United States Patent Application Publication US 2007/0134655 A1 - sequence listing, part 10

SEQ ID NO: 361399 - RNA, 32 nt, Human
ccaacugacuggcccgggcaaugauuccccaa

SEQ ID NO: 361400 - RNA, 32 nt, Human
ccaacugagcuuuucaggucucaggcacagca

SEQ ID NO: 361401 - RNA, 32 nt, Human
ccaacugaguccaaacuuuucuaaugucuguc

SEQ ID NO: 361402 - RNA, 32 nt, Human
ccaacugcaaacaagcucgccuaucugucauc

SEQ ID NO: 361403 - RNA, 32 nt, Human
ccaacugcaccagcacugccucccccagggau

SEQ ID NO: 361404 - RNA, 22 nt, Human
ccaacugcacucccugcugcug

SEQ ID NO: 361405 - RNA, 32 nt, Human
ccaacugcagugaucuaggcacuuccuccagc

SEQ ID NO: 361406 - RNA, 32 nt, Human
ccaacugccaaggcagggcagagcagacaagg

SEQ ID NO: 361407 - RNA, 32 nt, Human
ccaacugcccccguggucgccugguggcugga

SEQ ID NO: 361408 - RNA, 21 nt, Human
ccaacugcuccccccacccca

SEQ ID NO: 361409 - RNA, 32 nt, Human
ccaacugcucugccccuagcuccaggggccug

SEQ ID NO: 361410 - RNA, 21 nt, Human
ccaacugcuguccccaaggaa

SEQ ID NO: 361411 - RNA, 32 nt, Human
ccaacuggacaacgugugggauggaccuggaa

SEQ ID NO: 361412 - RNA, 24 nt, Human
ccaacuggaccuucuuguacucca

SEQ ID NO: 361413 - RNA, 32 nt, Human
ccaacuggagggugccuggcucuuugaagaaa

SEQ ID NO: 361414 - RNA, 32 nt, Human
ccaacuggcaagucgugcuaacccgaagaccc

SEQ ID NO: 361415 - RNA, 32 nt, Human
ccaacuggcaccaaggaauugccuccagccug

SEQ ID NO: 361416 - RNA, 19 nt, Human
ccaacuggcaucugugaug

SEQ ID NO: 361417 - RNA, 32 nt, Human
ccaacuggggaagagauggcagaggguccccc

SEQ ID NO: 361418 - RNA, 18 nt, Human
ccaacuggggccugcaua

SEQ ID NO: 361419 - RNA, 32 nt, Human
ccaacugucaucugagaaaccaacacauuuuu

SEQ ID NO: 361420 - RNA, 23 nt, Human
ccaacugucgccugguugggccc

SEQ ID NO: 361421 - RNA, 32 nt, Human
ccaacugugcaggugcuggggagugggaggcu

SEQ ID NO: 361422 - RNA, 32 nt, Human
ccaacuguguggcagaacgugcagugagggug

SEQ ID NO: 361423 - RNA, 23 nt, Human
ccaacuguguugcuccacccgga

SEQ ID NO: 361424 - RNA, 32 nt, Human
ccaacuguuucccugcugaaugccucgcuccc

SEQ ID NO: 361425 - RNA, 21 nt, Human
ccaacuuaagcagaacuugag

SEQ ID NO: 361426 - RNA, 32 nt, Human
ccaacuuaauaaacacauuucugggguuccuc

SEQ ID NO: 361427 - RNA, 32 nt, Human
ccaacuuaaucagauaaacagauuauguaaug

SEQ ID NO: 361428 - RNA, 32 nt, Human
ccaacuucacaccagccccaacccgcuuuggg

SEQ ID NO: 361429 - RNA, 32 nt, Human
ccaacuucauuagcuccagucuguggcuccug

SEQ ID NO: 361430 - RNA, 32 nt, Human
ccaacuucauuucugaaccuucacugcuucca

SEQ ID NO: 361431 - RNA, 24 nt, Human
ccaacuuccaauacaacagccauc

SEQ ID NO: 361432 - RNA, 32 nt, Human
ccaacuuccaaucauuccagcuagaagagcuu

SEQ ID NO: 361433 - RNA, 32 nt, Human
ccaacuuccgccuuaagaaaacaggaccagcc

SEQ ID NO: 361434 - RNA, 32 nt, Human
ccaacuuccucagucuuuucugccucaacuuc

SEQ ID NO: 361435 - RNA, 22 nt, Human
ccaacuuccuguugcuggcccc

SEQ ID NO: 361436 - RNA, 32 nt, Human
ccaacuucuagagacggcuuugcucauuacca

SEQ ID NO: 361437 - RNA, 32 nt, Human
ccaacuucucuugcuuucuaugcuguuuguag

SEQ ID NO: 361438 - RNA, 19 nt, Human
ccaacuucuggaagcauug

SEQ ID NO: 361439 - RNA, 32 nt, Human
ccaacuugagggcccagagcaggaagcauuca

SEQ ID NO: 361440 - RNA, 32 nt, Human
ccaacuugauccuggcccugaggagucauugg

SEQ ID NO: 361441 - RNA, 31 nt, Human
ccaacuugcaacacaagacccuaggagggag

SEQ ID NO: 361442 - RNA, 32 nt, Human
ccaacuuggaacccgacgugccagggcccagu

SEQ ID NO: 361443 - RNA, 32 nt, Human
ccaacuuggagugcucuggucauuugcaucug

SEQ ID NO: 361444 - RNA, 27 nt, Human
ccaacuugggcaacagacagagcgaga

SEQ ID NO: 361445 - RNA, 32 nt, Human
ccaacuugggcaacagacagagcgagacucug

SEQ ID NO: 361446 - RNA, 32 nt, Human
ccaacuugggcaacauagcaagaccccaucuc

SEQ ID NO: 361447 - RNA, 23 nt, Human
ccaacuugggcaacauggugaaa

SEQ ID NO: 361448 - RNA, 32 nt, Human
ccaacuugggcaacauggugaaacacugucuc

SEQ ID NO: 361449 - RNA, 20 nt, Human
ccaacuuggugaaaccccgu

SEQ ID NO: 361450 - RNA, 19 nt, Human
ccaacuugguugcugggga

SEQ ID NO: 361451 - RNA, 32 nt, Human
ccaacuuguagcuuuuuaucccuuacccuacc

SEQ ID NO: 361452 - RNA, 32 nt, Human
ccaacuugucuuccuuucucucuucccuuccc

SEQ ID NO: 361453 - RNA, 24 nt, Human
ccaacuuguuuccuccccucaaag

SEQ ID NO: 361454 - RNA, 32 nt, Human
ccaacuuugagacuuugcaggcugccaggugc

SEQ ID NO: 361455 - RNA, 32 nt, Human
ccaacuuugcugucuguucuuccaaauguuua

SEQ ID NO: 361456 - RNA, 19 nt, Human
ccaacuuuugcauuuccca

SEQ ID NO: 361457 - RNA, 32 nt, Human
ccaacuuuugccagaaagcagaaaaaugcucu

SEQ ID NO: 361458 - RNA, 32 nt, Human
ccaagaaaaacacucaucacacacagagaaga

SEQ ID NO: 361459 - RNA, 32 nt, Human
ccaagaaaaagcuuucucagccuucaaagacc

SEQ ID NO: 361460 - RNA, 32 nt, Human
ccaagaaaaaggaaaagaaagagugccaccaa

SEQ ID NO: 361461 - RNA, 22 nt, Human
ccaagaaaaccaggaguugcuu

SEQ ID NO: 361462 - RNA, 32 nt, Human
ccaagaaaaccuggcauauuuccuaaaacagu

SEQ ID NO: 361463 - RNA, 20 nt, Human
ccaagaaaagagauccacau

SEQ ID NO: 361464 - RNA, 32 nt, Human
ccaagaaaagaggccaaagcaagagcagauuc

SEQ ID NO: 361465 - RNA, 20 nt, Human
ccaagaaaauuuuuccucuu

SEQ ID NO: 361466 - RNA, 32 nt, Human
ccaagaaacaccuaacaccacaccucaaaugg

SEQ ID NO: 361467 - RNA, 32 nt, Human
ccaagaaacaucugguacagcugccaaacauc

SEQ ID NO: 361468 - RNA, 32 nt, Human
ccaagaaagacauuuuuaugugauaaaugcag

SEQ ID NO: 361469 - RNA, 32 nt, Human
ccaagaaagaggaggagaguugaaaagagagg

SEQ ID NO: 361470 - RNA, 32 nt, Human
ccaagaaagcagcuggguucagaaggccgggu

SEQ ID NO: 361471 - RNA, 32 nt, Human
ccaagaaagccaagugugagggcugaaagaau

SEQ ID NO: 361472 - RNA, 32 nt, Human
ccaagaaagggaagggaaaggacuaacgccaa

SEQ ID NO: 361473 - RNA, 32 nt, Human
ccaagaaagggaggggaaggaaugagcuaaaa

SEQ ID NO: 361474 - RNA, 32 nt, Human
ccaagaaagggaguggaggugcagcgaaggac

SEQ ID NO: 361475 - RNA, 32 nt, Human
ccaagaaagugaugauucuggaaaaggaacgc

SEQ ID NO: 361476 - RNA, 32 nt, Human
ccaagaaaugucccagcugagggccuuugucc

SEQ ID NO: 361477 - RNA, 32 nt, Human
ccaagaaauguucuauggaaguuuacguuuua

SEQ ID NO: 361478 - RNA, 32 nt, Human
ccaagaaauuuucccuguuuggaaaguuugcc

SEQ ID NO: 361479 - RNA, 32 nt, Human
ccaagaacaaaggcuuucugaaucuucucagg

SEQ ID NO: 361480 - RNA, 32 nt, Human
ccaagaacaccguggaugcugaagggaagaga

SEQ ID NO: 361481 - RNA, 32 nt, Human
ccaagaacagcauuucuguccugaaugaaagu

SEQ ID NO: 361482 - RNA, 32 nt, Human
ccaagaacaggccuggcccaaggugccacccc

SEQ ID NO: 361483 - RNA, 27 nt, Human
ccaagaaccaauaaauuucuguugaau

SEQ ID NO: 361484 - RNA, 19 nt, Human
ccaagaaccacuuccaugc

SEQ ID NO: 361485 - RNA, 32 nt, Human
ccaagaacgugagaguugaagcucccaacauc

SEQ ID NO: 361486 - RNA, 32 nt, Human
ccaagaacuccagcuuccccacugccucugug

SEQ ID NO: 361487 - RNA, 32 nt, Human
ccaagaacucuguucuucacuacuucucaaca

SEQ ID NO: 361488 - RNA, 32 nt, Human
ccaagaacugggagguggacguggcggcccag

SEQ ID NO: 361489 - RNA, 22 nt, Human
ccaagaagaaagcaccaagaca

SEQ ID NO: 361490 - RNA, 32 nt, Human
ccaagaagaaagugugagaaguugaugggcag

SEQ ID NO: 361491 - RNA, 25 nt, Human
ccaagaagagaggccucaccagaca

SEQ ID NO: 361492 - RNA, 32 nt, Human
ccaagaagagcagcaaagcugaaguagcagca

SEQ ID NO: 361493 - RNA, 32 nt, Human
ccaagaagaugaugagacagaggcagagccau

SEQ ID NO: 361494 - RNA, 18 nt, Human
ccaagaagcagaaucuca

SEQ ID NO: 361495 - RNA, 18 nt, Human
ccaagaagcccucugcag

SEQ ID NO: 361496 - RNA, 22 nt, Human
ccaagaagcugggauuacaggc

SEQ ID NO: 361497 - RNA, 32 nt, Human
ccaagaaggaagcaguagcugagcaccugccc

SEQ ID NO: 361498 - RNA, 32 nt, Human
ccaagaaggagaaaguugaggaccgcugacag

SEQ ID NO: 361499 - RNA, 32 nt, Human
ccaagaaggaggaggaggagagaaaggcggcu

SEQ ID NO: 361500 - RNA, 32 nt, Human
ccaagaaggcaggagcuggagcuguucuugcc

SEQ ID NO: 361501 - RNA, 32 nt, Human
ccaagaagggagcacagggcaaggaggagcug

SEQ ID NO: 361502 - RNA, 32 nt, Human
ccaagaagucuguccaaccccaaaaggcucuu

SEQ ID NO: 361503 - RNA, 32 nt, Human
ccaagaagucuugggauuggauuuuaccauau

SEQ ID NO: 361504 - RNA, 23 nt, Human
ccaagaaugcugagguuacaggc

SEQ ID NO: 361505 - RNA, 22 nt, Human
ccaagaauuauaccucucccuu

SEQ ID NO: 361506 - RNA, 32 nt, Human
ccaagaauuugagcguagccugggcaacacag

SEQ ID NO: 361507 - RNA, 24 nt, Human
ccaagacaagcagaucacuugagg

SEQ ID NO: 361508 - RNA, 28 nt, Human
ccaagacaaguacuaccccucaccauca

SEQ ID NO: 361509 - RNA, 32 nt, Human
ccaagacacagcagaacagaaaguucaacugc

SEQ ID NO: 361510 - RNA, 32 nt, Human
ccaagacacuguucuucaagagaaagaccaga

SEQ ID NO: 361511 - RNA, 32 nt, Human
ccaagacagaacucccagccuguguaaucuau

SEQ ID NO: 361512 - RNA, 20 nt, Human
ccaagacagcagucuuccuu

SEQ ID NO: 361513 - RNA, 32 nt, Human
ccaagacaggaaccuugucucuguugaagagc

SEQ ID NO: 361514 - RNA, 23 nt, Human
ccaagacaggaggaucacuugag

SEQ ID NO: 361515 - RNA, 24 nt, Human
ccaagacaggaggaucacuugagg

SEQ ID NO: 361516 - RNA, 32 nt, Human
ccaagacaggcagaucacaaggucaggaguuc

SEQ ID NO: 361517 - RNA, 24 nt, Human
ccaagacagguggaucaccugagg

SEQ ID NO: 361518 - RNA, 32 nt, Human
ccaagacagguggaucaccugagguuaggggu

SEQ ID NO: 361519 - RNA, 24 nt, Human
ccaagacagguggaucacuugagg

SEQ ID NO: 361520 - RNA, 23 nt, Human
ccaagacagguggaucucuugag

SEQ ID NO: 361521 - RNA, 32 nt, Human
ccaagacaguaucagacacagccccagaaggg

SEQ ID NO: 361522 - RNA, 21 nt, Human
ccaagacaugaaaagcugcca

SEQ ID NO: 361523 - RNA, 32 nt, Human
ccaagacaugggcuuuugucucucauagcaca

SEQ ID NO: 361524 - RNA, 32 nt, Human
ccaagacauggggacuuugcagugagcaaugg

SEQ ID NO: 361525 - RNA, 24 nt, Human
ccaagaccaauagaucacuugagg

SEQ ID NO: 361526 - RNA, 32 nt, Human
ccaagaccacccuggccaacauggugaagucc

SEQ ID NO: 361527 - RNA, 32 nt, Human
ccaagaccagacucgccaacauggugaaaccg

SEQ ID NO: 361528 - RNA, 32 nt, Human
ccaagaccagccuggccaacauggugaaaccc

SEQ ID NO: 361529 - RNA, 32 nt, Human
ccaagaccagccuggccaacauggugaaaucc

SEQ ID NO: 361530 - RNA, 32 nt, Human
ccaagaccagccuggccaagauggugaaaccc

SEQ ID NO: 361531 - RNA, 32 nt, Human
ccaagaccagccuggccaauguggugaaacuc

SEQ ID NO: 361532 - RNA, 32 nt, Human
ccaagaccagccugggcaacauggcaaaacac

SEQ ID NO: 361533 - RNA, 32 nt, Human
ccaagaccaugaucacauaugcagccucaaau

SEQ ID NO: 361534 - RNA, 32 nt, Human
ccaagaccaugucccggaacucaucggucacc

SEQ ID NO: 361535 - RNA, 32 nt, Human
ccaagacccagaguccagcuuagagaauagag

SEQ ID NO: 361536 - RNA, 32 nt, Human
ccaagacccccguuggugacugaagaugacac

SEQ ID NO: 361537 - RNA, 22 nt, Human
ccaagacccuaucuccucccca

SEQ ID NO: 361538 - RNA, 22 nt, Human
ccaagacccucugugcucccca

SEQ ID NO: 361539 - RNA, 32 nt, Human
ccaagaccucaucugccugcagcgucacaccg

SEQ ID NO: 361540 - RNA, 32 nt, Human
ccaagaccucaucugccugcagugucaaaucg

SEQ ID NO: 361541 - RNA, 32 nt, Human
ccaagaccugcaggaugucugggccuggagaa

SEQ ID NO: 361542 - RNA, 21 nt, Human
ccaagaccuggaucucccuuu

SEQ ID NO: 361543 - RNA, 22 nt, Human
ccaagacgagggccucauugau

SEQ ID NO: 361544 - RNA, 32 nt, Human
ccaagacgccauugcaccccagccugggcaau

SEQ ID NO: 361545 - RNA, 30 nt, Human
ccaagacgccgaauaucaaaaucuucagcg

SEQ ID NO: 361546 - RNA, 32 nt, Human
ccaagacgggcggaucaccugaggugaggagu

SEQ ID NO: 361547 - RNA, 32 nt, Human
ccaagacggguggaucacuugaggucaggagu

SEQ ID NO: 361548 - RNA, 24 nt, Human
ccaagacuauggguaacagggcau

SEQ ID NO: 361549 - RNA, 32 nt, Human
ccaagacucaggcuggggccaagagccgaccc

SEQ ID NO: 361550 - RNA, 32 nt, Human
ccaagacucuuguugccuuucuuccaagccau

SEQ ID NO: 361551 - RNA, 18 nt, Human
ccaagacugaccaugccc

SEQ ID NO: 361552 - RNA, 32 nt, Human
ccaagacugaggaugugacugacauuccugga

SEQ ID NO: 361553 - RNA, 32 nt, Human
ccaagacugcaucuagaaucgcucaaacaccu

SEQ ID NO: 361554 - RNA, 23 nt, Human
ccaagacuuauacccaggaugau

SEQ ID NO: 361555 - RNA, 22 nt, Human
ccaagacuucauugucccucuu

SEQ ID NO: 361556 - RNA, 32 nt, Human
ccaagacuuccauagaccaucuggaccaguag

SEQ ID NO: 361557 - RNA, 32 nt, Human
ccaagagaaacaagguuggauaagcgcuuccu

SEQ ID NO: 361558 - RNA, 32 nt, Human
ccaagagaacaaccaucuucacacaacaaccu

SEQ ID NO: 361559 - RNA, 32 nt, Human
ccaagagaauacaggugggcuccccagggugc

SEQ ID NO: 361560 - RNA, 32 nt, Human
ccaagagacccaaggcuccagauggaacacug

SEQ ID NO: 361561 - RNA, 32 nt, Human
ccaagagaccccuguccugucccuucaccagu

SEQ ID NO: 361562 - RNA, 32 nt, Human
ccaagagagcacgcauccuaaugagaacggag

SEQ ID NO: 361563 - RNA, 32 nt, Human
ccaagagaggaagcagagggaggcggaagcgu

SEQ ID NO: 361564 - RNA, 32 nt, Human
ccaagagaggagcagacaaggagaagguggug

SEQ ID NO: 361565 - RNA, 32 nt, Human
ccaagagagguuagggaauuugcucaaggucg

SEQ ID NO: 361566 - RNA, 32 nt, Human
ccaagagaguauuaugagggaggccgaggacu

SEQ ID NO: 361567 - RNA, 32 nt, Human
ccaagagauaacacauuccacgcacagugaug

SEQ ID NO: 361568 - RNA, 32 nt, Human
ccaagagauccaucaagacaaugggaauggcc

SEQ ID NO: 361569 - RNA, 32 nt, Human
ccaagagaugaaggaaaggagugaaagggaag

SEQ ID NO: 361570 - RNA, 19 nt, Human
ccaagagaugacacuggag

SEQ ID NO: 361571 - RNA, 32 nt, Human
ccaagagaugugagccaguuuucccagccugu

SEQ ID NO: 361572 - RNA, 32 nt, Human
ccaagagcaaacaaaccccaaagcuagcagaa

SEQ ID NO: 361573 - RNA, 32 nt, Human
ccaagagcaccaggcugugcuuggguccuugc

SEQ ID NO: 361574 - RNA, 32 nt, Human
ccaagagcacuuauugacccuuccucaggccu

SEQ ID NO: 361575 - RNA, 19 nt, Human
ccaagagcagacagaggag

SEQ ID NO: 361576 - RNA, 32 nt, Human
ccaagagcagcacaugcaaucaacuggaauaa

SEQ ID NO: 361577 - RNA, 32 nt, Human
ccaagagcaggaagagguugcuggagcaagag

SEQ ID NO: 361578 - RNA, 32 nt, Human
ccaagagcauuuguagucuggugacaaccccc

SEQ ID NO: 361579 - RNA, 32 nt, Human
ccaagagccacagggcggccucuccccaacca

SEQ ID NO: 361580 - RNA, 23 nt, Human
ccaagagccaggagcccagggcu

SEQ ID NO: 361581 - RNA, 23 nt, Human
ccaagagccccagccacacugug

SEQ ID NO: 361582 - RNA, 32 nt, Human
ccaagagccccauagacacagcagguucacuc

SEQ ID NO: 361583 - RNA, 32 nt, Human
ccaagagcccucuugcagaaagcugcccggcu

SEQ ID NO: 361584 - RNA, 32 nt, Human
ccaagagccugcguaucguggaaagggagagu

SEQ ID NO: 361585 - RNA, 21 nt, Human
ccaagagcucgaaggggccau

SEQ ID NO: 361586 - RNA, 32 nt, Human
ccaagaggacccggaaguaaucacauaggaaa

SEQ ID NO: 361587 - RNA, 23 nt, Human
ccaagaggaggcggcugcggguc

SEQ ID NO: 361588 - RNA, 32 nt, Human
ccaagaggauucauccugggagagggggcaag

SEQ ID NO: 361589 - RNA, 32 nt, Human
ccaagaggcagaagagcagagcagucgggggc

SEQ ID NO: 361590 - RNA, 24 nt, Human
ccaagaggcagaggaugcaaugag

SEQ ID NO: 361591 - RNA, 24 nt, Human
ccaagaggcagaggucgcagugag

SEQ ID NO: 361592 - RNA, 20 nt, Human
ccaagaggcagagguugcag

SEQ ID NO: 361593 - RNA, 24 nt, Human
ccaagaggcagagguuguaaugag

SEQ ID NO: 361594 - RNA, 24 nt, Human
ccaagaggcagaguuugcagugag

SEQ ID NO: 361595 - RNA, 24 nt, Human
ccaagaggcggagacugcagugag

SEQ ID NO: 361596 - RNA, 24 nt, Human
ccaagaggcggagguuguggugag

SEQ ID NO: 361597 - RNA, 32 nt, Human
ccaagaggcugacagagaggaagcagugcauu

SEQ ID NO: 361598 - RNA, 32 nt, Human
ccaagaggcugcagccaggccacuggccccug

SEQ ID NO: 361599 - RNA, 32 nt, Human
ccaagagggaaagccagaguucccuguucuag

SEQ ID NO: 361600 - RNA, 24 nt, Human
ccaagagguagagguugcagugag

SEQ ID NO: 361601 - RNA, 25 nt, Human
ccaagagguccaaggcugcagugag

SEQ ID NO: 361602 - RNA, 24 nt, Human
ccaagaggucgaggcugcagugag

SEQ ID NO: 361603 - RNA, 23 nt, Human
ccaagaggucuuucacugauaca

SEQ ID NO: 361604 - RNA, 32 nt, Human
ccaagaggugagugauugauguaucuuaaauc

SEQ ID NO: 361605 - RNA, 32 nt, Human
ccaagaggugccucauuagaacagaagacucu

SEQ ID NO: 361606 - RNA, 24 nt, Human
ccaagagguggagguuacagugag

SEQ ID NO: 361607 - RNA, 24 nt, Human
ccaagagguggagguugcggugag

SEQ ID NO: 361608 - RNA, 32 nt, Human
ccaagagguggauagcuggagcugucagucaa

SEQ ID NO: 361609 - RNA, 24 nt, Human
ccaagagguugaggcugcagugag

SEQ ID NO: 361610 - RNA, 32 nt, Human
ccaagaguaccaggacucaguguuucauauga

SEQ ID NO: 361611 - RNA, 32 nt, Human
ccaagaguccacccuucccagcucagcucagu

SEQ ID NO: 361612 - RNA, 32 nt, Human
ccaagaguggcagccuuuagggaaaauggagc

SEQ ID NO: 361613 - RNA, 32 nt, Human
ccaagaguucuuuaggugccuccugucuuaug

SEQ ID NO: 361614 - RNA, 32 nt, Human
ccaagaguugaaaugcuggcuucagaaucaua

SEQ ID NO: 361615 - RNA, 32 nt, Human
ccaagaguuugagaccagccuaggugacaaag

SEQ ID NO: 361616 - RNA, 24 nt, Human
ccaagaguuugagccugcggugag

SEQ ID NO: 361617 - RNA, 32 nt, Human
ccaagauaaccagccaugccaguaagccggcc

SEQ ID NO: 361618 - RNA, 32 nt, Human
ccaagauacgcugaagugugggaaaugcagau

SEQ ID NO: 361619 - RNA, 32 nt, Human
ccaagauauaaagcaagucauuuggaaccugc

SEQ ID NO: 361620 - RNA, 32 nt, Human
ccaagauauagagaggagaggagugaagaaaa

SEQ ID NO: 361621 - RNA, 22 nt, Human
ccaagauauccuuccugaggca

SEQ ID NO: 361622 - RNA, 32 nt, Human
ccaagaucacauaccagagucuggagcugagc

SEQ ID NO: 361623 - RNA, 32 nt, Human
ccaagaucaccccauacuccagccucuuuccu

SEQ ID NO: 361624 - RNA, 32 nt, Human
ccaagaucagccuggccaacaugucgaagugc

SEQ ID NO: 361625 - RNA, 32 nt, Human
ccaagauccagccugggcgacagagccagacu

SEQ ID NO: 361626 - RNA, 32 nt, Human
ccaagaucgcccacugcacuccagguugggcu

SEQ ID NO: 361627 - RNA, 32 nt, Human
ccaagaucuaacugucaaaugcuuuaggggaa

SEQ ID NO: 361628 - RNA, 32 nt, Human
ccaagaucuaccugcggggcaaauggucuggc

SEQ ID NO: 361629 - RNA, 32 nt, Human
ccaagaucuuuuugccccaucuccuagagaaa

SEQ ID NO: 361630 - RNA, 32 nt, Human
ccaagaugacccucacccaggucuccaccugg

SEQ ID NO: 361631 - RNA, 32 nt, Human
ccaagaugagcagaaggaagagagcagggaag

SEQ ID NO: 361632 - RNA, 32 nt, Human
ccaagaugagccccaguguucuugccuccuac

SEQ ID NO: 361633 - RNA, 30 nt, Human
ccaagaugagugccuugggagcugucauug

SEQ ID NO: 361634 - RNA, 32 nt, Human
ccaagaugaugaagccccaucuguacuaaaaa

SEQ ID NO: 361635 - RNA, 32 nt, Human
ccaagaugcaccacugcaccccagccugggcg

SEQ ID NO: 361636 - RNA, 32 nt, Human
ccaagaugcacugcaccccagccugggcgaca

SEQ ID NO: 361637 - RNA, 32 nt, Human
ccaagauggaguuuugcucugucacccaggcu

SEQ ID NO: 361638 - RNA, 31 nt, Human
ccaagauggcacuucuuuuuauuucuugucc

SEQ ID NO: 361639 - RNA, 29 nt, Human
ccaagauggcugcuguauccccaagaauc

SEQ ID NO: 361640 - RNA, 32 nt, Human
ccaagauggcuggaucaccugaggucaggcgu

SEQ ID NO: 361641 - RNA, 23 nt, Human
ccaagaugggcaaaucacuugag

SEQ ID NO: 361642 - RNA, 23 nt, Human
ccaagaugggcagaucgccugag

SEQ ID NO: 361643 - RNA, 32 nt, Human
ccaagaugggcggaucaccugaggucaggagu

SEQ ID NO: 361644 - RNA, 24 nt, Human
ccaagaugggcggauugcuugagg

SEQ ID NO: 361645 - RNA, 32 nt, Human
ccaagaugggcggauugcuugaggucaggagu

SEQ ID NO: 361646 - RNA, 24 nt, Human
ccaagauggguggaucaccugagg

SEQ ID NO: 361647 - RNA, 32 nt, Human
ccaagauggguggaucaccugaggucaggagu

SEQ ID NO: 361648 - RNA, 24 nt, Human
ccaagauggguggauuaccugagg

SEQ ID NO: 361649 - RNA, 20 nt, Human
ccaagauggugaaaccccgu

SEQ ID NO: 361650 - RNA, 20 nt, Human
ccaagauggugaaacccugu

SEQ ID NO: 361651 - RNA, 20 nt, Human
ccaagauggugaaaucccgu

SEQ ID NO: 361652 - RNA, 32 nt, Human
ccaagauguccccagaggggauauuguaucuc

SEQ ID NO: 361653 - RNA, 32 nt, Human
ccaagauguucuggacaacauccagcuacuuc

SEQ ID NO: 361654 - RNA, 32 nt, Human
ccaagauucucccauuauccccuguugucucc

SEQ ID NO: 361655 - RNA, 32 nt, Human
ccaagauucucccauuuaaaaugccacagacc

SEQ ID NO: 361656 - RNA, 32 nt, Human
ccaagauugcacacugcacuccagccugggug

SEQ ID NO: 361657 - RNA, 32 nt, Human
ccaagauugcacccugcacucuagccugggca

SEQ ID NO: 361658 - RNA, 21 nt, Human
ccaagauugcacuacugcacu

SEQ ID NO: 361659 - RNA, 32 nt, Human
ccaagauugcacuugugagaaggccugacagg

SEQ ID NO: 361660 - RNA, 21 nt, Human
ccaagauugcgccacugcacu

SEQ ID NO: 361661 - RNA, 23 nt, Human
ccaagauuggaaagccagcuuca

SEQ ID NO: 361662 - RNA, 32 nt, Human
ccaagauuucccaggcucaauacaguguaauu

SEQ ID NO: 361663 - RNA, 32 nt, Human
ccaagauuucugagagcuaaacacaggacuug

SEQ ID NO: 361664 - RNA, 32 nt, Human
ccaagcaaagagaagucucaguggagcaugag

SEQ ID NO: 361665 - RNA, 32 nt, Human
ccaagcaaagcuuccuguuuggaacacagaac

SEQ ID NO: 361666 - RNA, 32 nt, Human
ccaagcaaaggccagauagccugacagauagg

SEQ ID NO: 361667 - RNA, 32 nt, Human
ccaagcaagauggcggaggagccgcagucugu

SEQ ID NO: 361668 - RNA, 32 nt, Human
ccaagcaagcuugauggacaauggagugggau

SEQ ID NO: 361669 - RNA, 32 nt, Human
ccaagcaaggggaauggagcacuuuaagggcg

SEQ ID NO: 361670 - RNA, 32 nt, Human
ccaagcaaucccaaccuggugcuaggucauuu

SEQ ID NO: 361671 - RNA, 32 nt, Human
ccaagcaauccucccaccucagccucuggugu

SEQ ID NO: 361672 - RNA, 32 nt, Human
ccaagcacagccucugcuccuccuggagccgg

SEQ ID NO: 361673 - RNA, 23 nt, Human
ccaagcacagggccagcuguggg

SEQ ID NO: 361674 - RNA, 18 nt, Human
ccaagcacauacuuggua

SEQ ID NO: 361675 - RNA, 22 nt, Human
ccaagcacccccggccuggggg

SEQ ID NO: 361676 - RNA, 17 nt, Human
ccaagcaccucacacca

SEQ ID NO: 361677 - RNA, 17 nt, Human
ccaagcaccuccaacca

SEQ ID NO: 361678 - RNA, 32 nt, Human
ccaagcacuccugcgcugaaucgggccauugu

SEQ ID NO: 361679 - RNA, 32 nt, Human
ccaagcacugccucccuccugcucuguccagg

SEQ ID NO: 361680 - RNA, 32 nt, Human
ccaagcacuguacagaauacuuugugguuccu

SEQ ID NO: 361681 - RNA, 21 nt, Human
ccaagcacuuccugccgcggg

SEQ ID NO: 361682 - RNA, 32 nt, Human
ccaagcagacacaccugcccuccccagccagc

SEQ ID NO: 361683 - RNA, 25 nt, Human
ccaagcagacuccagccccuggacc

SEQ ID NO: 361684 - RNA, 32 nt, Human
ccaagcagaggugagaaggagaguggggcaca

SEQ ID NO: 361685 - RNA, 32 nt, Human
ccaagcagagguggagaaggggacacugaggu

SEQ ID NO: 361686 - RNA, 32 nt, Human
ccaagcagcagaaugagccaggaguagcagga

SEQ ID NO: 361687 - RNA, 32 nt, Human
ccaagcagcagcaacagcagccccaccgcccc

SEQ ID NO: 361688 - RNA, 19 nt, Human
ccaagcagcaguggcgguu

SEQ ID NO: 361689 - RNA, 31 nt, Human
ccaagcagcauucagcacaccccaagggaca

SEQ ID NO: 361690 - RNA, 23 nt, Human
ccaagcagcugagauuacaggug

SEQ ID NO: 361691 - RNA, 23 nt, Human
ccaagcagcugggauuacaggug

SEQ ID NO: 361692 - RNA, 17 nt, Human
ccaagcaggacauguug

SEQ ID NO: 361693 - RNA, 32 nt, Human
ccaagcagggauguggacauuuggauggugac

SEQ ID NO: 361694 - RNA, 32 nt, Human
ccaagcaggggagaggaaugaggggagcagcu

SEQ ID NO: 361695 - RNA, 22 nt, Human
ccaagcaggguucccccuuccc

SEQ ID NO: 361696 - RNA, 17 nt, Human
ccaagcagucccaugug

SEQ ID NO: 361697 - RNA, 32 nt, Human
ccaagcagugccugaggggccacccuaggacu

SEQ ID NO: 361698 - RNA, 32 nt, Human
ccaagcaguucuggggucccaaccugggugga

SEQ ID NO: 361699 - RNA, 24 nt, Human
ccaagcaguugggacuacaggcgu

SEQ ID NO: 361700 - RNA, 32 nt, Human
ccaagcauaaugacagagagaggcagauuuca

SEQ ID NO: 361701 - RNA, 32 nt, Human
ccaagcaucaaagccuuuggccuuucuccucc

SEQ ID NO: 361702 - RNA, 19 nt, Human
ccaagcaucacaccugcca

SEQ ID NO: 361703 - RNA, 32 nt, Human
ccaagcaucacaccugcgaugccugcacgagc

SEQ ID NO: 361704 - RNA, 32 nt, Human
ccaagcaugccacccguuaccggccagaaccu

SEQ ID NO: 361705 - RNA, 32 nt, Human
ccaagcaugguggcucacgccuguaaucccag

SEQ ID NO: 361706 - RNA, 32 nt, Human
ccaagcaugguggcucauguuuguaauccuag

SEQ ID NO: 361707 - RNA, 32 nt, Human
ccaagccaacagcaaagggaaaauuugggcca

SEQ ID NO: 361708 - RNA, 25 nt, Human
ccaagccaaggcaugucccugggcc

SEQ ID NO: 361709 - RNA, 32 nt, Human
ccaagccaauaaagggcugugaugaguggcug

SEQ ID NO: 361710 - RNA, 18 nt, Human
ccaagccacccugaagaa

SEQ ID NO: 361711 - RNA, 32 nt, Human
ccaagccaccuugcccgcagcccaggcuccug

SEQ ID NO: 361712 - RNA, 27 nt, Human
ccaagccacugcacuucggaggggcug

SEQ ID NO: 361713 - RNA, 32 nt, Human
ccaagccagagaaccgaagacccggccggccc

SEQ ID NO: 361714 - RNA, 22 nt, Human
ccaagccagagugcaguggugu

SEQ ID NO: 361715 - RNA, 32 nt, Human
ccaagccagcagaaacagccucagccuaccgc

SEQ ID NO: 361716 - RNA, 22 nt, Human
ccaagccagcgggaauggcagc

SEQ ID NO: 361717 - RNA, 32 nt, Human
ccaagccagggagggacgaggggcuggcucuc

SEQ ID NO: 361718 - RNA, 32 nt, Human
ccaagccauccccaccacccagccaugaugau

SEQ ID NO: 361719 - RNA, 32 nt, Human
ccaagccaugaccuacagccagcacucaaggg

SEQ ID NO: 361720 - RNA, 22 nt, Human
ccaagcccaccagcuuucagcg

SEQ ID NO: 361721 - RNA, 22 nt, Human
ccaagcccacccaccagccacu

SEQ ID NO: 361722 - RNA, 32 nt, Human
ccaagcccaccccuccucccaccaucaccucc

SEQ ID NO: 361723 - RNA, 32 nt, Human
ccaagcccagaggucacauaaagcuuuggacc

SEQ ID NO: 361724 - RNA, 32 nt, Human
ccaagcccagauggcagcaucuccccaucccg

SEQ ID NO: 361725 - RNA, 19 nt, Human
ccaagcccagcccugugcc

SEQ ID NO: 361726 - RNA, 22 nt, Human
ccaagcccagccuccccuugug

SEQ ID NO: 361727 - RNA, 23 nt, Human
ccaagcccagcgcaacaaaggaa

SEQ ID NO: 361728 - RNA, 18 nt, Human
ccaagcccagcuccccua

SEQ ID NO: 361729 - RNA, 32 nt, Human
ccaagcccaggaagucaagaaugcacugagcu

SEQ ID NO: 361730 - RNA, 32 nt, Human
ccaagcccaggaguuugaggcugcagugaguu

SEQ ID NO: 361731 - RNA, 32 nt, Human
ccaagcccagggagucugaaugugaguccaag

SEQ ID NO: 361732 - RNA, 21 nt, Human
ccaagcccauaucuguacacu

SEQ ID NO: 361733 - RNA, 19 nt, Human
ccaagcccaugugucccau

SEQ ID NO: 361734 - RNA, 32 nt, Human
ccaagcccauuguuucugucaugguuuccauc

SEQ ID NO: 361735 - RNA, 20 nt, Human
ccaagccccacccuggcccc

SEQ ID NO: 361736 - RNA, 32 nt, Human
ccaagccccacugaugauggcugagagggaag

SEQ ID NO: 361737 - RNA, 32 nt, Human
ccaagccccagccucagccugcgccugagcug

SEQ ID NO: 361738 - RNA, 32 nt, Human
ccaagccccaggaagaaaaugaugcagcucug

SEQ ID NO: 361739 - RNA, 32 nt, Human
ccaagccccaggagaugggcacugagaaagug

SEQ ID NO: 361740 - RNA, 23 nt, Human
ccaagccccaggagcugugccac

SEQ ID NO: 361741 - RNA, 17 nt, Human
ccaagcccccuccccug

SEQ ID NO: 361742 - RNA, 18 nt, Human
ccaagccccugcccaugu

SEQ ID NO: 361743 - RNA, 32 nt, Human
ccaagccccugccuccagccuuccugaguuuc

SEQ ID NO: 361744 - RNA, 32 nt, Human
ccaagccccuggcaaccacuaaucuacuuucu

SEQ ID NO: 361745 - RNA, 18 nt, Human
ccaagccccuuccuccau

SEQ ID NO: 361746 - RNA, 24 nt, Human
ccaagcccucacccagcccaugug

SEQ ID NO: 361747 - RNA, 18 nt, Human
ccaagcccugcaucccca

SEQ ID NO: 361748 - RNA, 32 nt, Human
ccaagcccugcauccccacaugcggggcagag

SEQ ID NO: 361749 - RNA, 17 nt, Human
ccaagcccuggacccau

SEQ ID NO: 361750 - RNA, 25 nt, Human
ccaagcccuggcccgucugugcacu

SEQ ID NO: 361751 - RNA, 20 nt, Human
ccaagcccugucuuaaggcc

SEQ ID NO: 361752 - RNA, 32 nt, Human
ccaagcccuuccgggcuggaacuggugucgga

SEQ ID NO: 361753 - RNA, 21 nt, Human
ccaagccgagggcaacuuugg

SEQ ID NO: 361754 - RNA, 22 nt, Human
ccaagccggagacccgcagcgc

SEQ ID NO: 361755 - RNA, 32 nt, Human
ccaagccuagagccaccagcccagcuuccuuc

SEQ ID NO: 361756 - RNA, 32 nt, Human
ccaagccuagcucaucuugcuguuguuguuag

SEQ ID NO: 361757 - RNA, 32 nt, Human
ccaagccucaguuucccuaucuguaaaaugga

SEQ ID NO: 361758 - RNA, 32 nt, Human
ccaagccuccaccacagcuuccugguuaacuu

SEQ ID NO: 361759 - RNA, 22 nt, Human
ccaagccuccccuccaccacug

SEQ ID NO: 361760 - RNA, 30 nt, Human
ccaagccuccucuccagguuccugcccugc

SEQ ID NO: 361761 - RNA, 32 nt, Human
ccaagccuccuggaugggggugggaggcccug

SEQ ID NO: 361762 - RNA, 21 nt, Human
ccaagccucucucucuggacc

SEQ ID NO: 361763 - RNA, 32 nt, Human
ccaagccucuggacugggggcucucuucagug

SEQ ID NO: 361764 - RNA, 32 nt, Human
ccaagccucugugcaccugcagucucuuucca

SEQ ID NO: 361765 - RNA, 32 nt, Human
ccaagccugcccaagcagucuacugauccagc

SEQ ID NO: 361766 - RNA, 32 nt, Human
ccaagccugccugccaggccucugcgccuggc

SEQ ID NO: 361767 - RNA, 32 nt, Human
ccaagccugccuggacggcuguucugugacuu

SEQ ID NO: 361768 - RNA, 32 nt, Human
ccaagccugcugucuugugaucacuuagcgaa

SEQ ID NO: 361769 - RNA, 32 nt, Human
ccaagccugcugugcuccuguggcagugaugg

SEQ ID NO: 361770 - RNA, 32 nt, Human
ccaagccuggcuaauuaaaaacaaauguuuaa

SEQ ID NO: 361771 - RNA, 32 nt, Human
ccaagccuggcucgagcacaggaagcucaucu

SEQ ID NO: 361772 - RNA, 32 nt, Human
ccaagccuggguaacaugcacaccucucaaac

SEQ ID NO: 361773 - RNA, 32 nt, Human
ccaagccugggucugugucucuggugugugug

SEQ ID NO: 361774 - RNA, 32 nt, Human
ccaagccuggguggcagaugaacagugcuucc

SEQ ID NO: 361775 - RNA, 32 nt, Human
ccaagccuguagucccagcuacucgggaggcu

SEQ ID NO: 361776 - RNA, 32 nt, Human
ccaagccuucccaguuaucauaaccuugaaug

SEQ ID NO: 361777 - RNA, 32 nt, Human
ccaagccuucuccaccuccucuucucuccucc

SEQ ID NO: 361778 - RNA, 32 nt, Human
ccaagccuugguggacaccacaccugcagcuc

SEQ ID NO: 361779 - RNA, 32 nt, Human
ccaagccuuuccagauggacuucugcagccca

SEQ ID NO: 361780 - RNA, 32 nt, Human
ccaagcgaacagcaaccuccugcuacccuccc

SEQ ID NO: 361781 - RNA, 32 nt, Human
ccaagcgacagagugaccagaaacccuuuuac

SEQ ID NO: 361782 - RNA, 21 nt, Human
ccaagcgaggacaacaggaag

SEQ ID NO: 361783 - RNA, 32 nt, Human
ccaagcgccccagcaggcacugugcugggcuu

SEQ ID NO: 361784 - RNA, 19 nt, Human
ccaagcgccgggcugcaga

SEQ ID NO: 361785 - RNA, 25 nt, Human
ccaagcgccuggaggacgggacaga

SEQ ID NO: 361786 - RNA, 23 nt, Human
ccaagcgcugagauuacaggugu

SEQ ID NO: 361787 - RNA, 32 nt, Human
ccaagcggaggaggagaaaaaggaauaagaag

SEQ ID NO: 361788 - RNA, 21 nt, Human
ccaagcgggggccacuugaga

SEQ ID NO: 361789 - RNA, 32 nt, Human
ccaagcggugucucucauccugacuggggauc

SEQ ID NO: 361790 - RNA, 32 nt, Human
ccaagcgugguggcucacgccuguaaucccag

SEQ ID NO: 361791 - RNA, 20 nt, Human
ccaagcguguggagcugggg

SEQ ID NO: 361792 - RNA, 32 nt, Human
ccaagcuacccucugaagaaauacucacugca

SEQ ID NO: 361793 - RNA, 32 nt, Human
ccaagcuaggagaggggagaagccgggggcug

SEQ ID NO: 361794 - RNA, 32 nt, Human
ccaagcucaaagauacugucuccugugugguc

SEQ ID NO: 361795 - RNA, 32 nt, Human
ccaagcucaaagcuggagugcaauggcgcaau

SEQ ID NO: 361796 - RNA, 32 nt, Human
ccaagcucaagcaauccuccugccucugccuc

SEQ ID NO: 361797 - RNA, 32 nt, Human
ccaagcucacacagcaggaacugagccagaaa

SEQ ID NO: 361798 - RNA, 23 nt, Human
ccaagcucaccagcccugcgcca

SEQ ID NO: 361799 - RNA, 32 nt, Human
ccaagcucaguuaaaucccccaccuccaacuu

SEQ ID NO: 361800 - RNA, 18 nt, Human
ccaagcucccaagaggcu

SEQ ID NO: 361801 - RNA, 32 nt, Human
ccaagcucccuccuaauuccccguuguugcag

SEQ ID NO: 361802 - RNA, 23 nt, Human
ccaagcucccugucacccagcca

SEQ ID NO: 361803 - RNA, 32 nt, Human
ccaagcuccgcaccccagaggaguguucugga

SEQ ID NO: 361804 - RNA, 32 nt, Human
ccaagcuccgggaggcugcaguggcggcagcu

SEQ ID NO: 361805 - RNA, 32 nt, Human
ccaagcucuaccccauccccaucccagaccug

SEQ ID NO: 361806 - RNA, 32 nt, Human
ccaagcucugagcucugcucccagggagcacg

SEQ ID NO: 361807 - RNA, 32 nt, Human
ccaagcucugcggcacccaaggguucccaggg

SEQ ID NO: 361808 - RNA, 21 nt, Human
ccaagcucugcucccuggauc

SEQ ID NO: 361809 - RNA, 32 nt, Human
ccaagcucugcuccucuccccagcaagugaga

SEQ ID NO: 361810 - RNA, 32 nt, Human
ccaagcucugcucuccuccucugugagcucug

SEQ ID NO: 361811 - RNA, 32 nt, Human
ccaagcucuucauugcugaccaugaagagacc

SEQ ID NO: 361812 - RNA, 32 nt, Human
ccaagcucuuggaagggguaacagugaaccgc

SEQ ID NO: 361813 - RNA, 32 nt, Human
ccaagcugaacaaccucuaccugcggcugcag

SEQ ID NO: 361814 - RNA, 18 nt, Human
ccaagcugaagcugcagg

SEQ ID NO: 361815 - RNA, 18 nt, Human
ccaagcugagccuggcca

SEQ ID NO: 361816 - RNA, 32 nt, Human
ccaagcugagccuggccaagcuagguggacag

SEQ ID NO: 361817 - RNA, 23 nt, Human
ccaagcugaugcauuccuacaga

SEQ ID NO: 361818 - RNA, 32 nt, Human
ccaagcugccaagccccugccuccagccuucc

SEQ ID NO: 361819 - RNA, 22 nt, Human
ccaagcugccccuuucccuccu

SEQ ID NO: 361820 - RNA, 32 nt, Human
ccaagcugcucuuuuaaaagucacuaaugacu

SEQ ID NO: 361821 - RNA, 32 nt, Human
ccaagcuggaccgcaaccacagcuuccgccac

SEQ ID NO: 361822 - RNA, 32 nt, Human
ccaagcuggaguacaaugacaggaucucggcu

SEQ ID NO: 361823 - RNA, 19 nt, Human
ccaagcuggagugcagugg

SEQ ID NO: 361824 - RNA, 32 nt, Human
ccaagcuggaucugaaauauguuccucccagg

SEQ ID NO: 361825 - RNA, 21 nt, Human
ccaagcuggccagcgccgacc

SEQ ID NO: 361826 - RNA, 22 nt, Human
ccaagcuggcccagccuggagc

SEQ ID NO: 361827 - RNA, 32 nt, Human
ccaagcuggccgagguugcaguccaugagcug

SEQ ID NO: 361828 - RNA, 21 nt, Human
ccaagcuggccggcccuagcc

SEQ ID NO: 361829 - RNA, 21 nt, Human
ccaagcuggccuuccugaacc

SEQ ID NO: 361830 - RNA, 18 nt, Human
ccaagcuggcuuuuccca

SEQ ID NO: 361831 - RNA, 22 nt, Human
ccaagcugggagcuccugggcc

SEQ ID NO: 361832 - RNA, 32 nt, Human
ccaagcugggcagcccuguccucuccacaaga

SEQ ID NO: 361833 - RNA, 32 nt, Human
ccaagcugguggcucugugugcucugauccga

SEQ ID NO: 361834 - RNA, 32 nt, Human
ccaagcugucuucagccuuccccagcuaaaga

SEQ ID NO: 361835 - RNA, 21 nt, Human
ccaagcugugcguucuggacc

SEQ ID NO: 361836 - RNA, 32 nt, Human
ccaagcuuaaggagaggagagcaucugcucug

SEQ ID NO: 361837 - RNA, 32 nt, Human
ccaagcuuagagcaagcugcccugccaaagga

SEQ ID NO: 361838 - RNA, 24 nt, Human
ccaagcuucauggagccgcggcgc

SEQ ID NO: 361839 - RNA, 23 nt, Human
ccaagcuucaugguuccuggacc

SEQ ID NO: 361840 - RNA, 32 nt, Human
ccaagcuuccaucaagucagggaguggagcaa

SEQ ID NO: 361841 - RNA, 32 nt, Human
ccaagcuugcaccacauucagcauuaaucacu

SEQ ID NO: 361842 - RNA, 19 nt, Human
ccaagcuugcuccgcgcca

SEQ ID NO: 361843 - RNA, 29 nt, Human
ccaagcuuggcugucucauccccaaggac

SEQ ID NO: 361844 - RNA, 32 nt, Human
ccaagcuuguuggcucaugccuauagucccag

SEQ ID NO: 361845 - RNA, 32 nt, Human
ccaaggaaaggaaggaaggaaggaaaaggagg

SEQ ID NO: 361846 - RNA, 32 nt, Human
ccaaggaaaggcuuuugucucuggccuuuuaa

SEQ ID NO: 361847 - RNA, 32 nt, Human
ccaaggaaccugacaaccauguguacaccagg

SEQ ID NO: 361848 - RNA, 32 nt, Human
ccaaggaaccuggagaccaucaucucauuucc

SEQ ID NO: 361849 - RNA, 32 nt, Human
ccaaggaacucuacuucagucaauaccauauc

SEQ ID NO: 361850 - RNA, 32 nt, Human
ccaaggaacugcugcccucccuuccuucuacu

SEQ ID NO: 361851 - RNA, 32 nt, Human
ccaaggaacugguuauguauguguguacaguu

SEQ ID NO: 361852 - RNA, 32 nt, Human
ccaaggaagaagggcggaaccagaaguagggc

SEQ ID NO: 361853 - RNA, 32 nt, Human
ccaaggaagaauuuccucugaagcaccggaac

SEQ ID NO: 361854 - RNA, 32 nt, Human
ccaaggaagacuuccuggaggaaauggccauu

SEQ ID NO: 361855 - RNA, 25 nt, Human
ccaaggaaggcagcggcagcuccac

SEQ ID NO: 361856 - RNA, 32 nt, Human
ccaaggaaggggccugguggugcuccacuugc

SEQ ID NO: 361857 - RNA, 32 nt, Human
ccaaggaauugccuccagccugaguccuaggc

SEQ ID NO: 361858 - RNA, 32 nt, Human
ccaaggacaaauggcagccacuguugaguacu

SEQ ID NO: 361859 - RNA, 32 nt, Human
ccaaggacaggagagacauggaguggcgcugg

SEQ ID NO: 361860 - RNA, 19 nt, Human
ccaaggacagggcuggcuc

SEQ ID NO: 361861 - RNA, 24 nt, Human
ccaaggacaguggaucaccugagg

SEQ ID NO: 361862 - RNA, 32 nt, Human
ccaaggacaguggaucaccugaggucaggggu

SEQ ID NO: 361863 - RNA, 32 nt, Human
ccaaggacauccugcagggcucuguagaugga

SEQ ID NO: 361864 - RNA, 32 nt, Human
ccaaggaccaaagaagguguguaagugaagug

SEQ ID NO: 361865 - RNA, 32 nt, Human
ccaaggaccaaaggaggggguggcaggggccu

SEQ ID NO: 361866 - RNA, 21 nt, Human
ccaaggaccaaauccuggagu

SEQ ID NO: 361867 - RNA, 32 nt, Human
ccaaggaccagcuggguccccuuugcuuucuu

SEQ ID NO: 361868 - RNA, 32 nt, Human
ccaaggacccagagagaaaggugagagugcag

SEQ ID NO: 361869 - RNA, 32 nt, Human
ccaaggacccuccaaggcuggcaguguggugu

SEQ ID NO: 361870 - RNA, 32 nt, Human
ccaaggaccgcagugaggaggaauguaccacu

SEQ ID NO: 361871 - RNA, 32 nt, Human
ccaaggaccguagaugccucucuagagcauga

SEQ ID NO: 361872 - RNA, 32 nt, Human
ccaaggacucaggcuaauuccuaaguugauca

SEQ ID NO: 361873 - RNA, 21 nt, Human
ccaaggacuggccugugcacu

SEQ ID NO: 361874 - RNA, 32 nt, Human
ccaaggacuugcucaaguggcagcgggcgggc

SEQ ID NO: 361875 - RNA, 22 nt, Human
ccaaggagacacccagacccuu

SEQ ID NO: 361876 - RNA, 32 nt, Human
ccaaggagaccccuccuggccugaugcccagc

SEQ ID NO: 361877 - RNA, 32 nt, Human
ccaaggagacuccgggcuugagcccaggccuc

SEQ ID NO: 361878 - RNA, 32 nt, Human
ccaaggagagccaccccugcuuucuggccauc

SEQ ID NO: 361879 - RNA, 32 nt, Human
ccaaggagaggacacagacacaguuguuugcu

SEQ ID NO: 361880 - RNA, 32 nt, Human
ccaaggagaguggaucaccugaggucgggagu

SEQ ID NO: 361881 - RNA, 32 nt, Human
ccaaggagauggaucacuugaggccaggaguu

SEQ ID NO: 361882 - RNA, 32 nt, Human
ccaaggagcagggagacaggaggcagagaaga

SEQ ID NO: 361883 - RNA, 32 nt, Human
ccaaggagcagggggcaggagauggaaaauug

SEQ ID NO: 361884 - RNA, 32 nt, Human
ccaaggagcauccuuggcagugggaauguucu

SEQ ID NO: 361885 - RNA, 32 nt, Human
ccaaggagccgggacccaggagagggcugcua

SEQ ID NO: 361886 - RNA, 32 nt, Human
ccaaggagcucaauaacuucaugauguaaauu

SEQ ID NO: 361887 - RNA, 22 nt, Human
ccaaggagcugggaugugccag

SEQ ID NO: 361888 - RNA, 22 nt, Human
ccaaggagcugggauuacaggc

SEQ ID NO: 361889 - RNA, 31 nt, Human
ccaaggaggagaccugaguugcugggaauuu

SEQ ID NO: 361890 - RNA, 32 nt, Human
ccaaggaggagggagagcggcgggaggggccg

SEQ ID NO: 361891 - RNA, 32 nt, Human
ccaaggaggagguggaggaggugcuggacucc

SEQ ID NO: 361892 - RNA, 32 nt, Human
ccaaggaggccgguauuacuguaaagcagaga

SEQ ID NO: 361893 - RNA, 32 nt, Human
ccaaggaggcugggaccucucucuucugcaau

SEQ ID NO: 361894 - RNA, 32 nt, Human
ccaaggaggcugugcacagcaggugugagaug

SEQ ID NO: 361895 - RNA, 32 nt, Human
ccaaggagggcaaaucaccugagaucaggagu

SEQ ID NO: 361896 - RNA, 32 nt, Human
ccaaggagggcagaucaccugaggucagcagu

SEQ ID NO: 361897 - RNA, 32 nt, Human
ccaaggaggggcuguaaaauggaggccauugu

SEQ ID NO: 361898 - RNA, 24 nt, Human
ccaaggaggguggaucaccugagg

SEQ ID NO: 361899 - RNA, 32 nt, Human
ccaaggaggguggaucaccugaggucaggagu

SEQ ID NO: 361900 - RNA, 24 nt, Human
ccaaggaggguggaucacuuaagg

SEQ ID NO: 361901 - RNA, 24 nt, Human
ccaaggaggguggaucacuugaga

SEQ ID NO: 361902 - RNA, 32 nt, Human
ccaaggaggguggaucacuugaggucaggagu

SEQ ID NO: 361903 - RNA, 32 nt, Human
ccaaggagguggagguugcagugagccgggau

SEQ ID NO: 361904 - RNA, 32 nt, Human
ccaaggagguggucagcuccccugggagcagu

SEQ ID NO: 361905 - RNA, 23 nt, Human
ccaaggaguccgggaggugccug

SEQ ID NO: 361906 - RNA, 32 nt, Human
ccaaggaguguggaauguccuugaguguauua

SEQ ID NO: 361907 - RNA, 32 nt, Human
ccaaggaguucuuguucucgaagaaccccagg

SEQ ID NO: 361908 - RNA, 32 nt, Human
ccaaggauauggggcaggaggcucccucugcu

SEQ ID NO: 361909 - RNA, 32 nt, Human
ccaaggaucagccuggaugccuagaggacuag

SEQ ID NO: 361910 - RNA, 32 nt, Human
ccaaggaucugaaguccauccccauaggugga

SEQ ID NO: 361911 - RNA, 32 nt, Human
ccaaggaugagcuggagcacagccugggggag

SEQ ID NO: 361912 - RNA, 32 nt, Human
ccaaggauggaugcagagggugaggcacccau

SEQ ID NO: 361913 - RNA, 32 nt, Human
ccaaggauggucuggaggacaaacaaaggagg

SEQ ID NO: 361914 - RNA, 32 nt, Human
ccaaggauguuuugaagggaagggaaguuuaa

SEQ ID NO: 361915 - RNA, 32 nt, Human
ccaaggauuuccucucagagcuguugcacaga

SEQ ID NO: 361916 - RNA, 32 nt, Human
ccaaggcaacacaguuuugccauaaagaaucc

SEQ ID NO: 361917 - RNA, 23 nt, Human
ccaaggcaagaggaucacuugag

SEQ ID NO: 361918 - RNA, 32 nt, Human
ccaaggcaagcagaucaccugaagucaggaga

SEQ ID NO: 361919 - RNA, 23 nt, Human
ccaaggcaaggggaucacuugag

SEQ ID NO: 361920 - RNA, 32 nt, Human
ccaaggcacacgugcccaugaccaucacugac

SEQ ID NO: 361921 - RNA, 32 nt, Human
ccaaggcacagcugugucgcacguuccgcccg

SEQ ID NO: 361922 - RNA, 32 nt, Human
ccaaggcacucagccuucuagugcaguagcau

SEQ ID NO: 361923 - RNA, 32 nt, Human
ccaaggcagaagcagcaggggauggcgugguc

SEQ ID NO: 361924 - RNA, 22 nt, Human
ccaaggcagaaggaucacuuga

SEQ ID NO: 361925 - RNA, 23 nt, Human
ccaaggcagaaggaucacuugag

SEQ ID NO: 361926 - RNA, 24 nt, Human
ccaaggcagaaggaucacuugaga

SEQ ID NO: 361927 - RNA, 32 nt, Human
ccaaggcagagucagagguuccacaggaggag

SEQ ID NO: 361928 - RNA, 24 nt, Human
ccaaggcagauggaacacuugagg

SEQ ID NO: 361929 - RNA, 32 nt, Human
ccaaggcagauggagaaaacuucgugaaaccc

SEQ ID NO: 361930 - RNA, 22 nt, Human
ccaaggcagauggaucaugagg

SEQ ID NO: 361931 - RNA, 32 nt, Human
ccaaggcagcaggcuggacucggugcagggac

SEQ ID NO: 361932 - RNA, 32 nt, Human
ccaaggcagccagaucaccugaggucagaagu

SEQ ID NO: 361933 - RNA, 32 nt, Human
ccaaggcagccccuuccuuccagccugggcuc

SEQ ID NO: 361934 - RNA, 32 nt, Human
ccaaggcagcgcuaaggaaggaggguagggac

SEQ ID NO: 361935 - RNA, 32 nt, Human
ccaaggcagcuuuccuuacccugacacagccc

SEQ ID NO: 361936 - RNA, 23 nt, Human
ccaaggcaggaagaucacuugag

SEQ ID NO: 361937 - RNA, 23 nt, Human
ccaaggcaggaggaucacuugag

SEQ ID NO: 361938 - RNA, 24 nt, Human
ccaaggcaggaggaucacuugagg

SEQ ID NO: 361939 - RNA, 32 nt, Human
ccaaggcaggaggaucgcuugaggucagaagu

SEQ ID NO: 361940 - RNA, 32 nt, Human
ccaaggcaggaggaucgcuugaggucaggagu

SEQ ID NO: 361941 - RNA, 32 nt, Human
ccaaggcaggcaaucacuugaggucaggaguu

SEQ ID NO: 361942 - RNA, 32 nt, Human
ccaaggcaggcacaucaccugaguucaggagu

SEQ ID NO: 361943 - RNA, 32 nt, Human
ccaaggcaggcagaucaccugaagucaggagu

SEQ ID NO: 361944 - RNA, 32 nt, Human
ccaaggcaggcagaucaccugaggccaggcug

SEQ ID NO: 361945 - RNA, 32 nt, Human
ccaaggcaggcagaucaccugaggucagagcu

SEQ ID NO: 361946 - RNA, 32 nt, Human
ccaaggcaggcagaucaccugaggucaggagu

SEQ ID NO: 361947 - RNA, 32 nt, Human
ccaaggcaggcagaucacgaggucaggagauu

SEQ ID NO: 361948 - RNA, 32 nt, Human
ccaaggcaggcagaucacgaggucaggaguuc

SEQ ID NO: 361949 - RNA, 24 nt, Human
ccaaggcaggcagaucacuuaagg

SEQ ID NO: 361950 - RNA, 24 nt, Human
ccaaggcaggcagaucacuugagg

SEQ ID NO: 361951 - RNA, 32 nt, Human
ccaaggcaggcagaucacuugaggucaggacu

SEQ ID NO: 361952 - RNA, 32 nt, Human
ccaaggcaggcagaucacuugaggucaggagu

SEQ ID NO: 361953 - RNA, 32 nt, Human
ccaaggcaggcagaucaucugaggucaugagu

SEQ ID NO: 361954 - RNA, 24 nt, Human
ccaaggcaggcagaucauuugaga

SEQ ID NO: 361955 - RNA, 24 nt, Human
ccaaggcaggcagaucauuugagg

SEQ ID NO: 361956 - RNA, 23 nt, Human
ccaaggcaggcagaucgcuugag

SEQ ID NO: 361957 - RNA, 28 nt, Human
ccaaggcaggcagguggaucaccugagg

SEQ ID NO: 361958 - RNA, 32 nt, Human
ccaaggcaggcagguggaucaccugaggucag

SEQ ID NO: 361959 - RNA, 25 nt, Human
ccaaggcaggcauaucaacuugagg

SEQ ID NO: 361960 - RNA, 23 nt, Human
ccaaggcaggcauaucacuugag

SEQ ID NO: 361961 - RNA, 32 nt, Human
ccaaggcaggcggaucaccugaggucaggaau

SEQ ID NO: 361962 - RNA, 32 nt, Human
ccaaggcaggcggaucaccugaggucaggagu

SEQ ID NO: 361963 - RNA, 32 nt, Human
ccaaggcaggcggaucaccugaggucgggagu

SEQ ID NO: 361964 - RNA, 32 nt, Human
ccaaggcaggcggaucaccugaggucuggagu

SEQ ID NO: 361965 - RNA, 32 nt, Human
ccaaggcaggcggaucaccugagguugggagu

SEQ ID NO: 361966 - RNA, 32 nt, Human
ccaaggcaggcggaucaucugaggucaggagu

SEQ ID NO: 361967 - RNA, 32 nt, Human
ccaaggcaggcugauugcuugaggucaggagu

SEQ ID NO: 361968 - RNA, 25 nt, Human
ccaaggcaggcuggaucaccugagg

SEQ ID NO: 361969 - RNA, 32 nt, Human
ccaaggcaggguggacagugugagagagcuag

SEQ ID NO: 361970 - RNA, 24 nt, Human
ccaaggcagguggaucaacugagg

SEQ ID NO: 361971 - RNA, 32 nt, Human
ccaaggcagguggaucaacugaggucaggagu

SEQ ID NO: 361972 - RNA, 18 nt, Human
ccaaggcagguggaucac

SEQ ID NO: 361973 - RNA, 23 nt, Human
ccaaggcagguggaucaccugag

SEQ ID NO: 361974 - RNA, 24 nt, Human
ccaaggcagguggaucaccugagg

SEQ ID NO: 361975 - RNA, 32 nt, Human
ccaaggcagguggaucaccugaggucaagagu

SEQ ID NO: 361976 - RNA, 32 nt, Human
ccaaggcagguggaucaccugaggucagaagu

SEQ ID NO: 361977 - RNA, 32 nt, Human
ccaaggcagguggaucaccugaggucaggagu

SEQ ID NO: 361978 - RNA, 32 nt, Human
ccaaggcagguggaucaccugagguuaggagu

SEQ ID NO: 361979 - RNA, 22 nt, Human
ccaaggcagguggaucacgagg

SEQ ID NO: 361980 - RNA, 24 nt, Human
ccaaggcagguggaucacuuaaga

SEQ ID NO: 361981 - RNA, 24 nt, Human
ccaaggcagguggaucacuugagg

SEQ ID NO: 361982 - RNA, 32 nt, Human
ccaaggcagguggaucacuugaggucaggagc

SEQ ID NO: 361983 - RNA, 22 nt, Human
ccaaggcagguggaucaugaga

SEQ ID NO: 361984 - RNA, 24 nt, Human
ccaaggcagguggaucauuugagg

SEQ ID NO: 361985 - RNA, 32 nt, Human
ccaaggcagguggaucauuugaggucaggagu

SEQ ID NO: 361986 - RNA, 23 nt, Human
ccaaggcagguggaucgcuugag

SEQ ID NO: 361987 - RNA, 24 nt, Human
ccaaggcagguggaucgcuugagg

SEQ ID NO: 361988 - RNA, 23 nt, Human
ccaaggcagguggauugcuugag

SEQ ID NO: 361989 - RNA, 24 nt, Human
ccaaggcagguggauugucugagg

SEQ ID NO: 361990 - RNA, 32 nt, Human
ccaaggcagguggauugucugaggucaggagu

SEQ ID NO: 361991 - RNA, 24 nt, Human
ccaaggcaggugggucaguugagg

SEQ ID NO: 361992 - RNA, 32 nt, Human
ccaaggcaggugggucaguugaggucaggagu

SEQ ID NO: 361993 - RNA, 23 nt, Human
ccaaggcagguggugacuugaga

SEQ ID NO: 361994 - RNA, 32 nt, Human
ccaaggcauggacccugacaccugccaacagc

SEQ ID NO: 361995 - RNA, 32 nt, Human
ccaaggccaagcagcccccugaggcagauucu

SEQ ID NO: 361996 - RNA, 32 nt, Human
ccaaggccaaguagcucgggagaacagggcaa

SEQ ID NO: 361997 - RNA, 32 nt, Human
ccaaggccaccugacuccuaucacgacgcacc

SEQ ID NO: 361998 - RNA, 32 nt, Human
ccaaggccacuucgucugaggaaggcucaacu

SEQ ID NO: 361999 - RNA, 32 nt, Human
ccaaggccagcccugguucccugcugcagcca

SEQ ID NO: 362000 - RNA, 24 nt, Human
ccaaggccagcggaucacuugagg

SEQ ID NO: 362001 - RNA, 32 nt, Human
ccaaggccagcggaucacuugaggucaggagu

SEQ ID NO: 362002 - RNA, 24 nt, Human
ccaaggccaggagagaagaaucca

SEQ ID NO: 362003 - RNA, 32 nt, Human
ccaaggccaggaguucaagaccagccuggcca

SEQ ID NO: 362004 - RNA, 32 nt, Human
ccaaggccagugcagccccagguucccgagcg

SEQ ID NO: 362005 - RNA, 32 nt, Human
ccaaggccauccaggagcccaccaagaggugc

SEQ ID NO: 362006 - RNA, 32 nt, Human
ccaaggccauggaaguggaggcugcagaggcc

SEQ ID NO: 362007 - RNA, 32 nt, Human
ccaaggcccaagcacuggaaagggaaauugcu

SEQ ID NO: 362008 - RNA, 32 nt, Human
ccaaggcccacuguccagcugcagaaauucgu

SEQ ID NO: 362009 - RNA, 32 nt, Human
ccaaggccccacacaaggaggucugcaggaca

SEQ ID NO: 362010 - RNA, 32 nt, Human
ccaaggccccaccccacccagaagcccaguag

SEQ ID NO: 362011 - RNA, 32 nt, Human
ccaaggcccccagcaggcucuccagucccagg

SEQ ID NO: 362012 - RNA, 32 nt, Human
ccaaggcccuccaggcaaugcacugggaaggg

SEQ ID NO: 362013 - RNA, 32 nt, Human
ccaaggcccucugugcccucagccagcccugu

SEQ ID NO: 362014 - RNA, 32 nt, Human
ccaaggcccugagccccaugcccagcccugcc

SEQ ID NO: 362015 - RNA, 32 nt, Human
ccaaggcccugaguaccucuugccuuguuugc

SEQ ID NO: 362016 - RNA, 22 nt, Human
ccaaggcccuggagcugcaggg

SEQ ID NO: 362017 - RNA, 32 nt, Human
ccaaggccgcccagggcagagagaggagacga

SEQ ID NO: 362018 - RNA, 23 nt, Human
ccaaggccgcugcuacugccgcc

SEQ ID NO: 362019 - RNA, 32 nt, Human
ccaaggccgguggaucaccugaggucaggagu

SEQ ID NO: 362020 - RNA, 32 nt, Human
ccaaggccucaauaacggaccuaggccuuauu

SEQ ID NO: 362021 - RNA, 22 nt, Human
ccaaggccucuuccuggacugc

SEQ ID NO: 362022 - RNA, 32 nt, Human
ccaaggcgagcagauuacuugaggucaggagu

SEQ ID NO: 362023 - RNA, 32 nt, Human
ccaaggcgaguggaucaccugaggucaggagu

SEQ ID NO: 362024 - RNA, 25 nt, Human
ccaaggcgcagcgggagcgcacagg

SEQ ID NO: 362025 - RNA, 24 nt, Human
ccaaggcggauggaucaccugagg

SEQ ID NO: 362026 - RNA, 32 nt, Human
ccaaggcggauggaucaccugaggucaggagc

SEQ ID NO: 362027 - RNA, 23 nt, Human
ccaaggcggauggaucacuugag

SEQ ID NO: 362028 - RNA, 24 nt, Human
ccaaggcgggaggaucacuugagg

SEQ ID NO: 362029 - RNA, 32 nt, Human
ccaaggcgggaggaucacuugaggucaggagu

SEQ ID NO: 362030 - RNA, 32 nt, Human
ccaaggcgggcaaaucaccugaggucaagagu

SEQ ID NO: 362031 - RNA, 32 nt, Human
ccaaggcgggcagaucaccugaggucaagagu

SEQ ID NO: 362032 - RNA, 32 nt, Human
ccaaggcgggcagaucaccugaggucaauagu

SEQ ID NO: 362033 - RNA, 32 nt, Human
ccaaggcgggcagaucaccugaggucaggagu

SEQ ID NO: 362034 - RNA, 32 nt, Human
ccaaggcgggcagaucaccugaggucggcagu

SEQ ID NO: 362035 - RNA, 32 nt, Human
ccaaggcgggcagaucaccugagguuaggagu

SEQ ID NO: 362036 - RNA, 24 nt, Human
ccaaggcgggcagaucacuugagg

SEQ ID NO: 362037 - RNA, 32 nt, Human
ccaaggcgggcagaucacuugaggucaggagu

SEQ ID NO: 362038 - RNA, 32 nt, Human
ccaaggcgggcagaucauuugaggucaggagu

SEQ ID NO: 362039 - RNA, 23 nt, Human
ccaaggcgggcagaucgcuugag

SEQ ID NO: 362040 - RNA, 24 nt, Human
ccaaggcgggcagaugacuugagg

SEQ ID NO: 362041 - RNA, 32 nt, Human
ccaaggcgggcagaugacuugaggucaggagu

SEQ ID NO: 362042 - RNA, 32 nt, Human
ccaaggcgggcagauuaccugaggucaggaga

SEQ ID NO: 362043 - RNA, 32 nt, Human
ccaaggcgggcagcucaccugaggucaggcgu

SEQ ID NO: 362044 - RNA, 32 nt, Human
ccaaggcgggcggauaaccugaggucaggggu

SEQ ID NO: 362045 - RNA, 32 nt, Human
ccaaggcgggcggaucaccugaggucaggagu

SEQ ID NO: 362046 - RNA, 28 nt, Human
ccaaggcgggcggaucacgaagucggga

SEQ ID NO: 362047 - RNA, 24 nt, Human
ccaaggcgggcggaucacuugagg

SEQ ID NO: 362048 - RNA, 32 nt, Human
ccaaggcgggcggaucacuugaggucaggagu

SEQ ID NO: 362049 - RNA, 32 nt, Human
ccaaggcgggcguaucaccugaggucaggagu

SEQ ID NO: 362050 - RNA, 32 nt, Human
ccaaggcggguagaucacuugaggucaggagu

SEQ ID NO: 362051 - RNA, 32 nt, Human
ccaaggcgggucaaucaccugaggucaggagu

SEQ ID NO: 362052 - RNA, 24 nt, Human
ccaaggcgggucgauuacuugagg

SEQ ID NO: 362053 - RNA, 32 nt, Human
ccaaggcgggucgauuacuugaggucaggagu

SEQ ID NO: 362054 - RNA, 32 nt, Human
ccaaggcgggugaaucaccugaggucaggagu

SEQ ID NO: 362055 - RNA, 32 nt, Human
ccaaggcgggugcaucaccugaggucgggagu

SEQ ID NO: 362056 - RNA, 32 nt, Human
ccaaggcggguggaacacuugaggucaggagu

SEQ ID NO: 362057 - RNA, 24 nt, Human
ccaaggcggguggauaaccugagg

SEQ ID NO: 362058 - RNA, 23 nt, Human
ccaaggcggguggauacccugag

SEQ ID NO: 362059 - RNA, 32 nt, Human
ccaaggcggguggaucaauugaggucaggagu

SEQ ID NO: 362060 - RNA, 18 nt, Human
ccaaggcggguggaucac

SEQ ID NO: 362061 - RNA, 24 nt, Human
ccaaggcggguggaucacccgagg

SEQ ID NO: 362062 - RNA, 22 nt, Human
ccaaggcggguggaucaccuga

SEQ ID NO: 362063 - RNA, 32 nt, Human
ccaaggcggguggaucaccugacaucaggagu

SEQ ID NO: 362064 - RNA, 32 nt, Human
ccaaggcggguggaucaccugagaucaggagu

SEQ ID NO: 362065 - RNA, 24 nt, Human
ccaaggcggguggaucaccugagg

SEQ ID NO: 362066 - RNA, 32 nt, Human
ccaaggcggguggaucaccugaggccaggaag

SEQ ID NO: 362067 - RNA, 32 nt, Human
ccaaggcggguggaucaccugaggucacgagu

SEQ ID NO: 362068 - RNA, 32 nt, Human
ccaaggcggguggaucaccugaggucaggagu

SEQ ID NO: 362069 - RNA, 22 nt, Human
ccaaggcggguggaucacgagg

SEQ ID NO: 362070 - RNA, 24 nt, Human
ccaaggcggguggaucacuugagg

SEQ ID NO: 362071 - RNA, 32 nt, Human
ccaaggcggguggaucacuugaggucaggagu

SEQ ID NO: 362072 - RNA, 22 nt, Human
ccaaggcggguggaucauuuga

SEQ ID NO: 362073 - RNA, 22 nt, Human
ccaaggcggguggauuacgagg

SEQ ID NO: 362074 - RNA, 24 nt, Human
ccaaggcggguggauugcuugagg

SEQ ID NO: 362075 - RNA, 24 nt, Human
ccaaggcggguggcucacuugagg

SEQ ID NO: 362076 - RNA, 22 nt, Human
ccaaggcgggugggucacauga

SEQ ID NO: 362077 - RNA, 24 nt, Human
ccaaggcguguggaucaccugagg

SEQ ID NO: 362078 - RNA, 32 nt, Human
ccaaggcguguggaucaccugaggucaggagu

SEQ ID NO: 362079 - RNA, 32 nt, Human
ccaaggcuaauugguggugggaaaguggacag

SEQ ID NO: 362080 - RNA, 32 nt, Human
ccaaggcucacugcagcgcgcuccugaccccu

SEQ ID NO: 362081 - RNA, 18 nt, Human
ccaaggcucagaaagguu

SEQ ID NO: 362082 - RNA, 23 nt, Human
ccaaggcucaggaaaaacugggg

SEQ ID NO: 362083 - RNA, 32 nt, Human
ccaaggcuccaaaggcugaggucuccccaguu

SEQ ID NO: 362084 - RNA, 22 nt, Human
ccaaggcuccaauaaacgugcu

SEQ ID NO: 362085 - RNA, 32 nt, Human
ccaaggcuccggcucccaggccuguguccuac

SEQ ID NO: 362086 - RNA, 20 nt, Human
ccaaggcuccuccaacaugc

SEQ ID NO: 362087 - RNA, 26 nt, Human
ccaaggcucuacugggucccuggacc

SEQ ID NO: 362088 - RNA, 32 nt, Human
ccaaggcucuacugggucccuggaccuaaccc

SEQ ID NO: 362089 - RNA, 32 nt, Human
ccaaggcucuucuccuuggaggacagugggaa

SEQ ID NO: 362090 - RNA, 20 nt, Human
ccaaggcuggaaugcagugg

SEQ ID NO: 362091 - RNA, 32 nt, Human
ccaaggcuggacuggguuggcugcaguguggu

SEQ ID NO: 362092 - RNA, 19 nt, Human
ccaaggcuggagugcaggg

SEQ ID NO: 362093 - RNA, 20 nt, Human
ccaaggcuggagugcagugg

SEQ ID NO: 362094 - RNA, 22 nt, Human
ccaaggcuggcagaucacuuga

SEQ ID NO: 362095 - RNA, 24 nt, Human
ccaaggcuggcagaucacuugagg

SEQ ID NO: 362096 - RNA, 32 nt, Human
ccaaggcugggaacagaggggauguggugaga

SEQ ID NO: 362097 - RNA, 32 nt, Human
ccaaggcugggggaagaagcucucuccucccu

SEQ ID NO: 362098 - RNA, 24 nt, Human
ccaaggcugguggaucaccugagg

SEQ ID NO: 362099 - RNA, 32 nt, Human
ccaaggcugguggaucaccugaggucaggagu

SEQ ID NO: 362100 - RNA, 32 nt, Human
ccaaggcugugcacguccccugugcugauucu

SEQ ID NO: 362101 - RNA, 32 nt, Human
ccaaggcugugccuguauuaaggcuuuuccgu

SEQ ID NO: 362102 - RNA, 32 nt, Human
ccaaggcuguucucaccagcugccucagauga

SEQ ID NO: 362103 - RNA, 21 nt, Human
ccaaggcuuccuccacccugc

SEQ ID NO: 362104 - RNA, 21 nt, Human
ccaaggcuucuccaauucugc

SEQ ID NO: 362105 - RNA, 24 nt, Human
ccaaggcuucuucauuggugcugu

SEQ ID NO: 362106 - RNA, 32 nt, Human
ccaaggcuuuacugcugauagugcuaauuggc

SEQ ID NO: 362107 - RNA, 32 nt, Human
ccaaggcuuucccaucuuggggccuuugccca

SEQ ID NO: 362108 - RNA, 32 nt, Human
ccaagggaagcuggguccugcccaccaagguc

SEQ ID NO: 362109 - RNA, 32 nt, Human
ccaagggagccggcucagaggggccggcgcgc

SEQ ID NO: 362110 - RNA, 32 nt, Human
ccaagggaggaagcagagggaggcagaagcgu

SEQ ID NO: 362111 - RNA, 32 nt, Human
ccaagggaggaucgcgaggggagccaggggag

SEQ ID NO: 362112 - RNA, 32 nt, Human
ccaagggaggcggaucaccugaggucaggagu

SEQ ID NO: 362113 - RNA, 32 nt, Human
ccaagggaggcuuggcggcuguggaggcgagu

SEQ ID NO: 362114 - RNA, 32 nt, Human
ccaagggaggggagcagccuaguuggucuugg

SEQ ID NO: 362115 - RNA, 23 nt, Human
ccaagggaguggaucaccugagg

SEQ ID NO: 362116 - RNA, 32 nt, Human
ccaagggaugucagggcagcucugugcaucug

SEQ ID NO: 362117 - RNA, 32 nt, Human
ccaagggcaagugcuagaguugcagugaauuu

SEQ ID NO: 362118 - RNA, 22 nt, Human
ccaagggcagagccugugcccu

SEQ ID NO: 362119 - RNA, 22 nt, Human
ccaagggcagaggauguaauga

SEQ ID NO: 362120 - RNA, 32 nt, Human
ccaagggcaucuccagccucaggccggcaggu

SEQ ID NO: 362121 - RNA, 18 nt, Human
ccaagggccacggcuggg

SEQ ID NO: 362122 - RNA, 32 nt, Human
ccaagggccacuggucucccugggcuugcagu

SEQ ID NO: 362123 - RNA, 32 nt, Human
ccaagggccauggggaagauggagcaaaccua

SEQ ID NO: 362124 - RNA, 32 nt, Human
ccaagggccggcuccguugagggaagggagcc

SEQ ID NO: 362125 - RNA, 32 nt, Human
ccaagggccuguccccauccugacuuaaaggc

SEQ ID NO: 362126 - RNA, 32 nt, Human
ccaagggcgguggcucacgccuguaaucccag

SEQ ID NO: 362127 - RNA, 32 nt, Human
ccaagggcuccagggccagggugugagggaug

SEQ ID NO: 362128 - RNA, 18 nt, Human
ccaagggcucugcuccag

SEQ ID NO: 362129 - RNA, 32 nt, Human
ccaagggcucuuucuuauuauggcagggagug

SEQ ID NO: 362130 - RNA, 32 nt, Human
ccaagggcugggacugggaagggacgcgacgc

SEQ ID NO: 362131 - RNA, 32 nt, Human
ccaagggcuguggcugaugaugguaaauaaga

SEQ ID NO: 362132 - RNA, 32 nt, Human
ccaagggcuucugcacccuccacccugucccc

SEQ ID NO: 362133 - RNA, 32 nt, Human
ccaaggggaagguggagcaagaaaugaaaagg

SEQ ID NO: 362134 - RNA, 22 nt, Human
ccaaggggagugaccccugcca

SEQ ID NO: 362135 - RNA, 32 nt, Human
ccaaggggagugagaugaggugggcuugaaag

SEQ ID NO: 362136 - RNA, 22 nt, Human
ccaaggggagugggaacgacag

SEQ ID NO: 362137 - RNA, 17 nt, Human
ccaaggggccucuccau

SEQ ID NO: 362138 - RNA, 30 nt, Human
ccaaggggccucuccaugccuucuuaggaa

SEQ ID NO: 362139 - RNA, 32 nt, Human
ccaaggggcgccaggagcagagccagggccug

SEQ ID NO: 362140 - RNA, 32 nt, Human
ccaaggggcugcaggagacuccagggcaggga

SEQ ID NO: 362141 - RNA, 32 nt, Human
ccaaggggcuggggcaggagacagaucagggc

SEQ ID NO: 362142 - RNA, 32 nt, Human
ccaagggggacugaggcaggagagagagcagc

SEQ ID NO: 362143 - RNA, 32 nt, Human
ccaagggggcagaucacuucaggucgggaguu

SEQ ID NO: 362144 - RNA, 32 nt, Human
ccaagggggcggguaucacaaccccgacgcca

SEQ ID NO: 362145 - RNA, 32 nt, Human
ccaaggggguuauuuaaacugucaguucccaa

SEQ ID NO: 362146 - RNA, 32 nt, Human
ccaaggggugaguggacguguuggaagagaga

SEQ ID NO: 362147 - RNA, 24 nt, Human
ccaagggguggggguugcagugag

SEQ ID NO: 362148 - RNA, 32 nt, Human
ccaagggguuuaauaaauaacccuugaaaacu

SEQ ID NO: 362149 - RNA, 32 nt, Human
ccaaggguaaagggauggggcagaggcauaaa

SEQ ID NO: 362150 - RNA, 32 nt, Human
ccaagggugggacuaggcggcucugccccuag

SEQ ID NO: 362151 - RNA, 32 nt, Human
ccaaggguguagaaaaggcaucaacacucugg

SEQ ID NO: 362152 - RNA, 32 nt, Human
ccaaggguucucucuccugcuugcgcuuagug

SEQ ID NO: 362153 - RNA, 32 nt, Human
ccaagguaaaauauaucccacauugagaucau

SEQ ID NO: 362154 - RNA, 23 nt, Human
ccaagguagaagaaucacuugag

SEQ ID NO: 362155 - RNA, 23 nt, Human
ccaagguaggaggaucacuugag

SEQ ID NO: 362156 - RNA, 32 nt, Human
ccaagguaggcagaucaccugaggucaggagu

SEQ ID NO: 362157 - RNA, 32 nt, Human
ccaaggucacaggcacagaaccuuuccccugc

SEQ ID NO: 362158 - RNA, 32 nt, Human
ccaaggucagcagaucaccugaggucaggagu

SEQ ID NO: 362159 - RNA, 32 nt, Human
ccaaggucagcccugaggccagggugaaaggu

SEQ ID NO: 362160 - RNA, 32 nt, Human
ccaaggucaggaguucaagaccagccuggcca

SEQ ID NO: 362161 - RNA, 32 nt, Human
ccaaggucaggaguuugagaccagccuggcca

SEQ ID NO: 362162 - RNA, 32 nt, Human
ccaaggucagggacuggucacagggagggcuc

SEQ ID NO: 362163 - RNA, 32 nt, Human
ccaaggucaucaccagcccuguuugcaucccc

SEQ ID NO: 362164 - RNA, 18 nt, Human
ccaagguccauccauucu

SEQ ID NO: 362165 - RNA, 32 nt, Human
ccaaggucccucaggcugguugugaaaucagu

SEQ ID NO: 362166 - RNA, 32 nt, Human
ccaaggucgcacagcuagugguggagcuggag

SEQ ID NO: 362167 - RNA, 32 nt, Human
ccaaggucgcucauggucacucccugcgcccc

SEQ ID NO: 362168 - RNA, 22 nt, Human
ccaaggucugaccuaggguucc

SEQ ID NO: 362169 - RNA, 32 nt, Human
ccaaggugacacuggguccaggagcucccugg

SEQ ID NO: 362170 - RNA, 24 nt, Human
ccaaggugagcaagucacuugagg

SEQ ID NO: 362171 - RNA, 32 nt, Human
ccaaggugagcggaucaccugaagucagggau

SEQ ID NO: 362172 - RNA, 32 nt, Human
ccaaggugaguggaucaccugaggucagaagu

SEQ ID NO: 362173 - RNA, 32 nt, Human
ccaaggugcagaaugguuuggaaaguagcugu

SEQ ID NO: 362174 - RNA, 32 nt, Human
ccaaggugcccucuccccggggaccuuagggu

SEQ ID NO: 362175 - RNA, 32 nt, Human
ccaaggugccugugcucccagcagguccaagu

SEQ ID NO: 362176 - RNA, 22 nt, Human
ccaaggugcuaggauuacaggc

SEQ ID NO: 362177 - RNA, 32 nt, Human
ccaaggugcugauguccaugauugugaugaug

SEQ ID NO: 362178 - RNA, 26 nt, Human
ccaaggugcugcuggucuccuggacc

SEQ ID NO: 362179 - RNA, 24 nt, Human
ccaaggugcuggaauuacaggcgu

SEQ ID NO: 362180 - RNA, 24 nt, Human
ccaaggugcuggaauuacaggugu

SEQ ID NO: 362181 - RNA, 21 nt, Human
ccaaggugcuggauuacaggc

SEQ ID NO: 362182 - RNA, 24 nt, Human
ccaaggugcugggacuacaggcgu

SEQ ID NO: 362183 - RNA, 24 nt, Human
ccaaggugcugggauuacaagcgu

SEQ ID NO: 362184 - RNA, 21 nt, Human
ccaaggugcugggauuacagg

SEQ ID NO: 362185 - RNA, 22 nt, Human
ccaaggugcugggauuacaggc

SEQ ID NO: 362186 - RNA, 24 nt, Human
ccaaggugcugggauuacaggugu

SEQ ID NO: 362187 - RNA, 32 nt, Human
ccaaggugcugggauuacaggugugcugcaca

SEQ ID NO: 362188 - RNA, 24 nt, Human
ccaaggugcugggauuauaggcgu

SEQ ID NO: 362189 - RNA, 24 nt, Human
ccaaggugcugggauugcagacgu

SEQ ID NO: 362190 - RNA, 24 nt, Human
ccaaggugcugggauugcaggcgu

SEQ ID NO: 362191 - RNA, 23 nt, Human
ccaagguggaaggaucacuuaga

SEQ ID NO: 362192 - RNA, 24 nt, Human
ccaagguggacaggucacuuaagg

SEQ ID NO: 362193 - RNA, 21 nt, Human
ccaagguggagaagaaucacg

SEQ ID NO: 362194 - RNA, 32 nt, Human
ccaagguggagaagaaucacgaaaaggagaag

SEQ ID NO: 362195 - RNA, 32 nt, Human
ccaagguggauagaucacuugaggucaugagu

SEQ ID NO: 362196 - RNA, 32 nt, Human
ccaagguggauggaucucuugaggucaggagu

SEQ ID NO: 362197 - RNA, 31 nt, Human
ccaagguggaugggccccaugccaaggaaua

SEQ ID NO: 362198 - RNA, 22 nt, Human
ccaagguggcagagguugcagu

SEQ ID NO: 362199 - RNA, 24 nt, Human
ccaagguggcagagguugcaguaa

SEQ ID NO: 362200 - RNA, 32 nt, Human
ccaagguggccaacagcuuccuggcugccauc

SEQ ID NO: 362201 - RNA, 32 nt, Human
ccaagguggcuagguacacucccccacuuccc

SEQ ID NO: 362202 - RNA, 23 nt, Human
ccaaggugggaagaucacuugag

SEQ ID NO: 362203 - RNA, 32 nt, Human
ccaaggugggaggaccaccugaggucaagagu

SEQ ID NO: 362204 - RNA, 24 nt, Human
ccaaggugggaggaucaccugagg

SEQ ID NO: 362205 - RNA, 32 nt, Human
ccaaggugggaggaucaccugaggucaggagu

SEQ ID NO: 362206 - RNA, 32 nt, Human
ccaaggugggaggaucaccugaugucgggagu

SEQ ID NO: 362207 - RNA, 23 nt, Human
ccaaggugggaggaucacucgag

SEQ ID NO: 362208 - RNA, 23 nt, Human
ccaaggugggaggaucacugaga

SEQ ID NO: 362209 - RNA, 22 nt, Human
ccaaggugggaggaucacuuga

SEQ ID NO: 362210 - RNA, 23 nt, Human
ccaaggugggaggaucacuugag

SEQ ID NO: 362211 - RNA, 24 nt, Human
ccaaggugggaggaucacuugagg

SEQ ID NO: 362212 - RNA, 24 nt, Human
ccaaggugggaggaucgcuugaga

SEQ ID NO: 362213 - RNA, 24 nt, Human
ccaaggugggaggauuacuugaga

SEQ ID NO: 362214 - RNA, 32 nt, Human
ccaaggugggaggcagcugacaacaccaccca

SEQ ID NO: 362215 - RNA, 32 nt, Human
ccaaggugggagggaagaucgauugagcccag

SEQ ID NO: 362216 - RNA, 32 nt, Human
ccaaggugggcaaaucaccugaggucaggagu

SEQ ID NO: 362217 - RNA, 24 nt, Human
ccaaggugggcaaggacgagcucu

SEQ ID NO: 362218 - RNA, 23 nt, Human
ccaaggugggcaaucauuugagg

SEQ ID NO: 362219 - RNA, 24 nt, Human
ccaaggugggcacaucacuuaagg

SEQ ID NO: 362220 - RNA, 24 nt, Human
ccaaggugggcagaucaccugagg

SEQ ID NO: 362221 - RNA, 32 nt, Human
ccaaggugggcagaucaccugaggucaggagu

SEQ ID NO: 362222 - RNA, 22 nt, Human
ccaaggugggcagaucacgagg

SEQ ID NO: 362223 - RNA, 24 nt, Human
ccaaggugggcagaucacuggagg

SEQ ID NO: 362224 - RNA, 24 nt, Human
ccaaggugggcagaucacuugagg

SEQ ID NO: 362225 - RNA, 32 nt, Human
ccaaggugggcagaucacuugaggucaggagu

SEQ ID NO: 362226 - RNA, 22 nt, Human
ccaaggugggcagaucaggagg

SEQ ID NO: 362227 - RNA, 22 nt, Human
ccaaggugggcagaucaugagg

SEQ ID NO: 362228 - RNA, 24 nt, Human
ccaaggugggcagaucgccugagg

SEQ ID NO: 362229 - RNA, 32 nt, Human
ccaaggugggcagaucgccugaggucuggagu

SEQ ID NO: 362230 - RNA, 23 nt, Human
ccaaggugggcagaucgcuugag

SEQ ID NO: 362231 - RNA, 19 nt, Human
ccaaggugggcagaucuca

SEQ ID NO: 362232 - RNA, 24 nt, Human
ccaaggugggcagaucuuuuaagg

SEQ ID NO: 362233 - RNA, 24 nt, Human
ccaaggugggcagaugacuugagg

SEQ ID NO: 362234 - RNA, 32 nt, Human
ccaaggugggcagaugacuugaggucaggggu

SEQ ID NO: 362235 - RNA, 23 nt, Human
ccaaggugggcagauugccugag

SEQ ID NO: 362236 - RNA, 24 nt, Human
ccaaggugggcggauaaccugagg

SEQ ID NO: 362237 - RNA, 32 nt, Human
ccaaggugggcggauaaccugaggucaggagu

SEQ ID NO: 362238 - RNA, 24 nt, Human
ccaaggugggcggaucacccugag

SEQ ID NO: 362239 - RNA, 22 nt, Human
ccaaggugggcggaucaccuga

SEQ ID NO: 362240 - RNA, 23 nt, Human
ccaaggugggcggaucaccugag

SEQ ID NO: 362241 - RNA, 32 nt, Human
ccaaggugggcggaucaccugagaucgagagu

SEQ ID NO: 362242 - RNA, 32 nt, Human
ccaaggugggcggaucaccugagcucaggagu

SEQ ID NO: 362243 - RNA, 24 nt, Human
ccaaggugggcggaucaccugagg

SEQ ID NO: 362244 - RNA, 32 nt, Human
ccaaggugggcggaucaccugaggucaggagu

SEQ ID NO: 362245 - RNA, 32 nt, Human
ccaaggugggcggaucaccugaggucaguuca

SEQ ID NO: 362246 - RNA, 32 nt, Human
ccaaggugggcggaucaccugaggucgggagu

SEQ ID NO: 362247 - RNA, 32 nt, Human
ccaaggugggcggaucaccugagguuaggagu

SEQ ID NO: 362248 - RNA, 32 nt, Human
ccaaggugggcggaucaccugaugucaggggu

SEQ ID NO: 362249 - RNA, 22 nt, Human
ccaaggugggcggaucacgagg

SEQ ID NO: 362250 - RNA, 24 nt, Human
ccaaggugggcggaucacuugagg

SEQ ID NO: 362251 - RNA, 32 nt, Human
ccaaggugggcggaucacuugaggucaggaau

SEQ ID NO: 362252 - RNA, 32 nt, Human
ccaaggugggcggaucacuugaggucaggagu

SEQ ID NO: 362253 - RNA, 24 nt, Human
ccaaggugggcggaucaucugagg

SEQ ID NO: 362254 - RNA, 22 nt, Human
ccaaggugggcggaucaugagg

SEQ ID NO: 362255 - RNA, 24 nt, Human
ccaaggugggcggaucgccugagg

SEQ ID NO: 362256 - RNA, 32 nt, Human
ccaaggugggcggaucgccugaggucaggagu

SEQ ID NO: 362257 - RNA, 32 nt, Human
ccaaggugggcggaugaccugaggucaggagu

SEQ ID NO: 362258 - RNA, 23 nt, Human
ccaaggugggcggauugcuugag

SEQ ID NO: 362259 - RNA, 22 nt, Human
ccaaggugggcugugaccgaga

SEQ ID NO: 362260 - RNA, 32 nt, Human
ccaaggugggguggaagcuuggggaagaccca

SEQ ID NO: 362261 - RNA, 32 nt, Human
ccaagguggguaaaucacuugaggucaggagu

SEQ ID NO: 362262 - RNA, 22 nt, Human
ccaagguggguaaauuacuuga

SEQ ID NO: 362263 - RNA, 22 nt, Human
ccaagguggguagaucacgaga

SEQ ID NO: 362264 - RNA, 32 nt, Human
ccaagguggguagaucacuugaggucaggagu

SEQ ID NO: 362265 - RNA, 24 nt, Human
ccaagguggguagaucaucugagg

SEQ ID NO: 362266 - RNA, 32 nt, Human
ccaagguggguagaucaucugaggucaggaau

SEQ ID NO: 362267 - RNA, 23 nt, Human
ccaagguggguagaucauuucag

SEQ ID NO: 362268 - RNA, 24 nt, Human
ccaagguggguagaucauuugagg

SEQ ID NO: 362269 - RNA, 32 nt, Human
ccaagguggguagaucauuugaggucaggagc

SEQ ID NO: 362270 - RNA, 22 nt, Human
ccaaggugggugaaucaccuga

SEQ ID NO: 362271 - RNA, 32 nt, Human
ccaaggugggugaaucaccugaagucaggagu

SEQ ID NO: 362272 - RNA, 24 nt, Human
ccaaggugggugaauugcuugagg

SEQ ID NO: 362273 - RNA, 32 nt, Human
ccaaggugggugaauugcuugaggucaggaau

SEQ ID NO: 362274 - RNA, 32 nt, Human
ccaagguggguggaccacaugaggucaggagu

SEQ ID NO: 362275 - RNA, 24 nt, Human
ccaagguggguggaucaccugagg

SEQ ID NO: 362276 - RNA, 32 nt, Human
ccaagguggguggaucaccugagggcaggagu

SEQ ID NO: 362277 - RNA, 32 nt, Human
ccaagguggguggaucaccugaggucagaagu

SEQ ID NO: 362278 - RNA, 32 nt, Human
ccaagguggguggaucaccugaggucagcagu

SEQ ID NO: 362279 - RNA, 32 nt, Human
ccaagguggguggaucaccugaggucaggagc

SEQ ID NO: 362280 - RNA, 32 nt, Human
ccaagguggguggaucaccugaggucaggagu

SEQ ID NO: 362281 - RNA, 32 nt, Human
ccaagguggguggaucaccugaggucaggcgu

SEQ ID NO: 362282 - RNA, 32 nt, Human
ccaagguggguggaucaccugaggucaggggu

SEQ ID NO: 362283 - RNA, 32 nt, Human
ccaagguggguggaucaccuguggucaagagu

SEQ ID NO: 362284 - RNA, 22 nt, Human
ccaagguggguggaucacgagg

SEQ ID NO: 362285 - RNA, 22 nt, Human
ccaagguggguggaucacuuga

SEQ ID NO: 362286 - RNA, 23 nt, Human
ccaagguggguggaucacuugag

SEQ ID NO: 362287 - RNA, 24 nt, Human
ccaagguggguggaucacuugagg

SEQ ID NO: 362288 - RNA, 32 nt, Human
ccaagguggguggaucacuugaggucaggagu

SEQ ID NO: 362289 - RNA, 24 nt, Human
ccaagguggguggaucaucuaagg

SEQ ID NO: 362290 - RNA, 22 nt, Human
ccaaggugggugggucacuuga

SEQ ID NO: 362291 - RNA, 24 nt, Human
ccaaggugggugggucaucugagg

SEQ ID NO: 362292 - RNA, 32 nt, Human
ccaaggugggugggucaucugaggucaggagu

SEQ ID NO: 362293 - RNA, 22 nt, Human
ccaaggugugaacaugcccuga

SEQ ID NO: 362294 - RNA, 32 nt, Human
ccaaggugugggcgcaucuagggcaggucuug

SEQ ID NO: 362295 - RNA, 24 nt, Human
ccaagguguugggaccacaggcgu

SEQ ID NO: 362296 - RNA, 24 nt, Human
ccaagguguugggauuacagaugu

SEQ ID NO: 362297 - RNA, 22 nt, Human
ccaagguuaaggaugagcacag

SEQ ID NO: 362298 - RNA, 32 nt, Human
ccaagguuaggguguugaaggaagguagaggg

SEQ ID NO: 362299 - RNA, 32 nt, Human
ccaagguuaucuuggaacuaaaugacuuuucu

SEQ ID NO: 362300 - RNA, 32 nt, Human
ccaagguuauuuuauuuauuguaagcauuuug

SEQ ID NO: 362301 - RNA, 32 nt, Human
ccaagguugaccucagcuucggagccaccucu

SEQ ID NO: 362302 - RNA, 19 nt, Human
ccaagguugagaagaauca

SEQ ID NO: 362303 - RNA, 23 nt, Human
ccaagguuggaauuaacaggcgu

SEQ ID NO: 362304 - RNA, 32 nt, Human
ccaagguuggcagaucaccugaggucaggagu

SEQ ID NO: 362305 - RNA, 32 nt, Human
ccaagguuucaagugauccucccgccucagcc

SEQ ID NO: 362306 - RNA, 24 nt, Human
ccaagguuuuggaauuacaggugu

SEQ ID NO: 362307 - RNA, 32 nt, Human
ccaaguaaccaccacuucugccuuagauaaua

SEQ ID NO: 362308 - RNA, 23 nt, Human
ccaaguaacuaggacuacaggca

SEQ ID NO: 362309 - RNA, 22 nt, Human
ccaaguaacugggauuacaggc

SEQ ID NO: 362310 - RNA, 32 nt, Human
ccaaguacagcaugggcaucacgagccugcug

SEQ ID NO: 362311 - RNA, 32 nt, Human
ccaaguacaugcagugcacagaagagcaaguc

SEQ ID NO: 362312 - RNA, 18 nt, Human
ccaaguaccugcucacca

SEQ ID NO: 362313 - RNA, 24 nt, Human
ccaaguaccugggacuacaggcgu

SEQ ID NO: 362314 - RNA, 23 nt, Human
ccaaguaccugggacuacaggug

SEQ ID NO: 362315 - RNA, 24 nt, Human
ccaaguaccugggacuacaggugu

SEQ ID NO: 362316 - RNA, 32 nt, Human
ccaaguacgaugggaugggauuccaaguaaac

SEQ ID NO: 362317 - RNA, 32 nt, Human
ccaaguagagcugaaaugggaaggaaccccug

SEQ ID NO: 362318 - RNA, 22 nt, Human
ccaaguagccaggauuacaggc

SEQ ID NO: 362319 - RNA, 22 nt, Human
ccaaguagccggaauuacaggc

SEQ ID NO: 362320 - RNA, 32 nt, Human
ccaaguagcuagcugggacuacaggcacgcac

SEQ ID NO: 362321 - RNA, 24 nt, Human
ccaaguagcuaggacuacaggcgu

SEQ ID NO: 362322 - RNA, 23 nt, Human
ccaaguagcuaggacuacaggug

SEQ ID NO: 362323 - RNA, 24 nt, Human
ccaaguagcugagacuacaggugu

SEQ ID NO: 362324 - RNA, 23 nt, Human
ccaaguagcugagauuacagacg

SEQ ID NO: 362325 - RNA, 22 nt, Human
ccaaguagcugagauuacaggc

SEQ ID NO: 362326 - RNA, 23 nt, Human
ccaaguagcugagauuacaggcg

SEQ ID NO: 362327 - RNA, 24 nt, Human
ccaaguagcugagauuacaggugu

SEQ ID NO: 362328 - RNA, 24 nt, Human
ccaaguagcuggaacuacaggugu

SEQ ID NO: 362329 - RNA, 21 nt, Human
ccaaguagcuggaauuacagg

SEQ ID NO: 362330 - RNA, 22 nt, Human
ccaaguagcuggaauuacaggc

SEQ ID NO: 362331 - RNA, 24 nt, Human
ccaaguagcuggaauuacaggcgu

SEQ ID NO: 362332 - RNA, 24 nt, Human
ccaaguagcugggaccacaggcgu

SEQ ID NO: 362333 - RNA, 23 nt, Human
ccaaguagcugggacuacaggcg

SEQ ID NO: 362334 - RNA, 24 nt, Human
ccaaguagcugggacuacaggcgu

SEQ ID NO: 362335 - RNA, 23 nt, Human
ccaaguagcugggacuacaggug

SEQ ID NO: 362336 - RNA, 24 nt, Human
ccaaguagcugggacuacaggugu

SEQ ID NO: 362337 - RNA, 23 nt, Human
ccaaguagcugggauaacaggcg

SEQ ID NO: 362338 - RNA, 24 nt, Human
ccaaguagcugggaucacaggcgu

SEQ ID NO: 362339 - RNA, 22 nt, Human
ccaaguagcugggauuaaaggc

SEQ ID NO: 362340 - RNA, 22 nt, Human
ccaaguagcugggauuaaggcg

SEQ ID NO: 362341 - RNA, 23 nt, Human
ccaaguagcugggauuacaagug

SEQ ID NO: 362342 - RNA, 20 nt, Human
ccaaguagcugggauuacag

SEQ ID NO: 362343 - RNA, 24 nt, Human
ccaaguagcugggauuacagaugu

SEQ ID NO: 362344 - RNA, 21 nt, Human
ccaaguagcugggauuacagg

SEQ ID NO: 362345 - RNA, 24 nt, Human
ccaaguagcugggauuacaggagu

SEQ ID NO: 362346 - RNA, 22 nt, Human
ccaaguagcugggauuacaggc

SEQ ID NO: 362347 - RNA, 23 nt, Human
ccaaguagcugggauuacaggcg

SEQ ID NO: 362348 - RNA, 23 nt, Human
ccaaguagcugggauuacaggug

SEQ ID NO: 362349 - RNA, 24 nt, Human
ccaaguagcugggauuacaggugu

SEQ ID NO: 362350 - RNA, 22 nt, Human
ccaaguagcugggauuacgggc

SEQ ID NO: 362351 - RNA, 22 nt, Human
ccaaguagcugggguuacaggc

SEQ ID NO: 362352 - RNA, 23 nt, Human
ccaaguagcugugacuacaggcg

SEQ ID NO: 362353 - RNA, 32 nt, Human
ccaaguaggaggaggcugggauccguguuuca

SEQ ID NO: 362354 - RNA, 32 nt, Human
ccaaguaggcaggcaacagauauguugauugu

SEQ ID NO: 362355 - RNA, 22 nt, Human
ccaaguaggugggauuacaggc

SEQ ID NO: 362356 - RNA, 23 nt, Human
ccaaguaggugggauuacaggcg

SEQ ID NO: 362357 - RNA, 32 nt, Human
ccaaguaguaaaguuuucagggaaacugacug

SEQ ID NO: 362358 - RNA, 32 nt, Human
ccaaguaguacagcuagagcccagggucccug

SEQ ID NO: 362359 - RNA, 22 nt, Human
ccaaguaguugggauuacaggc

SEQ ID NO: 362360 - RNA, 23 nt, Human
ccaaguaguugggauuacaggcg

SEQ ID NO: 362361 - RNA, 22 nt, Human
ccaaguaguugggauuacgggc

SEQ ID NO: 362362 - RNA, 22 nt, Human
ccaaguaguugggauugcaggc

SEQ ID NO: 362363 - RNA, 32 nt, Human
ccaaguaguuuaccuaugcaagaccugugaca

SEQ ID NO: 362364 - RNA, 24 nt, Human
ccaaguaucugggaccacaggcgu

SEQ ID NO: 362365 - RNA, 32 nt, Human
ccaaguaugguggccggcgccuguaaucccag

SEQ ID NO: 362366 - RNA, 32 nt, Human
ccaaguauugauuuaacuucauuuuucuaaua

SEQ ID NO: 362367 - RNA, 32 nt, Human
ccaagucaaaaugugaagaaagagaugaauua

SEQ ID NO: 362368 - RNA, 32 nt, Human
ccaagucaacaucaggcuacugaaguugaggc

SEQ ID NO: 362369 - RNA, 32 nt, Human
ccaagucacacaggcuucuguauuauguauuu

SEQ ID NO: 362370 - RNA, 32 nt, Human
ccaagucacucagaggacaacuacccauauuc

SEQ ID NO: 362371 - RNA, 20 nt, Human
ccaagucagccaucuguccu

SEQ ID NO: 362372 - RNA, 32 nt, Human
ccaagucagcuuugccuuccacgcugucucca

SEQ ID NO: 362373 - RNA, 32 nt, Human
ccaagucaggagaauggugugaucaccuguca

SEQ ID NO: 362374 - RNA, 32 nt, Human
ccaagucagugaauugucaaccugcauauccu

SEQ ID NO: 362375 - RNA, 32 nt, Human
ccaagucaucuagaaauugcaaaggaaaagac

SEQ ID NO: 362376 - RNA, 32 nt, Human
ccaagucauuugcaccuuuaccucucacaugg

SEQ ID NO: 362377 - RNA, 32 nt, Human
ccaaguccaagaacaaaugccagccacguccu

SEQ ID NO: 362378 - RNA, 32 nt, Human
ccaaguccaagaaccacaccacacacaaccag

SEQ ID NO: 362379 - RNA, 32 nt, Human
ccaaguccagaaggaaggaauggagcugagca

SEQ ID NO: 362380 - RNA, 32 nt, Human
ccaaguccagcccuggaucucccaauggccuu

SEQ ID NO: 362381 - RNA, 21 nt, Human
ccaagucccauuauuaucaca

SEQ ID NO: 362382 - RNA, 32 nt, Human
ccaagucccuuuccacuuuaaccuucuacaaa

SEQ ID NO: 362383 - RNA, 23 nt, Human
ccaaguccuaccacacaaaggaa

SEQ ID NO: 362384 - RNA, 32 nt, Human
ccacucauucacccaaccucaggguucucccc

SEQ ID NO: 362385 - RNA, 32 nt, Human
ccacucauuuuaguggcugccuccgggugaug

SEQ ID NO: 362386 - RNA, 32 nt, Human
ccacucauuuuauauuuagaaaaauccuaaau

SEQ ID NO: 362387 - RNA, 32 nt, Human
ccacucauuuuucuccuccuugggagcugggc

SEQ ID NO: 362388 - RNA, 32 nt, Human
ccacuccaaaaacccagugugggggcaaaggg

SEQ ID NO: 362389 - RNA, 32 nt, Human
ccacuccaagcccagcccauggagauugaccu

SEQ ID NO: 362390 - RNA, 32 nt, Human
ccacuccaaucacccuacaagaugccaaggag

SEQ ID NO: 362391 - RNA, 32 nt, Human
ccacuccaaugccccgcaggucgcgagcugcu

SEQ ID NO: 362392 - RNA, 32 nt, Human
ccacuccacacacacccuguuugcccgugagc

SEQ ID NO: 362393 - RNA, 18 nt, Human
ccacuccaccucggaccc

SEQ ID NO: 362394 - RNA, 32 nt, Human
ccacuccacugcacccaguguggccguacacc

SEQ ID NO: 362395 - RNA, 32 nt, Human
ccacuccagaggcugaggcaggagaaucgcuu

SEQ ID NO: 362396 - RNA, 32 nt, Human
ccacuccagagugaguagacaagacuuugaca

SEQ ID NO: 362397 - RNA, 20 nt, Human
ccacuccagcaccccagcca

SEQ ID NO: 362398 - RNA, 32 nt, Human
ccacuccagccugagcaacagagcgagacccu

SEQ ID NO: 362399 - RNA, 32 nt, Human
ccacuccagcucccuguauugauauaaccugu

SEQ ID NO: 362400 - RNA, 32 nt, Human
ccacuccaggagcugaguuggguggaaggugc

SEQ ID NO: 362401 - RNA, 32 nt, Human
ccacuccagggucuccguucugcuagaagcug

SEQ ID NO: 362402 - RNA, 32 nt, Human
ccacuccaguaguauccucuguuuucagacau

SEQ ID NO: 362403 - RNA, 32 nt, Human
ccacuccaguguucccagccccaaggccaggc

SEQ ID NO: 362404 - RNA, 32 nt, Human
ccacuccauaccacagcccuuggcccagccau

SEQ ID NO: 362405 - RNA, 32 nt, Human
ccacuccaucaccucucaaccuuugcuucgac

SEQ ID NO: 362406 - RNA, 32 nt, Human
ccacuccauccaggagcacugcaguuuccacg

SEQ ID NO: 362407 - RNA, 28 nt, Human
ccacucccaagugugcccucuucccucu

SEQ ID NO: 362408 - RNA, 17 nt, Human
ccacucccacccagcca

SEQ ID NO: 362409 - RNA, 32 nt, Human
ccacucccaccccacaccagcccugccucaag

SEQ ID NO: 362410 - RNA, 32 nt, Human
ccacucccaguucuguguuccagaaauugaga

SEQ ID NO: 362411 - RNA, 32 nt, Human
ccacucccaugugucuucagcuuucuuuugca

SEQ ID NO: 362412 - RNA, 32 nt, Human
ccacuccccaaaacugaccccaaucucugugu

SEQ ID NO: 362413 - RNA, 32 nt, Human
ccacuccccacccccagccucugccggcuccc

SEQ ID NO: 362414 - RNA, 32 nt, Human
ccacuccccacccugcaggacaggggugucug

SEQ ID NO: 362415 - RNA, 23 nt, Human
ccacuccccacuuauucuagggc

SEQ ID NO: 362416 - RNA, 21 nt, Human
ccacuccccagccacuggugc

SEQ ID NO: 362417 - RNA, 32 nt, Human
ccacuccccagccugcugccagcacucacugu

SEQ ID NO: 362418 - RNA, 32 nt, Human
ccacucccccagagcccugccaccccaugugu

SEQ ID NO: 362419 - RNA, 32 nt, Human
ccacucccccagcaaacauaacuccuaguaug

SEQ ID NO: 362420 - RNA, 32 nt, Human
ccacuccccucagaucucaguuagaacaugac

SEQ ID NO: 362421 - RNA, 19 nt, Human
ccacuccccuccugacagg

SEQ ID NO: 362422 - RNA, 32 nt, Human
ccacuccccugccccagcucgagccaggcucu

SEQ ID NO: 362423 - RNA, 32 nt, Human
ccacuccccuggcacuguuacuugccucugcg

SEQ ID NO: 362424 - RNA, 19 nt, Human
ccacuccccuggcauucca

SEQ ID NO: 362425 - RNA, 20 nt, Human
ccacucccggccuaggcacc

SEQ ID NO: 362426 - RNA, 20 nt, Human
ccacucccggccugacacca

SEQ ID NO: 362427 - RNA, 32 nt, Human
ccacucccggugcugaggcugcaucagacccu

SEQ ID NO: 362428 - RNA, 18 nt, Human
ccacucccgugcucgccu

SEQ ID NO: 362429 - RNA, 32 nt, Human
ccacucccuaucuccuucccaccccuacacac

SEQ ID NO: 362430 - RNA, 21 nt, Human
ccacucccuccaaggaccagg

SEQ ID NO: 362431 - RNA, 32 nt, Human
ccacucccuccaccgccucaccuucccugcug

SEQ ID NO: 362432 - RNA, 32 nt, Human
ccacucccuccagcagccugguucaccacaca

SEQ ID NO: 362433 - RNA, 32 nt, Human
ccacucccuccagggcgcaccugcaggucugc

SEQ ID NO: 362434 - RNA, 32 nt, Human
ccacucccugccuccuuugagggacuggggga

SEQ ID NO: 362435 - RNA, 32 nt, Human
ccacucccugcucuucuucuucauccaacucu

SEQ ID NO: 362436 - RNA, 21 nt, Human
ccacucccugggcacagaguc

SEQ ID NO: 362437 - RNA, 32 nt, Human
ccacucccuucccaugaucuaugaccucaucc

SEQ ID NO: 362438 - RNA, 32 nt, Human
ccacuccgaaggcagggaggaggacuuggcaa

SEQ ID NO: 362439 - RNA, 19 nt, Human
ccacuccgacugccuggga

SEQ ID NO: 362440 - RNA, 32 nt, Human
ccacuccgcagcuuucggccucggugagcggg

SEQ ID NO: 362441 - RNA, 32 nt, Human
ccacuccgcaucucaagaauagaaggcacggc

SEQ ID NO: 362442 - RNA, 32 nt, Human
ccacuccggggagggggccaagaggcaacggc

SEQ ID NO: 362443 - RNA, 32 nt, Human
ccacuccuaacacuagcaucagucccacucau

SEQ ID NO: 362444 - RNA, 32 nt, Human
ccacuccuaaucccucuccuuucuggcauccu

SEQ ID NO: 362445 - RNA, 19 nt, Human
ccacuccuaccacaaggac

SEQ ID NO: 362446 - RNA, 32 nt, Human
ccacuccuagccccagccuccaaggaugcggc

SEQ ID NO: 362447 - RNA, 32 nt, Human
ccacuccuaggauacaacaagagcaagcccaa

SEQ ID NO: 362448 - RNA, 17 nt, Human
ccacuccuccucacuaa

SEQ ID NO: 362449 - RNA, 32 nt, Human
ccacuccucugcuuccucuguuggccccagau

SEQ ID NO: 362450 - RNA, 32 nt, Human
ccacuccucuuccuccgccauccucauuuaua

SEQ ID NO: 362451 - RNA, 32 nt, Human
ccacuccugaacccccauuucugauuugucag

SEQ ID NO: 362452 - RNA, 23 nt, Human
ccacuccugagcgccacauccca

SEQ ID NO: 362453 - RNA, 32 nt, Human
ccacuccugcacacuggugugcagccuuugug

SEQ ID NO: 362454 - RNA, 32 nt, Human
ccacuccugcagcucuucucacaggaccagcc

SEQ ID NO: 362455 - RNA, 32 nt, Human
ccacuccugcagcugccacgguuucugccacc

SEQ ID NO: 362456 - RNA, 32 nt, Human
ccacuccugcagcugcuggugcugcuucuuac

SEQ ID NO: 362457 - RNA, 32 nt, Human
ccacuccugccugcuucccggugagcugcccc

SEQ ID NO: 362458 - RNA, 32 nt, Human
ccacuccugccuuccaaaucccugcagaaaac

SEQ ID NO: 362459 - RNA, 32 nt, Human
ccacuccugcucccucucccuuuucacuguug

SEQ ID NO: 362460 - RNA, 32 nt, Human
ccacuccugcugcaaaggcugcuggaauuuuc

SEQ ID NO: 362461 - RNA, 32 nt, Human
ccacuccugcugcaaaggcugcugggauuuuc

SEQ ID NO: 362462 - RNA, 32 nt, Human
ccacuccuucuaccugcacgcucugcgcaucc

SEQ ID NO: 362463 - RNA, 32 nt, Human
ccacuccuugccugccucaaagggggccuggc

SEQ ID NO: 362464 - RNA, 32 nt, Human
ccacucgaugccauggagaaggucaguugcag

SEQ ID NO: 362465 - RNA, 31 nt, Human
ccacucgccauuugcugacaugagauuggga

SEQ ID NO: 362466 - RNA, 32 nt, Human
ccacucgccccgcuuccucuggaucucucuag

SEQ ID NO: 362467 - RNA, 32 nt, Human
ccacucgccucaccugagccuggguggaacaa

SEQ ID NO: 362468 - RNA, 32 nt, Human
ccacucgccugacuccccuuggaccucaguua

SEQ ID NO: 362469 - RNA, 24 nt, Human
ccacucggcaucucugugaaagca

SEQ ID NO: 362470 - RNA, 32 nt, Human
ccacucggcccaggaggucagcagucuguucu

SEQ ID NO: 362471 - RNA, 32 nt, Human
ccacucgggaggcugagacaggagaaucgcuu

SEQ ID NO: 362472 - RNA, 32 nt, Human
ccacucgggaggcugaggcaagagaguuacuu

SEQ ID NO: 362473 - RNA, 32 nt, Human
ccacucgggaggcugaggcaggagaaugaugu

SEQ ID NO: 362474 - RNA, 20 nt, Human
ccacucgugcaucccugaga

SEQ ID NO: 362475 - RNA, 32 nt, Human
ccacucuaagugauuccuccagggugggaagc

SEQ ID NO: 362476 - RNA, 32 nt, Human
ccacucuacuaaaaauauaagaaauuagccgg

SEQ ID NO: 362477 - RNA, 32 nt, Human
ccacucuagaguaaugauggucccugugguau

SEQ ID NO: 362478 - RNA, 32 nt, Human
ccacucuaucuuugugguucaugaggacuuug

SEQ ID NO: 362479 - RNA, 32 nt, Human
ccacucucaauacccuguucccaaacccauuc

SEQ ID NO: 362480 - RNA, 32 nt, Human
ccacucucacacuuugucacuggaauuuuauu

SEQ ID NO: 362481 - RNA, 32 nt, Human
ccacucucagugucucaugcacugaaugcaac

SEQ ID NO: 362482 - RNA, 18 nt, Human
ccacucuccagcugccuu

SEQ ID NO: 362483 - RNA, 32 nt, Human
ccacucuccagucucccuccccugacucccuc

SEQ ID NO: 362484 - RNA, 32 nt, Human
ccacucucccacccucucgaucuguauauccu

SEQ ID NO: 362485 - RNA, 32 nt, Human
ccacucuccccagauccuggagaguggguugu

SEQ ID NO: 362486 - RNA, 32 nt, Human
ccacucuccccgacuucauucacucaaacuuc

SEQ ID NO: 362487 - RNA, 32 nt, Human
ccacucuccuccccucuuuuccuuccuuccua

SEQ ID NO: 362488 - RNA, 32 nt, Human
ccacucucgggaaggauuugcauuuugagcuu

SEQ ID NO: 362489 - RNA, 32 nt, Human
ccacucucuccccuccccucagugcccuugcc

SEQ ID NO: 362490 - RNA, 32 nt, Human
ccacucucucuuccucacccuacaaucagcca

SEQ ID NO: 362491 - RNA, 18 nt, Human
ccacucucuggcugccuu

SEQ ID NO: 362492 - RNA, 32 nt, Human
ccacucucuuggaaccaccacaccuguuuaaa

SEQ ID NO: 362493 - RNA, 32 nt, Human
ccacucugaagucugcugacugugucucuuga

SEQ ID NO: 362494 - RNA, 32 nt, Human
ccacucugacagucuccuccaguuccagcaau

SEQ ID NO: 362495 - RNA, 32 nt, Human
ccacucugaccgggcuuccucccuccacgcuu

SEQ ID NO: 362496 - RNA, 32 nt, Human
ccacucugaguguggccaguucuauaaccauc

SEQ ID NO: 362497 - RNA, 32 nt, Human
ccacucugcacucucccccucuauggaucagg

SEQ ID NO: 362498 - RNA, 32 nt, Human
ccacucugcagccucaaacuccugggcuccag

SEQ ID NO: 362499 - RNA, 32 nt, Human
ccacucugccacagguugcaucuugaccuggu

SEQ ID NO: 362500 - RNA, 23 nt, Human
ccacucugccagcuuccuggagc

SEQ ID NO: 362501 - RNA, 32 nt, Human
ccacucugcccagcuggguuggaucuucucuc

SEQ ID NO: 362502 - RNA, 32 nt, Human
ccacucugccgugcucacacagacacacccag

SEQ ID NO: 362503 - RNA, 32 nt, Human
ccacucugcgccccucgaucucccaggcucuu

SEQ ID NO: 362504 - RNA, 32 nt, Human
ccacucugcuuugcccaagugugacagcacug

SEQ ID NO: 362505 - RNA, 32 nt, Human
ccacucuggccuggccuauuuccccagagcuc

SEQ ID NO: 362506 - RNA, 29 nt, Human
ccacucuggcugccguuguccuguccugc

SEQ ID NO: 362507 - RNA, 32 nt, Human
ccacucuggcuggcuucucuccccugccccaa

SEQ ID NO: 362508 - RNA, 32 nt, Human
ccacucugggcaacagaaugagauccugucuc

SEQ ID NO: 362509 - RNA, 32 nt, Human
ccacucugggcugggugggccagguguuccuu

SEQ ID NO: 362510 - RNA, 32 nt, Human
ccacucuggggcccagccugccugccgcaccc

SEQ ID NO: 362511 - RNA, 32 nt, Human
ccacucugggucccucagaaaagagggacgug

SEQ ID NO: 362512 - RNA, 24 nt, Human
ccacucugugccuuggcucaugcu

SEQ ID NO: 362513 - RNA, 32 nt, Human
ccacucuucuuucauagucacauuuuggcccc

SEQ ID NO: 362514 - RNA, 32 nt, Human
ccacucuugcccaggcuggagcgcaaguggcg

SEQ ID NO: 362515 - RNA, 32 nt, Human
ccacucuuucagggauguccaagguccauguu

SEQ ID NO: 362516 - RNA, 32 nt, Human
ccacucuuuccagauugagucugugcuguuua

SEQ ID NO: 362517 - RNA, 32 nt, Human
ccacucuuucugcccucaccugggcaacguuu

SEQ ID NO: 362518 - RNA, 32 nt, Human
ccacugaaaauagaaaaauuagcugggcaugg

SEQ ID NO: 362519 - RNA, 32 nt, Human
ccacugaaacucgcugguuuugcucgaauuag

SEQ ID NO: 362520 - RNA, 21 nt, Human
ccacugaaagaagugggacuu

SEQ ID NO: 362521 - RNA, 19 nt, Human
ccacugaaccccauugccc

SEQ ID NO: 362522 - RNA, 32 nt, Human
ccacugaagaggaggaggagggucuagaggcc

SEQ ID NO: 362523 - RNA, 32 nt, Human
ccacugaaggauguaggcggaggcagaucucu

SEQ ID NO: 362524 - RNA, 32 nt, Human
ccacugaagugaggacacaccggagccaggcg

SEQ ID NO: 362525 - RNA, 21 nt, Human
ccacugaaugacuggggccag

SEQ ID NO: 362526 - RNA, 32 nt, Human
ccacugacagauucaccucccccacaucccua

SEQ ID NO: 362527 - RNA, 32 nt, Human
ccacugacauuuagggauguggccauagaauu

SEQ ID NO: 362528 - RNA, 32 nt, Human
ccacugaccaggcugugaacauugacuguggc

SEQ ID NO: 362529 - RNA, 32 nt, Human
ccacugaccaggcuuccaaugacuaggucacc

SEQ ID NO: 362530 - RNA, 32 nt, Human
ccacugaccagguggccagggggcaggguggg

SEQ ID NO: 362531 - RNA, 21 nt, Human
ccacugacccccgcugccucc

SEQ ID NO: 362532 - RNA, 31 nt, Human
ccacugacccuuucugggccuguuuccuuac

SEQ ID NO: 362533 - RNA, 32 nt, Human
ccacugacucacugugaccuugggaucuugug

SEQ ID NO: 362534 - RNA, 32 nt, Human
ccacugagaagcaggcggguugggugggagga

SEQ ID NO: 362535 - RNA, 32 nt, Human
ccacugagagcggggguccugccccaucuuag

SEQ ID NO: 362536 - RNA, 32 nt, Human
ccacugagaggacagagagaaauaagugcccu

SEQ ID NO: 362537 - RNA, 32 nt, Human
ccacugagagguguuuaaugugauccaagacc

SEQ ID NO: 362538 - RNA, 32 nt, Human
ccacugagcacagccugguagggcuggaauua

SEQ ID NO: 362539 - RNA, 32 nt, Human
ccacugagcagccaaccgcagccucuggccac

SEQ ID NO: 362540 - RNA, 24 nt, Human
ccacugagcaguucagagccccag

SEQ ID NO: 362541 - RNA, 19 nt, Human
ccacugagcccacauccca

SEQ ID NO: 362542 - RNA, 32 nt, Human
ccacugagcucuuaacccuccccaccugaggg

SEQ ID NO: 362543 - RNA, 32 nt, Human
ccacugaggaacaggauccacuuugaacaguc

SEQ ID NO: 362544 - RNA, 32 nt, Human
ccacugaggaacggccuggugaaggacaagcg

SEQ ID NO: 362545 - RNA, 32 nt, Human
ccacugaggaccacaucacugcagacccaggg

SEQ ID NO: 362546 - RNA, 32 nt, Human
ccacugaggagaagguaagggaguacuuuggu

SEQ ID NO: 362547 - RNA, 32 nt, Human
ccacugaggcaauggaugcuguuucucucccu

SEQ ID NO: 362548 - RNA, 32 nt, Human
ccacugaggccaguggaauuuccccaggccuu

SEQ ID NO: 362549 - RNA, 32 nt, Human
ccacugagucagugauaauuugcugaagaagc

SEQ ID NO: 362550 - RNA, 32 nt, Human
ccacugagugagcaacagaugagggaaauugc

SEQ ID NO: 362551 - RNA, 32 nt, Human
ccacugaguggcuucagccucgcuggaagaag

SEQ ID NO: 362552 - RNA, 32 nt, Human
ccacugauccccaacgggagcaagacuucuaa

SEQ ID NO: 362553 - RNA, 32 nt, Human
ccacugaugaaauuaugaccaggugggcccga

SEQ ID NO: 362554 - RNA, 24 nt, Human
ccacugaugcaggagcugccaccc

SEQ ID NO: 362555 - RNA, 19 nt, Human
ccacugaugcauccuccaa

SEQ ID NO: 362556 - RNA, 32 nt, Human
ccacugaugugucucuuggauuucuuccaggu

SEQ ID NO: 362557 - RNA, 31 nt, Human
ccacugauugagagaguggaggggaagagac

SEQ ID NO: 362558 - RNA, 17 nt, Human
ccacugcaaacugcagg

SEQ ID NO: 362559 - RNA, 32 nt, Human
ccacugcaaagauuccagccuggguccaggaa

SEQ ID NO: 362560 - RNA, 32 nt, Human
ccacugcaaauuucaaaagccuugucaauggu

SEQ ID NO: 362561 - RNA, 21 nt, Human
ccacugcaacacccaccagca

SEQ ID NO: 362562 - RNA, 32 nt, Human
ccacugcaacaucuucuccuacgacuacuccg

SEQ ID NO: 362563 - RNA, 32 nt, Human
ccacugcaagacaaguguuggggaagauggga

SEQ ID NO: 362564 - RNA, 32 nt, Human
ccacugcaagcccaugaacuucccagagagug

SEQ ID NO: 362565 - RNA, 32 nt, Human
ccacugcacacuccaaucugggugaaagaccg

SEQ ID NO: 362566 - RNA, 32 nt, Human
ccacugcacacugcacuccauccugggcgaca

SEQ ID NO: 362567 - RNA, 32 nt, Human
ccacugcaccacuacucccaagccuagggaug

SEQ ID NO: 362568 - RNA, 32 nt, Human
ccacugcaccacuccagccugggcaacaagag

SEQ ID NO: 362569 - RNA, 22 nt, Human
ccacugcaccccagccugggca

SEQ ID NO: 362570 - RNA, 32 nt, Human
ccacugcacccccuccugcugcagaggggcag

SEQ ID NO: 362571 - RNA, 21 nt, Human
ccacugcacccggcccugaga

SEQ ID NO: 362572 - RNA, 32 nt, Human
ccacugcaccucuagucugggugacagagcaa

SEQ ID NO: 362573 - RNA, 20 nt, Human
ccacugcaccuggcccagga

SEQ ID NO: 362574 - RNA, 32 nt, Human
ccacugcacgcacuccagccugggcgacagag

SEQ ID NO: 362575 - RNA, 32 nt, Human
ccacugcacgcacuccagccugggugacagag

SEQ ID NO: 362576 - RNA, 17 nt, Human
ccacugcacggggcccc

SEQ ID NO: 362577 - RNA, 32 nt, Human
ccacugcacucauccuggaagacagagugaga

SEQ ID NO: 362578 - RNA, 22 nt, Human
ccacugcacuccaaccugggca

SEQ ID NO: 362579 - RNA, 32 nt, Human
ccacugcacuccagagccugggcgacagagcg

SEQ ID NO: 362580 - RNA, 32 nt, Human
ccacugcacuccagcacuccagccugggugac

SEQ ID NO: 362581 - RNA, 22 nt, Human
ccacugcacuccagcccaggca

SEQ ID NO: 362582 - RNA, 22 nt, Human
ccacugcacuccagccuaagca

SEQ ID NO: 362583 - RNA, 21 nt, Human
ccacugcacuccagccuaggc

SEQ ID NO: 362584 - RNA, 22 nt, Human
ccacugcacuccagccuaggca

SEQ ID NO: 362585 - RNA, 22 nt, Human
ccacugcacuccagccucagca

SEQ ID NO: 362586 - RNA, 22 nt, Human
ccacugcacuccagccugagca

SEQ ID NO: 362587 - RNA, 22 nt, Human
ccacugcacuccagccuggaca

SEQ ID NO: 362588 - RNA, 21 nt, Human
ccacugcacuccagccuggca

SEQ ID NO: 362589 - RNA, 22 nt, Human
ccacugcacuccagccugggca

SEQ ID NO: 362590 - RNA, 22 nt, Human
ccacugcacuccagccuuggca

SEQ ID NO: 362591 - RNA, 32 nt, Human
ccacugcacuccagcuggagugacagagccaa

SEQ ID NO: 362592 - RNA, 32 nt, Human
ccacugcacuccaggccugggugacagugcga

SEQ ID NO: 362593 - RNA, 32 nt, Human
ccacugcacuccauccagccugggugacaggg

SEQ ID NO: 362594 - RNA, 22 nt, Human
ccacugcacucuagccuaagca

SEQ ID NO: 362595 - RNA, 32 nt, Human
ccacugcacugcaacccugcuuucaaaccgaa

SEQ ID NO: 362596 - RNA, 32 nt, Human
ccacugcacugcacgccagccuaggcgacaga

SEQ ID NO: 362597 - RNA, 32 nt, Human
ccacugcacugcacuccagccugggugacaaa

SEQ ID NO: 362598 - RNA, 32 nt, Human
ccacugcacuuccagccugggugacagaguga

SEQ ID NO: 362599 - RNA, 32 nt, Human
ccacugcacuugagccucuugggaaacauaac

SEQ ID NO: 362600 - RNA, 32 nt, Human
ccacugcacuuuucagccugggugccacagcg

SEQ ID NO: 362601 - RNA, 17 nt, Human
ccacugcagacugcagg

SEQ ID NO: 362602 - RNA, 32 nt, Human
ccacugcagcagccaugaagggcaguggguag

SEQ ID NO: 362603 - RNA, 32 nt, Human
ccacugcagcagccaugagacagacuuguggu

SEQ ID NO: 362604 - RNA, 20 nt, Human
ccacugcagccucagcccag

SEQ ID NO: 362605 - RNA, 32 nt, Human
ccacugcagccucugccugcucugccgccgag

SEQ ID NO: 362606 - RNA, 18 nt, Human
ccacugcagcucuuccaa

SEQ ID NO: 362607 - RNA, 32 nt, Human
ccacugcaggaauguggccacagggagcagag

SEQ ID NO: 362608 - RNA, 23 nt, Human
ccacugcaggagagcugcccccu

SEQ ID NO: 362609 - RNA, 32 nt, Human
ccacugcagggccagccacucgccaggaggcc

SEQ ID NO: 362610 - RNA, 32 nt, Human
ccacugcaguccgcagcccagccugggcgaca

SEQ ID NO: 362611 - RNA, 32 nt, Human
ccacugcaguccgcaguccagccugggcgaca

SEQ ID NO: 362612 - RNA, 32 nt, Human
ccacugcaucugggcugcagggccagagcuag

SEQ ID NO: 362613 - RNA, 32 nt, Human
ccacugcaugacccucuaucccugccaucugu

SEQ ID NO: 362614 - RNA, 32 nt, Human
ccacugccaacucccucugccccagccccacc

SEQ ID NO: 362615 - RNA, 32 nt, Human
ccacugccaccugggcccggagccuccacgau

SEQ ID NO: 362616 - RNA, 32 nt, Human
ccacugccaccuguacaccuuccacgcccgcu

SEQ ID NO: 362617 - RNA, 23 nt, Human
ccacugccacuccaguccugcca

SEQ ID NO: 362618 - RNA, 21 nt, Human
ccacugccagaaagugauaga

SEQ ID NO: 362619 - RNA, 32 nt, Human
ccacugccagcagucucuugaucuggcccggc

SEQ ID NO: 362620 - RNA, 32 nt, Human
ccacugccagccucaggcaacauagagagccu

SEQ ID NO: 362621 - RNA, 17 nt, Human
ccacugccauccauccu

SEQ ID NO: 362622 - RNA, 32 nt, Human
ccacugcccaauagugaccucacuuccagguc

SEQ ID NO: 362623 - RNA, 32 nt, Human
ccacugcccauuuuaccagcucacauucccga

SEQ ID NO: 362624 - RNA, 32 nt, Human
ccacugccccaggagcacuuuagggcucucag

SEQ ID NO: 362625 - RNA, 32 nt, Human
ccacugcccccuucacugucugugugugguga

SEQ ID NO: 362626 - RNA, 32 nt, Human
ccacugccccucacucuucucuggacccccac

SEQ ID NO: 362627 - RNA, 20 nt, Human
ccacugcccguggucuccaa

SEQ ID NO: 362628 - RNA, 32 nt, Human
ccacugcccuaggcucuuaaauacucauuggg

SEQ ID NO: 362629 - RNA, 32 nt, Human
ccacugcccuccagggccaggauucaggccuc

SEQ ID NO: 362630 - RNA, 32 nt, Human
ccacugcccugacaggaaccucaagagcaaca

SEQ ID NO: 362631 - RNA, 32 nt, Human
ccacugcccuggcugaugaguccuucgguggc

SEQ ID NO: 362632 - RNA, 21 nt, Human
ccacugccgcaggugcccccu

SEQ ID NO: 362633 - RNA, 32 nt, Human
ccacugccgcggccgcugggccugagugucgc

SEQ ID NO: 362634 - RNA, 32 nt, Human
ccacugccgcugccaguaccagccuggagcca

SEQ ID NO: 362635 - RNA, 32 nt, Human
ccacugccggcuugcagccugcuuuuauuccc

SEQ ID NO: 362636 - RNA, 22 nt, Human
ccacugccuaacaucugccccc

SEQ ID NO: 362637 - RNA, 32 nt, Human
ccacugccuacgugccugcccucugcccacug

SEQ ID NO: 362638 - RNA, 32 nt, Human
ccacugccuccgugcccugccuacuccuucuc

SEQ ID NO: 362639 - RNA, 32 nt, Human
ccacugccugcaccacccaccuccagagugca

SEQ ID NO: 362640 - RNA, 32 nt, Human
ccacugccugcagcaggcuucaaaaagcaaca

SEQ ID NO: 362641 - RNA, 32 nt, Human
ccacugccugcaggagccugggcugacugguu

SEQ ID NO: 362642 - RNA, 32 nt, Human
ccacugccuggagauagagugagacccugucu

SEQ ID NO: 362643 - RNA, 32 nt, Human
ccacugccuggaugccggcuugaguucugcgc

SEQ ID NO: 362644 - RNA, 32 nt, Human
ccacugccugggagcagcucacucagcuugcc

SEQ ID NO: 362645 - RNA, 32 nt, Human
ccacugccuuccucuagugcagccuggaagac

SEQ ID NO: 362646 - RNA, 31 nt, Human
ccacugccuugcucugggccuguggugcucc

SEQ ID NO: 362647 - RNA, 32 nt, Human
ccacugcgcccagccccaaguggcuuuuucaa

SEQ ID NO: 362648 - RNA, 32 nt, Human
ccacugcgccccaccucccugccugugugugu

SEQ ID NO: 362649 - RNA, 32 nt, Human
ccacugcgcccggccaucauuugccuauuuuc

SEQ ID NO: 362650 - RNA, 32 nt, Human
ccacugcgccuccagcgcccccgccuucuccg

SEQ ID NO: 362651 - RNA, 20 nt, Human
ccacugcgccuggccgcaga

SEQ ID NO: 362652 - RNA, 32 nt, Human
ccacugcggggaggagggggaggaggagcggg

SEQ ID NO: 362653 - RNA, 32 nt, Human
ccacugcgucagcuaauuuuuguauuuuuagu

SEQ ID NO: 362654 - RNA, 32 nt, Human
ccacugcgugcacucaccuggccgccgggcca

SEQ ID NO: 362655 - RNA, 23 nt, Human
ccacugcuaaaacugaagcacca

SEQ ID NO: 362656 - RNA, 32 nt, Human
ccacugcuaacaacaggacugccuuucccugg

SEQ ID NO: 362657 - RNA, 32 nt, Human
ccacugcuacaggagcccccagccugguuuaa

SEQ ID NO: 362658 - RNA, 32 nt, Human
ccacugcucaaagggcaacaacuuuaagaaca

SEQ ID NO: 362659 - RNA, 32 nt, Human
ccacugcucaacuucccccuccugcaggggau

SEQ ID NO: 362660 - RNA, 21 nt, Human
ccacugcucaccuaggcgcua

SEQ ID NO: 362661 - RNA, 32 nt, Human
ccacugcucacugcuuuccacuugcuaggaug

SEQ ID NO: 362662 - RNA, 32 nt, Human
ccacugcucagaccucuggaccugacaggaga

SEQ ID NO: 362663 - RNA, 32 nt, Human
ccacugcucaggggcuccuucuggcugcagua

SEQ ID NO: 362664 - RNA, 32 nt, Human
ccacugcucccccgucccaucggggugggcua

SEQ ID NO: 362665 - RNA, 32 nt, Human
ccacugcuccguucugagccucgguguauuuu

SEQ ID NO: 362666 - RNA, 32 nt, Human
ccacugcuccuugguccuuggcauuaugacgg

SEQ ID NO: 362667 - RNA, 22 nt, Human
ccacugcucguuguaaaugcca

SEQ ID NO: 362668 - RNA, 32 nt, Human
ccacugcucucgggggcgccauggacgaggcc

SEQ ID NO: 362669 - RNA, 32 nt, Human
ccacugcugaauccucaauggaaagggucgac

SEQ ID NO: 362670 - RNA, 32 nt, Human
ccacugcugacuuucugaaaaguuuuccaguu

SEQ ID NO: 362671 - RNA, 32 nt, Human
ccacugcugagugcccguguccccacagcccc

SEQ ID NO: 362672 - RNA, 32 nt, Human
ccacugcugccucuccaucccucucucauugg

SEQ ID NO: 362673 - RNA, 32 nt, Human
ccacugcugcuugugcggcucagcugaccgag

SEQ ID NO: 362674 - RNA, 32 nt, Human
ccacugcuggcuucagccccuugagcagccca

SEQ ID NO: 362675 - RNA, 32 nt, Human
ccacugcugggcacacuggggcucccucaucu

SEQ ID NO: 362676 - RNA, 32 nt, Human
ccacugcuguuuucacauccuuucccuuaccc

SEQ ID NO: 362677 - RNA, 32 nt, Human
ccacugcuuccucucggcgcaccccaggggag

SEQ ID NO: 362678 - RNA, 32 nt, Human
ccacugcuuugcuagacgugcuuucugccaug

SEQ ID NO: 362679 - RNA, 32 nt, Human
ccacuggaaaccagagucacacugcgcgucug

SEQ ID NO: 362680 - RNA, 25 nt, Human
ccacuggaaagcagacugcuuggga

SEQ ID NO: 362681 - RNA, 32 nt, Human
ccacuggaacaguucagccauuugaauaaauu

SEQ ID NO: 362682 - RNA, 32 nt, Human
ccacuggacucagguccugaaugaagcugucc

SEQ ID NO: 362683 - RNA, 32 nt, Human
ccacuggaggugagaagccgaauggccuuggu

SEQ ID NO: 362684 - RNA, 24 nt, Human
ccacuggagucagcaggcccagug

SEQ ID NO: 362685 - RNA, 31 nt, Human
ccacuggagugaaaugugucacuggauaucu

SEQ ID NO: 362686 - RNA, 32 nt, Human
ccacuggagugcccggccaggucuccaagccc

SEQ ID NO: 362687 - RNA, 17 nt, Human
ccacuggauaucaguug

SEQ ID NO: 362688 - RNA, 32 nt, Human
ccacuggaucgugcuggccucucccagauguc

SEQ ID NO: 362689 - RNA, 25 nt, Human
ccacuggcaaagggaggcaggggaa

SEQ ID NO: 362690 - RNA, 32 nt, Human
ccacuggcaaauccaaccagcaaccagaaaug

SEQ ID NO: 362691 - RNA, 32 nt, Human
ccacuggccagagagggagcugcuagagaucc

SEQ ID NO: 362692 - RNA, 32 nt, Human
ccacuggcccagggccaccucuugcuugggga

SEQ ID NO: 362693 - RNA, 32 nt, Human
ccacuggcgagaggaguuugaccuggauguga

SEQ ID NO: 362694 - RNA, 32 nt, Human
ccacuggcucacugcccaugauucagagcuuu

SEQ ID NO: 362695 - RNA, 32 nt, Human
ccacuggcucagaaaggcugaguccuaagaau

SEQ ID NO: 362696 - RNA, 32 nt, Human
ccacuggcuccaggcuccucacaacagcagcu

SEQ ID NO: 362697 - RNA, 32 nt, Human
ccacuggcuguagcugugcucuggguccccag

SEQ ID NO: 362698 - RNA, 32 nt, Human
ccacuggcuucaugcuggaguaauggguaaca

SEQ ID NO: 362699 - RNA, 32 nt, Human
ccacuggcuuccaagacacugaagacccggcc

SEQ ID NO: 362700 - RNA, 18 nt, Human
ccacugggaaucauggug

SEQ ID NO: 362701 - RNA, 32 nt, Human
ccacugggaccagcaggugaagcguugcaaca

SEQ ID NO: 362702 - RNA, 20 nt, Human
ccacugggacgguggccaga

SEQ ID NO: 362703 - RNA, 32 nt, Human
ccacugggacucaagagaggaaccuggggccc

SEQ ID NO: 362704 - RNA, 32 nt, Human
ccacugggagcacaaugcccacaucaucuuaa

SEQ ID NO: 362705 - RNA, 32 nt, Human
ccacugggagugaauggaucaugaggugggau

SEQ ID NO: 362706 - RNA, 32 nt, Human
ccacugggcaccaccugggcccugagucuccc

SEQ ID NO: 362707 - RNA, 32 nt, Human
ccacugggcaggcagaauuuguuugagggaua

SEQ ID NO: 362708 - RNA, 32 nt, Human
ccacugggccaagugcaguggaucaugucugu

SEQ ID NO: 362709 - RNA, 19 nt, Human
ccacugggccccucagggg

SEQ ID NO: 362710 - RNA, 23 nt, Human
ccacugggccugcuggccucccu

SEQ ID NO: 362711 - RNA, 21 nt, Human
ccacugggcgacagagugaga

SEQ ID NO: 362712 - RNA, 32 nt, Human
ccacugggcgacagagugagacuucgacucaa

SEQ ID NO: 362713 - RNA, 32 nt, Human
ccacuggggacccccacccgaccccacuccca

SEQ ID NO: 362714 - RNA, 32 nt, Human
ccacuggggacccccagcucagccaugcuggc

SEQ ID NO: 362715 - RNA, 32 nt, Human
ccacuggggagguggcgcugggcgcgcgggau

SEQ ID NO: 362716 - RNA, 32 nt, Human
ccacuggggauugggccccugccagacccccu

SEQ ID NO: 362717 - RNA, 17 nt, Human
ccacuggggccaaggug

SEQ ID NO: 362718 - RNA, 22 nt, Human
ccacuggggcccaagugcagca

SEQ ID NO: 362719 - RNA, 18 nt, Human
ccacuggggcugguggga

SEQ ID NO: 362720 - RNA, 32 nt, Human
ccacugggggucuuagacuauauuacccaugg

SEQ ID NO: 362721 - RNA, 31 nt, Human
ccacuggggguggaaugggguagggugggau

SEQ ID NO: 362722 - RNA, 32 nt, Human
ccacugggguguugugcucacuucagggccca

SEQ ID NO: 362723 - RNA, 32 nt, Human
ccacugggucacagugcuuuuccacgagagaa

SEQ ID NO: 362724 - RNA, 32 nt, Human
ccacugggucugcagcucacacauaggcauga

SEQ ID NO: 362725 - RNA, 32 nt, Human
ccacugguacuuccuuucucccugcgggccag

SEQ ID NO: 362726 - RNA, 32 nt, Human
ccacugguauaaauacaucucucuccaauuug

SEQ ID NO: 362727 - RNA, 32 nt, Human
ccacugguccaucugguuuucucuccaggggu

SEQ ID NO: 362728 - RNA, 32 nt, Human
ccacugguccccucucuggcucuguggguccc

SEQ ID NO: 362729 - RNA, 32 nt, Human
ccacuggucggcacuuugccacuguguggcag

SEQ ID NO: 362730 - RNA, 28 nt, Human
ccacuggucggugcugccugguccuggc

SEQ ID NO: 362731 - RNA, 32 nt, Human
ccacuggucugucuuuggauaauaggaauuca

SEQ ID NO: 362732 - RNA, 32 nt, Human
ccacuggucuugcaucccaaaugucucuuugu

SEQ ID NO: 362733 - RNA, 32 nt, Human
ccacuggugcugagaccccacccuagaacaau

SEQ ID NO: 362734 - RNA, 24 nt, Human
ccacugguggccaaauagccgaug

SEQ ID NO: 362735 - RNA, 32 nt, Human
ccacuggugguuuguguguguaugaagguaaa

SEQ ID NO: 362736 - RNA, 32 nt, Human
ccacugguguuuucugucccucuuguucauug

SEQ ID NO: 362737 - RNA, 32 nt, Human
ccacugguuccuucuuccugggucuucagcau

SEQ ID NO: 362738 - RNA, 20 nt, Human
ccacuguaaauuuaauagau

SEQ ID NO: 362739 - RNA, 32 nt, Human
ccacuguaagcagcccuagcucuuggguccag

SEQ ID NO: 362740 - RNA, 32 nt, Human
ccacuguaagccaaaagguggggaaguccuga

SEQ ID NO: 362741 - RNA, 18 nt, Human
ccacuguacaucauccuu

SEQ ID NO: 362742 - RNA, 32 nt, Human
ccacuguacccagccaaaauuguuuucuuuuu

SEQ ID NO: 362743 - RNA, 32 nt, Human
ccacuguacuccagccuggacaacagcgagag

SEQ ID NO: 362744 - RNA, 32 nt, Human
ccacuguacugcaaccugggacagagugagac

SEQ ID NO: 362745 - RNA, 18 nt, Human
ccacuguauauuaauuga

SEQ ID NO: 362746 - RNA, 32 nt, Human
ccacuguaucuucuauuucuaccacauuuugc

SEQ ID NO: 362747 - RNA, 32 nt, Human
ccacugucacggucaaccagagccugcugagc

SEQ ID NO: 362748 - RNA, 32 nt, Human
ccacugucagcaaagccuggagaaaugggacc

SEQ ID NO: 362749 - RNA, 32 nt, Human
ccacugucagcaccugaagguacccaccagau

SEQ ID NO: 362750 - RNA, 32 nt, Human
ccacugucagccacacaccugcccccaucaca

SEQ ID NO: 362751 - RNA, 27 nt, Human
ccacugucauaaucucuuuccaucuua

SEQ ID NO: 362752 - RNA, 18 nt, Human
ccacuguccagcugcaga

SEQ ID NO: 362753 - RNA, 32 nt, Human
ccacuguccaggcaaaugccaggccuuguccc

SEQ ID NO: 362754 - RNA, 32 nt, Human
ccacuguccagguggagacugagcaaaggaag

SEQ ID NO: 362755 - RNA, 32 nt, Human
ccacugucccacucugguggggcugcucucga

SEQ ID NO: 362756 - RNA, 32 nt, Human
ccacugucccgcuagugccugcuaggugcaug

SEQ ID NO: 362757 - RNA, 32 nt, Human
ccacugucgcccagacuggaguccaguggcac

SEQ ID NO: 362758 - RNA, 32 nt, Human
ccacugucgggaggggagacggagcugagcau

SEQ ID NO: 362759 - RNA, 19 nt, Human
ccacugucuccccauccuu

SEQ ID NO: 362760 - RNA, 32 nt, Human
ccacugucucucuccuucucuccaguuuuggu

SEQ ID NO: 362761 - RNA, 32 nt, Human
ccacugucucuucaccccggcagcuaaagaaa

SEQ ID NO: 362762 - RNA, 32 nt, Human
ccacugugaccuggcccacggcugcugugcac

SEQ ID NO: 362763 - RNA, 23 nt, Human
ccacugugagccccgggcuccug

SEQ ID NO: 362764 - RNA, 32 nt, Human
ccacugugaggugagaaugaaaguggaucuca

SEQ ID NO: 362765 - RNA, 20 nt, Human
ccacugugcacugcuuguga

SEQ ID NO: 362766 - RNA, 32 nt, Human
ccacugugcaggaguagggaggaaaaggaguu

SEQ ID NO: 362767 - RNA, 32 nt, Human
ccacugugcccagccaaaagagaaauuucuac

SEQ ID NO: 362768 - RNA, 32 nt, Human
ccacugugcccagccaagaaauaaaguuuuua

SEQ ID NO: 362769 - RNA, 32 nt, Human
ccacugugcccagccacgagcugcuuuuuauc

SEQ ID NO: 362770 - RNA, 32 nt, Human
ccacugugcccagccagagguucucuuaugcu

SEQ ID NO: 362771 - RNA, 32 nt, Human
ccacugugcccagcugagauguuucuuauuau

SEQ ID NO: 362772 - RNA, 32 nt, Human
ccacugugcccaggcugugggcaccaggcaga

SEQ ID NO: 362773 - RNA, 32 nt, Human
ccacugugcccagucaggaugucuuuaaugua

SEQ ID NO: 362774 - RNA, 32 nt, Human
ccacugugcccucugugucagugugugcucca

SEQ ID NO: 362775 - RNA, 32 nt, Human
ccacugugccucuccccucagugucccuucug

SEQ ID NO: 362776 - RNA, 32 nt, Human
ccacugugccuggccagaaauuguuuugaaag

SEQ ID NO: 362777 - RNA, 32 nt, Human
ccacugugcuauauacacagcauaagauuaau

SEQ ID NO: 362778 - RNA, 32 nt, Human
ccacugugcuugguagagugcaucacucacca

SEQ ID NO: 362779 - RNA, 32 nt, Human
ccacuguggagagcugguuucccacuggaguu

SEQ ID NO: 362780 - RNA, 32 nt, Human
ccacuguggagcuucccuggggugcccgggca

SEQ ID NO: 362781 - RNA, 32 nt, Human
ccacuguggcuagauauauacacacacauaua

SEQ ID NO: 362782 - RNA, 32 nt, Human
ccacugugguuuugacuuaagaaagcaaaacu

SEQ ID NO: 362783 - RNA, 32 nt, Human
ccacugugugcacuugcuguuuucccugucca

SEQ ID NO: 362784 - RNA, 32 nt, Human
ccacugugugcccauuuccuagggaaggggaa

SEQ ID NO: 362785 - RNA, 32 nt, Human
ccacuguuagaucugcagaaggggacacccug

SEQ ID NO: 362786 - RNA, 21 nt, Human
ccacuguuagcagcugccccu

SEQ ID NO: 362787 - RNA, 32 nt, Human
ccacuguuagcugaaaccgggguggggagaaa

SEQ ID NO: 362788 - RNA, 32 nt, Human
ccacuguuauuuuccuuccucucuggcagggc

SEQ ID NO: 362789 - RNA, 32 nt, Human
ccacuguugcagaaugaagucaccucgccccc

SEQ ID NO: 362790 - RNA, 32 nt, Human
ccacuguugcugaggccugccugccagccacu

SEQ ID NO: 362791 - RNA, 32 nt, Human
ccacuguuggauuuuaaucugcuuccauuaac

SEQ ID NO: 362792 - RNA, 24 nt, Human
ccacuguuucccccuaaaauguca

SEQ ID NO: 362793 - RNA, 32 nt, Human
ccacuuaaacucuugucagucugggcucaggg

SEQ ID NO: 362794 - RNA, 32 nt, Human
ccacuuaacagaugaggaaacugaggccuaga

SEQ ID NO: 362795 - RNA, 31 nt, Human
ccacuuaaccucucuggaccuuguuuguaag

SEQ ID NO: 362796 - RNA, 32 nt, Human
ccacuuaauaaauaagguuacuugguacacug

SEQ ID NO: 362797 - RNA, 23 nt, Human
ccacuuaauauagcccccacugc

SEQ ID NO: 362798 - RNA, 19 nt, Human
ccacuuacaaagcugcaca

SEQ ID NO: 362799 - RNA, 32 nt, Human
ccacuuaccaggaaauuccuucagaacuagau

SEQ ID NO: 362800 - RNA, 17 nt, Human
ccacuuaccccuucuca

SEQ ID NO: 362801 - RNA, 32 nt, Human
ccacuuacccggccucugccucuuguuaauuu

SEQ ID NO: 362802 - RNA, 32 nt, Human
ccacuuaccuuuccagagauggaguuucacca

SEQ ID NO: 362803 - RNA, 32 nt, Human
ccacuuagagacaaugauuaacagggcccuau

SEQ ID NO: 362804 - RNA, 32 nt, Human
ccacuuagauugagaauuuuauuugaaaagaa

SEQ ID NO: 362805 - RNA, 22 nt, Human
ccacuuaggauggcacagggug

SEQ ID NO: 362806 - RNA, 32 nt, Human
ccacuuaucucucacaaaauauauagacauuu

SEQ ID NO: 362807 - RNA, 32 nt, Human
ccacuuaucugaucagaacaaauguuuauuaa

SEQ ID NO: 362808 - RNA, 32 nt, Human
ccacuuauguagccuuuucccacuggggccgg

SEQ ID NO: 362809 - RNA, 32 nt, Human
ccacuuauugcacuccagcccgggcgacagag

SEQ ID NO: 362810 - RNA, 32 nt, Human
ccacuuauugcguguacacaaggccuggggca

SEQ ID NO: 362811 - RNA, 32 nt, Human
ccacuucaagaggcuggugcugcuagaucuca

SEQ ID NO: 362812 - RNA, 22 nt, Human
ccacuucacaaagaacugcugg

SEQ ID NO: 362813 - RNA, 32 nt, Human
ccacuucacaauauuugauauucaggagcauu

SEQ ID NO: 362814 - RNA, 31 nt, Human
ccacuucacagcuggagacaccggaguaugu

SEQ ID NO: 362815 - RNA, 31 nt, Human
ccacuucacagcugggaacugaggcucacag

SEQ ID NO: 362816 - RNA, 32 nt, Human
ccacuucacaguuucagauggagaacacacaa

SEQ ID NO: 362817 - RNA, 32 nt, Human
ccacuucacaugccguugacucucacagucua

SEQ ID NO: 362818 - RNA, 32 nt, Human
ccacuucacucugcuacuacucaacuuucucc

SEQ ID NO: 362819 - RNA, 32 nt, Human
ccacuucacuggcugcuccaugaauccagccc

SEQ ID NO: 362820 - RNA, 20 nt, Human
ccacuucagaagccuacugg

SEQ ID NO: 362821 - RNA, 32 nt, Human
ccacuucagcaacagcccuuuccccaggagaa

SEQ ID NO: 362822 - RNA, 20 nt, Human
ccacuucagcagcacugcca

SEQ ID NO: 362823 - RNA, 32 nt, Human
ccacuucagcagcacugccacugccuuuggcc

SEQ ID NO: 362824 - RNA, 32 nt, Human
ccacuucagccucccccacucuugccgccucc

SEQ ID NO: 362825 - RNA, 32 nt, Human
ccacuucagcuucugccagacagauggaacuc

SEQ ID NO: 362826 - RNA, 32 nt, Human
ccacuucaggggcaaacaucuccaucaucagc

SEQ ID NO: 362827 - RNA, 32 nt, Human
ccacuucauauucuucucacccagcacacucc

SEQ ID NO: 362828 - RNA, 32 nt, Human
ccacuuccaccccuugguaucuggacccacgu

SEQ ID NO: 362829 - RNA, 32 nt, Human
ccacuuccagaaccuaccccaagagcaagacu

SEQ ID NO: 362830 - RNA, 32 nt, Human
ccacuuccaggagcccagagggccaagagaga

SEQ ID NO: 362831 - RNA, 32 nt, Human
ccacuuccaggccagggugguggcuucucugc

SEQ ID NO: 362832 - RNA, 32 nt, Human
ccacuucccagaggcagagccugagucaccgg

SEQ ID NO: 362833 - RNA, 18 nt, Human
ccacuucccaggcugccu

SEQ ID NO: 362834 - RNA, 31 nt, Human
ccacuucccaucucugggccucgucuuuccu

SEQ ID NO: 362835 - RNA, 32 nt, Human
ccacuuccccuaugccucuccccacccaccau

SEQ ID NO: 362836 - RNA, 32 nt, Human
ccacuuccccuccaagacccuguguucauuug

SEQ ID NO: 362837 - RNA, 17 nt, Human
ccacuuccccucucuga

SEQ ID NO: 362838 - RNA, 32 nt, Human
ccacuucccuacucgcuacuacaacaaguauc

SEQ ID NO: 362839 - RNA, 32 nt, Human
ccacuucccucucuccccuggcccgcaaaguu

SEQ ID NO: 362840 - RNA, 32 nt, Human
ccacuucccuggcagguacaagggccaccuga

SEQ ID NO: 362841 - RNA, 32 nt, Human
ccacuuccuaacccagggacccugcacagcca

SEQ ID NO: 362842 - RNA, 32 nt, Human
ccacuuccuacuuccuccuuuagccuagcaga

SEQ ID NO: 362843 - RNA, 32 nt, Human
ccacuuccuccaccccaguggguaugucugag

SEQ ID NO: 362844 - RNA, 32 nt, Human
ccacuuccuccccuuucuacugcucucccauu

SEQ ID NO: 362845 - RNA, 32 nt, Human
ccacuuccucccuucccucauccugcauguuc

SEQ ID NO: 362846 - RNA, 32 nt, Human
ccacuuccucuccugagaccaggaacucagca

SEQ ID NO: 362847 - RNA, 32 nt, Human
ccacuuccugacuaaggagcugcagcgauaca

SEQ ID NO: 362848 - RNA, 32 nt, Human
ccacuuccuuucuacccugccugugcacagug

SEQ ID NO: 362849 - RNA, 32 nt, Human
ccacuucgagagcaagacagagcugcugccuu

SEQ ID NO: 362850 - RNA, 32 nt, Human
ccacuucggccuuccaaaguggccgcaaagug

SEQ ID NO: 362851 - RNA, 32 nt, Human
ccacuucgucuccugaaucuuguucugcugcc

SEQ ID NO: 362852 - RNA, 32 nt, Human
ccacuucuagcugcuucuccucuuguuucugc

SEQ ID NO: 362853 - RNA, 32 nt, Human
ccacuucuauuccuaaggucaccaagaauauc

SEQ ID NO: 362854 - RNA, 21 nt, Human
ccacuucucagccugguacuu

SEQ ID NO: 362855 - RNA, 18 nt, Human
ccacuucucagcucuccc

SEQ ID NO: 362856 - RNA, 32 nt, Human
ccacuucuccaacuucccuugagcugaaaaau

SEQ ID NO: 362857 - RNA, 32 nt, Human
ccacuucuccaccccaucaagacuucacaccu

SEQ ID NO: 362858 - RNA, 20 nt, Human
ccacuucucccugugaaagc

SEQ ID NO: 362859 - RNA, 32 nt, Human
ccacuucuccgugcaugacucugggugugagu

SEQ ID NO: 362860 - RNA, 32 nt, Human
ccacuucucugugucaucacacauacccacuu

SEQ ID NO: 362861 - RNA, 32 nt, Human
ccacuucucuucuguggccagaucuugaucau

SEQ ID NO: 362862 - RNA, 32 nt, Human
ccacuucugacaccuucuuucucucccguuuc

SEQ ID NO: 362863 - RNA, 20 nt, Human
ccacuucugaccuggggccu

SEQ ID NO: 362864 - RNA, 32 nt, Human
ccacuucugccagaggacacacacaugcacgc

SEQ ID NO: 362865 - RNA, 32 nt, Human
ccacuucugcugggcugaccugcagcggagag

SEQ ID NO: 362866 - RNA, 32 nt, Human
ccacuucuggagaggccucaggaagcuuccaa

SEQ ID NO: 362867 - RNA, 32 nt, Human
ccacuucuguauccucagagaugcugcgugga

SEQ ID NO: 362868 - RNA, 32 nt, Human
ccacuucuucacugagauaggagauguggaga

SEQ ID NO: 362869 - RNA, 32 nt, Human
ccacuucuuccuggaucaucucuccccaucac

SEQ ID NO: 362870 - RNA, 32 nt, Human
ccacuucuuccuugcgucucccugcaugcugc

SEQ ID NO: 362871 - RNA, 32 nt, Human
ccacuucuucuguuccaugagcugcagggcuu

SEQ ID NO: 362872 - RNA, 32 nt, Human
ccacuucuucuuucuucccuuuccuuccacgg

SEQ ID NO: 362873 - RNA, 32 nt, Human
ccacuugacuucagagcuuucucuccaaagac

SEQ ID NO: 362874 - RNA, 32 nt, Human
ccacuugagugccaccacgcccagcuaguuuu

SEQ ID NO: 362875 - RNA, 32 nt, Human
ccacuugcacacacgcacacacucaugcucac

SEQ ID NO: 362876 - RNA, 23 nt, Human
ccacuugcaccccaccccagcca

SEQ ID NO: 362877 - RNA, 32 nt, Human
ccacuugcagguuccagguuuuacuggcugca

SEQ ID NO: 362878 - RNA, 32 nt, Human
ccacuugcaugcuuccaagccuucaaaacaua

SEQ ID NO: 362879 - RNA, 32 nt, Human
ccacuugccaguuuaauuccagccuuacccau

SEQ ID NO: 362880 - RNA, 32 nt, Human
ccacuugccaucuuucucuauaucuccaguaa

SEQ ID NO: 362881 - RNA, 32 nt, Human
ccacuugcccugccgguuucuugguacuggga

SEQ ID NO: 362882 - RNA, 32 nt, Human
ccacuugcgccucuccagccuccgcaggccca

SEQ ID NO: 362883 - RNA, 32 nt, Human
ccacuugcuggagcugcuggaggcccuggggu

SEQ ID NO: 362884 - RNA, 32 nt, Human
ccacuuggagaaaguccggcuggagcugaccg

SEQ ID NO: 362885 - RNA, 32 nt, Human
ccacuuggagaucuuugcuuccuugcuuuuau

SEQ ID NO: 362886 - RNA, 32 nt, Human
ccacuuggcacccagagggggcugugggugga

SEQ ID NO: 362887 - RNA, 32 nt, Human
ccacuuggcccaggauguugaaagggugcaaa

SEQ ID NO: 362888 - RNA, 32 nt, Human
ccacuuggcucugucuacgggauuguaucaca

SEQ ID NO: 362889 - RNA, 32 nt, Human
ccacuugggaccagauguccagcuggagcaag

SEQ ID NO: 362890 - RNA, 32 nt, Human
ccacuugggaccccguucaggaccuuuugcag

SEQ ID NO: 362891 - RNA, 32 nt, Human
ccacuugggaggcugaggcaggagaaucgcuu

SEQ ID NO: 362892 - RNA, 32 nt, Human
ccacuugggaggcugaggcaggagaauugcuu

SEQ ID NO: 362893 - RNA, 32 nt, Human
ccacuugggaggcugaggugggaggaucgguu

SEQ ID NO: 362894 - RNA, 32 nt, Human
ccacuugggagucugaggcaggagaauggcgu

SEQ ID NO: 362895 - RNA, 32 nt, Human
ccacuuguaacuccagccugggcaacagagug

SEQ ID NO: 362896 - RNA, 32 nt, Human
ccacuugucauccauaaagcaagcucaaccuu

SEQ ID NO: 362897 - RNA, 32 nt, Human
ccacuugucccacgugccccagcagaguccca

SEQ ID NO: 362898 - RNA, 32 nt, Human
ccacuugucccucucccuccccaggacuucug

SEQ ID NO: 362899 - RNA, 32 nt, Human
ccacuugucuuuucugugaauuaugacuauuc

SEQ ID NO: 362900 - RNA, 32 nt, Human
ccacuugugcacacgaugggcaucuaacauca

SEQ ID NO: 362901 - RNA, 21 nt, Human
ccacuugugccuggggucccu

SEQ ID NO: 362902 - RNA, 32 nt, Human
ccacuugugcugccgccaugucucuagugauc

SEQ ID NO: 362903 - RNA, 32 nt, Human
ccacuuguuucuuuuaaaugcuuauuaaaagu

SEQ ID NO: 362904 - RNA, 32 nt, Human
ccacuuuaaauacuuuuaucuacugaaucgca

SEQ ID NO: 362905 - RNA, 23 nt, Human
ccacuuuaaguuuggcuagacuu

SEQ ID NO: 362906 - RNA, 32 nt, Human
ccacuuuagcaaacccugcugcagaggacugu

SEQ ID NO: 362907 - RNA, 32 nt, Human
ccacuuuagcuguuuugacuauuugaauuuuc

SEQ ID NO: 362908 - RNA, 32 nt, Human
ccacuuuagucccuggccaccagcacacccca

SEQ ID NO: 362909 - RNA, 32 nt, Human
ccacuuuagugacaaaacagcacuccacugcu

SEQ ID NO: 362910 - RNA, 32 nt, Human
ccacuuuauauccaccuuuuccuuuuguucaa

SEQ ID NO: 362911 - RNA, 32 nt, Human
ccacuuuauccagauccugcaguugaaggaag

SEQ ID NO: 362912 - RNA, 32 nt, Human
ccacuuucaagugacaauccucuccuuggccc

SEQ ID NO: 362913 - RNA, 31 nt, Human
ccacuuucaauaaagaccugacuuggagaca

SEQ ID NO: 362914 - RNA, 32 nt, Human
ccacuuucagccaggcuggagcaagguaccuu

SEQ ID NO: 362915 - RNA, 32 nt, Human
ccacuuuccaaauaaacuaaagccuggauuug

SEQ ID NO: 362916 - RNA, 20 nt, Human
ccacuuucccacacugugaa

SEQ ID NO: 362917 - RNA, 32 nt, Human
ccacuuucccccacccuucccacccucuagac

SEQ ID NO: 362918 - RNA, 32 nt, Human
ccacuuuccuucaugaacaucccccucccaac

SEQ ID NO: 362919 - RNA, 32 nt, Human
ccacuuucuagccagaggagagaggacccccu

SEQ ID NO: 362920 - RNA, 32 nt, Human
ccacuuucuccccugggggacguugguucaga

SEQ ID NO: 362921 - RNA, 32 nt, Human
ccacuuucucccuccuccuuuuccuguguucu

SEQ ID NO: 362922 - RNA, 32 nt, Human
ccacuuucuccuccccuuccugagccgcacuu

SEQ ID NO: 362923 - RNA, 32 nt, Human
ccacuuucucuucccucuacucacuauuuccc

SEQ ID NO: 362924 - RNA, 32 nt, Human
ccacuuucugccagcaucugcagccacuuucu

SEQ ID NO: 362925 - RNA, 32 nt, Human
ccacuuucuuauuggguugucuugcuuucuua

SEQ ID NO: 362926 - RNA, 17 nt, Human
ccacuuugacccucgac

SEQ ID NO: 362927 - RNA, 32 nt, Human
ccacuuugagggugagugccuccagcagaaac

SEQ ID NO: 362928 - RNA, 32 nt, Human
ccacuuugcaaaggagcucacuguggugucug

SEQ ID NO: 362929 - RNA, 32 nt, Human
ccacuuugcacuguuugggagacagaaaccug

SEQ ID NO: 362930 - RNA, 32 nt, Human
ccacuuugccacuccuaugguuuagggauuaa

SEQ ID NO: 362931 - RNA, 32 nt, Human
ccacuuugccucugcugcucugccagucugca

SEQ ID NO: 362932 - RNA, 32 nt, Human
ccacuuuggcacggaagccuuacagugugggg

SEQ ID NO: 362933 - RNA, 32 nt, Human
ccacuuuggcuuauaaaccacauguacaauau

SEQ ID NO: 362934 - RNA, 32 nt, Human
ccacuuuguccagauugggagaaguggaaauu

SEQ ID NO: 362935 - RNA, 18 nt, Human
ccacuuuguccugugaca

SEQ ID NO: 362936 - RNA, 32 nt, Human
ccacuuuguuacugguaccugauguacacgga

SEQ ID NO: 362937 - RNA, 21 nt, Human
ccacuuuuaauggguccucca

SEQ ID NO: 362938 - RNA, 32 nt, Human
ccacuuuuaccccucucuccccacuccucuuc

SEQ ID NO: 362939 - RNA, 32 nt, Human
ccacuuuuauuuccaagaggaggggcauucuu

SEQ ID NO: 362940 - RNA, 32 nt, Human
ccacuuuucaccgacacucuaagugacuagug

SEQ ID NO: 362941 - RNA, 32 nt, Human
ccacuuuucccagccaaguggugcuuucuucc

SEQ ID NO: 362942 - RNA, 32 nt, Human
ccacuuuucucccaggccucaguucugaagcu

SEQ ID NO: 362943 - RNA, 32 nt, Human
ccacuuuucuggaugagguguccccuuucucc

SEQ ID NO: 362944 - RNA, 32 nt, Human
ccacuuuucuuuccccuuccuuccuuccuuuu

SEQ ID NO: 362945 - RNA, 32 nt, Human
ccacuuuugcccaccucuucugcgugccccuc

SEQ ID NO: 362946 - RNA, 32 nt, Human
ccacuuuuuccaccugggguccaaugucgugg

SEQ ID NO: 362947 - RNA, 32 nt, Human
ccacuuuuuccagaucuuccucuugcucuuca

SEQ ID NO: 362948 - RNA, 32 nt, Human
ccacuuuuucuuucuuucuuucuuucuuucuu

SEQ ID NO: 362949 - RNA, 32 nt, Human
ccagaaaaacaguagcaguuuccugguccugu

SEQ ID NO: 362950 - RNA, 25 nt, Human
ccagaaaaaccaagaagacaggcac

SEQ ID NO: 362951 - RNA, 32 nt, Human
ccagaaaaaccagcuuaucaucuaucaagcuc

SEQ ID NO: 362952 - RNA, 32 nt, Human
ccagaaaaagauuuuguuuugcuuuaugaaaa

SEQ ID NO: 362953 - RNA, 26 nt, Human
ccagaaaaagguauggagcuaacuca

SEQ ID NO: 362954 - RNA, 32 nt, Human
ccagaaaaauauaugaaggagaggaggguaaa

SEQ ID NO: 362955 - RNA, 32 nt, Human
ccagaaaacaucugcucacuuccuucaaaaug

SEQ ID NO: 362956 - RNA, 32 nt, Human
ccagaaaagaaagcgcaaaagaauggugacuc

SEQ ID NO: 362957 - RNA, 32 nt, Human
ccagaaaagaagucuuaagauauuucaaggaa

SEQ ID NO: 362958 - RNA, 32 nt, Human
ccagaaaaggaagcuuuggagagaugggggaa

SEQ ID NO: 362959 - RNA, 32 nt, Human
ccagaaaaggaaggaaggauggagacggaaca

SEQ ID NO: 362960 - RNA, 32 nt, Human
ccagaaaaguagaaguggagauuaccugguau

SEQ ID NO: 362961 - RNA, 32 nt, Human
ccagaaaauacauguacagcagcuaagguugu

SEQ ID NO: 362962 - RNA, 32 nt, Human
ccagaaaauacugauguucacuuaaagauauu

SEQ ID NO: 362963 - RNA, 18 nt, Human
ccagaaaauuacuuugga

SEQ ID NO: 362964 - RNA, 32 nt, Human
ccagaaacaaagcagaucccagaucugaaaag

SEQ ID NO: 362965 - RNA, 32 nt, Human
ccagaaacacccugacaggcucagagaggaga

SEQ ID NO: 362966 - RNA, 18 nt, Human
ccagaaacaucucuggcc

SEQ ID NO: 362967 - RNA, 32 nt, Human
ccagaaaccagcuccaaacugguuguacuggu

SEQ ID NO: 362968 - RNA, 32 nt, Human
ccagaaacugcagaggacaugacaguguggca

SEQ ID NO: 362969 - RNA, 24 nt, Human
ccagaaagaacauuugaaucugga

SEQ ID NO: 362970 - RNA, 22 nt, Human
ccagaaagaccaccacuuugca

SEQ ID NO: 362971 - RNA, 32 nt, Human
ccagaaagagaaagacggagaggcagagaccc

SEQ ID NO: 362972 - RNA, 32 nt, Human
ccagaaagagauguccuuguggcugggggccc

SEQ ID NO: 362973 - RNA, 32 nt, Human
ccagaaagagccucuuguaacaaguauucaaa

SEQ ID NO: 362974 - RNA, 24 nt, Human
ccagaaagcggaaccucccgggcc

SEQ ID NO: 362975 - RNA, 32 nt, Human
ccagaaagcggaaccucccgggccagucgcgc

SEQ ID NO: 362976 - RNA, 32 nt, Human
ccagaaagcuccaggaaucgggaaagaagccc

SEQ ID NO: 362977 - RNA, 31 nt, Human
ccagaaaggaaacugacccucagcagcugcc

SEQ ID NO: 362978 - RNA, 32 nt, Human
ccagaaaggaagagcaucucugccauucgugu

SEQ ID NO: 362979 - RNA, 32 nt, Human
ccagaaaggaggcgaggaaggagggagugugu

SEQ ID NO: 362980 - RNA, 32 nt, Human
ccagaaaggcaccauuuugucgcggcugcccg

SEQ ID NO: 362981 - RNA, 22 nt, Human
ccagaaaggcugcacucuggga

SEQ ID NO: 362982 - RNA, 21 nt, Human
ccagaaagggaaggagagccg

SEQ ID NO: 362983 - RNA, 32 nt, Human
ccagaaagggauggcagccaggagggccuggg

SEQ ID NO: 362984 - RNA, 32 nt, Human
ccagaaagggcccucugcuguggucugaaccc

SEQ ID NO: 362985 - RNA, 32 nt, Human
ccagaaaggggcaggcugaggcugggggaggg

SEQ ID NO: 362986 - RNA, 18 nt, Human
ccagaaagggugcagugg

SEQ ID NO: 362987 - RNA, 31 nt, Human
ccagaaagugagagcuaaauggagaggcuga

SEQ ID NO: 362988 - RNA, 32 nt, Human
ccagaaagugauuaacuuuggccguugcaauc

SEQ ID NO: 362989 - RNA, 23 nt, Human
ccagaaaguggcaguugcaguga

SEQ ID NO: 362990 - RNA, 24 nt, Human
ccagaaaguggcaguugcagugag

SEQ ID NO: 362991 - RNA, 24 nt, Human
ccagaaaguugaggcugcagugag

SEQ ID NO: 362992 - RNA, 32 nt, Human
ccagaaauaagaagccaagggaaaaggagaaa

SEQ ID NO: 362993 - RNA, 32 nt, Human
ccagaaauacaacacacauauguuguauguuu

SEQ ID NO: 362994 - RNA, 25 nt, Human
ccagaaauacagcagccacuuugca

SEQ ID NO: 362995 - RNA, 32 nt, Human
ccagaaauaucuucacuugucauuguuauaua

SEQ ID NO: 362996 - RNA, 25 nt, Human
ccagaaaucagccugggagaagcug

SEQ ID NO: 362997 - RNA, 32 nt, Human
ccagaaaucaggggaaggagaccccuaucugu

SEQ ID NO: 362998 - RNA, 32 nt, Human
ccagaaauugacugagaaaaccaaaguaaaga

SEQ ID NO: 362999 - RNA, 32 nt, Human
ccagaaauugagcuucagaagauugaggauag

SEQ ID NO: 363000 - RNA, 32 nt, Human
ccagaaauuucuccuccaucugauuuugaaca

SEQ ID NO: 363001 - RNA, 32 nt, Human
ccagaaauuugagaccagccugggcaacauag

SEQ ID NO: 363002 - RNA, 32 nt, Human
ccagaaauuugucaguucaugcaguaggauaa

SEQ ID NO: 363003 - RNA, 24 nt, Human
ccagaacaaaaugacuccugauga

SEQ ID NO: 363004 - RNA, 32 nt, Human
ccagaacaaaccucuauauguugcugaaacac

SEQ ID NO: 363005 - RNA, 32 nt, Human
ccagaacaagcagagaggcugauuuuguccuu

SEQ ID NO: 363006 - RNA, 32 nt, Human
ccagaacacagugcucugucuccucccaccag

SEQ ID NO: 363007 - RNA, 16 nt, Human
ccagaacaccaccucu

SEQ ID NO: 363008 - RNA, 32 nt, Human
ccagaacaccuuuucuccugcaaaggaucaca

SEQ ID NO: 363009 - RNA, 32 nt, Human
ccagaacacuuaggagggugucuuuggaccaa

SEQ ID NO: 363010 - RNA, 32 nt, Human
ccagaacagcauaacaagggcaggucugacug

SEQ ID NO: 363011 - RNA, 32 nt, Human
ccagaacagcauggcccgaagcgugcggggcc

SEQ ID NO: 363012 - RNA, 32 nt, Human
ccagaacaggcagagacagggcacagucucua

SEQ ID NO: 363013 - RNA, 32 nt, Human
ccagaacaggcagucucacaagcacgcagcac

SEQ ID NO: 363014 - RNA, 32 nt, Human
ccagaacauaagcccugaagugggcaggggaa

SEQ ID NO: 363015 - RNA, 31 nt, Human
ccagaacauacuuauauguaaaguauuauuu

SEQ ID NO: 363016 - RNA, 32 nt, Human
ccagaacauuuacuucaacucuaccuuaguag

SEQ ID NO: 363017 - RNA, 32 nt, Human
ccagaacccaggaggcagagcuugcagugagc

SEQ ID NO: 363018 - RNA, 32 nt, Human
ccagaaccccugcaaaucacacaugaccuuug

SEQ ID NO: 363019 - RNA, 32 nt, Human
ccagaaccccugcgaaucacacaugaccuuug

SEQ ID NO: 363020 - RNA, 32 nt, Human
ccagaaccccuggcagccacagagcucaggcu

SEQ ID NO: 363021 - RNA, 20 nt, Human
ccagaacccgcagcuguggg

SEQ ID NO: 363022 - RNA, 32 nt, Human
ccagaaccgcgaccuccgcaaccuugagcggc

SEQ ID NO: 363023 - RNA, 32 nt, Human
ccagaaccuauugagcuugcagggaagccaag

SEQ ID NO: 363024 - RNA, 32 nt, Human
ccagaaccucacugcguccuccuccuccaaaa

SEQ ID NO: 363025 - RNA, 19 nt, Human
ccagaaccuggacugaaga

SEQ ID NO: 363026 - RNA, 32 nt, Human
ccagaaccuggacugaagaaccaccuagaaau

SEQ ID NO: 363027 - RNA, 32 nt, Human
ccagaaccuggcaccgagcgaugaggagucca

SEQ ID NO: 363028 - RNA, 32 nt, Human
ccagaaccugggagacagcuucucagcaagga

SEQ ID NO: 363029 - RNA, 32 nt, Human
ccagaaccuucucugacaccagccuggcgccc

SEQ ID NO: 363030 - RNA, 32 nt, Human
ccagaacgacggaggaaggggcggagagggac

SEQ ID NO: 363031 - RNA, 30 nt, Human
ccagaacgagaaaggaaaagacucauauca

SEQ ID NO: 363032 - RNA, 32 nt, Human
ccagaacuaaacccuuccuuucccucugaugg

SEQ ID NO: 363033 - RNA, 32 nt, Human
ccagaacuaaggcauuaaagaaaauagcaaau

SEQ ID NO: 363034 - RNA, 21 nt, Human
ccagaacuagugccucuguag

SEQ ID NO: 363035 - RNA, 20 nt, Human
ccagaacucagcagcuccau

SEQ ID NO: 363036 - RNA, 32 nt, Human
ccagaacucauuuugugccacccauuuaggua

SEQ ID NO: 363037 - RNA, 32 nt, Human
ccagaacucccacuuugcggugcucugguacg

SEQ ID NO: 363038 - RNA, 20 nt, Human
ccagaacucugggaagccaa

SEQ ID NO: 363039 - RNA, 21 nt, Human
ccagaacugaagaggaagcaa

SEQ ID NO: 363040 - RNA, 32 nt, Human
ccagaacugcagcccauccucgcugggcucuu

SEQ ID NO: 363041 - RNA, 32 nt, Human
ccagaacugcagcccauccucgcugggcuguc

SEQ ID NO: 363042 - RNA, 32 nt, Human
ccagaacugcagcccguccucccugggcuguc

SEQ ID NO: 363043 - RNA, 32 nt, Human
ccagaacugcagcccguccucgcuggguuguc

SEQ ID NO: 363044 - RNA, 22 nt, Human
ccagaacugccugccacaggug

SEQ ID NO: 363045 - RNA, 28 nt, Human
ccagaacugccuuuggcccuacggaugg

SEQ ID NO: 363046 - RNA, 32 nt, Human
ccagaacuguguccaagguuuccucagauuug

SEQ ID NO: 363047 - RNA, 32 nt, Human
ccagaacuugcuggaaaugugccuacaauggc

SEQ ID NO: 363048 - RNA, 32 nt, Human
ccagaacuugugcccucccuguccuuagccua

SEQ ID NO: 363049 - RNA, 22 nt, Human
ccagaacuuuuaacucuuccag

SEQ ID NO: 363050 - RNA, 32 nt, Human
ccagaacuuuucacagccucccccucuuucuu

SEQ ID NO: 363051 - RNA, 32 nt, Human
ccagaagaaaaagcgauagcaagagaaacugu

SEQ ID NO: 363052 - RNA, 19 nt, Human
ccagaagaacugagacaca

SEQ ID NO: 363053 - RNA, 32 nt, Human
ccagaagaagagaccugcaacugugagagucc

SEQ ID NO: 363054 - RNA, 21 nt, Human
ccagaagaaucucuacaggga

SEQ ID NO: 363055 - RNA, 22 nt, Human
ccagaagacaggcugcagugag

SEQ ID NO: 363056 - RNA, 32 nt, Human
ccagaagacauccagucccugacuccaccugc

SEQ ID NO: 363057 - RNA, 32 nt, Human
ccagaagacccaaaggagaguacugguuugug

SEQ ID NO: 363058 - RNA, 32 nt, Human
ccagaagacccaggcaguguagcgacagccuc

SEQ ID NO: 363059 - RNA, 21 nt, Human
ccagaagacguccccaacuca

SEQ ID NO: 363060 - RNA, 32 nt, Human
ccagaagagagacaacaaucacugcagucagc

SEQ ID NO: 363061 - RNA, 32 nt, Human
ccagaagagcccuuaugccccugggccgcgcu

SEQ ID NO: 363062 - RNA, 23 nt, Human
ccagaagagccuuguggaggccg

SEQ ID NO: 363063 - RNA, 32 nt, Human
ccagaagaggagagcaaaggagucaggaaugg

SEQ ID NO: 363064 - RNA, 18 nt, Human
ccagaagaggcaucucca

SEQ ID NO: 363065 - RNA, 32 nt, Human
ccagaagaucaugcagucaucagucccacgga

SEQ ID NO: 363066 - RNA, 32 nt, Human
ccagaagauuccagucuuaaagaaacagaagg

SEQ ID NO: 363067 - RNA, 32 nt, Human
ccagaagcaaacaauuugugggccagugucaa

SEQ ID NO: 363068 - RNA, 22 nt, Human
ccagaagcaacaucccaucucu

SEQ ID NO: 363069 - RNA, 32 nt, Human
ccagaagcaagaaaaguuucuucucuccccuc

SEQ ID NO: 363070 - RNA, 25 nt, Human
ccagaagcacugggaucacaggugu

SEQ ID NO: 363071 - RNA, 17 nt, Human
ccagaagcagaaucuca

SEQ ID NO: 363072 - RNA, 32 nt, Human
ccagaagcagaugccagcgccaugcuuccuau

SEQ ID NO: 363073 - RNA, 19 nt, Human
ccagaagcagggaugccau

SEQ ID NO: 363074 - RNA, 32 nt, Human
ccagaagcaucucaagugagaacagcagcaag

SEQ ID NO: 363075 - RNA, 20 nt, Human
ccagaagccagacccaggcc

SEQ ID NO: 363076 - RNA, 32 nt, Human
ccagaagccagccggcuggcagcccccaucug

SEQ ID NO: 363077 - RNA, 32 nt, Human
ccagaagccagccuuucgcucccggacccggc

SEQ ID NO: 363078 - RNA, 20 nt, Human
ccagaagccccagcucuggc

SEQ ID NO: 363079 - RNA, 32 nt, Human
ccagaagcccccagaggugacagcuucaccug

SEQ ID NO: 363080 - RNA, 23 nt, Human
ccagaagccccucaugccaagcc

SEQ ID NO: 363081 - RNA, 26 nt, Human
ccagaagccccuggacacuccgggcc

SEQ ID NO: 363082 - RNA, 32 nt, Human
ccagaagcucaagagcagccugggcaauacag

SEQ ID NO: 363083 - RNA, 22 nt, Human
ccagaagcugccagcccaggcc

SEQ ID NO: 363084 - RNA, 32 nt, Human
ccagaagcugccguagaaagccaugcgcuacu

SEQ ID NO: 363085 - RNA, 18 nt, Human
ccagaagcuggacugcag

SEQ ID NO: 363086 - RNA, 32 nt, Human
ccagaagcuggacugcaguccacggcaccacu

SEQ ID NO: 363087 - RNA, 32 nt, Human
ccagaagcuguuggagagacauucaggagaga

SEQ ID NO: 363088 - RNA, 24 nt, Human
ccagaagcuugaagcugcagugag

SEQ ID NO: 363089 - RNA, 27 nt, Human
ccagaaggaaugaaggccugcagugag

SEQ ID NO: 363090 - RNA, 32 nt, Human
ccagaaggagauuuaaccauaguagaaagaau

SEQ ID NO: 363091 - RNA, 32 nt, Human
ccagaaggaggcugaagaguugcugcccgacu

SEQ ID NO: 363092 - RNA, 32 nt, Human
ccagaaggauccaagacaaaacagaucugaau

SEQ ID NO: 363093 - RNA, 32 nt, Human
ccagaaggcacaagccucccacugccccuuuc

SEQ ID NO: 363094 - RNA, 24 nt, Human
ccagaaggcagagcuugcagugag

SEQ ID NO: 363095 - RNA, 24 nt, Human
ccagaaggcagagguugcagugag

SEQ ID NO: 363096 - RNA, 24 nt, Human
ccagaaggcagagguuguagugag

SEQ ID NO: 363097 - RNA, 32 nt, Human
ccagaaggcaggcaggaagagacagagaugga

SEQ ID NO: 363098 - RNA, 32 nt, Human
ccagaaggcaucugcagaugcccacacaggcc

SEQ ID NO: 363099 - RNA, 32 nt, Human
ccagaaggcccuuugcuuaguuucuugguacu

SEQ ID NO: 363100 - RNA, 23 nt, Human
ccagaaggcgaagguugcaguga

SEQ ID NO: 363101 - RNA, 24 nt, Human
ccagaaggcggaaguugcagugag

SEQ ID NO: 363102 - RNA, 23 nt, Human
ccagaaggcggagguugcaguga

SEQ ID NO: 363103 - RNA, 24 nt, Human
ccagaaggcggagguugcagugag

SEQ ID NO: 363104 - RNA, 32 nt, Human
ccagaaggcggggagagcagcagcggcccaag

SEQ ID NO: 363105 - RNA, 32 nt, Human
ccagaaggcugccugagggccucugaggccuc

SEQ ID NO: 363106 - RNA, 32 nt, Human
ccagaagggaagggaguucuuucacagcuuuc

SEQ ID NO: 363107 - RNA, 32 nt, Human
ccagaagggacuggccucugcccacaccuuga

SEQ ID NO: 363108 - RNA, 32 nt, Human
ccagaagggagagaggcagcaagucagaaagu

SEQ ID NO: 363109 - RNA, 32 nt, Human
ccagaagggccugaaggacgggauuauuuuau

SEQ ID NO: 363110 - RNA, 22 nt, Human
ccagaaggggggagggacaccg

SEQ ID NO: 363111 - RNA, 24 nt, Human
ccagaaggucgaggcugcagugag

SEQ ID NO: 363112 - RNA, 24 nt, Human
ccagaaggugcagguugcagugag

SEQ ID NO: 363113 - RNA, 23 nt, Human
ccagaagguggagguggcaguga

SEQ ID NO: 363114 - RNA, 32 nt, Human
ccagaagguggcugagggaacugaggccagca

SEQ ID NO: 363115 - RNA, 24 nt, Human
ccagaagguugagacugcagugag

SEQ ID NO: 363116 - RNA, 32 nt, Human
ccagaaguaagcucugcauguuccccuuccug

SEQ ID NO: 363117 - RNA, 32 nt, Human
ccagaagucaggccucaguauacaucagagaa

SEQ ID NO: 363118 - RNA, 32 nt, Human
ccagaagucauuguauucaaagaagaauaagc

SEQ ID NO: 363119 - RNA, 32 nt, Human
ccagaaguccccaggcaggaguguggugggac

SEQ ID NO: 363120 - RNA, 32 nt, Human
ccagaagucugaagacuuuuuccccaggacau

SEQ ID NO: 363121 - RNA, 32 nt, Human
ccagaagugagggcccagaggucugggucccc

SEQ ID NO: 363122 - RNA, 31 nt, Human
ccagaaguggagagagaaugagaccuggaga

SEQ ID NO: 363123 - RNA, 23 nt, Human
ccagaaguucaagguuacaguga

SEQ ID NO: 363124 - RNA, 32 nt, Human
ccagaaguucaagguuacagugaacuacgauu

SEQ ID NO: 363125 - RNA, 24 nt, Human
ccagaaguucaaguuugcagugag

SEQ ID NO: 363126 - RNA, 19 nt, Human
ccagaaguugcugcagugg

SEQ ID NO: 363127 - RNA, 32 nt, Human
ccagaaguuugagaccagccuaggcaacauug

SEQ ID NO: 363128 - RNA, 32 nt, Human
ccagaaguuugagaccagccugggcaacauag

SEQ ID NO: 363129 - RNA, 32 nt, Human
ccagaaguuugagacuagccugggcaauauga

SEQ ID NO: 363130 - RNA, 24 nt, Human
ccagaaguuugaggcugcagugag

SEQ ID NO: 363131 - RNA, 32 nt, Human
ccagaauaaagugagggaaaucaggucuuuau

SEQ ID NO: 363132 - RNA, 32 nt, Human
ccagaauagaagggagagagaaaacauuucua

SEQ ID NO: 363133 - RNA, 25 nt, Human
ccagaauagcugggauuacaggcgu

SEQ ID NO: 363134 - RNA, 32 nt, Human
ccagaauaucugauccauuuuaaugguuggaa

SEQ ID NO: 363135 - RNA, 32 nt, Human
ccagaauauguggggaaaaagggcuauugcua

SEQ ID NO: 363136 - RNA, 32 nt, Human
ccagaaucaaacuuuacuuccccaaauaagca

SEQ ID NO: 363137 - RNA, 32 nt, Human
ccagaaucccucagcugcacugaagacgagcc

SEQ ID NO: 363138 - RNA, 32 nt, Human
ccagaaucgguugcagaagaucaugggcaucu

SEQ ID NO: 363139 - RNA, 32 nt, Human
ccagaaucuauccugcaucgcagcccaccgug

SEQ ID NO: 363140 - RNA, 32 nt, Human
ccagaaucucaaggagcugcuggccgucaggg

SEQ ID NO: 363141 - RNA, 32 nt, Human
ccagaaucucgcucugcacuccagccuaggug

SEQ ID NO: 363142 - RNA, 32 nt, Human
ccagaaucuggaccccagagucuggaagcagg

SEQ ID NO: 363143 - RNA, 23 nt, Human
ccagaaucugggccaccccagca

SEQ ID NO: 363144 - RNA, 32 nt, Human
ccagaaugagacacaggaggagccacagccug

SEQ ID NO: 363145 - RNA, 32 nt, Human
ccagaaugcaggcauuucuguaccaaaaggca

SEQ ID NO: 363146 - RNA, 32 nt, Human
ccagaaugccaccaucccaccucugagacucc

SEQ ID NO: 363147 - RNA, 24 nt, Human
ccagaaugccaggauuacagaugu

SEQ ID NO: 363148 - RNA, 20 nt, Human
ccagaaugccuggacugcag

SEQ ID NO: 363149 - RNA, 32 nt, Human
ccagaaugccuggacugcaguggauguacccc

SEQ ID NO: 363150 - RNA, 24 nt, Human
ccagaaugcugggauuacaggcgu

SEQ ID NO: 363151 - RNA, 32 nt, Human
ccagaauggagaucuccucucaucagucucac

SEQ ID NO: 363152 - RNA, 21 nt, Human
ccagaauggccuggggcucag

SEQ ID NO: 363153 - RNA, 18 nt, Human
ccagaaugguagauccac

SEQ ID NO: 363154 - RNA, 32 nt, Human
ccagaaugugaagacaaguaguagaagaaaau

SEQ ID NO: 363155 - RNA, 32 nt, Human
ccagaaugugccacuugacuuaucuuuauugu

SEQ ID NO: 363156 - RNA, 32 nt, Human
ccagaauguucuggacaugcaccaccagccgg

SEQ ID NO: 363157 - RNA, 18 nt, Human
ccagaauguucugggaua

SEQ ID NO: 363158 - RNA, 32 nt, Human
ccagaauuacuggccaagaugccucagcucau

SEQ ID NO: 363159 - RNA, 22 nt, Human
ccagaauucacccacccgggcc

SEQ ID NO: 363160 - RNA, 32 nt, Human
ccagaauuggggucgccccuccccagccggac

SEQ ID NO: 363161 - RNA, 32 nt, Human
ccagaauugugacugaaguguacccagagaca

SEQ ID NO: 363162 - RNA, 32 nt, Human
ccagaauuuaaaccuauacucacuuucccaaa

SEQ ID NO: 363163 - RNA, 32 nt, Human
ccagaauuuauuuccacaucugcucuuucagu

SEQ ID NO: 363164 - RNA, 32 nt, Human
ccagaauuugacuugacgggauggcuuacaag

SEQ ID NO: 363165 - RNA, 32 nt, Human
ccagaauuugcucucccacucagugugcucug

SEQ ID NO: 363166 - RNA, 32 nt, Human
ccagaauuuguaacugagaagaucuuuucuuu

SEQ ID NO: 363167 - RNA, 32 nt, Human
ccagacaaaacaauuauguuacauuccucaaa

SEQ ID NO: 363168 - RNA, 20 nt, Human
ccagacaacaaaugaggaca

SEQ ID NO: 363169 - RNA, 25 nt, Human
ccagacaacaaucagaaccaaagca

SEQ ID NO: 363170 - RNA, 32 nt, Human
ccagacaacuuuguacucccaccacccccaau

SEQ ID NO: 363171 - RNA, 32 nt, Human
ccagacaagacccuggacagaggcuggugggg

SEQ ID NO: 363172 - RNA, 22 nt, Human
ccagacaagagcugggaggcaa

SEQ ID NO: 363173 - RNA, 21 nt, Human
ccagacaaggcacagaggcaa

SEQ ID NO: 363174 - RNA, 32 nt, Human
ccagacaaggcccacugcaguuccuauggcgc

SEQ ID NO: 363175 - RNA, 20 nt, Human
ccagacaauaaagggaccaa

SEQ ID NO: 363176 - RNA, 32 nt, Human
ccagacaaucaagcucuugagcacagguuuag

SEQ ID NO: 363177 - RNA, 32 nt, Human
ccagacaaucaaguucuugagcacagguuuag

SEQ ID NO: 363178 - RNA, 32 nt, Human
ccagacaaugauuuucucuuuauguacucugu

SEQ ID NO: 363179 - RNA, 32 nt, Human
ccagacacaggcagaccuggcgcucuugaccc

SEQ ID NO: 363180 - RNA, 19 nt, Human
ccagacacaggccgggaca

SEQ ID NO: 363181 - RNA, 32 nt, Human
ccagacacaggcuugggaaagacacgucaaaa

SEQ ID NO: 363182 - RNA, 32 nt, Human
ccagacacaggucccugagccuuggggagucc

SEQ ID NO: 363183 - RNA, 26 nt, Human
ccagacacaguaggacaaauauugua

SEQ ID NO: 363184 - RNA, 22 nt, Human
ccagacacagugcgguaccaga

SEQ ID NO: 363185 - RNA, 32 nt, Human
ccagacacauacaaguuccuauccugauucug

SEQ ID NO: 363186 - RNA, 21 nt, Human
ccagacacaucgcacugugga

SEQ ID NO: 363187 - RNA, 32 nt, Human
ccagacacauguccaagaagcccaggaaaggc

SEQ ID NO: 363188 - RNA, 21 nt, Human
ccagacacauguuucucccca

SEQ ID NO: 363189 - RNA, 32 nt, Human
ccagacaccacuguccauccugugaggcuccc

SEQ ID NO: 363190 - RNA, 32 nt, Human
ccagacacccacccucgcuucagccacaguuu

SEQ ID NO: 363191 - RNA, 18 nt, Human
ccagacacccaggacuua

SEQ ID NO: 363192 - RNA, 32 nt, Human
ccagacaccccugcucuaguccuugccacaca

SEQ ID NO: 363193 - RNA, 32 nt, Human
ccagacacccgcugccccagugccaccucacc

SEQ ID NO: 363194 - RNA, 32 nt, Human
ccagacacccuacacauauugccuccuauucu

SEQ ID NO: 363195 - RNA, 19 nt, Human
ccagacaccgguuuuccua

SEQ ID NO: 363196 - RNA, 32 nt, Human
ccagacaccuccggcccacacagccguucacc

SEQ ID NO: 363197 - RNA, 32 nt, Human
ccagacaccugcccuaauccucagccugcuca

SEQ ID NO: 363198 - RNA, 24 nt, Human
ccagacaccuugcucccucuccca

SEQ ID NO: 363199 - RNA, 32 nt, Human
ccagacacguagcugggcuggagaagcggcca

SEQ ID NO: 363200 - RNA, 32 nt, Human
ccagacacucuucuucucccaccucacucucc

SEQ ID NO: 363201 - RNA, 32 nt, Human
ccagacacugcacccugacuggggauccugug

SEQ ID NO: 363202 - RNA, 32 nt, Human
ccagacacugcacucaugcagcggaaaggaca

SEQ ID NO: 363203 - RNA, 32 nt, Human
ccagacacuuauuaacaaacuuuuauuacuag

SEQ ID NO: 363204 - RNA, 32 nt, Human
ccagacagagcaggugcggggaagggaagggc

SEQ ID NO: 363205 - RNA, 32 nt, Human
ccagacagagugcuaggcaugggggcagaggu

SEQ ID NO: 363206 - RNA, 32 nt, Human
ccagacagccucccccuguccccucuaugacc

SEQ ID NO: 363207 - RNA, 24 nt, Human
ccagacaggaaggagaagaggcag

SEQ ID NO: 363208 - RNA, 17 nt, Human
ccagacaggacugcaga

SEQ ID NO: 363209 - RNA, 23 nt, Human
ccagacaggaggagugggacaga

SEQ ID NO: 363210 - RNA, 32 nt, Human
ccagacaggaggaucacuuaagcgcagaagau

SEQ ID NO: 363211 - RNA, 32 nt, Human
ccagacaggaugaaagcguaggagaacuuucu

SEQ ID NO: 363212 - RNA, 32 nt, Human
ccagacaggcagcaggagucucggcugacaua

SEQ ID NO: 363213 - RNA, 32 nt, Human
ccagacaggggagcagaugagggaggagccuu

SEQ ID NO: 363214 - RNA, 32 nt, Human
ccagacagguuauguuaccugcagaggcugcc

SEQ ID NO: 363215 - RNA, 20 nt, Human
ccagacagucacuuuuccca

SEQ ID NO: 363216 - RNA, 32 nt, Human
ccagacagucuacaacugcccccuccagccca

SEQ ID NO: 363217 - RNA, 32 nt, Human
ccagacagugucgcuaagugcauuucacaguu

SEQ ID NO: 363218 - RNA, 32 nt, Human
ccagacaguguuggucaggauggcagaagaga

SEQ ID NO: 363219 - RNA, 32 nt, Human
ccagacauacaucccuccucugguaccacagu

SEQ ID NO: 363220 - RNA, 32 nt, Human
ccagacaucacugagccagagacuggagaugc

SEQ ID NO: 363221 - RNA, 32 nt, Human
ccagacaucugacuaauggcucugugccacac

SEQ ID NO: 363222 - RNA, 32 nt, Human
ccagacaucugcauguucuuguccucacuugc

SEQ ID NO: 363223 - RNA, 32 nt, Human
ccagacaugagagcccugcugggcuuucuggc

SEQ ID NO: 363224 - RNA, 32 nt, Human
ccagacaugcauaggaauggccacagguuuac

SEQ ID NO: 363225 - RNA, 18 nt, Human
ccagacaugccacuguga

SEQ ID NO: 363226 - RNA, 31 nt, Human
ccagacauggaggcccuuccuccagucagau

SEQ ID NO: 363227 - RNA, 32 nt, Human
ccagacaugguggcucacaccuguaaucccaa

SEQ ID NO: 363228 - RNA, 32 nt, Human
ccagacaugguggcucaugccuguaaucccag

SEQ ID NO: 363229 - RNA, 32 nt, Human
ccagacaugguggcucaugccuguaaucucag

SEQ ID NO: 363230 - RNA, 18 nt, Human
ccagacaugguuuuuccc

SEQ ID NO: 363231 - RNA, 32 nt, Human
ccagacauuuuaauagagauugcuugagccau

SEQ ID NO: 363232 - RNA, 32 nt, Human
ccagaccaagaguacaggaaaucaaauuguug

SEQ ID NO: 363233 - RNA, 31 nt, Human
ccagaccaauaaaauaccugguugaaauaca

SEQ ID NO: 363234 - RNA, 32 nt, Human
ccagaccaaugaacaguuucaggcuggcgugg

SEQ ID NO: 363235 - RNA, 32 nt, Human
ccagaccacaauauuucuucuuccucagggac

SEQ ID NO: 363236 - RNA, 32 nt, Human
ccagaccacaugcaguuuucaugcgucaugcu

SEQ ID NO: 363237 - RNA, 32 nt, Human
ccagaccaccggccaggagagaccuucucucc

SEQ ID NO: 363238 - RNA, 20 nt, Human
ccagaccaccuuuucuucca

SEQ ID NO: 363239 - RNA, 16 nt, Human
ccagaccacucaggug

SEQ ID NO: 363240 - RNA, 32 nt, Human
ccagaccacuccaagcugcuucuagagggacu

SEQ ID NO: 363241 - RNA, 32 nt, Human
ccagaccagacaccuggcagcccugccucaua

SEQ ID NO: 363242 - RNA, 23 nt, Human
ccagaccagagggacucagacac

SEQ ID NO: 363243 - RNA, 32 nt, Human
ccagaccagaguuugaugccagcagcuucggc

SEQ ID NO: 363244 - RNA, 32 nt, Human
ccagaccaggcuggccagcauggugaaacccc

SEQ ID NO: 363245 - RNA, 32 nt, Human
ccagaccagucucccaggaggcugaggcugcu

SEQ ID NO: 363246 - RNA, 32 nt, Human
ccagaccauagugaaaccgugucucuacaaaa

SEQ ID NO: 363247 - RNA, 32 nt, Human
ccagaccaucgauuucccguugcugaccucac

SEQ ID NO: 363248 - RNA, 32 nt, Human
ccagaccauuuuagaaaaagauaaaaaguuaa

SEQ ID NO: 363249 - RNA, 22 nt, Human
ccagacccaaaagcuuuuccua

SEQ ID NO: 363250 - RNA, 24 nt, Human
ccagacccaacaaaccuccagcca

SEQ ID NO: 363251 - RNA, 32 nt, Human
ccagacccaagugauccucccaccucagccuc

SEQ ID NO: 363252 - RNA, 32 nt, Human
ccagacccaccuggccccagagccucaugcca

SEQ ID NO: 363253 - RNA, 21 nt, Human
ccagacccaggacucugcgac

SEQ ID NO: 363254 - RNA, 32 nt, Human
ccagacccagggaccuggaguguguuuggacu

SEQ ID NO: 363255 - RNA, 32 nt, Human
ccagacccagggggaggaaggguggaggggcc

SEQ ID NO: 363256 - RNA, 32 nt, Human
ccagacccagguuuucuaguucagaagacuaa

SEQ ID NO: 363257 - RNA, 19 nt, Human
ccagacccaucccacucuc

SEQ ID NO: 363258 - RNA, 32 nt, Human
ccagacccaugaccaccucuggcucuacuauu

SEQ ID NO: 363259 - RNA, 32 nt, Human
ccagacccaugugauuucugcuuucuucuuua

SEQ ID NO: 363260 - RNA, 32 nt, Human
ccagaccccacucaaaacgauuuggucagguu

SEQ ID NO: 363261 - RNA, 32 nt, Human
ccagaccccagccuuucuccucaggccuaaga

SEQ ID NO: 363262 - RNA, 21 nt, Human
ccagaccccccuccccgcugc

SEQ ID NO: 363263 - RNA, 32 nt, Human
ccagaccccgagccaccccaggaaaagcacaa

SEQ ID NO: 363264 - RNA, 32 nt, Human
ccagaccccucccagcccucuccuccuguucc

SEQ ID NO: 363265 - RNA, 32 nt, Human
ccagaccccuccugacugggucccaaagccaa

SEQ ID NO: 363266 - RNA, 32 nt, Human
ccagaccccuucucccugaccuggcucuucca

SEQ ID NO: 363267 - RNA, 23 nt, Human
ccagacccgccaccgcacccgga

SEQ ID NO: 363268 - RNA, 32 nt, Human
ccagacccuaaaggggagcccuggaugcaguc

SEQ ID NO: 363269 - RNA, 32 nt, Human
ccagacccucgaggcugccacuccgucguggu

SEQ ID NO: 363270 - RNA, 18 nt, Human
ccagacccugcacuuuca

SEQ ID NO: 363271 - RNA, 32 nt, Human
ccagacccugccaucccucccacccccgacca

SEQ ID NO: 363272 - RNA, 32 nt, Human
ccagacccugcccagggacccccaucaccagc

SEQ ID NO: 363273 - RNA, 32 nt, Human
ccagacccugcucuccugcgagaugggauugg

SEQ ID NO: 363274 - RNA, 32 nt, Human
ccagacccuggacuuagccaccagagagcuac

SEQ ID NO: 363275 - RNA, 25 nt, Human
ccagacccuggcacccuccugagcc

SEQ ID NO: 363276 - RNA, 24 nt, Human
ccagaccgcacagaggccuggggc

SEQ ID NO: 363277 - RNA, 32 nt, Human
ccagaccgcagaguucaaggaggccuuccagc

SEQ ID NO: 363278 - RNA, 31 nt, Human
ccagaccgccucucuggaagguguuguaggc

SEQ ID NO: 363279 - RNA, 23 nt, Human
ccagaccgcggccuucaguguca

SEQ ID NO: 363280 - RNA, 20 nt, Human
ccagaccggagccgcaggcc

SEQ ID NO: 363281 - RNA, 32 nt, Human
ccagaccgugccagacccaggugccccagugc

SEQ ID NO: 363282 - RNA, 18 nt, Human
ccagaccgugggagagcc

SEQ ID NO: 363283 - RNA, 20 nt, Human
ccagaccuagaccugggcca

SEQ ID NO: 363284 - RNA, 32 nt, Human
ccagaccucaacagcacagagcacuuccaggc

SEQ ID NO: 363285 - RNA, 19 nt, Human
ccagaccucagagaucuca

SEQ ID NO: 363286 - RNA, 18 nt, Human
ccagaccuccacauuccc

SEQ ID NO: 363287 - RNA, 32 nt, Human
ccagaccucggcgauaagaggcugcacagcga

SEQ ID NO: 363288 - RNA, 21 nt, Human
ccagaccugaaguguuuucca

SEQ ID NO: 363289 - RNA, 19 nt, Human
ccagaccugcaaacguccc

SEQ ID NO: 363290 - RNA, 32 nt, Human
ccagaccugcaaacguccccuccuggaagggg

SEQ ID NO: 363291 - RNA, 19 nt, Human
ccagaccugcagacgccca

SEQ ID NO: 363292 - RNA, 22 nt, Human
ccagaccugcagacgcccagau

SEQ ID NO: 363293 - RNA, 32 nt, Human
ccagaccugcagccccagacccgccguaguau

SEQ ID NO: 363294 - RNA, 19 nt, Human
ccagaccugcauccuccua

SEQ ID NO: 363295 - RNA, 20 nt, Human
ccagaccugccccccacccg

SEQ ID NO: 363296 - RNA, 19 nt, Human
ccagaccugccccccugga

SEQ ID NO: 363297 - RNA, 17 nt, Human
ccagaccugcccucagg

SEQ ID NO: 363298 - RNA, 24 nt, Human
ccagaccugcccugcucugugaca

SEQ ID NO: 363299 - RNA, 18 nt, Human
ccagaccugccucuuccc

SEQ ID NO: 363300 - RNA, 32 nt, Human
ccagaccugccugccuuccugacuucuguucc

SEQ ID NO: 363301 - RNA, 32 nt, Human
ccagaccugcucaugaagaaggcuccucggug

SEQ ID NO: 363302 - RNA, 21 nt, Human
ccagaccugcuccuuugaccc

SEQ ID NO: 363303 - RNA, 32 nt, Human
ccagaccugcugcagggcuguggcuggagaaa

SEQ ID NO: 363304 - RNA, 32 nt, Human
ccagaccugggagcuccuugagcccgggcugu

SEQ ID NO: 363305 - RNA, 18 nt, Human
ccagaccugggauuccca

SEQ ID NO: 363306 - RNA, 32 nt, Human
ccagaccugggcaggcagcaggcucaggccca

SEQ ID NO: 363307 - RNA, 32 nt, Human
ccagaccuggggaccccaccuacacaggggca

SEQ ID NO: 363308 - RNA, 32 nt, Human
ccagaccuggggacugaguggggaaaggaguu

SEQ ID NO: 363309 - RNA, 18 nt, Human
ccagaccugugcuuccua

SEQ ID NO: 363310 - RNA, 18 nt, Human
ccagaccugugugcccca

SEQ ID NO: 363311 - RNA, 32 nt, Human
ccagaccuguucugaccucaugagugucaaac

SEQ ID NO: 363312 - RNA, 32 nt, Human
ccagaccuugaaaagaacaugcucaaaauaaa

SEQ ID NO: 363313 - RNA, 32 nt, Human
ccagaccuugacacaaaggacaucaaacugcc

SEQ ID NO: 363314 - RNA, 32 nt, Human
ccagaccuuggcugugccuccugcucucuuca

SEQ ID NO: 363315 - RNA, 32 nt, Human
ccagaccuuguucacacucucacauguuuaga

SEQ ID NO: 363316 - RNA, 23 nt, Human
ccagacgaagaacauuguguccu

SEQ ID NO: 363317 - RNA, 32 nt, Human
ccagacgagaggagagaaagagguagaauauu

SEQ ID NO: 363318 - RNA, 32 nt, Human
ccagacgagcaaggagacucauggucugguuc

SEQ ID NO: 363319 - RNA, 32 nt, Human
ccagacgaggaagguauccagccucaagucau

SEQ ID NO: 363320 - RNA, 32 nt, Human
ccagacgaggggaugcagcccagagccaguaa

SEQ ID NO: 363321 - RNA, 22 nt, Human
ccagacgauuucagugaccaaa

SEQ ID NO: 363322 - RNA, 32 nt, Human
ccagacgcagaggcagucccagcccgcgauga

SEQ ID NO: 363323 - RNA, 32 nt, Human
ccagacgcaguggcucacgccuguaaucccag

SEQ ID NO: 363324 - RNA, 32 nt, Human
ccagacgcaguggcucaugccuguaaucccag

SEQ ID NO: 363325 - RNA, 32 nt, Human
ccagacgcaguggcucaugccuguaauccuag

SEQ ID NO: 363326 - RNA, 32 nt, Human
ccagacgccaaugccuccuaagccaggagcug

SEQ ID NO: 363327 - RNA, 32 nt, Human
ccagacgccacaccugcugugucccgagaguc

SEQ ID NO: 363328 - RNA, 32 nt, Human
ccagacgccaggagaacugaucaaguccgaga

SEQ ID NO: 363329 - RNA, 15 nt, Human
ccagacgcccaccuc

SEQ ID NO: 363330 - RNA, 32 nt, Human
ccagacgccuggcugcugaucgccuuccccac

SEQ ID NO: 363331 - RNA, 19 nt, Human
ccagacgcgaguccugcgc

SEQ ID NO: 363332 - RNA, 32 nt, Human
ccagacgcgccaggccuggagauggcuggaaa

SEQ ID NO: 363333 - RNA, 20 nt, Human
ccagacgcgccgccgcugcc

SEQ ID NO: 363334 - RNA, 32 nt, Human
ccagacgcgcugcagccuccagcccgcggcaa

SEQ ID NO: 363335 - RNA, 32 nt, Human
ccagacgcgggcgccacaugcccagccuggga

SEQ ID NO: 363336 - RNA, 19 nt, Human
ccagacgcugccgcugccg

SEQ ID NO: 363337 - RNA, 32 nt, Human
ccagacgcuguggcucacaccuguaaucccag

SEQ ID NO: 363338 - RNA, 32 nt, Human
ccagacggacaagccuguguacagaccccagc

SEQ ID NO: 363339 - RNA, 32 nt, Human
ccagacggcugaaccccuggccccagagcccc

SEQ ID NO: 363340 - RNA, 24 nt, Human
ccagacggcugggauuccaggcgu

SEQ ID NO: 363341 - RNA, 32 nt, Human
ccagacggggcggcuggcugggcagaggggcu

SEQ ID NO: 363342 - RNA, 32 nt, Human
ccagacggggcuggagugugaggguccugcag

SEQ ID NO: 363343 - RNA, 32 nt, Human
ccagacgguagaacaaaaggaagaauauugau

SEQ ID NO: 363344 - RNA, 32 nt, Human
ccagacgguaucuccuggaugccagugagcgg

SEQ ID NO: 363345 - RNA, 32 nt, Human
ccagacggugaaggccaaccagcuggagcugg

SEQ ID NO: 363346 - RNA, 28 nt, Human
ccagacgucugugcugccugguuugcau

SEQ ID NO: 363347 - RNA, 32 nt, Human
ccagacgugauggcacauaccuguaauccaag

SEQ ID NO: 363348 - RNA, 32 nt, Human
ccagacgugguagcucacaccuguaaucccag

SEQ ID NO: 363349 - RNA, 32 nt, Human
ccagacgugguggcaugcgccuguaaucccag

SEQ ID NO: 363350 - RNA, 32 nt, Human
ccagacgugguggcgggcgccuguaaucccag

SEQ ID NO: 363351 - RNA, 32 nt, Human
ccagacgugguggcucacaccuguaaucccag

SEQ ID NO: 363352 - RNA, 32 nt, Human
ccagacgugguggugggugccuguaauccaac

SEQ ID NO: 363353 - RNA, 32 nt, Human
ccagacuaacuugggcaacacagggcgacccc

SEQ ID NO: 363354 - RNA, 20 nt, Human
ccagacuaacuuuacuguga

SEQ ID NO: 363355 - RNA, 32 nt, Human
ccagacuacagccugggugacagagugagauc

SEQ ID NO: 363356 - RNA, 32 nt, Human
ccagacucaagccauccucccaccucaaccuc

SEQ ID NO: 363357 - RNA, 32 nt, Human
ccagacucaagugauccuuccaccucagccuc

SEQ ID NO: 363358 - RNA, 32 nt, Human
ccagacucacacaucuuccuccaggucaggga

SEQ ID NO: 363359 - RNA, 32 nt, Human
ccagacucagagggcagcaggagcagcagcag

SEQ ID NO: 363360 - RNA, 32 nt, Human
ccagacucagauggugucucacuguggcaucc

SEQ ID NO: 363361 - RNA, 19 nt, Human
ccagacucaucccacucuc

SEQ ID NO: 363362 - RNA, 32 nt, Human
ccagacucauggccccagcugccuccugggcu

SEQ ID NO: 363363 - RNA, 32 nt, Human
ccagacuccaaagcccugguccuuuccugaug

SEQ ID NO: 363364 - RNA, 18 nt, Human
ccagacuccagaugucga

SEQ ID NO: 363365 - RNA, 20 nt, Human
ccagacuccaggccgccugc

SEQ ID NO: 363366 - RNA, 19 nt, Human
ccagacucccagcaggaca

SEQ ID NO: 363367 - RNA, 21 nt, Human
ccagacuccccaacugaaaca

SEQ ID NO: 363368 - RNA, 32 nt, Human
ccagacuccccaacugaaacaccagaagguuu

SEQ ID NO: 363369 - RNA, 32 nt, Human
ccagacuccuucccaucucuuuaguucuuccu

SEQ ID NO: 363370 - RNA, 19 nt, Human
ccagacuccuuuccucuga

SEQ ID NO: 363371 - RNA, 32 nt, Human
ccagacucgccacucucgaccagcacaagcuu

SEQ ID NO: 363372 - RNA, 32 nt, Human
ccagacucuccuccucuuaccuuugugccuug

SEQ ID NO: 363373 - RNA, 32 nt, Human
ccagacucuccucugaacucgggccucacaug

SEQ ID NO: 363374 - RNA, 32 nt, Human
ccagacucugagcugcucaccggagucauugg

SEQ ID NO: 363375 - RNA, 24 nt, Human
ccagacucugccaaaaccaagaua

SEQ ID NO: 363376 - RNA, 32 nt, Human
ccagacucugcucucccagcacugacucacuc

SEQ ID NO: 363377 - RNA, 32 nt, Human
ccagacucugucucccccuugaggucacagau

SEQ ID NO: 363378 - RNA, 32 nt, Human
ccagacucuuaguguugcguccugccuuguuu

SEQ ID NO: 363379 - RNA, 22 nt, Human
ccagacucuucacuccgcggca

SEQ ID NO: 363380 - RNA, 32 nt, Human
ccagacucuucaggacacuugcuccugcagca

SEQ ID NO: 363381 - RNA, 32 nt, Human
ccagacucuuccuagccuuucuaaaccaaagu

SEQ ID NO: 363382 - RNA, 32 nt, Human
ccagacucuuccuggacuggcuugccuccucc

SEQ ID NO: 363383 - RNA, 32 nt, Human
ccagacugaagcaggaggauugcuugggccca

SEQ ID NO: 363384 - RNA, 32 nt, Human
ccagacugaucuugagcuucugagcuccagcg

SEQ ID NO: 363385 - RNA, 18 nt, Human
ccagacugcagagcaaga

SEQ ID NO: 363386 - RNA, 32 nt, Human
ccagacugcagccuggcccauggcuguuuucc

SEQ ID NO: 363387 - RNA, 19 nt, Human
ccagacugcauucuggaua

SEQ ID NO: 363388 - RNA, 32 nt, Human
ccagacugccacugccccugucacugcaccca

SEQ ID NO: 363389 - RNA, 32 nt, Human
ccagacugccuucuguauuccccuguguacag

SEQ ID NO: 363390 - RNA, 32 nt, Human
ccagacugcguccuuuuuaagcgaacauuuua

SEQ ID NO: 363391 - RNA, 16 nt, Human
ccagacuggacugcag

SEQ ID NO: 363392 - RNA, 32 nt, Human
ccagacuggagugcaauggugcggucacagcu

SEQ ID NO: 363393 - RNA, 19 nt, Human
ccagacuggagugcagugg

SEQ ID NO: 363394 - RNA, 32 nt, Human
ccagacugggaaccaccaucugagacaggacc

SEQ ID NO: 363395 - RNA, 32 nt, Human
ccagacugggcaacauggugagacucugccuc

SEQ ID NO: 363396 - RNA, 32 nt, Human
ccagacugggcaauauagcaagaccccaucuc

SEQ ID NO: 363397 - RNA, 32 nt, Human
ccagacugggccaccaggaguucaagaccagc

SEQ ID NO: 363398 - RNA, 32 nt, Human
ccagacuggggaggggcagggggagaggcccc

SEQ ID NO: 363399 - RNA, 32 nt, Human
ccagacugggggcccuuccagacugggggccc

SEQ ID NO: 363400 - RNA, 32 nt, Human
ccagacugucuucaaauucuucugccuagccu

SEQ ID NO: 363401 - RNA, 32 nt, Human
ccagacugugaauccugugcucugcccgugac

SEQ ID NO: 363402 - RNA, 32 nt, Human
ccagacugugagcuccuugagggcagggacug

SEQ ID NO: 363403 - RNA, 32 nt, Human
ccagacuguguccuccaucaccgcagggucgg

SEQ ID NO: 363404 - RNA, 32 nt, Human
ccagacuuaacccagcagacacucugacauca

SEQ ID NO: 363405 - RNA, 32 nt, Human
ccagacuucauaccagcucccaacaccaugac

SEQ ID NO: 363406 - RNA, 32 nt, Human
ccagacuucauuuugacagcuaccuuagauca

SEQ ID NO: 363407 - RNA, 32 nt, Human
ccagacuucccuaaauucccugccuuacgguu

SEQ ID NO: 363408 - RNA, 20 nt, Human
ccagacuucgcccagcgaca

SEQ ID NO: 363409 - RNA, 19 nt, Human
ccagacuucgcuauuccca

SEQ ID NO: 363410 - RNA, 32 nt, Human
ccagacuucugucuuuucagcugcagugaagg

SEQ ID NO: 363411 - RNA, 32 nt, Human
ccagacuugcagcaucagagucuccugagucg

SEQ ID NO: 363412 - RNA, 32 nt, Human
ccagacuugccagaggggucucuccccauagc

SEQ ID NO: 363413 - RNA, 18 nt, Human
ccagacuuggggcuguga

SEQ ID NO: 363414 - RNA, 32 nt, Human
ccagacuugucacuauggagugucacagucuu

SEQ ID NO: 363415 - RNA, 20 nt, Human
ccagacuuuaauguuccucc

SEQ ID NO: 363416 - RNA, 32 nt, Human
ccagacuuuagcagccuccuguucccauucuu

SEQ ID NO: 363417 - RNA, 32 nt, Human
ccagacuuucaaggagauacugcagugaguuu

SEQ ID NO: 363418 - RNA, 32 nt, Human
ccagacuuucucaagcuccuccucacugcccu

SEQ ID NO: 363419 - RNA, 32 nt, Human
ccagacuuucugaaauagaucuaaauuuugcc

SEQ ID NO: 363420 - RNA, 32 nt, Human
ccagacuuugaauuaguaacagcucuaagaug

SEQ ID NO: 363421 - RNA, 32 nt, Human
ccagacuuugagccugcaucuucuugcaucua

SEQ ID NO: 363422 - RNA, 32 nt, Human
ccagacuuugggaggccgaggcaggcggauca

SEQ ID NO: 363423 - RNA, 32 nt, Human
ccagagaaaagagccucagcaagagaguuuug

SEQ ID NO: 363424 - RNA, 20 nt, Human
ccagagaaaaggaagcuguu

SEQ ID NO: 363425 - RNA, 32 nt, Human
ccagagaaaccagcuaaaucaugacaccuuca

SEQ ID NO: 363426 - RNA, 32 nt, Human
ccagagaaacuuuuguucuucucuccuuggcc

SEQ ID NO: 363427 - RNA, 32 nt, Human
ccagagaacagccuugaccagagauguggaga

SEQ ID NO: 363428 - RNA, 32 nt, Human
ccagagaacagcguggucacccugccaaggga

SEQ ID NO: 363429 - RNA, 32 nt, Human
ccagagaacccccaacccaccugucccuggga

SEQ ID NO: 363430 - RNA, 32 nt, Human
ccagagaacccuacugugucaugugagcaggc

SEQ ID NO: 363431 - RNA, 32 nt, Human
ccagagaacgcccucaucucuccucaccccug

SEQ ID NO: 363432 - RNA, 32 nt, Human
ccagagaagccaugggccaccugcucugugcc

SEQ ID NO: 363433 - RNA, 32 nt, Human
ccagagaagcugcagaagacacaggcagggag

SEQ ID NO: 363434 - RNA, 32 nt, Human
ccagagaagggccccacagcgcagcggcgggc

SEQ ID NO: 363435 - RNA, 32 nt, Human
ccagagaaggugcggggccagcugcuaugugg

SEQ ID NO: 363436 - RNA, 19 nt, Human
ccagagaagguuuuuccca

SEQ ID NO: 363437 - RNA, 32 nt, Human
ccagagacacgcgaccauguuggggcucuugg

SEQ ID NO: 363438 - RNA, 32 nt, Human
ccagagacaggaaaauccucuggcuggcuaac

SEQ ID NO: 363439 - RNA, 32 nt, Human
ccagagacaugagguccugcugggacaaguac

SEQ ID NO: 363440 - RNA, 32 nt, Human
ccagagacauugaaggaaaugauaauuccuug

SEQ ID NO: 363441 - RNA, 32 nt, Human
ccagagaccaccccgcuccuugcugcagcuga

SEQ ID NO: 363442 - RNA, 32 nt, Human
ccagagaccauuuauuauaaagcugcaaagaa

SEQ ID NO: 363443 - RNA, 18 nt, Human
ccagagacccaagccaag

SEQ ID NO: 363444 - RNA, 32 nt, Human
ccagagaccccaacucugcccuggcuucucug

SEQ ID NO: 363445 - RNA, 32 nt, Human
ccagagaccccaccccucauacccccagggac

SEQ ID NO: 363446 - RNA, 32 nt, Human
ccagagacccuucagugcuguguguuuuuccu

SEQ ID NO: 363447 - RNA, 32 nt, Human
ccagagacgaagaaagaguccugggauuugua

SEQ ID NO: 363448 - RNA, 32 nt, Human
ccagagacuacccuuuucuccauagacgugac

SEQ ID NO: 363449 - RNA, 32 nt, Human
ccagagacucuuuucagcagaaaguuaugcuu

SEQ ID NO: 363450 - RNA, 32 nt, Human
ccagagacugccagcauccccuccagggaagg

SEQ ID NO: 363451 - RNA, 24 nt, Human
ccagagacuuccuggucaauacuc

SEQ ID NO: 363452 - RNA, 32 nt, Human
ccagagagaaacagaagugcugaggggucgca

SEQ ID NO: 363453 - RNA, 17 nt, Human
ccagagagaccaccaaa

SEQ ID NO: 363454 - RNA, 21 nt, Human
ccagagagagggagcccugua

SEQ ID NO: 363455 - RNA, 32 nt, Human
ccagagagagugagagagauugacagagaaag

SEQ ID NO: 363456 - RNA, 25 nt, Human
ccagagagcagcccacgggcaucac

SEQ ID NO: 363457 - RNA, 32 nt, Human
ccagagagcccgaggaggugucucaggcugcc

SEQ ID NO: 363458 - RNA, 32 nt, Human
ccagagagcucccaaaugcagaaggauucaaa

SEQ ID NO: 363459 - RNA, 32 nt, Human
ccagagagcugaaccugcaucccggaccugcg

SEQ ID NO: 363460 - RNA, 32 nt, Human
ccagagaggaaggggcugcugaggucugaugg

SEQ ID NO: 363461 - RNA, 32 nt, Human
ccagagaggagaaaacccuuucaagggaaauu

SEQ ID NO: 363462 - RNA, 32 nt, Human
ccagagaggagccuauggaauguggaucaaau

SEQ ID NO: 363463 - RNA, 32 nt, Human
ccagagaggaugacccaggucuuguaguggca

SEQ ID NO: 363464 - RNA, 21 nt, Human
ccagagaggcagcuuuuccca

SEQ ID NO: 363465 - RNA, 32 nt, Human
ccagagaggcccagauggaggcuguucauucc

SEQ ID NO: 363466 - RNA, 19 nt, Human
ccagagaggcccuaggggc

SEQ ID NO: 363467 - RNA, 32 nt, Human
ccagagaggcugcaucagucucaggccccuaa

SEQ ID NO: 363468 - RNA, 32 nt, Human
ccagagaggcugcugcucauugagcugcacuc

SEQ ID NO: 363469 - RNA, 32 nt, Human
ccagagagugggggugaugaugaccaagaauu

SEQ ID NO: 363470 - RNA, 32 nt, Human
ccagagagugucacuccucuuugaagacgaug

SEQ ID NO: 363471 - RNA, 32 nt, Human
ccagagagugucuucgaggguaucaucauuuc

SEQ ID NO: 363472 - RNA, 32 nt, Human
ccagagauccccaucgaacugaaggaucacug

SEQ ID NO: 363473 - RNA, 32 nt, Human
ccagagaucucuguacuucaaggacagccuug

SEQ ID NO: 363474 - RNA, 32 nt, Human
ccagagaugccaccacuugugucuccacaaug

SEQ ID NO: 363475 - RNA, 32 nt, Human
ccagagaugccuguaauggugagacuuuggau

SEQ ID NO: 363476 - RNA, 21 nt, Human
ccagagauguaagacauguug

SEQ ID NO: 363477 - RNA, 32 nt, Human
ccagagauuucaucaagccauggauucuuggu

SEQ ID NO: 363478 - RNA, 32 nt, Human
ccagagcaacacagugagacccccaucucuac

SEQ ID NO: 363479 - RNA, 32 nt, Human
ccagagcaaggcuccugucacuccacucccug

SEQ ID NO: 363480 - RNA, 32 nt, Human
ccagagcaagugauccuggagcugcagccugc

SEQ ID NO: 363481 - RNA, 32 nt, Human
ccagagcacaagacugggggcaacuguagaug

SEQ ID NO: 363482 - RNA, 32 nt, Human
ccagagcaccugccugcccugccgaugugucc

SEQ ID NO: 363483 - RNA, 32 nt, Human
ccagagcacuccugccccuagccugggaccau

SEQ ID NO: 363484 - RNA, 32 nt, Human
ccagagcacucugcgcccccagccugccccag

SEQ ID NO: 363485 - RNA, 32 nt, Human
ccagagcacuuuacuccaggcagggccccugc

SEQ ID NO: 363486 - RNA, 32 nt, Human
ccagagcagaagcagggagaagggagugagga

SEQ ID NO: 363487 - RNA, 32 nt, Human
ccagagcagagaaacgccugaccugccugugu

SEQ ID NO: 363488 - RNA, 32 nt, Human
ccagagcagagcccaggaaucuggauuuugua

SEQ ID NO: 363489 - RNA, 32 nt, Human
ccagagcagagccccuuaccucccaggucaga

SEQ ID NO: 363490 - RNA, 32 nt, Human
ccagagcagagggucugaaaccuuagugagca

SEQ ID NO: 363491 - RNA, 32 nt, Human
ccagagcagcagagacagagccaggagcaguc

SEQ ID NO: 363492 - RNA, 32 nt, Human
ccagagcagccauggaggagguggugauugcc

SEQ ID NO: 363493 - RNA, 32 nt, Human
ccagagcagccccgcaccacccucgagcuuca

SEQ ID NO: 363494 - RNA, 32 nt, Human
ccagagcaggcagagggaaugacguggcaauu

SEQ ID NO: 363495 - RNA, 32 nt, Human
ccagagcagggcuggagggaaggagccaggag

SEQ ID NO: 363496 - RNA, 32 nt, Human
ccagagcagggugagcuggagcggcuguccau

SEQ ID NO: 363497 - RNA, 32 nt, Human
ccagagcaggguggacaggagagaccugaauc

SEQ ID NO: 363498 - RNA, 32 nt, Human
ccagagcaggguggcgcaggagcuggcaagac

SEQ ID NO: 363499 - RNA, 32 nt, Human
ccagagcagugcacuccagucugcagguacug

SEQ ID NO: 363500 - RNA, 32 nt, Human
ccagagcauugacuuccucuuccuagacuuga

SEQ ID NO: 363501 - RNA, 32 nt, Human
ccagagccaaagcuggagcccagaccguagcu

SEQ ID NO: 363502 - RNA, 32 nt, Human
ccagagccaagcggcggcagagcgaggggcau

SEQ ID NO: 363503 - RNA, 32 nt, Human
ccagagccaaugaggucaucucauccuugagg

SEQ ID NO: 363504 - RNA, 32 nt, Human
ccagagccacauccuuuaucgaggaagcuggg

SEQ ID NO: 363505 - RNA, 32 nt, Human
ccagagccacaugugcucaucaaacuugcauu

SEQ ID NO: 363506 - RNA, 32 nt, Human
ccagagccacuagcaaucucacccuaagagga

SEQ ID NO: 363507 - RNA, 20 nt, Human
ccagagccagcuagcccaca

SEQ ID NO: 363508 - RNA, 18 nt, Human
ccagagccaggagaguug

SEQ ID NO: 363509 - RNA, 21 nt, Human
ccagagccagggagccccaua

SEQ ID NO: 363510 - RNA, 32 nt, Human
ccagagccagggagcccuuagccucaacucug

SEQ ID NO: 363511 - RNA, 21 nt, Human
ccagagccaggggacagguug

SEQ ID NO: 363512 - RNA, 32 nt, Human
ccagagccauggacucuacacugugaacuugg

SEQ ID NO: 363513 - RNA, 32 nt, Human
ccagagcccacccucccaagcucaggggcauc

SEQ ID NO: 363514 - RNA, 32 nt, Human
ccagagcccaccuccccaacaugugaagacag

SEQ ID NO: 363515 - RNA, 32 nt, Human
ccagagcccacuccaacuucggauccaaguug

SEQ ID NO: 363516 - RNA, 32 nt, Human
ccagagcccaggacacagcaguagacuggggc

SEQ ID NO: 363517 - RNA, 32 nt, Human
ccagagcccaggacugagggcuccucccgggc

SEQ ID NO: 363518 - RNA, 28 nt, Human
ccagagcccaggcuggccucaucugcac

SEQ ID NO: 363519 - RNA, 32 nt, Human
ccagagcccaggcugggcgcccaugcccagaa

SEQ ID NO: 363520 - RNA, 32 nt, Human
ccagagccccucugccccuccugccgacguca

SEQ ID NO: 363521 - RNA, 32 nt, Human
ccagagccccugccugccccaggggagccaga

SEQ ID NO: 363522 - RNA, 32 nt, Human
ccagagcccgggccuauuuugccaucucaguu

SEQ ID NO: 363523 - RNA, 32 nt, Human
ccagagcccuggauggugaugcgcuggcuggg

SEQ ID NO: 363524 - RNA, 32 nt, Human
ccagagcccuucggaaccucccgagagauggu

SEQ ID NO: 363525 - RNA, 20 nt, Human
ccagagccgcccgcgccgcc

SEQ ID NO: 363526 - RNA, 32 nt, Human
ccagagccgggacggcagcccaggcgcccggg

SEQ ID NO: 363527 - RNA, 32 nt, Human
ccagagccucaaggggcccagccacgucaaac

SEQ ID NO: 363528 - RNA, 32 nt, Human
ccagagccuccaaagagagcugaggggaugug

SEQ ID NO: 363529 - RNA, 32 nt, Human
ccagagccuccaggagccaggccuuuggacaa

SEQ ID NO: 363530 - RNA, 32 nt, Human
ccagagccuccaggagccaggccuuuggacac

SEQ ID NO: 363531 - RNA, 32 nt, Human
ccagagccuccccucuucuuguccuucagcca

SEQ ID NO: 363532 - RNA, 32 nt, Human
ccagagccucugcgccuccacagggaaaaggc

SEQ ID NO: 363533 - RNA, 32 nt, Human
ccagagccugagccacugcgccccgccagacg

SEQ ID NO: 363534 - RNA, 32 nt, Human
ccagagccugaguacaguuuccuuccaaaugg

SEQ ID NO: 363535 - RNA, 32 nt, Human
ccagagccuggggcuccugggcugcagaccug

SEQ ID NO: 363536 - RNA, 32 nt, Human
ccagagccuucucuucacauaaugggacaugc

SEQ ID NO: 363537 - RNA, 20 nt, Human
ccagagccuugcagagccag

SEQ ID NO: 363538 - RNA, 32 nt, Human
ccagagccuuucucugccaucagcccuacguc

SEQ ID NO: 363539 - RNA, 32 nt, Human
ccagagcgauguucccgcagagccggcacccg

SEQ ID NO: 363540 - RNA, 32 nt, Human
ccagagcggcagcccccggccucagaggcuau

SEQ ID NO: 363541 - RNA, 24 nt, Human
ccagagcuaaccugggaggugcug

SEQ ID NO: 363542 - RNA, 21 nt, Human
ccagagcuaagcauuuuccca

SEQ ID NO: 363543 - RNA, 32 nt, Human
ccagagcuacucuugcuaucaacucgccgcau

SEQ ID NO: 363544 - RNA, 32 nt, Human
ccagagcuagcgccuguggcucccgggcuggu

SEQ ID NO: 363545 - RNA, 32 nt, Human
ccagagcuaguugcugucugguguuugcuggu

SEQ ID NO: 363546 - RNA, 32 nt, Human
ccagagcucacugagccuccaccuggggucuc

SEQ ID NO: 363547 - RNA, 32 nt, Human
ccagagcucacugucuagcccagggugacaca

SEQ ID NO: 363548 - RNA, 20 nt, Human
ccagagcucagagcuaacca

SEQ ID NO: 363549 - RNA, 32 nt, Human
ccagagcucaggaagccaggcuggaggaagag

SEQ ID NO: 363550 - RNA, 32 nt, Human
ccagagcuccaaggacagccugaagaucucag

SEQ ID NO: 363551 - RNA, 32 nt, Human
ccagagcucccaagccccugcccgccacaucu

SEQ ID NO: 363552 - RNA, 32 nt, Human
ccagagcuccuauagggcaagacacuguuucu

SEQ ID NO: 363553 - RNA, 32 nt, Human
ccagagcuccucuccagucaaggcuguugggc

SEQ ID NO: 363554 - RNA, 32 nt, Human
ccagagcuccuggaggaaaggcagucgggacu

SEQ ID NO: 363555 - RNA, 32 nt, Human
ccagagcuccuugccaucugcuaagaagacug

SEQ ID NO: 363556 - RNA, 19 nt, Human
ccagagcucgggagaugcc

SEQ ID NO: 363557 - RNA, 32 nt, Human
ccagagcucgggaggaaggcaaagaggggaag

SEQ ID NO: 363558 - RNA, 32 nt, Human
ccagagcucuacaaggaauucuggccugacuc

SEQ ID NO: 363559 - RNA, 32 nt, Human
ccagagcucuccagagaugagccuccccuauc

SEQ ID NO: 363560 - RNA, 32 nt, Human
ccagagcugaagcagaacauuccagaacccgu

SEQ ID NO: 363561 - RNA, 20 nt, Human
ccagagcugaauaacauguu

SEQ ID NO: 363562 - RNA, 32 nt, Human
ccagagcugcagugggcagccuaggagugcca

SEQ ID NO: 363563 - RNA, 32 nt, Human
ccagagcugccagagaaaggaaaccucuuccc

SEQ ID NO: 363564 - RNA, 20 nt, Human
ccagagcugcccaccuccca

SEQ ID NO: 363565 - RNA, 32 nt, Human
ccagagcugcccucagcauccgggccgggacc

SEQ ID NO: 363566 - RNA, 18 nt, Human
ccagagcugccucuggga

SEQ ID NO: 363567 - RNA, 32 nt, Human
ccagagcugccucugggaagucugcaguaguu

SEQ ID NO: 363568 - RNA, 32 nt, Human
ccagagcugcugcugcucacugccaguccuug

SEQ ID NO: 363569 - RNA, 32 nt, Human
ccagagcugcuggcuccccuguuuacucugag

SEQ ID NO: 363570 - RNA, 32 nt, Human
ccagagcugcuucacauaucucaaccggccuc

SEQ ID NO: 363571 - RNA, 32 nt, Human
ccagagcugcuuguggguuucugggguggaag

SEQ ID NO: 363572 - RNA, 18 nt, Human
ccagagcuggacgugcug

SEQ ID NO: 363573 - RNA, 32 nt, Human
ccagagcuuccagauggaggugaugaugauga

SEQ ID NO: 363574 - RNA, 32 nt, Human
ccagagcuucuccaggaggccaagcagaggcu

SEQ ID NO: 363575 - RNA, 32 nt, Human
ccagaggaacacacccacaccaggccucagga

SEQ ID NO: 363576 - RNA, 32 nt, Human
ccagaggaacagcuucauucagagcaggggca

SEQ ID NO: 363577 - RNA, 32 nt, Human
ccagaggaagggacaccaagccuuggcucuac

SEQ ID NO: 363578 - RNA, 16 nt, Human
ccagaggaaggugcug

SEQ ID NO: 363579 - RNA, 32 nt, Human
ccagaggaaguggcagauuucucagugaauuu

SEQ ID NO: 363580 - RNA, 32 nt, Human
ccagaggacacacacaugcacgcaugcuguau

SEQ ID NO: 363581 - RNA, 32 nt, Human
ccagaggaccagccugggagaggcuuucuagc

SEQ ID NO: 363582 - RNA, 32 nt, Human
ccagaggacuccugcccugccacacccuggac

SEQ ID NO: 363583 - RNA, 32 nt, Human
ccagaggacugaccacagccuggcuggcagcu

SEQ ID NO: 363584 - RNA, 32 nt, Human
ccagaggagacgaacccaggagaguagcuggg

SEQ ID NO: 363585 - RNA, 32 nt, Human
ccagaggagagcugaagagaggagggggaggc

SEQ ID NO: 363586 - RNA, 32 nt, Human
ccagaggagaggggcaguguucccacccaccu

SEQ ID NO: 363587 - RNA, 32 nt, Human
ccagaggagaguggggugggucuggaaacccc

SEQ ID NO: 363588 - RNA, 32 nt, Human
ccagaggagcaauagcccugggccacaagcgu

SEQ ID NO: 363589 - RNA, 22 nt, Human
ccagaggagccccgccccugua

SEQ ID NO: 363590 - RNA, 32 nt, Human
ccagaggagcuccuuuccccagcaggccucac

SEQ ID NO: 363591 - RNA, 32 nt, Human
ccagaggaggagggcaaaggggcagaugcugc

SEQ ID NO: 363592 - RNA, 32 nt, Human
ccagaggaggcagcgggauuguaguggcgcgc

SEQ ID NO: 363593 - RNA, 32 nt, Human
ccagaggaggcaggcgagugagcgaguccgag

SEQ ID NO: 363594 - RNA, 32 nt, Human
ccagaggaggcagggguaggaaagcucuuggc

SEQ ID NO: 363595 - RNA, 24 nt, Human
ccagaggaggccacagaccccuca

SEQ ID NO: 363596 - RNA, 21 nt, Human
ccagaggaggcgagggacaga

SEQ ID NO: 363597 - RNA, 32 nt, Human
ccagaggaggcggaagaggagcccgagccugg

SEQ ID NO: 363598 - RNA, 32 nt, Human
ccagaggagggaggggcacagugaagaaggga

SEQ ID NO: 363599 - RNA, 32 nt, Human
ccagaggaggguggggucagggccgccccuuc

SEQ ID NO: 363600 - RNA, 32 nt, Human
ccagaggaguacggauuaaggggccgaagaaa

SEQ ID NO: 363601 - RNA, 32 nt, Human
ccagaggaguuucuuaaugagauauuuguauu

SEQ ID NO: 363602 - RNA, 32 nt, Human
ccagaggauaagccacugggcacugggcuggg

SEQ ID NO: 363603 - RNA, 32 nt, Human
ccagaggaucaccagugcauccuucaucacag

SEQ ID NO: 363604 - RNA, 32 nt, Human
ccagaggauuauuuuccugccuuggcagagga

SEQ ID NO: 363605 - RNA, 32 nt, Human
ccagaggauugcuucaucugauacguaggccu

SEQ ID NO: 363606 - RNA, 32 nt, Human
ccagaggcaaaguggaccuggcaaccacaaga

SEQ ID NO: 363607 - RNA, 32 nt, Human
ccagaggcacaagaggaggacaucccaugcgg

SEQ ID NO: 363608 - RNA, 19 nt, Human
ccagaggcacuuccaccuu

SEQ ID NO: 363609 - RNA, 22 nt, Human
ccagaggcagagguugcaauga

SEQ ID NO: 363610 - RNA, 23 nt, Human
ccagaggcagagguugcaaugag

SEQ ID NO: 363611 - RNA, 19 nt, Human
ccagaggcagagguugcag

SEQ ID NO: 363612 - RNA, 23 nt, Human
ccagaggcagagguugcagugag

SEQ ID NO: 363613 - RNA, 23 nt, Human
ccagaggcagagguugcggugag

SEQ ID NO: 363614 - RNA, 32 nt, Human
ccagaggcagcuccagccugggggacagguga

SEQ ID NO: 363615 - RNA, 32 nt, Human
ccagaggcagcugccaccgugcccucagccga

SEQ ID NO: 363616 - RNA, 32 nt, Human
ccagaggcaggcggagguugaagaaaggaacc

SEQ ID NO: 363617 - RNA, 32 nt, Human
ccagaggccacacuccgccuugcucagccccu

SEQ ID NO: 363618 - RNA, 32 nt, Human
ccagaggccacugaagaugguaggcaggauuc

SEQ ID NO: 363619 - RNA, 32 nt, Human
ccagaggccacugcaccugggcuaggggucca

SEQ ID NO: 363620 - RNA, 32 nt, Human
ccagaggccagaauggugggaaagacagaucc

SEQ ID NO: 363621 - RNA, 32 nt, Human
ccagaggccauggagcugagauugagacuagc

SEQ ID NO: 363622 - RNA, 32 nt, Human
ccagaggcccaaugcuggaauggcaccaucau

SEQ ID NO: 363623 - RNA, 32 nt, Human
ccagaggccccaggcucugugcugaugaacag

SEQ ID NO: 363624 - RNA, 32 nt, Human
ccagaggcccccacuuuccuaacucgugcucc

SEQ ID NO: 363625 - RNA, 32 nt, Human
ccagaggccugcagccucccacaugccuuaag

SEQ ID NO: 363626 - RNA, 32 nt, Human
ccagaggccugcugcagauggggaagagcugg

SEQ ID NO: 363627 - RNA, 32 nt, Human
ccagaggccuggcucaaggugaccucaccuuc

SEQ ID NO: 363628 - RNA, 32 nt, Human
ccagaggccugggugggaggggaccaagggug

SEQ ID NO: 363629 - RNA, 32 nt, Human
ccagaggcgcccagcaccuggagcucacugga

SEQ ID NO: 363630 - RNA, 22 nt, Human
ccagaggcggagguugcaguga

SEQ ID NO: 363631 - RNA, 23 nt, Human
ccagaggcggagguugcagugag

SEQ ID NO: 363632 - RNA, 23 nt, Human
ccagaggcggagguuguagugag

SEQ ID NO: 363633 - RNA, 18 nt, Human
ccagaggcggcagcccac

SEQ ID NO: 363634 - RNA, 32 nt, Human
ccagaggcgggcagggcagacugacggacgga

SEQ ID NO: 363635 - RNA, 32 nt, Human
ccagaggcgggcccugagccggcaccuccccu

SEQ ID NO: 363636 - RNA, 32 nt, Human
ccagaggcgguggagaggaggaaggggcgggg

SEQ ID NO: 363637 - RNA, 32 nt, Human
ccagaggcucaggccugggucuaaggggcacg

SEQ ID NO: 363638 - RNA, 23 nt, Human
ccagaggcugcaggacugggcac

SEQ ID NO: 363639 - RNA, 32 nt, Human
ccagaggcuggcagagggaaagggguacacug

SEQ ID NO: 363640 - RNA, 32 nt, Human
ccagaggcuuggucccacaggccagggaccaa

SEQ ID NO: 363641 - RNA, 32 nt, Human
ccagagggaacaguaacagcccaggggccuuu

SEQ ID NO: 363642 - RNA, 32 nt, Human
ccagagggaaggcagaaggagaugagggugau

SEQ ID NO: 363643 - RNA, 32 nt, Human
ccagagggagagaggacucuggaccuaggaaa

SEQ ID NO: 363644 - RNA, 20 nt, Human
ccagagggagcacagcccua

SEQ ID NO: 363645 - RNA, 21 nt, Human
ccagagggagguagagagccc

SEQ ID NO: 363646 - RNA, 24 nt, Human
ccagagggaugcaggagcccuaua

SEQ ID NO: 363647 - RNA, 32 nt, Human
ccagagggcccagccccagcuguugccuggcu

SEQ ID NO: 363648 - RNA, 20 nt, Human
ccagagggccccgcccagug

SEQ ID NO: 363649 - RNA, 32 nt, Human
ccagagggccugcuucccaugggcauugcaag

SEQ ID NO: 363650 - RNA, 32 nt, Human
ccagaggggagaggagagagccuggacagccu

SEQ ID NO: 363651 - RNA, 22 nt, Human
ccagaggggaggcucugggaca

SEQ ID NO: 363652 - RNA, 32 nt, Human
ccagaggggcagcuccaguacaggcagcggca

SEQ ID NO: 363653 - RNA, 32 nt, Human
ccagagggggcaggcaccagccaggguaugau

SEQ ID NO: 363654 - RNA, 32 nt, Human
ccagaggggucugaagcuguuugggaaagcag

SEQ ID NO: 363655 - RNA, 32 nt, Human
ccagaggggugggucagagcaguggaggggag

SEQ ID NO: 363656 - RNA, 32 nt, Human
ccagaggguccccagggacucugcaguguccu

SEQ ID NO: 363657 - RNA, 32 nt, Human
ccagaggguccucagcccuccugccugggcua

SEQ ID NO: 363658 - RNA, 32 nt, Human
ccagaggguggaaggagccaggacgcaccccc

SEQ ID NO: 363659 - RNA, 23 nt, Human
ccagaggucaagacugcagugag

SEQ ID NO: 363660 - RNA, 23 nt, Human
ccagaggucaaggcugcagugag

SEQ ID NO: 363661 - RNA, 19 nt, Human
ccagaggucagcauucuca

SEQ ID NO: 363662 - RNA, 32 nt, Human
ccagaggugaagcugcccagggcuccggaggu

SEQ ID NO: 363663 - RNA, 32 nt, Human
ccagaggugaaggagucagagaggcgacagga

SEQ ID NO: 363664 - RNA, 20 nt, Human
ccagagguggagguugcagu

SEQ ID NO: 363665 - RNA, 23 nt, Human
ccagagguggagguugcagugag

SEQ ID NO: 363666 - RNA, 32 nt, Human
ccagagguggcacaauggagcgaucuccagga

SEQ ID NO: 363667 - RNA, 32 nt, Human
ccagagguggcccuuguuuacagugaggacuc

SEQ ID NO: 363668 - RNA, 32 nt, Human
ccagagguggcugagccccaggagaggggacc

SEQ ID NO: 363669 - RNA, 22 nt, Human
ccagaggugucagagguggcug

SEQ ID NO: 363670 - RNA, 21 nt, Human
ccagagguguccuuggacuca

SEQ ID NO: 363671 - RNA, 32 nt, Human
ccagaggugugccagauccuuaggcaggauuu

SEQ ID NO: 363672 - RNA, 22 nt, Human
ccagagguuaagucugcaguga

SEQ ID NO: 363673 - RNA, 23 nt, Human
ccagagguuaagucugcagugag

SEQ ID NO: 363674 - RNA, 32 nt, Human
ccagagguuuccaaucagccuugccugcuuuc

SEQ ID NO: 363675 - RNA, 32 nt, Human
ccagagguuugcaaccagccugagcaaaauau

SEQ ID NO: 363676 - RNA, 32 nt, Human
ccagaguaaagucacugaagaguggaagcgag

SEQ ID NO: 363677 - RNA, 32 nt, Human
ccagaguaacaagauucuugguggugacagaa

SEQ ID NO: 363678 - RNA, 23 nt, Human
ccagaguaacagggauuacaggc

SEQ ID NO: 363679 - RNA, 32 nt, Human
ccagaguaacagggauuacaggcauacuccac

SEQ ID NO: 363680 - RNA, 18 nt, Human
ccagaguaaggauagagg

SEQ ID NO: 363681 - RNA, 32 nt, Human
ccagaguacuagggaaggaggaagggaggaca

SEQ ID NO: 363682 - RNA, 22 nt, Human
ccagaguacugggauuacaggc

SEQ ID NO: 363683 - RNA, 32 nt, Human
ccagaguagcccaagcccugaagucacugcuc

SEQ ID NO: 363684 - RNA, 25 nt, Human
ccagaguagcugggaccacaggugu

SEQ ID NO: 363685 - RNA, 24 nt, Human
ccagaguagcugggacuacaggug

SEQ ID NO: 363686 - RNA, 23 nt, Human
ccagaguagcugggauuacaggc

SEQ ID NO: 363687 - RNA, 24 nt, Human
ccagaguagcugggauuacaggcg

SEQ ID NO: 363688 - RNA, 32 nt, Human
ccagagucacagacugacacguuucccacugu

SEQ ID NO: 363689 - RNA, 32 nt, Human
ccagagucacaguguaaaguuagauguugaaa

SEQ ID NO: 363690 - RNA, 32 nt, Human
ccagagucacccaguuggugacugggaaaguu

SEQ ID NO: 363691 - RNA, 32 nt, Human
ccagagucagcggccacugaggccucagaggc

SEQ ID NO: 363692 - RNA, 32 nt, Human
ccagaguccaauaacucgugcucaucugcagc

SEQ ID NO: 363693 - RNA, 32 nt, Human
ccagaguccacuccaacuucggauccaaguug

SEQ ID NO: 363694 - RNA, 32 nt, Human
ccagagucccaaaugcugaauuauugaaccau

SEQ ID NO: 363695 - RNA, 32 nt, Human
ccagaguccuucaggggcaccccucugccuug

SEQ ID NO: 363696 - RNA, 32 nt, Human
ccagaguccuuguggcccacagcauagcacug

SEQ ID NO: 363697 - RNA, 23 nt, Human
ccagagucuaagacugcagugag

SEQ ID NO: 363698 - RNA, 32 nt, Human
ccagagucuccaagcccaucaagagcaaguuu

SEQ ID NO: 363699 - RNA, 24 nt, Human
ccagagucugaaggaauucaugga

SEQ ID NO: 363700 - RNA, 24 nt, Human
ccagagucugccacuggggcucag

SEQ ID NO: 363701 - RNA, 32 nt, Human
ccagagucugcguaacagucucccacuggcug

SEQ ID NO: 363702 - RNA, 32 nt, Human
ccagagucugugggaaaauggaacacauauuu

SEQ ID NO: 363703 - RNA, 32 nt, Human
ccagagugacacacccccuaggccccuacaua

SEQ ID NO: 363704 - RNA, 32 nt, Human
ccagagugaccccugccccaccccugugcauu

SEQ ID NO: 363705 - RNA, 24 nt, Human
ccagagugccaggaacacugugga

SEQ ID NO: 363706 - RNA, 32 nt, Human
ccagagugcccaggaggcaggcagugcggggu

SEQ ID NO: 363707 - RNA, 22 nt, Human
ccagagugcuaggauuacaggc

SEQ ID NO: 363708 - RNA, 24 nt, Human
ccagagugcugagauuacaggcgu

SEQ ID NO: 363709 - RNA, 25 nt, Human
ccagagugcugagauuuacaggcgu

SEQ ID NO: 363710 - RNA, 22 nt, Human
ccagagugcuggaauuacaagc

SEQ ID NO: 363711 - RNA, 22 nt, Human
ccagagugcuggaauuacuggc

SEQ ID NO: 363712 - RNA, 22 nt, Human
ccagagugcugggauuacaggc

SEQ ID NO: 363713 - RNA, 24 nt, Human
ccagagugcugggauuacaggcgu

SEQ ID NO: 363714 - RNA, 24 nt, Human
ccagagugcugggauuacaggugu

SEQ ID NO: 363715 - RNA, 23 nt, Human
ccagagugcugggauuuacaggc

SEQ ID NO: 363716 - RNA, 32 nt, Human
ccagaguggagaauuagaaaguaagacguguu

SEQ ID NO: 363717 - RNA, 32 nt, Human
ccagaguggcucacccuguccagaccuuugag

SEQ ID NO: 363718 - RNA, 32 nt, Human
ccagaguggcugggaugugggagcagcaucuc

SEQ ID NO: 363719 - RNA, 32 nt, Human
ccagagugggaccaaguccaacaguagcaugg

SEQ ID NO: 363720 - RNA, 32 nt, Human
ccagaguggggccaggacagugccucagagcu

SEQ ID NO: 363721 - RNA, 32 nt, Human
ccagaguggugaaauaacaaggccagccacau

SEQ ID NO: 363722 - RNA, 32 nt, Human
ccagagugucccauuggugccaaaaauacacg

SEQ ID NO: 363723 - RNA, 31 nt, Human
ccagagugugagagacgauugucucgucggc

SEQ ID NO: 363724 - RNA, 32 nt, Human
ccagaguguuacuggcuuacaaauuggauuga

SEQ ID NO: 363725 - RNA, 24 nt, Human
ccagaguguuaggauuacaggcgu

SEQ ID NO: 363726 - RNA, 32 nt, Human
ccagaguguucugccuugugcugccucccuuc

SEQ ID NO: 363727 - RNA, 32 nt, Human
ccagaguuaggguuugcgacuccgccucccug

SEQ ID NO: 363728 - RNA, 32 nt, Human
ccagaguucaaaugugacuccaccucuuaaaa

SEQ ID NO: 363729 - RNA, 32 nt, Human
ccagaguucaguccuggcuggaggagccacag

SEQ ID NO: 363730 - RNA, 24 nt, Human
ccagaguucugggauuacgggcgu

SEQ ID NO: 363731 - RNA, 32 nt, Human
ccagaguugcuguucccaccucuggcugugag

SEQ ID NO: 363732 - RNA, 32 nt, Human
ccagaguuggcuaugccuuuucagacauugau

SEQ ID NO: 363733 - RNA, 22 nt, Human
ccagaguuuaaaagggaaccaa

SEQ ID NO: 363734 - RNA, 32 nt, Human
ccagaguuugaaaccagccuagguaacauagu

SEQ ID NO: 363735 - RNA, 32 nt, Human
ccagaguuugcagccgaguagggacuccuccc

SEQ ID NO: 363736 - RNA, 32 nt, Human
ccagaguuugguuuggucccugguuuucaguc

SEQ ID NO: 363737 - RNA, 32 nt, Human
ccagaguuuuaucaaaaugcuuucugggccag

SEQ ID NO: 363738 - RNA, 32 nt, Human
ccagaguuuuuaugccucucccuggcauucuc

SEQ ID NO: 363739 - RNA, 32 nt, Human
ccagauaagaagcuggugccucuugucucucu

SEQ ID NO: 363740 - RNA, 32 nt, Human
ccagauaagaauagguguuccuuugugcucau

SEQ ID NO: 363741 - RNA, 32 nt, Human
ccagauaagcacuggugaaaucaaagaccaac

SEQ ID NO: 363742 - RNA, 22 nt, Human
ccagauacacccuguugccaua

SEQ ID NO: 363743 - RNA, 32 nt, Human
ccagauaccaugucaggauauuuuuagugucu

SEQ ID NO: 363744 - RNA, 32 nt, Human
ccagauacccagaugggaaggaaggagacagc

SEQ ID NO: 363745 - RNA, 32 nt, Human
ccagauacugaacaaguuagugcaaugaagua

SEQ ID NO: 363746 - RNA, 32 nt, Human
ccagauacuggcaauacuccagccuggugaca

SEQ ID NO: 363747 - RNA, 32 nt, Human
ccagauagaaacacugggacagugguuugaac

SEQ ID NO: 363748 - RNA, 32 nt, Human
ccagauagagaaauagugacaagugaagaaca

SEQ ID NO: 363749 - RNA, 24 nt, Human
ccagauagcagagguugcagugag

SEQ ID NO: 363750 - RNA, 21 nt, Human
ccagauagcagucaugacuua

SEQ ID NO: 363751 - RNA, 32 nt, Human
ccagauagccccacugcacuccagccugggug

SEQ ID NO: 363752 - RNA, 32 nt, Human
ccagauagccuccagcgccacagccuuuuacc

SEQ ID NO: 363753 - RNA, 22 nt, Human
ccagauagcuggcagagggcag

SEQ ID NO: 363754 - RNA, 23 nt, Human
ccagauagcugggccacaggcgu

SEQ ID NO: 363755 - RNA, 20 nt, Human
ccagauaucagccacuuuca

SEQ ID NO: 363756 - RNA, 16 nt, Human
ccagauauccaccccu

SEQ ID NO: 363757 - RNA, 32 nt, Human
ccagauaugauggcaggcgccuguaaucccag

SEQ ID NO: 363758 - RNA, 32 nt, Human
ccagauauuucaucugaagaguucacaggcua

SEQ ID NO: 363759 - RNA, 32 nt, Human
ccagauauuucccacaguucggccugcugacc

SEQ ID NO: 363760 - RNA, 32 nt, Human
ccagauauuucuucauuuucuuuuggaggacc

SEQ ID NO: 363761 - RNA, 32 nt, Human
ccagaucaacacaaaccuuaccccacccccac

SEQ ID NO: 363762 - RNA, 32 nt, Human
ccagaucaagggaaccucagaaauccauugaa

SEQ ID NO: 363763 - RNA, 32 nt, Human
ccagaucacaccauugcacuccagccuaggca

SEQ ID NO: 363764 - RNA, 32 nt, Human
ccagaucacagaaguauugugccauaugugga

SEQ ID NO: 363765 - RNA, 32 nt, Human
ccagaucacgcaccccagcuccggaagauggg

SEQ ID NO: 363766 - RNA, 32 nt, Human
ccagaucacgccacugcacucuagccugggca

SEQ ID NO: 363767 - RNA, 32 nt, Human
ccagaucacgccagugcacuccagccugagag

SEQ ID NO: 363768 - RNA, 20 nt, Human
ccagaucagcuccuaacccu

SEQ ID NO: 363769 - RNA, 32 nt, Human
ccagaucaggugugacguggaaaccaagcaug

SEQ ID NO: 363770 - RNA, 32 nt, Human
ccagaucagugcagaacucauggaggaggcuu

SEQ ID NO: 363771 - RNA, 32 nt, Human
ccagaucaguggaggaagaggagaaagaggga

SEQ ID NO: 363772 - RNA, 32 nt, Human
ccagaucauacccccuuccugccuguaacccu

SEQ ID NO: 363773 - RNA, 32 nt, Human
ccagaucaucccucgaguccccagcgagaaag

SEQ ID NO: 363774 - RNA, 32 nt, Human
ccagaucaugccacuguacuccagccuaggug

SEQ ID NO: 363775 - RNA, 32 nt, Human
ccagauccaagggaccucagaaauccauugaa

SEQ ID NO: 363776 - RNA, 32 nt, Human
ccagauccacaucuucacucaagccaggagag

SEQ ID NO: 363777 - RNA, 22 nt, Human
ccagauccacccccauuucaga

SEQ ID NO: 363778 - RNA, 32 nt, Human
ccagauccagaggcggcggcggcggcggcagc

SEQ ID NO: 363779 - RNA, 32 nt, Human
ccagauccagcuaggcuagauguacaguaucu

SEQ ID NO: 363780 - RNA, 32 nt, Human
ccagauccagcuuuaagccuuugauggucaac

SEQ ID NO: 363781 - RNA, 32 nt, Human
ccagauccccucccaguggcacccacgccacc

SEQ ID NO: 363782 - RNA, 18 nt, Human
ccagauccuccacuccca

SEQ ID NO: 363783 - RNA, 22 nt, Human
ccagauccugccaggagguggc

SEQ ID NO: 363784 - RNA, 18 nt, Human
ccagauccuggacucaga

SEQ ID NO: 363785 - RNA, 32 nt, Human
ccagauccuggacucagagcuguuugagcuga

SEQ ID NO: 363786 - RNA, 32 nt, Human
ccagauccuugaagcucacuccgccuccucac

SEQ ID NO: 363787 - RNA, 32 nt, Human
ccagaucgagccacugcauuccagccugggcg

SEQ ID NO: 363788 - RNA, 32 nt, Human
ccagaucgcaccacugcacuccagucuggcaa

SEQ ID NO: 363789 - RNA, 32 nt, Human
ccagaucgcaccauugcacucuagccugggca

SEQ ID NO: 363790 - RNA, 32 nt, Human
ccagaucgcagcugaaggaucuguugagcgcu

SEQ ID NO: 363791 - RNA, 32 nt, Human
ccagaucgcgacacugcacuccagccugggca

SEQ ID NO: 363792 - RNA, 32 nt, Human
ccagaucgcgccauugcacuccagccugggua

SEQ ID NO: 363793 - RNA, 32 nt, Human
ccagaucgcgccgcugcacuccagccugggcg

SEQ ID NO: 363794 - RNA, 32 nt, Human
ccagaucgcgguauauagagauaugcauuuua

SEQ ID NO: 363795 - RNA, 32 nt, Human
ccagaucguccggcucggaagggacgccggca

SEQ ID NO: 363796 - RNA, 32 nt, Human
ccagaucuaagaauggcuucaggcuggggcug

SEQ ID NO: 363797 - RNA, 32 nt, Human
ccagaucuauuuuucuaccagagagaggagca

SEQ ID NO: 363798 - RNA, 32 nt, Human
ccagaucucagaggagccuggcuaagcaaaac

SEQ ID NO: 363799 - RNA, 32 nt, Human
ccagaucucauccugccucauccugaguccca

SEQ ID NO: 363800 - RNA, 32 nt, Human
ccagaucucauggaaacuggcagggguccugu

SEQ ID NO: 363801 - RNA, 32 nt, Human
ccagaucuccaucuucagccuagaucucuuca

SEQ ID NO: 363802 - RNA, 32 nt, Human
ccagaucucugccugccaacaagccccguguu

SEQ ID NO: 363803 - RNA, 32 nt, Human
ccagaucugaaaagcaggcuugaggaggcaag

SEQ ID NO: 363804 - RNA, 32 nt, Human
ccagaucugaggccaagcuaugugcuagagcc

SEQ ID NO: 363805 - RNA, 19 nt, Human
ccagaucugauuuucucca

SEQ ID NO: 363806 - RNA, 32 nt, Human
ccagaucugccuggggucaggcugcuucuaaa

SEQ ID NO: 363807 - RNA, 20 nt, Human
ccagaucuggaagguggcug

SEQ ID NO: 363808 - RNA, 20 nt, Human
ccagaucugugcagcagcuu

SEQ ID NO: 363809 - RNA, 32 nt, Human
ccagaucuucccaucuuguggcauguggugcc

SEQ ID NO: 363810 - RNA, 32 nt, Human
ccagaucuuccucuugcucuucacugaggaau

SEQ ID NO: 363811 - RNA, 32 nt, Human
ccagaucuugaccccaauacaggggcuggaua

SEQ ID NO: 363812 - RNA, 32 nt, Human
ccagaugaccucacccacccaggacuucaugc

SEQ ID NO: 363813 - RNA, 32 nt, Human
ccagaugacugcagauaggcacacagaggugu

SEQ ID NO: 363814 - RNA, 32 nt, Human
ccagaugagagaucacggucaugaagaucagc

SEQ ID NO: 363815 - RNA, 32 nt, Human
ccagaugagaucuuacagggagagagauuggg

SEQ ID NO: 363816 - RNA, 15 nt, Human
ccagaugauuuuccu

SEQ ID NO: 363817 - RNA, 32 nt, Human
ccagaugcaaguggaacaacacccucaucugc

SEQ ID NO: 363818 - RNA, 32 nt, Human
ccagaugcagaggcagaggcagccacacagcc

SEQ ID NO: 363819 - RNA, 32 nt, Human
ccagaugcagcccagcaugacacugcccucag

SEQ ID NO: 363820 - RNA, 32 nt, Human
ccagaugcagcggggauucuguucucugacug

SEQ ID NO: 363821 - RNA, 17 nt, Human
ccagaugcagcugcaga

SEQ ID NO: 363822 - RNA, 32 nt, Human
ccagaugcagcuuuuacccauucuuuguccuu

SEQ ID NO: 363823 - RNA, 32 nt, Human
ccagaugcaguggcucaggccuguaaucccag

SEQ ID NO: 363824 - RNA, 16 nt, Human
ccagaugccacucucu

SEQ ID NO: 363825 - RNA, 32 nt, Human
ccagaugccagggaagggacagaggaaaacag

SEQ ID NO: 363826 - RNA, 32 nt, Human
ccagaugccaucaaauacauguuuccaauaaa

SEQ ID NO: 363827 - RNA, 32 nt, Human
ccagaugcccugcugagugucccugaaaccau

SEQ ID NO: 363828 - RNA, 32 nt, Human
ccagaugcccuggcaccucuaggaccaacugg

SEQ ID NO: 363829 - RNA, 32 nt, Human
ccagaugccugggaaggaacaucucccuucca

SEQ ID NO: 363830 - RNA, 28 nt, Human
ccagaugccuugcuuaccgaaagccucc

SEQ ID NO: 363831 - RNA, 32 nt, Human
ccagaugcgguggcacccgccuguaaucccag

SEQ ID NO: 363832 - RNA, 32 nt, Human
ccagaugcuaaagagaagaaacccaaagccaa

SEQ ID NO: 363833 - RNA, 32 nt, Human
ccagaugcuggaugagcucugggcaggguuga

SEQ ID NO: 363834 - RNA, 32 nt, Human
ccagauggaaggacaggcagcacgggagccag

SEQ ID NO: 363835 - RNA, 32 nt, Human
ccagauggaaggaggcaggcaugggggacacc

SEQ ID NO: 363836 - RNA, 23 nt, Human
ccagauggacuugaaggcucccu

SEQ ID NO: 363837 - RNA, 32 nt, Human
ccagauggagggguacugaggaagcaucugaa

SEQ ID NO: 363838 - RNA, 32 nt, Human
ccagauggagguggaggguugauuugggaagc

SEQ ID NO: 363839 - RNA, 32 nt, Human
ccagauggagucucgcuuuguugcccaggcug

SEQ ID NO: 363840 - RNA, 32 nt, Human
ccagauggauccucuacagugcuaacccaaac

SEQ ID NO: 363841 - RNA, 18 nt, Human
ccagauggcauuuucuca

SEQ ID NO: 363842 - RNA, 32 nt, Human
ccagauggccaaccuguccuuguuaaguuacu

SEQ ID NO: 363843 - RNA, 32 nt, Human
ccagauggccugaugacaacaagaguuuguga

SEQ ID NO: 363844 - RNA, 32 nt, Human
ccagauggcgccacugcacuccagccugagug

SEQ ID NO: 363845 - RNA, 32 nt, Human
ccagauggcucagugauccuugcagaacuucu

SEQ ID NO: 363846 - RNA, 32 nt, Human
ccagauggcucgcagagauugaggaacuugcc

SEQ ID NO: 363847 - RNA, 20 nt, Human
ccagauggcucuuuuuccca

SEQ ID NO: 363848 - RNA, 32 nt, Human
ccagauggcugaaccucugcccccggagcccc

SEQ ID NO: 363849 - RNA, 32 nt, Human
ccagauggcuucacugaaaccugcuuuuguaa

SEQ ID NO: 363850 - RNA, 32 nt, Human
ccagauggcuuugugauucccuccagugaagc

SEQ ID NO: 363851 - RNA, 32 nt, Human
ccagaugggaucuuacucuguugcccaggcug

SEQ ID NO: 363852 - RNA, 29 nt, Human
ccagaugggauuacugagucagaggaagu

SEQ ID NO: 363853 - RNA, 32 nt, Human
ccagaugggauuauaguccugcuucuggaaca

SEQ ID NO: 363854 - RNA, 32 nt, Human
ccagaugggcagaaggcagggugcacaggugg

SEQ ID NO: 363855 - RNA, 32 nt, Human
ccagaugggcugggccuuugggcccuccucag

SEQ ID NO: 363856 - RNA, 32 nt, Human
ccagauggggcagcuggcugggcagaggggcu

SEQ ID NO: 363857 - RNA, 32 nt, Human
ccagaugggggaggggaugacaaggcuaugga

SEQ ID NO: 363858 - RNA, 23 nt, Human
ccagauggguggaucaccugagg

SEQ ID NO: 363859 - RNA, 32 nt, Human
ccagauggguucuaaugcagcugcuggggccu

SEQ ID NO: 363860 - RNA, 32 nt, Human
ccagaugguggagcugggcucuucuggcaggg

SEQ ID NO: 363861 - RNA, 32 nt, Human
ccagauggugucagaggaguacgcaguuguau

SEQ ID NO: 363862 - RNA, 32 nt, Human
ccagaugguuccuacuuaaaugauuucauaag

SEQ ID NO: 363863 - RNA, 32 nt, Human
ccagaugguuugaggccgcagagccagaccau

SEQ ID NO: 363864 - RNA, 32 nt, Human
ccagauguaggcuuagccaguuuauuuucucu

SEQ ID NO: 363865 - RNA, 32 nt, Human
ccagaugucaggagggacugaccucaggaccu

SEQ ID NO: 363866 - RNA, 15 nt, Human
ccagauguccaccuc

SEQ ID NO: 363867 - RNA, 32 nt, Human
ccagauguccuccucagacuccugagaucgcc

SEQ ID NO: 363868 - RNA, 32 nt, Human
ccagaugugacucaccuuucugcugcccucuu

SEQ ID NO: 363869 - RNA, 32 nt, Human
ccagaugugauggcgcaugccuguaaucccag

SEQ ID NO: 363870 - RNA, 32 nt, Human
ccagaugugguggcacaugccuguaaucccag

SEQ ID NO: 363871 - RNA, 32 nt, Human
ccagaugugguggcaugcaucuguaguccaag

SEQ ID NO: 363872 - RNA, 32 nt, Human
ccagaugugguggcgcacaccuguaaucccag

SEQ ID NO: 363873 - RNA, 32 nt, Human
ccagaugugguggcucaugccuguaaucccaa

SEQ ID NO: 363874 - RNA, 29 nt, Human
ccagauguucacagaaggagaggaaaugu

SEQ ID NO: 363875 - RNA, 32 nt, Human
ccagauguucggagccucagcgugcccaaugc

SEQ ID NO: 363876 - RNA, 19 nt, Human
ccagauguugcuuucucca

SEQ ID NO: 363877 - RNA, 32 nt, Human
ccagauguuguucugucaguugccaaaggacu

SEQ ID NO: 363878 - RNA, 32 nt, Human
ccagauuaaccuuuguuuccucuucaguaaaa

SEQ ID NO: 363879 - RNA, 32 nt, Human
ccagauuacacuccagccugagucagcacccc

SEQ ID NO: 363880 - RNA, 32 nt, Human
ccagauucaagcaacucucugccucagccucc

SEQ ID NO: 363881 - RNA, 32 nt, Human
ccagauucaagcaauucuccugccucagccuc

SEQ ID NO: 363882 - RNA, 32 nt, Human
ccagauucaagcaauucuccuguuucagccuc

SEQ ID NO: 363883 - RNA, 32 nt, Human
ccagauucaagugauccucccaucucagccuc

SEQ ID NO: 363884 - RNA, 32 nt, Human
ccagauucacgccauucuccugccucagccuc

SEQ ID NO: 363885 - RNA, 32 nt, Human
ccagauuccacagcccaaauggcgggacaguu

SEQ ID NO: 363886 - RNA, 32 nt, Human
ccagauuccguacccucucucccgacagccug

SEQ ID NO: 363887 - RNA, 32 nt, Human
ccagauuccucuuuccuauucuuugguuaauu

SEQ ID NO: 363888 - RNA, 32 nt, Human
ccagauucuucaggauucuccgugaagggaua

SEQ ID NO: 363889 - RNA, 32 nt, Human
ccagauucuugagacguuucucuuucugaucu

SEQ ID NO: 363890 - RNA, 31 nt, Human
ccagauugaaaugaauucuguugaaaaagag

SEQ ID NO: 363891 - RNA, 32 nt, Human
ccagauugcaacaggcugggcuucaguggcag

SEQ ID NO: 363892 - RNA, 23 nt, Human
ccagauugcacaggauacugggu

SEQ ID NO: 363893 - RNA, 32 nt, Human
ccagauugcaccacuacacuccagccugggca

SEQ ID NO: 363894 - RNA, 32 nt, Human
ccagauugcaccacugcucucuagccugggca

SEQ ID NO: 363895 - RNA, 32 nt, Human
ccagauugcaccauugcccuccagccugagca

SEQ ID NO: 363896 - RNA, 32 nt, Human
ccagauugcccacugcacuccagccugggcaa

SEQ ID NO: 363897 - RNA, 18 nt, Human
ccagauugcucugcccca

SEQ ID NO: 363898 - RNA, 22 nt, Human
ccagauugcuggguuuacaggc

SEQ ID NO: 363899 - RNA, 29 nt, Human
ccagauuggcugcugaaauagccccuaac

SEQ ID NO: 363900 - RNA, 32 nt, Human
ccagauuggggugggagcaagggacagggagc

SEQ ID NO: 363901 - RNA, 32 nt, Human
ccagauugucagcuccuugagggcaagagcca

SEQ ID NO: 363902 - RNA, 32 nt, Human
ccagauugucauucuucagggauggcagcccu

SEQ ID NO: 363903 - RNA, 32 nt, Human
ccagauugugccacugcacuccagccugggca

SEQ ID NO: 363904 - RNA, 32 nt, Human
ccagauugugccacugcacucuagccucggug

SEQ ID NO: 363905 - RNA, 32 nt, Human
ccagauugugccacugcauucuagccugggcg

SEQ ID NO: 363906 - RNA, 32 nt, Human
ccagauugugccaggucagcugucccuuccuc

SEQ ID NO: 363907 - RNA, 21 nt, Human
ccagauuucagcuuugaguua

SEQ ID NO: 363908 - RNA, 18 nt, Human
ccagauuuccacucucuc

SEQ ID NO: 363909 - RNA, 32 nt, Human
ccagauuuccccucagcuuacaguuccugaau

SEQ ID NO: 363910 - RNA, 18 nt, Human
ccagauuucucuuuccca

SEQ ID NO: 363911 - RNA, 18 nt, Human
ccagauuucuguuuccca

SEQ ID NO: 363912 - RNA, 32 nt, Human
ccagauuucuuaauaccuggucuuccucaaag

SEQ ID NO: 363913 - RNA, 32 nt, Human
ccagauuugggcagaccagcagugcucgccag

SEQ ID NO: 363914 - RNA, 32 nt, Human
ccagauuuuacugccuuugcuaggcuuuugcu

SEQ ID NO: 363915 - RNA, 32 nt, Human
ccagauuuuguggagccuuaagacacucccuc

SEQ ID NO: 363916 - RNA, 32 nt, Human
ccagcaaaauagagucccucagggugacaguu

SEQ ID NO: 363917 - RNA, 18 nt, Human
ccagcaaacaggcauucu

SEQ ID NO: 363918 - RNA, 32 nt, Human
ccagcaaagcaaauguugggaaaguauuuacu

SEQ ID NO: 363919 - RNA, 32 nt, Human
ccagcaaagcagagaugagagcgugggaacug

SEQ ID NO: 363920 - RNA, 32 nt, Human
ccagcaaagcaguaugcucccgaucaaguaga

SEQ ID NO: 363921 - RNA, 32 nt, Human
ccagcaaaggacacaucucuccagcaaaggac

SEQ ID NO: 363922 - RNA, 32 nt, Human
ccagcaaaggagacgacacagacaagaccuca

SEQ ID NO: 363923 - RNA, 32 nt, Human
ccagcaaagugggaggaggaguggggauucua

SEQ ID NO: 363924 - RNA, 32 nt, Human
ccagcaaauaaaagcaggcagaaaaaugugaa

SEQ ID NO: 363925 - RNA, 19 nt, Human
ccagcaaaucaucgggcca

SEQ ID NO: 363926 - RNA, 32 nt, Human
ccagcaacaacaaaacaggucuacccuggagu

SEQ ID NO: 363927 - RNA, 32 nt, Human
ccagcaacaacaaaagaacuaguccucuuaga

SEQ ID NO: 363928 - RNA, 32 nt, Human
ccagcaacaagcgcauccugugcucagauaag

SEQ ID NO: 363929 - RNA, 32 nt, Human
ccagcaacacagagcuggcgacugcagcugca

SEQ ID NO: 363930 - RNA, 32 nt, Human
ccagcaacagacguuuccagccacuuuccucg

SEQ ID NO: 363931 - RNA, 19 nt, Human
ccagcaacagguucuccaa

SEQ ID NO: 363932 - RNA, 32 nt, Human
ccagcaacaucagagcugaacuucuuaagaaa

SEQ ID NO: 363933 - RNA, 32 nt, Human
ccagcaaccagcuccauccuggcugcuugccu

SEQ ID NO: 363934 - RNA, 23 nt, Human
ccagcaaccccccacccucccca

SEQ ID NO: 363935 - RNA, 32 nt, Human
ccagcaaccugcacuccagccugggugacaga

SEQ ID NO: 363936 - RNA, 32 nt, Human
ccagcaacuacacuccagacccgugcugaccc

SEQ ID NO: 363937 - RNA, 32 nt, Human
ccagcaacucucuugccccucuucccauauuu

SEQ ID NO: 363938 - RNA, 32 nt, Human
ccagcaacugggaggugggacugucagaagcu

SEQ ID NO: 363939 - RNA, 20 nt, Human
ccagcaacuguggccucucg

SEQ ID NO: 363940 - RNA, 32 nt, Human
ccagcaagaagguucagaacagccuggcuuug

SEQ ID NO: 363941 - RNA, 32 nt, Human
ccagcaagacuuccuguccugacgaggcacga

SEQ ID NO: 363942 - RNA, 32 nt, Human
ccagcaagagcugggcaacagcuggcuuguga

SEQ ID NO: 363943 - RNA, 19 nt, Human
ccagcaagaggaagcuguc

SEQ ID NO: 363944 - RNA, 32 nt, Human
ccagcaagagguggagcugccagccugaggug

SEQ ID NO: 363945 - RNA, 32 nt, Human
ccagcaagaguuucaggaaguggguugcuagg

SEQ ID NO: 363946 - RNA, 32 nt, Human
ccagcaagcagggcugcagugggagcugggag

SEQ ID NO: 363947 - RNA, 32 nt, Human
ccagcaagcauuucugcccuagcuaauucucc

SEQ ID NO: 363948 - RNA, 32 nt, Human
ccagcaaggaggggccggccagcucugcuugc

SEQ ID NO: 363949 - RNA, 32 nt, Human
ccagcaaggaguuuacagucaaacaggagaga

SEQ ID NO: 363950 - RNA, 32 nt, Human
ccagcaaggaugaagaaauggagcagcacaga

SEQ ID NO: 363951 - RNA, 32 nt, Human
ccagcaaggaugacguccugccaccuccugga

SEQ ID NO: 363952 - RNA, 32 nt, Human
ccagcaaggcccugccagcccacccaccagag

SEQ ID NO: 363953 - RNA, 32 nt, Human
ccagcaauaccccacuucaccuacaauaauug

SEQ ID NO: 363954 - RNA, 32 nt, Human
ccagcaauaccccacuucaccuacaauauugu

SEQ ID NO: 363955 - RNA, 22 nt, Human
ccagcaaugcagucacccaggg

SEQ ID NO: 363956 - RNA, 32 nt, Human
ccagcaaugcccugccuugcugccuucacccu

SEQ ID NO: 363957 - RNA, 32 nt, Human
ccagcaauugcacuccugggccucugacagag

SEQ ID NO: 363958 - RNA, 18 nt, Human
ccagcaauuucacucuca

SEQ ID NO: 363959 - RNA, 32 nt, Human
ccagcacacccacuuccaacuaucuguuaaaa

SEQ ID NO: 363960 - RNA, 22 nt, Human
ccagcacaccucaccuccaugc

SEQ ID NO: 363961 - RNA, 32 nt, Human
ccagcacaccucagcaagaugccaggauuggg

SEQ ID NO: 363962 - RNA, 32 nt, Human
ccagcacaccugcagguguaagggacgauugg

SEQ ID NO: 363963 - RNA, 19 nt, Human
ccagcacacgaccuacaca

SEQ ID NO: 363964 - RNA, 32 nt, Human
ccagcacacucgcucugcuccacacacgagac

SEQ ID NO: 363965 - RNA, 18 nt, Human
ccagcacagaacagcuca

SEQ ID NO: 363966 - RNA, 18 nt, Human
ccagcacagagcagagcu

SEQ ID NO: 363967 - RNA, 18 nt, Human
ccagcacagagggaccau

SEQ ID NO: 363968 - RNA, 24 nt, Human
ccagcacagaugccacuguccagg

SEQ ID NO: 363969 - RNA, 32 nt, Human
ccagcacagcacaggcgugugcacacagaggu

SEQ ID NO: 363970 - RNA, 32 nt, Human
ccagcacagccccagcccggagcccagccccc

SEQ ID NO: 363971 - RNA, 23 nt, Human
ccagcacagcguuggugcugccu

SEQ ID NO: 363972 - RNA, 32 nt, Human
ccagcacaggauucagcaaacauuuucuguaa

SEQ ID NO: 363973 - RNA, 32 nt, Human
ccagcacaggcagggguagaagcaaaggcagg

SEQ ID NO: 363974 - RNA, 32 nt, Human
ccagcacaggcagguguucacaggacacacac

SEQ ID NO: 363975 - RNA, 32 nt, Human
ccagcacaggcucuugcugggugccugugccc

SEQ ID NO: 363976 - RNA, 18 nt, Human
ccagcacagggccacaca

SEQ ID NO: 363977 - RNA, 18 nt, Human
ccagcacagugccucaca

SEQ ID NO: 363978 - RNA, 32 nt, Human
ccagcacauccagcaguggcaaaggagccccu

SEQ ID NO: 363979 - RNA, 32 nt, Human
ccagcacaugaggcugaggcugaggggcaguc

SEQ ID NO: 363980 - RNA, 21 nt, Human
ccagcacaugcaaagcuggcu

SEQ ID NO: 363981 - RNA, 32 nt, Human
ccagcacaugccacaauccuaugcucuugccu

SEQ ID NO: 363982 - RNA, 32 nt, Human
ccagcacauuucagaaggcugcugaauaguag

SEQ ID NO: 363983 - RNA, 20 nt, Human
ccagcaccaacagagccaag

SEQ ID NO: 363984 - RNA, 32 nt, Human
ccagcaccaagccuacccagcacauaguaggu

SEQ ID NO: 363985 - RNA, 32 nt, Human
ccagcaccacgauggccccaggacguuguuua

SEQ ID NO: 363986 - RNA, 32 nt, Human
ccagcaccagccuggccaacacggugaaaccc

SEQ ID NO: 363987 - RNA, 32 nt, Human
ccagcaccagggagguugggcagacaagaccu

SEQ ID NO: 363988 - RNA, 32 nt, Human
ccagcacccaagaaaagagggaagagacgcgu

SEQ ID NO: 363989 - RNA, 17 nt, Human
ccagcacccaagagcaa

SEQ ID NO: 363990 - RNA, 32 nt, Human
ccagcacccaccucccuacucucccucauggc

SEQ ID NO: 363991 - RNA, 32 nt, Human
ccagcacccagccggcccuccgucuccugagg

SEQ ID NO: 363992 - RNA, 32 nt, Human
ccagcaccccacuccagccucgaggaagcuuu

SEQ ID NO: 363993 - RNA, 32 nt, Human
ccagcaccccagccagccugguacgcagaucc

SEQ ID NO: 363994 - RNA, 32 nt, Human
ccagcaccccaggcagucugugugugaggcau

SEQ ID NO: 363995 - RNA, 18 nt, Human
ccagcacccccagcccca

SEQ ID NO: 363996 - RNA, 32 nt, Human
ccagcacccccagcuaccucccaggacagacc

SEQ ID NO: 363997 - RNA, 17 nt, Human
ccagcacccgggcucag

SEQ ID NO: 363998 - RNA, 21 nt, Human
ccagcacccucccugcuucug

SEQ ID NO: 363999 - RNA, 32 nt, Human
ccagcacccucuuccucuucuaaccugcuuuc

SEQ ID NO: 364000 - RNA, 18 nt, Human
ccagcacccuggcuccca

SEQ ID NO: 364001 - RNA, 19 nt, Human
ccagcacccuggggucuuu

SEQ ID NO: 364002 - RNA, 32 nt, Human
ccagcaccgccuagcccugccaccccacugcc

SEQ ID NO: 364003 - RNA, 20 nt, Human
ccagcaccggcgcgugcaca

SEQ ID NO: 364004 - RNA, 32 nt, Human
ccagcaccucaugcagcaagugcugccaauag

SEQ ID NO: 364005 - RNA, 32 nt, Human
ccagcaccucccaccaaccaaccacacccggu

SEQ ID NO: 364006 - RNA, 32 nt, Human
ccagcaccucccaccaaccagccacacccggu

SEQ ID NO: 364007 - RNA, 32 nt, Human
ccagcaccuccccuccuccagcuuccuggccu

SEQ ID NO: 364008 - RNA, 32 nt, Human
ccagcaccugcacccacaccaggcuggagcca

SEQ ID NO: 364009 - RNA, 32 nt, Human
ccagcaccugcucucaccaugaccucgccugg

SEQ ID NO: 364010 - RNA, 32 nt, Human
ccagcaccugcucuccccguuccuccccaccu

SEQ ID NO: 364011 - RNA, 32 nt, Human
ccagcaccugggcagguacaagcacgaaaucc

SEQ ID NO: 364012 - RNA, 21 nt, Human
ccagcaccuucugcccuuccc

SEQ ID NO: 364013 - RNA, 32 nt, Human
ccagcaccuugaucuugaacuucucagccucc

SEQ ID NO: 364014 - RNA, 24 nt, Human
ccagcacgaccgaggagguggcug

SEQ ID NO: 364015 - RNA, 21 nt, Human
ccagcacgagauggaccaccu

SEQ ID NO: 364016 - RNA, 23 nt, Human
ccagcacgcaugcccacaggcca

SEQ ID NO: 364017 - RNA, 32 nt, Human
ccagcacgcccuggcccggcagcugcugcucu

SEQ ID NO: 364018 - RNA, 21 nt, Human
ccagcacgccggagcuggccu

SEQ ID NO: 364019 - RNA, 32 nt, Human
ccagcacgcguugcggcagccuggcgagcguc

SEQ ID NO: 364020 - RNA, 32 nt, Human
ccagcacgcuaagcuccagucggcgccgaagg

SEQ ID NO: 364021 - RNA, 21 nt, Human
ccagcacgcuggacugcgaga

SEQ ID NO: 364022 - RNA, 32 nt, Human
ccagcacggaaggugggcugaggcccagggug

SEQ ID NO: 364023 - RNA, 32 nt, Human
ccagcacggccuccccuccacuuccagucugu

SEQ ID NO: 364024 - RNA, 19 nt, Human
ccagcacgggcggagccgc

SEQ ID NO: 364025 - RNA, 20 nt, Human
ccagcacggugaaaccccgu

SEQ ID NO: 364026 - RNA, 19 nt, Human
ccagcacgucgccugggcu

SEQ ID NO: 364027 - RNA, 32 nt, Human
ccagcacguguggcugacgaauuuguuucuac

SEQ ID NO: 364028 - RNA, 32 nt, Human
ccagcacuauguacauguuccuggugaaaugg

SEQ ID NO: 364029 - RNA, 32 nt, Human
ccagcacucccaggacaguggagucagcagua

SEQ ID NO: 364030 - RNA, 32 nt, Human
ccagcacucccagggcccgagcgcgugccuuc

SEQ ID NO: 364031 - RNA, 20 nt, Human
ccagcacucccucccuccag

SEQ ID NO: 364032 - RNA, 32 nt, Human
ccagcacuccgagagguggaaggggcccugcc

SEQ ID NO: 364033 - RNA, 32 nt, Human
ccagcacucugccugcuccuucuuguauccaa

SEQ ID NO: 364034 - RNA, 32 nt, Human
ccagcacucuuucugcaagugucuugcucaca

SEQ ID NO: 364035 - RNA, 22 nt, Human
ccagcacugaaucccagcgcug

SEQ ID NO: 364036 - RNA, 32 nt, Human
ccagcacugagaggccgaucacuugaggucag

SEQ ID NO: 364037 - RNA, 32 nt, Human
ccagcacugcagccucaaccuccugggcucaa

SEQ ID NO: 364038 - RNA, 32 nt, Human
ccagcacugcccaccucugcucccagccgcca

SEQ ID NO: 364039 - RNA, 32 nt, Human
ccagcacugcccagguggcuggagcgagucac

SEQ ID NO: 364040 - RNA, 32 nt, Human
ccagcacugccuccuguuuucucccucucaug

SEQ ID NO: 364041 - RNA, 32 nt, Human
ccagcacugccuggcuccacgugccuccuggu

SEQ ID NO: 364042 - RNA, 32 nt, Human
ccagcacugcgagcuucugccuucccuguagu

SEQ ID NO: 364043 - RNA, 32 nt, Human
ccagcacugcucacugcgacuccuggaaaugu

SEQ ID NO: 364044 - RNA, 32 nt, Human
ccagcacugcuccccacucaccugugcucagg

SEQ ID NO: 364045 - RNA, 23 nt, Human
ccagcacugcuguuccauggcug

SEQ ID NO: 364046 - RNA, 32 nt, Human
ccagcacuggaagagcugguuccuggcuccga

SEQ ID NO: 364047 - RNA, 32 nt, Human
ccagcacuggaauuuugaaaacaaauaaggug

SEQ ID NO: 364048 - RNA, 20 nt, Human
ccagcacuggccacacccca

SEQ ID NO: 364049 - RNA, 32 nt, Human
ccagcacugggcaggcacagagcaggggcugc

SEQ ID NO: 364050 - RNA, 32 nt, Human
ccagcacugugcagcugaucuccacaacacug

SEQ ID NO: 364051 - RNA, 32 nt, Human
ccagcacugugcuguuguugucugacuguggc

SEQ ID NO: 364052 - RNA, 21 nt, Human
ccagcacuguucaggcugccu

SEQ ID NO: 364053 - RNA, 32 nt, Human
ccagcacuguucaugguaucuuauuucccagg

SEQ ID NO: 364054 - RNA, 32 nt, Human
ccagcacuguuggucaccgcaggccugucuuc

SEQ ID NO: 364055 - RNA, 32 nt, Human
ccagcacuucacuuugggaggcugaggcgggu

SEQ ID NO: 364056 - RNA, 20 nt, Human
ccagcacuucgggaggcuga

SEQ ID NO: 364057 - RNA, 32 nt, Human
ccagcacuuggcaggcaggaggugcggucucc

SEQ ID NO: 364058 - RNA, 32 nt, Human
ccagcacuugggaggccaaggcaggcggauca

SEQ ID NO: 364059 - RNA, 32 nt, Human
ccagcacuuguuacaaacacacgaugcaccuu

SEQ ID NO: 364060 - RNA, 32 nt, Human
ccagcacuuuauacacuucuggcucacaggaa

SEQ ID NO: 364061 - RNA, 32 nt, Human
ccagcacuuugggaagcugagguggguggauu

SEQ ID NO: 364062 - RNA, 32 nt, Human
ccagcacuuugggagacugagguggguggauc

SEQ ID NO: 364063 - RNA, 20 nt, Human
ccagcacuuugggaggcuga

SEQ ID NO: 364064 - RNA, 32 nt, Human
ccagcacuuuucccagcuuucucuccagcauc

SEQ ID NO: 364065 - RNA, 32 nt, Human
ccagcagaaacacacaucacuguuucaaaccu

SEQ ID NO: 364066 - RNA, 32 nt, Human
ccagcagaaagagaguaggccggauguuuuca

SEQ ID NO: 364067 - RNA, 20 nt, Human
ccagcagaaagcugcaguga

SEQ ID NO: 364068 - RNA, 32 nt, Human
ccagcagaaauccucauuucugugcuacggau

SEQ ID NO: 364069 - RNA, 31 nt, Human
ccagcagaaaugucucuccucuagguaucgu

SEQ ID NO: 364070 - RNA, 32 nt, Human
ccagcagaacauucuucucuucaaaggaugca

SEQ ID NO: 364071 - RNA, 32 nt, Human
ccagcagaaccagcucaagaaaggagaugccc

SEQ ID NO: 364072 - RNA, 32 nt, Human
ccagcagaacgcgccgggagguggugaccgcc

SEQ ID NO: 364073 - RNA, 32 nt, Human
ccagcagaacggguugaacgugucgacaaccc

SEQ ID NO: 364074 - RNA, 32 nt, Human
ccagcagaagccagcagagaggcaugggacag

SEQ ID NO: 364075 - RNA, 32 nt, Human
ccagcagaagugacuggcggggaccaggaugc

SEQ ID NO: 364076 - RNA, 32 nt, Human
ccagcagaccucccaacuccaccagaaacguc

SEQ ID NO: 364077 - RNA, 27 nt, Human
ccagcagacgcuccgccccacccggug

SEQ ID NO: 364078 - RNA, 32 nt, Human
ccagcagacgcuccgccccacccggugaugga

SEQ ID NO: 364079 - RNA, 32 nt, Human
ccagcagacuccugcucucuauccaaaauaaa

SEQ ID NO: 364080 - RNA, 32 nt, Human
ccagcagacuccugcucucuauccaaaauaag

SEQ ID NO: 364081 - RNA, 21 nt, Human
ccagcagagaauuuugacuug

SEQ ID NO: 364082 - RNA, 32 nt, Human
ccagcagagacuccuuuucuccuaaccguccc

SEQ ID NO: 364083 - RNA, 32 nt, Human
ccagcagagacugacagccacugugaggaacg

SEQ ID NO: 364084 - RNA, 32 nt, Human
ccagcagagagaguugaccccuccugaacugg

SEQ ID NO: 364085 - RNA, 22 nt, Human
ccagcagagagaugugauuccg

SEQ ID NO: 364086 - RNA, 32 nt, Human
ccagcagagagggacugaggcggacagugguc

SEQ ID NO: 364087 - RNA, 32 nt, Human
ccagcagagagggaguaggagagaagaaacau

SEQ ID NO: 364088 - RNA, 32 nt, Human
ccagcagagaggggccugguguaucacuggag

SEQ ID NO: 364089 - RNA, 32 nt, Human
ccagcagagcagcucagacuccugggacuccg

SEQ ID NO: 364090 - RNA, 32 nt, Human
ccagcagaggaagggccacucuucucaugggc

SEQ ID NO: 364091 - RNA, 25 nt, Human
ccagcagaggaggacaguggcucug

SEQ ID NO: 364092 - RNA, 32 nt, Human
ccagcagaggccuccggagaaaccccaaccuc

SEQ ID NO: 364093 - RNA, 32 nt, Human
ccagcagaggcuacagaacagcaaagauuccu

SEQ ID NO: 364094 - RNA, 32 nt, Human
ccagcagagggaggcagggcacugccuggccu

SEQ ID NO: 364095 - RNA, 32 nt, Human
ccagcagagggagggaucaggcagcaguguuu

SEQ ID NO: 364096 - RNA, 32 nt, Human
ccagcagagggugugguuggaggccucagaca

SEQ ID NO: 364097 - RNA, 32 nt, Human
ccagcagaggucagaggggacucugaccacag

SEQ ID NO: 364098 - RNA, 22 nt, Human
ccagcagaggugugacgggagg

SEQ ID NO: 364099 - RNA, 32 nt, Human
ccagcagaguacagcaauuuuugguguuuauu

SEQ ID NO: 364100 - RNA, 21 nt, Human
ccagcagauacagacuucuca

SEQ ID NO: 364101 - RNA, 32 nt, Human
ccagcagaugacccguugccuccccgggaaug

SEQ ID NO: 364102 - RNA, 32 nt, Human
ccagcagauggagggccaggaggaggaagagu

SEQ ID NO: 364103 - RNA, 32 nt, Human
ccagcagauuccgucucucaccuagacagaca

SEQ ID NO: 364104 - RNA, 32 nt, Human
ccagcagcaacucccugugcucccuucucuuu

SEQ ID NO: 364105 - RNA, 21 nt, Human
ccagcagcaagcagggcaguu

SEQ ID NO: 364106 - RNA, 32 nt, Human
ccagcagcacagacaucugcuccaucagaccu

SEQ ID NO: 364107 - RNA, 32 nt, Human
ccagcagcacccugcccgccucugccugccaa

SEQ ID NO: 364108 - RNA, 32 nt, Human
ccagcagcagaauggggaauggagaggugggc

SEQ ID NO: 364109 - RNA, 32 nt, Human
ccagcagcagcaucugccuuugucaucacugg

SEQ ID NO: 364110 - RNA, 32 nt, Human
ccagcagcagcuccaggucugcgcagcaggaa

SEQ ID NO: 364111 - RNA, 32 nt, Human
ccagcagcagcucuggaaggcagugcucagcc

SEQ ID NO: 364112 - RNA, 22 nt, Human
ccagcagcagcuggcccggcuu

SEQ ID NO: 364113 - RNA, 32 nt, Human
ccagcagcaggaagaaaccccaggaggaagaa

SEQ ID NO: 364114 - RNA, 23 nt, Human
ccagcagcaggaaggcugugccu

SEQ ID NO: 364115 - RNA, 22 nt, Human
ccagcagcaggagcuccaggcu

SEQ ID NO: 364116 - RNA, 32 nt, Human
ccagcagcaggaggagaaagaacauggcgggc

SEQ ID NO: 364117 - RNA, 32 nt, Human
ccagcagcaggccaaggcugugcucaagcauu

SEQ ID NO: 364118 - RNA, 18 nt, Human
ccagcagcaggcugcggc

SEQ ID NO: 364119 - RNA, 23 nt, Human
ccagcagcagggaggacgggagg

SEQ ID NO: 364120 - RNA, 25 nt, Human
ccagcagcagggcgcgggcaccggg

SEQ ID NO: 364121 - RNA, 32 nt, Human
ccagcagcaggggucccggcaggccugacccc

SEQ ID NO: 364122 - RNA, 22 nt, Human
ccagcagcagguccaggcggcu

SEQ ID NO: 364123 - RNA, 21 nt, Human
ccagcagcaggucccucgggc

SEQ ID NO: 364124 - RNA, 22 nt, Human
ccagcagcaguagccagggcuu

SEQ ID NO: 364125 - RNA, 32 nt, Human
ccagcagcagucuccgccaccuccgggcucca

SEQ ID NO: 364126 - RNA, 19 nt, Human
ccagcagcaguggcccuca

SEQ ID NO: 364127 - RNA, 32 nt, Human
ccagcagcagugggagaggcacugcucugggg

SEQ ID NO: 364128 - RNA, 32 nt, Human
ccagcagcauuccacacccagcucuuccucac

SEQ ID NO: 364129 - RNA, 23 nt, Human
ccagcagccaagacaguaaguga

SEQ ID NO: 364130 - RNA, 22 nt, Human
ccagcagccaagaggguagugg

SEQ ID NO: 364131 - RNA, 22 nt, Human
ccagcagccaccuccucugaga

SEQ ID NO: 364132 - RNA, 32 nt, Human
ccagcagccagggcagcuccaggugaggcggg

SEQ ID NO: 364133 - RNA, 32 nt, Human
ccagcagcccagccacagaggagccagcgaac

SEQ ID NO: 364134 - RNA, 21 nt, Human
ccagcagccccagacugccca

SEQ ID NO: 364135 - RNA, 32 nt, Human
ccagcagccccaggcauagcaucccuucuccu

SEQ ID NO: 364136 - RNA, 23 nt, Human
ccagcagcccggccacgcagcuu

SEQ ID NO: 364137 - RNA, 32 nt, Human
ccagcagcccucaacuugggacucuggguccg

SEQ ID NO: 364138 - RNA, 32 nt, Human
ccagcagcccuucgugaauccugcacugccac

SEQ ID NO: 364139 - RNA, 32 nt, Human
ccagcagccgccaucucacacgccucccuccu

SEQ ID NO: 364140 - RNA, 21 nt, Human
ccagcagccgccuccaugccc

SEQ ID NO: 364141 - RNA, 22 nt, Human
ccagcagccgccuccaugcccu

SEQ ID NO: 364142 - RNA, 23 nt, Human
ccagcagccgcgccgagccugac

SEQ ID NO: 364143 - RNA, 32 nt, Human
ccagcagccgcugaccauagccagcaaaagac

SEQ ID NO: 364144 - RNA, 32 nt, Human
ccagcagccgcuuucagccacugugugugcgu

SEQ ID NO: 364145 - RNA, 32 nt, Human
ccagcagccucagcgucugccuccccagcaca

SEQ ID NO: 364146 - RNA, 32 nt, Human
ccagcagccuccacagccuuuaucucaacagc

SEQ ID NO: 364147 - RNA, 32 nt, Human
ccagcagccucugcucccuccuggggacccac

SEQ ID NO: 364148 - RNA, 32 nt, Human
ccagcagccugacagaacacaggcuggcuuga

SEQ ID NO: 364149 - RNA, 31 nt, Human
ccagcagccuggucucccagucaggacacaa

SEQ ID NO: 364150 - RNA, 32 nt, Human
ccagcagccugucaaucacucgccaaggcagu

SEQ ID NO: 364151 - RNA, 18 nt, Human
ccagcagcggacugcagg

SEQ ID NO: 364152 - RNA, 32 nt, Human
ccagcagcggcguguccuccuugagugagagu

SEQ ID NO: 364153 - RNA, 32 nt, Human
ccagcagcuacaccccuacaggcuuccaggca

SEQ ID NO: 364154 - RNA, 20 nt, Human
ccagcagcuaccucagugac

SEQ ID NO: 364155 - RNA, 23 nt, Human
ccagcagcuaccugagccugacg

SEQ ID NO: 364156 - RNA, 32 nt, Human
ccagcagcuagcagaggcuuucucaucuuuua

SEQ ID NO: 364157 - RNA, 32 nt, Human
ccagcagcuccucauccccaaagucugcaggg

SEQ ID NO: 364158 - RNA, 18 nt, Human
ccagcagcucugccuggu

SEQ ID NO: 364159 - RNA, 32 nt, Human
ccagcagcucuugcccagagcugugcagugca

SEQ ID NO: 364160 - RNA, 19 nt, Human
ccagcagcugcagcucggc

SEQ ID NO: 364161 - RNA, 32 nt, Human
ccagcagcugcagcucggccucugcugccugc

SEQ ID NO: 364162 - RNA, 32 nt, Human
ccagcagcugcucugcucaccagccugacccc

SEQ ID NO: 364163 - RNA, 32 nt, Human
ccagcagcuguggugggggaggguuccccucc

SEQ ID NO: 364164 - RNA, 32 nt, Human
ccagcagcuuaaguccagcucauuucaguuuc

SEQ ID NO: 364165 - RNA, 32 nt, Human
ccagcaggaagagcuauaagcacuaagugcgu

SEQ ID NO: 364166 - RNA, 32 nt, Human
ccagcaggaagagcuauaagcacuagugcguc

SEQ ID NO: 364167 - RNA, 32 nt, Human
ccagcaggaaggucucaccugaggugaaccuu

SEQ ID NO: 364168 - RNA, 22 nt, Human
ccagcaggaauggguccucgaa

SEQ ID NO: 364169 - RNA, 21 nt, Human
ccagcaggacagagcugcuca

SEQ ID NO: 364170 - RNA, 32 nt, Human
ccagcaggagccaagaggaacaggaaaacaaa

SEQ ID NO: 364171 - RNA, 32 nt, Human
ccagcaggagcugaugccggaggcagugggug

SEQ ID NO: 364172 - RNA, 32 nt, Human
ccagcaggaggaagcccaggagcuggguccug

SEQ ID NO: 364173 - RNA, 32 nt, Human
ccagcaggaggaugagccagcucugcaguucc

SEQ ID NO: 364174 - RNA, 32 nt, Human
ccagcaggaggcagggguagagugauggaagg

SEQ ID NO: 364175 - RNA, 32 nt, Human
ccagcaggaggcugacgaguucccuggcagga

SEQ ID NO: 364176 - RNA, 32 nt, Human
ccagcaggaggugggcaacucaguccuacaac

SEQ ID NO: 364177 - RNA, 32 nt, Human
ccagcaggagugaacaggaacaggaaaacaaa

SEQ ID NO: 364178 - RNA, 32 nt, Human
ccagcaggcaaacugagggucucuuagggagg

SEQ ID NO: 364179 - RNA, 24 nt, Human
ccagcaggcagagguugcagugag

SEQ ID NO: 364180 - RNA, 32 nt, Human
ccagcaggcagcccugggcuggggguagggga

SEQ ID NO: 364181 - RNA, 20 nt, Human
ccagcaggccagguccaggg

SEQ ID NO: 364182 - RNA, 32 nt, Human
ccagcaggcccagcaugcagguggugggacac

SEQ ID NO: 364183 - RNA, 32 nt, Human
ccagcaggccccuggagguguguagucacucu

SEQ ID NO: 364184 - RNA, 32 nt, Human
ccagcaggcccuggugggcuugggaggaggca

SEQ ID NO: 364185 - RNA, 32 nt, Human
ccagcaggccuggguuccgugagcgcgaacuc

SEQ ID NO: 364186 - RNA, 21 nt, Human
ccagcaggcuagcucaggcuu

SEQ ID NO: 364187 - RNA, 32 nt, Human
ccagcaggcuucaugugcaugugcacacugcc

SEQ ID NO: 364188 - RNA, 32 nt, Human
ccagcagggaaacugugugcauucuacuguca

SEQ ID NO: 364189 - RNA, 21 nt, Human
ccagcagggaaaucuggccug

SEQ ID NO: 364190 - RNA, 19 nt, Human
ccagcagggagagaggguc

SEQ ID NO: 364191 - RNA, 32 nt, Human
ccagcagggagcucaggacagagcaggcuccc

SEQ ID NO: 364192 - RNA, 32 nt, Human
ccagcagggagcugggagcugggggaaacgac

SEQ ID NO: 364193 - RNA, 32 nt, Human
ccagcagggaggugccgguguccaggauggcc

SEQ ID NO: 364194 - RNA, 32 nt, Human
ccagcagggaggugggcauggcagggaaugga

SEQ ID NO: 364195 - RNA, 20 nt, Human
ccagcagggagucccuccag

SEQ ID NO: 364196 - RNA, 26 nt, Human
ccagcagggauggggcaucgguccug

SEQ ID NO: 364197 - RNA, 21 nt, Human
ccagcagggcuuccugucccg

SEQ ID NO: 364198 - RNA, 22 nt, Human
ccagcaggggaacuugagcuug

SEQ ID NO: 364199 - RNA, 22 nt, Human
ccagcaggggaccccuguuuug

SEQ ID NO: 364200 - RNA, 23 nt, Human
ccagcaggggagaggggccaucu

SEQ ID NO: 364201 - RNA, 32 nt, Human
ccagcaggggcagcagccaggucucugauggc

SEQ ID NO: 364202 - RNA, 23 nt, Human
ccagcaggggcugcccgagucug

SEQ ID NO: 364203 - RNA, 24 nt, Human
ccagcagggguccacguugucccg

SEQ ID NO: 364204 - RNA, 19 nt, Human
ccagcagguaggggcacag

SEQ ID NO: 364205 - RNA, 32 nt, Human
ccagcaggucaaaugauaguuucuccaucaag

SEQ ID NO: 364206 - RNA, 32 nt, Human
ccagcaggucucaugcaggcccagggcugggg

SEQ ID NO: 364207 - RNA, 32 nt, Human
ccagcagguggaugagaucacagaccucaacg

SEQ ID NO: 364208 - RNA, 20 nt, Human
ccagcaguagcagggcugcc

SEQ ID NO: 364209 - RNA, 32 nt, Human
ccagcaguaugcgaggcaucaccaccaucacg

SEQ ID NO: 364210 - RNA, 32 nt, Human
ccagcagucccaguuaugcauuucaaguuugg

SEQ ID NO: 364211 - RNA, 32 nt, Human
ccagcagucuaccugcucguugccugccacug

SEQ ID NO: 364212 - RNA, 32 nt, Human
ccagcagucugccuggaggccagggagcagug

SEQ ID NO: 364213 - RNA, 32 nt, Human
ccagcagucuugcccuuuacugagcuuagugu

SEQ ID NO: 364214 - RNA, 20 nt, Human
ccagcagugacccaugcgcu

SEQ ID NO: 364215 - RNA, 32 nt, Human
ccagcagugaccuaggaaaacaucccagagaa

SEQ ID NO: 364216 - RNA, 32 nt, Human
ccagcagugagcuguguaagcaccuuacauuc

SEQ ID NO: 364217 - RNA, 32 nt, Human
ccagcagugaggggcaggcucuucuggucacc

SEQ ID NO: 364218 - RNA, 21 nt, Human
ccagcagugcccccagcacug

SEQ ID NO: 364219 - RNA, 32 nt, Human
ccagcagugcccugcccugcccugcagugucu

SEQ ID NO: 364220 - RNA, 32 nt, Human
ccagcagugccuggcugucuccugugaugagc

SEQ ID NO: 364221 - RNA, 32 nt, Human
ccagcagugucauaggaguggagggggauaag

SEQ ID NO: 364222 - RNA, 32 nt, Human
ccagcaguucaagaccagccugggcaacacag

SEQ ID NO: 364223 - RNA, 32 nt, Human
ccagcauaaggcaucagguuguuagaugcugg

SEQ ID NO: 364224 - RNA, 32 nt, Human
ccagcauaccugcugguguguaaguguggacu

SEQ ID NO: 364225 - RNA, 32 nt, Human
ccagcauagaagcaagcaccaaugcagacaug

SEQ ID NO: 364226 - RNA, 19 nt, Human
ccagcauagacacaccuca

SEQ ID NO: 364227 - RNA, 20 nt, Human
ccagcauagugaaacccugu

SEQ ID NO: 364228 - RNA, 32 nt, Human
ccagcaucaacauguuuccauccuuggggaau

SEQ ID NO: 364229 - RNA, 32 nt, Human
ccagcaucaacuuaccggcuuuguaagagagc

SEQ ID NO: 364230 - RNA, 32 nt, Human
ccagcaucaagaggaagaagaagagggaggac

SEQ ID NO: 364231 - RNA, 32 nt, Human
ccagcaucaagauccgccggccuggauacaaa

SEQ ID NO: 364232 - RNA, 18 nt, Human
ccagcaucaagucuccag

SEQ ID NO: 364233 - RNA, 32 nt, Human
ccagcaucacaggucuaaaugcaucaggaauu

SEQ ID NO: 364234 - RNA, 32 nt, Human
ccagcaucagccccaauguccagccucuuuaa

SEQ ID NO: 364235 - RNA, 32 nt, Human
ccagcaucagcccuggggagagaggcucccaa

SEQ ID NO: 364236 - RNA, 32 nt, Human
ccagcaucaggcgugacccuauccugaucccu

SEQ ID NO: 364237 - RNA, 32 nt, Human
ccagcaucauggccuccucccaguacuucagg

SEQ ID NO: 364238 - RNA, 32 nt, Human
ccagcauccacucugucuuguccuccuggaag

SEQ ID NO: 364239 - RNA, 32 nt, Human
ccagcauccagcugccucguugucuauccugg

SEQ ID NO: 364240 - RNA, 32 nt, Human
ccagcaucccagagccaaaaacaaauagugcc

SEQ ID NO: 364241 - RNA, 24 nt, Human
ccagcaucccagcugggccagaga

SEQ ID NO: 364242 - RNA, 22 nt, Human
ccagcauccccgcccgaucucg

SEQ ID NO: 364243 - RNA, 21 nt, Human
ccagcauccuccugcugcagg

SEQ ID NO: 364244 - RNA, 24 nt, Human
ccagcauccuggggauccagcgga

SEQ ID NO: 364245 - RNA, 32 nt, Human
ccagcauccuuuaguacaguguuuccacucuu

SEQ ID NO: 364246 - RNA, 32 nt, Human
ccagcaucuagaugcagcuacucucauuccag

SEQ ID NO: 364247 - RNA, 18 nt, Human
ccagcaucucauuuuccc

SEQ ID NO: 364248 - RNA, 32 nt, Human
ccagcaucucggucuucagcucacaccagccu

SEQ ID NO: 364249 - RNA, 32 nt, Human
ccagcaucucuccccucagcccugucuccucu

SEQ ID NO: 364250 - RNA, 32 nt, Human
ccagcaucucuguugcuaacacacagagcuca

SEQ ID NO: 364251 - RNA, 32 nt, Human
ccagcaucugcagccacuuucugccagcaucu

SEQ ID NO: 364252 - RNA, 32 nt, Human
ccagcaucugcugucagguggcucaggucuuc

SEQ ID NO: 364253 - RNA, 32 nt, Human
ccagcaucuggaacagagccugggacaagcua

SEQ ID NO: 364254 - RNA, 32 nt, Human
ccagcaucuguguccagccuguguucuugcca

SEQ ID NO: 364255 - RNA, 30 nt, Human
ccagcaugaaagucucugccgcccuucugu

SEQ ID NO: 364256 - RNA, 32 nt, Human
ccagcaugccugucuaauuuuuguauuuuagu

SEQ ID NO: 364257 - RNA, 32 nt, Human
ccagcaugcuaccugaauggcgguuuuuaucc

SEQ ID NO: 364258 - RNA, 32 nt, Human
ccagcaugcucugcccaccccacgccgaggug

SEQ ID NO: 364259 - RNA, 32 nt, Human
ccagcaugcuuuuaauaugcugggugacccac

SEQ ID NO: 364260 - RNA, 32 nt, Human
ccagcauggaguauguggccucuugucauccc

SEQ ID NO: 364261 - RNA, 20 nt, Human
ccagcauggcaaaaccccgu

SEQ ID NO: 364262 - RNA, 30 nt, Human
ccagcauggccgcgcugcuccugggcgcgg

SEQ ID NO: 364263 - RNA, 21 nt, Human
ccagcauggccuaagccugac

SEQ ID NO: 364264 - RNA, 20 nt, Human
ccagcauggcgaaacccugu

SEQ ID NO: 364265 - RNA, 20 nt, Human
ccagcauggcgaaaccucgu

SEQ ID NO: 364266 - RNA, 24 nt, Human
ccagcauggcugcccccacggcug

SEQ ID NO: 364267 - RNA, 28 nt, Human
ccagcaugggaagaggccccuccagaga

SEQ ID NO: 364268 - RNA, 32 nt, Human
ccagcaugggagaaagauggaggccagauuca

SEQ ID NO: 364269 - RNA, 32 nt, Human
ccagcaugggcaacauaacaagaccccauccc

SEQ ID NO: 364270 - RNA, 20 nt, Human
ccagcauggugaaaccccgu

SEQ ID NO: 364271 - RNA, 20 nt, Human
ccagcauggugaaacccugu

SEQ ID NO: 364272 - RNA, 20 nt, Human
ccagcauguccagccccuga

SEQ ID NO: 364273 - RNA, 31 nt, Human
ccagcauguccauuugaacaugcagaggguu

SEQ ID NO: 364274 - RNA, 32 nt, Human
ccagcaugugccagucucgggggcgagguaca

SEQ ID NO: 364275 - RNA, 32 nt, Human
ccagcauguggggacuccagccaccugaguua

SEQ ID NO: 364276 - RNA, 32 nt, Human
ccagcauguguguccacacauacauaggaugg

SEQ ID NO: 364277 - RNA, 21 nt, Human
ccagcauuaccuucccuuccc

SEQ ID NO: 364278 - RNA, 32 nt, Human
ccagcauuccaaagugcugggauuacaggugu

SEQ ID NO: 364279 - RNA, 32 nt, Human
ccagcauuccaaauagacucagacucacugcc

SEQ ID NO: 364280 - RNA, 16 nt, Human
ccagcauuccagcucu

SEQ ID NO: 364281 - RNA, 32 nt, Human
ccagcauuccagcuguuucacccuucagcaac

SEQ ID NO: 364282 - RNA, 21 nt, Human
ccagcauuccccacagcacug

SEQ ID NO: 364283 - RNA, 32 nt, Human
ccagcauugcuacugugcaggccaaggguacu

SEQ ID NO: 364284 - RNA, 32 nt, Human
ccagcauuggucauaaccuucugccucccuaa

SEQ ID NO: 364285 - RNA, 32 nt, Human
ccagcauugucccagugcuuugaguuggacgg

SEQ ID NO: 364286 - RNA, 32 nt, Human
ccagcauugugcuuuuucccugggcuuauuug

SEQ ID NO: 364287 - RNA, 32 nt, Human
ccagcauuugauguucccucucuaaugauaac

SEQ ID NO: 364288 - RNA, 32 nt, Human
ccagcauuugggaggcucaggugggaggauug

SEQ ID NO: 364289 - RNA, 32 nt, Human
ccagcauuugggaggcugaggcaggcagauca

SEQ ID NO: 364290 - RNA, 32 nt, Human
ccagcauuugguucuucucaagaguugaccau

SEQ ID NO: 364291 - RNA, 22 nt, Human
ccagcauuugugaagcuuuugc

SEQ ID NO: 364292 - RNA, 22 nt, Human
ccagcauuuucccacuccagug

SEQ ID NO: 364293 - RNA, 32 nt, Human
ccagcauuuucuucucuucauugcugcuucuc

SEQ ID NO: 364294 - RNA, 22 nt, Human
ccagccaaaaggggggauugug

SEQ ID NO: 364295 - RNA, 32 nt, Human
ccagccaaaucagcuaggccauggccuugccu

SEQ ID NO: 364296 - RNA, 32 nt, Human
ccagccaacacaugggcuacugcugggaagcc

SEQ ID NO: 364297 - RNA, 32 nt, Human
ccagccaacagcuguggcuuaaaucugagucc

SEQ ID NO: 364298 - RNA, 32 nt, Human
ccagccaacauggcaaaaccccaucucuacua

SEQ ID NO: 364299 - RNA, 24 nt, Human
ccagccaacauggcgaaaccaugu

SEQ ID NO: 364300 - RNA, 32 nt, Human
ccagccaacauggcgaaaccaugucucuacua

SEQ ID NO: 364301 - RNA, 32 nt, Human
ccagccaacauggugaaaacccugucucuacu

SEQ ID NO: 364302 - RNA, 32 nt, Human
ccagccaagaucacccaggagcuugugccccc

SEQ ID NO: 364303 - RNA, 32 nt, Human
ccagccaaggagcagcccugcccagggggcau

SEQ ID NO: 364304 - RNA, 32 nt, Human
ccagccaaggcaacauagugaggccccaucuu

SEQ ID NO: 364305 - RNA, 32 nt, Human
ccagccaaggcuguucaggugggaccauggug

SEQ ID NO: 364306 - RNA, 32 nt, Human
ccagccaagggcccuggccacgugugcgccac

SEQ ID NO: 364307 - RNA, 32 nt, Human
ccagccaagggugagcaucucugcugagacag

SEQ ID NO: 364308 - RNA, 32 nt, Human
ccagccaagugcgguaccagcccuucgggccu

SEQ ID NO: 364309 - RNA, 32 nt, Human
ccagccaaguggugcuuucuuccaaaugccuu

SEQ ID NO: 364310 - RNA, 32 nt, Human
ccagccaauuuagugaaaccccaucucuacua

SEQ ID NO: 364311 - RNA, 32 nt, Human
ccagccacaaagcucauacccagcccuaccaa

SEQ ID NO: 364312 - RNA, 32 nt, Human
ccagccacaaguguuggagcugcagagagacc

SEQ ID NO: 364313 - RNA, 32 nt, Human
ccagccacacaggcacaugcacaggcacggug

SEQ ID NO: 364314 - RNA, 32 nt, Human
ccagccacagcacuccagccugggugacagag

SEQ ID NO: 364315 - RNA, 25 nt, Human
ccagccacagcgggagcggcagcaa

SEQ ID NO: 364316 - RNA, 32 nt, Human
ccagccacaggcaggaugcuccuugaucacgg

SEQ ID NO: 364317 - RNA, 32 nt, Human
ccagccacauguggacccucagccuggguggg

SEQ ID NO: 364318 - RNA, 20 nt, Human
ccagccaccagggagcugcc

SEQ ID NO: 364319 - RNA, 32 nt, Human
ccagccaccagucccuggcaugcccagugauc

SEQ ID NO: 364320 - RNA, 32 nt, Human
ccagccacccagccaggaggggcuguccaauc

SEQ ID NO: 364321 - RNA, 32 nt, Human
ccagccaccccagaaaagcugcagccugcagg

SEQ ID NO: 364322 - RNA, 19 nt, Human
ccagccacccccagcccca

SEQ ID NO: 364323 - RNA, 32 nt, Human
ccagccaccuccacuugcuuccuccuccuucc

SEQ ID NO: 364324 - RNA, 32 nt, Human
ccagccaccucggggaacuccagaccaagggu

SEQ ID NO: 364325 - RNA, 32 nt, Human
ccagccaccucugcaaccugccaccuccugcu

SEQ ID NO: 364326 - RNA, 18 nt, Human
ccagccaccuggcccuca

SEQ ID NO: 364327 - RNA, 23 nt, Human
ccagccacguucccuuuccuccu

SEQ ID NO: 364328 - RNA, 32 nt, Human
ccagccacuauuaggccaucaaaggaguccuc

SEQ ID NO: 364329 - RNA, 20 nt, Human
ccagccacucaggaggcuga

SEQ ID NO: 364330 - RNA, 32 nt, Human
ccagccacuccugaugggguugcucacacugc

SEQ ID NO: 364331 - RNA, 32 nt, Human
ccagccacucucccuggggccugguggguagg

SEQ ID NO: 364332 - RNA, 23 nt, Human
ccagccacucucccuucccugaa

SEQ ID NO: 364333 - RNA, 32 nt, Human
ccagccacugaggagggguggcagaggauugu

SEQ ID NO: 364334 - RNA, 32 nt, Human
ccagccacugcaucugcugcacaguugaacga

SEQ ID NO: 364335 - RNA, 32 nt, Human
ccagccacugcuuagcuaucauagucaccauu

SEQ ID NO: 364336 - RNA, 32 nt, Human
ccagccacuuguccuagccaaauguccaaaac

SEQ ID NO: 364337 - RNA, 32 nt, Human
ccagccagaacccauuuugcagucuucucuuc

SEQ ID NO: 364338 - RNA, 32 nt, Human
ccagccagacaagauggcaaagugugcagaug

SEQ ID NO: 364339 - RNA, 32 nt, Human
ccagccagacacacucccaugacgcccacagc

SEQ ID NO: 364340 - RNA, 32 nt, Human
ccagccagacuggccucaauggcggacucagu

SEQ ID NO: 364341 - RNA, 32 nt, Human
ccagccagagcccacugcugggaccuucaagc

SEQ ID NO: 364342 - RNA, 32 nt, Human
ccagccagaugcgccugugaaccaaagcuucg

SEQ ID NO: 364343 - RNA, 32 nt, Human
ccagccagauggacuccagccugccuggcagg

SEQ ID NO: 364344 - RNA, 32 nt, Human
ccagccagauggggucacaaugcugcagaaaa

SEQ ID NO: 364345 - RNA, 32 nt, Human
ccagccagcaccucugccuucucagggacaag

SEQ ID NO: 364346 - RNA, 32 nt, Human
ccagccagcauuccgagugacugagguggaug

SEQ ID NO: 364347 - RNA, 32 nt, Human
ccagccagccagggcccugcccagcuucaauu

SEQ ID NO: 364348 - RNA, 20 nt, Human
ccagccagccccagacucca

SEQ ID NO: 364349 - RNA, 32 nt, Human
ccagccagcgccucccuccaccccaggacgcc

SEQ ID NO: 364350 - RNA, 32 nt, Human
ccagccagcucuugccgccaccucggucgcga

SEQ ID NO: 364351 - RNA, 32 nt, Human
ccagccagcugcagguggcaucugccacgaag

SEQ ID NO: 364352 - RNA, 32 nt, Human
ccagccaggaaggcuggggcccuacuguuugu

SEQ ID NO: 364353 - RNA, 32 nt, Human
ccagccaggaaggguggaggaaaguucuuugc

SEQ ID NO: 364354 - RNA, 32 nt, Human
ccagccaggagagaggacagagccagggcaga

SEQ ID NO: 364355 - RNA, 32 nt, Human
ccagccaggagcugugggaggaaacgcccuca

SEQ ID NO: 364356 - RNA, 32 nt, Human
ccagccaggagggacccccagguccagaguga

SEQ ID NO: 364357 - RNA, 32 nt, Human
ccagccaggcccccucccuggaggccagcccc

SEQ ID NO: 364358 - RNA, 18 nt, Human
ccagccaggccuaagggc

SEQ ID NO: 364359 - RNA, 22 nt, Human
ccagccaggccucccugcucug

SEQ ID NO: 364360 - RNA, 32 nt, Human
ccagccaggccugcugcuagugugggaggggu

SEQ ID NO: 364361 - RNA, 17 nt, Human
ccagccaggccuggcca

SEQ ID NO: 364362 - RNA, 32 nt, Human
ccagccaggccugggcagugaccucuuucucu

SEQ ID NO: 364363 - RNA, 32 nt, Human
ccagccaggccuugguccucagcugcugucau

SEQ ID NO: 364364 - RNA, 32 nt, Human
ccagccagggagaccagguguugucugacauc

SEQ ID NO: 364365 - RNA, 32 nt, Human
ccagccagggaggggcagcugcagugaccagg

SEQ ID NO: 364366 - RNA, 32 nt, Human
ccagccagggaugcagaggccacccagaggcc

SEQ ID NO: 364367 - RNA, 32 nt, Human
ccagccagggcaacauaauaagacuuuucucu

SEQ ID NO: 364368 - RNA, 32 nt, Human
ccagccagggcaacauggugaaaccccaucuc

SEQ ID NO: 364369 - RNA, 32 nt, Human
ccagccagggcaacauggugagaccucaucuc

SEQ ID NO: 364370 - RNA, 32 nt, Human
ccagccagggcccggccuccugacucuccuac

SEQ ID NO: 364371 - RNA, 32 nt, Human
ccagccagggcuauuaaauaauaacaggaggg

SEQ ID NO: 364372 - RNA, 32 nt, Human
ccagccagggcugagaggauucgagguggcug

SEQ ID NO: 364373 - RNA, 32 nt, Human
ccagccagggcugaggagcugucacagagagg

SEQ ID NO: 364374 - RNA, 32 nt, Human
ccagccaggggccagacacagugcaggcacag

SEQ ID NO: 364375 - RNA, 32 nt, Human
ccagccagguccucaccuguguguacaccagc

SEQ ID NO: 364376 - RNA, 32 nt, Human
ccagccaguuuccaugugaaaaagccaucugg

SEQ ID NO: 364377 - RNA, 21 nt, Human
ccagccaguuucuggcugccu

SEQ ID NO: 364378 - RNA, 32 nt, Human
ccagccauaaaucugcauccugggacacaggc

SEQ ID NO: 364379 - RNA, 32 nt, Human
ccagccauagcuacuucuuuaagcuccuccag

SEQ ID NO: 364380 - RNA, 32 nt, Human
ccagccauaggcucuucucuguccgcagggcu

SEQ ID NO: 364381 - RNA, 32 nt, Human
ccagccauccugggaccccaggcgugcagguu

SEQ ID NO: 364382 - RNA, 31 nt, Human
ccagccaugaccuucgggcgcagcggggcgg

SEQ ID NO: 364383 - RNA, 32 nt, Human
ccagccaugccaccgcccuggccacccugcgg

SEQ ID NO: 364384 - RNA, 31 nt, Human
ccagccaugccuuuaaaccgcacuuugucca

SEQ ID NO: 364385 - RNA, 32 nt, Human
ccagccaugcuuccuguacagccuguggaacu

SEQ ID NO: 364386 - RNA, 32 nt, Human
ccagccaugcuuccuguacggccugcagaacu

SEQ ID NO: 364387 - RNA, 32 nt, Human
ccagccaugcuuccuguacggccuguggaacc

SEQ ID NO: 364388 - RNA, 32 nt, Human
ccagccaugcuuccuguauagccugcgggacu

SEQ ID NO: 364389 - RNA, 32 nt, Human
ccagccaugguggcgggcgccuguaaucccag

SEQ ID NO: 364390 - RNA, 32 nt, Human
ccagccauguguuggggagacaucaaaaccac

SEQ ID NO: 364391 - RNA, 32 nt, Human
ccagcccaaacagaaccuucagacaacugcag

SEQ ID NO: 364392 - RNA, 32 nt, Human
ccagcccaaacucaggcuggaggcagccccga

SEQ ID NO: 364393 - RNA, 23 nt, Human
ccagcccaaacugcacagcccca

SEQ ID NO: 364394 - RNA, 32 nt, Human
ccagcccaacuccugguucccugaugaagcuu

SEQ ID NO: 364395 - RNA, 32 nt, Human
ccagcccaacuuccuguugcuggccccugccc

SEQ ID NO: 364396 - RNA, 32 nt, Human
ccagcccaagaggagcccccacugccugcggg

SEQ ID NO: 364397 - RNA, 32 nt, Human
ccagcccaaucacucccugccugguccagaac

SEQ ID NO: 364398 - RNA, 32 nt, Human
ccagcccacaccauuccagugcucagccuagc

SEQ ID NO: 364399 - RNA, 32 nt, Human
ccagcccacagcucuuucuacucugcagacag

SEQ ID NO: 364400 - RNA, 32 nt, Human
ccagcccacagcuucucccagccugaaaccaa

SEQ ID NO: 364401 - RNA, 22 nt, Human
ccagcccacauuccuccuuccu

SEQ ID NO: 364402 - RNA, 32 nt, Human
ccagcccaccagugccuggccagccugccccc

SEQ ID NO: 364403 - RNA, 32 nt, Human
ccagcccaccccacccucccugggcagggucu

SEQ ID NO: 364404 - RNA, 32 nt, Human
ccagcccacccgcaugcacagagcaggggcua

SEQ ID NO: 364405 - RNA, 26 nt, Human
ccagcccacccugccccuuucuuccc

SEQ ID NO: 364406 - RNA, 24 nt, Human
ccagcccaccuccgccuccaagua

SEQ ID NO: 364407 - RNA, 16 nt, Human
ccagcccacgccuggc

SEQ ID NO: 364408 - RNA, 21 nt, Human
ccagcccacuccacccugcca

SEQ ID NO: 364409 - RNA, 32 nt, Human
ccagcccacuccagugugaucugcacccuggc

SEQ ID NO: 364410 - RNA, 32 nt, Human
ccagcccagaacugaagcgcugcggcauggcg

SEQ ID NO: 364411 - RNA, 23 nt, Human
ccagcccagaacuuuuccuucuc

SEQ ID NO: 364412 - RNA, 32 nt, Human
ccagcccagaauccuccucucccucaccagag

SEQ ID NO: 364413 - RNA, 23 nt, Human
ccagcccagacaacagagugaga

SEQ ID NO: 364414 - RNA, 32 nt, Human
ccagcccagacuccucagacuuuucucucagu

SEQ ID NO: 364415 - RNA, 32 nt, Human
ccagcccagagcacucggccagcagcgacucc

SEQ ID NO: 364416 - RNA, 19 nt, Human
ccagcccagauggcacuca

SEQ ID NO: 364417 - RNA, 32 nt, Human
ccagcccagcacagcaagcgaggccauuuguc

SEQ ID NO: 364418 - RNA, 23 nt, Human
ccagcccagcacuggaccauucc

SEQ ID NO: 364419 - RNA, 32 nt, Human
ccagcccagcagcugcagcugcuaagauggcc

SEQ ID NO: 364420 - RNA, 32 nt, Human
ccagcccagcaugcaccagcucuuucagaaaa

SEQ ID NO: 364421 - RNA, 32 nt, Human
ccagcccagcccacagcagucucaaccucucg

SEQ ID NO: 364422 - RNA, 32 nt, Human
ccagcccagcccagccuacccaaccucaucuc

SEQ ID NO: 364423 - RNA, 32 nt, Human
ccagcccagccccuccaugcacauuuggacgc

SEQ ID NO: 364424 - RNA, 32 nt, Human
ccagcccagccccugaacggcauguuagacag

SEQ ID NO: 364425 - RNA, 22 nt, Human
ccagcccagcgccucccacccc

SEQ ID NO: 364426 - RNA, 32 nt, Human
ccagcccagcuggccggaaggagacugugguu

SEQ ID NO: 364427 - RNA, 32 nt, Human
ccagcccagcuuugaacaguccugggccccaa

SEQ ID NO: 364428 - RNA, 32 nt, Human
ccagcccaggagguggcuggauugcagggcug

SEQ ID NO: 364429 - RNA, 32 nt, Human
ccagcccaggaguucaagaccagccugggcaa

SEQ ID NO: 364430 - RNA, 23 nt, Human
ccagcccaggcaacagagugaga

SEQ ID NO: 364431 - RNA, 32 nt, Human
ccagcccaggcaacauggugaaaccccaucuc

SEQ ID NO: 364432 - RNA, 32 nt, Human
ccagcccaggcagagaucaggugggcagaggc

SEQ ID NO: 364433 - RNA, 24 nt, Human
ccagcccaggccccugggcaucuc

SEQ ID NO: 364434 - RNA, 21 nt, Human
ccagcccaggcccucuccccc

SEQ ID NO: 364435 - RNA, 21 nt, Human
ccagcccaggcccugccuccc

SEQ ID NO: 364436 - RNA, 32 nt, Human
ccagcccagggacuuuuccggaaaguuuuuau

SEQ ID NO: 364437 - RNA, 18 nt, Human
ccagcccagggcucuggg

SEQ ID NO: 364438 - RNA, 21 nt, Human
ccagcccaggggccccuuccc

SEQ ID NO: 364439 - RNA, 32 nt, Human
ccagcccaggucugcacucgccuggaucaccu

SEQ ID NO: 364440 - RNA, 23 nt, Human
ccagcccaggugacagagcgaga

SEQ ID NO: 364441 - RNA, 32 nt, Human
ccagcccaguccaggaccuggcuggaugcuuc

SEQ ID NO: 364442 - RNA, 32 nt, Human
ccagcccaguccccugucuccuggggccaggc

SEQ ID NO: 364443 - RNA, 31 nt, Human
ccagcccaguuucaaacuccugaccucaggu

SEQ ID NO: 364444 - RNA, 32 nt, Human
ccagcccaucauuccuuuuccccuuggcacuc

SEQ ID NO: 364445 - RNA, 32 nt, Human
ccagcccauccuaccagccuucugccacguca

SEQ ID NO: 364446 - RNA, 32 nt, Human
ccagcccaucuucucccgcuucuugcgcuccu

SEQ ID NO: 364447 - RNA, 32 nt, Human
ccagcccaugcaccccuccccuaucccugaug

SEQ ID NO: 364448 - RNA, 32 nt, Human
ccagcccaugccucacagacaguaggauccca

SEQ ID NO: 364449 - RNA, 32 nt, Human
ccagcccaugucaggggaacagccuggaacag

SEQ ID NO: 364450 - RNA, 32 nt, Human
ccagcccauuggagaaaaguuacuguucaguc

SEQ ID NO: 364451 - RNA, 28 nt, Human
ccagccccaaaacucuccucugcugcug

SEQ ID NO: 364452 - RNA, 23 nt, Human
ccagccccaaaacuggggcuuca

SEQ ID NO: 364453 - RNA, 21 nt, Human
ccagccccaaaaugccaauag

SEQ ID NO: 364454 - RNA, 19 nt, Human
ccagccccaaacugagaca

SEQ ID NO: 364455 - RNA, 32 nt, Human
ccagccccaaagccaccggcaugugaagcugc

SEQ ID NO: 364456 - RNA, 32 nt, Human
ccagccccaaaggcaauucuguuuucagauug

SEQ ID NO: 364457 - RNA, 32 nt, Human
ccagccccaacauuucacuccagccuggcccc

SEQ ID NO: 364458 - RNA, 24 nt, Human
ccagccccaagagaccuguugcug

SEQ ID NO: 364459 - RNA, 28 nt, Human
ccagccccaaguggcuuuuucaauuaca

SEQ ID NO: 364460 - RNA, 21 nt, Human
ccagccccaaguuccagcuca

SEQ ID NO: 364461 - RNA, 32 nt, Human
ccagccccacacaggcccagcacugcauuugg

SEQ ID NO: 364462 - RNA, 24 nt, Human
ccagccccacaccugcuccuuccc

SEQ ID NO: 364463 - RNA, 20 nt, Human
ccagccccacagcccacguc

SEQ ID NO: 364464 - RNA, 20 nt, Human
ccagccccaccccuaagugc

SEQ ID NO: 364465 - RNA, 20 nt, Human
ccagccccacccugucccca

SEQ ID NO: 364466 - RNA, 32 nt, Human
ccagccccacccuuggccaucucccuuuggga

SEQ ID NO: 364467 - RNA, 32 nt, Human
ccagccccaccgcccacgccuggguaguagca

SEQ ID NO: 364468 - RNA, 23 nt, Human
ccagccccaccuuguacacacag

SEQ ID NO: 364469 - RNA, 18 nt, Human
ccagccccacgcugccca

SEQ ID NO: 364470 - RNA, 17 nt, Human
ccagccccacuggcccc

SEQ ID NO: 364471 - RNA, 32 nt, Human
ccagccccagaacccucuggggaagaauguug

SEQ ID NO: 364472 - RNA, 32 nt, Human
ccagccccagagggaguggcgagcccagcugc

SEQ ID NO: 364473 - RNA, 32 nt, Human
ccagccccagcacggcccggucccgcaugcca

SEQ ID NO: 364474 - RNA, 32 nt, Human
ccagccccagcccaguccuccuaggagcagga

SEQ ID NO: 364475 - RNA, 32 nt, Human
ccagccccagccccuggagauugcugucugcu

SEQ ID NO: 364476 - RNA, 32 nt, Human
ccagccccagccgcuccuccacgccuguccuu

SEQ ID NO: 364477 - RNA, 32 nt, Human
ccagccccagcucugcauaccugcaccugcac

SEQ ID NO: 364478 - RNA, 32 nt, Human
ccagccccagcuguuggcuacaugaguauuua

SEQ ID NO: 364479 - RNA, 32 nt, Human
ccagccccaggccaagcaaaaagaaagccccg

SEQ ID NO: 364480 - RNA, 32 nt, Human
ccagccccagggcuccagcccagcccggugga

SEQ ID NO: 364481 - RNA, 32 nt, Human
ccagccccaguaagagcacaagaggaagagag

SEQ ID NO: 364482 - RNA, 32 nt, Human
ccagccccaguaggaggagagcaggcagagcu

SEQ ID NO: 364483 - RNA, 32 nt, Human
ccagccccagugggcaagaccaaaguguggcg

SEQ ID NO: 364484 - RNA, 32 nt, Human
ccagccccaguucuuuuaucccugggcccaac

SEQ ID NO: 364485 - RNA, 24 nt, Human
ccagccccaucaccgaaacacaua

SEQ ID NO: 364486 - RNA, 23 nt, Human
ccagccccaucccccacagucca

SEQ ID NO: 364487 - RNA, 32 nt, Human
ccagccccaucggauccagacccggccaccag

SEQ ID NO: 364488 - RNA, 32 nt, Human
ccagccccaucuuacccgucugguuuuugagu

SEQ ID NO: 364489 - RNA, 32 nt, Human
ccagccccaugaggacccucaggcccggggcg

SEQ ID NO: 364490 - RNA, 21 nt, Human
ccagccccaugcaugcugcug

SEQ ID NO: 364491 - RNA, 32 nt, Human
ccagccccaugccaugguaggaggcagagucu

SEQ ID NO: 364492 - RNA, 32 nt, Human
ccagccccauugcccaccuccacuucccauug

SEQ ID NO: 364493 - RNA, 32 nt, Human
ccagcccccacugugcccagacaugugugcuc

SEQ ID NO: 364494 - RNA, 22 nt, Human
ccagcccccagcaagggcacuc

SEQ ID NO: 364495 - RNA, 32 nt, Human
ccagcccccagccuccucccucagccugggcu

SEQ ID NO: 364496 - RNA, 32 nt, Human
ccagcccccagccuugguggggaccaagcagc

SEQ ID NO: 364497 - RNA, 32 nt, Human
ccagcccccaggagcaagaccaagaccgcagg

SEQ ID NO: 364498 - RNA, 25 nt, Human
ccagcccccaggaggccccugcugc

SEQ ID NO: 364499 - RNA, 21 nt, Human
ccagcccccagugggacauca

SEQ ID NO: 364500 - RNA, 23 nt, Human
ccagccccccaagccuggccuca

SEQ ID NO: 364501 - RNA, 20 nt, Human
ccagccccccacacuaggcu

SEQ ID NO: 364502 - RNA, 26 nt, Human
ccagccccccgcggcugagguacuca

SEQ ID NO: 364503 - RNA, 21 nt, Human
ccagcccccgaccccgggcca

SEQ ID NO: 364504 - RNA, 24 nt, Human
ccagcccccggagagucaggccca

SEQ ID NO: 364505 - RNA, 23 nt, Human
ccagcccccggggauucaggcuc

SEQ ID NO: 364506 - RNA, 18 nt, Human
ccagcccccuccauccca

SEQ ID NO: 364507 - RNA, 19 nt, Human
ccagcccccugaccacuca

SEQ ID NO: 364508 - RNA, 23 nt, Human
ccagcccccugcagcccugcugc

SEQ ID NO: 364509 - RNA, 22 nt, Human
ccagcccccugccccgggcccg

SEQ ID NO: 364510 - RNA, 32 nt, Human
ccagcccccugcccuuuucuugcccugucucu

SEQ ID NO: 364511 - RNA, 32 nt, Human
ccagcccccugccggaugucuggcuggcaucu

SEQ ID NO: 364512 - RNA, 22 nt, Human
ccagcccccugugccuggcccc

SEQ ID NO: 364513 - RNA, 19 nt, Human
ccagcccccuucucccaca

SEQ ID NO: 364514 - RNA, 32 nt, Human
ccagcccccuuucccuuccuccuccuccagau

SEQ ID NO: 364515 - RNA, 32 nt, Human
ccagccccgaggaggaggaggaggaggaggaa

SEQ ID NO: 364516 - RNA, 21 nt, Human
ccagccccgccgggggcgcuc

SEQ ID NO: 364517 - RNA, 18 nt, Human
ccagccccgcugccccca

SEQ ID NO: 364518 - RNA, 19 nt, Human
ccagccccggccacagcca

SEQ ID NO: 364519 - RNA, 18 nt, Human
ccagccccguggccgcca

SEQ ID NO: 364520 - RNA, 32 nt, Human
ccagccccucacgccuccucucagucuacuca

SEQ ID NO: 364521 - RNA, 21 nt, Human
ccagccccucaggaacccuca

SEQ ID NO: 364522 - RNA, 32 nt, Human
ccagccccuccaaaggcucuuuccacagcugu

SEQ ID NO: 364523 - RNA, 32 nt, Human
ccagccccuccaccccuccccuacccccacaa

SEQ ID NO: 364524 - RNA, 32 nt, Human
ccagccccuccaccccuucuucaugcacagcu

SEQ ID NO: 364525 - RNA, 18 nt, Human
ccagccccuccagcacca

SEQ ID NO: 364526 - RNA, 32 nt, Human
ccagccccuccagcagcacagcauguccuggg

SEQ ID NO: 364527 - RNA, 32 nt, Human
ccagccccuccaggaccccuggacccacugcc

SEQ ID NO: 364528 - RNA, 32 nt, Human
ccagccccuccaggacccggucccccugcugc

SEQ ID NO: 364529 - RNA, 21 nt, Human
ccagccccuccagggcuuuca

SEQ ID NO: 364530 - RNA, 32 nt, Human
ccagccccuccaguacaaucccacuggaagaa

SEQ ID NO: 364531 - RNA, 21 nt, Human
ccagccccuccaucuguacuu

SEQ ID NO: 364532 - RNA, 17 nt, Human
ccagccccucccagcac

SEQ ID NO: 364533 - RNA, 22 nt, Human
ccagccccuccccagacucuca

SEQ ID NO: 364534 - RNA, 32 nt, Human
ccagccccucccccaauaaacucgccucuugg

SEQ ID NO: 364535 - RNA, 32 nt, Human
ccagccccuccccuccccuaccagucuucccg

SEQ ID NO: 364536 - RNA, 19 nt, Human
ccagccccucccucccacu

SEQ ID NO: 364537 - RNA, 21 nt, Human
ccagccccucccucuggguuc

SEQ ID NO: 364538 - RNA, 20 nt, Human
ccagccccuccucaccacuc

SEQ ID NO: 364539 - RNA, 32 nt, Human
ccagccccuccuccccacaaccccuagugggg

SEQ ID NO: 364540 - RNA, 25 nt, Human
ccagccccuccuccucagccacuca

SEQ ID NO: 364541 - RNA, 23 nt, Human
ccagccccuccucugaacacuca

SEQ ID NO: 364542 - RNA, 22 nt, Human
ccagccccuccucuuucccuca

SEQ ID NO: 364543 - RNA, 23 nt, Human
ccagccccucgaacgccuggcuu

SEQ ID NO: 364544 - RNA, 21 nt, Human
ccagccccucucccagacuca

SEQ ID NO: 364545 - RNA, 22 nt, Human
ccagccccucugcagagacaca

SEQ ID NO: 364546 - RNA, 21 nt, Human
ccagccccucuucugugccuu

SEQ ID NO: 364547 - RNA, 32 nt, Human
ccagccccugaccccaugucuccuggacucag

SEQ ID NO: 364548 - RNA, 21 nt, Human
ccagccccugcaacccaggcu

SEQ ID NO: 364549 - RNA, 32 nt, Human
ccagccccugcacacucccacccaggacagcc

SEQ ID NO: 364550 - RNA, 32 nt, Human
ccagccccugcagcaggaagcccccaguccca

SEQ ID NO: 364551 - RNA, 32 nt, Human
ccagccccugcagggauucugggcuacgagug

SEQ ID NO: 364552 - RNA, 32 nt, Human
ccagccccugcaggggcccaggcugccucuca

SEQ ID NO: 364553 - RNA, 32 nt, Human
ccagccccugccagucccccauggccccgugg

SEQ ID NO: 364554 - RNA, 21 nt, Human
ccagccccugccauaggccca

SEQ ID NO: 364555 - RNA, 21 nt, Human
ccagccccugcccccaggcuu

SEQ ID NO: 364556 - RNA, 21 nt, Human
ccagccccugccgcccagcuc

SEQ ID NO: 364557 - RNA, 20 nt, Human
ccagccccugcggcugcaag

SEQ ID NO: 364558 - RNA, 18 nt, Human
ccagccccugcucagguc

SEQ ID NO: 364559 - RNA, 32 nt, Human
ccagccccugcucccucugcggggaacguggc

SEQ ID NO: 364560 - RNA, 32 nt, Human
ccagccccugcuccuccucccagggagccaac

SEQ ID NO: 364561 - RNA, 22 nt, Human
ccagccccuggaugcagccuca

SEQ ID NO: 364562 - RNA, 21 nt, Human
ccagccccuggcccaggguca

SEQ ID NO: 364563 - RNA, 21 nt, Human
ccagccccuggcuuccugacc

SEQ ID NO: 364564 - RNA, 24 nt, Human
ccagccccugggcuggaagcacca

SEQ ID NO: 364565 - RNA, 24 nt, Human
ccagccccugucccuggggccuca

SEQ ID NO: 364566 - RNA, 18 nt, Human
ccagccccuguccucccu

SEQ ID NO: 364567 - RNA, 23 nt, Human
ccagccccugugggcgaggcuca

SEQ ID NO: 364568 - RNA, 23 nt, Human
ccagccccuguucucccagcuca

SEQ ID NO: 364569 - RNA, 21 nt, Human
ccagccccuguuuacugguuc

SEQ ID NO: 364570 - RNA, 22 nt, Human
ccagccccuuccaacccaguca

SEQ ID NO: 364571 - RNA, 20 nt, Human
ccagccccuuccaugguacu

SEQ ID NO: 364572 - RNA, 20 nt, Human
ccagccccuucccccaggcu

SEQ ID NO: 364573 - RNA, 26 nt, Human
ccagccccuuccucuguccgugcuca

SEQ ID NO: 364574 - RNA, 25 nt, Human
ccagccccuuccuucugcccacccg

SEQ ID NO: 364575 - RNA, 23 nt, Human
ccagccccuucuugucuuggcac

SEQ ID NO: 364576 - RNA, 21 nt, Human
ccagccccuuggaacaggcuu

SEQ ID NO: 364577 - RNA, 21 nt, Human
ccagccccuugucccaugccc

SEQ ID NO: 364578 - RNA, 32 nt, Human
ccagccccuuguccucugccuucugcuggcag

SEQ ID NO: 364579 - RNA, 32 nt, Human
ccagccccuuucucccucugccugaccacugg

SEQ ID NO: 364580 - RNA, 32 nt, Human
ccagccccuuucuucagggccccaaggggaaa

SEQ ID NO: 364581 - RNA, 25 nt, Human
ccagcccgacucccuccuccuuccc

SEQ ID NO: 364582 - RNA, 32 nt, Human
ccagcccgaguaagggcaucccggagccccca

SEQ ID NO: 364583 - RNA, 32 nt, Human
ccagcccgccucccggagccagccugcaccgu

SEQ ID NO: 364584 - RNA, 18 nt, Human
ccagcccgcggcucuggg

SEQ ID NO: 364585 - RNA, 25 nt, Human
ccagcccgcuccuucggcccugcca

SEQ ID NO: 364586 - RNA, 32 nt, Human
ccagcccggacaacauggcgaaaccucaucuc

SEQ ID NO: 364587 - RNA, 32 nt, Human
ccagcccggagcagccauccccugccaggucu

SEQ ID NO: 364588 - RNA, 32 nt, Human
ccagcccggagccaccaccgccgcggccgaag

SEQ ID NO: 364589 - RNA, 32 nt, Human
ccagcccggaggcugcagcccagaaacucuac

SEQ ID NO: 364590 - RNA, 32 nt, Human
ccagcccggcacuccagccuggcgacaagagu

SEQ ID NO: 364591 - RNA, 19 nt, Human
ccagcccggccacugcgga

SEQ ID NO: 364592 - RNA, 32 nt, Human
ccagcccggccagcagucccuucugggacagc

SEQ ID NO: 364593 - RNA, 32 nt, Human
ccagcccggcucccagugucugcccggcuccc

SEQ ID NO: 364594 - RNA, 23 nt, Human
ccagcccgggcgacagagcgaga

SEQ ID NO: 364595 - RNA, 23 nt, Human
ccagcccgggugacagagcgaga

SEQ ID NO: 364596 - RNA, 23 nt, Human
ccagcccgggugacagagugaaa

SEQ ID NO: 364597 - RNA, 32 nt, Human
ccagcccguccacccuggaguggucuucuuca

SEQ ID NO: 364598 - RNA, 32 nt, Human
ccagcccgugcagcugcucuacuccaggaaug

SEQ ID NO: 364599 - RNA, 32 nt, Human
ccagcccgugcccugaggggcucuugacaccc

SEQ ID NO: 364600 - RNA, 25 nt, Human
ccagcccuaaauaccccagcugcug

SEQ ID NO: 364601 - RNA, 32 nt, Human
ccagcccuaacuccaacucuaaagcuaacucc

SEQ ID NO: 364602 - RNA, 18 nt, Human
ccagcccuacaccuccca

SEQ ID NO: 364603 - RNA, 32 nt, Human
ccagcccuacagacuugcugugugaccucagg

SEQ ID NO: 364604 - RNA, 19 nt, Human
ccagcccuacagggcgagg

SEQ ID NO: 364605 - RNA, 32 nt, Human
ccagcccuagcagccuucuccccaaccaggau

SEQ ID NO: 364606 - RNA, 27 nt, Human
ccagcccuagcaucacugggccccaca

SEQ ID NO: 364607 - RNA, 22 nt, Human
ccagcccuaggcugggguucuu

SEQ ID NO: 364608 - RNA, 19 nt, Human
ccagcccucacccagguuu

SEQ ID NO: 364609 - RNA, 32 nt, Human
ccagcccucagacuggaucuucugccuccaaa

SEQ ID NO: 364610 - RNA, 23 nt, Human
ccagcccucaggcccucccugcc

SEQ ID NO: 364611 - RNA, 20 nt, Human
ccagcccucauccagaguuu

SEQ ID NO: 364612 - RNA, 32 nt, Human
ccagcccuccacguccucccaggcuggcucug

SEQ ID NO: 364613 - RNA, 32 nt, Human
ccagcccuccagcgucugccuccaggagcugc

SEQ ID NO: 364614 - RNA, 24 nt, Human
ccagcccucccagccccaggccca

SEQ ID NO: 364615 - RNA, 24 nt, Human
ccagcccuccccuaccgaccucug

SEQ ID NO: 364616 - RNA, 22 nt, Human
ccagcccuccccucccaucugu

SEQ ID NO: 364617 - RNA, 21 nt, Human
ccagcccucccgcucaggcca

SEQ ID NO: 364618 - RNA, 32 nt, Human
ccagcccucccgcugcagccugcagggagcga

SEQ ID NO: 364619 - RNA, 32 nt, Human
ccagcccuccuccuccucggaauccuggguuu

SEQ ID NO: 364620 - RNA, 31 nt, Human
ccagcccuccucucugcauccugggucccag

SEQ ID NO: 364621 - RNA, 23 nt, Human
ccagcccuccucugggagccuca

SEQ ID NO: 364622 - RNA, 26 nt, Human
ccagcccuccugcugcccacggccca

SEQ ID NO: 364623 - RNA, 32 nt, Human
ccagcccuccugggccagcccagagggcccuu

SEQ ID NO: 364624 - RNA, 21 nt, Human
ccagcccuccugucugagcuu

SEQ ID NO: 364625 - RNA, 32 nt, Human
ccagcccucuaauuugugccucucuuguguug

SEQ ID NO: 364626 - RNA, 32 nt, Human
ccagcccucucuuugugcauuagcaacaguaa

SEQ ID NO: 364627 - RNA, 32 nt, Human
ccagcccucugccuuuucaucccagaaugugu

SEQ ID NO: 364628 - RNA, 32 nt, Human
ccagcccugacaggcccugcgugugccaugug

SEQ ID NO: 364629 - RNA, 32 nt, Human
ccagcccugagauguccaugguuuggcuguuu

SEQ ID NO: 364630 - RNA, 22 nt, Human
ccagcccugaguucugggcuca

SEQ ID NO: 364631 - RNA, 32 nt, Human
ccagcccugcagcccccuuccccaggagcaag

SEQ ID NO: 364632 - RNA, 32 nt, Human
ccagcccugcagcuucagcaccugccccaccc

SEQ ID NO: 364633 - RNA, 32 nt, Human
ccagcccugcaguaaucuccaggccugguuau

SEQ ID NO: 364634 - RNA, 32 nt, Human
ccagcccugcccacccucccuccacuccucuc

SEQ ID NO: 364635 - RNA, 32 nt, Human
ccagcccugcccagcccugcccggaggcagac

SEQ ID NO: 364636 - RNA, 32 nt, Human
ccagcccugcccugcccugcccugcccugccc

SEQ ID NO: 364637 - RNA, 32 nt, Human
ccagcccugccgcauuuccuuucaguggcuug

SEQ ID NO: 364638 - RNA, 32 nt, Human
ccagcccugccuccagggcuccugggcugcca

SEQ ID NO: 364639 - RNA, 32 nt, Human
ccagcccugccuccuccuuucucccuuuuccu

SEQ ID NO: 364640 - RNA, 32 nt, Human
ccagcccugccucucugcggauucccugccug

SEQ ID NO: 364641 - RNA, 32 nt, Human
ccagcccugccugagcagccuuuccuccuugc

SEQ ID NO: 364642 - RNA, 32 nt, Human
ccagcccugccugggccuaccuccugcccagc

SEQ ID NO: 364643 - RNA, 32 nt, Human
ccagcccugccuguccccagccagcacugcag

SEQ ID NO: 364644 - RNA, 32 nt, Human
ccagcccugcuauuuccagccuccugaaggcu

SEQ ID NO: 364645 - RNA, 32 nt, Human
ccagcccugcucaggaagucucuggcugucuu

SEQ ID NO: 364646 - RNA, 31 nt, Human
ccagcccugcucccugggccuuccuccagcc

SEQ ID NO: 364647 - RNA, 32 nt, Human
ccagcccugcucucagcacuucccauguggaa

SEQ ID NO: 364648 - RNA, 32 nt, Human
ccagcccugcugccaucauuggcugaagcacc

SEQ ID NO: 364649 - RNA, 32 nt, Human
ccagcccugcugcccagagggacugagccacu

SEQ ID NO: 364650 - RNA, 20 nt, Human
ccagcccugcuggggcccag

SEQ ID NO: 364651 - RNA, 32 nt, Human
ccagcccuggaccccagcagaugaggaaacgg

SEQ ID NO: 364652 - RNA, 32 nt, Human
ccagcccuggccugcagggugggcaggguggg

SEQ ID NO: 364653 - RNA, 32 nt, Human
ccagcccuggcugaccuggccuagcaguuugg

SEQ ID NO: 364654 - RNA, 32 nt, Human
ccagcccuggcuguuuacucaggcucucuuag

SEQ ID NO: 364655 - RNA, 32 nt, Human
ccagcccugggaauggagucuugauucuucuc

SEQ ID NO: 364656 - RNA, 32 nt, Human
ccagcccuggggacccagcucagggaggcucu

SEQ ID NO: 364657 - RNA, 17 nt, Human
ccagcccuggggcucag

SEQ ID NO: 364658 - RNA, 24 nt, Human
ccagcccuggggcugggcccccca

SEQ ID NO: 364659 - RNA, 32 nt, Human
ccagcccuggguccucccacccucucuccucc

SEQ ID NO: 364660 - RNA, 32 nt, Human
ccagcccuggugagccaaggacaaccacacag

SEQ ID NO: 364661 - RNA, 21 nt, Human
ccagcccugguucccugcugc

SEQ ID NO: 364662 - RNA, 32 nt, Human
ccagcccugucaccgcugcuuccagaggaggc

SEQ ID NO: 364663 - RNA, 32 nt, Human
ccagcccugucccucacuguccucuguccuug

SEQ ID NO: 364664 - RNA, 20 nt, Human
ccagcccuguccugaccuca

SEQ ID NO: 364665 - RNA, 32 nt, Human
ccagcccugugcaguggugaggaggccccugg

SEQ ID NO: 364666 - RNA, 22 nt, Human
ccagcccugugccgggucccag

SEQ ID NO: 364667 - RNA, 32 nt, Human
ccagcccugugggcaccaugcucuaaacugaa

SEQ ID NO: 364668 - RNA, 32 nt, Human
ccagcccuuaagccugccuccaccuuccuggu

SEQ ID NO: 364669 - RNA, 21 nt, Human
ccagcccuucccccucccuca

SEQ ID NO: 364670 - RNA, 24 nt, Human
ccagcccuucccucccucugcaga

SEQ ID NO: 364671 - RNA, 32 nt, Human
ccagcccuuccuagugcccaugggcuuuacau

SEQ ID NO: 364672 - RNA, 32 nt, Human
ccagcccuuccucucacuccugccuccgcugg

SEQ ID NO: 364673 - RNA, 19 nt, Human
ccagcccuuccuugccacu

SEQ ID NO: 364674 - RNA, 32 nt, Human
ccagcccuucucccucccucccuuccucccuc

SEQ ID NO: 364675 - RNA, 22 nt, Human
ccagcccuucucccuguaccca

SEQ ID NO: 364676 - RNA, 22 nt, Human
ccagcccuucuuggagccuuca

SEQ ID NO: 364677 - RNA, 32 nt, Human
ccagcccuugaggcagaggugccgagugacug

SEQ ID NO: 364678 - RNA, 32 nt, Human
ccagcccuugagucugucacacucucuugggc

SEQ ID NO: 364679 - RNA, 23 nt, Human
ccagcccuugauuucccugcugc

SEQ ID NO: 364680 - RNA, 32 nt, Human
ccagcccuugcuuggucacagguuacacagau

SEQ ID NO: 364681 - RNA, 22 nt, Human
ccagcccuugggccuggcucca

SEQ ID NO: 364682 - RNA, 24 nt, Human
ccagcccuuuacuaagggcaauua

SEQ ID NO: 364683 - RNA, 32 nt, Human
ccagcccuuuugaagagcagcuucuguguucc

SEQ ID NO: 364684 - RNA, 17 nt, Human
ccagccgaagcugcagg

SEQ ID NO: 364685 - RNA, 32 nt, Human
ccagccgaaugagaucaaaaguuggggguggg

SEQ ID NO: 364686 - RNA, 21 nt, Human
ccagccgacacacacagucca

SEQ ID NO: 364687 - RNA, 32 nt, Human
ccagccgacacacacaguccacugagaugaua

SEQ ID NO: 364688 - RNA, 21 nt, Human
ccagccgagccacaucgcuca

SEQ ID NO: 364689 - RNA, 21 nt, Human
ccagccgagggacccuggugg

SEQ ID NO: 364690 - RNA, 32 nt, Human
ccagccgauguguccucaucucaggcccgugc

SEQ ID NO: 364691 - RNA, 19 nt, Human
ccagccgcagccggggcca

SEQ ID NO: 364692 - RNA, 32 nt, Human
ccagccgcagcgcauucucaugcuguggcccc

SEQ ID NO: 364693 - RNA, 32 nt, Human
ccagccgcaugcuggggacaggccuggaaggc

SEQ ID NO: 364694 - RNA, 32 nt, Human
ccagccgcauuuucacagcugacugaccacuc

SEQ ID NO: 364695 - RNA, 32 nt, Human
ccagccgccaccucugcccucucccaucccug

SEQ ID NO: 364696 - RNA, 32 nt, Human
ccagccgccagucauggacacagggcacugcc

SEQ ID NO: 364697 - RNA, 32 nt, Human
ccagccgccguggaguaacacagccagcaguu

SEQ ID NO: 364698 - RNA, 32 nt, Human
ccagccgccuggcugcugccgcugccuccucc

SEQ ID NO: 364699 - RNA, 21 nt, Human
ccagccgcgcugccgccgccg

SEQ ID NO: 364700 - RNA, 24 nt, Human
ccagccgcggggacuccgggcccg

SEQ ID NO: 364701 - RNA, 32 nt, Human
ccagccgcuaccuaacagcuggagcuugagug

SEQ ID NO: 364702 - RNA, 32 nt, Human
ccagccgcuagugcugguggccgccgcugcug

SEQ ID NO: 364703 - RNA, 21 nt, Human
ccagccgcuccuccacgccug

SEQ ID NO: 364704 - RNA, 32 nt, Human
ccagccgcuccuccacgccuguccuuagaaag

SEQ ID NO: 364705 - RNA, 32 nt, Human
ccagccgcuggaggaagccuucucugccagcg

SEQ ID NO: 364706 - RNA, 32 nt, Human
ccagccgcuggcucccagccuggcugaagcgg

SEQ ID NO: 364707 - RNA, 32 nt, Human
ccagccggaaggcggggaauccggcugacacc

SEQ ID NO: 364708 - RNA, 32 nt, Human
ccagccggacccauggccugcccauaucuuac

SEQ ID NO: 364709 - RNA, 32 nt, Human
ccagccggacucaggugggucuggaggagcac

SEQ ID NO: 364710 - RNA, 32 nt, Human
ccagccggagcagccggagcugaagcggauca

SEQ ID NO: 364711 - RNA, 23 nt, Human
ccagccggagccaccuccuuccc

SEQ ID NO: 364712 - RNA, 32 nt, Human
ccagccggcagcaguguguccagccugccucu

SEQ ID NO: 364713 - RNA, 32 nt, Human
ccagccggcagcccgggccuuucucguucaca

SEQ ID NO: 364714 - RNA, 32 nt, Human
ccagccggccagacucucaucuugaugucuug

SEQ ID NO: 364715 - RNA, 18 nt, Human
ccagccggccugguccca

SEQ ID NO: 364716 - RNA, 32 nt, Human
ccagccggccuugggagccuggaggagcaaag

SEQ ID NO: 364717 - RNA, 32 nt, Human
ccagccggcggaccucaggcgguggacgucgg

SEQ ID NO: 364718 - RNA, 32 nt, Human
ccagccgggccaacacugagaaacccugccuc

SEQ ID NO: 364719 - RNA, 17 nt, Human
ccagccgggccaccucu

SEQ ID NO: 364720 - RNA, 19 nt, Human
ccagccgggccauagcuca

SEQ ID NO: 364721 - RNA, 32 nt, Human
ccagccgggccauagcucaggcugcagcagaa

SEQ ID NO: 364722 - RNA, 32 nt, Human
ccagccgggcuggaggcugugcagaagguauc

SEQ ID NO: 364723 - RNA, 32 nt, Human
ccagccgggcuucaguuccauauuugccaugu

SEQ ID NO: 364724 - RNA, 32 nt, Human
ccagccggggcaacauggcaaaacccugucuc

SEQ ID NO: 364725 - RNA, 32 nt, Human
ccagccgggggcccugcacaggcagccucagg

SEQ ID NO: 364726 - RNA, 32 nt, Human
ccagccgguaucccaggucucccuucagugcc

SEQ ID NO: 364727 - RNA, 32 nt, Human
ccagccggugcucagguggcccaggggccgca

SEQ ID NO: 364728 - RNA, 32 nt, Human
ccagccgguggcaagguguuaaccucagaaga

SEQ ID NO: 364729 - RNA, 32 nt, Human
ccagccgucccgagcuaccagcagguuucauu

SEQ ID NO: 364730 - RNA, 32 nt, Human
ccagccguccuccugcagcuggagccuucagg

SEQ ID NO: 364731 - RNA, 22 nt, Human
ccagccgugagaggacugcuca

SEQ ID NO: 364732 - RNA, 32 nt, Human
ccagccgugaugacaggcaccuguaaucccag

SEQ ID NO: 364733 - RNA, 32 nt, Human
ccagccgugcagcugcccaggcgcuauggcga

SEQ ID NO: 364734 - RNA, 32 nt, Human
ccagccgugcggugcagccucaugcccccaac

SEQ ID NO: 364735 - RNA, 32 nt, Human
ccagccgugggugggggcccugaggugaagag

SEQ ID NO: 364736 - RNA, 32 nt, Human
ccagccgugguggcuuacaccuguaaucccag

SEQ ID NO: 364737 - RNA, 23 nt, Human
ccagccuaagcaauagagcgaga

SEQ ID NO: 364738 - RNA, 32 nt, Human
ccagccuaauaucagacuggagccagaaguag

SEQ ID NO: 364739 - RNA, 24 nt, Human
ccagccuagaacauccugcucuga

SEQ ID NO: 364740 - RNA, 32 nt, Human
ccagccuagccaccucugccucuugggucagc

SEQ ID NO: 364741 - RNA, 23 nt, Human
ccagccuagccugaacccugcca

SEQ ID NO: 364742 - RNA, 22 nt, Human
ccagccuagcgacagagcaaga

SEQ ID NO: 364743 - RNA, 24 nt, Human
ccagccuaggcaacaagagcgaaa

SEQ ID NO: 364744 - RNA, 24 nt, Human
ccagccuaggcaacaagagugaaa

SEQ ID NO: 364745 - RNA, 21 nt, Human
ccagccuaggcaacagagcga

SEQ ID NO: 364746 - RNA, 23 nt, Human
ccagccuaggcaacagagcgaga

SEQ ID NO: 364747 - RNA, 23 nt, Human
ccagccuaggcaacagagggaga

SEQ ID NO: 364748 - RNA, 23 nt, Human
ccagccuaggcaacagagugaga

SEQ ID NO: 364749 - RNA, 32 nt, Human
ccagccuaggcaacauagcaagaccucaucuu

SEQ ID NO: 364750 - RNA, 23 nt, Human
ccagccuaggcaacauagcgaga

SEQ ID NO: 364751 - RNA, 23 nt, Human
ccagccuaggcaacauagugaga

SEQ ID NO: 364752 - RNA, 32 nt, Human
ccagccuaggcaacauagugagaugcucaucu

SEQ ID NO: 364753 - RNA, 32 nt, Human
ccagccuaggcaacauggagaaaccccgucuc

SEQ ID NO: 364754 - RNA, 23 nt, Human
ccagccuaggcgacagagcgaga

SEQ ID NO: 364755 - RNA, 32 nt, Human
ccagccuaggguggggaagugaggaagaaggg

SEQ ID NO: 364756 - RNA, 23 nt, Human
ccagccuaggugacagagcgaga

SEQ ID NO: 364757 - RNA, 32 nt, Human
ccagccuauccaagugccaggaagggaagcac

SEQ ID NO: 364758 - RNA, 22 nt, Human
ccagccuaucugauggcauggu

SEQ ID NO: 364759 - RNA, 32 nt, Human
ccagccucaagcgaugcucccaccuccaccuc

SEQ ID NO: 364760 - RNA, 32 nt, Human
ccagccucaaguuucaccuauccucacugauc

SEQ ID NO: 364761 - RNA, 23 nt, Human
ccagccucacacugaccucagca

SEQ ID NO: 364762 - RNA, 24 nt, Human
ccagccucagcaacaagagugaaa

SEQ ID NO: 364763 - RNA, 32 nt, Human
ccagccucagcaucaccacggagcucacccac

SEQ ID NO: 364764 - RNA, 32 nt, Human
ccagccucagccagggcagggagggggacucc

SEQ ID NO: 364765 - RNA, 32 nt, Human
ccagccucagccccaacucccagcaaagccca

SEQ ID NO: 364766 - RNA, 19 nt, Human
ccagccucagcuggcccca

SEQ ID NO: 364767 - RNA, 23 nt, Human
ccagccucaggcaggaaacagca

SEQ ID NO: 364768 - RNA, 32 nt, Human
ccagccucagguccucugcuucuccccaccca

SEQ ID NO: 364769 - RNA, 32 nt, Human
ccagccucaggucgccccgccugggcccgcgc

SEQ ID NO: 364770 - RNA, 32 nt, Human
ccagccucaggugauccacccaccucagccuc

SEQ ID NO: 364771 - RNA, 32 nt, Human
ccagccucagugcagcccccuccugaccccac

SEQ ID NO: 364772 - RNA, 32 nt, Human
ccagccucauuuccaacuccgacuuccuacuu

SEQ ID NO: 364773 - RNA, 23 nt, Human
ccagccuccaacuccagcugagu

SEQ ID NO: 364774 - RNA, 24 nt, Human
ccagccuccaagcucagcagcauc

SEQ ID NO: 364775 - RNA, 32 nt, Human
ccagccuccacaacugugaggaauaauguaug

SEQ ID NO: 364776 - RNA, 32 nt, Human
ccagccuccacccccacuccagccucagcggg

SEQ ID NO: 364777 - RNA, 22 nt, Human
ccagccuccacccccauccaga

SEQ ID NO: 364778 - RNA, 32 nt, Human
ccagccuccagccucucauuucuggggcuccc

SEQ ID NO: 364779 - RNA, 32 nt, Human
ccagccuccagccugaccccagagcagaaccg

SEQ ID NO: 364780 - RNA, 18 nt, Human
ccagccuccaggccccca

SEQ ID NO: 364781 - RNA, 21 nt, Human
ccagccuccaguccuggguuc

SEQ ID NO: 364782 - RNA, 32 nt, Human
ccagccuccaucuacaccaagaacacccagca

SEQ ID NO: 364783 - RNA, 32 nt, Human
ccagccucccaaaauacugggauuacaggcuu

SEQ ID NO: 364784 - RNA, 32 nt, Human
ccagccucccaaaaugcugggauuacaggcgu

SEQ ID NO: 364785 - RNA, 32 nt, Human
ccagccucccaaagcgcugggauuacaggugu

SEQ ID NO: 364786 - RNA, 32 nt, Human
ccagccucccaaagugcuaagauuacaggcgu

SEQ ID NO: 364787 - RNA, 32 nt, Human
ccagccucccaaagugcugggauuacaagugu

SEQ ID NO: 364788 - RNA, 32 nt, Human
ccagccucccaaagugcugggauuacaggcau

SEQ ID NO: 364789 - RNA, 32 nt, Human
ccagccucccaaagugcugggauuacaggcgu

SEQ ID NO: 364790 - RNA, 32 nt, Human
ccagccucccaaagugcugggauuacaggugu

SEQ ID NO: 364791 - RNA, 32 nt, Human
ccagccucccaaagugcugggauugcaggcau

SEQ ID NO: 364792 - RNA, 32 nt, Human
ccagccucccaaguagcugggauuacaggugu

SEQ ID NO: 364793 - RNA, 32 nt, Human
ccagccucccaaguagcugggauuauaggugc

SEQ ID NO: 364794 - RNA, 32 nt, Human
ccagccucccacagugcugggauuacaggcgu

SEQ ID NO: 364795 - RNA, 22 nt, Human
ccagccucccacccugguccca

SEQ ID NO: 364796 - RNA, 24 nt, Human
ccagccucccagucccugcucuga

SEQ ID NO: 364797 - RNA, 32 nt, Human
ccagccucccauauagcugggauuauaggugc

SEQ ID NO: 364798 - RNA, 32 nt, Human
ccagccucccauccucugguggucugggagga

SEQ ID NO: 364799 - RNA, 19 nt, Human
ccagccuccccacccaggc

SEQ ID NO: 364800 - RNA, 22 nt, Human
ccagccuccccggggacaccca

SEQ ID NO: 364801 - RNA, 23 nt, Human
ccagccuccccugaacccugcca

SEQ ID NO: 364802 - RNA, 22 nt, Human
ccagccuccgucuucuggucca

SEQ ID NO: 364803 - RNA, 32 nt, Human
ccagccuccucagacaaaaugguacaccccaa

SEQ ID NO: 364804 - RNA, 32 nt, Human
ccagccuccucgcccuccuccacccccucucc

SEQ ID NO: 364805 - RNA, 18 nt, Human
ccagccuccucgcuccca

SEQ ID NO: 364806 - RNA, 21 nt, Human
ccagccuccucuuucccuccc

SEQ ID NO: 364807 - RNA, 32 nt, Human
ccagccuccugagcuccaugcccaucaggacu

SEQ ID NO: 364808 - RNA, 17 nt, Human
ccagccuccuggcccca

SEQ ID NO: 364809 - RNA, 23 nt, Human
ccagccucggaaauaccucaaua

SEQ ID NO: 364810 - RNA, 32 nt, Human
ccagccucggcaacauggcaaaaucuugucuc

SEQ ID NO: 364811 - RNA, 32 nt, Human
ccagccucggccucucccuccugaguugccuu

SEQ ID NO: 364812 - RNA, 21 nt, Human
ccagccucggccuuccuuccc

SEQ ID NO: 364813 - RNA, 32 nt, Human
ccagccucggggccgguugccuccucuucucu

SEQ ID NO: 364814 - RNA, 19 nt, Human
ccagccucguggcguggga

SEQ ID NO: 364815 - RNA, 23 nt, Human
ccagccucguggucuucuccaag

SEQ ID NO: 364816 - RNA, 32 nt, Human
ccagccucuacccaucccucccucccaauuag

SEQ ID NO: 364817 - RNA, 20 nt, Human
ccagccucuacguuagguuc

SEQ ID NO: 364818 - RNA, 32 nt, Human
ccagccucuaucuccugagccuauagagcccc

SEQ ID NO: 364819 - RNA, 32 nt, Human
ccagccucuccaagcucaaguacaaauacagc

SEQ ID NO: 364820 - RNA, 22 nt, Human
ccagccucuccccacagucuca

SEQ ID NO: 364821 - RNA, 32 nt, Human
ccagccucuccccgcucuggauccugcacucu

SEQ ID NO: 364822 - RNA, 32 nt, Human
ccagccucuccccuccucuuggccuccagagu

SEQ ID NO: 364823 - RNA, 20 nt, Human
ccagccucucccuccagcac

SEQ ID NO: 364824 - RNA, 24 nt, Human
ccagccucucccugccaaagccca

SEQ ID NO: 364825 - RNA, 20 nt, Human
ccagccucuccggcgcgcuc

SEQ ID NO: 364826 - RNA, 32 nt, Human
ccagccucuccucugcugagaauccccacuug

SEQ ID NO: 364827 - RNA, 24 nt, Human
ccagccucucugccaagucacuca

SEQ ID NO: 364828 - RNA, 32 nt, Human
ccagccucucuggagcugaaucguggcuggcu

SEQ ID NO: 364829 - RNA, 23 nt, Human
ccagccucucuggccagggccuu

SEQ ID NO: 364830 - RNA, 21 nt, Human
ccagccucucuggggcauggc

SEQ ID NO: 364831 - RNA, 32 nt, Human
ccagccucugcaacagcucugccuccucucca

SEQ ID NO: 364832 - RNA, 32 nt, Human
ccagccucugccggcuccccuaggcaaccccu

SEQ ID NO: 364833 - RNA, 32 nt, Human
ccagccucugcugcuccugcuccuggguuuga

SEQ ID NO: 364834 - RNA, 32 nt, Human
ccagccucugcuucccuccucucuccagugcu

SEQ ID NO: 364835 - RNA, 32 nt, Human
ccagccucugucccucuuugccugugugagca

SEQ ID NO: 364836 - RNA, 23 nt, Human
ccagccucugucuugggagcuca

SEQ ID NO: 364837 - RNA, 32 nt, Human
ccagccucugugggccugugaccugcagaaau

SEQ ID NO: 364838 - RNA, 20 nt, Human
ccagccucuguuggcggcuc

SEQ ID NO: 364839 - RNA, 32 nt, Human
ccagccucuuccauucccuuucuuuucaugcc

SEQ ID NO: 364840 - RNA, 23 nt, Human
ccagccucuucccccugggcuuc

SEQ ID NO: 364841 - RNA, 32 nt, Human
ccagccucuuccucagucccccaaaccaaagc

SEQ ID NO: 364842 - RNA, 19 nt, Human
ccagccucuuccugggcca

SEQ ID NO: 364843 - RNA, 23 nt, Human
ccagccucuuccugggccagcca

SEQ ID NO: 364844 - RNA, 32 nt, Human
ccagccucuucucucacuauccguuucugaca

SEQ ID NO: 364845 - RNA, 21 nt, Human
ccagccucuucugcgcaccca

SEQ ID NO: 364846 - RNA, 32 nt, Human
ccagccucuuuccaucauccuuccuccaccug

SEQ ID NO: 364847 - RNA, 22 nt, Human
ccagccucuuuccccuaggggc

SEQ ID NO: 364848 - RNA, 32 nt, Human
ccagccucuuucucccuaccaaccuccuccuc

SEQ ID NO: 364849 - RNA, 32 nt, Human
ccagccucuuucucccugccaaccuccuccuc

SEQ ID NO: 364850 - RNA, 25 nt, Human
ccagccucuuucugaaugcagcuca

SEQ ID NO: 364851 - RNA, 32 nt, Human
ccagccugaagaaaugucaagcagagccccag

SEQ ID NO: 364852 - RNA, 32 nt, Human
ccagccugaagacagagcaaggcuccaucuua

SEQ ID NO: 364853 - RNA, 18 nt, Human
ccagccugaagagcgaga

SEQ ID NO: 364854 - RNA, 32 nt, Human
ccagccugaaguuugugggggccaaaccuggg

SEQ ID NO: 364855 - RNA, 32 nt, Human
ccagccugaccaaaauggugaaaccuccucuc

SEQ ID NO: 364856 - RNA, 32 nt, Human
ccagccugaccaacacugagaaaccccaucuc

SEQ ID NO: 364857 - RNA, 32 nt, Human
ccagccugaccaacauagagaaaccucgucuc

SEQ ID NO: 364858 - RNA, 32 nt, Human
ccagccugaccaacauggagaaacccaaucuc

SEQ ID NO: 364859 - RNA, 32 nt, Human
ccagccugaccaacauggagaaacccagucuc

SEQ ID NO: 364860 - RNA, 32 nt, Human
ccagccugaccaacauggagaaaccucgucuc

SEQ ID NO: 364861 - RNA, 23 nt, Human
ccagccugaccaacauggugaaa

SEQ ID NO: 364862 - RNA, 32 nt, Human
ccagccugaccaacauggugaaaccucaacuc

SEQ ID NO: 364863 - RNA, 32 nt, Human
ccagccugaccaacauggugaaaccucaucuc

SEQ ID NO: 364864 - RNA, 32 nt, Human
ccagccugaccaacauggugaaaccucgucuc

SEQ ID NO: 364865 - RNA, 32 nt, Human
ccagccugaccaacguggagaaaccucgucuc

SEQ ID NO: 364866 - RNA, 32 nt, Human
ccagccugaccaacguggcgaaaccucgucuc

SEQ ID NO: 364867 - RNA, 32 nt, Human
ccagccugaccaauaugaugaaaccccgucuc

SEQ ID NO: 364868 - RNA, 32 nt, Human
ccagccugaccaucauggugaaaccucaucuc

SEQ ID NO: 364869 - RNA, 32 nt, Human
ccagccugaccgacauggagaaaccucgucuc

SEQ ID NO: 364870 - RNA, 32 nt, Human
ccagccugaccuggcccgccgcugcagcggug

SEQ ID NO: 364871 - RNA, 32 nt, Human
ccagccugacuagguacaggcaagcuugugug

SEQ ID NO: 364872 - RNA, 21 nt, Human
ccagccugacucaaaaggaga

SEQ ID NO: 364873 - RNA, 32 nt, Human
ccagccugacugugguucccagcuccagcccu

SEQ ID NO: 364874 - RNA, 32 nt, Human
ccagccugagacugugcaacuccagguggaag

SEQ ID NO: 364875 - RNA, 21 nt, Human
ccagccugagaggagucaaga

SEQ ID NO: 364876 - RNA, 23 nt, Human
ccagccugagcaacaaagcaaga

SEQ ID NO: 364877 - RNA, 22 nt, Human
ccagccugagcaacaagagcga

SEQ ID NO: 364878 - RNA, 24 nt, Human
ccagccugagcaacaagagcgaaa

SEQ ID NO: 364879 - RNA, 23 nt, Human
ccagccugagcaacacagugaga

SEQ ID NO: 364880 - RNA, 21 nt, Human
ccagccugagcaacagagcga

SEQ ID NO: 364881 - RNA, 23 nt, Human
ccagccugagcaacagagcgaga

SEQ ID NO: 364882 - RNA, 23 nt, Human
ccagccugagcaacagagugaga

SEQ ID NO: 364883 - RNA, 23 nt, Human
ccagccugagcaacauagcgaga

SEQ ID NO: 364884 - RNA, 32 nt, Human
ccagccugagcaacauagcgagaccccaucuu

SEQ ID NO: 364885 - RNA, 23 nt, Human
ccagccugagcaacauagugaga

SEQ ID NO: 364886 - RNA, 32 nt, Human
ccagccugagcaacauaucaaaaccccaucuc

SEQ ID NO: 364887 - RNA, 32 nt, Human
ccagccugagcaacauaucaaaaccccgucuc

SEQ ID NO: 364888 - RNA, 23 nt, Human
ccagccugagcaacaugaugaga

SEQ ID NO: 364889 - RNA, 32 nt, Human
ccagccugagcaacauggcgaaaccucauauc

SEQ ID NO: 364890 - RNA, 23 nt, Human
ccagccugagcaacauggugaaa

SEQ ID NO: 364891 - RNA, 21 nt, Human
ccagccugaggaggagggaga

SEQ ID NO: 364892 - RNA, 18 nt, Human
ccagccugagggcagugg

SEQ ID NO: 364893 - RNA, 20 nt, Human
ccagccugagguggaugaga

SEQ ID NO: 364894 - RNA, 32 nt, Human
ccagccugagucuucuccuugcucugcggggu

SEQ ID NO: 364895 - RNA, 23 nt, Human
ccagccugagugacagagcgaga

SEQ ID NO: 364896 - RNA, 32 nt, Human
ccagccugaguuucucuuucucucuuuuuaac

SEQ ID NO: 364897 - RNA, 32 nt, Human
ccagccugaucaacguggugaaaccucuacua

SEQ ID NO: 364898 - RNA, 32 nt, Human
ccagccugaugccaccuccucuguucuuggaa

SEQ ID NO: 364899 - RNA, 23 nt, Human
ccagccugcaaaaagggacagcu

SEQ ID NO: 364900 - RNA, 32 nt, Human
ccagccugcaaccauccugccuuuccccaggg

SEQ ID NO: 364901 - RNA, 24 nt, Human
ccagccugcacaacaagagugaaa

SEQ ID NO: 364902 - RNA, 19 nt, Human
ccagccugcaccucagcca

SEQ ID NO: 364903 - RNA, 32 nt, Human
ccagccugcagaggagagaagccugagcaagc

SEQ ID NO: 364904 - RNA, 32 nt, Human
ccagccugcagcaacagaacacuugaccuuaa

SEQ ID NO: 364905 - RNA, 21 nt, Human
ccagccugcauccucuccuca

SEQ ID NO: 364906 - RNA, 32 nt, Human
ccagccugcauccucuccucaggccuccuucc

SEQ ID NO: 364907 - RNA, 32 nt, Human
ccagccugccaagaaaacgguaggggagcaug

SEQ ID NO: 364908 - RNA, 32 nt, Human
ccagccugccaaguagcugggauuacagacag

SEQ ID NO: 364909 - RNA, 32 nt, Human
ccagccugccaaucaacccuccuggguguggc

SEQ ID NO: 364910 - RNA, 32 nt, Human
ccagccugcccaaauggugaaaccccaucucu

SEQ ID NO: 364911 - RNA, 32 nt, Human
ccagccugcccacuacauccagccuguggcuu

SEQ ID NO: 364912 - RNA, 25 nt, Human
ccagccugccccggcagcccgggcc

SEQ ID NO: 364913 - RNA, 19 nt, Human
ccagccugccccuugcugc

SEQ ID NO: 364914 - RNA, 32 nt, Human
ccagccugccuauaagguugggauuagcaugc

SEQ ID NO: 364915 - RNA, 32 nt, Human
ccagccugccugaccuggauucugagaacugg

SEQ ID NO: 364916 - RNA, 32 nt, Human
ccagccugccuggaugacagagcgagacucca

SEQ ID NO: 364917 - RNA, 32 nt, Human
ccagccugcgggaaggugguauggccggcugu

SEQ ID NO: 364918 - RNA, 21 nt, Human
ccagccugcuauaggcuggcu

SEQ ID NO: 364919 - RNA, 19 nt, Human
ccagccugcuccuggcccc

SEQ ID NO: 364920 - RNA, 22 nt, Human
ccagccugcuggucagcaggcu

SEQ ID NO: 364921 - RNA, 32 nt, Human
ccagccugcuguucccgcuuuccauauagcuu

SEQ ID NO: 364922 - RNA, 32 nt, Human
ccagccuggaacccugagauggccuccagcuc

SEQ ID NO: 364923 - RNA, 32 nt, Human
ccagccuggaagcagggaguaaggcuggacuc

SEQ ID NO: 364924 - RNA, 24 nt, Human
ccagccuggacaacaagagcgaaa

SEQ ID NO: 364925 - RNA, 23 nt, Human
ccagccuggacaacacagugaga

SEQ ID NO: 364926 - RNA, 21 nt, Human
ccagccuggacaacagagcga

SEQ ID NO: 364927 - RNA, 23 nt, Human
ccagccuggacaacagagcgaga

SEQ ID NO: 364928 - RNA, 23 nt, Human
ccagccuggacaacagagugaga

SEQ ID NO: 364929 - RNA, 32 nt, Human
ccagccuggacaacauaaugagacccucgucu

SEQ ID NO: 364930 - RNA, 23 nt, Human
ccagccuggacaacauagugaga

SEQ ID NO: 364931 - RNA, 32 nt, Human
ccagccuggacaacaucgugaaaccuugucuc

SEQ ID NO: 364932 - RNA, 23 nt, Human
ccagccuggacaacauggugaga

SEQ ID NO: 364933 - RNA, 32 nt, Human
ccagccuggacaacauugugaaaccuugucuc

SEQ ID NO: 364934 - RNA, 24 nt, Human
ccagccuggacagcaggagcgaaa

SEQ ID NO: 364935 - RNA, 21 nt, Human
ccagccuggaccccgugcaga

SEQ ID NO: 364936 - RNA, 32 nt, Human
ccagccuggaccccgugcagagcuucucccaa

SEQ ID NO: 364937 - RNA, 20 nt, Human
ccagccuggacuuggcccca

SEQ ID NO: 364938 - RNA, 20 nt, Human
ccagccuggagagggcuggc

SEQ ID NO: 364939 - RNA, 20 nt, Human
ccagccuggaguacaguggc

SEQ ID NO: 364940 - RNA, 32 nt, Human
ccagccuggagucuuauucuccaccugagaau

SEQ ID NO: 364941 - RNA, 19 nt, Human
ccagccuggagugcagugg

SEQ ID NO: 364942 - RNA, 23 nt, Human
ccagccuggauaacagagcgaga

SEQ ID NO: 364943 - RNA, 32 nt, Human
ccagccuggaucugucucucccuuccccuccu

SEQ ID NO: 364944 - RNA, 24 nt, Human
ccagccuggaugacaagagugaaa

SEQ ID NO: 364945 - RNA, 32 nt, Human
ccagccuggaugacagagaaggucaugggaac

SEQ ID NO: 364946 - RNA, 23 nt, Human
ccagccuggaugacagagcgaaa

SEQ ID NO: 364947 - RNA, 23 nt, Human
ccagccuggaugacagagugaaa

SEQ ID NO: 364948 - RNA, 32 nt, Human
ccagccuggaugacauaaugagauucugucuc

SEQ ID NO: 364949 - RNA, 22 nt, Human
ccagccuggcaacagagcaaga

SEQ ID NO: 364950 - RNA, 24 nt, Human
ccagccuggcaacagagcaaggcu

SEQ ID NO: 364951 - RNA, 22 nt, Human
ccagccuggcaacagagcgaga

SEQ ID NO: 364952 - RNA, 32 nt, Human
ccagccuggcagcuucucacaugguaaacacg

SEQ ID NO: 364953 - RNA, 32 nt, Human
ccagccuggccaaauggugaaaccccaucucu

SEQ ID NO: 364954 - RNA, 23 nt, Human
ccagccuggccaacaaggcgaaa

SEQ ID NO: 364955 - RNA, 32 nt, Human
ccagccuggccaacacgaugaaaccccgucuc

SEQ ID NO: 364956 - RNA, 32 nt, Human
ccagccuggccaacauaaugaaaccccaucuc

SEQ ID NO: 364957 - RNA, 32 nt, Human
ccagccuggccaacauaauuaaaaugucucua

SEQ ID NO: 364958 - RNA, 32 nt, Human
ccagccuggccaacaugacccaucuuuacuaa

SEQ ID NO: 364959 - RNA, 32 nt, Human
ccagccuggccaacaugaugaaaccccaucuc

SEQ ID NO: 364960 - RNA, 32 nt, Human
ccagccuggccaacaugaugaaaccccgucuc

SEQ ID NO: 364961 - RNA, 32 nt, Human
ccaggcuggaguguaguggugugaucucggcu

SEQ ID NO: 364962 - RNA, 32 nt, Human
ccaggcuggaguguagugguguguucuuggcu

SEQ ID NO: 364963 - RNA, 19 nt, Human
ccaggcuggaguucagugg

SEQ ID NO: 364964 - RNA, 32 nt, Human
ccaggcuggauggagugcaguggcgugaucuc

SEQ ID NO: 364965 - RNA, 32 nt, Human
ccaggcuggauggagugcccuggcgcgaucuc

SEQ ID NO: 364966 - RNA, 32 nt, Human
ccaggcuggauggagugcccuggcgcgaucuu

SEQ ID NO: 364967 - RNA, 19 nt, Human
ccaggcuggcagagcugga

SEQ ID NO: 364968 - RNA, 32 nt, Human
ccaggcuggccuuuggguuggcccaggcagga

SEQ ID NO: 364969 - RNA, 19 nt, Human
ccaggcuggcgugcagugg

SEQ ID NO: 364970 - RNA, 25 nt, Human
ccaggcuggcucuggagcugugagg

SEQ ID NO: 364971 - RNA, 32 nt, Human
ccaggcugggagaaggggccguugggugucua

SEQ ID NO: 364972 - RNA, 32 nt, Human
ccaggcugggagaaggggcuccugggugucug

SEQ ID NO: 364973 - RNA, 32 nt, Human
ccaggcugggagaagguggaaggucccagagc

SEQ ID NO: 364974 - RNA, 32 nt, Human
ccaggcugggagagggagcagggcggcggccc

SEQ ID NO: 364975 - RNA, 32 nt, Human
ccaggcugggcaacauagugagaccuguuguc

SEQ ID NO: 364976 - RNA, 32 nt, Human
ccaggcugggcaacaugacgaaauccugucuc

SEQ ID NO: 364977 - RNA, 32 nt, Human
ccaggcugggcaacauggugaaaccccagcuc

SEQ ID NO: 364978 - RNA, 32 nt, Human
ccaggcugggcagcaagagcaagacucuaucu

SEQ ID NO: 364979 - RNA, 32 nt, Human
ccaggcugggcuguggcuucaagcuuuggaaa

SEQ ID NO: 364980 - RNA, 18 nt, Human
ccaggcuggggugcagug

SEQ ID NO: 364981 - RNA, 19 nt, Human
ccaggcuggggugcagugg

SEQ ID NO: 364982 - RNA, 21 nt, Human
ccaggcuggggugcaguggug

SEQ ID NO: 364983 - RNA, 32 nt, Human
ccaggcuggggugggagaaggaagcaggacag

SEQ ID NO: 364984 - RNA, 18 nt, Human
ccaggcugggugcagugg

SEQ ID NO: 364985 - RNA, 32 nt, Human
ccaggcuggucucaaacccccagccucaacug

SEQ ID NO: 364986 - RNA, 32 nt, Human
ccaggcuggucuccaucaccugaucucaggug

SEQ ID NO: 364987 - RNA, 32 nt, Human
ccaggcuggucucgaacuccugacugaccuug

SEQ ID NO: 364988 - RNA, 32 nt, Human
ccaggcuggucucgaacuccugccucaaguga

SEQ ID NO: 364989 - RNA, 32 nt, Human
ccaggcuggucucgacccugaccucaggguga

SEQ ID NO: 364990 - RNA, 32 nt, Human
ccaggcuguaagcauucugagcugggcuuguu

SEQ ID NO: 364991 - RNA, 32 nt, Human
ccaggcuguacccgcugcucucagcugggccc

SEQ ID NO: 364992 - RNA, 19 nt, Human
ccaggcuguagugcagugg

SEQ ID NO: 364993 - RNA, 32 nt, Human
ccaggcugucacucaauucggucauuucauuc

SEQ ID NO: 364994 - RNA, 32 nt, Human
ccaggcugucucaaacuccuggccucaagugg

SEQ ID NO: 364995 - RNA, 32 nt, Human
ccaggcugucuuagccccuggaguucagaagu

SEQ ID NO: 364996 - RNA, 32 nt, Human
ccaggcugucuucuccucaucacagggacgag

SEQ ID NO: 364997 - RNA, 22 nt, Human
ccaggcugugaccucgcugccu

SEQ ID NO: 364998 - RNA, 32 nt, Human
ccaggcugugagaggauuauacugaguaguag

SEQ ID NO: 364999 - RNA, 32 nt, Human
ccaggcugugcaagccccugaggucuugagag

SEQ ID NO: 365000 - RNA, 32 nt, Human
ccaggcugugcccuccagaggacccuugccuc

SEQ ID NO: 365001 - RNA, 32 nt, Human
ccaggcugugcgcacccaggagaaggagcaga

SEQ ID NO: 365002 - RNA, 21 nt, Human
ccaggcugugguaaaacguug

SEQ ID NO: 365003 - RNA, 32 nt, Human
ccaggcuguuccugccuaaaucuccagcccug

SEQ ID NO: 365004 - RNA, 32 nt, Human
ccaggcuuaaacgauucucccaccucagccuc

SEQ ID NO: 365005 - RNA, 32 nt, Human
ccaggcuuaagcaauucuccugccucagccuc

SEQ ID NO: 365006 - RNA, 19 nt, Human
ccaggcuuacaucuuccca

SEQ ID NO: 365007 - RNA, 32 nt, Human
ccaggcuuagcuccagccucccggcggccucu

SEQ ID NO: 365008 - RNA, 32 nt, Human
ccaggcuucacacccaagcuggcucagcagcc

SEQ ID NO: 365009 - RNA, 32 nt, Human
ccaggcuucauggauucuugacauguaauugu

SEQ ID NO: 365010 - RNA, 18 nt, Human
ccaggcuucauucaccca

SEQ ID NO: 365011 - RNA, 32 nt, Human
ccaggcuuccaagaaagaggaggagaguugaa

SEQ ID NO: 365012 - RNA, 20 nt, Human
ccaggcuucccccacuuccc

SEQ ID NO: 365013 - RNA, 23 nt, Human
ccaggcuuccuggagggugacug

SEQ ID NO: 365014 - RNA, 32 nt, Human
ccaggcuugagugacagagcaagacuguaucu

SEQ ID NO: 365015 - RNA, 19 nt, Human
ccaggcuugagugcagugg

SEQ ID NO: 365016 - RNA, 32 nt, Human
ccaggcuugcagccuuucuucggagaguggag

SEQ ID NO: 365017 - RNA, 32 nt, Human
ccaggcuugcagcugcuccauccuccccugaa

SEQ ID NO: 365018 - RNA, 19 nt, Human
ccaggcuugcagucuccca

SEQ ID NO: 365019 - RNA, 21 nt, Human
ccaggcuugccccucagcuca

SEQ ID NO: 365020 - RNA, 32 nt, Human
ccaggcuugccccucagcucagcacuguugac

SEQ ID NO: 365021 - RNA, 32 nt, Human
ccaggcuuggccaggauguccuuugcucuggg

SEQ ID NO: 365022 - RNA, 22 nt, Human
ccaggcuugggggugauggagg

SEQ ID NO: 365023 - RNA, 32 nt, Human
ccaggcuugggugggguuuguggugcaggcag

SEQ ID NO: 365024 - RNA, 32 nt, Human
ccaggcuuggugaggaagaggaaggggccuca

SEQ ID NO: 365025 - RNA, 32 nt, Human
ccaggcuugguggcucacgccuguaaucccag

SEQ ID NO: 365026 - RNA, 32 nt, Human
ccaggcuugguggcucaggccuguaaucccag

SEQ ID NO: 365027 - RNA, 32 nt, Human
ccaggcuugguggcucaugccuguaauuccag

SEQ ID NO: 365028 - RNA, 32 nt, Human
ccaggcuuuaucugucagguggcaauucucac

SEQ ID NO: 365029 - RNA, 32 nt, Human
ccaggcuuugcaaacccagccucccagugcuc

SEQ ID NO: 365030 - RNA, 32 nt, Human
ccaggcuuugccugaugacaaguauacucuga

SEQ ID NO: 365031 - RNA, 32 nt, Human
ccaggcuuugcuguuccccagcagccugcaga

SEQ ID NO: 365032 - RNA, 32 nt, Human
ccaggcuuugguuucugcccacucagaguggc

SEQ ID NO: 365033 - RNA, 32 nt, Human
ccagggaaaccagcuacucagggacuucucuu

SEQ ID NO: 365034 - RNA, 32 nt, Human
ccagggaaaggagaaaagagaaaacaggcugg

SEQ ID NO: 365035 - RNA, 32 nt, Human
ccagggaacaaagcaauugucugccucucccu

SEQ ID NO: 365036 - RNA, 24 nt, Human
ccagggaacccuccccugcugcug

SEQ ID NO: 365037 - RNA, 32 nt, Human
ccagggaacuaaauucauuccugaugccagau

SEQ ID NO: 365038 - RNA, 21 nt, Human
ccagggaacucaguuuuccca

SEQ ID NO: 365039 - RNA, 32 nt, Human
ccagggaagaaugacagccacagggagauggu

SEQ ID NO: 365040 - RNA, 32 nt, Human
ccagggaagaggaggaagaagaggaggaggag

SEQ ID NO: 365041 - RNA, 32 nt, Human
ccagggaagaggcagggagggagcugaggacc

SEQ ID NO: 365042 - RNA, 32 nt, Human
ccagggaagcggagguugcagugagccgagug

SEQ ID NO: 365043 - RNA, 32 nt, Human
ccagggaaggaggcagcuaggcuguagaugga

SEQ ID NO: 365044 - RNA, 32 nt, Human
ccagggaagggacugggaggggagagaagaga

SEQ ID NO: 365045 - RNA, 32 nt, Human
ccagggaaucuaggagagaugaggcccgucag

SEQ ID NO: 365046 - RNA, 32 nt, Human
ccagggaaugcacacacgugcacuggagcagc

SEQ ID NO: 365047 - RNA, 32 nt, Human
ccagggaauuuucacccucucaguccucagga

SEQ ID NO: 365048 - RNA, 19 nt, Human
ccagggacacauuuuccca

SEQ ID NO: 365049 - RNA, 23 nt, Human
ccagggacaccccuccccagcuc

SEQ ID NO: 365050 - RNA, 32 nt, Human
ccagggacagccgccucagguccuggugaagg

SEQ ID NO: 365051 - RNA, 32 nt, Human
ccagggacaggagccacccuccccaggcccaa

SEQ ID NO: 365052 - RNA, 32 nt, Human
ccagggaccacaccugccacucagggaagaga

SEQ ID NO: 365053 - RNA, 32 nt, Human
ccagggaccagcccuggugggcaugggguggg

SEQ ID NO: 365054 - RNA, 32 nt, Human
ccagggacccagacaaggagcaucuggaaaac

SEQ ID NO: 365055 - RNA, 17 nt, Human
ccagggaccugccucug

SEQ ID NO: 365056 - RNA, 23 nt, Human
ccagggacgaagaagagccacag

SEQ ID NO: 365057 - RNA, 32 nt, Human
ccagggacggaaugccuggucuugagcaaccu

SEQ ID NO: 365058 - RNA, 32 nt, Human
ccagggacggcaugagcaggaggcggggacgu

SEQ ID NO: 365059 - RNA, 32 nt, Human
ccagggacuacugcacccgcuucugccuuguu

SEQ ID NO: 365060 - RNA, 18 nt, Human
ccagggacucggaggaag

SEQ ID NO: 365061 - RNA, 32 nt, Human
ccagggacucugcccauguucccagggccuca

SEQ ID NO: 365062 - RNA, 32 nt, Human
ccagggacucuuccuguuucauaaggaaagga

SEQ ID NO: 365063 - RNA, 32 nt, Human
ccagggacugggaggugggggugauagauaua

SEQ ID NO: 365064 - RNA, 32 nt, Human
ccagggacugugugcucaggagcacuguggua

SEQ ID NO: 365065 - RNA, 32 nt, Human
ccagggacuuggggaggaagaauggggaguga

SEQ ID NO: 365066 - RNA, 32 nt, Human
ccagggacuuugggccugcucuagcuucagaa

SEQ ID NO: 365067 - RNA, 32 nt, Human
ccagggagaagggagagcaggaguauuggggc

SEQ ID NO: 365068 - RNA, 32 nt, Human
ccagggagaagguucuucgcucaguaugaaga

SEQ ID NO: 365069 - RNA, 32 nt, Human
ccagggagaccgugucaguagggaugugugcc

SEQ ID NO: 365070 - RNA, 32 nt, Human
ccagggagaggagccagugacacaggcagagc

SEQ ID NO: 365071 - RNA, 32 nt, Human
ccagggagagggagcgcgagagagggagggag

SEQ ID NO: 365072 - RNA, 32 nt, Human
ccagggagcagccacacgucugucuguguuua

SEQ ID NO: 365073 - RNA, 21 nt, Human
ccagggagcaggguuccccac

SEQ ID NO: 365074 - RNA, 32 nt, Human
ccagggagccaccugaguggagcucagaacac

SEQ ID NO: 365075 - RNA, 32 nt, Human
ccagggagccacuggcuguacacaccugggcc

SEQ ID NO: 365076 - RNA, 32 nt, Human
ccagggagcccccagaggacuuuauucggacc

SEQ ID NO: 365077 - RNA, 19 nt, Human
ccagggagccgggguuagg

SEQ ID NO: 365078 - RNA, 32 nt, Human
ccagggagcuccagggccccucucuccuccca

SEQ ID NO: 365079 - RNA, 32 nt, Human
ccagggagcugcaggggcaugggaaggugggc

SEQ ID NO: 365080 - RNA, 32 nt, Human
ccagggagcugcccggcuggccuaggcaggca

SEQ ID NO: 365081 - RNA, 32 nt, Human
ccagggaggacaggaugcugggcaggggaagc

SEQ ID NO: 365082 - RNA, 32 nt, Human
ccagggaggagauguggagaggauguggccaa

SEQ ID NO: 365083 - RNA, 24 nt, Human
ccagggaggaggagcuugcaguga

SEQ ID NO: 365084 - RNA, 25 nt, Human
ccagggaggaggagcuugcagugag

SEQ ID NO: 365085 - RNA, 32 nt, Human
ccagggaggaggagcuugcagugagccgagau

SEQ ID NO: 365086 - RNA, 19 nt, Human
ccagggaggcaaggggcug

SEQ ID NO: 365087 - RNA, 24 nt, Human
ccagggaggcagagauugcaguga

SEQ ID NO: 365088 - RNA, 25 nt, Human
ccagggaggcagagauugcagugag

SEQ ID NO: 365089 - RNA, 32 nt, Human
ccagggaggcagagauugcagugagccgagau

SEQ ID NO: 365090 - RNA, 32 nt, Human
ccagggaggcagagguugcagugagcccagau

SEQ ID NO: 365091 - RNA, 32 nt, Human
ccagggaggcagagguugcagugagccgagau

SEQ ID NO: 365092 - RNA, 22 nt, Human
ccagggaggcagagguugcugu

SEQ ID NO: 365093 - RNA, 24 nt, Human
ccagggaggcagaguuugcaguga

SEQ ID NO: 365094 - RNA, 18 nt, Human
ccagggaggcagcaccau

SEQ ID NO: 365095 - RNA, 21 nt, Human
ccagggaggcagcugcugccu

SEQ ID NO: 365096 - RNA, 25 nt, Human
ccagggaggcccccaccugcugccu

SEQ ID NO: 365097 - RNA, 24 nt, Human
ccagggaggcggagcuugcaguga

SEQ ID NO: 365098 - RNA, 25 nt, Human
ccagggaggcggagcuugcagugag

SEQ ID NO: 365099 - RNA, 21 nt, Human
ccagggaggcggagguugcag

SEQ ID NO: 365100 - RNA, 32 nt, Human
ccagggaggcggagguugcagcaagccaagau

SEQ ID NO: 365101 - RNA, 23 nt, Human
ccagggaggcggagguugcagug

SEQ ID NO: 365102 - RNA, 24 nt, Human
ccagggaggcggagguugcaguga

SEQ ID NO: 365103 - RNA, 25 nt, Human
ccagggaggcggagguugcagugag

SEQ ID NO: 365104 - RNA, 32 nt, Human
ccagggaggcggagguugcagugagccgaggu

SEQ ID NO: 365105 - RNA, 32 nt, Human
ccagggaggcggagguugcugcaaagcauggu

SEQ ID NO: 365106 - RNA, 23 nt, Human
ccagggaggcugcccacagucua

SEQ ID NO: 365107 - RNA, 32 nt, Human
ccagggagggacccccacccccaagcacuggg

SEQ ID NO: 365108 - RNA, 32 nt, Human
ccagggagggagaaggaagagggggagcuggu

SEQ ID NO: 365109 - RNA, 20 nt, Human
ccagggagggagcaugggaa

SEQ ID NO: 365110 - RNA, 32 nt, Human
ccagggagggccugaaggcugguggcugggcu

SEQ ID NO: 365111 - RNA, 32 nt, Human
ccagggagggccuggcagagacugagcacugg

SEQ ID NO: 365112 - RNA, 32 nt, Human
ccagggaggggaggggaugggaagcaccacca

SEQ ID NO: 365113 - RNA, 32 nt, Human
ccagggaggggauggcccugagcccagcggcu

SEQ ID NO: 365114 - RNA, 32 nt, Human
ccagggaggguggaggcccaggagaccaaagg

SEQ ID NO: 365115 - RNA, 32 nt, Human
ccagggagguagaggcuucagugagcugagau

SEQ ID NO: 365116 - RNA, 24 nt, Human
ccagggagguagagguugcaguga

SEQ ID NO: 365117 - RNA, 25 nt, Human
ccagggagguagagguugcagugag

SEQ ID NO: 365118 - RNA, 32 nt, Human
ccagggagguagagguugcagugagcugagau

SEQ ID NO: 365119 - RNA, 32 nt, Human
ccagggagguaggccagagggagcgcgggcuu

SEQ ID NO: 365120 - RNA, 24 nt, Human
ccagggaggucaaggcugcaguga

SEQ ID NO: 365121 - RNA, 25 nt, Human
ccagggaggucaaggcugcagugag

SEQ ID NO: 365122 - RNA, 32 nt, Human
ccagggaggucaaggcugcagugagcaaugau

SEQ ID NO: 365123 - RNA, 25 nt, Human
ccagggaggucgaggcugcagugag

SEQ ID NO: 365124 - RNA, 32 nt, Human
ccagggaggucgaugcugcagugagcuauggu

SEQ ID NO: 365125 - RNA, 32 nt, Human
ccagggagguggaggcuacagugagccaugau

SEQ ID NO: 365126 - RNA, 24 nt, Human
ccagggagguggagguugcaguga

SEQ ID NO: 365127 - RNA, 25 nt, Human
ccagggagguggagguugcagugag

SEQ ID NO: 365128 - RNA, 32 nt, Human
ccagggagguggagguugcagugagccaagau

SEQ ID NO: 365129 - RNA, 32 nt, Human
ccagggagguggagguugcagugagccgagau

SEQ ID NO: 365130 - RNA, 32 nt, Human
ccagggagguggagguugcagugagcugagau

SEQ ID NO: 365131 - RNA, 32 nt, Human
ccagggagguugaggcugcagugagcuaugau

SEQ ID NO: 365132 - RNA, 25 nt, Human
ccagggagucaaaggcuguagugag

SEQ ID NO: 365133 - RNA, 24 nt, Human
ccagggagucagagguugcaguga

SEQ ID NO: 365134 - RNA, 25 nt, Human
ccagggagucagagguugcagugag

SEQ ID NO: 365135 - RNA, 25 nt, Human
ccagggagucagagguuucagugag

SEQ ID NO: 365136 - RNA, 24 nt, Human
ccagggagucggagauugcaguga

SEQ ID NO: 365137 - RNA, 25 nt, Human
ccagggagucggagauugcagugag

SEQ ID NO: 365138 - RNA, 32 nt, Human
ccagggagucggagauugcagugagcugagau

SEQ ID NO: 365139 - RNA, 32 nt, Human
ccagggagugcagagccagggagagggguacc

SEQ ID NO: 365140 - RNA, 32 nt, Human
ccagggauaaagagcuuccucacuggauggga

SEQ ID NO: 365141 - RNA, 23 nt, Human
ccagggaucccccagcuccccca

SEQ ID NO: 365142 - RNA, 32 nt, Human
ccagggaugagcugaugguugcuggaggaggc

SEQ ID NO: 365143 - RNA, 25 nt, Human
ccagggaugcaaagguugcagugag

SEQ ID NO: 365144 - RNA, 32 nt, Human
ccagggaugcaggggauccaggauucucugcc

SEQ ID NO: 365145 - RNA, 18 nt, Human
ccagggaugcaguggugu

SEQ ID NO: 365146 - RNA, 32 nt, Human
ccagggaugccacccuuucgucaccucuucca

SEQ ID NO: 365147 - RNA, 32 nt, Human
ccagggaugccaccgaacauccuacaaugcac

SEQ ID NO: 365148 - RNA, 32 nt, Human
ccagggaugcugagguugcacgagcugagauc

SEQ ID NO: 365149 - RNA, 32 nt, Human
ccagggauucaaggccaaccugggcaauagag

SEQ ID NO: 365150 - RNA, 32 nt, Human
ccagggcaaagcaguggcucagggcuccuugg

SEQ ID NO: 365151 - RNA, 32 nt, Human
ccagggcaacacagcaagaccccaucucuaca

SEQ ID NO: 365152 - RNA, 32 nt, Human
ccagggcaacacagccagacgcccuuguuuuu

SEQ ID NO: 365153 - RNA, 32 nt, Human
ccagggcaacacagcccgcacuccacaaguac

SEQ ID NO: 365154 - RNA, 25 nt, Human
ccagggcaacacagcgagacccugu

SEQ ID NO: 365155 - RNA, 32 nt, Human
ccagggcaacacagcgagacccugucccaaaa

SEQ ID NO: 365156 - RNA, 25 nt, Human
ccagggcaacaugaugagacccugu

SEQ ID NO: 365157 - RNA, 21 nt, Human
ccagggcaacauggugaaacc

SEQ ID NO: 365158 - RNA, 22 nt, Human
ccagggcaacauggugagaccu

SEQ ID NO: 365159 - RNA, 32 nt, Human
ccagggcaagggaacagcagaacuuaggguca

SEQ ID NO: 365160 - RNA, 32 nt, Human
ccagggcaagggacaggaggacagggguucuc

SEQ ID NO: 365161 - RNA, 22 nt, Human
ccagggcaaugauuucccugca

SEQ ID NO: 365162 - RNA, 32 nt, Human
ccagggcacaucugugguacccagggacgucc

SEQ ID NO: 365163 - RNA, 17 nt, Human
ccagggcacccgccucu

SEQ ID NO: 365164 - RNA, 32 nt, Human
ccagggcagaaaccuugccuucaaggguuuuu

SEQ ID NO: 365165 - RNA, 32 nt, Human
ccagggcagcaacuggcccuccugucccucac

SEQ ID NO: 365166 - RNA, 19 nt, Human
ccagggcagcagagcuagg

SEQ ID NO: 365167 - RNA, 18 nt, Human
ccagggcagcagggccag

SEQ ID NO: 365168 - RNA, 32 nt, Human
ccagggcagccccugggcaggagacguggcug

SEQ ID NO: 365169 - RNA, 32 nt, Human
ccagggcagcguucagcacacuccugggcaug

SEQ ID NO: 365170 - RNA, 32 nt, Human
ccagggcaggaaggaauggaaggauggagcua

SEQ ID NO: 365171 - RNA, 19 nt, Human
ccagggcaggagagcgcag

SEQ ID NO: 365172 - RNA, 32 nt, Human
ccagggcaggaugguuuaccugccuggacagc

SEQ ID NO: 365173 - RNA, 32 nt, Human
ccagggcaggcagaucaucugaggucaggagu

SEQ ID NO: 365174 - RNA, 32 nt, Human
ccagggcaggcagaugggggcggcggcacacc

SEQ ID NO: 365175 - RNA, 21 nt, Human
ccagggcaggccugggacaga

SEQ ID NO: 365176 - RNA, 32 nt, Human
ccagggcaggccugggacagagucaaggcuca

SEQ ID NO: 365177 - RNA, 32 nt, Human
ccagggcaggcuccucccaggcggcuguauuc

SEQ ID NO: 365178 - RNA, 19 nt, Human
ccagggcaggcucuggaca

SEQ ID NO: 365179 - RNA, 32 nt, Human
ccagggcagggugggcagccuaugggggcucu

SEQ ID NO: 365180 - RNA, 32 nt, Human
ccagggcagguggauugccugaggucgggagu

SEQ ID NO: 365181 - RNA, 32 nt, Human
ccagggcaucacauccuggggcucagaccccu

SEQ ID NO: 365182 - RNA, 32 nt, Human
ccagggcauccaggaacaggcuccagggcagg

SEQ ID NO: 365183 - RNA, 32 nt, Human
ccagggcaucuggagucugaaggacccuaguu

SEQ ID NO: 365184 - RNA, 22 nt, Human
ccagggcaugguccugcugcuu

SEQ ID NO: 365185 - RNA, 32 nt, Human
ccagggcauuguccuccagcccgucaugccca

SEQ ID NO: 365186 - RNA, 32 nt, Human
ccagggccaagccugugacucaacuccagggg

SEQ ID NO: 365187 - RNA, 32 nt, Human
ccagggccaaggagcugggacucacaggagug

SEQ ID NO: 365188 - RNA, 20 nt, Human
ccagggccacacugaugagc

SEQ ID NO: 365189 - RNA, 32 nt, Human
ccagggccacagcagagaggggcgcaggagcu

SEQ ID NO: 365190 - RNA, 32 nt, Human
ccagggccaccaagggcucugcuccagccucu

SEQ ID NO: 365191 - RNA, 32 nt, Human
ccagggccacccagagguaagaggacauuuag

SEQ ID NO: 365192 - RNA, 32 nt, Human
ccagggccacggaggggccaggagucucacag

SEQ ID NO: 365193 - RNA, 32 nt, Human
ccagggccacuuguugaagucugagcacuuua

SEQ ID NO: 365194 - RNA, 32 nt, Human
ccagggccagagagccggagagaggagccccc

SEQ ID NO: 365195 - RNA, 22 nt, Human
ccagggccaggagggcgggagg

SEQ ID NO: 365196 - RNA, 32 nt, Human
ccagggccaggccagaaaucagccugggagaa

SEQ ID NO: 365197 - RNA, 32 nt, Human
ccagggccagggcugcagccugaggcucaggc

SEQ ID NO: 365198 - RNA, 17 nt, Human
ccagggccagggcuuag

SEQ ID NO: 365199 - RNA, 25 nt, Human
ccagggccauccccacuuccugccu

SEQ ID NO: 365200 - RNA, 32 nt, Human
ccagggcccaaagcccagcucuuuguucaguu

SEQ ID NO: 365201 - RNA, 19 nt, Human
ccagggcccaccccagcca

SEQ ID NO: 365202 - RNA, 32 nt, Human
ccagggcccaggaacugucaucagagcagaaa

SEQ ID NO: 365203 - RNA, 32 nt, Human
ccagggcccaggagagagaagcagggagggag

SEQ ID NO: 365204 - RNA, 32 nt, Human
ccagggcccaggccucagcccaggccucggga

SEQ ID NO: 365205 - RNA, 18 nt, Human
ccagggcccaucugggag

SEQ ID NO: 365206 - RNA, 25 nt, Human
ccagggccccacccaccuccugcuu

SEQ ID NO: 365207 - RNA, 18 nt, Human
ccagggccccacccagug

SEQ ID NO: 365208 - RNA, 32 nt, Human
ccagggcccccagggcuauacauuucccugaa

SEQ ID NO: 365209 - RNA, 21 nt, Human
ccagggcccccucccucguca

SEQ ID NO: 365210 - RNA, 21 nt, Human
ccagggccccucacccugccu

SEQ ID NO: 365211 - RNA, 32 nt, Human
ccagggcccgggagagugugagguuucaggaa

SEQ ID NO: 365212 - RNA, 32 nt, Human
ccagggcccucagacagaagguuccacagaaa

SEQ ID NO: 365213 - RNA, 21 nt, Human
ccagggcccuccuggcuccca

SEQ ID NO: 365214 - RNA, 18 nt, Human
ccagggcccucgguggga

SEQ ID NO: 365215 - RNA, 32 nt, Human
ccagggcccugccucuugugcagagcucagcg

SEQ ID NO: 365216 - RNA, 32 nt, Human
ccagggcccugguggaggcugcugugggacgg

SEQ ID NO: 365217 - RNA, 32 nt, Human
ccagggcccuugggacagggacaggaacagca

SEQ ID NO: 365218 - RNA, 32 nt, Human
ccagggcccuuuacucucuucucccuccagac

SEQ ID NO: 365219 - RNA, 32 nt, Human
ccagggccgauuuugcuccuucaagggacauu

SEQ ID NO: 365220 - RNA, 32 nt, Human
ccagggccgcaccggcuuuccugcugcagauc

SEQ ID NO: 365221 - RNA, 32 nt, Human
ccagggccgcacuccggagacucgcgguugcu

SEQ ID NO: 365222 - RNA, 24 nt, Human
ccagggccgcuccuccaccacccu

SEQ ID NO: 365223 - RNA, 32 nt, Human
ccagggccgcucggucacgcugcgcagcucuc

SEQ ID NO: 365224 - RNA, 32 nt, Human
ccagggccgcuuccagcuuggagauacacagc

SEQ ID NO: 365225 - RNA, 32 nt, Human
ccagggccggcgggggcacugcgcacuggccg

SEQ ID NO: 365226 - RNA, 21 nt, Human
ccagggccgggcgcccgggcc

SEQ ID NO: 365227 - RNA, 32 nt, Human
ccagggccgggcggagccagagccagacgcgc

SEQ ID NO: 365228 - RNA, 32 nt, Human
ccagggccguuggcuuaugccuguaaucccag

SEQ ID NO: 365229 - RNA, 32 nt, Human
ccagggccuaggacaguaacuggcauacugua

SEQ ID NO: 365230 - RNA, 32 nt, Human
ccagggccuaggcugauagucagagccugugg

SEQ ID NO: 365231 - RNA, 32 nt, Human
ccagggccucacugcucuacuucaucaugaac

SEQ ID NO: 365232 - RNA, 32 nt, Human
ccagggccucauucagucucagaccaaguuua

SEQ ID NO: 365233 - RNA, 32 nt, Human
ccagggccuccagggcccagguucgagaccca

SEQ ID NO: 365234 - RNA, 25 nt, Human
ccagggccucccuccaccuccuccu

SEQ ID NO: 365235 - RNA, 32 nt, Human
ccagggccuccuggcuccagggcaugugggug

SEQ ID NO: 365236 - RNA, 32 nt, Human
ccagggccucggcggcugcugaagggauucua

SEQ ID NO: 365237 - RNA, 32 nt, Human
ccagggccucucccucccucccucccucucug

SEQ ID NO: 365238 - RNA, 32 nt, Human
ccagggccucuccuuggaaggucuuuugaagg

SEQ ID NO: 365239 - RNA, 32 nt, Human
ccagggccucugggacacuugccuugacuugc

SEQ ID NO: 365240 - RNA, 32 nt, Human
ccagggccugagcaccagucucaggccugcuu

SEQ ID NO: 365241 - RNA, 32 nt, Human
ccagggccuggcccuaccuccuggucuuguaa

SEQ ID NO: 365242 - RNA, 32 nt, Human
ccagggccuggcccugcugcacaugcccugcc

SEQ ID NO: 365243 - RNA, 32 nt, Human
ccagggccugggaaauuucuacuuauccucau

SEQ ID NO: 365244 - RNA, 32 nt, Human
ccagggccugggaagagggucgcucuccggcc

SEQ ID NO: 365245 - RNA, 32 nt, Human
ccagggccugggacugcuccuuccccagccag

SEQ ID NO: 365246 - RNA, 22 nt, Human
ccagggccugggaguuucagga

SEQ ID NO: 365247 - RNA, 32 nt, Human
ccagggccugugccagcucccuucccuccccg

SEQ ID NO: 365248 - RNA, 32 nt, Human
ccagggccuuucuccucccaggaucugggaaa

SEQ ID NO: 365249 - RNA, 32 nt, Human
ccagggcgagaguugaaaaacuaccuacaggg

SEQ ID NO: 365250 - RNA, 32 nt, Human
ccagggcgaggagggagggugaaggaacggag

SEQ ID NO: 365251 - RNA, 32 nt, Human
ccagggcgcugcagaggggcugugugccacag

SEQ ID NO: 365252 - RNA, 32 nt, Human
ccagggcggcucagcggacaauaaccgggcua

SEQ ID NO: 365253 - RNA, 23 nt, Human
ccagggcggcuccucccuccgca

SEQ ID NO: 365254 - RNA, 32 nt, Human
ccagggcggggugggaaucgguugagagccgc

SEQ ID NO: 365255 - RNA, 32 nt, Human
ccagggcgguagcgugaaacuugguggaagac

SEQ ID NO: 365256 - RNA, 32 nt, Human
ccagggcguccuccagcucagccacugcacug

SEQ ID NO: 365257 - RNA, 21 nt, Human
ccagggcgucgugcuuccgca

SEQ ID NO: 365258 - RNA, 32 nt, Human
ccagggcuaauccagaggugggggaggggcua

SEQ ID NO: 365259 - RNA, 32 nt, Human
ccagggcuacagccugugcccagcccucuaau

SEQ ID NO: 365260 - RNA, 25 nt, Human
ccagggcuacuuccaccuuuugccu

SEQ ID NO: 365261 - RNA, 32 nt, Human
ccagggcuagaugucgccgugacugaggccaa

SEQ ID NO: 365262 - RNA, 32 nt, Human
ccagggcuaggggaaggagcugggagaaggag

SEQ ID NO: 365263 - RNA, 32 nt, Human
ccagggcucaaggauccuccugccucagucuc

SEQ ID NO: 365264 - RNA, 32 nt, Human
ccagggcucaaucucugggggcugaggagcag

SEQ ID NO: 365265 - RNA, 32 nt, Human
ccagggcucacugcagccuugaccucccaggc

SEQ ID NO: 365266 - RNA, 32 nt, Human
ccagggcucauuugaccucuacuucaucuugg

SEQ ID NO: 365267 - RNA, 32 nt, Human
ccagggcuccacggggcgcccuugucucaguc

SEQ ID NO: 365268 - RNA, 32 nt, Human
ccagggcucccaggcagggagaggcaggugag

SEQ ID NO: 365269 - RNA, 22 nt, Human
ccagggcucccauccuucugca

SEQ ID NO: 365270 - RNA, 20 nt, Human
ccagggcuccccugcuccuu

SEQ ID NO: 365271 - RNA, 32 nt, Human
ccagggcucccuggcccaguacagcugugcgg

SEQ ID NO: 365272 - RNA, 32 nt, Human
ccagggcuccuccucauccagacuugccugug

SEQ ID NO: 365273 - RNA, 22 nt, Human
ccagggcucuccagaaacggag

SEQ ID NO: 365274 - RNA, 24 nt, Human
ccagggcucuccccacccucccca

SEQ ID NO: 365275 - RNA, 25 nt, Human
ccagggcucuccuccaccccugccu

SEQ ID NO: 365276 - RNA, 25 nt, Human
ccagggcucucuuccccuccugucu

SEQ ID NO: 365277 - RNA, 32 nt, Human
ccagggcucugcacucucaaggcuggccccau

SEQ ID NO: 365278 - RNA, 32 nt, Human
ccagggcugagcuguguggugcaggccaaacg

SEQ ID NO: 365279 - RNA, 21 nt, Human
ccagggcugaggaccccucca

SEQ ID NO: 365280 - RNA, 19 nt, Human
ccagggcugaugcuguaca

SEQ ID NO: 365281 - RNA, 32 nt, Human
ccagggcugcagcucucuacagcgugugugcc

SEQ ID NO: 365282 - RNA, 32 nt, Human
ccagggcugccuggcucugucccaggcgcggg

SEQ ID NO: 365283 - RNA, 32 nt, Human
ccagggcugccugggccugguuauuguguggg

SEQ ID NO: 365284 - RNA, 32 nt, Human
ccagggcugccuuccagcacuucauggggcac

SEQ ID NO: 365285 - RNA, 32 nt, Human
ccagggcugcuggcuagggagggacagggcag

SEQ ID NO: 365286 - RNA, 18 nt, Human
ccagggcugcuuugcugu

SEQ ID NO: 365287 - RNA, 23 nt, Human
ccagggcuggaggcaggucccag

SEQ ID NO: 365288 - RNA, 23 nt, Human
ccagggcugggggaggugggagg

SEQ ID NO: 365289 - RNA, 32 nt, Human
ccagggcuggugcugcucuucccucagcucug

SEQ ID NO: 365290 - RNA, 32 nt, Human
ccagggcuguaaccuggugucugguagcccca

SEQ ID NO: 365291 - RNA, 32 nt, Human
ccagggcuguaacugccaggcucucuuugccc

SEQ ID NO: 365292 - RNA, 32 nt, Human
ccagggcuguagcacaggcuucacagugauuu

SEQ ID NO: 365293 - RNA, 32 nt, Human
ccagggcugugacugcagccuguguaggacca

SEQ ID NO: 365294 - RNA, 32 nt, Human
ccagggcugugaggacggaaacaggcaggcag

SEQ ID NO: 365295 - RNA, 32 nt, Human
ccagggcugugcuaaggagggaagccugugaa

SEQ ID NO: 365296 - RNA, 32 nt, Human
ccagggcuguguggaucugacaggguauagga

SEQ ID NO: 365297 - RNA, 32 nt, Human
ccagggcuguucugucaagguucagcugcagg

SEQ ID NO: 365298 - RNA, 32 nt, Human
ccagggcuguuugcacagaaacaugcugcacc

SEQ ID NO: 365299 - RNA, 32 nt, Human
ccagggcuuccagccucgugcugucucgggac

SEQ ID NO: 365300 - RNA, 32 nt, Human
ccagggcuuccugccaagcaccugccugccug

SEQ ID NO: 365301 - RNA, 32 nt, Human
ccagggcuugaacuuggccucuacccaaacuu

SEQ ID NO: 365302 - RNA, 32 nt, Human
ccagggcuuggcuccacccauuuccuugaccu

SEQ ID NO: 365303 - RNA, 32 nt, Human
ccagggcuuguggacucucugccugcuuccug

SEQ ID NO: 365304 - RNA, 25 nt, Human
ccagggcuuuccuccucuucugccu

SEQ ID NO: 365305 - RNA, 25 nt, Human
ccagggcuuugacuacuuccugucu

SEQ ID NO: 365306 - RNA, 25 nt, Human
ccagggcuuugccaccucccugccu

SEQ ID NO: 365307 - RNA, 26 nt, Human
ccagggcuuugcccuuccuccugccu

SEQ ID NO: 365308 - RNA, 26 nt, Human
ccagggcuuuuucuaaucuccugccu

SEQ ID NO: 365309 - RNA, 25 nt, Human
ccagggcuuuuuuccucuccugucu

SEQ ID NO: 365310 - RNA, 32 nt, Human
ccaggggaacucgccaccugcccacgcuaguu

SEQ ID NO: 365311 - RNA, 32 nt, Human
ccaggggaagaaaaggggagaaaacggagaag

SEQ ID NO: 365312 - RNA, 18 nt, Human
ccaggggaagacucggag

SEQ ID NO: 365313 - RNA, 18 nt, Human
ccaggggaagcugcagug

SEQ ID NO: 365314 - RNA, 32 nt, Human
ccaggggaaggagaaagagacauuacagagca

SEQ ID NO: 365315 - RNA, 32 nt, Human
ccaggggaaggaugagguuuacuuggcugggg

SEQ ID NO: 365316 - RNA, 32 nt, Human
ccaggggacaagggauuugaggugaggguugg

SEQ ID NO: 365317 - RNA, 32 nt, Human
ccaggggacaggucggggcaguauuuggggga

SEQ ID NO: 365318 - RNA, 32 nt, Human
ccaggggaccacgcacgucccacccacccagc

SEQ ID NO: 365319 - RNA, 32 nt, Human
ccaggggaccuguugggugcucugccugccuc

SEQ ID NO: 365320 - RNA, 32 nt, Human
ccaggggagaauggguguuguauggggaggca

SEQ ID NO: 365321 - RNA, 32 nt, Human
ccaggggagacacuuucuugggcucugucuuu

SEQ ID NO: 365322 - RNA, 32 nt, Human
ccaggggagagggucuggagaagcagugagcc

SEQ ID NO: 365323 - RNA, 32 nt, Human
ccaggggagcaguggagguaagggcuccaccc

SEQ ID NO: 365324 - RNA, 32 nt, Human
ccaggggagcccaggcugcccugcacuccugc

SEQ ID NO: 365325 - RNA, 32 nt, Human
ccaggggagccgggcuugcagacaacagcagu

SEQ ID NO: 365326 - RNA, 32 nt, Human
ccaggggagcuaggaggaagcggggagagaga

SEQ ID NO: 365327 - RNA, 31 nt, Human
ccaggggaggcauagcagaaagacuggcccc

SEQ ID NO: 365328 - RNA, 32 nt, Human
ccaggggaggcauagcagaaagacuggccccu

SEQ ID NO: 365329 - RNA, 32 nt, Human
ccaggggagggcuugggggcagcucugggagg

SEQ ID NO: 365330 - RNA, 32 nt, Human
ccaggggagggugggcccugcucacagccaga

SEQ ID NO: 365331 - RNA, 32 nt, Human
ccaggggaggugggguuuggugagagacgcca

SEQ ID NO: 365332 - RNA, 25 nt, Human
ccaggggaugccaccucugcugcuc

SEQ ID NO: 365333 - RNA, 32 nt, Human
ccaggggaugccaccucugcugcuccagucgu

SEQ ID NO: 365334 - RNA, 32 nt, Human
ccaggggcaccggcugcccacagggaacacau

SEQ ID NO: 365335 - RNA, 32 nt, Human
ccaggggcagcaucccccuccaggcccuaaga

SEQ ID NO: 365336 - RNA, 21 nt, Human
ccaggggcaucagagcugccu

SEQ ID NO: 365337 - RNA, 32 nt, Human
ccaggggccaaugaaagccaaaaagcuggugu

SEQ ID NO: 365338 - RNA, 32 nt, Human
ccaggggccacuuggaccaagcuccagucagu

SEQ ID NO: 365339 - RNA, 21 nt, Human
ccaggggccaggccucuucca

SEQ ID NO: 365340 - RNA, 18 nt, Human
ccaggggccaggcuggga

SEQ ID NO: 365341 - RNA, 19 nt, Human
ccaggggcccucccggguc

SEQ ID NO: 365342 - RNA, 17 nt, Human
ccaggggccggccagcu

SEQ ID NO: 365343 - RNA, 32 nt, Human
ccaggggccuccaggacccggaggagaggcag

SEQ ID NO: 365344 - RNA, 32 nt, Human
ccaggggccuugagggucugaggucccagccc

SEQ ID NO: 365345 - RNA, 32 nt, Human
ccaggggccuuuaccauguucucuccacaucc

SEQ ID NO: 365346 - RNA, 21 nt, Human
ccaggggcgcuccagccgccu

SEQ ID NO: 365347 - RNA, 32 nt, Human
ccaggggcgcuuggcaucucccauggacugau

SEQ ID NO: 365348 - RNA, 32 nt, Human
ccaggggcgguggcucacgccuguaaucccag

SEQ ID NO: 365349 - RNA, 32 nt, Human
ccaggggcgguggcucaugccuguaaucccag

SEQ ID NO: 365350 - RNA, 32 nt, Human
ccaggggcucugagcauuuccacaaugcacag

SEQ ID NO: 365351 - RNA, 32 nt, Human
ccaggggcugacgcuuaccucaagucccugca

SEQ ID NO: 365352 - RNA, 32 nt, Human
ccaggggcugguaggucauucaaagcuguggc

SEQ ID NO: 365353 - RNA, 32 nt, Human
ccaggggcuggugugugggagcugcuaccugg

SEQ ID NO: 365354 - RNA, 32 nt, Human
ccaggggcugugugacggcugccugaaguucu

SEQ ID NO: 365355 - RNA, 32 nt, Human
ccaggggcuucagaaaaggaguggccacagca

SEQ ID NO: 365356 - RNA, 32 nt, Human
ccaggggcuuccaagaugaggcccagagacuc

SEQ ID NO: 365357 - RNA, 32 nt, Human
ccaggggcuuugacacaguccucugcuguccc

SEQ ID NO: 365358 - RNA, 32 nt, Human
ccagggggaagcuuggcuucagggaggaccua

SEQ ID NO: 365359 - RNA, 32 nt, Human
ccagggggacagcagagcuugggugaccauac

SEQ ID NO: 365360 - RNA, 23 nt, Human
ccagggggacuagccccugugga

SEQ ID NO: 365361 - RNA, 32 nt, Human
ccagggggagcugggguugcagggcaacagua

SEQ ID NO: 365362 - RNA, 32 nt, Human
ccagggggaggcagagauggcacagcaagaga

SEQ ID NO: 365363 - RNA, 21 nt, Human
ccagggggaugagcucuccaa

SEQ ID NO: 365364 - RNA, 32 nt, Human
ccagggggauuccaaagaccuggugucuggag

SEQ ID NO: 365365 - RNA, 32 nt, Human
ccagggggcaaggaaagcuggcaaacacacca

SEQ ID NO: 365366 - RNA, 24 nt, Human
ccagggggcagagguugcagugag

SEQ ID NO: 365367 - RNA, 32 nt, Human
ccagggggcaggcagaggcaagagaagaggaa

SEQ ID NO: 365368 - RNA, 32 nt, Human
ccagggggcccagucuucuguggggugcacag

SEQ ID NO: 365369 - RNA, 32 nt, Human
ccagggggccugggaggagccgagaccagccu

SEQ ID NO: 365370 - RNA, 32 nt, Human
ccagggggcgaacgcagcacagaggaagaggc

SEQ ID NO: 365371 - RNA, 24 nt, Human
ccagggggcggagguugcagugag

SEQ ID NO: 365372 - RNA, 18 nt, Human
ccagggggcuccacucca

SEQ ID NO: 365373 - RNA, 21 nt, Human
ccagggggcugaggcacacag

SEQ ID NO: 365374 - RNA, 32 nt, Human
ccagggggcugaggcacacagagaggccaacu

SEQ ID NO: 365375 - RNA, 32 nt, Human
ccagggggcugaggcaggagaauuguuugaag

SEQ ID NO: 365376 - RNA, 22 nt, Human
ccagggggucagggaugagcca

SEQ ID NO: 365377 - RNA, 25 nt, Human
ccaggggguuugaggcugcagugag

SEQ ID NO: 365378 - RNA, 20 nt, Human
ccagggguaaccccaggcca

SEQ ID NO: 365379 - RNA, 32 nt, Human
ccagggguaguggcacgggcagauaucucacc

SEQ ID NO: 365380 - RNA, 32 nt, Human
ccagggguccaagggaacaggagaggucacug

SEQ ID NO: 365381 - RNA, 32 nt, Human
ccagggguccagggccagccugagaugcccgu

SEQ ID NO: 365382 - RNA, 32 nt, Human
ccaggggucccagcuacucaggaggcugaggu

SEQ ID NO: 365383 - RNA, 32 nt, Human
ccaggggucccucccucccuccuucccaaagc

SEQ ID NO: 365384 - RNA, 32 nt, Human
ccaggggucucugacggggguggacccccauc

SEQ ID NO: 365385 - RNA, 32 nt, Human
ccaggggucugggcuccagccauggagggugg

SEQ ID NO: 365386 - RNA, 32 nt, Human
ccaggggugaagcaggaggggccaggccucua

SEQ ID NO: 365387 - RNA, 32 nt, Human
ccaggggugcaggagcagaagguggggagggu

SEQ ID NO: 365388 - RNA, 32 nt, Human
ccaggggugcuaagcaguuaguggugcaggug

SEQ ID NO: 365389 - RNA, 32 nt, Human
ccaggggugcugcugccuaagccacccacaua

SEQ ID NO: 365390 - RNA, 32 nt, Human
ccagggguggaggccucuguccuccacuuuga

SEQ ID NO: 365391 - RNA, 22 nt, Human
ccagggguggaggcugcaauga

SEQ ID NO: 365392 - RNA, 32 nt, Human
ccagggguggcaaucuuugcucugccuucccc

SEQ ID NO: 365393 - RNA, 32 nt, Human
ccaggggugggugaaagaagagauagaacuua

SEQ ID NO: 365394 - RNA, 32 nt, Human
ccaggggugguggaaggagcacugggcuaggg

SEQ ID NO: 365395 - RNA, 32 nt, Human
ccaggggugguggcucacgccuguaaucccag

SEQ ID NO: 365396 - RNA, 24 nt, Human
ccaggggugguuugggggcgcuca

SEQ ID NO: 365397 - RNA, 32 nt, Human
ccaggggugugaggaagcagacucccuguuau

SEQ ID NO: 365398 - RNA, 32 nt, Human
ccaggggugugguggaggggaaggccacgugc

SEQ ID NO: 365399 - RNA, 24 nt, Human
ccagggguucacagcugcagugag

SEQ ID NO: 365400 - RNA, 24 nt, Human
ccagggguugcaggcugcagugag

SEQ ID NO: 365401 - RNA, 32 nt, Human
ccagggguugucauggacuggcugccuuacaa

SEQ ID NO: 365402 - RNA, 24 nt, Human
ccagggguuugaggcugcagugag

SEQ ID NO: 365403 - RNA, 24 nt, Human
ccagggguuugcggcugcagugag

SEQ ID NO: 365404 - RNA, 25 nt, Human
ccaggguaaccuccagccuccugcc

SEQ ID NO: 365405 - RNA, 32 nt, Human
ccaggguaagggcaggccccuccaacaggugc

SEQ ID NO: 365406 - RNA, 32 nt, Human
ccaggguacagugggagccucaggaaggucag

SEQ ID NO: 365407 - RNA, 32 nt, Human
ccaggguaccacaacagacaauggcucagcga

SEQ ID NO: 365408 - RNA, 32 nt, Human
ccaggguagacuugagagaguucacauuccac

SEQ ID NO: 365409 - RNA, 32 nt, Human
ccaggguagagaaugaaggguauggaaguagu

SEQ ID NO: 365410 - RNA, 32 nt, Human
ccaggguagggagacaagcagcaguuuguucu

SEQ ID NO: 365411 - RNA, 32 nt, Human
ccaggguagggugagagggggaccaugaaugg

SEQ ID NO: 365412 - RNA, 32 nt, Human
ccaggguaguccuggccagcauggugaaaccc

SEQ ID NO: 365413 - RNA, 32 nt, Human
ccaggguauagacuagauauuuuugcuguugc

SEQ ID NO: 365414 - RNA, 32 nt, Human
ccaggguauauguggcagccuuugccauauca

SEQ ID NO: 365415 - RNA, 32 nt, Human
ccagggucacaucaaccgccagaaguggaguu

SEQ ID NO: 365416 - RNA, 32 nt, Human
ccagggucaccaggccagagccuccagugguc

SEQ ID NO: 365417 - RNA, 31 nt, Human
ccagggucacucagguagaguugagauucaa

SEQ ID NO: 365418 - RNA, 32 nt, Human
ccagggucagcaggcucaggccggcucagggc

SEQ ID NO: 365419 - RNA, 25 nt, Human
ccagggucaggcccccuccucuccc

SEQ ID NO: 365420 - RNA, 32 nt, Human
ccaggguccaccccuucucucugggcuuguug

SEQ ID NO: 365421 - RNA, 32 nt, Human
ccaggguccacucagaacuuuccucuuggacu

SEQ ID NO: 365422 - RNA, 31 nt, Human
ccaggguccaggcccaucacaguugacucca

SEQ ID NO: 365423 - RNA, 32 nt, Human
ccagggucccaggugucauggcaacagaacgu

SEQ ID NO: 365424 - RNA, 32 nt, Human
ccagggucccguugauguaacagagcagagga

SEQ ID NO: 365425 - RNA, 32 nt, Human
ccagggucccucaaagcuucuguggcuucgug

SEQ ID NO: 365426 - RNA, 25 nt, Human
ccaggguccuccuccaccuccuccu

SEQ ID NO: 365427 - RNA, 25 nt, Human
ccaggguccuccuccgccuccuccu

SEQ ID NO: 365428 - RNA, 32 nt, Human
ccaggguccuccuccuuccucucuccuuguaa

SEQ ID NO: 365429 - RNA, 26 nt, Human
ccaggguccucuaucaccuccugucu

SEQ ID NO: 365430 - RNA, 32 nt, Human
ccaggguccucugggcccucuucuugacuagg

SEQ ID NO: 365431 - RNA, 32 nt, Human
ccaggguccucuuccuccauuuggcucuuuuc

SEQ ID NO: 365432 - RNA, 32 nt, Human
ccaggguccucuuccuccguuuggcucuuuuc

SEQ ID NO: 365433 - RNA, 21 nt, Human
ccaggguccugguccuggaca

SEQ ID NO: 365434 - RNA, 25 nt, Human
ccaggguccuucccaccucuugccu

SEQ ID NO: 365435 - RNA, 25 nt, Human
ccaggguccuuccugcuucuugccu

SEQ ID NO: 365436 - RNA, 32 nt, Human
ccaggguccuuucaaggagguugaaugagaca

SEQ ID NO: 365437 - RNA, 25 nt, Human
ccagggucgugcacucucugggaua

SEQ ID NO: 365438 - RNA, 32 nt, Human
ccagggucuacccuuuguuucccaggcugguc

SEQ ID NO: 365439 - RNA, 32 nt, Human
ccagggucuaugaguuggcuucggguccuugu

SEQ ID NO: 365440 - RNA, 32 nt, Human
ccagggucucacuauguugcccaggcaggucu

SEQ ID NO: 365441 - RNA, 32 nt, Human
ccagggucucacucugugucucaggcuggagu

SEQ ID NO: 365442 - RNA, 32 nt, Human
ccagggucuccuccuccucuuccuucaucgcu

SEQ ID NO: 365443 - RNA, 32 nt, Human
ccagggucucuggagucucugccccuguccaa

SEQ ID NO: 365444 - RNA, 32 nt, Human
ccagggucugaacugccuccauccuagggcaa

SEQ ID NO: 365445 - RNA, 23 nt, Human
ccagggucuucccugcugagcca

SEQ ID NO: 365446 - RNA, 32 nt, Human
ccagggucuucccuuggucuuugugcgucagg

SEQ ID NO: 365447 - RNA, 25 nt, Human
ccagggucuuccuucaccuccuccu

SEQ ID NO: 365448 - RNA, 20 nt, Human
ccagggugaacccucaggug

SEQ ID NO: 365449 - RNA, 32 nt, Human
ccagggugacaucguagccaaauguuuacugu

SEQ ID NO: 365450 - RNA, 32 nt, Human
ccagggugaccccagcccuggggcccagccac

SEQ ID NO: 365451 - RNA, 32 nt, Human
ccagggugacuuugaugccacugguuugucuc

SEQ ID NO: 365452 - RNA, 32 nt, Human
ccagggugaggcggagccccuuggccaccaga

SEQ ID NO: 365453 - RNA, 32 nt, Human
ccagggugagggugggaacacauccuagaagg

SEQ ID NO: 365454 - RNA, 32 nt, Human
ccagggugaggguugugcccagcugggccacg

SEQ ID NO: 365455 - RNA, 32 nt, Human
ccagggugcggugcagagcagagcaggcaggg

SEQ ID NO: 365456 - RNA, 32 nt, Human
ccagggugcucugccugcucagccaggccucu

SEQ ID NO: 365457 - RNA, 24 nt, Human
ccagggugcugagauuacaggugu

SEQ ID NO: 365458 - RNA, 22 nt, Human
ccagggugcugggauuacaggc

SEQ ID NO: 365459 - RNA, 24 nt, Human
ccagggugcugggauuacaggugu

SEQ ID NO: 365460 - RNA, 32 nt, Human
ccaggguggacaaaucgccagagauguggugc

SEQ ID NO: 365461 - RNA, 17 nt, Human
ccaggguggagagccag

SEQ ID NO: 365462 - RNA, 21 nt, Human
ccaggguggaggacugagcac

SEQ ID NO: 365463 - RNA, 32 nt, Human
ccaggguggagguuuggugccggggguugaga

SEQ ID NO: 365464 - RNA, 32 nt, Human
ccaggguggagugcaguggcaggaucacagcu

SEQ ID NO: 365465 - RNA, 32 nt, Human
ccaggguggagugcaguggugugaucucggcu

SEQ ID NO: 365466 - RNA, 32 nt, Human
ccaggguggcugccucggcccucccagcucuu

SEQ ID NO: 365467 - RNA, 32 nt, Human
ccagggugggcagaugucuccaguggggucag

SEQ ID NO: 365468 - RNA, 32 nt, Human
ccagggugggcuacaugcaaugugguugcugc

SEQ ID NO: 365469 - RNA, 32 nt, Human
ccaggguggggaggggagcagcagagggaggc

SEQ ID NO: 365470 - RNA, 24 nt, Human
ccaggguggguggaucaccugagg

SEQ ID NO: 365471 - RNA, 32 nt, Human
ccaggguggguggaucaccugaggucaggagu

SEQ ID NO: 365472 - RNA, 31 nt, Human
ccagggugggugggagugggcugagggcucg

SEQ ID NO: 365473 - RNA, 32 nt, Human
ccaggguggucugcauggaacuucuuucccgg

SEQ ID NO: 365474 - RNA, 22 nt, Human
ccaggguggugguggcgggggg

SEQ ID NO: 365475 - RNA, 32 nt, Human
ccagggugucauggaagggcugcugacaagau

SEQ ID NO: 365476 - RNA, 32 nt, Human
ccaggguguccgggggcuggccagucagagaa

SEQ ID NO: 365477 - RNA, 32 nt, Human
ccagggugucucccgcuuuacucuucaggaau

SEQ ID NO: 365478 - RNA, 32 nt, Human
ccagggugucuucaucuucaauuuggguuuaa

SEQ ID NO: 365479 - RNA, 32 nt, Human
ccagggugugccagcccgucucugugcagucc

SEQ ID NO: 365480 - RNA, 32 nt, Human
ccagggugugggcuucggggcugcagauggcc

SEQ ID NO: 365481 - RNA, 32 nt, Human
ccaggguuauucuccuccucgagucacaguca

SEQ ID NO: 365482 - RNA, 32 nt, Human
ccaggguucaaaggacacacccuagaugagcc

SEQ ID NO: 365483 - RNA, 26 nt, Human
ccaggguucaauuccaccuccuuccu

SEQ ID NO: 365484 - RNA, 26 nt, Human
ccaggguucacuuacaccuccugccu

SEQ ID NO: 365485 - RNA, 32 nt, Human
ccaggguuccacccugcucugccugccugggg

SEQ ID NO: 365486 - RNA, 32 nt, Human
ccaggguucccaagguuucucccaucugguca

SEQ ID NO: 365487 - RNA, 25 nt, Human
ccaggguucuagucacuuccugccu

SEQ ID NO: 365488 - RNA, 32 nt, Human
ccaggguucucaggcagauuguaggagagcca

SEQ ID NO: 365489 - RNA, 25 nt, Human
ccaggguucucuuccgcuccugccu

SEQ ID NO: 365490 - RNA, 26 nt, Human
ccaggguucugaccacucuccugccu

SEQ ID NO: 365491 - RNA, 25 nt, Human
ccaggguucugaucccuuccugucu

SEQ ID NO: 365492 - RNA, 26 nt, Human
ccaggguucugccuacacuccugccu

SEQ ID NO: 365493 - RNA, 25 nt, Human
ccaggguucugcuccgcuuccuccu

SEQ ID NO: 365494 - RNA, 24 nt, Human
ccaggguucuuucaucuuuugccu

SEQ ID NO: 365495 - RNA, 19 nt, Human
ccaggguuggggcugcaca

SEQ ID NO: 365496 - RNA, 32 nt, Human
ccaggguuguggggacacaggagggccaggga

SEQ ID NO: 365497 - RNA, 32 nt, Human
ccaggguuuagagugaaacagccagucugaag

SEQ ID NO: 365498 - RNA, 26 nt, Human
ccaggguuuauugcuacuuccugccu

SEQ ID NO: 365499 - RNA, 32 nt, Human
ccaggguuucucaaccucuacugacauuuugc

SEQ ID NO: 365500 - RNA, 25 nt, Human
ccaggguuuugaccccuuccugucu

SEQ ID NO: 365501 - RNA, 25 nt, Human
ccaggguuuugcucaccuuuugccu

SEQ ID NO: 365502 - RNA, 26 nt, Human
ccaggguuuugcucuaccaccugccu

SEQ ID NO: 365503 - RNA, 26 nt, Human
ccaggguuuuggccucaucucugccu

SEQ ID NO: 365504 - RNA, 32 nt, Human
ccaggguuuugguggcuggcgaagcugagggc

SEQ ID NO: 365505 - RNA, 32 nt, Human
ccaggguuuuucacuucuccccacaucucccu

SEQ ID NO: 365506 - RNA, 25 nt, Human
ccaggguuuuucugccugccugccu

SEQ ID NO: 365507 - RNA, 32 nt, Human
ccagguaacagucccugggacugagcaguggc

SEQ ID NO: 365508 - RNA, 32 nt, Human
ccagguaacagugguuaccugggagacaauau

SEQ ID NO: 365509 - RNA, 32 nt, Human
ccagguaaccacuccugggagcaguggggaac

SEQ ID NO: 365510 - RNA, 32 nt, Human
ccagguaaccuuuaaaugaaacuugccuaaaa

SEQ ID NO: 365511 - RNA, 32 nt, Human
ccagguaacgucuguaucauacaguuaguguu

SEQ ID NO: 365512 - RNA, 32 nt, Human
ccagguaacuggagccggaaaccgguggaggu

SEQ ID NO: 365513 - RNA, 32 nt, Human
ccagguaaggagaguccuggucuuugucaacc

SEQ ID NO: 365514 - RNA, 18 nt, Human
ccagguaagggggugcag

SEQ ID NO: 365515 - RNA, 32 nt, Human
ccagguaauuccagguaauuaaccuauccauc

SEQ ID NO: 365516 - RNA, 32 nt, Human
ccagguacaguggcucaugccuguaaucccag

SEQ ID NO: 365517 - RNA, 32 nt, Human
ccagguacagugucucacaccuguaaucccag

SEQ ID NO: 365518 - RNA, 21 nt, Human
ccagguacccccgccucccca

SEQ ID NO: 365519 - RNA, 32 nt, Human
ccagguacuguucugagcacuuuacaaacacu

SEQ ID NO: 365520 - RNA, 32 nt, Human
ccagguagcugccugugaaugcacugcucucc

SEQ ID NO: 365521 - RNA, 22 nt, Human
ccagguagcugggauuacaggc

SEQ ID NO: 365522 - RNA, 32 nt, Human
ccagguaguguugagacccaggccuguggccc

SEQ ID NO: 365523 - RNA, 32 nt, Human
ccagguaguucccacugauggaaauguuuaug

SEQ ID NO: 365524 - RNA, 32 nt, Human
ccagguauccucagucuuucugcuuuacuauu

SEQ ID NO: 365525 - RNA, 32 nt, Human
ccagguaucugaaugcuuugguuggcagugcg

SEQ ID NO: 365526 - RNA, 32 nt, Human
ccagguauggugcuaggcaugcuaggcaccaa

SEQ ID NO: 365527 - RNA, 32 nt, Human
ccagguaugguggcacauaccuguggucucag

SEQ ID NO: 365528 - RNA, 32 nt, Human
ccagguaugguggcacgugccuguaaucccag

SEQ ID NO: 365529 - RNA, 32 nt, Human
ccagguaugguggcauacgccuguaauccuag

SEQ ID NO: 365530 - RNA, 32 nt, Human
ccagguaugguggcucacgccuguaaucccag

SEQ ID NO: 365531 - RNA, 32 nt, Human
ccagguaugguggugaacaccuguaaucccag

SEQ ID NO: 365532 - RNA, 32 nt, Human
ccagguaugguggugcauaccuguaaucccag

SEQ ID NO: 365533 - RNA, 32 nt, Human
ccagguaugguggugcaugccuguaaucccag

SEQ ID NO: 365534 - RNA, 32 nt, Human
ccagguaugguggugggcaccuguaaucccag

SEQ ID NO: 365535 - RNA, 18 nt, Human
ccagguauucucuuccca

SEQ ID NO: 365536 - RNA, 32 nt, Human
ccagguauuuuucuauuucucuccuuaauuuu

SEQ ID NO: 365537 - RNA, 32 nt, Human
ccaggucaacagguucaaauauucaagaaggu

SEQ ID NO: 365538 - RNA, 21 nt, Human
ccaggucacauacucguccug

SEQ ID NO: 365539 - RNA, 32 nt, Human
ccaggucacaugcacguauguccagggcaugg

SEQ ID NO: 365540 - RNA, 18 nt, Human
ccaggucaccccaucucu

SEQ ID NO: 365541 - RNA, 32 nt, Human
ccaggucacuuucaggaggcagauaauaaagg

SEQ ID NO: 365542 - RNA, 32 nt, Human
ccaggucagacucgggcuucauccucucuugc

SEQ ID NO: 365543 - RNA, 21 nt, Human
ccaggucagagauguccccug

SEQ ID NO: 365544 - RNA, 32 nt, Human
ccaggucagcaggagcagcagcagggauguau

SEQ ID NO: 365545 - RNA, 20 nt, Human
ccaggucagcgauuuuccca

SEQ ID NO: 365546 - RNA, 32 nt, Human
ccaggucaggagaucaagaccauccuggcuaa

SEQ ID NO: 365547 - RNA, 21 nt, Human
ccaggucaggaggaccuggag

SEQ ID NO: 365548 - RNA, 32 nt, Human
ccaggucaggaggagguagagagagggcagcc

SEQ ID NO: 365549 - RNA, 32 nt, Human
ccaggucaggcacaaggagaaaagguuccugg

SEQ ID NO: 365550 - RNA, 21 nt, Human
ccaggucaggcccacccccug

SEQ ID NO: 365551 - RNA, 24 nt, Human
ccaggucaggcccgauuuguccug

SEQ ID NO: 365552 - RNA, 32 nt, Human
ccaggucagguggcguuugcuguggcggcuag

SEQ ID NO: 365553 - RNA, 32 nt, Human
ccaggucauacuacccuagagccugggaccug

SEQ ID NO: 365554 - RNA, 32 nt, Human
ccaggucaucagcuauugcucuuuggagguug

SEQ ID NO: 365555 - RNA, 32 nt, Human
ccaggucauccaggcuggauguggcuugggag

SEQ ID NO: 365556 - RNA, 32 nt, Human
ccaggucaucccuccccgggccuggggcgcuc

SEQ ID NO: 365557 - RNA, 32 nt, Human
ccaggucaugggagaagagccuggagauucuu

SEQ ID NO: 365558 - RNA, 32 nt, Human
ccaggucauugucaguuuaugguauuauguug

SEQ ID NO: 365559 - RNA, 32 nt, Human
ccagguccaccagggugucugcauggagguga

SEQ ID NO: 365560 - RNA, 32 nt, Human
ccagguccagcccucccgcugcagccugcagg

SEQ ID NO: 365561 - RNA, 16 nt, Human
ccagguccauugccac

SEQ ID NO: 365562 - RNA, 32 nt, Human
ccaggucccaggcugggcggccucggugcccg

SEQ ID NO: 365563 - RNA, 32 nt, Human
ccaggucccaggggagagguuggggcuggcag

SEQ ID NO: 365564 - RNA, 32 nt, Human
ccaggucccauuccaggaggcuuuucauauag

SEQ ID NO: 365565 - RNA, 32 nt, Human
ccagguccccacugcucucacacccuuaggcu

SEQ ID NO: 365566 - RNA, 32 nt, Human
ccagguccccuccagaaaggacucugcuccac

SEQ ID NO: 365567 - RNA, 32 nt, Human
ccagguccccuggaugauguggcaggacacuc

SEQ ID NO: 365568 - RNA, 23 nt, Human
ccaggucccgcagcugccucuga

SEQ ID NO: 365569 - RNA, 32 nt, Human
ccaggucccuccaaauccacacggucaucaug

SEQ ID NO: 365570 - RNA, 32 nt, Human
ccaggucccugccucagccuucagcagaguug

SEQ ID NO: 365571 - RNA, 24 nt, Human
ccaggucccuggccccagggaugg

SEQ ID NO: 365572 - RNA, 32 nt, Human
ccagguccucaccuggguccucucagugaagc

SEQ ID NO: 365573 - RNA, 32 nt, Human
ccagguccucagcuccagacugggugaugcug

SEQ ID NO: 365574 - RNA, 19 nt, Human
ccagguccucauccucuuc

SEQ ID NO: 365575 - RNA, 32 nt, Human
ccagguccucauccucuucugcacccugcugu

SEQ ID NO: 365576 - RNA, 32 nt, Human
ccagguccugagcccuuccucuguaaaagugu

SEQ ID NO: 365577 - RNA, 32 nt, Human
ccagguccugcagcuugugcucugcccagcag

SEQ ID NO: 365578 - RNA, 32 nt, Human
ccagguccugccuugugagauguggccccagc

SEQ ID NO: 365579 - RNA, 32 nt, Human
ccagguccuggcccagucccuccacugccucg

SEQ ID NO: 365580 - RNA, 32 nt, Human
ccagguccuggccgaguuuccucugccccuuc

SEQ ID NO: 365581 - RNA, 32 nt, Human
ccagguccuggggugugucuguccucaugcuu

SEQ ID NO: 365582 - RNA, 32 nt, Human
ccagguccuguuccucuuucuccccgacucca

SEQ ID NO: 365583 - RNA, 32 nt, Human
ccagguccuuucucagccuccagcugggcugu

SEQ ID NO: 365584 - RNA, 32 nt, Human
ccagguccuuuucuuuucuuuuuaauugcuca

SEQ ID NO: 365585 - RNA, 17 nt, Human
ccaggucgggggcucag

SEQ ID NO: 365586 - RNA, 32 nt, Human
ccaggucucacuuuccccaucuguaaaacagg

SEQ ID NO: 365587 - RNA, 23 nt, Human
ccaggucuccugacauuguguuc

SEQ ID NO: 365588 - RNA, 32 nt, Human
ccaggucuccugggcaucuggcccugcugccc

SEQ ID NO: 365589 - RNA, 32 nt, Human
ccaggucucuacuguccccugcagccaccaca

SEQ ID NO: 365590 - RNA, 32 nt, Human
ccaggucugccaguuucugugccugcagagag

SEQ ID NO: 365591 - RNA, 32 nt, Human
ccaggucugcuccccaccuuacucggauggcc

SEQ ID NO: 365592 - RNA, 32 nt, Human
ccaggucugcucccugggaugcuuucucccug

SEQ ID NO: 365593 - RNA, 32 nt, Human
ccaggucugggagccccaggcuggccucagac

SEQ ID NO: 365594 - RNA, 32 nt, Human
ccaggucugggagucccaggccaucugcucaa

SEQ ID NO: 365595 - RNA, 32 nt, Human
ccaggucugggcagauucaaccaugggagcca

SEQ ID NO: 365596 - RNA, 19 nt, Human
ccaggucuggggcugcaca

SEQ ID NO: 365597 - RNA, 32 nt, Human
ccaggucugggugaaagggauacuuuuaugca

SEQ ID NO: 365598 - RNA, 32 nt, Human
ccaggucuguccuugcaggcagccugguacca

SEQ ID NO: 365599 - RNA, 32 nt, Human
ccaggucugucugacaucuguguccucacucu

SEQ ID NO: 365600 - RNA, 32 nt, Human
ccaggucugucugccuaagagccuuuugagga

SEQ ID NO: 365601 - RNA, 32 nt, Human
ccaggucugugccaccuccucucuccucugug

SEQ ID NO: 365602 - RNA, 32 nt, Human
ccaggucuuaccugcuuuccugcuccauggaa

SEQ ID NO: 365603 - RNA, 32 nt, Human
ccaggucuuucagggcccucccuugaggacag

SEQ ID NO: 365604 - RNA, 32 nt, Human
ccaggugaacacagcggcugccagucuccugg

SEQ ID NO: 365605 - RNA, 32 nt, Human
ccaggugaagagaggauagagugaagaacuga

SEQ ID NO: 365606 - RNA, 32 nt, Human
ccaggugaaggugagauugaagauaaccagcu

SEQ ID NO: 365607 - RNA, 32 nt, Human
ccaggugaaguggcucacaccuguaaucccag

SEQ ID NO: 365608 - RNA, 32 nt, Human
ccaggugacaucauaaauacuugcugaaugaa

SEQ ID NO: 365609 - RNA, 32 nt, Human
ccaggugacucugccaagcagcuguggcccca

SEQ ID NO: 365610 - RNA, 32 nt, Human
ccaggugagagaaggaagugaggccauagaug

SEQ ID NO: 365611 - RNA, 32 nt, Human
ccaggugagcugguggcauggggccgccugug

SEQ ID NO: 365612 - RNA, 32 nt, Human
ccaggugaggaacagacccucuggccucucac

SEQ ID NO: 365613 - RNA, 32 nt, Human
ccaggugaggccuggcccugccccaccaugac

SEQ ID NO: 365614 - RNA, 32 nt, Human
ccaggugaggugagcgugugugcucucaggga

SEQ ID NO: 365615 - RNA, 32 nt, Human
ccaggugagugagcccucgugggaucugguug

SEQ ID NO: 365616 - RNA, 21 nt, Human
ccaggugauccacuccauccu

SEQ ID NO: 365617 - RNA, 21 nt, Human
ccaggugaugccgggggucag

SEQ ID NO: 365618 - RNA, 20 nt, Human
ccaggugauggcagggccag

SEQ ID NO: 365619 - RNA, 19 nt, Human
ccaggugaugggcugcaca

SEQ ID NO: 365620 - RNA, 32 nt, Human
ccaggugauuccagugacacagacacacguuu

SEQ ID NO: 365621 - RNA, 32 nt, Human
ccaggugcaaucuacuggaaauguagcacuua

SEQ ID NO: 365622 - RNA, 32 nt, Human
ccaggugcaauggcucaugccuguaaucccaa

SEQ ID NO: 365623 - RNA, 32 nt, Human
ccaggugcaauggcucaugucucuaaucccag

SEQ ID NO: 365624 - RNA, 32 nt, Human
ccaggugcaauggcucgcaccuguaaucccag

SEQ ID NO: 365625 - RNA, 32 nt, Human
ccaggugcaccacugccgucauuucagcuucu

SEQ ID NO: 365626 - RNA, 32 nt, Human
ccaggugcacuggcucaugcuuguaaucucag

SEQ ID NO: 365627 - RNA, 32 nt, Human
ccaggugcagaaacggaagaugaccacucugu

SEQ ID NO: 365628 - RNA, 32 nt, Human
ccaggugcagccuggacaacaugaugagaucc

SEQ ID NO: 365629 - RNA, 32 nt, Human
ccaggugcaggagugguaccccagggaguccc

SEQ ID NO: 365630 - RNA, 32 nt, Human
ccaggugcagguugggaaugaggcuugcugag

SEQ ID NO: 365631 - RNA, 32 nt, Human
ccaggugcaguagcucaugccuguaaucccag

SEQ ID NO: 365632 - RNA, 32 nt, Human
ccaggugcaguggaucacgccuguaaucccag

SEQ ID NO: 365633 - RNA, 32 nt, Human
ccaggugcaguggcccaugccuguaaucccag

SEQ ID NO: 365634 - RNA, 32 nt, Human
ccaggugcaguggcucacaccuguaaucccaa

SEQ ID NO: 365635 - RNA, 32 nt, Human
ccaggugcaguggcucacaccuguaaucccag

SEQ ID NO: 365636 - RNA, 32 nt, Human
ccaggugcaguggcucacaccuguaauccuag

SEQ ID NO: 365637 - RNA, 32 nt, Human
ccaggugcaguggcucacgccuguaaucccag

SEQ ID NO: 365638 - RNA, 32 nt, Human
ccaggugcaguggcucacuccuguaauccgag

SEQ ID NO: 365639 - RNA, 32 nt, Human
ccaggugcaguggcucacuccuguaauccuag

SEQ ID NO: 365640 - RNA, 32 nt, Human
ccaggugcaguggcucaggccuguaaucccag

SEQ ID NO: 365641 - RNA, 32 nt, Human
ccaggugcaguggcucaugccuauaaucccag

SEQ ID NO: 365642 - RNA, 32 nt, Human
ccaggugcaguggcucaugccuguaaucccag

SEQ ID NO: 365643 - RNA, 32 nt, Human
ccaggugcaguggcuuacaccuguaaucccag

SEQ ID NO: 365644 - RNA, 32 nt, Human
ccaggugcagugguucaugccuguaaucccag

SEQ ID NO: 365645 - RNA, 32 nt, Human
ccaggugccagccugggcucagguuccaagac

SEQ ID NO: 365646 - RNA, 32 nt, Human
ccaggugccaucaucucuuuaccuggggccuu

SEQ ID NO: 365647 - RNA, 32 nt, Human
ccaggugccaugaggaagccucgucggaaguc

SEQ ID NO: 365648 - RNA, 32 nt, Human
ccaggugcccagaacagcccaucguggggacu

SEQ ID NO: 365649 - RNA, 23 nt, Human
ccaggugccccccauguuccaga

SEQ ID NO: 365650 - RNA, 22 nt, Human
ccaggugcccgcuccccgcgag

SEQ ID NO: 365651 - RNA, 32 nt, Human
ccaggugcccuagggggcacauuucccacaac

SEQ ID NO: 365652 - RNA, 22 nt, Human
ccaggugccggcggcccgggcc

SEQ ID NO: 365653 - RNA, 32 nt, Human
ccaggugccguggcucacaccuguaaucugaa

SEQ ID NO: 365654 - RNA, 32 nt, Human
ccaggugccguggcucacgccuguaaucccag

SEQ ID NO: 365655 - RNA, 24 nt, Human
ccaggugccucaccaccugcugag

SEQ ID NO: 365656 - RNA, 24 nt, Human
ccaggugccucggaggaugcggag

SEQ ID NO: 365657 - RNA, 20 nt, Human
ccaggugccuugccgcagag

SEQ ID NO: 365658 - RNA, 32 nt, Human
ccaggugccuuuggagguuaaggcuagguuag

SEQ ID NO: 365659 - RNA, 32 nt, Human
ccaggugcggcagcucacaccuguaaucccag

SEQ ID NO: 365660 - RNA, 32 nt, Human
ccaggugcggugacucaugccuguaaucccug

SEQ ID NO: 365661 - RNA, 32 nt, Human
ccaggugcgguggcucaagccuguaaucccag

SEQ ID NO: 365662 - RNA, 32 nt, Human
ccaggugcgguggcucacaccuguaaucccag

SEQ ID NO: 365663 - RNA, 32 nt, Human
ccaggugcgguggcucacaccuguaaucucag

SEQ ID NO: 365664 - RNA, 32 nt, Human
ccaggugcgguggcucacaccuguaauuccag

SEQ ID NO: 365665 - RNA, 32 nt, Human
ccaggugcgguggcucacgccuguaaucccag

SEQ ID NO: 365666 - RNA, 32 nt, Human
ccaggugcgguggcucacgccuguaauccuag

SEQ ID NO: 365667 - RNA, 32 nt, Human
ccaggugcgguggcucacuccuguaauccuag

SEQ ID NO: 365668 - RNA, 32 nt, Human
ccaggugcgguggcucauaccuauaauccuaa

SEQ ID NO: 365669 - RNA, 32 nt, Human
ccaggugcgguggcucauaccuguaaucccag

SEQ ID NO: 365670 - RNA, 32 nt, Human
ccaggugcgguggcucaugccuauaaucccag

SEQ ID NO: 365671 - RNA, 32 nt, Human
ccaggugcgguggcucaugccuguaaucccag

SEQ ID NO: 365672 - RNA, 32 nt, Human
ccaggugcgguggcucaugucuguaaucccag

SEQ ID NO: 365673 - RNA, 32 nt, Human
ccaggugcgguggcucguaccuguaauccagc

SEQ ID NO: 365674 - RNA, 32 nt, Human
ccaggugcggugguucgugccuguaaucccag

SEQ ID NO: 365675 - RNA, 17 nt, Human
ccaggugcuacccugca

SEQ ID NO: 365676 - RNA, 32 nt, Human
ccaggugcuagcccuggcaggcacagcccucc

SEQ ID NO: 365677 - RNA, 32 nt, Human
ccaggugcucagcucccagugcacugaagcuc

SEQ ID NO: 365678 - RNA, 32 nt, Human
ccaggugcucagucccuggugcacugaagcuc

SEQ ID NO: 365679 - RNA, 32 nt, Human
ccaggugcucauuguaaccauuucucacuagu

SEQ ID NO: 365680 - RNA, 25 nt, Human
ccaggugcucccucccuuccugcag

SEQ ID NO: 365681 - RNA, 23 nt, Human
ccaggugcugggauuauaggcgu

SEQ ID NO: 365682 - RNA, 32 nt, Human
ccaggugcuguggcucacaccuguaaucccag

SEQ ID NO: 365683 - RNA, 23 nt, Human
ccaggugcuuccugccagcaaag

SEQ ID NO: 365684 - RNA, 23 nt, Human
ccaggugcuuggcugccucagag

SEQ ID NO: 365685 - RNA, 21 nt, Human
ccagguggaagaaaguuucca

SEQ ID NO: 365686 - RNA, 23 nt, Human
ccagguggaccugggggauggcu

SEQ ID NO: 365687 - RNA, 32 nt, Human
ccagguggacuuccaccuccagccucuggucc

SEQ ID NO: 365688 - RNA, 32 nt, Human
ccagguggaggcggcggcggcagaggaguggg

SEQ ID NO: 365689 - RNA, 32 nt, Human
ccagguggagugagucugaggacagcagauga

SEQ ID NO: 365690 - RNA, 18 nt, Human
ccagguggauccucuuua

SEQ ID NO: 365691 - RNA, 32 nt, Human
ccagguggcaggcagagcaggaugcagaggca

SEQ ID NO: 365692 - RNA, 22 nt, Human
ccagguggccaccuuccuuccc

SEQ ID NO: 365693 - RNA, 23 nt, Human
ccagguggcggagguugcaguga

SEQ ID NO: 365694 - RNA, 24 nt, Human
ccagguggcggagguugcagugag

SEQ ID NO: 365695 - RNA, 32 nt, Human
ccagguggcucccaccuguagucccagcacuu

SEQ ID NO: 365696 - RNA, 32 nt, Human
ccaggugggaagaucacuugaggccaggaguu

SEQ ID NO: 365697 - RNA, 32 nt, Human
ccaggugggaggaucgcuugagcccagaaguu

SEQ ID NO: 365698 - RNA, 32 nt, Human
ccaggugggagugggcccaaacccagccccuc

SEQ ID NO: 365699 - RNA, 32 nt, Human
ccaggugggcaggcuggauggaaaugggccag

SEQ ID NO: 365700 - RNA, 19 nt, Human
ccaggugggcauggucccc

SEQ ID NO: 365701 - RNA, 23 nt, Human
ccaggugggcggaucacuugagg

SEQ ID NO: 365702 - RNA, 32 nt, Human
ccaggugggcuguggcggcauccagguggaag

SEQ ID NO: 365703 - RNA, 21 nt, Human
ccagguggggacucugaccug

SEQ ID NO: 365704 - RNA, 32 nt, Human
ccagguggggcggguggggagcuguccggugc

SEQ ID NO: 365705 - RNA, 18 nt, Human
ccagguggguggcagagc

SEQ ID NO: 365706 - RNA, 20 nt, Human
ccagguggguggcagagcaa

SEQ ID NO: 365707 - RNA, 21 nt, Human
ccagguggugacagagcagaa

SEQ ID NO: 365708 - RNA, 32 nt, Human
ccagguggugagcauaguaccuaacagauagu

SEQ ID NO: 365709 - RNA, 32 nt, Human
ccaggugguggaggugggguuggagcaggaag

SEQ ID NO: 365710 - RNA, 24 nt, Human
ccaggugguggagguugcagugag

SEQ ID NO: 365711 - RNA, 32 nt, Human
ccaggugguuuguggcagcuacucuucaccug

SEQ ID NO: 365712 - RNA, 32 nt, Human
ccagguguagugccucaugccuguaauuccag

SEQ ID NO: 365713 - RNA, 32 nt, Human
ccagguguaguggcucacaccuguaaucucag

SEQ ID NO: 365714 - RNA, 32 nt, Human
ccagguguaguggcucacgccuguaaucccag

SEQ ID NO: 365715 - RNA, 32 nt, Human
ccagguguaguggcucaugccuguaaucccag

SEQ ID NO: 365716 - RNA, 32 nt, Human
ccagguguaguggcucaugccuguaauccuag

SEQ ID NO: 365717 - RNA, 32 nt, Human
ccagguguccccgagcucucccuucccgagcc

SEQ ID NO: 365718 - RNA, 32 nt, Human
ccaggugucccgguucucaagauguaacacag

SEQ ID NO: 365719 - RNA, 21 nt, Human
ccagguguccugaggcucccu

SEQ ID NO: 365720 - RNA, 32 nt, Human
ccaggugugaaaagugaggcucagggagcuag

SEQ ID NO: 365721 - RNA, 32 nt, Human
ccaggugugauggcucacaccuguaaucccca

SEQ ID NO: 365722 - RNA, 32 nt, Human
ccaggugugauggcucaugccuguaauccagu

SEQ ID NO: 365723 - RNA, 32 nt, Human
ccaggugugauggcucaugccuguaaucccag

SEQ ID NO: 365724 - RNA, 32 nt, Human
ccaggugugauggugcaugccuguaaucccag

SEQ ID NO: 365725 - RNA, 32 nt, Human
ccaggugugauggugggugccuguaaucccag

SEQ ID NO: 365726 - RNA, 18 nt, Human
ccaggugugccagggacc

SEQ ID NO: 365727 - RNA, 23 nt, Human
ccaggugugcggccgccugagcc

SEQ ID NO: 365728 - RNA, 32 nt, Human
ccagguguggagguacaugccuguaaucccag

SEQ ID NO: 365729 - RNA, 25 nt, Human
ccagguguggccaccuggggcucag

SEQ ID NO: 365730 - RNA, 32 nt, Human
ccagguguggcggcgagcaccuguaaucccag

SEQ ID NO: 365731 - RNA, 32 nt, Human
ccaggugugggcucuccugugcucugaauugu

SEQ ID NO: 365732 - RNA, 32 nt, Human
ccagguguggggaacgagagugcacugcauga

SEQ ID NO: 365733 - RNA, 32 nt, Human
ccaggugugguagcucacaccuguaauuccca

SEQ ID NO: 365734 - RNA, 32 nt, Human
ccaggugugguggcacaugccuguaaucccag

SEQ ID NO: 365735 - RNA, 32 nt, Human
ccaggugugguggcgcauaccuguagucccag

SEQ ID NO: 365736 - RNA, 32 nt, Human
ccaggugugguggcgcaugccuguaaucccag

SEQ ID NO: 365737 - RNA, 32 nt, Human
ccaggugugguggcucaagccuguaaucccag

SEQ ID NO: 365738 - RNA, 32 nt, Human
ccaggugugguggcucacaccuguaaucccag

SEQ ID NO: 365739 - RNA, 32 nt, Human
ccaggugugguggcucacgccuguaaucccaa

SEQ ID NO: 365740 - RNA, 32 nt, Human
ccaggugugguggcucacgccuguaaucccag

SEQ ID NO: 365741 - RNA, 32 nt, Human
ccaggugugguggcucacuccuguaaucccgg

SEQ ID NO: 365742 - RNA, 32 nt, Human
ccaggugugguggcucaggccuguaaucccaa

SEQ ID NO: 365743 - RNA, 32 nt, Human
ccaggugugguggcucaggccuguaaucccag

SEQ ID NO: 365744 - RNA, 32 nt, Human
ccaggugugguggcucaugccuguaauagcag

SEQ ID NO: 365745 - RNA, 32 nt, Human
ccaggugugguggcucaugccuguaaucccag

SEQ ID NO: 365746 - RNA, 32 nt, Human
ccaggugugguggcucaugccuguaaucccga

SEQ ID NO: 365747 - RNA, 32 nt, Human
ccaggugugguggcucaugccuguagucccug

SEQ ID NO: 365748 - RNA, 32 nt, Human
ccaggugugguggcuccgaccuguaaucccag

SEQ ID NO: 365749 - RNA, 32 nt, Human
ccaggugugguggcugacaccuguaaucccag

SEQ ID NO: 365750 - RNA, 32 nt, Human
ccaggugugguggcuuaccccuguaaucccag

SEQ ID NO: 365751 - RNA, 32 nt, Human
ccaggugugguggcuuacgccuguaaucccag

SEQ ID NO: 365752 - RNA, 32 nt, Human
ccaggugugguggcuuaugccuguaauccuag

SEQ ID NO: 365753 - RNA, 32 nt, Human
ccaggugugguggugcaugccuguaaucccag

SEQ ID NO: 365754 - RNA, 32 nt, Human
ccaggugugguguugcaugccuguaaucccag

SEQ ID NO: 365755 - RNA, 32 nt, Human
ccagguguucugcaccuugcagccugcacacu

SEQ ID NO: 365756 - RNA, 32 nt, Human
ccagguguugacuccagcuccagcuucagcuc

SEQ ID NO: 365757 - RNA, 32 nt, Human
ccagguguugucugacaucccacacacaucgg

SEQ ID NO: 365758 - RNA, 32 nt, Human
ccagguguuucagaacaaggccucgggcacuc

SEQ ID NO: 365759 - RNA, 32 nt, Human
ccagguguuugcugaaagaagcugcuguaaug

SEQ ID NO: 365760 - RNA, 32 nt, Human
ccagguuacugcacuugucugaugugacguag

SEQ ID NO: 365761 - RNA, 32 nt, Human
ccagguuaucaggggcuucacugugaaaccug

SEQ ID NO: 365762 - RNA, 20 nt, Human
ccagguuaugccuggcccca

SEQ ID NO: 365763 - RNA, 31 nt, Human
ccagguuauucucuggagguugguggaugaa

SEQ ID NO: 365764 - RNA, 32 nt, Human
ccagguucaaacgauccucccgccucagccuc

SEQ ID NO: 365765 - RNA, 32 nt, Human
ccagguucaaacgauucuccugccucagccuc

SEQ ID NO: 365766 - RNA, 32 nt, Human
ccagguucaacugauucuccugccucagacuc

SEQ ID NO: 365767 - RNA, 32 nt, Human
ccagguucaacugauucuccugccucagccuc

SEQ ID NO: 365768 - RNA, 32 nt, Human
ccagguucaagagauccucccaccucagcuuc

SEQ ID NO: 365769 - RNA, 32 nt, Human
ccagguucaagcaaaagacccaccucucugca

SEQ ID NO: 365770 - RNA, 32 nt, Human
ccagguucaagcaagucuugugccucaguuua

SEQ ID NO: 365771 - RNA, 32 nt, Human
ccagguucaagcaauuauccugccucagccac

SEQ ID NO: 365772 - RNA, 32 nt, Human
ccagguucaagcaauuauccugccucagccuc

SEQ ID NO: 365773 - RNA, 32 nt, Human
ccagguucaagcaauuauccugccucaggcuc

SEQ ID NO: 365774 - RNA, 32 nt, Human
ccagguucaagcaauuccccugccucagcuuc

SEQ ID NO: 365775 - RNA, 32 nt, Human
ccagguucaagcaauucucccaccucagccuc

SEQ ID NO: 365776 - RNA, 32 nt, Human
ccagguucaagcaauucucccgccucagccuc

SEQ ID NO: 365777 - RNA, 32 nt, Human
ccagguucaagcaauucuccuaccucagccuc

SEQ ID NO: 365778 - RNA, 32 nt, Human
ccagguucaagcaauucuccugcaucagccuc

SEQ ID NO: 365779 - RNA, 32 nt, Human
ccagguucaagcaauucuccugccucacccuc

SEQ ID NO: 365780 - RNA, 32 nt, Human
ccagguucaagcaauucuccugccucagccuc

SEQ ID NO: 365781 - RNA, 32 nt, Human
ccagguucaagcaauucuccugccucagccuu

SEQ ID NO: 365782 - RNA, 32 nt, Human
ccagguucaagcaauucuccugccucagcucc

SEQ ID NO: 365783 - RNA, 32 nt, Human
ccagguucaagcaauucuccugccucagcuuc

SEQ ID NO: 365784 - RNA, 32 nt, Human
ccagguucaagcaauucuccugccucaggcuc

SEQ ID NO: 365785 - RNA, 32 nt, Human
ccagguucaagcaauucuccugccucagucuc

SEQ ID NO: 365786 - RNA, 32 nt, Human
ccagguucaagcaauucuccugccucggccuc

SEQ ID NO: 365787 - RNA, 32 nt, Human
ccagguucaagcaauucuccugccuuagccuc

SEQ ID NO: 365788 - RNA, 32 nt, Human
ccagguucaagcaauucuccugucucagccuc

SEQ ID NO: 365789 - RNA, 32 nt, Human
ccagguucaagcaauucuccuguuucagccuc

SEQ ID NO: 365790 - RNA, 32 nt, Human
ccagguucaagcaauucuccuuccucagccuc

SEQ ID NO: 365791 - RNA, 32 nt, Human
ccagguucaagcaauucucgugccucagccuc

SEQ ID NO: 365792 - RNA, 32 nt, Human
ccagguucaagcaauucucugucucagccucc

SEQ ID NO: 365793 - RNA, 32 nt, Human
ccagguucaagcaauucucuugccucagccuc

SEQ ID NO: 365794 - RNA, 32 nt, Human
ccagguucaagcaauucucuugccucggccuc

SEQ ID NO: 365795 - RNA, 32 nt, Human
ccagguucaagcaauucugccucagccuccca

SEQ ID NO: 365796 - RNA, 32 nt, Human
ccagguucaagcaauucugcugucucagcuuc

SEQ ID NO: 365797 - RNA, 32 nt, Human
ccagguucaagcaauucuucugccucagccuc

SEQ ID NO: 365798 - RNA, 32 nt, Human
ccagguucaagcaauuuuccugcuucagcuuc

SEQ ID NO: 365799 - RNA, 32 nt, Human
ccagguucaagcaauuuucgugccucagccuc

SEQ ID NO: 365800 - RNA, 32 nt, Human
ccagguucaagcacuucucguaccucagacuc

SEQ ID NO: 365801 - RNA, 32 nt, Human
ccagguucaagcaguucuccuaccucagccuc

SEQ ID NO: 365802 - RNA, 32 nt, Human
ccagguucaagcaguucuccugccucagccuc

SEQ ID NO: 365803 - RNA, 32 nt, Human
ccagguucaagcaguucuccugucucagccuc

SEQ ID NO: 365804 - RNA, 32 nt, Human
ccagguucaagcaguucucugccccacccucc

SEQ ID NO: 365805 - RNA, 32 nt, Human
ccagguucaagcaguucuuccucagccuccgg

SEQ ID NO: 365806 - RNA, 32 nt, Human
ccagguucaagcauucuucugccucagccucc

SEQ ID NO: 365807 - RNA, 32 nt, Human
ccagguucaagcgauccuccugccucagucuc

SEQ ID NO: 365808 - RNA, 32 nt, Human
ccagguucaagcgaugcucauaccucagccuc

SEQ ID NO: 365809 - RNA, 32 nt, Human
ccagguucaagcgauucucccgccucagccuc

SEQ ID NO: 365810 - RNA, 32 nt, Human
ccagguucaagcgauucucccgccucagguuc

SEQ ID NO: 365811 - RNA, 32 nt, Human
ccagguucaagcgauucucccgccucaguagc

SEQ ID NO: 365812 - RNA, 32 nt, Human
ccagguucaagcgauucuccuaccucagcccc

SEQ ID NO: 365813 - RNA, 32 nt, Human
ccagguucaagcgauucucgugccucagccuc

SEQ ID NO: 365814 - RNA, 32 nt, Human
ccagguucaagcgauuuucgugccucagcuug

SEQ ID NO: 365815 - RNA, 32 nt, Human
ccagguucaagcuauucuacugccucagccuc

SEQ ID NO: 365816 - RNA, 32 nt, Human
ccagguucaagcuauucuccugccucagccuc

SEQ ID NO: 365817 - RNA, 32 nt, Human
ccagguucaaggaauuccugugccucagcuuc

SEQ ID NO: 365818 - RNA, 32 nt, Human
ccagguucaagggauucgucugccucggccuc

SEQ ID NO: 365819 - RNA, 32 nt, Human
ccagguucaagggauucucccaccucagccuc

SEQ ID NO: 365820 - RNA, 32 nt, Human
ccagguucaaguaauucuccugccucagccuc

SEQ ID NO: 365821 - RNA, 32 nt, Human
ccagguucaagugauucucccaccucagccuc

SEQ ID NO: 365822 - RNA, 32 nt, Human
ccagguucaagugauucucccugccuccgccu

SEQ ID NO: 365823 - RNA, 32 nt, Human
ccagguucaagugauucuccuaccucagccuc

SEQ ID NO: 365824 - RNA, 32 nt, Human
ccagguucaaucgguuuuccugccucagccuc

SEQ ID NO: 365825 - RNA, 32 nt, Human
ccagguucaauugauucuccugccucagccuc

SEQ ID NO: 365826 - RNA, 32 nt, Human
ccagguucacaccauucuccugccucaaccuc

SEQ ID NO: 365827 - RNA, 32 nt, Human
ccagguucacaccauucuccugccucagccuc

SEQ ID NO: 365828 - RNA, 32 nt, Human
ccagguucacaccauucuccugccucagcuuc

SEQ ID NO: 365829 - RNA, 32 nt, Human
ccagguucacgccauccuccugccucagcuac

SEQ ID NO: 365830 - RNA, 32 nt, Human
ccagguucacgccauucucccgccucaaccuc

SEQ ID NO: 365831 - RNA, 32 nt, Human
ccagguucacgccauucucccgccucgggagc

SEQ ID NO: 365832 - RNA, 32 nt, Human
ccagguucacgccauucuccugccucagccaa

SEQ ID NO: 365833 - RNA, 32 nt, Human
ccagguucacgccauucuccugccucagccuc

SEQ ID NO: 365834 - RNA, 32 nt, Human
ccagguucacgccauuguccugccucagccuc

SEQ ID NO: 365835 - RNA, 32 nt, Human
ccagguucaggcaauucuccugccucagccuc

SEQ ID NO: 365836 - RNA, 28 nt, Human
ccagguucaguagcugccucgucuggcu

SEQ ID NO: 365837 - RNA, 18 nt, Human
ccagguucauccagccuu

SEQ ID NO: 365838 - RNA, 32 nt, Human
ccagguucaugcaauucuccugccucagucuc

SEQ ID NO: 365839 - RNA, 32 nt, Human
ccagguucaugccauucuccugccucacccuc

SEQ ID NO: 365840 - RNA, 32 nt, Human
ccagguucaugccauucuccugccucagccuc

SEQ ID NO: 365841 - RNA, 32 nt, Human
ccagguucaugccauucuccugcuucagccuc

SEQ ID NO: 365842 - RNA, 32 nt, Human
ccagguucaugucauucuccugccucagccuc

SEQ ID NO: 365843 - RNA, 32 nt, Human
ccagguuccagcaacacuagcuaccuaccaaa

SEQ ID NO: 365844 - RNA, 32 nt, Human
ccagguuccagcaauucuccugccucagccuc

SEQ ID NO: 365845 - RNA, 32 nt, Human
ccagguuccagcuauucuccugccucagccuc

SEQ ID NO: 365846 - RNA, 20 nt, Human
ccagguuccauccaccaccu

SEQ ID NO: 365847 - RNA, 32 nt, Human
ccagguuccccuuccucccucccuucaccggc

SEQ ID NO: 365848 - RNA, 32 nt, Human
ccagguucccgccauucuccugccucagccuc

SEQ ID NO: 365849 - RNA, 21 nt, Human
ccagguucccugagcuguggg

SEQ ID NO: 365850 - RNA, 32 nt, Human
ccagguuccuccccucaccccauauuccauca

SEQ ID NO: 365851 - RNA, 32 nt, Human
ccagguuccuguaacucccugccuccuccucu

SEQ ID NO: 365852 - RNA, 32 nt, Human
ccagguucgggcaauucuccugccucagccuc

SEQ ID NO: 365853 - RNA, 32 nt, Human
ccagguucuaucuccccgucacacccgaggcc

SEQ ID NO: 365854 - RNA, 32 nt, Human
ccagguucuggagguuggagguuccgcucagu

SEQ ID NO: 365855 - RNA, 32 nt, Human
ccagguucuuuuccuuccuuccuuccuuccuc

SEQ ID NO: 365856 - RNA, 32 nt, Human
ccagguugaagcaauucuccugccucagccuu

SEQ ID NO: 365857 - RNA, 32 nt, Human
ccagguugaaggccaccgcguccaacagcccc

SEQ ID NO: 365858 - RNA, 19 nt, Human
ccagguugagccuaggggc

SEQ ID NO: 365859 - RNA, 32 nt, Human
ccagguugccuaggagugggguccacugauga

SEQ ID NO: 365860 - RNA, 31 nt, Human
ccagguugccucucuccugugggccucuguc

SEQ ID NO: 365861 - RNA, 22 nt, Human
ccagguugcuugggccccggag

SEQ ID NO: 365862 - RNA, 32 nt, Human
ccagguuggagaccagccuaggcaacauggcg

SEQ ID NO: 365863 - RNA, 19 nt, Human
ccagguuggagugcagugg

SEQ ID NO: 365864 - RNA, 32 nt, Human
ccagguuggagugcaguggcacgaucuaggcu

SEQ ID NO: 365865 - RNA, 22 nt, Human
ccagguuggagugcaguggcgu

SEQ ID NO: 365866 - RNA, 32 nt, Human
ccagguuggagugcaguggcgugucuuggguu

SEQ ID NO: 365867 - RNA, 32 nt, Human
ccagguuggagugcaguggugugaucucgguu

SEQ ID NO: 365868 - RNA, 32 nt, Human
ccagguuggagugcaguggugugaucuuggcu

SEQ ID NO: 365869 - RNA, 32 nt, Human
ccagguuggccaaauaccauccacagugaggg

SEQ ID NO: 365870 - RNA, 32 nt, Human
ccagguuggccaggcuggucuugugaacuccu

SEQ ID NO: 365871 - RNA, 24 nt, Human
ccagguugugaggaaccgcagcgc

SEQ ID NO: 365872 - RNA, 32 nt, Human
ccagguuuaagcaauccucccaccucagcccc

SEQ ID NO: 365873 - RNA, 32 nt, Human
ccagguuuaagcaauucucaugcuucagccua

SEQ ID NO: 365874 - RNA, 32 nt, Human
ccagguuuaagcaauucuccugcuucaaccuc

SEQ ID NO: 365875 - RNA, 21 nt, Human
ccagguuuccucccggaggca

SEQ ID NO: 365876 - RNA, 21 nt, Human
ccagguuugcccccugcacag

SEQ ID NO: 365877 - RNA, 32 nt, Human
ccagguuugguggugcaugccuguaaucccag

SEQ ID NO: 365878 - RNA, 20 nt, Human
ccagguuuuccaccauccuu

SEQ ID NO: 365879 - RNA, 32 nt, Human
ccagguuuucccucuuaaaauauuugucccac

SEQ ID NO: 365880 - RNA, 23 nt, Human
ccaguaaaagagaagagucacag

SEQ ID NO: 365881 - RNA, 32 nt, Human
ccaguaaaccaaaaagcagauccuugaaacuu

SEQ ID NO: 365882 - RNA, 32 nt, Human
ccaguaaccccagcuacuagggaggcugaggc

SEQ ID NO: 365883 - RNA, 32 nt, Human
ccaguaagaagaggaggaggccaggcaggcaa

SEQ ID NO: 365884 - RNA, 32 nt, Human
ccaguaaggaggagaggcugucucagcugcag

SEQ ID NO: 365885 - RNA, 32 nt, Human
ccaguaaggucgcugccuuccuucucugccag

SEQ ID NO: 365886 - RNA, 32 nt, Human
ccaguaaguaaauuuaaaugcuucauuuuuaa

SEQ ID NO: 365887 - RNA, 32 nt, Human
ccaguaagucaccugcuccuguccgcaagcuu

SEQ ID NO: 365888 - RNA, 23 nt, Human
ccaguaaucccagcuacucggga

SEQ ID NO: 365889 - RNA, 32 nt, Human
ccaguaaucccagcuacucgggaggcugaagc

SEQ ID NO: 365890 - RNA, 32 nt, Human
ccaguaaucccagcuacucuuggaggcugagg

SEQ ID NO: 365891 - RNA, 23 nt, Human
ccaguaaucccagcuacuuggga

SEQ ID NO: 365892 - RNA, 32 nt, Human
ccaguaaucccagcuacuugggaggccaaggu

SEQ ID NO: 365893 - RNA, 32 nt, Human
ccaguaaucccagcuacuugggaggcucaggc

SEQ ID NO: 365894 - RNA, 32 nt, Human
ccaguaauuccagcuacuugggagguugaggc

SEQ ID NO: 365895 - RNA, 32 nt, Human
ccaguacaccaaggcuguagggaucaagcaug

SEQ ID NO: 365896 - RNA, 32 nt, Human
ccaguacaccuguagauauuacuguacuuuua

SEQ ID NO: 365897 - RNA, 32 nt, Human
ccaguacacgucuacccucugccucagcagau

SEQ ID NO: 365898 - RNA, 32 nt, Human
ccaguacagguaaaaucccagaggaauccaaa

SEQ ID NO: 365899 - RNA, 19 nt, Human
ccaguacaugccacccagu

SEQ ID NO: 365900 - RNA, 32 nt, Human
ccaguaccacaggcaagugcaccaccaugacu

SEQ ID NO: 365901 - RNA, 32 nt, Human
ccaguaccacggcaccugggcccuggggccug

SEQ ID NO: 365902 - RNA, 32 nt, Human
ccaguaccaugcacacuccugucccgaacucc

SEQ ID NO: 365903 - RNA, 20 nt, Human
ccaguacccacuauccagug

SEQ ID NO: 365904 - RNA, 32 nt, Human
ccaguaccccucucugccguggcugauuuguu

SEQ ID NO: 365905 - RNA, 22 nt, Human
ccaguacccgaagagguggcug

SEQ ID NO: 365906 - RNA, 32 nt, Human
ccaguaccuguuugaccuucuuugccaccauc

SEQ ID NO: 365907 - RNA, 32 nt, Human
ccaguaccuuuccuaagucuuugcucaaauua

SEQ ID NO: 365908 - RNA, 32 nt, Human
ccaguacuaggagcauugguugcaguggagga

SEQ ID NO: 365909 - RNA, 32 nt, Human
ccaguacugagaaaugggagcacacaguacug

SEQ ID NO: 365910 - RNA, 32 nt, Human
ccaguacuucacccucuacuaugccuucuaug

SEQ ID NO: 365911 - RNA, 32 nt, Human
ccaguacuuggcuguugagaagaguuuggauc

SEQ ID NO: 365912 - RNA, 32 nt, Human
ccaguacuugggaggccaaggcaggcauauca

SEQ ID NO: 365913 - RNA, 32 nt, Human
ccaguagagauggguuucaccauguuggccaa

SEQ ID NO: 365914 - RNA, 24 nt, Human
ccaguagaggcagcacugaucugg

SEQ ID NO: 365915 - RNA, 22 nt, Human
ccaguagagggggcuuugauuc

SEQ ID NO: 365916 - RNA, 24 nt, Human
ccaguagaggggugagggauucug

SEQ ID NO: 365917 - RNA, 21 nt, Human
ccaguagagguagauauucug

SEQ ID NO: 365918 - RNA, 32 nt, Human
ccaguagauggaauugcaauccuuugcaguuu

SEQ ID NO: 365919 - RNA, 31 nt, Human
ccaguagcaaugucuuccucuuaugaccaga

SEQ ID NO: 365920 - RNA, 22 nt, Human
ccaguagcaggacccggucucg

SEQ ID NO: 365921 - RNA, 22 nt, Human
ccaguagcaggagaaagaaaga

SEQ ID NO: 365922 - RNA, 32 nt, Human
ccaguagcaguggagcaggcccuguccugccc

SEQ ID NO: 365923 - RNA, 32 nt, Human
ccaguagcaucucugucaucauucagauuuug

SEQ ID NO: 365924 - RNA, 32 nt, Human
ccaguagcccaggagcuugggugugcugacga

SEQ ID NO: 365925 - RNA, 32 nt, Human
ccaguagccugggcccacagagcugcugggau

SEQ ID NO: 365926 - RNA, 23 nt, Human
ccaguagcuggaacuacaggcgu

SEQ ID NO: 365927 - RNA, 23 nt, Human
ccaguagcuggaacuacaggugu

SEQ ID NO: 365928 - RNA, 22 nt, Human
ccaguagcugggacuacaggcg

SEQ ID NO: 365929 - RNA, 21 nt, Human
ccaguagcugggauuacaggc

SEQ ID NO: 365930 - RNA, 22 nt, Human
ccaguagcugggauuacaggcg

SEQ ID NO: 365931 - RNA, 23 nt, Human
ccaguagcugggauuacaggcgu

SEQ ID NO: 365932 - RNA, 32 nt, Human
ccaguaggagccagggcugaguguggaaauua

SEQ ID NO: 365933 - RNA, 32 nt, Human
ccaguaggagcuaucacuauauuuugcagaau

SEQ ID NO: 365934 - RNA, 24 nt, Human
ccaguaggcggaaguugcagugag

SEQ ID NO: 365935 - RNA, 32 nt, Human
ccaguaggggagagagcaguuaaggcacacag

SEQ ID NO: 365936 - RNA, 24 nt, Human
ccaguaggucgaggcugcagugag

SEQ ID NO: 365937 - RNA, 23 nt, Human
ccaguagucccagcuacucagga

SEQ ID NO: 365938 - RNA, 32 nt, Human
ccaguagucccagcuacucaggaggcugaggc

SEQ ID NO: 365939 - RNA, 32 nt, Human
ccaguagucccagcuacuccugaggcugaggu

SEQ ID NO: 365940 - RNA, 32 nt, Human
ccaguagucccagcuacucgaaaggcuaagac

SEQ ID NO: 365941 - RNA, 23 nt, Human
ccaguagucccagcuacucggga

SEQ ID NO: 365942 - RNA, 32 nt, Human
ccaguagucccagcuacucgggaggcugaggc

SEQ ID NO: 365943 - RNA, 22 nt, Human
ccaguaguuuugacacuuccca

SEQ ID NO: 365944 - RNA, 32 nt, Human
ccaguaguuuuuaaccaauuuccuguguucca

SEQ ID NO: 365945 - RNA, 32 nt, Human
ccaguauaccagccucuuccuggugauucugu

SEQ ID NO: 365946 - RNA, 32 nt, Human
ccaguauacuccauaccagccugaggugucuc

SEQ ID NO: 365947 - RNA, 32 nt, Human
ccaguauagacagaaguaaacccagcugacuu

SEQ ID NO: 365948 - RNA, 32 nt, Human
ccaguauauggcccuggcucugcauuggaccu

SEQ ID NO: 365949 - RNA, 32 nt, Human
ccaguaucagguuauuuuaggagaugauggug

SEQ ID NO: 365950 - RNA, 32 nt, Human
ccaguaucuccaaggguaccuucaggcagcca

SEQ ID NO: 365951 - RNA, 32 nt, Human
ccaguaucugacuguggcaugaucucaguuaa

SEQ ID NO: 365952 - RNA, 32 nt, Human
ccaguaugaggugagaggaugacacgucugcc

SEQ ID NO: 365953 - RNA, 20 nt, Human
ccaguauggugaaacccugu

SEQ ID NO: 365954 - RNA, 32 nt, Human
ccaguauggugguauguacucacaaagauuaa

SEQ ID NO: 365955 - RNA, 32 nt, Human
ccaguauucccagcuacucuggaggcugaggc

SEQ ID NO: 365956 - RNA, 32 nt, Human
ccaguauugugucugugccccuguguguguuu

SEQ ID NO: 365957 - RNA, 32 nt, Human
ccaguauuuaaucaaagaaauggaauaagggu

SEQ ID NO: 365958 - RNA, 25 nt, Human
ccaguauuucagcuuucccugaaga

SEQ ID NO: 365959 - RNA, 32 nt, Human
ccaguauuuccccucuggagcuggauugagga

SEQ ID NO: 365960 - RNA, 32 nt, Human
ccaguauuuuaccuuuuguuaaaacaagugau

SEQ ID NO: 365961 - RNA, 32 nt, Human
ccagucaaacauauuugugcauuacauuucau

SEQ ID NO: 365962 - RNA, 32 nt, Human
ccagucaaaccugccucccacuucucacuaaa

SEQ ID NO: 365963 - RNA, 19 nt, Human
ccagucaaagccaccucca

SEQ ID NO: 365964 - RNA, 32 nt, Human
ccagucacaacugccauuuccagucucugcug

SEQ ID NO: 365965 - RNA, 32 nt, Human
ccagucacagauaagggaauaaccuuggccau

SEQ ID NO: 365966 - RNA, 32 nt, Human
ccagucacaggcaggggccuugaggaugauuu

SEQ ID NO: 365967 - RNA, 32 nt, Human
ccagucacaguuuuugguuccucuuuucuuuc

SEQ ID NO: 365968 - RNA, 32 nt, Human
ccagucacaucacugcacccguccuguguccu

SEQ ID NO: 365969 - RNA, 32 nt, Human
ccagucacauuuucuccuuccgaaucucaucc

SEQ ID NO: 365970 - RNA, 32 nt, Human
ccagucaccacccuccuggaccacacucggcc

SEQ ID NO: 365971 - RNA, 32 nt, Human
ccagucaccacugagcagcauggggcacgcua

SEQ ID NO: 365972 - RNA, 32 nt, Human
ccagucaccaggguucuccauuccaagugagu

SEQ ID NO: 365973 - RNA, 32 nt, Human
ccagucaccaggguucuccauuccaagugucu

SEQ ID NO: 365974 - RNA, 32 nt, Human
ccagucacccugcccugaauucuauccuacuc

SEQ ID NO: 365975 - RNA, 32 nt, Human
ccagucacguuccucaggcuuacuugaucuau

SEQ ID NO: 365976 - RNA, 32 nt, Human
ccagucacucaguuccagaagggguucaugga

SEQ ID NO: 365977 - RNA, 17 nt, Human
ccagucacuccaccuuu

SEQ ID NO: 365978 - RNA, 32 nt, Human
ccagucacugcccccgcacucccacagggcuc

SEQ ID NO: 365979 - RNA, 32 nt, Human
ccagucacuuaaccucucugugccucaguuuc

SEQ ID NO: 365980 - RNA, 32 nt, Human
ccagucagaacagcaggaaucuguugaugcag

SEQ ID NO: 365981 - RNA, 32 nt, Human
ccagucagagaaagggggccauggacugcugu

SEQ ID NO: 365982 - RNA, 32 nt, Human
ccagucagagcucuuggcugcaccacauagau

SEQ ID NO: 365983 - RNA, 32 nt, Human
ccagucagcaaccuguaacucacauucucuuc

SEQ ID NO: 365984 - RNA, 32 nt, Human
ccagucagcaugaacuucccccucucugaggc

SEQ ID NO: 365985 - RNA, 32 nt, Human
ccagucagccaggauugugagcuguuugggaa

SEQ ID NO: 365986 - RNA, 19 nt, Human
ccagucagcccugcugcuc

SEQ ID NO: 365987 - RNA, 32 nt, Human
ccagucagcccuuuugaguucccgccucaccc

SEQ ID NO: 365988 - RNA, 32 nt, Human
ccagucagcuggccagauuuccucacuaccug

SEQ ID NO: 365989 - RNA, 19 nt, Human
ccagucagcuugggucccu

SEQ ID NO: 365990 - RNA, 32 nt, Human
ccagucaggaugacgguauuaugcuucuugga

SEQ ID NO: 365991 - RNA, 32 nt, Human
ccagucagggugguguggcgguugcagcggcc

SEQ ID NO: 365992 - RNA, 32 nt, Human
ccagucaguaucuaaucuggcuuuuguuaacu

SEQ ID NO: 365993 - RNA, 32 nt, Human
ccagucaucgaggggguugggaagggagggag

SEQ ID NO: 365994 - RNA, 32 nt, Human
ccagucaugcuuccuguuaagccuguggaacu

SEQ ID NO: 365995 - RNA, 32 nt, Human
ccagucaugguacuaccccagccuggggucca

SEQ ID NO: 365996 - RNA, 32 nt, Human
ccagucaugguggcacacgccuguaaucucag

SEQ ID NO: 365997 - RNA, 32 nt, Human
ccagucauggugucaugagaaggacucaaaau

SEQ ID NO: 365998 - RNA, 23 nt, Human
ccaguccaaaccugcaccaucca

SEQ ID NO: 365999 - RNA, 32 nt, Human
ccaguccaaagaaacucuaccuaacagggaac

SEQ ID NO: 366000 - RNA, 32 nt, Human
ccaguccaaaggacagugugucacugugaacu

SEQ ID NO: 366001 - RNA, 32 nt, Human
ccaguccaaauugucugucugcucuuauuuuu

SEQ ID NO: 366002 - RNA, 32 nt, Human
ccaguccaacugucaacucauccacucaacuu

SEQ ID NO: 366003 - RNA, 32 nt, Human
ccaguccacaaacugguuggugugcuugcucu

SEQ ID NO: 366004 - RNA, 32 nt, Human
ccaguccaccccguuucuccccacccugaaga

SEQ ID NO: 366005 - RNA, 32 nt, Human
ccaguccacuccacucugggcugggcugugau

SEQ ID NO: 366006 - RNA, 17 nt, Human
ccaguccacugcagaga

SEQ ID NO: 366007 - RNA, 32 nt, Human
ccaguccagccaguccgcccagucucucgcgu

SEQ ID NO: 366008 - RNA, 32 nt, Human
ccaguccagcccagccuugugccugcagugga

SEQ ID NO: 366009 - RNA, 32 nt, Human
ccaguccagcuggggaaacugaggcucuggga

SEQ ID NO: 366010 - RNA, 32 nt, Human
ccaguccagcuuugaggcugggcccaggauca

SEQ ID NO: 366011 - RNA, 32 nt, Human
ccaguccaggaggaaagagccaaggcccacuu

SEQ ID NO: 366012 - RNA, 32 nt, Human
ccaguccaggcagagcagguggcuggcugucu

SEQ ID NO: 366013 - RNA, 32 nt, Human
ccaguccaguuugcacuggugcagcccaacuc

SEQ ID NO: 366014 - RNA, 20 nt, Human
ccagucccacccugcugcug

SEQ ID NO: 366015 - RNA, 32 nt, Human
ccagucccacgccaccaccccaccccaagcca

SEQ ID NO: 366016 - RNA, 32 nt, Human
ccagucccagcgcuccggagguggugggcgcg

SEQ ID NO: 366017 - RNA, 32 nt, Human
ccagucccaguuccaguccaggaaauagagau

SEQ ID NO: 366018 - RNA, 32 nt, Human
ccagucccauccagagcauggagcccgacccc

SEQ ID NO: 366019 - RNA, 27 nt, Human
ccaguccccacuucuucccugccacgc

SEQ ID NO: 366020 - RNA, 19 nt, Human
ccaguccccagccaggcuc

SEQ ID NO: 366021 - RNA, 32 nt, Human
ccaguccccagcucacucagccacacacacca

SEQ ID NO: 366022 - RNA, 18 nt, Human
ccaguccccagcucgcca

SEQ ID NO: 366023 - RNA, 24 nt, Human
ccaguccccagggugggggugcca

SEQ ID NO: 366024 - RNA, 20 nt, Human
ccagucccccacccaggcuu

SEQ ID NO: 366025 - RNA, 26 nt, Human
ccagucccccagaccucacaggcuca

SEQ ID NO: 366026 - RNA, 32 nt, Human
ccagucccccucccuucuccccaaagcgcucc

SEQ ID NO: 366027 - RNA, 20 nt, Human
ccaguccccgcuucccugcu

SEQ ID NO: 366028 - RNA, 21 nt, Human
ccaguccccgggcucggccuc

SEQ ID NO: 366029 - RNA, 32 nt, Human
ccaguccccgugcccacggggcucccucuccc

SEQ ID NO: 366030 - RNA, 32 nt, Human
ccaguccccucacccuuccuugacuuaccucc

SEQ ID NO: 366031 - RNA, 32 nt, Human
ccaguccccucaccugaugaucccaacacuuc

SEQ ID NO: 366032 - RNA, 32 nt, Human
ccaguccccugccugugcuccugcuggggaag

SEQ ID NO: 366033 - RNA, 23 nt, Human
ccaguccccuuccuucgguguuu

SEQ ID NO: 366034 - RNA, 22 nt, Human
ccaguccccuucuccacugcug

SEQ ID NO: 366035 - RNA, 32 nt, Human
ccagucccuaucucccccauccccucccggcu

SEQ ID NO: 366036 - RNA, 32 nt, Human
ccagucccuccacccacccaccgggcucagcu

SEQ ID NO: 366037 - RNA, 21 nt, Human
ccagucccucccgcccgccca

SEQ ID NO: 366038 - RNA, 24 nt, Human
ccagucccucccucaccagccuca

SEQ ID NO: 366039 - RNA, 32 nt, Human
ccagucccugcagccaagggaagccgcugccu

SEQ ID NO: 366040 - RNA, 32 nt, Human
ccagucccugcucgacucuuacuggcucccuc

SEQ ID NO: 366041 - RNA, 21 nt, Human
ccagucccugcucucaggcca

SEQ ID NO: 366042 - RNA, 28 nt, Human
ccagucccuggagccaccgcggguccuu

SEQ ID NO: 366043 - RNA, 22 nt, Human
ccagucccugggcuagugcuca

SEQ ID NO: 366044 - RNA, 22 nt, Human
ccagucccuguccggaaugcca

SEQ ID NO: 366045 - RNA, 22 nt, Human
ccagucccuguggcugcugcug

SEQ ID NO: 366046 - RNA, 23 nt, Human
ccagucccuucucuccagcuuca

SEQ ID NO: 366047 - RNA, 18 nt, Human
ccaguccgaggccagcuu

SEQ ID NO: 366048 - RNA, 32 nt, Human
ccaguccgugucccuccgccuccaggagggga

SEQ ID NO: 366049 - RNA, 22 nt, Human
ccaguccucagagacccugcug

SEQ ID NO: 366050 - RNA, 21 nt, Human
ccaguccucaguucccacugc

SEQ ID NO: 366051 - RNA, 32 nt, Human
ccaguccucauuuuuccucccaauacccaccc

SEQ ID NO: 366052 - RNA, 21 nt, Human
ccaguccuccaagccugcugc

SEQ ID NO: 366053 - RNA, 32 nt, Human
ccaguccucccagcugccauguuucaaagacg

SEQ ID NO: 366054 - RNA, 24 nt, Human
ccaguccucccccgagaggugcug

SEQ ID NO: 366055 - RNA, 24 nt, Human
ccaguccuccccuuuuugugugcu

SEQ ID NO: 366056 - RNA, 32 nt, Human
ccaguccuccucagcccuccccaagucgcuuc

SEQ ID NO: 366057 - RNA, 19 nt, Human
ccaguccuccugggauccu

SEQ ID NO: 366058 - RNA, 23 nt, Human
ccaguccuccugggauccugcug

SEQ ID NO: 366059 - RNA, 21 nt, Human
ccaguccucggccgccaggcu

SEQ ID NO: 366060 - RNA, 21 nt, Human
ccaguccucggcuccugcugc

SEQ ID NO: 366061 - RNA, 24 nt, Human
ccaguccucucccccugcugucug

SEQ ID NO: 366062 - RNA, 32 nt, Human
ccaguccucucugccuccuccuggcugaagcu

SEQ ID NO: 366063 - RNA, 20 nt, Human
ccaguccucuucugcugcuc

SEQ ID NO: 366064 - RNA, 24 nt, Human
ccaguccucuucuucccucugcug

SEQ ID NO: 366065 - RNA, 32 nt, Human
ccaguccucuuguccuccuuuguuugccauca

SEQ ID NO: 366066 - RNA, 32 nt, Human
ccaguccugccucugcuccugccugguggugu

SEQ ID NO: 366067 - RNA, 32 nt, Human
ccaguccugccugaacagcccucucucucacu

SEQ ID NO: 366068 - RNA, 32 nt, Human
ccaguccugccuggccaggcagaucugugccc

SEQ ID NO: 366069 - RNA, 32 nt, Human
ccaguccugccuguccuucuacucagcuguua

SEQ ID NO: 366070 - RNA, 32 nt, Human
ccaguccugcuccccucaccuuccuugggccc

SEQ ID NO: 366071 - RNA, 23 nt, Human
ccaguccuggaggacccgcugcu

SEQ ID NO: 366072 - RNA, 32 nt, Human
ccaguccuggccagggcaguuaccaggacggu

SEQ ID NO: 366073 - RNA, 32 nt, Human
ccaguccugggcaucgacuacacacacgugcg

SEQ ID NO: 366074 - RNA, 32 nt, Human
ccaguccuggggacucuaaggacucugaggac

SEQ ID NO: 366075 - RNA, 21 nt, Human
ccaguccugucggcugggccc

SEQ ID NO: 366076 - RNA, 32 nt, Human
ccaguccuguucucuuaugugucccaaugagu

SEQ ID NO: 366077 - RNA, 32 nt, Human
ccaguccuguucugacgguauuccugcgccac

SEQ ID NO: 366078 - RNA, 32 nt, Human
ccaguccuuccaggcccugccuggcucuaaac

SEQ ID NO: 366079 - RNA, 23 nt, Human
ccaguccuucccucuuggacuca

SEQ ID NO: 366080 - RNA, 22 nt, Human
ccaguccuuuaucccugcccug

SEQ ID NO: 366081 - RNA, 32 nt, Human
ccaguccuuuauucccuucugcauacugcaau

SEQ ID NO: 366082 - RNA, 21 nt, Human
ccagucgagcagccugugugg

SEQ ID NO: 366083 - RNA, 23 nt, Human
ccagucgcccagcuccaguguca

SEQ ID NO: 366084 - RNA, 32 nt, Human
ccagucgcugagugccugagccgggaagcagu

SEQ ID NO: 366085 - RNA, 32 nt, Human
ccagucgggcuucaucuuuacgcagcgggccc

SEQ ID NO: 366086 - RNA, 32 nt, Human
ccagucgggggaggagaaagacgcgauuaaca

SEQ ID NO: 366087 - RNA, 32 nt, Human
ccagucggucagccggacuggauuuccacgcg

SEQ ID NO: 366088 - RNA, 26 nt, Human
ccagucguagcccggccgcccgcgcc

SEQ ID NO: 366089 - RNA, 32 nt, Human
ccagucgugacuucauuucccuuccuucuguc

SEQ ID NO: 366090 - RNA, 31 nt, Human
ccagucguucucaaggaagggcugggggcca

SEQ ID NO: 366091 - RNA, 32 nt, Human
ccagucuacacccucccacgggguggaaaugg

SEQ ID NO: 366092 - RNA, 18 nt, Human
ccagucuacauuuuccca

SEQ ID NO: 366093 - RNA, 32 nt, Human
ccagucuagaccugcaucuugaggccacaccc

SEQ ID NO: 366094 - RNA, 32 nt, Human
ccagucucacugcacaccacugccucaugcuu

SEQ ID NO: 366095 - RNA, 32 nt, Human
ccagucucacugcgcccucuccuccaaccucc

SEQ ID NO: 366096 - RNA, 32 nt, Human
ccagucucagccaacaguaccaaaagugauuu

SEQ ID NO: 366097 - RNA, 18 nt, Human
ccagucucaggggucacc

SEQ ID NO: 366098 - RNA, 22 nt, Human
ccagucucagucagguaugucu

SEQ ID NO: 366099 - RNA, 32 nt, Human
ccagucuccaaagccgauggcaucuccgggcu

SEQ ID NO: 366100 - RNA, 21 nt, Human
ccagucuccaacccuggccuu

SEQ ID NO: 366101 - RNA, 32 nt, Human
ccagucuccaccuuuauuguucuugaaagccc

SEQ ID NO: 366102 - RNA, 20 nt, Human
ccagucuccacuuugguccc

SEQ ID NO: 366103 - RNA, 31 nt, Human
ccagucuccagcuagaaaaacucagaacauc

SEQ ID NO: 366104 - RNA, 32 nt, Human
ccagucuccaggagccucucccuccgagauac

SEQ ID NO: 366105 - RNA, 32 nt, Human
ccagucucccaaaguacugggauuacaggcgu

SEQ ID NO: 366106 - RNA, 32 nt, Human
ccagucuccuaaaucacaauauggccuuggua

SEQ ID NO: 366107 - RNA, 22 nt, Human
ccagucuccuauacccagcaga

SEQ ID NO: 366108 - RNA, 32 nt, Human
ccagucuccugacauuaagacacaccucugga

SEQ ID NO: 366109 - RNA, 32 nt, Human
ccagucuccuguggcucccuggugcuggguuu

SEQ ID NO: 366110 - RNA, 32 nt, Human
ccagucucuagcuagugccucuugcccucucc

SEQ ID NO: 366111 - RNA, 24 nt, Human
ccagucucuccgauaccaguuuca

SEQ ID NO: 366112 - RNA, 22 nt, Human
ccagucucuccucggaggcccu

SEQ ID NO: 366113 - RNA, 23 nt, Human
ccagucucuccucggaggcccuu

SEQ ID NO: 366114 - RNA, 19 nt, Human
ccagucucugacccuuccc

SEQ ID NO: 366115 - RNA, 32 nt, Human
ccagucucugcaccugggauucagcucaagga

SEQ ID NO: 366116 - RNA, 22 nt, Human
ccagucucugccucuguguuca

SEQ ID NO: 366117 - RNA, 32 nt, Human
ccagucucuggcaccuggcugcucugaucugg

SEQ ID NO: 366118 - RNA, 22 nt, Human
ccagucucugugcucggguuca

SEQ ID NO: 366119 - RNA, 32 nt, Human
ccagucugaccagcaagucccggggucacccu

SEQ ID NO: 366120 - RNA, 32 nt, Human
ccagucugauccauggggcugaaggguaaauu

SEQ ID NO: 366121 - RNA, 32 nt, Human
ccagucugccagcugaguccugguuuuggaug

SEQ ID NO: 366122 - RNA, 32 nt, Human
ccagucugccucuugggucuuccucccaggcc

SEQ ID NO: 366123 - RNA, 19 nt, Human
ccagucuggagucccuccc

SEQ ID NO: 366124 - RNA, 19 nt, Human
ccagucuggagugcagugg

SEQ ID NO: 366125 - RNA, 32 nt, Human
ccagucuggagugcaguggcaaaaucauggcu

SEQ ID NO: 366126 - RNA, 32 nt, Human
ccagucuggagugcagugguacaauaauggcu

SEQ ID NO: 366127 - RNA, 32 nt, Human
ccagucuggagugcaguggugugaucaugguu

SEQ ID NO: 366128 - RNA, 32 nt, Human
ccagucuggccaacauggcgaaaccucauuuc

SEQ ID NO: 366129 - RNA, 32 nt, Human
ccagucuggccaaugugaugaaaccccgucuc

SEQ ID NO: 366130 - RNA, 19 nt, Human
ccagucuggccgggguccc

SEQ ID NO: 366131 - RNA, 32 nt, Human
ccagucuggccuuggccuccagccuggagaag

SEQ ID NO: 366132 - RNA, 32 nt, Human
ccagucuggcucagucugguccacacucugga

SEQ ID NO: 366133 - RNA, 29 nt, Human
ccagucuggcugcgggcaacccuugaguu

SEQ ID NO: 366134 - RNA, 32 nt, Human
ccagucugggacaacagagcaagacccugucu

SEQ ID NO: 366135 - RNA, 24 nt, Human
ccagucugggcaacaaaaaugaaa

SEQ ID NO: 366136 - RNA, 32 nt, Human
ccagucugggcaacaaaaaugaaacuccgucu

SEQ ID NO: 366137 - RNA, 32 nt, Human
ccagucugggcaacagagcgagacuccaucuc

SEQ ID NO: 366138 - RNA, 32 nt, Human
ccagucugggcaacagagcgagacucccucuu

SEQ ID NO: 366139 - RNA, 32 nt, Human
ccagucugggcaacagagugagacccugucuc

SEQ ID NO: 366140 - RNA, 32 nt, Human
ccagucugggcaacauagcaagacucugccuc

SEQ ID NO: 366141 - RNA, 32 nt, Human
ccagucugggcaacauagcgagacuccaucuc

SEQ ID NO: 366142 - RNA, 32 nt, Human
ccagucugggcaacauagugaaacccugucuc

SEQ ID NO: 366143 - RNA, 32 nt, Human
ccagucugggcaacauagugagacccuuuccc

SEQ ID NO: 366144 - RNA, 32 nt, Human
ccagucugggcaacauggugaaaccccaucuc

SEQ ID NO: 366145 - RNA, 32 nt, Human
ccagucugggcaacauggugagacccucgucu

SEQ ID NO: 366146 - RNA, 32 nt, Human
ccagucugggcaacauguugagaccuccaucu

SEQ ID NO: 366147 - RNA, 32 nt, Human
ccagucugggcgacaggagcaagacucugucu

SEQ ID NO: 366148 - RNA, 32 nt, Human
ccagucugggcugccggguucuagucuccuuu

SEQ ID NO: 366149 - RNA, 32 nt, Human
ccagucuguccaaacaaaccuugaguuguuua

SEQ ID NO: 366150 - RNA, 32 nt, Human
ccagucugugucuuugccuucugcuguagguc

SEQ ID NO: 366151 - RNA, 32 nt, Human
ccagucuguucucaaacucgugagcuaaagcu

SEQ ID NO: 366152 - RNA, 32 nt, Human
ccagucuuagucugaagaccuggaaccagaag

SEQ ID NO: 366153 - RNA, 32 nt, Human
ccagucuucgccuuccucuuuuuaagcuguuu

SEQ ID NO: 366154 - RNA, 32 nt, Human
ccagucuucucccuguccccucaugggucccg

SEQ ID NO: 366155 - RNA, 18 nt, Human
ccagucuucugaggcccu

SEQ ID NO: 366156 - RNA, 32 nt, Human
ccagucuucuguccugggaggcugagauuuau

SEQ ID NO: 366157 - RNA, 19 nt, Human
ccagucuugaaaugcauuc

SEQ ID NO: 366158 - RNA, 32 nt, Human
ccagucuugccuggcucuccuccuuggcccag

SEQ ID NO: 366159 - RNA, 32 nt, Human
ccagucuugguugugcuccugaugacgggcac

SEQ ID NO: 366160 - RNA, 32 nt, Human
ccagucuuguuggcgcacgccuguaaucucag

SEQ ID NO: 366161 - RNA, 32 nt, Human
ccagucuuucuaccguucuccugggccuacau

SEQ ID NO: 366162 - RNA, 23 nt, Human
ccagucuuucuccccggcauuca

SEQ ID NO: 366163 - RNA, 32 nt, Human
ccagucuuucugacacacagugaagcucaacu

SEQ ID NO: 366164 - RNA, 32 nt, Human
ccagugaaagaguagugcauuuaauuggagua

SEQ ID NO: 366165 - RNA, 32 nt, Human
ccagugaaagaugaagagagaugaggcaggac

SEQ ID NO: 366166 - RNA, 32 nt, Human
ccagugaaagcaggccaggugcgguggcucac

SEQ ID NO: 366167 - RNA, 32 nt, Human
ccagugaagcuggagccaggguguaaggcaag

SEQ ID NO: 366168 - RNA, 32 nt, Human
ccagugaagggccuuccaugcagcuucccagc

SEQ ID NO: 366169 - RNA, 32 nt, Human
ccagugaaggucacuggacucuagccuacaac

SEQ ID NO: 366170 - RNA, 32 nt, Human
ccagugaaguagugacggaagccugaucauag

SEQ ID NO: 366171 - RNA, 32 nt, Human
ccagugaauagagaggcucaaggcugaguaaa

SEQ ID NO: 366172 - RNA, 32 nt, Human
ccagugaauggcacuuacguuuucauuuuuca

SEQ ID NO: 366173 - RNA, 32 nt, Human
ccagugaaugguggacugaguggugcgaggug

SEQ ID NO: 366174 - RNA, 32 nt, Human
ccagugacaaguguucggagggcagcagagag

SEQ ID NO: 366175 - RNA, 32 nt, Human
ccagugacagggacuguugccaucucccauuc

SEQ ID NO: 366176 - RNA, 32 nt, Human
ccagugacaugacaacugugaccuaagaaaug

SEQ ID NO: 366177 - RNA, 32 nt, Human
ccagugaccagaaaaauuaaaccucaauuuac

SEQ ID NO: 366178 - RNA, 32 nt, Human
ccagugaccggacccagcccgaguaagggcau

SEQ ID NO: 366179 - RNA, 18 nt, Human
ccagugaccugggaccug

SEQ ID NO: 366180 - RNA, 18 nt, Human
ccagugacguccacuucu

SEQ ID NO: 366181 - RNA, 32 nt, Human
ccagugacucagagauccagucuggaagcccu

SEQ ID NO: 366182 - RNA, 32 nt, Human
ccagugagacaauugugaaaccagcuucaauu

SEQ ID NO: 366183 - RNA, 32 nt, Human
ccagugagagaccuggccucagccuggcagcg

SEQ ID NO: 366184 - RNA, 32 nt, Human
ccagugagauccaagcaaauaaguaggcuaca

SEQ ID NO: 366185 - RNA, 32 nt, Human
ccagugagccagcccccaccuuccaggcgccu

SEQ ID NO: 366186 - RNA, 19 nt, Human
ccagugagcccugcuguuc

SEQ ID NO: 366187 - RNA, 32 nt, Human
ccagugagccugaccccgggaggggccguccc

SEQ ID NO: 366188 - RNA, 32 nt, Human
ccagugagcuaguggagagggagcaagggagg

SEQ ID NO: 366189 - RNA, 32 nt, Human
ccagugagcuuggaagagagcaccuugaggca

SEQ ID NO: 366190 - RNA, 32 nt, Human
ccagugaggaagggagaggccagcugcacucc

SEQ ID NO: 366191 - RNA, 32 nt, Human
ccagugaggagaagaugagcgcaagggggauu

SEQ ID NO: 366192 - RNA, 32 nt, Human
ccagugaggagggugcuucaguuuuacucccu

SEQ ID NO: 366193 - RNA, 32 nt, Human
ccagugaggcuucaguguacagcaaccaaaau

SEQ ID NO: 366194 - RNA, 32 nt, Human
ccagugagggagaaagugaucugcagggaggu

SEQ ID NO: 366195 - RNA, 32 nt, Human
ccagugaggucagcuucugcccuccagcaaua

SEQ ID NO: 366196 - RNA, 32 nt, Human
ccagugagguccaggcugcacuaagccaagau

SEQ ID NO: 366197 - RNA, 18 nt, Human
ccagugauccuccauccu

SEQ ID NO: 366198 - RNA, 32 nt, Human
ccagugaugaagagagaauggaagagacaaaa

SEQ ID NO: 366199 - RNA, 32 nt, Human
ccagugaugaauccgaagaacucugucuccau

SEQ ID NO: 366200 - RNA, 18 nt, Human
ccagugaugauuuuccua

SEQ ID NO: 366201 - RNA, 32 nt, Human
ccagugauguggggcucaagggggccucaccu

SEQ ID NO: 366202 - RNA, 32 nt, Human
ccagugauguuuaccaggaggcaucuugccag

SEQ ID NO: 366203 - RNA, 32 nt, Human
ccagugauuggcugcccggaaggaggcggaga

SEQ ID NO: 366204 - RNA, 32 nt, Human
ccagugauuugccucuuagguucuuucuuaaa

SEQ ID NO: 366205 - RNA, 22 nt, Human
ccagugcaaggacccccuuccc

SEQ ID NO: 366206 - RNA, 32 nt, Human
ccagugcaagucaucuggauuugcauuuagcu

SEQ ID NO: 366207 - RNA, 32 nt, Human
ccagugcacccaaugacccccucccuuggggc

SEQ ID NO: 366208 - RNA, 32 nt, Human
ccagugcacccaggcuucuagggcagcguugc

SEQ ID NO: 366209 - RNA, 22 nt, Human
ccagugcacucagccccaggua

SEQ ID NO: 366210 - RNA, 22 nt, Human
ccagugcacuccagccuuggug

SEQ ID NO: 366211 - RNA, 32 nt, Human
ccagugcacuuugccauuaaagucucuucaca

SEQ ID NO: 366212 - RNA, 32 nt, Human
ccagugcagacugucuaaugcccccagcccac

SEQ ID NO: 366213 - RNA, 30 nt, Human
ccagugcagauugaaucagaaagccaaagc

SEQ ID NO: 366214 - RNA, 32 nt, Human
ccagugcagcugauuugaccuccagugggaua

SEQ ID NO: 366215 - RNA, 19 nt, Human
ccagugcagggcgcaguca

SEQ ID NO: 366216 - RNA, 32 nt, Human
ccagugcaggguggcagcagaauguucuggaa

SEQ ID NO: 366217 - RNA, 32 nt, Human
ccagugcagggugggugaggaagugcacaggg

SEQ ID NO: 366218 - RNA, 32 nt, Human
ccagugcagguauuucagaaggagaaggcugg

SEQ ID NO: 366219 - RNA, 24 nt, Human
ccagugcagguggaucacuugagg

SEQ ID NO: 366220 - RNA, 32 nt, Human
ccagugcaguuuuucucuugaaggaucauuua

SEQ ID NO: 366221 - RNA, 32 nt, Human
ccagugcauaccaccaugccugggugauuuuu

SEQ ID NO: 366222 - RNA, 32 nt, Human
ccagugcaucccguuccugcugcagcagcugc

SEQ ID NO: 366223 - RNA, 32 nt, Human
ccagugcauuucuucauggcuucugcuuuuua

SEQ ID NO: 366224 - RNA, 32 nt, Human
ccagugccacagucugcacugagcuuggcuca

SEQ ID NO: 366225 - RNA, 32 nt, Human
ccagugccaggcaggcuucagggcaccguccu

SEQ ID NO: 366226 - RNA, 32 nt, Human
ccagugccaggugggagagggagcagaacagc

SEQ ID NO: 366227 - RNA, 32 nt, Human
ccagugcccaggaguuggggauguccuacaaa

SEQ ID NO: 366228 - RNA, 17 nt, Human
ccagugcccaguuugua

SEQ ID NO: 366229 - RNA, 32 nt, Human
ccagugcccauuccacugugaggugucauucc

SEQ ID NO: 366230 - RNA, 21 nt, Human
ccagugccccucccugcucug

SEQ ID NO: 366231 - RNA, 32 nt, Human
ccagugcccugagcgucuccauggccugccug

SEQ ID NO: 366232 - RNA, 32 nt, Human
ccagugcccugaggguggcauuuuccuaccuu

SEQ ID NO: 366233 - RNA, 32 nt, Human
ccagugcccuggaagcuggggacgccaccguc

SEQ ID NO: 366234 - RNA, 32 nt, Human
ccagugcccugggucagggcuguggggagcag

SEQ ID NO: 366235 - RNA, 32 nt, Human
ccagugccgcauuuauccaucuguaagaaggc

SEQ ID NO: 366236 - RNA, 32 nt, Human
ccagugccgccaucugucuucugugucugccu

SEQ ID NO: 366237 - RNA, 32 nt, Human
ccagugccggagguggggccugguguguuugg

SEQ ID NO: 366238 - RNA, 32 nt, Human
ccagugccuccaucccuccuucugccucccca

SEQ ID NO: 366239 - RNA, 32 nt, Human
ccagugccuccugucaauuucacugcacacug

SEQ ID NO: 366240 - RNA, 22 nt, Human
ccagugccucucccugcugcuc

SEQ ID NO: 366241 - RNA, 32 nt, Human
ccagugccucuccuggucguggaaggugcuac

SEQ ID NO: 366242 - RNA, 32 nt, Human
ccagugccucuggccuuccuacugaaagcaga

SEQ ID NO: 366243 - RNA, 32 nt, Human
ccagugccugcagcucaccuguggguuuuccc

SEQ ID NO: 366244 - RNA, 32 nt, Human
ccagugccuggaacagugucuggugcacauaa

SEQ ID NO: 366245 - RNA, 32 nt, Human
ccagugccuggccucagacucugugggcucug

SEQ ID NO: 366246 - RNA, 32 nt, Human
ccagugccuggugguccagccugugaugggca

SEQ ID NO: 366247 - RNA, 21 nt, Human
ccagugccugucuggagcuca

SEQ ID NO: 366248 - RNA, 32 nt, Human
ccagugccuugcucagccuccugguugcaaca

SEQ ID NO: 366249 - RNA, 32 nt, Human
ccagugccuuucuccccucagcaccuucaucu

SEQ ID NO: 366250 - RNA, 32 nt, Human
ccagugccuuuguccuucccuuggggcuugcc

SEQ ID NO: 366251 - RNA, 32 nt, Human
ccagugcgggaaucacacacauaccucagaau

SEQ ID NO: 366252 - RNA, 32 nt, Human
ccagugcggggaggcccugcccugggauacca

SEQ ID NO: 366253 - RNA, 32 nt, Human
ccagugcggguguggagaagaucuucuggcuu

SEQ ID NO: 366254 - RNA, 32 nt, Human
ccagugcucccucucagcucagucuccccucu

SEQ ID NO: 366255 - RNA, 32 nt, Human
ccagugcucugccuaccugccccaccccucac

SEQ ID NO: 366256 - RNA, 32 nt, Human
ccagugcucugugggagccccaggacaaguga

SEQ ID NO: 366257 - RNA, 32 nt, Human
ccagugcugcacucccacccugggcuccacuc

SEQ ID NO: 366258 - RNA, 32 nt, Human
ccagugcugcagcucugcagaauguucagcau

SEQ ID NO: 366259 - RNA, 32 nt, Human
ccagugcugcagguuucuccugggugaagaug

SEQ ID NO: 366260 - RNA, 32 nt, Human
ccagugcugccaacuguacagcugcgccucca

SEQ ID NO: 366261 - RNA, 32 nt, Human
ccagugcugccugcuugguggcgggggugaug

SEQ ID NO: 366262 - RNA, 22 nt, Human
ccagugcugcugagcuugugug

SEQ ID NO: 366263 - RNA, 32 nt, Human
ccagugcugcugcugaccuucacugacagcuc

SEQ ID NO: 366264 - RNA, 31 nt, Human
ccagugcugggacaaagauggggaaggugug

SEQ ID NO: 366265 - RNA, 32 nt, Human
ccagugcugggacaaagauggggaaggugugu

SEQ ID NO: 366266 - RNA, 32 nt, Human
ccagugcugggugcgcuuaacaacugcguucu

SEQ ID NO: 366267 - RNA, 18 nt, Human
ccagugcuucccaaggcc

SEQ ID NO: 366268 - RNA, 32 nt, Human
ccagugcuugcuugcuuucuucauucucuggg

SEQ ID NO: 366269 - RNA, 32 nt, Human
ccagugcuuggcgaucagcccaauugaaggac

SEQ ID NO: 366270 - RNA, 32 nt, Human
ccagugcuuucuggagcucacaccuggcgcuc

SEQ ID NO: 366271 - RNA, 32 nt, Human
ccagugcuuugcuuaugggugcucgcuggggu

SEQ ID NO: 366272 - RNA, 32 nt, Human
ccaguggaaaaaggaaaagacugguacaaauc

SEQ ID NO: 366273 - RNA, 32 nt, Human
ccaguggaaccagcuuccuccaaggagaugac

SEQ ID NO: 366274 - RNA, 32 nt, Human
ccaguggaaugagaaacuaaugaggaccuaaa

SEQ ID NO: 366275 - RNA, 32 nt, Human
ccaguggacaagacaggagacuggaagaaggg

SEQ ID NO: 366276 - RNA, 32 nt, Human
ccaguggacuacaggauuacuugagaguuauc

SEQ ID NO: 366277 - RNA, 32 nt, Human
ccaguggacuuuggacaguggggagcaggccc

SEQ ID NO: 366278 - RNA, 32 nt, Human
ccaguggagcagcagguguucgaacacauagg

SEQ ID NO: 366279 - RNA, 32 nt, Human
ccaguggaggaagaaggaaggagaggcuugga

SEQ ID NO: 366280 - RNA, 32 nt, Human
ccaguggagggagcaagaggagagggaugucg

SEQ ID NO: 366281 - RNA, 32 nt, Human
ccaguggaggguguucaggcagagggaacagc

SEQ ID NO: 366282 - RNA, 32 nt, Human
ccaguggaguuccaggagcaccaccugaguga

SEQ ID NO: 366283 - RNA, 32 nt, Human
ccaguggauccccugcggucaggcugggcagc

SEQ ID NO: 366284 - RNA, 32 nt, Human
ccaguggaugagggccaccaggaagcacaggu

SEQ ID NO: 366285 - RNA, 32 nt, Human
ccaguggauugcugaugucucuacauugauuc

SEQ ID NO: 366286 - RNA, 32 nt, Human
ccaguggcacaaucucggcucacugcauccuc

SEQ ID NO: 366287 - RNA, 32 nt, Human
ccaguggcacugacaaggggacggaguccaag

SEQ ID NO: 366288 - RNA, 32 nt, Human
ccaguggcagcccaaguuagagcccagcauua

SEQ ID NO: 366289 - RNA, 32 nt, Human
ccaguggcagccucgcccucugggucagggug

SEQ ID NO: 366290 - RNA, 32 nt, Human
ccaguggccaccuguaccuguacaacgucagc

SEQ ID NO: 366291 - RNA, 21 nt, Human
ccaguggccaggcccugugga

SEQ ID NO: 366292 - RNA, 32 nt, Human
ccaguggcccagccaggaguggauuucaaaga

SEQ ID NO: 366293 - RNA, 32 nt, Human
ccaguggccuuccucccuuccuuucacagccg

SEQ ID NO: 366294 - RNA, 32 nt, Human
ccaguggccuuggcagaggcagguguggccuc

SEQ ID NO: 366295 - RNA, 32 nt, Human
ccaguggcgagaucuuggcucacuacaaccuc

SEQ ID NO: 366296 - RNA, 32 nt, Human
ccaguggcugccaggauuucugguggaagaga

SEQ ID NO: 366297 - RNA, 19 nt, Human
ccaguggcuggagacuuca

SEQ ID NO: 366298 - RNA, 32 nt, Human
ccaguggcugggaugguggaauugggguuauu

SEQ ID NO: 366299 - RNA, 32 nt, Human
ccaguggcuucuggagcagccuggugaacccu

SEQ ID NO: 366300 - RNA, 32 nt, Human
ccagugggaaccuggguuuucuagcuggugaa

SEQ ID NO: 366301 - RNA, 19 nt, Human
ccagugggaggaggggcag

SEQ ID NO: 366302 - RNA, 32 nt, Human
ccagugggaggcggaggccgugagcgcccagg

SEQ ID NO: 366303 - RNA, 32 nt, Human
ccagugggauagauacgauuagcaccaggauc

SEQ ID NO: 366304 - RNA, 18 nt, Human
ccagugggccuggggucc

SEQ ID NO: 366305 - RNA, 19 nt, Human
ccagugggccugggguccc

SEQ ID NO: 366306 - RNA, 32 nt, Human
ccagugggcugcagggccugcuuggaggaagg

SEQ ID NO: 366307 - RNA, 32 nt, Human
ccagugggcuugagcuugcugugcuugguauu

SEQ ID NO: 366308 - RNA, 32 nt, Human
ccagugggcuuggcacuccaccuugggcuucc

SEQ ID NO: 366309 - RNA, 22 nt, Human
ccaguggggagugggugggagg

SEQ ID NO: 366310 - RNA, 32 nt, Human
ccaguggggccagcacacacgaagcaacagua

SEQ ID NO: 366311 - RNA, 32 nt, Human
ccagugggggauaccccagagcccauggccug

SEQ ID NO: 366312 - RNA, 31 nt, Human
ccagugggggcugucgcagccaacaccccgg

SEQ ID NO: 366313 - RNA, 32 nt, Human
ccaguggggugaggccagccaagucccugugu

SEQ ID NO: 366314 - RNA, 32 nt, Human
ccagugggucagcaggcacggcuggcagccuu

SEQ ID NO: 366315 - RNA, 32 nt, Human
ccagugggugaggaugggagggcagggugggg

SEQ ID NO: 366316 - RNA, 21 nt, Human
ccaguggguggcucugacucg

SEQ ID NO: 366317 - RNA, 32 nt, Human
ccaguggguggguggggugggguggggcaagu

SEQ ID NO: 366318 - RNA, 32 nt, Human
ccagugguaaugcccagaguccuggcucuauc

SEQ ID NO: 366319 - RNA, 21 nt, Human
ccaguggucaaaccgcacuca

SEQ ID NO: 366320 - RNA, 32 nt, Human
ccagugguccgggaguucaggauugcaugaaa

SEQ ID NO: 366321 - RNA, 32 nt, Human
ccaguggucuagucaacauuuccucuugcaga

SEQ ID NO: 366322 - RNA, 32 nt, Human
ccaguggugcaaggcuggagaaugggguauga

SEQ ID NO: 366323 - RNA, 32 nt, Human
ccagugguggaaggcacaccauggcuuccucu

SEQ ID NO: 366324 - RNA, 32 nt, Human
ccaguggugggacucagcccagacugcccugg

SEQ ID NO: 366325 - RNA, 32 nt, Human
ccaguggugugaucauagcucacugcauccuc

SEQ ID NO: 366326 - RNA, 19 nt, Human
ccagugguguggucaauca

SEQ ID NO: 366327 - RNA, 32 nt, Human
ccagugguucucaaacuuuaaaaugccucagc

SEQ ID NO: 366328 - RNA, 32 nt, Human
ccagugguucucaaagugugacccauagacua

SEQ ID NO: 366329 - RNA, 20 nt, Human
ccagugguuuguccaggcuc

SEQ ID NO: 366330 - RNA, 32 nt, Human
ccaguguaaaaaggaaguuggaaugggaguug

SEQ ID NO: 366331 - RNA, 32 nt, Human
ccaguguaaccagcuuaguaaccagaguaucu

SEQ ID NO: 366332 - RNA, 32 nt, Human
ccaguguaauuucugucaaccacggacguuug

SEQ ID NO: 366333 - RNA, 21 nt, Human
ccaguguaggagggugggagg

SEQ ID NO: 366334 - RNA, 32 nt, Human
ccaguguauccaggguguuccaggugagcugg

SEQ ID NO: 366335 - RNA, 22 nt, Human
ccaguguauuugggacucaugg

SEQ ID NO: 366336 - RNA, 32 nt, Human
ccagugucacccagggugagugcaaaauaaag

SEQ ID NO: 366337 - RNA, 32 nt, Human
ccagugucaccuacaacauggaauggaggguc

SEQ ID NO: 366338 - RNA, 32 nt, Human
ccagugucacuucugcaguccuccucugcuca

SEQ ID NO: 366339 - RNA, 32 nt, Human
ccagugucauucuccaccauuucugcaguuua

SEQ ID NO: 366340 - RNA, 19 nt, Human
ccaguguccaggccggcca

SEQ ID NO: 366341 - RNA, 32 nt, Human
ccaguguccaggcuguggugcaggcgugggga

SEQ ID NO: 366342 - RNA, 32 nt, Human
ccagugucccuggaugaggugaugauuucccg

SEQ ID NO: 366343 - RNA, 32 nt, Human
ccaguguccuacugggagcucagucuguagug

SEQ ID NO: 366344 - RNA, 32 nt, Human
ccaguguccugacuucugucugccacaugagg

SEQ ID NO: 366345 - RNA, 32 nt, Human
ccaguguccugugccagccuucaugcccagcc

SEQ ID NO: 366346 - RNA, 22 nt, Human
ccagugucuauagacuauugug

SEQ ID NO: 366347 - RNA, 32 nt, Human
ccagugucucacugccaaaccucuugguuacg

SEQ ID NO: 366348 - RNA, 32 nt, Human
ccagugucuccuugauauugauccuagcagau

SEQ ID NO: 366349 - RNA, 32 nt, Human
ccagugucucuaauaaacuuucucuucuuucu

SEQ ID NO: 366350 - RNA, 32 nt, Human
ccagugucucucugcaccuccacccaucccuc

SEQ ID NO: 366351 - RNA, 32 nt, Human
ccagugucugacacaaagccugggacaugugg

SEQ ID NO: 366352 - RNA, 32 nt, Human
ccagugucuguggccuggcaaguggccacgcc

SEQ ID NO: 366353 - RNA, 32 nt, Human
ccagugucuguucauugccucugccuugcccc

SEQ ID NO: 366354 - RNA, 32 nt, Human
ccagugugaagcucggcgggggugggcagggc

SEQ ID NO: 366355 - RNA, 32 nt, Human
ccagugugaaggaggagagagguggagggcug

SEQ ID NO: 366356 - RNA, 32 nt, Human
ccagugugaccucacccucuccagucaccccu

SEQ ID NO: 366357 - RNA, 21 nt, Human
ccagugugacuggccggggug

SEQ ID NO: 366358 - RNA, 32 nt, Human
ccagugugagugcugcucuuuccaccugccuu

SEQ ID NO: 366359 - RNA, 22 nt, Human
ccagugugcugggauuacaggc

SEQ ID NO: 366360 - RNA, 32 nt, Human
ccaguguggagcaugaccugaccugcagccca

SEQ ID NO: 366361 - RNA, 32 nt, Human
ccaguguggccgagguugcagugaguguagau

SEQ ID NO: 366362 - RNA, 32 nt, Human
ccagugugggcaacagagugagaaccaucucu

SEQ ID NO: 366363 - RNA, 32 nt, Human
ccagugugggcaacguagugaaacccugccuc

SEQ ID NO: 366364 - RNA, 30 nt, Human
ccagugugguuguagagauuguagagaggg

SEQ ID NO: 366365 - RNA, 28 nt, Human
ccaguguguaaauaaagcucuuuugcca

SEQ ID NO: 366366 - RNA, 22 nt, Human
ccagugugugccccacccagug

SEQ ID NO: 366367 - RNA, 32 nt, Human
ccaguguguguggcggguguagaaggagcuaa

SEQ ID NO: 366368 - RNA, 32 nt, Human
ccaguguguugugacuccugaggucucucagc

SEQ ID NO: 366369 - RNA, 32 nt, Human
ccaguguuauugaggugaucaagaucuguucc

SEQ ID NO: 366370 - RNA, 32 nt, Human
ccaguguucaaagcugaacuucagauggacuu

SEQ ID NO: 366371 - RNA, 32 nt, Human
ccaguguucccaguucccaccaguccaacugc

SEQ ID NO: 366372 - RNA, 32 nt, Human
ccaguguucucccagggcuugcuaaauccagc

SEQ ID NO: 366373 - RNA, 32 nt, Human
ccaguguucugaguuauugaaaggcuuucuuu

SEQ ID NO: 366374 - RNA, 32 nt, Human
ccaguguugcauuuugucuuacucugaaagaa

SEQ ID NO: 366375 - RNA, 21 nt, Human
ccaguguugggaagcuuuugc

SEQ ID NO: 366376 - RNA, 32 nt, Human
ccaguguuucaggcacaggaaguacagcagug

SEQ ID NO: 366377 - RNA, 24 nt, Human
ccaguguuuccucagcucauccgc

SEQ ID NO: 366378 - RNA, 22 nt, Human
ccaguguuucugucagucuuuc

SEQ ID NO: 366379 - RNA, 32 nt, Human
ccaguguuuggaggggaggaugagugccuguc

SEQ ID NO: 366380 - RNA, 32 nt, Human
ccaguguuuuucuguggcauugccugguaaag

SEQ ID NO: 366381 - RNA, 20 nt, Human
ccaguuaaaaagccugugug

SEQ ID NO: 366382 - RNA, 32 nt, Human
ccaguuaaaaccucccagcugaccucagacua

SEQ ID NO: 366383 - RNA, 32 nt, Human
ccaguuaaaagacguccaucuucaagaagugg

SEQ ID NO: 366384 - RNA, 32 nt, Human
ccaguuaaacaugccucuucuacagcuccauu

SEQ ID NO: 366385 - RNA, 31 nt, Human
ccaguuaaagggccuguuucuuacuggccug

SEQ ID NO: 366386 - RNA, 32 nt, Human
ccaguuaaccaccauucugcggccugguucug

SEQ ID NO: 366387 - RNA, 32 nt, Human
ccaguuaaccugggcucccugaugcccagcug

SEQ ID NO: 366388 - RNA, 32 nt, Human
ccaguuaagcagcagcugcacgcccaggcugc

SEQ ID NO: 366389 - RNA, 20 nt, Human
ccaguuaagccacagaacuc

SEQ ID NO: 366390 - RNA, 32 nt, Human
ccaguuaaguagugucuucucucuccaccaaa

SEQ ID NO: 366391 - RNA, 32 nt, Human
ccaguuaauggaaucagcaccuuuccuucauu

SEQ ID NO: 366392 - RNA, 20 nt, Human
ccaguuaauggcacugcuca

SEQ ID NO: 366393 - RNA, 32 nt, Human
ccaguuacagaugcuugguuaguuugggacau

SEQ ID NO: 366394 - RNA, 32 nt, Human
ccaguuacagcuccccggcucuucuguguggc

SEQ ID NO: 366395 - RNA, 32 nt, Human
ccaguuaccaccaaacaucugggaaacuucug

SEQ ID NO: 366396 - RNA, 20 nt, Human
ccaguuaccaccuccugccu

SEQ ID NO: 366397 - RNA, 32 nt, Human
ccaguuacccaagaggaagcugccuugggccu

SEQ ID NO: 366398 - RNA, 32 nt, Human
ccaguuaccuucuccauugucuuaguucuguc

SEQ ID NO: 366399 - RNA, 32 nt, Human
ccaguuacucaguagacugagcucuuuuggua

SEQ ID NO: 366400 - RNA, 32 nt, Human
ccaguuacuugaaccugggaggcggagguugc

SEQ ID NO: 366401 - RNA, 32 nt, Human
ccaguuagcacaaaggaaaauauuucaauaaa

SEQ ID NO: 366402 - RNA, 31 nt, Human
ccaguuaggcacuuuuugucccugguaagac

SEQ ID NO: 366403 - RNA, 18 nt, Human
ccaguuauccuggcccca

SEQ ID NO: 366404 - RNA, 32 nt, Human
ccaguuaugcccagcuccuuccuccuccuccu

SEQ ID NO: 366405 - RNA, 25 nt, Human
ccaguuauguugacuuccuucugca

SEQ ID NO: 366406 - RNA, 32 nt, Human
ccaguuauuauacaaccaaauacaacuuccag

SEQ ID NO: 366407 - RNA, 32 nt, Human
ccaguucaaagccaccuuagacaguguggcaa

SEQ ID NO: 366408 - RNA, 32 nt, Human
ccaguucaccccucaccuccagccuggaggag

SEQ ID NO: 366409 - RNA, 32 nt, Human
ccaguucacucaggccuuacuaauccauacca

SEQ ID NO: 366410 - RNA, 17 nt, Human
ccaguucacugcugcca

SEQ ID NO: 366411 - RNA, 32 nt, Human
ccaguucagacucuaacuucucccaaaguguc

SEQ ID NO: 366412 - RNA, 32 nt, Human
ccaguucagcuuggggacaggggcaggaggaa

SEQ ID NO: 366413 - RNA, 32 nt, Human
ccaguucaguccacaccaucucuucuuugagu

SEQ ID NO: 366414 - RNA, 32 nt, Human
ccaguuccaaaccuuaauugaacguaagagaa

SEQ ID NO: 366415 - RNA, 32 nt, Human
ccaguuccaaaccuuaauugaauguaagagaa

SEQ ID NO: 366416 - RNA, 28 nt, Human
ccaguuccaagugcaucccuuauucuau

SEQ ID NO: 366417 - RNA, 26 nt, Human
ccaguuccacaugcuggauuauggug

SEQ ID NO: 366418 - RNA, 32 nt, Human
ccaguuccacuucuaccuuggagcucacuggu

SEQ ID NO: 366419 - RNA, 32 nt, Human
ccaguuccauggcaaggcucagacuuuuaaug

SEQ ID NO: 366420 - RNA, 32 nt, Human
ccaguucccaaaucuuuaucuaucucagacuu

SEQ ID NO: 366421 - RNA, 21 nt, Human
ccaguucccacacucaggcca

SEQ ID NO: 366422 - RNA, 32 nt, Human
ccaguucccaggcgcacucuacuccagcccuu

SEQ ID NO: 366423 - RNA, 32 nt, Human
ccaguucccaggcugcaguugagggucugucc

SEQ ID NO: 366424 - RNA, 32 nt, Human
ccaguuccccguuuagaacucauuagcugugu

SEQ ID NO: 366425 - RNA, 32 nt, Human
ccaguuccccuccuugcggccccaucagcgaa

SEQ ID NO: 366426 - RNA, 22 nt, Human
ccaguucccgugacgaggcuca

SEQ ID NO: 366427 - RNA, 32 nt, Human
ccaguucccuaaucaaucagagucagaacucu

SEQ ID NO: 366428 - RNA, 23 nt, Human
ccaguucccuccccaggccuccu

SEQ ID NO: 366429 - RNA, 32 nt, Human
ccaguucccuccccaggccuccugggccaccu

SEQ ID NO: 366430 - RNA, 32 nt, Human
ccaguucccuguugaagaaacaguucccuguu

SEQ ID NO: 366431 - RNA, 32 nt, Human
ccaguucccuucuccccucccggccaaaccca

SEQ ID NO: 366432 - RNA, 32 nt, Human
ccaguuccggcacgaggaccaugggccggcug

SEQ ID NO: 366433 - RNA, 32 nt, Human
ccaguuccuaucucccacccgccugguuccag

SEQ ID NO: 366434 - RNA, 32 nt, Human
ccaguuccucaccagcuacucuggccauauau

SEQ ID NO: 366435 - RNA, 23 nt, Human
ccaguuccucagucagguacuua

SEQ ID NO: 366436 - RNA, 32 nt, Human
ccaguuccuccuaccccugccucugucggaga

SEQ ID NO: 366437 - RNA, 32 nt, Human
ccaguuccuccuuguuucaucucuuugcuaag

SEQ ID NO: 366438 - RNA, 32 nt, Human
ccaguuccucuucacaugaagccccuggcauu

SEQ ID NO: 366439 - RNA, 23 nt, Human
ccaguuccugggaccaggccuca

SEQ ID NO: 366440 - RNA, 21 nt, Human
ccaguuccuguccguccaugc

SEQ ID NO: 366441 - RNA, 21 nt, Human
ccaguuccuguucuguguuca

SEQ ID NO: 366442 - RNA, 32 nt, Human
ccaguuccuugaaggcccccaagaggggcgag

SEQ ID NO: 366443 - RNA, 32 nt, Human
ccaguuccuuuccuccccacuucaccaacacu

SEQ ID NO: 366444 - RNA, 32 nt, Human
ccaguuccuuucucccauucccagccucauuu

SEQ ID NO: 366445 - RNA, 32 nt, Human
ccaguucgccuggagcccuccgccuucacauu

SEQ ID NO: 366446 - RNA, 32 nt, Human
ccaguucgugagaguuccuguucugcauccuc

SEQ ID NO: 366447 - RNA, 19 nt, Human
ccaguucuacagagugaga

SEQ ID NO: 366448 - RNA, 32 nt, Human
ccaguucuaccucuugcugucuguguguucuu

SEQ ID NO: 366449 - RNA, 23 nt, Human
ccaguucucauggguggcacuca

SEQ ID NO: 366450 - RNA, 32 nt, Human
ccaguucuccacugucucuucuggaccaggaa

SEQ ID NO: 366451 - RNA, 32 nt, Human
ccaguucuccuccucagccuuuuccuccucag

SEQ ID NO: 366452 - RNA, 22 nt, Human
ccaguucuccuucccugcagag

SEQ ID NO: 366453 - RNA, 20 nt, Human
ccaguucucguuuugggcca

SEQ ID NO: 366454 - RNA, 32 nt, Human
ccaguucucuagaccucugcccaaaccagagc

SEQ ID NO: 366455 - RNA, 32 nt, Human
ccaguucucugccugcaccaugacugucguac

SEQ ID NO: 366456 - RNA, 32 nt, Human
ccaguucugcagugacaggcccaggggcugcc

SEQ ID NO: 366457 - RNA, 32 nt, Human
ccaguucuggaaaggccaggauguggguucag

SEQ ID NO: 366458 - RNA, 21 nt, Human
ccaguucugggaggcgggggg

SEQ ID NO: 366459 - RNA, 24 nt, Human
ccaguucuucccccaaaguauuca

SEQ ID NO: 366460 - RNA, 19 nt, Human
ccaguucuucucccugagc

SEQ ID NO: 366461 - RNA, 21 nt, Human
ccaguucuuuacauuuuucca

SEQ ID NO: 366462 - RNA, 32 nt, Human
ccaguucuuuccgucucugccucucucugucu

SEQ ID NO: 366463 - RNA, 32 nt, Human
ccaguucuuuggccuaugccaggcucucuggu

SEQ ID NO: 366464 - RNA, 23 nt, Human
ccaguugaaaauaccagcuuugg

SEQ ID NO: 366465 - RNA, 32 nt, Human
ccaguugaauaauggcccauucaugccaaccu

SEQ ID NO: 366466 - RNA, 32 nt, Human
ccaguugacaagauuuuuccacccucgagcag

SEQ ID NO: 366467 - RNA, 20 nt, Human
ccaguugagaacagccucug

SEQ ID NO: 366468 - RNA, 24 nt, Human
ccaguugagaaugagccugugugg

SEQ ID NO: 366469 - RNA, 21 nt, Human
ccaguugagccagggcagcca

SEQ ID NO: 366470 - RNA, 32 nt, Human
ccaguugaggaaacggaggcccagggaggcug

SEQ ID NO: 366471 - RNA, 21 nt, Human
ccaguugaugaaccugucugg

SEQ ID NO: 366472 - RNA, 31 nt, Human
ccaguugcaaugucugucaguaacgaggcuu

SEQ ID NO: 366473 - RNA, 19 nt, Human
ccaguugcauucugugaua

SEQ ID NO: 366474 - RNA, 23 nt, Human
ccaguugcccugaacccagcaga

SEQ ID NO: 366475 - RNA, 32 nt, Human
ccaguugccggaggucugggcaccaggccaau

SEQ ID NO: 366476 - RNA, 32 nt, Human
ccaguugcuggcuuagucauuggccacccuaa

SEQ ID NO: 366477 - RNA, 32 nt, Human
ccaguugcugggacggaaggcugaauguaggg

SEQ ID NO: 366478 - RNA, 27 nt, Human
ccaguuggaaaaggaggcccgguuccg

SEQ ID NO: 366479 - RNA, 32 nt, Human
ccaguuggaagagauuucagaugugcuacagc

SEQ ID NO: 366480 - RNA, 32 nt, Human
ccaguuggagccagacagcgggguggacaagu

SEQ ID NO: 366481 - RNA, 32 nt, Human
ccaguuggagccaggaacaggcaggagcccag

SEQ ID NO: 366482 - RNA, 32 nt, Human
ccaguuggcggaggaggagaaggaaggggccg

SEQ ID NO: 366483 - RNA, 32 nt, Human
ccaguugggagcacuggagugcagggaggaga

SEQ ID NO: 366484 - RNA, 20 nt, Human
ccaguuggggagacagaggg

SEQ ID NO: 366485 - RNA, 32 nt, Human
ccaguugguaauuuaaaaguacacuucacuuc

SEQ ID NO: 366486 - RNA, 23 nt, Human
ccaguugguacuuuuucacuccc

SEQ ID NO: 366487 - RNA, 19 nt, Human
ccaguuggugcugcuuucu

SEQ ID NO: 366488 - RNA, 20 nt, Human
ccaguuguaguaggugccag

SEQ ID NO: 366489 - RNA, 32 nt, Human
ccaguuguccuccaaaaaccucacucaccacg

SEQ ID NO: 366490 - RNA, 18 nt, Human
ccaguugucuuuuuccca

SEQ ID NO: 366491 - RNA, 32 nt, Human
ccaguugugaaggggcuccaagugccuuguuc

SEQ ID NO: 366492 - RNA, 32 nt, Human
ccaguugugcuggcucacaucuguaaugccag

SEQ ID NO: 366493 - RNA, 32 nt, Human
ccaguuguggcuguggaguuagagucacauag

SEQ ID NO: 366494 - RNA, 32 nt, Human
ccaguuguguugguuucucggugacuuggagu

SEQ ID NO: 366495 - RNA, 32 nt, Human
ccaguuguucccuucagacucaggggcuccac

SEQ ID NO: 366496 - RNA, 32 nt, Human
ccaguuguuccuucuaggcugcccaagcccca

SEQ ID NO: 366497 - RNA, 32 nt, Human
ccaguuguucucaaagugugguaccuggauca

SEQ ID NO: 366498 - RNA, 19 nt, Human
ccaguuuacccauuuuccc

SEQ ID NO: 366499 - RNA, 32 nt, Human
ccaguuuagccaagggcuuuguuccuggcaug

SEQ ID NO: 366500 - RNA, 32 nt, Human
ccaguuuagcuccaaaggaaaagagggaaaua

SEQ ID NO: 366501 - RNA, 32 nt, Human
ccaguuuaucugugccccagcuuccucacuua

SEQ ID NO: 366502 - RNA, 32 nt, Human
ccaguuucaaagcuccucggcuaugcuaaugu

SEQ ID NO: 366503 - RNA, 32 nt, Human
ccaguuucaagcaauucucaugccucagauuc

SEQ ID NO: 366504 - RNA, 32 nt, Human
ccaguuucaagcgauucuccugccucagccuc

SEQ ID NO: 366505 - RNA, 21 nt, Human
ccaguuucaugaaguaugucu

SEQ ID NO: 366506 - RNA, 32 nt, Human
ccaguuuccaauaccaacucaccuacaaagau

SEQ ID NO: 366507 - RNA, 32 nt, Human
ccaguuuccagucgggggaacugaggcagagc

SEQ ID NO: 366508 - RNA, 32 nt, Human
ccaguuuccccagccucagccccagccccagc

SEQ ID NO: 366509 - RNA, 32 nt, Human
ccaguuuccgcuccggucucucggcaugagag

SEQ ID NO: 366510 - RNA, 32 nt, Human
ccaguuuccuaugcauccuuccagaaauuacc

SEQ ID NO: 366511 - RNA, 32 nt, Human
ccaguuuccugagauuagaaccuguguguaug

SEQ ID NO: 366512 - RNA, 20 nt, Human
ccaguuucuacagacugcca

SEQ ID NO: 366513 - RNA, 19 nt, Human
ccaguuucucagagugcuc

SEQ ID NO: 366514 - RNA, 22 nt, Human
ccaguuucucaggaggaugccu

SEQ ID NO: 366515 - RNA, 32 nt, Human
ccaguuucuccaaccuuuacuguggagcaaca

SEQ ID NO: 366516 - RNA, 32 nt, Human
ccaguuucuccccuagacucaggcuuccuuug

SEQ ID NO: 366517 - RNA, 25 nt, Human
ccaguuucugaaucaucuccaagua

SEQ ID NO: 366518 - RNA, 32 nt, Human
ccaguuucuggaggcagauggguaaccaggaa

SEQ ID NO: 366519 - RNA, 23 nt, Human
ccaguuucuuccggcgcagcucu

SEQ ID NO: 366520 - RNA, 32 nt, Human
ccaguuucuucuuuucucccagucuccuguuc

SEQ ID NO: 366521 - RNA, 24 nt, Human
ccaguuucuuguccugggcccuca

SEQ ID NO: 366522 - RNA, 21 nt, Human
ccaguuucuuuaggcagcucu

SEQ ID NO: 366523 - RNA, 32 nt, Human
ccaguuugcaccuguccccacccuccacucag

SEQ ID NO: 366524 - RNA, 32 nt, Human
ccaguuugcaggaagaaaggaagagaauggaa

SEQ ID NO: 366525 - RNA, 15 nt, Human
ccaguuugcauuccc

SEQ ID NO: 366526 - RNA, 32 nt, Human
ccaguuugcauucuccaaauguuuccagugau

SEQ ID NO: 366527 - RNA, 32 nt, Human
ccaguuugccagcagcuauuugccuauagaga

SEQ ID NO: 366528 - RNA, 20 nt, Human
ccaguuugggcaacaagagc

SEQ ID NO: 366529 - RNA, 32 nt, Human
ccaguuugggcaacagaaugaggcuccaucuc

SEQ ID NO: 366530 - RNA, 23 nt, Human
ccaguuugggcaacauagugaga

SEQ ID NO: 366531 - RNA, 32 nt, Human
ccaguuugggcaacauagugagaucucaucuc

SEQ ID NO: 366532 - RNA, 32 nt, Human
ccaguuugguucugaagcugguccuuauuuac

SEQ ID NO: 366533 - RNA, 32 nt, Human
ccaguuuucacuuuuugaagcauugcaucuuu

SEQ ID NO: 366534 - RNA, 32 nt, Human
ccaguuuucucagccaggcggcggcggcgacu

SEQ ID NO: 366535 - RNA, 32 nt, Human
ccaguuuucucuccaucucuuuucuuuguaca

SEQ ID NO: 366536 - RNA, 32 nt, Human
ccaguuuucuuccuuguuuacacaaguucaau

SEQ ID NO: 366537 - RNA, 32 nt, Human
ccaguuuucuuuugccugucauggugaccuga

SEQ ID NO: 366538 - RNA, 32 nt, Human
ccaguuuugacacgccccagugcccuggagaa

SEQ ID NO: 366539 - RNA, 32 nt, Human
ccaguuuugauugcuggcaucuugccacccca

SEQ ID NO: 366540 - RNA, 32 nt, Human
ccaguuuugguaucacagcaauguuuucucau

SEQ ID NO: 366541 - RNA, 23 nt, Human
ccauaaaaacaaaguccauuuua

SEQ ID NO: 366542 - RNA, 32 nt, Human
ccauaaaacuggaagcugcuuccccuguaguc

SEQ ID NO: 366543 - RNA, 21 nt, Human
ccauaaaauacagacauuuua

SEQ ID NO: 366544 - RNA, 32 nt, Human
ccauaaaaugaauggcguuucucuccauauuu

SEQ ID NO: 366545 - RNA, 22 nt, Human
ccauaaaaugccuuuagcauuu

SEQ ID NO: 366546 - RNA, 32 nt, Human
ccauaaaaugugaaaacuggagaagaucuuag

SEQ ID NO: 366547 - RNA, 32 nt, Human
ccauaaacaaaaaguaucucagaucugucacu

SEQ ID NO: 366548 - RNA, 32 nt, Human
ccauaaacaccuucccuguccuggcccuccga

SEQ ID NO: 366549 - RNA, 32 nt, Human
ccauaaacagcccucuugugucuguuuucuuc

SEQ ID NO: 366550 - RNA, 32 nt, Human
ccauaaaccagcuggagcagacccuuuucauc

SEQ ID NO: 366551 - RNA, 32 nt, Human
ccauaaacuauguauuuuggcaagacacuuca

SEQ ID NO: 366552 - RNA, 31 nt, Human
ccauaaagcgcauccuuuacauuguaccuau

SEQ ID NO: 366553 - RNA, 32 nt, Human
ccauaaaguaauuuugugaaagaaggagcaag

SEQ ID NO: 366554 - RNA, 32 nt, Human
ccauaaagugauauauuuaauauuuuuauucu

SEQ ID NO: 366555 - RNA, 32 nt, Human
ccauaaauaaaagauucucugauaccuucauu

SEQ ID NO: 366556 - RNA, 32 nt, Human
ccauaaaucucaggaauguuuuaggcagaaaa

SEQ ID NO: 366557 - RNA, 32 nt, Human
ccauaacaaaggacuguagacugaggggcuua

SEQ ID NO: 366558 - RNA, 32 nt, Human
ccauaacaaauaguaacauuucuacagcaaaa

SEQ ID NO: 366559 - RNA, 32 nt, Human
ccauaacaaguuuacuuguggaaaagaaaagg

SEQ ID NO: 366560 - RNA, 19 nt, Human
ccauaaccaccccugggaa

SEQ ID NO: 366561 - RNA, 32 nt, Human
ccauaacccagccucagacccauggagcccac

SEQ ID NO: 366562 - RNA, 32 nt, Human
ccauaacccugaccgccuggggcaggaaguau

SEQ ID NO: 366563 - RNA, 32 nt, Human
ccauaaccucucccacagccagugccaagucc

SEQ ID NO: 366564 - RNA, 32 nt, Human
ccauaacguuuacaguuguaguacaguugugg

SEQ ID NO: 366565 - RNA, 32 nt, Human
ccauaagaagaaaagggggagccccagaugug

SEQ ID NO: 366566 - RNA, 32 nt, Human
ccauaagaguuucuccaaaaguggucaguuug

SEQ ID NO: 366567 - RNA, 32 nt, Human
ccauaagccacagccucacaggaagugggggu

SEQ ID NO: 366568 - RNA, 32 nt, Human
ccauaagcccagggaugugacagcugcagcgg

SEQ ID NO: 366569 - RNA, 32 nt, Human
ccauaagccuccaucguuuucucuuuucuccu

SEQ ID NO: 366570 - RNA, 32 nt, Human
ccauaaggaugaggacaggggaggccagaggg

SEQ ID NO: 366571 - RNA, 32 nt, Human
ccauaaggcaacacuuguuauccaccagauaa

SEQ ID NO: 366572 - RNA, 24 nt, Human
ccauaaggcagagguugcagugag

SEQ ID NO: 366573 - RNA, 32 nt, Human
ccauaaggcugaugcugauuuggccagagaug

SEQ ID NO: 366574 - RNA, 32 nt, Human
ccauaagucugauucucuuuaacugugugacc

SEQ ID NO: 366575 - RNA, 32 nt, Human
ccauaaguguuuuggagcucaucuggggugag

SEQ ID NO: 366576 - RNA, 32 nt, Human
ccauaauaagagucuucagagagaugauggga

SEQ ID NO: 366577 - RNA, 32 nt, Human
ccauaauauaaaugugugaaucagggcuguga

SEQ ID NO: 366578 - RNA, 32 nt, Human
ccauaaucuguaggcuuuaauuuuagaaauuc

SEQ ID NO: 366579 - RNA, 32 nt, Human
ccauaaugaaugugagaaagcugucauuuaaa

SEQ ID NO: 366580 - RNA, 24 nt, Human
ccauaaugcugggauuacaggcgu

SEQ ID NO: 366581 - RNA, 32 nt, Human
ccauaauggucaguacagagaagagaaaagcu

SEQ ID NO: 366582 - RNA, 32 nt, Human
ccauaauggucuucucugcuguuccuugaaca

SEQ ID NO: 366583 - RNA, 32 nt, Human
ccauaauguccucaguggaaggugaugggggc

SEQ ID NO: 366584 - RNA, 32 nt, Human
ccauaauucauagugauagagugcagugaugu

SEQ ID NO: 366585 - RNA, 25 nt, Human
ccauacaaauccaccgcagcacagg

SEQ ID NO: 366586 - RNA, 32 nt, Human
ccauacaacucaaccaaacuuaccccugagcc

SEQ ID NO: 366587 - RNA, 32 nt, Human
ccauacaacugccugaguuccuaaguggccuc

SEQ ID NO: 366588 - RNA, 32 nt, Human
ccauacacaggugugcuucuagucagugugua

SEQ ID NO: 366589 - RNA, 32 nt, Human
ccauacacaguuacagagaucagucaaaucca

SEQ ID NO: 366590 - RNA, 23 nt, Human
ccauacacauuuggcucaggguu

SEQ ID NO: 366591 - RNA, 32 nt, Human
ccauacaccagagacacacuggcagguuaggc

SEQ ID NO: 366592 - RNA, 32 nt, Human
ccauacaccauguuguauuauaagagccauuu

SEQ ID NO: 366593 - RNA, 32 nt, Human
ccauacaccggcugccggggacugccucgacu

SEQ ID NO: 366594 - RNA, 32 nt, Human
ccauacagaauuagcagagaaaauacacacag

SEQ ID NO: 366595 - RNA, 32 nt, Human
ccauacagccugguggucuagauguguuugga

SEQ ID NO: 366596 - RNA, 32 nt, Human
ccauacagcuugagccagugaggcagauuggg

SEQ ID NO: 366597 - RNA, 32 nt, Human
ccauacaggagauuguggccacugugacucuc

SEQ ID NO: 366598 - RNA, 32 nt, Human
ccauacaggcaacuuagcuggugaaaggacuc

SEQ ID NO: 366599 - RNA, 19 nt, Human
ccauacaugagacugcaga

SEQ ID NO: 366600 - RNA, 32 nt, Human
ccauacaugguggcugacgccuguaaucccag

SEQ ID NO: 366601 - RNA, 32 nt, Human
ccauaccacugcauuccagccugggugacaga

SEQ ID NO: 366602 - RNA, 32 nt, Human
ccauaccagugcauuccagccuggguacacag

SEQ ID NO: 366603 - RNA, 32 nt, Human
ccauacccaaauacacagcaaugaauggcaca

SEQ ID NO: 366604 - RNA, 32 nt, Human
ccauacccaagaaauagcuagcaucaagaaug

SEQ ID NO: 366605 - RNA, 32 nt, Human
ccauacccacaguaagcauccauuccauugau

SEQ ID NO: 366606 - RNA, 32 nt, Human
ccauacccauuucuuucuuuccuuccuuccuu

SEQ ID NO: 366607 - RNA, 32 nt, Human
ccauaccccuggcuucuccuugcaccuucauu

SEQ ID NO: 366608 - RNA, 32 nt, Human
ccauaccgccugcaaggcagagaggacacagg

SEQ ID NO: 366609 - RNA, 32 nt, Human
ccauaccuagcuaauuuuuccucuuuuuagua

SEQ ID NO: 366610 - RNA, 32 nt, Human
ccauaccuccacugcugaaguuccuccagccc

SEQ ID NO: 366611 - RNA, 32 nt, Human
ccauaccuccuccccuccaccccacacccugu

SEQ ID NO: 366612 - RNA, 32 nt, Human
ccauaccucugccuccccaaaaagcuccuauu

SEQ ID NO: 366613 - RNA, 32 nt, Human
ccauaccugccuagcccuuuggcuccauccug

SEQ ID NO: 366614 - RNA, 21 nt, Human
ccauaccuggugagucuggaa

SEQ ID NO: 366615 - RNA, 32 nt, Human
ccauacgaggcaggguuuccugguuugugaga

SEQ ID NO: 366616 - RNA, 32 nt, Human
ccauacgcaggugggagggaggaacaccggug

SEQ ID NO: 366617 - RNA, 32 nt, Human
ccauacgccaugccauagcuugugcuaucugu

SEQ ID NO: 366618 - RNA, 32 nt, Human
ccauacgcuccaaaagauggcugugauagauc

SEQ ID NO: 366619 - RNA, 32 nt, Human
ccauacgcugcccucgcagccuggcggccucc

SEQ ID NO: 366620 - RNA, 32 nt, Human
ccauacuacuagggaguaacuguagagugaga

SEQ ID NO: 366621 - RNA, 32 nt, Human
ccauacucagccacacauucucacaacaaucu

SEQ ID NO: 366622 - RNA, 32 nt, Human
ccauacuccucaggguucugagguccuuguau

SEQ ID NO: 366623 - RNA, 32 nt, Human
ccauacuccuuuccuuuuccuccuauugaaac

SEQ ID NO: 366624 - RNA, 32 nt, Human
ccauacucuguuccagcuggaguagccuccug

SEQ ID NO: 366625 - RNA, 32 nt, Human
ccauacucuuauguaccagcacuucugaugga

SEQ ID NO: 366626 - RNA, 32 nt, Human
ccauacucuuuccccucuauuucuuuguauga

SEQ ID NO: 366627 - RNA, 32 nt, Human
ccauacugucgguggagaagaggcucaacuuc

SEQ ID NO: 366628 - RNA, 23 nt, Human
ccauacuguucuggugguaguga

SEQ ID NO: 366629 - RNA, 32 nt, Human
ccauacuuagggaggcagacgucaaaggcaag

SEQ ID NO: 366630 - RNA, 32 nt, Human
ccauacuuguaaucccagcuauugggaaggau

SEQ ID NO: 366631 - RNA, 32 nt, Human
ccauagaacucauauugacacucagcuguuuu

SEQ ID NO: 366632 - RNA, 32 nt, Human
ccauagaaguagugacuaaggagcuucugaag

SEQ ID NO: 366633 - RNA, 32 nt, Human
ccauagagacaccucacaagguucccauuuuu

SEQ ID NO: 366634 - RNA, 32 nt, Human
ccauagagacugucaacguuguccucaugaca

SEQ ID NO: 366635 - RNA, 32 nt, Human
ccauagagaggaggagaagaaacuaaccaaca

SEQ ID NO: 366636 - RNA, 32 nt, Human
ccauagagccgucuccagagcugccggugccu

SEQ ID NO: 366637 - RNA, 32 nt, Human
ccauagaggagaagcuaaagagggagggggcc

SEQ ID NO: 366638 - RNA, 32 nt, Human
ccauagaggagagaggucuugaggggugggag

SEQ ID NO: 366639 - RNA, 32 nt, Human
ccauagaggccccacaggacagcaaccagaaa

SEQ ID NO: 366640 - RNA, 32 nt, Human
ccauagaguauuagcuacagaaaccuuuccau

SEQ ID NO: 366641 - RNA, 32 nt, Human
ccauagagucucacugauucugagauggcuuu

SEQ ID NO: 366642 - RNA, 32 nt, Human
ccauagaucucaguuugaucaaaaagaaggcu

SEQ ID NO: 366643 - RNA, 32 nt, Human
ccauagaucuggaucuggcccugcugcuucuc

SEQ ID NO: 366644 - RNA, 32 nt, Human
ccauagauuuuguauacguugugcacaaaauc

SEQ ID NO: 366645 - RNA, 32 nt, Human
ccauagcaaccagcaacuccaggguaccacaa

SEQ ID NO: 366646 - RNA, 32 nt, Human
ccauagcagcuuugucucugucacaucagcaa

SEQ ID NO: 366647 - RNA, 32 nt, Human
ccauagcaugccugccccaucuugccuguagc

SEQ ID NO: 366648 - RNA, 32 nt, Human
ccauagccacugcccccuccccuggaugccca

SEQ ID NO: 366649 - RNA, 32 nt, Human
ccauagccaguuuccagaugggccacagacug

SEQ ID NO: 366650 - RNA, 32 nt, Human
ccauagcccaccagcaucccagagcugccucu

SEQ ID NO: 366651 - RNA, 22 nt, Human
ccauagcccacugcagccucca

SEQ ID NO: 366652 - RNA, 32 nt, Human
ccauagcccacugcagccuccaccucccaggc

SEQ ID NO: 366653 - RNA, 22 nt, Human
ccauagcccauuaguggaagga

SEQ ID NO: 366654 - RNA, 19 nt, Human
ccauagccccuccuggaga

SEQ ID NO: 366655 - RNA, 20 nt, Human
ccauagccuaccagccugcc

SEQ ID NO: 366656 - RNA, 32 nt, Human
ccauagccucuggaacugugcguucugcauag

SEQ ID NO: 366657 - RNA, 32 nt, Human
ccauagcgcugaggcccuggccccgccuccag

SEQ ID NO: 366658 - RNA, 32 nt, Human
ccauagcggagaacuccugacgcccagcccug

SEQ ID NO: 366659 - RNA, 32 nt, Human
ccauagcucacugcagcaucaaauuccuaggc

SEQ ID NO: 366660 - RNA, 21 nt, Human
ccauagcugggacuacaggcg

SEQ ID NO: 366661 - RNA, 32 nt, Human
ccauagcugguggucaagaugagggagaggcc

SEQ ID NO: 366662 - RNA, 32 nt, Human
ccauagcuguaaaccucugcuuggcccagcag

SEQ ID NO: 366663 - RNA, 32 nt, Human
ccauaggaagccuuccuuucuggccaaggugg

SEQ ID NO: 366664 - RNA, 22 nt, Human
ccauaggaauaaccacaaccca

SEQ ID NO: 366665 - RNA, 32 nt, Human
ccauaggacauuucacacaguccuuagaaccc

SEQ ID NO: 366666 - RNA, 32 nt, Human
ccauaggacuuaaaggugauuuggaugcguug

SEQ ID NO: 366667 - RNA, 32 nt, Human
ccauaggagagcugggggcaggagaauggggu

SEQ ID NO: 366668 - RNA, 32 nt, Human
ccauaggaggauggacagggagucggggagau

SEQ ID NO: 366669 - RNA, 21 nt, Human
ccauaggcacagcacauccca

SEQ ID NO: 366670 - RNA, 32 nt, Human
ccauaggcagaggcaggccuuccuacacccua

SEQ ID NO: 366671 - RNA, 32 nt, Human
ccauaggcauuuuccagaauuccucaugucac

SEQ ID NO: 366672 - RNA, 32 nt, Human
ccauaggcugagaugaggcacagggucugguu

SEQ ID NO: 366673 - RNA, 32 nt, Human
ccauaggcuuguucacaugcacgcagccaguu

SEQ ID NO: 366674 - RNA, 20 nt, Human
ccauagggagagcccuccaa

SEQ ID NO: 366675 - RNA, 32 nt, Human
ccauagggcuuccauggguggaaacuugugag

SEQ ID NO: 366676 - RNA, 32 nt, Human
ccauaggguaacugugguuaccgaggcaauac

SEQ ID NO: 366677 - RNA, 22 nt, Human
ccauagggugaauaaaggaaug

SEQ ID NO: 366678 - RNA, 32 nt, Human
ccauagguagugcuggcuccaggugaagacuu

SEQ ID NO: 366679 - RNA, 32 nt, Human
ccauagguuuugcauaauguguuuccauuuuc

SEQ ID NO: 366680 - RNA, 32 nt, Human
ccauaguaaagaaaaugacagaucguggucag

SEQ ID NO: 366681 - RNA, 24 nt, Human
ccauagucaccaaauucuguuuua

SEQ ID NO: 366682 - RNA, 32 nt, Human
ccauagucccucaauaagauucagaggaagaa

SEQ ID NO: 366683 - RNA, 32 nt, Human
ccauaguccuguaauucauuuugcuuaaacga

SEQ ID NO: 366684 - RNA, 32 nt, Human
ccauagucucuuauucacccuggaccaacagg

SEQ ID NO: 366685 - RNA, 32 nt, Human
ccauagucuggcugcauuacuggucauuugac

SEQ ID NO: 366686 - RNA, 32 nt, Human
ccauagucuuagcuacucaggaggcugaggag

SEQ ID NO: 366687 - RNA, 31 nt, Human
ccauagugacuucuccaccaagcuggagaag

SEQ ID NO: 366688 - RNA, 22 nt, Human
ccauagugcuagaauuacaggc

SEQ ID NO: 366689 - RNA, 24 nt, Human
ccauagugcugggauuacaggugu

SEQ ID NO: 366690 - RNA, 31 nt, Human
ccauaguggaggcugggaugggugagagaau

SEQ ID NO: 366691 - RNA, 24 nt, Human
ccauaguggcucgugccuguaauc

SEQ ID NO: 366692 - RNA, 32 nt, Human
ccauaguggcugucaucccagcacuuuaggag

SEQ ID NO: 366693 - RNA, 32 nt, Human
ccauagugggcucuggcuuuucuugaauagau

SEQ ID NO: 366694 - RNA, 32 nt, Human
ccauaguuacagccacuacauccccaccgccg

SEQ ID NO: 366695 - RNA, 32 nt, Human
ccauaguucuccaacagagaaaucuugaaaag

SEQ ID NO: 366696 - RNA, 32 nt, Human
ccauaguucugccuccccagcuucuccucccc

SEQ ID NO: 366697 - RNA, 32 nt, Human
ccauaguuucuggggagggguggagaacucac

SEQ ID NO: 366698 - RNA, 32 nt, Human
ccauauaaaaugguauuugaaagugagaguuc

SEQ ID NO: 366699 - RNA, 32 nt, Human
ccauauaaagaaauguguuauguauguugugc

SEQ ID NO: 366700 - RNA, 32 nt, Human
ccauauacaaucuuccuuccuuagguaauuug

SEQ ID NO: 366701 - RNA, 20 nt, Human
ccauauacuaacauccccca

SEQ ID NO: 366702 - RNA, 32 nt, Human
ccauauacugugcugguugaggccaaagguua

SEQ ID NO: 366703 - RNA, 32 nt, Human
ccauaucaaauuccucagcuuuguucugugcc

SEQ ID NO: 366704 - RNA, 32 nt, Human
ccauaucacaccaccaaaggcuuuuggaccau

SEQ ID NO: 366705 - RNA, 32 nt, Human
ccauaucacugaggguacaggucuucacagaa

SEQ ID NO: 366706 - RNA, 32 nt, Human
ccauaucagaagaugaugaauugugucaggac

SEQ ID NO: 366707 - RNA, 32 nt, Human
ccauaucaggcuaugaaaugaagagaaaauga

SEQ ID NO: 366708 - RNA, 20 nt, Human
ccauaucaguaacuucgagu

SEQ ID NO: 366709 - RNA, 32 nt, Human
ccauaucaucaaggagcugauaaucuagugga

SEQ ID NO: 366710 - RNA, 32 nt, Human
ccauauccacagguuucacaccugcaaccaaa

SEQ ID NO: 366711 - RNA, 32 nt, Human
ccauauccaucuuucacaucaaugucuguccu

SEQ ID NO: 366712 - RNA, 32 nt, Human
ccauauccccagugcugggauggcacacaggu

SEQ ID NO: 366713 - RNA, 32 nt, Human
ccauauccuacagauccucccauuucuaggga

SEQ ID NO: 366714 - RNA, 32 nt, Human
ccauauccugccaugugagcucagggaaugca

SEQ ID NO: 366715 - RNA, 20 nt, Human
ccauauccugguccuuggca

SEQ ID NO: 366716 - RNA, 32 nt, Human
ccauaucucauuccgccccagcuacugaggga

SEQ ID NO: 366717 - RNA, 31 nt, Human
ccauaucuggguggagaaugggugaaaagua

SEQ ID NO: 366718 - RNA, 32 nt, Human
ccauaucuggguggagaaugggugaaaaguac

SEQ ID NO: 366719 - RNA, 32 nt, Human
ccauaucuucuccagaaggcaaauacuuuugu

SEQ ID NO: 366720 - RNA, 32 nt, Human
ccauaucuuggcuauugugaauaauccugcag

SEQ ID NO: 366721 - RNA, 32 nt, Human
ccauaugaaggagcaggaggagaggaagaaac

SEQ ID NO: 366722 - RNA, 32 nt, Human
ccauaugacaauuucaaaaugcaugugauugg

SEQ ID NO: 366723 - RNA, 32 nt, Human
ccauaugccacucuguaccccaaagagaguuc

SEQ ID NO: 366724 - RNA, 23 nt, Human
ccauaugccuccccuggccccca

SEQ ID NO: 366725 - RNA, 21 nt, Human
ccauauggaauagggauccac

SEQ ID NO: 366726 - RNA, 32 nt, Human
ccauauggaguacugaucagcccacacuugcc

SEQ ID NO: 366727 - RNA, 29 nt, Human
ccauaugggggcugcugaaaaguugguau

SEQ ID NO: 366728 - RNA, 32 nt, Human
ccauaugguaugcacauguagccaauauuggu

SEQ ID NO: 366729 - RNA, 32 nt, Human
ccauauggucucaagaugucaaagcaaaacaa

SEQ ID NO: 366730 - RNA, 32 nt, Human
ccauauguaaauaccaccuugcauuucauugu

SEQ ID NO: 366731 - RNA, 21 nt, Human
ccauauguaccccauccccca

SEQ ID NO: 366732 - RNA, 32 nt, Human
ccauaugugucuguaagagagacagagaccaa

SEQ ID NO: 366733 - RNA, 32 nt, Human
ccauauguugcccaggcuggucucgaacuccu

SEQ ID NO: 366734 - RNA, 32 nt, Human
ccauauguuuuacgguuaucugugcuauaaac

SEQ ID NO: 366735 - RNA, 23 nt, Human
ccauauuagccuggcuggucuca

SEQ ID NO: 366736 - RNA, 32 nt, Human
ccauauuagcuuccagagggugagugagggac

SEQ ID NO: 366737 - RNA, 23 nt, Human
ccauauuaggaaaaggccugcca

SEQ ID NO: 366738 - RNA, 32 nt, Human
ccauauucuuugcuccucucugcuccaauacc

SEQ ID NO: 366739 - RNA, 32 nt, Human
ccauauugacaaaugagggaacaggugguguc

SEQ ID NO: 366740 - RNA, 32 nt, Human
ccauauugcccaggcuggucucgaaugccugg

SEQ ID NO: 366741 - RNA, 23 nt, Human
ccauauugcccaggcuggucuua

SEQ ID NO: 366742 - RNA, 23 nt, Human
ccauauugcccaggguggucuca

SEQ ID NO: 366743 - RNA, 23 nt, Human
ccauauuggccaggcuggucuca

SEQ ID NO: 366744 - RNA, 32 nt, Human
ccauauuucugggcagagauuuacauugggcc

SEQ ID NO: 366745 - RNA, 32 nt, Human
ccauauuucuucuuccccuuuuagguaaacuu

SEQ ID NO: 366746 - RNA, 32 nt, Human
ccauauuuguucugcauucccugccacaagga

SEQ ID NO: 366747 - RNA, 32 nt, Human
ccauauuuuaucaauuuuaagaccaugaguug

SEQ ID NO: 366748 - RNA, 32 nt, Human
ccauauuuuguaggggaaauagaacacccuac

SEQ ID NO: 366749 - RNA, 32 nt, Human
ccauauuuugugaagaaagugcaugcaggaau

SEQ ID NO: 366750 - RNA, 32 nt, Human
ccaucaaaagugaaaguggcuucuagguacug

SEQ ID NO: 366751 - RNA, 32 nt, Human
ccaucaaaguuacuuccagccuggagagaacc

SEQ ID NO: 366752 - RNA, 32 nt, Human
ccaucaacauuacuuuucuuucuuaaggcaag

SEQ ID NO: 366753 - RNA, 32 nt, Human
ccaucaaccuauauugaaugucauauguccag

SEQ ID NO: 366754 - RNA, 32 nt, Human
ccaucaacuucaccaugagucaaacaaggaag

SEQ ID NO: 366755 - RNA, 32 nt, Human
ccaucaagaaggacuggaaggacuggcccagc

SEQ ID NO: 366756 - RNA, 24 nt, Human
ccaucaaggacaaggaggaaccuc

SEQ ID NO: 366757 - RNA, 32 nt, Human
ccaucaaggcgggagggccugcagugauucag

SEQ ID NO: 366758 - RNA, 32 nt, Human
ccaucaaguggacuggggcagugcaguagcac

SEQ ID NO: 366759 - RNA, 19 nt, Human
ccaucaauuuucuauccuu

SEQ ID NO: 366760 - RNA, 32 nt, Human
ccaucacaaaggaaccgcccagggagaagcag

SEQ ID NO: 366761 - RNA, 32 nt, Human
ccaucacaccugagaugucagacaugggaagu

SEQ ID NO: 366762 - RNA, 32 nt, Human
ccaucacagacuccccugacaaccuuuccugg

SEQ ID NO: 366763 - RNA, 32 nt, Human
ccaucacagagcaguccuugcaggugccuuuc

SEQ ID NO: 366764 - RNA, 32 nt, Human
ccaucacagcacacgcuguccugcauugcagc

SEQ ID NO: 366765 - RNA, 32 nt, Human
ccaucacagccaugcugacugagugacuggag

SEQ ID NO: 366766 - RNA, 32 nt, Human
ccaucacaguccugcccuucacccucaagcac

SEQ ID NO: 366767 - RNA, 32 nt, Human
ccaucacaugaccacauagcaugaggccacug

SEQ ID NO: 366768 - RNA, 32 nt, Human
ccaucaccaagaggagguucagggaagcugca

SEQ ID NO: 366769 - RNA, 32 nt, Human
ccaucaccaccaccaucaccaccaccaccagu

SEQ ID NO: 366770 - RNA, 32 nt, Human
ccaucaccagaggaagagagcuuggcaggaaa

SEQ ID NO: 366771 - RNA, 23 nt, Human
ccaucaccaucacccacugcuca

SEQ ID NO: 366772 - RNA, 32 nt, Human
ccaucaccaucccacugacucugugagaacau

SEQ ID NO: 366773 - RNA, 32 nt, Human
ccaucacccaggcuggaguccaguggugugau

SEQ ID NO: 366774 - RNA, 20 nt, Human
ccaucacccaggugcucagu

SEQ ID NO: 366775 - RNA, 32 nt, Human
ccaucaccccagacccaugcaggaagagccag

SEQ ID NO: 366776 - RNA, 32 nt, Human
ccaucaccccggcuaauucuguauuuuuagua

SEQ ID NO: 366777 - RNA, 32 nt, Human
ccaucaccccuggcuauuuuuguauuuuuagu

SEQ ID NO: 366778 - RNA, 32 nt, Human
ccaucacccucagcuacuaguggcuuugcuuu

SEQ ID NO: 366779 - RNA, 32 nt, Human
ccaucaccucaacuccagccagggaggaauag

SEQ ID NO: 366780 - RNA, 32 nt, Human
ccaucaccuccaguuuggcuucugagcagaga

SEQ ID NO: 366781 - RNA, 32 nt, Human
ccaucaccuccccuuggccccucccucuucau

SEQ ID NO: 366782 - RNA, 32 nt, Human
ccaucaccugcucugcucuuacaaggaucagu

SEQ ID NO: 366783 - RNA, 32 nt, Human
ccaucaccugcucugcucuuacaaggauccga

SEQ ID NO: 366784 - RNA, 32 nt, Human
ccaucaccugcucugcucuuauaaggaucugg

SEQ ID NO: 366785 - RNA, 17 nt, Human
ccaucaccuuguccccu

SEQ ID NO: 366786 - RNA, 32 nt, Human
ccaucacgccucgcucccuccuggcccucugg

SEQ ID NO: 366787 - RNA, 20 nt, Human
ccaucacuaccaaccagggu

SEQ ID NO: 366788 - RNA, 32 nt, Human
ccaucacuacuaaacauacaaaauuagccggg

SEQ ID NO: 366789 - RNA, 19 nt, Human
ccaucacuacuuuucagaa

SEQ ID NO: 366790 - RNA, 32 nt, Human
ccaucacucaggcuggaguacagugcugagau

SEQ ID NO: 366791 - RNA, 16 nt, Human
ccaucacucuaccucu

SEQ ID NO: 366792 - RNA, 32 nt, Human
ccaucacucucauccuguauuuuuauaagaaa

SEQ ID NO: 366793 - RNA, 32 nt, Human
ccaucacucucuuccuccucuagacucugugu

SEQ ID NO: 366794 - RNA, 32 nt, Human
ccaucacucugccucccucccaccucuugucc

SEQ ID NO: 366795 - RNA, 32 nt, Human
ccaucacugagcuccacuccuuccucauuuug

SEQ ID NO: 366796 - RNA, 32 nt, Human
ccaucacugauauuaaaaggcuugaucaugau

SEQ ID NO: 366797 - RNA, 22 nt, Human
ccaucacugccaacugcagggg

SEQ ID NO: 366798 - RNA, 19 nt, Human
ccaucacugccuucuugaa

SEQ ID NO: 366799 - RNA, 32 nt, Human
ccaucacugcgccacugcuccguggaggaggu

SEQ ID NO: 366800 - RNA, 22 nt, Human
ccaucacugcuggcagccuggg

SEQ ID NO: 366801 - RNA, 32 nt, Human
ccaucacugcugucccuccugaggucuggauu

SEQ ID NO: 366802 - RNA, 19 nt, Human
ccaucacugcuguuccucc

SEQ ID NO: 366803 - RNA, 32 nt, Human
ccaucacuggacugcuggacaggcucagugga

SEQ ID NO: 366804 - RNA, 32 nt, Human
ccaucacuggagguauuccagcagagucuagg

SEQ ID NO: 366805 - RNA, 32 nt, Human
ccaucacugugacaucugccugggcuugagug

SEQ ID NO: 366806 - RNA, 32 nt, Human
ccaucacuguucuggcaccggagaaaggauuc

SEQ ID NO: 366807 - RNA, 17 nt, Human
ccaucacuugcccagag

SEQ ID NO: 366808 - RNA, 18 nt, Human
ccaucacuugccuuggua

SEQ ID NO: 366809 - RNA, 32 nt, Human
ccaucacuuugagaggccaggaguuugagacc

SEQ ID NO: 366810 - RNA, 32 nt, Human
ccaucagaaaggaccuaugaauuuguacuuuu

SEQ ID NO: 366811 - RNA, 32 nt, Human
ccaucagaacaagggcuaaggguuuauggguc

SEQ ID NO: 366812 - RNA, 32 nt, Human
ccaucagaacagcuccaccgggacuugugggc

SEQ ID NO: 366813 - RNA, 32 nt, Human
ccaucagaaggagaaggaaggagacucaccuc

SEQ ID NO: 366814 - RNA, 32 nt, Human
ccaucagaaggugaguacaccaggugggcagg

SEQ ID NO: 366815 - RNA, 32 nt, Human
ccaucagaauugcuucucagcacuuuggguaa

SEQ ID NO: 366816 - RNA, 32 nt, Human
ccaucagacagggucuggaguggggcugccgu

SEQ ID NO: 366817 - RNA, 32 nt, Human
ccaucagacgcugcuuucuccucccagagacc

SEQ ID NO: 366818 - RNA, 32 nt, Human
ccaucagagagcaaaccacauguucugucuug

SEQ ID NO: 366819 - RNA, 32 nt, Human
ccaucagagaugacauucuaugugauauuuuu

SEQ ID NO: 366820 - RNA, 32 nt, Human
ccaucagagauucuaggagagcugucgacaac

SEQ ID NO: 366821 - RNA, 32 nt, Human
ccaucagagcaguggcuggggcacuggaagua

SEQ ID NO: 366822 - RNA, 32 nt, Human
ccaucagaggacaccuguacuggagagcaaca

SEQ ID NO: 366823 - RNA, 32 nt, Human
ccaucagaucaaaggagggagagcuguuuugg

SEQ ID NO: 366824 - RNA, 32 nt, Human
ccaucagcaagaaccugaguuugaagugacaa

SEQ ID NO: 366825 - RNA, 23 nt, Human
ccaucagcaccaggccacuggca

SEQ ID NO: 366826 - RNA, 32 nt, Human
ccaucagcaggccuuaccugcacuccaggcuc

SEQ ID NO: 366827 - RNA, 21 nt, Human
ccaucagccagcaaccuuaga

SEQ ID NO: 366828 - RNA, 32 nt, Human
ccaucagccaggcuggagugcaguggugcaau

SEQ ID NO: 366829 - RNA, 20 nt, Human
ccaucagccaugugcugcua

SEQ ID NO: 366830 - RNA, 32 nt, Human
ccaucagccccaaacuccugucucacuuccag

SEQ ID NO: 366831 - RNA, 19 nt, Human
ccaucagcccgccaggguc

SEQ ID NO: 366832 - RNA, 32 nt, Human
ccaucagcccugcccagaugucagccugggag

SEQ ID NO: 366833 - RNA, 32 nt, Human
ccaucagccucaccagcaaagcagagaugaga

SEQ ID NO: 366834 - RNA, 24 nt, Human
ccaucagcgcggccaggggcccag

SEQ ID NO: 366835 - RNA, 32 nt, Human
ccaucagcuaaaagagguagauagcagugguu

SEQ ID NO: 366836 - RNA, 21 nt, Human
ccaucagcuaaacuuuacaga

SEQ ID NO: 366837 - RNA, 32 nt, Human
ccaucagcucacugugguucuugcuuugggug

SEQ ID NO: 366838 - RNA, 32 nt, Human
ccaucagcuccagacuuccugggacaucucgg

SEQ ID NO: 366839 - RNA, 24 nt, Human
ccaucagcugaagcacucuucaga

SEQ ID NO: 366840 - RNA, 32 nt, Human
ccaucaggaaccaagcaaaggccagauagccu

SEQ ID NO: 366841 - RNA, 32 nt, Human
ccaucaggcaugcucucccccaccucugucca

SEQ ID NO: 366842 - RNA, 32 nt, Human
ccaucaggccuaugucaacaagacauaauccg

SEQ ID NO: 366843 - RNA, 32 nt, Human
ccaucaggccuggccucaguggccagccacau

SEQ ID NO: 366844 - RNA, 32 nt, Human
ccaucagggacaggaugaccuggagaacuuag

SEQ ID NO: 366845 - RNA, 32 nt, Human
ccaucagggccucccuugcccgccugagagca

SEQ ID NO: 366846 - RNA, 32 nt, Human
ccaucagggguagcgagguugcaggagcuggc

SEQ ID NO: 366847 - RNA, 32 nt, Human
ccaucaguagagacauugcuguuccugcccau

SEQ ID NO: 366848 - RNA, 32 nt, Human
ccaucaguccauuccaguuggcaccagccuga

SEQ ID NO: 366849 - RNA, 32 nt, Human
ccaucagugccccgucuacagcucccccagcu

SEQ ID NO: 366850 - RNA, 32 nt, Human
ccaucaguggcugaggccagagacccacacca

SEQ ID NO: 366851 - RNA, 32 nt, Human
ccaucaguggugcuggcugcuguugggagcuc

SEQ ID NO: 366852 - RNA, 22 nt, Human
ccaucagugucaucaccaaagc

SEQ ID NO: 366853 - RNA, 23 nt, Human
ccaucagugucccuagggacagg

SEQ ID NO: 366854 - RNA, 32 nt, Human
ccaucaguuagagcaagaaacagggauccgaa

SEQ ID NO: 366855 - RNA, 32 nt, Human
ccaucaguucuuccuuucuuuuuccucucuaa

SEQ ID NO: 366856 - RNA, 32 nt, Human
ccaucaguuuuccucccucucagaccugucuu

SEQ ID NO: 366857 - RNA, 32 nt, Human
ccaucauaaagcagagacuuacaugagugaaa

SEQ ID NO: 366858 - RNA, 32 nt, Human
ccaucauaggcuucauaguggagagaaaccuu

SEQ ID NO: 366859 - RNA, 16 nt, Human
ccaucaucacccagaa

SEQ ID NO: 366860 - RNA, 32 nt, Human
ccaucauccaggcugcagugcagcagcgccau

SEQ ID NO: 366861 - RNA, 32 nt, Human
ccaucaucccagccccacgagaucuuacccgc

SEQ ID NO: 366862 - RNA, 32 nt, Human
ccaucaucccccaagagccaucaucuuaggag

SEQ ID NO: 366863 - RNA, 20 nt, Human
ccaucauccucuggcuuggc

SEQ ID NO: 366864 - RNA, 32 nt, Human
ccaucauccugacugccagcagucuggccaga

SEQ ID NO: 366865 - RNA, 32 nt, Human
ccaucauccuucaacagccacagucugaauug

SEQ ID NO: 366866 - RNA, 32 nt, Human
ccaucaucuccugccuuccuccugggcccucu

SEQ ID NO: 366867 - RNA, 32 nt, Human
ccaucaugccugacuaauuuuguauuuuuagu

SEQ ID NO: 366868 - RNA, 32 nt, Human
ccaucaugcugagggagcagauucuucccaag

SEQ ID NO: 366869 - RNA, 30 nt, Human
ccaucaugcugcugccuguguucacccuga

SEQ ID NO: 366870 - RNA, 32 nt, Human
ccaucauggagcagaggugaggagaggcagcc

SEQ ID NO: 366871 - RNA, 32 nt, Human
ccaucaugggagacauccagauggcacaccag

SEQ ID NO: 366872 - RNA, 20 nt, Human
ccaucauggugaaacccugu

SEQ ID NO: 366873 - RNA, 32 nt, Human
ccaucaugucucaaacuuggacccacgaacac

SEQ ID NO: 366874 - RNA, 32 nt, Human
ccaucauguguuucacaccacaauucugugcc

SEQ ID NO: 366875 - RNA, 20 nt, Human
ccaucauguuuauucauccu

SEQ ID NO: 366876 - RNA, 19 nt, Human
ccaucauuaacaccaagaa

SEQ ID NO: 366877 - RNA, 32 nt, Human
ccaucauuagcuuccuccugggucauuuacag

SEQ ID NO: 366878 - RNA, 32 nt, Human
ccaucauucaucccuuaacaggcacauuagau

SEQ ID NO: 366879 - RNA, 32 nt, Human
ccaucauucugucuguccacacgggcaucauu

SEQ ID NO: 366880 - RNA, 32 nt, Human
ccaucauucuguguggaggugaguggaguggg

SEQ ID NO: 366881 - RNA, 32 nt, Human
ccaucauuucacuaaagcggaaugaggaugcc

SEQ ID NO: 366882 - RNA, 18 nt, Human
ccauccaaacauccaucc

SEQ ID NO: 366883 - RNA, 32 nt, Human
ccauccaaacuaagauaugcagagagaugcug

SEQ ID NO: 366884 - RNA, 32 nt, Human
ccauccacaagaacuuuccuccaagugaggcc

SEQ ID NO: 366885 - RNA, 32 nt, Human
ccauccacacagaagccugaggaaaagggcuc

SEQ ID NO: 366886 - RNA, 32 nt, Human
ccauccacagccaugaauuuccuccggcgacg

SEQ ID NO: 366887 - RNA, 32 nt, Human
ccauccacaucagggagcuuuccccaggcaaa

SEQ ID NO: 366888 - RNA, 21 nt, Human
ccauccaccaaggcuccaucc

SEQ ID NO: 366889 - RNA, 18 nt, Human
ccauccaccaccccgugc

SEQ ID NO: 366890 - RNA, 32 nt, Human
ccauccacccaccuuucccucauucccucucu

SEQ ID NO: 366891 - RNA, 32 nt, Human
ccauccacccgcuucagggaggaacuggacuc

SEQ ID NO: 366892 - RNA, 19 nt, Human
ccauccacccuuccguccu

SEQ ID NO: 366893 - RNA, 32 nt, Human
ccauccacuucucucuccuucucccucuguca

SEQ ID NO: 366894 - RNA, 23 nt, Human
ccauccagaaaauuacaacucca

SEQ ID NO: 366895 - RNA, 32 nt, Human
ccauccagagugagugccuggggcagagugag

SEQ ID NO: 366896 - RNA, 21 nt, Human
ccauccagauaacuccauccu

SEQ ID NO: 366897 - RNA, 20 nt, Human
ccauccagaucccccuuccc

SEQ ID NO: 366898 - RNA, 32 nt, Human
ccauccagccaaagaccugucauuucaaccuc

SEQ ID NO: 366899 - RNA, 32 nt, Human
ccauccagccugggugacagggcgagacucug

SEQ ID NO: 366900 - RNA, 32 nt, Human
ccauccagccugggugacagggugagacucug

SEQ ID NO: 366901 - RNA, 32 nt, Human
ccauccagcuucuagccucccuucucuggaau

SEQ ID NO: 366902 - RNA, 21 nt, Human
ccauccaggaauggaguccau

SEQ ID NO: 366903 - RNA, 32 nt, Human
ccauccaggaaugggagcccggaguagacuga

SEQ ID NO: 366904 - RNA, 26 nt, Human
ccauccaggagcucucacggccccau

SEQ ID NO: 366905 - RNA, 32 nt, Human
ccauccaggccugcuguuccaaacuuuuucag

SEQ ID NO: 366906 - RNA, 32 nt, Human
ccauccaggggcaguggcaacagggagauucc

SEQ ID NO: 366907 - RNA, 32 nt, Human
ccauccaguacauucuuucuucuuucaugaaa

SEQ ID NO: 366908 - RNA, 32 nt, Human
ccauccaguagaggagaaagacgucgagacag

SEQ ID NO: 366909 - RNA, 32 nt, Human
ccauccagugccuguccucgccacagggccuc

SEQ ID NO: 366910 - RNA, 22 nt, Human
ccauccaguuuucccgugcuga

SEQ ID NO: 366911 - RNA, 32 nt, Human
ccauccauaacuuggaauacugcucuggaaug

SEQ ID NO: 366912 - RNA, 32 nt, Human
ccauccauacaguguggagagcagaggagugg

SEQ ID NO: 366913 - RNA, 19 nt, Human
ccauccauacuggcauccu

SEQ ID NO: 366914 - RNA, 19 nt, Human
ccauccauaguccaucucc

SEQ ID NO: 366915 - RNA, 18 nt, Human
ccauccaucaaguccauc

SEQ ID NO: 366916 - RNA, 17 nt, Human
ccauccaucacccaucu

SEQ ID NO: 366917 - RNA, 17 nt, Human
ccauccaucagcucccu

SEQ ID NO: 366918 - RNA, 32 nt, Human
ccauccaucauaaccaccccagccugggaagg

SEQ ID NO: 366919 - RNA, 17 nt, Human
ccauccaucaucuaccc

SEQ ID NO: 366920 - RNA, 18 nt, Human
ccauccauccaaacaucc

SEQ ID NO: 366921 - RNA, 20 nt, Human
ccauccauccacacauaucc

SEQ ID NO: 366922 - RNA, 20 nt, Human
ccauccauccagacagcccu

SEQ ID NO: 366923 - RNA, 18 nt, Human
ccauccauccaggcaccc

SEQ ID NO: 366924 - RNA, 20 nt, Human
ccauccauccauccacucuu

SEQ ID NO: 366925 - RNA, 18 nt, Human
ccauccauccauccaucc

SEQ ID NO: 366926 - RNA, 18 nt, Human
ccauccauccauccgucc

SEQ ID NO: 366927 - RNA, 32 nt, Human
ccauccauccaugaccagaggauuauuuuccu

SEQ ID NO: 366928 - RNA, 20 nt, Human
ccauccauccaugccauacc

SEQ ID NO: 366929 - RNA, 32 nt, Human
ccauccauccaugccauaccacuugucagggc

SEQ ID NO: 366930 - RNA, 19 nt, Human
ccauccauccauuacucuu

SEQ ID NO: 366931 - RNA, 19 nt, Human
ccauccaucccacccuccu

SEQ ID NO: 366932 - RNA, 19 nt, Human
ccauccaucccaugccucc

SEQ ID NO: 366933 - RNA, 18 nt, Human
ccauccaucccccucuuu

SEQ ID NO: 366934 - RNA, 16 nt, Human
ccauccaucccuauuc

SEQ ID NO: 366935 - RNA, 18 nt, Human
ccauccauccgauccucc

SEQ ID NO: 366936 - RNA, 19 nt, Human
ccauccauccguccaccuu

SEQ ID NO: 366937 - RNA, 18 nt, Human
ccauccauccuccuaccu

SEQ ID NO: 366938 - RNA, 16 nt, Human
ccauccauccucuucc

SEQ ID NO: 366939 - RNA, 18 nt, Human
ccauccaucuccgucucc

SEQ ID NO: 366940 - RNA, 32 nt, Human
ccauccaucuccgucucccuagagcaaggaau

SEQ ID NO: 366941 - RNA, 18 nt, Human
ccauccaucuguccaucc

SEQ ID NO: 366942 - RNA, 18 nt, Human
ccauccaucuuuccaucc

SEQ ID NO: 366943 - RNA, 32 nt, Human
ccauccaugagcuguaucuugaucugucugac

SEQ ID NO: 366944 - RNA, 23 nt, Human
ccauccaugaggacauucagagc

SEQ ID NO: 366945 - RNA, 20 nt, Human
ccauccauggcccagccccu

SEQ ID NO: 366946 - RNA, 20 nt, Human
ccauccaugggccccaccuu

SEQ ID NO: 366947 - RNA, 22 nt, Human
ccauccaugugcuuccagggug

SEQ ID NO: 366948 - RNA, 32 nt, Human
ccauccauuaagcugcuaucucagccuguccc

SEQ ID NO: 366949 - RNA, 18 nt, Human
ccauccauuauuuaucuu

SEQ ID NO: 366950 - RNA, 19 nt, Human
ccaucccaaacugcauuua

SEQ ID NO: 366951 - RNA, 32 nt, Human
ccaucccaacacuccugucugugggacuugau

SEQ ID NO: 366952 - RNA, 32 nt, Human
ccaucccaacccagggaggccugugucacucu

SEQ ID NO: 366953 - RNA, 31 nt, Human
ccaucccaagauuauguccucacuuauaacu

SEQ ID NO: 366954 - RNA, 32 nt, Human
ccaucccaagccuuucaccaaugagguacaac

SEQ ID NO: 366955 - RNA, 32 nt, Human
ccaucccacaugcugagccgccacaaagacca

SEQ ID NO: 366956 - RNA, 32 nt, Human
ccaucccaccucccgagccuuccucuucccgc

SEQ ID NO: 366957 - RNA, 32 nt, Human
ccaucccacuggcugcaggccuccugcugcuc

SEQ ID NO: 366958 - RNA, 32 nt, Human
ccaucccagaagaggagugggagccagcucag

SEQ ID NO: 366959 - RNA, 32 nt, Human
ccaucccaggagaccuugaaggaagccuuuga

SEQ ID NO: 366960 - RNA, 32 nt, Human
ccaucccaggcagagcaccacugugauuuguu

SEQ ID NO: 366961 - RNA, 20 nt, Human
ccaucccagggagcucagca

SEQ ID NO: 366962 - RNA, 32 nt, Human
ccaucccaggucuaaagccacaaguuucuuuu

SEQ ID NO: 366963 - RNA, 32 nt, Human
ccaucccagugaaauaaacauguauuagacac

SEQ ID NO: 366964 - RNA, 18 nt, Human
ccaucccauccaccccuu

SEQ ID NO: 366965 - RNA, 32 nt, Human
ccaucccaugucccuccagggggaccccacag

SEQ ID NO: 366966 - RNA, 32 nt, Human
ccaucccauucugcccccuccccacccugggu

SEQ ID NO: 366967 - RNA, 32 nt, Human
ccauccccaccuggcccugccagggcccugac

SEQ ID NO: 366968 - RNA, 32 nt, Human
ccauccccagcgauucccucucccaggcccca

SEQ ID NO: 366969 - RNA, 32 nt, Human
ccauccccagcguuuguucagugccuugguug

SEQ ID NO: 366970 - RNA, 32 nt, Human
ccauccccaggaggcgacauuccaaugcuagg

SEQ ID NO: 366971 - RNA, 32 nt, Human
ccauccccagggagguggcccaggaaggugcc

SEQ ID NO: 366972 - RNA, 21 nt, Human
ccauccccauuuggcuucucc

SEQ ID NO: 366973 - RNA, 21 nt, Human
ccaucccccacccaccugcca

SEQ ID NO: 366974 - RNA, 32 nt, Human
ccaucccccaggagaaugacagaagcaaagga

SEQ ID NO: 366975 - RNA, 32 nt, Human
ccaucccccaggaggacuggauuugguaugau

SEQ ID NO: 366976 - RNA, 32 nt, Human
ccaucccccaggaugacgccaccucugagauc

SEQ ID NO: 366977 - RNA, 32 nt, Human
ccaucccccagugguaccucaggacccagggc

SEQ ID NO: 366978 - RNA, 32 nt, Human
ccaucccccauggauacugaggcauagcugua

SEQ ID NO: 366979 - RNA, 32 nt, Human
ccaucccccugcccucguggccagcccggcug

SEQ ID NO: 366980 - RNA, 32 nt, Human
ccaucccccugccucccauucugcaccacacc

SEQ ID NO: 366981 - RNA, 32 nt, Human
ccaucccccugccugcugccucagucugcaac

SEQ ID NO: 366982 - RNA, 21 nt, Human
ccauccccgcugcuccucccu

SEQ ID NO: 366983 - RNA, 32 nt, Human
ccauccccggcagggagggaccgucagcucac

SEQ ID NO: 366984 - RNA, 32 nt, Human
ccauccccggccugggagguucaugcagaccc

SEQ ID NO: 366985 - RNA, 21 nt, Human
ccauccccuacuuuccucccu

SEQ ID NO: 366986 - RNA, 19 nt, Human
ccauccccucccucauccu

SEQ ID NO: 366987 - RNA, 18 nt, Human
ccauccccuccuagcaca

SEQ ID NO: 366988 - RNA, 32 nt, Human
ccauccccucuaccugcagacagggucggagg

SEQ ID NO: 366989 - RNA, 32 nt, Human
ccauccccugcagcuacuuggugacuuaacaa

SEQ ID NO: 366990 - RNA, 32 nt, Human
ccauccccugcucuccucaguagggcacccug

SEQ ID NO: 366991 - RNA, 32 nt, Human
ccauccccuuccccuugguguugaccuuugac

SEQ ID NO: 366992 - RNA, 32 nt, Human
ccauccccuugugugugucccucugcccagcu

SEQ ID NO: 366993 - RNA, 32 nt, Human
ccaucccggcccuccgccuccuggcccugccu

SEQ ID NO: 366994 - RNA, 19 nt, Human
ccaucccucacccaucuuu

SEQ ID NO: 366995 - RNA, 32 nt, Human
ccaucccucacccccacccucacuuucaaucc

SEQ ID NO: 366996 - RNA, 24 nt, Human
ccaucccuccacggucacguuccu

SEQ ID NO: 366997 - RNA, 32 nt, Human
ccaucccuccauccauccauucauccaucuau

SEQ ID NO: 366998 - RNA, 20 nt, Human
ccaucccuccauucauccuu

SEQ ID NO: 366999 - RNA, 23 nt, Human
ccaucccucccucccguccuucc

SEQ ID NO: 367000 - RNA, 32 nt, Human
ccaucccucccucccguccuuccccucuucuu

SEQ ID NO: 367001 - RNA, 22 nt, Human
ccaucccuccuccaacuuuucc

SEQ ID NO: 367002 - RNA, 21 nt, Human
ccaucccuccuucaucucccu

SEQ ID NO: 367003 - RNA, 32 nt, Human
ccaucccucgccgcugucccuuagcugacgcc

SEQ ID NO: 367004 - RNA, 32 nt, Human
ccaucccucggcaagcucaccaccucauccuu

SEQ ID NO: 367005 - RNA, 32 nt, Human
ccaucccucucaaucuucccugcccaggacug

SEQ ID NO: 367006 - RNA, 32 nt, Human
ccaucccucugucccuugcucuucuucaagcu

SEQ ID NO: 367007 - RNA, 32 nt, Human
ccaucccucuuuucuuuuguccuugccuuguu

SEQ ID NO: 367008 - RNA, 32 nt, Human
ccaucccugaccgggccgaggcugcuggaugc

SEQ ID NO: 367009 - RNA, 32 nt, Human
ccaucccugaggcucgcuggaaggcacugcuc

SEQ ID NO: 367010 - RNA, 32 nt, Human
ccaucccugcagcgcugcaccagcucccacgg

SEQ ID NO: 367011 - RNA, 32 nt, Human
ccaucccugcaugccugauccccaguuccuau

SEQ ID NO: 367012 - RNA, 32 nt, Human
ccaucccugccacauacaggugcucaauaaac

SEQ ID NO: 367013 - RNA, 32 nt, Human
ccaucccugcuccccacucucacuucccuucc

SEQ ID NO: 367014 - RNA, 18 nt, Human
ccaucccugcuuuuccca

SEQ ID NO: 367015 - RNA, 32 nt, Human
ccaucccuggauagcuauuugcacgaaucaug

SEQ ID NO: 367016 - RNA, 25 nt, Human
ccaucccuggcccagagcaggaggg

SEQ ID NO: 367017 - RNA, 32 nt, Human
ccaucccuggguuguggaucccuuccuuccag

SEQ ID NO: 367018 - RNA, 18 nt, Human
ccaucccuggugcugaca

SEQ ID NO: 367019 - RNA, 32 nt, Human
ccaucccugucccugucuggccuuacucuucc

SEQ ID NO: 367020 - RNA, 32 nt, Human
ccaucccuuaggugagcuucaaucuaagcauc

SEQ ID NO: 367021 - RNA, 21 nt, Human
ccaucccuuccgccgccuccu

SEQ ID NO: 367022 - RNA, 32 nt, Human
ccaucccuuccucccuuacccagcuaugauuc

SEQ ID NO: 367023 - RNA, 32 nt, Human
ccauccgcaggcucuguaguucugcuuucuau

SEQ ID NO: 367024 - RNA, 32 nt, Human
ccauccgccaccuccccucccgcugccccaga

SEQ ID NO: 367025 - RNA, 32 nt, Human
ccauccgccucaucuuguauuguuccauggac

SEQ ID NO: 367026 - RNA, 21 nt, Human
ccauccgcgccgccgccgccg

SEQ ID NO: 367027 - RNA, 32 nt, Human
ccauccgcgggugccggaucuggaccuaggug

SEQ ID NO: 367028 - RNA, 32 nt, Human
ccauccggugguuguucgagacuugcccaaug

SEQ ID NO: 367029 - RNA, 32 nt, Human
ccauccguauccagcagcgcggcuacuccgac

SEQ ID NO: 367030 - RNA, 32 nt, Human
ccauccgucagguggcguucagucucagaaua

SEQ ID NO: 367031 - RNA, 32 nt, Human
ccauccgucaucaucccuaaucugauacugga

SEQ ID NO: 367032 - RNA, 32 nt, Human
ccauccguccguccccuccugccugccccucu

SEQ ID NO: 367033 - RNA, 32 nt, Human
ccauccuaacagaaguaacccagcaagucaag

SEQ ID NO: 367034 - RNA, 32 nt, Human
ccauccuaggaccugggcagacccacauggcc

SEQ ID NO: 367035 - RNA, 32 nt, Human
ccauccuaggagaaaggcagaaugucauaauu

SEQ ID NO: 367036 - RNA, 32 nt, Human
ccauccucaaggcccugccccaguggacccug

SEQ ID NO: 367037 - RNA, 32 nt, Human
ccauccucaaggcccuuccccaguggcggcag

SEQ ID NO: 367038 - RNA, 32 nt, Human
ccauccucacacacucagccucugccucaggu

SEQ ID NO: 367039 - RNA, 32 nt, Human
ccauccucaccgcgaacgccacugugacgcgc

SEQ ID NO: 367040 - RNA, 32 nt, Human
ccauccucagcccucugcccacugggcccagg

SEQ ID NO: 367041 - RNA, 32 nt, Human
ccauccucauccaagucuucauugcuuuguca

SEQ ID NO: 367042 - RNA, 32 nt, Human
ccauccuccaaaucugugagcacuccaaguga

SEQ ID NO: 367043 - RNA, 32 nt, Human
ccauccuccaacaaaugcucagaucugcacca

SEQ ID NO: 367044 - RNA, 32 nt, Human
ccauccuccauggccagcuaagccaacaccuc

SEQ ID NO: 367045 - RNA, 32 nt, Human
ccauccucccaaagugcugggauuacaagugu

SEQ ID NO: 367046 - RNA, 32 nt, Human
ccauccucccaaauagaugggacuacugaugc

SEQ ID NO: 367047 - RNA, 32 nt, Human
ccauccuccccugcuccagccagggaggacug

SEQ ID NO: 367048 - RNA, 21 nt, Human
ccauccucccucccccagcca

SEQ ID NO: 367049 - RNA, 32 nt, Human
ccauccucccugcucagccacagccccugcuu

SEQ ID NO: 367050 - RNA, 32 nt, Human
ccauccuccugccucagccuccugaguagcua

SEQ ID NO: 367051 - RNA, 32 nt, Human
ccauccuccugccucagccuccugaguagcug

SEQ ID NO: 367052 - RNA, 32 nt, Human
ccauccuccugccucggccuccugagcagcug

SEQ ID NO: 367053 - RNA, 32 nt, Human
ccauccucgguuucccuguccuugccccgggc

SEQ ID NO: 367054 - RNA, 17 nt, Human
ccauccucuaucuaucc

SEQ ID NO: 367055 - RNA, 32 nt, Human
ccauccucuccaagauccaccagaacagauac

SEQ ID NO: 367056 - RNA, 32 nt, Human
ccauccucucccacuuccaucuggcaucccac

SEQ ID NO: 367057 - RNA, 32 nt, Human
ccauccucucccacuuccaucuggcgucccau

SEQ ID NO: 367058 - RNA, 32 nt, Human
ccauccucuccccuccuuccuccccuggguca

SEQ ID NO: 367059 - RNA, 32 nt, Human
ccauccucugaaccccaaucccccagccccac

SEQ ID NO: 367060 - RNA, 22 nt, Human
ccauccucugacuuccugggcc

SEQ ID NO: 367061 - RNA, 32 nt, Human
ccauccucugcccucuguuggcuguuguccuc

SEQ ID NO: 367062 - RNA, 32 nt, Human
ccauccucugcugcuccuuuaaaacaaauugc

SEQ ID NO: 367063 - RNA, 32 nt, Human
ccauccucuucuccccguacugccucaacccu

SEQ ID NO: 367064 - RNA, 32 nt, Human
ccauccugagccagggaacagccccaggguug

SEQ ID NO: 367065 - RNA, 32 nt, Human
ccauccugaugcuucagaccacccucccuucu

SEQ ID NO: 367066 - RNA, 20 nt, Human
ccauccugcccacagcucca

SEQ ID NO: 367067 - RNA, 19 nt, Human
ccauccugccccugcccac

SEQ ID NO: 367068 - RNA, 32 nt, Human
ccauccugcccuuguggcccccggcugcagcc

SEQ ID NO: 367069 - RNA, 32 nt, Human
ccauccugccugggcaucccuggugcugggga

SEQ ID NO: 367070 - RNA, 25 nt, Human
ccauccugcuaccaucaaacauuca

SEQ ID NO: 367071 - RNA, 32 nt, Human
ccauccugcucagauaugacuccugggcaauu

SEQ ID NO: 367072 - RNA, 32 nt, Human
ccauccugcucuccuccagccgagggacccug

SEQ ID NO: 367073 - RNA, 32 nt, Human
ccauccugcuucugcugcuguggcugcugcca

SEQ ID NO: 367074 - RNA, 32 nt, Human
ccauccuggaggcagcaggucggguagaguga

SEQ ID NO: 367075 - RNA, 32 nt, Human
ccauccuggaggggcaggcucugcgcaucugc

SEQ ID NO: 367076 - RNA, 32 nt, Human
ccauccuggcauauggaaggcagcaguugaau

SEQ ID NO: 367077 - RNA, 32 nt, Human
ccauccuggccaaaauggugaaaccucgucuc

SEQ ID NO: 367078 - RNA, 32 nt, Human
ccauccuggccaacacagugaaaccucgucuc

SEQ ID NO: 367079 - RNA, 32 nt, Human
ccauccuggccaacaugaugaaaccccgucuc

SEQ ID NO: 367080 - RNA, 32 nt, Human
ccauccuggccaacaugaugaaacccuaucuc

SEQ ID NO: 367081 - RNA, 32 nt, Human
ccauccuggccaacauggugaaaccucaucuc

SEQ ID NO: 367082 - RNA, 32 nt, Human
ccauccuggccaacauggugaaaccucgucuc

SEQ ID NO: 367083 - RNA, 32 nt, Human
ccauccuggccaacauggugaaaccugucucu

SEQ ID NO: 367084 - RNA, 32 nt, Human
ccauccuggccaacauggugaaaccuugucua

SEQ ID NO: 367085 - RNA, 32 nt, Human
ccauccuggcccagggcaucugggaggaaccg

SEQ ID NO: 367086 - RNA, 32 nt, Human
ccauccuggcuaacaaggugaaaccucgucuc

SEQ ID NO: 367087 - RNA, 32 nt, Human
ccauccuggcuaacacagugaaaccucaucuc

SEQ ID NO: 367088 - RNA, 32 nt, Human
ccauccuggcuaacacgaugaaaccccgucuc

SEQ ID NO: 367089 - RNA, 32 nt, Human
ccauccuggcuaacacggugaaaccucgucuc

SEQ ID NO: 367090 - RNA, 32 nt, Human
ccauccuggcuaaugcggugaaaccucaucuc

SEQ ID NO: 367091 - RNA, 32 nt, Human
ccauccuggcuacauggugaaaccccgucucu

SEQ ID NO: 367092 - RNA, 20 nt, Human
ccauccuggcugcugaucca

SEQ ID NO: 367093 - RNA, 32 nt, Human
ccauccugggaagccugccugugugcaccaag

SEQ ID NO: 367094 - RNA, 24 nt, Human
ccauccugggcaacaagaacgaaa

SEQ ID NO: 367095 - RNA, 32 nt, Human
ccauccugggcaacaagaacgaaacuccgucu

SEQ ID NO: 367096 - RNA, 32 nt, Human
ccauccugggcaacagagugagacuuugucuc

SEQ ID NO: 367097 - RNA, 32 nt, Human
ccauccugggcaacagagugaggcucugucug

SEQ ID NO: 367098 - RNA, 32 nt, Human
ccauccugggcaacagggugagaccuuaucuc

SEQ ID NO: 367099 - RNA, 32 nt, Human
ccauccugggcaacauaaugaaacaccaucuc

SEQ ID NO: 367100 - RNA, 32 nt, Human
ccauccugggcaacauagggagauccugucuc

SEQ ID NO: 367101 - RNA, 32 nt, Human
ccauccugggcaacauagugagacccugucuc

SEQ ID NO: 367102 - RNA, 32 nt, Human
ccauccugggcaacauggcgaaacccuaucuc

SEQ ID NO: 367103 - RNA, 32 nt, Human
ccauccugggcaauauggcaaaaccccaucuu

SEQ ID NO: 367104 - RNA, 32 nt, Human
ccauccugggcagaagcugaaggccagcuuca

SEQ ID NO: 367105 - RNA, 32 nt, Human
ccauccugucacuccuggaauaagaugccaga

SEQ ID NO: 367106 - RNA, 18 nt, Human
ccauccugucuucauccu

SEQ ID NO: 367107 - RNA, 32 nt, Human
ccauccugugcuucuguggcccccagcaagcu

SEQ ID NO: 367108 - RNA, 32 nt, Human
ccauccuguggccacgaugggggccaggacac

SEQ ID NO: 367109 - RNA, 32 nt, Human
ccauccuguggcuagaaccggcggggaagggg

SEQ ID NO: 367110 - RNA, 32 nt, Human
ccauccugugggcucugagacuuugcauggau

SEQ ID NO: 367111 - RNA, 32 nt, Human
ccauccuguuggccacacccagcuccauggau

SEQ ID NO: 367112 - RNA, 32 nt, Human
ccauccuuaccaccacaccacacgcacacucc

SEQ ID NO: 367113 - RNA, 32 nt, Human
ccauccuuauccacagucugggucccauccag

SEQ ID NO: 367114 - RNA, 32 nt, Human
ccauccuucaaaaacaacuaaaggaugauaug

SEQ ID NO: 367115 - RNA, 32 nt, Human
ccauccuuccagagaagucucugggaccuuuu

SEQ ID NO: 367116 - RNA, 32 nt, Human
ccauccuucccccagcugcuuccucggggagg

SEQ ID NO: 367117 - RNA, 32 nt, Human
ccauccuucuauucucuggucuucuauuuuug

SEQ ID NO: 367118 - RNA, 32 nt, Human
ccauccuucugccucacugucccuaguaguug

SEQ ID NO: 367119 - RNA, 32 nt, Human
ccauccuucuuuccuucauccuuuuccuucau

SEQ ID NO: 367120 - RNA, 32 nt, Human
ccauccuugaaaaggccacuucucagugaggg

SEQ ID NO: 367121 - RNA, 32 nt, Human
ccauccuugcccagccgguguggugcuugugu

SEQ ID NO: 367122 - RNA, 24 nt, Human
ccauccuugccuucaguucucucc

SEQ ID NO: 367123 - RNA, 24 nt, Human
ccauccuugccuugccgcucuaca

SEQ ID NO: 367124 - RNA, 32 nt, Human
ccauccuugcugucccuucacccuccaugccc

SEQ ID NO: 367125 - RNA, 32 nt, Human
ccauccuuggggaguggccuggagaggccucg

SEQ ID NO: 367126 - RNA, 20 nt, Human
ccauccuuguuuucccucca

SEQ ID NO: 367127 - RNA, 20 nt, Human
ccauccuuguuuugucccca

SEQ ID NO: 367128 - RNA, 21 nt, Human
ccauccuuuauaaauagucaa

SEQ ID NO: 367129 - RNA, 32 nt, Human
ccauccuuucccuacguuuucucccaucuuuu

SEQ ID NO: 367130 - RNA, 32 nt, Human
ccauccuuuccuagcuccauccuuccguccca

SEQ ID NO: 367131 - RNA, 32 nt, Human
ccauccuuuccucucuccucagggcgccucuc

SEQ ID NO: 367132 - RNA, 32 nt, Human
ccauccuuuucugcaaccccuccacuccccuc

SEQ ID NO: 367133 - RNA, 32 nt, Human
ccaucgaaaucccauucuccuguccagaggcc

SEQ ID NO: 367134 - RNA, 32 nt, Human
ccaucgagagcaucaaaugcuacuguucagca

SEQ ID NO: 367135 - RNA, 32 nt, Human
ccaucgagggagcaggagcaucaggcggccgg

SEQ ID NO: 367136 - RNA, 32 nt, Human
ccaucgagggcuccugagcucauccugaggac

SEQ ID NO: 367137 - RNA, 32 nt, Human
ccaucgagucucuggucucugccuucaggccc

SEQ ID NO: 367138 - RNA, 32 nt, Human
ccaucgaugaaggaauaucucuucucagaagg

SEQ ID NO: 367139 - RNA, 32 nt, Human
ccaucgauggggaacucacuuccuuuggaaaa

SEQ ID NO: 367140 - RNA, 18 nt, Human
ccaucgcaccccauccuu

SEQ ID NO: 367141 - RNA, 32 nt, Human
ccaucgcacuccagacuacagccugggugaca

SEQ ID NO: 367142 - RNA, 32 nt, Human
ccaucgcagaguucuuggcgcaccaaugacuc

SEQ ID NO: 367143 - RNA, 32 nt, Human
ccaucgcaugcccagggaccacugccuggcau

SEQ ID NO: 367144 - RNA, 32 nt, Human
ccaucgccacugccaccugccucccgcugaau

SEQ ID NO: 367145 - RNA, 32 nt, Human
ccaucgccauccaccggggcauggcccaggag

SEQ ID NO: 367146 - RNA, 32 nt, Human
ccaucgccauuuuugcuccaacugaggaaacu

SEQ ID NO: 367147 - RNA, 32 nt, Human
ccaucgcccaggccugggaugcagugauguga

SEQ ID NO: 367148 - RNA, 32 nt, Human
ccaucgcccaggcugcagugcagugacacgau

SEQ ID NO: 367149 - RNA, 32 nt, Human
ccaucgccuuccaaagucagcacucuacacuc

SEQ ID NO: 367150 - RNA, 32 nt, Human
ccaucgcgccacugcacucuagccugggugac

SEQ ID NO: 367151 - RNA, 29 nt, Human
ccaucgcgggcugcaucaucccccagcca

SEQ ID NO: 367152 - RNA, 32 nt, Human
ccaucgcugcagaccuuagaguggauguccgg

SEQ ID NO: 367153 - RNA, 32 nt, Human
ccaucgcugcagcugccauuggugccgaugac

SEQ ID NO: 367154 - RNA, 16 nt, Human
ccaucgcugccugcca

SEQ ID NO: 367155 - RNA, 32 nt, Human
ccaucgcugccuggcucugcgcugaccacggg

SEQ ID NO: 367156 - RNA, 23 nt, Human
ccaucggaaaggaauccacauca

SEQ ID NO: 367157 - RNA, 32 nt, Human
ccaucggacagcccccagccccaugaggaccc

SEQ ID NO: 367158 - RNA, 32 nt, Human
ccaucggaucacugccuucuuccuccucuugc

SEQ ID NO: 367159 - RNA, 32 nt, Human
ccaucggcaggcagugguucgguuuaagagau

SEQ ID NO: 367160 - RNA, 32 nt, Human
ccaucggccugaggggcagccugguggccaga

SEQ ID NO: 367161 - RNA, 32 nt, Human
ccaucgggaugguggaggcugugaaggccgug

SEQ ID NO: 367162 - RNA, 32 nt, Human
ccaucgggcaggugccuggucgggccuggcuu

SEQ ID NO: 367163 - RNA, 32 nt, Human
ccaucggggcugcggccagggcggagggagga

SEQ ID NO: 367164 - RNA, 32 nt, Human
ccaucguaagauugagccucaaguuugcaaua

SEQ ID NO: 367165 - RNA, 32 nt, Human
ccaucguaccacugcacuccagccuggaugac

SEQ ID NO: 367166 - RNA, 32 nt, Human
ccaucguaggcuucauacuggagagaaaccuu

SEQ ID NO: 367167 - RNA, 32 nt, Human
ccaucguccaggcuggagugcaguggcgcgau

SEQ ID NO: 367168 - RNA, 32 nt, Human
ccaucguccccaucguccuccuugucccugac

SEQ ID NO: 367169 - RNA, 22 nt, Human
ccaucguccuccuugucccuga

SEQ ID NO: 367170 - RNA, 32 nt, Human
ccaucgugcacacccacccauggugcacaccu

SEQ ID NO: 367171 - RNA, 17 nt, Human
ccaucguguacugcaga

SEQ ID NO: 367172 - RNA, 32 nt, Human
ccaucguguauauguaccacauuuuucucaug

SEQ ID NO: 367173 - RNA, 23 nt, Human
ccaucgugugagggaaaaugcuc

SEQ ID NO: 367174 - RNA, 32 nt, Human
ccaucguuuccucagggagacugggcggaggu

SEQ ID NO: 367175 - RNA, 22 nt, Human
ccaucuaaacccaccuuguuca

SEQ ID NO: 367176 - RNA, 22 nt, Human
ccaucuaaagaagaaaaagaaa

SEQ ID NO: 367177 - RNA, 32 nt, Human
ccaucuaaucuaacuucaagaucaucaggaua

SEQ ID NO: 367178 - RNA, 32 nt, Human
ccaucuacaggguucccuaggccagguggaga

SEQ ID NO: 367179 - RNA, 32 nt, Human
ccaucuacuuuuccacuccagagugggaaaaa

SEQ ID NO: 367180 - RNA, 18 nt, Human
ccaucuauccccauuccu

SEQ ID NO: 367181 - RNA, 32 nt, Human
ccaucucaaaaacaaaaacaaaacaaaacaac

SEQ ID NO: 367182 - RNA, 32 nt, Human
ccaucucaagaggcaucuucuacauguuuugu

SEQ ID NO: 367183 - RNA, 31 nt, Human
ccaucucacagcuggggacugagccagggcu

SEQ ID NO: 367184 - RNA, 32 nt, Human
ccaucucaccacacugcuuuacagucuuccug

SEQ ID NO: 367185 - RNA, 32 nt, Human
ccaucucaccaggagaaagagccacaucccca

SEQ ID NO: 367186 - RNA, 15 nt, Human
ccaucucacccaaga

SEQ ID NO: 367187 - RNA, 32 nt, Human
ccaucucaccucuucauucucuuguuacauuu

SEQ ID NO: 367188 - RNA, 32 nt, Human
ccaucucacucacacacacaggcauccauaca

SEQ ID NO: 367189 - RNA, 32 nt, Human
ccaucucacugcauucccuggcugcccgaccc

SEQ ID NO: 367190 - RNA, 32 nt, Human
ccaucucacuggacugcagacccggccuggug

SEQ ID NO: 367191 - RNA, 32 nt, Human
ccaucucacuucucuacugccucccagcccca

SEQ ID NO: 367192 - RNA, 32 nt, Human
ccaucucagaagagacuugacuuguggauggu

SEQ ID NO: 367193 - RNA, 32 nt, Human
ccaucucagaagccuuaacuuaaucacaucug

SEQ ID NO: 367194 - RNA, 32 nt, Human
ccaucucagccagcccugcucucucccucuuc

SEQ ID NO: 367195 - RNA, 32 nt, Human
ccaucucaguaggaacuugagggaagguugag

SEQ ID NO: 367196 - RNA, 32 nt, Human
ccaucucaugcagagcucccaccaagaggagc

SEQ ID NO: 367197 - RNA, 32 nt, Human
ccaucucaugccccuggcugggacguggcuca

SEQ ID NO: 367198 - RNA, 32 nt, Human
ccaucucaugcuggccuugguggaugggaugg

SEQ ID NO: 367199 - RNA, 32 nt, Human
ccaucucauggacugaaagguagauagacaga

SEQ ID NO: 367200 - RNA, 32 nt, Human
ccaucucauuuaagcccuugcaaccaaugaga

SEQ ID NO: 367201 - RNA, 18 nt, Human
ccaucuccaccucugggc

SEQ ID NO: 367202 - RNA, 32 nt, Human
ccaucuccagaagaggggagcagaguccgagc

SEQ ID NO: 367203 - RNA, 32 nt, Human
ccaucuccagaggcaccuuccacuagcaacag

SEQ ID NO: 367204 - RNA, 32 nt, Human
ccaucuccaggaaagacugagaaaaagagcgu

SEQ ID NO: 367205 - RNA, 32 nt, Human
ccaucuccauaaggagccaucaggcugucauu

SEQ ID NO: 367206 - RNA, 32 nt, Human
ccaucuccaugcccucuccuucuguguccccu

SEQ ID NO: 367207 - RNA, 18 nt, Human
ccaucuccccauccgucc

SEQ ID NO: 367208 - RNA, 32 nt, Human
ccaucucccuccccagaaacagugugcauggg

SEQ ID NO: 367209 - RNA, 32 nt, Human
ccaucucccugccuggcccccaaccucagggc

SEQ ID NO: 367210 - RNA, 32 nt, Human
ccaucucccuugagaggcacagaagguuagag

SEQ ID NO: 367211 - RNA, 32 nt, Human
ccaucuccuccacuuccucccuucccucaucc

SEQ ID NO: 367212 - RNA, 32 nt, Human
ccaucuccucugccagaggcucuggcuauuug

SEQ ID NO: 367213 - RNA, 32 nt, Human
ccaucuccuucauucugggcagugccagccac

SEQ ID NO: 367214 - RNA, 32 nt, Human
ccaucuccuucccagcucuccuuuucuguaag

SEQ ID NO: 367215 - RNA, 32 nt, Human
ccaucuccuugcagagacccacuaccagcugg

SEQ ID NO: 367216 - RNA, 32 nt, Human
ccaucuccuuggaggcaguggugugaaucuuc

SEQ ID NO: 367217 - RNA, 32 nt, Human
ccaucuccuuguucccccucucucuuuugccu

SEQ ID NO: 367218 - RNA, 32 nt, Human
ccaucucgacccuggggcugaggccugagucc

SEQ ID NO: 367219 - RNA, 32 nt, Human
ccaucucgcccaccccuccuuccuugaccagc

SEQ ID NO: 367220 - RNA, 32 nt, Human
ccaucucgcuccuccuccucuguuccaauucu

SEQ ID NO: 367221 - RNA, 25 nt, Human
ccaucucuaaaacuaaaaagaaaga

SEQ ID NO: 367222 - RNA, 28 nt, Human
ccaucucuaagugcugaacucaucccug

SEQ ID NO: 367223 - RNA, 32 nt, Human
ccaucucuacaaaaauacaaaaauuaauuggg

SEQ ID NO: 367224 - RNA, 32 nt, Human
ccaucucuacaaaaauacaaaaauuagccagg

SEQ ID NO: 367225 - RNA, 32 nt, Human
ccaucucuacaaaaauacaaaauuagccaggu

SEQ ID NO: 367226 - RNA, 32 nt, Human
ccaucucuacaaaaauuuaaaaauuagccuag

SEQ ID NO: 367227 - RNA, 22 nt, Human
ccaucucuacaaaacaugaaaa

SEQ ID NO: 367228 - RNA, 32 nt, Human
ccaucucuacaaaagauuaaaaauuagcugcg

SEQ ID NO: 367229 - RNA, 32 nt, Human
ccaucucuacaaauaaauaaaaauuagcuggg

SEQ ID NO: 367230 - RNA, 32 nt, Human
ccaucucuacaacaaaaauacaaaaauuagcc

SEQ ID NO: 367231 - RNA, 32 nt, Human
ccaucucuacgaaaaauacaaaauuagccaga

SEQ ID NO: 367232 - RNA, 32 nt, Human
ccaucucuacuaaaaacgcaaaauuagccggg

SEQ ID NO: 367233 - RNA, 32 nt, Human
ccaucucuacuaaaaauacaaaauuaccuggg

SEQ ID NO: 367234 - RNA, 32 nt, Human
ccaucucuacuaaaaauacaaaauuagcaggg

SEQ ID NO: 367235 - RNA, 32 nt, Human
ccaucucuacuaaaaauacaaaauuagccagg

SEQ ID NO: 367236 - RNA, 32 nt, Human
ccaucucuacuaaaaauacaaaauuagccggg

SEQ ID NO: 367237 - RNA, 32 nt, Human
ccaucucuacuaaaaauacaaaauuagccucg

SEQ ID NO: 367238 - RNA, 32 nt, Human
ccaucucuacuaaaaauacaaaauuagcuggg

SEQ ID NO: 367239 - RNA, 32 nt, Human
ccaucucuacuaaaaauauaaaauuagccagg

SEQ ID NO: 367240 - RNA, 32 nt, Human
ccaucucuacuaaaauacaaaaaguuagcugg

SEQ ID NO: 367241 - RNA, 32 nt, Human
ccaucucuacuaaaauacaaaaauuagccggg

SEQ ID NO: 367242 - RNA, 32 nt, Human
ccaucucuacuaaaauacaaaaauuagcuggg

SEQ ID NO: 367243 - RNA, 32 nt, Human
ccaucucuacuaaaauacaaaaauuauccggg

SEQ ID NO: 367244 - RNA, 32 nt, Human
ccaucucuacuaaaauacaaaauuagccaggc

SEQ ID NO: 367245 - RNA, 32 nt, Human
ccaucucuacuaaaauauaaaaauuagccggg

SEQ ID NO: 367246 - RNA, 32 nt, Human
ccaucucuacuaaacauacaaaauuagcuggg

SEQ ID NO: 367247 - RNA, 32 nt, Human
ccaucucuacuaaauacagaaaauuagccagg

SEQ ID NO: 367248 - RNA, 32 nt, Human
ccaucucuagugaagacagaaccagagggaau

SEQ ID NO: 367249 - RNA, 32 nt, Human
ccaucucuauuaaagauacaaaauuagccagg

SEQ ID NO: 367250 - RNA, 32 nt, Human
ccaucucucagggagacaaagaaccuccuucc

SEQ ID NO: 367251 - RNA, 32 nt, Human
ccaucucucccagcagucuuggggucugggug

SEQ ID NO: 367252 - RNA, 32 nt, Human
ccaucucucccgaaaauacaaaauuagccagg

SEQ ID NO: 367253 - RNA, 18 nt, Human
ccaucucuccucauccuu

SEQ ID NO: 367254 - RNA, 32 nt, Human
ccaucucucuaaaaauacaaaaauuagcuggg

SEQ ID NO: 367255 - RNA, 32 nt, Human
ccaucucucuacugcuggacuguggaggguca

SEQ ID NO: 367256 - RNA, 32 nt, Human
ccaucucucuccauaucaaucuggaccaucuc

SEQ ID NO: 367257 - RNA, 32 nt, Human
ccaucucucucccacuucuucuccccuccccc

SEQ ID NO: 367258 - RNA, 32 nt, Human
ccaucucucuccccucucuucucucaugaugc

SEQ ID NO: 367259 - RNA, 32 nt, Human
ccaucucucuuuuugacccucucaggacuggg

SEQ ID NO: 367260 - RNA, 32 nt, Human
ccaucucugaagaaacaacccaucguucuuuu

SEQ ID NO: 367261 - RNA, 20 nt, Human
ccaucucugaccagcuggga

SEQ ID NO: 367262 - RNA, 32 nt, Human
ccaucucugaugggagagggugaggaaaucag

SEQ ID NO: 367263 - RNA, 32 nt, Human
ccaucucugcacccacaaucacacugauuuuu

SEQ ID NO: 367264 - RNA, 32 nt, Human
ccaucucugcccaugagccacagggaacaugu

SEQ ID NO: 367265 - RNA, 32 nt, Human
ccaucucugccuggccaggggcugcugaccca

SEQ ID NO: 367266 - RNA, 32 nt, Human
ccaucucugcucccgccagccuuguuuucagg

SEQ ID NO: 367267 - RNA, 32 nt, Human
ccaucucugggaauuguguggguauuaauguu

SEQ ID NO: 367268 - RNA, 32 nt, Human
ccaucucugggccucagaguccucagccacaa

SEQ ID NO: 367269 - RNA, 32 nt, Human
ccaucucuggucucaaagccagucccagccug

SEQ ID NO: 367270 - RNA, 32 nt, Human
ccaucugaaaaacaaaaacaaaaacagaaaac

SEQ ID NO: 367271 - RNA, 21 nt, Human
ccaucugaaaaauaaaagaaa

SEQ ID NO: 367272 - RNA, 32 nt, Human
ccaucugaagagcauuaaaagcauuuaaaaag

SEQ ID NO: 367273 - RNA, 32 nt, Human
ccaucugaagccccacucuuaaaaaguugcac

SEQ ID NO: 367274 - RNA, 32 nt, Human
ccaucugaauguguugggggcucugcacuuga

SEQ ID NO: 367275 - RNA, 32 nt, Human
ccaucugacaccgccucaccccggaccuuauu

SEQ ID NO: 367276 - RNA, 32 nt, Human
ccaucugacauuuggggauucacugcaugaag

SEQ ID NO: 367277 - RNA, 32 nt, Human
ccaucugaccagcugcugguaucugccaggac

SEQ ID NO: 367278 - RNA, 32 nt, Human
ccaucugacccauggggccugccugugagaaa

SEQ ID NO: 367279 - RNA, 32 nt, Human
ccaucugacucaugucucuucucaucugguuc

SEQ ID NO: 367280 - RNA, 32 nt, Human
ccaucugagaugggguccuguuguuuauuauc

SEQ ID NO: 367281 - RNA, 32 nt, Human
ccaucugagcuggcugugggcugagauccugg

SEQ ID NO: 367282 - RNA, 32 nt, Human
ccaucugaggauacauacucuggguuuccauu

SEQ ID NO: 367283 - RNA, 32 nt, Human
ccaucugaggcaaucuugccucccaggggaaa

SEQ ID NO: 367284 - RNA, 32 nt, Human
ccaucugaguaagggguguaaaccccaagagu

SEQ ID NO: 367285 - RNA, 32 nt, Human
ccaucugaguccugauuuagccagcagugacc

SEQ ID NO: 367286 - RNA, 22 nt, Human
ccaucugauaagaaagaauaga

SEQ ID NO: 367287 - RNA, 32 nt, Human
ccaucugaucgacuucaacuugcugaugguga

SEQ ID NO: 367288 - RNA, 32 nt, Human
ccaucugcaagcuggagaaucaggaaagcugg

SEQ ID NO: 367289 - RNA, 32 nt, Human
ccaucugcaccccuggcccugcucugggcuuc

SEQ ID NO: 367290 - RNA, 32 nt, Human
ccaucugcagagcgaggaggcccgggcugguu

SEQ ID NO: 367291 - RNA, 32 nt, Human
ccaucugcagcccgccuuccucugccuccuga

SEQ ID NO: 367292 - RNA, 32 nt, Human
ccaucugcaggcagagaaggcccagugugucc

SEQ ID NO: 367293 - RNA, 32 nt, Human
ccaucugccccagcugccuccacagacugcug

SEQ ID NO: 367294 - RNA, 32 nt, Human
ccaucugccugggaguccuccugggccugcca

SEQ ID NO: 367295 - RNA, 26 nt, Human
ccaucugccuucaggucuucuucaca

SEQ ID NO: 367296 - RNA, 24 nt, Human
ccaucugccuuggccucccagggu

SEQ ID NO: 367297 - RNA, 32 nt, Human
ccaucugcggcccugucccauggcuuaaccgc

SEQ ID NO: 367298 - RNA, 32 nt, Human
ccaucugcgugaccuggaugugagauguggag

SEQ ID NO: 367299 - RNA, 32 nt, Human
ccaucugcucuggguauuuuuguuuuuguuua

SEQ ID NO: 367300 - RNA, 32 nt, Human
ccaucugcuggcaccugaggagagugagcagc

SEQ ID NO: 367301 - RNA, 32 nt, Human
ccaucugcuggcacuccagccgcgugcaggug

SEQ ID NO: 367302 - RNA, 32 nt, Human
ccaucuggagaagggggaagacuccucgaaaa

SEQ ID NO: 367303 - RNA, 32 nt, Human
ccaucuggagcacggcuggccacggucagccc

SEQ ID NO: 367304 - RNA, 32 nt, Human
ccaucuggagugagugcaggaccaggucccgc

SEQ ID NO: 367305 - RNA, 32 nt, Human
ccaucuggcgacagcaaaugcaaaagagggga

SEQ ID NO: 367306 - RNA, 31 nt, Human
ccaucugggagggguuugugggugaacucgg

SEQ ID NO: 367307 - RNA, 32 nt, Human
ccaucugggcuauucugggguagaaggaaggc

SEQ ID NO: 367308 - RNA, 32 nt, Human
ccaucuggggcugaggacacacagauacauaa

SEQ ID NO: 367309 - RNA, 32 nt, Human
ccaucuggucacuggcagucugggcagguugc

SEQ ID NO: 367310 - RNA, 19 nt, Human
ccaucuggugcuuuuccca

SEQ ID NO: 367311 - RNA, 19 nt, Human
ccaucugguguagcacaga

SEQ ID NO: 367312 - RNA, 32 nt, Human
ccaucuguacuaaaaauacaaaauuagcuggg

SEQ ID NO: 367313 - RNA, 32 nt, Human
ccaucuguauaaaaacaccuugggggcaggca

SEQ ID NO: 367314 - RNA, 32 nt, Human
ccaucugucaccaggggcuuagggaaggccga

SEQ ID NO: 367315 - RNA, 32 nt, Human
ccaucugucacccaggcuggugugcaggggug

SEQ ID NO: 367316 - RNA, 16 nt, Human
ccaucuguccacaucc

SEQ ID NO: 367317 - RNA, 18 nt, Human
ccaucuguccauccuccu

SEQ ID NO: 367318 - RNA, 32 nt, Human
ccaucuguccugugugucuguccuccuuguga

SEQ ID NO: 367319 - RNA, 32 nt, Human
ccaucugucuccuguaaaagauaagaauuuuc

SEQ ID NO: 367320 - RNA, 32 nt, Human
ccaucugucuucagcacauuccacggcaucgc

SEQ ID NO: 367321 - RNA, 32 nt, Human
ccaucugucuucugagacuuugcccuucucca

SEQ ID NO: 367322 - RNA, 32 nt, Human
ccaucugugaggugacaggcaaggaugaaaga

SEQ ID NO: 367323 - RNA, 32 nt, Human
ccaucugugcaagguguccacauugcuagcug

SEQ ID NO: 367324 - RNA, 22 nt, Human
ccaucugugggaaaucccagga

SEQ ID NO: 367325 - RNA, 32 nt, Human
ccaucugugggacaaccacaaggucuggaaac

SEQ ID NO: 367326 - RNA, 18 nt, Human
ccaucuguguuccaccuu

SEQ ID NO: 367327 - RNA, 32 nt, Human
ccaucuguuccaagcuauuuguccauguaaaa

SEQ ID NO: 367328 - RNA, 32 nt, Human
ccaucuguucccucccugucaucuccucucug

SEQ ID NO: 367329 - RNA, 32 nt, Human
ccaucuguuggccaccugcaggccagucucaa

SEQ ID NO: 367330 - RNA, 24 nt, Human
ccaucuguugugcgcauugaagug

SEQ ID NO: 367331 - RNA, 32 nt, Human
ccaucuuaaagaagaucagacagaguacuuag

SEQ ID NO: 367332 - RNA, 32 nt, Human
ccaucuuaaggagaaugagcaaauaccuugug

SEQ ID NO: 367333 - RNA, 32 nt, Human
ccaucuuagaagaagcgaaagugacuguugau

SEQ ID NO: 367334 - RNA, 32 nt, Human
ccaucuuaucauguggaguuuaucucacccug

SEQ ID NO: 367335 - RNA, 32 nt, Human
ccaucuuaugcaaaucuggaugccauaaauaa

SEQ ID NO: 367336 - RNA, 32 nt, Human
ccaucuucaccuucccuccucacucugggucc

SEQ ID NO: 367337 - RNA, 32 nt, Human
ccaucuucccguuucuauccucgacuccaaag

SEQ ID NO: 367338 - RNA, 22 nt, Human
ccaucuuccggcuccagcguca

SEQ ID NO: 367339 - RNA, 32 nt, Human
ccaucuuccucccacuuaccugccuccccucc

SEQ ID NO: 367340 - RNA, 32 nt, Human
ccaucuuccucuacuucucuccuucauuucag

SEQ ID NO: 367341 - RNA, 32 nt, Human
ccaucuuccugacauguugccugggaugugac

SEQ ID NO: 367342 - RNA, 32 nt, Human
ccaucuucgugcccauucaccuggugaaggag

SEQ ID NO: 367343 - RNA, 32 nt, Human
ccaucuucuagacuguaacccugccucccugc

SEQ ID NO: 367344 - RNA, 32 nt, Human
ccaucuucuccaccaaccccaaccuccugcug

SEQ ID NO: 367345 - RNA, 32 nt, Human
ccaucuucuccucuauucuggucuccccugcc

SEQ ID NO: 367346 - RNA, 32 nt, Human
ccaucuucucucuccuagagcccauacagcac

SEQ ID NO: 367347 - RNA, 32 nt, Human
ccaucuucugagaugauccugauucccagaau

SEQ ID NO: 367348 - RNA, 32 nt, Human
ccaucuucuucuuccuccuccgucuccuuucc

SEQ ID NO: 367349 - RNA, 32 nt, Human
ccaucuugaacaaacaaaacauuaggcuccug

SEQ ID NO: 367350 - RNA, 32 nt, Human
ccaucuugcaccuguuccacagcuaaguacag

SEQ ID NO: 367351 - RNA, 32 nt, Human
ccaucuuggaagcagcccgccgccauuuugga

SEQ ID NO: 367352 - RNA, 20 nt, Human
ccaucuuggcagccauccuu

SEQ ID NO: 367353 - RNA, 32 nt, Human
ccaucuuggccaggcuggugugaucauggcuc

SEQ ID NO: 367354 - RNA, 32 nt, Human
ccaucuuggcucacugcaccuccaccuuccgg

SEQ ID NO: 367355 - RNA, 29 nt, Human
ccaucuuggcugcuguccugccucugacc

SEQ ID NO: 367356 - RNA, 32 nt, Human
ccaucuugggauuccuccccuggaaguugucc

SEQ ID NO: 367357 - RNA, 32 nt, Human
ccaucuugggcaacagaaugagauccugucuc

SEQ ID NO: 367358 - RNA, 32 nt, Human
ccaucuugggcaacauggugaaacccugucua

SEQ ID NO: 367359 - RNA, 32 nt, Human
ccaucuuggucucaccuuuucucuccauaucc

SEQ ID NO: 367360 - RNA, 32 nt, Human
ccaucuuguucuggccuagaggucaguccuuu

SEQ ID NO: 367361 - RNA, 32 nt, Human
ccaucuuuacaaaaauacaaaaauuagcugga

SEQ ID NO: 367362 - RNA, 32 nt, Human
ccaucuuucaauguugcagccugguugagaag

SEQ ID NO: 367363 - RNA, 32 nt, Human
ccaucuuuccccagccucucaucaccgaccgu

SEQ ID NO: 367364 - RNA, 32 nt, Human
ccaucuuuccccggaggucucuuccaaauccc

SEQ ID NO: 367365 - RNA, 32 nt, Human
ccaucuuuccuccagcacuuuugggguaagga

SEQ ID NO: 367366 - RNA, 32 nt, Human
ccaucuuugagccuuccuaguccuccaccugg

SEQ ID NO: 367367 - RNA, 32 nt, Human
ccaucuuugcauuguuccuccuugcucgccgc

SEQ ID NO: 367368 - RNA, 32 nt, Human
ccaucuuugcucauggcaacaguuagcuggag

SEQ ID NO: 367369 - RNA, 32 nt, Human
ccaucuuuguacucauccaccccagccggcuu

SEQ ID NO: 367370 - RNA, 32 nt, Human
ccaucuuuguuucauugccuucaucaaccuuc

SEQ ID NO: 367371 - RNA, 32 nt, Human
ccaugaaaacagaacccaaaaggguaaguggu

SEQ ID NO: 367372 - RNA, 32 nt, Human
ccaugaaacccauggcuucucacgggacagac

SEQ ID NO: 367373 - RNA, 32 nt, Human
ccaugaaagacuugugaauccaggaagagaga

SEQ ID NO: 367374 - RNA, 27 nt, Human
ccaugaaagauccaagucgcagcagua

SEQ ID NO: 367375 - RNA, 32 nt, Human
ccaugaacauggcagugcuaugacuuuucuga

SEQ ID NO: 367376 - RNA, 32 nt, Human
ccaugaaccaggcuguccaggaauggcagcug

SEQ ID NO: 367377 - RNA, 32 nt, Human
ccaugaaccagggcaugaaacugaaagugcau

SEQ ID NO: 367378 - RNA, 32 nt, Human
ccaugaacuccuccuccauuuccuuuuuggga

SEQ ID NO: 367379 - RNA, 27 nt, Human
ccaugaagaaggaggugugcuccgugg

SEQ ID NO: 367380 - RNA, 32 nt, Human
ccaugaagagucuggaaaacaauguuucaaag

SEQ ID NO: 367381 - RNA, 32 nt, Human
ccaugaagaugaucuuggcuguggagagccag

SEQ ID NO: 367382 - RNA, 19 nt, Human
ccaugaagcuccauucuca

SEQ ID NO: 367383 - RNA, 27 nt, Human
ccaugaagcugcugcugcugcacccgg

SEQ ID NO: 367384 - RNA, 32 nt, Human
ccaugaaggaagagaggaaaguuuuuaaguaa

SEQ ID NO: 367385 - RNA, 31 nt, Human
ccaugaaggaugucuccaugcuaggagcugc

SEQ ID NO: 367386 - RNA, 32 nt, Human
ccaugaaggccaugcagcgacugugguggcag

SEQ ID NO: 367387 - RNA, 21 nt, Human
ccaugaagguggcccaggacc

SEQ ID NO: 367388 - RNA, 32 nt, Human
ccaugaaguccuuuauagcaaaaguuuccagu

SEQ ID NO: 367389 - RNA, 32 nt, Human
ccaugaagugucaccaguaucuacuacuguga

SEQ ID NO: 367390 - RNA, 24 nt, Human
ccaugaauagaaaauacuucuuua

SEQ ID NO: 367391 - RNA, 32 nt, Human
ccaugaauagcaggagcugggaagaaaggaag

SEQ ID NO: 367392 - RNA, 32 nt, Human
ccaugaaucucucauccagccccgcagggauc

SEQ ID NO: 367393 - RNA, 32 nt, Human
ccaugaauggaggcugcaggaggcugaguccg

SEQ ID NO: 367394 - RNA, 32 nt, Human
ccaugaauggcagcaggaggcagacagguuuc

SEQ ID NO: 367395 - RNA, 32 nt, Human
ccaugaaugucagagacauugacuggaggccu

SEQ ID NO: 367396 - RNA, 32 nt, Human
ccaugaauuaugccagcaagaaugaagcacag

SEQ ID NO: 367397 - RNA, 32 nt, Human
ccaugaauuccugcccaaggauacuuaaucag

SEQ ID NO: 367398 - RNA, 21 nt, Human
ccaugacaaacaccaggaugc

SEQ ID NO: 367399 - RNA, 32 nt, Human
ccaugacaccaacugucaccacuaacucagag

SEQ ID NO: 367400 - RNA, 32 nt, Human
ccaugacauccaaccugggcucuccuggcccc

SEQ ID NO: 367401 - RNA, 32 nt, Human
ccaugacaucucaaagcaacagguaauugaag

SEQ ID NO: 367402 - RNA, 32 nt, Human
ccaugacauuucuuuccccacucugaccucag

SEQ ID NO: 367403 - RNA, 32 nt, Human
ccaugaccacuccugcccuccugccccgugcu

SEQ ID NO: 367404 - RNA, 32 nt, Human
ccaugaccagaggcuggaguggggguguguua

SEQ ID NO: 367405 - RNA, 32 nt, Human
ccaugaccagcagcaaccacagagccuuuuca

SEQ ID NO: 367406 - RNA, 32 nt, Human
ccaugaccccuuggacacuggacugcaugcac

SEQ ID NO: 367407 - RNA, 20 nt, Human
ccaugacccucgcucaggga

SEQ ID NO: 367408 - RNA, 32 nt, Human
ccaugaccuguaucccacguacuccaacuucc

SEQ ID NO: 367409 - RNA, 32 nt, Human
ccaugaccuucaugauaccagugagaagccag

SEQ ID NO: 367410 - RNA, 32 nt, Human
ccaugaccuuccuccuccucuucacuuggcca

SEQ ID NO: 367411 - RNA, 32 nt, Human
ccaugacggcugguccccacaggaccagcugg

SEQ ID NO: 367412 - RNA, 32 nt, Human
ccaugacucaacacuuauuauccaauggguaa

SEQ ID NO: 367413 - RNA, 32 nt, Human
ccaugacugcggcugcccuccuccaggccccc

SEQ ID NO: 367414 - RNA, 32 nt, Human
ccaugacuguugcugcacuccagccugaguga

SEQ ID NO: 367415 - RNA, 24 nt, Human
ccaugacuuccucucgccacugcu

SEQ ID NO: 367416 - RNA, 32 nt, Human
ccaugacuuuucugcccugcccucagccuguu

SEQ ID NO: 367417 - RNA, 22 nt, Human
ccaugagaaguguccuuguuca

SEQ ID NO: 367418 - RNA, 32 nt, Human
ccaugagaauaagagaaagaaaaugaagauca

SEQ ID NO: 367419 - RNA, 32 nt, Human
ccaugagaauuccaggcucacaaagggagagg

SEQ ID NO: 367420 - RNA, 32 nt, Human
ccaugagaccucagagcuucagaucgaggccu

SEQ ID NO: 367421 - RNA, 32 nt, Human
ccaugagagaagggccucuguccuuagguaga

SEQ ID NO: 367422 - RNA, 32 nt, Human
ccaugagagcugccagaauuucaaguccaguu

SEQ ID NO: 367423 - RNA, 32 nt, Human
ccaugagagggugggagggcccagggagggcu

SEQ ID NO: 367424 - RNA, 32 nt, Human
ccaugagauucccaaugccaugggcuuucccc

SEQ ID NO: 367425 - RNA, 32 nt, Human
ccaugagauucugcuuugggcuucacuucuuu

SEQ ID NO: 367426 - RNA, 32 nt, Human
ccaugagcaacagauuugagguaccagugcau

SEQ ID NO: 367427 - RNA, 32 nt, Human
ccaugagcacagaggcugcucuggagucaaca

SEQ ID NO: 367428 - RNA, 21 nt, Human
ccaugagcccacagcuugcca

SEQ ID NO: 367429 - RNA, 27 nt, Human
ccaugagcuacacaggcuuuguccagg

SEQ ID NO: 367430 - RNA, 32 nt, Human
ccaugagcugagucucugccucugccucuccc

SEQ ID NO: 367431 - RNA, 32 nt, Human
ccaugagcuggcuucucucugcaacaggagaa

SEQ ID NO: 367432 - RNA, 32 nt, Human
ccaugagcuucuuccaggcucauguggcccag

SEQ ID NO: 367433 - RNA, 32 nt, Human
ccaugaggaagauuuuuaacaaaagccuccag

SEQ ID NO: 367434 - RNA, 32 nt, Human
ccaugaggacaguugugugccacuggaagaga

SEQ ID NO: 367435 - RNA, 32 nt, Human
ccaugaggacugggaagaguccugcccacagc

SEQ ID NO: 367436 - RNA, 32 nt, Human
ccaugaggagccaagaccagcaggucccacag

SEQ ID NO: 367437 - RNA, 32 nt, Human
ccaugaggaugaggacaggaagccagacccgg

SEQ ID NO: 367438 - RNA, 32 nt, Human
ccaugaggcaacacauuauccaccggguaacu

SEQ ID NO: 367439 - RNA, 32 nt, Human
ccaugaggcaccacugcacucuagccugggca

SEQ ID NO: 367440 - RNA, 32 nt, Human
ccaugaggccacccuggaaucagaacugcaca

SEQ ID NO: 367441 - RNA, 32 nt, Human
ccaugaggcccagcugagagcagcucagcucg

SEQ ID NO: 367442 - RNA, 32 nt, Human
ccaugaggcccagguuacagugagccaagauc

SEQ ID NO: 367443 - RNA, 24 nt, Human
ccaugaggcggagguugcagugag

SEQ ID NO: 367444 - RNA, 32 nt, Human
ccaugaggcuggugcuugcaguuccugcaagu

SEQ ID NO: 367445 - RNA, 32 nt, Human
ccaugaggcugucuccccacagcuuuauccaa

SEQ ID NO: 367446 - RNA, 32 nt, Human
ccaugagggaggaacacucagacugaagggcu

SEQ ID NO: 367447 - RNA, 27 nt, Human
ccaugagggcccuggugcuucugcugu

SEQ ID NO: 367448 - RNA, 27 nt, Human
ccaugagggcucugcugcuccuggggu

SEQ ID NO: 367449 - RNA, 32 nt, Human
ccaugaggggccaagacacugccuaaggugug

SEQ ID NO: 367450 - RNA, 32 nt, Human
ccaugaggguggaucacuugaggucagaaguu

SEQ ID NO: 367451 - RNA, 32 nt, Human
ccaugagguccaguguugucaccaucuacuag

SEQ ID NO: 367452 - RNA, 32 nt, Human
ccaugagguccaguguugucaccaucuauuag

SEQ ID NO: 367453 - RNA, 24 nt, Human
ccaugagguggaaguugcagugag

SEQ ID NO: 367454 - RNA, 32 nt, Human
ccaugagguguuuucugugugcagaacauugu

SEQ ID NO: 367455 - RNA, 32 nt, Human
ccaugagguuucuucucuacugugccuucauc

SEQ ID NO: 367456 - RNA, 32 nt, Human
ccaugagugaauagacagcauuggcuggucca

SEQ ID NO: 367457 - RNA, 32 nt, Human
ccaugagugaauaugcugaaugaggaccuuuu

SEQ ID NO: 367458 - RNA, 32 nt, Human
ccaugagugcaggauuuggcugaugggcaguc

SEQ ID NO: 367459 - RNA, 21 nt, Human
ccaugagugucccuggccccu

SEQ ID NO: 367460 - RNA, 32 nt, Human
ccaugaguucacugcauucucccuuccccgcc

SEQ ID NO: 367461 - RNA, 32 nt, Human
ccaugaguugggggucgggugggggagggaaa

SEQ ID NO: 367462 - RNA, 32 nt, Human
ccaugaguuugagaccagccuggguaacauag

SEQ ID NO: 367463 - RNA, 32 nt, Human
ccaugaguuuguuuugcuuuucauacagacuu

SEQ ID NO: 367464 - RNA, 32 nt, Human
ccaugauaacagacauuauuuuaagcugcuau

SEQ ID NO: 367465 - RNA, 19 nt, Human
ccaugauacuccacuccca

SEQ ID NO: 367466 - RNA, 32 nt, Human
ccaugauccaauaugaccucaucuugacuaca

SEQ ID NO: 367467 - RNA, 32 nt, Human
ccaugaucucaccaugcacuccagccuagaca

SEQ ID NO: 367468 - RNA, 32 nt, Human
ccaugaugauggcccugagcacuggccucuuc

SEQ ID NO: 367469 - RNA, 32 nt, Human
ccaugaugcuuccugaggguguucuagaagcc

SEQ ID NO: 367470 - RNA, 32 nt, Human
ccaugauggaaagacuuaaagaugaauuugag

SEQ ID NO: 367471 - RNA, 32 nt, Human
ccaugauggaugcuuguuucaaaggguuuccu

SEQ ID NO: 367472 - RNA, 32 nt, Human
ccaugauggauuuggaaacuuacuggcuagcu

SEQ ID NO: 367473 - RNA, 32 nt, Human
ccaugauguagugccucuuucauccacuagug

SEQ ID NO: 367474 - RNA, 32 nt, Human
ccaugauguauacauuuguugaugacaguuga

SEQ ID NO: 367475 - RNA, 20 nt, Human
ccaugauucccuccucguca

SEQ ID NO: 367476 - RNA, 32 nt, Human
ccaugauuccuacccugucccagucaucucuu

SEQ ID NO: 367477 - RNA, 32 nt, Human
ccaugauucugaagcaugcacaccucugaaga

SEQ ID NO: 367478 - RNA, 32 nt, Human
ccaugauucugccucuguuuuauaccugcaca

SEQ ID NO: 367479 - RNA, 32 nt, Human
ccaugauugcacuccaaccugggcgacagaga

SEQ ID NO: 367480 - RNA, 32 nt, Human
ccaugauuguaaguuuccugaggucuccucag

SEQ ID NO: 367481 - RNA, 32 nt, Human
ccaugcaacucugucugucugcugcccaucug

SEQ ID NO: 367482 - RNA, 32 nt, Human
ccaugcacacacucacaggaggcccguggacu

SEQ ID NO: 367483 - RNA, 32 nt, Human
ccaugcacacagaaccuccuugugucuguuuc

SEQ ID NO: 367484 - RNA, 18 nt, Human
ccaugcacagccauccuu

SEQ ID NO: 367485 - RNA, 23 nt, Human
ccaugcacagggccauucaggaa

SEQ ID NO: 367486 - RNA, 32 nt, Human
ccaugcacauaguaagucugacuauggcaguc

SEQ ID NO: 367487 - RNA, 32 nt, Human
ccaugcacauuuaauuuauuucagagaaacuc

SEQ ID NO: 367488 - RNA, 22 nt, Human
ccaugcaccaacccacugccca

SEQ ID NO: 367489 - RNA, 23 nt, Human
ccaugcacgggcagggggcgugg

SEQ ID NO: 367490 - RNA, 32 nt, Human
ccaugcacuuuaccagcucaacgcauccacuc

SEQ ID NO: 367491 - RNA, 32 nt, Human
ccaugcagaaacuaagggaagggaccuuacaa

SEQ ID NO: 367492 - RNA, 32 nt, Human
ccaugcagacacacgccuguguccacccuggc

SEQ ID NO: 367493 - RNA, 32 nt, Human
ccaugcagacuccucagaucugaacacaguuu

SEQ ID NO: 367494 - RNA, 32 nt, Human
ccaugcagagacucugggcugcgcagcccccg

SEQ ID NO: 367495 - RNA, 32 nt, Human
ccaugcagagcaggaagccucagcugggccug

SEQ ID NO: 367496 - RNA, 32 nt, Human
ccaugcagagcuggagguuggggugaugucuu

SEQ ID NO: 367497 - RNA, 32 nt, Human
ccaugcagagugagcagggagaggcugggcac

SEQ ID NO: 367498 - RNA, 32 nt, Human
ccaugcagaguuuccaggugugcacuggaagu

SEQ ID NO: 367499 - RNA, 27 nt, Human
ccaugcagcauuuuccaccugccccga

SEQ ID NO: 367500 - RNA, 32 nt, Human
ccaugcagccccugauguucuguuccaccgua

SEQ ID NO: 367501 - RNA, 32 nt, Human
ccaugcagccuggaaggcgagaggagggccaa

SEQ ID NO: 367502 - RNA, 32 nt, Human
ccaugcaggacugguucagcuugggcugucug

SEQ ID NO: 367503 - RNA, 32 nt, Human
ccaugcaggagagaacacagaaggacugaugu

SEQ ID NO: 367504 - RNA, 32 nt, Human
ccaugcaggagggagagaagagugugauggca

SEQ ID NO: 367505 - RNA, 32 nt, Human
ccaugcaggaugacgccuucccggccugcaag

SEQ ID NO: 367506 - RNA, 32 nt, Human
ccaugcagggagggcacgaggaauaaugccgc

SEQ ID NO: 367507 - RNA, 32 nt, Human
ccaugcagggggcuccuggggguggggaggug

SEQ ID NO: 367508 - RNA, 19 nt, Human
cccacgcuggagugcaaug

SEQ ID NO: 367509 - RNA, 20 nt, Human
cccacgcuggagugcaaugg

SEQ ID NO: 367510 - RNA, 23 nt, Human
cccacgcuggagugcaauggugu

SEQ ID NO: 367511 - RNA, 19 nt, Human
cccacgcuggagugcagug

SEQ ID NO: 367512 - RNA, 22 nt, Human
cccacgcuggagugcugugaug

SEQ ID NO: 367513 - RNA, 32 nt, Human
cccacgcuggucuugaacuccugggcucaagc

SEQ ID NO: 367514 - RNA, 32 nt, Human
cccacggacuccuggucuggcccaauaaagac

SEQ ID NO: 367515 - RNA, 20 nt, Human
cccacggacuguaccaggca

SEQ ID NO: 367516 - RNA, 20 nt, Human
cccacggagagcuccaggca

SEQ ID NO: 367517 - RNA, 32 nt, Human
cccacggagauggauguccaggugcgcagagu

SEQ ID NO: 367518 - RNA, 32 nt, Human
cccacggaggcccccagcacacccaacguggc

SEQ ID NO: 367519 - RNA, 32 nt, Human
cccacggaggggacugcucucccccgcugcau

SEQ ID NO: 367520 - RNA, 32 nt, Human
cccacggaggggcaugcuuccacgcaccaagu

SEQ ID NO: 367521 - RNA, 32 nt, Human
cccacggaguaaggagacaugggggacuuuug

SEQ ID NO: 367522 - RNA, 32 nt, Human
cccacggaguuuggugacagagagugagcuug

SEQ ID NO: 367523 - RNA, 32 nt, Human
cccacggaucauucugaaucuuccugccccuc

SEQ ID NO: 367524 - RNA, 32 nt, Human
cccacggcaccuucuucugccuauuuagucaa

SEQ ID NO: 367525 - RNA, 32 nt, Human
cccacggcauccacccucuccagccagccccg

SEQ ID NO: 367526 - RNA, 32 nt, Human
cccacggccagacacaugcacacacaucacac

SEQ ID NO: 367527 - RNA, 22 nt, Human
cccacggcccacacgcucacuu

SEQ ID NO: 367528 - RNA, 19 nt, Human
cccacggccccgcucugcc

SEQ ID NO: 367529 - RNA, 24 nt, Human
cccacggccccucgggccccggcc

SEQ ID NO: 367530 - RNA, 17 nt, Human
cccacggcccugucaga

SEQ ID NO: 367531 - RNA, 32 nt, Human
cccacggcccuuaaacuugcugggcagguuug

SEQ ID NO: 367532 - RNA, 32 nt, Human
cccacggccgaauaccgugagccggaauccug

SEQ ID NO: 367533 - RNA, 32 nt, Human
cccacggcgggcaagggcccagcugugugcuc

SEQ ID NO: 367534 - RNA, 32 nt, Human
cccacggcugagggccuggcagcugcugcgcc

SEQ ID NO: 367535 - RNA, 32 nt, Human
cccacggcugauaggcugccuggugcgggcag

SEQ ID NO: 367536 - RNA, 32 nt, Human
cccacggcugggugguccuaagccacugggug

SEQ ID NO: 367537 - RNA, 32 nt, Human
cccacggcuucacucaggaccugcugggcuug

SEQ ID NO: 367538 - RNA, 32 nt, Human
cccacgggacccccaccaccagccucuugaag

SEQ ID NO: 367539 - RNA, 32 nt, Human
cccacgggagaggggagagggacgcacagcac

SEQ ID NO: 367540 - RNA, 32 nt, Human
cccacgggagcacuuccuacccccacgagggc

SEQ ID NO: 367541 - RNA, 32 nt, Human
cccacgggcccccagccccagccccucuccug

SEQ ID NO: 367542 - RNA, 21 nt, Human
cccacgggccccucaccccag

SEQ ID NO: 367543 - RNA, 32 nt, Human
cccacgggccugagagacuauaagagcguucc

SEQ ID NO: 367544 - RNA, 32 nt, Human
cccacgggccuuccaccucccucagcuuccug

SEQ ID NO: 367545 - RNA, 20 nt, Human
cccacgggcuccugccugcc

SEQ ID NO: 367546 - RNA, 32 nt, Human
cccacgggcugcagcggcagucgcgggggucc

SEQ ID NO: 367547 - RNA, 32 nt, Human
cccacggggaggagaaggaggaguggacccag

SEQ ID NO: 367548 - RNA, 32 nt, Human
cccacgggggcugcaguggauucacuguguca

SEQ ID NO: 367549 - RNA, 32 nt, Human
cccacgggggcugcauuucacacuccuccacc

SEQ ID NO: 367550 - RNA, 32 nt, Human
cccacgggucccggggauggcgucggagccgc

SEQ ID NO: 367551 - RNA, 32 nt, Human
cccacgggugugaccuugggggccagugugug

SEQ ID NO: 367552 - RNA, 32 nt, Human
cccacgguauucuuucuuugcaggucaccagu

SEQ ID NO: 367553 - RNA, 32 nt, Human
cccacggucuuccacuaccagccugggccucc

SEQ ID NO: 367554 - RNA, 32 nt, Human
cccacggugggcuuagccugccuaggcccuuc

SEQ ID NO: 367555 - RNA, 32 nt, Human
cccacguaaauauaugaauauauuucugacau

SEQ ID NO: 367556 - RNA, 28 nt, Human
cccacgucaggccuggccucaucucaga

SEQ ID NO: 367557 - RNA, 19 nt, Human
cccacguccccccuuugga

SEQ ID NO: 367558 - RNA, 32 nt, Human
cccacgucccuccugcagcccagcuccgcccg

SEQ ID NO: 367559 - RNA, 23 nt, Human
cccacguccuucucagccugccc

SEQ ID NO: 367560 - RNA, 32 nt, Human
cccacgucucagccacaguucuccacucgccu

SEQ ID NO: 367561 - RNA, 32 nt, Human
cccacgucucugucucugggccuuuguucccc

SEQ ID NO: 367562 - RNA, 32 nt, Human
cccacgucuguaaucccugcacuuugggaggc

SEQ ID NO: 367563 - RNA, 32 nt, Human
cccacgucuguuccucacccuccaucucuggg

SEQ ID NO: 367564 - RNA, 22 nt, Human
cccacgugcaaaaucaacauca

SEQ ID NO: 367565 - RNA, 32 nt, Human
cccacgugcagcccuguugggaagaaaggaag

SEQ ID NO: 367566 - RNA, 32 nt, Human
cccacgugccacucaauacaaauguucugcua

SEQ ID NO: 367567 - RNA, 32 nt, Human
cccacguggagcagcugcaggagcugcagacc

SEQ ID NO: 367568 - RNA, 32 nt, Human
cccacguggcagccccaccucuugagagcccc

SEQ ID NO: 367569 - RNA, 32 nt, Human
cccacguggcaucgauccucccugcccgcgaa

SEQ ID NO: 367570 - RNA, 23 nt, Human
cccacgugggcugggcggcugga

SEQ ID NO: 367571 - RNA, 32 nt, Human
cccacgugguguccccaaggaagggagaguug

SEQ ID NO: 367572 - RNA, 32 nt, Human
cccacgugucugcccagagucaaguccugugu

SEQ ID NO: 367573 - RNA, 19 nt, Human
cccacuaaccagacuggaa

SEQ ID NO: 367574 - RNA, 32 nt, Human
cccacuaaggagaaagaaguugauuccuucau

SEQ ID NO: 367575 - RNA, 32 nt, Human
cccacuaauaugcacauccagaaaaauuucca

SEQ ID NO: 367576 - RNA, 32 nt, Human
cccacuacaagugauccucaggcagguaaccc

SEQ ID NO: 367577 - RNA, 18 nt, Human
cccacuaccgcugccacg

SEQ ID NO: 367578 - RNA, 25 nt, Human
cccacuaccucauaagcugcaguga

SEQ ID NO: 367579 - RNA, 18 nt, Human
cccacuacucccuccuca

SEQ ID NO: 367580 - RNA, 32 nt, Human
cccacuacugcauuccagccuggguggacaga

SEQ ID NO: 367581 - RNA, 32 nt, Human
cccacuacuguacuccccucauggcccaggga

SEQ ID NO: 367582 - RNA, 32 nt, Human
cccacuacuuccuucccugccucccagcucag

SEQ ID NO: 367583 - RNA, 32 nt, Human
cccacuagacaaguccagccuggcaaggguuc

SEQ ID NO: 367584 - RNA, 32 nt, Human
cccacuagccaagagaaacagagaaagaccau

SEQ ID NO: 367585 - RNA, 17 nt, Human
cccacuagccccacuga

SEQ ID NO: 367586 - RNA, 30 nt, Human
cccacuagccucuccauacuuacuccucuc

SEQ ID NO: 367587 - RNA, 23 nt, Human
cccacuagcugggacuacaggca

SEQ ID NO: 367588 - RNA, 32 nt, Human
cccacuagggccugggguuaauugcucaaagg

SEQ ID NO: 367589 - RNA, 32 nt, Human
cccacuaggugaagcaugaguugucggagguc

SEQ ID NO: 367590 - RNA, 32 nt, Human
cccacuauccaucccagccucugguaaccauc

SEQ ID NO: 367591 - RNA, 32 nt, Human
cccacuaucuugcacacaggugcucuaaccau

SEQ ID NO: 367592 - RNA, 31 nt, Human
cccacuaugacccccagcuccuccagggaga

SEQ ID NO: 367593 - RNA, 32 nt, Human
cccacuauggacauaaaaauuuuugcaaggcc

SEQ ID NO: 367594 - RNA, 32 nt, Human
cccacucacaccuuccucccacagaaacagug

SEQ ID NO: 367595 - RNA, 32 nt, Human
cccacucaccccucagacuccugcugcccaug

SEQ ID NO: 367596 - RNA, 32 nt, Human
cccacucacugcacugggguccuugggguuug

SEQ ID NO: 367597 - RNA, 16 nt, Human
cccacucacugcccca

SEQ ID NO: 367598 - RNA, 32 nt, Human
cccacucagacuccugcguagcugggaccaca

SEQ ID NO: 367599 - RNA, 32 nt, Human
cccacucaggaggaguggaggcagguuguaga

SEQ ID NO: 367600 - RNA, 32 nt, Human
cccacucaggaugcaggcucuccccagggggc

SEQ ID NO: 367601 - RNA, 17 nt, Human
cccacucagugccucca

SEQ ID NO: 367602 - RNA, 32 nt, Human
cccacucaguguccccuccaaacuucacacuu

SEQ ID NO: 367603 - RNA, 32 nt, Human
cccacucaugcaaccguccucacuuuuccuuc

SEQ ID NO: 367604 - RNA, 32 nt, Human
cccacucaugcucuccagcgcuuggacuugcu

SEQ ID NO: 367605 - RNA, 32 nt, Human
cccacuccaaggucucugcugagagcugaaca

SEQ ID NO: 367606 - RNA, 32 nt, Human
cccacuccacccuggccaagaucugccugggc

SEQ ID NO: 367607 - RNA, 32 nt, Human
cccacuccacuccgcccagucugggacuccac

SEQ ID NO: 367608 - RNA, 32 nt, Human
cccacuccagcaccccagccagccugguacgc

SEQ ID NO: 367609 - RNA, 32 nt, Human
cccacuccagccgcaagcauaacugaagaaau

SEQ ID NO: 367610 - RNA, 32 nt, Human
cccacuccaggaaggcagcccaaucccuaggu

SEQ ID NO: 367611 - RNA, 32 nt, Human
cccacuccagugguggaggugcagucgcugga

SEQ ID NO: 367612 - RNA, 32 nt, Human
cccacuccauagccauguggauuuuuauccaa

SEQ ID NO: 367613 - RNA, 32 nt, Human
cccacuccauagucugguauucugagcacuag

SEQ ID NO: 367614 - RNA, 32 nt, Human
cccacuccaucaaucccugaccauguaaggcu

SEQ ID NO: 367615 - RNA, 32 nt, Human
cccacuccaucaucuccaggugccccacgccu

SEQ ID NO: 367616 - RNA, 17 nt, Human
cccacuccaugcugcuu

SEQ ID NO: 367617 - RNA, 21 nt, Human
cccacucccaaaccagagcca

SEQ ID NO: 367618 - RNA, 32 nt, Human
cccacucccacacuucuuugccuauaaaucuu

SEQ ID NO: 367619 - RNA, 32 nt, Human
cccacucccacucccucucucucccucucugc

SEQ ID NO: 367620 - RNA, 20 nt, Human
cccacucccagcccuccuca

SEQ ID NO: 367621 - RNA, 32 nt, Human
cccacucccagccggggcuccccacacacacu

SEQ ID NO: 367622 - RNA, 32 nt, Human
cccacucccaggcggggcaggaaggggccgag

SEQ ID NO: 367623 - RNA, 32 nt, Human
cccacuccccacccuucuccccuuccuuugcc

SEQ ID NO: 367624 - RNA, 32 nt, Human
cccacuccccaccuucaauuccugggccccaa

SEQ ID NO: 367625 - RNA, 32 nt, Human
cccacuccccacucucagccugggagacuccu

SEQ ID NO: 367626 - RNA, 32 nt, Human
cccacuccccacugagguccccaaaccccacc

SEQ ID NO: 367627 - RNA, 32 nt, Human
cccacuccccuccugacagguuccccaacagc

SEQ ID NO: 367628 - RNA, 32 nt, Human
cccacuccccucucuuccccagcaggcuguag

SEQ ID NO: 367629 - RNA, 32 nt, Human
cccacucccucacuuuuacuccuuccuccaac

SEQ ID NO: 367630 - RNA, 32 nt, Human
cccacucccuuuccccacuccuucuuuauugc

SEQ ID NO: 367631 - RNA, 32 nt, Human
cccacuccuagagacagcugugcucacuuuuc

SEQ ID NO: 367632 - RNA, 32 nt, Human
cccacuccuaucuccugccugucugccucugu

SEQ ID NO: 367633 - RNA, 32 nt, Human
cccacuccuauguacuauccccaaacuccuuu

SEQ ID NO: 367634 - RNA, 21 nt, Human
cccacuccucacacucuucua

SEQ ID NO: 367635 - RNA, 23 nt, Human
cccacuccuccaugaggggcuga

SEQ ID NO: 367636 - RNA, 32 nt, Human
cccacuccugaaccaugaggccucgcucuggg

SEQ ID NO: 367637 - RNA, 32 nt, Human
cccacuccugaagauccaucucuuggggcucc

SEQ ID NO: 367638 - RNA, 32 nt, Human
cccacuccugccccagcuguucuccagggcuu

SEQ ID NO: 367639 - RNA, 22 nt, Human
cccacuccugcucugcucgccu

SEQ ID NO: 367640 - RNA, 19 nt, Human
cccacuccugcugggcuga

SEQ ID NO: 367641 - RNA, 32 nt, Human
cccacuccugggcugcucagagcugcugcucc

SEQ ID NO: 367642 - RNA, 32 nt, Human
cccacuccugucaccgagacccccaggcuuca

SEQ ID NO: 367643 - RNA, 32 nt, Human
cccacuccuuuccugcauuucucccucccucc

SEQ ID NO: 367644 - RNA, 32 nt, Human
cccacucgauuccugcuccucagaccuccggg

SEQ ID NO: 367645 - RNA, 32 nt, Human
cccacucgccucaccugagccuggguggaaca

SEQ ID NO: 367646 - RNA, 32 nt, Human
cccacucggcccaggaggucagcagucuguuc

SEQ ID NO: 367647 - RNA, 32 nt, Human
cccacucggccuggccuuccucugccugcaag

SEQ ID NO: 367648 - RNA, 23 nt, Human
cccacucucaccucuccuccccu

SEQ ID NO: 367649 - RNA, 32 nt, Human
cccacucucagacccucuuuugucuucauuuu

SEQ ID NO: 367650 - RNA, 32 nt, Human
cccacucucaggccacugcccaccucacucag

SEQ ID NO: 367651 - RNA, 32 nt, Human
cccacucuccacccuacugcgugcucuuacuu

SEQ ID NO: 367652 - RNA, 32 nt, Human
cccacucuccaccucacuagcuccccaauccc

SEQ ID NO: 367653 - RNA, 32 nt, Human
cccacucuccacugcuuguccugcucucacgc

SEQ ID NO: 367654 - RNA, 22 nt, Human
cccacucuccagacccgccgcu

SEQ ID NO: 367655 - RNA, 20 nt, Human
cccacucuccagcucugccc

SEQ ID NO: 367656 - RNA, 20 nt, Human
cccacucucccagcuggacu

SEQ ID NO: 367657 - RNA, 19 nt, Human
cccacucuccccacacuaa

SEQ ID NO: 367658 - RNA, 22 nt, Human
cccacucuccccacccuccuca

SEQ ID NO: 367659 - RNA, 32 nt, Human
cccacucuccuccccucuuuuccuuccuuccu

SEQ ID NO: 367660 - RNA, 32 nt, Human
cccacucuccugcugcucggguucugaggcac

SEQ ID NO: 367661 - RNA, 23 nt, Human
cccacucucgugguaggcucccu

SEQ ID NO: 367662 - RNA, 32 nt, Human
cccacucucuucagcagccacccggcccuccc

SEQ ID NO: 367663 - RNA, 32 nt, Human
cccacucucuucucccccugacccccgcucca

SEQ ID NO: 367664 - RNA, 19 nt, Human
cccacucugaccccacuaa

SEQ ID NO: 367665 - RNA, 23 nt, Human
cccacucugcaaggcugcgguga

SEQ ID NO: 367666 - RNA, 21 nt, Human
cccacucugcccccgccuacc

SEQ ID NO: 367667 - RNA, 21 nt, Human
cccacucugcccguccaccuu

SEQ ID NO: 367668 - RNA, 32 nt, Human
cccacucugccucuugcuccuccagggcagca

SEQ ID NO: 367669 - RNA, 32 nt, Human
cccacucugcuccccaggcuugagugagugug

SEQ ID NO: 367670 - RNA, 21 nt, Human
cccacucugcucggccgccuu

SEQ ID NO: 367671 - RNA, 32 nt, Human
cccacucuggaauuucccuaccaauaaaagca

SEQ ID NO: 367672 - RNA, 32 nt, Human
cccacucuggucucaaacuccugggcucaacc

SEQ ID NO: 367673 - RNA, 32 nt, Human
cccacucugucacccaggcuggagugcagugg

SEQ ID NO: 367674 - RNA, 24 nt, Human
cccacucugucccuagcccagccu

SEQ ID NO: 367675 - RNA, 32 nt, Human
cccacucugucuccguuccuguccucaucucu

SEQ ID NO: 367676 - RNA, 32 nt, Human
cccacucugucugccugcaucuccucuguugc

SEQ ID NO: 367677 - RNA, 32 nt, Human
cccacucuguugcccaggcuagagugcaaugg

SEQ ID NO: 367678 - RNA, 22 nt, Human
cccacucuucccucagcucacc

SEQ ID NO: 367679 - RNA, 32 nt, Human
cccacucuugcccaggcuggagcgcaaguggc

SEQ ID NO: 367680 - RNA, 32 nt, Human
cccacucuuguucaagcgagugugugagcuau

SEQ ID NO: 367681 - RNA, 32 nt, Human
cccacucuuugccuccccgccccuucccugag

SEQ ID NO: 367682 - RNA, 32 nt, Human
cccacugaaaccaaggucuuuucaaauguggc

SEQ ID NO: 367683 - RNA, 20 nt, Human
cccacugaaaccuccaccuc

SEQ ID NO: 367684 - RNA, 32 nt, Human
cccacugaaauacaaaacuuaaccgggcuugg

SEQ ID NO: 367685 - RNA, 20 nt, Human
cccacugaagcuggcccagc

SEQ ID NO: 367686 - RNA, 32 nt, Human
cccacugaaguguucccuaaggaacagcauuu

SEQ ID NO: 367687 - RNA, 32 nt, Human
cccacugacccacucggauggaccaaccugcu

SEQ ID NO: 367688 - RNA, 32 nt, Human
cccacugacccccgcugccucccccaacaccg

SEQ ID NO: 367689 - RNA, 32 nt, Human
cccacugaccugcccauguccagagggacugg

SEQ ID NO: 367690 - RNA, 32 nt, Human
cccacugagcaucuccuucccgcccugugucc

SEQ ID NO: 367691 - RNA, 32 nt, Human
cccacugagccaagcccccuaacuuugggccu

SEQ ID NO: 367692 - RNA, 21 nt, Human
cccacugagccccagcugcug

SEQ ID NO: 367693 - RNA, 32 nt, Human
cccacugagggcccuggacagggcucauuaaa

SEQ ID NO: 367694 - RNA, 32 nt, Human
cccacugaggggucccuucagcaaagaccugg

SEQ ID NO: 367695 - RNA, 32 nt, Human
cccacugaggguggggcagcuguggggagcug

SEQ ID NO: 367696 - RNA, 32 nt, Human
cccacugagguccuagagugccuccagggugg

SEQ ID NO: 367697 - RNA, 32 nt, Human
cccacugaggugccccacagcagcagguguug

SEQ ID NO: 367698 - RNA, 32 nt, Human
cccacugaguggcuucagccucgcuggaagaa

SEQ ID NO: 367699 - RNA, 32 nt, Human
cccacugcaaacccacugcccucuucucccca

SEQ ID NO: 367700 - RNA, 32 nt, Human
cccacugcaaccucugccuccuggguucaagc

SEQ ID NO: 367701 - RNA, 32 nt, Human
cccacugcaagcuugaacauuugaugguggac

SEQ ID NO: 367702 - RNA, 32 nt, Human
cccacugcacuccagccugggugacagagcga

SEQ ID NO: 367703 - RNA, 32 nt, Human
cccacugcacuccagccugggugacagaggga

SEQ ID NO: 367704 - RNA, 32 nt, Human
cccacugcacucugcaaccaguguugccugcc

SEQ ID NO: 367705 - RNA, 32 nt, Human
cccacugcagcccuccagccucugguccccag

SEQ ID NO: 367706 - RNA, 32 nt, Human
cccacugcagcccucgaacuucccaggcaccc

SEQ ID NO: 367707 - RNA, 32 nt, Human
cccacugcagccuccaacuccugggcucaagc

SEQ ID NO: 367708 - RNA, 21 nt, Human
cccacugcaggcuguggcucc

SEQ ID NO: 367709 - RNA, 32 nt, Human
cccacugcaguggauacaaggaagggccuuuc

SEQ ID NO: 367710 - RNA, 32 nt, Human
cccacugcauaauguggaaacugaccucaaga

SEQ ID NO: 367711 - RNA, 32 nt, Human
cccacugcaucuggaguacagcuucuccuagg

SEQ ID NO: 367712 - RNA, 32 nt, Human
cccacugcauuccagccugggcaacagcguga

SEQ ID NO: 367713 - RNA, 32 nt, Human
cccacugcauuccagccugggugacagagcga

SEQ ID NO: 367714 - RNA, 32 nt, Human
cccacugccagcugccccuccugggagggccc

SEQ ID NO: 367715 - RNA, 32 nt, Human
cccacugccaggcuugccugugcuggggccac

SEQ ID NO: 367716 - RNA, 32 nt, Human
cccacugccaucacccagcaccccagaucacc

SEQ ID NO: 367717 - RNA, 21 nt, Human
cccacugccccaaaccggccu

SEQ ID NO: 367718 - RNA, 32 nt, Human
cccacugccuccaggaagccaaggagaauuau

SEQ ID NO: 367719 - RNA, 32 nt, Human
cccacugccucccuccuuccuggguggagcag

SEQ ID NO: 367720 - RNA, 32 nt, Human
cccacugccugcccagagccaucaggaugagc

SEQ ID NO: 367721 - RNA, 32 nt, Human
cccacugccuguguuugaauucugagugguuu

SEQ ID NO: 367722 - RNA, 32 nt, Human
cccacugcucuuccucuuaagaaagugcucca

SEQ ID NO: 367723 - RNA, 32 nt, Human
cccacugcugcacuuuagccugggugaaaaag

SEQ ID NO: 367724 - RNA, 32 nt, Human
cccacugcugccucuccaucccucucucauug

SEQ ID NO: 367725 - RNA, 32 nt, Human
cccacugcugccucuccugggcauggcuguua

SEQ ID NO: 367726 - RNA, 32 nt, Human
cccacugcuguccaccaugaguaggagggagg

SEQ ID NO: 367727 - RNA, 32 nt, Human
cccacugcuuccaaacucugccugugucccau

SEQ ID NO: 367728 - RNA, 32 nt, Human
cccacugcuucuuccuccuuucucaaccauca

SEQ ID NO: 367729 - RNA, 32 nt, Human
cccacuggaacucuccucacaccuggcagcuu

SEQ ID NO: 367730 - RNA, 32 nt, Human
cccacuggagguggagggugggaagagaaggg

SEQ ID NO: 367731 - RNA, 32 nt, Human
cccacuggagugauuucagugaaucagacaag

SEQ ID NO: 367732 - RNA, 21 nt, Human
cccacuggauccaggccccca

SEQ ID NO: 367733 - RNA, 32 nt, Human
cccacuggauccucuguagaauuagcagguca

SEQ ID NO: 367734 - RNA, 23 nt, Human
cccacuggcaccagcaguguggg

SEQ ID NO: 367735 - RNA, 21 nt, Human
cccacuggccaggacgcccca

SEQ ID NO: 367736 - RNA, 32 nt, Human
cccacuggccaggacucugagaucagagcugg

SEQ ID NO: 367737 - RNA, 21 nt, Human
cccacuggcccugcggcaucc

SEQ ID NO: 367738 - RNA, 32 nt, Human
cccacuggccgauucacucagugugggguccu

SEQ ID NO: 367739 - RNA, 23 nt, Human
cccacuggccucuucuggugcca

SEQ ID NO: 367740 - RNA, 21 nt, Human
cccacuggccugagcaugcca

SEQ ID NO: 367741 - RNA, 32 nt, Human
cccacuggcugccugggagccccacaccaccg

SEQ ID NO: 367742 - RNA, 21 nt, Human
cccacugggaccccgacacca

SEQ ID NO: 367743 - RNA, 32 nt, Human
cccacugggccggccacagucuggacccgcac

SEQ ID NO: 367744 - RNA, 32 nt, Human
cccacugggguguguggcagagccaggaccca

SEQ ID NO: 367745 - RNA, 32 nt, Human
cccacuggguagaaggaacagggagcggccag

SEQ ID NO: 367746 - RNA, 32 nt, Human
cccacuggguugccccggccaggccugcgagg

SEQ ID NO: 367747 - RNA, 32 nt, Human
cccacugguaugggccucccgccccuuccaca

SEQ ID NO: 367748 - RNA, 32 nt, Human
cccacuggucuuccaccuuccccagcucccuc

SEQ ID NO: 367749 - RNA, 28 nt, Human
cccacugguuacauauccauggcuccug

SEQ ID NO: 367750 - RNA, 32 nt, Human
cccacugguuuauagauccucugacuugugug

SEQ ID NO: 367751 - RNA, 32 nt, Human
cccacuguacauuuguugaauucugagaugcu

SEQ ID NO: 367752 - RNA, 32 nt, Human
cccacuguaccagaaaccagacuuguaucgac

SEQ ID NO: 367753 - RNA, 17 nt, Human
cccacuguagacaggaa

SEQ ID NO: 367754 - RNA, 32 nt, Human
cccacuguccucccgcugccccggguggugag

SEQ ID NO: 367755 - RNA, 21 nt, Human
cccacugucgugguggcccca

SEQ ID NO: 367756 - RNA, 32 nt, Human
cccacugucucuaaccacuccugggcuaagga

SEQ ID NO: 367757 - RNA, 32 nt, Human
cccacugugagugaggggccaagggaucuccu

SEQ ID NO: 367758 - RNA, 32 nt, Human
cccacugugcagcccccaagucaccagaguuu

SEQ ID NO: 367759 - RNA, 32 nt, Human
cccacugugcagcucaaaugugguguucacuc

SEQ ID NO: 367760 - RNA, 32 nt, Human
cccacugugccuaggacuugaggucccucuuu

SEQ ID NO: 367761 - RNA, 32 nt, Human
cccacugugccuuccgggccuccugggcuucu

SEQ ID NO: 367762 - RNA, 32 nt, Human
cccacugugcugcucuucagguccccacagcc

SEQ ID NO: 367763 - RNA, 32 nt, Human
cccacugugcuguagccugggugacaguguga

SEQ ID NO: 367764 - RNA, 32 nt, Human
cccacugugcuuuccucuaaccaaaauauacg

SEQ ID NO: 367765 - RNA, 32 nt, Human
cccacugugguucuggcaccuccagggcugau

SEQ ID NO: 367766 - RNA, 32 nt, Human
cccacuguucugaaaggagacauugcucuaug

SEQ ID NO: 367767 - RNA, 32 nt, Human
cccacuguucugaaaggagacauugcuuuaug

SEQ ID NO: 367768 - RNA, 32 nt, Human
cccacuguugcauuggggauuaauuuuccaac

SEQ ID NO: 367769 - RNA, 23 nt, Human
cccacuguuuccucuuucugcuu

SEQ ID NO: 367770 - RNA, 32 nt, Human
cccacuuacccugggcuggagaguugguuuca

SEQ ID NO: 367771 - RNA, 19 nt, Human
cccacuucacccccuacca

SEQ ID NO: 367772 - RNA, 32 nt, Human
cccacuucacucugucccaccugcuuucuguc

SEQ ID NO: 367773 - RNA, 32 nt, Human
cccacuuccaagcagaaaucgucacauguaag

SEQ ID NO: 367774 - RNA, 32 nt, Human
cccacuuccaucauuuccuucucccccaaccc

SEQ ID NO: 367775 - RNA, 21 nt, Human
cccacuucccaccccgucucc

SEQ ID NO: 367776 - RNA, 32 nt, Human
cccacuucccaguggcugcuuccuggggaccc

SEQ ID NO: 367777 - RNA, 20 nt, Human
cccacuuccccagucucgcc

SEQ ID NO: 367778 - RNA, 32 nt, Human
cccacuuccccucugugucugugucugugugu

SEQ ID NO: 367779 - RNA, 23 nt, Human
cccacuucccucagcccccaggg

SEQ ID NO: 367780 - RNA, 32 nt, Human
cccacuuccgacccucucaggccuuuuccgcu

SEQ ID NO: 367781 - RNA, 32 nt, Human
cccacuuccguggccaccuccaugcagaagcc

SEQ ID NO: 367782 - RNA, 15 nt, Human
cccacuuccuggcca

SEQ ID NO: 367783 - RNA, 32 nt, Human
cccacuuccuucuggccugggaggucuguaau

SEQ ID NO: 367784 - RNA, 32 nt, Human
cccacuuccuuuccuacuguccuggaaccugu

SEQ ID NO: 367785 - RNA, 32 nt, Human
cccacuuccuuugacccagaguugccuuccag

SEQ ID NO: 367786 - RNA, 16 nt, Human
cccacuucgcugugcc

SEQ ID NO: 367787 - RNA, 32 nt, Human
cccacuucgcuugccaucacagcacgccuauc

SEQ ID NO: 367788 - RNA, 32 nt, Human
cccacuucggcacagcugcucucccaugggug

SEQ ID NO: 367789 - RNA, 18 nt, Human
cccacuucucaucacaca

SEQ ID NO: 367790 - RNA, 32 nt, Human
cccacuucucuuccacugagcuucacuaauaa

SEQ ID NO: 367791 - RNA, 32 nt, Human
cccacuugacacagcacccgacucccaguuuc

SEQ ID NO: 367792 - RNA, 32 nt, Human
cccacuugagaccugcugcuuccuucaaaaug

SEQ ID NO: 367793 - RNA, 32 nt, Human
cccacuugagcccagauuccuggaagagcaga

SEQ ID NO: 367794 - RNA, 32 nt, Human
cccacuugcaaucccagcuauuugggaggcug

SEQ ID NO: 367795 - RNA, 22 nt, Human
cccacuugcgagccucaguccc

SEQ ID NO: 367796 - RNA, 32 nt, Human
cccacuuggacaccagucccuggguagauacc

SEQ ID NO: 367797 - RNA, 32 nt, Human
cccacuuggagcagugggaggaaaucuggguu

SEQ ID NO: 367798 - RNA, 20 nt, Human
cccacuuggccugcgugcug

SEQ ID NO: 367799 - RNA, 32 nt, Human
cccacuugggaaucugaggcagaggaggguga

SEQ ID NO: 367800 - RNA, 32 nt, Human
cccacuugugggaaccagccuccaagagggcc

SEQ ID NO: 367801 - RNA, 19 nt, Human
cccacuuucaccuccccac

SEQ ID NO: 367802 - RNA, 20 nt, Human
cccacuuucccacucaccuu

SEQ ID NO: 367803 - RNA, 32 nt, Human
cccacuuuccuucugucucuccuuccucccuu

SEQ ID NO: 367804 - RNA, 32 nt, Human
cccacuuucuccuuuuccuuccuuccuggcag

SEQ ID NO: 367805 - RNA, 22 nt, Human
cccacuuuucucccuccugucu

SEQ ID NO: 367806 - RNA, 32 nt, Human
cccagaaaaacagaaagagcaucuggggagcg

SEQ ID NO: 367807 - RNA, 32 nt, Human
cccagaaacuauuugaccaugauaauucaguu

SEQ ID NO: 367808 - RNA, 32 nt, Human
cccagaaagaccuggaaaggagcccagcaugu

SEQ ID NO: 367809 - RNA, 32 nt, Human
cccagaaagaggaaguuucuucaggaacagac

SEQ ID NO: 367810 - RNA, 21 nt, Human
cccagaaagaucuuucuagua

SEQ ID NO: 367811 - RNA, 22 nt, Human
cccagaaagcagaacccaggaa

SEQ ID NO: 367812 - RNA, 22 nt, Human
cccagaaaggaaacugaucucu

SEQ ID NO: 367813 - RNA, 32 nt, Human
cccagaaagggcccugcccuagacccugccag

SEQ ID NO: 367814 - RNA, 32 nt, Human
cccagaaagucacaggguacagcaacucauac

SEQ ID NO: 367815 - RNA, 32 nt, Human
cccagaaagugcucucaccuccgacacugguc

SEQ ID NO: 367816 - RNA, 32 nt, Human
cccagaaaguggagguuuccucuuggcauuuu

SEQ ID NO: 367817 - RNA, 24 nt, Human
cccagaaaguugaggcugcaguga

SEQ ID NO: 367818 - RNA, 32 nt, Human
cccagaacaaacacccuucagagccuaaccaa

SEQ ID NO: 367819 - RNA, 32 nt, Human
cccagaacaagaucuagcuucucauuugguca

SEQ ID NO: 367820 - RNA, 32 nt, Human
cccagaacaccgccuagaauuuggauuguaau

SEQ ID NO: 367821 - RNA, 32 nt, Human
cccagaacacuggccugaaucagccagcucuu

SEQ ID NO: 367822 - RNA, 21 nt, Human
cccagaacaucccuggcccca

SEQ ID NO: 367823 - RNA, 32 nt, Human
cccagaaccaaagaaugugaaggggguccaug

SEQ ID NO: 367824 - RNA, 32 nt, Human
cccagaaccagcuggcagcaagccucguauac

SEQ ID NO: 367825 - RNA, 32 nt, Human
cccagaaccccagguagguagagcaagaagau

SEQ ID NO: 367826 - RNA, 22 nt, Human
cccagaaccccaguagcagcag

SEQ ID NO: 367827 - RNA, 32 nt, Human
cccagaaccccugcccuggcagccuggaagac

SEQ ID NO: 367828 - RNA, 32 nt, Human
cccagaaccccuggccagucgcugggcugggc

SEQ ID NO: 367829 - RNA, 24 nt, Human
cccagaacccgccaaugcugggga

SEQ ID NO: 367830 - RNA, 23 nt, Human
cccagaacccuuggucuugccac

SEQ ID NO: 367831 - RNA, 32 nt, Human
cccagaaccgcucuccccuucccugcccagug

SEQ ID NO: 367832 - RNA, 20 nt, Human
cccagaaccucagaacgaga

SEQ ID NO: 367833 - RNA, 19 nt, Human
cccagaacuaugccuggag

SEQ ID NO: 367834 - RNA, 24 nt, Human
cccagaacucccugggcagagcca

SEQ ID NO: 367835 - RNA, 19 nt, Human
cccagaacucccuucaagg

SEQ ID NO: 367836 - RNA, 18 nt, Human
cccagaacuccuguagag

SEQ ID NO: 367837 - RNA, 18 nt, Human
cccagaacucgucuguga

SEQ ID NO: 367838 - RNA, 20 nt, Human
cccagaacucugugcccagg

SEQ ID NO: 367839 - RNA, 18 nt, Human
cccagaacuggcaugugg

SEQ ID NO: 367840 - RNA, 32 nt, Human
cccagaacugugaauggccugcuccaggccau

SEQ ID NO: 367841 - RNA, 25 nt, Human
cccagaacuucagaacuguguggag

SEQ ID NO: 367842 - RNA, 19 nt, Human
cccagaacuuccuccccac

SEQ ID NO: 367843 - RNA, 32 nt, Human
cccagaagacacaccuggccuccagcaggcug

SEQ ID NO: 367844 - RNA, 21 nt, Human
cccagaagacacuccuggcca

SEQ ID NO: 367845 - RNA, 20 nt, Human
cccagaagacaggcugcagu

SEQ ID NO: 367846 - RNA, 22 nt, Human
cccagaagacaggcugcaguga

SEQ ID NO: 367847 - RNA, 21 nt, Human
cccagaagaccaaccccugug

SEQ ID NO: 367848 - RNA, 19 nt, Human
cccagaagaccaagagcca

SEQ ID NO: 367849 - RNA, 32 nt, Human
cccagaagaggaagaagaggaaggaaaaggag

SEQ ID NO: 367850 - RNA, 23 nt, Human
cccagaagaggacacaccagccc

SEQ ID NO: 367851 - RNA, 32 nt, Human
cccagaagcacugggccuuggccacagcaaca

SEQ ID NO: 367852 - RNA, 19 nt, Human
cccagaagcagcucugggc

SEQ ID NO: 367853 - RNA, 20 nt, Human
cccagaagcaguggcuggga

SEQ ID NO: 367854 - RNA, 23 nt, Human
cccagaagcgggcccucaggcca

SEQ ID NO: 367855 - RNA, 24 nt, Human
cccagaagcucaaggcugcaguga

SEQ ID NO: 367856 - RNA, 24 nt, Human
cccagaagcuugaagcugcaguga

SEQ ID NO: 367857 - RNA, 21 nt, Human
cccagaaggaaaucucugacc

SEQ ID NO: 367858 - RNA, 32 nt, Human
cccagaaggaagcaacaaagacagcaacugaa

SEQ ID NO: 367859 - RNA, 31 nt, Human
cccagaaggagcuucuuuaccucuuagcccu

SEQ ID NO: 367860 - RNA, 32 nt, Human
cccagaaggaggaggagaugaaggugaagcug

SEQ ID NO: 367861 - RNA, 32 nt, Human
cccagaaggaggcagagcuccgcagcuggauc

SEQ ID NO: 367862 - RNA, 19 nt, Human
cccagaaggcagagcagga

SEQ ID NO: 367863 - RNA, 24 nt, Human
cccagaaggcagagcuugcaguga

SEQ ID NO: 367864 - RNA, 24 nt, Human
cccagaaggcagagguagugguga

SEQ ID NO: 367865 - RNA, 24 nt, Human
cccagaaggcagagguugcaguga

SEQ ID NO: 367866 - RNA, 32 nt, Human
cccagaaggcagagguugcagugagcugagau

SEQ ID NO: 367867 - RNA, 23 nt, Human
cccagaaggcagagguugcauga

SEQ ID NO: 367868 - RNA, 24 nt, Human
cccagaaggcagagguuguaguga

SEQ ID NO: 367869 - RNA, 32 nt, Human
cccagaaggcagggaaaggcucugaaagccag

SEQ ID NO: 367870 - RNA, 32 nt, Human
cccagaaggcagggguugcagugagccaagau

SEQ ID NO: 367871 - RNA, 22 nt, Human
cccagaaggcgaagguugcagu

SEQ ID NO: 367872 - RNA, 24 nt, Human
cccagaaggcgaagguugcaguga

SEQ ID NO: 367873 - RNA, 24 nt, Human
cccagaaggcggaaguugcaguga

SEQ ID NO: 367874 - RNA, 32 nt, Human
cccagaaggcggaaguugcagugagccgagac

SEQ ID NO: 367875 - RNA, 32 nt, Human
cccagaaggcggaaguugcagugagccgagau

SEQ ID NO: 367876 - RNA, 32 nt, Human
cccagaaggcggaaguugcagugagcugagau

SEQ ID NO: 367877 - RNA, 32 nt, Human
cccagaaggggagcaggaggagagggaaguag

SEQ ID NO: 367878 - RNA, 24 nt, Human
cccagaaggucgaggcugcaggga

SEQ ID NO: 367879 - RNA, 24 nt, Human
cccagaaggucgaggcugcaguga

SEQ ID NO: 367880 - RNA, 32 nt, Human
cccagaaggucgaggcugcagugagcugagau

SEQ ID NO: 367881 - RNA, 22 nt, Human
cccagaaggugcagguugcagu

SEQ ID NO: 367882 - RNA, 24 nt, Human
cccagaaggugcagguugcaguga

SEQ ID NO: 367883 - RNA, 32 nt, Human
cccagaaggugcagguugcagugagcugagau

SEQ ID NO: 367884 - RNA, 32 nt, Human
cccagaagguggagguagcagugagccgagau

SEQ ID NO: 367885 - RNA, 32 nt, Human
cccagaagguggagguugcagugagccgagau

SEQ ID NO: 367886 - RNA, 20 nt, Human
cccagaaggugugagcuguc

SEQ ID NO: 367887 - RNA, 24 nt, Human
cccagaagguugagacugcaguga

SEQ ID NO: 367888 - RNA, 32 nt, Human
cccagaaguaccuuugcacuccugguuuucag

SEQ ID NO: 367889 - RNA, 32 nt, Human
cccagaaguagaagaauggggauggaguggug

SEQ ID NO: 367890 - RNA, 31 nt, Human
cccagaagugagagcaguuggcugcgcccca

SEQ ID NO: 367891 - RNA, 31 nt, Human
cccagaagugagagcaguuggcugugcccca

SEQ ID NO: 367892 - RNA, 32 nt, Human
cccagaaguggagaaccuuucccaccuguaga

SEQ ID NO: 367893 - RNA, 24 nt, Human
cccagaaguucaagaccagccuga

SEQ ID NO: 367894 - RNA, 24 nt, Human
cccagaaguucaaggcugcaauga

SEQ ID NO: 367895 - RNA, 21 nt, Human
cccagaaguucccucugccca

SEQ ID NO: 367896 - RNA, 24 nt, Human
cccagaaguuugaggcugcaauga

SEQ ID NO: 367897 - RNA, 24 nt, Human
cccagaaguuugaggcugcaguga

SEQ ID NO: 367898 - RNA, 32 nt, Human
cccagaaucuacugggcucugcagagagccca

SEQ ID NO: 367899 - RNA, 32 nt, Human
cccagaaucuagaagaauaaaugccaagaggg

SEQ ID NO: 367900 - RNA, 32 nt, Human
cccagaaucuguguuuuuaaaauacuacauga

SEQ ID NO: 367901 - RNA, 32 nt, Human
cccagaaugccacuccuguguuccccugcaag

SEQ ID NO: 367902 - RNA, 23 nt, Human
cccagaaugggaaccucagagaa

SEQ ID NO: 367903 - RNA, 32 nt, Human
cccagaauguacuuaucuuaccucggcaugua

SEQ ID NO: 367904 - RNA, 32 nt, Human
cccagaauguggcaguggaggugguagccucc

SEQ ID NO: 367905 - RNA, 31 nt, Human
cccagaauguugacagucgcucuccuagccc

SEQ ID NO: 367906 - RNA, 32 nt, Human
cccagaauucugauuccauguguaaugcgaau

SEQ ID NO: 367907 - RNA, 32 nt, Human
cccagaauucugggcaagucacccaggaugcu

SEQ ID NO: 367908 - RNA, 32 nt, Human
cccagaauugcaguucagaauggcaguccugg

SEQ ID NO: 367909 - RNA, 32 nt, Human
cccagaauuucucaucaggagugggcaagacc

SEQ ID NO: 367910 - RNA, 32 nt, Human
cccagaauuugaggccagccugggcaacguga

SEQ ID NO: 367911 - RNA, 32 nt, Human
cccagacaagcagcuggguuggcuucugagaa

SEQ ID NO: 367912 - RNA, 32 nt, Human
cccagacacaugcuaacaggaccuacaggaug

SEQ ID NO: 367913 - RNA, 32 nt, Human
cccagacaccuugcucccucucccaaaucaca

SEQ ID NO: 367914 - RNA, 32 nt, Human
cccagacacgacgacuucgcucggaggcacau

SEQ ID NO: 367915 - RNA, 18 nt, Human
cccagacacgcagucugc

SEQ ID NO: 367916 - RNA, 32 nt, Human
cccagacagcagcuguccccugugcuggugug

SEQ ID NO: 367917 - RNA, 32 nt, Human
cccagacagcaguucagaagucucauuacaca

SEQ ID NO: 367918 - RNA, 23 nt, Human
cccagacagccccagcccaguca

SEQ ID NO: 367919 - RNA, 32 nt, Human
cccagacagccuccuccaccauucccuucauc

SEQ ID NO: 367920 - RNA, 32 nt, Human
cccagacagccuguuucuauccuguuuaauaa

SEQ ID NO: 367921 - RNA, 32 nt, Human
cccagacagcuggcgcucacacauucaccguu

SEQ ID NO: 367922 - RNA, 32 nt, Human
cccagacaggcccacagacgagggcuggucuc

SEQ ID NO: 367923 - RNA, 23 nt, Human
cccagacaggccugggcccuggg

SEQ ID NO: 367924 - RNA, 32 nt, Human
cccagacaggguggccaggcagaggugcuccu

SEQ ID NO: 367925 - RNA, 32 nt, Human
cccagacagguggcgaaggcagaggagugguc

SEQ ID NO: 367926 - RNA, 32 nt, Human
cccagacagguggcgacggcagaggagcggaa

SEQ ID NO: 367927 - RNA, 32 nt, Human
cccagacaucaccuuucauucuggaccuacca

SEQ ID NO: 367928 - RNA, 18 nt, Human
cccagacaucccgaggaa

SEQ ID NO: 367929 - RNA, 17 nt, Human
cccagaccaacucccca

SEQ ID NO: 367930 - RNA, 32 nt, Human
cccagaccacggcagggcaugaccuggggagg

SEQ ID NO: 367931 - RNA, 20 nt, Human
cccagaccagagacaguggc

SEQ ID NO: 367932 - RNA, 21 nt, Human
cccagacccacagcccguguu

SEQ ID NO: 367933 - RNA, 22 nt, Human
cccagacccaccuccugcccca

SEQ ID NO: 367934 - RNA, 32 nt, Human
cccagacccagccugaccaacgauggcauuuc

SEQ ID NO: 367935 - RNA, 32 nt, Human
cccagacccagccugccuaaaggggcugccuu

SEQ ID NO: 367936 - RNA, 32 nt, Human
cccagacccaggaaguauaagucauugacagu

SEQ ID NO: 367937 - RNA, 32 nt, Human
cccagaccccaggaucagggagguguaaguag

SEQ ID NO: 367938 - RNA, 32 nt, Human
cccagacccuccagaucagcucagaguuugaa

SEQ ID NO: 367939 - RNA, 32 nt, Human
cccagacccucuugccuccagugagaaggaga

SEQ ID NO: 367940 - RNA, 32 nt, Human
cccagaccgagaaggucggaggcagaagccgg

SEQ ID NO: 367941 - RNA, 32 nt, Human
cccagaccucaagugauccgcccgccuuggcc

SEQ ID NO: 367942 - RNA, 32 nt, Human
cccagaccucaccuccaucccccucugucugc

SEQ ID NO: 367943 - RNA, 32 nt, Human
cccagaccucacuugccucugccuccaucuug

SEQ ID NO: 367944 - RNA, 32 nt, Human
cccagaccuccaccuccuccagacccccuccc

SEQ ID NO: 367945 - RNA, 18 nt, Human
cccagaccuccccacuga

SEQ ID NO: 367946 - RNA, 24 nt, Human
cccagaccugccccuuucacuagg

SEQ ID NO: 367947 - RNA, 32 nt, Human
cccagaccugcuccccugucccuggggaggag

SEQ ID NO: 367948 - RNA, 21 nt, Human
cccagaccuggccaggccagc

SEQ ID NO: 367949 - RNA, 32 nt, Human
cccagaccugggauggcggaggccggccugag

SEQ ID NO: 367950 - RNA, 32 nt, Human
cccagaccuggucaucugcagcucuggcccag

SEQ ID NO: 367951 - RNA, 32 nt, Human
cccagaccugugaaggugggagcagcucacca

SEQ ID NO: 367952 - RNA, 32 nt, Human
cccagacgccaggaaaagaagaaacaacaaag

SEQ ID NO: 367953 - RNA, 19 nt, Human
cccagacgcgcaggccaag

SEQ ID NO: 367954 - RNA, 32 nt, Human
cccagacgcggagaaaauggcggcaggggucg

SEQ ID NO: 367955 - RNA, 24 nt, Human
cccagacgcgggcgccacaugccc

SEQ ID NO: 367956 - RNA, 32 nt, Human
cccagacgggcuucugcauccauucccucuuu

SEQ ID NO: 367957 - RNA, 22 nt, Human
cccagacuaaaggcuacaguga

SEQ ID NO: 367958 - RNA, 20 nt, Human
cccagacuagaaugcagugg

SEQ ID NO: 367959 - RNA, 20 nt, Human
cccagacuagagugcaaugg

SEQ ID NO: 367960 - RNA, 20 nt, Human
cccagacuagagugcagugg

SEQ ID NO: 367961 - RNA, 21 nt, Human
cccagacuagagugcaguggc

SEQ ID NO: 367962 - RNA, 32 nt, Human
cccagacuauccagagugaaugcagcuccgcu

SEQ ID NO: 367963 - RNA, 32 nt, Human
cccagacucaaggccuccagccacuuauuucc

SEQ ID NO: 367964 - RNA, 32 nt, Human
cccagacucacacaucuuccuccaggucaggg

SEQ ID NO: 367965 - RNA, 23 nt, Human
cccagacucagugggagcccugg

SEQ ID NO: 367966 - RNA, 32 nt, Human
cccagacuccagcccuggaccgcgcaucccga

SEQ ID NO: 367967 - RNA, 19 nt, Human
cccagacuccaggugccuu

SEQ ID NO: 367968 - RNA, 32 nt, Human
cccagacucccagagagaaaauaaccucgcca

SEQ ID NO: 367969 - RNA, 32 nt, Human
cccagacucccagggcaccugcuugcaccuuu

SEQ ID NO: 367970 - RNA, 32 nt, Human
cccagacuccgccugaggccagccugcgggaa

SEQ ID NO: 367971 - RNA, 32 nt, Human
cccagacucggccuccucuccugggacucggc

SEQ ID NO: 367972 - RNA, 32 nt, Human
cccagacucuaggaagcuggaauggagggcag

SEQ ID NO: 367973 - RNA, 32 nt, Human
cccagacucugucugugccgaguguauuauaa

SEQ ID NO: 367974 - RNA, 21 nt, Human
cccagacugcagguuaucuga

SEQ ID NO: 367975 - RNA, 20 nt, Human
cccagacuggaaugcaguga

SEQ ID NO: 367976 - RNA, 20 nt, Human
cccagacuggacugcagugg

SEQ ID NO: 367977 - RNA, 19 nt, Human
cccagacuggagugcaaug

SEQ ID NO: 367978 - RNA, 19 nt, Human
cccagacuggagugcaggg

SEQ ID NO: 367979 - RNA, 19 nt, Human
cccagacuggagugcagug

SEQ ID NO: 367980 - RNA, 20 nt, Human
cccagacuggagugcagugg

SEQ ID NO: 367981 - RNA, 21 nt, Human
cccagacuggagugcaguggc

SEQ ID NO: 367982 - RNA, 23 nt, Human
cccagacuggagugcaguggugu

SEQ ID NO: 367983 - RNA, 19 nt, Human
cccagacuggagugcgaug

SEQ ID NO: 367984 - RNA, 20 nt, Human
cccagacuggagugcugugg

SEQ ID NO: 367985 - RNA, 32 nt, Human
cccagacuggcggaucaccugaggucaggaga

SEQ ID NO: 367986 - RNA, 20 nt, Human
cccagacuggcgugcagugg

SEQ ID NO: 367987 - RNA, 24 nt, Human
cccagacugggaaccaccaucuga

SEQ ID NO: 367988 - RNA, 32 nt, Human
cccagacuggggccuuugcccucaaggggguu

SEQ ID NO: 367989 - RNA, 32 nt, Human
cccagacuggucucgaacuccugggcucaaac

SEQ ID NO: 367990 - RNA, 32 nt, Human
cccagacugugagcuccuugagggcagggacu

SEQ ID NO: 367991 - RNA, 32 nt, Human
cccagacuuccuuuguguuaguuaauaaagcu

SEQ ID NO: 367992 - RNA, 32 nt, Human
cccagacuucuccacgcgcuggcuccauaaag

SEQ ID NO: 367993 - RNA, 32 nt, Human
cccagacuucugucuuuucagcugcagugaag

SEQ ID NO: 367994 - RNA, 32 nt, Human
cccagacuugaacaucagcagagaugcggugc

SEQ ID NO: 367995 - RNA, 32 nt, Human
cccagacuugcaggcucacggugcagggugaa

SEQ ID NO: 367996 - RNA, 24 nt, Human
cccagacuugggccguugcucuga

SEQ ID NO: 367997 - RNA, 24 nt, Human
cccagacuugggcuguugcucuga

SEQ ID NO: 367998 - RNA, 32 nt, Human
cccagacuuuacaugacacagcuuuaucacca

SEQ ID NO: 367999 - RNA, 19 nt, Human
cccagagaaaaccauguac

SEQ ID NO: 368000 - RNA, 32 nt, Human
cccagagaaaagagccucagcaagagaguuuu

SEQ ID NO: 368001 - RNA, 20 nt, Human
cccagagaaauacugacgaa

SEQ ID NO: 368002 - RNA, 32 nt, Human
cccagagaaccuagcagagagcucuguacgug

SEQ ID NO: 368003 - RNA, 20 nt, Human
cccagagaaggaacuucgaa

SEQ ID NO: 368004 - RNA, 32 nt, Human
cccagagaauggcugagcaggacagugggaga

SEQ ID NO: 368005 - RNA, 32 nt, Human
cccagagacaucgauucaccccaaagugcugg

SEQ ID NO: 368006 - RNA, 20 nt, Human
cccagagaccaagaucauca

SEQ ID NO: 368007 - RNA, 32 nt, Human
cccagagaccuccaccucaacuucuggcuguc

SEQ ID NO: 368008 - RNA, 32 nt, Human
cccagagaccuucugaucuccaaaaagaggag

SEQ ID NO: 368009 - RNA, 21 nt, Human
cccagagaccuuugcccacac

SEQ ID NO: 368010 - RNA, 23 nt, Human
cccagagacuaggacccaaagaa

SEQ ID NO: 368011 - RNA, 22 nt, Human
cccagagacucccucacccagg

SEQ ID NO: 368012 - RNA, 32 nt, Human
cccagagacucuuuucagcagaaaguuaugcu

SEQ ID NO: 368013 - RNA, 32 nt, Human
cccagagagaaaaagagagagcaggguggggu

SEQ ID NO: 368014 - RNA, 32 nt, Human
cccagagagaaaaagcaucccaccuggggagg

SEQ ID NO: 368015 - RNA, 32 nt, Human
cccagagagacaccagagaacccaccauggcc

SEQ ID NO: 368016 - RNA, 32 nt, Human
cccagagagacagggccaucccucaugucugu

SEQ ID NO: 368017 - RNA, 18 nt, Human
cccagagagaccaugcau

SEQ ID NO: 368018 - RNA, 32 nt, Human
cccagagagacugccuucccuacacuagaagu

SEQ ID NO: 368019 - RNA, 32 nt, Human
cccagagagagcuguccgccagugcaucauua

SEQ ID NO: 368020 - RNA, 32 nt, Human
cccagagagcaucuggcuucaauuuuccuuuu

SEQ ID NO: 368021 - RNA, 32 nt, Human
cccagagagccccagagcucucaagcuccuuu

SEQ ID NO: 368022 - RNA, 21 nt, Human
cccagagagccccucauccuu

SEQ ID NO: 368023 - RNA, 32 nt, Human
cccagagagcuuguucccucccucccugugca

SEQ ID NO: 368024 - RNA, 32 nt, Human
cccagagaggaugccacagggaaaguaugaaa

SEQ ID NO: 368025 - RNA, 32 nt, Human
cccagagaggggaagagauucauccaaggcaa

SEQ ID NO: 368026 - RNA, 24 nt, Human
cccagagaggguagcuaccuugcc

SEQ ID NO: 368027 - RNA, 32 nt, Human
cccagagaguccauacaaauucugcuccggga

SEQ ID NO: 368028 - RNA, 22 nt, Human
cccagagaguggauggccaagu

SEQ ID NO: 368029 - RNA, 32 nt, Human
cccagagaucagcagggucgcuggacuaggau

SEQ ID NO: 368030 - RNA, 32 nt, Human
cccagagaugccccaggguggaggggguggga

SEQ ID NO: 368031 - RNA, 32 nt, Human
cccagagcaaaauaauucaguguaauacaucu

SEQ ID NO: 368032 - RNA, 32 nt, Human
cccagagcaaucuagaaucuuugagugcuugg

SEQ ID NO: 368033 - RNA, 32 nt, Human
cccagagcaaugacaccagucuggacucuggg

SEQ ID NO: 368034 - RNA, 32 nt, Human
cccagagcacagagagagcugggaugaagaau

SEQ ID NO: 368035 - RNA, 32 nt, Human
cccagagcaccaacagcacccagcccacggcu

SEQ ID NO: 368036 - RNA, 32 nt, Human
cccagagcacucugcgcccccagccugcccca

SEQ ID NO: 368037 - RNA, 32 nt, Human
cccagagcagagccccuuaccucccaggucag

SEQ ID NO: 368038 - RNA, 32 nt, Human
cccagagcagcaaacacaugaaagucagaagu

SEQ ID NO: 368039 - RNA, 32 nt, Human
cccagagcagcaucucucucauccuggaaggc

SEQ ID NO: 368040 - RNA, 32 nt, Human
cccagagcagguguugcagacaggagggccac

SEQ ID NO: 368041 - RNA, 20 nt, Human
cccagagccaacuuacccca

SEQ ID NO: 368042 - RNA, 22 nt, Human
cccagagccaagguggcuggga

SEQ ID NO: 368043 - RNA, 24 nt, Human
cccagagccacacaacucuugagg

SEQ ID NO: 368044 - RNA, 32 nt, Human
cccagagccacccgcuaugagcacaggccggg

SEQ ID NO: 368045 - RNA, 32 nt, Human
cccagagccacgggucuugcugugcugggggu

SEQ ID NO: 368046 - RNA, 32 nt, Human
cccagagccagccugggauugucagccuucaa

SEQ ID NO: 368047 - RNA, 32 nt, Human
cccagagccagcgucuucauggggaagaugaa

SEQ ID NO: 368048 - RNA, 32 nt, Human
cccagagccaggcggugcaggagccaggccca

SEQ ID NO: 368049 - RNA, 32 nt, Human
cccagagccaggggacagguuggggcuguggg

SEQ ID NO: 368050 - RNA, 32 nt, Human
cccagagccaggggagccagagcugcuuuagc

SEQ ID NO: 368051 - RNA, 26 nt, Human
cccagagcccaaggaagagcugggaa

SEQ ID NO: 368052 - RNA, 20 nt, Human
cccagagcccccuccccagc

SEQ ID NO: 368053 - RNA, 32 nt, Human
cccagagcccccugucccccagcuucagccgg

SEQ ID NO: 368054 - RNA, 32 nt, Human
cccagagcccucucccugucacucccugaaac

SEQ ID NO: 368055 - RNA, 32 nt, Human
cccagagccgggcccuguuuccuuggacgggg

SEQ ID NO: 368056 - RNA, 32 nt, Human
cccagagccuccagaggaaugcagcccuguug

SEQ ID NO: 368057 - RNA, 23 nt, Human
cccagagccucccaaggcuggga

SEQ ID NO: 368058 - RNA, 24 nt, Human
cccagagccucccaaggcugggaa

SEQ ID NO: 368059 - RNA, 21 nt, Human
cccagagccuccgccuguggc

SEQ ID NO: 368060 - RNA, 21 nt, Human
cccagagccuccuggcccccg

SEQ ID NO: 368061 - RNA, 32 nt, Human
cccagagccuuguuuggcccugaucucugacu

SEQ ID NO: 368062 - RNA, 23 nt, Human
cccagagcggaagauugcgguga

SEQ ID NO: 368063 - RNA, 32 nt, Human
cccagagcgggacaaaccagaggcccuuugca

SEQ ID NO: 368064 - RNA, 32 nt, Human
cccagagcguccacagcaccauucccagugua

SEQ ID NO: 368065 - RNA, 32 nt, Human
cccagagcuaaccccugucuucuuccccaggc

SEQ ID NO: 368066 - RNA, 24 nt, Human
cccagagcuacagcugggcuggga

SEQ ID NO: 368067 - RNA, 32 nt, Human
cccagagcucagaacuaacugugagauguacc

SEQ ID NO: 368068 - RNA, 32 nt, Human
cccagagcuggaccugagcuauucucacucgg

SEQ ID NO: 368069 - RNA, 32 nt, Human
cccagagcuggccucccccaacaccugcugcg

SEQ ID NO: 368070 - RNA, 32 nt, Human
cccagagcuuccaugcaaaggaauucuucaag

SEQ ID NO: 368071 - RNA, 32 nt, Human
cccagagcuucuuccuuuggcuacgcaggaug

SEQ ID NO: 368072 - RNA, 32 nt, Human
cccagagcuuguggcuuugaugccauuugucu

SEQ ID NO: 368073 - RNA, 32 nt, Human
cccagaggaaaagaagucacaguuaugaaaga

SEQ ID NO: 368074 - RNA, 17 nt, Human
cccagaggaaagcuguu

SEQ ID NO: 368075 - RNA, 30 nt, Human
cccagaggaagcccagggcccagccaacuc

SEQ ID NO: 368076 - RNA, 32 nt, Human
cccagaggacaguggguggagugguaccuacu

SEQ ID NO: 368077 - RNA, 21 nt, Human
cccagaggaccccucccuggc

SEQ ID NO: 368078 - RNA, 32 nt, Human
cccagaggacucccguggugggcacaguucua

SEQ ID NO: 368079 - RNA, 32 nt, Human
cccagaggagaggagacagacacacacuggcu

SEQ ID NO: 368080 - RNA, 32 nt, Human
cccagaggagaggauaggaaccucuccuccag

SEQ ID NO: 368081 - RNA, 22 nt, Human
cccagaggagagugugcacuca

SEQ ID NO: 368082 - RNA, 32 nt, Human
cccagaggagccaagccgcacagacccgagaa

SEQ ID NO: 368083 - RNA, 32 nt, Human
cccagaggagcucuuaccuggcccagaaucug

SEQ ID NO: 368084 - RNA, 22 nt, Human
cccagaggcacauccggacaag

SEQ ID NO: 368085 - RNA, 23 nt, Human
cccagaggcagagguugcaguga

SEQ ID NO: 368086 - RNA, 23 nt, Human
cccagaggcagagguugcgguga

SEQ ID NO: 368087 - RNA, 23 nt, Human
cccagaggcagagguugugguga

SEQ ID NO: 368088 - RNA, 32 nt, Human
cccagaggcagugggagcuguuggggagccgu

SEQ ID NO: 368089 - RNA, 18 nt, Human
cccagaggccagggccag

SEQ ID NO: 368090 - RNA, 32 nt, Human
cccagaggcccaggcugaucggugucggagcg

SEQ ID NO: 368091 - RNA, 22 nt, Human
cccagaggcccuccuguccgaa

SEQ ID NO: 368092 - RNA, 25 nt, Human
cccagaggccucugaaccccagggu

SEQ ID NO: 368093 - RNA, 32 nt, Human
cccagaggccugcucuccucacacauugugug

SEQ ID NO: 368094 - RNA, 23 nt, Human
cccagaggcggagguuguaguga

SEQ ID NO: 368095 - RNA, 32 nt, Human
cccagaggcugaagcaaacagugucccuucug

SEQ ID NO: 368096 - RNA, 32 nt, Human
cccagaggcugaggcaggcggaucaccugagg

SEQ ID NO: 368097 - RNA, 32 nt, Human
cccagaggcugaucugcaaaucaagcuacaug

SEQ ID NO: 368098 - RNA, 32 nt, Human
cccagaggcugcagagagcaaaacagcugcca

SEQ ID NO: 368099 - RNA, 18 nt, Human
cccagaggcugggcccug

SEQ ID NO: 368100 - RNA, 18 nt, Human
cccagaggcugggucccu

SEQ ID NO: 368101 - RNA, 23 nt, Human
cccagaggcuuuuccagcaccca

SEQ ID NO: 368102 - RNA, 32 nt, Human
cccagagggaaagaccuugccuuagaagaaga

SEQ ID NO: 368103 - RNA, 32 nt, Human
cccagagggaaagaggagaaaugugagacuua

SEQ ID NO: 368104 - RNA, 32 nt, Human
cccagagggaaaggagguuugccagagggacc

SEQ ID NO: 368105 - RNA, 16 nt, Human
cccagagggaguuguc

SEQ ID NO: 368106 - RNA, 32 nt, Human
cccagagggauauugcuucaguugaccucauu

SEQ ID NO: 368107 - RNA, 32 nt, Human
cccagagggcacuuucagcugcccucaauaau

SEQ ID NO: 368108 - RNA, 21 nt, Human
cccagagggcagaagcagcgu

SEQ ID NO: 368109 - RNA, 32 nt, Human
cccagagggcucaggaugccccaggaaggaaa

SEQ ID NO: 368110 - RNA, 16 nt, Human
cccagaggggagccgg

SEQ ID NO: 368111 - RNA, 18 nt, Human
cccagagggggcaugcac

SEQ ID NO: 368112 - RNA, 32 nt, Human
cccagagggucagaacuggacagcugcagaga

SEQ ID NO: 368113 - RNA, 21 nt, Human
cccagaggucaagacugcagu

SEQ ID NO: 368114 - RNA, 23 nt, Human
cccagaggucaagacugcaguga

SEQ ID NO: 368115 - RNA, 23 nt, Human
cccagaggucaaggcugcaguga

SEQ ID NO: 368116 - RNA, 32 nt, Human
cccagaggucccaucugaagcuggaguacccu

SEQ ID NO: 368117 - RNA, 32 nt, Human
cccagagguggaccaggcaucuccuggccacc

SEQ ID NO: 368118 - RNA, 32 nt, Human
cccagagguggaggccacggaggcagggucuc

SEQ ID NO: 368119 - RNA, 23 nt, Human
cccagagguggagguugcaguga

SEQ ID NO: 368120 - RNA, 32 nt, Human
cccagagguucacagcgugugcccaggacagc

SEQ ID NO: 368121 - RNA, 32 nt, Human
cccagaguaaacaacagaaauuuuucuuaaau

SEQ ID NO: 368122 - RNA, 19 nt, Human
cccagagucaaggccaagu

SEQ ID NO: 368123 - RNA, 32 nt, Human
cccagagucaccaaggcaaaguuggggcuggu

SEQ ID NO: 368124 - RNA, 32 nt, Human
cccagagucaucugauuggacaggcaugggug

SEQ ID NO: 368125 - RNA, 32 nt, Human
cccagagucaucuucgggacgcccagggcccg

SEQ ID NO: 368126 - RNA, 18 nt, Human
cccagaguccaggagcug

SEQ ID NO: 368127 - RNA, 32 nt, Human
cccagagucccaggccccuggaguuguuuucg

SEQ ID NO: 368128 - RNA, 32 nt, Human
cccagaguccccaaaauugagugucaaacaga

SEQ ID NO: 368129 - RNA, 32 nt, Human
cccagaguccccagagguaaccacuagagggg

SEQ ID NO: 368130 - RNA, 19 nt, Human
cccagaguccccccacuag

SEQ ID NO: 368131 - RNA, 23 nt, Human
cccagagucuaagacugcaguga

SEQ ID NO: 368132 - RNA, 32 nt, Human
cccagagucucucaugagguugcaguuaagac

SEQ ID NO: 368133 - RNA, 32 nt, Human
cccagagucugaggacugucacugcaacgugc

SEQ ID NO: 368134 - RNA, 20 nt, Human
cccagagucuggccauaaac

SEQ ID NO: 368135 - RNA, 32 nt, Human
cccagagugcaggaucauagggacagcggggg

SEQ ID NO: 368136 - RNA, 22 nt, Human
cccagagugcccguggcuccca

SEQ ID NO: 368137 - RNA, 23 nt, Human
cccagagugcuaggauuacaggc

SEQ ID NO: 368138 - RNA, 24 nt, Human
cccagagugcuaggauuacaggca

SEQ ID NO: 368139 - RNA, 24 nt, Human
cccagagugcuggaauuacaagca

SEQ ID NO: 368140 - RNA, 22 nt, Human
cccagagugcugggauuacagg

SEQ ID NO: 368141 - RNA, 24 nt, Human
cccagagugcugggauuacaggca

SEQ ID NO: 368142 - RNA, 32 nt, Human
cccagagugcuggguugggauuacaggcguga

SEQ ID NO: 368143 - RNA, 32 nt, Human
cccagauaccaugucaggauauuuuuaguguc

SEQ ID NO: 368144 - RNA, 32 nt, Human
cccagauacucuuuccuuuccucucuccuguu

SEQ ID NO: 368145 - RNA, 32 nt, Human
cccagauagaucaggcaaggcuuggagagcug

SEQ ID NO: 368146 - RNA, 24 nt, Human
cccagauagcagagguugcaguga

SEQ ID NO: 368147 - RNA, 32 nt, Human
cccagauagccucgggcgcugccuguagucau

SEQ ID NO: 368148 - RNA, 32 nt, Human
cccagauagccucgggugcugccuguagucau

SEQ ID NO: 368149 - RNA, 24 nt, Human
cccagauagcugggacuacaggca

SEQ ID NO: 368150 - RNA, 32 nt, Human
cccagauagcugguggugggcgcuaauccucc

SEQ ID NO: 368151 - RNA, 32 nt, Human
cccagauaggagagaucauuaaaacagugcau

SEQ ID NO: 368152 - RNA, 21 nt, Human
cccagauaucaccccugagga

SEQ ID NO: 368153 - RNA, 21 nt, Human
cccagauauccucaccucagg

SEQ ID NO: 368154 - RNA, 32 nt, Human
cccagaucacggugggaagugaaagaggggcu

SEQ ID NO: 368155 - RNA, 21 nt, Human
cccagaucagcugcagacaag

SEQ ID NO: 368156 - RNA, 32 nt, Human
cccagaucagcugcagacaagagcagagcuuu

SEQ ID NO: 368157 - RNA, 32 nt, Human
cccagaucagcuuugcacauggugcugaccuc

SEQ ID NO: 368158 - RNA, 32 nt, Human
cccagaucauagaccucucugcauaguaguca

SEQ ID NO: 368159 - RNA, 32 nt, Human
cccagauccagaggagcucgacugggggucca

SEQ ID NO: 368160 - RNA, 32 nt, Human
cccagauccccacuuuuccccuccagugccuc

SEQ ID NO: 368161 - RNA, 32 nt, Human
cccagauccccuuggagccucugcccuccucc

SEQ ID NO: 368162 - RNA, 32 nt, Human
cccagaucccgcaaucagagcggccagagagc

SEQ ID NO: 368163 - RNA, 21 nt, Human
cccagaucccucccagcccca

SEQ ID NO: 368164 - RNA, 32 nt, Human
cccagaucucaggagucucugccuucaggguc

SEQ ID NO: 368165 - RNA, 28 nt, Human
cccagaucucauccugccucauccugag

SEQ ID NO: 368166 - RNA, 32 nt, Human
cccagaucucugcacuucucagucccagaucc

SEQ ID NO: 368167 - RNA, 19 nt, Human
cccagaucucugccugcca

SEQ ID NO: 368168 - RNA, 32 nt, Human
cccagaucuugaguucuucccucugagagugg

SEQ ID NO: 368169 - RNA, 32 nt, Human
cccagaugcaggagucacccagcuuccuucuc

SEQ ID NO: 368170 - RNA, 30 nt, Human
cccagaugcaugcacacgcacacacauauu

SEQ ID NO: 368171 - RNA, 32 nt, Human
cccagaugcccaggcucacuucaguguugagu

SEQ ID NO: 368172 - RNA, 32 nt, Human
cccagauggaaauccuguaugaauguggaagc

SEQ ID NO: 368173 - RNA, 32 nt, Human
cccagauggguggaucaccugaggucaggagu

SEQ ID NO: 368174 - RNA, 29 nt, Human
cccagaugucugugcuuaugccuggccug

SEQ ID NO: 368175 - RNA, 21 nt, Human
cccagauuccacugcugggaa

SEQ ID NO: 368176 - RNA, 32 nt, Human
cccagauuccacugcugggaauaaucuccagg

SEQ ID NO: 368177 - RNA, 32 nt, Human
cccagauugcccacugcacuccagccugggca

SEQ ID NO: 368178 - RNA, 20 nt, Human
cccagauuggagugcagugg

SEQ ID NO: 368179 - RNA, 21 nt, Human
cccagauuggagugcaguggc

SEQ ID NO: 368180 - RNA, 32 nt, Human
cccagauugggguggagcaggaaggagcucuu

SEQ ID NO: 368181 - RNA, 32 nt, Human
cccagauuuucucccuccugacucacugagac

SEQ ID NO: 368182 - RNA, 32 nt, Human
cccagcaaagccagagagcuuuguccccggcc

SEQ ID NO: 368183 - RNA, 32 nt, Human
cccagcaaaguccacccaggaaaaagaaacca

SEQ ID NO: 368184 - RNA, 32 nt, Human
cccagcaaauucaguaaccaccaggcacaaau

SEQ ID NO: 368185 - RNA, 20 nt, Human
cccagcaacccuggccccca

SEQ ID NO: 368186 - RNA, 32 nt, Human
cccagcaaccucugcccugccucccucucaga

SEQ ID NO: 368187 - RNA, 32 nt, Human
cccagcaacugcuucucucccuucucucuccu

SEQ ID NO: 368188 - RNA, 20 nt, Human
cccagcaagaggaagcuguc

SEQ ID NO: 368189 - RNA, 32 nt, Human
cccagcaagccagccaccugcccagccgggcc

SEQ ID NO: 368190 - RNA, 32 nt, Human
cccagcaagcucaccgccuccuuggaggagag

SEQ ID NO: 368191 - RNA, 20 nt, Human
cccagcaagcucagccgcug

SEQ ID NO: 368192 - RNA, 32 nt, Human
cccagcaagggcccugugugggacagcaggag

SEQ ID NO: 368193 - RNA, 18 nt, Human
cccagcaagggggugcag

SEQ ID NO: 368194 - RNA, 32 nt, Human
cccagcaaucacccuccucacuuccuugucua

SEQ ID NO: 368195 - RNA, 32 nt, Human
cccagcaaucugugcuuucuuucacaagcccu

SEQ ID NO: 368196 - RNA, 21 nt, Human
cccagcaaucuguuccugcuu

SEQ ID NO: 368197 - RNA, 32 nt, Human
cccagcaauugcacuccugggccucugacaga

SEQ ID NO: 368198 - RNA, 32 nt, Human
cccagcacaagcugcccuugcuguccugugca

SEQ ID NO: 368199 - RNA, 32 nt, Human
cccagcacaaguacugaugagcucuccacugc

SEQ ID NO: 368200 - RNA, 32 nt, Human
cccagcacacaacugcacugaagccuuguucc

SEQ ID NO: 368201 - RNA, 32 nt, Human
cccagcacacacacauacaacacagaucauuu

SEQ ID NO: 368202 - RNA, 32 nt, Human
cccagcacaccuggaaaguucugcaaggccuc

SEQ ID NO: 368203 - RNA, 32 nt, Human
cccagcacacgcgcucgcacacacacgcacgc

SEQ ID NO: 368204 - RNA, 16 nt, Human
cccagcacacugggag

SEQ ID NO: 368205 - RNA, 32 nt, Human
cccagcacaggccuggcagacagcagguccuc

SEQ ID NO: 368206 - RNA, 32 nt, Human
cccagcacauugggaagaucacuugaggcaag

SEQ ID NO: 368207 - RNA, 27 nt, Human
cccagcacauuuuccuguaagcacuca

SEQ ID NO: 368208 - RNA, 32 nt, Human
cccagcaccacacaccccgccccugaaaggag

SEQ ID NO: 368209 - RNA, 32 nt, Human
cccagcaccacugcccaccuagcuguccuggc

SEQ ID NO: 368210 - RNA, 32 nt, Human
cccagcaccagggggagcaaacccugccccug

SEQ ID NO: 368211 - RNA, 32 nt, Human
cccagcacccaccugaguccaccucaguccug

SEQ ID NO: 368212 - RNA, 22 nt, Human
cccagcacccgccccuuccuca

SEQ ID NO: 368213 - RNA, 19 nt, Human
cccagcacccuggcuccca

SEQ ID NO: 368214 - RNA, 32 nt, Human
cccagcaccuccccuccuccagcuuccuggcc

SEQ ID NO: 368215 - RNA, 32 nt, Human
cccagcaccuuccagauugagagcaagguaga

SEQ ID NO: 368216 - RNA, 32 nt, Human
cccagcacgccugcuuuguggggcagggccau

SEQ ID NO: 368217 - RNA, 16 nt, Human
cccagcacgcugggag

SEQ ID NO: 368218 - RNA, 32 nt, Human
cccagcacgggcuuggcacagagcaggugccu

SEQ ID NO: 368219 - RNA, 32 nt, Human
cccagcacgucugccucuggcuucacccagcc

SEQ ID NO: 368220 - RNA, 32 nt, Human
cccagcacugaggagcucgccugcugcccucu

SEQ ID NO: 368221 - RNA, 32 nt, Human
cccagcacugcagccucaaccuccugggcuca

SEQ ID NO: 368222 - RNA, 23 nt, Human
cccagcacugcaggcagcggcgc

SEQ ID NO: 368223 - RNA, 18 nt, Human
cccagcacugcccagugc

SEQ ID NO: 368224 - RNA, 18 nt, Human
cccagcacugugcuguug

SEQ ID NO: 368225 - RNA, 32 nt, Human
cccagcacuuugggaggccaggaguucgagac

SEQ ID NO: 368226 - RNA, 32 nt, Human
cccagcagaaggauccgccacaggggaggugu

SEQ ID NO: 368227 - RNA, 22 nt, Human
cccagcagaaucaaaguggauc

SEQ ID NO: 368228 - RNA, 32 nt, Human
cccagcagacaggccguaggggaugccgggag

SEQ ID NO: 368229 - RNA, 32 nt, Human
cccagcagacccuccuguugguuccagcgaag

SEQ ID NO: 368230 - RNA, 32 nt, Human
cccagcagagagaguugaccccuccugaacug

SEQ ID NO: 368231 - RNA, 32 nt, Human
cccagcagagcagcaggauccccagccagacu

SEQ ID NO: 368232 - RNA, 24 nt, Human
cccagcagagcccacaagagaguc

SEQ ID NO: 368233 - RNA, 23 nt, Human
cccagcagagccgugggaggguc

SEQ ID NO: 368234 - RNA, 20 nt, Human
cccagcagagcuacaggagg

SEQ ID NO: 368235 - RNA, 24 nt, Human
cccagcagagcuggcuucuggguc

SEQ ID NO: 368236 - RNA, 24 nt, Human
cccagcagagcugggggagggauc

SEQ ID NO: 368237 - RNA, 21 nt, Human
cccagcagagcuugggaaggg

SEQ ID NO: 368238 - RNA, 24 nt, Human
cccagcagaggacuccagccuucu

SEQ ID NO: 368239 - RNA, 21 nt, Human
cccagcagaggcaggcuggga

SEQ ID NO: 368240 - RNA, 32 nt, Human
cccagcagagguggggccggcagagaaggggc

SEQ ID NO: 368241 - RNA, 32 nt, Human
cccagcagagucccagcauggcaccuuccuug

SEQ ID NO: 368242 - RNA, 22 nt, Human
cccagcagagugaaaguggauc

SEQ ID NO: 368243 - RNA, 32 nt, Human
cccagcagaguggugcggcacauucaagucag

SEQ ID NO: 368244 - RNA, 32 nt, Human
cccagcagauaugggcaccugaggcggagucu

SEQ ID NO: 368245 - RNA, 32 nt, Human
cccagcagaucuacucugggaugucuguuuca

SEQ ID NO: 368246 - RNA, 24 nt, Human
cccagcagauggagguugcaguga

SEQ ID NO: 368247 - RNA, 32 nt, Human
cccagcagauggagguugcagugagccaagau

SEQ ID NO: 368248 - RNA, 22 nt, Human
cccagcagaugugucggacaag

SEQ ID NO: 368249 - RNA, 32 nt, Human
cccagcagcacacccaugugcagugcgccugc

SEQ ID NO: 368250 - RNA, 32 nt, Human
cccagcagccagagcaccagcccagccauggu

SEQ ID NO: 368251 - RNA, 32 nt, Human
cccagcagccaucucaaccaccuaucccugcg

SEQ ID NO: 368252 - RNA, 23 nt, Human
cccagcagcccacucucguccga

SEQ ID NO: 368253 - RNA, 32 nt, Human
cccagcagcccccagccgaggggcccagggcc

SEQ ID NO: 368254 - RNA, 32 nt, Human
cccagcagccgcugcccccucacugcccaccc

SEQ ID NO: 368255 - RNA, 32 nt, Human
cccagcagccggaccagccuugggcaacagcg

SEQ ID NO: 368256 - RNA, 21 nt, Human
cccagcagccucagaaggauc

SEQ ID NO: 368257 - RNA, 32 nt, Human
cccagcagccugggggaagugucaggagaugu

SEQ ID NO: 368258 - RNA, 19 nt, Human
cccagcagccugugcccug

SEQ ID NO: 368259 - RNA, 32 nt, Human
cccagcagcucugcaaccuccgcuccaccacu

SEQ ID NO: 368260 - RNA, 32 nt, Human
cccagcagcugauguccaaggaucaggaugag

SEQ ID NO: 368261 - RNA, 32 nt, Human
cccagcagcugccuccugaggugacacagccu

SEQ ID NO: 368262 - RNA, 23 nt, Human
cccagcagcugggacuacaggca

SEQ ID NO: 368263 - RNA, 32 nt, Human
cccagcaggaacagcuacuacucauccugcag

SEQ ID NO: 368264 - RNA, 32 nt, Human
cccagcaggacgccccauccugggugaggggg

SEQ ID NO: 368265 - RNA, 20 nt, Human
cccagcaggaggaagcccag

SEQ ID NO: 368266 - RNA, 32 nt, Human
cccagcaggaggaaugaacaacuccagaugcg

SEQ ID NO: 368267 - RNA, 32 nt, Human
cccagcaggaggcagggguagagugauggaag

SEQ ID NO: 368268 - RNA, 18 nt, Human
cccagcaggagggaggcg

SEQ ID NO: 368269 - RNA, 21 nt, Human
cccagcaggagugggaggguc

SEQ ID NO: 368270 - RNA, 24 nt, Human
cccagcaggcagagguugcaguga

SEQ ID NO: 368271 - RNA, 32 nt, Human
cccagcaggcagagguugcagugagccaagau

SEQ ID NO: 368272 - RNA, 32 nt, Human
cccagcaggcagagguugcagugagcugagau

SEQ ID NO: 368273 - RNA, 20 nt, Human
cccagcaggcagcggcugga

SEQ ID NO: 368274 - RNA, 20 nt, Human
cccagcaggcccaggccagc

SEQ ID NO: 368275 - RNA, 19 nt, Human
cccagcaggccgggcgcgg

SEQ ID NO: 368276 - RNA, 23 nt, Human
cccagcaggcggagguugcggug

SEQ ID NO: 368277 - RNA, 24 nt, Human
cccagcaggcggagguugcgguga

SEQ ID NO: 368278 - RNA, 32 nt, Human
cccagcaggcggagguugcggugagucgagau

SEQ ID NO: 368279 - RNA, 23 nt, Human
cccagcaggcuagagugcgaugg

SEQ ID NO: 368280 - RNA, 20 nt, Human
cccagcagggcuggcccgga

SEQ ID NO: 368281 - RNA, 19 nt, Human
cccagcaggggacccggag

SEQ ID NO: 368282 - RNA, 21 nt, Human
cccagcaggggaggaggcauc

SEQ ID NO: 368283 - RNA, 32 nt, Human
cccagcaggggcagaaggaggaagggacuggu

SEQ ID NO: 368284 - RNA, 32 nt, Human
cccagcaggggugggaggugugggcagaagau

SEQ ID NO: 368285 - RNA, 32 nt, Human
cccagcaggguagaagaggcugagggacacac

SEQ ID NO: 368286 - RNA, 32 nt, Human
cccagcagguaaugacuccacagggaagaggc

SEQ ID NO: 368287 - RNA, 32 nt, Human
cccagcagguaugggcaucugggaaaccucca

SEQ ID NO: 368288 - RNA, 32 nt, Human
cccagcaggucucaugcaggcccagggcuggg

SEQ ID NO: 368289 - RNA, 21 nt, Human
cccagcaguagggaggggcag

SEQ ID NO: 368290 - RNA, 32 nt, Human
cccagcagucccucggcacacaggcauaucag

SEQ ID NO: 368291 - RNA, 32 nt, Human
cccagcaguuccacuuuucgguauuuaucuag

SEQ ID NO: 368292 - RNA, 32 nt, Human
cccagcaguucugagugaguucugagccagcc

SEQ ID NO: 368293 - RNA, 24 nt, Human
cccagcauaacaaacacuagcuca

SEQ ID NO: 368294 - RNA, 18 nt, Human
cccagcauacugaugaca

SEQ ID NO: 368295 - RNA, 32 nt, Human
cccagcauauagaaauggcucagaacguucca

SEQ ID NO: 368296 - RNA, 19 nt, Human
cccagcauccagacuggaa

SEQ ID NO: 368297 - RNA, 32 nt, Human
cccagcaucccaacuucucugcagcgaaaggg

SEQ ID NO: 368298 - RNA, 19 nt, Human
cccagcauccccucaccca

SEQ ID NO: 368299 - RNA, 32 nt, Human
cccagcaucccuccuacucugcccuuggugga

SEQ ID NO: 368300 - RNA, 32 nt, Human
cccagcaucucccucacugaaaccagguggcc

SEQ ID NO: 368301 - RNA, 32 nt, Human
cccagcaugaagagaugggcucugcucugaga

SEQ ID NO: 368302 - RNA, 32 nt, Human
cccagcaugauuuuuggguucaucuuaucagu

SEQ ID NO: 368303 - RNA, 32 nt, Human
cccagcaugccagugcuuccuccaugaauuug

SEQ ID NO: 368304 - RNA, 31 nt, Human
cccagcauggagaugugugaccagagacaca

SEQ ID NO: 368305 - RNA, 24 nt, Human
cccagcauggauggccacagcuca

SEQ ID NO: 368306 - RNA, 21 nt, Human
cccagcaugggacacaagcca

SEQ ID NO: 368307 - RNA, 23 nt, Human
cccagcauguccucacaugcuca

SEQ ID NO: 368308 - RNA, 32 nt, Human
cccagcauugcaguauggugugguguuuguag

SEQ ID NO: 368309 - RNA, 32 nt, Human
cccagcauugugagugacagagccuggaucug

SEQ ID NO: 368310 - RNA, 32 nt, Human
cccagcauuugcucagcuucuggggaggccuc

SEQ ID NO: 368311 - RNA, 32 nt, Human
cccagccaaaaauacagcugggcugaaaccug

SEQ ID NO: 368312 - RNA, 32 nt, Human
cccagccaaaugucugugcucucugugucacu

SEQ ID NO: 368313 - RNA, 32 nt, Human
cccagccaacacagauggucacuccagaggcu

SEQ ID NO: 368314 - RNA, 32 nt, Human
cccagccaaccagcauuucuuaaggugaaaau

SEQ ID NO: 368315 - RNA, 22 nt, Human
cccagccaacucccggcacuga

SEQ ID NO: 368316 - RNA, 32 nt, Human
cccagccaagauuccuccuuugggaggccaag

SEQ ID NO: 368317 - RNA, 32 nt, Human
cccagccaaggaggggccugaggcucucccua

SEQ ID NO: 368318 - RNA, 32 nt, Human
cccagccaaggcuuccuuccucucacucggcc

SEQ ID NO: 368319 - RNA, 32 nt, Human
cccagccacaaguguuggagcugcagagagac

SEQ ID NO: 368320 - RNA, 32 nt, Human
cccagccacacaccaggcugugcucaaggcca

SEQ ID NO: 368321 - RNA, 32 nt, Human
cccagccacaccaccuuguugugugaccuugg

SEQ ID NO: 368322 - RNA, 31 nt, Human
cccagccacagcuagaggucccgggcgcacc

SEQ ID NO: 368323 - RNA, 32 nt, Human
cccagccacagcuggaagcccaggccugcagc

SEQ ID NO: 368324 - RNA, 32 nt, Human
cccagccacaggcuucuuguccaccucuucuc

SEQ ID NO: 368325 - RNA, 32 nt, Human
cccagccaccacugccucucagcuuaaacagg

SEQ ID NO: 368326 - RNA, 23 nt, Human
cccagccaccagcccucauccuc

SEQ ID NO: 368327 - RNA, 32 nt, Human
cccagccacccaugcuaguugcagagaaaagc

SEQ ID NO: 368328 - RNA, 22 nt, Human
cccagccacccccggagcgcag

SEQ ID NO: 368329 - RNA, 32 nt, Human
cccagccacggcucccccucccgaggccauca

SEQ ID NO: 368330 - RNA, 21 nt, Human
cccagccacuccuccccacug

SEQ ID NO: 368331 - RNA, 32 nt, Human
cccagccacuccuccccacugcagccaguguc

SEQ ID NO: 368332 - RNA, 21 nt, Human
cccagccacucugaacgcuga

SEQ ID NO: 368333 - RNA, 32 nt, Human
cccagccacucuuuuccuccuaccucugccau

SEQ ID NO: 368334 - RNA, 32 nt, Human
cccagccacugcacuucaccggaugccgucug

SEQ ID NO: 368335 - RNA, 20 nt, Human
cccagccacugcagcacagg

SEQ ID NO: 368336 - RNA, 32 nt, Human
cccagccagaaggcucugagacauagcagcag

SEQ ID NO: 368337 - RNA, 32 nt, Human
cccagccagacuggaccaaaggaaaagccuuu

SEQ ID NO: 368338 - RNA, 31 nt, Human
cccagccagagagcaggugcaggugucaucc

SEQ ID NO: 368339 - RNA, 20 nt, Human
cccagccagagcaagcuugg

SEQ ID NO: 368340 - RNA, 32 nt, Human
cccagccagaggcgcagccccagcaagaggag

SEQ ID NO: 368341 - RNA, 32 nt, Human
cccagccagaucucaucuggggagucugaggu

SEQ ID NO: 368342 - RNA, 22 nt, Human
cccagccagcagagauggagag

SEQ ID NO: 368343 - RNA, 32 nt, Human
cccagccagcauggccggcaggagcgcaccgc

SEQ ID NO: 368344 - RNA, 32 nt, Human
cccagccagccaccccugccacucaccccucc

SEQ ID NO: 368345 - RNA, 18 nt, Human
cccagccagccccucaca

SEQ ID NO: 368346 - RNA, 32 nt, Human
cccagccagcccgauugugggcugaggggucu

SEQ ID NO: 368347 - RNA, 32 nt, Human
cccagccagcccucaaaacacaaaggaacaaa

SEQ ID NO: 368348 - RNA, 32 nt, Human
cccagccagccucugucaccaugguaacccug

SEQ ID NO: 368349 - RNA, 20 nt, Human
cccagccagccuggcuggga

SEQ ID NO: 368350 - RNA, 32 nt, Human
cccagccagcggaacaguuucuauuacccccu

SEQ ID NO: 368351 - RNA, 32 nt, Human
cccagccagcgggcccagcccgcggaggaggg

SEQ ID NO: 368352 - RNA, 22 nt, Human
cccagccagcucgggagguggg

SEQ ID NO: 368353 - RNA, 22 nt, Human
cccagccagcugggacccuggg

SEQ ID NO: 368354 - RNA, 32 nt, Human
cccagccagcuggucuggcccuggacgugccu

SEQ ID NO: 368355 - RNA, 21 nt, Human
cccagccagcuuccaggcgcu

SEQ ID NO: 368356 - RNA, 32 nt, Human
cccagccaggagagaggacagagccagggcag

SEQ ID NO: 368357 - RNA, 19 nt, Human
cccagccaggaggggccag

SEQ ID NO: 368358 - RNA, 24 nt, Human
cccagccaggcaccgagaucauca

SEQ ID NO: 368359 - RNA, 21 nt, Human
cccagccagggcagcgccagc

SEQ ID NO: 368360 - RNA, 32 nt, Human
cccagccaggguggccccggcgggggcggguc

SEQ ID NO: 368361 - RNA, 24 nt, Human
cccagccagguucucuggguccag

SEQ ID NO: 368362 - RNA, 32 nt, Human
cccagccaucaagcccuccgauaccuucggcu

SEQ ID NO: 368363 - RNA, 32 nt, Human
cccagccaucacugcuggcagccugggcaaac

SEQ ID NO: 368364 - RNA, 32 nt, Human
cccagccaucugauuggugacagggucaaccc

SEQ ID NO: 368365 - RNA, 32 nt, Human
cccagccaucugcaugacauggguauuuauua

SEQ ID NO: 368366 - RNA, 32 nt, Human
cccagccaucuguaaaaauuaggcaggucccu

SEQ ID NO: 368367 - RNA, 32 nt, Human
cccagccaugucguccauccugccuuucacuc

SEQ ID NO: 368368 - RNA, 32 nt, Human
cccagcccaacaccaucucuuccuaccucuca

SEQ ID NO: 368369 - RNA, 32 nt, Human
cccagcccaagccaugagcuucuuccaggcuc

SEQ ID NO: 368370 - RNA, 25 nt, Human
cccagcccaaggccccucugugagg

SEQ ID NO: 368371 - RNA, 32 nt, Human
cccagcccaagugccuggcacacagcuaaugu

SEQ ID NO: 368372 - RNA, 32 nt, Human
cccagcccacagagccugaauuuguaagcaac

SEQ ID NO: 368373 - RNA, 32 nt, Human
cccagcccacauuccuccuuccugcuccgaac

SEQ ID NO: 368374 - RNA, 32 nt, Human
cccagcccacccccaaacagacacagcguagc

SEQ ID NO: 368375 - RNA, 21 nt, Human
cccagcccaccccugccccca

SEQ ID NO: 368376 - RNA, 21 nt, Human
cccagcccacccuggcccuca

SEQ ID NO: 368377 - RNA, 32 nt, Human
cccagcccacgggacgccagaccucgaccguc

SEQ ID NO: 368378 - RNA, 32 nt, Human
cccagcccacugcuucagcugugggccaucug

SEQ ID NO: 368379 - RNA, 15 nt, Human
cccagcccacuucug

SEQ ID NO: 368380 - RNA, 32 nt, Human
cccagcccagagcagccaucaggcuggaggug

SEQ ID NO: 368381 - RNA, 32 nt, Human
cccagcccagcauggcaccccugcugcccauc

SEQ ID NO: 368382 - RNA, 21 nt, Human
cccagcccagccagcuaccca

SEQ ID NO: 368383 - RNA, 20 nt, Human
cccagcccagcccagcccca

SEQ ID NO: 368384 - RNA, 32 nt, Human
cccagcccagcccagccugagaaauacccuca

SEQ ID NO: 368385 - RNA, 20 nt, Human
cccagcccagcccagcugcu

SEQ ID NO: 368386 - RNA, 32 nt, Human
cccagcccagccccaaagagaaagaagagaca

SEQ ID NO: 368387 - RNA, 32 nt, Human
cccagcccagccccaaagagaaagaagagagc

SEQ ID NO: 368388 - RNA, 17 nt, Human
cccagcccagcccgccg

SEQ ID NO: 368389 - RNA, 21 nt, Human
cccagcccagccugagcccca

SEQ ID NO: 368390 - RNA, 32 nt, Human
cccagcccagccugagccccaacaacaacuuu

SEQ ID NO: 368391 - RNA, 20 nt, Human
cccagcccagcuccagcucc

SEQ ID NO: 368392 - RNA, 22 nt, Human
cccagcccagcuggggcaccca

SEQ ID NO: 368393 - RNA, 32 nt, Human
cccagcccaggaguuugaggcugcaaugagcc

SEQ ID NO: 368394 - RNA, 32 nt, Human
cccagcccaggccugguggagggggaggggag

SEQ ID NO: 368395 - RNA, 32 nt, Human
cccagcccagggauucuugaacuaucuguagg

SEQ ID NO: 368396 - RNA, 22 nt, Human
cccagcccagggcacgccccug

SEQ ID NO: 368397 - RNA, 32 nt, Human
cccagcccagguacaugaggccaaggugaacu

SEQ ID NO: 368398 - RNA, 24 nt, Human
cccagcccaguccccuugcuccca

SEQ ID NO: 368399 - RNA, 32 nt, Human
cccagcccaucuuacugcaagcagcguccuga

SEQ ID NO: 368400 - RNA, 21 nt, Human
cccagcccaugccuccggguc

SEQ ID NO: 368401 - RNA, 21 nt, Human
cccagcccauuccggccccca

SEQ ID NO: 368402 - RNA, 22 nt, Human
cccagccccaaagccagccccc

SEQ ID NO: 368403 - RNA, 18 nt, Human
cccagccccaagaucuca

SEQ ID NO: 368404 - RNA, 22 nt, Human
cccagccccaagguugauccca

SEQ ID NO: 368405 - RNA, 25 nt, Human
cccagccccaaguuccagcucacca

SEQ ID NO: 368406 - RNA, 32 nt, Human
cccagccccacagccugagccucccagcugcc

SEQ ID NO: 368407 - RNA, 19 nt, Human
cccagccccaccaccccca

SEQ ID NO: 368408 - RNA, 18 nt, Human
cccagccccaccaccucc

SEQ ID NO: 368409 - RNA, 20 nt, Human
cccagccccaccacucacca

SEQ ID NO: 368410 - RNA, 20 nt, Human
cccagccccaccagagcccc

SEQ ID NO: 368411 - RNA, 22 nt, Human
cccagccccaccaugaugcccc

SEQ ID NO: 368412 - RNA, 19 nt, Human
cccagccccaccccagcuc

SEQ ID NO: 368413 - RNA, 20 nt, Human
cccagccccacccccuuccc

SEQ ID NO: 368414 - RNA, 23 nt, Human
cccagccccaccccuaagugccc

SEQ ID NO: 368415 - RNA, 20 nt, Human
cccagccccacccucugccc

SEQ ID NO: 368416 - RNA, 21 nt, Human
cccagccccacccugucccca

SEQ ID NO: 368417 - RNA, 21 nt, Human
cccagccccaccgcccacccc

SEQ ID NO: 368418 - RNA, 21 nt, Human
cccagccccaccucagucucc

SEQ ID NO: 368419 - RNA, 19 nt, Human
cccagccccaccugacucc

SEQ ID NO: 368420 - RNA, 32 nt, Human
cccagccccaccugccaaagucccagguuuac

SEQ ID NO: 368421 - RNA, 32 nt, Human
cccagccccaccuuccccuccugaugcccuga

SEQ ID NO: 368422 - RNA, 20 nt, Human
cccagccccacgcccuacca

SEQ ID NO: 368423 - RNA, 22 nt, Human
cccagccccacgccggcuacca

SEQ ID NO: 368424 - RNA, 21 nt, Human
cccagccccacucagcugccc

SEQ ID NO: 368425 - RNA, 18 nt, Human
cccagccccacuccccgc

SEQ ID NO: 368426 - RNA, 23 nt, Human
cccagccccacuccccgcagucc

SEQ ID NO: 368427 - RNA, 20 nt, Human
cccagccccacuccgggccu

SEQ ID NO: 368428 - RNA, 22 nt, Human
cccagccccacuccuguugccc

SEQ ID NO: 368429 - RNA, 22 nt, Human
cccagccccacucggauguccc

SEQ ID NO: 368430 - RNA, 19 nt, Human
cccagccccacugcccucc

SEQ ID NO: 368431 - RNA, 16 nt, Human
cccagccccacuucug

SEQ ID NO: 368432 - RNA, 22 nt, Human
cccagccccagagaaacugcca

SEQ ID NO: 368433 - RNA, 21 nt, Human
cccagccccagcaggcccuca

SEQ ID NO: 368434 - RNA, 32 nt, Human
cccagccccagcaggcccucagccuggaagag

SEQ ID NO: 368435 - RNA, 20 nt, Human
cccagccccagccaacuccc

SEQ ID NO: 368436 - RNA, 23 nt, Human
cccagccccagccccggccccca

SEQ ID NO: 368437 - RNA, 21 nt, Human
cccagccccagccccggcucc

SEQ ID NO: 368438 - RNA, 21 nt, Human
cccagccccagcccggcccca

SEQ ID NO: 368439 - RNA, 32 nt, Human
cccagccccagccucugcucuuuugagcagcc

SEQ ID NO: 368440 - RNA, 32 nt, Human
cccagccccaggaccacuggccccuuggccug

SEQ ID NO: 368441 - RNA, 32 nt, Human
cccagccccaggagccagaccacuccugccuc

SEQ ID NO: 368442 - RNA, 20 nt, Human
cccagccccaggcccagcag

SEQ ID NO: 368443 - RNA, 19 nt, Human
cccagccccaggccugccc

SEQ ID NO: 368444 - RNA, 32 nt, Human
cccagccccaggcugcagcccauucgcaggca

SEQ ID NO: 368445 - RNA, 32 nt, Human
cccagccccaucacacuggcucuggcuucaag

SEQ ID NO: 368446 - RNA, 20 nt, Human
cccagccccaucccaaaccc

SEQ ID NO: 368447 - RNA, 18 nt, Human
cccagccccaucccuccc

SEQ ID NO: 368448 - RNA, 20 nt, Human
cccagccccaucccuguccu

SEQ ID NO: 368449 - RNA, 32 nt, Human
cccagccccauccgcaagccaggcugggccug

SEQ ID NO: 368450 - RNA, 20 nt, Human
cccagccccauccuacccca

SEQ ID NO: 368451 - RNA, 19 nt, Human
cccagccccaugaggaccc

SEQ ID NO: 368452 - RNA, 22 nt, Human
cccagccccaugaggacccuca

SEQ ID NO: 368453 - RNA, 21 nt, Human
cccagccccaugauuacccca

SEQ ID NO: 368454 - RNA, 21 nt, Human
cccagccccaugggacacccg

SEQ ID NO: 368455 - RNA, 32 nt, Human
cccagccccauucuacuccgagucgagucugu

SEQ ID NO: 368456 - RNA, 22 nt, Human
cccagccccauugcccaccucc

SEQ ID NO: 368457 - RNA, 24 nt, Human
cccagcccccacaugccagcccca

SEQ ID NO: 368458 - RNA, 23 nt, Human
cccagcccccagcaagggcacuc

SEQ ID NO: 368459 - RNA, 22 nt, Human
cccagcccccaggaggccccug

SEQ ID NO: 368460 - RNA, 23 nt, Human
cccagcccccauggggcagcagc

SEQ ID NO: 368461 - RNA, 19 nt, Human
cccagccccccaccgcccc

SEQ ID NO: 368462 - RNA, 21 nt, Human
cccagccccccaccgccccca

SEQ ID NO: 368463 - RNA, 22 nt, Human
cccagccccccagauggcuccc

SEQ ID NO: 368464 - RNA, 22 nt, Human
cccagccccccagcagcacccg

SEQ ID NO: 368465 - RNA, 32 nt, Human
cccagcccccgcagcccucuggcccccuccau

SEQ ID NO: 368466 - RNA, 25 nt, Human
cccagcccccguccguccaggcuca

SEQ ID NO: 368467 - RNA, 22 nt, Human
cccagcccccgucuguccccca

SEQ ID NO: 368468 - RNA, 32 nt, Human
cccagcccccucucccccugagccauuguggg

SEQ ID NO: 368469 - RNA, 32 nt, Human
cccagcccccuguccuggaagauaccuuagag

SEQ ID NO: 368470 - RNA, 32 nt, Human
cccagcccccuucgcccguuuccaucacgagu

SEQ ID NO: 368471 - RNA, 32 nt, Human
cccagcccccuuguaaacucuagucacuauaa

SEQ ID NO: 368472 - RNA, 23 nt, Human
cccagccccgaaugccuugaaga

SEQ ID NO: 368473 - RNA, 32 nt, Human
cccagccccgaggaggaggaggaggaggagga

SEQ ID NO: 368474 - RNA, 20 nt, Human
cccagccccgaggccagugg

SEQ ID NO: 368475 - RNA, 22 nt, Human
cccagccccgcccaggcugcug

SEQ ID NO: 368476 - RNA, 20 nt, Human
cccagccccgcgcagcccca

SEQ ID NO: 368477 - RNA, 20 nt, Human
cccagccccgcgcggcuccc

SEQ ID NO: 368478 - RNA, 20 nt, Human
cccagccccgcugacaccca

SEQ ID NO: 368479 - RNA, 19 nt, Human
cccagccccggacagcucc

SEQ ID NO: 368480 - RNA, 22 nt, Human
cccagccccggcagccucagca

SEQ ID NO: 368481 - RNA, 23 nt, Human
cccagccccggccacagccacgg

SEQ ID NO: 368482 - RNA, 21 nt, Human
cccagccccggcccccagcag

SEQ ID NO: 368483 - RNA, 32 nt, Human
cccagccccggcugugucuacuccaggccaag

SEQ ID NO: 368484 - RNA, 20 nt, Human
cccagccccgggaggcuccc

SEQ ID NO: 368485 - RNA, 24 nt, Human
cccagccccgggucccgguuccca

SEQ ID NO: 368486 - RNA, 21 nt, Human
cccagccccggugagccccca

SEQ ID NO: 368487 - RNA, 32 nt, Human
cccagccccuaccuugagacccucuucucugg

SEQ ID NO: 368488 - RNA, 32 nt, Human
cccagccccuacugcugugaacccuggggccu

SEQ ID NO: 368489 - RNA, 32 nt, Human
cccagccccucagccauccagggcuacccacu

SEQ ID NO: 368490 - RNA, 22 nt, Human
cccagccccucaggaacccuca

SEQ ID NO: 368491 - RNA, 18 nt, Human
cccagccccucccagcac

SEQ ID NO: 368492 - RNA, 20 nt, Human
cccagccccucccagcaccc

SEQ ID NO: 368493 - RNA, 23 nt, Human
cccagccccucccagccagccuc

SEQ ID NO: 368494 - RNA, 32 nt, Human
cccagccccucccagccagccucugucaccau

SEQ ID NO: 368495 - RNA, 20 nt, Human
cccagccccucccagcccuu

SEQ ID NO: 368496 - RNA, 21 nt, Human
cccagccccucccaggugccu

SEQ ID NO: 368497 - RNA, 23 nt, Human
cccagccccucccaguccccuca

SEQ ID NO: 368498 - RNA, 32 nt, Human
cccagccccuccccuccccauaccaaagugcu

SEQ ID NO: 368499 - RNA, 24 nt, Human
cccagccccuccucugaacacuca

SEQ ID NO: 368500 - RNA, 23 nt, Human
cccagccccuccucuuucccuca

SEQ ID NO: 368501 - RNA, 24 nt, Human
cccagccccuccugccccagccca

SEQ ID NO: 368502 - RNA, 21 nt, Human
cccagccccuccugcguacca

SEQ ID NO: 368503 - RNA, 23 nt, Human
cccagccccucgucgcggguuca

SEQ ID NO: 368504 - RNA, 21 nt, Human
cccagccccucuuaguucucc

SEQ ID NO: 368505 - RNA, 32 nt, Human
cccagccccugagaccuaucccccucaugcua

SEQ ID NO: 368506 - RNA, 32 nt, Human
cccagccccugagcccccuccugagccuacca

SEQ ID NO: 368507 - RNA, 15 nt, Human
cccagccccugcagc

SEQ ID NO: 368508 - RNA, 19 nt, Human
cccagccccugccagcucc

SEQ ID NO: 368509 - RNA, 32 nt, Human
cccagccccugccaugagcucugggcuggguc

SEQ ID NO: 368510 - RNA, 32 nt, Human
cccagccccugcccaccuucagcaggaugagg

SEQ ID NO: 368511 - RNA, 32 nt, Human
cccagccccugccccugccacccuccgguggc

SEQ ID NO: 368512 - RNA, 32 nt, Human
cccagccccugccccuggacaccugcugacag

SEQ ID NO: 368513 - RNA, 32 nt, Human
cccagccccugccucugcccaagugggccagc

SEQ ID NO: 368514 - RNA, 32 nt, Human
cccagccccugccugguccugcccaccucacc

SEQ ID NO: 368515 - RNA, 32 nt, Human
cccagccccuggcaaccacaaaucuuuccaac

SEQ ID NO: 368516 - RNA, 32 nt, Human
cccagccccuggcaaccacugaucugcuuuca

SEQ ID NO: 368517 - RNA, 21 nt, Human
cccagccccuggcagcaccca

SEQ ID NO: 368518 - RNA, 32 nt, Human
cccagccccuggcauccacccuucuagcuuuc

SEQ ID NO: 368519 - RNA, 22 nt, Human
cccagccccugugguagcccca

SEQ ID NO: 368520 - RNA, 32 nt, Human
cccagccccuucccuugggccugcuguggugc

SEQ ID NO: 368521 - RNA, 32 nt, Human
cccagccccuugggcucgcugccuuaugcagu

SEQ ID NO: 368522 - RNA, 24 nt, Human
cccagccccuuuuccccaguccca

SEQ ID NO: 368523 - RNA, 32 nt, Human
cccagccccuuuucucugcucuuguuucacuc

SEQ ID NO: 368524 - RNA, 21 nt, Human
cccagcccgaggaggcacuca

SEQ ID NO: 368525 - RNA, 21 nt, Human
cccagcccgcagccagccccc

SEQ ID NO: 368526 - RNA, 20 nt, Human
cccagcccgcccaacuccca

SEQ ID NO: 368527 - RNA, 22 nt, Human
cccagcccgccguccagcgcug

SEQ ID NO: 368528 - RNA, 32 nt, Human
cccagcccgcucccccucucugugcccugguc

SEQ ID NO: 368529 - RNA, 21 nt, Human
cccagcccgcugcagccgcca

SEQ ID NO: 368530 - RNA, 17 nt, Human
cccagcccggagcgcag

SEQ ID NO: 368531 - RNA, 22 nt, Human
cccagcccggcgaggggccuca

SEQ ID NO: 368532 - RNA, 32 nt, Human
cccagcccgggugacagagcgagacuccgucu

SEQ ID NO: 368533 - RNA, 20 nt, Human
cccagcccggucccuggcca

SEQ ID NO: 368534 - RNA, 32 nt, Human
cccagcccgucuccucuucccuucccuggccc

SEQ ID NO: 368535 - RNA, 19 nt, Human
cccagcccgugcagcugcu

SEQ ID NO: 368536 - RNA, 32 nt, Human
cccagcccgugggagagaagggggucucugac

SEQ ID NO: 368537 - RNA, 32 nt, Human
cccagcccuaaaggaaggguagacccgugucu

SEQ ID NO: 368538 - RNA, 19 nt, Human
cccagcccuacaaccccca

SEQ ID NO: 368539 - RNA, 32 nt, Human
cccagcccuaccugccagugcuggugucaggg

SEQ ID NO: 368540 - RNA, 32 nt, Human
cccagcccuauccggcgaggagcggagcgcug

SEQ ID NO: 368541 - RNA, 20 nt, Human
cccagcccucacagcuccca

SEQ ID NO: 368542 - RNA, 25 nt, Human
cccagcccucacccccuagccccca

SEQ ID NO: 368543 - RNA, 32 nt, Human
cccagcccucagaggcucagaggcucucugag

SEQ ID NO: 368544 - RNA, 24 nt, Human
cccagcccucagccccaggcccca

SEQ ID NO: 368545 - RNA, 23 nt, Human
cccagcccucagcuggcugccca

SEQ ID NO: 368546 - RNA, 21 nt, Human
cccagcccucagucaccccca

SEQ ID NO: 368547 - RNA, 32 nt, Human
cccagcccucaguuuucagucaaguuccgucu

SEQ ID NO: 368548 - RNA, 32 nt, Human
cccagcccucauccucccuugcucacaaaguu

SEQ ID NO: 368549 - RNA, 32 nt, Human
cccagcccucauugcugggggccaggccuugg

SEQ ID NO: 368550 - RNA, 32 nt, Human
cccagcccuccaaacccuggauuugcaacauc

SEQ ID NO: 368551 - RNA, 32 nt, Human
cccagcccuccaguggccugugggugagggaa

SEQ ID NO: 368552 - RNA, 32 nt, Human
cccagcccucccccgugcguaucucgcuuaag

SEQ ID NO: 368553 - RNA, 32 nt, Human
cccagcccuccccucccaucugugccucugua

SEQ ID NO: 368554 - RNA, 32 nt, Human
cccagcccucccuuccuuccucugccggcaag

SEQ ID NO: 368555 - RNA, 24 nt, Human
cccagcccuccucugggagccuca

SEQ ID NO: 368556 - RNA, 32 nt, Human
cccagcccucgccucugcgagaaugaacauau

SEQ ID NO: 368557 - RNA, 32 nt, Human
cccagcccucuucucgguuccccacacccagg

SEQ ID NO: 368558 - RNA, 32 nt, Human
cccagcccucuugaccuggccacagagagcug

SEQ ID NO: 368559 - RNA, 24 nt, Human
cccagcccugaacaaagcaccuca

SEQ ID NO: 368560 - RNA, 20 nt, Human
cccagcccugcaguccccca

SEQ ID NO: 368561 - RNA, 32 nt, Human
cccagcccugccaugcgcuuguggaccucuau

SEQ ID NO: 368562 - RNA, 26 nt, Human
cccagcccugccuccccggucuccca

SEQ ID NO: 368563 - RNA, 32 nt, Human
cccagcccugccuguacauacacaugcacacc

SEQ ID NO: 368564 - RNA, 32 nt, Human
cccagcccugcucaccuuucuuaccucucugg

SEQ ID NO: 368565 - RNA, 32 nt, Human
cccagcccugcucccaccuggacuggcucagu

SEQ ID NO: 368566 - RNA, 32 nt, Human
cccagcccugcucuccgcgcucggccagaggg

SEQ ID NO: 368567 - RNA, 20 nt, Human
cccagcccuggcaucugccc

SEQ ID NO: 368568 - RNA, 32 nt, Human
cccagcccuggcccuggccgcggucucagccc

SEQ ID NO: 368569 - RNA, 32 nt, Human
cccagcccuggccuccccacucuguccugggu

SEQ ID NO: 368570 - RNA, 23 nt, Human
cccagcccugggaaccacuccca

SEQ ID NO: 368571 - RNA, 32 nt, Human
cccagcccugggaaccacucccaccacaggca

SEQ ID NO: 368572 - RNA, 23 nt, Human
cccagcccuguccccuaccccca

SEQ ID NO: 368573 - RNA, 22 nt, Human
cccagcccugugccggguccca

SEQ ID NO: 368574 - RNA, 32 nt, Human
cccagcccugugccuccuagcccaggauuugu

SEQ ID NO: 368575 - RNA, 20 nt, Human
cccagcccugugggccccca

SEQ ID NO: 368576 - RNA, 20 nt, Human
cccagcccuguucugcuugu

SEQ ID NO: 368577 - RNA, 21 nt, Human
cccagcccuguugaagcacca

SEQ ID NO: 368578 - RNA, 19 nt, Human
cccagcccuuauuauuuua

SEQ ID NO: 368579 - RNA, 20 nt, Human
cccagcccuucccaccccca

SEQ ID NO: 368580 - RNA, 32 nt, Human
cccagcccuuccccacagcccaaaggaacuua

SEQ ID NO: 368581 - RNA, 32 nt, Human
cccagcccuuccugaagccagaagcguugcug

SEQ ID NO: 368582 - RNA, 32 nt, Human
cccagcccuuccuuuauuuccaugggaauuua

SEQ ID NO: 368583 - RNA, 22 nt, Human
cccagcccuugggccuggcucc

SEQ ID NO: 368584 - RNA, 24 nt, Human
cccagcccuugggccuggcuccaa

SEQ ID NO: 368585 - RNA, 32 nt, Human
cccagcccuuucucugccaccagccagcacuc

SEQ ID NO: 368586 - RNA, 21 nt, Human
cccagcccuuucuggauccca

SEQ ID NO: 368587 - RNA, 22 nt, Human
cccagcccuuugccugccccca

SEQ ID NO: 368588 - RNA, 32 nt, Human
cccagccgacgccacucacugccuccuuccuc

SEQ ID NO: 368589 - RNA, 24 nt, Human
cccagccgagccgagccggcccga

SEQ ID NO: 368590 - RNA, 23 nt, Human
cccagccgaggagcuggcugggg

SEQ ID NO: 368591 - RNA, 32 nt, Human
cccagccgaggcccccagcccagugggagcaa

SEQ ID NO: 368592 - RNA, 32 nt, Human
cccagccgcacugggagccauggggagcaagu

SEQ ID NO: 368593 - RNA, 23 nt, Human
cccagccgcagccgcagcagcag

SEQ ID NO: 368594 - RNA, 22 nt, Human
cccagccgccgccaccgcgccg

SEQ ID NO: 368595 - RNA, 32 nt, Human
cccagccgccgcccugcuccaggcucuaggac

SEQ ID NO: 368596 - RNA, 18 nt, Human
cccagccgcgcccagggc

SEQ ID NO: 368597 - RNA, 19 nt, Human
cccagccgcgcccagggcc

SEQ ID NO: 368598 - RNA, 32 nt, Human
cccagccgcugccucuugccgcuccgccuuug

SEQ ID NO: 368599 - RNA, 32 nt, Human
cccagccgcuggcucccagccuggcugaagcg

SEQ ID NO: 368600 - RNA, 19 nt, Human
cccagccgcugugggagga

SEQ ID NO: 368601 - RNA, 21 nt, Human
cccagccggcaagggcuugaa

SEQ ID NO: 368602 - RNA, 32 nt, Human
cccagccggucucucugugcucgguugucuug

SEQ ID NO: 368603 - RNA, 32 nt, Human
cccagccgguuuggauuacaggccugugcugg

SEQ ID NO: 368604 - RNA, 17 nt, Human
cccagccgucccucuca

SEQ ID NO: 368605 - RNA, 32 nt, Human
cccagccguggaacagaaacauuugcuggaug

SEQ ID NO: 368606 - RNA, 32 nt, Human
cccagccuacagaacaauggccauucugagug

SEQ ID NO: 368607 - RNA, 21 nt, Human
cccagccuacauucacuucua

SEQ ID NO: 368608 - RNA, 31 nt, Human
cccagccuagaguuuauuucacuggaucaga

SEQ ID NO: 368609 - RNA, 32 nt, Human
cccagccucaaauccaggacccugccaggcac

SEQ ID NO: 368610 - RNA, 21 nt, Human
cccagccucaccccugaggag

SEQ ID NO: 368611 - RNA, 32 nt, Human
cccagccucacccuccugggguggccccgugu

SEQ ID NO: 368612 - RNA, 32 nt, Human
cccagccucacugaggcucaggacacggccac

SEQ ID NO: 368613 - RNA, 32 nt, Human
cccagccucagaaguuguugugcaauaaaagg

SEQ ID NO: 368614 - RNA, 32 nt, Human
cccagccucagagacaaauaggcuucaucaug

SEQ ID NO: 368615 - RNA, 22 nt, Human
cccagccucagccccagcccca

SEQ ID NO: 368616 - RNA, 32 nt, Human
cccagccucaggucuucugucagagcaacaca

SEQ ID NO: 368617 - RNA, 32 nt, Human
cccagccucaguccuaacuccuggggcugggc

SEQ ID NO: 368618 - RNA, 32 nt, Human
cccagccuccaagggccgucaggcugggcuuu

SEQ ID NO: 368619 - RNA, 22 nt, Human
cccagccuccaccccggcuccc

SEQ ID NO: 368620 - RNA, 21 nt, Human
cccagccuccagaggcucuca

SEQ ID NO: 368621 - RNA, 32 nt, Human
cccagccuccagggcuucucugugugucuugg

SEQ ID NO: 368622 - RNA, 32 nt, Human
cccagccucccaaaucaagucucuccaucacu

SEQ ID NO: 368623 - RNA, 32 nt, Human
cccagccucccaccacgcucacugccuggcuu

SEQ ID NO: 368624 - RNA, 23 nt, Human
cccagccucccacccugguccca

SEQ ID NO: 368625 - RNA, 32 nt, Human
cccagccucccacucgacuuuccucuuaggaa

SEQ ID NO: 368626 - RNA, 32 nt, Human
cccagccucccaggcuggauggcauggacugu

SEQ ID NO: 368627 - RNA, 32 nt, Human
cccagccucccucuucuuccucaggcuuugga

SEQ ID NO: 368628 - RNA, 32 nt, Human
cccagccuccuccaaaacagcacacuuuccgg

SEQ ID NO: 368629 - RNA, 23 nt, Human
cccagccuccucggucuccuguc

SEQ ID NO: 368630 - RNA, 32 nt, Human
cccagccucuacucuucccagccccuaauccc

SEQ ID NO: 368631 - RNA, 20 nt, Human
cccagccucuccaaccccca

SEQ ID NO: 368632 - RNA, 20 nt, Human
cccagccucuccuccaccca

SEQ ID NO: 368633 - RNA, 22 nt, Human
cccagccucuccuccuugggca

SEQ ID NO: 368634 - RNA, 32 nt, Human
cccagccucucuuccaaauuuccucuucaugc

SEQ ID NO: 368635 - RNA, 32 nt, Human
cccagccucugacuugcuguguuguccagagg

SEQ ID NO: 368636 - RNA, 32 nt, Human
cccagccucugccggcuccccuaggcaacccc

SEQ ID NO: 368637 - RNA, 32 nt, Human
cccagccucugccucccgucagccucuacagu

SEQ ID NO: 368638 - RNA, 32 nt, Human
cccagccucugccucccgucggccucuacagu

SEQ ID NO: 368639 - RNA, 32 nt, Human
cccagccucugccucccgucggccucugcagu

SEQ ID NO: 368640 - RNA, 32 nt, Human
cccagccucugcuguccaaggcuggcuagcug

SEQ ID NO: 368641 - RNA, 32 nt, Human
cccagccucuuccucuuccuuuuggauacgcg

SEQ ID NO: 368642 - RNA, 32 nt, Human
cccagccucuugcuuccugggcugaggacaug

SEQ ID NO: 368643 - RNA, 32 nt, Human
cccagccucuuucugagggaaaggacaagaug

SEQ ID NO: 368644 - RNA, 21 nt, Human
cccagccucuuucugcuuuca

SEQ ID NO: 368645 - RNA, 32 nt, Human
cccagccugaacugcucaacucuaaacccaaa

SEQ ID NO: 368646 - RNA, 22 nt, Human
cccagccugaccccacuggcca

SEQ ID NO: 368647 - RNA, 21 nt, Human
cccagccugaccuguguuuug

SEQ ID NO: 368648 - RNA, 32 nt, Human
cccagccugacugcucugucuuccugccuucg

SEQ ID NO: 368649 - RNA, 16 nt, Human
cccagccugacugcug

SEQ ID NO: 368650 - RNA, 20 nt, Human
cccagccugagccaguccca

SEQ ID NO: 368651 - RNA, 32 nt, Human
cccagccugaggaggagggagagggaggaaca

SEQ ID NO: 368652 - RNA, 32 nt, Human
cccagccugagggaagggaggaaggggcgggg

SEQ ID NO: 368653 - RNA, 32 nt, Human
cccagccugauaggcugaggccagcugggaug

SEQ ID NO: 368654 - RNA, 32 nt, Human
cccagccugaugccagaacaaaggacagagaa

SEQ ID NO: 368655 - RNA, 21 nt, Human
cccagccugcaccgccuccca

SEQ ID NO: 368656 - RNA, 32 nt, Human
cccagccugcccacuacauccagccuguggcu

SEQ ID NO: 368657 - RNA, 22 nt, Human
cccagccugccccagccuccca

SEQ ID NO: 368658 - RNA, 23 nt, Human
cccagccugccucccggcgccca

SEQ ID NO: 368659 - RNA, 32 nt, Human
cccagccugccugccgcaccccuguggccucc

SEQ ID NO: 368660 - RNA, 32 nt, Human
cccagccugccuggacaacccuccuuagccgc

SEQ ID NO: 368661 - RNA, 32 nt, Human
cccagccugccuguccuccagcugucugacua

SEQ ID NO: 368662 - RNA, 23 nt, Human
cccagccugcuauggaagcauca

SEQ ID NO: 368663 - RNA, 21 nt, Human
cccagccugcuccuggccccc

SEQ ID NO: 368664 - RNA, 22 nt, Human
cccagccugcucuagcugccca

SEQ ID NO: 368665 - RNA, 17 nt, Human
cccagccugcugcugcu

SEQ ID NO: 368666 - RNA, 18 nt, Human
cccagccugcugcuucug

SEQ ID NO: 368667 - RNA, 20 nt, Human
cccagccuggaaugcagugg

SEQ ID NO: 368668 - RNA, 32 nt, Human
cccagccuggacaacagagugagacuccuucu

SEQ ID NO: 368669 - RNA, 15 nt, Human
cccagccuggacuuc

SEQ ID NO: 368670 - RNA, 23 nt, Human
cccagccuggagccaggcacugg

SEQ ID NO: 368671 - RNA, 20 nt, Human
cccagccuggagugcagugg

SEQ ID NO: 368672 - RNA, 23 nt, Human
cccagccuggagugcaguggugu

SEQ ID NO: 368673 - RNA, 32 nt, Human
cccagccuggauuccugugccugcucgcaggg

SEQ ID NO: 368674 - RNA, 32 nt, Human
cccagccuggcccagaucuucucaccuaggac

SEQ ID NO: 368675 - RNA, 20 nt, Human
cccagccuggcccagcuccc

SEQ ID NO: 368676 - RNA, 18 nt, Human
cccagccuggcccagggc

SEQ ID NO: 368677 - RNA, 21 nt, Human
cccagccuggccccucugcug

SEQ ID NO: 368678 - RNA, 22 nt, Human
cccagccuggcucuggguucaa

SEQ ID NO: 368679 - RNA, 21 nt, Human
cccagccugggaaagccccug

SEQ ID NO: 368680 - RNA, 32 nt, Human
cccagccugggagacagagugagacccugucu

SEQ ID NO: 368681 - RNA, 32 nt, Human
cccagccugggagcaauucaggcccauucuuu

SEQ ID NO: 368682 - RNA, 32 nt, Human
cccagccugggcaacagagcaagacuccaucu

SEQ ID NO: 368683 - RNA, 32 nt, Human
cccagccugggcaacagagcaagacuccguac

SEQ ID NO: 368684 - RNA, 32 nt, Human
cccagccugggccacagugcaagacuccaucu

SEQ ID NO: 368685 - RNA, 32 nt, Human
cccagccugggcgacagagcgagacucugucu

SEQ ID NO: 368686 - RNA, 32 nt, Human
cccagccugggcugcagaaagcagcaguuaaa

SEQ ID NO: 368687 - RNA, 32 nt, Human
cccagccuggggcagaaauggcugcaaguggc

SEQ ID NO: 368688 - RNA, 24 nt, Human
cccagccugggugacagagcgaga

SEQ ID NO: 368689 - RNA, 32 nt, Human
cccagccugggugacagagcgagacuccgucu

SEQ ID NO: 368690 - RNA, 32 nt, Human
cccagccugggugacagagcgagacucugucu

SEQ ID NO: 368691 - RNA, 32 nt, Human
cccagccugggugacagagcgagacuuugucu

SEQ ID NO: 368692 - RNA, 32 nt, Human
cccagccugggugacagcgagauccugucuca

SEQ ID NO: 368693 - RNA, 32 nt, Human
cccagccugguggcagaggaagcagguggcac

SEQ ID NO: 368694 - RNA, 32 nt, Human
cccagccuguauacccagauuacuuuggugaa

SEQ ID NO: 368695 - RNA, 32 nt, Human
cccagccugucaaguccucuucugccucagcu

SEQ ID NO: 368696 - RNA, 32 nt, Human
cccagccuguccaggauacaguggggcugagc

SEQ ID NO: 368697 - RNA, 19 nt, Human
cccagccuguccauccuca

SEQ ID NO: 368698 - RNA, 32 nt, Human
cccagccuguccccauucucauggcccuuugg

SEQ ID NO: 368699 - RNA, 32 nt, Human
cccagccuguuucucuuuuuccacucuucuuu

SEQ ID NO: 368700 - RNA, 22 nt, Human
cccagccuucccaaagcagcag

SEQ ID NO: 368701 - RNA, 32 nt, Human
cccagccuuccuucccugacccugagacucac

SEQ ID NO: 368702 - RNA, 22 nt, Human
cccagccuucucccggcgucuc

SEQ ID NO: 368703 - RNA, 22 nt, Human
cccagccuucuggacccagcca

SEQ ID NO: 368704 - RNA, 20 nt, Human
cccagccuugaggcugcagu

SEQ ID NO: 368705 - RNA, 19 nt, Human
cccagccuugagggaggga

SEQ ID NO: 368706 - RNA, 20 nt, Human
cccagccuugcagggaccag

SEQ ID NO: 368707 - RNA, 32 nt, Human
cccagccuuggcaacagagcaagacuccaucu

SEQ ID NO: 368708 - RNA, 22 nt, Human
cccagccuuucagagacaggga

SEQ ID NO: 368709 - RNA, 32 nt, Human
cccagcgacuuccguccuaccuggcaugcugc

SEQ ID NO: 368710 - RNA, 32 nt, Human
cccagcgagcagcggcggugcccacacgcugg

SEQ ID NO: 368711 - RNA, 25 nt, Human
cccagcgagccccugguggcagugg

SEQ ID NO: 368712 - RNA, 19 nt, Human
cccagcgauucccucuccc

SEQ ID NO: 368713 - RNA, 32 nt, Human
cccagcgauucuccugccucagccucuuccua

SEQ ID NO: 368714 - RNA, 28 nt, Human
cccagcgcacgggcugccuccaucaggg

SEQ ID NO: 368715 - RNA, 20 nt, Human
cccagcgcagccguggcagc

SEQ ID NO: 368716 - RNA, 19 nt, Human
cccagcgcagucccgggag

SEQ ID NO: 368717 - RNA, 32 nt, Human
cccagcgcagugccucaugccuguaaucccag

SEQ ID NO: 368718 - RNA, 32 nt, Human
cccagcgccagccugggccguggagguggggg

SEQ ID NO: 368719 - RNA, 32 nt, Human
cccagcgccauccugaggaucggggugggggu

SEQ ID NO: 368720 - RNA, 32 nt, Human
cccagcgcccaggaguuggggauguccuacaa

SEQ ID NO: 368721 - RNA, 32 nt, Human
cccagcgccuggcuccaggaaaacacgcuugc

SEQ ID NO: 368722 - RNA, 19 nt, Human
cccagcgcggccucaacca

SEQ ID NO: 368723 - RNA, 32 nt, Human
cccagcgcgggccuuugaggaugaggaggagg

SEQ ID NO: 368724 - RNA, 32 nt, Human
cccagcgcgguggcucacaccuguaaucccag

SEQ ID NO: 368725 - RNA, 32 nt, Human
cccagcgcgguuucagcauuuaauuuuaaggg

SEQ ID NO: 368726 - RNA, 25 nt, Human
cccagcgcucgugaccaaggauaca

SEQ ID NO: 368727 - RNA, 32 nt, Human
cccagcgcuggcagacaccgugaggcuggcag

SEQ ID NO: 368728 - RNA, 32 nt, Human
cccagcgcugucugcccgaggauuugccugaa

SEQ ID NO: 368729 - RNA, 32 nt, Human
cccagcgcugugguggggagcgguuugcccuu

SEQ ID NO: 368730 - RNA, 20 nt, Human
cccagcggacaccggcagcg

SEQ ID NO: 368731 - RNA, 32 nt, Human
cccagcggagccaagccccacgcuggccggac

SEQ ID NO: 368732 - RNA, 32 nt, Human
cccagcggccgggcauguagcagcggcagcaa

SEQ ID NO: 368733 - RNA, 32 nt, Human
cccagcggccuuccacccugacugccugaaca

SEQ ID NO: 368734 - RNA, 24 nt, Human
cccagcggcuggagcagcagacgu

SEQ ID NO: 368735 - RNA, 32 nt, Human
cccagcggcuguucccccugccgcaggugggu

SEQ ID NO: 368736 - RNA, 20 nt, Human
cccagcgggaggaggcgcgg

SEQ ID NO: 368737 - RNA, 32 nt, Human
cccagcgggaggugggaugugagacagcccac

SEQ ID NO: 368738 - RNA, 32 nt, Human
cccagcgggcaggcaggcaggaggaggcggag

SEQ ID NO: 368739 - RNA, 22 nt, Human
cccagcggugacagcagcaggg

SEQ ID NO: 368740 - RNA, 32 nt, Human
cccagcggugcuaagaguggucucagugagaa

SEQ ID NO: 368741 - RNA, 32 nt, Human
cccagcgguggcugagcaaugugcgagccugu

SEQ ID NO: 368742 - RNA, 31 nt, Human
cccagcgucacuucugcuaggagggacccgu

SEQ ID NO: 368743 - RNA, 32 nt, Human
cccagcgugaagccagggcccgggaagcaaau

SEQ ID NO: 368744 - RNA, 22 nt, Human
cccagcgugcccuggcucucca

SEQ ID NO: 368745 - RNA, 32 nt, Human
cccagcgugggaccccaagugaagacgaggcc

SEQ ID NO: 368746 - RNA, 32 nt, Human
cccagcgugguggcucaugccuguaaucccag

SEQ ID NO: 368747 - RNA, 21 nt, Human
cccagcgugguggggcagcag

SEQ ID NO: 368748 - RNA, 32 nt, Human
cccagcguggugguucaugccuguaauaccag

SEQ ID NO: 368749 - RNA, 32 nt, Human
cccagcguuuucugagaaguacuucagaaucu

SEQ ID NO: 368750 - RNA, 32 nt, Human
cccagcuaaaccugccucugugccaguggcuc

SEQ ID NO: 368751 - RNA, 32 nt, Human
cccagcuaaagcaguccuccagccucggccuc

SEQ ID NO: 368752 - RNA, 32 nt, Human
cccagcuaaaggaggcugagguugcagugagc

SEQ ID NO: 368753 - RNA, 32 nt, Human
cccagcuaacccacagaauuaugagagauaaa

SEQ ID NO: 368754 - RNA, 21 nt, Human
cccagcuaacuucugcucguc

SEQ ID NO: 368755 - RNA, 16 nt, Human
cccagcuaccugggag

SEQ ID NO: 368756 - RNA, 32 nt, Human
cccagcuacuaaaaauacuuguauuuuuagua

SEQ ID NO: 368757 - RNA, 32 nt, Human
cccagcuacuagggaggcugaggcaggagaau

SEQ ID NO: 368758 - RNA, 32 nt, Human
cccagcuacucaagagguugcagugagcugag

SEQ ID NO: 368759 - RNA, 32 nt, Human
cccagcuacucgggggcugagccaggcggaua

SEQ ID NO: 368760 - RNA, 32 nt, Human
cccagcuacuugaugcgaaggcugaggcaaaa

SEQ ID NO: 368761 - RNA, 32 nt, Human
cccagcuacuuugggagguugaggcaggagga

SEQ ID NO: 368762 - RNA, 18 nt, Human
cccagcuagagucagugg

SEQ ID NO: 368763 - RNA, 32 nt, Human
cccagcuagcucucgccucacugaggccuccc

SEQ ID NO: 368764 - RNA, 32 nt, Human
cccagcuagcuggccagguggggaggggcugg

SEQ ID NO: 368765 - RNA, 20 nt, Human
cccagcuaggagcagcagca

SEQ ID NO: 368766 - RNA, 32 nt, Human
cccagcuaguguuccucagaacaaagauugga

SEQ ID NO: 368767 - RNA, 22 nt, Human
cccagcuaugaagccuaucuug

SEQ ID NO: 368768 - RNA, 32 nt, Human
cccagcucaagcaauccucccaccucagccuc

SEQ ID NO: 368769 - RNA, 32 nt, Human
cccagcucaagccauggcaggcguggcaagca

SEQ ID NO: 368770 - RNA, 32 nt, Human
cccagcucaagugauccucccaccucagccuc

SEQ ID NO: 368771 - RNA, 32 nt, Human
cccagcucaagugauccuccuaccucagccuc

SEQ ID NO: 368772 - RNA, 21 nt, Human
cccagcucacccucaccccag

SEQ ID NO: 368773 - RNA, 18 nt, Human
cccagcucacuccagggc

SEQ ID NO: 368774 - RNA, 32 nt, Human
cccagcucacugcaaccuccgccuccuggguu

SEQ ID NO: 368775 - RNA, 32 nt, Human
cccagcucacugcagccucgaccucccuggcu

SEQ ID NO: 368776 - RNA, 21 nt, Human
cccagcucagagugcccguca

SEQ ID NO: 368777 - RNA, 32 nt, Human
cccagcucagcaccuggugcaaguaagcacaa

SEQ ID NO: 368778 - RNA, 32 nt, Human
cccagcucagcaucuucagcugugcccaggcu

SEQ ID NO: 368779 - RNA, 32 nt, Human
cccagcucagccugcugaccagcugggaugau

SEQ ID NO: 368780 - RNA, 18 nt, Human
cccagcucagcgccggcu

SEQ ID NO: 368781 - RNA, 23 nt, Human
cccagcucagcucgucaagcugc

SEQ ID NO: 368782 - RNA, 20 nt, Human
cccagcucagcucuuacugc

SEQ ID NO: 368783 - RNA, 32 nt, Human
cccagcucagcugccaggcccuucccugugcc

SEQ ID NO: 368784 - RNA, 25 nt, Human
cccagcucagggcagguccagcugu

SEQ ID NO: 368785 - RNA, 32 nt, Human
cccagcucagggugaugccugcugccuuugau

SEQ ID NO: 368786 - RNA, 32 nt, Human
cccagcucagguagggcugagacucucaggug

SEQ ID NO: 368787 - RNA, 22 nt, Human
cccagcucaguucucagcucug

SEQ ID NO: 368788 - RNA, 22 nt, Human
cccagcucauccaugugcuugu

SEQ ID NO: 368789 - RNA, 21 nt, Human
cccagcucaugcccccuuuca

SEQ ID NO: 368790 - RNA, 21 nt, Human
cccagcucaugccucuuggug

SEQ ID NO: 368791 - RNA, 21 nt, Human
cccagcucauuccucuuguca

SEQ ID NO: 368792 - RNA, 32 nt, Human
cccagcucauuucauucgacugcccaggccau

SEQ ID NO: 368793 - RNA, 32 nt, Human
cccagcuccaaugucaucuucucuggaagccg

SEQ ID NO: 368794 - RNA, 21 nt, Human
cccagcuccacccucucguca

SEQ ID NO: 368795 - RNA, 32 nt, Human
cccagcuccacuccagccuggcguccagggcc

SEQ ID NO: 368796 - RNA, 32 nt, Human
cccagcuccagccauccaccccucagcccuuu

SEQ ID NO: 368797 - RNA, 32 nt, Human
cccagcuccagccgccggcucggacucggucu

SEQ ID NO: 368798 - RNA, 32 nt, Human
cccagcuccauuccgcucccaccccagccggc

SEQ ID NO: 368799 - RNA, 32 nt, Human
cccagcucccaaaaugucugggaugccucggg

SEQ ID NO: 368800 - RNA, 32 nt, Human
cccagcucccaccuccccuugggcccacaccu

SEQ ID NO: 368801 - RNA, 20 nt, Human
cccagcucccauggccccca

SEQ ID NO: 368802 - RNA, 32 nt, Human
cccagcuccccuugggucucagugccagugcu

SEQ ID NO: 368803 - RNA, 32 nt, Human
cccagcucccgaccugcacuuccugcuggacu

SEQ ID NO: 368804 - RNA, 32 nt, Human
cccagcucccucuugccccuccaggaagcugc

SEQ ID NO: 368805 - RNA, 23 nt, Human
cccagcuccgccuccccacacuc

SEQ ID NO: 368806 - RNA, 19 nt, Human
cccagcuccgcugcugccg

SEQ ID NO: 368807 - RNA, 32 nt, Human
cccagcuccuaccugccucccacgccucaggu

SEQ ID NO: 368808 - RNA, 32 nt, Human
cccagcuccuauaccucuaccuuuccagccaa

SEQ ID NO: 368809 - RNA, 32 nt, Human
cccagcuccucacuuccgugugccucaugccu

SEQ ID NO: 368810 - RNA, 19 nt, Human
cccagcuccucagacauca

SEQ ID NO: 368811 - RNA, 21 nt, Human
cccagcuccuccugccuccca

SEQ ID NO: 368812 - RNA, 32 nt, Human
cccagcuccucgggaggcaggagaaucgcuug

SEQ ID NO: 368813 - RNA, 32 nt, Human
cccagcuccugcacuucuccccagagcgggac

SEQ ID NO: 368814 - RNA, 32 nt, Human
cccagcuccugccucccaguggccucuguagg

SEQ ID NO: 368815 - RNA, 21 nt, Human
cccagcuccugccuccuguca

SEQ ID NO: 368816 - RNA, 32 nt, Human
cccagcuccugccuccugucagcgucuacagg

SEQ ID NO: 368817 - RNA, 32 nt, Human
cccagcuccugccucuaauggccugguuaggc

SEQ ID NO: 368818 - RNA, 32 nt, Human
cccagcuccuggaggcaguggcuguagcagcc

SEQ ID NO: 368819 - RNA, 32 nt, Human
cccagcuccugggcuuugucccuucccaauaa

SEQ ID NO: 368820 - RNA, 18 nt, Human
cccagcuccuucccgggc

SEQ ID NO: 368821 - RNA, 24 nt, Human
cccagcucgcucuccccacuguca

SEQ ID NO: 368822 - RNA, 32 nt, Human
cccagcucgcugggguuggaggacugucauca

SEQ ID NO: 368823 - RNA, 32 nt, Human
cccagcucgggaccuggugcugaucagagugg

SEQ ID NO: 368824 - RNA, 21 nt, Human
cccagcucgucccggccucca

SEQ ID NO: 368825 - RNA, 32 nt, Human
cccagcucuaauuccauccaucuacccaacug

SEQ ID NO: 368826 - RNA, 32 nt, Human
cccagcucucagggacaagaccagucccccag

SEQ ID NO: 368827 - RNA, 32 nt, Human
cccagcucuccucugccagccacccuaaauuc

SEQ ID NO: 368828 - RNA, 32 nt, Human
cccagcucuccucuguggguuuuaccggaaag

SEQ ID NO: 368829 - RNA, 19 nt, Human
cccagcucuccugccuguc

SEQ ID NO: 368830 - RNA, 32 nt, Human
cccagcucucuuucccuucugggugucuuugc

SEQ ID NO: 368831 - RNA, 23 nt, Human
cccagcucugcccucugggucca

SEQ ID NO: 368832 - RNA, 23 nt, Human
cccagcucugcugcaggcagugg

SEQ ID NO: 368833 - RNA, 32 nt, Human
cccagcucugcuuuccagcgcuugguggaauc

SEQ ID NO: 368834 - RNA, 32 nt, Human
cccagcucuggccacugcuccagacaucccca

SEQ ID NO: 368835 - RNA, 21 nt, Human
cccagcucugucaggcauugg

SEQ ID NO: 368836 - RNA, 32 nt, Human
cccagcucuguucugcccccgcuuuccucugu

SEQ ID NO: 368837 - RNA, 32 nt, Human
cccagcugaaggaggcuggcaggaguuggcaa

SEQ ID NO: 368838 - RNA, 32 nt, Human
cccagcugacagccagcgacuggcagagcccc

SEQ ID NO: 368839 - RNA, 32 nt, Human
cccagcugaccaccccucccagcuccaauucc

SEQ ID NO: 368840 - RNA, 32 nt, Human
cccagcugaccuggaaugaggccuaaccacaa

SEQ ID NO: 368841 - RNA, 32 nt, Human
cccagcugaccuuccacccagaccugcugcag

SEQ ID NO: 368842 - RNA, 32 nt, Human
cccagcugaccuuucuuaagccuucacuguug

SEQ ID NO: 368843 - RNA, 21 nt, Human
cccagcugacgcaucuucuuu

SEQ ID NO: 368844 - RNA, 22 nt, Human
cccagcugacuucugcugauca

SEQ ID NO: 368845 - RNA, 19 nt, Human
cccagcugaggaccaggug

SEQ ID NO: 368846 - RNA, 32 nt, Human
cccagcugaggcacgauaauugcuugaacccg

SEQ ID NO: 368847 - RNA, 32 nt, Human
cccagcugagugucugucagcuucauucucuc

SEQ ID NO: 368848 - RNA, 32 nt, Human
cccagcugcaagugccuuccuuggagcagaga

SEQ ID NO: 368849 - RNA, 32 nt, Human
cccagcugcacugacuccuccuccaggaagcc

SEQ ID NO: 368850 - RNA, 21 nt, Human
cccagcugcagaccuucaucc

SEQ ID NO: 368851 - RNA, 17 nt, Human
cccagcugcagagucag

SEQ ID NO: 368852 - RNA, 31 nt, Human
cccagcugcagcaaggagguggggaaggagg

SEQ ID NO: 368853 - RNA, 32 nt, Human
cccagcugcagcucucugggucccccggugcc

SEQ ID NO: 368854 - RNA, 19 nt, Human
cccagcugccaccucucca

SEQ ID NO: 368855 - RNA, 32 nt, Human
cccagcugccagccuucuguccugggcaaacu

SEQ ID NO: 368856 - RNA, 32 nt, Human
cccagcugccagggaagacagagcaggcuuug

SEQ ID NO: 368857 - RNA, 32 nt, Human
cccagcugcccaggacggggcaagauguccaa

SEQ ID NO: 368858 - RNA, 32 nt, Human
cccagcugcccaggcugaggcaagagaaggcc

SEQ ID NO: 368859 - RNA, 32 nt, Human
cccagcugccucucccugcacccuggcccauc

SEQ ID NO: 368860 - RNA, 31 nt, Human
cccagcugccucugugcccuggccucuuucc

SEQ ID NO: 368861 - RNA, 32 nt, Human
cccagcugcugagaggaguugccugagaguga

SEQ ID NO: 368862 - RNA, 32 nt, Human
cccagcugcugcggaggcaggcugagggcgca

SEQ ID NO: 368863 - RNA, 32 nt, Human
cccagcugcuucuccuuuacuaacacaccugc

SEQ ID NO: 368864 - RNA, 32 nt, Human
cccagcuggaacacaggaaguuggagcaguag

SEQ ID NO: 368865 - RNA, 23 nt, Human
cccagcuggaacagcugaaguca

SEQ ID NO: 368866 - RNA, 22 nt, Human
cccagcuggaaccuggcagagg

SEQ ID NO: 368867 - RNA, 32 nt, Human
cccagcuggaagaggagagggaucagcucauc

SEQ ID NO: 368868 - RNA, 32 nt, Human
cccagcuggagcaauucuccugccucagccuu

SEQ ID NO: 368869 - RNA, 32 nt, Human
cccagcuggagggcccgaggcugcaggguguc

SEQ ID NO: 368870 - RNA, 18 nt, Human
cccagcuggagugcagug

SEQ ID NO: 368871 - RNA, 19 nt, Human
cccagcuggagugcagugg

SEQ ID NO: 368872 - RNA, 21 nt, Human
cccagcuggagugcaguggug

SEQ ID NO: 368873 - RNA, 18 nt, Human
cccagcuggccccagggc

SEQ ID NO: 368874 - RNA, 20 nt, Human
cccagcuggccuggccccca

SEQ ID NO: 368875 - RNA, 32 nt, Human
cccagcuggccuggcccccagcuucaccucug

SEQ ID NO: 368876 - RNA, 21 nt, Human
cccagcuggcuccuggcccca

SEQ ID NO: 368877 - RNA, 20 nt, Human
cccagcuggcugcagcacuu

SEQ ID NO: 368878 - RNA, 32 nt, Human
cccagcugggcugagggcccugaccacagcua

SEQ ID NO: 368879 - RNA, 32 nt, Human
cccagcuggggacugcuccauggccauggaga

SEQ ID NO: 368880 - RNA, 17 nt, Human
cccagcugggugcagug

SEQ ID NO: 368881 - RNA, 18 nt, Human
cccagcugggugcagugg

SEQ ID NO: 368882 - RNA, 32 nt, Human
cccagcugguauaaucucugugccucaguguu

SEQ ID NO: 368883 - RNA, 32 nt, Human
cccagcuggucugcuuggauuuccuacagccc

SEQ ID NO: 368884 - RNA, 25 nt, Human
cccagcuguagugagguugcaguga

SEQ ID NO: 368885 - RNA, 32 nt, Human
cccagcugucacucucucccacccccgggcag

SEQ ID NO: 368886 - RNA, 32 nt, Human
cccagcugucugcaggcaccaggcugggauga

SEQ ID NO: 368887 - RNA, 32 nt, Human
cccagcugucugcaguggcugacagcagggag

SEQ ID NO: 368888 - RNA, 32 nt, Human
cccagcugugcccagaggacagccaggcaggc

SEQ ID NO: 368889 - RNA, 23 nt, Human
cccagcugugccccucccccagg

SEQ ID NO: 368890 - RNA, 16 nt, Human
cccagcugugcugcug

SEQ ID NO: 368891 - RNA, 32 nt, Human
cccagcugugggagguggcgggaacaggggug

SEQ ID NO: 368892 - RNA, 32 nt, Human
cccagcugugggggcaguggggugggggagac

SEQ ID NO: 368893 - RNA, 32 nt, Human
cccagcuguggucccagagaucaggggguguu

SEQ ID NO: 368894 - RNA, 32 nt, Human
cccagcugugugucaccagcagcuuucccagc

SEQ ID NO: 368895 - RNA, 32 nt, Human
cccagcuguugacuuccagucacugucccaga

SEQ ID NO: 368896 - RNA, 32 nt, Human
cccagcuguugccuggcuuuccagaaacagaa

SEQ ID NO: 368897 - RNA, 32 nt, Human
cccagcuguuuagguugcuggaggccgggcua

SEQ ID NO: 368898 - RNA, 24 nt, Human
cccagcuuaaccccugccauccca

SEQ ID NO: 368899 - RNA, 32 nt, Human
cccagcuuagaguucuucuuucuuucuuaagc

SEQ ID NO: 368900 - RNA, 32 nt, Human
cccagcuuagccccaaagaccaaccaaagagc

SEQ ID NO: 368901 - RNA, 32 nt, Human
cccagcuuaggucccugacggggcugcuggug

SEQ ID NO: 368902 - RNA, 24 nt, Human
cccagcuucaccccucacccccag

SEQ ID NO: 368903 - RNA, 16 nt, Human
cccagcuucacuucug

SEQ ID NO: 368904 - RNA, 32 nt, Human
cccagcuucagcccuggcugcagcugcagcgc

SEQ ID NO: 368905 - RNA, 32 nt, Human
cccagcuucagccucaccuucccuguggucuu

SEQ ID NO: 368906 - RNA, 19 nt, Human
cccagcuucccucugcugu

SEQ ID NO: 368907 - RNA, 32 nt, Human
cccagcuucccucugcugugccacggcuguug

SEQ ID NO: 368908 - RNA, 32 nt, Human
cccagcuucuccccugcccuauucugcuucac

SEQ ID NO: 368909 - RNA, 22 nt, Human
cccagcuucucucucccuguca

SEQ ID NO: 368910 - RNA, 32 nt, Human
cccagcuucuucucgucucccaccccagcuuc

SEQ ID NO: 368911 - RNA, 32 nt, Human
cccagcuucuuggcuuggaggcugagguagga

SEQ ID NO: 368912 - RNA, 28 nt, Human
cccagcuucuugggaggccaaggcacaa

SEQ ID NO: 368913 - RNA, 19 nt, Human
cccagcuugagugcagugg

SEQ ID NO: 368914 - RNA, 32 nt, Human
cccagcuugcccaccgcgggcugucugcucuc

SEQ ID NO: 368915 - RNA, 19 nt, Human
cccagcuuggccuccccac

SEQ ID NO: 368916 - RNA, 32 nt, Human
cccagcuugggagcugugggucugccaggucc

SEQ ID NO: 368917 - RNA, 21 nt, Human
cccagcuugguggcaugcaug

SEQ ID NO: 368918 - RNA, 32 nt, Human
cccagcuugguuuggguggcagcugggagaac

SEQ ID NO: 368919 - RNA, 25 nt, Human
cccagcuuguuagucacccacuaua

SEQ ID NO: 368920 - RNA, 20 nt, Human
cccagcuuuauugcugcuau

SEQ ID NO: 368921 - RNA, 32 nt, Human
cccagcuuucaggccagcauugaggacaggag

SEQ ID NO: 368922 - RNA, 32 nt, Human
cccagcuuuccaggaacccuacuggcugccag

SEQ ID NO: 368923 - RNA, 21 nt, Human
cccagcuuuuagguucuuuaa

SEQ ID NO: 368924 - RNA, 21 nt, Human
cccaggaaaaaacggaucucu

SEQ ID NO: 368925 - RNA, 23 nt, Human
cccaggaaaaaaucaaugaucuc

SEQ ID NO: 368926 - RNA, 15 nt, Human
cccaggaaaacuguu

SEQ ID NO: 368927 - RNA, 15 nt, Human
cccaggaaaaguguc

SEQ ID NO: 368928 - RNA, 32 nt, Human
cccaggaaaccagcagaugcccagcuguagcu

SEQ ID NO: 368929 - RNA, 15 nt, Human
cccaggaaagcuguc

SEQ ID NO: 368930 - RNA, 22 nt, Human
cccaggaaaggccagcccaguc

SEQ ID NO: 368931 - RNA, 21 nt, Human
cccaggaaaggggugcaaaga

SEQ ID NO: 368932 - RNA, 15 nt, Human
cccaggaaaguuguc

SEQ ID NO: 368933 - RNA, 22 nt, Human
cccaggaaauagagguugcagu

SEQ ID NO: 368934 - RNA, 24 nt, Human
cccaggaaauagagguugcaguga

SEQ ID NO: 368935 - RNA, 23 nt, Human
cccaggaaauugacuuugcagug

SEQ ID NO: 368936 - RNA, 24 nt, Human
cccaggaaauugaggcugcaguga

SEQ ID NO: 368937 - RNA, 24 nt, Human
cccaggaaauuggggcugcaguga

SEQ ID NO: 368938 - RNA, 18 nt, Human
cccaggaacaacugaugg

SEQ ID NO: 368939 - RNA, 19 nt, Human
cccaggaacagcauccugg

SEQ ID NO: 368940 - RNA, 32 nt, Human
cccaggaaccuacaggggugucagccgcugag

SEQ ID NO: 368941 - RNA, 32 nt, Human
cccaggaacgcuaagacacaggcuccaguagg

SEQ ID NO: 368942 - RNA, 32 nt, Human
cccaggaacuagaagagagcgaggccuccggg

SEQ ID NO: 368943 - RNA, 32 nt, Human
cccaggaacuccucgguccagagaccaagugg

SEQ ID NO: 368944 - RNA, 32 nt, Human
cccaggaacuguuguuuucucaggauucuuuc

SEQ ID NO: 368945 - RNA, 32 nt, Human
cccaggaagaagcuggccagaggggcagcuca

SEQ ID NO: 368946 - RNA, 22 nt, Human
cccaggaagacacugaccugcu

SEQ ID NO: 368947 - RNA, 22 nt, Human
cccaggaagaggagguugcagu

SEQ ID NO: 368948 - RNA, 24 nt, Human
cccaggaagaggagguugcaguga

SEQ ID NO: 368949 - RNA, 32 nt, Human
cccaggaagaggagguugcagugagccgagau

SEQ ID NO: 368950 - RNA, 17 nt, Human
cccaggaagagucuguc

SEQ ID NO: 368951 - RNA, 32 nt, Human
cccaggaagaugaccuggcuucccugaauccc

SEQ ID NO: 368952 - RNA, 22 nt, Human
cccaggaagcagagguugcagu

SEQ ID NO: 368953 - RNA, 24 nt, Human
cccaggaagcagagguugcaguaa

SEQ ID NO: 368954 - RNA, 24 nt, Human
cccaggaagcagagguugcaguga

SEQ ID NO: 368955 - RNA, 32 nt, Human
cccaggaagcagagguugcagugagcagagau

SEQ ID NO: 368956 - RNA, 32 nt, Human
cccaggaagcagugggaggugguggcagauau

SEQ ID NO: 368957 - RNA, 32 nt, Human
cccaggaagccugcugcaucccuucccccgag

SEQ ID NO: 368958 - RNA, 24 nt, Human
cccaggaagcggaggcugcaguga

SEQ ID NO: 368959 - RNA, 20 nt, Human
cccaggaagcggagguugca

SEQ ID NO: 368960 - RNA, 24 nt, Human
cccaggaagcggagguugcaauga

SEQ ID NO: 368961 - RNA, 24 nt, Human
cccaggaagcggagguugcaguga

SEQ ID NO: 368962 - RNA, 32 nt, Human
cccaggaagcggagguugcagugagccaagau

SEQ ID NO: 368963 - RNA, 32 nt, Human
cccaggaagcggagguugcagugagccgagau

SEQ ID NO: 368964 - RNA, 21 nt, Human
cccaggaagcgggguugcagu

SEQ ID NO: 368965 - RNA, 23 nt, Human
cccaggaagcgggguugcaguga

SEQ ID NO: 368966 - RNA, 24 nt, Human
cccaggaagcuuuccagugaucuc

SEQ ID NO: 368967 - RNA, 19 nt, Human
cccaggaagggaggcuguc

SEQ ID NO: 368968 - RNA, 21 nt, Human
cccaggaagggcugcagcuga

SEQ ID NO: 368969 - RNA, 32 nt, Human
cccaggaaggugaccugccugaccaugaagca

SEQ ID NO: 368970 - RNA, 32 nt, Human
cccaggaaguagaagcuacagugagucgagau

SEQ ID NO: 368971 - RNA, 17 nt, Human
cccaggaaguaugcagu

SEQ ID NO: 368972 - RNA, 24 nt, Human
cccaggaagucaaggcugcaguga

SEQ ID NO: 368973 - RNA, 32 nt, Human
cccaggaagugcugggauuacaggcaugagcc

SEQ ID NO: 368974 - RNA, 22 nt, Human
cccaggaaguggagacugcagu

SEQ ID NO: 368975 - RNA, 24 nt, Human
cccaggaaguggagacugcaguga

SEQ ID NO: 368976 - RNA, 32 nt, Human
cccaggaaguggagacugcagugagccgauau

SEQ ID NO: 368977 - RNA, 22 nt, Human
cccaggaaguggagauugcagu

SEQ ID NO: 368978 - RNA, 24 nt, Human
cccaggaaguggagauugcaguga

SEQ ID NO: 368979 - RNA, 24 nt, Human
cccaggaaguggaggcugcaguga

SEQ ID NO: 368980 - RNA, 22 nt, Human
cccaggaaguggagguugcagu

SEQ ID NO: 368981 - RNA, 24 nt, Human
cccaggaaguggagguugcaguga

SEQ ID NO: 368982 - RNA, 32 nt, Human
cccaggaaguggagguugcagugagcagagau

SEQ ID NO: 368983 - RNA, 32 nt, Human
cccaggaaguggagguugcagugagccgagau

SEQ ID NO: 368984 - RNA, 32 nt, Human
cccaggaaguggagguugcagugagcuaagau

SEQ ID NO: 368985 - RNA, 32 nt, Human
cccaggaaguggagguugcagugagcugagau

SEQ ID NO: 368986 - RNA, 32 nt, Human
cccaggaaguggagguugcagugagcugaggu

SEQ ID NO: 368987 - RNA, 22 nt, Human
cccaggaaguggcaguugcagu

SEQ ID NO: 368988 - RNA, 24 nt, Human
cccaggaaguggcaguugcaguga

SEQ ID NO: 368989 - RNA, 32 nt, Human
cccaggaaguggcaguugcagugagccgagac

SEQ ID NO: 368990 - RNA, 24 nt, Human
cccaggaaguugaggcugcaguga

SEQ ID NO: 368991 - RNA, 32 nt, Human
cccaggaaugacagacagggguagaguugcug

SEQ ID NO: 368992 - RNA, 32 nt, Human
cccaggaaugaucauuugcugaagaugguguc

SEQ ID NO: 368993 - RNA, 32 nt, Human
cccaggaauucaagaccagccugggcaacaug

SEQ ID NO: 368994 - RNA, 32 nt, Human
cccaggaauucaagaccagccugggcaacuca

SEQ ID NO: 368995 - RNA, 24 nt, Human
cccaggaauucaaggcugcaguga

SEQ ID NO: 368996 - RNA, 24 nt, Human
cccaggaauucaaggcuucaccga

SEQ ID NO: 368997 - RNA, 21 nt, Human
cccaggaauucaggcugcagu

SEQ ID NO: 368998 - RNA, 23 nt, Human
cccaggaauucaggcugcaguaa

SEQ ID NO: 368999 - RNA, 32 nt, Human
cccaggaauucgaaaucagccuaggcaacaua

SEQ ID NO: 369000 - RNA, 22 nt, Human
cccaggaauugaaggcagcagu

SEQ ID NO: 369001 - RNA, 24 nt, Human
cccaggaauuggaggcugcaguga

SEQ ID NO: 369002 - RNA, 32 nt, Human
cccaggaauuggaggcugcagugagcuaugau

SEQ ID NO: 369003 - RNA, 24 nt, Human
cccaggaauuugaggcugcagcga

SEQ ID NO: 369004 - RNA, 22 nt, Human
cccaggaauuugagguugcagu

SEQ ID NO: 369005 - RNA, 24 nt, Human
cccaggaauuugagguugcaguaa

SEQ ID NO: 369006 - RNA, 24 nt, Human
cccaggaauuugagguuguaguga

SEQ ID NO: 369007 - RNA, 23 nt, Human
cccaggacaagccaaggauccaa

SEQ ID NO: 369008 - RNA, 32 nt, Human
cccaggacaaguucacuugcauuugucagccu

SEQ ID NO: 369009 - RNA, 24 nt, Human
cccaggacacggagauugcaguga

SEQ ID NO: 369010 - RNA, 32 nt, Human
cccaggacacggagauugcagugagccaagau

SEQ ID NO: 369011 - RNA, 25 nt, Human
cccaggacaggauccaggccggcuu

SEQ ID NO: 369012 - RNA, 24 nt, Human
cccaggacaucgaggcugcgguga

SEQ ID NO: 369013 - RNA, 32 nt, Human
cccaggacauguucgacaauggcagcuuucuc

SEQ ID NO: 369014 - RNA, 22 nt, Human
cccaggacauucccugccccuu

SEQ ID NO: 369015 - RNA, 32 nt, Human
cccaggaccacaggcucaggcagggccuccau

SEQ ID NO: 369016 - RNA, 32 nt, Human
cccaggaccacaggcugagacgagacgcaggg

SEQ ID NO: 369017 - RNA, 32 nt, Human
cccaggaccagcuuucuugucaccuugagguc

SEQ ID NO: 369018 - RNA, 32 nt, Human
cccaggacccacccauguuuucacuaucccuu

SEQ ID NO: 369019 - RNA, 20 nt, Human
cccaggacccccuguuccca

SEQ ID NO: 369020 - RNA, 32 nt, Human
cccaggaccccuuuuccacccugggccccaau

SEQ ID NO: 369021 - RNA, 32 nt, Human
cccaggacccuccacucacugcugugagugcg

SEQ ID NO: 369022 - RNA, 32 nt, Human
cccaggacccuccagaggcagccuggccugug

SEQ ID NO: 369023 - RNA, 23 nt, Human
cccaggacccucugagcugggag

SEQ ID NO: 369024 - RNA, 22 nt, Human
cccaggacccuggacccagcca

SEQ ID NO: 369025 - RNA, 25 nt, Human
cccaggacccuucaaagggcuggga

SEQ ID NO: 369026 - RNA, 32 nt, Human
cccaggaccucuggaccucagguucccaagac

SEQ ID NO: 369027 - RNA, 32 nt, Human
cccaggacgagaugccuuguuucuuuuacaau

SEQ ID NO: 369028 - RNA, 24 nt, Human
cccaggacgcagagguugcgguga

SEQ ID NO: 369029 - RNA, 32 nt, Human
cccaggacucacucacaccuauucuccaacuc

SEQ ID NO: 369030 - RNA, 32 nt, Human
cccaggacucacuccucaacccuucccuuccc

SEQ ID NO: 369031 - RNA, 32 nt, Human
cccaggacuccagaugccaggagcccugcugc

SEQ ID NO: 369032 - RNA, 32 nt, Human
cccaggacuccucgcuccuccuggagggccug

SEQ ID NO: 369033 - RNA, 32 nt, Human
cccaggacucuggcuucucuccucagacuucu

SEQ ID NO: 369034 - RNA, 32 nt, Human
cccaggacucuguuuacgugcccagucagccc

SEQ ID NO: 369035 - RNA, 19 nt, Human
cccaggacugcagcggcuu

SEQ ID NO: 369036 - RNA, 22 nt, Human
cccaggacugcgcucugcccca

SEQ ID NO: 369037 - RNA, 32 nt, Human
cccaggacuggagcuuucucuggccaaguuuc

SEQ ID NO: 369038 - RNA, 32 nt, Human
cccaggacuucaagaccagccuaggcaacaug

SEQ ID NO: 369039 - RNA, 32 nt, Human
cccaggacuuccuaaugugcagcuaggguugg

SEQ ID NO: 369040 - RNA, 24 nt, Human
cccaggacuucgaggcugcaauga

SEQ ID NO: 369041 - RNA, 32 nt, Human
cccaggacuuugccucuacagcauuuucuuac

SEQ ID NO: 369042 - RNA, 32 nt, Human
cccaggacuuugggcaagucacccgcacuccc

SEQ ID NO: 369043 - RNA, 32 nt, Human
cccaggagaaccccggugaguccguccaguug

SEQ ID NO: 369044 - RNA, 21 nt, Human
cccaggagaagcuggccggga

SEQ ID NO: 369045 - RNA, 24 nt, Human
cccaggagaagguacagcccuguc

SEQ ID NO: 369046 - RNA, 32 nt, Human
cccaggagaagucaggaagggagcccagcugg

SEQ ID NO: 369047 - RNA, 24 nt, Human
cccaggagacagaggcugcauuga

SEQ ID NO: 369048 - RNA, 24 nt, Human
cccaggagacagagguugcaguga

SEQ ID NO: 369049 - RNA, 24 nt, Human
cccaggagacagagguuguaguga

SEQ ID NO: 369050 - RNA, 23 nt, Human
cccaggagacagagguuguggug

SEQ ID NO: 369051 - RNA, 24 nt, Human
cccaggagacagagguuguggugg

SEQ ID NO: 369052 - RNA, 32 nt, Human
cccaggagacagcacaccaccaggcuccacac

SEQ ID NO: 369053 - RNA, 20 nt, Human
cccaggagacagguugcagu

SEQ ID NO: 369054 - RNA, 22 nt, Human
cccaggagacagguugcaguga

SEQ ID NO: 369055 - RNA, 18 nt, Human
cccaggagaccccuccca

SEQ ID NO: 369056 - RNA, 24 nt, Human
cccaggagacggaaguugcaguga

SEQ ID NO: 369057 - RNA, 32 nt, Human
cccaggagacggaaguugcagugagcugagau

SEQ ID NO: 369058 - RNA, 24 nt, Human
cccaggagacggagcuugcaguga

SEQ ID NO: 369059 - RNA, 32 nt, Human
cccaggagacggagcuugcagugagccgagau

SEQ ID NO: 369060 - RNA, 22 nt, Human
cccaggagacggagguugcagu

SEQ ID NO: 369061 - RNA, 24 nt, Human
cccaggagacggagguugcaguga

SEQ ID NO: 369062 - RNA, 32 nt, Human
cccaggagacggagguugcagugagccgagau

SEQ ID NO: 369063 - RNA, 24 nt, Human
cccaggagacggagguugcgguga

SEQ ID NO: 369064 - RNA, 24 nt, Human
cccaggagacggugguugcaguga

SEQ ID NO: 369065 - RNA, 32 nt, Human
cccaggagacggugguugcagugagcgaagau

SEQ ID NO: 369066 - RNA, 32 nt, Human
cccaggagacucaggcaguggccuggagaggc

SEQ ID NO: 369067 - RNA, 32 nt, Human
cccaggagagaagggaugaaggccuuuggucc

SEQ ID NO: 369068 - RNA, 32 nt, Human
cccaggagagagaagcagggagggagagagcu

SEQ ID NO: 369069 - RNA, 24 nt, Human
cccaggagagcacagcagacccuu

SEQ ID NO: 369070 - RNA, 32 nt, Human
cccaggagagccugugcagccuggggaacgug

SEQ ID NO: 369071 - RNA, 15 nt, Human
cccaggagagcuguc

SEQ ID NO: 369072 - RNA, 22 nt, Human
cccaggagaggaagguugcagu

SEQ ID NO: 369073 - RNA, 24 nt, Human
cccaggagaggaagguugcaguaa

SEQ ID NO: 369074 - RNA, 32 nt, Human
cccaggagaggauccuagggggcaguuaggca

SEQ ID NO: 369075 - RNA, 32 nt, Human
cccaggagaggccauacuuucaggguggcaug

SEQ ID NO: 369076 - RNA, 24 nt, Human
cccaggagagggaccgccuuccca

SEQ ID NO: 369077 - RNA, 22 nt, Human
cccaggagagugggcuacagga

SEQ ID NO: 369078 - RNA, 24 nt, Human
cccaggagauagagguugcaauga

SEQ ID NO: 369079 - RNA, 25 nt, Human
cccaggagaugcaggcuugcaguga

SEQ ID NO: 369080 - RNA, 32 nt, Human
cccaggagaugcaggcuugcagugagccauga

SEQ ID NO: 369081 - RNA, 24 nt, Human
cccaggagauggaaguugcaguga

SEQ ID NO: 369082 - RNA, 21 nt, Human
cccaggagauggagaugccgu

SEQ ID NO: 369083 - RNA, 22 nt, Human
cccaggagauggagauugcagu

SEQ ID NO: 369084 - RNA, 24 nt, Human
cccaggagauggagauugcaguag

SEQ ID NO: 369085 - RNA, 24 nt, Human
cccaggagauggagggccuggugg

SEQ ID NO: 369086 - RNA, 22 nt, Human
cccaggagauggagguugcagu

SEQ ID NO: 369087 - RNA, 24 nt, Human
cccaggagauggagguugcaguga

SEQ ID NO: 369088 - RNA, 32 nt, Human
cccaggagauggagguugcagugagccaagau

SEQ ID NO: 369089 - RNA, 32 nt, Human
cccaggagauggagguugcagugagcugagau

SEQ ID NO: 369090 - RNA, 24 nt, Human
cccaggagauggagguugcgguga

SEQ ID NO: 369091 - RNA, 32 nt, Human
cccaggagauugagaccagccugggcaacaua

SEQ ID NO: 369092 - RNA, 24 nt, Human
cccaggagauugaggcugcaguga

SEQ ID NO: 369093 - RNA, 32 nt, Human
cccaggagauugaggcugcagugagcaugauc

SEQ ID NO: 369094 - RNA, 24 nt, Human
cccaggagcacugacugcaguuga

SEQ ID NO: 369095 - RNA, 32 nt, Human
cccaggagcagaacucaguauccagagcuuac

SEQ ID NO: 369096 - RNA, 32 nt, Human
cccaggagcagcagcaaggaucugccagcugc

SEQ ID NO: 369097 - RNA, 32 nt, Human
cccaggagcaggaccugaaccaggaaggggag

SEQ ID NO: 369098 - RNA, 23 nt, Human
cccaggagcaggcucccaaguga

SEQ ID NO: 369099 - RNA, 22 nt, Human
cccaggagcagugucacaggga

SEQ ID NO: 369100 - RNA, 32 nt, Human
cccaggagcauugcuuuucugugaauucauua

SEQ ID NO: 369101 - RNA, 20 nt, Human
cccaggagccaaacucuuga

SEQ ID NO: 369102 - RNA, 32 nt, Human
cccaggagccaagaaaagagaacuacgaggaa

SEQ ID NO: 369103 - RNA, 32 nt, Human
cccaggagccaccauggagagugagaagcugc

SEQ ID NO: 369104 - RNA, 23 nt, Human
cccaggagccaggacaggcguga

SEQ ID NO: 369105 - RNA, 32 nt, Human
cccaggagccaggcuuccccucagcuggguga

SEQ ID NO: 369106 - RNA, 32 nt, Human
cccaggagccaggucugaacuucugugcacag

SEQ ID NO: 369107 - RNA, 23 nt, Human
cccaggagcccagccucuugaga

SEQ ID NO: 369108 - RNA, 32 nt, Human
cccaggagcccucguccccugccuuguccccc

SEQ ID NO: 369109 - RNA, 24 nt, Human
cccaggagccggagguugugguga

SEQ ID NO: 369110 - RNA, 32 nt, Human
cccaggagccuaguacaauauagugaugccau

SEQ ID NO: 369111 - RNA, 23 nt, Human
cccaggagccucugccucaguga

SEQ ID NO: 369112 - RNA, 20 nt, Human
cccaggagccugagggggug

SEQ ID NO: 369113 - RNA, 32 nt, Human
cccaggagcgaacagcaagcagcaaccgaagg

SEQ ID NO: 369114 - RNA, 22 nt, Human
cccaggagcuaguauccuuaga

SEQ ID NO: 369115 - RNA, 32 nt, Human
cccaggagcuaguggagggugaggucaaugug

SEQ ID NO: 369116 - RNA, 24 nt, Human
cccaggagcucaagauugcaguga

SEQ ID NO: 369117 - RNA, 24 nt, Human
cccaggagcucaaggucagcauga

SEQ ID NO: 369118 - RNA, 32 nt, Human
cccaggagcucaagucccaccugggcaacaua

SEQ ID NO: 369119 - RNA, 24 nt, Human
cccaggagcucuggagguacagga

SEQ ID NO: 369120 - RNA, 24 nt, Human
cccaggagcugaagguggggguga

SEQ ID NO: 369121 - RNA, 32 nt, Human
cccaggagcugaggccggagaaucgcuugaac

SEQ ID NO: 369122 - RNA, 32 nt, Human
cccaggagcugaggggugagggcuggggacca

SEQ ID NO: 369123 - RNA, 21 nt, Human
cccaggagcugcaggcuggga

SEQ ID NO: 369124 - RNA, 32 nt, Human
cccaggagcugcaggcugggagggggcagcca

SEQ ID NO: 369125 - RNA, 24 nt, Human
cccaggagcuggauguugcaguga

SEQ ID NO: 369126 - RNA, 18 nt, Human
cccaggagcugggcccug

SEQ ID NO: 369127 - RNA, 22 nt, Human
cccaggagcuuccacucucaga

SEQ ID NO: 369128 - RNA, 22 nt, Human
cccaggaggaagagguugcagu

SEQ ID NO: 369129 - RNA, 24 nt, Human
cccaggaggaagagguugcaguga

SEQ ID NO: 369130 - RNA, 32 nt, Human
cccaggaggaagagguugcagugagccaagau

SEQ ID NO: 369131 - RNA, 32 nt, Human
cccaggaggaaggauggggcaagagcagacaa

SEQ ID NO: 369132 - RNA, 32 nt, Human
cccaggaggacagagacccugaggcaggaggg

SEQ ID NO: 369133 - RNA, 15 nt, Human
cccaggaggacuguc

SEQ ID NO: 369134 - RNA, 32 nt, Human
cccaggaggagaacaggagggaggaggagaug

SEQ ID NO: 369135 - RNA, 24 nt, Human
cccaggaggaggagcuugcaguga

SEQ ID NO: 369136 - RNA, 32 nt, Human
cccaggaggaggagcuugcagugagccgagau

SEQ ID NO: 369137 - RNA, 32 nt, Human
cccaggaggaggaggaggacgagggccuagug

SEQ ID NO: 369138 - RNA, 24 nt, Human
cccaggaggaggaggcugcaguga

SEQ ID NO: 369139 - RNA, 32 nt, Human
cccaggaggaggaggcugcagugagcuaagau

SEQ ID NO: 369140 - RNA, 24 nt, Human
cccaggaggaggaggucgcaguga

SEQ ID NO: 369141 - RNA, 32 nt, Human
cccaggaggagggagaggacagagccacugca

SEQ ID NO: 369142 - RNA, 32 nt, Human
cccaggaggagguggagaucgcagugagcuga

SEQ ID NO: 369143 - RNA, 32 nt, Human
cccaggaggaguaggagcaggagcagaagcag

SEQ ID NO: 369144 - RNA, 22 nt, Human
cccaggaggagugacggaguga

SEQ ID NO: 369145 - RNA, 20 nt, Human
cccaggaggaguggggccag

SEQ ID NO: 369146 - RNA, 22 nt, Human
cccaggaggaugcugcagguga

SEQ ID NO: 369147 - RNA, 22 nt, Human
cccaggaggcaaaggcugcagu

SEQ ID NO: 369148 - RNA, 24 nt, Human
cccaggaggcaaaggcugcaguga

SEQ ID NO: 369149 - RNA, 32 nt, Human
cccaggaggcaaaggcugcagugagccaagau

SEQ ID NO: 369150 - RNA, 22 nt, Human
cccaggaggcaaagguugcagu

SEQ ID NO: 369151 - RNA, 24 nt, Human
cccaggaggcaaagguugcaguga

SEQ ID NO: 369152 - RNA, 32 nt, Human
cccaggaggcaaagguugcagugagccacgau

SEQ ID NO: 369153 - RNA, 22 nt, Human
cccaggaggcacagauugcagu

SEQ ID NO: 369154 - RNA, 24 nt, Human
cccaggaggcacagauugcaguga

SEQ ID NO: 369155 - RNA, 32 nt, Human
cccaggaggcacagauugcagugagccaagau

SEQ ID NO: 369156 - RNA, 24 nt, Human
cccaggaggcacagcuugcaguga

SEQ ID NO: 369157 - RNA, 32 nt, Human
cccaggaggcacagcuugcagugagcgaagau

SEQ ID NO: 369158 - RNA, 24 nt, Human
cccaggaggcacaggcugcaguga

SEQ ID NO: 369159 - RNA, 32 nt, Human
cccaggaggcacaggcugcagugagcagagau

SEQ ID NO: 369160 - RNA, 32 nt, Human
cccaggaggcacagguugcagugagccaggau

SEQ ID NO: 369161 - RNA, 24 nt, Human
cccaggaggcacaguuugcaguga

SEQ ID NO: 369162 - RNA, 32 nt, Human
cccaggaggcacuggggaaggccaggugccug

SEQ ID NO: 369163 - RNA, 24 nt, Human
cccaggaggcagaaguugcaguga

SEQ ID NO: 369164 - RNA, 32 nt, Human
cccaggaggcagaaguugcagugagcagagau

SEQ ID NO: 369165 - RNA, 32 nt, Human
cccaggaggcagaaguugcagugagccgaauu

SEQ ID NO: 369166 - RNA, 32 nt, Human
cccaggaggcagaaguugcagugagcugagau

SEQ ID NO: 369167 - RNA, 32 nt, Human
cccaggaggcagaauuugcagugagcugagau

SEQ ID NO: 369168 - RNA, 21 nt, Human
cccaggaggcagagaaugagu

SEQ ID NO: 369169 - RNA, 24 nt, Human
cccaggaggcagagaucgcaguga

SEQ ID NO: 369170 - RNA, 24 nt, Human
cccaggaggcagagauggcaguga

SEQ ID NO: 369171 - RNA, 22 nt, Human
cccaggaggcagagauugcagu

SEQ ID NO: 369172 - RNA, 24 nt, Human
cccaggaggcagagauugcaguga

SEQ ID NO: 369173 - RNA, 32 nt, Human
cccaggaggcagagauugcagugagccaagau

SEQ ID NO: 369174 - RNA, 32 nt, Human
cccaggaggcagagauugcagugagcugagau

SEQ ID NO: 369175 - RNA, 24 nt, Human
cccaggaggcagagauugcgguga

SEQ ID NO: 369176 - RNA, 24 nt, Human
cccaggaggcagagcuugcaguga

SEQ ID NO: 369177 - RNA, 32 nt, Human
cccaggaggcagagcuugcagugagccaagau

SEQ ID NO: 369178 - RNA, 32 nt, Human
cccaggaggcagagcuugcagugagccgagac

SEQ ID NO: 369179 - RNA, 32 nt, Human
cccaggaggcagagcuugcagugagccgagau

SEQ ID NO: 369180 - RNA, 32 nt, Human
cccaggaggcagagcuugcagugagccuagau

SEQ ID NO: 369181 - RNA, 32 nt, Human
cccaggaggcagagcuugcagugagcugagau

SEQ ID NO: 369182 - RNA, 21 nt, Human
cccaggaggcagagcuuguag

SEQ ID NO: 369183 - RNA, 24 nt, Human
cccaggaggcagagcuuguaguga

SEQ ID NO: 369184 - RNA, 22 nt, Human
cccaggaggcagaggcuacagu

SEQ ID NO: 369185 - RNA, 24 nt, Human
cccaggaggcagaggcuacaguga

SEQ ID NO: 369186 - RNA, 32 nt, Human
cccaggaggcagaggcuacagugagcugagau

SEQ ID NO: 369187 - RNA, 22 nt, Human
cccaggaggcagaggcugcagu

SEQ ID NO: 369188 - RNA, 24 nt, Human
cccaggaggcagaggcugcaguga

SEQ ID NO: 369189 - RNA, 32 nt, Human
cccaggaggcagaggcugcagugagccaugcu

SEQ ID NO: 369190 - RNA, 32 nt, Human
cccaggaggcagaggcugcagugagccgagau

SEQ ID NO: 369191 - RNA, 32 nt, Human
cccaggaggcagaggguugcagugagccgaga

SEQ ID NO: 369192 - RNA, 24 nt, Human
cccaggaggcagaggucgcaguga

SEQ ID NO: 369193 - RNA, 22 nt, Human
cccaggaggcagagguuacagu

SEQ ID NO: 369194 - RNA, 24 nt, Human
cccaggaggcagagguuacaguaa

SEQ ID NO: 369195 - RNA, 24 nt, Human
cccaggaggcagagguuacaguga

SEQ ID NO: 369196 - RNA, 32 nt, Human
cccaggaggcagagguuacagugagcagagau

SEQ ID NO: 369197 - RNA, 24 nt, Human
cccaggaggcagagguuccaguga

SEQ ID NO: 369198 - RNA, 20 nt, Human
cccaggaggcagagguugca

SEQ ID NO: 369199 - RNA, 24 nt, Human
cccaggaggcagagguugcaauga

SEQ ID NO: 369200 - RNA, 21 nt, Human
cccaggaggcagagguugcag

SEQ ID NO: 369201 - RNA, 24 nt, Human
cccaggaggcagagguugcagcga

SEQ ID NO: 369202 - RNA, 22 nt, Human
cccaggaggcagagguugcagu

SEQ ID NO: 369203 - RNA, 24 nt, Human
cccaggaggcagagguugcaguaa

SEQ ID NO: 369204 - RNA, 23 nt, Human
cccaggaggcagagguugcagug

SEQ ID NO: 369205 - RNA, 24 nt, Human
cccaggaggcagagguugcaguga

SEQ ID NO: 369206 - RNA, 32 nt, Human
cccaggaggcagagguugcagugagccaagac

SEQ ID NO: 369207 - RNA, 32 nt, Human
cccaggaggcagagguugcagugagccaagau

SEQ ID NO: 369208 - RNA, 32 nt, Human
cccaggaggcagagguugcagugagccaaggu

SEQ ID NO: 369209 - RNA, 32 nt, Human
cccaggaggcagagguugcagugagccgagac

SEQ ID NO: 369210 - RNA, 32 nt, Human
cccaggaggcagagguugcagugagccgagau

SEQ ID NO: 369211 - RNA, 32 nt, Human
cccaggaggcagagguugcagugagcuaagac

SEQ ID NO: 369212 - RNA, 32 nt, Human
cccaggaggcagagguugcagugagcuaagau

SEQ ID NO: 369213 - RNA, 32 nt, Human
cccaggaggcagagguugcagugagcugagac

SEQ ID NO: 369214 - RNA, 32 nt, Human
cccaggaggcagagguugcagugagcugagau

SEQ ID NO: 369215 - RNA, 32 nt, Human
cccaggaggcagagguugcagugagcugugau

SEQ ID NO: 369216 - RNA, 32 nt, Human
cccaggaggcagagguugcagugagucaagau

SEQ ID NO: 369217 - RNA, 32 nt, Human
cccaggaggcagagguugcagugagugaagau

SEQ ID NO: 369218 - RNA, 24 nt, Human
cccaggaggcagagguugcagugg

SEQ ID NO: 369219 - RNA, 32 nt, Human
cccaggaggcagagguugcagugggccaagau

SEQ ID NO: 369220 - RNA, 24 nt, Human
cccaggaggcagagguugcauuga

SEQ ID NO: 369221 - RNA, 24 nt, Human
cccaggaggcagagguugcgguga

SEQ ID NO: 369222 - RNA, 24 nt, Human
cccaggaggcagagguugcguuga

SEQ ID NO: 369223 - RNA, 24 nt, Human
cccaggaggcagagguugggguga

SEQ ID NO: 369224 - RNA, 24 nt, Human
cccaggaggcagaguuugcaguga

SEQ ID NO: 369225 - RNA, 32 nt, Human
cccaggaggcagaguuugcagugagccaagau

SEQ ID NO: 369226 - RNA, 32 nt, Human
cccaggaggcagaguuugcagugagcugagau

SEQ ID NO: 369227 - RNA, 32 nt, Human
cccaggaggcagcugcugacagguuugcuaca

SEQ ID NO: 369228 - RNA, 24 nt, Human
cccaggaggcagcuguugcaguga

SEQ ID NO: 369229 - RNA, 32 nt, Human
cccaggaggcagcuguugcagugagccaagau

SEQ ID NO: 369230 - RNA, 23 nt, Human
cccaggaggcaggacaacacuga

SEQ ID NO: 369231 - RNA, 23 nt, Human
cccaggaggcagggaggcagcgg

SEQ ID NO: 369232 - RNA, 24 nt, Human
cccaggaggcagugauugcaguga

SEQ ID NO: 369233 - RNA, 24 nt, Human
cccaggaggccaagucugcaguga

SEQ ID NO: 369234 - RNA, 21 nt, Human
cccaggaggccaccccugaga

SEQ ID NO: 369235 - RNA, 24 nt, Human
cccaggaggccccugcugcagaga

SEQ ID NO: 369236 - RNA, 32 nt, Human
cccaggaggccgagguugcagugagccaagau

SEQ ID NO: 369237 - RNA, 24 nt, Human
cccaggaggcgaagauugcaguga

SEQ ID NO: 369238 - RNA, 32 nt, Human
cccaggaggcgaagauugcagugagcugauau

SEQ ID NO: 369239 - RNA, 24 nt, Human
cccaggaggcgaagauugccguga

SEQ ID NO: 369240 - RNA, 32 nt, Human
cccaggaggcgacugcaugguggagagggagc

SEQ ID NO: 369241 - RNA, 23 nt, Human
cccaggaggcgcuggagcaacag

SEQ ID NO: 369242 - RNA, 24 nt, Human
cccaggaggcggaaguugcaguga

SEQ ID NO: 369243 - RNA, 32 nt, Human
cccaggaggcggaaguugcagugagcugagau

SEQ ID NO: 369244 - RNA, 24 nt, Human
cccaggaggcggaccuuguaguga

SEQ ID NO: 369245 - RNA, 32 nt, Human
cccaggaggcggaccuuguagugagccgagau

SEQ ID NO: 369246 - RNA, 24 nt, Human
cccaggaggcggacguugcaguga

SEQ ID NO: 369247 - RNA, 23 nt, Human
cccaggaggcggagauugcagug

SEQ ID NO: 369248 - RNA, 24 nt, Human
cccaggaggcggagauugcaguga

SEQ ID NO: 369249 - RNA, 32 nt, Human
cccaggaggcggagauugcagugagccgagau

SEQ ID NO: 369250 - RNA, 32 nt, Human
cccaggaggcggagauugcagugagcugagau

SEQ ID NO: 369251 - RNA, 24 nt, Human
cccaggaggcggagcuggcaguga

SEQ ID NO: 369252 - RNA, 32 nt, Human
cccaggaggcggagcuggcagugagcugagau

SEQ ID NO: 369253 - RNA, 24 nt, Human
cccaggaggcggagcuuacaguga

SEQ ID NO: 369254 - RNA, 23 nt, Human
cccaggaggcggagcuugcagug

SEQ ID NO: 369255 - RNA, 24 nt, Human
cccaggaggcggagcuugcaguga

SEQ ID NO: 369256 - RNA, 32 nt, Human
cccaggaggcggagcuugcagugagcagagau

SEQ ID NO: 369257 - RNA, 32 nt, Human
cccaggaggcggagcuugcagugagccaagau

SEQ ID NO: 369258 - RNA, 32 nt, Human
cccaggaggcggagcuugcagugagccaugau

SEQ ID NO: 369259 - RNA, 32 nt, Human
cccaggaggcggagcuugcagugagccgagau

SEQ ID NO: 369260 - RNA, 32 nt, Human
cccaggaggcggagcuugcagugagcugagau

SEQ ID NO: 369261 - RNA, 32 nt, Human
cccaggaggcggagcuugcagugagucgagau

SEQ ID NO: 369262 - RNA, 32 nt, Human
cccaggaggcggaggcagaggcugcagugacc

SEQ ID NO: 369263 - RNA, 22 nt, Human
cccaggaggcggaggcugcagu

SEQ ID NO: 369264 - RNA, 23 nt, Human
cccaggaggcggaggcugcagug

SEQ ID NO: 369265 - RNA, 24 nt, Human
cccaggaggcggaggcugcaguga

SEQ ID NO: 369266 - RNA, 32 nt, Human
cccaggaggcggaggcugcagugagcccagau

SEQ ID NO: 369267 - RNA, 32 nt, Human
cccaggaggcggaggcugcagugagcugagau

SEQ ID NO: 369268 - RNA, 24 nt, Human
cccaggaggcggagguagcaguga

SEQ ID NO: 369269 - RNA, 32 nt, Human
cccaggaggcggagguagcagugagccaagau

SEQ ID NO: 369270 - RNA, 23 nt, Human
cccaggaggcggagguaguggug

SEQ ID NO: 369271 - RNA, 24 nt, Human
cccaggaggcggagguagugguga

SEQ ID NO: 369272 - RNA, 32 nt, Human
cccaggaggcggagguaguggugagcaaagau

SEQ ID NO: 369273 - RNA, 22 nt, Human
cccaggaggcggagguuacagu

SEQ ID NO: 369274 - RNA, 24 nt, Human
cccaggaggcggagguuacaguga

SEQ ID NO: 369275 - RNA, 32 nt, Human
cccaggaggcggagguuacagugagccaagau

SEQ ID NO: 369276 - RNA, 24 nt, Human
cccaggaggcggagguuccaguga

SEQ ID NO: 369277 - RNA, 20 nt, Human
cccaggaggcggagguugca

SEQ ID NO: 369278 - RNA, 24 nt, Human
cccaggaggcggagguugcacuga

SEQ ID NO: 369279 - RNA, 32 nt, Human
cccaggaggcggagguugcacugagccgagau

SEQ ID NO: 369280 - RNA, 21 nt, Human
cccaggaggcggagguugcag

SEQ ID NO: 369281 - RNA, 24 nt, Human
cccaggaggcggagguugcaggga

SEQ ID NO: 369282 - RNA, 22 nt, Human
cccaggaggcggagguugcagu

SEQ ID NO: 369283 - RNA, 24 nt, Human
cccaggaggcggagguugcaguaa

SEQ ID NO: 369284 - RNA, 32 nt, Human
cccaggaggcggagguugcaguaagccaaggu

SEQ ID NO: 369285 - RNA, 23 nt, Human
cccaggaggcggagguugcagug

SEQ ID NO: 369286 - RNA, 24 nt, Human
cccaggaggcggagguugcaguga

SEQ ID NO: 369287 - RNA, 32 nt, Human
cccaggaggcggagguugcagugaaccgagau

SEQ ID NO: 369288 - RNA, 32 nt, Human
cccaggaggcggagguugcagugacccgagau

SEQ ID NO: 369289 - RNA, 32 nt, Human
cccaggaggcggagguugcagugagacgagau

SEQ ID NO: 369290 - RNA, 32 nt, Human
cccaggaggcggagguugcagugagcagagau

SEQ ID NO: 369291 - RNA, 32 nt, Human
cccaggaggcggagguugcagugagccaagau

SEQ ID NO: 369292 - RNA, 32 nt, Human
cccaggaggcggagguugcagugagccaggau

SEQ ID NO: 369293 - RNA, 32 nt, Human
cccaggaggcggagguugcagugagccgagau

SEQ ID NO: 369294 - RNA, 32 nt, Human
cccaggaggcggagguugcagugagcucagau

SEQ ID NO: 369295 - RNA, 32 nt, Human
cccaggaggcggagguugcagugagcugagau

SEQ ID NO: 369296 - RNA, 32 nt, Human
cccaggaggcggagguugcagugagcugaguu

SEQ ID NO: 369297 - RNA, 32 nt, Human
cccaggaggcggagguugcagugaguugagau

SEQ ID NO: 369298 - RNA, 32 nt, Human
cccaggaggcggagguugcagugaguugcagu

SEQ ID NO: 369299 - RNA, 32 nt, Human
cccaggaggcggagguugcagugauccaagau

SEQ ID NO: 369300 - RNA, 23 nt, Human
cccaggaggcggagguugccgug

SEQ ID NO: 369301 - RNA, 24 nt, Human
cccaggaggcggagguugccguga

SEQ ID NO: 369302 - RNA, 32 nt, Human
cccaggaggcggagguugccgugagccaagau

SEQ ID NO: 369303 - RNA, 23 nt, Human
cccaggaggcggagguugcggug

SEQ ID NO: 369304 - RNA, 24 nt, Human
cccaggaggcggagguugcgguga

SEQ ID NO: 369305 - RNA, 32 nt, Human
cccaggaggcggagguugcggugagccaagau

SEQ ID NO: 369306 - RNA, 32 nt, Human
cccaggaggcggagguugcggugagccgagau

SEQ ID NO: 369307 - RNA, 32 nt, Human
cccaggaggcggagguugcggugagcugagau

SEQ ID NO: 369308 - RNA, 32 nt, Human
cccaggaggcggagguugcggugaguugagau

SEQ ID NO: 369309 - RNA, 21 nt, Human
cccaggaggcggagguuguag

SEQ ID NO: 369310 - RNA, 24 nt, Human
cccaggaggcggagguuguaguga

SEQ ID NO: 369311 - RNA, 32 nt, Human
cccaggaggcggagguuguagugagccaagau

SEQ ID NO: 369312 - RNA, 32 nt, Human
cccaggaggcggagguuguagugagcugagau

SEQ ID NO: 369313 - RNA, 23 nt, Human
cccaggaggcggagguuguggug

SEQ ID NO: 369314 - RNA, 24 nt, Human
cccaggaggcggagguugugguga

SEQ ID NO: 369315 - RNA, 32 nt, Human
cccaggaggcggagguuguggugagccaagau

SEQ ID NO: 369316 - RNA, 32 nt, Human
cccaggaggcggaguuugcagugagcugagau

SEQ ID NO: 369317 - RNA, 32 nt, Human
cccaggaggcggcgguugcagugagccaagau

SEQ ID NO: 369318 - RNA, 32 nt, Human
cccaggaggcggggguugcagugagucgagau

SEQ ID NO: 369319 - RNA, 24 nt, Human
cccaggaggcggugcuugcaggga

SEQ ID NO: 369320 - RNA, 32 nt, Human
cccaggaggcggugcuugcagggagccgagau

SEQ ID NO: 369321 - RNA, 24 nt, Human
cccaggaggcguagcuagcaguga

SEQ ID NO: 369322 - RNA, 32 nt, Human
cccaggaggcguagcuagcagugagccaagac

SEQ ID NO: 369323 - RNA, 24 nt, Human
cccaggaggcugaggcugcaauga

SEQ ID NO: 369324 - RNA, 22 nt, Human
cccaggaggcugagguugcagu

SEQ ID NO: 369325 - RNA, 24 nt, Human
cccaggaggcugagguugcaguga

SEQ ID NO: 369326 - RNA, 32 nt, Human
cccaggaggcugagguugcagugagccaggau

SEQ ID NO: 369327 - RNA, 32 nt, Human
cccaggaggcugagguugcagugagcccagau

SEQ ID NO: 369328 - RNA, 21 nt, Human
cccaggaggcugcugcuauga

SEQ ID NO: 369329 - RNA, 32 nt, Human
cccaggaggcugggugaggcgcugagacgguu

SEQ ID NO: 369330 - RNA, 32 nt, Human
cccaggagggcaugggagcugcauuugggggc

SEQ ID NO: 369331 - RNA, 32 nt, Human
cccaggagggcugaaggcaggggccacucaca

SEQ ID NO: 369332 - RNA, 26 nt, Human
cccaggaggggaagggaucauggaga

SEQ ID NO: 369333 - RNA, 24 nt, Human
cccaggagggggaguuugcaguga

SEQ ID NO: 369334 - RNA, 19 nt, Human
cccaggagggucuugcagu

SEQ ID NO: 369335 - RNA, 32 nt, Human
cccaggagggucuugcagucaucuacauacuu

SEQ ID NO: 369336 - RNA, 31 nt, Human
cccaggagguaccagcaccugccucgaucuc

SEQ ID NO: 369337 - RNA, 32 nt, Human
cccaggagguagaagcugcagugagcagggau

SEQ ID NO: 369338 - RNA, 22 nt, Human
cccaggagguagaggcugcagu

SEQ ID NO: 369339 - RNA, 24 nt, Human
cccaggagguagaggcugcaguga

SEQ ID NO: 369340 - RNA, 32 nt, Human
cccaggagguagaggcugcagugagcagggau

SEQ ID NO: 369341 - RNA, 32 nt, Human
cccaggagguagagguugcagugagccaagau

SEQ ID NO: 369342 - RNA, 32 nt, Human
cccaggagguagagguugcagugagccgagau

SEQ ID NO: 369343 - RNA, 32 nt, Human
cccaggagguagcuggcagaguagcugucagg

SEQ ID NO: 369344 - RNA, 21 nt, Human
cccaggaggucaagccugcag

SEQ ID NO: 369345 - RNA, 24 nt, Human
cccaggaggucaagccugcagcga

SEQ ID NO: 369346 - RNA, 24 nt, Human
cccaggaggucaaggcugaaguga

SEQ ID NO: 369347 - RNA, 24 nt, Human
cccaggaggucaaggcugcaguga

SEQ ID NO: 369348 - RNA, 24 nt, Human
cccaggaggucaaggcuucaguga

SEQ ID NO: 369349 - RNA, 32 nt, Human
cccaggaggucaaggcuucagugagccaugau

SEQ ID NO: 369350 - RNA, 24 nt, Human
cccaggaggucaaggguacaguga

SEQ ID NO: 369351 - RNA, 24 nt, Human
cccaggaggucagggcugcaguga

SEQ ID NO: 369352 - RNA, 32 nt, Human
cccaggaggucagggcugcagugagccgagau

SEQ ID NO: 369353 - RNA, 32 nt, Human
cccaggaggucccuccuguagggcacaaggcc

SEQ ID NO: 369354 - RNA, 23 nt, Human
cccaggaggucgaggcugcagug

SEQ ID NO: 369355 - RNA, 24 nt, Human
cccaggaggucgaggcugcaguga

SEQ ID NO: 369356 - RNA, 32 nt, Human
cccaggaggucgaggcugcagugagccaugau

SEQ ID NO: 369357 - RNA, 32 nt, Human
cccaggaggucgaggcugcagugagcccugau

SEQ ID NO: 369358 - RNA, 32 nt, Human
cccaggaggucgaggcugcagugagcuaugau

SEQ ID NO: 369359 - RNA, 32 nt, Human
cccaggaggucgaggcugcagugagcugugau

SEQ ID NO: 369360 - RNA, 32 nt, Human
cccaggaggucgagguugcagugagcaguaau

SEQ ID NO: 369361 - RNA, 24 nt, Human
cccaggaggucuaggcugcaguga

SEQ ID NO: 369362 - RNA, 22 nt, Human
cccaggaggugaagguugcagu

SEQ ID NO: 369363 - RNA, 24 nt, Human
cccaggaggugaagguugcaguga

SEQ ID NO: 369364 - RNA, 32 nt, Human
cccaggaggugaagguugcagugaccggagau

SEQ ID NO: 369365 - RNA, 22 nt, Human
cccaggaggugcagguugcagu

SEQ ID NO: 369366 - RNA, 24 nt, Human
cccaggaggugcagguugcaguga

SEQ ID NO: 369367 - RNA, 32 nt, Human
cccaggaggugcagguugcagugagccgagau

SEQ ID NO: 369368 - RNA, 24 nt, Human
cccaggagguggaaacugcagaga

SEQ ID NO: 369369 - RNA, 24 nt, Human
cccaggagguggaaguugcuuuga

SEQ ID NO: 369370 - RNA, 32 nt, Human
cccaggagguggacauuacagugagcccagau

SEQ ID NO: 369371 - RNA, 32 nt, Human
cccaggagguggacauugcagugagccgagau

SEQ ID NO: 369372 - RNA, 22 nt, Human
cccaggagguggagacugcagu

SEQ ID NO: 369373 - RNA, 24 nt, Human
cccaggagguggagacugcaguga

SEQ ID NO: 369374 - RNA, 32 nt, Human
cccaggagguggagacugcagugagccaagau

SEQ ID NO: 369375 - RNA, 22 nt, Human
cccaggagguggagauugcagu

SEQ ID NO: 369376 - RNA, 24 nt, Human
cccaggagguggagauugcaguga

SEQ ID NO: 369377 - RNA, 32 nt, Human
cccaggagguggagauugcagugagcugagau

SEQ ID NO: 369378 - RNA, 32 nt, Human
cccaggagguggagcuugcaaugagccgagau

SEQ ID NO: 369379 - RNA, 32 nt, Human
cccaggagguggagcuugcagugagccgagau

SEQ ID NO: 369380 - RNA, 22 nt, Human
cccaggagguggaggaugcagu

SEQ ID NO: 369381 - RNA, 23 nt, Human
cccaggagguggaggaugcagug

SEQ ID NO: 369382 - RNA, 24 nt, Human
cccaggagguggaggaugcaguga

SEQ ID NO: 369383 - RNA, 24 nt, Human
cccaggagguggaggcugcaauga

SEQ ID NO: 369384 - RNA, 22 nt, Human
cccaggagguggaggcugcagu

SEQ ID NO: 369385 - RNA, 23 nt, Human
cccaggagguggaggcugcagug

SEQ ID NO: 369386 - RNA, 24 nt, Human
cccaggagguggaggcugcaguga

SEQ ID NO: 369387 - RNA, 32 nt, Human
cccaggagguggaggcugcagugagccaugcc

SEQ ID NO: 369388 - RNA, 32 nt, Human
cccaggagguggaggcugcagugagcugagau

SEQ ID NO: 369389 - RNA, 22 nt, Human
cccaggagguggaggcugcggu

SEQ ID NO: 369390 - RNA, 23 nt, Human
cccaggagguggaggcugcggug

SEQ ID NO: 369391 - RNA, 24 nt, Human
cccaggagguggaggcugcgguga

SEQ ID NO: 369392 - RNA, 24 nt, Human
cccaggagguggagguagcaguga

SEQ ID NO: 369393 - RNA, 32 nt, Human
cccaggagguggagguagcagugagccgagau

SEQ ID NO: 369394 - RNA, 32 nt, Human
cccaggagguggaggucgcagugagccgagau

SEQ ID NO: 369395 - RNA, 22 nt, Human
cccaggagguggagguuacagu

SEQ ID NO: 369396 - RNA, 24 nt, Human
cccaggagguggagguuacaguga

SEQ ID NO: 369397 - RNA, 32 nt, Human
cccaggagguggagguuacagugagccaagau

SEQ ID NO: 369398 - RNA, 32 nt, Human
cccaggagguggagguuacagugagcugagag

SEQ ID NO: 369399 - RNA, 24 nt, Human
cccaggagguggagguuccaguga

SEQ ID NO: 369400 - RNA, 32 nt, Human
cccaggagguggagguuccagugagccaaaau

SEQ ID NO: 369401 - RNA, 24 nt, Human
cccaggagguggagguugaaauga

SEQ ID NO: 369402 - RNA, 20 nt, Human
cccaggagguggagguugca

SEQ ID NO: 369403 - RNA, 24 nt, Human
cccaggagguggagguugcaagug

SEQ ID NO: 369404 - RNA, 24 nt, Human
cccaggagguggagguugcaauga

SEQ ID NO: 369405 - RNA, 24 nt, Human
cccaggagguggagguugcacuga

SEQ ID NO: 369406 - RNA, 21 nt, Human
cccaggagguggagguugcag

SEQ ID NO: 369407 - RNA, 24 nt, Human
cccaggagguggagguugcagcga

SEQ ID NO: 369408 - RNA, 22 nt, Human
cccaggagguggagguugcagu

SEQ ID NO: 369409 - RNA, 24 nt, Human
cccaggagguggagguugcaguaa

SEQ ID NO: 369410 - RNA, 23 nt, Human
cccaggagguggagguugcagug

SEQ ID NO: 369411 - RNA, 24 nt, Human
cccaggagguggagguugcaguga

SEQ ID NO: 369412 - RNA, 32 nt, Human
cccaggagguggagguugcagugagcagagau

SEQ ID NO: 369413 - RNA, 32 nt, Human
cccaggagguggagguugcagugagccaagac

SEQ ID NO: 369414 - RNA, 32 nt, Human
cccaggagguggagguugcagugagccaagau

SEQ ID NO: 369415 - RNA, 32 nt, Human
cccaggagguggagguugcagugagccaaggu

SEQ ID NO: 369416 - RNA, 32 nt, Human
cccaggagguggagguugcagugagccagaga

SEQ ID NO: 369417 - RNA, 32 nt, Human
cccaggagguggagguugcagugagccaugau

SEQ ID NO: 369418 - RNA, 32 nt, Human
cccaggagguggagguugcagugagccgaagu

SEQ ID NO: 369419 - RNA, 32 nt, Human
cccaggagguggagguugcagugagccgagac

SEQ ID NO: 369420 - RNA, 32 nt, Human
cccaggagguggagguugcagugagccgagau

SEQ ID NO: 369421 - RNA, 32 nt, Human
cccaggagguggagguugcagugagccgaguc

SEQ ID NO: 369422 - RNA, 32 nt, Human
cccaggagguggagguugcagugagcggagau

SEQ ID NO: 369423 - RNA, 32 nt, Human
cccaggagguggagguugcagugagcugagac

SEQ ID NO: 369424 - RNA, 32 nt, Human
cccaggagguggagguugcagugagcugagau

SEQ ID NO: 369425 - RNA, 32 nt, Human
cccaggagguggagguugcagugagcugggau

SEQ ID NO: 369426 - RNA, 32 nt, Human
cccaggagguggagguugcagugaggcaagau

SEQ ID NO: 369427 - RNA, 32 nt, Human
cccaggagguggagguugcagugagucaagau

SEQ ID NO: 369428 - RNA, 32 nt, Human
cccaggagguggagguugcagugagucgagau

SEQ ID NO: 369429 - RNA, 24 nt, Human
cccaggagguggagguugcagugg

SEQ ID NO: 369430 - RNA, 32 nt, Human
cccaggagguggagguugcagugggccgagau

SEQ ID NO: 369431 - RNA, 23 nt, Human
cccaggagguggagguugcggug

SEQ ID NO: 369432 - RNA, 24 nt, Human
cccaggagguggagguugcgguga

SEQ ID NO: 369433 - RNA, 24 nt, Human
cccaggagguggagguugcuguga

SEQ ID NO: 369434 - RNA, 24 nt, Human
cccaggagguggagguuguaguga

SEQ ID NO: 369435 - RNA, 24 nt, Human
cccaggagguggagguugugguga

SEQ ID NO: 369436 - RNA, 24 nt, Human
cccaggagguggagguuucagcga

SEQ ID NO: 369437 - RNA, 21 nt, Human
cccaggagguggaguugcagu

SEQ ID NO: 369438 - RNA, 23 nt, Human
cccaggagguggaguugcaguaa

SEQ ID NO: 369439 - RNA, 24 nt, Human
cccaggagguggaguuugcaguga

SEQ ID NO: 369440 - RNA, 32 nt, Human
cccaggagguggaguuugcagugagcugagau

SEQ ID NO: 369441 - RNA, 24 nt, Human
cccaggagguggauguugcaguga

SEQ ID NO: 369442 - RNA, 32 nt, Human
cccaggaggugggcauugcagugagccgagau

SEQ ID NO: 369443 - RNA, 24 nt, Human
cccaggagguggggguugcaccga

SEQ ID NO: 369444 - RNA, 24 nt, Human
cccaggagguggugguugcaguga

SEQ ID NO: 369445 - RNA, 32 nt, Human
cccaggagguggugguugcagugagccuagau

SEQ ID NO: 369446 - RNA, 32 nt, Human
cccaggagguugagaaugcagugagcuuguaa

SEQ ID NO: 369447 - RNA, 22 nt, Human
cccaggagguugaggcugcagu

SEQ ID NO: 369448 - RNA, 24 nt, Human
cccaggagguugaggcugcaguga

SEQ ID NO: 369449 - RNA, 32 nt, Human
cccaggagguugaggcugcagugagcagagcg

SEQ ID NO: 369450 - RNA, 32 nt, Human
cccaggagguugaggcugcagugagccaugau

SEQ ID NO: 369451 - RNA, 32 nt, Human
cccaggagguugaggcugcagugagcuaugau

SEQ ID NO: 369452 - RNA, 24 nt, Human
cccaggagguuguggauacaguga

SEQ ID NO: 369453 - RNA, 24 nt, Human
cccaggagguuguggcugcaguga

SEQ ID NO: 369454 - RNA, 32 nt, Human
cccaggaguaauggaguccaaagagaaacuag

SEQ ID NO: 369455 - RNA, 32 nt, Human
cccaggaguaauuucucagcauugaggguaaa

SEQ ID NO: 369456 - RNA, 32 nt, Human
cccaggaguaguuuucccagaagauuguaaaa

SEQ ID NO: 369457 - RNA, 22 nt, Human
cccaggagucaaaagcugcagu

SEQ ID NO: 369458 - RNA, 24 nt, Human
cccaggagucaaaagcugcaguga

SEQ ID NO: 369459 - RNA, 24 nt, Human
cccaggagucagagguuucaguga

SEQ ID NO: 369460 - RNA, 19 nt, Human
cccaggaguccaagggcag

SEQ ID NO: 369461 - RNA, 24 nt, Human
cccaggaguccaagggcagggugg

SEQ ID NO: 369462 - RNA, 21 nt, Human
cccaggaguccugaccagaga

SEQ ID NO: 369463 - RNA, 32 nt, Human
cccaggagucggagguugcagugaguugagau

SEQ ID NO: 369464 - RNA, 23 nt, Human
cccaggagucuaggugggaguga

SEQ ID NO: 369465 - RNA, 24 nt, Human
cccaggagucugaggcuuuaguga

SEQ ID NO: 369466 - RNA, 32 nt, Human
cccaggagugccugauugucccacaggggugg

SEQ ID NO: 369467 - RNA, 23 nt, Human
cccaggagugugacuggcaguga

SEQ ID NO: 369468 - RNA, 18 nt, Human
cccaggaguguggcugca

SEQ ID NO: 369469 - RNA, 23 nt, Human
cccaggaguuaaaugucuuaaga

SEQ ID NO: 369470 - RNA, 25 nt, Human
cccaggaguuaagaggcugcaguga

SEQ ID NO: 369471 - RNA, 32 nt, Human
cccaggaguuaagaggcugcagugaccgauga

SEQ ID NO: 369472 - RNA, 20 nt, Human
cccaggaguucaaagcugca

SEQ ID NO: 369473 - RNA, 24 nt, Human
cccaggaguucaaagcugcaguga

SEQ ID NO: 369474 - RNA, 24 nt, Human
cccaggaguucaaagcuguaguga

SEQ ID NO: 369475 - RNA, 32 nt, Human
cccaggaguucaaauccugccugggcaacaua

SEQ ID NO: 369476 - RNA, 22 nt, Human
cccaggaguucaaaucugcagu

SEQ ID NO: 369477 - RNA, 23 nt, Human
cccaggaguucaaaucugcagug

SEQ ID NO: 369478 - RNA, 24 nt, Human
cccaggaguucaacgcugcaguga

SEQ ID NO: 369479 - RNA, 24 nt, Human
cccaggaguucaagaccaacaugg

SEQ ID NO: 369480 - RNA, 19 nt, Human
cccaggaguucaagaccag

SEQ ID NO: 369481 - RNA, 24 nt, Human
cccaggaguucaagaccagccuga

SEQ ID NO: 369482 - RNA, 24 nt, Human
cccaggaguucaagaccagcuugg

SEQ ID NO: 369483 - RNA, 20 nt, Human
cccaggaguucaagaccagu

SEQ ID NO: 369484 - RNA, 21 nt, Human
cccaggaguucaagaccagug

SEQ ID NO: 369485 - RNA, 24 nt, Human
cccaggaguucaagaccggccuga

SEQ ID NO: 369486 - RNA, 23 nt, Human
cccaggaguucaagaccugccag

SEQ ID NO: 369487 - RNA, 24 nt, Human
cccaggaguucaaggcugcaauga

SEQ ID NO: 369488 - RNA, 23 nt, Human
cccaggaguucaaggcugcagug

SEQ ID NO: 369489 - RNA, 24 nt, Human
cccaggaguucaaggcuucaguga

SEQ ID NO: 369490 - RNA, 32 nt, Human
cccaggaguucaaggcuucagugagccaugau

SEQ ID NO: 369491 - RNA, 22 nt, Human
cccaggaguucaagucugcagu

SEQ ID NO: 369492 - RNA, 24 nt, Human
cccaggaguucaagucugcaguga

SEQ ID NO: 369493 - RNA, 22 nt, Human
cccaggaguucagggccagcuu

SEQ ID NO: 369494 - RNA, 24 nt, Human
cccaggaguucagggcugcaguga

SEQ ID NO: 369495 - RNA, 23 nt, Human
cccaggaguuccucuggccccca

SEQ ID NO: 369496 - RNA, 24 nt, Human
cccaggaguucgaagcugcaggga

SEQ ID NO: 369497 - RNA, 24 nt, Human
cccaggaguucgaggcugcagcga

SEQ ID NO: 369498 - RNA, 22 nt, Human
cccaggaguucgaggcugcagu

SEQ ID NO: 369499 - RNA, 32 nt, Human
cccaggaguucgaggcugcagucagucaugau

SEQ ID NO: 369500 - RNA, 24 nt, Human
cccaggaguucgaggcugcaguga

SEQ ID NO: 369501 - RNA, 24 nt, Human
cccaggaguucgagguuacaguga

SEQ ID NO: 369502 - RNA, 24 nt, Human
cccaggaguucgggguuacaguga

SEQ ID NO: 369503 - RNA, 24 nt, Human
cccaggaguuggaaguugcaggga

SEQ ID NO: 369504 - RNA, 19 nt, Human
cccaggaguuggagaccag

SEQ ID NO: 369505 - RNA, 32 nt, Human
cccaggaguuggagcuugcagugagccgagau

SEQ ID NO: 369506 - RNA, 19 nt, Human
cccaggaguuggaggccag

SEQ ID NO: 369507 - RNA, 24 nt, Human
cccaggaguuggaggccgcaguga

SEQ ID NO: 369508 - RNA, 24 nt, Human
cccaggaguuggaggcuacaguga

SEQ ID NO: 369509 - RNA, 24 nt, Human
cccaggaguuggaggcugaagaga

SEQ ID NO: 369510 - RNA, 24 nt, Human
cccaggaguuuaagaccagccuga

SEQ ID NO: 369511 - RNA, 24 nt, Human
cccaggaguuuaaggcugcaguga

SEQ ID NO: 369512 - RNA, 23 nt, Human
cccaggaguuuaagguuguagug

SEQ ID NO: 369513 - RNA, 24 nt, Human
cccaggaguuugaagcugcaguga

SEQ ID NO: 369514 - RNA, 24 nt, Human
cccaggaguuugaaguugcaauga

SEQ ID NO: 369515 - RNA, 32 nt, Human
cccaggaguuugacaccagccugggcaacaug

SEQ ID NO: 369516 - RNA, 19 nt, Human
cccaggaguuugagaacag

SEQ ID NO: 369517 - RNA, 19 nt, Human
cccaggaguuugagaccag

SEQ ID NO: 369518 - RNA, 24 nt, Human
cccaggaguuugagaccagcaugg

SEQ ID NO: 369519 - RNA, 24 nt, Human
cccaggaguuugagaccagcgugg

SEQ ID NO: 369520 - RNA, 20 nt, Human
cccaggaguuugagaccagu

SEQ ID NO: 369521 - RNA, 22 nt, Human
cccaggaguuugagacuacagu

SEQ ID NO: 369522 - RNA, 23 nt, Human
cccaggaguuugagacuguagug

SEQ ID NO: 369523 - RNA, 23 nt, Human
cccaggaguuugagaugaucugg

SEQ ID NO: 369524 - RNA, 24 nt, Human
cccaggaguuugagccuucaguga

SEQ ID NO: 369525 - RNA, 20 nt, Human
cccaggaguuugaggccagc

SEQ ID NO: 369526 - RNA, 24 nt, Human
cccaggaguuugaggcuacaguga

SEQ ID NO: 369527 - RNA, 24 nt, Human
cccaggaguuugaggcuauaguga

SEQ ID NO: 369528 - RNA, 24 nt, Human
cccaggaguuugaggcuccaguga

SEQ ID NO: 369529 - RNA, 24 nt, Human
cccaggaguuugaggcugcaauga

SEQ ID NO: 369530 - RNA, 24 nt, Human
cccaggaguuugaggcugcagcga

SEQ ID NO: 369531 - RNA, 22 nt, Human
cccaggaguuugaggcugcagu

SEQ ID NO: 369532 - RNA, 24 nt, Human
cccaggaguuugaggcugcaguaa

SEQ ID NO: 369533 - RNA, 24 nt, Human
cccaggaguuugaggcugcaguga

SEQ ID NO: 369534 - RNA, 24 nt, Human
cccaggaguuugaggcugcgguga

SEQ ID NO: 369535 - RNA, 24 nt, Human
cccaggaguuugaggguggaguga

SEQ ID NO: 369536 - RNA, 23 nt, Human
cccaggaguuugagguugcagug

SEQ ID NO: 369537 - RNA, 24 nt, Human
cccaggaguuugagguugcaguga

SEQ ID NO: 369538 - RNA, 24 nt, Human
cccaggaguuugagguuguaggga

SEQ ID NO: 369539 - RNA, 23 nt, Human
cccaggaguuugagucuguaaug

SEQ ID NO: 369540 - RNA, 32 nt, Human
cccaggaguuuggaccagccugggcaacauaa

SEQ ID NO: 369541 - RNA, 32 nt, Human
cccaggaucucaggguccuugggcucuguggc

SEQ ID NO: 369542 - RNA, 23 nt, Human
cccaggaugaagggaugcaguga

SEQ ID NO: 369543 - RNA, 22 nt, Human
cccaggaugcggagguugcagu

SEQ ID NO: 369544 - RNA, 24 nt, Human
cccaggaugcggagguugcaguga

SEQ ID NO: 369545 - RNA, 32 nt, Human
cccaggaugcggagguugcagugagccgagau

SEQ ID NO: 369546 - RNA, 32 nt, Human
cccaggauggagcaggaguguccugugauuca

SEQ ID NO: 369547 - RNA, 19 nt, Human
cccaggauggagugcagug

SEQ ID NO: 369548 - RNA, 20 nt, Human
cccaggauggagugcaguga

SEQ ID NO: 369549 - RNA, 20 nt, Human
cccaggauggagugcagugg

SEQ ID NO: 369550 - RNA, 32 nt, Human
cccaggauguguacucguucucucacggcccu

SEQ ID NO: 369551 - RNA, 32 nt, Human
cccaggauguguggcgagagccugggccagcc

SEQ ID NO: 369552 - RNA, 32 nt, Human
cccaggauguuuuccaaaauguuccacaggcg

SEQ ID NO: 369553 - RNA, 19 nt, Human
cccaggauugcaacauggg

SEQ ID NO: 369554 - RNA, 21 nt, Human
cccaggauuuccacagcacac

SEQ ID NO: 369555 - RNA, 22 nt, Human
cccaggcaacaaagucagaucc

SEQ ID NO: 369556 - RNA, 22 nt, Human
cccaggcaacacagcaagaccc

SEQ ID NO: 369557 - RNA, 32 nt, Human
cccaggcaacacagcaagaccccaucucuaua

SEQ ID NO: 369558 - RNA, 20 nt, Human
cccaggcaacauggugaccc

SEQ ID NO: 369559 - RNA, 30 nt, Human
cccaggcaacauggugaccccaucucuacc

SEQ ID NO: 369560 - RNA, 20 nt, Human
cccaggcaagagugcagugg

SEQ ID NO: 369561 - RNA, 29 nt, Human
cccaggcaagcagcaccucccugcucucc

SEQ ID NO: 369562 - RNA, 22 nt, Human
cccaggcaagcccuucuuccuc

SEQ ID NO: 369563 - RNA, 32 nt, Human
cccaggcaagcuuuuaauaaacuguugguuau

SEQ ID NO: 369564 - RNA, 32 nt, Human
cccaggcaaggccaccacccccacaccaggcc

SEQ ID NO: 369565 - RNA, 22 nt, Human
cccaggcaauuccccaggcccu

SEQ ID NO: 369566 - RNA, 19 nt, Human
cccaggcacagacaugugg

SEQ ID NO: 369567 - RNA, 32 nt, Human
cccaggcacagccaugggagauucggagaugg

SEQ ID NO: 369568 - RNA, 32 nt, Human
cccaggcacagccccaggcuggcaaagggagg

SEQ ID NO: 369569 - RNA, 32 nt, Human
cccaggcacagcugggugucagaccuggagga

SEQ ID NO: 369570 - RNA, 32 nt, Human
cccaggcacugcacagcaccuuggcugaugcu

SEQ ID NO: 369571 - RNA, 21 nt, Human
cccaggcagagguugcaguga

SEQ ID NO: 369572 - RNA, 22 nt, Human
cccaggcagauccuggcuccca

SEQ ID NO: 369573 - RNA, 32 nt, Human
cccaggcagaucucagacuccugggcucaagc

SEQ ID NO: 369574 - RNA, 21 nt, Human
cccaggcagaucucccccagg

SEQ ID NO: 369575 - RNA, 32 nt, Human
cccaggcagcauggugaggucugcucccggac

SEQ ID NO: 369576 - RNA, 32 nt, Human
cccaggcagccccugaagcugccggguucugc

SEQ ID NO: 369577 - RNA, 32 nt, Human
cccaggcagccgcugcagucgccacaccuuug

SEQ ID NO: 369578 - RNA, 32 nt, Human
cccaggcagccugacagagaucauucaagggg

SEQ ID NO: 369579 - RNA, 23 nt, Human
cccaggcagccuucucccuggcc

SEQ ID NO: 369580 - RNA, 32 nt, Human
cccaggcagcuggacaucuccaggaaaccagg

SEQ ID NO: 369581 - RNA, 17 nt, Human
cccaggcaggagcagca

SEQ ID NO: 369582 - RNA, 31 nt, Human
cccaggcaggagccaagcacagcaggagcuu

SEQ ID NO: 369583 - RNA, 32 nt, Human
cccaggcaggaggcuggggugcuguguggggg

SEQ ID NO: 369584 - RNA, 20 nt, Human
cccaggcaggaguacagugg

SEQ ID NO: 369585 - RNA, 19 nt, Human
cccaggcaggagugcagug

SEQ ID NO: 369586 - RNA, 20 nt, Human
cccaggcaggagugcagugg

SEQ ID NO: 369587 - RNA, 21 nt, Human
cccaggcaggagugcaguggc

SEQ ID NO: 369588 - RNA, 19 nt, Human
cccaggcaggaguuugcug

SEQ ID NO: 369589 - RNA, 32 nt, Human
cccaggcaggcagaucaccugaggucgggagu

SEQ ID NO: 369590 - RNA, 32 nt, Human
cccaggcaggcagaucacuugaggucaggagu

SEQ ID NO: 369591 - RNA, 32 nt, Human
cccaggcagggagaauggggagagggaccucc

SEQ ID NO: 369592 - RNA, 32 nt, Human
cccaggcagguggaucgccugaggucgggagu

SEQ ID NO: 369593 - RNA, 24 nt, Human
cccaggcaguggagguugcaguga

SEQ ID NO: 369594 - RNA, 32 nt, Human
cccaggcaguggagguugcagugagccaagau

SEQ ID NO: 369595 - RNA, 32 nt, Human
cccaggcagugucagcagugaagguucucggg

SEQ ID NO: 369596 - RNA, 32 nt, Human
cccaggcaucugcuuuacucuggaccauagga

SEQ ID NO: 369597 - RNA, 20 nt, Human
cccaggcaucuuggccccca

SEQ ID NO: 369598 - RNA, 32 nt, Human
cccaggcaugcuggagggacuuggggacauug

SEQ ID NO: 369599 - RNA, 32 nt, Human
cccaggcauuugaauccagccugagcaauaua

SEQ ID NO: 369600 - RNA, 32 nt, Human
cccaggccaaaggggaccuggaagggaggugg

SEQ ID NO: 369601 - RNA, 31 nt, Human
cccaggccaaugucugucagccaggugcuca

SEQ ID NO: 369602 - RNA, 17 nt, Human
cccaggccacaaaggca

SEQ ID NO: 369603 - RNA, 25 nt, Human
cccaggccacagugauaccauccca

SEQ ID NO: 369604 - RNA, 18 nt, Human
cccaggccaccaacggca

SEQ ID NO: 369605 - RNA, 21 nt, Human
cccaggccaccagcccccgug

SEQ ID NO: 369606 - RNA, 32 nt, Human
cccaggccaccaggaauucauuuauucaugca

SEQ ID NO: 369607 - RNA, 19 nt, Human
cccaggccacccaccaccc

SEQ ID NO: 369608 - RNA, 32 nt, Human
cccaggccaccugucuucucucccacaugcac

SEQ ID NO: 369609 - RNA, 17 nt, Human
cccaggccagaagccag

SEQ ID NO: 369610 - RNA, 20 nt, Human
cccaggccagagugcagugg

SEQ ID NO: 369611 - RNA, 20 nt, Human
cccaggccagaguguagugg

SEQ ID NO: 369612 - RNA, 21 nt, Human
cccaggccagaguguaguggc

SEQ ID NO: 369613 - RNA, 18 nt, Human
cccaggccagcagagcca

SEQ ID NO: 369614 - RNA, 21 nt, Human
cccaggccaggacucugcagc

SEQ ID NO: 369615 - RNA, 32 nt, Human
cccaggccaggcagccaaaucuugccugugcu

SEQ ID NO: 369616 - RNA, 24 nt, Human
cccaggccagggaaagcccguguc

SEQ ID NO: 369617 - RNA, 32 nt, Human
cccaggccagggacaccccuccccagcuccca

SEQ ID NO: 369618 - RNA, 23 nt, Human
cccaggccaggucgggagcacag

SEQ ID NO: 369619 - RNA, 32 nt, Human
cccaggccagguuugcuggccauagauaccuu

SEQ ID NO: 369620 - RNA, 32 nt, Human
cccaggccagugcuuggcaggugcucagggaa

SEQ ID NO: 369621 - RNA, 23 nt, Human
cccaggccauccagcccugugga

SEQ ID NO: 369622 - RNA, 32 nt, Human
cccaggccaucguggugauggagugccugggg

SEQ ID NO: 369623 - RNA, 32 nt, Human
cccaggccauuucucccaccuuuacucacacc

SEQ ID NO: 369624 - RNA, 32 nt, Human
cccaggcccacggccacaucucugucaagggu

SEQ ID NO: 369625 - RNA, 21 nt, Human
cccaggcccacugugccucag

SEQ ID NO: 369626 - RNA, 32 nt, Human
cccaggcccagccucuuguucuuagggcuugg

SEQ ID NO: 369627 - RNA, 32 nt, Human
cccaggcccaggcucugagaggccguguccua

SEQ ID NO: 369628 - RNA, 24 nt, Human
cccaggccccaaagcaccccaagg

SEQ ID NO: 369629 - RNA, 32 nt, Human
cccaggccccagaagucaccugccuguaugug

SEQ ID NO: 369630 - RNA, 18 nt, Human
cccaggccccaggagcug

SEQ ID NO: 369631 - RNA, 21 nt, Human
cccaggccccaugcaaaggca

SEQ ID NO: 369632 - RNA, 22 nt, Human
cccaggccccaugcaaaggcac

SEQ ID NO: 369633 - RNA, 19 nt, Human
cccaggcccccagagccag

SEQ ID NO: 369634 - RNA, 19 nt, Human
cccaggccccgaauugcug

SEQ ID NO: 369635 - RNA, 23 nt, Human
cccaggccccgccccccgcccgg

SEQ ID NO: 369636 - RNA, 32 nt, Human
cccaggccccgggcugagcacugugaggccug

SEQ ID NO: 369637 - RNA, 32 nt, Human
cccaggccccuagagccccgagagcuccgaga

SEQ ID NO: 369638 - RNA, 23 nt, Human
cccaggccccucgggcuuccaca

SEQ ID NO: 369639 - RNA, 21 nt, Human
cccaggccccugccacagccu

SEQ ID NO: 369640 - RNA, 18 nt, Human
cccaggccccuggcgugu

SEQ ID NO: 369641 - RNA, 26 nt, Human
cccaggccccuguguucagccucagg

SEQ ID NO: 369642 - RNA, 23 nt, Human
cccaggccccuuccucccuuccc

SEQ ID NO: 369643 - RNA, 22 nt, Human
cccaggcccgccgcuccgcagg

SEQ ID NO: 369644 - RNA, 32 nt, Human
cccaggcccgcgucaagagcuguuagccucug

SEQ ID NO: 369645 - RNA, 32 nt, Human
cccaggcccuagacccucccccaccauuccac

SEQ ID NO: 369646 - RNA, 32 nt, Human
cccaggcccuauccugaacaggagacuaaaca

SEQ ID NO: 369647 - RNA, 32 nt, Human
cccaggcccucagaaaccagagccaugagacc

SEQ ID NO: 369648 - RNA, 22 nt, Human
cccaggcccucaucacccucag

SEQ ID NO: 369649 - RNA, 22 nt, Human
cccaggcccucccaccacccca

SEQ ID NO: 369650 - RNA, 23 nt, Human
cccaggcccucucccaccuacag

SEQ ID NO: 369651 - RNA, 22 nt, Human
cccaggcccucuguuucaugug

SEQ ID NO: 369652 - RNA, 32 nt, Human
cccaggcccugagcagcgugucuuuccucggc

SEQ ID NO: 369653 - RNA, 21 nt, Human
cccaggcccugcagcggcagc

SEQ ID NO: 369654 - RNA, 32 nt, Human
cccaggcccugccuaagccucagcagaacuug

SEQ ID NO: 369655 - RNA, 32 nt, Human
cccaggcccugccuccccugccaugccccugu

SEQ ID NO: 369656 - RNA, 32 nt, Human
cccaggcccugccugcuuggcuggggcugggg

SEQ ID NO: 369657 - RNA, 32 nt, Human
cccaggcccuggaggcugcaacauaccucaau

SEQ ID NO: 369658 - RNA, 18 nt, Human
cccaggcccuggggaggg

SEQ ID NO: 369659 - RNA, 23 nt, Human
cccaggccgccagagcccacccg

SEQ ID NO: 369660 - RNA, 32 nt, Human
cccaggccggacugcaguggcagggucucggc

SEQ ID NO: 369661 - RNA, 32 nt, Human
cccaggccggacugcaguggcgcaaucuuggc

SEQ ID NO: 369662 - RNA, 20 nt, Human
cccaggccggagugcaaugg

SEQ ID NO: 369663 - RNA, 19 nt, Human
cccaggccggagugcagug

SEQ ID NO: 369664 - RNA, 20 nt, Human
cccaggccggagugcagugg

SEQ ID NO: 369665 - RNA, 21 nt, Human
cccaggccggagugcaguggc

SEQ ID NO: 369666 - RNA, 21 nt, Human
cccaggccggagugcaguggu

SEQ ID NO: 369667 - RNA, 21 nt, Human
cccaggccggcaaccuggcca

SEQ ID NO: 369668 - RNA, 32 nt, Human
cccaggccggccucagggucaggacgccucca

SEQ ID NO: 369669 - RNA, 26 nt, Human
cccaggccguucagccugaccucagg

SEQ ID NO: 369670 - RNA, 32 nt, Human
cccaggccuagaaucacaaagguccuagaaac

SEQ ID NO: 369671 - RNA, 17 nt, Human
cccaggccuagaugcug

SEQ ID NO: 369672 - RNA, 21 nt, Human
cccaggccuaggaccgcggug

SEQ ID NO: 369673 - RNA, 32 nt, Human
cccaggccuaugggggcucuggaaggaugggc

SEQ ID NO: 369674 - RNA, 32 nt, Human
cccaggccuccaccagccuugaacccuugcaa

SEQ ID NO: 369675 - RNA, 22 nt, Human
cccaggccuccaccuccccagg

SEQ ID NO: 369676 - RNA, 32 nt, Human
cccaggccuccagggacuccgccgcuccagga

SEQ ID NO: 369677 - RNA, 32 nt, Human
cccaggccuccugccgucuccaacagggcaug

SEQ ID NO: 369678 - RNA, 32 nt, Human
cccaggccucuccccaggucaggaggcagcug

SEQ ID NO: 369679 - RNA, 18 nt, Human
cccaggccucucuccagg

SEQ ID NO: 369680 - RNA, 32 nt, Human
cccaggccucucugugggaccugggccugacg

SEQ ID NO: 369681 - RNA, 21 nt, Human
cccaggccucuggcagcagcu

SEQ ID NO: 369682 - RNA, 23 nt, Human
cccaggccucuggggcccgcugg

SEQ ID NO: 369683 - RNA, 24 nt, Human
cccaggccugccccucaccucagg

SEQ ID NO: 369684 - RNA, 21 nt, Human
cccaggccugccucccuuccc

SEQ ID NO: 369685 - RNA, 21 nt, Human
cccaggccugcuggcaucagg

SEQ ID NO: 369686 - RNA, 20 nt, Human
cccaggccuggaaacagcug

SEQ ID NO: 369687 - RNA, 23 nt, Human
cccaggccuggacuccaucucag

SEQ ID NO: 369688 - RNA, 24 nt, Human
cccaggccuggagcguuugcugug

SEQ ID NO: 369689 - RNA, 24 nt, Human
cccaggccuggaggggggucugug

SEQ ID NO: 369690 - RNA, 24 nt, Human
cccaggccuggcugugcgcugcug

SEQ ID NO: 369691 - RNA, 32 nt, Human
cccaggccugggaagagcucggccccgaucag

SEQ ID NO: 369692 - RNA, 21 nt, Human
cccaggccugggaugcaguga

SEQ ID NO: 369693 - RNA, 22 nt, Human
cccaggccugggccuccugcug

SEQ ID NO: 369694 - RNA, 32 nt, Human
cccaggccuggggaccgguaagauccauguca

SEQ ID NO: 369695 - RNA, 32 nt, Human
cccaggccuguaaucccaucacuuugggaggu

SEQ ID NO: 369696 - RNA, 32 nt, Human
cccaggccuguaggcuuccagugagaaaacug

SEQ ID NO: 369697 - RNA, 18 nt, Human
cccaggccuguggugcug

SEQ ID NO: 369698 - RNA, 21 nt, Human
cccaggccuguggugcugcag

SEQ ID NO: 369699 - RNA, 32 nt, Human
cccaggccuucgggauccuccugggaaccucu

SEQ ID NO: 369700 - RNA, 21 nt, Human
cccaggccuucuggaacugcu

SEQ ID NO: 369701 - RNA, 23 nt, Human
cccaggccuugccucccuggccu

SEQ ID NO: 369702 - RNA, 32 nt, Human
cccaggccuuggucuugguccugggccuggag

SEQ ID NO: 369703 - RNA, 32 nt, Human
cccaggccuuucuccaccggaggaccagggaa

SEQ ID NO: 369704 - RNA, 32 nt, Human
cccaggccuuuguucuugccucuucucgcuga

SEQ ID NO: 369705 - RNA, 19 nt, Human
cccaggcgacacuaagcca

SEQ ID NO: 369706 - RNA, 32 nt, Human
cccaggcgaggaggaggaggagaaaauucccc

SEQ ID NO: 369707 - RNA, 32 nt, Human
cccaggcgcagccaaugggaagggucggaggc

SEQ ID NO: 369708 - RNA, 18 nt, Human
cccaggcgcugcuggcug

SEQ ID NO: 369709 - RNA, 32 nt, Human
cccaggcggaguacaauggugggaucucggcu

SEQ ID NO: 369710 - RNA, 24 nt, Human
cccaggcggcagagguugcaguga

SEQ ID NO: 369711 - RNA, 32 nt, Human
cccaggcggcagagguugcagugagccaagau

SEQ ID NO: 369712 - RNA, 32 nt, Human
cccaggcggcagagguugcagugagucgagau

SEQ ID NO: 369713 - RNA, 20 nt, Human
cccaggcgggagugcagugg

SEQ ID NO: 369714 - RNA, 32 nt, Human
cccaggcgggcggaucaccugaggucgggagu

SEQ ID NO: 369715 - RNA, 32 nt, Human
cccaggcgggcggaucacuugaggucaggaau

SEQ ID NO: 369716 - RNA, 32 nt, Human
cccaggcggucaccagcagauuugcccgcgcg

SEQ ID NO: 369717 - RNA, 24 nt, Human
cccaggcgguugaggcugcaguga

SEQ ID NO: 369718 - RNA, 32 nt, Human
cccaggcgguugaggcugcagugagccaugau

SEQ ID NO: 369719 - RNA, 32 nt, Human
cccaggcgucagaaaauggaaaaagagccagg

SEQ ID NO: 369720 - RNA, 20 nt, Human
cccaggcguccgggcuccca

SEQ ID NO: 369721 - RNA, 24 nt, Human
cccaggcguccuccacccacgccc

SEQ ID NO: 369722 - RNA, 32 nt, Human
cccaggcgucuccucuugcucccugguugggg

SEQ ID NO: 369723 - RNA, 19 nt, Human
cccaggcgugcagagccag

SEQ ID NO: 369724 - RNA, 32 nt, Human
cccaggcgugcagagccaggguccugggguuu

SEQ ID NO: 369725 - RNA, 32 nt, Human
cccaggcguguggacccgagcccagccuugcg

SEQ ID NO: 369726 - RNA, 20 nt, Human
cccaggcuacagugcagugg

SEQ ID NO: 369727 - RNA, 20 nt, Human
cccaggcuagaaugcagugg

SEQ ID NO: 369728 - RNA, 21 nt, Human
cccaggcuagaaugcaguggu

SEQ ID NO: 369729 - RNA, 22 nt, Human
cccaggcuagaaugcaguggug

SEQ ID NO: 369730 - RNA, 19 nt, Human
cccaggcuagagcgcaggg

SEQ ID NO: 369731 - RNA, 18 nt, Human
cccaggcuagaggguggu

SEQ ID NO: 369732 - RNA, 19 nt, Human
cccaggcuagaggguggug

SEQ ID NO: 369733 - RNA, 20 nt, Human
cccaggcuagaguacagugg

SEQ ID NO: 369734 - RNA, 20 nt, Human
cccaggcuagaguauagugg

SEQ ID NO: 369735 - RNA, 19 nt, Human
cccaggcuagagugcaaug

SEQ ID NO: 369736 - RNA, 20 nt, Human
cccaggcuagagugcaaugg

SEQ ID NO: 369737 - RNA, 21 nt, Human
cccaggcuagagugcaauggc

SEQ ID NO: 369738 - RNA, 22 nt, Human
cccaggcuagagugcaauggca

SEQ ID NO: 369739 - RNA, 23 nt, Human
cccaggcuagagugcaauggcau

SEQ ID NO: 369740 - RNA, 20 nt, Human
cccaggcuagagugcacugg

SEQ ID NO: 369741 - RNA, 18 nt, Human
cccaggcuagagugcagu

SEQ ID NO: 369742 - RNA, 20 nt, Human
cccaggcuagagugcaguag

SEQ ID NO: 369743 - RNA, 21 nt, Human
cccaggcuagagugcaguagc

SEQ ID NO: 369744 - RNA, 20 nt, Human
cccaggcuagagugcagugg

SEQ ID NO: 369745 - RNA, 21 nt, Human
cccaggcuagagugcaguggc

SEQ ID NO: 369746 - RNA, 23 nt, Human
cccaggcuagagugcaguggugu

SEQ ID NO: 369747 - RNA, 20 nt, Human
cccaggcuagaguguagugg

SEQ ID NO: 369748 - RNA, 21 nt, Human
cccaggcuagaguguaguggc

SEQ ID NO: 369749 - RNA, 21 nt, Human
cccaggcuagggggcuauaga

SEQ ID NO: 369750 - RNA, 32 nt, Human
cccaggcuagucucaaacuccugggcucaagc

SEQ ID NO: 369751 - RNA, 32 nt, Human
cccaggcuagucucaaacuccugggcucaagu

SEQ ID NO: 369752 - RNA, 32 nt, Human
cccaggcuagucuccaacuccugggcucagau

SEQ ID NO: 369753 - RNA, 32 nt, Human
cccaggcuagucuugaacuccugggcucaagc

SEQ ID NO: 369754 - RNA, 32 nt, Human
cccaggcuagucuugaacuccugggcucgaau

SEQ ID NO: 369755 - RNA, 32 nt, Human
cccaggcucaagccaucuuuccaccucagccu

SEQ ID NO: 369756 - RNA, 32 nt, Human
cccaggcucaagugauccuuccaccucagccu

SEQ ID NO: 369757 - RNA, 21 nt, Human
cccaggcucacccacccaagg

SEQ ID NO: 369758 - RNA, 21 nt, Human
cccaggcucaggcccaugagg

SEQ ID NO: 369759 - RNA, 32 nt, Human
cccaggcucaggggcugagaggcugcuuacug

SEQ ID NO: 369760 - RNA, 32 nt, Human
cccaggcucaugcucugaacucuggcugagag

SEQ ID NO: 369761 - RNA, 23 nt, Human
cccaggcuccagugcaguggugu

SEQ ID NO: 369762 - RNA, 32 nt, Human
cccaggcucccaggacccaggguacaucagga

SEQ ID NO: 369763 - RNA, 32 nt, Human
cccaggcucccugcuuucucucuugcccuccc

SEQ ID NO: 369764 - RNA, 32 nt, Human
cccaggcuccuucucaggucucagucucacuc

SEQ ID NO: 369765 - RNA, 32 nt, Human
cccaggcucgggggcucagugggaguucaugc

SEQ ID NO: 369766 - RNA, 31 nt, Human
cccaggcucguccccagcacagcagacacca

SEQ ID NO: 369767 - RNA, 21 nt, Human
cccaggcucucccaacccagg

SEQ ID NO: 369768 - RNA, 18 nt, Human
cccaggcucugacuuuca

SEQ ID NO: 369769 - RNA, 32 nt, Human
cccaggcucuucugacuggcaguggcucugga

SEQ ID NO: 369770 - RNA, 20 nt, Human
cccaggcugaacugcagugg

SEQ ID NO: 369771 - RNA, 23 nt, Human
cccaggcugaacugcaguggugu

SEQ ID NO: 369772 - RNA, 19 nt, Human
cccaggcugaagugcaaug

SEQ ID NO: 369773 - RNA, 20 nt, Human
cccaggcugaagugcagcgg

SEQ ID NO: 369774 - RNA, 32 nt, Human
cccaggcugaagugcaguagugcaaucucagc

SEQ ID NO: 369775 - RNA, 19 nt, Human
cccaggcugaagugcagug

SEQ ID NO: 369776 - RNA, 20 nt, Human
cccaggcugaagugcagugg

SEQ ID NO: 369777 - RNA, 23 nt, Human
cccaggcugaagugcaguggugu

SEQ ID NO: 369778 - RNA, 32 nt, Human
cccaggcugaaguguagagugcaguggcauga

SEQ ID NO: 369779 - RNA, 20 nt, Human
cccaggcugaccaggccagc

SEQ ID NO: 369780 - RNA, 20 nt, Human
cccaggcugagagccagaug

SEQ ID NO: 369781 - RNA, 19 nt, Human
cccaggcugaguacagugg

SEQ ID NO: 369782 - RNA, 18 nt, Human
cccaggcugagugcagug

SEQ ID NO: 369783 - RNA, 19 nt, Human
cccaggcugagugcagugg

SEQ ID NO: 369784 - RNA, 20 nt, Human
cccaggcugagugcaguggc

SEQ ID NO: 369785 - RNA, 32 nt, Human
cccaggcugaucucagauuccugggcugaagu

SEQ ID NO: 369786 - RNA, 32 nt, Human
cccaggcugaucuugaacuccugggcucaaga

SEQ ID NO: 369787 - RNA, 32 nt, Human
cccaggcugaucuugaacuccugggcucaagc

SEQ ID NO: 369788 - RNA, 32 nt, Human
cccaggcugcaacauccaccucccagguucaa

SEQ ID NO: 369789 - RNA, 32 nt, Human
cccaggcugcaacccucuguucccaagggcag

SEQ ID NO: 369790 - RNA, 32 nt, Human
cccaggcugcaaccucgaccucccgggcucaa

SEQ ID NO: 369791 - RNA, 32 nt, Human
cccaggcugcacccucuccgacccccaggccc

SEQ ID NO: 369792 - RNA, 16 nt, Human
cccaggcugcagcagc

SEQ ID NO: 369793 - RNA, 32 nt, Human
cccaggcugcagcugcucagaagcuccaggca

SEQ ID NO: 369794 - RNA, 24 nt, Human
cccaggcugcaggccucccccagg

SEQ ID NO: 369795 - RNA, 19 nt, Human
cccaggcugcagugcaaug

SEQ ID NO: 369796 - RNA, 20 nt, Human
cccaggcugcagugcaaugg

SEQ ID NO: 369797 - RNA, 18 nt, Human
cccaggcugcagugcagu

SEQ ID NO: 369798 - RNA, 19 nt, Human
cccaggcugcagugcagug

SEQ ID NO: 369799 - RNA, 20 nt, Human
cccaggcugcagugcaguga

SEQ ID NO: 369800 - RNA, 20 nt, Human
cccaggcugcagugcagugg

SEQ ID NO: 369801 - RNA, 32 nt, Human
cccaggcugcagugcaguggugccaucucagc

SEQ ID NO: 369802 - RNA, 20 nt, Human
cccaggcugcaguguagugg

SEQ ID NO: 369803 - RNA, 22 nt, Human
cccaggcugcaguguaguggug

SEQ ID NO: 369804 - RNA, 23 nt, Human
cccaggcugcaguucacuggugu

SEQ ID NO: 369805 - RNA, 32 nt, Human
cccaggcugccaggcuggaguggaguggcaug

SEQ ID NO: 369806 - RNA, 32 nt, Human
cccaggcugcccugcacuccugccucccagcc

SEQ ID NO: 369807 - RNA, 32 nt, Human
cccaggcugccuggccggggccacugccuccu

SEQ ID NO: 369808 - RNA, 32 nt, Human
cccaggcugccuggcuggggccacugccuccu

SEQ ID NO: 369809 - RNA, 32 nt, Human
cccaggcugcgucuggaguggcagagcucgca

SEQ ID NO: 369810 - RNA, 32 nt, Human
cccaggcugcuggaguacaguggcacaaucug

SEQ ID NO: 369811 - RNA, 23 nt, Human
cccaggcugcuggagugcagugg

SEQ ID NO: 369812 - RNA, 32 nt, Human
cccaggcugcuggagugcaguggcacaaucuc

SEQ ID NO: 369813 - RNA, 23 nt, Human
cccaggcugcuggagugccgugg

SEQ ID NO: 369814 - RNA, 21 nt, Human
cccaggcuggaauacaguggc

SEQ ID NO: 369815 - RNA, 20 nt, Human
cccaggcuggaauccagugg

SEQ ID NO: 369816 - RNA, 21 nt, Human
cccaggcuggaauccaguggc

SEQ ID NO: 369817 - RNA, 19 nt, Human
cccaggcuggaaugcaaug

SEQ ID NO: 369818 - RNA, 20 nt, Human
cccaggcuggaaugcaaugg

SEQ ID NO: 369819 - RNA, 23 nt, Human
cccaggcuggaaugcaauggcau

SEQ ID NO: 369820 - RNA, 19 nt, Human
cccaggcuggaaugcagug

SEQ ID NO: 369821 - RNA, 20 nt, Human
cccaggcuggaaugcagugg

SEQ ID NO: 369822 - RNA, 21 nt, Human
cccaggcuggaaugcaguggc

SEQ ID NO: 369823 - RNA, 23 nt, Human
cccaggcuggaaugcaguggugu

SEQ ID NO: 369824 - RNA, 19 nt, Human
cccaggcuggacugcaaug

SEQ ID NO: 369825 - RNA, 20 nt, Human
cccaggcuggacugcaauga

SEQ ID NO: 369826 - RNA, 32 nt, Human
cccaggcuggacugcagcagcgcagucucaga

SEQ ID NO: 369827 - RNA, 19 nt, Human
cccaggcuggacugcagug

SEQ ID NO: 369828 - RNA, 20 nt, Human
cccaggcuggacugcaguga

SEQ ID NO: 369829 - RNA, 20 nt, Human
cccaggcuggacugcagugg

SEQ ID NO: 369830 - RNA, 21 nt, Human
cccaggcuggacugcaguggc

SEQ ID NO: 369831 - RNA, 22 nt, Human
cccaggcuggacugcaguggug

SEQ ID NO: 369832 - RNA, 32 nt, Human
cccaggcuggacugcaguggugcgaucucggc

SEQ ID NO: 369833 - RNA, 32 nt, Human
cccaggcuggacugcaguggugcgauucuccu

SEQ ID NO: 369834 - RNA, 32 nt, Human
cccaggcuggacuuugugugagccuguuuagu

SEQ ID NO: 369835 - RNA, 32 nt, Human
cccaggcuggagaaguccaugugugcaugcau

SEQ ID NO: 369836 - RNA, 20 nt, Human
cccaggcuggagagcagugg

SEQ ID NO: 369837 - RNA, 21 nt, Human
cccaggcuggagagcaguggc

SEQ ID NO: 369838 - RNA, 22 nt, Human
cccaggcuggagagcaguggca

SEQ ID NO: 369839 - RNA, 22 nt, Human
cccaggcuggagcacacuggug

SEQ ID NO: 369840 - RNA, 19 nt, Human
cccaggcuggagcgcaaug

SEQ ID NO: 369841 - RNA, 19 nt, Human
cccaggcuggagcgcagug

SEQ ID NO: 369842 - RNA, 20 nt, Human
cccaggcuggagcgcagugg

SEQ ID NO: 369843 - RNA, 21 nt, Human
cccaggcuggagcgcaguggc

SEQ ID NO: 369844 - RNA, 32 nt, Human
cccaggcuggaggaagcagcaggcuagcggaa

SEQ ID NO: 369845 - RNA, 17 nt, Human
cccaggcuggaggacag

SEQ ID NO: 369846 - RNA, 20 nt, Human
cccaggcuggaggacaguga

SEQ ID NO: 369847 - RNA, 23 nt, Human
cccaggcuggaggacagugaugu

SEQ ID NO: 369848 - RNA, 19 nt, Human
cccaggcuggagggcaaug

SEQ ID NO: 369849 - RNA, 20 nt, Human
cccaggcuggagggcaguga

SEQ ID NO: 369850 - RNA, 21 nt, Human
cccaggcuggaguacaauagc

SEQ ID NO: 369851 - RNA, 19 nt, Human
cccaggcuggaguacaaug

SEQ ID NO: 369852 - RNA, 22 nt, Human
cccaggcuggaguacaaugaug

SEQ ID NO: 369853 - RNA, 21 nt, Human
cccaggcuggaguacacuggc

SEQ ID NO: 369854 - RNA, 19 nt, Human
cccaggcuggaguacagug

SEQ ID NO: 369855 - RNA, 20 nt, Human
cccaggcuggaguacaguga

SEQ ID NO: 369856 - RNA, 20 nt, Human
cccaggcuggaguacagugg

SEQ ID NO: 369857 - RNA, 21 nt, Human
cccaggcuggaguacaguggc

SEQ ID NO: 369858 - RNA, 23 nt, Human
cccaggcuggaguacaguggcgu

SEQ ID NO: 369859 - RNA, 22 nt, Human
cccaggcuggaguacagugggu

SEQ ID NO: 369860 - RNA, 21 nt, Human
cccaggcuggaguacaguggu

SEQ ID NO: 369861 - RNA, 22 nt, Human
cccaggcuggaguacaguggug

SEQ ID NO: 369862 - RNA, 23 nt, Human
cccaggcuggaguacaguggugu

SEQ ID NO: 369863 - RNA, 23 nt, Human
cccaggcuggaguaccgguggug

SEQ ID NO: 369864 - RNA, 19 nt, Human
cccaggcuggaguagagug

SEQ ID NO: 369865 - RNA, 20 nt, Human
cccaggcuggaguagaguga

SEQ ID NO: 369866 - RNA, 32 nt, Human
cccaggcuggaguauaguagugcaguggugug

SEQ ID NO: 369867 - RNA, 19 nt, Human
cccaggcuggaguauagug

SEQ ID NO: 369868 - RNA, 20 nt, Human
cccaggcuggaguauaguga

SEQ ID NO: 369869 - RNA, 20 nt, Human
cccaggcuggaguauagugg

SEQ ID NO: 369870 - RNA, 23 nt, Human
cccaggcuggaguauaguggugu

SEQ ID NO: 369871 - RNA, 19 nt, Human
cccaggcuggaguccaaug

SEQ ID NO: 369872 - RNA, 19 nt, Human
cccaggcuggaguccagug

SEQ ID NO: 369873 - RNA, 20 nt, Human
cccaggcuggaguccagugg

SEQ ID NO: 369874 - RNA, 21 nt, Human
cccaggcuggaguccaguggc

SEQ ID NO: 369875 - RNA, 23 nt, Human
cccaggcuggaguccaguggcgu

SEQ ID NO: 369876 - RNA, 22 nt, Human
cccaggcuggaguccaguggug

SEQ ID NO: 369877 - RNA, 23 nt, Human
cccaggcuggaguccaguggugu

SEQ ID NO: 369878 - RNA, 23 nt, Human
cccaggcuggagucuagugucgu

SEQ ID NO: 369879 - RNA, 20 nt, Human
cccaggcuggagugaggugg

SEQ ID NO: 369880 - RNA, 21 nt, Human
cccaggcuggagugagguggu

SEQ ID NO: 369881 - RNA, 20 nt, Human
cccaggcuggagugcaacgg

SEQ ID NO: 369882 - RNA, 19 nt, Human
cccaggcuggagugcaagg

SEQ ID NO: 369883 - RNA, 21 nt, Human
cccaggcuggagugcaaggca

SEQ ID NO: 369884 - RNA, 18 nt, Human
cccaggcuggagugcaau

SEQ ID NO: 369885 - RNA, 19 nt, Human
cccaggcuggagugcaaug

SEQ ID NO: 369886 - RNA, 20 nt, Human
cccaggcuggagugcaauga

SEQ ID NO: 369887 - RNA, 22 nt, Human
cccaggcuggagugcaaugaug

SEQ ID NO: 369888 - RNA, 22 nt, Human
cccaggcuggagugcaaugcug

SEQ ID NO: 369889 - RNA, 20 nt, Human
cccaggcuggagugcaaugg

SEQ ID NO: 369890 - RNA, 23 nt, Human
cccaggcuggagugcaauggagu

SEQ ID NO: 369891 - RNA, 21 nt, Human
cccaggcuggagugcaauggc

SEQ ID NO: 369892 - RNA, 22 nt, Human
cccaggcuggagugcaauggca

SEQ ID NO: 369893 - RNA, 23 nt, Human
cccaggcuggagugcaauggcau

SEQ ID NO: 369894 - RNA, 23 nt, Human
cccaggcuggagugcaauggcgu

SEQ ID NO: 369895 - RNA, 21 nt, Human
cccaggcuggagugcaauggu

SEQ ID NO: 369896 - RNA, 22 nt, Human
cccaggcuggagugcaauggug

SEQ ID NO: 369897 - RNA, 32 nt, Human
cccaggcuggagugcaauggugcaaugaucuc

SEQ ID NO: 369898 - RNA, 32 nt, Human
cccaggcuggagugcaauggugccaucuuggu

SEQ ID NO: 369899 - RNA, 23 nt, Human
cccaggcuggagugcaaugucgu

SEQ ID NO: 369900 - RNA, 22 nt, Human
cccaggcuggagugcaauugug

SEQ ID NO: 369901 - RNA, 32 nt, Human
cccaggcuggagugcacaaacauggcucacua

SEQ ID NO: 369902 - RNA, 19 nt, Human
cccaggcuggagugcacug

SEQ ID NO: 369903 - RNA, 20 nt, Human
cccaggcuggagugcacugg

SEQ ID NO: 369904 - RNA, 32 nt, Human
cccaggcuggagugcacuggcgcaaucucggc

SEQ ID NO: 369905 - RNA, 32 nt, Human
cccaggcuggagugcacuggcgcgaucucggc

SEQ ID NO: 369906 - RNA, 32 nt, Human
cccaggcuggagugcacuggcgugaucucggc

SEQ ID NO: 369907 - RNA, 32 nt, Human
cccaggcuggagugcacuggcuugaucucggc

SEQ ID NO: 369908 - RNA, 32 nt, Human
cccaggcuggagugcacuggcuugaucuuggc

SEQ ID NO: 369909 - RNA, 20 nt, Human
cccaggcuggagugcagagg

SEQ ID NO: 369910 - RNA, 19 nt, Human
cccaggcuggagugcagca

SEQ ID NO: 369911 - RNA, 20 nt, Human
cccaggcuggagugcagcag

SEQ ID NO: 369912 - RNA, 23 nt, Human
cccaggcuggagugcagcaguug

SEQ ID NO: 369913 - RNA, 19 nt, Human
cccaggcuggagugcaggg

SEQ ID NO: 369914 - RNA, 20 nt, Human
cccaggcuggagugcaggga

SEQ ID NO: 369915 - RNA, 18 nt, Human
cccaggcuggagugcagu

SEQ ID NO: 369916 - RNA, 20 nt, Human
cccaggcuggagugcaguag

SEQ ID NO: 369917 - RNA, 21 nt, Human
cccaggcuggagugcaguagc

SEQ ID NO: 369918 - RNA, 22 nt, Human
cccaggcuggagugcaguagca

SEQ ID NO: 369919 - RNA, 23 nt, Human
cccaggcuggagugcaguagcau

SEQ ID NO: 369920 - RNA, 22 nt, Human
cccaggcuggagugcaguagug

SEQ ID NO: 369921 - RNA, 32 nt, Human
cccaggcuggagugcaguagugcaaucagggc

SEQ ID NO: 369922 - RNA, 32 nt, Human
cccaggcuggagugcaguagugcagucguggc

SEQ ID NO: 369923 - RNA, 19 nt, Human
cccaggcuggagugcagug

SEQ ID NO: 369924 - RNA, 20 nt, Human
cccaggcuggagugcaguga

SEQ ID NO: 369925 - RNA, 21 nt, Human
cccaggcuggagugcagugca

SEQ ID NO: 369926 - RNA, 22 nt, Human
cccaggcuggagugcagugcug

SEQ ID NO: 369927 - RNA, 23 nt, Human
cccaggcuggagugcagugcugu

SEQ ID NO: 369928 - RNA, 32 nt, Human
cccaggcuggagugcagugcugugauauuggc

SEQ ID NO: 369929 - RNA, 20 nt, Human
cccaggcuggagugcagugg

SEQ ID NO: 369930 - RNA, 21 nt, Human
cccaggcuggagugcaguggc

SEQ ID NO: 369931 - RNA, 23 nt, Human
cccaggcuggagugcaguggcgu

SEQ ID NO: 369932 - RNA, 22 nt, Human
cccaggcuggagugcagugggu

SEQ ID NO: 369933 - RNA, 21 nt, Human
cccaggcuggagugcaguggu

SEQ ID NO: 369934 - RNA, 22 nt, Human
cccaggcuggagugcaguggug

SEQ ID NO: 369935 - RNA, 32 nt, Human
cccaggcuggagugcaguggugcaguggcucg

SEQ ID NO: 369936 - RNA, 32 nt, Human
cccaggcuggagugcaguggugccaucaccac

SEQ ID NO: 369937 - RNA, 32 nt, Human
cccaggcuggagugcaguggugccaucauagc

SEQ ID NO: 369938 - RNA, 32 nt, Human
cccaggcuggagugcaguggugccaucucggc

SEQ ID NO: 369939 - RNA, 32 nt, Human
cccaggcuggagugcaguggugccaucuuggc

SEQ ID NO: 369940 - RNA, 23 nt, Human
cccaggcuggagugcaguggugu

SEQ ID NO: 369941 - RNA, 23 nt, Human
cccaggcuggagugcagugucgu

SEQ ID NO: 369942 - RNA, 22 nt, Human
cccaggcuggagugcaguguug

SEQ ID NO: 369943 - RNA, 19 nt, Human
cccaggcuggagugcauga

SEQ ID NO: 369944 - RNA, 19 nt, Human
cccaggcuggagugcauug

SEQ ID NO: 369945 - RNA, 20 nt, Human
cccaggcuggagugcauuga

SEQ ID NO: 369946 - RNA, 23 nt, Human
cccaggcuggagugccauagugu

SEQ ID NO: 369947 - RNA, 19 nt, Human
cccaggcuggagugccaug

SEQ ID NO: 369948 - RNA, 20 nt, Human
cccaggcuggagugccaugg

SEQ ID NO: 369949 - RNA, 23 nt, Human
cccaggcuggagugccauggcau

SEQ ID NO: 369950 - RNA, 20 nt, Human
cccaggcuggagugccgugg

SEQ ID NO: 369951 - RNA, 23 nt, Human
cccaggcuggagugccguggcgu

SEQ ID NO: 369952 - RNA, 18 nt, Human
cccaggcuggagugcgau

SEQ ID NO: 369953 - RNA, 19 nt, Human
cccaggcuggagugcgaug

SEQ ID NO: 369954 - RNA, 20 nt, Human
cccaggcuggagugcgaugg

SEQ ID NO: 369955 - RNA, 18 nt, Human
cccaggcuggagugcggu

SEQ ID NO: 369956 - RNA, 20 nt, Human
cccaggcuggagugcggugg

SEQ ID NO: 369957 - RNA, 22 nt, Human
cccaggcuggagugcgguggug

SEQ ID NO: 369958 - RNA, 19 nt, Human
cccaggcuggagugcuaug

SEQ ID NO: 369959 - RNA, 20 nt, Human
cccaggcuggagugcuaugg

SEQ ID NO: 369960 - RNA, 22 nt, Human
cccaggcuggagugcuauggug

SEQ ID NO: 369961 - RNA, 19 nt, Human
cccaggcuggagugcugug

SEQ ID NO: 369962 - RNA, 20 nt, Human
cccaggcuggagugcugugg

SEQ ID NO: 369963 - RNA, 22 nt, Human
cccaggcuggagugcuguggug

SEQ ID NO: 369964 - RNA, 23 nt, Human
cccaggcuggagugcuguggugu

SEQ ID NO: 369965 - RNA, 19 nt, Human
cccaggcuggaguggagug

SEQ ID NO: 369966 - RNA, 20 nt, Human
cccaggcuggaguggagugg

SEQ ID NO: 369967 - RNA, 21 nt, Human
cccaggcuggaguggaguggu

SEQ ID NO: 369968 - RNA, 20 nt, Human
cccaggcuggaguguaagug

SEQ ID NO: 369969 - RNA, 18 nt, Human
cccaggcuggaguguagu

SEQ ID NO: 369970 - RNA, 19 nt, Human
cccaggcuggaguguagug

SEQ ID NO: 369971 - RNA, 20 nt, Human
cccaggcuggaguguagugg

SEQ ID NO: 369972 - RNA, 22 nt, Human
cccaggcuggaguguaguggug

SEQ ID NO: 369973 - RNA, 32 nt, Human
cccaggcuggaguguaguggugccaucucagc

SEQ ID NO: 369974 - RNA, 23 nt, Human
cccaggcuggaguguaguggugu

SEQ ID NO: 369975 - RNA, 20 nt, Human
cccaggcuggaguucagugg

SEQ ID NO: 369976 - RNA, 22 nt, Human
cccaggcuggaguucaguggug

SEQ ID NO: 369977 - RNA, 19 nt, Human
cccaggcuggaugcugcag

SEQ ID NO: 369978 - RNA, 19 nt, Human
cccaggcuggcgugcaaug

SEQ ID NO: 369979 - RNA, 20 nt, Human
cccaggcuggcgugcaaugg

SEQ ID NO: 369980 - RNA, 19 nt, Human
cccaggcuggcgugcagug

SEQ ID NO: 369981 - RNA, 20 nt, Human
cccaggcuggcgugcagugg

SEQ ID NO: 369982 - RNA, 23 nt, Human
cccaggcuggcgugcaguggugu

SEQ ID NO: 369983 - RNA, 22 nt, Human
cccaggcugggaauugcagugg

SEQ ID NO: 369984 - RNA, 32 nt, Human
cccaggcugggagcuugccaggaacccagugg

SEQ ID NO: 369985 - RNA, 20 nt, Human
cccaggcugggaugcagugg

SEQ ID NO: 369986 - RNA, 21 nt, Human
cccaggcugggaugcaguggc

SEQ ID NO: 369987 - RNA, 18 nt, Human
cccaggcugggcaaggcg

SEQ ID NO: 369988 - RNA, 32 nt, Human
cccaggcugggcagaggucaggagacucagcc

SEQ ID NO: 369989 - RNA, 32 nt, Human
cccaggcugggccugcgcugagcuucuggagc

SEQ ID NO: 369990 - RNA, 21 nt, Human
cccaggcugggccugguggug

SEQ ID NO: 369991 - RNA, 32 nt, Human
cccaggcugggccugguggugaagagcagucc

SEQ ID NO: 369992 - RNA, 24 nt, Human
cccaggcuggggccacaacccuga

SEQ ID NO: 369993 - RNA, 20 nt, Human
cccaggcugggggcaggugu

SEQ ID NO: 369994 - RNA, 20 nt, Human
cccaggcugggguacggugg

SEQ ID NO: 369995 - RNA, 21 nt, Human
cccaggcugggguacgguggc

SEQ ID NO: 369996 - RNA, 18 nt, Human
cccaggcuggggugcagu

SEQ ID NO: 369997 - RNA, 19 nt, Human
cccaggcuggggugcagug

SEQ ID NO: 369998 - RNA, 20 nt, Human
cccaggcuggggugcagugg

SEQ ID NO: 369999 - RNA, 21 nt, Human
cccaggcuggggugcaguggc

SEQ ID NO: 370000 - RNA, 23 nt, Human
cccaggcuggggugcaguggcgu

SEQ ID NO: 370001 - RNA, 21 nt, Human
cccaggcuggucucaaacucc

SEQ ID NO: 370002 - RNA, 32 nt, Human
cccaggcuggucucaaacuccugggcucaagc

SEQ ID NO: 370003 - RNA, 32 nt, Human
cccaggcuggucucaaacuccugggcucaagu

SEQ ID NO: 370004 - RNA, 32 nt, Human
cccaggcuggucucaaacuccugggcucaggc

SEQ ID NO: 370005 - RNA, 32 nt, Human
cccaggcuggucucaaauuccugggcccaaac

SEQ ID NO: 370006 - RNA, 32 nt, Human
cccaggcuggucucaaccuccugggcucaagc

SEQ ID NO: 370007 - RNA, 20 nt, Human
cccaggcuggucucaacucc

SEQ ID NO: 370008 - RNA, 32 nt, Human
cccaggcuggucucaggcuccugggcucagau

SEQ ID NO: 370009 - RNA, 32 nt, Human
cccaggcuggucuccaacuccugggcucaagc

SEQ ID NO: 370010 - RNA, 32 nt, Human
cccaggcuggucucgaacuccugggcucaagc

SEQ ID NO: 370011 - RNA, 32 nt, Human
cccaggcuggucucgaacuccugggcucaagu

SEQ ID NO: 370012 - RNA, 32 nt, Human
cccaggcuggucucgaacuccugggcucgggu

SEQ ID NO: 370013 - RNA, 32 nt, Human
cccaggcuggucuuaaacuccugggcucaagu

SEQ ID NO: 370014 - RNA, 32 nt, Human
cccaggcuggucuugaacuccugggccaugcc

SEQ ID NO: 370015 - RNA, 32 nt, Human
cccaggcuggucuugaacuccugggcucaagc

SEQ ID NO: 370016 - RNA, 32 nt, Human
cccaggcuggucuugaacuccugggcucaugc

SEQ ID NO: 370017 - RNA, 32 nt, Human
cccaggcuggucuugaacuccugggcuccagu

SEQ ID NO: 370018 - RNA, 32 nt, Human
cccaggcuggugagcaggagauuuugcucuug

SEQ ID NO: 370019 - RNA, 19 nt, Human
cccaggcuggugugcaaug

SEQ ID NO: 370020 - RNA, 24 nt, Human
cccaggcugguguggaacuccuga

SEQ ID NO: 370021 - RNA, 32 nt, Human
cccaggcugguguggacacaaggaagccccgc

SEQ ID NO: 370022 - RNA, 32 nt, Human
cccaggcugguuucaaccuccuggccucaagu

SEQ ID NO: 370023 - RNA, 32 nt, Human
cccaggcuguaguacaguggugccaucucagc

SEQ ID NO: 370024 - RNA, 19 nt, Human
cccaggcuguagugcaaug

SEQ ID NO: 370025 - RNA, 20 nt, Human
cccaggcuguagugcaaugg

SEQ ID NO: 370026 - RNA, 20 nt, Human
cccaggcuguagugcagugg

SEQ ID NO: 370027 - RNA, 21 nt, Human
cccaggcuguagugcaguggc

SEQ ID NO: 370028 - RNA, 20 nt, Human
cccaggcuguaguggagugg

SEQ ID NO: 370029 - RNA, 23 nt, Human
cccaggcuguaguggaguggugu

SEQ ID NO: 370030 - RNA, 19 nt, Human
cccaggcugucgggccaug

SEQ ID NO: 370031 - RNA, 32 nt, Human
cccaggcugugagcuccuugggggcaggcccu

SEQ ID NO: 370032 - RNA, 32 nt, Human
cccaggcugugcaaggccagcacacagacaua

SEQ ID NO: 370033 - RNA, 22 nt, Human
cccaggcugugccccaccacag

SEQ ID NO: 370034 - RNA, 32 nt, Human
cccaggcuguucucaaacuccugggcugaagu

SEQ ID NO: 370035 - RNA, 32 nt, Human
cccaggcuguucuucaacuccugggcucaagc

SEQ ID NO: 370036 - RNA, 32 nt, Human
cccaggcuuaucuggaacuccugggcucaaga

SEQ ID NO: 370037 - RNA, 32 nt, Human
cccaggcuucauuacacaggcuuuucauguau

SEQ ID NO: 370038 - RNA, 32 nt, Human
cccaggcuuccccucuauccagccuggccucu

SEQ ID NO: 370039 - RNA, 24 nt, Human
cccaggcuucgugcuccccacccu

SEQ ID NO: 370040 - RNA, 32 nt, Human
cccaggcuucuguugucccuugccugccugua

SEQ ID NO: 370041 - RNA, 19 nt, Human
cccaggcuugagugcaaug

SEQ ID NO: 370042 - RNA, 20 nt, Human
cccaggcuugagugcaauga

SEQ ID NO: 370043 - RNA, 19 nt, Human
cccaggcuugagugcagug

SEQ ID NO: 370044 - RNA, 20 nt, Human
cccaggcuugagugcaguga

SEQ ID NO: 370045 - RNA, 20 nt, Human
cccaggcuugagugcagugg

SEQ ID NO: 370046 - RNA, 22 nt, Human
cccaggcuugagugcaguggug

SEQ ID NO: 370047 - RNA, 23 nt, Human
cccaggcuugcagaauaaagcca

SEQ ID NO: 370048 - RNA, 20 nt, Human
cccaggcuuggccucccagg

SEQ ID NO: 370049 - RNA, 18 nt, Human
cccaggcuugggagccag

SEQ ID NO: 370050 - RNA, 25 nt, Human
cccaggcuuucucucccacuucccu

SEQ ID NO: 370051 - RNA, 32 nt, Human
cccaggcuuugcagaaaccacacacacuguug

SEQ ID NO: 370052 - RNA, 32 nt, Human
cccaggcuuugucccaggcuuucuggugugug

SEQ ID NO: 370053 - RNA, 32 nt, Human
cccaggcuuuuaaaaacuuucaucuaggccac

SEQ ID NO: 370054 - RNA, 32 nt, Human
cccaggcuuuuacaaccuggugcucagcuucc

SEQ ID NO: 370055 - RNA, 21 nt, Human
cccagggaaaagcccagagaa

SEQ ID NO: 370056 - RNA, 32 nt, Human
cccagggaaaggacaaggcugagagaauucca

SEQ ID NO: 370057 - RNA, 18 nt, Human
cccagggaagaaacggaa

SEQ ID NO: 370058 - RNA, 32 nt, Human
cccagggaagcagagugcaagagcagaagagc

SEQ ID NO: 370059 - RNA, 19 nt, Human
cccagggaagccugaggug

SEQ ID NO: 370060 - RNA, 32 nt, Human
cccagggaagucccuucuccaaagucagggcc

SEQ ID NO: 370061 - RNA, 32 nt, Human
cccagggaagugguugaccccuccgguggccg

SEQ ID NO: 370062 - RNA, 32 nt, Human
cccagggaaguguccuuucuuucccuuccuua

SEQ ID NO: 370063 - RNA, 24 nt, Human
cccagggaauccucuggaccauca

SEQ ID NO: 370064 - RNA, 32 nt, Human
cccagggaauuuucacccucucaguccucagg

SEQ ID NO: 370065 - RNA, 21 nt, Human
cccagggacacuccuuccauc

SEQ ID NO: 370066 - RNA, 32 nt, Human
cccagggacccaguguacccagccucuggccu

SEQ ID NO: 370067 - RNA, 32 nt, Human
cccagggacccccaucaccagcucuccagcgg

SEQ ID NO: 370068 - RNA, 32 nt, Human
cccagggacccugggacgaggcugcagaagcu

SEQ ID NO: 370069 - RNA, 32 nt, Human
cccagggacucacaguucagugcaguggguga

SEQ ID NO: 370070 - RNA, 32 nt, Human
cccagggacucagagcagcaucuucuuaggag

SEQ ID NO: 370071 - RNA, 32 nt, Human
cccagggacucaggcuggaauagaguggacug

SEQ ID NO: 370072 - RNA, 19 nt, Human
cccagggagaaagcauguc

SEQ ID NO: 370073 - RNA, 18 nt, Human
cccagggagaggagccag

SEQ ID NO: 370074 - RNA, 32 nt, Human
cccagggagagggacagacagccggcugcaug

SEQ ID NO: 370075 - RNA, 32 nt, Human
cccagggagagggggcuggugggugccuaggc

SEQ ID NO: 370076 - RNA, 25 nt, Human
cccagggagauggagguugcaggga

SEQ ID NO: 370077 - RNA, 32 nt, Human
cccagggagccccagcccaagauggccagccu

SEQ ID NO: 370078 - RNA, 32 nt, Human
cccagggagccgggguuaggaacucacuuggg

SEQ ID NO: 370079 - RNA, 32 nt, Human
cccagggaggacccagaccuccacacuccaug

SEQ ID NO: 370080 - RNA, 16 nt, Human
cccagggaggagccgg

SEQ ID NO: 370081 - RNA, 16 nt, Human
cccagggaggagucag

SEQ ID NO: 370082 - RNA, 23 nt, Human
cccagggaggcagagguugcugu

SEQ ID NO: 370083 - RNA, 25 nt, Human
cccagggaggcagagguugcuguaa

SEQ ID NO: 370084 - RNA, 32 nt, Human
cccagggaggcagagguugcuguaaguugaga

SEQ ID NO: 370085 - RNA, 32 nt, Human
cccagggaggccgaagcuaacagggaaggcag

SEQ ID NO: 370086 - RNA, 32 nt, Human
cccagggaggcugaguccugccaggaucauuc

SEQ ID NO: 370087 - RNA, 32 nt, Human
cccagggaggggcaggccgggcggccgacgcc

SEQ ID NO: 370088 - RNA, 32 nt, Human
cccagggagggugggagcuggagggggauguc

SEQ ID NO: 370089 - RNA, 32 nt, Human
cccagggagguagaggcuucagugagcugaga

SEQ ID NO: 370090 - RNA, 32 nt, Human
cccagggaggucaaggcugcagugagcaauga

SEQ ID NO: 370091 - RNA, 32 nt, Human
cccagggaggucgaugcugcagugagcuaugg

SEQ ID NO: 370092 - RNA, 25 nt, Human
cccagggagguugaggcugcaguga

SEQ ID NO: 370093 - RNA, 25 nt, Human
cccagggaguagcagccaggcccuu

SEQ ID NO: 370094 - RNA, 25 nt, Human
cccagggagucaaaggcuguaguga

SEQ ID NO: 370095 - RNA, 20 nt, Human
cccagggagugcagagccag

SEQ ID NO: 370096 - RNA, 32 nt, Human
cccagggaucagugucauuuagggaugugacu

SEQ ID NO: 370097 - RNA, 25 nt, Human
cccagggaugcaaagguugcaguga

SEQ ID NO: 370098 - RNA, 32 nt, Human
cccagggaugcaaagguugcagugaguugagu

SEQ ID NO: 370099 - RNA, 32 nt, Human
cccagggaugccacccuuucgucaccucuucc

SEQ ID NO: 370100 - RNA, 32 nt, Human
cccagggaugggaggcggaggguagagaugaa

SEQ ID NO: 370101 - RNA, 31 nt, Human
cccagggaugguggugcacacuuguaguccc

SEQ ID NO: 370102 - RNA, 32 nt, Human
cccagggauguggccuuggagaaggaccacug

SEQ ID NO: 370103 - RNA, 26 nt, Human
cccagggauguuugaggcugcaguga

SEQ ID NO: 370104 - RNA, 32 nt, Human
cccagggauugcaggccugggcgccgggguug

SEQ ID NO: 370105 - RNA, 19 nt, Human
cccagggauuggaaacgga

SEQ ID NO: 370106 - RNA, 20 nt, Human
cccagggcaaugugguggga

SEQ ID NO: 370107 - RNA, 32 nt, Human
cccagggcacccaaaccucccuucccuuucgu

SEQ ID NO: 370108 - RNA, 32 nt, Human
cccagggcacuacauaauugcuguucugcuga

SEQ ID NO: 370109 - RNA, 32 nt, Human
cccagggcagagcacaacucagccucccaggc

SEQ ID NO: 370110 - RNA, 32 nt, Human
cccagggcagcaucuacugaucacugaccagu

SEQ ID NO: 370111 - RNA, 18 nt, Human
cccagggcagccagcuca

SEQ ID NO: 370112 - RNA, 21 nt, Human
cccagggcagccgaggccagc

SEQ ID NO: 370113 - RNA, 32 nt, Human
cccagggcagccgccccgccgagucgcagugu

SEQ ID NO: 370114 - RNA, 32 nt, Human
cccagggcaguggcuuuccugaggcagcagcc

SEQ ID NO: 370115 - RNA, 20 nt, Human
cccagggcagugugguggga

SEQ ID NO: 370116 - RNA, 32 nt, Human
cccagggcaugcagagguugcaccuagagacg

SEQ ID NO: 370117 - RNA, 32 nt, Human
cccagggcaugcuggggcccuaccagcagcug

SEQ ID NO: 370118 - RNA, 32 nt, Human
cccagggccaacucccccugccggcccucugc

SEQ ID NO: 370119 - RNA, 32 nt, Human
cccagggccacccugcccugagguccuugugu

SEQ ID NO: 370120 - RNA, 32 nt, Human
cccagggccacucugccucugccugcauucug

SEQ ID NO: 370121 - RNA, 20 nt, Human
cccagggccacuggucagga

SEQ ID NO: 370122 - RNA, 22 nt, Human
cccagggccagacccuggcugg

SEQ ID NO: 370123 - RNA, 32 nt, Human
cccagggccagccuggcacucagcccuucgag

SEQ ID NO: 370124 - RNA, 32 nt, Human
cccagggccagccugggucacgagaugcuguc

SEQ ID NO: 370125 - RNA, 21 nt, Human
cccagggccagcuuuuccuca

SEQ ID NO: 370126 - RNA, 32 nt, Human
cccagggccaggcagacuggggcagugacugg

SEQ ID NO: 370127 - RNA, 32 nt, Human
cccagggccaggcagucgugguugcagaagga

SEQ ID NO: 370128 - RNA, 32 nt, Human
cccagggccauggcgaacccgaagcugcuggg

SEQ ID NO: 370129 - RNA, 21 nt, Human
cccagggcccaaggaggagaa

SEQ ID NO: 370130 - RNA, 28 nt, Human
cccagggcccacccccacccgccugccu

SEQ ID NO: 370131 - RNA, 20 nt, Human
cccagggcccaccuuucggg

SEQ ID NO: 370132 - RNA, 22 nt, Human
cccagggcccacgucgguggga

SEQ ID NO: 370133 - RNA, 21 nt, Human
cccagggcccagauugaggga

SEQ ID NO: 370134 - RNA, 22 nt, Human
cccagggcccagauugagggaa

SEQ ID NO: 370135 - RNA, 22 nt, Human
cccagggcccagcaagauggga

SEQ ID NO: 370136 - RNA, 22 nt, Human
cccagggcccagcuucccagga

SEQ ID NO: 370137 - RNA, 23 nt, Human
cccagggcccagcuucccaggag

SEQ ID NO: 370138 - RNA, 32 nt, Human
cccagggcccagcuuuggccuuagcuugacgg

SEQ ID NO: 370139 - RNA, 27 nt, Human
cccagggcccaggccgugugguuggga

SEQ ID NO: 370140 - RNA, 28 nt, Human
cccagggcccaggccgugugguugggaa

SEQ ID NO: 370141 - RNA, 23 nt, Human
cccagggcccaggccugucuggg

SEQ ID NO: 370142 - RNA, 23 nt, Human
cccagggcccauagacagcuggg

SEQ ID NO: 370143 - RNA, 28 nt, Human
cccagggccccaccccauccuccugccu

SEQ ID NO: 370144 - RNA, 22 nt, Human
cccagggccccaggggcgggga

SEQ ID NO: 370145 - RNA, 23 nt, Human
cccagggccccaggggcggggaa

SEQ ID NO: 370146 - RNA, 21 nt, Human
cccagggccccccagcuuaga

SEQ ID NO: 370147 - RNA, 22 nt, Human
cccagggccccccagcuuagaa

SEQ ID NO: 370148 - RNA, 23 nt, Human
cccagggccccggaagcugcgga

SEQ ID NO: 370149 - RNA, 23 nt, Human
cccagggcccgcaggaggcuggg

SEQ ID NO: 370150 - RNA, 32 nt, Human
cccagggcccggcuggagugacaggcucccug

SEQ ID NO: 370151 - RNA, 32 nt, Human
cccagggcccugccucggguccugggccugcu

SEQ ID NO: 370152 - RNA, 23 nt, Human
cccagggcccuggccagccggga

SEQ ID NO: 370153 - RNA, 24 nt, Human
cccagggcccuggccagccgggag

SEQ ID NO: 370154 - RNA, 24 nt, Human
cccagggcccuggggggagggauc

SEQ ID NO: 370155 - RNA, 22 nt, Human
cccagggcccugucuccugccu

SEQ ID NO: 370156 - RNA, 22 nt, Human
cccagggccgccgugagcggga

SEQ ID NO: 370157 - RNA, 21 nt, Human
cccagggccgcugagccgggg

SEQ ID NO: 370158 - RNA, 32 nt, Human
cccagggccgcugcucccucaguugccgccgc

SEQ ID NO: 370159 - RNA, 20 nt, Human
cccagggccuccaaguggga

SEQ ID NO: 370160 - RNA, 21 nt, Human
cccagggccuccuugcuccuu

SEQ ID NO: 370161 - RNA, 23 nt, Human
cccagggccucucucuagcuggg

SEQ ID NO: 370162 - RNA, 21 nt, Human
cccagggccugagccuggcca

SEQ ID NO: 370163 - RNA, 19 nt, Human
cccagggccugagcuaugg

SEQ ID NO: 370164 - RNA, 32 nt, Human
cccagggccugagcucucuuccccagcauugc

SEQ ID NO: 370165 - RNA, 32 nt, Human
cccagggccuggccuucucucccagcagccug

SEQ ID NO: 370166 - RNA, 21 nt, Human
cccagggccuggcugacaugg

SEQ ID NO: 370167 - RNA, 18 nt, Human
cccagggccugggccaug

SEQ ID NO: 370168 - RNA, 32 nt, Human
cccagggccugucucaagcucuuccuuacucc

SEQ ID NO: 370169 - RNA, 32 nt, Human
cccagggccugucuucucaaccccucaccuuu

SEQ ID NO: 370170 - RNA, 32 nt, Human
cccagggccugucuugucaaccccucaccuuu

SEQ ID NO: 370171 - RNA, 28 nt, Human
cccagggccuuccauuuacccccugccu

SEQ ID NO: 370172 - RNA, 32 nt, Human
cccagggccuucgcucccucagcacuggggug

SEQ ID NO: 370173 - RNA, 27 nt, Human
cccagggccuuuccuucaccuccugcc

SEQ ID NO: 370174 - RNA, 22 nt, Human
cccagggcgccauggcugagga

SEQ ID NO: 370175 - RNA, 23 nt, Human
cccagggcgccauggcugaggaa

SEQ ID NO: 370176 - RNA, 23 nt, Human
cccagggcgccgggcggccggga

SEQ ID NO: 370177 - RNA, 32 nt, Human
cccagggcgucagcacccagcacugccacaug

SEQ ID NO: 370178 - RNA, 19 nt, Human
cccagggcuacagccugug

SEQ ID NO: 370179 - RNA, 26 nt, Human
cccagggcuauuuuuaccucccgccu

SEQ ID NO: 370180 - RNA, 32 nt, Human
cccagggcucacccagauucagagguggggaa

SEQ ID NO: 370181 - RNA, 32 nt, Human
cccagggcucagagcagaggccagaaccacug

SEQ ID NO: 370182 - RNA, 28 nt, Human
cccagggcucagcuucugccuccugucu

SEQ ID NO: 370183 - RNA, 32 nt, Human
cccagggcuccacucucaucuaaugucacagc

SEQ ID NO: 370184 - RNA, 32 nt, Human
cccagggcuccagugggcucugccacuggaca

SEQ ID NO: 370185 - RNA, 32 nt, Human
cccagggcuccaucuccgccucaggggcuucu

SEQ ID NO: 370186 - RNA, 21 nt, Human
cccagggcucccccacccagg

SEQ ID NO: 370187 - RNA, 32 nt, Human
cccagggcucccugggagauccugguuuguac

SEQ ID NO: 370188 - RNA, 17 nt, Human
cccagggcucugcccca

SEQ ID NO: 370189 - RNA, 22 nt, Human
cccagggcucugcuuccugccu

SEQ ID NO: 370190 - RNA, 31 nt, Human
cccagggcucuuuucucuaugccaaguugcc

SEQ ID NO: 370191 - RNA, 32 nt, Human
cccagggcugcugcucauccugggcaagcuga

SEQ ID NO: 370192 - RNA, 21 nt, Human
cccagggcugcugugauagga

SEQ ID NO: 370193 - RNA, 22 nt, Human
cccagggcugcugugauaggaa

SEQ ID NO: 370194 - RNA, 19 nt, Human
cccagggcuggagugcagu

SEQ ID NO: 370195 - RNA, 20 nt, Human
cccagggcuggagugcagug

SEQ ID NO: 370196 - RNA, 21 nt, Human
cccagggcuggagugcagugg

SEQ ID NO: 370197 - RNA, 32 nt, Human
cccagggcuggcccuagccacaaaggaacuuu

SEQ ID NO: 370198 - RNA, 32 nt, Human
cccagggcugggacugggcaugagguggucac

SEQ ID NO: 370199 - RNA, 32 nt, Human
cccccaucaccuucucaacugggaaaccccug

SEQ ID NO: 370200 - RNA, 20 nt, Human
cccccaucacugcuuucucc

SEQ ID NO: 370201 - RNA, 18 nt, Human
cccccaucaucccucucc

SEQ ID NO: 370202 - RNA, 17 nt, Human
cccccauccagccucca

SEQ ID NO: 370203 - RNA, 32 nt, Human
cccccaucccagguuguggaggcucgaggaag

SEQ ID NO: 370204 - RNA, 22 nt, Human
cccccauccccccgguuuccuc

SEQ ID NO: 370205 - RNA, 32 nt, Human
cccccauccccgcugugaacgugccacugaau

SEQ ID NO: 370206 - RNA, 32 nt, Human
cccccaucccucccagugcuggcuccaggcuc

SEQ ID NO: 370207 - RNA, 32 nt, Human
cccccaucccuggggaggcucccaccaucucg

SEQ ID NO: 370208 - RNA, 24 nt, Human
cccccauccucacacccacucauc

SEQ ID NO: 370209 - RNA, 32 nt, Human
cccccauccucaccaugucuucgacucaggac

SEQ ID NO: 370210 - RNA, 32 nt, Human
cccccauccucuuccuccucucgcugccagac

SEQ ID NO: 370211 - RNA, 18 nt, Human
cccccauccugcagcugg

SEQ ID NO: 370212 - RNA, 20 nt, Human
cccccauccugucugucucc

SEQ ID NO: 370213 - RNA, 20 nt, Human
cccccaucuccacuuccucc

SEQ ID NO: 370214 - RNA, 32 nt, Human
cccccaucucccccucuccaucuccucugucu

SEQ ID NO: 370215 - RNA, 32 nt, Human
cccccaucuccucuucuagcccaugcccuucc

SEQ ID NO: 370216 - RNA, 19 nt, Human
cccccaucuccugcuuuca

SEQ ID NO: 370217 - RNA, 32 nt, Human
cccccaucucuaggacagccccagccuuguca

SEQ ID NO: 370218 - RNA, 32 nt, Human
cccccaucucucaggcgcgauggcuacgggcg

SEQ ID NO: 370219 - RNA, 32 nt, Human
cccccaucugccacagggcagggguggggcaa

SEQ ID NO: 370220 - RNA, 32 nt, Human
cccccaucuucgggaccaggauuugcacagaa

SEQ ID NO: 370221 - RNA, 20 nt, Human
cccccaucuugucugucucc

SEQ ID NO: 370222 - RNA, 18 nt, Human
cccccaugaaaugccaua

SEQ ID NO: 370223 - RNA, 32 nt, Human
cccccaugaaguacuucaagggccaagcugcc

SEQ ID NO: 370224 - RNA, 32 nt, Human
cccccaugagagaaggaggggagcaggcccgu

SEQ ID NO: 370225 - RNA, 32 nt, Human
cccccaugagagcccuuucuuuucaaugggcu

SEQ ID NO: 370226 - RNA, 23 nt, Human
cccccaugaugaaguccaccuuu

SEQ ID NO: 370227 - RNA, 23 nt, Human
cccccaugaugaccuugagccuc

SEQ ID NO: 370228 - RNA, 21 nt, Human
cccccaugauucaauuaccuc

SEQ ID NO: 370229 - RNA, 32 nt, Human
cccccaugcacaccccugccgcucaugcgcgg

SEQ ID NO: 370230 - RNA, 20 nt, Human
cccccaugcaccccacccuc

SEQ ID NO: 370231 - RNA, 23 nt, Human
cccccaugcauggagcugccaca

SEQ ID NO: 370232 - RNA, 32 nt, Human
cccccaugccaccacccaccccaaacuuccag

SEQ ID NO: 370233 - RNA, 32 nt, Human
cccccaugcccacccuccugccuggaucccaa

SEQ ID NO: 370234 - RNA, 32 nt, Human
cccccaugcccagguguggugaagugaauccc

SEQ ID NO: 370235 - RNA, 23 nt, Human
cccccaugcccccaugccccucu

SEQ ID NO: 370236 - RNA, 19 nt, Human
cccccaugcccugccuacc

SEQ ID NO: 370237 - RNA, 23 nt, Human
cccccaugccugccccuuccccu

SEQ ID NO: 370238 - RNA, 20 nt, Human
cccccaugcucuugugccuu

SEQ ID NO: 370239 - RNA, 22 nt, Human
cccccaugcuggagugcagugg

SEQ ID NO: 370240 - RNA, 32 nt, Human
cccccaugcuguucuugugagaguucucauga

SEQ ID NO: 370241 - RNA, 32 nt, Human
cccccauggagcugaugaggccgagugucagg

SEQ ID NO: 370242 - RNA, 30 nt, Human
cccccauggaggaggaggagggggcggugg

SEQ ID NO: 370243 - RNA, 18 nt, Human
cccccauggaggaggcau

SEQ ID NO: 370244 - RNA, 32 nt, Human
cccccauggaguuuggugugcuugccuuuggc

SEQ ID NO: 370245 - RNA, 17 nt, Human
cccccauggcagagaca

SEQ ID NO: 370246 - RNA, 22 nt, Human
cccccauggcagagacacugca

SEQ ID NO: 370247 - RNA, 32 nt, Human
cccccauggcaggguacacucuccccacagcc

SEQ ID NO: 370248 - RNA, 32 nt, Human
cccccauggcagugcugccucuuguaggugcu

SEQ ID NO: 370249 - RNA, 17 nt, Human
cccccauggcugacaua

SEQ ID NO: 370250 - RNA, 20 nt, Human
cccccaugggacuugaaaua

SEQ ID NO: 370251 - RNA, 16 nt, Human
cccccauguguauaca

SEQ ID NO: 370252 - RNA, 32 nt, Human
cccccauguugcauaucagggugcucaaggau

SEQ ID NO: 370253 - RNA, 19 nt, Human
cccccauuaucccuccuca

SEQ ID NO: 370254 - RNA, 32 nt, Human
cccccauuaugccaccuccaaaguggcugccc

SEQ ID NO: 370255 - RNA, 32 nt, Human
cccccauucacuagaagcacugagagaugcgg

SEQ ID NO: 370256 - RNA, 32 nt, Human
cccccauucccaaguucucucuuuuaucccag

SEQ ID NO: 370257 - RNA, 32 nt, Human
cccccauuccccagccucugcugguagcaugu

SEQ ID NO: 370258 - RNA, 32 nt, Human
cccccauucccugagaauccuguuguuaguaa

SEQ ID NO: 370259 - RNA, 32 nt, Human
cccccauucccugguguccuucuuagagauga

SEQ ID NO: 370260 - RNA, 32 nt, Human
cccccauuccuucauucuagagcuagagugaa

SEQ ID NO: 370261 - RNA, 32 nt, Human
cccccauucgcaugucuucugccuggcaacac

SEQ ID NO: 370262 - RNA, 20 nt, Human
cccccauugaggacaacagc

SEQ ID NO: 370263 - RNA, 32 nt, Human
cccccauugcagcccccacccuguggguaguc

SEQ ID NO: 370264 - RNA, 29 nt, Human
cccccauugucuuuggugccugggcuucc

SEQ ID NO: 370265 - RNA, 23 nt, Human
cccccauuguuagaugaggucuu

SEQ ID NO: 370266 - RNA, 20 nt, Human
ccccccaagcuauuugcuca

SEQ ID NO: 370267 - RNA, 22 nt, Human
ccccccacacccacagcuugcu

SEQ ID NO: 370268 - RNA, 21 nt, Human
ccccccaccccaggcccugcc

SEQ ID NO: 370269 - RNA, 18 nt, Human
ccccccaccccgaucccc

SEQ ID NO: 370270 - RNA, 18 nt, Human
ccccccacccugccagcc

SEQ ID NO: 370271 - RNA, 16 nt, Human
ccccccaccucggguc

SEQ ID NO: 370272 - RNA, 23 nt, Human
ccccccagacccccaggagugga

SEQ ID NO: 370273 - RNA, 19 nt, Human
ccccccagaucuggugccu

SEQ ID NO: 370274 - RNA, 18 nt, Human
ccccccaucccaagggga

SEQ ID NO: 370275 - RNA, 24 nt, Human
ccccccgccccccgcaaaaaagua

SEQ ID NO: 370276 - RNA, 17 nt, Human
ccccccgcccccucccu

SEQ ID NO: 370277 - RNA, 23 nt, Human
ccccccggcccgacuccgcuggu

SEQ ID NO: 370278 - RNA, 21 nt, Human
ccccccggccguggaugcugc

SEQ ID NO: 370279 - RNA, 20 nt, Human
ccccccggcuucucgcgccu

SEQ ID NO: 370280 - RNA, 22 nt, Human
ccccccggcuucucgcgccuca

SEQ ID NO: 370281 - RNA, 23 nt, Human
ccccccgguaccgcagauccccg

SEQ ID NO: 370282 - RNA, 22 nt, Human
ccccccuccuccuccuccucug

SEQ ID NO: 370283 - RNA, 18 nt, Human
ccccccuccuuccucccu

SEQ ID NO: 370284 - RNA, 23 nt, Human
ccccccucuaggagagcuggcuc

SEQ ID NO: 370285 - RNA, 17 nt, Human
ccccccugauccucccu

SEQ ID NO: 370286 - RNA, 22 nt, Human
ccccccuucagcccccacccca

SEQ ID NO: 370287 - RNA, 15 nt, Human
ccccccuuccaggug

SEQ ID NO: 370288 - RNA, 15 nt, Human
ccccccuuccgccca

SEQ ID NO: 370289 - RNA, 20 nt, Human
ccccccuucucaccuccuca

SEQ ID NO: 370290 - RNA, 20 nt, Human
ccccccuuuccccggaugcu

SEQ ID NO: 370291 - RNA, 24 nt, Human
ccccccuuucccuggagcaccugc

SEQ ID NO: 370292 - RNA, 32 nt, Human
cccccgaaaccugggcuggagugagguggaag

SEQ ID NO: 370293 - RNA, 32 nt, Human
cccccgaagggaggggaggccaggaggggagc

SEQ ID NO: 370294 - RNA, 32 nt, Human
cccccgaaguucuggcucggggcacagggcac

SEQ ID NO: 370295 - RNA, 32 nt, Human
cccccgacaccaggaggagggccaggagaguu

SEQ ID NO: 370296 - RNA, 32 nt, Human
cccccgacauccugccucuacacugcaccauc

SEQ ID NO: 370297 - RNA, 32 nt, Human
cccccgacaugccucuuccccuuggcaagcuc

SEQ ID NO: 370298 - RNA, 24 nt, Human
cccccgaccaaaccccaagaccug

SEQ ID NO: 370299 - RNA, 32 nt, Human
cccccgaccacacaaacccagccuggggagga

SEQ ID NO: 370300 - RNA, 32 nt, Human
cccccgaccaccuccuccucugccucaaagac

SEQ ID NO: 370301 - RNA, 32 nt, Human
cccccgaccagccucgggccaggcuagggcgu

SEQ ID NO: 370302 - RNA, 20 nt, Human
cccccgaccccaccccggga

SEQ ID NO: 370303 - RNA, 32 nt, Human
cccccgaccgcacuccagccugggcgacagag

SEQ ID NO: 370304 - RNA, 19 nt, Human
cccccgacucacucagacc

SEQ ID NO: 370305 - RNA, 21 nt, Human
cccccgacucccuggagcuug

SEQ ID NO: 370306 - RNA, 24 nt, Human
cccccgacugccacucuggaccua

SEQ ID NO: 370307 - RNA, 32 nt, Human
cccccgacugugcugcucgcgaaggucccaca

SEQ ID NO: 370308 - RNA, 23 nt, Human
cccccgacuucacacggcggcuu

SEQ ID NO: 370309 - RNA, 20 nt, Human
cccccgacuucgccgacucc

SEQ ID NO: 370310 - RNA, 32 nt, Human
cccccgagaccacccccacccuggggaagcgu

SEQ ID NO: 370311 - RNA, 21 nt, Human
cccccgagaugagcagaucca

SEQ ID NO: 370312 - RNA, 32 nt, Human
cccccgagcauggcagaggccuggcuuugcaa

SEQ ID NO: 370313 - RNA, 32 nt, Human
cccccgagcccgcggcacaggcggcggcggcg

SEQ ID NO: 370314 - RNA, 32 nt, Human
cccccgaggaaggggucgaggagaagcuuggu

SEQ ID NO: 370315 - RNA, 32 nt, Human
cccccgaggaggaggaggaggacgcgggccug

SEQ ID NO: 370316 - RNA, 32 nt, Human
cccccgaggaggaggaggaggaggaggacgcg

SEQ ID NO: 370317 - RNA, 21 nt, Human
cccccgaucccuccgggucua

SEQ ID NO: 370318 - RNA, 32 nt, Human
cccccgaugccaccacagccaucgccacugcc

SEQ ID NO: 370319 - RNA, 22 nt, Human
cccccgauuucccggcgggauc

SEQ ID NO: 370320 - RNA, 32 nt, Human
cccccgcaagccccagccccgaggaccgucca

SEQ ID NO: 370321 - RNA, 32 nt, Human
cccccgcacucccacagggcucagggugggcu

SEQ ID NO: 370322 - RNA, 32 nt, Human
cccccgcagccccugcugucaccccugcacag

SEQ ID NO: 370323 - RNA, 19 nt, Human
cccccgcaggccaccaggc

SEQ ID NO: 370324 - RNA, 32 nt, Human
cccccgcagucagccucuccuugaguguccuu

SEQ ID NO: 370325 - RNA, 32 nt, Human
cccccgccaccuguacucacccucacgcucuu

SEQ ID NO: 370326 - RNA, 32 nt, Human
cccccgccacgaagguugagaacaaagccagg

SEQ ID NO: 370327 - RNA, 32 nt, Human
cccccgccagcauucuggaugucagaggaggg

SEQ ID NO: 370328 - RNA, 20 nt, Human
cccccgcccagccccugccc

SEQ ID NO: 370329 - RNA, 32 nt, Human
cccccgccccacuccagccaguguagggagcu

SEQ ID NO: 370330 - RNA, 21 nt, Human
cccccgccccacucccggggc

SEQ ID NO: 370331 - RNA, 32 nt, Human
cccccgccccagagaaacacacagagcuguuc

SEQ ID NO: 370332 - RNA, 21 nt, Human
cccccgccccaggcccuuccc

SEQ ID NO: 370333 - RNA, 32 nt, Human
cccccgccccucucuucccuggcuggacuugc

SEQ ID NO: 370334 - RNA, 32 nt, Human
cccccgcccgcacuccagagccggcugagaac

SEQ ID NO: 370335 - RNA, 32 nt, Human
cccccgcccucccacccgcucagaccugguug

SEQ ID NO: 370336 - RNA, 18 nt, Human
cccccgcccuccgggaaa

SEQ ID NO: 370337 - RNA, 32 nt, Human
cccccgcccucggggugcgaggcggcagcagg

SEQ ID NO: 370338 - RNA, 32 nt, Human
cccccgccgcugccauggcggcagcuccgccg

SEQ ID NO: 370339 - RNA, 32 nt, Human
cccccgccuaaaggggguacugagccuccugu

SEQ ID NO: 370340 - RNA, 32 nt, Human
cccccgccuccaccacuuuccaccaucagcug

SEQ ID NO: 370341 - RNA, 32 nt, Human
cccccgccuccaggcugggccuggccuauuua

SEQ ID NO: 370342 - RNA, 32 nt, Human
cccccgccuccuccuccccauuuccgggcucc

SEQ ID NO: 370343 - RNA, 32 nt, Human
cccccgccucuucagcaagaccacagccauga

SEQ ID NO: 370344 - RNA, 32 nt, Human
cccccgccugcugugcacccagcuccaguguc

SEQ ID NO: 370345 - RNA, 32 nt, Human
cccccgccuuucuucccuccgcgacccgggcc

SEQ ID NO: 370346 - RNA, 22 nt, Human
cccccgcgagccccagcgcccu

SEQ ID NO: 370347 - RNA, 32 nt, Human
cccccgcgccagcccagccccagccugagugc

SEQ ID NO: 370348 - RNA, 32 nt, Human
cccccgcgcccagccaucaaaaugcuuuuuau

SEQ ID NO: 370349 - RNA, 21 nt, Human
cccccgcgcccuccucggggc

SEQ ID NO: 370350 - RNA, 23 nt, Human
cccccgcgccuucaggcccaccc

SEQ ID NO: 370351 - RNA, 32 nt, Human
cccccgcggccgcccgggccccggcuggcgag

SEQ ID NO: 370352 - RNA, 21 nt, Human
cccccgcgucgggccccgccc

SEQ ID NO: 370353 - RNA, 32 nt, Human
cccccgcuacacuccagccuggucgacagagu

SEQ ID NO: 370354 - RNA, 32 nt, Human
cccccgcucccagguuccccucuggugucaug

SEQ ID NO: 370355 - RNA, 32 nt, Human
cccccgcuccccaggacuucagagauguugca

SEQ ID NO: 370356 - RNA, 32 nt, Human
cccccgcucgccccuucucucccguccucacc

SEQ ID NO: 370357 - RNA, 32 nt, Human
cccccgcucugccaucagccccugcugcuccu

SEQ ID NO: 370358 - RNA, 32 nt, Human
cccccgcugccgcccgggccccggcugccguc

SEQ ID NO: 370359 - RNA, 32 nt, Human
cccccgcugcucccuugaccucuuguaggaau

SEQ ID NO: 370360 - RNA, 32 nt, Human
cccccgcuggucccucugggcaugcugugcuc

SEQ ID NO: 370361 - RNA, 22 nt, Human
cccccgcuuccuccuagcccug

SEQ ID NO: 370362 - RNA, 32 nt, Human
cccccggaccagugaagcuggagccagggugu

SEQ ID NO: 370363 - RNA, 24 nt, Human
cccccggacgccgcccagcuugcu

SEQ ID NO: 370364 - RNA, 25 nt, Human
cccccggacgccgcccagcuugcuu

SEQ ID NO: 370365 - RNA, 32 nt, Human
cccccggagagucaggcccacagagcaugccc

SEQ ID NO: 370366 - RNA, 32 nt, Human
cccccggaggcuguggccuggugucagggcgg

SEQ ID NO: 370367 - RNA, 32 nt, Human
cccccggaguagcugggaccacaggcacacac

SEQ ID NO: 370368 - RNA, 32 nt, Human
cccccggcaacaaaaguaucuucuugcucccu

SEQ ID NO: 370369 - RNA, 22 nt, Human
cccccggcacgaggccccgccc

SEQ ID NO: 370370 - RNA, 22 nt, Human
cccccggcagccagugcuccuu

SEQ ID NO: 370371 - RNA, 32 nt, Human
cccccggcagcucuuugcaaagcugcuugaaa

SEQ ID NO: 370372 - RNA, 32 nt, Human
cccccggccacugucucggggcccaccucucg

SEQ ID NO: 370373 - RNA, 19 nt, Human
cccccggccagugcugcug

SEQ ID NO: 370374 - RNA, 19 nt, Human
cccccggccaucgcucccu

SEQ ID NO: 370375 - RNA, 21 nt, Human
cccccggcccagcccugcagg

SEQ ID NO: 370376 - RNA, 20 nt, Human
cccccggccccacuccgccc

SEQ ID NO: 370377 - RNA, 23 nt, Human
cccccggcccccaaaaccugccc

SEQ ID NO: 370378 - RNA, 24 nt, Human
cccccggcccuggcuuugggaccu

SEQ ID NO: 370379 - RNA, 20 nt, Human
cccccggccugccugccucu

SEQ ID NO: 370380 - RNA, 32 nt, Human
cccccggccuggguggggagagcgagcugggu

SEQ ID NO: 370381 - RNA, 25 nt, Human
cccccggcgcucacgcucucggggc

SEQ ID NO: 370382 - RNA, 20 nt, Human
cccccggcucuacgggggcc

SEQ ID NO: 370383 - RNA, 32 nt, Human
cccccggcugccacuguuugcugguggucucc

SEQ ID NO: 370384 - RNA, 22 nt, Human
cccccggcugguccggggucug

SEQ ID NO: 370385 - RNA, 27 nt, Human
cccccgggaaagcagagguugcaguga

SEQ ID NO: 370386 - RNA, 28 nt, Human
cccccgggaggugcugccucgucuaccc

SEQ ID NO: 370387 - RNA, 22 nt, Human
cccccgggagucagacuggcuu

SEQ ID NO: 370388 - RNA, 27 nt, Human
cccccgggcaagcggagguugcaguga

SEQ ID NO: 370389 - RNA, 15 nt, Human
cccccgggcggccca

SEQ ID NO: 370390 - RNA, 19 nt, Human
cccccgggcugugcugcug

SEQ ID NO: 370391 - RNA, 27 nt, Human
cccccggggaaaucaagguugcaguga

SEQ ID NO: 370392 - RNA, 27 nt, Human
cccccggggaagcacagauugcaguga

SEQ ID NO: 370393 - RNA, 27 nt, Human
cccccggggaagcagagguuguaguga

SEQ ID NO: 370394 - RNA, 27 nt, Human
cccccggggaagcagaguuugcaguga

SEQ ID NO: 370395 - RNA, 27 nt, Human
cccccggggaagcggagguugcaguga

SEQ ID NO: 370396 - RNA, 22 nt, Human
cccccggggcagcaggagccag

SEQ ID NO: 370397 - RNA, 32 nt, Human
cccccggggccaggagccccuugagcagagcu

SEQ ID NO: 370398 - RNA, 23 nt, Human
cccccggggccauggcccugccc

SEQ ID NO: 370399 - RNA, 27 nt, Human
cccccggguagacagagguugcaguga

SEQ ID NO: 370400 - RNA, 32 nt, Human
cccccgggucaccuuuugccuggucauccugu

SEQ ID NO: 370401 - RNA, 32 nt, Human
cccccggguuccuuccuagaaauguggcagcc

SEQ ID NO: 370402 - RNA, 32 nt, Human
cccccggugcuagccgagaaagcccgaguucc

SEQ ID NO: 370403 - RNA, 32 nt, Human
cccccguaaggagcagaguccuuuguacugac

SEQ ID NO: 370404 - RNA, 32 nt, Human
cccccguagagaagauccuagagcagaaggag

SEQ ID NO: 370405 - RNA, 32 nt, Human
cccccguccacuuacugcgugaccucagccug

SEQ ID NO: 370406 - RNA, 32 nt, Human
cccccgucccacgccaacuuuucagacacagc

SEQ ID NO: 370407 - RNA, 32 nt, Human
cccccguccccucccuuccuuauuuauuccug

SEQ ID NO: 370408 - RNA, 16 nt, Human
cccccgucccugcugg

SEQ ID NO: 370409 - RNA, 32 nt, Human
cccccgucgcauaaccaguuccaucauccugg

SEQ ID NO: 370410 - RNA, 32 nt, Human
cccccgucuccccagccuguugcuuucucgug

SEQ ID NO: 370411 - RNA, 32 nt, Human
cccccgucuccuccccuucuccccuuggugcc

SEQ ID NO: 370412 - RNA, 32 nt, Human
cccccgucucggcccagccucuguauucucca

SEQ ID NO: 370413 - RNA, 32 nt, Human
cccccgucuguggguuucugguccaguguccc

SEQ ID NO: 370414 - RNA, 32 nt, Human
cccccgugcccugcacaaaaaccaccaccagc

SEQ ID NO: 370415 - RNA, 32 nt, Human
cccccgugugggaaguuggugucacuuccccu

SEQ ID NO: 370416 - RNA, 32 nt, Human
cccccguuagcccagauucaaaaggugaacau

SEQ ID NO: 370417 - RNA, 22 nt, Human
cccccguuagcuuccugcagga

SEQ ID NO: 370418 - RNA, 32 nt, Human
cccccguucaagguauagucugccuuuaaggg

SEQ ID NO: 370419 - RNA, 32 nt, Human
cccccguucccacucggggucucccucagggc

SEQ ID NO: 370420 - RNA, 32 nt, Human
cccccuaaaaauacaaaaauuagccgggcgug

SEQ ID NO: 370421 - RNA, 21 nt, Human
cccccuaaggcacuuugggga

SEQ ID NO: 370422 - RNA, 32 nt, Human
cccccuaccagugcaugagacacacaccuacc

SEQ ID NO: 370423 - RNA, 19 nt, Human
cccccuacccacccuggaa

SEQ ID NO: 370424 - RNA, 32 nt, Human
cccccuacuacaagagacccagccccuaacag

SEQ ID NO: 370425 - RNA, 19 nt, Human
cccccuacucuggggcuug

SEQ ID NO: 370426 - RNA, 18 nt, Human
cccccuacuugcuggcuc

SEQ ID NO: 370427 - RNA, 32 nt, Human
cccccuagaggaacuuuccuuccuuuccagca

SEQ ID NO: 370428 - RNA, 27 nt, Human
cccccuagccgcagccccccucugcug

SEQ ID NO: 370429 - RNA, 32 nt, Human
cccccuagccucccgcccucgcccucacugcu

SEQ ID NO: 370430 - RNA, 32 nt, Human
cccccuagggcgacaggagccagcgggacgcc

SEQ ID NO: 370431 - RNA, 32 nt, Human
cccccuaggggccaggacaggaccaguuuacc

SEQ ID NO: 370432 - RNA, 32 nt, Human
cccccuagugccugccccacagcccugaggaa

SEQ ID NO: 370433 - RNA, 32 nt, Human
cccccuauccuggaagucaguggggagagguu

SEQ ID NO: 370434 - RNA, 32 nt, Human
cccccuauccuuuuucucuccaccccaucccc

SEQ ID NO: 370435 - RNA, 32 nt, Human
cccccucaaccaggaacuggggauuugggaug

SEQ ID NO: 370436 - RNA, 32 nt, Human
cccccucaagccccagcagcccucaacaggcc

SEQ ID NO: 370437 - RNA, 32 nt, Human
cccccucacaaaccaccccacagauccaaccc

SEQ ID NO: 370438 - RNA, 32 nt, Human
cccccucaccauccuccgaccucacccacccc

SEQ ID NO: 370439 - RNA, 32 nt, Human
cccccucaccccaccacucccugggcacccaa

SEQ ID NO: 370440 - RNA, 32 nt, Human
cccccucacuuuugcucagccuagcagucuac

SEQ ID NO: 370441 - RNA, 32 nt, Human
cccccucagacuccgcugcgucgucucucggc

SEQ ID NO: 370442 - RNA, 32 nt, Human
cccccucagagcccccagcccccaggagagcc

SEQ ID NO: 370443 - RNA, 20 nt, Human
cccccucagcccugugguua

SEQ ID NO: 370444 - RNA, 32 nt, Human
cccccucagccuggcagccucuggacagagag

SEQ ID NO: 370445 - RNA, 21 nt, Human
cccccucagcuccuaucucug

SEQ ID NO: 370446 - RNA, 32 nt, Human
cccccucauccccucaccuccuucucuuuacc

SEQ ID NO: 370447 - RNA, 32 nt, Human
cccccucauggcagcaggugggcagaucaaag

SEQ ID NO: 370448 - RNA, 32 nt, Human
cccccuccaagaagcaaguaccgaaaccaccu

SEQ ID NO: 370449 - RNA, 32 nt, Human
cccccuccacaccucuagaccuggggccuccg

SEQ ID NO: 370450 - RNA, 32 nt, Human
cccccuccacagcaaccaaucacaaccauaaa

SEQ ID NO: 370451 - RNA, 32 nt, Human
cccccuccacagccacagcccccgcccccucc

SEQ ID NO: 370452 - RNA, 32 nt, Human
cccccuccacccaguggccacgcccagcaccc

SEQ ID NO: 370453 - RNA, 26 nt, Human
cccccuccacccccacccugaggcuc

SEQ ID NO: 370454 - RNA, 25 nt, Human
cccccuccaccccccuuccgugccc

SEQ ID NO: 370455 - RNA, 32 nt, Human
cccccuccaccgcgccugccucccaggccuga

SEQ ID NO: 370456 - RNA, 32 nt, Human
cccccuccaccucuccccuuggugccuaaccc

SEQ ID NO: 370457 - RNA, 32 nt, Human
cccccuccagagagugaggagggggccugaga

SEQ ID NO: 370458 - RNA, 32 nt, Human
cccccuccagccccaucucugucucaaggaga

SEQ ID NO: 370459 - RNA, 32 nt, Human
cccccuccaggaugccgccaggugucccucuc

SEQ ID NO: 370460 - RNA, 23 nt, Human
cccccuccaggccugacuggcuc

SEQ ID NO: 370461 - RNA, 32 nt, Human
cccccuccaucccagcccacuggaccagaacu

SEQ ID NO: 370462 - RNA, 32 nt, Human
cccccuccaucucuguguacacaaacagguac

SEQ ID NO: 370463 - RNA, 32 nt, Human
cccccuccaugucccuggacccuuaagauauc

SEQ ID NO: 370464 - RNA, 32 nt, Human
cccccucccagagcucaccuggugccagguaa

SEQ ID NO: 370465 - RNA, 32 nt, Human
cccccucccagcccuugcccagccugggggag

SEQ ID NO: 370466 - RNA, 32 nt, Human
cccccucccaggcaaucuccccacuccagccc

SEQ ID NO: 370467 - RNA, 32 nt, Human
cccccuccccaacucuaaccagaccccauccc

SEQ ID NO: 370468 - RNA, 20 nt, Human
cccccuccccacucuggcuc

SEQ ID NO: 370469 - RNA, 32 nt, Human
cccccuccccauccaggggcuguguauuauug

SEQ ID NO: 370470 - RNA, 32 nt, Human
cccccuccccauccccagcccagccgagggaa

SEQ ID NO: 370471 - RNA, 21 nt, Human
cccccuccccccuagaaccug

SEQ ID NO: 370472 - RNA, 20 nt, Human
cccccuccccccuuugcucu

SEQ ID NO: 370473 - RNA, 18 nt, Human
cccccucccccuccucuc

SEQ ID NO: 370474 - RNA, 32 nt, Human
cccccucccccuccugcugugcuggaauucca

SEQ ID NO: 370475 - RNA, 25 nt, Human
cccccucccccuucucccaccccug

SEQ ID NO: 370476 - RNA, 25 nt, Human
cccccucccccuuugcauccagcuc

SEQ ID NO: 370477 - RNA, 18 nt, Human
cccccuccccuccagggg

SEQ ID NO: 370478 - RNA, 32 nt, Human
cccccuccccucccccagaccuccaccuccuc

SEQ ID NO: 370479 - RNA, 20 nt, Human
cccccuccccucccuuuuug

SEQ ID NO: 370480 - RNA, 32 nt, Human
cccccuccccuccgacaaggcccagccagauu

SEQ ID NO: 370481 - RNA, 32 nt, Human
cccccuccccuccgccgcgccugggccucugc

SEQ ID NO: 370482 - RNA, 32 nt, Human
cccccuccccuccugcagccuccugcgccccg

SEQ ID NO: 370483 - RNA, 23 nt, Human
cccccuccccuccuucucccucu

SEQ ID NO: 370484 - RNA, 23 nt, Human
cccccuccccucugaggagccug

SEQ ID NO: 370485 - RNA, 18 nt, Human
cccccuccccucugccca

SEQ ID NO: 370486 - RNA, 24 nt, Human
cccccuccccucugggugagccug

SEQ ID NO: 370487 - RNA, 32 nt, Human
cccccuccccugcccugcuccagcucacacgu

SEQ ID NO: 370488 - RNA, 32 nt, Human
cccccuccccuucaccccuuccccuccccgcc

SEQ ID NO: 370489 - RNA, 28 nt, Human
cccccuccccuucucccuugccuaucug

SEQ ID NO: 370490 - RNA, 22 nt, Human
cccccuccccuucuccuccucu

SEQ ID NO: 370491 - RNA, 20 nt, Human
cccccuccccuuuagcucug

SEQ ID NO: 370492 - RNA, 32 nt, Human
cccccucccgcccccgcacgcggaccgcccuc

SEQ ID NO: 370493 - RNA, 20 nt, Human
cccccucccuaccucugccu

SEQ ID NO: 370494 - RNA, 32 nt, Human
cccccucccuccccgcccgcacggccaccaac

SEQ ID NO: 370495 - RNA, 32 nt, Human
cccccucccucggguuggguggcccagccagc

SEQ ID NO: 370496 - RNA, 19 nt, Human
cccccucccucuggggccu

SEQ ID NO: 370497 - RNA, 22 nt, Human
cccccucccugcucccagcucu

SEQ ID NO: 370498 - RNA, 32 nt, Human
cccccucccuggaucaugcacagaaacuuucg

SEQ ID NO: 370499 - RNA, 18 nt, Human
cccccucccuuagcucug

SEQ ID NO: 370500 - RNA, 32 nt, Human
cccccucccuuucccgcucuucuugcccaccc

SEQ ID NO: 370501 - RNA, 23 nt, Human
cccccucccuuucccuuaacucu

SEQ ID NO: 370502 - RNA, 20 nt, Human
cccccuccgcccccaugcuc

SEQ ID NO: 370503 - RNA, 32 nt, Human
cccccuccggugugcacacaggccagugagcg

SEQ ID NO: 370504 - RNA, 18 nt, Human
cccccuccguccugcccu

SEQ ID NO: 370505 - RNA, 32 nt, Human
cccccuccuaaacauucguacacacacaaaca

SEQ ID NO: 370506 - RNA, 32 nt, Human
cccccuccucaccgucuucucccggccuauua

SEQ ID NO: 370507 - RNA, 32 nt, Human
cccccuccuccacccaccccuaacucucagcc

SEQ ID NO: 370508 - RNA, 32 nt, Human
cccccuccuccaccccagccugcugcugcuac

SEQ ID NO: 370509 - RNA, 32 nt, Human
cccccuccuccagcaauagcauccaaggggcc

SEQ ID NO: 370510 - RNA, 32 nt, Human
cccccuccuccaggagaacucgcggcugggcu

SEQ ID NO: 370511 - RNA, 32 nt, Human
cccccuccuccccuccuuucuguccucucucu

SEQ ID NO: 370512 - RNA, 20 nt, Human
cccccuccucccugccuucu

SEQ ID NO: 370513 - RNA, 21 nt, Human
cccccuccucccugccuucuu

SEQ ID NO: 370514 - RNA, 20 nt, Human
cccccuccuccuccaaccca

SEQ ID NO: 370515 - RNA, 32 nt, Human
cccccuccucucuccaggcuuuagaucucuga

SEQ ID NO: 370516 - RNA, 32 nt, Human
cccccuccuuaggccccagccugggcccagac

SEQ ID NO: 370517 - RNA, 31 nt, Human
cccccuccuuccccugggccuggucacugca

SEQ ID NO: 370518 - RNA, 17 nt, Human
cccccuccuuccucccu

SEQ ID NO: 370519 - RNA, 32 nt, Human
cccccuccuuucucccccuaaacuuuggccgg

SEQ ID NO: 370520 - RNA, 32 nt, Human
cccccucgcucccauguuuccacccggcaccc

SEQ ID NO: 370521 - RNA, 32 nt, Human
cccccucggccccucaccaccucuuucuacag

SEQ ID NO: 370522 - RNA, 32 nt, Human
cccccucgucccaaaucucucucccaguacac

SEQ ID NO: 370523 - RNA, 22 nt, Human
cccccucguccucgcucaccuu

SEQ ID NO: 370524 - RNA, 21 nt, Human
cccccucuaucccuaacccug

SEQ ID NO: 370525 - RNA, 32 nt, Human
cccccucuccaccuccuggggcccaucaugaa

SEQ ID NO: 370526 - RNA, 32 nt, Human
cccccucucccauuuauucccuugaaggugcc

SEQ ID NO: 370527 - RNA, 22 nt, Human
cccccucucccccuccuuucuu

SEQ ID NO: 370528 - RNA, 23 nt, Human
cccccucucccuccuccccuuug

SEQ ID NO: 370529 - RNA, 18 nt, Human
cccccucucccuccuugc

SEQ ID NO: 370530 - RNA, 21 nt, Human
cccccucucccuuuccuuccu

SEQ ID NO: 370531 - RNA, 22 nt, Human
cccccucucccuuuccuuccuu

SEQ ID NO: 370532 - RNA, 22 nt, Human
cccccucuccucccagccucug

SEQ ID NO: 370533 - RNA, 21 nt, Human
cccccucuccucccagcugcu

SEQ ID NO: 370534 - RNA, 20 nt, Human
cccccucuccuccuuuguuc

SEQ ID NO: 370535 - RNA, 23 nt, Human
cccccucuccugugagacuggcu

SEQ ID NO: 370536 - RNA, 19 nt, Human
cccccucuccuuccgccca

SEQ ID NO: 370537 - RNA, 22 nt, Human
cccccucuccuuuugcucucuu

SEQ ID NO: 370538 - RNA, 18 nt, Human
cccccucucggcugcagc

SEQ ID NO: 370539 - RNA, 21 nt, Human
cccccucucuccccaucucug

SEQ ID NO: 370540 - RNA, 32 nt, Human
cccccucucuccccaucucuggucucaaagcc

SEQ ID NO: 370541 - RNA, 32 nt, Human
cccccucucucccucccuucucucuaauuccc

SEQ ID NO: 370542 - RNA, 32 nt, Human
cccccucucucccuggugucaacucgauuccu

SEQ ID NO: 370543 - RNA, 32 nt, Human
cccccucucugcuugcagacagugccacggcu

SEQ ID NO: 370544 - RNA, 32 nt, Human
cccccucucugugcccugguccccuugccgcc

SEQ ID NO: 370545 - RNA, 32 nt, Human
cccccucugaaagggauggagaugcugaugag

SEQ ID NO: 370546 - RNA, 32 nt, Human
cccccucugcaaccuuucucucugggggcugu

SEQ ID NO: 370547 - RNA, 19 nt, Human
cccccucugcaccucgggc

SEQ ID NO: 370548 - RNA, 32 nt, Human
cccccucugcauuuacacagauuugagucaga

SEQ ID NO: 370549 - RNA, 32 nt, Human
cccccucugccccucuccacucuuggcaugga

SEQ ID NO: 370550 - RNA, 32 nt, Human
cccccucugcccugagccaggagaccugccac

SEQ ID NO: 370551 - RNA, 32 nt, Human
cccccucugcccugccccuugucauggaccau

SEQ ID NO: 370552 - RNA, 32 nt, Human
cccccucugccucuccccaccuucuuuggagc

SEQ ID NO: 370553 - RNA, 32 nt, Human
cccccucugccuggagacuccugcucauccau

SEQ ID NO: 370554 - RNA, 32 nt, Human
cccccucuguucugcugauuguagggaugugc

SEQ ID NO: 370555 - RNA, 21 nt, Human
cccccucuuaguucuucgcgg

SEQ ID NO: 370556 - RNA, 32 nt, Human
cccccucuucaggcugcugcaggaggccaggc

SEQ ID NO: 370557 - RNA, 32 nt, Human
cccccucuuccagaggaggagcagggaucugg

SEQ ID NO: 370558 - RNA, 18 nt, Human
cccccucuuccccgccca

SEQ ID NO: 370559 - RNA, 32 nt, Human
cccccucuucucccagucuucagucuuaaguc

SEQ ID NO: 370560 - RNA, 22 nt, Human
cccccucuucucccuaauccug

SEQ ID NO: 370561 - RNA, 26 nt, Human
cccccucuucucucccucccgcccug

SEQ ID NO: 370562 - RNA, 32 nt, Human
cccccucuucuuccucuguagagaugcaagaa

SEQ ID NO: 370563 - RNA, 32 nt, Human
cccccucuucuuucucuuuuucuugacucuuu

SEQ ID NO: 370564 - RNA, 22 nt, Human
cccccucuugucucccacccug

SEQ ID NO: 370565 - RNA, 23 nt, Human
cccccugaagccugcaaacguug

SEQ ID NO: 370566 - RNA, 32 nt, Human
cccccugaaggugaguaugggaggcaggggcc

SEQ ID NO: 370567 - RNA, 32 nt, Human
cccccugaaggugauagagagugagaaguuag

SEQ ID NO: 370568 - RNA, 32 nt, Human
cccccugaccucagcuuccugccugugcccca

SEQ ID NO: 370569 - RNA, 32 nt, Human
cccccugacucucaggccacagcuccggccac

SEQ ID NO: 370570 - RNA, 32 nt, Human
cccccugagauccagcccuacuucuugcacug

SEQ ID NO: 370571 - RNA, 32 nt, Human
cccccugagcagcugggacuacaggcacacac

SEQ ID NO: 370572 - RNA, 21 nt, Human
cccccugagcgccuggccaca

SEQ ID NO: 370573 - RNA, 32 nt, Human
cccccugaggggccccucacucuuacccaaga

SEQ ID NO: 370574 - RNA, 32 nt, Human
cccccugagguugugcuuucucagggauaugc

SEQ ID NO: 370575 - RNA, 32 nt, Human
cccccugaguagcugggauuacaggugcacca

SEQ ID NO: 370576 - RNA, 32 nt, Human
cccccugaguagcugggauuacaggugccugc

SEQ ID NO: 370577 - RNA, 32 nt, Human
cccccugauaggaccugguuuauucacaggcu

SEQ ID NO: 370578 - RNA, 32 nt, Human
cccccugauugcuggcaucugccucuucuccu

SEQ ID NO: 370579 - RNA, 32 nt, Human
cccccugcacauucggggucucagcccccagg

SEQ ID NO: 370580 - RNA, 32 nt, Human
cccccugcaguuucuugcuuucuucagcacau

SEQ ID NO: 370581 - RNA, 32 nt, Human
cccccugcaucaccaggcaucuuugccgaggc

SEQ ID NO: 370582 - RNA, 32 nt, Human
cccccugcauugauugcugccccugugaagaa

SEQ ID NO: 370583 - RNA, 32 nt, Human
cccccugcauuuuccuucuauccucacuggga

SEQ ID NO: 370584 - RNA, 32 nt, Human
cccccugccacccugcacugccccggcucccc

SEQ ID NO: 370585 - RNA, 32 nt, Human
cccccugccacccuggcacuucccagggccug

SEQ ID NO: 370586 - RNA, 32 nt, Human
cccccugccauccagucuggccccaguaccua

SEQ ID NO: 370587 - RNA, 32 nt, Human
cccccugccauccucugcugcuacccacacag

SEQ ID NO: 370588 - RNA, 32 nt, Human
cccccugcccacugaccugugaugacaucucu

SEQ ID NO: 370589 - RNA, 32 nt, Human
cccccugcccagcugcuccucccaccuggcca

SEQ ID NO: 370590 - RNA, 32 nt, Human
cccccugccccgccaaacacacaauuggccuu

SEQ ID NO: 370591 - RNA, 32 nt, Human
cccccugccccucgggcaccagccugcauaug

SEQ ID NO: 370592 - RNA, 32 nt, Human
cccccugcccguguacauagugcauuguuucu

SEQ ID NO: 370593 - RNA, 32 nt, Human
cccccugcccucuccccucucucccucccccu

SEQ ID NO: 370594 - RNA, 32 nt, Human
cccccugcccucuccccugccucucucuccca

SEQ ID NO: 370595 - RNA, 32 nt, Human
cccccugcccuuuucuugcccugucucugaac

SEQ ID NO: 370596 - RNA, 32 nt, Human
cccccugccgcaucuuugaccugggcagcgac

SEQ ID NO: 370597 - RNA, 32 nt, Human
cccccugccugagcccaggacccacuggagcc

SEQ ID NO: 370598 - RNA, 32 nt, Human
cccccugccuuagagcaccuuccagagaagcu

SEQ ID NO: 370599 - RNA, 32 nt, Human
cccccugcgucacccacucccugcacuucugc

SEQ ID NO: 370600 - RNA, 32 nt, Human
cccccugcguggcaggaguccugggaguuccc

SEQ ID NO: 370601 - RNA, 32 nt, Human
cccccugcucacccucugggcuuugucuccga

SEQ ID NO: 370602 - RNA, 32 nt, Human
cccccugcuccaggacaggccaugggcaagcu

SEQ ID NO: 370603 - RNA, 32 nt, Human
cccccugcuccuguuucagcgccugcuccagc

SEQ ID NO: 370604 - RNA, 32 nt, Human
cccccugcucuagccaagguggccgcagucug

SEQ ID NO: 370605 - RNA, 32 nt, Human
cccccugcuucagucccuucgccaugcuuccc

SEQ ID NO: 370606 - RNA, 32 nt, Human
cccccugcuuccccuucuaccuccccuacccu

SEQ ID NO: 370607 - RNA, 32 nt, Human
cccccugcuuggccaggaggugagagaaggau

SEQ ID NO: 370608 - RNA, 32 nt, Human
cccccugcuugugcggcgaugaucuguuugug

SEQ ID NO: 370609 - RNA, 32 nt, Human
cccccugcuuuuacuuucuucucugucuuuaa

SEQ ID NO: 370610 - RNA, 21 nt, Human
cccccuggacuccuggcccug

SEQ ID NO: 370611 - RNA, 32 nt, Human
cccccuggagcugggagagaggccgggguuag

SEQ ID NO: 370612 - RNA, 32 nt, Human
cccccuggagcuuugauuuugcacugagccaa

SEQ ID NO: 370613 - RNA, 18 nt, Human
cccccuggaguccuuccc

SEQ ID NO: 370614 - RNA, 32 nt, Human
cccccuggcagggugagguagagccggaccgu

SEQ ID NO: 370615 - RNA, 20 nt, Human
cccccuggccccgccugccc

SEQ ID NO: 370616 - RNA, 32 nt, Human
cccccuggccucccccacuuucuuucuuucuu

SEQ ID NO: 370617 - RNA, 22 nt, Human
cccccuggcugagccccugucc

SEQ ID NO: 370618 - RNA, 22 nt, Human
cccccuggcuggagcugaccca

SEQ ID NO: 370619 - RNA, 32 nt, Human
cccccugggaggaaggcuuugcgcuccggggc

SEQ ID NO: 370620 - RNA, 32 nt, Human
cccccugggcaggacccugggcaggaccagag

SEQ ID NO: 370621 - RNA, 32 nt, Human
cccccugggccaggugagguuggggccugugg

SEQ ID NO: 370622 - RNA, 24 nt, Human
cccccugggcucugcccagcucug

SEQ ID NO: 370623 - RNA, 32 nt, Human
cccccuggggagaagguggccucguugcccgg

SEQ ID NO: 370624 - RNA, 32 nt, Human
cccccuggggccugggcugcugcugguucuuc

SEQ ID NO: 370625 - RNA, 32 nt, Human
cccccugggucccaagcaaccucagccaauga

SEQ ID NO: 370626 - RNA, 32 nt, Human
cccccugggucccaagcaaccucagccaguga

SEQ ID NO: 370627 - RNA, 32 nt, Human
cccccugguaaguguggaggaggcgggacacu

SEQ ID NO: 370628 - RNA, 32 nt, Human
cccccuguaaguuaaaggguagagaaagagau

SEQ ID NO: 370629 - RNA, 32 nt, Human
cccccugucacccugagcaaaucaguugcuuc

SEQ ID NO: 370630 - RNA, 32 nt, Human
cccccuguccggccuccacuugccauggggga

SEQ ID NO: 370631 - RNA, 32 nt, Human
cccccugucuucuccccucagcaauuccugca

SEQ ID NO: 370632 - RNA, 25 nt, Human
cccccugugccacucagcuccgccc

SEQ ID NO: 370633 - RNA, 32 nt, Human
cccccugugccagauccuccccuaugcugacc

SEQ ID NO: 370634 - RNA, 32 nt, Human
cccccuguggagagggugacugugggagagca

SEQ ID NO: 370635 - RNA, 32 nt, Human
cccccugugggaugggaggcaggccccagcau

SEQ ID NO: 370636 - RNA, 32 nt, Human
cccccuguucuuccucccaacgaaagcaugga

SEQ ID NO: 370637 - RNA, 32 nt, Human
cccccuguuuugaaucaggccaugucuucccc

SEQ ID NO: 370638 - RNA, 32 nt, Human
cccccuuaccucccccacccccuuuaucacca

SEQ ID NO: 370639 - RNA, 32 nt, Human
cccccuuacuggcuccaggcaucccccucacc

SEQ ID NO: 370640 - RNA, 32 nt, Human
cccccuuauuuuccuuuugucuccuggugauu

SEQ ID NO: 370641 - RNA, 32 nt, Human
cccccuucacacacacaacaaagcguggacac

SEQ ID NO: 370642 - RNA, 20 nt, Human
cccccuucaccaccucuaca

SEQ ID NO: 370643 - RNA, 22 nt, Human
cccccuucaccuugacuggcuu

SEQ ID NO: 370644 - RNA, 32 nt, Human
cccccuucaugcugccccuggcgccuagaacc

SEQ ID NO: 370645 - RNA, 32 nt, Human
cccccuucauuuccuaccuuccuuccuccucu

SEQ ID NO: 370646 - RNA, 19 nt, Human
cccccuuccagacccgcuc

SEQ ID NO: 370647 - RNA, 22 nt, Human
cccccuuccagauuacugucuc

SEQ ID NO: 370648 - RNA, 22 nt, Human
cccccuuccagggccucugcuc

SEQ ID NO: 370649 - RNA, 32 nt, Human
cccccuucccacucagcuucugccagcggguc

SEQ ID NO: 370650 - RNA, 32 nt, Human
cccccuuccccauuccuuuacuguacauaaag

SEQ ID NO: 370651 - RNA, 32 nt, Human
cccccuuccccauuccuuuauuguacauaaag

SEQ ID NO: 370652 - RNA, 32 nt, Human
cccccuuccccauuccuuuauuguacauaacu

SEQ ID NO: 370653 - RNA, 32 nt, Human
cccccuuccccauuccuuuauuguacguaaag

SEQ ID NO: 370654 - RNA, 25 nt, Human
cccccuucccccuuuagugccugcu

SEQ ID NO: 370655 - RNA, 32 nt, Human
cccccuuccccuacccccuccucucugccgca

SEQ ID NO: 370656 - RNA, 22 nt, Human
cccccuuccccugugcucccuu

SEQ ID NO: 370657 - RNA, 19 nt, Human
cccccuucccgccuggcuc

SEQ ID NO: 370658 - RNA, 32 nt, Human
cccccuuccuaagacagguagaaaaauguaau

SEQ ID NO: 370659 - RNA, 32 nt, Human
  misc_feature (17)..(17): n is a, c, g, or u
cccccuuccuaggacunucccaccccaaacuc

SEQ ID NO: 370660 - RNA, 32 nt, Human
cccccuuccucucccccuuccucucucccuuc

SEQ ID NO: 370661 - RNA, 21 nt, Human
cccccuuccuggugacugagc

SEQ ID NO: 370662 - RNA, 32 nt, Human
cccccuuccuuuaaaaucaucuggaaagaaac

SEQ ID NO: 370663 - RNA, 32 nt, Human
cccccuuccuuucccuccucuaccacuaaccg

SEQ ID NO: 370664 - RNA, 32 nt, Human
cccccuucuaucuccccuucuguccagggccc

SEQ ID NO: 370665 - RNA, 32 nt, Human
cccccuucucaccuccucauucucucuggcuc

SEQ ID NO: 370666 - RNA, 32 nt, Human
cccccuucuccaggagccagggggugacugga

SEQ ID NO: 370667 - RNA, 18 nt, Human
cccccuucuccccugugc

SEQ ID NO: 370668 - RNA, 21 nt, Human
cccccuucuccuuuccuuucu

SEQ ID NO: 370669 - RNA, 22 nt, Human
cccccuucuccuuuccuuucuu

SEQ ID NO: 370670 - RNA, 32 nt, Human
cccccuucucuagccacagccucuaguacacu

SEQ ID NO: 370671 - RNA, 32 nt, Human
cccccuucucucucccucucccucucucucua

SEQ ID NO: 370672 - RNA, 20 nt, Human
cccccuucugccccuggguc

SEQ ID NO: 370673 - RNA, 32 nt, Human
cccccuucugccuggcuugccugcuucugccc

SEQ ID NO: 370674 - RNA, 32 nt, Human
cccccuucugcgccuagcguuccucuuccccu

SEQ ID NO: 370675 - RNA, 32 nt, Human
cccccuucuuaccugaguaucagcuuacuucc

SEQ ID NO: 370676 - RNA, 23 nt, Human
cccccuucuucucccagacucug

SEQ ID NO: 370677 - RNA, 19 nt, Human
cccccuucuuugcagcugc

SEQ ID NO: 370678 - RNA, 32 nt, Human
cccccuugaaucugcagggagcaacucuccac

SEQ ID NO: 370679 - RNA, 32 nt, Human
cccccuugagcugggaacucaggcuccuggaa

SEQ ID NO: 370680 - RNA, 32 nt, Human
cccccuugcccaggcccuugggggagggggug

SEQ ID NO: 370681 - RNA, 24 nt, Human
cccccuugcuucucuccagcccug

SEQ ID NO: 370682 - RNA, 24 nt, Human
cccccuugggcucaggccccgccc

SEQ ID NO: 370683 - RNA, 32 nt, Human
cccccuuggucgccugcuggucuucuauguca

SEQ ID NO: 370684 - RNA, 32 nt, Human
cccccuugucacagaaaccagggacucuucag

SEQ ID NO: 370685 - RNA, 32 nt, Human
cccccuuguucccaggcacccuguggcugacu

SEQ ID NO: 370686 - RNA, 32 nt, Human
cccccuuuccccacccccucccccgacccuuu

SEQ ID NO: 370687 - RNA, 20 nt, Human
cccccuuucccccaacucug

SEQ ID NO: 370688 - RNA, 18 nt, Human
cccccuuucccgggcugu

SEQ ID NO: 370689 - RNA, 23 nt, Human
cccccuuuccucgacagcuuagu

SEQ ID NO: 370690 - RNA, 24 nt, Human
cccccuuuccucgacagcuuaguu

SEQ ID NO: 370691 - RNA, 32 nt, Human
cccccuuuccuuccuuuccucucuguaccauu

SEQ ID NO: 370692 - RNA, 32 nt, Human
cccccuuucugcucacacaauugcacuccauu

SEQ ID NO: 370693 - RNA, 32 nt, Human
cccccuuucuuuccucccuccccuucucauuu

SEQ ID NO: 370694 - RNA, 24 nt, Human
cccccuuucuuucuaccagcccug

SEQ ID NO: 370695 - RNA, 32 nt, Human
cccccuuugcucucacgcccagccugucccca

SEQ ID NO: 370696 - RNA, 32 nt, Human
cccccuuugguuuggccuccauccucaucucu

SEQ ID NO: 370697 - RNA, 32 nt, Human
cccccuuuuaacuuccucuugguuuuucauua

SEQ ID NO: 370698 - RNA, 21 nt, Human
cccccuuuuaagaugcuugcu

SEQ ID NO: 370699 - RNA, 19 nt, Human
cccccuuuuagaagcuugc

SEQ ID NO: 370700 - RNA, 20 nt, Human
cccccuuuuccccaagcugc

SEQ ID NO: 370701 - RNA, 32 nt, Human
cccccuuuucccucauagccucuagggaggga

SEQ ID NO: 370702 - RNA, 24 nt, Human
cccccuuuucccuccucugucugu

SEQ ID NO: 370703 - RNA, 23 nt, Human
cccccuuuucccucggaguucuu

SEQ ID NO: 370704 - RNA, 22 nt, Human
cccccuuuucccuguacuuugu

SEQ ID NO: 370705 - RNA, 23 nt, Human
cccccuuuucccuucagcuugcu

SEQ ID NO: 370706 - RNA, 24 nt, Human
cccccuuuucccuucagcuugcuu

SEQ ID NO: 370707 - RNA, 23 nt, Human
cccccuuuucccuuugguguugu

SEQ ID NO: 370708 - RNA, 23 nt, Human
cccccuuuucucugggaaccgcu

SEQ ID NO: 370709 - RNA, 32 nt, Human
ccccgaaaccugggcuggagugagguggaagg

SEQ ID NO: 370710 - RNA, 32 nt, Human
ccccgaaccccugaaccuccagccaggggcgc

SEQ ID NO: 370711 - RNA, 32 nt, Human
ccccgaaccuuuccuguuccccuggauuuagu

SEQ ID NO: 370712 - RNA, 32 nt, Human
ccccgaacuuucaugaaccccugguagcugaa

SEQ ID NO: 370713 - RNA, 20 nt, Human
ccccgaaggggcccagaaca

SEQ ID NO: 370714 - RNA, 32 nt, Human
ccccgaaguagccauucccuggagguggggaa

SEQ ID NO: 370715 - RNA, 22 nt, Human
ccccgaagucccgcugcccucg

SEQ ID NO: 370716 - RNA, 19 nt, Human
ccccgaaugucagcaccuu

SEQ ID NO: 370717 - RNA, 32 nt, Human
ccccgacacaucccuucccccaaaaagcaaca

SEQ ID NO: 370718 - RNA, 32 nt, Human
ccccgacaccagaacccuggugcuggugggcc

SEQ ID NO: 370719 - RNA, 21 nt, Human
ccccgacaccaggcccugccc

SEQ ID NO: 370720 - RNA, 22 nt, Human
ccccgacacccaagccccuccc

SEQ ID NO: 370721 - RNA, 32 nt, Human
ccccgacagacaguggcacuccugguccugcu

SEQ ID NO: 370722 - RNA, 32 nt, Human
ccccgacagcacaggccccugucccaggaccc

SEQ ID NO: 370723 - RNA, 32 nt, Human
ccccgacaggacgggcuugggcuuccauuugu

SEQ ID NO: 370724 - RNA, 32 nt, Human
ccccgacaggccuggcuccauccucugaaaau

SEQ ID NO: 370725 - RNA, 32 nt, Human
ccccgacaucuucuggcccucuggccagcacg

SEQ ID NO: 370726 - RNA, 32 nt, Human
ccccgaccaaaccucggggagcccuccugugc

SEQ ID NO: 370727 - RNA, 32 nt, Human
ccccgaccaacugcagcacccaaggacuggca

SEQ ID NO: 370728 - RNA, 22 nt, Human
ccccgacccccacccucacucc

SEQ ID NO: 370729 - RNA, 32 nt, Human
ccccgaccgcacuccagccugggcgacagagu

SEQ ID NO: 370730 - RNA, 25 nt, Human
ccccgaccucauacaaacucaggcc

SEQ ID NO: 370731 - RNA, 24 nt, Human
ccccgaccucccgcacccaggacc

SEQ ID NO: 370732 - RNA, 32 nt, Human
ccccgaccucgcugcccccgccucgccucucu

SEQ ID NO: 370733 - RNA, 24 nt, Human
ccccgaccugaucucccacugcca

SEQ ID NO: 370734 - RNA, 32 nt, Human
ccccgaccuuguagaaaaaccccuacccucac

SEQ ID NO: 370735 - RNA, 25 nt, Human
ccccgacgccugcucccccaggggc

SEQ ID NO: 370736 - RNA, 32 nt, Human
ccccgacgcuguacuccagaccaccuugagug

SEQ ID NO: 370737 - RNA, 32 nt, Human
ccccgacgggagcgccauggcccagccgccgc

SEQ ID NO: 370738 - RNA, 18 nt, Human
ccccgacucacucagacc

SEQ ID NO: 370739 - RNA, 27 nt, Human
ccccgacugcagccugcauucugcaca

SEQ ID NO: 370740 - RNA, 18 nt, Human
ccccgacugccacucugg

SEQ ID NO: 370741 - RNA, 23 nt, Human
ccccgacugccacucuggaccua

SEQ ID NO: 370742 - RNA, 19 nt, Human
ccccgacuguggggccaug

SEQ ID NO: 370743 - RNA, 32 nt, Human
ccccgacuucuaccagggaugccuucacgcca

SEQ ID NO: 370744 - RNA, 32 nt, Human
ccccgacuuuugcaucugaccaaaggacgaau

SEQ ID NO: 370745 - RNA, 32 nt, Human
ccccgagaaaugcuggagcaggcuguucagac

SEQ ID NO: 370746 - RNA, 23 nt, Human
ccccgagacgcgccuggcgcgga

SEQ ID NO: 370747 - RNA, 32 nt, Human
ccccgagacugcugaugucuguaaccacuggg

SEQ ID NO: 370748 - RNA, 21 nt, Human
ccccgagaucaccugcagcug

SEQ ID NO: 370749 - RNA, 21 nt, Human
ccccgagcagcggcgggggca

SEQ ID NO: 370750 - RNA, 25 nt, Human
ccccgagcagcuccccacucugccc

SEQ ID NO: 370751 - RNA, 32 nt, Human
ccccgagcaggagguggagcagcuggacuucc

SEQ ID NO: 370752 - RNA, 32 nt, Human
ccccgagcccugacuccuggacuccggaggac

SEQ ID NO: 370753 - RNA, 20 nt, Human
ccccgagccgccgacuugcc

SEQ ID NO: 370754 - RNA, 22 nt, Human
ccccgagcgcgccgggcgcgga

SEQ ID NO: 370755 - RNA, 32 nt, Human
ccccgagcuaagucccagggcaucugggccuu

SEQ ID NO: 370756 - RNA, 32 nt, Human
ccccgaggaagaagauuucauggcugcauccu

SEQ ID NO: 370757 - RNA, 32 nt, Human
ccccgaggacggacucggcugguucuggaguc

SEQ ID NO: 370758 - RNA, 32 nt, Human
ccccgaggaggaggaggaggacgcgggccugg

SEQ ID NO: 370759 - RNA, 32 nt, Human
ccccgaggaggaggaggaggaggaggaagagg

SEQ ID NO: 370760 - RNA, 32 nt, Human
ccccgaggaggaggaggaggaggaggacgcgg

SEQ ID NO: 370761 - RNA, 18 nt, Human
ccccgaggcagaguuggg

SEQ ID NO: 370762 - RNA, 19 nt, Human
ccccgaggcagggcugggg

SEQ ID NO: 370763 - RNA, 32 nt, Human
ccccgaggccaucacccccuccagcagugaac

SEQ ID NO: 370764 - RNA, 32 nt, Human
ccccgaggccugugccuuucccacuccaccuu

SEQ ID NO: 370765 - RNA, 32 nt, Human
ccccgaggcgggaggccggcugugcugcagga

SEQ ID NO: 370766 - RNA, 32 nt, Human
ccccgaggcugaagauggaaacauugaauaua

SEQ ID NO: 370767 - RNA, 32 nt, Human
ccccgagggucggggaaggaaccgagguccgg

SEQ ID NO: 370768 - RNA, 32 nt, Human
ccccgaggucaucuucuacaccuagcugcccg

SEQ ID NO: 370769 - RNA, 21 nt, Human
ccccgagguccucagugguug

SEQ ID NO: 370770 - RNA, 32 nt, Human
ccccgagguggaugccgcugggccggcugccu

SEQ ID NO: 370771 - RNA, 23 nt, Human
ccccgaggugggguccccuccca

SEQ ID NO: 370772 - RNA, 23 nt, Human
ccccgaguagcugggauuacagg

SEQ ID NO: 370773 - RNA, 32 nt, Human
ccccgaguccccagcugugcaccagcuccccg

SEQ ID NO: 370774 - RNA, 32 nt, Human
ccccgaguccccgacccuccccaagcaagguu

SEQ ID NO: 370775 - RNA, 21 nt, Human
ccccgagucccggcccaggcc

SEQ ID NO: 370776 - RNA, 32 nt, Human
ccccgaguccuggcaaacugcuugccuggggu

SEQ ID NO: 370777 - RNA, 32 nt, Human
ccccgagugccuccccucccucccucuguggg

SEQ ID NO: 370778 - RNA, 32 nt, Human
ccccgaguuagaaaaaguagcuauggaggacu

SEQ ID NO: 370779 - RNA, 32 nt, Human
ccccgaucacagacacuguggccccgcaaugg

SEQ ID NO: 370780 - RNA, 32 nt, Human
ccccgaucagugugugccuguuuacagcacua

SEQ ID NO: 370781 - RNA, 32 nt, Human
ccccgaucccagcuuucucuccuuugaaaaca

SEQ ID NO: 370782 - RNA, 32 nt, Human
ccccgauccgcuuccccuuucucccuccucag

SEQ ID NO: 370783 - RNA, 32 nt, Human
ccccgauccugagcgguugggguggggucccu

SEQ ID NO: 370784 - RNA, 32 nt, Human
ccccgaucuccccagcagcagcaacagcagcg

SEQ ID NO: 370785 - RNA, 32 nt, Human
ccccgaugccaccacagccaucgccacugcca

SEQ ID NO: 370786 - RNA, 19 nt, Human
ccccgaugccacucugccc

SEQ ID NO: 370787 - RNA, 18 nt, Human
ccccgaugcucagaagug

SEQ ID NO: 370788 - RNA, 30 nt, Human
ccccgaugggccagggcaggaggccugcug

SEQ ID NO: 370789 - RNA, 32 nt, Human
ccccgauguggagugggcaggaaggggccugg

SEQ ID NO: 370790 - RNA, 32 nt, Human
ccccgauguuccucuccugaauucuggauuuu

SEQ ID NO: 370791 - RNA, 32 nt, Human
ccccgauuuccucuuggguccccucaagcaga

SEQ ID NO: 370792 - RNA, 32 nt, Human
ccccgcaaaaucaggcuugagugcaguggcgc

SEQ ID NO: 370793 - RNA, 32 nt, Human
ccccgcaaacucgugggcagugcagugcugga

SEQ ID NO: 370794 - RNA, 32 nt, Human
ccccgcaacucgcuuguccuugggucacccug

SEQ ID NO: 370795 - RNA, 32 nt, Human
ccccgcaagccccagccccgaggaccguccau

SEQ ID NO: 370796 - RNA, 32 nt, Human
ccccgcaagccgcgccccuggcgggcuaagug

SEQ ID NO: 370797 - RNA, 23 nt, Human
ccccgcaaggccacugcgggugg

SEQ ID NO: 370798 - RNA, 32 nt, Human
ccccgcaaugcugauggggcugugcauugagg

SEQ ID NO: 370799 - RNA, 32 nt, Human
ccccgcacacgguaagaccucuugcuuucgcu

SEQ ID NO: 370800 - RNA, 17 nt, Human
ccccgcacccccucgca

SEQ ID NO: 370801 - RNA, 32 nt, Human
ccccgcaccccgaggcagaguugggaaagcag

SEQ ID NO: 370802 - RNA, 32 nt, Human
ccccgcaccccucccugggcugaaguucaggc

SEQ ID NO: 370803 - RNA, 32 nt, Human
ccccgcaccucgcucccuucccuuccccgcac

SEQ ID NO: 370804 - RNA, 32 nt, Human
ccccgcaccuggaagcugggaggccgcgagga

SEQ ID NO: 370805 - RNA, 32 nt, Human
ccccgcacgccuguaaucccagcacuugggga

SEQ ID NO: 370806 - RNA, 32 nt, Human
ccccgcacugacugaauaaagcuccucuggcc

SEQ ID NO: 370807 - RNA, 22 nt, Human
ccccgcacugacugucgcgccg

SEQ ID NO: 370808 - RNA, 32 nt, Human
ccccgcagaccuccccagccccuagcccagga

SEQ ID NO: 370809 - RNA, 32 nt, Human
ccccgcagagagaaagcugcagugcacauccu

SEQ ID NO: 370810 - RNA, 22 nt, Human
ccccgcagcccgccccaccgug

SEQ ID NO: 370811 - RNA, 32 nt, Human
ccccgcagcccuucugcacccagcacagccug

SEQ ID NO: 370812 - RNA, 32 nt, Human
ccccgcagccuccuugcuucucucuguccccu

SEQ ID NO: 370813 - RNA, 21 nt, Human
ccccgcagccugcggcgcaga

SEQ ID NO: 370814 - RNA, 21 nt, Human
ccccgcagcuucucuguagug

SEQ ID NO: 370815 - RNA, 32 nt, Human
ccccgcaggcugaggccagggcguggcggcug

SEQ ID NO: 370816 - RNA, 23 nt, Human
ccccgcagggccaaccccugccc

SEQ ID NO: 370817 - RNA, 32 nt, Human
ccccgcaggggagggggcggagagcgcgagaa

SEQ ID NO: 370818 - RNA, 32 nt, Human
ccccgcagguuaugucagcagcucugagacag

SEQ ID NO: 370819 - RNA, 19 nt, Human
ccccgcaugcccugggcca

SEQ ID NO: 370820 - RNA, 32 nt, Human
ccccgccaacagcagcgaggccauguguggug

SEQ ID NO: 370821 - RNA, 18 nt, Human
ccccgccaauacugugaa

SEQ ID NO: 370822 - RNA, 32 nt, Human
ccccgccaccacugcugggcugcgagcugggc

SEQ ID NO: 370823 - RNA, 19 nt, Human
ccccgccacccccuccuca

SEQ ID NO: 370824 - RNA, 32 nt, Human
ccccgccagcccggcgcccagcucuuuguucu

SEQ ID NO: 370825 - RNA, 32 nt, Human
ccccgccagccuugccccguaggaagcuggag

SEQ ID NO: 370826 - RNA, 16 nt, Human
ccccgccagcuguggc

SEQ ID NO: 370827 - RNA, 32 nt, Human
ccccgccaggcucccaugucauggaugccugu

SEQ ID NO: 370828 - RNA, 18 nt, Human
ccccgccaucgugggcca

SEQ ID NO: 370829 - RNA, 19 nt, Human
ccccgcccaccuccccucc

SEQ ID NO: 370830 - RNA, 32 nt, Human
ccccgcccacuuucccaccuccucgguauaaa

SEQ ID NO: 370831 - RNA, 19 nt, Human
ccccgcccagaacugugaa

SEQ ID NO: 370832 - RNA, 19 nt, Human
ccccgcccagccccgcccc

SEQ ID NO: 370833 - RNA, 32 nt, Human
ccccgcccagccccugcccccagccugugugc

SEQ ID NO: 370834 - RNA, 32 nt, Human
ccccgcccagccugcuccuaugcgguacuuga

SEQ ID NO: 370835 - RNA, 19 nt, Human
ccccgcccagcuccccucc

SEQ ID NO: 370836 - RNA, 32 nt, Human
ccccgcccagcugcaccugccagccuggcuuc

SEQ ID NO: 370837 - RNA, 32 nt, Human
ccccgcccaggcuuagucacugagacagcccg

SEQ ID NO: 370838 - RNA, 22 nt, Human
ccccgcccagggagcuccgccc

SEQ ID NO: 370839 - RNA, 20 nt, Human
ccccgccccacccccagccc

SEQ ID NO: 370840 - RNA, 32 nt, Human
ccccgccccagccccugacacacacucggacc

SEQ ID NO: 370841 - RNA, 32 nt, Human
ccccgccccagccguccuccugggguggaccc

SEQ ID NO: 370842 - RNA, 32 nt, Human
ccccgccccaggcuggaaaacaagaguagagg

SEQ ID NO: 370843 - RNA, 32 nt, Human
ccccgccccauucugggccaaugugauuuuau

SEQ ID NO: 370844 - RNA, 20 nt, Human
ccccgcccccaaacccagcc

SEQ ID NO: 370845 - RNA, 32 nt, Human
ccccgcccccgccucuugcgcccugccuggcu

SEQ ID NO: 370846 - RNA, 32 nt, Human
ccccgcccccuccagccccaucucugucucaa

SEQ ID NO: 370847 - RNA, 32 nt, Human
ccccgcccccuccucugcuccugcagcgcccu

SEQ ID NO: 370848 - RNA, 32 nt, Human
ccccgcccccugggcuggagggcugugugugg

SEQ ID NO: 370849 - RNA, 32 nt, Human
ccccgcccccuucuugacuccgcccucucagc

SEQ ID NO: 370850 - RNA, 18 nt, Human
ccccgccccgacugugaa

SEQ ID NO: 370851 - RNA, 32 nt, Human
ccccgccccgccauccccagacuuccccgccu

SEQ ID NO: 370852 - RNA, 21 nt, Human
ccccgccccgcccccgcugcc

SEQ ID NO: 370853 - RNA, 18 nt, Human
ccccgccccgccccgccc

SEQ ID NO: 370854 - RNA, 19 nt, Human
ccccgccccgccgccgccg

SEQ ID NO: 370855 - RNA, 18 nt, Human
ccccgccccgccucgccc

SEQ ID NO: 370856 - RNA, 32 nt, Human
ccccgccccgcuccgcgccccgggcagccgug

SEQ ID NO: 370857 - RNA, 32 nt, Human
ccccgccccuagcucuucuacggaggggaacc

SEQ ID NO: 370858 - RNA, 18 nt, Human
ccccgccccuccccgccc

SEQ ID NO: 370859 - RNA, 32 nt, Human
ccccgccccugcccccgcuccggccagagggg

SEQ ID NO: 370860 - RNA, 32 nt, Human
ccccgccccugccuccucucgcugaccaauug

SEQ ID NO: 370861 - RNA, 22 nt, Human
ccccgccccugccugccauaga

SEQ ID NO: 370862 - RNA, 32 nt, Human
ccccgccccuggcccugaaucucccauguccu

SEQ ID NO: 370863 - RNA, 32 nt, Human
ccccgccccuucuccuccuccuaccugggccu

SEQ ID NO: 370864 - RNA, 32 nt, Human
ccccgcccgcccccaccccacacccacauccu

SEQ ID NO: 370865 - RNA, 19 nt, Human
ccccgcccgcccuccccca

SEQ ID NO: 370866 - RNA, 32 nt, Human
ccccgcccgccuggccuguccugagugcauuu

SEQ ID NO: 370867 - RNA, 19 nt, Human
ccccgcccguccccccucc

SEQ ID NO: 370868 - RNA, 19 nt, Human
ccccgcccuacccccucca

SEQ ID NO: 370869 - RNA, 19 nt, Human
ccccgcccuaccuccgccc

SEQ ID NO: 370870 - RNA, 23 nt, Human
ccccgcccuacugccagcacaga

SEQ ID NO: 370871 - RNA, 32 nt, Human
ccccgcccuccagcaguccugguagggcccgg

SEQ ID NO: 370872 - RNA, 32 nt, Human
ccccgcccuccaggcuucucguuccuggauau

SEQ ID NO: 370873 - RNA, 18 nt, Human
ccccgcccuccccaccca

SEQ ID NO: 370874 - RNA, 32 nt, Human
ccccgcccuccccgcaucccucuccucccucg

SEQ ID NO: 370875 - RNA, 32 nt, Human
ccccgcccuccccucucucauuuuucuuggug

SEQ ID NO: 370876 - RNA, 32 nt, Human
ccccgcccuccugguccaaucuccgaucuguu

SEQ ID NO: 370877 - RNA, 18 nt, Human
ccccgcccugaaggggca

SEQ ID NO: 370878 - RNA, 19 nt, Human
ccccgcccugcccccucca

SEQ ID NO: 370879 - RNA, 32 nt, Human
ccccgcccugcuccagagcguggaccgaggag

SEQ ID NO: 370880 - RNA, 32 nt, Human
ccccgcccuucagccccgcggucuccaggggc

SEQ ID NO: 370881 - RNA, 32 nt, Human
ccccgcccuuggucccuucucucacccagagu

SEQ ID NO: 370882 - RNA, 32 nt, Human
ccccgccgcagcuccagcuggccggcuugguc

SEQ ID NO: 370883 - RNA, 19 nt, Human
ccccgccgccaccgccccg

SEQ ID NO: 370884 - RNA, 32 nt, Human
ccccgccgccaucaccaccaccgucaccuccg

SEQ ID NO: 370885 - RNA, 22 nt, Human
ccccgccgccccgccaccgccg

SEQ ID NO: 370886 - RNA, 18 nt, Human
ccccgccgccgccgccgc

SEQ ID NO: 370887 - RNA, 20 nt, Human
ccccgccgccgccgccgccg

SEQ ID NO: 370888 - RNA, 16 nt, Human
ccccgccgccgcugcc

SEQ ID NO: 370889 - RNA, 17 nt, Human
ccccgccgccgcugccg

SEQ ID NO: 370890 - RNA, 17 nt, Human
ccccgccgccgcugcug

SEQ ID NO: 370891 - RNA, 32 nt, Human
ccccgccgccgcuuccuccacccccaguccgc

SEQ ID NO: 370892 - RNA, 32 nt, Human
ccccgccgcgcacuuccucuggugcaaucucc

SEQ ID NO: 370893 - RNA, 17 nt, Human
ccccgccgcgggccgug

SEQ ID NO: 370894 - RNA, 22 nt, Human
ccccgccgcgggcuaccggcgc

SEQ ID NO: 370895 - RNA, 32 nt, Human
ccccgccggcaccaugcuucccuugucacugc

SEQ ID NO: 370896 - RNA, 20 nt, Human
ccccgccggccgccgcgccg

SEQ ID NO: 370897 - RNA, 32 nt, Human
ccccgccggccuggccaggacugagugcagga

SEQ ID NO: 370898 - RNA, 32 nt, Human
ccccgccggcggcggaggcagcgagcgcgaga

SEQ ID NO: 370899 - RNA, 32 nt, Human
ccccgccgguggagcccgcucuucuggccugu

SEQ ID NO: 370900 - RNA, 24 nt, Human
ccccgccgucgccccgccgcgccg

SEQ ID NO: 370901 - RNA, 32 nt, Human
ccccgccgucgguccugucucagucccucagc

SEQ ID NO: 370902 - RNA, 32 nt, Human
ccccgccgucugcaguccagcauggaggcacc

SEQ ID NO: 370903 - RNA, 21 nt, Human
ccccgccgugagccccgcucc

SEQ ID NO: 370904 - RNA, 32 nt, Human
ccccgccguucccugcgcuucaucucaugagg

SEQ ID NO: 370905 - RNA, 23 nt, Human
ccccgccguucucagcgcugccc

SEQ ID NO: 370906 - RNA, 17 nt, Human
ccccgccucaacgccca

SEQ ID NO: 370907 - RNA, 32 nt, Human
ccccgccucacagcugacagcgccagucccag

SEQ ID NO: 370908 - RNA, 32 nt, Human
ccccgccucauuccucacgccgagcuccagac

SEQ ID NO: 370909 - RNA, 32 nt, Human
ccccgccuccaggacagagccucggucugcau

SEQ ID NO: 370910 - RNA, 22 nt, Human
ccccgccucccagccccagggg

SEQ ID NO: 370911 - RNA, 21 nt, Human
ccccgccuccccacucugccc

SEQ ID NO: 370912 - RNA, 16 nt, Human
ccccgccuccccgccc

SEQ ID NO: 370913 - RNA, 21 nt, Human
ccccgccuccgaccccgcucu

SEQ ID NO: 370914 - RNA, 32 nt, Human
ccccgccuccuccuccugcuuugaccugaugc

SEQ ID NO: 370915 - RNA, 32 nt, Human
ccccgccuccuuggcagccucuggcggcagcg

SEQ ID NO: 370916 - RNA, 25 nt, Human
ccccgccucgggccguccccgccca

SEQ ID NO: 370917 - RNA, 32 nt, Human
ccccgccucucagcacagggcaggggcugcag

SEQ ID NO: 370918 - RNA, 32 nt, Human
ccccgccucugcccucauccucccucucgucu

SEQ ID NO: 370919 - RNA, 22 nt, Human
ccccgccucuguccccuggccu

SEQ ID NO: 370920 - RNA, 21 nt, Human
ccccgccucuucauccgucca

SEQ ID NO: 370921 - RNA, 32 nt, Human
ccccgccucuugcgcccugccuggcucccucu

SEQ ID NO: 370922 - RNA, 32 nt, Human
ccccgccugccugccacccugccccuugccau

SEQ ID NO: 370923 - RNA, 32 nt, Human
ccccgccugccuggacugcgcggcgccgugag

SEQ ID NO: 370924 - RNA, 32 nt, Human
ccccgccugcugcagcuccucccagaaccgcc

SEQ ID NO: 370925 - RNA, 32 nt, Human
ccccgccuggcaccccuggcugugcuguggcc

SEQ ID NO: 370926 - RNA, 32 nt, Human
ccccgccuggcgccugcccuccagggcugggg

SEQ ID NO: 370927 - RNA, 32 nt, Human
ccccgccuggcucuccccucuaaagcgcccgg

SEQ ID NO: 370928 - RNA, 16 nt, Human
ccccgccugggccaug

SEQ ID NO: 370929 - RNA, 32 nt, Human
ccccgccuguccugccucucugcuccagagag

SEQ ID NO: 370930 - RNA, 32 nt, Human
ccccgccuucacccacugccucugccucccug

SEQ ID NO: 370931 - RNA, 32 nt, Human
ccccgccuuccgccccuucccuucccuaaagu

SEQ ID NO: 370932 - RNA, 17 nt, Human
ccccgccuuucccccca

SEQ ID NO: 370933 - RNA, 32 nt, Human
ccccgcgagccccagcgcccuggcagucagca

SEQ ID NO: 370934 - RNA, 32 nt, Human
ccccgcgagucccucaagcgggaaccugccuc

SEQ ID NO: 370935 - RNA, 19 nt, Human
ccccgcgccacuccgcgcc

SEQ ID NO: 370936 - RNA, 21 nt, Human
ccccgcgccccagcccugccc

SEQ ID NO: 370937 - RNA, 17 nt, Human
ccccgcgccccgcgccg

SEQ ID NO: 370938 - RNA, 22 nt, Human
ccccgcgccccgcgccgcgccg

SEQ ID NO: 370939 - RNA, 24 nt, Human
ccccgcgcccugcccuccgcgccg

SEQ ID NO: 370940 - RNA, 22 nt, Human
ccccgcgccgccgccgccgccg

SEQ ID NO: 370941 - RNA, 21 nt, Human
ccccgcgccgccgcggccagg

SEQ ID NO: 370942 - RNA, 18 nt, Human
ccccgcgcgccccggguc

SEQ ID NO: 370943 - RNA, 32 nt, Human
ccccgcgcuccccucccucuccacucggcacc

SEQ ID NO: 370944 - RNA, 32 nt, Human
ccccgcgcucgcccuccgccucgcccgagccc

SEQ ID NO: 370945 - RNA, 25 nt, Human
ccccgcgcugccccacgccgcgccg

SEQ ID NO: 370946 - RNA, 25 nt, Human
ccccgcgcuuccgcugcagcgcaga

SEQ ID NO: 370947 - RNA, 32 nt, Human
ccccgcggacugacagcaccaggaaaccaaau

SEQ ID NO: 370948 - RNA, 20 nt, Human
ccccgcggagccgccgcgcc

SEQ ID NO: 370949 - RNA, 23 nt, Human
ccccgcggcccggaguccauccc

SEQ ID NO: 370950 - RNA, 20 nt, Human
ccccgcggccgucccuccuc

SEQ ID NO: 370951 - RNA, 19 nt, Human
ccccgcggcgcagcacgga

SEQ ID NO: 370952 - RNA, 23 nt, Human
ccccgcggcgcccgcagcgcgga

SEQ ID NO: 370953 - RNA, 32 nt, Human
ccccgcggcucuccucuucuucaucucuguuu

SEQ ID NO: 370954 - RNA, 18 nt, Human
ccccgcggcugggcccug

SEQ ID NO: 370955 - RNA, 26 nt, Human
ccccgcggcugggcccugccgcgccg

SEQ ID NO: 370956 - RNA, 32 nt, Human
ccccgcggugcccucucuccucccucuuugug

SEQ ID NO: 370957 - RNA, 24 nt, Human
ccccgcgguguccuggacugugca

SEQ ID NO: 370958 - RNA, 28 nt, Human
ccccgcguagccgcugccuccuccuacc

SEQ ID NO: 370959 - RNA, 21 nt, Human
ccccgcgucccagcccugccc

SEQ ID NO: 370960 - RNA, 22 nt, Human
ccccgcgucccccgccgcgccg

SEQ ID NO: 370961 - RNA, 21 nt, Human
ccccgcguccccgcgcgcgag

SEQ ID NO: 370962 - RNA, 32 nt, Human
ccccgcguguuucugcccugugacuccuggaa

SEQ ID NO: 370963 - RNA, 32 nt, Human
ccccgcuacacuccagccuggucgacagagug

SEQ ID NO: 370964 - RNA, 18 nt, Human
ccccgcuccccaacaccu

SEQ ID NO: 370965 - RNA, 32 nt, Human
ccccgcuccccaggacuucagagauguugcac

SEQ ID NO: 370966 - RNA, 32 nt, Human
ccccgcucccccucaccagcaguacuccuuug

SEQ ID NO: 370967 - RNA, 32 nt, Human
ccccgcucccuccucccugccuucucugcugg

SEQ ID NO: 370968 - RNA, 32 nt, Human
ccccgcuccgccaccagggcuugggggcgggg

SEQ ID NO: 370969 - RNA, 32 nt, Human
ccccgcuccucggggcccuccaaggugucucc

SEQ ID NO: 370970 - RNA, 32 nt, Human
ccccgcuccugcugcugacggcgcccaggaaa

SEQ ID NO: 370971 - RNA, 32 nt, Human
ccccgcucuccucucugcccccugcccucccc

SEQ ID NO: 370972 - RNA, 32 nt, Human
ccccgcucugcaggaugggcacagugcugucu

SEQ ID NO: 370973 - RNA, 32 nt, Human
ccccgcucugcaggccgcccuucugccagcug

SEQ ID NO: 370974 - RNA, 32 nt, Human
ccccgcucugcccacagacuccgauggcugcg

SEQ ID NO: 370975 - RNA, 32 nt, Human
ccccgcugaacagcagcuguucccagcgccag

SEQ ID NO: 370976 - RNA, 31 nt, Human
ccccgcugacgcuucccuugccguuggcuuu

SEQ ID NO: 370977 - RNA, 32 nt, Human
ccccgcugagccuucacugugggccagcuucc

SEQ ID NO: 370978 - RNA, 32 nt, Human
ccccgcugagcugcugccuggugaagaggaag

SEQ ID NO: 370979 - RNA, 32 nt, Human
ccccgcugcaggaaggccgcggcagagggggc

SEQ ID NO: 370980 - RNA, 32 nt, Human
ccccgcugcauccuuucugugagguaccuuac

SEQ ID NO: 370981 - RNA, 32 nt, Human
ccccgcugcccaggauuagggucuguggugug

SEQ ID NO: 370982 - RNA, 32 nt, Human
ccccgcugccugcccugcuccaggcuccaccu

SEQ ID NO: 370983 - RNA, 16 nt, Human
ccccgcugcucccggg

SEQ ID NO: 370984 - RNA, 32 nt, Human
ccccgcugcucgggcuggagaauagaugguuu

SEQ ID NO: 370985 - RNA, 22 nt, Human
ccccgcugcucugcuccgccca

SEQ ID NO: 370986 - RNA, 15 nt, Human
ccccgcugcuugcca

SEQ ID NO: 370987 - RNA, 24 nt, Human
ccccgcuggcagaugaccaggacc

SEQ ID NO: 370988 - RNA, 32 nt, Human
ccccgcuggcugcugcucacauggugucuggg

SEQ ID NO: 370989 - RNA, 29 nt, Human
ccccgcuggcugcuuucuuccugccccug

SEQ ID NO: 370990 - RNA, 32 nt, Human
ccccgcuguagccucaggccugacggcgacuc

SEQ ID NO: 370991 - RNA, 32 nt, Human
ccccgcugucucccccugccccgagucuggaa

SEQ ID NO: 370992 - RNA, 32 nt, Human
ccccgcuguggaaacaugggcgcucugcucug

SEQ ID NO: 370993 - RNA, 20 nt, Human
ccccgcuguguggacauggg

SEQ ID NO: 370994 - RNA, 32 nt, Human
ccccgcuguuuggcccaggccugggccaugac

SEQ ID NO: 370995 - RNA, 32 nt, Human
ccccgcuuccacccuccaaccucccccaaaua

SEQ ID NO: 370996 - RNA, 32 nt, Human
ccccgcuuccgcccgcuguccugcugcacgaa

SEQ ID NO: 370997 - RNA, 32 nt, Human
ccccgcuuccugcccucaaccugggcaugcgc

SEQ ID NO: 370998 - RNA, 32 nt, Human
ccccgcuucucuggaggggaggcggugcggga

SEQ ID NO: 370999 - RNA, 32 nt, Human
ccccgcuuuugacuuuuggcagccucuucagg

SEQ ID NO: 371000 - RNA, 32 nt, Human
ccccggaaccgagccagccacugaggggagcu

SEQ ID NO: 371001 - RNA, 32 nt, Human
ccccggaaucaccccucuucccaugccccucu

SEQ ID NO: 371002 - RNA, 32 nt, Human
ccccggaauucuuuaauagucaccuucaugau

SEQ ID NO: 371003 - RNA, 20 nt, Human
ccccggacaccugggaccug

SEQ ID NO: 371004 - RNA, 32 nt, Human
ccccggacagaggucugccccacccacuuccu

SEQ ID NO: 371005 - RNA, 32 nt, Human
ccccggacagccgccucaggccccagcucgaa

SEQ ID NO: 371006 - RNA, 32 nt, Human
ccccggaccacccucccugccggcuuugggug

SEQ ID NO: 371007 - RNA, 32 nt, Human
ccccggaccagggagagcagugagcuggagcu

SEQ ID NO: 371008 - RNA, 32 nt, Human
ccccggaccaggggccgcgccgccaccaugcu

SEQ ID NO: 371009 - RNA, 32 nt, Human
ccccggaccccuggcaugcaugcuggcggcgg

SEQ ID NO: 371010 - RNA, 32 nt, Human
ccccggaccuuccccaccgccugggcccgagg

SEQ ID NO: 371011 - RNA, 20 nt, Human
ccccggacuacagcacggaa

SEQ ID NO: 371012 - RNA, 32 nt, Human
ccccggagaagcuccgggaggaguagcuguca

SEQ ID NO: 371013 - RNA, 32 nt, Human
ccccggagaaggcagcgagcgcagugacagcg

SEQ ID NO: 371014 - RNA, 32 nt, Human
ccccggagacggagcuuccugagggcagggag

SEQ ID NO: 371015 - RNA, 32 nt, Human
ccccggagaggcggagggaagggaggcgaggc

SEQ ID NO: 371016 - RNA, 32 nt, Human
ccccggagauggagguugcagugagccaagau

SEQ ID NO: 371017 - RNA, 32 nt, Human
ccccggagccacagcacaaucaucucaguggc

SEQ ID NO: 371018 - RNA, 21 nt, Human
ccccggagccauccuuagggc

SEQ ID NO: 371019 - RNA, 32 nt, Human
ccccggagccgcgcugccucucggguguccug

SEQ ID NO: 371020 - RNA, 20 nt, Human
ccccggagccgucucagguc

SEQ ID NO: 371021 - RNA, 32 nt, Human
ccccggagccuggggcacggcagggagaagac

SEQ ID NO: 371022 - RNA, 32 nt, Human
ccccggaggagaagaaguaggggagaggagag

SEQ ID NO: 371023 - RNA, 32 nt, Human
ccccggaggcggagcuugcagugagccgagau

SEQ ID NO: 371024 - RNA, 23 nt, Human
ccccggaggcggagguugcagug

SEQ ID NO: 371025 - RNA, 32 nt, Human
ccccggaggcggagguugcagugagcugagaa

SEQ ID NO: 371026 - RNA, 32 nt, Human
ccccggagggagggaggaguucccugggcuuc

SEQ ID NO: 371027 - RNA, 32 nt, Human
ccccggagguagagguugcagugagccgagau

SEQ ID NO: 371028 - RNA, 32 nt, Human
ccccggagguagagguugcagugagcugagau

SEQ ID NO: 371029 - RNA, 32 nt, Human
ccccggauccugcuuuuguccagaugggccuc

SEQ ID NO: 371030 - RNA, 32 nt, Human
ccccggaucugcauguggaaguaccuggacgu

SEQ ID NO: 371031 - RNA, 22 nt, Human
ccccggaugccagcaccugcca

SEQ ID NO: 371032 - RNA, 22 nt, Human
ccccggaugccccacuagucca

SEQ ID NO: 371033 - RNA, 19 nt, Human
ccccggaugcugggcccug

SEQ ID NO: 371034 - RNA, 21 nt, Human
ccccggaugggccaccugccu

SEQ ID NO: 371035 - RNA, 22 nt, Human
ccccggauggggacccuuccca

SEQ ID NO: 371036 - RNA, 32 nt, Human
ccccggcaaccuauuugcuuauucugggcauu

SEQ ID NO: 371037 - RNA, 32 nt, Human
ccccggcaagccacaggaaggaggggagagac

SEQ ID NO: 371038 - RNA, 32 nt, Human
ccccggcaagccuacugaaagccagccgaacc

SEQ ID NO: 371039 - RNA, 32 nt, Human
ccccggcacacagcaggggcuuaauagauauu

SEQ ID NO: 371040 - RNA, 32 nt, Human
ccccggcaccccucccccucgggcgccagccc

SEQ ID NO: 371041 - RNA, 32 nt, Human
ccccggcagagcugggguugaagaggcagcuu

SEQ ID NO: 371042 - RNA, 32 nt, Human
ccccggcagaggacacuugucggcacguucuc

SEQ ID NO: 371043 - RNA, 25 nt, Human
ccccggcaggcgaggcgccuggcca

SEQ ID NO: 371044 - RNA, 32 nt, Human
ccccggcaggcgcggcagcaacaguuccugga

SEQ ID NO: 371045 - RNA, 32 nt, Human
ccccggcagugcaguccagcggggaggaggcu

SEQ ID NO: 371046 - RNA, 22 nt, Human
ccccggccaaggcgccuggacc

SEQ ID NO: 371047 - RNA, 32 nt, Human
ccccggccacaucuccuccaaacacacacagg

SEQ ID NO: 371048 - RNA, 32 nt, Human
ccccggccagcugggccccucccaggcacugc

SEQ ID NO: 371049 - RNA, 32 nt, Human
ccccggccaggaggccagaucggugaggugga

SEQ ID NO: 371050 - RNA, 22 nt, Human
ccccggccaggggccaaggagc

SEQ ID NO: 371051 - RNA, 24 nt, Human
ccccggccagggucccuuaacacc

SEQ ID NO: 371052 - RNA, 32 nt, Human
ccccggccagggucccuuaacaccucggcaca

SEQ ID NO: 371053 - RNA, 26 nt, Human
ccccggccaugagagggugcagugag

SEQ ID NO: 371054 - RNA, 22 nt, Human
ccccggccccagacccagagcc

SEQ ID NO: 371055 - RNA, 18 nt, Human
ccccggccccagcugagu

SEQ ID NO: 371056 - RNA, 32 nt, Human
ccccggcccccgugguucccagccgcacagua

SEQ ID NO: 371057 - RNA, 32 nt, Human
ccccggccccuaaaacauucauuaagucuggg

SEQ ID NO: 371058 - RNA, 19 nt, Human
ccccggcccggccuccagg

SEQ ID NO: 371059 - RNA, 32 nt, Human
ccccggcccgugcuguccgcugggugaggcag

SEQ ID NO: 371060 - RNA, 32 nt, Human
ccccggcccucgccucagccccggccccuggu

SEQ ID NO: 371061 - RNA, 32 nt, Human
ccccggcccugccuccccaggcggugccccug

SEQ ID NO: 371062 - RNA, 21 nt, Human
ccccggcccugcuccagaacc

SEQ ID NO: 371063 - RNA, 32 nt, Human
ccccggccgcaggcugugccccggcuguggcg

SEQ ID NO: 371064 - RNA, 19 nt, Human
ccccggccguccccccuca

SEQ ID NO: 371065 - RNA, 20 nt, Human
ccccggccgugacccaggcc

SEQ ID NO: 371066 - RNA, 32 nt, Human
ccccggccuagaccugccuaggacucuguggc

SEQ ID NO: 371067 - RNA, 32 nt, Human
ccccggccucagccuaaccaggaaaggggcuc

SEQ ID NO: 371068 - RNA, 20 nt, Human
ccccggccucauccuccuca

SEQ ID NO: 371069 - RNA, 32 nt, Human
ccccggccuccaccccagcuccccuggccucc

SEQ ID NO: 371070 - RNA, 32 nt, Human
ccccggccuccagggacuccuagcgcggcccg

SEQ ID NO: 371071 - RNA, 32 nt, Human
ccccggccuccccucgccccuuccccuccccc

SEQ ID NO: 371072 - RNA, 32 nt, Human
ccccggccuccuggucggcuguuuagagcuga

SEQ ID NO: 371073 - RNA, 22 nt, Human
ccccggccucugugcccaggcc

SEQ ID NO: 371074 - RNA, 32 nt, Human
ccccggccucuucuccauccugcuuggaccag

SEQ ID NO: 371075 - RNA, 32 nt, Human
ccccggcgaucugucugaguuuucuuccuccu

SEQ ID NO: 371076 - RNA, 22 nt, Human
ccccggcgauggugacacaugc

SEQ ID NO: 371077 - RNA, 22 nt, Human
ccccggcgccccgccccuccuc

SEQ ID NO: 371078 - RNA, 32 nt, Human
ccccggcgcccgcgucuuccacgggcacaggg

SEQ ID NO: 371079 - RNA, 32 nt, Human
ccccggcgcccgcgucuuccacgggcacaggu

SEQ ID NO: 371080 - RNA, 32 nt, Human
ccccggcgccgcccauauccccggcugcgcua

SEQ ID NO: 371081 - RNA, 23 nt, Human
ccccggcgcuccaggccgcgccc

SEQ ID NO: 371082 - RNA, 32 nt, Human
ccccggcgcugaggccccgaggaucggggcgg

SEQ ID NO: 371083 - RNA, 32 nt, Human
ccccggcggccgccaccucuccccagcccagg

SEQ ID NO: 371084 - RNA, 32 nt, Human
ccccggcggcgcgcuccagccgguguaggcga

SEQ ID NO: 371085 - RNA, 32 nt, Human
ccccggcgggcuguggcaggagggcggcggcg

SEQ ID NO: 371086 - RNA, 32 nt, Human
ccccggcguccccgggcaccaugcuguccaac

SEQ ID NO: 371087 - RNA, 32 nt, Human
ccccggcucagcucucuccaucugccuggcuc

SEQ ID NO: 371088 - RNA, 22 nt, Human
ccccggcucagcugagcugggg

SEQ ID NO: 371089 - RNA, 22 nt, Human
ccccggcuccagagcucagggg

SEQ ID NO: 371090 - RNA, 32 nt, Human
ccccggcuccccucggccgccuagcccgccuc

SEQ ID NO: 371091 - RNA, 19 nt, Human
ccccggcucccgacgccag

SEQ ID NO: 371092 - RNA, 32 nt, Human
ccccggcucuccccacgccccugccagagacc

SEQ ID NO: 371093 - RNA, 19 nt, Human
ccccggcucucggcaccug

SEQ ID NO: 371094 - RNA, 32 nt, Human
ccccggcucuggcgucccuggcugccaagccu

SEQ ID NO: 371095 - RNA, 21 nt, Human
ccccggcucuuacccaggacc

SEQ ID NO: 371096 - RNA, 32 nt, Human
ccccggcugcaaccucucccacucaagagacc

SEQ ID NO: 371097 - RNA, 32 nt, Human
ccccggcugcagcugcacucacauguggccac

SEQ ID NO: 371098 - RNA, 32 nt, Human
ccccggcugccaucuccuccuccugggccgcc

SEQ ID NO: 371099 - RNA, 32 nt, Human
ccccggcugggcagcagcggggacgccggggg

SEQ ID NO: 371100 - RNA, 22 nt, Human
ccccggcuucaggauuuacaca

SEQ ID NO: 371101 - RNA, 20 nt, Human
ccccggcuucccucuucugu

SEQ ID NO: 371102 - RNA, 18 nt, Human
ccccggcuucccuggccu

SEQ ID NO: 371103 - RNA, 32 nt, Human
ccccggcuuuauuccuccaccucuugcuccaa

SEQ ID NO: 371104 - RNA, 18 nt, Human
ccccgggaaagcuggugg

SEQ ID NO: 371105 - RNA, 25 nt, Human
ccccgggaagagaaacuugcaguga

SEQ ID NO: 371106 - RNA, 19 nt, Human
ccccgggacccgccggggg

SEQ ID NO: 371107 - RNA, 20 nt, Human
ccccgggacccugccugccu

SEQ ID NO: 371108 - RNA, 32 nt, Human
ccccgggaccguguugcuccaguauuaaccuc

SEQ ID NO: 371109 - RNA, 32 nt, Human
ccccgggacgccugagaguaaugggcgcgagg

SEQ ID NO: 371110 - RNA, 32 nt, Human
ccccgggacuccccaagcccagccucugugug

SEQ ID NO: 371111 - RNA, 32 nt, Human
ccccgggagacaccucagacccccgacagccu

SEQ ID NO: 371112 - RNA, 32 nt, Human
ccccgggagcagccggcagacagaggcaagac

SEQ ID NO: 371113 - RNA, 19 nt, Human
ccccgggagcggggccaug

SEQ ID NO: 371114 - RNA, 20 nt, Human
ccccgggagggcagagccag

SEQ ID NO: 371115 - RNA, 32 nt, Human
ccccgggagguacagcuggcagagggaaaggc

SEQ ID NO: 371116 - RNA, 32 nt, Human
ccccgggagguggaggcugcagugaguuguga

SEQ ID NO: 371117 - RNA, 32 nt, Human
ccccgggcaaauaggcuccgagggccccgggg

SEQ ID NO: 371118 - RNA, 32 nt, Human
ccccgggcaagaugcaccuccuguccaagucu

SEQ ID NO: 371119 - RNA, 32 nt, Human
ccccgggcacugccucacagccaaggcuggac

SEQ ID NO: 371120 - RNA, 32 nt, Human
ccccgggcacugcugcucauagguaccuuucc

SEQ ID NO: 371121 - RNA, 32 nt, Human
ccccgggcagagaaagccgagcagagcugggu

SEQ ID NO: 371122 - RNA, 25 nt, Human
ccccgggcagaggaaauugcaguga

SEQ ID NO: 371123 - RNA, 32 nt, Human
ccccgggcagaggcgcuugcccacgggacguu

SEQ ID NO: 371124 - RNA, 22 nt, Human
ccccgggcagcggcacccgcca

SEQ ID NO: 371125 - RNA, 32 nt, Human
ccccgggcagggcggggccgcucgcagacucc

SEQ ID NO: 371126 - RNA, 25 nt, Human
ccccgggccacggggacugcaguga

SEQ ID NO: 371127 - RNA, 24 nt, Human
ccccgggccagcagggaugggguu

SEQ ID NO: 371128 - RNA, 32 nt, Human
ccccgggccaguguccaucauccaggugcuca

SEQ ID NO: 371129 - RNA, 25 nt, Human
ccccgggcccaagaggaugcgguga

SEQ ID NO: 371130 - RNA, 32 nt, Human
ccccgggccccggagcgcgguggagaagcccc

SEQ ID NO: 371131 - RNA, 32 nt, Human
ccccgggcccggccccugcccugcugccccca

SEQ ID NO: 371132 - RNA, 25 nt, Human
ccccgggcccuaggguuugcaguga

SEQ ID NO: 371133 - RNA, 32 nt, Human
ccccgggcccugauggacugaaugaaggcugc

SEQ ID NO: 371134 - RNA, 25 nt, Human
ccccgggccggccagccuccugccu

SEQ ID NO: 371135 - RNA, 32 nt, Human
ccccgggccuccgccccuuccugggccucucg

SEQ ID NO: 371136 - RNA, 32 nt, Human
ccccgggccuggaggggguggggagggagaag

SEQ ID NO: 371137 - RNA, 18 nt, Human
ccccgggccuggggcaug

SEQ ID NO: 371138 - RNA, 32 nt, Human
ccccgggccuguccaguguccucuggccugcu

SEQ ID NO: 371139 - RNA, 26 nt, Human
ccccgggccuuggaugguugugguga

SEQ ID NO: 371140 - RNA, 18 nt, Human
ccccgggcgcgcccgccg

SEQ ID NO: 371141 - RNA, 22 nt, Human
ccccgggcgcuccuccccaggc

SEQ ID NO: 371142 - RNA, 19 nt, Human
ccccgggcggggauggggc

SEQ ID NO: 371143 - RNA, 32 nt, Human
ccccgggcucgagucucugccugcccaguggc

SEQ ID NO: 371144 - RNA, 32 nt, Human
ccccgggcucggaacuauaggaaaagacucuu

SEQ ID NO: 371145 - RNA, 32 nt, Human
ccccgggcugcaccccuuccucuucucuuucu

SEQ ID NO: 371146 - RNA, 32 nt, Human
ccccgggcugccagcccgugagguccgugagg

SEQ ID NO: 371147 - RNA, 25 nt, Human
ccccgggcugcgucgggaccugcca

SEQ ID NO: 371148 - RNA, 21 nt, Human
ccccgggcuggagugcagugg

SEQ ID NO: 371149 - RNA, 32 nt, Human
ccccgggcuuccccagcagccaccaaggccug

SEQ ID NO: 371150 - RNA, 25 nt, Human
ccccgggcuugggagguuccagugg

SEQ ID NO: 371151 - RNA, 32 nt, Human
ccccggggaggcaggcuggcagguggacaggc

SEQ ID NO: 371152 - RNA, 32 nt, Human
ccccggggaggcaggggcagaggucagaaggg

SEQ ID NO: 371153 - RNA, 21 nt, Human
ccccggggaggcagugcagcc

SEQ ID NO: 371154 - RNA, 32 nt, Human
ccccggggaggguggaaggccaggcguggggc

SEQ ID NO: 371155 - RNA, 20 nt, Human
ccccggggcacccuccuguc

SEQ ID NO: 371156 - RNA, 32 nt, Human
ccccggggcagcuccugccaccaguccucucc

SEQ ID NO: 371157 - RNA, 32 nt, Human
ccccggggcaggcucucucuccccagcagugu

SEQ ID NO: 371158 - RNA, 25 nt, Human
ccccggggcauggacagggccaggg

SEQ ID NO: 371159 - RNA, 32 nt, Human
ccccggggcgcucugcccuggagacuccggac

SEQ ID NO: 371160 - RNA, 32 nt, Human
ccccggggcucacgccuguaaucccaacacuu

SEQ ID NO: 371161 - RNA, 32 nt, Human
ccccggggcugccguuuugcugggcagugguu

SEQ ID NO: 371162 - RNA, 32 nt, Human
ccccgggggcacaucccucagcaggacagcaa

SEQ ID NO: 371163 - RNA, 22 nt, Human
ccccggggggauggcccaggcc

SEQ ID NO: 371164 - RNA, 26 nt, Human
ccccggggucucgccagccccuuccu

SEQ ID NO: 371165 - RNA, 23 nt, Human
ccccggggugaggccuccugccu

SEQ ID NO: 371166 - RNA, 32 nt, Human
ccccgggguuccaggccuggcaugguucaggg

SEQ ID NO: 371167 - RNA, 21 nt, Human
ccccggguacgagcuggcccc

SEQ ID NO: 371168 - RNA, 32 nt, Human
ccccgggugcuucuguggucaggcugggacag

SEQ ID NO: 371169 - RNA, 24 nt, Human
ccccgggugugaagcacagacccc

SEQ ID NO: 371170 - RNA, 32 nt, Human
ccccggguucaaaccauucuccugccucagcc

SEQ ID NO: 371171 - RNA, 32 nt, Human
ccccggguucaagcgauucuccugccucagcc

SEQ ID NO: 371172 - RNA, 32 nt, Human
ccccggguucaagugauucuccugccucagcc

SEQ ID NO: 371173 - RNA, 27 nt, Human
ccccggguucauuggggguugaagugg

SEQ ID NO: 371174 - RNA, 32 nt, Human
ccccggguucgcaccauucuccugccucagcc

SEQ ID NO: 371175 - RNA, 25 nt, Human
ccccggguuugggagguugaagugg

SEQ ID NO: 371176 - RNA, 26 nt, Human
ccccggguuugggggaaguguaguga

SEQ ID NO: 371177 - RNA, 32 nt, Human
ccccggucagcaaggaagacccugagcaggac

SEQ ID NO: 371178 - RNA, 32 nt, Human
ccccggucagcucugcaucagguguuuucuga

SEQ ID NO: 371179 - RNA, 32 nt, Human
ccccggucccucagccccuucucccccgucag

SEQ ID NO: 371180 - RNA, 21 nt, Human
ccccggucccuccccucccca

SEQ ID NO: 371181 - RNA, 32 nt, Human
ccccgguccuccucauuagggugcagggccua

SEQ ID NO: 371182 - RNA, 32 nt, Human
ccccggucgcaggaguccggggagggccggga

SEQ ID NO: 371183 - RNA, 32 nt, Human
ccccggucuaggaucgaaauguuaacaccggg

SEQ ID NO: 371184 - RNA, 32 nt, Human
ccccggugacauggcugugcccugccauccca

SEQ ID NO: 371185 - RNA, 32 nt, Human
ccccggugcagcccuggcgggaccgcagcaac

SEQ ID NO: 371186 - RNA, 32 nt, Human
ccccggugcuaccaccaccgcgcagauuauau

SEQ ID NO: 371187 - RNA, 32 nt, Human
ccccgguggcaguguuggagacuugcuccggc

SEQ ID NO: 371188 - RNA, 32 nt, Human
ccccgguuauuuccucagcuauuuccaccaaa

SEQ ID NO: 371189 - RNA, 32 nt, Human
ccccgguuauuuccucagcuguuuccaccaaa

SEQ ID NO: 371190 - RNA, 23 nt, Human
ccccgguucccuugugggggcuu

SEQ ID NO: 371191 - RNA, 32 nt, Human
ccccgguuucccuccuccuuuuaacuucaacu

SEQ ID NO: 371192 - RNA, 32 nt, Human
ccccguaaagggcugaucuuccaccucgccac

SEQ ID NO: 371193 - RNA, 32 nt, Human
ccccguacaagggcaacccuguuucuuuggug

SEQ ID NO: 371194 - RNA, 18 nt, Human
ccccguagccuagagcag

SEQ ID NO: 371195 - RNA, 32 nt, Human
ccccguaucauccaugggucucuggcuccuga

SEQ ID NO: 371196 - RNA, 32 nt, Human
ccccguauccaucucugugcuggguccugccu

SEQ ID NO: 371197 - RNA, 32 nt, Human
ccccguaugccccuccucgugaaaggccugcc

SEQ ID NO: 371198 - RNA, 32 nt, Human
ccccgucaagcagagggaggcacuuucacccg

SEQ ID NO: 371199 - RNA, 32 nt, Human
ccccgucagacccacugggagauggcugcuug

SEQ ID NO: 371200 - RNA, 32 nt, Human
ccccgucagcggccgccccaggaagaggcuuc

SEQ ID NO: 371201 - RNA, 19 nt, Human
ccccgucccaccccugccu

SEQ ID NO: 371202 - RNA, 19 nt, Human
ccccguccccgccccgccc

SEQ ID NO: 371203 - RNA, 32 nt, Human
ccccguccccucccucagcccccacucgcucc

SEQ ID NO: 371204 - RNA, 20 nt, Human
ccccgucccucuccuaccuc

SEQ ID NO: 371205 - RNA, 32 nt, Human
ccccguccgggaugugaggagcgucucucccu

SEQ ID NO: 371206 - RNA, 32 nt, Human
ccccguccgggaugugaggagcgucucugccc

SEQ ID NO: 371207 - RNA, 32 nt, Human
ccccguccucccaccaccccagggggcaggca

SEQ ID NO: 371208 - RNA, 32 nt, Human
ccccguccucguggagcuuagcaggcagcugg

SEQ ID NO: 371209 - RNA, 22 nt, Human
ccccguccucuuguccuccuca

SEQ ID NO: 371210 - RNA, 32 nt, Human
ccccguccugccucccaccacacuuacacaca

SEQ ID NO: 371211 - RNA, 32 nt, Human
ccccguccuuaccccuuccuuuccuuaccuug

SEQ ID NO: 371212 - RNA, 32 nt, Human
ccccgucgcacaggcuggagugcaguggcaaa

SEQ ID NO: 371213 - RNA, 20 nt, Human
ccccgucgccgccgccgccg

SEQ ID NO: 371214 - RNA, 24 nt, Human
ccccgucgcucucguccauccuca

SEQ ID NO: 371215 - RNA, 20 nt, Human
ccccgucggcacugccggcc

SEQ ID NO: 371216 - RNA, 32 nt, Human
ccccgucuaaccacagcuccuuuuccagagca

SEQ ID NO: 371217 - RNA, 17 nt, Human
ccccgucuaccccucca

SEQ ID NO: 371218 - RNA, 32 nt, Human
ccccgucuccacugaaaauagaaaaauuagcu

SEQ ID NO: 371219 - RNA, 32 nt, Human
ccccgucuccauggucccgaccaggaagggaa

SEQ ID NO: 371220 - RNA, 32 nt, Human
ccccgucucccugcuugguucuccccucccuu

SEQ ID NO: 371221 - RNA, 32 nt, Human
ccccgucuccuccucaggcucggaccauggug

SEQ ID NO: 371222 - RNA, 32 nt, Human
ccccgucuccuccucuugcucccucggccggg

SEQ ID NO: 371223 - RNA, 32 nt, Human
ccccgucucuuucucaccuuucccaccucucu

SEQ ID NO: 371224 - RNA, 19 nt, Human
ccccgucugcccuggguca

SEQ ID NO: 371225 - RNA, 32 nt, Human
ccccgucugcugcuggacacagagccaugaag

SEQ ID NO: 371226 - RNA, 32 nt, Human
ccccgucugucugcuuuccccaccuccucccc

SEQ ID NO: 371227 - RNA, 32 nt, Human
ccccgucuguguuccgaggcuuggugacaaau

SEQ ID NO: 371228 - RNA, 32 nt, Human
ccccgucuucucuucacugaugcacauagaug

SEQ ID NO: 371229 - RNA, 32 nt, Human
ccccgucuucuuugccaaguucuugagggcaa

SEQ ID NO: 371230 - RNA, 32 nt, Human
ccccgucuuugcuucccugccugcugcugccc

SEQ ID NO: 371231 - RNA, 32 nt, Human
ccccgucuuuucuuuccacaccccugugcccg

SEQ ID NO: 371232 - RNA, 32 nt, Human
ccccgugacucagucccucugaagggagcagc

SEQ ID NO: 371233 - RNA, 17 nt, Human
ccccgugacucugccuc

SEQ ID NO: 371234 - RNA, 32 nt, Human
ccccgugagcuacaaccuggccuucagcaccc

SEQ ID NO: 371235 - RNA, 32 nt, Human
ccccgugaggaggcggcggcggcuauggagau

SEQ ID NO: 371236 - RNA, 32 nt, Human
ccccgugauucugcccacgcuccuccaccacg

SEQ ID NO: 371237 - RNA, 32 nt, Human
ccccgugccccaggcauggcaagcgccugccu

SEQ ID NO: 371238 - RNA, 32 nt, Human
ccccgugcccugcacaaaaaccaccaccagca

SEQ ID NO: 371239 - RNA, 32 nt, Human
ccccgugcccugcugauguugacacugacccc

SEQ ID NO: 371240 - RNA, 32 nt, Human
ccccgugcccuuuaaccggcauuugcugcuaa

SEQ ID NO: 371241 - RNA, 19 nt, Human
ccccgugccgccgccgccg

SEQ ID NO: 371242 - RNA, 32 nt, Human
ccccgugccuggccuuuaguuuuuauauuuug

SEQ ID NO: 371243 - RNA, 32 nt, Human
ccccgugcuggugggacugaggagaacgccgu

SEQ ID NO: 371244 - RNA, 32 nt, Human
ccccguggaaguggccccugauauggauugua

SEQ ID NO: 371245 - RNA, 32 nt, Human
ccccguggagucugcagagaggccuuggccag

SEQ ID NO: 371246 - RNA, 32 nt, Human
ccccguggcucacaccuguaauccuagcacau

SEQ ID NO: 371247 - RNA, 32 nt, Human
ccccgugggaacacugggagccugcacuccac

SEQ ID NO: 371248 - RNA, 32 nt, Human
ccccgugggaagagcagagaaaucaucaccac

SEQ ID NO: 371249 - RNA, 32 nt, Human
ccccgugggcugggcacuguggcccuucuucu

SEQ ID NO: 371250 - RNA, 32 nt, Human
ccccguggugccugcacacagagugagggagg

SEQ ID NO: 371251 - RNA, 32 nt, Human
ccccguguagauacugagaggugguggcagua

SEQ ID NO: 371252 - RNA, 32 nt, Human
ccccgugugacccugucccagcauuuucccgc

SEQ ID NO: 371253 - RNA, 32 nt, Human
ccccgugugcaggaucaauuguaggaggaaau

SEQ ID NO: 371254 - RNA, 32 nt, Human
ccccguguuacugccuaucagcauuuuacuac

SEQ ID NO: 371255 - RNA, 18 nt, Human
ccccguguucccuggccu

SEQ ID NO: 371256 - RNA, 32 nt, Human
ccccguuacuccucaaacuuccugccgucagc

SEQ ID NO: 371257 - RNA, 32 nt, Human
ccccguuaggagugagcuuggugagggcucca

SEQ ID NO: 371258 - RNA, 32 nt, Human
ccccguuccucagagaaauuguccucagggag

SEQ ID NO: 371259 - RNA, 32 nt, Human
ccccguucgcaucauggucuccauguguaccg

SEQ ID NO: 371260 - RNA, 18 nt, Human
ccccguucuagggccgug

SEQ ID NO: 371261 - RNA, 17 nt, Human
ccccguucugucaccca

SEQ ID NO: 371262 - RNA, 32 nt, Human
ccccguucuguggggcacugggugauacucag

SEQ ID NO: 371263 - RNA, 32 nt, Human
ccccguugauguccauuccauuccccaggugc

SEQ ID NO: 371264 - RNA, 20 nt, Human
ccccguugccgccgcugccg

SEQ ID NO: 371265 - RNA, 32 nt, Human
ccccguuggagcccucacagaugaggagaaac

SEQ ID NO: 371266 - RNA, 18 nt, Human
ccccguugucccagcuca

SEQ ID NO: 371267 - RNA, 32 nt, Human
ccccguuucucccacagcuucccccgcaucgg

SEQ ID NO: 371268 - RNA, 32 nt, Human
ccccguuugccuccacgagccugcuguuucca

SEQ ID NO: 371269 - RNA, 32 nt, Human
ccccguuugccucuccaaccucuucauccugc

SEQ ID NO: 371270 - RNA, 32 nt, Human
ccccguuuucuggggcccuucuugccuggaau

SEQ ID NO: 371271 - RNA, 32 nt, Human
ccccguuuuucccuuccggcagccucuuggcc

SEQ ID NO: 371272 - RNA, 32 nt, Human
ccccguuuuucccuuccggcagccucuuggcu

SEQ ID NO: 371273 - RNA, 32 nt, Human
ccccguuuuucccuucuggcagccucuuggcc

SEQ ID NO: 371274 - RNA, 32 nt, Human
ccccuaaaaauacaaaaauuagccgggcgugg

SEQ ID NO: 371275 - RNA, 32 nt, Human
ccccuaaaaauaggaacaauuagccaggcaug

SEQ ID NO: 371276 - RNA, 32 nt, Human
ccccuaaaaccagguugauuugcucaaucuca

SEQ ID NO: 371277 - RNA, 32 nt, Human
ccccuaaacgccgccucgucauacgccccucc

SEQ ID NO: 371278 - RNA, 32 nt, Human
ccccuaaacuccaggauuuauaaagcaaauua

SEQ ID NO: 371279 - RNA, 32 nt, Human
ccccuaaagaugggaggagaccagcgguccau

SEQ ID NO: 371280 - RNA, 32 nt, Human
ccccuaaagccaagccuuuucacugggaagcc

SEQ ID NO: 371281 - RNA, 32 nt, Human
ccccuaaagcuuccuuugcccuugcuuucuag

SEQ ID NO: 371282 - RNA, 32 nt, Human
ccccuaaauaaacgucagaaguaaugaagucu

SEQ ID NO: 371283 - RNA, 32 nt, Human
ccccuaaaugauuugaauucuuuaguacuaca

SEQ ID NO: 371284 - RNA, 32 nt, Human
ccccuaaaugcacaucggugggcagggcaaac

SEQ ID NO: 371285 - RNA, 32 nt, Human
ccccuaacccccaauacuugaagggguuuugu

SEQ ID NO: 371286 - RNA, 23 nt, Human
ccccuaacccugaggcugccgcg

SEQ ID NO: 371287 - RNA, 32 nt, Human
ccccuaaccucagcccgagggucuccaggaug

SEQ ID NO: 371288 - RNA, 19 nt, Human
ccccuaacuucucuggugg

SEQ ID NO: 371289 - RNA, 32 nt, Human
ccccuaagaaagaaaguggaggggacacucca

SEQ ID NO: 371290 - RNA, 32 nt, Human
ccccuaagacuccagcuucauagacuccucug

SEQ ID NO: 371291 - RNA, 32 nt, Human
ccccuaagagucagugcgcggaacagaagagc

SEQ ID NO: 371292 - RNA, 32 nt, Human
ccccuaagcacaacuauuuacauuucuuuaua

SEQ ID NO: 371293 - RNA, 22 nt, Human
ccccuaagcccaccccuccuca

SEQ ID NO: 371294 - RNA, 32 nt, Human
ccccuaagccugcacucugggcgcuccugcug

SEQ ID NO: 371295 - RNA, 17 nt, Human
ccccuaagcuccaggug

SEQ ID NO: 371296 - RNA, 32 nt, Human
ccccuaagcugcgggacgaguucuguucuggc

SEQ ID NO: 371297 - RNA, 22 nt, Human
ccccuaaggcccugcccggggc

SEQ ID NO: 371298 - RNA, 26 nt, Human
ccccuaauguacacgcugcagccaga

SEQ ID NO: 371299 - RNA, 32 nt, Human
ccccuaauuaauuugaaaccaaucccagguau

SEQ ID NO: 371300 - RNA, 32 nt, Human
ccccuaauucuucugcucuguuugggaagacg

SEQ ID NO: 371301 - RNA, 32 nt, Human
ccccuacaacacaguauuuuggcaacuauugc

SEQ ID NO: 371302 - RNA, 32 nt, Human
ccccuacacagcaggggcagguuuggcuacug

SEQ ID NO: 371303 - RNA, 32 nt, Human
ccccuacaccugcuuugucagauacagcuggg

SEQ ID NO: 371304 - RNA, 18 nt, Human
ccccuacacugcccgcca

SEQ ID NO: 371305 - RNA, 32 nt, Human
ccccuacacugcccuggccuuugcagaguaug

SEQ ID NO: 371306 - RNA, 32 nt, Human
ccccuacaggcagaggaguagcaauguggguc

SEQ ID NO: 371307 - RNA, 32 nt, Human
ccccuacaggccucugggcccagcuccuggcc

SEQ ID NO: 371308 - RNA, 32 nt, Human
ccccuacaucaggaaggagagcccccugcuca

SEQ ID NO: 371309 - RNA, 32 nt, Human
ccccuaccacacacaccccuguccuccagcac

SEQ ID NO: 371310 - RNA, 32 nt, Human
ccccuaccacacucccccuccuagaccgccgc

SEQ ID NO: 371311 - RNA, 32 nt, Human
ccccuaccagcccggcuauauugggugggauu

SEQ ID NO: 371312 - RNA, 32 nt, Human
ccccuaccaucucccaauggaggggagguugc

SEQ ID NO: 371313 - RNA, 24 nt, Human
ccccuacccauaucccucccgugu

SEQ ID NO: 371314 - RNA, 32 nt, Human
ccccuaccccacggaggauggaagaggcagau

SEQ ID NO: 371315 - RNA, 32 nt, Human
ccccuacccccaccccucuagagacccuccag

SEQ ID NO: 371316 - RNA, 24 nt, Human
ccccuaccccccaaacuacccucu

SEQ ID NO: 371317 - RNA, 32 nt, Human
ccccuacccccuccucucugccgcaauacagg

SEQ ID NO: 371318 - RNA, 32 nt, Human
ccccuaccccuccaaauaccuugcauucucaa

SEQ ID NO: 371319 - RNA, 32 nt, Human
ccccuaccccucucccccagugcagcugaagc

SEQ ID NO: 371320 - RNA, 32 nt, Human
ccccuaccccugcuggccggggauggagacau

SEQ ID NO: 371321 - RNA, 22 nt, Human
ccccuaccccuguccuuccuca

SEQ ID NO: 371322 - RNA, 32 nt, Human
ccccuacccuaagcuguagccugggugacuga

SEQ ID NO: 371323 - RNA, 22 nt, Human
ccccuacccuguucuccggagu

SEQ ID NO: 371324 - RNA, 18 nt, Human
ccccuaccgccagccucc

SEQ ID NO: 371325 - RNA, 32 nt, Human
ccccuaccuaaaguccugcaauaaaaucagca

SEQ ID NO: 371326 - RNA, 32 nt, Human
ccccuaccucccaccaccaccaugaaguuugg

SEQ ID NO: 371327 - RNA, 32 nt, Human
ccccuaccuccuggcccuuuuugguguaguca

SEQ ID NO: 371328 - RNA, 32 nt, Human
ccccuaccucucccaccucuugcucuucaaua

SEQ ID NO: 371329 - RNA, 32 nt, Human
ccccuaccugcaaccucuuccaggcucccuuu

SEQ ID NO: 371330 - RNA, 32 nt, Human
ccccuaccuguucuccccuccaggccaccugu

SEQ ID NO: 371331 - RNA, 32 nt, Human
ccccuaccuucccacacaguauauucuuguga

SEQ ID NO: 371332 - RNA, 32 nt, Human
ccccuacgccacucccaccacacccacacccc

SEQ ID NO: 371333 - RNA, 22 nt, Human
ccccuacgccucaccccuccuc

SEQ ID NO: 371334 - RNA, 32 nt, Human
ccccuacgccucaccccuccucccucucacag

SEQ ID NO: 371335 - RNA, 32 nt, Human
ccccuacuccacccucagcucuuccuugccug

SEQ ID NO: 371336 - RNA, 32 nt, Human
ccccuacucccggagcccccagcagggcccuc

SEQ ID NO: 371337 - RNA, 32 nt, Human
ccccuacugcaggucuuacaguggaggggccu

SEQ ID NO: 371338 - RNA, 32 nt, Human
ccccuacugccagccagaagcugggcugaccc

SEQ ID NO: 371339 - RNA, 19 nt, Human
ccccuacuucccuuuggga

SEQ ID NO: 371340 - RNA, 32 nt, Human
ccccuagaaagaaauccuuggaaaaguugcau

SEQ ID NO: 371341 - RNA, 32 nt, Human
ccccuagaccccgcgccucugaaggggcuugg

SEQ ID NO: 371342 - RNA, 19 nt, Human
ccccuagaccucccccuca

SEQ ID NO: 371343 - RNA, 32 nt, Human
ccccuagagcaggauuugaggccaggccaaag

SEQ ID NO: 371344 - RNA, 32 nt, Human
ccccuagaugauaaccaggaacuccagguucu

SEQ ID NO: 371345 - RNA, 20 nt, Human
ccccuagauuccagccacca

SEQ ID NO: 371346 - RNA, 32 nt, Human
ccccuagcagugcagaacuacaagucccaggg

SEQ ID NO: 371347 - RNA, 32 nt, Human
ccccuagccagccuucccacacugccaggaua

SEQ ID NO: 371348 - RNA, 23 nt, Human
ccccuagcccaccccggcacaga

SEQ ID NO: 371349 - RNA, 32 nt, Human
ccccuagcccggcuguggcuccaccuccagcu

SEQ ID NO: 371350 - RNA, 32 nt, Human
ccccuagcccugcuagguggcuauuagaacag

SEQ ID NO: 371351 - RNA, 32 nt, Human
ccccuagcuaccacugccuccaggcuacugcc

SEQ ID NO: 371352 - RNA, 32 nt, Human
ccccuagcuagacuucauccuccuggacagau

SEQ ID NO: 371353 - RNA, 19 nt, Human
ccccuagcugggccaacuc

SEQ ID NO: 371354 - RNA, 20 nt, Human
ccccuagcugucaguuuggc

SEQ ID NO: 371355 - RNA, 18 nt, Human
ccccuagcuucccucccu

SEQ ID NO: 371356 - RNA, 32 nt, Human
ccccuaggagccuucagucugggagaaacaga

SEQ ID NO: 371357 - RNA, 17 nt, Human
ccccuaggccagacuuc

SEQ ID NO: 371358 - RNA, 20 nt, Human
ccccuaggccugucucuccc

SEQ ID NO: 371359 - RNA, 20 nt, Human
ccccuaggcgugccucuccc

SEQ ID NO: 371360 - RNA, 32 nt, Human
ccccuaggcuugaggguggagagccaggccuc

SEQ ID NO: 371361 - RNA, 32 nt, Human
ccccuagggaauggucccagcacgaguggcca

SEQ ID NO: 371362 - RNA, 28 nt, Human
ccccuagggcaaaagugaccauuguuaa

SEQ ID NO: 371363 - RNA, 21 nt, Human
ccccuaguagugauccuuccu

SEQ ID NO: 371364 - RNA, 32 nt, Human
ccccuaguaucuucagcacaugcucacuguuc

SEQ ID NO: 371365 - RNA, 32 nt, Human
ccccuaguaucuucagcacaugcucacuguuu

SEQ ID NO: 371366 - RNA, 23 nt, Human
ccccuaguccaucaccuggcacg

SEQ ID NO: 371367 - RNA, 18 nt, Human
ccccuagucugcccuccc

SEQ ID NO: 371368 - RNA, 32 nt, Human
ccccuagugaugcauccugccuaggcuggacu

SEQ ID NO: 371369 - RNA, 20 nt, Human
ccccuagugcccccuccuca

SEQ ID NO: 371370 - RNA, 20 nt, Human
ccccuaguucccucugcuca

SEQ ID NO: 371371 - RNA, 32 nt, Human
ccccuaucacacucuaguucaguccugugaac

SEQ ID NO: 371372 - RNA, 32 nt, Human
ccccuauccagaaucacaugcacaaguuuuua

SEQ ID NO: 371373 - RNA, 32 nt, Human
ccccuauccauggcaggggaggggcucagcau

SEQ ID NO: 371374 - RNA, 32 nt, Human
ccccuaucccagagcucagaguggacccuggc

SEQ ID NO: 371375 - RNA, 32 nt, Human
ccccuaucuggcaaggaaaccccauacagaag

SEQ ID NO: 371376 - RNA, 32 nt, Human
ccccuaucuguccuucuucuggaagagcugga

SEQ ID NO: 371377 - RNA, 18 nt, Human
ccccuaugagucaacuca

SEQ ID NO: 371378 - RNA, 32 nt, Human
ccccuauugcucuucuuccuaaagcuaaagga

SEQ ID NO: 371379 - RNA, 32 nt, Human
ccccuauuugcaaucauauucucccucugcuu

SEQ ID NO: 371380 - RNA, 32 nt, Human
ccccuauuuuacugcagcucaggggguaggcu

SEQ ID NO: 371381 - RNA, 21 nt, Human
ccccucaaaggcccccuccuc

SEQ ID NO: 371382 - RNA, 25 nt, Human
ccccucaaauuuucucagcucugcc

SEQ ID NO: 371383 - RNA, 25 nt, Human
ccccucaacccuccguuccuccuca

SEQ ID NO: 371384 - RNA, 32 nt, Human
ccccucaacuaccaccaccuccagucagucuc

SEQ ID NO: 371385 - RNA, 32 nt, Human
ccccucacagaugaacaaagugaggcagagaa

SEQ ID NO: 371386 - RNA, 25 nt, Human
ccccucacagcccucagcucuacuc

SEQ ID NO: 371387 - RNA, 20 nt, Human
ccccucacagcucuucccca

SEQ ID NO: 371388 - RNA, 32 nt, Human
ccccucaccaaaaccugcggggcugcuuggag

SEQ ID NO: 371389 - RNA, 21 nt, Human
ccccucaccagcgccucccca

SEQ ID NO: 371390 - RNA, 20 nt, Human
ccccucaccauccuuccuca

SEQ ID NO: 371391 - RNA, 19 nt, Human
ccccucacccaccuccccg

SEQ ID NO: 371392 - RNA, 20 nt, Human
ccccucacccacgccaacuc

SEQ ID NO: 371393 - RNA, 19 nt, Human
ccccucacccacucccucc

SEQ ID NO: 371394 - RNA, 32 nt, Human
ccccucacccacucuacccccaccuccucauu

SEQ ID NO: 371395 - RNA, 22 nt, Human
ccccucaccccacccccaccuc

SEQ ID NO: 371396 - RNA, 20 nt, Human
ccccucaccccacugcuuca

SEQ ID NO: 371397 - RNA, 22 nt, Human
ccccucaccccauauuccauca

SEQ ID NO: 371398 - RNA, 20 nt, Human
ccccucaccccaucuuguca

SEQ ID NO: 371399 - RNA, 20 nt, Human
ccccucacccccaacucucc

SEQ ID NO: 371400 - RNA, 18 nt, Human
ccccucacccccaccuca

SEQ ID NO: 371401 - RNA, 21 nt, Human
ccccucacccccacuggccca

SEQ ID NO: 371402 - RNA, 18 nt, Human
ccccucaccccccaacuc

SEQ ID NO: 371403 - RNA, 18 nt, Human
ccccucaccccccaccca

SEQ ID NO: 371404 - RNA, 32 nt, Human
ccccucaccccucaccauccuuccucaggacu

SEQ ID NO: 371405 - RNA, 19 nt, Human
ccccucacccucacccucc

SEQ ID NO: 371406 - RNA, 19 nt, Human
ccccucacccuccucccuc

SEQ ID NO: 371407 - RNA, 21 nt, Human
ccccucacccugccuuaucuu

SEQ ID NO: 371408 - RNA, 20 nt, Human
ccccucacccugcucccucu

SEQ ID NO: 371409 - RNA, 20 nt, Human
ccccucacccugcuguccuc

SEQ ID NO: 371410 - RNA, 20 nt, Human
ccccucaccgcgcccccgca

SEQ ID NO: 371411 - RNA, 20 nt, Human
ccccucaccuccacccccuc

SEQ ID NO: 371412 - RNA, 32 nt, Human
ccccucaccuccacccccuccugucaccggcc

SEQ ID NO: 371413 - RNA, 19 nt, Human
ccccucaccuccccccucc

SEQ ID NO: 371414 - RNA, 18 nt, Human
ccccucaccugcuccucc

SEQ ID NO: 371415 - RNA, 23 nt, Human
ccccucaccugcuugccuccuua

SEQ ID NO: 371416 - RNA, 32 nt, Human
ccccucaccuuccugguucccugaggguccuc

SEQ ID NO: 371417 - RNA, 20 nt, Human
ccccucaccuucucucccca

SEQ ID NO: 371418 - RNA, 20 nt, Human
ccccucaccuugcugccuca

SEQ ID NO: 371419 - RNA, 20 nt, Human
ccccucacgcuacccuccca

SEQ ID NO: 371420 - RNA, 20 nt, Human
ccccucacuauccuacccca

SEQ ID NO: 371421 - RNA, 32 nt, Human
ccccucacugcaaaagcaucuccuuaaguagc

SEQ ID NO: 371422 - RNA, 32 nt, Human
ccccucacugcacucugcucaucacgggagga

SEQ ID NO: 371423 - RNA, 18 nt, Human
ccccucacugccucccca

SEQ ID NO: 371424 - RNA, 32 nt, Human
ccccucacuguggggauugaucauucucauga

SEQ ID NO: 371425 - RNA, 20 nt, Human
ccccucacuuaaccacccca

SEQ ID NO: 371426 - RNA, 21 nt, Human
ccccucacuucgcccucccca

SEQ ID NO: 371427 - RNA, 18 nt, Human
ccccucacuugccugcca

SEQ ID NO: 371428 - RNA, 32 nt, Human
ccccucacuuuugcucagccuagcagucuacu

SEQ ID NO: 371429 - RNA, 32 nt, Human
ccccucagacugcugcucagccaggcaccaac

SEQ ID NO: 371430 - RNA, 32 nt, Human
ccccucagaggagcucugugcuauagucugug

SEQ ID NO: 371431 - RNA, 32 nt, Human
ccccucagcaucaagcagcccaaccaaggcgu

SEQ ID NO: 371432 - RNA, 32 nt, Human
ccccucagccaucucagggugaggagcugcca

SEQ ID NO: 371433 - RNA, 32 nt, Human
ccccucagccauguggcacuucugagcuccug

SEQ ID NO: 371434 - RNA, 32 nt, Human
ccccucagcccgugagcagccauguccaaccc

SEQ ID NO: 371435 - RNA, 32 nt, Human
ccccucagccuccugaguagcugagacuacag

SEQ ID NO: 371436 - RNA, 32 nt, Human
ccccucagccucuccccugccugcccugguga

SEQ ID NO: 371437 - RNA, 20 nt, Human
ccccucagccucuucucugc

SEQ ID NO: 371438 - RNA, 32 nt, Human
ccccucagccugagccgggggaagccaggcgg

SEQ ID NO: 371439 - RNA, 32 nt, Human
ccccucagccugggggaagaagagggccucgg

SEQ ID NO: 371440 - RNA, 32 nt, Human
ccccucagccuucucagcauuuccuuauccca

SEQ ID NO: 371441 - RNA, 18 nt, Human
ccccucagcgucagcuca

SEQ ID NO: 371442 - RNA, 32 nt, Human
ccccucagcuccccggcacugcagucugcaga

SEQ ID NO: 371443 - RNA, 22 nt, Human
ccccucagcucugaucucugcc

SEQ ID NO: 371444 - RNA, 18 nt, Human
ccccucagcugcccccuc

SEQ ID NO: 371445 - RNA, 32 nt, Human
ccccucagcugucuccucccucccucuggaaa

SEQ ID NO: 371446 - RNA, 32 nt, Human
ccccucagcugugcccugcugccuggcguccc

SEQ ID NO: 371447 - RNA, 20 nt, Human
ccccucagcuuucccuccuc

SEQ ID NO: 371448 - RNA, 32 nt, Human
ccccucaggaagagaaucgaggccaaguuccu

SEQ ID NO: 371449 - RNA, 32 nt, Human
ccccucaggccaccuccuguccucacuccugu

SEQ ID NO: 371450 - RNA, 22 nt, Human
ccccucaguacuguagcaugga

SEQ ID NO: 371451 - RNA, 19 nt, Human
ccccucagucucccuccuc

SEQ ID NO: 371452 - RNA, 32 nt, Human
ccccucagucuccuccccaucacccuccucag

SEQ ID NO: 371453 - RNA, 32 nt, Human
ccccucagugacuuccuugggugauccugacu

SEQ ID NO: 371454 - RNA, 32 nt, Human
ccccucagugcugcugucaguguagcaaauaa

SEQ ID NO: 371455 - RNA, 32 nt, Human
ccccucaguguaauguagggguugugagcaca

SEQ ID NO: 371456 - RNA, 21 nt, Human
ccccucaguuuccucuccuca

SEQ ID NO: 371457 - RNA, 32 nt, Human
ccccucauagccuguaccuguuaucaauauaa

SEQ ID NO: 371458 - RNA, 21 nt, Human
ccccucauccacgccucccca

SEQ ID NO: 371459 - RNA, 32 nt, Human
ccccucauccagggaacgagugugucucaagg

SEQ ID NO: 371460 - RNA, 32 nt, Human
ccccucaucugugguaguagugaaggcuaggu

SEQ ID NO: 371461 - RNA, 20 nt, Human
ccccucaugccuccuccuca

SEQ ID NO: 371462 - RNA, 32 nt, Human
ccccucaugcuagggccccauggguccgggag

SEQ ID NO: 371463 - RNA, 31 nt, Human
ccccucaugcucucuggcugggccagugggc

SEQ ID NO: 371464 - RNA, 32 nt, Human
ccccucaugcucucuggcugggccagugggca

SEQ ID NO: 371465 - RNA, 32 nt, Human
ccccucaugcuucacagguugacuaguaucug

SEQ ID NO: 371466 - RNA, 32 nt, Human
ccccucaugugaagaacgugucagaaucuuua

SEQ ID NO: 371467 - RNA, 21 nt, Human
ccccuccaaaacacgccccca

SEQ ID NO: 371468 - RNA, 32 nt, Human
ccccuccaaauagccauacuuagccucagcag

SEQ ID NO: 371469 - RNA, 32 nt, Human
ccccuccaacaggugcucacagccaccgaggc

SEQ ID NO: 371470 - RNA, 32 nt, Human
ccccuccaacccccaaaccagguggaaaaagg

SEQ ID NO: 371471 - RNA, 32 nt, Human
ccccuccaagcccagcuggcaccaaagagcuu

SEQ ID NO: 371472 - RNA, 32 nt, Human
ccccuccaagggacaggaaggcugggggaggg

SEQ ID NO: 371473 - RNA, 32 nt, Human
ccccuccaaguuggggacggagauggggagca

SEQ ID NO: 371474 - RNA, 22 nt, Human
ccccuccaccccagccagcuca

SEQ ID NO: 371475 - RNA, 21 nt, Human
ccccuccaccccauuugcuca

SEQ ID NO: 371476 - RNA, 17 nt, Human
ccccuccacccccucca

SEQ ID NO: 371477 - RNA, 32 nt, Human
ccccuccacccugcaacccccaucccccaccg

SEQ ID NO: 371478 - RNA, 24 nt, Human
ccccuccaccucaggccccagccc

SEQ ID NO: 371479 - RNA, 32 nt, Human
ccccuccacucccaucugcuucccuuucagag

SEQ ID NO: 371480 - RNA, 20 nt, Human
ccccuccacuccuccccuca

SEQ ID NO: 371481 - RNA, 32 nt, Human
ccccuccacuccucggccuugcccgacacuga

SEQ ID NO: 371482 - RNA, 32 nt, Human
ccccuccacuggccagccugggggugcccugc

SEQ ID NO: 371483 - RNA, 19 nt, Human
ccccuccacuucagcuugc

SEQ ID NO: 371484 - RNA, 21 nt, Human
ccccuccacuuccugcccucu

SEQ ID NO: 371485 - RNA, 32 nt, Human
ccccuccagaagacuugccugcuagggaccuc

SEQ ID NO: 371486 - RNA, 32 nt, Human
ccccuccagaagcagagcaugaccugggugac

SEQ ID NO: 371487 - RNA, 31 nt, Human
ccccuccagagagugaggagggggccugaga

SEQ ID NO: 371488 - RNA, 32 nt, Human
ccccuccagagcagugggacaucuggggacug

SEQ ID NO: 371489 - RNA, 19 nt, Human
ccccuccagagcccugccc

SEQ ID NO: 371490 - RNA, 32 nt, Human
ccccuccagcacucccuuuugucaucuugagu

SEQ ID NO: 371491 - RNA, 32 nt, Human
ccccuccagcugaugccugcucccucucucug

SEQ ID NO: 371492 - RNA, 32 nt, Human
ccccuccaggccuccuuacuccaucuuccaga

SEQ ID NO: 371493 - RNA, 32 nt, Human
ccccuccaggcuucacccucccugccuaagca

SEQ ID NO: 371494 - RNA, 20 nt, Human
ccccuccaguauccaacuua

SEQ ID NO: 371495 - RNA, 17 nt, Human
ccccuccagucagccca

SEQ ID NO: 371496 - RNA, 32 nt, Human
ccccuccagugcccucuccucgaugccucgcu

SEQ ID NO: 371497 - RNA, 32 nt, Human
ccccuccaguuagucccuaucuggguaagggu

SEQ ID NO: 371498 - RNA, 32 nt, Human
ccccuccaucuucuaccucugaauggccaccc

SEQ ID NO: 371499 - RNA, 32 nt, Human
ccccuccaugcggaguaggcacggggcccaau

SEQ ID NO: 371500 - RNA, 32 nt, Human
ccccuccauucccugugggugcagcccacagg

SEQ ID NO: 371501 - RNA, 32 nt, Human
ccccucccaaccacagcagccagagccaucug

SEQ ID NO: 371502 - RNA, 18 nt, Human
ccccucccaaccccaucc

SEQ ID NO: 371503 - RNA, 18 nt, Human
ccccucccaacccuucuu

SEQ ID NO: 371504 - RNA, 32 nt, Human
ccccucccaagggcccuuaaagcgaccuguca

SEQ ID NO: 371505 - RNA, 28 nt, Human
ccccucccaagugacccuccuccugccu

SEQ ID NO: 371506 - RNA, 22 nt, Human
ccccucccacacaaaccagcca

SEQ ID NO: 371507 - RNA, 22 nt, Human
ccccucccacugaaguuugugu

SEQ ID NO: 371508 - RNA, 20 nt, Human
ccccucccacuuguuugugu

SEQ ID NO: 371509 - RNA, 32 nt, Human
ccccucccacuuguuugugugaucucagaacu

SEQ ID NO: 371510 - RNA, 32 nt, Human
ccccucccagacaggaaggagaagaggcaggu

SEQ ID NO: 371511 - RNA, 32 nt, Human
ccccucccagaggaaagagcugagccacucuc

SEQ ID NO: 371512 - RNA, 32 nt, Human
ccccucccagcaaccuaagaccagucugaacu

SEQ ID NO: 371513 - RNA, 32 nt, Human
ccccucccagcaccagcucugcucaggccccu

SEQ ID NO: 371514 - RNA, 32 nt, Human
ccccucccagcaccuuucuccccaacagggug

SEQ ID NO: 371515 - RNA, 32 nt, Human
ccccucccagcccucagacccugggguccugg

SEQ ID NO: 371516 - RNA, 32 nt, Human
ccccucccagccuaccccuccugcgcugcccc

SEQ ID NO: 371517 - RNA, 32 nt, Human
ccccucccagccugugaccuuugugaccaacu

SEQ ID NO: 371518 - RNA, 19 nt, Human
ccccucccaggcccugucc

SEQ ID NO: 371519 - RNA, 32 nt, Human
ccccucccaggucugguuagggcaguuguuac

SEQ ID NO: 371520 - RNA, 32 nt, Human
ccccucccaucuugaggucguucuccacauuc

SEQ ID NO: 371521 - RNA, 28 nt, Human
ccccucccauggccaaaaaccccacugu

SEQ ID NO: 371522 - RNA, 32 nt, Human
ccccuccccacaccuccaggaacuccacuccc

SEQ ID NO: 371523 - RNA, 32 nt, Human
ccccuccccacagucacauggccacacggucc

SEQ ID NO: 371524 - RNA, 22 nt, Human
ccccuccccaccaccucucaua

SEQ ID NO: 371525 - RNA, 19 nt, Human
ccccuccccaccccugccu

SEQ ID NO: 371526 - RNA, 23 nt, Human
ccccuccccaccuaccccuuccu

SEQ ID NO: 371527 - RNA, 19 nt, Human
ccccuccccacuuugggga

SEQ ID NO: 371528 - RNA, 32 nt, Human
ccccuccccagagggaucccuaacgugcccag

SEQ ID NO: 371529 - RNA, 32 nt, Human
ccccuccccagccacagucugaggagccccug

SEQ ID NO: 371530 - RNA, 32 nt, Human
ccccuccccagccuccugacccuucccagccc

SEQ ID NO: 371531 - RNA, 32 nt, Human
ccccuccccagccuguguccacagugcuguga

SEQ ID NO: 371532 - RNA, 32 nt, Human
ccccuccccaggagaaaaagacccccaagcag

SEQ ID NO: 371533 - RNA, 32 nt, Human
ccccuccccaggaggagggauggccugacuga

SEQ ID NO: 371534 - RNA, 32 nt, Human
ccccuccccagggccccacccugccauaugaa

SEQ ID NO: 371535 - RNA, 32 nt, Human
ccccuccccagugccucuccuggucguggaag

SEQ ID NO: 371536 - RNA, 22 nt, Human
ccccucccccaaauccacccca

SEQ ID NO: 371537 - RNA, 22 nt, Human
ccccucccccacagagccucca

SEQ ID NO: 371538 - RNA, 22 nt, Human
ccccucccccagccacucccca

SEQ ID NO: 371539 - RNA, 32 nt, Human
ccccucccccagcccacccaaauaaaggauua

SEQ ID NO: 371540 - RNA, 24 nt, Human
ccccucccccagcuccggccgcca

SEQ ID NO: 371541 - RNA, 21 nt, Human
ccccucccccaggagcccuca

SEQ ID NO: 371542 - RNA, 23 nt, Human
ccccucccccagggccccaccca

SEQ ID NO: 371543 - RNA, 32 nt, Human
ccccucccccauuuacuucuccaccucccguc

SEQ ID NO: 371544 - RNA, 24 nt, Human
ccccuccccccaaugcacaagcca

SEQ ID NO: 371545 - RNA, 20 nt, Human
ccccuccccccgacccagcc

SEQ ID NO: 371546 - RNA, 23 nt, Human
ccccuccccccucccggaggcca

SEQ ID NO: 371547 - RNA, 23 nt, Human
ccccuccccccucuggcccagcc

SEQ ID NO: 371548 - RNA, 27 nt, Human
ccccucccccgagggcagacccagcca

SEQ ID NO: 371549 - RNA, 22 nt, Human
ccccucccccgccccugcccca

SEQ ID NO: 371550 - RNA, 32 nt, Human
ccccucccccguccgcgcccucccucuuuccc

SEQ ID NO: 371551 - RNA, 20 nt, Human
ccccucccccuagcccagcc

SEQ ID NO: 371552 - RNA, 22 nt, Human
ccccucccccucaaccccacca

SEQ ID NO: 371553 - RNA, 32 nt, Human
ccccucccccucccccucuuucuucuccuccc

SEQ ID NO: 371554 - RNA, 17 nt, Human
ccccucccccuccgccc

SEQ ID NO: 371555 - RNA, 23 nt, Human
ccccucccccucgggcgccagcc

SEQ ID NO: 371556 - RNA, 32 nt, Human
ccccucccccugggggcaaaucaggacacaac

SEQ ID NO: 371557 - RNA, 32 nt, Human
ccccucccccuucaaacacccucccccacauu

SEQ ID NO: 371558 - RNA, 32 nt, Human
ccccucccccuucauuacuucacucagguggg

SEQ ID NO: 371559 - RNA, 32 nt, Human
ccccuccccgggagguacagcuggcagaggga

SEQ ID NO: 371560 - RNA, 22 nt, Human
ccccuccccgggccacccagcc

SEQ ID NO: 371561 - RNA, 32 nt, Human
ccccuccccuaucccuaggcacuuaaccaaga

SEQ ID NO: 371562 - RNA, 22 nt, Human
ccccuccccucaguguccccca

SEQ ID NO: 371563 - RNA, 32 nt, Human
ccccuccccuccaacucucaucccauugagcc

SEQ ID NO: 371564 - RNA, 32 nt, Human
ccccuccccuccaucucucuuccccauagacc

SEQ ID NO: 371565 - RNA, 17 nt, Human
ccccuccccuccccccu

SEQ ID NO: 371566 - RNA, 23 nt, Human
ccccuccccucccccgcgcgcca

SEQ ID NO: 371567 - RNA, 21 nt, Human
ccccuccccuccuccccagcc

SEQ ID NO: 371568 - RNA, 21 nt, Human
ccccuccccucgcauccccca

SEQ ID NO: 371569 - RNA, 32 nt, Human
ccccuccccucgggccgggagcuuccagccca

SEQ ID NO: 371570 - RNA, 32 nt, Human
ccccuccccugccaucccuccccggacuccgg

SEQ ID NO: 371571 - RNA, 32 nt, Human
ccccuccccugccccugccccugccccugccc

SEQ ID NO: 371572 - RNA, 32 nt, Human
ccccuccccugcccugcuccagcucacacgug

SEQ ID NO: 371573 - RNA, 23 nt, Human
ccccuccccuucucccacagcca

SEQ ID NO: 371574 - RNA, 20 nt, Human
ccccucccgccgccuccuca

SEQ ID NO: 371575 - RNA, 32 nt, Human
ccccucccgcuagacucccagccugggcccuc

SEQ ID NO: 371576 - RNA, 32 nt, Human
ccccucccgcugcguguccagguccaaagugg

SEQ ID NO: 371577 - RNA, 32 nt, Human
ccccucccggaggcagcuucaggacaggacac

SEQ ID NO: 371578 - RNA, 32 nt, Human
ccccucccuaucucaccugcccagcccugugc

SEQ ID NO: 371579 - RNA, 32 nt, Human
ccccucccucaaggaggucuggcuuuauccau

SEQ ID NO: 371580 - RNA, 32 nt, Human
ccccucccucaaucuucuccccagccccuccc

SEQ ID NO: 371581 - RNA, 32 nt, Human
ccccucccucaccugaguccuggccucugugg

SEQ ID NO: 371582 - RNA, 32 nt, Human
ccccucccucauccucccaucccaguaaaccc

SEQ ID NO: 371583 - RNA, 32 nt, Human
ccccucccuccaccauuucccccuacucccuc

SEQ ID NO: 371584 - RNA, 32 nt, Human
ccccucccuccacccccucacccaggacgugc

SEQ ID NO: 371585 - RNA, 32 nt, Human
ccccucccuccagccucccuaacuggaaacac

SEQ ID NO: 371586 - RNA, 32 nt, Human
ccccucccuccaggucccgagguggauaaggg

SEQ ID NO: 371587 - RNA, 32 nt, Human
ccccucccucccacuggagcagcuccagagcc

SEQ ID NO: 371588 - RNA, 20 nt, Human
ccccucccuccccacagcca

SEQ ID NO: 371589 - RNA, 22 nt, Human
ccccucccuccccacccaagcc

SEQ ID NO: 371590 - RNA, 25 nt, Human
ccccucccuccccacggcccugcca

SEQ ID NO: 371591 - RNA, 32 nt, Human
ccccucccucccccaucaaacuuccuucauuu

SEQ ID NO: 371592 - RNA, 32 nt, Human
ccccucccucccccuccuccccucuuuuacuc

SEQ ID NO: 371593 - RNA, 26 nt, Human
ccccucccuccccgcccgcacggcca

SEQ ID NO: 371594 - RNA, 32 nt, Human
ccccucccuccccuccccuucuucuccaucuc

SEQ ID NO: 371595 - RNA, 32 nt, Human
ccccucccuccccucccucucgcuccuuccuu

SEQ ID NO: 371596 - RNA, 32 nt, Human
ccccucccuccccuuaugaggucucaggcagu

SEQ ID NO: 371597 - RNA, 32 nt, Human
ccccucccuccuucacuccugccuccucagcu

SEQ ID NO: 371598 - RNA, 21 nt, Human
ccccucccuccuugaaggcua

SEQ ID NO: 371599 - RNA, 25 nt, Human
ccccucccuccuugcuucccaccca

SEQ ID NO: 371600 - RNA, 23 nt, Human
ccccucccucgccaccccaacca

SEQ ID NO: 371601 - RNA, 32 nt, Human
ccccucccucuacugccuucugucagggucuu

SEQ ID NO: 371602 - RNA, 32 nt, Human
ccccucccucucagguguccugagaugcuguu

SEQ ID NO: 371603 - RNA, 22 nt, Human
ccccucccucuguccaccagcc

SEQ ID NO: 371604 - RNA, 26 nt, Human
ccccucccucuucagcuucccagaca

SEQ ID NO: 371605 - RNA, 16 nt, Human
ccccucccucuucugc

SEQ ID NO: 371606 - RNA, 25 nt, Human
ccccucccucuucugcccccuacca

SEQ ID NO: 371607 - RNA, 32 nt, Human
ccccucccucuuuucaguuucucccccuccuc

SEQ ID NO: 371608 - RNA, 32 nt, Human
ccccucccugcauugaggccuuguggaccccu

SEQ ID NO: 371609 - RNA, 32 nt, Human
ccccucccugcucccuuuugaugguggccucu

SEQ ID NO: 371610 - RNA, 32 nt, Human
ccccucccuggccuguucuguuuugccugaag

SEQ ID NO: 371611 - RNA, 32 nt, Human
ccccucccuggguugaccucacagacauugaa

SEQ ID NO: 371612 - RNA, 32 nt, Human
ccccucccuguuugacuucacacacacucaua

SEQ ID NO: 371613 - RNA, 32 nt, Human
ccccucccuucccccuccucguucccuuuuuc

SEQ ID NO: 371614 - RNA, 23 nt, Human
ccccucccuucccgaccccaaca

SEQ ID NO: 371615 - RNA, 24 nt, Human
ccccucccuuccugcccuucacca

SEQ ID NO: 371616 - RNA, 32 nt, Human
ccccucccuucuaaucccccaaaggaccuauu

SEQ ID NO: 371617 - RNA, 20 nt, Human
ccccucccuucuguuugugc

SEQ ID NO: 371618 - RNA, 18 nt, Human
ccccucccuugcaccucc

SEQ ID NO: 371619 - RNA, 32 nt, Human
ccccucccuugcuggccagcaucccccucuuc

SEQ ID NO: 371620 - RNA, 32 nt, Human
ccccucccuuucuccccugcccccaggacugg

SEQ ID NO: 371621 - RNA, 24 nt, Human
ccccucccuuuugcgcacacacca

SEQ ID NO: 371622 - RNA, 26 nt, Human
ccccuccgacgaccucaacucugccc

SEQ ID NO: 371623 - RNA, 32 nt, Human
ccccuccgcaccacugaccucuugucuccuau

SEQ ID NO: 371624 - RNA, 32 nt, Human
ccccuccgcaccacugaccucuugucuccugu

SEQ ID NO: 371625 - RNA, 32 nt, Human
ccccuccgcaccccacacagccuugcuccaag

SEQ ID NO: 371626 - RNA, 20 nt, Human
ccccuccgcagccccauccc

SEQ ID NO: 371627 - RNA, 24 nt, Human
ccccuccgcaggcaggacauccca

SEQ ID NO: 371628 - RNA, 32 nt, Human
ccccuccgcccccucuggaggcugaagaggga

SEQ ID NO: 371629 - RNA, 22 nt, Human
ccccuccgccccugccucccuc

SEQ ID NO: 371630 - RNA, 24 nt, Human
ccccuccgccgguccccacccucu

SEQ ID NO: 371631 - RNA, 21 nt, Human
ccccuccgccuccuagcccuc

SEQ ID NO: 371632 - RNA, 20 nt, Human
ccccuccgccuucuccccuc

SEQ ID NO: 371633 - RNA, 32 nt, Human
ccccuccgcgcucuccgcuuguggauaacuag

SEQ ID NO: 371634 - RNA, 24 nt, Human
ccccuccgcucuugacccugcaua

SEQ ID NO: 371635 - RNA, 22 nt, Human
ccccuccggccucagcucccuc

SEQ ID NO: 371636 - RNA, 24 nt, Human
ccccuccgguagccgccccuccuc

SEQ ID NO: 371637 - RNA, 32 nt, Human
ccccuccguccagccagcaaggcuuucccaag

SEQ ID NO: 371638 - RNA, 22 nt, Human
ccccuccgugucaccuggcaua

SEQ ID NO: 371639 - RNA, 32 nt, Human
ccccuccguucaugccuguaaucccaacauuu

SEQ ID NO: 371640 - RNA, 32 nt, Human
ccccuccguucccagccugcccugcccccgcc

SEQ ID NO: 371641 - RNA, 32 nt, Human
ccccuccuaaacauucguacacacacaaacac

SEQ ID NO: 371642 - RNA, 22 nt, Human
ccccuccuauccauauccccca

SEQ ID NO: 371643 - RNA, 32 nt, Human
ccccuccucaacaagcagagugaugacuggca

SEQ ID NO: 371644 - RNA, 32 nt, Human
ccccuccucaccccuucuuugccuccuacccc

SEQ ID NO: 371645 - RNA, 32 nt, Human
ccccuccucaugggaaugugucuggggucuug

SEQ ID NO: 371646 - RNA, 32 nt, Human
ccccuccuccacuccuacgcccacucccaugc

SEQ ID NO: 371647 - RNA, 21 nt, Human
ccccuccuccagaccacccuc

SEQ ID NO: 371648 - RNA, 32 nt, Human
ccccuccuccaggagaacucgcggcugggcug

SEQ ID NO: 371649 - RNA, 32 nt, Human
ccccuccuccagggaacccugcacccugggca

SEQ ID NO: 371650 - RNA, 32 nt, Human
ccccuccucccaccaucaccucccucaccucg

SEQ ID NO: 371651 - RNA, 32 nt, Human
ccccuccucccagcuccuggaaacccaccaau

SEQ ID NO: 371652 - RNA, 32 nt, Human
ccccuccucccauggccugccuggugacuguc

SEQ ID NO: 371653 - RNA, 15 nt, Human
ccccuccuccccucc

SEQ ID NO: 371654 - RNA, 32 nt, Human
ccccuccuccccucucuccugggcccucauuc

SEQ ID NO: 371655 - RNA, 32 nt, Human
ccccuccucccuggcccucucguucguuucug

SEQ ID NO: 371656 - RNA, 21 nt, Human
ccccuccuccucagcucaccc

SEQ ID NO: 371657 - RNA, 32 nt, Human
ccccuccucucccaucccccugcccucguggc

SEQ ID NO: 371658 - RNA, 19 nt, Human
ccccuccucucccgcucug

SEQ ID NO: 371659 - RNA, 19 nt, Human
ccccuccucucccucauca

SEQ ID NO: 371660 - RNA, 32 nt, Human
ccccuccugacuccaucucccugcaccagccu

SEQ ID NO: 371661 - RNA, 32 nt, Human
ccccuccugagaugaccugauggagcugaugc

SEQ ID NO: 371662 - RNA, 22 nt, Human
ccccuccugagcucagccccca

SEQ ID NO: 371663 - RNA, 32 nt, Human
ccccuccugcagccuccugcgccccgccgagc

SEQ ID NO: 371664 - RNA, 32 nt, Human
ccccuccugcauucaggagagccaugguaggg

SEQ ID NO: 371665 - RNA, 32 nt, Human
ccccuccugccucaccaacccgugcacaacca

SEQ ID NO: 371666 - RNA, 32 nt, Human
ccccuccugccugggucccagcucuguucacc

SEQ ID NO: 371667 - RNA, 32 nt, Human
ccccuccugcuucccuuccccacuuauccccc

SEQ ID NO: 371668 - RNA, 32 nt, Human
ccccuccuggagauggggucaaggcagcagga

SEQ ID NO: 371669 - RNA, 32 nt, Human
ccccuccuggcucaagaauuacuccgaaguca

SEQ ID NO: 371670 - RNA, 32 nt, Human
ccccuccuggggagccaggcucacagguuguu

SEQ ID NO: 371671 - RNA, 32 nt, Human
ccccuccugugcccucugcccugguggaagcg

SEQ ID NO: 371672 - RNA, 18 nt, Human
ccccuccuuaucccccuc

SEQ ID NO: 371673 - RNA, 32 nt, Human
ccccuccuucagaggaggcucuggguggggcc

SEQ ID NO: 371674 - RNA, 16 nt, Human
ccccuccuucaguugc

SEQ ID NO: 371675 - RNA, 32 nt, Human
ccccuccuuccuugaccagcagaucccagcuc

SEQ ID NO: 371676 - RNA, 22 nt, Human
ccccuccuugacggugcuggca

SEQ ID NO: 371677 - RNA, 24 nt, Human
ccccuccuuucccaggcccugccc

SEQ ID NO: 371678 - RNA, 18 nt, Human
ccccuccuuucuuugugc

SEQ ID NO: 371679 - RNA, 22 nt, Human
ccccuccuuuuuccagugccca

SEQ ID NO: 371680 - RNA, 32 nt, Human
ccccucgaauucccugaugguggugggguggg

SEQ ID NO: 371681 - RNA, 32 nt, Human
ccccucgcacuccugugaggcuuuugcagguc

SEQ ID NO: 371682 - RNA, 24 nt, Human
ccccucgcagauaucucccggggc

SEQ ID NO: 371683 - RNA, 20 nt, Human
ccccucgcagccccuugcuc

SEQ ID NO: 371684 - RNA, 32 nt, Human
ccccucgccacaucccugucuuggggcccagc

SEQ ID NO: 371685 - RNA, 18 nt, Human
ccccucgccgcugauuca

SEQ ID NO: 371686 - RNA, 18 nt, Human
ccccucgccgguaccuca

SEQ ID NO: 371687 - RNA, 32 nt, Human
ccccucgccggugaccuuggccgccucggaug

SEQ ID NO: 371688 - RNA, 32 nt, Human
ccccucgccugccugugucucuccccaaaccc

SEQ ID NO: 371689 - RNA, 22 nt, Human
ccccucgcgcacccagcgcaga

SEQ ID NO: 371690 - RNA, 18 nt, Human
ccccucgcgcuccagcca

SEQ ID NO: 371691 - RNA, 32 nt, Human
ccccucgcuggcuuccccaccucucucaggau

SEQ ID NO: 371692 - RNA, 32 nt, Human
ccccucgcuguagucgcggagcugugucuguu

SEQ ID NO: 371693 - RNA, 32 nt, Human
ccccucgcugucuuuagcaagcagguuucacu

SEQ ID NO: 371694 - RNA, 32 nt, Human
ccccucggagccugguagugggccacaagccc

SEQ ID NO: 371695 - RNA, 32 nt, Human
ccccucggaggagccuccagaggaggaaaucc

SEQ ID NO: 371696 - RNA, 32 nt, Human
ccccucggccauucccuccaccuccaagacag

SEQ ID NO: 371697 - RNA, 32 nt, Human
ccccucggcccaggaacccaggggaagcugcu

SEQ ID NO: 371698 - RNA, 24 nt, Human
ccccucggcccugcugcucugccc

SEQ ID NO: 371699 - RNA, 22 nt, Human
ccccucggccguagccaccuca

SEQ ID NO: 371700 - RNA, 32 nt, Human
ccccucggccuccugggcaacuugggguacac

SEQ ID NO: 371701 - RNA, 20 nt, Human
ccccucggcugccccuccuc

SEQ ID NO: 371702 - RNA, 32 nt, Human
ccccucggggauaugacacaugcccaugauga

SEQ ID NO: 371703 - RNA, 32 nt, Human
ccccucgucaccauccuguccuuggcuggccg

SEQ ID NO: 371704 - RNA, 32 nt, Human
ccccucgucccccuaggagcagacccaagcuu

SEQ ID NO: 371705 - RNA, 32 nt, Human
ccccucgucccuuccuccgcccccucuccucg

SEQ ID NO: 371706 - RNA, 32 nt, Human
ccccucgucucacccccuuuacacucacauuu

SEQ ID NO: 371707 - RNA, 32 nt, Human
ccccucguucccuagggagagccccaggggcc

SEQ ID NO: 371708 - RNA, 17 nt, Human
ccccucuaccuccucca

SEQ ID NO: 371709 - RNA, 32 nt, Human
ccccucuagcuccugcucacccacgcccaccc

SEQ ID NO: 371710 - RNA, 19 nt, Human
ccccucuaggcuuccugga

SEQ ID NO: 371711 - RNA, 23 nt, Human
ccccucuagucgaaauauuuugu

SEQ ID NO: 371712 - RNA, 32 nt, Human
ccccucucaaagcugucaccagggccaaagug

SEQ ID NO: 371713 - RNA, 32 nt, Human
ccccucucaaauacccuuauuuuauuuauguu

SEQ ID NO: 371714 - RNA, 32 nt, Human
ccccucucacacuuugucacuggaauuuuauu

SEQ ID NO: 371715 - RNA, 32 nt, Human
ccccucucaccagggcccucgcccgcuggucc

SEQ ID NO: 371716 - RNA, 32 nt, Human
ccccucucagaacauacugauugggaggugcg

SEQ ID NO: 371717 - RNA, 32 nt, Human
ccccucucagcccucaguaggugggaggggcc

SEQ ID NO: 371718 - RNA, 32 nt, Human
ccccucucauuguucagcauucuugucaaguu

SEQ ID NO: 371719 - RNA, 31 nt, Human
ccccucuccagcucggucaccaaagcugucu

SEQ ID NO: 371720 - RNA, 32 nt, Human
ccccucuccaucuccucugucucccccgucuc

SEQ ID NO: 371721 - RNA, 20 nt, Human
ccccucuccccaaacuccuc

SEQ ID NO: 371722 - RNA, 32 nt, Human
ccccucucccccaaaugcagcugaagcauuuu

SEQ ID NO: 371723 - RNA, 24 nt, Human
ccccucuccccgcaguguuugugu

SEQ ID NO: 371724 - RNA, 32 nt, Human
ccccucuccccgcguggacuccugagccugcg

SEQ ID NO: 371725 - RNA, 32 nt, Human
ccccucucccguggaugcuccagcacauugca

SEQ ID NO: 371726 - RNA, 32 nt, Human
ccccucucccuccuacucucccccuuucucuc

SEQ ID NO: 371727 - RNA, 32 nt, Human
ccccucucccugcuuggcagagccgcuggagg

SEQ ID NO: 371728 - RNA, 20 nt, Human
ccccucuccucgcccugcuc

SEQ ID NO: 371729 - RNA, 32 nt, Human
ccccucuccucucccuccuccugguccucauc

SEQ ID NO: 371730 - RNA, 19 nt, Human
ccccucuccucucuuccuc

SEQ ID NO: 371731 - RNA, 18 nt, Human
ccccucuccucugucucc

SEQ ID NO: 371732 - RNA, 32 nt, Human
ccccucuccugaagcccugccgcuguggcagc

SEQ ID NO: 371733 - RNA, 32 nt, Human
ccccucuccugagccugucucucccuacccuc

SEQ ID NO: 371734 - RNA, 24 nt, Human
ccccucuccugccucccuccacca

SEQ ID NO: 371735 - RNA, 18 nt, Human
ccccucuccugucccucc

SEQ ID NO: 371736 - RNA, 32 nt, Human
ccccucucgcagcugcagccccaccugccagu

SEQ ID NO: 371737 - RNA, 32 nt, Human
ccccucucgcagcugcucacgccuuagcuggc

SEQ ID NO: 371738 - RNA, 32 nt, Human
ccccucucuagcucccucacccucucccuuuc

SEQ ID NO: 371739 - RNA, 32 nt, Human
ccccucucucccuccugugucuugcgcuuuau

SEQ ID NO: 371740 - RNA, 32 nt, Human
ccccucucuccuccaugcugccuccccuagcu

SEQ ID NO: 371741 - RNA, 32 nt, Human
ccccucucuccuccucaugccacugccucucc

SEQ ID NO: 371742 - RNA, 32 nt, Human
ccccucucuccucgggaucggguccccagagc

SEQ ID NO: 371743 - RNA, 32 nt, Human
ccccucucuccucuuccuccccucucucuucc

SEQ ID NO: 371744 - RNA, 32 nt, Human
ccccucucucuccaucccuuccuuccucccuc

SEQ ID NO: 371745 - RNA, 21 nt, Human
ccccucucucugccccuccca

SEQ ID NO: 371746 - RNA, 32 nt, Human
ccccucucugcagccucuccugccacucgggg

SEQ ID NO: 371747 - RNA, 32 nt, Human
ccccucucuggcccaugguccugcuucaugcu

SEQ ID NO: 371748 - RNA, 24 nt, Human
ccccucucuuccuacccuuccuca

SEQ ID NO: 371749 - RNA, 32 nt, Human
ccccucugaaaccagaaaugagaagucagcuu

SEQ ID NO: 371750 - RNA, 32 nt, Human
ccccucugacaucacuggcauugcaccugggu

SEQ ID NO: 371751 - RNA, 32 nt, Human
ccccucugagcacuucccuugugacaggccac

SEQ ID NO: 371752 - RNA, 32 nt, Human
ccccucugagcucugggagggaagggaaugga

SEQ ID NO: 371753 - RNA, 32 nt, Human
ccccucugagguuucucagguggcaauguaac

SEQ ID NO: 371754 - RNA, 18 nt, Human
ccccucugcaccagcuca

SEQ ID NO: 371755 - RNA, 24 nt, Human
ccccucugcagaucugaagacaca

SEQ ID NO: 371756 - RNA, 21 nt, Human
ccccucugcaugcagcacaga

SEQ ID NO: 371757 - RNA, 32 nt, Human
ccccucugcauuuacacaccagacacacaaac

SEQ ID NO: 371758 - RNA, 32 nt, Human
ccccucugccaagagauccauaccgaggcagc

SEQ ID NO: 371759 - RNA, 32 nt, Human
ccccucugccacccucccauccguccgcgggu

SEQ ID NO: 371760 - RNA, 32 nt, Human
ccccucugcccaggcugccacgcccuggaugc

SEQ ID NO: 371761 - RNA, 32 nt, Human
ccccucugccccacccucagccgcucuuugcu

SEQ ID NO: 371762 - RNA, 21 nt, Human
ccccucugccccccgccaagu

SEQ ID NO: 371763 - RNA, 18 nt, Human
ccccucugccccuccuca

SEQ ID NO: 371764 - RNA, 32 nt, Human
ccccucugcccuuuccccuucucccccucccc

SEQ ID NO: 371765 - RNA, 32 nt, Human
ccccucugccuccccucccccgacccuccugc

SEQ ID NO: 371766 - RNA, 22 nt, Human
ccccucugcucaucccuccuca

SEQ ID NO: 371767 - RNA, 32 nt, Human
ccccucugcucaucccuccucauucagacauc

SEQ ID NO: 371768 - RNA, 21 nt, Human
ccccucugcugcugucccucc

SEQ ID NO: 371769 - RNA, 22 nt, Human
ccccucugcugggccccuccuc

SEQ ID NO: 371770 - RNA, 32 nt, Human
ccccucugcuggguagagaggcacuuucaggg

SEQ ID NO: 371771 - RNA, 32 nt, Human
ccccucugcuggguguaacugcucugaaauaa

SEQ ID NO: 371772 - RNA, 32 nt, Human
ccccucuggaaaugugguucccagggaugggc

SEQ ID NO: 371773 - RNA, 22 nt, Human
ccccucuggagcagaaccccca

SEQ ID NO: 371774 - RNA, 32 nt, Human
ccccucuggcagccccaggugggagcugggag

SEQ ID NO: 371775 - RNA, 19 nt, Human
ccccucuggccugcuggca

SEQ ID NO: 371776 - RNA, 26 nt, Human
ccccucuggcuucccgaacccggcca

SEQ ID NO: 371777 - RNA, 32 nt, Human
ccccucugggagaggggaggggccggcuuuug

SEQ ID NO: 371778 - RNA, 31 nt, Human
ccccucugguggcaugccaugccaagagcaa

SEQ ID NO: 371779 - RNA, 32 nt, Human
ccccucuggugucaugucaggcauuuugcaag

SEQ ID NO: 371780 - RNA, 20 nt, Human
ccccucuguaccccaacuca

SEQ ID NO: 371781 - RNA, 32 nt, Human
ccccucuguaggaaugagaccaagccacagcu

SEQ ID NO: 371782 - RNA, 32 nt, Human
ccccucuguccgcgccauggccgcccccgacc

SEQ ID NO: 371783 - RNA, 20 nt, Human
ccccucuguccucguucccu

SEQ ID NO: 371784 - RNA, 32 nt, Human
ccccucugugaccucucuccucaggccucuag

SEQ ID NO: 371785 - RNA, 32 nt, Human
ccccucuguucccagccccagccuuucuaagc

SEQ ID NO: 371786 - RNA, 32 nt, Human
ccccucuguucuguggcugagcacuuucccag

SEQ ID NO: 371787 - RNA, 32 nt, Human
ccccucuuagaacuugaccaaaauagaaguaa

SEQ ID NO: 371788 - RNA, 20 nt, Human
ccccucuuccagccagccca

SEQ ID NO: 371789 - RNA, 20 nt, Human
ccccucuucccucccccuca

SEQ ID NO: 371790 - RNA, 32 nt, Human
ccccucuucccugguaagaaaaagcaaaaggc

SEQ ID NO: 371791 - RNA, 19 nt, Human
ccccucuuccuccuccuca

SEQ ID NO: 371792 - RNA, 32 nt, Human
ccccucuuccuccuccucaagggaaagcugcc

SEQ ID NO: 371793 - RNA, 23 nt, Human
ccccucuuccucuugacccugca

SEQ ID NO: 371794 - RNA, 32 nt, Human
ccccucuucucccagucuucagucuuaagucg

SEQ ID NO: 371795 - RNA, 32 nt, Human
ccccucuucuccccgcccucccccagcuccua

SEQ ID NO: 371796 - RNA, 32 nt, Human
ccccucuucugcuccuuagacaccugaaugga

SEQ ID NO: 371797 - RNA, 21 nt, Human
ccccucuucuuccucuguaga

SEQ ID NO: 371798 - RNA, 32 nt, Human
ccccucuugacccuuccucccaccccaauucc

SEQ ID NO: 371799 - RNA, 17 nt, Human
ccccucuugcaguuugu

SEQ ID NO: 371800 - RNA, 32 nt, Human
ccccucuuggccucugucccagcucucugcag

SEQ ID NO: 371801 - RNA, 21 nt, Human
ccccucuuggguccccuccuc

SEQ ID NO: 371802 - RNA, 32 nt, Human
ccccucuuuaaccucaucuacaagcauuugcc

SEQ ID NO: 371803 - RNA, 32 nt, Human
ccccucuuucagcuucuaugugguguuggagg

SEQ ID NO: 371804 - RNA, 32 nt, Human
ccccucuuuccuccaaccuccauauccugcca

SEQ ID NO: 371805 - RNA, 21 nt, Human
ccccucuuucuuucugugcaa

SEQ ID NO: 371806 - RNA, 32 nt, Human
ccccucuuugcucuccucguguccucucccag

SEQ ID NO: 371807 - RNA, 21 nt, Human
ccccucuuuuccaguccuugc

SEQ ID NO: 371808 - RNA, 32 nt, Human
ccccugaaacagcucccggagcccugccuguu

SEQ ID NO: 371809 - RNA, 32 nt, Human
ccccugaaaggugagaaagugacugagagagg

SEQ ID NO: 371810 - RNA, 32 nt, Human
ccccugaacagaacccagcccauaagagacau

SEQ ID NO: 371811 - RNA, 32 nt, Human
ccccugaacuaucagcuuaacuuccagcucua

SEQ ID NO: 371812 - RNA, 32 nt, Human
ccccugaaggugaguaugggaggcaggggccg

SEQ ID NO: 371813 - RNA, 32 nt, Human
ccccugaagucuccaucucagcuguauauucu

SEQ ID NO: 371814 - RNA, 21 nt, Human
ccccugaagucugucugcucc

SEQ ID NO: 371815 - RNA, 21 nt, Human
ccccugaagucuguguucucc

SEQ ID NO: 371816 - RNA, 32 nt, Human
ccccugaagugcugggauuacaggugugagcc

SEQ ID NO: 371817 - RNA, 32 nt, Human
ccccugaagugucuccagcagaagagauggau

SEQ ID NO: 371818 - RNA, 32 nt, Human
ccccugaaguucuggcucagggcacaggguac

SEQ ID NO: 371819 - RNA, 20 nt, Human
ccccugaaucagcucugucc

SEQ ID NO: 371820 - RNA, 32 nt, Human
ccccugacacagaccacuagaagauuccggga

SEQ ID NO: 371821 - RNA, 32 nt, Human
ccccugacagauagcugcuucucuccauuuca

SEQ ID NO: 371822 - RNA, 32 nt, Human
ccccugacagauucucaaguaggacgauguuc

SEQ ID NO: 371823 - RNA, 19 nt, Human
ccccugacagcacuggcuc

SEQ ID NO: 371824 - RNA, 32 nt, Human
ccccugaccaggcccugcuccucugcuggggu

SEQ ID NO: 371825 - RNA, 25 nt, Human
ccccugacgcuggcccuuggggccu

SEQ ID NO: 371826 - RNA, 20 nt, Human
ccccugacuccauguggccu

SEQ ID NO: 371827 - RNA, 20 nt, Human
ccccugacuccgucccggcc

SEQ ID NO: 371828 - RNA, 22 nt, Human
ccccugacuccucacgugccug

SEQ ID NO: 371829 - RNA, 21 nt, Human
ccccugacugcuccucggggc

SEQ ID NO: 371830 - RNA, 24 nt, Human
ccccugacugcuccucggggccug

SEQ ID NO: 371831 - RNA, 32 nt, Human
ccccugacuucugcuucaccuuugaccucugc

SEQ ID NO: 371832 - RNA, 32 nt, Human
ccccugagaacagaggucagacacagcugcgu

SEQ ID NO: 371833 - RNA, 32 nt, Human
ccccugagacaagugagggguagucggugaaa

SEQ ID NO: 371834 - RNA, 32 nt, Human
ccccugagaccaaagaagaggggccaaguacc

SEQ ID NO: 371835 - RNA, 26 nt, Human
ccccugagcagagaccgcagcacaga

SEQ ID NO: 371836 - RNA, 32 nt, Human
ccccugagcagcugggacuacaggcacacacc

SEQ ID NO: 371837 - RNA, 21 nt, Human
ccccugagcccgcggcgcuga

SEQ ID NO: 371838 - RNA, 32 nt, Human
ccccugagccuggguagcggcgcgagggccgg

SEQ ID NO: 371839 - RNA, 18 nt, Human
ccccugagcggcucagca

SEQ ID NO: 371840 - RNA, 32 nt, Human
ccccugagcugauucccagugacagugcagca

SEQ ID NO: 371841 - RNA, 30 nt, Human
ccccugagcuugcagagaugaaggccgcca

SEQ ID NO: 371842 - RNA, 18 nt, Human
ccccugagcuuucaggua

SEQ ID NO: 371843 - RNA, 32 nt, Human
ccccugaggaugggaaaggagcucuucaguug

SEQ ID NO: 371844 - RNA, 32 nt, Human
ccccugaggcucagggaaaggccagugugaac

SEQ ID NO: 371845 - RNA, 32 nt, Human
ccccugagggcugcucuagaggacucaggccc

SEQ ID NO: 371846 - RNA, 32 nt, Human
ccccugaggucuugagagaugugcccacugcc

SEQ ID NO: 371847 - RNA, 32 nt, Human
ccccugaguagcugggauuacaggcacguacc

SEQ ID NO: 371848 - RNA, 32 nt, Human
ccccugaguagcugggauuacaggugcaccac

SEQ ID NO: 371849 - RNA, 32 nt, Human
ccccugaguagcugggauuacaggugccugcc

SEQ ID NO: 371850 - RNA, 32 nt, Human
ccccugagucaacuggagcaagaaggaaggag

SEQ ID NO: 371851 - RNA, 32 nt, Human
ccccugauagcccagagguagggccagagaca

SEQ ID NO: 371852 - RNA, 32 nt, Human
ccccugaugacuggcugccucuacacagacuc

SEQ ID NO: 371853 - RNA, 32 nt, Human
ccccugaugccauaggagaccuaucgucuugg

SEQ ID NO: 371854 - RNA, 32 nt, Human
ccccugaugcccaggcugggugcaggcucuca

SEQ ID NO: 371855 - RNA, 32 nt, Human
ccccugaugcuuucuccuugggugauaguaac

SEQ ID NO: 371856 - RNA, 32 nt, Human
ccccugauugaaugagccuauggaugaagacu

SEQ ID NO: 371857 - RNA, 18 nt, Human
ccccugauuguccaggug

SEQ ID NO: 371858 - RNA, 32 nt, Human
ccccugcaaaccugcuugcugaccucaggcuu

SEQ ID NO: 371859 - RNA, 32 nt, Human
ccccugcaaaggcaggcaaggccaggcgggug

SEQ ID NO: 371860 - RNA, 32 nt, Human
ccccugcaaauggagaccugugcaccugguug

SEQ ID NO: 371861 - RNA, 32 nt, Human
ccccugcaaggguagagucaggugagaguccc

SEQ ID NO: 371862 - RNA, 22 nt, Human
ccccugcaauacccaguuuggc

SEQ ID NO: 371863 - RNA, 32 nt, Human
ccccugcaauccagaccacaagcacccuuuau

SEQ ID NO: 371864 - RNA, 32 nt, Human
ccccugcacaacuaucucacuccugcuuggag

SEQ ID NO: 371865 - RNA, 32 nt, Human
ccccugcacaagcucccucucuugccugccac

SEQ ID NO: 371866 - RNA, 32 nt, Human
ccccugcacauacucucuugcuugcugccaug

SEQ ID NO: 371867 - RNA, 32 nt, Human
ccccugcacaugcauaaacgggcacaccccag

SEQ ID NO: 371868 - RNA, 32 nt, Human
ccccugcacuagcugucccaagcuuacauaca

SEQ ID NO: 371869 - RNA, 32 nt, Human
ccccugcacuccaggcugggcaacaguacgag

SEQ ID NO: 371870 - RNA, 32 nt, Human
ccccugcacugagauuauuuccagauugcacu

SEQ ID NO: 371871 - RNA, 32 nt, Human
ccccugcacugagcccccuuagaucuacugcc

SEQ ID NO: 371872 - RNA, 32 nt, Human
ccccugcagagccagccagggcggagagccau

SEQ ID NO: 371873 - RNA, 32 nt, Human
ccccugcagaugggcagagggaugcaugggga

SEQ ID NO: 371874 - RNA, 32 nt, Human
ccccugcagccagagguuugcaguggguagug

SEQ ID NO: 371875 - RNA, 32 nt, Human
ccccugcagccccagcccugcuuuucaucccc

SEQ ID NO: 371876 - RNA, 18 nt, Human
ccccugcagccccccaca

SEQ ID NO: 371877 - RNA, 32 nt, Human
ccccugcagccggacaccagcuccaggguccc

SEQ ID NO: 371878 - RNA, 32 nt, Human
ccccugcagccucccaggacaggcuggcaagg

SEQ ID NO: 371879 - RNA, 32 nt, Human
ccccugcagcugguuauccugacauuaugcac

SEQ ID NO: 371880 - RNA, 32 nt, Human
ccccugcagggugggggucuguggcagagccg

SEQ ID NO: 371881 - RNA, 32 nt, Human
ccccugcagggugucugcccucagggaacuca

SEQ ID NO: 371882 - RNA, 32 nt, Human
ccccugcagguguggcagagauggggcauggg

SEQ ID NO: 371883 - RNA, 32 nt, Human
ccccugcaguucugccucacacggcucaaguc

SEQ ID NO: 371884 - RNA, 31 nt, Human
ccccugcaguuucuugcuuucuucagcacau

SEQ ID NO: 371885 - RNA, 32 nt, Human
ccccugcauagcaacaguuccuccuagccuca

SEQ ID NO: 371886 - RNA, 32 nt, Human
ccccugcaugcacccagggccacccggcagca

SEQ ID NO: 371887 - RNA, 32 nt, Human
ccccugcaugcagagcuuccagccugagaacc

SEQ ID NO: 371888 - RNA, 32 nt, Human
ccccugcauuugccaagcuccaaagacucccu

SEQ ID NO: 371889 - RNA, 32 nt, Human
ccccugccacaccccagccucugacuugcugu

SEQ ID NO: 371890 - RNA, 19 nt, Human
ccccugccaccccucccca

SEQ ID NO: 371891 - RNA, 32 nt, Human
ccccugccacccuacuccucaccagaauuguc

SEQ ID NO: 371892 - RNA, 32 nt, Human
ccccugccacucagagcagagcagggggcuga

SEQ ID NO: 371893 - RNA, 32 nt, Human
ccccugccagaauggaggccagugcauguaug

SEQ ID NO: 371894 - RNA, 32 nt, Human
ccccugccagccaccugcaccugcugcccucc

SEQ ID NO: 371895 - RNA, 32 nt, Human
ccccugccaugcagagcaggaagccucagcug

SEQ ID NO: 371896 - RNA, 19 nt, Human
ccccugcccacccagcucc

SEQ ID NO: 371897 - RNA, 16 nt, Human
ccccugcccacuccac

SEQ ID NO: 371898 - RNA, 32 nt, Human
ccccugcccagagauucccccuucuccucucc

SEQ ID NO: 371899 - RNA, 32 nt, Human
ccccugcccagccugcucucccuaaccccuug

SEQ ID NO: 371900 - RNA, 32 nt, Human
ccccugcccaggcugccaugugagggugugca

SEQ ID NO: 371901 - RNA, 32 nt, Human
ccccugcccaggugccauggccgcauuguacc

SEQ ID NO: 371902 - RNA, 17 nt, Human
ccccugcccaguuuggc

SEQ ID NO: 371903 - RNA, 20 nt, Human
ccccugccccacccuccuca

SEQ ID NO: 371904 - RNA, 17 nt, Human
ccccugccccauccuca

SEQ ID NO: 371905 - RNA, 32 nt, Human
ccccugccccauggcccuggaugucacacucc

SEQ ID NO: 371906 - RNA, 32 nt, Human
ccccugcccccacuccagggcagccaugaugu

SEQ ID NO: 371907 - RNA, 32 nt, Human
ccccugcccccagagcaaaaggcaacccgaag

SEQ ID NO: 371908 - RNA, 32 nt, Human
ccccugcccccaugcccuccccaggcgaugga

SEQ ID NO: 371909 - RNA, 15 nt, Human
ccccugcccccggug

SEQ ID NO: 371910 - RNA, 27 nt, Human
ccccugcccccuccacuccggggccug

SEQ ID NO: 371911 - RNA, 32 nt, Human
ccccugcccccuuuuccuggugcaugugaagu

SEQ ID NO: 371912 - RNA, 23 nt, Human
ccccugccccgccuuggguccug

SEQ ID NO: 371913 - RNA, 19 nt, Human
ccccugccccuuguuggua

SEQ ID NO: 371914 - RNA, 32 nt, Human
ccccugcccgccgcccccuccccagggcccug

SEQ ID NO: 371915 - RNA, 25 nt, Human
ccccugcccggcuccgcggcgcgga

SEQ ID NO: 371916 - RNA, 32 nt, Human
ccccugcccgggaagggaccuugcagggaccu

SEQ ID NO: 371917 - RNA, 32 nt, Human
ccccugcccgggcuggaguugccacagccugu

SEQ ID NO: 371918 - RNA, 21 nt, Human
ccccugcccuaugcucuggug

SEQ ID NO: 371919 - RNA, 32 nt, Human
ccccugcccugagaguugcccgugcccuggac

SEQ ID NO: 371920 - RNA, 32 nt, Human
ccccugcccugaugucagcugcuuugcacaaa

SEQ ID NO: 371921 - RNA, 32 nt, Human
ccccugcccugccuccccaguauugugaaugc

SEQ ID NO: 371922 - RNA, 32 nt, Human
ccccugcccugccuccccuuucaccauguuuc

SEQ ID NO: 371923 - RNA, 32 nt, Human
ccccugcccugccucuguccuggcucugaacu

SEQ ID NO: 371924 - RNA, 32 nt, Human
ccccugcccugccugagcccugcgcuggccag

SEQ ID NO: 371925 - RNA, 32 nt, Human
ccccugcccugcggcuggucagccugguccuc

SEQ ID NO: 371926 - RNA, 23 nt, Human
ccccugcccugcuccuaagggua

SEQ ID NO: 371927 - RNA, 32 nt, Human
ccccugcccuggaggggaggggcgauaaauac

SEQ ID NO: 371928 - RNA, 32 nt, Human
ccccugcccuggcacagcugcaugcacuucaa

SEQ ID NO: 371929 - RNA, 19 nt, Human
ccccugcccuguccaggug

SEQ ID NO: 371930 - RNA, 32 nt, Human
ccccugcccuuccuccugauggagugugcaga

SEQ ID NO: 371931 - RNA, 32 nt, Human
ccccugccgagagaagaggaguggaugagccu

SEQ ID NO: 371932 - RNA, 27 nt, Human
ccccugccgcagcgcgccgcagccggg

SEQ ID NO: 371933 - RNA, 32 nt, Human
ccccugccgcaucuuugaccugggcagcgaca

SEQ ID NO: 371934 - RNA, 32 nt, Human
ccccugccgcggaggcagcggcggcagcggcu

SEQ ID NO: 371935 - RNA, 32 nt, Human
ccccugccggacccuccacccuucggccccca

SEQ ID NO: 371936 - RNA, 32 nt, Human
ccccugccgucaaucuccaccucaagggagcc

SEQ ID NO: 371937 - RNA, 32 nt, Human
ccccugccuacgccccuaccacugcugaagcc

SEQ ID NO: 371938 - RNA, 21 nt, Human
ccccugccucaagcccugccc

SEQ ID NO: 371939 - RNA, 32 nt, Human
ccccugccucaccaccuccucuccgcucuccc

SEQ ID NO: 371940 - RNA, 21 nt, Human
ccccugccucacgaaaaccca

SEQ ID NO: 371941 - RNA, 18 nt, Human
ccccugccuccaaaccuc

SEQ ID NO: 371942 - RNA, 32 nt, Human
ccccugccuccaccauauccacuaccaggcac

SEQ ID NO: 371943 - RNA, 32 nt, Human
ccccugccuccaggacccuguugcuaugguga

SEQ ID NO: 371944 - RNA, 17 nt, Human
ccccugccuccaguugc

SEQ ID NO: 371945 - RNA, 32 nt, Human
ccccugccuccgaggccugccugcuacccuca

SEQ ID NO: 371946 - RNA, 32 nt, Human
ccccugccuccgaggccugccugcuccccuca

SEQ ID NO: 371947 - RNA, 32 nt, Human
ccccugccuccuccuccuccucuuggcucuau

SEQ ID NO: 371948 - RNA, 24 nt, Human
ccccugccucgguuucccuucugu

SEQ ID NO: 371949 - RNA, 23 nt, Human
ccccugccucuaucuucuucugc

SEQ ID NO: 371950 - RNA, 22 nt, Human
ccccugccucucaccucuaccc

SEQ ID NO: 371951 - RNA, 32 nt, Human
ccccugccucucccugugucccuuccccugag

SEQ ID NO: 371952 - RNA, 32 nt, Human
ccccugccucucggacucgggcugcggcguca

SEQ ID NO: 371953 - RNA, 32 nt, Human
ccccugccucuggggcucugugguguaggcua

SEQ ID NO: 371954 - RNA, 32 nt, Human
ccccugccucuugccccggcuaguuucccugg

SEQ ID NO: 371955 - RNA, 32 nt, Human
ccccugccucuuuccccuacuuagcuccuuag

SEQ ID NO: 371956 - RNA, 32 nt, Human
ccccugccugaccuucauucaaacagaaccuc

SEQ ID NO: 371957 - RNA, 20 nt, Human
ccccugccugcccccaccca

SEQ ID NO: 371958 - RNA, 24 nt, Human
ccccugccugcguccuggggccug

SEQ ID NO: 371959 - RNA, 32 nt, Human
ccccugccugcucugguccaccccguccugac

SEQ ID NO: 371960 - RNA, 32 nt, Human
ccccugccugggaggcucucccaggggcugau

SEQ ID NO: 371961 - RNA, 32 nt, Human
ccccugccuuucucauuccuuccuucgucucc

SEQ ID NO: 371962 - RNA, 32 nt, Human
ccccugccuuucucccccaacccaaggcugac

SEQ ID NO: 371963 - RNA, 32 nt, Human
ccccugccuuucucuuccuccaucaggcccug

SEQ ID NO: 371964 - RNA, 32 nt, Human
ccccugcgacucccuguuuccugggcuagucu

SEQ ID NO: 371965 - RNA, 32 nt, Human
ccccugcgcacggacgccgggaagaagggggu

SEQ ID NO: 371966 - RNA, 32 nt, Human
ccccugcgcagggcccuccugcucugaggguu

SEQ ID NO: 371967 - RNA, 24 nt, Human
ccccugcgccgcacccggggccug

SEQ ID NO: 371968 - RNA, 19 nt, Human
ccccugcggccuuugcuca

SEQ ID NO: 371969 - RNA, 32 nt, Human
ccccugcgucucacccuaggcgggcugggcgg

SEQ ID NO: 371970 - RNA, 32 nt, Human
ccccugcguguugccaagcuccgucuccagcu

SEQ ID NO: 371971 - RNA, 32 nt, Human
ccccugcuacagccacagagcccacucccagc

SEQ ID NO: 371972 - RNA, 18 nt, Human
ccccugcuaucccuccuc

SEQ ID NO: 371973 - RNA, 32 nt, Human
ccccugcuaucucccuuccugcuucgaaggac

SEQ ID NO: 371974 - RNA, 32 nt, Human
ccccugcucaaggucaagacccugcucaagga

SEQ ID NO: 371975 - RNA, 19 nt, Human
ccccugcucacccuccuca

SEQ ID NO: 371976 - RNA, 32 nt, Human
ccccugcucacccucugggcuuugucuccgag

SEQ ID NO: 371977 - RNA, 19 nt, Human
ccccugcuccacagcgccc

SEQ ID NO: 371978 - RNA, 18 nt, Human
ccccugcuccagucgagu

SEQ ID NO: 371979 - RNA, 32 nt, Human
ccccugcucccaucugucccugaggaagcccc

SEQ ID NO: 371980 - RNA, 23 nt, Human
ccccugcuccccaggcccugccc

SEQ ID NO: 371981 - RNA, 22 nt, Human
ccccugcucccgucugucuguc

SEQ ID NO: 371982 - RNA, 23 nt, Human
ccccugcucccuccacucugccc

SEQ ID NO: 371983 - RNA, 23 nt, Human
ccccugcuccggcaggcauccca

SEQ ID NO: 371984 - RNA, 32 nt, Human
ccccugcucugcccucccuggcuccuggacua

SEQ ID NO: 371985 - RNA, 32 nt, Human
ccccugcucugggcuucucuccuguuuucccc

SEQ ID NO: 371986 - RNA, 32 nt, Human
ccccugcucugucugguacaggccccugcuga

SEQ ID NO: 371987 - RNA, 17 nt, Human
ccccugcucuuccaggu

SEQ ID NO: 371988 - RNA, 32 nt, Human
ccccugcucuuccuccugacccugcugcucuu

SEQ ID NO: 371989 - RNA, 32 nt, Human
ccccugcugagauggcugugacccugggcuga

SEQ ID NO: 371990 - RNA, 22 nt, Human
ccccugcugcagccacgagggg

SEQ ID NO: 371991 - RNA, 18 nt, Human
ccccugcugcccagcuca

SEQ ID NO: 371992 - RNA, 19 nt, Human
ccccugcugcccugagcca

SEQ ID NO: 371993 - RNA, 21 nt, Human
ccccugcugcggaugcugagu

SEQ ID NO: 371994 - RNA, 32 nt, Human
ccccugcugcgggcucugccuuggugucaugc

SEQ ID NO: 371995 - RNA, 32 nt, Human
ccccugcugcuggagugcaauugcacaaucuc

SEQ ID NO: 371996 - RNA, 32 nt, Human
ccccugcugcugucuuggugccugucacccac

SEQ ID NO: 371997 - RNA, 32 nt, Human
ccccugcugcugugcccagucugaguaccuug

SEQ ID NO: 371998 - RNA, 32 nt, Human
ccccugcugcuguguuggacacuugcucccau

SEQ ID NO: 371999 - RNA, 32 nt, Human
ccccugcugcuugagaugccagagcuguguug

SEQ ID NO: 372000 - RNA, 32 nt, Human
ccccugcugcuugggacguguacagcacagaa

SEQ ID NO: 372001 - RNA, 32 nt, Human
ccccugcuguagccuggugaagaccaccuggg

SEQ ID NO: 372002 - RNA, 32 nt, Human
ccccugcugugggaaagguggggaagaagggg

SEQ ID NO: 372003 - RNA, 32 nt, Human
ccccugcuuaaaaauggacaaaaagaaacuau

SEQ ID NO: 372004 - RNA, 32 nt, Human
ccccugcuuacauuccagacagacacagacua

SEQ ID NO: 372005 - RNA, 18 nt, Human
ccccugcuugccagcuca

SEQ ID NO: 372006 - RNA, 32 nt, Human
ccccugcuuggaggcccuucucugauggggug

SEQ ID NO: 372007 - RNA, 32 nt, Human
ccccugcuuggcuguaugcacugucuauauug

SEQ ID NO: 372008 - RNA, 20 nt, Human
ccccugcuuguccuggacca

SEQ ID NO: 372009 - RNA, 19 nt, Human
ccccuggaaacccaccucu

SEQ ID NO: 372010 - RNA, 32 nt, Human
ccccuggaaagccaccagauuggaggucacca

SEQ ID NO: 372011 - RNA, 22 nt, Human
ccccuggaaaggucccucccca

SEQ ID NO: 372012 - RNA, 20 nt, Human
ccccuggaacugaaccaggg

SEQ ID NO: 372013 - RNA, 21 nt, Human
ccccuggaagaggcaggcagg

SEQ ID NO: 372014 - RNA, 22 nt, Human
ccccuggaauaugcagcccggg

SEQ ID NO: 372015 - RNA, 23 nt, Human
ccccuggaauugauggguauaga

SEQ ID NO: 372016 - RNA, 24 nt, Human
ccccuggacacacacagcccugga

SEQ ID NO: 372017 - RNA, 22 nt, Human
ccccuggacaguagcaggcagg

SEQ ID NO: 372018 - RNA, 21 nt, Human
ccccuggacagugggcagggg

SEQ ID NO: 372019 - RNA, 32 nt, Human
ccccuggacaugccuuucuccacguccgccuc

SEQ ID NO: 372020 - RNA, 32 nt, Human
ccccuggaccacugccucccucccucccccug

SEQ ID NO: 372021 - RNA, 23 nt, Human
ccccuggacggcagaggcaagga

SEQ ID NO: 372022 - RNA, 23 nt, Human
ccccuggacuuagcggaugcagg

SEQ ID NO: 372023 - RNA, 32 nt, Human
ccccuggagccaagccuauccagcuaacaaga

SEQ ID NO: 372024 - RNA, 32 nt, Human
ccccuggagccagauggcaagagggugacagc

SEQ ID NO: 372025 - RNA, 32 nt, Human
ccccuggagccccagcccugccuucaugcuca

SEQ ID NO: 372026 - RNA, 20 nt, Human
ccccuggagcuauccgggua

SEQ ID NO: 372027 - RNA, 24 nt, Human
ccccuggaggacucgcagugcuga

SEQ ID NO: 372028 - RNA, 32 nt, Human
ccccuggaggcagagcacugagcuggacccug

SEQ ID NO: 372029 - RNA, 32 nt, Human
ccccuggaggggcaauggggaggugaugucuu

SEQ ID NO: 372030 - RNA, 32 nt, Human
ccccuggaggggcuggaguuuauccagcgccu

SEQ ID NO: 372031 - RNA, 32 nt, Human
ccccuggaggugggggcugcuggcugaggagg

SEQ ID NO: 372032 - RNA, 32 nt, Human
ccccuggagucgggccgcugagcccacggcag

SEQ ID NO: 372033 - RNA, 20 nt, Human
ccccuggaucuaccagcaua

SEQ ID NO: 372034 - RNA, 21 nt, Human
ccccuggaugcagccucacag

SEQ ID NO: 372035 - RNA, 24 nt, Human
ccccuggcacccccagaccugccc

SEQ ID NO: 372036 - RNA, 21 nt, Human
ccccuggcacugaggcacaga

SEQ ID NO: 372037 - RNA, 23 nt, Human
ccccuggcagacgguggcguaga

SEQ ID NO: 372038 - RNA, 21 nt, Human
ccccuggcagagccgcagggc

SEQ ID NO: 372039 - RNA, 32 nt, Human
ccccuggcagccaagaacagauaggaagggau

SEQ ID NO: 372040 - RNA, 22 nt, Human
ccccuggcagugcucccggagg

SEQ ID NO: 372041 - RNA, 22 nt, Human
ccccuggccaaguuggguccua

SEQ ID NO: 372042 - RNA, 24 nt, Human
ccccuggccacagacccccagggc

SEQ ID NO: 372043 - RNA, 21 nt, Human
ccccuggccacgugggacggg

SEQ ID NO: 372044 - RNA, 23 nt, Human
ccccuggcccacccuggggucug

SEQ ID NO: 372045 - RNA, 32 nt, Human
ccccuggccccagagcccccagcagggccauc

SEQ ID NO: 372046 - RNA, 32 nt, Human
ccccuggccccagagcccccagcagggcccuc

SEQ ID NO: 372047 - RNA, 27 nt, Human
ccccuggcccucauguccccccggggc

SEQ ID NO: 372048 - RNA, 21 nt, Human
ccccuggcccugccucaucca

SEQ ID NO: 372049 - RNA, 22 nt, Human
ccccuggccgagcugccggggc

SEQ ID NO: 372050 - RNA, 21 nt, Human
ccccuggccucaccuugcucc

SEQ ID NO: 372051 - RNA, 22 nt, Human
ccccuggccuccaggcuccucc

SEQ ID NO: 372052 - RNA, 20 nt, Human
ccccuggccuccugcgcucc

SEQ ID NO: 372053 - RNA, 22 nt, Human
ccccuggccucugugccuucuu

SEQ ID NO: 372054 - RNA, 22 nt, Human
ccccuggccugcccuucccggg

SEQ ID NO: 372055 - RNA, 32 nt, Human
ccccuggccuggacccaggagacccaggagaa

SEQ ID NO: 372056 - RNA, 20 nt, Human
ccccuggccuucagccugcu

SEQ ID NO: 372057 - RNA, 23 nt, Human
ccccuggccuugcuggcacccuu

SEQ ID NO: 372058 - RNA, 32 nt, Human
ccccuggccuuuacuuucuuccuugccuaugc

SEQ ID NO: 372059 - RNA, 32 nt, Human
ccccuggcgcccuguccaccguggcuggcugg

SEQ ID NO: 372060 - RNA, 23 nt, Human
ccccuggcggaauuuugggaccu

SEQ ID NO: 372061 - RNA, 21 nt, Human
ccccuggcuaucaucauccua

SEQ ID NO: 372062 - RNA, 32 nt, Human
ccccuggcucacccccagccgcaggaagccac

SEQ ID NO: 372063 - RNA, 21 nt, Human
ccccuggcucacuggcacagg

SEQ ID NO: 372064 - RNA, 32 nt, Human
ccccuggcucaggcccacaccccuggccaggc

SEQ ID NO: 372065 - RNA, 32 nt, Human
ccccuggcucugccucuccuuguuggcagaga

SEQ ID NO: 372066 - RNA, 23 nt, Human
ccccuggcucugggccgggccug

SEQ ID NO: 372067 - RNA, 22 nt, Human
ccccuggcucuuagggcaccua

SEQ ID NO: 372068 - RNA, 21 nt, Human
ccccuggcucuucugggcuug

SEQ ID NO: 372069 - RNA, 20 nt, Human
ccccuggcuuccuuuaagga

SEQ ID NO: 372070 - RNA, 19 nt, Human
ccccuggcuuuuccgggua

SEQ ID NO: 372071 - RNA, 32 nt, Human
ccccugggacaggcaaguccguggagacagaa

SEQ ID NO: 372072 - RNA, 25 nt, Human
ccccugggacccaccgugggaccug

SEQ ID NO: 372073 - RNA, 32 nt, Human
ccccugggagaaagggcccuggccaggcugga

SEQ ID NO: 372074 - RNA, 32 nt, Human
ccccugggagcaggugccaccuccuuccucuc

SEQ ID NO: 372075 - RNA, 32 nt, Human
ccccugggagcuucuuagaaaugcagaccugu

SEQ ID NO: 372076 - RNA, 32 nt, Human
ccccugggaguggacacagggugcagggagca

SEQ ID NO: 372077 - RNA, 32 nt, Human
ccccugggauggagugcagggagccagcugga

SEQ ID NO: 372078 - RNA, 32 nt, Human
ccccugggauuccaaggcauuggauccagucu

SEQ ID NO: 372079 - RNA, 25 nt, Human
ccccugggcaaaauggcagagcuag

SEQ ID NO: 372080 - RNA, 24 nt, Human
ccccugggcaaaggacagagccag

SEQ ID NO: 372081 - RNA, 21 nt, Human
ccccugggcaaggaagcgagg

SEQ ID NO: 372082 - RNA, 26 nt, Human
ccccugggcacaaguggcagggccag

SEQ ID NO: 372083 - RNA, 23 nt, Human
ccccugggcacacugggcccuga

SEQ ID NO: 372084 - RNA, 24 nt, Human
ccccugggcacaggacagagccag

SEQ ID NO: 372085 - RNA, 32 nt, Human
ccccugggcacaggcugggaucagggcaguga

SEQ ID NO: 372086 - RNA, 26 nt, Human
ccccugggcacccguugcagagccag

SEQ ID NO: 372087 - RNA, 28 nt, Human
ccccugggcacgcaaggaugaguauggg

SEQ ID NO: 372088 - RNA, 24 nt, Human
ccccugggcacgggacagagccag

SEQ ID NO: 372089 - RNA, 24 nt, Human
ccccugggcagaaggcagagccag

SEQ ID NO: 372090 - RNA, 22 nt, Human
ccccugggcagacaggcauuga

SEQ ID NO: 372091 - RNA, 23 nt, Human
ccccugggcagaugguaggcagg

SEQ ID NO: 372092 - RNA, 25 nt, Human
ccccugggcaggacagcggagccag

SEQ ID NO: 372093 - RNA, 24 nt, Human
ccccugggcaggaggcaguggaga

SEQ ID NO: 372094 - RNA, 26 nt, Human
ccccugggcaucaguagcagagccag

SEQ ID NO: 372095 - RNA, 25 nt, Human
ccccugggcaugacagcagagccag

SEQ ID NO: 372096 - RNA, 25 nt, Human
ccccugggcaugauggcagagccag

SEQ ID NO: 372097 - RNA, 32 nt, Human
ccccugggcauuucucuaccucccagguggaa

SEQ ID NO: 372098 - RNA, 22 nt, Human
ccccugggccaggcagagcagg

SEQ ID NO: 372099 - RNA, 18 nt, Human
ccccugggccccaauuca

SEQ ID NO: 372100 - RNA, 24 nt, Human
ccccugggcccuaccgcagcaggg

SEQ ID NO: 372101 - RNA, 23 nt, Human
ccccugggcccugaauggagcua

SEQ ID NO: 372102 - RNA, 25 nt, Human
ccccugggcgaaacggcagagccag

SEQ ID NO: 372103 - RNA, 21 nt, Human
ccccugggcgaagagcgcgga

SEQ ID NO: 372104 - RNA, 24 nt, Human
ccccugggcgagaggcagagccag

SEQ ID NO: 372105 - RNA, 24 nt, Human
ccccugggcgaggagcagagccag

SEQ ID NO: 372106 - RNA, 22 nt, Human
ccccugggcgagugcgggcagg

SEQ ID NO: 372107 - RNA, 25 nt, Human
ccccugggcgcaauggcagggccag

SEQ ID NO: 372108 - RNA, 26 nt, Human
ccccugggcgccaguggcagcgccag

SEQ ID NO: 372109 - RNA, 25 nt, Human
ccccugggcgccauggcggagccag

SEQ ID NO: 372110 - RNA, 25 nt, Human
ccccugggcgccugcgcagagccag

SEQ ID NO: 372111 - RNA, 27 nt, Human
ccccugggcgccuuuucugcagcaugg

SEQ ID NO: 372112 - RNA, 25 nt, Human
ccccugggcggaacugcagagccag

SEQ ID NO: 372113 - RNA, 24 nt, Human
ccccugggcggagagcagagccag

SEQ ID NO: 372114 - RNA, 25 nt, Human
ccccugggcggagcggcagggccag

SEQ ID NO: 372115 - RNA, 21 nt, Human
ccccugggcgggcgggacgga

SEQ ID NO: 372116 - RNA, 32 nt, Human
ccccugggcguaucucuucuuccucuguacua

SEQ ID NO: 372117 - RNA, 26 nt, Human
ccccugggcgugagcaucagagccag

SEQ ID NO: 372118 - RNA, 26 nt, Human
ccccugggcguguguggcagagccag

SEQ ID NO: 372119 - RNA, 32 nt, Human
ccccugggcucugugggcucccccugcuccac

SEQ ID NO: 372120 - RNA, 21 nt, Human
ccccugggcugccccuucuca

SEQ ID NO: 372121 - RNA, 21 nt, Human
ccccugggcuggcugcacaga

SEQ ID NO: 372122 - RNA, 32 nt, Human
ccccugggcuguaggccagggcagccacagcg

SEQ ID NO: 372123 - RNA, 27 nt, Human
ccccuggggaagcggagguugcaguga

SEQ ID NO: 372124 - RNA, 27 nt, Human
ccccuggggaaucagagguugcaguga

SEQ ID NO: 372125 - RNA, 32 nt, Human
ccccuggggaugugccacugucacucagaagg

SEQ ID NO: 372126 - RNA, 22 nt, Human
ccccuggggccugagcugcccc

SEQ ID NO: 372127 - RNA, 22 nt, Human
ccccuggggcuccgcagcagga

SEQ ID NO: 372128 - RNA, 32 nt, Human
ccccuggggcugggcaguguagaccugccacc

SEQ ID NO: 372129 - RNA, 32 nt, Human
ccccuggggcuguggggcucuacguggauccg

SEQ ID NO: 372130 - RNA, 32 nt, Human
ccccugggggauaugacacaugcccaugauga

SEQ ID NO: 372131 - RNA, 32 nt, Human
ccccuggggugaggacacaggcucugcaggcu

SEQ ID NO: 372132 - RNA, 22 nt, Human
ccccuggguacaccugcuggga

SEQ ID NO: 372133 - RNA, 32 nt, Human
ccccugggucccaagcaaccucagccaaugag

SEQ ID NO: 372134 - RNA, 32 nt, Human
ccccugggucccaagcaaccucagccagugag

SEQ ID NO: 372135 - RNA, 32 nt, Human
ccccuggguccccaguguucgcugugugugcg

SEQ ID NO: 372136 - RNA, 29 nt, Human
ccccugggucuguguggucccuggggaug

SEQ ID NO: 372137 - RNA, 24 nt, Human
ccccugggugcuugucugcacaga

SEQ ID NO: 372138 - RNA, 32 nt, Human
ccccuggguggagguugaggccauucuugaag

SEQ ID NO: 372139 - RNA, 22 nt, Human
ccccuggguggcugcggcugga

SEQ ID NO: 372140 - RNA, 32 nt, Human
ccccugggugggggcaucaggagcaggggcag

SEQ ID NO: 372141 - RNA, 32 nt, Human
ccccuggguuucucuuggaaauggucaguuuc

SEQ ID NO: 372142 - RNA, 32 nt, Human
ccccugguaccacauauauucauuugugaguu

SEQ ID NO: 372143 - RNA, 24 nt, Human
ccccugguccagccucggaaccug

SEQ ID NO: 372144 - RNA, 20 nt, Human
ccccugguccuuagcuugcu

SEQ ID NO: 372145 - RNA, 24 nt, Human
ccccuggucgccgccuuccugcga

SEQ ID NO: 372146 - RNA, 26 nt, Human
ccccuggugaugaguuucagcauaga

SEQ ID NO: 372147 - RNA, 21 nt, Human
ccccuggugccucccuagggc

SEQ ID NO: 372148 - RNA, 32 nt, Human
ccccugguggcagugggagcugccuguucagc

SEQ ID NO: 372149 - RNA, 32 nt, Human
ccccugguggugcucauggaacccaccuuugu

SEQ ID NO: 372150 - RNA, 32 nt, Human
ccccuggugguuuuguucacuccuuuccuuuc

SEQ ID NO: 372151 - RNA, 32 nt, Human
ccccugguguauacugggcauuggccagcuac

SEQ ID NO: 372152 - RNA, 23 nt, Human
ccccuggugucacauggggccug

SEQ ID NO: 372153 - RNA, 20 nt, Human
ccccugguuacccccacuca

SEQ ID NO: 372154 - RNA, 24 nt, Human
ccccugguucaggcugggcaugga

SEQ ID NO: 372155 - RNA, 32 nt, Human
ccccugguuuuagcugggcacaugacugcccu

SEQ ID NO: 372156 - RNA, 32 nt, Human
ccccuguaagaugucacugucuggguuccagc

SEQ ID NO: 372157 - RNA, 32 nt, Human
ccccuguaccaccacaucgccgacuugucugg

SEQ ID NO: 372158 - RNA, 32 nt, Human
ccccuguacugcccugccaucucaggccaaag

SEQ ID NO: 372159 - RNA, 32 nt, Human
ccccuguagagugggagcugagugggggauca

SEQ ID NO: 372160 - RNA, 32 nt, Human
ccccuguagcagucuucagccuccucuacccu

SEQ ID NO: 372161 - RNA, 32 nt, Human
ccccugucaagaaggugccgguggugcgaguc

SEQ ID NO: 372162 - RNA, 32 nt, Human
ccccugucacagucagucgucucauuugucca

SEQ ID NO: 372163 - RNA, 32 nt, Human
ccccugucacccugagcaaaucaguugcuucc

SEQ ID NO: 372164 - RNA, 32 nt, Human
ccccugucaguuaugucugccucccaggcucu

SEQ ID NO: 372165 - RNA, 32 nt, Human
ccccugucauuuccagauuucauuaccuccua

SEQ ID NO: 372166 - RNA, 20 nt, Human
ccccuguccaggcccugcuc

SEQ ID NO: 372167 - RNA, 22 nt, Human
ccccugucccaagcugcuuccu

SEQ ID NO: 372168 - RNA, 32 nt, Human
ccccugucccaccacucauucucagcuuugaa

SEQ ID NO: 372169 - RNA, 32 nt, Human
ccccugucccagcucccgaccugcacuuccug

SEQ ID NO: 372170 - RNA, 32 nt, Human
ccccuguccccgcacugggcuuggggaccaga

SEQ ID NO: 372171 - RNA, 19 nt, Human
ccccuguccugcccagggc

SEQ ID NO: 372172 - RNA, 32 nt, Human
ccccugucuccaggaggggcagguggcugagg

SEQ ID NO: 372173 - RNA, 32 nt, Human
ccccugucuccaguuuuucuccaucuccuggg

SEQ ID NO: 372174 - RNA, 20 nt, Human
ccccugucuccccuucaagg

SEQ ID NO: 372175 - RNA, 18 nt, Human
ccccugucucccucucug

SEQ ID NO: 372176 - RNA, 32 nt, Human
ccccugucuccgaggcuggaauacgguggugc

SEQ ID NO: 372177 - RNA, 18 nt, Human
ccccugucuccucuccug

SEQ ID NO: 372178 - RNA, 32 nt, Human
ccccugucuccucuccugauuuccuccaaucu

SEQ ID NO: 372179 - RNA, 32 nt, Human
ccccugucuccuuuccuccuccuggguucaug

SEQ ID NO: 372180 - RNA, 32 nt, Human
ccccugucugaagcucuguccugggucccacc

SEQ ID NO: 372181 - RNA, 32 nt, Human
ccccugucugcucauccucucucccucugucc

SEQ ID NO: 372182 - RNA, 19 nt, Human
ccccugucuggucccagua

SEQ ID NO: 372183 - RNA, 32 nt, Human
ccccugucugucugcauuugucucagaacauu

SEQ ID NO: 372184 - RNA, 20 nt, Human
ccccugucuucuuccccagg

SEQ ID NO: 372185 - RNA, 23 nt, Human
ccccugucuuggagcuccgggua

SEQ ID NO: 372186 - RNA, 32 nt, Human
ccccugucuuucuccuccugacugguggucua

SEQ ID NO: 372187 - RNA, 32 nt, Human
ccccugugaaagcuuguuccugccauauggag

SEQ ID NO: 372188 - RNA, 32 nt, Human
ccccugugaaggagaggguggggagggaggca

SEQ ID NO: 372189 - RNA, 22 nt, Human
ccccugugaauugcaguaaagg

SEQ ID NO: 372190 - RNA, 23 nt, Human
ccccugugacagccgcggcagga

SEQ ID NO: 372191 - RNA, 32 nt, Human
ccccugugauuucaagcccacagucugucacu

SEQ ID NO: 372192 - RNA, 32 nt, Human
ccccugugcaggauccacugggugaaagccag

SEQ ID NO: 372193 - RNA, 32 nt, Human
ccccugugccaccuccacagugggagccagcc

SEQ ID NO: 372194 - RNA, 19 nt, Human
ccccugugccagggaacag

SEQ ID NO: 372195 - RNA, 18 nt, Human
ccccugugcccacuggcc

SEQ ID NO: 372196 - RNA, 32 nt, Human
ccccugugccccuccccuccaggcuaccucug

SEQ ID NO: 372197 - RNA, 32 nt, Human
ccccugugccguaguuugucuccugggacugg

SEQ ID NO: 372198 - RNA, 22 nt, Human
ccccugugccuccccucccggg

SEQ ID NO: 372199 - RNA, 32 nt, Human
ccccugugcucucagaagcaggggucacuggc

SEQ ID NO: 372200 - RNA, 32 nt, Human
ccccugugcuugcuccccgagcucagggauug

SEQ ID NO: 372201 - RNA, 32 nt, Human
ccccuguggagcacuuggagcagugucuguug

SEQ ID NO: 372202 - RNA, 32 nt, Human
ccccugugggaggcggacagcagugaccaccu

SEQ ID NO: 372203 - RNA, 32 nt, Human
ccccuguggggaggggacggggaaggaagaaa

SEQ ID NO: 372204 - RNA, 19 nt, Human
ccccugugggucccuccca

SEQ ID NO: 372205 - RNA, 31 nt, Human
ccccugugggugggguggagggugaaauucu

SEQ ID NO: 372206 - RNA, 32 nt, Human
ccccuguguccuggcauuucagucuagaccuu

SEQ ID NO: 372207 - RNA, 32 nt, Human
ccccugugugggaggcagguucugcaaagcaa

SEQ ID NO: 372208 - RNA, 21 nt, Human
ccccuguguggguccuccuca

SEQ ID NO: 372209 - RNA, 32 nt, Human
ccccuguguguguuuucccuugccuuguuucc

SEQ ID NO: 372210 - RNA, 32 nt, Human
ccccuguguuaccugggcagcuccagaucacu

SEQ ID NO: 372211 - RNA, 32 nt, Human
ccccuguguucugccugccaggccagcugucu

SEQ ID NO: 372212 - RNA, 32 nt, Human
ccccuguguuguuacaggcugugcagugcaac

SEQ ID NO: 372213 - RNA, 19 nt, Human
ccccuguucucccagcuca

SEQ ID NO: 372214 - RNA, 32 nt, Human
ccccuguucucccagcucaucuccuugccuug

SEQ ID NO: 372215 - RNA, 32 nt, Human
ccccuguucuggucccuccuggagcgcccgcg

SEQ ID NO: 372216 - RNA, 32 nt, Human
ccccuguugcccaggcuggagugcagugggau

SEQ ID NO: 372217 - RNA, 32 nt, Human
ccccuguugucauugcuccugcagccuuuucg

SEQ ID NO: 372218 - RNA, 32 nt, Human
ccccuguuuauucuugaacagagggcaaagag

SEQ ID NO: 372219 - RNA, 32 nt, Human
ccccuguuuccucuuugucuugccccuggauu

SEQ ID NO: 372220 - RNA, 16 nt, Human
ccccuguuuccuggua

SEQ ID NO: 372221 - RNA, 21 nt, Human
ccccuguuucucaggggccug

SEQ ID NO: 372222 - RNA, 18 nt, Human
ccccuguuuucucucugc

SEQ ID NO: 372223 - RNA, 32 nt, Human
ccccuguuuucuuccucuguaaccuugggcaa

SEQ ID NO: 372224 - RNA, 32 nt, Human
ccccuuaaacaugcuccuccugcacggaagag

SEQ ID NO: 372225 - RNA, 32 nt, Human
ccccuuaacaccuugggcugcucagacccucc

SEQ ID NO: 372226 - RNA, 32 nt, Human
ccccuuaaccacccccacgguuucugccgucg

SEQ ID NO: 372227 - RNA, 32 nt, Human
ccccuuaacugcucuauagauaacagcuugaa

SEQ ID NO: 372228 - RNA, 32 nt, Human
ccccuuaagccaacaaccacagugccaccaag

SEQ ID NO: 372229 - RNA, 32 nt, Human
ccccuuaauggugcaaccacugaggcaaagua

SEQ ID NO: 372230 - RNA, 21 nt, Human
ccccuuacaucuacucugccg

SEQ ID NO: 372231 - RNA, 32 nt, Human
ccccuuaccaaccuggugaggcugcuccugag

SEQ ID NO: 372232 - RNA, 32 nt, Human
ccccuuaccugcccugcugccugcacacugca

SEQ ID NO: 372233 - RNA, 32 nt, Human
ccccuuacggacaggucccagagauggacaga

SEQ ID NO: 372234 - RNA, 22 nt, Human
ccccuuacuuacaggcauccca

SEQ ID NO: 372235 - RNA, 32 nt, Human
ccccuuagaaggugauguaccagcaagccaga

SEQ ID NO: 372236 - RNA, 32 nt, Human
ccccuuagagcugccccucucuggccuggccg

SEQ ID NO: 372237 - RNA, 32 nt, Human
ccccuuagaggaccugaguuugggagaguggu

SEQ ID NO: 372238 - RNA, 32 nt, Human
ccccuuagcaccuucagggcugaguucugggu

SEQ ID NO: 372239 - RNA, 24 nt, Human
ccccuuagccuccccucccucccg

SEQ ID NO: 372240 - RNA, 32 nt, Human
ccccuuagcuacugaggcauagggagaggaag

SEQ ID NO: 372241 - RNA, 23 nt, Human
ccccuuagggucgccaccccuca

SEQ ID NO: 372242 - RNA, 19 nt, Human
ccccuuaguuuguuuccuu

SEQ ID NO: 372243 - RNA, 32 nt, Human
ccccuuaucaaggguugaaggaagggagccau

SEQ ID NO: 372244 - RNA, 21 nt, Human
ccccuucaacccaguugaugu

SEQ ID NO: 372245 - RNA, 32 nt, Human
ccccuucacacccaccccucugaccccugccu

SEQ ID NO: 372246 - RNA, 32 nt, Human
ccccuucacaccucacuccuagauuuugcuag

SEQ ID NO: 372247 - RNA, 32 nt, Human
ccccuucacagacacugaccucagaggcccca

SEQ ID NO: 372248 - RNA, 32 nt, Human
ccccuucacagcaggcaucggggccuggcauc

SEQ ID NO: 372249 - RNA, 32 nt, Human
ccccuucaccugccaucgagugucccucacca

SEQ ID NO: 372250 - RNA, 21 nt, Human
ccccuucacgagcugcuccuu

SEQ ID NO: 372251 - RNA, 19 nt, Human
ccccuucacucccagcuca

SEQ ID NO: 372252 - RNA, 22 nt, Human
ccccuucagcccagcccagcca

SEQ ID NO: 372253 - RNA, 32 nt, Human
ccccuucagcuucucccuccggaucgaugugc

SEQ ID NO: 372254 - RNA, 32 nt, Human
ccccuucagugcagaaggcuuuggguaggacu

SEQ ID NO: 372255 - RNA, 32 nt, Human
ccccuucaucaccaucuccaucauucagcugg

SEQ ID NO: 372256 - RNA, 32 nt, Human
ccccuucauggagcuucuaugacagugaauaa

SEQ ID NO: 372257 - RNA, 32 nt, Human
ccccuucauggccucugcaccuccacacuccc

SEQ ID NO: 372258 - RNA, 24 nt, Human
ccccuuccacccucagcucuaccc

SEQ ID NO: 372259 - RNA, 32 nt, Human
ccccuuccaccuggaccguggccacacuuuuu

SEQ ID NO: 372260 - RNA, 32 nt, Human
ccccuuccagcccauuccccuuuuccccucag

SEQ ID NO: 372261 - RNA, 32 nt, Human
ccccuuccagcucccuccccugcucagaaucu

SEQ ID NO: 372262 - RNA, 32 nt, Human
ccccuuccaggagaugccaaaaauauuucugg

SEQ ID NO: 372263 - RNA, 32 nt, Human
ccccuuccaggccacucuuggggaaacagagc

SEQ ID NO: 372264 - RNA, 32 nt, Human
ccccuuccaguuuuccccuugcuucccaggcc

SEQ ID NO: 372265 - RNA, 32 nt, Human
  misc_feature (30)..(30): n is a, c, g, or u
ccccuuccaucacuuucugucaugccaggnug

SEQ ID NO: 372266 - RNA, 32 nt, Human
ccccuuccaucccggcaccaugcuggauaggg

SEQ ID NO: 372267 - RNA, 26 nt, Human
ccccuuccauggccccagcucugccu

SEQ ID NO: 372268 - RNA, 32 nt, Human
ccccuuccauuuccuggcccugcucugcuucc

SEQ ID NO: 372269 - RNA, 32 nt, Human
ccccuucccacuccagcaccccagccagccug

SEQ ID NO: 372270 - RNA, 32 nt, Human
ccccuucccagacuuuugccccggcucugcug

SEQ ID NO: 372271 - RNA, 32 nt, Human
ccccuucccagcucgucugccugcccccggcc

SEQ ID NO: 372272 - RNA, 32 nt, Human
ccccuucccagucgugacaaccacagauggcc

SEQ ID NO: 372273 - RNA, 32 nt, Human
ccccuuccccacacagccccagaaggguccca

SEQ ID NO: 372274 - RNA, 17 nt, Human
ccccuuccccacugccu

SEQ ID NO: 372275 - RNA, 20 nt, Human
ccccuuccccacugccugcc

SEQ ID NO: 372276 - RNA, 22 nt, Human
ccccuuccccagccucucgccu

SEQ ID NO: 372277 - RNA, 32 nt, Human
ccccuuccccagccucucgccugcacugaugc

SEQ ID NO: 372278 - RNA, 19 nt, Human
ccccuuccccaguuugcgc

SEQ ID NO: 372279 - RNA, 32 nt, Human
ccccuuccccauugccccagcuuagccucuuc

SEQ ID NO: 372280 - RNA, 32 nt, Human
ccccuucccccaggaacacuuccacugggauc

SEQ ID NO: 372281 - RNA, 32 nt, Human
ccccuuccccuaauaccuagcccuguaugauc

SEQ ID NO: 372282 - RNA, 32 nt, Human
ccccuuccccuccccuccucccucuuuucccc

SEQ ID NO: 372283 - RNA, 21 nt, Human
ccccuuccccucuccagcccu

SEQ ID NO: 372284 - RNA, 31 nt, Human
ccccuuccccucucugggccucaguuuccuu

SEQ ID NO: 372285 - RNA, 32 nt, Human
ccccuuccccuuccccuacccuucccuccucu

SEQ ID NO: 372286 - RNA, 21 nt, Human
ccccuuccccuuuucugggga

SEQ ID NO: 372287 - RNA, 32 nt, Human
ccccuucccggagaaccugugcgguguguaga

SEQ ID NO: 372288 - RNA, 32 nt, Human
ccccuucccuacuuccccuuggggcucccugu

SEQ ID NO: 372289 - RNA, 21 nt, Human
ccccuucccuccuccuggggc

SEQ ID NO: 372290 - RNA, 32 nt, Human
ccccuucccugccuauggugucgcuuggcuaa

SEQ ID NO: 372291 - RNA, 20 nt, Human
ccccuucccugccugccugc

SEQ ID NO: 372292 - RNA, 21 nt, Human
ccccuucccuguccuucccca

SEQ ID NO: 372293 - RNA, 17 nt, Human
ccccuucccuguucugc

SEQ ID NO: 372294 - RNA, 23 nt, Human
ccccuucccuucucccaucucug

SEQ ID NO: 372295 - RNA, 32 nt, Human
ccccuucccuuuccuguccuguccuuucuuuc

SEQ ID NO: 372296 - RNA, 32 nt, Human
ccccuuccuacacuguucccuggaccauacac

SEQ ID NO: 372297 - RNA, 17 nt, Human
ccccuuccuacugguuc

SEQ ID NO: 372298 - RNA, 32 nt, Human
ccccuuccucaaccucuucacgcuggcauguc

SEQ ID NO: 372299 - RNA, 32 nt, Human
ccccuuccucaaggacuuaacuugugcaagcu

SEQ ID NO: 372300 - RNA, 32 nt, Human
ccccuuccucaaggacuuaagcugacucccag

SEQ ID NO: 372301 - RNA, 32 nt, Human
ccccuuccucaaggguguuuggguuaaggcug

SEQ ID NO: 372302 - RNA, 32 nt, Human
ccccuuccucaccaguaaauccugcuacauca

SEQ ID NO: 372303 - RNA, 32 nt, Human
ccccuuccucaccccaaucccuacagccuccc

SEQ ID NO: 372304 - RNA, 32 nt, Human
ccccuuccucaccucuuccaccccucagacug

SEQ ID NO: 372305 - RNA, 32 nt, Human
ccccuuccucaccucuuccuuauuccauaggc

SEQ ID NO: 372306 - RNA, 32 nt, Human
ccccuuccucacugcucucuaccuggagaaga

SEQ ID NO: 372307 - RNA, 32 nt, Human
ccccuuccuccaccaacucacgccagggaccu

SEQ ID NO: 372308 - RNA, 32 nt, Human
ccccuuccuccaccucccucucugcagaacuu

SEQ ID NO: 372309 - RNA, 32 nt, Human
ccccuuccuccccuuucucuuucucuugagag

SEQ ID NO: 372310 - RNA, 32 nt, Human
ccccuuccuccuccucccuccuucccaucccu

SEQ ID NO: 372311 - RNA, 32 nt, Human
ccccuuccuccuccucuuccugcuccaacuuc

SEQ ID NO: 372312 - RNA, 32 nt, Human
ccccuuccuccugcaucuccccuucuuuccuu

SEQ ID NO: 372313 - RNA, 32 nt, Human
ccccuuccucucucccuucccuuccaugagac

SEQ ID NO: 372314 - RNA, 32 nt, Human
ccccuuccucucuguggcacacacagaccuga

SEQ ID NO: 372315 - RNA, 19 nt, Human
ccccuuccucuuccugccu

SEQ ID NO: 372316 - RNA, 32 nt, Human
ccccuuccugccccaaaaggcuuucacauacc

SEQ ID NO: 372317 - RNA, 32 nt, Human
ccccuuccuggagcuggcagagcuaacgcccu

SEQ ID NO: 372318 - RNA, 32 nt, Human
ccccuuccuggauggaggcuugagggcccugg

SEQ ID NO: 372319 - RNA, 32 nt, Human
ccccuuccugguaaaucucucucccuccccca

SEQ ID NO: 372320 - RNA, 32 nt, Human
ccccuuccuguagcauauggggagacuaaggc

SEQ ID NO: 372321 - RNA, 23 nt, Human
ccccuuccugucacucccggggc

SEQ ID NO: 372322 - RNA, 20 nt, Human
ccccuuccuuaucacugucu

SEQ ID NO: 372323 - RNA, 32 nt, Human
ccccuuccuucccggccauucucccucuuguu

SEQ ID NO: 372324 - RNA, 32 nt, Human
ccccuuccuucuugccuguagcuccugcugga

SEQ ID NO: 372325 - RNA, 32 nt, Human
ccccuuccuugcugcccucccuucccugccuc

SEQ ID NO: 372326 - RNA, 22 nt, Human
ccccuuccuuuccaucuguagc

SEQ ID NO: 372327 - RNA, 32 nt, Human
ccccuuccuuuccuuaccuuguuucuucccag

SEQ ID NO: 372328 - RNA, 32 nt, Human
ccccuuccuuucucucucuuccagaagucauu

SEQ ID NO: 372329 - RNA, 32 nt, Human
ccccuucgacccucagcccucuggugccgcuc

SEQ ID NO: 372330 - RNA, 32 nt, Human
ccccuucgagcagguggucgccagcuuucucc

SEQ ID NO: 372331 - RNA, 32 nt, Human
ccccuucgcgcugccagccucccccaaccacc

SEQ ID NO: 372332 - RNA, 31 nt, Human
ccccuucgcugcucugggccugcguuucucc

SEQ ID NO: 372333 - RNA, 32 nt, Human
ccccuucguuuuucucuucugauucuucucuu

SEQ ID NO: 372334 - RNA, 18 nt, Human
ccccuucuaucccuccuc

SEQ ID NO: 372335 - RNA, 22 nt, Human
ccccuucucacucauggagccc

SEQ ID NO: 372336 - RNA, 32 nt, Human
ccccuucucagaauccugcucuuccuccagag

SEQ ID NO: 372337 - RNA, 32 nt, Human
ccccuucucaguacauccugugccuccuuucu

SEQ ID NO: 372338 - RNA, 24 nt, Human
ccccuucuccaaugcucucgggga

SEQ ID NO: 372339 - RNA, 32 nt, Human
ccccuucuccacccucuacuucccgcccagug

SEQ ID NO: 372340 - RNA, 22 nt, Human
ccccuucuccaggagccagggg

SEQ ID NO: 372341 - RNA, 32 nt, Human
ccccuucuccagucuuuuccuuuuacucuggu

SEQ ID NO: 372342 - RNA, 19 nt, Human
ccccuucuccagugcucuc

SEQ ID NO: 372343 - RNA, 24 nt, Human
ccccuucuccagugcucucaggga

SEQ ID NO: 372344 - RNA, 24 nt, Human
ccccuucuccagugcucucgggga

SEQ ID NO: 372345 - RNA, 24 nt, Human
ccccuucuccagugcucuggggga

SEQ ID NO: 372346 - RNA, 24 nt, Human
ccccuucuccagugcuuucgggga

SEQ ID NO: 372347 - RNA, 24 nt, Human
ccccuucuccagugcuuuugggga

SEQ ID NO: 372348 - RNA, 19 nt, Human
ccccuucuccauccacaug

SEQ ID NO: 372349 - RNA, 32 nt, Human
ccccuucuccaucgucccaggaaucccagggg

SEQ ID NO: 372350 - RNA, 24 nt, Human
ccccuucucccacaaauaaagccc

SEQ ID NO: 372351 - RNA, 32 nt, Human
ccccuucucccaggguccagagccaggacccc

SEQ ID NO: 372352 - RNA, 22 nt, Human
ccccuucucccggguccgugga

SEQ ID NO: 372353 - RNA, 24 nt, Human
ccccuucucccgugcucucaggga

SEQ ID NO: 372354 - RNA, 27 nt, Human
ccccuucucccucucagcuuucggagg

SEQ ID NO: 372355 - RNA, 23 nt, Human
ccccuucuccuccucuuuggugc

SEQ ID NO: 372356 - RNA, 32 nt, Human
ccccuucuccucucugcaccuuccccaucagc

SEQ ID NO: 372357 - RNA, 23 nt, Human
ccccuucuccucuggcuccgggg

SEQ ID NO: 372358 - RNA, 17 nt, Human
ccccuucuccuugggga

SEQ ID NO: 372359 - RNA, 32 nt, Human
ccccuucucucucccucucccucucucucuaa

SEQ ID NO: 372360 - RNA, 32 nt, Human
ccccuucucugaggccuggacccacccaucuu

SEQ ID NO: 372361 - RNA, 32 nt, Human
ccccuucucugccuucacuucugugacugcua

SEQ ID NO: 372362 - RNA, 22 nt, Human
ccccuucucugcgucccuccca

SEQ ID NO: 372363 - RNA, 23 nt, Human
ccccuucucuucagccccugccc

SEQ ID NO: 372364 - RNA, 32 nt, Human
ccccuucucuuccugagugauucucagccaag

SEQ ID NO: 372365 - RNA, 32 nt, Human
ccccuucugagaucugaggacauggacaccca

SEQ ID NO: 372366 - RNA, 23 nt, Human
ccccuucugccaccgugguagca

SEQ ID NO: 372367 - RNA, 23 nt, Human
ccccuucugcccccacugcccuc

SEQ ID NO: 372368 - RNA, 22 nt, Human
ccccuucugccuccugcaggga

SEQ ID NO: 372369 - RNA, 32 nt, Human
ccccuucugccugcaguccugugugagccccu

SEQ ID NO: 372370 - RNA, 17 nt, Human
ccccuucugccuggcuu

SEQ ID NO: 372371 - RNA, 32 nt, Human
ccccuucugccuggcuugccugcuucugcccu

SEQ ID NO: 372372 - RNA, 32 nt, Human
ccccuucugcgugcccuggccccagccccagc

SEQ ID NO: 372373 - RNA, 32 nt, Human
ccccuucugcuuccacgcccuuuuccucuuug

SEQ ID NO: 372374 - RNA, 32 nt, Human
ccccuucugucacuggucucagacacaggccc

SEQ ID NO: 372375 - RNA, 22 nt, Human
ccccuucuguccagcacuugca

SEQ ID NO: 372376 - RNA, 32 nt, Human
ccccuucugucucucgguuccucuuuccuccc

SEQ ID NO: 372377 - RNA, 21 nt, Human
ccccuucuuaugccccucuca

SEQ ID NO: 372378 - RNA, 32 nt, Human
ccccuucuucauugcucucuccagaaaggguu

SEQ ID NO: 372379 - RNA, 23 nt, Human
ccccuugacacacgcccuccuca

SEQ ID NO: 372380 - RNA, 32 nt, Human
ccccuugaccuucccaucaccuccucaucagg

SEQ ID NO: 372381 - RNA, 20 nt, Human
ccccuugaggacccuccuca

SEQ ID NO: 372382 - RNA, 32 nt, Human
ccccuugagguucccuugugagcuugaaucaa

SEQ ID NO: 372383 - RNA, 32 nt, Human
ccccuugcaaaccaucccagcacugcacccca

SEQ ID NO: 372384 - RNA, 32 nt, Human
ccccuugccaccccauggccccggcugaaagc

SEQ ID NO: 372385 - RNA, 32 nt, Human
ccccuugccaguccuggagacuguggcagggg

SEQ ID NO: 372386 - RNA, 32 nt, Human
ccccuugcccacugggacuccucuuuggcucc

SEQ ID NO: 372387 - RNA, 32 nt, Human
ccccuugcccagggcucagccuggugggccuc

SEQ ID NO: 372388 - RNA, 22 nt, Human
ccccuugcuacagccucugccc

SEQ ID NO: 372389 - RNA, 18 nt, Human
ccccuugcucucaaccca

SEQ ID NO: 372390 - RNA, 17 nt, Human
ccccuugcuuccucccu

SEQ ID NO: 372391 - RNA, 32 nt, Human
ccccuugcuucucaacuaaagaauagugccuc

SEQ ID NO: 372392 - RNA, 18 nt, Human
ccccuugcuugccaccca

SEQ ID NO: 372393 - RNA, 32 nt, Human
ccccuuggaauggcugagggaggcaggagagc

SEQ ID NO: 372394 - RNA, 32 nt, Human
ccccuuggagccaagacgauuggccagacauc

SEQ ID NO: 372395 - RNA, 32 nt, Human
ccccuuggagccaggcgccggggucugaggau

SEQ ID NO: 372396 - RNA, 19 nt, Human
ccccuuggccagggccaug

SEQ ID NO: 372397 - RNA, 21 nt, Human
ccccuuggcccccagguuccc

SEQ ID NO: 372398 - RNA, 23 nt, Human
ccccuuggcccccuccccucccc

SEQ ID NO: 372399 - RNA, 22 nt, Human
ccccuuggcccugccccugucc

SEQ ID NO: 372400 - RNA, 22 nt, Human
ccccuuggcccuuucacucccc

SEQ ID NO: 372401 - RNA, 22 nt, Human
ccccuuggccuccccuccacuc

SEQ ID NO: 372402 - RNA, 22 nt, Human
ccccuuggccuuuccaccuccc

SEQ ID NO: 372403 - RNA, 22 nt, Human
ccccuuggcucuaucccugccc

SEQ ID NO: 372404 - RNA, 32 nt, Human
ccccuuggcucucaaugcuguuuggguuucca

SEQ ID NO: 372405 - RNA, 32 nt, Human
ccccuuggcucugccuuggcccuuccccucac

SEQ ID NO: 372406 - RNA, 32 nt, Human
ccccuuggcugggaacauccuccacugacuuc

SEQ ID NO: 372407 - RNA, 32 nt, Human
ccccuuggcuuccugccuuggggucagcagcc

SEQ ID NO: 372408 - RNA, 20 nt, Human
ccccuuggcuucuccgugcc

SEQ ID NO: 372409 - RNA, 31 nt, Human
ccccuuggcuuugccucuccuguguccuguc

SEQ ID NO: 372410 - RNA, 23 nt, Human
ccccuugggcucaggccccgccc

SEQ ID NO: 372411 - RNA, 32 nt, Human
ccccuuggggauaugacacaugcccaugauga

SEQ ID NO: 372412 - RNA, 23 nt, Human
ccccuuggguacaccccucugcc

SEQ ID NO: 372413 - RNA, 19 nt, Human
ccccuuggucugucaccuc

SEQ ID NO: 372414 - RNA, 32 nt, Human
ccccuuggugccacagagggcugugucuuacu

SEQ ID NO: 372415 - RNA, 32 nt, Human
ccccuuguaagaaagcauuccugggaagucuu

SEQ ID NO: 372416 - RNA, 32 nt, Human
ccccuuguacaauuaugcuguguuuuuaaaaa

SEQ ID NO: 372417 - RNA, 32 nt, Human
ccccuuguccccaugugucauuggagauaaac

SEQ ID NO: 372418 - RNA, 32 nt, Human
ccccuugucccugucaaauaaaccagaacaaa

SEQ ID NO: 372419 - RNA, 19 nt, Human
ccccuuguccugucaccuc

SEQ ID NO: 372420 - RNA, 17 nt, Human
ccccuuguccuuccuca

SEQ ID NO: 372421 - RNA, 22 nt, Human
ccccuugucuuaaaaucacuuc

SEQ ID NO: 372422 - RNA, 32 nt, Human
ccccuugugaaacuguaucauaauuucuucug

SEQ ID NO: 372423 - RNA, 18 nt, Human
ccccuugugcagcuuuga

SEQ ID NO: 372424 - RNA, 32 nt, Human
ccccuuguggucagagggguugccugcaggau

SEQ ID NO: 372425 - RNA, 19 nt, Human
ccccuuguucccggccggc

SEQ ID NO: 372426 - RNA, 32 nt, Human
ccccuuguucccucagcucuaagggccgcgau

SEQ ID NO: 372427 - RNA, 32 nt, Human
ccccuuguucucucugcuucugucuugaggau

SEQ ID NO: 372428 - RNA, 32 nt, Human
ccccuuguuggccauggagcagcaggcccaga

SEQ ID NO: 372429 - RNA, 32 nt, Human
ccccuuguuggggaaguugcaggaggagaggu

SEQ ID NO: 372430 - RNA, 32 nt, Human
ccccuuuaaacuuccuccucggccgggccaag

SEQ ID NO: 372431 - RNA, 24 nt, Human
ccccuuuaaggagcaaaucacuuc

SEQ ID NO: 372432 - RNA, 19 nt, Human
ccccuuuaccuagcugugc

SEQ ID NO: 372433 - RNA, 32 nt, Human
ccccuuuaccuugaguugauagcaauagagca

SEQ ID NO: 372434 - RNA, 32 nt, Human
ccccuuuacuccugggaacuuugcagcugccc

SEQ ID NO: 372435 - RNA, 21 nt, Human
ccccuuuaugaaaaccacuuc

SEQ ID NO: 372436 - RNA, 20 nt, Human
ccccuuucaaguuguuuugc

SEQ ID NO: 372437 - RNA, 32 nt, Human
ccccuuucacucuugaggccugggaggugaaa

SEQ ID NO: 372438 - RNA, 17 nt, Human
ccccuuucacucuuggc

SEQ ID NO: 372439 - RNA, 32 nt, Human
ccccuuucagcccaccagucccucucugcugc

SEQ ID NO: 372440 - RNA, 20 nt, Human
ccccuuucagccucuguugc

SEQ ID NO: 372441 - RNA, 19 nt, Human
ccccuuucagguguggugc

SEQ ID NO: 372442 - RNA, 20 nt, Human
ccccuuucauccuuuggugc

SEQ ID NO: 372443 - RNA, 18 nt, Human
ccccuuucauggcugugc

SEQ ID NO: 372444 - RNA, 22 nt, Human
ccccuuucauuuucaguuuugc

SEQ ID NO: 372445 - RNA, 32 nt, Human
ccccuuuccacucuaauggauaguguacauuc

SEQ ID NO: 372446 - RNA, 28 nt, Human
ccccuuuccacuuccccagcuucugccc

SEQ ID NO: 372447 - RNA, 20 nt, Human
ccccuuuccagauguggugc

SEQ ID NO: 372448 - RNA, 20 nt, Human
ccccuuuccaguccuuuggc

SEQ ID NO: 372449 - RNA, 23 nt, Human
ccccuuucccaaaccuucgggga

SEQ ID NO: 372450 - RNA, 20 nt, Human
ccccuuucccacauccgugc

SEQ ID NO: 372451 - RNA, 32 nt, Human
ccccuuucccagcccacagggcuugaagugaa

SEQ ID NO: 372452 - RNA, 19 nt, Human
ccccuuucccaguggcagc

SEQ ID NO: 372453 - RNA, 19 nt, Human
ccccuuuccccacuccacg

SEQ ID NO: 372454 - RNA, 17 nt, Human
ccccuuucccccuuggc

SEQ ID NO: 372455 - RNA, 32 nt, Human
ccccuuuccccggaugcugggcccugcugcua

SEQ ID NO: 372456 - RNA, 32 nt, Human
ccccuuuccccucccuccuugaaggcuacccc

SEQ ID NO: 372457 - RNA, 32 nt, Human
ccccuuuccccugcagcuucucaagugagacu

SEQ ID NO: 372458 - RNA, 18 nt, Human
ccccuuuccccuugggga

SEQ ID NO: 372459 - RNA, 17 nt, Human
ccccuuucccgggcugu

SEQ ID NO: 372460 - RNA, 18 nt, Human
ccccuuucccgggugagc

SEQ ID NO: 372461 - RNA, 17 nt, Human
ccccuuucccggucugc

SEQ ID NO: 372462 - RNA, 23 nt, Human
ccccuuucccuccucuccgccca

SEQ ID NO: 372463 - RNA, 32 nt, Human
ccccuuucccucucccccucccgcucggcgcu

SEQ ID NO: 372464 - RNA, 32 nt, Human
ccccuuuccguccuccucuguuuggagaggcc

SEQ ID NO: 372465 - RNA, 18 nt, Human
ccccuuuccuaccugugc

SEQ ID NO: 372466 - RNA, 32 nt, Human
ccccuuuccucagccuccaccugcaggacagc

SEQ ID NO: 372467 - RNA, 32 nt, Human
ccccuuuccucuuccuuucccuuccuucucuu

SEQ ID NO: 372468 - RNA, 22 nt, Human
ccccuuuccugcccccuccuca

SEQ ID NO: 372469 - RNA, 32 nt, Human
ccccuuuccugcccccuccucaucuuuaauaa

SEQ ID NO: 372470 - RNA, 21 nt, Human
ccccuuuccugcccuuucugc

SEQ ID NO: 372471 - RNA, 19 nt, Human
ccccuuuccugguuauggc

SEQ ID NO: 372472 - RNA, 32 nt, Human
ccccuuuccuucacugccccacuucuggcaug

SEQ ID NO: 372473 - RNA, 18 nt, Human
ccccuuuccuucuagcuc

SEQ ID NO: 372474 - RNA, 32 nt, Human
ccccuuuccuucuucuuaauccaauaggccuc

SEQ ID NO: 372475 - RNA, 32 nt, Human
ccccuuuccuuuccuucuucccuaccuccccu

SEQ ID NO: 372476 - RNA, 17 nt, Human
ccccuuucuacccugug

SEQ ID NO: 372477 - RNA, 19 nt, Human
ccccuuucuaguucaaugc

SEQ ID NO: 372478 - RNA, 32 nt, Human
ccccuuucuaguuccccuaccucucuaucuuu

SEQ ID NO: 372479 - RNA, 17 nt, Human
ccccuuucuauccaugc

SEQ ID NO: 372480 - RNA, 19 nt, Human
ccccuuucuauguucaugu

SEQ ID NO: 372481 - RNA, 32 nt, Human
ccccuuucucacccucugccucacucccaaug

SEQ ID NO: 372482 - RNA, 18 nt, Human
ccccuuucucagccuugc

SEQ ID NO: 372483 - RNA, 18 nt, Human
ccccuuucuccacccugc

SEQ ID NO: 372484 - RNA, 17 nt, Human
ccccuuucuccaccugc

SEQ ID NO: 372485 - RNA, 20 nt, Human
ccccuuucuccagggcaugu

SEQ ID NO: 372486 - RNA, 19 nt, Human
ccccuuucuccagggcugc

SEQ ID NO: 372487 - RNA, 18 nt, Human
ccccuuucuccauuagug

SEQ ID NO: 372488 - RNA, 32 nt, Human
ccccuuucucccccucgguuaagucccucccc

SEQ ID NO: 372489 - RNA, 32 nt, Human
ccccuuucucccccucuguuaagucccucccc

SEQ ID NO: 372490 - RNA, 20 nt, Human
ccccuuucuccucguaugug

SEQ ID NO: 372491 - RNA, 18 nt, Human
ccccuuucucuacugagc

SEQ ID NO: 372492 - RNA, 18 nt, Human
ccccuuucucugccuggc

SEQ ID NO: 372493 - RNA, 18 nt, Human
ccccuuucucuugaugug

SEQ ID NO: 372494 - RNA, 18 nt, Human
ccccuuucugaagcugug

SEQ ID NO: 372495 - RNA, 17 nt, Human
ccccuuucugcggcugc

SEQ ID NO: 372496 - RNA, 17 nt, Human
ccccuuucugggcuggc

SEQ ID NO: 372497 - RNA, 17 nt, Human
ccccuuucugggugugu

SEQ ID NO: 372498 - RNA, 18 nt, Human
ccccuuucuggguuugug

SEQ ID NO: 372499 - RNA, 18 nt, Human
ccccuuucugucccuggc

SEQ ID NO: 372500 - RNA, 18 nt, Human
ccccuuucuugagguugu

SEQ ID NO: 372501 - RNA, 16 nt, Human
ccccuuucuuguugug

SEQ ID NO: 372502 - RNA, 24 nt, Human
ccccuuucuuucuaccagcccugc

SEQ ID NO: 372503 - RNA, 32 nt, Human
ccccuuucuuucuccucgucggcccgagagca

SEQ ID NO: 372504 - RNA, 32 nt, Human
ccccuuugcucaguaucacucucccuccugcc

SEQ ID NO: 372505 - RNA, 32 nt, Human
ccccuuugcuccaucaguuaucaggaaggaga

SEQ ID NO: 372506 - RNA, 32 nt, Human
ccccuuuggacccauugggaccagcccacccg

SEQ ID NO: 372507 - RNA, 32 nt, Human
ccccuuugucccugcacucagcccuguggccc

SEQ ID NO: 372508 - RNA, 32 nt, Human
ccccuuugucuuugggcuuuugcccuuugaaa

SEQ ID NO: 372509 - RNA, 32 nt, Human
ccccuuugugugcaugggucagucaccauaug

SEQ ID NO: 372510 - RNA, 23 nt, Human
ccccuuuguuccccucccggggc

SEQ ID NO: 372511 - RNA, 32 nt, Human
ccccuuuguuuacagcuccugccuccucccuu

SEQ ID NO: 372512 - RNA, 32 nt, Human
ccccuuuguuugggcaauuuucugccauuugg

SEQ ID NO: 372513 - RNA, 32 nt, Human
ccccuuuuaagugugcaggccugagguuugcc

SEQ ID NO: 372514 - RNA, 20 nt, Human
ccccuuuuauuuccaugugc

SEQ ID NO: 372515 - RNA, 18 nt, Human
ccccuuuucaauuugagc

SEQ ID NO: 372516 - RNA, 18 nt, Human
ccccuuuucagcuucugc

SEQ ID NO: 372517 - RNA, 32 nt, Human
ccccuuuuccacccugggccccaaugccgucc

SEQ ID NO: 372518 - RNA, 16 nt, Human
ccccuuuuccagguga

SEQ ID NO: 372519 - RNA, 19 nt, Human
ccccuuuucccucugcugc

SEQ ID NO: 372520 - RNA, 32 nt, Human
ccccuuuucccucuugcgucugugccagcuca

SEQ ID NO: 372521 - RNA, 32 nt, Human
ccccuuuuccuggcauuucucuuccacgcgac

SEQ ID NO: 372522 - RNA, 18 nt, Human
ccccuuuuccuugagaga

SEQ ID NO: 372523 - RNA, 16 nt, Human
ccccuuuucucuggga

SEQ ID NO: 372524 - RNA, 32 nt, Human
ccccuuuucuuccucuugccuuucuauuaaua

SEQ ID NO: 372525 - RNA, 32 nt, Human
ccccuuuucuucuucugcugggaggguggggu

SEQ ID NO: 372526 - RNA, 32 nt, Human
ccccuuuugcagaugugaagggccagugaacc

SEQ ID NO: 372527 - RNA, 18 nt, Human
ccccuuuugccaaucuca

SEQ ID NO: 372528 - RNA, 19 nt, Human
ccccuuuuguucauuugug

SEQ ID NO: 372529 - RNA, 19 nt, Human
ccccuuuuuacaguucugc

SEQ ID NO: 372530 - RNA, 19 nt, Human
ccccuuuuucacguugugc

SEQ ID NO: 372531 - RNA, 17 nt, Human
ccccuuuuucccauggc

SEQ ID NO: 372532 - RNA, 21 nt, Human
ccccuuuuucgggccccgccc

SEQ ID NO: 372533 - RNA, 19 nt, Human
ccccuuuuuuagcuuuugc

SEQ ID NO: 372534 - RNA, 17 nt, Human
ccccuuuuuuguuugug

SEQ ID NO: 372535 - RNA, 32 nt, Human
cccgaaaauccuuccuugcaggaaaccagucu

SEQ ID NO: 372536 - RNA, 32 nt, Human
cccgaaaccagcugcucacucuuucuuuuugg

SEQ ID NO: 372537 - RNA, 32 nt, Human
cccgaaacccuuguuccuuccucuggucauug

SEQ ID NO: 372538 - RNA, 32 nt, Human
cccgaaaccugggcuggagugagguggaagga

SEQ ID NO: 372539 - RNA, 32 nt, Human
cccgaaacggggaaguugucuuguuuggagag

SEQ ID NO: 372540 - RNA, 32 nt, Human
cccgaaagaacuuccccaguauggugguccug

SEQ ID NO: 372541 - RNA, 32 nt, Human
cccgaaagccgugcucuccagccuggcugcca

SEQ ID NO: 372542 - RNA, 24 nt, Human
cccgaaaugcugggauuacaggca

SEQ ID NO: 372543 - RNA, 32 nt, Human
cccgaaaugcuuugggauuacgggugugagcc

SEQ ID NO: 372544 - RNA, 32 nt, Human
cccgaacaauaugcaguagcuuuaagccauuc

SEQ ID NO: 372545 - RNA, 32 nt, Human
cccgaaccaaaaacugcaaagguggcaggaag

SEQ ID NO: 372546 - RNA, 32 nt, Human
cccgaaccccggggcggcaggaagggggccga

SEQ ID NO: 372547 - RNA, 32 nt, Human
cccgaaccccugaaccuccagccaggggcgcc

SEQ ID NO: 372548 - RNA, 32 nt, Human
cccgaaccuccccugcuucucccuuuccuucu

SEQ ID NO: 372549 - RNA, 19 nt, Human
cccgaaccucugcagcggc

SEQ ID NO: 372550 - RNA, 32 nt, Human
cccgaacucccaccucuccauggccugccuag

SEQ ID NO: 372551 - RNA, 32 nt, Human
cccgaacugugccuucgcuuggagacccacaa

SEQ ID NO: 372552 - RNA, 32 nt, Human
cccgaagaccagcaccuggaucuggaggagcc

SEQ ID NO: 372553 - RNA, 32 nt, Human
cccgaagaccuacaggcaggugcaauggggga

SEQ ID NO: 372554 - RNA, 32 nt, Human
cccgaagaccuccccaggccaccccgccaucu

SEQ ID NO: 372555 - RNA, 32 nt, Human
cccgaagagccugguagcgccuccuggggcag

SEQ ID NO: 372556 - RNA, 25 nt, Human
cccgaagcaauaacaacagcagcag

SEQ ID NO: 372557 - RNA, 32 nt, Human
cccgaagcacacacagcagaguccucuggacu

SEQ ID NO: 372558 - RNA, 32 nt, Human
cccgaagccaggcucugugcuucugccuuuaa

SEQ ID NO: 372559 - RNA, 32 nt, Human
cccgaaggagaaaccauugucuucccaggcuu

SEQ ID NO: 372560 - RNA, 32 nt, Human
cccgaaggauggggaacccugcccucucuguc

SEQ ID NO: 372561 - RNA, 24 nt, Human
cccgaagggagcucuggacccuca

SEQ ID NO: 372562 - RNA, 25 nt, Human
cccgaaggggcuggaggcagggcag

SEQ ID NO: 372563 - RNA, 32 nt, Human
cccgaagggguggggagccaaggguggacuuu

SEQ ID NO: 372564 - RNA, 32 nt, Human
cccgaagguacggggagccaggacgacccccg

SEQ ID NO: 372565 - RNA, 32 nt, Human
cccgaagguauuucuccagauccacagggaga

SEQ ID NO: 372566 - RNA, 23 nt, Human
cccgaagugcuaagauuacaggc

SEQ ID NO: 372567 - RNA, 22 nt, Human
cccgaagugcugggauuacagg

SEQ ID NO: 372568 - RNA, 24 nt, Human
cccgaagugcugggauuacaggca

SEQ ID NO: 372569 - RNA, 22 nt, Human
cccgaagugcugggauuauagg

SEQ ID NO: 372570 - RNA, 32 nt, Human
cccgaaucuccuggguucccacugucagcacc

SEQ ID NO: 372571 - RNA, 32 nt, Human
cccgaaugagagguugaggaaaagacuguggg

SEQ ID NO: 372572 - RNA, 32 nt, Human
cccgaaugcagcccugguucaggcccggagga

SEQ ID NO: 372573 - RNA, 32 nt, Human
cccgaaugcucgcaucucccacuggacggcga

SEQ ID NO: 372574 - RNA, 32 nt, Human
cccgaaugggcgcucagugacaagggcuuuga

SEQ ID NO: 372575 - RNA, 19 nt, Human
cccgaaugucagcaccuuc

SEQ ID NO: 372576 - RNA, 22 nt, Human
cccgacaaucacagccccuguc

SEQ ID NO: 372577 - RNA, 32 nt, Human
cccgacacagcgcagacccaccaggaggaaag

SEQ ID NO: 372578 - RNA, 22 nt, Human
cccgacagcaccuccugagaaa

SEQ ID NO: 372579 - RNA, 32 nt, Human
cccgacagcaggaagucagcugaaagaagcca

SEQ ID NO: 372580 - RNA, 32 nt, Human
cccgacaggccagaggaaucaguuuagacuug

SEQ ID NO: 372581 - RNA, 32 nt, Human
cccgacaugccuggcuuguugcagcuucugug

SEQ ID NO: 372582 - RNA, 19 nt, Human
cccgacauggaacccauga

SEQ ID NO: 372583 - RNA, 32 nt, Human
cccgacaugguggcgcaugccuguaaucccag

SEQ ID NO: 372584 - RNA, 32 nt, Human
cccgaccacacaaacccagccuggggaggaac

SEQ ID NO: 372585 - RNA, 18 nt, Human
cccgaccagccccuucca

SEQ ID NO: 372586 - RNA, 32 nt, Human
cccgaccagccucacccagccucggcugaaug

SEQ ID NO: 372587 - RNA, 32 nt, Human
cccgaccaucuucuccuauuuccuggggagcc

SEQ ID NO: 372588 - RNA, 32 nt, Human
cccgaccauggucacacucaucacugagaagc

SEQ ID NO: 372589 - RNA, 32 nt, Human
cccgacccaaguuuguaaggguucugggugca

SEQ ID NO: 372590 - RNA, 18 nt, Human
cccgacccagcacagacu

SEQ ID NO: 372591 - RNA, 32 nt, Human
cccgaccccagccugucaguccgagcacagug

SEQ ID NO: 372592 - RNA, 32 nt, Human
cccgacccccuggaggugccacgaggaaagga

SEQ ID NO: 372593 - RNA, 24 nt, Human
cccgaccccgccugcggccccuca

SEQ ID NO: 372594 - RNA, 32 nt, Human
cccgaccccgcugcacccucagaagagggguu

SEQ ID NO: 372595 - RNA, 32 nt, Human
cccgaccccucaggcccaccugucacggggaa

SEQ ID NO: 372596 - RNA, 32 nt, Human
cccgacccucaccagucccauuugccucccuc

SEQ ID NO: 372597 - RNA, 32 nt, Human
cccgacccuccagccagccuucugccggcccc

SEQ ID NO: 372598 - RNA, 22 nt, Human
cccgacccucucaggcauucca

SEQ ID NO: 372599 - RNA, 18 nt, Human
cccgacccugcccugggc

SEQ ID NO: 372600 - RNA, 32 nt, Human
cccgaccgagcuuaaccccaggaaaaggucag

SEQ ID NO: 372601 - RNA, 32 nt, Human
cccgaccgcacuccagccugggcgacagaguc

SEQ ID NO: 372602 - RNA, 23 nt, Human
cccgaccgccauggagggggcag

SEQ ID NO: 372603 - RNA, 16 nt, Human
cccgaccgccgcgccg

SEQ ID NO: 372604 - RNA, 16 nt, Human
cccgaccgcgcugccg

SEQ ID NO: 372605 - RNA, 23 nt, Human
cccgaccgcguccugcagcagcu

SEQ ID NO: 372606 - RNA, 20 nt, Human
cccgaccuccuccugcuguc

SEQ ID NO: 372607 - RNA, 24 nt, Human
cccgaccucuauacucuggcuguc

SEQ ID NO: 372608 - RNA, 32 nt, Human
cccgaccugcagcggcugcaggcccagcgccc

SEQ ID NO: 372609 - RNA, 32 nt, Human
cccgacgacggcgacuuccugcgcacgccgcg

SEQ ID NO: 372610 - RNA, 32 nt, Human
cccgacgagaggaggcggggugggggaggcgg

SEQ ID NO: 372611 - RNA, 32 nt, Human
cccgacgcaagccugccccggggaagacccag

SEQ ID NO: 372612 - RNA, 24 nt, Human
cccgacgcagagcagcgcccuggc

SEQ ID NO: 372613 - RNA, 32 nt, Human
cccgacgcgaagcagcgagcugaggcggcggc

SEQ ID NO: 372614 - RNA, 18 nt, Human
cccgacgcugcagcggcu

SEQ ID NO: 372615 - RNA, 21 nt, Human
cccgacggagcugcuucugcu

SEQ ID NO: 372616 - RNA, 32 nt, Human
cccgacgggaugcccgcagccaugcuccccua

SEQ ID NO: 372617 - RNA, 21 nt, Human
cccgacgggccgcggcgcgga

SEQ ID NO: 372618 - RNA, 21 nt, Human
cccgacguccggagggggcag

SEQ ID NO: 372619 - RNA, 32 nt, Human
cccgacgucuccgcgcagguucuugaagcagc

SEQ ID NO: 372620 - RNA, 20 nt, Human
cccgacgugccagggcccag

SEQ ID NO: 372621 - RNA, 32 nt, Human
cccgacgugugccucuucggccccuggggcuc

SEQ ID NO: 372622 - RNA, 32 nt, Human
cccgacuccuuucccagaggugagugcccgaa

SEQ ID NO: 372623 - RNA, 32 nt, Human
cccgacucgcccacagauugaaaaaugccugc

SEQ ID NO: 372624 - RNA, 32 nt, Human
cccgacucgcugucugcugucgucgguggucg

SEQ ID NO: 372625 - RNA, 32 nt, Human
cccgacucucaagccucagcucccaggcuagg

SEQ ID NO: 372626 - RNA, 32 nt, Human
cccgacucuccgcgguuaccugugccuagagg

SEQ ID NO: 372627 - RNA, 20 nt, Human
cccgacucucgcgggguuua

SEQ ID NO: 372628 - RNA, 32 nt, Human
cccgacucuggccacugaccucagggccgaag

SEQ ID NO: 372629 - RNA, 32 nt, Human
cccgacucuguggagucuagcugccagggucg

SEQ ID NO: 372630 - RNA, 32 nt, Human
cccgacugcacccuccccuucugguagucaua

SEQ ID NO: 372631 - RNA, 32 nt, Human
cccgacugugccguggugucuccuucccuaaa

SEQ ID NO: 372632 - RNA, 32 nt, Human
cccgacuguggcuaguugucuguccgguggcu

SEQ ID NO: 372633 - RNA, 32 nt, Human
cccgacuuccuugugaaaccuccuaguagaaa

SEQ ID NO: 372634 - RNA, 32 nt, Human
cccgacuucguaucucccacccugcaccaaga

SEQ ID NO: 372635 - RNA, 32 nt, Human
cccgacuucuaccagggaugccuucacgccaa

SEQ ID NO: 372636 - RNA, 31 nt, Human
cccgacuuugucucugggguccuguuccuuc

SEQ ID NO: 372637 - RNA, 32 nt, Human
cccgagaaacacaggagagcgagcgcaagccc

SEQ ID NO: 372638 - RNA, 32 nt, Human
cccgagaacagcccuggcugucagcgggcacc

SEQ ID NO: 372639 - RNA, 22 nt, Human
cccgagaacgcgcgaccaggca

SEQ ID NO: 372640 - RNA, 22 nt, Human
cccgagaagagaugacuaggca

SEQ ID NO: 372641 - RNA, 32 nt, Human
cccgagaagcagagagcgagagggggaagagg

SEQ ID NO: 372642 - RNA, 32 nt, Human
cccgagaagcuuccucucagugaccacaauau

SEQ ID NO: 372643 - RNA, 32 nt, Human
cccgagaaggaagcucacagggcaagacaugg

SEQ ID NO: 372644 - RNA, 32 nt, Human
cccgagacugggugggagagggggagucucac

SEQ ID NO: 372645 - RNA, 21 nt, Human
cccgagacuucaggcccgccc

SEQ ID NO: 372646 - RNA, 32 nt, Human
cccgagagaacugcugaacauuuguucauugc

SEQ ID NO: 372647 - RNA, 24 nt, Human
cccgagagacggagguugcaguga

SEQ ID NO: 372648 - RNA, 32 nt, Human
cccgagagacggagguugcagugagcugauau

SEQ ID NO: 372649 - RNA, 32 nt, Human
cccgagagcgcacgaugggggccccgcucgcc

SEQ ID NO: 372650 - RNA, 32 nt, Human
cccgagaggagaggagguaacgaggagggcgg

SEQ ID NO: 372651 - RNA, 32 nt, Human
cccgagaggauuccugggugggggugggcgug

SEQ ID NO: 372652 - RNA, 22 nt, Human
cccgagaggcccugcagcagcu

SEQ ID NO: 372653 - RNA, 24 nt, Human
cccgagaggcggaaguugcaguga

SEQ ID NO: 372654 - RNA, 32 nt, Human
cccgagaggcggaaguugcagugagccgagau

SEQ ID NO: 372655 - RNA, 23 nt, Human
cccgagaggcggagagaaugugg

SEQ ID NO: 372656 - RNA, 32 nt, Human
cccgagaggcggagcuugcagugagccaagau

SEQ ID NO: 372657 - RNA, 32 nt, Human
cccgagaggcggagcuugcagugagcugagau

SEQ ID NO: 372658 - RNA, 24 nt, Human
cccgagaggcggagguggcaguga

SEQ ID NO: 372659 - RNA, 24 nt, Human
cccgagaggcggagguugcaguga

SEQ ID NO: 372660 - RNA, 32 nt, Human
cccgagaggcggagguugcagugagcccagau

SEQ ID NO: 372661 - RNA, 32 nt, Human
cccgagaggcggagguugcagugagccgagau

SEQ ID NO: 372662 - RNA, 32 nt, Human
cccgagaggcugucccuggacccuggcuggca

SEQ ID NO: 372663 - RNA, 32 nt, Human
cccgagagguagagcuugcaguaagcagagau

SEQ ID NO: 372664 - RNA, 24 nt, Human
cccgagagguggagguugaaguga

SEQ ID NO: 372665 - RNA, 32 nt, Human
cccgagagguggagguugcagugagccaaaau

SEQ ID NO: 372666 - RNA, 32 nt, Human
cccgagagguggagguugcagugagccgagau

SEQ ID NO: 372667 - RNA, 32 nt, Human
cccgagaguaaucaucuuuccaauccagagga

SEQ ID NO: 372668 - RNA, 31 nt, Human
cccgagaugccggaguuccuggaagaccccu

SEQ ID NO: 372669 - RNA, 23 nt, Human
cccgagaugcuggcccccagggu

SEQ ID NO: 372670 - RNA, 32 nt, Human
cccgagauggcuuuucucccaguggcuucucu

SEQ ID NO: 372671 - RNA, 32 nt, Human
cccgagcaaaacacaggauguuccagcauaag

SEQ ID NO: 372672 - RNA, 32 nt, Human
cccgagcaagacccugcaccucuuugggccuc

SEQ ID NO: 372673 - RNA, 32 nt, Human
cccgagcacccacucccuaccgcccgcucccu

SEQ ID NO: 372674 - RNA, 32 nt, Human
cccgagcaccuccacauccuccacguucugcu

SEQ ID NO: 372675 - RNA, 32 nt, Human
cccgagcagcacuauccugccugguggcccug

SEQ ID NO: 372676 - RNA, 32 nt, Human
cccgagcagccuggaucgucguucccucaguc

SEQ ID NO: 372677 - RNA, 23 nt, Human
cccgagcagcggcagcagcagcg

SEQ ID NO: 372678 - RNA, 32 nt, Human
cccgagccaccugcacuuuucccucacccacc

SEQ ID NO: 372679 - RNA, 18 nt, Human
cccgagcccagggaccag

SEQ ID NO: 372680 - RNA, 21 nt, Human
cccgagccccagucagcccgu

SEQ ID NO: 372681 - RNA, 20 nt, Human
cccgagccccgccgccgggu

SEQ ID NO: 372682 - RNA, 18 nt, Human
cccgagccccgcgccccg

SEQ ID NO: 372683 - RNA, 22 nt, Human
cccgagccccgugggcacucgc

SEQ ID NO: 372684 - RNA, 21 nt, Human
cccgagccccugcccacgccc

SEQ ID NO: 372685 - RNA, 19 nt, Human
cccgagcccgugggcacgc

SEQ ID NO: 372686 - RNA, 18 nt, Human
cccgagcccuagauguuc

SEQ ID NO: 372687 - RNA, 18 nt, Human
cccgagccgccgccgccg

SEQ ID NO: 372688 - RNA, 18 nt, Human
cccgagccgccgccgucg

SEQ ID NO: 372689 - RNA, 22 nt, Human
cccgagccggcggggagccggu

SEQ ID NO: 372690 - RNA, 32 nt, Human
cccgagccggggccauggcgaagcugcugagc

SEQ ID NO: 372691 - RNA, 25 nt, Human
cccgagccgucccagaaaccaaagg

SEQ ID NO: 372692 - RNA, 32 nt, Human
cccgagcgaagugccugacaccggguuggauc

SEQ ID NO: 372693 - RNA, 32 nt, Human
cccgagcgcacucuccagccgccggggaucuu

SEQ ID NO: 372694 - RNA, 32 nt, Human
cccgagcgcagaggcggagcugugcucagcac

SEQ ID NO: 372695 - RNA, 32 nt, Human
cccgagcgccuucuccccaggaccccgguguc

SEQ ID NO: 372696 - RNA, 20 nt, Human
cccgagcggcagcggcagcg

SEQ ID NO: 372697 - RNA, 32 nt, Human
cccgagcgggcagagggcacgggcaggcggac

SEQ ID NO: 372698 - RNA, 23 nt, Human
cccgagcggggggccauggagaa

SEQ ID NO: 372699 - RNA, 32 nt, Human
cccgagcuacucucuugccagcauuuucacau

SEQ ID NO: 372700 - RNA, 32 nt, Human
cccgagcucagggcagcugugcugggugagcu

SEQ ID NO: 372701 - RNA, 32 nt, Human
cccgagcugcaggagggccaggagggcagaug

SEQ ID NO: 372702 - RNA, 32 nt, Human
cccgagcugccgcggcugcgccccggcuccag

SEQ ID NO: 372703 - RNA, 18 nt, Human
cccgagcugccggucuga

SEQ ID NO: 372704 - RNA, 20 nt, Human
cccgagcuggagugcagugg

SEQ ID NO: 372705 - RNA, 22 nt, Human
cccgagcuggagugcaguggug

SEQ ID NO: 372706 - RNA, 32 nt, Human
cccgagcugugccgaccaacccccaggauggc

SEQ ID NO: 372707 - RNA, 32 nt, Human
cccgaggaaaagagagaagaaggggacacgga

SEQ ID NO: 372708 - RNA, 32 nt, Human
cccgaggacacacacgcaaccuccuggaccgc

SEQ ID NO: 372709 - RNA, 21 nt, Human
cccgaggaccagcaggcuggg

SEQ ID NO: 372710 - RNA, 32 nt, Human
cccgaggacccaggcuugacgauucaccgggg

SEQ ID NO: 372711 - RNA, 32 nt, Human
cccgaggacugggagcucuucucugaaauucg

SEQ ID NO: 372712 - RNA, 32 nt, Human
cccgaggagccugcuugcuggaaaggcuuucc

SEQ ID NO: 372713 - RNA, 32 nt, Human
cccgaggagcugaggguuuaccccgugaggug

SEQ ID NO: 372714 - RNA, 32 nt, Human
cccgaggagcugccuuucauauuuuccagguu

SEQ ID NO: 372715 - RNA, 22 nt, Human
cccgaggagcugggauuacagg

SEQ ID NO: 372716 - RNA, 24 nt, Human
cccgaggagcugggauuacaggca

SEQ ID NO: 372717 - RNA, 32 nt, Human
cccgaggaggaggaggaggaggaggaagaggg

SEQ ID NO: 372718 - RNA, 32 nt, Human
cccgaggaggaggaggaggaggaggacgcggg

SEQ ID NO: 372719 - RNA, 32 nt, Human
cccgaggaggcagcggccgcaggcagccgggg

SEQ ID NO: 372720 - RNA, 32 nt, Human
cccgaggaggcaggacuuccuggugugggggu

SEQ ID NO: 372721 - RNA, 18 nt, Human
cccgaggaggcggcagcu

SEQ ID NO: 372722 - RNA, 32 nt, Human
cccgaggaggggcccgguggcggcagggccag

SEQ ID NO: 372723 - RNA, 32 nt, Human
cccgaggaucagucuuggccccaaagcgcgac

SEQ ID NO: 372724 - RNA, 32 nt, Human
cccgaggcagccaggacugggcgggaaggugc

SEQ ID NO: 372725 - RNA, 22 nt, Human
cccgaggccaagcgaggggcug

SEQ ID NO: 372726 - RNA, 23 nt, Human
cccgaggccagggccgccgaagg

SEQ ID NO: 372727 - RNA, 32 nt, Human
cccgaggcccuggagugccgugcgugugaagg

SEQ ID NO: 372728 - RNA, 32 nt, Human
cccgaggccuacagcuggccuggggcucgugu

SEQ ID NO: 372729 - RNA, 22 nt, Human
cccgaggccuccgcugcggcug

SEQ ID NO: 372730 - RNA, 19 nt, Human
cccgaggccuuggccgcgu

SEQ ID NO: 372731 - RNA, 32 nt, Human
cccgaggcgcaagaggaagaugaggacgaaga

SEQ ID NO: 372732 - RNA, 21 nt, Human
cccgaggcgcgggcucuggcg

SEQ ID NO: 372733 - RNA, 22 nt, Human
cccgaggcggagguugcacuga

SEQ ID NO: 372734 - RNA, 32 nt, Human
cccgaggcucaggugauccucccaucucagcc

SEQ ID NO: 372735 - RNA, 32 nt, Human
cccgagggaaguuggcgcaguguuucagcauc

SEQ ID NO: 372736 - RNA, 32 nt, Human
cccgagggaggaagagagggagggaggaacuu

SEQ ID NO: 372737 - RNA, 32 nt, Human
cccgaggggaaggggcggugcccacaccgggg

SEQ ID NO: 372738 - RNA, 21 nt, Human
cccgaggguccgcugggcccg

SEQ ID NO: 372739 - RNA, 32 nt, Human
cccgaggucaaggugcccaagggaccugaagu

SEQ ID NO: 372740 - RNA, 32 nt, Human
cccgaggucacugaggacugguaccucgggaa

SEQ ID NO: 372741 - RNA, 32 nt, Human
cccgaggucuccgcccgcaccaugcggcuggg

SEQ ID NO: 372742 - RNA, 24 nt, Human
cccgaguaacugagauuacaggca

SEQ ID NO: 372743 - RNA, 24 nt, Human
cccgaguagcuaggacuacaggca

SEQ ID NO: 372744 - RNA, 23 nt, Human
cccgaguagcuaggauuacaggc

SEQ ID NO: 372745 - RNA, 24 nt, Human
cccgaguagcuaggauuacaggca

SEQ ID NO: 372746 - RNA, 24 nt, Human
cccgaguagcucagauuacaggca

SEQ ID NO: 372747 - RNA, 24 nt, Human
cccgaguagcugagacuacaggca

SEQ ID NO: 372748 - RNA, 24 nt, Human
cccgaguagcuggaauuacaggca

SEQ ID NO: 372749 - RNA, 24 nt, Human
cccgaguagcugggacuacaggca

SEQ ID NO: 372750 - RNA, 24 nt, Human
cccgaguagcugggauuacagaca

SEQ ID NO: 372751 - RNA, 22 nt, Human
cccgaguagcugggauuacagg

SEQ ID NO: 372752 - RNA, 24 nt, Human
cccgaguagcugggauuacaggca

SEQ ID NO: 372753 - RNA, 32 nt, Human
cccgaguagcugguaaaacaggucaacaucag

SEQ ID NO: 372754 - RNA, 32 nt, Human
cccgaguagggaggaccacaggugugagccac

SEQ ID NO: 372755 - RNA, 31 nt, Human
cccgagucacucagcguuugcgggaaaauaa

SEQ ID NO: 372756 - RNA, 32 nt, Human
cccgagucagggcgacuuccacagcagcagaa

SEQ ID NO: 372757 - RNA, 32 nt, Human
cccgaguccaggaauuagagguugcagugagg

SEQ ID NO: 372758 - RNA, 22 nt, Human
cccgagucccagaaaccaaagg

SEQ ID NO: 372759 - RNA, 32 nt, Human
cccgaguccccagcugugcaccagcuccccgc

SEQ ID NO: 372760 - RNA, 19 nt, Human
cccgagucccgggcccgcg

SEQ ID NO: 372761 - RNA, 21 nt, Human
cccgaguccgcuggcccgcgc

SEQ ID NO: 372762 - RNA, 32 nt, Human
cccgagucggcucuguuguuugaauaaacgug

SEQ ID NO: 372763 - RNA, 23 nt, Human
cccgagugccuggauuacaggca

SEQ ID NO: 372764 - RNA, 32 nt, Human
cccgagugcucaccugccccagccuggcucua

SEQ ID NO: 372765 - RNA, 32 nt, Human
cccgaguggagccgggcugagauucuucucaa

SEQ ID NO: 372766 - RNA, 22 nt, Human
cccgaguugcugggaugacagg

SEQ ID NO: 372767 - RNA, 32 nt, Human
cccgaguuugcagagagguaacucccuuuggc

SEQ ID NO: 372768 - RNA, 32 nt, Human
cccgauaggggucaaguugcucaaaucugcgu

SEQ ID NO: 372769 - RNA, 20 nt, Human
cccgauauauaugcauuuua

SEQ ID NO: 372770 - RNA, 21 nt, Human
cccgaucaagaacauggagaa

SEQ ID NO: 372771 - RNA, 32 nt, Human
cccgaucaagaacauggagaaagcccucuuuc

SEQ ID NO: 372772 - RNA, 32 nt, Human
cccgauccccgguagcugcgcuucccgcgcgg

SEQ ID NO: 372773 - RNA, 32 nt, Human
cccgauccugcagcucuuucuggaccuucagg

SEQ ID NO: 372774 - RNA, 32 nt, Human
cccgauccuuccccugcaaccagacagucuac

SEQ ID NO: 372775 - RNA, 32 nt, Human
cccgaucuucuuugcuucuccaaccaaaacau

SEQ ID NO: 372776 - RNA, 32 nt, Human
cccgaucuugcugcccuucuugacacacugug

SEQ ID NO: 372777 - RNA, 29 nt, Human
cccgaugacucugaaacaugcuuggccuu

SEQ ID NO: 372778 - RNA, 32 nt, Human
cccgaugagaaggggcagggacugggggcucu

SEQ ID NO: 372779 - RNA, 32 nt, Human
cccgaugauauggcagccauagguacagguau

SEQ ID NO: 372780 - RNA, 32 nt, Human
cccgaugcaguggcucaugccuguaaucccag

SEQ ID NO: 372781 - RNA, 29 nt, Human
cccgaugccuccagagucagugggaagga

SEQ ID NO: 372782 - RNA, 20 nt, Human
cccgauggaggcacaggcuu

SEQ ID NO: 372783 - RNA, 32 nt, Human
cccgauggccggcaccuggccugugugagcca

SEQ ID NO: 372784 - RNA, 16 nt, Human
cccgauggcgacagcu

SEQ ID NO: 372785 - RNA, 32 nt, Human
cccgaugggaaacuguuuugccuggcgcugcu

SEQ ID NO: 372786 - RNA, 22 nt, Human
cccgaugggacauaaaaccuca

SEQ ID NO: 372787 - RNA, 19 nt, Human
cccgaugggcugggccgug

SEQ ID NO: 372788 - RNA, 32 nt, Human
cccgaugucugggcugugucccugccgggauu

SEQ ID NO: 372789 - RNA, 32 nt, Human
cccgauguggucugggcugggagcaggcauau

SEQ ID NO: 372790 - RNA, 20 nt, Human
cccgauguguccagccagcu

SEQ ID NO: 372791 - RNA, 32 nt, Human
cccgauuagaugguaaagaagugcacccaaac

SEQ ID NO: 372792 - RNA, 32 nt, Human
cccgauucacgccauucuccugccucagccuc

SEQ ID NO: 372793 - RNA, 32 nt, Human
cccgauuccucccagugcuuagcaugaagaag

SEQ ID NO: 372794 - RNA, 32 nt, Human
cccgauucuuuccugcccuccccaccuuguga

SEQ ID NO: 372795 - RNA, 32 nt, Human
cccgauugaaagaaccagagaggcucugagaa

SEQ ID NO: 372796 - RNA, 32 nt, Human
cccgauugccuccucaagucgcagacacuaug

SEQ ID NO: 372797 - RNA, 32 nt, Human
cccgauuucccaggggcucugggagggacccu

SEQ ID NO: 372798 - RNA, 32 nt, Human
cccgcaaaaucaggcuugagugcaguggcgca

SEQ ID NO: 372799 - RNA, 32 nt, Human
cccgcaaaguacucggauuacaggugugaguc

SEQ ID NO: 372800 - RNA, 18 nt, Human
cccgcaacacccacauca

SEQ ID NO: 372801 - RNA, 32 nt, Human
cccgcaagcagcccggguccgcacugcgccag

SEQ ID NO: 372802 - RNA, 32 nt, Human
cccgcaauccugcuccaagagaucuuaagcug

SEQ ID NO: 372803 - RNA, 22 nt, Human
cccgcaauggccaccagaaaca

SEQ ID NO: 372804 - RNA, 32 nt, Human
cccgcacacaccaugccuccugucucaacacu

SEQ ID NO: 372805 - RNA, 32 nt, Human
cccgcacagcagcaacccagccuccagcucug

SEQ ID NO: 372806 - RNA, 32 nt, Human
cccgcacagcucccggcgggugcucugaggcc

SEQ ID NO: 372807 - RNA, 32 nt, Human
cccgcacaggcagcacugaggccgggacccug

SEQ ID NO: 372808 - RNA, 32 nt, Human
cccgcacaggcaggcuguguugugggguccag

SEQ ID NO: 372809 - RNA, 32 nt, Human
cccgcacaggcuguggcuugcacuccagccgc

SEQ ID NO: 372810 - RNA, 32 nt, Human
cccgcacaucaagucccuccccuacuggaugg

SEQ ID NO: 372811 - RNA, 22 nt, Human
cccgcaccagcagccuccgccg

SEQ ID NO: 372812 - RNA, 20 nt, Human
cccgcacccaccuccugucu

SEQ ID NO: 372813 - RNA, 22 nt, Human
cccgcacccacuaauucugcuu

SEQ ID NO: 372814 - RNA, 32 nt, Human
cccgcaccccaccucuagcggcuuugcucgag

SEQ ID NO: 372815 - RNA, 28 nt, Human
cccgcaccccgacuccugcuccaugcuu

SEQ ID NO: 372816 - RNA, 32 nt, Human
cccgcacccuagcauccugcugccuucccaca

SEQ ID NO: 372817 - RNA, 32 nt, Human
cccgcaccgccccacgcgcacacacuccugcc

SEQ ID NO: 372818 - RNA, 32 nt, Human
cccgcacgccuguaaucccagcacuuggggag

SEQ ID NO: 372819 - RNA, 22 nt, Human
cccgcacggccagcagcagcgg

SEQ ID NO: 372820 - RNA, 21 nt, Human
cccgcacggccgcugcgcacg

SEQ ID NO: 372821 - RNA, 32 nt, Human
cccgcacggcggcuacggccuaggugagcggc

SEQ ID NO: 372822 - RNA, 32 nt, Human
cccgcacggcuuuccuggaaagcgcugccccu

SEQ ID NO: 372823 - RNA, 32 nt, Human
cccgcacugcagucuccagccugagccauggg

SEQ ID NO: 372824 - RNA, 32 nt, Human
cccgcagacacgugccuggacuccgagggcuu

SEQ ID NO: 372825 - RNA, 32 nt, Human
cccgcagagagcacaggaagaggcaggggcgg

SEQ ID NO: 372826 - RNA, 32 nt, Human
cccgcagagggaggggaggggcugagcuguga

SEQ ID NO: 372827 - RNA, 18 nt, Human
cccgcagagggggugcag

SEQ ID NO: 372828 - RNA, 32 nt, Human
cccgcagaugcugggggcugaaggaucccggc

SEQ ID NO: 372829 - RNA, 32 nt, Human
cccgcagcaaaaggcaaacuugccuggcucau

SEQ ID NO: 372830 - RNA, 20 nt, Human
cccgcagcacgccgccgccg

SEQ ID NO: 372831 - RNA, 32 nt, Human
cccgcagcagcagaaauguccauuuccucucu

SEQ ID NO: 372832 - RNA, 32 nt, Human
cccgcagcagccgccgccgcagccgccccagc

SEQ ID NO: 372833 - RNA, 32 nt, Human
cccgcagcccaggcuccugggccagugcucuc

SEQ ID NO: 372834 - RNA, 24 nt, Human
cccgcagccccgcgcgccggccga

SEQ ID NO: 372835 - RNA, 32 nt, Human
cccgcagccccugcuacugagaagcuccggga

SEQ ID NO: 372836 - RNA, 25 nt, Human
cccgcagcccgccggccgcacacgu

SEQ ID NO: 372837 - RNA, 20 nt, Human
cccgcagcccgcucgcggcg

SEQ ID NO: 372838 - RNA, 21 nt, Human
cccgcagcccggccgccgccg

SEQ ID NO: 372839 - RNA, 20 nt, Human
cccgcagcccucuccaccca

SEQ ID NO: 372840 - RNA, 22 nt, Human
cccgcagcccuggcuccauccg

SEQ ID NO: 372841 - RNA, 32 nt, Human
cccgcagccgaaggacaagugagcagcccccu

SEQ ID NO: 372842 - RNA, 19 nt, Human
cccgcagccgccgccgccg

SEQ ID NO: 372843 - RNA, 22 nt, Human
cccgcagccgccgcgcccgggc

SEQ ID NO: 372844 - RNA, 32 nt, Human
cccuccuccauucuugcccucuggagaagugg

SEQ ID NO: 372845 - RNA, 23 nt, Human
cccuccucccaaaaagcagccag

SEQ ID NO: 372846 - RNA, 32 nt, Human
cccuccucccacccucguucagccuguccaga

SEQ ID NO: 372847 - RNA, 32 nt, Human
cccuccucccagccaucuccucuucccuaagg

SEQ ID NO: 372848 - RNA, 32 nt, Human
cccuccuccccaccauccucccuaccuccuua

SEQ ID NO: 372849 - RNA, 32 nt, Human
cccuccuccgcccccacccuccagaagcacuc

SEQ ID NO: 372850 - RNA, 32 nt, Human
cccuccuccuacccggcuuuaaagcuagugag

SEQ ID NO: 372851 - RNA, 32 nt, Human
cccuccuccucaaguuccuuuuugcaccguca

SEQ ID NO: 372852 - RNA, 32 nt, Human
cccuccuccucccccagagggguggguuccuc

SEQ ID NO: 372853 - RNA, 19 nt, Human
cccuccuccucccuccuca

SEQ ID NO: 372854 - RNA, 23 nt, Human
cccuccuccuccugccgggccgg

SEQ ID NO: 372855 - RNA, 21 nt, Human
cccuccuccucugcucugccc

SEQ ID NO: 372856 - RNA, 32 nt, Human
cccuccuccucuuccuccucuuccuucuccuc

SEQ ID NO: 372857 - RNA, 32 nt, Human
cccuccuccucuucuccuucaagacccaacug

SEQ ID NO: 372858 - RNA, 32 nt, Human
cccuccuccucuucuucuuccacacccacagc

SEQ ID NO: 372859 - RNA, 32 nt, Human
cccuccuccugccuccugacccaggacuguug

SEQ ID NO: 372860 - RNA, 32 nt, Human
cccuccuccuguguagcugccaccuccccgcu

SEQ ID NO: 372861 - RNA, 32 nt, Human
cccuccucggggucuguguccuugagacuugg

SEQ ID NO: 372862 - RNA, 32 nt, Human
cccuccucucacccuccacccuccaggagacc

SEQ ID NO: 372863 - RNA, 22 nt, Human
cccuccucucaccugcaggcug

SEQ ID NO: 372864 - RNA, 32 nt, Human
cccuccucucagccucuggccaacacaguccc

SEQ ID NO: 372865 - RNA, 32 nt, Human
cccuccucucaggcugcuucugacaggcccaa

SEQ ID NO: 372866 - RNA, 32 nt, Human
cccuccucucaguugagggcaaggucaagggg

SEQ ID NO: 372867 - RNA, 32 nt, Human
cccuccucuccaccaucgucuucuuggccaug

SEQ ID NO: 372868 - RNA, 32 nt, Human
cccuccucuccaggacccuggaugaauccguu

SEQ ID NO: 372869 - RNA, 32 nt, Human
cccuccucuccccuccacugucuucuucaggu

SEQ ID NO: 372870 - RNA, 32 nt, Human
cccuccucuccccuccccucuccuccgccccc

SEQ ID NO: 372871 - RNA, 32 nt, Human
cccuccucuccccuccuuuuccuuccuuccuu

SEQ ID NO: 372872 - RNA, 17 nt, Human
cccuccucuccuccuca

SEQ ID NO: 372873 - RNA, 32 nt, Human
cccuccucuccuccuuucaccucugcaccuag

SEQ ID NO: 372874 - RNA, 32 nt, Human
cccuccucuccugguauaccccggcuuccccc

SEQ ID NO: 372875 - RNA, 32 nt, Human
cccuccucucggccucuggccaacacaguccc

SEQ ID NO: 372876 - RNA, 32 nt, Human
cccuccucucggucucuggccaacacaguccc

SEQ ID NO: 372877 - RNA, 32 nt, Human
cccuccucucucuuccucuccucucucucuuc

SEQ ID NO: 372878 - RNA, 32 nt, Human
cccuccucucugcugccacucauuccagaaca

SEQ ID NO: 372879 - RNA, 32 nt, Human
cccuccucugaaccccagaggcuuccccagcc

SEQ ID NO: 372880 - RNA, 32 nt, Human
cccuccucugacucaacaaugccaucagcacu

SEQ ID NO: 372881 - RNA, 32 nt, Human
cccuccucugagagugggaugugcagaguuuu

SEQ ID NO: 372882 - RNA, 32 nt, Human
cccuccucugccaagcccccaggggagcccuc

SEQ ID NO: 372883 - RNA, 32 nt, Human
cccuccucugcccugugccacucucagccauu

SEQ ID NO: 372884 - RNA, 32 nt, Human
cccuccucugcucuccaucauaacugcuauua

SEQ ID NO: 372885 - RNA, 32 nt, Human
cccuccucugcucucucccuggagaggacugc

SEQ ID NO: 372886 - RNA, 15 nt, Human
cccuccucugcugcc

SEQ ID NO: 372887 - RNA, 32 nt, Human
cccuccucuggcagagguuuugggccaggagg

SEQ ID NO: 372888 - RNA, 32 nt, Human
cccuccucuggcccaggacgccugcugcaagc

SEQ ID NO: 372889 - RNA, 32 nt, Human
cccuccucuguggggcucaggugauugaaaug

SEQ ID NO: 372890 - RNA, 32 nt, Human
cccuccugaaacacagguuggcaggccagucu

SEQ ID NO: 372891 - RNA, 32 nt, Human
cccuccugaccuugugaucugccugccucggc

SEQ ID NO: 372892 - RNA, 32 nt, Human
cccuccugcaaccucucacccgaacaccagug

SEQ ID NO: 372893 - RNA, 32 nt, Human
cccuccugcacaccuggccuccugggccucca

SEQ ID NO: 372894 - RNA, 32 nt, Human
cccuccugcagccucugcucagaacgcccuuc

SEQ ID NO: 372895 - RNA, 23 nt, Human
cccuccugcauuccguccucaca

SEQ ID NO: 372896 - RNA, 32 nt, Human
cccuccugccacccucucuuugacugcuugug

SEQ ID NO: 372897 - RNA, 32 nt, Human
cccuccugccagcauggauucuggguggacac

SEQ ID NO: 372898 - RNA, 20 nt, Human
cccuccugccaggaaaaucc

SEQ ID NO: 372899 - RNA, 22 nt, Human
cccuccugccccauccacccag

SEQ ID NO: 372900 - RNA, 22 nt, Human
cccuccugccucagccccccaa

SEQ ID NO: 372901 - RNA, 20 nt, Human
cccuccugccucagucuuuc

SEQ ID NO: 372902 - RNA, 24 nt, Human
cccuccugccuccacgcccaccca

SEQ ID NO: 372903 - RNA, 23 nt, Human
cccuccugccugccaagcagcaa

SEQ ID NO: 372904 - RNA, 32 nt, Human
cccuccugccuuccuucucuucccaagcccuc

SEQ ID NO: 372905 - RNA, 32 nt, Human
cccuccugcgcugccccagagccugggaagga

SEQ ID NO: 372906 - RNA, 21 nt, Human
cccuccugcggggguuucaca

SEQ ID NO: 372907 - RNA, 22 nt, Human
cccuccugcuccacccccaucc

SEQ ID NO: 372908 - RNA, 19 nt, Human
cccuccugcugaagauaaa

SEQ ID NO: 372909 - RNA, 32 nt, Human
cccuccugcugcacuccuccgccaccgggcua

SEQ ID NO: 372910 - RNA, 32 nt, Human
cccuccugcuggugccagugggagacugccgc

SEQ ID NO: 372911 - RNA, 32 nt, Human
cccuccuggccauucuugcaggccugucccag

SEQ ID NO: 372912 - RNA, 31 nt, Human
cccuccuggcccagcucagccagcaucacug

SEQ ID NO: 372913 - RNA, 32 nt, Human
cccuccuggcccuggccuugguugguguccuc

SEQ ID NO: 372914 - RNA, 32 nt, Human
cccuccugggagagaaggagaucagggcaacu

SEQ ID NO: 372915 - RNA, 32 nt, Human
cccuccugggcuccuccuccgggacaggcaug

SEQ ID NO: 372916 - RNA, 32 nt, Human
cccuccugggcugggcuugggcacaaaucccc

SEQ ID NO: 372917 - RNA, 32 nt, Human
cccuccuggggagccaggcucacagguuguuc

SEQ ID NO: 372918 - RNA, 32 nt, Human
cccuccuggggcuccugugagguggagccaag

SEQ ID NO: 372919 - RNA, 32 nt, Human
cccuccugggugcaacugugcagccacccagc

SEQ ID NO: 372920 - RNA, 32 nt, Human
cccuccuguagucccagcuacuugggaggcug

SEQ ID NO: 372921 - RNA, 32 nt, Human
cccuccuguccaccucuccaggucucacucuc

SEQ ID NO: 372922 - RNA, 32 nt, Human
cccuccuguccugacaggcucagcucugcauc

SEQ ID NO: 372923 - RNA, 32 nt, Human
cccuccugucuacuggcuccaaauaaccaugu

SEQ ID NO: 372924 - RNA, 32 nt, Human
cccuccugucuucuccccguaccuuguaguua

SEQ ID NO: 372925 - RNA, 32 nt, Human
cccuccuguuucucccuugccuggaagucauu

SEQ ID NO: 372926 - RNA, 32 nt, Human
cccuccuguuuuaguuuaaggaaagguuuccu

SEQ ID NO: 372927 - RNA, 32 nt, Human
cccuccuucagaggaggcucuggguggggccu

SEQ ID NO: 372928 - RNA, 32 nt, Human
cccuccuucccaagccuuagggccuacccugg

SEQ ID NO: 372929 - RNA, 32 nt, Human
cccuccuucccaaggcuggcacuaaccaggua

SEQ ID NO: 372930 - RNA, 21 nt, Human
cccuccuuccccuuccugcuu

SEQ ID NO: 372931 - RNA, 32 nt, Human
cccuccuucccucccucccuccuuccucccuc

SEQ ID NO: 372932 - RNA, 32 nt, Human
cccuccuucccuggaugcugugcuguucuccu

SEQ ID NO: 372933 - RNA, 32 nt, Human
cccuccuuccucaggaucugcagccauaggcc

SEQ ID NO: 372934 - RNA, 32 nt, Human
cccuccuuccucccuccccucucccucccccu

SEQ ID NO: 372935 - RNA, 32 nt, Human
cccuccuuccuugaccagcagaucccagcuca

SEQ ID NO: 372936 - RNA, 32 nt, Human
cccuccuuccuugggccugccucaguucccuu

SEQ ID NO: 372937 - RNA, 32 nt, Human
cccuccuucucccagguuuggucucaggggga

SEQ ID NO: 372938 - RNA, 32 nt, Human
cccuccuucucuccuuccuuccuuccucccuc

SEQ ID NO: 372939 - RNA, 32 nt, Human
cccuccuucucugucucuaccucucugccugu

SEQ ID NO: 372940 - RNA, 22 nt, Human
cccuccuucucuuaagccuuuc

SEQ ID NO: 372941 - RNA, 32 nt, Human
cccuccuucugcaggagcucugcugugauuca

SEQ ID NO: 372942 - RNA, 32 nt, Human
cccuccuucugccuccccaguuccuguucccg

SEQ ID NO: 372943 - RNA, 32 nt, Human
cccuccuucuggcagugggcuggaccagccgg

SEQ ID NO: 372944 - RNA, 32 nt, Human
cccuccuucuucuucuuuuaacguuucucucu

SEQ ID NO: 372945 - RNA, 32 nt, Human
cccuccuugaagcacuuucucucccugcuucc

SEQ ID NO: 372946 - RNA, 32 nt, Human
cccuccuugcccgccuacccucccuccagaau

SEQ ID NO: 372947 - RNA, 21 nt, Human
cccuccuuggaggugcaguga

SEQ ID NO: 372948 - RNA, 32 nt, Human
cccuccuuguccagacugggcuacuugcaguu

SEQ ID NO: 372949 - RNA, 22 nt, Human
cccuccuuuaccccucauccaa

SEQ ID NO: 372950 - RNA, 32 nt, Human
cccuccuuucaggcugcagaagggagaggcaa

SEQ ID NO: 372951 - RNA, 32 nt, Human
cccuccuuuccaccccuccgcgcccugccacu

SEQ ID NO: 372952 - RNA, 32 nt, Human
cccuccuuucuauucugggggcuucugagaga

SEQ ID NO: 372953 - RNA, 32 nt, Human
cccuccuuuuauauccuccucuccuugaguaa

SEQ ID NO: 372954 - RNA, 32 nt, Human
cccucgaaaucguggcaucucacuucugagaa

SEQ ID NO: 372955 - RNA, 32 nt, Human
cccucgaagagccuggccagagagggaagaca

SEQ ID NO: 372956 - RNA, 32 nt, Human
cccucgaagcccaugcagaccugcucucaagg

SEQ ID NO: 372957 - RNA, 18 nt, Human
cccucgaaggaggcuguc

SEQ ID NO: 372958 - RNA, 32 nt, Human
cccucgacccucccccuccuugucccucugcu

SEQ ID NO: 372959 - RNA, 21 nt, Human
cccucgacuggccacagccca

SEQ ID NO: 372960 - RNA, 32 nt, Human
cccucgacugugugugcccacaugugccgaga

SEQ ID NO: 372961 - RNA, 32 nt, Human
cccucgagagaaugugcuagagacagccccug

SEQ ID NO: 372962 - RNA, 32 nt, Human
cccucgagagcucugugcuccacgccgaggau

SEQ ID NO: 372963 - RNA, 32 nt, Human
cccucgaggaaccuggucuccgcauccaguua

SEQ ID NO: 372964 - RNA, 32 nt, Human
cccucgaucucaggcugucggugaggcugcag

SEQ ID NO: 372965 - RNA, 32 nt, Human
cccucgaugccuggcuuggugucuggcaaaca

SEQ ID NO: 372966 - RNA, 32 nt, Human
cccucgcagcaacccugucuuggaggaagguc

SEQ ID NO: 372967 - RNA, 32 nt, Human
cccucgcagccugucccucggccucggcccgg

SEQ ID NO: 372968 - RNA, 24 nt, Human
cccucgcagggcccugccgcgccg

SEQ ID NO: 372969 - RNA, 32 nt, Human
cccucgcagggcccugccgcgccgccuucaga

SEQ ID NO: 372970 - RNA, 32 nt, Human
cccucgccaggugauggcagggccaggguggc

SEQ ID NO: 372971 - RNA, 18 nt, Human
cccucgccauccucccca

SEQ ID NO: 372972 - RNA, 32 nt, Human
cccucgcccagccucagcuccuugcugcuccc

SEQ ID NO: 372973 - RNA, 32 nt, Human
cccucgcccagccugccggccaggcgagcgcg

SEQ ID NO: 372974 - RNA, 18 nt, Human
cccucgccccccucccca

SEQ ID NO: 372975 - RNA, 20 nt, Human
cccucgcccugucccuccca

SEQ ID NO: 372976 - RNA, 19 nt, Human
cccucgccgccccuccccg

SEQ ID NO: 372977 - RNA, 32 nt, Human
cccucgccgcccuccggcagccgcgccgcucc

SEQ ID NO: 372978 - RNA, 32 nt, Human
cccucgccggugccucucuccugggucccagg

SEQ ID NO: 372979 - RNA, 32 nt, Human
cccucgccuccccucccugucgcccuuucccu

SEQ ID NO: 372980 - RNA, 15 nt, Human
cccucgccuguugcc

SEQ ID NO: 372981 - RNA, 22 nt, Human
cccucgccuuccaccuccugcu

SEQ ID NO: 372982 - RNA, 32 nt, Human
cccucgcgccugggcagcucucucccagggcu

SEQ ID NO: 372983 - RNA, 32 nt, Human
cccucgcuccucauggugugccuccaaccccc

SEQ ID NO: 372984 - RNA, 32 nt, Human
cccucgcucucauccagcccgcgaggagugcg

SEQ ID NO: 372985 - RNA, 32 nt, Human
cccucgcucugccuccuguccuugucgcugug

SEQ ID NO: 372986 - RNA, 32 nt, Human
cccucgcugcagccccgcccccgugggucucu

SEQ ID NO: 372987 - RNA, 25 nt, Human
cccucgcugccccugacccgcgccc

SEQ ID NO: 372988 - RNA, 16 nt, Human
cccucgcugccugcca

SEQ ID NO: 372989 - RNA, 29 nt, Human
cccucgcugcugucaucauccccuugccu

SEQ ID NO: 372990 - RNA, 32 nt, Human
cccucgcuggcuuccccaccucucucaggaug

SEQ ID NO: 372991 - RNA, 19 nt, Human
cccucgcugugcugcugcc

SEQ ID NO: 372992 - RNA, 32 nt, Human
cccucgcuucugugaagagaucaaaagaaacc

SEQ ID NO: 372993 - RNA, 32 nt, Human
cccucgcuuuccaggauggguaggguggaaga

SEQ ID NO: 372994 - RNA, 32 nt, Human
cccucggaacacccucuccugguggcaggcca

SEQ ID NO: 372995 - RNA, 32 nt, Human
cccucggaagcauggggcuuuugagcacacuu

SEQ ID NO: 372996 - RNA, 32 nt, Human
cccucggaaguuguuuuaccuacuuuaaaagu

SEQ ID NO: 372997 - RNA, 32 nt, Human
cccucggaaucugauuccacauggacauagga

SEQ ID NO: 372998 - RNA, 32 nt, Human
cccucggaccuccaucuccacccugcugagcc

SEQ ID NO: 372999 - RNA, 32 nt, Human
cccucggacuccugcccuccucggccucccug

SEQ ID NO: 373000 - RNA, 32 nt, Human
cccucggacuugaagaauggccauuccuguac

SEQ ID NO: 373001 - RNA, 32 nt, Human
cccucggagacgcagguugcaguggacauugg

SEQ ID NO: 373002 - RNA, 32 nt, Human
cccucggagcuucacaucacacuguacagagg

SEQ ID NO: 373003 - RNA, 32 nt, Human
cccucggcacccagcagcaucugccucagccc

SEQ ID NO: 373004 - RNA, 32 nt, Human
cccucggccaaagcccgagaucaaagcuggga

SEQ ID NO: 373005 - RNA, 32 nt, Human
cccucggccacugcccacucggggagccuucu

SEQ ID NO: 373006 - RNA, 22 nt, Human
cccucggcccugcccugcagug

SEQ ID NO: 373007 - RNA, 32 nt, Human
cccucggccgauccacagacccugccgacugc

SEQ ID NO: 373008 - RNA, 32 nt, Human
cccucggccucaaggauccucuuucugaccau

SEQ ID NO: 373009 - RNA, 32 nt, Human
cccucggccugcggaagaggcgagggcaagaa

SEQ ID NO: 373010 - RNA, 32 nt, Human
cccucggcgccuggccuggccggugcugcaca

SEQ ID NO: 373011 - RNA, 32 nt, Human
cccucggcgcgaaccggcagcccagccccggg

SEQ ID NO: 373012 - RNA, 32 nt, Human
cccucggcgcucugagcccacagggaagaagg

SEQ ID NO: 373013 - RNA, 32 nt, Human
cccucggcgcucugucugccucugccugccag

SEQ ID NO: 373014 - RNA, 32 nt, Human
cccucggcuagagcagggucugugauggccuc

SEQ ID NO: 373015 - RNA, 26 nt, Human
cccucggcuccagcccccggcgccug

SEQ ID NO: 373016 - RNA, 22 nt, Human
cccucggcuccagguccuaccc

SEQ ID NO: 373017 - RNA, 23 nt, Human
cccucggcuccuggcgcgggccu

SEQ ID NO: 373018 - RNA, 18 nt, Human
cccucggcugagaauaaa

SEQ ID NO: 373019 - RNA, 17 nt, Human
cccucggcugcagcagc

SEQ ID NO: 373020 - RNA, 32 nt, Human
cccucggcugccccuccucccugggccugcug

SEQ ID NO: 373021 - RNA, 23 nt, Human
cccucggcuuccgcggggcgcug

SEQ ID NO: 373022 - RNA, 21 nt, Human
cccucggcuuuguggggcuug

SEQ ID NO: 373023 - RNA, 19 nt, Human
cccucgggaagccuggcca

SEQ ID NO: 373024 - RNA, 32 nt, Human
cccucgggaaggaggagagcgccugacgccga

SEQ ID NO: 373025 - RNA, 32 nt, Human
cccucgggacgagacagccccuggcagugcca

SEQ ID NO: 373026 - RNA, 32 nt, Human
cccucgggacuccaccccuuguggccccgccu

SEQ ID NO: 373027 - RNA, 32 nt, Human
cccucgggacugccuggugcaggugguggcag

SEQ ID NO: 373028 - RNA, 30 nt, Human
cccucgggccucuccgagucuuugucucuu

SEQ ID NO: 373029 - RNA, 32 nt, Human
cccucgggcuguaggccugguccgccauucag

SEQ ID NO: 373030 - RNA, 32 nt, Human
cccucgggggccucucgaggucagccucucca

SEQ ID NO: 373031 - RNA, 17 nt, Human
cccucggggggcacuuu

SEQ ID NO: 373032 - RNA, 18 nt, Human
cccucggguccccuccca

SEQ ID NO: 373033 - RNA, 26 nt, Human
cccucggucucuugccucggcaccug

SEQ ID NO: 373034 - RNA, 32 nt, Human
cccucggugcagccuggcaccccauaaacucu

SEQ ID NO: 373035 - RNA, 32 nt, Human
cccucggugcuggccucuccugccugcuggga

SEQ ID NO: 373036 - RNA, 32 nt, Human
cccucgguggagaucuggccucaggaugcagg

SEQ ID NO: 373037 - RNA, 20 nt, Human
cccucguccccauccaccug

SEQ ID NO: 373038 - RNA, 20 nt, Human
cccucguccccccuccugcc

SEQ ID NO: 373039 - RNA, 32 nt, Human
cccucgucccucuccccaguguuuccaggacc

SEQ ID NO: 373040 - RNA, 20 nt, Human
cccucgucccugcccaggaa

SEQ ID NO: 373041 - RNA, 32 nt, Human
cccucgucccugcccaggucucuugucucuug

SEQ ID NO: 373042 - RNA, 20 nt, Human
cccucguccggcccccgggg

SEQ ID NO: 373043 - RNA, 17 nt, Human
cccucguccucugcgcc

SEQ ID NO: 373044 - RNA, 32 nt, Human
cccucgucguuccuccuccuuccauuugaccc

SEQ ID NO: 373045 - RNA, 32 nt, Human
cccucgucucacccccuuuacacucacauuuu

SEQ ID NO: 373046 - RNA, 32 nt, Human
cccucgucuccucauccccacguccucucguc

SEQ ID NO: 373047 - RNA, 16 nt, Human
cccucgucucgcugcc

SEQ ID NO: 373048 - RNA, 32 nt, Human
cccucgucucuggucccuaccucucugcugug

SEQ ID NO: 373049 - RNA, 32 nt, Human
cccucgucuuccuggccacccuuggccugucc

SEQ ID NO: 373050 - RNA, 32 nt, Human
cccucgugaggcuggcaugcaggauggcagga

SEQ ID NO: 373051 - RNA, 32 nt, Human
cccucgugccaucccucgaauccaccagcacg

SEQ ID NO: 373052 - RNA, 32 nt, Human
cccucgugcccaccccugugccugcagggcac

SEQ ID NO: 373053 - RNA, 32 nt, Human
cccucguggcuggagcaggggugcaccugcug

SEQ ID NO: 373054 - RNA, 32 nt, Human
cccucguggcuucucauuuuccauucccuuca

SEQ ID NO: 373055 - RNA, 32 nt, Human
cccucgugggaacugccaagaccaucgccaag

SEQ ID NO: 373056 - RNA, 32 nt, Human
cccucgugggguuaaggcgagcuguuccuggu

SEQ ID NO: 373057 - RNA, 32 nt, Human
cccucgugugcucugagcuaagccacauacua

SEQ ID NO: 373058 - RNA, 21 nt, Human
cccucguuccauggcccaguc

SEQ ID NO: 373059 - RNA, 32 nt, Human
cccucguugucagggccucuccucacugcugu

SEQ ID NO: 373060 - RNA, 20 nt, Human
cccucguuuucaaagauaaa

SEQ ID NO: 373061 - RNA, 32 nt, Human
cccucuaacucaugugauuucccaugcaugcu

SEQ ID NO: 373062 - RNA, 17 nt, Human
cccucuaagaaaguaaa

SEQ ID NO: 373063 - RNA, 32 nt, Human
cccucuaagccagcaagauuuccucuuugcaa

SEQ ID NO: 373064 - RNA, 32 nt, Human
cccucuaaggccgaagaaggguccuucccucu

SEQ ID NO: 373065 - RNA, 32 nt, Human
cccucuaaguugagcaggaaauccuccaccaa

SEQ ID NO: 373066 - RNA, 32 nt, Human
cccucuacacagacacuguccugggugcacac

SEQ ID NO: 373067 - RNA, 32 nt, Human
cccucuacacaggacaugcacacacaaguaac

SEQ ID NO: 373068 - RNA, 32 nt, Human
cccucuacagccugacuuucucuccagcgguc

SEQ ID NO: 373069 - RNA, 32 nt, Human
cccucuaccaccuugcacagugggcacugguc

SEQ ID NO: 373070 - RNA, 32 nt, Human
cccucuacccugccuugaggccuguuugcagu

SEQ ID NO: 373071 - RNA, 32 nt, Human
cccucuacccuugggccaccugcugcccaagu

SEQ ID NO: 373072 - RNA, 19 nt, Human
cccucuacuccacuuucaa

SEQ ID NO: 373073 - RNA, 18 nt, Human
cccucuacucucauccua

SEQ ID NO: 373074 - RNA, 32 nt, Human
cccucuagauugccucacaguuguuuguuuac

SEQ ID NO: 373075 - RNA, 32 nt, Human
cccucuagccucccucucccugaucccccacc

SEQ ID NO: 373076 - RNA, 32 nt, Human
cccucuagccucuaucacaguaggggaguuuu

SEQ ID NO: 373077 - RNA, 32 nt, Human
cccucuagccuucuccagucgccuccgccaug

SEQ ID NO: 373078 - RNA, 31 nt, Human
cccucuauaaagacuuccuguugaggugaau

SEQ ID NO: 373079 - RNA, 32 nt, Human
cccucuauauuuccucccuuuuuauagucuua

SEQ ID NO: 373080 - RNA, 32 nt, Human
cccucuaucaauugauuucuucuuaccuuuca

SEQ ID NO: 373081 - RNA, 32 nt, Human
cccucuauccccagggacucucuccccucuug

SEQ ID NO: 373082 - RNA, 32 nt, Human
cccucuauccucugcuguaucucccugcaagg

SEQ ID NO: 373083 - RNA, 32 nt, Human
cccucuaucugcagguccccagccuggguaaa

SEQ ID NO: 373084 - RNA, 32 nt, Human
cccucuauugcccaggcuggagugcaguggug

SEQ ID NO: 373085 - RNA, 32 nt, Human
cccucuauuuauuuuuaugucaggugaacugg

SEQ ID NO: 373086 - RNA, 32 nt, Human
cccucucacaccagcugcacucccguggcugc

SEQ ID NO: 373087 - RNA, 32 nt, Human
cccucucaccacccucuucugccuaugagcgg

SEQ ID NO: 373088 - RNA, 19 nt, Human
cccucucaccauccccuug

SEQ ID NO: 373089 - RNA, 32 nt, Human
cccucucacucacuuccgccucuuagagccuu

SEQ ID NO: 373090 - RNA, 32 nt, Human
cccucucacuccugcccuuucuagcucucucu

SEQ ID NO: 373091 - RNA, 32 nt, Human
cccucucagccaugcucuccccaggguggggc

SEQ ID NO: 373092 - RNA, 32 nt, Human
cccucucagcccaccacccacagcucccuucu

SEQ ID NO: 373093 - RNA, 32 nt, Human
cccucucagcccagaagugacacacaccaaac

SEQ ID NO: 373094 - RNA, 22 nt, Human
cccucucagcccccaccucagg

SEQ ID NO: 373095 - RNA, 32 nt, Human
cccucucaggcagagagguugccgagugauuc

SEQ ID NO: 373096 - RNA, 32 nt, Human
cccucucaggcugagggcaccccaggaacucc

SEQ ID NO: 373097 - RNA, 17 nt, Human
cccucucagggugccac

SEQ ID NO: 373098 - RNA, 32 nt, Human
cccucucaguccauuuuccggggcugcucggu

SEQ ID NO: 373099 - RNA, 32 nt, Human
cccucucaguguuuccccaacuucucccuuua

SEQ ID NO: 373100 - RNA, 32 nt, Human
cccucucauaacuucuccccaucccaggagga

SEQ ID NO: 373101 - RNA, 32 nt, Human
cccucucaucagaccuccgcacccucacccca

SEQ ID NO: 373102 - RNA, 18 nt, Human
cccucucauggggguuuu

SEQ ID NO: 373103 - RNA, 21 nt, Human
cccucucauuccuuccgugcc

SEQ ID NO: 373104 - RNA, 32 nt, Human
cccucucauuuuuaucugucuaccuccauucu

SEQ ID NO: 373105 - RNA, 19 nt, Human
cccucuccaaauccagcca

SEQ ID NO: 373106 - RNA, 32 nt, Human
cccucuccaaccacaggacccuucggcucacc

SEQ ID NO: 373107 - RNA, 32 nt, Human
cccucuccaaggcugagacacagggcauggcc

SEQ ID NO: 373108 - RNA, 20 nt, Human
cccucuccacaccccuucca

SEQ ID NO: 373109 - RNA, 17 nt, Human
cccucuccaccagccua

SEQ ID NO: 373110 - RNA, 32 nt, Human
cccucuccaccaggguggguggaauaaguuga

SEQ ID NO: 373111 - RNA, 32 nt, Human
cccucuccacccuucagugcugggaccccagg

SEQ ID NO: 373112 - RNA, 32 nt, Human
cccucuccacuccuacugccagucccaggcuc

SEQ ID NO: 373113 - RNA, 32 nt, Human
cccucuccacuggccuuugccugcuagugcac

SEQ ID NO: 373114 - RNA, 22 nt, Human
cccucuccagcccuggccccca

SEQ ID NO: 373115 - RNA, 32 nt, Human
cccucuccagcugcauucgccucggcuauguu

SEQ ID NO: 373116 - RNA, 32 nt, Human
cccucuccaguaggcauccacuguggaagugc

SEQ ID NO: 373117 - RNA, 32 nt, Human
cccucuccaugccucuugucugucucuagcug

SEQ ID NO: 373118 - RNA, 32 nt, Human
cccucucccagaggacgccaucucccuuacug

SEQ ID NO: 373119 - RNA, 32 nt, Human
cccucucccaguccucacaaaggggccuaguc

SEQ ID NO: 373120 - RNA, 32 nt, Human
cccucucccaucuucucauauccuggcucuuc

SEQ ID NO: 373121 - RNA, 32 nt, Human
cccucuccccacccuccuccuccgcccccucc

SEQ ID NO: 373122 - RNA, 32 nt, Human
cccucuccccucccuccugcaaacaccaccgc

SEQ ID NO: 373123 - RNA, 32 nt, Human
cccucuccccucuccaccaugggcugcaguau

SEQ ID NO: 373124 - RNA, 16 nt, Human
cccucuccccucuuca

SEQ ID NO: 373125 - RNA, 17 nt, Human
cccucuccccugcuguc

SEQ ID NO: 373126 - RNA, 32 nt, Human
cccucuccccuucaucuucugcuccaaaggug

SEQ ID NO: 373127 - RNA, 32 nt, Human
cccucuccccuuccuuucucucucuuccagaa

SEQ ID NO: 373128 - RNA, 23 nt, Human
cccucucccgggggugugcaggc

SEQ ID NO: 373129 - RNA, 32 nt, Human
cccucucccuugccuguaggucacgggaaugu

SEQ ID NO: 373130 - RNA, 18 nt, Human
cccucuccgccgggggcu

SEQ ID NO: 373131 - RNA, 32 nt, Human
cccucuccuaaaguaauuugauccucaggaau

SEQ ID NO: 373132 - RNA, 32 nt, Human
cccucuccucaccccucuauccauuccucccg

SEQ ID NO: 373133 - RNA, 32 nt, Human
cccucuccuccaggcccguggggcuggcccug

SEQ ID NO: 373134 - RNA, 32 nt, Human
cccucuccuccauagccuucugaggcuucacc

SEQ ID NO: 373135 - RNA, 32 nt, Human
cccucuccucccaccucccacccuccaguagg

SEQ ID NO: 373136 - RNA, 32 nt, Human
cccucuccuccccucuccuccccuccccuccc

SEQ ID NO: 373137 - RNA, 32 nt, Human
cccucuccuccccuucccucuguucucuccuc

SEQ ID NO: 373138 - RNA, 32 nt, Human
cccucuccuccuccuuccccagggucccaucu

SEQ ID NO: 373139 - RNA, 32 nt, Human
cccucuccuccuccuuccucuuggucucagca

SEQ ID NO: 373140 - RNA, 32 nt, Human
cccucuccucgagcacgucacacacacaugcc

SEQ ID NO: 373141 - RNA, 32 nt, Human
cccucuccucuccccgcgccccaaacuuugcc

SEQ ID NO: 373142 - RNA, 32 nt, Human
cccucuccucuccuccccuugcccucaaaaua

SEQ ID NO: 373143 - RNA, 16 nt, Human
cccucuccucugccca

SEQ ID NO: 373144 - RNA, 17 nt, Human
cccucuccucugcugcc

SEQ ID NO: 373145 - RNA, 32 nt, Human
cccucuccugaucuaacucccugcugcaucuc

SEQ ID NO: 373146 - RNA, 32 nt, Human
cccucuccugcagguggccgucugcccggccc

SEQ ID NO: 373147 - RNA, 15 nt, Human
cccucuccugcugcu

SEQ ID NO: 373148 - RNA, 32 nt, Human
cccucuccugcugcuggacuucugccuuuguu

SEQ ID NO: 373149 - RNA, 32 nt, Human
cccucuccugcugcuuccucucggugauauuu

SEQ ID NO: 373150 - RNA, 32 nt, Human
cccucuccuggagagaggcucacagcguagcu

SEQ ID NO: 373151 - RNA, 32 nt, Human
cccucuccuggcccaucccuucccuucuuccc

SEQ ID NO: 373152 - RNA, 32 nt, Human
cccucuccuggggcgggggaaggugugucucu

SEQ ID NO: 373153 - RNA, 32 nt, Human
cccucuccuguauuucucagguccaguucaaa

SEQ ID NO: 373154 - RNA, 20 nt, Human
cccucuccuguccugcccca

SEQ ID NO: 373155 - RNA, 15 nt, Human
cccucuccuguugcc

SEQ ID NO: 373156 - RNA, 32 nt, Human
cccucuccuucccaucuuucuauaccacccag

SEQ ID NO: 373157 - RNA, 32 nt, Human
cccucuccuugcuuucagcccuucccacagga

SEQ ID NO: 373158 - RNA, 32 nt, Human
cccucuccuuguauugcuuuccuucuagauuu

SEQ ID NO: 373159 - RNA, 32 nt, Human
cccucuccuuucucccucucagaaccuuccug

SEQ ID NO: 373160 - RNA, 32 nt, Human
cccucuccuuucucucccugccuuucuucccu

SEQ ID NO: 373161 - RNA, 32 nt, Human
cccucuccuuucucucuucucuuccuuccucu

SEQ ID NO: 373162 - RNA, 32 nt, Human
cccucuccuuucuuucaguucucccaugcagc

SEQ ID NO: 373163 - RNA, 32 nt, Human
cccucucgccaggcuggaguguaguggcacaa

SEQ ID NO: 373164 - RNA, 18 nt, Human
cccucucgggcccucgca

SEQ ID NO: 373165 - RNA, 32 nt, Human
cccucucggggaugccuccccaagaggguagu

SEQ ID NO: 373166 - RNA, 32 nt, Human
cccucucgggugggacucugcagcugcuucgc

SEQ ID NO: 373167 - RNA, 32 nt, Human
cccucucguuccccguccucguuuccagcauc

SEQ ID NO: 373168 - RNA, 32 nt, Human
cccucucguuuaggaagggaaggugggacagg

SEQ ID NO: 373169 - RNA, 32 nt, Human
cccucucuacuucugugccuuuguaaaacgug

SEQ ID NO: 373170 - RNA, 32 nt, Human
cccucucuagcaaaguuaugggcugcuuuacu

SEQ ID NO: 373171 - RNA, 32 nt, Human
cccucucucaccacuccuguucaucauagcau

SEQ ID NO: 373172 - RNA, 32 nt, Human
cccucucucagccucagugucccgagggcccc

SEQ ID NO: 373173 - RNA, 32 nt, Human
cccucucuccaccccugggcuaugcaggccag

SEQ ID NO: 373174 - RNA, 32 nt, Human
cccucucuccaccccuguccucuagccacagc

SEQ ID NO: 373175 - RNA, 32 nt, Human
cccucucuccacccuccccacacucugcgcuu

SEQ ID NO: 373176 - RNA, 32 nt, Human
cccucucuccaggacuugucagcuggugguuc

SEQ ID NO: 373177 - RNA, 32 nt, Human
cccucucuccccuaacccagcauccugcaguc

SEQ ID NO: 373178 - RNA, 16 nt, Human
cccucucucccuccuc

SEQ ID NO: 373179 - RNA, 16 nt, Human
cccucucuccuccuca

SEQ ID NO: 373180 - RNA, 32 nt, Human
cccucucuccuccucuuccucucucuggacgc

SEQ ID NO: 373181 - RNA, 32 nt, Human
cccucucuccucuuccuccccucucucuuccu

SEQ ID NO: 373182 - RNA, 32 nt, Human
cccucucucuuucucuccuccccuucucucuu

SEQ ID NO: 373183 - RNA, 32 nt, Human
cccucucugcaaaggccauuuugaagaucuca

SEQ ID NO: 373184 - RNA, 32 nt, Human
cccucucugccccacaguccucaggcuccagc

SEQ ID NO: 373185 - RNA, 32 nt, Human
cccucucugcuaaaaauacaaaauuagccgag

SEQ ID NO: 373186 - RNA, 32 nt, Human
cccucucugcucagucuaguucccagguccuu

SEQ ID NO: 373187 - RNA, 32 nt, Human
cccucucugcucccugugacuucugucccagc

SEQ ID NO: 373188 - RNA, 32 nt, Human
cccucucugcucgcccugccuagcuugaggau

SEQ ID NO: 373189 - RNA, 32 nt, Human
cccucucugcugcuguuuccauggcccagcau

SEQ ID NO: 373190 - RNA, 32 nt, Human
cccucucugcuuccuccuccagccucccuugg

SEQ ID NO: 373191 - RNA, 32 nt, Human
cccucucugcuuccuguugggcacccacugcc

SEQ ID NO: 373192 - RNA, 32 nt, Human
cccucucuggcauucaugcagagcaaagcacu

SEQ ID NO: 373193 - RNA, 32 nt, Human
cccucucuguaucuuaucaaauaugauggauu

SEQ ID NO: 373194 - RNA, 32 nt, Human
cccucucugucaccccugaccccagccauuca

SEQ ID NO: 373195 - RNA, 32 nt, Human
cccucucugucccgagaaggcuuagaguggua

SEQ ID NO: 373196 - RNA, 32 nt, Human
cccucucugugcaaagcugccacuggggccug

SEQ ID NO: 373197 - RNA, 32 nt, Human
cccucucuuagagacugugccuucagcaggac

SEQ ID NO: 373198 - RNA, 22 nt, Human
cccucucuuccagaacugugga

SEQ ID NO: 373199 - RNA, 32 nt, Human
cccucucuucccuuuccucucucccccucggu

SEQ ID NO: 373200 - RNA, 32 nt, Human
cccucucuuccucccuuccuccucuccccacu

SEQ ID NO: 373201 - RNA, 32 nt, Human
cccucucuugacuccagccuagggaaugguua

SEQ ID NO: 373202 - RNA, 32 nt, Human
cccucucuugcugcagaagaagagucuuccug

SEQ ID NO: 373203 - RNA, 32 nt, Human
cccucucuuuugggagcuucucugggcagaau

SEQ ID NO: 373204 - RNA, 32 nt, Human
cccucugaaaacaccugguccucuggcgaucc

SEQ ID NO: 373205 - RNA, 32 nt, Human
cccucugaaaacagccaacuaacagcgccucc

SEQ ID NO: 373206 - RNA, 32 nt, Human
cccucugaagaaaaaugaggcggggaagggga

SEQ ID NO: 373207 - RNA, 32 nt, Human
cccucugaagccacagccagagcuguauguug

SEQ ID NO: 373208 - RNA, 32 nt, Human
cccucugaagccugucacagaaacccgaucca

SEQ ID NO: 373209 - RNA, 32 nt, Human
cccucugaauuucugcaucugcaucuuaacaa

SEQ ID NO: 373210 - RNA, 32 nt, Human
cccucugacugcccucugccccuuuaagggaa

SEQ ID NO: 373211 - RNA, 22 nt, Human
cccucugagagaccacgggaac

SEQ ID NO: 373212 - RNA, 32 nt, Human
cccucugagcaccuggccgccugcuguccccg

SEQ ID NO: 373213 - RNA, 32 nt, Human
cccucugagcagcccccuccuccuucagggca

SEQ ID NO: 373214 - RNA, 32 nt, Human
cccucugagcccaccaguccugggcacagcug

SEQ ID NO: 373215 - RNA, 30 nt, Human
cccucugagccucuucugcuccugcacaac

SEQ ID NO: 373216 - RNA, 19 nt, Human
cccucugagcugccucuga

SEQ ID NO: 373217 - RNA, 32 nt, Human
cccucugaggcagaggcugggcaggacccaca

SEQ ID NO: 373218 - RNA, 32 nt, Human
cccucugaggcagauggggcaggcggcccagg

SEQ ID NO: 373219 - RNA, 32 nt, Human
cccucugaggggucugcaccuccugggagcag

SEQ ID NO: 373220 - RNA, 32 nt, Human
cccucugauccagcccagcggggcuucuccug

SEQ ID NO: 373221 - RNA, 32 nt, Human
cccucugcacacaaagcucucacauugucugc

SEQ ID NO: 373222 - RNA, 32 nt, Human
cccucugcacccccguuuccuccccuguaagg

SEQ ID NO: 373223 - RNA, 32 nt, Human
cccucugcacgcuagggugguccugcaccugu

SEQ ID NO: 373224 - RNA, 32 nt, Human
cccucugcagagccaucugcuccaggcaccca

SEQ ID NO: 373225 - RNA, 32 nt, Human
cccucugcagagcugggcucuaccccaaaagg

SEQ ID NO: 373226 - RNA, 32 nt, Human
cccucugcagcgcaugcugacaaggcaccuca

SEQ ID NO: 373227 - RNA, 32 nt, Human
cccucugcaggagcuucuccugccgccagcca

SEQ ID NO: 373228 - RNA, 32 nt, Human
cccucugcaggcaagaacuggggaagggaaag

SEQ ID NO: 373229 - RNA, 32 nt, Human
cccucugcauuggaugcaggaagcugggaaag

SEQ ID NO: 373230 - RNA, 32 nt, Human
cccucugccacaugcugguccgcagagcccuc

SEQ ID NO: 373231 - RNA, 32 nt, Human
cccucugccagccucuugggggcaguuccggc

SEQ ID NO: 373232 - RNA, 32 nt, Human
cccucugccaggcuggauuguacgggccccac

SEQ ID NO: 373233 - RNA, 32 nt, Human
cccucugccaugagccuggcagugcucaggau

SEQ ID NO: 373234 - RNA, 32 nt, Human
cccucugcccacuuccauuggucuccaggccc

SEQ ID NO: 373235 - RNA, 32 nt, Human
cccucugcccaggauguuaaagguugcuggaa

SEQ ID NO: 373236 - RNA, 32 nt, Human
cccucugccccagccagcgccuccaggcccag

SEQ ID NO: 373237 - RNA, 20 nt, Human
cccucugccccaguuuucuc

SEQ ID NO: 373238 - RNA, 22 nt, Human
cccucugcccccaugccuuucu

SEQ ID NO: 373239 - RNA, 26 nt, Human
cccucugcccccucagauggcuuuuu

SEQ ID NO: 373240 - RNA, 22 nt, Human
cccucugccccuccccacucuc

SEQ ID NO: 373241 - RNA, 21 nt, Human
cccucugccccucucuccucu

SEQ ID NO: 373242 - RNA, 32 nt, Human
cccucugccccuggcaccauuccagaacugcc

SEQ ID NO: 373243 - RNA, 32 nt, Human
cccucugccccuggcaccauuccggaacugcc

SEQ ID NO: 373244 - RNA, 32 nt, Human
cccucugccccuggcccucccggcagcccucg

SEQ ID NO: 373245 - RNA, 20 nt, Human
cccucugccccuuccucucu

SEQ ID NO: 373246 - RNA, 23 nt, Human
cccucugccccuuccuucucucu

SEQ ID NO: 373247 - RNA, 32 nt, Human
cccucugcccgaagcaauaacaacagcagcag

SEQ ID NO: 373248 - RNA, 32 nt, Human
cccucugcccuaggaagaucuuugccuuugac

SEQ ID NO: 373249 - RNA, 32 nt, Human
cccucugcccucacaaccucagccuggccuuc

SEQ ID NO: 373250 - RNA, 32 nt, Human
cccucugcccuucacacucuccuccaaaagag

SEQ ID NO: 373251 - RNA, 28 nt, Human
cccucugccgaugcugccuccuccaugc

SEQ ID NO: 373252 - RNA, 32 nt, Human
cccucugccuacccacgugccugcuuaccugc

SEQ ID NO: 373253 - RNA, 32 nt, Human
cccucugccuccaggcuuucccagcgagagug

SEQ ID NO: 373254 - RNA, 32 nt, Human
cccucugccucuuggguucaagcgauucuccu

SEQ ID NO: 373255 - RNA, 32 nt, Human
cccucugccugaccaacauggugaaaccccgu

SEQ ID NO: 373256 - RNA, 32 nt, Human
cccucugccugccugccugccugcuguccugg

SEQ ID NO: 373257 - RNA, 32 nt, Human
cccucugccugggacgccgucgugcccucucu

SEQ ID NO: 373258 - RNA, 32 nt, Human
cccucugccugggaugcccuucccccuuucuc

SEQ ID NO: 373259 - RNA, 20 nt, Human
cccucugccugucccucuca

SEQ ID NO: 373260 - RNA, 32 nt, Human
cccucugccuuccuccccaauccugacuggcu

SEQ ID NO: 373261 - RNA, 32 nt, Human
cccucugcguaggaauaaccauaauuaucuua

SEQ ID NO: 373262 - RNA, 21 nt, Human
cccucugcuaccagccccagu

SEQ ID NO: 373263 - RNA, 32 nt, Human
cccucugcuacugcugcugaucugaauaugga

SEQ ID NO: 373264 - RNA, 32 nt, Human
cccucugcucagccaagcuuguuaucagcuuu

SEQ ID NO: 373265 - RNA, 32 nt, Human
cccucugcucauuccuacccagguagugggac

SEQ ID NO: 373266 - RNA, 32 nt, Human
cccucugcuccaccccuccugugugucagagc

SEQ ID NO: 373267 - RNA, 32 nt, Human
cccucugcucccaagaucccagccaggaaggc

SEQ ID NO: 373268 - RNA, 23 nt, Human
cccucugcucccaaguacacucu

SEQ ID NO: 373269 - RNA, 24 nt, Human
cccucugcuccccuguggcucucu

SEQ ID NO: 373270 - RNA, 21 nt, Human
cccucugcucccuagagcucu

SEQ ID NO: 373271 - RNA, 32 nt, Human
cccucugcuccuccuucuccuguccuggccca

SEQ ID NO: 373272 - RNA, 32 nt, Human
cccucugcuccuggccuugggcaagggcacuc

SEQ ID NO: 373273 - RNA, 32 nt, Human
cccucugcuccuuggccugccugcccgccagc

SEQ ID NO: 373274 - RNA, 21 nt, Human
cccucugcucuuuguauuucu

SEQ ID NO: 373275 - RNA, 17 nt, Human
cccucugcugagauaaa

SEQ ID NO: 373276 - RNA, 32 nt, Human
cccucugcugcugccuuggcuuccuccuaaug

SEQ ID NO: 373277 - RNA, 32 nt, Human
cccucugcuuuaacucuccucccauauagaag

SEQ ID NO: 373278 - RNA, 26 nt, Human
cccucuggaacccuggcccaauuccu

SEQ ID NO: 373279 - RNA, 32 nt, Human
cccucuggacacacccuccuagcauccucuag

SEQ ID NO: 373280 - RNA, 32 nt, Human
cccucuggacaggacaugcugggcaggggaca

SEQ ID NO: 373281 - RNA, 32 nt, Human
cccucuggacuagaguagaaaugcaggggaaa

SEQ ID NO: 373282 - RNA, 32 nt, Human
cccucuggagcacggagcuccuuccccaaaga

SEQ ID NO: 373283 - RNA, 22 nt, Human
cccucuggaggaccacagcuca

SEQ ID NO: 373284 - RNA, 21 nt, Human
cccucuggcccccacugccca

SEQ ID NO: 373285 - RNA, 32 nt, Human
cccucugggaaccuggacuccuccaagcaucg

SEQ ID NO: 373286 - RNA, 32 nt, Human
cccucugggagggagagaagaguaagcuggag

SEQ ID NO: 373287 - RNA, 32 nt, Human
cccucugggcagggccaacgggaggcucuuug

SEQ ID NO: 373288 - RNA, 25 nt, Human
cccucugggcccgccucuggagcca

SEQ ID NO: 373289 - RNA, 32 nt, Human
cccucugggcuucaguuuccccacuggcacag

SEQ ID NO: 373290 - RNA, 32 nt, Human
cccucugguagccacagacaugcuguguuuac

SEQ ID NO: 373291 - RNA, 32 nt, Human
cccucuggucagacugcugccuggguuagaau

SEQ ID NO: 373292 - RNA, 32 nt, Human
cccucuggucccugucccucuggugguugggg

SEQ ID NO: 373293 - RNA, 23 nt, Human
cccucuggucuccauucucuuca

SEQ ID NO: 373294 - RNA, 32 nt, Human
cccucuggugagccaucuccagccacagccag

SEQ ID NO: 373295 - RNA, 32 nt, Human
cccucugguggccucugggccugcugcaugua

SEQ ID NO: 373296 - RNA, 32 nt, Human
cccucugguucacaccgcacccugcacucacc

SEQ ID NO: 373297 - RNA, 32 nt, Human
cccucuguaauacagauucugcagcccugccc

SEQ ID NO: 373298 - RNA, 32 nt, Human
cccucuguacagauaaucaaaauucaaaguug

SEQ ID NO: 373299 - RNA, 32 nt, Human
cccucuguaccauccccuccccuccgcaccac

SEQ ID NO: 373300 - RNA, 32 nt, Human
cccucuguauacuuccuccuccuucacgugca

SEQ ID NO: 373301 - RNA, 32 nt, Human
cccucugucaaccaggcuggagugcagugacu

SEQ ID NO: 373302 - RNA, 32 nt, Human
cccucugucaccaaggcuggagugcauuggug

SEQ ID NO: 373303 - RNA, 32 nt, Human
cccucugucaccaggcuggagugcaguggugc

SEQ ID NO: 373304 - RNA, 32 nt, Human
cccucugucacccaggcuggagugcaguggug

SEQ ID NO: 373305 - RNA, 32 nt, Human
cccucugucaccuaggcuggagugcaguggca

SEQ ID NO: 373306 - RNA, 31 nt, Human
cccucugucagcuagacaugccauaagcaag

SEQ ID NO: 373307 - RNA, 32 nt, Human
cccucugucauccaggcuggagugcaguggug

SEQ ID NO: 373308 - RNA, 32 nt, Human
cccucugucauccucaggaaccaacaauucgu

SEQ ID NO: 373309 - RNA, 32 nt, Human
cccucugucaugccucuuuaaagagaaaagaa

SEQ ID NO: 373310 - RNA, 32 nt, Human
cccucuguccaugucccugccucaguuuaccu

SEQ ID NO: 373311 - RNA, 19 nt, Human
cccucuguccccacaacca

SEQ ID NO: 373312 - RNA, 32 nt, Human
cccucugucccccaggcuggagugcaguggug

SEQ ID NO: 373313 - RNA, 32 nt, Human
cccucuguccuagcucaggucugggugccauu

SEQ ID NO: 373314 - RNA, 22 nt, Human
cccucuguccucaaauuuuucu

SEQ ID NO: 373315 - RNA, 19 nt, Human
cccucuguccuccucccuc

SEQ ID NO: 373316 - RNA, 32 nt, Human
cccucuguccuccucccuccccucugcccucu

SEQ ID NO: 373317 - RNA, 32 nt, Human
cccucuguccuccuuggcuuggcuuugcugcu

SEQ ID NO: 373318 - RNA, 32 nt, Human
cccucugucgccaaaguuggagugcaguggcg

SEQ ID NO: 373319 - RNA, 32 nt, Human
cccucugucgcccaggcuagagugcaauggcg

SEQ ID NO: 373320 - RNA, 32 nt, Human
cccucugucguccaggcuggagugcaguggca

SEQ ID NO: 373321 - RNA, 32 nt, Human
cccucugucguccugggauggcugucgggagc

SEQ ID NO: 373322 - RNA, 32 nt, Human
cccucugucugccuugugaagguggcaggggc

SEQ ID NO: 373323 - RNA, 32 nt, Human
cccucugucuguccuucugaggacgcaacaag

SEQ ID NO: 373324 - RNA, 23 nt, Human
cccucugucuucaggcucugccc

SEQ ID NO: 373325 - RNA, 32 nt, Human
cccucugucuucuguuaaguacaguugauacu

SEQ ID NO: 373326 - RNA, 32 nt, Human
cccucugugaagccaggccggccgggccgagc

SEQ ID NO: 373327 - RNA, 32 nt, Human
cccucugugaaggcucagcagaggugggaucc

SEQ ID NO: 373328 - RNA, 32 nt, Human
cccucugugagagaaggagcaggcagagagga

SEQ ID NO: 373329 - RNA, 32 nt, Human
cccucugugccaggccagagugcaguggugca

SEQ ID NO: 373330 - RNA, 32 nt, Human
cccucugugccgccgccgccuccugugggaga

SEQ ID NO: 373331 - RNA, 32 nt, Human
cccucugugccuccugcuuccuuucucucucc

SEQ ID NO: 373332 - RNA, 32 nt, Human
cccucuguguguccuuccucauggccugcagg

SEQ ID NO: 373333 - RNA, 20 nt, Human
cccucuguucccagccccag

SEQ ID NO: 373334 - RNA, 32 nt, Human
cccucuguucccgaaggggcggccgucuuucu

SEQ ID NO: 373335 - RNA, 32 nt, Human
cccucuguucuccccuccuaucuuuccaugac

SEQ ID NO: 373336 - RNA, 32 nt, Human
cccucuguucucuccuccucuuccccuccccu

SEQ ID NO: 373337 - RNA, 32 nt, Human
cccucuguucucucuucagcuccacccgccac

SEQ ID NO: 373338 - RNA, 32 nt, Human
cccucuguucuucccucccugcccugguuuuu

SEQ ID NO: 373339 - RNA, 32 nt, Human
cccucuguucuucucuuccuccuucagcacug

SEQ ID NO: 373340 - RNA, 32 nt, Human
cccucuguugccaggcuagagugcaguggcau

SEQ ID NO: 373341 - RNA, 32 nt, Human
cccucuguugcccaggcuggagugcagaggug

SEQ ID NO: 373342 - RNA, 32 nt, Human
cccucuguugcccaggcuggagugcaguggug

SEQ ID NO: 373343 - RNA, 32 nt, Human
cccucuguugggggauggggaggagagcaguc

SEQ ID NO: 373344 - RNA, 32 nt, Human
cccucuguuggggguuugggguccgggucucc

SEQ ID NO: 373345 - RNA, 21 nt, Human
cccucuguuguccccuccuca

SEQ ID NO: 373346 - RNA, 32 nt, Human
cccucuuaaugccuuugcuagugcaguguauu

SEQ ID NO: 373347 - RNA, 32 nt, Human
cccucuuagaaaaaccaccaccaucaccagac

SEQ ID NO: 373348 - RNA, 31 nt, Human
cccucuuagcacaggucuaggagggaaaaau

SEQ ID NO: 373349 - RNA, 32 nt, Human
cccucuucacucccccuaaaccccugucccau

SEQ ID NO: 373350 - RNA, 32 nt, Human
cccucuucauuucuggccuaucuuuuaacauc

SEQ ID NO: 373351 - RNA, 32 nt, Human
cccucuuccagaggaggagcagggaucugggu

SEQ ID NO: 373352 - RNA, 32 nt, Human
cccucuucccaauacuuuuugucauuuagaga

SEQ ID NO: 373353 - RNA, 32 nt, Human
cccucuucccaucccuucccccacccaaagca

SEQ ID NO: 373354 - RNA, 32 nt, Human
cccucuucccccgccccgcccugggccaggug

SEQ ID NO: 373355 - RNA, 32 nt, Human
cccucuuccccuaccccuguccuuccucaguu

SEQ ID NO: 373356 - RNA, 32 nt, Human
cccucuucccugcaaaccauguuugccaaagg

SEQ ID NO: 373357 - RNA, 32 nt, Human
cccucuucccugccagucucccccucuucugc

SEQ ID NO: 373358 - RNA, 32 nt, Human
cccucuuccucucugcugaggcagcugccucc

SEQ ID NO: 373359 - RNA, 32 nt, Human
cccucuuccucuucccaccuucauacagcuuc

SEQ ID NO: 373360 - RNA, 32 nt, Human
cccucuuccucuuuaccuuuccugguccugau

SEQ ID NO: 373361 - RNA, 32 nt, Human
cccucuuccucuuucuuuccguuuccaaagga

SEQ ID NO: 373362 - RNA, 32 nt, Human
cccucuuccuucuuccuucugugacuuaacuu

SEQ ID NO: 373363 - RNA, 32 nt, Human
cccucuuccuugggaccugccacucccugggu

SEQ ID NO: 373364 - RNA, 32 nt, Human
cccucuuccuuuggcggaccuuggaauccacc

SEQ ID NO: 373365 - RNA, 32 nt, Human
cccucuucucaaucuuccuucuccccuggaaa

SEQ ID NO: 373366 - RNA, 32 nt, Human
cccucuucuccccucccccuccucaccgucuu

SEQ ID NO: 373367 - RNA, 32 nt, Human
cccucuucuccucacugucuucuccccgcgcc

SEQ ID NO: 373368 - RNA, 32 nt, Human
cccucuucuccuccguuuucuucucuuccugc

SEQ ID NO: 373369 - RNA, 32 nt, Human
cccucuucucucgccgccuccuggccuccgca

SEQ ID NO: 373370 - RNA, 32 nt, Human
cccucuucugcaggaagucccugagcugagac

SEQ ID NO: 373371 - RNA, 32 nt, Human
cccucuucugccucugccgguuguggaacaaa

SEQ ID NO: 373372 - RNA, 32 nt, Human
cccucuucugcuguccuugaggacagacacca

SEQ ID NO: 373373 - RNA, 32 nt, Human
cccucuucugguccuggcucagggggcuggga

SEQ ID NO: 373374 - RNA, 32 nt, Human
cccucuucuguaccucuccugagugccaacug

SEQ ID NO: 373375 - RNA, 32 nt, Human
cccucuucuucccucaagcagaaaguuucucc

SEQ ID NO: 373376 - RNA, 32 nt, Human
cccucuucuucuccuccauccuuuauucagag

SEQ ID NO: 373377 - RNA, 32 nt, Human
cccucuucuucuuugccuucucuuguccucuu

SEQ ID NO: 373378 - RNA, 32 nt, Human
cccucuucuuucucuuucuuuucccuuugggc

SEQ ID NO: 373379 - RNA, 32 nt, Human
cccucuucuuuuucuuggaacuccucaacacg

SEQ ID NO: 373380 - RNA, 32 nt, Human
cccucuugcacaaaccagccuaaggcagacac

SEQ ID NO: 373381 - RNA, 32 nt, Human
cccucuugcccugccucuuucucuccaccccu

SEQ ID NO: 373382 - RNA, 26 nt, Human
cccucuugggugcacgaccuguacag

SEQ ID NO: 373383 - RNA, 32 nt, Human
cccucuuguauuuccccucugguuguuccuaa

SEQ ID NO: 373384 - RNA, 32 nt, Human
cccucuugucucugcugacuucagccugguca

SEQ ID NO: 373385 - RNA, 32 nt, Human
cccucuuguggcuccaguuauuuggaaacuau

SEQ ID NO: 373386 - RNA, 32 nt, Human
cccucuuguuuccaaugagcagcuuauagguu

SEQ ID NO: 373387 - RNA, 32 nt, Human
cccucuuuaaugcugucuuuguggacuguggg

SEQ ID NO: 373388 - RNA, 32 nt, Human
cccucuuucccugucgccugcagccacccgcc

SEQ ID NO: 373389 - RNA, 32 nt, Human
cccucuuucccuucugagauucuuuccuugug

SEQ ID NO: 373390 - RNA, 32 nt, Human
cccucuuucccuuucucuuuccuuucuuuccu

SEQ ID NO: 373391 - RNA, 32 nt, Human
cccucuuuccuuccuuccuccuggucuguucc

SEQ ID NO: 373392 - RNA, 32 nt, Human
cccucuuucucccaugcugcacuuacuccuuu

SEQ ID NO: 373393 - RNA, 32 nt, Human
cccucuuucuucuuuaggauucccaaguaacu

SEQ ID NO: 373394 - RNA, 18 nt, Human
cccucuuuggggcucuuu

SEQ ID NO: 373395 - RNA, 32 nt, Human
cccucuuuugugaagaaagcggguccagaugu

SEQ ID NO: 373396 - RNA, 32 nt, Human
cccugaaaaaccagaaaguaccuuuuacuguu

SEQ ID NO: 373397 - RNA, 32 nt, Human
cccugaaaacacaaaaggacaguucuguguug

SEQ ID NO: 373398 - RNA, 32 nt, Human
cccugaaaacaccuggccucaauguuggcuug

SEQ ID NO: 373399 - RNA, 19 nt, Human
cccugaaaacccagagagg

SEQ ID NO: 373400 - RNA, 23 nt, Human
cccugaaaaucccacuuccugcc

SEQ ID NO: 373401 - RNA, 32 nt, Human
cccugaaacagccacagccaagguaggcaugc

SEQ ID NO: 373402 - RNA, 18 nt, Human
cccugaaaccccacccuc

SEQ ID NO: 373403 - RNA, 32 nt, Human
cccugaaacuucucccaacagccccagggcca

SEQ ID NO: 373404 - RNA, 32 nt, Human
cccugaaagcaguucuuccugccucugagccu

SEQ ID NO: 373405 - RNA, 32 nt, Human
cccugaaagcccugagcuuucugcuaucaaag

SEQ ID NO: 373406 - RNA, 32 nt, Human
cccugaaagccuucaccugaugccucugcagc

SEQ ID NO: 373407 - RNA, 24 nt, Human
cccugaaagucgagguugcaguga

SEQ ID NO: 373408 - RNA, 32 nt, Human
cccugaaagugauucaugcuucuggcuggcau

SEQ ID NO: 373409 - RNA, 32 nt, Human
cccugaacaccaaauaccgagacagcugauga

SEQ ID NO: 373410 - RNA, 32 nt, Human
cccugaacaccuugggggccaccaacaaggga

SEQ ID NO: 373411 - RNA, 32 nt, Human
cccugaacagaggagguggcggugguggcccu

SEQ ID NO: 373412 - RNA, 32 nt, Human
cccugaacauuucaugguguucaucaacagug

SEQ ID NO: 373413 - RNA, 32 nt, Human
cccugaaccaguagcugggacuauccccaggg

SEQ ID NO: 373414 - RNA, 26 nt, Human
cccugaaccauuucaaucuucugccu

SEQ ID NO: 373415 - RNA, 32 nt, Human
cccugaacccacugcugcccugggcagugagu

SEQ ID NO: 373416 - RNA, 20 nt, Human
cccugaaccccuggcuucca

SEQ ID NO: 373417 - RNA, 32 nt, Human
cccugaacucaagugauccucccgccucagcc

SEQ ID NO: 373418 - RNA, 32 nt, Human
cccugaacuccgaucucucccaccccaccccu

SEQ ID NO: 373419 - RNA, 32 nt, Human
cccugaacucucgcuuucuuuuuaauccccug

SEQ ID NO: 373420 - RNA, 21 nt, Human
cccugaacugauaaagccuca

SEQ ID NO: 373421 - RNA, 23 nt, Human
cccugaacugauguaaaucuuca

SEQ ID NO: 373422 - RNA, 32 nt, Human
cccugaacugcuuuucugccucuguggaaaac

SEQ ID NO: 373423 - RNA, 24 nt, Human
cccugaagccaucgcuggccccca

SEQ ID NO: 373424 - RNA, 32 nt, Human
cccugaagcgucaggcugggggcagucuggua

SEQ ID NO: 373425 - RNA, 32 nt, Human
cccugaagcucaguuauagugcacugaugaac

SEQ ID NO: 373426 - RNA, 32 nt, Human
cccugaagcuggucuacaucucagucucugag

SEQ ID NO: 373427 - RNA, 32 nt, Human
cccugaaggagagaagggaagugaaaaguaga

SEQ ID NO: 373428 - RNA, 32 nt, Human
cccugaaggcagaggccagcugcugcaagaca

SEQ ID NO: 373429 - RNA, 32 nt, Human
cccugaaggcuaccuggcgccuugggggcugu

SEQ ID NO: 373430 - RNA, 32 nt, Human
cccugaauacacccucucuucaucagcccaag

SEQ ID NO: 373431 - RNA, 32 nt, Human
cccugaaucucugcauaugagcauuuuucugg

SEQ ID NO: 373432 - RNA, 32 nt, Human
cccugaaugauacaguuuuguuugaaagacug

SEQ ID NO: 373433 - RNA, 32 nt, Human
cccugaaugcagaagcagagccacugugaagu

SEQ ID NO: 373434 - RNA, 32 nt, Human
cccugaaugccuuuggaggccaguaagcacac

SEQ ID NO: 373435 - RNA, 31 nt, Human
cccugaauggcuggucuccagcgguuggcgu

SEQ ID NO: 373436 - RNA, 32 nt, Human
cccugacaacagugcuuguagcuuugaugugg

SEQ ID NO: 373437 - RNA, 32 nt, Human
cccugacaacccauccacacacggccaggccu

SEQ ID NO: 373438 - RNA, 31 nt, Human
cccugacaaguguccaugaugcugggcccug

SEQ ID NO: 373439 - RNA, 32 nt, Human
cccugacacaguuacauagucacugagagugg

SEQ ID NO: 373440 - RNA, 32 nt, Human
cccugacaccucugcacucccuugggcagaga

SEQ ID NO: 373441 - RNA, 32 nt, Human
cccugacacugcacgugggcguaguggggagc

SEQ ID NO: 373442 - RNA, 32 nt, Human
cccugacacugcacugagcacuuuaugagcuu

SEQ ID NO: 373443 - RNA, 32 nt, Human
cccugacagcacgcuccagcccucugggaacu

SEQ ID NO: 373444 - RNA, 32 nt, Human
cccugacagcucagcauguugucacacuucag

SEQ ID NO: 373445 - RNA, 32 nt, Human
cccugacaucccaaaaccaucuucccacaugu

SEQ ID NO: 373446 - RNA, 22 nt, Human
cccugacaucccuuccaggcaa

SEQ ID NO: 373447 - RNA, 21 nt, Human
cccugacauccuguaaucuaa

SEQ ID NO: 373448 - RNA, 32 nt, Human
cccugacauuucucuccaccuccagaggcuug

SEQ ID NO: 373449 - RNA, 32 nt, Human
cccugaccaacaugaaaccccgucucuacuaa

SEQ ID NO: 373450 - RNA, 18 nt, Human
cccugaccaccacugugc

SEQ ID NO: 373451 - RNA, 22 nt, Human
cccugaccaccgcugccggagc

SEQ ID NO: 373452 - RNA, 16 nt, Human
cccugaccagggacca

SEQ ID NO: 373453 - RNA, 32 nt, Human
cccugaccaguauucauuauuucagauaauuc

SEQ ID NO: 373454 - RNA, 32 nt, Human
cccugaccauccagaauaaucucccaucucaa

SEQ ID NO: 373455 - RNA, 32 nt, Human
cccugaccaugaccugagguugguggacuuuc

SEQ ID NO: 373456 - RNA, 22 nt, Human
cccugacccagagccuagggga

SEQ ID NO: 373457 - RNA, 32 nt, Human
cccugacccagaggaagccucuauuuauuuau

SEQ ID NO: 373458 - RNA, 32 nt, Human
cccugacccaggaggcuggaagugucccccuu

SEQ ID NO: 373459 - RNA, 32 nt, Human
cccugacccaguuucaaacagagccaucuuuu

SEQ ID NO: 373460 - RNA, 19 nt, Human
cccugaccccacggcugcc

SEQ ID NO: 373461 - RNA, 32 nt, Human
cccugacccccuugauccccaaagaagcugcg

SEQ ID NO: 373462 - RNA, 32 nt, Human
cccugacccugcaggcuagggguuagggugac

SEQ ID NO: 373463 - RNA, 32 nt, Human
cccugacccugccuucugccaugaacccaggc

SEQ ID NO: 373464 - RNA, 32 nt, Human
cccugacccugggcugcuuccugggggcucuc

SEQ ID NO: 373465 - RNA, 19 nt, Human
cccugacccugucccuccu

SEQ ID NO: 373466 - RNA, 32 nt, Human
cccugaccgcccuguggggcucagccaguccu

SEQ ID NO: 373467 - RNA, 32 nt, Human
cccugaccuaucuccugcagucagcccugugg

SEQ ID NO: 373468 - RNA, 32 nt, Human
cccugaccucaagugauccacccaccucggcc

SEQ ID NO: 373469 - RNA, 32 nt, Human
cccugaccucaagugauccacccaccucugcc

SEQ ID NO: 373470 - RNA, 32 nt, Human
cccugaccucacugccugccuccucuacccca

SEQ ID NO: 373471 - RNA, 32 nt, Human
cccugaccucagccuccuccccaaaccccgcu

SEQ ID NO: 373472 - RNA, 22 nt, Human
cccugaccucagcuuccugccu

SEQ ID NO: 373473 - RNA, 22 nt, Human
cccugaccucaucaccugugca

SEQ ID NO: 373474 - RNA, 32 nt, Human
cccugaccuccaccaccuccaccaccaccacc

SEQ ID NO: 373475 - RNA, 32 nt, Human
cccugaccuccauccuggacacugccuugaua

SEQ ID NO: 373476 - RNA, 32 nt, Human
cccugaccuccccucccaauucuuucucugcc

SEQ ID NO: 373477 - RNA, 32 nt, Human
cccugaccucuccuuuucacucaggcccuguc

SEQ ID NO: 373478 - RNA, 32 nt, Human
cccugaccucucucuccacauuacccuuacaa

SEQ ID NO: 373479 - RNA, 32 nt, Human
cccugaccuuguccuacuucacugccuuuguc

SEQ ID NO: 373480 - RNA, 32 nt, Human
cccugaccuuucuccuguccuuuucuuggcug

SEQ ID NO: 373481 - RNA, 32 nt, Human
cccugacgaauagaggccugcgcagagugccc

SEQ ID NO: 373482 - RNA, 32 nt, Human
cccugacgacaucagugauacccaaagcugag

SEQ ID NO: 373483 - RNA, 32 nt, Human
cccugacgaccuagagagaucccggcucccag

SEQ ID NO: 373484 - RNA, 32 nt, Human
cccugacgagggaagcugcagcuuucugauga

SEQ ID NO: 373485 - RNA, 18 nt, Human
cccugacgguuuuucuug

SEQ ID NO: 373486 - RNA, 21 nt, Human
cccugacgguuuuucuugccu

SEQ ID NO: 373487 - RNA, 32 nt, Human
cccugacgucgcuacgauuccacacgacagcc

SEQ ID NO: 373488 - RNA, 32 nt, Human
cccugacucaacucucacccuaacccugaugc

SEQ ID NO: 373489 - RNA, 32 nt, Human
cccugacucaauacaaauaaaaaccaaaucua

SEQ ID NO: 373490 - RNA, 32 nt, Human
cccugacucagagggaacccaggcuggaugcu

SEQ ID NO: 373491 - RNA, 32 nt, Human
cccugacuccagccacaaagcucauacccagc

SEQ ID NO: 373492 - RNA, 32 nt, Human
cccugacucccagggccccguaguuagcaauu

SEQ ID NO: 373493 - RNA, 32 nt, Human
cccugacucccucugcuguccuccccucucac

SEQ ID NO: 373494 - RNA, 32 nt, Human
cccugacucccucugcuguccuccccucucag

SEQ ID NO: 373495 - RNA, 20 nt, Human
cccugacuccgucccggcca

SEQ ID NO: 373496 - RNA, 26 nt, Human
cccugacuccgucccggccagggagg

SEQ ID NO: 373497 - RNA, 18 nt, Human
cccugacucggggacuug

SEQ ID NO: 373498 - RNA, 32 nt, Human
cccugacucugccugaggccagccugcccgaa

SEQ ID NO: 373499 - RNA, 32 nt, Human
cccugacucuggaaguggaauauugagugaua

SEQ ID NO: 373500 - RNA, 32 nt, Human
cccugacugaauguguucugucacucagcuuu

SEQ ID NO: 373501 - RNA, 32 nt, Human
cccugacugcaggaggcacagggacuccggga

SEQ ID NO: 373502 - RNA, 32 nt, Human
cccugacuggugcuucaguaaacccacgaaua

SEQ ID NO: 373503 - RNA, 31 nt, Human
cccugacuucagagcccuugccugagggccu

SEQ ID NO: 373504 - RNA, 32 nt, Human
cccugacuucauccucccuucucuguccacac

SEQ ID NO: 373505 - RNA, 18 nt, Human
cccugacuuugggaucug

SEQ ID NO: 373506 - RNA, 32 nt, Human
cccugacuuuuacuccccuuguagauaaacug

SEQ ID NO: 373507 - RNA, 23 nt, Human
cccugagaaagaugcccagaaca

SEQ ID NO: 373508 - RNA, 32 nt, Human
cccugagaaagccacuucuggugguugccagc

SEQ ID NO: 373509 - RNA, 32 nt, Human
cccugagaaugagauagauagcuaagaaauca

SEQ ID NO: 373510 - RNA, 17 nt, Human
cccugagaauucaguga

SEQ ID NO: 373511 - RNA, 32 nt, Human
cccugagaccacacuguugccucccagugacc

SEQ ID NO: 373512 - RNA, 32 nt, Human
cccugagaccuggccucaaagggcugacccag

SEQ ID NO: 373513 - RNA, 32 nt, Human
cccugagacgcugugugcccuuuuucagcuuc

SEQ ID NO: 373514 - RNA, 32 nt, Human
cccugagagcggacaucuccucccgcaggccu

SEQ ID NO: 373515 - RNA, 19 nt, Human
cccugagaggugcagcccu

SEQ ID NO: 373516 - RNA, 32 nt, Human
cccugagaucuuccccacccccaaucaugaug

SEQ ID NO: 373517 - RNA, 32 nt, Human
cccugagaucuuccccaucucaguuuuccuuc

SEQ ID NO: 373518 - RNA, 32 nt, Human
cccugagaugccaccaggaccugaugggccag

SEQ ID NO: 373519 - RNA, 32 nt, Human
cccugagaugggcgucagggagaggggacgcc

SEQ ID NO: 373520 - RNA, 31 nt, Human
cccugagcaaugucugugcuagggaaacucc

SEQ ID NO: 373521 - RNA, 32 nt, Human
cccugagcacagaggagcuuggcugccuggga

SEQ ID NO: 373522 - RNA, 32 nt, Human
cccugagcacuggccuuggaggugaccacaga

SEQ ID NO: 373523 - RNA, 21 nt, Human
cccugagcacuugaaggugca

SEQ ID NO: 373524 - RNA, 32 nt, Human
cccugagcagaauacuggucucaggccaagcc

SEQ ID NO: 373525 - RNA, 32 nt, Human
cccugagcagaggccguagcuugcgccgcacc

SEQ ID NO: 373526 - RNA, 19 nt, Human
cccugagcagcagugggug

SEQ ID NO: 373527 - RNA, 21 nt, Human
cccugagcagcagugggugua

SEQ ID NO: 373528 - RNA, 25 nt, Human
cccugagcagcugggacuacaggca

SEQ ID NO: 373529 - RNA, 32 nt, Human
cccugagcagguaacccagggaagagaaggaa

SEQ ID NO: 373530 - RNA, 32 nt, Human
cccugagcaugcagagagagcagcuuuuaaau

SEQ ID NO: 373531 - RNA, 32 nt, Human
cccugagcauggcaagggggucugucucugcc

SEQ ID NO: 373532 - RNA, 32 nt, Human
cccugagccauggaggcgccuuugcagacaga

SEQ ID NO: 373533 - RNA, 32 nt, Human
cccugagcccaggaguccaagggcaggguggg

SEQ ID NO: 373534 - RNA, 21 nt, Human
cccugagccccacuucugccu

SEQ ID NO: 373535 - RNA, 32 nt, Human
cccugagcccucagguccccagcuccuugagg

SEQ ID NO: 373536 - RNA, 32 nt, Human
cccugagccugagucauuucuaugugaaguca

SEQ ID NO: 373537 - RNA, 22 nt, Human
cccugagccugcccacuccuca

SEQ ID NO: 373538 - RNA, 32 nt, Human
cccugagccuggcuguugugugguauuuaugc

SEQ ID NO: 373539 - RNA, 32 nt, Human
cccugagccuguggcugcccucuccccagccu

SEQ ID NO: 373540 - RNA, 31 nt, Human
cccugagcgcaucuccuuacauucuugucuc

SEQ ID NO: 373541 - RNA, 32 nt, Human
cccugagcuacugcuucuaacaccucuuuucc

SEQ ID NO: 373542 - RNA, 32 nt, Human
cccugagcucccuagagucggccaccacagau

SEQ ID NO: 373543 - RNA, 32 nt, Human
cccugagcugacagauacacugcgcagcugga

SEQ ID NO: 373544 - RNA, 20 nt, Human
cccugagcugccuccugcuu

SEQ ID NO: 373545 - RNA, 32 nt, Human
cccugagcugccuccugcuucucccucaaagu

SEQ ID NO: 373546 - RNA, 32 nt, Human
cccugaggaaccaaucuaugccuuucuugcca

SEQ ID NO: 373547 - RNA, 32 nt, Human
cccugaggaaggaggggaagcugcagcuuggg

SEQ ID NO: 373548 - RNA, 32 nt, Human
cccugaggacccuaguccaacauggcggcgcc

SEQ ID NO: 373549 - RNA, 32 nt, Human
cccugaggacucagugugcauccuggaaggcu

SEQ ID NO: 373550 - RNA, 32 nt, Human
cccugaggagccggaccgauguggaaacugcu

SEQ ID NO: 373551 - RNA, 32 nt, Human
cccugaggaugaggacaagccccucggccagu

SEQ ID NO: 373552 - RNA, 32 nt, Human
cccugaggauucacggcaucaggcggacacug

SEQ ID NO: 373553 - RNA, 23 nt, Human
cccugaggcagagguugcaguga

SEQ ID NO: 373554 - RNA, 32 nt, Human
cccugaggccagaauugacucuuugggccuaa

SEQ ID NO: 373555 - RNA, 32 nt, Human
cccugaggccagaggucaguacccuuugguau

SEQ ID NO: 373556 - RNA, 21 nt, Human
cccugaggccccaggcagcug

SEQ ID NO: 373557 - RNA, 21 nt, Human
cccugaggcccucggcugcug

SEQ ID NO: 373558 - RNA, 32 nt, Human
cccugaggccuagggagcccaagccuggccug

SEQ ID NO: 373559 - RNA, 32 nt, Human
cccugaggccugacacggcagaucagccccau

SEQ ID NO: 373560 - RNA, 32 nt, Human
cccugaggccuguggcugaccucugccccagc

SEQ ID NO: 373561 - RNA, 32 nt, Human
cccugaggccuucugcaguguuugugucccug

SEQ ID NO: 373562 - RNA, 32 nt, Human
cccugaggcggaggaggagcugggacgaacaa

SEQ ID NO: 373563 - RNA, 22 nt, Human
cccugaggcucuauuucugucu

SEQ ID NO: 373564 - RNA, 32 nt, Human
cccugaggcugcagaguugggagcaggacacc

SEQ ID NO: 373565 - RNA, 32 nt, Human
cccugaggcugcugaggucguuaaauuguugu

SEQ ID NO: 373566 - RNA, 24 nt, Human
cccugaggcuuuucuucuccugcc

SEQ ID NO: 373567 - RNA, 32 nt, Human
cccugagggcccagagagguggccaguccugu

SEQ ID NO: 373568 - RNA, 32 nt, Human
cccugagggcccugcaugcuugugccuggggu

SEQ ID NO: 373569 - RNA, 32 nt, Human
cccugagggccugccgggcugccuuugcccca

SEQ ID NO: 373570 - RNA, 32 nt, Human
cccugagggcuggagaggcaggggagcagggu

SEQ ID NO: 373571 - RNA, 32 nt, Human
cccugaggguccugagacuuggaauauggaag

SEQ ID NO: 373572 - RNA, 32 nt, Human
cccugaggguugccugaaauuccuucaugcuu

SEQ ID NO: 373573 - RNA, 32 nt, Human
cccugagguauuugcaaccaccauggcugggu

SEQ ID NO: 373574 - RNA, 22 nt, Human
cccugaggucaccccguggucc

SEQ ID NO: 373575 - RNA, 32 nt, Human
cccugagguccugcauuucucagucggugugu

SEQ ID NO: 373576 - RNA, 32 nt, Human
cccugagguggcucagcaccugcccaggguag

SEQ ID NO: 373577 - RNA, 23 nt, Human
cccugagguuuccaugccucucc

SEQ ID NO: 373578 - RNA, 23 nt, Human
cccugaguagcugggauuacagg

SEQ ID NO: 373579 - RNA, 25 nt, Human
cccugaguagcugggauuacaggca

SEQ ID NO: 373580 - RNA, 32 nt, Human
cccugagucacagauuucugugggacugugga

SEQ ID NO: 373581 - RNA, 32 nt, Human
cccugagucuaagcaaaagcccauggguuggu

SEQ ID NO: 373582 - RNA, 25 nt, Human
cccugagucucagauguuucauuua

SEQ ID NO: 373583 - RNA, 32 nt, Human
cccugagucugccuagaugguugagccucaga

SEQ ID NO: 373584 - RNA, 32 nt, Human
cccugagugacggaaagaggucuggcggcuuc

SEQ ID NO: 373585 - RNA, 32 nt, Human
cccugagugccucccuugccucacucugaucc

SEQ ID NO: 373586 - RNA, 32 nt, Human
cccugagugcugggaggaggcugcaguacucc

SEQ ID NO: 373587 - RNA, 32 nt, Human
cccugaguguccagaucuggccaaggugucua

SEQ ID NO: 373588 - RNA, 32 nt, Human
cccugagugugaacagguuugccuacguuggu

SEQ ID NO: 373589 - RNA, 32 nt, Human
cccugaguucaagugauucaccucccuuggcc

SEQ ID NO: 373590 - RNA, 32 nt, Human
cccugauagcccagagguagggccagagacaa

SEQ ID NO: 373591 - RNA, 32 nt, Human
cccugauauagcagcacacauuuucacguuuc

SEQ ID NO: 373592 - RNA, 25 nt, Human
cccugaucagcacuaccacauccaa

SEQ ID NO: 373593 - RNA, 32 nt, Human
cccugauccaagcugcuugguguccuuguaag

SEQ ID NO: 373594 - RNA, 23 nt, Human
cccugaucccccaccccuugccu

SEQ ID NO: 373595 - RNA, 21 nt, Human
cccugaucccugggggacuca

SEQ ID NO: 373596 - RNA, 32 nt, Human
cccugaucuacauaucuaucucuuuuagaacu

SEQ ID NO: 373597 - RNA, 20 nt, Human
cccugaucucauggcugucu

SEQ ID NO: 373598 - RNA, 32 nt, Human
cccugaucucaugggacuuagguucuggugaa

SEQ ID NO: 373599 - RNA, 32 nt, Human
cccugaucuccaaguagccuaacugggaggca

SEQ ID NO: 373600 - RNA, 32 nt, Human
cccugaucucuagcuucucagccuccagaacu

SEQ ID NO: 373601 - RNA, 32 nt, Human
cccugaugacacccacccugugccaucaccau

SEQ ID NO: 373602 - RNA, 24 nt, Human
cccugaugacuugugggugcuccu

SEQ ID NO: 373603 - RNA, 32 nt, Human
cccugaugcauuuuccuugagagcagggguac

SEQ ID NO: 373604 - RNA, 18 nt, Human
cccugaugccagugguga

SEQ ID NO: 373605 - RNA, 32 nt, Human
cccugaugcccaggcugggugcaggcucucau

SEQ ID NO: 373606 - RNA, 32 nt, Human
cccugaugggagccaggccacagggaggaggc

SEQ ID NO: 373607 - RNA, 32 nt, Human
cccugaugggcccugacucuuccccauaauca

SEQ ID NO: 373608 - RNA, 32 nt, Human
cccugaugucagcugcuuugcacaaagguccu

SEQ ID NO: 373609 - RNA, 22 nt, Human
cccugauuccagcuuucugcuu

SEQ ID NO: 373610 - RNA, 32 nt, Human
cccugauucuaccaaaugcaaacacaucuggg

SEQ ID NO: 373611 - RNA, 31 nt, Human
cccugauucuucucugggcuggugccaguuu

SEQ ID NO: 373612 - RNA, 32 nt, Human
cccugcaaaucccucccacccugggccuugug

SEQ ID NO: 373613 - RNA, 32 nt, Human
cccugcaacacacgucgaagcugcugcagugg

SEQ ID NO: 373614 - RNA, 24 nt, Human
cccugcaacccacccucccagcca

SEQ ID NO: 373615 - RNA, 32 nt, Human
cccugcaacccccaucccccaccgggccuuug

SEQ ID NO: 373616 - RNA, 21 nt, Human
cccugcaagccagccuggcca

SEQ ID NO: 373617 - RNA, 22 nt, Human
cccugcaagcuacauccuacug

SEQ ID NO: 373618 - RNA, 32 nt, Human
cccugcaaggcugugggcuccgaccucaccgg

SEQ ID NO: 373619 - RNA, 32 nt, Human
cccugcaagggaggagccaggagcaagcauuc

SEQ ID NO: 373620 - RNA, 32 nt, Human
cccugcaaguugauucucauugccagauucca

SEQ ID NO: 373621 - RNA, 19 nt, Human
cccugcaaucuacucuuaa

SEQ ID NO: 373622 - RNA, 32 nt, Human
cccugcaauugggcagcuccccuggaagaagc

SEQ ID NO: 373623 - RNA, 32 nt, Human
cccugcacaaagccucagccuggugaaaacau

SEQ ID NO: 373624 - RNA, 32 nt, Human
cccugcacaacuaucucacuccugcuuggagc

SEQ ID NO: 373625 - RNA, 32 nt, Human
cccugcacaagacaacagaauccaucagggcc

SEQ ID NO: 373626 - RNA, 32 nt, Human
cccugcacaaucucccccuccagcuuccucgg

SEQ ID NO: 373627 - RNA, 32 nt, Human
cccugcacacagcucacuccucccucuggccc

SEQ ID NO: 373628 - RNA, 32 nt, Human
cccugcacauggcagcuuugucucuguugaga

SEQ ID NO: 373629 - RNA, 32 nt, Human
cccugcaccagcugagagagacuugccacaaa

SEQ ID NO: 373630 - RNA, 32 nt, Human
cccugcacccuauaugcugcugccucaggcag

SEQ ID NO: 373631 - RNA, 32 nt, Human
cccugcacccucuucccugccucugcuccuug

SEQ ID NO: 373632 - RNA, 23 nt, Human
cccugcacccuuccauuucucca

SEQ ID NO: 373633 - RNA, 32 nt, Human
cccugcacccuuguacagugucugugccaugg

SEQ ID NO: 373634 - RNA, 32 nt, Human
cccugcaccuccagccuccacccucgcauccc

SEQ ID NO: 373635 - RNA, 32 nt, Human
cccugcaccuccuauggcucaggaugagggag

SEQ ID NO: 373636 - RNA, 21 nt, Human
cccugcaccucuuugagccuu

SEQ ID NO: 373637 - RNA, 32 nt, Human
cccugcaccugccucaggcugagagcaggcgg

SEQ ID NO: 373638 - RNA, 18 nt, Human
cccugcaccugccugcca

SEQ ID NO: 373639 - RNA, 32 nt, Human
cccugcaccugccuugucccuggugcagaggu

SEQ ID NO: 373640 - RNA, 32 nt, Human
cccugcacucaggcuugugaaggccccgaguu

SEQ ID NO: 373641 - RNA, 32 nt, Human
cccugcacuccaggcugggcaacaguacgaga

SEQ ID NO: 373642 - RNA, 32 nt, Human
cccugcacuccccucuugcugcguguugauuu

SEQ ID NO: 373643 - RNA, 17 nt, Human
cccugcacucugccuca

SEQ ID NO: 373644 - RNA, 32 nt, Human
cccugcacuugagcucaggggcucaggguugu

SEQ ID NO: 373645 - RNA, 23 nt, Human
cccugcagacucacugcccaccg

SEQ ID NO: 373646 - RNA, 25 nt, Human
cccugcagaggcgcuccacucccag

SEQ ID NO: 373647 - RNA, 32 nt, Human
cccugcagaguggcuggauagagauauggagc

SEQ ID NO: 373648 - RNA, 32 nt, Human
cccugcagauccaggucuccaggccuugccca

SEQ ID NO: 373649 - RNA, 32 nt, Human
cccugcagcaugggugcugggcccuccuugcu

SEQ ID NO: 373650 - RNA, 22 nt, Human
cccugcagccacucucccgccu

SEQ ID NO: 373651 - RNA, 32 nt, Human
cccugcagccagagguuugcaguggguagugu

SEQ ID NO: 373652 - RNA, 22 nt, Human
cccugcagccccccacauccag

SEQ ID NO: 373653 - RNA, 22 nt, Human
cccugcagccccgccuucgccu

SEQ ID NO: 373654 - RNA, 32 nt, Human
cccugcagccucagcccugcagaagaggauuc

SEQ ID NO: 373655 - RNA, 32 nt, Human
cccugcagccucaguuuugaauucuuuuagca

SEQ ID NO: 373656 - RNA, 32 nt, Human
cccugcagccucccgugucccgucuccucccc

SEQ ID NO: 373657 - RNA, 32 nt, Human
cccugcagccuccugauggcuugaugguaucu

SEQ ID NO: 373658 - RNA, 32 nt, Human
cccugcagccugggucuggaugggaggagagc

SEQ ID NO: 373659 - RNA, 32 nt, Human
cccugcagccuuccgcaguguuugugucccug

SEQ ID NO: 373660 - RNA, 32 nt, Human
cccugcagccuuuguaggaagugccuagguga

SEQ ID NO: 373661 - RNA, 32 nt, Human
cccugcagcucacccauucauucacccaacuu

SEQ ID NO: 373662 - RNA, 32 nt, Human
cccugcagcucagcacccccagccuggugcuu

SEQ ID NO: 373663 - RNA, 32 nt, Human
cccugcagcucucuuuccucuggggcauuauc

SEQ ID NO: 373664 - RNA, 32 nt, Human
cccugcagcugccauccugccuggcaggcuag

SEQ ID NO: 373665 - RNA, 32 nt, Human
cccugcagcugugccaguugggccacagccuc

SEQ ID NO: 373666 - RNA, 32 nt, Human
cccugcaggaagcaucacccaggcuggcagau

SEQ ID NO: 373667 - RNA, 32 nt, Human
cccugcaggaauaggugggaagucauugaauu

SEQ ID NO: 373668 - RNA, 32 nt, Human
cccugcaggacaccuccuggcacaacaccacc

SEQ ID NO: 373669 - RNA, 32 nt, Human
cccugcaggagugaggcauggugacagcaguc

SEQ ID NO: 373670 - RNA, 32 nt, Human
cccugcaggcagcauuguggugacguagacca

SEQ ID NO: 373671 - RNA, 32 nt, Human
cccugcaggcagucagcaccagccucagcaac

SEQ ID NO: 373672 - RNA, 32 nt, Human
cccugcaggcgcugugugagcuggcccugccc

SEQ ID NO: 373673 - RNA, 32 nt, Human
cccugcaggcggaguuuucagaggaugcaauu

SEQ ID NO: 373674 - RNA, 32 nt, Human
cccugcaggcugaucagguggggaagcugagg

SEQ ID NO: 373675 - RNA, 32 nt, Human
cccugcagggagcagaguuuggccaggcggaa

SEQ ID NO: 373676 - RNA, 21 nt, Human
cccugcaggggaucuguggga

SEQ ID NO: 373677 - RNA, 25 nt, Human
cccugcaggucuuccuucuguggga

SEQ ID NO: 373678 - RNA, 32 nt, Human
cccugcaggugucugcuggcuuccugcucucc

SEQ ID NO: 373679 - RNA, 32 nt, Human
cccugcaguccucucaggcccggcuuucgggc

SEQ ID NO: 373680 - RNA, 32 nt, Human
cccugcaguccuuccuauagcagugcaccaug

SEQ ID NO: 373681 - RNA, 32 nt, Human
cccugcagugugaagggggacagguauaugag

SEQ ID NO: 373682 - RNA, 32 nt, Human
cccugcaguucccagucucuucuguccugcag

SEQ ID NO: 373683 - RNA, 18 nt, Human
cccugcaguucugccuca

SEQ ID NO: 373684 - RNA, 32 nt, Human
cccugcaguuuucaccaccagcaccaccagca

SEQ ID NO: 373685 - RNA, 32 nt, Human
cccugcauaagaaccacuaaucccaggcaagc

SEQ ID NO: 373686 - RNA, 32 nt, Human
cccugcaucccagucgcccugcagccucacac

SEQ ID NO: 373687 - RNA, 16 nt, Human
cccugcaucccuggcc

SEQ ID NO: 373688 - RNA, 27 nt, Human
cccugcauccuuuccgucucccugcuu

SEQ ID NO: 373689 - RNA, 32 nt, Human
cccugcaucuguggccagagcuggacagccac

SEQ ID NO: 373690 - RNA, 32 nt, Human
cccugcaucuuccucuccuuucccaaggcauc

SEQ ID NO: 373691 - RNA, 32 nt, Human
cccugcaugcccugaaccccuggguggguggc

SEQ ID NO: 373692 - RNA, 32 nt, Human
cccugcaugccuaguguggcaccuggcugugc

SEQ ID NO: 373693 - RNA, 32 nt, Human
cccugcaugcugcccagccacuccaggaggaa

SEQ ID NO: 373694 - RNA, 32 nt, Human
cccugcaugguggcucacgccuguaauccuag

SEQ ID NO: 373695 - RNA, 32 nt, Human
cccugcauguuggagacugagcugggugcacu

SEQ ID NO: 373696 - RNA, 32 nt, Human
cccugcauucugcucugcucuaauacacuacc

SEQ ID NO: 373697 - RNA, 22 nt, Human
cccugcauucuugccccuccuc

SEQ ID NO: 373698 - RNA, 32 nt, Human
cccugcauuucaaagcugcucuuucugguucu

SEQ ID NO: 373699 - RNA, 32 nt, Human
cccugccaaaaccucugcugugagcaauacaa

SEQ ID NO: 373700 - RNA, 32 nt, Human
cccugccaaagcugcagcaugcacagcacagg

SEQ ID NO: 373701 - RNA, 32 nt, Human
cccugccaacacugcggccugcagccuggacc

SEQ ID NO: 373702 - RNA, 32 nt, Human
cccugccaagucuguagacuucagagagcacu

SEQ ID NO: 373703 - RNA, 32 nt, Human
cccugccaaguuucugggcaccacagauugga

SEQ ID NO: 373704 - RNA, 32 nt, Human
cccugccacacccuggacaccugcacuagaga

SEQ ID NO: 373705 - RNA, 32 nt, Human
cccugccacagcccucccucggcacacuuuga

SEQ ID NO: 373706 - RNA, 32 nt, Human
cccugccacaggccuggcugagguggaaggag

SEQ ID NO: 373707 - RNA, 32 nt, Human
cccugccacaggcgcuggaguccucccauggc

SEQ ID NO: 373708 - RNA, 32 nt, Human
cccugccacauuucucucuucucccucacgcc

SEQ ID NO: 373709 - RNA, 32 nt, Human
cccugccaccauccuccuuccugggcuccagg

SEQ ID NO: 373710 - RNA, 32 nt, Human
cccugccacccacuguaaaaagguugaugaga

SEQ ID NO: 373711 - RNA, 22 nt, Human
cccugccaccccaccucuuccu

SEQ ID NO: 373712 - RNA, 21 nt, Human
cccugccaccccuaacucuca

SEQ ID NO: 373713 - RNA, 32 nt, Human
cccugccacccugcacugccccggcucccccg

SEQ ID NO: 373714 - RNA, 32 nt, Human
cccugccaccuccagccucugccagcaaugag

SEQ ID NO: 373715 - RNA, 18 nt, Human
cccugccaccucuccuca

SEQ ID NO: 373716 - RNA, 24 nt, Human
cccugccacgcaggccacccgggc

SEQ ID NO: 373717 - RNA, 19 nt, Human
cccugccacggccaacuca

SEQ ID NO: 373718 - RNA, 19 nt, Human
cccugccacucccuggccu

SEQ ID NO: 373719 - RNA, 32 nt, Human
cccugccacugccucuucuuuucccugcugcc

SEQ ID NO: 373720 - RNA, 32 nt, Human
cccugccacuggcugcagaaauggcucgacgg

SEQ ID NO: 373721 - RNA, 32 nt, Human
cccugccagaaacauauacacagauacacaac

SEQ ID NO: 373722 - RNA, 32 nt, Human
cccugccagaagcagcaagggccauggggugg

SEQ ID NO: 373723 - RNA, 32 nt, Human
cccugccagacccugcucacauucccucugcu

SEQ ID NO: 373724 - RNA, 32 nt, Human
cccugccagaugucccagccuugaucugucug

SEQ ID NO: 373725 - RNA, 32 nt, Human
cccugccagcagcugcuccuucagccaggcca

SEQ ID NO: 373726 - RNA, 23 nt, Human
cccugccagccaaucaccggggc

SEQ ID NO: 373727 - RNA, 23 nt, Human
cccugccagccccacaccagggc

SEQ ID NO: 373728 - RNA, 32 nt, Human
cccugccagcgggcgagcaggacaguccgcgc

SEQ ID NO: 373729 - RNA, 32 nt, Human
cccugccagcuccuagaaauaguuucaaucuu

SEQ ID NO: 373730 - RNA, 32 nt, Human
cccugccaggaucugcaguagggagggaaggc

SEQ ID NO: 373731 - RNA, 32 nt, Human
cccugccagugcaggugaauucuggaaggagg

SEQ ID NO: 373732 - RNA, 32 nt, Human
cccugccaucacugccccacauggacaaaacu

SEQ ID NO: 373733 - RNA, 32 nt, Human
cccugccaucaucugcuauuucugccacuucu

SEQ ID NO: 373734 - RNA, 23 nt, Human
cccugccaucuucccagcagggc

SEQ ID NO: 373735 - RNA, 22 nt, Human
cccugccaugcaggccaggugc

SEQ ID NO: 373736 - RNA, 32 nt, Human
cccugccaugccugagcccccugcacacaagg

SEQ ID NO: 373737 - RNA, 24 nt, Human
cccugccauggaaggaagaacggg

SEQ ID NO: 373738 - RNA, 32 nt, Human
cccugccauuggaacuuggauuacugugaaca

SEQ ID NO: 373739 - RNA, 32 nt, Human
cccugccauuuuucacaccucucuuaauuuua

SEQ ID NO: 373740 - RNA, 17 nt, Human
cccugcccaagguccuc

SEQ ID NO: 373741 - RNA, 32 nt, Human
cccugcccaagugccuaggggcaguagacagc

SEQ ID NO: 373742 - RNA, 32 nt, Human
cccugcccaaguggcucuugggacaacgugcu

SEQ ID NO: 373743 - RNA, 32 nt, Human
cccugcccaaucagagaugccaaaaaugggga

SEQ ID NO: 373744 - RNA, 25 nt, Human
cccugcccacagagcagccccccag

SEQ ID NO: 373745 - RNA, 32 nt, Human
cccugcccacagcauggggagaggccgucgug

SEQ ID NO: 373746 - RNA, 32 nt, Human
cccugcccacaucugcugguuuggggcuucag

SEQ ID NO: 373747 - RNA, 32 nt, Human
cccugcccacauguucccucucucacaguuuu

SEQ ID NO: 373748 - RNA, 32 nt, Human
cccugcccacccucccuccacuccucucaacu

SEQ ID NO: 373749 - RNA, 32 nt, Human
cccugcccaccgacgccagccugcuuggauga

SEQ ID NO: 373750 - RNA, 32 nt, Human
cccugcccaccugagcagcagcgucccaucca

SEQ ID NO: 373751 - RNA, 32 nt, Human
cccugcccagaaaggccagcagcuuggacuuc

SEQ ID NO: 373752 - RNA, 32 nt, Human
cccugcccagaauucccagcugucugugucag

SEQ ID NO: 373753 - RNA, 32 nt, Human
cccugcccagagcccuggcaccagagacgcca

SEQ ID NO: 373754 - RNA, 32 nt, Human
cccugcccagcaccacagcagagaucacacac

SEQ ID NO: 373755 - RNA, 32 nt, Human
cccugcccagcagaauuuguauagagauguga

SEQ ID NO: 373756 - RNA, 24 nt, Human
cccugcccagccagccuccugucu

SEQ ID NO: 373757 - RNA, 32 nt, Human
cccugcccagccagccuccugucuccagagaa

SEQ ID NO: 373758 - RNA, 32 nt, Human
cccugcccagccugggccugggccgcagccgu

SEQ ID NO: 373759 - RNA, 32 nt, Human
cccugcccagcuggaaaccacagggaggggaa

SEQ ID NO: 373760 - RNA, 32 nt, Human
cccugcccaggagucugguugcaaacccugau

SEQ ID NO: 373761 - RNA, 32 nt, Human
cccugcccaggccaccucccacagcccuccac

SEQ ID NO: 373762 - RNA, 20 nt, Human
cccugcccaggccacuguga

SEQ ID NO: 373763 - RNA, 32 nt, Human
cccugcccaucugcugagcuucucacaucucu

SEQ ID NO: 373764 - RNA, 32 nt, Human
cccugcccaugcaaaguguccuguacggugag

SEQ ID NO: 373765 - RNA, 32 nt, Human
cccugccccaccuuuccuuuccuuccuguggg

SEQ ID NO: 373766 - RNA, 32 nt, Human
cccugccccacuuuaccauagagaccagugcc

SEQ ID NO: 373767 - RNA, 32 nt, Human
cccugccccagccucaggacugcaggagccau

SEQ ID NO: 373768 - RNA, 32 nt, Human
cccugccccagccuguguagcucuuccugcau

SEQ ID NO: 373769 - RNA, 32 nt, Human
cccugccccaggagcgggccugagccacgucc

SEQ ID NO: 373770 - RNA, 23 nt, Human
cccugccccauccugaguucuuu

SEQ ID NO: 373771 - RNA, 32 nt, Human
cccugccccauuuccuccucaucuguccccca

SEQ ID NO: 373772 - RNA, 21 nt, Human
cccugcccccaccccaugccc

SEQ ID NO: 373773 - RNA, 24 nt, Human
cccugcccccaccccuuccugucu

SEQ ID NO: 373774 - RNA, 21 nt, Human
cccugcccccacuuccuguuu

SEQ ID NO: 373775 - RNA, 22 nt, Human
cccugccccccaccaccugccu

SEQ ID NO: 373776 - RNA, 32 nt, Human
cccugcccccgaggcuucugugggugcagacu

SEQ ID NO: 373777 - RNA, 23 nt, Human
cccugcccccuccacuuccugcc

SEQ ID NO: 373778 - RNA, 32 nt, Human
cccugcccccucgggcuuccuccuggcucugc

SEQ ID NO: 373779 - RNA, 32 nt, Human
cccugcccccuguccccugccucuuuucccaa

SEQ ID NO: 373780 - RNA, 32 nt, Human
cccugccccgcgcggcccugcccggcccaccg

SEQ ID NO: 373781 - RNA, 21 nt, Human
cccugccccuaacuccugccu

SEQ ID NO: 373782 - RNA, 32 nt, Human
cccugccccuaggagcuggagccggaggagcc

SEQ ID NO: 373783 - RNA, 32 nt, Human
cccugccccucaccuucuccuucuugauucca

SEQ ID NO: 373784 - RNA, 32 nt, Human
cccugccccucggaaaggcagcuaaggcccgg

SEQ ID NO: 373785 - RNA, 32 nt, Human
cccugccccucgggcaccagccugcauaugug

SEQ ID NO: 373786 - RNA, 32 nt, Human
cccugccccucucugucauagcuaacaggaau

SEQ ID NO: 373787 - RNA, 17 nt, Human
cccugccccucugccca

SEQ ID NO: 373788 - RNA, 32 nt, Human
cccugccccugcacucaggcuugugaaggccc

SEQ ID NO: 373789 - RNA, 32 nt, Human
cccugccccugcacucccaugggaaugccgca

SEQ ID NO: 373790 - RNA, 32 nt, Human
cccugccccugccccuaccagcccagcuuugg

SEQ ID NO: 373791 - RNA, 32 nt, Human
cccugccccugccccugcuacugccaaccucg

SEQ ID NO: 373792 - RNA, 32 nt, Human
cccugccccugccuccugcauccagcccccaa

SEQ ID NO: 373793 - RNA, 32 nt, Human
cccugccccuguuaaagaaucagagguugggc

SEQ ID NO: 373794 - RNA, 32 nt, Human
cccugcccuccacccuccccagagccacuucg

SEQ ID NO: 373795 - RNA, 32 nt, Human
cccugcccuccccuccccucccuuccccucca

SEQ ID NO: 373796 - RNA, 32 nt, Human
cccugcccuccccugucccccucucgccgccc

SEQ ID NO: 373797 - RNA, 32 nt, Human
cccugcccuccucccuucccugggugacugcu

SEQ ID NO: 373798 - RNA, 32 nt, Human
cccugcccuccucucccucccagauggacccu

SEQ ID NO: 373799 - RNA, 32 nt, Human
cccugcccuccugcccgcccucccuccugccu

SEQ ID NO: 373800 - RNA, 32 nt, Human
cccugcccuccuuucucagcagcuuuuuguua

SEQ ID NO: 373801 - RNA, 32 nt, Human
cccugcccucgaggagcuuucauucugaugga

SEQ ID NO: 373802 - RNA, 32 nt, Human
cccugcccucuccccucucucccucccccuaa

SEQ ID NO: 373803 - RNA, 32 nt, Human
cccugcccucugcacuaagcacuuuccaggca

SEQ ID NO: 373804 - RNA, 32 nt, Human
cccugcccucuguccuggcucugcaccuggua

SEQ ID NO: 373805 - RNA, 32 nt, Human
cccugcccucuuucccccucugggccucagug

SEQ ID NO: 373806 - RNA, 32 nt, Human
cccugcccugaaggaauguauuucuaaggcaa

SEQ ID NO: 373807 - RNA, 32 nt, Human
cccugcccugcaccagcacccugagauggagc

SEQ ID NO: 373808 - RNA, 19 nt, Human
cccugcccugcccuccuca

SEQ ID NO: 373809 - RNA, 32 nt, Human
cccugcccugcccugcacugcccggcccggca

SEQ ID NO: 373810 - RNA, 32 nt, Human
cccugcccugccuccagccuugguggcuccua

SEQ ID NO: 373811 - RNA, 32 nt, Human
cccugcccugcuccuuuguccacgggcuauug

SEQ ID NO: 373812 - RNA, 32 nt, Human
cccugcccugcucuccuugagggcccucaaca

SEQ ID NO: 373813 - RNA, 32 nt, Human
cccugcccugcucugcuuccugggggcuucag

SEQ ID NO: 373814 - RNA, 17 nt, Human
cccugcccugcugagca

SEQ ID NO: 373815 - RNA, 32 nt, Human
cccugcccugcugguggaauucugugagugcu

SEQ ID NO: 373816 - RNA, 19 nt, Human
cccugcccuggagcagcuu

SEQ ID NO: 373817 - RNA, 32 nt, Human
cccugcccuguucccguuccucccugcugcuc

SEQ ID NO: 373818 - RNA, 32 nt, Human
cccugcccuucaucugccggugagugggaagu

SEQ ID NO: 373819 - RNA, 32 nt, Human
cccugcccuugaggagcuucauuguagggaga

SEQ ID NO: 373820 - RNA, 32 nt, Human
cccugcccuugcugcccugccugucacguggc

SEQ ID NO: 373821 - RNA, 32 nt, Human
cccugcccuuucucagcugccuccccugcccu

SEQ ID NO: 373822 - RNA, 32 nt, Human
cccugccgcccaggcuagagugcaguggcacg

SEQ ID NO: 373823 - RNA, 32 nt, Human
cccugccgccugggcugucagcacuuuggcag

SEQ ID NO: 373824 - RNA, 32 nt, Human
cccugccgcggccccucgggccuguccacauc

SEQ ID NO: 373825 - RNA, 32 nt, Human
cccugccgcuccugccggcagcuccaaccaug

SEQ ID NO: 373826 - RNA, 32 nt, Human
cccugccggagccugagcccaagccuucuagc

SEQ ID NO: 373827 - RNA, 21 nt, Human
cccugccggaugccccgaggc

SEQ ID NO: 373828 - RNA, 32 nt, Human
cccugccgggcagggcuggagcuggacagaag

SEQ ID NO: 373829 - RNA, 32 nt, Human
cccugccgggugguggaggcgcugcacggugc

SEQ ID NO: 373830 - RNA, 32 nt, Human
cccugccgucaaucuccaccucaagggagcca

SEQ ID NO: 373831 - RNA, 32 nt, Human
cccugccguccugcgggagccugcuguccagu

SEQ ID NO: 373832 - RNA, 17 nt, Human
cccugccuaaagauaga

SEQ ID NO: 373833 - RNA, 32 nt, Human
cccugccuacuuccuuccuguuggauaucaua

SEQ ID NO: 373834 - RNA, 32 nt, Human
cccugccuauaacagccacuuccuggcgguca

SEQ ID NO: 373835 - RNA, 20 nt, Human
cccugccuauacucuggugg

SEQ ID NO: 373836 - RNA, 27 nt, Human
cccugccuauccgccccuuagugcuuu

SEQ ID NO: 373837 - RNA, 32 nt, Human
cccugccucacagauaccaauagagagguuuu

SEQ ID NO: 373838 - RNA, 32 nt, Human
cccugccucagccucaugaauagcugggauua

SEQ ID NO: 373839 - RNA, 20 nt, Human
cccugccucagcuucuccca

SEQ ID NO: 373840 - RNA, 32 nt, Human
cccugccucaucucuauucucauuccacuaug

SEQ ID NO: 373841 - RNA, 32 nt, Human
cccugccuccaccccuccagcccauccagcaa

SEQ ID NO: 373842 - RNA, 32 nt, Human
cccugccuccacccucugagcuuugcauguuc

SEQ ID NO: 373843 - RNA, 32 nt, Human
cccugccuccacuugccuugugauauucuauu

SEQ ID NO: 373844 - RNA, 32 nt, Human
cccugccuccagggcuccugggcugccaggga

SEQ ID NO: 373845 - RNA, 32 nt, Human
cccugccuccagggcuuccgccaccagcgucu

SEQ ID NO: 373846 - RNA, 32 nt, Human
cccugccucccaggaaccccggagggccaccc

SEQ ID NO: 373847 - RNA, 22 nt, Human
cccugccuccccacugccccua

SEQ ID NO: 373848 - RNA, 32 nt, Human
cccugccucccgggagacugggauuucuggcc

SEQ ID NO: 373849 - RNA, 17 nt, Human
cccugccucccuagggu

SEQ ID NO: 373850 - RNA, 32 nt, Human
cccugccuccuccuccuccucgucuuaggggg

SEQ ID NO: 373851 - RNA, 22 nt, Human
cccugccuccuccuuccugccu

SEQ ID NO: 373852 - RNA, 32 nt, Human
cccugccuccuugccaggcucuuccuccuguc

SEQ ID NO: 373853 - RNA, 32 nt, Human
cccugccuccuuggucacugccucuugcugca

SEQ ID NO: 373854 - RNA, 22 nt, Human
cccugccuccuuucuucugccu

SEQ ID NO: 373855 - RNA, 25 nt, Human
cccugccucgguuucccuucuguuu

SEQ ID NO: 373856 - RNA, 32 nt, Human
cccugccucuacuaggcgccuuagcucacuau

SEQ ID NO: 373857 - RNA, 32 nt, Human
cccugccucuaggaugcugcagcagagugagc

SEQ ID NO: 373858 - RNA, 32 nt, Human
cccugccucuccucacccucccucucuuccug

SEQ ID NO: 373859 - RNA, 19 nt, Human
cccugccucuccuccaccc

SEQ ID NO: 373860 - RNA, 25 nt, Human
cccugccucuccuccaccccugccu

SEQ ID NO: 373861 - RNA, 32 nt, Human
cccugccucuggggcucugugguguaggcuau

SEQ ID NO: 373862 - RNA, 32 nt, Human
cccugccucuuucauuuccagaccuuggagaa

SEQ ID NO: 373863 - RNA, 18 nt, Human
cccugccugauccugccc

SEQ ID NO: 373864 - RNA, 32 nt, Human
cccugccugcagcacgugcugaucuccaaggg

SEQ ID NO: 373865 - RNA, 32 nt, Human
cccugccugcagcuggcuuccaccuggcacgu

SEQ ID NO: 373866 - RNA, 32 nt, Human
cccugccugccaccccacaggguuacagcaag

SEQ ID NO: 373867 - RNA, 32 nt, Human
cccugccugcccacccuccacccacugccuuc

SEQ ID NO: 373868 - RNA, 32 nt, Human
cccugccugcccacccugccugaggacucuac

SEQ ID NO: 373869 - RNA, 17 nt, Human
cccugccugccccaggg

SEQ ID NO: 373870 - RNA, 17 nt, Human
cccugccugccucccca

SEQ ID NO: 373871 - RNA, 32 nt, Human
cccugccugccuccugcagguuccuuuccugg

SEQ ID NO: 373872 - RNA, 32 nt, Human
cccugccugccugauuccauggcuguugugcu

SEQ ID NO: 373873 - RNA, 32 nt, Human
cccugccugccugcccggcccugcacaacaug

SEQ ID NO: 373874 - RNA, 32 nt, Human
cccugccugccugcccugggcgaugagguacg

SEQ ID NO: 373875 - RNA, 32 nt, Human
cccugccugccugggccgccucuguggccuac

SEQ ID NO: 373876 - RNA, 32 nt, Human
cccugccugccuguggcucugcccagaugcuu

SEQ ID NO: 373877 - RNA, 23 nt, Human
cccugccugcucuuuaggccuuu

SEQ ID NO: 373878 - RNA, 32 nt, Human
cccugccuggaucucaccagcacuuucccucu

SEQ ID NO: 373879 - RNA, 32 nt, Human
cccugccuggaucucacgagcacuuucccucu

SEQ ID NO: 373880 - RNA, 32 nt, Human
cccugccugggcugaaggacugucuucacgaa

SEQ ID NO: 373881 - RNA, 32 nt, Human
cccugccuggggaccaagcugaaggggaauuc

SEQ ID NO: 373882 - RNA, 32 nt, Human
cccugccugugccugccugggaguuuuguauu

SEQ ID NO: 373883 - RNA, 32 nt, Human
cccugccugugguccugagcacugaucagcuu

SEQ ID NO: 373884 - RNA, 32 nt, Human
cccugccuguguucugugcccuguguccgcuc

SEQ ID NO: 373885 - RNA, 32 nt, Human
cccugccuguucugcaugccaguccuuccgug

SEQ ID NO: 373886 - RNA, 23 nt, Human
cccugccuuaaguccaguucuuu

SEQ ID NO: 373887 - RNA, 32 nt, Human
cccugccuuaguaaacagaguauacuggagag

SEQ ID NO: 373888 - RNA, 32 nt, Human
cccugccuucaagagccaguguucuagcgggu

SEQ ID NO: 373889 - RNA, 32 nt, Human
cccugccuucaagccgcuggucuacgugcugg

SEQ ID NO: 373890 - RNA, 32 nt, Human
cccugccuuccaggaagguuggggugggaguu

SEQ ID NO: 373891 - RNA, 22 nt, Human
cccugccuucgaccuccugccu

SEQ ID NO: 373892 - RNA, 32 nt, Human
cccugccuugauuuccccuugucugucaaugg

SEQ ID NO: 373893 - RNA, 21 nt, Human
cccugccuugccccuaccuca

SEQ ID NO: 373894 - RNA, 32 nt, Human
cccugccuugcuggaggagaugggauggggcg

SEQ ID NO: 373895 - RNA, 32 nt, Human
cccugccuuggugugagagugagggaagagga

SEQ ID NO: 373896 - RNA, 19 nt, Human
cccugccuugucccucuca

SEQ ID NO: 373897 - RNA, 23 nt, Human
cccugcgagaccccgggccagcc

SEQ ID NO: 373898 - RNA, 20 nt, Human
cccugcgagagccgcccgcc

SEQ ID NO: 373899 - RNA, 32 nt, Human
cccugcgccaccgcguccugcacuacagcaca

SEQ ID NO: 373900 - RNA, 24 nt, Human
cccugcgcccaaccgccugcgccg

SEQ ID NO: 373901 - RNA, 18 nt, Human
cccugcgcccgccccucu

SEQ ID NO: 373902 - RNA, 23 nt, Human
cccugcgcccgccgccgcugccg

SEQ ID NO: 373903 - RNA, 24 nt, Human
cccugcgcccguugcuacugaggc

SEQ ID NO: 373904 - RNA, 32 nt, Human
cccugcgccgcacccggggccugggugagacu

SEQ ID NO: 373905 - RNA, 32 nt, Human
cccugcgcgaguguccaaggcgggaggagaga

SEQ ID NO: 373906 - RNA, 32 nt, Human
cccugcgcucgcccuuggcccugcugccucug

SEQ ID NO: 373907 - RNA, 32 nt, Human
cccugcggaaccagagccucaggcugggaugg

SEQ ID NO: 373908 - RNA, 30 nt, Human
cccugcggaagccacagggugagcacucug

SEQ ID NO: 373909 - RNA, 32 nt, Human
cccugcggaagccacagggugagcacucuggg

SEQ ID NO: 373910 - RNA, 32 nt, Human
cccugcggagacccugaguccgggaggcaccg

SEQ ID NO: 373911 - RNA, 32 nt, Human
cccugcggcaaugccagcagcuccccaucagg

SEQ ID NO: 373912 - RNA, 21 nt, Human
cccugcggccagccagggagg

SEQ ID NO: 373913 - RNA, 24 nt, Human
cccugcggccccaccagguacuga

SEQ ID NO: 373914 - RNA, 23 nt, Human
cccugcggcucccaccucugccu

SEQ ID NO: 373915 - RNA, 32 nt, Human
cccugcgggaggugggugggguuggguggcug

SEQ ID NO: 373916 - RNA, 32 nt, Human
cccugcgggccuccgugcuccuucggggugcg

SEQ ID NO: 373917 - RNA, 32 nt, Human
cccugcgggcgcaggcccuccauuuugggucg

SEQ ID NO: 373918 - RNA, 32 nt, Human
cccugcggggcccagcccugccucagcuggua

SEQ ID NO: 373919 - RNA, 21 nt, Human
cccugcgggucaccgcccgcc

SEQ ID NO: 373920 - RNA, 32 nt, Human
cccugcgggucgcacgcccuccccagcuucug

SEQ ID NO: 373921 - RNA, 32 nt, Human
cccugcgguacccccaggccaaagcaaguaag

SEQ ID NO: 373922 - RNA, 32 nt, Human
cccugcgguagaugggagggaggcucaggucc

SEQ ID NO: 373923 - RNA, 32 nt, Human
cccugcggucaggcugggcagccccagagaga

SEQ ID NO: 373924 - RNA, 32 nt, Human
cccugcgugguggugccaaugugcccuggcac

SEQ ID NO: 373925 - RNA, 32 nt, Human
cccugcuaccacagcuuucacccaugggcaug

SEQ ID NO: 373926 - RNA, 21 nt, Human
cccugcuacugccccaacagg

SEQ ID NO: 373927 - RNA, 21 nt, Human
cccugcuacugucccuucuca

SEQ ID NO: 373928 - RNA, 32 nt, Human
cccugcuagcaaccaugugccucccauccuga

SEQ ID NO: 373929 - RNA, 23 nt, Human
cccugcuaucucccuuccugcuu

SEQ ID NO: 373930 - RNA, 32 nt, Human
cccugcuaugacuccucucugcagagacgcga

SEQ ID NO: 373931 - RNA, 32 nt, Human
cccugcucaagaagggggccaggcagcuggaa

SEQ ID NO: 373932 - RNA, 32 nt, Human
cccugcucaaugcccgccucuggcggagaccu

SEQ ID NO: 373933 - RNA, 31 nt, Human
cccugcucacccucugggcuuugucuccgag

SEQ ID NO: 373934 - RNA, 19 nt, Human
cccugcucacucccggggc

SEQ ID NO: 373935 - RNA, 32 nt, Human
cccugcucacugcagccuccgcuucccugguu

SEQ ID NO: 373936 - RNA, 32 nt, Human
cccugcucacuugagcaugucgcccaccaagc

SEQ ID NO: 373937 - RNA, 32 nt, Human
cccugcucagcauuuacauuuuugccaccagc

SEQ ID NO: 373938 - RNA, 24 nt, Human
cccugcucagcccauccccugccu

SEQ ID NO: 373939 - RNA, 20 nt, Human
cccugcucauccuguucuuu

SEQ ID NO: 373940 - RNA, 32 nt, Human
cccugcucauuucuuuacugccuuccugccug

SEQ ID NO: 373941 - RNA, 32 nt, Human
cccugcuccacccccucuccccauuccuccgc

SEQ ID NO: 373942 - RNA, 32 nt, Human
cccugcuccagaacccagcccagaucggagga

SEQ ID NO: 373943 - RNA, 32 nt, Human
cccugcuccaggcacccauuggcuccauccuc

SEQ ID NO: 373944 - RNA, 20 nt, Human
cccugcuccaucggcacugg

SEQ ID NO: 373945 - RNA, 32 nt, Human
cccugcuccaucucccucgccaggccugagac

SEQ ID NO: 373946 - RNA, 32 nt, Human
cccugcucccauuccucccuccggccauacug

SEQ ID NO: 373947 - RNA, 20 nt, Human
cccugcucccccaguuuuuu

SEQ ID NO: 373948 - RNA, 22 nt, Human
cccugcucccugccuccugccu

SEQ ID NO: 373949 - RNA, 32 nt, Human
cccugcuccgaggccuuccuggguugcugucc

SEQ ID NO: 373950 - RNA, 24 nt, Human
cccugcuccgccagccuccugcuu

SEQ ID NO: 373951 - RNA, 32 nt, Human
cccugcuccuacccccugacuggcucuugcgu

SEQ ID NO: 373952 - RNA, 32 nt, Human
cccugcuccugccucuccuccucauagucauc

SEQ ID NO: 373953 - RNA, 32 nt, Human
cccugcuccuuucugcggcauguggguggaca

SEQ ID NO: 373954 - RNA, 32 nt, Human
cccugcucgccuuggucauguacagcacugaa

SEQ ID NO: 373955 - RNA, 18 nt, Human
cccugcucuccccgggcu

SEQ ID NO: 373956 - RNA, 32 nt, Human
cccugcucucgaccuccgccccugcggugggg

SEQ ID NO: 373957 - RNA, 32 nt, Human
cccugcucucuaguucuaauucccaggagcca

SEQ ID NO: 373958 - RNA, 32 nt, Human
cccugcucucuauuccagagguggugagggga

SEQ ID NO: 373959 - RNA, 32 nt, Human
cccugcucucugcuugcuguuguuuugacgcu

SEQ ID NO: 373960 - RNA, 32 nt, Human
cccugcucugcggcuccucccaccccaccucu

SEQ ID NO: 373961 - RNA, 32 nt, Human
cccugcucugcucagcugaagcagaaaacaga

SEQ ID NO: 373962 - RNA, 32 nt, Human
cccugcucuggcccagccgcuggcgcccgcac

SEQ ID NO: 373963 - RNA, 32 nt, Human
cccugcucuggcucuugagucucagaauccga

SEQ ID NO: 373964 - RNA, 32 nt, Human
cccugcucuguucugcccggaggagccgccca

SEQ ID NO: 373965 - RNA, 32 nt, Human
cccugcucuuccucaagcuccagaaccucuca

SEQ ID NO: 373966 - RNA, 32 nt, Human
cccugcucuuccuccugacccugcugcucuug

SEQ ID NO: 373967 - RNA, 32 nt, Human
cccugcucuuccugccuuuccugcccaugugu

SEQ ID NO: 373968 - RNA, 32 nt, Human
cccugcucuucucuccccagcccccucccacc

SEQ ID NO: 373969 - RNA, 32 nt, Human
cccugcucuugccucuuagcucccucuccagg

SEQ ID NO: 373970 - RNA, 32 nt, Human
cccugcucuuucuccuucauuccgcagccucc

SEQ ID NO: 373971 - RNA, 32 nt, Human
cccugcucuuucuuccccuccucccuccuauc

SEQ ID NO: 373972 - RNA, 22 nt, Human
cccugcucuuuggcuguucuuu

SEQ ID NO: 373973 - RNA, 32 nt, Human
cccugcugaaaauagcugggccagugucucug

SEQ ID NO: 373974 - RNA, 22 nt, Human
cccugcugaauccuaaagcugu

SEQ ID NO: 373975 - RNA, 32 nt, Human
cccugcugagauuacagguguaagccaccaua

SEQ ID NO: 373976 - RNA, 32 nt, Human
cccugcugagccacccggguugggccaggauc

SEQ ID NO: 373977 - RNA, 24 nt, Human
cccugcugaggcauacagagcuuc

SEQ ID NO: 373978 - RNA, 32 nt, Human
cccugcugaugccacagagaauaagcugaacu

SEQ ID NO: 373979 - RNA, 32 nt, Human
cccugcugcaagaccaccagaguggugccccc

SEQ ID NO: 373980 - RNA, 32 nt, Human
cccugcugcaccuugaggagcuguguccuguc

SEQ ID NO: 373981 - RNA, 32 nt, Human
cccugcugcacucagugguuggcggaaacagc

SEQ ID NO: 373982 - RNA, 32 nt, Human
cccugcugcacuccagccugggcaacagaggg

SEQ ID NO: 373983 - RNA, 32 nt, Human
cccugcugcacuccagccugggugacagaggg

SEQ ID NO: 373984 - RNA, 32 nt, Human
cccugcugcagauucgucaggccaggugaaag

SEQ ID NO: 373985 - RNA, 32 nt, Human
cccugcugcaggcggaggugcuggaucuggac

SEQ ID NO: 373986 - RNA, 32 nt, Human
cccugcugcaucuucagcaucucccauguuca

SEQ ID NO: 373987 - RNA, 32 nt, Human
cccugcugccaggcuuacaucuucccagagaa

SEQ ID NO: 373988 - RNA, 22 nt, Human
cccugcugccccucacuucagg

SEQ ID NO: 373989 - RNA, 32 nt, Human
cccugcugccccugcugccccugcugccccug

SEQ ID NO: 373990 - RNA, 19 nt, Human
cccugcugccucccagagc

SEQ ID NO: 373991 - RNA, 32 nt, Human
cccugcugccuucucuaugcagccugcccucc

SEQ ID NO: 373992 - RNA, 32 nt, Human
cccugcugcuaccucgcgcuaggccagcucca

SEQ ID NO: 373993 - RNA, 32 nt, Human
cccugcugcuccaggacauauaagagacgaag

SEQ ID NO: 373994 - RNA, 32 nt, Human
cccugcugcucuugccuucuaagcuacugugc

SEQ ID NO: 373995 - RNA, 32 nt, Human
cccugcugcugcaggcugcagaagacuccgac

SEQ ID NO: 373996 - RNA, 32 nt, Human
cccugcugcugccaccugcccugcugccaggc

SEQ ID NO: 373997 - RNA, 32 nt, Human
cccugcugcugccucccguccucugcaugggg

SEQ ID NO: 373998 - RNA, 32 nt, Human
cccugcugcugcucccuuccuucuucuguccu

SEQ ID NO: 373999 - RNA, 20 nt, Human
cccugcugcugcuccucccu

SEQ ID NO: 374000 - RNA, 32 nt, Human
cccugcugcuggcugccaggcaggcccucugg

SEQ ID NO: 374001 - RNA, 18 nt, Human
cccugcugcugucaccuc

SEQ ID NO: 374002 - RNA, 32 nt, Human
cccugcuggacugucaccuguuucccaguuaa

SEQ ID NO: 374003 - RNA, 32 nt, Human
cccugcuggcacauucaggcugugcugggaag

SEQ ID NO: 374004 - RNA, 32 nt, Human
cccugcuggccuccgcuuuccucucucccccu

SEQ ID NO: 374005 - RNA, 32 nt, Human
cccugcuggcggauagcaagacucuguggagu

SEQ ID NO: 374006 - RNA, 29 nt, Human
cccugcuggcugccggcaccgcccuccug

SEQ ID NO: 374007 - RNA, 32 nt, Human
cccugcugggagagggaacuggaaugccacac

SEQ ID NO: 374008 - RNA, 32 nt, Human
cccugcugggcugcugaaucugggggacauag

SEQ ID NO: 374009 - RNA, 32 nt, Human
cccugcugggcugggagucgggguggcggcca

SEQ ID NO: 374010 - RNA, 32 nt, Human
cccugcuguccucagaggaggaggaggaggag

SEQ ID NO: 374011 - RNA, 31 nt, Human
cccugcugucucucugggcugcagagucugc

SEQ ID NO: 374012 - RNA, 32 nt, Human
cccugcugucugucugugggagucggacauug

SEQ ID NO: 374013 - RNA, 32 nt, Human
cccugcugugaggaagcucaugcacugcugaa

SEQ ID NO: 374014 - RNA, 32 nt, Human
cccugcuguggcugggccuugugggcagccac

SEQ ID NO: 374015 - RNA, 32 nt, Human
cccugcuguucugggucucaggcugcuggacc

SEQ ID NO: 374016 - RNA, 25 nt, Human
cccugcuguuugccccucagucuuu

SEQ ID NO: 374017 - RNA, 32 nt, Human
cccugcuuaaacaaacuauugaugaguucuuu

SEQ ID NO: 374018 - RNA, 32 nt, Human
cccugcuuaccucccucgcccgugcaaugccu

SEQ ID NO: 374019 - RNA, 22 nt, Human
cccugcuuaccugcaggccuuu

SEQ ID NO: 374020 - RNA, 32 nt, Human
cccugcuucaccgucguccccugggcaccggu

SEQ ID NO: 374021 - RNA, 32 nt, Human
cccugcuucagucccuuccccaugcuuccuug

SEQ ID NO: 374022 - RNA, 32 nt, Human
cccugcuuccagaaagccugggaagaacugcc

SEQ ID NO: 374023 - RNA, 21 nt, Human
cccugcuuccccaagcucucc

SEQ ID NO: 374024 - RNA, 32 nt, Human
cccugcuuccccaagcucuccugggucuugga

SEQ ID NO: 374025 - RNA, 22 nt, Human
cccugcuucccugccuccuccu

SEQ ID NO: 374026 - RNA, 23 nt, Human
cccugcuucuaaucugguucuuu

SEQ ID NO: 374027 - RNA, 32 nt, Human
cccugcuucuccccaguccuccagcccaggag

SEQ ID NO: 374028 - RNA, 32 nt, Human
cccugcuucucccccuccuaccugagaggcug

SEQ ID NO: 374029 - RNA, 32 nt, Human
cccugcuucucccgccauuggccuuaacuggc

SEQ ID NO: 374030 - RNA, 32 nt, Human
cccugcuucucccuuuccuucuguuccgguuu

SEQ ID NO: 374031 - RNA, 21 nt, Human
cccugcuucugccccuccuca

SEQ ID NO: 374032 - RNA, 16 nt, Human
cccugcuucugcugcc

SEQ ID NO: 374033 - RNA, 32 nt, Human
cccugcuucuggaaaccucugccugcugcccu

SEQ ID NO: 374034 - RNA, 32 nt, Human
cccugcuugccaggcccugcagaggggcugcc

SEQ ID NO: 374035 - RNA, 32 nt, Human
cccugcuugcccaggccgcccugcugcugcag

SEQ ID NO: 374036 - RNA, 21 nt, Human
cccugcuugccucugcucucc

SEQ ID NO: 374037 - RNA, 32 nt, Human
cccugcuugccuggccccagaagcuguuuugc

SEQ ID NO: 374038 - RNA, 21 nt, Human
cccugcuuggcagccagggua

SEQ ID NO: 374039 - RNA, 32 nt, Human
cccugcuuggccagaccuuggcugugccuccu

SEQ ID NO: 374040 - RNA, 32 nt, Human
cccugcuuggccagcacugccugcagccucac

SEQ ID NO: 374041 - RNA, 32 nt, Human
cccugcuuucguacaaggaagggggacgaugg

SEQ ID NO: 374042 - RNA, 32 nt, Human
cccugcuuuugacuuuuggcagccucuucagg

SEQ ID NO: 374043 - RNA, 32 nt, Human
cccuggaaaaacaagccaaggaggauuucuuu

SEQ ID NO: 374044 - RNA, 32 nt, Human
cccuggaaaaggaggaggcguggugggacugc

SEQ ID NO: 374045 - RNA, 20 nt, Human
cccuggaaagcacgccggcc

SEQ ID NO: 374046 - RNA, 15 nt, Human
cccuggaaaggguug

SEQ ID NO: 374047 - RNA, 32 nt, Human
cccuggaacagaguuacagauacacaaucaag

SEQ ID NO: 374048 - RNA, 16 nt, Human
cccuggaacgcuggcc

SEQ ID NO: 374049 - RNA, 32 nt, Human
cccuggaacuccucuuucauagaucgugacuu

SEQ ID NO: 374050 - RNA, 32 nt, Human
cccuggaagaagcugagucuucccuggagguu

SEQ ID NO: 374051 - RNA, 19 nt, Human
cccuggaagagcagccgga

SEQ ID NO: 374052 - RNA, 32 nt, Human
cccuggaagauggaucuugccuuguggauguu

SEQ ID NO: 374053 - RNA, 19 nt, Human
cccuggaagcagauacaga

SEQ ID NO: 374054 - RNA, 32 nt, Human
cccuggaaggcaggggacugcgagcugggcug

SEQ ID NO: 374055 - RNA, 32 nt, Human
cccuggaagggagggaaggcaugggaagaagc

SEQ ID NO: 374056 - RNA, 32 nt, Human
cccuggaagggagggaggcccaugggaggcca

SEQ ID NO: 374057 - RNA, 22 nt, Human
cccuggaagggccccucugccu

SEQ ID NO: 374058 - RNA, 32 nt, Human
cccuggaaguggagguugcagugagccuguca

SEQ ID NO: 374059 - RNA, 32 nt, Human
cccuggaaguggcagcagcagugagcagucag

SEQ ID NO: 374060 - RNA, 32 nt, Human
cccuggaauaggguccugcaggguagaauaaa

SEQ ID NO: 374061 - RNA, 32 nt, Human
cccuggaaucucaaccauugucuuccaagaua

SEQ ID NO: 374062 - RNA, 32 nt, Human
cccuggaaugugcagugggccagcugagagua

SEQ ID NO: 374063 - RNA, 32 nt, Human
cccuggaaugugcauuccugccacugguuuca

SEQ ID NO: 374064 - RNA, 22 nt, Human
cccuggaauuccagcuccaccu

SEQ ID NO: 374065 - RNA, 32 nt, Human
cccuggaauuccaugccagccuaugcaacauc

SEQ ID NO: 374066 - RNA, 32 nt, Human
cccuggaauuucugccuuucugucucaagaug

SEQ ID NO: 374067 - RNA, 32 nt, Human
cccuggacagugaucaugccaggccuggaccu

SEQ ID NO: 374068 - RNA, 32 nt, Human
cccuggacaucuccuagagaggaauggaccca

SEQ ID NO: 374069 - RNA, 32 nt, Human
cccuggacauuauguauaaacaugcauaagaa

SEQ ID NO: 374070 - RNA, 32 nt, Human
cccuggaccagaaacuucaggucucucagacg

SEQ ID NO: 374071 - RNA, 32 nt, Human
cccuggaccagccgcccagaucauggcgccac

SEQ ID NO: 374072 - RNA, 32 nt, Human
cccuggaccagccgcccagaucauggcgccgc

SEQ ID NO: 374073 - RNA, 21 nt, Human
cccuggaccagccuccuguuu

SEQ ID NO: 374074 - RNA, 32 nt, Human
cccuggaccagccuggaacacacuagcagagc

SEQ ID NO: 374075 - RNA, 18 nt, Human
cccuggaccauacacagg

SEQ ID NO: 374076 - RNA, 32 nt, Human
cccuggacccuaguacacucuaccuccuuggg

SEQ ID NO: 374077 - RNA, 23 nt, Human
cccuggacgccuugcuccugcuu

SEQ ID NO: 374078 - RNA, 32 nt, Human
cccuggacggcagaggcaaggacggacgggag

SEQ ID NO: 374079 - RNA, 22 nt, Human
cccuggacucccgucuccuccu

SEQ ID NO: 374080 - RNA, 32 nt, Human
cccuggacucuugagaaaauugguacagaaau

SEQ ID NO: 374081 - RNA, 22 nt, Human
cccuggacuugguauaccucca

SEQ ID NO: 374082 - RNA, 32 nt, Human
cccuggacuugucaagugaauucuuugcaugu

SEQ ID NO: 374083 - RNA, 32 nt, Human
cccuggacuugucaagugaguucuuugcaugu

SEQ ID NO: 374084 - RNA, 32 nt, Human
cccuggagaacagcaagcucgucagcugccac

SEQ ID NO: 374085 - RNA, 32 nt, Human
cccuggagaaggacagagcgguggggacucgg

SEQ ID NO: 374086 - RNA, 32 nt, Human
cccuggagaagggagaccuggcaguggaggga

SEQ ID NO: 374087 - RNA, 32 nt, Human
cccuggagagcagcagggggccuucacuccug

SEQ ID NO: 374088 - RNA, 32 nt, Human
cccuggagagcagcagggggucuucacuccug

SEQ ID NO: 374089 - RNA, 32 nt, Human
cccuggagaggaagaggcaagguuuguguauu

SEQ ID NO: 374090 - RNA, 32 nt, Human
cccuggagcagcccaagugcuccugaguccuu

SEQ ID NO: 374091 - RNA, 32 nt, Human
cccuggagcaggagcggcaggagcugcggcug

SEQ ID NO: 374092 - RNA, 25 nt, Human
cccuggagccaccugccucuggcuu

SEQ ID NO: 374093 - RNA, 32 nt, Human
cccuggagccaccugccucuggcuucauguga

SEQ ID NO: 374094 - RNA, 22 nt, Human
cccuggagcccccagcccaucc

SEQ ID NO: 374095 - RNA, 32 nt, Human
cccuggagccuacagagcaggcaggcuaggcc

SEQ ID NO: 374096 - RNA, 20 nt, Human
cccuggagccuccacugccu

SEQ ID NO: 374097 - RNA, 32 nt, Human
cccuggagccugggacacuaccucgcugcggu

SEQ ID NO: 374098 - RNA, 20 nt, Human
cccuggaggaaagucaggug

SEQ ID NO: 374099 - RNA, 32 nt, Human
cccuggaggaaggaagcagggaagaggggcgu

SEQ ID NO: 374100 - RNA, 24 nt, Human
cccuggaggacugccugcuugcuu

SEQ ID NO: 374101 - RNA, 23 nt, Human
cccuggaggauuucaucucuugu

SEQ ID NO: 374102 - RNA, 24 nt, Human
cccuggaggcagagcuugcaguga

SEQ ID NO: 374103 - RNA, 24 nt, Human
cccuggaggcagagguugcaauga

SEQ ID NO: 374104 - RNA, 24 nt, Human
cccuggaggcagagguugcaguga

SEQ ID NO: 374105 - RNA, 32 nt, Human
cccuggaggcagagguugcagugagccaagau

SEQ ID NO: 374106 - RNA, 24 nt, Human
cccuggaggcagagguuguaguga

SEQ ID NO: 374107 - RNA, 32 nt, Human
cccuggaggcagcacaaggaggaugugauaug

SEQ ID NO: 374108 - RNA, 21 nt, Human
cccuggaggcagcuucugccu

SEQ ID NO: 374109 - RNA, 21 nt, Human
cccuggaggccacuucuuccu

SEQ ID NO: 374110 - RNA, 24 nt, Human
cccuggaggcggaaguugcaguga

SEQ ID NO: 374111 - RNA, 32 nt, Human
cccuggaggcggaaguugcagugagccgagac

SEQ ID NO: 374112 - RNA, 32 nt, Human
cccuggaggcggagauugaagugagcugaguu

SEQ ID NO: 374113 - RNA, 32 nt, Human
cccuggaggcggagguuccagugagcugagau

SEQ ID NO: 374114 - RNA, 24 nt, Human
cccuggaggcggagguugcaguga

SEQ ID NO: 374115 - RNA, 32 nt, Human
cccuggaggcggagguugcagugagccgagau

SEQ ID NO: 374116 - RNA, 32 nt, Human
cccuggaggcggagguugcagugaguggagau

SEQ ID NO: 374117 - RNA, 24 nt, Human
cccuggaggcggagguugccguga

SEQ ID NO: 374118 - RNA, 32 nt, Human
cccuggaggcggagguugccgugagccaagau

SEQ ID NO: 374119 - RNA, 21 nt, Human
cccuggaggcugccuccugcc

SEQ ID NO: 374120 - RNA, 21 nt, Human
cccuggaggcuucuggauggg

SEQ ID NO: 374121 - RNA, 32 nt, Human
cccuggagggacaccaggcucauacuaaaauc

SEQ ID NO: 374122 - RNA, 22 nt, Human
cccuggagggagcagcguuggc

SEQ ID NO: 374123 - RNA, 32 nt, Human
cccuggagggagcagcguuggcagggagacag

SEQ ID NO: 374124 - RNA, 32 nt, Human
cccuggaggggcaggcacaggagacagcagug

SEQ ID NO: 374125 - RNA, 32 nt, Human
cccuggaggggcugcugcuccucaguugcauu

SEQ ID NO: 374126 - RNA, 32 nt, Human
cccuggaggguggauugccugaggucaggagu

SEQ ID NO: 374127 - RNA, 32 nt, Human
cccuggaggguggcuucuccugacuggcagga

SEQ ID NO: 374128 - RNA, 24 nt, Human
cccuggagguagaaguugcaguga

SEQ ID NO: 374129 - RNA, 24 nt, Human
cccuggaggucaaggcugcaguga

SEQ ID NO: 374130 - RNA, 32 nt, Human
cccuggagguggagguggagguugcagugagc

SEQ ID NO: 374131 - RNA, 24 nt, Human
cccuggagguggagguugcaguga

SEQ ID NO: 374132 - RNA, 32 nt, Human
cccuggagguggagguugcagugagccgagau

SEQ ID NO: 374133 - RNA, 32 nt, Human
cccuggagguggagguugcagugagcugagau

SEQ ID NO: 374134 - RNA, 24 nt, Human
cccuggagguggcgguugcaguga

SEQ ID NO: 374135 - RNA, 32 nt, Human
cccuggagguggcgguugcagugagcacagau

SEQ ID NO: 374136 - RNA, 21 nt, Human
cccuggagguguuuccugucu

SEQ ID NO: 374137 - RNA, 32 nt, Human
cccuggagguugaggcugcagugagcugggau

SEQ ID NO: 374138 - RNA, 24 nt, Human
cccuggagguugagguugcaguga

SEQ ID NO: 374139 - RNA, 32 nt, Human
cccuggagguugagguugcagugagcugagau

SEQ ID NO: 374140 - RNA, 23 nt, Human
cccuggaguccuggaguuaaggg

SEQ ID NO: 374141 - RNA, 23 nt, Human
cccuggagucuccaccuuuuccu

SEQ ID NO: 374142 - RNA, 23 nt, Human
cccuggagucugccucuccugcc

SEQ ID NO: 374143 - RNA, 32 nt, Human
cccuggagugguuucuuuacaguaauuucaac

SEQ ID NO: 374144 - RNA, 32 nt, Human
cccuggaguguucacuugcaagcugccaaaac

SEQ ID NO: 374145 - RNA, 24 nt, Human
cccuggaguucaaggcugcaguga

SEQ ID NO: 374146 - RNA, 22 nt, Human
cccuggaguucugcuucugucu

SEQ ID NO: 374147 - RNA, 24 nt, Human
cccuggaguuggagguugcaguga

SEQ ID NO: 374148 - RNA, 32 nt, Human
cccuggaguuggagguugcagugagcagagau

SEQ ID NO: 374149 - RNA, 32 nt, Human
cccuggaguuugaguccagccugggugacaua

SEQ ID NO: 374150 - RNA, 32 nt, Human
cccuggauagaacgugcauuuaaagaauauau

SEQ ID NO: 374151 - RNA, 32 nt, Human
cccuggauaucaccaccucauguuuccagagu

SEQ ID NO: 374152 - RNA, 32 nt, Human
cccuggaucugggguugcuggacuuggugcgu

SEQ ID NO: 374153 - RNA, 32 nt, Human
cccuggaugagguuuaggguggggagugccug

SEQ ID NO: 374154 - RNA, 32 nt, Human
cccuggaugccacccagugcagccuggcaccu

SEQ ID NO: 374155 - RNA, 32 nt, Human
cccuggaugggaacuccccuccucaacgccag

SEQ ID NO: 374156 - RNA, 23 nt, Human
cccuggauggggcuuccagcuca

SEQ ID NO: 374157 - RNA, 32 nt, Human
cccuggauuccccuguggccaggugaggcugg

SEQ ID NO: 374158 - RNA, 19 nt, Human
cccuggauuggcagccaga

SEQ ID NO: 374159 - RNA, 32 nt, Human
cccuggauugugaugcagccucgggacagggc

SEQ ID NO: 374160 - RNA, 20 nt, Human
cccuggauuucagggacuug

SEQ ID NO: 374161 - RNA, 32 nt, Human
cccuggauuuuccuccucucuccaucccugac

SEQ ID NO: 374162 - RNA, 31 nt, Human
cccuggcaacauaacaagacccugucucuac

SEQ ID NO: 374163 - RNA, 32 nt, Human
cccuggcaaccaggaauccacucuccauuucu

SEQ ID NO: 374164 - RNA, 32 nt, Human
cccuggcaagugaccaaauccucucugagcca

SEQ ID NO: 374165 - RNA, 32 nt, Human
cccuggcaaucccugggcucucuugcaccccu

SEQ ID NO: 374166 - RNA, 32 nt, Human
cccuggcacacaguaggcauuuaauaaguggc

SEQ ID NO: 374167 - RNA, 25 nt, Human
cccuggcaccugggagcacagugaa

SEQ ID NO: 374168 - RNA, 25 nt, Human
cccuggcacugcgggggccuggcca

SEQ ID NO: 374169 - RNA, 32 nt, Human
cccuggcagaacugaagagcggcaccgggccc

SEQ ID NO: 374170 - RNA, 32 nt, Human
cccuggcagagcuggguggcagcucuuccucc

SEQ ID NO: 374171 - RNA, 32 nt, Human
cccuggcagcagaggaagggguguggaggucc

SEQ ID NO: 374172 - RNA, 22 nt, Human
cccuggcagcaugaaaccccca

SEQ ID NO: 374173 - RNA, 32 nt, Human
cccuggcagccauccaaaauuugccuccaaga

SEQ ID NO: 374174 - RNA, 32 nt, Human
cccuggcagcccauguucuccucuuuucucac

SEQ ID NO: 374175 - RNA, 32 nt, Human
cccuggcagcgaugggucuccaggcaaguccc

SEQ ID NO: 374176 - RNA, 20 nt, Human
cccuggcagcugcagauccc

SEQ ID NO: 374177 - RNA, 32 nt, Human
cccuggcagcuuucuucaagagacuugcauaa

SEQ ID NO: 374178 - RNA, 32 nt, Human
cccuggcaggacacaggcacuuuuccaauggg

SEQ ID NO: 374179 - RNA, 19 nt, Human
cccuggcaggaggugggug

SEQ ID NO: 374180 - RNA, 32 nt, Human
cccuggcaggcaggcugugggcugguggggcu

SEQ ID NO: 374181 - RNA, 32 nt, Human
cccuggcaggcggcuggaaggccaggccuggu

SEQ ID NO: 374182 - RNA, 32 nt, Human
cccuggcagugagguggcaggagcagccuagu

SEQ ID NO: 374183 - RNA, 32 nt, Human
cccuggcagugccaccaccgcagccgccgggc

SEQ ID NO: 374184 - RNA, 32 nt, Human
cccuggcagugccaccaugaggagugcaaccg

SEQ ID NO: 374185 - RNA, 32 nt, Human
cccuggcaucgucuguguccacacagaugcua

SEQ ID NO: 374186 - RNA, 32 nt, Human
cccuggcaugugaaagucagucuuagaggaag

SEQ ID NO: 374187 - RNA, 32 nt, Human
cccuggcauucaacaaauauucacuggccccu

SEQ ID NO: 374188 - RNA, 18 nt, Human
cccuggcauucagagagg

SEQ ID NO: 374189 - RNA, 32 nt, Human
cccuggcauuggagagaagcccacugugguca

SEQ ID NO: 374190 - RNA, 32 nt, Human
cccuggcauuggccccagccuucugaaagccg

SEQ ID NO: 374191 - RNA, 19 nt, Human
cccuggccaaggaucugaa

SEQ ID NO: 374192 - RNA, 32 nt, Human
cccuggccacacagcaccuccuuggccaccuu

SEQ ID NO: 374193 - RNA, 22 nt, Human
cccuggccacccaccuccuacc

SEQ ID NO: 374194 - RNA, 21 nt, Human
cccuggccaccccgugcugcc

SEQ ID NO: 374195 - RNA, 23 nt, Human
cccuggccacccgaauuguucca

SEQ ID NO: 374196 - RNA, 32 nt, Human
cccuggccaccugaacuguaugggcacucuca

SEQ ID NO: 374197 - RNA, 32 nt, Human
cccuggccacugccccugccgcggaggcagcg

SEQ ID NO: 374198 - RNA, 32 nt, Human
cccuggccagcaccugcgggagcugcacuaca

SEQ ID NO: 374199 - RNA, 32 nt, Human
cccuggccagccuccaccugagcccagugagc

SEQ ID NO: 374200 - RNA, 32 nt, Human
cccuggccagcgcauguagguggugugaccug

SEQ ID NO: 374201 - RNA, 25 nt, Human
cccuggccagcgggcgugggacuga

SEQ ID NO: 374202 - RNA, 24 nt, Human
cccuggccagggccaucuccuguc

SEQ ID NO: 374203 - RNA, 32 nt, Human
cccuggccauccacacugaggucguggagcac

SEQ ID NO: 374204 - RNA, 32 nt, Human
cccuggccauccuccuggaauguggucugccc

SEQ ID NO: 374205 - RNA, 32 nt, Human
cccuggccaugggagcuaucucagccuaaugc

SEQ ID NO: 374206 - RNA, 32 nt, Human
cccuggcccaaggguccagccuccucucaccc

SEQ ID NO: 374207 - RNA, 23 nt, Human
cccuggcccacauugcacaugga

SEQ ID NO: 374208 - RNA, 32 nt, Human
cccuggcccagaggacucccguggugggcaca

SEQ ID NO: 374209 - RNA, 20 nt, Human
cccuggcccagccccagcag

SEQ ID NO: 374210 - RNA, 32 nt, Human
cccuggcccagccuguggccucagcaucucau

SEQ ID NO: 374211 - RNA, 32 nt, Human
cccuggcccagcugccucagagccuguccugc

SEQ ID NO: 374212 - RNA, 32 nt, Human
cccuggcccaggaaggcaggagacagaggcca

SEQ ID NO: 374213 - RNA, 32 nt, Human
cccuggcccaggaguugaaugccugaggacgu

SEQ ID NO: 374214 - RNA, 32 nt, Human
cccuggcccaggcuuggggcugcugggguugg

SEQ ID NO: 374215 - RNA, 32 nt, Human
cccuggcccauuccuccagcccuagacuccca

SEQ ID NO: 374216 - RNA, 32 nt, Human
cccuggccccacucugaggggcucagagcuga

SEQ ID NO: 374217 - RNA, 32 nt, Human
cccuggccccagacggagcccagaccuugcug

SEQ ID NO: 374218 - RNA, 25 nt, Human
cccuggccccagcccucuccugccu

SEQ ID NO: 374219 - RNA, 21 nt, Human
cccuggcccccuugagagagg

SEQ ID NO: 374220 - RNA, 32 nt, Human
cccuggccccgcccugcacuccagcucgcccc

SEQ ID NO: 374221 - RNA, 32 nt, Human
cccuggccccuccaauccuccccgcucugccg

SEQ ID NO: 374222 - RNA, 32 nt, Human
cccuggcccggacucuggccucccagaucccc

SEQ ID NO: 374223 - RNA, 32 nt, Human
cccuggcccgggaccuuggcauggcaguggug

SEQ ID NO: 374224 - RNA, 32 nt, Human
cccuggcccucugaguggugguggaggguggg

SEQ ID NO: 374225 - RNA, 32 nt, Human
cccuggcccugccucccgcgccccgcuccccu

SEQ ID NO: 374226 - RNA, 32 nt, Human
cccuggcccuguguucuagcacuuuguccauu

SEQ ID NO: 374227 - RNA, 21 nt, Human
cccuggcccuucaucugggaa

SEQ ID NO: 374228 - RNA, 32 nt, Human
cccuggccgcagcaggccagcacugcagaguu

SEQ ID NO: 374229 - RNA, 32 nt, Human
cccuggccgcggcagagcucccugccaccggc

SEQ ID NO: 374230 - RNA, 21 nt, Human
cccuggccgggcagcccccca

SEQ ID NO: 374231 - RNA, 32 nt, Human
cccuggccgggccugggcugcccuccagucgg

SEQ ID NO: 374232 - RNA, 32 nt, Human
cccuggccuaguauagugugacccugggacaa

SEQ ID NO: 374233 - RNA, 32 nt, Human
cccuggccuaguauagugugacccugggacua

SEQ ID NO: 374234 - RNA, 32 nt, Human
cccuggccuccacccaccccuagccagcagcu

SEQ ID NO: 374235 - RNA, 22 nt, Human
cccuggccuccccaccuccucc

SEQ ID NO: 374236 - RNA, 32 nt, Human
cccuggccuccccucucuucaccuuuagauuu

SEQ ID NO: 374237 - RNA, 22 nt, Human
cccuggccuccugcccuuguca

SEQ ID NO: 374238 - RNA, 20 nt, Human
cccuggccucggcccugccc

SEQ ID NO: 374239 - RNA, 32 nt, Human
cccuggccucugcacuccccugcugggugugg

SEQ ID NO: 374240 - RNA, 20 nt, Human
cccuggccucuuaccuguca

SEQ ID NO: 374241 - RNA, 20 nt, Human
cccuggccucuuccgcuguc

SEQ ID NO: 374242 - RNA, 32 nt, Human
cccuggccugcagguggcacaggacagggcau

SEQ ID NO: 374243 - RNA, 32 nt, Human
cccuggccugcucagagccucaguuuaccccu

SEQ ID NO: 374244 - RNA, 20 nt, Human
cccuggccuggacccaggag

SEQ ID NO: 374245 - RNA, 32 nt, Human
cccuggccugggaggaggucauaccccaccgu

SEQ ID NO: 374246 - RNA, 32 nt, Human
cccuggccugggagucggggucucagagaaac

SEQ ID NO: 374247 - RNA, 32 nt, Human
cccuggccuguggcccagccuggcuggccugc

SEQ ID NO: 374248 - RNA, 18 nt, Human
cccuggccuucugccuca

SEQ ID NO: 374249 - RNA, 20 nt, Human
cccuggccuugccagagugg

SEQ ID NO: 374250 - RNA, 32 nt, Human
cccuggccuugguugguguccucauccuuuuc

SEQ ID NO: 374251 - RNA, 24 nt, Human
cccuggccuugucuaccucuugcc

SEQ ID NO: 374252 - RNA, 32 nt, Human
cccuggccuuucacuccaguucugggugaggc

SEQ ID NO: 374253 - RNA, 32 nt, Human
cccuggccuuucucgccgaccucaugggucac

SEQ ID NO: 374254 - RNA, 22 nt, Human
cccuggccuuugggccaggagg

SEQ ID NO: 374255 - RNA, 32 nt, Human
cccuggcgcagcccuccagccugugcgcucac

SEQ ID NO: 374256 - RNA, 32 nt, Human
cccuggcgcugacccugccuccaugugcaaac

SEQ ID NO: 374257 - RNA, 32 nt, Human
cccuggcgcugccuuuccccacccucaccgaa

SEQ ID NO: 374258 - RNA, 24 nt, Human
cccuggcggcagagguugcaguga

SEQ ID NO: 374259 - RNA, 32 nt, Human
cccuggcggguaccugagcugugcucucaggg

SEQ ID NO: 374260 - RNA, 21 nt, Human
cccuggcguugccgucugcuu

SEQ ID NO: 374261 - RNA, 32 nt, Human
cccuggcuaacauggugaaacauggugaaacc

SEQ ID NO: 374262 - RNA, 32 nt, Human
cccuggcuacuucccuuccucccggggccuuc

SEQ ID NO: 374263 - RNA, 20 nt, Human
cccuggcuauuugggaccua

SEQ ID NO: 374264 - RNA, 32 nt, Human
cccuggcucaaggacuuagcauuucgucucau

SEQ ID NO: 374265 - RNA, 19 nt, Human
cccuggcucaggccugguc

SEQ ID NO: 374266 - RNA, 32 nt, Human
cccuggcuccacugaucaccucucuccuguga

SEQ ID NO: 374267 - RNA, 21 nt, Human
cccuggcucccaccucccgcc

SEQ ID NO: 374268 - RNA, 24 nt, Human
cccuggcuccccucccuccugccu

SEQ ID NO: 374269 - RNA, 32 nt, Human
cccuggcuccugcagguccacacaccuuccag

SEQ ID NO: 374270 - RNA, 32 nt, Human
cccuggcucgcugucccgcagccugggcgggg

SEQ ID NO: 374271 - RNA, 32 nt, Human
cccuggcucucccagagggacauggcacuggc

SEQ ID NO: 374272 - RNA, 32 nt, Human
cccuggcucugccaccacuagccugucaccug

SEQ ID NO: 374273 - RNA, 32 nt, Human
cccuggcucugccuccccacccuggggugggg

SEQ ID NO: 374274 - RNA, 32 nt, Human
cccuggcucuuggggugguccaugccuuuacc

SEQ ID NO: 374275 - RNA, 32 nt, Human
cccuggcugcaacccagacaauggcgagaucu

SEQ ID NO: 374276 - RNA, 22 nt, Human
cccuggcugcacuuccuugccu

SEQ ID NO: 374277 - RNA, 32 nt, Human
cccuggcugcagcugcagcgcgagccaugcgc

SEQ ID NO: 374278 - RNA, 32 nt, Human
cccuggcugcagcuguacaccaccugugcccc

SEQ ID NO: 374279 - RNA, 18 nt, Human
cccuggcugcccagcagc

SEQ ID NO: 374280 - RNA, 32 nt, Human
cccuggcugcccucagcuuucgcugaucugcc

SEQ ID NO: 374281 - RNA, 32 nt, Human
cccuggcugcccuggacugugcagagaugccu

SEQ ID NO: 374282 - RNA, 32 nt, Human
cccuggcugccuggaggacccuggguaggucc

SEQ ID NO: 374283 - RNA, 21 nt, Human
cccuggcugcugaguugcagg

SEQ ID NO: 374284 - RNA, 32 nt, Human
cccuggcugcuggcccuuugcccuugaauaug

SEQ ID NO: 374285 - RNA, 20 nt, Human
cccuggcuggagugcaaugg

SEQ ID NO: 374286 - RNA, 20 nt, Human
cccuggcuggagugcaguag

SEQ ID NO: 374287 - RNA, 22 nt, Human
cccuggcuggagugcaguagug

SEQ ID NO: 374288 - RNA, 19 nt, Human
cccuggcuggcagcgcgga

SEQ ID NO: 374289 - RNA, 32 nt, Human
cccuggcuggcuguucagcugucuacuaagcc

SEQ ID NO: 374290 - RNA, 32 nt, Human
cccuggcugggacugaaccacccagagcggag

SEQ ID NO: 374291 - RNA, 32 nt, Human
cccuggcuggguuaugggggagggcaggguaa

SEQ ID NO: 374292 - RNA, 32 nt, Human
cccuggcuggucucggacuccugggcucaagc

SEQ ID NO: 374293 - RNA, 32 nt, Human
cccuggcuguccccucucccucaguccuuccu

SEQ ID NO: 374294 - RNA, 23 nt, Human
cccuggcugugaaaagaaucuca

SEQ ID NO: 374295 - RNA, 32 nt, Human
cccuggcuuagaugcccagcuguggcugggua

SEQ ID NO: 374296 - RNA, 23 nt, Human
cccuggcuuauucuugggaucua

SEQ ID NO: 374297 - RNA, 32 nt, Human
cccuggcuuccaaggcucccguacugucugug

SEQ ID NO: 374298 - RNA, 20 nt, Human
cccuggcuucucugguucuu

SEQ ID NO: 374299 - RNA, 32 nt, Human
cccuggcuugaaauuuuuccacuuugguuauc

SEQ ID NO: 374300 - RNA, 32 nt, Human
cccuggcuuuggccauuauguagauguuuuua

SEQ ID NO: 374301 - RNA, 32 nt, Human
cccuggcuuuuagaggcacacacacaaaaaga

SEQ ID NO: 374302 - RNA, 32 nt, Human
cccugggaagacagggcaugggcuuacagaga

SEQ ID NO: 374303 - RNA, 18 nt, Human
cccugggaagcagcacag

SEQ ID NO: 374304 - RNA, 22 nt, Human
cccugggaagcuuuucuugacu

SEQ ID NO: 374305 - RNA, 27 nt, Human
cccugggaaggagcgcagcccacccgg

SEQ ID NO: 374306 - RNA, 18 nt, Human
cccugggaaggaggggug

SEQ ID NO: 374307 - RNA, 21 nt, Human
cccugggacacacccuaucca

SEQ ID NO: 374308 - RNA, 32 nt, Human
cccugggacaccuuuguuccagccugguuucc

SEQ ID NO: 374309 - RNA, 32 nt, Human
cccugggacagagaacgguguggcuuuggcug

SEQ ID NO: 374310 - RNA, 32 nt, Human
cccugggacaucugugguggcuuuugucgcgc

SEQ ID NO: 374311 - RNA, 32 nt, Human
cccugggaccaccauucccuggcuacucucuc

SEQ ID NO: 374312 - RNA, 22 nt, Human
cccugggaccaucuuucugccu

SEQ ID NO: 374313 - RNA, 32 nt, Human
cccugggacccuggggccucaggcuucuggga

SEQ ID NO: 374314 - RNA, 32 nt, Human
cccugggaccucccccauccuuuuugccucca

SEQ ID NO: 374315 - RNA, 24 nt, Human
cccugggacgguccguuuccugcc

SEQ ID NO: 374316 - RNA, 22 nt, Human
cccugggagaagaccuagccag

SEQ ID NO: 374317 - RNA, 21 nt, Human
cccugggagacauccuugucu

SEQ ID NO: 374318 - RNA, 32 nt, Human
cccugggagacuccuugugcuauuucccacuc

SEQ ID NO: 374319 - RNA, 32 nt, Human
cccugggagaggggcagugagaguuuguugaa

SEQ ID NO: 374320 - RNA, 32 nt, Human
cccugggagagggggccuuucucccaccauca

SEQ ID NO: 374321 - RNA, 18 nt, Human
cccugggagcacagagag

SEQ ID NO: 374322 - RNA, 20 nt, Human
cccugggagcacagcccauc

SEQ ID NO: 374323 - RNA, 21 nt, Human
cccugggagcagcccgggacc

SEQ ID NO: 374324 - RNA, 32 nt, Human
cccugggagcccagggguuaggaagggaagau

SEQ ID NO: 374325 - RNA, 32 nt, Human
cccugggagccgccaccucccuuuccccaaga

SEQ ID NO: 374326 - RNA, 22 nt, Human
cccugggagccgccugcuucuu

SEQ ID NO: 374327 - RNA, 24 nt, Human
cccugggagcggagauugcaguga

SEQ ID NO: 374328 - RNA, 32 nt, Human
cccugggagcggagauugcagugagcugagau

SEQ ID NO: 374329 - RNA, 17 nt, Human
cccugggagcucuggga

SEQ ID NO: 374330 - RNA, 32 nt, Human
cccugggaggagagaagggggcagagucuucc

SEQ ID NO: 374331 - RNA, 25 nt, Human
cccugggaggcagagguugcaguga

SEQ ID NO: 374332 - RNA, 32 nt, Human
cccugggaggcagagguugcagugagucgaga

SEQ ID NO: 374333 - RNA, 24 nt, Human
cccugggaggcccaaccuccugcc

SEQ ID NO: 374334 - RNA, 32 nt, Human
cccugggaggccccuucucucccugccagagg

SEQ ID NO: 374335 - RNA, 32 nt, Human
cccugggaggcuggagccccaggugcaguggc

SEQ ID NO: 374336 - RNA, 20 nt, Human
cccugggagggacccaucca

SEQ ID NO: 374337 - RNA, 32 nt, Human
cccugggagggugguuccuugggcccuggcag

SEQ ID NO: 374338 - RNA, 32 nt, Human
cccugggaggucaaggcugcagugagcugcaa

SEQ ID NO: 374339 - RNA, 32 nt, Human
cccugggaggucuugugaggucacacagaggu

SEQ ID NO: 374340 - RNA, 32 nt, Human
cccugggagguggagguggcagugagccgaga

SEQ ID NO: 374341 - RNA, 21 nt, Human
cccugggagugagggugggug

SEQ ID NO: 374342 - RNA, 20 nt, Human
cccugggaguuuccugaggg

SEQ ID NO: 374343 - RNA, 32 nt, Human
cccugggauacuccccucccagggugucuggu

SEQ ID NO: 374344 - RNA, 25 nt, Human
cccugggauagauccaucuccuucu

SEQ ID NO: 374345 - RNA, 32 nt, Human
cccugggauccagcacccauggaagcuucugc

SEQ ID NO: 374346 - RNA, 32 nt, Human
cccugggaucuguacccaggaccuggagaaua

SEQ ID NO: 374347 - RNA, 32 nt, Human
cccugggauggcacuggcaggacagcuggaca

SEQ ID NO: 374348 - RNA, 32 nt, Human
cccugggauguugggcuuccucucucaggagc

SEQ ID NO: 374349 - RNA, 22 nt, Human
cccugggcaaggggauggggcu

SEQ ID NO: 374350 - RNA, 32 nt, Human
cccugggcaccgugcucacccugggugcaccu

SEQ ID NO: 374351 - RNA, 32 nt, Human
cccugggcacguaaggcaaaauauugccgguu

SEQ ID NO: 374352 - RNA, 32 nt, Human
cccugggcagagccccuuaaagcugcugucac

SEQ ID NO: 374353 - RNA, 25 nt, Human
cccugggcagaggaaauugcaguga

SEQ ID NO: 374354 - RNA, 32 nt, Human
cccugggcagaggccgcccucgcuccacgcaa

SEQ ID NO: 374355 - RNA, 21 nt, Human
cccugggcagcagccccccag

SEQ ID NO: 374356 - RNA, 19 nt, Human
cccugggcagcagggccag

SEQ ID NO: 374357 - RNA, 25 nt, Human
cccugggcagcggagguugcaguga

SEQ ID NO: 374358 - RNA, 22 nt, Human
cccugggcaggaggucagggga

SEQ ID NO: 374359 - RNA, 32 nt, Human
cccugggcaggcaucggagcuuccagccuggg

SEQ ID NO: 374360 - RNA, 32 nt, Human
cccugggcaggcugaaagauggcggcggcguc

SEQ ID NO: 374361 - RNA, 32 nt, Human
cccugggcaucagaacagccugcccugggcac

SEQ ID NO: 374362 - RNA, 32 nt, Human
cccugggcaucuguccuugccuaggugauuuu

SEQ ID NO: 374363 - RNA, 32 nt, Human
cccugggcauggagcaccuguccaacaaccgc

SEQ ID NO: 374364 - RNA, 32 nt, Human
cccugggccacccuucacgcuggcuuccagcg

SEQ ID NO: 374365 - RNA, 18 nt, Human
cccugggccagacuggaa

SEQ ID NO: 374366 - RNA, 32 nt, Human
cccugggccagcugcaucacugccugugccuu

SEQ ID NO: 374367 - RNA, 23 nt, Human
cccugggcccagauucuuugucu

SEQ ID NO: 374368 - RNA, 32 nt, Human
cccugggcccagcuccccucccugccucuuug

SEQ ID NO: 374369 - RNA, 21 nt, Human
cccugggcccauuuccucucu

SEQ ID NO: 374370 - RNA, 22 nt, Human
cccugggccccagugagagggg

SEQ ID NO: 374371 - RNA, 32 nt, Human
cccugggccccguggaacuccagccugcgcca

SEQ ID NO: 374372 - RNA, 21 nt, Human
cccugggccccuccccgggga

SEQ ID NO: 374373 - RNA, 32 nt, Human
cccugggcccugagccggcagcagaaauauga

SEQ ID NO: 374374 - RNA, 21 nt, Human
cccugggcccugcuccagggg

SEQ ID NO: 374375 - RNA, 22 nt, Human
cccugggcccuggagcuuaggg

SEQ ID NO: 374376 - RNA, 20 nt, Human
cccugggcccuggggacagg

SEQ ID NO: 374377 - RNA, 23 nt, Human
cccugggcccuggucuuccucca

SEQ ID NO: 374378 - RNA, 32 nt, Human
cccugggccgcaacuuccgagccucccagggc

SEQ ID NO: 374379 - RNA, 21 nt, Human
cccugggccucacuuucuucu

SEQ ID NO: 374380 - RNA, 32 nt, Human
cccugggccuccugccuggcacuucauguuuc

SEQ ID NO: 374381 - RNA, 22 nt, Human
cccugggccucucucccgccca

SEQ ID NO: 374382 - RNA, 24 nt, Human
cccugggccucugcucucuugccu

SEQ ID NO: 374383 - RNA, 32 nt, Human
cccugggccugcagagaguccuguuagcagcg

SEQ ID NO: 374384 - RNA, 32 nt, Human
cccugggccugcccaccuuccccagcccccgc

SEQ ID NO: 374385 - RNA, 15 nt, Human
cccugggccugguca

SEQ ID NO: 374386 - RNA, 22 nt, Human
cccugggccuguccuucugccu

SEQ ID NO: 374387 - RNA, 21 nt, Human
cccugggccuugccuucaggg

SEQ ID NO: 374388 - RNA, 25 nt, Human
cccugggccuuuccaucuccuguuu

SEQ ID NO: 374389 - RNA, 32 nt, Human
cccugggcgcccuccugcugcucuggggccca

SEQ ID NO: 374390 - RNA, 25 nt, Human
cccugggcggcaaagguugcaguga

SEQ ID NO: 374391 - RNA, 32 nt, Human
cccugggcgucgagacaggaaggcagggcgca

SEQ ID NO: 374392 - RNA, 32 nt, Human
cccugggcgucugaggcccugauccgggcggg

SEQ ID NO: 374393 - RNA, 22 nt, Human
cccugggcuaggcagugugacc

SEQ ID NO: 374394 - RNA, 32 nt, Human
cccugggcucaagcaagccuccugccuuggcc

SEQ ID NO: 374395 - RNA, 32 nt, Human
cccugggcucaagcaauccucccacuucagcc

SEQ ID NO: 374396 - RNA, 32 nt, Human
cccugggcucaagcaguccucccaccucaguc

SEQ ID NO: 374397 - RNA, 32 nt, Human
cccugggcucaagggauccucccaucucagcu

SEQ ID NO: 374398 - RNA, 32 nt, Human
cccugggcucaagugauccuccugccucagcc

SEQ ID NO: 374399 - RNA, 32 nt, Human
cccugggcucaaguguuccuccugccucaucc

SEQ ID NO: 374400 - RNA, 32 nt, Human
cccugggcucagagccagcccagagggaagca

SEQ ID NO: 374401 - RNA, 32 nt, Human
cccugggcucaguccuagcugcauggggugca

SEQ ID NO: 374402 - RNA, 32 nt, Human
cccugggcucccaggaggcaguagugugugcc

SEQ ID NO: 374403 - RNA, 32 nt, Human
cccugggcucccaucucuucagucuagaggcg

SEQ ID NO: 374404 - RNA, 21 nt, Human
cccugggcuccguuuccuuca

SEQ ID NO: 374405 - RNA, 26 nt, Human
cccugggcucuacccccaaaaccuuc

SEQ ID NO: 374406 - RNA, 22 nt, Human
cccugggcucuccuucuugccu

SEQ ID NO: 374407 - RNA, 23 nt, Human
cccugggcucugauaaaacuuca

SEQ ID NO: 374408 - RNA, 21 nt, Human
cccugggcucugauuuguccu

SEQ ID NO: 374409 - RNA, 32 nt, Human
cccugggcucugcagagaacacacagagagaa

SEQ ID NO: 374410 - RNA, 23 nt, Human
cccugggcucuggccaacccuca

SEQ ID NO: 374411 - RNA, 32 nt, Human
cccugggcucugggcccugcugcucuagcccc

SEQ ID NO: 374412 - RNA, 32 nt, Human
cccugggcugccucucuaggcuucgcuguuca

SEQ ID NO: 374413 - RNA, 23 nt, Human
cccugggcugcuggccuggagga

SEQ ID NO: 374414 - RNA, 23 nt, Human
cccugggcuggcugcacagagga

SEQ ID NO: 374415 - RNA, 22 nt, Human
cccugggcuggggcccacagga

SEQ ID NO: 374416 - RNA, 32 nt, Human
cccugggcuucuccaccaaagugcugaaugcc

SEQ ID NO: 374417 - RNA, 32 nt, Human
cccugggcuugcgcuuucuuucuuugcagcca

SEQ ID NO: 374418 - RNA, 32 nt, Human
cccugggcuuucacgggccccauuccaccgcc

SEQ ID NO: 374419 - RNA, 32 nt, Human
cccugggcuuucauuuucuccucccagccccc

SEQ ID NO: 374420 - RNA, 32 nt, Human
cccugggcuuuccggcccucccuacuuuuccu

SEQ ID NO: 374421 - RNA, 23 nt, Human
cccuggggaaccuacuuucugcu

SEQ ID NO: 374422 - RNA, 32 nt, Human
cccuggggaaggcacaggcucaggagggcucu

SEQ ID NO: 374423 - RNA, 32 nt, Human
cccuggggacagggacuaugaaguggggaaaa

SEQ ID NO: 374424 - RNA, 32 nt, Human
cccuggggaccacccugggacucuaaccaagc

SEQ ID NO: 374425 - RNA, 23 nt, Human
cccuggggaccagucuucuguuu

SEQ ID NO: 374426 - RNA, 32 nt, Human
cccuggggacuaggaggaagggggcagagaga

SEQ ID NO: 374427 - RNA, 32 nt, Human
cccuggggacugcccuccauagccugucccga

SEQ ID NO: 374428 - RNA, 23 nt, Human
cccuggggacuucaccugcugcc

SEQ ID NO: 374429 - RNA, 24 nt, Human
cccuggggagaggcuuuccugccu

SEQ ID NO: 374430 - RNA, 21 nt, Human
cccuggggagcccuucagccu

SEQ ID NO: 374431 - RNA, 28 nt, Human
cccuggggagcuccuccgccuuuuggcu

SEQ ID NO: 374432 - RNA, 32 nt, Human
cccuggggagcuggaccaggagguggaggcuc

SEQ ID NO: 374433 - RNA, 20 nt, Human
cccuggggaggaccccugcc

SEQ ID NO: 374434 - RNA, 32 nt, Human
cccuggggaggcagaggaggaugaugaggaag

SEQ ID NO: 374435 - RNA, 32 nt, Human
cccuggggaggcagaggguacccaggggacug

SEQ ID NO: 374436 - RNA, 32 nt, Human
cccuggggaggggacccagugcagugaugccc

SEQ ID NO: 374437 - RNA, 19 nt, Human
cccuggggcacccucuugu

SEQ ID NO: 374438 - RNA, 22 nt, Human
cccuggggcaggaccccagccu

SEQ ID NO: 374439 - RNA, 24 nt, Human
cccuggggcauccaccuuccugcc

SEQ ID NO: 374440 - RNA, 21 nt, Human
cccuggggcaucccuuugccu

SEQ ID NO: 374441 - RNA, 32 nt, Human
cccuggggccaacggcaacagcaugggccuca

SEQ ID NO: 374442 - RNA, 22 nt, Human
cccuggggccagcaccccagcc

SEQ ID NO: 374443 - RNA, 20 nt, Human
cccuggggccaggcucugcc

SEQ ID NO: 374444 - RNA, 24 nt, Human
cccuggggcccaccagccccugcc

SEQ ID NO: 374445 - RNA, 22 nt, Human
cccuggggcccagccccuguuu

SEQ ID NO: 374446 - RNA, 23 nt, Human
cccuggggccccaggauccaccu

SEQ ID NO: 374447 - RNA, 20 nt, Human
cccuggggcccccaccagcc

SEQ ID NO: 374448 - RNA, 23 nt, Human
cccuggggcccccaccucacccu

SEQ ID NO: 374449 - RNA, 20 nt, Human
cccuggggccccuccccucc

SEQ ID NO: 374450 - RNA, 21 nt, Human
cccuggggcccgacuccugcu

SEQ ID NO: 374451 - RNA, 22 nt, Human
cccuggggcccgugccuggccu

SEQ ID NO: 374452 - RNA, 19 nt, Human
cccuggggcccuccaggua

SEQ ID NO: 374453 - RNA, 20 nt, Human
cccuggggcccucucccgcc

SEQ ID NO: 374454 - RNA, 24 nt, Human
cccuggggcccuggccuucugccu

SEQ ID NO: 374455 - RNA, 24 nt, Human
cccuggggccucccaccccagccu

SEQ ID NO: 374456 - RNA, 24 nt, Human
cccuggggccuccccagucucccu

SEQ ID NO: 374457 - RNA, 19 nt, Human
cccuggggccuccccugcc

SEQ ID NO: 374458 - RNA, 23 nt, Human
cccuggggccucugaccccaccu

SEQ ID NO: 374459 - RNA, 32 nt, Human
cccuggggccugcucuucucuggcagaguggc

SEQ ID NO: 374460 - RNA, 21 nt, Human
cccuggggccuggaccugccu

SEQ ID NO: 374461 - RNA, 28 nt, Human
cccuggggccuggaccugccuccugccu

SEQ ID NO: 374462 - RNA, 32 nt, Human
cccuggggccugggggcaguuugagccuccuc

SEQ ID NO: 374463 - RNA, 24 nt, Human
cccuggggccuguacugccugcuu

SEQ ID NO: 374464 - RNA, 25 nt, Human
cccuggggcgaggccaucucugccu

SEQ ID NO: 374465 - RNA, 21 nt, Human
cccuggggcgcaaacauuccc

SEQ ID NO: 374466 - RNA, 32 nt, Human
cccuggggcuagagguggaggaggcaguccug

SEQ ID NO: 374467 - RNA, 21 nt, Human
cccuggggcucccaauccccu

SEQ ID NO: 374468 - RNA, 21 nt, Human
cccuggggcucccuccuagcc

SEQ ID NO: 374469 - RNA, 21 nt, Human
cccuggggcucggccuccucc

SEQ ID NO: 374470 - RNA, 22 nt, Human
cccuggggcucuacuaccugcu

SEQ ID NO: 374471 - RNA, 23 nt, Human
cccuggggcucucccuccgcgcc

SEQ ID NO: 374472 - RNA, 32 nt, Human
cccuggggcugaagauggcagaagcauucugg

SEQ ID NO: 374473 - RNA, 21 nt, Human
cccuggggcugaggaggcagg

SEQ ID NO: 374474 - RNA, 32 nt, Human
cccuggggcugcugaaaaacucaggccugugg

SEQ ID NO: 374475 - RNA, 19 nt, Human
cccuggggcuggcccugcc

SEQ ID NO: 374476 - RNA, 21 nt, Human
cccuggggcuggcuuaggagg

SEQ ID NO: 374477 - RNA, 22 nt, Human
cccuggggcugggggagggauu

SEQ ID NO: 374478 - RNA, 22 nt, Human
cccuggggcuuccaucccaacc

SEQ ID NO: 374479 - RNA, 25 nt, Human
cccuggggcuuccuuugcucugccu

SEQ ID NO: 374480 - RNA, 20 nt, Human
cccuggggcuucuccugacc

SEQ ID NO: 374481 - RNA, 22 nt, Human
cccuggggcuucugaccccccu

SEQ ID NO: 374482 - RNA, 21 nt, Human
cccuggggcuugccgcugccu

SEQ ID NO: 374483 - RNA, 22 nt, Human
cccuggggcuuggcuccagccu

SEQ ID NO: 374484 - RNA, 22 nt, Human
cccuggggcuuuaacuccugcu

SEQ ID NO: 374485 - RNA, 32 nt, Human
cccugggggaggaagagaggccaaguucagag

SEQ ID NO: 374486 - RNA, 21 nt, Human
cccugggggcaccuuccuccu

SEQ ID NO: 374487 - RNA, 32 nt, Human
cccugggggcagcagaaggcugagaggaguag

SEQ ID NO: 374488 - RNA, 32 nt, Human
cccugggggcagccacccucccgccugucggc

SEQ ID NO: 374489 - RNA, 21 nt, Human
cccugggggcccagcccaccc

SEQ ID NO: 374490 - RNA, 21 nt, Human
cccugggggcucagcugagag

SEQ ID NO: 374491 - RNA, 21 nt, Human
cccugggggcuccucuugccu

SEQ ID NO: 374492 - RNA, 23 nt, Human
cccugggggcugguccuuugccu

SEQ ID NO: 374493 - RNA, 23 nt, Human
cccuggggggcccaccucuugcc

SEQ ID NO: 374494 - RNA, 20 nt, Human
cccuggggggccccuccugu

SEQ ID NO: 374495 - RNA, 24 nt, Human
cccugggggguggucuccaugccu

SEQ ID NO: 374496 - RNA, 32 nt, Human
cccugggggugaggauuccagaggagucaauu

SEQ ID NO: 374497 - RNA, 32 nt, Human
cccugggggugcucagguucacuugauugucu

SEQ ID NO: 374498 - RNA, 24 nt, Human
cccugggguacuacucuccagcuu

SEQ ID NO: 374499 - RNA, 20 nt, Human
cccugggguagccuccuauc

SEQ ID NO: 374500 - RNA, 24 nt, Human
cccugggguccauccccucuugcc

SEQ ID NO: 374501 - RNA, 21 nt, Human
cccugggguccccacagcugc

SEQ ID NO: 374502 - RNA, 23 nt, Human
cccugggguccccacucccuguc

SEQ ID NO: 374503 - RNA, 24 nt, Human
cccugggguccccuuauccucccu

SEQ ID NO: 374504 - RNA, 32 nt, Human
cccuggggucccuguccuccuauccugacucc

SEQ ID NO: 374505 - RNA, 23 nt, Human
cccuggggucuggcucacugccu

SEQ ID NO: 374506 - RNA, 24 nt, Human
cccuggggucugggcacucugccu

SEQ ID NO: 374507 - RNA, 21 nt, Human
cccuggggucugguccucgcc

SEQ ID NO: 374508 - RNA, 25 nt, Human
cccuggggucuguaugccuuugucu

SEQ ID NO: 374509 - RNA, 32 nt, Human
cccuggggugaaggccacugagagccagcaag

SEQ ID NO: 374510 - RNA, 22 nt, Human
cccuggggugaccccccagccu

SEQ ID NO: 374511 - RNA, 20 nt, Human
cccuggggugcccuccuucc

SEQ ID NO: 374512 - RNA, 32 nt, Human
cccuggggugcugcugucuuggagagcacagc

SEQ ID NO: 374513 - RNA, 32 nt, Human
cccugggguggaagugggguaggggaagagga

SEQ ID NO: 374514 - RNA, 26 nt, Human
cccugggguggccccgucccuuguuu

SEQ ID NO: 374515 - RNA, 32 nt, Human
cccuggggugggaacccaggagguggaguggc

SEQ ID NO: 374516 - RNA, 22 nt, Human
cccuggggugggucuccuugcc

SEQ ID NO: 374517 - RNA, 22 nt, Human
cccugggguuuccacacaggcc

SEQ ID NO: 374518 - RNA, 19 nt, Human
cccugggguuuccacaggc

SEQ ID NO: 374519 - RNA, 20 nt, Human
cccugggguuuuccacucuu

SEQ ID NO: 374520 - RNA, 19 nt, Human
cccugggucagcagccagg

SEQ ID NO: 374521 - RNA, 32 nt, Human
cccugggucaugcccacagcgagggcccagcu

SEQ ID NO: 374522 - RNA, 32 nt, Human
cccugggucaugcuguagggaaagggucuuag

SEQ ID NO: 374523 - RNA, 20 nt, Human
cccugggucccacuccugcc

SEQ ID NO: 374524 - RNA, 32 nt, Human
cccuggguccugcacgccgccugguggcaggc

SEQ ID NO: 374525 - RNA, 32 nt, Human
cccugggucucgagccugcgggccuuuggacu

SEQ ID NO: 374526 - RNA, 24 nt, Human
cccugggucucucauuuccuggcu

SEQ ID NO: 374527 - RNA, 32 nt, Human
cccugggucugagggcccuaggucauggagag

SEQ ID NO: 374528 - RNA, 32 nt, Human
cccugggugaagauggggagacagugcgcgua

SEQ ID NO: 374529 - RNA, 32 nt, Human
cccugggugacacccacccuaggcuuccuccu

SEQ ID NO: 374530 - RNA, 32 nt, Human
cccugggugagcuccgccuggcacugggcacc

SEQ ID NO: 374531 - RNA, 32 nt, Human
cccugggugagguggguccucuggccucaggg

SEQ ID NO: 374532 - RNA, 32 nt, Human
cccugggugccaggcuguccggagccaggccu

SEQ ID NO: 374533 - RNA, 32 nt, Human
cccuggguggcggcuuccugugguguuugugg

SEQ ID NO: 374534 - RNA, 25 nt, Human
cccugggugucgucucuuucugccu

SEQ ID NO: 374535 - RNA, 32 nt, Human
cccuggguguucugucucuccuucccucccuu

SEQ ID NO: 374536 - RNA, 27 nt, Human
cccuggguuauaaggaggcuuaggaga

SEQ ID NO: 374537 - RNA, 32 nt, Human
cccuggguucaaaugauccuccugccucagcc

SEQ ID NO: 374538 - RNA, 27 nt, Human
cccuggguucaagccauucuccugucu

SEQ ID NO: 374539 - RNA, 32 nt, Human
cccuggguucaagcgauucuccugccucagcc

SEQ ID NO: 374540 - RNA, 32 nt, Human
cccuggguucaagcgauucuccugccugagcc

SEQ ID NO: 374541 - RNA, 32 nt, Human
cccuggguucaagugauucucuugucucagcc

SEQ ID NO: 374542 - RNA, 32 nt, Human
cccuggguucuagggcagggauacuccugcca

SEQ ID NO: 374543 - RNA, 23 nt, Human
cccuggguucugccgucuugccu

SEQ ID NO: 374544 - RNA, 21 nt, Human
cccuggguucugccuccgccu

SEQ ID NO: 374545 - RNA, 26 nt, Human
cccuggguuucucuuacucaaucccu

SEQ ID NO: 374546 - RNA, 21 nt, Human
cccugguaaccagcccaguca

SEQ ID NO: 374547 - RNA, 32 nt, Human
cccugguacacccuccuuauaguggguauagu

SEQ ID NO: 374548 - RNA, 32 nt, Human
cccugguagauuugacuugcucuugccucacu

SEQ ID NO: 374549 - RNA, 32 nt, Human
cccugguauguaccucuggcaaaugccccacc

SEQ ID NO: 374550 - RNA, 32 nt, Human
cccuggucacuuccaguucaucucucacugcc

SEQ ID NO: 374551 - RNA, 32 nt, Human
cccuggucaggugagguaagagacugaccucc

SEQ ID NO: 374552 - RNA, 32 nt, Human
cccugguccagcccgugcuggccggcaaaggu

SEQ ID NO: 374553 - RNA, 32 nt, Human
cccugguccagccucggaaccugagcgcccuu

SEQ ID NO: 374554 - RNA, 32 nt, Human
cccugguccaggagaaguaucccaaggccacc

SEQ ID NO: 374555 - RNA, 32 nt, Human
cccugguccaggggacaguaagaggcagccgg

SEQ ID NO: 374556 - RNA, 32 nt, Human
cccugguccauccuuucugucuccagcuguuu

SEQ ID NO: 374557 - RNA, 32 nt, Human
cccugguccaugccagguuuuccucuucuggg

SEQ ID NO: 374558 - RNA, 32 nt, Human
cccuggucccugagcccugccucggcugccuc

SEQ ID NO: 374559 - RNA, 32 nt, Human
cccugguccugagcagagaggaagggaugggu

SEQ ID NO: 374560 - RNA, 32 nt, Human
cccugguccugaugcucccuguaaagguggcu

SEQ ID NO: 374561 - RNA, 32 nt, Human
cccuggucuaacuugggaucugggaauggaag

SEQ ID NO: 374562 - RNA, 32 nt, Human
cccuggucucacugcugaccugggcugguccc

SEQ ID NO: 374563 - RNA, 32 nt, Human
cccuggucucagagaacacuuagaugggggug

SEQ ID NO: 374564 - RNA, 22 nt, Human
cccuggucucagcccuauccag

SEQ ID NO: 374565 - RNA, 32 nt, Human
cccuggucuccaccauucuauguccacacuuc

SEQ ID NO: 374566 - RNA, 20 nt, Human
cccuggucucugcccaucca

SEQ ID NO: 374567 - RNA, 32 nt, Human
cccuggucugaaggcaggaggggaggagcagu

SEQ ID NO: 374568 - RNA, 32 nt, Human
cccuggucuucggccggguccccagcccccgc

SEQ ID NO: 374569 - RNA, 23 nt, Human
cccuggucuuggaccaguagagg

SEQ ID NO: 374570 - RNA, 32 nt, Human
cccuggugaagaggaggaagaagaggugugga

SEQ ID NO: 374571 - RNA, 32 nt, Human
cccuggugacagccaccacgccuuggccuagg

SEQ ID NO: 374572 - RNA, 32 nt, Human
cccuggugacaucauauauggaccugggaaug

SEQ ID NO: 374573 - RNA, 32 nt, Human
cccuggugaccaccagccuccuuucagaaacc

SEQ ID NO: 374574 - RNA, 32 nt, Human
cccuggugagagggccgggcagaggggcagau

SEQ ID NO: 374575 - RNA, 32 nt, Human
cccuggugagaugucugaaggucccugaggcc

SEQ ID NO: 374576 - RNA, 32 nt, Human
cccuggugaggucggagccagagggcuggggg

SEQ ID NO: 374577 - RNA, 19 nt, Human
cccuggugcagccagcccu

SEQ ID NO: 374578 - RNA, 32 nt, Human
cccuggugcccagccaggguggucugcaugga

SEQ ID NO: 374579 - RNA, 19 nt, Human
cccuggugcugcagcacuu

SEQ ID NO: 374580 - RNA, 32 nt, Human
cccuggugcugggccuggcaucugcagccucc

SEQ ID NO: 374581 - RNA, 32 nt, Human
cccuggugcuguggaacaaccagcucacgcac

SEQ ID NO: 374582 - RNA, 22 nt, Human
cccugguggauccuuucuguuu

SEQ ID NO: 374583 - RNA, 32 nt, Human
cccugguggauggggaaaagcacuuuccuggu

SEQ ID NO: 374584 - RNA, 32 nt, Human
cccugguggcauggcccuguuuccuguugaua

SEQ ID NO: 374585 - RNA, 32 nt, Human
cccugguggcuggagcaggggugcaccugcug

SEQ ID NO: 374586 - RNA, 20 nt, Human
cccuggugguggccucgcca

SEQ ID NO: 374587 - RNA, 26 nt, Human
cccuggugucacauggggccuggcca

SEQ ID NO: 374588 - RNA, 21 nt, Human
cccuggugucccugccuggcc

SEQ ID NO: 374589 - RNA, 22 nt, Human
cccuggugugccauuuucucuu

SEQ ID NO: 374590 - RNA, 32 nt, Human
cccugguguggacacugccagcggcugcagcc

SEQ ID NO: 374591 - RNA, 32 nt, Human
cccugguuacucuggugcuguccuguuuuacu

SEQ ID NO: 374592 - RNA, 24 nt, Human
cccugguucaaacaauuccugccu

SEQ ID NO: 374593 - RNA, 20 nt, Human
cccugguucaccuccuucca

SEQ ID NO: 374594 - RNA, 32 nt, Human
cccugguucaggagacagacagcggacggauc

SEQ ID NO: 374595 - RNA, 31 nt, Human
cccugguuccgccagcaccuaucccacugau

SEQ ID NO: 374596 - RNA, 32 nt, Human
cccugguuccuaggaagacagaguuguucucc

SEQ ID NO: 374597 - RNA, 32 nt, Human
cccugguugagaaacauugcuuuagacaaauu

SEQ ID NO: 374598 - RNA, 32 nt, Human
cccugguugagugccaucugccuaucuggugg

SEQ ID NO: 374599 - RNA, 21 nt, Human
cccugguugucccuucugccu

SEQ ID NO: 374600 - RNA, 32 nt, Human
cccugguuguucuuccccuuguucagcccauu

SEQ ID NO: 374601 - RNA, 32 nt, Human
cccugguuguugccugugccuggucuguucac

SEQ ID NO: 374602 - RNA, 32 nt, Human
cccugguuuccccucauugcucccugggcuaa

SEQ ID NO: 374603 - RNA, 22 nt, Human
cccugguuugucccucuugucu

SEQ ID NO: 374604 - RNA, 32 nt, Human
cccugguuuuaccccagcuccauccuugcauc

SEQ ID NO: 374605 - RNA, 23 nt, Human
cccugguuuuuaauuuucugucu

SEQ ID NO: 374606 - RNA, 32 nt, Human
cccuguaacccccacucguuagcucuaaacuc

SEQ ID NO: 374607 - RNA, 32 nt, Human
cccuguacaagcucucucucuuugccugcugc

SEQ ID NO: 374608 - RNA, 32 nt, Human
cccuguacacucccucgaagcugcuguucucu

SEQ ID NO: 374609 - RNA, 32 nt, Human
cccuguaccacugagugccuuucacagagaaa

SEQ ID NO: 374610 - RNA, 16 nt, Human
cccuguacccuggccu

SEQ ID NO: 374611 - RNA, 32 nt, Human
cccuguacccuugagcagucaccucucauuuu

SEQ ID NO: 374612 - RNA, 32 nt, Human
cccuguacuaaccugcuugguggacuuggaaa

SEQ ID NO: 374613 - RNA, 32 nt, Human
cccuguacugcccugccaucucaggccaaagg

SEQ ID NO: 374614 - RNA, 19 nt, Human
cccuguagccaccacagca

SEQ ID NO: 374615 - RNA, 32 nt, Human
cccuguagccccggcaggggaggaagggcaga

SEQ ID NO: 374616 - RNA, 32 nt, Human
cccuguagcuccaagccuggucucauuugcuu

SEQ ID NO: 374617 - RNA, 32 nt, Human
cccuguagcucugccaucaucagcaccaggag

SEQ ID NO: 374618 - RNA, 32 nt, Human
cccuguagcucugcuacccacccuccagcuuc

SEQ ID NO: 374619 - RNA, 20 nt, Human
cccuguagcugcagcacagg

SEQ ID NO: 374620 - RNA, 32 nt, Human
cccuguagggccagcuguagcaagaggcacuc

SEQ ID NO: 374621 - RNA, 18 nt, Human
cccuguaggguugagcca

SEQ ID NO: 374622 - RNA, 32 nt, Human
cccuguagucaaugugcaauuucucuaauucu

SEQ ID NO: 374623 - RNA, 32 nt, Human
cccuguaguucacacuguguccccagggauga

SEQ ID NO: 374624 - RNA, 32 nt, Human
cccuguauacgugugacaugcuggccucagag

SEQ ID NO: 374625 - RNA, 32 nt, Human
cccuguauccuuuugaaggacaugacaaugug

SEQ ID NO: 374626 - RNA, 32 nt, Human
cccuguaucugaagucuagcaucucaaggcug

SEQ ID NO: 374627 - RNA, 32 nt, Human
cccuguaucugccucucccuucccucaauuuc

SEQ ID NO: 374628 - RNA, 32 nt, Human
cccugucaccaccccgagcuguguggcuggug

SEQ ID NO: 374629 - RNA, 32 nt, Human
cccugucacccaggcuggaaugcaauggcacg

SEQ ID NO: 374630 - RNA, 32 nt, Human
cccugucacccaggcuggagugcaauggugcg

SEQ ID NO: 374631 - RNA, 32 nt, Human
cccugucacccaggcuggagugcaguggcacg

SEQ ID NO: 374632 - RNA, 32 nt, Human
cccugucacccaggcuggagugcaguggugug

SEQ ID NO: 374633 - RNA, 32 nt, Human
cccugucacccaggcugggguacgguggcaug

SEQ ID NO: 374634 - RNA, 32 nt, Human
cccugucacucaggauggaguucaaugguccu

SEQ ID NO: 374635 - RNA, 32 nt, Human
cccugucacucaggcuggagcacaguggugug

SEQ ID NO: 374636 - RNA, 32 nt, Human
cccugucacuccuccuggggaccucagagauc

SEQ ID NO: 374637 - RNA, 32 nt, Human
cccugucacugcacccagcuuggcauuuacca

SEQ ID NO: 374638 - RNA, 32 nt, Human
cccugucagaugccagccauuccccaggucuu

SEQ ID NO: 374639 - RNA, 32 nt, Human
cccugucagcacugugcuacugaugauacauc

SEQ ID NO: 374640 - RNA, 32 nt, Human
cccugucaggaggcucugccaucgggcuccuu

SEQ ID NO: 374641 - RNA, 32 nt, Human
cccugucaggauaccuuccacaggggagcagc

SEQ ID NO: 374642 - RNA, 32 nt, Human
cccugucaguguagcagaugaaagaaaacacu

SEQ ID NO: 374643 - RNA, 32 nt, Human
cccugucaguuaugucugccucccaggcucug

SEQ ID NO: 374644 - RNA, 32 nt, Human
cccugucauucuaguuuguggaucccaggaug

SEQ ID NO: 374645 - RNA, 32 nt, Human
cccuguccaaaaacagcaggacaucaggccca

SEQ ID NO: 374646 - RNA, 32 nt, Human
cccuguccaaaacauugugcuuuugcauguag

SEQ ID NO: 374647 - RNA, 32 nt, Human
cccuguccaagugccuuggagaacucacagca

SEQ ID NO: 374648 - RNA, 18 nt, Human
cccuguccaaguuugugc

SEQ ID NO: 374649 - RNA, 32 nt, Human
cccuguccaccaccuuuccuggccuugcuaug

SEQ ID NO: 374650 - RNA, 32 nt, Human
cccuguccaggccucagagucccgcucuguuc

SEQ ID NO: 374651 - RNA, 32 nt, Human
cccuguccagggcagugaguccucuacuuugc

SEQ ID NO: 374652 - RNA, 32 nt, Human
cccuguccaucagccaaaaccccacccacagc

SEQ ID NO: 374653 - RNA, 28 nt, Human
cccuguccaugugcagccucaucagagc

SEQ ID NO: 374654 - RNA, 32 nt, Human
cccugucccacugaggucagaguccuacagug

SEQ ID NO: 374655 - RNA, 32 nt, Human
cccugucccagagcaagagauguccccuucca

SEQ ID NO: 374656 - RNA, 20 nt, Human
cccugucccaggcccugccc

SEQ ID NO: 374657 - RNA, 18 nt, Human
cccuguccccagccccca

SEQ ID NO: 374658 - RNA, 18 nt, Human
cccuguccccaucggcca

SEQ ID NO: 374659 - RNA, 22 nt, Human
cccugucccccaaggccagcuu

SEQ ID NO: 374660 - RNA, 32 nt, Human
cccuguccccucccccuucccucacaccgcgu

SEQ ID NO: 374661 - RNA, 32 nt, Human
cccuguccccucccugcagaacccccagggca

SEQ ID NO: 374662 - RNA, 17 nt, Human
cccuguccccugcccac

SEQ ID NO: 374663 - RNA, 32 nt, Human
cccugucccuaucucucacucuggacccaggg

SEQ ID NO: 374664 - RNA, 32 nt, Human
cccugucccugacccacccaggaaaggauggg

SEQ ID NO: 374665 - RNA, 32 nt, Human
cccugucccugcacucccuugguugccaaaaa

SEQ ID NO: 374666 - RNA, 22 nt, Human
cccugucccugcggcugugaga

SEQ ID NO: 374667 - RNA, 32 nt, Human
cccugucccuuucuggcccucuuccuguagcc

SEQ ID NO: 374668 - RNA, 32 nt, Human
cccuguccgauggggaaacugaggcacggagc

SEQ ID NO: 374669 - RNA, 32 nt, Human
cccuguccgucugucugucugucugugguggu

SEQ ID NO: 374670 - RNA, 19 nt, Human
cccuguccuaaacccagcc

SEQ ID NO: 374671 - RNA, 32 nt, Human
cccuguccucaccucugcuuccacucccuuuc

SEQ ID NO: 374672 - RNA, 32 nt, Human
cccuguccucagugguuuugcugcaaucaaac

SEQ ID NO: 374673 - RNA, 32 nt, Human
cccuguccuccacccuggaccccagccggcug

SEQ ID NO: 374674 - RNA, 32 nt, Human
cccuguccuccccugucuccuuuccuccuccu

SEQ ID NO: 374675 - RNA, 25 nt, Human
cccuguccuccuccaccuucuuccu

SEQ ID NO: 374676 - RNA, 32 nt, Human
cccuguccuccugggcccugaggccccugccc

SEQ ID NO: 374677 - RNA, 32 nt, Human
cccuguccucucuguguuccccaaaucagaga

SEQ ID NO: 374678 - RNA, 32 nt, Human
cccuguccugagcaacaccaccacugagccug

SEQ ID NO: 374679 - RNA, 32 nt, Human
cccuguccugaggggagccccgccacggcagc

SEQ ID NO: 374680 - RNA, 32 nt, Human
cccuguccugcuuggguccuccagagaaagaa

SEQ ID NO: 374681 - RNA, 32 nt, Human
cccuguccuggacccagcuuugcuaggucucc

SEQ ID NO: 374682 - RNA, 32 nt, Human
cccuguccuugcugacuuguguugcauuguau

SEQ ID NO: 374683 - RNA, 32 nt, Human
cccuguccuuuaggucuucuccagaaauaccu

SEQ ID NO: 374684 - RNA, 23 nt, Human
cccuguccuuugcuacccagggc

SEQ ID NO: 374685 - RNA, 32 nt, Human
cccugucgccacugcucucccucccagccuuc

SEQ ID NO: 374686 - RNA, 32 nt, Human
cccugucgcccaggcuggagugcaaugccgug

SEQ ID NO: 374687 - RNA, 32 nt, Human
cccugucgcccaggcuggagugccauggcgcg

SEQ ID NO: 374688 - RNA, 16 nt, Human
cccugucgccugagcu

SEQ ID NO: 374689 - RNA, 32 nt, Human
cccugucgccuggcuggaguggaguggcacaa

SEQ ID NO: 374690 - RNA, 32 nt, Human
cccugucuacagccacaguugauuggaccagc

SEQ ID NO: 374691 - RNA, 32 nt, Human
cccugucuacccaucucugcugcuccagcuca

SEQ ID NO: 374692 - RNA, 32 nt, Human
cccugucuaccuccucucacccugccacagau

SEQ ID NO: 374693 - RNA, 24 nt, Human
cccugucuagggcagcccagggcc

SEQ ID NO: 374694 - RNA, 32 nt, Human
cccugucucaaccaccaccaccaccaccaccc

SEQ ID NO: 374695 - RNA, 32 nt, Human
cccugucucacacuucuuuucucccaucccgg

SEQ ID NO: 374696 - RNA, 32 nt, Human
cccugucucagcaagcucugaggucuccccug

SEQ ID NO: 374697 - RNA, 32 nt, Human
cccugucuccaccucuagguuuggccuucccc

SEQ ID NO: 374698 - RNA, 32 nt, Human
cccugucuccagcugcucugcacacauggaca

SEQ ID NO: 374699 - RNA, 20 nt, Human
cccugucuccagggccccca

SEQ ID NO: 374700 - RNA, 32 nt, Human
cccugucuccaucugccccaaccucagcccac

SEQ ID NO: 374701 - RNA, 32 nt, Human
cccugucuccccucagcagucugagugcaacc

SEQ ID NO: 374702 - RNA, 32 nt, Human
cccugucuccccuuguuucucugugccagauc

SEQ ID NO: 374703 - RNA, 32 nt, Human
cccugucuccgaggcuggaauacgguggugcg

SEQ ID NO: 374704 - RNA, 32 nt, Human
cccugucuccuuuccuccuccuggguucaugu

SEQ ID NO: 374705 - RNA, 32 nt, Human
cccugucucuacuaaaaauaaaauuagccagg

SEQ ID NO: 374706 - RNA, 32 nt, Human
cccugucucucccgucucugcacccagcuccu

SEQ ID NO: 374707 - RNA, 32 nt, Human
cccugucucugagaacuugagaccuagcuccg

SEQ ID NO: 374708 - RNA, 32 nt, Human
cccugucucugccucuaccuugcugugccucu

SEQ ID NO: 374709 - RNA, 32 nt, Human
cccugucucugccucucccucccuuccucagg

SEQ ID NO: 374710 - RNA, 32 nt, Human
cccugucugccuccugccccuuccuucugcca

SEQ ID NO: 374711 - RNA, 32 nt, Human
cccugucugccucuguucccuuuguguguguu

SEQ ID NO: 374712 - RNA, 19 nt, Human
cccugucugcucacuucua

SEQ ID NO: 374713 - RNA, 32 nt, Human
cccugucugcucauccucucucccucugucca

SEQ ID NO: 374714 - RNA, 32 nt, Human
cccugucuggaagacguggcucugggugaggu

SEQ ID NO: 374715 - RNA, 32 nt, Human
cccugucuggccagggagauccaugugcucaa

SEQ ID NO: 374716 - RNA, 32 nt, Human
cccugucuguccacacugaccucucucuaacu

SEQ ID NO: 374717 - RNA, 32 nt, Human
cccugucugucuggaccaggugugauccuagg

SEQ ID NO: 374718 - RNA, 32 nt, Human
cccugucuuagagugugaggaaaaugugcccc

SEQ ID NO: 374719 - RNA, 32 nt, Human
cccugucuucuagccccaccucccacuuggcc

SEQ ID NO: 374720 - RNA, 32 nt, Human
cccugucuucuguccccaucuuccugccgaua

SEQ ID NO: 374721 - RNA, 20 nt, Human
cccugucuugcccugggcca

SEQ ID NO: 374722 - RNA, 32 nt, Human
cccugucuugccugcuguccaucaccauggag

SEQ ID NO: 374723 - RNA, 32 nt, Human
cccugugaaauccugcaagggggugccgguga

SEQ ID NO: 374724 - RNA, 32 nt, Human
cccugugaagaagcaagcucucugucaauggg

SEQ ID NO: 374725 - RNA, 32 nt, Human
cccugugaagccagaggagauggacuggucug

SEQ ID NO: 374726 - RNA, 20 nt, Human
cccugugaaucagagugcac

SEQ ID NO: 374727 - RNA, 32 nt, Human
cccugugacacacagcccacccuccauguccc

SEQ ID NO: 374728 - RNA, 32 nt, Human
cccugugaccucagggugugcucuguucucca

SEQ ID NO: 374729 - RNA, 32 nt, Human
cccugugacugcaucccgccucccuggggacc

SEQ ID NO: 374730 - RNA, 32 nt, Human
cccugugacuugcaccuauacgcccagauggc

SEQ ID NO: 374731 - RNA, 32 nt, Human
cccugugagagggaaugggggaagccugauga

SEQ ID NO: 374732 - RNA, 32 nt, Human
cccugugagaucuucugcuacuccagccacag

SEQ ID NO: 374733 - RNA, 32 nt, Human
cccugugagcacauaagcagaggcugcaggaa

SEQ ID NO: 374734 - RNA, 32 nt, Human
cccugugagcugcuuacucaccugccggggaa

SEQ ID NO: 374735 - RNA, 32 nt, Human
cccugugagggcuuugggggcgucagguuggg

SEQ ID NO: 374736 - RNA, 32 nt, Human
cccugugaguugaccugcuccgggccgcgggc

SEQ ID NO: 374737 - RNA, 21 nt, Human
cccugugauagaggaugacuu

SEQ ID NO: 374738 - RNA, 32 nt, Human
cccugugcaauggcucacaccuguaauuccaa

SEQ ID NO: 374739 - RNA, 32 nt, Human
cccugugcacucccccgccacgcccagcccaa

SEQ ID NO: 374740 - RNA, 32 nt, Human
cccugugcagaggaaaaaugaagaauucuccc

SEQ ID NO: 374741 - RNA, 32 nt, Human
cccugugcaugcugggcuuggccccacauuau

SEQ ID NO: 374742 - RNA, 20 nt, Human
cccugugccaccuccugccu

SEQ ID NO: 374743 - RNA, 32 nt, Human
cccugugccacucucagccauuucagcagccc

SEQ ID NO: 374744 - RNA, 32 nt, Human
cccugugcccacucccuucucuacucuucccc

SEQ ID NO: 374745 - RNA, 22 nt, Human
cccugugccccagccccagcca

SEQ ID NO: 374746 - RNA, 19 nt, Human
cccugugccccuccacuug

SEQ ID NO: 374747 - RNA, 32 nt, Human
cccugugcccuccauccuccaucccagcaucc

SEQ ID NO: 374748 - RNA, 32 nt, Human
cccugugccgcugaagacauggaguuuguguc

SEQ ID NO: 374749 - RNA, 32 nt, Human
cccugugccggacuccagccggggcgacgaga

SEQ ID NO: 374750 - RNA, 32 nt, Human
cccugugccuggggaagcagucccggccccca

SEQ ID NO: 374751 - RNA, 32 nt, Human
cccugugcgccuuccucucaggcaggcuugcu

SEQ ID NO: 374752 - RNA, 32 nt, Human
cccugugcucaccucugccuggcucagcgacc

SEQ ID NO: 374753 - RNA, 32 nt, Human
cccugugcucacugcccccacgccuccugcca

SEQ ID NO: 374754 - RNA, 32 nt, Human
cccugugcucagggcuggagagaggguggcgg

SEQ ID NO: 374755 - RNA, 32 nt, Human
cccugugcucccuuucucuccucucuccuuuu

SEQ ID NO: 374756 - RNA, 32 nt, Human
cccugugcuccugccuaugcuccugggauacg

SEQ ID NO: 374757 - RNA, 32 nt, Human
cccugugcuggcaccugcucccugugcucagu

SEQ ID NO: 374758 - RNA, 32 nt, Human
cccugugcuguagcuucuuuccaggccuuucc

SEQ ID NO: 374759 - RNA, 32 nt, Human
cccugugcuuugccuaauucgagcacgugcug

SEQ ID NO: 374760 - RNA, 32 nt, Human
cccuguggaaacacuuggcagcggaguugcuc

SEQ ID NO: 374761 - RNA, 32 nt, Human
cccuguggaaagaagagacagacagagugugg

SEQ ID NO: 374762 - RNA, 32 nt, Human
cccuguggaacgaagagaggcacacagcaugg

SEQ ID NO: 374763 - RNA, 32 nt, Human
cccuguggagaaauucguuguucccacugaaa

SEQ ID NO: 374764 - RNA, 32 nt, Human
cccuguggagaugagucagugccaugacugag

SEQ ID NO: 374765 - RNA, 32 nt, Human
cccuguggagcacuuggagcagugucuguugu

SEQ ID NO: 374766 - RNA, 32 nt, Human
cccuguggaggaggcaguuagggaaacuagga

SEQ ID NO: 374767 - RNA, 32 nt, Human
cccuguggagggccaggcagaggcuguucugg

SEQ ID NO: 374768 - RNA, 26 nt, Human
cccuguggaguuccugucuucuguuu

SEQ ID NO: 374769 - RNA, 32 nt, Human
cccuguggcaaaccaggaaggccaaggcugcg

SEQ ID NO: 374770 - RNA, 32 nt, Human
cccuguggcccccuccccagcaccucugucug

SEQ ID NO: 374771 - RNA, 22 nt, Human
cccuguggcccucgcucugccu

SEQ ID NO: 374772 - RNA, 20 nt, Human
cccugugggaaguggcccca

SEQ ID NO: 374773 - RNA, 32 nt, Human
cccugugggacccgcuucaccaacaggaccca

SEQ ID NO: 374774 - RNA, 32 nt, Human
cccugugggagaggggacacuggaggaguggc

SEQ ID NO: 374775 - RNA, 32 nt, Human
cccugugggaggcggacagcagugaccaccuc

SEQ ID NO: 374776 - RNA, 32 nt, Human
cccugugggcaagcagccgccgccauggccga

SEQ ID NO: 374777 - RNA, 23 nt, Human
cccugugggcuacccucuguaga

SEQ ID NO: 374778 - RNA, 32 nt, Human
cccuguggggagagccacagggccagguggac

SEQ ID NO: 374779 - RNA, 19 nt, Human
cccuguggguccacagcag

SEQ ID NO: 374780 - RNA, 31 nt, Human
cccugugggucccagcaccuaucucaggaag

SEQ ID NO: 374781 - RNA, 20 nt, Human
cccugugguagccccagcag

SEQ ID NO: 374782 - RNA, 24 nt, Human
cccugugguauuccuuuccugcuu

SEQ ID NO: 374783 - RNA, 32 nt, Human
cccuguggugugaggcgcguguucgggcucuu

SEQ ID NO: 374784 - RNA, 32 nt, Human
cccuguguacacacaaucucuguuauucauac

SEQ ID NO: 374785 - RNA, 32 nt, Human
cccuguguacuuuuucuuuuuaugugaaaauu

SEQ ID NO: 374786 - RNA, 32 nt, Human
cccugugucagaugauauguccuugaagcugg

SEQ ID NO: 374787 - RNA, 32 nt, Human
cccuguguccaccuuucucuccucuucccaag

SEQ ID NO: 374788 - RNA, 32 nt, Human
cccuguguccacugcuguaugaucugggggcc

SEQ ID NO: 374789 - RNA, 21 nt, Human
cccuguguccccuuccugcuu

SEQ ID NO: 374790 - RNA, 19 nt, Human
cccugugucccgggaccug

SEQ ID NO: 374791 - RNA, 32 nt, Human
cccugugucccugagggaucugucucacuggc

SEQ ID NO: 374792 - RNA, 25 nt, Human
cccuguguccuuccauuuccugucu

SEQ ID NO: 374793 - RNA, 32 nt, Human
cccugugucuagugaugcucucugugcucacc

SEQ ID NO: 374794 - RNA, 22 nt, Human
cccugugugaccugcccaccca

SEQ ID NO: 374795 - RNA, 21 nt, Human
cccugugugacucaguucuuu

SEQ ID NO: 374796 - RNA, 32 nt, Human
cccugugugcggccucuccaccucucacccac

SEQ ID NO: 374797 - RNA, 32 nt, Human
cccugugugggugagagaagggacuagacucc

SEQ ID NO: 374798 - RNA, 25 nt, Human
cccuguguguggacagccuguggga

SEQ ID NO: 374799 - RNA, 32 nt, Human
cccuguguguucacucuccucccaaagcaaac

SEQ ID NO: 374800 - RNA, 32 nt, Human
cccuguguuacccaggcuggucucaaacuccu

SEQ ID NO: 374801 - RNA, 32 nt, Human
cccuguguuaccugggcagcuccagaucacug

SEQ ID NO: 374802 - RNA, 32 nt, Human
cccuguguucccaauguuuagcucuugccuac

SEQ ID NO: 374803 - RNA, 21 nt, Human
cccuguguugaaguucuuuaa

SEQ ID NO: 374804 - RNA, 32 nt, Human
cccuguguugaucacuugcaggcccggguucu

SEQ ID NO: 374805 - RNA, 32 nt, Human
cccuguguugcucaggcuggagugcaguggug

SEQ ID NO: 374806 - RNA, 32 nt, Human
cccuguguuguuacaggcugugcagugcaaca

SEQ ID NO: 374807 - RNA, 32 nt, Human
cccuguguuugucucuaguguccuccuaaaca

SEQ ID NO: 374808 - RNA, 17 nt, Human
cccuguuaaaagaugaa

SEQ ID NO: 374809 - RNA, 32 nt, Human
cccuguuagagacccucaugggcuaggacuuu

SEQ ID NO: 374810 - RNA, 32 nt, Human
cccuguuaucauuccuccccaacauaauaaua

SEQ ID NO: 374811 - RNA, 24 nt, Human
cccuguuauucugacuuccugcuu

SEQ ID NO: 374812 - RNA, 32 nt, Human
cccuguucacuuugguuccagcauccugucca

SEQ ID NO: 374813 - RNA, 32 nt, Human
cccuguuccaaaacaaaauucaccuccuuucu

SEQ ID NO: 374814 - RNA, 32 nt, Human
cccuguuccagcugcucccucacuggccuccg

SEQ ID NO: 374815 - RNA, 31 nt, Human
cccuguucccucucugucuaggugucauggu

SEQ ID NO: 374816 - RNA, 32 nt, Human
cccuguuccuucaccuccccacuuuggagcuc

SEQ ID NO: 374817 - RNA, 32 nt, Human
cccuguucuccugucccuccaucccagacauu

SEQ ID NO: 374818 - RNA, 32 nt, Human
cccuguucucuaccaagcuauccuggcucuuu

SEQ ID NO: 374819 - RNA, 19 nt, Human
cccuguucugcucugggcu

SEQ ID NO: 374820 - RNA, 32 nt, Human
cccuguucuggcagaguugaagacagagcuac

SEQ ID NO: 374821 - RNA, 32 nt, Human
cccuguucuggcugugugugaaggaugugugu

SEQ ID NO: 374822 - RNA, 24 nt, Human
cccuguugaaguucaucucugccu

SEQ ID NO: 374823 - RNA, 32 nt, Human
cccuguugacuuugcuguuucccaggcuccuu

SEQ ID NO: 374824 - RNA, 21 nt, Human
cccuguugcaggcaaaggaac

SEQ ID NO: 374825 - RNA, 32 nt, Human
cccuguugcccaaguuggagugcaaucuuggc

SEQ ID NO: 374826 - RNA, 32 nt, Human
cccuguugcccaggcuacagugcaauggcaug

SEQ ID NO: 374827 - RNA, 32 nt, Human
cccuguugcccaggcugaagugcaguggugcg

SEQ ID NO: 374828 - RNA, 32 nt, Human
cccuguugcccaggcuggaauacaguggcacg

SEQ ID NO: 374829 - RNA, 32 nt, Human
cccuguugcccaggcuggagagcaguggugca

SEQ ID NO: 374830 - RNA, 32 nt, Human
cccuguugcccaggcuggaguauaguagugca

SEQ ID NO: 374831 - RNA, 32 nt, Human
cccuguugcccaggcuggagugcaauggcgcg

SEQ ID NO: 374832 - RNA, 32 nt, Human
cccuguugcccaggcuggagugcaauggugcg

SEQ ID NO: 374833 - RNA, 32 nt, Human
cccuguugcccaggcuggagugcaguggcacg

SEQ ID NO: 374834 - RNA, 32 nt, Human
cccuguugcccaggcuggagugcagugggaug

SEQ ID NO: 374835 - RNA, 21 nt, Human
cccuguugcccauagcccuuu

SEQ ID NO: 374836 - RNA, 32 nt, Human
cccuguugcccaugcuggagugcaauggcacg

SEQ ID NO: 374837 - RNA, 32 nt, Human
cccuguugcccccaucucuacccccuuuuguu

SEQ ID NO: 374838 - RNA, 22 nt, Human
cccuguugccuucaacauccaa

SEQ ID NO: 374839 - RNA, 32 nt, Human
cccuguugcgcugcccuggccucggcauucga

SEQ ID NO: 374840 - RNA, 32 nt, Human
cccuguugcucacacauugucuggcagccugu

SEQ ID NO: 374841 - RNA, 32 nt, Human
cccuguuggccaggcuggagugcaguaagugg

SEQ ID NO: 374842 - RNA, 32 nt, Human
cccuguuggggaggggaggggagcucaagguu

SEQ ID NO: 374843 - RNA, 32 nt, Human
cccuguuguuccugaauaagucagaagaaguu

SEQ ID NO: 374844 - RNA, 32 nt, Human
cccuguuuaucugcagccaggagacuugcaag

SEQ ID NO: 374845 - RNA, 21 nt, Human
cccuguuucccaccucccgcc

SEQ ID NO: 374846 - RNA, 32 nt, Human
cccuguuucccagguuggaguauaguggugcc

SEQ ID NO: 374847 - RNA, 18 nt, Human
cccuguuuccccccacua

SEQ ID NO: 374848 - RNA, 32 nt, Human
cccuguuucccuucccucccucccuccccucu

SEQ ID NO: 374849 - RNA, 32 nt, Human
cccuguuuccuucccucuuuccuuccuuccuc

SEQ ID NO: 374850 - RNA, 32 nt, Human
cccuguuucuaguugguccaggauuagggaug

SEQ ID NO: 374851 - RNA, 32 nt, Human
cccuguuucucaggcuguagaugaagggguuc

SEQ ID NO: 374852 - RNA, 32 nt, Human
cccuguuucuccugcugaccuugggucacacc

SEQ ID NO: 374853 - RNA, 32 nt, Human
cccuguuuucugcucccuggacugccuagccc

SEQ ID NO: 374854 - RNA, 32 nt, Human
cccuguuuugagauuguuuguucuaauuuauu

SEQ ID NO: 374855 - RNA, 32 nt, Human
cccuguuuuguagcauuuacuaauauuuaugg

SEQ ID NO: 374856 - RNA, 32 nt, Human
cccuguuuuucccuuccggcagccucuuggcc

SEQ ID NO: 374857 - RNA, 32 nt, Human
cccuguuuuugaauaaauauucucagcgacca

SEQ ID NO: 374858 - RNA, 32 nt, Human
cccuuaaaaagcuucuuaagagcucaguuaau

SEQ ID NO: 374859 - RNA, 32 nt, Human
cccuuaaaaauggacucaaaaauuuuggacau

SEQ ID NO: 374860 - RNA, 32 nt, Human
cccuuaaauucucaagacuaaagacuugagau

SEQ ID NO: 374861 - RNA, 21 nt, Human
cccuuaacaccucggcacaga

SEQ ID NO: 374862 - RNA, 32 nt, Human
cccuuaacaguguugaauucaacugaaggcga

SEQ ID NO: 374863 - RNA, 32 nt, Human
cccuuaacuaugagcaggugcuaccuuuuggg

SEQ ID NO: 374864 - RNA, 32 nt, Human
cccuuaagaaaccuuaaagaaauaaguauccu

SEQ ID NO: 374865 - RNA, 32 nt, Human
cccuuaagacaggacugacuugguaacgcaca

SEQ ID NO: 374866 - RNA, 32 nt, Human
cccuuaagcaagaauagaauguaguggaaauu

SEQ ID NO: 374867 - RNA, 32 nt, Human
cccuuaagccaaguacagggauaguugucuca

SEQ ID NO: 374868 - RNA, 32 nt, Human
cccuuaagcucccuccgaccucccagaagccu

SEQ ID NO: 374869 - RNA, 26 nt, Human
cccuuaaguccuuaaugaagagccag

SEQ ID NO: 374870 - RNA, 32 nt, Human
cccuuaauuggcagguguaugugcugacagua

SEQ ID NO: 374871 - RNA, 32 nt, Human
cccuuacaaagcagggcuuugaggacuccgau

SEQ ID NO: 374872 - RNA, 32 nt, Human
cccuuacaagagguggagcaugcagaugagca

SEQ ID NO: 374873 - RNA, 32 nt, Human
cccuuacaagccugggacaagccuggguggaa

SEQ ID NO: 374874 - RNA, 21 nt, Human
cccuuacagaauuaagaaaaa

SEQ ID NO: 374875 - RNA, 32 nt, Human
cccuuaccaaaccugaugccccugacaucauc

SEQ ID NO: 374876 - RNA, 21 nt, Human
cccuuacccacccaccagccc

SEQ ID NO: 374877 - RNA, 32 nt, Human
cccuuacccauguuaucauuuccuuucuaucc

SEQ ID NO: 374878 - RNA, 32 nt, Human
cccuuacccuaucacuggccucaggcccccgc

SEQ ID NO: 374879 - RNA, 32 nt, Human
cccuuacccuccucaggacuaccgaaccuucu

SEQ ID NO: 374880 - RNA, 32 nt, Human
cccuuacccucugcccaaucucucauuacucc

SEQ ID NO: 374881 - RNA, 23 nt, Human
cccuuacguccuuccacuuccaa

SEQ ID NO: 374882 - RNA, 32 nt, Human
cccuuacucaaggaguugagggaccuuggagg

SEQ ID NO: 374883 - RNA, 32 nt, Human
cccuuacuccucccucugcugccuccuccccc

SEQ ID NO: 374884 - RNA, 32 nt, Human
cccuuacugauaagcggccacuuuaggagugu

SEQ ID NO: 374885 - RNA, 32 nt, Human
cccuuacugauaguugggaaaagaagauuggg

SEQ ID NO: 374886 - RNA, 21 nt, Human
cccuuacuggaggcugcagga

SEQ ID NO: 374887 - RNA, 32 nt, Human
cccuuacuucauccucccccucaucuccugaa

SEQ ID NO: 374888 - RNA, 32 nt, Human
cccuuagagacaggguuucacuauguugccca

SEQ ID NO: 374889 - RNA, 24 nt, Human
cccuuagagcccccuaaguuuuuc

SEQ ID NO: 374890 - RNA, 32 nt, Human
cccuuagaggugagcaucagagccagagcagu

SEQ ID NO: 374891 - RNA, 32 nt, Human
cccuuagcaccagcuuagacaccuccaagaac

SEQ ID NO: 374892 - RNA, 32 nt, Human
cccuuagcacuggccucugcguuggaccggau

SEQ ID NO: 374893 - RNA, 20 nt, Human
cccuuagcagggccuggcca

SEQ ID NO: 374894 - RNA, 32 nt, Human
cccuuagcagucaggucauaacagggcacauu

SEQ ID NO: 374895 - RNA, 32 nt, Human
cccuuagcugucaaggaugcugugggaagagu

SEQ ID NO: 374896 - RNA, 32 nt, Human
cccuuagcuugcuuuccuccucccuccuuuuu

SEQ ID NO: 374897 - RNA, 32 nt, Human
cccuuaggauggugaguugaagcaucacccuc

SEQ ID NO: 374898 - RNA, 24 nt, Human
cccuuaggcaaguuuaaaagccag

SEQ ID NO: 374899 - RNA, 17 nt, Human
cccuuagggaaguuguc

SEQ ID NO: 374900 - RNA, 32 nt, Human
cccuuagggaggaggaggcgagaagauggcgg

SEQ ID NO: 374901 - RNA, 32 nt, Human
cccuuagguucaggaagcuucuguguaagcug

SEQ ID NO: 374902 - RNA, 32 nt, Human
cccuuagguuucuaaguacccauuucuuucug

SEQ ID NO: 374903 - RNA, 32 nt, Human
cccuuaguaaagccucugagaccuuccugaac

SEQ ID NO: 374904 - RNA, 32 nt, Human
cccuuaguaauguuuuugaauuaaugaggcau

SEQ ID NO: 374905 - RNA, 32 nt, Human
cccuuaguagaggcacuaaccaugugacccaa

SEQ ID NO: 374906 - RNA, 32 nt, Human
cccuuagucuacucccuuccccucucuggucc

SEQ ID NO: 374907 - RNA, 32 nt, Human
cccuuaguuucuuuucauaaaguaaguuauuu

SEQ ID NO: 374908 - RNA, 32 nt, Human
cccuuauaccucuucgccuuucugugguucca

SEQ ID NO: 374909 - RNA, 32 nt, Human
cccuuauagagcugcaaaacacacacaugcgu

SEQ ID NO: 374910 - RNA, 32 nt, Human
cccuuauaggauuccaaaguuguuaaauaaau

SEQ ID NO: 374911 - RNA, 28 nt, Human
cccuuaucaccagcugccucuucugugg

SEQ ID NO: 374912 - RNA, 32 nt, Human
cccuuaucccuggucacauccagggagacgcg

SEQ ID NO: 374913 - RNA, 32 nt, Human
cccuuaucuaucuccuucucggcuccccagcc

SEQ ID NO: 374914 - RNA, 32 nt, Human
cccuuaucuccucugcacuuauguuaucaaua

SEQ ID NO: 374915 - RNA, 32 nt, Human
cccuuaucugcacugggccagcauccuccggc

SEQ ID NO: 374916 - RNA, 32 nt, Human
cccuuaucuggaggaggaagagaagcaggaga

SEQ ID NO: 374917 - RNA, 32 nt, Human
cccuuaugccagguuccagucuugagaggaaa

SEQ ID NO: 374918 - RNA, 22 nt, Human
cccuuauggccaggugcagugg

SEQ ID NO: 374919 - RNA, 32 nt, Human
cccuuauuagagccaugacagccuacagagug

SEQ ID NO: 374920 - RNA, 18 nt, Human
cccuuauucaguggaaga

SEQ ID NO: 374921 - RNA, 32 nt, Human
cccuuauuccccuucugccccugggcccaguc

SEQ ID NO: 374922 - RNA, 32 nt, Human
cccuuauugcagcugucucacagccugagcug

SEQ ID NO: 374923 - RNA, 20 nt, Human
cccuucaaagaacagcauca

SEQ ID NO: 374924 - RNA, 32 nt, Human
cccuucaaccuccccagucccccaccagaccc

SEQ ID NO: 374925 - RNA, 32 nt, Human
cccuucaagguacacgcagccuggguggguga

SEQ ID NO: 374926 - RNA, 32 nt, Human
cccuucacaagcccucucucucccucucuuug

SEQ ID NO: 374927 - RNA, 32 nt, Human
cccuucacacagggagcucaucagcccgacgc

SEQ ID NO: 374928 - RNA, 32 nt, Human
cccuucacagcaguaaaccagcucuuuggaac

SEQ ID NO: 374929 - RNA, 20 nt, Human
cccuucacauucccaaggaa

SEQ ID NO: 374930 - RNA, 20 nt, Human
cccuucaccaccccgcccca

SEQ ID NO: 374931 - RNA, 25 nt, Human
cccuucaccagcacagcagcagcag

SEQ ID NO: 374932 - RNA, 32 nt, Human
cccuucacccacccggugucuccagcagcagg

SEQ ID NO: 374933 - RNA, 21 nt, Human
cccuucaccccgcccccaggg

SEQ ID NO: 374934 - RNA, 32 nt, Human
cccuucaccccggccugugacacacacagccc

SEQ ID NO: 374935 - RNA, 32 nt, Human
cccuucacccgccucaucacccaagccaggca

SEQ ID NO: 374936 - RNA, 19 nt, Human
cccuucacccugccccucc

SEQ ID NO: 374937 - RNA, 32 nt, Human
cccuucaccgcccucugguguccccucaccuu

SEQ ID NO: 374938 - RNA, 32 nt, Human
cccuucaccggcugccccgcucagaccuaguc

SEQ ID NO: 374939 - RNA, 32 nt, Human
cccuucaccuacugcuggccauugucccuucu

SEQ ID NO: 374940 - RNA, 32 nt, Human
cccuucaccugcaggcccuccucuuugauaaa

SEQ ID NO: 374941 - RNA, 32 nt, Human
cccuucacuggcagugagaaaggugcucauuu

SEQ ID NO: 374942 - RNA, 21 nt, Human
cccuucagaacauggcuccca

SEQ ID NO: 374943 - RNA, 32 nt, Human
cccuucagaccagcagagugaagacagacaga

SEQ ID NO: 374944 - RNA, 32 nt, Human
cccuucagagcaucugccaaacuucgggcauc

SEQ ID NO: 374945 - RNA, 32 nt, Human
cccuucagauugccugccguuacauuaacaca

SEQ ID NO: 374946 - RNA, 32 nt, Human
cccuucagccagguccagaauguggaccuggu

SEQ ID NO: 374947 - RNA, 24 nt, Human
cccuucaggcggagguugcaguga

SEQ ID NO: 374948 - RNA, 32 nt, Human
cccuucaggcggagguugcagugagccgagau

SEQ ID NO: 374949 - RNA, 32 nt, Human
cccuucaggucuucaguggauuacuuaaccac

SEQ ID NO: 374950 - RNA, 32 nt, Human
cccuucaggugaggcccuuuucugccuucuuu

SEQ ID NO: 374951 - RNA, 22 nt, Human
cccuucagguggcaucccugag

SEQ ID NO: 374952 - RNA, 32 nt, Human
cccuucaguauuuaucccuccuuuccccacag

SEQ ID NO: 374953 - RNA, 32 nt, Human
cccuucagucaccacucaguucucacucauug

SEQ ID NO: 374954 - RNA, 32 nt, Human
cccuucagucucugcucuuccuucaucaacca

SEQ ID NO: 374955 - RNA, 32 nt, Human
cccuucagugcaggccagccuggcagcuggaa

SEQ ID NO: 374956 - RNA, 32 nt, Human
cccuucagugcguggugagugcagcgugugug

SEQ ID NO: 374957 - RNA, 23 nt, Human
cccuucagugcugggaccccagg

SEQ ID NO: 374958 - RNA, 16 nt, Human
cccuucaguggcccca

SEQ ID NO: 374959 - RNA, 32 nt, Human
cccuucagugugccacugaagauccugguguc

SEQ ID NO: 374960 - RNA, 32 nt, Human
cccuucaguucuggagaaagccugauaccagg

SEQ ID NO: 374961 - RNA, 32 nt, Human
cccuucauacagggcugcuggggaagacggca

SEQ ID NO: 374962 - RNA, 19 nt, Human
cccuucauaccccuccuca

SEQ ID NO: 374963 - RNA, 32 nt, Human
cccuucaucauccgcccucccacuacaagccc

SEQ ID NO: 374964 - RNA, 32 nt, Human
cccuucauccaccucucucucaccgcgccgcu

SEQ ID NO: 374965 - RNA, 32 nt, Human
cccuucauccauuggcuggaacauggauuggg

SEQ ID NO: 374966 - RNA, 32 nt, Human
cccuucaucccugccgcccagcauccuacugg

SEQ ID NO: 374967 - RNA, 32 nt, Human
cccuucaucuucuccucugccaggggaggacu

SEQ ID NO: 374968 - RNA, 32 nt, Human
cccuucauguuugcuucagcagcugguagcuu

SEQ ID NO: 374969 - RNA, 32 nt, Human
cccuucauuuugggacugaggcugcagcauug

SEQ ID NO: 374970 - RNA, 32 nt, Human
cccuuccaacacagaugcccaggcaccuccag

SEQ ID NO: 374971 - RNA, 32 nt, Human
cccuuccaccaccucugcccuccgucugcaga

SEQ ID NO: 374972 - RNA, 32 nt, Human
cccuuccaccaugugaggacacugugagaagg

SEQ ID NO: 374973 - RNA, 32 nt, Human
cccuuccaccucuguugguuucugccucccuu

SEQ ID NO: 374974 - RNA, 32 nt, Human
cccuuccaccuggaggcucccuugucucccag

SEQ ID NO: 374975 - RNA, 32 nt, Human
cccuuccacuccucacuggcugguucacugug

SEQ ID NO: 374976 - RNA, 32 nt, Human
cccuuccacucuggcuuuacugcagcgaucuu

SEQ ID NO: 374977 - RNA, 18 nt, Human
cccuuccagacccagcca

SEQ ID NO: 374978 - RNA, 21 nt, Human
cccuuccagcaccccauccag

SEQ ID NO: 374979 - RNA, 32 nt, Human
cccuuccagcacuuaaucuugucuuguugaaa

SEQ ID NO: 374980 - RNA, 32 nt, Human
cccuuccagcagccaugagggaaggacaggag

SEQ ID NO: 374981 - RNA, 32 nt, Human
cccuuccagcuccaguucugcccaggucacaa

SEQ ID NO: 374982 - RNA, 32 nt, Human
cccuuccaggagacccuggaguguacugaggg

SEQ ID NO: 374983 - RNA, 32 nt, Human
cccuuccaggaggccaguuuucuagugaagac

SEQ ID NO: 374984 - RNA, 32 nt, Human
cccuuccaggccagccagaguggggauggucu

SEQ ID NO: 374985 - RNA, 32 nt, Human
cccuuccagucaugugugcaucaugucucuuu

SEQ ID NO: 374986 - RNA, 32 nt, Human
cccuuccaucuaucagucuuacuccaaauaua

SEQ ID NO: 374987 - RNA, 32 nt, Human
cccuuccaugaaugaccccucagucuggccuc

SEQ ID NO: 374988 - RNA, 32 nt, Human
cccuuccaugccagcccuuccugcugccuccc

SEQ ID NO: 374989 - RNA, 32 nt, Human
cccuucccacaugccugcgccugcugccugcu

SEQ ID NO: 374990 - RNA, 20 nt, Human
cccuucccaccccucacuca

SEQ ID NO: 374991 - RNA, 32 nt, Human
cccuucccagcaccuugugcccuugccaguga

SEQ ID NO: 374992 - RNA, 32 nt, Human
cccuucccagggcugaggggaggcagggaugu

SEQ ID NO: 374993 - RNA, 32 nt, Human
cccuucccagguuucugaacagccugggcacc

SEQ ID NO: 374994 - RNA, 32 nt, Human
cccuucccaucuugccacacggucuuuuucuu

SEQ ID NO: 374995 - RNA, 32 nt, Human
cccuucccauuuccuccccugccuccuuagaa

SEQ ID NO: 374996 - RNA, 32 nt, Human
cccuucccauuucuccccacuuucaucuaccu

SEQ ID NO: 374997 - RNA, 21 nt, Human
cccuuccccaaccauggcccc

SEQ ID NO: 374998 - RNA, 19 nt, Human
cccuuccccaauuugggga

SEQ ID NO: 374999 - RNA, 32 nt, Human
cccuuccccacaccggggagagcugcucggac

SEQ ID NO: 375000 - RNA, 21 nt, Human
cccuuccccacccccauccca

SEQ ID NO: 375001 - RNA, 24 nt, Human
cccuuccccacccucuggccccca

SEQ ID NO: 375002 - RNA, 17 nt, Human
cccuuccccacugccca

SEQ ID NO: 375003 - RNA, 21 nt, Human
cccuuccccacuuauccccca

SEQ ID NO: 375004 - RNA, 32 nt, Human
cccuuccccagaggaauuguggagacuguccc

SEQ ID NO: 375005 - RNA, 32 nt, Human
cccuuccccagaggcugguguccagaacucag

SEQ ID NO: 375006 - RNA, 32 nt, Human
cccuuccccagccucucgccugcacugaugca

SEQ ID NO: 375007 - RNA, 32 nt, Human
cccuuccccaggagcaaggaccaguuggggcg

SEQ ID NO: 375008 - RNA, 32 nt, Human
cccuuccccaggcugggagaaggggccguugg

SEQ ID NO: 375009 - RNA, 32 nt, Human
cccuuccccauggcugggggcugggguaggac

SEQ ID NO: 375010 - RNA, 22 nt, Human
cccuucccccaaacccuauccc

SEQ ID NO: 375011 - RNA, 22 nt, Human
cccuucccccaacuugacccca

SEQ ID NO: 375012 - RNA, 21 nt, Human
cccuucccccaccccaccccc

SEQ ID NO: 375013 - RNA, 21 nt, Human
cccuucccccauaagccucca

SEQ ID NO: 375014 - RNA, 24 nt, Human
cccuucccccaucauugggcccca

SEQ ID NO: 375015 - RNA, 32 nt, Human
cccuucccccuucccuccuucccuccccucuc

SEQ ID NO: 375016 - RNA, 32 nt, Human
cccuucccccuucuuaugccccucucagacca

SEQ ID NO: 375017 - RNA, 23 nt, Human
cccuucccccuuuuuguccccca

SEQ ID NO: 375018 - RNA, 21 nt, Human
cccuuccccgcccggccucca

SEQ ID NO: 375019 - RNA, 32 nt, Human
cccuuccccguccccugcagccugggucugga

SEQ ID NO: 375020 - RNA, 20 nt, Human
cccuuccccuagugaccccc

SEQ ID NO: 375021 - RNA, 32 nt, Human
cccuuccccucagcaggcggcucucuuugccu

SEQ ID NO: 375022 - RNA, 32 nt, Human
cccuuccccuccccuucuaccuccuccucggc

SEQ ID NO: 375023 - RNA, 22 nt, Human
cccuuccccucccuggcuccca

SEQ ID NO: 375024 - RNA, 22 nt, Human
cccuuccccucucuggcccuca

SEQ ID NO: 375025 - RNA, 32 nt, Human
cccuuccccugccuaguccccgccugagugcc

SEQ ID NO: 375026 - RNA, 32 nt, Human
cccuuccccugccuuuuccuccugagacuucu

SEQ ID NO: 375027 - RNA, 23 nt, Human
cccuuccccugcuuugaccccca

SEQ ID NO: 375028 - RNA, 22 nt, Human
cccuuccccuguguggcuccca

SEQ ID NO: 375029 - RNA, 32 nt, Human
cccuuccccuucaagcauuuuccucuucccuu

SEQ ID NO: 375030 - RNA, 32 nt, Human
cccuuccccuucuccccuguccucaccauaug

SEQ ID NO: 375031 - RNA, 32 nt, Human
cccuuccccuuuccuuaacccuuccuagagcg

SEQ ID NO: 375032 - RNA, 32 nt, Human
cccuuccccuuuucccaaccuggacuuguuuu

SEQ ID NO: 375033 - RNA, 32 nt, Human
cccuucccgagcugaagccacagaguaggaga

SEQ ID NO: 375034 - RNA, 32 nt, Human
cccuucccgccuuccaaaaccugcuuccuuca

SEQ ID NO: 375035 - RNA, 18 nt, Human
cccuucccucaagccagg

SEQ ID NO: 375036 - RNA, 32 nt, Human
cccuucccuccaauacaucuuauagggcugcu

SEQ ID NO: 375037 - RNA, 32 nt, Human
cccuucccuccaggagccagguagggccugag

SEQ ID NO: 375038 - RNA, 32 nt, Human
cccuucccuccccaucuccccuacuucccugg

SEQ ID NO: 375039 - RNA, 32 nt, Human
cccuucccucccccuucacccacucccuccag

SEQ ID NO: 375040 - RNA, 32 nt, Human
cccuucccucccccuuccucucuuccuuccuu

SEQ ID NO: 375041 - RNA, 32 nt, Human
cccuucccuccccguuuuucauggccugcuga

SEQ ID NO: 375042 - RNA, 21 nt, Human
cccuucccucuccucagccca

SEQ ID NO: 375043 - RNA, 32 nt, Human
cccuucccucuucccucucccucucucuggga

SEQ ID NO: 375044 - RNA, 32 nt, Human
cccuucccucuucuccuuacauauuauaggug

SEQ ID NO: 375045 - RNA, 32 nt, Human
cccuucccugccucuugccugugucccagccu

SEQ ID NO: 375046 - RNA, 32 nt, Human
cccuucccugcuccaucccuguggcaccauua

SEQ ID NO: 375047 - RNA, 32 nt, Human
cccuucccugcucccacccaccugacuccaaa

SEQ ID NO: 375048 - RNA, 32 nt, Human
cccuucccugcucugcugcauggggccccaug

SEQ ID NO: 375049 - RNA, 32 nt, Human
cccuucccugcucuuccaccaguaaaggcucc

SEQ ID NO: 375050 - RNA, 22 nt, Human
cccuucccuggcacagccccua

SEQ ID NO: 375051 - RNA, 32 nt, Human
cccuucccugucugcugagcccuggcccccug

SEQ ID NO: 375052 - RNA, 32 nt, Human
cccuucccuuccccucucccuucugccuuucc

SEQ ID NO: 375053 - RNA, 32 nt, Human
cccuucccuucccuggagcugcccugccuuuc

SEQ ID NO: 375054 - RNA, 32 nt, Human
cccuucccuucccuuccaucucuuccuuuccu

SEQ ID NO: 375055 - RNA, 32 nt, Human
cccuucccuucccuucccuuuccuuuucccuu

SEQ ID NO: 375056 - RNA, 32 nt, Human
cccuucccuucccuuuccuuuucccuuucccu

SEQ ID NO: 375057 - RNA, 32 nt, Human
cccuucccuuuccuguccuguccuuucuuucu

SEQ ID NO: 375058 - RNA, 32 nt, Human
cccuucccuuucucccuuggcuguucacccag

SEQ ID NO: 375059 - RNA, 23 nt, Human
cccuuccgauuccaccuccaccu

SEQ ID NO: 375060 - RNA, 23 nt, Human
cccuuccgauuccaccuccgccu

SEQ ID NO: 375061 - RNA, 32 nt, Human
cccuuccgcuccugcccagccugggggaagga

SEQ ID NO: 375062 - RNA, 32 nt, Human
cccuuccgucucuguuguauccuugaaaacca

SEQ ID NO: 375063 - RNA, 32 nt, Human
cccuuccgucuucucccucauccuuuccaaac

SEQ ID NO: 375064 - RNA, 32 nt, Human
cccuuccguucccucccugucagggcguaauu

SEQ ID NO: 375065 - RNA, 32 nt, Human
cccuuccuaagcugugggcacaguggccaggc

SEQ ID NO: 375066 - RNA, 32 nt, Human
cccuuccuauucuccugccaugggugcagacc

SEQ ID NO: 375067 - RNA, 17 nt, Human
cccuuccucacuggcca

SEQ ID NO: 375068 - RNA, 32 nt, Human
cccuuccucagugcccuaguggccacuuucag

SEQ ID NO: 375069 - RNA, 19 nt, Human
cccuuccuccaggggucuu

SEQ ID NO: 375070 - RNA, 32 nt, Human
cccuuccucccucccucccuccuccuccuucc

SEQ ID NO: 375071 - RNA, 32 nt, Human
cccuuccuccuggcaugguggaaagugcacug

SEQ ID NO: 375072 - RNA, 32 nt, Human
cccuuccucucacuccugccuccgcuggcuuu

SEQ ID NO: 375073 - RNA, 32 nt, Human
cccuuccucucagaccaguacgguggccgacg

SEQ ID NO: 375074 - RNA, 22 nt, Human
cccuuccucuccaccuccuccu

SEQ ID NO: 375075 - RNA, 32 nt, Human
cccuuccucuccaucucucccucucuccaaga

SEQ ID NO: 375076 - RNA, 32 nt, Human
cccuuccucucccaccaugcgaugagcauccu

SEQ ID NO: 375077 - RNA, 20 nt, Human
cccuuccucuccucacucug

SEQ ID NO: 375078 - RNA, 32 nt, Human
cccuuccucucugcuucccucccaggccucgc

SEQ ID NO: 375079 - RNA, 32 nt, Human
cccuuccucugggagcucugugccacugaggu

SEQ ID NO: 375080 - RNA, 32 nt, Human
cccuuccucuuuuccauugucuuuggcucuca

SEQ ID NO: 375081 - RNA, 25 nt, Human
cccuuccugagcuacauuaaggcuc

SEQ ID NO: 375082 - RNA, 32 nt, Human
cccuuccugcagccgccgccuccgaaggagcg

SEQ ID NO: 375083 - RNA, 32 nt, Human
cccuuccugcagcuaccuccgcacaaagagcu

SEQ ID NO: 375084 - RNA, 32 nt, Human
cccuuccugcagggaaccucaggcuucagaga

SEQ ID NO: 375085 - RNA, 32 nt, Human
cccuuccugccucccccaggguccuuucagag

SEQ ID NO: 375086 - RNA, 32 nt, Human
cccuuccugccugggccuccccuuggccuacc

SEQ ID NO: 375087 - RNA, 32 nt, Human
cccuuccugccuguaacccuuaccggcuccau

SEQ ID NO: 375088 - RNA, 32 nt, Human
cccuuccugcuuccuguuaccugucuugcucc

SEQ ID NO: 375089 - RNA, 21 nt, Human
cccuuccuggaagaaaacugg

SEQ ID NO: 375090 - RNA, 32 nt, Human
cccuuccuggacagcguaaggccuccacaucu

SEQ ID NO: 375091 - RNA, 32 nt, Human
cccuuccuguucucaccuggcuguggcuggcc

SEQ ID NO: 375092 - RNA, 32 nt, Human
cccuuccuuaauacugggugaugugugaauau

SEQ ID NO: 375093 - RNA, 32 nt, Human
cccuuccuuagguugaugugcuugggaaagcu

SEQ ID NO: 375094 - RNA, 32 nt, Human
cccuuccuuaugcauacugagauagcuuagug

SEQ ID NO: 375095 - RNA, 32 nt, Human
cccuuccuuaugucuccagucuggugccaggu

SEQ ID NO: 375096 - RNA, 21 nt, Human
cccuuccuucacccaccaccc

SEQ ID NO: 375097 - RNA, 32 nt, Human
cccuuccuucccggccauucucccucuuguuu

SEQ ID NO: 375098 - RNA, 32 nt, Human
cccuuccuuccucccuccuucucccucuccuu

SEQ ID NO: 375099 - RNA, 32 nt, Human
cccuuccuuccucccuugcccaaagauccuuu

SEQ ID NO: 375100 - RNA, 32 nt, Human
cccuuccuucuuucucccuccgccucccgagc

SEQ ID NO: 375101 - RNA, 18 nt, Human
cccuuccuuucccucuga

SEQ ID NO: 375102 - RNA, 32 nt, Human
cccuuccuuucugugucuccugccucaucggc

SEQ ID NO: 375103 - RNA, 32 nt, Human
cccuucgaaaaaugaucaacuauugccauaua

SEQ ID NO: 375104 - RNA, 32 nt, Human
cccuucgaguuucuaguuacagacacaaucau

SEQ ID NO: 375105 - RNA, 32 nt, Human
cccuucggcuggcgcccucccaugcucucggc

SEQ ID NO: 375106 - RNA, 32 nt, Human
cccuucggggcagaggagggcggggacucggg

SEQ ID NO: 375107 - RNA, 19 nt, Human
cccuucggugacucccugg

SEQ ID NO: 375108 - RNA, 32 nt, Human
cccuucggugugccacugaagauccugguguc

SEQ ID NO: 375109 - RNA, 32 nt, Human
cccuucggugugccacugaagauccugguguu

SEQ ID NO: 375110 - RNA, 32 nt, Human
cccuucguaccucugguccucucuccagcccu

SEQ ID NO: 375111 - RNA, 21 nt, Human
cccuucguccugccccuccuc

SEQ ID NO: 375112 - RNA, 32 nt, Human
cccuucgugugccccugcccagccucuuggca

SEQ ID NO: 375113 - RNA, 32 nt, Human
cccuucuaccugccacucacacagccaggugc

SEQ ID NO: 375114 - RNA, 32 nt, Human
cccuucuaccuuuugaagugauuugcaguuac

SEQ ID NO: 375115 - RNA, 32 nt, Human
cccuucuacugcacugcccaagguguguguag

SEQ ID NO: 375116 - RNA, 32 nt, Human
cccuucuacuguccucuuccccuuggcugugu

SEQ ID NO: 375117 - RNA, 32 nt, Human
cccuucuagaaauaggaggagccccaggaucu

SEQ ID NO: 375118 - RNA, 32 nt, Human
cccuucuagagcaaggaauugacuuuuaggag

SEQ ID NO: 375119 - RNA, 32 nt, Human
cccuucuaggacaaccccaccagcaaggaggu

SEQ ID NO: 375120 - RNA, 32 nt, Human
cccuucuauaugccaucucugaugggagccuc

SEQ ID NO: 375121 - RNA, 32 nt, Human
cccuucucaagacuuugagcaguuagaagugc

SEQ ID NO: 375122 - RNA, 32 nt, Human
cccuucucaaugaucacgucaggagacacaug

SEQ ID NO: 375123 - RNA, 32 nt, Human
cccuucucacugccacugcucuugccucuugu

SEQ ID NO: 375124 - RNA, 32 nt, Human
cccuucucaggggccccaccugacugaggcuu

SEQ ID NO: 375125 - RNA, 32 nt, Human
cccuucucaucaucuucaucucagcuauuaaa

SEQ ID NO: 375126 - RNA, 32 nt, Human
cccuucucauuucauaggcaucuauuccugcc

SEQ ID NO: 375127 - RNA, 32 nt, Human
cccuucucauuucccuuaaccuuaucuucaaa

SEQ ID NO: 375128 - RNA, 16 nt, Human
cccuucuccaccagau

SEQ ID NO: 375129 - RNA, 32 nt, Human
cccuucuccacugcccccuccugugucugggu

SEQ ID NO: 375130 - RNA, 32 nt, Human
cccuucuccaucgcccucucccagaaagcucc

SEQ ID NO: 375131 - RNA, 32 nt, Human
cccuucuccauuucguaccaucuguguuccac

SEQ ID NO: 375132 - RNA, 32 nt, Human
cccuucucccacacucguuucccuuugcucau

SEQ ID NO: 375133 - RNA, 32 nt, Human
cccuucucccacccucgcucgcguagccaugg

SEQ ID NO: 375134 - RNA, 32 nt, Human
cccuucuccccagccagagguggagccaagug

SEQ ID NO: 375135 - RNA, 32 nt, Human
cccuucucccccucccccucccccacuccccc

SEQ ID NO: 375136 - RNA, 32 nt, Human
cccuucucccggccccagccugccucccuccu

SEQ ID NO: 375137 - RNA, 32 nt, Human
cccuucucccugaggagccucagcuuucccuc

SEQ ID NO: 375138 - RNA, 32 nt, Human
cccuucuccgcagggcccuguggcucuggcag

SEQ ID NO: 375139 - RNA, 32 nt, Human
cccuucuccuccaauacauaaaggacacagac

SEQ ID NO: 375140 - RNA, 32 nt, Human
cccuucuccugccucagccucccgaguagcug

SEQ ID NO: 375141 - RNA, 32 nt, Human
cccuucuccuucccggccccaccaacacucug

SEQ ID NO: 375142 - RNA, 32 nt, Human
cccuucuccuuuccuuucuuuccuucagguca

SEQ ID NO: 375143 - RNA, 32 nt, Human
cccuucucguguuugcccaccgucuaggccau

SEQ ID NO: 375144 - RNA, 32 nt, Human
cccuucucuagaauccagcccagaucugaggc

SEQ ID NO: 375145 - RNA, 32 nt, Human
cccuucucuaugaaccuugugccuucuguccu

SEQ ID NO: 375146 - RNA, 32 nt, Human
cccuucucucuuuucuucucaggauuuaaaau

SEQ ID NO: 375147 - RNA, 32 nt, Human
cccuucucugcccauuccccagccucucuucc

SEQ ID NO: 375148 - RNA, 32 nt, Human
cccuucucugcuuaaagaaugcccuuuaugau

SEQ ID NO: 375149 - RNA, 32 nt, Human
cccuucucuuuuaauggagacagggucuugca

SEQ ID NO: 375150 - RNA, 32 nt, Human
cccuucugaaucagcugggaugacuggcuuug

SEQ ID NO: 375151 - RNA, 32 nt, Human
cccuucugacugccuuccauccacucucaccc

SEQ ID NO: 375152 - RNA, 32 nt, Human
cccuucugagccugugcagcugcuggagcacg

SEQ ID NO: 375153 - RNA, 32 nt, Human
cccuucugagguauggcccauccaagacuuuu

SEQ ID NO: 375154 - RNA, 32 nt, Human
cccuucugaguaccucucuggcugccaaauug

SEQ ID NO: 375155 - RNA, 32 nt, Human
cccuucugaugauuccaauguguuggaaaguu

SEQ ID NO: 375156 - RNA, 32 nt, Human
cccuucugcagcuuuccaaagcuacauugacg

SEQ ID NO: 375157 - RNA, 32 nt, Human
cccuucugcccagggcccaguguucuugauag

SEQ ID NO: 375158 - RNA, 32 nt, Human
cccuucugcccucucuccauugccugcacccc

SEQ ID NO: 375159 - RNA, 32 nt, Human
cccuucugcccuuaaaugcuuccuugggcaag

SEQ ID NO: 375160 - RNA, 32 nt, Human
cccuucugcgcugccccagagccugggaggga

SEQ ID NO: 375161 - RNA, 32 nt, Human
cccuucuggaacccuggaccuggaccugcugu

SEQ ID NO: 375162 - RNA, 32 nt, Human
cccuucuggaggcuggaggggagaggccaagc

SEQ ID NO: 375163 - RNA, 32 nt, Human
cccuucuggcaccagauggggcuugguuaguu

SEQ ID NO: 375164 - RNA, 32 nt, Human
cccuucuggccacuggcugugguggcuguagu

SEQ ID NO: 375165 - RNA, 32 nt, Human
cccuucuggccugcucccuuccuccuuggcuc

SEQ ID NO: 375166 - RNA, 32 nt, Human
cccuucuggccuuggugaucacuuuuucagga

SEQ ID NO: 375167 - RNA, 32 nt, Human
cccuucugggcaacgaagcaaugaaauuucca

SEQ ID NO: 375168 - RNA, 32 nt, Human
cccuucuguaggaaacagcagagaccaggugg

SEQ ID NO: 375169 - RNA, 32 nt, Human
cccuucugugaguagaugcacaccucugaggc

SEQ ID NO: 375170 - RNA, 32 nt, Human
cccuucugugcccauggucaggagcuauucgg

SEQ ID NO: 375171 - RNA, 32 nt, Human
cccuucuguggaauaugacagugucucuauuu

SEQ ID NO: 375172 - RNA, 32 nt, Human
cccuucuguucuguucauguagcacagauaag

SEQ ID NO: 375173 - RNA, 32 nt, Human
cccuucuuaccugaacaaccaugagcgcucca

SEQ ID NO: 375174 - RNA, 32 nt, Human
cccuucuucccaacuuccuacuuccuagcccu

SEQ ID NO: 375175 - RNA, 32 nt, Human
cccuucuucccuuuuauaguucaucagccaca

SEQ ID NO: 375176 - RNA, 32 nt, Human
cccuucuuccuuuccaaccccuuccuuccuuu

SEQ ID NO: 375177 - RNA, 32 nt, Human
cccuucuucuagcagucugugccuccucucug

SEQ ID NO: 375178 - RNA, 32 nt, Human
cccuucuucugaaucucugggcaguccccauu

SEQ ID NO: 375179 - RNA, 32 nt, Human
cccuucuucuuuccuuccucccucccucucuc

SEQ ID NO: 375180 - RNA, 32 nt, Human
cccuucuugcacugccaccucacuuuccacca

SEQ ID NO: 375181 - RNA, 32 nt, Human
cccuucuugcaggucucagcuugcgggguggg

SEQ ID NO: 375182 - RNA, 32 nt, Human
cccuucuugcccaggcuggagugcaagggcgc

SEQ ID NO: 375183 - RNA, 32 nt, Human
cccuucuugccucaccauuccccuaggcaggc

SEQ ID NO: 375184 - RNA, 32 nt, Human
cccuucuuguguccuggcuggcugggaugcug

SEQ ID NO: 375185 - RNA, 22 nt, Human
cccuucuuucugcccuuccuca

SEQ ID NO: 375186 - RNA, 32 nt, Human
cccuucuuucuuuccucuuuccccaggccgcc

SEQ ID NO: 375187 - RNA, 32 nt, Human
cccuucuuugggcucgggggcucccggagcag

SEQ ID NO: 375188 - RNA, 32 nt, Human
cccuugaacccccaugcaaugagcuucuaacu

SEQ ID NO: 375189 - RNA, 32 nt, Human
cccuugaacuucugcccucuguucagggcuga

SEQ ID NO: 375190 - RNA, 32 nt, Human
cccuugaagcacagcagauaagaguguugcug

SEQ ID NO: 375191 - RNA, 32 nt, Human
cccuugaaucuuccgcuuccuccccaccgauu

SEQ ID NO: 375192 - RNA, 28 nt, Human
cccuugacaggcugacuuugguggcuua

SEQ ID NO: 375193 - RNA, 32 nt, Human
cccuugaccaccucugggggccugucagccug

SEQ ID NO: 375194 - RNA, 32 nt, Human
cccuugacccagaacuuccuccccacaaaaau

SEQ ID NO: 375195 - RNA, 32 nt, Human
cccuugaccccaguccacaguggucacaggua

SEQ ID NO: 375196 - RNA, 21 nt, Human
cccuugaccccugggggccug

SEQ ID NO: 375197 - RNA, 22 nt, Human
cccuugacccuggcuggccugc

SEQ ID NO: 375198 - RNA, 32 nt, Human
cccuugacuccucugugcuuugguaauaaauu

SEQ ID NO: 375199 - RNA, 23 nt, Human
cccuugacuucugcuggguccua

SEQ ID NO: 375200 - RNA, 32 nt, Human
cccuugagaagcagauguaauuccuugaguga

SEQ ID NO: 375201 - RNA, 23 nt, Human
cccuugagaccaugcggugcaga

SEQ ID NO: 375202 - RNA, 32 nt, Human
cccuugagaccuggaaccagagccacaggccc

SEQ ID NO: 375203 - RNA, 32 nt, Human
cccuugagagaagaggcagcagcagcggcggc

SEQ ID NO: 375204 - RNA, 21 nt, Human
cccuugagaucgcggcaccgg

SEQ ID NO: 375205 - RNA, 32 nt, Human
cccuugagcccaggaagcagagguugcaguga

SEQ ID NO: 375206 - RNA, 32 nt, Human
cccuugagccuaggagguugaggcugcaguga

SEQ ID NO: 375207 - RNA, 21 nt, Human
cccuugagcugacuguggcug

SEQ ID NO: 375208 - RNA, 25 nt, Human
cccuugagcugcaccgcggcgcagg

SEQ ID NO: 375209 - RNA, 20 nt, Human
cccuugagcugcuucaguga

SEQ ID NO: 375210 - RNA, 32 nt, Human
cccuugaggaagcaagcuccacggccaccaua

SEQ ID NO: 375211 - RNA, 21 nt, Human
cccuugaggcggcggcacaga

SEQ ID NO: 375212 - RNA, 32 nt, Human
cccuugaggcuggggagcuccacuccuuggcu

SEQ ID NO: 375213 - RNA, 32 nt, Human
cccuugaggucucuccuuugagccguggucac

SEQ ID NO: 375214 - RNA, 32 nt, Human
cccuugaggugccuccucuccucugcccaggg

SEQ ID NO: 375215 - RNA, 32 nt, Human
cccuugaguccaggagguugaggcugcaguga

SEQ ID NO: 375216 - RNA, 32 nt, Human
cccuugagucuagacuguggccacagccucug

SEQ ID NO: 375217 - RNA, 32 nt, Human
cccuugaugagggaaaaugucccacugcacug

SEQ ID NO: 375218 - RNA, 32 nt, Human
cccuugauuucagcugaaaauauucaugucug

SEQ ID NO: 375219 - RNA, 32 nt, Human
cccuugcaacuuggcaucauccggagcuucuu

SEQ ID NO: 375220 - RNA, 32 nt, Human
cccuugcagccaucugaaaugguugugacaaa

SEQ ID NO: 375221 - RNA, 32 nt, Human
cccuugcagccugggcuguguaugccugcgga

SEQ ID NO: 375222 - RNA, 32 nt, Human
cccuugcaggagguggagguuguugguggagg

SEQ ID NO: 375223 - RNA, 32 nt, Human
cccuugcagggcagugaugaugacaugaaaug

SEQ ID NO: 375224 - RNA, 32 nt, Human
cccuugcaggguggccaaccaacagaacacca

SEQ ID NO: 375225 - RNA, 32 nt, Human
cccuugcagggugggugagcucucaggccgag

SEQ ID NO: 375226 - RNA, 32 nt, Human
cccuugcaucuuucugaacucuucuugauuuu

SEQ ID NO: 375227 - RNA, 32 nt, Human
cccuugcauuuuuguuuccauccucuucuuug

SEQ ID NO: 375228 - RNA, 32 nt, Human
cccuugccaaaaagauuuucuaauacugcuug

SEQ ID NO: 375229 - RNA, 32 nt, Human
cccuugccaaaauauuuagcaugugaaaaggu

SEQ ID NO: 375230 - RNA, 32 nt, Human
cccuugccacccaaauguuagaaaaauagcug

SEQ ID NO: 375231 - RNA, 32 nt, Human
cccuugccagaacccugcuucuucccagagac

SEQ ID NO: 375232 - RNA, 32 nt, Human
cccuugccagagccacugcagagucagacgca

SEQ ID NO: 375233 - RNA, 32 nt, Human
cccuugccagaucucccucccucucucugugc

SEQ ID NO: 375234 - RNA, 32 nt, Human
cccuugcccaggaggccuugccagccugugug

SEQ ID NO: 375235 - RNA, 19 nt, Human
cccuugcccaucagagagg

SEQ ID NO: 375236 - RNA, 32 nt, Human
cccuugcccauggucugucuaucucuuuccua

SEQ ID NO: 375237 - RNA, 23 nt, Human
cccuugcccauuuuuuaauaaua

SEQ ID NO: 375238 - RNA, 32 nt, Human
cccuugccccacugcaggcugccugggacgcc

SEQ ID NO: 375239 - RNA, 19 nt, Human
cccuugccccaguccugcc

SEQ ID NO: 375240 - RNA, 17 nt, Human
cccuugcccucuccuca

SEQ ID NO: 375241 - RNA, 32 nt, Human
cccuugcccugagcucuguucuccauggugcc

SEQ ID NO: 375242 - RNA, 28 nt, Human
cccuugcccugggcugccuccuccugag

SEQ ID NO: 375243 - RNA, 32 nt, Human
cccuugcccuguuuuucccucuuccagcugac

SEQ ID NO: 375244 - RNA, 32 nt, Human
cccuugccgccucccuccucugcccggccgca

SEQ ID NO: 375245 - RNA, 32 nt, Human
cccuugccggaggccagcuggcagggccuuuc

SEQ ID NO: 375246 - RNA, 32 nt, Human
cccuugccuagggggcagagggugcaguggca

SEQ ID NO: 375247 - RNA, 32 nt, Human
cccuugccucaagugagcuucaaccuuagccu

SEQ ID NO: 375248 - RNA, 32 nt, Human
cccuugccuccaccacccccuggcccugcacu

SEQ ID NO: 375249 - RNA, 32 nt, Human
cccuugccucucccccuccaccaccaccuugu

SEQ ID NO: 375250 - RNA, 32 nt, Human
cccuugccucuccuggauggguugucagcccu

SEQ ID NO: 375251 - RNA, 32 nt, Human
cccuugccucuucccuucccacuggugcauua

SEQ ID NO: 375252 - RNA, 32 nt, Human
cccuugccucuugugccccagcaccuucucuc

SEQ ID NO: 375253 - RNA, 32 nt, Human
cccuugccugccccucccuguggcagggcuaa

SEQ ID NO: 375254 - RNA, 32 nt, Human
cccuugccugggcaggagauaacugagccugu

SEQ ID NO: 375255 - RNA, 32 nt, Human
cccuugccuguagucucagcacuuugggaggc

SEQ ID NO: 375256 - RNA, 32 nt, Human
cccuugccuuccagauaaaguccauguuucuu

SEQ ID NO: 375257 - RNA, 32 nt, Human
cccuugccuuugccugcgcggcucagaaucac

SEQ ID NO: 375258 - RNA, 32 nt, Human
cccuugccuuuuccagcuucuggaggccaccc

SEQ ID NO: 375259 - RNA, 32 nt, Human
cccuugcgccucagcaguuugcagugggguaa

SEQ ID NO: 375260 - RNA, 32 nt, Human
cccuugcgccuucucccacagggcccagcccc

SEQ ID NO: 375261 - RNA, 32 nt, Human
cccuugcggcggugugaacguguguccgcagc

SEQ ID NO: 375262 - RNA, 32 nt, Human
cccuugcuaggagcaguugccagcaagcaucc

SEQ ID NO: 375263 - RNA, 32 nt, Human
cccuugcucccaucccugcagcaugaacaagg

SEQ ID NO: 375264 - RNA, 32 nt, Human
cccuugcuccccacagggagagaagagcucug

SEQ ID NO: 375265 - RNA, 32 nt, Human
cccuugcucgcuagaauaaacugcuuugcgcu

SEQ ID NO: 375266 - RNA, 32 nt, Human
cccuugcuggccccagcccugcuggggauccc

SEQ ID NO: 375267 - RNA, 32 nt, Human
cccuugcuuaccucucagccuuagcucuccca

SEQ ID NO: 375268 - RNA, 32 nt, Human
cccuugcuucuguuuucuaccucuccaggccu

SEQ ID NO: 375269 - RNA, 32 nt, Human
cccuugcuugcaucuuccaaagcuauuucgaa

SEQ ID NO: 375270 - RNA, 32 nt, Human
cccuugcuugccaaauugcaggcaagaagaag

SEQ ID NO: 375271 - RNA, 32 nt, Human
cccuuggaaagaaauguagaugauauguuucg

SEQ ID NO: 375272 - RNA, 32 nt, Human
cccuuggaaucagagcaaugugucuucuuucc

SEQ ID NO: 375273 - RNA, 32 nt, Human
cccuuggaaugagggaggucucaagagauaua

SEQ ID NO: 375274 - RNA, 22 nt, Human
cccuuggacacgcucagugggg

SEQ ID NO: 375275 - RNA, 32 nt, Human
cccuuggacauaugugaaaucuuuuugucuuu

SEQ ID NO: 375276 - RNA, 22 nt, Human
cccuuggacucucagaugcagg

SEQ ID NO: 375277 - RNA, 32 nt, Human
cccuuggacucugccaggaucaacugcccaga

SEQ ID NO: 375278 - RNA, 32 nt, Human
cccuuggacucugccugggcuggagucuaggg

SEQ ID NO: 375279 - RNA, 23 nt, Human
cccuuggagaucuugcagcugga

SEQ ID NO: 375280 - RNA, 32 nt, Human
cccuuggaggaaccaaaggcugugcauuguua

SEQ ID NO: 375281 - RNA, 22 nt, Human
cccuuggaggcaggcagugagg

SEQ ID NO: 375282 - RNA, 32 nt, Human
cccuuggagggugccagguguguggugaccuu

SEQ ID NO: 375283 - RNA, 32 nt, Human
cccuuggaguguugguggagaucagagugccg

SEQ ID NO: 375284 - RNA, 32 nt, Human
cccuuggauagagagggaaacugaggccagca

SEQ ID NO: 375285 - RNA, 32 nt, Human
cccuuggauuucuucagccagcugcugaagua

SEQ ID NO: 375286 - RNA, 32 nt, Human
cccuuggcaaaugaaaguuuuauuuucguuug

SEQ ID NO: 375287 - RNA, 32 nt, Human
cccuuggcaaccacuaaucugccuucuaucuc

SEQ ID NO: 375288 - RNA, 32 nt, Human
cccuuggcagcagagaaaacccacugaaagau

SEQ ID NO: 375289 - RNA, 32 nt, Human
cccuuggcaggcgauacggcagcucugugccc

SEQ ID NO: 375290 - RNA, 26 nt, Human
cccuuggccaaguggaucacuugagg

SEQ ID NO: 375291 - RNA, 22 nt, Human
cccuuggccacucuugggacuu

SEQ ID NO: 375292 - RNA, 32 nt, Human
cccuuggccauccuggcccucccaggagaagc

SEQ ID NO: 375293 - RNA, 32 nt, Human
cccuuggcccaggaggcagagguugcagugag

SEQ ID NO: 375294 - RNA, 32 nt, Human
cccuuggcccccuccccucccccagaccucca

SEQ ID NO: 375295 - RNA, 32 nt, Human
cccuuggccgcagaggccucagcccuggggag

SEQ ID NO: 375296 - RNA, 18 nt, Human
cccuuggccggugaaaga

SEQ ID NO: 375297 - RNA, 32 nt, Human
cccuuggccugaguaaacuuggaaaggggcuc

SEQ ID NO: 375298 - RNA, 24 nt, Human
cccuuggccuggaccuggggccug

SEQ ID NO: 375299 - RNA, 32 nt, Human
cccuuggccuuuccaccucccuccuuggggcu

SEQ ID NO: 375300 - RNA, 20 nt, Human
cccuuggcggccguggagcc

SEQ ID NO: 375301 - RNA, 32 nt, Human
cccuuggcucaccuuucucuccucagcagaac

SEQ ID NO: 375302 - RNA, 32 nt, Human
cccuuggcucagaguguggugcuagaaacugg

SEQ ID NO: 375303 - RNA, 32 nt, Human
cccuuggcuccugcuuucugcuugggcccugc

SEQ ID NO: 375304 - RNA, 25 nt, Human
cccuuggcucuccaccugggauuug

SEQ ID NO: 375305 - RNA, 32 nt, Human
cccuuggcugaugccuccucugggucacauug

SEQ ID NO: 375306 - RNA, 22 nt, Human
cccuuggcuggagaagaccggg

SEQ ID NO: 375307 - RNA, 32 nt, Human
cccuuggcugugaugccccucucccgauuucc

SEQ ID NO: 375308 - RNA, 32 nt, Human
cccuuggcuucccaggaagaccaccugcuuuu

SEQ ID NO: 375309 - RNA, 32 nt, Human
cccuuggcuucuccucccucuacucagccuua

SEQ ID NO: 375310 - RNA, 20 nt, Human
cccuuggcuugcccuccuca

SEQ ID NO: 375311 - RNA, 32 nt, Human
cccuugggacaguaguguuugggugaauguua

SEQ ID NO: 375312 - RNA, 32 nt, Human
cccuugggagacaggaacuggcgaguucaggu

SEQ ID NO: 375313 - RNA, 32 nt, Human
cccuugggagcugacagcccaugggcauuaag

SEQ ID NO: 375314 - RNA, 32 nt, Human
cccuugggaggaacaacaugagcucaggaagc

SEQ ID NO: 375315 - RNA, 32 nt, Human
cccuugggaggcggguggaggagcagcagagg

SEQ ID NO: 375316 - RNA, 25 nt, Human
cccuugggaucuaccuugggucuua

SEQ ID NO: 375317 - RNA, 22 nt, Human
cccuugggcauaucagugacag

SEQ ID NO: 375318 - RNA, 21 nt, Human
cccuugggccccugggagcca

SEQ ID NO: 375319 - RNA, 32 nt, Human
cccuugggcccugccuggagugugugccgccu

SEQ ID NO: 375320 - RNA, 32 nt, Human
cccuugggcucccuccugccuccucucucucc

SEQ ID NO: 375321 - RNA, 22 nt, Human
cccuugggcuguggcagcagga

SEQ ID NO: 375322 - RNA, 32 nt, Human
cccuugggcuucaggcuccugagcuggcagca

SEQ ID NO: 375323 - RNA, 20 nt, Human
cccuugggcuuugaaagcca

SEQ ID NO: 375324 - RNA, 22 nt, Human
cccuuggggccaaaaaacaggg

SEQ ID NO: 375325 - RNA, 22 nt, Human
cccuugggucagacuggagcca

SEQ ID NO: 375326 - RNA, 22 nt, Human
cccuugggucugcaaggagcca

SEQ ID NO: 375327 - RNA, 32 nt, Human
cccuugggugcaugagucacagcauggaucca

SEQ ID NO: 375328 - RNA, 21 nt, Human
cccuugggugccccacacagg

SEQ ID NO: 375329 - RNA, 22 nt, Human
cccuuggguugcugcugagcca

SEQ ID NO: 375330 - RNA, 22 nt, Human
cccuuggguuugggaagaggca

SEQ ID NO: 375331 - RNA, 24 nt, Human
cccuuggguuuucuuuugauacca

SEQ ID NO: 375332 - RNA, 24 nt, Human
cccuuggguuuuuguacgaagcua

SEQ ID NO: 375333 - RNA, 32 nt, Human
cccuugguagaauccauauacaauauggauug

SEQ ID NO: 375334 - RNA, 32 nt, Human
cccuuggugaagcagaggcugaaggaaagggg

SEQ ID NO: 375335 - RNA, 32 nt, Human
cccuuggugaagccgugccagggggcucagcu

SEQ ID NO: 375336 - RNA, 32 nt, Human
cccuuggugagguggucaugcccgggcaaagg

SEQ ID NO: 375337 - RNA, 25 nt, Human
cccuuguaaaaccccgcaguacagg

SEQ ID NO: 375338 - RNA, 32 nt, Human
cccuuguagcaguuuucagccuccucuacccu

SEQ ID NO: 375339 - RNA, 32 nt, Human
cccuuguagcuggagagaagugucacauuuug

SEQ ID NO: 375340 - RNA, 32 nt, Human
cccuuguagucucuuauauaaguagaguccuu

SEQ ID NO: 375341 - RNA, 32 nt, Human
cccuuguauaccacugugcuugcacuacauca

SEQ ID NO: 375342 - RNA, 32 nt, Human
cccuugucaaagugcuugacugcaugcuggaa

SEQ ID NO: 375343 - RNA, 32 nt, Human
cccuugucacacuguucacaccugcccggcug

SEQ ID NO: 375344 - RNA, 32 nt, Human
cccuugucacccacgcagaggcagugucauga

SEQ ID NO: 375345 - RNA, 32 nt, Human
cccuugucacccaggcuguagugcgguggcgc

SEQ ID NO: 375346 - RNA, 32 nt, Human
cccuugucauuucccccagugagcucugauuu

SEQ ID NO: 375347 - RNA, 32 nt, Human
cccuuguccaccccucuccacaccccuuccag

SEQ ID NO: 375348 - RNA, 32 nt, Human
cccuugucccacuugccuaaucuccagcccag

SEQ ID NO: 375349 - RNA, 32 nt, Human
cccuuguccccacucccuucccaaguuccuuu

SEQ ID NO: 375350 - RNA, 32 nt, Human
cccuugucucaccaccaaccuugcuuguguag

SEQ ID NO: 375351 - RNA, 32 nt, Human
cccuugucucccucuucucuccuuugcaaaug

SEQ ID NO: 375352 - RNA, 32 nt, Human
cccuugucuccuagagaaagggacagggaauc

SEQ ID NO: 375353 - RNA, 32 nt, Human
cccuugucucuaccuuugcuuuccagggaagg

SEQ ID NO: 375354 - RNA, 18 nt, Human
cccuugucugggggguuu

SEQ ID NO: 375355 - RNA, 32 nt, Human
cccuugucuuugccaaguucuccacuagcuau

SEQ ID NO: 375356 - RNA, 32 nt, Human
cccuugugaugcuugucaucagucccauccca

SEQ ID NO: 375357 - RNA, 32 nt, Human
cccuugugcagagggagaaaugguuuuguuuu

SEQ ID NO: 375358 - RNA, 23 nt, Human
cccuugugcagauccagcaugga

SEQ ID NO: 375359 - RNA, 32 nt, Human
cccuugugccugauaccugcacuccggcuucc

SEQ ID NO: 375360 - RNA, 32 nt, Human
cccuugugccuuagccucaugggcugccuagg

SEQ ID NO: 375361 - RNA, 32 nt, Human
cccuugugcuccccacccccuaccuccaccug

SEQ ID NO: 375362 - RNA, 32 nt, Human
cccuuguggccaacucccuccccuucucacug

SEQ ID NO: 375363 - RNA, 30 nt, Human
cccuuguggcuuccuuagcuccuguucuug

SEQ ID NO: 375364 - RNA, 21 nt, Human
cccuuguggcuuugggaccua

SEQ ID NO: 375365 - RNA, 31 nt, Human
cccuugugguuucagcacagaaccugaaugc

SEQ ID NO: 375366 - RNA, 23 nt, Human
cccuuguguaaaguuacgaaaaa

SEQ ID NO: 375367 - RNA, 32 nt, Human
cccuugugugggaacaggugcuccccaaacac

SEQ ID NO: 375368 - RNA, 32 nt, Human
cccuuguguguaugugacagcguguauguaac

SEQ ID NO: 375369 - RNA, 32 nt, Human
cccuugugugugucccucugcccagcuccugc

SEQ ID NO: 375370 - RNA, 32 nt, Human
cccuuguguuggggugguauccagcauagcag

SEQ ID NO: 375371 - RNA, 32 nt, Human
cccuuguguuucacuccaccaccaaccccagg

SEQ ID NO: 375372 - RNA, 32 nt, Human
cccuuguuagauucagaggagcggccagaaga

SEQ ID NO: 375373 - RNA, 32 nt, Human
cccuuguucagaaauggccacuguaggaaagc

SEQ ID NO: 375374 - RNA, 32 nt, Human
cccuuguuccaggggugccugagccccuucaa

SEQ ID NO: 375375 - RNA, 32 nt, Human
cccuuguuccaucagaagcugcagugacucuu

SEQ ID NO: 375376 - RNA, 32 nt, Human
cccuuguugcccaggcuggagugcaauggcgc

SEQ ID NO: 375377 - RNA, 32 nt, Human
cccuuguugcccaggcuggagugcaauggcgu

SEQ ID NO: 375378 - RNA, 32 nt, Human
cccuuguugcccaggcuguaguacaauggcau

SEQ ID NO: 375379 - RNA, 32 nt, Human
cccuuguugccuggugaaccugcagggagggu

SEQ ID NO: 375380 - RNA, 32 nt, Human
cccuuguuggagauggaggcagcagacgugca

SEQ ID NO: 375381 - RNA, 20 nt, Human
cccuuguuggggagugggug

SEQ ID NO: 375382 - RNA, 18 nt, Human
cccuuguuuaaagauaaa

SEQ ID NO: 375383 - RNA, 32 nt, Human
cccuuguuuccuccaaaacaaacgacagcaac

SEQ ID NO: 375384 - RNA, 32 nt, Human
cccuuguuugaugagaggaaugagcagagcau

SEQ ID NO: 375385 - RNA, 32 nt, Human
cccuuguuuucccagccucucuuccaaauuuc

SEQ ID NO: 375386 - RNA, 31 nt, Human
cccuuguuuucuuucuguugccaaaggcaga

SEQ ID NO: 375387 - RNA, 32 nt, Human
cccuuuaaaauggaauauuaauuugaaaauua

SEQ ID NO: 375388 - RNA, 32 nt, Human
cccuuuacagcucuccuccagcccugggcaca

SEQ ID NO: 375389 - RNA, 32 nt, Human
cccuuuacauuuucuucuugauuuccuuucau

SEQ ID NO: 375390 - RNA, 32 nt, Human
cccuuuacuccugggaacuuugcagcugcccu

SEQ ID NO: 375391 - RNA, 32 nt, Human
cccuuuacuugucuuucugggguuuuucuguu

SEQ ID NO: 375392 - RNA, 32 nt, Human
cccuuuagaaacucucucccugcuguauauua

SEQ ID NO: 375393 - RNA, 32 nt, Human
cccuuuagaucuugauuuccuggucguuucuc

SEQ ID NO: 375394 - RNA, 32 nt, Human
cccuuuagauuuccaaaacacaauucuuauuu

SEQ ID NO: 375395 - RNA, 21 nt, Human
cccuuuagcccuugguucuuu

SEQ ID NO: 375396 - RNA, 32 nt, Human
cccuuuagccuuccaccuuucccuucuccucu

SEQ ID NO: 375397 - RNA, 23 nt, Human
cccuuuaguaacacuucugaaga

SEQ ID NO: 375398 - RNA, 32 nt, Human
cccuuuagucacccuuccuguggccuaacacu

SEQ ID NO: 375399 - RNA, 32 nt, Human
cccuuuagugcagggcucugcauuuacugugg

SEQ ID NO: 375400 - RNA, 32 nt, Human
cccuuuaucaguggaauggacagagcagcucu

SEQ ID NO: 375401 - RNA, 32 nt, Human
cccuuucacagcugauuauuucuguguccccu

SEQ ID NO: 375402 - RNA, 32 nt, Human
cccuuucacuguauguccucugaccccuuugg

SEQ ID NO: 375403 - RNA, 32 nt, Human
cccuuucacuucuguucucugcugcagaaagc

SEQ ID NO: 375404 - RNA, 32 nt, Human
ccgcugccugccgggcccucucuucugggacc

SEQ ID NO: 375405 - RNA, 19 nt, Human
ccgcugccuggcccgcgcc

SEQ ID NO: 375406 - RNA, 32 nt, Human
ccgcugccuggcguuccccagcacucggugug

SEQ ID NO: 375407 - RNA, 21 nt, Human
ccgcugccuucaccgccccga

SEQ ID NO: 375408 - RNA, 32 nt, Human
ccgcugccuugccugcacuggcauguccaugu

SEQ ID NO: 375409 - RNA, 32 nt, Human
ccgcugcgacccggcccugcaggcuccaggcg

SEQ ID NO: 375410 - RNA, 20 nt, Human
ccgcugcgccgccccugggc

SEQ ID NO: 375411 - RNA, 20 nt, Human
ccgcugcgccuguccgggcc

SEQ ID NO: 375412 - RNA, 23 nt, Human
ccgcugcgcgcggcuccugggcu

SEQ ID NO: 375413 - RNA, 20 nt, Human
ccgcugcgggaguccgagcc

SEQ ID NO: 375414 - RNA, 32 nt, Human
ccgcugcgggcugagggaggugcagggccuuc

SEQ ID NO: 375415 - RNA, 23 nt, Human
ccgcugcguccccuucccgggcu

SEQ ID NO: 375416 - RNA, 18 nt, Human
ccgcugcgucgcucggcu

SEQ ID NO: 375417 - RNA, 21 nt, Human
ccgcugcgucgucccugggcc

SEQ ID NO: 375418 - RNA, 32 nt, Human
ccgcugcguguuuuccucuugaucgggaacuc

SEQ ID NO: 375419 - RNA, 23 nt, Human
ccgcugcuaaucuccccugggcc

SEQ ID NO: 375420 - RNA, 17 nt, Human
ccgcugcuacggcggcc

SEQ ID NO: 375421 - RNA, 19 nt, Human
ccgcugcuaggacccgggc

SEQ ID NO: 375422 - RNA, 18 nt, Human
ccgcugcucaccccggcc

SEQ ID NO: 375423 - RNA, 32 nt, Human
ccgcugcuccacccucuggcccgguauccugc

SEQ ID NO: 375424 - RNA, 18 nt, Human
ccgcugcuccagcagccg

SEQ ID NO: 375425 - RNA, 23 nt, Human
ccgcugcucccaccucugggccg

SEQ ID NO: 375426 - RNA, 21 nt, Human
ccgcugcucccggaccgggcc

SEQ ID NO: 375427 - RNA, 20 nt, Human
ccgcugcucccggaggagcu

SEQ ID NO: 375428 - RNA, 17 nt, Human
ccgcugcuccgccgggc

SEQ ID NO: 375429 - RNA, 32 nt, Human
ccgcugcuccuccgccuggccugggccgucug

SEQ ID NO: 375430 - RNA, 17 nt, Human
ccgcugcuccugaaguu

SEQ ID NO: 375431 - RNA, 18 nt, Human
ccgcugcuccugccgggu

SEQ ID NO: 375432 - RNA, 32 nt, Human
ccgcugcuccuggagucuuggggagggguccg

SEQ ID NO: 375433 - RNA, 18 nt, Human
ccgcugcucgcagggcua

SEQ ID NO: 375434 - RNA, 19 nt, Human
ccgcugcucgcccaccgcc

SEQ ID NO: 375435 - RNA, 18 nt, Human
ccgcugcucgcgccugcc

SEQ ID NO: 375436 - RNA, 32 nt, Human
ccgcugcucgggcuggagaauagaugguuuug

SEQ ID NO: 375437 - RNA, 16 nt, Human
ccgcugcucgggggcc

SEQ ID NO: 375438 - RNA, 19 nt, Human
ccgcugcucguggcccggc

SEQ ID NO: 375439 - RNA, 18 nt, Human
ccgcugcucucacgagcc

SEQ ID NO: 375440 - RNA, 20 nt, Human
ccgcugcucucagcugggcc

SEQ ID NO: 375441 - RNA, 21 nt, Human
ccgcugcucucagcugggccc

SEQ ID NO: 375442 - RNA, 24 nt, Human
ccgcugcugcccugcugccccccu

SEQ ID NO: 375443 - RNA, 18 nt, Human
ccgcugcugccuccagcu

SEQ ID NO: 375444 - RNA, 32 nt, Human
ccgcugcugccuggcagcgccuggcacggcug

SEQ ID NO: 375445 - RNA, 19 nt, Human
ccgcugcugcgcugggccg

SEQ ID NO: 375446 - RNA, 16 nt, Human
ccgcugcugcggggcu

SEQ ID NO: 375447 - RNA, 32 nt, Human
ccgcugcugcugacacucgcucccaggcugca

SEQ ID NO: 375448 - RNA, 32 nt, Human
ccgcugcugcugccgccagccuagagccgccc

SEQ ID NO: 375449 - RNA, 32 nt, Human
ccgcugcuggagcuucuguugcugugaauacu

SEQ ID NO: 375450 - RNA, 32 nt, Human
ccgcugcuguccuggaggccuuggggaggccc

SEQ ID NO: 375451 - RNA, 21 nt, Human
ccgcugcugugcauuggguua

SEQ ID NO: 375452 - RNA, 20 nt, Human
ccgcugcugugccucgggcu

SEQ ID NO: 375453 - RNA, 18 nt, Human
ccgcugcugugcugggcc

SEQ ID NO: 375454 - RNA, 32 nt, Human
ccgcugcuucccucaccugccugccugucucc

SEQ ID NO: 375455 - RNA, 19 nt, Human
ccgcugcuucgcagggaca

SEQ ID NO: 375456 - RNA, 21 nt, Human
ccgcugcuucuuucccgagcu

SEQ ID NO: 375457 - RNA, 17 nt, Human
ccgcugcuugccaagcu

SEQ ID NO: 375458 - RNA, 20 nt, Human
ccgcugcuugccgcccccca

SEQ ID NO: 375459 - RNA, 20 nt, Human
ccgcugcuugcgcagcggcc

SEQ ID NO: 375460 - RNA, 32 nt, Human
ccgcugcuuuacggcugccucucccagacuag

SEQ ID NO: 375461 - RNA, 20 nt, Human
ccgcugcuuuucuccgaguc

SEQ ID NO: 375462 - RNA, 21 nt, Human
ccgcuggaagccaccgggcca

SEQ ID NO: 375463 - RNA, 32 nt, Human
ccgcuggagaaggguggggcuccucugagccu

SEQ ID NO: 375464 - RNA, 20 nt, Human
ccgcuggagagccccgagcu

SEQ ID NO: 375465 - RNA, 32 nt, Human
ccgcuggagcuccuacauggugcacuggaaga

SEQ ID NO: 375466 - RNA, 32 nt, Human
ccgcuggaggucgccgaggagccacagggcug

SEQ ID NO: 375467 - RNA, 21 nt, Human
ccgcuggccagcccugggcca

SEQ ID NO: 375468 - RNA, 32 nt, Human
ccgcuggcccaggucuccucuccagucccccu

SEQ ID NO: 375469 - RNA, 32 nt, Human
ccgcuggccccuccucugaauuuuaggauguc

SEQ ID NO: 375470 - RNA, 20 nt, Human
ccgcuggcgaccgcugagcc

SEQ ID NO: 375471 - RNA, 17 nt, Human
ccgcuggcgccccgggc

SEQ ID NO: 375472 - RNA, 32 nt, Human
ccgcuggcucccgccucauuucagcccagggu

SEQ ID NO: 375473 - RNA, 32 nt, Human
ccgcuggcugcagauggcugaccugcgggcgg

SEQ ID NO: 375474 - RNA, 32 nt, Human
ccgcuggcugggguucucugcagcccaggacu

SEQ ID NO: 375475 - RNA, 32 nt, Human
ccgcugggaagaggggacucgggaggacagcc

SEQ ID NO: 375476 - RNA, 22 nt, Human
ccgcugggagaaaagccagaug

SEQ ID NO: 375477 - RNA, 22 nt, Human
ccgcugggcugcugcucccccu

SEQ ID NO: 375478 - RNA, 32 nt, Human
ccgcugggcuggagaagccacugugggcacca

SEQ ID NO: 375479 - RNA, 32 nt, Human
ccgcuggggacagacaggaugggcagcagcuc

SEQ ID NO: 375480 - RNA, 32 nt, Human
ccgcuggggacugggcccugcucgcaugccgc

SEQ ID NO: 375481 - RNA, 18 nt, Human
ccgcugggucccagcgag

SEQ ID NO: 375482 - RNA, 32 nt, Human
ccgcuggguuccgucucuccuuccgcuucuuu

SEQ ID NO: 375483 - RNA, 17 nt, Human
ccgcuggguucugagcc

SEQ ID NO: 375484 - RNA, 25 nt, Human
ccgcugguacaauuuacccugugga

SEQ ID NO: 375485 - RNA, 32 nt, Human
ccgcuggucccaggcuggauugccguggcaca

SEQ ID NO: 375486 - RNA, 17 nt, Human
ccgcuggugcccugagc

SEQ ID NO: 375487 - RNA, 32 nt, Human
ccgcuggugucacuauggccugggugagaggc

SEQ ID NO: 375488 - RNA, 32 nt, Human
ccgcugguuccaccaagcacagucaaggucuc

SEQ ID NO: 375489 - RNA, 32 nt, Human
ccgcugguucccgaaggcagaucccuucuccc

SEQ ID NO: 375490 - RNA, 20 nt, Human
ccgcugguuccgcuggguca

SEQ ID NO: 375491 - RNA, 24 nt, Human
ccgcugguuccucgcuccggggcg

SEQ ID NO: 375492 - RNA, 32 nt, Human
ccgcuguaugcccuuuuuccuucuaagucaug

SEQ ID NO: 375493 - RNA, 32 nt, Human
ccgcugucaccaaggagcccauguggacacac

SEQ ID NO: 375494 - RNA, 21 nt, Human
ccgcugucaccgcccagagcu

SEQ ID NO: 375495 - RNA, 32 nt, Human
ccgcugucccgcccucucccgcugccgccgcc

SEQ ID NO: 375496 - RNA, 32 nt, Human
ccgcugucccucugcacucccugccuuggugc

SEQ ID NO: 375497 - RNA, 20 nt, Human
ccgcuguccggcccccgagc

SEQ ID NO: 375498 - RNA, 20 nt, Human
ccgcugucggacucugggcc

SEQ ID NO: 375499 - RNA, 22 nt, Human
ccgcugucgugugucugagcca

SEQ ID NO: 375500 - RNA, 32 nt, Human
ccgcugucucugcuauuuccauccuccccaua

SEQ ID NO: 375501 - RNA, 32 nt, Human
ccgcugugaccucaccagccaugccagcgccc

SEQ ID NO: 375502 - RNA, 18 nt, Human
ccgcugugcagugucaug

SEQ ID NO: 375503 - RNA, 21 nt, Human
ccgcugugcccgcccugggcu

SEQ ID NO: 375504 - RNA, 32 nt, Human
ccgcugugcuuccucugcaguaugaagacuuu

SEQ ID NO: 375505 - RNA, 32 nt, Human
ccgcuguggaagcuuuguccuuuugcucuuca

SEQ ID NO: 375506 - RNA, 19 nt, Human
ccgcuguggcacugggcca

SEQ ID NO: 375507 - RNA, 23 nt, Human
ccgcuguguaggcaccugaguua

SEQ ID NO: 375508 - RNA, 19 nt, Human
ccgcugugucgcccugagc

SEQ ID NO: 375509 - RNA, 32 nt, Human
ccgcuguucaugucuggacuccugggggcgcu

SEQ ID NO: 375510 - RNA, 20 nt, Human
ccgcuguuccucagcgggcc

SEQ ID NO: 375511 - RNA, 18 nt, Human
ccgcuguucgacugccca

SEQ ID NO: 375512 - RNA, 32 nt, Human
ccgcuguucgacugcccaaccuggugaguggc

SEQ ID NO: 375513 - RNA, 19 nt, Human
ccgcuguucgccgcgggcu

SEQ ID NO: 375514 - RNA, 19 nt, Human
ccgcuguucgcucucgccg

SEQ ID NO: 375515 - RNA, 19 nt, Human
ccgcuguucuccuagguca

SEQ ID NO: 375516 - RNA, 21 nt, Human
ccgcuguucuuaauccgggcc

SEQ ID NO: 375517 - RNA, 17 nt, Human
ccgcuguugccgcggcu

SEQ ID NO: 375518 - RNA, 22 nt, Human
ccgcuguuuccgcugcugagcc

SEQ ID NO: 375519 - RNA, 32 nt, Human
ccgcuucaacaucagcugccucugcuaugacc

SEQ ID NO: 375520 - RNA, 32 nt, Human
ccgcuucaucccucucaaguauggcucagcua

SEQ ID NO: 375521 - RNA, 32 nt, Human
ccgcuuccaccaacauccagaauccauugagg

SEQ ID NO: 375522 - RNA, 32 nt, Human
ccgcuuccagaggcgcaugcagcggcugauag

SEQ ID NO: 375523 - RNA, 23 nt, Human
ccgcuuccagcuuccucugagcc

SEQ ID NO: 375524 - RNA, 32 nt, Human
ccgcuuccauggucuugcacuauaaacuggaa

SEQ ID NO: 375525 - RNA, 32 nt, Human
ccgcuucccaggcuggggugcaguggugcgau

SEQ ID NO: 375526 - RNA, 32 nt, Human
ccgcuucccucaccuccuuuuccagccuuugc

SEQ ID NO: 375527 - RNA, 15 nt, Human
ccgcuucccucggug

SEQ ID NO: 375528 - RNA, 18 nt, Human
ccgcuucccucuccauga

SEQ ID NO: 375529 - RNA, 32 nt, Human
ccgcuucccuuccauuuccuuucuagaaaacc

SEQ ID NO: 375530 - RNA, 32 nt, Human
ccgcuucccuucccugaacucuuccagcgucg

SEQ ID NO: 375531 - RNA, 32 nt, Human
ccgcuuccggcagcucaccugggaagcgcuca

SEQ ID NO: 375532 - RNA, 15 nt, Human
ccgcuuccucaggug

SEQ ID NO: 375533 - RNA, 32 nt, Human
ccgcuuccuccccuucagucagcucccucugu

SEQ ID NO: 375534 - RNA, 25 nt, Human
ccgcuuccuggagguuugcagugag

SEQ ID NO: 375535 - RNA, 20 nt, Human
ccgcuucucugcccgaguua

SEQ ID NO: 375536 - RNA, 32 nt, Human
ccgcuucugaagcugcugcagcucccuccuca

SEQ ID NO: 375537 - RNA, 32 nt, Human
ccgcuucugcaaccugcgagccugcccagugc

SEQ ID NO: 375538 - RNA, 32 nt, Human
ccgcuucugccuggcuuuccggcuuaauuuuc

SEQ ID NO: 375539 - RNA, 32 nt, Human
ccgcuucugccugggcuccugccauggccccc

SEQ ID NO: 375540 - RNA, 18 nt, Human
ccgcuugccagaggcccu

SEQ ID NO: 375541 - RNA, 20 nt, Human
ccgcuugccccuuguucucc

SEQ ID NO: 375542 - RNA, 32 nt, Human
ccgcuugccugcacuccauccugucugcaacg

SEQ ID NO: 375543 - RNA, 23 nt, Human
ccgcuugcuccccagcccaccca

SEQ ID NO: 375544 - RNA, 32 nt, Human
ccgcuugcugccugucugcuuuccuugguggc

SEQ ID NO: 375545 - RNA, 32 nt, Human
ccgcuuggcuucuucuuuaggauugugauggu

SEQ ID NO: 375546 - RNA, 32 nt, Human
ccgcuugggaggcugagccaggagaauugcuu

SEQ ID NO: 375547 - RNA, 32 nt, Human
ccgcuugguggaggucgagugggugcaagggc

SEQ ID NO: 375548 - RNA, 32 nt, Human
ccgcuuguacccaggagguggagguugcagug

SEQ ID NO: 375549 - RNA, 32 nt, Human
ccgcuugugcugcagccaugucucuagugauc

SEQ ID NO: 375550 - RNA, 32 nt, Human
ccgcuugugcugcugccaugucucuagugauc

SEQ ID NO: 375551 - RNA, 32 nt, Human
ccgcuuguguuuacacaagcugugggguguua

SEQ ID NO: 375552 - RNA, 32 nt, Human
ccgcuuguuuggcugcugccgucaccucaugg

SEQ ID NO: 375553 - RNA, 32 nt, Human
ccgcuuucacaguccuccagauuuuuccaaga

SEQ ID NO: 375554 - RNA, 32 nt, Human
ccgcuuucagcccugugcucuggccccagaag

SEQ ID NO: 375555 - RNA, 32 nt, Human
ccgcuuucauuucuuucacauacaacuuucca

SEQ ID NO: 375556 - RNA, 32 nt, Human
ccgcuuuccccagaggaggagugcaggccugc

SEQ ID NO: 375557 - RNA, 32 nt, Human
ccgcuuucccuccaaggcugacuccccgcuga

SEQ ID NO: 375558 - RNA, 19 nt, Human
ccgcuuucucccgcgagcc

SEQ ID NO: 375559 - RNA, 32 nt, Human
ccgcuuucuggggagugaggugagacauagcg

SEQ ID NO: 375560 - RNA, 32 nt, Human
ccgcuuucugguggggccuuaucagaacguga

SEQ ID NO: 375561 - RNA, 19 nt, Human
ccgcuuucuugccgagcca

SEQ ID NO: 375562 - RNA, 32 nt, Human
ccgcuuugagcccagaggugcggugccgcacg

SEQ ID NO: 375563 - RNA, 32 nt, Human
ccgcuuugcacuccaccccgguagcagcuccg

SEQ ID NO: 375564 - RNA, 32 nt, Human
ccgcuuugcuugcuuguuuaacaaacccaacu

SEQ ID NO: 375565 - RNA, 32 nt, Human
ccggaaaagaggagaagagcaaacaggcacuu

SEQ ID NO: 375566 - RNA, 32 nt, Human
ccggaaaagaugagcuggcccuucccggaguc

SEQ ID NO: 375567 - RNA, 32 nt, Human
ccggaaacacaaccccagggagcggggagggu

SEQ ID NO: 375568 - RNA, 32 nt, Human
ccggaaacaccuggcccaugccuguucagucc

SEQ ID NO: 375569 - RNA, 32 nt, Human
ccggaaaccugagacaugcucaaggaagagca

SEQ ID NO: 375570 - RNA, 32 nt, Human
ccggaaacucagcccguggcagagggagucag

SEQ ID NO: 375571 - RNA, 20 nt, Human
ccggaaagcagcggcggcgu

SEQ ID NO: 375572 - RNA, 32 nt, Human
ccggaaaggagagagauacaugugaaggauau

SEQ ID NO: 375573 - RNA, 32 nt, Human
ccggaaagucccagcacccaagcuuggcugag

SEQ ID NO: 375574 - RNA, 32 nt, Human
ccggaaaugcucuucauagcugacguuuucuu

SEQ ID NO: 375575 - RNA, 32 nt, Human
ccggaacaaaagcggaagaggggccagccuca

SEQ ID NO: 375576 - RNA, 32 nt, Human
ccggaacagggcacuugugugcacacgcccac

SEQ ID NO: 375577 - RNA, 32 nt, Human
ccggaacccgcggcuucccuggcucccgugag

SEQ ID NO: 375578 - RNA, 19 nt, Human
ccggaacccucccugagcc

SEQ ID NO: 375579 - RNA, 32 nt, Human
ccggaaccugggaggggagggaacacuggggu

SEQ ID NO: 375580 - RNA, 32 nt, Human
ccggaaccuuuucaucauucugaggcuuugcc

SEQ ID NO: 375581 - RNA, 32 nt, Human
ccggaacucugccuuuucccagaaggaggagg

SEQ ID NO: 375582 - RNA, 32 nt, Human
ccggaacugccaccccaccagugacuccacag

SEQ ID NO: 375583 - RNA, 20 nt, Human
ccggaacugucagacauguu

SEQ ID NO: 375584 - RNA, 32 nt, Human
ccggaagaaggagaaacauugcaguggcuacu

SEQ ID NO: 375585 - RNA, 32 nt, Human
ccggaagaaggugagucugggagaggggcguc

SEQ ID NO: 375586 - RNA, 32 nt, Human
ccggaagaggggaccugagggagccagccggg

SEQ ID NO: 375587 - RNA, 32 nt, Human
ccggaagaggucuucguggaggccucgccagg

SEQ ID NO: 375588 - RNA, 32 nt, Human
ccggaagaugguggagggucaugaugaaguca

SEQ ID NO: 375589 - RNA, 23 nt, Human
ccggaagcgaagguugcagugag

SEQ ID NO: 375590 - RNA, 32 nt, Human
ccggaagcugcugggggaugucugacuagcuc

SEQ ID NO: 375591 - RNA, 24 nt, Human
ccggaaggcagagcuugcagugag

SEQ ID NO: 375592 - RNA, 24 nt, Human
ccggaaggcagagguucaggugag

SEQ ID NO: 375593 - RNA, 20 nt, Human
ccggaaggcagagguugcag

SEQ ID NO: 375594 - RNA, 23 nt, Human
ccggaaggcagagguugcaguga

SEQ ID NO: 375595 - RNA, 24 nt, Human
ccggaaggcagagguugcagugag

SEQ ID NO: 375596 - RNA, 24 nt, Human
ccggaaggcggagcuugcagugag

SEQ ID NO: 375597 - RNA, 24 nt, Human
ccggaaggcggagguugcagugag

SEQ ID NO: 375598 - RNA, 32 nt, Human
ccggaaggcugaggcaggagaauggcgugaac

SEQ ID NO: 375599 - RNA, 24 nt, Human
ccggaagguggagguugcagugag

SEQ ID NO: 375600 - RNA, 24 nt, Human
ccggaagguggaguuugcagugag

SEQ ID NO: 375601 - RNA, 32 nt, Human
ccggaaguaccugagagagaccccagaaggug

SEQ ID NO: 375602 - RNA, 32 nt, Human
ccggaaguagguccuuugacuuuugcuuccuc

SEQ ID NO: 375603 - RNA, 32 nt, Human
ccggaaguggcaccccucccuccaacucccua

SEQ ID NO: 375604 - RNA, 32 nt, Human
ccggaaugcaagacauccgaugguauacuuac

SEQ ID NO: 375605 - RNA, 32 nt, Human
ccggaaugugggccuaguguugccagaucuuc

SEQ ID NO: 375606 - RNA, 22 nt, Human
ccggaauuacaggcaugugcca

SEQ ID NO: 375607 - RNA, 32 nt, Human
ccggacaaagccccagcagccaaggugcuccg

SEQ ID NO: 375608 - RNA, 32 nt, Human
ccggacaacauggcgaaaccucaucucuauua

SEQ ID NO: 375609 - RNA, 20 nt, Human
ccggacaacccccagccccc

SEQ ID NO: 375610 - RNA, 21 nt, Human
ccggacaacuuagcugggccc

SEQ ID NO: 375611 - RNA, 25 nt, Human
ccggacaagaggagggggcgugcag

SEQ ID NO: 375612 - RNA, 32 nt, Human
ccggacaccucagacggacgguggccagggau

SEQ ID NO: 375613 - RNA, 20 nt, Human
ccggacacggggugcugcca

SEQ ID NO: 375614 - RNA, 32 nt, Human
ccggacacuggauuccuggacccccuucuccu

SEQ ID NO: 375615 - RNA, 32 nt, Human
ccggacagagcugggccuggggaagggguucc

SEQ ID NO: 375616 - RNA, 32 nt, Human
ccggaccaguuacauucguuccuggcaaaagc

SEQ ID NO: 375617 - RNA, 32 nt, Human
ccggaccauugagacauuugccaaggaggaac

SEQ ID NO: 375618 - RNA, 32 nt, Human
ccggacccaggccuuccaggagcaggagcagg

SEQ ID NO: 375619 - RNA, 20 nt, Human
ccggacccccgacgccgccu

SEQ ID NO: 375620 - RNA, 32 nt, Human
ccggaccccucggcccgcagcagcuaccagca

SEQ ID NO: 375621 - RNA, 32 nt, Human
ccggaccccucuuuccccauccagaaauaaaa

SEQ ID NO: 375622 - RNA, 17 nt, Human
ccggaccccugcucuga

SEQ ID NO: 375623 - RNA, 32 nt, Human
ccggacccgagagagagcgccgccgccaucuu

SEQ ID NO: 375624 - RNA, 32 nt, Human
ccggacccucgccaccauguacgugagcuacc

SEQ ID NO: 375625 - RNA, 32 nt, Human
ccggaccgcagauucgcgcaacagggcgaaaa

SEQ ID NO: 375626 - RNA, 32 nt, Human
ccggaccgcagccgccgcccucccaggacccc

SEQ ID NO: 375627 - RNA, 32 nt, Human
ccggaccggcggcgugaaagucgugauaucau

SEQ ID NO: 375628 - RNA, 32 nt, Human
ccggaccgugcgggcaccagugcagugcugcc

SEQ ID NO: 375629 - RNA, 32 nt, Human
ccggaccuccacccccaacuuccuccagccca

SEQ ID NO: 375630 - RNA, 32 nt, Human
ccggaccugagcccgcagcccagacccccucc

SEQ ID NO: 375631 - RNA, 32 nt, Human
ccggaccugcagcgcgcacaagcucgggcgcc

SEQ ID NO: 375632 - RNA, 22 nt, Human
ccggaccugcccaacgccgccu

SEQ ID NO: 375633 - RNA, 18 nt, Human
ccggaccugccucgagcc

SEQ ID NO: 375634 - RNA, 32 nt, Human
ccggaccugccucgagccucaggcugcugaaa

SEQ ID NO: 375635 - RNA, 32 nt, Human
ccggaccuuggagcgucuagagucuggcuacu

SEQ ID NO: 375636 - RNA, 32 nt, Human
ccggacgagccgcggggcccgggugccgcggg

SEQ ID NO: 375637 - RNA, 32 nt, Human
ccggacgcaccucaccucgcagucuccucacu

SEQ ID NO: 375638 - RNA, 32 nt, Human
ccggacgcaguggcucacgccuguaauuccag

SEQ ID NO: 375639 - RNA, 19 nt, Human
ccggacgccguacccgccc

SEQ ID NO: 375640 - RNA, 32 nt, Human
ccggacggaguccaaugcaaagcuguaccaca

SEQ ID NO: 375641 - RNA, 32 nt, Human
ccggacgggagguggcggagguggcggcggag

SEQ ID NO: 375642 - RNA, 32 nt, Human
ccggacggggcggcuggccgggcacaggggcu

SEQ ID NO: 375643 - RNA, 32 nt, Human
ccggacgggguuucuccauguuucccaggcug

SEQ ID NO: 375644 - RNA, 32 nt, Human
ccggacguggugccucacaccuguaauuccag

SEQ ID NO: 375645 - RNA, 32 nt, Human
ccggacgugguggcacaugccuguaaugccag

SEQ ID NO: 375646 - RNA, 32 nt, Human
ccggacgugguggcgcaugccuguaaucccag

SEQ ID NO: 375647 - RNA, 32 nt, Human
ccggacgugguggcgggcgccuguaaucccag

SEQ ID NO: 375648 - RNA, 32 nt, Human
ccggacgugguggcucacgccuguaaucccaa

SEQ ID NO: 375649 - RNA, 32 nt, Human
ccggacgugguggugccugccuguaauccagc

SEQ ID NO: 375650 - RNA, 32 nt, Human
ccggacuacaaggagcugguggagcucuucaa

SEQ ID NO: 375651 - RNA, 32 nt, Human
ccggacuaguuauugagcaucugccucucaua

SEQ ID NO: 375652 - RNA, 32 nt, Human
ccggacuccaaguccaccucccuucagaggca

SEQ ID NO: 375653 - RNA, 32 nt, Human
ccggacuccagugauccucccgccucagccuc

SEQ ID NO: 375654 - RNA, 32 nt, Human
ccggacuccuccuccuccucuucucgccauug

SEQ ID NO: 375655 - RNA, 32 nt, Human
ccggacucugcaguuucuccugcacuguuuuc

SEQ ID NO: 375656 - RNA, 32 nt, Human
ccggacugcccuccugugccugauguccccag

SEQ ID NO: 375657 - RNA, 20 nt, Human
ccggacugcuccuucgggcc

SEQ ID NO: 375658 - RNA, 32 nt, Human
ccggacuguggaccccuucauccuagacguca

SEQ ID NO: 375659 - RNA, 32 nt, Human
ccggacuuucaucuggagaugucagggaaaua

SEQ ID NO: 375660 - RNA, 22 nt, Human
ccggagaacugggauuacaggc

SEQ ID NO: 375661 - RNA, 18 nt, Human
ccggagaagaugcaguga

SEQ ID NO: 375662 - RNA, 32 nt, Human
ccggagaagguggugaccgagccuccaguugu

SEQ ID NO: 375663 - RNA, 32 nt, Human
ccggagacaggguuuggcugugucuaaacugc

SEQ ID NO: 375664 - RNA, 21 nt, Human
ccggagacagguugcagugag

SEQ ID NO: 375665 - RNA, 24 nt, Human
ccggagaccagccuggccaacaug

SEQ ID NO: 375666 - RNA, 32 nt, Human
ccggagaccagccuggccaacauggugaaacc

SEQ ID NO: 375667 - RNA, 32 nt, Human
ccggagaccauucaagcagguagacagucgcu

SEQ ID NO: 375668 - RNA, 18 nt, Human
ccggagagaagcauguug

SEQ ID NO: 375669 - RNA, 32 nt, Human
ccggagagagcuuggcccugcucacaccuuga

SEQ ID NO: 375670 - RNA, 32 nt, Human
ccggagagcgaagggcgggcgggucccggagc

SEQ ID NO: 375671 - RNA, 32 nt, Human
ccggagaggagaaagggcccgacugcccgccg

SEQ ID NO: 375672 - RNA, 32 nt, Human
ccggagaggagaaggaggaagaagaggaggag

SEQ ID NO: 375673 - RNA, 32 nt, Human
ccggagaggcaggaucgcaguggucagaaucc

SEQ ID NO: 375674 - RNA, 32 nt, Human
ccggagaggggucccucaacagucagccucac

SEQ ID NO: 375675 - RNA, 32 nt, Human
ccggagaguggcagauggagagagcuggcggg

SEQ ID NO: 375676 - RNA, 32 nt, Human
ccggagauauuggccucaagguaugagccagc

SEQ ID NO: 375677 - RNA, 23 nt, Human
ccggagauggagguugcagugag

SEQ ID NO: 375678 - RNA, 32 nt, Human
ccggagaugucuuuuuauuuuugugcuguaaa

SEQ ID NO: 375679 - RNA, 32 nt, Human
ccggagcaaagcagcaugauaaggacugcagc

SEQ ID NO: 375680 - RNA, 32 nt, Human
ccggagcagagcagcgcugcuggccuggcagc

SEQ ID NO: 375681 - RNA, 32 nt, Human
ccggagcagcagcagaggcaggaggacuagga

SEQ ID NO: 375682 - RNA, 20 nt, Human
ccggagcagccgcgggcgcc

SEQ ID NO: 375683 - RNA, 32 nt, Human
ccggagcagggaggguggcuggggccaagccc

SEQ ID NO: 375684 - RNA, 32 nt, Human
ccggagcaggguggggaggugcaguggcaccc

SEQ ID NO: 375685 - RNA, 32 nt, Human
ccggagcaggucggccucggcccaggggcgag

SEQ ID NO: 375686 - RNA, 17 nt, Human
ccggagccaagacuugu

SEQ ID NO: 375687 - RNA, 15 nt, Human
ccggagccaagcugu

SEQ ID NO: 375688 - RNA, 20 nt, Human
ccggagccacagccgcagcc

SEQ ID NO: 375689 - RNA, 32 nt, Human
ccggagcccaccugccuuuccccacaacuuuu

SEQ ID NO: 375690 - RNA, 32 nt, Human
ccggagcccgaacugcagcuccagccccagcc

SEQ ID NO: 375691 - RNA, 19 nt, Human
ccggagcccgagccugcug

SEQ ID NO: 375692 - RNA, 20 nt, Human
ccggagcccgcucuggccgc

SEQ ID NO: 375693 - RNA, 32 nt, Human
ccggagcccggccguagaggcugcaaucgcag

SEQ ID NO: 375694 - RNA, 32 nt, Human
ccggagcccgggagagaacccaggagcgccgc

SEQ ID NO: 375695 - RNA, 32 nt, Human
ccggagcccucccagcccucaggccugcgccu

SEQ ID NO: 375696 - RNA, 32 nt, Human
ccggagcccuccugccucauugcuccuguaau

SEQ ID NO: 375697 - RNA, 32 nt, Human
ccggagcccugccugccccugcuccccagcuc

SEQ ID NO: 375698 - RNA, 18 nt, Human
ccggagccgacccgagcc

SEQ ID NO: 375699 - RNA, 18 nt, Human
ccggagccgacggcagug

SEQ ID NO: 375700 - RNA, 17 nt, Human
ccggagccgacugcaga

SEQ ID NO: 375701 - RNA, 21 nt, Human
ccggagccgccuccugcaccu

SEQ ID NO: 375702 - RNA, 20 nt, Human
ccggagccgccugggauguu

SEQ ID NO: 375703 - RNA, 18 nt, Human
ccggagccggagauauug

SEQ ID NO: 375704 - RNA, 32 nt, Human
ccggagccggcagaggggcgcgggcgggacgg

SEQ ID NO: 375705 - RNA, 16 nt, Human
ccggagccggccuguu

SEQ ID NO: 375706 - RNA, 19 nt, Human
ccggagccggcgggacaug

SEQ ID NO: 375707 - RNA, 17 nt, Human
ccggagccggggaaugu

SEQ ID NO: 375708 - RNA, 28 nt, Human
ccggagccgugcccaguccacgccggcc

SEQ ID NO: 375709 - RNA, 32 nt, Human
ccggagccucgccuuccuuucucccucugcag

SEQ ID NO: 375710 - RNA, 20 nt, Human
ccggagccugguggcuguug

SEQ ID NO: 375711 - RNA, 32 nt, Human
ccggagccuuccuucagacccuuccuccacgu

SEQ ID NO: 375712 - RNA, 19 nt, Human
ccggagccuugcccgggcc

SEQ ID NO: 375713 - RNA, 20 nt, Human
ccggagcgccgccgccgccg

SEQ ID NO: 375714 - RNA, 32 nt, Human
ccggagcggagcgcgcccugcccuggcgcagc

SEQ ID NO: 375715 - RNA, 20 nt, Human
ccggagcggagcgggcgcgg

SEQ ID NO: 375716 - RNA, 32 nt, Human
ccggagcggcccugggcucugcagcaaggcgg

SEQ ID NO: 375717 - RNA, 19 nt, Human
ccggagcggcgccccggcc

SEQ ID NO: 375718 - RNA, 32 nt, Human
ccggagcgugagcaacagcuucccggcuggag

SEQ ID NO: 375719 - RNA, 16 nt, Human
ccggagcuccugcccc

SEQ ID NO: 375720 - RNA, 32 nt, Human
ccggagcuccuggcuuccgcaucccccaaggc

SEQ ID NO: 375721 - RNA, 32 nt, Human
ccggagcucucgaaguggaggcgguaggaaac

SEQ ID NO: 375722 - RNA, 32 nt, Human
ccggagcugcaaccgccagugcugcagggggu

SEQ ID NO: 375723 - RNA, 32 nt, Human
ccggagcugcagccaagcggguucccuccaua

SEQ ID NO: 375724 - RNA, 32 nt, Human
ccggagcugccuggcgcggccgggcgggcggc

SEQ ID NO: 375725 - RNA, 19 nt, Human
ccggagcugcgcuggguca

SEQ ID NO: 375726 - RNA, 32 nt, Human
ccggagcuggaagaggaggaggaggagaggcg

SEQ ID NO: 375727 - RNA, 22 nt, Human
ccggagcuggccagcgccauca

SEQ ID NO: 375728 - RNA, 18 nt, Human
ccggagcugucucgagcu

SEQ ID NO: 375729 - RNA, 32 nt, Human
ccggagcuucacaccccacuuccggggucaag

SEQ ID NO: 375730 - RNA, 21 nt, Human
ccggagcuuccgaaacugcug

SEQ ID NO: 375731 - RNA, 18 nt, Human
ccggaggaacaacagugg

SEQ ID NO: 375732 - RNA, 22 nt, Human
ccggaggacuaugccccuagua

SEQ ID NO: 375733 - RNA, 20 nt, Human
ccggaggagccugagccugg

SEQ ID NO: 375734 - RNA, 18 nt, Human
ccggaggaggagauguug

SEQ ID NO: 375735 - RNA, 32 nt, Human
ccggaggaggaggaggaggaggaggaggaggg

SEQ ID NO: 375736 - RNA, 32 nt, Human
ccggaggaggaggaggaggaggaggcaaaguu

SEQ ID NO: 375737 - RNA, 32 nt, Human
ccggaggcaagagugacuucagacaggaaccc

SEQ ID NO: 375738 - RNA, 32 nt, Human
ccggaggcagagaggcuccauggccgugcugc

SEQ ID NO: 375739 - RNA, 32 nt, Human
ccggaggcagaggccaugcugaccgcagcggu

SEQ ID NO: 375740 - RNA, 32 nt, Human
ccggaggcagcccagauauccucggaagagca

SEQ ID NO: 375741 - RNA, 23 nt, Human
ccggaggcagggguugcagugag

SEQ ID NO: 375742 - RNA, 22 nt, Human
ccggaggccaguggagcugccu

SEQ ID NO: 375743 - RNA, 32 nt, Human
ccggaggccccaggguuaugagacuaucacug

SEQ ID NO: 375744 - RNA, 32 nt, Human
ccggaggcccuaggagcuggugcugcccccgc

SEQ ID NO: 375745 - RNA, 32 nt, Human
ccggaggccgaggcagaagcugggcagaagca

SEQ ID NO: 375746 - RNA, 20 nt, Human
ccggaggccuaggagacaug

SEQ ID NO: 375747 - RNA, 23 nt, Human
ccggaggcggagguugcagugag

SEQ ID NO: 375748 - RNA, 20 nt, Human
ccggaggcggagguugcggu

SEQ ID NO: 375749 - RNA, 32 nt, Human
ccggaggcgggacuuccucuuccucggggaca

SEQ ID NO: 375750 - RNA, 20 nt, Human
ccggaggcgggcgugagaca

SEQ ID NO: 375751 - RNA, 32 nt, Human
ccggagggucaccaugaaguucaaucccuucg

SEQ ID NO: 375752 - RNA, 32 nt, Human
ccggagggugagcccggcagaggcagagacac

SEQ ID NO: 375753 - RNA, 32 nt, Human
ccggaggucaccaaggaaugcacagguuucga

SEQ ID NO: 375754 - RNA, 23 nt, Human
ccggaggucgaggcugcaguggg

SEQ ID NO: 375755 - RNA, 32 nt, Human
ccggaggugcucuugugcacacagcaggucaa

SEQ ID NO: 375756 - RNA, 32 nt, Human
ccggagguggacgugguccugccccugcaggu

SEQ ID NO: 375757 - RNA, 18 nt, Human
ccggagguguugcaguga

SEQ ID NO: 375758 - RNA, 23 nt, Human
ccggagguugaagcuacagugag

SEQ ID NO: 375759 - RNA, 24 nt, Human
ccggaguaacuggcauuacaggcg

SEQ ID NO: 375760 - RNA, 23 nt, Human
ccggaguagcugggauuacaggc

SEQ ID NO: 375761 - RNA, 25 nt, Human
ccggaguagcugggauuacaggcgu

SEQ ID NO: 375762 - RNA, 23 nt, Human
ccggaguagcugggauugcaggc

SEQ ID NO: 375763 - RNA, 23 nt, Human
ccggaguagcugggguuacaggc

SEQ ID NO: 375764 - RNA, 32 nt, Human
ccggagucaggaguucgagaccagccugacca

SEQ ID NO: 375765 - RNA, 18 nt, Human
ccggaguccaucauccuu

SEQ ID NO: 375766 - RNA, 32 nt, Human
ccggaguccaucauccuucaccucuggguggg

SEQ ID NO: 375767 - RNA, 32 nt, Human
ccggagucccagugaugcucugugccauagag

SEQ ID NO: 375768 - RNA, 32 nt, Human
ccggagucgauugagggccagagcaggcacug

SEQ ID NO: 375769 - RNA, 18 nt, Human
ccggagucgccaacaugu

SEQ ID NO: 375770 - RNA, 32 nt, Human
ccggagugacaggcacauacaugagaacaggc

SEQ ID NO: 375771 - RNA, 32 nt, Human
ccggagugagggccuugcagaccugcggcggc

SEQ ID NO: 375772 - RNA, 32 nt, Human
ccggagugcagaaagccaggaccaagagacag

SEQ ID NO: 375773 - RNA, 24 nt, Human
ccggauagcugggauuacaggcgu

SEQ ID NO: 375774 - RNA, 32 nt, Human
ccggauaggaggaggaggggacccauaggacg

SEQ ID NO: 375775 - RNA, 32 nt, Human
ccggauauccugcccacccaggggcaaggcaa

SEQ ID NO: 375776 - RNA, 32 nt, Human
ccggauaugguggcgggugccuguaaucucag

SEQ ID NO: 375777 - RNA, 32 nt, Human
ccggauauugagugcagccauugagaaaagcc

SEQ ID NO: 375778 - RNA, 32 nt, Human
ccggaucagagcaggaccucccuuccgacccu

SEQ ID NO: 375779 - RNA, 19 nt, Human
ccggaucagcgugguccaa

SEQ ID NO: 375780 - RNA, 32 nt, Human
ccggaucaggccaagugcaccacacacccuca

SEQ ID NO: 375781 - RNA, 32 nt, Human
ccggaucaguugagagagaaucaagaguagcg

SEQ ID NO: 375782 - RNA, 22 nt, Human
ccggaucccucuguucgggcuc

SEQ ID NO: 375783 - RNA, 32 nt, Human
ccggauccuggacaggcaccccggcuuggcgc

SEQ ID NO: 375784 - RNA, 32 nt, Human
ccggaucgccaccccgcacagccuggguagcg

SEQ ID NO: 375785 - RNA, 32 nt, Human
ccggaucgugggcucccucugcccauggaaac

SEQ ID NO: 375786 - RNA, 32 nt, Human
ccggaucucuggcuccucaucucuccggucuc

SEQ ID NO: 375787 - RNA, 32 nt, Human
ccggaucugcucccaaguuaucuuucuguucc

SEQ ID NO: 375788 - RNA, 25 nt, Human
ccggaugaagcagacuggagacaca

SEQ ID NO: 375789 - RNA, 32 nt, Human
ccggaugaccccgcgucaccacugugaggccu

SEQ ID NO: 375790 - RNA, 18 nt, Human
ccggaugccucugccccu

SEQ ID NO: 375791 - RNA, 32 nt, Human
ccggaugccucugggagccccagcacaagcac

SEQ ID NO: 375792 - RNA, 32 nt, Human
ccggaugcgguggcucacgccuguaaucccag

SEQ ID NO: 375793 - RNA, 32 nt, Human
ccggaugcgguggcucaugccuguaaucccac

SEQ ID NO: 375794 - RNA, 32 nt, Human
ccggaugcgguggcucaugccuguaaucccug

SEQ ID NO: 375795 - RNA, 18 nt, Human
ccggauggagugcaguga

SEQ ID NO: 375796 - RNA, 18 nt, Human
ccggauggccaucugucc

SEQ ID NO: 375797 - RNA, 32 nt, Human
ccggauggggcugagaggcacacaggaggcag

SEQ ID NO: 375798 - RNA, 32 nt, Human
ccggauggucaggguggggagcagggacggcc

SEQ ID NO: 375799 - RNA, 32 nt, Human
ccggaugugauggcacaugccuguaaucccag

SEQ ID NO: 375800 - RNA, 32 nt, Human
ccggauguggugccgcaugccuguaaucccag

SEQ ID NO: 375801 - RNA, 32 nt, Human
ccggaugugguggcucacgccuguaaucccag

SEQ ID NO: 375802 - RNA, 32 nt, Human
ccggaugugguggcucaugccuguaaucccag

SEQ ID NO: 375803 - RNA, 32 nt, Human
ccggauucaagcaauucucccgccucagccuc

SEQ ID NO: 375804 - RNA, 32 nt, Human
ccggauucaagcaauucuccuuccucagccuc

SEQ ID NO: 375805 - RNA, 32 nt, Human
ccggauucaagcaauucuucugccucagcuuc

SEQ ID NO: 375806 - RNA, 32 nt, Human
ccggauucaagcaguuuuccugccucagccuc

SEQ ID NO: 375807 - RNA, 32 nt, Human
ccggauucaagccauucuccugccucagccuc

SEQ ID NO: 375808 - RNA, 32 nt, Human
ccggauucaaggaauucucccugccucagccu

SEQ ID NO: 375809 - RNA, 32 nt, Human
ccggauucgucccauucucguccucauggugg

SEQ ID NO: 375810 - RNA, 32 nt, Human
ccggauuguuacagaauuuucaagaugacaga

SEQ ID NO: 375811 - RNA, 32 nt, Human
ccggcaaaaaguuaagaauuucuuaccaguua

SEQ ID NO: 375812 - RNA, 18 nt, Human
ccggcaaccuugcagagg

SEQ ID NO: 375813 - RNA, 32 nt, Human
ccggcaagaggaagagagaguggcuuccacau

SEQ ID NO: 375814 - RNA, 32 nt, Human
ccggcaagcagagguucgagaaaaugaucaau

SEQ ID NO: 375815 - RNA, 21 nt, Human
ccggcaaggggcuggggacuu

SEQ ID NO: 375816 - RNA, 32 nt, Human
ccggcacauccuggccgccucugacaccugcu

SEQ ID NO: 375817 - RNA, 32 nt, Human
ccggcaccaaagugaccaggaggcagagaaga

SEQ ID NO: 375818 - RNA, 24 nt, Human
ccggcaccacagacacccaccagc

SEQ ID NO: 375819 - RNA, 32 nt, Human
ccggcaccauucucccuucucucuuuucuucu

SEQ ID NO: 375820 - RNA, 32 nt, Human
ccggcacccacccugucuaugcacggggcuug

SEQ ID NO: 375821 - RNA, 32 nt, Human
ccggcacccucagccggggaggccguaggcuc

SEQ ID NO: 375822 - RNA, 20 nt, Human
ccggcacccucgagggccgg

SEQ ID NO: 375823 - RNA, 32 nt, Human
ccggcaccuccuccuccuucugcauuuccuau

SEQ ID NO: 375824 - RNA, 32 nt, Human
ccggcacgcacaccuaguccgcagucccgagg

SEQ ID NO: 375825 - RNA, 18 nt, Human
ccggcacugccgcugccu

SEQ ID NO: 375826 - RNA, 32 nt, Human
ccggcacugggagcugcaucugaggcuuaguc

SEQ ID NO: 375827 - RNA, 32 nt, Human
ccggcacuuaccugccuuucucucugcaccua

SEQ ID NO: 375828 - RNA, 32 nt, Human
ccggcacuuugggaggccugaguggauggauc

SEQ ID NO: 375829 - RNA, 30 nt, Human
ccggcagaaagccacaggagucauuguauu

SEQ ID NO: 375830 - RNA, 32 nt, Human
ccggcagaaagccacaggagucauuguauuag

SEQ ID NO: 375831 - RNA, 21 nt, Human
ccggcagaacagucugaucuc

SEQ ID NO: 375832 - RNA, 32 nt, Human
ccggcagaagcagcugcagcagcaguuccggg

SEQ ID NO: 375833 - RNA, 17 nt, Human
ccggcagacgggugcag

SEQ ID NO: 375834 - RNA, 32 nt, Human
ccggcagacuguucccaggaugcaacacgggc

SEQ ID NO: 375835 - RNA, 22 nt, Human
ccggcagagcaaccagauucug

SEQ ID NO: 375836 - RNA, 25 nt, Human
ccggcagagcaggaguggcuggagg

SEQ ID NO: 375837 - RNA, 24 nt, Human
ccggcagaggaggcgagcaucccg

SEQ ID NO: 375838 - RNA, 32 nt, Human
ccggcagaggcagggcccuggggucucugagc

SEQ ID NO: 375839 - RNA, 32 nt, Human
ccggcagagguguggacuggagaccaggauuc

SEQ ID NO: 375840 - RNA, 22 nt, Human
ccggcagaguuccucuaucucg

SEQ ID NO: 375841 - RNA, 32 nt, Human
ccggcagcaaggaguguuccugggaccucaga

SEQ ID NO: 375842 - RNA, 32 nt, Human
ccggcagcacagaaaaauaaaguuaaacaaga

SEQ ID NO: 375843 - RNA, 32 nt, Human
ccggcagcaccauguugcucauggucaucagc

SEQ ID NO: 375844 - RNA, 32 nt, Human
ccggcagcagaggcaccguguucucucagccc

SEQ ID NO: 375845 - RNA, 32 nt, Human
ccggcagcagcccaggcccggggacuggggug

SEQ ID NO: 375846 - RNA, 32 nt, Human
ccggcagcaucccaucugacccugucuggguc

SEQ ID NO: 375847 - RNA, 32 nt, Human
ccggcagccacccaccccacgugccaacuucc

SEQ ID NO: 375848 - RNA, 21 nt, Human
ccggcagcccagauguucagu

SEQ ID NO: 375849 - RNA, 32 nt, Human
ccggcagccccuuucccugccaccccaggagc

SEQ ID NO: 375850 - RNA, 27 nt, Human
ccggcagcccugaggccucuggucuug

SEQ ID NO: 375851 - RNA, 25 nt, Human
ccggcagcccugggguggcggcggg

SEQ ID NO: 375852 - RNA, 32 nt, Human
ccggcagccgaggccaagacacugcuggcccg

SEQ ID NO: 375853 - RNA, 32 nt, Human
ccggcagccgcuccacggaguccccggcaggg

SEQ ID NO: 375854 - RNA, 22 nt, Human
ccggcagccugcauugcgcugg

SEQ ID NO: 375855 - RNA, 32 nt, Human
ccggcagcuacuggucaugccaggcacacacu

SEQ ID NO: 375856 - RNA, 32 nt, Human
ccggcagcugaggagggagagggggagcguag

SEQ ID NO: 375857 - RNA, 32 nt, Human
ccggcaggacagcuccagaaugaaaaugcggu

SEQ ID NO: 375858 - RNA, 24 nt, Human
ccggcaggcagagguugcagugag

SEQ ID NO: 375859 - RNA, 32 nt, Human
ccggcaggcccaggcccugucugggugcacag

SEQ ID NO: 375860 - RNA, 24 nt, Human
ccggcaggcggagguugcagugag

SEQ ID NO: 375861 - RNA, 32 nt, Human
ccggcagggagaagcugcccuuugaguuuguc

SEQ ID NO: 375862 - RNA, 18 nt, Human
ccggcagggcgggcgcgg

SEQ ID NO: 375863 - RNA, 32 nt, Human
ccggcaggggcccagcccugccuuccacugug

SEQ ID NO: 375864 - RNA, 32 nt, Human
ccggcagggggagcgaggaggaagggaaccgc

SEQ ID NO: 375865 - RNA, 22 nt, Human
ccggcagggugcauccggccug

SEQ ID NO: 375866 - RNA, 32 nt, Human
ccggcagucagccucaggcucuccgcuuugcg

SEQ ID NO: 375867 - RNA, 32 nt, Human
ccggcaguccugggacggcuucccucugcugg

SEQ ID NO: 375868 - RNA, 32 nt, Human
ccggcagugagagugacuugaagaacuaaauu

SEQ ID NO: 375869 - RNA, 32 nt, Human
ccggcagugggagcucagugccaggcuguggg

SEQ ID NO: 375870 - RNA, 32 nt, Human
ccggcagugggggcgccgcgcccagccuuugc

SEQ ID NO: 375871 - RNA, 32 nt, Human
ccggcagugguggcgggggcggcggcggcgcc

SEQ ID NO: 375872 - RNA, 32 nt, Human
ccggcaguuggaggaaggccagaggaacagcu

SEQ ID NO: 375873 - RNA, 32 nt, Human
ccggcaucauuuccccucccgcuuccuccggc

SEQ ID NO: 375874 - RNA, 21 nt, Human
ccggcaucugggcccuggacg

SEQ ID NO: 375875 - RNA, 32 nt, Human
ccggcaucuuccaguucucugccagucugcac

SEQ ID NO: 375876 - RNA, 32 nt, Human
ccggcaugagccacugcgccuggccgacaaag

SEQ ID NO: 375877 - RNA, 32 nt, Human
ccggcauggaggaaaccacuaggugacccuca

SEQ ID NO: 375878 - RNA, 32 nt, Human
ccggcauggaggaugaggaagagcuggagacc

SEQ ID NO: 375879 - RNA, 32 nt, Human
ccggcauggcuaggcugagagcagggaucuac

SEQ ID NO: 375880 - RNA, 32 nt, Human
ccggcauggcugggaacugcagaccuguccuc

SEQ ID NO: 375881 - RNA, 32 nt, Human
ccggcaugucccuguaccgcagcgucgugugg

SEQ ID NO: 375882 - RNA, 30 nt, Human
ccggcaugucggcggaggccucgggcccgg

SEQ ID NO: 375883 - RNA, 32 nt, Human
ccggcauuauggggacagagagcagggggcag

SEQ ID NO: 375884 - RNA, 32 nt, Human
ccggcauugccuucuaccaccugggcgacuac

SEQ ID NO: 375885 - RNA, 32 nt, Human
ccggcauuuucccaucugccuuuucucugguu

SEQ ID NO: 375886 - RNA, 32 nt, Human
ccggccaaaugcugggcucaggccugggugcu

SEQ ID NO: 375887 - RNA, 32 nt, Human
ccggccaacacgagcacucuggguuuuccucc

SEQ ID NO: 375888 - RNA, 24 nt, Human
ccggccaacauagugaaacccugu

SEQ ID NO: 375889 - RNA, 32 nt, Human
ccggccaacauagugaaacccugucucuaaua

SEQ ID NO: 375890 - RNA, 19 nt, Human
ccggccaacaugggcuuga

SEQ ID NO: 375891 - RNA, 18 nt, Human
ccggccaacauggugaaa

SEQ ID NO: 375892 - RNA, 20 nt, Human
ccggccaacauggugaaacc

SEQ ID NO: 375893 - RNA, 32 nt, Human
ccggccaacauggugaaaccccaucucuacua

SEQ ID NO: 375894 - RNA, 22 nt, Human
ccggccaacauggugaaaccuu

SEQ ID NO: 375895 - RNA, 32 nt, Human
ccggccaacgucauuuucuuuucaggaguccc

SEQ ID NO: 375896 - RNA, 32 nt, Human
ccggccaagcaggagggcucuaacuccgugag

SEQ ID NO: 375897 - RNA, 32 nt, Human
ccggccaauccugcuauuucucuacaggacaa

SEQ ID NO: 375898 - RNA, 32 nt, Human
ccggccacaacuuggauaugcaggucaggcuu

SEQ ID NO: 375899 - RNA, 18 nt, Human
ccggccacacccaugccc

SEQ ID NO: 375900 - RNA, 20 nt, Human
ccggccacaccccucugcug

SEQ ID NO: 375901 - RNA, 18 nt, Human
ccggccacacuggcucgc

SEQ ID NO: 375902 - RNA, 32 nt, Human
ccggccacauucccgcccuccugggcagauug

SEQ ID NO: 375903 - RNA, 19 nt, Human
ccggccaccacccaugccc

SEQ ID NO: 375904 - RNA, 16 nt, Human
ccggccacccccgggc

SEQ ID NO: 375905 - RNA, 32 nt, Human
ccggccaccucccagggauccucucauccggu

SEQ ID NO: 375906 - RNA, 20 nt, Human
ccggccacggcccacccugg

SEQ ID NO: 375907 - RNA, 32 nt, Human
ccggccacugcaacccaugagcguccagguga

SEQ ID NO: 375908 - RNA, 19 nt, Human
ccggccacugcucugcuca

SEQ ID NO: 375909 - RNA, 32 nt, Human
ccggccacugcucugcucacaccagccuuggg

SEQ ID NO: 375910 - RNA, 32 nt, Human
ccggccacuucagcaacagcccuuuccccagg

SEQ ID NO: 375911 - RNA, 32 nt, Human
ccggccagagugcggugugcugugcuggagag

SEQ ID NO: 375912 - RNA, 32 nt, Human
ccggccagccagccacucuaccagugcaggcu

SEQ ID NO: 375913 - RNA, 32 nt, Human
ccggccagccuccgccucccgacauccuggga

SEQ ID NO: 375914 - RNA, 23 nt, Human
ccggccagccugaucugggcuca

SEQ ID NO: 375915 - RNA, 32 nt, Human
ccggccagcucaccucaggcccugccagggga

SEQ ID NO: 375916 - RNA, 32 nt, Human
ccggccagcuucauacuugagugugcacaucu

SEQ ID NO: 375917 - RNA, 32 nt, Human
ccggccaggccaccuccagaaacggccauuca

SEQ ID NO: 375918 - RNA, 19 nt, Human
ccggccaggcucuggcacg

SEQ ID NO: 375919 - RNA, 32 nt, Human
ccggccagggccucucccucccucccucccuc

SEQ ID NO: 375920 - RNA, 31 nt, Human
ccggccaugccuggcuggcccugggggcugc

SEQ ID NO: 375921 - RNA, 32 nt, Human
ccggccaugcucuccuccucugccagucuccu

SEQ ID NO: 375922 - RNA, 31 nt, Human
ccggccaugggaagcuuccagcuggaagacu

SEQ ID NO: 375923 - RNA, 23 nt, Human
ccggcccacccacuguucaggcu

SEQ ID NO: 375924 - RNA, 32 nt, Human
ccggcccagaagccagauggucccgggacagg

SEQ ID NO: 375925 - RNA, 25 nt, Human
ccggcccagaggggcuucuguccug

SEQ ID NO: 375926 - RNA, 32 nt, Human
ccggcccagcacagcaagcagcaggaccgcug

SEQ ID NO: 375927 - RNA, 22 nt, Human
ccggcccagcguggcgccacca

SEQ ID NO: 375928 - RNA, 21 nt, Human
ccggcccagcuagacccucca

SEQ ID NO: 375929 - RNA, 32 nt, Human
ccggcccagcugcagccacccuucucaucugg

SEQ ID NO: 375930 - RNA, 32 nt, Human
ccggcccagcuggcgaacccugggccauccuc

SEQ ID NO: 375931 - RNA, 32 nt, Human
ccggcccagggucuagggugugcacugggcaa

SEQ ID NO: 375932 - RNA, 32 nt, Human
ccggccccaacauguuuuucuaaugcuuaagg

SEQ ID NO: 375933 - RNA, 19 nt, Human
ccggccccaauucugcuga

SEQ ID NO: 375934 - RNA, 20 nt, Human
ccggccccaccggggcacuu

SEQ ID NO: 375935 - RNA, 32 nt, Human
ccggccccacugacagaucugaagagcacagu

SEQ ID NO: 375936 - RNA, 19 nt, Human
ccggccccacugguguguc

SEQ ID NO: 375937 - RNA, 32 nt, Human
ccggccccagccugagcggggacggcggccgg

SEQ ID NO: 375938 - RNA, 19 nt, Human
ccggccccagcucuggacg

SEQ ID NO: 375939 - RNA, 32 nt, Human
ccggccccaggccagcuucacugccgucucuu

SEQ ID NO: 375940 - RNA, 32 nt, Human
ccggccccauggacaacagccuggcgaccagc

SEQ ID NO: 375941 - RNA, 20 nt, Human
ccggcccccaccccagccuc

SEQ ID NO: 375942 - RNA, 32 nt, Human
ccggcccccaggaggucuggcagagcugagag

SEQ ID NO: 375943 - RNA, 20 nt, Human
ccggccccccucucgggcuc

SEQ ID NO: 375944 - RNA, 20 nt, Human
ccggcccccgacccgcgcuc

SEQ ID NO: 375945 - RNA, 32 nt, Human
ccggcccccgagagccgccgacaugaagaaag

SEQ ID NO: 375946 - RNA, 22 nt, Human
ccggcccccgcgcgcagugcuu

SEQ ID NO: 375947 - RNA, 22 nt, Human
ccggcccccggccccgggccca

SEQ ID NO: 375948 - RNA, 32 nt, Human
ccggcccccugccccugccccugcuccugcuc

SEQ ID NO: 375949 - RNA, 32 nt, Human
ccggccccgagaggaggaugcggguccggaua

SEQ ID NO: 375950 - RNA, 32 nt, Human
ccggccccgcugcaccuccccagggagccgag

SEQ ID NO: 375951 - RNA, 18 nt, Human
ccggccccggccgcucgc

SEQ ID NO: 375952 - RNA, 20 nt, Human
ccggccccuaaggcccugcc

SEQ ID NO: 375953 - RNA, 32 nt, Human
ccggccccucaaggaguacuccuuccguuccg

SEQ ID NO: 375954 - RNA, 32 nt, Human
ccggccccuccccucgccuccucuccuaggug

SEQ ID NO: 375955 - RNA, 32 nt, Human
ccggccccuccccucucccucccucugucccc

SEQ ID NO: 375956 - RNA, 32 nt, Human
ccggccccuccccuucuuugucuuuugcagau

SEQ ID NO: 375957 - RNA, 24 nt, Human
ccggccccucccugcccuccauuc

SEQ ID NO: 375958 - RNA, 20 nt, Human
ccggccccuccugccucggc

SEQ ID NO: 375959 - RNA, 32 nt, Human
ccggccccucgaggcaccgccuuucaauuagc

SEQ ID NO: 375960 - RNA, 21 nt, Human
ccggccccucgcucgcugcuc

SEQ ID NO: 375961 - RNA, 32 nt, Human
ccggccccucucccgccccacacccacccucc

SEQ ID NO: 375962 - RNA, 21 nt, Human
ccggccccucucugggccuca

SEQ ID NO: 375963 - RNA, 23 nt, Human
ccggccccugccacccagccuca

SEQ ID NO: 375964 - RNA, 32 nt, Human
ccggccccugccccaucuccucaucaucccca

SEQ ID NO: 375965 - RNA, 23 nt, Human
ccggccccugcugguucaggguu

SEQ ID NO: 375966 - RNA, 32 nt, Human
ccggccccugggacucacaggugggagacagg

SEQ ID NO: 375967 - RNA, 32 nt, Human
ccggccccuucacucccccaucuugcuuuucu

SEQ ID NO: 375968 - RNA, 23 nt, Human
ccggccccuuuugagcccugcca

SEQ ID NO: 375969 - RNA, 32 nt, Human
ccggcccgacucgcccucagaaacucacuguu

SEQ ID NO: 375970 - RNA, 32 nt, Human
ccggcccgagcaccuaagcuuuucaagacauu

SEQ ID NO: 375971 - RNA, 21 nt, Human
ccggcccgauccucacucgcc

SEQ ID NO: 375972 - RNA, 18 nt, Human
ccggcccgccaaggggac

SEQ ID NO: 375973 - RNA, 32 nt, Human
ccggcccgcccccgcggugcccucucuccucc

SEQ ID NO: 375974 - RNA, 32 nt, Human
ccggcccgccuucugcaaucaucacucccgca

SEQ ID NO: 375975 - RNA, 18 nt, Human
ccggcccgcugggcccgu

SEQ ID NO: 375976 - RNA, 22 nt, Human
ccggcccggccacacccaugcc

SEQ ID NO: 375977 - RNA, 32 nt, Human
ccggcccggcccugcccugcccugcccugucc

SEQ ID NO: 375978 - RNA, 21 nt, Human
ccggcccggcugagcccugcc

SEQ ID NO: 375979 - RNA, 23 nt, Human
ccggcccgggccagucccugcca

SEQ ID NO: 375980 - RNA, 19 nt, Human
ccggcccgggcucuggagg

SEQ ID NO: 375981 - RNA, 32 nt, Human
ccggcccuccagggccgccuccucuguuugcu

SEQ ID NO: 375982 - RNA, 32 nt, Human
ccggcccuccugggacuuguauuuuucucugg

SEQ ID NO: 375983 - RNA, 32 nt, Human
ccggcccucucugcaucucucucugaucuagc

SEQ ID NO: 375984 - RNA, 32 nt, Human
ccggcccugaacccgcgccccacauuucuguc

SEQ ID NO: 375985 - RNA, 32 nt, Human
ccggcccugcagcaguacagccagacccaaga

SEQ ID NO: 375986 - RNA, 32 nt, Human
ccggcccugcagccucccgugucccgucuccu

SEQ ID NO: 375987 - RNA, 32 nt, Human
ccggcccugcagcugccuucugccccagguuu

SEQ ID NO: 375988 - RNA, 32 nt, Human
ccggcccugcccugcccugcccuguccugccc

SEQ ID NO: 375989 - RNA, 32 nt, Human
ccggcccugccuggugucacuguggccaaaca

SEQ ID NO: 375990 - RNA, 32 nt, Human
ccggcccugcgacgcccuccugggcagcaccg

SEQ ID NO: 375991 - RNA, 32 nt, Human
ccggcccugcuccccuccagacuuccugcugu

SEQ ID NO: 375992 - RNA, 18 nt, Human
ccggcccugcucugggcc

SEQ ID NO: 375993 - RNA, 32 nt, Human
ccggcccugcugccacagcaguaaugaaauaa

SEQ ID NO: 375994 - RNA, 20 nt, Human
ccggcccuggcuggggacuu

SEQ ID NO: 375995 - RNA, 22 nt, Human
ccggcccuuccgccuccagcuc

SEQ ID NO: 375996 - RNA, 23 nt, Human
ccggcccuucugccccgccgccu

SEQ ID NO: 375997 - RNA, 19 nt, Human
ccggcccuugcagcugcag

SEQ ID NO: 375998 - RNA, 19 nt, Human
ccggcccuugccccgggcc

SEQ ID NO: 375999 - RNA, 32 nt, Human
ccggccgaagguggggacaggcaguggcaggc

SEQ ID NO: 376000 - RNA, 32 nt, Human
ccggccgagaaggcgccgaggagcagcgaggc

SEQ ID NO: 376001 - RNA, 32 nt, Human
ccggccgagccgcggcggcagcagcagcagca

SEQ ID NO: 376002 - RNA, 19 nt, Human
ccggccgauaggcaccuga

SEQ ID NO: 376003 - RNA, 32 nt, Human
ccggccgcagcccccgacgccugggugcgccu

SEQ ID NO: 376004 - RNA, 22 nt, Human
ccggccgccacugggcccugcc

SEQ ID NO: 376005 - RNA, 32 nt, Human
ccggccgccagcugcagccccgucgccucggc

SEQ ID NO: 376006 - RNA, 32 nt, Human
ccggccgcccccaccccucuggcuccugaaua

SEQ ID NO: 376007 - RNA, 17 nt, Human
ccggccgccgccgccac

SEQ ID NO: 376008 - RNA, 17 nt, Human
ccggccgcgccugggcu

SEQ ID NO: 376009 - RNA, 32 nt, Human
ccggccggagcggagcgcgcccggccccaugg

SEQ ID NO: 376010 - RNA, 32 nt, Human
ccggccggaggcgggagucacaggaagagccc

SEQ ID NO: 376011 - RNA, 32 nt, Human
ccggccggcaccacaacggggccaaaggcagu

SEQ ID NO: 376012 - RNA, 32 nt, Human
ccggccggcauggaggcggauuugagccagcu

SEQ ID NO: 376013 - RNA, 32 nt, Human
ccggccggccucagcccggcucugccuggugc

SEQ ID NO: 376014 - RNA, 32 nt, Human
ccggccgggccaggagcgagagcgagacucug

SEQ ID NO: 376015 - RNA, 32 nt, Human
ccggccgggcucgcgaugaccugcugagaagc

SEQ ID NO: 376016 - RNA, 32 nt, Human
ccggccgggggacgaguccggagcagcagcca

SEQ ID NO: 376017 - RNA, 21 nt, Human
ccggccggguagggggcgcgg

SEQ ID NO: 376018 - RNA, 32 nt, Human
ccggccgguagucccuggcgcugcugacccag

SEQ ID NO: 376019 - RNA, 32 nt, Human
ccggccguagccgccugcggcgccuccugucg

SEQ ID NO: 376020 - RNA, 23 nt, Human
ccggccguggcugagcucugcca

SEQ ID NO: 376021 - RNA, 32 nt, Human
ccggccuaaccaggcuggagugcagugguggg

SEQ ID NO: 376022 - RNA, 23 nt, Human
ccggccuacagcccgugcugcug

SEQ ID NO: 376023 - RNA, 32 nt, Human
ccggccuacagguugugaauguguuuuuauuc

SEQ ID NO: 376024 - RNA, 32 nt, Human
ccggccuacauggugaaaccccgucucuacua

SEQ ID NO: 376025 - RNA, 32 nt, Human
ccggccuagccccugcucacaucacagcuguc

SEQ ID NO: 376026 - RNA, 32 nt, Human
ccggccuaguuaccgucauaccacgggaggag

SEQ ID NO: 376027 - RNA, 32 nt, Human
ccggccucaagcaguccucccacuucggccuc

SEQ ID NO: 376028 - RNA, 21 nt, Human
ccggccucacaggccuugcca

SEQ ID NO: 376029 - RNA, 32 nt, Human
ccggccucagcuccuucuuucauuccagaccu

SEQ ID NO: 376030 - RNA, 21 nt, Human
ccggccucagcuguccgggcu

SEQ ID NO: 376031 - RNA, 32 nt, Human
ccggccucaucugcugcacacgcccagggcuc

SEQ ID NO: 376032 - RNA, 32 nt, Human
ccggccucauuuccucggaaaaucccugcuuu

SEQ ID NO: 376033 - RNA, 32 nt, Human
ccggccuccaaagccuaaugucuuugaucuua

SEQ ID NO: 376034 - RNA, 32 nt, Human
ccggccuccaggccccuccuggcuggcgagcg

SEQ ID NO: 376035 - RNA, 32 nt, Human
ccggccuccaucugaggauacuaagcgguucc

SEQ ID NO: 376036 - RNA, 32 nt, Human
ccggccucccaaagugccaggauuacaggcgu

SEQ ID NO: 376037 - RNA, 32 nt, Human
ccggccucccaaagugcugggauuacaggugu

SEQ ID NO: 376038 - RNA, 32 nt, Human
ccggccucccaaaguucugggauuacagggug

SEQ ID NO: 376039 - RNA, 19 nt, Human
ccggccucccaauagccgc

SEQ ID NO: 376040 - RNA, 32 nt, Human
ccggccucccagagugcugggauuacaggcgu

SEQ ID NO: 376041 - RNA, 32 nt, Human
ccggccuccccacuggguccuggaccuggcgc

SEQ ID NO: 376042 - RNA, 21 nt, Human
ccggccucccuucaccccucu

SEQ ID NO: 376043 - RNA, 23 nt, Human
ccggccuccuccugccacucuga

SEQ ID NO: 376044 - RNA, 32 nt, Human
ccggccuccugagucaccuucuaucuauacuu

SEQ ID NO: 376045 - RNA, 18 nt, Human
ccggccuccugccucucg

SEQ ID NO: 376046 - RNA, 19 nt, Human
ccggccuccuggcggccgc

SEQ ID NO: 376047 - RNA, 32 nt, Human
ccggccucgagggugaccucccuaccuugccc

SEQ ID NO: 376048 - RNA, 32 nt, Human
ccggccucgcacuccgcuuccggccgcucucg

SEQ ID NO: 376049 - RNA, 20 nt, Human
ccggccucgcuccgccgcuc

SEQ ID NO: 376050 - RNA, 22 nt, Human
ccggccucucccuccaguacuu

SEQ ID NO: 376051 - RNA, 32 nt, Human
ccggccucugcacuauucuacucucaugaacc

SEQ ID NO: 376052 - RNA, 32 nt, Human
ccggccucuggccuggcucaccuggccacugu

SEQ ID NO: 376053 - RNA, 21 nt, Human
ccggccucugugcccaggcca

SEQ ID NO: 376054 - RNA, 32 nt, Human
ccggccucugugggggucugugagcagcuucu

SEQ ID NO: 376055 - RNA, 32 nt, Human
ccggccugaccuuuggaaaagccuugucacuu

SEQ ID NO: 376056 - RNA, 18 nt, Human
ccggccugacgcuguggc

SEQ ID NO: 376057 - RNA, 32 nt, Human
ccggccugagcaacauagugaggaucccaucu

SEQ ID NO: 376058 - RNA, 32 nt, Human
ccggccugagggugcucccgcaggccuucacc

SEQ ID NO: 376059 - RNA, 31 nt, Human
ccggccugccucucuccgcuuugcugcuccu

SEQ ID NO: 376060 - RNA, 17 nt, Human
ccggccugcuccgagcc

SEQ ID NO: 376061 - RNA, 32 nt, Human
ccggccugcuccgagcccuggucccuggagcu

SEQ ID NO: 376062 - RNA, 32 nt, Human
ccggccugcuuccuuguauauccacaggagcu

SEQ ID NO: 376063 - RNA, 32 nt, Human
ccggccuggccaaccuccgccuccuggguuca

SEQ ID NO: 376064 - RNA, 32 nt, Human
ccggccugggauuggucgaaaaggaggggcgu

SEQ ID NO: 376065 - RNA, 20 nt, Human
ccggccugggcaacaagagc

SEQ ID NO: 376066 - RNA, 32 nt, Human
ccggccugggcaacagaggaagacugccucaa

SEQ ID NO: 376067 - RNA, 32 nt, Human
ccggccugggcaacguagugagagacccugua

SEQ ID NO: 376068 - RNA, 32 nt, Human
ccggccugggcagucuugucugccucggcugu

SEQ ID NO: 376069 - RNA, 32 nt, Human
ccggccugggcugcccccgcuccagucaaugc

SEQ ID NO: 376070 - RNA, 32 nt, Human
ccggccuggguggcgccagcaggcuuggacac

SEQ ID NO: 376071 - RNA, 18 nt, Human
ccggccugucugggccgc

SEQ ID NO: 376072 - RNA, 32 nt, Human
ccggccugugccccagcucuccccgagggcuc

SEQ ID NO: 376073 - RNA, 27 nt, Human
ccggccuguggacagccagacccugcc

SEQ ID NO: 376074 - RNA, 23 nt, Human
ccggccuguggaguugugggagg

SEQ ID NO: 376075 - RNA, 32 nt, Human
ccggccugugugacuugggugugaaugguuug

SEQ ID NO: 376076 - RNA, 32 nt, Human
ccggccuuaccucggcuccgccuucagucggc

SEQ ID NO: 376077 - RNA, 32 nt, Human
ccggccuuccaacuugcugugugcacauuaac

SEQ ID NO: 376078 - RNA, 28 nt, Human
ccggccuucgaggcugccuccuccaggc

SEQ ID NO: 376079 - RNA, 32 nt, Human
ccggccuucucacgucagugcaugucacaugc

SEQ ID NO: 376080 - RNA, 32 nt, Human
ccggccuucucccuucaucuugaucugggaag

SEQ ID NO: 376081 - RNA, 22 nt, Human
ccggccuugggugggcccucca

SEQ ID NO: 376082 - RNA, 19 nt, Human
ccggccuugucccgccuca

SEQ ID NO: 376083 - RNA, 32 nt, Human
ccggccuuucccucccucugccaaggacucau

SEQ ID NO: 376084 - RNA, 21 nt, Human
ccggccuuucgcuggugcuca

SEQ ID NO: 376085 - RNA, 19 nt, Human
ccggccuuuguccuggcuc

SEQ ID NO: 376086 - RNA, 23 nt, Human
ccggccuuuuccugcaguucuca

SEQ ID NO: 376087 - RNA, 32 nt, Human
ccggcgaagacgccuuccugggguacugagcc

SEQ ID NO: 376088 - RNA, 26 nt, Human
ccggcgaccccucgcuuccccaguca

SEQ ID NO: 376089 - RNA, 32 nt, Human
ccggcgaccuggcacccgcgccuggauauggg

SEQ ID NO: 376090 - RNA, 20 nt, Human
ccggcgacuggugcuacgca

SEQ ID NO: 376091 - RNA, 28 nt, Human
ccggcgaggggcggggggcuccggcccg

SEQ ID NO: 376092 - RNA, 25 nt, Human
ccggcgagggguggcuuugauuucg

SEQ ID NO: 376093 - RNA, 32 nt, Human
ccggcgcacggacuggccaggccccgcgggcc

SEQ ID NO: 376094 - RNA, 32 nt, Human
ccggcgcagccgcggcgggcgaggccaaugga

SEQ ID NO: 376095 - RNA, 32 nt, Human
ccggcgcagcucauggugagcgcccuuugggg

SEQ ID NO: 376096 - RNA, 19 nt, Human
ccggcgcagcucucgggcc

SEQ ID NO: 376097 - RNA, 32 nt, Human
ccggcgcaggagccaccucccugagccccgcg

SEQ ID NO: 376098 - RNA, 32 nt, Human
ccggcgcaggguggccggggaggggugagcag

SEQ ID NO: 376099 - RNA, 21 nt, Human
ccggcgccaggagggggugca

SEQ ID NO: 376100 - RNA, 18 nt, Human
ccggcgccgccacugccg

SEQ ID NO: 376101 - RNA, 18 nt, Human
ccggcgccgccgccgccg

SEQ ID NO: 376102 - RNA, 18 nt, Human
ccggcgccgccucggcca

SEQ ID NO: 376103 - RNA, 19 nt, Human
ccggcgccguccccgggcu

SEQ ID NO: 376104 - RNA, 20 nt, Human
ccggcgccucgcccugggcu

SEQ ID NO: 376105 - RNA, 32 nt, Human
ccggcgccugggcuugcugucuguucucggca

SEQ ID NO: 376106 - RNA, 32 nt, Human
ccggcgccuguaaucccagcuacuagggaggc

SEQ ID NO: 376107 - RNA, 32 nt, Human
ccggcgccuguaaucccagcuacucgggagac

SEQ ID NO: 376108 - RNA, 32 nt, Human
ccggcgcgcacagcugcacucagcggcuuccu

SEQ ID NO: 376109 - RNA, 17 nt, Human
ccggcgcgcuccgggcc

SEQ ID NO: 376110 - RNA, 32 nt, Human
ccggcgcggaggcaggaggagcagucucauug

SEQ ID NO: 376111 - RNA, 21 nt, Human
ccggcgcggggggcggcgugg

SEQ ID NO: 376112 - RNA, 19 nt, Human
ccggcgcucacucgaccgc

SEQ ID NO: 376113 - RNA, 32 nt, Human
ccggcgcucgcuggcccugcgcgcucggcgcg

SEQ ID NO: 376114 - RNA, 32 nt, Human
ccggcgcucuccccguguccucuccacgacuc

SEQ ID NO: 376115 - RNA, 32 nt, Human
ccggcgcucucgccucccugccgaacacagcg

SEQ ID NO: 376116 - RNA, 18 nt, Human
ccggcgcuggccugggcc

SEQ ID NO: 376117 - RNA, 32 nt, Human
ccggcgcugggaacacaaggagaaagacaaua

SEQ ID NO: 376118 - RNA, 32 nt, Human
ccggcgcuucuuaccuuaccuccgucucaucc

SEQ ID NO: 376119 - RNA, 32 nt, Human
ccggcggaaucuccugagcuccgccgcccagc

SEQ ID NO: 376120 - RNA, 19 nt, Human
ccggcggagagcggaccca

SEQ ID NO: 376121 - RNA, 24 nt, Human
ccggcggagcgaagaugcagugag

SEQ ID NO: 376122 - RNA, 23 nt, Human
ccggcggaggacccgcgagcucg

SEQ ID NO: 376123 - RNA, 24 nt, Human
ccggcggaggagcagcaggauccc

SEQ ID NO: 376124 - RNA, 22 nt, Human
ccggcggaggaggcgggagccc

SEQ ID NO: 376125 - RNA, 22 nt, Human
ccggcggaggcggcuggugccg

SEQ ID NO: 376126 - RNA, 18 nt, Human
ccggcggagggggcggag

SEQ ID NO: 376127 - RNA, 32 nt, Human
ccggcggaguuucuucagaggaacuaccgccc

SEQ ID NO: 376128 - RNA, 26 nt, Human
ccggcggcacgggaggcccgguuuug

SEQ ID NO: 376129 - RNA, 32 nt, Human
ccggcggccauggcaggcacccuggaccugga

SEQ ID NO: 376130 - RNA, 32 nt, Human
ccggcggcccaggauucuaaggaugcaauccu

SEQ ID NO: 376131 - RNA, 32 nt, Human
ccggcggcccccuuccccuccugaccccagau

SEQ ID NO: 376132 - RNA, 32 nt, Human
ccggcggcccccuuccccuccugccccagaug

SEQ ID NO: 376133 - RNA, 19 nt, Human
ccggcggccccgcgcucgc

SEQ ID NO: 376134 - RNA, 24 nt, Human
ccggcggcccggcugcuguuccca

SEQ ID NO: 376135 - RNA, 32 nt, Human
ccggcggccgccaccucuccccagcccaggag

SEQ ID NO: 376136 - RNA, 18 nt, Human
ccggcggccgccccggcc

SEQ ID NO: 376137 - RNA, 32 nt, Human
ccggcggccgcgcugaggccaccaugugacac

SEQ ID NO: 376138 - RNA, 19 nt, Human
ccggcggccgcugcugccg

SEQ ID NO: 376139 - RNA, 32 nt, Human
ccggcggcgcucggggagggagccagcagccu

SEQ ID NO: 376140 - RNA, 32 nt, Human
ccggcggcggcggcggcgcggagcagcacgua

SEQ ID NO: 376141 - RNA, 32 nt, Human
ccggcggcucgcgcccacgcugggccgggagu

SEQ ID NO: 376142 - RNA, 25 nt, Human
ccggcggcucggggcccccgcagca

SEQ ID NO: 376143 - RNA, 18 nt, Human
ccggcggcugccccggcc

SEQ ID NO: 376144 - RNA, 32 nt, Human
ccggcgggaccugcugggaggaauggcgccgc

SEQ ID NO: 376145 - RNA, 18 nt, Human
ccggcgggaggggcgcgg

SEQ ID NO: 376146 - RNA, 21 nt, Human
ccggcgggcagagguugcagu

SEQ ID NO: 376147 - RNA, 21 nt, Human
ccggcgggccgcuugaucccg

SEQ ID NO: 376148 - RNA, 18 nt, Human
ccggcgggcggggcgcag

SEQ ID NO: 376149 - RNA, 32 nt, Human
ccggcggggccagacgucugggcgcgggcagc

SEQ ID NO: 376150 - RNA, 32 nt, Human
ccggcggggccgggauaauaaggucugugggu

SEQ ID NO: 376151 - RNA, 32 nt, Human
ccggcgguggauggggccaggaagcaugcagg

SEQ ID NO: 376152 - RNA, 32 nt, Human
ccggcguacccucccacagauccagcaucacc

SEQ ID NO: 376153 - RNA, 32 nt, Human
ccggcguccggggcuccucuugucggcgacca

SEQ ID NO: 376154 - RNA, 32 nt, Human
ccggcgugagccaccaugcccagccuaucuau

SEQ ID NO: 376155 - RNA, 32 nt, Human
ccggcgugagccaccaugccuggcccggauaa

SEQ ID NO: 376156 - RNA, 20 nt, Human
ccggcgugauugccccgggc

SEQ ID NO: 376157 - RNA, 32 nt, Human
ccggcgugcaccaccaugccaggcuaauuuuu

SEQ ID NO: 376158 - RNA, 19 nt, Human
ccggcgugcgcgccgagcu

SEQ ID NO: 376159 - RNA, 32 nt, Human
ccggcgugucacaggugcgugcgugcuaaugg

SEQ ID NO: 376160 - RNA, 19 nt, Human
ccggcguuccucccuuccc

SEQ ID NO: 376161 - RNA, 32 nt, Human
ccggcuaacacggugaaaccccgucucuacua

SEQ ID NO: 376162 - RNA, 32 nt, Human
ccggcuaacauggugaaacccugccucuacua

SEQ ID NO: 376163 - RNA, 32 nt, Human
ccggcuaagccgcggccacccgcggucugagg

SEQ ID NO: 376164 - RNA, 22 nt, Human
ccggcuacacaguggagcugcc

SEQ ID NO: 376165 - RNA, 18 nt, Human
ccggcuauagccaggccc

SEQ ID NO: 376166 - RNA, 32 nt, Human
ccggcucaacuccagauagaaaaagugggaau

SEQ ID NO: 376167 - RNA, 32 nt, Human
ccggcucaagcaccauucacacugccauccaa

SEQ ID NO: 376168 - RNA, 32 nt, Human
ccggcucaagugcugcucuggcaaagcuccgg

SEQ ID NO: 376169 - RNA, 32 nt, Human
ccggcucaccagaggcagaaccguccuguugu

SEQ ID NO: 376170 - RNA, 24 nt, Human
ccggcucacccaccggccccacca

SEQ ID NO: 376171 - RNA, 31 nt, Human
ccggcucacucgccauggguuggagagggca

SEQ ID NO: 376172 - RNA, 32 nt, Human
ccggcucacugcaaccuccaccucccagguuc

SEQ ID NO: 376173 - RNA, 32 nt, Human
ccggcucacugcaaccuccgccucccugguuc

SEQ ID NO: 376174 - RNA, 32 nt, Human
ccggcucacugcaaccucugucuucuggguuc

SEQ ID NO: 376175 - RNA, 32 nt, Human
ccggcucacugcaguuuugaccucccaggcuc

SEQ ID NO: 376176 - RNA, 22 nt, Human
ccggcucaggaacagcagcagc

SEQ ID NO: 376177 - RNA, 32 nt, Human
ccggcucaguucagggaaaugcuguuccauau

SEQ ID NO: 376178 - RNA, 32 nt, Human
ccggcucaucaaggaggccgucugggaaaaga

SEQ ID NO: 376179 - RNA, 32 nt, Human
ccggcucauggacugaacucagcagggacucu

SEQ ID NO: 376180 - RNA, 32 nt, Human
ccggcuccaggccagacccaggagccaagaga

SEQ ID NO: 376181 - RNA, 23 nt, Human
ccggcuccauggcgaccgggcuc

SEQ ID NO: 376182 - RNA, 32 nt, Human
ccggcucccacaaauagacuccugggcgggcg

SEQ ID NO: 376183 - RNA, 25 nt, Human
ccggcucccacggccucugaggcuc

SEQ ID NO: 376184 - RNA, 32 nt, Human
ccggcucccauuccggcuccagccuccaaucc

SEQ ID NO: 376185 - RNA, 32 nt, Human
ccggcuccccagcccaccgccaugcagggcuc

SEQ ID NO: 376186 - RNA, 22 nt, Human
ccggcuccccggccccuggcuu

SEQ ID NO: 376187 - RNA, 32 nt, Human
ccggcuccccucagccugcuccgugugcucca

SEQ ID NO: 376188 - RNA, 22 nt, Human
ccggcuccccucccaggcugca

SEQ ID NO: 376189 - RNA, 20 nt, Human
ccggcucccggcccaggcuc

SEQ ID NO: 376190 - RNA, 18 nt, Human
ccggcucccggcccgagg

SEQ ID NO: 376191 - RNA, 23 nt, Human
ccggcucccggcgccgggccuca

SEQ ID NO: 376192 - RNA, 17 nt, Human
ccggcucccguccgggc

SEQ ID NO: 376193 - RNA, 22 nt, Human
ccggcucccgucucccuggcuc

SEQ ID NO: 376194 - RNA, 18 nt, Human
ccggcucccuccugagcu

SEQ ID NO: 376195 - RNA, 32 nt, Human
ccggcucccugagaugguccacucuguggcca

SEQ ID NO: 376196 - RNA, 32 nt, Human
ccggcucccugcauugccuggugagagggaag

SEQ ID NO: 376197 - RNA, 20 nt, Human
ccggcucccuucugcugcuc

SEQ ID NO: 376198 - RNA, 17 nt, Human
ccggcuccgcccaccca

SEQ ID NO: 376199 - RNA, 18 nt, Human
ccggcuccgccccgggcc

SEQ ID NO: 376200 - RNA, 32 nt, Human
ccggcuccuacccugaaggugcaccugcaauc

SEQ ID NO: 376201 - RNA, 32 nt, Human
ccggcuccuacccugaaggugcaccugcaguc

SEQ ID NO: 376202 - RNA, 32 nt, Human
ccggcuccuccccuccuccgccccuuccccag

SEQ ID NO: 376203 - RNA, 27 nt, Human
ccggcuccucccucuccuugugccuca

SEQ ID NO: 376204 - RNA, 24 nt, Human
ccggcuccuccucguccggcgcca

SEQ ID NO: 376205 - RNA, 32 nt, Human
ccggcuccucugccacccaccucccggggcug

SEQ ID NO: 376206 - RNA, 32 nt, Human
ccggcuccugcaggaucaugcagcuggggcgc

SEQ ID NO: 376207 - RNA, 32 nt, Human
ccggcuccugcucuccguguagccugaagccu

SEQ ID NO: 376208 - RNA, 32 nt, Human
ccggcuccugggcuucccagcgucgcggguag

SEQ ID NO: 376209 - RNA, 21 nt, Human
ccggcuccuguccccuggcuu

SEQ ID NO: 376210 - RNA, 32 nt, Human
ccggcucgagcucaggcuccagcuucagcccg

SEQ ID NO: 376211 - RNA, 32 nt, Human
ccggcucgcgccgccucgcgcucugccucagu

SEQ ID NO: 376212 - RNA, 32 nt, Human
ccggcucggcccggcccugcucuguucugccc

SEQ ID NO: 376213 - RNA, 21 nt, Human
ccggcucggcccguccggcuc

SEQ ID NO: 376214 - RNA, 32 nt, Human
ccggcucgggcgcgcaccugccggcugcggcc

SEQ ID NO: 376215 - RNA, 32 nt, Human
ccggcucgguacgcgcucugcuccgagccgcu

SEQ ID NO: 376216 - RNA, 32 nt, Human
ccggcucgguucugggauucugaggcucccca

SEQ ID NO: 376217 - RNA, 19 nt, Human
ccggcucucaccgcugcuu

SEQ ID NO: 376218 - RNA, 32 nt, Human
ccggcucucauagcacagucuacugcuuugua

SEQ ID NO: 376219 - RNA, 32 nt, Human
ccggcucucccaucagcggccugaggaccugg

SEQ ID NO: 376220 - RNA, 32 nt, Human
ccggcucuccuucugcagugcaggcgaaggcc

SEQ ID NO: 376221 - RNA, 32 nt, Human
ccggcucugaggugguggaggcggcggaggcg

SEQ ID NO: 376222 - RNA, 32 nt, Human
ccggcucugccuggugcucccugcagugccuu

SEQ ID NO: 376223 - RNA, 32 nt, Human
ccggcucuggaaggcaucccggcucuggguuc

SEQ ID NO: 376224 - RNA, 32 nt, Human
ccggcucugguacacgcuuucuccccagacgg

SEQ ID NO: 376225 - RNA, 32 nt, Human
ccggcucugguguuuuggcuuaugcguuccuu

SEQ ID NO: 376226 - RNA, 32 nt, Human
ccggcucugucgcccaggcuggagugcagugc

SEQ ID NO: 376227 - RNA, 32 nt, Human
ccggcucuucucucggagcugcaggggacagg

SEQ ID NO: 376228 - RNA, 32 nt, Human
ccggcugaccaacauucaaaagcacaaacccu

SEQ ID NO: 376229 - RNA, 32 nt, Human
ccggcugacuccugcccagguuuuccaggaac

SEQ ID NO: 376230 - RNA, 20 nt, Human
ccggcugagaccccugugcu

SEQ ID NO: 376231 - RNA, 23 nt, Human
ccggcugagccgggggagggcuc

SEQ ID NO: 376232 - RNA, 32 nt, Human
ccggcugagcgggccuggaggaagugagcagc

SEQ ID NO: 376233 - RNA, 21 nt, Human
ccggcugaggacccgcggcca

SEQ ID NO: 376234 - RNA, 24 nt, Human
ccggcugaggccacaccugugcca

SEQ ID NO: 376235 - RNA, 19 nt, Human
ccggcugcaaauucgccca

SEQ ID NO: 376236 - RNA, 32 nt, Human
ccggcugcacccagagggagcagugaggcagg

SEQ ID NO: 376237 - RNA, 32 nt, Human
ccggcugcacggccguccuggccaugccucug

SEQ ID NO: 376238 - RNA, 32 nt, Human
ccggcugcacucuagccgccuggguguguggc

SEQ ID NO: 376239 - RNA, 32 nt, Human
ccggcugcacuggccucuaggacucacagcag

SEQ ID NO: 376240 - RNA, 32 nt, Human
ccggcugcagaugggagcccgcggagccgagg

SEQ ID NO: 376241 - RNA, 19 nt, Human
ccggcugcaucuaucacca

SEQ ID NO: 376242 - RNA, 32 nt, Human
ccggcugccaucuccuccuccugggccgccgc

SEQ ID NO: 376243 - RNA, 32 nt, Human
ccggcugcccuaucuucccucacuuuucuuuu

SEQ ID NO: 376244 - RNA, 18 nt, Human
ccggcugccucccuccca

SEQ ID NO: 376245 - RNA, 32 nt, Human
ccggcugccucugcugcaguucagagcaacuu

SEQ ID NO: 376246 - RNA, 17 nt, Human
ccggcugcggcauagca

SEQ ID NO: 376247 - RNA, 25 nt, Human
ccggcugcgggccggcggcgggagg

SEQ ID NO: 376248 - RNA, 21 nt, Human
ccggcugcggggcgcgggggg

SEQ ID NO: 376249 - RNA, 32 nt, Human
ccggcugcugacaugacuucuuugccacucgg

SEQ ID NO: 376250 - RNA, 22 nt, Human
ccggcugcugccuggggcccuu

SEQ ID NO: 376251 - RNA, 22 nt, Human
ccggcugcugcuggcggcacuc

SEQ ID NO: 376252 - RNA, 32 nt, Human
ccggcuggaagagagcguagcacggcucgcac

SEQ ID NO: 376253 - RNA, 32 nt, Human
ccggcuggacccaagcccugcauccccacaug

SEQ ID NO: 376254 - RNA, 32 nt, Human
ccggcuggacugcccucuccuucuuggugauu

SEQ ID NO: 376255 - RNA, 32 nt, Human
ccggcuggaggaggagccgcagaggagugcca

SEQ ID NO: 376256 - RNA, 32 nt, Human
ccggcuggagggugagaucaacacguacuggg

SEQ ID NO: 376257 - RNA, 18 nt, Human
ccggcuggagugcagugg

SEQ ID NO: 376258 - RNA, 32 nt, Human
ccggcuggcacccuuccgcaagugacuggucc

SEQ ID NO: 376259 - RNA, 32 nt, Human
ccggcuggcccaggcccugcagcggcagccuu

SEQ ID NO: 376260 - RNA, 23 nt, Human
ccggcuggcgcuggugacggggg

SEQ ID NO: 376261 - RNA, 32 nt, Human
ccggcuggcggagaaaaggagaagacgguguc

SEQ ID NO: 376262 - RNA, 17 nt, Human
ccggcuggcugccgccu

SEQ ID NO: 376263 - RNA, 32 nt, Human
ccggcuggcugccuccccgugcuguguccagc

SEQ ID NO: 376264 - RNA, 32 nt, Human
ccggcugggacugccagaggaaccuggcuuug

SEQ ID NO: 376265 - RNA, 32 nt, Human
ccggcugggaggcagccgucugugcagcgagc

SEQ ID NO: 376266 - RNA, 32 nt, Human
ccggcugggaucauauguuccacacauguuug

SEQ ID NO: 376267 - RNA, 26 nt, Human
ccggcuggggaggggguggcaggggg

SEQ ID NO: 376268 - RNA, 32 nt, Human
ccggcuggggcagcuggcacucaccaggccug

SEQ ID NO: 376269 - RNA, 32 nt, Human
ccggcugggggacugcccagccucccaccugu

SEQ ID NO: 376270 - RNA, 32 nt, Human
ccggcugggucuccucccgggcucagugggcc

SEQ ID NO: 376271 - RNA, 32 nt, Human
ccggcuggguuugccaucagcccaggauacuc

SEQ ID NO: 376272 - RNA, 32 nt, Human
ccggcuggucaccagggauucaacugccucug

SEQ ID NO: 376273 - RNA, 24 nt, Human
ccggcuggucccaagggucaggaa

SEQ ID NO: 376274 - RNA, 32 nt, Human
ccggcugguguccucagagcaagcccucaaag

SEQ ID NO: 376275 - RNA, 32 nt, Human
ccggcuggugucuugagaccagccugccaggc

SEQ ID NO: 376276 - RNA, 23 nt, Human
ccggcugugcagggugagggagg

SEQ ID NO: 376277 - RNA, 32 nt, Human
ccggcugugcccaguaugccuccuggacccuc

SEQ ID NO: 376278 - RNA, 32 nt, Human
ccggcuguggagaaggaaauagggcccggcgc

SEQ ID NO: 376279 - RNA, 23 nt, Human
ccggcuguggagccccgcccgcc

SEQ ID NO: 376280 - RNA, 22 nt, Human
ccggcuguggcacccagcgcca

SEQ ID NO: 376281 - RNA, 32 nt, Human
ccggcugugggugguucugagcuguuuggcuu

SEQ ID NO: 376282 - RNA, 32 nt, Human
ccggcugugucaaccaggaccugcuggacucc

SEQ ID NO: 376283 - RNA, 32 nt, Human
ccggcuguguguguccuuccgggccuuccaua

SEQ ID NO: 376284 - RNA, 32 nt, Human
ccggcuuagacaccugccucugcuccugccca

SEQ ID NO: 376285 - RNA, 32 nt, Human
ccggcuuagggaggguugaugggggaggcgug

SEQ ID NO: 376286 - RNA, 32 nt, Human
ccggcuucaagccauucugcugccucagccuc

SEQ ID NO: 376287 - RNA, 32 nt, Human
ccggcuucaagugauucuccugccucagccuc

SEQ ID NO: 376288 - RNA, 32 nt, Human
ccggcuucagccucaaguucugaggucagagu

SEQ ID NO: 376289 - RNA, 32 nt, Human
ccggcuuccagcaggacguuuccccaggggau

SEQ ID NO: 376290 - RNA, 21 nt, Human
ccggcuucccgcccaggccca

SEQ ID NO: 376291 - RNA, 32 nt, Human
ccggcuucccgugaggcaggaggcagagccac

SEQ ID NO: 376292 - RNA, 32 nt, Human
ccggcuuccuugguggaggccgucuaggaaac

SEQ ID NO: 376293 - RNA, 32 nt, Human
ccggcuucgcgcggcccugccucccucucgcc

SEQ ID NO: 376294 - RNA, 22 nt, Human
ccggcuucuagcccaggacuca

SEQ ID NO: 376295 - RNA, 22 nt, Human
ccggcuucuccccgggcccuca

SEQ ID NO: 376296 - RNA, 32 nt, Human
ccggcuucucggcuuggauccugggcugggug

SEQ ID NO: 376297 - RNA, 32 nt, Human
ccggcuucucugugaggggucccaccagccca

SEQ ID NO: 376298 - RNA, 32 nt, Human
ccggcuugagccaccacacccggcacaucuuc

SEQ ID NO: 376299 - RNA, 32 nt, Human
ccggcuugccuguaaucccagcacuuugggag

SEQ ID NO: 376300 - RNA, 32 nt, Human
ccggcuuuccucccgugccucucccagcucua

SEQ ID NO: 376301 - RNA, 32 nt, Human
ccggcuuugccuggugaggcuggagggagcac

SEQ ID NO: 376302 - RNA, 32 nt, Human
ccgggaaaaguggcacugaggcucuggaacuu

SEQ ID NO: 376303 - RNA, 32 nt, Human
ccgggaaagagcccagccugccaacaccucga

SEQ ID NO: 376304 - RNA, 32 nt, Human
ccgggaaagcccucugcccacacccacaggcu

SEQ ID NO: 376305 - RNA, 28 nt, Human
ccgggaaagugcugaaaucugcagugag

SEQ ID NO: 376306 - RNA, 32 nt, Human
ccgggaaauacacacagagccaggagcagaag

SEQ ID NO: 376307 - RNA, 32 nt, Human
ccgggaacaaugucaguucuacaugguggucu

SEQ ID NO: 376308 - RNA, 32 nt, Human
ccgggaaccccagaggaggucgcaguucagcc

SEQ ID NO: 376309 - RNA, 20 nt, Human
ccgggaaccggggaccgaga

SEQ ID NO: 376310 - RNA, 32 nt, Human
ccgggaaccugucggcgagcugcgggagcgcg

SEQ ID NO: 376311 - RNA, 23 nt, Human
ccgggaacggaggcggccagcgg

SEQ ID NO: 376312 - RNA, 32 nt, Human
ccgggaacuccucugugggcucagugacaggu

SEQ ID NO: 376313 - RNA, 31 nt, Human
ccgggaacugagagaggaagaagagugaagg

SEQ ID NO: 376314 - RNA, 32 nt, Human
ccgggaacugcccgcagccugcucugagcuuu

SEQ ID NO: 376315 - RNA, 32 nt, Human
ccgggaagagcaggcgggugaaaaugaaagcc

SEQ ID NO: 376316 - RNA, 21 nt, Human
ccgggaagagcgggccugcug

SEQ ID NO: 376317 - RNA, 22 nt, Human
ccgggaagaguagggacugcug

SEQ ID NO: 376318 - RNA, 24 nt, Human
ccgggaagcagagguugcagugag

SEQ ID NO: 376319 - RNA, 24 nt, Human
ccgggaagcagagguugcggugag

SEQ ID NO: 376320 - RNA, 23 nt, Human
ccgggaagcagagguuguaguga

SEQ ID NO: 376321 - RNA, 24 nt, Human
ccgggaagcagagguuguagugag

SEQ ID NO: 376322 - RNA, 24 nt, Human
ccgggaagcagagucugcagugag

SEQ ID NO: 376323 - RNA, 24 nt, Human
ccgggaagcggagcuugcagugag

SEQ ID NO: 376324 - RNA, 24 nt, Human
ccgggaagcggagguugcagggag

SEQ ID NO: 376325 - RNA, 18 nt, Human
ccgggaagcuccggggua

SEQ ID NO: 376326 - RNA, 32 nt, Human
ccgggaaggaagagcggagccggagcgagcca

SEQ ID NO: 376327 - RNA, 32 nt, Human
ccgggaaggaaggcguccaguuucauuacaca

SEQ ID NO: 376328 - RNA, 23 nt, Human
ccgggaaggcaaaaaaugcagug

SEQ ID NO: 376329 - RNA, 32 nt, Human
ccgggaaggcggaaguugcagugagccgagug

SEQ ID NO: 376330 - RNA, 21 nt, Human
ccgggaaggggcccccagcug

SEQ ID NO: 376331 - RNA, 24 nt, Human
ccgggaaguggagguugcagugag

SEQ ID NO: 376332 - RNA, 32 nt, Human
ccgggaaguggcucuugugugugcccaccuca

SEQ ID NO: 376333 - RNA, 32 nt, Human
ccgggaagugggaggacguagagcagagaaga

SEQ ID NO: 376334 - RNA, 32 nt, Human
ccgggaaguuccugggcuuugcuccaaagcug

SEQ ID NO: 376335 - RNA, 32 nt, Human
ccgggaaucuacaguggugacaaggacauggg

SEQ ID NO: 376336 - RNA, 31 nt, Human
ccgggaaugggaaagacagaagagaagggaa

SEQ ID NO: 376337 - RNA, 32 nt, Human
ccgggaaugggaaagacagaagagaagggaaa

SEQ ID NO: 376338 - RNA, 32 nt, Human
ccgggaaugguggcucacgccuguaaucucag

SEQ ID NO: 376339 - RNA, 32 nt, Human
ccgggaauggugguucacgccuguaaucccag

SEQ ID NO: 376340 - RNA, 31 nt, Human
ccgggacaagaccagggcaggagggagccgg

SEQ ID NO: 376341 - RNA, 32 nt, Human
ccgggacagagaccaugagaggaggccgauug

SEQ ID NO: 376342 - RNA, 32 nt, Human
ccgggacaggcccagccccagagcccagagau

SEQ ID NO: 376343 - RNA, 32 nt, Human
ccgggaccacucucccuggcaggagcccgccu

SEQ ID NO: 376344 - RNA, 27 nt, Human
ccgggaccacugugaacccugccgccu

SEQ ID NO: 376345 - RNA, 32 nt, Human
ccgggaccagaggcugcugacacugucgcugg

SEQ ID NO: 376346 - RNA, 32 nt, Human
ccgggaccaugaacggggaggccaucugcagc

SEQ ID NO: 376347 - RNA, 32 nt, Human
ccgggaccaugguggcccaggcugcagccgcc

SEQ ID NO: 376348 - RNA, 32 nt, Human
ccgggaccauguccaaaccuucagaccacauc

SEQ ID NO: 376349 - RNA, 32 nt, Human
ccgggacccacugugcagccagcagccgggcc

SEQ ID NO: 376350 - RNA, 19 nt, Human
ccgggacccagaccugggg

SEQ ID NO: 376351 - RNA, 16 nt, Human
ccgggaccccaccucu

SEQ ID NO: 376352 - RNA, 25 nt, Human
ccgggaccccaccucuaccucccca

SEQ ID NO: 376353 - RNA, 25 nt, Human
ccgggaccccccuccccacccccca

SEQ ID NO: 376354 - RNA, 23 nt, Human
ccgggacccccgcggccuccgca

SEQ ID NO: 376355 - RNA, 21 nt, Human
ccgggacccucgaccuccuca

SEQ ID NO: 376356 - RNA, 21 nt, Human
ccgggacccucugcugcuccc

SEQ ID NO: 376357 - RNA, 26 nt, Human
ccgggaccgcugcccucacgcgccgc

SEQ ID NO: 376358 - RNA, 18 nt, Human
ccgggaccggcccguguc

SEQ ID NO: 376359 - RNA, 24 nt, Human
ccgggaccugccaccagcccccca

SEQ ID NO: 376360 - RNA, 32 nt, Human
ccgggaccugccgccgcugccugcgcgccccg

SEQ ID NO: 376361 - RNA, 32 nt, Human
ccgggaccuucagacccagggaaagggugagg

SEQ ID NO: 376362 - RNA, 23 nt, Human
ccgggacgcagagguuacaguga

SEQ ID NO: 376363 - RNA, 24 nt, Human
ccgggacgcagggguugcagugag

SEQ ID NO: 376364 - RNA, 19 nt, Human
ccgggacgccccgcugccg

SEQ ID NO: 376365 - RNA, 32 nt, Human
ccgggacgccccugcaccucugcuccggugca

SEQ ID NO: 376366 - RNA, 32 nt, Human
ccgggacgcgccgggcuggagugggcgguuau

SEQ ID NO: 376367 - RNA, 18 nt, Human
ccgggacggccccacgga

SEQ ID NO: 376368 - RNA, 32 nt, Human
ccgggacguggauacagaugaaaagaagcaaa

SEQ ID NO: 376369 - RNA, 32 nt, Human
ccgggacguggauacagaugaaaagaagcaag

SEQ ID NO: 376370 - RNA, 32 nt, Human
ccgggacuaaaagaaaagacagcacugcaaau

SEQ ID NO: 376371 - RNA, 22 nt, Human
ccgggacuacaggcaugcacca

SEQ ID NO: 376372 - RNA, 32 nt, Human
ccgggacucuagcagcggucuccgcgaccccc

SEQ ID NO: 376373 - RNA, 22 nt, Human
ccgggacugcaggcacaagcca

SEQ ID NO: 376374 - RNA, 32 nt, Human
ccgggacugcuggucacugcuuagaaccguca

SEQ ID NO: 376375 - RNA, 24 nt, Human
ccgggacuucaaugcugcagugag

SEQ ID NO: 376376 - RNA, 21 nt, Human
ccgggacuuggugaaacuuug

SEQ ID NO: 376377 - RNA, 28 nt, Human
ccgggagaagaugcugccucguuguuau

SEQ ID NO: 376378 - RNA, 32 nt, Human
ccgggagaagggcuggaaggaggggacuggac

SEQ ID NO: 376379 - RNA, 20 nt, Human
ccgggagacagagguugcag

SEQ ID NO: 376380 - RNA, 23 nt, Human
ccgggagacagagguugcaguga

SEQ ID NO: 376381 - RNA, 24 nt, Human
ccgggagacagagguugcagugag

SEQ ID NO: 376382 - RNA, 32 nt, Human
ccgggagacagaugaggcgagaggaggaggag

SEQ ID NO: 376383 - RNA, 17 nt, Human
ccgggagaccuuuucca

SEQ ID NO: 376384 - RNA, 24 nt, Human
ccgggagacggagguugcagugag

SEQ ID NO: 376385 - RNA, 24 nt, Human
ccgggagacggcgcuugcagugag

SEQ ID NO: 376386 - RNA, 20 nt, Human
ccgggagagagggggcgcgg

SEQ ID NO: 376387 - RNA, 24 nt, Human
ccgggagagggagguugcagugag

SEQ ID NO: 376388 - RNA, 19 nt, Human
ccgggagaggggggugcag

SEQ ID NO: 376389 - RNA, 32 nt, Human
ccgggagauaaguaugagaugcgcagccacgg

SEQ ID NO: 376390 - RNA, 24 nt, Human
ccgggagaugcauguugcagugag

SEQ ID NO: 376391 - RNA, 24 nt, Human
ccgggagauugaggcugcggugag

SEQ ID NO: 376392 - RNA, 23 nt, Human
ccgggagcacacgaacccugcca

SEQ ID NO: 376393 - RNA, 23 nt, Human
ccgggagcagagacugcagugag

SEQ ID NO: 376394 - RNA, 32 nt, Human
ccgggagcaggccuccggccucccagacuucu

SEQ ID NO: 376395 - RNA, 32 nt, Human
ccgggagccaggacucggcgacgcgaggcugc

SEQ ID NO: 376396 - RNA, 32 nt, Human
ccgggagcccacggcgguuaauucuuuuuacc

SEQ ID NO: 376397 - RNA, 32 nt, Human
ccgggagcccaggguggcagagcuguggugca

SEQ ID NO: 376398 - RNA, 32 nt, Human
ccgggagcccucucuucuccgcagaggagagc

SEQ ID NO: 376399 - RNA, 23 nt, Human
ccgggagccgagcuugcagcgag

SEQ ID NO: 376400 - RNA, 32 nt, Human
ccgggagccgcacuccagacuggcccgguagu

SEQ ID NO: 376401 - RNA, 30 nt, Human
ccgggagccggcuccaugcgccuggagcgc

SEQ ID NO: 376402 - RNA, 22 nt, Human
ccgggagccgggagccgagcgc

SEQ ID NO: 376403 - RNA, 32 nt, Human
ccgggagccugaggcaggagaauugcuugaac

SEQ ID NO: 376404 - RNA, 32 nt, Human
ccgggagccuguaccguucccugcugguugag

SEQ ID NO: 376405 - RNA, 32 nt, Human
ccgggagcgacguggggaaacugaggcccgga

SEQ ID NO: 376406 - RNA, 23 nt, Human
ccgggagcggagcuugcagugag

SEQ ID NO: 376407 - RNA, 23 nt, Human
ccgggagcggagguugcagugag

SEQ ID NO: 376408 - RNA, 32 nt, Human
ccgggagcggggcccggcgccgcccgggccgc

SEQ ID NO: 376409 - RNA, 32 nt, Human
ccgggagcugcggagcaugcguggaguggcag

SEQ ID NO: 376410 - RNA, 16 nt, Human
ccgggagcugcugccu

SEQ ID NO: 376411 - RNA, 21 nt, Human
ccgggagcugggaacccgcag

SEQ ID NO: 376412 - RNA, 32 nt, Human
ccgggagcuugaggccagagugagugacuugg

SEQ ID NO: 376413 - RNA, 32 nt, Human
ccgggaggacauggacagggaaggagaugcag

SEQ ID NO: 376414 - RNA, 32 nt, Human
ccgggaggagccaaccguggcgcaggcggcgc

SEQ ID NO: 376415 - RNA, 24 nt, Human
ccgggaggaggagcuugcagugag

SEQ ID NO: 376416 - RNA, 24 nt, Human
ccgggaggcaaagguugcagugag

SEQ ID NO: 376417 - RNA, 21 nt, Human
ccgggaggcaaagguugcggu

SEQ ID NO: 376418 - RNA, 24 nt, Human
ccgggaggcaaguaggacagagag

SEQ ID NO: 376419 - RNA, 24 nt, Human
ccgggaggcaccccacccucccca

SEQ ID NO: 376420 - RNA, 24 nt, Human
ccgggaggcagaaccugcagugag

SEQ ID NO: 376421 - RNA, 23 nt, Human
ccgggaggcagaaguugcaguga

SEQ ID NO: 376422 - RNA, 24 nt, Human
ccgggaggcagaaguugcagugag

SEQ ID NO: 376423 - RNA, 24 nt, Human
ccgggaggcagacuuugcagugag

SEQ ID NO: 376424 - RNA, 21 nt, Human
ccgggaggcagagauugcagu

SEQ ID NO: 376425 - RNA, 24 nt, Human
ccgggaggcagagcuugcagugag

SEQ ID NO: 376426 - RNA, 24 nt, Human
ccgggaggcagagcuugcggugag

SEQ ID NO: 376427 - RNA, 19 nt, Human
ccgggaggcagaggcugca

SEQ ID NO: 376428 - RNA, 23 nt, Human
ccgggaggcagaggcugcaguga

SEQ ID NO: 376429 - RNA, 24 nt, Human
ccgggaggcagaggcugcagugag

SEQ ID NO: 376430 - RNA, 32 nt, Human
ccgggaggcagaggcuguagugagccaagaua

SEQ ID NO: 376431 - RNA, 23 nt, Human
ccgggaggcagagggaguaguga

SEQ ID NO: 376432 - RNA, 21 nt, Human
ccgggaggcagagggugcagu

SEQ ID NO: 376433 - RNA, 24 nt, Human
ccgggaggcagagguagcagugag

SEQ ID NO: 376434 - RNA, 24 nt, Human
ccgggaggcagaggucauggugag

SEQ ID NO: 376435 - RNA, 24 nt, Human
ccgggaggcagagguggcugugag

SEQ ID NO: 376436 - RNA, 24 nt, Human
ccgggaggcagagguuacagugag

SEQ ID NO: 376437 - RNA, 24 nt, Human
ccgggaggcagagguuaucgugag

SEQ ID NO: 376438 - RNA, 24 nt, Human
ccgggaggcagagguugaagugag

SEQ ID NO: 376439 - RNA, 24 nt, Human
ccgggaggcagagguugcacugag

SEQ ID NO: 376440 - RNA, 20 nt, Human
ccgggaggcagagguugcag

SEQ ID NO: 376441 - RNA, 22 nt, Human
ccgggaggcagagguugcagga

SEQ ID NO: 376442 - RNA, 23 nt, Human
ccgggaggcagagguugcaggag

SEQ ID NO: 376443 - RNA, 23 nt, Human
ccgggaggcagagguugcaguga

SEQ ID NO: 376444 - RNA, 24 nt, Human
ccgggaggcagagguugcagugag

SEQ ID NO: 376445 - RNA, 24 nt, Human
ccgggaggcagagguugcagugug

SEQ ID NO: 376446 - RNA, 24 nt, Human
ccgggaggcagagguugcggugag

SEQ ID NO: 376447 - RNA, 21 nt, Human
ccgggaggcagagguugcugu

SEQ ID NO: 376448 - RNA, 23 nt, Human
ccgggaggcagagguugcuguga

SEQ ID NO: 376449 - RNA, 24 nt, Human
ccgggaggcagagguugcugugag

SEQ ID NO: 376450 - RNA, 24 nt, Human
ccgggaggcagagguuguagugag

SEQ ID NO: 376451 - RNA, 24 nt, Human
ccgggaggcagagguuguguugag

SEQ ID NO: 376452 - RNA, 24 nt, Human
ccgggaggcagagguuucagugag

SEQ ID NO: 376453 - RNA, 24 nt, Human
ccgggaggcagaguuugcagugag

SEQ ID NO: 376454 - RNA, 24 nt, Human
ccgggaggcagcaguugcagugag

SEQ ID NO: 376455 - RNA, 24 nt, Human
ccgggaggcauagcuugcagugag

SEQ ID NO: 376456 - RNA, 24 nt, Human
ccgggaggcggaacuugcagugag

SEQ ID NO: 376457 - RNA, 24 nt, Human
ccgggaggcggaacuugcggugag

SEQ ID NO: 376458 - RNA, 22 nt, Human
ccgggaggcggaaguugcagug

SEQ ID NO: 376459 - RNA, 23 nt, Human
ccgggaggcggaaguugcaguga

SEQ ID NO: 376460 - RNA, 24 nt, Human
ccgggaggcggaaguugcagugag

SEQ ID NO: 376461 - RNA, 24 nt, Human
ccgggaggcggaaguuguggugag

SEQ ID NO: 376462 - RNA, 23 nt, Human
ccgggaggcggagagucaaguga

SEQ ID NO: 376463 - RNA, 24 nt, Human
ccgggaggcggagauugcggugag

SEQ ID NO: 376464 - RNA, 24 nt, Human
ccgggaggcggagcuuacagugag

SEQ ID NO: 376465 - RNA, 20 nt, Human
ccgggaggcggagcuugcag

SEQ ID NO: 376466 - RNA, 23 nt, Human
ccgggaggcggagcuugcagcga

SEQ ID NO: 376467 - RNA, 24 nt, Human
ccgggaggcggagcuugcagcgag

SEQ ID NO: 376468 - RNA, 23 nt, Human
ccgggaggcggagcuugcaguga

SEQ ID NO: 376469 - RNA, 24 nt, Human
ccgggaggcggagcuugcagugag

SEQ ID NO: 376470 - RNA, 24 nt, Human
ccgggaggcggagcuuguagugag

SEQ ID NO: 376471 - RNA, 24 nt, Human
ccgggaggcggagcuuucagugag

SEQ ID NO: 376472 - RNA, 22 nt, Human
ccgggaggcggaggcgcggggg

SEQ ID NO: 376473 - RNA, 19 nt, Human
ccgggaggcggaggcggga

SEQ ID NO: 376474 - RNA, 20 nt, Human
ccgggaggcggaggcgggag

SEQ ID NO: 376475 - RNA, 24 nt, Human
ccgggaggcggaggcugcagugag

SEQ ID NO: 376476 - RNA, 24 nt, Human
ccgggaggcggagguuacagugag

SEQ ID NO: 376477 - RNA, 24 nt, Human
ccgggaggcggagguuauggagag

SEQ ID NO: 376478 - RNA, 22 nt, Human
ccgggaggcggagguucauggg

SEQ ID NO: 376479 - RNA, 24 nt, Human
ccgggaggcggagguuccagugag

SEQ ID NO: 376480 - RNA, 24 nt, Human
ccgggaggcggagguugaggugag

SEQ ID NO: 376481 - RNA, 21 nt, Human
ccgggaggcggagguugcagu

SEQ ID NO: 376482 - RNA, 22 nt, Human
ccgggaggcggagguugcagug

SEQ ID NO: 376483 - RNA, 23 nt, Human
ccgggaggcggagguugcaguga

SEQ ID NO: 376484 - RNA, 24 nt, Human
ccgggaggcggagguugcagugag

SEQ ID NO: 376485 - RNA, 24 nt, Human
ccgggaggcggagguugcaguuag

SEQ ID NO: 376486 - RNA, 23 nt, Human
ccgggaggcggagguugcaugag

SEQ ID NO: 376487 - RNA, 24 nt, Human
ccgggaggcggagguugccgugag

SEQ ID NO: 376488 - RNA, 23 nt, Human
ccgggaggcggagguugcgguga

SEQ ID NO: 376489 - RNA, 24 nt, Human
ccgggaggcggagguugcggugag

SEQ ID NO: 376490 - RNA, 24 nt, Human
ccgggaggcggagguuguagugag

SEQ ID NO: 376491 - RNA, 24 nt, Human
ccgggaggcggagguuguggugag

SEQ ID NO: 376492 - RNA, 24 nt, Human
ccgggaggcggagguuucagugag

SEQ ID NO: 376493 - RNA, 23 nt, Human
ccgggaggcggaguugcggugag

SEQ ID NO: 376494 - RNA, 24 nt, Human
ccgggaggcggaguuugcagagag

SEQ ID NO: 376495 - RNA, 24 nt, Human
ccgggaggcggaguuugcagugag

SEQ ID NO: 376496 - RNA, 22 nt, Human
ccgggaggcggaguuuugccag

SEQ ID NO: 376497 - RNA, 32 nt, Human
ccgggaggcggcggaggucaccgcggggagag

SEQ ID NO: 376498 - RNA, 24 nt, Human
ccgggaggcggcgguugcagugag

SEQ ID NO: 376499 - RNA, 24 nt, Human
ccgggaggcggggguugcagugag

SEQ ID NO: 376500 - RNA, 24 nt, Human
ccgggaggcgggucuugcagugag

SEQ ID NO: 376501 - RNA, 24 nt, Human
ccgggaggcuaagguugcagugag

SEQ ID NO: 376502 - RNA, 19 nt, Human
ccgggaggcuaaugcagga

SEQ ID NO: 376503 - RNA, 32 nt, Human
ccgggaggcuaaugcaggagaaucgcuugaac

SEQ ID NO: 376504 - RNA, 18 nt, Human
ccgggaggcucgcggugg

SEQ ID NO: 376505 - RNA, 32 nt, Human
ccgggaggcugaggcaggagaaucacuugaac

SEQ ID NO: 376506 - RNA, 32 nt, Human
ccgggaggcugaggcaggagaaucacuuguac

SEQ ID NO: 376507 - RNA, 32 nt, Human
ccgggaggcugaggcaggagaaucgcuugaac

SEQ ID NO: 376508 - RNA, 32 nt, Human
ccgggaggcugaggcaggagaauggcgugaac

SEQ ID NO: 376509 - RNA, 32 nt, Human
ccgggaggcugaggcaggagaauugcuugaac

SEQ ID NO: 376510 - RNA, 32 nt, Human
ccgggaggcugaggcaggagagucacuugaac

SEQ ID NO: 376511 - RNA, 32 nt, Human
ccgggaggcugaggcgggagaaucgcuugaac

SEQ ID NO: 376512 - RNA, 24 nt, Human
ccgggaggcugagguugcagugag

SEQ ID NO: 376513 - RNA, 31 nt, Human
ccgggagggaaacugucuguggcucuaggcu

SEQ ID NO: 376514 - RNA, 32 nt, Human
ccgggagggaaacugucuguggcucuaggcug

SEQ ID NO: 376515 - RNA, 24 nt, Human
ccgggagggagagguugcagugag

SEQ ID NO: 376516 - RNA, 32 nt, Human
ccgggagggaggcaaaugagcauugagaaauu

SEQ ID NO: 376517 - RNA, 21 nt, Human
ccgggagggcccagcagugag

SEQ ID NO: 376518 - RNA, 32 nt, Human
ccgggagguagaggcaggcugaugggggaggg

SEQ ID NO: 376519 - RNA, 24 nt, Human
ccgggagguagaggcugcaauggg

SEQ ID NO: 376520 - RNA, 24 nt, Human
ccgggagguagagguugcagugag

SEQ ID NO: 376521 - RNA, 24 nt, Human
ccgggagguagaguuugcagugag

SEQ ID NO: 376522 - RNA, 24 nt, Human
ccgggaggucaagguugcagugag

SEQ ID NO: 376523 - RNA, 18 nt, Human
ccgggagguccugcagga

SEQ ID NO: 376524 - RNA, 24 nt, Human
ccgggaggucgaggcugcugugag

SEQ ID NO: 376525 - RNA, 24 nt, Human
ccgggagguggagauugcagugag

SEQ ID NO: 376526 - RNA, 24 nt, Human
ccgggagguggagcuugcagugag

SEQ ID NO: 376527 - RNA, 24 nt, Human
ccgggagguggaggcugcaaugag

SEQ ID NO: 376528 - RNA, 24 nt, Human
ccgggagguggaggcugcagugag

SEQ ID NO: 376529 - RNA, 24 nt, Human
ccgggagguggaggcugcggugag

SEQ ID NO: 376530 - RNA, 24 nt, Human
ccgggagguggaggucgcggugag

SEQ ID NO: 376531 - RNA, 24 nt, Human
ccgggagguggagguuacagugag

SEQ ID NO: 376532 - RNA, 20 nt, Human
ccgggagguggagguugcag

SEQ ID NO: 376533 - RNA, 24 nt, Human
ccgggagguggagguugcagggag

SEQ ID NO: 376534 - RNA, 23 nt, Human
ccgggagguggagguugcaguga

SEQ ID NO: 376535 - RNA, 24 nt, Human
ccgggagguggagguugcagugag

SEQ ID NO: 376536 - RNA, 24 nt, Human
ccgggagguggagguugccgugag

SEQ ID NO: 376537 - RNA, 24 nt, Human
ccgggagguggagguugcgaugag

SEQ ID NO: 376538 - RNA, 24 nt, Human
ccgggagguggagguugcggugag

SEQ ID NO: 376539 - RNA, 24 nt, Human
ccgggagguggagguuguagugag

SEQ ID NO: 376540 - RNA, 24 nt, Human
ccgggaggugggaguuguagugag

SEQ ID NO: 376541 - RNA, 24 nt, Human
ccgggagguugaggcugcaguggg

SEQ ID NO: 376542 - RNA, 32 nt, Human
ccgggagucuuuccccacaccccagccaucgc

SEQ ID NO: 376543 - RNA, 23 nt, Human
ccgggaguggagcuugcaaugag

SEQ ID NO: 376544 - RNA, 32 nt, Human
ccgggagugguggcucacgccuguaaugccag

SEQ ID NO: 376545 - RNA, 32 nt, Human
ccgggagugguggugggcaccuguaaucccag

SEQ ID NO: 376546 - RNA, 32 nt, Human
ccgggaguugcuggacugagacaugagccucc

SEQ ID NO: 376547 - RNA, 24 nt, Human
ccgggaguuugaaguugcagugag

SEQ ID NO: 376548 - RNA, 32 nt, Human
ccgggaguuugagaccagccugggcaacaugg

SEQ ID NO: 376549 - RNA, 24 nt, Human
ccgggaguuugagucugcagugag

SEQ ID NO: 376550 - RNA, 24 nt, Human
ccgggauauaggggcggggcgcag

SEQ ID NO: 376551 - RNA, 32 nt, Human
ccgggaucaagcaaucccacuucagccucuug

SEQ ID NO: 376552 - RNA, 32 nt, Human
ccgggaucagccaggggccagcaugagccgga

SEQ ID NO: 376553 - RNA, 32 nt, Human
ccgggauccaugugucuuuccuggugacuagg

SEQ ID NO: 376554 - RNA, 20 nt, Human
ccgggauccucucacuguca

SEQ ID NO: 376555 - RNA, 32 nt, Human
ccgggauccuggaaggugaguguguaugaauu

SEQ ID NO: 376556 - RNA, 22 nt, Human
ccgggaucgccaccuccugccu

SEQ ID NO: 376557 - RNA, 32 nt, Human
ccgggaucuggcuuuccuucccuucccaccac

SEQ ID NO: 376558 - RNA, 22 nt, Human
ccgggaugacaggcaugagcca

SEQ ID NO: 376559 - RNA, 32 nt, Human
ccgggaugcagagcagcuuuugugcacgguuc

SEQ ID NO: 376560 - RNA, 32 nt, Human
ccgggaugccuccggcccugcccagcaggccu

SEQ ID NO: 376561 - RNA, 32 nt, Human
ccgggauggcugcuuccaaguuguuugcaauu

SEQ ID NO: 376562 - RNA, 32 nt, Human
ccgggaugggaucagaugggaagcagaagcuc

SEQ ID NO: 376563 - RNA, 32 nt, Human
ccgggaugggggcgcgcccugccugguccggc

SEQ ID NO: 376564 - RNA, 22 nt, Human
ccgggauuacaggcauaagcca

SEQ ID NO: 376565 - RNA, 22 nt, Human
ccgggauuacaggcaugagcca

SEQ ID NO: 376566 - RNA, 22 nt, Human
ccgggauuacaggcaugagcua

SEQ ID NO: 376567 - RNA, 22 nt, Human
ccgggauuacaggcgugagcca

SEQ ID NO: 376568 - RNA, 23 nt, Human
ccgggauugcuacuucucugcca

SEQ ID NO: 376569 - RNA, 32 nt, Human
ccgggauuuccucugcagcggacgcggcacug

SEQ ID NO: 376570 - RNA, 32 nt, Human
ccgggcaacaagggcuaaacuccaucucaaaa

SEQ ID NO: 376571 - RNA, 20 nt, Human
ccgggcaacauggcaaaacc

SEQ ID NO: 376572 - RNA, 20 nt, Human
ccgggcaacauggugaaacc

SEQ ID NO: 376573 - RNA, 32 nt, Human
ccgggcaacauggugaaaccccgucucuacaa

SEQ ID NO: 376574 - RNA, 32 nt, Human
ccgggcaacuggagagagcugggagucaauac

SEQ ID NO: 376575 - RNA, 32 nt, Human
ccgggcaagcaguuccaccagggccagcacug

SEQ ID NO: 376576 - RNA, 32 nt, Human
ccgggcacaccagcccucagagaccugagcuc

SEQ ID NO: 376577 - RNA, 32 nt, Human
ccgggcacaguggcucaugccuguaaucccag

SEQ ID NO: 376578 - RNA, 32 nt, Human
ccgggcaccaucagacucccaccuccacuguc

SEQ ID NO: 376579 - RNA, 32 nt, Human
ccgggcaccaugggccacuccaggaugggaca

SEQ ID NO: 376580 - RNA, 24 nt, Human
ccgggcaccccuggcaggaagcag

SEQ ID NO: 376581 - RNA, 32 nt, Human
ccgggcaccccuggcaggaagcaggacuccca

SEQ ID NO: 376582 - RNA, 32 nt, Human
ccgggcaccgccaggcgcggagcccagaucgc

SEQ ID NO: 376583 - RNA, 32 nt, Human
ccgggcaccgggaggcgguggcggcggcggcg

SEQ ID NO: 376584 - RNA, 32 nt, Human
ccgggcaccuggccuuggcaagugagccugca

SEQ ID NO: 376585 - RNA, 32 nt, Human
ccgggcaccugggccccugcacaugccaggug

SEQ ID NO: 376586 - RNA, 32 nt, Human
ccgggcacgacuuuggcugggauuggcagacc

SEQ ID NO: 376587 - RNA, 32 nt, Human
ccgggcacggugcuagcccugccuugagacac

SEQ ID NO: 376588 - RNA, 32 nt, Human
ccgggcacuguggcucacgccuguaaucccag

SEQ ID NO: 376589 - RNA, 32 nt, Human
ccgggcacuguggcucaugccuuuaaucccag

SEQ ID NO: 376590 - RNA, 32 nt, Human
ccgggcacuguugcugcugcgggaguccagag

SEQ ID NO: 376591 - RNA, 32 nt, Human
ccgggcagaggggcuccucucuucccaguagg

SEQ ID NO: 376592 - RNA, 20 nt, Human
ccgggcagcccccugggcca

SEQ ID NO: 376593 - RNA, 32 nt, Human
ccgggcagccuccugcucugugaaggacccug

SEQ ID NO: 376594 - RNA, 24 nt, Human
ccgggcagcggagguugcagugag

SEQ ID NO: 376595 - RNA, 32 nt, Human
ccgggcagcuucauccccucccccucugcccc

SEQ ID NO: 376596 - RNA, 32 nt, Human
ccgggcaggaauagaagaugaacaaacccaua

SEQ ID NO: 376597 - RNA, 32 nt, Human
ccgggcaggaauaugagacgugcacugagagu

SEQ ID NO: 376598 - RNA, 19 nt, Human
ccgggcaggcccuggguca

SEQ ID NO: 376599 - RNA, 32 nt, Human
ccgggcaggccuccuggguugcagggacuuga

SEQ ID NO: 376600 - RNA, 32 nt, Human
ccgggcaggcgccucacagagcacagacgugc

SEQ ID NO: 376601 - RNA, 32 nt, Human
ccgggcagggagaagugugcggggccgggaca

SEQ ID NO: 376602 - RNA, 32 nt, Human
ccgggcagggcugcucccuccucugcuccccc

SEQ ID NO: 376603 - RNA, 32 nt, Human
ccgggcaggguccuggccagcagugugggagc

SEQ ID NO: 376604 - RNA, 32 nt, Human
ccgggcaguuaggaucgucuauuggaugugaa

SEQ ID NO: 376605 - RNA, 32 nt, Human
ccgggcauaguggcucacuccuguaaucccag

SEQ ID NO: 376606 - RNA, 32 nt, Human
ccgggcauaguggcucaugccuguaaucccag

SEQ ID NO: 376607 - RNA, 32 nt, Human
ccgggcauauucuuagugugggagaaaaauca

SEQ ID NO: 376608 - RNA, 22 nt, Human
ccgggcauccacccaucagccc

SEQ ID NO: 376609 - RNA, 32 nt, Human
ccgggcaugacggcucaugccuguaaucccag

SEQ ID NO: 376610 - RNA, 32 nt, Human
ccgggcaugauggcgcgugccuguaaucccag

SEQ ID NO: 376611 - RNA, 32 nt, Human
ccgggcaugauggcgggugccuguaaucccag

SEQ ID NO: 376612 - RNA, 32 nt, Human
ccgggcaugauggugcacgccuguaaucucag

SEQ ID NO: 376613 - RNA, 32 nt, Human
ccgggcaugauggugggcaccuguaaucccag

SEQ ID NO: 376614 - RNA, 32 nt, Human
ccgggcaugauggugguggccuguaaucccag

SEQ ID NO: 376615 - RNA, 32 nt, Human
ccgggcaugguagcucacgccuguaaucccag

SEQ ID NO: 376616 - RNA, 32 nt, Human
ccgggcauggugaugcaugccuguaaucccag

SEQ ID NO: 376617 - RNA, 32 nt, Human
ccgggcauggugcugagcccuguuccugcucu

SEQ ID NO: 376618 - RNA, 32 nt, Human
ccgggcaugguggaaugugccuguaaucccac

SEQ ID NO: 376619 - RNA, 32 nt, Human
ccgggcaugguggcaaaugccuguaauaccag

SEQ ID NO: 376620 - RNA, 32 nt, Human
ccgggcaugguggcacauaccuguaaucccag

SEQ ID NO: 376621 - RNA, 32 nt, Human
ccgggcaugguggcacaugccuguaaucccag

SEQ ID NO: 376622 - RNA, 32 nt, Human
ccgggcaugguggcacaugccuguaaucccgg

SEQ ID NO: 376623 - RNA, 32 nt, Human
ccgggcaugguggcacaugccuguaaucucag

SEQ ID NO: 376624 - RNA, 32 nt, Human
ccgggcaugguggcacgcgccuguaaucccag

SEQ ID NO: 376625 - RNA, 32 nt, Human
ccgggcaugguggcacgugccuguaaucccag

SEQ ID NO: 376626 - RNA, 32 nt, Human
ccgggcaugguggcacgugccuguaaucucag

SEQ ID NO: 376627 - RNA, 32 nt, Human
ccgggcaugguggcaggcaccuguaaucccag

SEQ ID NO: 376628 - RNA, 32 nt, Human
ccgggcaugguggcaggugccuguaaucccaa

SEQ ID NO: 376629 - RNA, 32 nt, Human
ccgggcaugguggcaggugccuguaaucccag

SEQ ID NO: 376630 - RNA, 32 nt, Human
ccgggcaugguggcagucaccuguaaucccag

SEQ ID NO: 376631 - RNA, 32 nt, Human
ccgggcaugguggcaugcgccuguaaucccag

SEQ ID NO: 376632 - RNA, 32 nt, Human
ccgggcaugguggcaugugccuguaaucccag

SEQ ID NO: 376633 - RNA, 32 nt, Human
ccgggcaugguggcgcaagccuguaaucccag

SEQ ID NO: 376634 - RNA, 32 nt, Human
ccgggcaugguggcgcacaccuguaauccuag

SEQ ID NO: 376635 - RNA, 32 nt, Human
ccgggcaugguggcgcaugccuguaaucccag

SEQ ID NO: 376636 - RNA, 32 nt, Human
ccgggcaugguggcgcgcaccuguaaucccag

SEQ ID NO: 376637 - RNA, 32 nt, Human
ccgggcaugguggcgcucaccuguaaucccgg

SEQ ID NO: 376638 - RNA, 32 nt, Human
ccgggcaugguggcgugcaccuguaaucccag

SEQ ID NO: 376639 - RNA, 32 nt, Human
ccgggcaugguggcucaagccuguaaucccag

SEQ ID NO: 376640 - RNA, 32 nt, Human
ccgggcaugguggcucacaccuguaaucccag

SEQ ID NO: 376641 - RNA, 32 nt, Human
ccgggcaugguggcucacaccuguaauuccag

SEQ ID NO: 376642 - RNA, 32 nt, Human
ccgggcaugguggcucacgccuguaauccagc

SEQ ID NO: 376643 - RNA, 32 nt, Human
ccgggcaugguggcucacgccuguaaucccag

SEQ ID NO: 376644 - RNA, 32 nt, Human
ccgggcaugguggcucacgccuguaaucucag

SEQ ID NO: 376645 - RNA, 32 nt, Human
ccgggcaugguggcucauaccuguaauccuag

SEQ ID NO: 376646 - RNA, 32 nt, Human
ccgggcaugguggcucaugccuauaaucccaa

SEQ ID NO: 376647 - RNA, 32 nt, Human
ccgggcaugguggcucaugccuauaaucccag

SEQ ID NO: 376648 - RNA, 32 nt, Human
ccgggcaugguggcucaugccuguaaucccaa

SEQ ID NO: 376649 - RNA, 32 nt, Human
ccgggcaugguggcucaugccuguaaucccag

SEQ ID NO: 376650 - RNA, 32 nt, Human
ccgggcaugguggcucaugccuguaauccuag

SEQ ID NO: 376651 - RNA, 32 nt, Human
ccgggcaugguggcucaugccuguaucccagc

SEQ ID NO: 376652 - RNA, 32 nt, Human
ccgggcaugguggcuuacgccuguaaucccag

SEQ ID NO: 376653 - RNA, 32 nt, Human
ccgggcaugguggcuugcaccuguaaucccag

SEQ ID NO: 376654 - RNA, 32 nt, Human
ccgggcauggugguaggugccuguaaucccag

SEQ ID NO: 376655 - RNA, 32 nt, Human
ccgggcaugguggugcaugccuguaaucccag

SEQ ID NO: 376656 - RNA, 32 nt, Human
ccgggcaugguggugcaugccuguaaucucag

SEQ ID NO: 376657 - RNA, 32 nt, Human
ccgggcaugguggugcgugccuguaaucccag

SEQ ID NO: 376658 - RNA, 32 nt, Human
ccgggcauggugguggacgccuguaaucccag

SEQ ID NO: 376659 - RNA, 32 nt, Human
ccgggcaugguggugggcgccuguaaucccag

SEQ ID NO: 376660 - RNA, 32 nt, Human
ccgggcauggugguggguaccuguagucccag

SEQ ID NO: 376661 - RNA, 32 nt, Human
ccgggcaugguggugggugccuguaaucccag

SEQ ID NO: 376662 - RNA, 32 nt, Human
ccgggcaugguggugugcaccuguaaucccag

SEQ ID NO: 376663 - RNA, 32 nt, Human
ccgggcauggugguguguaccuguagucccag

SEQ ID NO: 376664 - RNA, 32 nt, Human
ccgggcauggugguucaugccuguaaucccag

SEQ ID NO: 376665 - RNA, 32 nt, Human
ccgggcaugucugccuggagugcugugcugug

SEQ ID NO: 376666 - RNA, 32 nt, Human
ccgggcaugugaggcccugggcaaggggaugg

SEQ ID NO: 376667 - RNA, 32 nt, Human
ccgggcauguuggcacaugccuguaaucucag

SEQ ID NO: 376668 - RNA, 32 nt, Human
ccgggcauguuggcucccgccuguaaucccag

SEQ ID NO: 376669 - RNA, 24 nt, Human
ccgggcauugccgacaggaugcag

SEQ ID NO: 376670 - RNA, 21 nt, Human
ccgggccaacauggugaaacc

SEQ ID NO: 376671 - RNA, 32 nt, Human
ccgggccacaauagggacagggcagggacagg

SEQ ID NO: 376672 - RNA, 32 nt, Human
ccgggccaccccgcaaccucgcgccucccguc

SEQ ID NO: 376673 - RNA, 32 nt, Human
ccgggccagagggagaggagccgagcgcggcg

SEQ ID NO: 376674 - RNA, 32 nt, Human
ccgggccaggaggaugagguuguccugagggg

SEQ ID NO: 376675 - RNA, 32 nt, Human
ccgggcccaagaggugcaaggaauaugggggu

SEQ ID NO: 376676 - RNA, 32 nt, Human
ccgggcccagcccaggcccaucaggacuaaga

SEQ ID NO: 376677 - RNA, 32 nt, Human
ccgggcccagcccucggagugcugccaagugc

SEQ ID NO: 376678 - RNA, 32 nt, Human
ccgggcccagcuccuccugccucccaguggcc

SEQ ID NO: 376679 - RNA, 32 nt, Human
ccgggcccagguaguccucccaccucagccuc

SEQ ID NO: 376680 - RNA, 32 nt, Human
ccgggcccaguggcucaugccuguaaucccaa

SEQ ID NO: 376681 - RNA, 32 nt, Human
ccgggccccacuguuuagaaucuuagauggaa

SEQ ID NO: 376682 - RNA, 32 nt, Human
ccgggccccagccuuccaccugugcuagcagc

SEQ ID NO: 376683 - RNA, 32 nt, Human
ccgggcccccugcugcgggcucugccuuggug

SEQ ID NO: 376684 - RNA, 32 nt, Human
ccgggcccccuggagucagccagaucccuggu

SEQ ID NO: 376685 - RNA, 32 nt, Human
ccgggccccucccauuccgccuuuucuucagc

SEQ ID NO: 376686 - RNA, 32 nt, Human
ccgggccccucggaaccuccagcuugguccgg

SEQ ID NO: 376687 - RNA, 20 nt, Human
ccgggccccugccacugccu

SEQ ID NO: 376688 - RNA, 32 nt, Human
ccgggccccugcccuaugucccgcaaggcaag

SEQ ID NO: 376689 - RNA, 32 nt, Human
ccgggccccugccuugugccucagcucucgag

SEQ ID NO: 376690 - RNA, 32 nt, Human
ccgggcccuccuccugccuguucuggcuccuc

SEQ ID NO: 376691 - RNA, 32 nt, Human
ccgggcccugcccacacacgguggugcugcau

SEQ ID NO: 376692 - RNA, 32 nt, Human
ccgggcccuggccacaaugaccucuuugcccu

SEQ ID NO: 376693 - RNA, 32 nt, Human
ccgggcccuuuaccuccugugggugaugugcu

SEQ ID NO: 376694 - RNA, 18 nt, Human
ccgggccgagccgggccu

SEQ ID NO: 376695 - RNA, 17 nt, Human
ccgggccgccggcgccu

SEQ ID NO: 376696 - RNA, 32 nt, Human
ccgggccgccucgcucgcucccagcucuguca

SEQ ID NO: 376697 - RNA, 18 nt, Human
ccgggccgcgcgcugccu

SEQ ID NO: 376698 - RNA, 19 nt, Human
ccgggccgcgcgcugugcc

SEQ ID NO: 376699 - RNA, 32 nt, Human
ccgggccggcggcgggcaccaggccgucccga

SEQ ID NO: 376700 - RNA, 32 nt, Human
ccgggccgggccgagcggagcccagggagcgc

SEQ ID NO: 376701 - RNA, 32 nt, Human
ccgggccgggccgcgccucagcagggcggcgg

SEQ ID NO: 376702 - RNA, 21 nt, Human
ccgggccggggcuggccggga

SEQ ID NO: 376703 - RNA, 32 nt, Human
ccgggccguuccccuccccgcucuucuuccaa

SEQ ID NO: 376704 - RNA, 32 nt, Human
ccgggccuauggcgaaacuccgucucuacaaa

SEQ ID NO: 376705 - RNA, 32 nt, Human
ccgggccucacugccgccaccauguccuccuu

SEQ ID NO: 376706 - RNA, 19 nt, Human
ccgggccucaguuuccuca

SEQ ID NO: 376707 - RNA, 32 nt, Human
ccgggccucccuucuguuuccugggcugcagg

SEQ ID NO: 376708 - RNA, 32 nt, Human
ccgggccucuccccacucuccucugcccaguu

SEQ ID NO: 376709 - RNA, 18 nt, Human
ccgggccucuuaacuuca

SEQ ID NO: 376710 - RNA, 18 nt, Human
ccgggccucuucuaccca

SEQ ID NO: 376711 - RNA, 32 nt, Human
ccgggccucuucuacccauccauguuucuacc

SEQ ID NO: 376712 - RNA, 22 nt, Human
ccgggccugcacagauaccuca

SEQ ID NO: 376713 - RNA, 32 nt, Human
ccgggccugcagcgccucagcaccgcuccggg

SEQ ID NO: 376714 - RNA, 32 nt, Human
ccgggccugccucugaguggugccucuccugg

SEQ ID NO: 376715 - RNA, 32 nt, Human
ccgggccugccugcaucucccaccuccucccc

SEQ ID NO: 376716 - RNA, 32 nt, Human
ccgggccugggaacugcuggcucuaagaaccu

SEQ ID NO: 376717 - RNA, 32 nt, Human
ccgggccugguggcgcaucccuguaaucccag

SEQ ID NO: 376718 - RNA, 32 nt, Human
ccgggccugguggcucacaccuguaaucccag

SEQ ID NO: 376719 - RNA, 32 nt, Human
ccgggccuguucuauuuuucuaguuaagggaa

SEQ ID NO: 376720 - RNA, 32 nt, Human
ccgggccuucaggacaucucaagauucagucu

SEQ ID NO: 376721 - RNA, 32 nt, Human
ccgggccuuccuggugggcauguacggccaga

SEQ ID NO: 376722 - RNA, 32 nt, Human
ccgggccuuggagauggagaauucucaguugu

SEQ ID NO: 376723 - RNA, 32 nt, Human
ccgggccuuugucccugccuuggcuuuucucc

SEQ ID NO: 376724 - RNA, 32 nt, Human
ccgggcgcaauggcucaugccuauaaucccag

SEQ ID NO: 376725 - RNA, 32 nt, Human
ccgggcgcacuggcucacgccuguaaucucag

SEQ ID NO: 376726 - RNA, 32 nt, Human
ccgggcgcagcggcucacgccuguaaucccag

SEQ ID NO: 376727 - RNA, 32 nt, Human
ccgggcgcaguggcucacaccuguaaucccaa

SEQ ID NO: 376728 - RNA, 32 nt, Human
ccgggcgcaguggcucacaccuguaaucccag

SEQ ID NO: 376729 - RNA, 32 nt, Human
ccgggcgcaguggcucacgccuguaaucccaa

SEQ ID NO: 376730 - RNA, 32 nt, Human
ccgggcgcaguggcucacgccuguaaucccag

SEQ ID NO: 376731 - RNA, 32 nt, Human
ccgggcgcaguggcucacgccuguaaucccgg

SEQ ID NO: 376732 - RNA, 32 nt, Human
ccgggcgcaguggcucacgccuguaauuccag

SEQ ID NO: 376733 - RNA, 32 nt, Human
ccgggcgcaguggcucaugccuguaaucccag

SEQ ID NO: 376734 - RNA, 32 nt, Human
ccgggcgcaguggcucaugccuguggucccaa

SEQ ID NO: 376735 - RNA, 32 nt, Human
ccgggcgcaguggcuuacaccuguaaucgcag

SEQ ID NO: 376736 - RNA, 17 nt, Human
ccgggcgccgaggccag

SEQ ID NO: 376737 - RNA, 32 nt, Human
ccgggcgcgauggcucacgccuguaaucccag

SEQ ID NO: 376738 - RNA, 23 nt, Human
ccgggcgcgccccagcccaccca

SEQ ID NO: 376739 - RNA, 18 nt, Human
ccgggcgcgccccgggcu

SEQ ID NO: 376740 - RNA, 32 nt, Human
ccgggcgcgcuggcucacgccuguaaucccag

SEQ ID NO: 376741 - RNA, 20 nt, Human
ccgggcgcggggagggggcu

SEQ ID NO: 376742 - RNA, 32 nt, Human
ccgggcgcuccugaagcagcaguuauggagcu

SEQ ID NO: 376743 - RNA, 18 nt, Human
ccgggcgcugcuccggcc

SEQ ID NO: 376744 - RNA, 32 nt, Human
ccgggcgcuguggcucaagccuguaaucccag

SEQ ID NO: 376745 - RNA, 25 nt, Human
ccgggcgcuuccaaaaugcccaggc

SEQ ID NO: 376746 - RNA, 32 nt, Human
ccgggcggacguucacuucuucaacugagaug

SEQ ID NO: 376747 - RNA, 32 nt, Human
ccgggcggaucccgggaaggcggaaggcuucg

SEQ ID NO: 376748 - RNA, 32 nt, Human
ccgggcggcagagaaggagggagcggguacgg

SEQ ID NO: 376749 - RNA, 23 nt, Human
ccgggcggcagagcuugcaguga

SEQ ID NO: 376750 - RNA, 24 nt, Human
ccgggcggcagagcuugcagugag

SEQ ID NO: 376751 - RNA, 32 nt, Human
ccgggcggcaggcgggcgagcagcgaucgggc

SEQ ID NO: 376752 - RNA, 24 nt, Human
ccgggcggcggaaguugcagugag

SEQ ID NO: 376753 - RNA, 24 nt, Human
ccgggcggcggagauugcagugag

SEQ ID NO: 376754 - RNA, 32 nt, Human
ccgggcggcucgugcacaccucaggccucaaa

SEQ ID NO: 376755 - RNA, 32 nt, Human
ccgggcggcugcagccgugagccaccccuguu

SEQ ID NO: 376756 - RNA, 32 nt, Human
ccgggcgggagggauuccaaagagaccgccgg

SEQ ID NO: 376757 - RNA, 32 nt, Human
ccgggcggggcggcuggccgggcagaggggcu

SEQ ID NO: 376758 - RNA, 17 nt, Human
ccgggcggggggcgcgg

SEQ ID NO: 376759 - RNA, 24 nt, Human
ccgggcgguggagcuugcagugag

SEQ ID NO: 376760 - RNA, 24 nt, Human
ccgggcgguggagguuguagugag

SEQ ID NO: 376761 - RNA, 32 nt, Human
ccgggcguaguggcacaugccuguaaucccag

SEQ ID NO: 376762 - RNA, 32 nt, Human
ccgggcguaguggcucacgccuguaaucccgg

SEQ ID NO: 376763 - RNA, 23 nt, Human
ccgggcgucccggaauugugggg

SEQ ID NO: 376764 - RNA, 32 nt, Human
ccgggcguccggagcuguagcagcagcagcag

SEQ ID NO: 376765 - RNA, 32 nt, Human
ccgggcgugauggcucacaccuguaauuccag

SEQ ID NO: 376766 - RNA, 32 nt, Human
ccgggcguggaggcucaugccuguaaucccag

SEQ ID NO: 376767 - RNA, 32 nt, Human
ccgggcguggcggcacaugccuguaaucccag

SEQ ID NO: 376768 - RNA, 32 nt, Human
ccgggcgugguagcucacgccuguaaucccag

SEQ ID NO: 376769 - RNA, 32 nt, Human
ccgggcgugguagcucaugccuguaaucccag

SEQ ID NO: 376770 - RNA, 32 nt, Human
ccgggcguggugaugcgugccuguaaucccag

SEQ ID NO: 376771 - RNA, 32 nt, Human
ccgggcgugguggcaaaugccuguaauaccag

SEQ ID NO: 376772 - RNA, 32 nt, Human
ccgggcgugguggcacacgccuguaaucccag

SEQ ID NO: 376773 - RNA, 32 nt, Human
ccgggcgugguggcacacuccuguaaucccag

SEQ ID NO: 376774 - RNA, 32 nt, Human
ccgggcgugguggcacaugccuguaaucccaa

SEQ ID NO: 376775 - RNA, 32 nt, Human
ccgggcgugguggcacaugccuguaaucccag

SEQ ID NO: 376776 - RNA, 32 nt, Human
ccgggcgugguggcacaugccuguaaucucag

SEQ ID NO: 376777 - RNA, 32 nt, Human
ccgggcgugguggcacauuccuguaaucccag

SEQ ID NO: 376778 - RNA, 32 nt, Human
ccgggcgugguggcaccugccuguaaucccag

SEQ ID NO: 376779 - RNA, 32 nt, Human
ccgggcgugguggcacgcaccuguaaucccag

SEQ ID NO: 376780 - RNA, 32 nt, Human
ccgggcgugguggcacgcgccuguaaucccag

SEQ ID NO: 376781 - RNA, 32 nt, Human
ccgggcgugguggcaggcgccuguaaucccag

SEQ ID NO: 376782 - RNA, 32 nt, Human
ccgggcgugguggcaggugccuguaaucccag

SEQ ID NO: 376783 - RNA, 32 nt, Human
ccgggcgugguggcccacgccuguaaucccag

SEQ ID NO: 376784 - RNA, 32 nt, Human
ccgggcgugguggccugcgccuguaaucccag

SEQ ID NO: 376785 - RNA, 32 nt, Human
ccgggcgugguggcgcaugccuguaaucccag

SEQ ID NO: 376786 - RNA, 32 nt, Human
ccgggcgugguggcgccugccuguaaucccag

SEQ ID NO: 376787 - RNA, 32 nt, Human
ccgggcgugguggcgggcaccuguaauaccaa

SEQ ID NO: 376788 - RNA, 32 nt, Human
ccgggcgugguggcgggccccuguaaucccag

SEQ ID NO: 376789 - RNA, 32 nt, Human
ccgggcgugguggcgggcgccuguaaucccag

SEQ ID NO: 376790 - RNA, 32 nt, Human
ccgggcgugguggcgggcgccuguaauccuag

SEQ ID NO: 376791 - RNA, 32 nt, Human
ccgggcgugguggcgugcaccuguaaucucag

SEQ ID NO: 376792 - RNA, 32 nt, Human
ccgggcgugguggcgugugccuguaaucucag

SEQ ID NO: 376793 - RNA, 32 nt, Human
ccgggcgugguggcucacaccuguaaucccaa

SEQ ID NO: 376794 - RNA, 32 nt, Human
ccgggcgugguggcucacaccuguaaucccag

SEQ ID NO: 376795 - RNA, 32 nt, Human
ccgggcgugguggcucacgccuguaaucccaa

SEQ ID NO: 376796 - RNA, 32 nt, Human
ccgggcgugguggcucacgccuguaaucccag

SEQ ID NO: 376797 - RNA, 32 nt, Human
ccgggcgugguggcucacgccuguaaucccgg

SEQ ID NO: 376798 - RNA, 32 nt, Human
ccgggcgugguggcucacgccuguaauccuag

SEQ ID NO: 376799 - RNA, 32 nt, Human
ccgggcgugguggcucacgccuguaaucucag

SEQ ID NO: 376800 - RNA, 32 nt, Human
ccgggcgugguggcucaugccuauaaucccag

SEQ ID NO: 376801 - RNA, 32 nt, Human
ccgggcgugguggcucaugccuguaaucccag

SEQ ID NO: 376802 - RNA, 32 nt, Human
ccgggcgugguggcucaugccuguaaucucag

SEQ ID NO: 376803 - RNA, 32 nt, Human
ccgggcgugguggcucaugccuguaauuccag

SEQ ID NO: 376804 - RNA, 32 nt, Human
ccgggcgugguggcucaugccuuuaaucccag

SEQ ID NO: 376805 - RNA, 32 nt, Human
ccgggcgugguggcucaugucuguaaugccag

SEQ ID NO: 376806 - RNA, 32 nt, Human
ccgggcgugguggcuccugccuguaaucccag

SEQ ID NO: 376807 - RNA, 32 nt, Human
ccgggcgugguggcucucgccuguaaucucag

SEQ ID NO: 376808 - RNA, 32 nt, Human
ccgggcguggugggucacgccuguaaucccag

SEQ ID NO: 376809 - RNA, 32 nt, Human
ccgggcgugguggugagugccuguaaucacag

SEQ ID NO: 376810 - RNA, 32 nt, Human
ccgggcgugguggugcaggccuguaaucccag

SEQ ID NO: 376811 - RNA, 32 nt, Human
ccgggcgugguggugcaugccuguaauccaag

SEQ ID NO: 376812 - RNA, 32 nt, Human
ccgggcgugguggugcaugccuguaaucccag

SEQ ID NO: 376813 - RNA, 32 nt, Human
ccgggcgugguggugcgcgccuguaaucccag

SEQ ID NO: 376814 - RNA, 32 nt, Human
ccgggcgugguggugcucaccuguaaucccag

SEQ ID NO: 376815 - RNA, 32 nt, Human
ccgggcgugguggugggcaccuguaaucccag

SEQ ID NO: 376816 - RNA, 32 nt, Human
ccgggcgugguggugggugccuguaauccuag

SEQ ID NO: 376817 - RNA, 32 nt, Human
ccgggcguggugguguaugccuguaaucccag

SEQ ID NO: 376818 - RNA, 32 nt, Human
ccgggcgugguuugcuucucucagucacugcu

SEQ ID NO: 376819 - RNA, 32 nt, Human
ccgggcguguuggugugcgccuguaaucccag

SEQ ID NO: 376820 - RNA, 32 nt, Human
ccgggcguucucuccgggcccagcucuucuuc

SEQ ID NO: 376821 - RNA, 32 nt, Human
ccgggcuacgagcggcugagaaaaugaugcau

SEQ ID NO: 376822 - RNA, 32 nt, Human
ccgggcuacuaggagugagaccagcuucuggc

SEQ ID NO: 376823 - RNA, 32 nt, Human
ccgggcuagacccggcgccaucaugcugcuuc

SEQ ID NO: 376824 - RNA, 32 nt, Human
ccgggcucaagcaauccucccaccucagccuc

SEQ ID NO: 376825 - RNA, 32 nt, Human
ccgggcucaagcaauccuccugccucagcucc

SEQ ID NO: 376826 - RNA, 32 nt, Human
ccgggcucaagugacccucccaccucagccuc

SEQ ID NO: 376827 - RNA, 32 nt, Human
ccgggcucaagugauucucccgccucagucuc

SEQ ID NO: 376828 - RNA, 32 nt, Human
ccgggcucacauccacugaggguauagugacc

SEQ ID NO: 376829 - RNA, 32 nt, Human
ccgggcucaccccauucuccugccucagccuc

SEQ ID NO: 376830 - RNA, 32 nt, Human
ccgggcucacgccauucuuccaccucagccuc

SEQ ID NO: 376831 - RNA, 32 nt, Human
ccgggcucaggggccuuugagcuggccugagg

SEQ ID NO: 376832 - RNA, 32 nt, Human
ccgggcucaggugauucucccgccucagcacc

SEQ ID NO: 376833 - RNA, 32 nt, Human
ccgggcuccaacaauccucccaucucagccuc

SEQ ID NO: 376834 - RNA, 32 nt, Human
ccgggcuccagccccagacccucuagcuccug

SEQ ID NO: 376835 - RNA, 32 nt, Human
ccgggcuccagugauccucccgccucagccuc

SEQ ID NO: 376836 - RNA, 18 nt, Human
ccgggcuccggcugcaga

SEQ ID NO: 376837 - RNA, 18 nt, Human
ccgggcucgcgggugaga

SEQ ID NO: 376838 - RNA, 32 nt, Human
ccgggcucuagcuguuucccucaggcggccug

SEQ ID NO: 376839 - RNA, 32 nt, Human
ccgggcucuccaggaagguggcugcggcgaca

SEQ ID NO: 376840 - RNA, 32 nt, Human
ccgggcucuggaggagggucccugcuucuucc

SEQ ID NO: 376841 - RNA, 32 nt, Human
ccgggcugaagcggggagccagacagcugcgg

SEQ ID NO: 376842 - RNA, 32 nt, Human
ccgggcugagggccugcuggaggccucaggug

SEQ ID NO: 376843 - RNA, 32 nt, Human
ccgggcugauagcauuugcccuguggggugca

SEQ ID NO: 376844 - RNA, 32 nt, Human
ccgggcugcccagccgggaaguuccugggcuu

SEQ ID NO: 376845 - RNA, 24 nt, Human
ccgggcugccccacagcccauguc

SEQ ID NO: 376846 - RNA, 32 nt, Human
ccgggcugcccuugaggggccugcugcguuga

SEQ ID NO: 376847 - RNA, 32 nt, Human
ccgggcugccucucccccgcuagggccuggug

SEQ ID NO: 376848 - RNA, 31 nt, Human
ccgggcugccucucgcaucucugucuucccc

SEQ ID NO: 376849 - RNA, 19 nt, Human
ccgggcugcgcucacugcc

SEQ ID NO: 376850 - RNA, 32 nt, Human
ccgggcugcucaccucuccccuucugcugagc

SEQ ID NO: 376851 - RNA, 32 nt, Human
ccgggcugcucuggaucccaggacuccggcuu

SEQ ID NO: 376852 - RNA, 32 nt, Human
ccgggcugcugaggcccgagcggcaggagcgc

SEQ ID NO: 376853 - RNA, 32 nt, Human
ccgggcugcugcagacagacaggaagcacgcc

SEQ ID NO: 376854 - RNA, 21 nt, Human
ccgggcuggagccacgggggc

SEQ ID NO: 376855 - RNA, 32 nt, Human
ccgggcuggagccgaggccggagcagcugucu

SEQ ID NO: 376856 - RNA, 18 nt, Human
ccgggcuggagugcaaug

SEQ ID NO: 376857 - RNA, 18 nt, Human
ccgggcuggagugcagug

SEQ ID NO: 376858 - RNA, 19 nt, Human
ccgggcuggagugcagugg

SEQ ID NO: 376859 - RNA, 21 nt, Human
ccgggcuggagugcaguggug

SEQ ID NO: 376860 - RNA, 32 nt, Human
ccgggcuggagugcaguggugugaucucgguu

SEQ ID NO: 376861 - RNA, 32 nt, Human
ccgggcuggcauuuugugacccuucccuguug

SEQ ID NO: 376862 - RNA, 32 nt, Human
ccgggcuggcccuugcccccacccugcaacuc

SEQ ID NO: 376863 - RNA, 32 nt, Human
ccgggcuggccuuggccucgcgccuuccccug

SEQ ID NO: 376864 - RNA, 32 nt, Human
ccgggcugggaggggcugcacugugagcgcug

SEQ ID NO: 376865 - RNA, 32 nt, Human
ccgggcugggcgggggagaggaaggggcgggg

SEQ ID NO: 376866 - RNA, 32 nt, Human
ccgggcugucccaggcugaggcgguugcuccc

SEQ ID NO: 376867 - RNA, 16 nt, Human
ccgggcugucccggcc

SEQ ID NO: 376868 - RNA, 32 nt, Human
ccgggcuguggucugugggcugugggacgagc

SEQ ID NO: 376869 - RNA, 32 nt, Human
ccgggcuugaggggugauggaggcagguuccc

SEQ ID NO: 376870 - RNA, 32 nt, Human
ccgggcuugcggagugcugggcucccagacaa

SEQ ID NO: 376871 - RNA, 32 nt, Human
ccgggcuugcuuccggcgucauggcucaaagg

SEQ ID NO: 376872 - RNA, 32 nt, Human
ccgggcuugguggcucaugccuguaaucccag

SEQ ID NO: 376873 - RNA, 32 nt, Human
ccgggcuugguggcucaugcuuguaaucucaa

SEQ ID NO: 376874 - RNA, 32 nt, Human
ccgggcuugguggcuuaugccuguaaucccag

SEQ ID NO: 376875 - RNA, 32 nt, Human
ccgggcuuuccucacaccugagccgggugcga

SEQ ID NO: 376876 - RNA, 32 nt, Human
ccgggcuuucgacaguggggagugugacgcgc

SEQ ID NO: 376877 - RNA, 32 nt, Human
ccgggcuuugggccgggcgcccgagucugucc

SEQ ID NO: 376878 - RNA, 32 nt, Human
ccgggcuuuguggcaugugccuguaaucccag

SEQ ID NO: 376879 - RNA, 32 nt, Human
ccggggaagagaagcaaagcgcaacggugugg

SEQ ID NO: 376880 - RNA, 32 nt, Human
ccggggaagaggaggaggaaggaaagaaagaa

SEQ ID NO: 376881 - RNA, 32 nt, Human
ccggggaagaggcgcggcgggagaagcgaccg

SEQ ID NO: 376882 - RNA, 32 nt, Human
ccggggaaggacacccucacucccacaccccg

SEQ ID NO: 376883 - RNA, 32 nt, Human
ccggggaaggccaggguggaagggcggcuuga

SEQ ID NO: 376884 - RNA, 32 nt, Human
ccggggaaucuccagcccguugccuuuuccau

SEQ ID NO: 376885 - RNA, 32 nt, Human
ccggggacaaguccggaagcuggagaagauga

SEQ ID NO: 376886 - RNA, 22 nt, Human
ccggggacggagguugcaguga

SEQ ID NO: 376887 - RNA, 32 nt, Human
ccggggacucccaggcuggagagcacugccag

SEQ ID NO: 376888 - RNA, 32 nt, Human
ccggggagaacaucccucccauucugggaaag

SEQ ID NO: 376889 - RNA, 32 nt, Human
ccggggagacaggaacacgggcaagacagcgc

SEQ ID NO: 376890 - RNA, 24 nt, Human
ccggggagacggagguugcaguga

SEQ ID NO: 376891 - RNA, 25 nt, Human
ccggggagacggagguugcagugag

SEQ ID NO: 376892 - RNA, 32 nt, Human
ccggggagacggagguugcagugagccgaguu

SEQ ID NO: 376893 - RNA, 32 nt, Human
ccggggagaggaacugccagcucccgcuuucu

SEQ ID NO: 376894 - RNA, 32 nt, Human
ccggggagaggaagaggagucggaagggaggc

SEQ ID NO: 376895 - RNA, 32 nt, Human
ccggggagaggaagggugggugcaagagugaa

SEQ ID NO: 376896 - RNA, 32 nt, Human
ccggggagauaaccucucccaugggccacauc

SEQ ID NO: 376897 - RNA, 18 nt, Human
ccggggagcacccuucua

SEQ ID NO: 376898 - RNA, 32 nt, Human
ccggggagcagaugcgucagauggaggagaaa

SEQ ID NO: 376899 - RNA, 32 nt, Human
ccggggagccacagaaucccagaucuugggcg

SEQ ID NO: 376900 - RNA, 32 nt, Human
ccggggagcccaagcguccucuagcuccaucu

SEQ ID NO: 376901 - RNA, 32 nt, Human
ccggggagccugggccugacauggcccaggag

SEQ ID NO: 376902 - RNA, 32 nt, Human
ccggggaggacuugcggggcagaggagggcgu

SEQ ID NO: 376903 - RNA, 32 nt, Human
ccggggaggaggaggaggaggaagaggaggag

SEQ ID NO: 376904 - RNA, 32 nt, Human
ccggggaggaggggguugcagugagccgagau

SEQ ID NO: 376905 - RNA, 22 nt, Human
ccggggaggcagagguugcagu

SEQ ID NO: 376906 - RNA, 24 nt, Human
ccggggaggcagagguugcaguga

SEQ ID NO: 376907 - RNA, 25 nt, Human
ccggggaggcagagguugcagugag

SEQ ID NO: 376908 - RNA, 32 nt, Human
ccggggaggcagagguugcagugagccgagau

SEQ ID NO: 376909 - RNA, 32 nt, Human
ccggggaggcagagguugcagugagcugagag

SEQ ID NO: 376910 - RNA, 23 nt, Human
ccggggaggcggagauugcagug

SEQ ID NO: 376911 - RNA, 24 nt, Human
ccggggaggcggagauugcaguga

SEQ ID NO: 376912 - RNA, 25 nt, Human
ccggggaggcggagauugcagugag

SEQ ID NO: 376913 - RNA, 24 nt, Human
ccggggaggcggagcuugcaguga

SEQ ID NO: 376914 - RNA, 25 nt, Human
ccggggaggcggagcuugcagugag

SEQ ID NO: 376915 - RNA, 32 nt, Human
ccggggaggcggagcuugcagugagccaagac

SEQ ID NO: 376916 - RNA, 32 nt, Human
ccggggaggcggaggguguggugagccgggau

SEQ ID NO: 376917 - RNA, 24 nt, Human
ccggggaggcggagguuacaguga

SEQ ID NO: 376918 - RNA, 25 nt, Human
ccggggaggcggagguuacagugag

SEQ ID NO: 376919 - RNA, 32 nt, Human
ccggggaggcggagguuacagugagccgagau

SEQ ID NO: 376920 - RNA, 25 nt, Human
ccggggaggcggggguugcaaugag

SEQ ID NO: 376921 - RNA, 32 nt, Human
ccggggagguggaaguugcagugggccaagau

SEQ ID NO: 376922 - RNA, 24 nt, Human
ccggggagguggaggcugcaguga

SEQ ID NO: 376923 - RNA, 25 nt, Human
ccggggagguggaggcugcagugag

SEQ ID NO: 376924 - RNA, 32 nt, Human
ccggggagguggaggcugcagugagccgagau

SEQ ID NO: 376925 - RNA, 24 nt, Human
ccggggagguggagguugcaguga

SEQ ID NO: 376926 - RNA, 25 nt, Human
ccggggagguggagguugcagugag

SEQ ID NO: 376927 - RNA, 32 nt, Human
ccggggagguggagguugcagugagcugagau

SEQ ID NO: 376928 - RNA, 24 nt, Human
ccggggaguuggagguugcaguga

SEQ ID NO: 376929 - RNA, 25 nt, Human
ccggggaguuggagguugcagugag

SEQ ID NO: 376930 - RNA, 32 nt, Human
ccggggaguuggagguugcagugagccgagau

SEQ ID NO: 376931 - RNA, 32 nt, Human
ccggggaucacagccucagcggacaggaaaug

SEQ ID NO: 376932 - RNA, 32 nt, Human
ccggggaucuccugggcugggcucuccuugga

SEQ ID NO: 376933 - RNA, 32 nt, Human
ccggggaugcgccauggccauggcccggcugg

SEQ ID NO: 376934 - RNA, 20 nt, Human
ccggggauggagacauguca

SEQ ID NO: 376935 - RNA, 32 nt, Human
ccggggauggcggcagagggggaccagcucag

SEQ ID NO: 376936 - RNA, 32 nt, Human
ccggggcaaaauggguuuccaggucuuggcaa

SEQ ID NO: 376937 - RNA, 28 nt, Human
ccggggcaacagagcaagacucugccuc

SEQ ID NO: 376938 - RNA, 21 nt, Human
ccggggcaacauagugaaacc

SEQ ID NO: 376939 - RNA, 32 nt, Human
ccggggcacuccugggcagcuuuugcucagug

SEQ ID NO: 376940 - RNA, 32 nt, Human
ccggggcagcagcagcccugccccacaccucc

SEQ ID NO: 376941 - RNA, 32 nt, Human
ccggggcagccccuccaccgcaccguccuggg

SEQ ID NO: 376942 - RNA, 32 nt, Human
ccggggcagccuggcuccacggccuguacucg

SEQ ID NO: 376943 - RNA, 32 nt, Human
ccggggcagcuggcaggagagagccuuggccu

SEQ ID NO: 376944 - RNA, 32 nt, Human
ccggggcagcuggugacccaccccuccaggca

SEQ ID NO: 376945 - RNA, 18 nt, Human
ccggggcaggaggcgcag

SEQ ID NO: 376946 - RNA, 32 nt, Human
ccggggcaggucuccuuccaggccaggggccc

SEQ ID NO: 376947 - RNA, 22 nt, Human
ccggggccaagcagcgcguugg

SEQ ID NO: 376948 - RNA, 32 nt, Human
ccggggccacaggacgucuguccuccagucac

SEQ ID NO: 376949 - RNA, 23 nt, Human
ccggggccaccaaacgggccccu

SEQ ID NO: 376950 - RNA, 24 nt, Human
ccggggccaccgaccccacccccu

SEQ ID NO: 376951 - RNA, 20 nt, Human
ccggggccaccgcgcccgcu

SEQ ID NO: 376952 - RNA, 32 nt, Human
ccggggccacggugaccaggaggcagaagccu

SEQ ID NO: 376953 - RNA, 24 nt, Human
ccggggccacuaccgucaccgcuu

SEQ ID NO: 376954 - RNA, 31 nt, Human
ccggggccacuuuucugaggccgaaggaccc

SEQ ID NO: 376955 - RNA, 32 nt, Human
ccggggccagccgcgccaucaugguaauggug

SEQ ID NO: 376956 - RNA, 32 nt, Human
ccggggccaggcgcgcucugcccagcccagcc

SEQ ID NO: 376957 - RNA, 32 nt, Human
ccggggccauuucaacaccacccaccugcugg

SEQ ID NO: 376958 - RNA, 21 nt, Human
ccggggcccagagcucugugg

SEQ ID NO: 376959 - RNA, 32 nt, Human
ccggggcccaggggaggcggcacuccaaccua

SEQ ID NO: 376960 - RNA, 32 nt, Human
ccggggccccaggcuugacuccaccucggggc

SEQ ID NO: 376961 - RNA, 21 nt, Human
ccggggcccccaggcccccca

SEQ ID NO: 376962 - RNA, 22 nt, Human
ccggggccccccagccucgccu

SEQ ID NO: 376963 - RNA, 18 nt, Human
ccggggcccccugggcca

SEQ ID NO: 376964 - RNA, 20 nt, Human
ccggggccccuccacugccu

SEQ ID NO: 376965 - RNA, 18 nt, Human
ccggggcccuccacugcc

SEQ ID NO: 376966 - RNA, 17 nt, Human
ccggggcccuccugcuc

SEQ ID NO: 376967 - RNA, 32 nt, Human
ccggggcccugccugaggccaucgccgcguug

SEQ ID NO: 376968 - RNA, 32 nt, Human
ccggggcccuggaaggagcugccugccugaag

SEQ ID NO: 376969 - RNA, 23 nt, Human
ccggggccgccgccgcggagccu

SEQ ID NO: 376970 - RNA, 24 nt, Human
ccggggccgccgccuccgcccgcc

SEQ ID NO: 376971 - RNA, 22 nt, Human
ccggggccgccgcgggccgucu

SEQ ID NO: 376972 - RNA, 20 nt, Human
ccggggccgccggcuccgcc

SEQ ID NO: 376973 - RNA, 22 nt, Human
ccggggccgcgcaugcgccgcc

SEQ ID NO: 376974 - RNA, 21 nt, Human
ccggggccgcggccaccuccu

SEQ ID NO: 376975 - RNA, 22 nt, Human
ccggggccgcuccaucgcgccu

SEQ ID NO: 376976 - RNA, 17 nt, Human
ccggggccgcuccggcc

SEQ ID NO: 376977 - RNA, 21 nt, Human
ccggggccgcuuggagucgcc

SEQ ID NO: 376978 - RNA, 32 nt, Human
ccggggccggaggaaaaagcucgccacccuga

SEQ ID NO: 376979 - RNA, 32 nt, Human
ccggggccggcaggggguuggggaagaagagg

SEQ ID NO: 376980 - RNA, 20 nt, Human
ccggggccguuacggccgcc

SEQ ID NO: 376981 - RNA, 32 nt, Human
ccggggccucgagccgggaggaagggggcuuc

SEQ ID NO: 376982 - RNA, 17 nt, Human
ccggggccuggacugca

SEQ ID NO: 376983 - RNA, 32 nt, Human
ccggggccugguguugucaguccuccugaaca

SEQ ID NO: 376984 - RNA, 32 nt, Human
ccggggccuuuagagcccgcgaagggcugucu

SEQ ID NO: 376985 - RNA, 23 nt, Human
ccggggcgaacagcagagcuggg

SEQ ID NO: 376986 - RNA, 19 nt, Human
ccggggcgcaccgcugccg

SEQ ID NO: 376987 - RNA, 32 nt, Human
ccggggcgcccacuccgcagcagccagcgagc

SEQ ID NO: 376988 - RNA, 19 nt, Human
ccggggcgccggcucagca

SEQ ID NO: 376989 - RNA, 32 nt, Human
ccggggcgggaggaggaagugaggccgcgcgg

SEQ ID NO: 376990 - RNA, 20 nt, Human
ccggggcggggaaagcggag

SEQ ID NO: 376991 - RNA, 21 nt, Human
ccggggcggggcggggcgcgg

SEQ ID NO: 376992 - RNA, 32 nt, Human
ccggggcggggugggagguaacgggacgggcg

SEQ ID NO: 376993 - RNA, 32 nt, Human
ccggggcgucuggccccaugcccggccgggcg

SEQ ID NO: 376994 - RNA, 32 nt, Human
ccggggcgucuucuccuacgcaggaagggcca

SEQ ID NO: 376995 - RNA, 32 nt, Human
ccggggcuagaggcggccgccgggagggcgcg

SEQ ID NO: 376996 - RNA, 20 nt, Human
ccggggcucagcccugaguu

SEQ ID NO: 376997 - RNA, 32 nt, Human
ccggggcucagcccugaguuggcaucaccugc

SEQ ID NO: 376998 - RNA, 32 nt, Human
ccggggcucccccugccugccucucucuccuc

SEQ ID NO: 376999 - RNA, 32 nt, Human
ccggggcuccggggaaggcgguugcagcuccu

SEQ ID NO: 377000 - RNA, 22 nt, Human
ccggggcuccuccacagcaccu

SEQ ID NO: 377001 - RNA, 32 nt, Human
ccggggcuccugucucugccuccugggccuuc

SEQ ID NO: 377002 - RNA, 18 nt, Human
ccggggcucgccccgagc

SEQ ID NO: 377003 - RNA, 32 nt, Human
ccggggcucgggcacccucuggccccacacug

SEQ ID NO: 377004 - RNA, 32 nt, Human
ccggggcucucaucuuccacucggaucucaga

SEQ ID NO: 377005 - RNA, 32 nt, Human
ccggggcucugccucucgcugaacgcuccugc

SEQ ID NO: 377006 - RNA, 32 nt, Human
ccgggggaaagagaguuaccggaguuuuagca

SEQ ID NO: 377007 - RNA, 32 nt, Human
ccgggggacagccagguuugaacucaccccac

SEQ ID NO: 377008 - RNA, 32 nt, Human
ccgggggacugugcuggucugagccccacgaa

SEQ ID NO: 377009 - RNA, 32 nt, Human
ccgggggagagggaccaggaggggcccgcggc

SEQ ID NO: 377010 - RNA, 32 nt, Human
ccgggggagaggggcaaaugccuccgggacug

SEQ ID NO: 377011 - RNA, 32 nt, Human
ccgggggaggaggaggaggagaagguggagag

SEQ ID NO: 377012 - RNA, 32 nt, Human
ccgggggaggccugaggccgcuggcuugugcg

SEQ ID NO: 377013 - RNA, 32 nt, Human
ccgggggaggcgcgccugcagcgcggccggcg

SEQ ID NO: 377014 - RNA, 32 nt, Human
ccgggggaggcuggcgcuagcgggcgagccgg

SEQ ID NO: 377015 - RNA, 32 nt, Human
ccgggggagggaggaggagggaggcggcgagg

SEQ ID NO: 377016 - RNA, 32 nt, Human
ccgggggauggacggcaaacagguaaggaguu

SEQ ID NO: 377017 - RNA, 32 nt, Human
ccgggggcaauuguuuaaaggcauuuuguucc

SEQ ID NO: 377018 - RNA, 32 nt, Human
ccgggggcagcacggccuggcuuucccacgcu

SEQ ID NO: 377019 - RNA, 24 nt, Human
ccgggggcaggaggcucugguucc

SEQ ID NO: 377020 - RNA, 32 nt, Human
ccgggggcagggcugccuccagccugcacgcu

SEQ ID NO: 377021 - RNA, 32 nt, Human
ccgggggccacugggugacagugggcaccuuc

SEQ ID NO: 377022 - RNA, 32 nt, Human
ccgggggccauccugauucuagaauuaucuug

SEQ ID NO: 377023 - RNA, 32 nt, Human
ccgggggcgcagcuuggagauccaggggcgca

SEQ ID NO: 377024 - RNA, 32 nt, Human
ccgggggcuaccgcguccaggugugguccagc

SEQ ID NO: 377025 - RNA, 32 nt, Human
ccgggggcucacugcuugcacugugcuuaggg

SEQ ID NO: 377026 - RNA, 23 nt, Human
ccgggggcugagguugcugugag

SEQ ID NO: 377027 - RNA, 32 nt, Human
ccgggggcuggaggagaagacaaggaguucuu

SEQ ID NO: 377028 - RNA, 32 nt, Human
ccgggggcuucauccuuccagggaggagaaga

SEQ ID NO: 377029 - RNA, 24 nt, Human
ccggggggcggagguugcagugag

SEQ ID NO: 377030 - RNA, 18 nt, Human
ccggggggcggggcgcgg

SEQ ID NO: 377031 - RNA, 24 nt, Human
ccgggggguggagccugcagugag

SEQ ID NO: 377032 - RNA, 19 nt, Human
ccggggguagggggcgcag

SEQ ID NO: 377033 - RNA, 32 nt, Human
ccgggggucugccugggcgaaugcagugggac

SEQ ID NO: 377034 - RNA, 32 nt, Human
ccgggggugagaguaaagaggcuuggaccugg

SEQ ID NO: 377035 - RNA, 32 nt, Human
ccgggggugcuuuuucugcagggacgaagugc

SEQ ID NO: 377036 - RNA, 22 nt, Human
ccggggguggggccccccugca

SEQ ID NO: 377037 - RNA, 32 nt, Human
ccgggggugugcaggccagggacuggccaggc

SEQ ID NO: 377038 - RNA, 32 nt, Human
ccgggguacacccugcacaaugcugggagcau

SEQ ID NO: 377039 - RNA, 20 nt, Human
ccgggguagagggaaaagag

SEQ ID NO: 377040 - RNA, 32 nt, Human
ccgggguagucuuuaauuccuggccucaagug

SEQ ID NO: 377041 - RNA, 32 nt, Human
ccgggguaugugacugccucugugcugggcac

SEQ ID NO: 377042 - RNA, 21 nt, Human
ccggggucacuccccgccgcc

SEQ ID NO: 377043 - RNA, 32 nt, Human
ccgggguccucaugcugugugcagccuaggga

SEQ ID NO: 377044 - RNA, 32 nt, Human
ccggggucgccggcuucucuccugccuccggu

SEQ ID NO: 377045 - RNA, 32 nt, Human
ccggggucucagaacugggagugcagacguug

SEQ ID NO: 377046 - RNA, 32 nt, Human
ccggggucugccccaggacuccuggguggacc

SEQ ID NO: 377047 - RNA, 32 nt, Human
ccggggugagccccaaaccuuacugggugugc

SEQ ID NO: 377048 - RNA, 32 nt, Human
ccgggguguguaagcaguggagguucuaagac

SEQ ID NO: 377049 - RNA, 32 nt, Human
ccgggguguuuccucugccuacguggagcuaa

SEQ ID NO: 377050 - RNA, 32 nt, Human
ccgggguucugcggacaaacguggggagaacu

SEQ ID NO: 377051 - RNA, 32 nt, Human
ccggguaacaggcagagauuggaacaguuugg

SEQ ID NO: 377052 - RNA, 32 nt, Human
ccggguaacaguggugaccaaugaggcaauac

SEQ ID NO: 377053 - RNA, 32 nt, Human
ccggguaacagugguuaccaaugaggcaauac

SEQ ID NO: 377054 - RNA, 32 nt, Human
ccggguaacggugguuaccaaugagacauuac

SEQ ID NO: 377055 - RNA, 32 nt, Human
ccggguaauccagcacccugaggcuucacugc

SEQ ID NO: 377056 - RNA, 24 nt, Human
ccggguaccaagggugggauccag

SEQ ID NO: 377057 - RNA, 32 nt, Human
ccggguaccaggacuuccuccaaccuggcaag

SEQ ID NO: 377058 - RNA, 21 nt, Human
ccggguacccccaccucccca

SEQ ID NO: 377059 - RNA, 23 nt, Human
ccggguagcugggacuacaggca

SEQ ID NO: 377060 - RNA, 24 nt, Human
ccggguagcugggacuacaggugu

SEQ ID NO: 377061 - RNA, 32 nt, Human
ccggguauagguaacccacaggcccagugcca

SEQ ID NO: 377062 - RNA, 32 nt, Human
ccggguaucuguggucuuuaagaugugguaag

SEQ ID NO: 377063 - RNA, 32 nt, Human
ccggguauggugacucaugccuguaauccuag

SEQ ID NO: 377064 - RNA, 32 nt, Human
ccggguaugguggcucaugccuguaaucccag

SEQ ID NO: 377065 - RNA, 32 nt, Human
ccggguauggugguacaugccuguaaucccag

SEQ ID NO: 377066 - RNA, 32 nt, Human
ccgggucaaggcccggucgagugcaguaccau

SEQ ID NO: 377067 - RNA, 32 nt, Human
ccgggucaagucagagagauaaggcuugcccc

SEQ ID NO: 377068 - RNA, 32 nt, Human
ccgggucacaacucacugcagccuggaccucc

SEQ ID NO: 377069 - RNA, 32 nt, Human
ccgggucacagaaccaauucauuuaccaggcg

SEQ ID NO: 377070 - RNA, 32 nt, Human
ccggguccaagcaauuccccugccucagucuc

SEQ ID NO: 377071 - RNA, 32 nt, Human
ccgggucccaggaggacuuggcauggcugagg

SEQ ID NO: 377072 - RNA, 32 nt, Human
ccgggucccccggggcugcaguagcagcggcg

SEQ ID NO: 377073 - RNA, 32 nt, Human
ccgggucccggacggcuccgggugacaccagc

SEQ ID NO: 377074 - RNA, 32 nt, Human
ccgggucccuccacccuugucuccugugcggc

SEQ ID NO: 377075 - RNA, 32 nt, Human
ccgggucccugugauuuucccaccucagccuc

SEQ ID NO: 377076 - RNA, 32 nt, Human
ccggguccuccaccaucaggaagaucccaucc

SEQ ID NO: 377077 - RNA, 21 nt, Human
ccggguccucucaggcaccca

SEQ ID NO: 377078 - RNA, 32 nt, Human
ccggguccuggagggccaaagccugcgucugg

SEQ ID NO: 377079 - RNA, 32 nt, Human
ccgggucgcgccgcagucuuccucaaguaugc

SEQ ID NO: 377080 - RNA, 21 nt, Human
ccgggucuacgugcccaugac

SEQ ID NO: 377081 - RNA, 20 nt, Human
ccgggucucaccccugugaa

SEQ ID NO: 377082 - RNA, 32 nt, Human
ccgggucucagggcgccuggcugaagugagca

SEQ ID NO: 377083 - RNA, 32 nt, Human
ccgggucuggcagaacucggguguuuugggcu

SEQ ID NO: 377084 - RNA, 18 nt, Human
ccgggucugggcucugga

SEQ ID NO: 377085 - RNA, 32 nt, Human
ccgggucuggugcugaggauacagcucuucuc

SEQ ID NO: 377086 - RNA, 32 nt, Human
ccgggucugguggcucaugccuguaaucccag

SEQ ID NO: 377087 - RNA, 32 nt, Human
ccgggucuugauucagucacauggcaugguuu

SEQ ID NO: 377088 - RNA, 32 nt, Human
ccgggugacgcccaggagaggugguggccuuc

SEQ ID NO: 377089 - RNA, 32 nt, Human
ccgggugacuguggcagugcaggugaagguac

SEQ ID NO: 377090 - RNA, 32 nt, Human
ccgggugagauggacacgcugcgcaaggccuc

SEQ ID NO: 377091 - RNA, 32 nt, Human
ccgggugagccaagggcacuuugcugccaccg

SEQ ID NO: 377092 - RNA, 32 nt, Human
ccgggugagccugucuggcgccuuccucgccc

SEQ ID NO: 377093 - RNA, 32 nt, Human
ccgggugauuacaggcaccagugcagugauga

SEQ ID NO: 377094 - RNA, 32 nt, Human
ccgggugcaaugacucaugccuguaaucccag

SEQ ID NO: 377095 - RNA, 32 nt, Human
ccgggugcaauggcucaugccuguaaucccaa

SEQ ID NO: 377096 - RNA, 32 nt, Human
ccgggugcaauggcucaugccuguaaucccag

SEQ ID NO: 377097 - RNA, 32 nt, Human
ccgggugcaauggcuuacgccuguaaucccag

SEQ ID NO: 377098 - RNA, 32 nt, Human
ccgggugcacuggcucaagccuguaaucccag

SEQ ID NO: 377099 - RNA, 32 nt, Human
ccgggugcacuggcucacgccucuaaucucag

SEQ ID NO: 377100 - RNA, 31 nt, Human
ccgggugcacuuucugcaugagaccgggcug

SEQ ID NO: 377101 - RNA, 32 nt, Human
ccgggugcaguagcucacgccuguaaucccag

SEQ ID NO: 377102 - RNA, 32 nt, Human
ccgggugcaguggcuaaagccuguaaucccag

SEQ ID NO: 377103 - RNA, 32 nt, Human
ccgggugcaguggcucacaccuguaaucccag

SEQ ID NO: 377104 - RNA, 32 nt, Human
ccgggugcaguggcucacgccuguaaucccag

SEQ ID NO: 377105 - RNA, 32 nt, Human
ccgggugcaguggcucaugccuauauucccug

SEQ ID NO: 377106 - RNA, 32 nt, Human
ccgggugcaguggcucaugccuguaauccaag

SEQ ID NO: 377107 - RNA, 32 nt, Human
ccgggugcaguggcucaugccuguaaucccag

SEQ ID NO: 377108 - RNA, 32 nt, Human
ccgggugcaguggcucaugccuguggucccag

SEQ ID NO: 377109 - RNA, 32 nt, Human
ccgggugccaugaagcaggagggcucggcgcg

SEQ ID NO: 377110 - RNA, 32 nt, Human
ccgggugccgguugagguugcuggugggccug

SEQ ID NO: 377111 - RNA, 32 nt, Human
ccgggugccguggcucaugccuguaaucccag

SEQ ID NO: 377112 - RNA, 32 nt, Human
ccgggugccugggcucaaguucucauuccauu

SEQ ID NO: 377113 - RNA, 32 nt, Human
ccgggugcgggggcucacgccuguaaucccag

SEQ ID NO: 377114 - RNA, 32 nt, Human
ccgggugcgguggcacacaccuguaaucccag

SEQ ID NO: 377115 - RNA, 32 nt, Human
ccgggugcgguggcucaagccuguaaucccag

SEQ ID NO: 377116 - RNA, 32 nt, Human
ccgggugcgguggcucacaccuguaaucccag

SEQ ID NO: 377117 - RNA, 32 nt, Human
ccgggugcgguggcucacgccuguaaucacac

SEQ ID NO: 377118 - RNA, 32 nt, Human
ccgggugcgguggcucacgccuguaaucccaa

SEQ ID NO: 377119 - RNA, 32 nt, Human
ccgggugcgguggcucacgccuguaaucccag

SEQ ID NO: 377120 - RNA, 32 nt, Human
ccgggugcgguggcucacgccuguaauccuag

SEQ ID NO: 377121 - RNA, 32 nt, Human
ccgggugcgguggcucaggccuguaaucccag

SEQ ID NO: 377122 - RNA, 32 nt, Human
ccgggugcgguggcucaugccuauaaucccag

SEQ ID NO: 377123 - RNA, 32 nt, Human
ccgggugcgguggcucaugccuguaaucccag

SEQ ID NO: 377124 - RNA, 32 nt, Human
ccgggugcgguggcucaugccuguauucccag

SEQ ID NO: 377125 - RNA, 32 nt, Human
ccgggugcgguggcucccgccuguaauccuag

SEQ ID NO: 377126 - RNA, 32 nt, Human
ccgggugcggugguucacaccuguaauccaag

SEQ ID NO: 377127 - RNA, 32 nt, Human
ccgggugcugcucugugcucugcgugucccac

SEQ ID NO: 377128 - RNA, 32 nt, Human
ccgggugcuguggcucacgccuguaaucccag

SEQ ID NO: 377129 - RNA, 32 nt, Human
ccggguggacugcuccacuaccgcaaaucagg

SEQ ID NO: 377130 - RNA, 24 nt, Human
ccggguggcagagguugcagugag

SEQ ID NO: 377131 - RNA, 24 nt, Human
ccggguggcugggaucacaggcgu

SEQ ID NO: 377132 - RNA, 22 nt, Human
ccggguggcugggauugcaggc

SEQ ID NO: 377133 - RNA, 32 nt, Human
ccgggugggaccugggcuguuugcucuuggag

SEQ ID NO: 377134 - RNA, 32 nt, Human
ccggguggggcagaagacucgccccuugaacc

SEQ ID NO: 377135 - RNA, 19 nt, Human
ccggguggggcgggcgcgg

SEQ ID NO: 377136 - RNA, 22 nt, Human
ccggguggggggugacgggggg

SEQ ID NO: 377137 - RNA, 32 nt, Human
ccgggugguggccggcaccucugcuccucacg

SEQ ID NO: 377138 - RNA, 32 nt, Human
ccggguguaguggcucacaccuguaaucccag

SEQ ID NO: 377139 - RNA, 32 nt, Human
ccggguguaguggcucacgccuguaaucccag

SEQ ID NO: 377140 - RNA, 32 nt, Human
ccggguguaguggcucaugccuguaauccgag

SEQ ID NO: 377141 - RNA, 32 nt, Human
ccgggugucgauccuuuucccuccagucaggg

SEQ ID NO: 377142 - RNA, 32 nt, Human
ccgggugucguggcacacaccuguaaucccag

SEQ ID NO: 377143 - RNA, 21 nt, Human
ccgggugucugcaaaaugcag

SEQ ID NO: 377144 - RNA, 32 nt, Human
ccgggugucugcaaaaugcagaggucaccaga

SEQ ID NO: 377145 - RNA, 32 nt, Human
ccgggugucuucaugggaggcgacaccggcac

SEQ ID NO: 377146 - RNA, 32 nt, Human
ccgggugugccagguguggugccuggaggcag

SEQ ID NO: 377147 - RNA, 32 nt, Human
ccgggugugccgcgacggcucuccagugaggc

SEQ ID NO: 377148 - RNA, 32 nt, Human
ccgggugugcuggugggcgccuguaaucccag

SEQ ID NO: 377149 - RNA, 32 nt, Human
ccgggugugggcccgugucuguccgucccucc

SEQ ID NO: 377150 - RNA, 32 nt, Human
ccgggugugggggcucacgccuguaaucccag

SEQ ID NO: 377151 - RNA, 32 nt, Human
ccgggugugguggcacacaccuguaaucccag

SEQ ID NO: 377152 - RNA, 32 nt, Human
ccgggugugguggcacaugccuguaaucccag

SEQ ID NO: 377153 - RNA, 32 nt, Human
ccgggugugguggcaugugccagcuacucggg

SEQ ID NO: 377154 - RNA, 32 nt, Human
ccgggugugguggcgcaugccuguaaucccaa

SEQ ID NO: 377155 - RNA, 32 nt, Human
ccgggugugguggcgcaugccuguaaucccag

SEQ ID NO: 377156 - RNA, 32 nt, Human
ccgggugugguggcucacaccuguaaucccag

SEQ ID NO: 377157 - RNA, 32 nt, Human
ccgggugugguggcucacaccuguaaucucgg

SEQ ID NO: 377158 - RNA, 32 nt, Human
ccgggugugguggcucacgccuguaaucccag

SEQ ID NO: 377159 - RNA, 32 nt, Human
ccgggugugguggcucacgccuguaaucccug

SEQ ID NO: 377160 - RNA, 32 nt, Human
ccgggugugguggcucacgccuguaauucuag

SEQ ID NO: 377161 - RNA, 32 nt, Human
ccgggugugguggcucaugccuauaaucccag

SEQ ID NO: 377162 - RNA, 32 nt, Human
ccgggugugguggcucaugccuuaaucccagc

SEQ ID NO: 377163 - RNA, 32 nt, Human
ccgggugugguggugcaugccuguaaucccag

SEQ ID NO: 377164 - RNA, 32 nt, Human
ccggguguggugguucacaccuguaauccaag

SEQ ID NO: 377165 - RNA, 32 nt, Human
ccggguguggugucacgcgccuguaaucccag

SEQ ID NO: 377166 - RNA, 32 nt, Human
ccgggugugguguugggcaccuguaaucccag

SEQ ID NO: 377167 - RNA, 32 nt, Human
ccggguguuguggcgggugccuguaaucucag

SEQ ID NO: 377168 - RNA, 32 nt, Human
ccggguuagccuggugacaggcagacacaugc

SEQ ID NO: 377169 - RNA, 32 nt, Human
ccggguucaaaccauucuccugccucagccuc

SEQ ID NO: 377170 - RNA, 32 nt, Human
ccggguucaaacgauucuccugccucagccuc

SEQ ID NO: 377171 - RNA, 32 nt, Human
ccggguucaaacuauucucccgccucaaccuc

SEQ ID NO: 377172 - RNA, 32 nt, Human
ccggguucaaaugauucucgugccucagccuc

SEQ ID NO: 377173 - RNA, 32 nt, Human
ccggguucaagcaacucuccugccucagccuc

SEQ ID NO: 377174 - RNA, 32 nt, Human
ccggguucaagcaauccucccugccucagccu

SEQ ID NO: 377175 - RNA, 32 nt, Human
ccggguucaagcaaugcucccgccucaaccuc

SEQ ID NO: 377176 - RNA, 32 nt, Human
ccggguucaagcaauuaacugccucagcuucc

SEQ ID NO: 377177 - RNA, 32 nt, Human
ccggguucaagcaauuauuugccucagccucc

SEQ ID NO: 377178 - RNA, 32 nt, Human
ccggguucaagcaauucccugccucagccuca

SEQ ID NO: 377179 - RNA, 32 nt, Human
ccggguucaagcaauucucaugcaucagccuc

SEQ ID NO: 377180 - RNA, 32 nt, Human
ccggguucaagcaauucucaugccucagccuc

SEQ ID NO: 377181 - RNA, 32 nt, Human
ccggguucaagcaauucucccaucucagccuc

SEQ ID NO: 377182 - RNA, 32 nt, Human
ccggguucaagcaauucucccgccucagcccc

SEQ ID NO: 377183 - RNA, 32 nt, Human
ccggguucaagcaauucuccugccuaagccuc

SEQ ID NO: 377184 - RNA, 32 nt, Human
ccggguucaagcaauucuccugccucacccuc

SEQ ID NO: 377185 - RNA, 32 nt, Human
ccggguucaagcaauucuccugccucagccuc

SEQ ID NO: 377186 - RNA, 32 nt, Human
ccggguucaagcaauucuccugccucagcucc

SEQ ID NO: 377187 - RNA, 32 nt, Human
ccggguucaagcaauucuccugccucagcuuc

SEQ ID NO: 377188 - RNA, 32 nt, Human
ccggguucaagcaauucuccugccuuagccuc

SEQ ID NO: 377189 - RNA, 32 nt, Human
ccggguucaagcaauucuccugucucagccuc

SEQ ID NO: 377190 - RNA, 32 nt, Human
ccggguucaagcaauucuccuucuucagccuc

SEQ ID NO: 377191 - RNA, 32 nt, Human
ccggguucaagcaauucucugccucagccucc

SEQ ID NO: 377192 - RNA, 32 nt, Human
ccggguucaagcaauucugucucagccucccg

SEQ ID NO: 377193 - RNA, 32 nt, Human
ccggguucaagcaauucuucugccucagccuc

SEQ ID NO: 377194 - RNA, 32 nt, Human
ccggguucaagcaauuuccugccucagccuca

SEQ ID NO: 377195 - RNA, 32 nt, Human
ccggguucaagcaguucuccugccucaaccuc

SEQ ID NO: 377196 - RNA, 32 nt, Human
ccggguucaagcaguucuccugccucagcccc

SEQ ID NO: 377197 - RNA, 32 nt, Human
ccggguucaagcaguucuccugccucagccuc

SEQ ID NO: 377198 - RNA, 32 nt, Human
ccggguucaagcaguucuccugccucagucuc

SEQ ID NO: 377199 - RNA, 32 nt, Human
ccggguucaagcaguucucugccucagccucc

SEQ ID NO: 377200 - RNA, 32 nt, Human
ccggguucaagcaguucugccucagccuccca

SEQ ID NO: 377201 - RNA, 32 nt, Human
ccggguucaagcaguuuccugcuucagacuuc

SEQ ID NO: 377202 - RNA, 32 nt, Human
ccggguucaagcauuucuccugucucagccuc

SEQ ID NO: 377203 - RNA, 32 nt, Human
ccggguucaagccauucuccugccucagucuc

SEQ ID NO: 377204 - RNA, 32 nt, Human
ccggguucaagcgauccuccugccucagucuc

SEQ ID NO: 377205 - RNA, 32 nt, Human
ccggguucaagcgauucucccaucucagccuc

SEQ ID NO: 377206 - RNA, 32 nt, Human
ccggguucaagcgauucucccgccucagccuc

SEQ ID NO: 377207 - RNA, 32 nt, Human
ccggguucaagcgauucuccuaccucagccuc

SEQ ID NO: 377208 - RNA, 32 nt, Human
ccggguucaagcgauucucgugccucagccuc

SEQ ID NO: 377209 - RNA, 32 nt, Human
ccggguucaagcgauucuugugccucggccuc

SEQ ID NO: 377210 - RNA, 32 nt, Human
ccggguucaagcuauucuccugccucagccuu

SEQ ID NO: 377211 - RNA, 32 nt, Human
ccggguucaaguaauucuccugccucaggcuu

SEQ ID NO: 377212 - RNA, 32 nt, Human
ccggguucaagugauuccccuaccucagccuc

SEQ ID NO: 377213 - RNA, 32 nt, Human
ccggguucaaucaauucuccuaccucaacuuc

SEQ ID NO: 377214 - RNA, 32 nt, Human
ccggguucacaccauucucccaccucaacccc

SEQ ID NO: 377215 - RNA, 32 nt, Human
ccggguucacaccauucuccugccucagccuc

SEQ ID NO: 377216 - RNA, 32 nt, Human
ccggguucacgcccuucuccugccucagccuc

SEQ ID NO: 377217 - RNA, 32 nt, Human
ccggguucacggcauucucccgccucagccuc

SEQ ID NO: 377218 - RNA, 24 nt, Human
ccggguucacuccccgccucccca

SEQ ID NO: 377219 - RNA, 32 nt, Human
ccggguucagaacuucaggccuguacgaugcc

SEQ ID NO: 377220 - RNA, 32 nt, Human
ccggguucaggcaauucuccugccucagcuuc

SEQ ID NO: 377221 - RNA, 32 nt, Human
ccggguucaggcaauucucuugcaucagccuc

SEQ ID NO: 377222 - RNA, 32 nt, Human
ccggguucaucccacaccagccgccuccacca

SEQ ID NO: 377223 - RNA, 32 nt, Human
ccggguucaugccauucuccugccucagccuc

SEQ ID NO: 377224 - RNA, 32 nt, Human
ccggguucaugccauucuccugccucagcguc

SEQ ID NO: 377225 - RNA, 32 nt, Human
ccggguuccccaggggaauacauguccccagc

SEQ ID NO: 377226 - RNA, 32 nt, Human
ccggguucgagcaauucuccugccucagccuc

SEQ ID NO: 377227 - RNA, 32 nt, Human
ccggguucgagcgauucuccugccucagccuc

SEQ ID NO: 377228 - RNA, 32 nt, Human
ccggguucgcaccauucuccugccucagccuc

SEQ ID NO: 377229 - RNA, 32 nt, Human
ccggguucucaccauucuccugccucagccuc

SEQ ID NO: 377230 - RNA, 32 nt, Human
ccggguucugcuugaggccgagccaaagagug

SEQ ID NO: 377231 - RNA, 32 nt, Human
ccggguuguaaucaccaucuggcccgccgcuc

SEQ ID NO: 377232 - RNA, 32 nt, Human
ccggguuguccuguucuuucugggcuugcuca

SEQ ID NO: 377233 - RNA, 32 nt, Human
ccggguugugagggguuguugcaaugaaauaa

SEQ ID NO: 377234 - RNA, 32 nt, Human
ccggguuucagcgauucucgugccucagcuuc

SEQ ID NO: 377235 - RNA, 32 nt, Human
ccggguuucuucuugaagcagcuccugcaaaa

SEQ ID NO: 377236 - RNA, 32 nt, Human
ccggguuugagcagaacgggcccagugcccug

SEQ ID NO: 377237 - RNA, 32 nt, Human
ccggguuuguuguccagcaccaauucuggcug

SEQ ID NO: 377238 - RNA, 22 nt, Human
ccgguaagcccgccuccucccu

SEQ ID NO: 377239 - RNA, 32 nt, Human
ccgguaaggcucccccucacccacgccaacuc

SEQ ID NO: 377240 - RNA, 17 nt, Human
ccgguaagggggugcag

SEQ ID NO: 377241 - RNA, 32 nt, Human
ccgguaaucccagcuacucaggaggcugagac

SEQ ID NO: 377242 - RNA, 32 nt, Human
ccgguaccugggaagggggagagugcaggccu

SEQ ID NO: 377243 - RNA, 32 nt, Human
ccgguagaggcggagguugcagugagccgaga

SEQ ID NO: 377244 - RNA, 19 nt, Human
ccgguagcagcuccgcggc

SEQ ID NO: 377245 - RNA, 32 nt, Human
ccgguagcccaggagauggagcagcccagccc

SEQ ID NO: 377246 - RNA, 32 nt, Human
ccgguagccccagcuacucgggaggcugaggu

SEQ ID NO: 377247 - RNA, 32 nt, Human
ccgguagccugacagcaggagcucgagagaag

SEQ ID NO: 377248 - RNA, 32 nt, Human
ccgguaggaagugggggccaggagagcagcgg

SEQ ID NO: 377249 - RNA, 32 nt, Human
ccgguaggagugagguuucaucgguucccucg

SEQ ID NO: 377250 - RNA, 24 nt, Human
ccgguagguggagguugcagugag

SEQ ID NO: 377251 - RNA, 32 nt, Human
ccgguagucccagcuacucaggaggcugaggc

SEQ ID NO: 377252 - RNA, 32 nt, Human
ccgguaucguuucgcauggaaaagccacuuuc

SEQ ID NO: 377253 - RNA, 32 nt, Human
ccgguauuguuugcaaacuuugcugcucuccg

SEQ ID NO: 377254 - RNA, 32 nt, Human
ccggucaacguggugaaaccccaucucuacua

SEQ ID NO: 377255 - RNA, 32 nt, Human
ccggucaagaagcaggagcaggagccggagcc

SEQ ID NO: 377256 - RNA, 32 nt, Human
ccggucaagccuuuaucccagcacucaguugu

SEQ ID NO: 377257 - RNA, 32 nt, Human
ccggucaccacgaggugagaggcugcacccag

SEQ ID NO: 377258 - RNA, 31 nt, Human
ccggucagaacugugugacucacuugaggca

SEQ ID NO: 377259 - RNA, 32 nt, Human
ccggucagacccaggauggggccagaacggac

SEQ ID NO: 377260 - RNA, 32 nt, Human
ccggucaggcccuagggugaagccgggaggaa

SEQ ID NO: 377261 - RNA, 32 nt, Human
ccggucaggcucucagaugcagcugguugcac

SEQ ID NO: 377262 - RNA, 32 nt, Human
ccggucagucauacggguuggaagaugggucu

SEQ ID NO: 377263 - RNA, 32 nt, Human
ccggucaugagaggggugaggucucuguggaa

SEQ ID NO: 377264 - RNA, 32 nt, Human
ccggucaugguggcucacgccuguaaucacag

SEQ ID NO: 377265 - RNA, 32 nt, Human
ccggucaugguggcucaugccuguaaucccaa

SEQ ID NO: 377266 - RNA, 32 nt, Human
ccggucauggugguggacaccuguaaucccag

SEQ ID NO: 377267 - RNA, 32 nt, Human
ccggucauuugugcccuucucuugucaucucu

SEQ ID NO: 377268 - RNA, 32 nt, Human
ccggucauuugugccuuucucuugucaucucu

SEQ ID NO: 377269 - RNA, 32 nt, Human
ccgguccacugcaaccuccacuucccggguuc

SEQ ID NO: 377270 - RNA, 32 nt, Human
ccgguccagaugcacacaguaucauugccaag

SEQ ID NO: 377271 - RNA, 32 nt, Human
ccgguccagccgcggccggcgccuggcuguga

SEQ ID NO: 377272 - RNA, 32 nt, Human
ccgguccauucaagcugacgcacccgcugguu

SEQ ID NO: 377273 - RNA, 32 nt, Human
ccgguccccagacccaagagcuguggcugccu

SEQ ID NO: 377274 - RNA, 21 nt, Human
ccgguccccccacugcugcug

SEQ ID NO: 377275 - RNA, 21 nt, Human
ccgguccccgcaggcccggga

SEQ ID NO: 377276 - RNA, 32 nt, Human
ccgguccccugccuggaacuggcugugaagac

SEQ ID NO: 377277 - RNA, 32 nt, Human
ccgguccccuguccccgguccccagccagcuc

SEQ ID NO: 377278 - RNA, 32 nt, Human
ccggucccggaggucccacagcaaagacaggc

SEQ ID NO: 377279 - RNA, 26 nt, Human
ccggucccuccagcugggggcccuca

SEQ ID NO: 377280 - RNA, 32 nt, Human
ccggucccuccagcugggggcccucaggugga

SEQ ID NO: 377281 - RNA, 32 nt, Human
ccggucccuccaggcucaguguggcuucuccc

SEQ ID NO: 377282 - RNA, 32 nt, Human
ccggucccuucccccaucauccuuccuuagac

SEQ ID NO: 377283 - RNA, 26 nt, Human
ccgguccucagccuugccugggcuca

SEQ ID NO: 377284 - RNA, 32 nt, Human
ccgguccucauaccccagacugugcugauacg

SEQ ID NO: 377285 - RNA, 32 nt, Human
ccgguccugcuggccccuuuuccucuggcccc

SEQ ID NO: 377286 - RNA, 32 nt, Human
ccgguccuggccugggcugggcccagccugag

SEQ ID NO: 377287 - RNA, 23 nt, Human
ccggucggaggggaggcgggagg

SEQ ID NO: 377288 - RNA, 32 nt, Human
ccggucgggcagcgcugcgggagcagccgccg

SEQ ID NO: 377289 - RNA, 32 nt, Human
ccggucgucucaaauucaucugaucucuuauu

SEQ ID NO: 377290 - RNA, 32 nt, Human
ccggucgugguggcucaugccuguaaucccaa

SEQ ID NO: 377291 - RNA, 32 nt, Human
ccggucuaccugucucacuacaugcauaaagu

SEQ ID NO: 377292 - RNA, 32 nt, Human
ccggucuauaggugcauaccaccacaccaggc

SEQ ID NO: 377293 - RNA, 32 nt, Human
ccggucucacagucacagccacguccucccga

SEQ ID NO: 377294 - RNA, 17 nt, Human
ccggucucugcagcagc

SEQ ID NO: 377295 - RNA, 32 nt, Human
ccggucuggaaaggcaggugaucagcuagaag

SEQ ID NO: 377296 - RNA, 32 nt, Human
ccggucuggggugaggaguguggggagcuugg

SEQ ID NO: 377297 - RNA, 32 nt, Human
ccggucuguucuguuccacucugaccaucggu

SEQ ID NO: 377298 - RNA, 32 nt, Human
ccggucuucucccacgcccuaccucagugccg

SEQ ID NO: 377299 - RNA, 32 nt, Human
ccggucuugaugcaggagagucuggaaaagga

SEQ ID NO: 377300 - RNA, 32 nt, Human
ccggugaaagacagagaucacauuucaacuag

SEQ ID NO: 377301 - RNA, 32 nt, Human
ccggugaagagcugcagaugccgagaagccag

SEQ ID NO: 377302 - RNA, 32 nt, Human
ccggugaaugugccucugguggcugcugagaa

SEQ ID NO: 377303 - RNA, 32 nt, Human
ccggugaauguguccacaguugagagguugga

SEQ ID NO: 377304 - RNA, 32 nt, Human
ccggugacaucgucuccuucugaggucugagg

SEQ ID NO: 377305 - RNA, 21 nt, Human
ccggugacuuacuguacagca

SEQ ID NO: 377306 - RNA, 32 nt, Human
ccggugagaagcagagcgcgagagggagcccu

SEQ ID NO: 377307 - RNA, 32 nt, Human
ccggugagauggaccauccugcccccgugggg

SEQ ID NO: 377308 - RNA, 32 nt, Human
ccggugagcgcagccagcaggagcugagcagc

SEQ ID NO: 377309 - RNA, 32 nt, Human
ccggugaggaagggucuccaggcuucacucag

SEQ ID NO: 377310 - RNA, 32 nt, Human
ccggugaggguaagguuggugggggugcagcg

SEQ ID NO: 377311 - RNA, 17 nt, Human
ccggugcacagcagcuu

SEQ ID NO: 377312 - RNA, 32 nt, Human
ccggugcacaggccucugccugcuggggauua

SEQ ID NO: 377313 - RNA, 32 nt, Human
ccggugcagccuguugccagccagccuuugag

SEQ ID NO: 377314 - RNA, 32 nt, Human
ccggugcagguggggaaaauggcggugucuac

SEQ ID NO: 377315 - RNA, 32 nt, Human
ccggugcaggugugaccagagaccaccucugu

SEQ ID NO: 377316 - RNA, 21 nt, Human
ccggugccaauaaauccuugu

SEQ ID NO: 377317 - RNA, 32 nt, Human
ccggugccaccaggagacccccaaggaggaca

SEQ ID NO: 377318 - RNA, 32 nt, Human
ccggugccaucugaagcccccuucccagguuu

SEQ ID NO: 377319 - RNA, 32 nt, Human
ccggugccuguucuccccugaccgagccugug

SEQ ID NO: 377320 - RNA, 32 nt, Human
ccggugccuucccaggcacuggcguuaccgcu

SEQ ID NO: 377321 - RNA, 32 nt, Human
ccggugcgcaucaccaugcgcggccuggcuuc

SEQ ID NO: 377322 - RNA, 32 nt, Human
ccggugcggcgaggcgggcagagccagaggca

SEQ ID NO: 377323 - RNA, 22 nt, Human
ccggugcuagggcagaggcacc

SEQ ID NO: 377324 - RNA, 32 nt, Human
ccggugcuauccuccccucccaccccucacag

SEQ ID NO: 377325 - RNA, 32 nt, Human
ccggugcugccuggcugguugcucuagcgccc

SEQ ID NO: 377326 - RNA, 32 nt, Human
ccggugcugggcuccccgucugccuugagggg

SEQ ID NO: 377327 - RNA, 32 nt, Human
ccggugcuugaacaaggagcuccgcucuacaa

SEQ ID NO: 377328 - RNA, 32 nt, Human
ccggugcuuuugcccaagcuuugaccacacgu

SEQ ID NO: 377329 - RNA, 32 nt, Human
ccgguggacagggagagccugagacgcccuuc

SEQ ID NO: 377330 - RNA, 32 nt, Human
ccgguggagagggacgcggcggacgccggcag

SEQ ID NO: 377331 - RNA, 32 nt, Human
ccgguggaggcagaggcaguccuggggcucug

SEQ ID NO: 377332 - RNA, 32 nt, Human
ccgguggagggagggagcagggagcccucacu

SEQ ID NO: 377333 - RNA, 32 nt, Human
ccgguggcacagacgccuccagggggcagcac

SEQ ID NO: 377334 - RNA, 18 nt, Human
ccgguggcacccgggcua

SEQ ID NO: 377335 - RNA, 22 nt, Human
ccgguggcagcagcagcaucac

SEQ ID NO: 377336 - RNA, 20 nt, Human
ccgguggccagagccagcca

SEQ ID NO: 377337 - RNA, 32 nt, Human
ccgguggccaguuaagcagagacuucacugac

SEQ ID NO: 377338 - RNA, 32 nt, Human
ccgguggcccagccgcucagggccagggccug

SEQ ID NO: 377339 - RNA, 32 nt, Human
ccgguggccccugggguggaagugggguaggg

SEQ ID NO: 377340 - RNA, 32 nt, Human
ccgguggcccuugcuucuugcuuugcagacug

SEQ ID NO: 377341 - RNA, 32 nt, Human
ccgguggccugggagcugcuuucuccccacug

SEQ ID NO: 377342 - RNA, 32 nt, Human
ccgguggcggccccagcaccucagccugcaca

SEQ ID NO: 377343 - RNA, 32 nt, Human
ccgguggcuagccagacaaaagaccuguccgu

SEQ ID NO: 377344 - RNA, 32 nt, Human
ccggugggaagacauccugagcgaugagguca

SEQ ID NO: 377345 - RNA, 32 nt, Human
ccggugggaagcccagacgaggaggacgggga

SEQ ID NO: 377346 - RNA, 32 nt, Human
ccggugggacagugucuccagguagugaggcc

SEQ ID NO: 377347 - RNA, 32 nt, Human
ccgguggggagggcugggagggggagggaacu

SEQ ID NO: 377348 - RNA, 22 nt, Human
ccgguggggguagggggugcgg

SEQ ID NO: 377349 - RNA, 32 nt, Human
ccgguggggugagauggacagaaagcuucaga

SEQ ID NO: 377350 - RNA, 32 nt, Human
ccgguggucaugccaugagcagccuuauggag

SEQ ID NO: 377351 - RNA, 32 nt, Human
ccgguggugaugacuccuacaucuaaguggcc

SEQ ID NO: 377352 - RNA, 32 nt, Human
ccgguggugaugacuccuacaucuaguggccc

SEQ ID NO: 377353 - RNA, 32 nt, Human
ccggugguggcagaugcuuccuccuggccaaa

SEQ ID NO: 377354 - RNA, 32 nt, Human
ccgguguaugcaguggugaugccuaaaggaau

SEQ ID NO: 377355 - RNA, 32 nt, Human
ccgguguccugaggaauagccucugcccccac

SEQ ID NO: 377356 - RNA, 32 nt, Human
ccggugucuccaagcacuucucgacaggcguu

SEQ ID NO: 377357 - RNA, 32 nt, Human
ccggugugaaguuucacacccaaaaggaugaa

SEQ ID NO: 377358 - RNA, 32 nt, Human
ccggugugagccagcgcugcugccagugugag

SEQ ID NO: 377359 - RNA, 32 nt, Human
ccggugugagcugcaggcugugcuccagaucc

SEQ ID NO: 377360 - RNA, 32 nt, Human
ccggugugcaaccgaaggugaagagcgggaag

SEQ ID NO: 377361 - RNA, 32 nt, Human
ccggugugcagcuggagagcgagcggccaccg

SEQ ID NO: 377362 - RNA, 21 nt, Human
ccggugugcucacugauccgc

SEQ ID NO: 377363 - RNA, 32 nt, Human
ccggugugcuguagcuccagccgggaugagga

SEQ ID NO: 377364 - RNA, 32 nt, Human
ccgguguggcugcucgguggccccacacccac

SEQ ID NO: 377365 - RNA, 32 nt, Human
ccgguguguccccauuucauggcauuggggga

SEQ ID NO: 377366 - RNA, 32 nt, Human
ccgguuaacaucuuuuaauuguuuccaggauu

SEQ ID NO: 377367 - RNA, 32 nt, Human
ccgguuccagccugggcuguccaggaagugac

SEQ ID NO: 377368 - RNA, 22 nt, Human
ccgguucccugggagaaggcug

SEQ ID NO: 377369 - RNA, 21 nt, Human
ccgguuccucucuaggcgcca

SEQ ID NO: 377370 - RNA, 23 nt, Human
ccgguuccucuggaggugccuua

SEQ ID NO: 377371 - RNA, 32 nt, Human
ccgguuccugcuacgccccauggaggcuccga

SEQ ID NO: 377372 - RNA, 22 nt, Human
ccgguuccuuccugcuucacuc

SEQ ID NO: 377373 - RNA, 22 nt, Human
ccgguuccuuccuggaggccuc

SEQ ID NO: 377374 - RNA, 32 nt, Human
ccgguuccuuucucucugcuccugacacugcu

SEQ ID NO: 377375 - RNA, 32 nt, Human
ccgguucuacagccccagcccagaucuacuuc

SEQ ID NO: 377376 - RNA, 32 nt, Human
ccgguucucaaagccucagcaccaucuuuuau

SEQ ID NO: 377377 - RNA, 32 nt, Human
ccgguucucaagauguaacacagcagaaaagu

SEQ ID NO: 377378 - RNA, 32 nt, Human
ccgguucuccaccuccccauccgccccaggcc

SEQ ID NO: 377379 - RNA, 32 nt, Human
ccgguugcucucaaacuccugaccucagguga

SEQ ID NO: 377380 - RNA, 32 nt, Human
ccgguuggaacugggacugagcucgggcacgc

SEQ ID NO: 377381 - RNA, 32 nt, Human
ccgguuggacugcucaggcuuuccgaggucaa

SEQ ID NO: 377382 - RNA, 18 nt, Human
ccgguuggccccgggcca

SEQ ID NO: 377383 - RNA, 32 nt, Human
ccgguuggccccgggccagggcacagguaccg

SEQ ID NO: 377384 - RNA, 32 nt, Human
ccgguuggggguccccaggguggggcagggau

SEQ ID NO: 377385 - RNA, 21 nt, Human
ccgguuguguccugugggagg

SEQ ID NO: 377386 - RNA, 32 nt, Human
ccgguuuauaaauauuuuagacuuugcaggcu

SEQ ID NO: 377387 - RNA, 32 nt, Human
ccgguuucaacacacacagacaaacacagcca

SEQ ID NO: 377388 - RNA, 32 nt, Human
ccgguuucaagcaauucuccugccucagccuc

SEQ ID NO: 377389 - RNA, 32 nt, Human
ccgguuucaagcaguucuccagcaucagccuc

SEQ ID NO: 377390 - RNA, 32 nt, Human
ccgguuucaauugugcccuauuacaaaagaaa

SEQ ID NO: 377391 - RNA, 21 nt, Human
ccgguuucccugcugaccugc

SEQ ID NO: 377392 - RNA, 32 nt, Human
ccgguuucggggagguggguggggugcggagc

SEQ ID NO: 377393 - RNA, 32 nt, Human
ccgguuucuaagagucaguucaguggcagagc

SEQ ID NO: 377394 - RNA, 32 nt, Human
ccgguuucuaaucccugcucugucacuaacaa

SEQ ID NO: 377395 - RNA, 32 nt, Human
ccgguuucuugucccagcagguugggggcgcc

SEQ ID NO: 377396 - RNA, 32 nt, Human
ccgguuugcaguacuugcacacauuuuggaga

SEQ ID NO: 377397 - RNA, 32 nt, Human
ccgguuuugaagccgcuucucugcccgaguua

SEQ ID NO: 377398 - RNA, 32 nt, Human
ccguaaaugcgaguuguuuuuguauuugugug

SEQ ID NO: 377399 - RNA, 32 nt, Human
ccguaaaugucugcacugaggauuucuuuuug

SEQ ID NO: 377400 - RNA, 32 nt, Human
ccguaacaagggcacacauccagcacuguguc

SEQ ID NO: 377401 - RNA, 32 nt, Human
ccguaaccacugcacaucaccuccaucucugc

SEQ ID NO: 377402 - RNA, 32 nt, Human
ccguaacuccuaggacccccaaaucauggaau

SEQ ID NO: 377403 - RNA, 32 nt, Human
ccguaacugcccagcccugccccuugcccccg

SEQ ID NO: 377404 - RNA, 32 nt, Human
ccguaagcccagggauguggcagcugcagugg

SEQ ID NO: 377405 - RNA, 32 nt, Human
ccguaaggccugauggaacacagaacugaacu

SEQ ID NO: 377406 - RNA, 32 nt, Human
ccguaaggcugcagagcaagggcagcaggacc

SEQ ID NO: 377407 - RNA, 32 nt, Human
ccguaagggcuggacccagcuccuuucugggc

SEQ ID NO: 377408 - RNA, 32 nt, Human
ccguaauccaguuuuccuaggaaaacuaagcc

SEQ ID NO: 377409 - RNA, 32 nt, Human
ccguacaaacacaagaucagggcugaggguaa

SEQ ID NO: 377410 - RNA, 32 nt, Human
ccguacacugaaagggcagagcaggccuaagg

SEQ ID NO: 377411 - RNA, 32 nt, Human
ccguacacugguuuguugacuguucuuucaau

SEQ ID NO: 377412 - RNA, 32 nt, Human
ccguacagacacagcauccuuggccaccucau

SEQ ID NO: 377413 - RNA, 31 nt, Human
ccguaccaagugucaccgcagcaagaggggg

SEQ ID NO: 377414 - RNA, 32 nt, Human
ccguaccacuggccgcugcuggucuuccugcu

SEQ ID NO: 377415 - RNA, 32 nt, Human
ccguacccacacugggcaccaucagcuaaaga

SEQ ID NO: 377416 - RNA, 32 nt, Human
ccguacccagccagagaagaaaaagaacagug

SEQ ID NO: 377417 - RNA, 32 nt, Human
ccguacccagccuggucccauaucauagugaa

SEQ ID NO: 377418 - RNA, 32 nt, Human
ccguacccuccaggcuagaggcuuccccugau

SEQ ID NO: 377419 - RNA, 32 nt, Human
ccguacccugcuguagugccucuuaucccuuc

SEQ ID NO: 377420 - RNA, 32 nt, Human
ccguaccucaccuggccugcaggaugaagaac

SEQ ID NO: 377421 - RNA, 32 nt, Human
ccguacgagcaucucacuuucccuuccauggu

SEQ ID NO: 377422 - RNA, 32 nt, Human
ccguacuaugaacaccagaacagaagagauuu

SEQ ID NO: 377423 - RNA, 32 nt, Human
ccguacuggaggcuagcucuugucgcggccgc

SEQ ID NO: 377424 - RNA, 32 nt, Human
ccguacugguacuucuugcagugcaaacaccu

SEQ ID NO: 377425 - RNA, 32 nt, Human
ccguacuuccagauuuauuguuauggcuccca

SEQ ID NO: 377426 - RNA, 32 nt, Human
ccguagaaaugucaaucagagcccggagcccc

SEQ ID NO: 377427 - RNA, 19 nt, Human
ccguagaccauuuacucca

SEQ ID NO: 377428 - RNA, 32 nt, Human
ccguagagcacuucuaagcagagauuauuugu

SEQ ID NO: 377429 - RNA, 32 nt, Human
ccguagagccagaucgucaucaugucugcauu

SEQ ID NO: 377430 - RNA, 32 nt, Human
ccguagaggccuuccuugaagaugcaucuaga

SEQ ID NO: 377431 - RNA, 32 nt, Human
ccguagagucucacugauucugagauggcuuu

SEQ ID NO: 377432 - RNA, 32 nt, Human
ccguagauaccuguugcugacugcaaacgaug

SEQ ID NO: 377433 - RNA, 32 nt, Human
ccguagcaacaguguagugagaacagcaccca

SEQ ID NO: 377434 - RNA, 32 nt, Human
ccguagcacugaggacccccggagaagauggg

SEQ ID NO: 377435 - RNA, 32 nt, Human
ccguagcaggguggugaggaggguggcugugg

SEQ ID NO: 377436 - RNA, 32 nt, Human
ccguagcccaggcuggagugcaguggcacagu

SEQ ID NO: 377437 - RNA, 18 nt, Human
ccguagccgccccggcca

SEQ ID NO: 377438 - RNA, 30 nt, Human
ccguagccuccagacaugcuccugauuucu

SEQ ID NO: 377439 - RNA, 32 nt, Human
ccguagcuagagcggcucagagacaggaggcg

SEQ ID NO: 377440 - RNA, 32 nt, Human
ccguagcuaggacugggguggccaggcccagg

SEQ ID NO: 377441 - RNA, 32 nt, Human
ccguaggacccaagcagagaagcucucgggcu

SEQ ID NO: 377442 - RNA, 32 nt, Human
ccguaggacugaggcagacuccacggugagaa

SEQ ID NO: 377443 - RNA, 32 nt, Human
ccguaggaggggcagagauugugcugauaggu

SEQ ID NO: 377444 - RNA, 32 nt, Human
ccguaggcagccggaggaaugcagcccaagca

SEQ ID NO: 377445 - RNA, 32 nt, Human
ccguaggggcuccugagugucaugaagugcac

SEQ ID NO: 377446 - RNA, 32 nt, Human
ccguaggugccuggccaguuuccuguuugugg

SEQ ID NO: 377447 - RNA, 32 nt, Human
ccguaguccauggcuaguuaggaagaaaggag

SEQ ID NO: 377448 - RNA, 32 nt, Human
ccguagucucccaggcucgagcaauccuccca

SEQ ID NO: 377449 - RNA, 20 nt, Human
ccguauacccucucaccauc

SEQ ID NO: 377450 - RNA, 32 nt, Human
ccguauagaagagaagacucaauggaagacag

SEQ ID NO: 377451 - RNA, 23 nt, Human
ccguauagggguuaaaguaucag

SEQ ID NO: 377452 - RNA, 32 nt, Human
ccguaucagccccuucagcaagccauaagaaa

SEQ ID NO: 377453 - RNA, 32 nt, Human
ccguauccagaaggauagugaucaugucuagu

SEQ ID NO: 377454 - RNA, 32 nt, Human
ccguaucuuccccaauccaaucucaaguguga

SEQ ID NO: 377455 - RNA, 32 nt, Human
ccguaugucaugagccuugugcgucaccucac

SEQ ID NO: 377456 - RNA, 32 nt, Human
ccguaugugcuagguaggaguggagggagaua

SEQ ID NO: 377457 - RNA, 32 nt, Human
ccguauuauuagccuggcuccccagguucugg

SEQ ID NO: 377458 - RNA, 32 nt, Human
ccguauuccgaggaguagagaggcagaagaga

SEQ ID NO: 377459 - RNA, 32 nt, Human
ccguauuucccaagcccuccucuuuuagccaa

SEQ ID NO: 377460 - RNA, 32 nt, Human
ccguauuuccugcaccugucagccugcaccga

SEQ ID NO: 377461 - RNA, 32 nt, Human
ccguauuugcagcuggaacugcagcccacggc

SEQ ID NO: 377462 - RNA, 32 nt, Human
ccgucaaagaauaugaggaaguugcuguauga

SEQ ID NO: 377463 - RNA, 32 nt, Human
ccgucaaccaaaaucaguguuuauagagugaa

SEQ ID NO: 377464 - RNA, 32 nt, Human
ccgucaagacucccagcuuagucauuuucuug

SEQ ID NO: 377465 - RNA, 32 nt, Human
ccgucaaggcgcugucccuguacagcaugagc

SEQ ID NO: 377466 - RNA, 32 nt, Human
ccgucacaaggagcuuuuccacaccugccaug

SEQ ID NO: 377467 - RNA, 21 nt, Human
ccgucacagccucaagucacu

SEQ ID NO: 377468 - RNA, 32 nt, Human
ccgucacaggcagugaggaugagaggggguga

SEQ ID NO: 377469 - RNA, 32 nt, Human
ccgucacauucaaccauguggaggcccagguc

SEQ ID NO: 377470 - RNA, 32 nt, Human
ccgucacccaggcuggagugcaguggcaagau

SEQ ID NO: 377471 - RNA, 32 nt, Human
ccgucacccaggcuggagugcaguggcgccau

SEQ ID NO: 377472 - RNA, 32 nt, Human
ccgucacccugccuccccugcgucccgccacc

SEQ ID NO: 377473 - RNA, 32 nt, Human
ccgucaccuccaccucucuccaugacccggcu

SEQ ID NO: 377474 - RNA, 20 nt, Human
ccgucaccucucccuccuca

SEQ ID NO: 377475 - RNA, 32 nt, Human
ccgucacuacagccucaccucccaccccuguc

SEQ ID NO: 377476 - RNA, 19 nt, Human
ccgucacucagcccugggc

SEQ ID NO: 377477 - RNA, 32 nt, Human
ccgucacuccuaggaaacuuuucgcgcagaaa

SEQ ID NO: 377478 - RNA, 32 nt, Human
ccgucacuuaaauuuguucuuuguuuagccug

SEQ ID NO: 377479 - RNA, 32 nt, Human
ccgucacuuauugauguguccaaaggauugug

SEQ ID NO: 377480 - RNA, 18 nt, Human
ccgucacuucucgagcca

SEQ ID NO: 377481 - RNA, 32 nt, Human
ccgucagccggccuuuuccuucagguucguca

SEQ ID NO: 377482 - RNA, 19 nt, Human
ccgucagccgugccgagcc

SEQ ID NO: 377483 - RNA, 22 nt, Human
ccgucagcgcugcccugaguca

SEQ ID NO: 377484 - RNA, 32 nt, Human
ccgucagcuauguaauguuugccaucacccgc

SEQ ID NO: 377485 - RNA, 31 nt, Human
ccgucagcugucccagagccugugucgcgcc

SEQ ID NO: 377486 - RNA, 32 nt, Human
ccgucaggagagaagccgcgucugugggacga

SEQ ID NO: 377487 - RNA, 32 nt, Human
ccgucaggagauccugaagcuggagaauucgg

SEQ ID NO: 377488 - RNA, 32 nt, Human
ccgucaggcaccgugugaaaguuuggaggagg

SEQ ID NO: 377489 - RNA, 23 nt, Human
ccgucaggcugggcuuugggcca

SEQ ID NO: 377490 - RNA, 32 nt, Human
ccgucagguucacaguuuguuuuucuagaaga

SEQ ID NO: 377491 - RNA, 32 nt, Human
ccgucaguauucacuggaccucaggcccugug

SEQ ID NO: 377492 - RNA, 32 nt, Human
ccgucagugucuuuuucucuccucucucucuu

SEQ ID NO: 377493 - RNA, 32 nt, Human
ccgucaguguguggauguauguuuacaguucu

SEQ ID NO: 377494 - RNA, 32 nt, Human
ccgucauccaagcuggagugcaguggugcaau

SEQ ID NO: 377495 - RNA, 30 nt, Human
ccgucaugccggggauaguggagcugccca

SEQ ID NO: 377496 - RNA, 32 nt, Human
ccgucauggaaaugaugagucagaagauucag

SEQ ID NO: 377497 - RNA, 32 nt, Human
ccgucaugugcuugcucuuacagugccugggc

SEQ ID NO: 377498 - RNA, 32 nt, Human
ccgucauugcagaagaaaguuuacacgacguc

SEQ ID NO: 377499 - RNA, 32 nt, Human
ccgucauugccaccccugacaccaucuaaucc

SEQ ID NO: 377500 - RNA, 32 nt, Human
ccgucauugcugcugcuaccagcgccaaaugu

SEQ ID NO: 377501 - RNA, 32 nt, Human
ccguccaacaggcuggaguacaauggcgagau

SEQ ID NO: 377502 - RNA, 32 nt, Human
ccguccaaggcuuaccuguagaugcuguccuu

SEQ ID NO: 377503 - RNA, 21 nt, Human
ccguccacacucucccgguca

SEQ ID NO: 377504 - RNA, 32 nt, Human
ccguccaccacagcagccccagguggagggcu

SEQ ID NO: 377505 - RNA, 32 nt, Human
ccguccacccugugcugcuucccuucacagca

SEQ ID NO: 377506 - RNA, 31 nt, Human
ccguccagcaaagccagcacagcagagauga

SEQ ID NO: 377507 - RNA, 18 nt, Human
ccguccagccccugacca

SEQ ID NO: 377508 - RNA, 32 nt, Human
ccguccagccucaggacacacagggaacggcu

SEQ ID NO: 377509 - RNA, 32 nt, Human
ccguccaggcuagagugcaguagugcgaucuu

SEQ ID NO: 377510 - RNA, 32 nt, Human
ccguccaggcuggagugcaauggcgugaucuc

SEQ ID NO: 377511 - RNA, 32 nt, Human
ccguccagggagcagguagcugcugggcuccg

SEQ ID NO: 377512 - RNA, 32 nt, Human
ccguccaggggcuccaagaccaacaggagcau

SEQ ID NO: 377513 - RNA, 21 nt, Human
ccguccaguggaagggggcag

SEQ ID NO: 377514 - RNA, 32 nt, Human
ccguccaguggggaguggagggcagaggcccu

SEQ ID NO: 377515 - RNA, 21 nt, Human
ccguccaucgccccucgggcc

SEQ ID NO: 377516 - RNA, 32 nt, Human
ccguccaucuccauaggcuucucagcuuguaa

SEQ ID NO: 377517 - RNA, 32 nt, Human
ccguccaugcgucuguccgccugcugccgguc

SEQ ID NO: 377518 - RNA, 32 nt, Human
ccgucccaaacagagggccacacagauacccc

SEQ ID NO: 377519 - RNA, 32 nt, Human
ccgucccacuccacuccaggcugccggcaccu

SEQ ID NO: 377520 - RNA, 32 nt, Human
ccgucccacugaggaccucaguuugggagugc

SEQ ID NO: 377521 - RNA, 32 nt, Human
ccgucccagcuccaaaggcccugcucuuccuc

SEQ ID NO: 377522 - RNA, 32 nt, Human
ccgucccaggguggugugaggauuacccagug

SEQ ID NO: 377523 - RNA, 32 nt, Human
ccguccccaauccagugggcuggccaggccac

SEQ ID NO: 377524 - RNA, 32 nt, Human
ccguccccauuccuccuccucucugagggacu

SEQ ID NO: 377525 - RNA, 32 nt, Human
ccgucccccaggcuggagugccguggcgugau

SEQ ID NO: 377526 - RNA, 32 nt, Human
ccgucccccugccccguucacaaugcagccug

SEQ ID NO: 377527 - RNA, 32 nt, Human
ccgucccccugccgcauucacaaugcagccug

SEQ ID NO: 377528 - RNA, 32 nt, Human
ccgucccccugccucugccuggcggucccucc

SEQ ID NO: 377529 - RNA, 18 nt, Human
ccguccccgccucgggcc

SEQ ID NO: 377530 - RNA, 32 nt, Human
ccguccccucaagagcccccagaacgagaccc

SEQ ID NO: 377531 - RNA, 32 nt, Human
ccguccccugcagccugggucuggaugggagg

SEQ ID NO: 377532 - RNA, 32 nt, Human
ccguccccugcagggccuuuuccugccacuca

SEQ ID NO: 377533 - RNA, 32 nt, Human
ccguccccugcagggcucaguuugcacugcug

SEQ ID NO: 377534 - RNA, 32 nt, Human
ccguccccuggccaggaugguggagucugccc

SEQ ID NO: 377535 - RNA, 32 nt, Human
ccguccccugucucccugggagugcgcagccu

SEQ ID NO: 377536 - RNA, 32 nt, Human
ccguccccuucccaggccucaaccccuuucuc

SEQ ID NO: 377537 - RNA, 32 nt, Human
ccgucccgaggcaccgccgguaagcagggagc

SEQ ID NO: 377538 - RNA, 21 nt, Human
ccgucccgggaaccacuggca

SEQ ID NO: 377539 - RNA, 32 nt, Human
ccgucccggucaaccaaagccugcugagcccc

SEQ ID NO: 377540 - RNA, 32 nt, Human
ccgucccgucccguccccaucggaaccccaag

SEQ ID NO: 377541 - RNA, 32 nt, Human
ccgucccuacuaaaaauacaaaauuagccagg

SEQ ID NO: 377542 - RNA, 19 nt, Human
ccgucccucaccucgaguu

SEQ ID NO: 377543 - RNA, 24 nt, Human
ccgucccucccagccacccucccu

SEQ ID NO: 377544 - RNA, 20 nt, Human
ccgucccucccgaccucucc

SEQ ID NO: 377545 - RNA, 22 nt, Human
ccgucccuccuccccucucucc

SEQ ID NO: 377546 - RNA, 23 nt, Human
ccgucccuccuccuuugcugccu

SEQ ID NO: 377547 - RNA, 24 nt, Human
ccgucccuccucuuccuccccucc

SEQ ID NO: 377548 - RNA, 21 nt, Human
ccgucccuccuuuugccuucc

SEQ ID NO: 377549 - RNA, 20 nt, Human
ccgucccucgcgccucgggc

SEQ ID NO: 377550 - RNA, 21 nt, Human
ccgucccugcucauccucucc

SEQ ID NO: 377551 - RNA, 20 nt, Human
ccgucccuggccauugggac

SEQ ID NO: 377552 - RNA, 32 nt, Human
ccgucccuggugcugacugcugaggagggagc

SEQ ID NO: 377553 - RNA, 32 nt, Human
ccgucccuguagcugcucuguuuagacagcgg

SEQ ID NO: 377554 - RNA, 18 nt, Human
ccgucccugucccuccuc

SEQ ID NO: 377555 - RNA, 32 nt, Human
ccgucccuuccuggucaggcuguucagcuggg

SEQ ID NO: 377556 - RNA, 32 nt, Human
ccgucccuucgcgcccccuccccguccgcccc

SEQ ID NO: 377557 - RNA, 32 nt, Human
ccguccgagaagccgcggaucucaggugccca

SEQ ID NO: 377558 - RNA, 32 nt, Human
ccguccgagaggcagagcugacaaggaagguu

SEQ ID NO: 377559 - RNA, 20 nt, Human
ccguccgccgcucugaguca

SEQ ID NO: 377560 - RNA, 32 nt, Human
ccguccgccgcucugagucaugugcgaguggg

SEQ ID NO: 377561 - RNA, 20 nt, Human
ccguccgcggcgccgcgcuc

SEQ ID NO: 377562 - RNA, 19 nt, Human
ccguccgcgugcuggguca

SEQ ID NO: 377563 - RNA, 32 nt, Human
ccguccggccgcuaccccuccugcucggccgc

SEQ ID NO: 377564 - RNA, 32 nt, Human
ccguccgggcccguccugccuggccgcaggug

SEQ ID NO: 377565 - RNA, 32 nt, Human
ccguccguccuccacucuccagccucucccca

SEQ ID NO: 377566 - RNA, 21 nt, Human
ccguccgugccggcucgggcc

SEQ ID NO: 377567 - RNA, 23 nt, Human
ccguccgugccgucccugggcca

SEQ ID NO: 377568 - RNA, 19 nt, Human
ccguccgugucccccauga

SEQ ID NO: 377569 - RNA, 18 nt, Human
ccguccuaaccucgggcc

SEQ ID NO: 377570 - RNA, 32 nt, Human
ccguccuccccugguccgguguuuguguuccc

SEQ ID NO: 377571 - RNA, 32 nt, Human
ccguccucccuccuagggucuuguguugcaag

SEQ ID NO: 377572 - RNA, 22 nt, Human
ccguccucccugcucugagaca

SEQ ID NO: 377573 - RNA, 23 nt, Human
ccguccuccguccucccgggcca

SEQ ID NO: 377574 - RNA, 32 nt, Human
ccguccuccugccucuguugccaacacgagau

SEQ ID NO: 377575 - RNA, 32 nt, Human
ccguccucgcccggccaggccaugaagguaga

SEQ ID NO: 377576 - RNA, 32 nt, Human
ccguccucuccuccucuucaugcauguuucug

SEQ ID NO: 377577 - RNA, 32 nt, Human
ccguccucucucucccccuccuccucccccgc

SEQ ID NO: 377578 - RNA, 32 nt, Human
ccguccugcccagagcaagaugugucaccagc

SEQ ID NO: 377579 - RNA, 32 nt, Human
ccguccugcuucucuguuuccacacguacaca

SEQ ID NO: 377580 - RNA, 32 nt, Human
ccguccuggcuaacacggugaaaccucgucuc

SEQ ID NO: 377581 - RNA, 32 nt, Human
ccguccugggccggugcccagguccgagucgc

SEQ ID NO: 377582 - RNA, 32 nt, Human
ccguccuggggaugcucagggugcaggcagag

SEQ ID NO: 377583 - RNA, 32 nt, Human
ccguccuucaacaaggaaauucuauuaaagga

SEQ ID NO: 377584 - RNA, 22 nt, Human
ccguccuuccgcagcccaaccg

SEQ ID NO: 377585 - RNA, 32 nt, Human
ccguccuugccucccuuacccacccucaccgg

SEQ ID NO: 377586 - RNA, 32 nt, Human
ccguccuuggcuuucuggguccugggcugccc

SEQ ID NO: 377587 - RNA, 32 nt, Human
ccguccuuuguugguuuccugagacugauaau

SEQ ID NO: 377588 - RNA, 21 nt, Human
ccgucgacggcacccugggcc

SEQ ID NO: 377589 - RNA, 32 nt, Human
ccgucgagagcaucaaaugcuacuguucagca

SEQ ID NO: 377590 - RNA, 21 nt, Human
ccgucgagcccagccccgccg

SEQ ID NO: 377591 - RNA, 20 nt, Human
ccgucgagccccaucgggcc

SEQ ID NO: 377592 - RNA, 32 nt, Human
ccgucgcacaggcuggagugcaguggcaaagu

SEQ ID NO: 377593 - RNA, 32 nt, Human
ccgucgcagcagcagcggcagccccggcagcc

SEQ ID NO: 377594 - RNA, 22 nt, Human
ccgucgcagcagcgccccgagc

SEQ ID NO: 377595 - RNA, 32 nt, Human
ccgucgcagcuuugacaucuugguguacucau

SEQ ID NO: 377596 - RNA, 32 nt, Human
ccgucgcagguugugagaagaagagaaacugc

SEQ ID NO: 377597 - RNA, 19 nt, Human
ccgucgccacuucgggcca

SEQ ID NO: 377598 - RNA, 18 nt, Human
ccgucgccagccccggcc

SEQ ID NO: 377599 - RNA, 32 nt, Human
ccgucgccaucuguuucccuucccucccccau

SEQ ID NO: 377600 - RNA, 32 nt, Human
ccgucgcccaggcuggcaugcaguugcgcgau

SEQ ID NO: 377601 - RNA, 23 nt, Human
ccgucgcccgccauccugagcca

SEQ ID NO: 377602 - RNA, 23 nt, Human
ccgucgcccggauccccugagcu

SEQ ID NO: 377603 - RNA, 32 nt, Human
ccgucgccgcagccuccgccgccgagaagccc

SEQ ID NO: 377604 - RNA, 32 nt, Human
ccgucgccgccaucugucaccuccacuccggc

SEQ ID NO: 377605 - RNA, 18 nt, Human
ccgucgccgccgccgccg

SEQ ID NO: 377606 - RNA, 32 nt, Human
ccgucgccgccgcggagcagaucaauaggcga

SEQ ID NO: 377607 - RNA, 23 nt, Human
ccgucgccuccuccgcccgggcc

SEQ ID NO: 377608 - RNA, 20 nt, Human
ccgucgcgagcgaccgggcc

SEQ ID NO: 377609 - RNA, 16 nt, Human
ccgucgcucacgggcu

SEQ ID NO: 377610 - RNA, 20 nt, Human
ccgucgcucgccugggugcc

SEQ ID NO: 377611 - RNA, 17 nt, Human
ccgucgcucgcgcagcc

SEQ ID NO: 377612 - RNA, 19 nt, Human
ccgucgcugccgccgccac

SEQ ID NO: 377613 - RNA, 20 nt, Human
ccgucgcugccugcuggguc

SEQ ID NO: 377614 - RNA, 20 nt, Human
ccgucgcugcgcugcagcca

SEQ ID NO: 377615 - RNA, 18 nt, Human
ccgucgcuguccagggcc

SEQ ID NO: 377616 - RNA, 18 nt, Human
ccgucgcuugccucccgc

SEQ ID NO: 377617 - RNA, 24 nt, Human
ccgucggcagcugggggaaggguc

SEQ ID NO: 377618 - RNA, 21 nt, Human
ccgucggccgggucccagcga

SEQ ID NO: 377619 - RNA, 32 nt, Human
ccgucgggaguucugcauggcaguucacugca

SEQ ID NO: 377620 - RNA, 17 nt, Human
ccgucgggcgccgggcc

SEQ ID NO: 377621 - RNA, 32 nt, Human
ccgucggugcugcugcuccugcagcugccuuu

SEQ ID NO: 377622 - RNA, 20 nt, Human
ccgucgguugcucucgggcc

SEQ ID NO: 377623 - RNA, 32 nt, Human
ccgucguagggaggcuugcggagcaggagcgc

SEQ ID NO: 377624 - RNA, 32 nt, Human
ccgucguaucccucgguccggcggcggcggcg

SEQ ID NO: 377625 - RNA, 32 nt, Human
ccgucgucacacuauguuaccccacauacaga

SEQ ID NO: 377626 - RNA, 32 nt, Human
ccgucgucuccucugccgccgugccgcagccg

SEQ ID NO: 377627 - RNA, 18 nt, Human
ccgucgucugcccgggcc

SEQ ID NO: 377628 - RNA, 32 nt, Human
ccgucgugaggggucagagauggcgcugaccc

SEQ ID NO: 377629 - RNA, 32 nt, Human
ccgucgugcuccauccuucccugccggggccu

SEQ ID NO: 377630 - RNA, 19 nt, Human
ccgucguucccucccggcu

SEQ ID NO: 377631 - RNA, 22 nt, Human
ccgucguucugcgaagcggcca

SEQ ID NO: 377632 - RNA, 19 nt, Human
ccgucguuugcccucucca

SEQ ID NO: 377633 - RNA, 32 nt, Human
ccgucguuuucucuccccgcguggcuccuuga

SEQ ID NO: 377634 - RNA, 20 nt, Human
ccgucuaaccacagcuccuu

SEQ ID NO: 377635 - RNA, 32 nt, Human
ccgucuacaacaucuuuaggccauaaacaaca

SEQ ID NO: 377636 - RNA, 32 nt, Human
ccgucuaccgggaaagguggccagcagaugug

SEQ ID NO: 377637 - RNA, 32 nt, Human
ccgucucaaccucccucccguccagcauugag

SEQ ID NO: 377638 - RNA, 32 nt, Human
ccgucucaccuccaaagguaucuucacucccg

SEQ ID NO: 377639 - RNA, 32 nt, Human
ccgucucagcugguaucagccccagccugccu

SEQ ID NO: 377640 - RNA, 32 nt, Human
ccgucucaggagacccugguauuucuagagca

SEQ ID NO: 377641 - RNA, 32 nt, Human
ccgucucaucuucucucaucugaucacuucau

SEQ ID NO: 377642 - RNA, 32 nt, Human
ccgucuccacuaaaaauacaaaauuagccggg

SEQ ID NO: 377643 - RNA, 32 nt, Human
ccgucuccacuaaaaauacaaaauuagcuggg

SEQ ID NO: 377644 - RNA, 32 nt, Human
ccgucuccacuaaaauacaaaauuagcugggu

SEQ ID NO: 377645 - RNA, 32 nt, Human
ccgucuccaucccccacccacccaaggaaugg

SEQ ID NO: 377646 - RNA, 32 nt, Human
ccgucucccagccucagacggcucugcgggcu

SEQ ID NO: 377647 - RNA, 22 nt, Human
ccgucucccgcugcuuugguca

SEQ ID NO: 377648 - RNA, 18 nt, Human
ccgucuccgagcugcucc

SEQ ID NO: 377649 - RNA, 32 nt, Human
ccgucuccgugccagcguucacgcucccuccc

SEQ ID NO: 377650 - RNA, 32 nt, Human
ccgucuccuaaaaggccagcaggucccaggag

SEQ ID NO: 377651 - RNA, 32 nt, Human
ccgucuccucccucagcucucugggaccuccu

SEQ ID NO: 377652 - RNA, 32 nt, Human
ccgucuccuucccaagcucccggcuuuuucua

SEQ ID NO: 377653 - RNA, 18 nt, Human
ccgucucgccuggggcca

SEQ ID NO: 377654 - RNA, 32 nt, Human
ccgucucgcucccagccauuugcugggaugac

SEQ ID NO: 377655 - RNA, 32 nt, Human
ccgucucuacaaaaauaagaaaauuagccagg

SEQ ID NO: 377656 - RNA, 32 nt, Human
ccgucucuacaaaaauacaaaaaucagccagg

SEQ ID NO: 377657 - RNA, 32 nt, Human
ccgucucuacaaaaauacaaaaauuagccagg

SEQ ID NO: 377658 - RNA, 32 nt, Human
ccgucucuacaaaaauagaaaaauuagccgag

SEQ ID NO: 377659 - RNA, 32 nt, Human
ccgucucuacaaaaauauggaaauuagcuggg

SEQ ID NO: 377660 - RNA, 32 nt, Human
ccgucucuacaaaaguacaaaaauuagccagg

SEQ ID NO: 377661 - RNA, 32 nt, Human
ccgucucuaccaauauacaaaaauuagccggg

SEQ ID NO: 377662 - RNA, 32 nt, Human
ccgucucuacuaaaaauacaaaauuaacuggg

SEQ ID NO: 377663 - RNA, 32 nt, Human
ccgucucuacuaaaaauacaaaauuagccaga

SEQ ID NO: 377664 - RNA, 32 nt, Human
ccgucucuacuaaaaauacaaaauuagccagg

SEQ ID NO: 377665 - RNA, 32 nt, Human
ccgucucuacuaaaaauacaaaauuagccgag

SEQ ID NO: 377666 - RNA, 32 nt, Human
ccgucucuacuaaaaauacaaaauuagccgga

SEQ ID NO: 377667 - RNA, 32 nt, Human
ccgucucuacuaaaaauacaaaauuagccggg

SEQ ID NO: 377668 - RNA, 32 nt, Human
ccgucucuacuaaaaauacaaaauuagccggu

SEQ ID NO: 377669 - RNA, 32 nt, Human
ccgucucuacuaaaaauacaaaauuagcuggg

SEQ ID NO: 377670 - RNA, 32 nt, Human
ccgucucuacuaaaaauacaaaauuagucggg

SEQ ID NO: 377671 - RNA, 32 nt, Human
ccgucucuacuaaaaauacaaaauuauccggu

SEQ ID NO: 377672 - RNA, 32 nt, Human
ccgucucuacuaaaauacaaaaauuagccaga

SEQ ID NO: 377673 - RNA, 32 nt, Human
ccgucucuacuaaaauacaaaaauuagcuggg

SEQ ID NO: 377674 - RNA, 32 nt, Human
ccgucucuacuaaaauacaaaaauuaggugug

SEQ ID NO: 377675 - RNA, 32 nt, Human
ccgucucuacuaaaauacaaaaauuuagccgg

SEQ ID NO: 377676 - RNA, 32 nt, Human
ccgucucuacuaaaauacauaaauuagccggg

SEQ ID NO: 377677 - RNA, 32 nt, Human
ccgucucuacuaaaauauaaaaauuagccaga

SEQ ID NO: 377678 - RNA, 32 nt, Human
ccgucucuacuaaauauacaaaauuagccggg

SEQ ID NO: 377679 - RNA, 32 nt, Human
ccgucucuacuaacauacaaaauuagcugggc

SEQ ID NO: 377680 - RNA, 32 nt, Human
ccgucucuacugaaaauacaaaauuagccggg

SEQ ID NO: 377681 - RNA, 32 nt, Human
ccgucucuagcacaauauauuucugaauauug

SEQ ID NO: 377682 - RNA, 32 nt, Human
ccgucucuauuaaaaauacaaaauuagccggg

SEQ ID NO: 377683 - RNA, 32 nt, Human
ccgucucuccaccgggggcuucauccuuccag

SEQ ID NO: 377684 - RNA, 32 nt, Human
ccgucucuccaucaguuccuagaacucaagca

SEQ ID NO: 377685 - RNA, 32 nt, Human
ccgucucuccggagcccuccugccucauugcu

SEQ ID NO: 377686 - RNA, 32 nt, Human
ccgucucuccuccccucucucucuucucuguc

SEQ ID NO: 377687 - RNA, 32 nt, Human
ccgucucucuguggagaagcagcuccaccucu

SEQ ID NO: 377688 - RNA, 31 nt, Human
ccgucucugauucucccuuuaugaagcugca

SEQ ID NO: 377689 - RNA, 19 nt, Human
ccgucucugccccggggcg

SEQ ID NO: 377690 - RNA, 18 nt, Human
ccgucucugcccugggcu

SEQ ID NO: 377691 - RNA, 32 nt, Human
ccgucucugcuaaaaauacaaaauuagcuggg

SEQ ID NO: 377692 - RNA, 32 nt, Human
ccgucucugucccgguucaccuugccgagaga

SEQ ID NO: 377693 - RNA, 32 nt, Human
ccgucugagaagugaggagacccuccgccugg

SEQ ID NO: 377694 - RNA, 32 nt, Human
ccgucugagaagugaggagacccucugccugg

SEQ ID NO: 377695 - RNA, 32 nt, Human
ccgucugcaagccgaggagggggccucaggag

SEQ ID NO: 377696 - RNA, 32 nt, Human
ccgucugcccuccaaggacccgcauggaggca

SEQ ID NO: 377697 - RNA, 32 nt, Human
ccgucugccuaaaucacuuuucucgcagaagc

SEQ ID NO: 377698 - RNA, 24 nt, Human
ccgucugcgggcgcuuccgggcca

SEQ ID NO: 377699 - RNA, 32 nt, Human
ccgucugcugcuggacaguaaguccuggcccc

SEQ ID NO: 377700 - RNA, 32 nt, Human
ccgucuggaaccaccugggccccugagggcac

SEQ ID NO: 377701 - RNA, 30 nt, Human
ccgucuggcaaggccggggcacaauuugca

SEQ ID NO: 377702 - RNA, 32 nt, Human
ccgucuggcacgcagcguggucucagguucua

SEQ ID NO: 377703 - RNA, 32 nt, Human
ccgucuggccuaaaggugauguauuugguguu

SEQ ID NO: 377704 - RNA, 21 nt, Human
ccgucuggcugaccugggcca

SEQ ID NO: 377705 - RNA, 32 nt, Human
ccgucuggggcucaggcuggugugggaugcag

SEQ ID NO: 377706 - RNA, 32 nt, Human
ccgucugggguuuuacggugugcacugggugc

SEQ ID NO: 377707 - RNA, 32 nt, Human
ccgucugggugaugcucaugguaaacucgcuc

SEQ ID NO: 377708 - RNA, 32 nt, Human
ccgucuggucacugaaagaacugcugccucgg

SEQ ID NO: 377709 - RNA, 32 nt, Human
ccgucugguguccugauuccagcaguuuucca

SEQ ID NO: 377710 - RNA, 32 nt, Human
ccgucuguccuuuguccacaaggaauuucccu

SEQ ID NO: 377711 - RNA, 32 nt, Human
ccgucugugauugccauuucuucccaaggcca

SEQ ID NO: 377712 - RNA, 32 nt, Human
ccgucuguggcuuucagccucugggucugagu

SEQ ID NO: 377713 - RNA, 19 nt, Human
ccgucugugucccccauga

SEQ ID NO: 377714 - RNA, 32 nt, Human
ccgucugugugugaccccuccuggggccaggc

SEQ ID NO: 377715 - RNA, 20 nt, Human
ccgucuguuucucugggcca

SEQ ID NO: 377716 - RNA, 32 nt, Human
ccgucuuaguaaaaauacaaaauuggccuggc

SEQ ID NO: 377717 - RNA, 32 nt, Human
ccgucuucauagaagacaagugagugaucccc

SEQ ID NO: 377718 - RNA, 32 nt, Human
ccgucuucauuucuucccaucucuucuugcug

SEQ ID NO: 377719 - RNA, 32 nt, Human
ccgucuucccuuccuuaacucucccccuuugc

SEQ ID NO: 377720 - RNA, 32 nt, Human
ccgucuuccuguuggaggcaugugccccugga

SEQ ID NO: 377721 - RNA, 20 nt, Human
ccgucuucuccuccuuguca

SEQ ID NO: 377722 - RNA, 32 nt, Human
ccgucuucuccuccuugucacccgcggucgcu

SEQ ID NO: 377723 - RNA, 21 nt, Human
ccgucuucuuccccccgagcu

SEQ ID NO: 377724 - RNA, 32 nt, Human
ccgucuugcuugcucgccgccugcugacuucc

SEQ ID NO: 377725 - RNA, 32 nt, Human
ccgucuuggaggagaggcugcagccacagcac

SEQ ID NO: 377726 - RNA, 32 nt, Human
ccgucuuggggccucgccacacaugcccuuug

SEQ ID NO: 377727 - RNA, 32 nt, Human
ccgucuuguacaccccuaacuccugaggcucc

SEQ ID NO: 377728 - RNA, 32 nt, Human
ccgucuuuacuaaaaauacaaaauuagccagg

SEQ ID NO: 377729 - RNA, 32 nt, Human
ccgucuuuacuaaaaauacaaaauuagccgga

SEQ ID NO: 377730 - RNA, 32 nt, Human
ccgucuuugugggggcucucaggcuuggcaca

SEQ ID NO: 377731 - RNA, 19 nt, Human
ccgucuuuucccuuagagg

SEQ ID NO: 377732 - RNA, 32 nt, Human
ccgugaaaggccacugcacuccagccugagug

SEQ ID NO: 377733 - RNA, 32 nt, Human
ccgugaaagggugggccagccgggccacgaga

SEQ ID NO: 377734 - RNA, 23 nt, Human
ccgugaacaccugcuuccucccu

SEQ ID NO: 377735 - RNA, 32 nt, Human
ccgugaaccacugcacccagccaaugggugua

SEQ ID NO: 377736 - RNA, 32 nt, Human
ccgugaacccaagaaagaggcggugaagagcu

SEQ ID NO: 377737 - RNA, 32 nt, Human
ccgugaagaaagccaagaagccguggaggccc

SEQ ID NO: 377738 - RNA, 32 nt, Human
ccgugaagaaccugguggacagcagcgucuac

SEQ ID NO: 377739 - RNA, 32 nt, Human
ccgugaagaaggagaauaagacccugcaggag

SEQ ID NO: 377740 - RNA, 32 nt, Human
ccgugaaggugaccucacaguacugguuaauu

SEQ ID NO: 377741 - RNA, 32 nt, Human
ccgugacacagaccucaggagauccugcccaa

SEQ ID NO: 377742 - RNA, 32 nt, Human
ccgugacagaggaggggagggguggugccugg

SEQ ID NO: 377743 - RNA, 32 nt, Human
ccgugacauaaacuguuauuccauugcuuuca

SEQ ID NO: 377744 - RNA, 32 nt, Human
ccgugaccauguccaagucucugaagaaguug

SEQ ID NO: 377745 - RNA, 32 nt, Human
ccgugacccaggcuggaaugcaauggcucacu

SEQ ID NO: 377746 - RNA, 32 nt, Human
ccgugaccgagagcgagagcgagaacgagauc

SEQ ID NO: 377747 - RNA, 32 nt, Human
ccgugacucaacacuuauuauccaccauguaa

SEQ ID NO: 377748 - RNA, 32 nt, Human
ccgugacuguuucugcccuugugccuaguuaa

SEQ ID NO: 377749 - RNA, 32 nt, Human
ccgugacuuugaacucccuacucuccagaauc

SEQ ID NO: 377750 - RNA, 32 nt, Human
ccgugagaagagucgaucucccaggggcuuca

SEQ ID NO: 377751 - RNA, 32 nt, Human
ccgugagaugggugcaaggauucccuaagcag

SEQ ID NO: 377752 - RNA, 32 nt, Human
ccgugagcccgaggcuggaaguggugucugcc

SEQ ID NO: 377753 - RNA, 32 nt, Human
ccgugagcccugccaacagaucuucaguccac

SEQ ID NO: 377754 - RNA, 32 nt, Human
ccgugagcucaagugauccucuugccuuggcc

SEQ ID NO: 377755 - RNA, 22 nt, Human
ccgugagcucugggcccugcca

SEQ ID NO: 377756 - RNA, 32 nt, Human
ccgugagcugagcccaggcugcguagugacca

SEQ ID NO: 377757 - RNA, 23 nt, Human
ccgugaggcagagguugcaguga

SEQ ID NO: 377758 - RNA, 17 nt, Human
ccgugaggcuggaguga

SEQ ID NO: 377759 - RNA, 32 nt, Human
ccgugaggggaggaggccgaggaggacgcggc

SEQ ID NO: 377760 - RNA, 23 nt, Human
ccgugagguggagguuguaguga

SEQ ID NO: 377761 - RNA, 32 nt, Human
ccgugaguacaucucagccccgggggaugcuc

SEQ ID NO: 377762 - RNA, 32 nt, Human
ccgugaucaaaaccaaccugggcaacaugaug

SEQ ID NO: 377763 - RNA, 32 nt, Human
ccgugaucaagaugagcacggaggcucguguc

SEQ ID NO: 377764 - RNA, 32 nt, Human
ccgugaucaagguagcuuagagagauggucag

SEQ ID NO: 377765 - RNA, 32 nt, Human
ccgugauccagcgacggguuuggggcuccggg

SEQ ID NO: 377766 - RNA, 23 nt, Human
ccgugauccaggguugcagugag

SEQ ID NO: 377767 - RNA, 19 nt, Human
ccgugauccauccaucucc

SEQ ID NO: 377768 - RNA, 32 nt, Human
ccgugaucuccgcucacugccaccuccgccuc

SEQ ID NO: 377769 - RNA, 32 nt, Human
ccgugaugcauucugccuuccugucuacuagg

SEQ ID NO: 377770 - RNA, 21 nt, Human
ccgugaugcucaguguucaaa

SEQ ID NO: 377771 - RNA, 32 nt, Human
ccgugauggcagcaggcggugggaugcuugua

SEQ ID NO: 377772 - RNA, 32 nt, Human
ccgugauguugucuauggcccccagccccagc

SEQ ID NO: 377773 - RNA, 32 nt, Human
ccgugauucccuggugaucucucagcaggcca

SEQ ID NO: 377774 - RNA, 32 nt, Human
ccgugauuucaccaccacuccagccuggguga

SEQ ID NO: 377775 - RNA, 32 nt, Human
ccgugcacauuuccucuuuucucaucuccauu

SEQ ID NO: 377776 - RNA, 32 nt, Human
ccgugcaccacugugugccuggcccugugcug

SEQ ID NO: 377777 - RNA, 32 nt, Human
ccgugcacgguggcucacgccuguaaucccag

SEQ ID NO: 377778 - RNA, 32 nt, Human
ccgugcacucccuaagaaaccccagggcaggg

SEQ ID NO: 377779 - RNA, 32 nt, Human
ccgugcagaaaagaugcugguucuggcuggac

SEQ ID NO: 377780 - RNA, 32 nt, Human
ccgugcagagcagaggacagugagugucugca

SEQ ID NO: 377781 - RNA, 32 nt, Human
ccgugcagaggaaacagaaacucccaacuguc

SEQ ID NO: 377782 - RNA, 32 nt, Human
ccgugcagccacacccugcccugccccgcccc

SEQ ID NO: 377783 - RNA, 17 nt, Human
ccgugcagccucgagcu

SEQ ID NO: 377784 - RNA, 32 nt, Human
ccgugcagcugguuccucucgagcgagugucc

SEQ ID NO: 377785 - RNA, 32 nt, Human
ccgugcaggcucugaagggagcucccagucac

SEQ ID NO: 377786 - RNA, 32 nt, Human
ccgugcaucugaauuucaggggucaugcugau

SEQ ID NO: 377787 - RNA, 32 nt, Human
ccgugcaucugucugucauggagggccaugug

SEQ ID NO: 377788 - RNA, 32 nt, Human
ccgugcaugacagcaugugccuguaauuccag

SEQ ID NO: 377789 - RNA, 32 nt, Human
ccgugcaugguggcaugcgccuguaaucccag

SEQ ID NO: 377790 - RNA, 24 nt, Human
ccgugcaugucucaguuacagcug

SEQ ID NO: 377791 - RNA, 32 nt, Human
ccgugccacugcacuccagccuggcaacagag

SEQ ID NO: 377792 - RNA, 32 nt, Human
ccgugccacugcacuccagccugggcaacaca

SEQ ID NO: 377793 - RNA, 32 nt, Human
ccgugccacuguacuccagccugggcagcaga

SEQ ID NO: 377794 - RNA, 32 nt, Human
ccgugccaggccugccccagacgcgucugcag

SEQ ID NO: 377795 - RNA, 27 nt, Human
ccgugcccaagagaaaggcugaagggg

SEQ ID NO: 377796 - RNA, 28 nt, Human
ccgugcccaagugaguccuuaccgccuc

SEQ ID NO: 377797 - RNA, 20 nt, Human
ccgugcccacugcccucccu

SEQ ID NO: 377798 - RNA, 32 nt, Human
ccgugcccacuucacaucuccccuaccagcag

SEQ ID NO: 377799 - RNA, 32 nt, Human
ccgugcccggaaccgcggcuucucccacgcgg

SEQ ID NO: 377800 - RNA, 32 nt, Human
ccgugcccuccagagcccacagcgggcaggac

SEQ ID NO: 377801 - RNA, 32 nt, Human
ccgugcccuccccgccccacuuucccuucuuc

SEQ ID NO: 377802 - RNA, 32 nt, Human
ccgugccggcgguggaggugugaaggcacgcg

SEQ ID NO: 377803 - RNA, 32 nt, Human
ccgugccuagaccuccccaucuguggaauggg

SEQ ID NO: 377804 - RNA, 32 nt, Human
ccgugccucaaucucuauccugaugucauggg

SEQ ID NO: 377805 - RNA, 32 nt, Human
ccgugccucacuuagaggguucugaacccguu

SEQ ID NO: 377806 - RNA, 32 nt, Human
ccgugccucugcggggagaggcuggagaggaa

SEQ ID NO: 377807 - RNA, 20 nt, Human
ccgugccugagaagagccag

SEQ ID NO: 377808 - RNA, 32 nt, Human
ccgugccugcagcacuacuggugccugaaaca

SEQ ID NO: 377809 - RNA, 19 nt, Human
ccgugccugcccugaggca

SEQ ID NO: 377810 - RNA, 32 nt, Human
ccgugccugccugcccugccuacugagaagac

SEQ ID NO: 377811 - RNA, 32 nt, Human
ccgugccugcgccaucuccaucagagcugcau

SEQ ID NO: 377812 - RNA, 32 nt, Human
ccgugccuguguauacaugccuuuauguaagc

SEQ ID NO: 377813 - RNA, 32 nt, Human
ccgugcgccccugcacccuuccaggcucucgc

SEQ ID NO: 377814 - RNA, 32 nt, Human
ccgugcgcgagccgaagcagggcgaggcauug

SEQ ID NO: 377815 - RNA, 20 nt, Human
ccgugcgcgccccgccgccg

SEQ ID NO: 377816 - RNA, 32 nt, Human
ccgugcgcgguggcucaugccuguaaucccag

SEQ ID NO: 377817 - RNA, 32 nt, Human
ccgugcgcuugcucugagccuugugagcaagg

SEQ ID NO: 377818 - RNA, 32 nt, Human
ccgugcggcgcggggagccagcgagcgcgccu

SEQ ID NO: 377819 - RNA, 32 nt, Human
ccgugcggugggucccagccugaggguggagu

SEQ ID NO: 377820 - RNA, 32 nt, Human
ccgugcuacaucuucacaguuccuccgaauaa

SEQ ID NO: 377821 - RNA, 32 nt, Human
ccgugcuaggcacugaggcggugacaggccca

SEQ ID NO: 377822 - RNA, 22 nt, Human
ccgugcuaucccucaccauuca

SEQ ID NO: 377823 - RNA, 20 nt, Human
ccgugcucccacgugcuucc

SEQ ID NO: 377824 - RNA, 32 nt, Human
ccgugcuccgccgggaagauggggaaagugag

SEQ ID NO: 377825 - RNA, 32 nt, Human
ccgugcucuaccaagauccccacgcggggccc

SEQ ID NO: 377826 - RNA, 20 nt, Human
ccgugcucuagaucauggug

SEQ ID NO: 377827 - RNA, 32 nt, Human
ccgugcucucagggagggugcaccaggccugc

SEQ ID NO: 377828 - RNA, 32 nt, Human
ccgugcugcaugcagaugagauguggcuggaa

SEQ ID NO: 377829 - RNA, 20 nt, Human
ccgugcugcccagaaugccc

SEQ ID NO: 377830 - RNA, 32 nt, Human
ccgugcugcgugucacugaaggcccuuucuuc

SEQ ID NO: 377831 - RNA, 32 nt, Human
ccgugcugcugcucugugccugcugucagagc

SEQ ID NO: 377832 - RNA, 32 nt, Human
ccgugcuggaacccgggccucagccgcagccg

SEQ ID NO: 377833 - RNA, 32 nt, Human
ccgugcuggaaguaggaggagagucaggacuc

SEQ ID NO: 377834 - RNA, 32 nt, Human
ccgugcugggguccuggaagaguuggggcccu

SEQ ID NO: 377835 - RNA, 32 nt, Human
ccgugcuggggucgggacgagguugaaggguc

SEQ ID NO: 377836 - RNA, 32 nt, Human
ccgugcugguggcccagguccugcugcucauu

SEQ ID NO: 377837 - RNA, 32 nt, Human
ccgugcuguguuagccacugcagcugggacca

SEQ ID NO: 377838 - RNA, 32 nt, Human
ccgugcuuguacugcuagaagcacuuuauguu

SEQ ID NO: 377839 - RNA, 32 nt, Human
ccguggaagaacacauggaucucucuggcuuu

SEQ ID NO: 377840 - RNA, 32 nt, Human
ccguggaagaauuucgugccauguggaaacuu

SEQ ID NO: 377841 - RNA, 32 nt, Human
ccguggacaaagugccucaugucccugagccc

SEQ ID NO: 377842 - RNA, 24 nt, Human
ccguggacugccucaggggcgccg

SEQ ID NO: 377843 - RNA, 32 nt, Human
ccguggagaggugaggccggauccucagagcc

SEQ ID NO: 377844 - RNA, 32 nt, Human
ccguggagcgcuaugucugcaagugggcccug

SEQ ID NO: 377845 - RNA, 32 nt, Human
ccguggagcugcugugugacugugucaggccu

SEQ ID NO: 377846 - RNA, 32 nt, Human
ccguggaggagaaccagagucuggaggggagg

SEQ ID NO: 377847 - RNA, 21 nt, Human
ccguggaggagagagaggcaa

SEQ ID NO: 377848 - RNA, 32 nt, Human
ccguggagggcuuagagaggggaagccaucuc

SEQ ID NO: 377849 - RNA, 32 nt, Human
ccguggaucuauagcuguggccaaucagucag

SEQ ID NO: 377850 - RNA, 32 nt, Human
ccguggaugacggaugaggacucugggcugcu

SEQ ID NO: 377851 - RNA, 32 nt, Human
ccguggaugccuguguaccucuugccuuuucu

SEQ ID NO: 377852 - RNA, 23 nt, Human
ccguggaugcuuuccugcagcua

SEQ ID NO: 377853 - RNA, 32 nt, Human
ccguggauuccugacaguauggaaaagcaaac

SEQ ID NO: 377854 - RNA, 32 nt, Human
ccguggcaccacucacccugcaugggggcagc

SEQ ID NO: 377855 - RNA, 32 nt, Human
ccguggcagagcccccaucccuugggggcugu

SEQ ID NO: 377856 - RNA, 21 nt, Human
ccguggcagccgcagcgcaga

SEQ ID NO: 377857 - RNA, 32 nt, Human
ccguggccaagcagagagaguggccuugagga

SEQ ID NO: 377858 - RNA, 32 nt, Human
ccguggccacagcccugcuccagcagcacuug

SEQ ID NO: 377859 - RNA, 32 nt, Human
ccguggccaccugagaccugcuccacgacccu

SEQ ID NO: 377860 - RNA, 21 nt, Human
ccguggccacuggagaccuca

SEQ ID NO: 377861 - RNA, 32 nt, Human
ccguggccagcucuccccagggagccagguuc

SEQ ID NO: 377862 - RNA, 32 nt, Human
ccguggcccacacaugcccuucuccacaggug

SEQ ID NO: 377863 - RNA, 32 nt, Human
ccguggcccagccucugcaacagcucugccuc

SEQ ID NO: 377864 - RNA, 23 nt, Human
ccguggcccccacaccccagggg

SEQ ID NO: 377865 - RNA, 32 nt, Human
ccguggcccuaggcaccugggcugcaggaagu

SEQ ID NO: 377866 - RNA, 32 nt, Human
ccguggccucaaggaagcuuguggcuuuggag

SEQ ID NO: 377867 - RNA, 32 nt, Human
ccguggccuccccucccucuggcuuuagcuuc

SEQ ID NO: 377868 - RNA, 32 nt, Human
ccguggccucucccuguuaggcugccacaggc

SEQ ID NO: 377869 - RNA, 32 nt, Human
ccguggcgcauccucacucccagccugcgggu

SEQ ID NO: 377870 - RNA, 32 nt, Human
ccguggcgcccaggcugugggccgugguggau

SEQ ID NO: 377871 - RNA, 32 nt, Human
ccguggcgcuuucugcaguuugcagguuauca

SEQ ID NO: 377872 - RNA, 32 nt, Human
ccguggcggggaggggguuauggagaacgugg

SEQ ID NO: 377873 - RNA, 32 nt, Human
ccguggcggugcuggcaacacaagcaccagcu

SEQ ID NO: 377874 - RNA, 32 nt, Human
ccguggcgucuccucccaggagccagaucagu

SEQ ID NO: 377875 - RNA, 32 nt, Human
ccguggcuacggucaggcucuggccagggcag

SEQ ID NO: 377876 - RNA, 32 nt, Human
ccguggcucacaccuguaaucugaacacuuug

SEQ ID NO: 377877 - RNA, 32 nt, Human
ccguggcucacaccuguaaucugagcacauug

SEQ ID NO: 377878 - RNA, 32 nt, Human
ccguggcucaugccuguauaaucccagcacuu

SEQ ID NO: 377879 - RNA, 32 nt, Human
ccguggcucggcguuguggugccugagggaca

SEQ ID NO: 377880 - RNA, 32 nt, Human
ccguggcucuaccugcccagcaugacaguaau

SEQ ID NO: 377881 - RNA, 29 nt, Human
ccguggcugcugguguccuacuguggcuu

SEQ ID NO: 377882 - RNA, 32 nt, Human
ccguggcuggaaggggacaggagaagcccuuu

SEQ ID NO: 377883 - RNA, 32 nt, Human
ccguggcugggcaggagccgaggacggcaugu

SEQ ID NO: 377884 - RNA, 32 nt, Human
ccguggcugucucaggcuccaggacagugagg

SEQ ID NO: 377885 - RNA, 32 nt, Human
ccguggcugugaggacccuguggcggaccaga

SEQ ID NO: 377886 - RNA, 32 nt, Human
ccgugggaaagaaaugccuagaaaguguuguc

SEQ ID NO: 377887 - RNA, 32 nt, Human
ccgugggaacuaaaggaagugggaacuuagaa

SEQ ID NO: 377888 - RNA, 32 nt, Human
ccgugggacagcgcgcucagcccagccuagga

SEQ ID NO: 377889 - RNA, 32 nt, Human
ccgugggaugggccucaggccaccaggcaaua

SEQ ID NO: 377890 - RNA, 32 nt, Human
ccgugggccauggggaggacuucacucagcag

SEQ ID NO: 377891 - RNA, 32 nt, Human
ccgugggcccccggaacgaggcaaagaugcug

SEQ ID NO: 377892 - RNA, 32 nt, Human
ccgugggccuggggucgggggagcagcagacc

SEQ ID NO: 377893 - RNA, 32 nt, Human
ccgugggcuccuggggagccacuggggagggg

SEQ ID NO: 377894 - RNA, 32 nt, Human
ccgugggcuggaccaggacuagagaagcuuga

SEQ ID NO: 377895 - RNA, 32 nt, Human
ccgugggcuuaggagagagggaccagcgccca

SEQ ID NO: 377896 - RNA, 32 nt, Human
ccgugggcuucugcucccucgcuugucuucuc

SEQ ID NO: 377897 - RNA, 19 nt, Human
ccguggggaaggggugcag

SEQ ID NO: 377898 - RNA, 32 nt, Human
ccguggggacaggagagaagcugagacucucg

SEQ ID NO: 377899 - RNA, 32 nt, Human
ccguggggagccacccuuaccuggggucaggc

SEQ ID NO: 377900 - RNA, 19 nt, Human
ccguggggaggggacggag

SEQ ID NO: 377901 - RNA, 32 nt, Human
ccguggggagucugguuuuucucuucauccug

SEQ ID NO: 377902 - RNA, 32 nt, Human
ccguggggcagguggagggagcagucuucguu

SEQ ID NO: 377903 - RNA, 32 nt, Human
ccguggggcggccagagcccacggucaccugg

SEQ ID NO: 377904 - RNA, 32 nt, Human
ccguggggcugcccuccuccaugcgccuggga

SEQ ID NO: 377905 - RNA, 32 nt, Human
ccguggggcugugggaaucgcucuuauuuaua

SEQ ID NO: 377906 - RNA, 32 nt, Human
ccgugggggaucagugccugcugugugcugau

SEQ ID NO: 377907 - RNA, 32 nt, Human
ccgugggggccugaagagacagugagugccau

SEQ ID NO: 377908 - RNA, 32 nt, Human
ccgugggggcucaguaccugcccagcuaccuc

SEQ ID NO: 377909 - RNA, 32 nt, Human
ccguggguagggaggacagagaggcggcguuc

SEQ ID NO: 377910 - RNA, 32 nt, Human
ccgugggucaugcagcgaaggggcuggauggu

SEQ ID NO: 377911 - RNA, 32 nt, Human
ccgugggugaaaccggccccagaagggugagg

SEQ ID NO: 377912 - RNA, 32 nt, Human
ccguggguucaagcgauucuccugccucagcc

SEQ ID NO: 377913 - RNA, 32 nt, Human
ccgugguaacuugcaauguggccgccccugcg

SEQ ID NO: 377914 - RNA, 32 nt, Human
ccgugguaauucuccccaccuccccggaugcc

SEQ ID NO: 377915 - RNA, 32 nt, Human
ccguggucacacacacgcacugcccugucagu

SEQ ID NO: 377916 - RNA, 32 nt, Human
ccguggucagguguugggggauggggugugga

SEQ ID NO: 377917 - RNA, 32 nt, Human
ccgugguccaggaguuaagggcuugggucugg

SEQ ID NO: 377918 - RNA, 32 nt, Human
ccgugguccugggccagggccugagaugacag

SEQ ID NO: 377919 - RNA, 32 nt, Human
ccguggucucaaggagucagagcagggcuggc

SEQ ID NO: 377920 - RNA, 32 nt, Human
ccguggucuccuugcacuuucucaguucagag

SEQ ID NO: 377921 - RNA, 32 nt, Human
ccguggucucgugcggaacucuaccucuuccc

SEQ ID NO: 377922 - RNA, 32 nt, Human
ccguggugacccuugccucuggggaaggguua

SEQ ID NO: 377923 - RNA, 32 nt, Human
ccguggugagggcuggaaauccaaacucacca

SEQ ID NO: 377924 - RNA, 32 nt, Human
ccguggugcagagaagaugcuucugaggccgc

SEQ ID NO: 377925 - RNA, 22 nt, Human
ccguggugccccucaccauccu

SEQ ID NO: 377926 - RNA, 32 nt, Human
ccgugguggagguggauacagcagucggagac

SEQ ID NO: 377927 - RNA, 32 nt, Human
ccgugguggagugaagucagucagggaagguu

SEQ ID NO: 377928 - RNA, 32 nt, Human
ccgugguggcaucuacccucccuguuuaaaga

SEQ ID NO: 377929 - RNA, 32 nt, Human
ccguggugggcggaucaccugaggucaggagu

SEQ ID NO: 377930 - RNA, 31 nt, Human
ccgugguuacugaggcccuguugaaaagugc

SEQ ID NO: 377931 - RNA, 32 nt, Human
ccgugguucuuuucacagcccucgacuuugca

SEQ ID NO: 377932 - RNA, 32 nt, Human
ccguguaagggaacagguguggggaagaggug

SEQ ID NO: 377933 - RNA, 32 nt, Human
ccguguacauagugcauuguuucugugggcgg

SEQ ID NO: 377934 - RNA, 18 nt, Human
ccguguacugucgcccca

SEQ ID NO: 377935 - RNA, 23 nt, Human
ccguguagcugggacuacaggcg

SEQ ID NO: 377936 - RNA, 32 nt, Human
ccguguagugccugucaccacuguggauucac

SEQ ID NO: 377937 - RNA, 23 nt, Human
ccgugucaagcugcucugagcca

SEQ ID NO: 377938 - RNA, 32 nt, Human
ccgugucacacgugugcuuuaacacaaaacag

SEQ ID NO: 377939 - RNA, 32 nt, Human
ccgugucacuguuuacaugaccuauuugugug

SEQ ID NO: 377940 - RNA, 32 nt, Human
ccgugucauccaggcuggagugcgguggugga

SEQ ID NO: 377941 - RNA, 32 nt, Human
ccguguccagcgcgaaccacacgucguccacg

SEQ ID NO: 377942 - RNA, 32 nt, Human
ccguguccuaccuccgucuucgccaaggcccc

SEQ ID NO: 377943 - RNA, 32 nt, Human
ccguguccuccaccagccucugcccaccuacc

SEQ ID NO: 377944 - RNA, 32 nt, Human
ccguguccugcuuaggggaaggugauuggagc

SEQ ID NO: 377945 - RNA, 32 nt, Human
ccguguccuugucuccccuccucccccaucug

SEQ ID NO: 377946 - RNA, 20 nt, Human
ccgugucgccgccgccgccg

SEQ ID NO: 377947 - RNA, 32 nt, Human
ccgugucucucgggggcggcucgcggggcagg

SEQ ID NO: 377948 - RNA, 32 nt, Human
ccgugucuggcuucaucuaaguggccuggucc

SEQ ID NO: 377949 - RNA, 32 nt, Human
ccgugucuucacucuccagccugaggugguga

SEQ ID NO: 377950 - RNA, 32 nt, Human
ccgugucuugugaacucccaucaccuucaaga

SEQ ID NO: 377951 - RNA, 32 nt, Human
ccgugugcacacucauacacaugugcacacac

SEQ ID NO: 377952 - RNA, 32 nt, Human
ccgugugcacacugcguauguguacgcgcagc

SEQ ID NO: 377953 - RNA, 32 nt, Human
ccgugugcagccagagaggcagcuugcguuuu

SEQ ID NO: 377954 - RNA, 19 nt, Human
ccgugugcaggacuccgcg

SEQ ID NO: 377955 - RNA, 32 nt, Human
ccgugugccagaugagcuugugaucugggaag

SEQ ID NO: 377956 - RNA, 32 nt, Human
ccguguggacugugccucaggccagggcucac

SEQ ID NO: 377957 - RNA, 32 nt, Human
ccguguggccacugacccaucugcacguccgc

SEQ ID NO: 377958 - RNA, 32 nt, Human
ccgugugggccacugguacuggcaagacugca

SEQ ID NO: 377959 - RNA, 32 nt, Human
ccgugugugcaggugucggcacaggcuagcuc

SEQ ID NO: 377960 - RNA, 32 nt, Human
ccgugugugcaucuccccucuccuaccagggg

SEQ ID NO: 377961 - RNA, 32 nt, Human
ccguguuaccucccuggcccucuggcuggccc

SEQ ID NO: 377962 - RNA, 32 nt, Human
ccguguucaagcaauucuccuaccucagccua

SEQ ID NO: 377963 - RNA, 32 nt, Human
ccguguucaagcaguucuccugccucagccuc

SEQ ID NO: 377964 - RNA, 32 nt, Human
ccguguucacaccauucuccugccucagccuc

SEQ ID NO: 377965 - RNA, 32 nt, Human
ccguguuccaaagcgggauggcugguauccug

SEQ ID NO: 377966 - RNA, 19 nt, Human
ccguguuccccucuugucu

SEQ ID NO: 377967 - RNA, 19 nt, Human
ccguguuccgcuuccugcc

SEQ ID NO: 377968 - RNA, 24 nt, Human
ccguguuccgugucucuggauuca

SEQ ID NO: 377969 - RNA, 32 nt, Human
ccguguuccucuuuucuucuuuccggcugcuc

SEQ ID NO: 377970 - RNA, 32 nt, Human
ccguguucuaaaccugggguccacagacaccc

SEQ ID NO: 377971 - RNA, 20 nt, Human
ccguguucucccugcggcuc

SEQ ID NO: 377972 - RNA, 32 nt, Human
ccguguucuucucagagacuguucuacggauu

SEQ ID NO: 377973 - RNA, 32 nt, Human
ccguguugcucccagccgucugcugcugcugc

SEQ ID NO: 377974 - RNA, 32 nt, Human
ccguguuggccaggcuggucuccaacuccuga

SEQ ID NO: 377975 - RNA, 32 nt, Human
ccguguugggggccagccugagccagcagugg

SEQ ID NO: 377976 - RNA, 32 nt, Human
ccguguugucaguuuccugaggccuccccagc

SEQ ID NO: 377977 - RNA, 32 nt, Human
ccguguuuagccuguggcucugugugccccuu

SEQ ID NO: 377978 - RNA, 32 nt, Human
ccguguuugggcugaagaaaagagcaagggaa

SEQ ID NO: 377979 - RNA, 21 nt, Human
ccguguuuugcuuuguguuca

SEQ ID NO: 377980 - RNA, 32 nt, Human
ccguuaaguguccuuaggaugcagugauuaag

SEQ ID NO: 377981 - RNA, 32 nt, Human
ccguuacaacuucaacaaaaucaaguccuacu

SEQ ID NO: 377982 - RNA, 32 nt, Human
ccguuacaggugcgcccacagcgcggccccgc

SEQ ID NO: 377983 - RNA, 32 nt, Human
ccguuacucuaccccgagacugccuucugccc

SEQ ID NO: 377984 - RNA, 32 nt, Human
ccguuacuuccagcaggccacaccagcuguuu

SEQ ID NO: 377985 - RNA, 32 nt, Human
ccguuagcagagcccuaagcugggccagaauu

SEQ ID NO: 377986 - RNA, 32 nt, Human
ccguuaggugcugaaggcuguggcgcgcggcu

SEQ ID NO: 377987 - RNA, 32 nt, Human
ccguuauucuucacuuucacuugacaucguuc

SEQ ID NO: 377988 - RNA, 32 nt, Human
ccguuauuuuccuccccucuugcucagaugaa

SEQ ID NO: 377989 - RNA, 32 nt, Human
ccguucacagccaaaccacugacauuccucca

SEQ ID NO: 377990 - RNA, 21 nt, Human
ccguucacuauuguagaguaa

SEQ ID NO: 377991 - RNA, 32 nt, Human
ccguucacugcaaucucugccuccuggguuua

SEQ ID NO: 377992 - RNA, 32 nt, Human
ccguucacugcagccuccaccuccccgguuca

SEQ ID NO: 377993 - RNA, 32 nt, Human
ccuccaucugcguugaugcucagaaucgccua

SEQ ID NO: 377994 - RNA, 22 nt, Human
ccuccaucuggggauggagaau

SEQ ID NO: 377995 - RNA, 32 nt, Human
ccuccaucuuacucugcccuauuugaaagucu

SEQ ID NO: 377996 - RNA, 32 nt, Human
ccuccaucuuggcucccagagcucuaggaacu

SEQ ID NO: 377997 - RNA, 22 nt, Human
ccuccaugaaggucuccuggau

SEQ ID NO: 377998 - RNA, 32 nt, Human
ccuccaugacucuacucucccaaagguugcuu

SEQ ID NO: 377999 - RNA, 32 nt, Human
ccuccaugagccuggagaccccaggggaggau

SEQ ID NO: 378000 - RNA, 32 nt, Human
ccuccaugagccuucucuuuagaaaaguggca

SEQ ID NO: 378001 - RNA, 32 nt, Human
ccuccaugcagagauccugaggcuuuuccccc

SEQ ID NO: 378002 - RNA, 32 nt, Human
ccuccaugcaggagggagagaagagugugaug

SEQ ID NO: 378003 - RNA, 32 nt, Human
ccuccaugccagggagggcagccccagggaag

SEQ ID NO: 378004 - RNA, 31 nt, Human
ccuccaugccucucuggucagugugccuuag

SEQ ID NO: 378005 - RNA, 32 nt, Human
ccuccaugccuggcuaauuuuguauuuuuagu

SEQ ID NO: 378006 - RNA, 32 nt, Human
ccuccaugcgcaagacuaaagcagcggaagag

SEQ ID NO: 378007 - RNA, 32 nt, Human
ccuccaugcucugcugucuccuggugaucauu

SEQ ID NO: 378008 - RNA, 32 nt, Human
ccuccaugcugccuccagaauggucuuucuaa

SEQ ID NO: 378009 - RNA, 23 nt, Human
ccuccaugcuugagaacugcaca

SEQ ID NO: 378010 - RNA, 24 nt, Human
ccuccauggccucaguuuccccau

SEQ ID NO: 378011 - RNA, 30 nt, Human
ccuccauggcggccccagccgggaaggcga

SEQ ID NO: 378012 - RNA, 32 nt, Human
ccuccauggugggucacuugaggucaggaguu

SEQ ID NO: 378013 - RNA, 32 nt, Human
ccuccauguccugggccagccugaugaugucc

SEQ ID NO: 378014 - RNA, 32 nt, Human
ccuccaugugguuucggagucgaggaagaccu

SEQ ID NO: 378015 - RNA, 32 nt, Human
ccuccauuccucacgccaucuccauccccauc

SEQ ID NO: 378016 - RNA, 32 nt, Human
ccuccauugucaggcacugcugccuuccugcc

SEQ ID NO: 378017 - RNA, 32 nt, Human
ccuccauuguccauggucaacagggaaggggu

SEQ ID NO: 378018 - RNA, 32 nt, Human
ccuccauuuccccgugccucugaggcugccca

SEQ ID NO: 378019 - RNA, 19 nt, Human
ccuccauuucccuggccug

SEQ ID NO: 378020 - RNA, 22 nt, Human
ccuccauuuccuugaaaacuga

SEQ ID NO: 378021 - RNA, 22 nt, Human
ccuccauuuccuuggaaacuga

SEQ ID NO: 378022 - RNA, 22 nt, Human
ccuccauuuggcagcucacuga

SEQ ID NO: 378023 - RNA, 18 nt, Human
ccuccauuuucagcaaca

SEQ ID NO: 378024 - RNA, 32 nt, Human
ccuccauuuuucccuguaaauucuccaacuga

SEQ ID NO: 378025 - RNA, 32 nt, Human
ccucccaaaaccauuagggcucagaggaaggu

SEQ ID NO: 378026 - RNA, 32 nt, Human
ccucccaaaagcugggauuacaggcgugagcc

SEQ ID NO: 378027 - RNA, 17 nt, Human
ccucccaaacccagcca

SEQ ID NO: 378028 - RNA, 23 nt, Human
ccucccaaacuccauuucuguca

SEQ ID NO: 378029 - RNA, 32 nt, Human
ccucccaaagagcugggauuacaggcaugagc

SEQ ID NO: 378030 - RNA, 32 nt, Human
ccucccaaagagcugggauuacaggugugagc

SEQ ID NO: 378031 - RNA, 21 nt, Human
ccucccaaaggacuggagaca

SEQ ID NO: 378032 - RNA, 32 nt, Human
ccucccaaaguacugggauuacaaacauaagc

SEQ ID NO: 378033 - RNA, 32 nt, Human
ccucccaaaguacugggauuacaggcaugaac

SEQ ID NO: 378034 - RNA, 32 nt, Human
ccucccaaaguacugggauuacaggcaugagc

SEQ ID NO: 378035 - RNA, 32 nt, Human
ccucccaaaguacugggauuacaggccugagc

SEQ ID NO: 378036 - RNA, 32 nt, Human
ccucccaaaguacugggauuacaggcgugaac

SEQ ID NO: 378037 - RNA, 32 nt, Human
ccucccaaaguacugggauuacaggcgugagc

SEQ ID NO: 378038 - RNA, 32 nt, Human
ccucccaaaguacugggauuacaggugagagu

SEQ ID NO: 378039 - RNA, 32 nt, Human
ccucccaaaguacugggauuauaggcaugagc

SEQ ID NO: 378040 - RNA, 32 nt, Human
ccucccaaaguacugggauuauaggcgugagc

SEQ ID NO: 378041 - RNA, 32 nt, Human
ccucccaaaguacugggauuuaggcaugagcc

SEQ ID NO: 378042 - RNA, 32 nt, Human
ccucccaaaguccucggauuacaggcaugagc

SEQ ID NO: 378043 - RNA, 32 nt, Human
ccucccaaaguccuggaauuacaggcaugagu

SEQ ID NO: 378044 - RNA, 32 nt, Human
ccucccaaagugaugggauuacaggcaugagc

SEQ ID NO: 378045 - RNA, 32 nt, Human
ccucccaaagugcagggauuacaggcacaagc

SEQ ID NO: 378046 - RNA, 32 nt, Human
ccucccaaagugcagggauuacaggcaugagc

SEQ ID NO: 378047 - RNA, 32 nt, Human
ccucccaaagugccaggauuacaggcaugagc

SEQ ID NO: 378048 - RNA, 32 nt, Human
ccucccaaagugccgggauuacaggcauaagc

SEQ ID NO: 378049 - RNA, 32 nt, Human
ccucccaaagugccgggauuacaggcaugagc

SEQ ID NO: 378050 - RNA, 32 nt, Human
ccucccaaagugcgggauuacaagcgugaacc

SEQ ID NO: 378051 - RNA, 32 nt, Human
ccucccaaagugcuaagauuacaggcaugggu

SEQ ID NO: 378052 - RNA, 32 nt, Human
ccucccaaagugcuagaauuacaggcauuagc

SEQ ID NO: 378053 - RNA, 32 nt, Human
ccucccaaagugcuagauuacaggcgugggcc

SEQ ID NO: 378054 - RNA, 32 nt, Human
ccucccaaagugcuaggauuacagacaugagc

SEQ ID NO: 378055 - RNA, 32 nt, Human
ccucccaaagugcuaggauuacaggcauaagc

SEQ ID NO: 378056 - RNA, 32 nt, Human
ccucccaaagugcuaggauuacaggcaucagc

SEQ ID NO: 378057 - RNA, 32 nt, Human
ccucccaaagugcuaggauuacaggcaugaac

SEQ ID NO: 378058 - RNA, 32 nt, Human
ccucccaaagugcuaggauuacaggcaugagc

SEQ ID NO: 378059 - RNA, 32 nt, Human
ccucccaaagugcuaggauuacaggcaugggc

SEQ ID NO: 378060 - RNA, 32 nt, Human
ccucccaaagugcuaggauuacagguaugagc

SEQ ID NO: 378061 - RNA, 32 nt, Human
ccucccaaagugcucggauuacagacaugagc

SEQ ID NO: 378062 - RNA, 32 nt, Human
ccucccaaagugcugagauuacagacaugagc

SEQ ID NO: 378063 - RNA, 32 nt, Human
ccucccaaagugcugagauuacaggcauaaac

SEQ ID NO: 378064 - RNA, 32 nt, Human
ccucccaaagugcugagauuacaggcauaagc

SEQ ID NO: 378065 - RNA, 32 nt, Human
ccucccaaagugcugagauuacaggcaugacc

SEQ ID NO: 378066 - RNA, 32 nt, Human
ccucccaaagugcugagauuacaggcaugagc

SEQ ID NO: 378067 - RNA, 32 nt, Human
ccucccaaagugcugcgauuacaggcaugagc

SEQ ID NO: 378068 - RNA, 32 nt, Human
ccucccaaagugcuggaauuacaggcaugagc

SEQ ID NO: 378069 - RNA, 32 nt, Human
ccucccaaagugcuggaauuacaggcgaaccu

SEQ ID NO: 378070 - RNA, 32 nt, Human
ccucccaaagugcuggauuacaggcauaggcc

SEQ ID NO: 378071 - RNA, 32 nt, Human
ccucccaaagugcuggauuacaggcgugagcc

SEQ ID NO: 378072 - RNA, 32 nt, Human
ccucccaaagugcuggauuacaggugugagcc

SEQ ID NO: 378073 - RNA, 32 nt, Human
ccucccaaagugcuggcacuacaggcaugagc

SEQ ID NO: 378074 - RNA, 32 nt, Human
ccucccaaagugcuggcauuacagguaugagc

SEQ ID NO: 378075 - RNA, 32 nt, Human
ccucccaaagugcugggacuacaggcaggagc

SEQ ID NO: 378076 - RNA, 32 nt, Human
ccucccaaagugcugggacuacaggcaugagc

SEQ ID NO: 378077 - RNA, 32 nt, Human
ccucccaaagugcugggaucacaggcaugaac

SEQ ID NO: 378078 - RNA, 32 nt, Human
ccucccaaagugcugggaucacaggcaugagc

SEQ ID NO: 378079 - RNA, 32 nt, Human
ccucccaaagugcugggaugacaggcaugaau

SEQ ID NO: 378080 - RNA, 32 nt, Human
ccucccaaagugcugggauuaacagguaugaa

SEQ ID NO: 378081 - RNA, 32 nt, Human
ccucccaaagugcugggauuacaagcaugagc

SEQ ID NO: 378082 - RNA, 32 nt, Human
ccucccaaagugcugggauuacaaguaugagc

SEQ ID NO: 378083 - RNA, 32 nt, Human
ccucccaaagugcugggauuacagacacgagc

SEQ ID NO: 378084 - RNA, 32 nt, Human
ccucccaaagugcugggauuacagacaugaac

SEQ ID NO: 378085 - RNA, 32 nt, Human
ccucccaaagugcugggauuacagacaugagc

SEQ ID NO: 378086 - RNA, 32 nt, Human
ccucccaaagugcugggauuacagccacugca

SEQ ID NO: 378087 - RNA, 32 nt, Human
ccucccaaagugcugggauuacagcgaagagc

SEQ ID NO: 378088 - RNA, 32 nt, Human
ccucccaaagugcugggauuacaggcaacucu

SEQ ID NO: 378089 - RNA, 32 nt, Human
ccucccaaagugcugggauuacaggcaccgag

SEQ ID NO: 378090 - RNA, 32 nt, Human
ccucccaaagugcugggauuacaggcacgagc

SEQ ID NO: 378091 - RNA, 32 nt, Human
ccucccaaagugcugggauuacaggcaggagc

SEQ ID NO: 378092 - RNA, 32 nt, Human
ccucccaaagugcugggauuacaggcauaagc

SEQ ID NO: 378093 - RNA, 32 nt, Human
ccucccaaagugcugggauuacaggcaucagc

SEQ ID NO: 378094 - RNA, 32 nt, Human
ccucccaaagugcugggauuacaggcaugaac

SEQ ID NO: 378095 - RNA, 32 nt, Human
ccucccaaagugcugggauuacaggcaugaau

SEQ ID NO: 378096 - RNA, 32 nt, Human
ccucccaaagugcugggauuacaggcaugacc

SEQ ID NO: 378097 - RNA, 32 nt, Human
ccucccaaagugcugggauuacaggcaugagc

SEQ ID NO: 378098 - RNA, 32 nt, Human
ccucccaaagugcugggauuacaggcaugagu

SEQ ID NO: 378099 - RNA, 32 nt, Human
ccucccaaagugcugggauuacaggcauggag

SEQ ID NO: 378100 - RNA, 32 nt, Human
ccucccaaagugcugggauuacaggccacuac

SEQ ID NO: 378101 - RNA, 32 nt, Human
ccucccaaagugcugggauuacaggccccuug

SEQ ID NO: 378102 - RNA, 32 nt, Human
ccucccaaagugcugggauuacaggccugagc

SEQ ID NO: 378103 - RNA, 32 nt, Human
ccucccaaagugcugggauuacaggccuggcc

SEQ ID NO: 378104 - RNA, 32 nt, Human
ccucccaaagugcugggauuacaggcgcaagc

SEQ ID NO: 378105 - RNA, 32 nt, Human
ccucccaaagugcugggauuacaggcgccacc

SEQ ID NO: 378106 - RNA, 32 nt, Human
ccucccaaagugcugggauuacaggcgcgagc

SEQ ID NO: 378107 - RNA, 32 nt, Human
ccucccaaagugcugggauuacaggcggccag

SEQ ID NO: 378108 - RNA, 32 nt, Human
ccucccaaagugcugggauuacaggcgggagc

SEQ ID NO: 378109 - RNA, 32 nt, Human
ccucccaaagugcugggauuacaggcguaagc

SEQ ID NO: 378110 - RNA, 32 nt, Human
ccucccaaagugcugggauuacaggcgucagc

SEQ ID NO: 378111 - RNA, 32 nt, Human
ccucccaaagugcugggauuacaggcgugaaa

SEQ ID NO: 378112 - RNA, 32 nt, Human
ccucccaaagugcugggauuacaggcgugaac

SEQ ID NO: 378113 - RNA, 32 nt, Human
ccucccaaagugcugggauuacaggcgugacg

SEQ ID NO: 378114 - RNA, 32 nt, Human
ccucccaaagugcugggauuacaggcgugaga

SEQ ID NO: 378115 - RNA, 32 nt, Human
ccucccaaagugcugggauuacaggcgugagc

SEQ ID NO: 378116 - RNA, 32 nt, Human
ccucccaaagugcugggauuacaggcgugagg

SEQ ID NO: 378117 - RNA, 32 nt, Human
ccucccaaagugcugggauuacaggcgugagu

SEQ ID NO: 378118 - RNA, 32 nt, Human
ccucccaaagugcugggauuacaggcgugauc

SEQ ID NO: 378119 - RNA, 32 nt, Human
ccucccaaagugcugggauuacaggcgugaug

SEQ ID NO: 378120 - RNA, 32 nt, Human
ccucccaaagugcugggauuacaggcgugggc

SEQ ID NO: 378121 - RNA, 32 nt, Human
ccucccaaagugcugggauuacaggcgugugc

SEQ ID NO: 378122 - RNA, 32 nt, Human
ccucccaaagugcugggauuacaggcguuagc

SEQ ID NO: 378123 - RNA, 32 nt, Human
ccucccaaagugcugggauuacaggcucaugc

SEQ ID NO: 378124 - RNA, 32 nt, Human
ccucccaaagugcugggauuacaggcuguaaa

SEQ ID NO: 378125 - RNA, 32 nt, Human
ccucccaaagugcugggauuacaggcuuaagc

SEQ ID NO: 378126 - RNA, 32 nt, Human
ccucccaaagugcugggauuacaggcuucagc

SEQ ID NO: 378127 - RNA, 32 nt, Human
ccucccaaagugcugggauuacaggcuugaaa

SEQ ID NO: 378128 - RNA, 32 nt, Human
ccucccaaagugcugggauuacaggcuugagc

SEQ ID NO: 378129 - RNA, 32 nt, Human
ccucccaaagugcugggauuacaggcuugggc

SEQ ID NO: 378130 - RNA, 32 nt, Human
ccucccaaagugcugggauuacagggcacuga

SEQ ID NO: 378131 - RNA, 32 nt, Human
ccucccaaagugcugggauuacagguacgagu

SEQ ID NO: 378132 - RNA, 32 nt, Human
ccucccaaagugcugggauuacagguaucagc

SEQ ID NO: 378133 - RNA, 32 nt, Human
ccucccaaagugcugggauuacagguaugagc

SEQ ID NO: 378134 - RNA, 32 nt, Human
ccucccaaagugcugggauuacaggugcgagc

SEQ ID NO: 378135 - RNA, 32 nt, Human
ccucccaaagugcugggauuacaggugggagc

SEQ ID NO: 378136 - RNA, 32 nt, Human
ccucccaaagugcugggauuacagguguaagc

SEQ ID NO: 378137 - RNA, 32 nt, Human
ccucccaaagugcugggauuacagguguaagu

SEQ ID NO: 378138 - RNA, 32 nt, Human
ccucccaaagugcugggauuacaggugucagc

SEQ ID NO: 378139 - RNA, 32 nt, Human
ccucccaaagugcugggauuacaggugugaac

SEQ ID NO: 378140 - RNA, 32 nt, Human
ccucccaaagugcugggauuacaggugugacc

SEQ ID NO: 378141 - RNA, 32 nt, Human
ccucccaaagugcugggauuacaggugugagc

SEQ ID NO: 378142 - RNA, 32 nt, Human
ccucccaaagugcugggauuacaggugugagg

SEQ ID NO: 378143 - RNA, 32 nt, Human
ccucccaaagugcugggauuacaggugugagu

SEQ ID NO: 378144 - RNA, 32 nt, Human
ccucccaaagugcugggauuacaggugugcgc

SEQ ID NO: 378145 - RNA, 32 nt, Human
ccucccaaagugcugggauuacaggugugcgu

SEQ ID NO: 378146 - RNA, 32 nt, Human
ccucccaaagugcugggauuacagguguggga

SEQ ID NO: 378147 - RNA, 32 nt, Human
ccucccaaagugcugggauuacagguguuccu

SEQ ID NO: 378148 - RNA, 32 nt, Human
ccucccaaagugcugggauuacagguuugagc

SEQ ID NO: 378149 - RNA, 32 nt, Human
ccucccaaagugcugggauuacagucaugagc

SEQ ID NO: 378150 - RNA, 32 nt, Human
ccucccaaagugcugggauuacagucaugagu

SEQ ID NO: 378151 - RNA, 32 nt, Human
ccucccaaagugcugggauuacaguugcgagc

SEQ ID NO: 378152 - RNA, 32 nt, Human
ccucccaaagugcugggauuaccagcauaagc

SEQ ID NO: 378153 - RNA, 32 nt, Human
ccucccaaagugcugggauuaccggcaugagc

SEQ ID NO: 378154 - RNA, 32 nt, Human
ccucccaaagugcugggauuaccgguaugaac

SEQ ID NO: 378155 - RNA, 32 nt, Human
ccucccaaagugcugggauuacgggcaugagc

SEQ ID NO: 378156 - RNA, 32 nt, Human
ccucccaaagugcugggauuacuggcaugagc

SEQ ID NO: 378157 - RNA, 32 nt, Human
ccucccaaagugcugggauuacugguaugaac

SEQ ID NO: 378158 - RNA, 32 nt, Human
ccucccaaagugcugggauuagaggcaugagc

SEQ ID NO: 378159 - RNA, 32 nt, Human
ccucccaaagugcugggauuauacguaugggc

SEQ ID NO: 378160 - RNA, 32 nt, Human
ccucccaaagugcugggauuauaggcacaaga

SEQ ID NO: 378161 - RNA, 32 nt, Human
ccucccaaagugcugggauuauaggcaugaac

SEQ ID NO: 378162 - RNA, 32 nt, Human
ccucccaaagugcugggauuauaggcaugagc

SEQ ID NO: 378163 - RNA, 32 nt, Human
ccucccaaagugcugggauuauaggcaugcgc

SEQ ID NO: 378164 - RNA, 32 nt, Human
ccucccaaagugcugggauuauaggccugagc

SEQ ID NO: 378165 - RNA, 32 nt, Human
ccucccaaagugcugggauuauaggcguaagc

SEQ ID NO: 378166 - RNA, 32 nt, Human
ccucccaaagugcugggauuauaggcgugaga

SEQ ID NO: 378167 - RNA, 32 nt, Human
ccucccaaagugcugggauuauaggcgugagc

SEQ ID NO: 378168 - RNA, 32 nt, Human
ccucccaaagugcugggauuauaggcgugagu

SEQ ID NO: 378169 - RNA, 32 nt, Human
ccucccaaagugcugggauuauaggcgugugc

SEQ ID NO: 378170 - RNA, 32 nt, Human
ccucccaaagugcugggauuauaggcugggug

SEQ ID NO: 378171 - RNA, 32 nt, Human
ccucccaaagugcugggauugcaggcaugagc

SEQ ID NO: 378172 - RNA, 32 nt, Human
ccucccaaagugcugggauugcaggcauggcc

SEQ ID NO: 378173 - RNA, 32 nt, Human
ccucccaaagugcugggauugcaggcgugagc

SEQ ID NO: 378174 - RNA, 32 nt, Human
ccucccaaagugcugggguuacaggcaugagc

SEQ ID NO: 378175 - RNA, 32 nt, Human
ccucccaaagugcugggguuacaggcgugagc

SEQ ID NO: 378176 - RNA, 32 nt, Human
ccucccaaagugcugggguuacaggcgugugu

SEQ ID NO: 378177 - RNA, 32 nt, Human
ccucccaaagugcuguaauuacaggcaugagc

SEQ ID NO: 378178 - RNA, 32 nt, Human
ccucccaaagugcuuggauuacaggcauaagc

SEQ ID NO: 378179 - RNA, 32 nt, Human
ccucccaaagugcuuggauuacaggcaugagc

SEQ ID NO: 378180 - RNA, 32 nt, Human
ccucccaaagugguaggauuacaggcgugagc

SEQ ID NO: 378181 - RNA, 32 nt, Human
ccucccaaaguggugggaucacaggcgugagc

SEQ ID NO: 378182 - RNA, 32 nt, Human
ccucccaaaguggugggauuauaggcaugagc

SEQ ID NO: 378183 - RNA, 32 nt, Human
ccucccaaaguguuaggauuacaggcaugagc

SEQ ID NO: 378184 - RNA, 32 nt, Human
ccucccaaaguguugagauuacaggcaugagc

SEQ ID NO: 378185 - RNA, 32 nt, Human
ccucccaaaguguuggauuacaggugugagcc

SEQ ID NO: 378186 - RNA, 32 nt, Human
ccucccaaaguguugggauuacagacauuagc

SEQ ID NO: 378187 - RNA, 32 nt, Human
ccucccaaaguguugggauuacaggcaagagc

SEQ ID NO: 378188 - RNA, 32 nt, Human
ccucccaaaguguugggauuacaggcauaagc

SEQ ID NO: 378189 - RNA, 32 nt, Human
ccucccaaaguguugggauuacaggcaugaau

SEQ ID NO: 378190 - RNA, 32 nt, Human
ccucccaaaguguugggauuacaggcaugaga

SEQ ID NO: 378191 - RNA, 32 nt, Human
ccucccaaaguguugggauuacaggcaugagc

SEQ ID NO: 378192 - RNA, 32 nt, Human
ccucccaaaguguugggauuacaggcgugagc

SEQ ID NO: 378193 - RNA, 32 nt, Human
ccucccaaaguguugggauuacaggcgugagu

SEQ ID NO: 378194 - RNA, 32 nt, Human
ccucccaaaguguugggauuacaugcaugagc

SEQ ID NO: 378195 - RNA, 32 nt, Human
ccucccaaaguguugggauuauaggcaugagc

SEQ ID NO: 378196 - RNA, 32 nt, Human
ccucccaaaguguugggauuauagguaugagc

SEQ ID NO: 378197 - RNA, 32 nt, Human
ccucccaaaguucugggauuacaggcaugagc

SEQ ID NO: 378198 - RNA, 32 nt, Human
ccucccaaaguucugggauuacagguaugagc

SEQ ID NO: 378199 - RNA, 32 nt, Human
ccucccaaauagcugggacuacaggcacaggc

SEQ ID NO: 378200 - RNA, 32 nt, Human
ccucccaaauagcugggauuacaggcacccac

SEQ ID NO: 378201 - RNA, 32 nt, Human
ccucccaaauaguugggauuacaggcacaugc

SEQ ID NO: 378202 - RNA, 32 nt, Human
ccucccaaaugcugggauuacagacaugaacc

SEQ ID NO: 378203 - RNA, 32 nt, Human
ccucccaacaaacuccagaacagcagaaagcg

SEQ ID NO: 378204 - RNA, 22 nt, Human
ccucccaaccugaacugcuccu

SEQ ID NO: 378205 - RNA, 32 nt, Human
ccucccaacgugcuggaauuacaggcaugagc

SEQ ID NO: 378206 - RNA, 32 nt, Human
ccucccaacgugcugggauuacagccgguggu

SEQ ID NO: 378207 - RNA, 32 nt, Human
ccucccaacuggugacugguuagugaugaggc

SEQ ID NO: 378208 - RNA, 32 nt, Human
ccucccaagaagcugggauuacaggcaugcgc

SEQ ID NO: 378209 - RNA, 32 nt, Human
ccucccaagcagcugggaagauaggcacgugc

SEQ ID NO: 378210 - RNA, 32 nt, Human
ccucccaagcagcugggacuacagacaucuga

SEQ ID NO: 378211 - RNA, 32 nt, Human
ccucccaagcagcugggauuacaggcgcacgc

SEQ ID NO: 378212 - RNA, 32 nt, Human
ccucccaagcagcugggauuauagacacccgc

SEQ ID NO: 378213 - RNA, 32 nt, Human
ccucccaagccaugcagaacugugagucaauu

SEQ ID NO: 378214 - RNA, 21 nt, Human
ccucccaagcugugcugggaa

SEQ ID NO: 378215 - RNA, 32 nt, Human
ccucccaagggcccuuaaagcgaccugucauu

SEQ ID NO: 378216 - RNA, 32 nt, Human
ccucccaaggugcuaggauuacaggcaugagc

SEQ ID NO: 378217 - RNA, 32 nt, Human
ccucccaaggugcuggauuacaggcaugagcc

SEQ ID NO: 378218 - RNA, 32 nt, Human
ccucccaaggugcuggauuacagguguaagcc

SEQ ID NO: 378219 - RNA, 32 nt, Human
ccucccaaggugcugggauuacaggcacgagc

SEQ ID NO: 378220 - RNA, 32 nt, Human
ccucccaaggugcugggauuacaggcauaagc

SEQ ID NO: 378221 - RNA, 32 nt, Human
ccucccaaggugcugggauuacaggcaugagc

SEQ ID NO: 378222 - RNA, 32 nt, Human
ccucccaaggugcugggauuacaggcaugagg

SEQ ID NO: 378223 - RNA, 32 nt, Human
ccucccaaguaacugggauuacaggcaugcgc

SEQ ID NO: 378224 - RNA, 32 nt, Human
ccucccaaguaacugggauuacaggcaugugc

SEQ ID NO: 378225 - RNA, 32 nt, Human
ccucccaaguaacugggauuacaggcaugugu

SEQ ID NO: 378226 - RNA, 32 nt, Human
ccucccaaguaccugggacuacaggcacgcac

SEQ ID NO: 378227 - RNA, 32 nt, Human
ccucccaaguaccugggauuacaggcauguuu

SEQ ID NO: 378228 - RNA, 32 nt, Human
ccucccaaguagccaggauuacaggcacccuc

SEQ ID NO: 378229 - RNA, 32 nt, Human
ccucccaaguagcuaggacuacaggcacucac

SEQ ID NO: 378230 - RNA, 32 nt, Human
ccucccaaguagcuaggauuacagacacccgc

SEQ ID NO: 378231 - RNA, 32 nt, Human
ccucccaaguagcuaggauuacaggcaugugc

SEQ ID NO: 378232 - RNA, 32 nt, Human
ccucccaaguagcuccgauuacaggcacccac

SEQ ID NO: 378233 - RNA, 32 nt, Human
ccucccaaguagcugagacuacaagcacccac

SEQ ID NO: 378234 - RNA, 32 nt, Human
ccucccaaguagcugagacuacaggcacacac

SEQ ID NO: 378235 - RNA, 32 nt, Human
ccucccaaguagcugagacuacaggcacaugc

SEQ ID NO: 378236 - RNA, 32 nt, Human
ccucccaaguagcugagacugcaggcacgagc

SEQ ID NO: 378237 - RNA, 32 nt, Human
ccucccaaguagcugagauuacagaugcaagg

SEQ ID NO: 378238 - RNA, 32 nt, Human
ccucccaaguagcugagauuacaggcacaugc

SEQ ID NO: 378239 - RNA, 32 nt, Human
ccucccaaguagcugagauuacaggcgcacac

SEQ ID NO: 378240 - RNA, 32 nt, Human
ccucccaaguagcuggaacuauaggcacaagc

SEQ ID NO: 378241 - RNA, 32 nt, Human
ccucccaaguagcuggaauuacaggcacauac

SEQ ID NO: 378242 - RNA, 32 nt, Human
ccucccaaguagcuggaauuacaggcaccugc

SEQ ID NO: 378243 - RNA, 32 nt, Human
ccucccaaguagcuggaauuacaggcgugugc

SEQ ID NO: 378244 - RNA, 32 nt, Human
ccucccaaguagcuggauuacaggugcaugcc

SEQ ID NO: 378245 - RNA, 32 nt, Human
ccucccaaguagcuggcacuacagacacgcgc

SEQ ID NO: 378246 - RNA, 32 nt, Human
ccucccaaguagcugggaauacaggcacgcca

SEQ ID NO: 378247 - RNA, 32 nt, Human
ccucccaaguagcugggaccacacgcaugcgc

SEQ ID NO: 378248 - RNA, 32 nt, Human
ccucccaaguagcugggaccacaggcagaugc

SEQ ID NO: 378249 - RNA, 32 nt, Human
ccucccaaguagcugggaccacaggcaugcac

SEQ ID NO: 378250 - RNA, 32 nt, Human
ccucccaaguagcugggaccgcaggcacacau

SEQ ID NO: 378251 - RNA, 32 nt, Human
ccucccaaguagcugggacuacaagugcacgc

SEQ ID NO: 378252 - RNA, 32 nt, Human
ccucccaaguagcugggacuacagaugcacgc

SEQ ID NO: 378253 - RNA, 32 nt, Human
ccucccaaguagcugggacuacaggcacacac

SEQ ID NO: 378254 - RNA, 32 nt, Human
ccucccaaguagcugggacuacaggcacacgc

SEQ ID NO: 378255 - RNA, 32 nt, Human
ccucccaaguagcugggacuacaggcacccac

SEQ ID NO: 378256 - RNA, 32 nt, Human
ccucccaaguagcugggacuacaggcacccgc

SEQ ID NO: 378257 - RNA, 32 nt, Human
ccucccaaguagcugggacuacaggcaccugc

SEQ ID NO: 378258 - RNA, 32 nt, Human
ccucccaaguagcugggacuacaggcacgugc

SEQ ID NO: 378259 - RNA, 32 nt, Human
ccucccaaguagcugggacuacaggcauaugc

SEQ ID NO: 378260 - RNA, 32 nt, Human
ccucccaaguagcugggacuacaggcaugaac

SEQ ID NO: 378261 - RNA, 32 nt, Human
ccucccaaguagcugggacuacaggcaugagc

SEQ ID NO: 378262 - RNA, 32 nt, Human
ccucccaaguagcugggacuacaggcaugcac

SEQ ID NO: 378263 - RNA, 32 nt, Human
ccucccaaguagcugggacuacaggcaugcgc

SEQ ID NO: 378264 - RNA, 32 nt, Human
ccucccaaguagcugggacuacaggcauguaa

SEQ ID NO: 378265 - RNA, 32 nt, Human
ccucccaaguagcugggacuacaggcauguac

SEQ ID NO: 378266 - RNA, 32 nt, Human
ccucccaaguagcugggacuacaggcgcccac

SEQ ID NO: 378267 - RNA, 32 nt, Human
ccucccaaguagcugggacuacaggcgcccgc

SEQ ID NO: 378268 - RNA, 32 nt, Human
ccucccaaguagcugggacuacaggcgccuac

SEQ ID NO: 378269 - RNA, 32 nt, Human
ccucccaaguagcugggacuacaggcgccugc

SEQ ID NO: 378270 - RNA, 32 nt, Human
ccucccaaguagcugggacuacaggcgccugu

SEQ ID NO: 378271 - RNA, 32 nt, Human
ccucccaaguagcugggacuacaggcuuucag

SEQ ID NO: 378272 - RNA, 32 nt, Human
ccucccaaguagcugggacuacagucaugugc

SEQ ID NO: 378273 - RNA, 32 nt, Human
ccucccaaguagcugggacuacaguugugcac

SEQ ID NO: 378274 - RNA, 32 nt, Human
ccucccaaguagcugggacuacaugcacauga

SEQ ID NO: 378275 - RNA, 32 nt, Human
ccucccaaguagcugggacuacccgugcauga

SEQ ID NO: 378276 - RNA, 32 nt, Human
ccucccaaguagcugggacuacgggcacacac

SEQ ID NO: 378277 - RNA, 32 nt, Human
ccucccaaguagcugggacuacgggcacaugc

SEQ ID NO: 378278 - RNA, 32 nt, Human
ccucccaaguagcugggacuacuggcacccac

SEQ ID NO: 378279 - RNA, 32 nt, Human
ccucccaaguagcugggacuauaggcacacau

SEQ ID NO: 378280 - RNA, 32 nt, Human
ccucccaaguagcugggacuauaggcaccuac

SEQ ID NO: 378281 - RNA, 32 nt, Human
ccucccaaguagcugggacuauagucacuugc

SEQ ID NO: 378282 - RNA, 32 nt, Human
ccucccaaguagcugggacugcaggcaugagc

SEQ ID NO: 378283 - RNA, 32 nt, Human
ccucccaaguagcugggagccugggcaugcau

SEQ ID NO: 378284 - RNA, 32 nt, Human
ccucccaaguagcugggauaacaggcgcccac

SEQ ID NO: 378285 - RNA, 32 nt, Human
ccucccaaguagcugggaugacaggcgcacac

SEQ ID NO: 378286 - RNA, 32 nt, Human
ccucccaaguagcugggauuaaaggcacgugc

SEQ ID NO: 378287 - RNA, 32 nt, Human
ccucccaaguagcugggauuaaggcgccugcc

SEQ ID NO: 378288 - RNA, 32 nt, Human
ccucccaaguagcugggauuacagaugccugc

SEQ ID NO: 378289 - RNA, 32 nt, Human
ccucccaaguagcugggauuacagcgauuggu

SEQ ID NO: 378290 - RNA, 32 nt, Human
ccucccaaguagcugggauuacaggcacaaac

SEQ ID NO: 378291 - RNA, 32 nt, Human
ccucccaaguagcugggauuacaggcacaggc

SEQ ID NO: 378292 - RNA, 32 nt, Human
ccucccaaguagcugggauuacaggcacaugc

SEQ ID NO: 378293 - RNA, 32 nt, Human
ccucccaaguagcugggauuacaggcacccac

SEQ ID NO: 378294 - RNA, 32 nt, Human
ccucccaaguagcugggauuacaggcacccgc

SEQ ID NO: 378295 - RNA, 32 nt, Human
ccucccaaguagcugggauuacaggcaccuac

SEQ ID NO: 378296 - RNA, 32 nt, Human
ccucccaaguagcugggauuacaggcaccugc

SEQ ID NO: 378297 - RNA, 32 nt, Human
ccucccaaguagcugggauuacaggcacgcgc

SEQ ID NO: 378298 - RNA, 32 nt, Human
ccucccaaguagcugggauuacaggcacgcuc

SEQ ID NO: 378299 - RNA, 32 nt, Human
ccucccaaguagcugggauuacaggcagacac

SEQ ID NO: 378300 - RNA, 32 nt, Human
ccucccaaguagcugggauuacaggcagcacc

SEQ ID NO: 378301 - RNA, 32 nt, Human
ccucccaaguagcugggauuacaggcauacac

SEQ ID NO: 378302 - RNA, 32 nt, Human
ccucccaaguagcugggauuacaggcaugcac

SEQ ID NO: 378303 - RNA, 32 nt, Human
ccucccaaguagcugggauuacaggcaugcgc

SEQ ID NO: 378304 - RNA, 32 nt, Human
ccucccaaguagcugggauuacaggcaugggc

SEQ ID NO: 378305 - RNA, 32 nt, Human
ccucccaaguagcugggauuacaggcauguac

SEQ ID NO: 378306 - RNA, 32 nt, Human
ccucccaaguagcugggauuacaggcaugugc

SEQ ID NO: 378307 - RNA, 32 nt, Human
ccucccaaguagcugggauuacaggcgcacgc

SEQ ID NO: 378308 - RNA, 32 nt, Human
ccucccaaguagcugggauuacaggcgcauug

SEQ ID NO: 378309 - RNA, 32 nt, Human
ccucccaaguagcugggauuacaggcgccugc

SEQ ID NO: 378310 - RNA, 32 nt, Human
ccucccaaguagcugggauuacaggcgcgugc

SEQ ID NO: 378311 - RNA, 32 nt, Human
ccucccaaguagcugggauuacaggcguccgc

SEQ ID NO: 378312 - RNA, 32 nt, Human
ccucccaaguagcugggauuacaggcgugcac

SEQ ID NO: 378313 - RNA, 32 nt, Human
ccucccaaguagcugggauuacaggcguguac

SEQ ID NO: 378314 - RNA, 32 nt, Human
ccucccaaguagcugggauuacagguaccugc

SEQ ID NO: 378315 - RNA, 32 nt, Human
ccucccaaguagcugggauuacaggugcacac

SEQ ID NO: 378316 - RNA, 32 nt, Human
ccucccaaguagcugggauuacaggugcaggc

SEQ ID NO: 378317 - RNA, 32 nt, Human
ccucccaaguagcugggauuacaggugcccaa

SEQ ID NO: 378318 - RNA, 32 nt, Human
ccucccaaguagcugggauuacaggugcccac

SEQ ID NO: 378319 - RNA, 32 nt, Human
ccucccaaguagcugggauuacaggugcccgc

SEQ ID NO: 378320 - RNA, 32 nt, Human
ccucccaaguagcugggauuacaggugccugc

SEQ ID NO: 378321 - RNA, 32 nt, Human
ccucccaaguagcugggauuacaggugcucac

SEQ ID NO: 378322 - RNA, 32 nt, Human
ccucccaaguagcugggauuacagguguccgc

SEQ ID NO: 378323 - RNA, 32 nt, Human
ccucccaaguagcugggauuacaggugugagc

SEQ ID NO: 378324 - RNA, 32 nt, Human
ccucccaaguagcugggauuacaggugugcac

SEQ ID NO: 378325 - RNA, 32 nt, Human
ccucccaaguagcugggauuacaggugugcgc

SEQ ID NO: 378326 - RNA, 32 nt, Human
ccucccaaguagcugggauuacaggugugugc

SEQ ID NO: 378327 - RNA, 32 nt, Human
ccucccaaguagcugggauuacagucaggcac

SEQ ID NO: 378328 - RNA, 32 nt, Human
ccucccaaguagcugggauuacagugccugcc

SEQ ID NO: 378329 - RNA, 32 nt, Human
ccucccaaguagcugggauuacgggcaugcgc

SEQ ID NO: 378330 - RNA, 32 nt, Human
ccucccaaguagcugggauuauaggcaccugc

SEQ ID NO: 378331 - RNA, 32 nt, Human
ccucccaaguagcugggauuauaggugcccac

SEQ ID NO: 378332 - RNA, 32 nt, Human
ccucccaaguagcugggauuauaggugugugc

SEQ ID NO: 378333 - RNA, 32 nt, Human
ccucccaaguagcugggauugcaggcgcccgc

SEQ ID NO: 378334 - RNA, 32 nt, Human
ccucccaaguagcugggauugcaggugcccac

SEQ ID NO: 378335 - RNA, 32 nt, Human
ccucccaaguagcugggauuguaagaguaugc

SEQ ID NO: 378336 - RNA, 32 nt, Human
ccucccaaguagcuggggcuacaggcacccac

SEQ ID NO: 378337 - RNA, 32 nt, Human
ccucccaaguagcugggguuacaggcauuugc

SEQ ID NO: 378338 - RNA, 32 nt, Human
ccucccaaguaggugggauuacaggcaugcac

SEQ ID NO: 378339 - RNA, 32 nt, Human
ccucccaaguaggugggauuacaggcaugcgc

SEQ ID NO: 378340 - RNA, 32 nt, Human
ccucccaaguaggugggauuacaggcgcccgc

SEQ ID NO: 378341 - RNA, 32 nt, Human
ccucccaaguaguugggacuacaggcaugcgc

SEQ ID NO: 378342 - RNA, 32 nt, Human
ccucccaaguaguugggauuacaggcaccugc

SEQ ID NO: 378343 - RNA, 32 nt, Human
ccucccaaguaguugggauuacaggcaugcau

SEQ ID NO: 378344 - RNA, 32 nt, Human
ccucccaaguaguugggauuacgggcaugcac

SEQ ID NO: 378345 - RNA, 32 nt, Human
ccucccaaguaguugggucuacaggcacgcac

SEQ ID NO: 378346 - RNA, 32 nt, Human
ccucccaaguaucugggacuacaggcaugcgc

SEQ ID NO: 378347 - RNA, 32 nt, Human
ccucccaagugcuaggauuacaggcaucagcc

SEQ ID NO: 378348 - RNA, 32 nt, Human
ccucccaagugcuggaauuacaggugugagcc

SEQ ID NO: 378349 - RNA, 32 nt, Human
ccucccaagugcugggauuacaggcgcgagcc

SEQ ID NO: 378350 - RNA, 32 nt, Human
ccucccaagugcugggauuacaggcgugagcc

SEQ ID NO: 378351 - RNA, 32 nt, Human
ccucccaaguggcugggauuacaggcgcaaac

SEQ ID NO: 378352 - RNA, 32 nt, Human
ccucccaaguggcugggauugcaggcaugagc

SEQ ID NO: 378353 - RNA, 32 nt, Human
ccucccaauaccagcaggagguucugggccuc

SEQ ID NO: 378354 - RNA, 32 nt, Human
ccucccaauagacuacaggcagugccaguugg

SEQ ID NO: 378355 - RNA, 32 nt, Human
ccucccaauccccacagacacacacauugauc

SEQ ID NO: 378356 - RNA, 32 nt, Human
ccucccaaugugcugggauuacaggcaugagc

SEQ ID NO: 378357 - RNA, 32 nt, Human
ccucccaaugugcugggauuacaguugucacg

SEQ ID NO: 378358 - RNA, 32 nt, Human
ccucccacaacacauggugauuauggggauua

SEQ ID NO: 378359 - RNA, 32 nt, Human
ccucccacaagccacguugaucuucacaacga

SEQ ID NO: 378360 - RNA, 21 nt, Human
ccucccacaagucgcgccuca

SEQ ID NO: 378361 - RNA, 28 nt, Human
ccucccacaagucgcgccucaucgagca

SEQ ID NO: 378362 - RNA, 32 nt, Human
ccucccacacacaggccagcugcucacccugc

SEQ ID NO: 378363 - RNA, 32 nt, Human
ccucccacacaccuugcucuggcuucucugug

SEQ ID NO: 378364 - RNA, 21 nt, Human
ccucccacaccucucaccuca

SEQ ID NO: 378365 - RNA, 32 nt, Human
ccucccacaccucucaccucacaggcacauca

SEQ ID NO: 378366 - RNA, 32 nt, Human
ccucccacacucgccaucuccugggccguuac

SEQ ID NO: 378367 - RNA, 32 nt, Human
ccucccacagcccaccuccacuuuugaaagcc

SEQ ID NO: 378368 - RNA, 32 nt, Human
ccucccacagccgaccaggcucaacgcacaca

SEQ ID NO: 378369 - RNA, 15 nt, Human
ccucccacagugcug

SEQ ID NO: 378370 - RNA, 32 nt, Human
ccucccacagugcugggauuacaggcaugggc

SEQ ID NO: 378371 - RNA, 32 nt, Human
ccucccacagugcugggauuacaggccugagc

SEQ ID NO: 378372 - RNA, 32 nt, Human
ccucccacagugcugggauuacaggcgugagc

SEQ ID NO: 378373 - RNA, 32 nt, Human
ccucccacagugcugggauuagaggcaugagc

SEQ ID NO: 378374 - RNA, 32 nt, Human
ccucccacaucuugccauuaccagucugugua

SEQ ID NO: 378375 - RNA, 32 nt, Human
ccucccaccacugucccagcagucccucggca

SEQ ID NO: 378376 - RNA, 32 nt, Human
ccucccaccaguguccaggcaggcaggagccc

SEQ ID NO: 378377 - RNA, 28 nt, Human
ccucccacccagucccucccucuggucc

SEQ ID NO: 378378 - RNA, 32 nt, Human
ccucccaccccagccucccagguagcuaguac

SEQ ID NO: 378379 - RNA, 22 nt, Human
ccucccacccccaaacgaggug

SEQ ID NO: 378380 - RNA, 20 nt, Human
ccucccacccggucuuccug

SEQ ID NO: 378381 - RNA, 24 nt, Human
ccucccacccucauuuucuggucc

SEQ ID NO: 378382 - RNA, 18 nt, Human
ccucccacccugugucug

SEQ ID NO: 378383 - RNA, 32 nt, Human
ccucccacccuucagccccaggcucucugagc

SEQ ID NO: 378384 - RNA, 32 nt, Human
ccucccacccuucuggccaagcauggcggugc

SEQ ID NO: 378385 - RNA, 21 nt, Human
ccucccaccgcaccuuccuga

SEQ ID NO: 378386 - RNA, 23 nt, Human
ccucccaccucagccucuggugu

SEQ ID NO: 378387 - RNA, 21 nt, Human
ccucccaccucagcuuccuga

SEQ ID NO: 378388 - RNA, 32 nt, Human
ccucccaccucuuccuccuccuagcuccccaa

SEQ ID NO: 378389 - RNA, 32 nt, Human
ccucccaccugccccucaauucccaggagacu

SEQ ID NO: 378390 - RNA, 32 nt, Human
ccucccacgacccccaccagacugccuuaggu

SEQ ID NO: 378391 - RNA, 32 nt, Human
ccucccacuacagugauuccagaucucccagc

SEQ ID NO: 378392 - RNA, 32 nt, Human
ccucccacugauuuuaaauaguugguugaaga

SEQ ID NO: 378393 - RNA, 32 nt, Human
ccucccacugcaacuuuucagcucagggguug

SEQ ID NO: 378394 - RNA, 32 nt, Human
ccucccacugcacugccgguuucccuggguua

SEQ ID NO: 378395 - RNA, 32 nt, Human
ccucccacugcagccucugccugcucugccgc

SEQ ID NO: 378396 - RNA, 32 nt, Human
ccucccacugccugacaccugggacaggcugg

SEQ ID NO: 378397 - RNA, 32 nt, Human
ccucccacuggcuccugauaucuugcuguauu

SEQ ID NO: 378398 - RNA, 17 nt, Human
ccucccacugggucccu

SEQ ID NO: 378399 - RNA, 26 nt, Human
ccucccacuugguagcaccuuccuga

SEQ ID NO: 378400 - RNA, 32 nt, Human
ccucccagaaugcugggauuacaggcgugagc

SEQ ID NO: 378401 - RNA, 22 nt, Human
ccucccagaccugucaugagga

SEQ ID NO: 378402 - RNA, 32 nt, Human
ccucccagacuaccugcccucagcuuggauaa

SEQ ID NO: 378403 - RNA, 32 nt, Human
ccucccagacuguugggauuacaggcaugagc

SEQ ID NO: 378404 - RNA, 32 nt, Human
ccucccagacuugcugcuugcuugguccacag

SEQ ID NO: 378405 - RNA, 32 nt, Human
ccucccagagaccuccaagaccugccaagcug

SEQ ID NO: 378406 - RNA, 32 nt, Human
ccucccagagcaucucacccccacccucaugu

SEQ ID NO: 378407 - RNA, 32 nt, Human
ccucccagagcucagcccaugucacccuccag

SEQ ID NO: 378408 - RNA, 32 nt, Human
ccucccagagcuuguugucuccacuuguauau

SEQ ID NO: 378409 - RNA, 32 nt, Human
ccucccagagggcugaacucuuucaacucugc

SEQ ID NO: 378410 - RNA, 32 nt, Human
ccucccagaguacugggauuacaggcucuuuc

SEQ ID NO: 378411 - RNA, 32 nt, Human
ccucccagaguauugggauuacagacaugagc

SEQ ID NO: 378412 - RNA, 32 nt, Human
ccucccagagugcuaggauuacaggcaugagc

SEQ ID NO: 378413 - RNA, 32 nt, Human
ccucccagagugcuaggauuacaggccuuuug

SEQ ID NO: 378414 - RNA, 32 nt, Human
ccucccagagugcugagauuacaggcgugagc

SEQ ID NO: 378415 - RNA, 32 nt, Human
ccucccagagugcugggacuacaggcaucagc

SEQ ID NO: 378416 - RNA, 32 nt, Human
ccucccagagugcugggacuacaggcaugagc

SEQ ID NO: 378417 - RNA, 32 nt, Human
ccucccagagugcugggauuacaggcaugagc

SEQ ID NO: 378418 - RNA, 32 nt, Human
ccucccagagugcugggauuacaggcgucagc

SEQ ID NO: 378419 - RNA, 32 nt, Human
ccucccagagugcugggauuacaggcgugagc

SEQ ID NO: 378420 - RNA, 32 nt, Human
ccucccagagugcugggauuacagggggagcc

SEQ ID NO: 378421 - RNA, 32 nt, Human
ccucccagagugcugggauuacaggugugaau

SEQ ID NO: 378422 - RNA, 32 nt, Human
ccucccagagugcugggauuacaggugugagc

SEQ ID NO: 378423 - RNA, 32 nt, Human
ccucccagagugcugggauuauaggcgugagc

SEQ ID NO: 378424 - RNA, 32 nt, Human
ccucccagagugcugggauuuacaggcaugag

SEQ ID NO: 378425 - RNA, 32 nt, Human
ccucccagauagcugggacuacaggcacacgc

SEQ ID NO: 378426 - RNA, 32 nt, Human
ccucccagauugcuggguuuacaggcaugagc

SEQ ID NO: 378427 - RNA, 19 nt, Human
ccucccagcaaccuucccu

SEQ ID NO: 378428 - RNA, 32 nt, Human
ccucccagcacuggcccugcagggcgcccacc

SEQ ID NO: 378429 - RNA, 32 nt, Human
ccucccagcacugucuccuuccucccacuggc

SEQ ID NO: 378430 - RNA, 32 nt, Human
ccucccagcagacggagccaggacgggcacaa

SEQ ID NO: 378431 - RNA, 19 nt, Human
ccucccagcagcagcagug

SEQ ID NO: 378432 - RNA, 32 nt, Human
ccucccagcaucugggacucgagagugggcag

SEQ ID NO: 378433 - RNA, 32 nt, Human
ccucccagccaguguccagccuaagcacaucg

SEQ ID NO: 378434 - RNA, 32 nt, Human
ccucccagccaugcuuccuguacagccugugg

SEQ ID NO: 378435 - RNA, 17 nt, Human
ccucccagccccuucca

SEQ ID NO: 378436 - RNA, 19 nt, Human
ccucccagcccucuccuca

SEQ ID NO: 378437 - RNA, 32 nt, Human
ccucccagcccuugcccagccugggggagugg

SEQ ID NO: 378438 - RNA, 23 nt, Human
ccucccagccuauuucugcuccu

SEQ ID NO: 378439 - RNA, 32 nt, Human
ccucccagccuccuuagcacuagaaaacugcc

SEQ ID NO: 378440 - RNA, 32 nt, Human
ccucccagccugguggacccaaggagaagguc

SEQ ID NO: 378441 - RNA, 32 nt, Human
ccucccagccuucugcugcccuugcuuaacaa

SEQ ID NO: 378442 - RNA, 32 nt, Human
ccucccagcguccacuggcuccaggcuccuca

SEQ ID NO: 378443 - RNA, 32 nt, Human
ccucccagcuacuuaggaggcugaggcaggag

SEQ ID NO: 378444 - RNA, 20 nt, Human
ccucccagcucccuuagaga

SEQ ID NO: 378445 - RNA, 32 nt, Human
ccucccagcugacccagccuccugggccgcuu

SEQ ID NO: 378446 - RNA, 32 nt, Human
ccucccagcugucucuggaggcuggaggaguu

SEQ ID NO: 378447 - RNA, 32 nt, Human
ccucccagcuuuguuuauuuugugcuuuuaga

SEQ ID NO: 378448 - RNA, 32 nt, Human
ccucccaggaagugcugggauuacaggcauga

SEQ ID NO: 378449 - RNA, 28 nt, Human
ccucccaggaaugcugccuuccuucagc

SEQ ID NO: 378450 - RNA, 32 nt, Human
ccucccaggagggagacgcuggggugcaaaaa

SEQ ID NO: 378451 - RNA, 32 nt, Human
ccucccaggaguaaaagccaagcaagagguug

SEQ ID NO: 378452 - RNA, 21 nt, Human
ccucccaggaucccaccagcc

SEQ ID NO: 378453 - RNA, 18 nt, Human
ccucccaggccaccaacc

SEQ ID NO: 378454 - RNA, 32 nt, Human
ccucccaggccccugccccaacugauucugcc

SEQ ID NO: 378455 - RNA, 32 nt, Human
ccucccaggcgggaucgcugguuucucucgac

SEQ ID NO: 378456 - RNA, 32 nt, Human
ccucccaggcugggcuuuguagcugcagcccc

SEQ ID NO: 378457 - RNA, 32 nt, Human
ccucccaggcuggggcagugggcaugggcagg

SEQ ID NO: 378458 - RNA, 32 nt, Human
ccucccaggcuggugugagugugcgugcguuu

SEQ ID NO: 378459 - RNA, 32 nt, Human
ccucccagggaagccugugcagaugcagucac

SEQ ID NO: 378460 - RNA, 32 nt, Human
ccucccagggccagguuccugacaguguuggu

SEQ ID NO: 378461 - RNA, 32 nt, Human
ccucccagggcugugaggacggaaacaggcag

SEQ ID NO: 378462 - RNA, 21 nt, Human
ccucccaggggacuguuccuu

SEQ ID NO: 378463 - RNA, 32 nt, Human
ccucccagggucuuugccucuaucugugguuu

SEQ ID NO: 378464 - RNA, 32 nt, Human
ccucccagggugcugggauuacaggugugagc

SEQ ID NO: 378465 - RNA, 32 nt, Human
ccucccagguagcugggacuacaggcacacac

SEQ ID NO: 378466 - RNA, 32 nt, Human
ccucccagguagcugggacuauaggcacgugc

SEQ ID NO: 378467 - RNA, 32 nt, Human
ccucccagguagcugggauuacaggcacccac

SEQ ID NO: 378468 - RNA, 32 nt, Human
ccucccagguagcugggauuacaggcaugcaa

SEQ ID NO: 378469 - RNA, 32 nt, Human
ccucccagguagcugggauuacaggcucccgc

SEQ ID NO: 378470 - RNA, 32 nt, Human
ccucccagguagcugggauuauaggcgugugc

SEQ ID NO: 378471 - RNA, 32 nt, Human
ccucccaggucucccuggggagguagaggcac

SEQ ID NO: 378472 - RNA, 32 nt, Human
ccucccaggugcaaagggcucccggcgcccgg

SEQ ID NO: 378473 - RNA, 32 nt, Human
ccucccaggugcugggauuauaggcgugagcc

SEQ ID NO: 378474 - RNA, 32 nt, Human
ccucccagguggcugaaacuacaggcacaugc

SEQ ID NO: 378475 - RNA, 32 nt, Human
ccucccagguggcugggauuacaggcaugcac

SEQ ID NO: 378476 - RNA, 32 nt, Human
ccucccagguggugucaacacaacaucacaca

SEQ ID NO: 378477 - RNA, 20 nt, Human
ccucccaguaaacccugcca

SEQ ID NO: 378478 - RNA, 32 nt, Human
ccucccaguaagggcguggcucugggugggcg

SEQ ID NO: 378479 - RNA, 32 nt, Human
ccucccaguaugcucugugcuuuuggaacaau

SEQ ID NO: 378480 - RNA, 32 nt, Human
ccucccagucaguucaagacccgacaugaggg

SEQ ID NO: 378481 - RNA, 32 nt, Human
ccucccaguccugaacacauugcagauggccc

SEQ ID NO: 378482 - RNA, 32 nt, Human
ccucccagugaagguggaccucugauuuagac

SEQ ID NO: 378483 - RNA, 32 nt, Human
ccucccagugauggucaguauucuuuuggaau

SEQ ID NO: 378484 - RNA, 32 nt, Human
ccucccagugcaaauccuccugcccauaccgu

SEQ ID NO: 378485 - RNA, 32 nt, Human
ccucccagugugcugggauuacaggcaugagc

SEQ ID NO: 378486 - RNA, 32 nt, Human
ccucccaguucugcgccuuggggccagccagu

SEQ ID NO: 378487 - RNA, 32 nt, Human
ccucccaguucuggaggagccagguuccccuu

SEQ ID NO: 378488 - RNA, 32 nt, Human
ccucccaguuuuucuccccuuuugguuuaaua

SEQ ID NO: 378489 - RNA, 32 nt, Human
ccucccauacugugaaucagcaggugccccga

SEQ ID NO: 378490 - RNA, 32 nt, Human
ccucccauagugcugggauuacaggcaugagc

SEQ ID NO: 378491 - RNA, 32 nt, Human
ccucccauagugcugggauuacaggugugagc

SEQ ID NO: 378492 - RNA, 32 nt, Human
ccucccaucaccucaacuccagccagggagga

SEQ ID NO: 378493 - RNA, 32 nt, Human
ccucccaucccaggauucauguuuucauggua

SEQ ID NO: 378494 - RNA, 19 nt, Human
ccucccaucccucuguccu

SEQ ID NO: 378495 - RNA, 24 nt, Human
ccucccaucccugcccuccuccug

SEQ ID NO: 378496 - RNA, 32 nt, Human
ccucccauccgucauuccccugcguucucuuu

SEQ ID NO: 378497 - RNA, 32 nt, Human
ccucccauccuuguccuucucucccucagaag

SEQ ID NO: 378498 - RNA, 24 nt, Human
ccucccaucuauccccauuccuga

SEQ ID NO: 378499 - RNA, 32 nt, Human
ccucccaucucaaggacuuggaaguaagggaa

SEQ ID NO: 378500 - RNA, 21 nt, Human
ccucccaucucagccuccuga

SEQ ID NO: 378501 - RNA, 20 nt, Human
ccucccaucucagccugccu

SEQ ID NO: 378502 - RNA, 23 nt, Human
ccucccaucucuuaucuccuuga

SEQ ID NO: 378503 - RNA, 24 nt, Human
ccucccaucuuaagcaacccccug

SEQ ID NO: 378504 - RNA, 24 nt, Human
ccucccaucuugagcucuuccuga

SEQ ID NO: 378505 - RNA, 19 nt, Human
ccucccaucuuggccuccc

SEQ ID NO: 378506 - RNA, 31 nt, Human
ccucccaugcugaguuucaugauggcuuuca

SEQ ID NO: 378507 - RNA, 27 nt, Human
ccucccauggauaggaacucuuccugg

SEQ ID NO: 378508 - RNA, 32 nt, Human
ccucccaugggaagugcuggaauccacucuug

SEQ ID NO: 378509 - RNA, 32 nt, Human
ccucccauguagcugggauuacagcugccugc

SEQ ID NO: 378510 - RNA, 32 nt, Human
ccucccauucacccaucucugcucccacccuu

SEQ ID NO: 378511 - RNA, 32 nt, Human
ccuccccaaacaucucccucccuaccucccuc

SEQ ID NO: 378512 - RNA, 32 nt, Human
ccuccccaaaccuucagaugcagugagaccug

SEQ ID NO: 378513 - RNA, 23 nt, Human
ccuccccaaagaguugcgcauca

SEQ ID NO: 378514 - RNA, 32 nt, Human
ccuccccaacacagugagaccccagccaccuc

SEQ ID NO: 378515 - RNA, 32 nt, Human
ccuccccaaccacguggaacugugaguccauu

SEQ ID NO: 378516 - RNA, 32 nt, Human
ccuccccaaccuccuccauuuccccagccaga

SEQ ID NO: 378517 - RNA, 32 nt, Human
ccuccccaacuucagcccaugucuucacagca

SEQ ID NO: 378518 - RNA, 32 nt, Human
ccuccccaagccccagggccuaaagagaagac

SEQ ID NO: 378519 - RNA, 22 nt, Human
ccuccccaagcuucuugcuaua

SEQ ID NO: 378520 - RNA, 32 nt, Human
ccuccccaaggcucagcucuaagaccugcacc

SEQ ID NO: 378521 - RNA, 32 nt, Human
ccuccccaagugcugggauuacaggcgugagc

SEQ ID NO: 378522 - RNA, 32 nt, Human
ccuccccaagugcugggauuauaggcaugagc

SEQ ID NO: 378523 - RNA, 32 nt, Human
ccuccccaaguguugggauuacaggcgugagc

SEQ ID NO: 378524 - RNA, 20 nt, Human
ccuccccaaugauuucuuca

SEQ ID NO: 378525 - RNA, 32 nt, Human
ccuccccacacaacaggcuacgaagaaccugg

SEQ ID NO: 378526 - RNA, 32 nt, Human
ccuccccacaggcucuccuuguggggucccag

SEQ ID NO: 378527 - RNA, 32 nt, Human
ccuccccacaguccuggcuggagcagcgaguc

SEQ ID NO: 378528 - RNA, 32 nt, Human
ccuccccacaguuugagucagagauggcucuc

SEQ ID NO: 378529 - RNA, 32 nt, Human
ccuccccacauggugcugaggcucccugcugc

SEQ ID NO: 378530 - RNA, 32 nt, Human
ccuccccaccacagccaucucguuuaucggac

SEQ ID NO: 378531 - RNA, 32 nt, Human
ccuccccaccacauaaacacauggacacacac

SEQ ID NO: 378532 - RNA, 32 nt, Human
ccuccccaccacccuccgccaucagccugccu

SEQ ID NO: 378533 - RNA, 20 nt, Human
ccuccccaccagcccgcuga

SEQ ID NO: 378534 - RNA, 32 nt, Human
ccuccccaccauuccucuucccccacaugugu

SEQ ID NO: 378535 - RNA, 32 nt, Human
ccuccccacccaagccucaccuccccaccccu

SEQ ID NO: 378536 - RNA, 32 nt, Human
ccuccccacccagguuuucggcccagugaaga

SEQ ID NO: 378537 - RNA, 32 nt, Human
ccuccccaccuaccccuuccuuccucuuuauc

SEQ ID NO: 378538 - RNA, 32 nt, Human
ccuccccaccuagcccuccaaccaaggcuagg

SEQ ID NO: 378539 - RNA, 32 nt, Human
ccuccccaccucccaucucuccuuccaggccc

SEQ ID NO: 378540 - RNA, 19 nt, Human
ccuccccaccuccuggaaa

SEQ ID NO: 378541 - RNA, 32 nt, Human
ccuccccacgucgcccccuccugcacagccac

SEQ ID NO: 378542 - RNA, 32 nt, Human
ccuccccacucccuccccacucccuccuggca

SEQ ID NO: 378543 - RNA, 32 nt, Human
ccuccccacucugagcccguguccucaguagu

SEQ ID NO: 378544 - RNA, 32 nt, Human
ccuccccacugaagaaaaagaugaaaaugaug

SEQ ID NO: 378545 - RNA, 32 nt, Human
ccuccccacugauucccuucuuuccauuucug

SEQ ID NO: 378546 - RNA, 32 nt, Human
ccuccccacugcagccagcaugccuggcugug

SEQ ID NO: 378547 - RNA, 22 nt, Human
ccuccccacugcccccacccca

SEQ ID NO: 378548 - RNA, 32 nt, Human
ccuccccacugccuuuucucacucagaugggg

SEQ ID NO: 378549 - RNA, 32 nt, Human
ccuccccacuggcucugucugcucuccugcca

SEQ ID NO: 378550 - RNA, 32 nt, Human
ccuccccacuucaccaacacugccuuccucca

SEQ ID NO: 378551 - RNA, 32 nt, Human
ccuccccacuuucuccuuuuccuuccuuccug

SEQ ID NO: 378552 - RNA, 32 nt, Human
ccuccccagcaauguagaacuguaaguccauu

SEQ ID NO: 378553 - RNA, 32 nt, Human
ccuccccagcacagccagggugaguguccucu

SEQ ID NO: 378554 - RNA, 32 nt, Human
ccuccccagcagcugcucugcucaccagccug

SEQ ID NO: 378555 - RNA, 32 nt, Human
ccuccccagcagcugggacuacaggcacacau

SEQ ID NO: 378556 - RNA, 32 nt, Human
ccuccccagcagcugggacuacaggcacccac

SEQ ID NO: 378557 - RNA, 32 nt, Human
ccuccccagccacgcagaacugugagucaauu

SEQ ID NO: 378558 - RNA, 32 nt, Human
ccuccccagccaugcagagccaugagucaauu

SEQ ID NO: 378559 - RNA, 32 nt, Human
ccuccccagccaugcaggacugugagucaauu

SEQ ID NO: 378560 - RNA, 32 nt, Human
ccuccccagccaugcggaacugugagucaguu

SEQ ID NO: 378561 - RNA, 32 nt, Human
ccuccccagccauguggaacagugagucaauu

SEQ ID NO: 378562 - RNA, 32 nt, Human
ccuccccagccauguggaacucugagaaaccu

SEQ ID NO: 378563 - RNA, 32 nt, Human
ccuccccagccauguggaacucuuguguugug

SEQ ID NO: 378564 - RNA, 32 nt, Human
ccuccccagccauguggaacuguaaguccaau

SEQ ID NO: 378565 - RNA, 32 nt, Human
ccuccccagccauguggaacugugaauccauu

SEQ ID NO: 378566 - RNA, 32 nt, Human
ccuccccagccauguggaacugugagucaauu

SEQ ID NO: 378567 - RNA, 32 nt, Human
ccuccccagccauguggaacugugugugaguu

SEQ ID NO: 378568 - RNA, 32 nt, Human
ccuccccagccauguuaaacuuugaguuaauu

SEQ ID NO: 378569 - RNA, 17 nt, Human
ccuccccagccccacgg

SEQ ID NO: 378570 - RNA, 32 nt, Human
ccuccccagccccagcucacacacccaacacc

SEQ ID NO: 378571 - RNA, 32 nt, Human
ccuccccagcccuuggcacaggcagaguucgg

SEQ ID NO: 378572 - RNA, 32 nt, Human
ccuccccagccguguggaacugugaguccauu

SEQ ID NO: 378573 - RNA, 32 nt, Human
ccuccccagcuacucgggaggcugaggcagga

SEQ ID NO: 378574 - RNA, 32 nt, Human
ccuccccagcuauaaggaacugugagccaauu

SEQ ID NO: 378575 - RNA, 32 nt, Human
ccuccccaggcaggccagggcccagcagcuug

SEQ ID NO: 378576 - RNA, 32 nt, Human
ccuccccaggccccaaagcaccccaaggcugg

SEQ ID NO: 378577 - RNA, 23 nt, Human
ccuccccaggccucuggggcccg

SEQ ID NO: 378578 - RNA, 32 nt, Human
ccuccccaggcuggccccagaggagcgagcac

SEQ ID NO: 378579 - RNA, 32 nt, Human
ccuccccagguggcaggaucuggcuuggggug

SEQ ID NO: 378580 - RNA, 21 nt, Human
ccuccccaggugugcaccaug

SEQ ID NO: 378581 - RNA, 32 nt, Human
ccuccccaguagagcugggacuacagguaugc

SEQ ID NO: 378582 - RNA, 32 nt, Human
ccuccccaguagcugagauugcaggcacaugc

SEQ ID NO: 378583 - RNA, 32 nt, Human
ccuccccaguagcuggaacuacaggcaugcac

SEQ ID NO: 378584 - RNA, 32 nt, Human
ccuccccaguagcugggaauacaggcacccgc

SEQ ID NO: 378585 - RNA, 32 nt, Human
ccuccccaguagcugggacuacaagcacaugc

SEQ ID NO: 378586 - RNA, 32 nt, Human
ccuccccaguagcugggacuacaggcaugugc

SEQ ID NO: 378587 - RNA, 32 nt, Human
ccuccccaguagcugggacuacaggccuccau

SEQ ID NO: 378588 - RNA, 32 nt, Human
ccuccccaguagcugggacuacaggcgcccgc

SEQ ID NO: 378589 - RNA, 32 nt, Human
ccuccccaguagcugggacuacaggcgccugc

SEQ ID NO: 378590 - RNA, 32 nt, Human
ccuccccaguagcugggacuccaggcacccac

SEQ ID NO: 378591 - RNA, 32 nt, Human
ccuccccaguagcugggauuacaggcaccagc

SEQ ID NO: 378592 - RNA, 32 nt, Human
ccuccccaguagcugggauuacaggcacccac

SEQ ID NO: 378593 - RNA, 32 nt, Human
ccuccccaguagcugggauuacaggcacccgc

SEQ ID NO: 378594 - RNA, 32 nt, Human
ccuccccaguagcugggauuacaggcaccuac

SEQ ID NO: 378595 - RNA, 32 nt, Human
ccuccccaguagcugggauuacaggcgcccac

SEQ ID NO: 378596 - RNA, 32 nt, Human
ccuccccaguagcugggauuacaggcgccgau

SEQ ID NO: 378597 - RNA, 32 nt, Human
ccuccccaguagcugggauuacaggcgugggc

SEQ ID NO: 378598 - RNA, 32 nt, Human
ccuccccaguagcugggauuacaggcucaugc

SEQ ID NO: 378599 - RNA, 32 nt, Human
ccuccccaguagcugggauuacaguguuauag

SEQ ID NO: 378600 - RNA, 32 nt, Human
ccuccccagucauacagaacugugaaucaauu

SEQ ID NO: 378601 - RNA, 32 nt, Human
ccuccccaguccccagaacugccugcaggugc

SEQ ID NO: 378602 - RNA, 32 nt, Human
ccuccccagugcagcauggcacucaggagaua

SEQ ID NO: 378603 - RNA, 17 nt, Human
ccuccccaguuuagggg

SEQ ID NO: 378604 - RNA, 32 nt, Human
ccuccccauauuccucacuucuccaucaccuc

SEQ ID NO: 378605 - RNA, 32 nt, Human
ccuccccaucaaugacccccagccuggcucca

SEQ ID NO: 378606 - RNA, 19 nt, Human
ccuccccaucacccagcca

SEQ ID NO: 378607 - RNA, 32 nt, Human
ccuccccaucccugaccuggcgaaaggccuag

SEQ ID NO: 378608 - RNA, 32 nt, Human
ccuccccaugaaggagggaggcugguagcuuu

SEQ ID NO: 378609 - RNA, 32 nt, Human
ccuccccauguucauuaugcucagccugucuu

SEQ ID NO: 378610 - RNA, 32 nt, Human
ccuccccauucuucucuuccccucucuucccu

SEQ ID NO: 378611 - RNA, 18 nt, Human
ccucccccaaaggggcag

SEQ ID NO: 378612 - RNA, 32 nt, Human
ccucccccaaccccuguauccccaccccguac

SEQ ID NO: 378613 - RNA, 18 nt, Human
ccucccccaagccaacca

SEQ ID NO: 378614 - RNA, 32 nt, Human
ccucccccaagucucuucugugcaaggcccgc

SEQ ID NO: 378615 - RNA, 32 nt, Human
ccucccccacccaccucucuggcuuccaugcu

SEQ ID NO: 378616 - RNA, 32 nt, Human
ccucccccacccagucugccaggcugggagcu

SEQ ID NO: 378617 - RNA, 32 nt, Human
ccucccccacgggcuccugccugccugccagg

SEQ ID NO: 378618 - RNA, 32 nt, Human
ccucccccacugcaccccaagagagagagccc

SEQ ID NO: 378619 - RNA, 19 nt, Human
ccucccccagaugguacuu

SEQ ID NO: 378620 - RNA, 32 nt, Human
ccucccccagcacuugcggccgcucagcccuc

SEQ ID NO: 378621 - RNA, 25 nt, Human
ccucccccagccuuccuccggcugg

SEQ ID NO: 378622 - RNA, 28 nt, Human
ccucccccagcugcugccuucauauuga

SEQ ID NO: 378623 - RNA, 32 nt, Human
ccucccccaggccuaagaggagagggaaccag

SEQ ID NO: 378624 - RNA, 32 nt, Human
ccucccccagggccaagggaaauccugagcgc

SEQ ID NO: 378625 - RNA, 18 nt, Human
ccuccccccaaagccccc

SEQ ID NO: 378626 - RNA, 15 nt, Human
ccuccccccacgccc

SEQ ID NO: 378627 - RNA, 16 nt, Human
ccuccccccuuggggg

SEQ ID NO: 378628 - RNA, 32 nt, Human
ccucccccgaccugggcccacacugcugccuu

SEQ ID NO: 378629 - RNA, 32 nt, Human
ccucccccgagaccacccccacccuggggaag

SEQ ID NO: 378630 - RNA, 32 nt, Human
ccucccccgauucugacuaucucccuuucccg

SEQ ID NO: 378631 - RNA, 32 nt, Human
ccucccccgcagguuaugucagcagcucugag

SEQ ID NO: 378632 - RNA, 32 nt, Human
ccucccccgccaugugaaacugugaguccauu

SEQ ID NO: 378633 - RNA, 32 nt, Human
ccucccccgccauguggaacugugagucaauu

SEQ ID NO: 378634 - RNA, 16 nt, Human
ccucccccggcugccg

SEQ ID NO: 378635 - RNA, 32 nt, Human
ccucccccuaauucucaucugucagauccagu

SEQ ID NO: 378636 - RNA, 25 nt, Human
ccucccccuagcccagccccaguca

SEQ ID NO: 378637 - RNA, 32 nt, Human
ccucccccucagagaagacaggaggucgggaa

SEQ ID NO: 378638 - RNA, 32 nt, Human
ccucccccucauccuccauucccuuguuuuca

SEQ ID NO: 378639 - RNA, 32 nt, Human
ccucccccucauggagagucagcagcuugggc

SEQ ID NO: 378640 - RNA, 32 nt, Human
ccucccccuccagccuuugccugggaacuggu

SEQ ID NO: 378641 - RNA, 32 nt, Human
ccucccccucccccacucccccuccccggcgc

SEQ ID NO: 378642 - RNA, 32 nt, Human
ccucccccucccccauucccuccauuuuucuc

SEQ ID NO: 378643 - RNA, 32 nt, Human
ccucccccucccccucccccucuuucuucucc

SEQ ID NO: 378644 - RNA, 32 nt, Human
ccucccccucccccucuuucuucuccucccuc

SEQ ID NO: 378645 - RNA, 32 nt, Human
ccucccccucccccuuagucucucugcucccu

SEQ ID NO: 378646 - RNA, 32 nt, Human
ccucccccuccccuacccccauccccuuguga

SEQ ID NO: 378647 - RNA, 32 nt, Human
ccucccccuccccucccccuccccaacucaga

SEQ ID NO: 378648 - RNA, 32 nt, Human
ccucccccuccccuuccuaaugaucccucgca

SEQ ID NO: 378649 - RNA, 21 nt, Human
ccucccccuccugcugugcug

SEQ ID NO: 378650 - RNA, 16 nt, Human
ccucccccucugggga

SEQ ID NO: 378651 - RNA, 32 nt, Human
ccucccccucuuuuccauuucucccuccauca

SEQ ID NO: 378652 - RNA, 32 nt, Human
ccucccccugaccacauacaaaggcacucuag

SEQ ID NO: 378653 - RNA, 32 nt, Human
ccucccccugagcauucauucucuccaccagg

SEQ ID NO: 378654 - RNA, 32 nt, Human
ccucccccugcauuccugucugggugaagagg

SEQ ID NO: 378655 - RNA, 32 nt, Human
ccucccccugccucuucggcuguguuuucucu

SEQ ID NO: 378656 - RNA, 32 nt, Human
ccucccccugcuccgcuccucugcagggccca

SEQ ID NO: 378657 - RNA, 32 nt, Human
ccucccccuggcuucuuucucuugggaaaacg

SEQ ID NO: 378658 - RNA, 20 nt, Human
ccucccccuguguggcccug

SEQ ID NO: 378659 - RNA, 32 nt, Human
ccucccccuucccuccccuuggggaccaccgg

SEQ ID NO: 378660 - RNA, 32 nt, Human
ccucccccuuccucccccucccaccaccagcu

SEQ ID NO: 378661 - RNA, 32 nt, Human
ccucccccuucucccaccccugcccccacuuc

SEQ ID NO: 378662 - RNA, 19 nt, Human
ccucccccuuuuguaaaua

SEQ ID NO: 378663 - RNA, 20 nt, Human
ccuccccgaggacccgccuc

SEQ ID NO: 378664 - RNA, 32 nt, Human
ccuccccgcagcucuucucuucccucuaugag

SEQ ID NO: 378665 - RNA, 32 nt, Human
ccuccccgcaggcagacagugaagagaaucag

SEQ ID NO: 378666 - RNA, 32 nt, Human
ccuccccgcaucuaaaggccccuucaguucuu

SEQ ID NO: 378667 - RNA, 24 nt, Human
ccuccccgccaccccacgcacuca

SEQ ID NO: 378668 - RNA, 23 nt, Human
ccuccccgcccacccgcggcuca

SEQ ID NO: 378669 - RNA, 24 nt, Human
ccuccccgccccgagccccaguca

SEQ ID NO: 378670 - RNA, 19 nt, Human
ccuccccgcccuggugcug

SEQ ID NO: 378671 - RNA, 24 nt, Human
ccuccccgccgagccggcgcccca

SEQ ID NO: 378672 - RNA, 20 nt, Human
ccuccccgcgacccgcaccg

SEQ ID NO: 378673 - RNA, 32 nt, Human
ccuccccgcugccgccuccuccugggcugggc

SEQ ID NO: 378674 - RNA, 32 nt, Human
ccuccccgcuggacgccuucuuccugccgugg

SEQ ID NO: 378675 - RNA, 23 nt, Human
ccuccccggagcggagcgcaccu

SEQ ID NO: 378676 - RNA, 32 nt, Human
ccuccccggccucagguuugcuucacucuucc

SEQ ID NO: 378677 - RNA, 20 nt, Human
ccuccccgggagacaccuca

SEQ ID NO: 378678 - RNA, 20 nt, Human
ccuccccgggagcugacgcc

SEQ ID NO: 378679 - RNA, 20 nt, Human
ccuccccgggcgccggcgcc

SEQ ID NO: 378680 - RNA, 19 nt, Human
ccuccccgucuccuccuca

SEQ ID NO: 378681 - RNA, 32 nt, Human
ccuccccuaagccgccgccaucaugcugcugc

SEQ ID NO: 378682 - RNA, 32 nt, Human
ccuccccuacuggcccuggugugugauguucc

SEQ ID NO: 378683 - RNA, 31 nt, Human
ccuccccuacuucucccuugcucccaaagcu

SEQ ID NO: 378684 - RNA, 32 nt, Human
ccuccccucaagaguucucaccagccuuaguu

SEQ ID NO: 378685 - RNA, 32 nt, Human
ccuccccucacuuccuccugguggucccguug

SEQ ID NO: 378686 - RNA, 32 nt, Human
ccuccccucagcccccagccuccaggccugcu

SEQ ID NO: 378687 - RNA, 32 nt, Human
ccuccccucagguuguucucugauucuuccuc

SEQ ID NO: 378688 - RNA, 32 nt, Human
ccuccccucagugcccuugccccauccccuca

SEQ ID NO: 378689 - RNA, 32 nt, Human
ccuccccuccacccucacaaggagcugccauc

SEQ ID NO: 378690 - RNA, 32 nt, Human
ccuccccuccacuccagcccaccggugacuca

SEQ ID NO: 378691 - RNA, 32 nt, Human
ccuccccuccacugcauaaucauguauaacua

SEQ ID NO: 378692 - RNA, 32 nt, Human
ccuccccuccaggcugauccugaggccuggac

SEQ ID NO: 378693 - RNA, 32 nt, Human
ccuccccucccccagaccuccaccuccuccag

SEQ ID NO: 378694 - RNA, 32 nt, Human
ccuccccuccccuccucagagcccacccugag

SEQ ID NO: 378695 - RNA, 19 nt, Human
ccuccccucccggcuccca

SEQ ID NO: 378696 - RNA, 32 nt, Human
ccuccccuccuauagccccaugguggggcuag

SEQ ID NO: 378697 - RNA, 22 nt, Human
ccuccccucgugucagcucagg

SEQ ID NO: 378698 - RNA, 32 nt, Human
ccuccccucuaguaggcaggccagguuaguga

SEQ ID NO: 378699 - RNA, 32 nt, Human
ccuccccucucccccaggcucuuucuccagcc

SEQ ID NO: 378700 - RNA, 32 nt, Human
ccuccccucuccccuugacuccucuccgaggc

SEQ ID NO: 378701 - RNA, 32 nt, Human
ccuccccucucccucccccucucccucccauc

SEQ ID NO: 378702 - RNA, 32 nt, Human
ccuccccucugccucccauuucugccccugac

SEQ ID NO: 378703 - RNA, 32 nt, Human
ccuccccucugccuuuuaaacccauccccucc

SEQ ID NO: 378704 - RNA, 32 nt, Human
ccuccccucugggaauugggcagcccugggca

SEQ ID NO: 378705 - RNA, 32 nt, Human
ccuccccucuuuccucacccuuuucuagaugu

SEQ ID NO: 378706 - RNA, 32 nt, Human
ccuccccugagagugaggaccucauccgacca

SEQ ID NO: 378707 - RNA, 18 nt, Human
ccuccccugcaccugggg

SEQ ID NO: 378708 - RNA, 32 nt, Human
ccuccccugcagccccgcccgccauggcccgg

SEQ ID NO: 378709 - RNA, 32 nt, Human
ccuccccugcagcgacucggacccgcuacugc

SEQ ID NO: 378710 - RNA, 32 nt, Human
ccuccccugcccccuccacuccggggccugug

SEQ ID NO: 378711 - RNA, 32 nt, Human
ccuccccugccucaccagcccuggcaacugcu

SEQ ID NO: 378712 - RNA, 32 nt, Human
ccuccccugccucaucagccagccugcaugag

SEQ ID NO: 378713 - RNA, 20 nt, Human
ccuccccugccuccaccaua

SEQ ID NO: 378714 - RNA, 32 nt, Human
ccuccccugccuccccuccuuuuuccugucca

SEQ ID NO: 378715 - RNA, 32 nt, Human
ccuccccugccugccuccugccuccccugccu

SEQ ID NO: 378716 - RNA, 32 nt, Human
ccuccccugccugccuccugccuccugccucc

SEQ ID NO: 378717 - RNA, 32 nt, Human
ccuccccugccugccugauuccauggcuguug

SEQ ID NO: 378718 - RNA, 32 nt, Human
ccuccccugccugcucugcagucguggguggg

SEQ ID NO: 378719 - RNA, 32 nt, Human
ccuccccugccuggcugacugccuugcuagaa

SEQ ID NO: 378720 - RNA, 32 nt, Human
ccuccccugccugggcacucccuccucccugc

SEQ ID NO: 378721 - RNA, 32 nt, Human
ccuccccugcuccaugugacccucccucugcc

SEQ ID NO: 378722 - RNA, 32 nt, Human
ccuccccugcucugacaccagggcggcucagc

SEQ ID NO: 378723 - RNA, 32 nt, Human
ccuccccugcugcagcuaacauggaggacuug

SEQ ID NO: 378724 - RNA, 32 nt, Human
ccuccccugggaacaguggcucugguggggag

SEQ ID NO: 378725 - RNA, 32 nt, Human
ccuccccugggagcagaggcccuucuagugug

SEQ ID NO: 378726 - RNA, 32 nt, Human
ccuccccuggggacgccaaggaggugggccac

SEQ ID NO: 378727 - RNA, 21 nt, Human
ccuccccugguuuuuuaggga

SEQ ID NO: 378728 - RNA, 32 nt, Human
ccuccccuguaccucucguaccacagaggaca

SEQ ID NO: 378729 - RNA, 21 nt, Human
ccuccccuguccccucgggca

SEQ ID NO: 378730 - RNA, 32 nt, Human
ccuccccuguucugcucucucagucaacaugu

SEQ ID NO: 378731 - RNA, 32 nt, Human
ccuccccuuccccuagcaacagccauacuuuu

SEQ ID NO: 378732 - RNA, 19 nt, Human
ccuccccuucccuucugga

SEQ ID NO: 378733 - RNA, 32 nt, Human
ccuccccuucugguagucauaggcaggauuga

SEQ ID NO: 378734 - RNA, 32 nt, Human
ccuccccuucuuucucuuccuucugccucccc

SEQ ID NO: 378735 - RNA, 32 nt, Human
ccucccgaaaugcugggauuacaggcaugagc

SEQ ID NO: 378736 - RNA, 32 nt, Human
ccucccgaaaugcuuugggauuacggguguga

SEQ ID NO: 378737 - RNA, 32 nt, Human
ccucccgaaauguugguauuacaggcaugagc

SEQ ID NO: 378738 - RNA, 32 nt, Human
ccucccgaagagcugggauuacacgcauacaa

SEQ ID NO: 378739 - RNA, 32 nt, Human
ccucccgaagugcuggcauuacaggcaugagc

SEQ ID NO: 378740 - RNA, 32 nt, Human
ccucccgaagugcugggauuacaggcaugagc

SEQ ID NO: 378741 - RNA, 32 nt, Human
ccucccgaagugcugggauuacaggcgggagc

SEQ ID NO: 378742 - RNA, 32 nt, Human
ccucccgaagugcugggauuacaggcguaagc

SEQ ID NO: 378743 - RNA, 32 nt, Human
ccucccgaagugcugggauuacaggcgugagc

SEQ ID NO: 378744 - RNA, 32 nt, Human
ccucccgaagugcugggauugcaggcauaagc

SEQ ID NO: 378745 - RNA, 32 nt, Human
ccucccgaagugcugggauugcaggcgugagc

SEQ ID NO: 378746 - RNA, 32 nt, Human
ccucccgaaguguugggauuacaggcacgagc

SEQ ID NO: 378747 - RNA, 32 nt, Human
ccucccgaauagcagggacuacaggcaugcgc

SEQ ID NO: 378748 - RNA, 32 nt, Human
ccucccgaauagcugggacuacaggugugagu

SEQ ID NO: 378749 - RNA, 32 nt, Human
ccucccgaauagcugggauuacaggcgcccgc

SEQ ID NO: 378750 - RNA, 32 nt, Human
ccucccgaauggcugggacuacaggcacccac

SEQ ID NO: 378751 - RNA, 32 nt, Human
ccucccgaccuuuccgagcccucuuugcgccc

SEQ ID NO: 378752 - RNA, 32 nt, Human
ccucccgacguggugggguuacaggcaugagc

SEQ ID NO: 378753 - RNA, 21 nt, Human
ccucccgacucucugcuccuu

SEQ ID NO: 378754 - RNA, 32 nt, Human
ccucccgagaccccuggugcugggcagagcug

SEQ ID NO: 378755 - RNA, 32 nt, Human
ccucccgagcagcugggacuacaggcgcccgc

SEQ ID NO: 378756 - RNA, 32 nt, Human
ccucccgagcagcugggacuacaggcgugcgc

SEQ ID NO: 378757 - RNA, 32 nt, Human
ccucccgagcagcugggauuacaggcgcccac

SEQ ID NO: 378758 - RNA, 32 nt, Human
ccucccgagccaugcugacugugaguuaauaa

SEQ ID NO: 378759 - RNA, 32 nt, Human
ccucccgagcccggggaggggcggggaggaca

SEQ ID NO: 378760 - RNA, 32 nt, Human
ccucccgagcucccaguaggauguccagacac

SEQ ID NO: 378761 - RNA, 32 nt, Human
ccucccgaggaggaaggaaggagagaccccag

SEQ ID NO: 378762 - RNA, 32 nt, Human
ccucccgaggcccagcccuugccucacaguug

SEQ ID NO: 378763 - RNA, 32 nt, Human
ccucccgaguaacugggauuacaggcgggcgc

SEQ ID NO: 378764 - RNA, 32 nt, Human
ccucccgaguaacugggauuacaggcuugugc

SEQ ID NO: 378765 - RNA, 32 nt, Human
ccucccgaguaacugggauuacaggugugugc

SEQ ID NO: 378766 - RNA, 32 nt, Human
ccucccgaguaacugggauuauaggcaugcac

SEQ ID NO: 378767 - RNA, 32 nt, Human
ccucccgaguaccugggacuacaggcacucgc

SEQ ID NO: 378768 - RNA, 32 nt, Human
ccucccgaguaccugggauuacaggcaugcac

SEQ ID NO: 378769 - RNA, 32 nt, Human
ccucccgaguaccugggauuacaggcaugugc

SEQ ID NO: 378770 - RNA, 32 nt, Human
ccucccgaguagcagggauuaccggugugcac

SEQ ID NO: 378771 - RNA, 32 nt, Human
ccucccgaguagcggggauuacaggcacgcgc

SEQ ID NO: 378772 - RNA, 32 nt, Human
ccucccgaguagcggggauuacaggcgcacac

SEQ ID NO: 378773 - RNA, 32 nt, Human
ccucccgaguagcuaggacuacaggcacgugc

SEQ ID NO: 378774 - RNA, 32 nt, Human
ccucccgaguagcuaggauuacagaagcaugc

SEQ ID NO: 378775 - RNA, 32 nt, Human
ccucccgaguagcuaggauuacaggcgcccgc

SEQ ID NO: 378776 - RNA, 32 nt, Human
ccucccgaguagcucagauuacaggcaugugc

SEQ ID NO: 378777 - RNA, 32 nt, Human
ccucccgaguagcugagacuacaggcaccugc

SEQ ID NO: 378778 - RNA, 32 nt, Human
ccucccgaguagcugagacuacaggcaugcac

SEQ ID NO: 378779 - RNA, 32 nt, Human
ccucccgaguagcugagacuacaggugcaugc

SEQ ID NO: 378780 - RNA, 32 nt, Human
ccucccgaguagcugagauuacaggcgcccgc

SEQ ID NO: 378781 - RNA, 32 nt, Human
ccucccgaguagcugagauuacaggugcacac

SEQ ID NO: 378782 - RNA, 32 nt, Human
ccucccgaguagcugagauuacaggugcgcgc

SEQ ID NO: 378783 - RNA, 32 nt, Human
ccucccgaguagcugagauuacagguuuuucu

SEQ ID NO: 378784 - RNA, 32 nt, Human
ccucccgaguagcugagauuauaggcaccuac

SEQ ID NO: 378785 - RNA, 32 nt, Human
ccucccgaguagcugagauuauaggcgugcac

SEQ ID NO: 378786 - RNA, 32 nt, Human
ccucccgaguagcugcaauuacaggagccugc

SEQ ID NO: 378787 - RNA, 32 nt, Human
ccucccgaguagcugcgacuacaggcgccggc

SEQ ID NO: 378788 - RNA, 32 nt, Human
ccucccgaguagcugcuacuagagaugcacca

SEQ ID NO: 378789 - RNA, 32 nt, Human
ccucccgaguagcuggaacuacaggcacacac

SEQ ID NO: 378790 - RNA, 32 nt, Human
ccucccgaguagcuggaauuacagacgccugc

SEQ ID NO: 378791 - RNA, 32 nt, Human
ccucccgaguagcuggaauuacaggcaccugc

SEQ ID NO: 378792 - RNA, 32 nt, Human
ccucccgaguagcuggaauuacaggcaugcgc

SEQ ID NO: 378793 - RNA, 32 nt, Human
ccucccgaguagcuggaauuauaggcgugcac

SEQ ID NO: 378794 - RNA, 32 nt, Human
ccucccgaguagcuggaauugcagacacccau

SEQ ID NO: 378795 - RNA, 32 nt, Human
ccucccgaguagcuggacuaacaggcacacuc

SEQ ID NO: 378796 - RNA, 32 nt, Human
ccucccgaguagcuggauuuacagaugcaugc

SEQ ID NO: 378797 - RNA, 32 nt, Human
ccucccgaguagcuggcacuacaggcacccgc

SEQ ID NO: 378798 - RNA, 32 nt, Human
ccucccgaguagcuggcauuacaggcaugugu

SEQ ID NO: 378799 - RNA, 32 nt, Human
ccucccgaguagcuggcauuacaggcgcccac

SEQ ID NO: 378800 - RNA, 32 nt, Human
ccucccgaguagcuggcauuacaggcgccugc

SEQ ID NO: 378801 - RNA, 32 nt, Human
ccucccgaguagcugggacaacagguacgcac

SEQ ID NO: 378802 - RNA, 32 nt, Human
ccucccgaguagcugggaccacaggggcccac

SEQ ID NO: 378803 - RNA, 32 nt, Human
ccucccgaguagcugggaccacaggugccuac

SEQ ID NO: 378804 - RNA, 32 nt, Human
ccucccgaguagcugggaccacagguguaugg

SEQ ID NO: 378805 - RNA, 32 nt, Human
ccucccgaguagcugggaccgcgggugugugc

SEQ ID NO: 378806 - RNA, 32 nt, Human
ccucccgaguagcugggacuacaagcggcugc

SEQ ID NO: 378807 - RNA, 32 nt, Human
ccucccgaguagcugggacuacaagugugcac

SEQ ID NO: 378808 - RNA, 32 nt, Human
ccucccgaguagcugggacuacacccagcuaa

SEQ ID NO: 378809 - RNA, 32 nt, Human
ccucccgaguagcugggacuacagaagugcac

SEQ ID NO: 378810 - RNA, 32 nt, Human
ccucccgaguagcugggacuacagacacccgc

SEQ ID NO: 378811 - RNA, 32 nt, Human
ccucccgaguagcugggacuacagagucuugc

SEQ ID NO: 378812 - RNA, 32 nt, Human
ccucccgaguagcugggacuacaggagcgugc

SEQ ID NO: 378813 - RNA, 32 nt, Human
ccucccgaguagcugggacuacaggagcgugu

SEQ ID NO: 378814 - RNA, 32 nt, Human
ccucccgaguagcugggacuacaggcacaagu

SEQ ID NO: 378815 - RNA, 32 nt, Human
ccucccgaguagcugggacuacaggcacccac

SEQ ID NO: 378816 - RNA, 32 nt, Human
ccucccgaguagcugggacuacaggcacccgc

SEQ ID NO: 378817 - RNA, 32 nt, Human
ccucccgaguagcugggacuacaggcaccugc

SEQ ID NO: 378818 - RNA, 32 nt, Human
ccucccgaguagcugggacuacaggcacgugc

SEQ ID NO: 378819 - RNA, 32 nt, Human
ccucccgaguagcugggacuacaggcacgugu

SEQ ID NO: 378820 - RNA, 32 nt, Human
ccucccgaguagcugggacuacaggcaggcgc

SEQ ID NO: 378821 - RNA, 32 nt, Human
ccucccgaguagcugggacuacaggcaugcac

SEQ ID NO: 378822 - RNA, 32 nt, Human
ccucccgaguagcugggacuacaggcaugugc

SEQ ID NO: 378823 - RNA, 32 nt, Human
ccucccgaguagcugggacuacaggcgccacc

SEQ ID NO: 378824 - RNA, 32 nt, Human
ccucccgaguagcugggacuacaggcgcccac

SEQ ID NO: 378825 - RNA, 32 nt, Human
ccucccgaguagcugggacuacaggcgcccgc

SEQ ID NO: 378826 - RNA, 32 nt, Human
ccucccgaguagcugggacuacaggcgcccgg

SEQ ID NO: 378827 - RNA, 32 nt, Human
ccucccgaguagcugggacuacaggcgccuau

SEQ ID NO: 378828 - RNA, 32 nt, Human
ccucccgaguagcugggacuacaggcgccugc

SEQ ID NO: 378829 - RNA, 32 nt, Human
ccucccgaguagcugggacuacaggcgcgugc

SEQ ID NO: 378830 - RNA, 32 nt, Human
ccucccgaguagcugggacuacaggcggccgc

SEQ ID NO: 378831 - RNA, 32 nt, Human
ccucccgaguagcugggacuacaggcguccac

SEQ ID NO: 378832 - RNA, 32 nt, Human
ccucccgaguagcugggacuacaggcgugcau

SEQ ID NO: 378833 - RNA, 32 nt, Human
ccucccgaguagcugggacuacaggcguggcc

SEQ ID NO: 378834 - RNA, 32 nt, Human
ccucccgaguagcugggacuacaggcgugugc

SEQ ID NO: 378835 - RNA, 32 nt, Human
ccucccgaguagcugggacuacaggggcccgc

SEQ ID NO: 378836 - RNA, 32 nt, Human
ccucccgaguagcugggacuacagguacccac

SEQ ID NO: 378837 - RNA, 32 nt, Human
ccucccgaguagcugggacuacaggugcacac

SEQ ID NO: 378838 - RNA, 32 nt, Human
ccucccgaguagcugggacuacaggugcaugc

SEQ ID NO: 378839 - RNA, 32 nt, Human
ccucccgaguagcugggacuacaggugccauc

SEQ ID NO: 378840 - RNA, 32 nt, Human
ccucccgaguagcugggacuacaggugcccac

SEQ ID NO: 378841 - RNA, 32 nt, Human
ccucccgaguagcugggacuacaggugcccgc

SEQ ID NO: 378842 - RNA, 32 nt, Human
ccucccgaguagcugggacuacaggugcccuc

SEQ ID NO: 378843 - RNA, 32 nt, Human
ccucccgaguagcugggacuacaggugccugc

SEQ ID NO: 378844 - RNA, 32 nt, Human
ccucccgaguagcugggacuacagguguccac

SEQ ID NO: 378845 - RNA, 32 nt, Human
ccucccgaguagcugggacuacaggugugcca

SEQ ID NO: 378846 - RNA, 32 nt, Human
ccucccgaguagcugggacuacaggugugcgc

SEQ ID NO: 378847 - RNA, 32 nt, Human
ccucccgaguagcugggacuacaggugugggc

SEQ ID NO: 378848 - RNA, 32 nt, Human
ccucccgaguagcugggacuacgggcacgcac

SEQ ID NO: 378849 - RNA, 32 nt, Human
ccucccgaguagcugggacuacugguacaugc

SEQ ID NO: 378850 - RNA, 32 nt, Human
ccucccgaguagcugggacuauagaugcgcca

SEQ ID NO: 378851 - RNA, 32 nt, Human
ccucccgaguagcugggacuauaggcgcccac

SEQ ID NO: 378852 - RNA, 32 nt, Human
ccucccgaguagcugggacuauaggugggcgc

SEQ ID NO: 378853 - RNA, 32 nt, Human
ccucccgaguagcugggacuauaggugugugc

SEQ ID NO: 378854 - RNA, 32 nt, Human
ccucccgaguagcugggacugcaggcacacac

SEQ ID NO: 378855 - RNA, 32 nt, Human
ccucccgaguagcugggacugcaggugugugc

SEQ ID NO: 378856 - RNA, 32 nt, Human
ccucccgaguagcugggacuggaggcgugugc

SEQ ID NO: 378857 - RNA, 32 nt, Human
ccucccgaguagcugggaguacaggcacacac

SEQ ID NO: 378858 - RNA, 32 nt, Human
ccucccgaguagcugggaguacaggugcacac

SEQ ID NO: 378859 - RNA, 32 nt, Human
ccucccgaguagcugggagugcaggugcacac

SEQ ID NO: 378860 - RNA, 32 nt, Human
ccucccgaguagcugggaucacaggugugcgc

SEQ ID NO: 378861 - RNA, 32 nt, Human
ccucccgaguagcugggauuacaagcacccac

SEQ ID NO: 378862 - RNA, 32 nt, Human
ccucccgaguagcugggauuacaagugcacac

SEQ ID NO: 378863 - RNA, 32 nt, Human
ccucccgaguagcugggauuacaagugcgcac

SEQ ID NO: 378864 - RNA, 32 nt, Human
ccucccgaguagcugggauuacagacaugugc

SEQ ID NO: 378865 - RNA, 32 nt, Human
ccucccgaguagcugggauuacagccugaauu

SEQ ID NO: 378866 - RNA, 32 nt, Human
ccucccgaguagcugggauuacaggaagauaa

SEQ ID NO: 378867 - RNA, 32 nt, Human
ccucccgaguagcugggauuacaggaaucugg

SEQ ID NO: 378868 - RNA, 32 nt, Human
ccucccgaguagcugggauuacaggagcgugc

SEQ ID NO: 378869 - RNA, 32 nt, Human
ccucccgaguagcugggauuacaggaggcuga

SEQ ID NO: 378870 - RNA, 32 nt, Human
ccucccgaguagcugggauuacaggaugacgc

SEQ ID NO: 378871 - RNA, 32 nt, Human
ccucccgaguagcugggauuacaggcacacac

SEQ ID NO: 378872 - RNA, 32 nt, Human
ccucccgaguagcugggauuacaggcacacgc

SEQ ID NO: 378873 - RNA, 32 nt, Human
ccucccgaguagcugggauuacaggcacccac

SEQ ID NO: 378874 - RNA, 32 nt, Human
ccucccgaguagcugggauuacaggcacccgc

SEQ ID NO: 378875 - RNA, 32 nt, Human
ccucccgaguagcugggauuacaggcaccugc

SEQ ID NO: 378876 - RNA, 32 nt, Human
ccucccgaguagcugggauuacaggcaccugu

SEQ ID NO: 378877 - RNA, 32 nt, Human
ccucccgaguagcugggauuacaggcacgcac

SEQ ID NO: 378878 - RNA, 32 nt, Human
ccucccgaguagcugggauuacaggcaucugc

SEQ ID NO: 378879 - RNA, 32 nt, Human
ccucccgaguagcugggauuacaggcaugagc

SEQ ID NO: 378880 - RNA, 32 nt, Human
ccucccgaguagcugggauuacaggcaugcac

SEQ ID NO: 378881 - RNA, 32 nt, Human
ccucccgaguagcugggauuacaggcaugcgc

SEQ ID NO: 378882 - RNA, 32 nt, Human
ccucccgaguagcugggauuacaggcaugcuc

SEQ ID NO: 378883 - RNA, 32 nt, Human
ccucccgaguagcugggauuacaggcaugugc

SEQ ID NO: 378884 - RNA, 32 nt, Human
ccucccgaguagcugggauuacaggcgcacgc

SEQ ID NO: 378885 - RNA, 32 nt, Human
ccucccgaguagcugggauuacaggcgcccac

SEQ ID NO: 378886 - RNA, 32 nt, Human
ccucccgaguagcugggauuacaggcgcccgc

SEQ ID NO: 378887 - RNA, 32 nt, Human
ccucccgaguagcugggauuacaggcgccuga

SEQ ID NO: 378888 - RNA, 32 nt, Human
ccucccgaguagcugggauuacaggcgccugc

SEQ ID NO: 378889 - RNA, 32 nt, Human
ccucccgaguagcugggauuacaggcgugcac

SEQ ID NO: 378890 - RNA, 32 nt, Human
ccucccgaguagcugggauuacaggcgugugc

SEQ ID NO: 378891 - RNA, 32 nt, Human
ccucccgaguagcugggauuacaggcgugugu

SEQ ID NO: 378892 - RNA, 32 nt, Human
ccucccgaguagcugggauuacagggugaaga

SEQ ID NO: 378893 - RNA, 32 nt, Human
ccucccgaguagcugggauuacaggugagcac

SEQ ID NO: 378894 - RNA, 32 nt, Human
ccucccgaguagcugggauuacaggugcaugc

SEQ ID NO: 378895 - RNA, 32 nt, Human
ccucccgaguagcugggauuacaggugcccac

SEQ ID NO: 378896 - RNA, 32 nt, Human
ccucccgaguagcugggauuacaggugccugc

SEQ ID NO: 378897 - RNA, 32 nt, Human
ccucccgaguagcugggauuacaggugcgcac

SEQ ID NO: 378898 - RNA, 32 nt, Human
ccucccgaguagcugggauuacaggugcgccc

SEQ ID NO: 378899 - RNA, 32 nt, Human
ccucccgaguagcugggauuacaggugcgcgc

SEQ ID NO: 378900 - RNA, 32 nt, Human
ccucccgaguagcugggauuacagguggugac

SEQ ID NO: 378901 - RNA, 32 nt, Human
ccucccgaguagcugggauuacaggugugcac

SEQ ID NO: 378902 - RNA, 32 nt, Human
ccucccgaguagcugggauuacaggugugggc

SEQ ID NO: 378903 - RNA, 32 nt, Human
ccucccgaguagcugggauuacgggcauaugc

SEQ ID NO: 378904 - RNA, 32 nt, Human
ccucccgaguagcugggauuacgggcgcccgc

SEQ ID NO: 378905 - RNA, 32 nt, Human
ccucccgaguagcugggauuacuggugcccac

SEQ ID NO: 378906 - RNA, 32 nt, Human
ccucccgaguagcugggauuagaggcgccagc

SEQ ID NO: 378907 - RNA, 32 nt, Human
ccucccgaguagcugggauuagaggcgugugc

SEQ ID NO: 378908 - RNA, 32 nt, Human
ccucccgaguagcugggauuauagacacgugc

SEQ ID NO: 378909 - RNA, 32 nt, Human
ccucccgaguagcugggauuauaggcacccgc

SEQ ID NO: 378910 - RNA, 32 nt, Human
ccucccgaguagcugggauuauaggcaccugc

SEQ ID NO: 378911 - RNA, 32 nt, Human
ccucccgaguagcugggauuauaggcgagugc

SEQ ID NO: 378912 - RNA, 32 nt, Human
ccucccgaguagcugggauuaugggcgcccac

SEQ ID NO: 378913 - RNA, 32 nt, Human
ccucccgaguagcugggauuaugggcgcccgc

SEQ ID NO: 378914 - RNA, 32 nt, Human
ccucccgaguagcugggauuccaggcgcccgc

SEQ ID NO: 378915 - RNA, 32 nt, Human
ccucccgaguagcugggauuccaggugcccgc

SEQ ID NO: 378916 - RNA, 32 nt, Human
ccucccgaguagcugggauugcaggagccugg

SEQ ID NO: 378917 - RNA, 32 nt, Human
ccucccgaguagcugggauugcaggcgcccgc

SEQ ID NO: 378918 - RNA, 32 nt, Human
ccucccgaguagcugggauugcagguacccau

SEQ ID NO: 378919 - RNA, 32 nt, Human
ccucccgaguagcugggauugcaggugcccac

SEQ ID NO: 378920 - RNA, 32 nt, Human
ccucccgaguagcugggcuuacgggcacaugc

SEQ ID NO: 378921 - RNA, 32 nt, Human
ccucccgaguagcuggggcuacaggugugugc

SEQ ID NO: 378922 - RNA, 32 nt, Human
ccucccgaguagcugggguuacaggcaugcac

SEQ ID NO: 378923 - RNA, 32 nt, Human
ccucccgaguagcuggguuuacagguaugcac

SEQ ID NO: 378924 - RNA, 32 nt, Human
ccucccgaguagcugguacuacaggcacacau

SEQ ID NO: 378925 - RNA, 32 nt, Human
ccucccgaguagcuuggacuacaggcgugcac

SEQ ID NO: 378926 - RNA, 32 nt, Human
ccucccgaguaggugggauuauaggagcgugc

SEQ ID NO: 378927 - RNA, 32 nt, Human
ccucccgaguaguggaucuaggauccggcuuc

SEQ ID NO: 378928 - RNA, 32 nt, Human
ccucccgaguaguugggauuacaggcgccugc

SEQ ID NO: 378929 - RNA, 32 nt, Human
ccucccgaguaguugggauuacaggugacugc

SEQ ID NO: 378930 - RNA, 32 nt, Human
ccucccgaguaucugggauuauaagcaagagc

SEQ ID NO: 378931 - RNA, 32 nt, Human
ccucccgaguaucuggggcuacaggcauguac

SEQ ID NO: 378932 - RNA, 32 nt, Human
ccucccgagucacugggauuacaggcgcccac

SEQ ID NO: 378933 - RNA, 32 nt, Human
ccucccgagugacucggauuacaggcaugugc

SEQ ID NO: 378934 - RNA, 32 nt, Human
ccucccgaguggcugggauuagcggcaugcac

SEQ ID NO: 378935 - RNA, 23 nt, Human
ccucccgaguugacccccugggg

SEQ ID NO: 378936 - RNA, 32 nt, Human
ccucccgaguugcugggauugcgggcauggug

SEQ ID NO: 378937 - RNA, 32 nt, Human
ccucccgauuagcugggacuacaggcgcccac

SEQ ID NO: 378938 - RNA, 32 nt, Human
ccucccgauuagcugggaucacaggugugcac

SEQ ID NO: 378939 - RNA, 32 nt, Human
ccucccgcaaagcgguuuucugacccucaggg

SEQ ID NO: 378940 - RNA, 32 nt, Human
ccucccgcagccgccgcgggaccggcccccag

SEQ ID NO: 378941 - RNA, 32 nt, Human
ccucccgcagugcugggauuacaggcaugagc

SEQ ID NO: 378942 - RNA, 32 nt, Human
ccucccgccacacaccucuaaucugaauuaca

SEQ ID NO: 378943 - RNA, 32 nt, Human
ccucccgccagccugcccgccugcucgccggc

SEQ ID NO: 378944 - RNA, 32 nt, Human
ccucccgccccgccccucccacgccucaccag

SEQ ID NO: 378945 - RNA, 32 nt, Human
ccucccgcccuucuggccaagcauggcggugc

SEQ ID NO: 378946 - RNA, 15 nt, Human
ccucccgccgcgccg

SEQ ID NO: 378947 - RNA, 32 nt, Human
ccucccgccucagucucccaaagcgcugggau

SEQ ID NO: 378948 - RNA, 32 nt, Human
ccucccgcgccgccaccaugcccaacuucucu

SEQ ID NO: 378949 - RNA, 21 nt, Human
ccucccgcgccuguugguugg

SEQ ID NO: 378950 - RNA, 18 nt, Human
ccucccgcggcuccuucc

SEQ ID NO: 378951 - RNA, 32 nt, Human
ccucccgcuagacucccagccugggcccucug

SEQ ID NO: 378952 - RNA, 21 nt, Human
ccucccgcucaggccacagcc

SEQ ID NO: 378953 - RNA, 32 nt, Human
ccucccgcuccgccgcgcuccagccucgcucu

SEQ ID NO: 378954 - RNA, 32 nt, Human
ccucccgcucucugcgccucagucucccaagc

SEQ ID NO: 378955 - RNA, 32 nt, Human
ccucccgcugacugccccagagccugaaaguc

SEQ ID NO: 378956 - RNA, 32 nt, Human
ccucccggaacaaaagcggaagaggggccagc

SEQ ID NO: 378957 - RNA, 32 nt, Human
ccucccggaacgaaagcggagaagggggccag

SEQ ID NO: 378958 - RNA, 32 nt, Human
ccucccggauagcugggauuacaggcgugcac

SEQ ID NO: 378959 - RNA, 32 nt, Human
ccucccggcccccaugcucccuucucugccau

SEQ ID NO: 378960 - RNA, 20 nt, Human
ccucccggcccccugcuccu

SEQ ID NO: 378961 - RNA, 18 nt, Human
ccucccggccccuccuca

SEQ ID NO: 378962 - RNA, 22 nt, Human
ccucccggcccuugggcugcuc

SEQ ID NO: 378963 - RNA, 22 nt, Human
ccucccggccuggccugcccuu

SEQ ID NO: 378964 - RNA, 19 nt, Human
ccucccggcucgcugcucc

SEQ ID NO: 378965 - RNA, 32 nt, Human
ccucccggcugggcggccccacagacccgcug

SEQ ID NO: 378966 - RNA, 26 nt, Human
ccucccgggaaaacagaggauacagu

SEQ ID NO: 378967 - RNA, 28 nt, Human
ccucccgggaaagcagagguugcaguga

SEQ ID NO: 378968 - RNA, 28 nt, Human
ccucccgggcaagcggagguugcaguga

SEQ ID NO: 378969 - RNA, 32 nt, Human
ccucccgggcgggccuacagccaugucccggg

SEQ ID NO: 378970 - RNA, 32 nt, Human
ccucccgggcuguccgagggaccccaggguac

SEQ ID NO: 378971 - RNA, 28 nt, Human
ccucccggggaagcagagguugcaguga

SEQ ID NO: 378972 - RNA, 28 nt, Human
ccucccggggaagcggagguugcaguga

SEQ ID NO: 378973 - RNA, 32 nt, Human
ccucccggggagcugggaccacaggcacgugc

SEQ ID NO: 378974 - RNA, 32 nt, Human
ccucccggggugcugggauuauaggcgugagc

SEQ ID NO: 378975 - RNA, 32 nt, Human
ccucccgggguuggggacagagcaggugcaga

SEQ ID NO: 378976 - RNA, 28 nt, Human
ccucccggguagacagagguugcaguga

SEQ ID NO: 378977 - RNA, 32 nt, Human
ccucccggguagcugggacuacaggcgccugc

SEQ ID NO: 378978 - RNA, 32 nt, Human
ccucccggguagcugggauuacaggcaugugc

SEQ ID NO: 378979 - RNA, 32 nt, Human
ccucccggguagcugggauugcagacgugcac

SEQ ID NO: 378980 - RNA, 32 nt, Human
ccucccggguagcugguacuacaggcuccugc

SEQ ID NO: 378981 - RNA, 32 nt, Human
ccucccggguccucgggagaugaagcauccgu

SEQ ID NO: 378982 - RNA, 32 nt, Human
ccucccggguggcugggaucacaggcgugcac

SEQ ID NO: 378983 - RNA, 32 nt, Human
ccucccggguggcugggauugcaggcacccac

SEQ ID NO: 378984 - RNA, 28 nt, Human
ccucccggguuugggagguucucagugg

SEQ ID NO: 378985 - RNA, 32 nt, Human
ccucccggucaccuccaaaucuugcugcuuuu

SEQ ID NO: 378986 - RNA, 20 nt, Human
ccucccggugagcugcugcc

SEQ ID NO: 378987 - RNA, 32 nt, Human
ccucccguagccgccuccucccagcagucccc

SEQ ID NO: 378988 - RNA, 21 nt, Human
ccucccguaggaggggggcag

SEQ ID NO: 378989 - RNA, 32 nt, Human
ccucccgucacuccacgcagcuggcagagagc

SEQ ID NO: 378990 - RNA, 32 nt, Human
ccucccgugcugucugucucccccucucuguu

SEQ ID NO: 378991 - RNA, 32 nt, Human
ccucccguguagcugggacuacaggcacgcgc

SEQ ID NO: 378992 - RNA, 32 nt, Human
ccucccguguagcugggauuacaggcgcgcac

SEQ ID NO: 378993 - RNA, 32 nt, Human
ccucccuaacccccuccucccaaaaagcagcc

SEQ ID NO: 378994 - RNA, 32 nt, Human
ccucccuaacccuuaccuucagucuccaccag

SEQ ID NO: 378995 - RNA, 32 nt, Human
ccucccuaagugcugggauuacaggcaugagc

SEQ ID NO: 378996 - RNA, 32 nt, Human
ccucccuaagugcugggauuauaggcgugagc

SEQ ID NO: 378997 - RNA, 32 nt, Human
ccucccuaagugcugggauugcaggcgugagc

SEQ ID NO: 378998 - RNA, 32 nt, Human
ccucccuaaguguugggauuacaggcaugagc

SEQ ID NO: 378999 - RNA, 32 nt, Human
ccucccuaauagcugggacuacaggcaaccac

SEQ ID NO: 379000 - RNA, 32 nt, Human
ccucccuaauaguugggauuacaggcacccgc

SEQ ID NO: 379001 - RNA, 32 nt, Human
ccucccuacccuggcccagcccccugcagggg

SEQ ID NO: 379002 - RNA, 32 nt, Human
ccucccuaccgcuacucuccccaagccugugu

SEQ ID NO: 379003 - RNA, 32 nt, Human
ccucccuaccuguaauuccagucuuugugcau

SEQ ID NO: 379004 - RNA, 32 nt, Human
ccucccuacuuuccuugcuuccuuccuuccuc

SEQ ID NO: 379005 - RNA, 32 nt, Human
ccucccuagcaaugcagaacugugagucaauu

SEQ ID NO: 379006 - RNA, 32 nt, Human
ccucccuaguagcugggacuacagcacccacc

SEQ ID NO: 379007 - RNA, 32 nt, Human
ccucccuaguagcugggacuacaggcacccac

SEQ ID NO: 379008 - RNA, 32 nt, Human
ccucccuaguagcugggacuacaggcaugcac

SEQ ID NO: 379009 - RNA, 32 nt, Human
ccucccuaguagcugggacuacagguaugcac

SEQ ID NO: 379010 - RNA, 32 nt, Human
ccucccuaguagcugggaugacaagcacacgc

SEQ ID NO: 379011 - RNA, 32 nt, Human
ccucccuaguagcugggaugacaggcgccugc

SEQ ID NO: 379012 - RNA, 32 nt, Human
ccucccuaguagcugggauuacagccaugcac

SEQ ID NO: 379013 - RNA, 32 nt, Human
ccucccuaguagcugggauuacaggcacacac

SEQ ID NO: 379014 - RNA, 32 nt, Human
ccucccuaguagcugggauuacaggcaugcac

SEQ ID NO: 379015 - RNA, 32 nt, Human
ccucccuaguagcugggauuacaggcaugugc

SEQ ID NO: 379016 - RNA, 32 nt, Human
ccucccuaguagcugggauuacaggcgcacac

SEQ ID NO: 379017 - RNA, 32 nt, Human
ccucccuaguagcugggauuacaggcgcccgc

SEQ ID NO: 379018 - RNA, 32 nt, Human
ccucccuaguagcugggauuacaggugcacac

SEQ ID NO: 379019 - RNA, 32 nt, Human
ccucccuaguagcugggauuauaggcgccccc

SEQ ID NO: 379020 - RNA, 32 nt, Human
ccucccuaguaucugugauuacaggcacgugc

SEQ ID NO: 379021 - RNA, 32 nt, Human
ccucccuaguggcugggauuacaggcgccugc

SEQ ID NO: 379022 - RNA, 32 nt, Human
ccucccuaucacugcuacuggcucuugguccc

SEQ ID NO: 379023 - RNA, 32 nt, Human
ccucccuaucucuguguaucuggauggcagcc

SEQ ID NO: 379024 - RNA, 32 nt, Human
ccucccuaugggaggcagagcggcaaggacag

SEQ ID NO: 379025 - RNA, 32 nt, Human
ccucccuauuaagcucaucccaccucauggau

SEQ ID NO: 379026 - RNA, 20 nt, Human
ccucccuauuuucuuaggga

SEQ ID NO: 379027 - RNA, 32 nt, Human
ccucccucaccgcacaacucucuuucaccacg

SEQ ID NO: 379028 - RNA, 22 nt, Human
ccucccucacuacugggugcug

SEQ ID NO: 379029 - RNA, 24 nt, Human
ccucccucagagcuggggcagcug

SEQ ID NO: 379030 - RNA, 20 nt, Human
ccucccucagccccccaguc

SEQ ID NO: 379031 - RNA, 32 nt, Human
ccucccucagccugcaaccucuauccuggaac

SEQ ID NO: 379032 - RNA, 32 nt, Human
ccucccucagcuucagagaugggugaaaucaa

SEQ ID NO: 379033 - RNA, 19 nt, Human
ccucccucaucccuuaggg

SEQ ID NO: 379034 - RNA, 31 nt, Human
ccucccucaucuccucugccugugucugcga

SEQ ID NO: 379035 - RNA, 23 nt, Human
ccucccuccacgcuuagggucug

SEQ ID NO: 379036 - RNA, 16 nt, Human
ccucccuccagaugca

SEQ ID NO: 379037 - RNA, 32 nt, Human
ccucccuccagccacuggaccccagccuuggc

SEQ ID NO: 379038 - RNA, 25 nt, Human
ccucccuccagggcccggggcgcug

SEQ ID NO: 379039 - RNA, 32 nt, Human
ccucccuccagucuccggaucucccucggucc

SEQ ID NO: 379040 - RNA, 32 nt, Human
ccucccucccaagucucuucccuucccacucu

SEQ ID NO: 379041 - RNA, 32 nt, Human
ccucccucccacacucgccaucuccugggccg

SEQ ID NO: 379042 - RNA, 32 nt, Human
ccucccucccacacugccccagcagggcuggc

SEQ ID NO: 379043 - RNA, 32 nt, Human
ccucccucccaccuuccucccaccucaccugu

SEQ ID NO: 379044 - RNA, 32 nt, Human
ccucccucccagcguccacuggcuccaggcuc

SEQ ID NO: 379045 - RNA, 32 nt, Human
ccucccucccagcuccugcaccaggaaacggc

SEQ ID NO: 379046 - RNA, 32 nt, Human
ccucccucccagcuugccagggauuugaugag

SEQ ID NO: 379047 - RNA, 32 nt, Human
ccucccucccaggcacccagcacuuuaagccu

SEQ ID NO: 379048 - RNA, 22 nt, Human
ccucccucccauggaagugcug

SEQ ID NO: 379049 - RNA, 32 nt, Human
ccucccuccccaggcaccacuggaccaauuac

SEQ ID NO: 379050 - RNA, 20 nt, Human
ccucccuccccucccuuccc

SEQ ID NO: 379051 - RNA, 32 nt, Human
ccucccuccccuuccuccucugccacccagug

SEQ ID NO: 379052 - RNA, 32 nt, Human
ccucccucccuagcccuuccagccugggacac

SEQ ID NO: 379053 - RNA, 18 nt, Human
ccucccucccuccagaug

SEQ ID NO: 379054 - RNA, 32 nt, Human
ccucccucccucccuuucuuccuuccuuccuu

SEQ ID NO: 379055 - RNA, 32 nt, Human
ccucccucccugcaauccuuccuucuuauucc

SEQ ID NO: 379056 - RNA, 32 nt, Human
ccucccucccuucaccggcccccucccggcuc

SEQ ID NO: 379057 - RNA, 32 nt, Human
ccucccucccuucaccuuuccucuccuggcgg

SEQ ID NO: 379058 - RNA, 32 nt, Human
ccucccucccuuccuuuccuuuccgcuccucu

SEQ ID NO: 379059 - RNA, 32 nt, Human
ccucccucccuuccuuucuuccuuccuucugu

SEQ ID NO: 379060 - RNA, 32 nt, Human
ccucccucccuuucuuccuuccuuccuugaug

SEQ ID NO: 379061 - RNA, 23 nt, Human
ccucccuccggccugggcugcug

SEQ ID NO: 379062 - RNA, 32 nt, Human
ccucccuccuaggucacacuuuucagaaaaag

SEQ ID NO: 379063 - RNA, 32 nt, Human
ccucccuccucacucccuaggcccaagucucc

SEQ ID NO: 379064 - RNA, 32 nt, Human
ccucccuccucccacccacuggcucccucccc

SEQ ID NO: 379065 - RNA, 32 nt, Human
ccucccuccucccucuggaggugaugugggcc

SEQ ID NO: 379066 - RNA, 21 nt, Human
ccucccuccuccugggugcug

SEQ ID NO: 379067 - RNA, 32 nt, Human
ccucccuccucgucauccucccccuucguccu

SEQ ID NO: 379068 - RNA, 17 nt, Human
ccucccuccucuggugu

SEQ ID NO: 379069 - RNA, 32 nt, Human
ccucccuccugccucuuacucuccagcaccga

SEQ ID NO: 379070 - RNA, 16 nt, Human
ccucccuccugcugcc

SEQ ID NO: 379071 - RNA, 32 nt, Human
ccucccuccuggcuggaguugggagggcccca

SEQ ID NO: 379072 - RNA, 19 nt, Human
ccucccuccuucugccucc

SEQ ID NO: 379073 - RNA, 32 nt, Human
ccucccuccuuuccuguccucccuuucugucc

SEQ ID NO: 379074 - RNA, 32 nt, Human
ccucccuccuuuccuuugcccuuaccugucuc

SEQ ID NO: 379075 - RNA, 32 nt, Human
ccucccucgcaaguagcugggauuacaggcgc

SEQ ID NO: 379076 - RNA, 32 nt, Human
ccucccucucagggcugcgcgcccaggucugc

SEQ ID NO: 379077 - RNA, 32 nt, Human
ccucccucucauucccauccuuccugguacug

SEQ ID NO: 379078 - RNA, 20 nt, Human
ccucccucuccccuccgccc

SEQ ID NO: 379079 - RNA, 32 nt, Human
ccucccucuccccucucuacuuuaauucauug

SEQ ID NO: 379080 - RNA, 32 nt, Human
ccucccucuccuccuccuuccccaggguccca

SEQ ID NO: 379081 - RNA, 32 nt, Human
ccucccucuccuccugaugacuuuucaugcca

SEQ ID NO: 379082 - RNA, 32 nt, Human
ccucccucuccucugcuuccagcaugcucuga

SEQ ID NO: 379083 - RNA, 32 nt, Human
ccucccucuccuuuuugauguuuucuuguccc

SEQ ID NO: 379084 - RNA, 32 nt, Human
ccucccucugacuuccuugucacugcagccag

SEQ ID NO: 379085 - RNA, 22 nt, Human
ccucccucugccccacgguccg

SEQ ID NO: 379086 - RNA, 24 nt, Human
ccucccucugccccccagcagccg

SEQ ID NO: 379087 - RNA, 22 nt, Human
ccucccucugccucuccuuccc

SEQ ID NO: 379088 - RNA, 22 nt, Human
ccucccucugcggugggguccg

SEQ ID NO: 379089 - RNA, 23 nt, Human
ccucccucugcuccagcagugcc

SEQ ID NO: 379090 - RNA, 23 nt, Human
ccucccucugcuccccagcucug

SEQ ID NO: 379091 - RNA, 15 nt, Human
ccucccucugcugcc

SEQ ID NO: 379092 - RNA, 32 nt, Human
ccucccucugcuguguucccacagacagaaac

SEQ ID NO: 379093 - RNA, 23 nt, Human
ccucccucugcuugacggggcug

SEQ ID NO: 379094 - RNA, 32 nt, Human
ccucccucuggccccuucucccauggggacau

SEQ ID NO: 379095 - RNA, 32 nt, Human
ccucccucuggggaugaagugggaguauuugg

SEQ ID NO: 379096 - RNA, 17 nt, Human
ccucccucugucaccca

SEQ ID NO: 379097 - RNA, 32 nt, Human
ccucccucuguccaccagcccaugucccugug

SEQ ID NO: 379098 - RNA, 21 nt, Human
ccucccucuguccccgcgucg

SEQ ID NO: 379099 - RNA, 22 nt, Human
ccucccucuguccuugagguug

SEQ ID NO: 379100 - RNA, 23 nt, Human
ccucccucugucucuggagugcc

SEQ ID NO: 379101 - RNA, 23 nt, Human
ccucccucugucuucaggcucug

SEQ ID NO: 379102 - RNA, 32 nt, Human
ccucccucuguuccccgaccucagacccuggg

SEQ ID NO: 379103 - RNA, 19 nt, Human
ccucccucuguugucugcc

SEQ ID NO: 379104 - RNA, 32 nt, Human
ccucccucuguugucugccugugugacacaca

SEQ ID NO: 379105 - RNA, 32 nt, Human
ccucccucuuccagacugcacucucugucauc

SEQ ID NO: 379106 - RNA, 32 nt, Human
ccucccucuucccucacuccugacucuuccuc

SEQ ID NO: 379107 - RNA, 32 nt, Human
ccucccucuuggggcuuuccucaggccacauu

SEQ ID NO: 379108 - RNA, 32 nt, Human
ccucccucuuucccacccuccaccucucacgg

SEQ ID NO: 379109 - RNA, 32 nt, Human
ccucccucuuucuuccuccgcucuuucucuuc

SEQ ID NO: 379110 - RNA, 32 nt, Human
ccucccugaaaccuccuacaguuucugaagaa

SEQ ID NO: 379111 - RNA, 32 nt, Human
ccucccugaacuguccauugcuuuuauagggu

SEQ ID NO: 379112 - RNA, 32 nt, Human
ccucccugaagggaccaaggaggcagguggau

SEQ ID NO: 379113 - RNA, 32 nt, Human
ccucccugaccuggaacucuggcuacagccau

SEQ ID NO: 379114 - RNA, 21 nt, Human
ccucccugacuuuagaggcug

SEQ ID NO: 379115 - RNA, 32 nt, Human
ccucccugagaguccccucccuucucccacac

SEQ ID NO: 379116 - RNA, 32 nt, Human
ccucccugagccacgaggauggagcagccacc

SEQ ID NO: 379117 - RNA, 32 nt, Human
ccucccugaggaccucagacccucucuuccau

SEQ ID NO: 379118 - RNA, 32 nt, Human
ccucccugagggcuggcacugccucccggauc

SEQ ID NO: 379119 - RNA, 18 nt, Human
ccucccugaggucccuca

SEQ ID NO: 379120 - RNA, 26 nt, Human
ccucccugauccccuucauuucuuca

SEQ ID NO: 379121 - RNA, 20 nt, Human
ccucccugcaacaccgagug

SEQ ID NO: 379122 - RNA, 32 nt, Human
ccucccugcacccaugugccugggcuuccccu

SEQ ID NO: 379123 - RNA, 32 nt, Human
ccucccugcagcaccucgccuccuccaggcaa

SEQ ID NO: 379124 - RNA, 32 nt, Human
ccucccugcauugaggccuuguggaccccugg

SEQ ID NO: 379125 - RNA, 32 nt, Human
ccucccugccaaccuccuccucccugcccagc

SEQ ID NO: 379126 - RNA, 32 nt, Human
ccucccugccaagaaucugagagaggccgagu

SEQ ID NO: 379127 - RNA, 32 nt, Human
ccucccugccaccuccccguguuuccaaguca

SEQ ID NO: 379128 - RNA, 32 nt, Human
ccucccugccaugcugggguccuacccagccu

SEQ ID NO: 379129 - RNA, 32 nt, Human
ccucccugcccuccuccucccugggccuucac

SEQ ID NO: 379130 - RNA, 32 nt, Human
ccucccugccuagguuacaugcaguggucauc

SEQ ID NO: 379131 - RNA, 32 nt, Human
ccucccugccucccuuucuuccuuccuuuuua

SEQ ID NO: 379132 - RNA, 31 nt, Human
ccucccugccucuuuguacuuugcucuuuau

SEQ ID NO: 379133 - RNA, 22 nt, Human
ccucccugccuguccuugggga

SEQ ID NO: 379134 - RNA, 32 nt, Human
ccucccugccuuggucccgccaacacaugcga

SEQ ID NO: 379135 - RNA, 19 nt, Human
ccucccugccuuguguccu

SEQ ID NO: 379136 - RNA, 32 nt, Human
ccucccugcgagcuuuuccucugcagagccca

SEQ ID NO: 379137 - RNA, 19 nt, Human
ccucccugcuccaagugca

SEQ ID NO: 379138 - RNA, 22 nt, Human
ccucccugcucucgggccucca

SEQ ID NO: 379139 - RNA, 32 nt, Human
ccucccugcucugcaaccuuucucuucucacg

SEQ ID NO: 379140 - RNA, 32 nt, Human
ccucccugcuggucuugucccucugccccucc

SEQ ID NO: 379141 - RNA, 32 nt, Human
ccucccugcugucauuggcucucccuccaggc

SEQ ID NO: 379142 - RNA, 32 nt, Human
ccucccugcuucaagcuauucucccaccucau

SEQ ID NO: 379143 - RNA, 32 nt, Human
ccucccugcuuccucuggcggaggcggcagga

SEQ ID NO: 379144 - RNA, 32 nt, Human
ccucccugcuuugcauuaacucaucagcaagc

SEQ ID NO: 379145 - RNA, 32 nt, Human
ccucccuggccagccucccucacuucuuucag

SEQ ID NO: 379146 - RNA, 32 nt, Human
ccucccuggcuacauggucaaaaagcuccuug

SEQ ID NO: 379147 - RNA, 29 nt, Human
ccucccuggcugcuuccucucgcucaucc

SEQ ID NO: 379148 - RNA, 32 nt, Human
ccucccugggggacccucgaaggaggcuguca

SEQ ID NO: 379149 - RNA, 32 nt, Human
ccucccuggguuucacaaacagccuugagguu

SEQ ID NO: 379150 - RNA, 32 nt, Human
ccucccugguagcugggauuacaggugugagc

SEQ ID NO: 379151 - RNA, 20 nt, Human
ccucccuggucccuuggaga

SEQ ID NO: 379152 - RNA, 18 nt, Human
ccucccugucccuccuca

SEQ ID NO: 379153 - RNA, 32 nt, Human
ccucccugucugagagaggaggcaggagcccc

SEQ ID NO: 379154 - RNA, 32 nt, Human
ccucccugucugcacugcccaggccagagggu

SEQ ID NO: 379155 - RNA, 32 nt, Human
ccucccugucuguguccauguguuugcauugu

SEQ ID NO: 379156 - RNA, 32 nt, Human
ccucccugugacccguuccauaucccuuucuc

SEQ ID NO: 379157 - RNA, 19 nt, Human
ccucccugugacuaccuca

SEQ ID NO: 379158 - RNA, 32 nt, Human
ccucccugugccggacuccagccggggcgacg

SEQ ID NO: 379159 - RNA, 32 nt, Human
ccucccugugccuucuccaggcccaguucuuc

SEQ ID NO: 379160 - RNA, 32 nt, Human
ccucccuguggcccaaggcucucuucacacuc

SEQ ID NO: 379161 - RNA, 32 nt, Human
ccucccuguggcugaaguguucugaggacugg

SEQ ID NO: 379162 - RNA, 19 nt, Human
ccucccuguggguuugcug

SEQ ID NO: 379163 - RNA, 32 nt, Human
ccucccugugugaccugcccacccaacuccug

SEQ ID NO: 379164 - RNA, 32 nt, Human
ccucccuguuaucugcuagaucuaguucucaa

SEQ ID NO: 379165 - RNA, 32 nt, Human
ccucccuuauucuucuuacuuaaucucagacc

SEQ ID NO: 379166 - RNA, 16 nt, Human
ccucccuucccagguc

SEQ ID NO: 379167 - RNA, 32 nt, Human
ccucccuucccccacuccccacugaccucccu

SEQ ID NO: 379168 - RNA, 32 nt, Human
ccucccuucccccucgccgccgaccgaguucu

SEQ ID NO: 379169 - RNA, 32 nt, Human
ccucccuucccccuggcagguagagacucuac

SEQ ID NO: 379170 - RNA, 32 nt, Human
ccucccuucccugccucuugccugugucccag

SEQ ID NO: 379171 - RNA, 32 nt, Human
ccucccuucccuggccccuucccucucaguga

SEQ ID NO: 379172 - RNA, 32 nt, Human
ccucccuuccgcuccugcccagccugggggaa

SEQ ID NO: 379173 - RNA, 21 nt, Human
ccucccuuccguaaagugcug

SEQ ID NO: 379174 - RNA, 21 nt, Human
ccucccuuccuggcuugggga

SEQ ID NO: 379175 - RNA, 32 nt, Human
ccucccuuccuuccuuccuuccuuccuuccuu

SEQ ID NO: 379176 - RNA, 32 nt, Human
ccucccuucgucucugucugugcuguuggcga

SEQ ID NO: 379177 - RNA, 32 nt, Human
ccucccuucgugugccccugcccagccucuug

SEQ ID NO: 379178 - RNA, 32 nt, Human
ccucccuucuccgcccccuccccuggcuuuga

SEQ ID NO: 379179 - RNA, 32 nt, Human
ccucccuucugaaucgaaguucaagucccgcg

SEQ ID NO: 379180 - RNA, 32 nt, Human
ccucccuucuguguccccuugaggguacccug

SEQ ID NO: 379181 - RNA, 32 nt, Human
ccucccuucuucccuuccaucucccccuccuc

SEQ ID NO: 379182 - RNA, 32 nt, Human
ccucccuucuuccuuuccaaccccuuccuucc

SEQ ID NO: 379183 - RNA, 20 nt, Human
ccucccuucuuuauugggga

SEQ ID NO: 379184 - RNA, 32 nt, Human
ccucccuugcucagugccuccuggccggggcc

SEQ ID NO: 379185 - RNA, 32 nt, Human
ccucccuuggcguggagccagggagcggccgc

SEQ ID NO: 379186 - RNA, 32 nt, Human
ccucccuuguggaugggaggaggcgggaucug

SEQ ID NO: 379187 - RNA, 32 nt, Human
ccucccuuuagcuaugcccacagaucacugag

SEQ ID NO: 379188 - RNA, 32 nt, Human
ccucccuuucccugcucugccugcgggcacug

SEQ ID NO: 379189 - RNA, 32 nt, Human
ccucccuuuccuggaggagccugcugcauucu

SEQ ID NO: 379190 - RNA, 32 nt, Human
ccucccuuucuuccuuccccugagcgccuugg

SEQ ID NO: 379191 - RNA, 23 nt, Human
ccucccuuugccucuaccuggcc

SEQ ID NO: 379192 - RNA, 19 nt, Human
ccucccuuugccuuugagu

SEQ ID NO: 379193 - RNA, 23 nt, Human
ccucccuuuguaaugcugcuccu

SEQ ID NO: 379194 - RNA, 16 nt, Human
ccucccuuuuagguga

SEQ ID NO: 379195 - RNA, 32 nt, Human
ccucccuuuuuacaaucucuguccagcaccuc

SEQ ID NO: 379196 - RNA, 32 nt, Human
ccuccgaaacccacucgggugcacgggucguc

SEQ ID NO: 379197 - RNA, 24 nt, Human
ccuccgaaaccccaacccugaggg

SEQ ID NO: 379198 - RNA, 32 nt, Human
ccuccgaaagugcugagauuacaguugcgagc

SEQ ID NO: 379199 - RNA, 32 nt, Human
ccuccgaaagugcugggauuacaggcgugagc

SEQ ID NO: 379200 - RNA, 32 nt, Human
ccuccgaagccaugcggaacugugagucaguu

SEQ ID NO: 379201 - RNA, 21 nt, Human
ccuccgaagcugcgcuccugg

SEQ ID NO: 379202 - RNA, 32 nt, Human
ccuccgaaguagcugggaauuacaggcaccca

SEQ ID NO: 379203 - RNA, 32 nt, Human
ccuccgaaguagcugggauuacaggcgcccgc

SEQ ID NO: 379204 - RNA, 32 nt, Human
ccuccgacccccacccuaccccggcuggagua

SEQ ID NO: 379205 - RNA, 32 nt, Human
ccuccgacccucccaugcgggugcacacgaag

SEQ ID NO: 379206 - RNA, 32 nt, Human
ccuccgaccuguguaggguguggacccaguaa

SEQ ID NO: 379207 - RNA, 25 nt, Human
ccuccgacucuaaacaagggacuug

SEQ ID NO: 379208 - RNA, 32 nt, Human
ccuccgacucuuucgcccgccugguggagcug

SEQ ID NO: 379209 - RNA, 32 nt, Human
ccuccgagacccaggcugagcccaguccccuc

SEQ ID NO: 379210 - RNA, 32 nt, Human
ccuccgagcagcccggggauccagcacgcagg

SEQ ID NO: 379211 - RNA, 32 nt, Human
ccuccgagcccgccgccacauccucugagaag

SEQ ID NO: 379212 - RNA, 32 nt, Human
ccuccgagcugcaaggagggugcgcuggagga

SEQ ID NO: 379213 - RNA, 32 nt, Human
ccuccgaggaacugggcgcuugcagugcguug

SEQ ID NO: 379214 - RNA, 32 nt, Human
ccuccgaggaagagaagaauggcagugaagag

SEQ ID NO: 379215 - RNA, 20 nt, Human
ccuccgaggcccccagcugg

SEQ ID NO: 379216 - RNA, 32 nt, Human
ccuccgaugccuggccugccagacacugcgcc

SEQ ID NO: 379217 - RNA, 24 nt, Human
ccuccgauugucccuuggggguua

SEQ ID NO: 379218 - RNA, 24 nt, Human
ccuccgauuucauccucagacgua

SEQ ID NO: 379219 - RNA, 32 nt, Human
ccuccgcacacaccccaccccagccugcuaua

SEQ ID NO: 379220 - RNA, 32 nt, Human
ccuccgcaccacugaccucuugucuccuauug

SEQ ID NO: 379221 - RNA, 32 nt, Human
ccuccgcaccacugaccucuugucuccuguug

SEQ ID NO: 379222 - RNA, 32 nt, Human
ccuccgcacccguuaaguucuccggucgggcg

SEQ ID NO: 379223 - RNA, 32 nt, Human
ccuccgcaccuugagcauuaggccaguucucc

SEQ ID NO: 379224 - RNA, 18 nt, Human
ccuccgcacuguuaccca

SEQ ID NO: 379225 - RNA, 32 nt, Human
ccuccgcagaugagguuccugccccuuccucc

SEQ ID NO: 379226 - RNA, 32 nt, Human
ccuccgcagcagcccggcagacugccucuguc

SEQ ID NO: 379227 - RNA, 32 nt, Human
ccuccgcaguagcugggacuacaggcaugcac

SEQ ID NO: 379228 - RNA, 32 nt, Human
ccuccgccacagccacagccccugccccugcu

SEQ ID NO: 379229 - RNA, 32 nt, Human
ccuccgccacauccuccaccucucuuggucca

SEQ ID NO: 379230 - RNA, 32 nt, Human
ccuccgccacccuccuggaauauggccuaggc

SEQ ID NO: 379231 - RNA, 18 nt, Human
ccuccgccaccgccgccg

SEQ ID NO: 379232 - RNA, 16 nt, Human
ccuccgccaccggccg

SEQ ID NO: 379233 - RNA, 32 nt, Human
ccuccgccagaccucacuggccuggcuggacc

SEQ ID NO: 379234 - RNA, 19 nt, Human
ccuccgccagccgccucca

SEQ ID NO: 379235 - RNA, 19 nt, Human
ccuccgcccaggcccucca

SEQ ID NO: 379236 - RNA, 22 nt, Human
ccuccgcccccucuggaggcug

SEQ ID NO: 379237 - RNA, 16 nt, Human
ccuccgccccuguccu

SEQ ID NO: 379238 - RNA, 32 nt, Human
ccuccgcccgcccgccugccugccugcccgcc

SEQ ID NO: 379239 - RNA, 16 nt, Human
ccuccgcccgcugcug

SEQ ID NO: 379240 - RNA, 32 nt, Human
ccuccgcccucccccauucacacuagccuaua

SEQ ID NO: 379241 - RNA, 32 nt, Human
ccuccgcccuuuccucuccccaccuuccucuc

SEQ ID NO: 379242 - RNA, 32 nt, Human
ccuccgccgaggcgcgagguugcggcgcgcag

SEQ ID NO: 379243 - RNA, 32 nt, Human
ccuccgccuccacccccauccuggaacccugg

SEQ ID NO: 379244 - RNA, 32 nt, Human
ccuccgccuccaccucccccugccacagaggg

SEQ ID NO: 379245 - RNA, 32 nt, Human
ccuccgccuccaggaagaccagacucccaccc

SEQ ID NO: 379246 - RNA, 32 nt, Human
ccuccgccuccccugggguuucccuuucggcg

SEQ ID NO: 379247 - RNA, 21 nt, Human
ccuccgccucccucucgggca

SEQ ID NO: 379248 - RNA, 32 nt, Human
ccuccgccuccuccuccuccucuuccuccucc

SEQ ID NO: 379249 - RNA, 32 nt, Human
ccuccgccuccuggcccugccucuauuuauug

SEQ ID NO: 379250 - RNA, 32 nt, Human
ccuccgccuccuggggucaggcuguucuccug

SEQ ID NO: 379251 - RNA, 32 nt, Human
ccuccgccucugcacuccagccugggugacaa

SEQ ID NO: 379252 - RNA, 32 nt, Human
ccuccgccuuccugaguucaagcgauucuccu

SEQ ID NO: 379253 - RNA, 32 nt, Human
ccuccgccuuccugguucaagugauucuccug

SEQ ID NO: 379254 - RNA, 32 nt, Human
ccuccgcgagccccaaccaguagacgguuccc

SEQ ID NO: 379255 - RNA, 32 nt, Human
ccuccgcgauggcagagguggaggaaaccuua

SEQ ID NO: 379256 - RNA, 32 nt, Human
ccuccgcggcggguuugggugcaguggacccg

SEQ ID NO: 379257 - RNA, 32 nt, Human
ccuccgcggggcagcgucuccgggccggccgc

SEQ ID NO: 379258 - RNA, 32 nt, Human
ccuccgcgucccucgccccagcccccugcccg

SEQ ID NO: 379259 - RNA, 32 nt, Human
ccuccgcguggcucacuccagccucggauguu

SEQ ID NO: 379260 - RNA, 19 nt, Human
ccuccgcucaauuuacuua

SEQ ID NO: 379261 - RNA, 32 nt, Human
ccuccgcuccucucccccgccccucccgggcc

SEQ ID NO: 379262 - RNA, 32 nt, Human
ccuccgcucugcccugguagcccuucacgaag

SEQ ID NO: 379263 - RNA, 32 nt, Human
ccuccgcugcccggcccugcgccccgccgagc

SEQ ID NO: 379264 - RNA, 32 nt, Human
ccuccgcugggaggaaccugaaccugggaacc

SEQ ID NO: 379265 - RNA, 32 nt, Human
ccuccgcuguaaccagcuggucuggguguagc

SEQ ID NO: 379266 - RNA, 32 nt, Human
ccuccgcuguccaguuccuccugcugcggccu

SEQ ID NO: 379267 - RNA, 32 nt, Human
ccuccgcuuccucuccuaggcgacgagaccca

SEQ ID NO: 379268 - RNA, 18 nt, Human
ccuccgcuugccgcugcu

SEQ ID NO: 379269 - RNA, 32 nt, Human
ccuccggaagugcugggauuacaggcgugagc

SEQ ID NO: 379270 - RNA, 32 nt, Human
ccuccggacccgauccugcagcucuuucugga

SEQ ID NO: 379271 - RNA, 32 nt, Human
ccuccggaccuaccucagggagcugagcgugc

SEQ ID NO: 379272 - RNA, 32 nt, Human
ccuccggacuccugcacgaccugcuccuacag

SEQ ID NO: 379273 - RNA, 32 nt, Human
ccuccggaggggccagucugggccugacaccc

SEQ ID NO: 379274 - RNA, 32 nt, Human
ccuccggaggggucuugguguccucugacuuc

SEQ ID NO: 379275 - RNA, 32 nt, Human
ccuccggaguaacuggcauuacaggcgccugc

SEQ ID NO: 379276 - RNA, 32 nt, Human
ccuccggaguagcugcgacuacaggcgcgcac

SEQ ID NO: 379277 - RNA, 32 nt, Human
ccuccggaguagcugggaauacaggugcaggc

SEQ ID NO: 379278 - RNA, 32 nt, Human
ccuccggaguagcugggaccacaggcgcccac

SEQ ID NO: 379279 - RNA, 32 nt, Human
ccuccggaguagcugggaccacagguucaugc

SEQ ID NO: 379280 - RNA, 32 nt, Human
ccuccggaguagcugggauuacaggcacaugc

SEQ ID NO: 379281 - RNA, 32 nt, Human
ccuccggaguagcugggauuacaggcacgugc

SEQ ID NO: 379282 - RNA, 32 nt, Human
ccuccggaguagcugggauuacaggcaugcac

SEQ ID NO: 379283 - RNA, 32 nt, Human
ccuccggaguagcugggauuacaggcgccugc

SEQ ID NO: 379284 - RNA, 32 nt, Human
ccuccggaguagcugggauuacaggcgugcgc

SEQ ID NO: 379285 - RNA, 32 nt, Human
ccuccggaguagcugggauugcaggcacccgc

SEQ ID NO: 379286 - RNA, 32 nt, Human
ccuccggaguagcugggguuacaggcacgggc

SEQ ID NO: 379287 - RNA, 32 nt, Human
ccuccggccagcugccugcccucuugucugug

SEQ ID NO: 379288 - RNA, 32 nt, Human
ccuccggccgguccccagcugcaguggcugcc

SEQ ID NO: 379289 - RNA, 21 nt, Human
ccuccggccucggccccgccc

SEQ ID NO: 379290 - RNA, 32 nt, Human
ccuccggccugcacucccccaguucccgggcc

SEQ ID NO: 379291 - RNA, 32 nt, Human
ccuccggccugggaguggcucaucccgcaccu

SEQ ID NO: 379292 - RNA, 32 nt, Human
ccuccggcgggggcgagggccacccaccucca

SEQ ID NO: 379293 - RNA, 32 nt, Human
ccuccggcucccugcauugccuggugagaggg

SEQ ID NO: 379294 - RNA, 22 nt, Human
ccuccggcuccuauggagccua

SEQ ID NO: 379295 - RNA, 23 nt, Human
ccuccggcugggaggggccguag

SEQ ID NO: 379296 - RNA, 20 nt, Human
ccuccggcuggggggcgcgg

SEQ ID NO: 379297 - RNA, 32 nt, Human
ccuccggcuggguggaggaugccaggaagggg

SEQ ID NO: 379298 - RNA, 23 nt, Human
ccuccggcuuccugucggggcuu

SEQ ID NO: 379299 - RNA, 20 nt, Human
ccuccgggagcggcagcagu

SEQ ID NO: 379300 - RNA, 18 nt, Human
ccuccgggaggggcgcgg

SEQ ID NO: 379301 - RNA, 32 nt, Human
ccuccgggccacacccucagcugccucuucag

SEQ ID NO: 379302 - RNA, 32 nt, Human
ccuccgggcccagcucuuccucccggcugcau

SEQ ID NO: 379303 - RNA, 32 nt, Human
ccuccggggagaaaggacacugccccuccccc

SEQ ID NO: 379304 - RNA, 19 nt, Human
ccuccggggaggggcacag

SEQ ID NO: 379305 - RNA, 24 nt, Human
ccuccggggcacgcucggggccug

SEQ ID NO: 379306 - RNA, 21 nt, Human
ccuccggggcagcagcagcgg

SEQ ID NO: 379307 - RNA, 19 nt, Human
ccuccggggggcggugcag

SEQ ID NO: 379308 - RNA, 32 nt, Human
ccuccgggguagcugggaccacaggcacgcgc

SEQ ID NO: 379309 - RNA, 32 nt, Human
ccuccgguaccugauccauagaacagcagaga

SEQ ID NO: 379310 - RNA, 32 nt, Human
ccuccgguuaucaagcaaaaugucucuugugg

SEQ ID NO: 379311 - RNA, 32 nt, Human
ccuccguaacagcugcccugccuacaccugca

SEQ ID NO: 379312 - RNA, 32 nt, Human
ccuccguacuuaucccugcucucccauuucuc

SEQ ID NO: 379313 - RNA, 16 nt, Human
ccuccguagucaccuc

SEQ ID NO: 379314 - RNA, 24 nt, Human
ccuccgucacaccucugggcgcug

SEQ ID NO: 379315 - RNA, 32 nt, Human
ccuccguccacuugagcucugccucuuccucg

SEQ ID NO: 379316 - RNA, 21 nt, Human
ccuccguccccgcccuccagg

SEQ ID NO: 379317 - RNA, 32 nt, Human
ccuccguccucggccccugccucuugcugcug

SEQ ID NO: 379318 - RNA, 32 nt, Human
ccuccguccugagcagccaccuccagggcccu

SEQ ID NO: 379319 - RNA, 32 nt, Human
ccuccgucgccccuccuguuggguaagggugu

SEQ ID NO: 379320 - RNA, 17 nt, Human
ccuccgucgccgcugcc

SEQ ID NO: 379321 - RNA, 32 nt, Human
ccuccgucucucuccauuguguuccgacccau

SEQ ID NO: 379322 - RNA, 32 nt, Human
ccuccgucugcaaugucccuugcacagcccac

SEQ ID NO: 379323 - RNA, 32 nt, Human
ccuccgucuggccucccuucccuuacaaugug

SEQ ID NO: 379324 - RNA, 32 nt, Human
ccuccgucuuccuguggccuuggggcaucacc

SEQ ID NO: 379325 - RNA, 20 nt, Human
ccuccgugaaaccagccuca

SEQ ID NO: 379326 - RNA, 32 nt, Human
ccuccgugaaaccuggggugggacuguccccu

SEQ ID NO: 379327 - RNA, 19 nt, Human
ccuccgugaccuguccucc

SEQ ID NO: 379328 - RNA, 32 nt, Human
ccuccgugcaccuagcaggagugccaggccac

SEQ ID NO: 379329 - RNA, 32 nt, Human
ccuccgugcauagcucugccuuugggucuugu

SEQ ID NO: 379330 - RNA, 32 nt, Human
ccuccgugcgccgcugccccagaaggcucuua

SEQ ID NO: 379331 - RNA, 20 nt, Human
ccuccguggaauggagcuca

SEQ ID NO: 379332 - RNA, 19 nt, Human
ccuccguggacucacucca

SEQ ID NO: 379333 - RNA, 19 nt, Human
ccuccguggcaucaccuua

SEQ ID NO: 379334 - RNA, 32 nt, Human
ccuccgugggcagcuccucggguggggccugc

SEQ ID NO: 379335 - RNA, 19 nt, Human
ccuccgugggcugcaccca

SEQ ID NO: 379336 - RNA, 32 nt, Human
ccuccgugugaagacauccaacauccacguga

SEQ ID NO: 379337 - RNA, 32 nt, Human
ccuccguguuuggggugggggagcugcuuaga

SEQ ID NO: 379338 - RNA, 32 nt, Human
ccuccguuccccucagccucugagcugaggcc

SEQ ID NO: 379339 - RNA, 32 nt, Human
ccuccguugaaugcaagcucucuucugccuuc

SEQ ID NO: 379340 - RNA, 24 nt, Human
ccuccguuguugcgugagaacccg

SEQ ID NO: 379341 - RNA, 32 nt, Human
ccuccuaaacauucguacacacacaaacacaa

SEQ ID NO: 379342 - RNA, 32 nt, Human
ccuccuaaaguacugggauuuauaggcauaag

SEQ ID NO: 379343 - RNA, 32 nt, Human
ccuccuaaagugccggauuacagguguaagcc

SEQ ID NO: 379344 - RNA, 32 nt, Human
ccuccuaaagugcugcgauuacaggcaugagc

SEQ ID NO: 379345 - RNA, 32 nt, Human
ccuccuaaagugcugggauuacaggcacgcuc

SEQ ID NO: 379346 - RNA, 32 nt, Human
ccuccuaaagugcugggauuacaggcaucugc

SEQ ID NO: 379347 - RNA, 32 nt, Human
ccuccuaaagugcugggauuacaggcaugagc

SEQ ID NO: 379348 - RNA, 32 nt, Human
ccuccuaaagugcugggauuacaggccugagc

SEQ ID NO: 379349 - RNA, 32 nt, Human
ccuccuaaagugcugggauuacaggcgugaac

SEQ ID NO: 379350 - RNA, 32 nt, Human
ccuccuaaagugcugggauuacaggcgugagc

SEQ ID NO: 379351 - RNA, 32 nt, Human
ccuccuaaagugcugggauuacaggugugagc

SEQ ID NO: 379352 - RNA, 32 nt, Human
ccuccuaaagugcugggauuauaggcaugagu

SEQ ID NO: 379353 - RNA, 32 nt, Human
ccuccuaaaugcugggauuacaggcgugagcc

SEQ ID NO: 379354 - RNA, 32 nt, Human
ccuccuaaccauugagccaaugcauugguguc

SEQ ID NO: 379355 - RNA, 32 nt, Human
ccuccuaacccaaagccagcuguuccaggcuc

SEQ ID NO: 379356 - RNA, 32 nt, Human
ccuccuaaccucuuaagagcagucucuucuga

SEQ ID NO: 379357 - RNA, 32 nt, Human
ccuccuaaguaccugggauuacaggcaugugc

SEQ ID NO: 379358 - RNA, 32 nt, Human
ccuccuaaguagcagggauuacaggcaugcac

SEQ ID NO: 379359 - RNA, 32 nt, Human
ccuccuaaguagcugggauuacaagugcccac

SEQ ID NO: 379360 - RNA, 32 nt, Human
ccuccuaaguagcugggauuacaggaaaugag

SEQ ID NO: 379361 - RNA, 32 nt, Human
ccuccuaaguagcugggauuacaggcacccac

SEQ ID NO: 379362 - RNA, 32 nt, Human
ccuccuaaguagcugggauuacaggcaugcgc

SEQ ID NO: 379363 - RNA, 32 nt, Human
ccuccuaaguagcugggauuacaggcgcgugc

SEQ ID NO: 379364 - RNA, 32 nt, Human
ccuccuaaguaucugggauuacaggcaugugc

SEQ ID NO: 379365 - RNA, 32 nt, Human
ccuccuaagugcugggauuacagacgugagcu

SEQ ID NO: 379366 - RNA, 32 nt, Human
ccuccuaagugcugggauuacaggcgugaacc

SEQ ID NO: 379367 - RNA, 32 nt, Human
ccuccuacaagguuuugaguuggcugcugguu

SEQ ID NO: 379368 - RNA, 32 nt, Human
ccuccuacacaucuauaauccccaccccaugg

SEQ ID NO: 379369 - RNA, 32 nt, Human
ccuccuacagcacuccaccuugggaccuguuu

SEQ ID NO: 379370 - RNA, 32 nt, Human
ccuccuacaguuccucccagcagucccucaac

SEQ ID NO: 379371 - RNA, 24 nt, Human
ccuccuacccagcagcucugaugu

SEQ ID NO: 379372 - RNA, 23 nt, Human
ccuccuaccccaacuuccggucc

SEQ ID NO: 379373 - RNA, 32 nt, Human
ccuccuaccccagagcagcuggcuccauuggc

SEQ ID NO: 379374 - RNA, 20 nt, Human
ccuccuacccccuacucugg

SEQ ID NO: 379375 - RNA, 15 nt, Human
ccuccuaccccuucc

SEQ ID NO: 379376 - RNA, 21 nt, Human
ccuccuacccgcagcuccugg

SEQ ID NO: 379377 - RNA, 21 nt, Human
ccuccuacccgggccuccgug

SEQ ID NO: 379378 - RNA, 32 nt, Human
ccuccuacccugcuauuucuuuacaucucucu

SEQ ID NO: 379379 - RNA, 22 nt, Human
ccuccuaccugggccucugcgu

SEQ ID NO: 379380 - RNA, 32 nt, Human
ccuccuacgcaaaaacaguuuggugcagacua

SEQ ID NO: 379381 - RNA, 32 nt, Human
ccuccuacugcucuuccucucucccucucuua

SEQ ID NO: 379382 - RNA, 32 nt, Human
ccuccuacuguaccucgugccugcugcggcug

SEQ ID NO: 379383 - RNA, 32 nt, Human
ccuccuacuucccucacucccuuucuccuuug

SEQ ID NO: 379384 - RNA, 32 nt, Human
ccuccuagacaagauggagaagucaccacugg

SEQ ID NO: 379385 - RNA, 22 nt, Human
ccuccuagagaccaggcugcca

SEQ ID NO: 379386 - RNA, 32 nt, Human
ccuccuagagugcagggauuacaggcgugagc

SEQ ID NO: 379387 - RNA, 32 nt, Human
ccuccuagagugcugggauuacagacaugagc

SEQ ID NO: 379388 - RNA, 32 nt, Human
ccuccuagagugcugggauuacaggugugagc

SEQ ID NO: 379389 - RNA, 32 nt, Human
ccuccuagauaacugggauuacaggugcccac

SEQ ID NO: 379390 - RNA, 21 nt, Human
ccuccuagcucccucuugugu

SEQ ID NO: 379391 - RNA, 32 nt, Human
ccuccuagcucuucgcagagcaaccaggagcc

SEQ ID NO: 379392 - RNA, 32 nt, Human
ccuccuaggaaauaugcaguaagauggauugu

SEQ ID NO: 379393 - RNA, 20 nt, Human
ccuccuaggagggggagcgg

SEQ ID NO: 379394 - RNA, 32 nt, Human
ccuccuagggugcugggauugcaggccugagc

SEQ ID NO: 379395 - RNA, 27 nt, Human
ccuccuaguacuccacaagcugcuccu

SEQ ID NO: 379396 - RNA, 32 nt, Human
ccuccuagugggcucccggggcaccgugggag

SEQ ID NO: 379397 - RNA, 32 nt, Human
ccuccuauaaagcacugggauuacaggcauuu

SEQ ID NO: 379398 - RNA, 32 nt, Human
ccuccuaucaguucaaaacaacacaugaaacc

SEQ ID NO: 379399 - RNA, 32 nt, Human
ccuccuauccccaccuacuccugggucaggag

SEQ ID NO: 379400 - RNA, 32 nt, Human
ccuccuaucuucugguuguuccuugccuucug

SEQ ID NO: 379401 - RNA, 32 nt, Human
ccuccuaugccaccugccugggccccuccugg

SEQ ID NO: 379402 - RNA, 32 nt, Human
ccuccuauuuuaaaaugcugagucgaucccac

SEQ ID NO: 379403 - RNA, 32 nt, Human
ccuccucaaauuaaccucauacccagaaaccc

SEQ ID NO: 379404 - RNA, 32 nt, Human
ccuccucacauggcaggugagcacagacuucu

SEQ ID NO: 379405 - RNA, 32 nt, Human
ccuccucaccacccucauccggcucuucaggg

SEQ ID NO: 379406 - RNA, 32 nt, Human
ccuccucacccaaggaguucugcuguacaaac

SEQ ID NO: 379407 - RNA, 32 nt, Human
ccuccucaccuccaaagccccacccagugcac

SEQ ID NO: 379408 - RNA, 32 nt, Human
ccuccucaccuugcauagcaccuuugcaagcc

SEQ ID NO: 379409 - RNA, 32 nt, Human
ccuccucacugcagcccccacagccucaggcc

SEQ ID NO: 379410 - RNA, 32 nt, Human
ccuccucacugcauccccaauccccuucccag

SEQ ID NO: 379411 - RNA, 32 nt, Human
ccuccucacuggagacuacaagugguggguca

SEQ ID NO: 379412 - RNA, 32 nt, Human
ccuccucagacacucagacaccacuccaggcu

SEQ ID NO: 379413 - RNA, 32 nt, Human
ccuccucagacuccugagaucgccucccuccc

SEQ ID NO: 379414 - RNA, 32 nt, Human
ccuccucagcaacgcacguccaucaggccugg

SEQ ID NO: 379415 - RNA, 32 nt, Human
ccuccucagcaacuggaauuccucaaguuagu

SEQ ID NO: 379416 - RNA, 32 nt, Human
ccuccucagcaugcaggaggcugcccuguagg

SEQ ID NO: 379417 - RNA, 32 nt, Human
ccuccucagccacagagaacugugaguucauu

SEQ ID NO: 379418 - RNA, 32 nt, Human
ccuccucagccauguggaauuguaaguucaau

SEQ ID NO: 379419 - RNA, 32 nt, Human
ccuccucagcucccugccuguuucccguaagg

SEQ ID NO: 379420 - RNA, 22 nt, Human
ccuccucaggcccagcugcucc

SEQ ID NO: 379421 - RNA, 32 nt, Human
ccuccucaggcuuaaaucucaggcuucacauu

SEQ ID NO: 379422 - RNA, 32 nt, Human
ccuccucagggagggcaggagagccugaggag

SEQ ID NO: 379423 - RNA, 32 nt, Human
ccuccucaggggguaggagagcacugccucua

SEQ ID NO: 379424 - RNA, 32 nt, Human
ccuccucaguagcugagauuacaggcaugcac

SEQ ID NO: 379425 - RNA, 32 nt, Human
ccuccucaguagcugggauuacaggcaugugc

SEQ ID NO: 379426 - RNA, 32 nt, Human
ccuccucagucgggaagaguccugcuaaaaau

SEQ ID NO: 379427 - RNA, 32 nt, Human
ccuccucauccagacuugccugugagugcccc

SEQ ID NO: 379428 - RNA, 32 nt, Human
ccuccucauccuccuccuccucuuccuccucc

SEQ ID NO: 379429 - RNA, 32 nt, Human
ccuccucaucuucuuccugcuccuccaccucc

SEQ ID NO: 379430 - RNA, 32 nt, Human
ccuccucauguuucaacauuccaucuucccgu

SEQ ID NO: 379431 - RNA, 32 nt, Human
ccuccuccaaaugccagcugugcccacaagcu

SEQ ID NO: 379432 - RNA, 32 nt, Human
ccuccuccacccccucucccaucacccucccc

SEQ ID NO: 379433 - RNA, 32 nt, Human
ccuccuccaccgacuguacuucaucaaccuuc

SEQ ID NO: 379434 - RNA, 32 nt, Human
ccuccuccaccuccaccucucuucccagagac

SEQ ID NO: 379435 - RNA, 32 nt, Human
ccuccuccaccugcgccucccuugucugaacu

SEQ ID NO: 379436 - RNA, 32 nt, Human
ccuccuccacucacuccagcccaacagaagga

SEQ ID NO: 379437 - RNA, 32 nt, Human
ccuccuccagagagcucaguuggaaaggcccu

SEQ ID NO: 379438 - RNA, 32 nt, Human
ccuccuccagcuccaccucccucccucccucc

SEQ ID NO: 379439 - RNA, 32 nt, Human
ccuccuccagcuuccuggccucccagccacuu

SEQ ID NO: 379440 - RNA, 32 nt, Human
ccuccuccaggccugccucccacuucacugcg

SEQ ID NO: 379441 - RNA, 32 nt, Human
ccuccuccaucuuuauucaucuuugucuuccc

SEQ ID NO: 379442 - RNA, 32 nt, Human
ccuccucccacaccggcuguggagccaagagg

SEQ ID NO: 379443 - RNA, 32 nt, Human
ccuccucccacucacacccaagugggccugga

SEQ ID NO: 379444 - RNA, 19 nt, Human
ccuccucccacugcgacuc

SEQ ID NO: 379445 - RNA, 32 nt, Human
ccuccucccacugucucucaccucccccaccc

SEQ ID NO: 379446 - RNA, 32 nt, Human
ccuccucccacuguguguauguguguauaugu

SEQ ID NO: 379447 - RNA, 32 nt, Human
ccuccucccagaucuuccuuguggccuuccuc

SEQ ID NO: 379448 - RNA, 32 nt, Human
ccuccucccaggcuagugcaaagggcucuuca

SEQ ID NO: 379449 - RNA, 32 nt, Human
ccuccucccaggcuggugugagugugcgugcg

SEQ ID NO: 379450 - RNA, 32 nt, Human
ccuccucccauggcuagaaguggggccugcac

SEQ ID NO: 379451 - RNA, 19 nt, Human
ccuccuccccaaggacuca

SEQ ID NO: 379452 - RNA, 32 nt, Human
ccuccuccccacaaaaucagggauggaggcgc

SEQ ID NO: 379453 - RNA, 32 nt, Human
ccuccuccccaccaccaccaucuccaucaccc

SEQ ID NO: 379454 - RNA, 32 nt, Human
ccuccuccccagggaugccaagcuuggaucau

SEQ ID NO: 379455 - RNA, 32 nt, Human
ccuccuccccaguucagaaugcagcccacagc

SEQ ID NO: 379456 - RNA, 32 nt, Human
ccuccucccccaauucccaggucucacauccc

SEQ ID NO: 379457 - RNA, 32 nt, Human
ccuccucccccuccucucuggcagggaucuca

SEQ ID NO: 379458 - RNA, 32 nt, Human
ccuccucccccucucuccuuccuuccuuuuca

SEQ ID NO: 379459 - RNA, 18 nt, Human
ccuccucccccuuugggg

SEQ ID NO: 379460 - RNA, 32 nt, Human
ccuccuccccuccaccccacacccugugucca

SEQ ID NO: 379461 - RNA, 32 nt, Human
ccuccuccccuccagauccgggccccaggcug

SEQ ID NO: 379462 - RNA, 32 nt, Human
ccuccucccgggcucuuccugcggccuccccu

SEQ ID NO: 379463 - RNA, 32 nt, Human
ccuccucccucacuuauauucuauuaaauccu

SEQ ID NO: 379464 - RNA, 32 nt, Human
ccuccucccucagacccagcgguccaaugcca

SEQ ID NO: 379465 - RNA, 32 nt, Human
ccuccucccucagacccaggaguccagacccc

SEQ ID NO: 379466 - RNA, 32 nt, Human
ccuccucccucagacccaggaguccagccccu

SEQ ID NO: 379467 - RNA, 32 nt, Human
ccuccucccucagacccaggaguccaggcccc

SEQ ID NO: 379468 - RNA, 32 nt, Human
ccuccucccucagacccgggaguccaggcccc

SEQ ID NO: 379469 - RNA, 18 nt, Human
ccuccucccucagacuca

SEQ ID NO: 379470 - RNA, 32 nt, Human
ccuccucccucagacucagagguccaagcccc

SEQ ID NO: 379471 - RNA, 32 nt, Human
ccuccucccucaucucaaaggguccucaaagc

SEQ ID NO: 379472 - RNA, 32 nt, Human
ccuccucccuccaggcagaugcagccccaugc

SEQ ID NO: 379473 - RNA, 32 nt, Human
ccuccucccuccucccccuccucucuggcagg

SEQ ID NO: 379474 - RNA, 32 nt, Human
ccuccucccuccugccgacuccuggguugagc

SEQ ID NO: 379475 - RNA, 32 nt, Human
ccuccucccuccugccucuuacucuccagcac

SEQ ID NO: 379476 - RNA, 32 nt, Human
ccuccucccugccuccucuuggucuagaugga

SEQ ID NO: 379477 - RNA, 16 nt, Human
ccuccucccugcugcc

SEQ ID NO: 379478 - RNA, 32 nt, Human
ccuccucccugucugacucuuccucuuccucc

SEQ ID NO: 379479 - RNA, 19 nt, Human
ccuccucccuucccuuccc

SEQ ID NO: 379480 - RNA, 32 nt, Human
ccuccucccuucugagcacacacacaaccgau

SEQ ID NO: 379481 - RNA, 32 nt, Human
ccuccuccuaagguccuccucagcuucuagac

SEQ ID NO: 379482 - RNA, 32 nt, Human
ccuccuccuaccaucccucacuuggaccuggg

SEQ ID NO: 379483 - RNA, 32 nt, Human
ccuccuccuagccucucucccaaaaaguaaaa

SEQ ID NO: 379484 - RNA, 18 nt, Human
ccuccuccuagguucaag

SEQ ID NO: 379485 - RNA, 32 nt, Human
ccuccuccuauucuguccuuguggacuuaugu

SEQ ID NO: 379486 - RNA, 23 nt, Human
ccuccuccucacugagugccuca

SEQ ID NO: 379487 - RNA, 19 nt, Human
ccuccuccucagccacuca

SEQ ID NO: 379488 - RNA, 24 nt, Human
ccuccuccucaucuuuguggucca

SEQ ID NO: 379489 - RNA, 32 nt, Human
ccuccuccuccaccaccuccugccccaccccu

SEQ ID NO: 379490 - RNA, 32 nt, Human
ccuccuccuccaccuccuccuccuccuccucu

SEQ ID NO: 379491 - RNA, 32 nt, Human
ccuccuccuccaccugcucuccucccuaccca

SEQ ID NO: 379492 - RNA, 32 nt, Human
ccuccuccuccacucccugccucuucucccca

SEQ ID NO: 379493 - RNA, 32 nt, Human
ccuccuccuccaggaagccuucccaguccugg

SEQ ID NO: 379494 - RNA, 32 nt, Human
ccuccuccuccaggggaucuugggaggacucu

SEQ ID NO: 379495 - RNA, 32 nt, Human
ccuccuccuccaggucaggcucggaagccccc

SEQ ID NO: 379496 - RNA, 18 nt, Human
ccuccuccucccaacuca

SEQ ID NO: 379497 - RNA, 32 nt, Human
ccuccuccuccccaccaccaccaucuccauca

SEQ ID NO: 379498 - RNA, 32 nt, Human
ccuccuccucccccucccuuacucccagcucc

SEQ ID NO: 379499 - RNA, 32 nt, Human
ccuccuccucccccucuccgcucugugcucuu

SEQ ID NO: 379500 - RNA, 32 nt, Human
ccuccuccuccccuacaauuccuuuucacaua

SEQ ID NO: 379501 - RNA, 32 nt, Human
ccuccuccuccccucucccucccccucucccu

SEQ ID NO: 379502 - RNA, 32 nt, Human
ccuccuccuccccucuucucuuuuuggcagcc

SEQ ID NO: 379503 - RNA, 32 nt, Human
ccuccuccuccccugccagccucuuccuucuc

SEQ ID NO: 379504 - RNA, 18 nt, Human
ccuccuccucccuccuca

SEQ ID NO: 379505 - RNA, 32 nt, Human
ccuccuccuccuccucaugaccggggugaauu

SEQ ID NO: 379506 - RNA, 32 nt, Human
ccuccuccuccuccucaugucugccucgggcu

SEQ ID NO: 379507 - RNA, 32 nt, Human
ccuccuccuccuccuccucaugucugccucgg

SEQ ID NO: 379508 - RNA, 32 nt, Human
ccuccuccuccuccuccuccggaggugggauc

SEQ ID NO: 379509 - RNA, 32 nt, Human
ccuccuccuccuccuccuccucauccuccucc

SEQ ID NO: 379510 - RNA, 32 nt, Human
ccuccuccuccuccuccuccuccucauccucc

SEQ ID NO: 379511 - RNA, 32 nt, Human
ccuccuccuccuccuccucuccuccuggagca

SEQ ID NO: 379512 - RNA, 32 nt, Human
ccuccuccuccuccuccucuccugcugcuccu

SEQ ID NO: 379513 - RNA, 32 nt, Human
ccuccuccuccuccuccucugguagagcacuc

SEQ ID NO: 379514 - RNA, 32 nt, Human
ccuccuccuccuccucgcccuccccucccgau

SEQ ID NO: 379515 - RNA, 32 nt, Human
ccuccuccuccuccucuccuccuggagcagag

SEQ ID NO: 379516 - RNA, 32 nt, Human
ccuccuccuccuccucuccugcugcuccuggg

SEQ ID NO: 379517 - RNA, 32 nt, Human
ccuccuccuccuccucucuaggcacccccguc

SEQ ID NO: 379518 - RNA, 32 nt, Human
ccuccuccuccuccugcuccccgccgcuuccg

SEQ ID NO: 379519 - RNA, 32 nt, Human
ccuccuccuccuccuucucggcuuccuccuca

SEQ ID NO: 379520 - RNA, 32 nt, Human
ccuccuccuccuccuuggcauccgccucuucu

SEQ ID NO: 379521 - RNA, 32 nt, Human
ccuccuccuccugcuuccccugcucagaguuc

SEQ ID NO: 379522 - RNA, 32 nt, Human
ccuccuccuccuggcccugcugcugcccucgc

SEQ ID NO: 379523 - RNA, 18 nt, Human
ccuccuccuccuugggga

SEQ ID NO: 379524 - RNA, 20 nt, Human
ccuccuccucgucuuagggg

SEQ ID NO: 379525 - RNA, 32 nt, Human
ccuccuccucucuccaccuuaccccagguaca

SEQ ID NO: 379526 - RNA, 32 nt, Human
ccuccuccucuuccucugaggacacagaauug

SEQ ID NO: 379527 - RNA, 32 nt, Human
ccuccuccucuugcuaccuccaccuccaccgc

SEQ ID NO: 379528 - RNA, 32 nt, Human
ccuccuccugcaggcagccacucagccugugc

SEQ ID NO: 379529 - RNA, 32 nt, Human
ccuccuccugggccucagcuugcccagauaca

SEQ ID NO: 379530 - RNA, 21 nt, Human
ccuccuccuggggugccaggg

SEQ ID NO: 379531 - RNA, 32 nt, Human
ccuccuccugugugagucccaccaggagccac

SEQ ID NO: 379532 - RNA, 18 nt, Human
ccuccuccuguuggcugg

SEQ ID NO: 379533 - RNA, 32 nt, Human
ccuccuccuucaccgcccccuucaccaccucu

SEQ ID NO: 379534 - RNA, 32 nt, Human
ccuccuccuuccuuccuccucucccucccucc

SEQ ID NO: 379535 - RNA, 32 nt, Human
ccuccuccuugcaaauuccuuucuucugccuc

SEQ ID NO: 379536 - RNA, 32 nt, Human
ccuccuccuuguccaucuccucuacuccuccu

SEQ ID NO: 379537 - RNA, 32 nt, Human
ccuccucgagugcccugggaccacugggccac

SEQ ID NO: 379538 - RNA, 32 nt, Human
ccuccucgcagugacgucccagggggcggagg

SEQ ID NO: 379539 - RNA, 17 nt, Human
ccuccucgcccugggcu

SEQ ID NO: 379540 - RNA, 32 nt, Human
ccuccucgcgucucucccagaugcagucaccc

SEQ ID NO: 379541 - RNA, 32 nt, Human
ccuccucgcucacccaccccucccucucuucc

SEQ ID NO: 379542 - RNA, 32 nt, Human
ccuccucggacuccugccucacucauuuacac

SEQ ID NO: 379543 - RNA, 32 nt, Human
ccuccucgggcuccacgcgucuugccccgcag

SEQ ID NO: 379544 - RNA, 32 nt, Human
ccuccucgggcugggaaacaggaagcuguguu

SEQ ID NO: 379545 - RNA, 32 nt, Human
ccuccucguccaccccggagaggucagagucc

SEQ ID NO: 379546 - RNA, 32 nt, Human
ccuccucgugccugcccugccucuccacgcac

SEQ ID NO: 379547 - RNA, 22 nt, Human
ccuccucuauuccuuuuaggga

SEQ ID NO: 379548 - RNA, 32 nt, Human
ccuccucucacccuccacccuccaggagaccc

SEQ ID NO: 379549 - RNA, 21 nt, Human
ccuccucucauaaaagagaca

SEQ ID NO: 379550 - RNA, 32 nt, Human
ccuccucuccacccuaccuuccaucaaccagg

SEQ ID NO: 379551 - RNA, 32 nt, Human
ccuccucuccaccucucgcgucgugacaccag

SEQ ID NO: 379552 - RNA, 32 nt, Human
ccuccucuccauccccugaagagcucaggcag

SEQ ID NO: 379553 - RNA, 32 nt, Human
ccuccucucccagggccuccuugcuccuucgu

SEQ ID NO: 379554 - RNA, 32 nt, Human
ccuccucuccccaggccucuggcugcagugau

SEQ ID NO: 379555 - RNA, 18 nt, Human
ccuccucucccuuggaga

SEQ ID NO: 379556 - RNA, 19 nt, Human
ccuccucuccuagcuuccc

SEQ ID NO: 379557 - RNA, 32 nt, Human
ccuccucuccuccucacagcucucaccugucc

SEQ ID NO: 379558 - RNA, 32 nt, Human
ccuccucuccugauccccagcauccagcugag

SEQ ID NO: 379559 - RNA, 32 nt, Human
ccuccucuccuuccacagaccccacaugccca

SEQ ID NO: 379560 - RNA, 19 nt, Human
ccuccucuccuuugagagg

SEQ ID NO: 379561 - RNA, 32 nt, Human
ccuccucucgucccugugccuguggucagcua

SEQ ID NO: 379562 - RNA, 32 nt, Human
ccuccucucucccucacugcucccagcaccuc

SEQ ID NO: 379563 - RNA, 32 nt, Human
ccuccucucucccucccugcucuaguagucca

SEQ ID NO: 379564 - RNA, 32 nt, Human
ccuccucucucccugccucacaucucccuucc

SEQ ID NO: 379565 - RNA, 32 nt, Human
ccuccucucugcucugugcccuaugcaccccc

SEQ ID NO: 379566 - RNA, 32 nt, Human
ccuccucucuuggaagcucacagagcgcuggg

SEQ ID NO: 379567 - RNA, 32 nt, Human
ccuccucucuuuccucacccgguagucccaga

SEQ ID NO: 379568 - RNA, 32 nt, Human
ccuccucugaacuugugguucauucucaggcu

SEQ ID NO: 379569 - RNA, 32 nt, Human
ccuccucugagcgcacagcccauguccucugc

SEQ ID NO: 379570 - RNA, 32 nt, Human
ccuccucugaggauggggcuuguuggugugaa

SEQ ID NO: 379571 - RNA, 20 nt, Human
ccuccucugcacuuugggga

SEQ ID NO: 379572 - RNA, 32 nt, Human
ccuccucugccacccagugccuucuaaagggc

SEQ ID NO: 379573 - RNA, 32 nt, Human
ccuccucugcccugcccaccagccugugauuu

SEQ ID NO: 379574 - RNA, 32 nt, Human
ccuccucugccuccucuuccucauccucgucc

SEQ ID NO: 379575 - RNA, 32 nt, Human
ccuccucugccucuguucgcauaguaagaagg

SEQ ID NO: 379576 - RNA, 32 nt, Human
ccuccucugccuggaagagauuacagggaaau

SEQ ID NO: 379577 - RNA, 32 nt, Human
ccuccucugccuuucaaaaggcuggucaccua

SEQ ID NO: 379578 - RNA, 32 nt, Human
ccuccucugcgucuuccaucuacugaaauggg

SEQ ID NO: 379579 - RNA, 32 nt, Human
ccuccucugcuccuccccacacccugcaggca

SEQ ID NO: 379580 - RNA, 32 nt, Human
ccuccucugcucugcccugcccugcccuggcc

SEQ ID NO: 379581 - RNA, 19 nt, Human
ccuccucugcucuuaggga

SEQ ID NO: 379582 - RNA, 32 nt, Human
ccuccucuggacggcaggcucacugccaggcc

SEQ ID NO: 379583 - RNA, 32 nt, Human
ccuccucuggcccaggacgccugcugcaagcc

SEQ ID NO: 379584 - RNA, 32 nt, Human
ccuccucugggcccucuccuucgucugggaag

SEQ ID NO: 379585 - RNA, 32 nt, Human
ccuccucugucugacugaguuccuuccugugg

SEQ ID NO: 379586 - RNA, 32 nt, Human
ccuccucuguuuagcaaaggagggcagcucac

SEQ ID NO: 379587 - RNA, 32 nt, Human
ccuccucuuagaccaucucuaagaccacuuca

SEQ ID NO: 379588 - RNA, 32 nt, Human
ccuccucuuagagcuccugaauucuggagcau

SEQ ID NO: 379589 - RNA, 32 nt, Human
ccuccucuucacugccuccaccugcucccgcu

SEQ ID NO: 379590 - RNA, 19 nt, Human
ccuccucuucccuuggggg

SEQ ID NO: 379591 - RNA, 32 nt, Human
ccuccucuuccuccuccuccuccaccuccggc

SEQ ID NO: 379592 - RNA, 32 nt, Human
ccuccucuuccuccuccuccuccucucuaggc

SEQ ID NO: 379593 - RNA, 32 nt, Human
ccuccucuuccuccuccucuuccucuucgucu

SEQ ID NO: 379594 - RNA, 32 nt, Human
ccuccucuuccuccuccuggugggugccaugu

SEQ ID NO: 379595 - RNA, 32 nt, Human
ccuccucuuccuucuccuccuccauccccaga

SEQ ID NO: 379596 - RNA, 32 nt, Human
ccuccucuucuuccuguccaugccggccccuc

SEQ ID NO: 379597 - RNA, 17 nt, Human
ccuccucuucuugggga

SEQ ID NO: 379598 - RNA, 32 nt, Human
ccuccucuucuuucuccuuccgaguucgcccu

SEQ ID NO: 379599 - RNA, 32 nt, Human
ccuccucuuucugugagaguccugagucccuc

SEQ ID NO: 379600 - RNA, 32 nt, Human
ccuccucuuuuccucuuuccucccuacuuuuu

SEQ ID NO: 379601 - RNA, 32 nt, Human
ccuccugaaaacagcacugccuuccgcgcugc

SEQ ID NO: 379602 - RNA, 32 nt, Human
ccuccugaaaagcugggauuacagggcccugc

SEQ ID NO: 379603 - RNA, 32 nt, Human
ccuccugaaauccuccaucgcguccuucuggg

SEQ ID NO: 379604 - RNA, 32 nt, Human
ccuccugaacagcugggaccacaggugcacgc

SEQ ID NO: 379605 - RNA, 21 nt, Human
ccuccugaacgucuccuacca

SEQ ID NO: 379606 - RNA, 19 nt, Human
ccuccugaagagccccgcc

SEQ ID NO: 379607 - RNA, 17 nt, Human
ccuccugaagcagaagu

SEQ ID NO: 379608 - RNA, 32 nt, Human
ccuccugaagugcugggauuacaggcaugagc

SEQ ID NO: 379609 - RNA, 32 nt, Human
ccuccugaagugcugggauuacaggcguggcc

SEQ ID NO: 379610 - RNA, 32 nt, Human
ccuccugaaguguugggauuacaggcgugagc

SEQ ID NO: 379611 - RNA, 32 nt, Human
ccuccugaauagcugggaauacaggugcacgc

SEQ ID NO: 379612 - RNA, 32 nt, Human
ccuccugaauagcugggacuacaggcuugcac

SEQ ID NO: 379613 - RNA, 32 nt, Human
ccuccugaauagcugggacuacagguucuauu

SEQ ID NO: 379614 - RNA, 32 nt, Human
ccuccugaauagcugggauuacaggcacccac

SEQ ID NO: 379615 - RNA, 32 nt, Human
ccuccugaauagcugggauuacaggcaccugu

SEQ ID NO: 379616 - RNA, 32 nt, Human
ccuccugaauagcugggauuacaggugcacgc

SEQ ID NO: 379617 - RNA, 32 nt, Human
ccuccugaauaucugggauuacaggugcccgc

SEQ ID NO: 379618 - RNA, 32 nt, Human
ccuccugacacccagagcugugcggggaggca

SEQ ID NO: 379619 - RNA, 21 nt, Human
ccuccugacccugcugcucuu

SEQ ID NO: 379620 - RNA, 32 nt, Human
ccuccugagaagcuaggacuacaggcaugcac

SEQ ID NO: 379621 - RNA, 32 nt, Human
ccuccugagaagcugagauuacaggcaugugc

SEQ ID NO: 379622 - RNA, 32 nt, Human
ccuccugagagccagcccugacgugaacucau

SEQ ID NO: 379623 - RNA, 32 nt, Human
ccuccugagcagcugggacuacagacacaccc

SEQ ID NO: 379624 - RNA, 32 nt, Human
ccuccugagcagcugggacuacaggcacacac

SEQ ID NO: 379625 - RNA, 32 nt, Human
ccuccugagcagcugggacuacaggcgcaugc

SEQ ID NO: 379626 - RNA, 32 nt, Human
ccuccugagcagcugggacuacaggcgccugc

SEQ ID NO: 379627 - RNA, 32 nt, Human
ccuccugagcagcugggauuacaggcgcacau

SEQ ID NO: 379628 - RNA, 32 nt, Human
ccuccugagcagcugggauuacaggcgcuggc

SEQ ID NO: 379629 - RNA, 32 nt, Human
ccuccugagcagcugggauuacaggugcgugc

SEQ ID NO: 379630 - RNA, 22 nt, Human
ccuccugagcucagcccccacc

SEQ ID NO: 379631 - RNA, 21 nt, Human
ccuccugaggaccgcugcucu

SEQ ID NO: 379632 - RNA, 32 nt, Human
ccuccugaggagcugcgauuacagguaaccuc

SEQ ID NO: 379633 - RNA, 32 nt, Human
ccuccugaggagcugggacuacaggugcgugc

SEQ ID NO: 379634 - RNA, 23 nt, Human
ccuccugaggcagcaccacacca

SEQ ID NO: 379635 - RNA, 32 nt, Human
ccuccugaggcccugaggguggcccugacccc

SEQ ID NO: 379636 - RNA, 32 nt, Human
ccuccugagggaggggcaggagagcagugagg

SEQ ID NO: 379637 - RNA, 32 nt, Human
ccuccugaguaacugagauuacaggcacaagc

SEQ ID NO: 379638 - RNA, 32 nt, Human
ccuccugaguaacugggacuacaggcacagcu

SEQ ID NO: 379639 - RNA, 32 nt, Human
ccuccugaguaacugggauuacagagcccagg

SEQ ID NO: 379640 - RNA, 32 nt, Human
ccuccugaguaacugggauuacagucgugugc

SEQ ID NO: 379641 - RNA, 32 nt, Human
ccuccugaguaacugggguuacaggcgcgcga

SEQ ID NO: 379642 - RNA, 32 nt, Human
ccuccugaguaccugagauuacaggcacccac

SEQ ID NO: 379643 - RNA, 32 nt, Human
ccuccugaguaccugggauuacaggcgcgcau

SEQ ID NO: 379644 - RNA, 32 nt, Human
ccuccugaguaccugggauuacaggugcacac

SEQ ID NO: 379645 - RNA, 32 nt, Human
ccuccugaguaccugggauuauaggcacaagu

SEQ ID NO: 379646 - RNA, 32 nt, Human
ccuccugaguagaugggacuacaggcacaggc

SEQ ID NO: 379647 - RNA, 32 nt, Human
ccuccugaguagccaggacuauggcauguacc

SEQ ID NO: 379648 - RNA, 32 nt, Human
ccuccugaguagcuaggaccauaggcacaugu

SEQ ID NO: 379649 - RNA, 32 nt, Human
ccuccugaguagcuaggacuacaggcaugugc

SEQ ID NO: 379650 - RNA, 32 nt, Human
ccuccugaguagcuaggacuacaggugcaugc

SEQ ID NO: 379651 - RNA, 32 nt, Human
ccuccugaguagcuaggacuacaggugugcac

SEQ ID NO: 379652 - RNA, 32 nt, Human
ccuccugaguagcuaggacuauaggcacacag

SEQ ID NO: 379653 - RNA, 32 nt, Human
ccuccugaguagcuaggacuauaggcaugcac

SEQ ID NO: 379654 - RNA, 32 nt, Human
ccuccugaguagcuaggacugcaggugcucca

SEQ ID NO: 379655 - RNA, 32 nt, Human
ccuccugaguagcuaggacuguaggcauguac

SEQ ID NO: 379656 - RNA, 32 nt, Human
ccuccugaguagcuaggauuacaggcaugugc

SEQ ID NO: 379657 - RNA, 32 nt, Human
ccuccugaguagcuaggauuacaggugccugc

SEQ ID NO: 379658 - RNA, 32 nt, Human
ccuccugaguagcuaggauuacaggugugugc

SEQ ID NO: 379659 - RNA, 32 nt, Human
ccuccugaguagcuaugacuacagguaugugc

SEQ ID NO: 379660 - RNA, 32 nt, Human
ccuccugaguagcugagaccacaggcgugugc

SEQ ID NO: 379661 - RNA, 32 nt, Human
ccuccugaguagcugagacuacaggugagugc

SEQ ID NO: 379662 - RNA, 32 nt, Human
ccuccugaguagcugagauuacaggcacacac

SEQ ID NO: 379663 - RNA, 32 nt, Human
ccuccugaguagcugagauuacaggugcccgc

SEQ ID NO: 379664 - RNA, 32 nt, Human
ccuccugaguagcugagauuacaggugugugc

SEQ ID NO: 379665 - RNA, 32 nt, Human
ccuccugaguagcugagauuauaggccuacca

SEQ ID NO: 379666 - RNA, 32 nt, Human
ccuccugaguagcugauacuacaggcacccac

SEQ ID NO: 379667 - RNA, 32 nt, Human
ccuccugaguagcugcgacuacaggugcaugc

SEQ ID NO: 379668 - RNA, 32 nt, Human
ccuccugaguagcuggaaccacaggcaugugc

SEQ ID NO: 379669 - RNA, 32 nt, Human
ccuccugaguagcuggaauuacaggaggauuc

SEQ ID NO: 379670 - RNA, 32 nt, Human
ccuccugaguagcuggaauuacaggcacccac

SEQ ID NO: 379671 - RNA, 32 nt, Human
ccuccugaguagcuggaauuacaggcaugugc

SEQ ID NO: 379672 - RNA, 32 nt, Human
ccuccugaguagcuggaauuacaggcgcccac

SEQ ID NO: 379673 - RNA, 32 nt, Human
ccuccugaguagcuggaauuauaggcacaugc

SEQ ID NO: 379674 - RNA, 32 nt, Human
ccuccugaguagcuggauuacaggcaugugcc

SEQ ID NO: 379675 - RNA, 32 nt, Human
ccuccugaguagcuggauuacagggccuggcc

SEQ ID NO: 379676 - RNA, 32 nt, Human
ccuccugaguagcuggcacuguaggcauguac

SEQ ID NO: 379677 - RNA, 32 nt, Human
ccuccugaguagcuggcauuauaggugcccac

SEQ ID NO: 379678 - RNA, 32 nt, Human
ccuccugaguagcugggaauacagcaugcgcc

SEQ ID NO: 379679 - RNA, 32 nt, Human
ccuccugaguagcugggaccacaggcgacugc

SEQ ID NO: 379680 - RNA, 32 nt, Human
ccuccugaguagcugggaccacaggcgagugu

SEQ ID NO: 379681 - RNA, 32 nt, Human
ccuccugaguagcugggaccacagguaugcac

SEQ ID NO: 379682 - RNA, 32 nt, Human
ccuccugaguagcugggaccacaggugugugc

SEQ ID NO: 379683 - RNA, 32 nt, Human
ccuccugaguagcugggaccauaggcucacaa

SEQ ID NO: 379684 - RNA, 32 nt, Human
ccuccugaguagcugggaccauaggugugagc

SEQ ID NO: 379685 - RNA, 32 nt, Human
ccuccugaguagcugggacgacaggcgugcac

SEQ ID NO: 379686 - RNA, 32 nt, Human
ccuccugaguagcugggacuacaagcaugcac

SEQ ID NO: 379687 - RNA, 32 nt, Human
ccuccugaguagcugggacuacaagugugcac

SEQ ID NO: 379688 - RNA, 32 nt, Human
ccuccugaguagcugggacuacaaguguguac

SEQ ID NO: 379689 - RNA, 32 nt, Human
ccuccugaguagcugggacuacagaugcauuc

SEQ ID NO: 379690 - RNA, 32 nt, Human
ccuccugaguagcugggacuacagauguaggc

SEQ ID NO: 379691 - RNA, 32 nt, Human
ccuccugaguagcugggacuacaggaauuagu

SEQ ID NO: 379692 - RNA, 32 nt, Human
ccuccugaguagcugggacuacaggagcucgc

SEQ ID NO: 379693 - RNA, 32 nt, Human
ccuccugaguagcugggacuacaggcacacac

SEQ ID NO: 379694 - RNA, 32 nt, Human
ccuccugaguagcugggacuacaggcacaugc

SEQ ID NO: 379695 - RNA, 32 nt, Human
ccuccugaguagcugggacuacaggcacccac

SEQ ID NO: 379696 - RNA, 32 nt, Human
ccuccugaguagcugggacuacaggcacccgc

SEQ ID NO: 379697 - RNA, 32 nt, Human
ccuccugaguagcugggacuacaggcaccugc

SEQ ID NO: 379698 - RNA, 32 nt, Human
ccuccugaguagcugggacuacaggcacgcac

SEQ ID NO: 379699 - RNA, 32 nt, Human
ccuccugaguagcugggacuacaggcacgugc

SEQ ID NO: 379700 - RNA, 32 nt, Human
ccuccugaguagcugggacuacaggcaugagc

SEQ ID NO: 379701 - RNA, 32 nt, Human
ccuccugaguagcugggacuacaggcaugcaa

SEQ ID NO: 379702 - RNA, 32 nt, Human
ccuccugaguagcugggacuacaggcaugcac

SEQ ID NO: 379703 - RNA, 32 nt, Human
ccuccugaguagcugggacuacaggcauguac

SEQ ID NO: 379704 - RNA, 32 nt, Human
ccuccugaguagcugggacuacaggcaugugc

SEQ ID NO: 379705 - RNA, 32 nt, Human
ccuccugaguagcugggacuacaggccccugc

SEQ ID NO: 379706 - RNA, 32 nt, Human
ccuccugaguagcugggacuacaggcgcacac

SEQ ID NO: 379707 - RNA, 32 nt, Human
ccuccugaguagcugggacuacaggcgccagc

SEQ ID NO: 379708 - RNA, 32 nt, Human
ccuccugaguagcugggacuacaggcgcccac

SEQ ID NO: 379709 - RNA, 32 nt, Human
ccuccugaguagcugggacuacaggcgcccgc

SEQ ID NO: 379710 - RNA, 32 nt, Human
ccuccugaguagcugggacuacaggcgccugc

SEQ ID NO: 379711 - RNA, 32 nt, Human
ccuccugaguagcugggacuacaggcgcucgc

SEQ ID NO: 379712 - RNA, 32 nt, Human
ccuccugaguagcugggacuacaggcgugugc

SEQ ID NO: 379713 - RNA, 32 nt, Human
ccuccugaguagcugggacuacaggcucaugc

SEQ ID NO: 379714 - RNA, 32 nt, Human
ccuccugaguagcugggacuacaggcuugcgc

SEQ ID NO: 379715 - RNA, 32 nt, Human
ccuccugaguagcugggacuacaggcuugugc

SEQ ID NO: 379716 - RNA, 32 nt, Human
ccuccugaguagcugggacuacagggacuaug

SEQ ID NO: 379717 - RNA, 32 nt, Human
ccuccugaguagcugggacuacagguaugcac

SEQ ID NO: 379718 - RNA, 32 nt, Human
ccuccugaguagcugggacuacaggugcccac

SEQ ID NO: 379719 - RNA, 32 nt, Human
ccuccugaguagcugggacuacaggugcccgc

SEQ ID NO: 379720 - RNA, 32 nt, Human
ccuccugaguagcugggacuacaggugccugc

SEQ ID NO: 379721 - RNA, 32 nt, Human
ccuccugaguagcugggacuacaggugcgugc

SEQ ID NO: 379722 - RNA, 32 nt, Human
ccuccugaguagcugggacuacagguguacac

SEQ ID NO: 379723 - RNA, 32 nt, Human
ccuccugaguagcugggacuacaggugugcac

SEQ ID NO: 379724 - RNA, 32 nt, Human
ccuccugaguagcugggacuacaggugugcgc

SEQ ID NO: 379725 - RNA, 32 nt, Human
ccuccugaguagcugggacuacagguguguga

SEQ ID NO: 379726 - RNA, 32 nt, Human
ccuccugaguagcugggacuacaguugugcac

SEQ ID NO: 379727 - RNA, 32 nt, Human
ccuccugaguagcugggacuacaguugugcca

SEQ ID NO: 379728 - RNA, 32 nt, Human
ccuccugaguagcugggacuacaguugugcuc

SEQ ID NO: 379729 - RNA, 32 nt, Human
ccuccugaguagcugggacuacaguuucgugu

SEQ ID NO: 379730 - RNA, 32 nt, Human
ccuccugaguagcugggacuacaugcgcacac

SEQ ID NO: 379731 - RNA, 32 nt, Human
ccuccugaguagcugggacuagaggcacgcac

SEQ ID NO: 379732 - RNA, 32 nt, Human
ccuccugaguagcugggacuagaggcauguau

SEQ ID NO: 379733 - RNA, 32 nt, Human
ccuccugaguagcugggacuagaggcgugugu

SEQ ID NO: 379734 - RNA, 32 nt, Human
ccuccugaguagcugggacuauaggcaugugc

SEQ ID NO: 379735 - RNA, 32 nt, Human
ccuccugaguagcugggacuauaggccuguac

SEQ ID NO: 379736 - RNA, 32 nt, Human
ccuccugaguagcugggacuauaggcgcgugc

SEQ ID NO: 379737 - RNA, 32 nt, Human
ccuccugaguagcugggacuauaggcucccgc

SEQ ID NO: 379738 - RNA, 32 nt, Human
ccuccugaguagcugggacuauaggugcaugc

SEQ ID NO: 379739 - RNA, 32 nt, Human
ccuccugaguagcugggacuauagguugcuga

SEQ ID NO: 379740 - RNA, 32 nt, Human
ccuccugaguagcugggacugcagaagugcac

SEQ ID NO: 379741 - RNA, 32 nt, Human
ccuccugaguagcugggacugcaggcacccac

SEQ ID NO: 379742 - RNA, 32 nt, Human
ccuccugaguagcugggacugcaggcacgcgc

SEQ ID NO: 379743 - RNA, 32 nt, Human
ccuccugaguagcugggacugcaguuguaagc

SEQ ID NO: 379744 - RNA, 32 nt, Human
ccuccugaguagcugggacuggagacaugcgc

SEQ ID NO: 379745 - RNA, 32 nt, Human
ccuccugaguagcugggaggacaggcauaugc

SEQ ID NO: 379746 - RNA, 32 nt, Human
ccuccugaguagcugggaguacaggcgugcau

SEQ ID NO: 379747 - RNA, 32 nt, Human
ccuccugaguagcugggauaacagacaugcau

SEQ ID NO: 379748 - RNA, 32 nt, Human
ccuccugaguagcugggauaacagguguggug

SEQ ID NO: 379749 - RNA, 32 nt, Human
ccuccugaguagcugggaucacaggcacacac

SEQ ID NO: 379750 - RNA, 32 nt, Human
ccuccugaguagcugggaucacagguguguac

SEQ ID NO: 379751 - RNA, 32 nt, Human
ccuccugaguagcugggaucacaggugugugc

SEQ ID NO: 379752 - RNA, 32 nt, Human
ccuccugaguagcugggaucauagaugccugc

SEQ ID NO: 379753 - RNA, 32 nt, Human
ccuccugaguagcugggaucauaggcacgcgc

SEQ ID NO: 379754 - RNA, 32 nt, Human
ccuccugaguagcugggaugacaggcgugcac

SEQ ID NO: 379755 - RNA, 32 nt, Human
ccuccugaguagcugggaugacaggugcacgc

SEQ ID NO: 379756 - RNA, 32 nt, Human
ccuccugaguagcugggauuacaagggcacac

SEQ ID NO: 379757 - RNA, 32 nt, Human
ccuccugaguagcugggauuacagaaaaucug

SEQ ID NO: 379758 - RNA, 32 nt, Human
ccuccugaguagcugggauuacagacacccac

SEQ ID NO: 379759 - RNA, 32 nt, Human
ccuccugaguagcugggauuacagacacccgc

SEQ ID NO: 379760 - RNA, 32 nt, Human
ccuccugaguagcugggauuacagacaugcac

SEQ ID NO: 379761 - RNA, 32 nt, Human
ccuccugaguagcugggauuacagacgcacgc

SEQ ID NO: 379762 - RNA, 32 nt, Human
ccuccugaguagcugggauuacagacuccagc

SEQ ID NO: 379763 - RNA, 32 nt, Human
ccuccugaguagcugggauuacagauccuggu

SEQ ID NO: 379764 - RNA, 32 nt, Human
ccuccugaguagcugggauuacagauguaugc

SEQ ID NO: 379765 - RNA, 32 nt, Human
ccuccugaguagcugggauuacagaugugcac

SEQ ID NO: 379766 - RNA, 32 nt, Human
ccuccugaguagcugggauuacagcacccgcc

SEQ ID NO: 379767 - RNA, 32 nt, Human
ccuccugaguagcugggauuacagcucuggga

SEQ ID NO: 379768 - RNA, 32 nt, Human
ccuccugaguagcugggauuacaggaccagug

SEQ ID NO: 379769 - RNA, 32 nt, Human
ccuccugaguagcugggauuacaggagugugc

SEQ ID NO: 379770 - RNA, 32 nt, Human
ccuccugaguagcugggauuacaggcaacugc

SEQ ID NO: 379771 - RNA, 32 nt, Human
ccuccugaguagcugggauuacaggcacacac

SEQ ID NO: 379772 - RNA, 32 nt, Human
ccuccugaguagcugggauuacaggcacacgc

SEQ ID NO: 379773 - RNA, 32 nt, Human
ccuccugaguagcugggauuacaggcacaugc

SEQ ID NO: 379774 - RNA, 32 nt, Human
ccuccugaguagcugggauuacaggcacccac

SEQ ID NO: 379775 - RNA, 32 nt, Human
ccuccugaguagcugggauuacaggcacccgc

SEQ ID NO: 379776 - RNA, 32 nt, Human
ccuccugaguagcugggauuacaggcaccugc

SEQ ID NO: 379777 - RNA, 32 nt, Human
ccuccugaguagcugggauuacaggcacgcgc

SEQ ID NO: 379778 - RNA, 32 nt, Human
ccuccugaguagcugggauuacaggcagacac

SEQ ID NO: 379779 - RNA, 32 nt, Human
ccuccugaguagcugggauuacaggcauacac

SEQ ID NO: 379780 - RNA, 32 nt, Human
ccuccugaguagcugggauuacaggcauccgc

SEQ ID NO: 379781 - RNA, 32 nt, Human
ccuccugaguagcugggauuacaggcaugaau

SEQ ID NO: 379782 - RNA, 32 nt, Human
ccuccugaguagcugggauuacaggcaugcac

SEQ ID NO: 379783 - RNA, 32 nt, Human
ccuccugaguagcugggauuacaggcaugcgc

SEQ ID NO: 379784 - RNA, 32 nt, Human
ccuccugaguagcugggauuacaggcauguac

SEQ ID NO: 379785 - RNA, 32 nt, Human
ccuccugaguagcugggauuacaggcauguga

SEQ ID NO: 379786 - RNA, 32 nt, Human
ccuccugaguagcugggauuacaggcaugugc

SEQ ID NO: 379787 - RNA, 32 nt, Human
ccuccugaguagcugggauuacaggcgcacgc

SEQ ID NO: 379788 - RNA, 32 nt, Human
ccuccugaguagcugggauuacaggcgcccgc

SEQ ID NO: 379789 - RNA, 32 nt, Human
ccuccugaguagcugggauuacaggcgcccgu

SEQ ID NO: 379790 - RNA, 32 nt, Human
ccuccugaguagcugggauuacaggcgccugc

SEQ ID NO: 379791 - RNA, 32 nt, Human
ccuccugaguagcugggauuacaggcgcguau

SEQ ID NO: 379792 - RNA, 32 nt, Human
ccuccugaguagcugggauuacaggcgcgugc

SEQ ID NO: 379793 - RNA, 32 nt, Human
ccuccugaguagcugggauuacaggcguccgc

SEQ ID NO: 379794 - RNA, 32 nt, Human
ccuccugaguagcugggauuacaggcgugcac

SEQ ID NO: 379795 - RNA, 32 nt, Human
ccuccugaguagcugggauuacaggcgugcgc

SEQ ID NO: 379796 - RNA, 32 nt, Human
ccuccugaguagcugggauuacaggcgugugc

SEQ ID NO: 379797 - RNA, 32 nt, Human
ccuccugaguagcugggauuacaggcgugugu

SEQ ID NO: 379798 - RNA, 32 nt, Human
ccuccugaguagcugggauuacaggcuccugc

SEQ ID NO: 379799 - RNA, 32 nt, Human
ccuccugaguagcugggauuacagggcgcugg

SEQ ID NO: 379800 - RNA, 32 nt, Human
ccuccugaguagcugggauuacagguaugugc

SEQ ID NO: 379801 - RNA, 32 nt, Human
ccuccugaguagcugggauuacaggugcaugc

SEQ ID NO: 379802 - RNA, 32 nt, Human
ccuccugaguagcugggauuacaggugcccac

SEQ ID NO: 379803 - RNA, 32 nt, Human
ccuccugaguagcugggauuacaggugccugc

SEQ ID NO: 379804 - RNA, 32 nt, Human
ccuccugaguagcugggauuacaggugcgcac

SEQ ID NO: 379805 - RNA, 32 nt, Human
ccuccugaguagcugggauuacaggugcgugc

SEQ ID NO: 379806 - RNA, 32 nt, Human
ccuccugaguagcugggauuacagguguaugc

SEQ ID NO: 379807 - RNA, 32 nt, Human
ccuccugaguagcugggauuacaggugucggc

SEQ ID NO: 379808 - RNA, 32 nt, Human
ccuccugaguagcugggauuacaggugugcac

SEQ ID NO: 379809 - RNA, 32 nt, Human
ccuccugaguagcugggauuacaggugugccc

SEQ ID NO: 379810 - RNA, 32 nt, Human
ccuccugaguagcugggauuacaggugugcgc

SEQ ID NO: 379811 - RNA, 32 nt, Human
ccuccugaguagcugggauuacaggugugugc

SEQ ID NO: 379812 - RNA, 32 nt, Human
ccuccugaguagcugggauuacagguuccugc

SEQ ID NO: 379813 - RNA, 32 nt, Human
ccuccugaguagcugggauuaccagugcacgc

SEQ ID NO: 379814 - RNA, 32 nt, Human
ccuccugaguagcugggauuacgggcaugugc

SEQ ID NO: 379815 - RNA, 32 nt, Human
ccuccugaguagcugggauuacuggcacacac

SEQ ID NO: 379816 - RNA, 32 nt, Human
ccuccugaguagcugggauuauaggcacacac

SEQ ID NO: 379817 - RNA, 32 nt, Human
ccuccugaguagcugggauuauaggcacaugc

SEQ ID NO: 379818 - RNA, 32 nt, Human
ccuccugaguagcugggauuauaggcacgugc

SEQ ID NO: 379819 - RNA, 32 nt, Human
ccuccugaguagcugggauuauaggcaugcac

SEQ ID NO: 379820 - RNA, 32 nt, Human
ccuccugaguagcugggauuauaggcgagagc

SEQ ID NO: 379821 - RNA, 32 nt, Human
ccuccugaguagcugggauuauaggcgucugc

SEQ ID NO: 379822 - RNA, 32 nt, Human
ccuccugaguagcugggauuauaggcgugcac

SEQ ID NO: 379823 - RNA, 32 nt, Human
ccuccugaguagcugggauuauaggcguguac

SEQ ID NO: 379824 - RNA, 32 nt, Human
ccuccugaguagcugggauuauagguacaugc

SEQ ID NO: 379825 - RNA, 32 nt, Human
ccuccugaguagcugggauuauaggugcaugc

SEQ ID NO: 379826 - RNA, 32 nt, Human
ccuccugaguagcugggauuauaggugcgagc

SEQ ID NO: 379827 - RNA, 32 nt, Human
ccuccugaguagcugggauuauggacaaaugc

SEQ ID NO: 379828 - RNA, 32 nt, Human
ccuccugaguagcugggauuaugggcgcccac

SEQ ID NO: 379829 - RNA, 32 nt, Human
ccuccugaguagcugggauuaugggugccugc

SEQ ID NO: 379830 - RNA, 32 nt, Human
ccuccugaguagcugggauugcaggcacccgc

SEQ ID NO: 379831 - RNA, 32 nt, Human
ccuccugaguagcugggauugcagguaugcac

SEQ ID NO: 379832 - RNA, 32 nt, Human
ccuccugaguagcugggauugcaggugcccac

SEQ ID NO: 379833 - RNA, 32 nt, Human
ccuccugaguagcugggauuucaggccaugaa

SEQ ID NO: 379834 - RNA, 32 nt, Human
ccuccugaguagcugggccuauagguucccuc

SEQ ID NO: 379835 - RNA, 32 nt, Human
ccuccugaguagcugggcugacaggcacccac

SEQ ID NO: 379836 - RNA, 32 nt, Human
ccuccugaguagcugggcuuacaggcacccac

SEQ ID NO: 379837 - RNA, 32 nt, Human
ccuccugaguagcuggggcuacaggcgccugc

SEQ ID NO: 379838 - RNA, 32 nt, Human
ccuccugaguagcuggggcuacaggugugugc

SEQ ID NO: 379839 - RNA, 32 nt, Human
ccuccugaguagcugggguuacaggugugugc

SEQ ID NO: 379840 - RNA, 32 nt, Human
ccuccugaguagcugggguugcaggugugcac

SEQ ID NO: 379841 - RNA, 32 nt, Human
ccuccugaguagcuggguuuacaggugccugc

SEQ ID NO: 379842 - RNA, 32 nt, Human
ccuccugaguagcugugacuacaggcgcccaa

SEQ ID NO: 379843 - RNA, 32 nt, Human
ccuccugaguagcugugauuacaggcaugcgc

SEQ ID NO: 379844 - RNA, 32 nt, Human
ccuccugaguagcuuggauuacaggcacaagc

SEQ ID NO: 379845 - RNA, 32 nt, Human
ccuccugaguaggugggauuacagaugcccgc

SEQ ID NO: 379846 - RNA, 32 nt, Human
ccuccugaguaguugggacuacaggcauauac

SEQ ID NO: 379847 - RNA, 32 nt, Human
ccuccugaguaguugggauuacagaugcccgc

SEQ ID NO: 379848 - RNA, 32 nt, Human
ccuccugaguaucugggauuacaggcgugcac

SEQ ID NO: 379849 - RNA, 32 nt, Human
ccuccugaguggcugggauuacaggcaugcac

SEQ ID NO: 379850 - RNA, 32 nt, Human
ccuccugaguggcugggauuacaggcgcccgc

SEQ ID NO: 379851 - RNA, 32 nt, Human
ccuccugaguggcugggauuauaggugugugc

SEQ ID NO: 379852 - RNA, 32 nt, Human
ccuccugaguggcugggauugcaggugugcgc

SEQ ID NO: 379853 - RNA, 32 nt, Human
ccuccugauacuguagccucuugguacccagg

SEQ ID NO: 379854 - RNA, 32 nt, Human
ccuccugauauuccucuucucacuuuugcaau

SEQ ID NO: 379855 - RNA, 32 nt, Human
ccuccugaucugccagggucugcucugggugg

SEQ ID NO: 379856 - RNA, 32 nt, Human
ccuccugauuaccugggauuacaggcaugugc

SEQ ID NO: 379857 - RNA, 32 nt, Human
ccuccugauuagcugggacuacagguucagcu

SEQ ID NO: 379858 - RNA, 32 nt, Human
ccuccugauuagcugggacuauaggcgugugc

SEQ ID NO: 379859 - RNA, 32 nt, Human
ccuccugauuagcugggauuacaggcaugcgc

SEQ ID NO: 379860 - RNA, 32 nt, Human
ccuccugauuagcugggauuacaggcaugugc

SEQ ID NO: 379861 - RNA, 32 nt, Human
ccuccugauuagcugggauuacaggcgugugc

SEQ ID NO: 379862 - RNA, 32 nt, Human
ccuccugcaaagcaucucccaccaaguguauc

SEQ ID NO: 379863 - RNA, 17 nt, Human
ccuccugcaacccagaa

SEQ ID NO: 379864 - RNA, 32 nt, Human
ccuccugcaaggaccugggccucccagcccag

SEQ ID NO: 379865 - RNA, 32 nt, Human
ccuccugcaaggggcucaacccccuaccccga

SEQ ID NO: 379866 - RNA, 32 nt, Human
ccuccugcacacagaaugcucagggucacuga

SEQ ID NO: 379867 - RNA, 22 nt, Human
ccuccugcacagucugcagcuu

SEQ ID NO: 379868 - RNA, 32 nt, Human
ccuccugcacccaaggcagugccugagaagcc

SEQ ID NO: 379869 - RNA, 16 nt, Human
ccuccugcacccagaa

SEQ ID NO: 379870 - RNA, 32 nt, Human
ccuccugcagagccagcgaaggaaagcucuag

SEQ ID NO: 379871 - RNA, 18 nt, Human
ccuccugcagagcugggg

SEQ ID NO: 379872 - RNA, 32 nt, Human
ccuccugcagaugcaagagcuccugggcaggg

SEQ ID NO: 379873 - RNA, 32 nt, Human
ccuccugcagcaucugcacucugggacugccu

SEQ ID NO: 379874 - RNA, 32 nt, Human
ccuccugcagccuucucaagggacagccccac

SEQ ID NO: 379875 - RNA, 32 nt, Human
ccuccugcagcucgguuaaguacccgaggccu

SEQ ID NO: 379876 - RNA, 19 nt, Human
ccuccugcaggaaggggug

SEQ ID NO: 379877 - RNA, 22 nt, Human
ccuccugcagugaaugcuccuu

SEQ ID NO: 379878 - RNA, 32 nt, Human
ccuccugcagugaaugcuccuuccauuccugu

SEQ ID NO: 379879 - RNA, 32 nt, Human
ccuccugcagugcugagaggcagcgaggacgg

SEQ ID NO: 379880 - RNA, 20 nt, Human
ccuccugcaucagcuuccca

SEQ ID NO: 379881 - RNA, 32 nt, Human
ccuccugcauucuccccucuccuaggagcucu

SEQ ID NO: 379882 - RNA, 32 nt, Human
ccuccugccacacacaugcacacauaucuagc

SEQ ID NO: 379883 - RNA, 32 nt, Human
ccuccugccaccacccgcuacccggccacccc

SEQ ID NO: 379884 - RNA, 32 nt, Human
ccuccugccacucugagcacauguccgggggu

SEQ ID NO: 379885 - RNA, 22 nt, Human
ccuccugccagcaguucuugaa

SEQ ID NO: 379886 - RNA, 32 nt, Human
ccuccugccagcucugucacccuggccaccac

SEQ ID NO: 379887 - RNA, 32 nt, Human
ccuccugccagcugcccuggugcuuucuccaa

SEQ ID NO: 379888 - RNA, 32 nt, Human
ccuccugccaugauacugucaguuaccuuagu

SEQ ID NO: 379889 - RNA, 22 nt, Human
ccuccugcccacccccuggcgu

SEQ ID NO: 379890 - RNA, 32 nt, Human
ccuccugcccacugcugucacuucaagccacu

SEQ ID NO: 379891 - RNA, 32 nt, Human
ccuccugcccagcugcucuugucagcccucug

SEQ ID NO: 379892 - RNA, 24 nt, Human
ccuccugccccagcccucuggugu

SEQ ID NO: 379893 - RNA, 22 nt, Human
ccuccugccccaggcccacuga

SEQ ID NO: 379894 - RNA, 18 nt, Human
ccuccugcccccuccaag

SEQ ID NO: 379895 - RNA, 32 nt, Human
ccuccugccccuccccuuccuccagcuuguca

SEQ ID NO: 379896 - RNA, 19 nt, Human
ccuccugccccuucaugca

SEQ ID NO: 379897 - RNA, 32 nt, Human
ccuccugcccgccucugcaccacacaaggagc

SEQ ID NO: 379898 - RNA, 31 nt, Human
ccuccugcccucucugggucucaguugcccc

SEQ ID NO: 379899 - RNA, 32 nt, Human
ccuccugcccugcaccuguccuguuguugggg

SEQ ID NO: 379900 - RNA, 15 nt, Human
ccuccugccgcugcc

SEQ ID NO: 379901 - RNA, 32 nt, Human
ccuccugccuaagcccccaaauagcugggacu

SEQ ID NO: 379902 - RNA, 32 nt, Human
ccuccugccucagcuacucaggagaauugcuu

SEQ ID NO: 379903 - RNA, 32 nt, Human
ccuccugccucagcuccugaguagcuggaacu

SEQ ID NO: 379904 - RNA, 32 nt, Human
ccuccugccuccagcacucccucccagagaac

SEQ ID NO: 379905 - RNA, 32 nt, Human
ccuccugccuccccaucuucucucugcccaga

SEQ ID NO: 379906 - RNA, 19 nt, Human
ccuccugccugcuauccaa

SEQ ID NO: 379907 - RNA, 32 nt, Human
ccuccugccuggugaagacugcccuggguacc

SEQ ID NO: 379908 - RNA, 32 nt, Human
ccuccugccugucugcacuauuccuuugcccg

SEQ ID NO: 379909 - RNA, 32 nt, Human
ccuccugcgcucaggguggcuugcagucccug

SEQ ID NO: 379910 - RNA, 32 nt, Human
ccuccugcggaacaggguuuugcucaaugacu

SEQ ID NO: 379911 - RNA, 32 nt, Human
ccuccugcguagcugggacuacaggcacacgc

SEQ ID NO: 379912 - RNA, 32 nt, Human
ccuccugcgucucaacaagccaugucccgcgg

SEQ ID NO: 379913 - RNA, 22 nt, Human
ccuccugcuaacuaucacuuca

SEQ ID NO: 379914 - RNA, 32 nt, Human
ccuccugcuaugaugccuggacagaucccgga

SEQ ID NO: 379915 - RNA, 32 nt, Human
ccuccugcuauuccucuccugaagaaccucau

SEQ ID NO: 379916 - RNA, 32 nt, Human
ccuccugcucacugccucuccugaguagaaau

SEQ ID NO: 379917 - RNA, 32 nt, Human
ccuccugcucccagaggugaccuccuccucca

SEQ ID NO: 379918 - RNA, 32 nt, Human
ccuccugcucccucccccucgcccaccauugu

SEQ ID NO: 379919 - RNA, 32 nt, Human
ccuccugcuccgggggcagaccagacucugac

SEQ ID NO: 379920 - RNA, 17 nt, Human
ccuccugcuccuuaggg

SEQ ID NO: 379921 - RNA, 32 nt, Human
ccuccugcucuuccugugggcccugcugaacu

SEQ ID NO: 379922 - RNA, 32 nt, Human
ccuccugcugagaaccuuccccuaggcccugu

SEQ ID NO: 379923 - RNA, 32 nt, Human
ccuccugcugcuucggggacccggcuacgaca

SEQ ID NO: 379924 - RNA, 32 nt, Human
ccuccugcugcuucugugcccuguuaaggcuu

SEQ ID NO: 379925 - RNA, 32 nt, Human
ccuccugcuggagaacagagacccuucaagag

SEQ ID NO: 379926 - RNA, 32 nt, Human
ccuccugcugggaacagugucccccagagccu

SEQ ID NO: 379927 - RNA, 30 nt, Human
ccuccugcugugaaaacucagaaugauaac

SEQ ID NO: 379928 - RNA, 32 nt, Human
ccuccugcugugcggcccaguuccuaacaggu

SEQ ID NO: 379929 - RNA, 20 nt, Human
ccuccugcugugggaugcug

SEQ ID NO: 379930 - RNA, 32 nt, Human
ccuccugcuguugccccuuagugaggaaucuu

SEQ ID NO: 379931 - RNA, 32 nt, Human
ccuccugcuguuuccuccuuugugguagccuc

SEQ ID NO: 379932 - RNA, 32 nt, Human
ccuccugcuuagaauaugccuuuugcuagccu

SEQ ID NO: 379933 - RNA, 32 nt, Human
ccuccugcuuccuggguucaagcgauucuccu

SEQ ID NO: 379934 - RNA, 24 nt, Human
ccuccugcuugagcccugcuguau

SEQ ID NO: 379935 - RNA, 32 nt, Human
ccuccugcuuuagugccaccccaaacugcauu

SEQ ID NO: 379936 - RNA, 32 nt, Human
ccuccugcuuuuccaccuauccuuuucccucc

SEQ ID NO: 379937 - RNA, 32 nt, Human
ccuccuggaaucuugaggcacugugaaauuua

SEQ ID NO: 379938 - RNA, 32 nt, Human
ccuccuggacugcuccccuucaucucuuaccc

SEQ ID NO: 379939 - RNA, 32 nt, Human
ccuccuggagcagaggagguuguggcgguggc

SEQ ID NO: 379940 - RNA, 32 nt, Human
ccuccuggauccuggucaggccgaaccaccgc

SEQ ID NO: 379941 - RNA, 20 nt, Human
ccuccuggaugcugcuccuu

SEQ ID NO: 379942 - RNA, 21 nt, Human
ccuccuggcaccaacugcucc

SEQ ID NO: 379943 - RNA, 32 nt, Human
ccuccuggcaggcuuccuucugggacaggggc

SEQ ID NO: 379944 - RNA, 32 nt, Human
ccuccuggcaggguagggaaggaggaccccgg

SEQ ID NO: 379945 - RNA, 32 nt, Human
ccuccuggccaacauggugaaacucugucucu

SEQ ID NO: 379946 - RNA, 22 nt, Human
ccuccuggccaaguccugcccu

SEQ ID NO: 379947 - RNA, 32 nt, Human
ccuccuggccaggccagcagugaagcaguaug

SEQ ID NO: 379948 - RNA, 24 nt, Human
ccuccuggccccacccugccccuu

SEQ ID NO: 379949 - RNA, 32 nt, Human
ccuccuggccccacccugccccuucuuuuugg

SEQ ID NO: 379950 - RNA, 27 nt, Human
ccuccuggccccauccuccugguccuu

SEQ ID NO: 379951 - RNA, 21 nt, Human
ccuccuggcccccgccuucca

SEQ ID NO: 379952 - RNA, 21 nt, Human
ccuccuggccccgcccugccc

SEQ ID NO: 379953 - RNA, 32 nt, Human
ccuccuggcccgcucaccuuccucaccccucc

SEQ ID NO: 379954 - RNA, 20 nt, Human
ccuccuggcccggaccccuu

SEQ ID NO: 379955 - RNA, 21 nt, Human
ccuccuggcccucgaugcuuc

SEQ ID NO: 379956 - RNA, 23 nt, Human
ccuccuggcccugcugcugcccu

SEQ ID NO: 379957 - RNA, 32 nt, Human
ccuccuggcccugucccaauucugagccaagg

SEQ ID NO: 379958 - RNA, 32 nt, Human
ccuccuggccggcagagggcgcaggagcccag

SEQ ID NO: 379959 - RNA, 22 nt, Human
ccuccuggccucaagugauccu

SEQ ID NO: 379960 - RNA, 32 nt, Human
ccuccuggccucaagugauccucuugccucag

SEQ ID NO: 379961 - RNA, 21 nt, Human
ccuccuggccucaggaucucc

SEQ ID NO: 379962 - RNA, 24 nt, Human
ccuccuggccucagggcaugcccu

SEQ ID NO: 379963 - RNA, 32 nt, Human
ccuccuggccuccagcucagccuucucucacc

SEQ ID NO: 379964 - RNA, 21 nt, Human
ccuccuggccucguccugccu

SEQ ID NO: 379965 - RNA, 32 nt, Human
ccuccuggccucguccugccugaccugcucug

SEQ ID NO: 379966 - RNA, 19 nt, Human
ccuccuggccucucccucc

SEQ ID NO: 379967 - RNA, 21 nt, Human
ccuccuggccugccuaguucc

SEQ ID NO: 379968 - RNA, 19 nt, Human
ccuccuggccugccugccc

SEQ ID NO: 379969 - RNA, 32 nt, Human
ccuccuggccuggaauccucagccucucuggc

SEQ ID NO: 379970 - RNA, 32 nt, Human
ccuccuggccuggacgcuguggcuuaagagua

SEQ ID NO: 379971 - RNA, 32 nt, Human
ccuccuggccugggacugcuguggcagaggaa

SEQ ID NO: 379972 - RNA, 32 nt, Human
ccuccuggcgggucuccuccagccucacuucg

SEQ ID NO: 379973 - RNA, 32 nt, Human
ccuccuggcguuuuuguuuuguguucucccuc

SEQ ID NO: 379974 - RNA, 18 nt, Human
ccuccuggcucuuuggga

SEQ ID NO: 379975 - RNA, 22 nt, Human
ccuccuggcugcacagccccuu

SEQ ID NO: 379976 - RNA, 21 nt, Human
ccuccuggcuugcacugcucc

SEQ ID NO: 379977 - RNA, 22 nt, Human
ccuccuggcuuuggcugucccu

SEQ ID NO: 379978 - RNA, 32 nt, Human
ccuccugggaaagaagggcggcagagagacca

SEQ ID NO: 379979 - RNA, 28 nt, Human
ccuccugggaaagcagagguugcaguga

SEQ ID NO: 379980 - RNA, 32 nt, Human
ccuccugggaaagggagaauggcaaagacagg

SEQ ID NO: 379981 - RNA, 32 nt, Human
ccuccugggaacacaucuggcugcacaggcug

SEQ ID NO: 379982 - RNA, 23 nt, Human
ccuccugggaaugcugacuccuu

SEQ ID NO: 379983 - RNA, 32 nt, Human
ccuccugggacccagcuucagccaucgggcca

SEQ ID NO: 379984 - RNA, 32 nt, Human
ccuccugggacccucacccacccuggcagcag

SEQ ID NO: 379985 - RNA, 32 nt, Human
ccuccugggagcccagaacuugcaguaacccu

SEQ ID NO: 379986 - RNA, 22 nt, Human
ccuccugggauaugucaccuca

SEQ ID NO: 379987 - RNA, 28 nt, Human
ccuccugggcaagcggagguugcaguga

SEQ ID NO: 379988 - RNA, 19 nt, Human
ccuccugggccccaugccc

SEQ ID NO: 379989 - RNA, 21 nt, Human
ccuccugggccgccgccuccu

SEQ ID NO: 379990 - RNA, 23 nt, Human
ccuccugggcucaagccauccuu

SEQ ID NO: 379991 - RNA, 18 nt, Human
ccuccugggcuccuuuca

SEQ ID NO: 379992 - RNA, 28 nt, Human
ccuccuggggaagcggagguugcaguga

SEQ ID NO: 379993 - RNA, 32 nt, Human
ccuccuggggcugcgcagggaggaggccuugc

SEQ ID NO: 379994 - RNA, 28 nt, Human
ccuccuggguagacagagguugcaguga

SEQ ID NO: 379995 - RNA, 32 nt, Human
ccuccuggguagcugggacuacaggcuugcac

SEQ ID NO: 379996 - RNA, 32 nt, Human
ccuccuggguagcugggauuacaagcacccaa

SEQ ID NO: 379997 - RNA, 32 nt, Human
ccuccuggguagcugggauuacaggcacgcgc

SEQ ID NO: 379998 - RNA, 32 nt, Human
ccuccuggguagcugggauuacaggugcccac

SEQ ID NO: 379999 - RNA, 32 nt, Human
ccuccugggugagaagggucagauuuuccuau

SEQ ID NO: 380000 - RNA, 32 nt, Human
ccuccugggugcugggauuacagacgugagcc

SEQ ID NO: 380001 - RNA, 32 nt, Human
ccuccugguccucaucgccccucucuccucuu

SEQ ID NO: 380002 - RNA, 23 nt, Human
ccuccuggugcccacucccgcca

SEQ ID NO: 380003 - RNA, 32 nt, Human
ccuccuggugccccuggcacugaggcacagau

SEQ ID NO: 380004 - RNA, 32 nt, Human
ccuccuggugcuggguuugcccucccaauccu

SEQ ID NO: 380005 - RNA, 32 nt, Human
ccuccuggugcuggugcccugaugcugugccu

SEQ ID NO: 380006 - RNA, 32 nt, Human
ccuccugguggagacaguggauugacagguuc

SEQ ID NO: 380007 - RNA, 32 nt, Human
ccuccugguucaagcgauucucaggccucagc

SEQ ID NO: 380008 - RNA, 21 nt, Human
ccuccugguucucaccaggaa

SEQ ID NO: 380009 - RNA, 29 nt, Human
ccuccugguuggaugucaucccccgaccc

SEQ ID NO: 380010 - RNA, 17 nt, Human
ccuccugguuuuagggg

SEQ ID NO: 380011 - RNA, 32 nt, Human
ccuccuguagagccaccggccucagcccugga

SEQ ID NO: 380012 - RNA, 32 nt, Human
ccuccugucacugcaaucugugacauuccaga

SEQ ID NO: 380013 - RNA, 21 nt, Human
ccuccugucacuguggccugc

SEQ ID NO: 380014 - RNA, 32 nt, Human
ccuccugucaucacaucaccggcugucacugg

SEQ ID NO: 380015 - RNA, 32 nt, Human
ccuccugucaucugcugacuucacagaaggcc

SEQ ID NO: 380016 - RNA, 26 nt, Human
ccuccuguccagacccagccuuggca

SEQ ID NO: 380017 - RNA, 32 nt, Human
ccuccuguccagccccuccaacuucaucgacu

SEQ ID NO: 380018 - RNA, 32 nt, Human
ccuccuguccccaccuaagccuggugggggug

SEQ ID NO: 380019 - RNA, 32 nt, Human
ccuccugucuccuuugaugcugaggccugacg

SEQ ID NO: 380020 - RNA, 32 nt, Human
ccuccugucugugucguucucugugccacagc

SEQ ID NO: 380021 - RNA, 32 nt, Human
ccuccugucuuucugcuucgccccuucaucuu

SEQ ID NO: 380022 - RNA, 32 nt, Human
ccuccugugacugcacuguccgccugugggau

SEQ ID NO: 380023 - RNA, 32 nt, Human
ccuccugugcaucccucccucccauccccugg

SEQ ID NO: 380024 - RNA, 32 nt, Human
ccuccugugccuggccccagucugggccaucu

SEQ ID NO: 380025 - RNA, 32 nt, Human
ccuccugugcuccaagguucugaagauaucuu

SEQ ID NO: 380026 - RNA, 32 nt, Human
ccuccugugcugcuggucacuguaacccacua

SEQ ID NO: 380027 - RNA, 32 nt, Human
ccuccugugcuuccuuucucguuccuaacuuu

SEQ ID NO: 380028 - RNA, 31 nt, Human
ccuccuguggaaggaacuggauucaucccuu

SEQ ID NO: 380029 - RNA, 32 nt, Human
ccuccuguguaacugggauuacaggcucccac

SEQ ID NO: 380030 - RNA, 32 nt, Human
ccuccuguguagcugccaccuccccgcugggc

SEQ ID NO: 380031 - RNA, 32 nt, Human
ccuccuguguucccaccuuacuguccaccaac

SEQ ID NO: 380032 - RNA, 32 nt, Human
ccuccuguguuccugcuuccucuccuuugcug

SEQ ID NO: 380033 - RNA, 32 nt, Human
ccuccuguguugaugccacuucccagggugga

SEQ ID NO: 380034 - RNA, 32 nt, Human
ccuccuguucuugagccaguugucucuuuugu

SEQ ID NO: 380035 - RNA, 16 nt, Human
ccuccuguucuuggga

SEQ ID NO: 380036 - RNA, 32 nt, Human
ccuccuguugcagcacaaggccggggucucug

SEQ ID NO: 380037 - RNA, 32 nt, Human
ccuccuguuggcuggggaaccccuaaagucac

SEQ ID NO: 380038 - RNA, 32 nt, Human
ccuccuuaaaggccccuuggaacaugcaggua

SEQ ID NO: 380039 - RNA, 32 nt, Human
ccuccuuagaagauaccuaacaacagcacugu

SEQ ID NO: 380040 - RNA, 19 nt, Human
ccuccuuagccccacuggu

SEQ ID NO: 380041 - RNA, 32 nt, Human
ccuccuuagggagacaggugacccugggugcc

SEQ ID NO: 380042 - RNA, 32 nt, Human
ccuccuuaguagcugggacuaccagugcauac

SEQ ID NO: 380043 - RNA, 32 nt, Human
ccuccuuaguagcugggauuacaggcaugugc

SEQ ID NO: 380044 - RNA, 32 nt, Human
ccuccuuagugucgcuccugugccucaguggg

SEQ ID NO: 380045 - RNA, 32 nt, Human
ccuccuucagcccacuaguagugcgcugguaa

SEQ ID NO: 380046 - RNA, 32 nt, Human
ccuccuucagggacuggccugagaccggggca

SEQ ID NO: 380047 - RNA, 16 nt, Human
ccuccuucauccagau

SEQ ID NO: 380048 - RNA, 32 nt, Human
ccuccuucauucccaaccccugccucuggugg

SEQ ID NO: 380049 - RNA, 32 nt, Human
ccuccuucauuuuucuuccaaaauugcugcug

SEQ ID NO: 380050 - RNA, 32 nt, Human
ccuccuuccacgccugaauuuggcuucaggcu

SEQ ID NO: 380051 - RNA, 21 nt, Human
ccuccuuccaggguuuaggga

SEQ ID NO: 380052 - RNA, 32 nt, Human
ccuccuuccaguagucccauguugcuucacac

SEQ ID NO: 380053 - RNA, 32 nt, Human
ccuccuuccaugucuugagcacuggcucaccc

SEQ ID NO: 380054 - RNA, 32 nt, Human
ccuccuuccauuccuucuucccccucucugca

SEQ ID NO: 380055 - RNA, 21 nt, Human
ccuccuucccaagccuuaggg

SEQ ID NO: 380056 - RNA, 32 nt, Human
ccuccuucccacggggcuucugagcuugcucc

SEQ ID NO: 380057 - RNA, 32 nt, Human
ccuccuucccauuggcuuucucuccuuggccu

SEQ ID NO: 380058 - RNA, 32 nt, Human
ccuccuuccccaccuccuucccaaacccucuu

SEQ ID NO: 380059 - RNA, 32 nt, Human
ccuccuucccccucaucuccccuuccugggac

SEQ ID NO: 380060 - RNA, 32 nt, Human
ccuccuuccccucacuccuccccuccuucgcu

SEQ ID NO: 380061 - RNA, 32 nt, Human
ccuccuuccccucauuccuccccuccuucgcu

SEQ ID NO: 380062 - RNA, 32 nt, Human
ccuccuuccccucccugaaccccacaguccgc

SEQ ID NO: 380063 - RNA, 21 nt, Human
ccuccuuccccuuggagccug

SEQ ID NO: 380064 - RNA, 32 nt, Human
ccuccuucccgagaaauaagacaggacaauaa

SEQ ID NO: 380065 - RNA, 32 nt, Human
ccuccuucccgccuaugugagccauccugaga

SEQ ID NO: 380066 - RNA, 32 nt, Human
ccuccuucccucucuucugccugauagaggga

SEQ ID NO: 380067 - RNA, 32 nt, Human
ccuccuucccuuccacacuuccuuccugggua

SEQ ID NO: 380068 - RNA, 19 nt, Human
ccuccuucccuucuuggga

SEQ ID NO: 380069 - RNA, 32 nt, Human
ccuccuuccgaaugccaaccccgggagggcag

SEQ ID NO: 380070 - RNA, 32 nt, Human
ccuccuuccuaaccugaggccugggguuccuc

SEQ ID NO: 380071 - RNA, 32 nt, Human
ccuccuuccuacaggggcuccucuguggguga

SEQ ID NO: 380072 - RNA, 32 nt, Human
ccuccuuccuaucuuucccuugccuacagaaa

SEQ ID NO: 380073 - RNA, 32 nt, Human
ccuccuuccucuuccccuuucuaguuccccua

SEQ ID NO: 380074 - RNA, 32 nt, Human
ccuccuuccugaugucugccauuagcauugga

SEQ ID NO: 380075 - RNA, 32 nt, Human
ccuccuuccugcccuucugccugccugugucu

SEQ ID NO: 380076 - RNA, 32 nt, Human
ccuccuuccuucuccccuggcuguucgcgauc

SEQ ID NO: 380077 - RNA, 17 nt, Human
ccuccuuccuucuucca

SEQ ID NO: 380078 - RNA, 32 nt, Human
ccuccuucgccacuccaccagccuggaccucc

SEQ ID NO: 380079 - RNA, 32 nt, Human
ccuccuucgccuucugccaugacuguaagcuu

SEQ ID NO: 380080 - RNA, 20 nt, Human
ccuccuucgcgccugcagcu

SEQ ID NO: 380081 - RNA, 32 nt, Human
ccuccuucgcucgcucaaucucuuuuauucag

SEQ ID NO: 380082 - RNA, 24 nt, Human
ccuccuucuaccacuggggugcug

SEQ ID NO: 380083 - RNA, 32 nt, Human
ccuccuucuaccacuggggugcugcuguacca

SEQ ID NO: 380084 - RNA, 32 nt, Human
ccuccuucuccaaccucuaccccaccauuagu

SEQ ID NO: 380085 - RNA, 32 nt, Human
ccuccuucuccacuucuacaaucucauucucu

SEQ ID NO: 380086 - RNA, 32 nt, Human
ccuccuucuccagccucuucucccgggaacuc

SEQ ID NO: 380087 - RNA, 23 nt, Human
ccuccuucuccccgucuugggga

SEQ ID NO: 380088 - RNA, 32 nt, Human
ccuccuucuccuccuccuccuucucuuccuuu

SEQ ID NO: 380089 - RNA, 32 nt, Human
ccuccuucuccuccuucucggcuuccuccuca

SEQ ID NO: 380090 - RNA, 32 nt, Human
ccuccuucucucuccgcagcuuucaagaauug

SEQ ID NO: 380091 - RNA, 19 nt, Human
ccuccuucucucuuggcga

SEQ ID NO: 380092 - RNA, 32 nt, Human
ccuccuucucucuuucuuuucuucuauucucc

SEQ ID NO: 380093 - RNA, 23 nt, Human
ccuccuucucugcacccuuggca

SEQ ID NO: 380094 - RNA, 32 nt, Human
ccuccuucucugcuuugggucccuucucucac

SEQ ID NO: 380095 - RNA, 32 nt, Human
ccuccuucucugugagcugucagucuagguua

SEQ ID NO: 380096 - RNA, 32 nt, Human
ccuccuucucuuuccuccuccuccucaccaag

SEQ ID NO: 380097 - RNA, 21 nt, Human
ccuccuucugcaggagcucug

SEQ ID NO: 380098 - RNA, 22 nt, Human
ccuccuucugcuucggugcguu

SEQ ID NO: 380099 - RNA, 23 nt, Human
ccuccuucuggggcugggcucug

SEQ ID NO: 380100 - RNA, 32 nt, Human
ccuccuucuggguccagacucuggguggagug

SEQ ID NO: 380101 - RNA, 21 nt, Human
ccuccuucuguagagggcgcc

SEQ ID NO: 380102 - RNA, 22 nt, Human
ccuccuucuguuucccagaccg

SEQ ID NO: 380103 - RNA, 21 nt, Human
ccuccuucuucgacugcuccu

SEQ ID NO: 380104 - RNA, 32 nt, Human
ccuccuugaagcugcccuugaagacuucccga

SEQ ID NO: 380105 - RNA, 32 nt, Human
ccuccuugaaguuuacacuuugccacugcugg

SEQ ID NO: 380106 - RNA, 32 nt, Human
ccuccuugacaccuccccguggcuccagcaag

SEQ ID NO: 380107 - RNA, 32 nt, Human
ccuccuugagccacaguuagcugccaacuggg

SEQ ID NO: 380108 - RNA, 32 nt, Human
ccuccuugagcuccgccacccuucccgaaguu

SEQ ID NO: 380109 - RNA, 32 nt, Human
ccuccuugaggcaaacagccugggcuucucac

SEQ ID NO: 380110 - RNA, 32 nt, Human
ccuccuugaguugcccccuccuuguggguuua

SEQ ID NO: 380111 - RNA, 21 nt, Human
ccuccuugcaaugggcugcca

SEQ ID NO: 380112 - RNA, 32 nt, Human
ccuccuugcaccggugaaacucaggccacacu

SEQ ID NO: 380113 - RNA, 32 nt, Human
ccuccuugcccaggcaggaggcuggggugcug

SEQ ID NO: 380114 - RNA, 32 nt, Human
ccuccuugcccaucccaccacccggccuuucc

SEQ ID NO: 380115 - RNA, 32 nt, Human
ccuccuugcuaucugggcugaguggccagggc

SEQ ID NO: 380116 - RNA, 19 nt, Human
ccuccuugcuugucaccca

SEQ ID NO: 380117 - RNA, 17 nt, Human
ccuccuugcuuugggga

SEQ ID NO: 380118 - RNA, 24 nt, Human
ccuccuuggacacggccauccugg

SEQ ID NO: 380119 - RNA, 32 nt, Human
ccuccuuggagccucagacuccaagcuaggcu

SEQ ID NO: 380120 - RNA, 32 nt, Human
ccuccuuggccauuuucauguucucugccaau

SEQ ID NO: 380121 - RNA, 32 nt, Human
ccuccuuggggcuggagaucguuggggauagu

SEQ ID NO: 380122 - RNA, 32 nt, Human
ccuccuuggggguccuuccagccugaggggcu

SEQ ID NO: 380123 - RNA, 32 nt, Human
ccuccuuggguagaaagagggagcgagggcaa

SEQ ID NO: 380124 - RNA, 32 nt, Human
ccuccuugucaauguccccauccugggaagcc

SEQ ID NO: 380125 - RNA, 32 nt, Human
ccuccuuguccacccaccuaugugccaacugu

SEQ ID NO: 380126 - RNA, 19 nt, Human
ccuccuugucccuccuaca

SEQ ID NO: 380127 - RNA, 31 nt, Human
ccuccuugucuggaaagagggugggucaucu

SEQ ID NO: 380128 - RNA, 21 nt, Human
ccuccuugugucugaugcaca

SEQ ID NO: 380129 - RNA, 32 nt, Human
ccuccuuguuucagcugggccugcuguccagc

SEQ ID NO: 380130 - RNA, 20 nt, Human
ccuccuuuaagaggacuugg

SEQ ID NO: 380131 - RNA, 18 nt, Human
ccuccuuuaauuuaggga

SEQ ID NO: 380132 - RNA, 17 nt, Human
ccuccuuuacuuaaggg

SEQ ID NO: 380133 - RNA, 21 nt, Human
ccuccuuuagagguuugggga

SEQ ID NO: 380134 - RNA, 32 nt, Human
ccuccuuuauccucaucuuucuucuaugcaga

SEQ ID NO: 380135 - RNA, 18 nt, Human
ccuccuuuauuugagggg

SEQ ID NO: 380136 - RNA, 32 nt, Human
ccuccuuucagcccucuccaggugucuuuggg

SEQ ID NO: 380137 - RNA, 17 nt, Human
ccuccuuucauaggaga

SEQ ID NO: 380138 - RNA, 32 nt, Human
ccuccuuuccaaauaagugcauuuauugccuc

SEQ ID NO: 380139 - RNA, 20 nt, Human
ccuccuuuccagcuauuuug

SEQ ID NO: 380140 - RNA, 16 nt, Human
ccuccuuuccccuggg

SEQ ID NO: 380141 - RNA, 18 nt, Human
ccuccuuuccccuggggg

SEQ ID NO: 380142 - RNA, 18 nt, Human
ccuccuuucccgcagggg

SEQ ID NO: 380143 - RNA, 18 nt, Human
ccuccuuucccggugggg

SEQ ID NO: 380144 - RNA, 19 nt, Human
ccuccuuucccuaccaggg

SEQ ID NO: 380145 - RNA, 32 nt, Human
ccuccuuucccucacccagagcuggauuucca

SEQ ID NO: 380146 - RNA, 32 nt, Human
ccuccuuucccucucuccaucuuccaaucccu

SEQ ID NO: 380147 - RNA, 32 nt, Human
ccuccuuuccucagccccuuguucuucccugu

SEQ ID NO: 380148 - RNA, 15 nt, Human
ccuccuuuccugggg

SEQ ID NO: 380149 - RNA, 19 nt, Human
ccuccuuuccuggggguga

SEQ ID NO: 380150 - RNA, 32 nt, Human
ccuccuuucucccaaagccagaugugagaacg

SEQ ID NO: 380151 - RNA, 32 nt, Human
ccuccuuucucccacguccuaucugccucucg

SEQ ID NO: 380152 - RNA, 32 nt, Human
ccuccuuucugagcuccagccccagccccucg

SEQ ID NO: 380153 - RNA, 23 nt, Human
ccuccuuucugggacucccggca

SEQ ID NO: 380154 - RNA, 32 nt, Human
ccuccuuucuucuucucugccucuccugccuc

SEQ ID NO: 380155 - RNA, 17 nt, Human
ccuccuuucuuggcggg

SEQ ID NO: 380156 - RNA, 18 nt, Human
ccuccuuucuuuugggga

SEQ ID NO: 380157 - RNA, 32 nt, Human
ccuccuuugccucugaaugacccagccuggag

SEQ ID NO: 380158 - RNA, 32 nt, Human
ccuccuuugcgcugggcugagcccagagccga

SEQ ID NO: 380159 - RNA, 32 nt, Human
ccuccuuugcuccugcugcuucucccaacagc

SEQ ID NO: 380160 - RNA, 23 nt, Human
ccuccuuugcuucacucccagca

SEQ ID NO: 380161 - RNA, 17 nt, Human
ccuccuuugguucggga

SEQ ID NO: 380162 - RNA, 18 nt, Human
ccuccuuuguguuagggg

SEQ ID NO: 380163 - RNA, 17 nt, Human
ccuccuuuguugcugga

SEQ ID NO: 380164 - RNA, 19 nt, Human
ccuccuuuuaaaaugggga

SEQ ID NO: 380165 - RNA, 19 nt, Human
ccuccuuuucagguaagga

SEQ ID NO: 380166 - RNA, 18 nt, Human
ccuccuuuuccaaaguga

SEQ ID NO: 380167 - RNA, 18 nt, Human
ccuccuuuuccagcggga

SEQ ID NO: 380168 - RNA, 19 nt, Human
ccuccuuuucccacaggga

SEQ ID NO: 380169 - RNA, 21 nt, Human
ccuccuuuucccaucccgcca

SEQ ID NO: 380170 - RNA, 32 nt, Human
ccuccuuuucccuccaucacucagagguaggg

SEQ ID NO: 380171 - RNA, 19 nt, Human
ccuccuuuucuagaugggg

SEQ ID NO: 380172 - RNA, 19 nt, Human
ccuccuuuucucucaguga

SEQ ID NO: 380173 - RNA, 32 nt, Human
ccuccuuuucuuucucuccucuuugccugucu

SEQ ID NO: 380174 - RNA, 24 nt, Human
ccuccuuuuguuuugaggguuuug

SEQ ID NO: 380175 - RNA, 32 nt, Human
ccuccuuuuucagacuuguuuguaaaguacag

SEQ ID NO: 380176 - RNA, 18 nt, Human
ccuccuuuuuccaaggga

SEQ ID NO: 380177 - RNA, 19 nt, Human
ccuccuuuuucugagugga

SEQ ID NO: 380178 - RNA, 16 nt, Human
ccuccuuuuuggggga

SEQ ID NO: 380179 - RNA, 32 nt, Human
ccucgaaaagugcugggauuacaggcgugagc

SEQ ID NO: 380180 - RNA, 32 nt, Human
ccucgaaccaacaacagaagcugacaaaugcc

SEQ ID NO: 380181 - RNA, 32 nt, Human
ccucgaaccagccacaccaaacucugcugcag

SEQ ID NO: 380182 - RNA, 32 nt, Human
ccucgaacucuugggcuucaagcaauccuccu

SEQ ID NO: 380183 - RNA, 32 nt, Human
ccucgaaggaagcacaaacccuccauccacuu

SEQ ID NO: 380184 - RNA, 32 nt, Human
ccucgacagugaugcaaggacacagagaguac

SEQ ID NO: 380185 - RNA, 32 nt, Human
ccucgacaucuuccuccucuacugguaaccaa

SEQ ID NO: 380186 - RNA, 32 nt, Human
ccucgaccaggggcaccucuacucgaccaggg

SEQ ID NO: 380187 - RNA, 32 nt, Human
ccucgaccccacccuucuuuccuaccagccca

SEQ ID NO: 380188 - RNA, 22 nt, Human
ccucgaccccgugacacccugg

SEQ ID NO: 380189 - RNA, 32 nt, Human
ccucgaccccucacccccuccucccgggcucu

SEQ ID NO: 380190 - RNA, 32 nt, Human
ccucgaccccucucccccuugacuauccaaag

SEQ ID NO: 380191 - RNA, 32 nt, Human
ccucgacccuuccuccuccuuugccuaggagg

SEQ ID NO: 380192 - RNA, 22 nt, Human
ccucgaccgcccacacauuccu

SEQ ID NO: 380193 - RNA, 20 nt, Human
ccucgaccucucucuucuca

SEQ ID NO: 380194 - RNA, 32 nt, Human
ccucgacguucucuccccuucucuccguggcc

SEQ ID NO: 380195 - RNA, 32 nt, Human
ccucgagacucugcaaagcauuacugcugcuu

SEQ ID NO: 380196 - RNA, 32 nt, Human
ccucgagauccucuacccuucucugggccuug

SEQ ID NO: 380197 - RNA, 20 nt, Human
ccucgagaugggugcugguc

SEQ ID NO: 380198 - RNA, 32 nt, Human
ccucgagcaaauggaaugugacuuugaaaacc

SEQ ID NO: 380199 - RNA, 32 nt, Human
ccucgagcaccaugggccugagggguucccgg

SEQ ID NO: 380200 - RNA, 22 nt, Human
ccucgagcagcgugagagaugc

SEQ ID NO: 380201 - RNA, 32 nt, Human
ccucgagcccuagcagugaagaagauuccauu

SEQ ID NO: 380202 - RNA, 22 nt, Human
ccucgagcucgcgaacucggug

SEQ ID NO: 380203 - RNA, 32 nt, Human
ccucgaggaaccuggucuccgcauccaguuac

SEQ ID NO: 380204 - RNA, 32 nt, Human
ccucgaggacauccacaugagccuggagaagg

SEQ ID NO: 380205 - RNA, 32 nt, Human
ccucgaggcagaugcaccugcuugcugcuauu

SEQ ID NO: 380206 - RNA, 20 nt, Human
ccucgaggccagccugcucc

SEQ ID NO: 380207 - RNA, 22 nt, Human
ccucgaggcgggaggggggcag

SEQ ID NO: 380208 - RNA, 32 nt, Human
ccucgaggcucccucugacugaaggcgcgcug

SEQ ID NO: 380209 - RNA, 17 nt, Human
ccucgagguucaccuca

SEQ ID NO: 380210 - RNA, 32 nt, Human
ccucgaucaugacaggcucaucagccugugcc

SEQ ID NO: 380211 - RNA, 22 nt, Human
ccucgaucgucaucucugguua

SEQ ID NO: 380212 - RNA, 32 nt, Human
ccucgaucuauuuccuucuuccuucugaccuc

SEQ ID NO: 380213 - RNA, 32 nt, Human
ccucgaucucccaggcucuuucugcagucaua

SEQ ID NO: 380214 - RNA, 32 nt, Human
ccucgaucucgcucccccuucggucuuucgac

SEQ ID NO: 380215 - RNA, 32 nt, Human
ccucgaugaggugaguugggagcacguuccug

SEQ ID NO: 380216 - RNA, 19 nt, Human
ccucgauucaauugccuua

SEQ ID NO: 380217 - RNA, 32 nt, Human
ccucgcaaccacugcuuugucucugaagugag

SEQ ID NO: 380218 - RNA, 32 nt, Human
ccucgcaagaagcacaggaaagagaaguuucu

SEQ ID NO: 380219 - RNA, 32 nt, Human
ccucgcaaguagcugggacuacagccgugcac

SEQ ID NO: 380220 - RNA, 32 nt, Human
ccucgcaaguagcugggauuacaggcgccugc

SEQ ID NO: 380221 - RNA, 32 nt, Human
ccucgcaccagcugcaccugccuagcauuaga

SEQ ID NO: 380222 - RNA, 22 nt, Human
ccucgcagaggccagcacccca

SEQ ID NO: 380223 - RNA, 24 nt, Human
ccucgcagcaccaucugccucuug

SEQ ID NO: 380224 - RNA, 19 nt, Human
ccucgcagccccuugcucc

SEQ ID NO: 380225 - RNA, 20 nt, Human
ccucgcaggagccgcccccc

SEQ ID NO: 380226 - RNA, 21 nt, Human
ccucgcaggagcucuucuucc

SEQ ID NO: 380227 - RNA, 18 nt, Human
ccucgcagggcccugccg

SEQ ID NO: 380228 - RNA, 32 nt, Human
ccucgcaggggcugagcuggaggcagcgaggc

SEQ ID NO: 380229 - RNA, 32 nt, Human
ccucgcagguggucaucaugcccagggaagga

SEQ ID NO: 380230 - RNA, 21 nt, Human
ccucgcagucaccgccaccca

SEQ ID NO: 380231 - RNA, 32 nt, Human
ccucgcaucuucaccagcauuggagaggacua

SEQ ID NO: 380232 - RNA, 32 nt, Human
ccucgccaacauggugagacccugucucuacu

SEQ ID NO: 380233 - RNA, 32 nt, Human
ccucgccaccauguacgugagcuaccuccugg

SEQ ID NO: 380234 - RNA, 23 nt, Human
ccucgccacuaccgccgccgccg

SEQ ID NO: 380235 - RNA, 32 nt, Human
ccucgccacuccugcucuuucuccacugcaug

SEQ ID NO: 380236 - RNA, 32 nt, Human
ccucgccacugcaccucggcauaugccaccuc

SEQ ID NO: 380237 - RNA, 32 nt, Human
ccucgccagacccuggccagcaugguuguccu

SEQ ID NO: 380238 - RNA, 19 nt, Human
ccucgccagagaagcucuu

SEQ ID NO: 380239 - RNA, 32 nt, Human
ccucgccagccauguggaacuguaaguccauu

SEQ ID NO: 380240 - RNA, 32 nt, Human
ccucgccagcccugcuggaguuugcugugggc

SEQ ID NO: 380241 - RNA, 32 nt, Human
ccucgccaggcacagaggacauggacagucua

SEQ ID NO: 380242 - RNA, 32 nt, Human
ccucgccaggcucucccuggauccagacggga

SEQ ID NO: 380243 - RNA, 32 nt, Human
ccucgccaggcuggcucugccugcgccucacu

SEQ ID NO: 380244 - RNA, 32 nt, Human
ccucgccaucuucuucucacagccggaccgga

SEQ ID NO: 380245 - RNA, 21 nt, Human
ccucgcccaccagcugggccc

SEQ ID NO: 380246 - RNA, 32 nt, Human
ccucgcccaugugggucagugggagcugcagg

SEQ ID NO: 380247 - RNA, 19 nt, Human
ccucgccccaagcaagcca

SEQ ID NO: 380248 - RNA, 32 nt, Human
ccucgccccacagggaccuggacacgcccggc

SEQ ID NO: 380249 - RNA, 22 nt, Human
ccucgccccauccacuccggug

SEQ ID NO: 380250 - RNA, 32 nt, Human
ccucgccccauccuuugcuuccuuccuuccuu

SEQ ID NO: 380251 - RNA, 21 nt, Human
ccucgcccccuccccucgggc

SEQ ID NO: 380252 - RNA, 32 nt, Human
ccucgccccuccaguguugccuccucccaucc

SEQ ID NO: 380253 - RNA, 21 nt, Human
ccucgcccgcggacacccugg

SEQ ID NO: 380254 - RNA, 19 nt, Human
ccucgcccgcugccucccu

SEQ ID NO: 380255 - RNA, 32 nt, Human
ccucgcccucacugcugacuccucuuccagau

SEQ ID NO: 380256 - RNA, 32 nt, Human
ccucgcccuccccucccgauccucauccccuu

SEQ ID NO: 380257 - RNA, 32 nt, Human
ccucgcccuccuccuccuccucgcccuccccu

SEQ ID NO: 380258 - RNA, 32 nt, Human
ccucgcccugcugcauuugcucuugucuggau

SEQ ID NO: 380259 - RNA, 32 nt, Human
ccucgcccuggcccuggcugggcggggaagcu

SEQ ID NO: 380260 - RNA, 32 nt, Human
ccucgcccuguauuucuccaucuccaguucug

SEQ ID NO: 380261 - RNA, 17 nt, Human
ccucgcccuucuccucg

SEQ ID NO: 380262 - RNA, 32 nt, Human
ccucgccgaagccgucaagguggcugcucggg

SEQ ID NO: 380263 - RNA, 22 nt, Human
ccucgccgccagccuuccaggu

SEQ ID NO: 380264 - RNA, 17 nt, Human
ccucgccgccgcccccg

SEQ ID NO: 380265 - RNA, 20 nt, Human
ccucgccgccgccgccgccg

SEQ ID NO: 380266 - RNA, 19 nt, Human
ccucgccgccgccgcugcc

SEQ ID NO: 380267 - RNA, 22 nt, Human
ccucgccgcgcguccguccucc

SEQ ID NO: 380268 - RNA, 32 nt, Human
ccucgccgcgugccuccgcaggagucgggcuc

SEQ ID NO: 380269 - RNA, 26 nt, Human
ccucgccgcuggccaccagccuucca

SEQ ID NO: 380270 - RNA, 20 nt, Human
ccucgccgcuuccccucguc

SEQ ID NO: 380271 - RNA, 32 nt, Human
ccucgccgugcuggcccugaccuggcucagcu

SEQ ID NO: 380272 - RNA, 32 nt, Human
ccucgccucccgcggcugccagcgugcacugg

SEQ ID NO: 380273 - RNA, 32 nt, Human
ccucgccucuuccauccacgucuuccaaggcc

SEQ ID NO: 380274 - RNA, 32 nt, Human
ccucgccugaagccagccucucugccaaguca

SEQ ID NO: 380275 - RNA, 32 nt, Human
ccucgccugagcgggcgccucugaaguggagg

SEQ ID NO: 380276 - RNA, 32 nt, Human
ccucgccugcucccugccuccuuuucagggcu

SEQ ID NO: 380277 - RNA, 32 nt, Human
ccucgccuuccuccuccucgucaggcucgacc

SEQ ID NO: 380278 - RNA, 32 nt, Human
ccucgcgacauccugaucucuccugcaauaac

SEQ ID NO: 380279 - RNA, 32 nt, Human
ccucgcgaccacaagcccucagguccggcgcg

SEQ ID NO: 380280 - RNA, 32 nt, Human
ccucgcgagcagcugggacuacaggugcccgc

SEQ ID NO: 380281 - RNA, 32 nt, Human
ccucgcgaguagcuaggacuacaggcgcaugu

SEQ ID NO: 380282 - RNA, 32 nt, Human
ccucgcgaguagcuggaauuacaggaagcuaa

SEQ ID NO: 380283 - RNA, 32 nt, Human
ccucgcgccugggcagcucucucccagggcuu

SEQ ID NO: 380284 - RNA, 32 nt, Human
ccucgcgccuucugcagacuccguggcuggcg

SEQ ID NO: 380285 - RNA, 32 nt, Human
ccucgcggaaggcguggucuggugacucagaa

SEQ ID NO: 380286 - RNA, 32 nt, Human
ccucgcggacacacccagaugccccagggacc

SEQ ID NO: 380287 - RNA, 32 nt, Human
ccucgcgggaccccacccucucccagccugcc

SEQ ID NO: 380288 - RNA, 22 nt, Human
ccucgcgggaggccggcucaga

SEQ ID NO: 380289 - RNA, 31 nt, Human
ccucgcgggugcagcagcacagcagggagug

SEQ ID NO: 380290 - RNA, 32 nt, Human
ccucgcggugagaggaaggcggaggagcggga

SEQ ID NO: 380291 - RNA, 32 nt, Human
ccucgcuaauggaacaggcaucuugcuggacu

SEQ ID NO: 380292 - RNA, 21 nt, Human
ccucgcuccacgcccuccagg

SEQ ID NO: 380293 - RNA, 32 nt, Human
ccucgcuccccacucugcucugaugcaucaga

SEQ ID NO: 380294 - RNA, 21 nt, Human
ccucgcucccgccccucgagg

SEQ ID NO: 380295 - RNA, 32 nt, Human
ccucgcucccggaccccacggcugcaaacuga

SEQ ID NO: 380296 - RNA, 32 nt, Human
ccucgcucccuccccgcucgcuuccuccccca

SEQ ID NO: 380297 - RNA, 32 nt, Human
ccucgcucccuucaagacgaggggcagggaag

SEQ ID NO: 380298 - RNA, 32 nt, Human
ccucgcuccugagaccuggcccugccacacgc

SEQ ID NO: 380299 - RNA, 32 nt, Human
ccucgcucgaggccucuucuccccagcaccgc

SEQ ID NO: 380300 - RNA, 32 nt, Human
ccucgcucucccuccuccuccuccuccgagcu

SEQ ID NO: 380301 - RNA, 32 nt, Human
ccucgcucucugucuccagcaguucucucgaa

SEQ ID NO: 380302 - RNA, 32 nt, Human
ccucgcucuggccgcucuugcugcuccugucu

SEQ ID NO: 380303 - RNA, 23 nt, Human
ccucgcugaacaccaucccgcca

SEQ ID NO: 380304 - RNA, 32 nt, Human
ccucgcugaggagagaaagggaggcgugccug

SEQ ID NO: 380305 - RNA, 32 nt, Human
ccucgcugccauucucugggcuggaaugugaa

SEQ ID NO: 380306 - RNA, 32 nt, Human
ccucgcugccuagauuccgaggaaaaggagau

SEQ ID NO: 380307 - RNA, 19 nt, Human
ccucgcugcugucauccca

SEQ ID NO: 380308 - RNA, 32 nt, Human
ccucgcuggaacauguccugccaccaagugcc

SEQ ID NO: 380309 - RNA, 20 nt, Human
ccucgcuggcgccccagagc

SEQ ID NO: 380310 - RNA, 32 nt, Human
ccucgcuguccggcccccaccccagccucgcc

SEQ ID NO: 380311 - RNA, 32 nt, Human
ccucgcugugccaccaccccucccucugcucu

SEQ ID NO: 380312 - RNA, 32 nt, Human
ccucgcuucagggucagaguccaaguacagau

SEQ ID NO: 380313 - RNA, 19 nt, Human
ccucgcuuccccugaguca

SEQ ID NO: 380314 - RNA, 32 nt, Human
ccucggaaaagcuucaaguagagcuggagacc

SEQ ID NO: 380315 - RNA, 32 nt, Human
ccucggaacgcuugccuuuccucccuccacaa

SEQ ID NO: 380316 - RNA, 32 nt, Human
ccucggaacugcggucuccugccugugcuuca

SEQ ID NO: 380317 - RNA, 19 nt, Human
ccucggacagucccugcuc

SEQ ID NO: 380318 - RNA, 32 nt, Human
ccucggaccagagccauguaagaaaaggccug

SEQ ID NO: 380319 - RNA, 32 nt, Human
ccucggacucaagugauccaccagccuccacc

SEQ ID NO: 380320 - RNA, 23 nt, Human
ccucggacucugguuaccucuga

SEQ ID NO: 380321 - RNA, 32 nt, Human
ccucggacugaagcaagagacagggaaggaau

SEQ ID NO: 380322 - RNA, 32 nt, Human
ccucggagagccugagcaguccaaugggggcu

SEQ ID NO: 380323 - RNA, 32 nt, Human
ccucggagcaccagucacuuacuccaagaagu

SEQ ID NO: 380324 - RNA, 32 nt, Human
ccucggagcccaggcagcuguguccagugaga

SEQ ID NO: 380325 - RNA, 18 nt, Human
ccucggagcuccacagua

SEQ ID NO: 380326 - RNA, 32 nt, Human
ccucggaggcagaggaaggaaaauggggaugg

SEQ ID NO: 380327 - RNA, 23 nt, Human
ccucggaggcggagguugcagug

SEQ ID NO: 380328 - RNA, 24 nt, Human
ccucggaggcggagguugcaguga

SEQ ID NO: 380329 - RNA, 32 nt, Human
ccucggaggcggagguugcagugagccaagau

SEQ ID NO: 380330 - RNA, 32 nt, Human
ccucggaggcggagguugcagugagcugagau

SEQ ID NO: 380331 - RNA, 32 nt, Human
ccucggaggcguucagcugcuucaagaugaag

SEQ ID NO: 380332 - RNA, 32 nt, Human
ccucggaggcugaaguugcagugagccaagau

SEQ ID NO: 380333 - RNA, 32 nt, Human
ccucggcaacuggccgcacugacccgucaacu

SEQ ID NO: 380334 - RNA, 32 nt, Human
ccucggcacagcugccacgggcucuccugggc

SEQ ID NO: 380335 - RNA, 32 nt, Human
ccucggcagcagcgggaggcagaggaaggcgg

SEQ ID NO: 380336 - RNA, 32 nt, Human
ccucggcagccacagccgcugcagccggggca

SEQ ID NO: 380337 - RNA, 20 nt, Human
ccucggcagccuugggaagc

SEQ ID NO: 380338 - RNA, 32 nt, Human
ccucggcaggcauggcuggugccugaagaccc

SEQ ID NO: 380339 - RNA, 20 nt, Human
ccucggccaucggcugcucc

SEQ ID NO: 380340 - RNA, 20 nt, Human
ccucggcccagaccucggug

SEQ ID NO: 380341 - RNA, 32 nt, Human
ccucggccccgcugcacuccaccuccgccccc

SEQ ID NO: 380342 - RNA, 32 nt, Human
ccucggccccuuccucucuacacagaguggug

SEQ ID NO: 380343 - RNA, 32 nt, Human
ccucggcccucgggcggucgaugggacggggc

SEQ ID NO: 380344 - RNA, 32 nt, Human
ccucggcccuggagcugaagguggaggagcug

SEQ ID NO: 380345 - RNA, 32 nt, Human
ccucggccgcccccaccgccucccagauguac

SEQ ID NO: 380346 - RNA, 15 nt, Human
ccucggccgcugccg

SEQ ID NO: 380347 - RNA, 32 nt, Human
ccucggccgugaggaggaggagggaugcaagc

SEQ ID NO: 380348 - RNA, 32 nt, Human
ccucggccuccaggagugggaguuggaguuga

SEQ ID NO: 380349 - RNA, 32 nt, Human
ccucggccucgacgccagcccaggcgccgacc

SEQ ID NO: 380350 - RNA, 19 nt, Human
ccucggccucggccuccga

SEQ ID NO: 380351 - RNA, 32 nt, Human
ccucggccucucaaacugcugggauuacaggc

SEQ ID NO: 380352 - RNA, 32 nt, Human
ccucggccuggacuacuauagcggggacagca

SEQ ID NO: 380353 - RNA, 21 nt, Human
ccucggcgaagggacagcgaa

SEQ ID NO: 380354 - RNA, 32 nt, Human
ccucggcgcccagggucugaggcugcagcccc

SEQ ID NO: 380355 - RNA, 32 nt, Human
ccucggcggcaccccucgucccgcgacuacuu

SEQ ID NO: 380356 - RNA, 32 nt, Human
ccucggcgguucccaucaccacugcaguucca

SEQ ID NO: 380357 - RNA, 23 nt, Human
ccucggcgucccuuccccucccc

SEQ ID NO: 380358 - RNA, 32 nt, Human
ccucggcucacugcaaccuccgccucccaggu

SEQ ID NO: 380359 - RNA, 32 nt, Human
ccucggcucacugcaaccucugucuccugggu

SEQ ID NO: 380360 - RNA, 32 nt, Human
ccucggcucacugcaaccuuugccuccuaggu

SEQ ID NO: 380361 - RNA, 32 nt, Human
ccucggcucacugcagccuccuucuccugggu

SEQ ID NO: 380362 - RNA, 32 nt, Human
ccucggcucacugcauccucugccuccugggu

SEQ ID NO: 380363 - RNA, 32 nt, Human
ccucggcucacuguaaccuucaccuuccgugu

SEQ ID NO: 380364 - RNA, 32 nt, Human
ccucggcuccacugcuucaggucacuucccau

SEQ ID NO: 380365 - RNA, 32 nt, Human
ccucggcuccagaagcuggggcucaggguccg

SEQ ID NO: 380366 - RNA, 18 nt, Human
ccucggcuccagguccua

SEQ ID NO: 380367 - RNA, 32 nt, Human
ccucggcuccccucacuggggccuugggcagg

SEQ ID NO: 380368 - RNA, 21 nt, Human
ccucggcucucuccucuuccc

SEQ ID NO: 380369 - RNA, 32 nt, Human
ccucggcucuuccuccuccuucuccgggaccc

SEQ ID NO: 380370 - RNA, 32 nt, Human
ccucggcuggacucccuguggcccaguccgga

SEQ ID NO: 380371 - RNA, 32 nt, Human
ccucggcugugugguguggccugcugcuucca

SEQ ID NO: 380372 - RNA, 32 nt, Human
ccucggcuuacugcaaccuccaccucccgggu

SEQ ID NO: 380373 - RNA, 32 nt, Human
ccucggcuuacugcaaccuccgccuucccaga

SEQ ID NO: 380374 - RNA, 32 nt, Human
ccucggcuugggcugcacucuacccuguacac

SEQ ID NO: 380375 - RNA, 32 nt, Human
ccucgggaaccaccuccaucuccagcagaagu

SEQ ID NO: 380376 - RNA, 32 nt, Human
ccucgggacagucaccugccacugaguggcca

SEQ ID NO: 380377 - RNA, 32 nt, Human
ccucgggagcaccccaccucugugugugaugu

SEQ ID NO: 380378 - RNA, 32 nt, Human
ccucgggagcccaggugcagagcgaggccgug

SEQ ID NO: 380379 - RNA, 32 nt, Human
ccucgggagccccugcgguggagcucugagug

SEQ ID NO: 380380 - RNA, 32 nt, Human
ccucgggaggcugaggcaggagaaucgcuuga

SEQ ID NO: 380381 - RNA, 32 nt, Human
ccucgggaggguggcagguuggagggcccgua

SEQ ID NO: 380382 - RNA, 32 nt, Human
ccucgggaugcagugacugagauaggggcccu

SEQ ID NO: 380383 - RNA, 32 nt, Human
ccucgggauguggcguuguuuggagaaagggu

SEQ ID NO: 380384 - RNA, 21 nt, Human
ccucgggcaacuccugccacc

SEQ ID NO: 380385 - RNA, 32 nt, Human
ccucgggcaccugucauuuccaauaugguagg

SEQ ID NO: 380386 - RNA, 32 nt, Human
ccucgggcacucccaagucugccucuuggcuc

SEQ ID NO: 380387 - RNA, 32 nt, Human
ccucgggcacucggaagagaacggcggagaca

SEQ ID NO: 380388 - RNA, 22 nt, Human
ccucgggcagcccaaagcuccu

SEQ ID NO: 380389 - RNA, 25 nt, Human
ccucgggcagccccuccagcuuccu

SEQ ID NO: 380390 - RNA, 20 nt, Human
ccucgggcagcccugagccu

SEQ ID NO: 380391 - RNA, 19 nt, Human
ccucgggccacccugcucc

SEQ ID NO: 380392 - RNA, 32 nt, Human
ccucgggccacuaguguuagcccaaggugggc

SEQ ID NO: 380393 - RNA, 32 nt, Human
ccucgggccauccagcccaguguuuucuuuag

SEQ ID NO: 380394 - RNA, 32 nt, Human
ccucgggccauggugcucucccaggaggagcc

SEQ ID NO: 380395 - RNA, 21 nt, Human
ccucgggcccggccugcgccu

SEQ ID NO: 380396 - RNA, 32 nt, Human
ccucgggcccuccugccugcaggaucaugccc

SEQ ID NO: 380397 - RNA, 32 nt, Human
ccucgggcccucucuccgccccggacagggug

SEQ ID NO: 380398 - RNA, 20 nt, Human
ccucgggccgccugccgccg

SEQ ID NO: 380399 - RNA, 24 nt, Human
ccucgggccgcuccccugcgccuu

SEQ ID NO: 380400 - RNA, 20 nt, Human
ccucgggccucccuucuccu

SEQ ID NO: 380401 - RNA, 21 nt, Human
ccucgggcgcccccgccgccg

SEQ ID NO: 380402 - RNA, 32 nt, Human
ccucgggcucucacccuccucuccugcagcuc

SEQ ID NO: 380403 - RNA, 24 nt, Human
ccucgggcucugcucaccucuggu

SEQ ID NO: 380404 - RNA, 32 nt, Human
ccucgggcugcggacucugccuccugggucug

SEQ ID NO: 380405 - RNA, 32 nt, Human
ccucgggcuggcuggcucagugggcagcaggg

SEQ ID NO: 380406 - RNA, 32 nt, Human
ccucgggcuuaccacccuccccaggacccgug

SEQ ID NO: 380407 - RNA, 20 nt, Human
ccucggggaccccugcugcu

SEQ ID NO: 380408 - RNA, 32 nt, Human
ccucggggagagaagaaaggagggggcaaggg

SEQ ID NO: 380409 - RNA, 19 nt, Human
ccucggggagagggcgcgg

SEQ ID NO: 380410 - RNA, 32 nt, Human
ccucggggagcagcaccccgccucccuccagc

SEQ ID NO: 380411 - RNA, 32 nt, Human
ccucggggagugggaaguggaggcaggagccu

SEQ ID NO: 380412 - RNA, 32 nt, Human
ccucggggcaccguugcugggcggcgccggcg

SEQ ID NO: 380413 - RNA, 32 nt, Human
ccucggggccgcaggaaggaagaggaggcagc

SEQ ID NO: 380414 - RNA, 18 nt, Human
ccucgggucagccagaua

SEQ ID NO: 380415 - RNA, 32 nt, Human
ccucggguccccaagccgcugggagauguccc

SEQ ID NO: 380416 - RNA, 32 nt, Human
ccucgguauccaggaggauugucagcaggacu

SEQ ID NO: 380417 - RNA, 32 nt, Human
ccucgguauggaggggacagugaugugacagc

SEQ ID NO: 380418 - RNA, 32 nt, Human
ccucgguaugugucauccucugccuuuacugc

SEQ ID NO: 380419 - RNA, 32 nt, Human
ccucggucacccacagagccaccaaagauucc

SEQ ID NO: 380420 - RNA, 32 nt, Human
ccucgguccuacagcacuguguaggcugcauc

SEQ ID NO: 380421 - RNA, 32 nt, Human
ccucggugccccgccgggugcaucaccagguc

SEQ ID NO: 380422 - RNA, 32 nt, Human
ccucggugccuuccucuuuuuauuuaguuccu

SEQ ID NO: 380423 - RNA, 32 nt, Human
ccucggugcuucccagcugccgucugcaccag

SEQ ID NO: 380424 - RNA, 32 nt, Human
ccucgguggcgggcauggaggcuucgcgcugc

SEQ ID NO: 380425 - RNA, 32 nt, Human
ccucgguggugaauacauucuuggguggugaa

SEQ ID NO: 380426 - RNA, 32 nt, Human
ccucgguggugaggacuggaugcuagacugcu

SEQ ID NO: 380427 - RNA, 32 nt, Human
ccucgguucacuacaaccuccgccuccugggu

SEQ ID NO: 380428 - RNA, 32 nt, Human
ccucgguuccucuuacccucuucuuggacccu

SEQ ID NO: 380429 - RNA, 32 nt, Human
ccucgguucuccagcucacccccagccugccg

SEQ ID NO: 380430 - RNA, 32 nt, Human
ccucgguuugaacaagcgcaaaaagaaggacg

SEQ ID NO: 380431 - RNA, 24 nt, Human
ccucguaauccaccugccguggcc

SEQ ID NO: 380432 - RNA, 32 nt, Human
ccucguaauuuuggacugccacacauugguac

SEQ ID NO: 380433 - RNA, 32 nt, Human
ccucguacuguugucacuaugagcuuaagaaa

SEQ ID NO: 380434 - RNA, 22 nt, Human
ccucguagaggcagugcuggcc

SEQ ID NO: 380435 - RNA, 32 nt, Human
ccucguaggguggucacggagccccugcgccu

SEQ ID NO: 380436 - RNA, 32 nt, Human
ccucguagugucccaagaaauggccuugacac

SEQ ID NO: 380437 - RNA, 32 nt, Human
ccucgucaauccaucagcaaugcuucucucau

SEQ ID NO: 380438 - RNA, 22 nt, Human
ccucgucacacugcggcacagg

SEQ ID NO: 380439 - RNA, 32 nt, Human
ccucgucacccugacaucucuccgggaagacu

SEQ ID NO: 380440 - RNA, 32 nt, Human
ccucgucagacuccugugcucuuccaggggcu

SEQ ID NO: 380441 - RNA, 32 nt, Human
ccucgucagaugcucauccccuaaaagguuaa

SEQ ID NO: 380442 - RNA, 32 nt, Human
ccucgucagggcccugcagugcggcgccccgg

SEQ ID NO: 380443 - RNA, 17 nt, Human
ccucgucagucaccuca

SEQ ID NO: 380444 - RNA, 32 nt, Human
ccucgucauuuucuuucccagaagcgcccugu

SEQ ID NO: 380445 - RNA, 18 nt, Human
ccucguccaccgcugccg

SEQ ID NO: 380446 - RNA, 32 nt, Human
ccucguccaggcugccccgcagcuccucacgu

SEQ ID NO: 380447 - RNA, 32 nt, Human
ccucgucccaggaggccaccccugagaaagag

SEQ ID NO: 380448 - RNA, 32 nt, Human
ccucguccccagccugcacuccugggcgaagg

SEQ ID NO: 380449 - RNA, 32 nt, Human
ccucguccucaaacuaaaggccacagaaaugg

SEQ ID NO: 380450 - RNA, 32 nt, Human
ccucguccugcccugcgggcucaggcggaacc

SEQ ID NO: 380451 - RNA, 32 nt, Human
ccucgucguuccuccuccuuccauuugaccca

SEQ ID NO: 380452 - RNA, 32 nt, Human
ccucgucguucuuucuccccugccucucaccu

SEQ ID NO: 380453 - RNA, 32 nt, Human
ccucgucuaagcugccacuuacagacaucugc

SEQ ID NO: 380454 - RNA, 32 nt, Human
ccucgucucccaucuacaaaacgugaagauug

SEQ ID NO: 380455 - RNA, 32 nt, Human
ccucgucuccccugccccaucuggugcuuaca

SEQ ID NO: 380456 - RNA, 32 nt, Human
ccucgucugcucuccucucucuuccaacacag

SEQ ID NO: 380457 - RNA, 32 nt, Human
ccucgugagccaccacgcccagccucuuuugc

SEQ ID NO: 380458 - RNA, 32 nt, Human
ccucgugaguagcugagauuacaggcgcccgc

SEQ ID NO: 380459 - RNA, 32 nt, Human
ccucgugauccgcccaccucagccucucaaag

SEQ ID NO: 380460 - RNA, 32 nt, Human
ccucgugauccgcccaucuccaccucccgcag

SEQ ID NO: 380461 - RNA, 32 nt, Human
ccucgugaucuaccggccucagccucucaaag

SEQ ID NO: 380462 - RNA, 32 nt, Human
ccucgugaucugccugccucagccucucaaag

SEQ ID NO: 380463 - RNA, 32 nt, Human
ccucgugauucacccaccuugggcucccaaag

SEQ ID NO: 380464 - RNA, 32 nt, Human
ccucgugcagagcuggggcugccagccugagc

SEQ ID NO: 380465 - RNA, 32 nt, Human
ccucgugccaacgugucuuguaaggugcggcu

SEQ ID NO: 380466 - RNA, 32 nt, Human
ccucgugccagcugcuggugcagccucuccug

SEQ ID NO: 380467 - RNA, 20 nt, Human
ccucgugccccugcccagcc

SEQ ID NO: 380468 - RNA, 32 nt, Human
ccucgugccugugaucccagcacuuugggagg

SEQ ID NO: 380469 - RNA, 32 nt, Human
ccucgugcugggcucugcccugggcagacagg

SEQ ID NO: 380470 - RNA, 32 nt, Human
ccucguggccacucuaggccucacggaggagg

SEQ ID NO: 380471 - RNA, 32 nt, Human
ccucgugggcccugaccuucucucugagagcc

SEQ ID NO: 380472 - RNA, 32 nt, Human
ccucgugggguuuucacccugcuuggcgccag

SEQ ID NO: 380473 - RNA, 32 nt, Human
ccucgugucaucuccgggguggccacaggcua

SEQ ID NO: 380474 - RNA, 18 nt, Human
ccucgugucguuaccuca

SEQ ID NO: 380475 - RNA, 32 nt, Human
ccucgugucucccaggagccauggaggcugug

SEQ ID NO: 380476 - RNA, 32 nt, Human
ccucgugugacggcgggggucggugaagaccc

SEQ ID NO: 380477 - RNA, 32 nt, Human
ccucgugugucaccccacagagcugucugugg

SEQ ID NO: 380478 - RNA, 32 nt, Human
ccucguguucccagcugccucuugccuugaua

SEQ ID NO: 380479 - RNA, 32 nt, Human
ccucguguugccauugccucucucggauccuc

SEQ ID NO: 380480 - RNA, 32 nt, Human
ccucguuaguauagugguugguugggaugagu

SEQ ID NO: 380481 - RNA, 28 nt, Human
ccucguuauccggcugccuccuccuccc

SEQ ID NO: 380482 - RNA, 32 nt, Human
ccucguuauucguccuccucggguccauccgg

SEQ ID NO: 380483 - RNA, 32 nt, Human
ccucguuccugggucaguaucagucuacugug

SEQ ID NO: 380484 - RNA, 32 nt, Human
ccucguucuccucgcaguggcccuggcuccca

SEQ ID NO: 380485 - RNA, 32 nt, Human
ccucguucugaccccacuacaacaaggcccau

SEQ ID NO: 380486 - RNA, 32 nt, Human
ccucguuuccaggccucuccccaggcuugcca

SEQ ID NO: 380487 - RNA, 32 nt, Human
ccucguuuugacuggcucuaucaggauaaauu

SEQ ID NO: 380488 - RNA, 32 nt, Human
ccucuaaaaauaccaaaauuagcugggacugg

SEQ ID NO: 380489 - RNA, 32 nt, Human
ccucuaaaaugcugggauuacaggcgugagcc

SEQ ID NO: 380490 - RNA, 32 nt, Human
ccucuaaacucugugcugggcagccacacgug

SEQ ID NO: 380491 - RNA, 32 nt, Human
ccucuaaagcagcgugagaugggaaugaucua

SEQ ID NO: 380492 - RNA, 32 nt, Human
ccucuaacaauauaauaauuagccaggcgugg

SEQ ID NO: 380493 - RNA, 32 nt, Human
ccucuaacacuuccaacuccagccaccacuuu

SEQ ID NO: 380494 - RNA, 32 nt, Human
ccucuaacauccucgcaccagacaggacaggu

SEQ ID NO: 380495 - RNA, 32 nt, Human
ccucuaacccccagugccacagagaagacggg

SEQ ID NO: 380496 - RNA, 32 nt, Human
ccucuaacccucauugcugucuugccccaguu

SEQ ID NO: 380497 - RNA, 32 nt, Human
ccucuaaccuauaaacugacaacucuaacucu

SEQ ID NO: 380498 - RNA, 32 nt, Human
ccucuaacucccuccucacacuccagaauuac

SEQ ID NO: 380499 - RNA, 32 nt, Human
ccucuaacuguacugcucacucgacaucccau

SEQ ID NO: 380500 - RNA, 32 nt, Human
ccucuaagaaccacagccacagagucaggcuc

SEQ ID NO: 380501 - RNA, 32 nt, Human
ccucuaagccauuagaauaucuugccugauaa

SEQ ID NO: 380502 - RNA, 17 nt, Human
ccucuaagccucugaca

SEQ ID NO: 380503 - RNA, 32 nt, Human
ccucuaagcuguuccugcuucugcucuccuca

SEQ ID NO: 380504 - RNA, 32 nt, Human
ccucuaagcuguucucucccaccccaccuuuc

SEQ ID NO: 380505 - RNA, 23 nt, Human
ccucuaagucugcuugauagagu

SEQ ID NO: 380506 - RNA, 32 nt, Human
ccucuaaucccagcuacucaggaggcuaaggc

SEQ ID NO: 380507 - RNA, 23 nt, Human
ccucuaaucccagcuacuuggga

SEQ ID NO: 380508 - RNA, 32 nt, Human
ccucuaaucccagcuacuugggaggcugaggg

SEQ ID NO: 380509 - RNA, 32 nt, Human
ccucuaaugaagcacagagagaggaagagagc

SEQ ID NO: 380510 - RNA, 23 nt, Human
ccucuacaaaccaccagcuucau

SEQ ID NO: 380511 - RNA, 32 nt, Human
ccucuacaaggaggugaugcuggagaacuaua

SEQ ID NO: 380512 - RNA, 25 nt, Human
ccucuacacggccccuuggggccug

SEQ ID NO: 380513 - RNA, 21 nt, Human
ccugcccagaacccuuccuga

SEQ ID NO: 380514 - RNA, 22 nt, Human
ccugcccagaccccacaccccu

SEQ ID NO: 380515 - RNA, 32 nt, Human
ccugcccagacuagcugcaccuccucauuccc

SEQ ID NO: 380516 - RNA, 20 nt, Human
ccugcccagagcccccuccg

SEQ ID NO: 380517 - RNA, 32 nt, Human
ccugcccagcaaccugccagcuacaggagccc

SEQ ID NO: 380518 - RNA, 32 nt, Human
ccugcccagcauugccaacgaccucauguaca

SEQ ID NO: 380519 - RNA, 32 nt, Human
ccugcccagcccucccuuccuuccucugccgg

SEQ ID NO: 380520 - RNA, 32 nt, Human
ccugcccagcccucgucaccacagggacuccu

SEQ ID NO: 380521 - RNA, 22 nt, Human
ccugcccagcugccgcccccgg

SEQ ID NO: 380522 - RNA, 32 nt, Human
ccugcccagcugggaggagucagagcuggcuu

SEQ ID NO: 380523 - RNA, 32 nt, Human
ccugcccaggaaggugccugcacaugagagga

SEQ ID NO: 380524 - RNA, 32 nt, Human
ccugcccaggagaugccacccaggaggagccc

SEQ ID NO: 380525 - RNA, 21 nt, Human
ccugcccaggccacugugagg

SEQ ID NO: 380526 - RNA, 32 nt, Human
ccugcccagggacccccaucaccagcucucca

SEQ ID NO: 380527 - RNA, 32 nt, Human
ccugcccagggagagagagggaguggagccca

SEQ ID NO: 380528 - RNA, 32 nt, Human
ccugcccagggcacccacgccucggcgaccac

SEQ ID NO: 380529 - RNA, 32 nt, Human
ccugcccagggggagagcggagcgguccgcag

SEQ ID NO: 380530 - RNA, 32 nt, Human
ccugcccagggggagagcggagcuccgcagcc

SEQ ID NO: 380531 - RNA, 32 nt, Human
ccugcccagguguggagcgaggggcacagggg

SEQ ID NO: 380532 - RNA, 32 nt, Human
ccugcccaguggccccagccuacagggacugg

SEQ ID NO: 380533 - RNA, 32 nt, Human
ccugcccauaucuuacucugcuuccaucucuc

SEQ ID NO: 380534 - RNA, 21 nt, Human
ccugcccaucagcgucaggaa

SEQ ID NO: 380535 - RNA, 32 nt, Human
ccugcccauccucccuuuuaccuccucucuuu

SEQ ID NO: 380536 - RNA, 32 nt, Human
ccugcccaucuguucucccagcugagccaagg

SEQ ID NO: 380537 - RNA, 32 nt, Human
ccugcccaugcccacacuacaggccagggcug

SEQ ID NO: 380538 - RNA, 32 nt, Human
ccugcccaugcugcuugcaucccuggagaauc

SEQ ID NO: 380539 - RNA, 32 nt, Human
ccugcccaugucucaaaacaaacacauguaca

SEQ ID NO: 380540 - RNA, 32 nt, Human
ccugcccauguuguugagaggucuuggugagg

SEQ ID NO: 380541 - RNA, 32 nt, Human
ccugccccaacucuccccugaccugugagccc

SEQ ID NO: 380542 - RNA, 32 nt, Human
ccugccccaagagugaggcaaggagguccagc

SEQ ID NO: 380543 - RNA, 32 nt, Human
ccugccccaagugccuugcuuuuacaguggac

SEQ ID NO: 380544 - RNA, 20 nt, Human
ccugccccacccacccagug

SEQ ID NO: 380545 - RNA, 19 nt, Human
ccugccccacccccugccu

SEQ ID NO: 380546 - RNA, 19 nt, Human
ccugccccaccgcaccccc

SEQ ID NO: 380547 - RNA, 32 nt, Human
ccugccccacugcugucucaguaccaagaaaa

SEQ ID NO: 380548 - RNA, 32 nt, Human
ccugccccagcccaaguccaaauguuuacggg

SEQ ID NO: 380549 - RNA, 32 nt, Human
ccugccccagcccuggcucuuuccuaaccccc

SEQ ID NO: 380550 - RNA, 32 nt, Human
ccugccccagccugcccuggcugcagcaaggg

SEQ ID NO: 380551 - RNA, 32 nt, Human
ccugccccagccugugccuucugcuggggcag

SEQ ID NO: 380552 - RNA, 32 nt, Human
ccugccccaggcgggcuagagugcaguggcau

SEQ ID NO: 380553 - RNA, 18 nt, Human
ccugccccaggugccgcu

SEQ ID NO: 380554 - RNA, 18 nt, Human
ccugccccaucccuuccc

SEQ ID NO: 380555 - RNA, 32 nt, Human
ccugcccccaaaauauuuucaucuuuccccca

SEQ ID NO: 380556 - RNA, 23 nt, Human
ccugcccccaaaggugguuugcu

SEQ ID NO: 380557 - RNA, 32 nt, Human
ccugcccccacacccacuccacaccaguaaua

SEQ ID NO: 380558 - RNA, 32 nt, Human
ccugcccccacaccugcacccaaacagacaca

SEQ ID NO: 380559 - RNA, 32 nt, Human
ccugcccccacccccagcaucgcaguaagccu

SEQ ID NO: 380560 - RNA, 32 nt, Human
ccugcccccacugucuggccucucccuguucc

SEQ ID NO: 380561 - RNA, 32 nt, Human
ccugcccccagaggagccaggagucugggagg

SEQ ID NO: 380562 - RNA, 20 nt, Human
ccugcccccagccugugugc

SEQ ID NO: 380563 - RNA, 18 nt, Human
ccugccccccucccuucc

SEQ ID NO: 380564 - RNA, 19 nt, Human
ccugcccccgggcacugca

SEQ ID NO: 380565 - RNA, 32 nt, Human
ccugcccccucccccuucuccugggacccucg

SEQ ID NO: 380566 - RNA, 25 nt, Human
ccugcccccucccgccuguuuuucc

SEQ ID NO: 380567 - RNA, 20 nt, Human
ccugcccccucuccuuuccc

SEQ ID NO: 380568 - RNA, 32 nt, Human
ccugcccccugccccauuucccaugagcacac

SEQ ID NO: 380569 - RNA, 32 nt, Human
ccugcccccugccccugcuggcacauuuaacc

SEQ ID NO: 380570 - RNA, 32 nt, Human
ccugcccccugcccucuguccuggcucugcac

SEQ ID NO: 380571 - RNA, 32 nt, Human
ccugcccccuguccccugccucuuuucccaau

SEQ ID NO: 380572 - RNA, 23 nt, Human
ccugcccccuucccccacccccg

SEQ ID NO: 380573 - RNA, 32 nt, Human
ccugccccgacaccucgggcacaucgcaugca

SEQ ID NO: 380574 - RNA, 32 nt, Human
ccugccccgcagccagugccccugccagcugc

SEQ ID NO: 380575 - RNA, 32 nt, Human
ccugccccggcuuccccagccucccagcaggg

SEQ ID NO: 380576 - RNA, 32 nt, Human
ccugccccguccacuuucccaucuccucggua

SEQ ID NO: 380577 - RNA, 32 nt, Human
ccugccccuccaccacccccgccuccaaugau

SEQ ID NO: 380578 - RNA, 32 nt, Human
ccugccccuccacccccucagaucaggcauag

SEQ ID NO: 380579 - RNA, 32 nt, Human
ccugccccuccagaguccagagccaggaaggg

SEQ ID NO: 380580 - RNA, 32 nt, Human
ccugccccuccaggccacugaguguuuuggcc

SEQ ID NO: 380581 - RNA, 21 nt, Human
ccugccccuccaguuccuugg

SEQ ID NO: 380582 - RNA, 32 nt, Human
ccugccccucccccauuggcugacuuccguca

SEQ ID NO: 380583 - RNA, 32 nt, Human
ccugccccuccugucgggaacaauuugaggaa

SEQ ID NO: 380584 - RNA, 21 nt, Human
ccugccccucgguucugcucg

SEQ ID NO: 380585 - RNA, 31 nt, Human
ccugccccucucucugggagcucugucccgu

SEQ ID NO: 380586 - RNA, 32 nt, Human
ccugccccugcacucaggcuugugaaggcccc

SEQ ID NO: 380587 - RNA, 32 nt, Human
ccugccccugcauuuguccugggaaacacggu

SEQ ID NO: 380588 - RNA, 32 nt, Human
ccugccccugcccccaccuccuggagggccug

SEQ ID NO: 380589 - RNA, 32 nt, Human
ccugccccugcucacuaagcugggcagccucc

SEQ ID NO: 380590 - RNA, 32 nt, Human
ccugccccugcuccauguccuuguguggcugc

SEQ ID NO: 380591 - RNA, 32 nt, Human
ccugccccugcucguggugugaggcccagccc

SEQ ID NO: 380592 - RNA, 32 nt, Human
ccugccccugggaacugaaugucuccguauaa

SEQ ID NO: 380593 - RNA, 32 nt, Human
ccugccccuuccaagccuaucggggugggguc

SEQ ID NO: 380594 - RNA, 32 nt, Human
ccugccccuucuacacucuccugggccccucc

SEQ ID NO: 380595 - RNA, 32 nt, Human
ccugccccuucucuccccuguaaccuguuuau

SEQ ID NO: 380596 - RNA, 23 nt, Human
ccugccccuugcacaccacccgg

SEQ ID NO: 380597 - RNA, 32 nt, Human
ccugccccuuggcugcucucggacucccuacc

SEQ ID NO: 380598 - RNA, 32 nt, Human
ccugccccuuucugcagccuaggcggcccagg

SEQ ID NO: 380599 - RNA, 32 nt, Human
ccugccccuuucugucccauccuucccaagaa

SEQ ID NO: 380600 - RNA, 32 nt, Human
ccugcccgagagagcucuggccccgcuagcgg

SEQ ID NO: 380601 - RNA, 20 nt, Human
ccugcccgaggcccagucgg

SEQ ID NO: 380602 - RNA, 32 nt, Human
ccugcccgauccaccguccugaggcagagugu

SEQ ID NO: 380603 - RNA, 19 nt, Human
ccugcccgcacuccugccu

SEQ ID NO: 380604 - RNA, 16 nt, Human
ccugcccgccgcugcc

SEQ ID NO: 380605 - RNA, 32 nt, Human
ccugcccgccggcccgcggcuccugggccucc

SEQ ID NO: 380606 - RNA, 32 nt, Human
ccugcccgcgagagacugucgggaaguugacc

SEQ ID NO: 380607 - RNA, 32 nt, Human
ccugcccgcuacucccacucucagacacccag

SEQ ID NO: 380608 - RNA, 23 nt, Human
ccugcccggacuuccagccccgg

SEQ ID NO: 380609 - RNA, 21 nt, Human
ccugcccggcagccacacccc

SEQ ID NO: 380610 - RNA, 32 nt, Human
ccugcccggccucgcccccacccgcgagcgcc

SEQ ID NO: 380611 - RNA, 32 nt, Human
ccugcccggccuggccccgccccugcccggcc

SEQ ID NO: 380612 - RNA, 32 nt, Human
ccugcccggcguggacgugagccggccucagc

SEQ ID NO: 380613 - RNA, 21 nt, Human
ccugcccgggaccuccgccgg

SEQ ID NO: 380614 - RNA, 32 nt, Human
ccugcccgggagaacccugccugaagcucugg

SEQ ID NO: 380615 - RNA, 21 nt, Human
ccugcccggggagcugcagag

SEQ ID NO: 380616 - RNA, 19 nt, Human
ccugcccggggcaaccccg

SEQ ID NO: 380617 - RNA, 32 nt, Human
ccugcccggugcccacccugcugguaggagcc

SEQ ID NO: 380618 - RNA, 32 nt, Human
ccugcccguccccucaccagcgccuccccacc

SEQ ID NO: 380619 - RNA, 32 nt, Human
ccugcccuacagccagaaucagccagcaaaug

SEQ ID NO: 380620 - RNA, 16 nt, Human
ccugcccuaccggggc

SEQ ID NO: 380621 - RNA, 32 nt, Human
ccugcccuacuuccguuacccugagagucggc

SEQ ID NO: 380622 - RNA, 32 nt, Human
ccugcccuagugcaacaggcauugcugagguc

SEQ ID NO: 380623 - RNA, 32 nt, Human
ccugcccucacccagcccgcuguuccccaagc

SEQ ID NO: 380624 - RNA, 32 nt, Human
ccugcccucacugcauucccucaccucuaccu

SEQ ID NO: 380625 - RNA, 17 nt, Human
ccugcccucacuggcca

SEQ ID NO: 380626 - RNA, 32 nt, Human
ccugcccucacuuuuaaaaagcauccuagcuc

SEQ ID NO: 380627 - RNA, 32 nt, Human
ccugcccucagacugcaggaccagaaccccug

SEQ ID NO: 380628 - RNA, 32 nt, Human
ccugcccucagagagguuccagucuagaugag

SEQ ID NO: 380629 - RNA, 19 nt, Human
ccugcccucagcacagacu

SEQ ID NO: 380630 - RNA, 32 nt, Human
ccugcccucagccuguugcccugccucccaaa

SEQ ID NO: 380631 - RNA, 32 nt, Human
ccugcccucagguugccuauguauuuuaccuu

SEQ ID NO: 380632 - RNA, 22 nt, Human
ccugcccucauggccccucuga

SEQ ID NO: 380633 - RNA, 32 nt, Human
ccugcccuccacccacaccugcccgcucccca

SEQ ID NO: 380634 - RNA, 32 nt, Human
ccugcccuccacccagccuccuggacucggcc

SEQ ID NO: 380635 - RNA, 32 nt, Human
ccugcccuccacccuccccagagccacuucgg

SEQ ID NO: 380636 - RNA, 32 nt, Human
ccugcccuccagccccaucaccagcuucuugc

SEQ ID NO: 380637 - RNA, 24 nt, Human
ccugcccucccaccaaagccuccu

SEQ ID NO: 380638 - RNA, 32 nt, Human
ccugcccucccagcaauaaccaccucccugga

SEQ ID NO: 380639 - RNA, 32 nt, Human
ccugcccucccauccagcacucucuauggaaa

SEQ ID NO: 380640 - RNA, 21 nt, Human
ccugcccuccccuccccuccc

SEQ ID NO: 380641 - RNA, 32 nt, Human
ccugcccuccuacccugcuauuucuuuacauc

SEQ ID NO: 380642 - RNA, 21 nt, Human
ccugcccuccuaggucuuccc

SEQ ID NO: 380643 - RNA, 19 nt, Human
ccugcccuccucccuuccc

SEQ ID NO: 380644 - RNA, 32 nt, Human
ccugcccucuaauuugggggcagcaguuugug

SEQ ID NO: 380645 - RNA, 32 nt, Human
ccugcccucuacugacuggaggcaggccucug

SEQ ID NO: 380646 - RNA, 32 nt, Human
ccugcccucuacugauuucagcccagccccug

SEQ ID NO: 380647 - RNA, 32 nt, Human
ccugcccucuagccucuacucuuccaguugcg

SEQ ID NO: 380648 - RNA, 22 nt, Human
ccugcccucuauuuauuagcca

SEQ ID NO: 380649 - RNA, 23 nt, Human
ccugcccucuccacagugcugcu

SEQ ID NO: 380650 - RNA, 32 nt, Human
ccugcccucuccccugccucucucucccauua

SEQ ID NO: 380651 - RNA, 32 nt, Human
ccugcccucugccugggccucggucccuccug

SEQ ID NO: 380652 - RNA, 32 nt, Human
ccugcccucuuucccuggcaacccugauugau

SEQ ID NO: 380653 - RNA, 32 nt, Human
ccugcccugacacucaaggaccugugcuccuu

SEQ ID NO: 380654 - RNA, 32 nt, Human
ccugcccugaggggcuguccaggccuucuccc

SEQ ID NO: 380655 - RNA, 32 nt, Human
ccugcccugagugucugucccucuucagccaa

SEQ ID NO: 380656 - RNA, 19 nt, Human
ccugcccugcacccugggg

SEQ ID NO: 380657 - RNA, 32 nt, Human
ccugcccugcagcaugugccuaaaggcucaag

SEQ ID NO: 380658 - RNA, 32 nt, Human
ccugcccugccccugccccauuuccuccucau

SEQ ID NO: 380659 - RNA, 18 nt, Human
ccugcccugcccugagcu

SEQ ID NO: 380660 - RNA, 32 nt, Human
ccugcccugcccugcccugcccugcacugccc

SEQ ID NO: 380661 - RNA, 32 nt, Human
ccugcccugcccugcccugcccugcccugcac

SEQ ID NO: 380662 - RNA, 32 nt, Human
ccugcccugcccugcccugcccugcccugccc

SEQ ID NO: 380663 - RNA, 32 nt, Human
ccugcccugcccugcccugcccugcccugcgc

SEQ ID NO: 380664 - RNA, 32 nt, Human
ccugcccugcccugcccugcccuguuccgcau

SEQ ID NO: 380665 - RNA, 32 nt, Human
ccugcccugccuccagccuugguggcuccuac

SEQ ID NO: 380666 - RNA, 32 nt, Human
ccugcccugccuccuccaucagauccuuuggg

SEQ ID NO: 380667 - RNA, 32 nt, Human
ccugcccugccucuguccuggcucugaacuag

SEQ ID NO: 380668 - RNA, 32 nt, Human
ccugcccugccugagcccugcgcuggccagac

SEQ ID NO: 380669 - RNA, 32 nt, Human
ccugcccugccugccugcugccccucccagcc

SEQ ID NO: 380670 - RNA, 32 nt, Human
ccugcccugccugcuccucguuuucccacaug

SEQ ID NO: 380671 - RNA, 32 nt, Human
ccugcccugccugggacccacagggagacuau

SEQ ID NO: 380672 - RNA, 32 nt, Human
ccugcccugcuggcuuccugacuggagagaca

SEQ ID NO: 380673 - RNA, 32 nt, Human
ccugcccugcuuccugugaucgagccggcccu

SEQ ID NO: 380674 - RNA, 32 nt, Human
ccugcccuggccacguuuccagaagagacucg

SEQ ID NO: 380675 - RNA, 32 nt, Human
ccugcccugggccaaguggccuaucugggaua

SEQ ID NO: 380676 - RNA, 32 nt, Human
ccugcccuguccugcccugcccugcccugccc

SEQ ID NO: 380677 - RNA, 32 nt, Human
ccugcccuguccuguccuguccugacuucauc

SEQ ID NO: 380678 - RNA, 32 nt, Human
ccugcccugugauaugucuguugaguuggccu

SEQ ID NO: 380679 - RNA, 32 nt, Human
ccugcccuguucagccccacagcucccaacua

SEQ ID NO: 380680 - RNA, 32 nt, Human
ccugcccuguucuguuucucucugaccacugg

SEQ ID NO: 380681 - RNA, 20 nt, Human
ccugcccuucccguauccca

SEQ ID NO: 380682 - RNA, 32 nt, Human
ccugcccuuccucuuugaauucuuccggggga

SEQ ID NO: 380683 - RNA, 32 nt, Human
ccugcccuucuugagaguucccccucuuucug

SEQ ID NO: 380684 - RNA, 20 nt, Human
ccugcccuugcccccuuccc

SEQ ID NO: 380685 - RNA, 32 nt, Human
ccugcccuugcucucccuuaguguucccuggc

SEQ ID NO: 380686 - RNA, 20 nt, Human
ccugcccuuggccugcagug

SEQ ID NO: 380687 - RNA, 32 nt, Human
ccugcccuugggaucucggcagcaucucagcc

SEQ ID NO: 380688 - RNA, 20 nt, Human
ccugcccuuuuuucauacca

SEQ ID NO: 380689 - RNA, 32 nt, Human
ccugccgacuccuggguugagcuguugccuca

SEQ ID NO: 380690 - RNA, 32 nt, Human
ccugccgaguagcugggacuacaggucuaauu

SEQ ID NO: 380691 - RNA, 32 nt, Human
ccugccgagugcuguguucuuccucagucugg

SEQ ID NO: 380692 - RNA, 20 nt, Human
ccugccgaucagacaugugg

SEQ ID NO: 380693 - RNA, 32 nt, Human
ccugccgaugcugagaugggggcccgacaugg

SEQ ID NO: 380694 - RNA, 32 nt, Human
ccugccgcacacacguucgcacgcggcggccg

SEQ ID NO: 380695 - RNA, 31 nt, Human
ccugccgcacagcccagcaggagggaggcgg

SEQ ID NO: 380696 - RNA, 18 nt, Human
ccugccgcaugcugcaca

SEQ ID NO: 380697 - RNA, 32 nt, Human
ccugccgcccucugcccugccggagacagacc

SEQ ID NO: 380698 - RNA, 32 nt, Human
ccugccgcccugacgcccgccagccugagcca

SEQ ID NO: 380699 - RNA, 15 nt, Human
ccugccgcccugccg

SEQ ID NO: 380700 - RNA, 20 nt, Human
ccugccgcccugccgcugcc

SEQ ID NO: 380701 - RNA, 16 nt, Human
ccugccgccgccgccg

SEQ ID NO: 380702 - RNA, 19 nt, Human
ccugccgccgccgccgccg

SEQ ID NO: 380703 - RNA, 23 nt, Human
ccugccgccgcgcucgucccucc

SEQ ID NO: 380704 - RNA, 16 nt, Human
ccugccgccgcugccg

SEQ ID NO: 380705 - RNA, 32 nt, Human
ccugccgccugccaguuggcugaccccacucc

SEQ ID NO: 380706 - RNA, 32 nt, Human
ccugccgccugggcugucagcacuuuggcagc

SEQ ID NO: 380707 - RNA, 32 nt, Human
ccugccgcggaggcagcggcggcagcggcucu

SEQ ID NO: 380708 - RNA, 32 nt, Human
ccugccgcuggccuuguccuccuugggccuca

SEQ ID NO: 380709 - RNA, 32 nt, Human
ccugccggacacagcaccgugccaaccccacc

SEQ ID NO: 380710 - RNA, 32 nt, Human
ccugccggaccucagccccagcccgcuccccc

SEQ ID NO: 380711 - RNA, 32 nt, Human
ccugccggaggacccccaccugagagauggau

SEQ ID NO: 380712 - RNA, 32 nt, Human
ccugccggcaaucagccaugacugccuuugca

SEQ ID NO: 380713 - RNA, 32 nt, Human
ccugccggccuccugcaagauccucauugagc

SEQ ID NO: 380714 - RNA, 32 nt, Human
ccugccggccugagagcgggaccauggaugaa

SEQ ID NO: 380715 - RNA, 32 nt, Human
ccugccggccuggcugccucuggggucgaggg

SEQ ID NO: 380716 - RNA, 32 nt, Human
ccugccggcgccugagugccucugccugaaca

SEQ ID NO: 380717 - RNA, 32 nt, Human
ccugccggcgugccucuagggacgggcgacgc

SEQ ID NO: 380718 - RNA, 22 nt, Human
ccugccggcucgguucgguucg

SEQ ID NO: 380719 - RNA, 32 nt, Human
ccugccggcugucuggcggccugggugccggc

SEQ ID NO: 380720 - RNA, 19 nt, Human
ccugccgggcaacauguca

SEQ ID NO: 380721 - RNA, 32 nt, Human
ccugccgggcugcaagccugaggucugugcug

SEQ ID NO: 380722 - RNA, 32 nt, Human
ccugccgggguggcagagugaguugucucagg

SEQ ID NO: 380723 - RNA, 27 nt, Human
ccugccggguagcugggacuacaggca

SEQ ID NO: 380724 - RNA, 32 nt, Human
ccugccgggugguggaggcgcugcacggugcc

SEQ ID NO: 380725 - RNA, 22 nt, Human
ccugccgucaaucuccaccuca

SEQ ID NO: 380726 - RNA, 16 nt, Human
ccugccgucgcugccg

SEQ ID NO: 380727 - RNA, 32 nt, Human
ccugccgucuauccacccaucuguuccucguc

SEQ ID NO: 380728 - RNA, 32 nt, Human
ccugccgugccaggcccugcagggaugaugau

SEQ ID NO: 380729 - RNA, 32 nt, Human
ccugccgugguaccagccuccagccugccccc

SEQ ID NO: 380730 - RNA, 20 nt, Human
ccugccgugucuccucguca

SEQ ID NO: 380731 - RNA, 32 nt, Human
ccugccguugcuuccuauccugggcuuggaag

SEQ ID NO: 380732 - RNA, 32 nt, Human
ccugccuaaaaaggaaaucuuauggaaugaca

SEQ ID NO: 380733 - RNA, 32 nt, Human
ccugccuagaaaaagacuugugucuagcaucc

SEQ ID NO: 380734 - RNA, 32 nt, Human
ccugccuauaaucccagcuauuugggaggcug

SEQ ID NO: 380735 - RNA, 32 nt, Human
ccugccucacagucaucagucuuuuuaaaucu

SEQ ID NO: 380736 - RNA, 32 nt, Human
ccugccucacaucucccuuccaccucacaacu

SEQ ID NO: 380737 - RNA, 31 nt, Human
ccugccucaccagggaagguuggaggggccu

SEQ ID NO: 380738 - RNA, 32 nt, Human
ccugccucaccuuccaauucguuugccgccgc

SEQ ID NO: 380739 - RNA, 32 nt, Human
ccugccucagauacaagaggcaucauuggcuc

SEQ ID NO: 380740 - RNA, 32 nt, Human
ccugccucagcccgccaagguagccaucccau

SEQ ID NO: 380741 - RNA, 32 nt, Human
ccugccucagcugcaucugauaaaguugagag

SEQ ID NO: 380742 - RNA, 32 nt, Human
ccugccucagcuuaauuuuagaggauauuggg

SEQ ID NO: 380743 - RNA, 32 nt, Human
ccugccucagcuucccaaagugcugagauuac

SEQ ID NO: 380744 - RNA, 32 nt, Human
ccugccucagcuucucaggugugaccuacugu

SEQ ID NO: 380745 - RNA, 32 nt, Human
ccugccucaugucuguaacaugugacaguaau

SEQ ID NO: 380746 - RNA, 32 nt, Human
ccugccuccacccucccgaauggugcuccucc

SEQ ID NO: 380747 - RNA, 20 nt, Human
ccugccuccaccuucugccu

SEQ ID NO: 380748 - RNA, 19 nt, Human
ccugccuccacuccugccu

SEQ ID NO: 380749 - RNA, 32 nt, Human
ccugccuccagccuugguggcuccuacugccc

SEQ ID NO: 380750 - RNA, 32 nt, Human
ccugccuccagggcuccugggcugccagggac

SEQ ID NO: 380751 - RNA, 20 nt, Human
ccugccuccagugucaggga

SEQ ID NO: 380752 - RNA, 32 nt, Human
ccugccucccacaguuccuccccuaaucuggu

SEQ ID NO: 380753 - RNA, 32 nt, Human
ccugccucccacccucccucccugcccccugu

SEQ ID NO: 380754 - RNA, 32 nt, Human
ccugccuccccucugcuggugcaccucgccca

SEQ ID NO: 380755 - RNA, 32 nt, Human
ccugccucccggauaccugcgccccauggcug

SEQ ID NO: 380756 - RNA, 32 nt, Human
ccugccucccgggagacugggauuucuggccu

SEQ ID NO: 380757 - RNA, 19 nt, Human
ccugccucccucgcucgcc

SEQ ID NO: 380758 - RNA, 32 nt, Human
ccugccucccuuaccccuccccuccacuucgc

SEQ ID NO: 380759 - RNA, 32 nt, Human
ccugccucccuuccucacccugucucuggauu

SEQ ID NO: 380760 - RNA, 32 nt, Human
ccugccuccggccugcacucccccaguucccg

SEQ ID NO: 380761 - RNA, 32 nt, Human
ccugccuccuaauccccuuacuucucugucca

SEQ ID NO: 380762 - RNA, 19 nt, Human
ccugccuccuccaaguguc

SEQ ID NO: 380763 - RNA, 32 nt, Human
ccugccuccucccagggcucugccagggccuu

SEQ ID NO: 380764 - RNA, 32 nt, Human
ccugccuccugccuccccugccugccuccugc

SEQ ID NO: 380765 - RNA, 32 nt, Human
ccugccuccugccuccugccuccccugccugc

SEQ ID NO: 380766 - RNA, 32 nt, Human
ccugccuccugccuccugcggcuguuggauuu

SEQ ID NO: 380767 - RNA, 32 nt, Human
ccugccuccuuuccuuucccuuuccucugcca

SEQ ID NO: 380768 - RNA, 32 nt, Human
ccugccuccuuugagggacugggggacuuggg

SEQ ID NO: 380769 - RNA, 32 nt, Human
ccugccucggccuccugagcagcugggacuac

SEQ ID NO: 380770 - RNA, 32 nt, Human
ccugccucggggaaguccuggcgcagaugggc

SEQ ID NO: 380771 - RNA, 32 nt, Human
ccugccucucaccucuaccccaaauaccucug

SEQ ID NO: 380772 - RNA, 32 nt, Human
ccugccucuccaaggacuccacgccugacgaa

SEQ ID NO: 380773 - RNA, 32 nt, Human
ccugccucuccccucccccaguuucuccuccc

SEQ ID NO: 380774 - RNA, 32 nt, Human
ccugccucuccccuccccuuccccucucgcaa

SEQ ID NO: 380775 - RNA, 32 nt, Human
ccugccucuccucccugacccagggcugguga

SEQ ID NO: 380776 - RNA, 32 nt, Human
ccugccucuccucugccccuguccagugccug

SEQ ID NO: 380777 - RNA, 32 nt, Human
ccugccucuccucugcuccccaucccacuuuc

SEQ ID NO: 380778 - RNA, 32 nt, Human
ccugccucucuccucucuccccagaacaucca

SEQ ID NO: 380779 - RNA, 23 nt, Human
ccugccucugagccugucuuucc

SEQ ID NO: 380780 - RNA, 24 nt, Human
ccugccucugccagaaggagccag

SEQ ID NO: 380781 - RNA, 21 nt, Human
ccugccucugccuguucuucu

SEQ ID NO: 380782 - RNA, 32 nt, Human
ccugccucuggccccaguucguuuccucugcc

SEQ ID NO: 380783 - RNA, 32 nt, Human
ccugccucugggugcccggcagcuccacuaga

SEQ ID NO: 380784 - RNA, 32 nt, Human
ccugccucuguaggcuccaccucugggggcag

SEQ ID NO: 380785 - RNA, 32 nt, Human
ccugccucuguucacccuccauggcccugcua

SEQ ID NO: 380786 - RNA, 32 nt, Human
ccugccucuguugccaacacgagaucaaucag

SEQ ID NO: 380787 - RNA, 25 nt, Human
ccugccucuucccaggcuuccuggg

SEQ ID NO: 380788 - RNA, 20 nt, Human
ccugccucuucucccaauca

SEQ ID NO: 380789 - RNA, 32 nt, Human
ccugccugaccaacaugcugaaacccagucuc

SEQ ID NO: 380790 - RNA, 32 nt, Human
ccugccugaggcuucucuccuggggcaggccc

SEQ ID NO: 380791 - RNA, 32 nt, Human
ccugccugagggccccucugcccagcuugggc

SEQ ID NO: 380792 - RNA, 28 nt, Human
ccugccugaggugcugccuccucccagg

SEQ ID NO: 380793 - RNA, 32 nt, Human
ccugccugagucuugcauaucugugaaucagc

SEQ ID NO: 380794 - RNA, 32 nt, Human
ccugccugcacuauugccccagaggagggcac

SEQ ID NO: 380795 - RNA, 32 nt, Human
ccugccugcauggcggguacuucugucucugu

SEQ ID NO: 380796 - RNA, 20 nt, Human
ccugccugccaccucucgga

SEQ ID NO: 380797 - RNA, 32 nt, Human
ccugccugcccaccccuccaugcuccacgcag

SEQ ID NO: 380798 - RNA, 21 nt, Human
ccugccugccccuacccugga

SEQ ID NO: 380799 - RNA, 24 nt, Human
ccugccugccccugagaugcggaa

SEQ ID NO: 380800 - RNA, 21 nt, Human
ccugccugccccugucuuuuc

SEQ ID NO: 380801 - RNA, 32 nt, Human
ccugccugcccgccugcuugcucucuggcugu

SEQ ID NO: 380802 - RNA, 32 nt, Human
ccugccugcccugagccacuguucccagcuca

SEQ ID NO: 380803 - RNA, 32 nt, Human
ccugccugcccuggcccugaggcuccaccacu

SEQ ID NO: 380804 - RNA, 32 nt, Human
ccugccugcccuuucucccaaaaggacaaaga

SEQ ID NO: 380805 - RNA, 31 nt, Human
ccugccugccucugccguccucaguuuccuu

SEQ ID NO: 380806 - RNA, 32 nt, Human
ccugccugccugccugccugagguccccgcug

SEQ ID NO: 380807 - RNA, 22 nt, Human
ccugccugccugcucuugagaa

SEQ ID NO: 380808 - RNA, 32 nt, Human
ccugccugccuggguccagggccugagggagc

SEQ ID NO: 380809 - RNA, 22 nt, Human
ccugccugccuucuuucuggaa

SEQ ID NO: 380810 - RNA, 19 nt, Human
ccugccugcgguguucuug

SEQ ID NO: 380811 - RNA, 32 nt, Human
ccugccugcguccugccaggggagacagcccc

SEQ ID NO: 380812 - RNA, 31 nt, Human
ccugccugcguccuggggccugugcacuguu

SEQ ID NO: 380813 - RNA, 19 nt, Human
ccugccugcguucucccca

SEQ ID NO: 380814 - RNA, 32 nt, Human
ccugccugcuccacuuuuucuaccuuggaacu

SEQ ID NO: 380815 - RNA, 32 nt, Human
ccugccugcucuggccaagaggaccagccagc

SEQ ID NO: 380816 - RNA, 32 nt, Human
ccugccugcuucucagcucauuuggaaaaaua

SEQ ID NO: 380817 - RNA, 32 nt, Human
ccugccuggaaaugcugugggcucagggcaau

SEQ ID NO: 380818 - RNA, 32 nt, Human
ccugccuggacucuguggccaagagugcgugg

SEQ ID NO: 380819 - RNA, 19 nt, Human
ccugccuggagcaggggga

SEQ ID NO: 380820 - RNA, 32 nt, Human
ccugccuggagcuguuuaauuuggagcuuccc

SEQ ID NO: 380821 - RNA, 18 nt, Human
ccugccuggaggcugccu

SEQ ID NO: 380822 - RNA, 32 nt, Human
ccugccuggccaacaugaugaaacccugucuc

SEQ ID NO: 380823 - RNA, 32 nt, Human
ccugccuggcccccggaccguucugcagcguc

SEQ ID NO: 380824 - RNA, 32 nt, Human
ccugccuggccuccccucucauggcccagcca

SEQ ID NO: 380825 - RNA, 32 nt, Human
ccugccuggcugacugccuugcuagaaacaua

SEQ ID NO: 380826 - RNA, 32 nt, Human
ccugccugggcaaaauggugaaaccaugucuc

SEQ ID NO: 380827 - RNA, 32 nt, Human
ccugccugggcaacaagagcaaaauuucaucu

SEQ ID NO: 380828 - RNA, 32 nt, Human
ccugccugggcaacaagagugaaacuccaucu

SEQ ID NO: 380829 - RNA, 32 nt, Human
ccugccugggcaacauaaugaaacuuccuuuc

SEQ ID NO: 380830 - RNA, 32 nt, Human
ccugccugggcaacauagugagaccccaucuc

SEQ ID NO: 380831 - RNA, 32 nt, Human
ccugccugggcaacauggcaaaacuuugucuc

SEQ ID NO: 380832 - RNA, 32 nt, Human
ccugccugggcaacugagcaugaacccuccuc

SEQ ID NO: 380833 - RNA, 32 nt, Human
ccugccugggcaauagagccagaccuugccuc

SEQ ID NO: 380834 - RNA, 32 nt, Human
ccugccugggcccugacacccagaccaggcag

SEQ ID NO: 380835 - RNA, 32 nt, Human
ccugccuggggaccaagcugaaggggaauucu

SEQ ID NO: 380836 - RNA, 21 nt, Human
ccugccugggggaagagccag

SEQ ID NO: 380837 - RNA, 32 nt, Human
ccugccuggguggguguccugugacuugacag

SEQ ID NO: 380838 - RNA, 31 nt, Human
ccugccugguacauagcuggcauucagaaaa

SEQ ID NO: 380839 - RNA, 32 nt, Human
ccugccuguaaucccagcuacuugggaggcug

SEQ ID NO: 380840 - RNA, 32 nt, Human
ccugccuguagucccaccugugugggagaauc

SEQ ID NO: 380841 - RNA, 32 nt, Human
ccugccuguagucccagcuacucgggaggcug

SEQ ID NO: 380842 - RNA, 32 nt, Human
ccugccugucauggccuuggggcucucagccc

SEQ ID NO: 380843 - RNA, 32 nt, Human
ccugccugucugccccagcccagauuccccug

SEQ ID NO: 380844 - RNA, 32 nt, Human
ccugccugugagccacaccuccuagcucuggg

SEQ ID NO: 380845 - RNA, 32 nt, Human
ccugccugugccuagaucagagcccagagggc

SEQ ID NO: 380846 - RNA, 31 nt, Human
ccugccuguggcucugcccagaugcuucaga

SEQ ID NO: 380847 - RNA, 32 nt, Human
ccugccugugggcauccaccucccaggugagg

SEQ ID NO: 380848 - RNA, 32 nt, Human
ccugccuguggucaggcauuccucacucccac

SEQ ID NO: 380849 - RNA, 18 nt, Human
ccugccugugucuccaca

SEQ ID NO: 380850 - RNA, 32 nt, Human
ccugccugugugacgcugggcgagucucuucc

SEQ ID NO: 380851 - RNA, 32 nt, Human
ccugccugugugugugcaagugugcagguucc

SEQ ID NO: 380852 - RNA, 32 nt, Human
ccugccuguguguuugaaaaggccaguucucc

SEQ ID NO: 380853 - RNA, 31 nt, Human
ccugccuguguucugugcccuguguccgcuc

SEQ ID NO: 380854 - RNA, 32 nt, Human
ccugccuguguucugugcccuguguccgcucu

SEQ ID NO: 380855 - RNA, 32 nt, Human
ccugccuguuaguacagagcuuuccugaugau

SEQ ID NO: 380856 - RNA, 32 nt, Human
ccugccuuacaagaggucccagaaggagugcu

SEQ ID NO: 380857 - RNA, 32 nt, Human
ccugccuuaccgcgcuuggaaacucugacuug

SEQ ID NO: 380858 - RNA, 32 nt, Human
ccugccuuagccuccuguccauguuuaauuuu

SEQ ID NO: 380859 - RNA, 32 nt, Human
ccugccuuccacagccucucguuucuccucca

SEQ ID NO: 380860 - RNA, 32 nt, Human
ccugccuuccaccaacuccaucaugcaucuga

SEQ ID NO: 380861 - RNA, 32 nt, Human
ccugccuucccuccagaccucucccucuguuu

SEQ ID NO: 380862 - RNA, 32 nt, Human
ccugccuucccucccuccuccccaccgggccg

SEQ ID NO: 380863 - RNA, 17 nt, Human
ccugccuucccuccuca

SEQ ID NO: 380864 - RNA, 32 nt, Human
ccugccuucccucuugccuggaaagggcagca

SEQ ID NO: 380865 - RNA, 32 nt, Human
ccugccuucccugagacugucucuucuccugu

SEQ ID NO: 380866 - RNA, 21 nt, Human
ccugccuucccuuguccuucc

SEQ ID NO: 380867 - RNA, 24 nt, Human
ccugccuuccugauccucuguaga

SEQ ID NO: 380868 - RNA, 32 nt, Human
ccugccuuccugcagccacacacccacccggg

SEQ ID NO: 380869 - RNA, 32 nt, Human
ccugccuuccugggccagcuuccugcuugcag

SEQ ID NO: 380870 - RNA, 32 nt, Human
ccugccuuccuuguggcugucagcccaauguc

SEQ ID NO: 380871 - RNA, 32 nt, Human
ccugccuucgucucgcuccaucaccgccucaa

SEQ ID NO: 380872 - RNA, 22 nt, Human
ccugccuucuagaugccucuga

SEQ ID NO: 380873 - RNA, 32 nt, Human
ccugccuucuccccaucuauccccaaggccuc

SEQ ID NO: 380874 - RNA, 32 nt, Human
ccugccuucucccuuccucugguugaauguca

SEQ ID NO: 380875 - RNA, 32 nt, Human
ccugccuucucuaggaacccuggcuuuuaucu

SEQ ID NO: 380876 - RNA, 32 nt, Human
ccugccuucugccugcucuccugcacugaccc

SEQ ID NO: 380877 - RNA, 32 nt, Human
ccugccuucugcugugagcccugagauccucc

SEQ ID NO: 380878 - RNA, 32 nt, Human
ccugccuugaagaccacccaagcggccuccag

SEQ ID NO: 380879 - RNA, 32 nt, Human
ccugccuugcaaauucuguuucccaggggaau

SEQ ID NO: 380880 - RNA, 32 nt, Human
ccugccuugcccacuccugcucugcucgccuc

SEQ ID NO: 380881 - RNA, 32 nt, Human
ccugccuugccgcuccccuuggaccuccaggg

SEQ ID NO: 380882 - RNA, 32 nt, Human
ccugccuuguguccugagccauagugacucuu

SEQ ID NO: 380883 - RNA, 32 nt, Human
ccugccuuguuauuguaagugccuucaauacu

SEQ ID NO: 380884 - RNA, 32 nt, Human
ccugccuuuauucugucuucucuuguccuauc

SEQ ID NO: 380885 - RNA, 32 nt, Human
ccugccuuucccugacacuuuuggggucugcc

SEQ ID NO: 380886 - RNA, 32 nt, Human
ccugccuuuccucccuuaucaguuucucuuua

SEQ ID NO: 380887 - RNA, 32 nt, Human
ccugccuuuccucugccuccuccccugccagc

SEQ ID NO: 380888 - RNA, 32 nt, Human
ccugccuuugagcccccgucacguugggcacu

SEQ ID NO: 380889 - RNA, 32 nt, Human
ccugccuuugauugucauucuccugggaagcc

SEQ ID NO: 380890 - RNA, 20 nt, Human
ccugccuuuggucucucaga

SEQ ID NO: 380891 - RNA, 32 nt, Human
ccugccuuuuauaguaugcccaccucaggcag

SEQ ID NO: 380892 - RNA, 32 nt, Human
ccugccuuuuuguucccuaucuccacucccug

SEQ ID NO: 380893 - RNA, 32 nt, Human
ccugcgaacccacaaucucugccagcagaacu

SEQ ID NO: 380894 - RNA, 32 nt, Human
ccugcgaaugcuguauagaaggugcuaaugaa

SEQ ID NO: 380895 - RNA, 18 nt, Human
ccugcgacuucccccgga

SEQ ID NO: 380896 - RNA, 32 nt, Human
ccugcgagagaaggggguucaucauggcggau

SEQ ID NO: 380897 - RNA, 32 nt, Human
ccugcgagagccacagcaaggagcucagccag

SEQ ID NO: 380898 - RNA, 32 nt, Human
ccugcgagcuccguccugccugcagcagcaca

SEQ ID NO: 380899 - RNA, 32 nt, Human
ccugcgaggaagguggggucucagugcuuucg

SEQ ID NO: 380900 - RNA, 32 nt, Human
ccugcgaggacggcgggggcggcccugugagg

SEQ ID NO: 380901 - RNA, 21 nt, Human
ccugcgaggagcguggucccc

SEQ ID NO: 380902 - RNA, 24 nt, Human
ccugcgaggcagagauugcaguga

SEQ ID NO: 380903 - RNA, 32 nt, Human
ccugcgaggcagagauugcagugagccaagau

SEQ ID NO: 380904 - RNA, 22 nt, Human
ccugcgaggggaggaggcccag

SEQ ID NO: 380905 - RNA, 21 nt, Human
ccugcgaggggcggggcgcgg

SEQ ID NO: 380906 - RNA, 32 nt, Human
ccugcgaggggugaggagagacuuugcugacu

SEQ ID NO: 380907 - RNA, 23 nt, Human
ccugcgaggucaagcugcagaga

SEQ ID NO: 380908 - RNA, 32 nt, Human
ccugcgaggucagucaaggcuuugggggcucu

SEQ ID NO: 380909 - RNA, 32 nt, Human
ccugcgaguggcgcagguaacagaccgcaggg

SEQ ID NO: 380910 - RNA, 31 nt, Human
ccugcgaugaauccggcccuaggcaaccaga

SEQ ID NO: 380911 - RNA, 32 nt, Human
ccugcgaugagcuuuucuuucagcuggugaaa

SEQ ID NO: 380912 - RNA, 31 nt, Human
ccugcgaugauggacucaacaccuuccguga

SEQ ID NO: 380913 - RNA, 32 nt, Human
ccugcgauggcagaagaaacucgacaaaguaa

SEQ ID NO: 380914 - RNA, 32 nt, Human
ccugcgcaauaggaguacgcugccugggaggc

SEQ ID NO: 380915 - RNA, 32 nt, Human
ccugcgcagauggggacuguggugccaucuuu

SEQ ID NO: 380916 - RNA, 32 nt, Human
ccugcgcagggccguaugcauccugccaagcu

SEQ ID NO: 380917 - RNA, 18 nt, Human
ccugcgcaucccacccga

SEQ ID NO: 380918 - RNA, 22 nt, Human
ccugcgccaccacaaccaggac

SEQ ID NO: 380919 - RNA, 18 nt, Human
ccugcgccaccgccgccg

SEQ ID NO: 380920 - RNA, 32 nt, Human
ccugcgcccagccgugcccuggacuguggcac

SEQ ID NO: 380921 - RNA, 24 nt, Human
ccugcgccccgcccacacccucgg

SEQ ID NO: 380922 - RNA, 32 nt, Human
ccugcgccccgccccgagguuggggcuuugaa

SEQ ID NO: 380923 - RNA, 18 nt, Human
ccugcgccccuccugccu

SEQ ID NO: 380924 - RNA, 32 nt, Human
ccugcgcccugagagguugccuuuccuuuucc

SEQ ID NO: 380925 - RNA, 32 nt, Human
ccugcgccgcacccggggccugggugagacug

SEQ ID NO: 380926 - RNA, 32 nt, Human
ccugcgccgucccucguuccauggcccagucc

SEQ ID NO: 380927 - RNA, 32 nt, Human
ccugcgccuccucucugcuucucccuccuccu

SEQ ID NO: 380928 - RNA, 32 nt, Human
ccugcgccuggggugagcugagcccgggacuc

SEQ ID NO: 380929 - RNA, 32 nt, Human
ccugcgccuguaaucccagcacuuugggaggc

SEQ ID NO: 380930 - RNA, 23 nt, Human
ccugcgccuugucucugcugcuc

SEQ ID NO: 380931 - RNA, 31 nt, Human
ccugcgcgaguguccaaggcgggaggagaga

SEQ ID NO: 380932 - RNA, 32 nt, Human
ccugcgcgccuggacagcgccugcugcccgcc

SEQ ID NO: 380933 - RNA, 20 nt, Human
ccugcgcgcuuuccugcucc

SEQ ID NO: 380934 - RNA, 22 nt, Human
ccugcgcggcgacggggcgugg

SEQ ID NO: 380935 - RNA, 19 nt, Human
ccugcgcgggaggccacag

SEQ ID NO: 380936 - RNA, 32 nt, Human
ccugcgcgggccugaauggccuucaggagcac

SEQ ID NO: 380937 - RNA, 22 nt, Human
ccugcgcucagcugcucuggca

SEQ ID NO: 380938 - RNA, 32 nt, Human
ccugcgcuccaccgcacaccucccgggcccgc

SEQ ID NO: 380939 - RNA, 32 nt, Human
ccugcgcuccuucuccccgcugcaacccgggc

SEQ ID NO: 380940 - RNA, 32 nt, Human
ccugcgcugcagcuccgcaccuuagcagcccg

SEQ ID NO: 380941 - RNA, 32 nt, Human
ccugcgcuguccgcccuuccccuagcguuacu

SEQ ID NO: 380942 - RNA, 32 nt, Human
ccugcgcugucuggguggccacacagagcccg

SEQ ID NO: 380943 - RNA, 32 nt, Human
ccugcgcugugauuuuagccuccugagauugg

SEQ ID NO: 380944 - RNA, 32 nt, Human
ccugcgcuucaucucaugaggauuucuuuaug

SEQ ID NO: 380945 - RNA, 21 nt, Human
ccugcggaagaggaggugcgg

SEQ ID NO: 380946 - RNA, 32 nt, Human
ccugcggaagcaucuuguaauggaacacauua

SEQ ID NO: 380947 - RNA, 32 nt, Human
ccugcggaaugacagccugggguccuugugcc

SEQ ID NO: 380948 - RNA, 20 nt, Human
ccugcggaccgcuuccuucc

SEQ ID NO: 380949 - RNA, 32 nt, Human
ccugcggagagaaaccccagcccaucggucug

SEQ ID NO: 380950 - RNA, 32 nt, Human
ccugcggagaggggaugaggcccggggcgccc

SEQ ID NO: 380951 - RNA, 32 nt, Human
ccugcggagcccagugagaacaggcggccccu

SEQ ID NO: 380952 - RNA, 32 nt, Human
ccugcggaggcuucugaacugggaggaguuug

SEQ ID NO: 380953 - RNA, 32 nt, Human
ccugcggagggaggggacagcuggacccgcag

SEQ ID NO: 380954 - RNA, 32 nt, Human
ccugcggaggggcgaggacgaggcagaaguca

SEQ ID NO: 380955 - RNA, 32 nt, Human
ccugcggaggggcgauccggccccuccauguc

SEQ ID NO: 380956 - RNA, 32 nt, Human
ccugcggagucgauaaauuagcagaaccacau

SEQ ID NO: 380957 - RNA, 32 nt, Human
ccugcggauccuucacuccgggugggucggcc

SEQ ID NO: 380958 - RNA, 32 nt, Human
ccugcggcaauggagaaaaugcuaauacagac

SEQ ID NO: 380959 - RNA, 32 nt, Human
ccugcggcagagcccaggcuggggaagugaac

SEQ ID NO: 380960 - RNA, 32 nt, Human
ccugcggcagaggugugcagaggcagaaugug

SEQ ID NO: 380961 - RNA, 32 nt, Human
ccugcggcagccacaggcuuggugguuucaag

SEQ ID NO: 380962 - RNA, 32 nt, Human
ccugcggccuccaagccuuccuggcccaggca

SEQ ID NO: 380963 - RNA, 32 nt, Human
ccugcggcuacaagucccuccuggggccuggg

SEQ ID NO: 380964 - RNA, 32 nt, Human
ccugcggcugcuccgggcugggcgcggggcga

SEQ ID NO: 380965 - RNA, 32 nt, Human
ccugcggcugggccuccgggaggcagaagaga

SEQ ID NO: 380966 - RNA, 32 nt, Human
ccugcggcuggucagccugguccuccugggcu

SEQ ID NO: 380967 - RNA, 32 nt, Human
ccugcggcugugccuggacugaagcugucccg

SEQ ID NO: 380968 - RNA, 32 nt, Human
ccugcggcuuuggugacagugugcagacagca

SEQ ID NO: 380969 - RNA, 32 nt, Human
ccugcgggaagagcagggagaggagguggacu

SEQ ID NO: 380970 - RNA, 18 nt, Human
ccugcgggaggggcgaca

SEQ ID NO: 380971 - RNA, 22 nt, Human
ccugcgggcacagcugccuucc

SEQ ID NO: 380972 - RNA, 22 nt, Human
ccugcgggccaccuccucuucc

SEQ ID NO: 380973 - RNA, 22 nt, Human
ccugcgggccuccgugcuccuu

SEQ ID NO: 380974 - RNA, 22 nt, Human
ccugcgggcggccguccguucc

SEQ ID NO: 380975 - RNA, 21 nt, Human
ccugcgggcgggcgggcgcgg

SEQ ID NO: 380976 - RNA, 32 nt, Human
ccugcggggaggcgcaggauggacgcguuggc

SEQ ID NO: 380977 - RNA, 32 nt, Human
ccugcgggggcucucccuucccucucuucccc

SEQ ID NO: 380978 - RNA, 18 nt, Human
ccugcgggguggcccugg

SEQ ID NO: 380979 - RNA, 26 nt, Human
ccugcggggugugccccuguccuucc

SEQ ID NO: 380980 - RNA, 32 nt, Human
ccugcggguaauagacaagaaggucacccugg

SEQ ID NO: 380981 - RNA, 32 nt, Human
ccugcgguccagccuccaacuuugguugccag

SEQ ID NO: 380982 - RNA, 32 nt, Human
ccugcggucccagcuacuuagggaggcuaaga

SEQ ID NO: 380983 - RNA, 32 nt, Human
ccugcggucccagcuacuugggaggcugaggc

SEQ ID NO: 380984 - RNA, 32 nt, Human
ccugcggugagcucgcgcugggcgggcuguuc

SEQ ID NO: 380985 - RNA, 22 nt, Human
ccugcgguguguacacgaacuc

SEQ ID NO: 380986 - RNA, 23 nt, Human
ccugcgguuccagcuacucaaga

SEQ ID NO: 380987 - RNA, 32 nt, Human
ccugcgguuccagcuacucaagaggcugaggc

SEQ ID NO: 380988 - RNA, 32 nt, Human
ccugcgguucgcaaagugggguccccagccag

SEQ ID NO: 380989 - RNA, 32 nt, Human
ccugcguaacuuucucccuugauccgggaguc

SEQ ID NO: 380990 - RNA, 32 nt, Human
ccugcguacauucacaugcacacauggaagaa

SEQ ID NO: 380991 - RNA, 22 nt, Human
ccugcguaggaggcgggugcag

SEQ ID NO: 380992 - RNA, 32 nt, Human
ccugcguaguuguuaaauuggugaccuugcgg

SEQ ID NO: 380993 - RNA, 32 nt, Human
ccugcguauuuaugucccaggagcucaccuuc

SEQ ID NO: 380994 - RNA, 32 nt, Human
ccugcgucccugccccuucuuccugcuccccc

SEQ ID NO: 380995 - RNA, 32 nt, Human
ccugcguccucgaaaagccagaggguucaccu

SEQ ID NO: 380996 - RNA, 21 nt, Human
ccugcgucguucuguccuucc

SEQ ID NO: 380997 - RNA, 32 nt, Human
ccugcgucuccucgucccgagggcgccugggu

SEQ ID NO: 380998 - RNA, 32 nt, Human
ccugcgucuccucugugcgccugugagugucc

SEQ ID NO: 380999 - RNA, 32 nt, Human
ccugcgucuuccgccccugccugccauguacc

SEQ ID NO: 381000 - RNA, 19 nt, Human
ccugcgugccauucuucua

SEQ ID NO: 381001 - RNA, 21 nt, Human
ccugcgugccccgccacugcc

SEQ ID NO: 381002 - RNA, 28 nt, Human
ccugcgugcugccccguucagugugccg

SEQ ID NO: 381003 - RNA, 32 nt, Human
ccugcguggaaaguugcugggcccccgccccc

SEQ ID NO: 381004 - RNA, 32 nt, Human
ccugcgugggggccagucaggcugcagaggca

SEQ ID NO: 381005 - RNA, 22 nt, Human
ccugcguggguagcccucggcc

SEQ ID NO: 381006 - RNA, 32 nt, Human
ccugcgugucaucugccuggucaucucagacc

SEQ ID NO: 381007 - RNA, 32 nt, Human
ccugcguguccuccccuccacugccugcaugg

SEQ ID NO: 381008 - RNA, 32 nt, Human
ccugcgugugggacucaagguugcccagggcu

SEQ ID NO: 381009 - RNA, 23 nt, Human
ccugcguucccagcuacuuggga

SEQ ID NO: 381010 - RNA, 22 nt, Human
ccugcguucuccccaugaacuu

SEQ ID NO: 381011 - RNA, 32 nt, Human
ccugcuaaaugccacugacaauguuaugagau

SEQ ID NO: 381012 - RNA, 32 nt, Human
ccugcuaacagcaugaucucuccucacccuuu

SEQ ID NO: 381013 - RNA, 32 nt, Human
ccugcuaacuuggagcuucagagccauggcaa

SEQ ID NO: 381014 - RNA, 32 nt, Human
ccugcuaagagggagaccaggucaaggcagcc

SEQ ID NO: 381015 - RNA, 32 nt, Human
ccugcuaaguguccugcaaggccuuucacggu

SEQ ID NO: 381016 - RNA, 32 nt, Human
ccugcuaccaacagcccuccccuugggcuggc

SEQ ID NO: 381017 - RNA, 32 nt, Human
ccugcuaccuugacccuucccuuuccucugcu

SEQ ID NO: 381018 - RNA, 32 nt, Human
ccugcuacuccaguuuccucagccucugcaag

SEQ ID NO: 381019 - RNA, 32 nt, Human
ccugcuacugcugaccaaauucccaggaaucu

SEQ ID NO: 381020 - RNA, 32 nt, Human
ccugcuagcacaguaugcuacagggaacaaag

SEQ ID NO: 381021 - RNA, 18 nt, Human
ccugcuagcucuuccuga

SEQ ID NO: 381022 - RNA, 32 nt, Human
ccugcuagcugagcacuuccacaagggcauac

SEQ ID NO: 381023 - RNA, 22 nt, Human
ccugcuaggaccggccggggcc

SEQ ID NO: 381024 - RNA, 32 nt, Human
ccugcuagggucguuuguuucuuucugcugug

SEQ ID NO: 381025 - RNA, 21 nt, Human
ccugcuaggucuuaagagcca

SEQ ID NO: 381026 - RNA, 32 nt, Human
ccugcuaugaaaggaauaaaaccuacacacaa

SEQ ID NO: 381027 - RNA, 32 nt, Human
ccugcucaagcagcacagaggaaggggcaaga

SEQ ID NO: 381028 - RNA, 32 nt, Human
ccugcucaagcuaaacgcaccacgccggcuuu

SEQ ID NO: 381029 - RNA, 25 nt, Human
ccugcucaagcuccuccugcuccuu

SEQ ID NO: 381030 - RNA, 32 nt, Human
ccugcucaauggugaauacgaccuaaguguua

SEQ ID NO: 381031 - RNA, 32 nt, Human
ccugcucacagcccauggguggacucggcccc

SEQ ID NO: 381032 - RNA, 32 nt, Human
ccugcucacauucucuggaagugggccaguuu

SEQ ID NO: 381033 - RNA, 32 nt, Human
ccugcucaccagccgccagcugcccaucuucu

SEQ ID NO: 381034 - RNA, 22 nt, Human
ccugcucacccacgcccaccca

SEQ ID NO: 381035 - RNA, 32 nt, Human
ccugcucacgcucucccuggaccucuucuaca

SEQ ID NO: 381036 - RNA, 32 nt, Human
ccugcucacuggcuggguauucuucguaaaaa

SEQ ID NO: 381037 - RNA, 32 nt, Human
ccugcucagccccugaugagcacaucaucaaa

SEQ ID NO: 381038 - RNA, 32 nt, Human
ccugcucaggccccaucucugggguguuuggg

SEQ ID NO: 381039 - RNA, 32 nt, Human
ccugcucagguggcacagacugcgagcugggc

SEQ ID NO: 381040 - RNA, 22 nt, Human
ccugcucagugcuuguccugcc

SEQ ID NO: 381041 - RNA, 32 nt, Human
ccugcucaguguccagcccccgcugaguucag

SEQ ID NO: 381042 - RNA, 32 nt, Human
ccugcucaguguccggaaagaagucagucauc

SEQ ID NO: 381043 - RNA, 32 nt, Human
ccugcucaucaccuacggggugagugggccug

SEQ ID NO: 381044 - RNA, 32 nt, Human
ccugcucaucugcuugagcagcggcugucagg

SEQ ID NO: 381045 - RNA, 32 nt, Human
ccugcucaugaggagccuuaguggagauucca

SEQ ID NO: 381046 - RNA, 32 nt, Human
ccugcucaugccacuaacagcaugcugccaaa

SEQ ID NO: 381047 - RNA, 32 nt, Human
ccugcuccaagcucugcuuuuccuuccucuga

SEQ ID NO: 381048 - RNA, 32 nt, Human
ccugcuccacaccccuauuuuccucuuaauaa

SEQ ID NO: 381049 - RNA, 32 nt, Human
ccugcuccacccccucuccccauuccuccgcc

SEQ ID NO: 381050 - RNA, 32 nt, Human
ccugcuccagccagggaggacugagggagugc

SEQ ID NO: 381051 - RNA, 32 nt, Human
ccugcuccagcuucccuguccuggccccaccu

SEQ ID NO: 381052 - RNA, 32 nt, Human
ccugcuccaggccuugcuucucccucugcagg

SEQ ID NO: 381053 - RNA, 21 nt, Human
ccugcuccaucggcacuggug

SEQ ID NO: 381054 - RNA, 32 nt, Human
ccugcuccaugagggacacucagcauucuuuu

SEQ ID NO: 381055 - RNA, 32 nt, Human
ccugcucccaagugcaaccucugucugacccu

SEQ ID NO: 381056 - RNA, 32 nt, Human
ccugcucccacacugucacuggaugucauggg

SEQ ID NO: 381057 - RNA, 32 nt, Human
ccugcucccacugucuguguucuccucacugu

SEQ ID NO: 381058 - RNA, 32 nt, Human
ccugcucccagaggaaaagugaauugcaccau

SEQ ID NO: 381059 - RNA, 32 nt, Human
ccugcucccagauguaaacagagcaaccugca

SEQ ID NO: 381060 - RNA, 32 nt, Human
ccugcucccagccaugguggccuggcgcucgg

SEQ ID NO: 381061 - RNA, 32 nt, Human
ccugcucccagccucuugcucagagcuaggcc

SEQ ID NO: 381062 - RNA, 32 nt, Human
  misc_feature (30)..(30): n is a, c, g, or u
ccugcucccaggguuagaccugagaugaancu

SEQ ID NO: 381063 - RNA, 32 nt, Human
ccugcucccaucuccaccucuaaugcuucuug

SEQ ID NO: 381064 - RNA, 32 nt, Human
ccugcuccccaagcuccagcagcuggacgauc

SEQ ID NO: 381065 - RNA, 32 nt, Human
ccugcuccccagcuccuccugccugcacccga

SEQ ID NO: 381066 - RNA, 24 nt, Human
ccugcucccccuguccccacccca

SEQ ID NO: 381067 - RNA, 22 nt, Human
ccugcucccccugucccuuccc

SEQ ID NO: 381068 - RNA, 23 nt, Human
ccugcuccccuccuaccacuguc

SEQ ID NO: 381069 - RNA, 31 nt, Human
ccugcuccccucucuggcccaugguccugcu

SEQ ID NO: 381070 - RNA, 32 nt, Human
ccugcuccccugugccuccacaggggagggcc

SEQ ID NO: 381071 - RNA, 32 nt, Human
ccugcucccgcccgaggacuccugcgggcacu

SEQ ID NO: 381072 - RNA, 32 nt, Human
ccugcucccgcccgcccucuggcccggccgcc

SEQ ID NO: 381073 - RNA, 32 nt, Human
ccugcucccguccuguugacucugccuugcuc

SEQ ID NO: 381074 - RNA, 21 nt, Human
ccugcucccgucugucugucc

SEQ ID NO: 381075 - RNA, 23 nt, Human
ccugcucccucccaucccuuccc

SEQ ID NO: 381076 - RNA, 32 nt, Human
ccugcucccucugcccuuccucccucuuucuu

SEQ ID NO: 381077 - RNA, 32 nt, Human
ccugcucccugccuccuuuucagggcugcccu

SEQ ID NO: 381078 - RNA, 32 nt, Human
ccugcucccuggaagguagacuauggcauaag

SEQ ID NO: 381079 - RNA, 25 nt, Human
ccugcuccgcccgcgccuuucuucu

SEQ ID NO: 381080 - RNA, 32 nt, Human
ccugcuccggggcccuuccagaaauaaagacc

SEQ ID NO: 381081 - RNA, 32 nt, Human
ccugcuccgugccucccgcgccuguugguugg

SEQ ID NO: 381082 - RNA, 32 nt, Human
ccugcuccguucugcuaccuugucaaacccac

SEQ ID NO: 381083 - RNA, 32 nt, Human
ccugcuccucaccuccuggcccugcuccuuac

SEQ ID NO: 381084 - RNA, 32 nt, Human
ccugcuccuccaccuccuccucuccuuguccu

SEQ ID NO: 381085 - RNA, 32 nt, Human
ccugcuccuccaggaauucccagcaggcucuc

SEQ ID NO: 381086 - RNA, 32 nt, Human
ccugcuccuccaugcugugagcugcuuuggca

SEQ ID NO: 381087 - RNA, 32 nt, Human
ccugcuccuccccuucgggcccccuccuccug

SEQ ID NO: 381088 - RNA, 32 nt, Human
ccugcuccucucggccccuccuccugggccgc

SEQ ID NO: 381089 - RNA, 32 nt, Human
ccugcuccucucugccucaucucccaaagccc

SEQ ID NO: 381090 - RNA, 32 nt, Human
ccugcuccucucuguccugccucaggccuaag

SEQ ID NO: 381091 - RNA, 32 nt, Human
ccugcuccucugggccaccucucuccaccugc

SEQ ID NO: 381092 - RNA, 32 nt, Human
ccugcuccucuguggccuuccugggcugcccu

SEQ ID NO: 381093 - RNA, 32 nt, Human
ccugcuccuggaccucuuuaugauauugugau

SEQ ID NO: 381094 - RNA, 32 nt, Human
ccugcuccuguaguacagaaggugcaguacau

SEQ ID NO: 381095 - RNA, 32 nt, Human
ccugcuccuguuucagcgccugcuccagcuug

SEQ ID NO: 381096 - RNA, 32 nt, Human
ccugcuccuuagagaagggaagaugagugagu

SEQ ID NO: 381097 - RNA, 32 nt, Human
ccugcuccuucccaggaguggaggaggccugg

SEQ ID NO: 381098 - RNA, 32 nt, Human
ccugcucggaagcagaugaugugaaauguucc

SEQ ID NO: 381099 - RNA, 32 nt, Human
ccugcucggcggcuccaccacaguugcaaccu

SEQ ID NO: 381100 - RNA, 32 nt, Human
ccugcucggucacauuggagcuggcagaggcc

SEQ ID NO: 381101 - RNA, 32 nt, Human
ccugcucuaggccagcccugucaccaccucca

SEQ ID NO: 381102 - RNA, 32 nt, Human
ccugcucuaguccuugccacacaugcccuggg

SEQ ID NO: 381103 - RNA, 32 nt, Human
ccugcucuauccccugcccucuuccagcccca

SEQ ID NO: 381104 - RNA, 32 nt, Human
ccugcucucaugaggcuuucaggcguuugggg

SEQ ID NO: 381105 - RNA, 32 nt, Human
ccugcucuccaccuggacucaggccgggcugg

SEQ ID NO: 381106 - RNA, 24 nt, Human
ccugcucuccucuugccacugccu

SEQ ID NO: 381107 - RNA, 32 nt, Human
ccugcucucucaccugccaucguacagaccag

SEQ ID NO: 381108 - RNA, 32 nt, Human
ccugcucucuccacuucucugcuuauauuguc

SEQ ID NO: 381109 - RNA, 20 nt, Human
ccugcucucucccucuuccc

SEQ ID NO: 381110 - RNA, 32 nt, Human
ccugcucucucuccacccuccuguucugucug

SEQ ID NO: 381111 - RNA, 32 nt, Human
ccugcucucuggucuuuucaguuugccucuuu

SEQ ID NO: 381112 - RNA, 22 nt, Human
ccugcucucuuagaaagagcca

SEQ ID NO: 381113 - RNA, 30 nt, Human
ccugcucucuucagcuccugugguaugugg

SEQ ID NO: 381114 - RNA, 32 nt, Human
ccugcucugaagauguggauacagaauuaguc

SEQ ID NO: 381115 - RNA, 32 nt, Human
ccugcucugagcugccccuuguugugaccugg

SEQ ID NO: 381116 - RNA, 32 nt, Human
ccugcucugcaaccuuucucuucucacggguc

SEQ ID NO: 381117 - RNA, 32 nt, Human
ccugcucugcagcugcuauaaauagccucccu

SEQ ID NO: 381118 - RNA, 32 nt, Human
ccugcucugcccaggagguggcguccagcagu

SEQ ID NO: 381119 - RNA, 32 nt, Human
ccugcucugcccucccuggcuccuggacuaga

SEQ ID NO: 381120 - RNA, 32 nt, Human
ccugcucugccucaagcaccccuucuuugcug

SEQ ID NO: 381121 - RNA, 32 nt, Human
ccugcucugccuggcucgaugucugcuucuuc

SEQ ID NO: 381122 - RNA, 32 nt, Human
ccugcucugcgaugggcauccugacugucugg

SEQ ID NO: 381123 - RNA, 32 nt, Human
ccugcucuggacuugcccucucccuuccuggc

SEQ ID NO: 381124 - RNA, 32 nt, Human
ccugcucuggcaggcaggcaaagcuaggcaga

SEQ ID NO: 381125 - RNA, 32 nt, Human
ccugcucugggagcauugcuagccuucuaccc

SEQ ID NO: 381126 - RNA, 32 nt, Human
ccugcucugucacccaggcuggagugcagugg

SEQ ID NO: 381127 - RNA, 32 nt, Human
ccugcucugucccuaauuuuuguuuuuauuuu

SEQ ID NO: 381128 - RNA, 32 nt, Human
ccugcucuguccuuagucauccuuagacaccu

SEQ ID NO: 381129 - RNA, 32 nt, Human
ccugcucugucgcccaggcuggagugcagugg

SEQ ID NO: 381130 - RNA, 32 nt, Human
ccugcucuguugcccaggcuggaguacauugg

SEQ ID NO: 381131 - RNA, 32 nt, Human
ccugcucuguugcuggcucuccuugaagacaa

SEQ ID NO: 381132 - RNA, 32 nt, Human
ccugcucuuaggaagccugggaaggaccggug

SEQ ID NO: 381133 - RNA, 17 nt, Human
ccugcucuucagcguca

SEQ ID NO: 381134 - RNA, 32 nt, Human
ccugcucuucagugugaaagagaaagagggga

SEQ ID NO: 381135 - RNA, 32 nt, Human
ccugcucuuccucggcccuccgccuccucccc

SEQ ID NO: 381136 - RNA, 32 nt, Human
ccugcucuugcucgcucugucuugccugccgc

SEQ ID NO: 381137 - RNA, 32 nt, Human
ccugcugaaacaccucccaggggcuccaccug

SEQ ID NO: 381138 - RNA, 32 nt, Human
ccugcugaaauaugugugugaagaauuauuua

SEQ ID NO: 381139 - RNA, 32 nt, Human
ccugcugaacucagaggagaaagccugaguga

SEQ ID NO: 381140 - RNA, 32 nt, Human
ccugcugaagacauuuacuuucaaugaucuac

SEQ ID NO: 381141 - RNA, 31 nt, Human
ccugcugaagcuuuggagcacuugugauugc

SEQ ID NO: 381142 - RNA, 32 nt, Human
ccugcugaccagcugggaugauaggcaggcac

SEQ ID NO: 381143 - RNA, 32 nt, Human
ccugcugaccccgugucaccacugccggcgcc

SEQ ID NO: 381144 - RNA, 32 nt, Human
ccugcugacugcacucugccaggcuucccaau

SEQ ID NO: 381145 - RNA, 24 nt, Human
ccugcugacugcgccugucuucuc

SEQ ID NO: 381146 - RNA, 32 nt, Human
ccugcugagacgggaccaaggacggcugcagg

SEQ ID NO: 381147 - RNA, 32 nt, Human
ccugcugagagcugugaggggagcuucugcuc

SEQ ID NO: 381148 - RNA, 32 nt, Human
ccugcugagaguccucccuccugggcucccug

SEQ ID NO: 381149 - RNA, 32 nt, Human
ccugcugagcccagggcgacagaggggcacug

SEQ ID NO: 381150 - RNA, 32 nt, Human
ccugcugagcuccagacugcagcccgugcuga

SEQ ID NO: 381151 - RNA, 32 nt, Human
ccugcugagcucugauucaagugccugccucu

SEQ ID NO: 381152 - RNA, 32 nt, Human
ccugcugagcugacuacacagacuuagucuuc

SEQ ID NO: 381153 - RNA, 32 nt, Human
ccugcugagcuuugugaaaauccacaggcguu

SEQ ID NO: 381154 - RNA, 32 nt, Human
ccugcugaggcggagacugcagugagcugaga

SEQ ID NO: 381155 - RNA, 32 nt, Human
ccugcugagguggagacugcagugagcugaga

SEQ ID NO: 381156 - RNA, 32 nt, Human
ccugcugagguggagauugcagugaacuaaga

SEQ ID NO: 381157 - RNA, 32 nt, Human
ccugcugaguagcugggacuacaggcacaugc

SEQ ID NO: 381158 - RNA, 32 nt, Human
ccugcugaguagcugggauugcagguguguac

SEQ ID NO: 381159 - RNA, 32 nt, Human
ccugcugcaacaucuucuccuccaggaaggcu

SEQ ID NO: 381160 - RNA, 32 nt, Human
ccugcugcacacacaagcaucucacucggccc

SEQ ID NO: 381161 - RNA, 32 nt, Human
ccugcugcacaccaaucuguggcccuucauca

SEQ ID NO: 381162 - RNA, 32 nt, Human
ccugcugcaccacugcccugccuucgggcugc

SEQ ID NO: 381163 - RNA, 32 nt, Human
ccugcugcacuccagccugggugacagaggga

SEQ ID NO: 381164 - RNA, 32 nt, Human
ccugcugcagagccagugaacucaggucgggc

SEQ ID NO: 381165 - RNA, 32 nt, Human
ccugcugcagcuggcccuggguccuggcuuuc

SEQ ID NO: 381166 - RNA, 32 nt, Human
ccugcugcaggggagcuccuucaggagcccca

SEQ ID NO: 381167 - RNA, 32 nt, Human
ccugcugcaugaggcccucgucuucaguuucu

SEQ ID NO: 381168 - RNA, 32 nt, Human
ccugcugcaugcccucucaggccggcagcccc

SEQ ID NO: 381169 - RNA, 32 nt, Human
ccugcugccacuaaggggaaaaugcagaccag

SEQ ID NO: 381170 - RNA, 20 nt, Human
ccugcugccagaacaggccu

SEQ ID NO: 381171 - RNA, 32 nt, Human
ccugcugccagccugugucugugcaguccccc

SEQ ID NO: 381172 - RNA, 25 nt, Human
ccugcugccaucuccaggccccuua

SEQ ID NO: 381173 - RNA, 23 nt, Human
ccugcugcccagugagggcuccu

SEQ ID NO: 381174 - RNA, 32 nt, Human
ccugcugccccagccaggguuggagucuuagc

SEQ ID NO: 381175 - RNA, 21 nt, Human
ccugcugcccccacacccccg

SEQ ID NO: 381176 - RNA, 22 nt, Human
ccugcugccccgccccguccuu

SEQ ID NO: 381177 - RNA, 24 nt, Human
ccugcugccccgccccguccuucc

SEQ ID NO: 381178 - RNA, 32 nt, Human
ccugcugccccucccucucucucccucucucu

SEQ ID NO: 381179 - RNA, 20 nt, Human
ccugcugcccggaagagccu

SEQ ID NO: 381180 - RNA, 31 nt, Human
ccugcugcccucucuggugccuguggagaug

SEQ ID NO: 381181 - RNA, 21 nt, Human
ccugcugcccuuccccuuccc

SEQ ID NO: 381182 - RNA, 20 nt, Human
ccugcugcccuucgauccuu

SEQ ID NO: 381183 - RNA, 32 nt, Human
ccugcugcccuuggucgccuagacuggauagu

SEQ ID NO: 381184 - RNA, 32 nt, Human
ccugcugcccuuucuaggcagccuccuugggg

SEQ ID NO: 381185 - RNA, 32 nt, Human
ccugcugccggaccugagccuccuggcuccca

SEQ ID NO: 381186 - RNA, 22 nt, Human
ccugcugccuccacuccugccu

SEQ ID NO: 381187 - RNA, 20 nt, Human
ccugcugccucccucggcca

SEQ ID NO: 381188 - RNA, 32 nt, Human
ccugcugccucucaggcaccagugccauuaac

SEQ ID NO: 381189 - RNA, 32 nt, Human
ccugcugccugcccaaacaccccaccauuggc

SEQ ID NO: 381190 - RNA, 32 nt, Human
ccugcugccuggguccuggcccuccuccccca

SEQ ID NO: 381191 - RNA, 22 nt, Human
ccugcugcggccccacccccgg

SEQ ID NO: 381192 - RNA, 32 nt, Human
ccugcugcuccuccugagccucggggaggagg

SEQ ID NO: 381193 - RNA, 32 nt, Human
ccugcugcucuugccuucuaagcuacugugcu

SEQ ID NO: 381194 - RNA, 32 nt, Human
ccugcugcugaaggcccugcugcuacugcugc

SEQ ID NO: 381195 - RNA, 32 nt, Human
ccugcugcugaccuccccuugaggacccuccu

SEQ ID NO: 381196 - RNA, 20 nt, Human
ccugcugcugcaggagcccc

SEQ ID NO: 381197 - RNA, 20 nt, Human
ccugcugcugcugcugcaca

SEQ ID NO: 381198 - RNA, 23 nt, Human
ccugcugcugcugcugcugccuc

SEQ ID NO: 381199 - RNA, 32 nt, Human
ccugcugcuggcaaggaaugggaacaguggcu

SEQ ID NO: 381200 - RNA, 20 nt, Human
ccugcugcugugcugccauc

SEQ ID NO: 381201 - RNA, 32 nt, Human
ccugcugcuuccaggcugcaaaccugacagca

SEQ ID NO: 381202 - RNA, 32 nt, Human
ccugcugcuucgcaucccuccuguggccucca

SEQ ID NO: 381203 - RNA, 32 nt, Human
ccugcugcuuuccugguauagcaccuaagaga

SEQ ID NO: 381204 - RNA, 21 nt, Human
ccugcugcuuucucuaccuca

SEQ ID NO: 381205 - RNA, 21 nt, Human
ccugcuggaacgcaguggugu

SEQ ID NO: 381206 - RNA, 32 nt, Human
ccugcuggagaugaaugaggccaaggugaagg

SEQ ID NO: 381207 - RNA, 32 nt, Human
ccugcuggagcugcucaagaucacgcgggaag

SEQ ID NO: 381208 - RNA, 32 nt, Human
ccugcuggaggaacucggcuuccagcuauucu

SEQ ID NO: 381209 - RNA, 32 nt, Human
ccugcuggagugaaggggccaaggagggugag

SEQ ID NO: 381210 - RNA, 32 nt, Human
ccugcuggaguuuucugccugagauguuagga

SEQ ID NO: 381211 - RNA, 32 nt, Human
ccugcuggaugcagcuccuugugggccuacca

SEQ ID NO: 381212 - RNA, 32 nt, Human
ccugcuggccccaggacuucugaucucagucc

SEQ ID NO: 381213 - RNA, 20 nt, Human
ccugcuggcccuccaggggg

SEQ ID NO: 381214 - RNA, 23 nt, Human
ccugcuggcccugaggcugcaga

SEQ ID NO: 381215 - RNA, 32 nt, Human
ccugcuggccucccuuccccagaggcuggugu

SEQ ID NO: 381216 - RNA, 20 nt, Human
ccugcuggcgccccagcaca

SEQ ID NO: 381217 - RNA, 21 nt, Human
ccugcuggcgcucccugucca

SEQ ID NO: 381218 - RNA, 32 nt, Human
ccugcuggcuuaguggguuuauuucauaaguu

SEQ ID NO: 381219 - RNA, 32 nt, Human
ccugcuggcuuuccuguugacuggcccggagc

SEQ ID NO: 381220 - RNA, 32 nt, Human
ccugcugggaggaauggcgccgccggguucaa

SEQ ID NO: 381221 - RNA, 32 nt, Human
ccugcugggaggaggagggggaagaggaggag

SEQ ID NO: 381222 - RNA, 32 nt, Human
ccugcugggagguguguuugcaggacaggggu

SEQ ID NO: 381223 - RNA, 32 nt, Human
ccugcugggcaauccugggaaggucuggaggu

SEQ ID NO: 381224 - RNA, 32 nt, Human
ccugcugggcccagccaccaggacagcaggaa

SEQ ID NO: 381225 - RNA, 32 nt, Human
ccugcugggcugcuuccacuccuccacuccag

SEQ ID NO: 381226 - RNA, 32 nt, Human
ccugcuggggugaugcagggaggaggggaggu

SEQ ID NO: 381227 - RNA, 32 nt, Human
ccugcugggguucuccuuucugcuguuccgag

SEQ ID NO: 381228 - RNA, 32 nt, Human
ccugcuggguagagaacacagaggacagggca

SEQ ID NO: 381229 - RNA, 32 nt, Human
ccugcugggugaggaugagugcugguuccgcc

SEQ ID NO: 381230 - RNA, 19 nt, Human
ccugcuggguggucccuca

SEQ ID NO: 381231 - RNA, 32 nt, Human
ccugcuggguuacuggcccacccugugggcac

SEQ ID NO: 381232 - RNA, 19 nt, Human
ccugcugguccacaggucc

SEQ ID NO: 381233 - RNA, 32 nt, Human
ccugcugguccugaccaagaucgcggcugccg

SEQ ID NO: 381234 - RNA, 32 nt, Human
ccugcuggugugggauggugcugcgggcgagc

SEQ ID NO: 381235 - RNA, 32 nt, Human
ccugcugguuccccagcccuuuucccugcccu

SEQ ID NO: 381236 - RNA, 31 nt, Human
ccugcuguaauaaauguauuaacugaaaccu

SEQ ID NO: 381237 - RNA, 32 nt, Human
ccugcuguagccacugggcucagcccuggagc

SEQ ID NO: 381238 - RNA, 32 nt, Human
ccugcugucaacacccaggacacccaggauau

SEQ ID NO: 381239 - RNA, 32 nt, Human
ccugcugucaccccgaccucuggcaggagccg

SEQ ID NO: 381240 - RNA, 22 nt, Human
ccugcugucaggagcaggcaga

SEQ ID NO: 381241 - RNA, 32 nt, Human
ccugcugucauugcuucuucugaggccugaau

SEQ ID NO: 381242 - RNA, 32 nt, Human
ccugcugucauuggcucucccuccaggcugcu

SEQ ID NO: 381243 - RNA, 32 nt, Human
ccugcuguccagcuucccaggugcaguggguu

SEQ ID NO: 381244 - RNA, 32 nt, Human
ccugcugucccagggagaguugcaucgcccuc

SEQ ID NO: 381245 - RNA, 32 nt, Human
ccugcuguccuccagaaagcaccaaggaaaaa

SEQ ID NO: 381246 - RNA, 32 nt, Human
ccugcuguccuccuugccuucucccucuucuc

SEQ ID NO: 381247 - RNA, 23 nt, Human
ccugcuguccucgauagaccgga

SEQ ID NO: 381248 - RNA, 23 nt, Human
ccugcuguccugucuaggguagg

SEQ ID NO: 381249 - RNA, 32 nt, Human
ccugcuguccugugaacugccugcugcccugu

SEQ ID NO: 381250 - RNA, 32 nt, Human
ccugcugucuccuccagguacccccuaagccu

SEQ ID NO: 381251 - RNA, 32 nt, Human
ccugcugucucuuggggcucucuccccuccgc

SEQ ID NO: 381252 - RNA, 22 nt, Human
ccugcugucuuacaccagugga

SEQ ID NO: 381253 - RNA, 21 nt, Human
ccugcugugagaacaagugga

SEQ ID NO: 381254 - RNA, 24 nt, Human
ccugcugugcccccgagcugcucc

SEQ ID NO: 381255 - RNA, 32 nt, Human
ccugcugugcugcugccauggcgcaugcuccu

SEQ ID NO: 381256 - RNA, 32 nt, Human
ccugcuguggaggugagaucgccaugggucau

SEQ ID NO: 381257 - RNA, 32 nt, Human
ccugcuguggaugucccuauucugccauggga

SEQ ID NO: 381258 - RNA, 32 nt, Human
ccugcuguggccaggacaugacaaugacggcu

SEQ ID NO: 381259 - RNA, 32 nt, Human
ccugcuguggcuggcacauucuucugauuaac

SEQ ID NO: 381260 - RNA, 32 nt, Human
ccugcugugggaaagguggggaagaaggggau

SEQ ID NO: 381261 - RNA, 32 nt, Human
ccugcugugggaugcugagcacagagcccaca

SEQ ID NO: 381262 - RNA, 32 nt, Human
ccugcugugguccugcccucuguccugcagac

SEQ ID NO: 381263 - RNA, 17 nt, Human
ccugcuguguccacagu

SEQ ID NO: 381264 - RNA, 32 nt, Human
ccugcuguguguccccugucauguccccaggu

SEQ ID NO: 381265 - RNA, 32 nt, Human
ccugcuguguguccuguuccauguuccgguuc

SEQ ID NO: 381266 - RNA, 32 nt, Human
ccugcuguucccgugggagccaugaagcugaa

SEQ ID NO: 381267 - RNA, 32 nt, Human
ccugcuguuccucucccugccuguucugcaug

SEQ ID NO: 381268 - RNA, 32 nt, Human
ccugcuguucuagguacuggccugggugacag

SEQ ID NO: 381269 - RNA, 32 nt, Human
ccugcuguucugggucucaggcugcuggaccc

SEQ ID NO: 381270 - RNA, 32 nt, Human
ccugcuguugcucucaugccucuugccaacag

SEQ ID NO: 381271 - RNA, 32 nt, Human
ccugcuguugcuucagccuggccugggcagcc

SEQ ID NO: 381272 - RNA, 32 nt, Human
ccugcuguuggaggcaacaucuccucuuuuua

SEQ ID NO: 381273 - RNA, 32 nt, Human
ccugcuguuuccugcccaucagagaggccuga

SEQ ID NO: 381274 - RNA, 32 nt, Human
ccugcuuaacccaaauaagaacagugaucuua

SEQ ID NO: 381275 - RNA, 32 nt, Human
ccugcuuagaugccuggugacucucaucuugc

SEQ ID NO: 381276 - RNA, 32 nt, Human
ccugcuuaggauucuguucccugggcugaaac

SEQ ID NO: 381277 - RNA, 19 nt, Human
ccugcuuauccguauuuca

SEQ ID NO: 381278 - RNA, 32 nt, Human
ccugcuuaugugggguguggccgauuccuccc

SEQ ID NO: 381279 - RNA, 32 nt, Human
ccugcuuauugccucuuucucagaauccucuu

SEQ ID NO: 381280 - RNA, 32 nt, Human
ccugcuucaagccagugccucuucccagcucc

SEQ ID NO: 381281 - RNA, 32 nt, Human
ccugcuucaagcuauucucccaccucauccuc

SEQ ID NO: 381282 - RNA, 21 nt, Human
ccugcuucacagccccaugga

SEQ ID NO: 381283 - RNA, 32 nt, Human
ccugcuucaccaucuucucauaccaucacauu

SEQ ID NO: 381284 - RNA, 23 nt, Human
ccugcuucagagccuguucuucu

SEQ ID NO: 381285 - RNA, 32 nt, Human
ccugcuucaguaaaauccaguaauggguaugc

SEQ ID NO: 381286 - RNA, 32 nt, Human
ccugcuucauccucccuggcaucugggagagu

SEQ ID NO: 381287 - RNA, 32 nt, Human
ccugcuucauucuugccccacacucauaaucc

SEQ ID NO: 381288 - RNA, 32 nt, Human
ccugcuuccacccauggucaggacagucagcc

SEQ ID NO: 381289 - RNA, 32 nt, Human
ccugcuuccacuucgccuucugccaugacugu

SEQ ID NO: 381290 - RNA, 32 nt, Human
ccugcuuccagcccuucucucugcaccucucu

SEQ ID NO: 381291 - RNA, 32 nt, Human
ccugcuuccagcugcugcagcgcgccuucgcc

SEQ ID NO: 381292 - RNA, 24 nt, Human
ccugcuucccacgcugccaucucu

SEQ ID NO: 381293 - RNA, 32 nt, Human
ccugcuucccagaggacuggcccuacgugcuc

SEQ ID NO: 381294 - RNA, 21 nt, Human
ccugcuucccagcuucacaau

SEQ ID NO: 381295 - RNA, 32 nt, Human
ccugcuuccccagcuaagcaggagucuuuugu

SEQ ID NO: 381296 - RNA, 32 nt, Human
ccugcuucccccucccccuccugcugugcugg

SEQ ID NO: 381297 - RNA, 32 nt, Human
ccugcuuccuccguguccccugcuccucaccc

SEQ ID NO: 381298 - RNA, 32 nt, Human
ccugcuuccuccuccgcugccugccgccgccg

SEQ ID NO: 381299 - RNA, 20 nt, Human
ccugcuuccucuccaucuca

SEQ ID NO: 381300 - RNA, 32 nt, Human
ccugcuuccucuucuuccucuucuuuucacag

SEQ ID NO: 381301 - RNA, 32 nt, Human
ccugcuuccucuuuuccugcucccuaaccuuu

SEQ ID NO: 381302 - RNA, 18 nt, Human
ccugcuuccugcuugcca

SEQ ID NO: 381303 - RNA, 32 nt, Human
ccugcuuccuucagucccucugccucccuuug

SEQ ID NO: 381304 - RNA, 32 nt, Human
ccugcuuccuuggggagcugcagccaugggca

SEQ ID NO: 381305 - RNA, 22 nt, Human
ccugcuucucaagcugcagaga

SEQ ID NO: 381306 - RNA, 32 nt, Human
ccugcuucucacuugacauugcauuaugagua

SEQ ID NO: 381307 - RNA, 32 nt, Human
ccugcuucucauuuugcccucugagaaaaggc

SEQ ID NO: 381308 - RNA, 32 nt, Human
ccugcuucucucugcacgucucccucauucuu

SEQ ID NO: 381309 - RNA, 32 nt, Human
ccugcuucucugcuccccugggugaugggugg

SEQ ID NO: 381310 - RNA, 19 nt, Human
ccugcuucugccagcagcu

SEQ ID NO: 381311 - RNA, 32 nt, Human
ccugcuucugcccaccugcucuccuuccaugg

SEQ ID NO: 381312 - RNA, 32 nt, Human
ccugcuucugcugcccugaugcgucuacccag

SEQ ID NO: 381313 - RNA, 20 nt, Human
ccugcuucugggggcaguga

SEQ ID NO: 381314 - RNA, 32 nt, Human
ccugcuucuguaauccuagcuaguugggaggc

SEQ ID NO: 381315 - RNA, 32 nt, Human
ccugcuucuucaagcaccugcagauucugauu

SEQ ID NO: 381316 - RNA, 32 nt, Human
ccugcuucuucccagagacagagcuguguacc

SEQ ID NO: 381317 - RNA, 32 nt, Human
ccugcuucuugcccugcuguguguggcugccu

SEQ ID NO: 381318 - RNA, 32 nt, Human
ccugcuucuuuccuuucccuuccagagguaau

SEQ ID NO: 381319 - RNA, 32 nt, Human
ccugcuugaacccugagaggcaggugguaggc

SEQ ID NO: 381320 - RNA, 23 nt, Human
ccugcuugaacugcugccaacuc

SEQ ID NO: 381321 - RNA, 32 nt, Human
ccugcuugaaugucaugaacaggugugcuggg

SEQ ID NO: 381322 - RNA, 32 nt, Human
ccugcuugagcugcucccaaauuauugaucca

SEQ ID NO: 381323 - RNA, 32 nt, Human
ccugcuugcacauguuaucuuugcuucugccg

SEQ ID NO: 381324 - RNA, 32 nt, Human
ccugcuugcacucccuucauccggccacccug

SEQ ID NO: 381325 - RNA, 32 nt, Human
ccugcuugcagucugcaaggacaccuuugcag

SEQ ID NO: 381326 - RNA, 17 nt, Human
ccugcuugccagcucuu

SEQ ID NO: 381327 - RNA, 32 nt, Human
ccugcuugcgggggccgccuguccucacugcc

SEQ ID NO: 381328 - RNA, 27 nt, Human
ccugcuugcucucauaaaaagagccag

SEQ ID NO: 381329 - RNA, 32 nt, Human
ccugcuugcuuacucauauucucccucccucu

SEQ ID NO: 381330 - RNA, 32 nt, Human
ccugcuugcuuccaaagugauggacaggaagg

SEQ ID NO: 381331 - RNA, 32 nt, Human
ccugcuugggagccccuggccccagccuccau

SEQ ID NO: 381332 - RNA, 32 nt, Human
ccugcuugggcaacguagcaagaccuugccuc

SEQ ID NO: 381333 - RNA, 32 nt, Human
ccugcuugguggggucccccuuguaacaauaa

SEQ ID NO: 381334 - RNA, 32 nt, Human
ccugcuugguucuccccucccuucccuggccg

SEQ ID NO: 381335 - RNA, 32 nt, Human
ccugcuuguaaagccuccccucccucugacca

SEQ ID NO: 381336 - RNA, 32 nt, Human
ccugcuuuaaguaauauguagccacauuugaa

SEQ ID NO: 381337 - RNA, 32 nt, Human
ccugcuuucauuuugugcuuuuccuuguguuu

SEQ ID NO: 381338 - RNA, 20 nt, Human
ccugcuuuccauuucgagaa

SEQ ID NO: 381339 - RNA, 19 nt, Human
ccugcuuucccaguuggaa

SEQ ID NO: 381340 - RNA, 32 nt, Human
ccugcuuuccucaauguguucuucacccguga

SEQ ID NO: 381341 - RNA, 24 nt, Human
ccugcuuucucgcggccaccccgg

SEQ ID NO: 381342 - RNA, 32 nt, Human
ccugcuuucuuugaacacauacuugaucaaaa

SEQ ID NO: 381343 - RNA, 32 nt, Human
ccugcuuugaagaaacauacuguccauuuguc

SEQ ID NO: 381344 - RNA, 32 nt, Human
ccugcuuugaggacaaagagaauaaagacuuc

SEQ ID NO: 381345 - RNA, 32 nt, Human
ccugcuuugcagagaaggagccggggaccagc

SEQ ID NO: 381346 - RNA, 32 nt, Human
ccugcuuugcaguaggucacccugccaaacaa

SEQ ID NO: 381347 - RNA, 32 nt, Human
ccugcuuugccuacucucuagcaacugacuug

SEQ ID NO: 381348 - RNA, 32 nt, Human
ccugcuuugucuccucuauccugggcuuuugu

SEQ ID NO: 381349 - RNA, 32 nt, Human
ccugcuuuucugaagcccccaaggagggcucu

SEQ ID NO: 381350 - RNA, 27 nt, Human
ccugcuuuugcagccaggggucaggag

SEQ ID NO: 381351 - RNA, 32 nt, Human
ccugcuuuugcagccaggggucaggagguggc

SEQ ID NO: 381352 - RNA, 32 nt, Human
ccuggaaaaauuauuuuguuucccucuuccuu

SEQ ID NO: 381353 - RNA, 22 nt, Human
ccuggaaaacggagcauggugg

SEQ ID NO: 381354 - RNA, 32 nt, Human
ccuggaaaagagcaucccgaacaguggagagg

SEQ ID NO: 381355 - RNA, 20 nt, Human
ccuggaaaagguugcaguga

SEQ ID NO: 381356 - RNA, 21 nt, Human
ccuggaaaagguugcagugag

SEQ ID NO: 381357 - RNA, 32 nt, Human
ccuggaaaccaccacuuugagcuguccugccu

SEQ ID NO: 381358 - RNA, 32 nt, Human
ccuggaaaccagaagaaaaauaugagacgggg

SEQ ID NO: 381359 - RNA, 32 nt, Human
ccuggaaaccuacagacaaggaggaguuccac

SEQ ID NO: 381360 - RNA, 22 nt, Human
ccuggaaaccugguucucuucu

SEQ ID NO: 381361 - RNA, 32 nt, Human
ccuggaaaccuguacaaaagguugagauuggg

SEQ ID NO: 381362 - RNA, 32 nt, Human
ccuggaaagaugagaacacuguugcacaaccc

SEQ ID NO: 381363 - RNA, 18 nt, Human
ccuggaaaguaugugugg

SEQ ID NO: 381364 - RNA, 22 nt, Human
ccuggaaauaggucuguccacu

SEQ ID NO: 381365 - RNA, 32 nt, Human
ccuggaaauauuuuguaacacuuuaaaggauu

SEQ ID NO: 381366 - RNA, 32 nt, Human
ccuggaaauguccuugcauucguggccuccuu

SEQ ID NO: 381367 - RNA, 32 nt, Human
ccuggaacacagagcugcggccucggugcuga

SEQ ID NO: 381368 - RNA, 32 nt, Human
ccuggaacacccugggguuggcccagaaggag

SEQ ID NO: 381369 - RNA, 23 nt, Human
ccuggaacaccuguccucgggca

SEQ ID NO: 381370 - RNA, 32 nt, Human
ccuggaacagauuuuaauaauuaucagaguaa

SEQ ID NO: 381371 - RNA, 21 nt, Human
ccuggaacagggaggguguag

SEQ ID NO: 381372 - RNA, 32 nt, Human
ccuggaacauaaaaauuguuugggucaaauuu

SEQ ID NO: 381373 - RNA, 21 nt, Human
ccuggaacaugacauuguuaa

SEQ ID NO: 381374 - RNA, 32 nt, Human
ccuggaacaugccagcacacacugccaugucc

SEQ ID NO: 381375 - RNA, 32 nt, Human
ccuggaacauuucuauuucagcagaauauauu

SEQ ID NO: 381376 - RNA, 22 nt, Human
ccuggaaccucaaacaaugugg

SEQ ID NO: 381377 - RNA, 32 nt, Human
ccuggaaccugacagcagaaaggacccuucac

SEQ ID NO: 381378 - RNA, 20 nt, Human
ccuggaacgcugcagugugg

SEQ ID NO: 381379 - RNA, 32 nt, Human
ccuggaacugcuggauuucucagauauccagg

SEQ ID NO: 381380 - RNA, 32 nt, Human
ccuggaacuucugccuccuuccuccgugaucu

SEQ ID NO: 381381 - RNA, 32 nt, Human
ccuggaagaaggaggaacauggagaggagagc

SEQ ID NO: 381382 - RNA, 32 nt, Human
ccuggaagaaucaggucacacacagacuugaa

SEQ ID NO: 381383 - RNA, 32 nt, Human
ccuggaagacccucgcccacacccagcgugga

SEQ ID NO: 381384 - RNA, 32 nt, Human
ccuggaagagcaacucuaucugaucucaaaau

SEQ ID NO: 381385 - RNA, 25 nt, Human
ccuggaagaggcaggcagggggcug

SEQ ID NO: 381386 - RNA, 32 nt, Human
ccuggaagagggaggucccacuaugccuuugg

SEQ ID NO: 381387 - RNA, 22 nt, Human
ccuggaagaguccuccacccca

SEQ ID NO: 381388 - RNA, 32 nt, Human
ccuggaagcaccugcuuggcccugccaccuuc

SEQ ID NO: 381389 - RNA, 32 nt, Human
ccuggaagccagugaaaaaugauggcaacacu

SEQ ID NO: 381390 - RNA, 32 nt, Human
ccuggaagccgcugccccuugcaccuccucgg

SEQ ID NO: 381391 - RNA, 32 nt, Human
ccuggaagcugaggcugagaaggguggagcuu

SEQ ID NO: 381392 - RNA, 22 nt, Human
ccuggaagcugccuguccuucu

SEQ ID NO: 381393 - RNA, 32 nt, Human
ccuggaaggaagagaaggaauacaguuagcau

SEQ ID NO: 381394 - RNA, 24 nt, Human
ccuggaaggaagagguugcaguga

SEQ ID NO: 381395 - RNA, 32 nt, Human
ccuggaaggaagagguugcagugagccaagau

SEQ ID NO: 381396 - RNA, 32 nt, Human
ccuggaaggaagcaggauggcagccggaacag

SEQ ID NO: 381397 - RNA, 32 nt, Human
ccuggaaggagagggcacagaagcagcuguuu

SEQ ID NO: 381398 - RNA, 32 nt, Human
ccuggaaggagagggugagugggggauggcuu

SEQ ID NO: 381399 - RNA, 32 nt, Human
ccuggaaggagggagagcaggcagcccuucac

SEQ ID NO: 381400 - RNA, 24 nt, Human
ccuggaaggcagaaguugcaguga

SEQ ID NO: 381401 - RNA, 32 nt, Human
ccuggaaggcagaaguugcagugagcugagau

SEQ ID NO: 381402 - RNA, 24 nt, Human
ccuggaaggcagagauugcaguga

SEQ ID NO: 381403 - RNA, 32 nt, Human
ccuggaaggcagagauugcagugagcugagac

SEQ ID NO: 381404 - RNA, 24 nt, Human
ccuggaaggcagagguggcaguga

SEQ ID NO: 381405 - RNA, 23 nt, Human
ccuggaaggcggagcuugcagug

SEQ ID NO: 381406 - RNA, 24 nt, Human
ccuggaaggcggagcuugcaguga

SEQ ID NO: 381407 - RNA, 25 nt, Human
ccuggaaggcggagcuugcagugag

SEQ ID NO: 381408 - RNA, 32 nt, Human
ccuggaaggcggagcuugcagugagcugagau

SEQ ID NO: 381409 - RNA, 23 nt, Human
ccuggaaggcggagguugcagug

SEQ ID NO: 381410 - RNA, 24 nt, Human
ccuggaaggcggagguugcaguga

SEQ ID NO: 381411 - RNA, 32 nt, Human
ccuggaaggcggagguugcagugagcagagau

SEQ ID NO: 381412 - RNA, 32 nt, Human
ccuggaaggcggagguugcagugagccaagau

SEQ ID NO: 381413 - RNA, 32 nt, Human
ccuggaaggcggagguugcagugagccgagau

SEQ ID NO: 381414 - RNA, 32 nt, Human
ccuggaagggaaaggaaggaaccuggggucau

SEQ ID NO: 381415 - RNA, 32 nt, Human
ccuggaagggccugugccagcaccaggcagag

SEQ ID NO: 381416 - RNA, 32 nt, Human
ccuggaaggggaagaauucgggaaaagcaacg

SEQ ID NO: 381417 - RNA, 24 nt, Human
ccuggaagguggaaguugcaguga

SEQ ID NO: 381418 - RNA, 32 nt, Human
ccuggaagguggaaguugcagugagucgagau

SEQ ID NO: 381419 - RNA, 24 nt, Human
ccuggaagguggagcuugcaguga

SEQ ID NO: 381420 - RNA, 25 nt, Human
ccuggaagguggagcuugcagugag

SEQ ID NO: 381421 - RNA, 32 nt, Human
ccuggaagguggagcuugcagugagcugagau

SEQ ID NO: 381422 - RNA, 32 nt, Human
ccuggaaguauuucacuguuggaagaaguaaa

SEQ ID NO: 381423 - RNA, 20 nt, Human
ccuggaagucccgacucccc

SEQ ID NO: 381424 - RNA, 32 nt, Human
ccuggaagugagaaguucuuugcagauuuggg

SEQ ID NO: 381425 - RNA, 32 nt, Human
ccuggaagugauuuccaugagaacaaaggcuu

SEQ ID NO: 381426 - RNA, 23 nt, Human
ccuggaaguggagguugcgguga

SEQ ID NO: 381427 - RNA, 32 nt, Human
ccuggaauacaugacacauucuuacugagguc

SEQ ID NO: 381428 - RNA, 32 nt, Human
ccuggaauauuuuugcccuuuauccuucaagg

SEQ ID NO: 381429 - RNA, 19 nt, Human
ccuggaaucccagcacuuu

SEQ ID NO: 381430 - RNA, 32 nt, Human
ccuggaaucccagcuacuugagaggcugaggc

SEQ ID NO: 381431 - RNA, 32 nt, Human
ccuggaauccucagccucucuggccgccagua

SEQ ID NO: 381432 - RNA, 32 nt, Human
ccuggaauggaaggcagggcuguggcucagag

SEQ ID NO: 381433 - RNA, 32 nt, Human
ccuggaauuccaugccagccuaugcaacauca

SEQ ID NO: 381434 - RNA, 32 nt, Human
ccuggaauuucugccuuucugucucaagaugc

SEQ ID NO: 381435 - RNA, 32 nt, Human
ccuggacaacaacguggagccugcaccaggag

SEQ ID NO: 381436 - RNA, 32 nt, Human
ccuggacaacacagcagaccccgucuuuauaa

SEQ ID NO: 381437 - RNA, 28 nt, Human
ccuggacaacacagcgagauuccgucuc

SEQ ID NO: 381438 - RNA, 28 nt, Human
ccuggacaacacagugagacucugucuc

SEQ ID NO: 381439 - RNA, 28 nt, Human
ccuggacaacagagcaagaccuucucuc

SEQ ID NO: 381440 - RNA, 32 nt, Human
ccuggacaacagagcaagacuccuucucaaaa

SEQ ID NO: 381441 - RNA, 32 nt, Human
ccuggacaacauagcaagaccccaucucuuaa

SEQ ID NO: 381442 - RNA, 32 nt, Human
ccuggacaacauaguaagacccuaucucuacc

SEQ ID NO: 381443 - RNA, 32 nt, Human
ccuggacaacauggugaacccgucucuacuaa

SEQ ID NO: 381444 - RNA, 32 nt, Human
ccuggacaauaccugcuccgugugugcaucuc

SEQ ID NO: 381445 - RNA, 32 nt, Human
ccuggacaauacggugagacccugucuguacc

SEQ ID NO: 381446 - RNA, 32 nt, Human
ccuggacacagauccucuguguggacccagga

SEQ ID NO: 381447 - RNA, 25 nt, Human
ccuggacaccaacaggagccgccug

SEQ ID NO: 381448 - RNA, 32 nt, Human
ccuggacacccuaccuuucuaucaggagcagu

SEQ ID NO: 381449 - RNA, 32 nt, Human
ccuggacaccgaggggccagugugugaucauu

SEQ ID NO: 381450 - RNA, 25 nt, Human
ccuggacacgcugguggugcugcac

SEQ ID NO: 381451 - RNA, 32 nt, Human
ccuggacacugaaccucuaaagggaaaagguc

SEQ ID NO: 381452 - RNA, 32 nt, Human
ccuggacagaaacauauccccaaacaccucca

SEQ ID NO: 381453 - RNA, 31 nt, Human
ccuggacagagaccuguuugaagggaagguc

SEQ ID NO: 381454 - RNA, 32 nt, Human
ccuggacagagcaaggagagggcuccccacuc

SEQ ID NO: 381455 - RNA, 32 nt, Human
ccuggacagauggcccaagggauggcaccacu

SEQ ID NO: 381456 - RNA, 32 nt, Human
ccuggacagggacccuuuucuguccaucagag

SEQ ID NO: 381457 - RNA, 32 nt, Human
ccuggacagugaagggagagaaguggauuugg

SEQ ID NO: 381458 - RNA, 27 nt, Human
ccuggacaugaccguaucccucugcca

SEQ ID NO: 381459 - RNA, 32 nt, Human
ccuggaccaaugcaucuucccaccaccuuaaa

SEQ ID NO: 381460 - RNA, 32 nt, Human
ccuggaccacacacaucacugugugcagaugc

SEQ ID NO: 381461 - RNA, 17 nt, Human
ccuggaccacuccugcc

SEQ ID NO: 381462 - RNA, 32 nt, Human
ccuggaccagaagacagagggcaagaggagca

SEQ ID NO: 381463 - RNA, 32 nt, Human
ccuggaccagcugcucagcugucugaagaccu

SEQ ID NO: 381464 - RNA, 32 nt, Human
ccuggaccaggcaccaggcuccugggcucugg

SEQ ID NO: 381465 - RNA, 32 nt, Human
ccuggaccaggccauggaugaaggacaaagac

SEQ ID NO: 381466 - RNA, 32 nt, Human
ccuggaccccaggccagcuaugaggcugacug

SEQ ID NO: 381467 - RNA, 32 nt, Human
ccuggacccccgaggcucucggaugauagagu

SEQ ID NO: 381468 - RNA, 32 nt, Human
ccuggaccccucugcacgucuagcugggagua

SEQ ID NO: 381469 - RNA, 32 nt, Human
ccuggacccucagagcaagugguuuggucggg

SEQ ID NO: 381470 - RNA, 32 nt, Human
ccuggacccugagguugucuccagaaacgguc

SEQ ID NO: 381471 - RNA, 32 nt, Human
ccuggacccuggaagcagggacugguugaggg

SEQ ID NO: 381472 - RNA, 32 nt, Human
ccuggaccggcacaagaaacugcuuucuucuc

SEQ ID NO: 381473 - RNA, 19 nt, Human
ccuggaccggggggcgcgg

SEQ ID NO: 381474 - RNA, 32 nt, Human
ccuggaccuaauauggugauaaaauuuuaggc

SEQ ID NO: 381475 - RNA, 32 nt, Human
ccuggaccucaagugaucuacccgccuuggcc

SEQ ID NO: 381476 - RNA, 32 nt, Human
ccuggaccucagggaggaagacggggaugaaa

SEQ ID NO: 381477 - RNA, 32 nt, Human
ccuggaccugccggcccucccuccaggaccga

SEQ ID NO: 381478 - RNA, 32 nt, Human
ccuggaccuggcugggcuccaugagaaugagu

SEQ ID NO: 381479 - RNA, 32 nt, Human
ccuggaccugggaggaagcuggagaaaagaug

SEQ ID NO: 381480 - RNA, 19 nt, Human
ccuggaccuggggggccag

SEQ ID NO: 381481 - RNA, 32 nt, Human
ccuggaccuugggccauaauuucugagccucg

SEQ ID NO: 381482 - RNA, 32 nt, Human
ccuggacgacagagcaagacucugucucaaaa

SEQ ID NO: 381483 - RNA, 32 nt, Human
ccuggacgauauagccagacccugucuguaaa

SEQ ID NO: 381484 - RNA, 32 nt, Human
ccuggacgcagaggcccugcccuugccagacg

SEQ ID NO: 381485 - RNA, 32 nt, Human
ccuggacgccguccuggcugcgcaggaggggc

SEQ ID NO: 381486 - RNA, 23 nt, Human
ccuggacggcaucaaggugcuga

SEQ ID NO: 381487 - RNA, 22 nt, Human
ccuggacgugugcagcaugugg

SEQ ID NO: 381488 - RNA, 32 nt, Human
ccuggacuaucaguaaccccacugcacaggca

SEQ ID NO: 381489 - RNA, 32 nt, Human
ccuggacuauccauugcauuuuugccucuaaa

SEQ ID NO: 381490 - RNA, 32 nt, Human
ccuggacucaacaacacgaacuucuacucacc

SEQ ID NO: 381491 - RNA, 32 nt, Human
ccuggacucaugcaaucuuccugccucaggcu

SEQ ID NO: 381492 - RNA, 32 nt, Human
ccuggacuccagccaaggcuguucagguggga

SEQ ID NO: 381493 - RNA, 22 nt, Human
ccuggacuccccagccuuccca

SEQ ID NO: 381494 - RNA, 32 nt, Human
ccuggacuccccagccuucccaccccauaccu

SEQ ID NO: 381495 - RNA, 25 nt, Human
ccuggacuccucuucccaacuuccu

SEQ ID NO: 381496 - RNA, 32 nt, Human
ccuggacuccugggaccccacguccugcaccc

SEQ ID NO: 381497 - RNA, 32 nt, Human
ccuggacuccuugaugccggagcugcuggugu

SEQ ID NO: 381498 - RNA, 32 nt, Human
ccuggacucggccagcugccuccagggaccgc

SEQ ID NO: 381499 - RNA, 32 nt, Human
ccuggacucugccuuagcucccaccucucagc

SEQ ID NO: 381500 - RNA, 32 nt, Human
ccuggacugaagagagggagaauagaagccaa

SEQ ID NO: 381501 - RNA, 32 nt, Human
ccuggacugaagagagggagaauagaagccca

SEQ ID NO: 381502 - RNA, 32 nt, Human
ccuggacugaauucuggggaugagggcugaca

SEQ ID NO: 381503 - RNA, 32 nt, Human
ccuggacugagaauaguugaacaccgggggcu

SEQ ID NO: 381504 - RNA, 22 nt, Human
ccuggacugagagguuaccagg

SEQ ID NO: 381505 - RNA, 20 nt, Human
ccuggacugaugggcacagg

SEQ ID NO: 381506 - RNA, 22 nt, Human
ccuggacugcagagggggucag

SEQ ID NO: 381507 - RNA, 32 nt, Human
ccuggacugccucucgccucaguaggccuggg

SEQ ID NO: 381508 - RNA, 32 nt, Human
ccuggacugccucucggcugugcuccguggac

SEQ ID NO: 381509 - RNA, 32 nt, Human
ccuggacugguagcugcuggaggccuucuugu

SEQ ID NO: 381510 - RNA, 32 nt, Human
ccuggacugguucucucuaucucuggaguaau

SEQ ID NO: 381511 - RNA, 22 nt, Human
ccuggacuugagacccuucaca

SEQ ID NO: 381512 - RNA, 32 nt, Human
ccuggacuugccucugcacacccuccagagac

SEQ ID NO: 381513 - RNA, 32 nt, Human
ccuggacuuggagagaugggaggcagaccccc

SEQ ID NO: 381514 - RNA, 32 nt, Human
ccuggacuuucccaugagccuccuggaacugc

SEQ ID NO: 381515 - RNA, 32 nt, Human
ccuggacuuuccugcaacucaaggacuuugca

SEQ ID NO: 381516 - RNA, 20 nt, Human
ccuggagaagacauaugugg

SEQ ID NO: 381517 - RNA, 27 nt, Human
ccuggagaagacuacagcuccucgucc

SEQ ID NO: 381518 - RNA, 19 nt, Human
ccuggagaagggacauggg

SEQ ID NO: 381519 - RNA, 21 nt, Human
ccuggagaagggacaugggaa

SEQ ID NO: 381520 - RNA, 32 nt, Human
ccuggagaaguggucacagaagauggagcucu

SEQ ID NO: 381521 - RNA, 27 nt, Human
ccuggagacagaggaugacagggcucu

SEQ ID NO: 381522 - RNA, 23 nt, Human
ccuggagacagagguugcaguga

SEQ ID NO: 381523 - RNA, 24 nt, Human
ccuggagacagagguugcagugag

SEQ ID NO: 381524 - RNA, 19 nt, Human
ccuggagacagccaggugc

SEQ ID NO: 381525 - RNA, 32 nt, Human
ccuggagacagcugccugagacuccuugagga

SEQ ID NO: 381526 - RNA, 23 nt, Human
ccuggagaccaagaacagggcgc

SEQ ID NO: 381527 - RNA, 18 nt, Human
ccuggagaccagaagcug

SEQ ID NO: 381528 - RNA, 32 nt, Human
ccuggagacgcugguggcuguggacuccccag

SEQ ID NO: 381529 - RNA, 32 nt, Human
ccuggagacggaaggcaccgaugggcuuggag

SEQ ID NO: 381530 - RNA, 32 nt, Human
ccuggagacuaccaccucgcacaugccaaggu

SEQ ID NO: 381531 - RNA, 32 nt, Human
ccuggagacuggugcccugagcuccaaccagc

SEQ ID NO: 381532 - RNA, 19 nt, Human
ccuggagacuuugggucug

SEQ ID NO: 381533 - RNA, 32 nt, Human
ccuggagagaauuuccucuuccccagcuaaau

SEQ ID NO: 381534 - RNA, 32 nt, Human
ccuggagagacacuucaugcuccaaggcuuuu

SEQ ID NO: 381535 - RNA, 32 nt, Human
ccuggagagagaagaaugcaggcagcauuuuc

SEQ ID NO: 381536 - RNA, 32 nt, Human
ccuggagagagggaggugaaagcuggugugag

SEQ ID NO: 381537 - RNA, 32 nt, Human
ccuggagagcccaacucccagagcagauggca

SEQ ID NO: 381538 - RNA, 32 nt, Human
ccuggagagcccaggagcgggcgggacaugga

SEQ ID NO: 381539 - RNA, 32 nt, Human
ccuggagagcugggggaagguaggaagaggag

SEQ ID NO: 381540 - RNA, 21 nt, Human
ccuggagaggacggcccugcc

SEQ ID NO: 381541 - RNA, 32 nt, Human
ccuggagaggacugagccuacggaaaggggau

SEQ ID NO: 381542 - RNA, 32 nt, Human
ccuggagaggcccucuggaguggccacuaagc

SEQ ID NO: 381543 - RNA, 18 nt, Human
ccuggagaggggaggcag

SEQ ID NO: 381544 - RNA, 32 nt, Human
ccuggagauaugaaggauuacucuccauaucc

SEQ ID NO: 381545 - RNA, 32 nt, Human
ccuggagauauuaauggaauacagucaugucc

SEQ ID NO: 381546 - RNA, 18 nt, Human
ccuggagauccuacagua

SEQ ID NO: 381547 - RNA, 32 nt, Human
ccuggagauguagaggcugcagugagcuguga

SEQ ID NO: 381548 - RNA, 32 nt, Human
ccuggagcaaccaucagagcaguggcuggggc

SEQ ID NO: 381549 - RNA, 32 nt, Human
ccuggagcaagcccuggucaauggcuaccugg

SEQ ID NO: 381550 - RNA, 19 nt, Human
ccuggagcacaacaugugg

SEQ ID NO: 381551 - RNA, 32 nt, Human
ccuggagcagaaaaauccugucuucauugcua

SEQ ID NO: 381552 - RNA, 32 nt, Human
ccuggagcagcccuccagaccuggguggaauu

SEQ ID NO: 381553 - RNA, 19 nt, Human
ccuggagcaggcagugugg

SEQ ID NO: 381554 - RNA, 18 nt, Human
ccuggagcaggggcgcag

SEQ ID NO: 381555 - RNA, 32 nt, Human
ccuggagcaggggcgcaggaauucugauguga

SEQ ID NO: 381556 - RNA, 32 nt, Human
ccuggagcagguggucagcuguggugggcugc

SEQ ID NO: 381557 - RNA, 32 nt, Human
ccuggagcaguaugagcagaugcugaagacca

SEQ ID NO: 381558 - RNA, 32 nt, Human
ccuggagcaguaugcgcagaugcugagaccaa

SEQ ID NO: 381559 - RNA, 32 nt, Human
ccuggagcagugggcaagacaguccuuguggc

SEQ ID NO: 381560 - RNA, 32 nt, Human
ccuggagcaguuuugugaggcuuuugugcucc

SEQ ID NO: 381561 - RNA, 32 nt, Human
ccuggagcauccagccgcuggagcugcgaggg

SEQ ID NO: 381562 - RNA, 32 nt, Human
ccuggagcaucucgcccaggcuuuuuauaccu

SEQ ID NO: 381563 - RNA, 21 nt, Human
ccuggagcauggacagugugg

SEQ ID NO: 381564 - RNA, 32 nt, Human
ccuggagcaugugagcagcggcuggucucuuc

SEQ ID NO: 381565 - RNA, 32 nt, Human
ccuggagccaaccuggagaugcagccugagaa

SEQ ID NO: 381566 - RNA, 32 nt, Human
ccuggagccacuggucggccuggagucccugc

SEQ ID NO: 381567 - RNA, 32 nt, Human
ccuggagccagcaccccugccuccugguccug

SEQ ID NO: 381568 - RNA, 23 nt, Human
ccuggagccagcccuaucuggca

SEQ ID NO: 381569 - RNA, 32 nt, Human
ccuggagccagcccuaucuggcaguccugcuu

SEQ ID NO: 381570 - RNA, 32 nt, Human
ccuggagccagcugcuggggucccucagccuc

SEQ ID NO: 381571 - RNA, 18 nt, Human
ccuggagccaggaguggg

SEQ ID NO: 381572 - RNA, 21 nt, Human
ccuggagcccaggcucuuuuc

SEQ ID NO: 381573 - RNA, 32 nt, Human
ccuggagcccagguugcagguggugagcugcu

SEQ ID NO: 381574 - RNA, 32 nt, Human
ccuggagccccacuccagcccugggacaacuu

SEQ ID NO: 381575 - RNA, 24 nt, Human
ccuggagccucacgcugcucugca

SEQ ID NO: 381576 - RNA, 32 nt, Human
ccuggagccuccacugccucuggaauugcuca

SEQ ID NO: 381577 - RNA, 32 nt, Human
ccuggagccucuggaggaagaggagggacaaa

SEQ ID NO: 381578 - RNA, 32 nt, Human
ccuggagccugccugcagcccgaggucccacu

SEQ ID NO: 381579 - RNA, 32 nt, Human
ccuggagccuggaagggggagacggcccgagc

SEQ ID NO: 381580 - RNA, 32 nt, Human
ccuggagccuuucaaagaaggucuaagguaga

SEQ ID NO: 381581 - RNA, 32 nt, Human
ccuggagcuacaccuuucuuuguaaaacugua

SEQ ID NO: 381582 - RNA, 32 nt, Human
ccuggagcuaucuccaucuucagcuccagagu

SEQ ID NO: 381583 - RNA, 32 nt, Human
ccuggagcucacugagcuccuugccucccaca

SEQ ID NO: 381584 - RNA, 32 nt, Human
ccuggagcucaggaggccgaggcugccuugag

SEQ ID NO: 381585 - RNA, 32 nt, Human
ccuggagcucagugucaggaaagggggugaua

SEQ ID NO: 381586 - RNA, 31 nt, Human
ccuggagcuccaaccucagccagcaccagcg

SEQ ID NO: 381587 - RNA, 22 nt, Human
ccuggagcucuggaaagaccag

SEQ ID NO: 381588 - RNA, 26 nt, Human
ccuggagcugacaugauaaggucaaa

SEQ ID NO: 381589 - RNA, 32 nt, Human
ccuggagcugagugccuggggguccagaagcu

SEQ ID NO: 381590 - RNA, 21 nt, Human
ccuggagcugccgccgucucu

SEQ ID NO: 381591 - RNA, 32 nt, Human
ccuggagcuggacuccagcgaugaggagggcc

SEQ ID NO: 381592 - RNA, 32 nt, Human
ccuggagcugguguuuuuccugccuaggcgga

SEQ ID NO: 381593 - RNA, 32 nt, Human
ccuggagcugugccucagugaaggggcccagc

SEQ ID NO: 381594 - RNA, 32 nt, Human
ccuggagcugugcuguggcuugaggagauccg

SEQ ID NO: 381595 - RNA, 32 nt, Human
ccuggagcuguggccuggcuguggagggccgg

SEQ ID NO: 381596 - RNA, 32 nt, Human
ccuggagcuguucaccagccagggcucagccc

SEQ ID NO: 381597 - RNA, 32 nt, Human
ccuggagcuugccagagcagagcgagaaaguc

SEQ ID NO: 381598 - RNA, 32 nt, Human
ccuggaggaagaggaagaggaacccaagagga

SEQ ID NO: 381599 - RNA, 32 nt, Human
ccuggaggaagaggaggaggaggaggaggaag

SEQ ID NO: 381600 - RNA, 21 nt, Human
ccuggaggaaggggccaggcc

SEQ ID NO: 381601 - RNA, 22 nt, Human
ccuggaggacacgccuguagca

SEQ ID NO: 381602 - RNA, 18 nt, Human
ccuggaggacagcaccgg

SEQ ID NO: 381603 - RNA, 20 nt, Human
ccuggaggacagcagcaugg

SEQ ID NO: 381604 - RNA, 23 nt, Human
ccuggaggacagcagugcuggca

SEQ ID NO: 381605 - RNA, 32 nt, Human
ccuggaggacaggagucccaggagaacccaga

SEQ ID NO: 381606 - RNA, 21 nt, Human
ccuggaggacuggcccaggca

SEQ ID NO: 381607 - RNA, 21 nt, Human
ccuggaggagaaggaggaacc

SEQ ID NO: 381608 - RNA, 32 nt, Human
ccuggaggagagaaggauggacuccagagccc

SEQ ID NO: 381609 - RNA, 24 nt, Human
ccuggaggagaugaauccugggcc

SEQ ID NO: 381610 - RNA, 24 nt, Human
ccuggaggaggcagccugucagcu

SEQ ID NO: 381611 - RNA, 23 nt, Human
ccuggaggaggcaggcccaagcc

SEQ ID NO: 381612 - RNA, 21 nt, Human
ccuggaggagggaguccggcc

SEQ ID NO: 381613 - RNA, 32 nt, Human
ccuggaggagguggagcugcagcugggacugu

SEQ ID NO: 381614 - RNA, 19 nt, Human
ccuggaggagguggugcag

SEQ ID NO: 381615 - RNA, 32 nt, Human
ccuggaggaguccaggucugaauggucagaag

SEQ ID NO: 381616 - RNA, 32 nt, Human
ccuggaggaguggacccaggagaccagaagag

SEQ ID NO: 381617 - RNA, 23 nt, Human
ccuggaggaguuccgucccagcc

SEQ ID NO: 381618 - RNA, 24 nt, Human
ccuggaggaguucucugcucagca

SEQ ID NO: 381619 - RNA, 19 nt, Human
ccuggaggaucacugagca

SEQ ID NO: 381620 - RNA, 22 nt, Human
ccuggaggauggggacuuggca

SEQ ID NO: 381621 - RNA, 18 nt, Human
ccuggaggcaacgugcug

SEQ ID NO: 381622 - RNA, 32 nt, Human
ccuggaggcacugggcccugagaacgggugcc

SEQ ID NO: 381623 - RNA, 23 nt, Human
ccuggaggcagagauugcaguga

SEQ ID NO: 381624 - RNA, 24 nt, Human
ccuggaggcagagauugcagugag

SEQ ID NO: 381625 - RNA, 24 nt, Human
ccuggaggcagagcuugcagugag

SEQ ID NO: 381626 - RNA, 24 nt, Human
ccuggaggcagagguugcaaugag

SEQ ID NO: 381627 - RNA, 23 nt, Human
ccuggaggcagagguugcaguga

SEQ ID NO: 381628 - RNA, 24 nt, Human
ccuggaggcagagguugcagugag

SEQ ID NO: 381629 - RNA, 32 nt, Human
ccuggaggcagccugcagccccaucccaucuc

SEQ ID NO: 381630 - RNA, 32 nt, Human
ccuggaggcaggcugucucucaagguggucuu

SEQ ID NO: 381631 - RNA, 32 nt, Human
ccuggaggccacccuggaggaggcaggcccaa

SEQ ID NO: 381632 - RNA, 32 nt, Human
ccuggaggccacggggacagagaggccagaga

SEQ ID NO: 381633 - RNA, 32 nt, Human
ccuggaggccagagugagacuccgucucaaaa

SEQ ID NO: 381634 - RNA, 32 nt, Human
ccuggaggccaggaguucgacacuguauaaca

SEQ ID NO: 381635 - RNA, 32 nt, Human
ccuggaggccauuugugccugccucugugcug

SEQ ID NO: 381636 - RNA, 32 nt, Human
ccuggaggcccagguugggagucagucgagga

SEQ ID NO: 381637 - RNA, 32 nt, Human
ccuggaggcccugcucccaaaaccgcuggaag

SEQ ID NO: 381638 - RNA, 22 nt, Human
ccuggaggcggaaguugcagug

SEQ ID NO: 381639 - RNA, 24 nt, Human
ccuggaggcggaaguugcagugag

SEQ ID NO: 381640 - RNA, 22 nt, Human
ccuggaggcggagguugcagug

SEQ ID NO: 381641 - RNA, 24 nt, Human
ccuggaggcggagguugcagugag

SEQ ID NO: 381642 - RNA, 24 nt, Human
ccuggaggcggagguugccgugag

SEQ ID NO: 381643 - RNA, 23 nt, Human
ccuggaggcgggccccccuggca

SEQ ID NO: 381644 - RNA, 32 nt, Human
ccuggaggcgguggcugggauaaacgugcacc

SEQ ID NO: 381645 - RNA, 32 nt, Human
ccuggaggcugaggcagaagaaucacuugaac

SEQ ID NO: 381646 - RNA, 32 nt, Human
ccuggaggcugcagaggggguggaggacucuc

SEQ ID NO: 381647 - RNA, 32 nt, Human
ccuggaggcugcaguccgcgcggccggggagg

SEQ ID NO: 381648 - RNA, 32 nt, Human
ccuggaggcugugagagaugaggcaugacuac

SEQ ID NO: 381649 - RNA, 32 nt, Human
ccuggagggaaaggccgaggccgggagcgccc

SEQ ID NO: 381650 - RNA, 21 nt, Human
ccuggagggaacauucuggca

SEQ ID NO: 381651 - RNA, 32 nt, Human
ccuggagggaagccuccuaaggccagguaagg

SEQ ID NO: 381652 - RNA, 22 nt, Human
ccuggagggaagggcucuggcc

SEQ ID NO: 381653 - RNA, 23 nt, Human
ccuggagggaaguugccgcagcc

SEQ ID NO: 381654 - RNA, 24 nt, Human
ccuggagggaaguugccugcagcc

SEQ ID NO: 381655 - RNA, 23 nt, Human
ccuggagggaauccauaucagcu

SEQ ID NO: 381656 - RNA, 32 nt, Human
ccuggagggaaugaaccuggagggcuagaacc

SEQ ID NO: 381657 - RNA, 32 nt, Human
ccuggagggagaaaggagccugugcccccuga

SEQ ID NO: 381658 - RNA, 23 nt, Human
ccuggagggagaggccccacgcc

SEQ ID NO: 381659 - RNA, 21 nt, Human
ccuggagggagcagcguuggc

SEQ ID NO: 381660 - RNA, 21 nt, Human
ccuggagggagcuggguggcc

SEQ ID NO: 381661 - RNA, 21 nt, Human
ccuggagggagguccccugcc

SEQ ID NO: 381662 - RNA, 32 nt, Human
ccuggagggaguuguagccacuuugaggucug

SEQ ID NO: 381663 - RNA, 18 nt, Human
ccuggagggcagcaaugg

SEQ ID NO: 381664 - RNA, 32 nt, Human
ccuggagggcagcaauggaccauacacguguc

SEQ ID NO: 381665 - RNA, 24 nt, Human
ccuggagggcagggcugccugaug

SEQ ID NO: 381666 - RNA, 20 nt, Human
ccuggagggccugcuggcug

SEQ ID NO: 381667 - RNA, 26 nt, Human
ccuggagggccuucagcuccucaguc

SEQ ID NO: 381668 - RNA, 32 nt, Human
ccuggagggcuagaaccuggagaaugagaaaa

SEQ ID NO: 381669 - RNA, 32 nt, Human
ccuggagggcugccugggggaggcagacaugg

SEQ ID NO: 381670 - RNA, 23 nt, Human
ccuggaggggaaggacccugacc

SEQ ID NO: 381671 - RNA, 32 nt, Human
ccuggaggggacaucagggaagaggcuuccgg

SEQ ID NO: 381672 - RNA, 20 nt, Human
ccuggaggggagacugcaga

SEQ ID NO: 381673 - RNA, 24 nt, Human
ccuggagggggcagaggccaggcc

SEQ ID NO: 381674 - RNA, 23 nt, Human
ccuggagggggccugccucggcc

SEQ ID NO: 381675 - RNA, 32 nt, Human
ccuggaggggugagccacugucgggaggggag

SEQ ID NO: 381676 - RNA, 24 nt, Human
ccuggaggggugugcacgcuggca

SEQ ID NO: 381677 - RNA, 24 nt, Human
ccuggaggguggaaguuguaguga

SEQ ID NO: 381678 - RNA, 32 nt, Human
ccuggagguagaagugcucuuuuagcauuuuu

SEQ ID NO: 381679 - RNA, 24 nt, Human
ccuggagguagaaguugcagugag

SEQ ID NO: 381680 - RNA, 23 nt, Human
ccuggaggucaaggcugcaguga

SEQ ID NO: 381681 - RNA, 32 nt, Human
ccuggaggugaagggaagagccugugccugcu

SEQ ID NO: 381682 - RNA, 26 nt, Human
ccuggaggugaccuggagggagacag

SEQ ID NO: 381683 - RNA, 32 nt, Human
ccuggagguggaccccaauauccaggccaugc

SEQ ID NO: 381684 - RNA, 32 nt, Human
ccuggagguggaccccaauauccaggcugugc

SEQ ID NO: 381685 - RNA, 22 nt, Human
ccuggagguggagguugcagug

SEQ ID NO: 381686 - RNA, 23 nt, Human
ccuggagguggagguugcaguga

SEQ ID NO: 381687 - RNA, 24 nt, Human
ccuggagguggagguugcagugag

SEQ ID NO: 381688 - RNA, 19 nt, Human
ccuggaggugggagggcag

SEQ ID NO: 381689 - RNA, 32 nt, Human
ccuggagguguaguggagagcaguggaaaugc

SEQ ID NO: 381690 - RNA, 32 nt, Human
ccuggaggugugaggugcuguaucccggaaau

SEQ ID NO: 381691 - RNA, 23 nt, Human
ccuggagguugagguugcaguga

SEQ ID NO: 381692 - RNA, 32 nt, Human
ccuggaguaggcaguuugggggcgguagaggg

SEQ ID NO: 381693 - RNA, 18 nt, Human
ccuggaguagggggccag

SEQ ID NO: 381694 - RNA, 32 nt, Human
ccuggagucccagcuacucaggaggcugaggu

SEQ ID NO: 381695 - RNA, 32 nt, Human
ccuggagucccagcuacuccggaggcugaggg

SEQ ID NO: 381696 - RNA, 23 nt, Human
ccuggagucccagcuacucggga

SEQ ID NO: 381697 - RNA, 32 nt, Human
ccuggagucccagcuacucgggaggcugaggc

SEQ ID NO: 381698 - RNA, 32 nt, Human
ccuggagucccuggcccgggcagcagcgcuag

SEQ ID NO: 381699 - RNA, 32 nt, Human
ccuggagucuaugcuaggaagcugagauauuu

SEQ ID NO: 381700 - RNA, 24 nt, Human
ccuggagucugcccccacuucccu

SEQ ID NO: 381701 - RNA, 32 nt, Human
ccuggagucuguuucuuuaggcggaugaacug

SEQ ID NO: 381702 - RNA, 32 nt, Human
ccuggagucuugaggcccauugagugcagugu

SEQ ID NO: 381703 - RNA, 32 nt, Human
ccuggagugaagagguagaacugugguauuau

SEQ ID NO: 381704 - RNA, 32 nt, Human
ccuggagugcagaagaagcauuaggcauugac

SEQ ID NO: 381705 - RNA, 17 nt, Human
ccuggagugccccgaga

SEQ ID NO: 381706 - RNA, 32 nt, Human
ccuggagugccuggcccggagugccugcuggu

SEQ ID NO: 381707 - RNA, 32 nt, Human
ccuggaguggacugcagguggcaggggcuccu

SEQ ID NO: 381708 - RNA, 19 nt, Human
ccuggaguggcccaguacc

SEQ ID NO: 381709 - RNA, 32 nt, Human
ccuggaguggccggcccugcuugugccaugug

SEQ ID NO: 381710 - RNA, 20 nt, Human
ccuggaguggcucacgggca

SEQ ID NO: 381711 - RNA, 32 nt, Human
ccuggagugggcccugugcaccucaccuggcg

SEQ ID NO: 381712 - RNA, 16 nt, Human
ccuggagugggggcgc

SEQ ID NO: 381713 - RNA, 32 nt, Human
ccuggagugugggaacaacagucucuccuguc

SEQ ID NO: 381714 - RNA, 32 nt, Human
ccuggaguucacagacauggguggcaaugugu

SEQ ID NO: 381715 - RNA, 21 nt, Human
ccuggaguucagugggugcag

SEQ ID NO: 381716 - RNA, 32 nt, Human
ccuggaguucccaaccauacuucuucugaccc

SEQ ID NO: 381717 - RNA, 32 nt, Human
ccuggaguugcauagguugaauaguugaauag

SEQ ID NO: 381718 - RNA, 32 nt, Human
ccuggaguuggccagucaccaccaccauccua

SEQ ID NO: 381719 - RNA, 32 nt, Human
ccuggaguuggcugugucuguguuugugacug

SEQ ID NO: 381720 - RNA, 26 nt, Human
ccuggaguuguugggcaaggaugcug

SEQ ID NO: 381721 - RNA, 20 nt, Human
ccuggaguuuacacucacca

SEQ ID NO: 381722 - RNA, 32 nt, Human
ccuggaguuucugagugugcagguguggaaua

SEQ ID NO: 381723 - RNA, 32 nt, Human
ccuggaguuugaguccagccugggugacauag

SEQ ID NO: 381724 - RNA, 32 nt, Human
ccuggauaaaaugacacccauuuuucuuagga

SEQ ID NO: 381725 - RNA, 32 nt, Human
ccuggauaacagagcgagacccugucucaaaa

SEQ ID NO: 381726 - RNA, 32 nt, Human
ccuggauacagccuuuuuaugacuuuuacuuc

SEQ ID NO: 381727 - RNA, 31 nt, Human
ccuggauacagcuagagagcaggacuucacc

SEQ ID NO: 381728 - RNA, 26 nt, Human
ccuggauagucgccgucaggcacuga

SEQ ID NO: 381729 - RNA, 32 nt, Human
ccuggauagugaggcccuggcugguccagggg

SEQ ID NO: 381730 - RNA, 32 nt, Human
ccuggauaucaccaccucauguuuccagaguc

SEQ ID NO: 381731 - RNA, 32 nt, Human
ccuggauaugaaccaguggcuucaagguacau

SEQ ID NO: 381732 - RNA, 32 nt, Human
ccuggauauuguuugcaccauccauugucccu

SEQ ID NO: 381733 - RNA, 32 nt, Human
ccuggaucaucucuccccaucacuugccuugg

SEQ ID NO: 381734 - RNA, 32 nt, Human
ccuggauccagaaccacuuuuauuuccaagag

SEQ ID NO: 381735 - RNA, 32 nt, Human
ccuggauccccagaccaaagagacacagucac

SEQ ID NO: 381736 - RNA, 32 nt, Human
ccuggaucccgcuccaccuucuagaagcuccc

SEQ ID NO: 381737 - RNA, 19 nt, Human
ccuggauccgcuccugccu

SEQ ID NO: 381738 - RNA, 32 nt, Human
ccuggauccggaguucgaggccagccugacca

SEQ ID NO: 381739 - RNA, 32 nt, Human
ccuggauccugccuccgccaggccggcugccu

SEQ ID NO: 381740 - RNA, 32 nt, Human
ccuggauccuggggccugggugggcuggggga

SEQ ID NO: 381741 - RNA, 22 nt, Human
ccuggauccuggucaggccgaa

SEQ ID NO: 381742 - RNA, 32 nt, Human
ccuggaucuauccaccuccccauguucauuau

SEQ ID NO: 381743 - RNA, 32 nt, Human
ccuggaucucaaacuuccugccuccagaauga

SEQ ID NO: 381744 - RNA, 32 nt, Human
ccuggaucucacuccaccuuucaaucaaagcu

SEQ ID NO: 381745 - RNA, 18 nt, Human
ccuggaucucagaugcua

SEQ ID NO: 381746 - RNA, 32 nt, Human
ccuggaucuccucccuuacccuccucugcugg

SEQ ID NO: 381747 - RNA, 32 nt, Human
ccuggaucugaggccuuucccuugccauagaa

SEQ ID NO: 381748 - RNA, 32 nt, Human
ccuggaucuggaguggagcugcucugagauuu

SEQ ID NO: 381749 - RNA, 32 nt, Human
ccuggaucuuauuccuguacuuccuagggaau

SEQ ID NO: 381750 - RNA, 32 nt, Human
ccuggaucuucccagggauucccucuacgcuc

SEQ ID NO: 381751 - RNA, 32 nt, Human
ccuggaucuugccucugcuccgacgccguucc

SEQ ID NO: 381752 - RNA, 32 nt, Human
ccuggaugaacugucuggaauuacauaaauau

SEQ ID NO: 381753 - RNA, 32 nt, Human
ccuggaugacaaagcaagacccugucucaaaa

SEQ ID NO: 381754 - RNA, 19 nt, Human
ccuggaugacagagcaaga

SEQ ID NO: 381755 - RNA, 32 nt, Human
ccuggaugacgguggcauucacagaccacagc

SEQ ID NO: 381756 - RNA, 32 nt, Human
ccuggaugacuguuacccugaggccuccacgg

SEQ ID NO: 381757 - RNA, 18 nt, Human
ccuggaugagggggccag

SEQ ID NO: 381758 - RNA, 25 nt, Human
ccuggaugaguuccgucggcgcugg

SEQ ID NO: 381759 - RNA, 22 nt, Human
ccuggaugccaaggagccccug

SEQ ID NO: 381760 - RNA, 32 nt, Human
ccuggaugcccaccccugcugccgccacuggc

SEQ ID NO: 381761 - RNA, 32 nt, Human
ccuggaugcugaggcacgagaaucacuugaac

SEQ ID NO: 381762 - RNA, 31 nt, Human
ccuggauggagaccugagcuggagaaggaga

SEQ ID NO: 381763 - RNA, 32 nt, Human
ccuggauggagcagguggaggugcagagggga

SEQ ID NO: 381764 - RNA, 32 nt, Human
ccuggauggagcuccagggcuggggaacgucc

SEQ ID NO: 381765 - RNA, 22 nt, Human
ccuggauggccgcuguccggca

SEQ ID NO: 381766 - RNA, 32 nt, Human
ccuggaugggagagagagggaggaguaaaacu

SEQ ID NO: 381767 - RNA, 32 nt, Human
ccuggauggggaggggguaggaggggcuacaa

SEQ ID NO: 381768 - RNA, 32 nt, Human
ccuggauggguaugcaccuguccccaccaccg

SEQ ID NO: 381769 - RNA, 32 nt, Human
ccuggauggucucgauuuucugaucuuaugau

SEQ ID NO: 381770 - RNA, 32 nt, Human
ccuggaugguggcccuuccagugacauggagg

SEQ ID NO: 381771 - RNA, 32 nt, Human
ccuggauguacuauccaaucugugaugacauu

SEQ ID NO: 381772 - RNA, 32 nt, Human
ccuggaugugggcuucccagccgcucacgguu

SEQ ID NO: 381773 - RNA, 24 nt, Human
ccuggauguucggggacccccaca

SEQ ID NO: 381774 - RNA, 32 nt, Human
ccuggauucauuuccugcccuuccucaguuua

SEQ ID NO: 381775 - RNA, 23 nt, Human
ccuggauuccccagcuacuugga

SEQ ID NO: 381776 - RNA, 19 nt, Human
ccuggauucccuguucuuu

SEQ ID NO: 381777 - RNA, 32 nt, Human
ccuggauucuggcaaaucuccgucuaguaaca

SEQ ID NO: 381778 - RNA, 24 nt, Human
ccuggauugagaaccaccacccga

SEQ ID NO: 381779 - RNA, 32 nt, Human
ccuggauugcuacuuuacccccaugaagcccg

SEQ ID NO: 381780 - RNA, 32 nt, Human
ccuggauuguugaggaaaaagccagacuaacc

SEQ ID NO: 381781 - RNA, 32 nt, Human
ccuggauuuccuucggagagagcuagauucua

SEQ ID NO: 381782 - RNA, 23 nt, Human
ccuggauuucucucacacugccu

SEQ ID NO: 381783 - RNA, 32 nt, Human
ccuggauuucuucuggacauuuccucaagaug

SEQ ID NO: 381784 - RNA, 32 nt, Human
ccuggauuugaaguuucgucugggcuugugcu

SEQ ID NO: 381785 - RNA, 32 nt, Human
ccuggauuuggaggcagaguugucaggcuuuu

SEQ ID NO: 381786 - RNA, 23 nt, Human
ccuggauuugggccauccugaua

SEQ ID NO: 381787 - RNA, 32 nt, Human
ccuggauuugugaaugacguacagguauucau

SEQ ID NO: 381788 - RNA, 32 nt, Human
ccuggauuuugcccucuccuuagcucuuaguc

SEQ ID NO: 381789 - RNA, 18 nt, Human
ccuggcaaaacauaugug

SEQ ID NO: 381790 - RNA, 21 nt, Human
ccuggcaaaauaaaacauguu

SEQ ID NO: 381791 - RNA, 19 nt, Human
ccuggcaaacauggugaaa

SEQ ID NO: 381792 - RNA, 32 nt, Human
ccuggcaaauccugccacuuguuuccacucuu

SEQ ID NO: 381793 - RNA, 23 nt, Human
ccuggcaacauggcaagacccug

SEQ ID NO: 381794 - RNA, 32 nt, Human
ccuggcaacauggcaagacccugccucuuuga

SEQ ID NO: 381795 - RNA, 32 nt, Human
ccuggcaacauugugagacccaucucuauaaa

SEQ ID NO: 381796 - RNA, 32 nt, Human
ccuggcaaccaccauccuacuuucuaucucug

SEQ ID NO: 381797 - RNA, 32 nt, Human
ccuggcaacugcuuaccagccuggcuggccgu

SEQ ID NO: 381798 - RNA, 32 nt, Human
ccuggcaagcuagaaccuggagggaaugaacc

SEQ ID NO: 381799 - RNA, 20 nt, Human
ccuggcaagcuccccacguc

SEQ ID NO: 381800 - RNA, 20 nt, Human
ccuggcaaggauccaauuuc

SEQ ID NO: 381801 - RNA, 18 nt, Human
ccuggcaaggggaggcag

SEQ ID NO: 381802 - RNA, 18 nt, Human
ccuggcaaggggggugca

SEQ ID NO: 381803 - RNA, 32 nt, Human
ccuggcacaagaagaucuacaucuuccaggga

SEQ ID NO: 381804 - RNA, 32 nt, Human
ccuggcacaccauacuagaauucacacuggag

SEQ ID NO: 381805 - RNA, 32 nt, Human
ccuggcacacccuucacgguugcuacccaggc

SEQ ID NO: 381806 - RNA, 32 nt, Human
ccuggcacacgggccaagguacccacaggauc

SEQ ID NO: 381807 - RNA, 32 nt, Human
ccuggcacagacucacccuucuuucuggcacc

SEQ ID NO: 381808 - RNA, 32 nt, Human
ccuggcacagccgccuggaaugcaggacuguc

SEQ ID NO: 381809 - RNA, 18 nt, Human
ccuggcacagcggggcgu

SEQ ID NO: 381810 - RNA, 32 nt, Human
ccuggcacagggaggagcagcucuguaaaucu

SEQ ID NO: 381811 - RNA, 32 nt, Human
ccuggcacaguccguccugucggacacagagc

SEQ ID NO: 381812 - RNA, 32 nt, Human
ccuggcacaguggcucaugccuguaaucucaa

SEQ ID NO: 381813 - RNA, 20 nt, Human
ccuggcaccagcccagggug

SEQ ID NO: 381814 - RNA, 20 nt, Human
ccuggcacccacugcccgug

SEQ ID NO: 381815 - RNA, 32 nt, Human
ccuggcacccagagaaaaggagcauccuuacc

SEQ ID NO: 381816 - RNA, 32 nt, Human
ccuggcaccuagcaaggcacaccaagaacagc

SEQ ID NO: 381817 - RNA, 32 nt, Human
ccuggcacgccggucugugccugcccgccccg

SEQ ID NO: 381818 - RNA, 32 nt, Human
ccuggcacgggcucagcccaggaagaggagaa

SEQ ID NO: 381819 - RNA, 32 nt, Human
ccuggcacguggccaccaucaugucuaggccu

SEQ ID NO: 381820 - RNA, 32 nt, Human
ccuggcacgugugccacuugcccagcuucuug

SEQ ID NO: 381821 - RNA, 32 nt, Human
ccuggcacucaauccccgccaugugggggcuc

SEQ ID NO: 381822 - RNA, 22 nt, Human
ccuggcacuccagagggcgcgg

SEQ ID NO: 381823 - RNA, 20 nt, Human
ccuggcacugaggcccugac

SEQ ID NO: 381824 - RNA, 32 nt, Human
ccuggcacugccucagcauggccaugucauca

SEQ ID NO: 381825 - RNA, 32 nt, Human
ccuggcacugcuuccuccaccguuuucacagg

SEQ ID NO: 381826 - RNA, 32 nt, Human
ccuggcacuggcagcauucaguggggaccccc

SEQ ID NO: 381827 - RNA, 32 nt, Human
ccuggcacugguuuguucccugugucauuuca

SEQ ID NO: 381828 - RNA, 20 nt, Human
ccuggcagaaagauggccag

SEQ ID NO: 381829 - RNA, 32 nt, Human
ccuggcagaagaacccacauaaggaagugucc

SEQ ID NO: 381830 - RNA, 20 nt, Human
ccuggcagaagaagcgguag

SEQ ID NO: 381831 - RNA, 20 nt, Human
ccuggcagaagaucaugcag

SEQ ID NO: 381832 - RNA, 20 nt, Human
ccuggcagaagggagcagca

SEQ ID NO: 381833 - RNA, 19 nt, Human
ccuggcagaaggggcacgg

SEQ ID NO: 381834 - RNA, 18 nt, Human
ccuggcagaaguuugcag

SEQ ID NO: 381835 - RNA, 32 nt, Human
ccuggcagaaucuugacccagggaaagggaag

SEQ ID NO: 381836 - RNA, 23 nt, Human
ccuggcagacaggcagggcucug

SEQ ID NO: 381837 - RNA, 32 nt, Human
ccuggcagaccccagaccgagcagaggcgacc

SEQ ID NO: 381838 - RNA, 32 nt, Human
ccuggcagaccccagagucaggccugcuguua

SEQ ID NO: 381839 - RNA, 20 nt, Human
ccuggcagacgguggcguag

SEQ ID NO: 381840 - RNA, 30 nt, Human
ccuggcagagaacgacgcaaggcuccagca

SEQ ID NO: 381841 - RNA, 32 nt, Human
ccuggcagagaacgacgcaaggcuccagcagg

SEQ ID NO: 381842 - RNA, 19 nt, Human
ccuggcagagaugggggcg

SEQ ID NO: 381843 - RNA, 32 nt, Human
ccuggcagagcagaaaaggcaguugaaggagg

SEQ ID NO: 381844 - RNA, 20 nt, Human
ccuggcagagcagggcguag

SEQ ID NO: 381845 - RNA, 20 nt, Human
ccuggcagagccaguugcag

SEQ ID NO: 381846 - RNA, 20 nt, Human
ccuggcagagccuggugugg

SEQ ID NO: 381847 - RNA, 17 nt, Human
ccuggcagagcgcgcag

SEQ ID NO: 381848 - RNA, 17 nt, Human
ccuggcagaggagccca

SEQ ID NO: 381849 - RNA, 18 nt, Human
ccuggcagaggaggagca

SEQ ID NO: 381850 - RNA, 20 nt, Human
ccuggcagaggccccgacag

SEQ ID NO: 381851 - RNA, 18 nt, Human
ccuggcagagggagcaca

SEQ ID NO: 381852 - RNA, 24 nt, Human
ccuggcagagggagguugcaguga

SEQ ID NO: 381853 - RNA, 19 nt, Human
ccuggcagagggugccgca

SEQ ID NO: 381854 - RNA, 18 nt, Human
ccuggcagagguggccag

SEQ ID NO: 381855 - RNA, 19 nt, Human
ccuggcagaguagggguag

SEQ ID NO: 381856 - RNA, 32 nt, Human
ccuggcagaguccugugccacccucucacagg

SEQ ID NO: 381857 - RNA, 20 nt, Human
ccuggcagcagcaggagcag

SEQ ID NO: 381858 - RNA, 20 nt, Human
ccuggcagcagcaggugugg

SEQ ID NO: 381859 - RNA, 20 nt, Human
ccuggcagcaggaggcccag

SEQ ID NO: 381860 - RNA, 32 nt, Human
ccuggcagccacacccucaguaaucccgcaca

SEQ ID NO: 381861 - RNA, 32 nt, Human
ccuggcagccaucugcuuuaccagucucauuu

SEQ ID NO: 381862 - RNA, 19 nt, Human
ccuggcagcccggagcccc

SEQ ID NO: 381863 - RNA, 18 nt, Human
ccuggcagccggguccag

SEQ ID NO: 381864 - RNA, 32 nt, Human
ccuggcagccuccugcaucauccucgucuuca

SEQ ID NO: 381865 - RNA, 32 nt, Human
ccuggcagccucuuccuggcuagggggccaga

SEQ ID NO: 381866 - RNA, 21 nt, Human
ccuggcagccuggcucccucu

SEQ ID NO: 381867 - RNA, 19 nt, Human
ccuggcagcggaggagcag

SEQ ID NO: 381868 - RNA, 17 nt, Human
ccuggcagcggcggcgc

SEQ ID NO: 381869 - RNA, 25 nt, Human
ccuggcagcugugcuuguccguuuc

SEQ ID NO: 381870 - RNA, 24 nt, Human
ccuggcaggaaagagggggugcgg

SEQ ID NO: 381871 - RNA, 32 nt, Human
ccuggcaggaacagauuccaguccugcuuacu

SEQ ID NO: 381872 - RNA, 20 nt, Human
ccuggcaggaaccuucgcag

SEQ ID NO: 381873 - RNA, 32 nt, Human
ccuggcaggaagcacacugcacagggagccug

SEQ ID NO: 381874 - RNA, 20 nt, Human
ccuggcaggaaggccggcca

SEQ ID NO: 381875 - RNA, 18 nt, Human
ccuggcaggaaugggcca

SEQ ID NO: 381876 - RNA, 20 nt, Human
ccuggcaggaccucugccgg

SEQ ID NO: 381877 - RNA, 19 nt, Human
ccuggcaggaccuguggag

SEQ ID NO: 381878 - RNA, 32 nt, Human
ccuggcaggagaaaggagggugguuuccgugg

SEQ ID NO: 381879 - RNA, 20 nt, Human
ccuggcaggagaaccuggag

SEQ ID NO: 381880 - RNA, 18 nt, Human
ccuggcaggagagcgcgg

SEQ ID NO: 381881 - RNA, 19 nt, Human
ccuggcaggagcaggacag

SEQ ID NO: 381882 - RNA, 20 nt, Human
ccuggcaggaggaccuggag

SEQ ID NO: 381883 - RNA, 20 nt, Human
ccuggcaggaggagcggcgu

SEQ ID NO: 381884 - RNA, 19 nt, Human
ccuggcaggaggccaccgu

SEQ ID NO: 381885 - RNA, 19 nt, Human
ccuggcaggaggcgggugu

SEQ ID NO: 381886 - RNA, 32 nt, Human
ccuggcaggaggcgggugugugaauagcauau

SEQ ID NO: 381887 - RNA, 20 nt, Human
ccuggcaggaggcuggugua

SEQ ID NO: 381888 - RNA, 18 nt, Human
ccuggcaggaggguuggc

SEQ ID NO: 381889 - RNA, 18 nt, Human
ccuggcaggaggugggug

SEQ ID NO: 381890 - RNA, 17 nt, Human
ccuggcaggagguguag

SEQ ID NO: 381891 - RNA, 19 nt, Human
ccuggcaggagugggcagc

SEQ ID NO: 381892 - RNA, 18 nt, Human
ccuggcaggagugugugg

SEQ ID NO: 381893 - RNA, 18 nt, Human
ccuggcaggaucugccgg

SEQ ID NO: 381894 - RNA, 20 nt, Human
ccuggcaggaugagccgcgg

SEQ ID NO: 381895 - RNA, 32 nt, Human
ccuggcaggauggcgccaccaccagcuagagu

SEQ ID NO: 381896 - RNA, 18 nt, Human
ccuggcaggcagaagcag

SEQ ID NO: 381897 - RNA, 24 nt, Human
ccuggcaggcagagguugcaguga

SEQ ID NO: 381898 - RNA, 32 nt, Human
ccuggcaggcagagguugcagugagccaagau

SEQ ID NO: 381899 - RNA, 32 nt, Human
ccuggcaggccagcaacaugugccccagaucu

SEQ ID NO: 381900 - RNA, 23 nt, Human
ccuggcaggcggagguugcagug

SEQ ID NO: 381901 - RNA, 32 nt, Human
ccuggcaggcggagguugcagugagccgagau

SEQ ID NO: 381902 - RNA, 19 nt, Human
ccuggcaggcggcgcgcgg

SEQ ID NO: 381903 - RNA, 32 nt, Human
ccuggcaggcuggagggcaggagcuggggcca

SEQ ID NO: 381904 - RNA, 18 nt, Human
ccuggcagggacggccgg

SEQ ID NO: 381905 - RNA, 20 nt, Human
ccuggcagggacggguggag

SEQ ID NO: 381906 - RNA, 18 nt, Human
ccuggcagggagaaggcg

SEQ ID NO: 381907 - RNA, 22 nt, Human
ccuggcagggagccuggugggg

SEQ ID NO: 381908 - RNA, 32 nt, Human
ccuggcagggcagauccaggggcaguucucug

SEQ ID NO: 381909 - RNA, 20 nt, Human
ccuggcagggccaccugcag

SEQ ID NO: 381910 - RNA, 32 nt, Human
ccuggcagggccuggagaagucuggaggcuuu

SEQ ID NO: 381911 - RNA, 19 nt, Human
ccuggcagggcucgcccgg

SEQ ID NO: 381912 - RNA, 32 nt, Human
ccuggcagggcugagcacacgcuaggccucag

SEQ ID NO: 381913 - RNA, 16 nt, Human
ccuggcaggggagcgc

SEQ ID NO: 381914 - RNA, 18 nt, Human
ccuggcaggggagggggg

SEQ ID NO: 381915 - RNA, 18 nt, Human
ccuggcaggggaguccag

SEQ ID NO: 381916 - RNA, 20 nt, Human
ccuggcagggggccucgcgg

SEQ ID NO: 381917 - RNA, 20 nt, Human
ccuggcagggggccucgggc

SEQ ID NO: 381918 - RNA, 32 nt, Human
ccuggcaggguggccagagaggcuuggacaag

SEQ ID NO: 381919 - RNA, 32 nt, Human
ccuggcaggucacuugcuugugguguuuucgu

SEQ ID NO: 381920 - RNA, 19 nt, Human
ccuggcaggucugggcgca

SEQ ID NO: 381921 - RNA, 24 nt, Human
ccuggcagguggagguuacaguga

SEQ ID NO: 381922 - RNA, 32 nt, Human
ccuggcagguggagguuacagugagccaagau

SEQ ID NO: 381923 - RNA, 32 nt, Human
ccuggcagguggagguugcagugaguggagau

SEQ ID NO: 381924 - RNA, 18 nt, Human
ccuggcagguggggccag

SEQ ID NO: 381925 - RNA, 21 nt, Human
ccuggcaggugggggcagcag

SEQ ID NO: 381926 - RNA, 32 nt, Human
ccuggcaggugugggagggaagcccauggcca

SEQ ID NO: 381927 - RNA, 20 nt, Human
ccuggcaguacuugggucgg

SEQ ID NO: 381928 - RNA, 18 nt, Human
ccuggcagucagaggcgc

SEQ ID NO: 381929 - RNA, 32 nt, Human
ccuggcagucccggaagacaccaggaaaacaa

SEQ ID NO: 381930 - RNA, 32 nt, Human
ccuggcagucuggcugcugcagaagaguuuuu

SEQ ID NO: 381931 - RNA, 20 nt, Human
ccuggcagugagaggugugg

SEQ ID NO: 381932 - RNA, 18 nt, Human
ccuggcagugcacuggua

SEQ ID NO: 381933 - RNA, 32 nt, Human
ccuggcaguugaaaucucuggaagagggaaca

SEQ ID NO: 381934 - RNA, 18 nt, Human
ccuggcaguuggcugcag

SEQ ID NO: 381935 - RNA, 32 nt, Human
ccuggcauaacugaggcaggagcuggccgggc

SEQ ID NO: 381936 - RNA, 32 nt, Human
ccuggcauccacccucuacuuucugucucucu

SEQ ID NO: 381937 - RNA, 32 nt, Human
ccuggcauccacccuucuagcuuucugucucu

SEQ ID NO: 381938 - RNA, 22 nt, Human
ccuggcauccagacagccccug

SEQ ID NO: 381939 - RNA, 32 nt, Human
ccuggcaucccagcuacuccaggggcugaggu

SEQ ID NO: 381940 - RNA, 32 nt, Human
ccuggcaucccucuaacccaggaggagcgugg

SEQ ID NO: 381941 - RNA, 21 nt, Human
ccuggcauccgcugggggcgc

SEQ ID NO: 381942 - RNA, 32 nt, Human
ccuggcaucucuccacucccagaguccacucc

SEQ ID NO: 381943 - RNA, 32 nt, Human
ccuggcaucugggcuccugaucagcugaugga

SEQ ID NO: 381944 - RNA, 32 nt, Human
ccuggcaucugucuccccuuguuccugagugg

SEQ ID NO: 381945 - RNA, 32 nt, Human
ccuggcaucuuccuguucuaccuccucauuca

SEQ ID NO: 381946 - RNA, 32 nt, Human
ccuggcaugaaccuggccucccggggagcuga

SEQ ID NO: 381947 - RNA, 20 nt, Human
ccuggcaugaggagugggug

SEQ ID NO: 381948 - RNA, 32 nt, Human
ccuggcauggcggcucacgccuguaaucccag

SEQ ID NO: 381949 - RNA, 32 nt, Human
ccuggcaugggcagauuccagccuuugggcug

SEQ ID NO: 381950 - RNA, 18 nt, Human
ccuggcaugggggcgcag

SEQ ID NO: 381951 - RNA, 32 nt, Human
ccuggcaugguggcaugcaccuguaaucccaa

SEQ ID NO: 381952 - RNA, 32 nt, Human
ccuggcauggugguguacgccuguaaucccag

SEQ ID NO: 381953 - RNA, 32 nt, Human
ccuggcaugugccaguuauagacuguccagca

SEQ ID NO: 381954 - RNA, 25 nt, Human
ccuggcaugugccuucauguaguag

SEQ ID NO: 381955 - RNA, 23 nt, Human
ccuggcaugugguaggagcucag

SEQ ID NO: 381956 - RNA, 32 nt, Human
ccuggcauucuguacauauauguauuacauuu

SEQ ID NO: 381957 - RNA, 32 nt, Human
ccuggcauugaccaacauagguggugagccug

SEQ ID NO: 381958 - RNA, 32 nt, Human
ccuggccaaauggugaaaccccaucucuacga

SEQ ID NO: 381959 - RNA, 32 nt, Human
ccuggccaacacaguaaacccugucuccacaa

SEQ ID NO: 381960 - RNA, 32 nt, Human
ccuggccaacacagugagacccugucucuacu

SEQ ID NO: 381961 - RNA, 19 nt, Human
ccuggccaacacggugaaa

SEQ ID NO: 381962 - RNA, 24 nt, Human
ccuggccaacacggugaaacccca

SEQ ID NO: 381963 - RNA, 32 nt, Human
ccuggccaacacggugagacccugucuuuacu

SEQ ID NO: 381964 - RNA, 19 nt, Human
ccuggccaacauagugaaa

SEQ ID NO: 381965 - RNA, 24 nt, Human
ccuggccaacauagugaaacccca

SEQ ID NO: 381966 - RNA, 21 nt, Human
ccuggccaacaucucacugca

SEQ ID NO: 381967 - RNA, 32 nt, Human
ccuggccaacaugagguuucuccaucaagacg

SEQ ID NO: 381968 - RNA, 19 nt, Human
ccuggccaacaugaugaaa

SEQ ID NO: 381969 - RNA, 24 nt, Human
ccuggccaacaugaugaaacccca

SEQ ID NO: 381970 - RNA, 24 nt, Human
ccuggccaacauggagaaacccca

SEQ ID NO: 381971 - RNA, 32 nt, Human
ccuggccaacauggcaaaaccaucucuacuaa

SEQ ID NO: 381972 - RNA, 31 nt, Human
ccuggccaacauggcaaaacccugccucuac

SEQ ID NO: 381973 - RNA, 19 nt, Human
ccuggccaacauggcgaaa

SEQ ID NO: 381974 - RNA, 24 nt, Human
ccuggccaacauggcgaaacccca

SEQ ID NO: 381975 - RNA, 24 nt, Human
ccuggccaacauggcgaaauucca

SEQ ID NO: 381976 - RNA, 24 nt, Human
ccuggccaacauggcgagacccca

SEQ ID NO: 381977 - RNA, 19 nt, Human
ccuggccaacauggggaaa

SEQ ID NO: 381978 - RNA, 24 nt, Human
ccuggccaacaugguaaaacccca

SEQ ID NO: 381979 - RNA, 24 nt, Human
ccuggccaacaugguaaaacucca

SEQ ID NO: 381980 - RNA, 24 nt, Human
ccuggccaacauggucccagcugc

SEQ ID NO: 381981 - RNA, 19 nt, Human
ccuggccaacauggugaaa

SEQ ID NO: 381982 - RNA, 23 nt, Human
ccuggccaacauggugaaacacu

SEQ ID NO: 381983 - RNA, 24 nt, Human
ccuggccaacauggugaaacccca

SEQ ID NO: 381984 - RNA, 24 nt, Human
ccuggccaacauggugaaacccgc

SEQ ID NO: 381985 - RNA, 23 nt, Human
ccuggccaacauggugaaaccug

SEQ ID NO: 381986 - RNA, 22 nt, Human
ccuggccaacauggugaaacgc

SEQ ID NO: 381987 - RNA, 21 nt, Human
ccuggccaacauggugaaacu

SEQ ID NO: 381988 - RNA, 24 nt, Human
ccuggccaacauggugaaacucca

SEQ ID NO: 381989 - RNA, 24 nt, Human
ccuggccaacauggugaaacuccg

SEQ ID NO: 381990 - RNA, 19 nt, Human
ccuggccaacauggugaag

SEQ ID NO: 381991 - RNA, 24 nt, Human
ccuggccaacauggugaagcuccg

SEQ ID NO: 381992 - RNA, 20 nt, Human
ccuggccaacauggugacac

SEQ ID NO: 381993 - RNA, 20 nt, Human
ccuggccaacauggugagac

SEQ ID NO: 381994 - RNA, 24 nt, Human
ccuggccaacauggugagacccca

SEQ ID NO: 381995 - RNA, 32 nt, Human
ccuggccaacauggugagacccugucucugcu

SEQ ID NO: 381996 - RNA, 20 nt, Human
ccuggccaacauggugauac

SEQ ID NO: 381997 - RNA, 32 nt, Human
ccuggccaacaugugaaaccccgucuccacug

SEQ ID NO: 381998 - RNA, 19 nt, Human
ccuggccaacauguugaaa

SEQ ID NO: 381999 - RNA, 19 nt, Human
ccuggccaacauugugaaa

SEQ ID NO: 382000 - RNA, 32 nt, Human
ccuggccaaccaacauggugaaaccucguguc

SEQ ID NO: 382001 - RNA, 19 nt, Human
ccuggccaaccuggugaaa

SEQ ID NO: 382002 - RNA, 19 nt, Human
ccuggccaacguggugaaa

SEQ ID NO: 382003 - RNA, 18 nt, Human
ccuggccaagcagggugc

SEQ ID NO: 382004 - RNA, 32 nt, Human
ccuggccaagcccagcuuccgaagcaggaacc

SEQ ID NO: 382005 - RNA, 32 nt, Human
ccuggccaaggagagacagaagugccuccuuc

SEQ ID NO: 382006 - RNA, 32 nt, Human
ccuggccaaggaggacucgaggccugucccac

SEQ ID NO: 382007 - RNA, 23 nt, Human
ccuggccaauaugguaaacccca

SEQ ID NO: 382008 - RNA, 22 nt, Human
ccuggccaauauggucuuucug

SEQ ID NO: 382009 - RNA, 19 nt, Human
ccuggccaauauggugaaa

SEQ ID NO: 382010 - RNA, 20 nt, Human
ccuggccaauauggugaaac

SEQ ID NO: 382011 - RNA, 23 nt, Human
ccuggccaauauggugaaaccac

SEQ ID NO: 382012 - RNA, 24 nt, Human
ccuggccaauauggugaaacccca

SEQ ID NO: 382013 - RNA, 24 nt, Human
ccuggccaauauggugaaacuccg

SEQ ID NO: 382014 - RNA, 24 nt, Human
ccuggccaauauggugagacccca

SEQ ID NO: 382015 - RNA, 32 nt, Human
ccuggccaaucaggcgagacgccuuugugagc

SEQ ID NO: 382016 - RNA, 32 nt, Human
ccuggccacaaaccugcugcuguggguucugg

SEQ ID NO: 382017 - RNA, 32 nt, Human
ccuggccacaauagccucaucaacauggcugc

SEQ ID NO: 382018 - RNA, 21 nt, Human
ccuggccacagcucacccugg

SEQ ID NO: 382019 - RNA, 32 nt, Human
ccuggccacauccuuccccugaucucauggcu

SEQ ID NO: 382020 - RNA, 21 nt, Human
ccuggccacauggggcacugg

SEQ ID NO: 382021 - RNA, 32 nt, Human
ccuggccacauggugaaacccugucucuacua

SEQ ID NO: 382022 - RNA, 32 nt, Human
ccuggccaccucugugcuucuugugaagucuc

SEQ ID NO: 382023 - RNA, 23 nt, Human
ccuggccaccuuuaaagccccug

SEQ ID NO: 382024 - RNA, 32 nt, Human
ccuggccacgugugcgccaccuuacuuuggaa

SEQ ID NO: 382025 - RNA, 32 nt, Human
ccuggccacuaugccaguucugaccucgcauc

SEQ ID NO: 382026 - RNA, 22 nt, Human
ccuggccacucuagacauauga

SEQ ID NO: 382027 - RNA, 32 nt, Human
ccuggccacuggcccuguuucuccccacaccc

SEQ ID NO: 382028 - RNA, 22 nt, Human
ccuggccacuuaggagagcuga

SEQ ID NO: 382029 - RNA, 32 nt, Human
ccuggccagaacuugggggaggacacaaaucc

SEQ ID NO: 382030 - RNA, 32 nt, Human
ccuggccagaagcaggagugugaggaggagac

SEQ ID NO: 382031 - RNA, 32 nt, Human
ccuggccagaagcuggagggggcuuggccaaa

SEQ ID NO: 382032 - RNA, 26 nt, Human
ccuggccagaggccacugacagggug

SEQ ID NO: 382033 - RNA, 32 nt, Human
ccuggccagcacucggggaccucccugccccu

SEQ ID NO: 382034 - RNA, 25 nt, Human
ccuggccagcagaguggggcacugg

SEQ ID NO: 382035 - RNA, 19 nt, Human
ccuggccagcauggugaaa

SEQ ID NO: 382036 - RNA, 32 nt, Human
ccuggccagcccacccuccugcaaccucucac

SEQ ID NO: 382037 - RNA, 22 nt, Human
ccuggccagccuggggcacuga

SEQ ID NO: 382038 - RNA, 22 nt, Human
ccuggccagcggcgggcgcuga

SEQ ID NO: 382039 - RNA, 32 nt, Human
ccuggccagcucuucgccccucaccucuuuga

SEQ ID NO: 382040 - RNA, 19 nt, Human
ccuggccaggagggcccag

SEQ ID NO: 382041 - RNA, 32 nt, Human
ccuggccagggaaaucagaagcucuucuuggg

SEQ ID NO: 382042 - RNA, 32 nt, Human
ccuggccagguuguccucgaccagucccgugc

SEQ ID NO: 382043 - RNA, 32 nt, Human
ccuggccagucugccaccacccucucucuacc

SEQ ID NO: 382044 - RNA, 31 nt, Human
ccuggccaguuucacaaucuagcucgacaga

SEQ ID NO: 382045 - RNA, 23 nt, Human
ccuggccauccugugggcucuga

SEQ ID NO: 382046 - RNA, 32 nt, Human
ccuggccaucugccuccugucuucccaguacc

SEQ ID NO: 382047 - RNA, 32 nt, Human
ccuggccaugaccaccacauuucugcaaacuu

SEQ ID NO: 382048 - RNA, 32 nt, Human
ccuggccauugguauuuugaaaaaucccucca

SEQ ID NO: 382049 - RNA, 21 nt, Human
ccuggccauuuucuugccuga

SEQ ID NO: 382050 - RNA, 19 nt, Human
ccuggcccaaaccugcccc

SEQ ID NO: 382051 - RNA, 24 nt, Human
ccuggcccaaauggugaaacccug

SEQ ID NO: 382052 - RNA, 23 nt, Human
ccuggcccaacagaaaaacccug

SEQ ID NO: 382053 - RNA, 20 nt, Human
ccuggcccaagacaggggcc

SEQ ID NO: 382054 - RNA, 19 nt, Human
ccuggcccaaggugccacc

SEQ ID NO: 382055 - RNA, 32 nt, Human
ccuggcccaaguaggggauuccaugccuuccc

SEQ ID NO: 382056 - RNA, 22 nt, Human
ccuggcccacagcaggugcuga

SEQ ID NO: 382057 - RNA, 24 nt, Human
ccuggcccacauggugaaacccug

SEQ ID NO: 382058 - RNA, 20 nt, Human
ccuggcccaccggcgagccc

SEQ ID NO: 382059 - RNA, 32 nt, Human
ccuggcccaccucaucccuccagccugggauc

SEQ ID NO: 382060 - RNA, 24 nt, Human
ccuggcccacuccacaggccccug

SEQ ID NO: 382061 - RNA, 32 nt, Human
ccuggcccacugcaccuguccccacaggagcc

SEQ ID NO: 382062 - RNA, 32 nt, Human
ccuggcccacugcacugggaaucuaggauggg

SEQ ID NO: 382063 - RNA, 22 nt, Human
ccuggcccagaagaccagcccu

SEQ ID NO: 382064 - RNA, 22 nt, Human
ccuggcccagacugccagcccu

SEQ ID NO: 382065 - RNA, 32 nt, Human
ccuggcccagaggcuccugaagaugcugggcg

SEQ ID NO: 382066 - RNA, 32 nt, Human
ccuggcccagaucuucucaccuaggacuuuuu

SEQ ID NO: 382067 - RNA, 23 nt, Human
ccuggcccagccagagcccacug

SEQ ID NO: 382068 - RNA, 21 nt, Human
ccuggcccagcccccagcccc

SEQ ID NO: 382069 - RNA, 21 nt, Human
ccuggcccagccucagcaccc

SEQ ID NO: 382070 - RNA, 32 nt, Human
ccuggcccagccucagcacccagggccaguga

SEQ ID NO: 382071 - RNA, 22 nt, Human
ccuggcccagccugcaccccug

SEQ ID NO: 382072 - RNA, 19 nt, Human
ccuggcccagcuacuccuu

SEQ ID NO: 382073 - RNA, 32 nt, Human
ccuggcccagcucuggagugcaugugugugug

SEQ ID NO: 382074 - RNA, 21 nt, Human
ccuggcccaggaccccaccug

SEQ ID NO: 382075 - RNA, 20 nt, Human
ccuggcccaggaccucccug

SEQ ID NO: 382076 - RNA, 32 nt, Human
ccuggcccaggagcaggggcuuggaguggggc

SEQ ID NO: 382077 - RNA, 24 nt, Human
ccuggcccaggccucugcccucug

SEQ ID NO: 382078 - RNA, 21 nt, Human
ccuggcccagggaccccucac

SEQ ID NO: 382079 - RNA, 20 nt, Human
ccuggcccagggaggagccc

SEQ ID NO: 382080 - RNA, 32 nt, Human
ccuggcccaggucugggcagaugucuucacuu

SEQ ID NO: 382081 - RNA, 32 nt, Human
ccuggcccauaaagcccacuaguuggagagua

SEQ ID NO: 382082 - RNA, 32 nt, Human
ccuggcccaucuucccuggcguccucucccuc

SEQ ID NO: 382083 - RNA, 22 nt, Human
ccuggccccaaagagcccucga

SEQ ID NO: 382084 - RNA, 32 nt, Human
ccuggccccaaagguuucucuuucuuccuccu

SEQ ID NO: 382085 - RNA, 22 nt, Human
ccuggccccaacuauuaaagug

SEQ ID NO: 382086 - RNA, 19 nt, Human
ccuggccccaaggggccug

SEQ ID NO: 382087 - RNA, 32 nt, Human
ccuggccccacacucccaaaucugccacucca

SEQ ID NO: 382088 - RNA, 19 nt, Human
ccuggccccacagcccgug

SEQ ID NO: 382089 - RNA, 23 nt, Human
ccuggccccacugcccugugagg

SEQ ID NO: 382090 - RNA, 32 nt, Human
ccuggccccagaagcuguuuugcucagagcug

SEQ ID NO: 382091 - RNA, 32 nt, Human
ccuggccccaggagaaugaaccagccgcagag

SEQ ID NO: 382092 - RNA, 32 nt, Human
ccuggccccaggagcacugcagcccgagacuu

SEQ ID NO: 382093 - RNA, 28 nt, Human
ccuggccccagugcugcguccuuaucag

SEQ ID NO: 382094 - RNA, 32 nt, Human
ccuggcccccaagcagaggaggcugcaccucc

SEQ ID NO: 382095 - RNA, 32 nt, Human
ccuggcccccaccacauccugauguccuucua

SEQ ID NO: 382096 - RNA, 32 nt, Human
ccuggcccccagcccaugccucccugggauga

SEQ ID NO: 382097 - RNA, 27 nt, Human
ccuggcccccucagccaucucagggug

SEQ ID NO: 382098 - RNA, 32 nt, Human
ccuggcccccucccgcugcaggagacucgggg

SEQ ID NO: 382099 - RNA, 32 nt, Human
ccuggcccccuucgagaccucugccccgcugg

SEQ ID NO: 382100 - RNA, 19 nt, Human
ccuggccccgcccaccuca

SEQ ID NO: 382101 - RNA, 32 nt, Human
ccuggccccgcccugcacuccagcucgccccu

SEQ ID NO: 382102 - RNA, 20 nt, Human
ccuggccccucacgggcccc

SEQ ID NO: 382103 - RNA, 32 nt, Human
ccuggccccucagacucacuccugccaagagg

SEQ ID NO: 382104 - RNA, 32 nt, Human
ccuggccccuccaaaucucauguccucacuau

SEQ ID NO: 382105 - RNA, 32 nt, Human
ccuggccccuccacugcuucucuccccaucca

SEQ ID NO: 382106 - RNA, 32 nt, Human
ccuggccccuccauccuuucuucucugguccc

SEQ ID NO: 382107 - RNA, 20 nt, Human
ccuggccccuccugccccca

SEQ ID NO: 382108 - RNA, 32 nt, Human
ccuggccccucgggugacccuucccacacacc

SEQ ID NO: 382109 - RNA, 32 nt, Human
ccuggccccuggcagcuucuguccucacccua

SEQ ID NO: 382110 - RNA, 24 nt, Human
ccuggccccuggccgggcgggcgg

SEQ ID NO: 382111 - RNA, 32 nt, Human
ccuggccccuggccuuggcugcauuugugcac

SEQ ID NO: 382112 - RNA, 18 nt, Human
ccuggccccugggagccc

SEQ ID NO: 382113 - RNA, 32 nt, Human
ccuggccccuggggauucuguggugugggugg

SEQ ID NO: 382114 - RNA, 32 nt, Human
ccuggcccgccuggcccuagccauggagcuga

SEQ ID NO: 382115 - RNA, 32 nt, Human
ccuggcccggagcugggagcugauggaguccg

SEQ ID NO: 382116 - RNA, 22 nt, Human
ccuggcccgggccucggcgccc

SEQ ID NO: 382117 - RNA, 20 nt, Human
ccuggcccggguggggcccc

SEQ ID NO: 382118 - RNA, 32 nt, Human
ccuggcccggguuguggaggggaccggggaug

SEQ ID NO: 382119 - RNA, 32 nt, Human
ccuggcccgucauaggcucggggcccgucgac

SEQ ID NO: 382120 - RNA, 32 nt, Human
ccuggcccuagccauggagcugagccggcgcg

SEQ ID NO: 382121 - RNA, 32 nt, Human
ccuggcccuccaccugccuccaggccacgaaa

SEQ ID NO: 382122 - RNA, 32 nt, Human
ccuggcccuccccuccuuggcauucauggggg

SEQ ID NO: 382123 - RNA, 20 nt, Human
ccuggcccuccucccuuccc

SEQ ID NO: 382124 - RNA, 32 nt, Human
ccuggcccuccuggaacccaggcucuaaacaa

SEQ ID NO: 382125 - RNA, 32 nt, Human
ccuggcccucugaguggugguggagggugggg

SEQ ID NO: 382126 - RNA, 23 nt, Human
ccuggcccugagacucugugagg

SEQ ID NO: 382127 - RNA, 32 nt, Human
ccuggcccugccccugcacucaggcuugugaa

SEQ ID NO: 382128 - RNA, 32 nt, Human
ccuggcccugcucaccccuacgccucgcccuu

SEQ ID NO: 382129 - RNA, 32 nt, Human
ccuggcccugcucugcuuccugucuaccucau

SEQ ID NO: 382130 - RNA, 32 nt, Human
ccuggcccugcucuggcccuucccgggccgug

SEQ ID NO: 382131 - RNA, 32 nt, Human
ccuggcccugcucugggcuucaguggagccgu

SEQ ID NO: 382132 - RNA, 32 nt, Human
ccuggcccuggaccugggcagcccagcagccc

SEQ ID NO: 382133 - RNA, 32 nt, Human
ccuggcccugggaggaagcuggcugugguagc

SEQ ID NO: 382134 - RNA, 21 nt, Human
ccuggcccuguccuggaccca

SEQ ID NO: 382135 - RNA, 23 nt, Human
ccuggcccugugcugggcacugg

SEQ ID NO: 382136 - RNA, 20 nt, Human
ccuggcccuuuccccuuccc

SEQ ID NO: 382137 - RNA, 32 nt, Human
ccuggcccuuucuggggccacccugggauaug

SEQ ID NO: 382138 - RNA, 20 nt, Human
ccuggccgagcaggaggcgc

SEQ ID NO: 382139 - RNA, 32 nt, Human
ccuggccgaugccauggagcaagugguccagc

SEQ ID NO: 382140 - RNA, 23 nt, Human
ccuggccgcagugaggcgauuga

SEQ ID NO: 382141 - RNA, 16 nt, Human
ccuggccgccgcugcc

SEQ ID NO: 382142 - RNA, 21 nt, Human
ccuggccgcucccggcccugg

SEQ ID NO: 382143 - RNA, 32 nt, Human
ccuggccggagccacuagacagagccgggccu

SEQ ID NO: 382144 - RNA, 32 nt, Human
ccuggccggcugccauggccaggagcuaagug

SEQ ID NO: 382145 - RNA, 32 nt, Human
ccuggccgggccugggcugcccuccagucggu

SEQ ID NO: 382146 - RNA, 32 nt, Human
ccuggccguccuccuccucuucaaauuggcuu

SEQ ID NO: 382147 - RNA, 32 nt, Human
ccuggccgugcuggauguggucaugagcuucg

SEQ ID NO: 382148 - RNA, 20 nt, Human
ccuggccuaaaauguguucu

SEQ ID NO: 382149 - RNA, 32 nt, Human
ccuggccuacuucuuccugugguuccugcccc

SEQ ID NO: 382150 - RNA, 19 nt, Human
ccuggccuagaaccauuca

SEQ ID NO: 382151 - RNA, 32 nt, Human
ccuggccuagaccagcagacagagccaggaga

SEQ ID NO: 382152 - RNA, 32 nt, Human
ccuggccuagcccccucauuucacaagaagaa

SEQ ID NO: 382153 - RNA, 23 nt, Human
ccuggccuauccuggcccuucuc

SEQ ID NO: 382154 - RNA, 21 nt, Human
ccuggccucaaagggcugacc

SEQ ID NO: 382155 - RNA, 18 nt, Human
ccuggccucaagccacca

SEQ ID NO: 382156 - RNA, 19 nt, Human
ccuggccucaagcuguccu

SEQ ID NO: 382157 - RNA, 25 nt, Human
ccuggccucaccucaucaggcacug

SEQ ID NO: 382158 - RNA, 32 nt, Human
ccuggccucacugccagcccaccuccccuaca

SEQ ID NO: 382159 - RNA, 32 nt, Human
ccuggccucagaaaggagcggggacccacccu

SEQ ID NO: 382160 - RNA, 32 nt, Human
ccuggccucagaggagggaggccauggugaaa

SEQ ID NO: 382161 - RNA, 19 nt, Human
ccuggccucagcaaccuga

SEQ ID NO: 382162 - RNA, 18 nt, Human
ccuggccucagccuggca

SEQ ID NO: 382163 - RNA, 19 nt, Human
ccuggccucaggugaucca

SEQ ID NO: 382164 - RNA, 32 nt, Human
ccuggccuccacugugcccaccacugcccucc

SEQ ID NO: 382165 - RNA, 32 nt, Human
ccuggccucccaggccaccaaggacggcaaga

SEQ ID NO: 382166 - RNA, 32 nt, Human
ccuggccucccaggcugcacagaacaacagaa

SEQ ID NO: 382167 - RNA, 32 nt, Human
ccuggccuccccacucccagcucucuugcacu

SEQ ID NO: 382168 - RNA, 32 nt, Human
ccuggccuccccacucuguccugggugcuggc

SEQ ID NO: 382169 - RNA, 32 nt, Human
ccuggccuccgagggcuuuccugucuauggcg

SEQ ID NO: 382170 - RNA, 32 nt, Human
ccuggccuccuuggauuuaucgcaaaaacuga

SEQ ID NO: 382171 - RNA, 32 nt, Human
ccuggccucgcacaggcccuccugccugccaa

SEQ ID NO: 382172 - RNA, 32 nt, Human
ccuggccucgcacaggcgcacacacaccgcca

SEQ ID NO: 382173 - RNA, 25 nt, Human
ccuggccucgucaugacucuuuucu

SEQ ID NO: 382174 - RNA, 21 nt, Human
ccuggccucuaggccgccuga

SEQ ID NO: 382175 - RNA, 32 nt, Human
ccuggccucucuguucccagccauacagcagu

SEQ ID NO: 382176 - RNA, 32 nt, Human
ccuggccucugcacuccccugcuggguguggc

SEQ ID NO: 382177 - RNA, 32 nt, Human
ccuggccucugccugccucccgccugugcacu

SEQ ID NO: 382178 - RNA, 32 nt, Human
ccuggccucugcuccaccucaacagcucccac

SEQ ID NO: 382179 - RNA, 21 nt, Human
ccuggccucuggggucaggaa

SEQ ID NO: 382180 - RNA, 32 nt, Human
ccuggccucuucuccccucucuucccagcagc

SEQ ID NO: 382181 - RNA, 22 nt, Human
ccuggccucuucugggcuacug

SEQ ID NO: 382182 - RNA, 22 nt, Human
ccuggccugaaaggggaugcag

SEQ ID NO: 382183 - RNA, 32 nt, Human
ccuggccugagacaggacaggaaggggccaca

SEQ ID NO: 382184 - RNA, 32 nt, Human
ccuggccugcagcucuucccagccccgagaga

SEQ ID NO: 382185 - RNA, 32 nt, Human
ccuggccugcagcuggcuuccaccuggcacgu

SEQ ID NO: 382186 - RNA, 32 nt, Human
ccuggccugccugguggcugcccuggaguugu

SEQ ID NO: 382187 - RNA, 32 nt, Human
ccuggccugcuggggaugucuccuggggacuu

SEQ ID NO: 382188 - RNA, 32 nt, Human
ccuggccuggcccgggugcaggcugcauggcc

SEQ ID NO: 382189 - RNA, 32 nt, Human
ccuggccugggacaccuccucucugccaggag

SEQ ID NO: 382190 - RNA, 32 nt, Human
ccuggccugggcaacagagcaagacccugucu

SEQ ID NO: 382191 - RNA, 32 nt, Human
ccuggccugggcagcccuggaagcucggagga

SEQ ID NO: 382192 - RNA, 21 nt, Human
ccuggccugggccacaccuga

SEQ ID NO: 382193 - RNA, 32 nt, Human
ccuggccuggggccagcucagauauaccucuc

SEQ ID NO: 382194 - RNA, 19 nt, Human
ccuggccuggggggcgggg

SEQ ID NO: 382195 - RNA, 32 nt, Human
ccuggccugggugaguuggggguggggcacca

SEQ ID NO: 382196 - RNA, 32 nt, Human
ccuggccuggugcucugggcucugccuucugg

SEQ ID NO: 382197 - RNA, 21 nt, Human
ccuggccuguacagguacugg

SEQ ID NO: 382198 - RNA, 31 nt, Human
ccuggccuguggagagaaagccaaggcugcg

SEQ ID NO: 382199 - RNA, 24 nt, Human
ccuggccuguggcgguucuuuccu

SEQ ID NO: 382200 - RNA, 32 nt, Human
ccuggccuguucugucucugagcucugugucc

SEQ ID NO: 382201 - RNA, 32 nt, Human
ccuggccuuccagaugcgaacuggguugcuuc

SEQ ID NO: 382202 - RNA, 32 nt, Human
ccuggccuucgagguccgucccccucagacgu

SEQ ID NO: 382203 - RNA, 32 nt, Human
ccuggccuucucuucgcuucuugacaaaguua

SEQ ID NO: 382204 - RNA, 32 nt, Human
ccuggccuugccaagggccuggggcaaggugu

SEQ ID NO: 382205 - RNA, 32 nt, Human
ccuggccuuucacuccaguucugggugaggca

SEQ ID NO: 382206 - RNA, 32 nt, Human
ccuggccuuuccugguuuucaucaggaaggaa

SEQ ID NO: 382207 - RNA, 22 nt, Human
ccuggcgaacauccuccgggaa

SEQ ID NO: 382208 - RNA, 19 nt, Human
ccuggcgaacauggugaaa

SEQ ID NO: 382209 - RNA, 32 nt, Human
ccuggcgaccacugcccauuccauucaccccu

SEQ ID NO: 382210 - RNA, 23 nt, Human
ccuggcgaccagcaacacugcca

SEQ ID NO: 382211 - RNA, 32 nt, Human
ccuggcgaggcugaaggcgagggguggaggag

SEQ ID NO: 382212 - RNA, 32 nt, Human
ccuggcgagguucacugugccugcugagucag

SEQ ID NO: 382213 - RNA, 19 nt, Human
ccuggcgagugacaaugug

SEQ ID NO: 382214 - RNA, 32 nt, Human
ccuggcgauucugccaagaaggcagguguuuu

SEQ ID NO: 382215 - RNA, 32 nt, Human
ccuggcgcagcaucugcuucuucuggggugug

SEQ ID NO: 382216 - RNA, 19 nt, Human
ccuggcgcagcuccgggaa

SEQ ID NO: 382217 - RNA, 32 nt, Human
ccuggcgcaguggcucaugcuuguaaucccag

SEQ ID NO: 382218 - RNA, 19 nt, Human
ccuggcgccccccugcucc

SEQ ID NO: 382219 - RNA, 19 nt, Human
ccuggcgccgccgcggccg

SEQ ID NO: 382220 - RNA, 32 nt, Human
ccuggcgccgcucuccccuccuguggaucccu

SEQ ID NO: 382221 - RNA, 19 nt, Human
ccuggcgccggacgugugg

SEQ ID NO: 382222 - RNA, 32 nt, Human
ccuggcgcgguggcucacaccuguaaucccag

SEQ ID NO: 382223 - RNA, 32 nt, Human
ccuggcgcgguggcucaggccuguaaucccag

SEQ ID NO: 382224 - RNA, 32 nt, Human
ccuggcgcgguggcucaugccuguaaucauag

SEQ ID NO: 382225 - RNA, 21 nt, Human
ccuggcgcguacggccugcca

SEQ ID NO: 382226 - RNA, 22 nt, Human
ccuggcgcugagucacaggagc

SEQ ID NO: 382227 - RNA, 18 nt, Human
ccuggcggaacacacugg

SEQ ID NO: 382228 - RNA, 18 nt, Human
ccuggcggaagggugcgg

SEQ ID NO: 382229 - RNA, 32 nt, Human
ccuggcggacagcucccuucugaagcagagaa

SEQ ID NO: 382230 - RNA, 19 nt, Human
ccuggcggacgggacccag

SEQ ID NO: 382231 - RNA, 20 nt, Human
ccuggcggagacggcggcag

SEQ ID NO: 382232 - RNA, 32 nt, Human
ccuggcggagacggcggcaggagcugggccca

SEQ ID NO: 382233 - RNA, 18 nt, Human
ccuggcggagcaggucag

SEQ ID NO: 382234 - RNA, 18 nt, Human
ccuggcggagggaugcag

SEQ ID NO: 382235 - RNA, 20 nt, Human
ccuggcggagucggcggcgg

SEQ ID NO: 382236 - RNA, 18 nt, Human
ccuggcggaucuggucag

SEQ ID NO: 382237 - RNA, 20 nt, Human
ccuggcggcagagguugcag

SEQ ID NO: 382238 - RNA, 23 nt, Human
ccuggcggcagagguugcaguga

SEQ ID NO: 382239 - RNA, 32 nt, Human
ccuggcggcaggaagccaaagagacugggccu

SEQ ID NO: 382240 - RNA, 19 nt, Human
ccuggcggcaggggcgggg

SEQ ID NO: 382241 - RNA, 32 nt, Human
ccuggcggccacccccucuuccucacuucccu

SEQ ID NO: 382242 - RNA, 32 nt, Human
ccuggcggcgcaucccuccucucccaccuccu

SEQ ID NO: 382243 - RNA, 19 nt, Human
ccuggcggcgccuccuucu

SEQ ID NO: 382244 - RNA, 19 nt, Human
ccuggcggcggcggcgcgg

SEQ ID NO: 382245 - RNA, 18 nt, Human
ccuggcgggaaucgacgg

SEQ ID NO: 382246 - RNA, 18 nt, Human
ccuggcgggaccccgcag

SEQ ID NO: 382247 - RNA, 18 nt, Human
ccuggcgggacgucgcgg

SEQ ID NO: 382248 - RNA, 18 nt, Human
ccuggcgggagcgcgcgg

SEQ ID NO: 382249 - RNA, 19 nt, Human
ccuggcgggaggaagccca

SEQ ID NO: 382250 - RNA, 18 nt, Human
ccuggcgggaggcagcgc

SEQ ID NO: 382251 - RNA, 18 nt, Human
ccuggcgggcaagggggc

SEQ ID NO: 382252 - RNA, 25 nt, Human
ccuggcgggcccucuccccaccuca

SEQ ID NO: 382253 - RNA, 20 nt, Human
ccuggcgggccugggggcgc

SEQ ID NO: 382254 - RNA, 19 nt, Human
ccuggcggggacggugcag

SEQ ID NO: 382255 - RNA, 32 nt, Human
ccuggcggggcugaaauuggaaccugggccuc

SEQ ID NO: 382256 - RNA, 19 nt, Human
ccuggcggggguccagcag

SEQ ID NO: 382257 - RNA, 20 nt, Human
ccuggcgggguggggugggg

SEQ ID NO: 382258 - RNA, 19 nt, Human
ccuggcgggucgcggccgg

SEQ ID NO: 382259 - RNA, 20 nt, Human
ccuggcgggugagagugcag

SEQ ID NO: 382260 - RNA, 32 nt, Human
ccuggcggucucccccuuagauccgcgcuauc

SEQ ID NO: 382261 - RNA, 18 nt, Human
ccuggcggugcgggucag

SEQ ID NO: 382262 - RNA, 19 nt, Human
ccuggcgucgcggggcgua

SEQ ID NO: 382263 - RNA, 32 nt, Human
ccuggcgucuguccucaccaugccuagccuuu

SEQ ID NO: 382264 - RNA, 32 nt, Human
ccuggcgugaggaggugugggauuucugcuac

SEQ ID NO: 382265 - RNA, 32 nt, Human
ccuggcgugauccagucagaucaagccuccug

SEQ ID NO: 382266 - RNA, 32 nt, Human
ccuggcguggagucuugaggccugcugagggc

SEQ ID NO: 382267 - RNA, 20 nt, Human
ccuggcguggcaggaagcgc

SEQ ID NO: 382268 - RNA, 32 nt, Human
ccuggcgugguggcaggugccuguaaucccag

SEQ ID NO: 382269 - RNA, 32 nt, Human
ccuggcgugguggcgcaugccuguaaucccag

SEQ ID NO: 382270 - RNA, 32 nt, Human
ccuggcgugguggcucaugccuguaaucccag

SEQ ID NO: 382271 - RNA, 32 nt, Human
ccuggcgugguggugcacaccuguaaucccag

SEQ ID NO: 382272 - RNA, 32 nt, Human
ccuggcguuaucaaagcaaaucaaagccuuuc

SEQ ID NO: 382273 - RNA, 32 nt, Human
ccuggcguugagcucggccggcccggagcgcg

SEQ ID NO: 382274 - RNA, 19 nt, Human
ccuggcuaacauggugaaa

SEQ ID NO: 382275 - RNA, 19 nt, Human
ccuggcuaagcaggggcug

SEQ ID NO: 382276 - RNA, 24 nt, Human
ccuggcuaauugccuguucuuuuc

SEQ ID NO: 382277 - RNA, 32 nt, Human
ccuggcuacauggugaaaccccgucucuauaa

SEQ ID NO: 382278 - RNA, 32 nt, Human
ccuggcuacggggaguggaggcucccacgagg

SEQ ID NO: 382279 - RNA, 32 nt, Human
ccuggcuacucaggaggccgaggcagaagaau

SEQ ID NO: 382280 - RNA, 27 nt, Human
ccuggcuacuccgagccaaggcacuga

SEQ ID NO: 382281 - RNA, 21 nt, Human
ccuggcuacucgggaggcuga

SEQ ID NO: 382282 - RNA, 21 nt, Human
ccuggcuacuugggaggcuga

SEQ ID NO: 382283 - RNA, 23 nt, Human
ccuggcuagcagaggccuggcca

SEQ ID NO: 382284 - RNA, 29 nt, Human
ccuggcuauggugaaaccccgucucuacu

SEQ ID NO: 382285 - RNA, 22 nt, Human
ccuggcuauuccaugcucaugg

SEQ ID NO: 382286 - RNA, 32 nt, Human
ccuggcucaagcaauucuccuaugucagccuc

SEQ ID NO: 382287 - RNA, 32 nt, Human
ccuggcucaagugauccucccaccucagccuu

SEQ ID NO: 382288 - RNA, 32 nt, Human
ccuggcucacccaccugguggagagaguagaa

SEQ ID NO: 382289 - RNA, 32 nt, Human
ccuggcucacccaggauggaaaacggcuuaaa

SEQ ID NO: 382290 - RNA, 32 nt, Human
ccuggcucaccuugugcuggggacagguccuc

SEQ ID NO: 382291 - RNA, 32 nt, Human
ccuggcucacugcaaacucugccucccagguu

SEQ ID NO: 382292 - RNA, 32 nt, Human
ccuggcucacugcaaccuccaccucccggguu

SEQ ID NO: 382293 - RNA, 32 nt, Human
ccuggcucacugcaacugcagccucccggguu

SEQ ID NO: 382294 - RNA, 32 nt, Human
ccuggcucacugcaaucuccaucucccggguu

SEQ ID NO: 382295 - RNA, 32 nt, Human
ccuggcucacugcaaucuccgccuccccaguu

SEQ ID NO: 382296 - RNA, 32 nt, Human
ccuggcucagccaaccuccuuccucccccggu

SEQ ID NO: 382297 - RNA, 20 nt, Human
ccuggcucaggccuggcgag

SEQ ID NO: 382298 - RNA, 22 nt, Human
ccuggcucaggcgggagugcgg

SEQ ID NO: 382299 - RNA, 32 nt, Human
ccuggcucagggaggaccucaggguuccugga

SEQ ID NO: 382300 - RNA, 24 nt, Human
ccuggcucaucucauugggacugg

SEQ ID NO: 382301 - RNA, 21 nt, Human
ccuggcuccaaacccucgagg

SEQ ID NO: 382302 - RNA, 32 nt, Human
ccuggcuccaccacuccuccagccagaggguc

SEQ ID NO: 382303 - RNA, 32 nt, Human
ccuggcuccagaaaacccgcgccccacauacc

SEQ ID NO: 382304 - RNA, 16 nt, Human
ccuggcuccagccucc

SEQ ID NO: 382305 - RNA, 32 nt, Human
ccuggcuccagccuccccuacccagggucucu

SEQ ID NO: 382306 - RNA, 32 nt, Human
ccuggcuccagccugaagugugggcacggcau

SEQ ID NO: 382307 - RNA, 18 nt, Human
ccuggcuccagggccaug

SEQ ID NO: 382308 - RNA, 32 nt, Human
ccuggcuccauggcauaaggaaagggagaugc

SEQ ID NO: 382309 - RNA, 22 nt, Human
ccuggcucccaagucuucaagg

SEQ ID NO: 382310 - RNA, 23 nt, Human
ccuggcucccaccagcucugagg

SEQ ID NO: 382311 - RNA, 22 nt, Human
ccuggcucccacgggauggagg

SEQ ID NO: 382312 - RNA, 32 nt, Human
ccuggcucccaucuccuccucaccuuuuguug

SEQ ID NO: 382313 - RNA, 24 nt, Human
ccuggcucccauucccugacaagg

SEQ ID NO: 382314 - RNA, 21 nt, Human
ccuggcuccccaggacacuca

SEQ ID NO: 382315 - RNA, 19 nt, Human
ccuggcuccccuccugccu

SEQ ID NO: 382316 - RNA, 21 nt, Human
ccuggcuccccuccugggagg

SEQ ID NO: 382317 - RNA, 32 nt, Human
ccuggcuccccucuucguuccuucccuggcug

SEQ ID NO: 382318 - RNA, 21 nt, Human
ccuggcuccccuggggugcag

SEQ ID NO: 382319 - RNA, 23 nt, Human
ccuggcucccggcggcccggagg

SEQ ID NO: 382320 - RNA, 32 nt, Human
ccuggcucccucacuccuggguuccaggucac

SEQ ID NO: 382321 - RNA, 21 nt, Human
ccuggcucccucccuaggagg

SEQ ID NO: 382322 - RNA, 32 nt, Human
ccuggcucccugcacugugcacgcuccucuuc

SEQ ID NO: 382323 - RNA, 22 nt, Human
ccuggcuccgcaccugcagagg

SEQ ID NO: 382324 - RNA, 32 nt, Human
ccuggcuccgcacggaggcuccugggucccgc

SEQ ID NO: 382325 - RNA, 23 nt, Human
ccuggcuccguggguccagugag

SEQ ID NO: 382326 - RNA, 32 nt, Human
ccuggcuccuaccuggaggacucaguuguucu

SEQ ID NO: 382327 - RNA, 32 nt, Human
ccuggcuccucacaucccagggguuggcuucu

SEQ ID NO: 382328 - RNA, 20 nt, Human
ccuggcuccuccuugcuccc

SEQ ID NO: 382329 - RNA, 24 nt, Human
ccuggcuccugacucucagagagg

SEQ ID NO: 382330 - RNA, 24 nt, Human
ccuggcuccuggcccgagccuggg

SEQ ID NO: 382331 - RNA, 24 nt, Human
ccuggcuccuggccgucugugagg

SEQ ID NO: 382332 - RNA, 20 nt, Human
ccuggcuccuggccugugag

SEQ ID NO: 382333 - RNA, 21 nt, Human
ccuggcuccugggcagugggg

SEQ ID NO: 382334 - RNA, 20 nt, Human
ccuggcuccugggggcgggg

SEQ ID NO: 382335 - RNA, 21 nt, Human
ccuggcuccuggucgggaagg

SEQ ID NO: 382336 - RNA, 32 nt, Human
ccuggcuccuuccagcguaaaccaguagugaa

SEQ ID NO: 382337 - RNA, 19 nt, Human
ccuggcuccuuucuacucc

SEQ ID NO: 382338 - RNA, 32 nt, Human
ccuggcucgaugucugcuucuucccagccugg

SEQ ID NO: 382339 - RNA, 22 nt, Human
ccuggcucggaccacugcaagg

SEQ ID NO: 382340 - RNA, 32 nt, Human
ccuggcucggccucccucacacugaccaaggg

SEQ ID NO: 382341 - RNA, 21 nt, Human
ccuggcucgggacgucugaga

SEQ ID NO: 382342 - RNA, 32 nt, Human
ccuggcucggggugggagugcagaggcaacca

SEQ ID NO: 382343 - RNA, 32 nt, Human
ccuggcucucagggugacgccacccacagaga

SEQ ID NO: 382344 - RNA, 32 nt, Human
ccuggcucuccccugggcacagugccacuccc

SEQ ID NO: 382345 - RNA, 32 nt, Human
ccuggcucuccucgugcagucaccccagugcc

SEQ ID NO: 382346 - RNA, 32 nt, Human
ccuggcucucucuuccccuccuuaccuggcca

SEQ ID NO: 382347 - RNA, 23 nt, Human
ccuggcucugcaaugggcacugg

SEQ ID NO: 382348 - RNA, 32 nt, Human
ccuggcucugcacuuuuccuccggggagaaag

SEQ ID NO: 382349 - RNA, 32 nt, Human
ccuggcucugccuuuuagauagcaggagcaaa

SEQ ID NO: 382350 - RNA, 32 nt, Human
ccuggcucugcugcucugaagcaccggagucg

SEQ ID NO: 382351 - RNA, 32 nt, Human
ccuggcucugcuguccccuuggcagguccugg

SEQ ID NO: 382352 - RNA, 20 nt, Human
ccuggcucugggggguggag

SEQ ID NO: 382353 - RNA, 32 nt, Human
ccuggcucuuggagaaaggcuucugggcccag

SEQ ID NO: 382354 - RNA, 32 nt, Human
ccuggcucuuucugauggugccuuugcuucug

SEQ ID NO: 382355 - RNA, 23 nt, Human
ccuggcugaccuuucuaucuucu

SEQ ID NO: 382356 - RNA, 32 nt, Human
ccuggcugacuggccaguugcccagagcacuu

SEQ ID NO: 382357 - RNA, 21 nt, Human
ccuggcugagaggaccaggga

SEQ ID NO: 382358 - RNA, 19 nt, Human
ccuggcugcacaggagccc

SEQ ID NO: 382359 - RNA, 17 nt, Human
ccuggcugcagaugcuu

SEQ ID NO: 382360 - RNA, 21 nt, Human
ccuggcugcaggcgggcgugg

SEQ ID NO: 382361 - RNA, 19 nt, Human
ccuggcugcauaacauggg

SEQ ID NO: 382362 - RNA, 32 nt, Human
ccuggcugcauauccagccucgagaaaauguc

SEQ ID NO: 382363 - RNA, 32 nt, Human
ccuggcugccaagccaugguaacuggaguuaa

SEQ ID NO: 382364 - RNA, 32 nt, Human
ccuggcugcccaggaaguagugucuucuuuug

SEQ ID NO: 382365 - RNA, 32 nt, Human
ccuggcugcccaggcggagcugccucuucucc

SEQ ID NO: 382366 - RNA, 31 nt, Human
ccuggcugccucuggggucgagggucugggu

SEQ ID NO: 382367 - RNA, 32 nt, Human
ccuggcugccugacaucagugaagaccugcug

SEQ ID NO: 382368 - RNA, 21 nt, Human
ccuggcugcuccagcuccuga

SEQ ID NO: 382369 - RNA, 24 nt, Human
ccuggcugcucgcaucugcaggaa

SEQ ID NO: 382370 - RNA, 21 nt, Human
ccuggcugcuggaaaaaccag

SEQ ID NO: 382371 - RNA, 22 nt, Human
ccuggcugcuugcugucuguga

SEQ ID NO: 382372 - RNA, 18 nt, Human
ccuggcuggaaagcuuug

SEQ ID NO: 382373 - RNA, 21 nt, Human
ccuggcuggaagcucuuuucu

SEQ ID NO: 382374 - RNA, 19 nt, Human
ccuggcuggagugcagugg

SEQ ID NO: 382375 - RNA, 32 nt, Human
ccuggcuggaugcuuccugucccuggaacucu

SEQ ID NO: 382376 - RNA, 20 nt, Human
ccuggcuggcaggggugcug

SEQ ID NO: 382377 - RNA, 32 nt, Human
ccuggcuggcauggaaauacagugggaaaacc

SEQ ID NO: 382378 - RNA, 32 nt, Human
ccuggcuggccaggacacacugaaaagcagcc

SEQ ID NO: 382379 - RNA, 20 nt, Human
ccuggcuggcggggacgcgg

SEQ ID NO: 382380 - RNA, 18 nt, Human
ccuggcuggcgggggcgc

SEQ ID NO: 382381 - RNA, 23 nt, Human
ccuggcugggaaagggggugugg

SEQ ID NO: 382382 - RNA, 17 nt, Human
ccuggcugggagggcag

SEQ ID NO: 382383 - RNA, 32 nt, Human
ccuggcugggcaugggauggugaccucagcug

SEQ ID NO: 382384 - RNA, 32 nt, Human
ccuggcugggccagaccccaggaagguggggu

SEQ ID NO: 382385 - RNA, 21 nt, Human
ccuggcugggccgggcacuga

SEQ ID NO: 382386 - RNA, 32 nt, Human
ccuggcugggcugagucaggaccuugccggga

SEQ ID NO: 382387 - RNA, 21 nt, Human
ccuggcuggggagggggccag

SEQ ID NO: 382388 - RNA, 32 nt, Human
ccuggcuggggaugguggcucacaccugugau

SEQ ID NO: 382389 - RNA, 32 nt, Human
ccuggcugggugaggcggcucacaccuguaau

SEQ ID NO: 382390 - RNA, 32 nt, Human
ccuggcuggucugucuuuucuccauuuguuua

SEQ ID NO: 382391 - RNA, 32 nt, Human
ccuggcuguagccuaggucuugagugaacccc

SEQ ID NO: 382392 - RNA, 32 nt, Human
ccuggcugucaccuuuuuaauuuccagaacug

SEQ ID NO: 382393 - RNA, 31 nt, Human
ccuggcugucugagugggcacuugucuggcu

SEQ ID NO: 382394 - RNA, 32 nt, Human
ccuggcugucugucugucugucuaaccuggca

SEQ ID NO: 382395 - RNA, 32 nt, Human
ccuggcugugaaggcagcugcacagggcuagg

SEQ ID NO: 382396 - RNA, 32 nt, Human
ccuggcugugagcagccuccacuguguccaga

SEQ ID NO: 382397 - RNA, 32 nt, Human
ccuggcugugccaggaccacaccuaccaaggc

SEQ ID NO: 382398 - RNA, 32 nt, Human
ccuggcugugccugugacuccagaguccuauc

SEQ ID NO: 382399 - RNA, 21 nt, Human
ccuggcuguggcgucugugag

SEQ ID NO: 382400 - RNA, 21 nt, Human
ccuggcugugguugcuucucu

SEQ ID NO: 382401 - RNA, 32 nt, Human
ccuggcuguguacgugggugugcagugcacgu

SEQ ID NO: 382402 - RNA, 32 nt, Human
ccuggcuguucacuucccugccauucaguaug

SEQ ID NO: 382403 - RNA, 32 nt, Human
ccuggcuguuuaucugccccaaaggagaagcc

SEQ ID NO: 382404 - RNA, 32 nt, Human
ccuggcuuacccacuuagacugccuccguuuc

SEQ ID NO: 382405 - RNA, 32 nt, Human
ccuggcuuagugccuggcaacgcccaguuccu

SEQ ID NO: 382406 - RNA, 32 nt, Human
ccuggcuucagagcuggagugccuggggccac

SEQ ID NO: 382407 - RNA, 23 nt, Human
ccuggcuucaggagggagcggag

SEQ ID NO: 382408 - RNA, 32 nt, Human
ccuggcuucaggagggagcggagcagccauuc

SEQ ID NO: 382409 - RNA, 24 nt, Human
ccuggcuucagugcaacucuuuuc

SEQ ID NO: 382410 - RNA, 32 nt, Human
ccuggcuucaugccaggggcugcucugguugc

SEQ ID NO: 382411 - RNA, 32 nt, Human
ccuggcuuccacccuccccagcuccugcacuu

SEQ ID NO: 382412 - RNA, 32 nt, Human
ccuggcuuccuggguggcggugcggacugaug

SEQ ID NO: 382413 - RNA, 23 nt, Human
ccuggcuucucugguucuucccu

SEQ ID NO: 382414 - RNA, 32 nt, Human
ccuggcuucuguggccugggcguguuguggac

SEQ ID NO: 382415 - RNA, 32 nt, Human
ccuggcuucuuacugcggcuucauacugaggg

SEQ ID NO: 382416 - RNA, 32 nt, Human
ccuggcuucuucacugcgugccugugugcugg

SEQ ID NO: 382417 - RNA, 32 nt, Human
ccuggcuucuucuaucuggaaguguccguggu

SEQ ID NO: 382418 - RNA, 32 nt, Human
ccuggcuugaagcugcucacugcucacacgcu

SEQ ID NO: 382419 - RNA, 32 nt, Human
ccuggcuugacaggcuuggucucugcaagugg

SEQ ID NO: 382420 - RNA, 32 nt, Human
ccuggcuugcacucccuguccugcugcccugu

SEQ ID NO: 382421 - RNA, 31 nt, Human
ccuggcuugcccucugggccuuugcuccccc

SEQ ID NO: 382422 - RNA, 32 nt, Human
ccuggcuuggggugucauucugccuggcggcc

SEQ ID NO: 382423 - RNA, 32 nt, Human
ccuggcuuuaaugugagaguuauguggaaugg

SEQ ID NO: 382424 - RNA, 32 nt, Human
ccuggcuuuccuucuggcguggggccagcucc

SEQ ID NO: 382425 - RNA, 32 nt, Human
ccuggcuuucuagccacauucugcaccuccuu

SEQ ID NO: 382426 - RNA, 32 nt, Human
ccuggcuuucuccuuauuguuuacagauguag

SEQ ID NO: 382427 - RNA, 32 nt, Human
ccuggcuuugaaguggagucugugacugcucu

SEQ ID NO: 382428 - RNA, 32 nt, Human
ccuggcuuugcaccugguggcuauuacaaagc

SEQ ID NO: 382429 - RNA, 32 nt, Human
ccuggcuuuggggcaagacugagccacggggg

SEQ ID NO: 382430 - RNA, 32 nt, Human
ccugggaaaacuaaccaucucagucuuuccug

SEQ ID NO: 382431 - RNA, 32 nt, Human
ccugggaaaaggaacacagcugugccuggaac

SEQ ID NO: 382432 - RNA, 32 nt, Human
ccugggaaacauagcaagacccugucucuaca

SEQ ID NO: 382433 - RNA, 32 nt, Human
ccugggaaaccagcuggggcugcacagggcca

SEQ ID NO: 382434 - RNA, 17 nt, Human
ccugggaaaccauccag

SEQ ID NO: 382435 - RNA, 21 nt, Human
ccugggaaagcguccaugcuu

SEQ ID NO: 382436 - RNA, 32 nt, Human
ccugggaaaugaggauaaagaaaaucgagagu

SEQ ID NO: 382437 - RNA, 32 nt, Human
ccugggaaauguuuuccugaugaauuucuccu

SEQ ID NO: 382438 - RNA, 18 nt, Human
ccugggaacacaaacgug

SEQ ID NO: 382439 - RNA, 32 nt, Human
ccugggaacagcccuggcuugguucaggccgc

SEQ ID NO: 382440 - RNA, 18 nt, Human
ccugggaacaggcagagg

SEQ ID NO: 382441 - RNA, 32 nt, Human
ccugggaacauguaggguggggaguaugagca

SEQ ID NO: 382442 - RNA, 20 nt, Human
ccugggaaccacaauuaugg

SEQ ID NO: 382443 - RNA, 32 nt, Human
ccugggaacccaucccacacaccagcugugug

SEQ ID NO: 382444 - RNA, 18 nt, Human
ccugggaaccgcuugugg

SEQ ID NO: 382445 - RNA, 32 nt, Human
ccugggaaccuaacgaggagagcccaggccua

SEQ ID NO: 382446 - RNA, 18 nt, Human
ccugggaacguuauaugg

SEQ ID NO: 382447 - RNA, 18 nt, Human
ccugggaacuaacacgug

SEQ ID NO: 382448 - RNA, 24 nt, Human
ccugggaacucaaggcugcaguga

SEQ ID NO: 382449 - RNA, 18 nt, Human
ccugggaacugacagagg

SEQ ID NO: 382450 - RNA, 18 nt, Human
ccugggaacuggcaaugg

SEQ ID NO: 382451 - RNA, 20 nt, Human
ccugggaacugggggugcgg

SEQ ID NO: 382452 - RNA, 18 nt, Human
ccugggaagacguucugg

SEQ ID NO: 382453 - RNA, 18 nt, Human
ccugggaagacugugugg

SEQ ID NO: 382454 - RNA, 19 nt, Human
ccugggaagaggcucagca

SEQ ID NO: 382455 - RNA, 24 nt, Human
ccugggaagcagagguugcaguga

SEQ ID NO: 382456 - RNA, 24 nt, Human
ccugggaagcagaguuugcaguga

SEQ ID NO: 382457 - RNA, 32 nt, Human
ccugggaagcagaguuugcagugagccaagau

SEQ ID NO: 382458 - RNA, 32 nt, Human
ccugggaagcggagcucgcagugagccgagau

SEQ ID NO: 382459 - RNA, 32 nt, Human
ccugggaaggagagacgaggaggcaugccuuc

SEQ ID NO: 382460 - RNA, 18 nt, Human
ccugggaaggcucugugg

SEQ ID NO: 382461 - RNA, 18 nt, Human
ccugggaagggcagcugg

SEQ ID NO: 382462 - RNA, 32 nt, Human
ccugggaaggucuggagguuccuguggaccuc

SEQ ID NO: 382463 - RNA, 32 nt, Human
ccugggaagugaggggacgaagccuuagaggg

SEQ ID NO: 382464 - RNA, 24 nt, Human
ccugggaaguggaagcugcaguga

SEQ ID NO: 382465 - RNA, 32 nt, Human
ccugggaaguggaagcugcagugagccgagau

SEQ ID NO: 382466 - RNA, 24 nt, Human
ccugggaaguggaaguugcaguga

SEQ ID NO: 382467 - RNA, 32 nt, Human
ccugggaaguggaggcugcagugagcccagau

SEQ ID NO: 382468 - RNA, 32 nt, Human
ccugggaaguggaggcugcagugagccgagau

SEQ ID NO: 382469 - RNA, 32 nt, Human
ccugggaaguggaggcugcagugagccuaggu

SEQ ID NO: 382470 - RNA, 24 nt, Human
ccugggaaguggagguuacaguga

SEQ ID NO: 382471 - RNA, 22 nt, Human
ccugggaaguggagguugcagu

SEQ ID NO: 382472 - RNA, 24 nt, Human
ccugggaaguugaggcugcaguga

SEQ ID NO: 382473 - RNA, 18 nt, Human
ccugggaaucagcauggg

SEQ ID NO: 382474 - RNA, 18 nt, Human
ccugggaaucccggugug

SEQ ID NO: 382475 - RNA, 21 nt, Human
ccugggaaucggagguugcag

SEQ ID NO: 382476 - RNA, 32 nt, Human
ccugggaaugagauuaaaggaggcagggaggu

SEQ ID NO: 382477 - RNA, 19 nt, Human
ccugggaauggcacagugg

SEQ ID NO: 382478 - RNA, 32 nt, Human
ccugggaaugugacuuuaauuuggaaauagug

SEQ ID NO: 382479 - RNA, 20 nt, Human
ccugggaaugugauaugagg

SEQ ID NO: 382480 - RNA, 18 nt, Human
ccugggaauuuaccuggg

SEQ ID NO: 382481 - RNA, 22 nt, Human
ccugggacaacagguguagugg

SEQ ID NO: 382482 - RNA, 32 nt, Human
ccugggacaagccuggguggaauucuauauug

SEQ ID NO: 382483 - RNA, 32 nt, Human
ccugggacaauagugugcaugccacccggggu

SEQ ID NO: 382484 - RNA, 32 nt, Human
ccugggacaccuuuguuccagccugguuuccu

SEQ ID NO: 382485 - RNA, 32 nt, Human
ccugggacaggcuggggccaggaggcagaaac

SEQ ID NO: 382486 - RNA, 19 nt, Human
ccugggacaggggcaggug

SEQ ID NO: 382487 - RNA, 32 nt, Human
ccugggacagggucaguacaagucaggacagg

SEQ ID NO: 382488 - RNA, 24 nt, Human
ccugggacauugaggcugcaguga

SEQ ID NO: 382489 - RNA, 32 nt, Human
ccugggaccacagagggcaggagcuugcacga

SEQ ID NO: 382490 - RNA, 32 nt, Human
ccugggaccacagauuuggacaggaagggcuc

SEQ ID NO: 382491 - RNA, 19 nt, Human
ccugggaccagcagagugg

SEQ ID NO: 382492 - RNA, 32 nt, Human
ccugggaccagccugguaccccugggcgggag

SEQ ID NO: 382493 - RNA, 24 nt, Human
ccugggacccccuccccacugccu

SEQ ID NO: 382494 - RNA, 23 nt, Human
ccugggaccccucggccacugcc

SEQ ID NO: 382495 - RNA, 32 nt, Human
ccugggacccugaggaauucaccaggaguaaa

SEQ ID NO: 382496 - RNA, 20 nt, Human
ccugggacccuugcccugcc

SEQ ID NO: 382497 - RNA, 18 nt, Human
ccugggaccuacaugugg

SEQ ID NO: 382498 - RNA, 32 nt, Human
ccugggaccuccccagcccaggaaaaacugga

SEQ ID NO: 382499 - RNA, 32 nt, Human
ccugggaccugcaggcggcggcgcaggugggc

SEQ ID NO: 382500 - RNA, 20 nt, Human
ccugggaccugccacugugg

SEQ ID NO: 382501 - RNA, 32 nt, Human
ccugggaccuggggcaucuuugcccaccuuag

SEQ ID NO: 382502 - RNA, 32 nt, Human
ccugggaccuugcccaaguucaaagcggaggc

SEQ ID NO: 382503 - RNA, 32 nt, Human
ccugggacggcaucaacgcacugugagcacuc

SEQ ID NO: 382504 - RNA, 32 nt, Human
ccugggacgugagacuuagcuuccagccagug

SEQ ID NO: 382505 - RNA, 32 nt, Human
ccugggacuagugggaugagagacugagaaaa

SEQ ID NO: 382506 - RNA, 32 nt, Human
ccugggacugaggaggcaggggagggauaagg

SEQ ID NO: 382507 - RNA, 20 nt, Human
ccugggacugagggggccag

SEQ ID NO: 382508 - RNA, 32 nt, Human
ccugggacugcacgaugaacuauuggagcaua

SEQ ID NO: 382509 - RNA, 32 nt, Human
ccugggacugcacugcaugcaugugaagcccu

SEQ ID NO: 382510 - RNA, 32 nt, Human
ccugggacuuggguggcugagccgagguacuc

SEQ ID NO: 382511 - RNA, 32 nt, Human
ccugggagaaaagacccuggguucugagguaa

SEQ ID NO: 382512 - RNA, 32 nt, Human
ccugggagaagacguaucaaaagggauggcaa

SEQ ID NO: 382513 - RNA, 32 nt, Human
ccugggagaagaggaaaaaggagcuaauauuu

SEQ ID NO: 382514 - RNA, 21 nt, Human
ccugggagacagaagccucug

SEQ ID NO: 382515 - RNA, 18 nt, Human
ccugggagacagaaugug

SEQ ID NO: 382516 - RNA, 24 nt, Human
ccugggagacagagguugcaauga

SEQ ID NO: 382517 - RNA, 22 nt, Human
ccugggagacagagguugcagu

SEQ ID NO: 382518 - RNA, 24 nt, Human
ccugggagacagagguugcaguaa

SEQ ID NO: 382519 - RNA, 23 nt, Human
ccugggagacagagguugcagug

SEQ ID NO: 382520 - RNA, 24 nt, Human
ccugggagacagagguugcaguga

SEQ ID NO: 382521 - RNA, 18 nt, Human
ccugggagacagaugagg

SEQ ID NO: 382522 - RNA, 32 nt, Human
ccugggagacauccuugucuuugcaacuccaa

SEQ ID NO: 382523 - RNA, 18 nt, Human
ccugggagaccccuccag

SEQ ID NO: 382524 - RNA, 32 nt, Human
ccugggagacgagugaaggagccccagagucg

SEQ ID NO: 382525 - RNA, 32 nt, Human
ccugggagacggagcuugcagugagcugagau

SEQ ID NO: 382526 - RNA, 23 nt, Human
ccugggagacggagguugcagug

SEQ ID NO: 382527 - RNA, 24 nt, Human
ccugggagacggagguugcaguga

SEQ ID NO: 382528 - RNA, 32 nt, Human
ccugggagacggagguugcagugagccaagau

SEQ ID NO: 382529 - RNA, 32 nt, Human
ccugggagacggagguugcagugagccaugau

SEQ ID NO: 382530 - RNA, 32 nt, Human
ccugggagacuuuuccucccugccucagcucc

SEQ ID NO: 382531 - RNA, 32 nt, Human
ccugggagagaagaggaggaucucaucucuca

SEQ ID NO: 382532 - RNA, 18 nt, Human
ccugggagagacagaugg

SEQ ID NO: 382533 - RNA, 32 nt, Human
ccugggagagaggaagugaucgcucccggaga

SEQ ID NO: 382534 - RNA, 24 nt, Human
ccugggagaucaaggcuacaguga

SEQ ID NO: 382535 - RNA, 32 nt, Human
ccugggagaugaaccaagcaucaguugaggcu

SEQ ID NO: 382536 - RNA, 32 nt, Human
ccugggagaugagacaggguuagaggaaacag

SEQ ID NO: 382537 - RNA, 24 nt, Human
ccugggagauggaaguugcaguga

SEQ ID NO: 382538 - RNA, 23 nt, Human
ccugggagauggagauugcagug

SEQ ID NO: 382539 - RNA, 24 nt, Human
ccugggagauggagauugcaguga

SEQ ID NO: 382540 - RNA, 32 nt, Human
ccugggagauggagauugcagugagcagagau

SEQ ID NO: 382541 - RNA, 22 nt, Human
ccugggagauggaggcugcagu

SEQ ID NO: 382542 - RNA, 23 nt, Human
ccugggagauggagguugcagug

SEQ ID NO: 382543 - RNA, 24 nt, Human
ccugggagauggagguugcaguga

SEQ ID NO: 382544 - RNA, 32 nt, Human
ccugggagauggagguugcagugagccgagau

SEQ ID NO: 382545 - RNA, 32 nt, Human
ccugggagauggagguugcagugagcugagau

SEQ ID NO: 382546 - RNA, 24 nt, Human
ccugggagauggggguuguaguga

SEQ ID NO: 382547 - RNA, 32 nt, Human
ccugggagaugguggaggaugaagcccugauc

SEQ ID NO: 382548 - RNA, 24 nt, Human
ccugggagauugaggcugcaguga

SEQ ID NO: 382549 - RNA, 32 nt, Human
ccugggagcaggaagcccuaggaagaggggac

SEQ ID NO: 382550 - RNA, 23 nt, Human
ccugggagcaggagguugcagug

SEQ ID NO: 382551 - RNA, 24 nt, Human
ccugggagcaggagguugcaguga

SEQ ID NO: 382552 - RNA, 32 nt, Human
ccugggagcaggagguugcagugagccgaggu

SEQ ID NO: 382553 - RNA, 32 nt, Human
ccugggagcaucguccuguaaucaagggcaga

SEQ ID NO: 382554 - RNA, 32 nt, Human
ccugggagccacaggugccugcuucucccauc

SEQ ID NO: 382555 - RNA, 27 nt, Human
ccugggagccacugugccugugcuucu

SEQ ID NO: 382556 - RNA, 32 nt, Human
ccugggagccagcucuggaggguggucugggg

SEQ ID NO: 382557 - RNA, 23 nt, Human
ccugggagcccagggguuaggaa

SEQ ID NO: 382558 - RNA, 32 nt, Human
ccugggagcccagggguuaggaagggaagaua

SEQ ID NO: 382559 - RNA, 32 nt, Human
ccugggagccgccaccucccuuuccccaagac

SEQ ID NO: 382560 - RNA, 32 nt, Human
ccugggagccggaggcugcagugagccaagau

SEQ ID NO: 382561 - RNA, 18 nt, Human
ccugggagccugcgugug

SEQ ID NO: 382562 - RNA, 32 nt, Human
ccugggagcgcuaugggagacuggggcuuauu

SEQ ID NO: 382563 - RNA, 22 nt, Human
ccugggagcggagauugcagug

SEQ ID NO: 382564 - RNA, 23 nt, Human
ccugggagcggagauugcaguga

SEQ ID NO: 382565 - RNA, 32 nt, Human
ccugggagcuccugguuagcaagugagaucuc

SEQ ID NO: 382566 - RNA, 32 nt, Human
ccugggagcugaauuccaagcccaggguuugg

SEQ ID NO: 382567 - RNA, 32 nt, Human
ccugggagcugaugaagcaggugccagggcug

SEQ ID NO: 382568 - RNA, 32 nt, Human
ccugggagcugaugacccagugugcaaggcgc

SEQ ID NO: 382569 - RNA, 18 nt, Human
ccugggagcugggccaug

SEQ ID NO: 382570 - RNA, 22 nt, Human
ccugggagcugucugucuuucc

SEQ ID NO: 382571 - RNA, 32 nt, Human
ccugggagcuugcugggagccaccucccaggu

SEQ ID NO: 382572 - RNA, 22 nt, Human
ccugggaggaaagugggcgcag

SEQ ID NO: 382573 - RNA, 24 nt, Human
ccugggaggaagagguugcaguga

SEQ ID NO: 382574 - RNA, 32 nt, Human
ccugggaggaagagguugcagugagccgagau

SEQ ID NO: 382575 - RNA, 32 nt, Human
ccugggaggaaggcuccaaauucucacuacuu

SEQ ID NO: 382576 - RNA, 32 nt, Human
ccugggaggacccugagggagggucagggaug

SEQ ID NO: 382577 - RNA, 32 nt, Human
ccugggaggaccucagaccuccccagcccugg

SEQ ID NO: 382578 - RNA, 23 nt, Human
ccugggaggagaagguugcagug

SEQ ID NO: 382579 - RNA, 24 nt, Human
ccugggaggagaagguugcaguga

SEQ ID NO: 382580 - RNA, 32 nt, Human
ccugggaggagaagguuggaauggcgggggca

SEQ ID NO: 382581 - RNA, 32 nt, Human
ccugggaggagagaguagugacacucaggauc

SEQ ID NO: 382582 - RNA, 32 nt, Human
ccugggaggaggagcugagaccucaggggagg

SEQ ID NO: 382583 - RNA, 23 nt, Human
ccugggaggaggagguugcagug

SEQ ID NO: 382584 - RNA, 24 nt, Human
ccugggaggaggagguugcaguga

SEQ ID NO: 382585 - RNA, 32 nt, Human
ccugggaggaggagguugcagugagcugagau

SEQ ID NO: 382586 - RNA, 32 nt, Human
ccugggaggagguugagccuggggaaggaaaa

SEQ ID NO: 382587 - RNA, 32 nt, Human
ccugggaggaugugacgucaggugagaaggga

SEQ ID NO: 382588 - RNA, 23 nt, Human
ccugggaggcaaagguugcagug

SEQ ID NO: 382589 - RNA, 24 nt, Human
ccugggaggcaaagguugcaguga

SEQ ID NO: 382590 - RNA, 32 nt, Human
ccugggaggcaaagguugcagugagcugagau

SEQ ID NO: 382591 - RNA, 23 nt, Human
ccugggaggcaaagguugcggug

SEQ ID NO: 382592 - RNA, 24 nt, Human
ccugggaggcaaagguugcgguga

SEQ ID NO: 382593 - RNA, 23 nt, Human
ccugggaggcagaaguugcagug

SEQ ID NO: 382594 - RNA, 24 nt, Human
ccugggaggcagaaguugcaguga

SEQ ID NO: 382595 - RNA, 32 nt, Human
ccugggaggcagaaguugcagugagccgagau

SEQ ID NO: 382596 - RNA, 32 nt, Human
ccugggaggcagaaguugcagugagcugagau

SEQ ID NO: 382597 - RNA, 23 nt, Human
ccugggaggcagaaguuguggug

SEQ ID NO: 382598 - RNA, 24 nt, Human
ccugggaggcagaaguugugguga

SEQ ID NO: 382599 - RNA, 24 nt, Human
ccugggaggcagagauugcacuga

SEQ ID NO: 382600 - RNA, 23 nt, Human
ccugggaggcagagauugcagug

SEQ ID NO: 382601 - RNA, 24 nt, Human
ccugggaggcagagauugcaguga

SEQ ID NO: 382602 - RNA, 32 nt, Human
ccugggaggcagagauugcagugagccaagac

SEQ ID NO: 382603 - RNA, 32 nt, Human
ccugggaggcagagauugcagugagccgagau

SEQ ID NO: 382604 - RNA, 32 nt, Human
ccugggaggcagagauugcagugagcugagau

SEQ ID NO: 382605 - RNA, 32 nt, Human
ccugggaggcagagcuugcaguaagccgagau

SEQ ID NO: 382606 - RNA, 23 nt, Human
ccugggaggcagagcuugcagug

SEQ ID NO: 382607 - RNA, 24 nt, Human
ccugggaggcagagcuugcaguga

SEQ ID NO: 382608 - RNA, 32 nt, Human
ccugggaggcagagcuugcagugagccaagau

SEQ ID NO: 382609 - RNA, 32 nt, Human
ccugggaggcagagcuugcagugagccgagau

SEQ ID NO: 382610 - RNA, 32 nt, Human
ccugggaggcagagcuugcagugagccuagau

SEQ ID NO: 382611 - RNA, 32 nt, Human
ccugggaggcagagcuugcagugagcugagau

SEQ ID NO: 382612 - RNA, 32 nt, Human
ccugggaggcagagcuugcagugaguggagau

SEQ ID NO: 382613 - RNA, 32 nt, Human
ccugggaggcagaggcugcagugagccgagau

SEQ ID NO: 382614 - RNA, 21 nt, Human
ccugggaggcagagggugcag

SEQ ID NO: 382615 - RNA, 22 nt, Human
ccugggaggcagagggugcagu

SEQ ID NO: 382616 - RNA, 24 nt, Human
ccugggaggcagagggugcaguaa

SEQ ID NO: 382617 - RNA, 24 nt, Human
ccugggaggcagagguuacaauga

SEQ ID NO: 382618 - RNA, 24 nt, Human
ccugggaggcagagguuacaguga

SEQ ID NO: 382619 - RNA, 22 nt, Human
ccugggaggcagagguugcagu

SEQ ID NO: 382620 - RNA, 24 nt, Human
ccugggaggcagagguugcaguaa

SEQ ID NO: 382621 - RNA, 23 nt, Human
ccugggaggcagagguugcagug

SEQ ID NO: 382622 - RNA, 24 nt, Human
ccugggaggcagagguugcaguga

SEQ ID NO: 382623 - RNA, 32 nt, Human
ccugggaggcagagguugcagugaacagagau

SEQ ID NO: 382624 - RNA, 32 nt, Human
ccugggaggcagagguugcagugagccaagau

SEQ ID NO: 382625 - RNA, 32 nt, Human
ccugggaggcagagguugcagugagccaauau

SEQ ID NO: 382626 - RNA, 32 nt, Human
ccugggaggcagagguugcagugagccgagau

SEQ ID NO: 382627 - RNA, 32 nt, Human
ccugggaggcagagguugcagugagccgauau

SEQ ID NO: 382628 - RNA, 32 nt, Human
ccugggaggcagagguugcagugagcuaagac

SEQ ID NO: 382629 - RNA, 32 nt, Human
ccugggaggcagagguugcagugagcucagau

SEQ ID NO: 382630 - RNA, 32 nt, Human
ccugggaggcagagguugcagugagcugagac

SEQ ID NO: 382631 - RNA, 32 nt, Human
ccugggaggcagagguugcagugagcugagau

SEQ ID NO: 382632 - RNA, 32 nt, Human
ccugggaggcagagguugcagugagucgagau

SEQ ID NO: 382633 - RNA, 24 nt, Human
ccugggaggcagagguugcuguga

SEQ ID NO: 382634 - RNA, 24 nt, Human
ccugggaggcagagguuguagcga

SEQ ID NO: 382635 - RNA, 23 nt, Human
ccugggaggcagagguuguagug

SEQ ID NO: 382636 - RNA, 24 nt, Human
ccugggaggcagagguuguaguga

SEQ ID NO: 382637 - RNA, 23 nt, Human
ccugggaggcagagguuguggug

SEQ ID NO: 382638 - RNA, 24 nt, Human
ccugggaggcagagguugugguga

SEQ ID NO: 382639 - RNA, 24 nt, Human
ccugggaggcagagguuucaguga

SEQ ID NO: 382640 - RNA, 23 nt, Human
ccugggaggcagagucugcagug

SEQ ID NO: 382641 - RNA, 24 nt, Human
ccugggaggcagagucugcaguga

SEQ ID NO: 382642 - RNA, 32 nt, Human
ccugggaggcagagucugcagugagccgagau

SEQ ID NO: 382643 - RNA, 32 nt, Human
ccugggaggcagaguuuacagugagccgagau

SEQ ID NO: 382644 - RNA, 23 nt, Human
ccugggaggcagaguuugcagug

SEQ ID NO: 382645 - RNA, 24 nt, Human
ccugggaggcagaguuugcaguga

SEQ ID NO: 382646 - RNA, 32 nt, Human
ccugggaggcagaguuugcagugagccgagag

SEQ ID NO: 382647 - RNA, 32 nt, Human
ccugggaggcagaguuugcagugagcggagau

SEQ ID NO: 382648 - RNA, 23 nt, Human
ccugggaggcagauguugcagug

SEQ ID NO: 382649 - RNA, 24 nt, Human
ccugggaggcagauguugcaguga

SEQ ID NO: 382650 - RNA, 32 nt, Human
ccugggaggcagauguugcagugagccgagau

SEQ ID NO: 382651 - RNA, 20 nt, Human
ccugggaggcagauguugug

SEQ ID NO: 382652 - RNA, 24 nt, Human
ccugggaggcagauguugugguga

SEQ ID NO: 382653 - RNA, 19 nt, Human
ccugggaggcagcaucugg

SEQ ID NO: 382654 - RNA, 32 nt, Human
ccugggaggcagcaucugggggcaguggauag

SEQ ID NO: 382655 - RNA, 22 nt, Human
ccugggaggcagcgguugcagu

SEQ ID NO: 382656 - RNA, 19 nt, Human
ccugggaggcaggaggcgg

SEQ ID NO: 382657 - RNA, 21 nt, Human
ccugggaggcagggguugcag

SEQ ID NO: 382658 - RNA, 23 nt, Human
ccugggaggcagggguugcagug

SEQ ID NO: 382659 - RNA, 24 nt, Human
ccugggaggcagggguugcaguga

SEQ ID NO: 382660 - RNA, 32 nt, Human
ccugggaggcagggguugcagugagcugagac

SEQ ID NO: 382661 - RNA, 32 nt, Human
ccugggaggcauagguugcagugagccgagau

SEQ ID NO: 382662 - RNA, 26 nt, Human
ccugggaggcauuugggguugcagga

SEQ ID NO: 382663 - RNA, 32 nt, Human
ccugggaggccaagguugcagugagccgagau

SEQ ID NO: 382664 - RNA, 22 nt, Human
ccugggaggccucugcuuguca

SEQ ID NO: 382665 - RNA, 23 nt, Human
ccugggaggcgaagauugcagug

SEQ ID NO: 382666 - RNA, 24 nt, Human
ccugggaggcgaagauugcaguga

SEQ ID NO: 382667 - RNA, 32 nt, Human
ccugggaggcgaagauugcagugagcugaaau

SEQ ID NO: 382668 - RNA, 23 nt, Human
ccugggaggcgaagguugcagug

SEQ ID NO: 382669 - RNA, 24 nt, Human
ccugggaggcgaagguugcaguga

SEQ ID NO: 382670 - RNA, 32 nt, Human
ccugggaggcgaagguugcagugagccaagau

SEQ ID NO: 382671 - RNA, 32 nt, Human
ccugggaggcgaagguugcagugagcugagau

SEQ ID NO: 382672 - RNA, 24 nt, Human
ccugggaggcgcagguugcaggga

SEQ ID NO: 382673 - RNA, 23 nt, Human
ccugggaggcggaaguugcagug

SEQ ID NO: 382674 - RNA, 24 nt, Human
ccugggaggcggaaguugcaguga

SEQ ID NO: 382675 - RNA, 32 nt, Human
ccugggaggcggaaguugcagugagccaagau

SEQ ID NO: 382676 - RNA, 32 nt, Human
ccugggaggcggaaguugcagugagccgagau

SEQ ID NO: 382677 - RNA, 32 nt, Human
ccugggaggcggaaguugcagugagcugagau

SEQ ID NO: 382678 - RNA, 23 nt, Human
ccugggaggcggagaguacagug

SEQ ID NO: 382679 - RNA, 24 nt, Human
ccugggaggcggagaguacaguga

SEQ ID NO: 382680 - RNA, 32 nt, Human
ccugggaggcggagaguacagugagccaagau

SEQ ID NO: 382681 - RNA, 23 nt, Human
ccugggaggcggagauugcagug

SEQ ID NO: 382682 - RNA, 24 nt, Human
ccugggaggcggagauugcaguga

SEQ ID NO: 382683 - RNA, 32 nt, Human
ccugggaggcggagauugcagugaaccaagau

SEQ ID NO: 382684 - RNA, 32 nt, Human
ccugggaggcggagauugcagugagccgagau

SEQ ID NO: 382685 - RNA, 32 nt, Human
ccugggaggcggagauugcggugagccuagau

SEQ ID NO: 382686 - RNA, 23 nt, Human
ccugggaggcggagcuuacagug

SEQ ID NO: 382687 - RNA, 24 nt, Human
ccugggaggcggagcuuacaguga

SEQ ID NO: 382688 - RNA, 32 nt, Human
ccugggaggcggagcuuacagugaaccgagau

SEQ ID NO: 382689 - RNA, 24 nt, Human
ccugggaggcggagcuugcaauga

SEQ ID NO: 382690 - RNA, 22 nt, Human
ccugggaggcggagcuugcagu

SEQ ID NO: 382691 - RNA, 24 nt, Human
ccugggaggcggagcuugcaguaa

SEQ ID NO: 382692 - RNA, 32 nt, Human
ccugggaggcggagcuugcaguaagccgagac

SEQ ID NO: 382693 - RNA, 23 nt, Human
ccugggaggcggagcuugcagug

SEQ ID NO: 382694 - RNA, 24 nt, Human
ccugggaggcggagcuugcaguga

SEQ ID NO: 382695 - RNA, 32 nt, Human
ccugggaggcggagcuugcagugagccaaggu

SEQ ID NO: 382696 - RNA, 32 nt, Human
ccugggaggcggagcuugcagugagcccagau

SEQ ID NO: 382697 - RNA, 32 nt, Human
ccugggaggcggagcuugcagugagccgagac

SEQ ID NO: 382698 - RNA, 32 nt, Human
ccugggaggcggagcuugcagugagccgagau

SEQ ID NO: 382699 - RNA, 32 nt, Human
ccugggaggcggagcuugcagugagcugaaau

SEQ ID NO: 382700 - RNA, 32 nt, Human
ccugggaggcggagcuugcagugagcugagau

SEQ ID NO: 382701 - RNA, 23 nt, Human
ccugggaggcggagcuugcggug

SEQ ID NO: 382702 - RNA, 24 nt, Human
ccugggaggcggagcuugcgguga

SEQ ID NO: 382703 - RNA, 32 nt, Human
ccugggaggcggaggagguugcagugaacuga

SEQ ID NO: 382704 - RNA, 23 nt, Human
ccugggaggcggaggcugcagug

SEQ ID NO: 382705 - RNA, 24 nt, Human
ccugggaggcggaggcugcaguga

SEQ ID NO: 382706 - RNA, 32 nt, Human
ccugggaggcggaggcugcagugagccgagau

SEQ ID NO: 382707 - RNA, 32 nt, Human
ccugggaggcggaggcugcagugagcugggau

SEQ ID NO: 382708 - RNA, 21 nt, Human
ccugggaggcggagggugcgg

SEQ ID NO: 382709 - RNA, 23 nt, Human
ccugggaggcggagggugcggug

SEQ ID NO: 382710 - RNA, 24 nt, Human
ccugggaggcggagggugcgguga

SEQ ID NO: 382711 - RNA, 18 nt, Human
ccugggaggcggaggugg

SEQ ID NO: 382712 - RNA, 23 nt, Human
ccugggaggcggagguggcagug

SEQ ID NO: 382713 - RNA, 24 nt, Human
ccugggaggcggagguggcaguga

SEQ ID NO: 382714 - RNA, 32 nt, Human
ccugggaggcggagguuccagagagccaagau

SEQ ID NO: 382715 - RNA, 24 nt, Human
ccugggaggcggagguugcaauga

SEQ ID NO: 382716 - RNA, 32 nt, Human
ccugggaggcggagguugcaaugagccgagau

SEQ ID NO: 382717 - RNA, 24 nt, Human
ccugggaggcggagguugcagcga

SEQ ID NO: 382718 - RNA, 32 nt, Human
ccugggaggcggagguugcagggagcugagau

SEQ ID NO: 382719 - RNA, 22 nt, Human
ccugggaggcggagguugcagu

SEQ ID NO: 382720 - RNA, 32 nt, Human
ccugggaggcggagguugcaguaagcccagau

SEQ ID NO: 382721 - RNA, 32 nt, Human
ccugggaggcggagguugcagucagccaagau

SEQ ID NO: 382722 - RNA, 23 nt, Human
ccugggaggcggagguugcagug

SEQ ID NO: 382723 - RNA, 24 nt, Human
ccugggaggcggagguugcaguga

SEQ ID NO: 382724 - RNA, 32 nt, Human
ccugggaggcggagguugcagugaaccaagau

SEQ ID NO: 382725 - RNA, 32 nt, Human
ccugggaggcggagguugcagugagccaaaau

SEQ ID NO: 382726 - RNA, 32 nt, Human
ccugggaggcggagguugcagugagccaagau

SEQ ID NO: 382727 - RNA, 32 nt, Human
ccugggaggcggagguugcagugagccacugc

SEQ ID NO: 382728 - RNA, 32 nt, Human
ccugggaggcggagguugcagugagccgagac

SEQ ID NO: 382729 - RNA, 32 nt, Human
ccugggaggcggagguugcagugagccgagag

SEQ ID NO: 382730 - RNA, 32 nt, Human
ccugggaggcggagguugcagugagccgagau

SEQ ID NO: 382731 - RNA, 32 nt, Human
ccugggaggcggagguugcagugagccgaggu

SEQ ID NO: 382732 - RNA, 32 nt, Human
ccugggaggcggagguugcagugagccgcgau

SEQ ID NO: 382733 - RNA, 32 nt, Human
ccugggaggcggagguugcagugagcgagauc

SEQ ID NO: 382734 - RNA, 32 nt, Human
ccugggaggcggagguugcagugagcggagau

SEQ ID NO: 382735 - RNA, 32 nt, Human
ccugggaggcggagguugcagugagcuaagau

SEQ ID NO: 382736 - RNA, 32 nt, Human
ccugggaggcggagguugcagugagcugaaau

SEQ ID NO: 382737 - RNA, 32 nt, Human
ccugggaggcggagguugcagugagcugagac

SEQ ID NO: 382738 - RNA, 32 nt, Human
ccugggaggcggagguugcagugagcugagau

SEQ ID NO: 382739 - RNA, 32 nt, Human
ccugggaggcggagguugcagugagcuuagau

SEQ ID NO: 382740 - RNA, 32 nt, Human
ccugggaggcggagguugcagugagucgagau

SEQ ID NO: 382741 - RNA, 32 nt, Human
ccugggaggcggagguugcagugaguugagau

SEQ ID NO: 382742 - RNA, 32 nt, Human
ccugggaggcggagguugcaguggccgagauc

SEQ ID NO: 382743 - RNA, 23 nt, Human
ccugggaggcggagguugccgug

SEQ ID NO: 382744 - RNA, 24 nt, Human
ccugggaggcggagguugccguga

SEQ ID NO: 382745 - RNA, 32 nt, Human
ccugggaggcggagguugccgugagccgagau

SEQ ID NO: 382746 - RNA, 22 nt, Human
ccugggaggcggagguugcggu

SEQ ID NO: 382747 - RNA, 32 nt, Human
ccugggaggcggagguugcggucagcugagau

SEQ ID NO: 382748 - RNA, 23 nt, Human
ccugggaggcggagguugcggug

SEQ ID NO: 382749 - RNA, 24 nt, Human
ccugggaggcggagguugcgguga

SEQ ID NO: 382750 - RNA, 32 nt, Human
ccugggaggcggagguugcggugagcugagau

SEQ ID NO: 382751 - RNA, 23 nt, Human
ccugggaggcggagguugcugug

SEQ ID NO: 382752 - RNA, 24 nt, Human
ccugggaggcggagguugcuguga

SEQ ID NO: 382753 - RNA, 32 nt, Human
ccugggaggcggagguugcugugagcugagau

SEQ ID NO: 382754 - RNA, 23 nt, Human
ccugggaggcggagguuguagug

SEQ ID NO: 382755 - RNA, 32 nt, Human
ccugggaggcggagguuguagugagccaagau

SEQ ID NO: 382756 - RNA, 32 nt, Human
ccugggaggcggagguuguagugagccaaggu

SEQ ID NO: 382757 - RNA, 32 nt, Human
ccugggaggcggagguuguagugagccgagau

SEQ ID NO: 382758 - RNA, 20 nt, Human
ccugggaggcggagguugug

SEQ ID NO: 382759 - RNA, 24 nt, Human
ccugggaggcggagguugugauga

SEQ ID NO: 382760 - RNA, 32 nt, Human
ccugggaggcggagguugugaugagccaagau

SEQ ID NO: 382761 - RNA, 23 nt, Human
ccugggaggcggagguuguggug

SEQ ID NO: 382762 - RNA, 32 nt, Human
ccugggaggcggagguuguggugagccaagau

SEQ ID NO: 382763 - RNA, 32 nt, Human
ccugggaggcggagguuguggugagccgagau

SEQ ID NO: 382764 - RNA, 23 nt, Human
ccugggaggcggaguuugcagug

SEQ ID NO: 382765 - RNA, 24 nt, Human
ccugggaggcggaguuugcaguga

SEQ ID NO: 382766 - RNA, 22 nt, Human
ccugggaggcggaugacggugg

SEQ ID NO: 382767 - RNA, 23 nt, Human
ccugggaggcggauguugaagug

SEQ ID NO: 382768 - RNA, 24 nt, Human
ccugggaggcggauguugaaguga

SEQ ID NO: 382769 - RNA, 32 nt, Human
ccugggaggcggauguugaagugagcugagau

SEQ ID NO: 382770 - RNA, 23 nt, Human
ccugggaggcgggcgcggcagga

SEQ ID NO: 382771 - RNA, 24 nt, Human
ccugggaggcgggggccggcggga

SEQ ID NO: 382772 - RNA, 22 nt, Human
ccugggaggcgggggguugcag

SEQ ID NO: 382773 - RNA, 25 nt, Human
ccugggaggcgggggguugcaguga

SEQ ID NO: 382774 - RNA, 23 nt, Human
ccugggaggcugaaguugcagug

SEQ ID NO: 382775 - RNA, 24 nt, Human
ccugggaggcugaaguugcaguga

SEQ ID NO: 382776 - RNA, 32 nt, Human
ccugggaggcugaaguugcagugagccgagau

SEQ ID NO: 382777 - RNA, 32 nt, Human
ccugggaggcugagcuugcagugagcugagau

SEQ ID NO: 382778 - RNA, 23 nt, Human
ccugggaggcuggugggaggcag

SEQ ID NO: 382779 - RNA, 32 nt, Human
ccugggagggagaaggaguuggagcucaaguu

SEQ ID NO: 382780 - RNA, 32 nt, Human
ccugggagggagaaggggcuggagagggccug

SEQ ID NO: 382781 - RNA, 18 nt, Human
ccugggagggagugaugg

SEQ ID NO: 382782 - RNA, 24 nt, Human
ccugggagggcggagguugcagug

SEQ ID NO: 382783 - RNA, 25 nt, Human
ccugggagggcggagguugcaguga

SEQ ID NO: 382784 - RNA, 32 nt, Human
ccugggagggcggagguugcagugagccagga

SEQ ID NO: 382785 - RNA, 23 nt, Human
ccugggagggggagguugcagug

SEQ ID NO: 382786 - RNA, 24 nt, Human
ccugggagggggagguugcaguga

SEQ ID NO: 382787 - RNA, 24 nt, Human
ccugggagggggagguugccguga

SEQ ID NO: 382788 - RNA, 23 nt, Human
ccugggagguacagguugcagug

SEQ ID NO: 382789 - RNA, 24 nt, Human
ccugggagguacagguugcaguga

SEQ ID NO: 382790 - RNA, 24 nt, Human
ccugggagguagaaguugcaguga

SEQ ID NO: 382791 - RNA, 23 nt, Human
ccugggagguagagguugcagug

SEQ ID NO: 382792 - RNA, 24 nt, Human
ccugggagguagagguugcaguga

SEQ ID NO: 382793 - RNA, 32 nt, Human
ccugggagguagagguugcagugagccaauau

SEQ ID NO: 382794 - RNA, 32 nt, Human
ccugggagguagagguugcagugagccgagac

SEQ ID NO: 382795 - RNA, 32 nt, Human
ccugggagguagagguugcagugagccgagau

SEQ ID NO: 382796 - RNA, 22 nt, Human
ccugggaggucaaagcugcagu

SEQ ID NO: 382797 - RNA, 24 nt, Human
ccugggaggucaagauugcaguga

SEQ ID NO: 382798 - RNA, 22 nt, Human
ccugggaggucaaggcugcagu

SEQ ID NO: 382799 - RNA, 24 nt, Human
ccugggaggucaaggcugcaguga

SEQ ID NO: 382800 - RNA, 24 nt, Human
ccugggaggucgaggcugcaguga

SEQ ID NO: 382801 - RNA, 32 nt, Human
ccugggaggucgaggcugcagugagcugugau

SEQ ID NO: 382802 - RNA, 24 nt, Human
ccugggaggucgaggcuguaguga

SEQ ID NO: 382803 - RNA, 24 nt, Human
ccugggaggugaagguugcugugg

SEQ ID NO: 382804 - RNA, 23 nt, Human
ccugggaggugagguguguguga

SEQ ID NO: 382805 - RNA, 32 nt, Human
ccugggagguggaagcugcagugagccaagau

SEQ ID NO: 382806 - RNA, 23 nt, Human
ccugggagguggaaguugcagug

SEQ ID NO: 382807 - RNA, 24 nt, Human
ccugggagguggaaguugcaguga

SEQ ID NO: 382808 - RNA, 32 nt, Human
ccugggagguggaaguugcagugagccaagau

SEQ ID NO: 382809 - RNA, 32 nt, Human
ccugggagguggaaguugcagugagccgagau

SEQ ID NO: 382810 - RNA, 32 nt, Human
ccugggagguggaaguugcagugagcugagau

SEQ ID NO: 382811 - RNA, 32 nt, Human
ccugggagguggagacugcagugagccgagau

SEQ ID NO: 382812 - RNA, 23 nt, Human
ccugggagguggagauugcagug

SEQ ID NO: 382813 - RNA, 24 nt, Human
ccugggagguggagauugcaguga

SEQ ID NO: 382814 - RNA, 32 nt, Human
ccugggagguggagauugcagugagcccagau

SEQ ID NO: 382815 - RNA, 32 nt, Human
ccugggagguggagauugcagugagucaagau

SEQ ID NO: 382816 - RNA, 24 nt, Human
ccugggagguggagcuugcaguga

SEQ ID NO: 382817 - RNA, 32 nt, Human
ccugggagguggagcuugcagugaaccgagau

SEQ ID NO: 382818 - RNA, 32 nt, Human
ccugggagguggagcuugcagugagccgagau

SEQ ID NO: 382819 - RNA, 32 nt, Human
ccugggagguggagcuugcagugagcggacau

SEQ ID NO: 382820 - RNA, 32 nt, Human
ccugggagguggagcuugcagugagcugagau

SEQ ID NO: 382821 - RNA, 32 nt, Human
  misc_feature (21)..(21): n is a, c, g, or u
ccugggagguggagcuugcanugagccaaggu

SEQ ID NO: 382822 - RNA, 32 nt, Human
ccugggagguggaggcagugagcugagaucgu

SEQ ID NO: 382823 - RNA, 23 nt, Human
ccugggagguggaggcuacagug

SEQ ID NO: 382824 - RNA, 24 nt, Human
ccugggagguggaggcuacaguga

SEQ ID NO: 382825 - RNA, 32 nt, Human
ccugggagguggaggcuacagugagcugagau

SEQ ID NO: 382826 - RNA, 24 nt, Human
ccugggagguggagggagacagga

SEQ ID NO: 382827 - RNA, 32 nt, Human
ccugggagguggagguggcagugagccgagau

SEQ ID NO: 382828 - RNA, 32 nt, Human
ccugggagguggagguuacagugagccgagau

SEQ ID NO: 382829 - RNA, 20 nt, Human
ccugggagguggagguugca

SEQ ID NO: 382830 - RNA, 24 nt, Human
ccugggagguggagguugcaauga

SEQ ID NO: 382831 - RNA, 24 nt, Human
ccugggagguggagguugcagcga

SEQ ID NO: 382832 - RNA, 22 nt, Human
ccugggagguggagguugcagu

SEQ ID NO: 382833 - RNA, 23 nt, Human
ccugggagguggagguugcagug

SEQ ID NO: 382834 - RNA, 24 nt, Human
ccugggagguggagguugcaguga

SEQ ID NO: 382835 - RNA, 32 nt, Human
ccugggagguggagguugcagugagcagagac

SEQ ID NO: 382836 - RNA, 32 nt, Human
ccugggagguggagguugcagugagcagagau

SEQ ID NO: 382837 - RNA, 32 nt, Human
ccugggagguggagguugcagugagccaagau

SEQ ID NO: 382838 - RNA, 32 nt, Human
ccugggagguggagguugcagugagccgagaa

SEQ ID NO: 382839 - RNA, 32 nt, Human
ccugggagguggagguugcagugagccgagau

SEQ ID NO: 382840 - RNA, 32 nt, Human
ccugggagguggagguugcagugagccgagcu

SEQ ID NO: 382841 - RNA, 32 nt, Human
ccugggagguggagguugcagugagcuaagau

SEQ ID NO: 382842 - RNA, 32 nt, Human
ccugggagguggagguugcagugagcugagau

SEQ ID NO: 382843 - RNA, 32 nt, Human
ccugggagguggagguugcagugagcugagcu

SEQ ID NO: 382844 - RNA, 32 nt, Human
ccugggagguggagguugcagugagcugaggu

SEQ ID NO: 382845 - RNA, 32 nt, Human
ccugggagguggagguugcagugagcugugau

SEQ ID NO: 382846 - RNA, 32 nt, Human
ccugggagguggagguugcagugagucgagau

SEQ ID NO: 382847 - RNA, 32 nt, Human
ccugggagguggagguugcagugaguggagau

SEQ ID NO: 382848 - RNA, 32 nt, Human
ccugggagguggagguugcagugaguugagau

SEQ ID NO: 382849 - RNA, 24 nt, Human
ccugggagguggagguugcagugg

SEQ ID NO: 382850 - RNA, 32 nt, Human
ccugggagguggagguugcagugggccaagau

SEQ ID NO: 382851 - RNA, 32 nt, Human
ccugggagguggagguugcagugggcuaagau

SEQ ID NO: 382852 - RNA, 32 nt, Human
ccugggagguggagguugcagugggcugagau

SEQ ID NO: 382853 - RNA, 24 nt, Human
ccugggagguggagguugccagug

SEQ ID NO: 382854 - RNA, 32 nt, Human
ccugggagguggagguugccagugagucgaga

SEQ ID NO: 382855 - RNA, 23 nt, Human
ccugggagguggagguugcggug

SEQ ID NO: 382856 - RNA, 24 nt, Human
ccugggagguggagguugcgguga

SEQ ID NO: 382857 - RNA, 24 nt, Human
ccugggagguggagguugcuguga

SEQ ID NO: 382858 - RNA, 24 nt, Human
ccugggagguggagguuucaguga

SEQ ID NO: 382859 - RNA, 32 nt, Human
ccugggagguggagguuucagugagccaagau

SEQ ID NO: 382860 - RNA, 32 nt, Human
ccugggagguggagguuucagugagcugggau

SEQ ID NO: 382861 - RNA, 22 nt, Human
ccugggagguggaguugcagug

SEQ ID NO: 382862 - RNA, 32 nt, Human
ccugggagguggaguuugcagugagcuaagau

SEQ ID NO: 382863 - RNA, 24 nt, Human
ccugggagguggauguugcaguga

SEQ ID NO: 382864 - RNA, 32 nt, Human
ccugggagguggauguugcagugagcugagac

SEQ ID NO: 382865 - RNA, 32 nt, Human
ccugggagguggauguugcagugagcugagau

SEQ ID NO: 382866 - RNA, 21 nt, Human
ccugggagguggggguugcag

SEQ ID NO: 382867 - RNA, 24 nt, Human
ccugggagguggggguugcaggga

SEQ ID NO: 382868 - RNA, 32 nt, Human
ccugggagguggggguuucagugagcugagau

SEQ ID NO: 382869 - RNA, 32 nt, Human
ccugggaggugggucuccuaagccucaggcac

SEQ ID NO: 382870 - RNA, 23 nt, Human
ccugggagguggugguugcagug

SEQ ID NO: 382871 - RNA, 24 nt, Human
ccugggagguggugguugcaguga

SEQ ID NO: 382872 - RNA, 32 nt, Human
ccugggagguggugguugcagugagcugagau

SEQ ID NO: 382873 - RNA, 23 nt, Human
ccugggagguugaggcugcagug

SEQ ID NO: 382874 - RNA, 24 nt, Human
ccugggagguugaggcugcaguga

SEQ ID NO: 382875 - RNA, 32 nt, Human
ccugggagguugaggcugcagugagccaugau

SEQ ID NO: 382876 - RNA, 32 nt, Human
ccugggagguugaggcugcagugagcuguguu

SEQ ID NO: 382877 - RNA, 24 nt, Human
ccugggagguugugguugcaguga

SEQ ID NO: 382878 - RNA, 18 nt, Human
ccugggaguagaaggugg

SEQ ID NO: 382879 - RNA, 32 nt, Human
ccugggaguagacagucuucuacuuucuaaaa

SEQ ID NO: 382880 - RNA, 24 nt, Human
ccugggagucaaagguugcaguga

SEQ ID NO: 382881 - RNA, 32 nt, Human
ccugggagucagcucuggaggguggccugggg

SEQ ID NO: 382882 - RNA, 32 nt, Human
ccugggagucccggaggccaggcugcacaccu

SEQ ID NO: 382883 - RNA, 23 nt, Human
ccugggagugagggugggugugg

SEQ ID NO: 382884 - RNA, 32 nt, Human
ccugggagugcuaugggagacuggggucuauu

SEQ ID NO: 382885 - RNA, 25 nt, Human
ccugggaguggaacagcagcaguua

SEQ ID NO: 382886 - RNA, 19 nt, Human
ccugggagugggggugcag

SEQ ID NO: 382887 - RNA, 18 nt, Human
ccugggaguguaauaugu

SEQ ID NO: 382888 - RNA, 23 nt, Human
ccugggaguuagagguugcagug

SEQ ID NO: 382889 - RNA, 24 nt, Human
ccugggaguuagagguugcaguga

SEQ ID NO: 382890 - RNA, 24 nt, Human
ccugggaguucgaggcugcaguga

SEQ ID NO: 382891 - RNA, 32 nt, Human
ccugggaguucgaggcugcagugagcaaugau

SEQ ID NO: 382892 - RNA, 23 nt, Human
ccugggaguuggagguugcagug

SEQ ID NO: 382893 - RNA, 24 nt, Human
ccugggaguuggagguugcaguga

SEQ ID NO: 382894 - RNA, 24 nt, Human
ccugggaguuugaggcugcaguga

SEQ ID NO: 382895 - RNA, 32 nt, Human
ccugggauacacuggauuuagcaaagaucguu

SEQ ID NO: 382896 - RNA, 18 nt, Human
ccugggauaugaugugug

SEQ ID NO: 382897 - RNA, 32 nt, Human
ccugggaucacacugagcuugccacaucccca

SEQ ID NO: 382898 - RNA, 19 nt, Human
ccugggaucagccugacca

SEQ ID NO: 382899 - RNA, 32 nt, Human
ccugggaucaggaguccaagaucagccuggcc

SEQ ID NO: 382900 - RNA, 32 nt, Human
ccugggaucccucugucaaccccacgccuuuu

SEQ ID NO: 382901 - RNA, 32 nt, Human
ccugggaucugaguuucugcaggucauuugua

SEQ ID NO: 382902 - RNA, 32 nt, Human
ccugggauggaaggugaagucuugccaaagaa

SEQ ID NO: 382903 - RNA, 32 nt, Human
ccugggauggagcccaucucuccaguuccucc

SEQ ID NO: 382904 - RNA, 32 nt, Human
ccugggauggggaagagaguuauacagcaggg

SEQ ID NO: 382905 - RNA, 19 nt, Human
ccugggauggggcaugugg

SEQ ID NO: 382906 - RNA, 32 nt, Human
ccugggaugguggaguucuuuccaaggauacc

SEQ ID NO: 382907 - RNA, 32 nt, Human
ccugggauguaggcgcuggagcuccaguuccc

SEQ ID NO: 382908 - RNA, 24 nt, Human
ccugggauguggagguugcaguga

SEQ ID NO: 382909 - RNA, 32 nt, Human
ccugggauguggagguugcagugagccaagau

SEQ ID NO: 382910 - RNA, 32 nt, Human
ccugggauuaggugaaaaaugucuagcaaaag

SEQ ID NO: 382911 - RNA, 32 nt, Human
ccugggauucauggccaccacccggcucgacg

SEQ ID NO: 382912 - RNA, 22 nt, Human
ccugggauucccaacaggugga

SEQ ID NO: 382913 - RNA, 32 nt, Human
ccugggauuccuagccgaggccagucugcugc

SEQ ID NO: 382914 - RNA, 20 nt, Human
ccugggauugggcagugugg

SEQ ID NO: 382915 - RNA, 32 nt, Human
ccugggcaaaauagcaagaccgugccucuaga

SEQ ID NO: 382916 - RNA, 32 nt, Human
ccugggcaaaauagcaagaccuugccucuaga

SEQ ID NO: 382917 - RNA, 32 nt, Human
ccugggcaaagaccaagagagcaggggcagaa

SEQ ID NO: 382918 - RNA, 32 nt, Human
ccugggcaacaaagcaagacccugucucuuga

SEQ ID NO: 382919 - RNA, 32 nt, Human
ccugggcaacaaagcgagacccugucucaaaa

SEQ ID NO: 382920 - RNA, 29 nt, Human
ccugggcaacaacagugaaacuccgucuc

SEQ ID NO: 382921 - RNA, 28 nt, Human
ccugggcaacaagagugaaacuccgucu

SEQ ID NO: 382922 - RNA, 32 nt, Human
ccugggcaacaagagugaaacuccgucuuaaa

SEQ ID NO: 382923 - RNA, 32 nt, Human
ccugggcaacaagagugaaacucugucuuaaa

SEQ ID NO: 382924 - RNA, 32 nt, Human
ccugggcaacacaagacccugucucuacaaau

SEQ ID NO: 382925 - RNA, 32 nt, Human
ccugggcaacacagagagacccugucucaaaa

SEQ ID NO: 382926 - RNA, 31 nt, Human
ccugggcaacacagaggacccucaccucuac

SEQ ID NO: 382927 - RNA, 32 nt, Human
ccugggcaacacagcaagacaccgcaucuaca

SEQ ID NO: 382928 - RNA, 32 nt, Human
ccugggcaacacagcaagaccccaucuaagaa

SEQ ID NO: 382929 - RNA, 32 nt, Human
ccugggcaacacagcaagacccugucauuacc

SEQ ID NO: 382930 - RNA, 32 nt, Human
ccugggcaacacagcaagacccugugucaaaa

SEQ ID NO: 382931 - RNA, 28 nt, Human
ccugggcaacacagcaagacucugucgc

SEQ ID NO: 382932 - RNA, 27 nt, Human
ccugggcaacacagcaagacucugucu

SEQ ID NO: 382933 - RNA, 32 nt, Human
ccugggcaacacagcaagacucugucucaaaa

SEQ ID NO: 382934 - RNA, 32 nt, Human
ccugggcaacacagcaagauccugucuaaaaa

SEQ ID NO: 382935 - RNA, 32 nt, Human
ccugggcaacacagcaagauccugucuuugua

SEQ ID NO: 382936 - RNA, 32 nt, Human
ccugggcaacacagcgagaacuugucucuauu

SEQ ID NO: 382937 - RNA, 32 nt, Human
ccugggcaacacagcgagaccccaucucuuaa

SEQ ID NO: 382938 - RNA, 32 nt, Human
ccugggcaacacagcgagacuccgucucaaaa

SEQ ID NO: 382939 - RNA, 32 nt, Human
ccugggcaacacagcgagacuccgucucaagg

SEQ ID NO: 382940 - RNA, 32 nt, Human
ccugggcaacacagcgagacuccgucucgagg

SEQ ID NO: 382941 - RNA, 32 nt, Human
ccugggcaacacagcgggaccccgacuccauu

SEQ ID NO: 382942 - RNA, 32 nt, Human
ccugggcaacacaggaagaccccgucucuacc

SEQ ID NO: 382943 - RNA, 32 nt, Human
ccugggcaacacagggagaccccgucucuaua

SEQ ID NO: 382944 - RNA, 32 nt, Human
ccugggcaacacagggagacucugucucuaca

SEQ ID NO: 382945 - RNA, 32 nt, Human
ccugggcaacacaguaagacccuguuucuaca

SEQ ID NO: 382946 - RNA, 26 nt, Human
ccugggcaacacagugagacccuguc

SEQ ID NO: 382947 - RNA, 26 nt, Human
ccugggcaacacagugagacucuguc

SEQ ID NO: 382948 - RNA, 32 nt, Human
ccugggcaacacagugagacucugucucaaaa

SEQ ID NO: 382949 - RNA, 32 nt, Human
ccugggcaacacagugagacuucaucuccaca

SEQ ID NO: 382950 - RNA, 32 nt, Human
ccugggcaacacagugaggcccccuacccaca

SEQ ID NO: 382951 - RNA, 32 nt, Human
ccugggcaacacagugagugagacccugucuc

SEQ ID NO: 382952 - RNA, 32 nt, Human
ccugggcaacagagcaagacaccgucuuaaaa

SEQ ID NO: 382953 - RNA, 32 nt, Human
ccugggcaacagagcaagaccccauccuccac

SEQ ID NO: 382954 - RNA, 28 nt, Human
ccugggcaacagagcaagacccugucuc

SEQ ID NO: 382955 - RNA, 32 nt, Human
ccugggcaacagagcaagacccugucucaaaa

SEQ ID NO: 382956 - RNA, 32 nt, Human
ccugggcaacagagcaagacccugucucagag

SEQ ID NO: 382957 - RNA, 32 nt, Human
ccugggcaacagagcaagacccugucucucaa

SEQ ID NO: 382958 - RNA, 32 nt, Human
ccugggcaacagagcaagacccugucugucuc

SEQ ID NO: 382959 - RNA, 28 nt, Human
ccugggcaacagagcaagaccucgucuc

SEQ ID NO: 382960 - RNA, 32 nt, Human
ccugggcaacagagcaagaccuugucucaaaa

SEQ ID NO: 382961 - RNA, 32 nt, Human
ccugggcaacagagcaagacuccaugucaagg

SEQ ID NO: 382962 - RNA, 28 nt, Human
ccugggcaacagagcaagacuccgucuc

SEQ ID NO: 382963 - RNA, 28 nt, Human
ccugggcaacagagcaagacucggucuc

SEQ ID NO: 382964 - RNA, 32 nt, Human
ccugggcaacagagcaagacucugccucaaaa

SEQ ID NO: 382965 - RNA, 28 nt, Human
ccugggcaacagagcaagacucugucuc

SEQ ID NO: 382966 - RNA, 32 nt, Human
ccugggcaacagagcaagacucugucucaaaa

SEQ ID NO: 382967 - RNA, 32 nt, Human
ccugggcaacagagcaagacucugucucagga

SEQ ID NO: 382968 - RNA, 32 nt, Human
ccugggcaacagagcaagacucugucuccaaa

SEQ ID NO: 382969 - RNA, 32 nt, Human
ccugggcaacagagcaagacucugucuucaaa

SEQ ID NO: 382970 - RNA, 32 nt, Human
ccugggcaacagagcaagacugccucaaaaca

SEQ ID NO: 382971 - RNA, 32 nt, Human
ccugggcaacagagccagacccugccucaaaa

SEQ ID NO: 382972 - RNA, 32 nt, Human
ccugggcaacagagccagacccugucuaaaaa

SEQ ID NO: 382973 - RNA, 32 nt, Human
ccugggcaacagagcgagaccaucucuuaaaa

SEQ ID NO: 382974 - RNA, 28 nt, Human
ccugggcaacagagcgagacccugucuc

SEQ ID NO: 382975 - RNA, 32 nt, Human
ccugggcaacagagcgagacccugucuccaaa

SEQ ID NO: 382976 - RNA, 32 nt, Human
ccugggcaacagaggaagacugccucaaacaa

SEQ ID NO: 382977 - RNA, 32 nt, Human
ccugggcaacagagugagacccugccucaaaa

SEQ ID NO: 382978 - RNA, 32 nt, Human
ccugggcaacagagugagacccugucuaaaaa

SEQ ID NO: 382979 - RNA, 32 nt, Human
ccugggcaacagagugagacccugucucaaaa

SEQ ID NO: 382980 - RNA, 32 nt, Human
ccugggcaacagagugagacccugucucaaac

SEQ ID NO: 382981 - RNA, 32 nt, Human
ccugggcaacagagugagacccugucuccaaa

SEQ ID NO: 382982 - RNA, 29 nt, Human
ccugggcaacagagugagacccugucucu

SEQ ID NO: 382983 - RNA, 32 nt, Human
ccugggcaacagagugagacccugucucuaua

SEQ ID NO: 382984 - RNA, 32 nt, Human
ccugggcaacagagugagacccugucucugaa

SEQ ID NO: 382985 - RNA, 32 nt, Human
ccugggcaacagaucaagacccugucucaaaa

SEQ ID NO: 382986 - RNA, 32 nt, Human
ccugggcaacagcaagaccucaucucuacaaa

SEQ ID NO: 382987 - RNA, 32 nt, Human
ccugggcaacagcagcgaaacuccaucucaaa

SEQ ID NO: 382988 - RNA, 29 nt, Human
ccugggcaacagcguaagacccugucucc

SEQ ID NO: 382989 - RNA, 31 nt, Human
ccugggcaacauagagagacccugucucugu

SEQ ID NO: 382990 - RNA, 22 nt, Human
ccugggcaacauagcaagaccc

SEQ ID NO: 382991 - RNA, 32 nt, Human
ccugggcaacauagcaagaccccaucucuaca

SEQ ID NO: 382992 - RNA, 32 nt, Human
ccugggcaacauagcaagaccccaucucuacc

SEQ ID NO: 382993 - RNA, 32 nt, Human
ccugggcaacauagcaagaccccaucucuaua

SEQ ID NO: 382994 - RNA, 32 nt, Human
ccugggcaacauagcaagacccccaccaucuc

SEQ ID NO: 382995 - RNA, 32 nt, Human
ccugggcaacauagcaagacccccaucucugc

SEQ ID NO: 382996 - RNA, 32 nt, Human
ccugggcaacauagcaagaccccgucucuuaa

SEQ ID NO: 382997 - RNA, 32 nt, Human
ccugggcaacauagcaagacccugucucuaaa

SEQ ID NO: 382998 - RNA, 32 nt, Human
ccugggcaacauagcaagacccugucucuaca

SEQ ID NO: 382999 - RNA, 32 nt, Human
ccugggcaacauagcaagacccugucucuauu

SEQ ID NO: 383000 - RNA, 32 nt, Human
ccugggcaacauagcaagacccugucucuuaa

SEQ ID NO: 383001 - RNA, 28 nt, Human
ccugggcaacauagcaagacccugucuu

SEQ ID NO: 383002 - RNA, 32 nt, Human
ccugggcaacauagcaagacucugucucaaaa

SEQ ID NO: 383003 - RNA, 32 nt, Human
ccugggcaacauagcaagacucugucucugua

SEQ ID NO: 383004 - RNA, 22 nt, Human
ccugggcaacauagcgagaccc

SEQ ID NO: 383005 - RNA, 32 nt, Human
ccugggcaacauaggaagacccugucucuaca

SEQ ID NO: 383006 - RNA, 32 nt, Human
ccugggcaacauaguaagacccugucucuauu

SEQ ID NO: 383007 - RNA, 32 nt, Human
ccugggcaacauagugagacccugccucaugg

SEQ ID NO: 383008 - RNA, 31 nt, Human
ccugggcaacauagugagacccugucucuac

SEQ ID NO: 383009 - RNA, 32 nt, Human
ccugggcaacauggcaagacccugucucuacu

SEQ ID NO: 383010 - RNA, 32 nt, Human
ccugggcaacauggcaagacccugucucuuua

SEQ ID NO: 383011 - RNA, 32 nt, Human
ccugggcaacauggcgagacccugucucuaca

SEQ ID NO: 383012 - RNA, 19 nt, Human
ccugggcaacauggugaaa

SEQ ID NO: 383013 - RNA, 32 nt, Human
ccugggcaacggagcaagacccugucucaaag

SEQ ID NO: 383014 - RNA, 32 nt, Human
ccugggcaacguagcaagaccuugccucuaga

SEQ ID NO: 383015 - RNA, 32 nt, Human
ccugggcaagaacuugaccucccuggacgcag

SEQ ID NO: 383016 - RNA, 32 nt, Human
ccugggcaagauagcaagaccuugccucuaga

SEQ ID NO: 383017 - RNA, 19 nt, Human
ccugggcaagcagggugcu

SEQ ID NO: 383018 - RNA, 30 nt, Human
ccugggcaauaaagugagacccugucacua

SEQ ID NO: 383019 - RNA, 32 nt, Human
ccugggcaauaaagugagacccugucacuaac

SEQ ID NO: 383020 - RNA, 32 nt, Human
ccugggcaauacagugagacccugucucaaaa

SEQ ID NO: 383021 - RNA, 32 nt, Human
ccugggcaauagagcgagacccugucucuuaa

SEQ ID NO: 383022 - RNA, 32 nt, Human
ccugggcaauagaguaagacccugucuaaaaa

SEQ ID NO: 383023 - RNA, 32 nt, Human
ccugggcaauauagcaagaccccauccuuuaa

SEQ ID NO: 383024 - RNA, 27 nt, Human
ccugggcaauauagcaagaccccucac

SEQ ID NO: 383025 - RNA, 32 nt, Human
ccugggcaaucagacacccucuccuuaaaaac

SEQ ID NO: 383026 - RNA, 16 nt, Human
ccugggcacacggcca

SEQ ID NO: 383027 - RNA, 32 nt, Human
ccugggcacacgugcucacucaggcccagcaa

SEQ ID NO: 383028 - RNA, 32 nt, Human
ccugggcacagaagagagcacaggggcaucug

SEQ ID NO: 383029 - RNA, 32 nt, Human
ccugggcacagagagaaaagaauugagacuca

SEQ ID NO: 383030 - RNA, 32 nt, Human
ccugggcacagcugcccuacaugucuguccug

SEQ ID NO: 383031 - RNA, 21 nt, Human
ccugggcacaggcaugggcca

SEQ ID NO: 383032 - RNA, 32 nt, Human
ccugggcacaucugggacuggaauacagaacg

SEQ ID NO: 383033 - RNA, 18 nt, Human
ccugggcacccuccugcc

SEQ ID NO: 383034 - RNA, 32 nt, Human
ccugggcaccgagcuucacccugggugggucu

SEQ ID NO: 383035 - RNA, 32 nt, Human
ccugggcaccuugcagcccugcaccugccugc

SEQ ID NO: 383036 - RNA, 23 nt, Human
ccugggcacgggagggggugggg

SEQ ID NO: 383037 - RNA, 26 nt, Human
ccugggcacucugugccccuccuucc

SEQ ID NO: 383038 - RNA, 32 nt, Human
ccugggcacugccugagcagggcacagucugc

SEQ ID NO: 383039 - RNA, 32 nt, Human
ccugggcagacacucguccaaaccacuggagu

SEQ ID NO: 383040 - RNA, 32 nt, Human
ccugggcagacaggaacacagucucuuucugu

SEQ ID NO: 383041 - RNA, 19 nt, Human
ccugggcagagagaugcag

SEQ ID NO: 383042 - RNA, 32 nt, Human
ccugggcagagcaggcaugagcugggcugugg

SEQ ID NO: 383043 - RNA, 24 nt, Human
ccugggcagaggaaauugcaguga

SEQ ID NO: 383044 - RNA, 32 nt, Human
ccugggcagagguggaggagacacugaagcga

SEQ ID NO: 383045 - RNA, 32 nt, Human
ccugggcagcaccuccgggacugaccuucggc

SEQ ID NO: 383046 - RNA, 28 nt, Human
ccugggcagcagagcaagacucugucuc

SEQ ID NO: 383047 - RNA, 32 nt, Human
ccugggcagcagagcaagacucugucucaaaa

SEQ ID NO: 383048 - RNA, 32 nt, Human
ccugggcagcauacugagacccugccuuuaaa

SEQ ID NO: 383049 - RNA, 32 nt, Human
ccugggcagcauagcaagacacaucccuacaa

SEQ ID NO: 383050 - RNA, 32 nt, Human
ccugggcagcauagugugagacccugucucuu

SEQ ID NO: 383051 - RNA, 18 nt, Human
ccugggcagcccacagua

SEQ ID NO: 383052 - RNA, 32 nt, Human
ccugggcagccugcugggugggccacacucag

SEQ ID NO: 383053 - RNA, 32 nt, Human
ccugggcagcugggugggccugggcagcuggg

SEQ ID NO: 383054 - RNA, 32 nt, Human
ccugggcaggaagcuggcugagccccaagacc

SEQ ID NO: 383055 - RNA, 18 nt, Human
ccugggcaggaggcacag

SEQ ID NO: 383056 - RNA, 19 nt, Human
ccugggcaggaggcuacag

SEQ ID NO: 383057 - RNA, 32 nt, Human
ccugggcagggaccaggccagcgcugcaaccu

SEQ ID NO: 383058 - RNA, 18 nt, Human
ccugggcagggggcgaca

SEQ ID NO: 383059 - RNA, 18 nt, Human
ccugggcaggggguccag

SEQ ID NO: 383060 - RNA, 32 nt, Human
ccugggcagguggcgggaacguugcuggggug

SEQ ID NO: 383061 - RNA, 32 nt, Human
ccugggcagguuuccaacuccugggcucaagu

SEQ ID NO: 383062 - RNA, 32 nt, Human
ccugggcaguauagcaagaccccaucuccauu

SEQ ID NO: 383063 - RNA, 32 nt, Human
ccugggcauagccauggaacccugccaggcug

SEQ ID NO: 383064 - RNA, 22 nt, Human
ccugggcaucaugggaggcaga

SEQ ID NO: 383065 - RNA, 32 nt, Human
ccugggcauccagccccuggaccaugacugcc

SEQ ID NO: 383066 - RNA, 32 nt, Human
ccugggcaucuucuacuaauggccucggcuuc

SEQ ID NO: 383067 - RNA, 32 nt, Human
ccugggcauggugcugggcauggcuggcauag

SEQ ID NO: 383068 - RNA, 32 nt, Human
ccugggcauugaggcauuuccauacaucuucu

SEQ ID NO: 383069 - RNA, 32 nt, Human
ccugggccaacagacccacacacuuagccauu

SEQ ID NO: 383070 - RNA, 23 nt, Human
ccugggccaagacaagcuucccu

SEQ ID NO: 383071 - RNA, 32 nt, Human
ccugggccacaggaaagguaucagcccuuggu

SEQ ID NO: 383072 - RNA, 32 nt, Human
ccugggccacagugcaagacuccaucucaaaa

SEQ ID NO: 383073 - RNA, 32 nt, Human
ccugggccacauagcaagacccugucuccaaa

SEQ ID NO: 383074 - RNA, 32 nt, Human
ccugggccacccucaccgucugccucagacuu

SEQ ID NO: 383075 - RNA, 32 nt, Human
ccugggccaccuggggcaccuuaccaccggag

SEQ ID NO: 383076 - RNA, 21 nt, Human
ccugggccacggcagacaggg

SEQ ID NO: 383077 - RNA, 32 nt, Human
ccugggccacugccauuggguuagucaagaug

SEQ ID NO: 383078 - RNA, 32 nt, Human
ccugggccacugccugcuccagagaguggacc

SEQ ID NO: 383079 - RNA, 32 nt, Human
ccugggccacuggcaucucuggaguguguggg

SEQ ID NO: 383080 - RNA, 27 nt, Human
ccugggccagaaucccggaccccucac

SEQ ID NO: 383081 - RNA, 32 nt, Human
ccugggccaggaggagcugaggcugcagaccc

SEQ ID NO: 383082 - RNA, 32 nt, Human
ccugggccaggccagccagggagaagacaagg

SEQ ID NO: 383083 - RNA, 32 nt, Human
ccugggccaggccaggaaagagacuauuuaag

SEQ ID NO: 383084 - RNA, 19 nt, Human
ccugggccagggacggugg

SEQ ID NO: 383085 - RNA, 32 nt, Human
ccugggccagugucaggccagcaggugcaggg

SEQ ID NO: 383086 - RNA, 31 nt, Human
ccugggccaguguccaucagccaggugcuca

SEQ ID NO: 383087 - RNA, 32 nt, Human
ccugggccauccauuccauuuuguuccacauu

SEQ ID NO: 383088 - RNA, 32 nt, Human
ccugggcccaagugauccuuccaccucagucu

SEQ ID NO: 383089 - RNA, 32 nt, Human
ccugggcccagacagucccccuugaccccagg

SEQ ID NO: 383090 - RNA, 32 nt, Human
ccugggcccaggaguugcaagucucugcuucu

SEQ ID NO: 383091 - RNA, 19 nt, Human
ccugggcccaggcugggga

SEQ ID NO: 383092 - RNA, 32 nt, Human
ccugggcccaggcuggggacagagcccuuguu

SEQ ID NO: 383093 - RNA, 32 nt, Human
ccugggcccagucagcccugcugcucagagug

SEQ ID NO: 383094 - RNA, 32 nt, Human
ccugggcccauccugcccuuguggcccccggc

SEQ ID NO: 383095 - RNA, 32 nt, Human
ccugggcccaucucccugcuuuggucuugccc

SEQ ID NO: 383096 - RNA, 21 nt, Human
ccugggccccagagcucaggg

SEQ ID NO: 383097 - RNA, 19 nt, Human
ccugggcccccuugcuccu

SEQ ID NO: 383098 - RNA, 32 nt, Human
ccugggccccuccacgccuccuggccagacgc

SEQ ID NO: 383099 - RNA, 32 nt, Human
ccugggccccucugggcuucaguuuccccacu

SEQ ID NO: 383100 - RNA, 32 nt, Human
ccugggccccugggcccugcuucucugcuccc

SEQ ID NO: 383101 - RNA, 19 nt, Human
ccugggccccugucgucag

SEQ ID NO: 383102 - RNA, 32 nt, Human
ccugggcccgggacggccgaggcagcagaagc

SEQ ID NO: 383103 - RNA, 32 nt, Human
ccugggcccguccucccuccugauacuguagc

SEQ ID NO: 383104 - RNA, 21 nt, Human
ccugggcccuacacccccaca

SEQ ID NO: 383105 - RNA, 32 nt, Human
ccugggcccugaggccccugcccuagugcaac

SEQ ID NO: 383106 - RNA, 32 nt, Human
ccugggcccugccucuccaugccuguaggagc

SEQ ID NO: 383107 - RNA, 22 nt, Human
ccugggccgaguuuguuuuucc

SEQ ID NO: 383108 - RNA, 32 nt, Human
ccugggccgccuaggcaagacagucgacgcgc

SEQ ID NO: 383109 - RNA, 32 nt, Human
ccugggccgcggugaggccaccagaggcagga

SEQ ID NO: 383110 - RNA, 22 nt, Human
ccugggccggcagggaccccca

SEQ ID NO: 383111 - RNA, 32 nt, Human
ccugggccgggagaggauggccuggucugaau

SEQ ID NO: 383112 - RNA, 32 nt, Human
ccugggccgggcuguagaucagguuugcccac

SEQ ID NO: 383113 - RNA, 22 nt, Human
ccugggccggugaagucacaca

SEQ ID NO: 383114 - RNA, 32 nt, Human
ccugggccguggcugcucacugcguucggacc

SEQ ID NO: 383115 - RNA, 24 nt, Human
ccugggccuaaagcaagaaucuca

SEQ ID NO: 383116 - RNA, 32 nt, Human
ccugggccucacucuugagagauucucauuua

SEQ ID NO: 383117 - RNA, 32 nt, Human
ccugggccuccaccucugugcagggcacagaa

SEQ ID NO: 383118 - RNA, 32 nt, Human
ccugggccuccagggagaugcagcuggcagga

SEQ ID NO: 383119 - RNA, 32 nt, Human
ccugggccuggccagaccagagggcagguuga

SEQ ID NO: 383120 - RNA, 32 nt, Human
ccugggccugggccuugguucuccccaugaca

SEQ ID NO: 383121 - RNA, 32 nt, Human
ccugggccugguccuagcccugccucggccac

SEQ ID NO: 383122 - RNA, 32 nt, Human
ccugggccuguggccgccagagcugcugcggc

SEQ ID NO: 383123 - RNA, 32 nt, Human
ccugggccuguugacccaccagcuuaggagca

SEQ ID NO: 383124 - RNA, 32 nt, Human
ccugggccuucuuuaucuccccaagccauaug

SEQ ID NO: 383125 - RNA, 19 nt, Human
ccugggccuugccuucagg

SEQ ID NO: 383126 - RNA, 32 nt, Human
ccugggccuuucugccuccugauguacaccca

SEQ ID NO: 383127 - RNA, 32 nt, Human
ccugggccuuucuggcucugggaaugaagcgu

SEQ ID NO: 383128 - RNA, 23 nt, Human
ccugggcgaaguggcagagccag

SEQ ID NO: 383129 - RNA, 30 nt, Human
ccuucaggaagccauaauggauggcacaga

SEQ ID NO: 383130 - RNA, 24 nt, Human
ccuucaggaagccccagaacaccc

SEQ ID NO: 383131 - RNA, 26 nt, Human
ccuucaggaagccugugaaaaacgug

SEQ ID NO: 383132 - RNA, 32 nt, Human
ccuucaggaagcugguuccugccaccaacuua

SEQ ID NO: 383133 - RNA, 24 nt, Human
ccuucaggacucaccuggggccug

SEQ ID NO: 383134 - RNA, 32 nt, Human
ccuucaggacucugcgggaggcuggggcccca

SEQ ID NO: 383135 - RNA, 32 nt, Human
ccuucaggacugcccuuuucugccuucucaau

SEQ ID NO: 383136 - RNA, 32 nt, Human
ccuucaggcacaaguaaguuucaagagcaagu

SEQ ID NO: 383137 - RNA, 32 nt, Human
ccuucaggcagcugaaauucaccaagaacagc

SEQ ID NO: 383138 - RNA, 32 nt, Human
ccuucaggccugaauguggcggcugccucugc

SEQ ID NO: 383139 - RNA, 32 nt, Human
ccuucagggagcagagcagagcagguggugga

SEQ ID NO: 383140 - RNA, 32 nt, Human
ccuucagggccugagguuugugguuggcacug

SEQ ID NO: 383141 - RNA, 32 nt, Human
ccuucaggggugcugggauuacaggcaucagc

SEQ ID NO: 383142 - RNA, 32 nt, Human
ccuucaggucugugaugagaaacggaguggcc

SEQ ID NO: 383143 - RNA, 18 nt, Human
ccuucaguccauucccuu

SEQ ID NO: 383144 - RNA, 32 nt, Human
ccuucagucuucuagaaacagagacaagaaag

SEQ ID NO: 383145 - RNA, 32 nt, Human
ccuucagugagguggggacgccuggacccugg

SEQ ID NO: 383146 - RNA, 32 nt, Human
ccuucagugauaucaccacuugcucagucacc

SEQ ID NO: 383147 - RNA, 32 nt, Human
ccuucagugaugugcuuuuggugaaagaauua

SEQ ID NO: 383148 - RNA, 32 nt, Human
ccuucaguggcucucaucaccuucaggaaaag

SEQ ID NO: 383149 - RNA, 32 nt, Human
ccuucaguuccaccugccacuccucaaaccac

SEQ ID NO: 383150 - RNA, 21 nt, Human
ccuucaguuccccaggcuccu

SEQ ID NO: 383151 - RNA, 32 nt, Human
ccuucauacaaccagaagcacacuaauccuua

SEQ ID NO: 383152 - RNA, 32 nt, Human
ccuucaucaaaucccuaucucauuucauuucu

SEQ ID NO: 383153 - RNA, 32 nt, Human
ccuucaucauacaaccucuccuaaccucccug

SEQ ID NO: 383154 - RNA, 32 nt, Human
ccuucaucauuuccugcacucgcugaccacaa

SEQ ID NO: 383155 - RNA, 18 nt, Human
ccuucauccacccacuca

SEQ ID NO: 383156 - RNA, 24 nt, Human
ccuucauccacccacucaccggca

SEQ ID NO: 383157 - RNA, 32 nt, Human
ccuucauccaggcugggcgagguggcucacgc

SEQ ID NO: 383158 - RNA, 32 nt, Human
ccuucauccccagcugcuccuaggacuggccc

SEQ ID NO: 383159 - RNA, 32 nt, Human
ccuucaucccccaagaggaugcggugaaguuu

SEQ ID NO: 383160 - RNA, 32 nt, Human
ccuucauccuguccuugaagaccaccacucua

SEQ ID NO: 383161 - RNA, 32 nt, Human
ccuucauccuguggccaaaggcugcagagccc

SEQ ID NO: 383162 - RNA, 32 nt, Human
ccuucaucucuccucccuccccaaacucacuu

SEQ ID NO: 383163 - RNA, 32 nt, Human
ccuucaucugggaaucauauacuccacucuag

SEQ ID NO: 383164 - RNA, 32 nt, Human
ccuucaugaagaaaagacagaggcagaaagga

SEQ ID NO: 383165 - RNA, 32 nt, Human
ccuucaugagacaggauucaguacugagcuag

SEQ ID NO: 383166 - RNA, 32 nt, Human
ccuucaugagcuguuuugcacugugagguaag

SEQ ID NO: 383167 - RNA, 32 nt, Human
ccuucaugcauggucucggggaagaagcuucc

SEQ ID NO: 383168 - RNA, 20 nt, Human
ccuucaugccauaucccaca

SEQ ID NO: 383169 - RNA, 32 nt, Human
ccuucaugcccucccucccuuuccuaccacug

SEQ ID NO: 383170 - RNA, 32 nt, Human
ccuucaugccucaguuucccagccuggcacca

SEQ ID NO: 383171 - RNA, 32 nt, Human
ccuucaugccucugcugugagacccagcaaag

SEQ ID NO: 383172 - RNA, 32 nt, Human
ccuucaugccuguaaucccagcacuuugggag

SEQ ID NO: 383173 - RNA, 32 nt, Human
ccuucaugccuguaauccgagugcuuuaggag

SEQ ID NO: 383174 - RNA, 20 nt, Human
ccuucaugggacucccaaca

SEQ ID NO: 383175 - RNA, 32 nt, Human
ccuucaugguugacuucagccaaggccaucau

SEQ ID NO: 383176 - RNA, 32 nt, Human
ccuucauuaccugaaccccauguucacacguc

SEQ ID NO: 383177 - RNA, 32 nt, Human
ccuucauuacuuuugcaaaaacauacugacuc

SEQ ID NO: 383178 - RNA, 32 nt, Human
ccuucauuccuucuuccagaacaucugggucc

SEQ ID NO: 383179 - RNA, 32 nt, Human
ccuucauucgggccucacaccuuagucaacau

SEQ ID NO: 383180 - RNA, 32 nt, Human
ccuucauucuagagcuagagugaaugagcccc

SEQ ID NO: 383181 - RNA, 32 nt, Human
ccuucauucucacccugucugcuuuuacuuuu

SEQ ID NO: 383182 - RNA, 32 nt, Human
ccuucauucugaugccucccuggggaacaagg

SEQ ID NO: 383183 - RNA, 21 nt, Human
ccuucauugccucuccucgca

SEQ ID NO: 383184 - RNA, 32 nt, Human
ccuucauugggucuccuaagagcaccaauuuu

SEQ ID NO: 383185 - RNA, 23 nt, Human
ccuucauuucauccuguuggcug

SEQ ID NO: 383186 - RNA, 32 nt, Human
ccuuccaaaccagcaccaacagagccaaggcc

SEQ ID NO: 383187 - RNA, 32 nt, Human
ccuuccaaagugcugggauaucaggcacugag

SEQ ID NO: 383188 - RNA, 32 nt, Human
ccuuccaaagugcugggauuacaggcaugagc

SEQ ID NO: 383189 - RNA, 32 nt, Human
ccuuccaaagugcugggauuacaggccugagc

SEQ ID NO: 383190 - RNA, 32 nt, Human
ccuuccaaagugcugggauuacaggcgucagc

SEQ ID NO: 383191 - RNA, 32 nt, Human
ccuuccaaagugcugggauuacaggcgugagc

SEQ ID NO: 383192 - RNA, 32 nt, Human
ccuuccaaagugcugggauuacaggcgugagu

SEQ ID NO: 383193 - RNA, 32 nt, Human
ccuuccaaagugcugggauuacaggugucagc

SEQ ID NO: 383194 - RNA, 32 nt, Human
ccuuccaaagugcugggauuacaggugugagg

SEQ ID NO: 383195 - RNA, 32 nt, Human
ccuuccaaagugcugggauuacuggcaggaac

SEQ ID NO: 383196 - RNA, 32 nt, Human
ccuuccaaagugcugggauuccagaugcgagc

SEQ ID NO: 383197 - RNA, 32 nt, Human
ccuuccaaaguguugggauuacaggcaugagc

SEQ ID NO: 383198 - RNA, 32 nt, Human
ccuuccaaaguguugggauuacaggcgugagc

SEQ ID NO: 383199 - RNA, 32 nt, Human
ccuuccaaccccaagguucugauguccugguu

SEQ ID NO: 383200 - RNA, 32 nt, Human
ccuuccaacccuccugcuaccaugaagauugc

SEQ ID NO: 383201 - RNA, 32 nt, Human
ccuuccaacuccuggguucaagggaucgucuu

SEQ ID NO: 383202 - RNA, 32 nt, Human
ccuuccaaguaacuaggacuacaggcaugugc

SEQ ID NO: 383203 - RNA, 32 nt, Human
ccuuccaaguagcugggacuacaggcaugcac

SEQ ID NO: 383204 - RNA, 32 nt, Human
ccuuccaaguagcugggaguacaagcauaugc

SEQ ID NO: 383205 - RNA, 32 nt, Human
ccuuccaaguagcugggauuacaagugcccac

SEQ ID NO: 383206 - RNA, 32 nt, Human
ccuuccaaguagcugggauuacaggaguuaga

SEQ ID NO: 383207 - RNA, 32 nt, Human
ccuuccaaguagcugggauuacaggugugcgc

SEQ ID NO: 383208 - RNA, 32 nt, Human
ccuuccaagugcuaggauuacaggcgugagcc

SEQ ID NO: 383209 - RNA, 31 nt, Human
ccuuccaauguaaucucugccaacaccauga

SEQ ID NO: 383210 - RNA, 21 nt, Human
ccuuccacacauggccaggac

SEQ ID NO: 383211 - RNA, 21 nt, Human
ccuuccacagcuccuccuaca

SEQ ID NO: 383212 - RNA, 20 nt, Human
ccuuccacagucccccuaca

SEQ ID NO: 383213 - RNA, 22 nt, Human
ccuuccacagugaccucauaca

SEQ ID NO: 383214 - RNA, 32 nt, Human
ccuuccaccauccaggaagugcagccccuucu

SEQ ID NO: 383215 - RNA, 32 nt, Human
ccuuccaccaugggaugacgcaguaagaaggc

SEQ ID NO: 383216 - RNA, 32 nt, Human
ccuuccaccccgacccgcacacacacccacac

SEQ ID NO: 383217 - RNA, 32 nt, Human
ccuuccaccccucccuccuugcuucccaccca

SEQ ID NO: 383218 - RNA, 32 nt, Human
ccuuccacccuguggccugcacuugagccaca

SEQ ID NO: 383219 - RNA, 32 nt, Human
ccuuccacccuuuagcacagagcuugguguuc

SEQ ID NO: 383220 - RNA, 32 nt, Human
ccuuccaccugggauucuccagccuccaccca

SEQ ID NO: 383221 - RNA, 32 nt, Human
ccuuccaccuuucccuucuccucucucgcauu

SEQ ID NO: 383222 - RNA, 32 nt, Human
ccuuccacuacuccccagccuagaagauccag

SEQ ID NO: 383223 - RNA, 32 nt, Human
ccuuccacuagcaacagucuccccaggcacaa

SEQ ID NO: 383224 - RNA, 32 nt, Human
ccuuccacugcccaauguggagacagggguua

SEQ ID NO: 383225 - RNA, 32 nt, Human
ccuuccacuguugucaggagaagaagggggcc

SEQ ID NO: 383226 - RNA, 32 nt, Human
ccuuccacuucuagagcagggaggcuugggga

SEQ ID NO: 383227 - RNA, 32 nt, Human
ccuuccacuucucauuccccgugucgcucauu

SEQ ID NO: 383228 - RNA, 32 nt, Human
ccuuccacuucugcacgucuuccuuuccccau

SEQ ID NO: 383229 - RNA, 32 nt, Human
ccuuccagacugcugcccaguugccugauguc

SEQ ID NO: 383230 - RNA, 32 nt, Human
ccuuccagagacaaggcugcaggcccugugaa

SEQ ID NO: 383231 - RNA, 32 nt, Human
ccuuccagagcagugcugaucacuggauccug

SEQ ID NO: 383232 - RNA, 32 nt, Human
ccuuccagagugcugggauuacaggcgugagc

SEQ ID NO: 383233 - RNA, 32 nt, Human
ccuuccagagugcugggauuauaggcgugagc

SEQ ID NO: 383234 - RNA, 32 nt, Human
ccuuccagcaccuccucucuucuccuuuugcc

SEQ ID NO: 383235 - RNA, 32 nt, Human
ccuuccagcuacucaggaggcugaggcaggag

SEQ ID NO: 383236 - RNA, 32 nt, Human
ccuuccagcugaggcaggugaagacuucauaa

SEQ ID NO: 383237 - RNA, 32 nt, Human
ccuuccagcugccucuggaaccuaggccgagc

SEQ ID NO: 383238 - RNA, 32 nt, Human
ccuuccagcugucacugaauggcuuuauucgu

SEQ ID NO: 383239 - RNA, 32 nt, Human
ccuuccagcuguuccauucucuccaccaccag

SEQ ID NO: 383240 - RNA, 32 nt, Human
ccuuccagcuguuccugcuuccacucuugcuc

SEQ ID NO: 383241 - RNA, 32 nt, Human
ccuuccaggaaggggcuggccucugcugagcu

SEQ ID NO: 383242 - RNA, 21 nt, Human
ccuuccaggaucuggagcccg

SEQ ID NO: 383243 - RNA, 32 nt, Human
ccuuccaggcagcaggcuggcauggggacuuc

SEQ ID NO: 383244 - RNA, 18 nt, Human
ccuuccaggccgcugccg

SEQ ID NO: 383245 - RNA, 32 nt, Human
ccuuccaggccuacgagcagauucucgggauc

SEQ ID NO: 383246 - RNA, 32 nt, Human
ccuuccaggccugagccccaaccccucuucag

SEQ ID NO: 383247 - RNA, 32 nt, Human
ccuuccaggccuggccuggccuggaaccugga

SEQ ID NO: 383248 - RNA, 32 nt, Human
ccuuccagggaaauuguggucuccggccuggg

SEQ ID NO: 383249 - RNA, 32 nt, Human
ccuuccagggccugagcagcuggaucugguac

SEQ ID NO: 383250 - RNA, 32 nt, Human
ccuuccagggccugggaccauuggcugggacc

SEQ ID NO: 383251 - RNA, 32 nt, Human
ccuuccaggguuuagggagugcagugaugucg

SEQ ID NO: 383252 - RNA, 32 nt, Human
ccuuccagucagaacaguugagcaguuuacaa

SEQ ID NO: 383253 - RNA, 31 nt, Human
ccuuccagugagagaaaaauagaaugguaag

SEQ ID NO: 383254 - RNA, 31 nt, Human
ccuuccagugagagauucaagaauugaugug

SEQ ID NO: 383255 - RNA, 32 nt, Human
ccuuccagugcugugcucugugucaccaucag

SEQ ID NO: 383256 - RNA, 20 nt, Human
ccuuccagugguaccagcuc

SEQ ID NO: 383257 - RNA, 32 nt, Human
ccuuccagugguaccagcucacucccugggaa

SEQ ID NO: 383258 - RNA, 32 nt, Human
ccuuccaguuuauuccagagcugccagugggg

SEQ ID NO: 383259 - RNA, 32 nt, Human
ccuuccauaaccuaauuuagucauuugggccu

SEQ ID NO: 383260 - RNA, 32 nt, Human
ccuuccaucagugucuuccagccugcaugggg

SEQ ID NO: 383261 - RNA, 32 nt, Human
ccuuccaucccugaauacaaggcucuaggcaa

SEQ ID NO: 383262 - RNA, 32 nt, Human
ccuuccaugaacacaugugcuggagacguguu

SEQ ID NO: 383263 - RNA, 18 nt, Human
ccuuccaugauguugcca

SEQ ID NO: 383264 - RNA, 32 nt, Human
ccuuccaugucugacccugccucaugucuugg

SEQ ID NO: 383265 - RNA, 32 nt, Human
ccuuccauuucugccuuuuguucauuucaucc

SEQ ID NO: 383266 - RNA, 32 nt, Human
ccuucccaaacagucacagauuccauugaaag

SEQ ID NO: 383267 - RNA, 32 nt, Human
ccuucccaacccagugccguuuauuucagaag

SEQ ID NO: 383268 - RNA, 32 nt, Human
ccuucccaagcccccuuccuucauccuugggg

SEQ ID NO: 383269 - RNA, 32 nt, Human
ccuucccaagugcugggauuacaggugugagc

SEQ ID NO: 383270 - RNA, 32 nt, Human
ccuucccacagggcugcaguccuggccucucc

SEQ ID NO: 383271 - RNA, 21 nt, Human
ccuucccacccacccagucca

SEQ ID NO: 383272 - RNA, 32 nt, Human
ccuucccacugcacuccccaguggcuggcgug

SEQ ID NO: 383273 - RNA, 19 nt, Human
ccuucccagaacccagcca

SEQ ID NO: 383274 - RNA, 32 nt, Human
ccuucccagaaucuccuucagugguugcucuc

SEQ ID NO: 383275 - RNA, 32 nt, Human
ccuucccagcaagucauagcucagggaggagg

SEQ ID NO: 383276 - RNA, 32 nt, Human
ccuucccagcacccccagcccugaaaccugac

SEQ ID NO: 383277 - RNA, 32 nt, Human
ccuucccagccauguggaacugugagucgaaa

SEQ ID NO: 383278 - RNA, 32 nt, Human
ccuucccagccccagcccuggagacagcagcc

SEQ ID NO: 383279 - RNA, 32 nt, Human
ccuucccagcugggaagagcucagagcugaca

SEQ ID NO: 383280 - RNA, 32 nt, Human
ccuucccaguagcugggauuacaggcacauac

SEQ ID NO: 383281 - RNA, 32 nt, Human
ccuucccaguuucuccccaaccuccccuuuuc

SEQ ID NO: 383282 - RNA, 19 nt, Human
ccuucccaucaccuccuca

SEQ ID NO: 383283 - RNA, 32 nt, Human
ccuucccaucaggucugcuccagccuggcuac

SEQ ID NO: 383284 - RNA, 32 nt, Human
ccuucccauccccaaggagcccuucagcgcgc

SEQ ID NO: 383285 - RNA, 32 nt, Human
ccuucccaugacccaggcugggcaaggaggcc

SEQ ID NO: 383286 - RNA, 32 nt, Human
ccuucccauuagcugggauuacaggcaugcgc

SEQ ID NO: 383287 - RNA, 32 nt, Human
ccuuccccaagagaggaaccagaaggaggacc

SEQ ID NO: 383288 - RNA, 32 nt, Human
ccuuccccaagugagcucagcagcaugugcua

SEQ ID NO: 383289 - RNA, 18 nt, Human
ccuuccccaccccugccc

SEQ ID NO: 383290 - RNA, 32 nt, Human
ccuuccccacugcacacaccucagaggcuguu

SEQ ID NO: 383291 - RNA, 32 nt, Human
ccuuccccagagagauggcuuuaggggcuuua

SEQ ID NO: 383292 - RNA, 32 nt, Human
ccuuccccagaugaacugaggugagagcggcu

SEQ ID NO: 383293 - RNA, 32 nt, Human
ccuuccccagccugggccuugaccguccagca

SEQ ID NO: 383294 - RNA, 32 nt, Human
ccuuccccauaacacugagcugcucugcuggg

SEQ ID NO: 383295 - RNA, 32 nt, Human
ccuuccccaucaccaguggcaggaugaagcau

SEQ ID NO: 383296 - RNA, 32 nt, Human
ccuuccccauccugagcccccuucccuguccu

SEQ ID NO: 383297 - RNA, 32 nt, Human
ccuuccccaucuuuccagccccuggcccugcu

SEQ ID NO: 383298 - RNA, 32 nt, Human
ccuuccccauuuccucuuccuucucuacucau

SEQ ID NO: 383299 - RNA, 32 nt, Human
ccuuccccauuuucauauccuuucuucaaaaa

SEQ ID NO: 383300 - RNA, 32 nt, Human
ccuucccccaccuuccuccucacucucuaccu

SEQ ID NO: 383301 - RNA, 32 nt, Human
ccuucccccacugucccgguccucuuccccug

SEQ ID NO: 383302 - RNA, 32 nt, Human
ccuucccccacuguggugaccuguggccacuu

SEQ ID NO: 383303 - RNA, 32 nt, Human
ccuucccccagccagccagcuguccuggggcc

SEQ ID NO: 383304 - RNA, 32 nt, Human
ccuucccccagcccuggcugggcccagcgccu

SEQ ID NO: 383305 - RNA, 32 nt, Human
ccuucccccagcucuauccaucugccaggccc

SEQ ID NO: 383306 - RNA, 32 nt, Human
ccuucccccaggaaagcuaggagacaagacaa

SEQ ID NO: 383307 - RNA, 32 nt, Human
ccuucccccaggagucacugugccagccccac

SEQ ID NO: 383308 - RNA, 32 nt, Human
ccuucccccaucauccuuccuuagacugaugc

SEQ ID NO: 383309 - RNA, 32 nt, Human
ccuucccccggagacgcccacccggccaccgu

SEQ ID NO: 383310 - RNA, 32 nt, Human
ccuucccccgucgcauaaccaguuccaucauc

SEQ ID NO: 383311 - RNA, 32 nt, Human
ccuucccccuacaagauuaugagaccccagag

SEQ ID NO: 383312 - RNA, 32 nt, Human
ccuucccccucagagaaccaaauagccugagg

SEQ ID NO: 383313 - RNA, 32 nt, Human
ccuucccccuccucccccuccuuuccgucuuc

SEQ ID NO: 383314 - RNA, 32 nt, Human
ccuucccccucuucucuugcucaggccugcac

SEQ ID NO: 383315 - RNA, 32 nt, Human
ccuucccccugccccugccccuaccagcccag

SEQ ID NO: 383316 - RNA, 32 nt, Human
ccuucccccuuuccuuucccuuucuuuccuuu

SEQ ID NO: 383317 - RNA, 32 nt, Human
ccuuccccgaggcugagcugagccuuuuccag

SEQ ID NO: 383318 - RNA, 32 nt, Human
ccuuccccgcucccaaaccagaaaggaaucca

SEQ ID NO: 383319 - RNA, 32 nt, Human
ccuuccccgguggagggagggagcagggagcc

SEQ ID NO: 383320 - RNA, 32 nt, Human
ccuuccccuauagggcccucacuagggccagu

SEQ ID NO: 383321 - RNA, 19 nt, Human
ccuuccccuccacccccca

SEQ ID NO: 383322 - RNA, 32 nt, Human
ccuuccccuccacccgcccuaacccccucuca

SEQ ID NO: 383323 - RNA, 32 nt, Human
ccuuccccuccagaacaccagccagggagggg

SEQ ID NO: 383324 - RNA, 32 nt, Human
ccuuccccuccaggggugcaguggggugggug

SEQ ID NO: 383325 - RNA, 32 nt, Human
ccuuccccuccccacucuucuccuucccuccc

SEQ ID NO: 383326 - RNA, 32 nt, Human
ccuuccccucccccuccccucccccuccccaa

SEQ ID NO: 383327 - RNA, 19 nt, Human
ccuuccccucccccuuccc

SEQ ID NO: 383328 - RNA, 32 nt, Human
ccuuccccuccccuccccucgcccgccuucgc

SEQ ID NO: 383329 - RNA, 32 nt, Human
ccuuccccuccccuccccuuccccucaucuuc

SEQ ID NO: 383330 - RNA, 32 nt, Human
ccuuccccuccccuccucccucuuuuccccuc

SEQ ID NO: 383331 - RNA, 32 nt, Human
ccuuccccuccccucgccuguccucgccaucu

SEQ ID NO: 383332 - RNA, 32 nt, Human
ccuuccccuccccuuccccucccccuccccaa

SEQ ID NO: 383333 - RNA, 32 nt, Human
ccuuccccuccccuucuaccuccuccucggcc

SEQ ID NO: 383334 - RNA, 32 nt, Human
ccuuccccuccucagauguggggaguugccgc

SEQ ID NO: 383335 - RNA, 32 nt, Human
ccuuccccuccucuccccuccuuuuccuuccu

SEQ ID NO: 383336 - RNA, 32 nt, Human
ccuuccccucugcagcuuccaggcuggcgugc

SEQ ID NO: 383337 - RNA, 32 nt, Human
ccuuccccugcuccuccugccuugucugccug

SEQ ID NO: 383338 - RNA, 32 nt, Human
ccuuccccuuauccucccuguaacuugaucca

SEQ ID NO: 383339 - RNA, 23 nt, Human
ccuuccccuucaagcauuuuccu

SEQ ID NO: 383340 - RNA, 19 nt, Human
ccuuccccuuccccuuccc

SEQ ID NO: 383341 - RNA, 32 nt, Human
ccuuccccuugccucacucucucagcuuucuu

SEQ ID NO: 383342 - RNA, 32 nt, Human
ccuuccccuuucucugucuccaacacucuuuc

SEQ ID NO: 383343 - RNA, 32 nt, Human
ccuucccgcagcuggcccugugguguuccgaa

SEQ ID NO: 383344 - RNA, 32 nt, Human
ccuucccgcuccccgucuuccucucucacaca

SEQ ID NO: 383345 - RNA, 19 nt, Human
ccuucccggccaccagcuc

SEQ ID NO: 383346 - RNA, 32 nt, Human
ccuucccguccacccagugcagcucccagugc

SEQ ID NO: 383347 - RNA, 32 nt, Human
ccuucccgugucugagccuggaagaggcucgg

SEQ ID NO: 383348 - RNA, 32 nt, Human
ccuucccuaaaauguugccagcauguaaagga

SEQ ID NO: 383349 - RNA, 32 nt, Human
ccuucccuauaggaacagcccagcacagguau

SEQ ID NO: 383350 - RNA, 32 nt, Human
ccuucccuauccugagcccccuucccuguccu

SEQ ID NO: 383351 - RNA, 32 nt, Human
ccuucccucacaccaucuccuuccaggggaug

SEQ ID NO: 383352 - RNA, 32 nt, Human
ccuucccucacacccugccucgcccccacuuu

SEQ ID NO: 383353 - RNA, 32 nt, Human
ccuucccucacuacugacgagaccauguguaa

SEQ ID NO: 383354 - RNA, 32 nt, Human
ccuucccucacucuuccucauccugcuucucu

SEQ ID NO: 383355 - RNA, 32 nt, Human
ccuucccucacugucucaggugccgagagggg

SEQ ID NO: 383356 - RNA, 32 nt, Human
ccuucccuccacccaggccagcagccgucaga

SEQ ID NO: 383357 - RNA, 32 nt, Human
ccuucccuccauguguuucucaguuucccguu

SEQ ID NO: 383358 - RNA, 32 nt, Human
ccuucccucccccauucuccagaucucccucu

SEQ ID NO: 383359 - RNA, 32 nt, Human
ccuucccuccccucccccucugccuuuuguac

SEQ ID NO: 383360 - RNA, 32 nt, Human
ccuucccucccucccucccucccucccuuucu

SEQ ID NO: 383361 - RNA, 31 nt, Human
ccuucccuccucucuggcccucccuccuccc

SEQ ID NO: 383362 - RNA, 32 nt, Human
ccuucccuccuucccuccuuccuuccuuuuug

SEQ ID NO: 383363 - RNA, 32 nt, Human
ccuucccuccuuccuuccuuuuugucuuuguu

SEQ ID NO: 383364 - RNA, 32 nt, Human
ccuucccucgcaguuccccuguccugagggga

SEQ ID NO: 383365 - RNA, 32 nt, Human
ccuucccucggugugggggauguggcccucuc

SEQ ID NO: 383366 - RNA, 32 nt, Human
ccuucccucucccaucuucucauauccuggcu

SEQ ID NO: 383367 - RNA, 19 nt, Human
ccuucccucuccuccccca

SEQ ID NO: 383368 - RNA, 32 nt, Human
ccuucccucuccuuuucugucaccuuuccccc

SEQ ID NO: 383369 - RNA, 32 nt, Human
ccuucccucuuuccuuccuuccuccuggucug

SEQ ID NO: 383370 - RNA, 32 nt, Human
ccuucccucuuucucaccaccgccuucccucc

SEQ ID NO: 383371 - RNA, 32 nt, Human
ccuucccugagacugucucuucuccugugaaa

SEQ ID NO: 383372 - RNA, 32 nt, Human
ccuucccugaggagcugggacaugcugggcag

SEQ ID NO: 383373 - RNA, 32 nt, Human
ccuucccugcaagaccccuuguggauguuuuu

SEQ ID NO: 383374 - RNA, 32 nt, Human
ccuucccugcagccccuccccaacaggcuugg

SEQ ID NO: 383375 - RNA, 32 nt, Human
ccuucccugccaccccucgcaugucacagcug

SEQ ID NO: 383376 - RNA, 32 nt, Human
ccuucccugccucuugccugugucccagccug

SEQ ID NO: 383377 - RNA, 32 nt, Human
ccuucccugccugaacuuugaagcuguuuugu

SEQ ID NO: 383378 - RNA, 32 nt, Human
ccuucccugccugacccacuguugcagaauga

SEQ ID NO: 383379 - RNA, 32 nt, Human
ccuucccugccugcccaccccuccaugcucca

SEQ ID NO: 383380 - RNA, 32 nt, Human
ccuucccugccugcgcuugugcccccucuccu

SEQ ID NO: 383381 - RNA, 32 nt, Human
ccuucccugccugugggggucaugcugccacu

SEQ ID NO: 383382 - RNA, 32 nt, Human
ccuucccugccuucucugggcugugcggcccc

SEQ ID NO: 383383 - RNA, 32 nt, Human
ccuucccugcucccacccaccugacuccaaau

SEQ ID NO: 383384 - RNA, 32 nt, Human
ccuucccugggccccuucucuccugggcagcc

SEQ ID NO: 383385 - RNA, 32 nt, Human
ccuucccuguacuucccaccucgccaggccug

SEQ ID NO: 383386 - RNA, 32 nt, Human
ccuucccugucaccccaaacugugcgguggcu

SEQ ID NO: 383387 - RNA, 32 nt, Human
ccuucccuuaucaccccugcagccugggaugc

SEQ ID NO: 383388 - RNA, 32 nt, Human
ccuucccuucaaggaguaugucauaugucaca

SEQ ID NO: 383389 - RNA, 20 nt, Human
ccuucccuucaucccuuccc

SEQ ID NO: 383390 - RNA, 32 nt, Human
ccuucccuucaugauaagccagugccagcauc

SEQ ID NO: 383391 - RNA, 32 nt, Human
ccuucccuuccaguggggccugaccuggcuac

SEQ ID NO: 383392 - RNA, 32 nt, Human
ccuucccuucccuccuccuuccuuccuccucu

SEQ ID NO: 383393 - RNA, 32 nt, Human
ccuucccuucugacucagguuggcagauaaac

SEQ ID NO: 383394 - RNA, 32 nt, Human
ccuucccuuguccuucccugaguuccuccagg

SEQ ID NO: 383395 - RNA, 32 nt, Human
ccuucccuuuccaacucuaccucccucacuca

SEQ ID NO: 383396 - RNA, 32 nt, Human
ccuucccuuugauacaguccaggauuuguaag

SEQ ID NO: 383397 - RNA, 20 nt, Human
ccuucccuuuuucccuuccc

SEQ ID NO: 383398 - RNA, 32 nt, Human
ccuuccgaaauacauuugcucaaucauuugca

SEQ ID NO: 383399 - RNA, 32 nt, Human
ccuuccgaauagcugggacuacaggcgcacgc

SEQ ID NO: 383400 - RNA, 32 nt, Human
ccuuccgaaucccagcccuggggcgucagccc

SEQ ID NO: 383401 - RNA, 32 nt, Human
ccuuccgacgccuugucucaggaacaugcuuu

SEQ ID NO: 383402 - RNA, 32 nt, Human
ccuuccgaguagcugggaccacaggcaugcac

SEQ ID NO: 383403 - RNA, 32 nt, Human
ccuuccgaguagcugggacuacaggcgcaugc

SEQ ID NO: 383404 - RNA, 32 nt, Human
ccuuccgaguagcugggacuacagugcuuccu

SEQ ID NO: 383405 - RNA, 32 nt, Human
ccuuccgaguagcugggaucgcaggcgccugc

SEQ ID NO: 383406 - RNA, 32 nt, Human
ccuuccgaguagcugggauuacaggcacccac

SEQ ID NO: 383407 - RNA, 32 nt, Human
ccuuccgaguagcugggauuacaggcaccugc

SEQ ID NO: 383408 - RNA, 32 nt, Human
ccuuccgaguagcugggauuacaggcgcccgc

SEQ ID NO: 383409 - RNA, 32 nt, Human
ccuuccgaguagcugggauuacaggcuccugc

SEQ ID NO: 383410 - RNA, 32 nt, Human
ccuuccgaguagcugggauuacagggauguag

SEQ ID NO: 383411 - RNA, 32 nt, Human
ccuuccgaguagcugggauuacaggugcccgc

SEQ ID NO: 383412 - RNA, 32 nt, Human
ccuuccgaguagcugggauuacaggugugugc

SEQ ID NO: 383413 - RNA, 32 nt, Human
ccuuccgaguagcugggauugcaggcgugugc

SEQ ID NO: 383414 - RNA, 22 nt, Human
ccuuccgauuccaccuccgccu

SEQ ID NO: 383415 - RNA, 32 nt, Human
ccuuccgcccucccuucuuuccuuccuuccuu

SEQ ID NO: 383416 - RNA, 32 nt, Human
ccuuccgccgcucugagcccuuccuggcaccc

SEQ ID NO: 383417 - RNA, 32 nt, Human
ccuuccgccuggggcccugccgacccccugcc

SEQ ID NO: 383418 - RNA, 32 nt, Human
ccuuccgccuggggcucccugugaccucucag

SEQ ID NO: 383419 - RNA, 32 nt, Human
ccuuccgcuccugcccagccugggggaaggag

SEQ ID NO: 383420 - RNA, 32 nt, Human
ccuuccgcuccuggcugccacaggguccuccg

SEQ ID NO: 383421 - RNA, 32 nt, Human
ccuuccgcuugcagcuucccugggauuuuugu

SEQ ID NO: 383422 - RNA, 32 nt, Human
ccuuccggauccagagcugugcagcccaggcc

SEQ ID NO: 383423 - RNA, 32 nt, Human
ccuuccggaucggaagaagcugacuuccucuc

SEQ ID NO: 383424 - RNA, 32 nt, Human
ccuuccggcagccucuuggccucuaauuuguu

SEQ ID NO: 383425 - RNA, 32 nt, Human
ccuuccggccgguuuccagacgcccagguggc

SEQ ID NO: 383426 - RNA, 32 nt, Human
ccuuccggcucacacccccgcccacacuccug

SEQ ID NO: 383427 - RNA, 20 nt, Human
ccuuccggcuccggcacggg

SEQ ID NO: 383428 - RNA, 21 nt, Human
ccuuccgggcagagaccagag

SEQ ID NO: 383429 - RNA, 32 nt, Human
ccuuccgggccccgugccccugacugggaugc

SEQ ID NO: 383430 - RNA, 32 nt, Human
ccuuccgggccuccugggcuucugcuggggac

SEQ ID NO: 383431 - RNA, 32 nt, Human
ccuuccggguucccagggcugcugugggaaca

SEQ ID NO: 383432 - RNA, 32 nt, Human
ccuuccggucuacaagagcucucaaggcuggg

SEQ ID NO: 383433 - RNA, 32 nt, Human
ccuuccggugcucacacgcccacgccgugcca

SEQ ID NO: 383434 - RNA, 28 nt, Human
ccuuccgguggagcugccucguuccuuu

SEQ ID NO: 383435 - RNA, 32 nt, Human
ccuuccguuucuucuuccagggugggguggcc

SEQ ID NO: 383436 - RNA, 32 nt, Human
ccuuccuacauacucuugcgaccauuaggcuc

SEQ ID NO: 383437 - RNA, 32 nt, Human
  misc_feature (29)..(29): n is a, c, g, or u
ccuuccuacucccauucaucgcucucaanauu

SEQ ID NO: 383438 - RNA, 32 nt, Human
ccuuccuacugguuuagacuacacuuacaaca

SEQ ID NO: 383439 - RNA, 32 nt, Human
ccuuccuacuuuccuucauucucucuuccuuc

SEQ ID NO: 383440 - RNA, 32 nt, Human
ccuuccuagcagccuggugagcucacuccuuc

SEQ ID NO: 383441 - RNA, 32 nt, Human
ccuuccuaguagcugggacuacagguaugcac

SEQ ID NO: 383442 - RNA, 32 nt, Human
ccuuccuagugcuaugguuucugccauuggcc

SEQ ID NO: 383443 - RNA, 25 nt, Human
ccuuccucaauaguccuguuggugg

SEQ ID NO: 383444 - RNA, 32 nt, Human
ccuuccucaccacuucccucagucccaacucc

SEQ ID NO: 383445 - RNA, 32 nt, Human
ccuuccucaccgcagauguuucugccucuuaa

SEQ ID NO: 383446 - RNA, 32 nt, Human
ccuuccucacuggcccccuccaccugcccaua

SEQ ID NO: 383447 - RNA, 32 nt, Human
ccuuccucacugguacugccugcuguuuucua

SEQ ID NO: 383448 - RNA, 22 nt, Human
ccuuccucacuuuggacugcug

SEQ ID NO: 383449 - RNA, 32 nt, Human
ccuuccucagcuucaccuugauacugggccuc

SEQ ID NO: 383450 - RNA, 21 nt, Human
ccuuccucaguucccagcugg

SEQ ID NO: 383451 - RNA, 32 nt, Human
ccuuccucaucucucccugccugugcagaccu

SEQ ID NO: 383452 - RNA, 32 nt, Human
ccuuccucauucuccaagcucaucaacagguc

SEQ ID NO: 383453 - RNA, 32 nt, Human
ccuuccucauucucuuuaccaguauccuggca

SEQ ID NO: 383454 - RNA, 32 nt, Human
ccuuccuccacucccucccuuccccuccccuu

SEQ ID NO: 383455 - RNA, 32 nt, Human
ccuuccuccagccucacaaccuuucugcuggg

SEQ ID NO: 383456 - RNA, 32 nt, Human
ccuuccuccagccugugcgcaccugcccuccu

SEQ ID NO: 383457 - RNA, 32 nt, Human
ccuuccuccaggagaaggggcccaaggucccc

SEQ ID NO: 383458 - RNA, 20 nt, Human
ccuuccuccagugccugcug

SEQ ID NO: 383459 - RNA, 23 nt, Human
ccuuccuccauccuauccacugg

SEQ ID NO: 383460 - RNA, 21 nt, Human
ccuuccucccaaguuagcagg

SEQ ID NO: 383461 - RNA, 22 nt, Human
ccuuccucccaccccugguggu

SEQ ID NO: 383462 - RNA, 21 nt, Human
ccuuccucccacuggacaugg

SEQ ID NO: 383463 - RNA, 32 nt, Human
ccuuccucccacuggcaugccugcugcaacgg

SEQ ID NO: 383464 - RNA, 32 nt, Human
ccuuccucccagaaccuguggucccugauuuu

SEQ ID NO: 383465 - RNA, 32 nt, Human
ccuuccucccaucacuagacccuggcagcagc

SEQ ID NO: 383466 - RNA, 21 nt, Human
ccuuccucccaucccccuugg

SEQ ID NO: 383467 - RNA, 19 nt, Human
ccuuccucccauccucugc

SEQ ID NO: 383468 - RNA, 24 nt, Human
ccuuccuccccaauccugacuggc

SEQ ID NO: 383469 - RNA, 20 nt, Human
ccuuccuccccggauuggcu

SEQ ID NO: 383470 - RNA, 32 nt, Human
ccuuccuccccucucccccagugacuuuaucc

SEQ ID NO: 383471 - RNA, 24 nt, Human
ccuuccuccccugccugcagcugg

SEQ ID NO: 383472 - RNA, 24 nt, Human
ccuuccuccccuggcacuggcugg

SEQ ID NO: 383473 - RNA, 21 nt, Human
ccuuccuccccuuccaggcgg

SEQ ID NO: 383474 - RNA, 23 nt, Human
ccuuccucccgggggucagcugg

SEQ ID NO: 383475 - RNA, 32 nt, Human
ccuuccucccgucuugccuucucccucgaguu

SEQ ID NO: 383476 - RNA, 32 nt, Human
ccuuccucccuccugcaucugagcuuugucuc

SEQ ID NO: 383477 - RNA, 22 nt, Human
ccuuccucccugcgcgggcugg

SEQ ID NO: 383478 - RNA, 24 nt, Human
ccuuccucccuggaguuuggcuua

SEQ ID NO: 383479 - RNA, 32 nt, Human
ccuuccucccuuccuuccuuccuuccuuccuu

SEQ ID NO: 383480 - RNA, 23 nt, Human
ccuuccuccgacaccucggcugg

SEQ ID NO: 383481 - RNA, 32 nt, Human
ccuuccuccgugcgcccugccgggcggcgagc

SEQ ID NO: 383482 - RNA, 32 nt, Human
ccuuccuccucccaugggucccucccaguagg

SEQ ID NO: 383483 - RNA, 32 nt, Human
ccuuccuccucuauagcuucuggguguccccc

SEQ ID NO: 383484 - RNA, 32 nt, Human
ccuuccuccucuccucccuguccugagccuua

SEQ ID NO: 383485 - RNA, 32 nt, Human
ccuuccuccucuuccuccuccuccuccaccuc

SEQ ID NO: 383486 - RNA, 23 nt, Human
ccuuccuccuggccuggacgcug

SEQ ID NO: 383487 - RNA, 32 nt, Human
ccuuccuccuuucaaaagaguucuuaacccaa

SEQ ID NO: 383488 - RNA, 32 nt, Human
ccuuccuccuuuccuaucuuccuuccucucuc

SEQ ID NO: 383489 - RNA, 23 nt, Human
ccuuccucggaccugggcugucg

SEQ ID NO: 383490 - RNA, 24 nt, Human
ccuuccucuagcagacugugcagg

SEQ ID NO: 383491 - RNA, 32 nt, Human
ccuuccucucccaccaugcgaugagcauccuu

SEQ ID NO: 383492 - RNA, 21 nt, Human
ccuuccucucccaggucgcug

SEQ ID NO: 383493 - RNA, 32 nt, Human
ccuuccucuccccuccucccaucccucauagg

SEQ ID NO: 383494 - RNA, 32 nt, Human
ccuuccucuccccuccucccauccuucauagg

SEQ ID NO: 383495 - RNA, 32 nt, Human
ccuuccucuccucccugaucauccuauccacc

SEQ ID NO: 383496 - RNA, 32 nt, Human
ccuuccucuccuccuccuccccuccagccgcu

SEQ ID NO: 383497 - RNA, 32 nt, Human
ccuuccucuccuccuucccucucccucucugc

SEQ ID NO: 383498 - RNA, 32 nt, Human
ccuuccucucuccuccccuccuuccucucucc

SEQ ID NO: 383499 - RNA, 32 nt, Human
ccuuccucucucucaccuucaccacccaacac

SEQ ID NO: 383500 - RNA, 32 nt, Human
ccuuccucugcauguggccacaggggaccuuu

SEQ ID NO: 383501 - RNA, 22 nt, Human
ccuuccucugccuccugagcgc

SEQ ID NO: 383502 - RNA, 22 nt, Human
ccuuccucugcugaaaaggcug

SEQ ID NO: 383503 - RNA, 32 nt, Human
ccuuccucugcuuccuccuuuugacuuauuug

SEQ ID NO: 383504 - RNA, 20 nt, Human
ccuuccucugucucugcucc

SEQ ID NO: 383505 - RNA, 32 nt, Human
ccuuccucugucugacaggaaucuccccguuu

SEQ ID NO: 383506 - RNA, 24 nt, Human
ccuuccucuguuccuucuggccgg

SEQ ID NO: 383507 - RNA, 32 nt, Human
ccuuccucuucacacugagcccucucugauuc

SEQ ID NO: 383508 - RNA, 32 nt, Human
ccuuccucuucccccuuccacccucacauccc

SEQ ID NO: 383509 - RNA, 32 nt, Human
ccuuccucuuccugccuccucaucucccuuaa

SEQ ID NO: 383510 - RNA, 32 nt, Human
ccuuccucuuucuccuccuaccucugcccugu

SEQ ID NO: 383511 - RNA, 32 nt, Human
ccuuccugaagauccuccacugcugcucugcu

SEQ ID NO: 383512 - RNA, 32 nt, Human
ccuuccugaagugcuggcagcccaguggcacc

SEQ ID NO: 383513 - RNA, 32 nt, Human
ccuuccugaccccugugcucagccuggaauug

SEQ ID NO: 383514 - RNA, 32 nt, Human
ccuuccugaccuuccucagucugcagcucuuu

SEQ ID NO: 383515 - RNA, 32 nt, Human
ccuuccugagccagggcuuugcuguaguugug

SEQ ID NO: 383516 - RNA, 32 nt, Human
ccuuccugaggcugaguuuacucucuaggagg

SEQ ID NO: 383517 - RNA, 32 nt, Human
ccuuccugcacgccauucuccaccucaguauc

SEQ ID NO: 383518 - RNA, 32 nt, Human
ccuuccugcacucauucucaaacauacugaug

SEQ ID NO: 383519 - RNA, 32 nt, Human
ccuuccugcagaccuggcugggccugggcuuc

SEQ ID NO: 383520 - RNA, 22 nt, Human
ccuuccugcagauggcuucuca

SEQ ID NO: 383521 - RNA, 32 nt, Human
ccuuccugcaguucccagcccucggagccccc

SEQ ID NO: 383522 - RNA, 32 nt, Human
ccuuccugccaaaaauaaacaugugaaacugc

SEQ ID NO: 383523 - RNA, 32 nt, Human
ccuuccugccaaggcuggaggccgccaggugu

SEQ ID NO: 383524 - RNA, 32 nt, Human
ccuuccugccacugccccacccugccccacug

SEQ ID NO: 383525 - RNA, 32 nt, Human
ccuuccugccaggagcucuccacccacucaca

SEQ ID NO: 383526 - RNA, 32 nt, Human
ccuuccugccaggcuccguuguagggguuaca

SEQ ID NO: 383527 - RNA, 32 nt, Human
ccuuccugccccaacuccuuccagcuagugac

SEQ ID NO: 383528 - RNA, 32 nt, Human
ccuuccugcccucugcccagcuugccucugcc

SEQ ID NO: 383529 - RNA, 32 nt, Human
ccuuccugcccuucugccugccugugucugcu

SEQ ID NO: 383530 - RNA, 32 nt, Human
ccuuccugccuaguaauguuccagcuuuaccc

SEQ ID NO: 383531 - RNA, 32 nt, Human
ccuuccugccugacacccaguguugagagugc

SEQ ID NO: 383532 - RNA, 32 nt, Human
ccuuccugcuccccaguccuggcagugccgug

SEQ ID NO: 383533 - RNA, 32 nt, Human
ccuuccugcuccgucuuugggguccucaaggc

SEQ ID NO: 383534 - RNA, 20 nt, Human
ccuuccugcugagccucaca

SEQ ID NO: 383535 - RNA, 21 nt, Human
ccuuccugcugagcuuccaca

SEQ ID NO: 383536 - RNA, 32 nt, Human
ccuuccuggagagagggaggugaaagcuggug

SEQ ID NO: 383537 - RNA, 32 nt, Human
ccuuccuggaucuccagugccugggccaggaa

SEQ ID NO: 383538 - RNA, 32 nt, Human
ccuuccuggauuucacgcaucccauccucugg

SEQ ID NO: 383539 - RNA, 31 nt, Human
ccuuccuggcagggaaagugggugaacagag

SEQ ID NO: 383540 - RNA, 20 nt, Human
ccuuccuggcgccugugcag

SEQ ID NO: 383541 - RNA, 32 nt, Human
ccuuccugggccuucuuuaucuccccaagcca

SEQ ID NO: 383542 - RNA, 32 nt, Human
ccuuccuggguaccccaaacucuuagcccuag

SEQ ID NO: 383543 - RNA, 32 nt, Human
ccuuccugguacugcagucaaccaaagauggc

SEQ ID NO: 383544 - RNA, 32 nt, Human
ccuuccuggucaggcuguucagcugggcgcug

SEQ ID NO: 383545 - RNA, 32 nt, Human
ccuuccuggucucuggccgccugcugccaggg

SEQ ID NO: 383546 - RNA, 32 nt, Human
ccuuccuggucugagacuagcucugggggugg

SEQ ID NO: 383547 - RNA, 32 nt, Human
ccuuccuggugcccuucagccagguccagaau

SEQ ID NO: 383548 - RNA, 32 nt, Human
ccuuccugguuggcuguguucuuaggggugug

SEQ ID NO: 383549 - RNA, 32 nt, Human
ccuuccugucucucauuuucaccaucugacug

SEQ ID NO: 383550 - RNA, 32 nt, Human
ccuuccuguggaaggcagaggcagugagggag

SEQ ID NO: 383551 - RNA, 32 nt, Human
ccuuccugugucccuuugcaagcuuccaggcg

SEQ ID NO: 383552 - RNA, 32 nt, Human
ccuuccuguuggaaugaaaacauuucgauuuu

SEQ ID NO: 383553 - RNA, 32 nt, Human
ccuuccuuaagaaaauacaaaauuaggaacag

SEQ ID NO: 383554 - RNA, 32 nt, Human
ccuuccuuagacagaggccagcagggacugug

SEQ ID NO: 383555 - RNA, 32 nt, Human
ccuuccuuauuuccuuuaguuuccuuccuuag

SEQ ID NO: 383556 - RNA, 32 nt, Human
ccuuccuucaagccuucagccccuccagcucc

SEQ ID NO: 383557 - RNA, 32 nt, Human
ccuuccuucacacccccucacagacuccuugu

SEQ ID NO: 383558 - RNA, 32 nt, Human
ccuuccuucagagucccugcgagcccucagga

SEQ ID NO: 383559 - RNA, 32 nt, Human
ccuuccuucauuccuucauuccuuccuuuguu

SEQ ID NO: 383560 - RNA, 32 nt, Human
ccuuccuuccagccugggcucuggcguguucu

SEQ ID NO: 383561 - RNA, 32 nt, Human
ccuuccuucccaaucucccugccagggcccac

SEQ ID NO: 383562 - RNA, 32 nt, Human
ccuuccuucccauuuacccauuuccuuccagu

SEQ ID NO: 383563 - RNA, 32 nt, Human
ccuuccuuccccucccagguugcugggagaaa

SEQ ID NO: 383564 - RNA, 32 nt, Human
ccuuccuucccucccuuccuccuucucuccuu

SEQ ID NO: 383565 - RNA, 32 nt, Human
ccuuccuucccuggcccuuggcugugacacaa

SEQ ID NO: 383566 - RNA, 32 nt, Human
ccuuccuucccuuuucuuuucuuuucuuucua

SEQ ID NO: 383567 - RNA, 32 nt, Human
ccuuccuuccgaggagcuuucuggcugccuaa

SEQ ID NO: 383568 - RNA, 32 nt, Human
ccuuccuuccuacccccuucucccucucccuu

SEQ ID NO: 383569 - RNA, 32 nt, Human
ccuuccuuccuuccuuccuuccuuccucucuc

SEQ ID NO: 383570 - RNA, 32 nt, Human
ccuuccuuccuuccuuccuuccuuccuucauu

SEQ ID NO: 383571 - RNA, 32 nt, Human
ccuuccuuccuuccuuccuuccuuccuucccu

SEQ ID NO: 383572 - RNA, 32 nt, Human
ccuuccuuccuuccuuccuuccuuccuuccuc

SEQ ID NO: 383573 - RNA, 32 nt, Human
ccuuccuuccuuccuuccuuccuuccuuccuu

SEQ ID NO: 383574 - RNA, 32 nt, Human
ccuuccuuccuuccuuccuuccuuccuucgag

SEQ ID NO: 383575 - RNA, 32 nt, Human
ccuuccuuccuuccuuccuuccuuccuucuuu

SEQ ID NO: 383576 - RNA, 32 nt, Human
ccuuccuuccuuccuucguuccuuccuuccuu

SEQ ID NO: 383577 - RNA, 32 nt, Human
ccuuccuuccuuccuucuuuccuuccuuccuu

SEQ ID NO: 383578 - RNA, 32 nt, Human
ccuuccuuccuucguuccuuccuuccuucauu

SEQ ID NO: 383579 - RNA, 32 nt, Human
ccuuccuuccuucuuuccuuccuuccuuccuu

SEQ ID NO: 383580 - RNA, 32 nt, Human
ccuuccuucucagggucuccccagcccagucc

SEQ ID NO: 383581 - RNA, 19 nt, Human
ccuuccuucugcuucuccc

SEQ ID NO: 383582 - RNA, 32 nt, Human
ccuuccuucugguggcagagccagucuucugg

SEQ ID NO: 383583 - RNA, 32 nt, Human
ccuuccuucuucuccccuuccgccaucuccac

SEQ ID NO: 383584 - RNA, 32 nt, Human
ccuuccuucuuuccuuccuuccuuccuuccuu

SEQ ID NO: 383585 - RNA, 32 nt, Human
ccuuccuucuuuccuuucucuucuuuuaucuc

SEQ ID NO: 383586 - RNA, 24 nt, Human
ccuuccuugaaaugcuggacgccg

SEQ ID NO: 383587 - RNA, 32 nt, Human
ccuuccuugacugucuagccacucccucccag

SEQ ID NO: 383588 - RNA, 32 nt, Human
ccuuccuugagcugucgcuguacucugaaguu

SEQ ID NO: 383589 - RNA, 32 nt, Human
ccuuccuugugugucugcucuggaccacuucc

SEQ ID NO: 383590 - RNA, 32 nt, Human
ccuuccuuuagcccacagcccagagucccagc

SEQ ID NO: 383591 - RNA, 32 nt, Human
ccuuccuuucacuccauucauuguccucucug

SEQ ID NO: 383592 - RNA, 32 nt, Human
ccuuccuuuccagagcaauugucuccuccucu

SEQ ID NO: 383593 - RNA, 32 nt, Human
ccuuccuuucccuagucacaggaucgcaguuu

SEQ ID NO: 383594 - RNA, 32 nt, Human
ccuuccuuucccucccauucugagggccucag

SEQ ID NO: 383595 - RNA, 32 nt, Human
ccuuccuuucccuccuccucccccucuccgcu

SEQ ID NO: 383596 - RNA, 32 nt, Human
ccuuccuuucuuccauucauccuuccuugccu

SEQ ID NO: 383597 - RNA, 32 nt, Human
ccuuccuuucuucccuccucccccucauccuu

SEQ ID NO: 383598 - RNA, 22 nt, Human
ccuuccuuugccucugucugcc

SEQ ID NO: 383599 - RNA, 21 nt, Human
ccuuccuuugucacuugcccg

SEQ ID NO: 383600 - RNA, 23 nt, Human
ccuuccuuuguccugcccgcugg

SEQ ID NO: 383601 - RNA, 32 nt, Human
ccuuccuuuguuccuuuguuccuuccuuccuu

SEQ ID NO: 383602 - RNA, 32 nt, Human
ccuuccuuuuauuccuguggggccagacaggg

SEQ ID NO: 383603 - RNA, 32 nt, Human
ccuucgaaaugaggguccugggugggcgcugc

SEQ ID NO: 383604 - RNA, 16 nt, Human
ccuucgaauuugguca

SEQ ID NO: 383605 - RNA, 32 nt, Human
ccuucgacagcugagagacaaaaagaagcccg

SEQ ID NO: 383606 - RNA, 32 nt, Human
ccuucgauccccaucagagaggucacaugagc

SEQ ID NO: 383607 - RNA, 32 nt, Human
ccuucgcagucgcgcaccgacgcucaaacgcg

SEQ ID NO: 383608 - RNA, 32 nt, Human
ccuucgcaucuccuccucgcgcgucuuggaca

SEQ ID NO: 383609 - RNA, 32 nt, Human
ccuucgccaggacccgacacaccaggcuucgc

SEQ ID NO: 383610 - RNA, 19 nt, Human
ccuucgcccuguggccugc

SEQ ID NO: 383611 - RNA, 32 nt, Human
ccuucgccgaagaaguacuuguugcgcagugg

SEQ ID NO: 383612 - RNA, 32 nt, Human
ccuucgccgagggccgcagggagccagagacu

SEQ ID NO: 383613 - RNA, 32 nt, Human
ccuucgccucccagguucaagugauuguccca

SEQ ID NO: 383614 - RNA, 32 nt, Human
ccuucgccuccuggguucaaguguuuccggcu

SEQ ID NO: 383615 - RNA, 32 nt, Human
ccuucgccuuuauuuuuacucucccucuucug

SEQ ID NO: 383616 - RNA, 32 nt, Human
ccuucgcuaugacuuccugauagcggaaaagg

SEQ ID NO: 383617 - RNA, 32 nt, Human
ccuucgcuccccgaccuccugcugcagcucug

SEQ ID NO: 383618 - RNA, 32 nt, Human
ccuucggaaacgcgcugacaccaggcgaagcc

SEQ ID NO: 383619 - RNA, 32 nt, Human
ccuucggagaaagagcuggauuggcuggggau

SEQ ID NO: 383620 - RNA, 32 nt, Human
ccuucggaguagcugggaucacagcugcaggc

SEQ ID NO: 383621 - RNA, 32 nt, Human
ccuucggaguagcugggauuacaggcaggugc

SEQ ID NO: 383622 - RNA, 32 nt, Human
ccuucggaguggcugggauuacaggugugcgc

SEQ ID NO: 383623 - RNA, 32 nt, Human
ccuucggaguuucuuagucauuacuguccuuu

SEQ ID NO: 383624 - RNA, 32 nt, Human
ccuucggcacagaggcccuccuccuggcccac

SEQ ID NO: 383625 - RNA, 24 nt, Human
ccuucggcccacucugggggccug

SEQ ID NO: 383626 - RNA, 22 nt, Human
ccuucggcccuguuccccaagg

SEQ ID NO: 383627 - RNA, 17 nt, Human
ccuucggccuccuugua

SEQ ID NO: 383628 - RNA, 32 nt, Human
ccuucggggugagcccccagagcuggaccuga

SEQ ID NO: 383629 - RNA, 25 nt, Human
ccuucggucgggcgugauuucagca

SEQ ID NO: 383630 - RNA, 32 nt, Human
ccuucggugcacagggaacagcagggaccuga

SEQ ID NO: 383631 - RNA, 32 nt, Human
ccuucggugguggcggcggcagcugcugccgg

SEQ ID NO: 383632 - RNA, 32 nt, Human
ccuucgguuccuucucugcuggccccagaagc

SEQ ID NO: 383633 - RNA, 32 nt, Human
ccuucgguuguuccagcuccuucugaauacac

SEQ ID NO: 383634 - RNA, 32 nt, Human
ccuucguauguaggugagaaacuuagcuggaa

SEQ ID NO: 383635 - RNA, 32 nt, Human
ccuucgucucuucaucugucaccaaagacaaa

SEQ ID NO: 383636 - RNA, 28 nt, Human
ccuucgucugggagugggguggggaggc

SEQ ID NO: 383637 - RNA, 32 nt, Human
ccuucgucuuucucccaugcuggaugcuuccu

SEQ ID NO: 383638 - RNA, 32 nt, Human
ccuucgugcagcuucuugccccuguugacgug

SEQ ID NO: 383639 - RNA, 32 nt, Human
ccuucguggacagaagccagaguucagagagg

SEQ ID NO: 383640 - RNA, 32 nt, Human
ccuucgugugagccaaccccacccgcuccacc

SEQ ID NO: 383641 - RNA, 21 nt, Human
ccuucguucaagggucaggaa

SEQ ID NO: 383642 - RNA, 32 nt, Human
ccuucguuuucaucuucuaguuugucuauuuu

SEQ ID NO: 383643 - RNA, 32 nt, Human
ccuucuaaagugcugggauuacaggcgugagc

SEQ ID NO: 383644 - RNA, 32 nt, Human
ccuucuaaagugcugggauuacaggcgugagu

SEQ ID NO: 383645 - RNA, 32 nt, Human
ccuucuaaagugcugggauuacaggugugagc

SEQ ID NO: 383646 - RNA, 32 nt, Human
ccuucuaagaagagaagacagggacacacagg

SEQ ID NO: 383647 - RNA, 32 nt, Human
ccuucuaauaaaagagacuuuccucuucccuu

SEQ ID NO: 383648 - RNA, 32 nt, Human
ccuucuacagcuuagcuccgucuuuucaacca

SEQ ID NO: 383649 - RNA, 32 nt, Human
ccuucuacauaacuccaauaccaaaauagaaa

SEQ ID NO: 383650 - RNA, 32 nt, Human
ccuucuaccaggccacucucaggcucaccuua

SEQ ID NO: 383651 - RNA, 32 nt, Human
ccuucuaccagguccccauccugcugccagcu

SEQ ID NO: 383652 - RNA, 32 nt, Human
ccuucuacccugcaccugaccucaugaucccc

SEQ ID NO: 383653 - RNA, 32 nt, Human
ccuucuacuaccugugugaucuuggggaaauu

SEQ ID NO: 383654 - RNA, 32 nt, Human
ccuucuacuuggggaucaugcagagagcuuca

SEQ ID NO: 383655 - RNA, 32 nt, Human
ccuucuacuuguguccauuugaagcaggaggg

SEQ ID NO: 383656 - RNA, 32 nt, Human
ccuucuagaaaaucaguguucacagagacugc

SEQ ID NO: 383657 - RNA, 32 nt, Human
ccuucuagaagagaugauggugggagagugcu

SEQ ID NO: 383658 - RNA, 32 nt, Human
ccuucuagagcagaaaagggagagaaguguug

SEQ ID NO: 383659 - RNA, 32 nt, Human
ccuucuagccuucuccugcccuccugugucuc

SEQ ID NO: 383660 - RNA, 32 nt, Human
ccuucuaggaauggggaacaggggaggggagg

SEQ ID NO: 383661 - RNA, 32 nt, Human
ccuucuaggaaugggggacagggggaggggag

SEQ ID NO: 383662 - RNA, 32 nt, Human
ccuucuagucagaagcgagcuauagaguuggc

SEQ ID NO: 383663 - RNA, 32 nt, Human
ccuucuauccugaauaacuagcauggaaaagu

SEQ ID NO: 383664 - RNA, 32 nt, Human
ccuucuaucugccucccaacuccucaagguca

SEQ ID NO: 383665 - RNA, 32 nt, Human
ccuucuaugguaucauacacuucuuuuccugg

SEQ ID NO: 383666 - RNA, 22 nt, Human
ccuucuauuuucuauaauugua

SEQ ID NO: 383667 - RNA, 32 nt, Human
ccuucucaaaacugagucagcaagagaaaauc

SEQ ID NO: 383668 - RNA, 21 nt, Human
ccuucucaaugcaugugcagg

SEQ ID NO: 383669 - RNA, 32 nt, Human
ccuucucaauuucucauagauuuuaccuuaaa

SEQ ID NO: 383670 - RNA, 32 nt, Human
ccuucucaccagcccccuccucccuuuucauc

SEQ ID NO: 383671 - RNA, 32 nt, Human
ccuucucaccccuugcaguguugcaggcucag

SEQ ID NO: 383672 - RNA, 32 nt, Human
ccuucucacuucagacacauacaucacuuuca

SEQ ID NO: 383673 - RNA, 32 nt, Human
ccuucucacuucugccugaaucacacaggcua

SEQ ID NO: 383674 - RNA, 32 nt, Human
ccuucucagaaaacuucucuucugagccucuu

SEQ ID NO: 383675 - RNA, 32 nt, Human
ccuucucagaaccaguccccugcugaccucaa

SEQ ID NO: 383676 - RNA, 32 nt, Human
ccuucucagaagcaaggaguggacaagccucu

SEQ ID NO: 383677 - RNA, 21 nt, Human
ccuucucagauaccugugcau

SEQ ID NO: 383678 - RNA, 32 nt, Human
ccuucucagccacacuucccaccccagggggu

SEQ ID NO: 383679 - RNA, 32 nt, Human
ccuucucagccucugaggauccaggcucagga

SEQ ID NO: 383680 - RNA, 32 nt, Human
ccuucucagcggugugauggcagauggacacu

SEQ ID NO: 383681 - RNA, 32 nt, Human
ccuucucagcgugaccccagacauccugcaac

SEQ ID NO: 383682 - RNA, 32 nt, Human
ccuucucaggaaccuagaaacaacaccgcuug

SEQ ID NO: 383683 - RNA, 32 nt, Human
ccuucucaguaugccagcugucucaauggcuc

SEQ ID NO: 383684 - RNA, 32 nt, Human
ccuucucaguccagcuggaggcuggagggaga

SEQ ID NO: 383685 - RNA, 32 nt, Human
ccuucucaguuauucuggaauaaggcaaggag

SEQ ID NO: 383686 - RNA, 32 nt, Human
ccuucucaguuucuccccaaccuccccuuuuc

SEQ ID NO: 383687 - RNA, 32 nt, Human
ccuucucauaacuauguccacccucuacgucu

SEQ ID NO: 383688 - RNA, 32 nt, Human
ccuucucauccgggcauucgggucccugcgag

SEQ ID NO: 383689 - RNA, 32 nt, Human
ccuucucauggugcuacuuccucugucagcua

SEQ ID NO: 383690 - RNA, 32 nt, Human
ccuucucauucccagcgcguccuucugagcuc

SEQ ID NO: 383691 - RNA, 32 nt, Human
ccuucucauuuuuguuaguuugcccuuucggc

SEQ ID NO: 383692 - RNA, 32 nt, Human
ccuucuccaagcucuggagcccucgcguccca

SEQ ID NO: 383693 - RNA, 32 nt, Human
ccuucuccaccccagcccccaaagcagcccuu

SEQ ID NO: 383694 - RNA, 32 nt, Human
ccuucuccacggcagcgaccuccgucucaagu

SEQ ID NO: 383695 - RNA, 32 nt, Human
ccuucuccagccucucuuucucugcuugauga

SEQ ID NO: 383696 - RNA, 32 nt, Human
ccuucuccagcuucaucaucucacaguggucu

SEQ ID NO: 383697 - RNA, 18 nt, Human
ccuucuccagcuuccugg

SEQ ID NO: 383698 - RNA, 32 nt, Human
ccuucuccaggauggcagaggcggaauugcac

SEQ ID NO: 383699 - RNA, 32 nt, Human
ccuucuccagugcucucggggagguugcacca

SEQ ID NO: 383700 - RNA, 32 nt, Human
ccuucuccauaccccucuccccagcaucauga

SEQ ID NO: 383701 - RNA, 32 nt, Human
ccuucuccauaggaagaggaggcgaguccccu

SEQ ID NO: 383702 - RNA, 32 nt, Human
ccuucuccauucucccaaccucuugggccugg

SEQ ID NO: 383703 - RNA, 32 nt, Human
ccuucuccauuuucucaguuaucucuaccagu

SEQ ID NO: 383704 - RNA, 32 nt, Human
ccuucucccaccccuccuggaccuagccaccc

SEQ ID NO: 383705 - RNA, 32 nt, Human
ccuucucccagaugcaggauguuuucaaccag

SEQ ID NO: 383706 - RNA, 21 nt, Human
ccuucucccauggagcauggc

SEQ ID NO: 383707 - RNA, 22 nt, Human
ccuucuccccacccugccgagg

SEQ ID NO: 383708 - RNA, 32 nt, Human
ccuucuccccuccagaccccuacccuuuccca

SEQ ID NO: 383709 - RNA, 32 nt, Human
ccuucuccccucuaaaccuucucccaucucuu

SEQ ID NO: 383710 - RNA, 32 nt, Human
ccuucuccccuucagaauucccgcccccaccc

SEQ ID NO: 383711 - RNA, 19 nt, Human
ccuucucccgcccuccuca

SEQ ID NO: 383712 - RNA, 22 nt, Human
ccuucucccgcccuccucaccu

SEQ ID NO: 383713 - RNA, 32 nt, Human
ccuucucccucagaccagggaccgucaucauc

SEQ ID NO: 383714 - RNA, 31 nt, Human
ccuucucccucccacaggccuguguucuugg

SEQ ID NO: 383715 - RNA, 20 nt, Human
ccuucucccucucccuuccc

SEQ ID NO: 383716 - RNA, 32 nt, Human
ccuucucccuuuacccuucuccagaaauaaag

SEQ ID NO: 383717 - RNA, 32 nt, Human
ccuucucccuuuccaaccccuuccuuccuuuu

SEQ ID NO: 383718 - RNA, 32 nt, Human
ccuucucccuuuccuucuuuaccucccucccu

SEQ ID NO: 383719 - RNA, 32 nt, Human
ccuucuccucagccuucuccuuagccgguggc

SEQ ID NO: 383720 - RNA, 32 nt, Human
ccuucuccuccaccaguuccccagagcagagc

SEQ ID NO: 383721 - RNA, 32 nt, Human
ccuucuccuccaccugcuaccuaacagccaaa

SEQ ID NO: 383722 - RNA, 22 nt, Human
ccuucuccuccccgcagcuugc

SEQ ID NO: 383723 - RNA, 32 nt, Human
ccuucuccuccuccuccuccucuucccuuggg

SEQ ID NO: 383724 - RNA, 32 nt, Human
ccuucuccuccuccuccuucucuuccuuuccu

SEQ ID NO: 383725 - RNA, 32 nt, Human
ccuucuccucuuccugacccucccuccccugg

SEQ ID NO: 383726 - RNA, 32 nt, Human
ccuucuccugggagguccugcugcaacucaag

SEQ ID NO: 383727 - RNA, 32 nt, Human
ccuucuccuuucucccauucuucccugccucu

SEQ ID NO: 383728 - RNA, 32 nt, Human
ccuucuccuuuuccuuuguggccuuaacccuu

SEQ ID NO: 383729 - RNA, 32 nt, Human
ccuucuccuuuuuccuccucuuccuccuuccu

SEQ ID NO: 383730 - RNA, 20 nt, Human
ccuucucgccacucuucuca

SEQ ID NO: 383731 - RNA, 32 nt, Human
ccuucucgcgccugaccaugcaccccugcauc

SEQ ID NO: 383732 - RNA, 21 nt, Human
ccuucucuaaaaaacaggaag

SEQ ID NO: 383733 - RNA, 32 nt, Human
ccuucucuacccacccucuucucucuucucuu

SEQ ID NO: 383734 - RNA, 32 nt, Human
ccuucucuacuaaaauacacaaauuagcuagg

SEQ ID NO: 383735 - RNA, 32 nt, Human
ccuucucucacucccuuucuucaugcuuccac

SEQ ID NO: 383736 - RNA, 32 nt, Human
ccuucucucacucccuuucuucaugcuucccc

SEQ ID NO: 383737 - RNA, 21 nt, Human
ccuucucuccaccaccauaga

SEQ ID NO: 383738 - RNA, 32 nt, Human
ccuucucuccacccaauugugccaguaaaugg

SEQ ID NO: 383739 - RNA, 32 nt, Human
ccuucucucccaccccuuccuucugagccggg

SEQ ID NO: 383740 - RNA, 32 nt, Human
ccuucucuccuccccuccccucccuucucauu

SEQ ID NO: 383741 - RNA, 32 nt, Human
ccuucucuccuuccucuuccucaugaaugggc

SEQ ID NO: 383742 - RNA, 32 nt, Human
ccuucucuccuucucuccuccucucuccucuc

SEQ ID NO: 383743 - RNA, 32 nt, Human
ccuucucucugaaauccucccugcuuugacaa

SEQ ID NO: 383744 - RNA, 32 nt, Human
ccuucucucuuacuccugcucucacuauguga

SEQ ID NO: 383745 - RNA, 32 nt, Human
ccuucucugaguagcacggauuugaggagaag

SEQ ID NO: 383746 - RNA, 32 nt, Human
ccuucucugaugcucaccccucccaggcccug

SEQ ID NO: 383747 - RNA, 32 nt, Human
ccuucucugcaccucagagugcagaaccacag

SEQ ID NO: 383748 - RNA, 18 nt, Human
ccuucucugccacccgaa

SEQ ID NO: 383749 - RNA, 32 nt, Human
ccuucucugcccgccccagugccuuauggguc

SEQ ID NO: 383750 - RNA, 32 nt, Human
ccuucucugccucuucucauccuuucucgcuc

SEQ ID NO: 383751 - RNA, 32 nt, Human
ccuucucuggacugcacuguagggccuggaga

SEQ ID NO: 383752 - RNA, 32 nt, Human
ccuucucuggccaucuccuucccuccuuccag

SEQ ID NO: 383753 - RNA, 32 nt, Human
ccuucucugggguccaucagagucuagaggau

SEQ ID NO: 383754 - RNA, 32 nt, Human
ccuucucuguccacccccuccuaagcuagaca

SEQ ID NO: 383755 - RNA, 32 nt, Human
ccuucucuuccuccuccuccgucuucuucccu

SEQ ID NO: 383756 - RNA, 32 nt, Human
ccuucucuucugcuguuuaauuccagacuggu

SEQ ID NO: 383757 - RNA, 32 nt, Human
ccuucucuuuccuccuccuccucaccaagggc

SEQ ID NO: 383758 - RNA, 19 nt, Human
ccuucucuuuggagcccuu

SEQ ID NO: 383759 - RNA, 32 nt, Human
ccuucugaagaagcccacagggcuccuaaggu

SEQ ID NO: 383760 - RNA, 32 nt, Human
ccuucugaagacaggaagaaagucaauaauau

SEQ ID NO: 383761 - RNA, 32 nt, Human
ccuucugaaucucuccagcagccagaggcacg

SEQ ID NO: 383762 - RNA, 32 nt, Human
ccuucugacacuaaguuccacucuccagagga

SEQ ID NO: 383763 - RNA, 32 nt, Human
ccuucugagcagcugggauuaugaaggggugg

SEQ ID NO: 383764 - RNA, 21 nt, Human
ccuucugagcccauguuuucu

SEQ ID NO: 383765 - RNA, 32 nt, Human
ccuucugagcccccgacccgaggcgccgagcc

SEQ ID NO: 383766 - RNA, 32 nt, Human
ccuucugaguagcuggaauuacaggcugucua

SEQ ID NO: 383767 - RNA, 32 nt, Human
ccuucugaguagcugggaccacaggcgugcac

SEQ ID NO: 383768 - RNA, 32 nt, Human
ccuucugaguagcugggacuacaggcacacgc

SEQ ID NO: 383769 - RNA, 32 nt, Human
ccuucugaguagcugggacuacaggcacaugu

SEQ ID NO: 383770 - RNA, 32 nt, Human
ccuucugaguagcugggacuacaggugugcac

SEQ ID NO: 383771 - RNA, 32 nt, Human
ccuucugaguagcugggacuacaguugguucu

SEQ ID NO: 383772 - RNA, 32 nt, Human
ccuucugaguagcugggaguacaggcgcccgc

SEQ ID NO: 383773 - RNA, 32 nt, Human
ccuucugaguagcugggauuacacgcgugugc

SEQ ID NO: 383774 - RNA, 32 nt, Human
ccuucugaguagcugggauuacaggcaagcac

SEQ ID NO: 383775 - RNA, 32 nt, Human
ccuucugaguagcugggauuacaggcaugcgc

SEQ ID NO: 383776 - RNA, 32 nt, Human
ccuucugaguccccaccccaaccuguucaaac

SEQ ID NO: 383777 - RNA, 32 nt, Human
ccuucugagugucagaggaacggccagacccc

SEQ ID NO: 383778 - RNA, 32 nt, Human
ccuucugcaacguggacaucuccuuggggcug

SEQ ID NO: 383779 - RNA, 32 nt, Human
ccuucugcaaugugugaucacagcuagaaggc

SEQ ID NO: 383780 - RNA, 32 nt, Human
ccuucugcacccagaguagggguggaguauac

SEQ ID NO: 383781 - RNA, 32 nt, Human
ccuucugcagagcuagugcagacuaggauggc

SEQ ID NO: 383782 - RNA, 32 nt, Human
ccuucugccagccugcauccucuccucaggcc

SEQ ID NO: 383783 - RNA, 32 nt, Human
ccuucugccaugccacaacucucuccacucuc

SEQ ID NO: 383784 - RNA, 32 nt, Human
ccuucugccccagguuuuuggcuacugauguu

SEQ ID NO: 383785 - RNA, 17 nt, Human
ccuucugccccuccuca

SEQ ID NO: 383786 - RNA, 32 nt, Human
ccuucugccccucucuaccucuuccacucaug

SEQ ID NO: 383787 - RNA, 32 nt, Human
ccuucugcccucuccccucccugccccugugu

SEQ ID NO: 383788 - RNA, 32 nt, Human
ccuucugcccucucuccauugccugcacccca

SEQ ID NO: 383789 - RNA, 32 nt, Human
ccuucugcccugccugccucccugcaccugcg

SEQ ID NO: 383790 - RNA, 32 nt, Human
ccuucugcccugccuugccccugcacuaugcu

SEQ ID NO: 383791 - RNA, 23 nt, Human
ccuucugcccuuaaaugcuuccu

SEQ ID NO: 383792 - RNA, 32 nt, Human
ccuucugcccuuguaagcccaucccagcuacu

SEQ ID NO: 383793 - RNA, 32 nt, Human
ccuucugccuacacuccugccugcugugccua

SEQ ID NO: 383794 - RNA, 21 nt, Human
ccuucugccugccacuggggc

SEQ ID NO: 383795 - RNA, 32 nt, Human
ccuucugccuggaauacucucuccccagauuu

SEQ ID NO: 383796 - RNA, 32 nt, Human
ccuucugccuuccaccaugggaugaugcagca

SEQ ID NO: 383797 - RNA, 32 nt, Human
ccuucugccuuccccuuccuucuuuccuuauu

SEQ ID NO: 383798 - RNA, 32 nt, Human
ccuucugcggcggcagaagugaagugccugag

SEQ ID NO: 383799 - RNA, 32 nt, Human
ccuucugcguuuccucacucucacauaccagc

SEQ ID NO: 383800 - RNA, 32 nt, Human
ccuucugcuccaccuucucucucugcccucac

SEQ ID NO: 383801 - RNA, 32 nt, Human
ccuucugcucuuuaucuuuucagcuaugacug

SEQ ID NO: 383802 - RNA, 32 nt, Human
ccuucugcugacacuccugccugcuguuccug

SEQ ID NO: 383803 - RNA, 32 nt, Human
ccuucugcugcagcuuccugagucggcggagg

SEQ ID NO: 383804 - RNA, 32 nt, Human
ccuucugcugcuccugcuucuccugagguguu

SEQ ID NO: 383805 - RNA, 23 nt, Human
ccuucugcugcuccuguuggcug

SEQ ID NO: 383806 - RNA, 32 nt, Human
ccuucugcugcucucguggcccccucgcgaug

SEQ ID NO: 383807 - RNA, 21 nt, Human
ccuucugcugcugccauccuc

SEQ ID NO: 383808 - RNA, 24 nt, Human
ccuucugcugcugcccccaccucu

SEQ ID NO: 383809 - RNA, 31 nt, Human
ccuucugcugucucuggggcgagucuuggag

SEQ ID NO: 383810 - RNA, 32 nt, Human
ccuucugcuguugccgcagcaacccagaaagc

SEQ ID NO: 383811 - RNA, 23 nt, Human
ccuucugcuucccccauucccuu

SEQ ID NO: 383812 - RNA, 32 nt, Human
ccuucuggaagccugcacuccagcuucgagug

SEQ ID NO: 383813 - RNA, 32 nt, Human
ccuucuggacagucacaccagggacuucccag

SEQ ID NO: 383814 - RNA, 32 nt, Human
ccuucuggagccagcucaucagcucagagccc

SEQ ID NO: 383815 - RNA, 32 nt, Human
ccuucuggcccgagaagagaucagagauuggu

SEQ ID NO: 383816 - RNA, 30 nt, Human
ccuucuggccucuccugcugcugaccugau

SEQ ID NO: 383817 - RNA, 32 nt, Human
ccuucuggcuuccucugucccacguggcugag

SEQ ID NO: 383818 - RNA, 18 nt, Human
ccuucugggagcuccucc

SEQ ID NO: 383819 - RNA, 32 nt, Human
ccuucuggggagaagaaauggguuuuggcccc

SEQ ID NO: 383820 - RNA, 32 nt, Human
ccuucugggucagaggagagagacugaauugg

SEQ ID NO: 383821 - RNA, 32 nt, Human
ccuucuggguugacuccaagagccaaggagau

SEQ ID NO: 383822 - RNA, 32 nt, Human
ccuucuggguuuucuuuuugacaauucuugga

SEQ ID NO: 383823 - RNA, 32 nt, Human
ccuucugguuuggaggaaguggagccuccacg

SEQ ID NO: 383824 - RNA, 32 nt, Human
ccuucuguaaccacagugcccaaacgaagagg

SEQ ID NO: 383825 - RNA, 32 nt, Human
ccuucuguaggggauuacugagacagggaaga

SEQ ID NO: 383826 - RNA, 32 nt, Human
ccuucuguccagggccucuccaccccaacccc

SEQ ID NO: 383827 - RNA, 19 nt, Human
ccuucugucccccuuggag

SEQ ID NO: 383828 - RNA, 32 nt, Human
ccuucuguccuccuccuguucuugccuuggac

SEQ ID NO: 383829 - RNA, 32 nt, Human
ccuucugucgcccaggcuggagugcaguggcg

SEQ ID NO: 383830 - RNA, 32 nt, Human
ccuucugucuccucucagucucucuuccgccu

SEQ ID NO: 383831 - RNA, 32 nt, Human
ccuucugugaagccuccaguggagaacugggc

SEQ ID NO: 383832 - RNA, 32 nt, Human
ccuucugugcaaaagccuuccucccagggaga

SEQ ID NO: 383833 - RNA, 32 nt, Human
ccuucugugcaggacgcucagccucagggcuc

SEQ ID NO: 383834 - RNA, 32 nt, Human
ccuucugugcaggccagcagggccccaucucu

SEQ ID NO: 383835 - RNA, 32 nt, Human
ccuucugugccuccuaccauguucccuuuaac

SEQ ID NO: 383836 - RNA, 32 nt, Human
ccuucuguggaucacagcugaaagggguagcc

SEQ ID NO: 383837 - RNA, 32 nt, Human
ccuucuguggggacuccggcugugcugggaga

SEQ ID NO: 383838 - RNA, 32 nt, Human
ccuucugugugcuucaccucacucucuacuuc

SEQ ID NO: 383839 - RNA, 32 nt, Human
ccuucugugugggcugcacauggugacuuccu

SEQ ID NO: 383840 - RNA, 32 nt, Human
ccuucuguuaccacaucucucugacaccagug

SEQ ID NO: 383841 - RNA, 32 nt, Human
ccuucuguuacccagcuccuggaggcaguggc

SEQ ID NO: 383842 - RNA, 32 nt, Human
ccuucuguuaucgcugacagcuuucuugcguc

SEQ ID NO: 383843 - RNA, 18 nt, Human
ccuucuguuccauccucu

SEQ ID NO: 383844 - RNA, 32 nt, Human
ccuucuguucucucuuuccccguccuuccucu

SEQ ID NO: 383845 - RNA, 32 nt, Human
ccuucuguucuuccacaacacaggguuugugg

SEQ ID NO: 383846 - RNA, 32 nt, Human
ccuucuguugcccaugccccugccugaaagug

SEQ ID NO: 383847 - RNA, 32 nt, Human
ccuucuguuuccaugucacagcuccaccauau

SEQ ID NO: 383848 - RNA, 32 nt, Human
ccuucuuaacaaaagucuuugauaacuuaaga

SEQ ID NO: 383849 - RNA, 32 nt, Human
ccuucuuaauggagagcucccgauggagggcu

SEQ ID NO: 383850 - RNA, 32 nt, Human
ccuucuuacugcccuguccucugccuuggaag

SEQ ID NO: 383851 - RNA, 32 nt, Human
ccuucuuaugggaggucgacccagacugccac

SEQ ID NO: 383852 - RNA, 32 nt, Human
ccuucuuauuguccuccuccuccuggcucggc

SEQ ID NO: 383853 - RNA, 32 nt, Human
ccuucuuauuuaagacuucccaccuuacuaaa

SEQ ID NO: 383854 - RNA, 22 nt, Human
ccuucuucaagagagcuuucuu

SEQ ID NO: 383855 - RNA, 28 nt, Human
ccuucuucaagugcugccugcucacuga

SEQ ID NO: 383856 - RNA, 22 nt, Human
ccuucuucaaguuuauuuuccu

SEQ ID NO: 383857 - RNA, 32 nt, Human
ccuucuucacuaccucagaucuaaucaauuag

SEQ ID NO: 383858 - RNA, 32 nt, Human
ccuucuucagaauguucugcgggacccccugg

SEQ ID NO: 383859 - RNA, 32 nt, Human
ccuucuucaggccuugaaucaaaagccacuuu

SEQ ID NO: 383860 - RNA, 22 nt, Human
ccuucuucaguuaguucuuccu

SEQ ID NO: 383861 - RNA, 32 nt, Human
ccuucuucauacugcugcucuguugccagaga

SEQ ID NO: 383862 - RNA, 32 nt, Human
ccuucuucaucauuugaugugaugccagauac

SEQ ID NO: 383863 - RNA, 32 nt, Human
ccuucuucauucuacaccacccccaacacaua

SEQ ID NO: 383864 - RNA, 32 nt, Human
ccuucuucauuuccacccacgcucccagccuc

SEQ ID NO: 383865 - RNA, 22 nt, Human
ccuucuuccaaagcuagcuugg

SEQ ID NO: 383866 - RNA, 32 nt, Human
ccuucuuccagggccugggaggauagggcuaa

SEQ ID NO: 383867 - RNA, 24 nt, Human
ccuucuuccaguugcacuauucug

SEQ ID NO: 383868 - RNA, 32 nt, Human
ccuucuuccccaaaaccagcagugccauaccu

SEQ ID NO: 383869 - RNA, 32 nt, Human
ccuucuuccccacaacagaagagaccagcgac

SEQ ID NO: 383870 - RNA, 32 nt, Human
ccuucuuccccaggcugggagugggugagacg

SEQ ID NO: 383871 - RNA, 32 nt, Human
ccuucuucccuuccaucucccccuccucccug

SEQ ID NO: 383872 - RNA, 32 nt, Human
ccuucuucccuuucccuuccucuccccuaccc

SEQ ID NO: 383873 - RNA, 32 nt, Human
ccuucuuccggcggggagugggagccucucgc

SEQ ID NO: 383874 - RNA, 32 nt, Human
ccuucuuccucagccagaaaggaucuuucccu

SEQ ID NO: 383875 - RNA, 32 nt, Human
ccuucuuccuccacuugugucagcuugcauuu

SEQ ID NO: 383876 - RNA, 32 nt, Human
ccuucuuccucccaccauggcagguggggagc

SEQ ID NO: 383877 - RNA, 32 nt, Human
ccuucuuccucuuggaguccccagugucuauu

SEQ ID NO: 383878 - RNA, 32 nt, Human
ccuucuuccugccguggccagcgcggccggcg

SEQ ID NO: 383879 - RNA, 32 nt, Human
ccuucuuccugcucccccuccuagccuagggu

SEQ ID NO: 383880 - RNA, 32 nt, Human
ccuucuuccuuuccuuguuauucaccucccug

SEQ ID NO: 383881 - RNA, 32 nt, Human
ccuucuucuccaaccucuaccccaccauuagu

SEQ ID NO: 383882 - RNA, 32 nt, Human
ccuucuucuccaccaccuguccagcuucuucc

SEQ ID NO: 383883 - RNA, 32 nt, Human
ccuucuucucccccuuccccugugcucccuuu

SEQ ID NO: 383884 - RNA, 19 nt, Human
ccuucuucucccuuagaga

SEQ ID NO: 383885 - RNA, 32 nt, Human
ccuucuucugcagcuccuggugcugcuugugu

SEQ ID NO: 383886 - RNA, 32 nt, Human
ccuucuucugccgcuucuggugcugcuugugu

SEQ ID NO: 383887 - RNA, 32 nt, Human
ccuucuugaacugucguuuccucaggaacugg

SEQ ID NO: 383888 - RNA, 32 nt, Human
ccuucuugacccucucuccaucauucagcugc

SEQ ID NO: 383889 - RNA, 32 nt, Human
ccuucuugacgccagcccccacccucugucug

SEQ ID NO: 383890 - RNA, 32 nt, Human
ccuucuugagguggccgggcgcaguggcucac

SEQ ID NO: 383891 - RNA, 32 nt, Human
ccuucuugcccaggcuggagugcaagggcgca

SEQ ID NO: 383892 - RNA, 32 nt, Human
ccuucuugccucaccauuccccuaggcaggcc

SEQ ID NO: 383893 - RNA, 18 nt, Human
ccuucuugcucccccuca

SEQ ID NO: 383894 - RNA, 32 nt, Human
ccuucuugcuuugcuuugcuguggaccucucc

SEQ ID NO: 383895 - RNA, 32 nt, Human
ccuucuuggaaccuaaauugaacugccaagua

SEQ ID NO: 383896 - RNA, 32 nt, Human
ccuucuuggcucugcugacacucgagcccaca

SEQ ID NO: 383897 - RNA, 32 nt, Human
ccuucuugguagaagcuaaggugugagcuggg

SEQ ID NO: 383898 - RNA, 32 nt, Human
ccuucuugguugcugcagccuggguggauguu

SEQ ID NO: 383899 - RNA, 22 nt, Human
ccuucuuguuuggagcacaggg

SEQ ID NO: 383900 - RNA, 32 nt, Human
ccuucuuguuuguuccucuguguucugugugc

SEQ ID NO: 383901 - RNA, 22 nt, Human
ccuucuuuaacccauguuuucu

SEQ ID NO: 383902 - RNA, 32 nt, Human
ccuucuuuaccaccucuuccucccccucaaag

SEQ ID NO: 383903 - RNA, 32 nt, Human
ccuucuuuaccucugagcuuucugccuucuga

SEQ ID NO: 383904 - RNA, 32 nt, Human
ccuucuuuaccuucauuucauccuguuggcug

SEQ ID NO: 383905 - RNA, 32 nt, Human
ccuucuuuccacgcuuuccagccugugggagc

SEQ ID NO: 383906 - RNA, 32 nt, Human
ccuucuuuccccuuuugucuugcccacuccug

SEQ ID NO: 383907 - RNA, 19 nt, Human
ccuucuuucccuucagaga

SEQ ID NO: 383908 - RNA, 32 nt, Human
ccuucuuuccucacgcccuuccaaggcuccgg

SEQ ID NO: 383909 - RNA, 32 nt, Human
ccuucuuuccucacugcuccucuccacccagc

SEQ ID NO: 383910 - RNA, 32 nt, Human
ccuucuuuccuggaacucaggguguggggacu

SEQ ID NO: 383911 - RNA, 32 nt, Human
ccuucuuuccuuccuuccuuccuuccuuccuu

SEQ ID NO: 383912 - RNA, 32 nt, Human
ccuucuuucucaucucugucuuuaccauacuu

SEQ ID NO: 383913 - RNA, 32 nt, Human
ccuucuuucucuucaacccccuccccaccuuc

SEQ ID NO: 383914 - RNA, 22 nt, Human
ccuucuuucuuuguauuuuccu

SEQ ID NO: 383915 - RNA, 32 nt, Human
ccuucuuugcagcugcccagccccuccucccu

SEQ ID NO: 383916 - RNA, 32 nt, Human
ccuucuuugccuccuggggcggccgccaccca

SEQ ID NO: 383917 - RNA, 32 nt, Human
ccuucuuugccuucuugccacaggguccuuac

SEQ ID NO: 383918 - RNA, 32 nt, Human
ccuucuuugcuuuuugugggggagaggggagg

SEQ ID NO: 383919 - RNA, 32 nt, Human
ccuucuuugggcucagggcagagcagguguuu

SEQ ID NO: 383920 - RNA, 32 nt, Human
ccuucuuuguucugguagauccuggccugggg

SEQ ID NO: 383921 - RNA, 32 nt, Human
ccuucuuuuaucugcaaugugugaagggacuc

SEQ ID NO: 383922 - RNA, 32 nt, Human
ccuucuuuuaucugcacugugugaagggacuc

SEQ ID NO: 383923 - RNA, 32 nt, Human
ccuucuuuucucccuuuuaauccuggcugucg

SEQ ID NO: 383924 - RNA, 32 nt, Human
ccuucuuuucuuuuggacaagauaauacugug

SEQ ID NO: 383925 - RNA, 31 nt, Human
ccuugaaaagucagagagugauuuguuuugu

SEQ ID NO: 383926 - RNA, 32 nt, Human
ccuugaaacuucuuuuuguuugaggggguucu

SEQ ID NO: 383927 - RNA, 32 nt, Human
ccuugaaagucaccugaggaaguuuccccacu

SEQ ID NO: 383928 - RNA, 32 nt, Human
ccuugaacauggcacugcccuccucuggcacu

SEQ ID NO: 383929 - RNA, 32 nt, Human
ccuugaaccaggauggggagguugcagugagc

SEQ ID NO: 383930 - RNA, 32 nt, Human
ccuugaacccaggaggcagaaguugcagugag

SEQ ID NO: 383931 - RNA, 32 nt, Human
ccuugaacccaggaggcagagguugcaaugag

SEQ ID NO: 383932 - RNA, 32 nt, Human
ccuugaacccaggagguggagguugcagugag

SEQ ID NO: 383933 - RNA, 32 nt, Human
ccuugaaccuuaaauuuuaagucauguucauu

SEQ ID NO: 383934 - RNA, 32 nt, Human
ccuugaacugcagcgucaccucuucccugggc

SEQ ID NO: 383935 - RNA, 32 nt, Human
ccuugaacuugacuccagcgugacaggaguga

SEQ ID NO: 383936 - RNA, 32 nt, Human
ccuugaagaagaggaagaggaaagaaagacaa

SEQ ID NO: 383937 - RNA, 32 nt, Human
ccuugaagaggaagacggggcggaagaccaag

SEQ ID NO: 383938 - RNA, 32 nt, Human
ccuugaagagugagaaacaccuagggggacag

SEQ ID NO: 383939 - RNA, 32 nt, Human
ccuugaagauacgugcaaaaggugcuacccca

SEQ ID NO: 383940 - RNA, 32 nt, Human
ccuugaagcccaggcugaugcuugaaguaacu

SEQ ID NO: 383941 - RNA, 32 nt, Human
ccuugaagcccuggacacuggccacauucccu

SEQ ID NO: 383942 - RNA, 32 nt, Human
ccuugaagccucucuccuucucugccuacaaa

SEQ ID NO: 383943 - RNA, 32 nt, Human
ccuugaaggagaggagggcggggaaguuugcg

SEQ ID NO: 383944 - RNA, 32 nt, Human
ccuugaaggcagcagggugcccaggugaagcu

SEQ ID NO: 383945 - RNA, 32 nt, Human
ccuugaagggaaccucacaggcuuagccaggg

SEQ ID NO: 383946 - RNA, 32 nt, Human
ccuugaaggggaaaaagcuauuuucaauuggu

SEQ ID NO: 383947 - RNA, 32 nt, Human
ccuugaagggggaccuucuucuaaucuccucc

SEQ ID NO: 383948 - RNA, 32 nt, Human
ccuugaaggggguugaggguacaggcaaccuu

SEQ ID NO: 383949 - RNA, 20 nt, Human
ccuugaauagugcuuuucuc

SEQ ID NO: 383950 - RNA, 21 nt, Human
ccuugaauccaccucuuguuu

SEQ ID NO: 383951 - RNA, 23 nt, Human
ccuugaauccuggggacgggaag

SEQ ID NO: 383952 - RNA, 24 nt, Human
ccuugaauccuguuuacaacgaag

SEQ ID NO: 383953 - RNA, 32 nt, Human
ccuugaaugcuacugcuuggagagaggagagu

SEQ ID NO: 383954 - RNA, 32 nt, Human
ccuugaaugggaagaagccccacguuguccuu

SEQ ID NO: 383955 - RNA, 32 nt, Human
ccuugacaagggcugagcucucgggcacugcg

SEQ ID NO: 383956 - RNA, 23 nt, Human
ccuugacacuuuugaacauuucc

SEQ ID NO: 383957 - RNA, 32 nt, Human
ccuugacagauggccaagucaaaaccccucau

SEQ ID NO: 383958 - RNA, 32 nt, Human
ccuugacagcagcgcuggugcaaaaugaauug

SEQ ID NO: 383959 - RNA, 32 nt, Human
ccuugacaggcagggagggcuaggcugugcau

SEQ ID NO: 383960 - RNA, 32 nt, Human
ccuugacaggccuugucagagcagagggcagg

SEQ ID NO: 383961 - RNA, 32 nt, Human
ccuugacauucagcaaaagcccugacaguggu

SEQ ID NO: 383962 - RNA, 32 nt, Human
ccuugacauuuugcguuuuaauauuucucuua

SEQ ID NO: 383963 - RNA, 32 nt, Human
ccuugaccacuuuuucuuucuccggucgcucg

SEQ ID NO: 383964 - RNA, 21 nt, Human
ccuugaccaggcccagugccc

SEQ ID NO: 383965 - RNA, 32 nt, Human
ccuugacccagcccgguggcucuuacucucgc

SEQ ID NO: 383966 - RNA, 22 nt, Human
ccuugacccugaaaacagugaa

SEQ ID NO: 383967 - RNA, 32 nt, Human
ccuugaccugcgagggagagagaggacaccga

SEQ ID NO: 383968 - RNA, 32 nt, Human
ccuugaccugcugcauccuccucggcaauuuu

SEQ ID NO: 383969 - RNA, 32 nt, Human
ccuugacgcaaaaacucaaaccacaaauguuu

SEQ ID NO: 383970 - RNA, 21 nt, Human
ccuugacgccuguguacuucc

SEQ ID NO: 383971 - RNA, 32 nt, Human
ccuugacgucacucaaagacaggccccaaucc

SEQ ID NO: 383972 - RNA, 32 nt, Human
ccuugacguuuacuuucaaguaacacaaacuc

SEQ ID NO: 383973 - RNA, 32 nt, Human
ccuugacuacguaacaucuuguccucacagcc

SEQ ID NO: 383974 - RNA, 32 nt, Human
ccuugacuagccccuggccaucucuaggggag

SEQ ID NO: 383975 - RNA, 32 nt, Human
ccuugacuauaagagaaaagugaccugaagua

SEQ ID NO: 383976 - RNA, 32 nt, Human
ccuugacucaccucagcuuugccugcuugucc

SEQ ID NO: 383977 - RNA, 32 nt, Human
ccuugacuccaaaggccagccugggucagcca

SEQ ID NO: 383978 - RNA, 32 nt, Human
ccuugacucccagccucgucuucugcaccugu

SEQ ID NO: 383979 - RNA, 32 nt, Human
ccuugacuccccucugccucugagggcuucag

SEQ ID NO: 383980 - RNA, 32 nt, Human
ccuugacucucuuaagaauaacagugaaauau

SEQ ID NO: 383981 - RNA, 32 nt, Human
ccuugacucuuuccuggcuccagagcucaagc

SEQ ID NO: 383982 - RNA, 32 nt, Human
ccuugacuguucuguucugucuucucugucca

SEQ ID NO: 383983 - RNA, 32 nt, Human
ccuugacuucagaucccuugaaaauccaacau

SEQ ID NO: 383984 - RNA, 25 nt, Human
ccuugacuuccaccaggacagugaa

SEQ ID NO: 383985 - RNA, 32 nt, Human
ccuugagaaaacgggcaucucacguaccccca

SEQ ID NO: 383986 - RNA, 32 nt, Human
ccuugagaaaucccagcuuagcaccuuugaca

SEQ ID NO: 383987 - RNA, 32 nt, Human
ccuugagaagucagguugagaaaguaguugau

SEQ ID NO: 383988 - RNA, 32 nt, Human
ccuugagaaugaugcaugugcucgggaaaaau

SEQ ID NO: 383989 - RNA, 32 nt, Human
ccuugagacaaacugagggacaaggacacccu

SEQ ID NO: 383990 - RNA, 32 nt, Human
ccuugagacagcuucgguuucuaacuuggagc

SEQ ID NO: 383991 - RNA, 32 nt, Human
ccuugagacagugcuugccuugagagagugag

SEQ ID NO: 383992 - RNA, 32 nt, Human
ccuugagacuacaacauagaaacccuaucuga

SEQ ID NO: 383993 - RNA, 32 nt, Human
ccuugagagaaaaggaaucaugggagcaaugg

SEQ ID NO: 383994 - RNA, 32 nt, Human
ccuugagagccaggaauggcucuuagcagugg

SEQ ID NO: 383995 - RNA, 32 nt, Human
ccuugagaggucagaggggccucugugggugc

SEQ ID NO: 383996 - RNA, 19 nt, Human
ccuugagcaaaacugcaca

SEQ ID NO: 383997 - RNA, 32 nt, Human
ccuugagcaaguggaagagaggccagggucca

SEQ ID NO: 383998 - RNA, 32 nt, Human
ccuugagcaaguugucucucuucucugacccu

SEQ ID NO: 383999 - RNA, 32 nt, Human
ccuugagcagagcuucuagugggugaagcagu

SEQ ID NO: 384000 - RNA, 32 nt, Human
ccuugagcagcagccugagcguggagggcaag

SEQ ID NO: 384001 - RNA, 32 nt, Human
ccuugagcagggaagaguucuucccuuagccc

SEQ ID NO: 384002 - RNA, 32 nt, Human
ccuugagcagugggcccaggccuggcccucca

SEQ ID NO: 384003 - RNA, 32 nt, Human
ccuugagccacccuucccaccccagcccuugc

SEQ ID NO: 384004 - RNA, 32 nt, Human
ccuugagccagggagguggaggcuacagugag

SEQ ID NO: 384005 - RNA, 32 nt, Human
ccuugagcccaagagguccaggcugcagccug

SEQ ID NO: 384006 - RNA, 32 nt, Human
ccuugagcccaggaagcagagguugcagugag

SEQ ID NO: 384007 - RNA, 32 nt, Human
ccuugagcccaggagcuggaggcugcagugaa

SEQ ID NO: 384008 - RNA, 32 nt, Human
ccuugagcccaggaggucgaggcugcagugag

SEQ ID NO: 384009 - RNA, 32 nt, Human
ccuugagcccaggagguugaggcugcagugag

SEQ ID NO: 384010 - RNA, 32 nt, Human
ccuugagcccaggagugcaaggcugcaaugag

SEQ ID NO: 384011 - RNA, 32 nt, Human
ccuugagcccaggaguucgagacaagccuggg

SEQ ID NO: 384012 - RNA, 32 nt, Human
ccuugagcccaggaguucgaggcugcagcgag

SEQ ID NO: 384013 - RNA, 32 nt, Human
ccuugagccccucagccagccuggugugcguu

SEQ ID NO: 384014 - RNA, 32 nt, Human
ccuugagccuaggagguugaggcugcagugag

SEQ ID NO: 384015 - RNA, 32 nt, Human
ccuugagcuacacacacuggcuguagugcaag

SEQ ID NO: 384016 - RNA, 32 nt, Human
ccuugagcucaagugaucuucccacaccagcc

SEQ ID NO: 384017 - RNA, 32 nt, Human
ccuugagcucaggaguuugaggccaggcuggg

SEQ ID NO: 384018 - RNA, 32 nt, Human
ccuugagcucuagccgaugcauuugucaggaa

SEQ ID NO: 384019 - RNA, 32 nt, Human
ccuugagcuggggagauggaggcugcagugag

SEQ ID NO: 384020 - RNA, 32 nt, Human
ccuugagcuucagcccauuucucuccauuucc

SEQ ID NO: 384021 - RNA, 32 nt, Human
ccuugaggacaugcccuagggaacagugcucu

SEQ ID NO: 384022 - RNA, 31 nt, Human
ccuugaggagccggccaccagaugcugaauc

SEQ ID NO: 384023 - RNA, 32 nt, Human
ccuugaggcaacauuggauauuauugagacau

SEQ ID NO: 384024 - RNA, 32 nt, Human
ccuugaggccaggagguugaggcugcagugag

SEQ ID NO: 384025 - RNA, 32 nt, Human
ccuugagggcucucagccacugcuccaacaca

SEQ ID NO: 384026 - RNA, 32 nt, Human
ccuugagggucugaggucccagcccuguugcc

SEQ ID NO: 384027 - RNA, 32 nt, Human
ccuugagguaggcagaguggguuguggcgccu

SEQ ID NO: 384028 - RNA, 32 nt, Human
ccuugagguuaccagguagaaaacugguguca

SEQ ID NO: 384029 - RNA, 32 nt, Human
ccuugaguccaggagguugaggcugcagugag

SEQ ID NO: 384030 - RNA, 32 nt, Human
ccuugagucugggagguggaggcugcagugag

SEQ ID NO: 384031 - RNA, 31 nt, Human
ccuugagugugggggauuugggugaaugagg

SEQ ID NO: 384032 - RNA, 32 nt, Human
ccuugauaaaagcagaaaagcaaagagguaau

SEQ ID NO: 384033 - RNA, 32 nt, Human
ccuugauauauguauauggauguaugcauaaa

SEQ ID NO: 384034 - RNA, 32 nt, Human
ccuugaucauaaugauuucauuagcagugugu

SEQ ID NO: 384035 - RNA, 22 nt, Human
ccuugaucccaaaacccagcca

SEQ ID NO: 384036 - RNA, 32 nt, Human
ccuugaucucagacuucagccuccagaacugc

SEQ ID NO: 384037 - RNA, 32 nt, Human
ccuugaucuccucuccuuccucuggccagucc

SEQ ID NO: 384038 - RNA, 32 nt, Human
ccuugaucuuucuccuugucucucccgcugcc

SEQ ID NO: 384039 - RNA, 32 nt, Human
ccuugaugacaccugccgcugccccucggggc

SEQ ID NO: 384040 - RNA, 32 nt, Human
ccuugaugcuccugaacugggugcuuaugagu

SEQ ID NO: 384041 - RNA, 32 nt, Human
ccuugauggaggagggagggcuucaggacggg

SEQ ID NO: 384042 - RNA, 32 nt, Human
ccuugauggcacugggcugugcucaggugaag

SEQ ID NO: 384043 - RNA, 32 nt, Human
ccuugaugggaauguggagcagacccucgucc

SEQ ID NO: 384044 - RNA, 32 nt, Human
ccuugauggggcucaguggggccaggccaaag

SEQ ID NO: 384045 - RNA, 32 nt, Human
ccuugauguccaggcugggucauuuaaaauag

SEQ ID NO: 384046 - RNA, 32 nt, Human
ccuugauuacuuccacugaggugggagcaucu

SEQ ID NO: 384047 - RNA, 32 nt, Human
ccuugauuauuuccucugugcuuucucagcuu

SEQ ID NO: 384048 - RNA, 32 nt, Human
ccuugauucagccuuggugccugcacucuggg

SEQ ID NO: 384049 - RNA, 32 nt, Human
ccuugauugcccacguucucuccguuccuucu

SEQ ID NO: 384050 - RNA, 32 nt, Human
ccuugauugucccuggauggagugcagucacc

SEQ ID NO: 384051 - RNA, 32 nt, Human
ccuugauuguguaaggaacuugcuggacgcac

SEQ ID NO: 384052 - RNA, 32 nt, Human
ccuugauuuauucaaaagaacugggaaagaug

SEQ ID NO: 384053 - RNA, 32 nt, Human
ccuugauuucuauggagaccucagagcugguu

SEQ ID NO: 384054 - RNA, 32 nt, Human
ccuugcaaaccugcagacugcuuuuugcccaa

SEQ ID NO: 384055 - RNA, 32 nt, Human
ccuugcaaauccagcucaguacugcuagauaa

SEQ ID NO: 384056 - RNA, 32 nt, Human
ccuugcaacagcucugcagggccccgcagaug

SEQ ID NO: 384057 - RNA, 32 nt, Human
ccuugcacaagaaccacuaaccccaggcaagc

SEQ ID NO: 384058 - RNA, 32 nt, Human
ccuugcacacacccugagcuuuugccacuucu

SEQ ID NO: 384059 - RNA, 32 nt, Human
ccuugcacacucaccuccaccuucacaggcca

SEQ ID NO: 384060 - RNA, 32 nt, Human
ccuugcaccauggacagcucccauuaagccac

SEQ ID NO: 384061 - RNA, 32 nt, Human
ccuugcacccgaggcccucgcagcagggagcu

SEQ ID NO: 384062 - RNA, 32 nt, Human
ccuugcaccgcacugccgccuccugacugccc

SEQ ID NO: 384063 - RNA, 32 nt, Human
ccuugcaccuuccugaggguuuugugggagaa

SEQ ID NO: 384064 - RNA, 32 nt, Human
ccuugcacucaggaagcccugauguuuaaagg

SEQ ID NO: 384065 - RNA, 32 nt, Human
ccuugcacugugcugcucucacagaucggugu

SEQ ID NO: 384066 - RNA, 32 nt, Human
ccuugcacuuggaacagggcucaggugggugg

SEQ ID NO: 384067 - RNA, 23 nt, Human
ccuugcagaaccaccgcauucca

SEQ ID NO: 384068 - RNA, 32 nt, Human
ccuugcagaacugccauuauuuucugucagau

SEQ ID NO: 384069 - RNA, 27 nt, Human
ccuugcagaacuucuacuugccugccu

SEQ ID NO: 384070 - RNA, 32 nt, Human
ccuugcagacuggaaugagucaucaugcagac

SEQ ID NO: 384071 - RNA, 32 nt, Human
ccuugcagaguccucaguauccagucagcacu

SEQ ID NO: 384072 - RNA, 32 nt, Human
ccuugcagcaccugagacugaagcuccuccca

SEQ ID NO: 384073 - RNA, 32 nt, Human
ccuugcagcagagcagggcugaggggaagggg

SEQ ID NO: 384074 - RNA, 32 nt, Human
ccuugcagcccugcaccugccugccacuuccc

SEQ ID NO: 384075 - RNA, 32 nt, Human
ccuugcagccugauaccacugggagugagggu

SEQ ID NO: 384076 - RNA, 32 nt, Human
ccuugcaggagaagagggaagugaaaagaucu

SEQ ID NO: 384077 - RNA, 32 nt, Human
ccuugcaggagguggagguuguugguggagga

SEQ ID NO: 384078 - RNA, 32 nt, Human
ccuugcaggcuggagggcggcuggagagcggc

SEQ ID NO: 384079 - RNA, 32 nt, Human
ccuugcaguccugagguccugcagccccggcc

SEQ ID NO: 384080 - RNA, 32 nt, Human
ccuugcagugacaucaguccaggagagcucuc

SEQ ID NO: 384081 - RNA, 32 nt, Human
ccuugcaguggaggagagagccagaguggaua

SEQ ID NO: 384082 - RNA, 32 nt, Human
ccuugcaguguggcuggccaugggccacagcu

SEQ ID NO: 384083 - RNA, 32 nt, Human
ccuugcaguuaacugugcaaaauuggcuggcu

SEQ ID NO: 384084 - RNA, 32 nt, Human
ccuugcauauucuccuuucauccuggcuugcc

SEQ ID NO: 384085 - RNA, 32 nt, Human
ccuugcaucccagggaugaagccaacucgauc

SEQ ID NO: 384086 - RNA, 22 nt, Human
ccuugcaucguuucccucguca

SEQ ID NO: 384087 - RNA, 32 nt, Human
ccuugcaucuucugcuacagacugcuuuucga

SEQ ID NO: 384088 - RNA, 32 nt, Human
ccuugcaugccuuucaugccugaugccguaga

SEQ ID NO: 384089 - RNA, 32 nt, Human
ccuugcauggauacaugggagggagacguuau

SEQ ID NO: 384090 - RNA, 32 nt, Human
ccuugcauggaugcauguccucccucuguccc

SEQ ID NO: 384091 - RNA, 32 nt, Human
ccuugcaugggcccugcccacaagcacacccu

SEQ ID NO: 384092 - RNA, 32 nt, Human
ccuugcauguacuggaguauuuauuucaucua

SEQ ID NO: 384093 - RNA, 32 nt, Human
ccuugcauuggcaccccuccagccuggaggcc

SEQ ID NO: 384094 - RNA, 32 nt, Human
ccuugcauuucuugguaucucucagcuuuucc

SEQ ID NO: 384095 - RNA, 32 nt, Human
ccuugcauuugcacauccagaaugacuaaaac

SEQ ID NO: 384096 - RNA, 32 nt, Human
ccuugccaacacagugaaacccugucucuacu

SEQ ID NO: 384097 - RNA, 32 nt, Human
ccuugccaacuaguaaaagcuggaccuucgga

SEQ ID NO: 384098 - RNA, 32 nt, Human
ccuugccaagagucucaucccuacccuggggc

SEQ ID NO: 384099 - RNA, 32 nt, Human
ccuugccaagccccaggaagaaaaugaugcag

SEQ ID NO: 384100 - RNA, 32 nt, Human
ccuugccaaguuguucgagguggaauuaaaca

SEQ ID NO: 384101 - RNA, 32 nt, Human
ccuugccaauccagcuccaagaugcugagccu

SEQ ID NO: 384102 - RNA, 32 nt, Human
ccuugccaauccagguagacagaggcccugcc

SEQ ID NO: 384103 - RNA, 32 nt, Human
ccuugccacggugccagcaggcagcccugggc

SEQ ID NO: 384104 - RNA, 32 nt, Human
ccuugccacugucuccuggcccucucucugau

SEQ ID NO: 384105 - RNA, 32 nt, Human
ccuugccagcacuggauauuaucccggcuugg

SEQ ID NO: 384106 - RNA, 30 nt, Human
ccuugccagccucugcugcuccugcuccug

SEQ ID NO: 384107 - RNA, 32 nt, Human
ccuugccagcgcuguccugucuuucuggccca

SEQ ID NO: 384108 - RNA, 32 nt, Human
ccuugccaggaaaauuccacccagugcacaga

SEQ ID NO: 384109 - RNA, 32 nt, Human
ccuugccaggaccugcucccagcuccacgacg

SEQ ID NO: 384110 - RNA, 32 nt, Human
ccuugccaggagcaugucugugcagcaguguu

SEQ ID NO: 384111 - RNA, 32 nt, Human
ccuugccaggaggggaguggcagugaggaggg

SEQ ID NO: 384112 - RNA, 32 nt, Human
ccuugccaggccuccccaaccccuggccucaa

SEQ ID NO: 384113 - RNA, 32 nt, Human
ccuugccagugagcuguucagcagguagccac

SEQ ID NO: 384114 - RNA, 32 nt, Human
ccuugccauagaaaugguugcugguagcagua

SEQ ID NO: 384115 - RNA, 32 nt, Human
ccuugcccaaaccaacugaggucuuaaagucc

SEQ ID NO: 384116 - RNA, 32 nt, Human
ccuugcccaagaguuugagaccagccuggaca

SEQ ID NO: 384117 - RNA, 32 nt, Human
ccuugcccacgggcccccagccccagccccuc

SEQ ID NO: 384118 - RNA, 32 nt, Human
ccuugcccagaacuuuggucaccugcuuguuc

SEQ ID NO: 384119 - RNA, 32 nt, Human
ccuugcccagccgugguggcccccaggccugg

SEQ ID NO: 384120 - RNA, 32 nt, Human
ccuugcccaggcccuugggggagggggugcau

SEQ ID NO: 384121 - RNA, 32 nt, Human
ccuugcccagggcacuuggagcacacgcagcc

SEQ ID NO: 384122 - RNA, 32 nt, Human
ccuugcccaucuucacucuagccuucguauuu

SEQ ID NO: 384123 - RNA, 32 nt, Human
ccuugccccaacccuucuucauguucaauuau

SEQ ID NO: 384124 - RNA, 19 nt, Human
ccuugccccaccccugccu

SEQ ID NO: 384125 - RNA, 32 nt, Human
ccuugccccaccccuugcuuccagaaaggguu

SEQ ID NO: 384126 - RNA, 32 nt, Human
ccuugccccacgccuucucuguggaccauuca

SEQ ID NO: 384127 - RNA, 32 nt, Human
ccuugccccacugcaggcugccugggacgccu

SEQ ID NO: 384128 - RNA, 21 nt, Human
ccuugcccccaccuccugucu

SEQ ID NO: 384129 - RNA, 21 nt, Human
ccuugccccggcccccaggcc

SEQ ID NO: 384130 - RNA, 32 nt, Human
ccuugccccucagaccugccaugaaaggaaug

SEQ ID NO: 384131 - RNA, 32 nt, Human
ccuugccccucucugucauagcuaacaggaau

SEQ ID NO: 384132 - RNA, 32 nt, Human
ccuugcccgcagcccaggcuccugggccagug

SEQ ID NO: 384133 - RNA, 32 nt, Human
ccuugcccgccaugcccugagccacgucccuc

SEQ ID NO: 384134 - RNA, 32 nt, Human
ccuugcccucacugcccacucugcccacacuu

SEQ ID NO: 384135 - RNA, 32 nt, Human
ccuugcccucacuucagugccugggugcucag

SEQ ID NO: 384136 - RNA, 32 nt, Human
ccuugcccuccacgcccugcccccugcauccc

SEQ ID NO: 384137 - RNA, 32 nt, Human
ccuugcccuccaguccucuaccucuggccugc

SEQ ID NO: 384138 - RNA, 20 nt, Human
ccuugcccucccaagacacu

SEQ ID NO: 384139 - RNA, 32 nt, Human
ccuugcccugccuccaguauguuuccaagucc

SEQ ID NO: 384140 - RNA, 32 nt, Human
ccuugcccugcucacccuauguggucccaccu

SEQ ID NO: 384141 - RNA, 32 nt, Human
ccuugcccugcucccccggggacccccaggcu

SEQ ID NO: 384142 - RNA, 32 nt, Human
ccuugcccugcucucuccuguugcucugggau

SEQ ID NO: 384143 - RNA, 32 nt, Human
ccuugcccugggcugccuccuccugagagcug

SEQ ID NO: 384144 - RNA, 32 nt, Human
ccuugcccuggugucuuuuuccagauuucaau

SEQ ID NO: 384145 - RNA, 22 nt, Human
ccuugcccuuccaccuccuccu

SEQ ID NO: 384146 - RNA, 19 nt, Human
ccuugcccuugccucuggu

SEQ ID NO: 384147 - RNA, 32 nt, Human
ccuugcccuuugggcuggagaugcuuugccag

SEQ ID NO: 384148 - RNA, 32 nt, Human
ccuugccgcccgugguccuggccacgcaguac

SEQ ID NO: 384149 - RNA, 32 nt, Human
ccuugccgggagggguacucaccccaccuaag

SEQ ID NO: 384150 - RNA, 32 nt, Human
ccuugccuagauuuaaggccacugugaggaga

SEQ ID NO: 384151 - RNA, 32 nt, Human
ccuugccucaagugagcuucaaccuuagccuc

SEQ ID NO: 384152 - RNA, 32 nt, Human
ccuugccucaggccuggugaguggggcaggca

SEQ ID NO: 384153 - RNA, 32 nt, Human
ccuugccucagugaaauaugcauauguauauc

SEQ ID NO: 384154 - RNA, 21 nt, Human
ccuugccucccccuccucuca

SEQ ID NO: 384155 - RNA, 32 nt, Human
ccuugccuccuuuaggggaaagguaggacagg

SEQ ID NO: 384156 - RNA, 32 nt, Human
ccuugccucugcggccuccacuuggaaaguuc

SEQ ID NO: 384157 - RNA, 32 nt, Human
ccuugccuggacugccuuugacaaggcagaaa

SEQ ID NO: 384158 - RNA, 32 nt, Human
ccuugccuguucugccuuguaugucuauuuua

SEQ ID NO: 384159 - RNA, 32 nt, Human
ccuugccuguuuccgaagcccccacacugccu

SEQ ID NO: 384160 - RNA, 32 nt, Human
ccuugccuucagcugcuucacggagcucauga

SEQ ID NO: 384161 - RNA, 32 nt, Human
ccuugccuuccucccuucuuccucuuggaguc

SEQ ID NO: 384162 - RNA, 32 nt, Human
ccuugccuuggggcagggagagagggaaccug

SEQ ID NO: 384163 - RNA, 32 nt, Human
ccuugcgaggguuggucucgaggcagagguca

SEQ ID NO: 384164 - RNA, 32 nt, Human
ccuugcgcccgggcguagcccagcacaugcgc

SEQ ID NO: 384165 - RNA, 20 nt, Human
ccuugcgccuggugcugcca

SEQ ID NO: 384166 - RNA, 32 nt, Human
ccuugcgcggcagaggaagcgcagggacagag

SEQ ID NO: 384167 - RNA, 32 nt, Human
ccuugcgcuguugcguaacuggcuguguucug

SEQ ID NO: 384168 - RNA, 32 nt, Human
ccuugcggccuuucuaacguuggcccugcucu

SEQ ID NO: 384169 - RNA, 32 nt, Human
ccuugcgggaccccaccuggaacccgaccucc

SEQ ID NO: 384170 - RNA, 32 nt, Human
ccuugcggggcugaguguaacuuuaggaaauu

SEQ ID NO: 384171 - RNA, 32 nt, Human
ccuugcgguggugggauccugaugucuuucau

SEQ ID NO: 384172 - RNA, 32 nt, Human
ccuugcguccuugggcaucuccgggcaucaga

SEQ ID NO: 384173 - RNA, 32 nt, Human
ccuugcgucucccauucccaagauugucccgc

SEQ ID NO: 384174 - RNA, 32 nt, Human
ccuugcuacaaccuggugucucagcuuauuau

SEQ ID NO: 384175 - RNA, 19 nt, Human
ccuugcucacaugcugcca

SEQ ID NO: 384176 - RNA, 32 nt, Human
ccuugcucagaagaaagaucggguaacucaga

SEQ ID NO: 384177 - RNA, 19 nt, Human
ccuugcucagcacuggaca

SEQ ID NO: 384178 - RNA, 32 nt, Human
ccuugcucagccaucccgucuucuccaacacc

SEQ ID NO: 384179 - RNA, 32 nt, Human
ccuugcuccccaccccuugcgaacaggaccag

SEQ ID NO: 384180 - RNA, 23 nt, Human
ccuugcuccucucccuccugccu

SEQ ID NO: 384181 - RNA, 32 nt, Human
ccuugcuccucuuccuccuuucuuggcgggug

SEQ ID NO: 384182 - RNA, 32 nt, Human
ccuugcuccugaggccaaagccagagacucga

SEQ ID NO: 384183 - RNA, 32 nt, Human
ccuugcuccuuagccaggucuccagguccucc

SEQ ID NO: 384184 - RNA, 32 nt, Human
ccuugcuccuuuggggugauuuaugguauaga

SEQ ID NO: 384185 - RNA, 32 nt, Human
ccuugcucgccugcucccuccugcuugccuga

SEQ ID NO: 384186 - RNA, 32 nt, Human
ccuugcucuccagcaaaagcaccaaggaucgg

SEQ ID NO: 384187 - RNA, 32 nt, Human
ccuugcucugagaccccuaccucugccaugag

SEQ ID NO: 384188 - RNA, 32 nt, Human
ccuugcucuguggcuuuucccaacacaaucag

SEQ ID NO: 384189 - RNA, 32 nt, Human
ccuugcucuucucaccucucccuuaccccguu

SEQ ID NO: 384190 - RNA, 32 nt, Human
ccuugcucuucucuggcuaccucugcagggag

SEQ ID NO: 384191 - RNA, 32 nt, Human
ccuugcugacaccugggccuugccuccauguc

SEQ ID NO: 384192 - RNA, 32 nt, Human
ccuugcugacaugccuggaggagcugcuacac

SEQ ID NO: 384193 - RNA, 31 nt, Human
ccuugcugacuucucccuauaagaguaaagc

SEQ ID NO: 384194 - RNA, 32 nt, Human
ccuugcugaugaguaggaugugauuuggcucu

SEQ ID NO: 384195 - RNA, 32 nt, Human
ccuugcugcaggcuagggagcugcagucccca

SEQ ID NO: 384196 - RNA, 32 nt, Human
ccuugcugcuguccucugagacugccuguucc

SEQ ID NO: 384197 - RNA, 32 nt, Human
ccuugcuggacaagugguuuguuugugugcaa

SEQ ID NO: 384198 - RNA, 32 nt, Human
ccuugcuggagucaugugccucuguccuuagg

SEQ ID NO: 384199 - RNA, 32 nt, Human
ccuugcuggaguuuuguuuuguugcuccaauu

SEQ ID NO: 384200 - RNA, 32 nt, Human
ccuugcugggccccaguagggguggggaggga

SEQ ID NO: 384201 - RNA, 32 nt, Human
ccuugcugggcugggaaguggggaaagcaggg

SEQ ID NO: 384202 - RNA, 18 nt, Human
ccuugcuggggacgugaa

SEQ ID NO: 384203 - RNA, 32 nt, Human
ccuugcugguagcuaaggaaaugccuucuguu

SEQ ID NO: 384204 - RNA, 32 nt, Human
ccuugcugugcucacaggcucaccuuuguguu

SEQ ID NO: 384205 - RNA, 24 nt, Human
ccuugcugugucccccaggcggga

SEQ ID NO: 384206 - RNA, 32 nt, Human
ccuugcuucauaucaaauauuuaaccaauuau

SEQ ID NO: 384207 - RNA, 32 nt, Human
ccuugcuuccugcugucccuccaccuccugua

SEQ ID NO: 384208 - RNA, 32 nt, Human
ccuugcuucggcuccucccuugcugaccugcc

SEQ ID NO: 384209 - RNA, 32 nt, Human
ccuugcuucgucuucgcuuuucuuucuacuua

SEQ ID NO: 384210 - RNA, 32 nt, Human
ccuugcuucucaaauaaccuagcaugaagggc

SEQ ID NO: 384211 - RNA, 32 nt, Human
ccuugcuucucccaucaacgagucuuggccca

SEQ ID NO: 384212 - RNA, 32 nt, Human
ccuugcuucucccugcucugcccaucaugacu

SEQ ID NO: 384213 - RNA, 32 nt, Human
ccuugcuucucuccagcccuguccagcaagug

SEQ ID NO: 384214 - RNA, 32 nt, Human
ccuugcuucuugcuuugcagacugccugcagc

SEQ ID NO: 384215 - RNA, 32 nt, Human
ccuugcuuuggacccuacacacuucggcucuc

SEQ ID NO: 384216 - RNA, 32 nt, Human
ccuugcuuugggcccugcagggggagggguga

SEQ ID NO: 384217 - RNA, 32 nt, Human
ccuugcuuuucuuccucuucccccaaccuaac

SEQ ID NO: 384218 - RNA, 20 nt, Human
ccuuggaaaacaugcuggcc

SEQ ID NO: 384219 - RNA, 32 nt, Human
ccuuggaaacagcaaucccaaauaaugucggc

SEQ ID NO: 384220 - RNA, 32 nt, Human
ccuuggaaacaguucuggcacacaggcagaac

SEQ ID NO: 384221 - RNA, 22 nt, Human
ccuuggaaauagaaagaagcca

SEQ ID NO: 384222 - RNA, 32 nt, Human
ccuuggaaaucuguaugugguggagaaguauu

SEQ ID NO: 384223 - RNA, 32 nt, Human
ccuuggaaauggagagcacugcagugaauucu

SEQ ID NO: 384224 - RNA, 32 nt, Human
ccuuggaacaagagacuuuccuaaguggauca

SEQ ID NO: 384225 - RNA, 32 nt, Human
ccuuggaacuccugccuccacagccccuccag

SEQ ID NO: 384226 - RNA, 32 nt, Human
ccuuggaagaagaugucugcagaggagcugga

SEQ ID NO: 384227 - RNA, 20 nt, Human
ccuuggaaggccgcagugag

SEQ ID NO: 384228 - RNA, 32 nt, Human
ccuuggaaggcucucccuuguggaaccaaguu

SEQ ID NO: 384229 - RNA, 32 nt, Human
ccuuggaaugguguugccaucacuguucuggc

SEQ ID NO: 384230 - RNA, 25 nt, Human
ccuuggaauuucucaucuucugccu

SEQ ID NO: 384231 - RNA, 24 nt, Human
ccuuggaauuuucuggcacuuccu

SEQ ID NO: 384232 - RNA, 32 nt, Human
ccuuggacaagccacacaaucaguggggcagc

SEQ ID NO: 384233 - RNA, 19 nt, Human
ccuuggacaagcuuuucuu

SEQ ID NO: 384234 - RNA, 32 nt, Human
ccuuggacauccuccucccacccggcugcaga

SEQ ID NO: 384235 - RNA, 32 nt, Human
ccuuggacaugccuggacucuccagggacagg

SEQ ID NO: 384236 - RNA, 32 nt, Human
ccuuggacauguccaauaaaacaggugggaaa

SEQ ID NO: 384237 - RNA, 32 nt, Human
ccuuggacccccagucugggaacgguggacau

SEQ ID NO: 384238 - RNA, 32 nt, Human
ccuuggacccucggcuguagggggcaccuguc

SEQ ID NO: 384239 - RNA, 32 nt, Human
ccuuggaccugcuugguuaaggagggaguggg

SEQ ID NO: 384240 - RNA, 32 nt, Human
ccuuggaccuguuaggcgcauggcaggagucc

SEQ ID NO: 384241 - RNA, 32 nt, Human
ccuuggacggcugucaguuuugcacaugaugu

SEQ ID NO: 384242 - RNA, 21 nt, Human
ccuuggacucucauucccuuu

SEQ ID NO: 384243 - RNA, 32 nt, Human
ccuuggagaaggacagagcgguggggacuugg

SEQ ID NO: 384244 - RNA, 32 nt, Human
ccuuggagacaggcuagccuggccacagaauu

SEQ ID NO: 384245 - RNA, 32 nt, Human
ccuuggagacaggggagacccuaugucaaaaa

SEQ ID NO: 384246 - RNA, 32 nt, Human
ccuuggagacccaggcaaggacaaguacacgu

SEQ ID NO: 384247 - RNA, 32 nt, Human
ccuuggagacccaggcaaggacaaguacaugu

SEQ ID NO: 384248 - RNA, 32 nt, Human
ccuuggagagcuuucuggaauauuuauaccac

SEQ ID NO: 384249 - RNA, 24 nt, Human
ccuuggagcacccccacccucccc

SEQ ID NO: 384250 - RNA, 32 nt, Human
ccuuggagcuaguggagagggagaggaaaggg

SEQ ID NO: 384251 - RNA, 32 nt, Human
ccuuggagcucugcugccugcaccacaaugaa

SEQ ID NO: 384252 - RNA, 32 nt, Human
ccuuggaggacacuaagaggaggcaggaggag

SEQ ID NO: 384253 - RNA, 32 nt, Human
ccuuggaggagagagacauacaaggacagugg

SEQ ID NO: 384254 - RNA, 32 nt, Human
ccuuggaggaggaggaagaggaggccacugug

SEQ ID NO: 384255 - RNA, 32 nt, Human
ccuuggaggcagagguugcagugagcugagau

SEQ ID NO: 384256 - RNA, 32 nt, Human
ccuuggaggccgggaggaagugggguuggaaa

SEQ ID NO: 384257 - RNA, 32 nt, Human
ccuuggaggcggagguugcagugagcugagau

SEQ ID NO: 384258 - RNA, 32 nt, Human
ccuuggaggcggagguugcauugagcugagau

SEQ ID NO: 384259 - RNA, 32 nt, Human
ccuuggagggaaagcggcgccgcccgaagcag

SEQ ID NO: 384260 - RNA, 32 nt, Human
ccuuggagggacuggccugaggugggcccugg

SEQ ID NO: 384261 - RNA, 32 nt, Human
ccuuggagggccuggaacucugaguccuccua

SEQ ID NO: 384262 - RNA, 32 nt, Human
ccuuggagguacugcugccuggggccgggggu

SEQ ID NO: 384263 - RNA, 24 nt, Human
ccuuggaggucaaaacugcaguga

SEQ ID NO: 384264 - RNA, 20 nt, Human
ccuuggaggugaacuucuca

SEQ ID NO: 384265 - RNA, 32 nt, Human
ccuuggaggugaccagggccacugcaggcaug

SEQ ID NO: 384266 - RNA, 32 nt, Human
ccuuggaggugcgagucugggaaaggcgcgcu

SEQ ID NO: 384267 - RNA, 32 nt, Human
ccuuggagucaagacuucaacacuccauggca

SEQ ID NO: 384268 - RNA, 32 nt, Human
ccuuggaguugaugccuuggcucagauccagc

SEQ ID NO: 384269 - RNA, 32 nt, Human
ccuuggaguugcagaggaggccugauuggcca

SEQ ID NO: 384270 - RNA, 32 nt, Human
ccuuggaucccaaauaaaugaguaguuccucu

SEQ ID NO: 384271 - RNA, 32 nt, Human
ccuuggauccucaggugggcucugcugugugc

SEQ ID NO: 384272 - RNA, 32 nt, Human
ccuuggaucugcagaugcaggaggcagauauc

SEQ ID NO: 384273 - RNA, 32 nt, Human
ccuuggaugaggaugaccuagguccuagaagg

SEQ ID NO: 384274 - RNA, 18 nt, Human
ccuuggaugauggagcca

SEQ ID NO: 384275 - RNA, 32 nt, Human
ccuuggaugggacuugcaggccuaaaugagag

SEQ ID NO: 384276 - RNA, 31 nt, Human
ccuuggauggggaagggccagaugcugggug

SEQ ID NO: 384277 - RNA, 32 nt, Human
ccuuggaugucauugaggaggaaaggcgguug

SEQ ID NO: 384278 - RNA, 32 nt, Human
ccuuggcaacaaagcaagacccugucuccaaa

SEQ ID NO: 384279 - RNA, 32 nt, Human
ccuuggcaacacagugagacccugucuuuaaa

SEQ ID NO: 384280 - RNA, 32 nt, Human
ccuuggcaacacagugugagacccugucucaa

SEQ ID NO: 384281 - RNA, 32 nt, Human
ccuuggcaacagagugagacccugucuucaaa

SEQ ID NO: 384282 - RNA, 32 nt, Human
ccuuggcacaccaguguucuccugccaaauga

SEQ ID NO: 384283 - RNA, 32 nt, Human
ccuuggcaccagcaccaccacugccaucgauu

SEQ ID NO: 384284 - RNA, 32 nt, Human
ccuuggcagcagggaggaagcaggagugcccc

SEQ ID NO: 384285 - RNA, 32 nt, Human
ccuuggcagcccccuguaguugacagguaagc

SEQ ID NO: 384286 - RNA, 22 nt, Human
ccuuggcagccugucaccgccc

SEQ ID NO: 384287 - RNA, 32 nt, Human
ccuuggcagcgccgccccugcccacacugacc

SEQ ID NO: 384288 - RNA, 32 nt, Human
ccuuggcaggaggguuuggggcuuccacauau

SEQ ID NO: 384289 - RNA, 32 nt, Human
ccuuggcaggcucugggcaguagccacagaga

SEQ ID NO: 384290 - RNA, 32 nt, Human
ccuuggcagggugagcccacaaggagcaaugg

SEQ ID NO: 384291 - RNA, 32 nt, Human
ccuuggcaggguguuggagcccucggucugcc

SEQ ID NO: 384292 - RNA, 24 nt, Human
ccuuggcagguggaucaccugaga

SEQ ID NO: 384293 - RNA, 32 nt, Human
ccuuggcaggugugagaucgaggccaguagug

SEQ ID NO: 384294 - RNA, 32 nt, Human
ccuuggcaggugugggauccagaccacuagca

SEQ ID NO: 384295 - RNA, 21 nt, Human
ccuuggcauccgccucuucuu

SEQ ID NO: 384296 - RNA, 32 nt, Human
ccuuggccaaaguguugggauuacaggcauaa

SEQ ID NO: 384297 - RNA, 32 nt, Human
ccuuggccacaugccugcaggcauuuguuuuc

SEQ ID NO: 384298 - RNA, 32 nt, Human
ccuuggccaccugucugccauauacguacacu

SEQ ID NO: 384299 - RNA, 32 nt, Human
ccuuggccacugugcguuacagccuggagggg

SEQ ID NO: 384300 - RNA, 22 nt, Human
ccuuggccaugcucccugguca

SEQ ID NO: 384301 - RNA, 32 nt, Human
ccuuggcccaagaacacagucauguggagccc

SEQ ID NO: 384302 - RNA, 32 nt, Human
ccuuggcccaggaggcagagguugcagugagc

SEQ ID NO: 384303 - RNA, 19 nt, Human
ccuuggccccauccucuca

SEQ ID NO: 384304 - RNA, 32 nt, Human
ccuuggcccccagcuacaaugaaaaagaagaa

SEQ ID NO: 384305 - RNA, 20 nt, Human
ccuuggccccucccucuuca

SEQ ID NO: 384306 - RNA, 18 nt, Human
ccuuggccccuccugguc

SEQ ID NO: 384307 - RNA, 32 nt, Human
ccuuggcccucaggaagcaucagaucucaaac

SEQ ID NO: 384308 - RNA, 17 nt, Human
ccuuggcccuuccccuc

SEQ ID NO: 384309 - RNA, 18 nt, Human
ccuuggccgaagcauaga

SEQ ID NO: 384310 - RNA, 17 nt, Human
ccuuggccgccgcgccg

SEQ ID NO: 384311 - RNA, 32 nt, Human
ccuuggccgccuugcccugccgccgcucucgc

SEQ ID NO: 384312 - RNA, 32 nt, Human
ccuuggccgccuugcccugccgcugcucucac

SEQ ID NO: 384313 - RNA, 19 nt, Human
ccuuggccuaucccucuca

SEQ ID NO: 384314 - RNA, 21 nt, Human
ccuuggccucagcuccucuca

SEQ ID NO: 384315 - RNA, 23 nt, Human
ccuuggccuccaccaagcacgug

SEQ ID NO: 384316 - RNA, 20 nt, Human
ccuuggccuccagcucccgu

SEQ ID NO: 384317 - RNA, 21 nt, Human
ccuuggccuccauuucugucu

SEQ ID NO: 384318 - RNA, 18 nt, Human
ccuuggccucccagaguc

SEQ ID NO: 384319 - RNA, 17 nt, Human
ccuuggccucccguguu

SEQ ID NO: 384320 - RNA, 21 nt, Human
ccuuggccuccucucagcucg

SEQ ID NO: 384321 - RNA, 24 nt, Human
ccuuggccuccugccucccugucu

SEQ ID NO: 384322 - RNA, 20 nt, Human
ccuuggccucucaggcucgu

SEQ ID NO: 384323 - RNA, 20 nt, Human
ccuuggccucuccugauguc

SEQ ID NO: 384324 - RNA, 19 nt, Human
ccuuggccuggaccugggg

SEQ ID NO: 384325 - RNA, 21 nt, Human
ccuuggccuggccuccucuca

SEQ ID NO: 384326 - RNA, 32 nt, Human
ccuuggccuggucucgagaagcuucccaugcu

SEQ ID NO: 384327 - RNA, 26 nt, Human
ccuuggccuguugcuucuaggggucg

SEQ ID NO: 384328 - RNA, 26 nt, Human
ccuuggccuguugcuucuagggguug

SEQ ID NO: 384329 - RNA, 32 nt, Human
ccuuggccuuagaguuaagugaagaguuaaca

SEQ ID NO: 384330 - RNA, 32 nt, Human
ccuuggccuucugcaagccaagugguucugca

SEQ ID NO: 384331 - RNA, 32 nt, Human
ccuuggccuugccuccccuuccugccacgugc

SEQ ID NO: 384332 - RNA, 29 nt, Human
ccuuggcgacaaaccaagacccugucucg

SEQ ID NO: 384333 - RNA, 32 nt, Human
ccuuggcgccaccaccuggcccuggugguuaa

SEQ ID NO: 384334 - RNA, 21 nt, Human
ccuuggcggaggucggcguga

SEQ ID NO: 384335 - RNA, 28 nt, Human
ccuuggcggcuauuuuugccaccugccu

SEQ ID NO: 384336 - RNA, 32 nt, Human
ccuuggcgucuccgcagccugggaagcucgga

SEQ ID NO: 384337 - RNA, 32 nt, Human
ccuuggcguggagucuuccucccuucucccaa

SEQ ID NO: 384338 - RNA, 24 nt, Human
ccuuggcuaaacagggacagugaa

SEQ ID NO: 384339 - RNA, 23 nt, Human
ccuuggcuaaauggagcagcgaa

SEQ ID NO: 384340 - RNA, 24 nt, Human
ccuuggcuaagaagagacaacgga

SEQ ID NO: 384341 - RNA, 32 nt, Human
ccuuggcucacugcaaccuccaccucccaggu

SEQ ID NO: 384342 - RNA, 32 nt, Human
ccuuggcucacugcaaccuccaggccagccuc

SEQ ID NO: 384343 - RNA, 32 nt, Human
ccuuggcucacugcaaccuccaucuccggggc

SEQ ID NO: 384344 - RNA, 32 nt, Human
ccuuggcucacugcaaccuccgccucccgggu

SEQ ID NO: 384345 - RNA, 32 nt, Human
ccuuggcucacugcaaccucugccucccuggu

SEQ ID NO: 384346 - RNA, 32 nt, Human
ccuuggcucacuguccccuucugccgccagcc

SEQ ID NO: 384347 - RNA, 32 nt, Human
ccuuggcuccacuggucaccuacuuuucaucu

SEQ ID NO: 384348 - RNA, 32 nt, Human
ccuuggcuccaggagcccacaggcuggggagg

SEQ ID NO: 384349 - RNA, 32 nt, Human
ccuuggcucugccuuggcccuuccccucacca

SEQ ID NO: 384350 - RNA, 32 nt, Human
ccuuggcucuuggcccccuccuccaucuucag

SEQ ID NO: 384351 - RNA, 32 nt, Human
ccuuggcucuuuggcucccuuuugcuuaauua

SEQ ID NO: 384352 - RNA, 32 nt, Human
ccuuggcugauaggagaauggauguuagcuga

SEQ ID NO: 384353 - RNA, 32 nt, Human
ccuuggcugcaagcucugcugccuccuugccu

SEQ ID NO: 384354 - RNA, 32 nt, Human
ccuuggcugcacggaccccaugggagcugcga

SEQ ID NO: 384355 - RNA, 32 nt, Human
ccuuggcuggugacggcaccaugccauccucu

SEQ ID NO: 384356 - RNA, 32 nt, Human
ccuuggcugucagugcugcccagauucagaag

SEQ ID NO: 384357 - RNA, 32 nt, Human
ccuuggcuguccuaacagggccaaucaccagu

SEQ ID NO: 384358 - RNA, 20 nt, Human
ccuuggcugugccuccugcu

SEQ ID NO: 384359 - RNA, 32 nt, Human
ccuuggcugugccuccugcucucuucaagagc

SEQ ID NO: 384360 - RNA, 32 nt, Human
ccuuggcuuacagcauuugccugcugaauacu

SEQ ID NO: 384361 - RNA, 32 nt, Human
ccuuggcuuccaauauggcaagagggugcugg

SEQ ID NO: 384362 - RNA, 32 nt, Human
ccuuggcuuccagccaugcuguccucacauac

SEQ ID NO: 384363 - RNA, 32 nt, Human
ccuuggcuuccucugcugggugggauuggggg

SEQ ID NO: 384364 - RNA, 32 nt, Human
ccuuggcuuccuggcccagucccugccucucc

SEQ ID NO: 384365 - RNA, 32 nt, Human
ccuuggcuugcaccuacugauucuccacgugu

SEQ ID NO: 384366 - RNA, 32 nt, Human
ccuuggcuuggaaggcuggagcuucgggccaa

SEQ ID NO: 384367 - RNA, 32 nt, Human
ccuuggcuuuucuccccuucucauucuccucu

SEQ ID NO: 384368 - RNA, 32 nt, Human
ccuugggaaacuuuacauagaggggaacaugc

SEQ ID NO: 384369 - RNA, 32 nt, Human
ccuugggaacagaucugugaucugaggagguu

SEQ ID NO: 384370 - RNA, 32 nt, Human
ccuugggaaggucagaaaaaucucucagggcc

SEQ ID NO: 384371 - RNA, 32 nt, Human
ccuugggaagugagacuagaagaggggagcag

SEQ ID NO: 384372 - RNA, 32 nt, Human
ccuugggacaaaaagggaaaccuaguaaugcc

SEQ ID NO: 384373 - RNA, 22 nt, Human
ccuugggacacgguuuuccacu

SEQ ID NO: 384374 - RNA, 32 nt, Human
ccuugggacccgcuucccaccugcugcgguca

SEQ ID NO: 384375 - RNA, 32 nt, Human
ccuugggacgucuggucuucuggcuuccccgg

SEQ ID NO: 384376 - RNA, 17 nt, Human
ccuugggacguggagcc

SEQ ID NO: 384377 - RNA, 23 nt, Human
ccuugggacuggauucucuuccu

SEQ ID NO: 384378 - RNA, 23 nt, Human
ccuugggagcagucucucugucu

SEQ ID NO: 384379 - RNA, 32 nt, Human
ccuugggaggccaaggcaggcagaucacgaca

SEQ ID NO: 384380 - RNA, 32 nt, Human
ccuugggaggccaaggugggaggaucacugga

SEQ ID NO: 384381 - RNA, 32 nt, Human
ccuugggaggccacuguaggaggaucaauuga

SEQ ID NO: 384382 - RNA, 32 nt, Human
ccuugggaggcccaggcaggcagaucaccuga

SEQ ID NO: 384383 - RNA, 32 nt, Human
ccuugggaggccgaggcaggcagaucaccuua

SEQ ID NO: 384384 - RNA, 32 nt, Human
ccuugggaggccggggcaggaggaucaccuua

SEQ ID NO: 384385 - RNA, 23 nt, Human
ccuugggaggcuaagacaggaag

SEQ ID NO: 384386 - RNA, 32 nt, Human
ccuugggaggcugaggcagguggaucaccuaa

SEQ ID NO: 384387 - RNA, 32 nt, Human
ccuugggaggcugaggcgggcagaucaugagg

SEQ ID NO: 384388 - RNA, 32 nt, Human
ccuugggaggcugaggugggaggaucauuuga

SEQ ID NO: 384389 - RNA, 32 nt, Human
ccuugggaggcugccuuagcugcuggacuuga

SEQ ID NO: 384390 - RNA, 32 nt, Human
ccuugggagggacuucaggcccuggcugaucg

SEQ ID NO: 384391 - RNA, 32 nt, Human
ccuugggaguagcugagggggcagacuaggga

SEQ ID NO: 384392 - RNA, 32 nt, Human
ccuugggaguagcugggugaauggacgauggu

SEQ ID NO: 384393 - RNA, 32 nt, Human
ccuugggaguggccugugcaccccagggccag

SEQ ID NO: 384394 - RNA, 32 nt, Human
ccuugggaguuuuugugucuguuagcggcaca

SEQ ID NO: 384395 - RNA, 21 nt, Human
ccuugggaucugcccuccgcu

SEQ ID NO: 384396 - RNA, 21 nt, Human
ccuugggaugcggcccuucau

SEQ ID NO: 384397 - RNA, 24 nt, Human
ccuugggauguaccuuucuucacu

SEQ ID NO: 384398 - RNA, 21 nt, Human
ccuugggauuagccucuuccu

SEQ ID NO: 384399 - RNA, 21 nt, Human
ccuugggauuuccuucucccu

SEQ ID NO: 384400 - RNA, 18 nt, Human
ccuugggcaagcuccuca

SEQ ID NO: 384401 - RNA, 32 nt, Human
ccuugggcaagucccuggggcuggcuaggccu

SEQ ID NO: 384402 - RNA, 32 nt, Human
ccuugggcaagugucuuuacugcucagaaccu

SEQ ID NO: 384403 - RNA, 32 nt, Human
ccuugggcacagcagguccugaacacccugcu

SEQ ID NO: 384404 - RNA, 32 nt, Human
ccuugggcaccuccugguaugugcacacccca

SEQ ID NO: 384405 - RNA, 32 nt, Human
ccuugggcaggggcagggagagcugcugagcc

SEQ ID NO: 384406 - RNA, 25 nt, Human
ccuugggcagguuccauuucugcuu

SEQ ID NO: 384407 - RNA, 21 nt, Human
ccuugggcagugccuccuccu

SEQ ID NO: 384408 - RNA, 32 nt, Human
ccuugggcccagcacacccucgcugcuggugg

SEQ ID NO: 384409 - RNA, 25 nt, Human
ccuugggcccauuucccuccugucu

SEQ ID NO: 384410 - RNA, 22 nt, Human
ccuugggccccagccuccugcu

SEQ ID NO: 384411 - RNA, 26 nt, Human
ccuugggccgagccugccuccugcuu

SEQ ID NO: 384412 - RNA, 32 nt, Human
ccuugggccugggauaaguccacucuccacac

SEQ ID NO: 384413 - RNA, 31 nt, Human
ccuugggcgggccauuucacauuccugaccc

SEQ ID NO: 384414 - RNA, 32 nt, Human
ccuugggcgucccuccugguccugcgcucgcg

SEQ ID NO: 384415 - RNA, 32 nt, Human
ccuugggcucaagcuauccucccaccucagcc

SEQ ID NO: 384416 - RNA, 32 nt, Human
ccuugggcuccaggggagggugcgugggggcg

SEQ ID NO: 384417 - RNA, 32 nt, Human
ccuugggcucccuguaaccucuucagaggccc

SEQ ID NO: 384418 - RNA, 32 nt, Human
ccuugggcucuccccagggucuaacgguuaag

SEQ ID NO: 384419 - RNA, 22 nt, Human
ccuugggcugccucuucugucu

SEQ ID NO: 384420 - RNA, 32 nt, Human
ccuugggcuggcucgagccugggguccauguc

SEQ ID NO: 384421 - RNA, 32 nt, Human
ccuugggcuggcugugugaucuugggcaaguu

SEQ ID NO: 384422 - RNA, 32 nt, Human
ccuugggcugggugggaagagggguggccgcc

SEQ ID NO: 384423 - RNA, 32 nt, Human
ccuugggcuucugagggcaucauagggggacc

SEQ ID NO: 384424 - RNA, 32 nt, Human
ccuugggcuuggcuccagcaguggcaccaaua

SEQ ID NO: 384425 - RNA, 32 nt, Human
ccuugggcuuucugucuccucaacaagagugc

SEQ ID NO: 384426 - RNA, 32 nt, Human
ccuugggcuuugaacccacccuucuuagaagg

SEQ ID NO: 384427 - RNA, 32 nt, Human
ccuugggcuuuucaacucuugcaccuggaguu

SEQ ID NO: 384428 - RNA, 32 nt, Human
ccuuggggaaguuggcccauaucuuacuaagu

SEQ ID NO: 384429 - RNA, 22 nt, Human
ccuuggggacuccugucugucu

SEQ ID NO: 384430 - RNA, 32 nt, Human
ccuuggggagaaauggcccguggugggcugac

SEQ ID NO: 384431 - RNA, 32 nt, Human
ccuuggggaggaaccauaucucccucugggcc

SEQ ID NO: 384432 - RNA, 32 nt, Human
ccuuggggaucugggagcugagcacuugucua

SEQ ID NO: 384433 - RNA, 32 nt, Human
ccuuggggaugguggaggugcuaaugcuuugc

SEQ ID NO: 384434 - RNA, 23 nt, Human
ccuuggggauucuacuucuuccu

SEQ ID NO: 384435 - RNA, 32 nt, Human
ccuuggggcacagucauucacaucacugauug

SEQ ID NO: 384436 - RNA, 32 nt, Human
ccuuggggcagcucccacauucccagggauuu

SEQ ID NO: 384437 - RNA, 32 nt, Human
ccuuggggcagggagagagggaaccugcucac

SEQ ID NO: 384438 - RNA, 32 nt, Human
ccuuggggccagcaucucccacugccuccaaa

SEQ ID NO: 384439 - RNA, 24 nt, Human
ccuuggggcccaaggccucuuccu

SEQ ID NO: 384440 - RNA, 32 nt, Human
ccuuggggcccugggagaucugggacuucaga

SEQ ID NO: 384441 - RNA, 22 nt, Human
ccuuggggcgcggcagcgcagg

SEQ ID NO: 384442 - RNA, 32 nt, Human
ccuuggggcggggugguugcaguagugucauc

SEQ ID NO: 384443 - RNA, 32 nt, Human
ccuuggggcuaaggggacagcggugugguuug

SEQ ID NO: 384444 - RNA, 18 nt, Human
ccuuggggcugggcccug

SEQ ID NO: 384445 - RNA, 32 nt, Human
ccuuggggcugguggcugggggaguggguagc

SEQ ID NO: 384446 - RNA, 32 nt, Human
ccuugggggaaaggaaggaagugcauguuugg

SEQ ID NO: 384447 - RNA, 32 nt, Human
ccuugggggccaccaacaagggaggaagucag

SEQ ID NO: 384448 - RNA, 23 nt, Human
ccuuggggggcacaugucuucgu

SEQ ID NO: 384449 - RNA, 19 nt, Human
ccuuggggguguugagcca

SEQ ID NO: 384450 - RNA, 23 nt, Human
ccuuggggguuccgcuuccuguu

SEQ ID NO: 384451 - RNA, 21 nt, Human
ccuugggguaccccuuuuccu

SEQ ID NO: 384452 - RNA, 26 nt, Human
ccuugggguagcaccuccuucugcuu

SEQ ID NO: 384453 - RNA, 18 nt, Human
ccuuggggucgccuccca

SEQ ID NO: 384454 - RNA, 22 nt, Human
ccuugggguggcgcgccugccu

SEQ ID NO: 384455 - RNA, 23 nt, Human
ccuugggguuaagucuccugucu

SEQ ID NO: 384456 - RNA, 32 nt, Human
ccuugggguuugagagcgcuguauuugggaga

SEQ ID NO: 384457 - RNA, 24 nt, Human
ccuugggguuugggggcuugaccu

SEQ ID NO: 384458 - RNA, 32 nt, Human
ccuuggguaggguacgguggggugggguguug

SEQ ID NO: 384459 - RNA, 22 nt, Human
ccuuggguauuaagugcaguca

SEQ ID NO: 384460 - RNA, 32 nt, Human
ccuuggguccccauccucuggaaccaggggga

SEQ ID NO: 384461 - RNA, 32 nt, Human
ccuuggguccuuccagcucagugccgcggaca

SEQ ID NO: 384462 - RNA, 32 nt, Human
ccuugggucuguuucauucuaaaacgaagugg

SEQ ID NO: 384463 - RNA, 32 nt, Human
ccuugggugacaccuccgagaggcagccagac

SEQ ID NO: 384464 - RNA, 23 nt, Human
ccuugggugucccucuccugccu

SEQ ID NO: 384465 - RNA, 32 nt, Human
ccuuggguguggccaucuucuauggucgagac

SEQ ID NO: 384466 - RNA, 22 nt, Human
ccuuggguucaagguuacagga

SEQ ID NO: 384467 - RNA, 32 nt, Human
ccuuggguuccaggcuggaggaaugcaggcag

SEQ ID NO: 384468 - RNA, 23 nt, Human
ccuuggguuugcucuuucuucac

SEQ ID NO: 384469 - RNA, 32 nt, Human
ccuugguaauuuugaauuuggccauaguauac

SEQ ID NO: 384470 - RNA, 32 nt, Human
ccuugguagaaggagagaaggggaguggagga

SEQ ID NO: 384471 - RNA, 32 nt, Human
ccuugguagcuugcaggagcaucugaugaaug

SEQ ID NO: 384472 - RNA, 18 nt, Human
ccuugguagcuuuuucuc

SEQ ID NO: 384473 - RNA, 24 nt, Human
ccuugguaucgccucucccuuccc

SEQ ID NO: 384474 - RNA, 32 nt, Human
ccuugguauguaccucuggcaaaugcccuggu

SEQ ID NO: 384475 - RNA, 21 nt, Human
ccuugguauuucuccuggggc

SEQ ID NO: 384476 - RNA, 21 nt, Human
ccuuggucauggccaaacccu

SEQ ID NO: 384477 - RNA, 21 nt, Human
ccuugguccccaaccccagca

SEQ ID NO: 384478 - RNA, 16 nt, Human
ccuugguccucaggug

SEQ ID NO: 384479 - RNA, 32 nt, Human
ccuugguccucaucuuggucccuuccaaucug

SEQ ID NO: 384480 - RNA, 32 nt, Human
ccuuggucgccuagacuggauagugggggugg

SEQ ID NO: 384481 - RNA, 32 nt, Human
ccuuggucucaccuauccugcccucacaucuu

SEQ ID NO: 384482 - RNA, 32 nt, Human
ccuuggucuccaccacgacaucucaguaccaa

SEQ ID NO: 384483 - RNA, 32 nt, Human
ccuuggucugagacaguguccucaggucgcag

SEQ ID NO: 384484 - RNA, 22 nt, Human
ccuuggucugucacuccugcuu

SEQ ID NO: 384485 - RNA, 20 nt, Human
ccuuggucuucccugccccu

SEQ ID NO: 384486 - RNA, 32 nt, Human
ccuuggucuuggcuuguccucacccagucgga

SEQ ID NO: 384487 - RNA, 32 nt, Human
ccuugguggcaggucccagagccuagguggua

SEQ ID NO: 384488 - RNA, 32 nt, Human
ccuugguggcugcuggaaagggagagguucuc

SEQ ID NO: 384489 - RNA, 32 nt, Human
ccuugguguucucugcuguuaucugccaaaug

SEQ ID NO: 384490 - RNA, 32 nt, Human
ccuugguuaaagaaauccacuugugaagugug

SEQ ID NO: 384491 - RNA, 32 nt, Human
ccuugguuccagcaauucuucugccucagccu

SEQ ID NO: 384492 - RNA, 32 nt, Human
ccuugguucuccccaugacaccaccugaacgu

SEQ ID NO: 384493 - RNA, 32 nt, Human
ccuugguugguugaaucuacagaugcagaacc

SEQ ID NO: 384494 - RNA, 18 nt, Human
ccuugguuguuuuucucu

SEQ ID NO: 384495 - RNA, 32 nt, Human
ccuugguuuccugagccaccuuuacucugcuc

SEQ ID NO: 384496 - RNA, 32 nt, Human
ccuugguuucuaggaugguuuuguguggaggg

SEQ ID NO: 384497 - RNA, 32 nt, Human
ccuuguaaagacagagugaauuucaguauaaa

SEQ ID NO: 384498 - RNA, 24 nt, Human
ccuuguaacccuuuucugcccagc

SEQ ID NO: 384499 - RNA, 32 nt, Human
ccuuguaacggauguuuccaccuccuucucca

SEQ ID NO: 384500 - RNA, 32 nt, Human
ccuuguaacggauguuuccaccuucuucucca

SEQ ID NO: 384501 - RNA, 32 nt, Human
ccuuguaaguaaauccaugauaugaauuagaa

SEQ ID NO: 384502 - RNA, 32 nt, Human
ccuuguaaguucuggggagcauuccaaagcag

SEQ ID NO: 384503 - RNA, 32 nt, Human
ccuuguaaucuaacuuugucacugugacuaca

SEQ ID NO: 384504 - RNA, 32 nt, Human
ccuuguacagaggcauagguuaccacccccac

SEQ ID NO: 384505 - RNA, 32 nt, Human
ccuuguacaugaaaacagcggcccacccaaag

SEQ ID NO: 384506 - RNA, 32 nt, Human
ccuuguaccccaucccuuccuccccagucuac

SEQ ID NO: 384507 - RNA, 32 nt, Human
ccuuguaccugcuccgugcccaacacaugccc

SEQ ID NO: 384508 - RNA, 32 nt, Human
ccuuguagagacauggucucacuauguugcug

SEQ ID NO: 384509 - RNA, 32 nt, Human
ccuuguaggaauaguugaaggagauucgauuu

SEQ ID NO: 384510 - RNA, 32 nt, Human
ccuuguaguacaaggugcuuuaaugggauaga

SEQ ID NO: 384511 - RNA, 23 nt, Human
ccuuguaguacagguacagugaa

SEQ ID NO: 384512 - RNA, 32 nt, Human
ccuuguauaacugaauuuauggugcuauuuaa

SEQ ID NO: 384513 - RNA, 19 nt, Human
ccuuguauccuccuuguca

SEQ ID NO: 384514 - RNA, 32 nt, Human
ccuuguaucuucuccccuucugagccugucca

SEQ ID NO: 384515 - RNA, 32 nt, Human
ccuugucacccaggcuagagugcaguggcacg

SEQ ID NO: 384516 - RNA, 32 nt, Human
ccuugucacccaggcuggaguccaguggcaca

SEQ ID NO: 384517 - RNA, 32 nt, Human
ccuugucacccaggcuguagugcgguggcgcg

SEQ ID NO: 384518 - RNA, 32 nt, Human
ccuugucacuacuuuaggcccauuccacaaag

SEQ ID NO: 384519 - RNA, 32 nt, Human
ccuugucacuccuugcuccucucccuccugcc

SEQ ID NO: 384520 - RNA, 19 nt, Human
ccuugucacugcagccaga

SEQ ID NO: 384521 - RNA, 32 nt, Human
ccuugucagcucccuaagucuuccuguuuccc

SEQ ID NO: 384522 - RNA, 32 nt, Human
ccuugucaggaucuccccuccuuggcccaggc

SEQ ID NO: 384523 - RNA, 32 nt, Human
ccuugucauuuuaccccaucccugcaugacug

SEQ ID NO: 384524 - RNA, 32 nt, Human
ccuuguccaagaagaacuugcuacacagccua

SEQ ID NO: 384525 - RNA, 32 nt, Human
ccuuguccaagaaggcuggacgagagaccuuc

SEQ ID NO: 384526 - RNA, 32 nt, Human
ccuuguccacuaacugcacuuccuucccacug

SEQ ID NO: 384527 - RNA, 32 nt, Human
ccuuguccacugcccugcuccagcccauuucc

SEQ ID NO: 384528 - RNA, 18 nt, Human
ccuuguccacugcugccg

SEQ ID NO: 384529 - RNA, 32 nt, Human
ccuuguccagccugaccaacauggugaaaccc

SEQ ID NO: 384530 - RNA, 32 nt, Human
ccuugucccagccucugccccagcccacuggc

SEQ ID NO: 384531 - RNA, 32 nt, Human
ccuugucccagcuucuacaggcugaggaagcu

SEQ ID NO: 384532 - RNA, 21 nt, Human
ccuuguccccacucccuuccc

SEQ ID NO: 384533 - RNA, 32 nt, Human
ccuuguccccgagggccaugggccgggucuca

SEQ ID NO: 384534 - RNA, 32 nt, Human
ccuuguccccucuuccccaaaaccucuguaaa

SEQ ID NO: 384535 - RNA, 29 nt, Human
ccuuguccccugccugugccugccuggga

SEQ ID NO: 384536 - RNA, 32 nt, Human
ccuuguccccuuuuuauuuauugggcaggggg

SEQ ID NO: 384537 - RNA, 32 nt, Human
ccuugucccucuuccucuuucuuuccguuucc

SEQ ID NO: 384538 - RNA, 32 nt, Human
ccuugucccuguuuaucugcagccaggagacu

SEQ ID NO: 384539 - RNA, 32 nt, Human
ccuugucccuuagcguccaccuaggggacauu

SEQ ID NO: 384540 - RNA, 32 nt, Human
ccuuguccucaagauuuuuaguuuggcccaag

SEQ ID NO: 384541 - RNA, 32 nt, Human
ccuuguccucaccuuacuccccucaggacccu

SEQ ID NO: 384542 - RNA, 32 nt, Human
ccuuguccucagcucccaucuccuggacugcc

SEQ ID NO: 384543 - RNA, 32 nt, Human
ccuuguccugaguggccuuaggaagcugcagu

SEQ ID NO: 384544 - RNA, 32 nt, Human
ccuuguccuguggccucugcuccaggggcagu

SEQ ID NO: 384545 - RNA, 32 nt, Human
ccuuguccuucuccucuuuguccuccugcuuu

SEQ ID NO: 384546 - RNA, 32 nt, Human
ccuugucucccacucuuucuucauauacggug

SEQ ID NO: 384547 - RNA, 32 nt, Human
ccuugucuccuccagcaccacagggaagacaa

SEQ ID NO: 384548 - RNA, 32 nt, Human
ccuugucucuaccaaaauaaaaauuagcuggg

SEQ ID NO: 384549 - RNA, 32 nt, Human
ccuugucucuaugccagcucagucccaucaga

SEQ ID NO: 384550 - RNA, 32 nt, Human
ccuugucuggaggcuuuguucaucucgaagga

SEQ ID NO: 384551 - RNA, 32 nt, Human
ccuugucuguaucugggcagcagguguuccau

SEQ ID NO: 384552 - RNA, 32 nt, Human
ccuugucuucagaugagaauggagucugaaug

SEQ ID NO: 384553 - RNA, 32 nt, Human
ccuugucuuccaguuccuuucucccauuccca

SEQ ID NO: 384554 - RNA, 32 nt, Human
ccuugucuucuuuccuuuugcgacuugguuuu

SEQ ID NO: 384555 - RNA, 22 nt, Human
ccuugucuuucaaaagaacuca

SEQ ID NO: 384556 - RNA, 23 nt, Human
ccuugucuuucaaaagacaccug

SEQ ID NO: 384557 - RNA, 32 nt, Human
ccuugucuuugccucugauuuuuacacagugu

SEQ ID NO: 384558 - RNA, 31 nt, Human
ccuugucuuugcucuuacccugugucuucca

SEQ ID NO: 384559 - RNA, 32 nt, Human
ccuugucuuugucuuucuucccuucccccugc

SEQ ID NO: 384560 - RNA, 32 nt, Human
ccuugucuuuuccucucucugccucaguuucu

SEQ ID NO: 384561 - RNA, 32 nt, Human
ccuugugaaagaagaaaagauaacugaaugaa

SEQ ID NO: 384562 - RNA, 32 nt, Human
ccuugugaaaguuaccacagugcuccauguga

SEQ ID NO: 384563 - RNA, 32 nt, Human
ccuugugaacugcucaguaaacucuacauugu

SEQ ID NO: 384564 - RNA, 21 nt, Human
ccuugugaagguggcaggggc

SEQ ID NO: 384565 - RNA, 32 nt, Human
ccuugugaaugcucaccuaaaccaaagaucac

SEQ ID NO: 384566 - RNA, 22 nt, Human
ccuugugaaugucccuuaggga

SEQ ID NO: 384567 - RNA, 32 nt, Human
ccuugugacaucucugaucagguuggggugcc

SEQ ID NO: 384568 - RNA, 23 nt, Human
ccuugugaguuauagucugcuua

SEQ ID NO: 384569 - RNA, 21 nt, Human
ccuugugauccacccaccuca

SEQ ID NO: 384570 - RNA, 21 nt, Human
ccuugugauccgcccaccuca

SEQ ID NO: 384571 - RNA, 21 nt, Human
ccuugugauccucccgccuca

SEQ ID NO: 384572 - RNA, 32 nt, Human
ccuugugauccucccgccucagccucucaaag

SEQ ID NO: 384573 - RNA, 32 nt, Human
ccuugugaucugccugccucagccucucaaag

SEQ ID NO: 384574 - RNA, 32 nt, Human
ccuugugauucuguccccuccccaagacccca

SEQ ID NO: 384575 - RNA, 31 nt, Human
ccuugugcacuuuuccccuggcaguggacau

SEQ ID NO: 384576 - RNA, 32 nt, Human
ccuugugcagaagacuaguuacacuuaauggg

SEQ ID NO: 384577 - RNA, 32 nt, Human
ccuugugcagagccaggggucugagggcaccu

SEQ ID NO: 384578 - RNA, 32 nt, Human
ccuugugcagggcugaagacauguggacuucc

SEQ ID NO: 384579 - RNA, 32 nt, Human
ccuugugcauuugggcugaagacaaagaugac

SEQ ID NO: 384580 - RNA, 32 nt, Human
ccuugugccaggucaaggugggggcaggcugg

SEQ ID NO: 384581 - RNA, 32 nt, Human
ccuugugccccaggcauccucagccucuggug

SEQ ID NO: 384582 - RNA, 32 nt, Human
ccuugugccuccugugggaggcugaggacugc

SEQ ID NO: 384583 - RNA, 32 nt, Human
ccuugugccuggguaaaaagucuccuccuggg

SEQ ID NO: 384584 - RNA, 32 nt, Human
ccuugugcuagagcccuccaucaccuucacgc

SEQ ID NO: 384585 - RNA, 32 nt, Human
ccuugugcucaggccagugucuucccauuaac

SEQ ID NO: 384586 - RNA, 32 nt, Human
ccuugugcugaccccgcuggggugcagggguu

SEQ ID NO: 384587 - RNA, 32 nt, Human
ccuugugcugugcagcccgguuccuaacagac

SEQ ID NO: 384588 - RNA, 30 nt, Human
ccuuguggccacuccaugcauuuuucuugg

SEQ ID NO: 384589 - RNA, 32 nt, Human
ccuuguggggcucuugggaugggcgggcaccc

SEQ ID NO: 384590 - RNA, 32 nt, Human
ccuugugggugaagccagggagggagacagga

SEQ ID NO: 384591 - RNA, 32 nt, Human
ccuuguggguuauuauggcaguacauuuaucg

SEQ ID NO: 384592 - RNA, 32 nt, Human
ccuugugguggaggaggccugggggcagccag

SEQ ID NO: 384593 - RNA, 32 nt, Human
ccuuguguauccugacagcgccauguguguca

SEQ ID NO: 384594 - RNA, 32 nt, Human
ccuugugucuucaagcauugaccaaguuaagu

SEQ ID NO: 384595 - RNA, 21 nt, Human
ccuugugugacccuccccaua

SEQ ID NO: 384596 - RNA, 32 nt, Human
ccuugugugcugacagccuggcugcugcagga

SEQ ID NO: 384597 - RNA, 32 nt, Human
ccuuguguggccugcucagagcuggaugccac

SEQ ID NO: 384598 - RNA, 32 nt, Human
ccuugugugucaggcccucugccugcacuccc

SEQ ID NO: 384599 - RNA, 32 nt, Human
ccuuguguuugagauugggagcugagccagaa

SEQ ID NO: 384600 - RNA, 32 nt, Human
ccuuguuacucaggaaccucaccuuggacgga

SEQ ID NO: 384601 - RNA, 32 nt, Human
ccuuguuacuggcuccuuccaucaagcagaca

SEQ ID NO: 384602 - RNA, 32 nt, Human
ccuuguuagacagaacuugggccuuugccagc

SEQ ID NO: 384603 - RNA, 32 nt, Human
ccuuguuauaucuauuucuguauuggaguaau

SEQ ID NO: 384604 - RNA, 18 nt, Human
ccuuguuaucucuugccu

SEQ ID NO: 384605 - RNA, 32 nt, Human
ccuuguucaacucuguuuacugaggccccuac

SEQ ID NO: 384606 - RNA, 32 nt, Human
ccuuguucacagcugcugcucuugccucugug

SEQ ID NO: 384607 - RNA, 32 nt, Human
ccuuguucacauacccuccuugugauuuuguc

SEQ ID NO: 384608 - RNA, 32 nt, Human
ccuuguucaccuucugucaugaguaaaagcuu

SEQ ID NO: 384609 - RNA, 32 nt, Human
ccuuguuccagggaacagcugcuucucugggg

SEQ ID NO: 384610 - RNA, 32 nt, Human
ccuuguucccucccuggcccucaggcccuccu

SEQ ID NO: 384611 - RNA, 32 nt, Human
ccuuguuccuucaucaucccccuuccuugugc

SEQ ID NO: 384612 - RNA, 32 nt, Human
ccuuguucuacccuaaacuuuguaucaccuga

SEQ ID NO: 384613 - RNA, 32 nt, Human
ccuuguucuccaagaacuuacuguccaaucau

SEQ ID NO: 384614 - RNA, 32 nt, Human
ccuuguucucccacuuccugaagaugcuaaac

SEQ ID NO: 384615 - RNA, 32 nt, Human
ccuuguucuccuccagguggagcugcugggug

SEQ ID NO: 384616 - RNA, 32 nt, Human
ccuuguucucucucccuggcacccacccccag

SEQ ID NO: 384617 - RNA, 32 nt, Human
ccuuguucuuguuccccaccucccaggaaagg

SEQ ID NO: 384618 - RNA, 32 nt, Human
ccuuguugaacagauccacacugcucuaauaa

SEQ ID NO: 384619 - RNA, 32 nt, Human
ccuuguugaggcuuuuuccuuucagaugagcu

SEQ ID NO: 384620 - RNA, 32 nt, Human
ccuuguugcccaggcuggagugcaauggcgcg

SEQ ID NO: 384621 - RNA, 32 nt, Human
ccuuguugcccaggcuggagugcaauggcgua

SEQ ID NO: 384622 - RNA, 32 nt, Human
ccuuguugcccaggcuggucuugaacugggcu

SEQ ID NO: 384623 - RNA, 32 nt, Human
ccuuguugcccaggcuguaguacaauggcaug

SEQ ID NO: 384624 - RNA, 32 nt, Human
ccuuguugccuccccgucccugucuccccuga

SEQ ID NO: 384625 - RNA, 19 nt, Human
ccuuguuggagggggccag

SEQ ID NO: 384626 - RNA, 32 nt, Human
ccuuguugugugaccuugggcaggugguucug

SEQ ID NO: 384627 - RNA, 32 nt, Human
ccuuguuguugggagcauuuccaggcaucuuu

SEQ ID NO: 384628 - RNA, 32 nt, Human
ccuuguuucuccuuucuacaugacauugcagu

SEQ ID NO: 384629 - RNA, 32 nt, Human
ccuuguuugaguauuucugucucugaaauaac

SEQ ID NO: 384630 - RNA, 32 nt, Human
ccuuguuuuauucaaagacagagaagaccaaa

SEQ ID NO: 384631 - RNA, 32 nt, Human
ccuuguuuucacccucuguccucugcccguca

SEQ ID NO: 384632 - RNA, 32 nt, Human
ccuuuaaaaauucuuuuaauagaucauguuau

SEQ ID NO: 384633 - RNA, 32 nt, Human
ccuuuaaaauccuaagccugacuaggacagcc

SEQ ID NO: 384634 - RNA, 32 nt, Human
ccuuuaaagggagggggagaagccagggugau

SEQ ID NO: 384635 - RNA, 32 nt, Human
ccuuuaaaugcacauuguguggauggcucuca

SEQ ID NO: 384636 - RNA, 32 nt, Human
ccuuuaaauggaaucccagcacuuugggaggc

SEQ ID NO: 384637 - RNA, 32 nt, Human
ccuuuaaauuuucagauuuaccuucauucugu

SEQ ID NO: 384638 - RNA, 23 nt, Human
ccuuuaacaacauguuuccagca

SEQ ID NO: 384639 - RNA, 32 nt, Human
ccuuuaaccacagugucaacauaguaucggaa

SEQ ID NO: 384640 - RNA, 32 nt, Human
ccuuuaacucaacccgcuucccagcacagcgg

SEQ ID NO: 384641 - RNA, 32 nt, Human
ccuuuaacucaugaggagggaaaagagugccu

SEQ ID NO: 384642 - RNA, 32 nt, Human
ccuuuaagaagcuuccagagcagaagugacug

SEQ ID NO: 384643 - RNA, 32 nt, Human
ccuuuaagaccaaggagauaaggguggaggag

SEQ ID NO: 384644 - RNA, 32 nt, Human
ccuuuaaucccaauuuccccugcucacucuuc

SEQ ID NO: 384645 - RNA, 32 nt, Human
ccuuuaaucccagcuacucgggaggcugaggc

SEQ ID NO: 384646 - RNA, 32 nt, Human
ccuuuaaucccagcuacucgggagguugaggc

SEQ ID NO: 384647 - RNA, 23 nt, Human
ccuuuaaucccagcuacuuggga

SEQ ID NO: 384648 - RNA, 32 nt, Human
ccuuuaaucccagcuacuugggaggcugaggu

SEQ ID NO: 384649 - RNA, 32 nt, Human
ccuuuaaucccaguuacucaggaggcugaggc

SEQ ID NO: 384650 - RNA, 32 nt, Human
ccuuuaaugaucugguggucuccucgucaauc

SEQ ID NO: 384651 - RNA, 32 nt, Human
ccuuuacaaucaggaugacaaucaccaggaau

SEQ ID NO: 384652 - RNA, 32 nt, Human
ccuuuacacaugcccaggcagcaccucaggcc

SEQ ID NO: 384653 - RNA, 32 nt, Human
ccuuuacagagcagcccuuagccuggggccau

SEQ ID NO: 384654 - RNA, 32 nt, Human
ccuuuacagcacagaugccauuagaaugugaa

SEQ ID NO: 384655 - RNA, 32 nt, Human
ccuuuacaugaauacgucuugaucagacauuc

SEQ ID NO: 384656 - RNA, 32 nt, Human
ccuuuacauuuguacacaaaugugacuauguc

SEQ ID NO: 384657 - RNA, 32 nt, Human
ccuuuaccagagaagguuugcugacccucucc

SEQ ID NO: 384658 - RNA, 32 nt, Human
ccuuuaccuggaccuuguagggucuccugccu

SEQ ID NO: 384659 - RNA, 32 nt, Human
ccuuuaccuguauuccuggacaaggccuagag

SEQ ID NO: 384660 - RNA, 24 nt, Human
ccuuuaccuuuucuauaaguugua

SEQ ID NO: 384661 - RNA, 22 nt, Human
ccuuuaccuuuuuuguuguugu

SEQ ID NO: 384662 - RNA, 32 nt, Human
ccuuuacuaaguagcugguuuuguuuguuugu

SEQ ID NO: 384663 - RNA, 32 nt, Human
ccuuuacuacaggacagaaaccacuuaguuuu

SEQ ID NO: 384664 - RNA, 32 nt, Human
ccuuuacucaaaacaaaacaauuuuuagcaca

SEQ ID NO: 384665 - RNA, 32 nt, Human
ccuuuacucacacccuucuucugaccagcucc

SEQ ID NO: 384666 - RNA, 23 nt, Human
ccuuuacuccuggcucaagcccu

SEQ ID NO: 384667 - RNA, 32 nt, Human
ccuuuacucuagauucauucagcuuuuccaga

SEQ ID NO: 384668 - RNA, 32 nt, Human
ccuuuacucucuucucccuccagaccuuccuc

SEQ ID NO: 384669 - RNA, 32 nt, Human
ccuuuacucuuuccucaacccuugucucuauc

SEQ ID NO: 384670 - RNA, 32 nt, Human
ccuuuacugacaccuugugcucaggccugugu

SEQ ID NO: 384671 - RNA, 32 nt, Human
ccuuuacuuagaagauuuagaccuaagcagca

SEQ ID NO: 384672 - RNA, 23 nt, Human
ccuuuagaaacacacagcuccau

SEQ ID NO: 384673 - RNA, 32 nt, Human
ccuuuagagaucuggauauuuuucaaagacuu

SEQ ID NO: 384674 - RNA, 32 nt, Human
ccuuuagcacaauccuggcccacucccuaccc

SEQ ID NO: 384675 - RNA, 32 nt, Human
ccuuuagccuggaggucaaggcugcagugagc

SEQ ID NO: 384676 - RNA, 19 nt, Human
ccuuuaggaugucaccuca

SEQ ID NO: 384677 - RNA, 32 nt, Human
ccuuuaggcucuacagagugaagguuuaaauc

SEQ ID NO: 384678 - RNA, 32 nt, Human
ccuuuagggcaaauaacacagcagaaccacgu

SEQ ID NO: 384679 - RNA, 32 nt, Human
ccuuuaggguucccggagcuccgggaagaccc

SEQ ID NO: 384680 - RNA, 32 nt, Human
ccuuuaguacaguguuuccacucuuucugccc

SEQ ID NO: 384681 - RNA, 32 nt, Human
ccuuuaguagcugauuucuuguccucaaccac

SEQ ID NO: 384682 - RNA, 32 nt, Human
ccuuuagucccagcuacucuggaggcugaagu

SEQ ID NO: 384683 - RNA, 32 nt, Human
ccuuuagucgcagcuacuggggaggcugaggc

SEQ ID NO: 384684 - RNA, 32 nt, Human
ccuuuagugaagcccccgagguuguguccagg

SEQ ID NO: 384685 - RNA, 32 nt, Human
ccuuuagugaccagucugccucuugggucuuc

SEQ ID NO: 384686 - RNA, 31 nt, Human
ccuuuagugccagcagggccuguguccuggg

SEQ ID NO: 384687 - RNA, 32 nt, Human
ccuuuagugugcucuuccacuuuggaaggcca

SEQ ID NO: 384688 - RNA, 32 nt, Human
ccuuuaguuaccaaacauuaaauguuuuuaaa

SEQ ID NO: 384689 - RNA, 32 nt, Human
ccuuuaguuccagcuacucaggaggcuaaggc

SEQ ID NO: 384690 - RNA, 32 nt, Human
ccuuuaguucucacuucugucuccacgucaag

SEQ ID NO: 384691 - RNA, 32 nt, Human
ccuuuaguuuuacaaguaaagcagguuguaaa

SEQ ID NO: 384692 - RNA, 21 nt, Human
ccuuuauaagaauaugacaua

SEQ ID NO: 384693 - RNA, 32 nt, Human
ccuuuauaaugaauuuguuuuuauuucucaua

SEQ ID NO: 384694 - RNA, 32 nt, Human
ccuuuauagagugucucagggugcagagguca

SEQ ID NO: 384695 - RNA, 22 nt, Human
ccuuuauagauugauuccagca

SEQ ID NO: 384696 - RNA, 32 nt, Human
ccuuuauauaaauguuaaaugccuuuauaacu

SEQ ID NO: 384697 - RNA, 32 nt, Human
ccuuuauauccagaagagucucuguguggugc

SEQ ID NO: 384698 - RNA, 32 nt, Human
ccuuuauaugugaauuaccaucuuguuucuuu

SEQ ID NO: 384699 - RNA, 32 nt, Human
ccuuuaucgaggggugcugcuuuuucucccuc

SEQ ID NO: 384700 - RNA, 32 nt, Human
ccuuuaucuccaacaauauccaccucaccaaa

SEQ ID NO: 384701 - RNA, 32 nt, Human
ccuuuaucuccuccuuccccucuggcagcgag

SEQ ID NO: 384702 - RNA, 32 nt, Human
ccuuuaucuugcaaaccccugccccugcuguc

SEQ ID NO: 384703 - RNA, 32 nt, Human
ccuuuaugaagcugcaggcugacgagagaugg

SEQ ID NO: 384704 - RNA, 32 nt, Human
ccuuuaugagcuguaacacucacccugaaggu

SEQ ID NO: 384705 - RNA, 32 nt, Human
ccuuuaugcuugcugucucucagaauuguuuu

SEQ ID NO: 384706 - RNA, 30 nt, Human
ccuuuauggacaacuacagcacaggcuacg

SEQ ID NO: 384707 - RNA, 32 nt, Human
ccuuuauggcugcugggcugagugacacaagc

SEQ ID NO: 384708 - RNA, 22 nt, Human
ccuuuauuaaugaacugugaca

SEQ ID NO: 384709 - RNA, 32 nt, Human
ccuuuauuaccuuuacucccucccucucccau

SEQ ID NO: 384710 - RNA, 32 nt, Human
ccuuuauuccacgucgcguggucuccaagacc

SEQ ID NO: 384711 - RNA, 32 nt, Human
ccuuuauuccagcugccugccaccccagaccc

SEQ ID NO: 384712 - RNA, 32 nt, Human
ccuuuauuccuucauuucaucuaccauuuucu

SEQ ID NO: 384713 - RNA, 32 nt, Human
ccuuuauucuucuuuugcugcuuucugauagu

SEQ ID NO: 384714 - RNA, 32 nt, Human
ccuuuauugcccuguccucaaacuggucauag

SEQ ID NO: 384715 - RNA, 32 nt, Human
ccuuuauuuaacuccauuuauugcuuuuggua

SEQ ID NO: 384716 - RNA, 32 nt, Human
ccuuuauuucccaauauuucugaucuacaaau

SEQ ID NO: 384717 - RNA, 23 nt, Human
ccuuuauuugaucucaaguugua

SEQ ID NO: 384718 - RNA, 32 nt, Human
ccuuuauuuguacccaccuuccagucagcaag

SEQ ID NO: 384719 - RNA, 32 nt, Human
ccuuuauuuucagauacucuucuauacuuacc

SEQ ID NO: 384720 - RNA, 32 nt, Human
ccuuucaaaaucaugaaauaucucacacugga

SEQ ID NO: 384721 - RNA, 32 nt, Human
ccuuucaaaaucaugagacaacucacacugga

SEQ ID NO: 384722 - RNA, 32 nt, Human
ccuuucaaaccuguauuccuucuuuauacuca

SEQ ID NO: 384723 - RNA, 32 nt, Human
ccuuucaaagugcugggauuacagacaugagc

SEQ ID NO: 384724 - RNA, 32 nt, Human
ccuuucaaagugcugggauuacaggcaugagc

SEQ ID NO: 384725 - RNA, 32 nt, Human
ccuuucaaccagauaacuuccuaaguggagau

SEQ ID NO: 384726 - RNA, 32 nt, Human
ccuuucaagacagaaagagacaggagacauga

SEQ ID NO: 384727 - RNA, 32 nt, Human
ccuuucaagccccaguguucaagcucagagag

SEQ ID NO: 384728 - RNA, 32 nt, Human
ccuuucaaguagcugggauuacagguaccucu

SEQ ID NO: 384729 - RNA, 32 nt, Human
ccuuucaaguggcugggaugacuacaggcaug

SEQ ID NO: 384730 - RNA, 32 nt, Human
ccuuucacaagcaacagacucucacagggcaa

SEQ ID NO: 384731 - RNA, 32 nt, Human
ccuuucacaagggcaaacuuuuuccuuuuccc

SEQ ID NO: 384732 - RNA, 32 nt, Human
ccuuucacagccggucucucugccaggaaaug

SEQ ID NO: 384733 - RNA, 22 nt, Human
ccuuucaccaguggagcugccu

SEQ ID NO: 384734 - RNA, 22 nt, Human
ccuuucacccugucccuccuca

SEQ ID NO: 384735 - RNA, 32 nt, Human
ccuuucacuccacacccucuggccuucugccu

SEQ ID NO: 384736 - RNA, 32 nt, Human
ccuuucacugaauuuucugagggcagagucuu

SEQ ID NO: 384737 - RNA, 32 nt, Human
ccuuucacuugagcuucaacaugggaaaggga

SEQ ID NO: 384738 - RNA, 32 nt, Human
ccuuucagaacacacucacauuuucuauagga

SEQ ID NO: 384739 - RNA, 32 nt, Human
ccuuucagagacggagcaccugagauguggga

SEQ ID NO: 384740 - RNA, 32 nt, Human
ccuuucagcaagacuucucuuugccucaaaua

SEQ ID NO: 384741 - RNA, 32 nt, Human
ccuuucagccacacccucccaaaaggcuuuua

SEQ ID NO: 384742 - RNA, 32 nt, Human
ccuuucagccauggcuggagcagcugggacac

SEQ ID NO: 384743 - RNA, 22 nt, Human
ccuuucagcccccaggcugccu

SEQ ID NO: 384744 - RNA, 32 nt, Human
ccuuucagccucuuuacaaccuccuggaucca

SEQ ID NO: 384745 - RNA, 32 nt, Human
ccuuucaggaagggagggagcaggucugaagg

SEQ ID NO: 384746 - RNA, 32 nt, Human
ccuuucaggaagguggagcugcauugguuuga

SEQ ID NO: 384747 - RNA, 32 nt, Human
ccuuucaggauggaggaaugugggcaguuuga

SEQ ID NO: 384748 - RNA, 32 nt, Human
ccuuucagggccugugaggaugcccaugagcu

SEQ ID NO: 384749 - RNA, 32 nt, Human
ccuuucaucagagcccaggagggaaggcagga

SEQ ID NO: 384750 - RNA, 20 nt, Human
ccuuucauccuaugcagcuu

SEQ ID NO: 384751 - RNA, 32 nt, Human
ccuuucaucuuucuccccgcuuccccagucuu

SEQ ID NO: 384752 - RNA, 19 nt, Human
ccuuucaugcuagcaggaa

SEQ ID NO: 384753 - RNA, 32 nt, Human
ccuuucaugcuguuuguugccugcuuguugca

SEQ ID NO: 384754 - RNA, 32 nt, Human
ccuuucauguauauuuccacauuuuugugcuu

SEQ ID NO: 384755 - RNA, 32 nt, Human
ccuuuccaaauuugguccuauggauguugagc

SEQ ID NO: 384756 - RNA, 32 nt, Human
ccuuuccaacagcaucucucugucgaagaaag

SEQ ID NO: 384757 - RNA, 32 nt, Human
ccuuuccacagcuguuagcagcaucugcccca

SEQ ID NO: 384758 - RNA, 32 nt, Human
ccuuuccaccacauuccccaaccaaggacagu

SEQ ID NO: 384759 - RNA, 32 nt, Human
ccuuuccaccucggcagggagggaaggagggg

SEQ ID NO: 384760 - RNA, 32 nt, Human
ccuuuccaccucucacccauugcccaccauua

SEQ ID NO: 384761 - RNA, 32 nt, Human
ccuuuccacgcccuccagccccgggggagaua

SEQ ID NO: 384762 - RNA, 32 nt, Human
ccuuuccacucuaauggauaguguacauucuu

SEQ ID NO: 384763 - RNA, 32 nt, Human
ccuuuccagacggcacagggaaaugcaucuuc

SEQ ID NO: 384764 - RNA, 32 nt, Human
ccuuuccagacuccagggcuccccgggcugcu

SEQ ID NO: 384765 - RNA, 32 nt, Human
ccuuuccagagcaaccagaaggagguuauacc

SEQ ID NO: 384766 - RNA, 32 nt, Human
ccuuuccagcagcugcagcugccguuucucuc

SEQ ID NO: 384767 - RNA, 32 nt, Human
ccuuuccaggcagggccagcauguguagaaua

SEQ ID NO: 384768 - RNA, 32 nt, Human
ccuuuccagggaguggcucuguucaucuuauu

SEQ ID NO: 384769 - RNA, 32 nt, Human
ccuuuccagugcuguggcauucuguggcagcu

SEQ ID NO: 384770 - RNA, 32 nt, Human
ccuuuccaucaaggaggcguccuucucagaca

SEQ ID NO: 384771 - RNA, 32 nt, Human
ccuuucccaauuagacuuccucuccuuccacc

SEQ ID NO: 384772 - RNA, 32 nt, Human
ccuuucccaccaccccacaggcuuuacccuuu

SEQ ID NO: 384773 - RNA, 32 nt, Human
ccuuucccacccgucgggcuccuggguucccg

SEQ ID NO: 384774 - RNA, 18 nt, Human
ccuuucccagagccccug

SEQ ID NO: 384775 - RNA, 32 nt, Human
ccuuucccaggcaaucccuccugugcugaacu

SEQ ID NO: 384776 - RNA, 32 nt, Human
ccuuucccaguaaagaagguaaagaagauaua

SEQ ID NO: 384777 - RNA, 32 nt, Human
ccuuuccccaagaagcugugggagacagauga

SEQ ID NO: 384778 - RNA, 32 nt, Human
ccuuuccccagccucagcccugagcggcauaa

SEQ ID NO: 384779 - RNA, 32 nt, Human
ccuuuccccagccucuccuccuugggcagggu

SEQ ID NO: 384780 - RNA, 32 nt, Human
ccuuucccccacccuguccaguuucccuguca

SEQ ID NO: 384781 - RNA, 21 nt, Human
ccuuucccccucucccuuucc

SEQ ID NO: 384782 - RNA, 32 nt, Human
ccuuucccccuucagaauccugucucgccucg

SEQ ID NO: 384783 - RNA, 18 nt, Human
ccuuuccccucccuuccc

SEQ ID NO: 384784 - RNA, 32 nt, Human
ccuuuccccugcccuuguccugaugccucaag

SEQ ID NO: 384785 - RNA, 32 nt, Human
ccuuuccccugccuugcugcugccgcacacuu

SEQ ID NO: 384786 - RNA, 32 nt, Human
ccuuuccccuucucccccucccccucccccac

SEQ ID NO: 384787 - RNA, 32 nt, Human
ccuuuccccuugcuucuuucugaggccauaua

SEQ ID NO: 384788 - RNA, 32 nt, Human
ccuuucccgccuggaaacuuccggacaagccu

SEQ ID NO: 384789 - RNA, 32 nt, Human
ccuuucccgcucuucuugcccacccggccggc

SEQ ID NO: 384790 - RNA, 32 nt, Human
ccuuucccucauucccucucuuggagcagcag

SEQ ID NO: 384791 - RNA, 32 nt, Human
ccuuucccuccaccuccuccaggaaccauguu

SEQ ID NO: 384792 - RNA, 21 nt, Human
ccuuucccucccucccuuccc

SEQ ID NO: 384793 - RNA, 32 nt, Human
ccuuucccucugucuucucuucauuaccuuuu

SEQ ID NO: 384794 - RNA, 32 nt, Human
ccuuucccugacugucaaggacaacugacucc

SEQ ID NO: 384795 - RNA, 32 nt, Human
ccuuucccugcagagcaugguuuguauaccac

SEQ ID NO: 384796 - RNA, 32 nt, Human
ccuuucccugcaggaguguggucuauauucuu

SEQ ID NO: 384797 - RNA, 21 nt, Human
ccuuucccugucccagcccca

SEQ ID NO: 384798 - RNA, 32 nt, Human
ccuuucccuuccccucuccagcccuuuucucc

SEQ ID NO: 384799 - RNA, 32 nt, Human
ccuuucccuuguccaagguccuucuagcucua

SEQ ID NO: 384800 - RNA, 20 nt, Human
ccuuucccuuuccccuuccc

SEQ ID NO: 384801 - RNA, 32 nt, Human
ccuuucccuuucccugggguccaaaccacaug

SEQ ID NO: 384802 - RNA, 32 nt, Human
ccuuuccgaagcuguggucccuuggggcugag

SEQ ID NO: 384803 - RNA, 32 nt, Human
ccuuuccgggucuggaugcugccgcucaggag

SEQ ID NO: 384804 - RNA, 32 nt, Human
ccuuuccuaccaauuuccucccccuccucacu

SEQ ID NO: 384805 - RNA, 23 nt, Human
ccuuuccuagccucagaucuguu

SEQ ID NO: 384806 - RNA, 25 nt, Human
ccuuuccuagcugaugauuuguuca

SEQ ID NO: 384807 - RNA, 32 nt, Human
ccuuuccuagucucauccuccccuggcugcag

SEQ ID NO: 384808 - RNA, 32 nt, Human
ccuuuccuaucuucacaccugccaccucaugu

SEQ ID NO: 384809 - RNA, 22 nt, Human
ccuuuccuauuguaaucauuca

SEQ ID NO: 384810 - RNA, 32 nt, Human
ccuuuccuauuucccuuccugcugugucaucc

SEQ ID NO: 384811 - RNA, 32 nt, Human
ccuuuccuccaauggugaaaugaucaaaagug

SEQ ID NO: 384812 - RNA, 32 nt, Human
ccuuuccuccacuucuccaguaacauauuccu

SEQ ID NO: 384813 - RNA, 32 nt, Human
ccuuuccuccagggcccagucuggcucccgag

SEQ ID NO: 384814 - RNA, 21 nt, Human
ccuuuccucuccccacugccu

SEQ ID NO: 384815 - RNA, 20 nt, Human
ccuuuccucucuccccuccc

SEQ ID NO: 384816 - RNA, 32 nt, Human
ccuuuccucucuccuguuucccuucccuucca

SEQ ID NO: 384817 - RNA, 32 nt, Human
ccuuuccucucuccuguuuuccuuccucugcu

SEQ ID NO: 384818 - RNA, 32 nt, Human
ccuuuccucucuguagagugggaagagaugga

SEQ ID NO: 384819 - RNA, 32 nt, Human
ccuuuccucugccuccuccccugccagcccua

SEQ ID NO: 384820 - RNA, 32 nt, Human
ccuuuccucuuccaucucucugucaccucccu

SEQ ID NO: 384821 - RNA, 32 nt, Human
ccuuuccugaccauuccucgugccccauucuc

SEQ ID NO: 384822 - RNA, 32 nt, Human
ccuuuccugaugucuccucccuugucuuauug

SEQ ID NO: 384823 - RNA, 32 nt, Human
ccuuuccugcccugccuuucggugcaaccaug

SEQ ID NO: 384824 - RNA, 32 nt, Human
ccuuuccugccucugugccccugccucucccu

SEQ ID NO: 384825 - RNA, 32 nt, Human
ccuuuccugcgccccagacuccaggccgccug

SEQ ID NO: 384826 - RNA, 32 nt, Human
ccuuuccuggacugcucucuccagaaacagca

SEQ ID NO: 384827 - RNA, 32 nt, Human
ccuuuccuggcagggcugguggagucuucccu

SEQ ID NO: 384828 - RNA, 32 nt, Human
ccuuuccuggcucccucuguuuucucucacug

SEQ ID NO: 384829 - RNA, 32 nt, Human
ccuuuccuggcuucauggugcucaucauacug

SEQ ID NO: 384830 - RNA, 32 nt, Human
ccuuuccuggcuucggacauuggagcacuaaa

SEQ ID NO: 384831 - RNA, 32 nt, Human
ccuuuccuguaaccugcacuuugggaugguag

SEQ ID NO: 384832 - RNA, 32 nt, Human
ccuuuccugugagucuuucucagaauugauau

SEQ ID NO: 384833 - RNA, 24 nt, Human
ccuuuccuguguguacucugucca

SEQ ID NO: 384834 - RNA, 32 nt, Human
ccuuuccuguuacccucuccccacauguacca

SEQ ID NO: 384835 - RNA, 32 nt, Human
ccuuuccuuaucuacauuagcuuagacuauac

SEQ ID NO: 384836 - RNA, 32 nt, Human
ccuuuccuucaucaucacucccugcauucuua

SEQ ID NO: 384837 - RNA, 32 nt, Human
ccuuuccuuccagauccuggguacugaaagcc

SEQ ID NO: 384838 - RNA, 32 nt, Human
ccuuuccuuuaugaaccuccauccucccagcc

SEQ ID NO: 384839 - RNA, 32 nt, Human
ccuuuccuuuccugacuuaugccuguaguuuu

SEQ ID NO: 384840 - RNA, 32 nt, Human
ccuuuccuuuccuucuucccuaccuccccuuu

SEQ ID NO: 384841 - RNA, 32 nt, Human
ccuuuccuuucuccagcuucugcucugcccca

SEQ ID NO: 384842 - RNA, 32 nt, Human
ccuuuccuuuuuccuuuccuuuccuuucuuuc

SEQ ID NO: 384843 - RNA, 25 nt, Human
ccuuucgaauuuuaugauuuuuuca

SEQ ID NO: 384844 - RNA, 22 nt, Human
ccuuucgacccacccauucuca

SEQ ID NO: 384845 - RNA, 32 nt, Human
ccuuucgacccacccauucucaccaccuguuu

SEQ ID NO: 384846 - RNA, 32 nt, Human
ccuuucgaguagcuggaaugacuacaggcaug

SEQ ID NO: 384847 - RNA, 32 nt, Human
ccuuucgaguagcugggacuacaggugugugc

SEQ ID NO: 384848 - RNA, 32 nt, Human
ccuuucgggaggcugagacaggagaaucgcuu

SEQ ID NO: 384849 - RNA, 32 nt, Human
ccuuucgguuacuaagcucugccuucuugacu

SEQ ID NO: 384850 - RNA, 32 nt, Human
ccuuucguccccgucgucuccucugccgccgu

SEQ ID NO: 384851 - RNA, 32 nt, Human
ccuuucgucuuccucuuuccucuguggaagau

SEQ ID NO: 384852 - RNA, 32 nt, Human
ccuuucguggcagucuaaccucaggccauucu

SEQ ID NO: 384853 - RNA, 32 nt, Human
ccuuucuaaacccaguuaagcauggaagagag

SEQ ID NO: 384854 - RNA, 32 nt, Human
ccuuucuaacuggauccagccuguuggagggg

SEQ ID NO: 384855 - RNA, 32 nt, Human
ccuuucuaagauacuccuccagccgggcgcgg

SEQ ID NO: 384856 - RNA, 32 nt, Human
ccuuucuaagccauugggaauagaauggcccc

SEQ ID NO: 384857 - RNA, 32 nt, Human
ccuuucuaaggguuggagcugcuccuugcagg

SEQ ID NO: 384858 - RNA, 32 nt, Human
ccuuucuaccugugaucaacacaugccuaucu

SEQ ID NO: 384859 - RNA, 32 nt, Human
ccuuucuacuuaucuauuuugugaauucuaaa

SEQ ID NO: 384860 - RNA, 32 nt, Human
ccuuucuacuucucaaucugauuucuaugagg

SEQ ID NO: 384861 - RNA, 32 nt, Human
ccuuucuagccgcugucccaaggguuggucuc

SEQ ID NO: 384862 - RNA, 22 nt, Human
ccuuucuaggacaggagccgcu

SEQ ID NO: 384863 - RNA, 32 nt, Human
ccuuucuauauacugcugaucuugcaugucua

SEQ ID NO: 384864 - RNA, 31 nt, Human
ccuuucucaauaaauucaucugcgguggaga

SEQ ID NO: 384865 - RNA, 32 nt, Human
ccuuucucauaagaaagggacacuccuacagg

SEQ ID NO: 384866 - RNA, 32 nt, Human
ccuuucucauccucuuugccaugugaggagcc

SEQ ID NO: 384867 - RNA, 32 nt, Human
ccuuucucauuucucccacaccuccuccccau

SEQ ID NO: 384868 - RNA, 32 nt, Human
ccuuucuccacugcacuggagcuuugaagacc

SEQ ID NO: 384869 - RNA, 18 nt, Human
ccuuucuccagcuucugc

SEQ ID NO: 384870 - RNA, 32 nt, Human
ccuuucuccaggugggagugcaguggcaugau

SEQ ID NO: 384871 - RNA, 32 nt, Human
ccuuucuccaguuugugcuggaagaggagcug

SEQ ID NO: 384872 - RNA, 18 nt, Human
ccuuucuccaucauccuu

SEQ ID NO: 384873 - RNA, 32 nt, Human
ccuuucuccaucuucaagagugacaccucuuc

SEQ ID NO: 384874 - RNA, 32 nt, Human
ccuuucuccccacuucuucuggcuccucauuu

SEQ ID NO: 384875 - RNA, 32 nt, Human
ccuuucuccccaugccugccuucugcucccuc

SEQ ID NO: 384876 - RNA, 32 nt, Human
ccuuucuccgugugaccuaaagccacucaaug

SEQ ID NO: 384877 - RNA, 32 nt, Human
ccuuucuccuaccaggagaguacuguggcuua

SEQ ID NO: 384878 - RNA, 32 nt, Human
ccuuucuccuagagaucugugccuccuggcga

SEQ ID NO: 384879 - RNA, 32 nt, Human
ccuuucuccuucuccccuccuucuuuuucaga

SEQ ID NO: 384880 - RNA, 32 nt, Human
ccuuucucguuccccggccaucuuagcggcug

SEQ ID NO: 384881 - RNA, 32 nt, Human
ccuuucucuacccccucgcuguugugugugug

SEQ ID NO: 384882 - RNA, 25 nt, Human
ccuuucucucaccccuggagccccg

SEQ ID NO: 384883 - RNA, 32 nt, Human
ccuuucucuccucagcagaacaugucucuccu

SEQ ID NO: 384884 - RNA, 32 nt, Human
ccuuucucuccucagucccugcuccucauguu

SEQ ID NO: 384885 - RNA, 32 nt, Human
ccuuucucuccucccaugcugaguuucaugau

SEQ ID NO: 384886 - RNA, 32 nt, Human
ccuuucucuccucucuccuuuucuagccuguu

SEQ ID NO: 384887 - RNA, 32 nt, Human
ccuuucucucuucccuuccccucucucauugc

SEQ ID NO: 384888 - RNA, 32 nt, Human
ccuuucucugcaggcaucuguuuguuuguguc

SEQ ID NO: 384889 - RNA, 32 nt, Human
ccuuucucugccaucgugguguguucuugacu

SEQ ID NO: 384890 - RNA, 32 nt, Human
ccuuucucugccugcccugcccuuggggccac

SEQ ID NO: 384891 - RNA, 24 nt, Human
ccuuucucugccuucugagcaccg

SEQ ID NO: 384892 - RNA, 32 nt, Human
ccuuucucugucuccaacacucuuuccccaug

SEQ ID NO: 384893 - RNA, 32 nt, Human
ccuuucucugucuuucucuucauuccaucccc

SEQ ID NO: 384894 - RNA, 19 nt, Human
ccuuucucuguggcaguga

SEQ ID NO: 384895 - RNA, 32 nt, Human
ccuuucucuguucuucagcagaaggcagggug

SEQ ID NO: 384896 - RNA, 32 nt, Human
ccuuucucuuccugcugaccacaagcucugug

SEQ ID NO: 384897 - RNA, 32 nt, Human
ccuuucucuuuuucucuuucucucucccuuuc

SEQ ID NO: 384898 - RNA, 32 nt, Human
ccuuucugaacaaacgcagcaaagcaagccac

SEQ ID NO: 384899 - RNA, 32 nt, Human
ccuuucugaccagcaggccuggagggcagggg

SEQ ID NO: 384900 - RNA, 32 nt, Human
ccuuucugagcuccagccccagccccucgaac

SEQ ID NO: 384901 - RNA, 32 nt, Human
ccuuucugcacuccgugggcccugggugcgcu

SEQ ID NO: 384902 - RNA, 32 nt, Human
ccuuucugcacugcaacugugugauugaaaaa

SEQ ID NO: 384903 - RNA, 32 nt, Human
ccuuucugcccaguggaugugagcuucugaag

SEQ ID NO: 384904 - RNA, 32 nt, Human
ccuuucugcgcccgcgggcaccaugagcagcc

SEQ ID NO: 384905 - RNA, 32 nt, Human
ccuuucugcugauuugcuggaagcacuacaag

SEQ ID NO: 384906 - RNA, 32 nt, Human
ccuuucugcugcccucuucaugcaggccuacu

SEQ ID NO: 384907 - RNA, 32 nt, Human
ccuuucugcuucugaaguaugaaaaucuaguc

SEQ ID NO: 384908 - RNA, 32 nt, Human
ccuuucuggaccagauccuacucuuccuuucu

SEQ ID NO: 384909 - RNA, 32 nt, Human
ccuuucugggagggcggggugggggugacuga

SEQ ID NO: 384910 - RNA, 32 nt, Human
ccuuucugggcuggccaaggccagagcaggcu

SEQ ID NO: 384911 - RNA, 32 nt, Human
ccuuucuggggagugaggaaugugggagagag

SEQ ID NO: 384912 - RNA, 32 nt, Human
ccuuucugguccugcugcucccuaugggaugu

SEQ ID NO: 384913 - RNA, 25 nt, Human
ccuuucugucacccagguuagagua

SEQ ID NO: 384914 - RNA, 32 nt, Human
ccuuucuguccugguucccugaagcaucgaga

SEQ ID NO: 384915 - RNA, 31 nt, Human
ccuuucugucucucugggcuguggcugggca

SEQ ID NO: 384916 - RNA, 32 nt, Human
ccuuucugucucugcugagcuguggcugcggu

SEQ ID NO: 384917 - RNA, 32 nt, Human
ccuuucugugagauuuuuccaacaagcaugug

SEQ ID NO: 384918 - RNA, 32 nt, Human
ccuuucugugccuugcccuuugcccacucccc

SEQ ID NO: 384919 - RNA, 32 nt, Human
ccuuucuguguccuacuccuugcaggugacau

SEQ ID NO: 384920 - RNA, 32 nt, Human
ccuuucuguucaaggcuguuugucuacccaga

SEQ ID NO: 384921 - RNA, 32 nt, Human
ccuuucuguuuuccucaccuugcugcuccccu

SEQ ID NO: 384922 - RNA, 32 nt, Human
ccuuucuuaccucucuggccccgucggcauuu

SEQ ID NO: 384923 - RNA, 32 nt, Human
ccuuucuucccauagcuuccagccuggugggg

SEQ ID NO: 384924 - RNA, 32 nt, Human
ccuuucuuccccacccuggaggcucucucugc

SEQ ID NO: 384925 - RNA, 32 nt, Human
ccuuucuucucccacaucugcccacugaagau

SEQ ID NO: 384926 - RNA, 32 nt, Human
ccuuucuucuucucugccucuccugccucucg

SEQ ID NO: 384927 - RNA, 32 nt, Human
ccuuucuucuucuucuucuuccucuuccauag

SEQ ID NO: 384928 - RNA, 32 nt, Human
ccuuucuucuuuccuuauucaucccagaguaa

SEQ ID NO: 384929 - RNA, 32 nt, Human
ccuuucuucuuugucuuauuucugccuucauc

SEQ ID NO: 384930 - RNA, 22 nt, Human
ccuuucuugacucugagugcug

SEQ ID NO: 384931 - RNA, 32 nt, Human
ccuuucuuguaauaaaugauaaaauuccgagu

SEQ ID NO: 384932 - RNA, 32 nt, Human
ccuuucuuguaccucagcacuccuggggguca

SEQ ID NO: 384933 - RNA, 32 nt, Human
ccuuucuugugaccaucuccccaugaaagugc

SEQ ID NO: 384934 - RNA, 32 nt, Human
ccuuucuuucccuaacgaagugagugaugaga

SEQ ID NO: 384935 - RNA, 32 nt, Human
ccuuucuuucccucccugcagcucugagggag

SEQ ID NO: 384936 - RNA, 32 nt, Human
ccuuucuuucucugucucuuccuuccuuuuag

SEQ ID NO: 384937 - RNA, 32 nt, Human
ccuuucuuucugcuuuuuauuuauuuugccuu

SEQ ID NO: 384938 - RNA, 32 nt, Human
ccuuucuuucuugagccaacauuuuguacuuc

SEQ ID NO: 384939 - RNA, 32 nt, Human
ccuuucuuucuuucucucucugauugagaggc

SEQ ID NO: 384940 - RNA, 32 nt, Human
ccuuucuuugcaacuucccagcaacaauaaug

SEQ ID NO: 384941 - RNA, 32 nt, Human
ccuuucuuugccauaaaacugccaucacacag

SEQ ID NO: 384942 - RNA, 32 nt, Human
ccuuugaacacaucuucuugcugaacauuaug

SEQ ID NO: 384943 - RNA, 32 nt, Human
ccuuugaacccccuuccugcccuguguuagga

SEQ ID NO: 384944 - RNA, 32 nt, Human
ccuuugaagagagguucugauucuacuuccac

SEQ ID NO: 384945 - RNA, 32 nt, Human
ccuuugaagaucucaguagcugagggagaugg

SEQ ID NO: 384946 - RNA, 32 nt, Human
ccuuugaauguagcaacugugguaaggccuuc

SEQ ID NO: 384947 - RNA, 18 nt, Human
ccuuugacaauuuacuua

SEQ ID NO: 384948 - RNA, 18 nt, Human
ccuuugacaccucugcau

SEQ ID NO: 384949 - RNA, 18 nt, Human
ccuuugacaccugugcau

SEQ ID NO: 384950 - RNA, 32 nt, Human
ccuuugacacuacccuccaaucuugcaacacu

SEQ ID NO: 384951 - RNA, 32 nt, Human
ccuuugacagcugaauguuccuaaagaacugc

SEQ ID NO: 384952 - RNA, 32 nt, Human
ccuuugacauuaugucaguccugagagucugg

SEQ ID NO: 384953 - RNA, 21 nt, Human
ccuuugaccaacaugguacua

SEQ ID NO: 384954 - RNA, 21 nt, Human
ccuuugaccagaacugcaaca

SEQ ID NO: 384955 - RNA, 32 nt, Human
ccuuugaccccaccuuguggaaacccagcugu

SEQ ID NO: 384956 - RNA, 32 nt, Human
ccuuugaccccuggugugaucuugggcccggg

SEQ ID NO: 384957 - RNA, 32 nt, Human
ccuuugacccugcuuauuugucucacugguua

SEQ ID NO: 384958 - RNA, 32 nt, Human
ccuuugaccgagguccugcagguggacaagau

SEQ ID NO: 384959 - RNA, 32 nt, Human
ccuuugaccucaccaggccucaugcuucccuu

SEQ ID NO: 384960 - RNA, 32 nt, Human
ccuuugacugguuuucuucuucauccugagaa

SEQ ID NO: 384961 - RNA, 27 nt, Human
ccuuugacuuccccuuccugggaucug

SEQ ID NO: 384962 - RNA, 32 nt, Human
ccuuugacuucuacagaaaucugggccugaga

SEQ ID NO: 384963 - RNA, 32 nt, Human
ccuuugagaaaagcuugggacgauuucugggg

SEQ ID NO: 384964 - RNA, 32 nt, Human
ccuuugagagugaagguggguggaguugacca

SEQ ID NO: 384965 - RNA, 32 nt, Human
ccuuugagauugcauuaaagagaagggauaaa

SEQ ID NO: 384966 - RNA, 32 nt, Human
ccuuugaggaagggagaggaggugaaugaacu

SEQ ID NO: 384967 - RNA, 32 nt, Human
ccuuugaggagagauggggacagggcaguggg

SEQ ID NO: 384968 - RNA, 32 nt, Human
ccuuugaggccugguaaccauuccaggugaug

SEQ ID NO: 384969 - RNA, 32 nt, Human
ccuuugagggcaagacauuuuaagcugggcaa

SEQ ID NO: 384970 - RNA, 32 nt, Human
ccuuugagucaggaaaccagggccaguucuuu

SEQ ID NO: 384971 - RNA, 32 nt, Human
ccuuugagugacuccagcacaggcuaccuagc

SEQ ID NO: 384972 - RNA, 21 nt, Human
ccuuugaguggauuccccaua

SEQ ID NO: 384973 - RNA, 23 nt, Human
ccuuugaguuugcuauuuucuca

SEQ ID NO: 384974 - RNA, 32 nt, Human
ccuuugaucauuuugcaucugugcauagcguu

SEQ ID NO: 384975 - RNA, 32 nt, Human
ccuuugaucucucuucugaauugcagaaauca

SEQ ID NO: 384976 - RNA, 32 nt, Human
ccuuugauggaaaaugcagaggcccuuccucu

SEQ ID NO: 384977 - RNA, 32 nt, Human
ccuuugauuugccucccuaaccuuuucuaggg

SEQ ID NO: 384978 - RNA, 32 nt, Human
ccuuugcaaaccugccuguuggcauauugaag

SEQ ID NO: 384979 - RNA, 32 nt, Human
ccuuugcacugaggacacagaucccggggagc

SEQ ID NO: 384980 - RNA, 32 nt, Human
ccuuugcacugcaacaucaugccucugaagaa

SEQ ID NO: 384981 - RNA, 32 nt, Human
ccuuugcacugcuucugugaacagucuuuguc

SEQ ID NO: 384982 - RNA, 32 nt, Human
ccuuugcacuggcuguuuccucugccuggaac

SEQ ID NO: 384983 - RNA, 32 nt, Human
ccuuugcagagagcaaagaaacguggaaucca

SEQ ID NO: 384984 - RNA, 32 nt, Human
ccuuugcagcagccccgcuaucuugagauuag

SEQ ID NO: 384985 - RNA, 32 nt, Human
ccuuugcagccgcuggccuacccggcccgcgg

SEQ ID NO: 384986 - RNA, 32 nt, Human
ccuuugcagggaggggaggauaagugggaucu

SEQ ID NO: 384987 - RNA, 32 nt, Human
ccuuugcagguagaaugucaagauuugauuau

SEQ ID NO: 384988 - RNA, 32 nt, Human
ccuuugcagugcccuccacccuuccugguguc

SEQ ID NO: 384989 - RNA, 32 nt, Human
ccuuugcaguuugccagccauauucccaugug

SEQ ID NO: 384990 - RNA, 32 nt, Human
ccuuugcauauacucucucaguauuaacuccc

SEQ ID NO: 384991 - RNA, 32 nt, Human
ccuuugcaucccugcacuccuggacgugugcg

SEQ ID NO: 384992 - RNA, 32 nt, Human
ccuuugcauggguuuugggaaagauuaaguca

SEQ ID NO: 384993 - RNA, 32 nt, Human
ccuuugcauguuccaucucuucucuuucuccc

SEQ ID NO: 384994 - RNA, 32 nt, Human
ccuuugcauuucugcaaccucuguucuuucug

SEQ ID NO: 384995 - RNA, 32 nt, Human
ccuuugcauuuuggagaguuuccugaaacaac

SEQ ID NO: 384996 - RNA, 21 nt, Human
ccuuugccacauccccucaca

SEQ ID NO: 384997 - RNA, 32 nt, Human
ccuuugccagacagcucugucuccccaugucc

SEQ ID NO: 384998 - RNA, 32 nt, Human
ccuuugcccagcccugggccuccaaucugcau

SEQ ID NO: 384999 - RNA, 32 nt, Human
ccuuugcccauucugucaggcuggacgggagg

SEQ ID NO: 385000 - RNA, 32 nt, Human
ccuuugccccuccacacugccucgcgccuuuc

SEQ ID NO: 385001 - RNA, 32 nt, Human
ccuuugcccuagagcuagagucaugauagcug

SEQ ID NO: 385002 - RNA, 32 nt, Human
ccuuugcccucagcccuuucuccugggaucuc

SEQ ID NO: 385003 - RNA, 32 nt, Human
ccuuugcccugaugucuccccauugccccuca

SEQ ID NO: 385004 - RNA, 18 nt, Human
ccuuugcccugugaccug

SEQ ID NO: 385005 - RNA, 32 nt, Human
ccuuugccgcccucgucaggcccagcucuccu

SEQ ID NO: 385006 - RNA, 32 nt, Human
ccuuugccuaggaaaaaggaauccaagugugu

SEQ ID NO: 385007 - RNA, 32 nt, Human
ccuuugccucaaagccaucccccaccagacug

SEQ ID NO: 385008 - RNA, 32 nt, Human
ccuuugccuccaccauucccacccacccuccc

SEQ ID NO: 385009 - RNA, 32 nt, Human
ccuuugccucugaaugacccagccuggagucu

SEQ ID NO: 385010 - RNA, 32 nt, Human
ccuuugccugggaacugguccuuguuugccgg

SEQ ID NO: 385011 - RNA, 32 nt, Human
ccuuugccuuacaugaucccauggcccugaau

SEQ ID NO: 385012 - RNA, 32 nt, Human
ccuuugccuuccuucagcaccaaggagaaugg

SEQ ID NO: 385013 - RNA, 32 nt, Human
ccuuugccuucgcagccgccuccagggcaauu

SEQ ID NO: 385014 - RNA, 32 nt, Human
ccuuugccuuucuucugcccuuuccuaggccc

SEQ ID NO: 385015 - RNA, 32 nt, Human
ccuuugcgcugggcugagcccagagccgagag

SEQ ID NO: 385016 - RNA, 18 nt, Human
ccuuugcuacauucccuu

SEQ ID NO: 385017 - RNA, 19 nt, Human
ccuuugcuacccguucccc

SEQ ID NO: 385018 - RNA, 32 nt, Human
ccuuugcuauugagccaacaucaggaauaauu

SEQ ID NO: 385019 - RNA, 18 nt, Human
ccuuugcucaaugcugga

SEQ ID NO: 385020 - RNA, 32 nt, Human
ccuuugcucaguugccccaggaaggcuucccu

SEQ ID NO: 385021 - RNA, 32 nt, Human
ccuuugcucccccuuauccuccuuccucuucc

SEQ ID NO: 385022 - RNA, 32 nt, Human
ccuuugcucugggcuuccugagcaccagcagu

SEQ ID NO: 385023 - RNA, 32 nt, Human
ccuuugcucuuuucagggaaaauaacaaccac

SEQ ID NO: 385024 - RNA, 32 nt, Human
ccuuugcugacgcccagagcucuggcugcagg

SEQ ID NO: 385025 - RNA, 32 nt, Human
ccuuugcugcugcugccagccauucugacucc

SEQ ID NO: 385026 - RNA, 32 nt, Human
ccuuugcugggccucuggauggcccugcccug

SEQ ID NO: 385027 - RNA, 32 nt, Human
ccuuugcuggggacaaugcccucaagucaugu

SEQ ID NO: 385028 - RNA, 32 nt, Human
ccuuugcugucugaggggccucagcucugacc

SEQ ID NO: 385029 - RNA, 32 nt, Human
ccuuugcugugacacuucuucaucucaccccc

SEQ ID NO: 385030 - RNA, 32 nt, Human
ccuuugcuuccagaguucaagcuauucuccug

SEQ ID NO: 385031 - RNA, 32 nt, Human
ccuuugcuuccagguggcaggauuacuacuuu

SEQ ID NO: 385032 - RNA, 32 nt, Human
ccuuugcuuggacuccaagucuccucucuggg

SEQ ID NO: 385033 - RNA, 32 nt, Human
ccuuugcuuggcacuucuuccugcugccaugu

SEQ ID NO: 385034 - RNA, 32 nt, Human
ccuuugcuuucccuuucugcucccucucuuuc

SEQ ID NO: 385035 - RNA, 32 nt, Human
ccuuugcuuucucuacccuccugggcugggcu

SEQ ID NO: 385036 - RNA, 32 nt, Human
ccuuugcuuugcuagugcugcuuuguguguau

SEQ ID NO: 385037 - RNA, 32 nt, Human
ccuuuggaaaaauaugugacaagugaauguaa

SEQ ID NO: 385038 - RNA, 32 nt, Human
ccuuuggaaaacuugugaacaugugaauacac

SEQ ID NO: 385039 - RNA, 32 nt, Human
ccuuuggaaggugagagcagggcccugagaaa

SEQ ID NO: 385040 - RNA, 22 nt, Human
ccuuuggacacuggagcucaga

SEQ ID NO: 385041 - RNA, 22 nt, Human
ccuuuggacauacaugcuacag

SEQ ID NO: 385042 - RNA, 32 nt, Human
ccuuuggacauacaugcuacagucccacaaug

SEQ ID NO: 385043 - RNA, 32 nt, Human
ccuuuggagaggggagugcagggcaccaccug

SEQ ID NO: 385044 - RNA, 22 nt, Human
ccuuuggagccggcagcccagg

SEQ ID NO: 385045 - RNA, 32 nt, Human
ccuuuggagcucgcuuuaccucuggcuacuuc

SEQ ID NO: 385046 - RNA, 32 nt, Human
ccuuuggaggaggaggaggaggaggagagggg

SEQ ID NO: 385047 - RNA, 32 nt, Human
ccuuuggagguggagaugguggaggugguggu

SEQ ID NO: 385048 - RNA, 32 nt, Human
ccuuuggauucaacauugugucuggaaaggca

SEQ ID NO: 385049 - RNA, 32 nt, Human
ccuuuggauuccuuaucuuuggcuccaccuua

SEQ ID NO: 385050 - RNA, 24 nt, Human
ccuuuggcaaaaaauauuuccaca

SEQ ID NO: 385051 - RNA, 32 nt, Human
ccuuuggcaaaacucgaauguuugguuagcaa

SEQ ID NO: 385052 - RNA, 32 nt, Human
ccuuuggcaaagcccccauccacaccuggcac

SEQ ID NO: 385053 - RNA, 23 nt, Human
ccuuuggcagagggaccccagca

SEQ ID NO: 385054 - RNA, 32 nt, Human
ccuuuggcauuuucccaggcccucgguaaaag

SEQ ID NO: 385055 - RNA, 32 nt, Human
ccuuuggccacauccaccucgaggggacccug

SEQ ID NO: 385056 - RNA, 22 nt, Human
ccuuuggccaugauucucaaca

SEQ ID NO: 385057 - RNA, 32 nt, Human
ccuuuggccucaucgcugaccugggccgucag

SEQ ID NO: 385058 - RNA, 32 nt, Human
ccuuuggccuccagcuugucccucucucacuu

SEQ ID NO: 385059 - RNA, 27 nt, Human
ccuuuggccucggaggcucgggaccua

SEQ ID NO: 385060 - RNA, 32 nt, Human
ccuuuggccugggagguccaggcugcaaugag

SEQ ID NO: 385061 - RNA, 32 nt, Human
ccuuuggccuuccucucuacauuuaagaguag

SEQ ID NO: 385062 - RNA, 32 nt, Human
ccuuuggccuugugguuccucaggagagguug

SEQ ID NO: 385063 - RNA, 32 nt, Human
ccuuuggcgauguucuggacauggcugaagau

SEQ ID NO: 385064 - RNA, 32 nt, Human
ccuuuggcuuagugacuuugaggucccaagau

SEQ ID NO: 385065 - RNA, 22 nt, Human
ccuuuggcuucacacucgccug

SEQ ID NO: 385066 - RNA, 32 nt, Human
ccuuugggaagaaaugucuucuguaaaaagaa

SEQ ID NO: 385067 - RNA, 32 nt, Human
ccuuugggaagaauuccucuccagaccuggca

SEQ ID NO: 385068 - RNA, 19 nt, Human
ccuuugggaccuccuugua

SEQ ID NO: 385069 - RNA, 21 nt, Human
ccuuugggaggcagcaucagg

SEQ ID NO: 385070 - RNA, 32 nt, Human
ccuuugggaugugggcagggagggaagcaggc

SEQ ID NO: 385071 - RNA, 30 nt, Human
ccuuugggccucucccugcuccucucggcc

SEQ ID NO: 385072 - RNA, 32 nt, Human
ccuuugggccuggggcugugcuuggcuugaaa

SEQ ID NO: 385073 - RNA, 26 nt, Human
ccuuugggcgccucacccgggaucua

SEQ ID NO: 385074 - RNA, 32 nt, Human
ccuuugggcucagugaagagucuggaguuuau

SEQ ID NO: 385075 - RNA, 32 nt, Human
ccuuugggcugcagaaacuccgcugagcagaa

SEQ ID NO: 385076 - RNA, 32 nt, Human
ccuuuggggagggagagacagacgggcgguuu

SEQ ID NO: 385077 - RNA, 25 nt, Human
ccuuuggggggccacccggggccug

SEQ ID NO: 385078 - RNA, 32 nt, Human
ccuuugggguucgaaguggcccuggagccagc

SEQ ID NO: 385079 - RNA, 32 nt, Human
ccuuuggguucugcauguguuccuggcagcug

SEQ ID NO: 385080 - RNA, 32 nt, Human
ccuuugguaccaagcccacccuugggguuccu

SEQ ID NO: 385081 - RNA, 32 nt, Human
ccuuuggucaaucauaacaugcuguuuaaagc

SEQ ID NO: 385082 - RNA, 32 nt, Human
ccuuugguguggaggugcuggcauucagucug

SEQ ID NO: 385083 - RNA, 32 nt, Human
ccuuugguuaaaggagcugccgucagguggga

SEQ ID NO: 385084 - RNA, 32 nt, Human
ccuuugguuauauggccaguucuuucuuaauu

SEQ ID NO: 385085 - RNA, 32 nt, Human
ccuuugguugagaguuguggauccaagucuca

SEQ ID NO: 385086 - RNA, 32 nt, Human
ccuuuguaacacccuccuucaaagguugggag

SEQ ID NO: 385087 - RNA, 32 nt, Human
ccuuuguaauaccuuuaaaaauccagaguauu

SEQ ID NO: 385088 - RNA, 32 nt, Human
ccuuuguacuuuuccaagcucaggucuuuauu

SEQ ID NO: 385089 - RNA, 32 nt, Human
ccuuuguaguccuucagccacugugggcccug

SEQ ID NO: 385090 - RNA, 32 nt, Human
ccuuuguaugacagacccauguauuuuuggca

SEQ ID NO: 385091 - RNA, 32 nt, Human
ccuuugucacccaggccggagugcaguggcau

SEQ ID NO: 385092 - RNA, 32 nt, Human
ccuuugucacuagucuuugaggagguuugcuc

SEQ ID NO: 385093 - RNA, 32 nt, Human
ccuuugucagccaggcuggagugcaaugugca

SEQ ID NO: 385094 - RNA, 32 nt, Human
ccuuugucauucuagcugccugcugccuccgc

SEQ ID NO: 385095 - RNA, 32 nt, Human
ccuuuguccaucucagcccccagaguauaucu

SEQ ID NO: 385096 - RNA, 23 nt, Human
ccuuuguccccaccgcagacagg

SEQ ID NO: 385097 - RNA, 32 nt, Human
ccuuuguccuggcuccguagcagaacacugua

SEQ ID NO: 385098 - RNA, 24 nt, Human
ccuuuguccuucccuuggggcuug

SEQ ID NO: 385099 - RNA, 23 nt, Human
ccuuugucgcccaggcuggagug

SEQ ID NO: 385100 - RNA, 32 nt, Human
ccuuugucgcccaggcuggagugcaauggcgu

SEQ ID NO: 385101 - RNA, 32 nt, Human
ccuuugucucacucccuguagccccgucacgu

SEQ ID NO: 385102 - RNA, 32 nt, Human
ccuuugucucagagaagcaggagauguugaug

SEQ ID NO: 385103 - RNA, 32 nt, Human
ccuuugucuccucuuccccaucuaugucccuu

SEQ ID NO: 385104 - RNA, 32 nt, Human
ccuuugucuggaugcacucuucugaccuugcu

SEQ ID NO: 385105 - RNA, 32 nt, Human
ccuuugugaagguuuuuaucuguguagaaugg

SEQ ID NO: 385106 - RNA, 32 nt, Human
ccuuugugcagggacaguuggcuuccagaggu

SEQ ID NO: 385107 - RNA, 32 nt, Human
ccuuugugccuuaaaugcauguugaggacuuu

SEQ ID NO: 385108 - RNA, 32 nt, Human
ccuuugugcgguuccuggaggacaacgucugc

SEQ ID NO: 385109 - RNA, 32 nt, Human
ccuuugugcuuugcacaaaccugaauccccca

SEQ ID NO: 385110 - RNA, 32 nt, Human
ccuuuguggaaacuguuucagcaaagguucuu

SEQ ID NO: 385111 - RNA, 18 nt, Human
ccuuuguggcucacggcc

SEQ ID NO: 385112 - RNA, 32 nt, Human
ccuuuguggucuucugugauuauuuaugcugc

SEQ ID NO: 385113 - RNA, 32 nt, Human
ccuuuguguccaguagugggguccaccggagg

SEQ ID NO: 385114 - RNA, 32 nt, Human
ccuuuguguguccugcucacauugucuccagg

SEQ ID NO: 385115 - RNA, 32 nt, Human
ccuuuguguuucccccagugcuggcagccuag

SEQ ID NO: 385116 - RNA, 32 nt, Human
ccuuuguuaucuagcugaaaacaaaugacaac

SEQ ID NO: 385117 - RNA, 32 nt, Human
ccuuuguucagaaauggccacuguagaaagcc

SEQ ID NO: 385118 - RNA, 32 nt, Human
ccuuuguuccagccugguuuccugggcugggc

SEQ ID NO: 385119 - RNA, 32 nt, Human
ccuuuguuccuuuguuccuuccuuccuucuuu

SEQ ID NO: 385120 - RNA, 32 nt, Human
ccuuuguucugaggccuuuagccucugaauga

SEQ ID NO: 385121 - RNA, 32 nt, Human
ccuuuguucugcauucagcagcuauuuaucga

SEQ ID NO: 385122 - RNA, 32 nt, Human
ccuuuguucuuuuccugccacagggucuuugc

SEQ ID NO: 385123 - RNA, 32 nt, Human
ccuuuguugcuggcccgccucucuggaccuug

SEQ ID NO: 385124 - RNA, 24 nt, Human
ccuuuguugugaaggcgccggggc

SEQ ID NO: 385125 - RNA, 32 nt, Human
ccuuuguuuacaagaugacuaauucuagaauc

SEQ ID NO: 385126 - RNA, 32 nt, Human
ccuuuguuucauaaaguaaaugcauaguuggu

SEQ ID NO: 385127 - RNA, 32 nt, Human
ccuuuguuucauuucaccucagcacguaccau

SEQ ID NO: 385128 - RNA, 32 nt, Human
ccuuuguuuccaccauccauccaaccuggcuc

SEQ ID NO: 385129 - RNA, 32 nt, Human
ccuuuguuugagagucagccagccugcucagg

SEQ ID NO: 385130 - RNA, 32 nt, Human
ccuuuuaacuaccuuucuuugcuccaagugaa

SEQ ID NO: 385131 - RNA, 32 nt, Human
ccuuuuaaggagaaaaucuaaaaugaaaagug

SEQ ID NO: 385132 - RNA, 32 nt, Human
ccuuuuaccaucuuugcuauacuauaagcaaa

SEQ ID NO: 385133 - RNA, 23 nt, Human
ccuuuuaccuuuucagucuggca

SEQ ID NO: 385134 - RNA, 32 nt, Human
ccuuuuacucagccacagccuccggagccguu

SEQ ID NO: 385135 - RNA, 32 nt, Human
ccuuuuacucagccugcacagagccaucucuu

SEQ ID NO: 385136 - RNA, 23 nt, Human
ccuuuuacucccaacgucuggca

SEQ ID NO: 385137 - RNA, 21 nt, Human
ccuuuuacuccuuuucuucca

SEQ ID NO: 385138 - RNA, 32 nt, Human
ccuuuuacuuccugaauucaauucaguuugau

SEQ ID NO: 385139 - RNA, 32 nt, Human
ccuuuuagauuucauaaagugcaguguauaua

SEQ ID NO: 385140 - RNA, 32 nt, Human
ccuuuuagcaaagaugcaggccaguuuguuua

SEQ ID NO: 385141 - RNA, 32 nt, Human
ccuuuuaggggagaaaggagggcagauuugua

SEQ ID NO: 385142 - RNA, 32 nt, Human
ccuuuuaguauuaguuuucuguauaugauaua

SEQ ID NO: 385143 - RNA, 32 nt, Human
ccuuuuaguggagaagagaggaagucagaggg

SEQ ID NO: 385144 - RNA, 32 nt, Human
ccuuuuauaccuugguacggugcagugauauc

SEQ ID NO: 385145 - RNA, 32 nt, Human
ccuuuuaugccgagaagaucucagcuggaugc

SEQ ID NO: 385146 - RNA, 32 nt, Human
ccuuuuauggaccaaauuuuucugguacugua

SEQ ID NO: 385147 - RNA, 32 nt, Human
ccuuuuauuaacucaccucucaguugaaagau

SEQ ID NO: 385148 - RNA, 32 nt, Human
ccuuuuauugaauauguucuuauagggcaaaa

SEQ ID NO: 385149 - RNA, 32 nt, Human
ccuuuuauuuguccuuaaacuaccuccuuaga

SEQ ID NO: 385150 - RNA, 32 nt, Human
ccuuuuauuuugcucuacccaguaacugcgcu

SEQ ID NO: 385151 - RNA, 32 nt, Human
ccuuuucaaaacugugcagcuuccugaaccuu

SEQ ID NO: 385152 - RNA, 32 nt, Human
ccuuuucaauauucuaaucuuugcuuugcuga

SEQ ID NO: 385153 - RNA, 32 nt, Human
ccuuuucacagcccucuucuggaacagucacc

SEQ ID NO: 385154 - RNA, 32 nt, Human
ccuuuucagcagaaggcacagaacaguagcgg

SEQ ID NO: 385155 - RNA, 32 nt, Human
ccuuuucagcagacgcuucccuucccuucccc

SEQ ID NO: 385156 - RNA, 32 nt, Human
ccuuuucaggauuugagacuguucucaaaggg

SEQ ID NO: 385157 - RNA, 32 nt, Human
ccuuuucaggcaaggacaagccagcuucagag

SEQ ID NO: 385158 - RNA, 32 nt, Human
ccuuuucaggggagagaccaggagaccaccau

SEQ ID NO: 385159 - RNA, 32 nt, Human
ccuuuucagggugaagcucuuccuucaagagu

SEQ ID NO: 385160 - RNA, 32 nt, Human
ccuuuucaucuauuuaauuauugcccauguca

SEQ ID NO: 385161 - RNA, 32 nt, Human
ccuuuucaugucuauacaggaugcuucuagug

SEQ ID NO: 385162 - RNA, 32 nt, Human
ccuuuucauuuaauggggauuccacuaucuca

SEQ ID NO: 385163 - RNA, 32 nt, Human
ccuuuuccaaggaagugaagguuaagaggucc

SEQ ID NO: 385164 - RNA, 32 nt, Human
ccuuuuccagcauauuccccugggccuuuagu

SEQ ID NO: 385165 - RNA, 32 nt, Human
ccuuuuccaggaguucugaagcugacagcacu

SEQ ID NO: 385166 - RNA, 20 nt, Human
ccuuuuccagugacuggcuc

SEQ ID NO: 385167 - RNA, 32 nt, Human
ccuuuuccaugacuccaggcugugccucucuc

SEQ ID NO: 385168 - RNA, 32 nt, Human
ccuuuucccaggagaagacaccucugggagcc

SEQ ID NO: 385169 - RNA, 32 nt, Human
ccuuuuccccacccucaccuucgcccaucacu

SEQ ID NO: 385170 - RNA, 32 nt, Human
ccuuuuccccuaauaccgcccccucagugcuc

SEQ ID NO: 385171 - RNA, 32 nt, Human
ccuuuucccugccucgcuccagguuuuaguga

SEQ ID NO: 385172 - RNA, 32 nt, Human
ccuuuucccugucaugcucaucagcuuauggc

SEQ ID NO: 385173 - RNA, 32 nt, Human
ccuuuucccuguucauggcaggccauggcccg

SEQ ID NO: 385174 - RNA, 32 nt, Human
ccuuuucccuuuaccaugucccaguaagaagg

SEQ ID NO: 385175 - RNA, 32 nt, Human
ccuuuucccuuucaaccucuccuccgcuguca

SEQ ID NO: 385176 - RNA, 32 nt, Human
ccuuuucccuuucccuuuccccuuccccuucc

SEQ ID NO: 385177 - RNA, 32 nt, Human
ccuuuucccuuuccuuuccuuuccucuugacc

SEQ ID NO: 385178 - RNA, 32 nt, Human
ccuuuuccucaagggagcaacguuagcuuucc

SEQ ID NO: 385179 - RNA, 32 nt, Human
ccuuuuccucaccugcucaaccauuauucaca

SEQ ID NO: 385180 - RNA, 32 nt, Human
ccuuuuccuccccacuccuucccaccagcgcc

SEQ ID NO: 385181 - RNA, 22 nt, Human
ccuuuuccucuugcucacugcc

SEQ ID NO: 385182 - RNA, 32 nt, Human
ccuuuuccugacccaucucccccuuccuacca

SEQ ID NO: 385183 - RNA, 32 nt, Human
ccuuuuccugcgcaacagagcugggccucccu

SEQ ID NO: 385184 - RNA, 22 nt, Human
ccuuuuccugggcugccucuga

SEQ ID NO: 385185 - RNA, 32 nt, Human
ccuuuuccugggcuucagcuccccuacuucuu

SEQ ID NO: 385186 - RNA, 32 nt, Human
ccuuuuccuggugugcuuauuaucccuuuugc

SEQ ID NO: 385187 - RNA, 32 nt, Human
ccuuuuccuuccagccucucuuuuccaggaac

SEQ ID NO: 385188 - RNA, 32 nt, Human
ccuuuuccuucuaauuuguuuuuaacuucauu

SEQ ID NO: 385189 - RNA, 21 nt, Human
ccuuuucgcccaggcugagua

SEQ ID NO: 385190 - RNA, 32 nt, Human
ccuuuucgcccaggcugaguacaguggugcaa

SEQ ID NO: 385191 - RNA, 32 nt, Human
ccuuuucggucugucuucauccugccuggcuc

SEQ ID NO: 385192 - RNA, 32 nt, Human
ccuuuucuaagugcuucacaugauauuaacuc

SEQ ID NO: 385193 - RNA, 32 nt, Human
ccuuuucuacaaauaucagagccauggcucag

SEQ ID NO: 385194 - RNA, 18 nt, Human
ccuuuucucaacuugugc

SEQ ID NO: 385195 - RNA, 32 nt, Human
ccuuuucucacuguagcugcuggcagcccugu

SEQ ID NO: 385196 - RNA, 32 nt, Human
ccuuuucucacuucugucagucuguaagcuuu

SEQ ID NO: 385197 - RNA, 32 nt, Human
ccuuuucucagcuucugaggcugcgaugccuc

SEQ ID NO: 385198 - RNA, 32 nt, Human
ccuuuucuccaaucccccuuccccagguuccu

SEQ ID NO: 385199 - RNA, 32 nt, Human
ccuuuucuccaccucucucaacacacuccuca

SEQ ID NO: 385200 - RNA, 32 nt, Human
ccuuuucuccacugucauaaucucuuuccauc

SEQ ID NO: 385201 - RNA, 22 nt, Human
ccuuuucucccaucacaacuac

SEQ ID NO: 385202 - RNA, 32 nt, Human
ccuuuucucccaucacaacuacgaagaccuug

SEQ ID NO: 385203 - RNA, 18 nt, Human
ccuuuucuccccacgaug

SEQ ID NO: 385204 - RNA, 32 nt, Human
ccuuuucucccuucccauuucuccccacuuuc

SEQ ID NO: 385205 - RNA, 32 nt, Human
ccuuuucuccuccaaauauuucuccucucacc

SEQ ID NO: 385206 - RNA, 32 nt, Human
ccuuuucucugcaaccuagcccgcaucuguca

SEQ ID NO: 385207 - RNA, 32 nt, Human
ccuuuucucugccugcaugucccugugcagag

SEQ ID NO: 385208 - RNA, 32 nt, Human
ccuuuucugaaccucuuagacucuuagaaaua

SEQ ID NO: 385209 - RNA, 32 nt, Human
ccuuuucugcagucacucagggacccagacuu

SEQ ID NO: 385210 - RNA, 32 nt, Human
ccuuuucugccagacuacauuuuguggggagc

SEQ ID NO: 385211 - RNA, 32 nt, Human
ccuuuucugguucaguucccuuguccugaucu

SEQ ID NO: 385212 - RNA, 32 nt, Human
ccuuuucuuaacaaaaucugugcaaaagaugc

SEQ ID NO: 385213 - RNA, 32 nt, Human
ccuuuucuuccuaucucuguggcuuucagcuc

SEQ ID NO: 385214 - RNA, 32 nt, Human
ccuuuucuuccuccuccugaccuuauuuugcu

SEQ ID NO: 385215 - RNA, 32 nt, Human
ccuuuucuuccucuucuugauagaugaggcca

SEQ ID NO: 385216 - RNA, 32 nt, Human
ccuuuucuuuaaaagacacaauaggacucgca

SEQ ID NO: 385217 - RNA, 32 nt, Human
ccuuuucuuuucuccccuugggucuuauuaua

SEQ ID NO: 385218 - RNA, 32 nt, Human
ccuuuucuuuuucuuuccuuccuuccuuuucu

SEQ ID NO: 385219 - RNA, 32 nt, Human
ccuuuugaaauguuugccugucugaacuguga

SEQ ID NO: 385220 - RNA, 21 nt, Human
ccuuuugaauuaucuuuuuca

SEQ ID NO: 385221 - RNA, 32 nt, Human
ccuuuugacauggcccaucauucuuuaaacac

SEQ ID NO: 385222 - RNA, 32 nt, Human
ccuuuugagacagggccucacucuguucccca

SEQ ID NO: 385223 - RNA, 32 nt, Human
ccuuuugaugaccccaggcuugaguuuuuaaa

SEQ ID NO: 385224 - RNA, 32 nt, Human
ccuuuugauugagccuccaccucugggauuuu

SEQ ID NO: 385225 - RNA, 32 nt, Human
ccuuuugcaaagcucuaagcaacucgauuguu

SEQ ID NO: 385226 - RNA, 32 nt, Human
ccuuuugcacaucggucucugccacacgcagu

SEQ ID NO: 385227 - RNA, 32 nt, Human
ccuuuugcagaagggaaauggaggacaugugu

SEQ ID NO: 385228 - RNA, 32 nt, Human
ccuuuugcaggauguggaggcguccucaggag

SEQ ID NO: 385229 - RNA, 32 nt, Human
ccuuuugcccccucccccuccuucuguccccu

SEQ ID NO: 385230 - RNA, 32 nt, Human
ccuuuugccuggcaguucugcauugcaucuca

SEQ ID NO: 385231 - RNA, 32 nt, Human
ccuuuugccuguaguaguaaauugcuuuuaaa

SEQ ID NO: 385232 - RNA, 32 nt, Human
ccuuuugccuuggcuuagaggcugcagcacuu

SEQ ID NO: 385233 - RNA, 32 nt, Human
ccuuuugcugccucuaaaaggccugucccugc

SEQ ID NO: 385234 - RNA, 20 nt, Human
ccuuuugcuucccugcccuu

SEQ ID NO: 385235 - RNA, 32 nt, Human
ccuuuuggaacacugccuuccuuacugugccu

SEQ ID NO: 385236 - RNA, 32 nt, Human
ccuuuuggaggcaccaugggaacagaaggaaa

SEQ ID NO: 385237 - RNA, 24 nt, Human
ccuuuuggaggguuagaagaucag

SEQ ID NO: 385238 - RNA, 32 nt, Human
ccuuuuggccgagguccgcuguauccauggcu

SEQ ID NO: 385239 - RNA, 32 nt, Human
ccuuuuggcucaacgaaccucacuuuguaggc

SEQ ID NO: 385240 - RNA, 32 nt, Human
ccuuuuggcuggguuacagaagaguuucuaag

SEQ ID NO: 385241 - RNA, 32 nt, Human
ccuuuugggaagcaggacagaaaccucuuucu

SEQ ID NO: 385242 - RNA, 32 nt, Human
ccuuuugggauuauauguuuggaugcagguga

SEQ ID NO: 385243 - RNA, 32 nt, Human
ccuuuuggguucugugcugucaaugguauguc

SEQ ID NO: 385244 - RNA, 32 nt, Human
ccuuuugguggccucuccaggugcaaaacuuc

SEQ ID NO: 385245 - RNA, 24 nt, Human
ccuuuugguuguguaucuuuuuca

SEQ ID NO: 385246 - RNA, 32 nt, Human
ccuuuugucacccaggcuggagugccauggca

SEQ ID NO: 385247 - RNA, 32 nt, Human
ccuuuugucaucuguaccagaucaguaguugg

SEQ ID NO: 385248 - RNA, 23 nt, Human
ccuuuuguccccaccucucuggu

SEQ ID NO: 385249 - RNA, 31 nt, Human
ccuuuugucuauuucugacacagaugcauuu

SEQ ID NO: 385250 - RNA, 32 nt, Human
ccuuuugucugccucuuagacuucugcuuucc

SEQ ID NO: 385251 - RNA, 32 nt, Human
ccuuuugucuggcugauucuguccucaaauaa

SEQ ID NO: 385252 - RNA, 32 nt, Human
ccuuuugugagccuguguuuguuagauaccca

SEQ ID NO: 385253 - RNA, 32 nt, Human
ccuuuuguguuccugcucacuucaagcuucuu

SEQ ID NO: 385254 - RNA, 32 nt, Human
ccuuuuguucucuccauuggaagccuccuugu

SEQ ID NO: 385255 - RNA, 32 nt, Human
ccuuuuuaaaaagcaccuauuugggaucauuu

SEQ ID NO: 385256 - RNA, 32 nt, Human
ccuuuuuaaaaauuacgugugcacagagaggu

SEQ ID NO: 385257 - RNA, 32 nt, Human
ccuuuuuaaauacuuguucuuaauucacuggu

SEQ ID NO: 385258 - RNA, 19 nt, Human
ccuuuuuaacagcaugugg

SEQ ID NO: 385259 - RNA, 31 nt, Human
ccuuuuuaauggauuugucuguugaacuuca

SEQ ID NO: 385260 - RNA, 18 nt, Human
ccuuuuuaccaucuacuu

SEQ ID NO: 385261 - RNA, 32 nt, Human
ccuuuuuacucuuaaaacaaugcugcaguuaa

SEQ ID NO: 385262 - RNA, 32 nt, Human
ccuuuuuagucccuuuccaaagcugcccccac

SEQ ID NO: 385263 - RNA, 32 nt, Human
ccuuuuuaucuaggagaugaaaagaggauaau

SEQ ID NO: 385264 - RNA, 32 nt, Human
ccuuuuuaugucaauuaccaucuuguuucuuu

SEQ ID NO: 385265 - RNA, 32 nt, Human
ccuuuuucaaaaugagagaaguaugagacauc

SEQ ID NO: 385266 - RNA, 32 nt, Human
ccuuuuucaaagaaauguaauugauuuugaag

SEQ ID NO: 385267 - RNA, 32 nt, Human
ccuuuuucacacagcuaggucuuuucagaagu

SEQ ID NO: 385268 - RNA, 32 nt, Human
ccuuuuucagaaugugagguaguugggaguca

SEQ ID NO: 385269 - RNA, 32 nt, Human
ccuuuuucauuuccuuaaguuuugaucuccgu

SEQ ID NO: 385270 - RNA, 32 nt, Human
ccuuuuucauuucugauuguauuuauuugggu

SEQ ID NO: 385271 - RNA, 18 nt, Human
ccuuuuuccaauuucuua

SEQ ID NO: 385272 - RNA, 32 nt, Human
ccuuuuuccacuuugcacuaccuggugccauu

SEQ ID NO: 385273 - RNA, 32 nt, Human
ccuuuuuccauggcaaugagguggggcccagc

SEQ ID NO: 385274 - RNA, 32 nt, Human
ccuuuuucccugccucccuuuuucaucaauug

SEQ ID NO: 385275 - RNA, 32 nt, Human
ccuuuuucccuucccuccuuuguuuacuuaua

SEQ ID NO: 385276 - RNA, 32 nt, Human
ccuuuuucccuucuaaguucugcuaaaucaca

SEQ ID NO: 385277 - RNA, 32 nt, Human
ccuuuuuccuacuuguuaugguuguuuggacc

SEQ ID NO: 385278 - RNA, 23 nt, Human
ccuuuuuccuggucccagcagca

SEQ ID NO: 385279 - RNA, 32 nt, Human
ccuuuuuccuucuccccaauuacuccccugaa

SEQ ID NO: 385280 - RNA, 32 nt, Human
ccuuuuuccuuuccuuuccuuucuuucuuccu

SEQ ID NO: 385281 - RNA, 32 nt, Human
ccuuuuucuccccucuccgucuucuccccucc

SEQ ID NO: 385282 - RNA, 32 nt, Human
ccuuuuucucucuuacugcuucauguaauuuu

SEQ ID NO: 385283 - RNA, 32 nt, Human
ccuuuuucucuucacaucucccccauagcacc

SEQ ID NO: 385284 - RNA, 21 nt, Human
ccuuuuucuggcuggggccug

SEQ ID NO: 385285 - RNA, 32 nt, Human
ccuuuuucuucaaauugcucccccuccccagg

SEQ ID NO: 385286 - RNA, 32 nt, Human
ccuuuuucuucuuccucccccaaaaaccuuuu

SEQ ID NO: 385287 - RNA, 32 nt, Human
ccuuuuugacuuuauagaucacugcagcauua

SEQ ID NO: 385288 - RNA, 32 nt, Human
ccuuuuugaugacaccacaaaauuguugaaca

SEQ ID NO: 385289 - RNA, 32 nt, Human
ccuuuuugcaugguugucuaggguuucuggac

SEQ ID NO: 385290 - RNA, 32 nt, Human
ccuuuuugccaguaaaccaaaaagcagauccu

SEQ ID NO: 385291 - RNA, 32 nt, Human
ccuuuuugccucuuugccauuuccuuggaaag

SEQ ID NO: 385292 - RNA, 32 nt, Human
ccuuuuuggacuagccagaauucuacccugga

SEQ ID NO: 385293 - RNA, 32 nt, Human
ccuuuuuggcaaaggcaucaagcauucaaaga

SEQ ID NO: 385294 - RNA, 32 nt, Human
ccuuuuugguaccaaaccugaggucuuuugga

SEQ ID NO: 385295 - RNA, 32 nt, Human
ccuuuuugguucuuucagcuaccauaaauaac

SEQ ID NO: 385296 - RNA, 32 nt, Human
ccuuuuugucagugggaggcugggcugggaga

SEQ ID NO: 385297 - RNA, 32 nt, Human
ccuuuuugugagauggggucucgcacuguccc

SEQ ID NO: 385298 - RNA, 32 nt, Human
ccuuuuuguguuuagagaauuaugggaaaccu

SEQ ID NO: 385299 - RNA, 22 nt, Human
ccuuuuuuccuucuuccuuccc

SEQ ID NO: 385300 - RNA, 32 nt, Human
cgaaaaacaaaccgcuggucgcgcagcucgcc

SEQ ID NO: 385301 - RNA, 32 nt, Human
cgaaaaacacagaaagauuagccaggcauagu

SEQ ID NO: 385302 - RNA, 32 nt, Human
cgaaaaacugauugacugggcuggcguuaacu

SEQ ID NO: 385303 - RNA, 32 nt, Human
cgaaaaagcccucagcagggccaucugugugc

SEQ ID NO: 385304 - RNA, 32 nt, Human
cgaaaaauaaauagcugggauuacaggugccu

SEQ ID NO: 385305 - RNA, 32 nt, Human
cgaaaaauacaaaaauuagcugggcauagugg

SEQ ID NO: 385306 - RNA, 32 nt, Human
cgaaaacagucaaccaaccccaucgccaacua

SEQ ID NO: 385307 - RNA, 32 nt, Human
cgaaaacauggauaagaucccaggaagacaag

SEQ ID NO: 385308 - RNA, 32 nt, Human
cgaaaacccacauuccaagacuugguauaagg

SEQ ID NO: 385309 - RNA, 32 nt, Human
cgaaaaccuccaagauauuuuucacaaaauag

SEQ ID NO: 385310 - RNA, 32 nt, Human
cgaaaacgcaagcaggaaaaacaaguggaaac

SEQ ID NO: 385311 - RNA, 32 nt, Human
cgaaaacuccugcugcaguagacggugguuug

SEQ ID NO: 385312 - RNA, 32 nt, Human
cgaaaagaccuccggccugaaugaucuccaug

SEQ ID NO: 385313 - RNA, 32 nt, Human
cgaaaagagaagagaaucgcaugaguagcaag

SEQ ID NO: 385314 - RNA, 32 nt, Human
cgaaaagguaaauaagguauaaauagauuuaa

SEQ ID NO: 385315 - RNA, 32 nt, Human
cgaaaaguucccucaugccaacugcagugauc

SEQ ID NO: 385316 - RNA, 32 nt, Human
cgaaaaugcaccacugcacuccagcaugggca

SEQ ID NO: 385317 - RNA, 32 nt, Human
cgaaaauggcaaacuacuacuacuacuguuca

SEQ ID NO: 385318 - RNA, 32 nt, Human
cgaaaauuagccuggugugguggugcacgcuu

SEQ ID NO: 385319 - RNA, 32 nt, Human
cgaaacaccuuaaagacuucugucauuuuaaa

SEQ ID NO: 385320 - RNA, 32 nt, Human
cgaaacagaggaggaggagggaggggagugcg

SEQ ID NO: 385321 - RNA, 32 nt, Human
cgaaacaggaggaaacucagugaccucugccu

SEQ ID NO: 385322 - RNA, 32 nt, Human
cgaaacaggaggauccuuugagccuaggaguu

SEQ ID NO: 385323 - RNA, 32 nt, Human
cgaaacaggcgaaucacuugagcccaggaguu

SEQ ID NO: 385324 - RNA, 32 nt, Human
cgaaaccaacagcaguccaagcucagucagca

SEQ ID NO: 385325 - RNA, 32 nt, Human
cgaaaccaauguggguguuagaaaaauuacca

SEQ ID NO: 385326 - RNA, 32 nt, Human
cgaaaccacaccacuuaguuucucccaggggu

SEQ ID NO: 385327 - RNA, 32 nt, Human
cgaaaccacagcuuccuuggcucuuuuugccc

SEQ ID NO: 385328 - RNA, 32 nt, Human
cgaaaccacgcgcaccuggccuuagagagcgg

SEQ ID NO: 385329 - RNA, 32 nt, Human
cgaaaccagaagguggagguggcagugagccg

SEQ ID NO: 385330 - RNA, 32 nt, Human
cgaaacccucauccaguuuucucuccaucucu

SEQ ID NO: 385331 - RNA, 32 nt, Human
cgaaaccucacaggaaaaaugguaaguucuaa

SEQ ID NO: 385332 - RNA, 30 nt, Human
cgaaaccucuuugguuguccuuuccuuccu

SEQ ID NO: 385333 - RNA, 32 nt, Human
cgaaaccugcacccucucuucuggucacgccu

SEQ ID NO: 385334 - RNA, 32 nt, Human
cgaaaccugucucucugccucucuuucuccug

SEQ ID NO: 385335 - RNA, 32 nt, Human
cgaaacuaugccacagucuggauguguuuacu

SEQ ID NO: 385336 - RNA, 32 nt, Human
cgaaacuauuuuuauagagaaaaagggucuuu

SEQ ID NO: 385337 - RNA, 32 nt, Human
cgaaacucagcccauuggagaccauggauaag

SEQ ID NO: 385338 - RNA, 32 nt, Human
cgaaacuccaucuucaaaacaaaacaaaacaa

SEQ ID NO: 385339 - RNA, 32 nt, Human
cgaaacuccgucucaaaaacaaagaaggauau

SEQ ID NO: 385340 - RNA, 32 nt, Human
cgaaacuccgucucaaaaacaacaaaaacaaa

SEQ ID NO: 385341 - RNA, 32 nt, Human
cgaaacugacuugcucaccuggaacaccugau

SEQ ID NO: 385342 - RNA, 32 nt, Human
cgaaagaagagagguaaauccuauucuuuucc

SEQ ID NO: 385343 - RNA, 32 nt, Human
cgaaagagaggguggucacagauggguccauc

SEQ ID NO: 385344 - RNA, 32 nt, Human
cgaaagaggacgaggaggaggacuagcucagg

SEQ ID NO: 385345 - RNA, 32 nt, Human
cgaaagcaccuugaggccuuucuuacccagag

SEQ ID NO: 385346 - RNA, 32 nt, Human
cgaaagcagaggaggaggaagggccggccaga

SEQ ID NO: 385347 - RNA, 32 nt, Human
cgaaagcaggauguggcaguugcagugagaaa

SEQ ID NO: 385348 - RNA, 32 nt, Human
cgaaagcaucuucuccuuccguucacggauuu

SEQ ID NO: 385349 - RNA, 32 nt, Human
cgaaagcccaggagugaaggggguuccuggag

SEQ ID NO: 385350 - RNA, 32 nt, Human
cgaaagcccucuggauugaggcagcaggaucu

SEQ ID NO: 385351 - RNA, 32 nt, Human
cgaaagccgugcucuccagccuggcugccagg

SEQ ID NO: 385352 - RNA, 32 nt, Human
cgaaagccuaguaguuaguugcacuggguugu

SEQ ID NO: 385353 - RNA, 32 nt, Human
cgaaagcucuuugcuuuagccaaaggagagug

SEQ ID NO: 385354 - RNA, 32 nt, Human
cgaaaggagagagggagggaaggguggguaag

SEQ ID NO: 385355 - RNA, 32 nt, Human
cgaaaggcaggcaggcaggcaugugucagagc

SEQ ID NO: 385356 - RNA, 32 nt, Human
cgaaaggcaggcgggcuguguacugggcccug

SEQ ID NO: 385357 - RNA, 28 nt, Human
cgaaaggcauuuucccaggagagcucug

SEQ ID NO: 385358 - RNA, 32 nt, Human
cgaaagggagagcagagauggcagcugaaacu

SEQ ID NO: 385359 - RNA, 32 nt, Human
cgaaaggggaaacugaggaugaccuggcgggg

SEQ ID NO: 385360 - RNA, 32 nt, Human
cgaaaggucuggucgcagagacaggaacgugu

SEQ ID NO: 385361 - RNA, 32 nt, Human
cgaaaguggccucaugaaggggaagccgaggg

SEQ ID NO: 385362 - RNA, 32 nt, Human
cgaaagugucuggagaagcuggacacugacau

SEQ ID NO: 385363 - RNA, 32 nt, Human
cgaaaguugccucugugucugagaaaguaucu

SEQ ID NO: 385364 - RNA, 32 nt, Human
cgaaauaagugguacuauuuccauuuagccuu

SEQ ID NO: 385365 - RNA, 32 nt, Human
cgaaauaggagaauagaacauauuuaacuauu

SEQ ID NO: 385366 - RNA, 32 nt, Human
cgaaauauucagcagucuugccagcuuaccag

SEQ ID NO: 385367 - RNA, 32 nt, Human
cgaaaucaauguuauucucccucccaccacuu

SEQ ID NO: 385368 - RNA, 32 nt, Human
cgaaaucacaccacuguacuccagccugguga

SEQ ID NO: 385369 - RNA, 32 nt, Human
cgaaaucacaccauugcacuccagcuugggca

SEQ ID NO: 385370 - RNA, 32 nt, Human
cgaaaucacgccacuacacuccagccugggca

SEQ ID NO: 385371 - RNA, 32 nt, Human
cgaaaucagugcgcuccagcugaucucguucc

SEQ ID NO: 385372 - RNA, 32 nt, Human
cgaaaucgcaccacugcacuccagccugggcg

SEQ ID NO: 385373 - RNA, 32 nt, Human
cgaaaucgcaccgcugcacuccagccuggcaa

SEQ ID NO: 385374 - RNA, 32 nt, Human
cgaaaucgcgccacugcacuccagccugggug

SEQ ID NO: 385375 - RNA, 32 nt, Human
cgaaaugccaucacuccuacugcggcugcuau

SEQ ID NO: 385376 - RNA, 23 nt, Human
cgaaaugcugggauuacaggcau

SEQ ID NO: 385377 - RNA, 32 nt, Human
cgaaauggcgacacugcacugcaggcugggcu

SEQ ID NO: 385378 - RNA, 32 nt, Human
cgaaauguaaguuuuauucuuccuauuuacug

SEQ ID NO: 385379 - RNA, 32 nt, Human
cgaaauuaugccacugcacuccagccugggca

SEQ ID NO: 385380 - RNA, 32 nt, Human
cgaaauucccaaugaugcuaauuuuaagucug

SEQ ID NO: 385381 - RNA, 32 nt, Human
cgaaauucccuccucugcuuucaaaagucaaa

SEQ ID NO: 385382 - RNA, 32 nt, Human
cgaaauugcaccauugcacuccagccugggca

SEQ ID NO: 385383 - RNA, 32 nt, Human
cgaaauugugcaaaugaaagaaaugucauggu

SEQ ID NO: 385384 - RNA, 32 nt, Human
cgaaauugugccacuaguacuccagccugggu

SEQ ID NO: 385385 - RNA, 32 nt, Human
cgaacaaagaggaggagccgaggcgcgagagc

SEQ ID NO: 385386 - RNA, 25 nt, Human
cgaacaaagcagccacgaggugcaa

SEQ ID NO: 385387 - RNA, 32 nt, Human
cgaacacaaauggacacacauaccuggccacg

SEQ ID NO: 385388 - RNA, 32 nt, Human
cgaacacaauugcuccagccacaggcgaggcc

SEQ ID NO: 385389 - RNA, 32 nt, Human
cgaacacagaagugggaaggagaggggugggc

SEQ ID NO: 385390 - RNA, 20 nt, Human
cgaacacccaaugaguuuaa

SEQ ID NO: 385391 - RNA, 32 nt, Human
cgaacacccgccccucugcuccaggcuagcuu

SEQ ID NO: 385392 - RNA, 28 nt, Human
cgaacacugccucggccuccugguauag

SEQ ID NO: 385393 - RNA, 32 nt, Human
cgaacagacguucuuucuccuccaugcaguua

SEQ ID NO: 385394 - RNA, 28 nt, Human
cgaacagcaguucgcagaacuccagcga

SEQ ID NO: 385395 - RNA, 32 nt, Human
cgaacagccauugcacuccagccugggcaaca

SEQ ID NO: 385396 - RNA, 32 nt, Human
cgaacaggaagaggacggaaaagauaaccguc

SEQ ID NO: 385397 - RNA, 32 nt, Human
cgaacaggcuugcaauuaagaucaauaaggcu

SEQ ID NO: 385398 - RNA, 32 nt, Human
cgaacagggugaggcucagugcuggaucuuag

SEQ ID NO: 385399 - RNA, 32 nt, Human
cgaacaguauucaccuaguuacccugacacaa

SEQ ID NO: 385400 - RNA, 32 nt, Human
cgaacagugaccacuaaccuucccucuggcug

SEQ ID NO: 385401 - RNA, 32 nt, Human
cgaacaucagcuuacagaugaugaggacuuaa

SEQ ID NO: 385402 - RNA, 32 nt, Human
cgaacaugggaggcguagcuugcagugagcug

SEQ ID NO: 385403 - RNA, 32 nt, Human
cgaacauucacagaugccaaaguaggcacucg

SEQ ID NO: 385404 - RNA, 32 nt, Human
cgaaccaccuguaaucuaggcaccuuugccaa

SEQ ID NO: 385405 - RNA, 32 nt, Human
cgaaccagauggugccagggaguacgugacac

SEQ ID NO: 385406 - RNA, 32 nt, Human
cgaaccagggaaacccagguucccugggcccu

SEQ ID NO: 385407 - RNA, 32 nt, Human
cgaaccaggugcagggucccagcuggagaccc

SEQ ID NO: 385408 - RNA, 32 nt, Human
cgaaccagugggggaaagauggaucuugaagc

SEQ ID NO: 385409 - RNA, 32 nt, Human
cgaaccauggugaacuccaccuccguggaaua

SEQ ID NO: 385410 - RNA, 32 nt, Human
cgaaccauuguacuccagccugggugacagag

SEQ ID NO: 385411 - RNA, 32 nt, Human
cgaaccauuucucugguucccugcagacagga

SEQ ID NO: 385412 - RNA, 32 nt, Human
cgaacccaagaaguggagguugcagugagcca

SEQ ID NO: 385413 - RNA, 32 nt, Human
cgaacccacaucccuacaaagcaggaaaguau

SEQ ID NO: 385414 - RNA, 32 nt, Human
cgaacccaggaggcagagguugcagugagcca

SEQ ID NO: 385415 - RNA, 31 nt, Human
cgaacccaggaggcggaggcagaggcugcag

SEQ ID NO: 385416 - RNA, 32 nt, Human
cgaacccaggagguggagguugcagugagccg

SEQ ID NO: 385417 - RNA, 23 nt, Human
cgaacccaggccacuagucucuu

SEQ ID NO: 385418 - RNA, 32 nt, Human
cgaaccccagcacguggccaguaucaucagcu

SEQ ID NO: 385419 - RNA, 32 nt, Human
cgaaccccugaaccuccagccaggggcgcccc

SEQ ID NO: 385420 - RNA, 31 nt, Human
cgaacccgggaggaggaggaggagguugcag

SEQ ID NO: 385421 - RNA, 32 nt, Human
cgaacccgggaggcagagguugcagugagccg

SEQ ID NO: 385422 - RNA, 32 nt, Human
cgaacccgggaggcggagcuugcagugagccc

SEQ ID NO: 385423 - RNA, 32 nt, Human
cgaacccuuuugugguuuugaacaccaacaua

SEQ ID NO: 385424 - RNA, 32 nt, Human
cgaaccgagucuggaccauuuagaagacgccg

SEQ ID NO: 385425 - RNA, 32 nt, Human
cgaaccgccaagcagaaaccggaccucacagc

SEQ ID NO: 385426 - RNA, 32 nt, Human
cgaaccgcuaccuggaccccuagccucacggg

SEQ ID NO: 385427 - RNA, 32 nt, Human
cgaaccuaggaggcagaguuugcagugagcug

SEQ ID NO: 385428 - RNA, 32 nt, Human
cgaaccucaggugauccacccaccucagccuc

SEQ ID NO: 385429 - RNA, 32 nt, Human
cgaaccugagggagcauuugcugagggaauag

SEQ ID NO: 385430 - RNA, 32 nt, Human
cgaaccugggaggcagagguugcaguaagcug

SEQ ID NO: 385431 - RNA, 32 nt, Human
cgaaccugggagguggagguugcgagaucaca

SEQ ID NO: 385432 - RNA, 32 nt, Human
cgaaccuuggagguggagguuguggugagcca

SEQ ID NO: 385433 - RNA, 32 nt, Human
cgaaccuuugggcucuccagguccgagauccu

SEQ ID NO: 385434 - RNA, 31 nt, Human
cgaacgaaggaccagccucagaggcuagaag

SEQ ID NO: 385435 - RNA, 32 nt, Human
cgaacgcaggcagaucacuugaggucaggaau

SEQ ID NO: 385436 - RNA, 18 nt, Human
cgaacgcggcggcggcgg

SEQ ID NO: 385437 - RNA, 32 nt, Human
cgaacggcaguuucccuuccccaguggacguc

SEQ ID NO: 385438 - RNA, 32 nt, Human
cgaacggccagggagaggagguggccuagcgc

SEQ ID NO: 385439 - RNA, 32 nt, Human
cgaacggcucagaaaccccggaaugguugagg

SEQ ID NO: 385440 - RNA, 22 nt, Human
cgaacgggcagacccccucgag

SEQ ID NO: 385441 - RNA, 32 nt, Human
cgaacuaaacccaggcaacaggcgaggcagga

SEQ ID NO: 385442 - RNA, 31 nt, Human
cgaacuaggaaagagccuaggagggagccuc

SEQ ID NO: 385443 - RNA, 32 nt, Human
cgaacucagccaccugcuaccucugccuucug

SEQ ID NO: 385444 - RNA, 32 nt, Human
cgaacucagggcacuccacauggggcaaacug

SEQ ID NO: 385445 - RNA, 31 nt, Human
cgaacucaggggguggagguugcagugaguu

SEQ ID NO: 385446 - RNA, 32 nt, Human
cgaacucaggggguggagguugcagugaguug

SEQ ID NO: 385447 - RNA, 22 nt, Human
cgaacuccugaccucaagugau

SEQ ID NO: 385448 - RNA, 24 nt, Human
cgaacuccugaccucaugauccac

SEQ ID NO: 385449 - RNA, 24 nt, Human
cgaacuccugaccucgugauccac

SEQ ID NO: 385450 - RNA, 24 nt, Human
cgaacuccugaccuugugauccac

SEQ ID NO: 385451 - RNA, 32 nt, Human
cgaacuccugcauuccaaccagccugggugac

SEQ ID NO: 385452 - RNA, 32 nt, Human
cgaacucuguaaucccagcacuuugggaggcc

SEQ ID NO: 385453 - RNA, 32 nt, Human
cgaacucuucuuugcugcauuccuuuuucuuc

SEQ ID NO: 385454 - RNA, 32 nt, Human
cgaacugcucaaaggcuuggagcgggucuagu

SEQ ID NO: 385455 - RNA, 32 nt, Human
cgaacuggaugcauuaggaagcugcugucuga

SEQ ID NO: 385456 - RNA, 32 nt, Human
cgaacuggcugcaaaggguaucaggugcugcc

SEQ ID NO: 385457 - RNA, 32 nt, Human
cgaacuggugaccuguaggccauguuagcacu

SEQ ID NO: 385458 - RNA, 19 nt, Human
cgaacugugauggcggcgg

SEQ ID NO: 385459 - RNA, 32 nt, Human
cgaacugugcagcuccugcggcaccauuugua

SEQ ID NO: 385460 - RNA, 32 nt, Human
cgaacuguguuuugaagauuugagggaagggc

SEQ ID NO: 385461 - RNA, 32 nt, Human
cgaacuucucuuccucacaugagguuacuguu

SEQ ID NO: 385462 - RNA, 32 nt, Human
cgaacuugugaccuucucugagguugcagcgg

SEQ ID NO: 385463 - RNA, 32 nt, Human
cgaacuuucucaucuguucuaccaugccacga

SEQ ID NO: 385464 - RNA, 32 nt, Human
cgaacuuuugucauucagccugggagaccacg

SEQ ID NO: 385465 - RNA, 32 nt, Human
cgaagaaaaggcugcugacaaggcugagggag

SEQ ID NO: 385466 - RNA, 32 nt, Human
cgaagaaagaggagugaggcaggggagcgagg

SEQ ID NO: 385467 - RNA, 32 nt, Human
cgaagaaauccaggaguggccaaccuggaggu

SEQ ID NO: 385468 - RNA, 32 nt, Human
cgaagaacaugcugcaucucuaaggccugcaa

SEQ ID NO: 385469 - RNA, 32 nt, Human
cgaagaagccaauuugagacucagccuagucc

SEQ ID NO: 385470 - RNA, 31 nt, Human
cgaagaagccauuggcuccucacuuagccau

SEQ ID NO: 385471 - RNA, 32 nt, Human
cgaagaaggcucaucccucaccccagacgccu

SEQ ID NO: 385472 - RNA, 32 nt, Human
cgaagaauacugggggagggugugguggguuc

SEQ ID NO: 385473 - RNA, 32 nt, Human
cgaagacaagcagacagauggacacuuuggau

SEQ ID NO: 385474 - RNA, 32 nt, Human
cgaagacauacagcuagugacgaauggacuga

SEQ ID NO: 385475 - RNA, 32 nt, Human
cgaagacauggcccuuucucuguaguugauuu

SEQ ID NO: 385476 - RNA, 32 nt, Human
cgaagaccaaagugaagagcaaggagcugaac

SEQ ID NO: 385477 - RNA, 32 nt, Human
cgaagaccacgugggcagaggcgcagggccac

SEQ ID NO: 385478 - RNA, 32 nt, Human
cgaagaccccugggcaugauuuugcuuguauu

SEQ ID NO: 385479 - RNA, 32 nt, Human
cgaagacgagaugagggagcugacgggagggg

SEQ ID NO: 385480 - RNA, 32 nt, Human
cgaagacucgcccucgccagugguguuacaca

SEQ ID NO: 385481 - RNA, 32 nt, Human
cgaagacugugagacuuccuccccacagugag

SEQ ID NO: 385482 - RNA, 32 nt, Human
cgaagagaagugaaagguucaaggacacuggc

SEQ ID NO: 385483 - RNA, 32 nt, Human
cgaagagacucugccgcagcuuuucuucuuuu

SEQ ID NO: 385484 - RNA, 32 nt, Human
cgaagagaggagagaccugggagugggagcuc

SEQ ID NO: 385485 - RNA, 32 nt, Human
cgaagagcaggaagagguugcugagauuguug

SEQ ID NO: 385486 - RNA, 32 nt, Human
cgaagaggaauguauggagaacuccacgugga

SEQ ID NO: 385487 - RNA, 32 nt, Human
cgaagaggacauguggauauccagccagaaug

SEQ ID NO: 385488 - RNA, 32 nt, Human
cgaagaggacuacagcuccacggaggggucug

SEQ ID NO: 385489 - RNA, 32 nt, Human
cgaagaggcaccuccagcagccuuggaagcaa

SEQ ID NO: 385490 - RNA, 32 nt, Human
cgaagagguggacugagccgcucgggacagcg

SEQ ID NO: 385491 - RNA, 32 nt, Human
cgaagaguguguuggggcaaaggggcucgguu

SEQ ID NO: 385492 - RNA, 32 nt, Human
cgaagauacaauauuuauuccuugucuccugg

SEQ ID NO: 385493 - RNA, 32 nt, Human
cgaagauaggagagaggaagacaagaaggaga

SEQ ID NO: 385494 - RNA, 32 nt, Human
cgaagaugcgaugaggaugacaccccagugaa

SEQ ID NO: 385495 - RNA, 32 nt, Human
cgaagaugcuuggaugagucagcugggaauau

SEQ ID NO: 385496 - RNA, 30 nt, Human
cgaagauggcugcuggcugccugcuggccu

SEQ ID NO: 385497 - RNA, 32 nt, Human
cgaagauggugggcgggccauugaaagagguc

SEQ ID NO: 385498 - RNA, 32 nt, Human
cgaagauuaccgcuggccuacugugaagguag

SEQ ID NO: 385499 - RNA, 32 nt, Human
cgaagcacguggucccgcugcgccacagccag

SEQ ID NO: 385500 - RNA, 32 nt, Human
cgaagcagaagcugcauuuugccaagauccca

SEQ ID NO: 385501 - RNA, 32 nt, Human
cgaagcagagcggaacgaaacagaacagagga

SEQ ID NO: 385502 - RNA, 32 nt, Human
cgaagcagccucccaccagcgaucccuugggg

SEQ ID NO: 385503 - RNA, 32 nt, Human
cgaagcaggaggaucacuggaggccaagaguu

SEQ ID NO: 385504 - RNA, 32 nt, Human
cgaagcaggcggaucacuugaggucaggaguu

SEQ ID NO: 385505 - RNA, 32 nt, Human
cgaagcaggcuggcgacucagugcugcagcaa

SEQ ID NO: 385506 - RNA, 32 nt, Human
cgaagcagguggaucacuugaggccaggaguu

SEQ ID NO: 385507 - RNA, 32 nt, Human
cgaagcagugccucugcgcaaucuccgggcaa

SEQ ID NO: 385508 - RNA, 32 nt, Human
cgaagcauacugggggagggugugguggguuc

SEQ ID NO: 385509 - RNA, 32 nt, Human
cgaagccaaggcaggcaucaaaagccaaagug

SEQ ID NO: 385510 - RNA, 32 nt, Human
cgaagccaccuugcuuauucccauaggcuuac

SEQ ID NO: 385511 - RNA, 32 nt, Human
cgaagccagugcuugggcucugcugcugggag

SEQ ID NO: 385512 - RNA, 32 nt, Human
cgaagccauccaucaacauuuucuaacagcac

SEQ ID NO: 385513 - RNA, 32 nt, Human
cgaagccauugccauccacugcagacgccugg

SEQ ID NO: 385514 - RNA, 21 nt, Human
cgaagcccauuggggcggcgg

SEQ ID NO: 385515 - RNA, 32 nt, Human
cgaagccccagccaguggcagaacugggucuc

SEQ ID NO: 385516 - RNA, 23 nt, Human
cgaagccccugcgcgcucaggga

SEQ ID NO: 385517 - RNA, 32 nt, Human
cgaagccgagacuggaguucacggcugggccg

SEQ ID NO: 385518 - RNA, 22 nt, Human
cgaagccgggagcucgcaggga

SEQ ID NO: 385519 - RNA, 32 nt, Human
cgaagccuaggauaugagggcugaggaggacu

SEQ ID NO: 385520 - RNA, 32 nt, Human
cgaagccugagacccggaaggcccuggcaccc

SEQ ID NO: 385521 - RNA, 32 nt, Human
cgaagccuggggacucccagccccagagcucc

SEQ ID NO: 385522 - RNA, 32 nt, Human
cgaagccuguagucccagcuacucgggaggcu

SEQ ID NO: 385523 - RNA, 32 nt, Human
cgaagccuuccccucacaucucucucacuccc

SEQ ID NO: 385524 - RNA, 32 nt, Human
cgaagccuuccgggggcucuuuaccaggaacc

SEQ ID NO: 385525 - RNA, 32 nt, Human
cgaagccuugcugcuaacacugagguagcucu

SEQ ID NO: 385526 - RNA, 23 nt, Human
cgaagcgcagcccgccgcccgca

SEQ ID NO: 385527 - RNA, 32 nt, Human
cgaagcgccauccacgucuccugggccguggg

SEQ ID NO: 385528 - RNA, 18 nt, Human
cgaagcgcgcgugcgcgg

SEQ ID NO: 385529 - RNA, 22 nt, Human
cgaagcgcugcgcucgcgcccg

SEQ ID NO: 385530 - RNA, 32 nt, Human
cgaagcggccucucuccgccucaggcugccag

SEQ ID NO: 385531 - RNA, 19 nt, Human
cgaagcgggcgagcggugg

SEQ ID NO: 385532 - RNA, 19 nt, Human
cgaagcggggcgggaccgg

SEQ ID NO: 385533 - RNA, 32 nt, Human
cgaagcuagagagagagccagaggagggaaga

SEQ ID NO: 385534 - RNA, 32 nt, Human
cgaagcuauuucaguuccaggaauucugucug

SEQ ID NO: 385535 - RNA, 32 nt, Human
cgaagcucagccuaaucacugcuuccuccaaa

SEQ ID NO: 385536 - RNA, 32 nt, Human
cgaagcucagcuucgaagaugugaacaagaau

SEQ ID NO: 385537 - RNA, 32 nt, Human
cgaagcuccucccagccggucucucugugcuc

SEQ ID NO: 385538 - RNA, 32 nt, Human
cgaagcuccugccuuucugcagccucuacagg

SEQ ID NO: 385539 - RNA, 32 nt, Human
cgaagcucuaauugcccugaaggagaccgcgc

SEQ ID NO: 385540 - RNA, 32 nt, Human
cgaagcucuccccuuguugaaauaacacaaau

SEQ ID NO: 385541 - RNA, 32 nt, Human
cgaagcucugaccucaugaaacaucagcgagu

SEQ ID NO: 385542 - RNA, 32 nt, Human
cgaagcucugugguccgaucugcgguccgcuu

SEQ ID NO: 385543 - RNA, 32 nt, Human
cgaagcugacauuccucuggcaguccaguuca

SEQ ID NO: 385544 - RNA, 25 nt, Human
cgaagcugaggaagcuguugggggg

SEQ ID NO: 385545 - RNA, 32 nt, Human
cgaagcugaugaaguuccaaaaguaguucagu

SEQ ID NO: 385546 - RNA, 21 nt, Human
cgaagcugccgcgugcugcug

SEQ ID NO: 385547 - RNA, 32 nt, Human
cgaagcugccuuucuggccauccuugagaaaa

SEQ ID NO: 385548 - RNA, 21 nt, Human
cgaagcugcgcccggcgcccg

SEQ ID NO: 385549 - RNA, 21 nt, Human
cgaagcuggacgguacugcug

SEQ ID NO: 385550 - RNA, 32 nt, Human
cgaagcuggagcugcuagggcagcagcggcuc

SEQ ID NO: 385551 - RNA, 18 nt, Human
cgaagcuggggguggcgg

SEQ ID NO: 385552 - RNA, 23 nt, Human
cgaagcuggggucaggugagguc

SEQ ID NO: 385553 - RNA, 32 nt, Human
cgaagcuucaggaaguagaggauccagugaug

SEQ ID NO: 385554 - RNA, 32 nt, Human
cgaaggaagcacaaacccuccauccacuuccc

SEQ ID NO: 385555 - RNA, 32 nt, Human
cgaaggagaaggaggaagaggagaaggcggcg

SEQ ID NO: 385556 - RNA, 32 nt, Human
cgaaggaggagaagaagaagggaggggaaggc

SEQ ID NO: 385557 - RNA, 19 nt, Human
cgaaggaggccaucgggga

SEQ ID NO: 385558 - RNA, 32 nt, Human
cgaaggaguggaagaggagacaauuugaauga

SEQ ID NO: 385559 - RNA, 32 nt, Human
cgaaggaugccucacuaacuaguuuuaucccu

SEQ ID NO: 385560 - RNA, 32 nt, Human
cgaaggcacucccauuccccucugcauauggu

SEQ ID NO: 385561 - RNA, 32 nt, Human
cgaaggcagcacaggaccuggaaaaauuacau

SEQ ID NO: 385562 - RNA, 27 nt, Human
cgaaggcaggagauggcuugagcccua

SEQ ID NO: 385563 - RNA, 32 nt, Human
cgaaggcaggguguccggagagcggugggcug

SEQ ID NO: 385564 - RNA, 32 nt, Human
cgaaggcaucaacauuucuggcaauuucuaca

SEQ ID NO: 385565 - RNA, 32 nt, Human
cgaaggccacguggcuuccguugacucagugc

SEQ ID NO: 385566 - RNA, 31 nt, Human
cgaaggcccaauaaauauuuguagaauaaag

SEQ ID NO: 385567 - RNA, 32 nt, Human
cgaaggcccagcccuggcccuggccgcggucu

SEQ ID NO: 385568 - RNA, 18 nt, Human
cgaaggcggcgcggccgg

SEQ ID NO: 385569 - RNA, 18 nt, Human
cgaaggcggcggcgaagg

SEQ ID NO: 385570 - RNA, 17 nt, Human
cgaaggcgggcugagcc

SEQ ID NO: 385571 - RNA, 22 nt, Human
cgaaggcugagagcuggcgcug

SEQ ID NO: 385572 - RNA, 21 nt, Human
cgaaggcugagguggcagcgg

SEQ ID NO: 385573 - RNA, 32 nt, Human
cgaaggcugcccagagagguggagucgguagc

SEQ ID NO: 385574 - RNA, 21 nt, Human
cgaaggcugcggcgcggcgcu

SEQ ID NO: 385575 - RNA, 18 nt, Human
cgaagggagaaguuggga

SEQ ID NO: 385576 - RNA, 32 nt, Human
cgaagggagagggaccuuaggggagcagagaa

SEQ ID NO: 385577 - RNA, 32 nt, Human
cgaagggaggggaggccaggaggggagcugcu

SEQ ID NO: 385578 - RNA, 32 nt, Human
cgaagggcagagccaagaagucagcccugacu

SEQ ID NO: 385579 - RNA, 32 nt, Human
cgaagggcagccccugccgacuccagguccua

SEQ ID NO: 385580 - RNA, 21 nt, Human
cgaagggcguuuggguacugc

SEQ ID NO: 385581 - RNA, 32 nt, Human
cgaaggggaggcacacuuucugcaaacguuuc

SEQ ID NO: 385582 - RNA, 32 nt, Human
cgaaggggauaucaccaccaaucccacagaaa

SEQ ID NO: 385583 - RNA, 32 nt, Human
cgaaggggccuaguguucccagcacugugccu

SEQ ID NO: 385584 - RNA, 32 nt, Human
cgaaggggcucccagccauggaaagcccugga

SEQ ID NO: 385585 - RNA, 32 nt, Human
cgaaggggcuucuuccagagccaaggaggaag

SEQ ID NO: 385586 - RNA, 32 nt, Human
cgaagggggaggaucgcuugagcccaggaguu

SEQ ID NO: 385587 - RNA, 32 nt, Human
cgaagggggcacaggagaggagaggggcugug

SEQ ID NO: 385588 - RNA, 32 nt, Human
cgaagggggcaggccagggagaggcgcaggag

SEQ ID NO: 385589 - RNA, 32 nt, Human
cgaagggggcgugacagauaagaguggcauuu

SEQ ID NO: 385590 - RNA, 32 nt, Human
cgaagggugguauguggagcuggaaggucuug

SEQ ID NO: 385591 - RNA, 32 nt, Human
cgaaggucugcaacuucacuccuggggccagc

SEQ ID NO: 385592 - RNA, 32 nt, Human
cgaaggucugcagcuucacuccugaagccagc

SEQ ID NO: 385593 - RNA, 32 nt, Human
cgaaggucugcagcuucacuccugagccagcc

SEQ ID NO: 385594 - RNA, 32 nt, Human
cgaaggucugcagcuucacuccugagccagcg

SEQ ID NO: 385595 - RNA, 32 nt, Human
cgaaggucugcagcuucacuccugagccaggg

SEQ ID NO: 385596 - RNA, 32 nt, Human
cgaaggugagugaagauggcagagaggacgug

SEQ ID NO: 385597 - RNA, 32 nt, Human
cgaagguggggugggaccaggcugccccucgc

SEQ ID NO: 385598 - RNA, 32 nt, Human
cgaaguaaagggaguaggggagacugagacug

SEQ ID NO: 385599 - RNA, 30 nt, Human
cgaaguacauugcaaucacgauggccuuuu

SEQ ID NO: 385600 - RNA, 32 nt, Human
cgaaguacccuaggaaucucucucccucacuc

SEQ ID NO: 385601 - RNA, 21 nt, Human
cgaaguagcugggauuacagg

SEQ ID NO: 385602 - RNA, 32 nt, Human
cgaaguauuuucugaguguugagaagaaugag

SEQ ID NO: 385603 - RNA, 32 nt, Human
cgaagucaagacgucuggaaagaauuacccag

SEQ ID NO: 385604 - RNA, 32 nt, Human
cgaagucaagaguucaagaccagccuggccaa

SEQ ID NO: 385605 - RNA, 32 nt, Human
cgaagucacacgcacacaugcacgcacacaca

SEQ ID NO: 385606 - RNA, 32 nt, Human
cgaagucagcagacacuagacacuccaaagac

SEQ ID NO: 385607 - RNA, 32 nt, Human
cgaagucaggagaucaagaccaucuggcuaac

SEQ ID NO: 385608 - RNA, 32 nt, Human
cgaagucaggagaucgagaccaaccuggcuaa

SEQ ID NO: 385609 - RNA, 32 nt, Human
cgaagucauacucuugcucccaccccacccuu

SEQ ID NO: 385610 - RNA, 32 nt, Human
cgaagucaucugcacaaggcuaccaacugcaa

SEQ ID NO: 385611 - RNA, 22 nt, Human
cgaagucccgcugccucuaagc

SEQ ID NO: 385612 - RNA, 32 nt, Human
cgaaguccggaacuggucuucugugauuuuca

SEQ ID NO: 385613 - RNA, 32 nt, Human
cgaagucucauggcagucccaaaggaggcuua

SEQ ID NO: 385614 - RNA, 22 nt, Human
cgaagucuucaacuuccugcug

SEQ ID NO: 385615 - RNA, 32 nt, Human
cgaagugaagaacaaggcuggccacacaccac

SEQ ID NO: 385616 - RNA, 32 nt, Human
cgaagugacucacaccugcaaucccagcacuu

SEQ ID NO: 385617 - RNA, 32 nt, Human
cgaagugcaaggccacggccagagcucgagcc

SEQ ID NO: 385618 - RNA, 32 nt, Human
cgaagugcaguggcucaugccuguaaucucag

SEQ ID NO: 385619 - RNA, 22 nt, Human
cgaagugcucccggugcccgca

SEQ ID NO: 385620 - RNA, 32 nt, Human
cgaagugcucgagugcuuagaaacccccucug

SEQ ID NO: 385621 - RNA, 20 nt, Human
cgaagugcugggauuacagg

SEQ ID NO: 385622 - RNA, 22 nt, Human
cgaagugcugggauuacaggug

SEQ ID NO: 385623 - RNA, 20 nt, Human
cgaagugcugggauuauagg

SEQ ID NO: 385624 - RNA, 22 nt, Human
cgaagugcugggauuauaggug

SEQ ID NO: 385625 - RNA, 20 nt, Human
cgaagugcugggauugcagg

SEQ ID NO: 385626 - RNA, 19 nt, Human
cgaagugcuguggcggugg

SEQ ID NO: 385627 - RNA, 22 nt, Human
cgaagugcuuggauuacaggug

SEQ ID NO: 385628 - RNA, 32 nt, Human
cgaaguggcccaugccuguaaucucagcacuc

SEQ ID NO: 385629 - RNA, 32 nt, Human
cgaagugggcagaucacuugaggucaagaguu

SEQ ID NO: 385630 - RNA, 32 nt, Human
cgaagugggcggaucacuugaggucagcaguu

SEQ ID NO: 385631 - RNA, 32 nt, Human
cgaaguggguggaucacuugaggccaggaguu

SEQ ID NO: 385632 - RNA, 20 nt, Human
cgcagcacugguccgggaca

SEQ ID NO: 385633 - RNA, 32 nt, Human
cgcagcacuguacuccagccugggcgauggag

SEQ ID NO: 385634 - RNA, 20 nt, Human
cgcagcagagagccugggag

SEQ ID NO: 385635 - RNA, 32 nt, Human
cgcagcagagguuucccuugaagugcaagagg

SEQ ID NO: 385636 - RNA, 22 nt, Human
cgcagcagcagcagccagggca

SEQ ID NO: 385637 - RNA, 32 nt, Human
cgcagcagccaucuuagacuugagggcucugu

SEQ ID NO: 385638 - RNA, 16 nt, Human
cgcagcagccggagca

SEQ ID NO: 385639 - RNA, 32 nt, Human
cgcagcagccucccucccucucagcagcuaga

SEQ ID NO: 385640 - RNA, 32 nt, Human
cgcagcagccugacgcuagaggacaucugcgg

SEQ ID NO: 385641 - RNA, 26 nt, Human
cgcagcagcggcggcagcagcagcgg

SEQ ID NO: 385642 - RNA, 32 nt, Human
cgcagcagcuggagaggaaggggugaggcgug

SEQ ID NO: 385643 - RNA, 26 nt, Human
cgcagcaggaaccaggcuccaggcgc

SEQ ID NO: 385644 - RNA, 19 nt, Human
cgcagcaggagcagccagc

SEQ ID NO: 385645 - RNA, 19 nt, Human
cgcagcaggcugccugcug

SEQ ID NO: 385646 - RNA, 32 nt, Human
cgcagcagguucucacaaaauaacuggugcua

SEQ ID NO: 385647 - RNA, 32 nt, Human
cgcagcauggcugugguggacgcgggaaacaa

SEQ ID NO: 385648 - RNA, 19 nt, Human
cgcagccaacggcucgggc

SEQ ID NO: 385649 - RNA, 32 nt, Human
cgcagccaaggucuguguucagcacuuggucu

SEQ ID NO: 385650 - RNA, 27 nt, Human
cgcagccaccugggccgcuaccuggcg

SEQ ID NO: 385651 - RNA, 32 nt, Human
cgcagccagaagcccuggccagugaggagcuc

SEQ ID NO: 385652 - RNA, 32 nt, Human
cgcagccagcgccaugcaaaacuacaaguacg

SEQ ID NO: 385653 - RNA, 32 nt, Human
cgcagccaggagaccgaggugcuguaccagcu

SEQ ID NO: 385654 - RNA, 21 nt, Human
cgcagccaggccucugcugcc

SEQ ID NO: 385655 - RNA, 32 nt, Human
cgcagcccaaaaacaaaugguuaggcugcaga

SEQ ID NO: 385656 - RNA, 32 nt, Human
cgcagcccacccgggaagccacggugaccagc

SEQ ID NO: 385657 - RNA, 32 nt, Human
cgcagcccacccugcgccacucagccucugcg

SEQ ID NO: 385658 - RNA, 32 nt, Human
cgcagcccaucucuagaugaaagggggaaugu

SEQ ID NO: 385659 - RNA, 21 nt, Human
cgcagccccaggcagccgggg

SEQ ID NO: 385660 - RNA, 21 nt, Human
cgcagccccccggcccugaga

SEQ ID NO: 385661 - RNA, 32 nt, Human
cgcagcccccuucucaucuccacccaagaagu

SEQ ID NO: 385662 - RNA, 19 nt, Human
cgcagccccggccgccagg

SEQ ID NO: 385663 - RNA, 32 nt, Human
cgcagccccggcgcggccgccugguggcgaug

SEQ ID NO: 385664 - RNA, 32 nt, Human
cgcagccccucagaccucacgcuacagucacc

SEQ ID NO: 385665 - RNA, 32 nt, Human
cgcagccccuccugccccuccugccaggcccu

SEQ ID NO: 385666 - RNA, 32 nt, Human
cgcagcccgccuggccggagcugugggagucc

SEQ ID NO: 385667 - RNA, 19 nt, Human
cgcagcccggcggcgcagg

SEQ ID NO: 385668 - RNA, 32 nt, Human
cgcagcccucauuuaugauuccugccagauuu

SEQ ID NO: 385669 - RNA, 32 nt, Human
cgcagcccuccagucccuacuucaggcugagc

SEQ ID NO: 385670 - RNA, 32 nt, Human
cgcagcccuccaguguggcugcaggcgguggu

SEQ ID NO: 385671 - RNA, 20 nt, Human
cgcagcccucgggcgcgagg

SEQ ID NO: 385672 - RNA, 32 nt, Human
cgcagcccuuuccugggacauggauguacaug

SEQ ID NO: 385673 - RNA, 32 nt, Human
cgcagccgagcagcggcucuuucagcauuggc

SEQ ID NO: 385674 - RNA, 32 nt, Human
cgcagccgaggggcucuggagugccuuagagc

SEQ ID NO: 385675 - RNA, 32 nt, Human
cgcagccgaggugggagcacgggcaggcucag

SEQ ID NO: 385676 - RNA, 21 nt, Human
cgcagccgccgccgccgccgc

SEQ ID NO: 385677 - RNA, 32 nt, Human
cgcagccgcugggagcccccggcagagcuggg

SEQ ID NO: 385678 - RNA, 32 nt, Human
cgcagccggcgccuuguugagggaacggaccc

SEQ ID NO: 385679 - RNA, 32 nt, Human
cgcagccgucuguccuugaucugcccgcggcg

SEQ ID NO: 385680 - RNA, 32 nt, Human
cgcagccgugcgauguuguccucuacagccau

SEQ ID NO: 385681 - RNA, 19 nt, Human
cgcagccucagccagggag

SEQ ID NO: 385682 - RNA, 32 nt, Human
cgcagccucccaucccaggauucauguuuuca

SEQ ID NO: 385683 - RNA, 32 nt, Human
cgcagccuccuccagccgcgagcccagcugca

SEQ ID NO: 385684 - RNA, 32 nt, Human
cgcagccuccuugagccuggcaucccaggccu

SEQ ID NO: 385685 - RNA, 32 nt, Human
cgcagccucggggaaaccuaccugcacacaga

SEQ ID NO: 385686 - RNA, 32 nt, Human
cgcagccucucugauucucucucccucuccgc

SEQ ID NO: 385687 - RNA, 32 nt, Human
cgcagccuggagagucgggaccaccugcaccg

SEQ ID NO: 385688 - RNA, 32 nt, Human
cgcagccugggugggugaggggagagacggua

SEQ ID NO: 385689 - RNA, 32 nt, Human
cgcagcgacauggagggagcugcuuugcugaa

SEQ ID NO: 385690 - RNA, 32 nt, Human
cgcagcgagccgcggcccgggcgggcugcucg

SEQ ID NO: 385691 - RNA, 32 nt, Human
cgcagcgagcgagagcgcggcggccgcgggcu

SEQ ID NO: 385692 - RNA, 32 nt, Human
cgcagcgagcuacagacgggggcgcggcacuc

SEQ ID NO: 385693 - RNA, 32 nt, Human
cgcagcgaggaggcggcggggaagaagcgcag

SEQ ID NO: 385694 - RNA, 32 nt, Human
cgcagcgcaggcggagcggcagcggggccucg

SEQ ID NO: 385695 - RNA, 23 nt, Human
cgcagcgccagccucgagcuccu

SEQ ID NO: 385696 - RNA, 32 nt, Human
cgcagcgccagccucgagcuccucgguagccc

SEQ ID NO: 385697 - RNA, 23 nt, Human
cgcagcgccgccgcccggccccu

SEQ ID NO: 385698 - RNA, 32 nt, Human
cgcagcgccgcggucucuccagccucuggucc

SEQ ID NO: 385699 - RNA, 21 nt, Human
cgcagcgccuucuccagccgc

SEQ ID NO: 385700 - RNA, 32 nt, Human
cgcagcgcgccgcgauucaccagccugguccc

SEQ ID NO: 385701 - RNA, 32 nt, Human
cgcagcgcggcagaggaaggcgaggcgagcuu

SEQ ID NO: 385702 - RNA, 32 nt, Human
cgcagcgcgggugggaggcggggaggagcagc

SEQ ID NO: 385703 - RNA, 32 nt, Human
cgcagcgcuacccuuuuccgcuccacggugac

SEQ ID NO: 385704 - RNA, 32 nt, Human
cgcagcgcuccaggauucugcggcucggaacu

SEQ ID NO: 385705 - RNA, 32 nt, Human
cgcagcggagaggcacuagucaccgacagcgg

SEQ ID NO: 385706 - RNA, 32 nt, Human
cgcagcggcgagugcacagagcagggaaaggc

SEQ ID NO: 385707 - RNA, 32 nt, Human
cgcagcggcucacgccuguaaucccagcacuu

SEQ ID NO: 385708 - RNA, 32 nt, Human
cgcagcggcucaugccuguaaucccagcacuu

SEQ ID NO: 385709 - RNA, 32 nt, Human
cgcagcggggagugggaccggcuuccagccug

SEQ ID NO: 385710 - RNA, 32 nt, Human
cgcagcgggggcgggaagguuguagugccgcg

SEQ ID NO: 385711 - RNA, 32 nt, Human
cgcagcggugcucuggggccaggugccaccgg

SEQ ID NO: 385712 - RNA, 24 nt, Human
cgcagcguaacugcaggccucuca

SEQ ID NO: 385713 - RNA, 32 nt, Human
cgcagcguccagggguuggaggagggccccgg

SEQ ID NO: 385714 - RNA, 32 nt, Human
cgcagcgugagggugugucuucccuggauagc

SEQ ID NO: 385715 - RNA, 22 nt, Human
cgcagcguggggccccgagcgc

SEQ ID NO: 385716 - RNA, 32 nt, Human
cgcagcuaucagacagagacccugcccaugau

SEQ ID NO: 385717 - RNA, 32 nt, Human
cgcagcuauggagccgcaggaggagagagaaa

SEQ ID NO: 385718 - RNA, 32 nt, Human
cgcagcucacugcaaucucugccuccuggguu

SEQ ID NO: 385719 - RNA, 32 nt, Human
cgcagcucagugcucuagccggggcaagcccg

SEQ ID NO: 385720 - RNA, 32 nt, Human
cgcagcucuggugggaggaaggcgagcccuca

SEQ ID NO: 385721 - RNA, 23 nt, Human
cgcagcugaagccgccccggagc

SEQ ID NO: 385722 - RNA, 24 nt, Human
cgcagcugaccaugaacauccccu

SEQ ID NO: 385723 - RNA, 32 nt, Human
cgcagcugacugcagccucaaccuuccaggcu

SEQ ID NO: 385724 - RNA, 32 nt, Human
cgcagcugagucgggcuggagaagcugggcag

SEQ ID NO: 385725 - RNA, 32 nt, Human
cgcagcugccagccaggggucugggugggcac

SEQ ID NO: 385726 - RNA, 32 nt, Human
cgcagcugccgccgccgccagggcccggacuc

SEQ ID NO: 385727 - RNA, 31 nt, Human
cgcagcugccucuccgucuuugugucugucu

SEQ ID NO: 385728 - RNA, 32 nt, Human
cgcagcugcucagggacagcagucuccccggg

SEQ ID NO: 385729 - RNA, 32 nt, Human
cgcagcuggacucugugcaacugggaguggag

SEQ ID NO: 385730 - RNA, 32 nt, Human
cgcagcuggagcagggcugagcccaggagcau

SEQ ID NO: 385731 - RNA, 32 nt, Human
cgcagcuggagugagaggcagguggcggccgg

SEQ ID NO: 385732 - RNA, 32 nt, Human
cgcagcugggcuggcgggaggcauggaggcug

SEQ ID NO: 385733 - RNA, 32 nt, Human
cgcagcuggggccuggcacacagggucccugu

SEQ ID NO: 385734 - RNA, 32 nt, Human
cgcagcugguuugcacagccucccgacugugc

SEQ ID NO: 385735 - RNA, 32 nt, Human
cgcagcuguuccugaauggauuucuugcucag

SEQ ID NO: 385736 - RNA, 32 nt, Human
cgcagcuucugagacuggaagucuggaggaag

SEQ ID NO: 385737 - RNA, 16 nt, Human
cgcagcuuggccugca

SEQ ID NO: 385738 - RNA, 32 nt, Human
cgcaggaacagccccguggcgcccucucuggc

SEQ ID NO: 385739 - RNA, 32 nt, Human
cgcaggaaccagggauaccaucugguccagug

SEQ ID NO: 385740 - RNA, 32 nt, Human
cgcaggaagggccuacagcccauuucuccaua

SEQ ID NO: 385741 - RNA, 32 nt, Human
cgcaggacaaaaggacucuggccacccagcag

SEQ ID NO: 385742 - RNA, 32 nt, Human
cgcaggacaggcaggagagauucuuccuaaag

SEQ ID NO: 385743 - RNA, 25 nt, Human
cgcaggaccggcgggcgcgcgcggg

SEQ ID NO: 385744 - RNA, 32 nt, Human
cgcaggacggcaccgaggugguggugaaagag

SEQ ID NO: 385745 - RNA, 32 nt, Human
cgcaggagccaagagcaagggacgccgccacg

SEQ ID NO: 385746 - RNA, 32 nt, Human
cgcaggagccccgggaaucuggaggggccgug

SEQ ID NO: 385747 - RNA, 32 nt, Human
cgcaggagccgagucaggcucucuccacugcc

SEQ ID NO: 385748 - RNA, 32 nt, Human
cgcaggagccuauccugaauuuuguaaaauau

SEQ ID NO: 385749 - RNA, 32 nt, Human
cgcaggaggaaggagguugugcagggucugga

SEQ ID NO: 385750 - RNA, 32 nt, Human
cgcaggaggcugaggcugcagugaguugugau

SEQ ID NO: 385751 - RNA, 32 nt, Human
cgcaggaggugaaaaugcuuucuuggccaggg

SEQ ID NO: 385752 - RNA, 32 nt, Human
cgcaggaguagaauugcggaggcuugggccau

SEQ ID NO: 385753 - RNA, 32 nt, Human
cgcaggaucggaggguucggaggacucggagg

SEQ ID NO: 385754 - RNA, 32 nt, Human
cgcaggaucucacagcugcagucuaauaguaa

SEQ ID NO: 385755 - RNA, 32 nt, Human
cgcaggcaaauuugaagcuuugcuugucauuc

SEQ ID NO: 385756 - RNA, 21 nt, Human
cgcaggcaacaguaacucuga

SEQ ID NO: 385757 - RNA, 32 nt, Human
cgcaggcacacaggccagagcuucguggauac

SEQ ID NO: 385758 - RNA, 22 nt, Human
cgcaggcacuccaggcucugca

SEQ ID NO: 385759 - RNA, 32 nt, Human
cgcaggcagagaagcugcaggagcugcugcgg

SEQ ID NO: 385760 - RNA, 32 nt, Human
cgcaggcagggugagcaaggauggcguggaac

SEQ ID NO: 385761 - RNA, 32 nt, Human
cgcaggcagggugugcugccugagauggcacc

SEQ ID NO: 385762 - RNA, 32 nt, Human
cgcaggcaguucuucuuagguuccgucucacg

SEQ ID NO: 385763 - RNA, 23 nt, Human
cgcaggccagggccgcccggcgc

SEQ ID NO: 385764 - RNA, 32 nt, Human
cgcaggccagugugugcgcgcaccgugcgcga

SEQ ID NO: 385765 - RNA, 32 nt, Human
cgcaggccaugaggacccacugggcagcuccu

SEQ ID NO: 385766 - RNA, 32 nt, Human
cgcaggcccacagccaggagcaguagacagcg

SEQ ID NO: 385767 - RNA, 32 nt, Human
cgcaggcccacugugcagcccccaagucacca

SEQ ID NO: 385768 - RNA, 32 nt, Human
cgcaggcccggagaauguggccccagacugaa

SEQ ID NO: 385769 - RNA, 32 nt, Human
cgcaggcccgggaggacgcggcggcgggaacc

SEQ ID NO: 385770 - RNA, 18 nt, Human
cgcaggcccucacgcgua

SEQ ID NO: 385771 - RNA, 32 nt, Human
cgcaggccgaguuccagaccagccugggaaac

SEQ ID NO: 385772 - RNA, 32 nt, Human
cgcaggccugggaggaaagugggcgcagagcc

SEQ ID NO: 385773 - RNA, 32 nt, Human
cgcaggcgaguagggccagacaugguggcuca

SEQ ID NO: 385774 - RNA, 32 nt, Human
cgcaggcgcagagagacaggaggcugaugggg

SEQ ID NO: 385775 - RNA, 32 nt, Human
cgcaggcggcggggcgcuggggaaucuuccuc

SEQ ID NO: 385776 - RNA, 23 nt, Human
cgcaggcggugacgcagcugcuc

SEQ ID NO: 385777 - RNA, 20 nt, Human
cgcaggcuagagugcagugg

SEQ ID NO: 385778 - RNA, 25 nt, Human
cgcaggcucagggcccuggauuccc

SEQ ID NO: 385779 - RNA, 32 nt, Human
cgcaggcucagggcccuggauucccgcuuucu

SEQ ID NO: 385780 - RNA, 32 nt, Human
cgcaggcucccaggaauccuaaugucacgauc

SEQ ID NO: 385781 - RNA, 32 nt, Human
cgcaggcucccugcgggagcaggcugggcuca

SEQ ID NO: 385782 - RNA, 32 nt, Human
cgcaggcucugcccccgggcuccgguggugcg

SEQ ID NO: 385783 - RNA, 32 nt, Human
cgcaggcugcaacccuggugugcugggcgaaa

SEQ ID NO: 385784 - RNA, 32 nt, Human
cgcaggcugccaggcuggcguacaguggcgca

SEQ ID NO: 385785 - RNA, 20 nt, Human
cgcaggcuggagugcagugg

SEQ ID NO: 385786 - RNA, 32 nt, Human
cgcaggcugggcugcaggcucucggcugcagc

SEQ ID NO: 385787 - RNA, 23 nt, Human
cgcaggcuuaguaacgccgugga

SEQ ID NO: 385788 - RNA, 32 nt, Human
cgcagggaaaggcugcgcgggagaagccgcug

SEQ ID NO: 385789 - RNA, 27 nt, Human
cgcagggaccggccaggcgggcugcag

SEQ ID NO: 385790 - RNA, 32 nt, Human
cgcagggagagggagggcacgggcgcgggccg

SEQ ID NO: 385791 - RNA, 32 nt, Human
cgcagggagcagcuccagcugccuggcagugc

SEQ ID NO: 385792 - RNA, 32 nt, Human
cgcagggaggcagggauggcaaggcgugaagc

SEQ ID NO: 385793 - RNA, 32 nt, Human
cgcagggagucugccaucugccuccaggcccg

SEQ ID NO: 385794 - RNA, 25 nt, Human
cgcagggcacacucaaggccgcugc

SEQ ID NO: 385795 - RNA, 32 nt, Human
cgcagggcagacggcggcaggagaagcaagau

SEQ ID NO: 385796 - RNA, 22 nt, Human
cgcagggcagcggcgucgcggg

SEQ ID NO: 385797 - RNA, 32 nt, Human
cgcagggcagggggacugggcggugguggcug

SEQ ID NO: 385798 - RNA, 25 nt, Human
cgcagggccaagccgaggcagccgc

SEQ ID NO: 385799 - RNA, 32 nt, Human
cgcagggcccgaguccuccucgguaaugaguc

SEQ ID NO: 385800 - RNA, 19 nt, Human
cgcagggccgugcaccugc

SEQ ID NO: 385801 - RNA, 21 nt, Human
cgcagggccugccgccacugc

SEQ ID NO: 385802 - RNA, 32 nt, Human
cgcagggccugcucuucuuccggcaggaccag

SEQ ID NO: 385803 - RNA, 18 nt, Human
cgcagggcucugccacau

SEQ ID NO: 385804 - RNA, 32 nt, Human
cgcaggggaagagaaagcaggagccguccagc

SEQ ID NO: 385805 - RNA, 32 nt, Human
cgcaggggagccggcuggagugagcuggcugg

SEQ ID NO: 385806 - RNA, 32 nt, Human
cgcaggggcaugcgccuagaaucccagcuacu

SEQ ID NO: 385807 - RNA, 32 nt, Human
cgcaggggcccaggaaugucccagaaucaagg

SEQ ID NO: 385808 - RNA, 24 nt, Human
cgcaggggccccuccuccagagcc

SEQ ID NO: 385809 - RNA, 32 nt, Human
cgcaggggcucacaccuguaaucccagcaccu

SEQ ID NO: 385810 - RNA, 21 nt, Human
cgcaggggcugggcagcugcc

SEQ ID NO: 385811 - RNA, 32 nt, Human
cgcaggggcuguagggaggugaucucauccau

SEQ ID NO: 385812 - RNA, 23 nt, Human
cgcagggggauggcccccggcgc

SEQ ID NO: 385813 - RNA, 32 nt, Human
cgcaggggguucccccugcugaggagagacca

SEQ ID NO: 385814 - RNA, 32 nt, Human
cgcaggguggcugucuuuguuccagcacuguu

SEQ ID NO: 385815 - RNA, 32 nt, Human
cgcaggguuagagugggcuccuuucuuuuugg

SEQ ID NO: 385816 - RNA, 32 nt, Human
  misc_feature (7)..(7): n is a, c, g, or u
cgcaggngcucacaccuguaauccuagcacuu

SEQ ID NO: 385817 - RNA, 32 nt, Human
cgcagguccgugccauggggaaguucuucaga

SEQ ID NO: 385818 - RNA, 32 nt, Human
cgcaggucucugagccgggugcggaaggaggg

SEQ ID NO: 385819 - RNA, 15 nt, Human
cgcaggucugagcug

SEQ ID NO: 385820 - RNA, 32 nt, Human
cgcaggucugaggagcugagaagggaggcuua

SEQ ID NO: 385821 - RNA, 32 nt, Human
cgcaggucuuucuucuucuagcuuccacccac

SEQ ID NO: 385822 - RNA, 32 nt, Human
cgcaggugcagagagacaggaggcugaugggg

SEQ ID NO: 385823 - RNA, 22 nt, Human
cgcaggugggcagcgcgcacgg

SEQ ID NO: 385824 - RNA, 32 nt, Human
cgcaggugguucccucauucgagugcuccggc

SEQ ID NO: 385825 - RNA, 32 nt, Human
cgcaggugugagccaccacacccggcccugau

SEQ ID NO: 385826 - RNA, 32 nt, Human
cgcaggugugugccaccauuucuggcuaguuu

SEQ ID NO: 385827 - RNA, 32 nt, Human
cgcagguugaagcaagcugcucugcaagguga

SEQ ID NO: 385828 - RNA, 32 nt, Human
cgcagguugcuuucccacccugggcaaugcag

SEQ ID NO: 385829 - RNA, 21 nt, Human
cgcaguagcugggacuacagg

SEQ ID NO: 385830 - RNA, 32 nt, Human
cgcaguaggaggugggggcgaagagagggcug

SEQ ID NO: 385831 - RNA, 32 nt, Human
cgcagucacccagguccagaggcggcgguauc

SEQ ID NO: 385832 - RNA, 32 nt, Human
cgcagucagggaacaggugaggaaagaaauaa

SEQ ID NO: 385833 - RNA, 32 nt, Human
cgcagucccaggagccgagcuccagcacuaga

SEQ ID NO: 385834 - RNA, 32 nt, Human
cgcaguccuaacagggugagaaagcacaagag

SEQ ID NO: 385835 - RNA, 32 nt, Human
cgcaguccugggagccagcggccaccugcggg

SEQ ID NO: 385836 - RNA, 32 nt, Human
cgcaguccugugggaagcauucaggcucagaa

SEQ ID NO: 385837 - RNA, 32 nt, Human
cgcagucggcggugggggaugggcaggcagug

SEQ ID NO: 385838 - RNA, 32 nt, Human
cgcagucggugaagcacaggagacugaagcag

SEQ ID NO: 385839 - RNA, 32 nt, Human
cgcagucucagcucccugcucuacggcuccau

SEQ ID NO: 385840 - RNA, 24 nt, Human
cgcagucuggccugggcgacagag

SEQ ID NO: 385841 - RNA, 32 nt, Human
cgcagucuugguggaggagguggugaccacca

SEQ ID NO: 385842 - RNA, 32 nt, Human
cgcagugaacuuaaagcaaagaccucuuagua

SEQ ID NO: 385843 - RNA, 32 nt, Human
cgcagugacagcgccucaccgccaccagcucc

SEQ ID NO: 385844 - RNA, 32 nt, Human
cgcagugacucacgccuguaaucccagcacuu

SEQ ID NO: 385845 - RNA, 32 nt, Human
cgcagugacucugaggagaaggagccgccugu

SEQ ID NO: 385846 - RNA, 32 nt, Human
cgcagugacuuacgccuguaaucucagcacuu

SEQ ID NO: 385847 - RNA, 32 nt, Human
cgcagugagcaugcucggccuccugcgggaag

SEQ ID NO: 385848 - RNA, 19 nt, Human
cgcagugaggcccugggug

SEQ ID NO: 385849 - RNA, 32 nt, Human
cgcagugaguccugccuggcucuaagcaccac

SEQ ID NO: 385850 - RNA, 21 nt, Human
cgcagugcagagccccaaagc

SEQ ID NO: 385851 - RNA, 32 nt, Human
cgcagugcagagccccaaagcucaggcuauug

SEQ ID NO: 385852 - RNA, 32 nt, Human
cgcagugcagugaguucaugcaccuucuugcc

SEQ ID NO: 385853 - RNA, 32 nt, Human
cgcagugcaugcugggugcaugaagggcagcc

SEQ ID NO: 385854 - RNA, 32 nt, Human
cgcagugccucaugccuguaaucccagcacuu

SEQ ID NO: 385855 - RNA, 32 nt, Human
cgcagugccuggcaguccagaggcagugggau

SEQ ID NO: 385856 - RNA, 20 nt, Human
cgcagugcugggauuacagg

SEQ ID NO: 385857 - RNA, 32 nt, Human
cgcagugcuugggaacauacuguauccucgaa

SEQ ID NO: 385858 - RNA, 32 nt, Human
cgcaguggagccagcacagcggauguuuucac

SEQ ID NO: 385859 - RNA, 32 nt, Human
cgcaguggaucgcaccuguaaucccagucacu

SEQ ID NO: 385860 - RNA, 32 nt, Human
cgcaguggcacgcgccuguaaucccagcuacu

SEQ ID NO: 385861 - RNA, 30 nt, Human
cgcaguggcaggaucucagcucaacacauc

SEQ ID NO: 385862 - RNA, 32 nt, Human
cgcaguggcuaacgccuguaaucccagcacuu

SEQ ID NO: 385863 - RNA, 32 nt, Human
cgcaguggcucaagccuguaaucccagcauuu

SEQ ID NO: 385864 - RNA, 32 nt, Human
cgcaguggcucacaccuauaaccccagcuaug

SEQ ID NO: 385865 - RNA, 32 nt, Human
cgcaguggcucacaccucuaaucccagcacuu

SEQ ID NO: 385866 - RNA, 32 nt, Human
cgcaguggcucacaccuguaaucccaacacuu

SEQ ID NO: 385867 - RNA, 32 nt, Human
cgcaguggcucacaccuguaaucccagaacuu

SEQ ID NO: 385868 - RNA, 32 nt, Human
cgcaguggcucacaccuguaaucccagcacuu

SEQ ID NO: 385869 - RNA, 32 nt, Human
cgcaguggcucacaccuguaauccuagcacuu

SEQ ID NO: 385870 - RNA, 32 nt, Human
cgcaguggcucacaccuguaauccugcacuuu

SEQ ID NO: 385871 - RNA, 32 nt, Human
cgcaguggcucacaccuguaaucucagcacuu

SEQ ID NO: 385872 - RNA, 32 nt, Human
cgcaguggcucacaccuguagucccagcacuu

SEQ ID NO: 385873 - RNA, 32 nt, Human
cgcaguggcucacaucuguaaucucagcauuu

SEQ ID NO: 385874 - RNA, 32 nt, Human
cgcaguggcucaccccuguaaucucagcacuu

SEQ ID NO: 385875 - RNA, 32 nt, Human
cgcaguggcucaccucuguaaucccagcacuu

SEQ ID NO: 385876 - RNA, 32 nt, Human
cgcaguggcucacgccuauaaucccaacacuu

SEQ ID NO: 385877 - RNA, 32 nt, Human
cgcaguggcucacgccuauaaucccagaggcu

SEQ ID NO: 385878 - RNA, 32 nt, Human
cgcaguggcucacgccuauaaucccagcacuu

SEQ ID NO: 385879 - RNA, 32 nt, Human
cgcaguggcucacgccuguaaucccaacaaca

SEQ ID NO: 385880 - RNA, 32 nt, Human
cgcaguggcucacgccuguaaucccaacaccu

SEQ ID NO: 385881 - RNA, 32 nt, Human
cgcaguggcucacgccuguaaucccaacacuu

SEQ ID NO: 385882 - RNA, 32 nt, Human
cgcaguggcucacgccuguaaucccaacauuu

SEQ ID NO: 385883 - RNA, 32 nt, Human
cgcaguggcucacgccuguaaucccagcacug

SEQ ID NO: 385884 - RNA, 32 nt, Human
cgcaguggcucacgccuguaaucccagcacuu

SEQ ID NO: 385885 - RNA, 32 nt, Human
cgcaguggcucacgccuguaaucccagcccuu

SEQ ID NO: 385886 - RNA, 32 nt, Human
cgcaguggcucacgccuguaaucccagcgcuu

SEQ ID NO: 385887 - RNA, 32 nt, Human
cgcaguggcucacgccuguaaucccggcacug

SEQ ID NO: 385888 - RNA, 32 nt, Human
cgcaguggcucacgccuguaaucccgguauuu

SEQ ID NO: 385889 - RNA, 32 nt, Human
cgcaguggcucacgccuguaauuccagcacuu

SEQ ID NO: 385890 - RNA, 32 nt, Human
cgcaguggcucacgccuguaauuccagcaugu

SEQ ID NO: 385891 - RNA, 32 nt, Human
cgcaguggcucacgcuuguaaucccagcacuu

SEQ ID NO: 385892 - RNA, 32 nt, Human
cgcaguggcucacuccuguaaucccagcacuu

SEQ ID NO: 385893 - RNA, 32 nt, Human
cgcaguggcucaugcccauaaucccagcacuu

SEQ ID NO: 385894 - RNA, 32 nt, Human
cgcaguggcucaugccuauaaucccagcacuu

SEQ ID NO: 385895 - RNA, 32 nt, Human
cgcaguggcucaugccuggaaucccagcacuu

SEQ ID NO: 385896 - RNA, 32 nt, Human
cgcaguggcucaugccuguaaucccagaacuu

SEQ ID NO: 385897 - RNA, 32 nt, Human
cgcaguggcucaugccuguaaucccagcacuc

SEQ ID NO: 385898 - RNA, 32 nt, Human
cgcaguggcucaugccuguaaucccagcacuu

SEQ ID NO: 385899 - RNA, 32 nt, Human
cgcaguggcucaugccuguaaucccagcauuu

SEQ ID NO: 385900 - RNA, 32 nt, Human
cgcaguggcucaugccuguaaucccaggacuu

SEQ ID NO: 385901 - RNA, 32 nt, Human
cgcaguggcucaugccuguaauccuagcacuu

SEQ ID NO: 385902 - RNA, 32 nt, Human
cgcaguggcucaugccuguaaucguagcacuu

SEQ ID NO: 385903 - RNA, 32 nt, Human
cgcaguggcucaugccuguaaucucaguacuu

SEQ ID NO: 385904 - RNA, 32 nt, Human
cgcaguggcucaugccuguaauuccagcacuu

SEQ ID NO: 385905 - RNA, 32 nt, Human
cgcaguggcucaugccuguaauuucaguacuu

SEQ ID NO: 385906 - RNA, 32 nt, Human
cgcaguggcucaugcuuguaaucccagcacuu

SEQ ID NO: 385907 - RNA, 32 nt, Human
cgcaguggcucaugcuuguaauccuagcacuu

SEQ ID NO: 385908 - RNA, 32 nt, Human
cgcaguggcucauguguguaaucccagcacuc

SEQ ID NO: 385909 - RNA, 32 nt, Human
cgcaguggcucccaccuguaaucucagcccuu

SEQ ID NO: 385910 - RNA, 32 nt, Human
cgcaguggcucuugccuguaaucccagcacuu

SEQ ID NO: 385911 - RNA, 32 nt, Human
cgcaguggcugaugccuguaaucccagcacuu

SEQ ID NO: 385912 - RNA, 32 nt, Human
cgcaguggcuguaaucccagcacuuugggagg

SEQ ID NO: 385913 - RNA, 32 nt, Human
cgcaguggcuuacaccuguaaccccagcacuu

SEQ ID NO: 385914 - RNA, 32 nt, Human
cgcaguggcuuacaccuguaaucccaguacuu

SEQ ID NO: 385915 - RNA, 32 nt, Human
cgcaguggcuuacaccuguaaucgcagcauuu

SEQ ID NO: 385916 - RNA, 32 nt, Human
cgcaguggcuuacgccuguaaucccagcacuu

SEQ ID NO: 385917 - RNA, 32 nt, Human
cgcaguggcuuaugccuguaaucccagcacuu

SEQ ID NO: 385918 - RNA, 32 nt, Human
cgcagugggcccacccuuucccuugcuauggc

SEQ ID NO: 385919 - RNA, 32 nt, Human
cgcagugggcuacaaacuuucgcagcgcgagu

SEQ ID NO: 385920 - RNA, 32 nt, Human
cgcaguggggucuucccgcugcccagcagccu

SEQ ID NO: 385921 - RNA, 32 nt, Human
cgcagugggguggagggggcagggcgugguga

SEQ ID NO: 385922 - RNA, 20 nt, Human
cgcaguggugaugacccuca

SEQ ID NO: 385923 - RNA, 32 nt, Human
cgcaguggugcgcaccuguaaucccagcuacu

SEQ ID NO: 385924 - RNA, 32 nt, Human
cgcagugguucaugccaguaaucccagcacuu

SEQ ID NO: 385925 - RNA, 32 nt, Human
cgcagugguucaugucuguaaucccagcacuu

SEQ ID NO: 385926 - RNA, 32 nt, Human
cgcagugucagcaacgcccuguccucagugcc

SEQ ID NO: 385927 - RNA, 32 nt, Human
cgcaguguggaugccacuggccuaguguccug

SEQ ID NO: 385928 - RNA, 32 nt, Human
cgcaguguugcccaggcuggucucgaacuccu

SEQ ID NO: 385929 - RNA, 23 nt, Human
cgcaguucccaggcgucugcggg

SEQ ID NO: 385930 - RNA, 32 nt, Human
cgcaguuugcuucauagcucugugaagcagcu

SEQ ID NO: 385931 - RNA, 32 nt, Human
cgcaguuugucguguuuccaaaccaguugugc

SEQ ID NO: 385932 - RNA, 32 nt, Human
cgcauaaaaaccauuaagaugucuucugggga

SEQ ID NO: 385933 - RNA, 32 nt, Human
cgcauaacucuagcuguaucauccucucaccu

SEQ ID NO: 385934 - RNA, 32 nt, Human
cgcauaaggaagggaguggagcuauguugacu

SEQ ID NO: 385935 - RNA, 32 nt, Human
cgcauaccuguaaucccagcuacuugggaggc

SEQ ID NO: 385936 - RNA, 32 nt, Human
cgcauacugccuggaaccagacuguuugcuua

SEQ ID NO: 385937 - RNA, 32 nt, Human
cgcauagaggagagaaggaaaccugaggagua

SEQ ID NO: 385938 - RNA, 32 nt, Human
cgcauaucuggcagauggugcaggaagaaacc

SEQ ID NO: 385939 - RNA, 32 nt, Human
cgcauaugagugugugugcgugugaacggcuu

SEQ ID NO: 385940 - RNA, 32 nt, Human
cgcauaugcaugccaggcugggcacggcuccg

SEQ ID NO: 385941 - RNA, 32 nt, Human
cgcauaugcuccagaggagccacucgggacaa

SEQ ID NO: 385942 - RNA, 32 nt, Human
cgcauauggaguagaugcucaccagaggcugg

SEQ ID NO: 385943 - RNA, 32 nt, Human
cgcaucacugcaguccagccuggaugacagag

SEQ ID NO: 385944 - RNA, 32 nt, Human
cgcaucauugcacucuagccugggccacaggg

SEQ ID NO: 385945 - RNA, 32 nt, Human
cgcauccagagcagcgacgaccggcgcaugac

SEQ ID NO: 385946 - RNA, 32 nt, Human
cgcauccagccagcccagcccugugaaagaug

SEQ ID NO: 385947 - RNA, 32 nt, Human
cgcauccauguucgacaccacaccccacucug

SEQ ID NO: 385948 - RNA, 32 nt, Human
cgcaucccccaacagcagccccugccaguccc

SEQ ID NO: 385949 - RNA, 32 nt, Human
cgcaucccgugcaacuuugggguaguggccgc

SEQ ID NO: 385950 - RNA, 32 nt, Human
cgcauccucccuuccuccuuucggagaacugu

SEQ ID NO: 385951 - RNA, 32 nt, Human
cgcauccucuuccauccccaggcacagaucaa

SEQ ID NO: 385952 - RNA, 32 nt, Human
cgcauccugcagcccaugcuugaugccagcaa

SEQ ID NO: 385953 - RNA, 32 nt, Human
cgcauccugcgugccuccuccuucucccgcuc

SEQ ID NO: 385954 - RNA, 32 nt, Human
cgcauccuuguucuccccuggguccguaacau

SEQ ID NO: 385955 - RNA, 32 nt, Human
cgcauccuuugcaggugaaggaauggcaugga

SEQ ID NO: 385956 - RNA, 32 nt, Human
cgcaucgaaguaacaugcaaccaugguacaaa

SEQ ID NO: 385957 - RNA, 20 nt, Human
cgcaucgcagcggccgggca

SEQ ID NO: 385958 - RNA, 32 nt, Human
cgcaucgcauucccuccucuccaucuugaugc

SEQ ID NO: 385959 - RNA, 32 nt, Human
cgcaucgguggaagaacugaauuucaggaugc

SEQ ID NO: 385960 - RNA, 32 nt, Human
cgcaucguggaaguggccgugcaccaagugga

SEQ ID NO: 385961 - RNA, 32 nt, Human
cgcaucguggugcuggaggccgugagcgggcu

SEQ ID NO: 385962 - RNA, 31 nt, Human
cgcaucuacuaaaauacaaaaauuagccggg

SEQ ID NO: 385963 - RNA, 32 nt, Human
cgcaucucagccaccuuccucaggcucacucc

SEQ ID NO: 385964 - RNA, 32 nt, Human
cgcaucucagcccucucaggagcagucuucca

SEQ ID NO: 385965 - RNA, 32 nt, Human
cgcaucucucagacucacucugccaggcuaca

SEQ ID NO: 385966 - RNA, 32 nt, Human
cgcaucucuuuuccaggcaccccaccaugggc

SEQ ID NO: 385967 - RNA, 32 nt, Human
cgcaucuguagucccagcuacucaggaggcug

SEQ ID NO: 385968 - RNA, 32 nt, Human
cgcaucuguaguuccagcuauacaggaaggug

SEQ ID NO: 385969 - RNA, 32 nt, Human
cgcaucuguggucccagcuacucgggagacuc

SEQ ID NO: 385970 - RNA, 32 nt, Human
cgcaucuuccacccucgccgccgccgcagcuc

SEQ ID NO: 385971 - RNA, 32 nt, Human
cgcaucuucucagcagcuucugaccacugcuc

SEQ ID NO: 385972 - RNA, 28 nt, Human
cgcaugaaaaguucccuacugaaggaac

SEQ ID NO: 385973 - RNA, 32 nt, Human
cgcaugaacccgcccaaguucagcaaggccga

SEQ ID NO: 385974 - RNA, 31 nt, Human
cgcaugaauuacugaauauuuuacugugcuu

SEQ ID NO: 385975 - RNA, 32 nt, Human
cgcaugcacacacgugcgcacgcacacacaca

SEQ ID NO: 385976 - RNA, 32 nt, Human
cgcaugcaccuggccggccaccugccacuggg

SEQ ID NO: 385977 - RNA, 32 nt, Human
cgcaugcacugcacuucuucguuuucuucuug

SEQ ID NO: 385978 - RNA, 32 nt, Human
cgcaugcacugcacuucuuuguuuucuucuug

SEQ ID NO: 385979 - RNA, 32 nt, Human
cgcaugccacugcacuccagccugggcgacag

SEQ ID NO: 385980 - RNA, 32 nt, Human
cgcaugcccuccugcaguugcuggauggauag

SEQ ID NO: 385981 - RNA, 32 nt, Human
cgcaugcccuuccacucugccucccaggacag

SEQ ID NO: 385982 - RNA, 32 nt, Human
cgcaugccugcccgcccgccagccugccgggu

SEQ ID NO: 385983 - RNA, 32 nt, Human
cgcaugccuguaaucccagaacuuugggaggc

SEQ ID NO: 385984 - RNA, 32 nt, Human
cgcaugccuguaaucccagcacuuugggaggc

SEQ ID NO: 385985 - RNA, 32 nt, Human
cgcaugccuguaaucccagcuacugggaaggc

SEQ ID NO: 385986 - RNA, 32 nt, Human
cgcaugccuguaaucccagcuacuuaggaggc

SEQ ID NO: 385987 - RNA, 32 nt, Human
cgcaugccuguaaucccagcuacuugggagac

SEQ ID NO: 385988 - RNA, 32 nt, Human
cgcaugccuguaaucccagcuacuugggagcc

SEQ ID NO: 385989 - RNA, 32 nt, Human
cgcaugccuguaaucccagcuacuugggaggc

SEQ ID NO: 385990 - RNA, 32 nt, Human
cgcaugccuguaaucccagcuacuuggguggc

SEQ ID NO: 385991 - RNA, 32 nt, Human
cgcaugccuguaaucccagcugcuugggaggc

SEQ ID NO: 385992 - RNA, 32 nt, Human
cgcaugccuguaauccuagcuacucaggaggc

SEQ ID NO: 385993 - RNA, 32 nt, Human
cgcaugccuguaauccuagcuacucgggaggc

SEQ ID NO: 385994 - RNA, 32 nt, Human
cgcaugccuguaauccuagcuauucgggaggc

SEQ ID NO: 385995 - RNA, 32 nt, Human
cgcaugccuuuccacggauucccucauuaaaa

SEQ ID NO: 385996 - RNA, 32 nt, Human
cgcaugcggaagcucaaguacaagcaccuggc

SEQ ID NO: 385997 - RNA, 32 nt, Human
cgcaugcuacugcacuccagccugggagacag

SEQ ID NO: 385998 - RNA, 32 nt, Human
cgcaugcugcagcugcucccgggugcccccgc

SEQ ID NO: 385999 - RNA, 21 nt, Human
cgcaugcugggcgcccgggug

SEQ ID NO: 386000 - RNA, 32 nt, Human
cgcaugcuuguaaucccagcuacucgggaggc

SEQ ID NO: 386001 - RNA, 21 nt, Human
cgcauggaaaacccagaggaa

SEQ ID NO: 386002 - RNA, 28 nt, Human
cgcauggagccagaggaggaggaugaac

SEQ ID NO: 386003 - RNA, 32 nt, Human
cgcauggaggcagugggcuggcagcuuccugc

SEQ ID NO: 386004 - RNA, 32 nt, Human
cgcauggcgagcgccucccacgcccauccgua

SEQ ID NO: 386005 - RNA, 26 nt, Human
cgcauggcuaaucuuuuuguguuuuu

SEQ ID NO: 386006 - RNA, 32 nt, Human
cgcauggcuguaauccuggcuacucaggaggc

SEQ ID NO: 386007 - RNA, 32 nt, Human
cgcaugggagugaagacaguagaaggggaaga

SEQ ID NO: 386008 - RNA, 32 nt, Human
cgcaugggcugggggccagggauaauggacag

SEQ ID NO: 386009 - RNA, 32 nt, Human
cgcaugggugugagccagcuugagaacacuaa

SEQ ID NO: 386010 - RNA, 32 nt, Human
cgcaugguagcuggagcagcaaacaacugcuu

SEQ ID NO: 386011 - RNA, 32 nt, Human
cgcauggucucuucaccgcugcccucgaguuc

SEQ ID NO: 386012 - RNA, 32 nt, Human
cgcauguaccagaaucucacauggaccccaua

SEQ ID NO: 386013 - RNA, 32 nt, Human
cgcauguccauggcgagucagguggggagcac

SEQ ID NO: 386014 - RNA, 32 nt, Human
cgcaugucccccagggcagguuagggggcugg

SEQ ID NO: 386015 - RNA, 32 nt, Human
cgcaugucugcaccuccgcuugccagaggccc

SEQ ID NO: 386016 - RNA, 32 nt, Human
cgcaugucuguaaucccagcuacuggggaagc

SEQ ID NO: 386017 - RNA, 32 nt, Human
cgcaugucuguaaucccagcuacuggggaggc

SEQ ID NO: 386018 - RNA, 32 nt, Human
cgcaugugcaccacagagugcacucgagggga

SEQ ID NO: 386019 - RNA, 32 nt, Human
cgcaugugcgcgcacacaccacacaugcacac

SEQ ID NO: 386020 - RNA, 32 nt, Human
cgcaugugcuguucccucugccuagaacacuc

SEQ ID NO: 386021 - RNA, 32 nt, Human
cgcauguggcccaggauggcuuuaaguacagc

SEQ ID NO: 386022 - RNA, 32 nt, Human
cgcauguggugucugagcagggcccgagaccu

SEQ ID NO: 386023 - RNA, 32 nt, Human
cgcauguguggacaucaguaggcaaguaacca

SEQ ID NO: 386024 - RNA, 32 nt, Human
cgcauguucaaacccaaaggcucuuuucagag

SEQ ID NO: 386025 - RNA, 32 nt, Human
cgcauuaccgcaugagcucugccuccugucag

SEQ ID NO: 386026 - RNA, 32 nt, Human
cgcauuacugcacuccagccuggguaacagag

SEQ ID NO: 386027 - RNA, 32 nt, Human
cgcauuagcauuagcagcaccuaaguccucau

SEQ ID NO: 386028 - RNA, 32 nt, Human
cgcauucccacacuccagucuggauccagguc

SEQ ID NO: 386029 - RNA, 32 nt, Human
cgcauucuagguagaggagacagccuggacaa

SEQ ID NO: 386030 - RNA, 32 nt, Human
cgcauucucuacuggacucuggccugcuugga

SEQ ID NO: 386031 - RNA, 32 nt, Human
cgcauucugcucccacagugccuuuuccagaa

SEQ ID NO: 386032 - RNA, 32 nt, Human
cgcauugaagcaggaacaaauugccucuuuuu

SEQ ID NO: 386033 - RNA, 32 nt, Human
cgcauuggcucaugucuguaaucccagcacuu

SEQ ID NO: 386034 - RNA, 32 nt, Human
cgcauuuauauaacauucuugaggugacaaaa

SEQ ID NO: 386035 - RNA, 28 nt, Human
cgcauuucaagugcuggauccuuuuugu

SEQ ID NO: 386036 - RNA, 24 nt, Human
cgcauuucacagacugcuuuuuca

SEQ ID NO: 386037 - RNA, 32 nt, Human
cgcauuucuguguuuucagccacccagucugu

SEQ ID NO: 386038 - RNA, 32 nt, Human
cgcauuugagccuuguucuggggcccagccca

SEQ ID NO: 386039 - RNA, 32 nt, Human
cgcauuuucaauaaaaugucucuaauacaaua

SEQ ID NO: 386040 - RNA, 32 nt, Human
cgccaaacacugcagcaucuuccccagcguug

SEQ ID NO: 386041 - RNA, 32 nt, Human
cgccaaagcagcugccauggacucuggccugu

SEQ ID NO: 386042 - RNA, 32 nt, Human
cgccaaaggaaaagccccuuggaugagaggca

SEQ ID NO: 386043 - RNA, 32 nt, Human
cgccaacagagcugugcccugaggacccggcc

SEQ ID NO: 386044 - RNA, 32 nt, Human
cgccaacaggcaucugccaugcuggcaucucu

SEQ ID NO: 386045 - RNA, 32 nt, Human
cgccaacagggugaaaccccaccucuauuaaa

SEQ ID NO: 386046 - RNA, 25 nt, Human
cgccaacaguccaggucacacagca

SEQ ID NO: 386047 - RNA, 32 nt, Human
cgccaacauccuccuccacaggcaguggcagg

SEQ ID NO: 386048 - RNA, 32 nt, Human
cgccaacauggcgaaaccccaucucuacuaaa

SEQ ID NO: 386049 - RNA, 32 nt, Human
cgccaacauggugaaaccccaucucuacuaaa

SEQ ID NO: 386050 - RNA, 32 nt, Human
cgccaacauggugaaaccguaucucuaauaaa

SEQ ID NO: 386051 - RNA, 32 nt, Human
cgccaacauggugagacccugucucuacuaaa

SEQ ID NO: 386052 - RNA, 32 nt, Human
cgccaacccacacuugccccagacagagcugg

SEQ ID NO: 386053 - RNA, 32 nt, Human
cgccaacccugccugccgcugcaccugccugc

SEQ ID NO: 386054 - RNA, 32 nt, Human
cgccaacggccuggccuucccugccggcccgc

SEQ ID NO: 386055 - RNA, 32 nt, Human
cgccaacugcagccgggcugaggccgagagca

SEQ ID NO: 386056 - RNA, 32 nt, Human
cgccaacugcagcuccuggccuugugcggagg

SEQ ID NO: 386057 - RNA, 32 nt, Human
cgccaacugcauuuaaaacaaaacaaaacaga

SEQ ID NO: 386058 - RNA, 32 nt, Human
cgccaagaacaaggugcuaggcaucuguuuuu

SEQ ID NO: 386059 - RNA, 32 nt, Human
cgccaagaugcccgagagcgcuuggaaguuuc

SEQ ID NO: 386060 - RNA, 32 nt, Human
cgccaagcaucuguccccuccucccccggccg

SEQ ID NO: 386061 - RNA, 32 nt, Human
cgccaagcggcugggcccaggcuguggcauga

SEQ ID NO: 386062 - RNA, 32 nt, Human
cgccaagcuuugagagaaggcugugacugcug

SEQ ID NO: 386063 - RNA, 32 nt, Human
cgccaaggccacuccucgcucucuaggccgag

SEQ ID NO: 386064 - RNA, 32 nt, Human
cgccaaggccgacggcccucagccucugccau

SEQ ID NO: 386065 - RNA, 32 nt, Human
cgccaaggcgccuccuuccugggcauccugga

SEQ ID NO: 386066 - RNA, 32 nt, Human
cgccaaggcugcagggagcaccaccaggagcc

SEQ ID NO: 386067 - RNA, 21 nt, Human
cgccaaggcuggagugcagug

SEQ ID NO: 386068 - RNA, 32 nt, Human
cgccaagggguucgugcgcuguggagacgcgg

SEQ ID NO: 386069 - RNA, 32 nt, Human
cgccaaggucaccuagaaauucgugucaccgc

SEQ ID NO: 386070 - RNA, 32 nt, Human
cgccaagguuuucucucccagaacccacagug

SEQ ID NO: 386071 - RNA, 32 nt, Human
cgccaagucauccucccaccucagccuccuga

SEQ ID NO: 386072 - RNA, 32 nt, Human
cgccaagugagugaggaggaggaggaggagaa

SEQ ID NO: 386073 - RNA, 32 nt, Human
cgccaaguugggggcccaggaggcggggaggg

SEQ ID NO: 386074 - RNA, 32 nt, Human
cgccaaucaauacuuggggcucuaaguuuuac

SEQ ID NO: 386075 - RNA, 32 nt, Human
cgccaaucacgagacugggggaccggccgggc

SEQ ID NO: 386076 - RNA, 32 nt, Human
cgccaaugcacuccagccugggcgacagagaa

SEQ ID NO: 386077 - RNA, 32 nt, Human
cgccacacacaaccucuccacaugccucagcg

SEQ ID NO: 386078 - RNA, 32 nt, Human
cgccacacacggcuaauuuuguauuuuuagug

SEQ ID NO: 386079 - RNA, 32 nt, Human
cgccacaccacuguuugugcuggaucgcagcg

SEQ ID NO: 386080 - RNA, 24 nt, Human
cgccacacccacgaggcggugcug

SEQ ID NO: 386081 - RNA, 32 nt, Human
cgccacacccagcuaauuuuguauuuuuagua

SEQ ID NO: 386082 - RNA, 22 nt, Human
cgccacaccccgcgcucaacug

SEQ ID NO: 386083 - RNA, 32 nt, Human
cgccacacccggcuaauuuuuaguauuuuuag

SEQ ID NO: 386084 - RNA, 32 nt, Human
cgccacacugcuggcugcuguagugcugggug

SEQ ID NO: 386085 - RNA, 32 nt, Human
cgccacacugucuuccacaaugguugaacuaa

SEQ ID NO: 386086 - RNA, 32 nt, Human
cgccacagcacccaccaccugccgccuucaga

SEQ ID NO: 386087 - RNA, 32 nt, Human
cgccacagcacuccagccugggcgacagagug

SEQ ID NO: 386088 - RNA, 32 nt, Human
cgccacagcauuccagccugggcgauggagug

SEQ ID NO: 386089 - RNA, 32 nt, Human
cgccacagccaaccugcccagucuuuccucug

SEQ ID NO: 386090 - RNA, 32 nt, Human
cgccacagccgccgccuccaccaccaccaccg

SEQ ID NO: 386091 - RNA, 32 nt, Human
cgccacagccgccgccuccacccccggcccca

SEQ ID NO: 386092 - RNA, 32 nt, Human
cgccacagccucccaaaguucugggauuacaa

SEQ ID NO: 386093 - RNA, 32 nt, Human
cgccacagccucucgggagacgugggcccucg

SEQ ID NO: 386094 - RNA, 32 nt, Human
cgccacagcuacuaccugacacugagcucaug

SEQ ID NO: 386095 - RNA, 32 nt, Human
cgccacauccaccccugucugcacaugaguug

SEQ ID NO: 386096 - RNA, 32 nt, Human
cgccacaucccccaauccaucagugccaaacu

SEQ ID NO: 386097 - RNA, 32 nt, Human
cgccacaucgcggcccuccagccuggccuaac

SEQ ID NO: 386098 - RNA, 32 nt, Human
cgccacaucugcagugccgcacacagacagga

SEQ ID NO: 386099 - RNA, 32 nt, Human
cgccaccacacuccagccugggcaacagagac

SEQ ID NO: 386100 - RNA, 32 nt, Human
cgccaccaccaccaccacccacugccugcagc

SEQ ID NO: 386101 - RNA, 18 nt, Human
cgccaccaccccacccca

SEQ ID NO: 386102 - RNA, 19 nt, Human
cgccaccaccccagccccc

SEQ ID NO: 386103 - RNA, 32 nt, Human
cgccaccaccgccaccaccaccaccaucauca

SEQ ID NO: 386104 - RNA, 32 nt, Human
cgccaccaccgcgccuccgccucggccgccgc

SEQ ID NO: 386105 - RNA, 32 nt, Human
cgccaccacucaggggcucuggaggggucagc

SEQ ID NO: 386106 - RNA, 32 nt, Human
cgccaccacugcacuccagccugggcaacaga

SEQ ID NO: 386107 - RNA, 32 nt, Human
cgccaccacugccaccacggucgccugccaca

SEQ ID NO: 386108 - RNA, 32 nt, Human
cgccaccagcccagagagcaucggccccuguc

SEQ ID NO: 386109 - RNA, 32 nt, Human
cgccaccagcggccuccgccgccccggaagcc

SEQ ID NO: 386110 - RNA, 32 nt, Human
cgccaccagcucccagccuccugcucagaccc

SEQ ID NO: 386111 - RNA, 32 nt, Human
cgccaccaugaagaaauucuuucaggaguuca

SEQ ID NO: 386112 - RNA, 32 nt, Human
cgccaccaugaccaccaccauccaccaguuca

SEQ ID NO: 386113 - RNA, 32 nt, Human
cgccaccaugcccagcuaauuguauuuuagua

SEQ ID NO: 386114 - RNA, 32 nt, Human
cgccaccauggugcuggagucgguggucgcgg

SEQ ID NO: 386115 - RNA, 32 nt, Human
cgccacccaagugccaagacacagcagggcca

SEQ ID NO: 386116 - RNA, 32 nt, Human
cgccacccagcuguuuuugugcucacaagcuc

SEQ ID NO: 386117 - RNA, 32 nt, Human
cgccaccccagaggggugccagaugccccagu

SEQ ID NO: 386118 - RNA, 32 nt, Human
cgccaccccaggccagcuuccacagcagcugu

SEQ ID NO: 386119 - RNA, 32 nt, Human
cgccacccccucccccugucucccucucugaa

SEQ ID NO: 386120 - RNA, 32 nt, Human
cgccaccccuggcaggcguauccuucagcagg

SEQ ID NO: 386121 - RNA, 32 nt, Human
cgccacccgcagccacagccacagccacagcc

SEQ ID NO: 386122 - RNA, 19 nt, Human
cgccacccgcccacuggcc

SEQ ID NO: 386123 - RNA, 24 nt, Human
cgccacccgccccccaccacccca

SEQ ID NO: 386124 - RNA, 32 nt, Human
cgccacccuaucuccagcugccuuuaaagggu

SEQ ID NO: 386125 - RNA, 18 nt, Human
cgccacccucagcagcca

SEQ ID NO: 386126 - RNA, 32 nt, Human
cgccacccuccacccuucuccccagcgugcug

SEQ ID NO: 386127 - RNA, 32 nt, Human
cgccacccucuguuuucccucacucgccagcc

SEQ ID NO: 386128 - RNA, 32 nt, Human
cgccaccgcacuccagccucgccgacaaagcg

SEQ ID NO: 386129 - RNA, 32 nt, Human
cgccaccgcacuccagccugggcgacagagcg

SEQ ID NO: 386130 - RNA, 32 nt, Human
cgccaccgcauuccagccugggcgacagagca

SEQ ID NO: 386131 - RNA, 32 nt, Human
cgccaccgccaccaccaccuccaccgccgccu

SEQ ID NO: 386132 - RNA, 32 nt, Human
cgccaccgcccuccagccugggcgacagagca

SEQ ID NO: 386133 - RNA, 32 nt, Human
cgccaccgcgcuccagccugggugacagagcg

SEQ ID NO: 386134 - RNA, 32 nt, Human
cgccaccgcugccucuuuccggcugugacccu

SEQ ID NO: 386135 - RNA, 18 nt, Human
cgccaccggaucugcucu

SEQ ID NO: 386136 - RNA, 32 nt, Human
cgccaccgggcugacuuccaccucccaguggu

SEQ ID NO: 386137 - RNA, 32 nt, Human
cgccaccguggcugcccugcccugcaggguga

SEQ ID NO: 386138 - RNA, 32 nt, Human
cgccaccuccaccccuguugugaccuguccuu

SEQ ID NO: 386139 - RNA, 32 nt, Human
cgccaccucccgcucgugcccagcacaaguga

SEQ ID NO: 386140 - RNA, 31 nt, Human
cgccaccuccucucugagccugucucccacu

SEQ ID NO: 386141 - RNA, 32 nt, Human
cgccaccucgugggccucaucgagcgcagccg

SEQ ID NO: 386142 - RNA, 32 nt, Human
cgccaccucugcuacuuccugccugugucacc

SEQ ID NO: 386143 - RNA, 32 nt, Human
cgccaccugccugucaccucgucuucugugga

SEQ ID NO: 386144 - RNA, 32 nt, Human
cgccaccuggacagcgugaccucagggguugu

SEQ ID NO: 386145 - RNA, 21 nt, Human
cgccaccuggccccaccccca

SEQ ID NO: 386146 - RNA, 32 nt, Human
cgccaccuucaacugcagcaccggcuccuacc

SEQ ID NO: 386147 - RNA, 32 nt, Human
cgccaccuuccaccccugcgcugugcugaccc

SEQ ID NO: 386148 - RNA, 32 nt, Human
cgccaccuucuccuggaaggugagccuuuucc

SEQ ID NO: 386149 - RNA, 25 nt, Human
cgccacgagguggaaagggcuccug

SEQ ID NO: 386150 - RNA, 32 nt, Human
cgccacgcccagggccaggagccagacaaacc

SEQ ID NO: 386151 - RNA, 32 nt, Human
cgccacgcccggcuaauuuuuauauuuuuagu

SEQ ID NO: 386152 - RNA, 32 nt, Human
cgccacgcccggcuaauuuuuguauuuuuagu

SEQ ID NO: 386153 - RNA, 32 nt, Human
cgccacggagggcuggggaugcgccugcgucc

SEQ ID NO: 386154 - RNA, 32 nt, Human
cgccacggcacuccagccugggcgacagagca

SEQ ID NO: 386155 - RNA, 32 nt, Human
cgccacggccacaagcccuggcauccccugca

SEQ ID NO: 386156 - RNA, 32 nt, Human
cgccacggccgcaagcccuggcauccccugca

SEQ ID NO: 386157 - RNA, 32 nt, Human
cgccacggggacugcagugaccccggcuugcc

SEQ ID NO: 386158 - RNA, 32 nt, Human
cgccacguccuuggccagcuuaauggccuucc

SEQ ID NO: 386159 - RNA, 32 nt, Human
cgccacgucgggcuccucagccccaggggaaa

SEQ ID NO: 386160 - RNA, 32 nt, Human
cgccacuacacuccagccugagcaacagagug

SEQ ID NO: 386161 - RNA, 32 nt, Human
cgccacuacacuccagccugggcaacagaggg

SEQ ID NO: 386162 - RNA, 32 nt, Human
cgccacuacacuccagccugggcgacagagca

SEQ ID NO: 386163 - RNA, 32 nt, Human
cgccacuacacuccagccugggcgacagagcg

SEQ ID NO: 386164 - RNA, 32 nt, Human
cgccacuacacuccagccugggugacagagug

SEQ ID NO: 386165 - RNA, 19 nt, Human
cgccacuagaccacgcucc

SEQ ID NO: 386166 - RNA, 32 nt, Human
cgccacuauacuccagccugggcaacagacau

SEQ ID NO: 386167 - RNA, 25 nt, Human
cgccacuauuuccaggcucugcggg

SEQ ID NO: 386168 - RNA, 32 nt, Human
cgccacucacugccuccuuccuccugguguug

SEQ ID NO: 386169 - RNA, 32 nt, Human
cgccacucccaccacacccacacccccuucug

SEQ ID NO: 386170 - RNA, 32 nt, Human
cgccacugaacuccagccugggagacagcaag

SEQ ID NO: 386171 - RNA, 32 nt, Human
cgccacugaacuccagccugggugacagagug

SEQ ID NO: 386172 - RNA, 32 nt, Human
cgccacugcaaaccagccugggcaauagagug

SEQ ID NO: 386173 - RNA, 32 nt, Human
cgccacugcaacccagccugggugacagagcg

SEQ ID NO: 386174 - RNA, 32 nt, Human
cgccacugcaacuccagcuugggugacagagu

SEQ ID NO: 386175 - RNA, 32 nt, Human
cgccacugcacaccagccugggugacagugug

SEQ ID NO: 386176 - RNA, 32 nt, Human
cgccacugcaccccagccugggcgacagagca

SEQ ID NO: 386177 - RNA, 32 nt, Human
cgccacugcaccccagccugggugacagagcg

SEQ ID NO: 386178 - RNA, 32 nt, Human
cgccacugcacgccagccugggcgacagagcg

SEQ ID NO: 386179 - RNA, 32 nt, Human
cgccacugcacuaaugucuggugacagaguug

SEQ ID NO: 386180 - RNA, 32 nt, Human
cgccacugcacuacagccuggacgacagagca

SEQ ID NO: 386181 - RNA, 32 nt, Human
cgccacugcacucaagccugggcaacaccugg

SEQ ID NO: 386182 - RNA, 32 nt, Human
cgccacugcacucaagccugggcgacagagcg

SEQ ID NO: 386183 - RNA, 32 nt, Human
cgccacugcacucaagucugggcgacagggug

SEQ ID NO: 386184 - RNA, 32 nt, Human
cgccacugcacuccaaccugggcaauagagga

SEQ ID NO: 386185 - RNA, 32 nt, Human
cgccacugcacuccaaccugggugacagacuc

SEQ ID NO: 386186 - RNA, 32 nt, Human
cgccacugcacuccaaccugggugacagagcg

SEQ ID NO: 386187 - RNA, 32 nt, Human
cgccacugcacuccaacuugggcaacagacag

SEQ ID NO: 386188 - RNA, 32 nt, Human
cgccacugcacuccacccugggugacagagug

SEQ ID NO: 386189 - RNA, 32 nt, Human
cgccacugcacuccaccugggcaacaagaacg

SEQ ID NO: 386190 - RNA, 32 nt, Human
cgccacugcacuccagacugggcgacagaguc

SEQ ID NO: 386191 - RNA, 32 nt, Human
cgccacugcacuccagcacccugggcgacaga

SEQ ID NO: 386192 - RNA, 32 nt, Human
cgccacugcacuccagcagucugggcgacaga

SEQ ID NO: 386193 - RNA, 32 nt, Human
cgccacugcacuccagcccaggugacagagcg

SEQ ID NO: 386194 - RNA, 32 nt, Human
cgccacugcacuccagcccgggcgacagagcg

SEQ ID NO: 386195 - RNA, 32 nt, Human
cgccacugcacuccagcccgggcgacaguuca

SEQ ID NO: 386196 - RNA, 32 nt, Human
cgccacugcacuccagcccgggcggcagaggg

SEQ ID NO: 386197 - RNA, 32 nt, Human
cgccacugcacuccagcccggggacagagcaa

SEQ ID NO: 386198 - RNA, 32 nt, Human
cgccacugcacuccagcccgggugacagagca

SEQ ID NO: 386199 - RNA, 32 nt, Human
cgccacugcacuccagcccgggugacagagcg

SEQ ID NO: 386200 - RNA, 32 nt, Human
cgccacugcacuccagccuagacgacagagca

SEQ ID NO: 386201 - RNA, 32 nt, Human
cgccacugcacuccagccuaggcaacagagca

SEQ ID NO: 386202 - RNA, 32 nt, Human
cgccacugcacuccagccuaggggacaguuag

SEQ ID NO: 386203 - RNA, 32 nt, Human
cgccacugcacuccagccuaggugacagaggg

SEQ ID NO: 386204 - RNA, 32 nt, Human
cgccacugcacuccagccuaggugauagagca

SEQ ID NO: 386205 - RNA, 32 nt, Human
cgccacugcacuccagccucggcaacagagca

SEQ ID NO: 386206 - RNA, 32 nt, Human
cgccacugcacuccagccucggugacagagca

SEQ ID NO: 386207 - RNA, 32 nt, Human
cgccacugcacuccagccugacgacaaagcga

SEQ ID NO: 386208 - RNA, 32 nt, Human
cgccacugcacuccagccugagugacagagcg

SEQ ID NO: 386209 - RNA, 32 nt, Human
cgccacugcacuccagccugcggacagaccaa

SEQ ID NO: 386210 - RNA, 32 nt, Human
cgccacugcacuccagccuggacgacagagcg

SEQ ID NO: 386211 - RNA, 32 nt, Human
cgccacugcacuccagccuggacgacagagug

SEQ ID NO: 386212 - RNA, 32 nt, Human
cgccacugcacuccagccuggaggccagagug

SEQ ID NO: 386213 - RNA, 32 nt, Human
cgccacugcacuccagccuggaugacagagcg

SEQ ID NO: 386214 - RNA, 32 nt, Human
cgccacugcacuccagccuggcaacagaguga

SEQ ID NO: 386215 - RNA, 32 nt, Human
cgccacugcacuccagccugggagaaagacuc

SEQ ID NO: 386216 - RNA, 32 nt, Human
cgccacugcacuccagccugggagacagagcc

SEQ ID NO: 386217 - RNA, 32 nt, Human
cgccacugcacuccagccugggagacagagcg

SEQ ID NO: 386218 - RNA, 32 nt, Human
cgccacugcacuccagccugggagacagagug

SEQ ID NO: 386219 - RNA, 32 nt, Human
cgccacugcacuccagccugggagacagaguu

SEQ ID NO: 386220 - RNA, 32 nt, Human
cgccacugcacuccagccugggcaacaagaac

SEQ ID NO: 386221 - RNA, 32 nt, Human
cgccacugcacuccagccugggcaacaagagc

SEQ ID NO: 386222 - RNA, 32 nt, Human
cgccacugcacuccagccugggcaacaagagu

SEQ ID NO: 386223 - RNA, 32 nt, Human
cgccacugcacuccagccugggcaacagaaca

SEQ ID NO: 386224 - RNA, 32 nt, Human
cgccacugcacuccagccugggcaacagagag

SEQ ID NO: 386225 - RNA, 32 nt, Human
cgccacugcacuccagccugggcaacagaggg

SEQ ID NO: 386226 - RNA, 32 nt, Human
cgccacugcacuccagccugggcaacagagug

SEQ ID NO: 386227 - RNA, 32 nt, Human
cgccacugcacuccagccugggcaacaggcuc

SEQ ID NO: 386228 - RNA, 32 nt, Human
cgccacugcacuccagccugggcaacagugag

SEQ ID NO: 386229 - RNA, 32 nt, Human
cgccacugcacuccagccugggcaacggauug

SEQ ID NO: 386230 - RNA, 32 nt, Human
cgccacugcacuccagccugggcaauagagug

SEQ ID NO: 386231 - RNA, 32 nt, Human
cgccacugcacuccagccugggcagcagagca

SEQ ID NO: 386232 - RNA, 32 nt, Human
cgccacugcacuccagccugggcagcagagga

SEQ ID NO: 386233 - RNA, 32 nt, Human
cgccacugcacuccagccugggcgacacagca

SEQ ID NO: 386234 - RNA, 29 nt, Human
cgccacugcacuccagccugggcgacaga

SEQ ID NO: 386235 - RNA, 32 nt, Human
cgccacugcacuccagccugggcgacagaaug

SEQ ID NO: 386236 - RNA, 32 nt, Human
cgccacugcacuccagccugggcgacagagag

SEQ ID NO: 386237 - RNA, 32 nt, Human
cgccacugcacuccagccugggcgacagagca

SEQ ID NO: 386238 - RNA, 32 nt, Human
cgccacugcacuccagccugggcgacagagcc

SEQ ID NO: 386239 - RNA, 32 nt, Human
cgccacugcacuccagccugggcgacagagcg

SEQ ID NO: 386240 - RNA, 32 nt, Human
cgccacugcacuccagccugggcgacagagcu

SEQ ID NO: 386241 - RNA, 32 nt, Human
cgccacugcacuccagccugggcgacagagug

SEQ ID NO: 386242 - RNA, 32 nt, Human
cgccacugcacuccagccugggcgacagcaag

SEQ ID NO: 386243 - RNA, 32 nt, Human
cgccacugcacuccagccugggcgacagcgag

SEQ ID NO: 386244 - RNA, 32 nt, Human
cgccacugcacuccagccugggcgacagggca

SEQ ID NO: 386245 - RNA, 32 nt, Human
cgccacugcacuccagccugggcgacagugag

SEQ ID NO: 386246 - RNA, 32 nt, Human
cgccacugcacuccagccugggcgacggagcg

SEQ ID NO: 386247 - RNA, 32 nt, Human
cgccacugcacuccagccugggcgagagaaug

SEQ ID NO: 386248 - RNA, 32 nt, Human
cgccacugcacuccagccugggcgauagagca

SEQ ID NO: 386249 - RNA, 32 nt, Human
cgccacugcacuccagccugggcgauggagcg

SEQ ID NO: 386250 - RNA, 32 nt, Human
cgccacugcacuccagccugggcgucagagug

SEQ ID NO: 386251 - RNA, 32 nt, Human
cgccacugcacuccagccugggcugcagggug

SEQ ID NO: 386252 - RNA, 32 nt, Human
cgccacugcacuccagccugggggacagagca

SEQ ID NO: 386253 - RNA, 32 nt, Human
cgccacugcacuccagccugggugacacagcg

SEQ ID NO: 386254 - RNA, 32 nt, Human
cgccacugcacuccagccugggugacagaaca

SEQ ID NO: 386255 - RNA, 32 nt, Human
cgccacugcacuccagccugggugacagaacg

SEQ ID NO: 386256 - RNA, 32 nt, Human
cgccacugcacuccagccugggugacagaaug

SEQ ID NO: 386257 - RNA, 32 nt, Human
cgccacugcacuccagccugggugacagagac

SEQ ID NO: 386258 - RNA, 32 nt, Human
cgccacugcacuccagccugggugacagagag

SEQ ID NO: 386259 - RNA, 32 nt, Human
cgccacugcacuccagccugggugacagagca

SEQ ID NO: 386260 - RNA, 32 nt, Human
cgccacugcacuccagccugggugacagagcc

SEQ ID NO: 386261 - RNA, 32 nt, Human
cgccacugcacuccagccugggugacagagcg

SEQ ID NO: 386262 - RNA, 32 nt, Human
cgccacugcacuccagccugggugacagaggg

SEQ ID NO: 386263 - RNA, 32 nt, Human
cgccacugcacuccagccugggugacagagug

SEQ ID NO: 386264 - RNA, 32 nt, Human
cgccacugcacuccagccugggugacagugag

SEQ ID NO: 386265 - RNA, 32 nt, Human
cgccacugcacuccagccugggugacggagcg

SEQ ID NO: 386266 - RNA, 32 nt, Human
cgccacugcacuccagccugggugacugaggg

SEQ ID NO: 386267 - RNA, 32 nt, Human
cgccacugcacuccagccugggugagagagug

SEQ ID NO: 386268 - RNA, 32 nt, Human
cgccacugcacuccagccugggugauagagcu

SEQ ID NO: 386269 - RNA, 32 nt, Human
cgccacugcacuccagccugggugauagagug

SEQ ID NO: 386270 - RNA, 32 nt, Human
cgccacugcacuccagccuggucaacagagug

SEQ ID NO: 386271 - RNA, 32 nt, Human
cgccacugcacuccagccuggugacagagcaa

SEQ ID NO: 386272 - RNA, 32 nt, Human
cgccacugcacuccagccuggugacagagcga

SEQ ID NO: 386273 - RNA, 32 nt, Human
cgccacugcacuccagccuggugacagcguga

SEQ ID NO: 386274 - RNA, 32 nt, Human
cgccacugcacuccagccugguugacagagca

SEQ ID NO: 386275 - RNA, 32 nt, Human
cgccacugcacuccagccuguugacaaagcaa

SEQ ID NO: 386276 - RNA, 32 nt, Human
cgccacugcacuccagcgugggcaacagagcg

SEQ ID NO: 386277 - RNA, 32 nt, Human
cgccacugcacuccagcuggagugacagagcc

SEQ ID NO: 386278 - RNA, 32 nt, Human
cgccacugcacuccagcuugggugacaaagua

SEQ ID NO: 386279 - RNA, 32 nt, Human
cgccacugcacuccaggccugggugacagugc

SEQ ID NO: 386280 - RNA, 32 nt, Human
cgccacugcacuccaggcugggcaacggagug

SEQ ID NO: 386281 - RNA, 32 nt, Human
cgccacugcacuccaggcugggcgacagagcg

SEQ ID NO: 386282 - RNA, 32 nt, Human
cgccacugcacuccaggcugggcgacagagug

SEQ ID NO: 386283 - RNA, 32 nt, Human
cgccacugcacuccagucugggcaacagagug

SEQ ID NO: 386284 - RNA, 32 nt, Human
cgccacugcacuccagucugggcgacagagcg

SEQ ID NO: 386285 - RNA, 32 nt, Human
cgccacugcacuccagucugggcgauagagcu

SEQ ID NO: 386286 - RNA, 32 nt, Human
cgccacugcacuccagucugggugacagagag

SEQ ID NO: 386287 - RNA, 32 nt, Human
cgccacugcacuccagucuggucggcaagagu

SEQ ID NO: 386288 - RNA, 32 nt, Human
cgccacugcacuccaguguaggcaacagagug

SEQ ID NO: 386289 - RNA, 32 nt, Human
cgccacugcacuccaguuugggcaacagaaug

SEQ ID NO: 386290 - RNA, 32 nt, Human
cgccacugcacuccauccagccugggugacag

SEQ ID NO: 386291 - RNA, 32 nt, Human
cgccacugcacuccggccugaugacagagcga

SEQ ID NO: 386292 - RNA, 32 nt, Human
cgccacugcacuccugccugggcaacugagca

SEQ ID NO: 386293 - RNA, 32 nt, Human
cgccacugcacucuagccggagugacagagua

SEQ ID NO: 386294 - RNA, 32 nt, Human
cgccacugcacucuagccugagugacagagca

SEQ ID NO: 386295 - RNA, 32 nt, Human
cgccacugcacucuagccugggauacagagcu

SEQ ID NO: 386296 - RNA, 32 nt, Human
cgccacugcacucuagccugggcaacaagagu

SEQ ID NO: 386297 - RNA, 32 nt, Human
cgccacugcacucuagccugggcaauaagagc

SEQ ID NO: 386298 - RNA, 32 nt, Human
cgccacugcacucuagccugggccauagagcg

SEQ ID NO: 386299 - RNA, 32 nt, Human
cgccacugcacucuagccugggcuacagagcg

SEQ ID NO: 386300 - RNA, 32 nt, Human
cgccacugcacucuagccugggugacagagca

SEQ ID NO: 386301 - RNA, 32 nt, Human
cgccacugcacucuagccugggugacagagug

SEQ ID NO: 386302 - RNA, 32 nt, Human
cgccacugcacucuagccugggugacagauaa

SEQ ID NO: 386303 - RNA, 32 nt, Human
cgccacugcacugcacgccagccuaggcgaca

SEQ ID NO: 386304 - RNA, 32 nt, Human
cgccacugcacuucagccuggaugacagagcg

SEQ ID NO: 386305 - RNA, 32 nt, Human
cgccacugcacuucagccugggugacagagcu

SEQ ID NO: 386306 - RNA, 32 nt, Human
cgccacugcaguccagccugggcaacaagagc

SEQ ID NO: 386307 - RNA, 32 nt, Human
cgccacugcaguccgcaguccagccugggcga

SEQ ID NO: 386308 - RNA, 32 nt, Human
cgccacugcaguccggccugggugaaagagcg

SEQ ID NO: 386309 - RNA, 32 nt, Human
cgccacugcauuacagccuggugcagagcaag

SEQ ID NO: 386310 - RNA, 32 nt, Human
cgccacugcauuccagccuggacgacagagcg

SEQ ID NO: 386311 - RNA, 32 nt, Human
cgccacugcauuccagccugggcgacagagca

SEQ ID NO: 386312 - RNA, 32 nt, Human
cgccacugcauuccagccugggugacugagcg

SEQ ID NO: 386313 - RNA, 32 nt, Human
cgccacugcauuccagccuggugacagagcga

SEQ ID NO: 386314 - RNA, 32 nt, Human
cgccacugcauucuagccuggaugacagagca

SEQ ID NO: 386315 - RNA, 32 nt, Human
cgccacugcauuguagccugggcaacagagca

SEQ ID NO: 386316 - RNA, 32 nt, Human
cgccacugccccuccuacucuccagggguugg

SEQ ID NO: 386317 - RNA, 32 nt, Human
cgccacugcccuccagccugggcgacagaaug

SEQ ID NO: 386318 - RNA, 32 nt, Human
cgccacugccuacaucuucucucuuccccauc

SEQ ID NO: 386319 - RNA, 32 nt, Human
cgccacugcgaugccgccacugggcgacagag

SEQ ID NO: 386320 - RNA, 32 nt, Human
cgccacugcgcuacagccugggcgacacagua

SEQ ID NO: 386321 - RNA, 32 nt, Human
cgccacugcgcuccagccugggcaacagagug

SEQ ID NO: 386322 - RNA, 32 nt, Human
cgccacugcgcuccagccugggcgaaagagug

SEQ ID NO: 386323 - RNA, 32 nt, Human
cgccacugcucuccagccuggguggcagagcg

SEQ ID NO: 386324 - RNA, 32 nt, Human
cgccacugcugccaccacuacagccccuccac

SEQ ID NO: 386325 - RNA, 32 nt, Human
cgccacuggacacaugaggaagaggcugcucu

SEQ ID NO: 386326 - RNA, 32 nt, Human
cgccacuggacuccagccuggacaacagagca

SEQ ID NO: 386327 - RNA, 32 nt, Human
cgccacuggaggagcagcaaauuuguaacaca

SEQ ID NO: 386328 - RNA, 32 nt, Human
cgccacugggcuccagccugggcgacagagug

SEQ ID NO: 386329 - RNA, 32 nt, Human
cgccacuguacuccagccuggacaacagcgag

SEQ ID NO: 386330 - RNA, 32 nt, Human
cgccacuguacuccagccuggaugacacagcg

SEQ ID NO: 386331 - RNA, 32 nt, Human
cgccacuguacuccagccuggcaacagaguga

SEQ ID NO: 386332 - RNA, 32 nt, Human
cgccacuguacuccagccugggagacacagug

SEQ ID NO: 386333 - RNA, 32 nt, Human
cgccacuguacuccagccugggugacagagcg

SEQ ID NO: 386334 - RNA, 32 nt, Human
cgccacuguacuccagccugggugacgagcga

SEQ ID NO: 386335 - RNA, 32 nt, Human
cgccacuguacuccagccugggugaggagagc

SEQ ID NO: 386336 - RNA, 32 nt, Human
cgccacuguacuccauccugggugauggagcg

SEQ ID NO: 386337 - RNA, 32 nt, Human
cgccacugucccgcuagugccugcuaggugca

SEQ ID NO: 386338 - RNA, 32 nt, Human
cgccacuguccugcugcccuccagacaugcug

SEQ ID NO: 386339 - RNA, 32 nt, Human
cgccacugugacgcgcugacaguggaugcgaa

SEQ ID NO: 386340 - RNA, 32 nt, Human
cgccacugugcuccagccugggcaacaaagug

SEQ ID NO: 386341 - RNA, 32 nt, Human
cgccacugugcuccagccugggcaacagagug

SEQ ID NO: 386342 - RNA, 32 nt, Human
cgccacuucacuccagccugggcaacagagug

SEQ ID NO: 386343 - RNA, 32 nt, Human
cgccacuucacuccagccugggugacagagac

SEQ ID NO: 386344 - RNA, 32 nt, Human
cgccacuucacugcagccuggguggcagagug

SEQ ID NO: 386345 - RNA, 32 nt, Human
cgccacuuggccaggagcagagcugccuguaa

SEQ ID NO: 386346 - RNA, 32 nt, Human
cgccacuuugacuuauuuucucuaauaguuua

SEQ ID NO: 386347 - RNA, 32 nt, Human
cgccagaaaggcuccugaggucccagguuggc

SEQ ID NO: 386348 - RNA, 32 nt, Human
cgccagaagcacacuugaggcugcagucgcag

SEQ ID NO: 386349 - RNA, 25 nt, Human
cgccagaagggcaggccgcagagca

SEQ ID NO: 386350 - RNA, 32 nt, Human
cgccagaaguagaccugucuaggcacuaaggg

SEQ ID NO: 386351 - RNA, 32 nt, Human
cgccagacagccgcccgcccacccguucgccc

SEQ ID NO: 386352 - RNA, 32 nt, Human
cgccagacuccuggacacuugccgccugcguu

SEQ ID NO: 386353 - RNA, 32 nt, Human
cgccagagcagccccgcaccacccucgagcuu

SEQ ID NO: 386354 - RNA, 32 nt, Human
cgccagaggaagcacgugcacuaacuggguuu

SEQ ID NO: 386355 - RNA, 32 nt, Human
cgccagaggagaaaauugagauucuugacccu

SEQ ID NO: 386356 - RNA, 32 nt, Human
cgccagaggagaaaugucugaaguaagacccc

SEQ ID NO: 386357 - RNA, 32 nt, Human
cgccagaggccuugccuuucagaagaacccug

SEQ ID NO: 386358 - RNA, 22 nt, Human
cgccagaugccaggacgcccuc

SEQ ID NO: 386359 - RNA, 23 nt, Human
cgccagaugcugccagucauuag

SEQ ID NO: 386360 - RNA, 32 nt, Human
cgccagcaaaacuuagaugugagaaaaccccu

SEQ ID NO: 386361 - RNA, 32 nt, Human
cgccagcaacagcuccagcccagccaguccag

SEQ ID NO: 386362 - RNA, 32 nt, Human
cgccagcaauagauacucccacccccucaaaa

SEQ ID NO: 386363 - RNA, 32 nt, Human
cgccagcacagcuucaguuggggaagauauua

SEQ ID NO: 386364 - RNA, 32 nt, Human
cgccagcagccccucgccgcgcguccagcguu

SEQ ID NO: 386365 - RNA, 32 nt, Human
cgccagcagcccugcacuccacgcuggccaag

SEQ ID NO: 386366 - RNA, 32 nt, Human
cgccagcagguggagcuugacgugacgucuua

SEQ ID NO: 386367 - RNA, 32 nt, Human
cgccagcauggccaccaccgccaccugcaccc

SEQ ID NO: 386368 - RNA, 32 nt, Human
cgccagccaagcccagccugagccagcacuug

SEQ ID NO: 386369 - RNA, 32 nt, Human
cgccagccccggccccagccauggaagagcuc

SEQ ID NO: 386370 - RNA, 32 nt, Human
cgccagcccugccucugggcccugggggcugg

SEQ ID NO: 386371 - RNA, 32 nt, Human
cgccagcccuggaagcugagccugacccagca

SEQ ID NO: 386372 - RNA, 32 nt, Human
cgccagccgagaucgcagcccaacccauggcc

SEQ ID NO: 386373 - RNA, 32 nt, Human
cgccagccgcagccaggcugggcugagagcau

SEQ ID NO: 386374 - RNA, 32 nt, Human
cgccagccgccuuccccagcagccgcaggugg

SEQ ID NO: 386375 - RNA, 32 nt, Human
cgccagccuccuccuggaccucuuggccccca

SEQ ID NO: 386376 - RNA, 32 nt, Human
cgccagccuggagugagggagcaggaucuggg

SEQ ID NO: 386377 - RNA, 22 nt, Human
cgccagcgagcugugccgagag

SEQ ID NO: 386378 - RNA, 21 nt, Human
cgccagcgcccagccagggag

SEQ ID NO: 386379 - RNA, 32 nt, Human
cgccagcgccgagcccagcccugaagucguuu

SEQ ID NO: 386380 - RNA, 23 nt, Human
cgccagcgccucagcucugugga

SEQ ID NO: 386381 - RNA, 32 nt, Human
cgccagcgccugucccugucacggaccccagc

SEQ ID NO: 386382 - RNA, 32 nt, Human
cgccagcucccagguccccacuccuguaccgg

SEQ ID NO: 386383 - RNA, 32 nt, Human
cgccagcuccccucagccgaggcugcuccgcg

SEQ ID NO: 386384 - RNA, 32 nt, Human
cgccagcuccugugcuggacauggccccggcc

SEQ ID NO: 386385 - RNA, 22 nt, Human
cgccagcucugcagagcccaga

SEQ ID NO: 386386 - RNA, 32 nt, Human
cgccagcugcaucagaucccuccagggccuca

SEQ ID NO: 386387 - RNA, 32 nt, Human
cgccagcugccuguagccacguggcauccugc

SEQ ID NO: 386388 - RNA, 22 nt, Human
cgccagcugcggcggcgcgucg

SEQ ID NO: 386389 - RNA, 24 nt, Human
cgccagcugcggcggcgcgucggg

SEQ ID NO: 386390 - RNA, 19 nt, Human
cgccagcuggagugcagug

SEQ ID NO: 386391 - RNA, 32 nt, Human
cgccagcugggagcacuggugugaacucaccc

SEQ ID NO: 386392 - RNA, 18 nt, Human
cgccagcuucaacgggua

SEQ ID NO: 386393 - RNA, 32 nt, Human
cgccagcuuggcccugcagccagcacaggaac

SEQ ID NO: 386394 - RNA, 32 nt, Human
cgccaggaacagcuugagguaccugagcccug

SEQ ID NO: 386395 - RNA, 17 nt, Human
cgccaggaaggagcaug

SEQ ID NO: 386396 - RNA, 19 nt, Human
cgccaggacgcagcgcucc

SEQ ID NO: 386397 - RNA, 19 nt, Human
cgccaggacuaugcuccca

SEQ ID NO: 386398 - RNA, 31 nt, Human
cgccaggacuucucugggcuguguuuaaacg

SEQ ID NO: 386399 - RNA, 22 nt, Human
cgccaggagccccgcagcuccu

SEQ ID NO: 386400 - RNA, 32 nt, Human
cgccaggagcugcuacagcagaggcggagguu

SEQ ID NO: 386401 - RNA, 32 nt, Human
cgccaggauccccugagggucugggauggggg

SEQ ID NO: 386402 - RNA, 22 nt, Human
cgccaggcaaagcgccagcagc

SEQ ID NO: 386403 - RNA, 32 nt, Human
cgccaggcaaagcgccagcagcccugcacucc

SEQ ID NO: 386404 - RNA, 32 nt, Human
cgccaggcaagugcccuuagaaaccgggcccc

SEQ ID NO: 386405 - RNA, 20 nt, Human
cgccaggcagaaggcgcagc

SEQ ID NO: 386406 - RNA, 23 nt, Human
cgccaggcagucgccuagcaaca

SEQ ID NO: 386407 - RNA, 32 nt, Human
cgccaggcccaggaggcgacugcaugguggag

SEQ ID NO: 386408 - RNA, 32 nt, Human
cgccaggccggggaagguuggagcagccccca

SEQ ID NO: 386409 - RNA, 32 nt, Human
cgccaggccuuaguggguucccuuuccugucc

SEQ ID NO: 386410 - RNA, 32 nt, Human
cgccaggcgcucgcaggcaugcagcccgggag

SEQ ID NO: 386411 - RNA, 21 nt, Human
cgccaggcuggagugcagugg

SEQ ID NO: 386412 - RNA, 32 nt, Human
cgccaggcuggucucuaacuccugggcucagu

SEQ ID NO: 386413 - RNA, 32 nt, Human
cgccagggagagaaggggagugcggagccccg

SEQ ID NO: 386414 - RNA, 31 nt, Human
cgccagggcaaaggagcugagcagccauccc

SEQ ID NO: 386415 - RNA, 32 nt, Human
cgccagggcugcgccugggcauggaagagggg

SEQ ID NO: 386416 - RNA, 31 nt, Human
cgccaggggaaacuggcauaagaugcugcuc

SEQ ID NO: 386417 - RNA, 32 nt, Human
cgccaggggaaaggaggaacaucccucccagg

SEQ ID NO: 386418 - RNA, 32 nt, Human
cgccaggggcaggcagcuaggcagggaggggg

SEQ ID NO: 386419 - RNA, 32 nt, Human
cgccaggggcgcgccgcagccacccacccucc

SEQ ID NO: 386420 - RNA, 32 nt, Human
cgccaggggucugccccaauccuggccugcau

SEQ ID NO: 386421 - RNA, 32 nt, Human
cgccagggucaccaggugagcaaggcugggga

SEQ ID NO: 386422 - RNA, 32 nt, Human
cgccagguccugaguguucccugcucggacug

SEQ ID NO: 386423 - RNA, 32 nt, Human
cgccaggucuaugaaaacaccugcucugauau

SEQ ID NO: 386424 - RNA, 32 nt, Human
cgccaggucugacuaggaaggaggauggggag

SEQ ID NO: 386425 - RNA, 32 nt, Human
cgccagguuuauucagucaccaugaagcugcu

SEQ ID NO: 386426 - RNA, 32 nt, Human
cgccagguuuccuggagcucuuggcuucagcc

SEQ ID NO: 386427 - RNA, 32 nt, Human
cgccagucagccccaaggagguggccacccug

SEQ ID NO: 386428 - RNA, 32 nt, Human
cgccagucucucuucccacuugcugacccuuu

SEQ ID NO: 386429 - RNA, 32 nt, Human
cgccagucugcccagcugcaguacucacgccc

SEQ ID NO: 386430 - RNA, 32 nt, Human
cgccagugagccuccuggaagggcagcaaguu

SEQ ID NO: 386431 - RNA, 32 nt, Human
cgccagugcaagaccgagacugagggaaagca

SEQ ID NO: 386432 - RNA, 32 nt, Human
cgccagugcacuccagccugggcaagaagagc

SEQ ID NO: 386433 - RNA, 32 nt, Human
cgccagugcacuccagcugggcgacagagcga

SEQ ID NO: 386434 - RNA, 32 nt, Human
cgccagugccuugccagugugcacggucccac

SEQ ID NO: 386435 - RNA, 32 nt, Human
cgccagugucccuguaaugcuuucugguguga

SEQ ID NO: 386436 - RNA, 32 nt, Human
cgccaguuuccuggguccucuucagaggccag

SEQ ID NO: 386437 - RNA, 32 nt, Human
cgccaguuucuaacgcccucaccauuuuuauu

SEQ ID NO: 386438 - RNA, 32 nt, Human
cgccauagcaauugcacuccggccugggcaac

SEQ ID NO: 386439 - RNA, 32 nt, Human
cgccauagcacuccagccuuagccugggcgac

SEQ ID NO: 386440 - RNA, 32 nt, Human
cgccauaggccuagcauugucaccaacggagc

SEQ ID NO: 386441 - RNA, 32 nt, Human
cgccauaucccacuccaaaccagcacaacuau

SEQ ID NO: 386442 - RNA, 32 nt, Human
cgccaucauccuggcugucaucaacaguggga

SEQ ID NO: 386443 - RNA, 32 nt, Human
cgccaucaucgagcgcacggccagcuucgugu

SEQ ID NO: 386444 - RNA, 32 nt, Human
cgccaucaugccggccguguccaagggcgaug

SEQ ID NO: 386445 - RNA, 32 nt, Human
cgccauccacaucugcucggcaaagaaggaag

SEQ ID NO: 386446 - RNA, 32 nt, Human
cgccauccagcacccagacuccagcaccggcc

SEQ ID NO: 386447 - RNA, 32 nt, Human
cgccaucccagagggcucaggaugccccagga

SEQ ID NO: 386448 - RNA, 32 nt, Human
cgccaucccugcaggccagggcacacggugcg

SEQ ID NO: 386449 - RNA, 32 nt, Human
cgccaucccuucgaucacgugcaccugcugcc

SEQ ID NO: 386450 - RNA, 32 nt, Human
cgccaucccuuuccacaguauccuucuucccu

SEQ ID NO: 386451 - RNA, 32 nt, Human
cgccauccgcagagcaaggcugccucggggcg

SEQ ID NO: 386452 - RNA, 32 nt, Human
cgccauccuagagugaggcucuguccaauaca

SEQ ID NO: 386453 - RNA, 32 nt, Human
cgccaucgcacuccagccugggcaacaagagc

SEQ ID NO: 386454 - RNA, 32 nt, Human
cgccaucgcacuccagccugggugacaagagc

SEQ ID NO: 386455 - RNA, 32 nt, Human
cgccaucgucccggcugaagugcaguggcacg

SEQ ID NO: 386456 - RNA, 32 nt, Human
cgccaucgugguguguucuugacuccgcugcu

SEQ ID NO: 386457 - RNA, 32 nt, Human
cgccaucucccaggcucaagggauccuccugc

SEQ ID NO: 386458 - RNA, 32 nt, Human
cgccaucuuggcuccggaucgugcgugaggcg

SEQ ID NO: 386459 - RNA, 32 nt, Human
cgccaugaacuugccaagagcugagcgccuuc

SEQ ID NO: 386460 - RNA, 32 nt, Human
cgccaugacgaccgcguccaccucacaggugc

SEQ ID NO: 386461 - RNA, 29 nt, Human
cgccaugacgaccgcguccaccucgcagg

SEQ ID NO: 386462 - RNA, 29 nt, Human
cgccaugagggcucugcugcuccuggggu

SEQ ID NO: 386463 - RNA, 32 nt, Human
cgccaugcagagcugcucucacuucuccucgg

SEQ ID NO: 386464 - RNA, 32 nt, Human
cgccaugccaggcuaauuuuuguguuuuuagu

SEQ ID NO: 386465 - RNA, 32 nt, Human
cgccaugcccggcuaauuuuuguauuuuuagu

SEQ ID NO: 386466 - RNA, 29 nt, Human
cgccauggagcagcgccgcgucaccgacu

SEQ ID NO: 386467 - RNA, 29 nt, Human
cgccauggaggugcuggagagcggggagc

SEQ ID NO: 386468 - RNA, 32 nt, Human
cgccauggcacucacuccagccugggcaacaa

SEQ ID NO: 386469 - RNA, 29 nt, Human
cgccauggcuauggcuaguguuaaauugc

SEQ ID NO: 386470 - RNA, 32 nt, Human
cgccauggcucacaccuguaucccaacacuuu

SEQ ID NO: 386471 - RNA, 32 nt, Human
cgccauggcucacgucuguaaucccagcacuu

SEQ ID NO: 386472 - RNA, 29 nt, Human
cgccauggcugaaaacacagagggggauc

SEQ ID NO: 386473 - RNA, 29 nt, Human
cgccaugggccuagagcuguuucuugacc

SEQ ID NO: 386474 - RNA, 32 nt, Human
cgccauggggacaucaggcaaggucuggagac

SEQ ID NO: 386475 - RNA, 32 nt, Human
cgccauggugggcgccacagaccuugucagaa

SEQ ID NO: 386476 - RNA, 32 nt, Human
cgccauguaugacaaguguuacugcaagaaau

SEQ ID NO: 386477 - RNA, 32 nt, Human
cgccaugucucacuccuguaauaccagcacuu

SEQ ID NO: 386478 - RNA, 32 nt, Human
cgccaugugauggacacuccagggacacacag

SEQ ID NO: 386479 - RNA, 32 nt, Human
cgccauguggaugcuguugugauugcuguuug

SEQ ID NO: 386480 - RNA, 32 nt, Human
cgccauguuauccaggcuggccucaaacuccu

SEQ ID NO: 386481 - RNA, 32 nt, Human
cgccauguugcacaggcuggucucaaacucuu

SEQ ID NO: 386482 - RNA, 32 nt, Human
cgccauguugcccaggcuggucucaaacaccu

SEQ ID NO: 386483 - RNA, 32 nt, Human
cgccauguugcccaggcuggucucaaacuugu

SEQ ID NO: 386484 - RNA, 32 nt, Human
cgccauguugcccaggcuggucucgaacaucu

SEQ ID NO: 386485 - RNA, 32 nt, Human
cgccauguugcccaggcuggucucgaacuucu

SEQ ID NO: 386486 - RNA, 32 nt, Human
cgccauguuggccaggcuggucucaaacuccu

SEQ ID NO: 386487 - RNA, 32 nt, Human
cgccauguuggccaggcuggucucgaacaccu

SEQ ID NO: 386488 - RNA, 32 nt, Human
cgccauguuggccaggcuggucucgaaccccu

SEQ ID NO: 386489 - RNA, 32 nt, Human
cgccauguuggccaggcuggucucgaacuccu

SEQ ID NO: 386490 - RNA, 32 nt, Human
cgccauguuggccaggcuggucucgaacucuu

SEQ ID NO: 386491 - RNA, 32 nt, Human
cgccauguuggccaggcugguuucaaacuccu

SEQ ID NO: 386492 - RNA, 32 nt, Human
cgccauguuucccaggcugguguggaacuccu

SEQ ID NO: 386493 - RNA, 32 nt, Human
cgccauuacacuccagccuggcugacagugca

SEQ ID NO: 386494 - RNA, 32 nt, Human
cgccauuacacuccagccugggugacagagca

SEQ ID NO: 386495 - RNA, 32 nt, Human
cgccauuacacuucagccugggcaacaagagc

SEQ ID NO: 386496 - RNA, 32 nt, Human
cgccauucaccugaacucugcagcucaucggc

SEQ ID NO: 386497 - RNA, 17 nt, Human
cgccauucuaacaggua

SEQ ID NO: 386498 - RNA, 32 nt, Human
cgccauucuacuccagccugggccacaaggca

SEQ ID NO: 386499 - RNA, 32 nt, Human
cgccauucuggaacgcagucuucaccauuucu

SEQ ID NO: 386500 - RNA, 31 nt, Human
cgccauugcaccccagccugggcaaugagug

SEQ ID NO: 386501 - RNA, 32 nt, Human
cgccauugcacuacagccugggugacagagca

SEQ ID NO: 386502 - RNA, 32 nt, Human
cgccauugcacucaagccugggcaauaagaau

SEQ ID NO: 386503 - RNA, 32 nt, Human
cgccauugcacuccaaccuggacgacagagca

SEQ ID NO: 386504 - RNA, 32 nt, Human
cgccauugcacuccaaccugggugacaagagc

SEQ ID NO: 386505 - RNA, 32 nt, Human
cgccauugcacuccacacuccagccugagcaa

SEQ ID NO: 386506 - RNA, 32 nt, Human
cgccauugcacuccagccuaggcaauaagagc

SEQ ID NO: 386507 - RNA, 32 nt, Human
cgccauugcacuccagccuagguaacaagagg

SEQ ID NO: 386508 - RNA, 32 nt, Human
cgccauugcacuccagccuggcugacagagcg

SEQ ID NO: 386509 - RNA, 32 nt, Human
cgccauugcacuccagccugggcaaaaagagc

SEQ ID NO: 386510 - RNA, 32 nt, Human
cgccauugcacuccagccugggcaaaaagagu

SEQ ID NO: 386511 - RNA, 32 nt, Human
cgccauugcacuccagccugggcaacaacagu

SEQ ID NO: 386512 - RNA, 32 nt, Human
cgccauugcacuccagccugggcaacaagaga

SEQ ID NO: 386513 - RNA, 32 nt, Human
cgccauugcacuccagccugggcaacaagagc

SEQ ID NO: 386514 - RNA, 32 nt, Human
cgccauugcacuccagccugggcaacaagagu

SEQ ID NO: 386515 - RNA, 32 nt, Human
cgccauugcacuccagccugggcaacaagcga

SEQ ID NO: 386516 - RNA, 32 nt, Human
cgccauugcacuccagccugggcaacagagug

SEQ ID NO: 386517 - RNA, 32 nt, Human
cgccauugcacuccagccugggcaacaguguu

SEQ ID NO: 386518 - RNA, 32 nt, Human
cgccauugcacuccagccugggcaacgaaaag

SEQ ID NO: 386519 - RNA, 32 nt, Human
cgccauugcacuccagccugggcaacgagagg

SEQ ID NO: 386520 - RNA, 32 nt, Human
cgccauugcacuccagccugggcaacgaguga

SEQ ID NO: 386521 - RNA, 32 nt, Human
cgccauugcacuccagccugggcaacuccguc

SEQ ID NO: 386522 - RNA, 32 nt, Human
cgccauugcacuccagccugggcaauaagagc

SEQ ID NO: 386523 - RNA, 32 nt, Human
cgccauugcacuccagccugggcgacaagagc

SEQ ID NO: 386524 - RNA, 32 nt, Human
cgccauugcacuccagccugggcgacagagcg

SEQ ID NO: 386525 - RNA, 32 nt, Human
cgccauugcacuccagccugggcgacagagug

SEQ ID NO: 386526 - RNA, 32 nt, Human
cgccauugcacuccagccugggcgacugaaua

SEQ ID NO: 386527 - RNA, 32 nt, Human
cgccauugcacuccagccugggcggcagagca

SEQ ID NO: 386528 - RNA, 32 nt, Human
cgccauugcacuccagccuggggacaaagcaa

SEQ ID NO: 386529 - RNA, 32 nt, Human
cgccauugcacuccagccugggggacaagagu

SEQ ID NO: 386530 - RNA, 32 nt, Human
cgccauugcacuccagccugggggacagagca

SEQ ID NO: 386531 - RNA, 32 nt, Human
cgccauugcacuccagccugggugacaagagu

SEQ ID NO: 386532 - RNA, 32 nt, Human
cgccauugcacuccagccugggugacacagug

SEQ ID NO: 386533 - RNA, 32 nt, Human
cgccauugcacuccagccugggugacagaacg

SEQ ID NO: 386534 - RNA, 32 nt, Human
cgccauugcacuccagccugggugacagagca

SEQ ID NO: 386535 - RNA, 32 nt, Human
cgccauugcacuccagccugggugacagagug

SEQ ID NO: 386536 - RNA, 32 nt, Human
cgccauugcacuccagccugggugacgaguga

SEQ ID NO: 386537 - RNA, 32 nt, Human
cgccauugcacuccagccugggugagaagagc

SEQ ID NO: 386538 - RNA, 32 nt, Human
cgccauugcacuccagcuugggcaauaagaau

SEQ ID NO: 386539 - RNA, 32 nt, Human
cgccauugcacuccagucugggugacagagca

SEQ ID NO: 386540 - RNA, 32 nt, Human
cgccauugcacuccagucugguugacagagug

SEQ ID NO: 386541 - RNA, 32 nt, Human
cgccauugcacuccauucugggcaacaagagc

SEQ ID NO: 386542 - RNA, 32 nt, Human
cgccauugcacuccggccuggggacaagagca

SEQ ID NO: 386543 - RNA, 32 nt, Human
cgccauugcagcuuguuuucacuugcuuuuua

SEQ ID NO: 386544 - RNA, 32 nt, Human
cgccauugcagggcagccugguuacagaguga

SEQ ID NO: 386545 - RNA, 32 nt, Human
cgccauugcauuccagccugggcaacaagagc

SEQ ID NO: 386546 - RNA, 32 nt, Human
cgccauugcauuccagccugggugacagagcg

SEQ ID NO: 386547 - RNA, 32 nt, Human
cgccauugcccaggcuugcuuagguaaacaaa

SEQ ID NO: 386548 - RNA, 32 nt, Human
cgccauugccuagcuugccguaaugauucuau

SEQ ID NO: 386549 - RNA, 32 nt, Human
cgccauugggcagagggauuggcaagcuugcg

SEQ ID NO: 386550 - RNA, 32 nt, Human
cgccauuguacuccagccuggcaacagagcga

SEQ ID NO: 386551 - RNA, 32 nt, Human
cgccauuguacuccagccugggcaacaagagc

SEQ ID NO: 386552 - RNA, 32 nt, Human
cgccauuguacuccagccugggcaacaagagu

SEQ ID NO: 386553 - RNA, 32 nt, Human
cgccauuguacuccagccugggcgacagagca

SEQ ID NO: 386554 - RNA, 32 nt, Human
cgccauuguacuccagccugggcgaugagcaa

SEQ ID NO: 386555 - RNA, 32 nt, Human
cgccauuguacuccagccugggggacaggagc

SEQ ID NO: 386556 - RNA, 32 nt, Human
cgccauuguccgcggcugagguugggauuugc

SEQ ID NO: 386557 - RNA, 32 nt, Human
cgccauugugcuccagccugggugacaaagca

SEQ ID NO: 386558 - RNA, 32 nt, Human
cgccauuucacuccagccugggcgacagagca

SEQ ID NO: 386559 - RNA, 32 nt, Human
cgccauuuccuggaaaaauuggggcugggacu

SEQ ID NO: 386560 - RNA, 32 nt, Human
cgccauuucggacugggagcgagcgcggcgca

SEQ ID NO: 386561 - RNA, 32 nt, Human
cgccauuugggaggggagcagagccaggccgg

SEQ ID NO: 386562 - RNA, 24 nt, Human
cgcccaaaauaaagcaccacuuca

SEQ ID NO: 386563 - RNA, 25 nt, Human
cgcccaaaauagcccccggcgccag

SEQ ID NO: 386564 - RNA, 22 nt, Human
cgcccaaacuggagugcagugg

SEQ ID NO: 386565 - RNA, 32 nt, Human
cgcccaaagcgcugggauuacaggcgugagcc

SEQ ID NO: 386566 - RNA, 32 nt, Human
cgcccaaaguguugggauuacaggcaugagcc

SEQ ID NO: 386567 - RNA, 16 nt, Human
cgcccaacgacgagug

SEQ ID NO: 386568 - RNA, 32 nt, Human
cgcccaagagccuuccucccgggggaaugaga

SEQ ID NO: 386569 - RNA, 32 nt, Human
cgcccaagccagugcaaggcccaggggccuga

SEQ ID NO: 386570 - RNA, 28 nt, Human
cgcccaaggaagucaacaggagagccag

SEQ ID NO: 386571 - RNA, 32 nt, Human
cgcccaaggccuuccccuggcacuggcaaaca

SEQ ID NO: 386572 - RNA, 28 nt, Human
cgcccaagggagguccccacagagccag

SEQ ID NO: 386573 - RNA, 32 nt, Human
cgcccaauagcccaggcuggagugcaguggca

SEQ ID NO: 386574 - RNA, 32 nt, Human
cgcccaauauggugaaaccccgucucuccuga

SEQ ID NO: 386575 - RNA, 32 nt, Human
cgcccaauguuaggaaucaagccucauuuaca

SEQ ID NO: 386576 - RNA, 32 nt, Human
cgcccacacagcccacuuguuuggguggggcc

SEQ ID NO: 386577 - RNA, 32 nt, Human
cgcccacaccccuccuucccagucccaugauc

SEQ ID NO: 386578 - RNA, 32 nt, Human
cgcccacagcagagggcgguauuagggagggg

SEQ ID NO: 386579 - RNA, 32 nt, Human
cgcccacagccagccccaaccuccagggcugu

SEQ ID NO: 386580 - RNA, 16 nt, Human
cgcccacaggacucca

SEQ ID NO: 386581 - RNA, 32 nt, Human
cgcccacaggcagggcacacugggcagccagc

SEQ ID NO: 386582 - RNA, 32 nt, Human
cgcccaccaugcgcggcugccugcggcucgcg

SEQ ID NO: 386583 - RNA, 32 nt, Human
cgcccacccaccucccuccaccccgugccacg

SEQ ID NO: 386584 - RNA, 32 nt, Human
cgcccacccagcuguguguccuccgccgaggg

SEQ ID NO: 386585 - RNA, 32 nt, Human
cgcccacccaggcuggaguacaguggcacgau

SEQ ID NO: 386586 - RNA, 21 nt, Human
cgcccacccccggcuccagga

SEQ ID NO: 386587 - RNA, 18 nt, Human
cgcccacccgccuuguga

SEQ ID NO: 386588 - RNA, 32 nt, Human
cgcccacccugcggcccugccagugguagcac

SEQ ID NO: 386589 - RNA, 32 nt, Human
cgcccacccugcucccuuccggacaaugaaga

SEQ ID NO: 386590 - RNA, 32 nt, Human
cgcccacccugugcccuggcgccgcugcaaca

SEQ ID NO: 386591 - RNA, 32 nt, Human
cgcccaccgcagaggaggggcgaugggggugg

SEQ ID NO: 386592 - RNA, 32 nt, Human
cgcccaccuguaauccuagcugcucagggggc

SEQ ID NO: 386593 - RNA, 32 nt, Human
cgcccaccuucgggaggaucaggcugcuucug

SEQ ID NO: 386594 - RNA, 21 nt, Human
cgcccacgaccgcagcagccu

SEQ ID NO: 386595 - RNA, 32 nt, Human
cgcccacgcuuaacaggaagcuccuaggccuc

SEQ ID NO: 386596 - RNA, 32 nt, Human
cgcccacggaagcacccgagcgaccggagaaa

SEQ ID NO: 386597 - RNA, 20 nt, Human
cgcccacggcccgagcgccc

SEQ ID NO: 386598 - RNA, 32 nt, Human
cgcccacucuagacaucagccuccagguugac

SEQ ID NO: 386599 - RNA, 32 nt, Human
cgcccacugcacuccagguugggcuacagagu

SEQ ID NO: 386600 - RNA, 32 nt, Human
cgcccagaccccuccuucccagucccaugauc

SEQ ID NO: 386601 - RNA, 21 nt, Human
cgcccagacuggaguccagug

SEQ ID NO: 386602 - RNA, 21 nt, Human
cgcccagacuggagugcugug

SEQ ID NO: 386603 - RNA, 32 nt, Human
cgcccagagaagcacagcaugcgugccugcac

SEQ ID NO: 386604 - RNA, 32 nt, Human
cgcccagagaucaugcagagugaacagaacug

SEQ ID NO: 386605 - RNA, 32 nt, Human
cgcccagagaugaccgcgaccgaagcccuccu

SEQ ID NO: 386606 - RNA, 32 nt, Human
cgcccagagcagcagcaacagcgaagaugcga

SEQ ID NO: 386607 - RNA, 32 nt, Human
cgcccagagcccagauagagagacacggccuc

SEQ ID NO: 386608 - RNA, 32 nt, Human
cgcccagaugcugaaggaucacuugguaacug

SEQ ID NO: 386609 - RNA, 32 nt, Human
cgcccagcagaggcguacuacccagcucuguc

SEQ ID NO: 386610 - RNA, 32 nt, Human
cgcccagcagccgccgccgccgcccggccggc

SEQ ID NO: 386611 - RNA, 32 nt, Human
cgcccagcaguguccugcccucugccugggcc

SEQ ID NO: 386612 - RNA, 32 nt, Human
cgcccagcaugcagaacaaaagcacaacgcac

SEQ ID NO: 386613 - RNA, 32 nt, Human
cgcccagccagcugccuggccucccuccugug

SEQ ID NO: 386614 - RNA, 32 nt, Human
cgcccagccaugcgcgccgccugcugaguccg

SEQ ID NO: 386615 - RNA, 21 nt, Human
cgcccagccccggccccugga

SEQ ID NO: 386616 - RNA, 21 nt, Human
cgcccagccuggagugcagug

SEQ ID NO: 386617 - RNA, 32 nt, Human
cgcccagcuaauuuuuguauuuuugguagaga

SEQ ID NO: 386618 - RNA, 32 nt, Human
cgcccagcugcagacccuccaggcuggaggac

SEQ ID NO: 386619 - RNA, 32 nt, Human
cgcccagcuggcugcagcacuuguagcaugca

SEQ ID NO: 386620 - RNA, 32 nt, Human
cgcccaggaccagucugcccacugccuaaaug

SEQ ID NO: 386621 - RNA, 32 nt, Human
cgcccaggagcugggcccugccacccaggccg

SEQ ID NO: 386622 - RNA, 21 nt, Human
cgcccaggauggagugcagug

SEQ ID NO: 386623 - RNA, 32 nt, Human
cgcccaggcaaggccgcccugccuugggcgca

SEQ ID NO: 386624 - RNA, 32 nt, Human
cgcccaggcagcggaauagagugcagugcuug

SEQ ID NO: 386625 - RNA, 20 nt, Human
cgcccaggccaggccugugg

SEQ ID NO: 386626 - RNA, 32 nt, Human
cgcccaggcccagcggccguagcuagcgucug

SEQ ID NO: 386627 - RNA, 19 nt, Human
cgcccaggccccugcgugg

SEQ ID NO: 386628 - RNA, 20 nt, Human
cgcccaggcgggagugcagu

SEQ ID NO: 386629 - RNA, 21 nt, Human
cgcccaggcgggagugcagug

SEQ ID NO: 386630 - RNA, 22 nt, Human
cgcccaggcgggagugcagugg

SEQ ID NO: 386631 - RNA, 22 nt, Human
cgcccaggcuagagugcagugg

SEQ ID NO: 386632 - RNA, 20 nt, Human
cgcccaggcugaguacagug

SEQ ID NO: 386633 - RNA, 32 nt, Human
cgcccaggcugcaaccucgaccucccgggcuc

SEQ ID NO: 386634 - RNA, 20 nt, Human
cgcccaggcugcagugcagu

SEQ ID NO: 386635 - RNA, 21 nt, Human
cgcccaggcugcagugcagug

SEQ ID NO: 386636 - RNA, 32 nt, Human
cgcccaggcugcugccagugcacacuuuuaca

SEQ ID NO: 386637 - RNA, 20 nt, Human
cgcccaggcuggacugcagu

SEQ ID NO: 386638 - RNA, 21 nt, Human
cgcccaggcuggacugcagug

SEQ ID NO: 386639 - RNA, 21 nt, Human
cgcccaggcuggaguacagug

SEQ ID NO: 386640 - RNA, 22 nt, Human
cgcccaggcuggaguacagugg

SEQ ID NO: 386641 - RNA, 24 nt, Human
cgcccaggcuggagugcaacggug

SEQ ID NO: 386642 - RNA, 21 nt, Human
cgcccaggcuggagugcaaug

SEQ ID NO: 386643 - RNA, 24 nt, Human
cgcccaggcuggagugcaauggug

SEQ ID NO: 386644 - RNA, 19 nt, Human
cgcccaggcuggagugcag

SEQ ID NO: 386645 - RNA, 20 nt, Human
cgcccaggcuggagugcagu

SEQ ID NO: 386646 - RNA, 24 nt, Human
cgcccaggcuggagugcaguagug

SEQ ID NO: 386647 - RNA, 21 nt, Human
cgcccaggcuggagugcagug

SEQ ID NO: 386648 - RNA, 22 nt, Human
cgcccaggcuggagugcagugg

SEQ ID NO: 386649 - RNA, 24 nt, Human
cgcccaggcuggagugcaguggug

SEQ ID NO: 386650 - RNA, 21 nt, Human
cgcccaggcuggagugcgaug

SEQ ID NO: 386651 - RNA, 21 nt, Human
cgcccaggcuggagugcggug

SEQ ID NO: 386652 - RNA, 21 nt, Human
cgcccaggcuggcgugcagug

SEQ ID NO: 386653 - RNA, 18 nt, Human
cgcccaggcugggugcag

SEQ ID NO: 386654 - RNA, 21 nt, Human
cgcccaggcuguagugcaaug

SEQ ID NO: 386655 - RNA, 21 nt, Human
cgcccaggcuguagugcagug

SEQ ID NO: 386656 - RNA, 32 nt, Human
cgcccagggaagagaguggccuggcccaagcc

SEQ ID NO: 386657 - RNA, 28 nt, Human
cgcccagggagcggcuuccgggagccgg

SEQ ID NO: 386658 - RNA, 32 nt, Human
cgcccagggcucugagacugagccugccaucc

SEQ ID NO: 386659 - RNA, 22 nt, Human
cgcccagggcuggagugcagug

SEQ ID NO: 386660 - RNA, 32 nt, Human
cgcccagggcuggagugcaguggcgcgaucau

SEQ ID NO: 386661 - RNA, 21 nt, Human
cgcccagggcugggacagugg

SEQ ID NO: 386662 - RNA, 32 nt, Human
cgcccagggcugggugcaguggcucacgccug

SEQ ID NO: 386663 - RNA, 27 nt, Human
cgcccagggucuggggcagcagagcca

SEQ ID NO: 386664 - RNA, 21 nt, Human
cgcccaggguggagugcagug

SEQ ID NO: 386665 - RNA, 32 nt, Human
cgcccagguaagggaaagccucagcuccuucc

SEQ ID NO: 386666 - RNA, 32 nt, Human
cgcccaggucugggagccccaggcuggccuca

SEQ ID NO: 386667 - RNA, 32 nt, Human
cgcccagguguaaucagagccaaccugguggg

SEQ ID NO: 386668 - RNA, 32 nt, Human
cgcccagucucuccccacguucuugaacucgg

SEQ ID NO: 386669 - RNA, 23 nt, Human
cgcccaguuccuuuuuugucuuu

SEQ ID NO: 386670 - RNA, 19 nt, Human
cgcccaucccaggacucca

SEQ ID NO: 386671 - RNA, 32 nt, Human
cgcccauccucugacucugcagugccagcuug

SEQ ID NO: 386672 - RNA, 32 nt, Human
cgcccauccucuuccccucuguuucccacuag

SEQ ID NO: 386673 - RNA, 32 nt, Human
cgcccauccuuaggccaaacaguacccaaggc

SEQ ID NO: 386674 - RNA, 32 nt, Human
cgcccaugcucagcuugugagcuucuucccgg

SEQ ID NO: 386675 - RNA, 32 nt, Human
cgcccaugcucucagccuuucucccucccccg

SEQ ID NO: 386676 - RNA, 32 nt, Human
cgcccaugcugcugccccuagccugccugcac

SEQ ID NO: 386677 - RNA, 21 nt, Human
cgcccaugcuggagugcagug

SEQ ID NO: 386678 - RNA, 32 nt, Human
cgcccauuccagacugggaaccagcuuucagu

SEQ ID NO: 386679 - RNA, 32 nt, Human
cgcccauucccgaccuccaccuagggugccug

SEQ ID NO: 386680 - RNA, 32 nt, Human
cgcccauugcagcaugucguauccugggggcu

SEQ ID NO: 386681 - RNA, 20 nt, Human
cgccccaacacuguccuucc

SEQ ID NO: 386682 - RNA, 19 nt, Human
cgccccaaccugcuccucc

SEQ ID NO: 386683 - RNA, 32 nt, Human
cgccccacaccucuccccuuugggcuggacgg

SEQ ID NO: 386684 - RNA, 32 nt, Human
cgccccacagcccgagccggagagggagcgcg

SEQ ID NO: 386685 - RNA, 32 nt, Human
cgccccacagccggcgccgcgccaugcuccac

SEQ ID NO: 386686 - RNA, 32 nt, Human
cgccccacauuccuccuucucagugaggguga

SEQ ID NO: 386687 - RNA, 32 nt, Human
cgccccaccccgccagcuccagagccacgacu

SEQ ID NO: 386688 - RNA, 32 nt, Human
cgccccaccggcugggacucuuccaugcaguu

SEQ ID NO: 386689 - RNA, 32 nt, Human
cgccccaccuguguccccaucucggccggccc

SEQ ID NO: 386690 - RNA, 32 nt, Human
cgccccacgcuucucccgcuccgggccccgca

SEQ ID NO: 386691 - RNA, 32 nt, Human
cgccccacuacacuccagccuggucaacagag

SEQ ID NO: 386692 - RNA, 19 nt, Human
cgccccacuccccggcgcc

SEQ ID NO: 386693 - RNA, 32 nt, Human
cgccccacugcacuccagccuggcaauagacc

SEQ ID NO: 386694 - RNA, 32 nt, Human
cgccccacugcacuccagccugggcgacagaa

SEQ ID NO: 386695 - RNA, 32 nt, Human
cgccccacugcacuccagccuggugacuccgu

SEQ ID NO: 386696 - RNA, 32 nt, Human
cgccccacugcuuuucaaccugggugacagaa

SEQ ID NO: 386697 - RNA, 32 nt, Human
cgccccagaaaugcugcuuccauaucagcugc

SEQ ID NO: 386698 - RNA, 32 nt, Human
cgccccagcacuaccgugagagcacaggcaga

SEQ ID NO: 386699 - RNA, 19 nt, Human
cgccccagccacccuccuu

SEQ ID NO: 386700 - RNA, 18 nt, Human
cgccccagccaccucccu

SEQ ID NO: 386701 - RNA, 17 nt, Human
cgccccagccuagcccc

SEQ ID NO: 386702 - RNA, 32 nt, Human
cgccccagccuccugaguagcugggacuagag

SEQ ID NO: 386703 - RNA, 18 nt, Human
cgccccagccuucugcuc

SEQ ID NO: 386704 - RNA, 18 nt, Human
cgccccagcgaccucccu

SEQ ID NO: 386705 - RNA, 32 nt, Human
cgccccaggaggaggaagaaaccagggccccg

SEQ ID NO: 386706 - RNA, 32 nt, Human
cgccccaggcaccgccagaguguccugcuacc

SEQ ID NO: 386707 - RNA, 32 nt, Human
cgccccaggcagccccagcgguuaguggaagc

SEQ ID NO: 386708 - RNA, 17 nt, Human
cgccccaggcccuuccc

SEQ ID NO: 386709 - RNA, 31 nt, Human
cgccccagggagagagaaaaagcugagacuc

SEQ ID NO: 386710 - RNA, 32 nt, Human
cgccccagggccuggggcuguugggagccaag

SEQ ID NO: 386711 - RNA, 20 nt, Human
cgccccaggucgugcagccc

SEQ ID NO: 386712 - RNA, 21 nt, Human
cgccccauaaaaccagcagaa

SEQ ID NO: 386713 - RNA, 32 nt, Human
cgccccauccccaggcugugugcucaaagcgg

SEQ ID NO: 386714 - RNA, 32 nt, Human
cgccccaucugccuccugcccugccgcacucc

SEQ ID NO: 386715 - RNA, 32 nt, Human
cgccccauucugucccccucauggccaccuug

SEQ ID NO: 386716 - RNA, 32 nt, Human
cgccccauuguacuccagccuggggaacaaga

SEQ ID NO: 386717 - RNA, 23 nt, Human
cgcccccaaccccccaccucccu

SEQ ID NO: 386718 - RNA, 32 nt, Human
cgcccccaaguaugucccgcugccuggagaga

SEQ ID NO: 386719 - RNA, 21 nt, Human
cgcccccaccccacccuaccc

SEQ ID NO: 386720 - RNA, 20 nt, Human
cgcccccacccccgcccccc

SEQ ID NO: 386721 - RNA, 19 nt, Human
cgcccccaccccugccccc

SEQ ID NO: 386722 - RNA, 18 nt, Human
cgcccccacccuguccag

SEQ ID NO: 386723 - RNA, 32 nt, Human
cgcccccaccgccacccaaccaagcaucaccc

SEQ ID NO: 386724 - RNA, 22 nt, Human
cgcccccacgcccacccuccuu

SEQ ID NO: 386725 - RNA, 22 nt, Human
cgcccccacugcccggccuccc

SEQ ID NO: 386726 - RNA, 32 nt, Human
cgcccccagcaccacggaaacuaccuacaugc

SEQ ID NO: 386727 - RNA, 22 nt, Human
cgcccccagcacccccucuccu

SEQ ID NO: 386728 - RNA, 23 nt, Human
cgcccccagcccagcccacuccc

SEQ ID NO: 386729 - RNA, 19 nt, Human
cgcccccagccccagcccc

SEQ ID NO: 386730 - RNA, 21 nt, Human
cgcccccagccccccuucccu

SEQ ID NO: 386731 - RNA, 25 nt, Human
cgcccccagcccccgcccccguccc

SEQ ID NO: 386732 - RNA, 22 nt, Human
cgcccccagccccugcugcccc

SEQ ID NO: 386733 - RNA, 22 nt, Human
cgcccccagcccggcgccgccc

SEQ ID NO: 386734 - RNA, 24 nt, Human
cgcccccagcccucgccccacccu

SEQ ID NO: 386735 - RNA, 22 nt, Human
cgcccccagccugccccagccc

SEQ ID NO: 386736 - RNA, 22 nt, Human
cgcccccagccuggcggacgag

SEQ ID NO: 386737 - RNA, 21 nt, Human
cgcccccagcguggcgccccc

SEQ ID NO: 386738 - RNA, 22 nt, Human
cgcccccagcuucucucucccu

SEQ ID NO: 386739 - RNA, 32 nt, Human
cgcccccaggcugugccccaccacagauucug

SEQ ID NO: 386740 - RNA, 32 nt, Human
cgcccccagugagauucaaaucacgcaucucu

SEQ ID NO: 386741 - RNA, 23 nt, Human
cgcccccagugcugcguucuccc

SEQ ID NO: 386742 - RNA, 32 nt, Human
cgcccccauagcaaucugacuuugaguuggag

SEQ ID NO: 386743 - RNA, 32 nt, Human
cgcccccaucugucuucagcacauuccacggc

SEQ ID NO: 386744 - RNA, 22 nt, Human
cgccccccagacucacacgggg

SEQ ID NO: 386745 - RNA, 22 nt, Human
cgccccccaguaccucccuccc

SEQ ID NO: 386746 - RNA, 18 nt, Human
cgccccccgccccgggug

SEQ ID NO: 386747 - RNA, 18 nt, Human
cgccccccggagcugcca

SEQ ID NO: 386748 - RNA, 19 nt, Human
cgccccccggcuguccucc

SEQ ID NO: 386749 - RNA, 17 nt, Human
cgccccccuccagcgcc

SEQ ID NO: 386750 - RNA, 32 nt, Human
cgcccccgccacaggauccagagcaagcaccg

SEQ ID NO: 386751 - RNA, 32 nt, Human
cgcccccgccacaggauccagagcaagcagcg

SEQ ID NO: 386752 - RNA, 21 nt, Human
cgcccccgcccaggccccgcc

SEQ ID NO: 386753 - RNA, 32 nt, Human
cgcccccgcccccugccacccugcacugcccc

SEQ ID NO: 386754 - RNA, 20 nt, Human
cgcccccgccccgaccuccc

SEQ ID NO: 386755 - RNA, 22 nt, Human
cgcccccgccccggccccgaga

SEQ ID NO: 386756 - RNA, 19 nt, Human
cgcccccgcccgcccuccc

SEQ ID NO: 386757 - RNA, 20 nt, Human
cgcccccgcccugccccagg

SEQ ID NO: 386758 - RNA, 25 nt, Human
cgcccccgcccugucccuccgaagg

SEQ ID NO: 386759 - RNA, 17 nt, Human
cgcccccgccuccuccc

SEQ ID NO: 386760 - RNA, 32 nt, Human
cgcccccgccucugagcucccuucccauggcg

SEQ ID NO: 386761 - RNA, 32 nt, Human
cgcccccgcuccagcuccagccggguccucgc

SEQ ID NO: 386762 - RNA, 21 nt, Human
cgcccccgcugcccgccuucc

SEQ ID NO: 386763 - RNA, 32 nt, Human
cgcccccggcccagcccugccuugcgccaccc

SEQ ID NO: 386764 - RNA, 22 nt, Human
cgcccccggcccgccgccuccc

SEQ ID NO: 386765 - RNA, 20 nt, Human
cgcccccggccguccccccu

SEQ ID NO: 386766 - RNA, 20 nt, Human
cgcccccggcgcccccuccc

SEQ ID NO: 386767 - RNA, 25 nt, Human
cgcccccgggccccgcuguccuccc

SEQ ID NO: 386768 - RNA, 32 nt, Human
cgcccccggucuccucuuuugcucuggccccg

SEQ ID NO: 386769 - RNA, 22 nt, Human
cgcccccguugcaggccuggca

SEQ ID NO: 386770 - RNA, 18 nt, Human
cgcccccuccccagggug

SEQ ID NO: 386771 - RNA, 19 nt, Human
cgcccccucccugcuccca

SEQ ID NO: 386772 - RNA, 32 nt, Human
cgcccccucccuggcccugccccuagccccgc

SEQ ID NO: 386773 - RNA, 27 nt, Human
cgcccccuccuccccaccauccucccu

SEQ ID NO: 386774 - RNA, 18 nt, Human
cgcccccuccucgcucca

SEQ ID NO: 386775 - RNA, 32 nt, Human
cgcccccucggagcuuuuucuccaguuaacug

SEQ ID NO: 386776 - RNA, 25 nt, Human
cgcccccucuccugcugucccuccu

SEQ ID NO: 386777 - RNA, 32 nt, Human
cgcccccugaaacaugugccccugccaaggcc

SEQ ID NO: 386778 - RNA, 32 nt, Human
cgcccccugacucucaggccacagcuccggcc

SEQ ID NO: 386779 - RNA, 32 nt, Human
cgcccccugcacuccagccugggcuucagagc

SEQ ID NO: 386780 - RNA, 32 nt, Human
cgcccccugccccuguaacaguuacauugucu

SEQ ID NO: 386781 - RNA, 21 nt, Human
cgcccccugcgcccaaccgcc

SEQ ID NO: 386782 - RNA, 24 nt, Human
cgcccccugcgcgcuguccuaccc

SEQ ID NO: 386783 - RNA, 32 nt, Human
cgcccccugcugaggagcagccccaggagggg

SEQ ID NO: 386784 - RNA, 32 nt, Human
cgcccccugcuugugcggcgaugaucuguuug

SEQ ID NO: 386785 - RNA, 32 nt, Human
cgcccccuggagggaggaaggggaacugcauc

SEQ ID NO: 386786 - RNA, 32 nt, Human
cgcccccuggagggaggaaggggaacuguauc

SEQ ID NO: 386787 - RNA, 19 nt, Human
cgcccccuucaccaccucu

SEQ ID NO: 386788 - RNA, 32 nt, Human
cgcccccuucaccaccucuacacguucuaggc

SEQ ID NO: 386789 - RNA, 32 nt, Human
cgcccccuucagccacuccgacugccugggaa

SEQ ID NO: 386790 - RNA, 32 nt, Human
cgcccccuucccacucagcuucugccagcggg

SEQ ID NO: 386791 - RNA, 32 nt, Human
cgcccccuucucauggugcuacuuccucuguc

SEQ ID NO: 386792 - RNA, 19 nt, Human
cgcccccuugcuggcccca

SEQ ID NO: 386793 - RNA, 32 nt, Human
cgcccccuuuucugugcuucgaagucccucuc

SEQ ID NO: 386794 - RNA, 32 nt, Human
cgccccgaacccagguagugaggccagugauu

SEQ ID NO: 386795 - RNA, 32 nt, Human
cgccccgacacacaugcuuuucuccaugacac

SEQ ID NO: 386796 - RNA, 32 nt, Human
cgccccgacaccagcucuccagccugcucguc

SEQ ID NO: 386797 - RNA, 21 nt, Human
cgccccgaccucgcugccccc

SEQ ID NO: 386798 - RNA, 32 nt, Human
cgccccgagauggagagcaaagcccugcucgu

SEQ ID NO: 386799 - RNA, 32 nt, Human
cgccccgagggucggggaaggaaccgaggucc

SEQ ID NO: 386800 - RNA, 32 nt, Human
cgccccgcaccaugcccuagccccaggucuag

SEQ ID NO: 386801 - RNA, 32 nt, Human
cgccccgcaccuccagccuucccgacucgcag

SEQ ID NO: 386802 - RNA, 31 nt, Human
cgccccgcacuuuucugagcagacguccaga

SEQ ID NO: 386803 - RNA, 21 nt, Human
cgccccgccccgcuaaccgcc

SEQ ID NO: 386804 - RNA, 19 nt, Human
cgccccgccccuccucccu

SEQ ID NO: 386805 - RNA, 32 nt, Human
cgccccgcccuuccagcugaggacaggcuggc

SEQ ID NO: 386806 - RNA, 19 nt, Human
cgccccgcgcuccacggcg

SEQ ID NO: 386807 - RNA, 22 nt, Human
cgccccgcggccgccagcagaa

SEQ ID NO: 386808 - RNA, 24 nt, Human
cgccccgcggcggugcgcgcguga

SEQ ID NO: 386809 - RNA, 32 nt, Human
cgccccgcuccuccuccuccucuuccuccucc

SEQ ID NO: 386810 - RNA, 32 nt, Human
cgccccgcugacgcgcucucuccuggguccgg

SEQ ID NO: 386811 - RNA, 32 nt, Human
cgccccgcuggcugggguucucugcagcccag

SEQ ID NO: 386812 - RNA, 32 nt, Human
cgccccggacaguggcaccugggaagccuggg

SEQ ID NO: 386813 - RNA, 32 nt, Human
cgccccggaccacccucccugccggcuuuggg

SEQ ID NO: 386814 - RNA, 32 nt, Human
cgccccggagccaagcagcaacugagcgggga

SEQ ID NO: 386815 - RNA, 32 nt, Human
cgccccggccuccgggagacuggcgcaugcca

SEQ ID NO: 386816 - RNA, 32 nt, Human
cgccccggccucucgggagccguggggcagag

SEQ ID NO: 386817 - RNA, 32 nt, Human
cgccccggcgcucucccagggccccuagcuuu

SEQ ID NO: 386818 - RNA, 32 nt, Human
cgccccgggacccguuagugcccagccugcgg

SEQ ID NO: 386819 - RNA, 32 nt, Human
cgccccgggauagggacccugcagcuccaggu

SEQ ID NO: 386820 - RNA, 32 nt, Human
cgccccgggcccugauggacugaaugaaggcu

SEQ ID NO: 386821 - RNA, 32 nt, Human
cgccccgugcaggagacguagguaggacgucg

SEQ ID NO: 386822 - RNA, 32 nt, Human
cgccccuaacacccgcgccuccugcagacccg

SEQ ID NO: 386823 - RNA, 32 nt, Human
cgccccuagcucuucuacggaggggaaccgca

SEQ ID NO: 386824 - RNA, 22 nt, Human
cgccccuaggccgccgcccccu

SEQ ID NO: 386825 - RNA, 32 nt, Human
cgccccuauccagcaggaaguagcuagagcag

SEQ ID NO: 386826 - RNA, 32 nt, Human
cgccccucagcagggcagggccaguccuggcg

SEQ ID NO: 386827 - RNA, 19 nt, Human
cgccccuccccagccccca

SEQ ID NO: 386828 - RNA, 23 nt, Human
cgccccuccccccacuccaggcc

SEQ ID NO: 386829 - RNA, 32 nt, Human
cgccccucccucccuguuucccuucccucccu

SEQ ID NO: 386830 - RNA, 32 nt, Human
cgccccuccgagcaacuuuucccggugccugc

SEQ ID NO: 386831 - RNA, 32 nt, Human
cgccccucgggggcggcuguggcggaggaacg

SEQ ID NO: 386832 - RNA, 18 nt, Human
cgccccucggguggcccc

SEQ ID NO: 386833 - RNA, 32 nt, Human
cgccccucucugagagaagccgcgaggggagg

SEQ ID NO: 386834 - RNA, 32 nt, Human
cgccccugacuguggcaggaauccaagugcau

SEQ ID NO: 386835 - RNA, 32 nt, Human
cgccccugagcccacugugcguggggcucccg

SEQ ID NO: 386836 - RNA, 32 nt, Human
cgccccugcacuccagccugggugacagagcc

SEQ ID NO: 386837 - RNA, 32 nt, Human
cgccccugcagauccaggucuccaggccuugc

SEQ ID NO: 386838 - RNA, 32 nt, Human
cgccccugcauucccagcuacuugggaggcug

SEQ ID NO: 386839 - RNA, 19 nt, Human
cgccccugcucucucccca

SEQ ID NO: 386840 - RNA, 32 nt, Human
cgccccuggcugggaggaaggacugggggccc

SEQ ID NO: 386841 - RNA, 32 nt, Human
cgccccugguggacaggaugguucggcaaagc

SEQ ID NO: 386842 - RNA, 32 nt, Human
cgccccuguccucgcccugccuccugccauuc

SEQ ID NO: 386843 - RNA, 32 nt, Human
cgccccuuccucaccucuuccuuauuccauag

SEQ ID NO: 386844 - RNA, 32 nt, Human
cgccccuuccucagaucccuaucaucuuggga

SEQ ID NO: 386845 - RNA, 32 nt, Human
cgccccuucuccccgucgcuguccgcagccau

SEQ ID NO: 386846 - RNA, 32 nt, Human
cgccccuucuugccaggcuucuccucucuccu

SEQ ID NO: 386847 - RNA, 32 nt, Human
cgccccuugccugacccucagggagucagccu

SEQ ID NO: 386848 - RNA, 32 nt, Human
cgcccgaagcggcggucgguggcagggguggu

SEQ ID NO: 386849 - RNA, 32 nt, Human
cgcccgacagccgccgcgugcuggucacaguc

SEQ ID NO: 386850 - RNA, 32 nt, Human
cgcccgacccuccagccagccuucugccggcc

SEQ ID NO: 386851 - RNA, 22 nt, Human
cgcccgagcccccagccccggg

SEQ ID NO: 386852 - RNA, 32 nt, Human
cgcccgagccccgggagagaggagcgaagauc

SEQ ID NO: 386853 - RNA, 32 nt, Human
cgcccgagccuccucggccuuggagagcagcg

SEQ ID NO: 386854 - RNA, 32 nt, Human
cgcccgcaacacgccccugcuggaccacucgg

SEQ ID NO: 386855 - RNA, 32 nt, Human
cgcccgcacggcuccaggucuggggucugcgc

SEQ ID NO: 386856 - RNA, 19 nt, Human
cgcccgcaucccagcgcca

SEQ ID NO: 386857 - RNA, 32 nt, Human
cgcccgccaccugggauuacgggcgcccgcca

SEQ ID NO: 386858 - RNA, 32 nt, Human
cgcccgccauguccgagauccugcccuacagc

SEQ ID NO: 386859 - RNA, 32 nt, Human
cgcccgcccagaggaguccccgcgcccgccaa

SEQ ID NO: 386860 - RNA, 21 nt, Human
cgcccgcccccgcccggcacc

SEQ ID NO: 386861 - RNA, 32 nt, Human
cgcccgcccccucccucccuccccucccuucc

SEQ ID NO: 386862 - RNA, 32 nt, Human
cgcccgcccgcauagcacuugcagaccugccu

SEQ ID NO: 386863 - RNA, 32 nt, Human
cgcccgcccggcguccgaccccuucagcggcg

SEQ ID NO: 386864 - RNA, 32 nt, Human
cgcccgcccucacugcuguucuugccuuacag

SEQ ID NO: 386865 - RNA, 28 nt, Human
cgcccgccgagugcugcuggguugggca

SEQ ID NO: 386866 - RNA, 32 nt, Human
cgcccgccgccccgagcuccccaagccuucga

SEQ ID NO: 386867 - RNA, 21 nt, Human
cgcccgccgccgcccgucccc

SEQ ID NO: 386868 - RNA, 32 nt, Human
cgcccgccgccuggcccuccccuaccaggcug

SEQ ID NO: 386869 - RNA, 32 nt, Human
cgcccgccgcgguccccaccuccauggacgcc

SEQ ID NO: 386870 - RNA, 23 nt, Human
cgcccgccgguaccccggcgcca

SEQ ID NO: 386871 - RNA, 32 nt, Human
cgcccgccgugccaugggguucccggccgcgg

SEQ ID NO: 386872 - RNA, 32 nt, Human
cgcccgccuaucugccugccggccuggugggg

SEQ ID NO: 386873 - RNA, 32 nt, Human
cgcccgccugcucggcgaccagcggggauccu

SEQ ID NO: 386874 - RNA, 32 nt, Human
cgcccgccuggcauggccaacuggguguucug

SEQ ID NO: 386875 - RNA, 20 nt, Human
cgcccgcggaaccagaccag

SEQ ID NO: 386876 - RNA, 20 nt, Human
cgcccgcggcccagcgccgg

SEQ ID NO: 386877 - RNA, 21 nt, Human
cgcccgcggcgcgacccuccc

SEQ ID NO: 386878 - RNA, 23 nt, Human
cgcccgcggcuccccagccccag

SEQ ID NO: 386879 - RNA, 32 nt, Human
cgcccgcgucccggaagcuccagccugaacca

SEQ ID NO: 386880 - RNA, 32 nt, Human
cgcccgcucgccgccucgucucccagcggcgg

SEQ ID NO: 386881 - RNA, 24 nt, Human
cgcccgcucgccgccuuccucccu

SEQ ID NO: 386882 - RNA, 19 nt, Human
cgcccgcucggcugggucc

SEQ ID NO: 386883 - RNA, 21 nt, Human
cgcccgcugagccccggcgcc

SEQ ID NO: 386884 - RNA, 20 nt, Human
cgcccgcugcccuacccgcc

SEQ ID NO: 386885 - RNA, 32 nt, Human
cgcccgcugcugcugcucgcuuacuucagucg

SEQ ID NO: 386886 - RNA, 32 nt, Human
cgcccgcugggaaugaugaagaagaacaauuc

SEQ ID NO: 386887 - RNA, 32 nt, Human
cgcccggagccagccgcgcagcaugcacuggg

SEQ ID NO: 386888 - RNA, 32 nt, Human
cgcccggaugcagagugggggucugugucucu

SEQ ID NO: 386889 - RNA, 32 nt, Human
cgcccggcagccgccccgucugagaagugagg

SEQ ID NO: 386890 - RNA, 19 nt, Human
cgcccggcagcggcuggca

SEQ ID NO: 386891 - RNA, 32 nt, Human
cgcccggccagccugagguggggucggugccc

SEQ ID NO: 386892 - RNA, 30 nt, Human
cgcccggccccuuuugagcccugccaguga

SEQ ID NO: 386893 - RNA, 32 nt, Human
cgcccggcccggacacagggaggacgcucccg

SEQ ID NO: 386894 - RNA, 32 nt, Human
cgcccggcccuccagccagccuucugccggcc

SEQ ID NO: 386895 - RNA, 23 nt, Human
cgcccggccgcuccgggccccug

SEQ ID NO: 386896 - RNA, 18 nt, Human
cgcccggccgucacccca

SEQ ID NO: 386897 - RNA, 32 nt, Human
cgcccggccugauccugccugaagauggugcc

SEQ ID NO: 386898 - RNA, 32 nt, Human
cgcccggcugcuccucacuugcucugagacag

SEQ ID NO: 386899 - RNA, 32 nt, Human
cgcccggcuggucagcagcacagccagagucu

SEQ ID NO: 386900 - RNA, 32 nt, Human
cgcccggcugucagagggaagcagggaaugca

SEQ ID NO: 386901 - RNA, 32 nt, Human
cgcccggcuuugaacccgcccugcacugcugu

SEQ ID NO: 386902 - RNA, 32 nt, Human
cgcccgggcaggucucccuucaaacguggcgu

SEQ ID NO: 386903 - RNA, 32 nt, Human
cgcccgggcaggucuggaagcugcagggcucu

SEQ ID NO: 386904 - RNA, 32 nt, Human
cgcccgggcaggucuuuauuuuauuuaugcua

SEQ ID NO: 386905 - RNA, 19 nt, Human
cgcccgggccuuggccagc

SEQ ID NO: 386906 - RNA, 19 nt, Human
cgcccgggcugggcacuaa

SEQ ID NO: 386907 - RNA, 32 nt, Human
cgcccggggaaggcuccagugggcuagcgcgc

SEQ ID NO: 386908 - RNA, 32 nt, Human
cgcccggggcuccaccagggcagggauggugg

SEQ ID NO: 386909 - RNA, 32 nt, Human
cgcccggggugaggggacccgaaguccugagg

SEQ ID NO: 386910 - RNA, 21 nt, Human
cgcccgggucccaaacgccag

SEQ ID NO: 386911 - RNA, 32 nt, Human
cgcccggucggaggcggaaggaagugauauuu

SEQ ID NO: 386912 - RNA, 32 nt, Human
cgcccgucuccucucccugaggauuucagguc

SEQ ID NO: 386913 - RNA, 32 nt, Human
cgcccgucugcccaccaugaggaagauccgcg

SEQ ID NO: 386914 - RNA, 32 nt, Human
cgcccgugccucucccuccacaccucccugca

SEQ ID NO: 386915 - RNA, 32 nt, Human
cgcccguucuuggucuaauccccagucgugau

SEQ ID NO: 386916 - RNA, 32 nt, Human
cgcccuacaucggcagcuccccaacccugugc

SEQ ID NO: 386917 - RNA, 32 nt, Human
cgcccuagcagaugcacgugucugucgaaucg

SEQ ID NO: 386918 - RNA, 32 nt, Human
cgcccuagcauccaggcuucaggcugccgccg

SEQ ID NO: 386919 - RNA, 32 nt, Human
cgcccuagcuggaucuacuacagggaagggaa

SEQ ID NO: 386920 - RNA, 32 nt, Human
cgcccuaggcgccaccaugucgggagacaaac

SEQ ID NO: 386921 - RNA, 32 nt, Human
cgcccuagggaccaagacugaauccuccucac

SEQ ID NO: 386922 - RNA, 32 nt, Human
cgcccuaucuuccucccuguccuccuucuugg

SEQ ID NO: 386923 - RNA, 32 nt, Human
cgcccuaugcaguucugagaagguggaggcac

SEQ ID NO: 386924 - RNA, 32 nt, Human
cgcccucaccacccuccccuuccagccaccac

SEQ ID NO: 386925 - RNA, 21 nt, Human
cgcccucacccccaaccucca

SEQ ID NO: 386926 - RNA, 32 nt, Human
cgcccucaccgacggguccagaccugguggga

SEQ ID NO: 386927 - RNA, 32 nt, Human
cgcccucacugcaggcuccccuccucggcuuc

SEQ ID NO: 386928 - RNA, 21 nt, Human
cgcccuccagcugcccucccu

SEQ ID NO: 386929 - RNA, 32 nt, Human
cgcccuccagcuucugcccugccugcugugug

SEQ ID NO: 386930 - RNA, 32 nt, Human
cgcccucccagccucaacaccucagggcagga

SEQ ID NO: 386931 - RNA, 22 nt, Human
cgcccuccccaccaggcccacc

SEQ ID NO: 386932 - RNA, 32 nt, Human
cgcccuccccuccccggcccuccacagcugcu

SEQ ID NO: 386933 - RNA, 32 nt, Human
cgcccuccccucucucuugggacuggccucuu

SEQ ID NO: 386934 - RNA, 32 nt, Human
cgcccucccucugcuccugagaugcugaccca

SEQ ID NO: 386935 - RNA, 32 nt, Human
cgcccucccuuuccuucccuucgucuucccua

SEQ ID NO: 386936 - RNA, 32 nt, Human
cgcccuccgcgaggguggaggcggcggcugug

SEQ ID NO: 386937 - RNA, 32 nt, Human
cgcccuccgugcgcucugccaccgggcgcuca

SEQ ID NO: 386938 - RNA, 32 nt, Human
cgcccuccucaccaacguguccucaguggcac

SEQ ID NO: 386939 - RNA, 32 nt, Human
cgcccuccucacugcugagcuccucaccugga

SEQ ID NO: 386940 - RNA, 32 nt, Human
cgcccuccuccacccccucucccaucacccuc

SEQ ID NO: 386941 - RNA, 32 nt, Human
cgcccuccuccuccuccucgcccuccccuccc

SEQ ID NO: 386942 - RNA, 24 nt, Human
cgcccuccuuccccagggcuccuu

SEQ ID NO: 386943 - RNA, 32 nt, Human
cgcccucggccuuccgcgccagccgcagccac

SEQ ID NO: 386944 - RNA, 32 nt, Human
cgcccucucagccuguggccucugcgccuccu

SEQ ID NO: 386945 - RNA, 19 nt, Human
cgcccucucccaguccuca

SEQ ID NO: 386946 - RNA, 32 nt, Human
cgcccucucuacugucugaaccccuugucccu

SEQ ID NO: 386947 - RNA, 32 nt, Human
cgcccucucucuuuggccauccuuccuuuccc

SEQ ID NO: 386948 - RNA, 32 nt, Human
cgcccucugcccaccucccccgcuguguguca

SEQ ID NO: 386949 - RNA, 32 nt, Human
cgcccucugcuuucucuuuccuagacucgcgg

SEQ ID NO: 386950 - RNA, 32 nt, Human
cgcccucuggcugcaaauaaacuguuacaggc

SEQ ID NO: 386951 - RNA, 32 nt, Human
cgcccugaaggcagaguccagggaccuugacc

SEQ ID NO: 386952 - RNA, 32 nt, Human
cgcccugaccaccagcucuacuucccaacccc

SEQ ID NO: 386953 - RNA, 32 nt, Human
cgcccugcacacacagaaagccaaagcgaucg

SEQ ID NO: 386954 - RNA, 32 nt, Human
cgcccugcccaguuuccaguugcccuguccac

SEQ ID NO: 386955 - RNA, 32 nt, Human
cgcccugcccccugcauccccuagagacagcu

SEQ ID NO: 386956 - RNA, 32 nt, Human
cgcccugccccgcuacagaagccagacugggu

SEQ ID NO: 386957 - RNA, 19 nt, Human
cgcccugccccggcgccag

SEQ ID NO: 386958 - RNA, 16 nt, Human
cgcccugccccgggug

SEQ ID NO: 386959 - RNA, 32 nt, Human
cgcccugccuccauuuaccuugugauaucuua

SEQ ID NO: 386960 - RNA, 32 nt, Human
cgcccugccucggccuugcgccuguguagggg

SEQ ID NO: 386961 - RNA, 32 nt, Human
cgcccugccucuguggcucugccuguggaucg

SEQ ID NO: 386962 - RNA, 32 nt, Human
cgcccugccuggccucauccuuguauuuaauu

SEQ ID NO: 386963 - RNA, 18 nt, Human
cgcccugcggcccucccu

SEQ ID NO: 386964 - RNA, 32 nt, Human
cgcccugcggucccgccgccuccggggccucc

SEQ ID NO: 386965 - RNA, 32 nt, Human
cgcccugcucagcgcguccucccgcggcggcc

SEQ ID NO: 386966 - RNA, 32 nt, Human
cgcccugcuccugcugcgucgugaggacccgg

SEQ ID NO: 386967 - RNA, 32 nt, Human
cgcccugcugcacuccagccugggcaacagag

SEQ ID NO: 386968 - RNA, 32 nt, Human
cgcccugcugcacuccagccugggugacagag

SEQ ID NO: 386969 - RNA, 32 nt, Human
cgcccugcuguaaccucugucuuggcagggcu

SEQ ID NO: 386970 - RNA, 17 nt, Human
cgcccugcuuggcccca

SEQ ID NO: 386971 - RNA, 32 nt, Human
cgcccuggacccacuuucucucucaaacuguc

SEQ ID NO: 386972 - RNA, 32 nt, Human
cgcccuggauccucugccugcccccucccccg

SEQ ID NO: 386973 - RNA, 32 nt, Human
cgcccuggaugccacccagugcagccuggcac

SEQ ID NO: 386974 - RNA, 22 nt, Human
cgcccuggcuaacauggugaaa

SEQ ID NO: 386975 - RNA, 32 nt, Human
cgcccuggcucacaccuguaaucccagcacuc

SEQ ID NO: 386976 - RNA, 21 nt, Human
cgcccuggcuggagugcaaug

SEQ ID NO: 386977 - RNA, 32 nt, Human
cgcccugggaggaggaugagauccgcagggac

SEQ ID NO: 386978 - RNA, 32 nt, Human
cgcccugggcagcuagagugucucagcccggu

SEQ ID NO: 386979 - RNA, 32 nt, Human
cgcccuggguguccucaccccuucccuggccu

SEQ ID NO: 386980 - RNA, 32 nt, Human
cgcccuggugcuggcugaccacccccugcccu

SEQ ID NO: 386981 - RNA, 32 nt, Human
cgcccuguaggcuggggaugggcugcugugug

SEQ ID NO: 386982 - RNA, 32 nt, Human
cgcccugucacccaggcuggagugcaguggca

SEQ ID NO: 386983 - RNA, 32 nt, Human
cgcccugucacccaggcuggagugcaguggug

SEQ ID NO: 386984 - RNA, 32 nt, Human
cgcccugucgccaggcuggaguguaguggcau

SEQ ID NO: 386985 - RNA, 32 nt, Human
cgcccugucucagagcugaugaccucaccguu

SEQ ID NO: 386986 - RNA, 32 nt, Human
cgcccugucugggaauggggccgcccccgggc

SEQ ID NO: 386987 - RNA, 32 nt, Human
cgcccugugcccaccccacaucccuuuccgaa

SEQ ID NO: 386988 - RNA, 32 nt, Human
cgcccugugcucaccucugccuggcucagcga

SEQ ID NO: 386989 - RNA, 32 nt, Human
cgcccuguggggacccggaccaggagggaccc

SEQ ID NO: 386990 - RNA, 31 nt, Human
cgcccuguugcagcucucaugccaagaccug

SEQ ID NO: 386991 - RNA, 32 nt, Human
cgcccuguugcccaggcugaagugcaguggug

SEQ ID NO: 386992 - RNA, 32 nt, Human
cgcccuuccagcccuuccccagccccuccucu

SEQ ID NO: 386993 - RNA, 32 nt, Human
cgcccuucccucuucuccuuacauauuauagg

SEQ ID NO: 386994 - RNA, 32 nt, Human
cgcccuucugucuggccagcugcccacgaccu

SEQ ID NO: 386995 - RNA, 32 nt, Human
cgcccuucuuccccaucucucccccgggccug

SEQ ID NO: 386996 - RNA, 32 nt, Human
cgcccuuguugccuccccgucccugucucccc

SEQ ID NO: 386997 - RNA, 32 nt, Human
cgcccuuucucagagcagagggccagguaggg

SEQ ID NO: 386998 - RNA, 32 nt, Human
cgcccuuugcaccuccuaucuccaggguccgc

SEQ ID NO: 386999 - RNA, 19 nt, Human
cgcccuuugcagcagcccc

SEQ ID NO: 387000 - RNA, 32 nt, Human
cgcccuuugcagcauuucacgugugggcuaug

SEQ ID NO: 387001 - RNA, 32 nt, Human
cgcccuuuggguugugggcagcucccugaaca

SEQ ID NO: 387002 - RNA, 19 nt, Human
cgcccuuuguugagcccca

SEQ ID NO: 387003 - RNA, 32 nt, Human
cgccgaagcagcccgggacugcgcagcgcccc

SEQ ID NO: 387004 - RNA, 32 nt, Human
cgccgacaaccacauucccccggcuauucuga

SEQ ID NO: 387005 - RNA, 32 nt, Human
cgccgacacccaccccagcacugcaggcagcg

SEQ ID NO: 387006 - RNA, 32 nt, Human
cgccgaccaauggcugcuucauccccgacguu

SEQ ID NO: 387007 - RNA, 22 nt, Human
cgccgaccgccccggaccccug

SEQ ID NO: 387008 - RNA, 32 nt, Human
cgccgacgagaccauggaagagccaucugucc

SEQ ID NO: 387009 - RNA, 32 nt, Human
cgccgacucucuuccuccuugcaagcccuucg

SEQ ID NO: 387010 - RNA, 32 nt, Human
cgccgagaaauccuggaucuucccagggauuc

SEQ ID NO: 387011 - RNA, 32 nt, Human
cgccgagaagugcagaagucacaguugccccu

SEQ ID NO: 387012 - RNA, 32 nt, Human
cgccgagacggcccuggcagaggucgggcccc

SEQ ID NO: 387013 - RNA, 32 nt, Human
cgccgagagccaccagcagcugugcugccaac

SEQ ID NO: 387014 - RNA, 32 nt, Human
cgccgagcaaagccgggcugggcuuggagcug

SEQ ID NO: 387015 - RNA, 32 nt, Human
cgccgagccagcugccagaaugccgaacuggg

SEQ ID NO: 387016 - RNA, 32 nt, Human
cgccgagcccaccgucgcccccuagacccuga

SEQ ID NO: 387017 - RNA, 32 nt, Human
cgccgagccccgcaccuggaagcugggaggcc

SEQ ID NO: 387018 - RNA, 32 nt, Human
cgccgagccuccccugccuccuggccgccucu

SEQ ID NO: 387019 - RNA, 32 nt, Human
cgccgagccucggagagcaggggcuuugcuuu

SEQ ID NO: 387020 - RNA, 32 nt, Human
cgccgaggaacaagucggucaggaagcccgcg

SEQ ID NO: 387021 - RNA, 32 nt, Human
cgccgaggauacacagugcugaggcagaacgc

SEQ ID NO: 387022 - RNA, 32 nt, Human
cgccgaggcacccggggcugggccagcgcccc

SEQ ID NO: 387023 - RNA, 32 nt, Human
cgccgaggcgggcggaucaugaggucaggaga

SEQ ID NO: 387024 - RNA, 32 nt, Human
cgccgaggcuaucuccaacuguucaccgaaga

SEQ ID NO: 387025 - RNA, 32 nt, Human
cgccgaggcuuagagagcucgaccuccucaag

SEQ ID NO: 387026 - RNA, 22 nt, Human
cgccgagggccccgggacccug

SEQ ID NO: 387027 - RNA, 22 nt, Human
cgccgagggccugagugcucca

SEQ ID NO: 387028 - RNA, 32 nt, Human
cgccgaggucgagucugguggcgccucgguau

SEQ ID NO: 387029 - RNA, 22 nt, Human
cgccgaguaguggcaacggcgu

SEQ ID NO: 387030 - RNA, 32 nt, Human
cgccgaguaguggcaacggcgugguugcgucg

SEQ ID NO: 387031 - RNA, 32 nt, Human
cgccgagucggaggggguggcagugagcggcg

SEQ ID NO: 387032 - RNA, 32 nt, Human
cgccgcacacacacauuaacacacuugagcca

SEQ ID NO: 387033 - RNA, 32 nt, Human
cgccgcaccgaggccugggcccugccaaagug

SEQ ID NO: 387034 - RNA, 32 nt, Human
cgccgcaccgggccugcugggcuccgcuuccg

SEQ ID NO: 387035 - RNA, 24 nt, Human
cgccgcacgcugugcuccagggag

SEQ ID NO: 387036 - RNA, 32 nt, Human
cgccgcacgggggaggcuccaccccacaauug

SEQ ID NO: 387037 - RNA, 32 nt, Human
cgccgcagagccggauuaacugugcugauaag

SEQ ID NO: 387038 - RNA, 23 nt, Human
cgccgcagccaccaccgccgcca

SEQ ID NO: 387039 - RNA, 32 nt, Human
cgccgcagccccgggcucgccaugcuccuggc

SEQ ID NO: 387040 - RNA, 21 nt, Human
cgccgcagcccgcagccgcca

SEQ ID NO: 387041 - RNA, 24 nt, Human
cgccgcagcgcccucaggccgcca

SEQ ID NO: 387042 - RNA, 32 nt, Human
cgccgcagcgcucgcuuucccuucccuccucu

SEQ ID NO: 387043 - RNA, 32 nt, Human
cgccgcauccaccuccuccgccgccugcgacc

SEQ ID NO: 387044 - RNA, 32 nt, Human
cgccgcaucuuccccuccucuuuggguggauu

SEQ ID NO: 387045 - RNA, 32 nt, Human
cgccgcaugccuguagucccagcuacucggga

SEQ ID NO: 387046 - RNA, 32 nt, Human
cgccgcaugcuggccggcucuguggugaucgu

SEQ ID NO: 387047 - RNA, 32 nt, Human
cgccgccacagccauggccgagaguggugaaa

SEQ ID NO: 387048 - RNA, 32 nt, Human
cgccgccaccccgggaccagaccuaaagggag

SEQ ID NO: 387049 - RNA, 32 nt, Human
cgccgccaccgccaccaccaccuccaccgccg

SEQ ID NO: 387050 - RNA, 32 nt, Human
cgccgccacucccaugccugcugcugggaccg

SEQ ID NO: 387051 - RNA, 32 nt, Human
cgccgccacugcugcugccaccucuuauaugu

SEQ ID NO: 387052 - RNA, 32 nt, Human
cgccgccagccgcggcggcccgggcgccggcc

SEQ ID NO: 387053 - RNA, 32 nt, Human
cgccgccaugaagaagcaguucaaccgcauga

SEQ ID NO: 387054 - RNA, 32 nt, Human
cgccgcccagaaucccagcccagaaucccgac

SEQ ID NO: 387055 - RNA, 32 nt, Human
cgccgcccccucccccgcaccaugagcaaccu

SEQ ID NO: 387056 - RNA, 32 nt, Human
cgccgcccccuucuccagugcucuccagcccg

SEQ ID NO: 387057 - RNA, 32 nt, Human
cgccgccccucggagaccacuccagcucggac

SEQ ID NO: 387058 - RNA, 32 nt, Human
cgccgcccgcaccuccugaucccuucaagagc

SEQ ID NO: 387059 - RNA, 32 nt, Human
cgccgcccgccucagcccaacauggcgaugca

SEQ ID NO: 387060 - RNA, 23 nt, Human
cgccgcccgcgccgcgcuggccc

SEQ ID NO: 387061 - RNA, 25 nt, Human
cgccgcccgcgcgcccccgggcccc

SEQ ID NO: 387062 - RNA, 32 nt, Human
cgccgcccgcuccccugcgcccucuccucucc

SEQ ID NO: 387063 - RNA, 21 nt, Human
cgccgcccggucgccagggag

SEQ ID NO: 387064 - RNA, 32 nt, Human
cgccgcccuccagugagcagagcugggcucag

SEQ ID NO: 387065 - RNA, 32 nt, Human
cgccgcccuccccgcucuccuuccugggcgag

SEQ ID NO: 387066 - RNA, 32 nt, Human
cgccgcccucgaggcucccucugacugaaggc

SEQ ID NO: 387067 - RNA, 19 nt, Human
cgccgcccugcagccccca

SEQ ID NO: 387068 - RNA, 32 nt, Human
cgccgcccugcuccaggcucuaggacugcgcg

SEQ ID NO: 387069 - RNA, 32 nt, Human
cgccgcccuguaguucuuggcugggucuggag

SEQ ID NO: 387070 - RNA, 32 nt, Human
cgccgccgagccaccaucaugccugggcacuu

SEQ ID NO: 387071 - RNA, 32 nt, Human
cgccgccgcaaucucaccucucccaggcccaa

SEQ ID NO: 387072 - RNA, 32 nt, Human
cgccgccgcagccaccaccgccgccaccgcag

SEQ ID NO: 387073 - RNA, 23 nt, Human
cgccgccgcagcuccccgcgcuc

SEQ ID NO: 387074 - RNA, 32 nt, Human
cgccgccgccaccaccaccgccauagauacac

SEQ ID NO: 387075 - RNA, 32 nt, Human
cgccgccgccgccaccaccaccgccauagaua

SEQ ID NO: 387076 - RNA, 32 nt, Human
cgccgccgccgccaccaccgcugccacugccg

SEQ ID NO: 387077 - RNA, 32 nt, Human
cgccgccgccgccaccacugccaccacggucg

SEQ ID NO: 387078 - RNA, 18 nt, Human
cgccgccgccgccgccgc

SEQ ID NO: 387079 - RNA, 21 nt, Human
cgccgccgccgccgccgccgc

SEQ ID NO: 387080 - RNA, 32 nt, Human
cgccgccgccgccgccuccagccgggccgccg

SEQ ID NO: 387081 - RNA, 32 nt, Human
cgccgccgccgccgccuccucagcuucagccu

SEQ ID NO: 387082 - RNA, 20 nt, Human
cgccgccgccgccgcugcca

SEQ ID NO: 387083 - RNA, 32 nt, Human
cgccgccgccgcugcugacccggcggccggcc

SEQ ID NO: 387084 - RNA, 32 nt, Human
cgccgccgccuccucagcuucagccuccgcgc

SEQ ID NO: 387085 - RNA, 19 nt, Human
cgccgccgcgacagcagca

SEQ ID NO: 387086 - RNA, 32 nt, Human
cgccgccgcugcugggcaccgugucgucgccc

SEQ ID NO: 387087 - RNA, 32 nt, Human
cgccgccggagggagaggggagcugcgggcca

SEQ ID NO: 387088 - RNA, 32 nt, Human
cgccgccggcggcggagggagcgugacugcgc

SEQ ID NO: 387089 - RNA, 32 nt, Human
cgccgccggcugccccagcccugcgugaaggc

SEQ ID NO: 387090 - RNA, 32 nt, Human
cgccgccggggaaacgccgccacgggcugcau

SEQ ID NO: 387091 - RNA, 32 nt, Human
cgccgccggggaggggacgagcaccaugucga

SEQ ID NO: 387092 - RNA, 32 nt, Human
cgccgccguagcugccccaggcuccccgcccc

SEQ ID NO: 387093 - RNA, 32 nt, Human
cgccgccguuuccugcgagccagccugagcgc

SEQ ID NO: 387094 - RNA, 32 nt, Human
cgccgccuaagcugcagccgccggagccgcag

SEQ ID NO: 387095 - RNA, 32 nt, Human
cgccgccucacugcagccagcgugguccuagg

SEQ ID NO: 387096 - RNA, 32 nt, Human
cgccgccuccaccaccaccaccgccgccgccu

SEQ ID NO: 387097 - RNA, 20 nt, Human
cgccgccucccgcgcggcca

SEQ ID NO: 387098 - RNA, 32 nt, Human
cgccgccucccgguuuugggcagcccuggcca

SEQ ID NO: 387099 - RNA, 32 nt, Human
cgccgccucccucccuuccuuuccuuuccgcu

SEQ ID NO: 387100 - RNA, 32 nt, Human
cgccgccuccgagccgggcagcaacagccccg

SEQ ID NO: 387101 - RNA, 32 nt, Human
cgccgccugcagccucuuccaagcccugcguc

SEQ ID NO: 387102 - RNA, 32 nt, Human
cgccgccugccuggcaccuaggagcgcagcgg

SEQ ID NO: 387103 - RNA, 32 nt, Human
cgccgccugccugggccgggccgaggaugcgg

SEQ ID NO: 387104 - RNA, 32 nt, Human
cgccgccuggcaggcccugcgcaccaggaacc

SEQ ID NO: 387105 - RNA, 32 nt, Human
cgccgccuggcguagggagggcugcgggcgcu

SEQ ID NO: 387106 - RNA, 32 nt, Human
cgccgccugggcagcgugugcggguccguggc

SEQ ID NO: 387107 - RNA, 32 nt, Human
cgccgccugggucccuuugauaguuucagaaa

SEQ ID NO: 387108 - RNA, 32 nt, Human
cgccgccugguaauuauuugcauuacaaaccg

SEQ ID NO: 387109 - RNA, 32 nt, Human
cgccgccuguuuccucaccuucucuccccuuu

SEQ ID NO: 387110 - RNA, 32 nt, Human
cgccgccuugcaccaucgcaucauguccgggc

SEQ ID NO: 387111 - RNA, 32 nt, Human
cgccgccuugccccauuggccugggccaguuc

SEQ ID NO: 387112 - RNA, 32 nt, Human
cgccgcgacuugccccaucugcugcagaggag

SEQ ID NO: 387113 - RNA, 32 nt, Human
cgccgcgagccaguaucucagagagcgcgggg

SEQ ID NO: 387114 - RNA, 22 nt, Human
cgccgcgcagccccggccgcca

SEQ ID NO: 387115 - RNA, 32 nt, Human
cgccgcgcagccccuccaucuuccugcucggc

SEQ ID NO: 387116 - RNA, 32 nt, Human
cgccgcgccagacccucgcccagacauggggg

SEQ ID NO: 387117 - RNA, 32 nt, Human
cgccgcgccauggccaccuccccgcagaaguc

SEQ ID NO: 387118 - RNA, 32 nt, Human
cgccgcgcccaggaguuggggauguccuacaa

SEQ ID NO: 387119 - RNA, 32 nt, Human
cgccgcgccccaggaaucagugacauucaaag

SEQ ID NO: 387120 - RNA, 32 nt, Human
cgccgcgccccuucccccucccgccuccccgg

SEQ ID NO: 387121 - RNA, 22 nt, Human
cgccgcgccgccguccucgccu

SEQ ID NO: 387122 - RNA, 23 nt, Human
cgccgcgccuccccgggccacug

SEQ ID NO: 387123 - RNA, 15 nt, Human
cgccgcgccucggcu

SEQ ID NO: 387124 - RNA, 19 nt, Human
cgccgcgcgccgccgccac

SEQ ID NO: 387125 - RNA, 20 nt, Human
cgccgcgcgguccugcagcc

SEQ ID NO: 387126 - RNA, 32 nt, Human
cgccgcgcucagcuuccaucgcugggcgguca

SEQ ID NO: 387127 - RNA, 32 nt, Human
cgccgcggacacaccguccgucuccgggacgc

SEQ ID NO: 387128 - RNA, 20 nt, Human
cgccgcggaccgcagcuccu

SEQ ID NO: 387129 - RNA, 32 nt, Human
cgccgcggagggggugcugggccgcgcugugc

SEQ ID NO: 387130 - RNA, 23 nt, Human
cgccgcggccucgccccggcccc

SEQ ID NO: 387131 - RNA, 22 nt, Human
cgccgcggcgcgcccgggcucc

SEQ ID NO: 387132 - RNA, 32 nt, Human
cgccgcggcggggaccagcccagagagacccc

SEQ ID NO: 387133 - RNA, 32 nt, Human
cgccgcggcugagccaugcggcucccugaccu

SEQ ID NO: 387134 - RNA, 23 nt, Human
cgccgcgggauuuggagcugccu

SEQ ID NO: 387135 - RNA, 20 nt, Human
cgccgcgggcacuucuccug

SEQ ID NO: 387136 - RNA, 21 nt, Human
cgccgcgggcccggggccucc

SEQ ID NO: 387137 - RNA, 22 nt, Human
cgccgcgggccugcugagcucc

SEQ ID NO: 387138 - RNA, 21 nt, Human
cgccgcgggcgccuucggcuc

SEQ ID NO: 387139 - RNA, 24 nt, Human
cgccgcgggcgcugggccgcucug

SEQ ID NO: 387140 - RNA, 19 nt, Human
cgccgcggggcacacgcug

SEQ ID NO: 387141 - RNA, 32 nt, Human
cgccgcgggguccccgccagcccagggcacuc

SEQ ID NO: 387142 - RNA, 24 nt, Human
cgccgcggggugucacggccgcca

SEQ ID NO: 387143 - RNA, 32 nt, Human
cgccgcgguugaugugguugggccggggcuga

SEQ ID NO: 387144 - RNA, 32 nt, Human
cgccgcgugaccacaugggcagcucuguucac

SEQ ID NO: 387145 - RNA, 32 nt, Human
cgccgcgugccuggccccgcucgcccgugccg

SEQ ID NO: 387146 - RNA, 32 nt, Human
cgccgcgugcgcgagccgggguugcagcccag

SEQ ID NO: 387147 - RNA, 32 nt, Human
cgccgcguucuccuuuagccucccgggccucu

SEQ ID NO: 387148 - RNA, 32 nt, Human
cgccgcuacauuccagccugggcaacacgagc

SEQ ID NO: 387149 - RNA, 32 nt, Human
cgccgcuagguagagucugagggcuuguaguu

SEQ ID NO: 387150 - RNA, 32 nt, Human
cgccgcucagcucucuggaaacuagcgccuca

SEQ ID NO: 387151 - RNA, 32 nt, Human
cgccgcucaucaacaggaaagcuugggaaaga

SEQ ID NO: 387152 - RNA, 32 nt, Human
cgccgcuccugcccgggccccugcugcugcug

SEQ ID NO: 387153 - RNA, 32 nt, Human
cgccgcucuccccuccuguggaucccuccgca

SEQ ID NO: 387154 - RNA, 21 nt, Human
cgccgcucucucccgggccag

SEQ ID NO: 387155 - RNA, 22 nt, Human
cgccgcugagccucugcggccu

SEQ ID NO: 387156 - RNA, 32 nt, Human
cgccgcugcacuccagccugagcacagagcaa

SEQ ID NO: 387157 - RNA, 32 nt, Human
cgccgcugcacuccagccugggcaacagagua

SEQ ID NO: 387158 - RNA, 32 nt, Human
cgccgcugcacuccagccugggcgacagagcg

SEQ ID NO: 387159 - RNA, 32 nt, Human
cgccgcugcacuccagccugggcgacagagug

SEQ ID NO: 387160 - RNA, 32 nt, Human
cgccgcugcacuccagccugggcggcagagcg

SEQ ID NO: 387161 - RNA, 32 nt, Human
cgccgcugcacuccagccugggugacagagug

SEQ ID NO: 387162 - RNA, 32 nt, Human
cgccgcugcacuccagcuugaaugacagaggg

SEQ ID NO: 387163 - RNA, 32 nt, Human
cgccgcugcauuccagccugggugacagagcg

SEQ ID NO: 387164 - RNA, 21 nt, Human
cgccgcugccgccguccuccc

SEQ ID NO: 387165 - RNA, 31 nt, Human
cgccgcugcgcgcaugggccuguuccuggcc

SEQ ID NO: 387166 - RNA, 31 nt, Human
cgccgcugcgcugguaagccuguguuuuggu

SEQ ID NO: 387167 - RNA, 32 nt, Human
cgccgcugcgcugguaagccuguguuuugguu

SEQ ID NO: 387168 - RNA, 32 nt, Human
cgccgcugcuccuccgccuggccugggccguc

SEQ ID NO: 387169 - RNA, 32 nt, Human
cgccgcuggcugcugcucacauggugucuggg

SEQ ID NO: 387170 - RNA, 32 nt, Human
cgccgcugggcagaggagccggagacgcgagc

SEQ ID NO: 387171 - RNA, 32 nt, Human
cgccgcuggugccggguccuugaggagagcgc

SEQ ID NO: 387172 - RNA, 32 nt, Human
cgccgcuguugcugcugacuccaaggucugcu

SEQ ID NO: 387173 - RNA, 32 nt, Human
cgccgcuguugcugcugacuccaaggucuucu

SEQ ID NO: 387174 - RNA, 32 nt, Human
cgccgcuuacucucagcggaugcagcugcuca

SEQ ID NO: 387175 - RNA, 32 nt, Human
cgccggacccuccucugcacuuuggggaggcg

SEQ ID NO: 387176 - RNA, 32 nt, Human
cgccggaccugccaggaggugggcuggcgcgg

SEQ ID NO: 387177 - RNA, 32 nt, Human
cgccggacgaagaagagaagggcaguugggcc

SEQ ID NO: 387178 - RNA, 32 nt, Human
cgccggagaggaaggccggcuggcuguggcgc

SEQ ID NO: 387179 - RNA, 32 nt, Human
cgccggaggaggcauuaacgagaccggguaag

SEQ ID NO: 387180 - RNA, 32 nt, Human
cgccggaggaggcggagguggcgcggcaggag

SEQ ID NO: 387181 - RNA, 32 nt, Human
cgccggaggagguggcggcggcugggagaggc

SEQ ID NO: 387182 - RNA, 32 nt, Human
cgccggaggcucccccuccucuccucuccccu

SEQ ID NO: 387183 - RNA, 32 nt, Human
cgccggaggggccuggagugcggcggcggcgg

SEQ ID NO: 387184 - RNA, 32 nt, Human
cgccggaugcacuagcccugaagagggguguc

SEQ ID NO: 387185 - RNA, 32 nt, Human
cgccggcaccccuugcuuccucccucuguugu

SEQ ID NO: 387186 - RNA, 32 nt, Human
cgccggcaccgccugcaccgcccuuccgcccg

SEQ ID NO: 387187 - RNA, 32 nt, Human
cgccggcagcauggacaaaggucuccaugcag

SEQ ID NO: 387188 - RNA, 32 nt, Human
cgccggcagcuuccagcccugccgcagaagug

SEQ ID NO: 387189 - RNA, 32 nt, Human
cgccggcauccagcagugcaucgcugaaguug

SEQ ID NO: 387190 - RNA, 32 nt, Human
cgccggccacacuggucacaggcaaaguccag

SEQ ID NO: 387191 - RNA, 32 nt, Human
cgccggcccagccugauggaacccacuguacc

SEQ ID NO: 387192 - RNA, 32 nt, Human
cgccggcccggagagcgcgcggcggcggcggc

SEQ ID NO: 387193 - RNA, 32 nt, Human
cgccggcccugccugcugcucugcccagggca

SEQ ID NO: 387194 - RNA, 32 nt, Human
cgccggcccuggggcagcagagccaggaugga

SEQ ID NO: 387195 - RNA, 32 nt, Human
cgccggccgaggaggagggguggggguagcgg

SEQ ID NO: 387196 - RNA, 32 nt, Human
cgccggccuccaggccccuccuggcuggcgag

SEQ ID NO: 387197 - RNA, 32 nt, Human
cgccggccuccagggcgcgcaggcuguuguug

SEQ ID NO: 387198 - RNA, 16 nt, Human
cgccggccucucccca

SEQ ID NO: 387199 - RNA, 32 nt, Human
cgccggccugucagagcaaaucagccucaggc

SEQ ID NO: 387200 - RNA, 32 nt, Human
cgccggccuuagugaccccaucuaugcugcug

SEQ ID NO: 387201 - RNA, 32 nt, Human
cgccggcgacugccugccccagccccucagug

SEQ ID NO: 387202 - RNA, 32 nt, Human
cgccggcucugccuccucccccuucccgaccc

SEQ ID NO: 387203 - RNA, 32 nt, Human
cgccggcuucaggacaugcacggacacagccg

SEQ ID NO: 387204 - RNA, 32 nt, Human
cgccgggaaacugggaaggcuggugagcgaga

SEQ ID NO: 387205 - RNA, 32 nt, Human
cgccgggaacccuggggcauggagaggucuga

SEQ ID NO: 387206 - RNA, 32 nt, Human
cgccgggacccugccugugacucuccaggacu

SEQ ID NO: 387207 - RNA, 32 nt, Human
cgccgggaccugccucaugcaggaggaggagg

SEQ ID NO: 387208 - RNA, 32 nt, Human
cgccgggacugacaguugccggaagugaggcu

SEQ ID NO: 387209 - RNA, 32 nt, Human
cgccgggacuuuaaccccuugugggcucugcg

SEQ ID NO: 387210 - RNA, 32 nt, Human
cgccgggagaguugagaauuauggcugcagga

SEQ ID NO: 387211 - RNA, 32 nt, Human
cgccgggagggagccagaucccagcgaucuuc

SEQ ID NO: 387212 - RNA, 32 nt, Human
cgccgggaggggcaaccaggccucccagcgag

SEQ ID NO: 387213 - RNA, 32 nt, Human
cgccgggcagggcggcgggcgcgcucagucug

SEQ ID NO: 387214 - RNA, 32 nt, Human
cgccgggcccgcaguuauugccgcugccuggu

SEQ ID NO: 387215 - RNA, 32 nt, Human
cgccgggccggugggagccagcggcgcgcggu

SEQ ID NO: 387216 - RNA, 32 nt, Human
cgccgggccucaggcuccuuccuacuguccga

SEQ ID NO: 387217 - RNA, 29 nt, Human
cgccgggcgacaccacgaguuauuuccca

SEQ ID NO: 387218 - RNA, 32 nt, Human
cgccgggcugcgugcacguccagccugaccgg

SEQ ID NO: 387219 - RNA, 32 nt, Human
cgccggggaagaggacacgcagaggagcagcu

SEQ ID NO: 387220 - RNA, 32 nt, Human
cgccggggaagaggaggaggaaggaaagaaag

SEQ ID NO: 387221 - RNA, 32 nt, Human
cgccggggaccaggaaccuccagcgcugagau

SEQ ID NO: 387222 - RNA, 17 nt, Human
cgccggggcccugagcc

SEQ ID NO: 387223 - RNA, 32 nt, Human
cgccggggccgcggguggaggucggggaugag

SEQ ID NO: 387224 - RNA, 32 nt, Human
cgccggucccgguccugagcuggaccagagcc

SEQ ID NO: 387225 - RNA, 21 nt, Human
cgccggucugggcugugcgga

SEQ ID NO: 387226 - RNA, 32 nt, Human
cgccggugagagaagagaacgcgagaagggaa

SEQ ID NO: 387227 - RNA, 32 nt, Human
cgccggugagcacgggcucccucucgcguggc

SEQ ID NO: 387228 - RNA, 32 nt, Human
cgccgguguccccagagaccaggcuguguccc

SEQ ID NO: 387229 - RNA, 32 nt, Human
cgccgguucauuuugcaccuuauucagaaaau

SEQ ID NO: 387230 - RNA, 32 nt, Human
cgccgucccagugcccucagaggcaccuagac

SEQ ID NO: 387231 - RNA, 32 nt, Human
cgccguccccacccccuccauuuggcagcuca

SEQ ID NO: 387232 - RNA, 32 nt, Human
cgccgucccccuucaucuccccacggacugua

SEQ ID NO: 387233 - RNA, 32 nt, Human
cgccgucccugcggcaccugccccagagcccg

SEQ ID NO: 387234 - RNA, 32 nt, Human
cgccgucccugugcagcugggcucagacgugu

SEQ ID NO: 387235 - RNA, 23 nt, Human
cgccguccgccccagccccgggg

SEQ ID NO: 387236 - RNA, 32 nt, Human
cgccgucgccacucgggagaggcugggugagg

SEQ ID NO: 387237 - RNA, 32 nt, Human
cgccgucgcccaggcgccccgcaauguagcug

SEQ ID NO: 387238 - RNA, 32 nt, Human
cgccgucgcuuccugcuaaccccacauccuca

SEQ ID NO: 387239 - RNA, 32 nt, Human
cgccgucuccuccucuugcccgcgcaggcacc

SEQ ID NO: 387240 - RNA, 32 nt, Human
cgccgucugcccacuccucuagccggaaccug

SEQ ID NO: 387241 - RNA, 32 nt, Human
cgccgucugcucccucuccacucucuucucaa

SEQ ID NO: 387242 - RNA, 19 nt, Human
cgccgugccgcuccucccu

SEQ ID NO: 387243 - RNA, 32 nt, Human
cgccgugccugccucgcgcucccuguuacggc

SEQ ID NO: 387244 - RNA, 32 nt, Human
cgccguggcagggauccuggagcacugcguga

SEQ ID NO: 387245 - RNA, 32 nt, Human
cgccguggcucacaccuguaauccuagcgcuu

SEQ ID NO: 387246 - RNA, 32 nt, Human
cgccguggcucacgccuguaaucccagcacuu

SEQ ID NO: 387247 - RNA, 32 nt, Human
cgccguggcucacucuuguaaucccaaaacuu

SEQ ID NO: 387248 - RNA, 32 nt, Human
cgccgugucauccaggcuggagugcgguggug

SEQ ID NO: 387249 - RNA, 32 nt, Human
cgccguguuggccaggcuggucucgaacuccu

SEQ ID NO: 387250 - RNA, 32 nt, Human
cgccguuccggaaaagucauggaagacagccc

SEQ ID NO: 387251 - RNA, 32 nt, Human
cgccguugcacuccagccugggcaacaagagu

SEQ ID NO: 387252 - RNA, 32 nt, Human
cgccguugcccaggcuggagugcgguggcaug

SEQ ID NO: 387253 - RNA, 32 nt, Human
cgccguugggggaagagcugugucacagccag

SEQ ID NO: 387254 - RNA, 32 nt, Human
cgccguuuccucugaagaaacagaaccagaga

SEQ ID NO: 387255 - RNA, 32 nt, Human
cgccuaaagugggcugcuggggagacaagauc

SEQ ID NO: 387256 - RNA, 32 nt, Human
cgccuacagccccucugaaaucaaagagaucu

SEQ ID NO: 387257 - RNA, 32 nt, Human
cgccuaccagagguggaagagacagugugggc

SEQ ID NO: 387258 - RNA, 16 nt, Human
cgccuacgcgggaacc

SEQ ID NO: 387259 - RNA, 21 nt, Human
cgccuacgcuggagugcagug

SEQ ID NO: 387260 - RNA, 32 nt, Human
cgccuacugggugggagcccugguuuccaucu

SEQ ID NO: 387261 - RNA, 32 nt, Human
cgccuagaaaacuugcucucaaacuucagggu

SEQ ID NO: 387262 - RNA, 32 nt, Human
cgccuagcccucugggaauuguguucuggguc

SEQ ID NO: 387263 - RNA, 32 nt, Human
cgccuagccgcgccggucccagaaguggcgaa

SEQ ID NO: 387264 - RNA, 18 nt, Human
cgccuagcuccucggcuc

SEQ ID NO: 387265 - RNA, 32 nt, Human
cgccuaggcacacaggccagccccagucucac

SEQ ID NO: 387266 - RNA, 32 nt, Human
cgccuaggccaucugggugcugggcauggauu

SEQ ID NO: 387267 - RNA, 32 nt, Human
cgccuaggcugcagugcaguggcgggaucucg

SEQ ID NO: 387268 - RNA, 32 nt, Human
cgccuaggcuggagcgccgugguacagucuug

SEQ ID NO: 387269 - RNA, 21 nt, Human
cgccuaggcuggagugcagug

SEQ ID NO: 387270 - RNA, 32 nt, Human
cgccuagggaccccugcucccagccugcugag

SEQ ID NO: 387271 - RNA, 32 nt, Human
cgccuagugagggcaggagagaggaggacgca

SEQ ID NO: 387272 - RNA, 32 nt, Human
cgccuagugcagccgugagaaaagggccaccc

SEQ ID NO: 387273 - RNA, 32 nt, Human
cgccuauacacacgcacacacgcacacacaca

SEQ ID NO: 387274 - RNA, 32 nt, Human
cgccucaaaugagagacugguguggggaggag

SEQ ID NO: 387275 - RNA, 30 nt, Human
cgccucaacucaagcaauccucccaccuca

SEQ ID NO: 387276 - RNA, 32 nt, Human
cgccucaccccggcuccugggcuuugaugguc

SEQ ID NO: 387277 - RNA, 22 nt, Human
cgccucaccugccaccagggag

SEQ ID NO: 387278 - RNA, 32 nt, Human
cgccucacgguggaagaugauguggauaugcu

SEQ ID NO: 387279 - RNA, 32 nt, Human
cgccucacugcaaccuccgccucccagguuca

SEQ ID NO: 387280 - RNA, 32 nt, Human
cgccucacugcaaccuucaccuaccgaguuca

SEQ ID NO: 387281 - RNA, 32 nt, Human
cgccucacugcaacuugcgccucccggguuca

SEQ ID NO: 387282 - RNA, 32 nt, Human
cgccucacuucuggcgccuccugcugccuccu

SEQ ID NO: 387283 - RNA, 32 nt, Human
cgccucagaaaaucacuugucugaugcucagg

SEQ ID NO: 387284 - RNA, 32 nt, Human
cgccucagagccucucagggcaggccaacuuc

SEQ ID NO: 387285 - RNA, 32 nt, Human
cgccucagaguuggagcacacagcuguauuaa

SEQ ID NO: 387286 - RNA, 23 nt, Human
cgccucagcaccgcuccgggaca

SEQ ID NO: 387287 - RNA, 32 nt, Human
cgccucagcccacccuucccgccacccuggcc

SEQ ID NO: 387288 - RNA, 32 nt, Human
cgccucagccccucaaguagcugggacuacag

SEQ ID NO: 387289 - RNA, 32 nt, Human
cgccucagccgauccuggcacagccauuuugc

SEQ ID NO: 387290 - RNA, 32 nt, Human
cgccucagccucccaaaguucugggauuacaa

SEQ ID NO: 387291 - RNA, 32 nt, Human
cgccucagccucccgaggcaugagccaccacg

SEQ ID NO: 387292 - RNA, 32 nt, Human
cgccucagccuccugagcagcugggauuacag

SEQ ID NO: 387293 - RNA, 32 nt, Human
cgccucagccuccugaguagauggaacuacag

SEQ ID NO: 387294 - RNA, 32 nt, Human
cgccucagccuccugaguagcugggauuacag

SEQ ID NO: 387295 - RNA, 32 nt, Human
cgccucagccucggcccugcgcugcgcgcccg

SEQ ID NO: 387296 - RNA, 32 nt, Human
cgccucagccuucugcgcucgccgccgccgcc

SEQ ID NO: 387297 - RNA, 32 nt, Human
cgccucagucucccaaagugcugguauuacag

SEQ ID NO: 387298 - RNA, 32 nt, Human
cgccucagugugacagagagguguggggaggc

SEQ ID NO: 387299 - RNA, 32 nt, Human
cgccucaucaggagcauucgagggugcuugga

SEQ ID NO: 387300 - RNA, 32 nt, Human
cgccuccaaccucacagccucguagagcuuca

SEQ ID NO: 387301 - RNA, 32 nt, Human
cgccuccaacuugcggccgccgggcuuggcug

SEQ ID NO: 387302 - RNA, 32 nt, Human
cgccuccaagguuucacggcuuccucagcaga

SEQ ID NO: 387303 - RNA, 32 nt, Human
cgccuccaauccagacccaccacagcuggagg

SEQ ID NO: 387304 - RNA, 32 nt, Human
cgccuccaccaccaccaccgccgccgccucca

SEQ ID NO: 387305 - RNA, 21 nt, Human
cgccuccaccagcgccuccca

SEQ ID NO: 387306 - RNA, 18 nt, Human
cgccuccacccagccucc

SEQ ID NO: 387307 - RNA, 32 nt, Human
cgccuccagagggagcgagggaagcggcuaga

SEQ ID NO: 387308 - RNA, 23 nt, Human
cgccuccagcccagcgcucggag

SEQ ID NO: 387309 - RNA, 22 nt, Human
cgccuccagccccucgguguuc

SEQ ID NO: 387310 - RNA, 32 nt, Human
cgccuccagccucuccccucuggcaggcgcac

SEQ ID NO: 387311 - RNA, 20 nt, Human
cgccuccagccugaccagca

SEQ ID NO: 387312 - RNA, 32 nt, Human
cgccuccaggcuggaccagcaguuccaggcgg

SEQ ID NO: 387313 - RNA, 32 nt, Human
cgccuccaguaggaaaagaggaaaacugcgau

SEQ ID NO: 387314 - RNA, 32 nt, Human
cgccuccaugaagcggaaaagcgagcggcggu

SEQ ID NO: 387315 - RNA, 32 nt, Human
cgccuccauguuucagcaucuaugucaugggc

SEQ ID NO: 387316 - RNA, 32 nt, Human
cgccucccaaagcgcuggcauuacaggcgaca

SEQ ID NO: 387317 - RNA, 32 nt, Human
cgccucccaaagugcuaggauuacagguauga

SEQ ID NO: 387318 - RNA, 32 nt, Human
cgccucccaaagugcuggaauuacaggcauga

SEQ ID NO: 387319 - RNA, 32 nt, Human
cgccucccaaagugcugggaugacaggcguga

SEQ ID NO: 387320 - RNA, 32 nt, Human
cgccucccaaagugcugggauuacaggcguga

SEQ ID NO: 387321 - RNA, 32 nt, Human
cgccucccaaagugcugggauuacagguauca

SEQ ID NO: 387322 - RNA, 32 nt, Human
cgccucccaaagugcugggauuacagguguga

SEQ ID NO: 387323 - RNA, 32 nt, Human
cgccucccaaagugcugggauuacagguguuc

SEQ ID NO: 387324 - RNA, 32 nt, Human
cgccucccaaagugcugggauugcaggcauga

SEQ ID NO: 387325 - RNA, 32 nt, Human
cgccucccaaaguguugggauuacaagcguga

SEQ ID NO: 387326 - RNA, 32 nt, Human
cgccucccaaguagcugggauuacaggcaugc

SEQ ID NO: 387327 - RNA, 32 nt, Human
cgccucccaaguagcugggauuacagguaccu

SEQ ID NO: 387328 - RNA, 32 nt, Human
cgccucccagaguucagacccaggaagcggcc

SEQ ID NO: 387329 - RNA, 32 nt, Human
cgccucccaggcgauucuccugccucagccuc

SEQ ID NO: 387330 - RNA, 32 nt, Human
cgccucccagguucgagcacuuuucaugccuc

SEQ ID NO: 387331 - RNA, 32 nt, Human
cgccucccaucccgcuuagcgcucuggacaga

SEQ ID NO: 387332 - RNA, 32 nt, Human
cgccucccaugucuuugaagcaccccuccagg

SEQ ID NO: 387333 - RNA, 32 nt, Human
cgccuccccaagcgcugagauuacagguguga

SEQ ID NO: 387334 - RNA, 32 nt, Human
cgccuccccgucuccuccucaggcucggacca

SEQ ID NO: 387335 - RNA, 21 nt, Human
cgccuccccucccggcuccca

SEQ ID NO: 387336 - RNA, 32 nt, Human
cgccucccgaagugcugggauuacagauguaa

SEQ ID NO: 387337 - RNA, 32 nt, Human
cgccucccgaguagcuggaauuacagacgccu

SEQ ID NO: 387338 - RNA, 32 nt, Human
cgccucccgaguagcugggauuacaggcaugu

SEQ ID NO: 387339 - RNA, 23 nt, Human
cgccucccgccgggcucugccgg

SEQ ID NO: 387340 - RNA, 32 nt, Human
cgccucccggagguccuccugaugcccuagga

SEQ ID NO: 387341 - RNA, 32 nt, Human
cgccucccuaagugcugggauuacaggcauga

SEQ ID NO: 387342 - RNA, 32 nt, Human
cgccucccuccaggacuccaccccggcucccg

SEQ ID NO: 387343 - RNA, 32 nt, Human
cgccucccuccuggccaggcuguucgagcacc

SEQ ID NO: 387344 - RNA, 32 nt, Human
cgccucccugcagccccaucuccuugggcgcc

SEQ ID NO: 387345 - RNA, 32 nt, Human
cgccucccugccuccagcccuggcugcaaugu

SEQ ID NO: 387346 - RNA, 32 nt, Human
cgccucccugcuccucaggggacccgcacucu

SEQ ID NO: 387347 - RNA, 32 nt, Human
cgccucccugcucuuggccacugugcucccau

SEQ ID NO: 387348 - RNA, 32 nt, Human
cgccucccuuucccugcucugccugcgggcac

SEQ ID NO: 387349 - RNA, 23 nt, Human
cgccuccgcccaccuuccucgcc

SEQ ID NO: 387350 - RNA, 32 nt, Human
cgccuccgccccgcccccucccgggacgccgg

SEQ ID NO: 387351 - RNA, 22 nt, Human
cgccuccgcccggcugcccgcc

SEQ ID NO: 387352 - RNA, 20 nt, Human
cgccuccgccucugcccgcc

SEQ ID NO: 387353 - RNA, 17 nt, Human
cgccuccgcucucccca

SEQ ID NO: 387354 - RNA, 24 nt, Human
cgccuccggcuauccgcugcucca

SEQ ID NO: 387355 - RNA, 32 nt, Human
cgccuccggcuccguccuccucuggcccccuc

SEQ ID NO: 387356 - RNA, 18 nt, Human
cgccuccgucgccgccgu

SEQ ID NO: 387357 - RNA, 32 nt, Human
cgccuccuccacccccugcccugccaggccca

SEQ ID NO: 387358 - RNA, 32 nt, Human
cgccuccuccaggccaugcuccuugaacuugg

SEQ ID NO: 387359 - RNA, 32 nt, Human
cgccuccuccuccaccuccuccuccuccuccu

SEQ ID NO: 387360 - RNA, 32 nt, Human
cgccuccuccuccccucugcccuuuccccuuc

SEQ ID NO: 387361 - RNA, 26 nt, Human
cgccuccuccuccuccgccgccgcca

SEQ ID NO: 387362 - RNA, 21 nt, Human
cgccuccucggccaguggcgu

SEQ ID NO: 387363 - RNA, 22 nt, Human
cgccuccucgggcuccacgcgu

SEQ ID NO: 387364 - RNA, 32 nt, Human
cgccuccugccagcuuccuuagaccaggcagg

SEQ ID NO: 387365 - RNA, 32 nt, Human
cgccuccugccuggagugacccugggcgggga

SEQ ID NO: 387366 - RNA, 25 nt, Human
cgccuccugcuagcaagaacagagu

SEQ ID NO: 387367 - RNA, 32 nt, Human
cgccuccuggguucaggagauucuccucuguc

SEQ ID NO: 387368 - RNA, 32 nt, Human
cgccuccuucaaaaagcaaucuggaagaaagc

SEQ ID NO: 387369 - RNA, 25 nt, Human
cgccuccuucugcggacucugcggg

SEQ ID NO: 387370 - RNA, 22 nt, Human
cgccuccuuuucuagaugggga

SEQ ID NO: 387371 - RNA, 21 nt, Human
cgccucgcccgagccccggga

SEQ ID NO: 387372 - RNA, 32 nt, Human
cgccucgccuaccaaucucugcucucuaugua

SEQ ID NO: 387373 - RNA, 32 nt, Human
cgccucgcgggcuccccgccugggucgggaca

SEQ ID NO: 387374 - RNA, 32 nt, Human
cgccucggcuccaggaggucacacagcagguu

SEQ ID NO: 387375 - RNA, 32 nt, Human
cgccucgggcagcagagagcagaugaaacccc

SEQ ID NO: 387376 - RNA, 32 nt, Human
cgccucgggucguggagccaggagcgacguca

SEQ ID NO: 387377 - RNA, 32 nt, Human
cgccucggucacccugcacagcaggccacaga

SEQ ID NO: 387378 - RNA, 32 nt, Human
cgccucgucgaucuccccuucuaccccggucc

SEQ ID NO: 387379 - RNA, 21 nt, Human
cgccucgugccccugccuccu

SEQ ID NO: 387380 - RNA, 32 nt, Human
cgccucuaaugucugucuggaugggauguguu

SEQ ID NO: 387381 - RNA, 32 nt, Human
cgccucuacuaaaaauacaaaaauuagccagg

SEQ ID NO: 387382 - RNA, 32 nt, Human
cgccucuacuaaaaauacaaaaauuagccggg

SEQ ID NO: 387383 - RNA, 32 nt, Human
cgccucuacuaaaaauacaaaaauugcccagg

SEQ ID NO: 387384 - RNA, 32 nt, Human
cgccucuacuccccaucacucccagccgagag

SEQ ID NO: 387385 - RNA, 32 nt, Human
cgccucucagccgcccgccgcacagacgcacg

SEQ ID NO: 387386 - RNA, 32 nt, Human
cgccucucauucagagaggugaggucaggaaa

SEQ ID NO: 387387 - RNA, 32 nt, Human
cgccucuccagggccccuuuccugggcgucua

SEQ ID NO: 387388 - RNA, 32 nt, Human
cgccucuccaucuccgacgacugggcaagagg

SEQ ID NO: 387389 - RNA, 32 nt, Human
cgccucucccacaugccacccccuucccuguc

SEQ ID NO: 387390 - RNA, 32 nt, Human
cgccucucccugcacucccuccuggagcucug

SEQ ID NO: 387391 - RNA, 32 nt, Human
cgccucucggcaagauuucgcgcugcccaucc

SEQ ID NO: 387392 - RNA, 32 nt, Human
cgccucucugcagccuuucacuucagugccca

SEQ ID NO: 387393 - RNA, 32 nt, Human
cgccucugacaugaguccagggagaggcaaga

SEQ ID NO: 387394 - RNA, 31 nt, Human
cgccucugacuucucuguccgaagucgggac

SEQ ID NO: 387395 - RNA, 32 nt, Human
cgccucugcacuccagccugggcaacaagagu

SEQ ID NO: 387396 - RNA, 32 nt, Human
cgccucugcacuccagccugggugacaagagu

SEQ ID NO: 387397 - RNA, 32 nt, Human
cgccucugccaauccccgccguccuuccagcc

SEQ ID NO: 387398 - RNA, 32 nt, Human
cgccucuggccuugggggcucguucuugaggg

SEQ ID NO: 387399 - RNA, 26 nt, Human
cgccucugggaagccugggcagcaga

SEQ ID NO: 387400 - RNA, 32 nt, Human
cgccucuucucacucccuggucaucaauaaau

SEQ ID NO: 387401 - RNA, 32 nt, Human
cgccucuucucccagcucccuccagccaucag

SEQ ID NO: 387402 - RNA, 32 nt, Human
cgccucuugcggucccagaguggaguggaagg

SEQ ID NO: 387403 - RNA, 32 nt, Human
cgccucuuggaguucaagaagccaacgcugag

SEQ ID NO: 387404 - RNA, 32 nt, Human
cgccugaccaggaguucgaggcugcagugagc

SEQ ID NO: 387405 - RNA, 32 nt, Human
cgccugaccccaugucucaggcugccagagga

SEQ ID NO: 387406 - RNA, 32 nt, Human
cgccugacucggccugccccagccucugcuuc

SEQ ID NO: 387407 - RNA, 32 nt, Human
cgccugacugcuguucaggcccgcacaauguc

SEQ ID NO: 387408 - RNA, 31 nt, Human
cgccugagcagcuagagccggggcggcgcgg

SEQ ID NO: 387409 - RNA, 32 nt, Human
cgccugagccuccugaguaucugggacuacag

SEQ ID NO: 387410 - RNA, 32 nt, Human
cgccugagccugacagaggagaagcagcggcu

SEQ ID NO: 387411 - RNA, 32 nt, Human
cgccugagcguggagagcacgaguuaguugua

SEQ ID NO: 387412 - RNA, 32 nt, Human
cgccugaggaggaggaggagaagcggaugaga

SEQ ID NO: 387413 - RNA, 32 nt, Human
cgccugaggaggaggaggaggcgggggcggcc

SEQ ID NO: 387414 - RNA, 32 nt, Human
cgccugagugagugugugugcuugaaugugag

SEQ ID NO: 387415 - RNA, 32 nt, Human
cgccugaugcaauccuucugugccucauggcc

SEQ ID NO: 387416 - RNA, 32 nt, Human
cgccugauggugcugcucaggcccaugcuaug

SEQ ID NO: 387417 - RNA, 32 nt, Human
cgccugcacacccagagaaauggacuuggcuu

SEQ ID NO: 387418 - RNA, 32 nt, Human
cgccugcacagcacauuaacugugcugaaugc

SEQ ID NO: 387419 - RNA, 32 nt, Human
cgccugcaccgccucugcguccuggguagucu

SEQ ID NO: 387420 - RNA, 22 nt, Human
cgccugcaccuucgccagggag

SEQ ID NO: 387421 - RNA, 32 nt, Human
cgccugcacugcacugaggacccggugccgga

SEQ ID NO: 387422 - RNA, 32 nt, Human
cgccugcagccugccccugugaucccuucggc

SEQ ID NO: 387423 - RNA, 32 nt, Human
cgccugcagucuccucucugggugauugcgcg

SEQ ID NO: 387424 - RNA, 32 nt, Human
cgccugcaucugugugggggcagccacacccc

SEQ ID NO: 387425 - RNA, 32 nt, Human
cgccugcaugcagcaggcguguguuccagugg

SEQ ID NO: 387426 - RNA, 19 nt, Human
cgccugccaccucccccca

SEQ ID NO: 387427 - RNA, 32 nt, Human
cgccugccagcccagagcccuggaggagccgg

SEQ ID NO: 387428 - RNA, 32 nt, Human
cgccugccaggagugaguccaugcguugucug

SEQ ID NO: 387429 - RNA, 23 nt, Human
cgccugccccucucguguuugau

SEQ ID NO: 387430 - RNA, 32 nt, Human
cgccugccccuuucugcagccuaggcggccca

SEQ ID NO: 387431 - RNA, 20 nt, Human
cgccugcccgcccuccccca

SEQ ID NO: 387432 - RNA, 32 nt, Human
cgccugcccgccugccccuccugccgaccaca

SEQ ID NO: 387433 - RNA, 32 nt, Human
cgccugcccugaguccggagcccuuugccucc

SEQ ID NO: 387434 - RNA, 32 nt, Human
cgccugcccugccugggccuuggcugggccuc

SEQ ID NO: 387435 - RNA, 32 nt, Human
cgccugcccuggggcacccagggcugugcugg

SEQ ID NO: 387436 - RNA, 32 nt, Human
cgccugccuccacccugcucuccaucucccgc

SEQ ID NO: 387437 - RNA, 32 nt, Human
cgccugccuccucuaacuugggugaugccagu

SEQ ID NO: 387438 - RNA, 30 nt, Human
cgccugccuccugcagguuccuuuccuggg

SEQ ID NO: 387439 - RNA, 32 nt, Human
cgccugccuccuggcucaggcccagcuuauug

SEQ ID NO: 387440 - RNA, 32 nt, Human
cgccugccucggccuccugaaguguugggauu

SEQ ID NO: 387441 - RNA, 32 nt, Human
cgccugccugccagcaguugcuggugagcagc

SEQ ID NO: 387442 - RNA, 22 nt, Human
cgccugccugcuggcucucccc

SEQ ID NO: 387443 - RNA, 32 nt, Human
cgccugccugcuggggcugccugcaugccucc

SEQ ID NO: 387444 - RNA, 18 nt, Human
cgccugccuggcugccca

SEQ ID NO: 387445 - RNA, 18 nt, Human
cgccugccugucccgcca

SEQ ID NO: 387446 - RNA, 28 nt, Human
cgccugccuucugaccaaccucucccca

SEQ ID NO: 387447 - RNA, 32 nt, Human
cgccugccuucuggccacgcuggcggcagcca

SEQ ID NO: 387448 - RNA, 25 nt, Human
cgccugcgccguucucccggccgcc

SEQ ID NO: 387449 - RNA, 32 nt, Human
cgccugcgccuccauccaucuguccguccaga

SEQ ID NO: 387450 - RNA, 32 nt, Human
cgccugcgccuguaaucccagcacuuugggag

SEQ ID NO: 387451 - RNA, 19 nt, Human
cgccugcgccuuccucccu

SEQ ID NO: 387452 - RNA, 24 nt, Human
cgccugcgcggguggcuuugcggg

SEQ ID NO: 387453 - RNA, 32 nt, Human
cgccugcgcucccggcccuggagaccaugagg

SEQ ID NO: 387454 - RNA, 32 nt, Human
cgccugcgcuuccuccugauggucgccagagg

SEQ ID NO: 387455 - RNA, 32 nt, Human
cgccugcggcgccgcgggcgggucgccucccc

SEQ ID NO: 387456 - RNA, 32 nt, Human
cgccugcuacacaggcaggaaugcgguuggga

SEQ ID NO: 387457 - RNA, 32 nt, Human
cgccugcucccucugcugcauuucaagcugac

SEQ ID NO: 387458 - RNA, 32 nt, Human
cgccugcugccuggcuugccuggucggcggcg

SEQ ID NO: 387459 - RNA, 32 nt, Human
cgccugcuuccccuccagcuccugggcucugc

SEQ ID NO: 387460 - RNA, 32 nt, Human
cgccugcuugucccugcccagaauucccagcu

SEQ ID NO: 387461 - RNA, 25 nt, Human
cgccuggaaguucggacugugugga

SEQ ID NO: 387462 - RNA, 32 nt, Human
cgccuggagaaguaugcuuucagcgagaacac

SEQ ID NO: 387463 - RNA, 32 nt, Human
cgccuggagccacacagggauccggagccugg

SEQ ID NO: 387464 - RNA, 32 nt, Human
cgccuggauccgggagcauggcccagagagug

SEQ ID NO: 387465 - RNA, 31 nt, Human
cgccuggaugagagaguggaacacugucauc

SEQ ID NO: 387466 - RNA, 32 nt, Human
cgccuggcacucccaguaggugcucaauaagu

SEQ ID NO: 387467 - RNA, 26 nt, Human
cgccuggcacuucugagcucggcgga

SEQ ID NO: 387468 - RNA, 32 nt, Human
cgccuggcacuucugagcucggcggacgagag

SEQ ID NO: 387469 - RNA, 32 nt, Human
cgccuggcagaacugagcuccucugggcagga

SEQ ID NO: 387470 - RNA, 32 nt, Human
cgccuggcaggcagaaggagcugcaguccuac

SEQ ID NO: 387471 - RNA, 32 nt, Human
cgccuggcaggcaugcggggccucuaaggcuu

SEQ ID NO: 387472 - RNA, 20 nt, Human
cgccuggcaucccaccugga

SEQ ID NO: 387473 - RNA, 21 nt, Human
cgccuggccacacucuucgga

SEQ ID NO: 387474 - RNA, 32 nt, Human
cgccuggccaccccaggcucaggcugcagaac

SEQ ID NO: 387475 - RNA, 32 nt, Human
cgccuggccagggcagggccaccccacucuac

SEQ ID NO: 387476 - RNA, 32 nt, Human
cgccuggcccucucccccaacgcccaggucuu

SEQ ID NO: 387477 - RNA, 32 nt, Human
cgccuggcccugagcugucaccaccgacacuc

SEQ ID NO: 387478 - RNA, 21 nt, Human
cgccuggccgccuccccgggc

SEQ ID NO: 387479 - RNA, 32 nt, Human
cgccuggccugaugccugugugucauucucuu

SEQ ID NO: 387480 - RNA, 32 nt, Human
cgccuggccugggagagccucuuccagguuuu

SEQ ID NO: 387481 - RNA, 32 nt, Human
cgccuggccugggagucccucccugguuuuua

SEQ ID NO: 387482 - RNA, 24 nt, Human
cgccuggcgcuccacacuggugga

SEQ ID NO: 387483 - RNA, 23 nt, Human
cgccuggcgcugcugcugccggg

SEQ ID NO: 387484 - RNA, 21 nt, Human
cgccuggcgcuuccuuccggg

SEQ ID NO: 387485 - RNA, 23 nt, Human
cgccuggcguugccgcggcgcug

SEQ ID NO: 387486 - RNA, 32 nt, Human
cgccuggcuaauuuuguuuuuguauuuuuagu

SEQ ID NO: 387487 - RNA, 25 nt, Human
cgccuggcucaguggcuucugcggg

SEQ ID NO: 387488 - RNA, 32 nt, Human
cgccuggcugcugccgcugccuccuccugggu

SEQ ID NO: 387489 - RNA, 20 nt, Human
cgccuggcuggagugcagug

SEQ ID NO: 387490 - RNA, 20 nt, Human
cgccuggcuggaguggagug

SEQ ID NO: 387491 - RNA, 32 nt, Human
cgccuggcuggcucaggccaaugcagaagucu

SEQ ID NO: 387492 - RNA, 32 nt, Human
cgccuggcuggcugcugcuccaccacgggccc

SEQ ID NO: 387493 - RNA, 32 nt, Human
cgccuggcugugcacacaugcagcacgaccca

SEQ ID NO: 387494 - RNA, 32 nt, Human
cgccuggcuucuuggaaagagcaggaaggagc

SEQ ID NO: 387495 - RNA, 32 nt, Human
cgccugggaaguggggacuggcccugguaccu

SEQ ID NO: 387496 - RNA, 32 nt, Human
cgccugggacagcggcgcgcugggcaggcgcc

SEQ ID NO: 387497 - RNA, 32 nt, Human
cgccugggagggugggcgcccaggcgucccug

SEQ ID NO: 387498 - RNA, 32 nt, Human
cgccugggcaggggccccaaagcuagcucuga

SEQ ID NO: 387499 - RNA, 32 nt, Human
cgccugggcugcagaagccagggugcaugacc

SEQ ID NO: 387500 - RNA, 32 nt, Human
cgccugggcuggggcuuacugggggcugaagg

SEQ ID NO: 387501 - RNA, 32 nt, Human
cgccugggucuucugcagacucaugcagcccu

SEQ ID NO: 387502 - RNA, 32 nt, Human
cgccugggugccuggagcugagcugcggcaag

SEQ ID NO: 387503 - RNA, 32 nt, Human
cgccuggguggaggcaggguagggcagggccc

SEQ ID NO: 387504 - RNA, 32 nt, Human
cgccuggugcugucccaggcccugggggugag

SEQ ID NO: 387505 - RNA, 24 nt, Human
cgccuguaaucccagacuuuggga

SEQ ID NO: 387506 - RNA, 26 nt, Human
cgccuguaaucccagcacuuugcggg

SEQ ID NO: 387507 - RNA, 32 nt, Human
cgccuguaaucccagcagugggagaccgaggu

SEQ ID NO: 387508 - RNA, 32 nt, Human
cgccuguaaucccggcuacucgggaggcugag

SEQ ID NO: 387509 - RNA, 26 nt, Human
cgccugucaauaaauguugaaaaguc

SEQ ID NO: 387510 - RNA, 18 nt, Human
cgccugucacugcagcug

SEQ ID NO: 387511 - RNA, 32 nt, Human
cgccuguccaguucggaggagaacuagcugcu

SEQ ID NO: 387512 - RNA, 22 nt, Human
cgccugucccugcucccucccu

SEQ ID NO: 387513 - RNA, 32 nt, Human
cgccugucccugcuucuuuucugaccgggaaa

SEQ ID NO: 387514 - RNA, 32 nt, Human
cgccuguccuucagaccaucucccugcugcgg

SEQ ID NO: 387515 - RNA, 32 nt, Human
cgccuguccuugguggccgggggugggggccu

SEQ ID NO: 387516 - RNA, 32 nt, Human
cgccugucucagccucuccaagugcugggauu

SEQ ID NO: 387517 - RNA, 32 nt, Human
cgccugucugcucuccucuaacuaggacccag

SEQ ID NO: 387518 - RNA, 32 nt, Human
cgccugugaacugucuguucuccagcgcccgg

SEQ ID NO: 387519 - RNA, 32 nt, Human
cgccugugcagcccucccagguggaguacacg

SEQ ID NO: 387520 - RNA, 32 nt, Human
cgccugugcuugccucccagguaccccagugu

SEQ ID NO: 387521 - RNA, 32 nt, Human
cgccuguggaugcugcgccucuccgaacgcaa

SEQ ID NO: 387522 - RNA, 32 nt, Human
cgccugugggauccaccaugccacaugacagc

SEQ ID NO: 387523 - RNA, 32 nt, Human
cgccuguggguucaccaccuccuaggaggguc

SEQ ID NO: 387524 - RNA, 32 nt, Human
cgccugugucaucugggcugggccccacaaac

SEQ ID NO: 387525 - RNA, 29 nt, Human
cgccuguguccgugugugcuugggugugu

SEQ ID NO: 387526 - RNA, 21 nt, Human
cgccuuaaccgagcucgugga

SEQ ID NO: 387527 - RNA, 32 nt, Human
cgccuuagaacuagcagccaaguccaucuaaa

SEQ ID NO: 387528 - RNA, 32 nt, Human
cgccuuaggacggggccaggaggccaggcgcu

SEQ ID NO: 387529 - RNA, 32 nt, Human
cgccuuaucaacccuuuucucccuuuagcaaa

SEQ ID NO: 387530 - RNA, 32 nt, Human
cgccuucacacuaggaugacagacucagcuaa

SEQ ID NO: 387531 - RNA, 32 nt, Human
cgccuucacccacugccucugccucccugggg

SEQ ID NO: 387532 - RNA, 32 nt, Human
cgccuucaccuggaugcugcuggagggugugc

SEQ ID NO: 387533 - RNA, 32 nt, Human
cgccuucacugcccuguguccucugcucgcag

SEQ ID NO: 387534 - RNA, 32 nt, Human
cgccuucagccaugauugugaguccuccccaa

SEQ ID NO: 387535 - RNA, 32 nt, Human
cgccuucagccuggcccugcgcuccaugcaga

SEQ ID NO: 387536 - RNA, 32 nt, Human
cgccuuccaccugaauccccacccaggacugu

SEQ ID NO: 387537 - RNA, 32 nt, Human
cgccuuccaguccaaaaaucccgccaagagag

SEQ ID NO: 387538 - RNA, 32 nt, Human
cgccuucccacccagcgucuuccccagguucc

SEQ ID NO: 387539 - RNA, 32 nt, Human
cgccuucccaugcccccacacccggcuccugc

SEQ ID NO: 387540 - RNA, 32 nt, Human
cgccuucccugccucuccaggacagagcagcc

SEQ ID NO: 387541 - RNA, 32 nt, Human
cgccuucccuuucuccccuuuggggucugucc

SEQ ID NO: 387542 - RNA, 32 nt, Human
cgccuuccgcuuggcccugccuucugccgcau

SEQ ID NO: 387543 - RNA, 32 nt, Human
cgccuuccucaagcucuggaucgagcugcuca

SEQ ID NO: 387544 - RNA, 32 nt, Human
cgccuuccuccuccucgucaggcucgacccag

SEQ ID NO: 387545 - RNA, 32 nt, Human
cgccuuccucugcugaaaaggcugcuuuucca

SEQ ID NO: 387546 - RNA, 22 nt, Human
cgccuucgccgccucccucccu

SEQ ID NO: 387547 - RNA, 25 nt, Human
cgccuucggcgccugcugccucccu

SEQ ID NO: 387548 - RNA, 32 nt, Human
cgccuucguuuugccauucucuacagcagacc

SEQ ID NO: 387549 - RNA, 31 nt, Human
cgccuucucagcuagaccaggguaggcauca

SEQ ID NO: 387550 - RNA, 32 nt, Human
cgccuucuccauagucuuuccccaccuggagc

SEQ ID NO: 387551 - RNA, 32 nt, Human
cgccuucucugccucuucucauccuuucucgc

SEQ ID NO: 387552 - RNA, 32 nt, Human
cgccuucucuuccuccuccuccgucuucuucc

SEQ ID NO: 387553 - RNA, 32 nt, Human
cgccuucuucccucguggacaggagucagcca

SEQ ID NO: 387554 - RNA, 32 nt, Human
cgccuucuuguccuccuccucauugucgcugc

SEQ ID NO: 387555 - RNA, 32 nt, Human
cgccuugacgaccgcguccaccucgcaggugc

SEQ ID NO: 387556 - RNA, 32 nt, Human
cgccuugcacacugccuggcacacaguaggcg

SEQ ID NO: 387557 - RNA, 32 nt, Human
cgccuugcagaacugucagccuguggaguugu

SEQ ID NO: 387558 - RNA, 32 nt, Human
cgccuugcccccagaucccacugggguccauu

SEQ ID NO: 387559 - RNA, 32 nt, Human
cgccuugcccggcccccgccgccuccugcucg

SEQ ID NO: 387560 - RNA, 32 nt, Human
cgccuugccucgcgcugggaggggagauccag

SEQ ID NO: 387561 - RNA, 20 nt, Human
cgccuugcgcccccggcacc

SEQ ID NO: 387562 - RNA, 31 nt, Human
cgccuuggcuuucucccucacccaaguuucc

SEQ ID NO: 387563 - RNA, 32 nt, Human
cgccuugggcaggccuacgugguggugcaggc

SEQ ID NO: 387564 - RNA, 32 nt, Human
cgccuugucacccaggcuggaguccaguggca

SEQ ID NO: 387565 - RNA, 32 nt, Human
cgccuugucucugcugcuccucuccuuggaaa

SEQ ID NO: 387566 - RNA, 23 nt, Human
cgccuugugaccccgggccccug

SEQ ID NO: 387567 - RNA, 22 nt, Human
cgccuuguggcggcuuugcgga

SEQ ID NO: 387568 - RNA, 32 nt, Human
cgccuugugguuuuguuuuguuuuguuuuguu

SEQ ID NO: 387569 - RNA, 32 nt, Human
cgccuuguucccucuucucucucuucaugaac

SEQ ID NO: 387570 - RNA, 30 nt, Human
cgccuuguuuccugagucugaucuguuugg

SEQ ID NO: 387571 - RNA, 32 nt, Human
cgccuuuacuguaagcuuccugaggcccucac

SEQ ID NO: 387572 - RNA, 32 nt, Human
cgccuuuacuuucacagccucugcagcaaacu

SEQ ID NO: 387573 - RNA, 32 nt, Human
cgccuuuccagcucccccugguucccgugcuc

SEQ ID NO: 387574 - RNA, 24 nt, Human
cgccuuucuccgcuggcaacggcg

SEQ ID NO: 387575 - RNA, 32 nt, Human
cgccuuugcugaaaauacaaaauuagccaggc

SEQ ID NO: 387576 - RNA, 32 nt, Human
cgccuuugggccgagcacugaaugucuuguac

SEQ ID NO: 387577 - RNA, 32 nt, Human
cgccuuuguaacucccaucuguggacccaucg

SEQ ID NO: 387578 - RNA, 32 nt, Human
cgccuuugugaaccccaaauaucugagaccag

SEQ ID NO: 387579 - RNA, 32 nt, Human
cgcgaaagacuugcuugcugugggcgagguau

SEQ ID NO: 387580 - RNA, 32 nt, Human
cgcgaacacugcuugucgccugggcaaccgga

SEQ ID NO: 387581 - RNA, 32 nt, Human
cgcgaacaugggaggcguagcuugcagugagc

SEQ ID NO: 387582 - RNA, 32 nt, Human
cgcgaacccuagcagaggacucagccaccgcc

SEQ ID NO: 387583 - RNA, 32 nt, Human
cgcgaacccucgggaguuaaagaccagccggc

SEQ ID NO: 387584 - RNA, 32 nt, Human
cgcgaagguggaggcggggccgcgccggaagc

SEQ ID NO: 387585 - RNA, 32 nt, Human
cgcgacacugcacuccagccugggcaacagag

SEQ ID NO: 387586 - RNA, 32 nt, Human
cgcgacacugcacuccagccugggugacggug

SEQ ID NO: 387587 - RNA, 32 nt, Human
cgcgacacugcgcuccagccugggcaacaaga

SEQ ID NO: 387588 - RNA, 18 nt, Human
cgcgaccagaucugggug

SEQ ID NO: 387589 - RNA, 19 nt, Human
cgcgacccccuuccagacc

SEQ ID NO: 387590 - RNA, 32 nt, Human
cgcgaccccggagccacgugccaggccgggcu

SEQ ID NO: 387591 - RNA, 32 nt, Human
cgcgacccggaggcggugggggugcggcugag

SEQ ID NO: 387592 - RNA, 20 nt, Human
cgcgacggggguucagggaa

SEQ ID NO: 387593 - RNA, 20 nt, Human
cgcgacgguucggccgggug

SEQ ID NO: 387594 - RNA, 32 nt, Human
cgcgacgugaagccggacgaggaccuggcgag

SEQ ID NO: 387595 - RNA, 32 nt, Human
cgcgacugcacuccagccugggcgagagagca

SEQ ID NO: 387596 - RNA, 32 nt, Human
cgcgacugccagacccucagggagucagggca

SEQ ID NO: 387597 - RNA, 32 nt, Human
cgcgacugcgcucaguucucuccucucggaag

SEQ ID NO: 387598 - RNA, 32 nt, Human
cgcgacugcuacaccaggcacuccugggcccg

SEQ ID NO: 387599 - RNA, 32 nt, Human
cgcgacuuacccaggccuuuuugcagugggag

SEQ ID NO: 387600 - RNA, 32 nt, Human
cgcgacuucggggaccugcucaucuacucggg

SEQ ID NO: 387601 - RNA, 32 nt, Human
cgcgagaaguagucucccgaagagguucggac

SEQ ID NO: 387602 - RNA, 32 nt, Human
cgcgagaccagccugaccaacauggagaaacc

SEQ ID NO: 387603 - RNA, 32 nt, Human
cgcgagauggucuaagucagcuuacaucccug

SEQ ID NO: 387604 - RNA, 32 nt, Human
cgcgagcagcagcagaggcggcggcggccccc

SEQ ID NO: 387605 - RNA, 32 nt, Human
cgcgagcagccaagggcuuccugagcaagcca

SEQ ID NO: 387606 - RNA, 32 nt, Human
cgcgagcauucccauguacccuggggcacccu

SEQ ID NO: 387607 - RNA, 32 nt, Human
cgcgagccacugcguccggccggcgggacuua

SEQ ID NO: 387608 - RNA, 32 nt, Human
cgcgagccgggguugcagcccagccgggacuu

SEQ ID NO: 387609 - RNA, 32 nt, Human
cgcgagcggcaggugugcacagagguucucca

SEQ ID NO: 387610 - RNA, 23 nt, Human
cgcgagcgggaggaccggggagg

SEQ ID NO: 387611 - RNA, 32 nt, Human
cgcgagcgggaggagcagagacccgcagccgg

SEQ ID NO: 387612 - RNA, 32 nt, Human
cgcgagcgucgggucccagagccgggcgcggc

SEQ ID NO: 387613 - RNA, 32 nt, Human
cgcgagcuccuggaggcggcgggauggaggcg

SEQ ID NO: 387614 - RNA, 32 nt, Human
cgcgaggaggugaggcuggagcgcggcccccu

SEQ ID NO: 387615 - RNA, 32 nt, Human
cgcgaggaugccuuuucucuucugccuugcga

SEQ ID NO: 387616 - RNA, 32 nt, Human
cgcgaggccgggagguccgggggucgggaggu

SEQ ID NO: 387617 - RNA, 32 nt, Human
cgcgaggcgacuucucaagcuuuugaaugggu

SEQ ID NO: 387618 - RNA, 22 nt, Human
cgcgaggcggcgagggcggcgg

SEQ ID NO: 387619 - RNA, 19 nt, Human
cgcgaggcuucuccgggug

SEQ ID NO: 387620 - RNA, 32 nt, Human
cgcgagggacggggcaggaugaaccgggccaa

SEQ ID NO: 387621 - RNA, 32 nt, Human
cgcgagggaggcgggagugagcagaaaggcuu

SEQ ID NO: 387622 - RNA, 32 nt, Human
cgcgaggggagggguccucccgcugaacagug

SEQ ID NO: 387623 - RNA, 32 nt, Human
cgcgagggggaggcacguggccccgcucagcc

SEQ ID NO: 387624 - RNA, 32 nt, Human
cgcgaggguagagcacaagauggaaauggagc

SEQ ID NO: 387625 - RNA, 32 nt, Human
cgcgaggugcaggagacgcaggcauggccggu

SEQ ID NO: 387626 - RNA, 22 nt, Human
cgcgaguccuccuccccgggug

SEQ ID NO: 387627 - RNA, 32 nt, Human
cgcgaguguucccguacauggagggggaccgg

SEQ ID NO: 387628 - RNA, 32 nt, Human
cgcgauaaauaugcagagcggaggcuucgcgc

SEQ ID NO: 387629 - RNA, 32 nt, Human
cgcgaucccgggagcuggaggcgcaugcgcau

SEQ ID NO: 387630 - RNA, 32 nt, Human
cgcgaucgacgcugcggagcgagcccacccgc

SEQ ID NO: 387631 - RNA, 32 nt, Human
cgcgaucuuggcugacugcagucugugccucc

SEQ ID NO: 387632 - RNA, 19 nt, Human
cgcgaugccgccggcgagu

SEQ ID NO: 387633 - RNA, 17 nt, Human
cgcgaugcuccugcgug

SEQ ID NO: 387634 - RNA, 32 nt, Human
cgcgauggcucacaccuguaaucccagagcuu

SEQ ID NO: 387635 - RNA, 32 nt, Human
cgcgauggcucacgccuguaaucccagcacuu

SEQ ID NO: 387636 - RNA, 32 nt, Human
cgcgauggcucauaccuguaaucccagcacuu

SEQ ID NO: 387637 - RNA, 32 nt, Human
cgcgauggcugucgccuguaaugccagcgcuu

SEQ ID NO: 387638 - RNA, 19 nt, Human
cgcgaugucaggcgcggug

SEQ ID NO: 387639 - RNA, 32 nt, Human
cgcgauugcaccaccacacuccagccugcgcg

SEQ ID NO: 387640 - RNA, 32 nt, Human
cgcgauuguaaguuuccugaggccuccuagcc

SEQ ID NO: 387641 - RNA, 32 nt, Human
cgcgcaacuuuguaaucccaacacuuucuauu

SEQ ID NO: 387642 - RNA, 32 nt, Human
cgcgcaagagugacacacagguguucaaagac

SEQ ID NO: 387643 - RNA, 31 nt, Human
cgcgcaaggggcccuguuuccggggagacug

SEQ ID NO: 387644 - RNA, 32 nt, Human
cgcgcaauugcgcuccagccugggcgacaaga

SEQ ID NO: 387645 - RNA, 32 nt, Human
cgcgcacaccaaagagaaagcggcuguggcgg

SEQ ID NO: 387646 - RNA, 32 nt, Human
cgcgcacaggcaggagguugcaguugggcgcu

SEQ ID NO: 387647 - RNA, 32 nt, Human
cgcgcaccagucgcguaagacaacagcagugu

SEQ ID NO: 387648 - RNA, 32 nt, Human
cgcgcaccucgcucccccucccggccggcgcu

SEQ ID NO: 387649 - RNA, 32 nt, Human
cgcgcaccuggcgccgcccgagcugcugcugc

SEQ ID NO: 387650 - RNA, 22 nt, Human
cgcgcaccuguaaucccagcua

SEQ ID NO: 387651 - RNA, 32 nt, Human
cgcgcaccuguaaucccagcuacuugggaggc

SEQ ID NO: 387652 - RNA, 22 nt, Human
cgcgcaccuguagucccagcua

SEQ ID NO: 387653 - RNA, 32 nt, Human
cgcgcacggacccccauuacacucgcguccca

SEQ ID NO: 387654 - RNA, 32 nt, Human
cgcgcacuagcccucgcgccgcacgggacacg

SEQ ID NO: 387655 - RNA, 32 nt, Human
cgcgcacuccaccgccagccucucgggaguca

SEQ ID NO: 387656 - RNA, 32 nt, Human
cgcgcacuugaggaggcugugguggugaggag

SEQ ID NO: 387657 - RNA, 18 nt, Human
cgcgcagaccgagucccc

SEQ ID NO: 387658 - RNA, 32 nt, Human
cgcgcagagccaaggcacugauguuugaacug

SEQ ID NO: 387659 - RNA, 21 nt, Human
cgcgcagagcccaggcccagg

SEQ ID NO: 387660 - RNA, 32 nt, Human
cgcgcagcaacggccucaauagcgccaggccc

SEQ ID NO: 387661 - RNA, 21 nt, Human
cgcgcagcacgaagcucgagc

SEQ ID NO: 387662 - RNA, 24 nt, Human
cgcgcagcagcagcagcagcagca

SEQ ID NO: 387663 - RNA, 32 nt, Human
cgcgcagcagccgccccgcugcgcccaccucc

SEQ ID NO: 387664 - RNA, 18 nt, Human
cgcgcagccagggcgccu

SEQ ID NO: 387665 - RNA, 32 nt, Human
cgcgcagccauacaacuuuagagcuggccuug

SEQ ID NO: 387666 - RNA, 21 nt, Human
cgcgcagccccgagcugggca

SEQ ID NO: 387667 - RNA, 23 nt, Human
cgcgcagcccgcggcccagcgca

SEQ ID NO: 387668 - RNA, 32 nt, Human
cgcgcagcccucuuuggacacacacgcgccgc

SEQ ID NO: 387669 - RNA, 32 nt, Human
cgcgcagccguguuucccucuggaccagacgc

SEQ ID NO: 387670 - RNA, 32 nt, Human
cgcgcagcucccucagcuucgcagcgccgccc

SEQ ID NO: 387671 - RNA, 32 nt, Human
cgcgcagcugcacuccagccugggcaacagag

SEQ ID NO: 387672 - RNA, 32 nt, Human
cgcgcagcugguguuccagaccugcgacauca

SEQ ID NO: 387673 - RNA, 32 nt, Human
cgcgcagcugguucccgcucugcagcgcaacg

SEQ ID NO: 387674 - RNA, 32 nt, Human
cgcgcaggagcugccaaggccaugucuguucc

SEQ ID NO: 387675 - RNA, 32 nt, Human
cgcgcaggcugugaucguaguggugcgaucuc

SEQ ID NO: 387676 - RNA, 32 nt, Human
cgcgcagguccacuucuccaucccugcucucg

SEQ ID NO: 387677 - RNA, 32 nt, Human
cgcgcaggugcggcgccuggguccccauggcg

SEQ ID NO: 387678 - RNA, 32 nt, Human
cgcgcaguccgcgagguccccacgccgggcga

SEQ ID NO: 387679 - RNA, 32 nt, Human
cgcgcauccuuucccagcuccccacccuccuu

SEQ ID NO: 387680 - RNA, 32 nt, Human
cgcgcaugcaugcacacacacgcacgcacaca

SEQ ID NO: 387681 - RNA, 32 nt, Human
cgcgcaugguggcucacccccuguaaucccag

SEQ ID NO: 387682 - RNA, 32 nt, Human
cgcgccaaugcacuccagccugggcgacagag

SEQ ID NO: 387683 - RNA, 20 nt, Human
cgcgccacagccccaccgcc

SEQ ID NO: 387684 - RNA, 32 nt, Human
cgcgccaccacacuccagccugagcgacagag

SEQ ID NO: 387685 - RNA, 32 nt, Human
cgcgccacccacccucgcuuucuccggcuucc

SEQ ID NO: 387686 - RNA, 32 nt, Human
cgcgccaccgcacuccagccucgccgacaaag

SEQ ID NO: 387687 - RNA, 32 nt, Human
cgcgccaccgcauuccagccugggcgacagag

SEQ ID NO: 387688 - RNA, 32 nt, Human
cgcgccaccgcccuccagccugggcgacagag

SEQ ID NO: 387689 - RNA, 32 nt, Human
cgcgccacggcacuccagccugggagacagag

SEQ ID NO: 387690 - RNA, 32 nt, Human
cgcgccacuacacuccagccugagcaacagag

SEQ ID NO: 387691 - RNA, 32 nt, Human
cgcgccacuauacuccagccugggcaacagac

SEQ ID NO: 387692 - RNA, 32 nt, Human
cgcgccacugaacucgggucugggcaacagau

SEQ ID NO: 387693 - RNA, 32 nt, Human
cgcgccacugcaacccagccugggugacagag

SEQ ID NO: 387694 - RNA, 32 nt, Human
cgcgccacugcacagccagggcgacggugcaa

SEQ ID NO: 387695 - RNA, 32 nt, Human
cgcgccacugcacucaagccugggcaacaccu

SEQ ID NO: 387696 - RNA, 32 nt, Human
cgcgccacugcacuccaaccugggugacagac

SEQ ID NO: 387697 - RNA, 32 nt, Human
cgcgccacugcacuccacccuggguaacggaa

SEQ ID NO: 387698 - RNA, 32 nt, Human
cgcgccacugcacuccagcagucugggcgaca

SEQ ID NO: 387699 - RNA, 32 nt, Human
cgcgccacugcacuccagcccgggugacagag

SEQ ID NO: 387700 - RNA, 32 nt, Human
cgcgccacugcacuccagccuagacgacagag

SEQ ID NO: 387701 - RNA, 32 nt, Human
cgcgccacugcacuccagccuaggggacaguu

SEQ ID NO: 387702 - RNA, 32 nt, Human
cgcgccacugcacuccagccuaggugacagag

SEQ ID NO: 387703 - RNA, 32 nt, Human
cgcgccacugcacuccagccucagcaauagag

SEQ ID NO: 387704 - RNA, 32 nt, Human
cgcgccacugcacuccagccucggcaacagag

SEQ ID NO: 387705 - RNA, 32 nt, Human
cgcgccacugcacuccagccucggugacagag

SEQ ID NO: 387706 - RNA, 32 nt, Human
cgcgccacugcacuccagccuggacgacagag

SEQ ID NO: 387707 - RNA, 32 nt, Human
cgcgccacugcacuccagccuggcaacagagu

SEQ ID NO: 387708 - RNA, 32 nt, Human
cgcgccacugcacuccagccuggcgacaaagc

SEQ ID NO: 387709 - RNA, 32 nt, Human
cgcgccacugcacuccagccuggcgacagagc

SEQ ID NO: 387710 - RNA, 32 nt, Human
cgcgccacugcacuccagccugggagaaagac

SEQ ID NO: 387711 - RNA, 32 nt, Human
cgcgccacugcacuccagccugggcaacaaga

SEQ ID NO: 387712 - RNA, 32 nt, Human
cgcgccacugcacuccagccugggcaacagaa

SEQ ID NO: 387713 - RNA, 32 nt, Human
cgcgccacugcacuccagccugggcaacagag

SEQ ID NO: 387714 - RNA, 32 nt, Human
cgcgccacugcacuccagccugggcaacaggc

SEQ ID NO: 387715 - RNA, 32 nt, Human
cgcgccacugcacuccagccugggcagcaaga

SEQ ID NO: 387716 - RNA, 32 nt, Human
cgcgccacugcacuccagccugggcgacacag

SEQ ID NO: 387717 - RNA, 31 nt, Human
cgcgccacugcacuccagccugggcgacaga

SEQ ID NO: 387718 - RNA, 32 nt, Human
cgcgccacugcacuccagccugggcgacagag

SEQ ID NO: 387719 - RNA, 32 nt, Human
cgcgccacugcacuccagccugggcgacagca

SEQ ID NO: 387720 - RNA, 32 nt, Human
cgcgccacugcacuccagccugggcgacagcg

SEQ ID NO: 387721 - RNA, 32 nt, Human
cgcgccacugcacuccagccugggcgacaggg

SEQ ID NO: 387722 - RNA, 32 nt, Human
cgcgccacugcacuccagccugggcgacggag

SEQ ID NO: 387723 - RNA, 32 nt, Human
cgcgccacugcacuccagccugggcgagagaa

SEQ ID NO: 387724 - RNA, 32 nt, Human
cgcgccacugcacuccagccugggcgauagag

SEQ ID NO: 387725 - RNA, 32 nt, Human
cgcgccacugcacuccagccuggguaacagag

SEQ ID NO: 387726 - RNA, 32 nt, Human
cgcgccacugcacuccagccugggugacacag

SEQ ID NO: 387727 - RNA, 32 nt, Human
cgcgccacugcacuccagccugggugacagaa

SEQ ID NO: 387728 - RNA, 32 nt, Human
cgcgccacugcacuccagccugggugacagag

SEQ ID NO: 387729 - RNA, 32 nt, Human
cgcgccacugcacuccagccugggugauagag

SEQ ID NO: 387730 - RNA, 32 nt, Human
cgcgccacugcacuccagccuggugacagagc

SEQ ID NO: 387731 - RNA, 32 nt, Human
cgcgccacugcacuccagcuugggcaacagag

SEQ ID NO: 387732 - RNA, 32 nt, Human
cgcgccacugcacuccaggccugggugacagu

SEQ ID NO: 387733 - RNA, 32 nt, Human
cgcgccacugcacuccaggcugggcaacggag

SEQ ID NO: 387734 - RNA, 32 nt, Human
cgcgccacugcacuccaggcugggcgacagag

SEQ ID NO: 387735 - RNA, 32 nt, Human
cgcgccacugcacuccagucugggcaacagag

SEQ ID NO: 387736 - RNA, 32 nt, Human
cgcgccacugcacuccaguuugggcaacagaa

SEQ ID NO: 387737 - RNA, 32 nt, Human
cgcgccacugcacuccggccugaugacagagc

SEQ ID NO: 387738 - RNA, 32 nt, Human
cgcgccacugcacuccugccugggacacaaug

SEQ ID NO: 387739 - RNA, 32 nt, Human
cgcgccacugcacuccugccugggcaacugag

SEQ ID NO: 387740 - RNA, 32 nt, Human
cgcgccacugcacucuagccggagugacagag

SEQ ID NO: 387741 - RNA, 32 nt, Human
cgcgccacugcacucuagccugagugacagag

SEQ ID NO: 387742 - RNA, 32 nt, Human
cgcgccacugcacucuagccugggccauagag

SEQ ID NO: 387743 - RNA, 32 nt, Human
cgcgccacugcacucuagccugggugacagag

SEQ ID NO: 387744 - RNA, 32 nt, Human
cgcgccacugcacuucagccuggacaacagag

SEQ ID NO: 387745 - RNA, 32 nt, Human
cgcgccacugcacuucagccugggugacagag

SEQ ID NO: 387746 - RNA, 32 nt, Human
cgcgccacugcaguccagccugggcaacaaga

SEQ ID NO: 387747 - RNA, 32 nt, Human
cgcgccacugcauuccagccuggacgacagag

SEQ ID NO: 387748 - RNA, 32 nt, Human
cgcgccacugcccuccagccugggcgacagaa

SEQ ID NO: 387749 - RNA, 32 nt, Human
cgcgccacugcgcuccagccuggacaacacag

SEQ ID NO: 387750 - RNA, 32 nt, Human
cgcgccacugcgcuucagccugggagacagag

SEQ ID NO: 387751 - RNA, 32 nt, Human
cgcgccacugcucuccagccuggguggcagag

SEQ ID NO: 387752 - RNA, 32 nt, Human
cgcgccacuggacuccagccuggacaacagag

SEQ ID NO: 387753 - RNA, 32 nt, Human
cgcgccacugggcuccagccugggcgacagag

SEQ ID NO: 387754 - RNA, 32 nt, Human
cgcgccacuguacuccagccuggacaacagcg

SEQ ID NO: 387755 - RNA, 32 nt, Human
cgcgccacuguacuccagccugggcaacagag

SEQ ID NO: 387756 - RNA, 32 nt, Human
cgcgccacuguacuccagccugggugacagag

SEQ ID NO: 387757 - RNA, 32 nt, Human
cgcgccacuguacuccauccugggugauggag

SEQ ID NO: 387758 - RNA, 32 nt, Human
cgcgccacugugcuccagccugggcaacagag

SEQ ID NO: 387759 - RNA, 25 nt, Human
cgcgccaggcaggacgacagcagca

SEQ ID NO: 387760 - RNA, 25 nt, Human
cgcgccaggcaggacgacggcagca

SEQ ID NO: 387761 - RNA, 32 nt, Human
cgcgccagggagguugucgggaggggccggcg

SEQ ID NO: 387762 - RNA, 32 nt, Human
cgcgccaguacacuccagccuggguaacagag

SEQ ID NO: 387763 - RNA, 32 nt, Human
cgcgccagugcacuccagccugggcaagaaga

SEQ ID NO: 387764 - RNA, 32 nt, Human
cgcgccagugcugugcggucuccacacccuua

SEQ ID NO: 387765 - RNA, 32 nt, Human
cgcgccauagcacuccagccuuagccugggcg

SEQ ID NO: 387766 - RNA, 32 nt, Human
cgcgccaucacacuccagccuaggcgacagag

SEQ ID NO: 387767 - RNA, 32 nt, Human
cgcgccauccuuucucuuccuccucucuguaa

SEQ ID NO: 387768 - RNA, 32 nt, Human
cgcgccaucgcacuccagccugggcaacaaga

SEQ ID NO: 387769 - RNA, 32 nt, Human
cgcgccaucgcacuccagccugggugacaaga

SEQ ID NO: 387770 - RNA, 31 nt, Human
cgcgccaugcuggccaaguugcugugcgacc

SEQ ID NO: 387771 - RNA, 32 nt, Human
cgcgccauggcacucacuccagccugggcaac

SEQ ID NO: 387772 - RNA, 32 nt, Human
cgcgccauuacacuucagccugggcaacaaga

SEQ ID NO: 387773 - RNA, 32 nt, Human
cgcgccauugcacuccaaccuaggugacaaag

SEQ ID NO: 387774 - RNA, 32 nt, Human
cgcgccauugcacuccaaccuggacgacagag

SEQ ID NO: 387775 - RNA, 32 nt, Human
cgcgccauugcacuccagccuggacaacaaga

SEQ ID NO: 387776 - RNA, 32 nt, Human
cgcgccauugcacuccagccuggccuauaaga

SEQ ID NO: 387777 - RNA, 32 nt, Human
cgcgccauugcacuccagccuggcugacagag

SEQ ID NO: 387778 - RNA, 32 nt, Human
cgcgccauugcacuccagccugggcaacaaca

SEQ ID NO: 387779 - RNA, 32 nt, Human
cgcgccauugcacuccagccugggcaacaaga

SEQ ID NO: 387780 - RNA, 32 nt, Human
cgcgccauugcacuccagccugggcaacgaaa

SEQ ID NO: 387781 - RNA, 32 nt, Human
cgcgccauugcacuccagccugggcaacuccg

SEQ ID NO: 387782 - RNA, 32 nt, Human
cgcgccauugcacuccagccugggcgacaaga

SEQ ID NO: 387783 - RNA, 32 nt, Human
cgcgccauugcacuccagccugggcgacagag

SEQ ID NO: 387784 - RNA, 32 nt, Human
cgcgccauugcacuccagccugggcggcagag

SEQ ID NO: 387785 - RNA, 32 nt, Human
cgcgccauugcacuccagccugggggacaaga

SEQ ID NO: 387786 - RNA, 32 nt, Human
cgcgccauugcacuccagccuggguaacaaga

SEQ ID NO: 387787 - RNA, 32 nt, Human
cgcgccauugcacuccagccugggugacagag

SEQ ID NO: 387788 - RNA, 32 nt, Human
cgcgccauugcacuccagccugggugacgagu

SEQ ID NO: 387789 - RNA, 32 nt, Human
cgcgccauugcacuccagccuuggaacaagag

SEQ ID NO: 387790 - RNA, 32 nt, Human
cgcgccauugcacuccauccuggacaacagga

SEQ ID NO: 387791 - RNA, 32 nt, Human
cgcgccauugcacucccgccugggcgacucca

SEQ ID NO: 387792 - RNA, 32 nt, Human
cgcgccauugcacuccggccuggggacaagag

SEQ ID NO: 387793 - RNA, 32 nt, Human
cgcgccauugcacucuagccuaggugacagag

SEQ ID NO: 387794 - RNA, 32 nt, Human
cgcgccauugcacucuagccugggcaacaaga

SEQ ID NO: 387795 - RNA, 32 nt, Human
cgcgccauugcauuccaaccugggggacaaca

SEQ ID NO: 387796 - RNA, 32 nt, Human
cgcgccauuguacuccagccugggcgaugagc

SEQ ID NO: 387797 - RNA, 32 nt, Human
cgcgcccacuggccggucucuccucuuccccg

SEQ ID NO: 387798 - RNA, 32 nt, Human
cgcgcccauccagcagccucgccggagccaca

SEQ ID NO: 387799 - RNA, 32 nt, Human
cgcgcccaugcaggccaucaagugcguggugg

SEQ ID NO: 387800 - RNA, 32 nt, Human
cgcgccccaggugggcagcuguggcagagcag

SEQ ID NO: 387801 - RNA, 32 nt, Human
cgcgcccccagcugcccuuuccaacugccugu

SEQ ID NO: 387802 - RNA, 32 nt, Human
cgcgcccccaggagaccuggaccagaccacga

SEQ ID NO: 387803 - RNA, 32 nt, Human
cgcgcccccgugcccccaggcccagccgccgc

SEQ ID NO: 387804 - RNA, 19 nt, Human
cgcgcccccuuggcccgcg

SEQ ID NO: 387805 - RNA, 32 nt, Human
cgcgccccgagugagcaguccuggcccggagc

SEQ ID NO: 387806 - RNA, 32 nt, Human
cgcgccccgcuccccuucucucucuuacucgg

SEQ ID NO: 387807 - RNA, 22 nt, Human
cgcgccccggcggcgucauggg

SEQ ID NO: 387808 - RNA, 32 nt, Human
cgcgccccuccccucacgggcucuggccuuaa

SEQ ID NO: 387809 - RNA, 32 nt, Human
cgcgccccugcacuccagccugggugacagag

SEQ ID NO: 387810 - RNA, 32 nt, Human
cgcgccccugcuccccuggguggccuuccggg

SEQ ID NO: 387811 - RNA, 32 nt, Human
cgcgcccgaucccggcgacagggcgggcggac

SEQ ID NO: 387812 - RNA, 18 nt, Human
cgcgcccgcgccugcuca

SEQ ID NO: 387813 - RNA, 22 nt, Human
cgcgcccguuccugccuggccg

SEQ ID NO: 387814 - RNA, 32 nt, Human
cgcgcccuccccucuccuuucucccucucaga

SEQ ID NO: 387815 - RNA, 32 nt, Human
cgcgcccucggcuccguuucugcucccuccac

SEQ ID NO: 387816 - RNA, 32 nt, Human
cgcgcccucucccaguccucacaaaggggccu

SEQ ID NO: 387817 - RNA, 32 nt, Human
cgcgcccucuccuucuugugccuugaguggca

SEQ ID NO: 387818 - RNA, 32 nt, Human
cgcgcccugcaugcgaguugggccgcgggcgg

SEQ ID NO: 387819 - RNA, 32 nt, Human
cgcgcccugccucuguggcucugccuguggau

SEQ ID NO: 387820 - RNA, 32 nt, Human
cgcgcccugccugguccggcacuucuuccgcg

SEQ ID NO: 387821 - RNA, 32 nt, Human
cgcgcccuuggaccaggggagcggugcgauuc

SEQ ID NO: 387822 - RNA, 32 nt, Human
cgcgccgagccgcggccgagcuggcccgcccg

SEQ ID NO: 387823 - RNA, 17 nt, Human
cgcgccgcccgggcccu

SEQ ID NO: 387824 - RNA, 32 nt, Human
cgcgccgcccucucaccccucccuucacccac

SEQ ID NO: 387825 - RNA, 22 nt, Human
cgcgccgccgccgccgccgccg

SEQ ID NO: 387826 - RNA, 32 nt, Human
cgcgccgccgccgccucccgcccgccccggag

SEQ ID NO: 387827 - RNA, 32 nt, Human
cgcgccgccggccucugccgcgaacaaacccu

SEQ ID NO: 387828 - RNA, 32 nt, Human
cgcgccgccuacuccggcaucagcuccguggc

SEQ ID NO: 387829 - RNA, 32 nt, Human
cgcgccgccucgcuagccgaaaccugcccagc

SEQ ID NO: 387830 - RNA, 32 nt, Human
cgcgccgcgccgccugaaccugggcgggggcu

SEQ ID NO: 387831 - RNA, 32 nt, Human
cgcgccgcggccgccuccuccuccccggcucc

SEQ ID NO: 387832 - RNA, 18 nt, Human
cgcgccgcucaggcgucu

SEQ ID NO: 387833 - RNA, 18 nt, Human
cgcgccgcuccgcuccgg

SEQ ID NO: 387834 - RNA, 32 nt, Human
cgcgccgcugcacuccagccugggccacacag

SEQ ID NO: 387835 - RNA, 32 nt, Human
cgcgccgcugcacuccagccugggcgacagag

SEQ ID NO: 387836 - RNA, 32 nt, Human
cgcgccgcugcacuccagccugggcggcagag

SEQ ID NO: 387837 - RNA, 32 nt, Human
cgcgccgcugcacuccagccugggugacagag

SEQ ID NO: 387838 - RNA, 32 nt, Human
cgcgccgcugcauuccagccugggugacagag

SEQ ID NO: 387839 - RNA, 22 nt, Human
cgcgccgcuugccgccgggcua

SEQ ID NO: 387840 - RNA, 19 nt, Human
cgcgccggccccccagggg

SEQ ID NO: 387841 - RNA, 32 nt, Human
cgcgccggcccgcgcccugcccagugcggccu

SEQ ID NO: 387842 - RNA, 32 nt, Human
cgcgccgggagguggugaccgccugacagaca

SEQ ID NO: 387843 - RNA, 32 nt, Human
cgcgccgggccaguguccucugugcugcuggc

SEQ ID NO: 387844 - RNA, 32 nt, Human
cgcgccgggcuucuccaugacagcugcggccc

SEQ ID NO: 387845 - RNA, 24 nt, Human
cgcgccggggacccucuccaggcc

SEQ ID NO: 387846 - RNA, 32 nt, Human
cgcgccggggcucugggugugugcgcuuggcg

SEQ ID NO: 387847 - RNA, 26 nt, Human
cgcgccggucuuccccugacaugcgu

SEQ ID NO: 387848 - RNA, 25 nt, Human
cgcgccgucucccuccuccagggcc

SEQ ID NO: 387849 - RNA, 32 nt, Human
cgcgccgugauaucuugguggcucccugccac

SEQ ID NO: 387850 - RNA, 20 nt, Human
cgcgccguggugcgcacgga

SEQ ID NO: 387851 - RNA, 32 nt, Human
cgcgccguugcacuccagccugggcaacaaga

SEQ ID NO: 387852 - RNA, 32 nt, Human
cgcgccucaaacuguugacucacuggagggac

SEQ ID NO: 387853 - RNA, 17 nt, Human
cgcgccuccccugggug

SEQ ID NO: 387854 - RNA, 32 nt, Human
cgcgccucccugcacacgcacacacacgcaca

SEQ ID NO: 387855 - RNA, 32 nt, Human
cgcgccuccuggccaggcagggcgccugggag

SEQ ID NO: 387856 - RNA, 32 nt, Human
cgcgccucucugaggcggaggaugcgggagcg

SEQ ID NO: 387857 - RNA, 32 nt, Human
cgcgccugaaggagcaggaaggggaaggaggc

SEQ ID NO: 387858 - RNA, 32 nt, Human
cgcgccugaggaggaggaggaggcgggggcgg

SEQ ID NO: 387859 - RNA, 22 nt, Human
cgcgccugcaacggugcgcgga

SEQ ID NO: 387860 - RNA, 32 nt, Human
cgcgccugccaaggaggccaccagagggcagu

SEQ ID NO: 387861 - RNA, 32 nt, Human
cgcgccugccuguucccuccagcccggacccc

SEQ ID NO: 387862 - RNA, 32 nt, Human
cgcgccugcggggcggagaugggcagggggcg

SEQ ID NO: 387863 - RNA, 32 nt, Human
cgcgccuggcacaaccucacugugcuggcuac

SEQ ID NO: 387864 - RNA, 32 nt, Human
cgcgccuggccgccgccucccuuuaccuccgg

SEQ ID NO: 387865 - RNA, 32 nt, Human
cgcgccugggagggagaaagaagucgggggcc

SEQ ID NO: 387866 - RNA, 32 nt, Human
cgcgccuggggaggaggcggaggcagcggcug

SEQ ID NO: 387867 - RNA, 32 nt, Human
cgcgccuguaaucccagcuacucgggaagcug

SEQ ID NO: 387868 - RNA, 32 nt, Human
cgcgccuguaaucccagcuacucgggaggcug

SEQ ID NO: 387869 - RNA, 32 nt, Human
cgcgccuguaaucccagcuacuugggaagcug

SEQ ID NO: 387870 - RNA, 32 nt, Human
cgcgccuguaaucccagcuacuugggaggcug

SEQ ID NO: 387871 - RNA, 32 nt, Human
cgcgccuguaaucccagcuauucgggaggcug

SEQ ID NO: 387872 - RNA, 32 nt, Human
cgcgccuguagcugggacuacaagagugcgcc

SEQ ID NO: 387873 - RNA, 32 nt, Human
cgcgccuguagucccagcuacacgggaggcug

SEQ ID NO: 387874 - RNA, 32 nt, Human
cgcgccuguagucccagcuacucaggaggcug

SEQ ID NO: 387875 - RNA, 32 nt, Human
cgcgccuguagucccagcuacucgggaggcug

SEQ ID NO: 387876 - RNA, 32 nt, Human
cgcgccuguagucccagcuacuugggaggcug

SEQ ID NO: 387877 - RNA, 32 nt, Human
cgcgccuguagucccagcuccucaggaggcug

SEQ ID NO: 387878 - RNA, 32 nt, Human
cgcgccuguagucccagcugcucaggaggcug

SEQ ID NO: 387879 - RNA, 32 nt, Human
cgcgccuguggucccagcuacucgggaggcug

SEQ ID NO: 387880 - RNA, 32 nt, Human
cgcgccuucuccaggaauaggcgagaaucuca

SEQ ID NO: 387881 - RNA, 32 nt, Human
cgcgccuuucgcacugccaccauuccauccug

SEQ ID NO: 387882 - RNA, 32 nt, Human
cgcgccuuugcacuccagccuggaagacaaaa

SEQ ID NO: 387883 - RNA, 32 nt, Human
cgcgcgaggucccuccucuccgggcguccgug

SEQ ID NO: 387884 - RNA, 17 nt, Human
cgcgcgcccaggcgccu

SEQ ID NO: 387885 - RNA, 17 nt, Human
cgcgcgcccccgggccc

SEQ ID NO: 387886 - RNA, 18 nt, Human
cgcgcgccccgggagccu

SEQ ID NO: 387887 - RNA, 32 nt, Human
cgcgcggacuccugccccgaggguccggacgc

SEQ ID NO: 387888 - RNA, 32 nt, Human
cgcgcggagagggguggcgggcccgacagcgg

SEQ ID NO: 387889 - RNA, 32 nt, Human
cgcgcggaggggcgggggaggcgccgggaagu

SEQ ID NO: 387890 - RNA, 32 nt, Human
cgcgcggagucacccagucacacucccggcac

SEQ ID NO: 387891 - RNA, 32 nt, Human
cgcgcggcacagccaugaacaccaacgaugcc

SEQ ID NO: 387892 - RNA, 32 nt, Human
cgcgcggcagccgccugaagccccggccuggc

SEQ ID NO: 387893 - RNA, 24 nt, Human
cgcgcggccaagaauuuauuuggg

SEQ ID NO: 387894 - RNA, 27 nt, Human
cgcgcggccacaccccucccccagggg

SEQ ID NO: 387895 - RNA, 32 nt, Human
cgcgcggccccuguccuccggcccgagaugaa

SEQ ID NO: 387896 - RNA, 26 nt, Human
cgcgcggccucacccuuuccccaggg

SEQ ID NO: 387897 - RNA, 20 nt, Human
cgcgcggcuuccuccagacc

SEQ ID NO: 387898 - RNA, 32 nt, Human
cgcgcgggcaucaucccuaccagauugagugu

SEQ ID NO: 387899 - RNA, 32 nt, Human
cgcgcgggccguggccagagucuggcggcggc

SEQ ID NO: 387900 - RNA, 32 nt, Human
cgcgcggggaagggaagaagaggacgaggugg

SEQ ID NO: 387901 - RNA, 24 nt, Human
cgcgcgguaaugaauuuauuugga

SEQ ID NO: 387902 - RNA, 32 nt, Human
cgcgcgguugcuguuucuucucuggcuccggg

SEQ ID NO: 387903 - RNA, 19 nt, Human
cgcgcguacucggccgccu

SEQ ID NO: 387904 - RNA, 32 nt, Human
cgcgcguccggggcacguuccagggcgcgcgg

SEQ ID NO: 387905 - RNA, 32 nt, Human
cgcgcgucggagaggcuccugggaaacuccca

SEQ ID NO: 387906 - RNA, 32 nt, Human
cgcgcgucugcugcagagaccaugucugccga

SEQ ID NO: 387907 - RNA, 32 nt, Human
cgcgcgugucuucucuucuuuccagagauggc

SEQ ID NO: 387908 - RNA, 32 nt, Human
cgcgcuacugcacuccagccugggcgacagag

SEQ ID NO: 387909 - RNA, 32 nt, Human
cgcgcuacugcacuccagccugggugacagug

SEQ ID NO: 387910 - RNA, 32 nt, Human
cgcgcuacugcagcuuucuuccgccuuaggaa

SEQ ID NO: 387911 - RNA, 32 nt, Human
cgcgcuacugcauuccagccugggcgccgaga

SEQ ID NO: 387912 - RNA, 32 nt, Human
cgcgcuauugcacuccagccugggugacagag

SEQ ID NO: 387913 - RNA, 32 nt, Human
cgcgcucaggaggucaagaccagccugggcaa

SEQ ID NO: 387914 - RNA, 32 nt, Human
cgcgcucccaggagaguggaggcugcaggaag

SEQ ID NO: 387915 - RNA, 20 nt, Human
cgcgcuccgccccugcugcc

SEQ ID NO: 387916 - RNA, 32 nt, Human
cgcgcucgccucaguguggaaucaccuccgcg

SEQ ID NO: 387917 - RNA, 32 nt, Human
cgcgcucucacugcagccugugcccaaccccg

SEQ ID NO: 387918 - RNA, 32 nt, Human
cgcgcucuccaccacccaacccaaaccaugag

SEQ ID NO: 387919 - RNA, 32 nt, Human
cgcgcucuccggccuagacuggcugaaggagg

SEQ ID NO: 387920 - RNA, 32 nt, Human
cgcgcucugcaugcuccucugccugugcccgc

SEQ ID NO: 387921 - RNA, 32 nt, Human
cgcgcucugcucccugccuuugccucacuuua

SEQ ID NO: 387922 - RNA, 32 nt, Human
cgcgcugccggggcgagguugcgaggggcggu

SEQ ID NO: 387923 - RNA, 32 nt, Human
cgcgcugcgccuggggcugcugggcagccugg

SEQ ID NO: 387924 - RNA, 32 nt, Human
cgcgcugcucagcaggacacgugaacacccag

SEQ ID NO: 387925 - RNA, 32 nt, Human
cgcgcugcugcacuccagccugggugacagag

SEQ ID NO: 387926 - RNA, 32 nt, Human
cgcgcugcugcuccagccgcccggcagcucug

SEQ ID NO: 387927 - RNA, 32 nt, Human
cgcgcugcugcugcccguguacgcgcugggcu

SEQ ID NO: 387928 - RNA, 32 nt, Human
cgcgcugcuucuggcccugcagguuguguucc

SEQ ID NO: 387929 - RNA, 20 nt, Human
cgcgcugcuugccuuggcca

SEQ ID NO: 387930 - RNA, 20 nt, Human
cgcgcuggacccggcuaugc

SEQ ID NO: 387931 - RNA, 32 nt, Human
cgcgcuggagcuugcgaggagcgcagggugga

SEQ ID NO: 387932 - RNA, 32 nt, Human
cgcgcuggcccugccacuccagccuggccuca

SEQ ID NO: 387933 - RNA, 32 nt, Human
cgcgcuggcucacgccuguaaucccagcacuu

SEQ ID NO: 387934 - RNA, 17 nt, Human
cgcgcuggcuccgggug

SEQ ID NO: 387935 - RNA, 32 nt, Human
cgcgcugggcggggcuggaugggcuguggugg

SEQ ID NO: 387936 - RNA, 32 nt, Human
cgcgcugucgcccaggcuggagcgcaauggcg

SEQ ID NO: 387937 - RNA, 32 nt, Human
cgcgcugugcugccugucuucgcgccacuguu

SEQ ID NO: 387938 - RNA, 32 nt, Human
cgcgcuguugcccaggcuggagugcaguggcg

SEQ ID NO: 387939 - RNA, 32 nt, Human
cgcgcuuaggcaggcgguggcgcggcuggagu

SEQ ID NO: 387940 - RNA, 32 nt, Human
cgcgcuuccugcguccccaacccggucccuga

SEQ ID NO: 387941 - RNA, 32 nt, Human
cgcgcuucugggcucuaaccugggagacucgc

SEQ ID NO: 387942 - RNA, 32 nt, Human
cgcgcuuggcugcuuauaacuguacuagggcg

SEQ ID NO: 387943 - RNA, 32 nt, Human
cgcgcuuuccaaauuucuuaggcauuuauuuu

SEQ ID NO: 387944 - RNA, 32 nt, Human
cgcgcuuugcaccuccuauccccaggguccgc

SEQ ID NO: 387945 - RNA, 32 nt, Human
cgcgcuuugggaacaggaagguugagagagag

SEQ ID NO: 387946 - RNA, 32 nt, Human
cgcggaaaagccugaugaaguccuccgauauu

SEQ ID NO: 387947 - RNA, 32 nt, Human
cgcggaaagcagccucggggaaggaggaggaa

SEQ ID NO: 387948 - RNA, 32 nt, Human
cgcggaaagccgauggccuacucucguccggc

SEQ ID NO: 387949 - RNA, 18 nt, Human
cgcggaaagcggcucccc

SEQ ID NO: 387950 - RNA, 32 nt, Human
cgcggaacucggcggccgccauggcguccaac

SEQ ID NO: 387951 - RNA, 23 nt, Human
cgcggaagacgggcggcgcgugg

SEQ ID NO: 387952 - RNA, 32 nt, Human
cgcggaagagcagaacguuugggagugugcag

SEQ ID NO: 387953 - RNA, 32 nt, Human
cgcggaaggaccgggaaggaagagcggagccg

SEQ ID NO: 387954 - RNA, 32 nt, Human
cgcggaauauugaaggauguuuguuccaagau

SEQ ID NO: 387955 - RNA, 32 nt, Human
cgcggacaguaccgccuuccuccccucugucc

SEQ ID NO: 387956 - RNA, 32 nt, Human
cgcggacccacgcuuugucgggcugcucugcu

SEQ ID NO: 387957 - RNA, 23 nt, Human
cgcggacccgccuucugcccuca

SEQ ID NO: 387958 - RNA, 32 nt, Human
cgcggacccgcgugccccaggccucgcgcugc

SEQ ID NO: 387959 - RNA, 32 nt, Human
cgcggaccgcuucccugcagugccccgagucc

SEQ ID NO: 387960 - RNA, 32 nt, Human
cgcggacgaaggggugccugagcuguggagag

SEQ ID NO: 387961 - RNA, 32 nt, Human
cgcggacuaugacugcaggcuggguccugauc

SEQ ID NO: 387962 - RNA, 32 nt, Human
cgcggacucugccagccccagcuucagccccg

SEQ ID NO: 387963 - RNA, 32 nt, Human
cgcggacugccugggcuuagccagcgagcuac

SEQ ID NO: 387964 - RNA, 32 nt, Human
cgcggagaacagugggguuacagggagucauc

SEQ ID NO: 387965 - RNA, 32 nt, Human
cgcggagaacuccuaaggaggagauuggacag

SEQ ID NO: 387966 - RNA, 32 nt, Human
cgcggagaggagcggcgggagagccaggaggg

SEQ ID NO: 387967 - RNA, 32 nt, Human
cgcggagcagggagagaaaaagcagguaggga

SEQ ID NO: 387968 - RNA, 32 nt, Human
cgcggagccccggccgcugccucccgggacag

SEQ ID NO: 387969 - RNA, 32 nt, Human
cgcggagcccgcagcuggccagcuucagccac

SEQ ID NO: 387970 - RNA, 19 nt, Human
cgcggagcgggagagcggc

SEQ ID NO: 387971 - RNA, 32 nt, Human
cgcggaggagacugcauuucccaguagcagau

SEQ ID NO: 387972 - RNA, 32 nt, Human
cgcggaggaggaagaggguagacaggggcgac

SEQ ID NO: 387973 - RNA, 32 nt, Human
cgcggaggaggaggaucugggggaagaggagg

SEQ ID NO: 387974 - RNA, 32 nt, Human
cgcggaggcggaugggcgcggcucccuccccc

SEQ ID NO: 387975 - RNA, 32 nt, Human
cgcggaggcucacgccuguaaucccagcccuu

SEQ ID NO: 387976 - RNA, 32 nt, Human
cgcggaggcuggagccgcaauggugcugaugg

SEQ ID NO: 387977 - RNA, 32 nt, Human
cgcggaggcuuggugugccagguccgagccuc

SEQ ID NO: 387978 - RNA, 32 nt, Human
cgcggagggaggcggaggcugugagggacucc

SEQ ID NO: 387979 - RNA, 32 nt, Human
cgcggagggagggagagucugggccgcgcggg

SEQ ID NO: 387980 - RNA, 32 nt, Human
cgcggagggcgcgggcccgggagccagggagc

SEQ ID NO: 387981 - RNA, 20 nt, Human
cgcggaggucgcccggggug

SEQ ID NO: 387982 - RNA, 32 nt, Human
cgcggaguccacccugccgucuccgccuuggc

SEQ ID NO: 387983 - RNA, 32 nt, Human
cgcggaguucagugccacgugccugaauuuca

SEQ ID NO: 387984 - RNA, 32 nt, Human
cgcggaucaaccaggcagaguucuguggcgcc

SEQ ID NO: 387985 - RNA, 32 nt, Human
cgcggaucucagaacagucuuugucagauggg

SEQ ID NO: 387986 - RNA, 32 nt, Human
cgcggauuguagaugaagaaacucagcagcgc

SEQ ID NO: 387987 - RNA, 32 nt, Human
cgcggcagaaaccucuguagaggagcaggaug

SEQ ID NO: 387988 - RNA, 19 nt, Human
cgcggcagcacccggggca

SEQ ID NO: 387989 - RNA, 32 nt, Human
cgcggcagcagauguguguggggucagcccac

SEQ ID NO: 387990 - RNA, 32 nt, Human
cgcggcagccgaacaaaggagcaggggcgccg

SEQ ID NO: 387991 - RNA, 17 nt, Human
cgcggcagccuccgggu

SEQ ID NO: 387992 - RNA, 32 nt, Human
cgcggcaggaggacgaggcagggcgggcgggc

SEQ ID NO: 387993 - RNA, 32 nt, Human
cgcggcaucccccugcccauccagaccuuccu

SEQ ID NO: 387994 - RNA, 32 nt, Human
cgcggcauugcacuucagccugggcgauagag

SEQ ID NO: 387995 - RNA, 32 nt, Human
cgcggccaccggcgggagugcagcggccacug

SEQ ID NO: 387996 - RNA, 23 nt, Human
cgcggccacgccggcgcggcggg

SEQ ID NO: 387997 - RNA, 32 nt, Human
cgcggccacucgggggagacgguaguacacgg

SEQ ID NO: 387998 - RNA, 32 nt, Human
cgcggccacugcagucacuucgccaguuagcc

SEQ ID NO: 387999 - RNA, 18 nt, Human
cgcggccagccccacgug

SEQ ID NO: 388000 - RNA, 32 nt, Human
cgcggccauggacugagcgccgccggccaggc

SEQ ID NO: 388001 - RNA, 32 nt, Human
cgcggccauggcgggcccugagggcuuccagu

SEQ ID NO: 388002 - RNA, 32 nt, Human
cgcggccaugucugggccaggcaacaaacgcg

SEQ ID NO: 388003 - RNA, 32 nt, Human
cgcggccauuucagccccaucuuggcccagcg

SEQ ID NO: 388004 - RNA, 20 nt, Human
cgcggcccacaagcaucccc

SEQ ID NO: 388005 - RNA, 21 nt, Human
cgcggcccagcucccuggagc

SEQ ID NO: 388006 - RNA, 18 nt, Human
cgcggccccagcgccagg

SEQ ID NO: 388007 - RNA, 20 nt, Human
cgcggccccaggcggggcgg

SEQ ID NO: 388008 - RNA, 18 nt, Human
cgcggccccggcugcgag

SEQ ID NO: 388009 - RNA, 32 nt, Human
cgcggccccuacucccugucaggucguagagg

SEQ ID NO: 388010 - RNA, 24 nt, Human
cgcggcccgaggaggcggcggagg

SEQ ID NO: 388011 - RNA, 23 nt, Human
cgcggcccgccgaggcucggagc

SEQ ID NO: 388012 - RNA, 20 nt, Human
cgcggcccggaggcgcgggg

SEQ ID NO: 388013 - RNA, 32 nt, Human
cgcggcccggccggcaguugcaguguagacag

SEQ ID NO: 388014 - RNA, 19 nt, Human
cgcggcccgggcgcgcgcg

SEQ ID NO: 388015 - RNA, 23 nt, Human
cgcggcccggggacuugcacggg

SEQ ID NO: 388016 - RNA, 26 nt, Human
cgcggcccggugagggcgcgcgcggg

SEQ ID NO: 388017 - RNA, 32 nt, Human
cgcggcccuccccucgcucaugcccucccgcc

SEQ ID NO: 388018 - RNA, 32 nt, Human
cgcggcccugcugccaccuugaucucagacuu

SEQ ID NO: 388019 - RNA, 32 nt, Human
cgcggcccugggagcuggaggaaccgcgacuc

SEQ ID NO: 388020 - RNA, 32 nt, Human
cgcggcccuguuccagccugucucggcaccca

SEQ ID NO: 388021 - RNA, 20 nt, Human
cgcggcccuucucggcgagg

SEQ ID NO: 388022 - RNA, 20 nt, Human
cgcggccgagccggcgcggg

SEQ ID NO: 388023 - RNA, 32 nt, Human
cgcggccgagcugccaucagucaugcucuuaa

SEQ ID NO: 388024 - RNA, 32 nt, Human
cgcggccgcaaugaacugggagcugcugcugu

SEQ ID NO: 388025 - RNA, 24 nt, Human
cgcggccgcagcagcaccgggcgg

SEQ ID NO: 388026 - RNA, 21 nt, Human
cgcggccgcagcccgcgugga

SEQ ID NO: 388027 - RNA, 24 nt, Human
cgcggccgcagcgucggggcugga

SEQ ID NO: 388028 - RNA, 22 nt, Human
cgcggccgcagggagcgccgga

SEQ ID NO: 388029 - RNA, 22 nt, Human
cgcggccgcccgggccugcggg

SEQ ID NO: 388030 - RNA, 19 nt, Human
cgcggccgccgcgugcgcg

SEQ ID NO: 388031 - RNA, 24 nt, Human
cgcggccgccggacgcagcgcggg

SEQ ID NO: 388032 - RNA, 21 nt, Human
cgcggccgcggaugagccggg

SEQ ID NO: 388033 - RNA, 22 nt, Human
cgcggccgcggcgcgagccggg

SEQ ID NO: 388034 - RNA, 24 nt, Human
cgcggccgcggcggcggcgggcgg

SEQ ID NO: 388035 - RNA, 24 nt, Human
cgcggccgcgggucacccggcggg

SEQ ID NO: 388036 - RNA, 24 nt, Human
cgcggccgcggucccagcagcgga

SEQ ID NO: 388037 - RNA, 24 nt, Human
cgcggccgcggugggcacgcacgg

SEQ ID NO: 388038 - RNA, 32 nt, Human
cgcggccggaggcagaggccaggcgagacacc

SEQ ID NO: 388039 - RNA, 23 nt, Human
cgcggccggcgggcggcgggagg

SEQ ID NO: 388040 - RNA, 20 nt, Human
cgcggccgggccagcggagg

SEQ ID NO: 388041 - RNA, 19 nt, Human
cgcggccggggcagcgagg

SEQ ID NO: 388042 - RNA, 21 nt, Human
cgcggccggggcgcgcggggg

SEQ ID NO: 388043 - RNA, 24 nt, Human
cgcggccggggggcggugcgcgga

SEQ ID NO: 388044 - RNA, 21 nt, Human
cgcggccguggcaccgcugga

SEQ ID NO: 388045 - RNA, 32 nt, Human
cgcggccucuggagcugggauuugggaggaca

SEQ ID NO: 388046 - RNA, 32 nt, Human
cgcggccugagccccuccaccugcugcaauca

SEQ ID NO: 388047 - RNA, 32 nt, Human
cgcggccugagcccggcgaggguggggagggc

SEQ ID NO: 388048 - RNA, 32 nt, Human
cgcggccugcagcccucgcccgcguccccggc

SEQ ID NO: 388049 - RNA, 32 nt, Human
cgcggccugcgaugacagcccagggccgcuga

SEQ ID NO: 388050 - RNA, 32 nt, Human
cgcggccuggaggacgaggaggacggggugcc

SEQ ID NO: 388051 - RNA, 32 nt, Human
cgcggccuuccuccucccugcuccagaauucu

SEQ ID NO: 388052 - RNA, 32 nt, Human
cgcggccuuccuggugacggagcugcuccccc

SEQ ID NO: 388053 - RNA, 32 nt, Human
cgcggccuugggagcaugucacuguguacagc

SEQ ID NO: 388054 - RNA, 32 nt, Human
cgcggcgaaaccagccuugucauuucagcauu

SEQ ID NO: 388055 - RNA, 32 nt, Human
cgcggcgaggccgucggagaaaacuuaagcgu

SEQ ID NO: 388056 - RNA, 32 nt, Human
cgcggcgaugaggugguccugaggcagaagcc

SEQ ID NO: 388057 - RNA, 22 nt, Human
cgcggcgcagcggcccgaggca

SEQ ID NO: 388058 - RNA, 18 nt, Human
cgcggcgccgcccgggug

SEQ ID NO: 388059 - RNA, 23 nt, Human
cgcggcgccgcgccuccccgggc

SEQ ID NO: 388060 - RNA, 32 nt, Human
cgcggcgccuccucagagagcccgggucagcu

SEQ ID NO: 388061 - RNA, 32 nt, Human
cgcggcgcugcacucuagccugggugacagag

SEQ ID NO: 388062 - RNA, 32 nt, Human
cgcggcgcuggcucggcagccucggccgggcg

SEQ ID NO: 388063 - RNA, 20 nt, Human
cgcggcggcagagcgcgagg

SEQ ID NO: 388064 - RNA, 32 nt, Human
cgcggcggcaggcacagguguaauggauaggu

SEQ ID NO: 388065 - RNA, 21 nt, Human
cgcggcggccagcggcgcggg

SEQ ID NO: 388066 - RNA, 22 nt, Human
cgcggcggccagcggcgcgggg

SEQ ID NO: 388067 - RNA, 32 nt, Human
cgcggcggccccgggaccaaggagaacuggcg

SEQ ID NO: 388068 - RNA, 16 nt, Human
cgcggcggcccggaca

SEQ ID NO: 388069 - RNA, 19 nt, Human
cgcggcggccgccgcgagg

SEQ ID NO: 388070 - RNA, 21 nt, Human
cgcggcggccggcgcgcugga

SEQ ID NO: 388071 - RNA, 22 nt, Human
cgcggcggcgcggcggcgcgag

SEQ ID NO: 388072 - RNA, 32 nt, Human
cgcggcggcggaggcagcagcggcggcggcag

SEQ ID NO: 388073 - RNA, 17 nt, Human
cgcggcggcggcgcgag

SEQ ID NO: 388074 - RNA, 20 nt, Human
cgcggcggcggcggcgcggg

SEQ ID NO: 388075 - RNA, 21 nt, Human
cgcggcggcggcggcgcgggg

SEQ ID NO: 388076 - RNA, 20 nt, Human
cgcggcggcgggcggccgag

SEQ ID NO: 388077 - RNA, 32 nt, Human
cgcggcggcucacgccuguaauccuagcgguu

SEQ ID NO: 388078 - RNA, 32 nt, Human
cgcggcggcucacuccuguaaucccagcacuu

SEQ ID NO: 388079 - RNA, 32 nt, Human
cgcggcggcucaugccuguaaucccagcacuu

SEQ ID NO: 388080 - RNA, 32 nt, Human
cgcggcggcugcagcuccagggagggggucug

SEQ ID NO: 388081 - RNA, 32 nt, Human
cgcggcggcugggaacgccgcuccccgacgca

SEQ ID NO: 388082 - RNA, 16 nt, Human
cgcggcgggccgagcc

SEQ ID NO: 388083 - RNA, 32 nt, Human
cgcggcggggccugagggacggaggccgggau

SEQ ID NO: 388084 - RNA, 20 nt, Human
cgcggcggggcggcgagagg

SEQ ID NO: 388085 - RNA, 32 nt, Human
cgcggcggguuugggugcaguggacccgcagu

SEQ ID NO: 388086 - RNA, 32 nt, Human
cgcggcgguggccagggccagagcaggcggcc

SEQ ID NO: 388087 - RNA, 32 nt, Human
cgcggcgucuuugaaaguuaacagacacuaag

SEQ ID NO: 388088 - RNA, 32 nt, Human
cgcggcgugccgcggcggccgcgggcuccggc

SEQ ID NO: 388089 - RNA, 32 nt, Human
cgcggcgugccggcgcugcagcgcggcagggg

SEQ ID NO: 388090 - RNA, 32 nt, Human
cgcggcguggaggcagggagaaugcgacucuc

SEQ ID NO: 388091 - RNA, 23 nt, Human
cgcggcuaccgcggcggcgcagg

SEQ ID NO: 388092 - RNA, 32 nt, Human
cgcggcucacugcaaccuccaccucccagguu

SEQ ID NO: 388093 - RNA, 32 nt, Human
cgcggcucacugcaaccuccaccucccgggcu

SEQ ID NO: 388094 - RNA, 32 nt, Human
cgcggcucacugcaaccuggaacuccugggcu

SEQ ID NO: 388095 - RNA, 19 nt, Human
cgcggcucagaaccggagc

SEQ ID NO: 388096 - RNA, 32 nt, Human
cgcggcucagccaagcuguuguuuuaaaagag

SEQ ID NO: 388097 - RNA, 32 nt, Human
cgcggcucagcgcgcaccggcgggcuucgaaa

SEQ ID NO: 388098 - RNA, 32 nt, Human
cgcggcuccagcccucuccagccuccggcuca

SEQ ID NO: 388099 - RNA, 21 nt, Human
cgcggcucgcggggccggagc

SEQ ID NO: 388100 - RNA, 22 nt, Human
cgcggcucggugacgccgcggg

SEQ ID NO: 388101 - RNA, 32 nt, Human
cgcggcucuccuccugucgguccugcaguucu

SEQ ID NO: 388102 - RNA, 32 nt, Human
cgcggcucuccucuucuucaucucuguuuucc

SEQ ID NO: 388103 - RNA, 32 nt, Human
cgcggcucuggagcuugacaggccugacgucg

SEQ ID NO: 388104 - RNA, 21 nt, Human
cgcggcugcagcgcgggcggg

SEQ ID NO: 388105 - RNA, 23 nt, Human
cgcggcugcccagcagcaugagg

SEQ ID NO: 388106 - RNA, 32 nt, Human
cgcggcugcccagcagcaugagguggugcugg

SEQ ID NO: 388107 - RNA, 20 nt, Human
cgcggcugccugcgcgcacg

SEQ ID NO: 388108 - RNA, 21 nt, Human
cgcggcugcggaacgggcgga

SEQ ID NO: 388109 - RNA, 20 nt, Human
cgcggcugcggcggcggccg

SEQ ID NO: 388110 - RNA, 21 nt, Human
cgcggcugcucacggcgcacg

SEQ ID NO: 388111 - RNA, 23 nt, Human
cgcggcugcuccggugcgccggg

SEQ ID NO: 388112 - RNA, 27 nt, Human
cgcggcuggcgccgcugcgcgcauggg

SEQ ID NO: 388113 - RNA, 18 nt, Human
cgcggcugggcccugccg

SEQ ID NO: 388114 - RNA, 20 nt, Human
cgcggcugggccgucggaga

SEQ ID NO: 388115 - RNA, 32 nt, Human
cgcggcuggggccucgcgccuccuggagcgcc

SEQ ID NO: 388116 - RNA, 21 nt, Human
cgcggcugugagccugcggga

SEQ ID NO: 388117 - RNA, 24 nt, Human
cgcggcuguggcggcgccggcgga

SEQ ID NO: 388118 - RNA, 32 nt, Human
cgcggcuugccuggcucuugcuguauccucac

SEQ ID NO: 388119 - RNA, 32 nt, Human
cgcgggaagccgcggaacugcgccggaaaguc

SEQ ID NO: 388120 - RNA, 32 nt, Human
cgcgggaccagagggagggaggcugcggacga

SEQ ID NO: 388121 - RNA, 32 nt, Human
cgcgggaccucgguggagaucuccagugaggc

SEQ ID NO: 388122 - RNA, 32 nt, Human
cgcgggagagggaggagaaggagcagccgcca

SEQ ID NO: 388123 - RNA, 24 nt, Human
cgcgggagcaguaacccgcgcggg

SEQ ID NO: 388124 - RNA, 32 nt, Human
cgcgggagccugggcggcgagccgggugugag

SEQ ID NO: 388125 - RNA, 32 nt, Human
cgcgggaggaggacgcgggugcggucuaggaa

SEQ ID NO: 388126 - RNA, 32 nt, Human
cgcgggaggcagagacugcagugagccgagau

SEQ ID NO: 388127 - RNA, 32 nt, Human
cgcgggagggguggaggcugcggggagccggg

SEQ ID NO: 388128 - RNA, 32 nt, Human
cgcgggaguccaggggcagacgggaugggucu

SEQ ID NO: 388129 - RNA, 32 nt, Human
cgcgggagugagagagggugagucagccacug

SEQ ID NO: 388130 - RNA, 23 nt, Human
cgcgggaugcgcccgggagccac

SEQ ID NO: 388131 - RNA, 32 nt, Human
cgcgggaugcugucuguccccuugcucagggc

SEQ ID NO: 388132 - RNA, 32 nt, Human
cgcgggcaccuugcuugcaugccucuuccucc

SEQ ID NO: 388133 - RNA, 32 nt, Human
cgcgggcagcagcuggagcuaaaggaagggca

SEQ ID NO: 388134 - RNA, 32 nt, Human
cgcgggcagcagggaagagggagcaaggcauu

SEQ ID NO: 388135 - RNA, 21 nt, Human
cgcgggcagcccaggcuccug

SEQ ID NO: 388136 - RNA, 20 nt, Human
cgcgggcagcggcgcgagca

SEQ ID NO: 388137 - RNA, 32 nt, Human
cgcgggcaucgggcaggagcucggccggggcg

SEQ ID NO: 388138 - RNA, 32 nt, Human
cgcgggccagaggcugagccuggguguggcug

SEQ ID NO: 388139 - RNA, 32 nt, Human
cgcgggcccagaggcuggaggcagcggggagc

SEQ ID NO: 388140 - RNA, 24 nt, Human
cgcgggccccggcggcggcgcgga

SEQ ID NO: 388141 - RNA, 32 nt, Human
cgcgggccgagggcuccugcagcugcucgcgc

SEQ ID NO: 388142 - RNA, 32 nt, Human
cgcgggccgcaugacuccucucugccucaauu

SEQ ID NO: 388143 - RNA, 32 nt, Human
cgcgggccgggagggggcacggcggaggccac

SEQ ID NO: 388144 - RNA, 25 nt, Human
cgcgggcgacgggcgggugcgcggg

SEQ ID NO: 388145 - RNA, 32 nt, Human
cgcgggcgagccggagcagaagaaggagggag

SEQ ID NO: 388146 - RNA, 22 nt, Human
cgcgggcgccccaagccugcca

SEQ ID NO: 388147 - RNA, 22 nt, Human
cgcgggcgcgggcgcgugcggg

SEQ ID NO: 388148 - RNA, 32 nt, Human
cgcgggcggcggcggaggcugcgggagucgcu

SEQ ID NO: 388149 - RNA, 32 nt, Human
cgcgggcgggcggacccaagcagugagggccu

SEQ ID NO: 388150 - RNA, 32 nt, Human
cgcgggcuacagccgcaccgccuauuccagcc

SEQ ID NO: 388151 - RNA, 32 nt, Human
cgcgggcuagaggcacuuuaccgcccggcggg

SEQ ID NO: 388152 - RNA, 32 nt, Human
cgcgggcuccugacaaccuccuccccucggcg

SEQ ID NO: 388153 - RNA, 32 nt, Human
cgcgggcugagaggucagaggcugcgaguguc

SEQ ID NO: 388154 - RNA, 18 nt, Human
cgcgggcugcgcccuggg

SEQ ID NO: 388155 - RNA, 32 nt, Human
cgcgggcugcggcagcaugaaaaagaagcaga

SEQ ID NO: 388156 - RNA, 22 nt, Human
cgcgggcugcggugcgagcggg

SEQ ID NO: 388157 - RNA, 18 nt, Human
cgcgggcuuccgcuccca

SEQ ID NO: 388158 - RNA, 32 nt, Human
cggccuggagcagcgacgccaccgcugggcaa

SEQ ID NO: 388159 - RNA, 32 nt, Human
cggccuggaggagggagguugugguuggaugg

SEQ ID NO: 388160 - RNA, 22 nt, Human
cggccuggaggugugugggcca

SEQ ID NO: 388161 - RNA, 32 nt, Human
cggccuggaguugggguugcagggacgccacg

SEQ ID NO: 388162 - RNA, 32 nt, Human
cggccuggcagauagcagaggcagcaggccgu

SEQ ID NO: 388163 - RNA, 32 nt, Human
cggccuggccaacauggugaaaccccaucucu

SEQ ID NO: 388164 - RNA, 32 nt, Human
cggccuggccaacauggugaaaccccgucucu

SEQ ID NO: 388165 - RNA, 32 nt, Human
cggccuggccaacauggugaaacccugucucu

SEQ ID NO: 388166 - RNA, 32 nt, Human
cggccuggccaaccuccgccuccuggguucaa

SEQ ID NO: 388167 - RNA, 32 nt, Human
cggccuggccaauauggugaaaccccaucucu

SEQ ID NO: 388168 - RNA, 32 nt, Human
cggccuggcccaggcugccgcuguacggugag

SEQ ID NO: 388169 - RNA, 32 nt, Human
cggccuggccgccaccaccgccaccgagagcc

SEQ ID NO: 388170 - RNA, 32 nt, Human
cggccuggcggcaggcugaagcuguucuuuug

SEQ ID NO: 388171 - RNA, 32 nt, Human
cggccuggcugcagcugggcagcagggguagg

SEQ ID NO: 388172 - RNA, 32 nt, Human
cggccuggcugcaggcgcaggagcagugucgg

SEQ ID NO: 388173 - RNA, 32 nt, Human
cggccuggcuuggagagagggggcucccggca

SEQ ID NO: 388174 - RNA, 32 nt, Human
cggccugggaggagccgagcucggacaacggc

SEQ ID NO: 388175 - RNA, 32 nt, Human
cggccugggaugcgggccaggcugcaggcggc

SEQ ID NO: 388176 - RNA, 22 nt, Human
cggccugggcaacagagcaaga

SEQ ID NO: 388177 - RNA, 32 nt, Human
cggccugggcagcgccccagaagccucauaga

SEQ ID NO: 388178 - RNA, 32 nt, Human
cggccugggcaggggguccaggugggccacac

SEQ ID NO: 388179 - RNA, 32 nt, Human
cggccugggcccugucacuucucugauagcuc

SEQ ID NO: 388180 - RNA, 22 nt, Human
cggccugggcgacagagcgaga

SEQ ID NO: 388181 - RNA, 32 nt, Human
cggccugggcggacccaggggagggcggccca

SEQ ID NO: 388182 - RNA, 32 nt, Human
cggccugggcucugccagaggcugaggugccc

SEQ ID NO: 388183 - RNA, 22 nt, Human
cggccugggugacagagugaga

SEQ ID NO: 388184 - RNA, 32 nt, Human
cggccuggguguggcuggaaugguggcaggag

SEQ ID NO: 388185 - RNA, 32 nt, Human
cggccuggugcaguuuggccugggcgacaguc

SEQ ID NO: 388186 - RNA, 32 nt, Human
cggccugguucugcagcuggaccgaccucauu

SEQ ID NO: 388187 - RNA, 22 nt, Human
cggccugugccggccggcgcgg

SEQ ID NO: 388188 - RNA, 32 nt, Human
cggccuguggacagccagacccugccaucccu

SEQ ID NO: 388189 - RNA, 32 nt, Human
cggccuucagcccaggcugggaagcgccuucu

SEQ ID NO: 388190 - RNA, 32 nt, Human
cggccuuccaaagugcauuacaggcgugagcc

SEQ ID NO: 388191 - RNA, 31 nt, Human
cggccuucccaagucugagcuauuucuucca

SEQ ID NO: 388192 - RNA, 32 nt, Human
cggccuucucccgcuccugagggcuguggcgg

SEQ ID NO: 388193 - RNA, 32 nt, Human
cggccuucucccuucaucuugaucugggaaga

SEQ ID NO: 388194 - RNA, 32 nt, Human
cggccuucucgagaagcgacggcggagggccc

SEQ ID NO: 388195 - RNA, 18 nt, Human
cggccuugagcccugaca

SEQ ID NO: 388196 - RNA, 32 nt, Human
cggccuugcgccgugcauuccgaugcgcggca

SEQ ID NO: 388197 - RNA, 18 nt, Human
cggccuugcuuuuccccg

SEQ ID NO: 388198 - RNA, 19 nt, Human
cggccuuggcuaacuuuuc

SEQ ID NO: 388199 - RNA, 18 nt, Human
cggccuugucagcucaca

SEQ ID NO: 388200 - RNA, 18 nt, Human
cggccuugucuuucggca

SEQ ID NO: 388201 - RNA, 21 nt, Human
cggccuuucagguccaggcca

SEQ ID NO: 388202 - RNA, 20 nt, Human
cggccuuucccucccuccgc

SEQ ID NO: 388203 - RNA, 22 nt, Human
cggccuuucccucccucugcca

SEQ ID NO: 388204 - RNA, 31 nt, Human
cggccuuuccucucugccucuggcuuuaugu

SEQ ID NO: 388205 - RNA, 32 nt, Human
cggccuuugcaggcccggccuccugcgucucg

SEQ ID NO: 388206 - RNA, 32 nt, Human
cggccuuugcuguggcuggagcuggacagugc

SEQ ID NO: 388207 - RNA, 19 nt, Human
cggccuuuguuccuccaua

SEQ ID NO: 388208 - RNA, 20 nt, Human
cggccuuuuccucuggcuca

SEQ ID NO: 388209 - RNA, 32 nt, Human
cggcgaagaggacccgcaggcugcaaggagca

SEQ ID NO: 388210 - RNA, 32 nt, Human
cggcgaaggaggugguggcugcguugggcucc

SEQ ID NO: 388211 - RNA, 17 nt, Human
cggcgaaguggccuccc

SEQ ID NO: 388212 - RNA, 32 nt, Human
cggcgacacccgaggccuggugguggcggcgg

SEQ ID NO: 388213 - RNA, 32 nt, Human
cggcgacacugcacccaucccggcugcuuuug

SEQ ID NO: 388214 - RNA, 32 nt, Human
cggcgacagguauggccccuugccaggguagg

SEQ ID NO: 388215 - RNA, 32 nt, Human
cggcgacauggcuucggagcaggacgugcgcg

SEQ ID NO: 388216 - RNA, 32 nt, Human
cggcgaccaccaggggccugaggaugaagcca

SEQ ID NO: 388217 - RNA, 32 nt, Human
cggcgaccccgccagccccggucucuuucccu

SEQ ID NO: 388218 - RNA, 19 nt, Human
cggcgacccugcccucccg

SEQ ID NO: 388219 - RNA, 31 nt, Human
cggcgacccuuuccagggccuguugucuggc

SEQ ID NO: 388220 - RNA, 32 nt, Human
cggcgacucccaggauccuggccaugagagcu

SEQ ID NO: 388221 - RNA, 32 nt, Human
cggcgacuccccucagccuccgccgccucgcc

SEQ ID NO: 388222 - RNA, 32 nt, Human
cggcgacugcagcugcacggcguccagcagcg

SEQ ID NO: 388223 - RNA, 32 nt, Human
cggcgacuuggagagagggaagaggggcguuu

SEQ ID NO: 388224 - RNA, 24 nt, Human
cggcgagacccggcccccacgccc

SEQ ID NO: 388225 - RNA, 19 nt, Human
cggcgagaccuggccaggg

SEQ ID NO: 388226 - RNA, 32 nt, Human
cggcgagagcgguucagguguucuccgaagcc

SEQ ID NO: 388227 - RNA, 31 nt, Human
cggcgagauggcccucggccugugccgcugc

SEQ ID NO: 388228 - RNA, 32 nt, Human
cggcgagccagagcuggaccucaccagcaagc

SEQ ID NO: 388229 - RNA, 28 nt, Human
cggcgagccgggugugagcugccugaaa

SEQ ID NO: 388230 - RNA, 32 nt, Human
cggcgagcgggagugaaagaagaaaagcuaga

SEQ ID NO: 388231 - RNA, 21 nt, Human
cggcgaggcacuggccagccc

SEQ ID NO: 388232 - RNA, 32 nt, Human
cggcgaggcaggcggacgaggcgcagagacag

SEQ ID NO: 388233 - RNA, 32 nt, Human
cggcgaggcccuggugggcgcgaggcaggggg

SEQ ID NO: 388234 - RNA, 32 nt, Human
cggcgaggcuugagcuugcagcgcgcggcuuc

SEQ ID NO: 388235 - RNA, 32 nt, Human
cggcgagggaggacgggggcgcagacggccgg

SEQ ID NO: 388236 - RNA, 32 nt, Human
cggcgauggcauccuuccuuuccauccuaaga

SEQ ID NO: 388237 - RNA, 32 nt, Human
cggcgcaccgcaagcccugccuccuggguuca

SEQ ID NO: 388238 - RNA, 32 nt, Human
cggcgcacuccuggcccuggguucuugcugcu

SEQ ID NO: 388239 - RNA, 32 nt, Human
cggcgcagccgugggagcugaggaucuggcac

SEQ ID NO: 388240 - RNA, 32 nt, Human
cggcgcagcgcuccagccaugucgcgcggccu

SEQ ID NO: 388241 - RNA, 32 nt, Human
cggcgcagcugcucccgcugccacagccgcca

SEQ ID NO: 388242 - RNA, 17 nt, Human
cggcgcaggcgcgcgga

SEQ ID NO: 388243 - RNA, 32 nt, Human
cggcgcaucccuccucucccaccuccuggcac

SEQ ID NO: 388244 - RNA, 32 nt, Human
cggcgcaugccugcaaucccagcuacuuggaa

SEQ ID NO: 388245 - RNA, 32 nt, Human
cggcgccaaccaccgcgggccucccagccagc

SEQ ID NO: 388246 - RNA, 32 nt, Human
cggcgccacccugccccagccugaggaggagg

SEQ ID NO: 388247 - RNA, 32 nt, Human
cggcgccacggcuugcugacagcugggagggu

SEQ ID NO: 388248 - RNA, 32 nt, Human
cggcgccacugccaccaccgcagacgccgccu

SEQ ID NO: 388249 - RNA, 32 nt, Human
cggcgccagcaacugcgggacgccucagcucg

SEQ ID NO: 388250 - RNA, 23 nt, Human
cggcgccagcagcccgcgccccg

SEQ ID NO: 388251 - RNA, 32 nt, Human
cggcgccauccugcaaucuaagccacaauggu

SEQ ID NO: 388252 - RNA, 32 nt, Human
cggcgcccagcccaggaagaguuuuuaaauua

SEQ ID NO: 388253 - RNA, 32 nt, Human
cggcgccccugccaccucccugacccgucuaa

SEQ ID NO: 388254 - RNA, 32 nt, Human
cggcgcccgcagcggaggagguuuucaguggc

SEQ ID NO: 388255 - RNA, 32 nt, Human
cggcgcccggccuugcucaacgcccagcaguc

SEQ ID NO: 388256 - RNA, 32 nt, Human
cggcgccgcagccauggagggaggcggcggcg

SEQ ID NO: 388257 - RNA, 20 nt, Human
cggcgccgccaccgccgcac

SEQ ID NO: 388258 - RNA, 32 nt, Human
cggcgccgcgcacuccaacccggcgggcaccu

SEQ ID NO: 388259 - RNA, 32 nt, Human
cggcgccgcugcuguaggggaccagcgcgggu

SEQ ID NO: 388260 - RNA, 32 nt, Human
cggcgccggcuugugggcucgccgccugcagc

SEQ ID NO: 388261 - RNA, 19 nt, Human
cggcgccgggggcgggagg

SEQ ID NO: 388262 - RNA, 32 nt, Human
cggcgccuagcccucugggaauuguguucugg

SEQ ID NO: 388263 - RNA, 32 nt, Human
cggcgccucacggauggcaaagcucuccucac

SEQ ID NO: 388264 - RNA, 32 nt, Human
cggcgccugagaugcaggcuugugugcggggc

SEQ ID NO: 388265 - RNA, 32 nt, Human
cggcgccuguaaucccagcuacuagggaggcu

SEQ ID NO: 388266 - RNA, 32 nt, Human
cggcgccuguaaucccagcuacucgggagacu

SEQ ID NO: 388267 - RNA, 27 nt, Human
cggcgccuguaaucccagcuacuuggg

SEQ ID NO: 388268 - RNA, 32 nt, Human
cggcgccuguucugggggcuuucuguuccagc

SEQ ID NO: 388269 - RNA, 32 nt, Human
cggcgcgaacccugcugggccuccagucaccc

SEQ ID NO: 388270 - RNA, 32 nt, Human
cggcgcgcacacugcucgcugggccgcggcuc

SEQ ID NO: 388271 - RNA, 32 nt, Human
cggcgcgcacagcugcacucagcggcuuccuu

SEQ ID NO: 388272 - RNA, 21 nt, Human
cggcgcgccaccggcgcccgc

SEQ ID NO: 388273 - RNA, 32 nt, Human
cggcgcgccugaaggagcaggaaggggaagga

SEQ ID NO: 388274 - RNA, 25 nt, Human
cggcgcgcuucugccugcguuccau

SEQ ID NO: 388275 - RNA, 32 nt, Human
cggcgcggagggccccagcccagucaggggug

SEQ ID NO: 388276 - RNA, 21 nt, Human
cggcgcggccggccccagucg

SEQ ID NO: 388277 - RNA, 18 nt, Human
cggcgcggccggggcagg

SEQ ID NO: 388278 - RNA, 20 nt, Human
cggcgcggcgcgacaccggg

SEQ ID NO: 388279 - RNA, 32 nt, Human
cggcgcggcggcggagggggcgggcaggccgg

SEQ ID NO: 388280 - RNA, 22 nt, Human
cggcgcggcggggcggggccgg

SEQ ID NO: 388281 - RNA, 32 nt, Human
cggcgcgggaggaggagcgggagccagcccug

SEQ ID NO: 388282 - RNA, 21 nt, Human
cggcgcgggccacgccagggu

SEQ ID NO: 388283 - RNA, 32 nt, Human
cggcgcgggcuggggcggcucugcgccuccgc

SEQ ID NO: 388284 - RNA, 32 nt, Human
cggcgcggguuccugccucucuggguggguga

SEQ ID NO: 388285 - RNA, 32 nt, Human
cggcgcguccggcggaggguugaggggagcgg

SEQ ID NO: 388286 - RNA, 32 nt, Human
cggcgcuagggugggcgaacccagagggacgc

SEQ ID NO: 388287 - RNA, 24 nt, Human
cggcgcucacugcucuccacgccg

SEQ ID NO: 388288 - RNA, 32 nt, Human
cggcgcucucccugccuccccugccgggcugc

SEQ ID NO: 388289 - RNA, 32 nt, Human
cggcgcucugggcugcuccucccauccccgca

SEQ ID NO: 388290 - RNA, 32 nt, Human
cggcgcugacccuuccaggucagcuggaguug

SEQ ID NO: 388291 - RNA, 32 nt, Human
cggcgcugaugcugggaggccuccagggaugg

SEQ ID NO: 388292 - RNA, 32 nt, Human
cggcgcugcacucuagccugggugacagaguc

SEQ ID NO: 388293 - RNA, 32 nt, Human
cggcgcugcggugggagccggagggcgacagu

SEQ ID NO: 388294 - RNA, 32 nt, Human
cggcgcuggcagcagggcccgcggggugaagg

SEQ ID NO: 388295 - RNA, 32 nt, Human
cggcgcugggagagggcggagggggaggcggc

SEQ ID NO: 388296 - RNA, 32 nt, Human
cggcgcugggagguggagucguugcuguugcu

SEQ ID NO: 388297 - RNA, 32 nt, Human
cggcgcuuugggaggccgaggugggcagauca

SEQ ID NO: 388298 - RNA, 32 nt, Human
cggcggaaggguguccaggcagaggaaacagg

SEQ ID NO: 388299 - RNA, 32 nt, Human
cggcggacaguguaauguugggugggagugcg

SEQ ID NO: 388300 - RNA, 32 nt, Human
cggcggagagacugauggagaggcagaaacgg

SEQ ID NO: 388301 - RNA, 32 nt, Human
cggcggagcaggcauuuccagcagugaggaga

SEQ ID NO: 388302 - RNA, 32 nt, Human
cggcggagccgcaggccagggaccugcaguga

SEQ ID NO: 388303 - RNA, 32 nt, Human
cggcggaggaggaggaggagcgggaggagcgc

SEQ ID NO: 388304 - RNA, 32 nt, Human
cggcggaggcagcagcggcggcggcaguggcg

SEQ ID NO: 388305 - RNA, 32 nt, Human
cggcggaugccuguaaucccagcuacuuggga

SEQ ID NO: 388306 - RNA, 32 nt, Human
cggcggcaccagcaccaccaugucgcgcucag

SEQ ID NO: 388307 - RNA, 32 nt, Human
cggcggcagaaaaggcagcgggcgcugggaga

SEQ ID NO: 388308 - RNA, 32 nt, Human
cggcggcagcagccccagcccucagagagaca

SEQ ID NO: 388309 - RNA, 32 nt, Human
cggcggcagcagcgauggcaggaauagaguug

SEQ ID NO: 388310 - RNA, 32 nt, Human
cggcggcagcagcggcgacagcagaggaggaa

SEQ ID NO: 388311 - RNA, 20 nt, Human
cggcggcagcccucccggcg

SEQ ID NO: 388312 - RNA, 32 nt, Human
cggcggcagccgcggcggccgccggcucuucc

SEQ ID NO: 388313 - RNA, 32 nt, Human
cggcggcagccugccuugcucugccaggaacc

SEQ ID NO: 388314 - RNA, 32 nt, Human
cggcggcagcggcggagccaggcagccccgcg

SEQ ID NO: 388315 - RNA, 32 nt, Human
cggcggcaggacuccggcacuaugagcggcuu

SEQ ID NO: 388316 - RNA, 32 nt, Human
cggcggcaggagcugaggggaguuguagggaa

SEQ ID NO: 388317 - RNA, 32 nt, Human
cggcggcaggguggcggacggagcgggggacc

SEQ ID NO: 388318 - RNA, 32 nt, Human
cggcggcaggguguggacccagcuggccgcug

SEQ ID NO: 388319 - RNA, 32 nt, Human
cggcggccacugcgcgccgcccugaggagcgc

SEQ ID NO: 388320 - RNA, 32 nt, Human
cggcggccagggaggugcggagcagccucggc

SEQ ID NO: 388321 - RNA, 21 nt, Human
cggcggcccagcgcccggcgu

SEQ ID NO: 388322 - RNA, 20 nt, Human
cggcggccccaaccagccgg

SEQ ID NO: 388323 - RNA, 23 nt, Human
cggcggcccccagcccagcccgg

SEQ ID NO: 388324 - RNA, 32 nt, Human
cggcggccccuccggcucccacugccuccccc

SEQ ID NO: 388325 - RNA, 21 nt, Human
cggcggccccugcggucccgg

SEQ ID NO: 388326 - RNA, 32 nt, Human
cggcggccgggugggagcgcagcgaggacgcg

SEQ ID NO: 388327 - RNA, 23 nt, Human
cggcggccguccucaucccggcg

SEQ ID NO: 388328 - RNA, 21 nt, Human
cggcggccuccaaagccuccc

SEQ ID NO: 388329 - RNA, 32 nt, Human
cggcggccuccaaagccucccaccccacccca

SEQ ID NO: 388330 - RNA, 32 nt, Human
cggcggccuccggcggcgcucuccagucaugg

SEQ ID NO: 388331 - RNA, 32 nt, Human
cggcggccugcagggaggucccagaaucuagg

SEQ ID NO: 388332 - RNA, 18 nt, Human
cggcggccugugcugcug

SEQ ID NO: 388333 - RNA, 19 nt, Human
cggcggcgaccccgcggcg

SEQ ID NO: 388334 - RNA, 23 nt, Human
cggcggcgaccccggggccuggc

SEQ ID NO: 388335 - RNA, 22 nt, Human
cggcggcgacccggcgccgcgu

SEQ ID NO: 388336 - RNA, 32 nt, Human
cggcggcgagccagcacccgggccggcuaagc

SEQ ID NO: 388337 - RNA, 18 nt, Human
cggcggcgaucucccggc

SEQ ID NO: 388338 - RNA, 32 nt, Human
cggcggcgaugcggcggccccgcugaguccgc

SEQ ID NO: 388339 - RNA, 21 nt, Human
cggcggcgaugugcccgagcg

SEQ ID NO: 388340 - RNA, 20 nt, Human
cggcggcgcccagucccggc

SEQ ID NO: 388341 - RNA, 23 nt, Human
cggcggcgcccgcggcggugccc

SEQ ID NO: 388342 - RNA, 32 nt, Human
cggcggcgccucgggcgcgggugcaggcgcgc

SEQ ID NO: 388343 - RNA, 32 nt, Human
cggcggcgcgcuccagccgguguaggcgaggc

SEQ ID NO: 388344 - RNA, 24 nt, Human
cggcggcgcugaaggccgcggcgu

SEQ ID NO: 388345 - RNA, 20 nt, Human
cggcggcgcuggacccgacg

SEQ ID NO: 388346 - RNA, 32 nt, Human
cggcggcgcuggggccagaggggccggacggg

SEQ ID NO: 388347 - RNA, 32 nt, Human
cggcggcggagcgggcggcagagcagggcggc

SEQ ID NO: 388348 - RNA, 32 nt, Human
cggcggcggaggaggagaaaggaaagaggaag

SEQ ID NO: 388349 - RNA, 32 nt, Human
cggcggcggaggaggaggaggagcgggaggag

SEQ ID NO: 388350 - RNA, 32 nt, Human
cggcggcggcaacauggcagagaccgcggccg

SEQ ID NO: 388351 - RNA, 20 nt, Human
cggcggcggcaccccagcgu

SEQ ID NO: 388352 - RNA, 20 nt, Human
cggcggcggcaccccgggcg

SEQ ID NO: 388353 - RNA, 32 nt, Human
cggcggcggcagaggagugggagcagcggccc

SEQ ID NO: 388354 - RNA, 32 nt, Human
cggcggcggcagcagcggcagcagcgacuuca

SEQ ID NO: 388355 - RNA, 32 nt, Human
cggcggcggcagcgguuggagguuguaggacc

SEQ ID NO: 388356 - RNA, 19 nt, Human
cggcggcggccccucgggc

SEQ ID NO: 388357 - RNA, 21 nt, Human
cggcggcggcccgagcccagc

SEQ ID NO: 388358 - RNA, 21 nt, Human
cggcggcggcccgggcccagc

SEQ ID NO: 388359 - RNA, 18 nt, Human
cggcggcggcccgggcgg

SEQ ID NO: 388360 - RNA, 22 nt, Human
cggcggcggccgaggcccagcg

SEQ ID NO: 388361 - RNA, 21 nt, Human
cggcggcggccgaggcggcgu

SEQ ID NO: 388362 - RNA, 20 nt, Human
cggcggcggccgcggcccgg

SEQ ID NO: 388363 - RNA, 20 nt, Human
cggcggcggccggagccggc

SEQ ID NO: 388364 - RNA, 22 nt, Human
cggcggcggccgggacccagcg

SEQ ID NO: 388365 - RNA, 19 nt, Human
cggcggcggccgggccggg

SEQ ID NO: 388366 - RNA, 32 nt, Human
cggcggcggcgacagagcgagcgcggcgcggg

SEQ ID NO: 388367 - RNA, 21 nt, Human
cggcggcggcgaggcucggcg

SEQ ID NO: 388368 - RNA, 24 nt, Human
cggcggcggcgcggaccccgagcg

SEQ ID NO: 388369 - RNA, 19 nt, Human
cggcggcggcgcugcccgg

SEQ ID NO: 388370 - RNA, 22 nt, Human
cggcggcggcgcuuccccggcg

SEQ ID NO: 388371 - RNA, 32 nt, Human
cggcggcggcggagcgggcggcagagcagggc

SEQ ID NO: 388372 - RNA, 22 nt, Human
cggcggcggcggauuccccgcg

SEQ ID NO: 388373 - RNA, 20 nt, Human
cggcggcggcggcgcgcgga

SEQ ID NO: 388374 - RNA, 32 nt, Human
cggcggcggcggcggaggaggaggcgaccgag

SEQ ID NO: 388375 - RNA, 32 nt, Human
cggcggcggcggcggaggcggcggcggcggcg

SEQ ID NO: 388376 - RNA, 32 nt, Human
cggcggcggcggcggcggcaggagaauggcau

SEQ ID NO: 388377 - RNA, 32 nt, Human
cggcggcggcggcggcggcgggcagaucgcgg

SEQ ID NO: 388378 - RNA, 32 nt, Human
cggcggcggcggcgguuccagcaugaagagga

SEQ ID NO: 388379 - RNA, 19 nt, Human
cggcggcggcgggacccgg

SEQ ID NO: 388380 - RNA, 32 nt, Human
cggcggcggcgggcaguugcaguggugcagaa

SEQ ID NO: 388381 - RNA, 32 nt, Human
cggcggcggcugcugcagcugcaggaggagcc

SEQ ID NO: 388382 - RNA, 23 nt, Human
cggcggcgggacggccccgagcg

SEQ ID NO: 388383 - RNA, 32 nt, Human
cggcggcgggagagaggaggaggcggcggcgg

SEQ ID NO: 388384 - RNA, 22 nt, Human
cggcggcgggcagaucgcggcg

SEQ ID NO: 388385 - RNA, 23 nt, Human
cggcggcggggagggucgcggcg

SEQ ID NO: 388386 - RNA, 32 nt, Human
cggcggcggggcagaggcggcccaggggcggc

SEQ ID NO: 388387 - RNA, 32 nt, Human
cggcggcgggggaggcagaggcggaggcggag

SEQ ID NO: 388388 - RNA, 21 nt, Human
cggcggcgggugccccgcgcg

SEQ ID NO: 388389 - RNA, 32 nt, Human
cggcggcggguggaucaccugagaucaggagu

SEQ ID NO: 388390 - RNA, 19 nt, Human
cggcggcgguggcgggggg

SEQ ID NO: 388391 - RNA, 32 nt, Human
cggcggcguccugguagcggccuccugggugc

SEQ ID NO: 388392 - RNA, 25 nt, Human
cggcggcgucggcgcgguccuagcg

SEQ ID NO: 388393 - RNA, 22 nt, Human
cggcggcgucuagcggccccgg

SEQ ID NO: 388394 - RNA, 21 nt, Human
cggcggcguggaauccggcgu

SEQ ID NO: 388395 - RNA, 21 nt, Human
cggcggcucacgccuguaauc

SEQ ID NO: 388396 - RNA, 24 nt, Human
cggcggcucacgccuguaauccca

SEQ ID NO: 388397 - RNA, 32 nt, Human
cggcggcucacggagcuccugggggcgcagga

SEQ ID NO: 388398 - RNA, 24 nt, Human
cggcggcucacuccuguaauccca

SEQ ID NO: 388399 - RNA, 32 nt, Human
cggcggcucaggggaaacgaggcugcaguggu

SEQ ID NO: 388400 - RNA, 24 nt, Human
cggcggcucaugccuguaauccca

SEQ ID NO: 388401 - RNA, 32 nt, Human
cggcggcucuggacugcagccucccaaggcuc

SEQ ID NO: 388402 - RNA, 32 nt, Human
cggcggcugccugggcuuuaauggcugcuccg

SEQ ID NO: 388403 - RNA, 32 nt, Human
cggcggcugccugguccucagcagugcagccc

SEQ ID NO: 388404 - RNA, 32 nt, Human
cggcggcugcugugcugggugcagugaggaag

SEQ ID NO: 388405 - RNA, 18 nt, Human
cggcgggaccgcgaggag

SEQ ID NO: 388406 - RNA, 32 nt, Human
cggcgggaccugcugggaggaauggcgccgcc

SEQ ID NO: 388407 - RNA, 32 nt, Human
cggcgggacugucaauggaggcagggguucca

SEQ ID NO: 388408 - RNA, 32 nt, Human
cggcgggaggggcggcggcgccccgcgcacau

SEQ ID NO: 388409 - RNA, 32 nt, Human
cggcgggaggggcgggugggaggccgcggcca

SEQ ID NO: 388410 - RNA, 32 nt, Human
cggcgggaggugggggaacaaggggucuuccg

SEQ ID NO: 388411 - RNA, 32 nt, Human
cggcgggcagcggcccaggaggcgcguggcgg

SEQ ID NO: 388412 - RNA, 32 nt, Human
cggcgggcaggcggcgggcgcggcgggcgagg

SEQ ID NO: 388413 - RNA, 32 nt, Human
cggcgggcgcgagcacgaccccacucuccugc

SEQ ID NO: 388414 - RNA, 32 nt, Human
cggcgggcggaggcggcgggagcgguggugcc

SEQ ID NO: 388415 - RNA, 32 nt, Human
cggcgggcgggugggaggugggaguggcugca

SEQ ID NO: 388416 - RNA, 24 nt, Human
cggcgggcuaagcccagggccggg

SEQ ID NO: 388417 - RNA, 32 nt, Human
cggcgggcugcucacccagccugugggaagag

SEQ ID NO: 388418 - RNA, 32 nt, Human
cggcggggagagccacagaggagcaggagggg

SEQ ID NO: 388419 - RNA, 32 nt, Human
cggcggggaggaggagaaggaggaggguggcg

SEQ ID NO: 388420 - RNA, 32 nt, Human
cggcggggaggcagcaggcgcgggagcgggcg

SEQ ID NO: 388421 - RNA, 32 nt, Human
cggcggggaggcagggaugucgagggccccuc

SEQ ID NO: 388422 - RNA, 32 nt, Human
cggcggggccagcccagcccacagcagucuca

SEQ ID NO: 388423 - RNA, 32 nt, Human
cggcggggcucgcgcaaccucccucgccuccc

SEQ ID NO: 388424 - RNA, 32 nt, Human
cggcgggggagguggaggugcgaguauaaaug

SEQ ID NO: 388425 - RNA, 32 nt, Human
cggcgggggcagcagcagcugaggcagcagcu

SEQ ID NO: 388426 - RNA, 32 nt, Human
cggcgggggcagcggcaaccccggcgccgcgg

SEQ ID NO: 388427 - RNA, 32 nt, Human
cggcgggggccccagcccagcuugcaggccac

SEQ ID NO: 388428 - RNA, 32 nt, Human
cggcgggggcgggccagcuggacgggcugccg

SEQ ID NO: 388429 - RNA, 32 nt, Human
cggcgggggcgggcccgugccugcugugcccc

SEQ ID NO: 388430 - RNA, 32 nt, Human
cggcgggucggggccggccucugccuugccgc

SEQ ID NO: 388431 - RNA, 32 nt, Human
cggcgggucggggcugaagauguggcagcgcc

SEQ ID NO: 388432 - RNA, 32 nt, Human
cggcgggugccuguaaccccagcuacuuggga

SEQ ID NO: 388433 - RNA, 32 nt, Human
cggcggguggguggaggaugcggugcgcggga

SEQ ID NO: 388434 - RNA, 32 nt, Human
cggcgguccgcggcggagguucaugugggggu

SEQ ID NO: 388435 - RNA, 32 nt, Human
cggcggucguguagcugagcaggccuggggcu

SEQ ID NO: 388436 - RNA, 32 nt, Human
cggcgguggagccgagcggggagccaggaaag

SEQ ID NO: 388437 - RNA, 32 nt, Human
cggcgguggaggaggaggcagagaggagugga

SEQ ID NO: 388438 - RNA, 32 nt, Human
cggcgguggugaggaagauacuuugguuagug

SEQ ID NO: 388439 - RNA, 32 nt, Human
cggcgguuagggcuguguagggcgaggccucc

SEQ ID NO: 388440 - RNA, 17 nt, Human
cggcgguugcuugcuca

SEQ ID NO: 388441 - RNA, 32 nt, Human
cggcguagccgcugccccaacuccugccccau

SEQ ID NO: 388442 - RNA, 32 nt, Human
cggcgucacugcacccuccgccaggcuccgcg

SEQ ID NO: 388443 - RNA, 32 nt, Human
cggcgucagacuuuucuuugcgauguccucgg

SEQ ID NO: 388444 - RNA, 32 nt, Human
cggcgucagagggagggcgggcgccgcguugg

SEQ ID NO: 388445 - RNA, 32 nt, Human
cggcguccacaccuaagaacagcagcuccacc

SEQ ID NO: 388446 - RNA, 32 nt, Human
cggcguccccgcccucuccccgccucggccag

SEQ ID NO: 388447 - RNA, 32 nt, Human
cggcguccgcucggcccugcuuuuugcgaccu

SEQ ID NO: 388448 - RNA, 32 nt, Human
cggcguccuccacauaggcaguggcugugguu

SEQ ID NO: 388449 - RNA, 32 nt, Human
cggcguccugaacccaaaggcucuuuucagag

SEQ ID NO: 388450 - RNA, 32 nt, Human
cggcguccugguagcggccuccugggugcuca

SEQ ID NO: 388451 - RNA, 32 nt, Human
cggcgucgagacuggaggcugagugcuaaacu

SEQ ID NO: 388452 - RNA, 32 nt, Human
cggcgucugcagcucgcuucaagauggccgcu

SEQ ID NO: 388453 - RNA, 32 nt, Human
cggcgucuggaacucuauuuuaagaaccucuc

SEQ ID NO: 388454 - RNA, 32 nt, Human
cggcgucugggcaucucggccucggcagaaag

SEQ ID NO: 388455 - RNA, 32 nt, Human
cggcgugaggccugggcugguuggagaagguc

SEQ ID NO: 388456 - RNA, 32 nt, Human
cggcgugcccugcuugucacaggcugaaaaac

SEQ ID NO: 388457 - RNA, 32 nt, Human
cggcguggagaugaacgcgccgcuggacggcc

SEQ ID NO: 388458 - RNA, 19 nt, Human
cggcguggccgugcgcgcg

SEQ ID NO: 388459 - RNA, 32 nt, Human
cggcgugggaagagaauggcuucugcaaggaa

SEQ ID NO: 388460 - RNA, 32 nt, Human
cggcgugggaggcugggccgcagugagugggg

SEQ ID NO: 388461 - RNA, 22 nt, Human
cggcguguucauccccacaccg

SEQ ID NO: 388462 - RNA, 32 nt, Human
cggcguugaaggaggcacgugggggaggcggg

SEQ ID NO: 388463 - RNA, 32 nt, Human
cggcguuugcccagccucaaccccugggaugc

SEQ ID NO: 388464 - RNA, 32 nt, Human
cggcuaaacuauucagaguuaacacuccagaa

SEQ ID NO: 388465 - RNA, 32 nt, Human
cggcuaaagagacugaugcaucaacaccaggc

SEQ ID NO: 388466 - RNA, 32 nt, Human
cggcuaacacggugaaaccccgucucuacuaa

SEQ ID NO: 388467 - RNA, 20 nt, Human
cggcuaagaccugccaggga

SEQ ID NO: 388468 - RNA, 32 nt, Human
cggcuaagcucuggcaucaucaucccagaaca

SEQ ID NO: 388469 - RNA, 32 nt, Human
cggcuaaggcagaauuaggauuugaacccaga

SEQ ID NO: 388470 - RNA, 32 nt, Human
cggcuaaguucaaggaggaucgcuugagcagg

SEQ ID NO: 388471 - RNA, 32 nt, Human
cggcuacauccagccaaugccaagacagugga

SEQ ID NO: 388472 - RNA, 32 nt, Human
cggcuacccaggcaggaacgucagggaggcuu

SEQ ID NO: 388473 - RNA, 32 nt, Human
cggcuacuggggccgccuccuccaggcggggc

SEQ ID NO: 388474 - RNA, 32 nt, Human
cggcuacuuccuggagcuucugccgccuccug

SEQ ID NO: 388475 - RNA, 32 nt, Human
cggcuacuugggaggcugaggugggagggauu

SEQ ID NO: 388476 - RNA, 32 nt, Human
cggcuagugucgaucuccugaccucaugaucu

SEQ ID NO: 388477 - RNA, 25 nt, Human
cggcucaaaugauccucccaccuca

SEQ ID NO: 388478 - RNA, 32 nt, Human
cggcucaacgcaaccuccgccucccagguuca

SEQ ID NO: 388479 - RNA, 32 nt, Human
cggcucaagccuguaaucccagcacuuugggu

SEQ ID NO: 388480 - RNA, 32 nt, Human
cggcucaaugaacccaucagcagccagguucu

SEQ ID NO: 388481 - RNA, 20 nt, Human
cggcucaauugaucuuccca

SEQ ID NO: 388482 - RNA, 21 nt, Human
cggcucacaccuguaauccca

SEQ ID NO: 388483 - RNA, 32 nt, Human
cggcucacaccuguaaucccagcacuuuggga

SEQ ID NO: 388484 - RNA, 32 nt, Human
cggcucacagcaaccucucugccuccagaaau

SEQ ID NO: 388485 - RNA, 32 nt, Human
cggcucacagcaaccucugccucccggauuua

SEQ ID NO: 388486 - RNA, 32 nt, Human
cggcucaccacaaccuccaccucccagguuca

SEQ ID NO: 388487 - RNA, 32 nt, Human
cggcucaccacaaccuccgccuccuggguuca

SEQ ID NO: 388488 - RNA, 32 nt, Human
cggcucaccacaaccuccuccucuuggguuca

SEQ ID NO: 388489 - RNA, 32 nt, Human
cggcucaccccaaccuccgccuccuggguuca

SEQ ID NO: 388490 - RNA, 32 nt, Human
cggcucacccugagagcagaggccgugcaggg

SEQ ID NO: 388491 - RNA, 32 nt, Human
cggcucaccgcaaaguccgccucccaggcgau

SEQ ID NO: 388492 - RNA, 32 nt, Human
cggcucaccgcaaccuccaccuuccugguuca

SEQ ID NO: 388493 - RNA, 32 nt, Human
cggcucaccgcaaccuccgcccccuggguuca

SEQ ID NO: 388494 - RNA, 32 nt, Human
cggcucaccgcaaccuccgccucccagguuca

SEQ ID NO: 388495 - RNA, 32 nt, Human
cggcucaccgcaaccuccgccucccggauuca

SEQ ID NO: 388496 - RNA, 32 nt, Human
cggcucaccgcaaccuccgccucccggguuca

SEQ ID NO: 388497 - RNA, 32 nt, Human
cggcucaccgcaaccuccgccuccuggguuca

SEQ ID NO: 388498 - RNA, 32 nt, Human
cggcucaccgcaaccuccucuucuggguuaaa

SEQ ID NO: 388499 - RNA, 32 nt, Human
cggcucaccgcaaccucugccucccaggugca

SEQ ID NO: 388500 - RNA, 32 nt, Human
cggcucaccgcaaccucugccucccggguuca

SEQ ID NO: 388501 - RNA, 32 nt, Human
cggcucaccgcaaccucugccuccuggguuca

SEQ ID NO: 388502 - RNA, 32 nt, Human
cggcucaccgcaaccucugcuuccuggcuuaa

SEQ ID NO: 388503 - RNA, 32 nt, Human
cggcucacgcauguaaucccagcacuuuggga

SEQ ID NO: 388504 - RNA, 32 nt, Human
cggcucacgccuguaacuccagcacuuuggga

SEQ ID NO: 388505 - RNA, 21 nt, Human
cggcucacgccuguaauccca

SEQ ID NO: 388506 - RNA, 32 nt, Human
cggcucacgccuguaaucccagaacuuuggga

SEQ ID NO: 388507 - RNA, 32 nt, Human
cggcucacgccuguaaucccagcacuuucgga

SEQ ID NO: 388508 - RNA, 32 nt, Human
cggcucacgccuguaaucccagcacuuuggga

SEQ ID NO: 388509 - RNA, 32 nt, Human
cggcucacgccuguaucccagcacuuuggaag

SEQ ID NO: 388510 - RNA, 32 nt, Human
cggcucacggcaaccuccaccucccggguuca

SEQ ID NO: 388511 - RNA, 32 nt, Human
cggcucacgguaaccucugccucccagguuca

SEQ ID NO: 388512 - RNA, 32 nt, Human
cggcucacgucuguaaucccagcacuuuggga

SEQ ID NO: 388513 - RNA, 32 nt, Human
cggcucacuacaaccaccaccuccugggucca

SEQ ID NO: 388514 - RNA, 32 nt, Human
cggcucacuacaaccuccaccuccuggguucc

SEQ ID NO: 388515 - RNA, 32 nt, Human
cggcucacuacaaccuccgccucccagguuca

SEQ ID NO: 388516 - RNA, 32 nt, Human
cggcucacuacaaccucugccucccagguuca

SEQ ID NO: 388517 - RNA, 32 nt, Human
cggcucacuacaagcucugccucccggguuca

SEQ ID NO: 388518 - RNA, 32 nt, Human
cggcucacuauaaccuccaccucccagguuca

SEQ ID NO: 388519 - RNA, 32 nt, Human
cggcucacuccaaccuccaccuacuagguuca

SEQ ID NO: 388520 - RNA, 32 nt, Human
cggcucacuccaaucuccaccucccggauuca

SEQ ID NO: 388521 - RNA, 32 nt, Human
cggcucacuccaccuccaccucccagguucaa

SEQ ID NO: 388522 - RNA, 32 nt, Human
cggcucacuccuguaaucccagcacuuuggga

SEQ ID NO: 388523 - RNA, 32 nt, Human
cggcucacugaaaccucugccucccggguuca

SEQ ID NO: 388524 - RNA, 32 nt, Human
cggcucacugaaaccucugccuuccagguuca

SEQ ID NO: 388525 - RNA, 32 nt, Human
cggcucacugaaaccugugccuccccgguucg

SEQ ID NO: 388526 - RNA, 32 nt, Human
cggcucacugaaacuucugccucccggguaca

SEQ ID NO: 388527 - RNA, 32 nt, Human
cggcucacugaaccuccgccucccagguucaa

SEQ ID NO: 388528 - RNA, 32 nt, Human
cggcucacugaaccuccgccucucagguucaa

SEQ ID NO: 388529 - RNA, 32 nt, Human
cggcucacugcaaaccgccucccggguucacg

SEQ ID NO: 388530 - RNA, 32 nt, Human
cggcucacugcaaacuccgccucccagguuca

SEQ ID NO: 388531 - RNA, 32 nt, Human
cggcucacugcaaacuccgccucccggguuca

SEQ ID NO: 388532 - RNA, 32 nt, Human
cggcucacugcaaacuccgccuuccagguuca

SEQ ID NO: 388533 - RNA, 32 nt, Human
cggcucacugcaaacucugccucccagguuca

SEQ ID NO: 388534 - RNA, 32 nt, Human
cggcucacugcaaacucugccucccggguuca

SEQ ID NO: 388535 - RNA, 32 nt, Human
cggcucacugcaaacucugccuccuggauuca

SEQ ID NO: 388536 - RNA, 32 nt, Human
cggcucacugcaaaucuccgccucccagguuc

SEQ ID NO: 388537 - RNA, 32 nt, Human
cggcucacugcaacauccaccuccuggguuca

SEQ ID NO: 388538 - RNA, 32 nt, Human
cggcucacugcaacauccagcuccuggguuuc

SEQ ID NO: 388539 - RNA, 32 nt, Human
cggcucacugcaaccaccaucucccaggagag

SEQ ID NO: 388540 - RNA, 32 nt, Human
cggcucacugcaaccacugccucccagguuca

SEQ ID NO: 388541 - RNA, 32 nt, Human
cggcucacugcaacccccacaucccggguuca

SEQ ID NO: 388542 - RNA, 32 nt, Human
cggcucacugcaacccccaucucccagguuca

SEQ ID NO: 388543 - RNA, 32 nt, Human
cggcucacugcaacccccgucucccggguuca

SEQ ID NO: 388544 - RNA, 32 nt, Human
cggcucacugcaaccucaccucccggguucaa

SEQ ID NO: 388545 - RNA, 18 nt, Human
cggcucacugcaaccucc

SEQ ID NO: 388546 - RNA, 32 nt, Human
cggcucacugcaaccuccaacucccagguuca

SEQ ID NO: 388547 - RNA, 32 nt, Human
cggcucacugcaaccuccaacucccugguuua

SEQ ID NO: 388548 - RNA, 32 nt, Human
cggcucacugcaaccuccacccccggggauca

SEQ ID NO: 388549 - RNA, 22 nt, Human
cggcucacugcaaccuccaccu

SEQ ID NO: 388550 - RNA, 32 nt, Human
cggcucacugcaaccuccaccucacagguuca

SEQ ID NO: 388551 - RNA, 32 nt, Human
cggcucacugcaaccuccaccucccagaagga

SEQ ID NO: 388552 - RNA, 32 nt, Human
cggcucacugcaaccuccaccucccagauuca

SEQ ID NO: 388553 - RNA, 32 nt, Human
cggcucacugcaaccuccaccucccaggucag

SEQ ID NO: 388554 - RNA, 32 nt, Human
cggcucacugcaaccuccaccucccagguuca

SEQ ID NO: 388555 - RNA, 32 nt, Human
cggcucacugcaaccuccaccuccccaguuca

SEQ ID NO: 388556 - RNA, 32 nt, Human
cggcucacugcaaccuccaccuccccggguuc

SEQ ID NO: 388557 - RNA, 32 nt, Human
cggcucacugcaaccuccaccucccgaguuca

SEQ ID NO: 388558 - RNA, 32 nt, Human
cggcucacugcaaccuccaccucccggauuca

SEQ ID NO: 388559 - RNA, 32 nt, Human
cggcucacugcaaccuccaccucccgggcuca

SEQ ID NO: 388560 - RNA, 32 nt, Human
cggcucacugcaaccuccaccucccggguuca

SEQ ID NO: 388561 - RNA, 32 nt, Human
cggcucacugcaaccuccaccucccggguucc

SEQ ID NO: 388562 - RNA, 32 nt, Human
cggcucacugcaaccuccaccuccuagguuca

SEQ ID NO: 388563 - RNA, 32 nt, Human
cggcucacugcaaccuccaccuccugaguuca

SEQ ID NO: 388564 - RNA, 32 nt, Human
cggcucacugcaaccuccaccuccuggauuca

SEQ ID NO: 388565 - RNA, 32 nt, Human
cggcucacugcaaccuccaccuccuggcuuca

SEQ ID NO: 388566 - RNA, 32 nt, Human
cggcucacugcaaccuccaccuccugggcuca

SEQ ID NO: 388567 - RNA, 32 nt, Human
cggcucacugcaaccuccaccuccuggguuca

SEQ ID NO: 388568 - RNA, 32 nt, Human
cggcucacugcaaccuccaccuccuggguuua

SEQ ID NO: 388569 - RNA, 32 nt, Human
cggcucacugcaaccuccaccuccugguucaa

SEQ ID NO: 388570 - RNA, 32 nt, Human
cggcucacugcaaccuccaccucucggcuuca

SEQ ID NO: 388571 - RNA, 32 nt, Human
cggcucacugcaaccuccaccuucaggguguc

SEQ ID NO: 388572 - RNA, 32 nt, Human
cggcucacugcaaccuccacuucuuggguuca

SEQ ID NO: 388573 - RNA, 32 nt, Human
cggcucacugcaaccuccagcucccagguuga

SEQ ID NO: 388574 - RNA, 32 nt, Human
cggcucacugcaaccuccgacuccuggguuca

SEQ ID NO: 388575 - RNA, 32 nt, Human
cggcucacugcaaccuccgcaucccggguuca

SEQ ID NO: 388576 - RNA, 32 nt, Human
cggcucacugcaaccuccgcccccuggguuua

SEQ ID NO: 388577 - RNA, 32 nt, Human
cggcucacugcaaccuccgccuaccggguuca

SEQ ID NO: 388578 - RNA, 32 nt, Human
cggcucacugcaaccuccgccucccaaguuca

SEQ ID NO: 388579 - RNA, 32 nt, Human
cggcucacugcaaccuccgccucccagguuca

SEQ ID NO: 388580 - RNA, 32 nt, Human
cggcucacugcaaccuccgccucccagguuga

SEQ ID NO: 388581 - RNA, 32 nt, Human
cggcucacugcaaccuccgccucccagguuua

SEQ ID NO: 388582 - RNA, 32 nt, Human
cggcucacugcaaccuccgccucccaguuuca

SEQ ID NO: 388583 - RNA, 32 nt, Human
cggcucacugcaaccuccgccucccggcuuca

SEQ ID NO: 388584 - RNA, 32 nt, Human
cggcucacugcaaccuccgccucccgggcuga

SEQ ID NO: 388585 - RNA, 32 nt, Human
cggcucacugcaaccuccgccucccggguuaa

SEQ ID NO: 388586 - RNA, 32 nt, Human
cggcucacugcaaccuccgccucccggguuca

SEQ ID NO: 388587 - RNA, 32 nt, Human
cggcucacugcaaccuccgccucccggguucg

SEQ ID NO: 388588 - RNA, 32 nt, Human
cggcucacugcaaccuccgccucccgguucaa

SEQ ID NO: 388589 - RNA, 32 nt, Human
cggcucacugcaaccuccgccucccugguuca

SEQ ID NO: 388590 - RNA, 32 nt, Human
cggcucacugcaaccuccgccuccugaguuca

SEQ ID NO: 388591 - RNA, 32 nt, Human
cggcucacugcaaccuccgccuccugggcuca

SEQ ID NO: 388592 - RNA, 32 nt, Human
cggcucacugcaaccuccgccuccuggguuca

SEQ ID NO: 388593 - RNA, 32 nt, Human
cggcucacugcaaccuccgccuccuugguucc

SEQ ID NO: 388594 - RNA, 32 nt, Human
cggcucacugcaaccuccgccuuccugaguuc

SEQ ID NO: 388595 - RNA, 32 nt, Human
cggcucacugcaaccuccgccuugcugguuga

SEQ ID NO: 388596 - RNA, 32 nt, Human
cggcucacugcaaccuccgccuuuccaccuuc

SEQ ID NO: 388597 - RNA, 32 nt, Human
cggcucacugcaaccuccgcucccuggguuca

SEQ ID NO: 388598 - RNA, 32 nt, Human
cggcucacugcaaccuccgucucccagguuca

SEQ ID NO: 388599 - RNA, 32 nt, Human
cggcucacugcaaccuccuccucccagaggua

SEQ ID NO: 388600 - RNA, 32 nt, Human
cggcucacugcaaccuccuccucccggguuca

SEQ ID NO: 388601 - RNA, 32 nt, Human
cggcucacugcaaccucgccucccugguucaa

SEQ ID NO: 388602 - RNA, 32 nt, Human
cggcucacugcaaccucuaccucccagguuca

SEQ ID NO: 388603 - RNA, 32 nt, Human
cggcucacugcaaccucuaccuccuggauuca

SEQ ID NO: 388604 - RNA, 32 nt, Human
cggcucacugcaaccucuaccuccuggguuca

SEQ ID NO: 388605 - RNA, 32 nt, Human
cggcucacugcaaccucugccacacggguuca

SEQ ID NO: 388606 - RNA, 32 nt, Human
cggcucacugcaaccucugccaucaggauuaa

SEQ ID NO: 388607 - RNA, 32 nt, Human
cggcucacugcaaccucugccucacggguuca

SEQ ID NO: 388608 - RNA, 32 nt, Human
cggcucacugcaaccucugccucccaaguuca

SEQ ID NO: 388609 - RNA, 32 nt, Human
cggcucacugcaaccucugccucccagguuca

SEQ ID NO: 388610 - RNA, 32 nt, Human
cggcucacugcaaccucugccucccagguucc

SEQ ID NO: 388611 - RNA, 32 nt, Human
cggcucacugcaaccucugccucccgaguuca

SEQ ID NO: 388612 - RNA, 32 nt, Human
cggcucacugcaaccucugccucccgcauuca

SEQ ID NO: 388613 - RNA, 32 nt, Human
cggcucacugcaaccucugccucccggauuca

SEQ ID NO: 388614 - RNA, 32 nt, Human
cggcucacugcaaccucugccucccggguuca

SEQ ID NO: 388615 - RNA, 32 nt, Human
cggcucacugcaaccucugccucccggguucg

SEQ ID NO: 388616 - RNA, 32 nt, Human
cggcucacugcaaccucugccucccguguuca

SEQ ID NO: 388617 - RNA, 32 nt, Human
cggcucacugcaaccucugccuccuagguuga

SEQ ID NO: 388618 - RNA, 32 nt, Human
cggcucacugcaaccucugccuccugagcuca

SEQ ID NO: 388619 - RNA, 32 nt, Human
cggcucacugcaaccucugccuccugaguuca

SEQ ID NO: 388620 - RNA, 32 nt, Human
cggcucacugcaaccucugccuccuggauuca

SEQ ID NO: 388621 - RNA, 32 nt, Human
cggcucacugcaaccucugccuccugggcuca

SEQ ID NO: 388622 - RNA, 32 nt, Human
cggcucacugcaaccucugccuccugggguuc

SEQ ID NO: 388623 - RNA, 32 nt, Human
cggcucacugcaaccucugccuccugggugca

SEQ ID NO: 388624 - RNA, 32 nt, Human
cggcucacugcaaccucugccuccuggguuca

SEQ ID NO: 388625 - RNA, 32 nt, Human
cggcucacugcaaccucugccuccuggguuua

SEQ ID NO: 388626 - RNA, 32 nt, Human
cggcucacugcaaccucugccucuuggguuca

SEQ ID NO: 388627 - RNA, 32 nt, Human
cggcucacugcaaccucugcuucccggguuca

SEQ ID NO: 388628 - RNA, 32 nt, Human
cggcucacugcaaccucugucuccugaguuca

SEQ ID NO: 388629 - RNA, 32 nt, Human
cggcucacugcaaccucugucuccuggguuca

SEQ ID NO: 388630 - RNA, 32 nt, Human
cggcucacugcaaccucugucuccuggguuua

SEQ ID NO: 388631 - RNA, 32 nt, Human
cggcucacugcaaccucugucuucuggguuca

SEQ ID NO: 388632 - RNA, 32 nt, Human
cggcucacugcaaccucuugccucccagguuc

SEQ ID NO: 388633 - RNA, 32 nt, Human
cggcucacugcaaccuggaacuccugggcuca

SEQ ID NO: 388634 - RNA, 32 nt, Human
cggcucacugcaaccugucucucagguugaag

SEQ ID NO: 388635 - RNA, 32 nt, Human
cggcucacugcaaccuucgccucuggguucaa

SEQ ID NO: 388636 - RNA, 32 nt, Human
cggcucacugcaaccuuugccuccuagguuca

SEQ ID NO: 388637 - RNA, 32 nt, Human
cggcucacugcaacguccgccucccggguuga

SEQ ID NO: 388638 - RNA, 32 nt, Human
cggcucacugcaacguccgccuccuggguuca

SEQ ID NO: 388639 - RNA, 32 nt, Human
cggcucacugcaacuaccaccuccuggguuca

SEQ ID NO: 388640 - RNA, 32 nt, Human
cggcucacugcaacuccaccucccggguucac

SEQ ID NO: 388641 - RNA, 32 nt, Human
cggcucacugcaacucugccucccggguucaa

SEQ ID NO: 388642 - RNA, 32 nt, Human
cggcucacugcaacuuccaccucccggguuca

SEQ ID NO: 388643 - RNA, 32 nt, Human
cggcucacugcaacuuccgccucccgguuuca

SEQ ID NO: 388644 - RNA, 32 nt, Human
cggcucacugcaacuuccgccuccugggauca

SEQ ID NO: 388645 - RNA, 32 nt, Human
cggcucacugcaacuucuaccaccuagguuca

SEQ ID NO: 388646 - RNA, 32 nt, Human
cggcucacugcaacuucugccucccggguuca

SEQ ID NO: 388647 - RNA, 32 nt, Human
cggcucacugcaacuucugccuccuagguuca

SEQ ID NO: 388648 - RNA, 32 nt, Human
cggcucacugcaagauccgccucccggguuca

SEQ ID NO: 388649 - RNA, 32 nt, Human
cggcucacugcaagcccugccuccuggguuca

SEQ ID NO: 388650 - RNA, 32 nt, Human
cggcucacugcaagcucagccuccccgauuca

SEQ ID NO: 388651 - RNA, 32 nt, Human
cggcucacugcaagcuccaccucccagguuca

SEQ ID NO: 388652 - RNA, 32 nt, Human
cggcucacugcaagcuccaccucccggguuca

SEQ ID NO: 388653 - RNA, 32 nt, Human
cggcucacugcaagcuccaccuccuggguuca

SEQ ID NO: 388654 - RNA, 32 nt, Human
cggcucacugcaagcuccaucucccagguuca

SEQ ID NO: 388655 - RNA, 32 nt, Human
cggcucacugcaagcuccgccucccagauuca

SEQ ID NO: 388656 - RNA, 32 nt, Human
cggcucacugcaagcuccgccucccaggauca

SEQ ID NO: 388657 - RNA, 32 nt, Human
cggcucacugcaagcuccgccucccagguuca

SEQ ID NO: 388658 - RNA, 32 nt, Human
cggcucacugcaagcuccgccucccggauuca

SEQ ID NO: 388659 - RNA, 32 nt, Human
cggcucacugcaagcuccgccucccggguuca

SEQ ID NO: 388660 - RNA, 32 nt, Human
cggcucacugcaagcuccgccucccggguucu

SEQ ID NO: 388661 - RNA, 32 nt, Human
cggcucacugcaagcuccgccuccuggguuca

SEQ ID NO: 388662 - RNA, 32 nt, Human
cggcucacugcaagcuccgccuccuggguuga

SEQ ID NO: 388663 - RNA, 32 nt, Human
cggcucacugcaagcuccgccucucggguuca

SEQ ID NO: 388664 - RNA, 32 nt, Human
cggcucacugcaagcuccggcucccagguuca

SEQ ID NO: 388665 - RNA, 32 nt, Human
cggcucacugcaagcucggccuccuggguuca

SEQ ID NO: 388666 - RNA, 32 nt, Human
cggcucacugcaagcucugccucccagguuca

SEQ ID NO: 388667 - RNA, 32 nt, Human
cggcucacugcaagcucugccucccgggcuca

SEQ ID NO: 388668 - RNA, 32 nt, Human
cggcucacugcaagcucugccucccggguuca

SEQ ID NO: 388669 - RNA, 32 nt, Human
cggcucacugcaagcucugccucccggguucc

SEQ ID NO: 388670 - RNA, 32 nt, Human
cggcucacugcaagcucugccucccgguugcu

SEQ ID NO: 388671 - RNA, 32 nt, Human
cggcucacugcaagcucugccucccguguuca

SEQ ID NO: 388672 - RNA, 32 nt, Human
cggcucacugcaagcucugccuccuggguuca

SEQ ID NO: 388673 - RNA, 32 nt, Human
cggcucacugcaagcucugccucucggguuca

SEQ ID NO: 388674 - RNA, 32 nt, Human
cggcucacugcaagcucugcguccuggguuga

SEQ ID NO: 388675 - RNA, 32 nt, Human
cggcucacugcaagcucugcuucccagguuca

SEQ ID NO: 388676 - RNA, 32 nt, Human
cggcucacugcaagcuucgccucccggguuca

SEQ ID NO: 388677 - RNA, 32 nt, Human
cggcucacugcaaguuccgccucccggguuca

SEQ ID NO: 388678 - RNA, 32 nt, Human
cggcucacugcaaucuccgccucccagguuca

SEQ ID NO: 388679 - RNA, 32 nt, Human
cggcucacugcaaucucugccucccaagcaau

SEQ ID NO: 388680 - RNA, 32 nt, Human
cggcucacugcaaucucugccucccagguuca

SEQ ID NO: 388681 - RNA, 32 nt, Human
cggcucacugcaaucucugccucccggauuca

SEQ ID NO: 388682 - RNA, 32 nt, Human
cggcucacugcaaucucugccucccggguuca

SEQ ID NO: 388683 - RNA, 32 nt, Human
cggcucacugcaaucucugccuccuggguuca

SEQ ID NO: 388684 - RNA, 32 nt, Human
cggcucacugcaauuugcgucucccaaguuca

SEQ ID NO: 388685 - RNA, 32 nt, Human
cggcucacugcacccucugccucuuggguuca

SEQ ID NO: 388686 - RNA, 32 nt, Human
cggcucacugcaccuccgccucccagguucaa

SEQ ID NO: 388687 - RNA, 32 nt, Human
cggcucacugcaccucugccuccuggauucac

SEQ ID NO: 388688 - RNA, 32 nt, Human
cggcucacugcaccuucugccuaccgaguuca

SEQ ID NO: 388689 - RNA, 32 nt, Human
cggcucacugcagccccugccucccaggcuca

SEQ ID NO: 388690 - RNA, 32 nt, Human
cggcucacugcagccucaaccuccuggacuca

SEQ ID NO: 388691 - RNA, 32 nt, Human
cggcucacugcagccucaaccuccugggcuaa

SEQ ID NO: 388692 - RNA, 32 nt, Human
cggcucacugcagccucaaccuccugggcuca

SEQ ID NO: 388693 - RNA, 32 nt, Human
cggcucacugcagccuccgccucccagguuca

SEQ ID NO: 388694 - RNA, 32 nt, Human
cggcucacugcagccucugccucccggguuca

SEQ ID NO: 388695 - RNA, 32 nt, Human
cggcucacugcagccugcgccucccagcgucc

SEQ ID NO: 388696 - RNA, 32 nt, Human
cggcucacugcagccuuugccucccggguuca

SEQ ID NO: 388697 - RNA, 32 nt, Human
cggcucacugcagcuucaaacuccugggcuca

SEQ ID NO: 388698 - RNA, 32 nt, Human
cggcucacugcaggcucugccuccuggguuca

SEQ ID NO: 388699 - RNA, 32 nt, Human
cggcucacugcagucucugccucccagaugga

SEQ ID NO: 388700 - RNA, 32 nt, Human
cggcucacugcaguuuugaccucccaggcuca

SEQ ID NO: 388701 - RNA, 32 nt, Human
cggcucacugcauccucaaccuccuggguuca

SEQ ID NO: 388702 - RNA, 20 nt, Human
cggcucacugcauccuccac

SEQ ID NO: 388703 - RNA, 32 nt, Human
cggcucacugcauccuccaccuccuggguuca

SEQ ID NO: 388704 - RNA, 32 nt, Human
cggcucacugcauccucugccucccggguuca

SEQ ID NO: 388705 - RNA, 32 nt, Human
cggcucacugcauccucugccuccuggguuca

SEQ ID NO: 388706 - RNA, 32 nt, Human
cggcucacugccaccucugccucccagguuca

SEQ ID NO: 388707 - RNA, 32 nt, Human
cggcucacugccgccucaaccucuccuggguu

SEQ ID NO: 388708 - RNA, 32 nt, Human
cggcucacugcgaccucugccucccagguuca

SEQ ID NO: 388709 - RNA, 32 nt, Human
cggcucacugcgagcuccaccucucggguuca

SEQ ID NO: 388710 - RNA, 32 nt, Human
cggcucacugcgagcucugccuccuggguuca

SEQ ID NO: 388711 - RNA, 32 nt, Human
cggcucacuguaaccuccaccuccuggguuca

SEQ ID NO: 388712 - RNA, 32 nt, Human
cggcucacuguaaccucugccuccugccuccc

SEQ ID NO: 388713 - RNA, 32 nt, Human
cggcucacuguagccucaaccugccagguuga

SEQ ID NO: 388714 - RNA, 32 nt, Human
cggcucacuguagccuccaccucccccaauca

SEQ ID NO: 388715 - RNA, 32 nt, Human
cggcucacuguagucucaaccuccugggcuca

SEQ ID NO: 388716 - RNA, 32 nt, Human
cggcucacuguagucucgaccucccaggcuca

SEQ ID NO: 388717 - RNA, 32 nt, Human
cggcucacugugaccucugccuccuggguuua

SEQ ID NO: 388718 - RNA, 32 nt, Human
cggcucagacauggcagagaucagcagagaau

SEQ ID NO: 388719 - RNA, 32 nt, Human
cggcucagaggcagcugcuccaugcagaacug

SEQ ID NO: 388720 - RNA, 32 nt, Human
cggcucagcagccuccaacuucucccgaaucc

SEQ ID NO: 388721 - RNA, 32 nt, Human
cggcucagccaaggacaaaggggccucgcaga

SEQ ID NO: 388722 - RNA, 21 nt, Human
cggcucagcccacagcacugu

SEQ ID NO: 388723 - RNA, 21 nt, Human
cggcucagccuccaagcccaa

SEQ ID NO: 388724 - RNA, 32 nt, Human
cggcucagcugaggcugucacaggaggagcug

SEQ ID NO: 388725 - RNA, 32 nt, Human
cggcucaggcccugcuugccccuucugccauc

SEQ ID NO: 388726 - RNA, 32 nt, Human
cggcucaggcucugcugguggaaagcgauuca

SEQ ID NO: 388727 - RNA, 32 nt, Human
cggcucagggcaucccucccauuccggcccuc

SEQ ID NO: 388728 - RNA, 32 nt, Human
cggcucaguaccgcuccagcagccugggcccc

SEQ ID NO: 388729 - RNA, 27 nt, Human
cggcucagugacagcaagagcaggaag

SEQ ID NO: 388730 - RNA, 32 nt, Human
cggcucagugcaaccucugccucccagguuga

SEQ ID NO: 388731 - RNA, 32 nt, Human
cggcucagugcaaccuugaccuccugggcuca

SEQ ID NO: 388732 - RNA, 32 nt, Human
cggcucaugccuguaaccucagcacuuuggga

SEQ ID NO: 388733 - RNA, 32 nt, Human
cggcucaugccuguaagcccaacacuuuggga

SEQ ID NO: 388734 - RNA, 32 nt, Human
cggcucaugccuguaaucccagcacuuuggca

SEQ ID NO: 388735 - RNA, 32 nt, Human
cggcucaugccuguaaucccagcacuuuggga

SEQ ID NO: 388736 - RNA, 32 nt, Human
cggcucaugccuguaaucccaggacuuuggua

SEQ ID NO: 388737 - RNA, 32 nt, Human
cggcucauggguugccauagagucuaggaaca

SEQ ID NO: 388738 - RNA, 32 nt, Human
cggcucauuacaaccuccaccucccggguuca

SEQ ID NO: 388739 - RNA, 32 nt, Human
cggcucauugcaaccuccaccuuccagauucu

SEQ ID NO: 388740 - RNA, 32 nt, Human
cggcucauugcaaccuccgccucccggguuca

SEQ ID NO: 388741 - RNA, 32 nt, Human
cggcucauugcaaccuccgccuccuggguuca

SEQ ID NO: 388742 - RNA, 32 nt, Human
cggcucauugcaaccuccgccuuccggguuca

SEQ ID NO: 388743 - RNA, 32 nt, Human
cggcucauugcaaccucugcuuccugggcuca

SEQ ID NO: 388744 - RNA, 32 nt, Human
cggcucauugcaagcuccgccucccagguuca

SEQ ID NO: 388745 - RNA, 32 nt, Human
cggcucauugcagccucgaccucccaggugau

SEQ ID NO: 388746 - RNA, 20 nt, Human
cggcuccacagcagguggug

SEQ ID NO: 388747 - RNA, 32 nt, Human
cggcuccaccaccauuucccucccgggccggg

SEQ ID NO: 388748 - RNA, 32 nt, Human
cggcuccacuacagacccagccccagguucaa

SEQ ID NO: 388749 - RNA, 32 nt, Human
cggcuccagcaacucuccucuggcgugacagc

SEQ ID NO: 388750 - RNA, 32 nt, Human
cggcuccaggagcuggaccccagugaccgugu

SEQ ID NO: 388751 - RNA, 32 nt, Human
cggcuccaggaggucacacagcagguuucugc

SEQ ID NO: 388752 - RNA, 32 nt, Human
cggcuccagggacucuuggggcgcagugggga

SEQ ID NO: 388753 - RNA, 32 nt, Human
cggcuccaggugggaggaaggcgggcgaagga

SEQ ID NO: 388754 - RNA, 32 nt, Human
cggcuccagucuccuaugugggggcuggggag

SEQ ID NO: 388755 - RNA, 32 nt, Human
cggcucccaacacccaugccaugggaccucag

SEQ ID NO: 388756 - RNA, 32 nt, Human
cggcucccacgcggggcugggccucggaguuu

SEQ ID NO: 388757 - RNA, 19 nt, Human
cggcucccaggcccugccc

SEQ ID NO: 388758 - RNA, 32 nt, Human
cggcucccccuuccuggucucccuucucccgc

SEQ ID NO: 388759 - RNA, 32 nt, Human
cggcuccccggccgccuccacccggggaacgc

SEQ ID NO: 388760 - RNA, 32 nt, Human
cggcucccugcaaccuccaccucccggguuca

SEQ ID NO: 388761 - RNA, 32 nt, Human
cggcucccugcaaccuccaccuccuggguuca

SEQ ID NO: 388762 - RNA, 32 nt, Human
cggcucccugcaaccuucgccucccggguuca

SEQ ID NO: 388763 - RNA, 32 nt, Human
cggcucccugcaaucuccaccucccagguuca

SEQ ID NO: 388764 - RNA, 23 nt, Human
cggcucccuuucagcagcugcgg

SEQ ID NO: 388765 - RNA, 29 nt, Human
cggcuccgcaaguggaacgagacaagcag

SEQ ID NO: 388766 - RNA, 32 nt, Human
cggcuccgcgcugcugugccugugaucccuac

SEQ ID NO: 388767 - RNA, 32 nt, Human
cggcuccgcuuccucaggcccugccggguccc

SEQ ID NO: 388768 - RNA, 20 nt, Human
cggcuccggcgcugcuccca

SEQ ID NO: 388769 - RNA, 22 nt, Human
cggcuccgggugacaccagccc

SEQ ID NO: 388770 - RNA, 22 nt, Human
cggcuccgugggaaccuccaac

SEQ ID NO: 388771 - RNA, 20 nt, Human
cggcuccuaagauccagccc

SEQ ID NO: 388772 - RNA, 32 nt, Human
cggcuccucaagguggugguugaggagacaga

SEQ ID NO: 388773 - RNA, 32 nt, Human
cggcuccucacuucccaguaggggcggccggg

SEQ ID NO: 388774 - RNA, 32 nt, Human
cggcuccucccuugcugaccugccccuugcuu

SEQ ID NO: 388775 - RNA, 32 nt, Human
cggcuccucccuugcugaccugcccguugcuu

SEQ ID NO: 388776 - RNA, 32 nt, Human
cggcuccucgccgcgucucugcccccacucca

SEQ ID NO: 388777 - RNA, 32 nt, Human
cggcuccucuccaggguaggccagcuugagga

SEQ ID NO: 388778 - RNA, 32 nt, Human
cggcuccucugccacccaccucccggggcugg

SEQ ID NO: 388779 - RNA, 32 nt, Human
cggcuccugaauugugcccacucccccaccuc

SEQ ID NO: 388780 - RNA, 32 nt, Human
cggcuccugcauucuggcaccacuugaacacg

SEQ ID NO: 388781 - RNA, 32 nt, Human
cggcuccugcugucuguccuuccccgucaugu

SEQ ID NO: 388782 - RNA, 32 nt, Human
cggcuccuggauccgcuccugccugcgcccgc

SEQ ID NO: 388783 - RNA, 32 nt, Human
cggcucgagagggaugucuggucagcccccag

SEQ ID NO: 388784 - RNA, 32 nt, Human
cggcucgaggacuccgcuuccuucccuccccu

SEQ ID NO: 388785 - RNA, 32 nt, Human
cggcucgcaggcacagauccuagaagucuguu

SEQ ID NO: 388786 - RNA, 32 nt, Human
cggcucgcuacaaccuccaccucccagcaacc

SEQ ID NO: 388787 - RNA, 32 nt, Human
cggcucgcugcaaacucugccucccagguuca

SEQ ID NO: 388788 - RNA, 32 nt, Human
cggcucgcugcaaccuccgccucccggguuca

SEQ ID NO: 388789 - RNA, 32 nt, Human
cggcucgcugcaaccuccuccuccuggguuca

SEQ ID NO: 388790 - RNA, 32 nt, Human
cggcucgcugcaaccucugacucccugguuca

SEQ ID NO: 388791 - RNA, 32 nt, Human
cggcucgcugcagccacugccuccuggguuca

SEQ ID NO: 388792 - RNA, 32 nt, Human
cggcucgcugcagccucugccuccuggguuca

SEQ ID NO: 388793 - RNA, 32 nt, Human
cggcucgcugcccgccuuccucaagcucugga

SEQ ID NO: 388794 - RNA, 32 nt, Human
cggcucgcugguaccggcagugccauggcggc

SEQ ID NO: 388795 - RNA, 32 nt, Human
cggcucgcuucagaugcucugaugcagagggc

SEQ ID NO: 388796 - RNA, 32 nt, Human
cggcucggcucugcgcugcuccggacggcugu

SEQ ID NO: 388797 - RNA, 32 nt, Human
cggcucuacugaaaaugcaaaaauuagccagg

SEQ ID NO: 388798 - RNA, 32 nt, Human
cggcucuaugcaaccuccaccuccuggguuca

SEQ ID NO: 388799 - RNA, 32 nt, Human
cggcucucaccucuccccugugcacccgcauc

SEQ ID NO: 388800 - RNA, 32 nt, Human
cggcucucaccuggcccugcuuccugcuugcc

SEQ ID NO: 388801 - RNA, 32 nt, Human
cggcucuccuggugggaagggauguugcucug

SEQ ID NO: 388802 - RNA, 32 nt, Human
cggcucucgccuguaaucccagcacuuuggga

SEQ ID NO: 388803 - RNA, 32 nt, Human
cggcucucuaggccguggagcuugccguccca

SEQ ID NO: 388804 - RNA, 32 nt, Human
cggcucucucugagacccaaggcugcaguccc

SEQ ID NO: 388805 - RNA, 32 nt, Human
cggcucucugacccucucugugcccucccccg

SEQ ID NO: 388806 - RNA, 19 nt, Human
cggcucucugauccagccc

SEQ ID NO: 388807 - RNA, 32 nt, Human
cggcucucugcaaccuccgccucccagguuca

SEQ ID NO: 388808 - RNA, 32 nt, Human
cggcucucugcaaccucugccucccggguuca

SEQ ID NO: 388809 - RNA, 32 nt, Human
cggcucucugcaaccucugucucccggguuca

SEQ ID NO: 388810 - RNA, 32 nt, Human
cggcucucugcaacuuccgccuccuggguuca

SEQ ID NO: 388811 - RNA, 32 nt, Human
cggcucucugcgcaggccgagugggcccagag

SEQ ID NO: 388812 - RNA, 31 nt, Human
cggcucugacacgucccuugcaaagucuccg

SEQ ID NO: 388813 - RNA, 32 nt, Human
cggcucugagccuggcccaucuuccuauuccc

SEQ ID NO: 388814 - RNA, 32 nt, Human
cggcucugagccuuauuucucuggaagcggcu

SEQ ID NO: 388815 - RNA, 32 nt, Human
cggcucugcaccaucccucacccagaccguag

SEQ ID NO: 388816 - RNA, 32 nt, Human
cggcucugcaccugucgccauccccggcuccc

SEQ ID NO: 388817 - RNA, 32 nt, Human
cggcucugcaggaagcugaagugagaggcccg

SEQ ID NO: 388818 - RNA, 32 nt, Human
cggcucugcgggcgccgccaggcccagaccaa

SEQ ID NO: 388819 - RNA, 32 nt, Human
cggcucuggggaauccuggugaauauagugcu

SEQ ID NO: 388820 - RNA, 32 nt, Human
cggcucugggggugggaaguggggcuaggucu

SEQ ID NO: 388821 - RNA, 32 nt, Human
cggcucuucacucccaacaauggcggcuccga

SEQ ID NO: 388822 - RNA, 32 nt, Human
cggcucuuccuguguggaggugaugguaccug

SEQ ID NO: 388823 - RNA, 32 nt, Human
cggcucuucucccggucccugaaacucggcug

SEQ ID NO: 388824 - RNA, 32 nt, Human
cggcucuucucgcuuccccggcggcggcaagg

SEQ ID NO: 388825 - RNA, 32 nt, Human
cggcucuugccuguaaucuuagcacuuuggga

SEQ ID NO: 388826 - RNA, 32 nt, Human
cggcucuuggagaaagcgugagcagggggcca

SEQ ID NO: 388827 - RNA, 32 nt, Human
cggcugaagaagaccuguuggacuggaucuuc

SEQ ID NO: 388828 - RNA, 18 nt, Human
cggcugaaggaccugcca

SEQ ID NO: 388829 - RNA, 19 nt, Human
cggcugaaggagcugucca

SEQ ID NO: 388830 - RNA, 32 nt, Human
cggcugaaggauuucuccccagcuggugcagu

SEQ ID NO: 388831 - RNA, 32 nt, Human
cggcugaccacaguggcuuggacugugagggu

SEQ ID NO: 388832 - RNA, 32 nt, Human
cggcugacugcaaacucugccucccagguuua

SEQ ID NO: 388833 - RNA, 32 nt, Human
cggcugacugcaaccacugccuccaggguuca

SEQ ID NO: 388834 - RNA, 32 nt, Human
cggcugacugcaaccuccaccucccgggugca

SEQ ID NO: 388835 - RNA, 32 nt, Human
cggcugacugcaaccuccaccuccuggguuca

SEQ ID NO: 388836 - RNA, 32 nt, Human
cggcugacugccuggagcugguguuuuuccug

SEQ ID NO: 388837 - RNA, 32 nt, Human
cggcugagaaggagguucuuccgcgagagaag

SEQ ID NO: 388838 - RNA, 32 nt, Human
cggcugagagugacagagaauccagaauagcu

SEQ ID NO: 388839 - RNA, 32 nt, Human
cggcugagauggcgccaucacacuccagccug

SEQ ID NO: 388840 - RNA, 32 nt, Human
cggcugagcuaacuccccagagccaaagugga

SEQ ID NO: 388841 - RNA, 32 nt, Human
cggcugaggaggcgggaaggcggcagugguug

SEQ ID NO: 388842 - RNA, 32 nt, Human
cggcugagggagcgggacagggucagcggcga

SEQ ID NO: 388843 - RNA, 32 nt, Human
cggcugaggggcugaggggcugaggggcgggc

SEQ ID NO: 388844 - RNA, 18 nt, Human
cggcugaggucugcauug

SEQ ID NO: 388845 - RNA, 32 nt, Human
cggcugaguuaccagagccucugccucuuccu

SEQ ID NO: 388846 - RNA, 32 nt, Human
cggcugauuagcaaccuucauuccaucugccu

SEQ ID NO: 388847 - RNA, 32 nt, Human
cggcugcacccaggcugugaccucagcugacg

SEQ ID NO: 388848 - RNA, 19 nt, Human
cggcugcagaccaccagac

SEQ ID NO: 388849 - RNA, 32 nt, Human
cggcugcagagcagagaugugcagcccucugg

SEQ ID NO: 388850 - RNA, 32 nt, Human
cggcugcagagccugggcucagccccagggag

SEQ ID NO: 388851 - RNA, 32 nt, Human
cggcugcagagggagcacuguggcugccaucc

SEQ ID NO: 388852 - RNA, 32 nt, Human
cggcugcagccugagguguguccugggcuccu

SEQ ID NO: 388853 - RNA, 32 nt, Human
cggcugcaggggcaggagaggaagggaccggc

SEQ ID NO: 388854 - RNA, 32 nt, Human
cggcugcaggggccaacaagaggucagcuuug

SEQ ID NO: 388855 - RNA, 32 nt, Human
cggcugccagaggcacaauccggaaccgcccc

SEQ ID NO: 388856 - RNA, 32 nt, Human
cggcugccagcacuagguccugggcagcuuug

SEQ ID NO: 388857 - RNA, 26 nt, Human
cggcugccagcagcacagcugccaag

SEQ ID NO: 388858 - RNA, 32 nt, Human
cggcugccagccucgggccaucagccuaggag

SEQ ID NO: 388859 - RNA, 19 nt, Human
cggcugccaggcccagccc

SEQ ID NO: 388860 - RNA, 32 nt, Human
cggcugccagucugcacggccucggcacggcg

SEQ ID NO: 388861 - RNA, 20 nt, Human
cggcugccggcuccacgccc

SEQ ID NO: 388862 - RNA, 23 nt, Human
cggcugccucaccuggccacagc

SEQ ID NO: 388863 - RNA, 23 nt, Human
cggcugccuccagaccacaggac

SEQ ID NO: 388864 - RNA, 32 nt, Human
cggcugccuccuccucuuccuggcugcaggga

SEQ ID NO: 388865 - RNA, 24 nt, Human
cggcugccucugcccccacagcac

SEQ ID NO: 388866 - RNA, 32 nt, Human
cggcugccugugacaguuucucagccaggcag

SEQ ID NO: 388867 - RNA, 32 nt, Human
cggcugcgcauguccagaagcauuuccuuccu

SEQ ID NO: 388868 - RNA, 21 nt, Human
cggcugcgugaccucgggagg

SEQ ID NO: 388869 - RNA, 32 nt, Human
cggcugcuaaccccucuccucgcccugcuccc

SEQ ID NO: 388870 - RNA, 19 nt, Human
cggcugcuacaacaccaaa

SEQ ID NO: 388871 - RNA, 23 nt, Human
cggcugcuacagcuuuuucacuc

SEQ ID NO: 388872 - RNA, 32 nt, Human
cggcugcuccaguucauggccucccaggggug

SEQ ID NO: 388873 - RNA, 32 nt, Human
cggcugcuccucucacagacccucuuuggccc

SEQ ID NO: 388874 - RNA, 21 nt, Human
cggcugcucgugccugagcua

SEQ ID NO: 388875 - RNA, 32 nt, Human
cggcugcugcagcugcugaacaaggccuugcc

SEQ ID NO: 388876 - RNA, 23 nt, Human
cggcugcugcccuucucugggca

SEQ ID NO: 388877 - RNA, 32 nt, Human
cggcugcugccuggggcccuuuccugcucucc

SEQ ID NO: 388878 - RNA, 24 nt, Human
cggcugcuggcugacaucacgcac

SEQ ID NO: 388879 - RNA, 32 nt, Human
cggcugcuggugccuuucuucccaccucgcuu

SEQ ID NO: 388880 - RNA, 32 nt, Human
cggcugcuguaacuugugccuccuagcggauc

SEQ ID NO: 388881 - RNA, 32 nt, Human
cggcugcugucacuuggcucucuggcuggagc

SEQ ID NO: 388882 - RNA, 32 nt, Human
cggcugcugugaucagcacaaggaccgccgca

SEQ ID NO: 388883 - RNA, 32 nt, Human
cggcugcuuccagaguaagcagucuuuauggg

SEQ ID NO: 388884 - RNA, 25 nt, Human
cggcugcuucugagugguucuuuca

SEQ ID NO: 388885 - RNA, 22 nt, Human
cggcugcuucuguuuuuucauu

SEQ ID NO: 388886 - RNA, 32 nt, Human
cggcugcuuuuauguaguuuaggcuggaaaug

SEQ ID NO: 388887 - RNA, 32 nt, Human
cggcuggaaaaggauugcugugugcuagacuu

SEQ ID NO: 388888 - RNA, 32 nt, Human
cggcuggaaagaggagaaggagagggaguaca

SEQ ID NO: 388889 - RNA, 32 nt, Human
cggcuggaaggguaggcuucauucaccgcucg

SEQ ID NO: 388890 - RNA, 32 nt, Human
cggcuggacagaauuuuauacccacaucuggg

SEQ ID NO: 388891 - RNA, 32 nt, Human
cggcuggacaguuuuacaucucagggaagggc

SEQ ID NO: 388892 - RNA, 32 nt, Human
cggcuggagcaaagucaaagucaugcagcaaa

SEQ ID NO: 388893 - RNA, 32 nt, Human
cggcuggaggagcaucgguccgggaggucucu

SEQ ID NO: 388894 - RNA, 32 nt, Human
cggcuggaggccggaaggucaccccguccccg

SEQ ID NO: 388895 - RNA, 32 nt, Human
cggcuggcacccacuccugggcugcucagagc

SEQ ID NO: 388896 - RNA, 32 nt, Human
cggcuggccauggagaaagcugacuuggcugg

SEQ ID NO: 388897 - RNA, 32 nt, Human
cggcuggcggcuggcuagccugggcggccuga

SEQ ID NO: 388898 - RNA, 32 nt, Human
cggcuggcucacugucuccaguucucaauggc

SEQ ID NO: 388899 - RNA, 32 nt, Human
cggcuggcugggacuuggcugugggugggaug

SEQ ID NO: 388900 - RNA, 32 nt, Human
cggcugggacgggaaccuuccacccacagcua

SEQ ID NO: 388901 - RNA, 32 nt, Human
cggcugggacucuuccaugcaguugaaacugg

SEQ ID NO: 388902 - RNA, 32 nt, Human
cggcugggaggcagccgucugugcagcgagca

SEQ ID NO: 388903 - RNA, 19 nt, Human
cggcugggagggugggguc

SEQ ID NO: 388904 - RNA, 32 nt, Human
cggcugggcccaggcuguggcaugauggccgg

SEQ ID NO: 388905 - RNA, 32 nt, Human
cggcugggcgggcgggggcgggcaggcggacg

SEQ ID NO: 388906 - RNA, 32 nt, Human
cggcugggcggggagagccgacggccgcggcg

SEQ ID NO: 388907 - RNA, 32 nt, Human
cggcugggcuccugggcugccuucagugucuu

SEQ ID NO: 388908 - RNA, 32 nt, Human
cggcugggcuuggucccaggagcagggagagu

SEQ ID NO: 388909 - RNA, 32 nt, Human
cggcuggggaaaagggaggaguuagacucugg

SEQ ID NO: 388910 - RNA, 32 nt, Human
cggcuggggcugaccacacuagcaccggggga

SEQ ID NO: 388911 - RNA, 32 nt, Human
cggcugggggcaggccagaggccuccacagug

SEQ ID NO: 388912 - RNA, 32 nt, Human
cggcugggucuggggcucgggcucaggcucgc

SEQ ID NO: 388913 - RNA, 32 nt, Human
cggcuggucagccugguccuccugggcucccu

SEQ ID NO: 388914 - RNA, 32 nt, Human
cggcuggucccaagggucaggaagauggauuc

SEQ ID NO: 388915 - RNA, 32 nt, Human
cggcuggugaaugacacauacagcuguacaaa

SEQ ID NO: 388916 - RNA, 32 nt, Human
cggcuggugacugauggauggguagugggcug

SEQ ID NO: 388917 - RNA, 32 nt, Human
cggcuguaaagauggcggcuuccuagugaguc

SEQ ID NO: 388918 - RNA, 32 nt, Human
cggcuguaacugugaggaaggcugcagagugg

SEQ ID NO: 388919 - RNA, 20 nt, Human
cggcuguaaucccagcacuu

SEQ ID NO: 388920 - RNA, 32 nt, Human
cggcuguaauggcugcccccagcuggcgcggg

SEQ ID NO: 388921 - RNA, 32 nt, Human
cggcuguaaugguuccaugggcgggggugggg

SEQ ID NO: 388922 - RNA, 32 nt, Human
cggcuguaggggucgagcaggaugcgcacgca

SEQ ID NO: 388923 - RNA, 23 nt, Human
cggcugucccaaccaagcugcca

SEQ ID NO: 388924 - RNA, 32 nt, Human
cggcugucuugccucuugucauugucuguccc

SEQ ID NO: 388925 - RNA, 32 nt, Human
cggcugugagccaagagccgcggagcacgccg

SEQ ID NO: 388926 - RNA, 32 nt, Human
cggcugugagcugcgcucuccacgccggcucc

SEQ ID NO: 388927 - RNA, 32 nt, Human
cggcugugaucuggggaaggagggaaacccaa

SEQ ID NO: 388928 - RNA, 24 nt, Human
cggcugugccccgucugaccaaag

SEQ ID NO: 388929 - RNA, 32 nt, Human
cggcugugcgcucccugcucccacgggccggu

SEQ ID NO: 388930 - RNA, 32 nt, Human
cggcugugcucuucugggagguucccgcuugc

SEQ ID NO: 388931 - RNA, 32 nt, Human
cggcugugggcagaggcugcggggccuaaaau

SEQ ID NO: 388932 - RNA, 32 nt, Human
cggcugugggccugcugggggugggggcccga

SEQ ID NO: 388933 - RNA, 32 nt, Human
cggcugugucagaggcaagcaaacaaguauua

SEQ ID NO: 388934 - RNA, 21 nt, Human
cggcuguguggcagcgggggg

SEQ ID NO: 388935 - RNA, 24 nt, Human
cggcuguuacaguucuuucauuca

SEQ ID NO: 388936 - RNA, 30 nt, Human
cggcuguugaccaccagacaccugaccgca

SEQ ID NO: 388937 - RNA, 32 nt, Human
cggcuguugaugccaugaaugaaauggcuggu

SEQ ID NO: 388938 - RNA, 32 nt, Human
cggcuguugcagcugcugcggagaugcuccaa

SEQ ID NO: 388939 - RNA, 19 nt, Human
cggcuguuucuuuuuauuu

SEQ ID NO: 388940 - RNA, 32 nt, Human
cggcuguuuucguugucugcacacagagcagu

SEQ ID NO: 388941 - RNA, 32 nt, Human
cggcuuaacuccgccucaccgagcccagucca

SEQ ID NO: 388942 - RNA, 32 nt, Human
cggcuuacuacgaccucugccuccuggguuca

SEQ ID NO: 388943 - RNA, 32 nt, Human
cggcuuacugaaaccucugccucccagguuca

SEQ ID NO: 388944 - RNA, 32 nt, Human
cggcuuacugcaaccuccaccucccaggugca

SEQ ID NO: 388945 - RNA, 32 nt, Human
cggcuuacugcaaccuccaccucccggguuca

SEQ ID NO: 388946 - RNA, 32 nt, Human
cggcuuacugcaaccuccgccuacuggguuca

SEQ ID NO: 388947 - RNA, 32 nt, Human
cggcuuacugcaaccuccgccuucccagauuc

SEQ ID NO: 388948 - RNA, 32 nt, Human
cggcuuacugcaaccuuugccucccagguuua

SEQ ID NO: 388949 - RNA, 32 nt, Human
cggcuuacugcaacuuccagcuccuggguucg

SEQ ID NO: 388950 - RNA, 32 nt, Human
cggcuuacugcaagcuccgccucccagguuca

SEQ ID NO: 388951 - RNA, 32 nt, Human
cggcuuauggcaaccuccgccucccggguuca

SEQ ID NO: 388952 - RNA, 32 nt, Human
cggcuuauugcaaccuccgcuuccuggguuca

SEQ ID NO: 388953 - RNA, 20 nt, Human
cggcuucaccggcucagccc

SEQ ID NO: 388954 - RNA, 32 nt, Human
cggcuucacuaauaagaaggaacucacacuua

SEQ ID NO: 388955 - RNA, 32 nt, Human
cggcuucagcacuccgggcugcaguaagaagu

SEQ ID NO: 388956 - RNA, 32 nt, Human
cggcuucaugccauucucguccuucagccucc

SEQ ID NO: 388957 - RNA, 32 nt, Human
cggcuuccacaucugcacaucugggagacaaa

SEQ ID NO: 388958 - RNA, 32 nt, Human
cggcuuccccagaagccugggcuuagggugga

SEQ ID NO: 388959 - RNA, 32 nt, Human
cggcuuccuagacucuggcccugccacaccaa

SEQ ID NO: 388960 - RNA, 32 nt, Human
cggcuuccucacccuauguccuuuauuuacaa

SEQ ID NO: 388961 - RNA, 32 nt, Human
cggcuuccuccacauggaggucccaggaagac

SEQ ID NO: 388962 - RNA, 32 nt, Human
cggcuuccuccaccagcgccugccucggcccc

SEQ ID NO: 388963 - RNA, 32 nt, Human
cggcuuccugguagcugggacuagagaugugu

SEQ ID NO: 388964 - RNA, 32 nt, Human
cggcuucgcccaccaucucccuaccauggacc

SEQ ID NO: 388965 - RNA, 32 nt, Human
cggcuucggaaggugggcucugcagcgggacc

SEQ ID NO: 388966 - RNA, 32 nt, Human
cggcuucucaugcuauuucuaccucacuuugg

SEQ ID NO: 388967 - RNA, 32 nt, Human
cggcuucuccaucuuccucgucuggacggugg

SEQ ID NO: 388968 - RNA, 18 nt, Human
cggcuucucccuggacuc

SEQ ID NO: 388969 - RNA, 19 nt, Human
cggcuucucugauucucca

SEQ ID NO: 388970 - RNA, 32 nt, Human
cggcuucugcuaggaccccaccgggugugguu

SEQ ID NO: 388971 - RNA, 32 nt, Human
cggcuucugucccaggcaucucaggccuuggc

SEQ ID NO: 388972 - RNA, 32 nt, Human
cggcuucuuccucugugcuggucaugaaaguu

SEQ ID NO: 388973 - RNA, 32 nt, Human
cggcuugaggcccgcggggagcgcggcgcaau

SEQ ID NO: 388974 - RNA, 32 nt, Human
cggcuugaguggcugcuucuccucacugcuca

SEQ ID NO: 388975 - RNA, 32 nt, Human
cggcuugccucucucccuccucccucgcucuc

SEQ ID NO: 388976 - RNA, 32 nt, Human
cggcuugccuguaaucccagcacuuugggagg

SEQ ID NO: 388977 - RNA, 22 nt, Human
cggcuugcuaaucuccacgccc

SEQ ID NO: 388978 - RNA, 32 nt, Human
cggcuuguaggaccucacaggaacccaagccu

SEQ ID NO: 388979 - RNA, 32 nt, Human
cggcuuguauuuuuaugagggaauucugcagc

SEQ ID NO: 388980 - RNA, 32 nt, Human
cggcuuguccuccucuggcgcucagcucccuc

SEQ ID NO: 388981 - RNA, 32 nt, Human
cggcuugugcugcucugcgcucuccgcuucgc

SEQ ID NO: 388982 - RNA, 32 nt, Human
cggcuuugccgucugcgcuccagccuucgccu

SEQ ID NO: 388983 - RNA, 31 nt, Human
cggcuuuggugagggcgccuccauuugugaa

SEQ ID NO: 388984 - RNA, 32 nt, Human
cggcuuuguccaguucaaaauggcagaaaagg

SEQ ID NO: 388985 - RNA, 32 nt, Human
cggcuuuucagccucagugcugcggcagaggc

SEQ ID NO: 388986 - RNA, 32 nt, Human
cggcuuuuccucacuccugguaaccaauacaa

SEQ ID NO: 388987 - RNA, 32 nt, Human
cggcuuuugcagcauuagccuacaagcuuugu

SEQ ID NO: 388988 - RNA, 32 nt, Human
cggcuuuuguugucuccgccuccucggccgcc

SEQ ID NO: 388989 - RNA, 32 nt, Human
cgggaaaacagaccagccacacacaaggggca

SEQ ID NO: 388990 - RNA, 32 nt, Human
cgggaaaacagcuuucagaagcuugaggccga

SEQ ID NO: 388991 - RNA, 32 nt, Human
cgggaaaagugaggggacggaggcgcccaagc

SEQ ID NO: 388992 - RNA, 32 nt, Human
cgggaaagaggugagaggaugggaaggagcag

SEQ ID NO: 388993 - RNA, 32 nt, Human
cgggaaagaugccauauauucacuggguggca

SEQ ID NO: 388994 - RNA, 32 nt, Human
cgggaaagcagccagcacaaagggcccaggaa

SEQ ID NO: 388995 - RNA, 32 nt, Human
cgggaaaggagcugcuuucuucccucacuuuu

SEQ ID NO: 388996 - RNA, 32 nt, Human
cgggaaaggggaagaaugcaggagggguagga

SEQ ID NO: 388997 - RNA, 28 nt, Human
cgggaaauggaugaaaagaggcugcugg

SEQ ID NO: 388998 - RNA, 20 nt, Human
cgggaaauggcgacuggcug

SEQ ID NO: 388999 - RNA, 32 nt, Human
cgggaaaugguguggagguuccggggagcccu

SEQ ID NO: 389000 - RNA, 32 nt, Human
cgggaacacacguguguggcucaggaggaaaa

SEQ ID NO: 389001 - RNA, 32 nt, Human
cgggaacacggaggggaaggaggaggagcuua

SEQ ID NO: 389002 - RNA, 32 nt, Human
cgggaacagagaaguguggggaagagauagga

SEQ ID NO: 389003 - RNA, 20 nt, Human
cgggaacagcaggcagcugc

SEQ ID NO: 389004 - RNA, 32 nt, Human
cgggaacauccaaggcaagacuggcacccagc

SEQ ID NO: 389005 - RNA, 32 nt, Human
cgggaacccaggaggcagagguugcagugagc

SEQ ID NO: 389006 - RNA, 32 nt, Human
cgggaacccaggcggagacccgaggcucucgc

SEQ ID NO: 389007 - RNA, 32 nt, Human
cgggaacccaggcugcagcccccacccccgcg

SEQ ID NO: 389008 - RNA, 25 nt, Human
cgggaacccccgacaggggucgcug

SEQ ID NO: 389009 - RNA, 32 nt, Human
cgggaacccuuaggauccccucuguccacgag

SEQ ID NO: 389010 - RNA, 32 nt, Human
cgggaaccggggaccgagaggagcagcagcgg

SEQ ID NO: 389011 - RNA, 32 nt, Human
cgggaaccucagcaaccucugccggcuccucg

SEQ ID NO: 389012 - RNA, 32 nt, Human
cgggaaccucauucucaguagcuacagauuuc

SEQ ID NO: 389013 - RNA, 32 nt, Human
cgggaaccugggaggcggagcuuacagugaac

SEQ ID NO: 389014 - RNA, 32 nt, Human
cgggaacgagaaagacagagcagggaaacgug

SEQ ID NO: 389015 - RNA, 18 nt, Human
cgggaacggcggcggggg

SEQ ID NO: 389016 - RNA, 32 nt, Human
cgggaacgucagcaaccucugccggcuccucg

SEQ ID NO: 389017 - RNA, 32 nt, Human
cgggaagaagcaguggcagcuaccuccagaga

SEQ ID NO: 389018 - RNA, 22 nt, Human
cgggaagaccgcagaggccucg

SEQ ID NO: 389019 - RNA, 23 nt, Human
cgggaagacgccagaggccagcu

SEQ ID NO: 389020 - RNA, 32 nt, Human
cgggaagaggcagagggaggcagccagcgggg

SEQ ID NO: 389021 - RNA, 32 nt, Human
cgggaagagggugggagagccagagcaaagag

SEQ ID NO: 389022 - RNA, 24 nt, Human
cgggaagaggucugauggcuggga

SEQ ID NO: 389023 - RNA, 32 nt, Human
cgggaagcagaggccgccgccggccacagucg

SEQ ID NO: 389024 - RNA, 20 nt, Human
cgggaagccagccucaggga

SEQ ID NO: 389025 - RNA, 32 nt, Human
cgggaagccagccuccgcagccaccgugaaga

SEQ ID NO: 389026 - RNA, 32 nt, Human
cgggaagcugagguaggagaaucucucuuuuu

SEQ ID NO: 389027 - RNA, 32 nt, Human
cgggaaggaacagccagagcuuccaugugcca

SEQ ID NO: 389028 - RNA, 32 nt, Human
cgggaaggagagaaggagaagaguugcgacaa

SEQ ID NO: 389029 - RNA, 32 nt, Human
cgggaaggaggagagcgccugacgccgacccg

SEQ ID NO: 389030 - RNA, 32 nt, Human
cgggaaggaggcaggugcaggugcaggaggga

SEQ ID NO: 389031 - RNA, 32 nt, Human
cgggaaggcaugccagccugggcgaugcugca

SEQ ID NO: 389032 - RNA, 32 nt, Human
cgggaaggcggcagugguugaaggggugauug

SEQ ID NO: 389033 - RNA, 32 nt, Human
cgggaaggcuugcuuuuucuccaugucuccca

SEQ ID NO: 389034 - RNA, 32 nt, Human
cgggaagggagcgcgguggccgccaccgccac

SEQ ID NO: 389035 - RNA, 32 nt, Human
cgggaagggccgacgccgccugacuggcuugg

SEQ ID NO: 389036 - RNA, 32 nt, Human
cgggaagggcuggggccagcuucuuccuccua

SEQ ID NO: 389037 - RNA, 32 nt, Human
cgggaaggggagcaagauggacaagacuggcc

SEQ ID NO: 389038 - RNA, 23 nt, Human
cgggaaggggaggcuugauccug

SEQ ID NO: 389039 - RNA, 32 nt, Human
cgggaaggggcagaggccgugagcucucagcu

SEQ ID NO: 389040 - RNA, 22 nt, Human
cgggaaguggagguugcaguga

SEQ ID NO: 389041 - RNA, 23 nt, Human
cgggaaguggagguugcagugag

SEQ ID NO: 389042 - RNA, 32 nt, Human
cgggaaguggccaguucaggaggcggaccccc

SEQ ID NO: 389043 - RNA, 32 nt, Human
cgggaaucaccccagggauucguaggcuaggu

SEQ ID NO: 389044 - RNA, 32 nt, Human
cgggaaucaggaaagggugggguccagcugca

SEQ ID NO: 389045 - RNA, 32 nt, Human
cgggaaucugggaggcgagcagcucugcaguu

SEQ ID NO: 389046 - RNA, 31 nt, Human
cgggaauggguggaggccgggggaauaaaaa

SEQ ID NO: 389047 - RNA, 32 nt, Human
cgggacaaagagacuguugguaacuguggauu

SEQ ID NO: 389048 - RNA, 32 nt, Human
cgggacaagccuggccacccucgcugugauga

SEQ ID NO: 389049 - RNA, 32 nt, Human
cgggacaaucaaaauauauacacccuucaccu

SEQ ID NO: 389050 - RNA, 32 nt, Human
cgggacacaaucagcuuuaaccaauggaugag

SEQ ID NO: 389051 - RNA, 32 nt, Human
cgggacacagaauuauagaugucugagcacgg

SEQ ID NO: 389052 - RNA, 32 nt, Human
cgggacacuuuugugcguuccucuccagagcg

SEQ ID NO: 389053 - RNA, 32 nt, Human
cgggacagaaggaucaccuugaggccaggagu

SEQ ID NO: 389054 - RNA, 20 nt, Human
cgggacagagaagggacagg

SEQ ID NO: 389055 - RNA, 32 nt, Human
cgggacagaggaccauuacaacuagaucaagg

SEQ ID NO: 389056 - RNA, 32 nt, Human
cgggacagccaaguugcugggcccagcugaac

SEQ ID NO: 389057 - RNA, 32 nt, Human
cgggacagcuguuccuuugggcugcagaaacu

SEQ ID NO: 389058 - RNA, 32 nt, Human
cgggacaggagaagggggcugagcuccuguuc

SEQ ID NO: 389059 - RNA, 32 nt, Human
cgggacaggagccuggaaucagcuggagaaca

SEQ ID NO: 389060 - RNA, 32 nt, Human
cgggacaggcacacaggcccagguguguaggc

SEQ ID NO: 389061 - RNA, 32 nt, Human
cgggacaggcccagccccagagcccagagaug

SEQ ID NO: 389062 - RNA, 32 nt, Human
cgggacaggccuccuuggcaagaggaaugacc

SEQ ID NO: 389063 - RNA, 32 nt, Human
cgggacaggccugggcuggggcaguuggaggu

SEQ ID NO: 389064 - RNA, 32 nt, Human
cgggacagggcugaggccugcgggggaagacc

SEQ ID NO: 389065 - RNA, 32 nt, Human
cgggacaggugggcaggacugacccugaggag

SEQ ID NO: 389066 - RNA, 32 nt, Human
cgggaccaaauuucugcagaggccuugccgga

SEQ ID NO: 389067 - RNA, 32 nt, Human
cgggaccaaggacggcugcaggaugugguguc

SEQ ID NO: 389068 - RNA, 32 nt, Human
cgggaccaagggacaacaagagcucaggagaa

SEQ ID NO: 389069 - RNA, 32 nt, Human
cgggaccaggaggaggaggaggaggaggagga

SEQ ID NO: 389070 - RNA, 32 nt, Human
cgggaccaucuucucggccaucuccugcuucu

SEQ ID NO: 389071 - RNA, 32 nt, Human
cgggacccaagaggagcaggcagggacggggg

SEQ ID NO: 389072 - RNA, 32 nt, Human
cgggacccagcuguagugagguugcagugauu

SEQ ID NO: 389073 - RNA, 32 nt, Human
cgggacccgccagcuucagccuccagggccug

SEQ ID NO: 389074 - RNA, 32 nt, Human
cgggacccggucucugccuccuggcugcccuc

SEQ ID NO: 389075 - RNA, 32 nt, Human
cgggacccguuggcagagguggcggcggcggc

SEQ ID NO: 389076 - RNA, 32 nt, Human
cgggacccucuucauucucugaucucauccug

SEQ ID NO: 389077 - RNA, 32 nt, Human
cgggacccugcacuccgucgccggaagugcca

SEQ ID NO: 389078 - RNA, 32 nt, Human
cgggacccugccugugacucuccaggacucug

SEQ ID NO: 389079 - RNA, 18 nt, Human
cgggacccugcuggaccc

SEQ ID NO: 389080 - RNA, 32 nt, Human
cgggaccgcuuugcagagaccagaggcauauc

SEQ ID NO: 389081 - RNA, 21 nt, Human
cgggaccggcagcagcagcag

SEQ ID NO: 389082 - RNA, 32 nt, Human
cgggaccgugucccccuucaucccccuagaac

SEQ ID NO: 389083 - RNA, 32 nt, Human
cgggaccugagcgcgaggagccugagugcggg

SEQ ID NO: 389084 - RNA, 32 nt, Human
cgggaccugcagcccgccaugccugagccucc

SEQ ID NO: 389085 - RNA, 32 nt, Human
cgggaccugcagcccuccaugccugacccucc

SEQ ID NO: 389086 - RNA, 32 nt, Human
cgggaccugcagccgccgccguccccggagca

SEQ ID NO: 389087 - RNA, 32 nt, Human
cgggaccugccacucgcaucugggcaauguug

SEQ ID NO: 389088 - RNA, 32 nt, Human
cgggaccugccugagggcucccugcugcaguu

SEQ ID NO: 389089 - RNA, 32 nt, Human
cgggaccugcugcugcuccagccauguccaug

SEQ ID NO: 389090 - RNA, 32 nt, Human
cgggaccugcuggccucaggaggcaggcagag

SEQ ID NO: 389091 - RNA, 32 nt, Human
cgggaccuggugcugaucagaguggcugcugc

SEQ ID NO: 389092 - RNA, 32 nt, Human
cgggaccuuccaccucuccaacauuguccccu

SEQ ID NO: 389093 - RNA, 32 nt, Human
cgggaccuugagugcggcgaggcguggcuguu

SEQ ID NO: 389094 - RNA, 32 nt, Human
cgggaccuugcaagccucuccauccagcaucu

SEQ ID NO: 389095 - RNA, 32 nt, Human
cgggacgaaggcgaggaggaggcggaggugga

SEQ ID NO: 389096 - RNA, 32 nt, Human
cgggacgaggaggaggaggaggaagaggggau

SEQ ID NO: 389097 - RNA, 32 nt, Human
cgggacgcgccgggcuggagugggcgguuaua

SEQ ID NO: 389098 - RNA, 32 nt, Human
cgggacgcggcaggcuucucagucucuguccg

SEQ ID NO: 389099 - RNA, 32 nt, Human
cgggacgcucccuucucccacccaggacugcc

SEQ ID NO: 389100 - RNA, 32 nt, Human
cgggacggauuccacagacgggagccucauuc

SEQ ID NO: 389101 - RNA, 32 nt, Human
cgggacggugcagucaggcucugggugccaca

SEQ ID NO: 389102 - RNA, 32 nt, Human
cgggacgugagcugugaggcuuguugaugacg

SEQ ID NO: 389103 - RNA, 32 nt, Human
cgggacgugggacggagcgaggaugugguggg

SEQ ID NO: 389104 - RNA, 32 nt, Human
cgggacguguuggugagcaccuguaaucccug

SEQ ID NO: 389105 - RNA, 32 nt, Human
cgggacuaggguggggagcaaacaggccagcg

SEQ ID NO: 389106 - RNA, 32 nt, Human
cgggacuccagccccaggcuguggcucugcag

SEQ ID NO: 389107 - RNA, 32 nt, Human
cgggacucgggguuugcucagugagccguuca

SEQ ID NO: 389108 - RNA, 32 nt, Human
cgggacugccagcugcuccccaaaagccacuu

SEQ ID NO: 389109 - RNA, 21 nt, Human
cgggacugccccggguggaag

SEQ ID NO: 389110 - RNA, 32 nt, Human
cgggacuggcgaguacgcagcccaggggguua

SEQ ID NO: 389111 - RNA, 27 nt, Human
cgggacugggccucacgggguggggug

SEQ ID NO: 389112 - RNA, 32 nt, Human
cgggacugggcugggccugcggugagcaucag

SEQ ID NO: 389113 - RNA, 32 nt, Human
cgggacugugcagucugaaccugcaacuguaa

SEQ ID NO: 389114 - RNA, 32 nt, Human
cgggacuguggacuccacgacccuguccucgg

SEQ ID NO: 389115 - RNA, 32 nt, Human
cgggacuuccuucuaagagaagcgaucuugag

SEQ ID NO: 389116 - RNA, 26 nt, Human
cgggagaaagagagagaggagagaga

SEQ ID NO: 389117 - RNA, 32 nt, Human
cgggagaacagggagcuccuggagcgcagccu

SEQ ID NO: 389118 - RNA, 32 nt, Human
cgggagaaccguucgcggaggaaaggcgaacu

SEQ ID NO: 389119 - RNA, 22 nt, Human
cgggagaagguggaggaggagg

SEQ ID NO: 389120 - RNA, 18 nt, Human
cgggagaaucgcuugaac

SEQ ID NO: 389121 - RNA, 32 nt, Human
cgggagaaucgcuugaaccugggagacggagg

SEQ ID NO: 389122 - RNA, 32 nt, Human
cgggagacccccagccccugcaggggcggggc

SEQ ID NO: 389123 - RNA, 32 nt, Human
cgggagagagaaugagccagagggacacgcug

SEQ ID NO: 389124 - RNA, 23 nt, Human
cgggagagagacuuccgguucug

SEQ ID NO: 389125 - RNA, 32 nt, Human
cgggagagaggaagagaggggagcgcgguggc

SEQ ID NO: 389126 - RNA, 32 nt, Human
cgggagaggacaaaagcaugucuucccuuccu

SEQ ID NO: 389127 - RNA, 32 nt, Human
cgggagaggagaagagggagacccgccgccuc

SEQ ID NO: 389128 - RNA, 32 nt, Human
cgggagaggagaauggauuuauagagaacauc

SEQ ID NO: 389129 - RNA, 32 nt, Human
cgggagaggcugcuguggaggcugaggaggcg

SEQ ID NO: 389130 - RNA, 32 nt, Human
cgggagcaaauacagagccuccaggcagugcu

SEQ ID NO: 389131 - RNA, 32 nt, Human
cgggagcagaggaggcgagggaggagggccag

SEQ ID NO: 389132 - RNA, 32 nt, Human
cgggagcagcauggauuggggcacugagcugu

SEQ ID NO: 389133 - RNA, 27 nt, Human
cgggagcagccuccuugggccucagga

SEQ ID NO: 389134 - RNA, 23 nt, Human
cgggagcagggcgcggggcggga

SEQ ID NO: 389135 - RNA, 24 nt, Human
cgggagcauccugcugcuuagggg

SEQ ID NO: 389136 - RNA, 32 nt, Human
cgggagccacauagagacagacuuggcaaggg

SEQ ID NO: 389137 - RNA, 20 nt, Human
cgggagccaccaugauggcc

SEQ ID NO: 389138 - RNA, 22 nt, Human
cgggagccagacuguccaggga

SEQ ID NO: 389139 - RNA, 32 nt, Human
cgggagccagcuggguguuauuucucaaacuc

SEQ ID NO: 389140 - RNA, 32 nt, Human
cgggagccaggcgcuguggacagggucugucc

SEQ ID NO: 389141 - RNA, 24 nt, Human
cgggagcccaucugcccccagggg

SEQ ID NO: 389142 - RNA, 20 nt, Human
cgggagcccccacccgggga

SEQ ID NO: 389143 - RNA, 20 nt, Human
cgggagcccccgcccggaga

SEQ ID NO: 389144 - RNA, 32 nt, Human
cgggagcccccuggucaccuugguagcaggag

SEQ ID NO: 389145 - RNA, 22 nt, Human
cgggagccccggcaguccgggg

SEQ ID NO: 389146 - RNA, 22 nt, Human
cgggagccccgggacgggccgg

SEQ ID NO: 389147 - RNA, 20 nt, Human
cgggagccccuccccgggga

SEQ ID NO: 389148 - RNA, 32 nt, Human
cgggagccccugcacacuuuccaccucugcug

SEQ ID NO: 389149 - RNA, 21 nt, Human
cgggagcccgccgucugcgga

SEQ ID NO: 389150 - RNA, 21 nt, Human
cgggagcccgcggcgcgaggg

SEQ ID NO: 389151 - RNA, 32 nt, Human
cgggagcccuuugggaggaagggaggcguuag

SEQ ID NO: 389152 - RNA, 32 nt, Human
cgggagccgagaggaggcggaggagauggcgu

SEQ ID NO: 389153 - RNA, 32 nt, Human
cgggagccgccaggccuggccuggccggggcu

SEQ ID NO: 389154 - RNA, 32 nt, Human
cgggagccggacccgucggcagaggagcgggc

SEQ ID NO: 389155 - RNA, 32 nt, Human
cgggagccgucgcagacccguuucaugcagcg

SEQ ID NO: 389156 - RNA, 25 nt, Human
cgggagccucagguucucucagggg

SEQ ID NO: 389157 - RNA, 21 nt, Human
cgggagccugaggcaggagaa

SEQ ID NO: 389158 - RNA, 20 nt, Human
cgggagccugcguccaggga

SEQ ID NO: 389159 - RNA, 21 nt, Human
cgggagccuggguccccgggg

SEQ ID NO: 389160 - RNA, 32 nt, Human
cgggagcgaaagugcgcugagcugcagugucu

SEQ ID NO: 389161 - RNA, 32 nt, Human
cgggagcgaguauguccgcucugacucggcug

SEQ ID NO: 389162 - RNA, 32 nt, Human
cgggagcggcacggcagccacugcuuggggua

SEQ ID NO: 389163 - RNA, 32 nt, Human
cgggagcggcaguccuuccaguacaggcucgc

SEQ ID NO: 389164 - RNA, 18 nt, Human
cgggagcggcggcagcgg

SEQ ID NO: 389165 - RNA, 18 nt, Human
cgggagcggcggcggcgg

SEQ ID NO: 389166 - RNA, 18 nt, Human
cgggagcgguggcggcgg

SEQ ID NO: 389167 - RNA, 32 nt, Human
cgggagcuccucuccagccagagcuacacuug

SEQ ID NO: 389168 - RNA, 24 nt, Human
cgggagcucgccgcggcccgggga

SEQ ID NO: 389169 - RNA, 32 nt, Human
cgggagcucgcugguccuggccccagaagccu

SEQ ID NO: 389170 - RNA, 32 nt, Human
cgggagcucugccuccaagucuacccuucccu

SEQ ID NO: 389171 - RNA, 22 nt, Human
cgggagcugcacuggccagggg

SEQ ID NO: 389172 - RNA, 22 nt, Human
cgggagcugcgcagcgcuccac

SEQ ID NO: 389173 - RNA, 21 nt, Human
cgggagcugugcggcccaggg

SEQ ID NO: 389174 - RNA, 32 nt, Human
cgggagcuucagggcugcgccacccacccccu

SEQ ID NO: 389175 - RNA, 23 nt, Human
cgggagcuucuugagaccgagga

SEQ ID NO: 389176 - RNA, 19 nt, Human
cgggagcuuuacacaccuu

SEQ ID NO: 389177 - RNA, 25 nt, Human
cgggaggaaaggcagaagcugggag

SEQ ID NO: 389178 - RNA, 25 nt, Human
cgggaggaaagggggugcuggaaga

SEQ ID NO: 389179 - RNA, 21 nt, Human
cgggaggaacgcccagggccc

SEQ ID NO: 389180 - RNA, 32 nt, Human
cgggaggaagaggaggaggaggaggaggcugg

SEQ ID NO: 389181 - RNA, 22 nt, Human
cgggaggaagagguugcaguga

SEQ ID NO: 389182 - RNA, 21 nt, Human
cgggaggaaggacaagagcuc

SEQ ID NO: 389183 - RNA, 32 nt, Human
cgggaggaagggagcuggaaagggggcggaaa

SEQ ID NO: 389184 - RNA, 32 nt, Human
cgggaggaagggcacagcaggagcggucaggg

SEQ ID NO: 389185 - RNA, 18 nt, Human
cgggaggacccgggcgca

SEQ ID NO: 389186 - RNA, 21 nt, Human
cgggaggacccgggcgcagua

SEQ ID NO: 389187 - RNA, 22 nt, Human
cgggaggacgacgguggagccg

SEQ ID NO: 389188 - RNA, 32 nt, Human
cgggaggacgcggaagaggagccccgggggua

SEQ ID NO: 389189 - RNA, 25 nt, Human
cgggaggacgcugucgucccgggga

SEQ ID NO: 389190 - RNA, 21 nt, Human
cgggaggacugcuugaggcca

SEQ ID NO: 389191 - RNA, 32 nt, Human
cgggaggagcagcguguggaaauggugaccuu

SEQ ID NO: 389192 - RNA, 24 nt, Human
cgggaggagccggguagccgccug

SEQ ID NO: 389193 - RNA, 32 nt, Human
cgggaggaggaggaggagguugcagugagccg

SEQ ID NO: 389194 - RNA, 32 nt, Human
cgggaggagggaguggagagacugacuggccg

SEQ ID NO: 389195 - RNA, 22 nt, Human
cgggaggagguggaggaggagg

SEQ ID NO: 389196 - RNA, 19 nt, Human
cgggaggaguggcagcggc

SEQ ID NO: 389197 - RNA, 32 nt, Human
cgggaggaucacaccucgacacccaaccccug

SEQ ID NO: 389198 - RNA, 21 nt, Human
cgggaggaucacuugaggcca

SEQ ID NO: 389199 - RNA, 32 nt, Human
cgggaggaucacuugaguccaggaguuugaga

SEQ ID NO: 389200 - RNA, 21 nt, Human
cgggaggaucgcuugagacca

SEQ ID NO: 389201 - RNA, 20 nt, Human
cgggaggaucgcuugagcca

SEQ ID NO: 389202 - RNA, 24 nt, Human
cgggaggauggacacgaugagcuc

SEQ ID NO: 389203 - RNA, 19 nt, Human
cgggaggauuccagaacag

SEQ ID NO: 389204 - RNA, 21 nt, Human
cgggaggauugcuugaggcca

SEQ ID NO: 389205 - RNA, 32 nt, Human
cgggaggcagagccggcucagagcagguccac

SEQ ID NO: 389206 - RNA, 32 nt, Human
cgggaggcagaggcugcacucuagccugggca

SEQ ID NO: 389207 - RNA, 19 nt, Human
cgggaggcagagguugcag

SEQ ID NO: 389208 - RNA, 22 nt, Human
cgggaggcagagguugcaguga

SEQ ID NO: 389209 - RNA, 23 nt, Human
cgggaggcagagguugcagugag

SEQ ID NO: 389210 - RNA, 32 nt, Human
cgggaggcagagguuucagggagccaagaaug

SEQ ID NO: 389211 - RNA, 32 nt, Human
cgggaggcagcaacgaggcgggcggcgacgcg

SEQ ID NO: 389212 - RNA, 31 nt, Human
cgggaggccaacgccgaggcgggcggaucau

SEQ ID NO: 389213 - RNA, 32 nt, Human
cgggaggccaaggcaggagaauugcucgaacu

SEQ ID NO: 389214 - RNA, 18 nt, Human
cgggaggccgcuggcugc

SEQ ID NO: 389215 - RNA, 22 nt, Human
cgggaggcgaagguugcaguga

SEQ ID NO: 389216 - RNA, 23 nt, Human
cgggaggcgaagguugcagugag

SEQ ID NO: 389217 - RNA, 32 nt, Human
cgggaggcggcagcggcugcagcguugguagc

SEQ ID NO: 389218 - RNA, 32 nt, Human
cgggaggcggggguuggcgugccugaggguga

SEQ ID NO: 389219 - RNA, 32 nt, Human
cgggaggcugaggcaggagaaucucuuucuua

SEQ ID NO: 389220 - RNA, 32 nt, Human
cgggaggcugaggcaggagaauuguuugaacc

SEQ ID NO: 389221 - RNA, 32 nt, Human
cgggaggcugaggcagggagaaucgcuugaac

SEQ ID NO: 389222 - RNA, 32 nt, Human
cgggaggcugagguagagaaucgcuugaaccu

SEQ ID NO: 389223 - RNA, 32 nt, Human
cgggaggcugcagggaugccagcugggagaug

SEQ ID NO: 389224 - RNA, 32 nt, Human
cgggaggcugcccugagcaggagcauggagcu

SEQ ID NO: 389225 - RNA, 32 nt, Human
cgggaggcugccgccucgggacaccccacuca

SEQ ID NO: 389226 - RNA, 32 nt, Human
cgggaggcuguaauccuagcuacucgggaggc

SEQ ID NO: 389227 - RNA, 32 nt, Human
cgggagggaacuccaggggaagugaggggaga

SEQ ID NO: 389228 - RNA, 32 nt, Human
cgggagggagagacagagacagagccgauggg

SEQ ID NO: 389229 - RNA, 32 nt, Human
cgggagggagagauucuagggaacaaggaagc

SEQ ID NO: 389230 - RNA, 32 nt, Human
cgggagggaggcaaaugagcauugagaaauuc

SEQ ID NO: 389231 - RNA, 32 nt, Human
cgggagggaggcacccggccggcuggaccuaa

SEQ ID NO: 389232 - RNA, 32 nt, Human
cgggagggaggcgggagucgggggaagacgcg

SEQ ID NO: 389233 - RNA, 32 nt, Human
cgggagggaggggugugcaggagccgcagggc

SEQ ID NO: 389234 - RNA, 32 nt, Human
cgggagggaguggagaaggaggugagggggcc

SEQ ID NO: 389235 - RNA, 32 nt, Human
cgggagggauggagggaggcaggcuggggaga

SEQ ID NO: 389236 - RNA, 20 nt, Human
cgggaggggaagggcugcuc

SEQ ID NO: 389237 - RNA, 32 nt, Human
cgggaggggaggcuccucuccaugguccagaa

SEQ ID NO: 389238 - RNA, 32 nt, Human
cgggaggggaggugacggcuggugacugaugg

SEQ ID NO: 389239 - RNA, 32 nt, Human
cgggaggggguagaguuggcagguuugacucc

SEQ ID NO: 389240 - RNA, 32 nt, Human
cgggaggggucuccuccucucugcugcccagu

SEQ ID NO: 389241 - RNA, 32 nt, Human
cgggagggugcaggcaggagagggaaaggcag

SEQ ID NO: 389242 - RNA, 22 nt, Human
cgggagguagagguugcaguga

SEQ ID NO: 389243 - RNA, 23 nt, Human
cgggagguagagguugcagugag

SEQ ID NO: 389244 - RNA, 18 nt, Human
cgggagguccugcaggag

SEQ ID NO: 389245 - RNA, 22 nt, Human
cgggaggucgaggcuacaguga

SEQ ID NO: 389246 - RNA, 32 nt, Human
cgggagguggagguggagguugcagugagccg

SEQ ID NO: 389247 - RNA, 32 nt, Human
cgggagguggagguggcagugagccgagauca

SEQ ID NO: 389248 - RNA, 32 nt, Human
cgggagguggagguggcagugagccgagauug

SEQ ID NO: 389249 - RNA, 21 nt, Human
cgggagguggagguuacagug

SEQ ID NO: 389250 - RNA, 20 nt, Human
cgggagguggagguugcagu

SEQ ID NO: 389251 - RNA, 22 nt, Human
cgggagguggagguugcaguga

SEQ ID NO: 389252 - RNA, 23 nt, Human
cgggagguggagguugcagugag

SEQ ID NO: 389253 - RNA, 32 nt, Human
cgggagguucuggagaccugggugacggaaga

SEQ ID NO: 389254 - RNA, 32 nt, Human
cgggaguacugccucccaggcccugugcucug

SEQ ID NO: 389255 - RNA, 32 nt, Human
cgggaguagagcagccucgccucccagcugga

SEQ ID NO: 389256 - RNA, 21 nt, Human
cgggaguccagccccaaggga

SEQ ID NO: 389257 - RNA, 32 nt, Human
cgggaguccauggcaaaugauguggauaaaga

SEQ ID NO: 389258 - RNA, 20 nt, Human
cgggagucccuugcucaggg

SEQ ID NO: 389259 - RNA, 32 nt, Human
cgggagucgggugggaucccaggcugggcccc

SEQ ID NO: 389260 - RNA, 32 nt, Human
cgggagugaggcuggugcaggagcaguucugc

SEQ ID NO: 389261 - RNA, 32 nt, Human
cgggagugagucacucucucucugugccaggc

SEQ ID NO: 389262 - RNA, 18 nt, Human
cgggagugccccaccacg

SEQ ID NO: 389263 - RNA, 19 nt, Human
cgggagugcccuuggcuca

SEQ ID NO: 389264 - RNA, 32 nt, Human
cgggagugcucaccuccagcuacuguguccau

SEQ ID NO: 389265 - RNA, 32 nt, Human
cgggagugguuaaauguuaaauuuaacgaugu

SEQ ID NO: 389266 - RNA, 32 nt, Human
cgggaguugcagugaacccagccacccgcucg

SEQ ID NO: 389267 - RNA, 32 nt, Human
cgggaguuggggaagggaaggagccaggaagc

SEQ ID NO: 389268 - RNA, 32 nt, Human
cgggaguuggucccccuuccucccacuggaca

SEQ ID NO: 389269 - RNA, 32 nt, Human
cgggaguugucagcugaugccugcugagaggc

SEQ ID NO: 389270 - RNA, 32 nt, Human
cgggauaacaauaguagguaacaccgagugcu

SEQ ID NO: 389271 - RNA, 32 nt, Human
cgggaucacuggggcucuuugugagugagggu

SEQ ID NO: 389272 - RNA, 32 nt, Human
cgggaucagagcacugagaaacuccagaggcu

SEQ ID NO: 389273 - RNA, 32 nt, Human
cgggaucagaugggaagcagaagcucaucaug

SEQ ID NO: 389274 - RNA, 24 nt, Human
cgggaucagcaacccuuccugcug

SEQ ID NO: 389275 - RNA, 32 nt, Human
cgggauccucugccgcccucucugccacgcgg

SEQ ID NO: 389276 - RNA, 32 nt, Human
cgggaucgcaccacugcacuccagccugggcu

SEQ ID NO: 389277 - RNA, 32 nt, Human
cgggaucgcaccacugcacuccagccuggguu

SEQ ID NO: 389278 - RNA, 32 nt, Human
cgggaucgcaccgcugcacuccagccugggug

SEQ ID NO: 389279 - RNA, 32 nt, Human
cgggaucgcagguagagcaggacgcugcagcg

SEQ ID NO: 389280 - RNA, 21 nt, Human
cgggaucgccaccuccugccu

SEQ ID NO: 389281 - RNA, 32 nt, Human
cgggaucgcgccacugcauuccagccuggacg

SEQ ID NO: 389282 - RNA, 32 nt, Human
cgggaucggcugggugaggcugggcaggccug

SEQ ID NO: 389283 - RNA, 32 nt, Human
cgggaucucuggagauaaaggcaguugagaau

SEQ ID NO: 389284 - RNA, 32 nt, Human
cgggaugaaaggagggaacgcaggugagaaag

SEQ ID NO: 389285 - RNA, 29 nt, Human
cgggaugagagggagccaucgggccgcgc

SEQ ID NO: 389286 - RNA, 32 nt, Human
cgggaugaggucagaggccccaccugauuuuc

SEQ ID NO: 389287 - RNA, 29 nt, Human
cgggaugcagccgccggugcccgggcccc

SEQ ID NO: 389288 - RNA, 32 nt, Human
cgggaugcuuugggcauguccucuggagcccc

SEQ ID NO: 389289 - RNA, 29 nt, Human
cgggauggccuucauggagaagccgccag

SEQ ID NO: 389290 - RNA, 32 nt, Human
cgggaugggagaccccacuuuagaaagggucg

SEQ ID NO: 389291 - RNA, 32 nt, Human
cgggaugggaggcggcccuggccgcaagcccc

SEQ ID NO: 389292 - RNA, 29 nt, Human
cgggaugggcggggaggcugggugcgcgg

SEQ ID NO: 389293 - RNA, 32 nt, Human
cgggauggucucaaucuccugaccucgugauc

SEQ ID NO: 389294 - RNA, 32 nt, Human
cgggaugucgcaccuguggacuccaggggcca

SEQ ID NO: 389295 - RNA, 32 nt, Human
cgggauuagagcccuccagaauacccaucaua

SEQ ID NO: 389296 - RNA, 32 nt, Human
cgggauucagcaaugguggaauggaagacaga

SEQ ID NO: 389297 - RNA, 32 nt, Human
cgggauucagcaccaggcucuucccaguaccc

SEQ ID NO: 389298 - RNA, 32 nt, Human
cgggauucaggcaucccucccugacauggaga

SEQ ID NO: 389299 - RNA, 32 nt, Human
cgggauuccagccuuggucuuccgggguaagc

SEQ ID NO: 389300 - RNA, 32 nt, Human
cgggauuccuggaagagacggggauuuggggg

SEQ ID NO: 389301 - RNA, 32 nt, Human
cgggauucuccuccgcuuccuuuucucggucu

SEQ ID NO: 389302 - RNA, 32 nt, Human
cgggauugagcagcugagggcaggugccacgu

SEQ ID NO: 389303 - RNA, 23 nt, Human
cgggauugcaaagaugacuguca

SEQ ID NO: 389304 - RNA, 32 nt, Human
cgggauugcaccacugcacuccagccugggcu

SEQ ID NO: 389305 - RNA, 32 nt, Human
cgggauugcgccacugcacuccagccugggug

SEQ ID NO: 389306 - RNA, 32 nt, Human
cgggauugcgccagugcacuccagcugggcga

SEQ ID NO: 389307 - RNA, 32 nt, Human
cgggauugcuugaguccagccugggcaguaua

SEQ ID NO: 389308 - RNA, 32 nt, Human
cgggauuggaugacugauuauuggacagaaug

SEQ ID NO: 389309 - RNA, 32 nt, Human
cgggauugggaauccgcccaucugggggccuc

SEQ ID NO: 389310 - RNA, 18 nt, Human
cgggauuggggcgcgagg

SEQ ID NO: 389311 - RNA, 32 nt, Human
cgggauuuauucagccuuggucagagcagaaa

SEQ ID NO: 389312 - RNA, 32 nt, Human
cgggauuuucagaaguuagccugaauuuaacu

SEQ ID NO: 389313 - RNA, 22 nt, Human
cgggauuuuuguugauggcuga

SEQ ID NO: 389314 - RNA, 32 nt, Human
cgggcaaagauggcggcggccagguguuggag

SEQ ID NO: 389315 - RNA, 32 nt, Human
cgggcaacacccuucucgcagccugggccucu

SEQ ID NO: 389316 - RNA, 32 nt, Human
cgggcaacauggugaaaccccgucucuacaaa

SEQ ID NO: 389317 - RNA, 32 nt, Human
cgggcaacgagguuucucugucauucacagaa

SEQ ID NO: 389318 - RNA, 32 nt, Human
cgggcaagcaguuggcuucgcccacacggugu

SEQ ID NO: 389319 - RNA, 32 nt, Human
cgggcaagcaugccucuucccuucccuggaga

SEQ ID NO: 389320 - RNA, 32 nt, Human
cgggcaagccccgguggaaguccaaggaaaag

SEQ ID NO: 389321 - RNA, 32 nt, Human
cgggcaagguggaggcagaguuugagcugcug

SEQ ID NO: 389322 - RNA, 20 nt, Human
cgggcacaccuucucccggg

SEQ ID NO: 389323 - RNA, 32 nt, Human
cgggcacaguuggcucaugccugugaucccaa

SEQ ID NO: 389324 - RNA, 32 nt, Human
cgggcacauccuggcccacuucaagaggggcu

SEQ ID NO: 389325 - RNA, 32 nt, Human
cgggcaccagccgcuuccugugcccaucgcac

SEQ ID NO: 389326 - RNA, 32 nt, Human
cgggcaccaugggccacuccaggaugggacac

SEQ ID NO: 389327 - RNA, 32 nt, Human
cgggcacccaggcugcagugugugagggggcu

SEQ ID NO: 389328 - RNA, 32 nt, Human
cgggcaccgcggaggcuggagccgcaauggug

SEQ ID NO: 389329 - RNA, 32 nt, Human
cgggcaccgucccacagcaucuccuagaagca

SEQ ID NO: 389330 - RNA, 32 nt, Human
cgggcaccugcagcugcugcuguggcugccag

SEQ ID NO: 389331 - RNA, 32 nt, Human
cgggcaccuguaaucccagccacuugggaggc

SEQ ID NO: 389332 - RNA, 32 nt, Human
cgggcaccuguaaucccagcuacucaggaggc

SEQ ID NO: 389333 - RNA, 32 nt, Human
cgggcaccuguaaucccagcuacucgggaggc

SEQ ID NO: 389334 - RNA, 32 nt, Human
cgggcaccuguaaucccagcuacuugggaggc

SEQ ID NO: 389335 - RNA, 32 nt, Human
cgggcaccuguaaucccagcuacuuggguggc

SEQ ID NO: 389336 - RNA, 32 nt, Human
cgggcaccuguaauccuggcuacucgggaggc

SEQ ID NO: 389337 - RNA, 32 nt, Human
cgggcaccuuggcagcccccagcuggguggcu

SEQ ID NO: 389338 - RNA, 18 nt, Human
cgggcacgcagggccuga

SEQ ID NO: 389339 - RNA, 32 nt, Human
cgggcacggagguaacguggaccuggacggug

SEQ ID NO: 389340 - RNA, 32 nt, Human
cgggcacucucaggcaaccccaccucccccuc

SEQ ID NO: 389341 - RNA, 32 nt, Human
cgggcagaaggagcgugagcccaaugauuggg

SEQ ID NO: 389342 - RNA, 32 nt, Human
cgggcagaaugagauuguccacacuggcccca

SEQ ID NO: 389343 - RNA, 32 nt, Human
cgggcagagaaaugccagcugcaccagggcuc

SEQ ID NO: 389344 - RNA, 32 nt, Human
cgggcagagagggaaggagggaggaggcaucu

SEQ ID NO: 389345 - RNA, 23 nt, Human
cgggcagaucaccugagaucagg

SEQ ID NO: 389346 - RNA, 32 nt, Human
cgggcagaucacgaggccaggaguucgagacc

SEQ ID NO: 389347 - RNA, 23 nt, Human
cgggcagaucacuugaggucagg

SEQ ID NO: 389348 - RNA, 32 nt, Human
cgggcagcacggugcagcggugcaguggcaag

SEQ ID NO: 389349 - RNA, 32 nt, Human
cgggcagcagagacgcaccucacuuccuagac

SEQ ID NO: 389350 - RNA, 18 nt, Human
cgggcagcagcgacagga

SEQ ID NO: 389351 - RNA, 32 nt, Human
cgggcagcaugguucacuccagcaugggggcu

SEQ ID NO: 389352 - RNA, 32 nt, Human
cgggcagccaggcugggccgcaagggccugga

SEQ ID NO: 389353 - RNA, 22 nt, Human
cgggcagccccagcccccgucc

SEQ ID NO: 389354 - RNA, 32 nt, Human
cgggcagccgagaagaacagacgcucuuuaag

SEQ ID NO: 389355 - RNA, 32 nt, Human
cgggcagccuggagcuuccugcagccuccuac

SEQ ID NO: 389356 - RNA, 32 nt, Human
cgggcagcggcgcagacccagcaaggaccggc

SEQ ID NO: 389357 - RNA, 16 nt, Human
cgggcagcggcgcgag

SEQ ID NO: 389358 - RNA, 32 nt, Human
cgggcagcuccagggauguggccucauugcug

SEQ ID NO: 389359 - RNA, 32 nt, Human
cgggcagcucuccccucacucuccuccaccug

SEQ ID NO: 389360 - RNA, 25 nt, Human
cgggcagcuggaaaguccuccucca

SEQ ID NO: 389361 - RNA, 32 nt, Human
cgggcagcuguuccuucccccgacucaagaau

SEQ ID NO: 389362 - RNA, 32 nt, Human
cgggcaggacaguuggguguggccugggcuca

SEQ ID NO: 389363 - RNA, 32 nt, Human
cgggcaggagcaacccagaagcaccggugagg

SEQ ID NO: 389364 - RNA, 32 nt, Human
cgggcaggaggcggcggcagcagcgggaccga

SEQ ID NO: 389365 - RNA, 32 nt, Human
cgggcaggcccagggagcaggcagcaguguuc

SEQ ID NO: 389366 - RNA, 32 nt, Human
cgggcaggccccauccugcuucugcugcugug

SEQ ID NO: 389367 - RNA, 32 nt, Human
cgggcaggcggguggggcaggcugggggcugg

SEQ ID NO: 389368 - RNA, 32 nt, Human
cgggcagggaccugcaggaggcuuucccagca

SEQ ID NO: 389369 - RNA, 21 nt, Human
cgggcagggcugccuccucac

SEQ ID NO: 389370 - RNA, 32 nt, Human
cgggcagguacacgacauucuugggcauacgc

SEQ ID NO: 389371 - RNA, 32 nt, Human
cgggcaggugggaggcacgggguugcggaucc

SEQ ID NO: 389372 - RNA, 32 nt, Human
cgggcagucgacuucggggcccagggaccaac

SEQ ID NO: 389373 - RNA, 32 nt, Human
cgggcagucugcccaagugucuuaggaaccaa

SEQ ID NO: 389374 - RNA, 32 nt, Human
cgggcagugucacacccugccugcucaguccu

SEQ ID NO: 389375 - RNA, 32 nt, Human
cgggcaguguuagaggaggagaugggagcggu

SEQ ID NO: 389376 - RNA, 32 nt, Human
cgggcaucaggagccagccacagggaugucug

SEQ ID NO: 389377 - RNA, 32 nt, Human
cgggcaucugguugaccccagccuggggagga

SEQ ID NO: 389378 - RNA, 32 nt, Human
cgggcaugaaggaggauggaagggcaggacga

SEQ ID NO: 389379 - RNA, 32 nt, Human
cgggcaugagcugagagcaccacgccgaggcc

SEQ ID NO: 389380 - RNA, 32 nt, Human
cgggcauugugguggugcaugccuguaacccc

SEQ ID NO: 389381 - RNA, 32 nt, Human
cgggccaacauggugaaaccccaucucuacaa

SEQ ID NO: 389382 - RNA, 32 nt, Human
cgggccaacauggugaaaccccaucucugcua

SEQ ID NO: 389383 - RNA, 32 nt, Human
cgggccaacauggugcaaccucgucuuuacua

SEQ ID NO: 389384 - RNA, 32 nt, Human
cgggccaagacgcugcaacagcucagcgcggc

SEQ ID NO: 389385 - RNA, 32 nt, Human
cgggccaaggacaggcagggagggaggccagg

SEQ ID NO: 389386 - RNA, 18 nt, Human
cgggccacagagaaagua

SEQ ID NO: 389387 - RNA, 32 nt, Human
cgggccacagccgggucacguggccggcggcc

SEQ ID NO: 389388 - RNA, 32 nt, Human
cgggccacaggcagggucagauugagaagaag

SEQ ID NO: 389389 - RNA, 32 nt, Human
cgggccaccaaguucuggaaaccacguggugu

SEQ ID NO: 389390 - RNA, 18 nt, Human
cgggccacccaccccagu

SEQ ID NO: 389391 - RNA, 17 nt, Human
cgggccacccggcucag

SEQ ID NO: 389392 - RNA, 17 nt, Human
cgggccaccgccggcag

SEQ ID NO: 389393 - RNA, 19 nt, Human
cgggccaccugccgcagug

SEQ ID NO: 389394 - RNA, 17 nt, Human
cgggccaccuguaacag

SEQ ID NO: 389395 - RNA, 32 nt, Human
cgggccacggcacuccagccugggugacagag

SEQ ID NO: 389396 - RNA, 32 nt, Human
cgggccacugcacuccagcuugggugacagag

SEQ ID NO: 389397 - RNA, 32 nt, Human
cgggccacugcccuuuagacugggcaacagag

SEQ ID NO: 389398 - RNA, 18 nt, Human
cgggccagacgcgcugca

SEQ ID NO: 389399 - RNA, 19 nt, Human
cgggccagaggcagagccc

SEQ ID NO: 389400 - RNA, 32 nt, Human
cgggccagcauggugaaaccccgucucuacua

SEQ ID NO: 389401 - RNA, 32 nt, Human
cgggccagccaagauggcggccucaugcuugg

SEQ ID NO: 389402 - RNA, 18 nt, Human
cgggccagccuuggugca

SEQ ID NO: 389403 - RNA, 22 nt, Human
cgggccagccuuucccuuaagg

SEQ ID NO: 389404 - RNA, 15 nt, Human
cgggccagcggugca

SEQ ID NO: 389405 - RNA, 32 nt, Human
cgggccagcucuuaaggaguucaggagugaga

SEQ ID NO: 389406 - RNA, 16 nt, Human
cgggccagggggcgca

SEQ ID NO: 389407 - RNA, 20 nt, Human
cgggccagguaggaggcaag

SEQ ID NO: 389408 - RNA, 20 nt, Human
cgggccaggucuggcgccag

SEQ ID NO: 389409 - RNA, 32 nt, Human
cgggccagucucaaacuccugacgucaaguga

SEQ ID NO: 389410 - RNA, 32 nt, Human
cgggccaguuucucccucuucaccccugcgcc

SEQ ID NO: 389411 - RNA, 32 nt, Human
cgggccaugucgacgucacacauauuaauguc

SEQ ID NO: 389412 - RNA, 32 nt, Human
cgggccauugacacauggacucugccugggca

SEQ ID NO: 389413 - RNA, 32 nt, Human
cgggcccaagcccugccccuccagaguccaga

SEQ ID NO: 389414 - RNA, 23 nt, Human
cgggcccacuccccguucuccca

SEQ ID NO: 389415 - RNA, 32 nt, Human
cgggcccagaggagcugggagccgggccgcag

SEQ ID NO: 389416 - RNA, 32 nt, Human
cgggcccaggcagagagcgaccagcaggcucc

SEQ ID NO: 389417 - RNA, 32 nt, Human
cgggcccagguaguccucccaccucagccucc

SEQ ID NO: 389418 - RNA, 20 nt, Human
cgggcccaggucacacagca

SEQ ID NO: 389419 - RNA, 17 nt, Human
cgggcccagugcccugg

SEQ ID NO: 389420 - RNA, 32 nt, Human
cgggcccauccccucccuguuggcggccucua

SEQ ID NO: 389421 - RNA, 32 nt, Human
cgggccccagcccuggagcugcaggaguuggg

SEQ ID NO: 389422 - RNA, 18 nt, Human
cgggcccccaacccccca

SEQ ID NO: 389423 - RNA, 19 nt, Human
cgggcccccgccgccccgc

SEQ ID NO: 389424 - RNA, 32 nt, Human
cgggcccccggcaugcagccccggcugcggag

SEQ ID NO: 389425 - RNA, 21 nt, Human
cgggcccccguagucccagcu

SEQ ID NO: 389426 - RNA, 32 nt, Human
cgggcccccugccuccgccauguuccgcaggg

SEQ ID NO: 389427 - RNA, 20 nt, Human
cgggcccccuuccccaggcc

SEQ ID NO: 389428 - RNA, 24 nt, Human
cgggccccgcgcggggauccggcu

SEQ ID NO: 389429 - RNA, 20 nt, Human
cgggccccgcgucccagccc

SEQ ID NO: 389430 - RNA, 18 nt, Human
cgggccccgcguccuccc

SEQ ID NO: 389431 - RNA, 19 nt, Human
cgggccccgcuguccuccc

SEQ ID NO: 389432 - RNA, 18 nt, Human
cgggccccguccuggggu

SEQ ID NO: 389433 - RNA, 32 nt, Human
cgggccccuaggggagauggugcagugggcgg

SEQ ID NO: 389434 - RNA, 21 nt, Human
cgggccccucaccccagcuga

SEQ ID NO: 389435 - RNA, 20 nt, Human
cgggccccucagcccucugg

SEQ ID NO: 389436 - RNA, 27 nt, Human
cgggccccuggaccacgggguccaccu

SEQ ID NO: 389437 - RNA, 20 nt, Human
cgggccccuggggguggcug

SEQ ID NO: 389438 - RNA, 24 nt, Human
cgggccccuggucaagugcuggcu

SEQ ID NO: 389439 - RNA, 21 nt, Human
cgggccccuguaaucccagcu

SEQ ID NO: 389440 - RNA, 32 nt, Human
cgggccccuguaaucccagcuacucgggaggc

SEQ ID NO: 389441 - RNA, 32 nt, Human
cgggccccuguagauggcauuuuugcaggcug

SEQ ID NO: 389442 - RNA, 21 nt, Human
cgggccccuguagucccagcu

SEQ ID NO: 389443 - RNA, 19 nt, Human
cgggccccuucuuuccccg

SEQ ID NO: 389444 - RNA, 32 nt, Human
cgggcccgagcgcagaccaggcuccagccgcg

SEQ ID NO: 389445 - RNA, 22 nt, Human
cgggcccgaucucgggcgggaa

SEQ ID NO: 389446 - RNA, 32 nt, Human
cgggcccgcacucaggagcacagccauagcag

SEQ ID NO: 389447 - RNA, 32 nt, Human
cgggcccgcgcaggcccccaccccuugagcac

SEQ ID NO: 389448 - RNA, 22 nt, Human
cgggcccggcgcgcgcgggaag

SEQ ID NO: 389449 - RNA, 32 nt, Human
cgggcccgggcacuggugggugacagucauac

SEQ ID NO: 389450 - RNA, 32 nt, Human
cgggcccgguggaggcugcagugagacgagau

SEQ ID NO: 389451 - RNA, 32 nt, Human
cgggcccguucccuccugcucucuggugcucc

SEQ ID NO: 389452 - RNA, 19 nt, Human
cgggcccuacaggagccug

SEQ ID NO: 389453 - RNA, 21 nt, Human
cgggcccucagccagcuggcu

SEQ ID NO: 389454 - RNA, 25 nt, Human
cgggcccuccuggaggaguccuguu

SEQ ID NO: 389455 - RNA, 20 nt, Human
cgggcccucgccggcccggc

SEQ ID NO: 389456 - RNA, 32 nt, Human
cgggcccucucauccuucauuccauuaaaucc

SEQ ID NO: 389457 - RNA, 21 nt, Human
cgggcccucugcgaccugggg

SEQ ID NO: 389458 - RNA, 32 nt, Human
cgggcccugcgcugccugucauggcucaugag

SEQ ID NO: 389459 - RNA, 24 nt, Human
cgggcccugcgucagguugcaguu

SEQ ID NO: 389460 - RNA, 32 nt, Human
cgggcccuucauuccucuccaugcugcaauca

SEQ ID NO: 389461 - RNA, 32 nt, Human
cgggccgagcccacaacuuugcagccucgggc

SEQ ID NO: 389462 - RNA, 19 nt, Human
cgggccgagccccgggcgc

SEQ ID NO: 389463 - RNA, 32 nt, Human
cgggccgagccgcggggcggggccgccccucc

SEQ ID NO: 389464 - RNA, 32 nt, Human
cgggccgcagagcccaugagggcgcgggcacc

SEQ ID NO: 389465 - RNA, 32 nt, Human
cgggccgcagggccaugaaacuacaggccgug

SEQ ID NO: 389466 - RNA, 22 nt, Human
cgggccgccacagccgccggcc

SEQ ID NO: 389467 - RNA, 18 nt, Human
cgggccgcggcccgggag

SEQ ID NO: 389468 - RNA, 32 nt, Human
cgggccgcggccgccuccaugaagcggaaaag

SEQ ID NO: 389469 - RNA, 32 nt, Human
cgggccgcugcacuccagccugggggacagag

SEQ ID NO: 389470 - RNA, 21 nt, Human
cgggccgcugcagcuccagga

SEQ ID NO: 389471 - RNA, 32 nt, Human
cgggccggaccacccugacaucccgagaaguc

SEQ ID NO: 389472 - RNA, 32 nt, Human
cgggccggacgggccggggcagaggaggcgag

SEQ ID NO: 389473 - RNA, 32 nt, Human
cgggccggagagcugggagcacaggucccggc

SEQ ID NO: 389474 - RNA, 32 nt, Human
cgggccggagcgggcuccagagacaugggguc

SEQ ID NO: 389475 - RNA, 32 nt, Human
cgggccggagggcugcagucucccucgcggug

SEQ ID NO: 389476 - RNA, 32 nt, Human
cgggccgggaagcagagccuggucgugaggaa

SEQ ID NO: 389477 - RNA, 32 nt, Human
cgggccgggccgggcccaggagcgcgcggaug

SEQ ID NO: 389478 - RNA, 32 nt, Human
cgggccggggacccacucugcccagccggagg

SEQ ID NO: 389479 - RNA, 32 nt, Human
cgggccggggcccugccugaggccaucgccgc

SEQ ID NO: 389480 - RNA, 32 nt, Human
cgggccgggggugggagcgggggccggagccg

SEQ ID NO: 389481 - RNA, 32 nt, Human
cgggccgggucugaagcgccgccgggacggcg

SEQ ID NO: 389482 - RNA, 19 nt, Human
cgggccgguggggcguaag

SEQ ID NO: 389483 - RNA, 32 nt, Human
cgggccgugagaggggacgggucaggagccuu

SEQ ID NO: 389484 - RNA, 17 nt, Human
cgggccgugcagagcag

SEQ ID NO: 389485 - RNA, 32 nt, Human
cgggccgugcgcucugcacuccggagcgguuc

SEQ ID NO: 389486 - RNA, 32 nt, Human
cgggccuacgcgcucaccugacgccccggccg

SEQ ID NO: 389487 - RNA, 32 nt, Human
cgggccuaggcucaucuccacaggggagaaca

SEQ ID NO: 389488 - RNA, 32 nt, Human
cgggccuagggaggaggagcgagaaucagccu

SEQ ID NO: 389489 - RNA, 32 nt, Human
cgggccucagcugcggccacagcuccagaucg

SEQ ID NO: 389490 - RNA, 31 nt, Human
cgggccucagggccggccuggcagccgggga

SEQ ID NO: 389491 - RNA, 32 nt, Human
cgggccuccagccacagccugcuggcaugggg

SEQ ID NO: 389492 - RNA, 32 nt, Human
cgggccuccagccuggacuucccagccccucu

SEQ ID NO: 389493 - RNA, 18 nt, Human
cgggccuccaggugcagg

SEQ ID NO: 389494 - RNA, 21 nt, Human
cgggccuccgccgccgccacu

SEQ ID NO: 389495 - RNA, 22 nt, Human
cgggccuccgcguccuccugcu

SEQ ID NO: 389496 - RNA, 25 nt, Human
cgggccuccggaggcagguucggcu

SEQ ID NO: 389497 - RNA, 21 nt, Human
cgggccuccggcggcccggcu

SEQ ID NO: 389498 - RNA, 18 nt, Human
cgggccucgcuuccccca

SEQ ID NO: 389499 - RNA, 22 nt, Human
cgggccucugagcaggugcagg

SEQ ID NO: 389500 - RNA, 22 nt, Human
cgggccucugccauagcccggc

SEQ ID NO: 389501 - RNA, 32 nt, Human
cgggccucugggcagaggaugcaauggcacgg

SEQ ID NO: 389502 - RNA, 32 nt, Human
cgggccugagccugagagcucagaggauuccu

SEQ ID NO: 389503 - RNA, 32 nt, Human
cgggccugccccugcccccucucuggagcccu

SEQ ID NO: 389504 - RNA, 21 nt, Human
cgggccuggcgcggagccuga

SEQ ID NO: 389505 - RNA, 32 nt, Human
cgggccuggcugaggcggagguuguugcggau

SEQ ID NO: 389506 - RNA, 32 nt, Human
cgggccuggggucaccgaggggugcggggcuc

SEQ ID NO: 389507 - RNA, 32 nt, Human
cgggccuguggaagaagccccgccacggacuu

SEQ ID NO: 389508 - RNA, 32 nt, Human
cgggccuguggucccagcugcucgggagguug

SEQ ID NO: 389509 - RNA, 21 nt, Human
cgggccuucggcagaugcagg

SEQ ID NO: 389510 - RNA, 32 nt, Human
cgggccuuucagcuuggucuuuccgggccucg

SEQ ID NO: 389511 - RNA, 32 nt, Human
cgggcgagccggccggggcugaauggagggaa

SEQ ID NO: 389512 - RNA, 32 nt, Human
cgggcgaggaagaaaaauaagcuuuuccaauc

SEQ ID NO: 389513 - RNA, 32 nt, Human
cgggcgagugggcggaggcggcugcggggaag

SEQ ID NO: 389514 - RNA, 32 nt, Human
cgggcgauggcugugguccuucugcuaaugca

SEQ ID NO: 389515 - RNA, 32 nt, Human
cgggcgauucuccugccccagccucuugagug

SEQ ID NO: 389516 - RNA, 31 nt, Human
cgggcgcacagcuaugcuggagcucugcagg

SEQ ID NO: 389517 - RNA, 32 nt, Human
cgggcgcacugaggucuuggccauggggcugc

SEQ ID NO: 389518 - RNA, 32 nt, Human
cgggcgcaguggugccuguaaucccagcaguu

SEQ ID NO: 389519 - RNA, 32 nt, Human
cgggcgccaccaaagccaggcccugaggccug

SEQ ID NO: 389520 - RNA, 32 nt, Human
cgggcgccaggcauuguccagaccuggucggg

SEQ ID NO: 389521 - RNA, 32 nt, Human
cgggcgcccaggacccuggccugcagagacgc

SEQ ID NO: 389522 - RNA, 32 nt, Human
cgggcgcccgggccuuugcuaucucgccgucg

SEQ ID NO: 389523 - RNA, 32 nt, Human
cgggcgccgcgcagauggccugggcgagccag

SEQ ID NO: 389524 - RNA, 19 nt, Human
cgggcgccgggccggaagg

SEQ ID NO: 389525 - RNA, 32 nt, Human
cgggcgccucugaaguggagggcgggccgccu

SEQ ID NO: 389526 - RNA, 25 nt, Human
cgggcgccugcccagcaggagcuga

SEQ ID NO: 389527 - RNA, 32 nt, Human
cgggcgccuggagccacacagggauccggagc

SEQ ID NO: 389528 - RNA, 32 nt, Human
cgggcgccuguaaucacagcuacuugggaggc

SEQ ID NO: 389529 - RNA, 32 nt, Human
cgggcgccuguaauccaagcuacuggggaggc

SEQ ID NO: 389530 - RNA, 32 nt, Human
cgggcgccuguaaucccagauacucaggaggc

SEQ ID NO: 389531 - RNA, 32 nt, Human
cgggcgccuguaaucccagcuacucaggaggc

SEQ ID NO: 389532 - RNA, 32 nt, Human
cgggcgccuguaaucccagcuacucgggaagc

SEQ ID NO: 389533 - RNA, 32 nt, Human
cgggcgccuguaaucccagcuacucgggaggc

SEQ ID NO: 389534 - RNA, 32 nt, Human
cgggcgccuguaaucccagcuacugagggggc

SEQ ID NO: 389535 - RNA, 32 nt, Human
cgggcgccuguaaucccagcuacuugggaagc

SEQ ID NO: 389536 - RNA, 32 nt, Human
cgggcgccuguaaucccagcuacuugggaggc

SEQ ID NO: 389537 - RNA, 32 nt, Human
cgggcgccuguaaucccagcuacuuggguggc

SEQ ID NO: 389538 - RNA, 32 nt, Human
cgggcgccuguaaucccagcugcuggggaagc

SEQ ID NO: 389539 - RNA, 32 nt, Human
cgggcgccuguaaucccagguacucaggaggc

SEQ ID NO: 389540 - RNA, 32 nt, Human
cgggcgccuguaauccuagcugcuugggaggc

SEQ ID NO: 389541 - RNA, 32 nt, Human
cgggcgccuguaguucuagcuacucuggaggc

SEQ ID NO: 389542 - RNA, 32 nt, Human
cgggcgccuguaucccagcuacucgggaggcu

SEQ ID NO: 389543 - RNA, 32 nt, Human
cgggcgcgagaaggaggagcuggaggagcgcg

SEQ ID NO: 389544 - RNA, 32 nt, Human
cgggcgcggcgcccaccaugcgcggcugccug

SEQ ID NO: 389545 - RNA, 32 nt, Human
cgggcgcgggcagagcgcggcggcgcggagac

SEQ ID NO: 389546 - RNA, 25 nt, Human
cgggcgcugaggacaagggccgcug

SEQ ID NO: 389547 - RNA, 32 nt, Human
cgggcgcugccuggacaggccugccugcgugc

SEQ ID NO: 389548 - RNA, 32 nt, Human
cgggcgcuggaggccgugaggcugcagaacag

SEQ ID NO: 389549 - RNA, 32 nt, Human
cgggcgcuuuucucuccuccaauucagaguag

SEQ ID NO: 389550 - RNA, 32 nt, Human
cgggcggaaccgcagaagcauccccggccgug

SEQ ID NO: 389551 - RNA, 32 nt, Human
cgggcggaagagggaggagaggcgcggggagc

SEQ ID NO: 389552 - RNA, 21 nt, Human
cgggcggagcgggcagcggcc

SEQ ID NO: 389553 - RNA, 32 nt, Human
cgggcggagcuggcccugccucugccuggccg

SEQ ID NO: 389554 - RNA, 32 nt, Human
cgggcggaggggaaggugucuuucaagucggu

SEQ ID NO: 389555 - RNA, 32 nt, Human
cgggcggagggggagagcgcgggccgcgcggg

SEQ ID NO: 389556 - RNA, 32 nt, Human
cgggcggaucacgaggccaggagaucaagacc

SEQ ID NO: 389557 - RNA, 32 nt, Human
cgggcggaucacgaggucaggagaccgagauc

SEQ ID NO: 389558 - RNA, 32 nt, Human
cgggcggaucacgaggucaggagacugagacc

SEQ ID NO: 389559 - RNA, 32 nt, Human
cgggcggaucccgggaaggcggaaggcuucgg

SEQ ID NO: 389560 - RNA, 32 nt, Human
cgggcggcagccgccucugcgcggaccggggc

SEQ ID NO: 389561 - RNA, 32 nt, Human
cgggcggccaggagucaguggcaggcgcggcc

SEQ ID NO: 389562 - RNA, 32 nt, Human
cgggcggccauggagcgagccuagggcccgac

SEQ ID NO: 389563 - RNA, 32 nt, Human
cgggcggcccagguccucuacugugaaggagc

SEQ ID NO: 389564 - RNA, 32 nt, Human
cgggcggccgacgcuccucuucggcggcggcg

SEQ ID NO: 389565 - RNA, 24 nt, Human
cgggcggccgugucgcuccaggga

SEQ ID NO: 389566 - RNA, 32 nt, Human
cgggcggcgcggacgaugagggcccagugagg

SEQ ID NO: 389567 - RNA, 32 nt, Human
cgggcggcgggcgcaccaugcccuccuucgac

SEQ ID NO: 389568 - RNA, 32 nt, Human
cgggcggcggucgccaggucucagggccgggg

SEQ ID NO: 389569 - RNA, 32 nt, Human
cgggcggcugaaggaggggcugagccucagga

SEQ ID NO: 389570 - RNA, 32 nt, Human
cgggcggcugcugaggugagggccgggccaga

SEQ ID NO: 389571 - RNA, 32 nt, Human
cgggcgggacccgcuccucccuuggggucuag

SEQ ID NO: 389572 - RNA, 32 nt, Human
cgggcgggagagagaggccgcggccgccagcg

SEQ ID NO: 389573 - RNA, 32 nt, Human
cgggcgggagagaggaagagaggggagcgcgg

SEQ ID NO: 389574 - RNA, 32 nt, Human
cgggcgggaggaaggccgcugcucgcagggcu

SEQ ID NO: 389575 - RNA, 32 nt, Human
cgggcgggaggcggugguccugggagcggccc

SEQ ID NO: 389576 - RNA, 32 nt, Human
cgggcgggcgccucucggccaggaagcgccuc

SEQ ID NO: 389577 - RNA, 32 nt, Human
cgggcgggcgggacggaggccgggaggccggg

SEQ ID NO: 389578 - RNA, 32 nt, Human
cgggcgggcugggaggaugaggacggcugccc

SEQ ID NO: 389579 - RNA, 32 nt, Human
cgggcggggaggacggcgggggacauggccug

SEQ ID NO: 389580 - RNA, 32 nt, Human
cgggcggggcggccgcugccuccccgggacgg

SEQ ID NO: 389581 - RNA, 32 nt, Human
cgggcggggguacgagggaggaaggggagcaa

SEQ ID NO: 389582 - RNA, 32 nt, Human
cgggcgggugagcgagcagaggcgugggcggc

SEQ ID NO: 389583 - RNA, 32 nt, Human
cgggcggguggacgugaggaccagcccucucc

SEQ ID NO: 389584 - RNA, 32 nt, Human
cgggcggguguggccaggggugugggucugug

SEQ ID NO: 389585 - RNA, 32 nt, Human
cgggcgguaggcagcagcaggcugaagggauc

SEQ ID NO: 389586 - RNA, 32 nt, Human
cgggcgucaccaccggaguggagggcgaggcc

SEQ ID NO: 389587 - RNA, 23 nt, Human
cgggcgucacgccuguaauccca

SEQ ID NO: 389588 - RNA, 32 nt, Human
cgggcguccuuuccccgcuucuucccaccucg

SEQ ID NO: 389589 - RNA, 32 nt, Human
cgggcgucuugguugaaucuuuugcuacaaac

SEQ ID NO: 389590 - RNA, 31 nt, Human
cgggcgugacuucauuggccagaggacgcug

SEQ ID NO: 389591 - RNA, 32 nt, Human
cgggcgugagccaccgcgccuggccaggauuu

SEQ ID NO: 389592 - RNA, 32 nt, Human
cgggcgugaugaucucucugagccgcauccuc

SEQ ID NO: 389593 - RNA, 32 nt, Human
cgggcguggacucuggcgcacucuaguggaca

SEQ ID NO: 389594 - RNA, 31 nt, Human
cgggcguggguggaacagagcggccaggagu

SEQ ID NO: 389595 - RNA, 32 nt, Human
cgggcgugguggcucacgcugaggucaggagu

SEQ ID NO: 389596 - RNA, 32 nt, Human
cgggcgugguggcuucacgccuguaauucuag

SEQ ID NO: 389597 - RNA, 32 nt, Human
cgggcgugguuggcucaugccuguaaucccac

SEQ ID NO: 389598 - RNA, 32 nt, Human
cgggcguucgcuugcugugaauuccuguccuc

SEQ ID NO: 389599 - RNA, 32 nt, Human
cgggcuagaggagcagguacaugugaagauuu

SEQ ID NO: 389600 - RNA, 32 nt, Human
cgggcuaggcccagagacuuggguugcugguc

SEQ ID NO: 389601 - RNA, 32 nt, Human
cgggcuagucauggcguccccgucucggagac

SEQ ID NO: 389602 - RNA, 32 nt, Human
cgggcuauacucuuugaaacugccuuugugag

SEQ ID NO: 389603 - RNA, 32 nt, Human
cgggcucaagcaauccucccaccucagccucc

SEQ ID NO: 389604 - RNA, 24 nt, Human
cgggcucaagcaauccuccugccu

SEQ ID NO: 389605 - RNA, 24 nt, Human
cgggcucaagcgauucuccagccu

SEQ ID NO: 389606 - RNA, 24 nt, Human
cgggcucaagcgauucucucaccu

SEQ ID NO: 389607 - RNA, 24 nt, Human
cgggcucaagcgauucucuugccu

SEQ ID NO: 389608 - RNA, 32 nt, Human
cgggcucaagugacccucccaccucagccucc

SEQ ID NO: 389609 - RNA, 24 nt, Human
cgggcucaagugauucuccucccu

SEQ ID NO: 389610 - RNA, 24 nt, Human
cgggcucaagugguccuccugccu

SEQ ID NO: 389611 - RNA, 24 nt, Human
cgggcucacgccauucuccugccu

SEQ ID NO: 389612 - RNA, 32 nt, Human
cgggcucacugcaagcuccggcucccggguuc

SEQ ID NO: 389613 - RNA, 32 nt, Human
cgggcucacugugcagaccaaugauugacagu

SEQ ID NO: 389614 - RNA, 32 nt, Human
cgggcucagccugggagcccagcgacuacgcu

SEQ ID NO: 389615 - RNA, 32 nt, Human
cgggcucaggccacugcccacccuggccugga

SEQ ID NO: 389616 - RNA, 24 nt, Human
cgggcucaggugauucucccgccu

SEQ ID NO: 389617 - RNA, 24 nt, Human
cgggcuccagcgauucuccugccu

SEQ ID NO: 389618 - RNA, 32 nt, Human
cgggcucccagcugcccaccucauagcgcucc

SEQ ID NO: 389619 - RNA, 32 nt, Human
cgggcuccccauuccucuuugucaggccagcg

SEQ ID NO: 389620 - RNA, 32 nt, Human
cgggcucccccggcuccucuggccuccaugcc

SEQ ID NO: 389621 - RNA, 22 nt, Human
cgggcuccccgcugcuccagcu

SEQ ID NO: 389622 - RNA, 32 nt, Human
cgggcuccccuggcuccucuggccuccaugcc

SEQ ID NO: 389623 - RNA, 19 nt, Human
cgggcuccccuuucgccca

SEQ ID NO: 389624 - RNA, 22 nt, Human
cgggcucccgcccucagccgcu

SEQ ID NO: 389625 - RNA, 24 nt, Human
cgggcucccgcuccgucuccaccu

SEQ ID NO: 389626 - RNA, 22 nt, Human
cgggcucccgucccguccgucu

SEQ ID NO: 389627 - RNA, 32 nt, Human
cgggcucccucggguaccggcgcugccgcacc

SEQ ID NO: 389628 - RNA, 20 nt, Human
cgggcuccgccuuuccccca

SEQ ID NO: 389629 - RNA, 32 nt, Human
cgggcuccuaaugaggugggaaagccacggca

SEQ ID NO: 389630 - RNA, 32 nt, Human
cgggcuccuccacauuaccucgcagccccugc

SEQ ID NO: 389631 - RNA, 32 nt, Human
cgggcuccugacaaccuccuccccucggcgga

SEQ ID NO: 389632 - RNA, 32 nt, Human
cgggcuccugcagccgaagggaauucuccccu

SEQ ID NO: 389633 - RNA, 21 nt, Human
cgggcuccuguagucccagcu

SEQ ID NO: 389634 - RNA, 19 nt, Human
cgggcuccuucuuccuccc

SEQ ID NO: 389635 - RNA, 32 nt, Human
cgggcucgcgcggcgccgccuccugggcucag

SEQ ID NO: 389636 - RNA, 32 nt, Human
cgggcucgcgucauccugcccccgcugcgaug

SEQ ID NO: 389637 - RNA, 24 nt, Human
cgggcucggcagcggggggcccga

SEQ ID NO: 389638 - RNA, 32 nt, Human
cgggcucggcccuguccuccucacaggcuggu

SEQ ID NO: 389639 - RNA, 26 nt, Human
cgggcucggggugccgagguccggcu

SEQ ID NO: 389640 - RNA, 32 nt, Human
cgggcucgucgcuuucuccaucccgacccacg

SEQ ID NO: 389641 - RNA, 32 nt, Human
cgggcucgucgcuuucuccaucccgacccagc

SEQ ID NO: 389642 - RNA, 32 nt, Human
cgggcucucaccggagaccacagggaggagcu

SEQ ID NO: 389643 - RNA, 32 nt, Human
cgggcucucuggaaggccggggagaggccagu

SEQ ID NO: 389644 - RNA, 32 nt, Human
cgggcucugagcuggauugauggggccagucu

SEQ ID NO: 389645 - RNA, 32 nt, Human
cgggcucugggcugacgagagaacaccuggua

SEQ ID NO: 389646 - RNA, 32 nt, Human
cgggcucuucaggagacugagacagagaagac

SEQ ID NO: 389647 - RNA, 24 nt, Human
cgggcucuugacgcucagccagcu

SEQ ID NO: 389648 - RNA, 32 nt, Human
cgggcucuuggagccacuuuccccagcggaac

SEQ ID NO: 389649 - RNA, 32 nt, Human
cgggcugaaccagcuuuguucccaggguggcg

SEQ ID NO: 389650 - RNA, 32 nt, Human
cgggcugaagcgauccucccaccccagccucc

SEQ ID NO: 389651 - RNA, 32 nt, Human
cgggcugacagugagaggaugcagcccggugu

SEQ ID NO: 389652 - RNA, 32 nt, Human
cgggcugagagggaccuggggagcugcggccu

SEQ ID NO: 389653 - RNA, 32 nt, Human
cgggcugaggagaaggaggucagugcucaggg

SEQ ID NO: 389654 - RNA, 32 nt, Human
cgggcugcacuccucaacucugcuccaaagca

SEQ ID NO: 389655 - RNA, 32 nt, Human
cgggcugcauucccaggaguuuaggcauucua

SEQ ID NO: 389656 - RNA, 32 nt, Human
cgggcugccaacugcacucggguacuggugug

SEQ ID NO: 389657 - RNA, 32 nt, Human
cgggcugccagccuguggcacuguccucggug

SEQ ID NO: 389658 - RNA, 20 nt, Human
cgggcugcccccucccgcca

SEQ ID NO: 389659 - RNA, 32 nt, Human
cgggcugcccugcuuugcugccauggagucca

SEQ ID NO: 389660 - RNA, 32 nt, Human
cgggcugcggacucugccuccugggucugagc

SEQ ID NO: 389661 - RNA, 32 nt, Human
cgggcugcgggaauucagccuccggcgggggc

SEQ ID NO: 389662 - RNA, 32 nt, Human
cgggcugcgggaggggaggagagcagagaacg

SEQ ID NO: 389663 - RNA, 32 nt, Human
cgggcugcuccugggcacguggggcgcccagg

SEQ ID NO: 389664 - RNA, 32 nt, Human
cgggcugcucggaggcagaggcagcaagaggc

SEQ ID NO: 389665 - RNA, 32 nt, Human
cgggcugcugcugcccaugcaggagaaaaccu

SEQ ID NO: 389666 - RNA, 32 nt, Human
cgggcugcugggagguaggcagggacuugggc

SEQ ID NO: 389667 - RNA, 32 nt, Human
cgggcuggaagaggcggcggcgugaugcggcc

SEQ ID NO: 389668 - RNA, 32 nt, Human
cgggcuggacagugagccucgagaggagacgc

SEQ ID NO: 389669 - RNA, 32 nt, Human
cgggcuggagacauagcauucauuccuguuca

SEQ ID NO: 389670 - RNA, 32 nt, Human
cgggcuggcaggcgggggaggcugcaggcuca

SEQ ID NO: 389671 - RNA, 32 nt, Human
cgggcuggcagggacuggcaggaggcaggugc

SEQ ID NO: 389672 - RNA, 32 nt, Human
cgggcuggcauuuugugacccuucccuguugc

SEQ ID NO: 389673 - RNA, 32 nt, Human
cgggcuggccugacacaaugguagcucugaag

SEQ ID NO: 389674 - RNA, 32 nt, Human
cgggcuggcucuccuuucugugguuuuauuua

SEQ ID NO: 389675 - RNA, 32 nt, Human
cgggcuggcugcagagaaaccgcagggagagc

SEQ ID NO: 389676 - RNA, 32 nt, Human
cgggcugggcaggcagcucggggcagggagca

SEQ ID NO: 389677 - RNA, 18 nt, Human
cgggcugggccagaacag

SEQ ID NO: 389678 - RNA, 32 nt, Human
cgggcugggccgccaaggcaagaugguggacu

SEQ ID NO: 389679 - RNA, 32 nt, Human
cgggcugggcgccgguaguggaaagcgacggc

SEQ ID NO: 389680 - RNA, 32 nt, Human
cgggcugggcgguggagcaggagcuggcgucu

SEQ ID NO: 389681 - RNA, 32 nt, Human
cgggcugggcugggaccccucugccuccaggg

SEQ ID NO: 389682 - RNA, 32 nt, Human
cgggcuggguaccugaggucaccagcucggcu

SEQ ID NO: 389683 - RNA, 32 nt, Human
cgggcuggucucaaacuccuaaggucauccac

SEQ ID NO: 389684 - RNA, 32 nt, Human
cgggcuggucucaaacuccugaccuccgguga

SEQ ID NO: 389685 - RNA, 32 nt, Human
cgggcuggucucaaacuccugaccucuugauc

SEQ ID NO: 389686 - RNA, 32 nt, Human
cgggcuggucucaaacuccuggguucaaguga

SEQ ID NO: 389687 - RNA, 32 nt, Human
cgggcuggucucaaacuuguggcuucaaguua

SEQ ID NO: 389688 - RNA, 32 nt, Human
cgggcugguuugugcuuauuucugccauuguc

SEQ ID NO: 389689 - RNA, 32 nt, Human
cgggcugugcaggggcgaggggagcagggcgg

SEQ ID NO: 389690 - RNA, 32 nt, Human
cgggcugugccagcccucccagccccaggccc

SEQ ID NO: 389691 - RNA, 32 nt, Human
cgggcuguggggcugggcugugcugcacacug

SEQ ID NO: 389692 - RNA, 32 nt, Human
cgggcuguuuugcuccagccacuuuucuugua

SEQ ID NO: 389693 - RNA, 23 nt, Human
cgggcuuaauugaucuccugccu

SEQ ID NO: 389694 - RNA, 32 nt, Human
cgggcuuaggcaggcuguugaggagcuguggg

SEQ ID NO: 389695 - RNA, 32 nt, Human
cgggcuuaucaggcagccuccccaccagcucg

SEQ ID NO: 389696 - RNA, 32 nt, Human
cgggcuuauggguggagguugggaagaggaug

SEQ ID NO: 389697 - RNA, 32 nt, Human
cgggcuucagcccagucccagcugaggaacaa

SEQ ID NO: 389698 - RNA, 32 nt, Human
cgggcuucaucuuuacgcagcgggcccggcuc

SEQ ID NO: 389699 - RNA, 32 nt, Human
cgggcuuccaggcuggauggagugcccuggcg

SEQ ID NO: 389700 - RNA, 19 nt, Human
cgggcuuccgccagaagcc

SEQ ID NO: 389701 - RNA, 21 nt, Human
cgggcuuccuggaguccugcu

SEQ ID NO: 389702 - RNA, 22 nt, Human
cgggcuucucggaggguucacu

SEQ ID NO: 389703 - RNA, 32 nt, Human
cgggcuucuggcccucuccagugcucuaggag

SEQ ID NO: 389704 - RNA, 32 nt, Human
cgggcuugagccagaggcuggggagcugaguc

SEQ ID NO: 389705 - RNA, 32 nt, Human
cgggcuugcaccacugcggucucccacccagg

SEQ ID NO: 389706 - RNA, 32 nt, Human
cgggcuuggccggaacugaauugguagaggua

SEQ ID NO: 389707 - RNA, 32 nt, Human
cgggcuuggucaagagcaggaggcggaggugg

SEQ ID NO: 389708 - RNA, 32 nt, Human
cgggcuugucuuccucuuccauguccccgcau

SEQ ID NO: 389709 - RNA, 32 nt, Human
cggggaaaccgugaaauguuguguacacacgu

SEQ ID NO: 389710 - RNA, 32 nt, Human
cggggaaagcagcuggugugggaggaaaggcu

SEQ ID NO: 389711 - RNA, 32 nt, Human
cggggaaaggcucgaggagagcgcggcucacg

SEQ ID NO: 389712 - RNA, 22 nt, Human
cggggaacagaugaauauuuca

SEQ ID NO: 389713 - RNA, 32 nt, Human
cggggaacagcauccuaugaacugaaagagca

SEQ ID NO: 389714 - RNA, 20 nt, Human
cggggaacccguuucuccca

SEQ ID NO: 389715 - RNA, 32 nt, Human
cggggaagaagcgcagucuccggguugggggc

SEQ ID NO: 389716 - RNA, 32 nt, Human
cggggaagagauggcggcggagcggggagccc

SEQ ID NO: 389717 - RNA, 30 nt, Human
cggggaagccucuccaacuccuccuagccc

SEQ ID NO: 389718 - RNA, 32 nt, Human
cggggaagcuccagaagguggggagaggggac

SEQ ID NO: 389719 - RNA, 32 nt, Human
cggggaaggaacuuccucugggaaccuuuggg

SEQ ID NO: 389720 - RNA, 32 nt, Human
cggggaaggaggaggaagaggggcagguguag

SEQ ID NO: 389721 - RNA, 32 nt, Human
cggggaagggagcaaaucccugagaggagugc

SEQ ID NO: 389722 - RNA, 32 nt, Human
cggggaaguggaggcagagggagcgggcacgg

SEQ ID NO: 389723 - RNA, 32 nt, Human
cggggaaucucuccaggacauuggagugggca

SEQ ID NO: 389724 - RNA, 32 nt, Human
cggggaaugccucccuggaauguuccagagac

SEQ ID NO: 389725 - RNA, 21 nt, Human
cggggacaaaggacaaacaga

SEQ ID NO: 389726 - RNA, 32 nt, Human
cggggacaacugccuggugacacugcugccgc

SEQ ID NO: 389727 - RNA, 20 nt, Human
cggggacaccagcacugagc

SEQ ID NO: 389728 - RNA, 32 nt, Human
cggggacagagcagugaccauggccaggcugg

SEQ ID NO: 389729 - RNA, 32 nt, Human
cggggacagagcugcccccgaggguccuggcu

SEQ ID NO: 389730 - RNA, 22 nt, Human
cggggacagccaccuccugcug

SEQ ID NO: 389731 - RNA, 32 nt, Human
cggggacaggaaagggaauuccaaggggcagg

SEQ ID NO: 389732 - RNA, 21 nt, Human
cggggaccagccgcccaggga

SEQ ID NO: 389733 - RNA, 26 nt, Human
cggggaccaggagggagcggggucgg

SEQ ID NO: 389734 - RNA, 24 nt, Human
cggggacccacgccguggccacug

SEQ ID NO: 389735 - RNA, 20 nt, Human
cggggacccccagggccgcu

SEQ ID NO: 389736 - RNA, 19 nt, Human
cggggaccccgggggccgc

SEQ ID NO: 389737 - RNA, 19 nt, Human
cggggacccgcgcgagggg

SEQ ID NO: 389738 - RNA, 20 nt, Human
cggggacccgggcucaggga

SEQ ID NO: 389739 - RNA, 32 nt, Human
cggggacccugauccaccagggacccagggca

SEQ ID NO: 389740 - RNA, 32 nt, Human
cggggaccgcugcggcagcagaggcggcuggc

SEQ ID NO: 389741 - RNA, 21 nt, Human
cggggaccggcaggggcccgg

SEQ ID NO: 389742 - RNA, 32 nt, Human
cggggaccugcucgcuguccgcucgggugcag

SEQ ID NO: 389743 - RNA, 32 nt, Human
cggggaccugcucucccuggggcucuacuacc

SEQ ID NO: 389744 - RNA, 18 nt, Human
cggggacggcggcggcgg

SEQ ID NO: 389745 - RNA, 31 nt, Human
cggggacggugcagcaggcggcgggaugcgg

SEQ ID NO: 389746 - RNA, 32 nt, Human
cggggacucaagaggaaucuguuucucugcug

SEQ ID NO: 389747 - RNA, 32 nt, Human
cggggacucccaggccucaguguggcagggug

SEQ ID NO: 389748 - RNA, 32 nt, Human
cggggacucccaggcuggagagcacugccagg

SEQ ID NO: 389749 - RNA, 32 nt, Human
cggggacugaagauggcgccgcgaggugagau

SEQ ID NO: 389750 - RNA, 32 nt, Human
cggggacugcaaccucaguccacagacggccc

SEQ ID NO: 389751 - RNA, 32 nt, Human
cggggacuggccucucugcacggcuguguaca

SEQ ID NO: 389752 - RNA, 32 nt, Human
cggggacuguggaccccacccugcugcacgga

SEQ ID NO: 389753 - RNA, 32 nt, Human
cggggacuguugugggguagggggauggggga

SEQ ID NO: 389754 - RNA, 32 nt, Human
cggggagaaauguugcccaggaaggacaggug

SEQ ID NO: 389755 - RNA, 32 nt, Human
cggggagaacagacauggaggaagcgcaggcc

SEQ ID NO: 389756 - RNA, 32 nt, Human
cggggagaacauacaaacucugccuucgguca

SEQ ID NO: 389757 - RNA, 32 nt, Human
cggggagaagccagcagccaugcugaacucuc

SEQ ID NO: 389758 - RNA, 32 nt, Human
cggggagaagcggaguuucuucuuuguggcau

SEQ ID NO: 389759 - RNA, 32 nt, Human
cggggagaagggcgacuuucaggccugaggag

SEQ ID NO: 389760 - RNA, 23 nt, Human
cggggagagcgaggcggggccgc

SEQ ID NO: 389761 - RNA, 32 nt, Human
cggggagagcgugggucacugccccuccugcc

SEQ ID NO: 389762 - RNA, 32 nt, Human
cggggagaggccagugugggaggaccuggugg

SEQ ID NO: 389763 - RNA, 32 nt, Human
cggggagaugcuggugagggguccguacaggg

SEQ ID NO: 389764 - RNA, 32 nt, Human
cggggagcaauggaaucagauggcucauucuc

SEQ ID NO: 389765 - RNA, 32 nt, Human
cggggagcacugaagacaccugggacccgcag

SEQ ID NO: 389766 - RNA, 32 nt, Human
cggggagccaaagagugugguguguggcgcua

SEQ ID NO: 389767 - RNA, 32 nt, Human
cggggagccagcgauuggaggcucagaaggag

SEQ ID NO: 389768 - RNA, 32 nt, Human
cggggagcccaggguaaaggcagcaguaaugc

SEQ ID NO: 389769 - RNA, 32 nt, Human
cggggagccgaguccagaucuuccugcaagug

SEQ ID NO: 389770 - RNA, 32 nt, Human
cggggagccugcaaagccucucagauucaaac

SEQ ID NO: 389771 - RNA, 32 nt, Human
cggggagccuggggcugagauucugggcacag

SEQ ID NO: 389772 - RNA, 32 nt, Human
cggggagcgcggccuccgcccuuggggcccuc

SEQ ID NO: 389773 - RNA, 32 nt, Human
cggggagcgggcgggaaauggaacugugacgg

SEQ ID NO: 389774 - RNA, 32 nt, Human
cggggagcgggcggggcagccaugcuccuguc

SEQ ID NO: 389775 - RNA, 32 nt, Human
cggggagcugcaggaaccagacugggggcgag

SEQ ID NO: 389776 - RNA, 32 nt, Human
cggggaggaagugcaccuagaaagauuaauga

SEQ ID NO: 389777 - RNA, 22 nt, Human
cggggaggacaccuaccugcug

SEQ ID NO: 389778 - RNA, 19 nt, Human
cggggaggacagcggggcc

SEQ ID NO: 389779 - RNA, 32 nt, Human
cggggaggagaaaguggcgaguuccggauccc

SEQ ID NO: 389780 - RNA, 32 nt, Human
cggggaggagaggcggcggcggcaguguccaa

SEQ ID NO: 389781 - RNA, 32 nt, Human
cggggaggaggaacccgagcagcagcggcggc

SEQ ID NO: 389782 - RNA, 32 nt, Human
cggggaggaggaggaggaggaagaggaggaga

SEQ ID NO: 389783 - RNA, 23 nt, Human
cggggaggccaaacuuccugcug

SEQ ID NO: 389784 - RNA, 32 nt, Human
cggggaggccagggcgacagaggacucgggag

SEQ ID NO: 389785 - RNA, 32 nt, Human
cggggaggcugaggcaggagaaucgcuagaac

SEQ ID NO: 389786 - RNA, 32 nt, Human
cggggaggcugaggcaggagaauugcuugaac

SEQ ID NO: 389787 - RNA, 32 nt, Human
cggggaggcugagguaggagaauagcgugaac

SEQ ID NO: 389788 - RNA, 32 nt, Human
cggggaggcugcaaacaugggcccaggaaaca

SEQ ID NO: 389789 - RNA, 32 nt, Human
cggggaggcugcagaggaggagcagggugggg

SEQ ID NO: 389790 - RNA, 32 nt, Human
cggggaggcugcagcgcagagcagcggggcug

SEQ ID NO: 389791 - RNA, 32 nt, Human
cggggagggaaagggaaaacggggcucggcau

SEQ ID NO: 389792 - RNA, 32 nt, Human
cggggagggaagccucggggcugcggggugag

SEQ ID NO: 389793 - RNA, 32 nt, Human
cggggagggaggaggaggagaagaugcgcagu

SEQ ID NO: 389794 - RNA, 32 nt, Human
cggggaggggauguuaguaggacugaucaugg

SEQ ID NO: 389795 - RNA, 32 nt, Human
cggggaggggcggauggaggggccuggguugc

SEQ ID NO: 389796 - RNA, 32 nt, Human
cggggaggguugggaagggggugcaggaagcu

SEQ ID NO: 389797 - RNA, 32 nt, Human
cggggagguguggaggugagggguuagaggag

SEQ ID NO: 389798 - RNA, 32 nt, Human
cggggaguggugguggcugccuguaaucccag

SEQ ID NO: 389799 - RNA, 32 nt, Human
cggggaguuagcagagggucagacuccuacag

SEQ ID NO: 389800 - RNA, 25 nt, Human
cggggaucaagcaacucuccugccu

SEQ ID NO: 389801 - RNA, 32 nt, Human
cggggaucaagcaacucuccugccucagccuc

SEQ ID NO: 389802 - RNA, 21 nt, Human
cggggaucgcggcggaggcgg

SEQ ID NO: 389803 - RNA, 32 nt, Human
cggggaucucugcuggccccauccuacauccu

SEQ ID NO: 389804 - RNA, 32 nt, Human
cggggaucugggagggucgggggagcaaaagg

SEQ ID NO: 389805 - RNA, 32 nt, Human
cggggaugaaaggaagagaggggccaauuggg

SEQ ID NO: 389806 - RNA, 18 nt, Human
cggggaugcaggaugcag

SEQ ID NO: 389807 - RNA, 32 nt, Human
cggggauucaaagccgccguuccccagguccc

SEQ ID NO: 389808 - RNA, 32 nt, Human
cggggauucucagucgaguuuccagagcagga

SEQ ID NO: 389809 - RNA, 32 nt, Human
cggggauugcucauggcaugggccucuuacgu

SEQ ID NO: 389810 - RNA, 32 nt, Human
cggggauuguggguguuauacauacauuuagg

SEQ ID NO: 389811 - RNA, 32 nt, Human
cggggauuucuuuccaggguaggggaggggcc

SEQ ID NO: 389812 - RNA, 32 nt, Human
cggggcaacauggcaaaacccugucucuacua

SEQ ID NO: 389813 - RNA, 32 nt, Human
cggggcaagaggagggagaaggcagggccgug

SEQ ID NO: 389814 - RNA, 32 nt, Human
cggggcaaggagcacguggcagcgcaggaaac

SEQ ID NO: 389815 - RNA, 22 nt, Human
cggggcacaggaaagggccgcu

SEQ ID NO: 389816 - RNA, 32 nt, Human
cggggcacuggcagaggucgccaagaagagcc

SEQ ID NO: 389817 - RNA, 32 nt, Human
cggggcagaucuuuccucuugucugugguaag

SEQ ID NO: 389818 - RNA, 32 nt, Human
cggggcagccugaguguggggagagcaagcug

SEQ ID NO: 389819 - RNA, 32 nt, Human
cggggcagcguggaggugagggucgggugagg

SEQ ID NO: 389820 - RNA, 21 nt, Human
cggggcagcuccgcugcucug

SEQ ID NO: 389821 - RNA, 32 nt, Human
cggggcagcugcugcacuggcccagggagggc

SEQ ID NO: 389822 - RNA, 20 nt, Human
cggggcaggaagggaggcgg

SEQ ID NO: 389823 - RNA, 32 nt, Human
cggggcaggacgcugcagcucucuccagcccu

SEQ ID NO: 389824 - RNA, 32 nt, Human
cggggcaggaggaucaccuuaggucaggaguu

SEQ ID NO: 389825 - RNA, 32 nt, Human
cggggcaggcaggagucugggaggcggguccg

SEQ ID NO: 389826 - RNA, 32 nt, Human
cggggcaggccugacgggcagcugaggauugc

SEQ ID NO: 389827 - RNA, 32 nt, Human
cggggcaggcuugugaaggcuuggugggaccu

SEQ ID NO: 389828 - RNA, 32 nt, Human
cggggcagggagaacucucuucugcuaaaucg

SEQ ID NO: 389829 - RNA, 32 nt, Human
cggggcaggggcggaggcggaggcagaggugg

SEQ ID NO: 389830 - RNA, 32 nt, Human
cggggcagguuagagucccgaucuuggccagg

SEQ ID NO: 389831 - RNA, 32 nt, Human
cggggcaguucacucugucucccaggcuggag

SEQ ID NO: 389832 - RNA, 32 nt, Human
cggggcaguucuggaacaguucaggauggcca

SEQ ID NO: 389833 - RNA, 32 nt, Human
cggggcauagaaccuguccuggugcugggcaa

SEQ ID NO: 389834 - RNA, 22 nt, Human
cggggcauggaagcagccuccu

SEQ ID NO: 389835 - RNA, 32 nt, Human
cggggcaugguggcucacaccuguaaucccaa

SEQ ID NO: 389836 - RNA, 32 nt, Human
cggggcaugguggcucaugccuguaaucccag

SEQ ID NO: 389837 - RNA, 32 nt, Human
cggggcauuccagcugagacacugugauuuua

SEQ ID NO: 389838 - RNA, 24 nt, Human
cggggccaagcgauccuccugccu

SEQ ID NO: 389839 - RNA, 32 nt, Human
cggggccaccacccucuccuugcuuucagccc

SEQ ID NO: 389840 - RNA, 22 nt, Human
cggggccaccagcacaugccug

SEQ ID NO: 389841 - RNA, 21 nt, Human
cggggccaccagcacugcugc

SEQ ID NO: 389842 - RNA, 22 nt, Human
cggggccacccccuuccuguca

SEQ ID NO: 389843 - RNA, 17 nt, Human
cggggccagcagccgcc

SEQ ID NO: 389844 - RNA, 32 nt, Human
cggggccagcugcguucugagccugggcgcag

SEQ ID NO: 389845 - RNA, 32 nt, Human
cggggccaggaggccaggcgcuugccuuagga

SEQ ID NO: 389846 - RNA, 32 nt, Human
cggggccagggcggcggcccccagggaguugg

SEQ ID NO: 389847 - RNA, 32 nt, Human
cggggccagggugagaggagagaugaugaguu

SEQ ID NO: 389848 - RNA, 32 nt, Human
cggggcccacccugcccagcucagggauuggc

SEQ ID NO: 389849 - RNA, 32 nt, Human
cggggcccagaacgaagcggggaggcgccccu

SEQ ID NO: 389850 - RNA, 32 nt, Human
cggggccccagcccacuccacccugccagcag

SEQ ID NO: 389851 - RNA, 18 nt, Human
cggggccccagcccccca

SEQ ID NO: 389852 - RNA, 32 nt, Human
cggggccccucagaucaggaauaccagauaaa

SEQ ID NO: 389853 - RNA, 22 nt, Human
cggggcccgcggcgcgcgggga

SEQ ID NO: 389854 - RNA, 18 nt, Human
cggggcccgcuccagccc

SEQ ID NO: 389855 - RNA, 21 nt, Human
cggggcccuccuggccgggga

SEQ ID NO: 389856 - RNA, 18 nt, Human
cggggccgccacucuccu

SEQ ID NO: 389857 - RNA, 32 nt, Human
cggggccgcccagacccugggcucagccucgc

SEQ ID NO: 389858 - RNA, 22 nt, Human
cggggccgcccugccccgguca

SEQ ID NO: 389859 - RNA, 19 nt, Human
cggggccgcgccgcggccu

SEQ ID NO: 389860 - RNA, 32 nt, Human
cggggccgcgcugcacgugcucuugucccagc

SEQ ID NO: 389861 - RNA, 32 nt, Human
cggggccgcgggaugagccaggugagcgcgga

SEQ ID NO: 389862 - RNA, 32 nt, Human
cggggccgcggggcccaggaauggcguaaggg

SEQ ID NO: 389863 - RNA, 32 nt, Human
cggggccgcggguggaggucggggaugaggca

SEQ ID NO: 389864 - RNA, 21 nt, Human
cggggccggcaucugcucccc

SEQ ID NO: 389865 - RNA, 32 nt, Human
cggggccggcgcgggccuuuccuuccaucgga

SEQ ID NO: 389866 - RNA, 32 nt, Human
cggggccgggccugaagggucccccgccagcc

SEQ ID NO: 389867 - RNA, 32 nt, Human
cggggccucuggggcauggcuacagcuguggc

SEQ ID NO: 389868 - RNA, 32 nt, Human
cggggccucuuuauuucucuccacccuaacuc

SEQ ID NO: 389869 - RNA, 32 nt, Human
cggggccugcagcaggcuuggaggcuucgcgc

SEQ ID NO: 389870 - RNA, 32 nt, Human
cggggccuggacugcacaggcagcaaggucau

SEQ ID NO: 389871 - RNA, 32 nt, Human
cggggccuggacuugccuaggauuucccgacc

SEQ ID NO: 389872 - RNA, 32 nt, Human
cggggccugggagcugagggcgucucaucucc

SEQ ID NO: 389873 - RNA, 32 nt, Human
cggggccugggugaccgccaauacuugaccac

SEQ ID NO: 389874 - RNA, 32 nt, Human
cggggccuguugagggguagggggcuagagga

SEQ ID NO: 389875 - RNA, 32 nt, Human
cggggccuguugugggggcgggggagggaaag

SEQ ID NO: 389876 - RNA, 32 nt, Human
cggggccuuccugcaaccuuugcggcuccaac

SEQ ID NO: 389877 - RNA, 32 nt, Human
cggggcgacgugccugagucaccccgucccgc

SEQ ID NO: 389878 - RNA, 32 nt, Human
cggggcgaggagaaggugggaagccguggccg

SEQ ID NO: 389879 - RNA, 32 nt, Human
cggggcgagggaggaggaagaagcggaggagg

SEQ ID NO: 389880 - RNA, 32 nt, Human
cggggcgcaguggcucacgccuguaaucccag

SEQ ID NO: 389881 - RNA, 32 nt, Human
cggggcgcccccagucuauggagcgggguaag

SEQ ID NO: 389882 - RNA, 32 nt, Human
cggggcgcccucagcucccugcuuggcucugu

SEQ ID NO: 389883 - RNA, 32 nt, Human
cggggcgccggaggaagaggaggacccacggg

SEQ ID NO: 389884 - RNA, 32 nt, Human
cggggcgcgcugcauugugggguggcggcggc

SEQ ID NO: 389885 - RNA, 32 nt, Human
cggggcgcgggaggaggaaguagagcccggga

SEQ ID NO: 389886 - RNA, 32 nt, Human
cggggcgcgggcggcccagcagagcuggccug

SEQ ID NO: 389887 - RNA, 32 nt, Human
cggggcgcugccgaagugcaaggccacggcca

SEQ ID NO: 389888 - RNA, 32 nt, Human
cggggcgcuggccuaccuccugaggaccucag

SEQ ID NO: 389889 - RNA, 32 nt, Human
cggggcgcugggccgccagccucggcaccguc

SEQ ID NO: 389890 - RNA, 32 nt, Human
cggggcggaagaggaggaggaggaggaggaag

SEQ ID NO: 389891 - RNA, 32 nt, Human
cggggcggaugcugcauccucugccucccugg

SEQ ID NO: 389892 - RNA, 32 nt, Human
cggggcggcauccccagcugguucgggccgug

SEQ ID NO: 389893 - RNA, 32 nt, Human
cggggcggccggcggaggagcagcaggauccc

SEQ ID NO: 389894 - RNA, 32 nt, Human
cggggcggccggcggaggcccauguggcgcuc

SEQ ID NO: 389895 - RNA, 32 nt, Human
cggggcggcuggccaggcagaggggcuccuca

SEQ ID NO: 389896 - RNA, 32 nt, Human
cggggcggcuggccgggcagagcggcuccuca

SEQ ID NO: 389897 - RNA, 32 nt, Human
cggggcgggaccgggggcgggagcagcgcggg

SEQ ID NO: 389898 - RNA, 32 nt, Human
cggggcgggaggcggugaccagcagcaggagg

SEQ ID NO: 389899 - RNA, 32 nt, Human
cggggcgggcaggcccagcugagaggugcgcg

SEQ ID NO: 389900 - RNA, 32 nt, Human
cggggcggggcagaggugagggcugggcccag

SEQ ID NO: 389901 - RNA, 32 nt, Human
cggggcggggcgcgcagcaggagcgagugggg

SEQ ID NO: 389902 - RNA, 32 nt, Human
cggggcgggggcggggcggcagugagcucggc

SEQ ID NO: 389903 - RNA, 20 nt, Human
cggggcggggggaagcgcuc

SEQ ID NO: 389904 - RNA, 32 nt, Human
cggggcggggugggagguaacgggacgggcgc

SEQ ID NO: 389905 - RNA, 32 nt, Human
cggggcgucgggcacgaggccaggggucacua

SEQ ID NO: 389906 - RNA, 32 nt, Human
cggggcguggcagggcccucucugugccucuc

SEQ ID NO: 389907 - RNA, 32 nt, Human
cggggcuaaagcggaggaggggaccagccuca

SEQ ID NO: 389908 - RNA, 32 nt, Human
cggggcuagaggcagauggaagggaggcauuu

SEQ ID NO: 389909 - RNA, 32 nt, Human
cggggcucaagcgauccucccgcuucagccuc

SEQ ID NO: 389910 - RNA, 32 nt, Human
cggggcucagcauucacauucacugcacugcc

SEQ ID NO: 389911 - RNA, 32 nt, Human
cggggcucaggaguuggggguccuccacgugu

SEQ ID NO: 389912 - RNA, 32 nt, Human
cggggcucaggugauuuucccaccucagcuuu

SEQ ID NO: 389913 - RNA, 32 nt, Human
cggggcucaggugggaggauugcuugaggcca

SEQ ID NO: 389914 - RNA, 32 nt, Human
cggggcuccacauugcuguacgcacagagaug

SEQ ID NO: 389915 - RNA, 32 nt, Human
cggggcuccagccugcaccugcaccaggcaca

SEQ ID NO: 389916 - RNA, 19 nt, Human
cggggcucccaagggccug

SEQ ID NO: 389917 - RNA, 32 nt, Human
cggggcuccccucucugcuccacgccauucag

SEQ ID NO: 389918 - RNA, 32 nt, Human
cggggcuccugagggagcuccaacucagaagg

SEQ ID NO: 389919 - RNA, 24 nt, Human
cggggcuccuggaggggggcccug

SEQ ID NO: 389920 - RNA, 32 nt, Human
cggggcuccugucucugccuccugggccuuca

SEQ ID NO: 389921 - RNA, 20 nt, Human
cggggcucgccagcgcuuca

SEQ ID NO: 389922 - RNA, 20 nt, Human
cggggcucggccccgggcca

SEQ ID NO: 389923 - RNA, 18 nt, Human
cggggcucuccacccgcc

SEQ ID NO: 389924 - RNA, 32 nt, Human
cggggcucuccaggacucagugguuucggaga

SEQ ID NO: 389925 - RNA, 32 nt, Human
cggggcucucugaacaccuccagcagaggguc

SEQ ID NO: 389926 - RNA, 32 nt, Human
cggggcucuucagcccuccugggagcucagug

SEQ ID NO: 389927 - RNA, 32 nt, Human
cggggcugaagugcaggcuccuggaggagcgg

SEQ ID NO: 389928 - RNA, 32 nt, Human
cggggcugaccaggcuggggguccagugaaac

SEQ ID NO: 389929 - RNA, 20 nt, Human
cggggcugacccgucacuuu

SEQ ID NO: 389930 - RNA, 21 nt, Human
cggggcugagacgcacgccuu

SEQ ID NO: 389931 - RNA, 32 nt, Human
cggggcugagagaauuuugagcucuagccauc

SEQ ID NO: 389932 - RNA, 32 nt, Human
cggggcugaguguuugugaaagauguugccac

SEQ ID NO: 389933 - RNA, 32 nt, Human
cggggcugcaccugccgggugggcugcuccug

SEQ ID NO: 389934 - RNA, 32 nt, Human
cggggcugcaggcuggagugcagugggacagc

SEQ ID NO: 389935 - RNA, 32 nt, Human
cggggcugccgaggccacggccgcccccaccc

SEQ ID NO: 389936 - RNA, 32 nt, Human
cggggcugcgcggccgccgcugugcuggcuuu

SEQ ID NO: 389937 - RNA, 25 nt, Human
cggggcugcuucucuacacagccuc

SEQ ID NO: 389938 - RNA, 19 nt, Human
cggggcuggagaccaccuu

SEQ ID NO: 389939 - RNA, 19 nt, Human
cggggcuggauggcaccuc

SEQ ID NO: 389940 - RNA, 19 nt, Human
cggggcuggcaggagcucu

SEQ ID NO: 389941 - RNA, 20 nt, Human
cggggcuggcagggaccucu

SEQ ID NO: 389942 - RNA, 20 nt, Human
cggggcuggccccaugcccu

SEQ ID NO: 389943 - RNA, 21 nt, Human
cggggcuggccuggcagcgcu

SEQ ID NO: 389944 - RNA, 18 nt, Human
cggggcuggccuggccuc

SEQ ID NO: 389945 - RNA, 32 nt, Human
cggggcuggcugcaguguaccguggacagccu

SEQ ID NO: 389946 - RNA, 17 nt, Human
cggggcugggacaccuc

SEQ ID NO: 389947 - RNA, 18 nt, Human
cggggcugggacccacuc

SEQ ID NO: 389948 - RNA, 19 nt, Human
cggggcugggacucacucu

SEQ ID NO: 389949 - RNA, 32 nt, Human
cggggcugggcaggcuggauguggugguguac

SEQ ID NO: 389950 - RNA, 21 nt, Human
cggggcugggcgcggggccgg

SEQ ID NO: 389951 - RNA, 32 nt, Human
cggggcuggggagagacauguggacacguggc

SEQ ID NO: 389952 - RNA, 21 nt, Human
cggggcuggggaggacacucu

SEQ ID NO: 389953 - RNA, 32 nt, Human
cggggcuggggucggggccaggaggaauuuug

SEQ ID NO: 389954 - RNA, 22 nt, Human
cggggcuggguuggcgcacccu

SEQ ID NO: 389955 - RNA, 20 nt, Human
cggggcugguucaucaccuc

SEQ ID NO: 389956 - RNA, 32 nt, Human
cggggcuguagggagggcagggggaggagagu

SEQ ID NO: 389957 - RNA, 32 nt, Human
cggggcugucacugcagaagucuuccacaggc

SEQ ID NO: 389958 - RNA, 32 nt, Human
cggggcuguggcuggcagcuuggugggcccca

SEQ ID NO: 389959 - RNA, 32 nt, Human
cggggcuuccauccuuccuuugacugauuuuu

SEQ ID NO: 389960 - RNA, 20 nt, Human
cggggcuucgccggggccgg

SEQ ID NO: 389961 - RNA, 32 nt, Human
cggggcuucuccugccuccaucacaucacaga

SEQ ID NO: 389962 - RNA, 32 nt, Human
cggggcuugccuugguuuucagucuucucucu

SEQ ID NO: 389963 - RNA, 32 nt, Human
cggggcuuucuggcugccccuucaccaccccg

SEQ ID NO: 389964 - RNA, 22 nt, Human
cggggcuuugcgcguggcggcc

SEQ ID NO: 389965 - RNA, 32 nt, Human
cggggcuuuggaggugaaagaggcccagagua

SEQ ID NO: 389966 - RNA, 32 nt, Human
cgggggaaagagagagcuccuuucgccauguu

SEQ ID NO: 389967 - RNA, 22 nt, Human
cgggggaaaggaggcggcagcc

SEQ ID NO: 389968 - RNA, 32 nt, Human
cgggggaagaaagagaaacuagugcugguuuu

SEQ ID NO: 389969 - RNA, 23 nt, Human
cgggggaagcagcgugagcagcc

SEQ ID NO: 389970 - RNA, 23 nt, Human
cgggggaagcgucuccagcugcc

SEQ ID NO: 389971 - RNA, 21 nt, Human
cgggggaagcuggcagcaggc

SEQ ID NO: 389972 - RNA, 22 nt, Human
cgggggacgccugcccugccca

SEQ ID NO: 389973 - RNA, 32 nt, Human
cgggggacgggugggugcaguggcucacaucu

SEQ ID NO: 389974 - RNA, 32 nt, Human
cgggggacugcgccagguuccccagccgccca

SEQ ID NO: 389975 - RNA, 26 nt, Human
cgggggagcagcagcgcacggcggcc

SEQ ID NO: 389976 - RNA, 32 nt, Human
cgggggagccccgggagccgcacggagaugga

SEQ ID NO: 389977 - RNA, 19 nt, Human
cgggggagccggggcucag

SEQ ID NO: 389978 - RNA, 32 nt, Human
cgggggagccugagucaggaggucagugggcc

SEQ ID NO: 389979 - RNA, 32 nt, Human
cgggggagcuccugccaggagccgaauaacug

SEQ ID NO: 389980 - RNA, 32 nt, Human
cgggggaggagaaaaggggaguccagucguca

SEQ ID NO: 389981 - RNA, 32 nt, Human
cgggggaggagaaagggagacagcagaagaaa

SEQ ID NO: 389982 - RNA, 32 nt, Human
cgggggaggaggaggaggagaagguggagagg

SEQ ID NO: 389983 - RNA, 23 nt, Human
cgggggaggcagcgugagcagcc

SEQ ID NO: 389984 - RNA, 19 nt, Human
cgggggaggcggcggcgcc

SEQ ID NO: 389985 - RNA, 32 nt, Human
cgggggaggcugggagcugggccuccugcgug

SEQ ID NO: 389986 - RNA, 32 nt, Human
cgggggagggaggaggagggaggcggcgagga

SEQ ID NO: 389987 - RNA, 26 nt, Human
cgggggaggggaaggaagggccgcug

SEQ ID NO: 389988 - RNA, 32 nt, Human
cgggggaggggcaggagagggauauggagagc

SEQ ID NO: 389989 - RNA, 23 nt, Human
cgggggaggggccgcgcagcagc

SEQ ID NO: 389990 - RNA, 32 nt, Human
cgggggaucuuaguugcuuauuuguuuugacu

SEQ ID NO: 389991 - RNA, 32 nt, Human
cgggggaugaaggcgggagcugagggcuggag

SEQ ID NO: 389992 - RNA, 32 nt, Human
cgggggaugaaugauuccagacagugggaagg

SEQ ID NO: 389993 - RNA, 32 nt, Human
cgggggaugaggauauggcagggaagcuuuca

SEQ ID NO: 389994 - RNA, 32 nt, Human
cgggggcaaggagucaaggcuugggggcgggu

SEQ ID NO: 389995 - RNA, 21 nt, Human
cgggggcacuuggaggaccug

SEQ ID NO: 389996 - RNA, 22 nt, Human
cgggggcagagcggagccgcag

SEQ ID NO: 389997 - RNA, 32 nt, Human
cgggggcagaggcugcagugagccgagauugu

SEQ ID NO: 389998 - RNA, 32 nt, Human
cgggggcaggagacggagcugagcggcggggg

SEQ ID NO: 389999 - RNA, 21 nt, Human
cgggggcaggagggaccaagg

SEQ ID NO: 390000 - RNA, 23 nt, Human
cgggggcagggcauucccucgga

SEQ ID NO: 390001 - RNA, 32 nt, Human
cgggggcagggugcgugggaggacggagccug

SEQ ID NO: 390002 - RNA, 27 nt, Human
cgggggcaggucguuggagacugaaga

SEQ ID NO: 390003 - RNA, 32 nt, Human
cgggggcauguguggacauccacacacagcgc

SEQ ID NO: 390004 - RNA, 32 nt, Human
cgggggcauuggggacacagggaagggaaagc

SEQ ID NO: 390005 - RNA, 22 nt, Human
cgggggccacgucagcggggcc

SEQ ID NO: 390006 - RNA, 32 nt, Human
cgggggccagcccaggagggcgggugguuugu

SEQ ID NO: 390007 - RNA, 32 nt, Human
cgggggccauggggccuccugagguacaccuu

SEQ ID NO: 390008 - RNA, 32 nt, Human
cgggggcccacaccccucacacgcaaaacugg

SEQ ID NO: 390009 - RNA, 21 nt, Human
cgggggccgcgcgagggccgg

SEQ ID NO: 390010 - RNA, 22 nt, Human
cgggggccggcgcggcggccgg

SEQ ID NO: 390011 - RNA, 22 nt, Human
cgggggccgggccgggggcggg

SEQ ID NO: 390012 - RNA, 22 nt, Human
cgggggccgggcgggagccugg

SEQ ID NO: 390013 - RNA, 20 nt, Human
cgggggccgggcggggccgg

SEQ ID NO: 390014 - RNA, 25 nt, Human
cgggggccggggagugaggggccgg

SEQ ID NO: 390015 - RNA, 22 nt, Human
cgggggccuaccuuccccaggg

SEQ ID NO: 390016 - RNA, 32 nt, Human
cgggggccucgggagggugaaaggagggagga

SEQ ID NO: 390017 - RNA, 32 nt, Human
cgggggccucugcaccuggucugcagggccag

SEQ ID NO: 390018 - RNA, 32 nt, Human
cgggggccucuggcugcugaaggauucggucu

SEQ ID NO: 390019 - RNA, 23 nt, Human
cgggggccugacggccgggccgg

SEQ ID NO: 390020 - RNA, 32 nt, Human
cgggggccuguaaucccagcuacucaggaggc

SEQ ID NO: 390021 - RNA, 32 nt, Human
cgggggccuguaauccuagcuacuuggggugc

SEQ ID NO: 390022 - RNA, 32 nt, Human
cgggggccuugaagacucccugaucccagacc

SEQ ID NO: 390023 - RNA, 32 nt, Human
cgggggcgagggcugcccccuccuccccuccc

SEQ ID NO: 390024 - RNA, 32 nt, Human
cgggggcgccccugagucacugggcagaggca

SEQ ID NO: 390025 - RNA, 19 nt, Human
cgggggcgcccgaggcccg

SEQ ID NO: 390026 - RNA, 22 nt, Human
cgggggcgcccggcugggccca

SEQ ID NO: 390027 - RNA, 32 nt, Human
cgggggcgcuuggccucagcgggccaugggag

SEQ ID NO: 390028 - RNA, 32 nt, Human
cgggggcggaggcagcugaggcgcuucuuucc

SEQ ID NO: 390029 - RNA, 32 nt, Human
cgggggcggcaccgcuccccugugacugcauc

SEQ ID NO: 390030 - RNA, 18 nt, Human
cgggggcggccccgggug

SEQ ID NO: 390031 - RNA, 23 nt, Human
cgggggcggcggcgcgagcggcc

SEQ ID NO: 390032 - RNA, 15 nt, Human
cgggggcggcugcag

SEQ ID NO: 390033 - RNA, 32 nt, Human
cgggggcggggagguggaguggagaggcccgc

SEQ ID NO: 390034 - RNA, 32 nt, Human
cgggggcggggccggggccagagcagaucucc

SEQ ID NO: 390035 - RNA, 17 nt, Human
cgggggcucaagcugca

SEQ ID NO: 390036 - RNA, 24 nt, Human
cgggggcucacgccuguaauccca

SEQ ID NO: 390037 - RNA, 32 nt, Human
cgggggcucauaccuguaaucccggcacuuug

SEQ ID NO: 390038 - RNA, 32 nt, Human
cgggggcuccgaggcggggucuggguguugag

SEQ ID NO: 390039 - RNA, 24 nt, Human
cgggggcuccuagcaacgggccgg

SEQ ID NO: 390040 - RNA, 19 nt, Human
cgggggcugcacgcggcug

SEQ ID NO: 390041 - RNA, 32 nt, Human
cgggggcugccuggucacgcgcggcaccaagu

SEQ ID NO: 390042 - RNA, 32 nt, Human
cgggggcugcucccugcuuaccucccucgccc

SEQ ID NO: 390043 - RNA, 32 nt, Human
cgggggcuggggaaggaagacagggacugcag

SEQ ID NO: 390044 - RNA, 18 nt, Human
cggggggaagaccgcaga

SEQ ID NO: 390045 - RNA, 22 nt, Human
cggggggcagagguugcaguga

SEQ ID NO: 390046 - RNA, 20 nt, Human
cggggggcgcacagagccag

SEQ ID NO: 390047 - RNA, 18 nt, Human
cgggggguauggcugcag

SEQ ID NO: 390048 - RNA, 32 nt, Human
cggggguacgagggaggaaggggagcaagacu

SEQ ID NO: 390049 - RNA, 32 nt, Human
cggggguagcggcggcgcgagcaggggcgcgg

SEQ ID NO: 390050 - RNA, 32 nt, Human
cgggggucaugaugggcagcaagauggcgucu

SEQ ID NO: 390051 - RNA, 23 nt, Human
cgggggucccggcgcugagccgg

SEQ ID NO: 390052 - RNA, 24 nt, Human
cgggggucgcuauggaggagccgg

SEQ ID NO: 390053 - RNA, 21 nt, Human
cgggggucggcagggggccgg

SEQ ID NO: 390054 - RNA, 32 nt, Human
cgggggucuccucuccugcccguccuggccgg

SEQ ID NO: 390055 - RNA, 32 nt, Human
cgggggucuccucuccugcuggucccugccgg

SEQ ID NO: 390056 - RNA, 25 nt, Human
cgggggucuggggagcgcagcagcc

SEQ ID NO: 390057 - RNA, 32 nt, Human
cgggggugcaggaaggaaguggggcccaagca

SEQ ID NO: 390058 - RNA, 32 nt, Human
cggggguggaggaggaagaaggggcacagcac

SEQ ID NO: 390059 - RNA, 32 nt, Human
cggggguggagguggugccucuggcagugacg

SEQ ID NO: 390060 - RNA, 32 nt, Human
cggggguggcgguggagggaacgaaaauugaa

SEQ ID NO: 390061 - RNA, 29 nt, Human
cggggguggcuucguuugccuggaguggc

SEQ ID NO: 390062 - RNA, 22 nt, Human
cgggggugggagcgggggccgg

SEQ ID NO: 390063 - RNA, 22 nt, Human
cgggggugggaggcggaggcgg

SEQ ID NO: 390064 - RNA, 32 nt, Human
cggggguggggcugggguggcaauggcgguuu

SEQ ID NO: 390065 - RNA, 32 nt, Human
cggggguggggucaguggugaagaguguguca

SEQ ID NO: 390066 - RNA, 32 nt, Human
cgggggugggguccagcccagagcaggcacug

SEQ ID NO: 390067 - RNA, 31 nt, Human
cggggguggguggggugaagagaucuuguga

SEQ ID NO: 390068 - RNA, 32 nt, Human
cggggguucagcggggccucugucuuuugugg

SEQ ID NO: 390069 - RNA, 32 nt, Human
cggggguuggggcggagggagcagcggcccca

SEQ ID NO: 390070 - RNA, 32 nt, Human
cggggguuucaccaugccauccaggcugguuu

SEQ ID NO: 390071 - RNA, 32 nt, Human
cgggguaccaacauggcccagaagcguccugc

SEQ ID NO: 390072 - RNA, 31 nt, Human
cgggguaggagaccuggagcuggagaacccg

SEQ ID NO: 390073 - RNA, 32 nt, Human
cgggguaggaggaucaccagaggccagcaggu

SEQ ID NO: 390074 - RNA, 32 nt, Human
cgggguaggcagcuagaggcgcaggagcgaau

SEQ ID NO: 390075 - RNA, 32 nt, Human
cgggguagugcaugccuguaaucccagcuacu

SEQ ID NO: 390076 - RNA, 31 nt, Human
cgggguaugugacugccucugugcugggcac

SEQ ID NO: 390077 - RNA, 32 nt, Human
cggggucaacuguacccagccuagagccaaga

SEQ ID NO: 390078 - RNA, 24 nt, Human
cggggucacguccagccuccacug

SEQ ID NO: 390079 - RNA, 32 nt, Human
cggggucagagagagcgcgcgggcgugcgagc

SEQ ID NO: 390080 - RNA, 32 nt, Human
cggggucagauaccuggggguggggaggggcc

SEQ ID NO: 390081 - RNA, 32 nt, Human
cggggucaggagaucaagaccauccuggcuaa

SEQ ID NO: 390082 - RNA, 32 nt, Human
cggggucagggaggggcagggggcaccuggca

SEQ ID NO: 390083 - RNA, 32 nt, Human
cggggucaucgccuccugcuuccggggucauc

SEQ ID NO: 390084 - RNA, 22 nt, Human
cggggucaucuucucucugcug

SEQ ID NO: 390085 - RNA, 32 nt, Human
cggggucauguugccagccauguugcccaggc

SEQ ID NO: 390086 - RNA, 20 nt, Human
cgggguccccggucccgcgu

SEQ ID NO: 390087 - RNA, 32 nt, Human
cgggguccgcaccgggccugagucgguccgag

SEQ ID NO: 390088 - RNA, 32 nt, Human
cgggguccggaggcagagacggccaugaacag

SEQ ID NO: 390089 - RNA, 18 nt, Human
cgggguccuggccggaga

SEQ ID NO: 390090 - RNA, 32 nt, Human
cggggucgaccuuugugcggggcgggucccug

SEQ ID NO: 390091 - RNA, 32 nt, Human
cggggucgccacugcacccagccugugucuuc

SEQ ID NO: 390092 - RNA, 32 nt, Human
cggggucgggcaucugcugucgcugccucggc

SEQ ID NO: 390093 - RNA, 22 nt, Human
cggggucgggcggccgcgcggg

SEQ ID NO: 390094 - RNA, 18 nt, Human
cggggucucacucuguua

SEQ ID NO: 390095 - RNA, 32 nt, Human
cggggucucaugcuuugcccacugacccggca

SEQ ID NO: 390096 - RNA, 18 nt, Human
cggggucucgcucuguca

SEQ ID NO: 390097 - RNA, 32 nt, Human
cggggucucugcucuuaugcaucaggacgacc

SEQ ID NO: 390098 - RNA, 32 nt, Human
cggggucucugucacccaggcuggagugcagu

SEQ ID NO: 390099 - RNA, 32 nt, Human
cggggucugccuggccuguggguucugccggu

SEQ ID NO: 390100 - RNA, 32 nt, Human
cggggugaaaccucccauuggccaaaggacac

SEQ ID NO: 390101 - RNA, 32 nt, Human
cggggugacugcugagggcccauaccaacggc

SEQ ID NO: 390102 - RNA, 32 nt, Human
cggggugagacagcaggaaggggcccugcacg

SEQ ID NO: 390103 - RNA, 32 nt, Human
cggggugagcccccagagcuggaccugagcua

SEQ ID NO: 390104 - RNA, 32 nt, Human
cggggugaggggagggagagcauuaggaaaaa

SEQ ID NO: 390105 - RNA, 32 nt, Human
cggggugcagaaccuccucucagggagggucc

SEQ ID NO: 390106 - RNA, 32 nt, Human
cggggugcgggggaggaggaggaggacgccgc

SEQ ID NO: 390107 - RNA, 32 nt, Human
cggggugcugccucucccucccuguuugaauc

SEQ ID NO: 390108 - RNA, 32 nt, Human
cgggguggcacacaccuguagucccagcuacu

SEQ ID NO: 390109 - RNA, 32 nt, Human
cgggguggcgcgcaccuguaaucccagcugcu

SEQ ID NO: 390110 - RNA, 32 nt, Human
cgggguggcucacaccuguaaugcagcucguu

SEQ ID NO: 390111 - RNA, 32 nt, Human
cgggguggcucacgccuguaaucccagcacuu

SEQ ID NO: 390112 - RNA, 32 nt, Human
cgggguggcucacgccuguaauccuagcacuu

SEQ ID NO: 390113 - RNA, 32 nt, Human
cgggguggcucagaccuguaaucccagaacuu

SEQ ID NO: 390114 - RNA, 32 nt, Human
cgggguggcucaugccuguaauuccagcacuu

SEQ ID NO: 390115 - RNA, 32 nt, Human
cgggguggcuuacgccuguaaucccaauacuu

SEQ ID NO: 390116 - RNA, 32 nt, Human
cggggugggaagaguuucucuccaucggcccc

SEQ ID NO: 390117 - RNA, 19 nt, Human
cggggugggccuucgggga

SEQ ID NO: 390118 - RNA, 32 nt, Human
cgggguggggaaggggcugggagccaggguac

SEQ ID NO: 390119 - RNA, 32 nt, Human
cggggugggggagggggagccuuauuucugua

SEQ ID NO: 390120 - RNA, 32 nt, Human
cggggugggggcgggggugaggguaggugcuu

SEQ ID NO: 390121 - RNA, 32 nt, Human
cggggugucaggagggagagacagccugggua

SEQ ID NO: 390122 - RNA, 21 nt, Human
cggggugugccccuccugcug

SEQ ID NO: 390123 - RNA, 32 nt, Human
cggggugugguggcucacaccuguaaucccag

SEQ ID NO: 390124 - RNA, 32 nt, Human
cgggguguguguggcucagcuuccacggcgug

SEQ ID NO: 390125 - RNA, 32 nt, Human
cgggguuccaggacagggaagggagcaggagc

SEQ ID NO: 390126 - RNA, 24 nt, Human
cgggguuccucaucaucaauacca

SEQ ID NO: 390127 - RNA, 32 nt, Human
cgggguugaacaaacggaaagugccaggauuu

SEQ ID NO: 390128 - RNA, 32 nt, Human
cgggguuggaggaucauuugagcccaggaauu

SEQ ID NO: 390129 - RNA, 32 nt, Human
cgggguuggggugggagggcgucaggcagagg

SEQ ID NO: 390130 - RNA, 18 nt, Human
cgggguuucacucuguca

SEQ ID NO: 390131 - RNA, 32 nt, Human
cgggguuucuucguugcauugccugagaggag

SEQ ID NO: 390132 - RNA, 32 nt, Human
cgggguuugugguuggcugagguggaggaaua

SEQ ID NO: 390133 - RNA, 32 nt, Human
cggguaacucugagggacacagcuccacucac

SEQ ID NO: 390134 - RNA, 32 nt, Human
cggguaauggcugcuuccaagacccagggggc

SEQ ID NO: 390135 - RNA, 32 nt, Human
cggguaccgaaaggagggcaauucauggaaga

SEQ ID NO: 390136 - RNA, 32 nt, Human
cggguaccguaauccuagcuacucgggagacu

SEQ ID NO: 390137 - RNA, 32 nt, Human
cggguacgagcuggccccagacaagcgccgcu

SEQ ID NO: 390138 - RNA, 32 nt, Human
cggguacuacauuuccaucccuucccuauuuu

SEQ ID NO: 390139 - RNA, 32 nt, Human
cggguacugugaugauggcugcaguccaguuu

SEQ ID NO: 390140 - RNA, 32 nt, Human
cggguagcaaaaagguugggaaccacuggugu

SEQ ID NO: 390141 - RNA, 32 nt, Human
cggguagccccagggcuggggcugccagaagu

SEQ ID NO: 390142 - RNA, 32 nt, Human
cggguagcugcacugggcauggggugguggug

SEQ ID NO: 390143 - RNA, 20 nt, Human
cggguagcugggacuacagg

SEQ ID NO: 390144 - RNA, 22 nt, Human
cggguagcugggacuacaggug

SEQ ID NO: 390145 - RNA, 32 nt, Human
cggguagggucagagacauuggaggaucucuc

SEQ ID NO: 390146 - RNA, 32 nt, Human
cggguauauugagagaaauaaaggugagagca

SEQ ID NO: 390147 - RNA, 32 nt, Human
cgggucaaagugcaccaccagccaccaacagc

SEQ ID NO: 390148 - RNA, 32 nt, Human
cgggucaacccuguaauuccagcacuuuggga

SEQ ID NO: 390149 - RNA, 23 nt, Human
cgggucaagcaauucuccugccu

SEQ ID NO: 390150 - RNA, 32 nt, Human
cgggucaaggcccggucgagugcaguaccaug

SEQ ID NO: 390151 - RNA, 32 nt, Human
cgggucacaggcauugguaguuuugaagcucu

SEQ ID NO: 390152 - RNA, 32 nt, Human
cgggucaccacaaccuccgccucccggauuca

SEQ ID NO: 390153 - RNA, 32 nt, Human
cgggucacccaccuuucgcacucugcgggccg

SEQ ID NO: 390154 - RNA, 32 nt, Human
cgggucaccucagcugcccacacccacacucu

SEQ ID NO: 390155 - RNA, 32 nt, Human
cgggucacugcaaccuccgccucccggguuca

SEQ ID NO: 390156 - RNA, 32 nt, Human
cgggucacugcaaccucuaccuccaggguuca

SEQ ID NO: 390157 - RNA, 32 nt, Human
cgggucacugcaagcucugccucccaaguuca

SEQ ID NO: 390158 - RNA, 32 nt, Human
cgggucagagggcaagacgugacccagggccg

SEQ ID NO: 390159 - RNA, 32 nt, Human
cgggucagccacaagggccacagccaugaaug

SEQ ID NO: 390160 - RNA, 32 nt, Human
cgggucagcuuugcagucgcugccuucucgcg

SEQ ID NO: 390161 - RNA, 32 nt, Human
cgggucagugcugcucgggggcuucuccaucc

SEQ ID NO: 390162 - RNA, 24 nt, Human
cggguccaagugauucuccugccu

SEQ ID NO: 390163 - RNA, 16 nt, Human
cggguccacccugggu

SEQ ID NO: 390164 - RNA, 22 nt, Human
cggguccagaccuggugggaag

SEQ ID NO: 390165 - RNA, 32 nt, Human
cggguccagaugagggccaggaaggggaggag

SEQ ID NO: 390166 - RNA, 32 nt, Human
cggguccagcuacucgggaggcugaggcagga

SEQ ID NO: 390167 - RNA, 32 nt, Human
cggguccauaagccuuuauuucauacaguccu

SEQ ID NO: 390168 - RNA, 32 nt, Human
cggguccauuaacgaagguggggaagggcgga

SEQ ID NO: 390169 - RNA, 32 nt, Human
cgggucccacccccaaacccccagagguggcc

SEQ ID NO: 390170 - RNA, 32 nt, Human
cgggucccaccgcgcaggacgccccuuccugc

SEQ ID NO: 390171 - RNA, 32 nt, Human
cgggucccuccacccacaucccccugguccua

SEQ ID NO: 390172 - RNA, 19 nt, Human
cgggucccugccacgucca

SEQ ID NO: 390173 - RNA, 24 nt, Human
cgggucccugccgaaggcucggcu

SEQ ID NO: 390174 - RNA, 22 nt, Human
cggguccgaggcagcggcggga

SEQ ID NO: 390175 - RNA, 32 nt, Human
cggguccggccucucccugccuguggccccuc

SEQ ID NO: 390176 - RNA, 32 nt, Human
cggguccggcugggacugccagaggaaccugg

SEQ ID NO: 390177 - RNA, 22 nt, Human
cggguccgggugaagcgggagg

SEQ ID NO: 390178 - RNA, 32 nt, Human
cggguccucacaccccuccuuggcccuucugg

SEQ ID NO: 390179 - RNA, 32 nt, Human
cggguccucucuuuaccugccagggcuuuucc

SEQ ID NO: 390180 - RNA, 32 nt, Human
cggguccugagcaccugcuucaugaaggaaga

SEQ ID NO: 390181 - RNA, 32 nt, Human
cggguccugcagcguuucucgccgccuagcca

SEQ ID NO: 390182 - RNA, 32 nt, Human
cggguccuggggaggcagagagaggccaauuu

SEQ ID NO: 390183 - RNA, 32 nt, Human
cgggucgcagaggcacuugaccaccccgcccu

SEQ ID NO: 390184 - RNA, 25 nt, Human
cgggucgccgccggcagcagccucc

SEQ ID NO: 390185 - RNA, 32 nt, Human
cgggucgccugcccugucucccuacuuagacc

SEQ ID NO: 390186 - RNA, 32 nt, Human
cgggucgccuguuccccugcaaccgcaaugug

SEQ ID NO: 390187 - RNA, 32 nt, Human
cgggucgcggaggcgggcgccgccggaacgcg

SEQ ID NO: 390188 - RNA, 32 nt, Human
cgggucggccgcaauccagccugggcggagcc

SEQ ID NO: 390189 - RNA, 32 nt, Human
cgggucgggaggcugugcuggcugcacuggcc

SEQ ID NO: 390190 - RNA, 32 nt, Human
cgggucguuguggugcgcugucuucccgcuug

SEQ ID NO: 390191 - RNA, 32 nt, Human
cgggucucagcggacuugugcauguuagcugu

SEQ ID NO: 390192 - RNA, 32 nt, Human
cgggucucaggacccaaagauccuuuagucag

SEQ ID NO: 390193 - RNA, 32 nt, Human
cgggucuccagccccaguccagaguugggcac

SEQ ID NO: 390194 - RNA, 32 nt, Human
cgggucuccagccuccgaccccucgccccaug

SEQ ID NO: 390195 - RNA, 23 nt, Human
cgggucuccuuuuggccuggggu

SEQ ID NO: 390196 - RNA, 21 nt, Human
cgggucucucaacguccaguu

SEQ ID NO: 390197 - RNA, 20 nt, Human
cgggucucuggcccuucuug

SEQ ID NO: 390198 - RNA, 32 nt, Human
cgggucucuggcccuucuugccuacuaugcca

SEQ ID NO: 390199 - RNA, 32 nt, Human
cgggucugccuaaacucagugucucuccuaga

SEQ ID NO: 390200 - RNA, 32 nt, Human
cgggucuucgggccuaggcgagcgccaggucu

SEQ ID NO: 390201 - RNA, 32 nt, Human
cgggucuugcucucucacccaggcuggaguag

SEQ ID NO: 390202 - RNA, 32 nt, Human
cgggucuuugccucccccuccuucccuagcag

SEQ ID NO: 390203 - RNA, 32 nt, Human
cgggucuuuggaugggaggaggacgaggacuu

SEQ ID NO: 390204 - RNA, 32 nt, Human
cgggugaaaugggguuguggggcagagcaggg

SEQ ID NO: 390205 - RNA, 32 nt, Human
cgggugacagcacuaaccagaccuccagccac

SEQ ID NO: 390206 - RNA, 32 nt, Human
cgggugacugcaaccacugccucccagguuca

SEQ ID NO: 390207 - RNA, 32 nt, Human
cgggugagaagcaggaaggaggcugaugauag

SEQ ID NO: 390208 - RNA, 17 nt, Human
cgggugagcccuguaac

SEQ ID NO: 390209 - RNA, 32 nt, Human
cgggugaggugccucccuucucugggcagagu

SEQ ID NO: 390210 - RNA, 32 nt, Human
cgggugagucucauggcugacccuggagggag

SEQ ID NO: 390211 - RNA, 32 nt, Human
cgggugagugauacuucucagucuucucuacu

SEQ ID NO: 390212 - RNA, 32 nt, Human
cgggugagugugugugcaugcacgugugugca

SEQ ID NO: 390213 - RNA, 32 nt, Human
cgggugaucguagcucggaaauggcgggauuu

SEQ ID NO: 390214 - RNA, 32 nt, Human
cgggugaugcuagauggauguguaccuggugg

SEQ ID NO: 390215 - RNA, 32 nt, Human
cgggugauggccucauccagggccacguucuc

SEQ ID NO: 390216 - RNA, 32 nt, Human
cgggugauuacaggcaccagugcagugaugau

SEQ ID NO: 390217 - RNA, 32 nt, Human
cgggugcacccaggcugcagggugaggccagg

SEQ ID NO: 390218 - RNA, 32 nt, Human
cgggugcagcucuguuccgcggaggcacgccc

SEQ ID NO: 390219 - RNA, 32 nt, Human
cgggugcagggcgugacucaccgcugggugcu

SEQ ID NO: 390220 - RNA, 32 nt, Human
cgggugcauagauacagguaaccaccaccaca

SEQ ID NO: 390221 - RNA, 32 nt, Human
cgggugccccggggcguucccucugccgcugc

SEQ ID NO: 390222 - RNA, 32 nt, Human
cgggugccuauaaucccgcuacucgggaggcu

SEQ ID NO: 390223 - RNA, 32 nt, Human
cgggugccuguaaucccagcuacuggggaggc

SEQ ID NO: 390224 - RNA, 32 nt, Human
cgggugccuguaaucccagcuacuugggaggc

SEQ ID NO: 390225 - RNA, 32 nt, Human
cgggugccuuaaacccacacuuccagggaccc

SEQ ID NO: 390226 - RNA, 32 nt, Human
cgggugccuuucugucuugcuuccagggggcu

SEQ ID NO: 390227 - RNA, 32 nt, Human
cgggugcgccuccuguuuggguuucuucgggg

SEQ ID NO: 390228 - RNA, 22 nt, Human
cgggugcgucugcagcuccucc

SEQ ID NO: 390229 - RNA, 31 nt, Human
cgggugcucaauaaauauuugucgaaugaau

SEQ ID NO: 390230 - RNA, 22 nt, Human
cgggugcugcgcaggcaggaag

SEQ ID NO: 390231 - RNA, 32 nt, Human
cgggugcugcugguuagugugcucugagggag

SEQ ID NO: 390232 - RNA, 32 nt, Human
cgggugcugcuugcugcaggcucuggggaguc

SEQ ID NO: 390233 - RNA, 32 nt, Human
cgggugcuucaaaguacaugauaagggaacac

SEQ ID NO: 390234 - RNA, 32 nt, Human
cgggugcuuuccuguccugccagagcauggau

SEQ ID NO: 390235 - RNA, 32 nt, Human
cggguggacacacaggaccacucaguggggcc

SEQ ID NO: 390236 - RNA, 32 nt, Human
cggguggagagggcggcggcguugaaugugug

SEQ ID NO: 390237 - RNA, 32 nt, Human
cggguggagagggugcgccaaggagagguaac

SEQ ID NO: 390238 - RNA, 32 nt, Human
cggguggagggcccugagguggcagcaggggu

SEQ ID NO: 390239 - RNA, 32 nt, Human
cggguggcaggggcugucugugaaauuaggca

SEQ ID NO: 390240 - RNA, 32 nt, Human
cggguggcccccaguccugcuggaccagcuga

SEQ ID NO: 390241 - RNA, 32 nt, Human
cggguggcggcccuggggauggggaaggagca

SEQ ID NO: 390242 - RNA, 32 nt, Human
cggguggcgggauggggagcagcuugguccau

SEQ ID NO: 390243 - RNA, 32 nt, Human
cggguggcggggagaucaacuccgagcuguuu

SEQ ID NO: 390244 - RNA, 20 nt, Human
cggguggcugggaucacagg

SEQ ID NO: 390245 - RNA, 20 nt, Human
cggguggcugggauugcagg

SEQ ID NO: 390246 - RNA, 32 nt, Human
cgggugggaacgcugugucuguuggucuggug

SEQ ID NO: 390247 - RNA, 32 nt, Human
cgggugggagcgagcuugcgggcaggugccgc

SEQ ID NO: 390248 - RNA, 32 nt, Human
cgggugggaggcggggaggagcagcgggaaga

SEQ ID NO: 390249 - RNA, 32 nt, Human
cgggugggaggugagauugauagugcaauaau

SEQ ID NO: 390250 - RNA, 32 nt, Human
cgggugggcaggaacaacaagguccuguggcc

SEQ ID NO: 390251 - RNA, 32 nt, Human
cggguggggagguggccaaggaugcuggagcu

SEQ ID NO: 390252 - RNA, 32 nt, Human
cggguggggcgcagaagagaggggagcccuuc

SEQ ID NO: 390253 - RNA, 22 nt, Human
cgggugggggagguugcaauga

SEQ ID NO: 390254 - RNA, 32 nt, Human
cggguggggugguggaggagcugcagagaugu

SEQ ID NO: 390255 - RNA, 32 nt, Human
cggguggguggaggaugcggugcgcgggaauu

SEQ ID NO: 390256 - RNA, 32 nt, Human
cgggugggugugagcuguugggcuuccagguc

SEQ ID NO: 390257 - RNA, 32 nt, Human
cggguggucugccuguguauuuuggucauggg

SEQ ID NO: 390258 - RNA, 32 nt, Human
cgggugguugccauguuuucuaaugcugggga

SEQ ID NO: 390259 - RNA, 18 nt, Human
cgggugucagcuccagga

SEQ ID NO: 390260 - RNA, 32 nt, Human
cgggugucaguucguccggcuuccucacagcc

SEQ ID NO: 390261 - RNA, 32 nt, Human
cgggugucaguugugucuuuucaccucgauuu

SEQ ID NO: 390262 - RNA, 32 nt, Human
cggguguccgcccucagccuccuggggacucg

SEQ ID NO: 390263 - RNA, 32 nt, Human
cgggugucgauccuuuucccuccagucagggc

SEQ ID NO: 390264 - RNA, 32 nt, Human
cgggugucuggaggcuguggccguuuuguuuu

SEQ ID NO: 390265 - RNA, 32 nt, Human
cgggugugagccaccacgccuggcuaauuuuu

SEQ ID NO: 390266 - RNA, 32 nt, Human
cgggugugagccaccgcgcccagcuagcuccu

SEQ ID NO: 390267 - RNA, 31 nt, Human
cggguguuccugggaagaugggcagaaaauc

SEQ ID NO: 390268 - RNA, 32 nt, Human
cggguguugguggugugcaccuguaaucccgg

SEQ ID NO: 390269 - RNA, 24 nt, Human
cggguuaaagcgauucucuuaccu

SEQ ID NO: 390270 - RNA, 32 nt, Human
cggguuacagccgccuccucggcgccacagag

SEQ ID NO: 390271 - RNA, 26 nt, Human
cggguuaccccacaagggggccgcug

SEQ ID NO: 390272 - RNA, 24 nt, Human
cggguucaaaccauucuccugccu

SEQ ID NO: 390273 - RNA, 24 nt, Human
cggguucaaacgauucuccuaccu

SEQ ID NO: 390274 - RNA, 23 nt, Human
cggguucaaacgauucuccugcc

SEQ ID NO: 390275 - RNA, 24 nt, Human
cggguucaaaugauacuccugccu

SEQ ID NO: 390276 - RNA, 24 nt, Human
cggguucaaaugauucuccugccu

SEQ ID NO: 390277 - RNA, 24 nt, Human
cggguucaagagauccuccugccu

SEQ ID NO: 390278 - RNA, 24 nt, Human
cggguucaagagauuccccugccu

SEQ ID NO: 390279 - RNA, 24 nt, Human
cggguucaagagauucuccugccu

SEQ ID NO: 390280 - RNA, 21 nt, Human
cggguucaagagauucugccu

SEQ ID NO: 390281 - RNA, 24 nt, Human
cggguucaagcaauccuccugccu

SEQ ID NO: 390282 - RNA, 24 nt, Human
cggguucaagcaauucucccaucu

SEQ ID NO: 390283 - RNA, 22 nt, Human
cggguucaagcaauucuccugc

SEQ ID NO: 390284 - RNA, 24 nt, Human
cggguucaagcaauucuccugccu

SEQ ID NO: 390285 - RNA, 24 nt, Human
cggguucaagcaauucuccugucu

SEQ ID NO: 390286 - RNA, 24 nt, Human
cggguucaagcaauucuccuucuu

SEQ ID NO: 390287 - RNA, 24 nt, Human
cggguucaagcaauucuucugccu

SEQ ID NO: 390288 - RNA, 23 nt, Human
cggguucaagcaauuuccugccu

SEQ ID NO: 390289 - RNA, 24 nt, Human
cggguucaagcaguucuccugccu

SEQ ID NO: 390290 - RNA, 21 nt, Human
cggguucaagcaguucugccu

SEQ ID NO: 390291 - RNA, 23 nt, Human
cggguucaagcaguuuccugcuu

SEQ ID NO: 390292 - RNA, 24 nt, Human
cggguucaagcauuucuccugucu

SEQ ID NO: 390293 - RNA, 24 nt, Human
cggguucaagccauucuccucccu

SEQ ID NO: 390294 - RNA, 24 nt, Human
cggguucaagccauucuccugccu

SEQ ID NO: 390295 - RNA, 24 nt, Human
cggguucaagccauucuccugucu

SEQ ID NO: 390296 - RNA, 21 nt, Human
cggguucaagccauucugccu

SEQ ID NO: 390297 - RNA, 24 nt, Human
cggguucaagcgaaucuccugccu

SEQ ID NO: 390298 - RNA, 24 nt, Human
cggguucaagcgacucuccugccu

SEQ ID NO: 390299 - RNA, 24 nt, Human
cggguucaagcgauccuccugccu

SEQ ID NO: 390300 - RNA, 21 nt, Human
cggguucaagcgauccugccu

SEQ ID NO: 390301 - RNA, 24 nt, Human
cggguucaagcgaugcuccugccu

SEQ ID NO: 390302 - RNA, 24 nt, Human
cggguucaagcgauuacucccacu

SEQ ID NO: 390303 - RNA, 24 nt, Human
cggguucaagcgauucaccugccu

SEQ ID NO: 390304 - RNA, 24 nt, Human
cggguucaagcgauucuccagccu

SEQ ID NO: 390305 - RNA, 24 nt, Human
cggguucaagcgauucucccgccu

SEQ ID NO: 390306 - RNA, 24 nt, Human
cggguucaagcgauucuccuaccu

SEQ ID NO: 390307 - RNA, 22 nt, Human
cggguucaagcgauucuccugc

SEQ ID NO: 390308 - RNA, 24 nt, Human
cggguucaagcgauucuccugccu

SEQ ID NO: 390309 - RNA, 24 nt, Human
cggguucaagcgauucuccugcuu

SEQ ID NO: 390310 - RNA, 24 nt, Human
cggguucaagcgauucuccugucu

SEQ ID NO: 390311 - RNA, 24 nt, Human
cggguucaagcgauucucgugccu

SEQ ID NO: 390312 - RNA, 24 nt, Human
cggguucaagcgauucugcugccu

SEQ ID NO: 390313 - RNA, 24 nt, Human
cggguucaagcgauucuucugccu

SEQ ID NO: 390314 - RNA, 24 nt, Human
cggguucaagcgauucuucugcuu

SEQ ID NO: 390315 - RNA, 24 nt, Human
cggguucaagcgauucuugugccu

SEQ ID NO: 390316 - RNA, 23 nt, Human
cggguucaagcgauuuucccgcc

SEQ ID NO: 390317 - RNA, 24 nt, Human
cggguucaagcgguucuacugccu

SEQ ID NO: 390318 - RNA, 24 nt, Human
cggguucaagcuauucuccugccu

SEQ ID NO: 390319 - RNA, 21 nt, Human
cggguucaagggauucugccu

SEQ ID NO: 390320 - RNA, 24 nt, Human
cggguucaaguaauucuccugccu

SEQ ID NO: 390321 - RNA, 24 nt, Human
cggguucaagugaucguccugccu

SEQ ID NO: 390322 - RNA, 24 nt, Human
cggguucaagugaugcuccugccu

SEQ ID NO: 390323 - RNA, 24 nt, Human
cggguucaagugauucaccugccu

SEQ ID NO: 390324 - RNA, 24 nt, Human
cggguucaagugauuccccuaccu

SEQ ID NO: 390325 - RNA, 23 nt, Human
cggguucaagugauucccugccu

SEQ ID NO: 390326 - RNA, 24 nt, Human
cggguucaagugauucucaugccu

SEQ ID NO: 390327 - RNA, 24 nt, Human
cggguucaagugauucuccugccu

SEQ ID NO: 390328 - RNA, 24 nt, Human
cggguucaagugauucuccugcuu

SEQ ID NO: 390329 - RNA, 24 nt, Human
cggguucaagugauucuccugucu

SEQ ID NO: 390330 - RNA, 24 nt, Human
cggguucaagugauucucgugccu

SEQ ID NO: 390331 - RNA, 24 nt, Human
cggguucaagugauucuucugccu

SEQ ID NO: 390332 - RNA, 24 nt, Human
cggguucaagugguucuccugccu

SEQ ID NO: 390333 - RNA, 24 nt, Human
cggguucaauagauucuccagccu

SEQ ID NO: 390334 - RNA, 24 nt, Human
cggguucaaucaauucuccuaccu

SEQ ID NO: 390335 - RNA, 32 nt, Human
cggguucacaccauucucccaccucaaccccc

SEQ ID NO: 390336 - RNA, 32 nt, Human
cggguucacaccauucuccggccucagucucc

SEQ ID NO: 390337 - RNA, 24 nt, Human
cggguucacaccauucuccuaccu

SEQ ID NO: 390338 - RNA, 24 nt, Human
cggguucacaccauucuccugccu

SEQ ID NO: 390339 - RNA, 32 nt, Human
cggguucacaccauucuccugccucagccucc

SEQ ID NO: 390340 - RNA, 32 nt, Human
cggguucacacguguguucacagagcuacggc

SEQ ID NO: 390341 - RNA, 24 nt, Human
cggguucacgccauccuccugccu

SEQ ID NO: 390342 - RNA, 24 nt, Human
cggguucacgccauucuccugccu

SEQ ID NO: 390343 - RNA, 24 nt, Human
cggguucacgccauucucuugccu

SEQ ID NO: 390344 - RNA, 24 nt, Human
cggguucacgcccuucuccugccu

SEQ ID NO: 390345 - RNA, 24 nt, Human
cggguucacgucauucuccugccu

SEQ ID NO: 390346 - RNA, 24 nt, Human
cggguucaggcaauucuccugccu

SEQ ID NO: 390347 - RNA, 24 nt, Human
cggguucaggccauucuccugccu

SEQ ID NO: 390348 - RNA, 24 nt, Human
cggguucaggcuauucuccugccu

SEQ ID NO: 390349 - RNA, 24 nt, Human
cggguucaggugauucuccugccu

SEQ ID NO: 390350 - RNA, 24 nt, Human
cggguucaggugauucucuugccu

SEQ ID NO: 390351 - RNA, 24 nt, Human
cggguucaugccauucuccugccu

SEQ ID NO: 390352 - RNA, 32 nt, Human
cggguucaugccauucuccugccucagccucc

SEQ ID NO: 390353 - RNA, 32 nt, Human
cggguucaugccauucugccucagccuccuga

SEQ ID NO: 390354 - RNA, 24 nt, Human
cggguucauggcauucuccugccu

SEQ ID NO: 390355 - RNA, 24 nt, Human
cggguucaugugauucuccugccu

SEQ ID NO: 390356 - RNA, 32 nt, Human
cggguuccagcaaauucuccugccucagccuc

SEQ ID NO: 390357 - RNA, 24 nt, Human
cggguuccagcaauucuccugccu

SEQ ID NO: 390358 - RNA, 24 nt, Human
cggguuccagcgauucuccugccu

SEQ ID NO: 390359 - RNA, 17 nt, Human
cggguuccagcgcgggg

SEQ ID NO: 390360 - RNA, 32 nt, Human
cggguuccgcagaugcagagguugagguggcu

SEQ ID NO: 390361 - RNA, 32 nt, Human
cggguuccgggcuccgggcucuggguggcggc

SEQ ID NO: 390362 - RNA, 24 nt, Human
cggguucgagcaauucuccugccu

SEQ ID NO: 390363 - RNA, 24 nt, Human
cggguucgagcgauucuccugccu

SEQ ID NO: 390364 - RNA, 32 nt, Human
cggguucgcacacccauucaagcggcaggacg

SEQ ID NO: 390365 - RNA, 24 nt, Human
cggguucgcaccauucuccugccu

SEQ ID NO: 390366 - RNA, 24 nt, Human
cggguucgggcaguucuccugccu

SEQ ID NO: 390367 - RNA, 24 nt, Human
cggguucgggugguucuccugccu

SEQ ID NO: 390368 - RNA, 23 nt, Human
cggguucggugauucuccugccu

SEQ ID NO: 390369 - RNA, 24 nt, Human
cggguucucaccauucuccugccu

SEQ ID NO: 390370 - RNA, 32 nt, Human
cggguucugaggcacagcuugucacaccgagg

SEQ ID NO: 390371 - RNA, 32 nt, Human
cggguucugggauccugcuggaagaggggagc

SEQ ID NO: 390372 - RNA, 32 nt, Human
cggguucuuuccaacucagaaucaucucugau

SEQ ID NO: 390373 - RNA, 32 nt, Human
cggguugacaccauuuuccugccucagccucc

SEQ ID NO: 390374 - RNA, 32 nt, Human
cggguugccacugccggcuugcagccugcuuu

SEQ ID NO: 390375 - RNA, 32 nt, Human
cggguugcccuggugaccccagccucugucca

SEQ ID NO: 390376 - RNA, 32 nt, Human
cggguuggcucccagccuggaggucccagaug

SEQ ID NO: 390377 - RNA, 32 nt, Human
cggguugguggggguggagcagcacuucaucg

SEQ ID NO: 390378 - RNA, 24 nt, Human
cggguugucacgccuguaauccca

SEQ ID NO: 390379 - RNA, 20 nt, Human
cggguuuaagaguccuggcc

SEQ ID NO: 390380 - RNA, 24 nt, Human
cggguuuaagcaguucuccugccu

SEQ ID NO: 390381 - RNA, 24 nt, Human
cggguuuaagcgauucuucugccu

SEQ ID NO: 390382 - RNA, 32 nt, Human
cggguuuaccuuaagcuucucuagugaggcau

SEQ ID NO: 390383 - RNA, 24 nt, Human
cggguuuaugccauucuccugucu

SEQ ID NO: 390384 - RNA, 22 nt, Human
cggguuucccgcgguccgagcu

SEQ ID NO: 390385 - RNA, 32 nt, Human
cggguuucucccugcggcuccuggguuguuga

SEQ ID NO: 390386 - RNA, 32 nt, Human
cggguuucugcucuccgcccguguggaguggu

SEQ ID NO: 390387 - RNA, 24 nt, Human
cggguuugcaccauucuccugccu

SEQ ID NO: 390388 - RNA, 32 nt, Human
cggguuuggcugcugcuuccccgccgggugcc

SEQ ID NO: 390389 - RNA, 32 nt, Human
cggguuuggggucggggacagagcagugacca

SEQ ID NO: 390390 - RNA, 32 nt, Human
cggguuuguacacauacacaaaauguaccauu

SEQ ID NO: 390391 - RNA, 32 nt, Human
cggguuuucaccauguugccccgguugcucuc

SEQ ID NO: 390392 - RNA, 32 nt, Human
cggguuuuguuucauagggaguccugaguggg

SEQ ID NO: 390393 - RNA, 32 nt, Human
cgguaacacauuaccuuccucaccuccuguuu

SEQ ID NO: 390394 - RNA, 32 nt, Human
cgguaacccguccaccuggccgaggcagccca

SEQ ID NO: 390395 - RNA, 32 nt, Human
cgguaaccuuggaggucagcuugagaugacug

SEQ ID NO: 390396 - RNA, 32 nt, Human
cgguaacuacagccuuacuaccccacuacuca

SEQ ID NO: 390397 - RNA, 32 nt, Human
cgguaacuuucccagggucacccagccagcau

SEQ ID NO: 390398 - RNA, 32 nt, Human
cgguaauacacaaauaaauccauguuuuagca

SEQ ID NO: 390399 - RNA, 32 nt, Human
cgguaauaguuucagacagacaggaggaauag

SEQ ID NO: 390400 - RNA, 32 nt, Human
cgguaaugagccagacccuuguccuagugguc

SEQ ID NO: 390401 - RNA, 30 nt, Human
cgguaauggcggagcuggugcaggggcaga

SEQ ID NO: 390402 - RNA, 32 nt, Human
cgguaauggcggagcuggugcaggggcagagc

SEQ ID NO: 390403 - RNA, 32 nt, Human
cgguacacacacccuuccucuagccaggaucu

SEQ ID NO: 390404 - RNA, 32 nt, Human
cgguacagcacacuagcccuggcuccaagggc

SEQ ID NO: 390405 - RNA, 32 nt, Human
cgguacagcugcaggccguggucagggauggc

SEQ ID NO: 390406 - RNA, 32 nt, Human
cgguacauuugcacuguguccuagagagccuc

SEQ ID NO: 390407 - RNA, 20 nt, Human
cgguaccauucgucuaggga

SEQ ID NO: 390408 - RNA, 23 nt, Human
cgguacccacugccggccuccgc

SEQ ID NO: 390409 - RNA, 23 nt, Human
cgguaccccccagcaguaccagc

SEQ ID NO: 390410 - RNA, 32 nt, Human
cgguaccuagagucugugcgccccuuguugga

SEQ ID NO: 390411 - RNA, 24 nt, Human
cgguaccucacaccuguaauccca

SEQ ID NO: 390412 - RNA, 32 nt, Human
cgguaccuccagaacacuucagcuccacagcc

SEQ ID NO: 390413 - RNA, 32 nt, Human
cgguaccucuacugcguagaggccguagccag

SEQ ID NO: 390414 - RNA, 32 nt, Human
cgguaccucuacugcguagaggccguagcugg

SEQ ID NO: 390415 - RNA, 32 nt, Human
cgguacgccgccgccucgcacccgcagccucg

SEQ ID NO: 390416 - RNA, 32 nt, Human
cgguacggagagugcagaugcaggaaggcccg

SEQ ID NO: 390417 - RNA, 32 nt, Human
cgguacggcgcagacucaacaucaaccucuug

SEQ ID NO: 390418 - RNA, 23 nt, Human
cgguacucacugccggccuccgc

SEQ ID NO: 390419 - RNA, 32 nt, Human
cgguacucuuggaggcucugcaaccacaguuu

SEQ ID NO: 390420 - RNA, 32 nt, Human
cgguacugagauaucucggcuuccgcucagcc

SEQ ID NO: 390421 - RNA, 32 nt, Human
cgguacuuugggaggcugaggugggaggacug

SEQ ID NO: 390422 - RNA, 32 nt, Human
cgguagaaucacgugaguccaggaguuugaga

SEQ ID NO: 390423 - RNA, 32 nt, Human
cgguagacgaggacgccaacagcagcggagaa

SEQ ID NO: 390424 - RNA, 32 nt, Human
cgguagacggagccaugaagaagaccucgggc

SEQ ID NO: 390425 - RNA, 32 nt, Human
cgguagagaaugguggucuuuccuucauuguc

SEQ ID NO: 390426 - RNA, 32 nt, Human
cgguagagacgggauuucaccauguuggccag

SEQ ID NO: 390427 - RNA, 32 nt, Human
cgguagagagccugagaaucugguccaagguc

SEQ ID NO: 390428 - RNA, 32 nt, Human
cgguagagaugggguuucaccacguuggccag

SEQ ID NO: 390429 - RNA, 32 nt, Human
cgguagaggagaagucgagguuagagggaacu

SEQ ID NO: 390430 - RNA, 32 nt, Human
cgguagaggcggagguugcagugagccgagau

SEQ ID NO: 390431 - RNA, 32 nt, Human
cgguagagugcuuggcugggcgcaguggcuca

SEQ ID NO: 390432 - RNA, 32 nt, Human
cgguagcauaaauaugcacaucaauaaaauaa

SEQ ID NO: 390433 - RNA, 32 nt, Human
cgguagcgaaggcagcagcagcgguggcgaca

SEQ ID NO: 390434 - RNA, 24 nt, Human
cgguagcucacaccuguaauccca

SEQ ID NO: 390435 - RNA, 24 nt, Human
cgguagcucacgccuguaauccca

SEQ ID NO: 390436 - RNA, 32 nt, Human
cgguagcucuuugauuacacaaaagccaauuu

SEQ ID NO: 390437 - RNA, 32 nt, Human
cgguaggugcaggugcaguaggacgugggacu

SEQ ID NO: 390438 - RNA, 32 nt, Human
cgguaggugcauacuucugcccuccccagccc

SEQ ID NO: 390439 - RNA, 23 nt, Human
cgguagucacgccuguaauccca

SEQ ID NO: 390440 - RNA, 32 nt, Human
cgguagucgagaaaagcagagugaagacacaa

SEQ ID NO: 390441 - RNA, 32 nt, Human
cgguaguggcugcuguggcugccccaucccag

SEQ ID NO: 390442 - RNA, 21 nt, Human
cgguaucgcguugcucagggg

SEQ ID NO: 390443 - RNA, 24 nt, Human
cgguaucucaugccuauaauccca

SEQ ID NO: 390444 - RNA, 21 nt, Human
cgguaucuuuaaguucuccac

SEQ ID NO: 390445 - RNA, 32 nt, Human
cgguaugaaacuguauuuaaaugaguguacau

SEQ ID NO: 390446 - RNA, 32 nt, Human
cgguauggaaggcaggcuguacugguugagug

SEQ ID NO: 390447 - RNA, 32 nt, Human
cgguauggggccugcaugauuggcgcaggaau

SEQ ID NO: 390448 - RNA, 32 nt, Human
cgguaugucauuaucagcagugugaaaaugga

SEQ ID NO: 390449 - RNA, 32 nt, Human
cgguauuagggagggguuaggagcaggaagga

SEQ ID NO: 390450 - RNA, 32 nt, Human
cggucaacguggugaaaccccaucucuacuaa

SEQ ID NO: 390451 - RNA, 32 nt, Human
cggucaaguguggaggagagggguggaggcug

SEQ ID NO: 390452 - RNA, 27 nt, Human
cggucacaagggagauguccgccccca

SEQ ID NO: 390453 - RNA, 32 nt, Human
cggucacagcucacugccuccugggcucagcu

SEQ ID NO: 390454 - RNA, 32 nt, Human
cggucacagugccaccaacacggguucacucc

SEQ ID NO: 390455 - RNA, 32 nt, Human
cggucaccaguucugccgugcgauggggccuc

SEQ ID NO: 390456 - RNA, 32 nt, Human
cggucaccauuccugagugugugcacauucca

SEQ ID NO: 390457 - RNA, 32 nt, Human
cggucaccgcggccaggcccaggcugguacug

SEQ ID NO: 390458 - RNA, 32 nt, Human
cggucaccuaggcuggaguguaguggcgcaau

SEQ ID NO: 390459 - RNA, 32 nt, Human
cggucacgggucuccuucaaaaccacucuguu

SEQ ID NO: 390460 - RNA, 32 nt, Human
cggucagaauguguggcaauucugaucugcau

SEQ ID NO: 390461 - RNA, 32 nt, Human
cggucagacuggaggugggggcagcagcuccc

SEQ ID NO: 390462 - RNA, 32 nt, Human
cggucagaggccaggauuggagagggggcacc

SEQ ID NO: 390463 - RNA, 32 nt, Human
cggucagagucacacggggcucaguggacugc

SEQ ID NO: 390464 - RNA, 32 nt, Human
cggucagcucauuccugccuccuuccugagcc

SEQ ID NO: 390465 - RNA, 32 nt, Human
cggucaggcucucagaugcagcugguugcacc

SEQ ID NO: 390466 - RNA, 32 nt, Human
cggucagucucggcccacaccccaaaggcucu

SEQ ID NO: 390467 - RNA, 32 nt, Human
cggucauaaagaauguaagggcuauaaguaga

SEQ ID NO: 390468 - RNA, 32 nt, Human
cggucauaugguagaaucacuguggacugaga

SEQ ID NO: 390469 - RNA, 32 nt, Human
cggucaucacccagccucugagagcaguuacu

SEQ ID NO: 390470 - RNA, 32 nt, Human
cggucaucccuaagccuuugccaccuccugag

SEQ ID NO: 390471 - RNA, 32 nt, Human
cggucaugccacugcacuccagccugggugac

SEQ ID NO: 390472 - RNA, 32 nt, Human
cggucauuuucuccuucuuucucccucuugag

SEQ ID NO: 390473 - RNA, 32 nt, Human
cgguccaaccuagacaaccaagaccgcuauac

SEQ ID NO: 390474 - RNA, 32 nt, Human
cgguccaaccucugcauucaguuaggagcucu

SEQ ID NO: 390475 - RNA, 32 nt, Human
cgguccacugcaaccuccacuucccggguuca

SEQ ID NO: 390476 - RNA, 32 nt, Human
cgguccagagccaagcggcggcagagcgaggg

SEQ ID NO: 390477 - RNA, 20 nt, Human
cgguccagcucagggaugcu

SEQ ID NO: 390478 - RNA, 32 nt, Human
cgguccaggaggcggcucgagcuguucguaaa

SEQ ID NO: 390479 - RNA, 32 nt, Human
cgguccaggcccugugcaccuuaccccagaga

SEQ ID NO: 390480 - RNA, 32 nt, Human
cgguccagggcaaugacacacagggucucgau

SEQ ID NO: 390481 - RNA, 32 nt, Human
cgguccauaagaauggggacagugggcucugc

SEQ ID NO: 390482 - RNA, 32 nt, Human
cgguccauucugcccauggccacagggugcag

SEQ ID NO: 390483 - RNA, 31 nt, Human
cgguccauuggcaugaagcacuuguacugcu

SEQ ID NO: 390484 - RNA, 32 nt, Human
cggucccagaucucugaccacaccacucaccc

SEQ ID NO: 390485 - RNA, 32 nt, Human
cggucccagcuacuugggaggcugaggcggga

SEQ ID NO: 390486 - RNA, 32 nt, Human
cggucccagguguggagcagagcucgggaacu

SEQ ID NO: 390487 - RNA, 32 nt, Human
cgguccccaggcccuuugggacaggaagagaa

SEQ ID NO: 390488 - RNA, 32 nt, Human
cgguccccaucagcacugugcagugguaccgg

SEQ ID NO: 390489 - RNA, 32 nt, Human
cgguccccauggaggagauggaagaggaguug

SEQ ID NO: 390490 - RNA, 32 nt, Human
cgguccccugggucugugccugggggucagga

SEQ ID NO: 390491 - RNA, 32 nt, Human
cggucccgcacuggugcagccauguccucuuc

SEQ ID NO: 390492 - RNA, 32 nt, Human
cggucccgcucaggccagacgcagaggcaguc

SEQ ID NO: 390493 - RNA, 32 nt, Human
cggucccucccccucacguucucucuuccucu

SEQ ID NO: 390494 - RNA, 32 nt, Human
cggucccucuggugucugccaucccccucccu

SEQ ID NO: 390495 - RNA, 32 nt, Human
cggucccugcagcggcgcguagucgagggcag

SEQ ID NO: 390496 - RNA, 32 nt, Human
cggucccugggcagguguggguggaaugcauc

SEQ ID NO: 390497 - RNA, 32 nt, Human
cgguccgagccgcggcagucggcgacgccuca

SEQ ID NO: 390498 - RNA, 23 nt, Human
cgguccgcccaccgccgccgccg

SEQ ID NO: 390499 - RNA, 32 nt, Human
cgguccgcugaagcucugaauccucagggagg

SEQ ID NO: 390500 - RNA, 32 nt, Human
cgguccggcuccaggagauucagucacuccuc

SEQ ID NO: 390501 - RNA, 31 nt, Human
cgguccggcuucucugggagacugucuacaa

SEQ ID NO: 390502 - RNA, 22 nt, Human
cgguccgggaggucucuaggcu

SEQ ID NO: 390503 - RNA, 32 nt, Human
cgguccgggcccagagugcagcagagcucugg

SEQ ID NO: 390504 - RNA, 32 nt, Human
cgguccgggccgcggcgguggcggcgccacuu

SEQ ID NO: 390505 - RNA, 32 nt, Human
cgguccucaccacccucugccccaccaugauc

SEQ ID NO: 390506 - RNA, 32 nt, Human
cgguccucucagcccugccugcccuggccugg

SEQ ID NO: 390507 - RNA, 32 nt, Human
cgguccucuccaucucucuccucggcagcagc

SEQ ID NO: 390508 - RNA, 32 nt, Human
cgguccucucucugacgggguggcauuuggcc

SEQ ID NO: 390509 - RNA, 32 nt, Human
cgguccugaaauuuucaucuugaaugucuuug

SEQ ID NO: 390510 - RNA, 21 nt, Human
cgguccugaggauccuccuca

SEQ ID NO: 390511 - RNA, 32 nt, Human
cgguccugguagggagugcguagcagggugga

SEQ ID NO: 390512 - RNA, 32 nt, Human
cgguccuguagauggcaguaacuugaucauca

SEQ ID NO: 390513 - RNA, 32 nt, Human
cggucgacuccgccccagccucagagggugga

SEQ ID NO: 390514 - RNA, 32 nt, Human
cggucgagaacagcagcgccauggaggagcuc

SEQ ID NO: 390515 - RNA, 32 nt, Human
cggucgcaggaggugccgucugccucccaggu

SEQ ID NO: 390516 - RNA, 25 nt, Human
cggucgccacgguaacgcgcgcggg

SEQ ID NO: 390517 - RNA, 22 nt, Human
cggucgcccacccugggaagug

SEQ ID NO: 390518 - RNA, 32 nt, Human
cggucggagaggggguacgagagcugcuggug

SEQ ID NO: 390519 - RNA, 32 nt, Human
cggucggagauggagccgggugcggcuguacc

SEQ ID NO: 390520 - RNA, 32 nt, Human
cggucggagguggggcguuugggggugugcgg

SEQ ID NO: 390521 - RNA, 32 nt, Human
cggucggcccucgcccccucccccaggcccag

SEQ ID NO: 390522 - RNA, 32 nt, Human
cggucgggagggaggaagguggcaagauggug

SEQ ID NO: 390523 - RNA, 32 nt, Human
cggucggggccaggccaggccaggccagcucc

SEQ ID NO: 390524 - RNA, 32 nt, Human
cggucggggcugggcccuacgcacuuugcgua

SEQ ID NO: 390525 - RNA, 32 nt, Human
cggucgguaaagacgucuucuaagccuuugau

SEQ ID NO: 390526 - RNA, 32 nt, Human
cggucgucaccugcacucaucuuggguuuucc

SEQ ID NO: 390527 - RNA, 32 nt, Human
cggucguucccguucaggagcagaauuuuccc

SEQ ID NO: 390528 - RNA, 32 nt, Human
cggucuagaggagucccaggagcagccaggac

SEQ ID NO: 390529 - RNA, 32 nt, Human
cggucuagggcaauaggagagcagagaauggg

SEQ ID NO: 390530 - RNA, 32 nt, Human
cggucucaacacagaagacuucugugagcaaa

SEQ ID NO: 390531 - RNA, 32 nt, Human
cggucuccaaacucccuguuggcuuuuuaaug

SEQ ID NO: 390532 - RNA, 32 nt, Human
cggucuccaagugccccugguuacagcuccug

SEQ ID NO: 390533 - RNA, 32 nt, Human
cggucuccccaaagugcugggauuacaggcgu

SEQ ID NO: 390534 - RNA, 32 nt, Human
cggucuccgcgucugccagccuggcuggcagu

SEQ ID NO: 390535 - RNA, 25 nt, Human
cggucucgaucuccugaccuccuga

SEQ ID NO: 390536 - RNA, 25 nt, Human
cggucucgaucuccugaccucuuga

SEQ ID NO: 390537 - RNA, 25 nt, Human
cggucucgaucuccugaccuucuga

SEQ ID NO: 390538 - RNA, 32 nt, Human
cggucucgccuccgcuuccuccucacuccgcc

SEQ ID NO: 390539 - RNA, 22 nt, Human
cggucucgccuugucgccagcu

SEQ ID NO: 390540 - RNA, 32 nt, Human
cggucucuagccccucagcccccgcugggcac

SEQ ID NO: 390541 - RNA, 32 nt, Human
cggucucugagguuccaccaaaauauggaacu

SEQ ID NO: 390542 - RNA, 32 nt, Human
cggucugaaaguaggaggugggggaagaggca

SEQ ID NO: 390543 - RNA, 32 nt, Human
cggucugacacugucuucucucaccaugcuca

SEQ ID NO: 390544 - RNA, 25 nt, Human
cggucugacuagaauuuaccaggcu

SEQ ID NO: 390545 - RNA, 24 nt, Human
cggucugacucugucacccaggcu

SEQ ID NO: 390546 - RNA, 32 nt, Human
cggucugagccuuuuuggauaauuaauaaaua

SEQ ID NO: 390547 - RNA, 32 nt, Human
cggucugaggcagacgguuacagccaccggca

SEQ ID NO: 390548 - RNA, 17 nt, Human
cggucugcauccgggga

SEQ ID NO: 390549 - RNA, 32 nt, Human
cggucugcuguugagauguugcuuuuugguuu

SEQ ID NO: 390550 - RNA, 32 nt, Human
cggucuggagccucugggcuucugccuacaga

SEQ ID NO: 390551 - RNA, 32 nt, Human
cggucuggccaacauggugaaaccccaucucu

SEQ ID NO: 390552 - RNA, 32 nt, Human
cggucuggcugcagcuagaggacaggcaagcc

SEQ ID NO: 390553 - RNA, 32 nt, Human
cggucugggacuuaugucaccgggaggaaaag

SEQ ID NO: 390554 - RNA, 32 nt, Human
cggucugggccgccgaaucuccggccgaagag

SEQ ID NO: 390555 - RNA, 32 nt, Human
cggucugucacccaggcuggagugcaguggug

SEQ ID NO: 390556 - RNA, 32 nt, Human
cggucuguugcccagguuggagugcaguggcg

SEQ ID NO: 390557 - RNA, 32 nt, Human
cggucuguuuugacaaaacuucaggggcuucu

SEQ ID NO: 390558 - RNA, 20 nt, Human
cggucuucggcuccucugca

SEQ ID NO: 390559 - RNA, 32 nt, Human
cggucuucucucgaucucugcagggagucacu

SEQ ID NO: 390560 - RNA, 32 nt, Human
cggucuugcccagaggaucacagugcugagac

SEQ ID NO: 390561 - RNA, 20 nt, Human
cggucuugucaucuuuuaca

SEQ ID NO: 390562 - RNA, 19 nt, Human
cggucuuugcuccuuuaca

SEQ ID NO: 390563 - RNA, 32 nt, Human
cggugaaaucauagcgcacugcagccuugaac

SEQ ID NO: 390564 - RNA, 32 nt, Human
cggugaacaguacugccuccugccaggagcug

SEQ ID NO: 390565 - RNA, 32 nt, Human
cggugaaccuauaaaucagcagucucuugggc

SEQ ID NO: 390566 - RNA, 32 nt, Human
cggugaaguggaaacuccuccugcaggaagag

SEQ ID NO: 390567 - RNA, 32 nt, Human
cggugaaguucuccgccaugaaccugaggggc

SEQ ID NO: 390568 - RNA, 32 nt, Human
cggugaaucuuuggcagacucugugugugccc

SEQ ID NO: 390569 - RNA, 32 nt, Human
cggugaaugaaccacugucauuuucuguugag

SEQ ID NO: 390570 - RNA, 32 nt, Human
cggugaaugcccucugcugggguggggaaggg

SEQ ID NO: 390571 - RNA, 32 nt, Human
cggugacagaaacuccauuugcaccagcuuac

SEQ ID NO: 390572 - RNA, 18 nt, Human
cggugacaggcccagccc

SEQ ID NO: 390573 - RNA, 32 nt, Human
cggugaccagcagcacacagcaaccagucucu

SEQ ID NO: 390574 - RNA, 32 nt, Human
cggugaccagccaccaggugugccaucgugga

SEQ ID NO: 390575 - RNA, 32 nt, Human
cggugacccaugcugcccagccuggagguaaa

SEQ ID NO: 390576 - RNA, 32 nt, Human
cggugacccugccuagaauuuucuagagucug

SEQ ID NO: 390577 - RNA, 32 nt, Human
cggugaccuccguccucuccccagccuggcac

SEQ ID NO: 390578 - RNA, 32 nt, Human
cggugaccugaggacuccacucacacuggcga

SEQ ID NO: 390579 - RNA, 32 nt, Human
cggugaccuucauucaggggaaccuggaggcu

SEQ ID NO: 390580 - RNA, 24 nt, Human
cggugacucacaccuguaauccca

SEQ ID NO: 390581 - RNA, 24 nt, Human
cggugacucacacuuguaauccca

SEQ ID NO: 390582 - RNA, 24 nt, Human
cggugacucacgccuauaauccca

SEQ ID NO: 390583 - RNA, 24 nt, Human
cggugacucacgccuauaaucuca

SEQ ID NO: 390584 - RNA, 24 nt, Human
cggugacucaugccuguaauccca

SEQ ID NO: 390585 - RNA, 24 nt, Human
cggugacucaugcuuguaauccca

SEQ ID NO: 390586 - RNA, 24 nt, Human
cggugacucgcaccuguaauccca

SEQ ID NO: 390587 - RNA, 32 nt, Human
cggugagaaaggagggccagccaguugggugg

SEQ ID NO: 390588 - RNA, 32 nt, Human
cggugagaagcagagaaggcacuugcauccua

SEQ ID NO: 390589 - RNA, 32 nt, Human
cggugagagcagaggcgcucugcugcaguuuu

SEQ ID NO: 390590 - RNA, 32 nt, Human
cggugagaggcagugggcaagugaucuuggag

SEQ ID NO: 390591 - RNA, 32 nt, Human
cggugagauggagugggucacaccuggcaagc

SEQ ID NO: 390592 - RNA, 32 nt, Human
cggugagcacacacgcccucccugucucucgc

SEQ ID NO: 390593 - RNA, 32 nt, Human
cggugagccucaguuccugggcuggacgcugg

SEQ ID NO: 390594 - RNA, 32 nt, Human
cggugagcgaagagcggucacucuccaagccc

SEQ ID NO: 390595 - RNA, 32 nt, Human
cggugagcgcagccccgcucuccgggccgggc

SEQ ID NO: 390596 - RNA, 32 nt, Human
cggugagcgugucagcauccucugguuccauc

SEQ ID NO: 390597 - RNA, 21 nt, Human
cggugaggagagguguuucca

SEQ ID NO: 390598 - RNA, 32 nt, Human
cggugaggaggcagagaguggugcaggcuggg

SEQ ID NO: 390599 - RNA, 32 nt, Human
cggugaggauguugugcucagaaaugucacug

SEQ ID NO: 390600 - RNA, 32 nt, Human
cggugaggcacgguagucuucacuuugaaaca

SEQ ID NO: 390601 - RNA, 21 nt, Human
cggugaggccaagguuuccca

SEQ ID NO: 390602 - RNA, 32 nt, Human
cggugaggccaagguuucccagugagccucug

SEQ ID NO: 390603 - RNA, 32 nt, Human
cggugaggccugacauccuggggaagggcaac

SEQ ID NO: 390604 - RNA, 32 nt, Human
cggugaggcugcagcagugguuaaggaguaac

SEQ ID NO: 390605 - RNA, 32 nt, Human
cggugagggaaagaugagcgaggagacggcga

SEQ ID NO: 390606 - RNA, 32 nt, Human
cggugagggggagggggagccucucuccaggc

SEQ ID NO: 390607 - RNA, 31 nt, Human
cggugaggugagagagaugcaucugcacguu

SEQ ID NO: 390608 - RNA, 32 nt, Human
cggugaggugcugguguccgugaaccccuacc

SEQ ID NO: 390609 - RNA, 32 nt, Human
cggugagguggccuggggagggcagaggcaag

SEQ ID NO: 390610 - RNA, 32 nt, Human
cggugaguccccucagcuggccaggacaguac

SEQ ID NO: 390611 - RNA, 32 nt, Human
cggugauccagaggagauccggaugcucaucc

SEQ ID NO: 390612 - RNA, 32 nt, Human
cggugaucucaagcugccugacuucuggugcu

SEQ ID NO: 390613 - RNA, 32 nt, Human
cggugaugagcacacaauuaaagugguuugug

SEQ ID NO: 390614 - RNA, 24 nt, Human
cggugaugcauaccuauaauccca

SEQ ID NO: 390615 - RNA, 24 nt, Human
cggugauucacgccuguaauccca

SEQ ID NO: 390616 - RNA, 32 nt, Human
cggugauucagccacagccucugccucccguu

SEQ ID NO: 390617 - RNA, 32 nt, Human
cggugcaagagagcugagggaggcgcgagggc

SEQ ID NO: 390618 - RNA, 32 nt, Human
cggugcaaucaugagucaaugcagccuccagc

SEQ ID NO: 390619 - RNA, 32 nt, Human
cggugcacaguaauaugaaagccacacuuuga

SEQ ID NO: 390620 - RNA, 21 nt, Human
cggugcaccuggguuauggua

SEQ ID NO: 390621 - RNA, 32 nt, Human
cggugcacuuucuccaccuccugcagccuccc

SEQ ID NO: 390622 - RNA, 32 nt, Human
cggugcagccaagccacacagagagacaacuu

SEQ ID NO: 390623 - RNA, 32 nt, Human
cggugcaggaggcugagugagcaggggagcac

SEQ ID NO: 390624 - RNA, 32 nt, Human
cggugcaggcuguccuggcugcucuggggaag

SEQ ID NO: 390625 - RNA, 32 nt, Human
cggugcaggguuguaaaccugcuuuaucuuuu

SEQ ID NO: 390626 - RNA, 32 nt, Human
cggugcaguucagaaagccugagguuuaaggg

SEQ ID NO: 390627 - RNA, 32 nt, Human
cggugcaugcacugugcacccuccugguuaac

SEQ ID NO: 390628 - RNA, 32 nt, Human
cggugcaugccuguaaucccagcuacucggga

SEQ ID NO: 390629 - RNA, 32 nt, Human
cggugccacccacugcacuggggccagcuggg

SEQ ID NO: 390630 - RNA, 32 nt, Human
cggugccacugcacuccagcuugggugacaga

SEQ ID NO: 390631 - RNA, 32 nt, Human
cggugccauugcucuccagccugggcgacaag

SEQ ID NO: 390632 - RNA, 32 nt, Human
cggugcccaaacuccgcccacccucuagggag

SEQ ID NO: 390633 - RNA, 32 nt, Human
cggugcccacagugccccggacacauuucaca

SEQ ID NO: 390634 - RNA, 32 nt, Human
cggugcccagagccaggaagccgcccuccugg

SEQ ID NO: 390635 - RNA, 32 nt, Human
cggugcccggcagccuuggugaaggcccugcc

SEQ ID NO: 390636 - RNA, 32 nt, Human
cggugcccguggcugaggauaagcugcugagg

SEQ ID NO: 390637 - RNA, 32 nt, Human
cggugcccguggugaugccaugccccgccacc

SEQ ID NO: 390638 - RNA, 24 nt, Human
cggugccucaugccuguaauccca

SEQ ID NO: 390639 - RNA, 32 nt, Human
cggugccugagagccucgcugucuguccuccg

SEQ ID NO: 390640 - RNA, 24 nt, Human
cggugccugcugcccagugcccau

SEQ ID NO: 390641 - RNA, 32 nt, Human
cggugccuguucuccccugaccgagccuguga

SEQ ID NO: 390642 - RNA, 20 nt, Human
cggugccuuccacccugccc

SEQ ID NO: 390643 - RNA, 32 nt, Human
cggugcgcucgcucagcaccuacucggccgcc

SEQ ID NO: 390644 - RNA, 32 nt, Human
cggugcggagagcuuggacugggagcccaaag

SEQ ID NO: 390645 - RNA, 18 nt, Human
cggugcggccggggccag

SEQ ID NO: 390646 - RNA, 32 nt, Human
cggugcggcgaggcgggcagagccagaggcac

SEQ ID NO: 390647 - RNA, 32 nt, Human
cggugcgggcggggguccgggagaagcggcgg

SEQ ID NO: 390648 - RNA, 18 nt, Human
cggugcggguccuccaca

SEQ ID NO: 390649 - RNA, 32 nt, Human
cggugcgucccccaggcugguggccgagcugc

SEQ ID NO: 390650 - RNA, 32 nt, Human
cggugcuacccuccaccucccaccucccugcg

SEQ ID NO: 390651 - RNA, 32 nt, Human
cggugcuaggcugagauggauccucucagggc

SEQ ID NO: 390652 - RNA, 23 nt, Human
cggugcucacgccuguaauccca

SEQ ID NO: 390653 - RNA, 19 nt, Human
cggugcucguccuaggcca

SEQ ID NO: 390654 - RNA, 31 nt, Human
cggugcugacuucuccccauugagagucagc

SEQ ID NO: 390655 - RNA, 32 nt, Human
cggugcugagucucuaucgggcucuguugcgc

SEQ ID NO: 390656 - RNA, 32 nt, Human
cggugcugcugcaggcugaggcugcggcagag

SEQ ID NO: 390657 - RNA, 32 nt, Human
cggugcuggcugugauucagagccagaaggag

SEQ ID NO: 390658 - RNA, 32 nt, Human
cggugcugggccaggggaaggaagggacacgg

SEQ ID NO: 390659 - RNA, 32 nt, Human
cggugcugggggcacagcugucugccaggcac

SEQ ID NO: 390660 - RNA, 32 nt, Human
cggugcugucucuaccauugcccucacuuuaa

SEQ ID NO: 390661 - RNA, 32 nt, Human
cggugcuguggcuguaaagcuguaggacccuu

SEQ ID NO: 390662 - RNA, 32 nt, Human
cggugcuucuacugcugcacgggcuguggaaa

SEQ ID NO: 390663 - RNA, 32 nt, Human
cggugcuuuccccucauauccccuagaagcaa

SEQ ID NO: 390664 - RNA, 32 nt, Human
cgguggaaggaggagcuuucuccucuggcuga

SEQ ID NO: 390665 - RNA, 32 nt, Human
cgguggacccacgagcgcgugccaccauggag

SEQ ID NO: 390666 - RNA, 32 nt, Human
cgguggaccugccgccaugcaggacgguaacu

SEQ ID NO: 390667 - RNA, 20 nt, Human
cgguggaccuggagaagcug

SEQ ID NO: 390668 - RNA, 32 nt, Human
cgguggagaaguuaaugguaaaaaccuucuug

SEQ ID NO: 390669 - RNA, 32 nt, Human
cgguggagaugaggacagagggaaccaagacu

SEQ ID NO: 390670 - RNA, 32 nt, Human
cgguggagccaccacacagccgacucucuccu

SEQ ID NO: 390671 - RNA, 32 nt, Human
cgguggagccugggugacggcgccugggccgg

SEQ ID NO: 390672 - RNA, 32 nt, Human
cgguggagggagggagcagggagcccucacuc

SEQ ID NO: 390673 - RNA, 32 nt, Human
cgguggaguaguggaccagagcaggggaguuu

SEQ ID NO: 390674 - RNA, 24 nt, Human
cgguggaucacgccuguaauccca

SEQ ID NO: 390675 - RNA, 32 nt, Human
cgguggaucaggcagguccacacuugcuaagu

SEQ ID NO: 390676 - RNA, 32 nt, Human
cgguggauguccggcucuggaccucaguuuca

SEQ ID NO: 390677 - RNA, 32 nt, Human
cgguggcaagaggcagacaugccuuugauguc

SEQ ID NO: 390678 - RNA, 32 nt, Human
cgguggcacugcacuccuagaaccuucaguuu

SEQ ID NO: 390679 - RNA, 18 nt, Human
cgguggcagcggcggcgg

SEQ ID NO: 390680 - RNA, 32 nt, Human
cgguggcagggugagcggagcggggccccgca

SEQ ID NO: 390681 - RNA, 32 nt, Human
cgguggcagucccugccugccaccccacaggg

SEQ ID NO: 390682 - RNA, 32 nt, Human
cgguggcaugaacaggcccagcuuugacuuga

SEQ ID NO: 390683 - RNA, 32 nt, Human
cgguggcaugacugucaggaggugcuggcauu

SEQ ID NO: 390684 - RNA, 21 nt, Human
cgguggcccaugccuguaauc

SEQ ID NO: 390685 - RNA, 24 nt, Human
cgguggcccaugccuguaauccca

SEQ ID NO: 390686 - RNA, 21 nt, Human
cgguggcccaugccuguuauc

SEQ ID NO: 390687 - RNA, 24 nt, Human
cgguggcccaugccuguuauccca

SEQ ID NO: 390688 - RNA, 32 nt, Human
cgguggcccugccucuccccgcucauagaagc

SEQ ID NO: 390689 - RNA, 18 nt, Human
cgguggccuccccaggcc

SEQ ID NO: 390690 - RNA, 18 nt, Human
cgguggccucuccaggcc

SEQ ID NO: 390691 - RNA, 32 nt, Human
cgguggccucuccaggcucagcuccugcccuc

SEQ ID NO: 390692 - RNA, 32 nt, Human
cgguggccucuccaggcucagcuccuggcccu

SEQ ID NO: 390693 - RNA, 32 nt, Human
cgguggccucucggggcuucugacgccaaaug

SEQ ID NO: 390694 - RNA, 18 nt, Human
cgguggccugcagagcuu

SEQ ID NO: 390695 - RNA, 32 nt, Human
cgguggccugggagcugcuuucuccccacugg

SEQ ID NO: 390696 - RNA, 32 nt, Human
cgguggcgcccggcacagagggguuaaggggg

SEQ ID NO: 390697 - RNA, 18 nt, Human
cgguggcggaggcggcgg

SEQ ID NO: 390698 - RNA, 18 nt, Human
cgguggcggcagcggcgg

SEQ ID NO: 390699 - RNA, 18 nt, Human
cgguggcggcggcagcgg

SEQ ID NO: 390700 - RNA, 18 nt, Human
cgguggcggcggcggcgg

SEQ ID NO: 390701 - RNA, 18 nt, Human
cgguggcgguggcggcgg

SEQ ID NO: 390702 - RNA, 21 nt, Human
cgguggcuaacgccuguaauc

SEQ ID NO: 390703 - RNA, 24 nt, Human
cgguggcucaagcccauaauccca

SEQ ID NO: 390704 - RNA, 21 nt, Human
cgguggcucaagccuguaauc

SEQ ID NO: 390705 - RNA, 24 nt, Human
cgguggcucacacccguaauccca

SEQ ID NO: 390706 - RNA, 24 nt, Human
cgguggcucacaccuauaauccca

SEQ ID NO: 390707 - RNA, 24 nt, Human
cgguggcucacaccuguaacccca

SEQ ID NO: 390708 - RNA, 21 nt, Human
cgguggcucacaccuguaauc

SEQ ID NO: 390709 - RNA, 32 nt, Human
cguuacucuaccccgagacugccuucugcccu

SEQ ID NO: 390710 - RNA, 32 nt, Human
cguuacucuacuuuaaaaauguaagacaagcu

SEQ ID NO: 390711 - RNA, 32 nt, Human
cguuacugacucuggugccuuaucucgaaggg

SEQ ID NO: 390712 - RNA, 32 nt, Human
cguuacugcuaaggauuaguccuggcucuucu

SEQ ID NO: 390713 - RNA, 32 nt, Human
cguuagagaauagaaucagcgaucuucacucc

SEQ ID NO: 390714 - RNA, 32 nt, Human
cguuagagacagggauucaccauguuggccug

SEQ ID NO: 390715 - RNA, 32 nt, Human
cguuagccaccuggguccacauccugcuaaga

SEQ ID NO: 390716 - RNA, 32 nt, Human
cguuagccacugcgcccggcccgagaaaauac

SEQ ID NO: 390717 - RNA, 32 nt, Human
cguuagccguggggaaagauggcggaaaauuu

SEQ ID NO: 390718 - RNA, 32 nt, Human
cguuagccugggaaaaucauucuuuuaaacaa

SEQ ID NO: 390719 - RNA, 32 nt, Human
cguuagccuuucugccuccucccucaucccau

SEQ ID NO: 390720 - RNA, 32 nt, Human
cguuaggagaagaagagaggcagggaagacaa

SEQ ID NO: 390721 - RNA, 32 nt, Human
cguuaggauggugaagugagacaaugugaaug

SEQ ID NO: 390722 - RNA, 32 nt, Human
cguuaggauguugcuuucuuuuuccauuaguu

SEQ ID NO: 390723 - RNA, 32 nt, Human
cguuaggcagagagaggaagggauuccuagca

SEQ ID NO: 390724 - RNA, 32 nt, Human
cguuaggcgggcccugagacagcugggaccgc

SEQ ID NO: 390725 - RNA, 32 nt, Human
cguuaggcucucaacaugacuauagagacccc

SEQ ID NO: 390726 - RNA, 32 nt, Human
cguuagggagagaggcccaggguggggacugg

SEQ ID NO: 390727 - RNA, 26 nt, Human
cguuagggcugcccaaacacugugga

SEQ ID NO: 390728 - RNA, 32 nt, Human
cguuaggggccugucucugcaccugucugucc

SEQ ID NO: 390729 - RNA, 32 nt, Human
cguuagguaaggggguucaagggucauggucc

SEQ ID NO: 390730 - RNA, 23 nt, Human
cguuagguuuucuuuucuuggug

SEQ ID NO: 390731 - RNA, 32 nt, Human
cguuaguaauguucaacuuuucacaaagaugg

SEQ ID NO: 390732 - RNA, 21 nt, Human
cguuagucuguucucaugcug

SEQ ID NO: 390733 - RNA, 32 nt, Human
cguuagugcucuucuuguccaggcuugccgac

SEQ ID NO: 390734 - RNA, 32 nt, Human
cguuagugcuuccggguugccgccaggaagcc

SEQ ID NO: 390735 - RNA, 32 nt, Human
cguuagugggcagguggccacagcaggacuga

SEQ ID NO: 390736 - RNA, 32 nt, Human
cguuagugucacccccuccucccugaucuguc

SEQ ID NO: 390737 - RNA, 32 nt, Human
cguuauaaacacaucaaagguucauucugacu

SEQ ID NO: 390738 - RNA, 32 nt, Human
cguuauaacacuucucagcaugcaagugagag

SEQ ID NO: 390739 - RNA, 32 nt, Human
cguuauacacagaguuugggcacacacugccc

SEQ ID NO: 390740 - RNA, 32 nt, Human
cguuaucacccaggccugauucacuggccugg

SEQ ID NO: 390741 - RNA, 32 nt, Human
cguuaucagugcaguuccguucucgggggaaa

SEQ ID NO: 390742 - RNA, 32 nt, Human
cguuauccuucaugccuguaaucccagcacuu

SEQ ID NO: 390743 - RNA, 32 nt, Human
cguuaucuccauccuuaaucucaguuguuugc

SEQ ID NO: 390744 - RNA, 32 nt, Human
cguuaucuucaugguaguugugaauacuggua

SEQ ID NO: 390745 - RNA, 32 nt, Human
cguuaugacaggaagcagaguggcuaucccuu

SEQ ID NO: 390746 - RNA, 29 nt, Human
cguuaugcuggaagaacaugucaggaaga

SEQ ID NO: 390747 - RNA, 32 nt, Human
cguuauggcgggcgccuguaaucccagcuacu

SEQ ID NO: 390748 - RNA, 32 nt, Human
cguuauguauguagucuguugcugcugaaaga

SEQ ID NO: 390749 - RNA, 32 nt, Human
cguuauucaccccaacugcucugcaucugccu

SEQ ID NO: 390750 - RNA, 32 nt, Human
cguuauugauuugagaccuuuccucuuuucua

SEQ ID NO: 390751 - RNA, 32 nt, Human
cguucaacaaugcugcaugggucacagcggca

SEQ ID NO: 390752 - RNA, 32 nt, Human
cguucaagaaaggguagggaaugaaguacccu

SEQ ID NO: 390753 - RNA, 32 nt, Human
cguucaagaccagccugggcaacagaacaaga

SEQ ID NO: 390754 - RNA, 32 nt, Human
cguucaagucuacgagcacagccguguucuaa

SEQ ID NO: 390755 - RNA, 32 nt, Human
cguucaagugugagcugcggcugagcccagcg

SEQ ID NO: 390756 - RNA, 32 nt, Human
cguucacaaugggcagcucccggcugaggguc

SEQ ID NO: 390757 - RNA, 32 nt, Human
cguucaccagccugugucucugaagcagcggu

SEQ ID NO: 390758 - RNA, 32 nt, Human
cguucacccccaggaugcuguugcuguaggac

SEQ ID NO: 390759 - RNA, 32 nt, Human
cguucaccuccccuuaucccuguuccccucuu

SEQ ID NO: 390760 - RNA, 32 nt, Human
cguucaccugagucucgcuggagcucuucucg

SEQ ID NO: 390761 - RNA, 32 nt, Human
cguucacguguucgguccuccuuagcugacuc

SEQ ID NO: 390762 - RNA, 32 nt, Human
cguucacugcaaccugacagaugagacacaug

SEQ ID NO: 390763 - RNA, 32 nt, Human
cguucacugcaaucucugccuccuggguuuaa

SEQ ID NO: 390764 - RNA, 32 nt, Human
cguucacugcagccuccaccuccccgguucaa

SEQ ID NO: 390765 - RNA, 19 nt, Human
cguucagacugacagcaga

SEQ ID NO: 390766 - RNA, 32 nt, Human
cguucagagacuuacaggugcuugccugcauu

SEQ ID NO: 390767 - RNA, 32 nt, Human
cguucagagcaucagaugaagacuucauuggg

SEQ ID NO: 390768 - RNA, 32 nt, Human
cguucagcaaguggagacuggcauucagauuc

SEQ ID NO: 390769 - RNA, 23 nt, Human
cguucagcacgugguggagaaca

SEQ ID NO: 390770 - RNA, 32 nt, Human
cguucaggccgccagccccacauucuggguug

SEQ ID NO: 390771 - RNA, 32 nt, Human
cguucaggcuuuccuaacccugccuuuuuagu

SEQ ID NO: 390772 - RNA, 32 nt, Human
cguucagggcccugccacuggugacggccacu

SEQ ID NO: 390773 - RNA, 32 nt, Human
cguucaguguuuagagaguggggagauggguc

SEQ ID NO: 390774 - RNA, 32 nt, Human
cguucaucagccccauaacccaggaaggaaca

SEQ ID NO: 390775 - RNA, 32 nt, Human
cguucaugccuguaaucccaacauuuugggag

SEQ ID NO: 390776 - RNA, 30 nt, Human
cguucaugcuuccuccccagccuucugcag

SEQ ID NO: 390777 - RNA, 32 nt, Human
cguucauggagcuggucauuucuugaaaugag

SEQ ID NO: 390778 - RNA, 30 nt, Human
cguucauggaggcauaugaccagaagaucg

SEQ ID NO: 390779 - RNA, 31 nt, Human
cguucauguugcucucggccucggugaauuc

SEQ ID NO: 390780 - RNA, 32 nt, Human
cguucauguugcucucggccucggugaauucc

SEQ ID NO: 390781 - RNA, 32 nt, Human
cguucauugagcaccuacuaugugccaggcca

SEQ ID NO: 390782 - RNA, 32 nt, Human
cguucauuuguccacuguuucuugucaucacg

SEQ ID NO: 390783 - RNA, 32 nt, Human
cguuccaauauauaaucuccuccuuuacaaga

SEQ ID NO: 390784 - RNA, 32 nt, Human
cguuccaccggguccguaucccucccgauucc

SEQ ID NO: 390785 - RNA, 22 nt, Human
cguuccaccuggggagauccca

SEQ ID NO: 390786 - RNA, 32 nt, Human
cguuccagcuugggcgacagagcaagacuguc

SEQ ID NO: 390787 - RNA, 32 nt, Human
cguucccagacaccuucccaggcgcugccagc

SEQ ID NO: 390788 - RNA, 32 nt, Human
cguucccagagccaaaugacacuaacuuauag

SEQ ID NO: 390789 - RNA, 32 nt, Human
cguucccagcagaacagcggagccuggacuga

SEQ ID NO: 390790 - RNA, 32 nt, Human
cguuccccagcucucccuacgcugcucgggcc

SEQ ID NO: 390791 - RNA, 32 nt, Human
cguucccccucgcgcagcuccaaccaaagaga

SEQ ID NO: 390792 - RNA, 32 nt, Human
cguuccccgucucggagcucacacagagaauc

SEQ ID NO: 390793 - RNA, 32 nt, Human
cguuccccuccagccuggugcugggcuccucg

SEQ ID NO: 390794 - RNA, 32 nt, Human
cguuccccuucaucuccgucccccucuuugaa

SEQ ID NO: 390795 - RNA, 32 nt, Human
cguucccgacuccggcaagaggguggcgccug

SEQ ID NO: 390796 - RNA, 32 nt, Human
cguucccuggggacauugggaaggugggcagg

SEQ ID NO: 390797 - RNA, 17 nt, Human
cguucccuguccauguc

SEQ ID NO: 390798 - RNA, 23 nt, Human
cguuccgcccggugccugggacg

SEQ ID NO: 390799 - RNA, 32 nt, Human
cguuccgcucccagcagccacacccaccgggc

SEQ ID NO: 390800 - RNA, 32 nt, Human
cguuccggccaggaguuugccgacugcagacg

SEQ ID NO: 390801 - RNA, 32 nt, Human
cguuccucagugugagcaagauuugggucucu

SEQ ID NO: 390802 - RNA, 32 nt, Human
cguuccucccaggacacccuugcugcgcucuc

SEQ ID NO: 390803 - RNA, 32 nt, Human
cguuccugcuaaaaauacaaaaauuagcuggg

SEQ ID NO: 390804 - RNA, 32 nt, Human
cguuccuggccagagcucuaccucuuugccuc

SEQ ID NO: 390805 - RNA, 32 nt, Human
cguuccugucucuguugaguucggacuggcag

SEQ ID NO: 390806 - RNA, 32 nt, Human
cguuccuuccucuuccucucuccucuccggcc

SEQ ID NO: 390807 - RNA, 32 nt, Human
cguuccuucuacucuggcaccacucuccaggc

SEQ ID NO: 390808 - RNA, 32 nt, Human
cguuccuugaagagaagcggcuucugguuccu

SEQ ID NO: 390809 - RNA, 32 nt, Human
cguuccuuuaaucccagcuacucgggagguug

SEQ ID NO: 390810 - RNA, 32 nt, Human
cguuccuuugaguggugacauccagguggcag

SEQ ID NO: 390811 - RNA, 32 nt, Human
cguuccuuuugggacuguggaagcaucagaug

SEQ ID NO: 390812 - RNA, 32 nt, Human
cguucgagggucagaggagccuggaugcuaau

SEQ ID NO: 390813 - RNA, 32 nt, Human
cguucgcgaaacagcuuuccacacaauggagc

SEQ ID NO: 390814 - RNA, 19 nt, Human
cguucgcuugucccgacca

SEQ ID NO: 390815 - RNA, 32 nt, Human
cguucggggcgcaguccucuccccggcuggcc

SEQ ID NO: 390816 - RNA, 32 nt, Human
cguucgggguaacccagaggcugaugagugug

SEQ ID NO: 390817 - RNA, 32 nt, Human
cguucuauucugcacuacaaucauuuugacaa

SEQ ID NO: 390818 - RNA, 32 nt, Human
cguucucaccaucugcuuccugucacacaagc

SEQ ID NO: 390819 - RNA, 32 nt, Human
cguucucagcacuuaauggccuugugauuaag

SEQ ID NO: 390820 - RNA, 32 nt, Human
cguucuccauuuuccugucauugggucauguu

SEQ ID NO: 390821 - RNA, 32 nt, Human
cguucuccugcguggucgcugccuccugcaga

SEQ ID NO: 390822 - RNA, 32 nt, Human
cguucucucccagagcaagucagucugagcag

SEQ ID NO: 390823 - RNA, 32 nt, Human
cguucucuccccuucucuccguggccccagag

SEQ ID NO: 390824 - RNA, 32 nt, Human
cguucucuccuggccacucuuccugcugccuc

SEQ ID NO: 390825 - RNA, 32 nt, Human
cguucucugccuggccugaggcucccugagcc

SEQ ID NO: 390826 - RNA, 32 nt, Human
cguucucuuguauuccuguugcuugagcuaca

SEQ ID NO: 390827 - RNA, 32 nt, Human
cguucugaggggccuuuggaagugaccggucu

SEQ ID NO: 390828 - RNA, 32 nt, Human
cguucugaguagcugggauuagaggcgugugc

SEQ ID NO: 390829 - RNA, 32 nt, Human
cguucugcacugccccuuggccugugugugag

SEQ ID NO: 390830 - RNA, 23 nt, Human
cguucugggcucaccuggccugg

SEQ ID NO: 390831 - RNA, 32 nt, Human
cguucugucacccaggcuggagugcagugacu

SEQ ID NO: 390832 - RNA, 32 nt, Human
cguucugucacccaggcuggcgugcaauaguu

SEQ ID NO: 390833 - RNA, 32 nt, Human
cguucugucgcccaggcuggagugcaggggca

SEQ ID NO: 390834 - RNA, 32 nt, Human
cguucugucgcccuggcuggaguggaaugccg

SEQ ID NO: 390835 - RNA, 32 nt, Human
cguucugucgcuuagcuggagugcgguggcgu

SEQ ID NO: 390836 - RNA, 32 nt, Human
cguucugucguccaggcuggagugcaguggug

SEQ ID NO: 390837 - RNA, 32 nt, Human
cguucugucguccaggcuggagugcgguggcg

SEQ ID NO: 390838 - RNA, 32 nt, Human
cguucuguggcccuggcuggaguucaguggug

SEQ ID NO: 390839 - RNA, 32 nt, Human
cguucuguuacccagggcucugcagcaccuca

SEQ ID NO: 390840 - RNA, 32 nt, Human
cguucuguuguccaggauggagugcagugguu

SEQ ID NO: 390841 - RNA, 32 nt, Human
cguucuucucugggugcuuuauucucuucuuu

SEQ ID NO: 390842 - RNA, 32 nt, Human
cguucuucugcugccaccgcugucggcaccau

SEQ ID NO: 390843 - RNA, 32 nt, Human
cguucuugccgcggcuugccugggcagguaaa

SEQ ID NO: 390844 - RNA, 32 nt, Human
cguucuuggaacuuacacccucuuggguuugc

SEQ ID NO: 390845 - RNA, 32 nt, Human
cguucuuggucagagaaaagugaagacuccac

SEQ ID NO: 390846 - RNA, 32 nt, Human
cguucuugguguggccacugaggacggcgcug

SEQ ID NO: 390847 - RNA, 32 nt, Human
cguucuugucuuucucccuccugcuuccccgg

SEQ ID NO: 390848 - RNA, 32 nt, Human
cguucuuuauuaugaaacuuuaucacauucga

SEQ ID NO: 390849 - RNA, 32 nt, Human
cguucuuugccuuucccuccccuuagcgaugu

SEQ ID NO: 390850 - RNA, 32 nt, Human
cguugaacgucacaucuuuaacccacuaacug

SEQ ID NO: 390851 - RNA, 32 nt, Human
cguugaaguuuuaagggucucagucccguuga

SEQ ID NO: 390852 - RNA, 30 nt, Human
cguugaauuuauuauguauauuauuucuaa

SEQ ID NO: 390853 - RNA, 32 nt, Human
cguugagaucacuguguagaaggauccgccug

SEQ ID NO: 390854 - RNA, 32 nt, Human
cguugagcugugcagcugcgcccugggcucca

SEQ ID NO: 390855 - RNA, 32 nt, Human
cguugaggccaaggaaugauccauacugaaaa

SEQ ID NO: 390856 - RNA, 32 nt, Human
cguugagggggaaauaccucaccagaacacaa

SEQ ID NO: 390857 - RNA, 32 nt, Human
cguugagguucacuuccuggauccuuacugcu

SEQ ID NO: 390858 - RNA, 32 nt, Human
cguugagguugcuuccuuccuggucguuugcu

SEQ ID NO: 390859 - RNA, 32 nt, Human
cguugaguguuucaaaugguucauuguuugug

SEQ ID NO: 390860 - RNA, 32 nt, Human
cguugauccauccagcccuaaaguucauugac

SEQ ID NO: 390861 - RNA, 32 nt, Human
cguugaugaggccauaaacagaaacaaugugc

SEQ ID NO: 390862 - RNA, 21 nt, Human
cguugcacuccagccugggca

SEQ ID NO: 390863 - RNA, 32 nt, Human
cguugcagaccccagaggguccugugugggug

SEQ ID NO: 390864 - RNA, 32 nt, Human
cguugcagugauguggguacugcuuucauaaa

SEQ ID NO: 390865 - RNA, 32 nt, Human
cguugcaucuccaguauugaucuuuggaaacu

SEQ ID NO: 390866 - RNA, 32 nt, Human
cguugcauugaggcaggcaggagcggcagggu

SEQ ID NO: 390867 - RNA, 32 nt, Human
cguugcauuugcagcgucuguggagugugcag

SEQ ID NO: 390868 - RNA, 32 nt, Human
cguugccagccugucucugcgcucgccauucc

SEQ ID NO: 390869 - RNA, 32 nt, Human
cguugcccagccaccaccgucucuccaaaaac

SEQ ID NO: 390870 - RNA, 25 nt, Human
cguugcccaggcuggagugcaacgg

SEQ ID NO: 390871 - RNA, 25 nt, Human
cguugcccaggcuggagugcaaugg

SEQ ID NO: 390872 - RNA, 23 nt, Human
cguugcccaggcuggagugcagu

SEQ ID NO: 390873 - RNA, 32 nt, Human
cguugcccaugccucugguccuggguggagca

SEQ ID NO: 390874 - RNA, 32 nt, Human
cguugccccagcuucacucucucccucagcac

SEQ ID NO: 390875 - RNA, 32 nt, Human
cguugccccauuaacagauuuccucuggaaug

SEQ ID NO: 390876 - RNA, 32 nt, Human
cguugcccugagcugcagccucggccccagga

SEQ ID NO: 390877 - RNA, 32 nt, Human
cguugccgcuguucccugcgcggcauggaggg

SEQ ID NO: 390878 - RNA, 32 nt, Human
cguugccggccccugaaguggagcgagaggga

SEQ ID NO: 390879 - RNA, 32 nt, Human
cguugccgggcagaggaagcugggugagugug

SEQ ID NO: 390880 - RNA, 32 nt, Human
cguugccguggggccucgagccccaggaugug

SEQ ID NO: 390881 - RNA, 32 nt, Human
cguugccucagccugcccucacccucaggacu

SEQ ID NO: 390882 - RNA, 32 nt, Human
cguugccugccacccagccuugcugccuuugc

SEQ ID NO: 390883 - RNA, 32 nt, Human
cguugcgauggauccuuggacccacuuuuguu

SEQ ID NO: 390884 - RNA, 32 nt, Human
cguugcgggaaagaggaagagagagugugagu

SEQ ID NO: 390885 - RNA, 22 nt, Human
cguugcguggaguggugggagg

SEQ ID NO: 390886 - RNA, 32 nt, Human
cguugcucaugggcuagauuggguaucaccuu

SEQ ID NO: 390887 - RNA, 32 nt, Human
cguugcugccgucaccgccuccugggucgucc

SEQ ID NO: 390888 - RNA, 32 nt, Human
cguugcuguggacacccaagucgcuggagcca

SEQ ID NO: 390889 - RNA, 32 nt, Human
cguugcuucgcgggcugggaggcccggggucc

SEQ ID NO: 390890 - RNA, 32 nt, Human
cguugcuuguucugcagcccugucuacuuggg

SEQ ID NO: 390891 - RNA, 32 nt, Human
cguuggaagggccaggguacgcagcuccccuu

SEQ ID NO: 390892 - RNA, 32 nt, Human
cguuggacugcacuugccucuccaugugaucu

SEQ ID NO: 390893 - RNA, 32 nt, Human
cguuggaggcuggagcgcaauggcccugccgu

SEQ ID NO: 390894 - RNA, 32 nt, Human
cguuggccagguuggucucgaucucuugacgu

SEQ ID NO: 390895 - RNA, 32 nt, Human
cguuggccuaacacugggcugcagagacugga

SEQ ID NO: 390896 - RNA, 21 nt, Human
cguuggccucucaggauucca

SEQ ID NO: 390897 - RNA, 32 nt, Human
cguuggccugccucuguucacccuccauggcc

SEQ ID NO: 390898 - RNA, 32 nt, Human
cguuggccuuucugucugccucuccuuccucu

SEQ ID NO: 390899 - RNA, 32 nt, Human
cguuggcgcguggccucaaucaggacuucuug

SEQ ID NO: 390900 - RNA, 32 nt, Human
cguuggcugauucagcucccagaagagacgag

SEQ ID NO: 390901 - RNA, 32 nt, Human
cguuggcuuccucuuggacugggucucaauca

SEQ ID NO: 390902 - RNA, 32 nt, Human
cguugggagaggguugggaggcagcagagcau

SEQ ID NO: 390903 - RNA, 32 nt, Human
cguugggaggagcagagccagggagccaucua

SEQ ID NO: 390904 - RNA, 32 nt, Human
cguugggaggcugaggcgggcggaucgguuga

SEQ ID NO: 390905 - RNA, 32 nt, Human
cguugggaggcugaggcgguagaaucacguga

SEQ ID NO: 390906 - RNA, 32 nt, Human
cguugggauuacaggcaugagccaccucaacg

SEQ ID NO: 390907 - RNA, 32 nt, Human
cguugggcacagcagguccugaacacccugcu

SEQ ID NO: 390908 - RNA, 32 nt, Human
cguugggccccacauucccccacugccucaca

SEQ ID NO: 390909 - RNA, 32 nt, Human
cguugggccgcgaacgcagccgccacgccggg

SEQ ID NO: 390910 - RNA, 31 nt, Human
cguugggcgaggggagccaugccaagggucc

SEQ ID NO: 390911 - RNA, 32 nt, Human
cguuggggcccagggcuggcgggccauguaac

SEQ ID NO: 390912 - RNA, 32 nt, Human
cguugggggacagagagagggacuccagaguc

SEQ ID NO: 390913 - RNA, 32 nt, Human
cguugggugaggaaaguauugugaagacaggc

SEQ ID NO: 390914 - RNA, 32 nt, Human
cguugggugguguuugguagguuucccuccag

SEQ ID NO: 390915 - RNA, 32 nt, Human
cguugguacagcuguuuguuuuacuugcacau

SEQ ID NO: 390916 - RNA, 32 nt, Human
cguuggucagggggcccugaaaacacugguaa

SEQ ID NO: 390917 - RNA, 32 nt, Human
cguuggucucagaaagaacgugaaugcuuaag

SEQ ID NO: 390918 - RNA, 32 nt, Human
cguuggucucauuggaaucugccuccuaauga

SEQ ID NO: 390919 - RNA, 32 nt, Human
cguuggucuuugauuguucuguccucacagca

SEQ ID NO: 390920 - RNA, 32 nt, Human
cguugguguuuacgaugaacaucggcaugaug

SEQ ID NO: 390921 - RNA, 32 nt, Human
cguuguagccuuuugcugugucuucgcugugu

SEQ ID NO: 390922 - RNA, 32 nt, Human
cguuguauacauguacugcaauauugcugucc

SEQ ID NO: 390923 - RNA, 32 nt, Human
cguuguauucacacaaaccugaacaaagcaaa

SEQ ID NO: 390924 - RNA, 32 nt, Human
cguugucacuuuucucuuguucuugaaacauu

SEQ ID NO: 390925 - RNA, 32 nt, Human
cguugucaugccuuacgguuuccaaugcgccg

SEQ ID NO: 390926 - RNA, 32 nt, Human
cguugucaugccuuacgguuuccaaugcggcg

SEQ ID NO: 390927 - RNA, 32 nt, Human
cguugucauguggauugagaugauauguauga

SEQ ID NO: 390928 - RNA, 32 nt, Human
cguuguccuccaccagcauuucccuuacucug

SEQ ID NO: 390929 - RNA, 32 nt, Human
cguugucuacugaccauuuccacuacaugccu

SEQ ID NO: 390930 - RNA, 32 nt, Human
cguugucuauccugggaggguguggugcuucg

SEQ ID NO: 390931 - RNA, 32 nt, Human
cguugucucugcugaaucagagcugagaacgg

SEQ ID NO: 390932 - RNA, 32 nt, Human
cguugucugccugggcucagcguggaccugcc

SEQ ID NO: 390933 - RNA, 32 nt, Human
cguugucugguugcuaaugacagccuugcaac

SEQ ID NO: 390934 - RNA, 32 nt, Human
cguugugccccgagaugagauccggaagcuga

SEQ ID NO: 390935 - RNA, 32 nt, Human
cguuguggccacugucuugcacaugccggacg

SEQ ID NO: 390936 - RNA, 19 nt, Human
cguuguggcccugcagccg

SEQ ID NO: 390937 - RNA, 32 nt, Human
cguuguggcucaugccuguaaucccagcacuu

SEQ ID NO: 390938 - RNA, 32 nt, Human
cguuguggcuggcaccuguaaucccagcauuu

SEQ ID NO: 390939 - RNA, 32 nt, Human
cguuguggugaauaugcaggaaucauucauga

SEQ ID NO: 390940 - RNA, 32 nt, Human
cguugugugcgguuaccugcuugagugauccu

SEQ ID NO: 390941 - RNA, 32 nt, Human
cguuguguuuccucagccauuuucccucugcu

SEQ ID NO: 390942 - RNA, 32 nt, Human
cguuguuggaaugacuagggacaacuagacuu

SEQ ID NO: 390943 - RNA, 32 nt, Human
cguuuaaaacagggggagcggaagggagccac

SEQ ID NO: 390944 - RNA, 32 nt, Human
cguuuaacccagacagaaguguucuuguuugu

SEQ ID NO: 390945 - RNA, 32 nt, Human
cguuuaccgugcuauaaucugcucugagcagu

SEQ ID NO: 390946 - RNA, 32 nt, Human
cguuuaccucuccugagaucagcccuaauccc

SEQ ID NO: 390947 - RNA, 32 nt, Human
cguuuagaccuuuaauucuagcacuuugaauu

SEQ ID NO: 390948 - RNA, 32 nt, Human
cguuuagcaaacaccaaaacuaauaaaucauc

SEQ ID NO: 390949 - RNA, 32 nt, Human
cguuuagcauuuuuaccaaccucacaucaugu

SEQ ID NO: 390950 - RNA, 32 nt, Human
cguuuagggaaagagaaggugggcaggagcaa

SEQ ID NO: 390951 - RNA, 32 nt, Human
cguuuagugagggcuggacugaaggagagccu

SEQ ID NO: 390952 - RNA, 32 nt, Human
cguuuagugagggcuggauugaaggaaagccu

SEQ ID NO: 390953 - RNA, 32 nt, Human
cguuuauaacuaccuucuuucgcuacccguuu

SEQ ID NO: 390954 - RNA, 32 nt, Human
cguuuauggugcuuccuucucccuccucuguc

SEQ ID NO: 390955 - RNA, 32 nt, Human
cguuuauugcuagcaguuucaaagugucaugu

SEQ ID NO: 390956 - RNA, 32 nt, Human
cguuuauuggcaaucugugaucacaagguuga

SEQ ID NO: 390957 - RNA, 32 nt, Human
cguuuauugugcauugauuaugugccagggac

SEQ ID NO: 390958 - RNA, 32 nt, Human
cguuucaaaacugaaaggaaagaaggaacaau

SEQ ID NO: 390959 - RNA, 32 nt, Human
cguuucacaacaaauucuucuuuuuggguugg

SEQ ID NO: 390960 - RNA, 32 nt, Human
cguuucaccauguuggccaggcuggucucaaa

SEQ ID NO: 390961 - RNA, 32 nt, Human
cguuucacuauguuggccaggcuggucucaaa

SEQ ID NO: 390962 - RNA, 32 nt, Human
cguuucacuguggcugcauuuuaauucuuauu

SEQ ID NO: 390963 - RNA, 32 nt, Human
cguuucagaccagcuucugggggaaggcaguc

SEQ ID NO: 390964 - RNA, 32 nt, Human
cguuucagagagaaaauuccuguuccaagaga

SEQ ID NO: 390965 - RNA, 27 nt, Human
cguuucaggcugcccaggcuuugcuga

SEQ ID NO: 390966 - RNA, 32 nt, Human
cguuucauaaaauuaagguuuaacagacugaa

SEQ ID NO: 390967 - RNA, 32 nt, Human
cguuucaucauguuggcuaggcuggucuugaa

SEQ ID NO: 390968 - RNA, 32 nt, Human
cguuucaucuuucuaggucuucacauccucac

SEQ ID NO: 390969 - RNA, 32 nt, Human
cguuuccacauccugcucugcugcaggagagg

SEQ ID NO: 390970 - RNA, 32 nt, Human
cguuuccacuggcuuuuuguacccaccgagcc

SEQ ID NO: 390971 - RNA, 32 nt, Human
cguuuccagggcauccgcagcccaggguaggg

SEQ ID NO: 390972 - RNA, 32 nt, Human
cguuuccagugaauuagugucaugucagcauc

SEQ ID NO: 390973 - RNA, 32 nt, Human
cguuuccaguuggcagcagagaucagggguua

SEQ ID NO: 390974 - RNA, 32 nt, Human
cguuucccgcuagccuggccugggcaaaugga

SEQ ID NO: 390975 - RNA, 31 nt, Human
cguuucccuagcccugggccugugccgcugu

SEQ ID NO: 390976 - RNA, 32 nt, Human
cguuucccucucccuucuuccccaccaacaaa

SEQ ID NO: 390977 - RNA, 32 nt, Human
cguuuccgggcccucagggcuggggagcucag

SEQ ID NO: 390978 - RNA, 32 nt, Human
cguuuccuccacccuacuuugauuuccuggug

SEQ ID NO: 390979 - RNA, 32 nt, Human
cguuuccucuccauccuucauccuccauuggu

SEQ ID NO: 390980 - RNA, 32 nt, Human
cguuuccugacacuaccagccugggaggccca

SEQ ID NO: 390981 - RNA, 32 nt, Human
cguuuccugagccgggaucuggggcgagaugg

SEQ ID NO: 390982 - RNA, 32 nt, Human
cguuuccuucaagaguuuucauggauucuaau

SEQ ID NO: 390983 - RNA, 32 nt, Human
cguuucgucauccucacagcaaggaccggacg

SEQ ID NO: 390984 - RNA, 32 nt, Human
cguuucuaccaaaaauacaaaaauuagccggg

SEQ ID NO: 390985 - RNA, 32 nt, Human
cguuucuacuaaaaauaacaacaauuagcuag

SEQ ID NO: 390986 - RNA, 32 nt, Human
cguuucuacuaaaaauaacaacaguuagcuag

SEQ ID NO: 390987 - RNA, 32 nt, Human
cguuucuacuaaaaauacaaaaauuagccagg

SEQ ID NO: 390988 - RNA, 32 nt, Human
cguuucuacuaaaaauacaaaaauuagccggg

SEQ ID NO: 390989 - RNA, 32 nt, Human
cguuucuacuaaaaauacaaaaauuagcuggg

SEQ ID NO: 390990 - RNA, 32 nt, Human
cguuucuacuaaaaauacaaaaauuagucagg

SEQ ID NO: 390991 - RNA, 32 nt, Human
cguuucuacuaaaaauacaaaauuagcugggc

SEQ ID NO: 390992 - RNA, 32 nt, Human
cguuucuacuaaaaaugcaaaaauuagcuggg

SEQ ID NO: 390993 - RNA, 32 nt, Human
cguuucuacucaccuccgccuccaggaagacc

SEQ ID NO: 390994 - RNA, 32 nt, Human
cguuucucagaagcagacccacccuuaaguug

SEQ ID NO: 390995 - RNA, 32 nt, Human
cguuucucuguguugaucaggcuggucucgaa

SEQ ID NO: 390996 - RNA, 32 nt, Human
cguuucucuuucuccuucucuuucccuugagg

SEQ ID NO: 390997 - RNA, 32 nt, Human
cguuucugugccucugcacucacagguuccuu

SEQ ID NO: 390998 - RNA, 32 nt, Human
cguuucuuaggaaaccaggaauccagggaagg

SEQ ID NO: 390999 - RNA, 32 nt, Human
cguuucuuccuccugcaguagaucuuagcuac

SEQ ID NO: 391000 - RNA, 32 nt, Human
cguuugaaaauacaaaaggccgggcguggugg

SEQ ID NO: 391001 - RNA, 32 nt, Human
cguuugaagucaguuuaaaacuucugaagugc

SEQ ID NO: 391002 - RNA, 32 nt, Human
cguuugacagguccucccucugcagggccugg

SEQ ID NO: 391003 - RNA, 32 nt, Human
cguuugagaggcugucaggcagcagcgaaagc

SEQ ID NO: 391004 - RNA, 32 nt, Human
cguuugaggagaaaggagaaaauacagaaaua

SEQ ID NO: 391005 - RNA, 32 nt, Human
cguuugcaccucgcugcuccagccucuggggc

SEQ ID NO: 391006 - RNA, 32 nt, Human
cguuugcagacacaggugcagcuuuggagaac

SEQ ID NO: 391007 - RNA, 32 nt, Human
cguuugcagcacaacaccauugcccggaggcu

SEQ ID NO: 391008 - RNA, 21 nt, Human
cguuugcagccaaugaagcug

SEQ ID NO: 391009 - RNA, 32 nt, Human
cguuugcauagagagaaaugauugacaguaag

SEQ ID NO: 391010 - RNA, 32 nt, Human
cguuugccacucuccagcaucuggcccagccu

SEQ ID NO: 391011 - RNA, 32 nt, Human
cguuugcggauggccgcagcaggccugugggg

SEQ ID NO: 391012 - RNA, 32 nt, Human
cguuugcuaucuugaaagcugcagcccccgua

SEQ ID NO: 391013 - RNA, 32 nt, Human
cguuugcugggaaggagaggacuuggggcaug

SEQ ID NO: 391014 - RNA, 32 nt, Human
cguuugcugggcuauuccccugcagugcagac

SEQ ID NO: 391015 - RNA, 32 nt, Human
cguuugcuuaaugccagaaguugggggaaagu

SEQ ID NO: 391016 - RNA, 32 nt, Human
cguuuggaaaggauuaaucgagaacuggguuc

SEQ ID NO: 391017 - RNA, 31 nt, Human
cguuuggauggggaagggaaagacuggggag

SEQ ID NO: 391018 - RNA, 32 nt, Human
cguuuggccaaaaagaaucugcauuuagcaca

SEQ ID NO: 391019 - RNA, 32 nt, Human
cguuuggcuguuuaagcugccaauuguagcac

SEQ ID NO: 391020 - RNA, 32 nt, Human
cguuuggguuugcagcuccuugccagagccca

SEQ ID NO: 391021 - RNA, 28 nt, Human
cguuuggugagucccggauucugguggg

SEQ ID NO: 391022 - RNA, 22 nt, Human
cguuuggugcaagauucucggg

SEQ ID NO: 391023 - RNA, 32 nt, Human
cguuuguaggcggugacccgccccuucucugg

SEQ ID NO: 391024 - RNA, 31 nt, Human
cguuugucacuuuucugauaaaagauggcca

SEQ ID NO: 391025 - RNA, 32 nt, Human
cguuugucccuccgccucccaccagcacgcgc

SEQ ID NO: 391026 - RNA, 32 nt, Human
cguuugucgccaggcuggagugcaguggugcc

SEQ ID NO: 391027 - RNA, 32 nt, Human
cguuugugugugugcguguauguauguguaua

SEQ ID NO: 391028 - RNA, 32 nt, Human
cguuuguguucuguuuuguuucgcucuuugag

SEQ ID NO: 391029 - RNA, 32 nt, Human
cguuuguuccccaagacauucuagguuugcaa

SEQ ID NO: 391030 - RNA, 32 nt, Human
cguuuguuuucacagcuuagggauuggugggu

SEQ ID NO: 391031 - RNA, 32 nt, Human
cguuuuaauuuccaggacuugaacugccaugu

SEQ ID NO: 391032 - RNA, 32 nt, Human
cguuuuacagcaguccuggaacagggcuguuu

SEQ ID NO: 391033 - RNA, 32 nt, Human
cguuuuagaaucugguaaaugucuugagaagg

SEQ ID NO: 391034 - RNA, 32 nt, Human
cguuuuaggaagaaggaggaaggaagaaggua

SEQ ID NO: 391035 - RNA, 32 nt, Human
cguuuuaggacucugugccacuuugagagacu

SEQ ID NO: 391036 - RNA, 32 nt, Human
cguuuuaggagagagaggucguaaggaagugu

SEQ ID NO: 391037 - RNA, 32 nt, Human
cguuuuaucuugaucucucucugacaaagaaa

SEQ ID NO: 391038 - RNA, 32 nt, Human
cguuuuauuuuucccaacauuaauguuucuua

SEQ ID NO: 391039 - RNA, 32 nt, Human
cguuuucaauaugccacaauuuaggacacauu

SEQ ID NO: 391040 - RNA, 32 nt, Human
cguuuucacaugcacauauguguaugcaugua

SEQ ID NO: 391041 - RNA, 24 nt, Human
cguuuucagaguucauccauguug

SEQ ID NO: 391042 - RNA, 32 nt, Human
cguuuucagaugggcaaggcacugccugucag

SEQ ID NO: 391043 - RNA, 32 nt, Human
cguuuuccagaacuuuaguauaugcaaaugca

SEQ ID NO: 391044 - RNA, 32 nt, Human
cguuuuccuucucuuuuucgacaaugguagac

SEQ ID NO: 391045 - RNA, 32 nt, Human
cguuuuccuuggcugagggaaguggccucucc

SEQ ID NO: 391046 - RNA, 32 nt, Human
cguuuucucacuguuggacucuaccucacugg

SEQ ID NO: 391047 - RNA, 32 nt, Human
cguuuucuccacccggcuccaucugcuggguc

SEQ ID NO: 391048 - RNA, 32 nt, Human
cguuuucucuccccuuucuucucucuucgcgg

SEQ ID NO: 391049 - RNA, 27 nt, Human
cguuuucucugacuucugcugacagug

SEQ ID NO: 391050 - RNA, 32 nt, Human
cguuuucugccacccaggcuggaguacagugg

SEQ ID NO: 391051 - RNA, 32 nt, Human
cguuuucugguuuugcucuugccuuguauucc

SEQ ID NO: 391052 - RNA, 32 nt, Human
cguuuucuguuugagauuuuuaucucuugauu

SEQ ID NO: 391053 - RNA, 32 nt, Human
cguuuucuuccccucacaccguuuucuuccca

SEQ ID NO: 391054 - RNA, 32 nt, Human
cguuuucuuccugcaugauccugggcccuccc

SEQ ID NO: 391055 - RNA, 32 nt, Human
cguuuucuugcucaaagggaacagugaauuag

SEQ ID NO: 391056 - RNA, 24 nt, Human
cguuuugacuguuuaaaguuuaug

SEQ ID NO: 391057 - RNA, 32 nt, Human
cguuuugauuuucaaagaagcagguucuggug

SEQ ID NO: 391058 - RNA, 32 nt, Human
cguuuugcacacaacauucaaaacacuucaua

SEQ ID NO: 391059 - RNA, 32 nt, Human
cguuuugccuuccaccaugcugugaggccucu

SEQ ID NO: 391060 - RNA, 32 nt, Human
cguuuuggaaccugcgucuggggcuccagucg

SEQ ID NO: 391061 - RNA, 32 nt, Human
cguuuuguagagaaaacuauucacaagauaaa

SEQ ID NO: 391062 - RNA, 32 nt, Human
cguuuugucgcccaggcuggagugcaguggca

SEQ ID NO: 391063 - RNA, 32 nt, Human
cguuuuguguccgauucaguguguaaacguug

SEQ ID NO: 391064 - RNA, 32 nt, Human
cguuuugugucugagcucugcgcucugcacgg

SEQ ID NO: 391065 - RNA, 32 nt, Human
cguuuuguucuuguuuaccagaaucuccuuua

SEQ ID NO: 391066 - RNA, 32 nt, Human
cguuuuguuuucucuucuugggagacaucugu

SEQ ID NO: 391067 - RNA, 32 nt, Human
cguuuuucccccagagcccuguguuuuuguga

SEQ ID NO: 391068 - RNA, 32 nt, Human
cguuuuucuaggacucugugcaacugucguau

SEQ ID NO: 391069 - RNA, 32 nt, Human
cguuuuucugcaggcuguuuucccagguuccc

SEQ ID NO: 391070 - RNA, 32 nt, Human
cguuuuucugcucucuucuggcccuccaugga

SEQ ID NO: 391071 - RNA, 32 nt, Human
cguuuuuguuucuuauuucaccaauucuggua

SEQ ID NO: 391072 - RNA, 32 nt, Human
  misc_feature (2)..(2): n is a, c, g, or u
  misc_feature (27)..(27): n is a, c, g, or u
cnugaaccugggagguggagcuugcanugagc

SEQ ID NO: 391073 - RNA, 32 nt, Human
cuaaaaacaacaaacauaauuuuucuaagugu

SEQ ID NO: 391074 - RNA, 32 nt, Human
cuaaaaacaacaaacauucauucucucacaca

SEQ ID NO: 391075 - RNA, 32 nt, Human
cuaaaaaccaaacacaccaccuuccuugaucc

SEQ ID NO: 391076 - RNA, 32 nt, Human
cuaaaaaccuucaaagacccagucuagccaaa

SEQ ID NO: 391077 - RNA, 32 nt, Human
cuaaaaacgcacagaaaaauuagccaggcaug

SEQ ID NO: 391078 - RNA, 32 nt, Human
cuaaaaacuaaaacaaaaacauucauagcaaa

SEQ ID NO: 391079 - RNA, 32 nt, Human
cuaaaaacuuaccccauaccaggaacccagag

SEQ ID NO: 391080 - RNA, 32 nt, Human
cuaaaaacuucugccccacucuugccauuucc

SEQ ID NO: 391081 - RNA, 32 nt, Human
cuaaaaagagaauuacacaugccaaauggacc

SEQ ID NO: 391082 - RNA, 32 nt, Human
cuaaaaagccacgacaugaaaaugacaauccc

SEQ ID NO: 391083 - RNA, 32 nt, Human
cuaaaaagccagugcuuuauuuggggaauuca

SEQ ID NO: 391084 - RNA, 19 nt, Human
cuaaaaagccugaacagcu

SEQ ID NO: 391085 - RNA, 20 nt, Human
cuaaaaaggcugaacauuua

SEQ ID NO: 391086 - RNA, 32 nt, Human
cuaaaaaguuugagauuugugauaacuuugua

SEQ ID NO: 391087 - RNA, 32 nt, Human
cuaaaaauacaaaaacuagcugggcauggugg

SEQ ID NO: 391088 - RNA, 32 nt, Human
cuaaaaauacaaaaaguuagcugggcauggug

SEQ ID NO: 391089 - RNA, 32 nt, Human
cuaaaaauacaaaaauagcugggcgugguggu

SEQ ID NO: 391090 - RNA, 32 nt, Human
cuaaaaauacaaaaaucagcugggcauggugg

SEQ ID NO: 391091 - RNA, 32 nt, Human
cuaaaaauacaaaaaugagcugggcauggugg

SEQ ID NO: 391092 - RNA, 32 nt, Human
cuaaaaauacaaaaaugagcugggcguggugg

SEQ ID NO: 391093 - RNA, 32 nt, Human
cuaaaaauacaaaaaugagcugggcuuggugg

SEQ ID NO: 391094 - RNA, 32 nt, Human
cuaaaaauacaaaaauuaacugggcuuggugg

SEQ ID NO: 391095 - RNA, 32 nt, Human
cuaaaaauacaaaaauuacccgggcuuggugg

SEQ ID NO: 391096 - RNA, 32 nt, Human
cuaaaaauacaaaaauuagccaggacugaugg

SEQ ID NO: 391097 - RNA, 32 nt, Human
cuaaaaauacaaaaauuagccaggcuuagugg

SEQ ID NO: 391098 - RNA, 32 nt, Human
cuaaaaauacaaaaauuagccggacgcagugg

SEQ ID NO: 391099 - RNA, 32 nt, Human
cuaaaaauacaaaaauuagccggacgugguag

SEQ ID NO: 391100 - RNA, 32 nt, Human
cuaaaaauacaaaaauuagccggacguggugg

SEQ ID NO: 391101 - RNA, 32 nt, Human
cuaaaaauacaaaaauuagcgggcguaguggc

SEQ ID NO: 391102 - RNA, 32 nt, Human
cuaaaaauacaaaaauuagcugagcucugaug

SEQ ID NO: 391103 - RNA, 32 nt, Human
cuaaaaauacaaaaauuagcugcacaugguug

SEQ ID NO: 391104 - RNA, 32 nt, Human
cuaaaaauacaaaaauuagcuggacaucaugg

SEQ ID NO: 391105 - RNA, 32 nt, Human
cuaaaaauacaaaaauuagcuggacauggugg

SEQ ID NO: 391106 - RNA, 32 nt, Human
cuaaaaauacaaaaauuagcuggacguggugg

SEQ ID NO: 391107 - RNA, 32 nt, Human
cuaaaaauacaaaaauuagcuggaugcgauag

SEQ ID NO: 391108 - RNA, 32 nt, Human
cuaaaaauacaaaaauuagcuggauguggugg

SEQ ID NO: 391109 - RNA, 32 nt, Human
cuaaaaauacaaaaauuagcugggcacggugg

SEQ ID NO: 391110 - RNA, 32 nt, Human
cuaaaaauacaaaaauuagcugggcaugaugg

SEQ ID NO: 391111 - RNA, 32 nt, Human
cuaaaaauacaaaaauuagcugggcauggcgg

SEQ ID NO: 391112 - RNA, 32 nt, Human
cuaaaaauacaaaaauuagcugggcauggugg

SEQ ID NO: 391113 - RNA, 32 nt, Human
cuaaaaauacaaaaauuagcugggcauggugu

SEQ ID NO: 391114 - RNA, 32 nt, Human
cuaaaaauacaaaaauuagcugggcgcaguag

SEQ ID NO: 391115 - RNA, 32 nt, Human
cuaaaaauacaaaaauuagcugggcgcggugg

SEQ ID NO: 391116 - RNA, 32 nt, Human
cuaaaaauacaaaaauuagcugggcggggugg

SEQ ID NO: 391117 - RNA, 32 nt, Human
cuaaaaauacaaaaauuagcugggcgugaugg

SEQ ID NO: 391118 - RNA, 32 nt, Human
cuaaaaauacaaaaauuagcugggcgugaugu

SEQ ID NO: 391119 - RNA, 32 nt, Human
cuaaaaauacaaaaauuagcugggcgugcugg

SEQ ID NO: 391120 - RNA, 32 nt, Human
cuaaaaauacaaaaauuagcugggcgugguag

SEQ ID NO: 391121 - RNA, 32 nt, Human
cuaaaaauacaaaaauuagcugggcguggugg

SEQ ID NO: 391122 - RNA, 32 nt, Human
cuaaaaauacaaaaauuagcugggcguguugg

SEQ ID NO: 391123 - RNA, 32 nt, Human
cuaaaaauacaaaaauuagcugggcguuaugg

SEQ ID NO: 391124 - RNA, 32 nt, Human
cuaaaaauacaaaaauuagcugggcuuggugg

SEQ ID NO: 391125 - RNA, 32 nt, Human
cuaaaaauacaaaaauuagcuggggcgagggg

SEQ ID NO: 391126 - RNA, 32 nt, Human
cuaaaaauacaaaaauuagcuggggguggugg

SEQ ID NO: 391127 - RNA, 32 nt, Human
cuaaaaauacaaaaauuagcugggugcagugg

SEQ ID NO: 391128 - RNA, 32 nt, Human
cuaaaaauacaaaaauuagcugggugcggugg

SEQ ID NO: 391129 - RNA, 32 nt, Human
cuaaaaauacaaaaauuagcuggguguagugg

SEQ ID NO: 391130 - RNA, 32 nt, Human
cuaaaaauacaaaaauuagcuggguguauggc

SEQ ID NO: 391131 - RNA, 32 nt, Human
cuaaaaauacaaaaauuagcugggugugaugg

SEQ ID NO: 391132 - RNA, 32 nt, Human
cuaaaaauacaaaaauuagcugggugugguga

SEQ ID NO: 391133 - RNA, 32 nt, Human
cuaaaaauacaaaaauuagcuggguguggugg

SEQ ID NO: 391134 - RNA, 32 nt, Human
cuaaaaauacaaaaauuagcuggguguguugg

SEQ ID NO: 391135 - RNA, 32 nt, Human
cuaaaaauacaaaaauuagcuggucuuggugg

SEQ ID NO: 391136 - RNA, 32 nt, Human
cuaaaaauacaaaaauuagguggacauggugg

SEQ ID NO: 391137 - RNA, 32 nt, Human
cuaaaaauacaaaaauuaggugggucuggugg

SEQ ID NO: 391138 - RNA, 32 nt, Human
cuaaaaauacaaaaauuaguugggcauggugg

SEQ ID NO: 391139 - RNA, 32 nt, Human
cuaaaaauacaaaaauuaucugggcuuggugg

SEQ ID NO: 391140 - RNA, 32 nt, Human
cuaaaaauacaaaaauuggcugggcauggugg

SEQ ID NO: 391141 - RNA, 32 nt, Human
cuaaaaauacaaaaauuugcugggcauggugg

SEQ ID NO: 391142 - RNA, 32 nt, Human
cuaaaaauacaaaaauuugcugggcuuggugg

SEQ ID NO: 391143 - RNA, 32 nt, Human
cuaaaaauacaaaaguuagcuggggcuggugg

SEQ ID NO: 391144 - RNA, 32 nt, Human
cuaaaaauacaaaauauuagcugggcguggug

SEQ ID NO: 391145 - RNA, 32 nt, Human
cuaaaaauacaaaauccaggcgugguggcaca

SEQ ID NO: 391146 - RNA, 32 nt, Human
cuaaaaauacaaaauuagcugggcaugguggc

SEQ ID NO: 391147 - RNA, 32 nt, Human
cuaaaaauacaaaauuagcugggcguggugga

SEQ ID NO: 391148 - RNA, 32 nt, Human
cuaaaaauacaaaauuagcugggcgugguggc

SEQ ID NO: 391149 - RNA, 32 nt, Human
cuaaaaauacaaaauuagcugggcgugguggu

SEQ ID NO: 391150 - RNA, 32 nt, Human
cuaaaaauacaaaauuagcuggguuugguggc

SEQ ID NO: 391151 - RNA, 32 nt, Human
cuaaaaauacaaaauuuagcugggcauggugg

SEQ ID NO: 391152 - RNA, 32 nt, Human
cuaaaaauacaaacaaaauuagcugggcaugg

SEQ ID NO: 391153 - RNA, 32 nt, Human
cuaaaaauacaaacuuggcugggcuuaguggu

SEQ ID NO: 391154 - RNA, 32 nt, Human
cuaaaaauacaaauauuagcuggauauggugg

SEQ ID NO: 391155 - RNA, 32 nt, Human
cuaaaaauacaaauauuagcugggcguggugg

SEQ ID NO: 391156 - RNA, 32 nt, Human
cuaaaaauacaacaacaacaaaauuagcuggg

SEQ ID NO: 391157 - RNA, 32 nt, Human
cuaaaaauacaagaauuagcugggcguggugg

SEQ ID NO: 391158 - RNA, 32 nt, Human
cuaaaaauacaaggauuagcugggcauggugg

SEQ ID NO: 391159 - RNA, 32 nt, Human
cuaaaaauaccaaaauuagcugggacuggugg

SEQ ID NO: 391160 - RNA, 32 nt, Human
cuaaaaauagaaacaaauuuagccaggcaugg

SEQ ID NO: 391161 - RNA, 32 nt, Human
cuaaaaauaugaaaauuagcugggcuuggugg

SEQ ID NO: 391162 - RNA, 32 nt, Human
cuaaaaaugcaaaaauuagcuggacguggugg

SEQ ID NO: 391163 - RNA, 32 nt, Human
cuaaaaaugcaaaaauuagcugggcguggugg

SEQ ID NO: 391164 - RNA, 24 nt, Human
cuaaaaaugguaaaucugaucaua

SEQ ID NO: 391165 - RNA, 32 nt, Human
cuaaaacaaauacaaaacuucgcugggaaaaa

SEQ ID NO: 391166 - RNA, 32 nt, Human
cuaaaacagacccugaguuaauuggguugaaa

SEQ ID NO: 391167 - RNA, 32 nt, Human
cuaaaacauaaauauuuauauuacagacucaa

SEQ ID NO: 391168 - RNA, 32 nt, Human
cuaaaacauccagcaaacucaaguugaaggac

SEQ ID NO: 391169 - RNA, 32 nt, Human
cuaaaacaucccugaguucaccaccuuggcca

SEQ ID NO: 391170 - RNA, 32 nt, Human
cuaaaaccaaaaacaacagugacaauagaguc

SEQ ID NO: 391171 - RNA, 32 nt, Human
cuaaaaccaaaccagaugaugaccuuucuagu

SEQ ID NO: 391172 - RNA, 32 nt, Human
cuaaaaccagcgucggaagcugugcuguagcc

SEQ ID NO: 391173 - RNA, 32 nt, Human
cuaaaaccagugagagcacacacuaagagaaa

SEQ ID NO: 391174 - RNA, 32 nt, Human
cuaaaacccaggaugaggaggaacaggcagaa

SEQ ID NO: 391175 - RNA, 32 nt, Human
cuaaaaccuuccuuggcucccugcugcccuca

SEQ ID NO: 391176 - RNA, 32 nt, Human
cuaaaacuauguucaucugccucucucugcca

SEQ ID NO: 391177 - RNA, 32 nt, Human
cuaaaacuauuuucucuuugcccuuaccacuc

SEQ ID NO: 391178 - RNA, 32 nt, Human
cuaaaacugcccccagcacguccucaagacgc

SEQ ID NO: 391179 - RNA, 32 nt, Human
cuaaaagacagaaacaauacacugccaaaaug

SEQ ID NO: 391180 - RNA, 32 nt, Human
cuaaaagagggccagaaggccugcugagggcu

SEQ ID NO: 391181 - RNA, 32 nt, Human
cuaaaagaguaggaagagagaaaugguagccu

SEQ ID NO: 391182 - RNA, 32 nt, Human
cuaaaagaugcugguccucccaaccucacucu

SEQ ID NO: 391183 - RNA, 32 nt, Human
cuaaaagauuuugauuuccuggaaugacaauu

SEQ ID NO: 391184 - RNA, 32 nt, Human
cuaaaagcuucugcuccuuccuucccaauuuc

SEQ ID NO: 391185 - RNA, 32 nt, Human
cuaaaagcuuugccacauucuucacauuugua

SEQ ID NO: 391186 - RNA, 32 nt, Human
cuaaaaggaggggucccugaagcuuucccacu

SEQ ID NO: 391187 - RNA, 32 nt, Human
cuaaaaggccuuggggcuggagcccagagagg

SEQ ID NO: 391188 - RNA, 32 nt, Human
cuaaaaguacaaaaauuagcuggauguggugg

SEQ ID NO: 391189 - RNA, 32 nt, Human
cuaaaaguacaaaaauuagcuggcgugcacca

SEQ ID NO: 391190 - RNA, 32 nt, Human
cuaaaaguacaaaaauuagcugggcaugaugg

SEQ ID NO: 391191 - RNA, 32 nt, Human
cuaaaaguacaaaaauuagcugggcguggugg

SEQ ID NO: 391192 - RNA, 32 nt, Human
cuaaaaguauuuuuaaauguuucucaugugau

SEQ ID NO: 391193 - RNA, 23 nt, Human
cuaaaagucuauaaagaaucaga

SEQ ID NO: 391194 - RNA, 26 nt, Human
cuaaaagucucaggcaauaggacaga

SEQ ID NO: 391195 - RNA, 32 nt, Human
cuaaaagucuucauacagaguacaagugcagc

SEQ ID NO: 391196 - RNA, 23 nt, Human
cuaaaagugcuacagaggacaga

SEQ ID NO: 391197 - RNA, 21 nt, Human
cuaaaaguguacagaaaacag

SEQ ID NO: 391198 - RNA, 21 nt, Human
cuaaaaguuaagaaggaaaga

SEQ ID NO: 391199 - RNA, 32 nt, Human
cuaaaauacaaaaaguuagcugggcuuggcgg

SEQ ID NO: 391200 - RNA, 32 nt, Human
cuaaaauagagaauguugucuuuugccgacca

SEQ ID NO: 391201 - RNA, 32 nt, Human
cuaaaaucauccagacuguuggugguggugcu

SEQ ID NO: 391202 - RNA, 32 nt, Human
cuaaaaucauggacuggcuuucugguuggauu

SEQ ID NO: 391203 - RNA, 32 nt, Human
cuaaaaucuauaauuuaauucaagagaaugcu

SEQ ID NO: 391204 - RNA, 32 nt, Human
cuaaaaugaaucugagcaauauggaauauuuu

SEQ ID NO: 391205 - RNA, 24 nt, Human
cuaaaaugcugggauuacaggcgu

SEQ ID NO: 391206 - RNA, 32 nt, Human
cuaaaauggaauagacaggaaaagauuguguu

SEQ ID NO: 391207 - RNA, 32 nt, Human
cuaaaaugggcaagggagagcggguggagggc

SEQ ID NO: 391208 - RNA, 32 nt, Human
cuaaaaugugaaccguugggugaucuguccuu

SEQ ID NO: 391209 - RNA, 32 nt, Human
cuaaaauguuaacugccaguuugucuuaucug

SEQ ID NO: 391210 - RNA, 32 nt, Human
cuaaaauuaucugaaguuggaagcacuuuguu

SEQ ID NO: 391211 - RNA, 32 nt, Human
cuaaaauucaaaaacaaaauuagccgggcaug

SEQ ID NO: 391212 - RNA, 32 nt, Human
cuaaaauucugucucuuccugcuuuagacagc

SEQ ID NO: 391213 - RNA, 32 nt, Human
cuaaaauugaucuauggauuuaauaccauuuu

SEQ ID NO: 391214 - RNA, 32 nt, Human
cuaaaauugcagcauuuccccagcugggcugu

SEQ ID NO: 391215 - RNA, 32 nt, Human
cuaaaauuuauaugaaaugaaaaggaaccaga

SEQ ID NO: 391216 - RNA, 32 nt, Human
cuaaacaaaacaaaugaugggagaguaaguag

SEQ ID NO: 391217 - RNA, 32 nt, Human
cuaaacaaacuuauauuucaauaaaagggagu

SEQ ID NO: 391218 - RNA, 32 nt, Human
cuaaacaaagaauguuuuugaaaagcccaaau

SEQ ID NO: 391219 - RNA, 32 nt, Human
cuaaacaaaguucagucuucugcucgccccuu

SEQ ID NO: 391220 - RNA, 32 nt, Human
cuaaacaacauagugaaacccugucucuauua

SEQ ID NO: 391221 - RNA, 32 nt, Human
cuaaacaagagaaacuaccaucuuggccagug

SEQ ID NO: 391222 - RNA, 32 nt, Human
cuaaacaagcaugcucuaacccaaugcaagga

SEQ ID NO: 391223 - RNA, 32 nt, Human
cuaaacaagggacuuggguucaguuaguguac

SEQ ID NO: 391224 - RNA, 21 nt, Human
cuaaacaaugaacucuguuca

SEQ ID NO: 391225 - RNA, 32 nt, Human
cuaaacacacacuugaggcauucaugugacua

SEQ ID NO: 391226 - RNA, 32 nt, Human
cuaaacaccuucacuaccuucuaccucgcacu

SEQ ID NO: 391227 - RNA, 32 nt, Human
cuaaacacgcaacuggcaucucauuucgccua

SEQ ID NO: 391228 - RNA, 32 nt, Human
cuaaacagagacuuaguccaaagagaaccaac

SEQ ID NO: 391229 - RNA, 32 nt, Human
cuaaacagccaagacuggagcagucucucacc

SEQ ID NO: 391230 - RNA, 32 nt, Human
cuaaacagccugacacugaggggaggcaguga

SEQ ID NO: 391231 - RNA, 32 nt, Human
cuaaacaggauuucuggucuggggucugggac

SEQ ID NO: 391232 - RNA, 32 nt, Human
cuaaacaguacuagaaauuacagugccaagag

SEQ ID NO: 391233 - RNA, 32 nt, Human
cuaaacauacaaaaauuagcugggcauggugg

SEQ ID NO: 391234 - RNA, 32 nt, Human
cuaaacaugcaaaaauuagcugggcacggugg

SEQ ID NO: 391235 - RNA, 32 nt, Human
cuaaacaugucacuuuucuguuaagaaaacug

SEQ ID NO: 391236 - RNA, 32 nt, Human
cuaaacaugugucucucccacaggucauucuc

SEQ ID NO: 391237 - RNA, 32 nt, Human
cuaaacauuugacuaacauucuguuugaauuu

SEQ ID NO: 391238 - RNA, 32 nt, Human
cuaaacauuuuugagugugaacuggggauugg

SEQ ID NO: 391239 - RNA, 32 nt, Human
cuaaaccaaguggcagagggguuggaaugugc

SEQ ID NO: 391240 - RNA, 21 nt, Human
cuaaaccacugagaaaacguu

SEQ ID NO: 391241 - RNA, 24 nt, Human
cuaaaccagccugggcaacauagu

SEQ ID NO: 391242 - RNA, 32 nt, Human
cuaaaccagcgucgguggaggaagggguauaa

SEQ ID NO: 391243 - RNA, 32 nt, Human
cuaaaccaucuuucaagagaaaggacaaaaua

SEQ ID NO: 391244 - RNA, 32 nt, Human
cuaaaccauuagggaaguucaaaggaaugugc

SEQ ID NO: 391245 - RNA, 32 nt, Human
cuaaacccagaagagaggggugggcuggggca

SEQ ID NO: 391246 - RNA, 32 nt, Human
cuaaacccagauaacuuuugaaacccaaguuc

SEQ ID NO: 391247 - RNA, 32 nt, Human
cuaaacccagugcugcucucccaucucccauc

SEQ ID NO: 391248 - RNA, 32 nt, Human
cuaaacccaucaccugcugucuucacucaaau

SEQ ID NO: 391249 - RNA, 32 nt, Human
cuaaaccccacugucuuccagggucagguugg

SEQ ID NO: 391250 - RNA, 32 nt, Human
cuaaaccccagccuugaacuucacuccucccu

SEQ ID NO: 391251 - RNA, 32 nt, Human
cuaaacccugugccuugagugugcaagcugac

SEQ ID NO: 391252 - RNA, 32 nt, Human
cuaaaccugguuuaaaugaaacaucuaauuuu

SEQ ID NO: 391253 - RNA, 32 nt, Human
cuaaaccugugcaagaugggagaccggggugg

SEQ ID NO: 391254 - RNA, 32 nt, Human
cuaaaccuucucccaucucuuucaaaaucuuu

SEQ ID NO: 391255 - RNA, 32 nt, Human
cuaaaccuugagggggagggugcucuggguuu

SEQ ID NO: 391256 - RNA, 32 nt, Human
cuaaacgaggagcugggccagguggaguacau

SEQ ID NO: 391257 - RNA, 32 nt, Human
cuaaacgccacccucacuaagucucccugggc

SEQ ID NO: 391258 - RNA, 32 nt, Human
cuaaacgugaguugcugugaacuggggauuaa

SEQ ID NO: 391259 - RNA, 32 nt, Human
cuaaacuacagaugucaacuccuuggggugcu

SEQ ID NO: 391260 - RNA, 32 nt, Human
cuaaacuaccgugaacaccuuauucucaaagg

SEQ ID NO: 391261 - RNA, 32 nt, Human
cuaaacuaccugcuguuaaaagaauagauggu

SEQ ID NO: 391262 - RNA, 32 nt, Human
cuaaacuccaaacauccucuuccauauggauc

SEQ ID NO: 391263 - RNA, 32 nt, Human
cuaaacucccuucccucucucccauuucagga

SEQ ID NO: 391264 - RNA, 32 nt, Human
cuaaacucgggggcccccugcccgcacccgga

SEQ ID NO: 391265 - RNA, 32 nt, Human
cuaaacucugaggauaaaguugccaguccuuu

SEQ ID NO: 391266 - RNA, 32 nt, Human
cuaaacucuggaaaguggaguugggggaaggg

SEQ ID NO: 391267 - RNA, 32 nt, Human
cuaaacucuggaagcuccucaucccaggcuug

SEQ ID NO: 391268 - RNA, 32 nt, Human
cuaaacucuucauguggcagagucuucuaugu

SEQ ID NO: 391269 - RNA, 32 nt, Human
cuaaacugagcagucucauaccauggagagau

SEQ ID NO: 391270 - RNA, 32 nt, Human
cuaaacugagguauggagccuccaucaucaug

SEQ ID NO: 391271 - RNA, 32 nt, Human
cuaaacugcaacuucuaaauuccauguggcau

SEQ ID NO: 391272 - RNA, 31 nt, Human
cuaaacugccucugcucucuugucuucagac

SEQ ID NO: 391273 - RNA, 32 nt, Human
cuaaacugugaguucucaugguguuuuuguaa

SEQ ID NO: 391274 - RNA, 32 nt, Human
cuaaacuucccugaauuggcuuagucaaugcc

SEQ ID NO: 391275 - RNA, 32 nt, Human
cuaaacuucccugaauuggcuuggucaaugcc

SEQ ID NO: 391276 - RNA, 32 nt, Human
cuaaacuucucccagccucuucaggaaagaaa

SEQ ID NO: 391277 - RNA, 32 nt, Human
cuaaacuugaagcaaaaucuccugucaagggu

SEQ ID NO: 391278 - RNA, 32 nt, Human
cuaaacuuucuccuuuguucucaggccuucca

SEQ ID NO: 391279 - RNA, 32 nt, Human
cuaaagaaaccagcuuuuugcacuaaagccaa

SEQ ID NO: 391280 - RNA, 32 nt, Human
cuaaagaaagaaagacaaaaguagucguccgc

SEQ ID NO: 391281 - RNA, 32 nt, Human
cuaaagaaagcacauuuuaccauugcuguugg

SEQ ID NO: 391282 - RNA, 32 nt, Human
cuaaagaaccaacccaggacagagccacaauc

SEQ ID NO: 391283 - RNA, 32 nt, Human
cuaaagaaugaacuucugucugccucguggag

SEQ ID NO: 391284 - RNA, 32 nt, Human
cuaaagaaugugccaccagacuuuaagugaua

SEQ ID NO: 391285 - RNA, 32 nt, Human
cuaaagacacaaauggcguucugcaaggggac

SEQ ID NO: 391286 - RNA, 32 nt, Human
cuaaagacauacugcaguuuguucauaaaugu

SEQ ID NO: 391287 - RNA, 32 nt, Human
cuaaagacauguggaggaagucacuguuaaau

SEQ ID NO: 391288 - RNA, 32 nt, Human
cuaaagacauugucaccgagugugugugacuc

SEQ ID NO: 391289 - RNA, 32 nt, Human
cuaaagacccaggaaggucucugggugggaua

SEQ ID NO: 391290 - RNA, 32 nt, Human
cuaaagacuguucuggccccagacacagggua

SEQ ID NO: 391291 - RNA, 32 nt, Human
cuaaagagaaccuucucacaagaauuaaaaac

SEQ ID NO: 391292 - RNA, 32 nt, Human
cuaaagagcacuaguugugaauuuaggguguu

SEQ ID NO: 391293 - RNA, 18 nt, Human
cuaaagagcugcacagca

SEQ ID NO: 391294 - RNA, 32 nt, Human
cuaaagagucaagcaucuagcccaggacauga

SEQ ID NO: 391295 - RNA, 32 nt, Human
cuaaagaguguccuccuuucuuugccaacacu

SEQ ID NO: 391296 - RNA, 32 nt, Human
cuaaagagugucuugcuauguugcccaggcug

SEQ ID NO: 391297 - RNA, 32 nt, Human
cuaaagauaaauaauaucaaaauagugucauu

SEQ ID NO: 391298 - RNA, 32 nt, Human
cuaaagauauaaaaauuagcuggauguggugg

SEQ ID NO: 391299 - RNA, 32 nt, Human
cuaaagaugaagcuacaagaaauaaguugggg

SEQ ID NO: 391300 - RNA, 32 nt, Human
cuaaagauggaguacacugaugcugaaguacu

SEQ ID NO: 391301 - RNA, 32 nt, Human
cuaaagauguuuuaagcuaaagccugaauuug

SEQ ID NO: 391302 - RNA, 32 nt, Human
cuaaagcaaaaacagaguugaaugaaggacac

SEQ ID NO: 391303 - RNA, 32 nt, Human
cuaaagcaaagucauuggaugggaggaggaag

SEQ ID NO: 391304 - RNA, 32 nt, Human
cuaaagcaauccucccaccucugccucccgag

SEQ ID NO: 391305 - RNA, 32 nt, Human
cuaaagcacuuuucauugaacauguuagccua

SEQ ID NO: 391306 - RNA, 24 nt, Human
cuaaagcagauuuaauuuuugcca

SEQ ID NO: 391307 - RNA, 32 nt, Human
cuaaagcagguaaauugucgggggagagaguu

SEQ ID NO: 391308 - RNA, 32 nt, Human
cuaaagcagguaaauuguugggggagagaguu

SEQ ID NO: 391309 - RNA, 22 nt, Human
cuaaagccaacagagauuugua

SEQ ID NO: 391310 - RNA, 32 nt, Human
cuaaagccauuugucuguguuuucuucuugug

SEQ ID NO: 391311 - RNA, 32 nt, Human
cuaaagccuccucagccuucugagucagccug

SEQ ID NO: 391312 - RNA, 32 nt, Human
cuaaagccuccuguuccaccucagguuuucac

SEQ ID NO: 391313 - RNA, 32 nt, Human
cuaaagccuguaaucccagcacuuugggaggc

SEQ ID NO: 391314 - RNA, 32 nt, Human
cuaaagcuauacuaacagcagucaccuuuagu

SEQ ID NO: 391315 - RNA, 32 nt, Human
cuaaagcuaugugaaaguugagcucaaaguag

SEQ ID NO: 391316 - RNA, 32 nt, Human
cuaaagcucaaaaacaugaaaccacaacgagg

SEQ ID NO: 391317 - RNA, 32 nt, Human
cuaaagcucagcuggaccugaccaggccucug

SEQ ID NO: 391318 - RNA, 20 nt, Human
cuaaagcugagauuacaggc

SEQ ID NO: 391319 - RNA, 32 nt, Human
cuaaagcugcagcuagcucccagcccugcaga

SEQ ID NO: 391320 - RNA, 32 nt, Human
cuaaaggaaggaggguaucaagaggcuguucu

SEQ ID NO: 391321 - RNA, 32 nt, Human
cuaaaggaaucucuugagauugucugagugga

SEQ ID NO: 391322 - RNA, 32 nt, Human
cuaaaggacuccugagucacuaccacagccac

SEQ ID NO: 391323 - RNA, 32 nt, Human
cuaaaggaggcugagguugcagugagcugaga

SEQ ID NO: 391324 - RNA, 32 nt, Human
cuaaaggauaacaucaccccaucuucagaaac

SEQ ID NO: 391325 - RNA, 32 nt, Human
cuaaaggauuugacuuucucucaacugcaguu

SEQ ID NO: 391326 - RNA, 32 nt, Human
cuaaaggcaaagcauuccggggcgcggcgcau

SEQ ID NO: 391327 - RNA, 32 nt, Human
cuaaaggcaacccuggcccacacccgcaugcg

SEQ ID NO: 391328 - RNA, 32 nt, Human
cuaaaggcacacaccaccacaccuagcuaauu

SEQ ID NO: 391329 - RNA, 31 nt, Human
cuaaaggcacuuuuauugagaaugagaagaa

SEQ ID NO: 391330 - RNA, 32 nt, Human
cuaaaggcagagccccagccucagagacaaau

SEQ ID NO: 391331 - RNA, 32 nt, Human
cuaaaggcagaggcaccuaacugcuccccgca

SEQ ID NO: 391332 - RNA, 32 nt, Human
cuaaaggccagugucugcuguauaucucucau

SEQ ID NO: 391333 - RNA, 32 nt, Human
cuaaaggcugguagccacugagcaaaacccaa

SEQ ID NO: 391334 - RNA, 32 nt, Human
cuaaaggcuugucuuuccccugcccgaccgaa

SEQ ID NO: 391335 - RNA, 32 nt, Human
cuaaaggcuuugccacauucagcacauauaua

SEQ ID NO: 391336 - RNA, 32 nt, Human
cuaaaggcuuugccacauucuucacaugugua

SEQ ID NO: 391337 - RNA, 32 nt, Human
cuaaaggcuuugccacauuguucacauuugua

SEQ ID NO: 391338 - RNA, 32 nt, Human
cuaaagggaagugggcgcuggauuuauuagau

SEQ ID NO: 391339 - RNA, 32 nt, Human
cuaaagggaagugggugcuggauuuauuagau

SEQ ID NO: 391340 - RNA, 32 nt, Human
cuaaagggcaacauauagacuuuagauccuaa

SEQ ID NO: 391341 - RNA, 32 nt, Human
cuaaaggguaacuucaggugugcagcccugag

SEQ ID NO: 391342 - RNA, 32 nt, Human
cuaaagggugugggucagggaggggucuagag

SEQ ID NO: 391343 - RNA, 32 nt, Human
cuaaaggucagaauccgggaucaggaacuguu

SEQ ID NO: 391344 - RNA, 32 nt, Human
cuaaaggucucccaggccuucccagucaaaau

SEQ ID NO: 391345 - RNA, 32 nt, Human
cuaaagguuuucuaaaaauuaaccucacaucc

SEQ ID NO: 391346 - RNA, 24 nt, Human
cuaaaguacugggauuacaggcgu

SEQ ID NO: 391347 - RNA, 32 nt, Human
cuaaaguagagcccuuugagaauacaagauau

SEQ ID NO: 391348 - RNA, 20 nt, Human
cuaaaguagcaggacucgga

SEQ ID NO: 391349 - RNA, 32 nt, Human
cuaaagucaagcaaauguucuagcccuucagg

SEQ ID NO: 391350 - RNA, 32 nt, Human
cuaaagucacauauaaaaguuaaacuacuugu

SEQ ID NO: 391351 - RNA, 32 nt, Human
cuaaagucaggaguucgagaccagccugacca

SEQ ID NO: 391352 - RNA, 32 nt, Human
cuaaagucuagugaccuuaaacugaaugauuu

SEQ ID NO: 391353 - RNA, 32 nt, Human
cuaaagucuccaaggaggucgggauggggcuu

SEQ ID NO: 391354 - RNA, 31 nt, Human
cuaaagugacucucuggguugccugcuucca

SEQ ID NO: 391355 - RNA, 32 nt, Human
cuaaagugagcccagaggccacugagaaugca

SEQ ID NO: 391356 - RNA, 32 nt, Human
cuaaagugaguugaugaaaauauuugcaaaaa

SEQ ID NO: 391357 - RNA, 22 nt, Human
cuaaagugcuaggauuacaggc

SEQ ID NO: 391358 - RNA, 24 nt, Human
cuaaagugcugggaucacaggcgu

SEQ ID NO: 391359 - RNA, 21 nt, Human
cuaaagugcugggauuacagg

SEQ ID NO: 391360 - RNA, 22 nt, Human
cuaaagugcugggauuacaggc

SEQ ID NO: 391361 - RNA, 23 nt, Human
cuaaagugcugggauuacaggca

SEQ ID NO: 391362 - RNA, 24 nt, Human
cuaaagugcugggauuacaggcgu

SEQ ID NO: 391363 - RNA, 32 nt, Human
cuaaagugcugggauuacaugagccaccacau

SEQ ID NO: 391364 - RNA, 21 nt, Human
cuaaagugcugggauugcagg

SEQ ID NO: 391365 - RNA, 22 nt, Human
cuaaagugcugggauugcaggc

SEQ ID NO: 391366 - RNA, 24 nt, Human
cuaaagugcugggauugcaggcgu

SEQ ID NO: 391367 - RNA, 21 nt, Human
cuaaagugcugggauuucagg

SEQ ID NO: 391368 - RNA, 32 nt, Human
cuaaagugucugcaaguggaaauccagagaaa

SEQ ID NO: 391369 - RNA, 32 nt, Human
cuaaagugucugcaaguggaaauccagaggaa

SEQ ID NO: 391370 - RNA, 22 nt, Human
cuaaaguuaucuccccauucua

SEQ ID NO: 391371 - RNA, 32 nt, Human
cuaaaguucauucuguagugcacagcauucag

SEQ ID NO: 391372 - RNA, 32 nt, Human
cuaaaguuguuuuguaagguuccaaacuaaua

SEQ ID NO: 391373 - RNA, 32 nt, Human
cuaaaguuuucugcuuuccuucuguccugaug

SEQ ID NO: 391374 - RNA, 32 nt, Human
cuaaauaacuaaaaguauguaaagguaaaagg

SEQ ID NO: 391375 - RNA, 32 nt, Human
cuaaauaaugcccagucuucuccccaaaguca

SEQ ID NO: 391376 - RNA, 32 nt, Human
cuaaauaauguuccauucuauagauacauauu

SEQ ID NO: 391377 - RNA, 32 nt, Human
cuaaauaccaguuaucacagacuucacuggcc

SEQ ID NO: 391378 - RNA, 32 nt, Human
cuaaauacugaacaauaugaagauucuuuucu

SEQ ID NO: 391379 - RNA, 32 nt, Human
cuaaauaggaguuacagaaaacuguuaaauag

SEQ ID NO: 391380 - RNA, 32 nt, Human
cuaaauagggcugaggcuugggcaagggcauu

SEQ ID NO: 391381 - RNA, 32 nt, Human
cuaaauagguuccccagaguccugccccucua

SEQ ID NO: 391382 - RNA, 32 nt, Human
cuaaauauaauuguuuuagucuuauggcauga

SEQ ID NO: 391383 - RNA, 21 nt, Human
cuaaauauucagcugauugua

SEQ ID NO: 391384 - RNA, 32 nt, Human
cuaaauauugcucaggcugguugcaaacuccu

SEQ ID NO: 391385 - RNA, 32 nt, Human
cuaaauauuuugcugaagaagcaguuucucag

SEQ ID NO: 391386 - RNA, 32 nt, Human
cuaaaucaauuccucaaagugugcacaaaacu

SEQ ID NO: 391387 - RNA, 32 nt, Human
cuaaaucacuuugagccugggaaauaagcccc

SEQ ID NO: 391388 - RNA, 32 nt, Human
cuaaaucaggccaggaaggaggggaaaagagu

SEQ ID NO: 391389 - RNA, 32 nt, Human
cuaaaucauugcucucuauacuaggauagacu

SEQ ID NO: 391390 - RNA, 32 nt, Human
cuaaauccagcucucccuggaacuauauacca

SEQ ID NO: 391391 - RNA, 32 nt, Human
cuaaauccaguccuccccuuggaucugccuuu

SEQ ID NO: 391392 - RNA, 32 nt, Human
cuaaauccagugugagggauguucuacaagau

SEQ ID NO: 391393 - RNA, 32 nt, Human
cuaaauccucaucugucauaucaagaaaucac

SEQ ID NO: 391394 - RNA, 20 nt, Human
cuaaauccugcuucucccua

SEQ ID NO: 391395 - RNA, 32 nt, Human
cuaaaucuccaaaauaaaacuuuuuaaaauaa

SEQ ID NO: 391396 - RNA, 32 nt, Human
cuaaaucugccucacuaaggaacgagcuuguu

SEQ ID NO: 391397 - RNA, 32 nt, Human
cuaaaucugggacagggaggugacaguggaac

SEQ ID NO: 391398 - RNA, 32 nt, Human
cuaaaucugggauuuaaaaucuuuagacaaua

SEQ ID NO: 391399 - RNA, 32 nt, Human
cuaaaucugggcuggucagaaugcugcagcga

SEQ ID NO: 391400 - RNA, 32 nt, Human
cuaaaucuguggaaugcauugugaacuguaaa

SEQ ID NO: 391401 - RNA, 32 nt, Human
cuaaaucuuuuuccuuucugaauucuugcuug

SEQ ID NO: 391402 - RNA, 32 nt, Human
cuaaaugagauauuguguggcuuuuuaguaac

SEQ ID NO: 391403 - RNA, 32 nt, Human
cuaaaugagguccucagcugaaugaggaaccc

SEQ ID NO: 391404 - RNA, 32 nt, Human
cuaaaugaugccagagaaggcuugggaaauug

SEQ ID NO: 391405 - RNA, 32 nt, Human
cuaaaugcacuccccucuccccaaagaccgug

SEQ ID NO: 391406 - RNA, 32 nt, Human
cuaaaugcagaauuaauggagacuucaaugac

SEQ ID NO: 391407 - RNA, 32 nt, Human
cuaaaugcuugauuagaaaugaucucaaaacc

SEQ ID NO: 391408 - RNA, 32 nt, Human
cuaaauggagaaagcugugcagaggaaacuua

SEQ ID NO: 391409 - RNA, 32 nt, Human
cuaaauggcagggcuagccacaacggaggcuu

SEQ ID NO: 391410 - RNA, 32 nt, Human
cuaaaugggugggcggugggggagaccgacuc

SEQ ID NO: 391411 - RNA, 32 nt, Human
cuaaauggugucaggacauuucaguacuucug

SEQ ID NO: 391412 - RNA, 32 nt, Human
cuaaauguaaaacacaagacugucauuagaau

SEQ ID NO: 391413 - RNA, 32 nt, Human
cuaaauguacuacugagcuucgcugaguuaag

SEQ ID NO: 391414 - RNA, 32 nt, Human
cuaaauguaugaaaccaagcugugccugacaa

SEQ ID NO: 391415 - RNA, 32 nt, Human
cuaaauguauucacaaacagagaagcaacauu

SEQ ID NO: 391416 - RNA, 32 nt, Human
cuaaauguccccaaccucagagggaccuagag

SEQ ID NO: 391417 - RNA, 32 nt, Human
cuaaauguguaaaagaaaaaugcagagguuau

SEQ ID NO: 391418 - RNA, 32 nt, Human
cuaaauguucugauggaugccagugccaaauu

SEQ ID NO: 391419 - RNA, 20 nt, Human
cuaaauuaccaauccacuug

SEQ ID NO: 391420 - RNA, 32 nt, Human
cuaaauuagucuaccauugagugagaauaauc

SEQ ID NO: 391421 - RNA, 32 nt, Human
cuaaauuauaaauauacaaauacauauauuau

SEQ ID NO: 391422 - RNA, 32 nt, Human
cuaaauucaguagaaucuuuugugcuucagua

SEQ ID NO: 391423 - RNA, 32 nt, Human
cuaaauucauuccugaugccagaucugaucga

SEQ ID NO: 391424 - RNA, 32 nt, Human
cuaaauuccaacucuaugucuggaccuguguu

SEQ ID NO: 391425 - RNA, 32 nt, Human
cuaaauucucagcagcaguugccuccugauau

SEQ ID NO: 391426 - RNA, 32 nt, Human
cuaaauugggaucucagccugcccuaaucuuu

SEQ ID NO: 391427 - RNA, 32 nt, Human
cuaaauuguagccauaaguauuggauaguuga

SEQ ID NO: 391428 - RNA, 32 nt, Human
cuaaauuguagggagaggaauaugguaaagcc

SEQ ID NO: 391429 - RNA, 32 nt, Human
cuaaauugugccucgugugccaaagaaacaua

SEQ ID NO: 391430 - RNA, 32 nt, Human
cuaaauuuauuccagccacccuacugaaggga

SEQ ID NO: 391431 - RNA, 32 nt, Human
cuaaauuucaaaggaaauggacccugcuuuua

SEQ ID NO: 391432 - RNA, 32 nt, Human
cuaaauuuccuacuuuguaaacaucaguagug

SEQ ID NO: 391433 - RNA, 32 nt, Human
cuaaauuuuagguguuaacuguauuuaaguaa

SEQ ID NO: 391434 - RNA, 32 nt, Human
cuaacaaaaccagcaccacaucgcuagguggu

SEQ ID NO: 391435 - RNA, 17 nt, Human
cuaacaaaaugagauga

SEQ ID NO: 391436 - RNA, 32 nt, Human
cuaacaaacacagugaaaccccgucucuacua

SEQ ID NO: 391437 - RNA, 32 nt, Human
cuaacaaacagcccuucacuuccucucccacu

SEQ ID NO: 391438 - RNA, 32 nt, Human
cuaacaaagcagguguguggcagaaauauuac

SEQ ID NO: 391439 - RNA, 32 nt, Human
cuaacaaaugaagaagcaggcugcagccugca

SEQ ID NO: 391440 - RNA, 32 nt, Human
cuaacaacauugcuuccuaaacuuucaagucc

SEQ ID NO: 391441 - RNA, 32 nt, Human
cuaacaaccaaccaaccaaccaaccaaccaca

SEQ ID NO: 391442 - RNA, 32 nt, Human
cuaacaacucacugcagugcucuucauagaca

SEQ ID NO: 391443 - RNA, 32 nt, Human
cuaacaagaaagcagggggaccugccaccccc

SEQ ID NO: 391444 - RNA, 32 nt, Human
cuaacaagcaacaacaacaacaaaauaaauag

SEQ ID NO: 391445 - RNA, 18 nt, Human
cuaacaaggcagauauga

SEQ ID NO: 391446 - RNA, 20 nt, Human
cuaacaaggugaaaccccgu

SEQ ID NO: 391447 - RNA, 32 nt, Human
cuaacaauguuuacuucuaaacuuuguugaau

SEQ ID NO: 391448 - RNA, 32 nt, Human
cuaacacaacaaagugggaccaucucuauucc

SEQ ID NO: 391449 - RNA, 32 nt, Human
cuaacacaauaugccuaggauuuaacugucgg

SEQ ID NO: 391450 - RNA, 32 nt, Human
cuaacacacccagcuaauuuuguauuuuuagu

SEQ ID NO: 391451 - RNA, 20 nt, Human
cuaacacagugaaaccccgu

SEQ ID NO: 391452 - RNA, 32 nt, Human
cuaacaccacggcacuucagccugggugacag

SEQ ID NO: 391453 - RNA, 32 nt, Human
cuaacaccaguauuggcuugcaaauaacacug

SEQ ID NO: 391454 - RNA, 32 nt, Human
cuaacaccauggaucugguugugcauaggaug

SEQ ID NO: 391455 - RNA, 32 nt, Human
cuaacacccaggcuggccgccagcuggcaccu

SEQ ID NO: 391456 - RNA, 32 nt, Human
cuaacacccauguucuguaacucuccucguau

SEQ ID NO: 391457 - RNA, 32 nt, Human
cuaacacccuuaucuacaccuucaacaagcuu

SEQ ID NO: 391458 - RNA, 32 nt, Human
cuaacaccuauaauucccagcacuuugggagg

SEQ ID NO: 391459 - RNA, 32 nt, Human
cuaacaccuccuagaggccaaggcuuaaacag

SEQ ID NO: 391460 - RNA, 32 nt, Human
cuaacaccuguaaucccagcacuuugggaggc

SEQ ID NO: 391461 - RNA, 32 nt, Human
cuaacacgcgguaaaacaucaucucuacuaaa

SEQ ID NO: 391462 - RNA, 32 nt, Human
cuaacacggccaggcugggcucugggauucug

SEQ ID NO: 391463 - RNA, 21 nt, Human
cuaacacgggugaaaccccgu

SEQ ID NO: 391464 - RNA, 20 nt, Human
cuaacacggugaaaccccgu

SEQ ID NO: 391465 - RNA, 20 nt, Human
cuaacacggugaaacccguc

SEQ ID NO: 391466 - RNA, 20 nt, Human
cuaacacggugaaacccugu

SEQ ID NO: 391467 - RNA, 20 nt, Human
cuaacacggugaaaccucgu

SEQ ID NO: 391468 - RNA, 20 nt, Human
cuaacacggugaaacuccgu

SEQ ID NO: 391469 - RNA, 20 nt, Human
cuaacacggugaaaucccgu

SEQ ID NO: 391470 - RNA, 20 nt, Human
cuaacacggugagaccccgu

SEQ ID NO: 391471 - RNA, 32 nt, Human
cuaacacucguuugcugcugcugcagugugga

SEQ ID NO: 391472 - RNA, 32 nt, Human
cuaacacugcucaggagaccccugcccucuag

SEQ ID NO: 391473 - RNA, 32 nt, Human
cuaacacuucuuuccaccuucuuaugaauaau

SEQ ID NO: 391474 - RNA, 32 nt, Human
cuaacacuugaaaauucuaugcaagagcacca

SEQ ID NO: 391475 - RNA, 32 nt, Human
cuaacacuugccuccccacugcagccugcggu

SEQ ID NO: 391476 - RNA, 32 nt, Human
cuaacacuuuugcucugcaggcagccuugccc

SEQ ID NO: 391477 - RNA, 32 nt, Human
cuaacagaaaucucagauuucucucuaagcga

SEQ ID NO: 391478 - RNA, 32 nt, Human
cuaacagaagcuuauacacauaugcaugggcu

SEQ ID NO: 391479 - RNA, 32 nt, Human
cuaacagaggcagcagcaguccuucggcuuca

SEQ ID NO: 391480 - RNA, 32 nt, Human
cuaacagaucaccauccaucuucaagaagcua

SEQ ID NO: 391481 - RNA, 17 nt, Human
cuaacagaucagcaaga

SEQ ID NO: 391482 - RNA, 32 nt, Human
cuaacagauucugcuuuaugcucugacaacua

SEQ ID NO: 391483 - RNA, 32 nt, Human
cuaacagcugugggaaggagcuacccacuucc

SEQ ID NO: 391484 - RNA, 32 nt, Human
cuaacagcuuuuccaguuguuagaugacuuug

SEQ ID NO: 391485 - RNA, 32 nt, Human
cuaacaggagaaaggacaaccaggaugaggau

SEQ ID NO: 391486 - RNA, 32 nt, Human
cuaacaggauuagacagucaaggaguggcuua

SEQ ID NO: 391487 - RNA, 32 nt, Human
cuaacaggcucaauauuccugaaugaaauauc

SEQ ID NO: 391488 - RNA, 32 nt, Human
cuaacaggcugcagaauggcaggaaggacucg

SEQ ID NO: 391489 - RNA, 32 nt, Human
cuaacagggcggcuucccagggcugcaggcgg

SEQ ID NO: 391490 - RNA, 20 nt, Human
cuaacagggugaaaccccgu

SEQ ID NO: 391491 - RNA, 20 nt, Human
cuaacagggugaaacccugu

SEQ ID NO: 391492 - RNA, 32 nt, Human
cuaacaguacccacccaaaaggaaaaucuuac

SEQ ID NO: 391493 - RNA, 32 nt, Human
cuaacaguacugagcuauuugucugucaaaau

SEQ ID NO: 391494 - RNA, 32 nt, Human
cuaacagucagaggucaguaucucagcgugug

SEQ ID NO: 391495 - RNA, 32 nt, Human
cuaacagugccucacaaggcuugggggcugga

SEQ ID NO: 391496 - RNA, 32 nt, Human
cuaacauaauccaacuccucagagccagagug

SEQ ID NO: 391497 - RNA, 32 nt, Human
cuaacauacaaaauuagcugggcacaguggca

SEQ ID NO: 391498 - RNA, 20 nt, Human
cuaacauagugaaacccugu

SEQ ID NO: 391499 - RNA, 32 nt, Human
cuaacauauccauuaaaaguaucaacuggcca

SEQ ID NO: 391500 - RNA, 32 nt, Human
cuaacauccagaaucucauaccacagacuggu

SEQ ID NO: 391501 - RNA, 32 nt, Human
cuaacauccuacucuggaaacugaucucggag

SEQ ID NO: 391502 - RNA, 32 nt, Human
cuaacaucucuagugaucccuuugucaguggu

SEQ ID NO: 391503 - RNA, 32 nt, Human
cuaacaucugaauagaugcagaaaagucacag

SEQ ID NO: 391504 - RNA, 32 nt, Human
cuaacaucuuuguccaggucccagugcccucu

SEQ ID NO: 391505 - RNA, 32 nt, Human
cuaacaugcccuguucagcuacucccacuccc

SEQ ID NO: 391506 - RNA, 32 nt, Human
cuaacauggaauccagucugugcaguguuuuu

SEQ ID NO: 391507 - RNA, 20 nt, Human
cuaacauggcgaaaccccgu

SEQ ID NO: 391508 - RNA, 20 nt, Human
cuaacaugguaaaaccccgu

SEQ ID NO: 391509 - RNA, 32 nt, Human
cuaacauggugaaaccccaugucuacuaaaaa

SEQ ID NO: 391510 - RNA, 19 nt, Human
cuaacauggugaaaccccg

SEQ ID NO: 391511 - RNA, 20 nt, Human
cuaacauggugaaaccccgu

SEQ ID NO: 391512 - RNA, 20 nt, Human
cuaacauggugaaacccugu

SEQ ID NO: 391513 - RNA, 32 nt, Human
cuaacauggugaaauccuaucucuaccaaaaa

SEQ ID NO: 391514 - RNA, 31 nt, Human
cuaacauucaauaaauagcuauaugaaauca

SEQ ID NO: 391515 - RNA, 32 nt, Human
cuaacauuccaucuucugaaauucugagauuc

SEQ ID NO: 391516 - RNA, 32 nt, Human
cuaacauugaagucuuccagaaaccucgagga

SEQ ID NO: 391517 - RNA, 32 nt, Human
cuaacauuuccacuucuaagcaucaggcuccg

SEQ ID NO: 391518 - RNA, 32 nt, Human
cuaacauuuggaaacauuuagagaacaaacaa

SEQ ID NO: 391519 - RNA, 19 nt, Human
cuaaccaaacaagcugcaa

SEQ ID NO: 391520 - RNA, 32 nt, Human
cuaaccaacauggagaaacccugucucuacua

SEQ ID NO: 391521 - RNA, 32 nt, Human
cuaaccaacauggugaaaccccgucucuacaa

SEQ ID NO: 391522 - RNA, 32 nt, Human
cuaaccaaccuccaccuccuccuuccauuuug

SEQ ID NO: 391523 - RNA, 32 nt, Human
cuaaccacauguggcuguuaagcccuugaaau

SEQ ID NO: 391524 - RNA, 32 nt, Human
cuaaccacuuccuccuccacccgaccaucacc

SEQ ID NO: 391525 - RNA, 32 nt, Human
cuaaccagccacugcagcccuccagcucuggc

SEQ ID NO: 391526 - RNA, 32 nt, Human
cuaaccagccaucauaucauauccuaucaggc

SEQ ID NO: 391527 - RNA, 32 nt, Human
cuaaccagcuguucagaaccuucuguuuuuac

SEQ ID NO: 391528 - RNA, 32 nt, Human
cuaaccaggaauaaaggcaagacagccuggaa

SEQ ID NO: 391529 - RNA, 32 nt, Human
cuaaccaggaggcugaggcaggagaaucacuu

SEQ ID NO: 391530 - RNA, 32 nt, Human
cuaaccaggcuggagugcaguggugggaucuc

SEQ ID NO: 391531 - RNA, 32 nt, Human
cuaaccaguaagguuauaacuguggcuaauuc

SEQ ID NO: 391532 - RNA, 32 nt, Human
cuaaccaucugacagagacucggccuggacac

SEQ ID NO: 391533 - RNA, 32 nt, Human
cuaaccaugaggaaauaaucagacaaauccac

SEQ ID NO: 391534 - RNA, 32 nt, Human
cuaaccaugcccugugaagauggucuucgggg

SEQ ID NO: 391535 - RNA, 32 nt, Human
cuaacccacaggaucauuuggaaccuugaaua

SEQ ID NO: 391536 - RNA, 32 nt, Human
cuaacccaccugccagcuacaguucugagcau

SEQ ID NO: 391537 - RNA, 32 nt, Human
cuaacccacucccagcucccagccuggcauga

SEQ ID NO: 391538 - RNA, 32 nt, Human
cuaacccacugcuuuuccccagcucucugccu

SEQ ID NO: 391539 - RNA, 32 nt, Human
cuaacccagaagcagcucugggcugccaggau

SEQ ID NO: 391540 - RNA, 32 nt, Human
cuaacccagcaacccucagcauacaaguggga

SEQ ID NO: 391541 - RNA, 32 nt, Human
cuaacccuccagcccugguccccagccccugc

SEQ ID NO: 391542 - RNA, 32 nt, Human
cuaacccuggagagcccaggagcgggcgggac

SEQ ID NO: 391543 - RNA, 32 nt, Human
cuaaccgggcuccagccccagacccucuagcu

SEQ ID NO: 391544 - RNA, 32 nt, Human
cuaaccuacuauuggcugaaggaaggagaaaa

SEQ ID NO: 391545 - RNA, 32 nt, Human
cuaaccuagaagcaagaaauucagggccaaga

SEQ ID NO: 391546 - RNA, 32 nt, Human
cuaaccucaacugauccaccugccucagccuc

SEQ ID NO: 391547 - RNA, 32 nt, Human
cuaaccucaggugauccgcccaccucggccuc

SEQ ID NO: 391548 - RNA, 32 nt, Human
cuaaccuccgucccagccuccuggcucaccac

SEQ ID NO: 391549 - RNA, 32 nt, Human
cuaaccucgggugauccacccaccucagccuu

SEQ ID NO: 391550 - RNA, 32 nt, Human
cuaaccucuugaucugcccuccuuggccuccc

SEQ ID NO: 391551 - RNA, 21 nt, Human
cuaaccucuuuccuuacuccu

SEQ ID NO: 391552 - RNA, 32 nt, Human
cuaaccugaccagccgcucaggacaggacccu

SEQ ID NO: 391553 - RNA, 32 nt, Human
cuaaccugaggccaacaugucccacugccccu

SEQ ID NO: 391554 - RNA, 32 nt, Human
cuaaccugcaucccauuuccagccucuuuuca

SEQ ID NO: 391555 - RNA, 32 nt, Human
cuaaccugccucucccuguacacuggcuaccc

SEQ ID NO: 391556 - RNA, 32 nt, Human
cuaaccugcggggaaggucucuccuggacacg

SEQ ID NO: 391557 - RNA, 32 nt, Human
cuaaccugcugucccuucccagccuuugagga

SEQ ID NO: 391558 - RNA, 32 nt, Human
cuaaccugcuugguggacuuggaaaagacuug

SEQ ID NO: 391559 - RNA, 32 nt, Human
cuaaccugggagacggaagaagcacgccaugg

SEQ ID NO: 391560 - RNA, 32 nt, Human
cuaaccuguaaucccagcuacuugggaggcug

SEQ ID NO: 391561 - RNA, 32 nt, Human
cuaaccuguagcuucagaggccagucugggcc

SEQ ID NO: 391562 - RNA, 32 nt, Human
cuaaccuguccagccagagcaugcgucucagc

SEQ ID NO: 391563 - RNA, 32 nt, Human
cuaaccuguuguccuccacauucuauuguccu

SEQ ID NO: 391564 - RNA, 32 nt, Human
cuaaccuugacagaaucaucaccagagacacc

SEQ ID NO: 391565 - RNA, 32 nt, Human
cuaaccuugggaaucuugcagguuauacuuaa

SEQ ID NO: 391566 - RNA, 25 nt, Human
cuaaccuugugauccgcccuccuua

SEQ ID NO: 391567 - RNA, 32 nt, Human
cuaacgagaucugaugguuuuauaggggcuuc

SEQ ID NO: 391568 - RNA, 32 nt, Human
cuaacgccuguaaucccagaacuuugggaagc

SEQ ID NO: 391569 - RNA, 32 nt, Human
cuaacgccuguaaucccagcacuugggaggcc

SEQ ID NO: 391570 - RNA, 32 nt, Human
cuaacgccuguaaucccagcacuuugagaugc

SEQ ID NO: 391571 - RNA, 32 nt, Human
cuaacgcgaggugaaugguauuaauaacagug

SEQ ID NO: 391572 - RNA, 32 nt, Human
cuaacgcucccuggcccggccggggccgcgca

SEQ ID NO: 391573 - RNA, 32 nt, Human
cuaacgcucucagugcaguugccuccuuugaa

SEQ ID NO: 391574 - RNA, 32 nt, Human
cuaacgcuuguaaucccagcgcuuugggaggc

SEQ ID NO: 391575 - RNA, 32 nt, Human
cuaacggaacuaucaucuguguuuguauugga

SEQ ID NO: 391576 - RNA, 32 nt, Human
cuaacggccagugaguuggagucucagggcag

SEQ ID NO: 391577 - RNA, 32 nt, Human
cuaacgggcccaggucacacagcagaacagug

SEQ ID NO: 391578 - RNA, 32 nt, Human
cuaacggucgcugaguguccugcucucauacg

SEQ ID NO: 391579 - RNA, 20 nt, Human
cuaacguggugaaaccccgu

SEQ ID NO: 391580 - RNA, 20 nt, Human
cuaacguggugaaacccugu

SEQ ID NO: 391581 - RNA, 32 nt, Human
cuaacuaagggcuauucauucugccauuuuua

SEQ ID NO: 391582 - RNA, 32 nt, Human
cuaacuagccugacacaagcaggugccacuau

SEQ ID NO: 391583 - RNA, 32 nt, Human
cuaacuagcuuggaaacuggaugaggucauag

SEQ ID NO: 391584 - RNA, 32 nt, Human
cuaacuaggcuucuuaauuguuuucucaucca

SEQ ID NO: 391585 - RNA, 32 nt, Human
cuaacuaucaaauuguguuuaguaacuugagu

SEQ ID NO: 391586 - RNA, 32 nt, Human
cuaacuauccccucagcuccgugugccauaag

SEQ ID NO: 391587 - RNA, 32 nt, Human
cuaacucaaacacucaucagaaauuaagugca

SEQ ID NO: 391588 - RNA, 32 nt, Human
cuaacucaacauacaggaauucaugcuggaga

SEQ ID NO: 391589 - RNA, 32 nt, Human
cuaacucagcacacacugccagucuuccccaa

SEQ ID NO: 391590 - RNA, 32 nt, Human
cuaacucagcacuucagaagccuuuuugaguu

SEQ ID NO: 391591 - RNA, 32 nt, Human
cuaacucaggcagaguaguuggcgaaggcccc

SEQ ID NO: 391592 - RNA, 32 nt, Human
cuaacuccccaccccaacaucucccucccaca

SEQ ID NO: 391593 - RNA, 32 nt, Human
cuaacuccuagacacacacagagcacugcugc

SEQ ID NO: 391594 - RNA, 32 nt, Human
cuaacuccuccuggggccugggcaguuuugau

SEQ ID NO: 391595 - RNA, 32 nt, Human
cuaacuccuuuccauuccccugggugucucau

SEQ ID NO: 391596 - RNA, 32 nt, Human
cuaacucgucuggccuuugagcucuuugcuga

SEQ ID NO: 391597 - RNA, 32 nt, Human
cuaacucuccccuuuccuucuuauggccaccc

SEQ ID NO: 391598 - RNA, 32 nt, Human
cuaacucugcagauggggcuaggacugugggc

SEQ ID NO: 391599 - RNA, 32 nt, Human
cuaacucugcccacccuccuguaccgucgaca

SEQ ID NO: 391600 - RNA, 32 nt, Human
cuaacucuucuuucauuucuucuacaacucau

SEQ ID NO: 391601 - RNA, 32 nt, Human
cuaacucuuuauuccuuagacuugaugaugca

SEQ ID NO: 391602 - RNA, 32 nt, Human
cuaacugcaacuuccaccuccuggguucaagc

SEQ ID NO: 391603 - RNA, 32 nt, Human
cuaacugcuuccugaaagcuggaaaaggagaa

SEQ ID NO: 391604 - RNA, 32 nt, Human
cuaacuggcccaggcacuggaguggaauagaa

SEQ ID NO: 391605 - RNA, 32 nt, Human
cuaacugggaggcugaggcaggaggaucacuu

SEQ ID NO: 391606 - RNA, 32 nt, Human
cuaacugggcggagguggaggugcagggucaa

SEQ ID NO: 391607 - RNA, 32 nt, Human
cuaacugggcugggccucuuuccugugguuca

SEQ ID NO: 391608 - RNA, 32 nt, Human
cuaacugggucaaguccuccuagcucugaagc

SEQ ID NO: 391609 - RNA, 32 nt, Human
cuaacugguguuauuuuguauguacccugugc

SEQ ID NO: 391610 - RNA, 32 nt, Human
cuaacuguaggaucuuccacacccuaaggcuu

SEQ ID NO: 391611 - RNA, 32 nt, Human
cuaacugucaagacaaacacaaaggcccagag

SEQ ID NO: 391612 - RNA, 32 nt, Human
cuaacugucccuaacacagcaugugggaaugc

SEQ ID NO: 391613 - RNA, 32 nt, Human
cuaacuguggugagagcaacaggccuccaaag

SEQ ID NO: 391614 - RNA, 32 nt, Human
cuaacuguucccagacagcagagcaaguauuc

SEQ ID NO: 391615 - RNA, 32 nt, Human
cuaacuguugccacucuccuccccagacuaug

SEQ ID NO: 391616 - RNA, 32 nt, Human
cuaacuuagagucugcagcccagagccacaug

SEQ ID NO: 391617 - RNA, 19 nt, Human
cuaacuucagagacaggga

SEQ ID NO: 391618 - RNA, 32 nt, Human
cuaacuuccacuuucgugucaccacuguaauu

SEQ ID NO: 391619 - RNA, 32 nt, Human
cuaacuucccaggugacaguagcaggaacaag

SEQ ID NO: 391620 - RNA, 32 nt, Human
cuaacuucuaaaccagccaaucaauaacauaa

SEQ ID NO: 391621 - RNA, 32 nt, Human
cuaacuucucucuuacucauguacuuacauuc

SEQ ID NO: 391622 - RNA, 32 nt, Human
cuaacuucuuuauccucuucucccagaggcuu

SEQ ID NO: 391623 - RNA, 32 nt, Human
cuaacuugcuucugccgaggacucauuaggaa

SEQ ID NO: 391624 - RNA, 32 nt, Human
cuaacuuggaauaaauauuuugcaucaguaaa

SEQ ID NO: 391625 - RNA, 20 nt, Human
cuaacuuggugaaacccugu

SEQ ID NO: 391626 - RNA, 32 nt, Human
cuaacuuucucccagggaucuaacuggcuagu

SEQ ID NO: 391627 - RNA, 32 nt, Human
cuaacuuuugagauagauuuggcucuaguaag

SEQ ID NO: 391628 - RNA, 32 nt, Human
cuaagaaaaacacagcagcaaacacaggaaau

SEQ ID NO: 391629 - RNA, 32 nt, Human
cuaagaaacaccauuugaugcaccuuagagaa

SEQ ID NO: 391630 - RNA, 32 nt, Human
cuaagaaacuaaaggcaagccagcaagugucu

SEQ ID NO: 391631 - RNA, 32 nt, Human
cuaagaaaucauaugaccaauauuucacuuau

SEQ ID NO: 391632 - RNA, 32 nt, Human
cuaagaaauguccucuuuuggagacucuuccu

SEQ ID NO: 391633 - RNA, 32 nt, Human
cuaagaaccugcaagguggaagugaccuguuc

SEQ ID NO: 391634 - RNA, 32 nt, Human
cuaagaagaaguaagaaagaaaaagccuguug

SEQ ID NO: 391635 - RNA, 32 nt, Human
cuaagaagcagagccaaguccacccauguccu

SEQ ID NO: 391636 - RNA, 32 nt, Human
cuaagaagccaucaacuggccuaaagaaagag

SEQ ID NO: 391637 - RNA, 32 nt, Human
cuaagaagccuccuggggguuugagcgaaucg

SEQ ID NO: 391638 - RNA, 32 nt, Human
cuaagaaggaaggggagcgugucugcuuccug

SEQ ID NO: 391639 - RNA, 32 nt, Human
cuaagaaggccgagaggguggaggccgagaag

SEQ ID NO: 391640 - RNA, 32 nt, Human
cuaagaagggaagagaaagccgggaggcaagu

SEQ ID NO: 391641 - RNA, 32 nt, Human
cuaagaagggaauccuuccuccaucccuuuga

SEQ ID NO: 391642 - RNA, 32 nt, Human
cuaagaauacaaaauuagcugggcaugguggu

SEQ ID NO: 391643 - RNA, 32 nt, Human
cuaagaauaucaaguauuucucuggcucuuga

SEQ ID NO: 391644 - RNA, 32 nt, Human
cuaagaauggugcuacauaagcguugcuguua

SEQ ID NO: 391645 - RNA, 32 nt, Human
cuaagaauuucaggauuauuguauuuacguuc

SEQ ID NO: 391646 - RNA, 32 nt, Human
cuaagacaagcaucuccugcccucucuccuuc

SEQ ID NO: 391647 - RNA, 32 nt, Human
cuaagacacaaacacauuagccuagguacaca

SEQ ID NO: 391648 - RNA, 32 nt, Human
cuaagacacagaaggcagacugggugaggaga

SEQ ID NO: 391649 - RNA, 32 nt, Human
cuaagacaccgggaccuccuggaagccaaaaa

SEQ ID NO: 391650 - RNA, 32 nt, Human
cuaagacccuucugugguagucggugagggag

SEQ ID NO: 391651 - RNA, 32 nt, Human
cuaagaccuccccuucucucuuacuccugcuc

SEQ ID NO: 391652 - RNA, 32 nt, Human
cuaagaccugcuggaaugucaccagaauagaa

SEQ ID NO: 391653 - RNA, 32 nt, Human
cuaagacugaguaaacuucuuauuuuuagaaa

SEQ ID NO: 391654 - RNA, 32 nt, Human
cuaagacuuccuucucagcuucucccauaaag

SEQ ID NO: 391655 - RNA, 32 nt, Human
cuaagagaaaaauaacuuuguugccaaaaggu

SEQ ID NO: 391656 - RNA, 32 nt, Human
cuaagagacaacaggcugccugacucuccaga

SEQ ID NO: 391657 - RNA, 32 nt, Human
cuaagagacagagauuaaaauggcuuccagag

SEQ ID NO: 391658 - RNA, 32 nt, Human
cuaagagagcaauggaaaauauguagcugcuu

SEQ ID NO: 391659 - RNA, 32 nt, Human
cuaagagauccugaaaccucugucauggaaaa

SEQ ID NO: 391660 - RNA, 32 nt, Human
cuaagagcaaacuugaagguauggauaaggcc

SEQ ID NO: 391661 - RNA, 32 nt, Human
cuaagagcaaagcauccucugcacaaaagaaa

SEQ ID NO: 391662 - RNA, 32 nt, Human
cuaagagccacaccuggugaauacucaguaaa

SEQ ID NO: 391663 - RNA, 32 nt, Human
cuaagagccccagcugcagacaggccucuggc

SEQ ID NO: 391664 - RNA, 32 nt, Human
cuaagagcccucaauugccugccuguauuaau

SEQ ID NO: 391665 - RNA, 32 nt, Human
cuaagagcugagagacagccggcagggaaucg

SEQ ID NO: 391666 - RNA, 32 nt, Human
cuaagaggaauuuuuagaugucaguuuggagg

SEQ ID NO: 391667 - RNA, 32 nt, Human
cuaagaggcaaaagagaaaagacucaagaaac

SEQ ID NO: 391668 - RNA, 32 nt, Human
cuaagagggggaggaaaggcuguucugugucu

SEQ ID NO: 391669 - RNA, 32 nt, Human
cuaagagggggcagaaaugaaugaccagguua

SEQ ID NO: 391670 - RNA, 32 nt, Human
cuaagaguaaagcaacucaaguuauaggaaag

SEQ ID NO: 391671 - RNA, 32 nt, Human
cuaagaguucuaaaggaagguaggcaucuguu

SEQ ID NO: 391672 - RNA, 32 nt, Human
cuaagaguuuaguugcuaccucagguccacag

SEQ ID NO: 391673 - RNA, 32 nt, Human
cuaagaguuugagaccagccugggcaacaugg

SEQ ID NO: 391674 - RNA, 32 nt, Human
cuaagauccuaccuuaguuuaccucucagugu

SEQ ID NO: 391675 - RNA, 32 nt, Human
cuaagaucggaagaugagugagcuugaccagu

SEQ ID NO: 391676 - RNA, 31 nt, Human
cuaagaugccucucuccagcccugucucaac

SEQ ID NO: 391677 - RNA, 32 nt, Human
cuaagauggguggaucacuugaggucaggagu

SEQ ID NO: 391678 - RNA, 22 nt, Human
cuaagauuacaggcgugagcca

SEQ ID NO: 391679 - RNA, 32 nt, Human
cuaagauucuuaagaacuggauccucgugauu

SEQ ID NO: 391680 - RNA, 32 nt, Human
cuaagauuguguuggucgcucucugaagcaga

SEQ ID NO: 391681 - RNA, 32 nt, Human
cuaagcaaaugagaguccaggaggcuggaucc

SEQ ID NO: 391682 - RNA, 27 nt, Human
cuaagcaacagcacugagauccggggc

SEQ ID NO: 391683 - RNA, 32 nt, Human
cuaagcaacauagugaaaccccaucuccaaaa

SEQ ID NO: 391684 - RNA, 32 nt, Human
cuaagcaagggagggguguuggagagccagug

SEQ ID NO: 391685 - RNA, 21 nt, Human
cuaagcaaucacgugcacaca

SEQ ID NO: 391686 - RNA, 32 nt, Human
cuaagcaaugccugcauugccugcuaugugca

SEQ ID NO: 391687 - RNA, 32 nt, Human
cuaagcacaggcagcacuucgaggcuucguga

SEQ ID NO: 391688 - RNA, 32 nt, Human
cuaagcaccauuuaaagccacuggaaauuugu

SEQ ID NO: 391689 - RNA, 32 nt, Human
cuaagcaccuguuccuggccaggcucuaggcc

SEQ ID NO: 391690 - RNA, 32 nt, Human
cuaagcaccuuauuuuauuuuugaggcagagu

SEQ ID NO: 391691 - RNA, 32 nt, Human
cuaagcacugccacuggggaaaacuccaccuu

SEQ ID NO: 391692 - RNA, 32 nt, Human
cuaagcagccucuuuguuccagaagcugcccu

SEQ ID NO: 391693 - RNA, 32 nt, Human
cuaagcaggggaggggacaggacagaaagccu

SEQ ID NO: 391694 - RNA, 32 nt, Human
cuaagcaggggcugacaggguggcaggugacu

SEQ ID NO: 391695 - RNA, 32 nt, Human
cuaagcagugcuguccuuuuguucucuccauu

SEQ ID NO: 391696 - RNA, 32 nt, Human
cuaagcaguuucaucagcauuacuugggaaaa

SEQ ID NO: 391697 - RNA, 32 nt, Human
cuaagcaucccagcugucuccucuuuucuauu

SEQ ID NO: 391698 - RNA, 32 nt, Human
cuaagcaucuaaguuauaagacucucacacuc

SEQ ID NO: 391699 - RNA, 32 nt, Human
cuaagcaugguagcucucgccuguaaucccag

SEQ ID NO: 391700 - RNA, 32 nt, Human
cuaagcauuuacacaucaaaauacugcacaca

SEQ ID NO: 391701 - RNA, 32 nt, Human
cuaagccaaccuccucucacagccucuguauc

SEQ ID NO: 391702 - RNA, 32 nt, Human
cuaagccaacuuguuaaaccucuucacggcug

SEQ ID NO: 391703 - RNA, 32 nt, Human
cuaagccagaugggauaguggaggagcgcugg

SEQ ID NO: 391704 - RNA, 32 nt, Human
cuaagccagcacugcugcucccuggagcccgg

SEQ ID NO: 391705 - RNA, 32 nt, Human
cuaagccagguaaaccaggagacacagaagac

SEQ ID NO: 391706 - RNA, 32 nt, Human
cuaagccagguggggcaacagcgguggcaggg

SEQ ID NO: 391707 - RNA, 32 nt, Human
cuaagcccaaagauuaacuagagucccuccaa

SEQ ID NO: 391708 - RNA, 32 nt, Human
cuaagcccaggaggccaagucugcagugagcu

SEQ ID NO: 391709 - RNA, 32 nt, Human
cuaagccccaggaggucgaggcugcagugagc

SEQ ID NO: 391710 - RNA, 32 nt, Human
cuaagcccgggagguggagguugcagugagcc

SEQ ID NO: 391711 - RNA, 18 nt, Human
cuaagcccuagguuucuu

SEQ ID NO: 391712 - RNA, 32 nt, Human
cuaagcccugcguacauucacaugcacacaug

SEQ ID NO: 391713 - RNA, 32 nt, Human
cuaagccuuccugguggguguggagagggagg

SEQ ID NO: 391714 - RNA, 32 nt, Human
cuaagccuugugacccaucaggccagugagug

SEQ ID NO: 391715 - RNA, 32 nt, Human
cuaagcgccauggacgaaggcacuggacugca

SEQ ID NO: 391716 - RNA, 32 nt, Human
cuaagcgccgguacccugggcccacugcuguu

SEQ ID NO: 391717 - RNA, 26 nt, Human
cuaagcggggagaugcggacauccua

SEQ ID NO: 391718 - RNA, 32 nt, Human
cuaagcuaacacagcaaguugguggcagaccu

SEQ ID NO: 391719 - RNA, 32 nt, Human
cuaagcuacaaaccauucuccaaaggaaaaga

SEQ ID NO: 391720 - RNA, 32 nt, Human
cuaagcuagcacacagcacuugggccagcaaa

SEQ ID NO: 391721 - RNA, 32 nt, Human
cuaagcuagcauugaagagagggauaaaauuc

SEQ ID NO: 391722 - RNA, 32 nt, Human
cuaagcuaggucuaggucuacacuccuaggac

SEQ ID NO: 391723 - RNA, 32 nt, Human
cuaagcuauuugggaaaguucuccccaccgcc

SEQ ID NO: 391724 - RNA, 32 nt, Human
cuaagcucaagugauccucccaccucagccuc

SEQ ID NO: 391725 - RNA, 32 nt, Human
cuaagcuccuccuuuacuuccucucuccucuu

SEQ ID NO: 391726 - RNA, 32 nt, Human
cuaagcucuaguguccccaucuguaaaauggg

SEQ ID NO: 391727 - RNA, 32 nt, Human
cuaagcucucacccgcucugcagccaccuggc

SEQ ID NO: 391728 - RNA, 32 nt, Human
cuaagcugagaagggagagcgagcuuaggacc

SEQ ID NO: 391729 - RNA, 32 nt, Human
cuaagcugagcagugcagugugaacagggccc

SEQ ID NO: 391730 - RNA, 32 nt, Human
cuaagcugcuccaaccuccuuuuugucuuuug

SEQ ID NO: 391731 - RNA, 32 nt, Human
cuaagcugcugacaucauccacugccuucugc

SEQ ID NO: 391732 - RNA, 32 nt, Human
cuaagcuuaaguagacuauacaguuguaugaa

SEQ ID NO: 391733 - RNA, 32 nt, Human
cuaaggaaagaguugauccuuaugagggagau

SEQ ID NO: 391734 - RNA, 32 nt, Human
cuaaggaaauacuuauaccaaaaauagaggug

SEQ ID NO: 391735 - RNA, 32 nt, Human
cuaaggaacaccuucaaauaaagcuuagacac

SEQ ID NO: 391736 - RNA, 32 nt, Human
cuaaggaauuuuuaucaccaaaaugaauguua

SEQ ID NO: 391737 - RNA, 32 nt, Human
cuaaggaccugcgagcuggagcucuucucggg

SEQ ID NO: 391738 - RNA, 32 nt, Human
cuaaggacucaaauccaaaagcaugagcaaca

SEQ ID NO: 391739 - RNA, 32 nt, Human
cuaaggacucaaauccagaagcaugagcaaca

SEQ ID NO: 391740 - RNA, 32 nt, Human
cuaaggacuccuggucacuggguaggguggcu

SEQ ID NO: 391741 - RNA, 32 nt, Human
cuaaggagaagcagcaggaaugaugcuuugau

SEQ ID NO: 391742 - RNA, 32 nt, Human
cuaaggagaggagagauuaugucauaugcaac

SEQ ID NO: 391743 - RNA, 32 nt, Human
cuaaggagaugggaauaaagaggccagagagc

SEQ ID NO: 391744 - RNA, 32 nt, Human
cuaaggagcacuagaaugagaaaucauguugu

SEQ ID NO: 391745 - RNA, 32 nt, Human
cuaaggaggaagaggaaggcagcccuggagug

SEQ ID NO: 391746 - RNA, 32 nt, Human
cuaaggagguaggaaguauggggaggguuaga

SEQ ID NO: 391747 - RNA, 18 nt, Human
cuaaggaguccccaggag

SEQ ID NO: 391748 - RNA, 32 nt, Human
cuaaggagugaugagguuagaggaucacuucu

SEQ ID NO: 391749 - RNA, 32 nt, Human
cuaaggauacuugacuuagaacucagucauuc

SEQ ID NO: 391750 - RNA, 32 nt, Human
cuaaggaucucucaggagcacaggcagcugga

SEQ ID NO: 391751 - RNA, 32 nt, Human
cuaaggaugaaagcaaaggagggccuugagga

SEQ ID NO: 391752 - RNA, 32 nt, Human
cuaaggauggcugauuccccaagggcacccgc

SEQ ID NO: 391753 - RNA, 32 nt, Human
cuaaggcaccgagcccaaaaggccccaggcac

SEQ ID NO: 391754 - RNA, 32 nt, Human
cuaaggcaggcagaucaccugaggucaggagu

SEQ ID NO: 391755 - RNA, 24 nt, Human
cuaaggcaggcagaucacuugaga

SEQ ID NO: 391756 - RNA, 32 nt, Human
cuaaggcaggcagaucauuugaggucaggagu

SEQ ID NO: 391757 - RNA, 32 nt, Human
cuaaggcaggcggaucacuugaggucaggagu

SEQ ID NO: 391758 - RNA, 32 nt, Human
cuaaggcaggcugaucacuugaggucaggaau

SEQ ID NO: 391759 - RNA, 32 nt, Human
cuaaggcagugucuuuaaugggcaccagcacg

SEQ ID NO: 391760 - RNA, 32 nt, Human
cuaaggcaucucuacucccuccagaggagccg

SEQ ID NO: 391761 - RNA, 32 nt, Human
cuaaggccacugcuuccugcuuugugaagccu

SEQ ID NO: 391762 - RNA, 32 nt, Human
cuaaggcccgagcgccuggugcugagugcacc

SEQ ID NO: 391763 - RNA, 32 nt, Human
cuaaggccgggaguucaagaccagccugacca

SEQ ID NO: 391764 - RNA, 32 nt, Human
cuaaggccuccgcuucccuccugaggucucau

SEQ ID NO: 391765 - RNA, 32 nt, Human
cuaaggcggguggaucaccugaggccaggagu

SEQ ID NO: 391766 - RNA, 32 nt, Human
cuaaggcguucuguuacagcagcacaaaggaa

SEQ ID NO: 391767 - RNA, 32 nt, Human
cuaaggcucggccuccccuacuggccugguug

SEQ ID NO: 391768 - RNA, 32 nt, Human
cuaaggcucuuuuugcuuucauggcccugucc

SEQ ID NO: 391769 - RNA, 32 nt, Human
cuaaggcugaggcacggagaagaaaaggaauc

SEQ ID NO: 391770 - RNA, 31 nt, Human
cuaaggcuuguguccaucaacagaugaaugg

SEQ ID NO: 391771 - RNA, 32 nt, Human
cuaagggaacaguuagagcagagaugaagaaa

SEQ ID NO: 391772 - RNA, 32 nt, Human
cuaagggacccccauccuagggaucuugucag

SEQ ID NO: 391773 - RNA, 32 nt, Human
cuaagggagauggggcugaggacagcucaaaa

SEQ ID NO: 391774 - RNA, 32 nt, Human
cuaagggauuugaucugcucaucuucaguuga

SEQ ID NO: 391775 - RNA, 32 nt, Human
cuaagggcacggcaggaaggaggugucguccu

SEQ ID NO: 391776 - RNA, 32 nt, Human
cuaaggggagacuucaggggaggaucaagcuu

SEQ ID NO: 391777 - RNA, 32 nt, Human
cuaaggggcagaacagucuuuuuggguaaggg

SEQ ID NO: 391778 - RNA, 32 nt, Human
cuaagggggcucagcagacucugguugacugu

SEQ ID NO: 391779 - RNA, 32 nt, Human
cuaagggguccccaaagaacuaaagagucagc

SEQ ID NO: 391780 - RNA, 32 nt, Human
cuaagggguggggugaggggauggagagggag

SEQ ID NO: 391781 - RNA, 32 nt, Human
cuaaggguaagggagagggagggagccgggag

SEQ ID NO: 391782 - RNA, 32 nt, Human
cuaaggguaugaaggaccuguauuggggucga

SEQ ID NO: 391783 - RNA, 32 nt, Human
cuaagggucaacucaguuucucagccauggac

SEQ ID NO: 391784 - RNA, 32 nt, Human
cuaagggucccaccccucaccccacccccacc

SEQ ID NO: 391785 - RNA, 32 nt, Human
cuaagggugugaaccucaccuccuggggcuuc

SEQ ID NO: 391786 - RNA, 32 nt, Human
cuaagguacagagaggucaaguaacuugccca

SEQ ID NO: 391787 - RNA, 32 nt, Human
cuaagguacuaauuuguagcugcucugaagua

SEQ ID NO: 391788 - RNA, 32 nt, Human
cuaagguagaggccucacagcccuugaguaaa

SEQ ID NO: 391789 - RNA, 32 nt, Human
cuaagguagcagugccuguguguuggagcuca

SEQ ID NO: 391790 - RNA, 32 nt, Human
cuaagguagggaggaggaagaugcccccaauu

SEQ ID NO: 391791 - RNA, 32 nt, Human
cuaaggucaaaguucaaacgcacuccacacgg

SEQ ID NO: 391792 - RNA, 32 nt, Human
cuaaggucacccaagcagugguuggauuuuau

SEQ ID NO: 391793 - RNA, 32 nt, Human
cuaaggucacccagcuguuugguaauaguguu

SEQ ID NO: 391794 - RNA, 32 nt, Human
cuaaggucagcuguuaccucagcugggccugg

SEQ ID NO: 391795 - RNA, 32 nt, Human
cuaaggucaggaguucaagaccagccuggcca

SEQ ID NO: 391796 - RNA, 32 nt, Human
cuaaggucaggaguucaagaccagccugguca

SEQ ID NO: 391797 - RNA, 32 nt, Human
cuaaggucaggaguucaagaccagcuuggcca

SEQ ID NO: 391798 - RNA, 32 nt, Human
cuaaggucaggaguuccagaccagccugguca

SEQ ID NO: 391799 - RNA, 32 nt, Human
cuaaggucaggaguucgagaccagcccagcca

SEQ ID NO: 391800 - RNA, 32 nt, Human
cuaaggucaggaguucgagaccagccuagcca

SEQ ID NO: 391801 - RNA, 32 nt, Human
cuaaggucaggaguucgagaccagccuggcca

SEQ ID NO: 391802 - RNA, 32 nt, Human
cuaaggucaggaguugaagaccagccuggcca

SEQ ID NO: 391803 - RNA, 32 nt, Human
cuaaggucaggaguuugagaccagccugagca

SEQ ID NO: 391804 - RNA, 32 nt, Human
cuaaggucaggaguuugagaccagccuggcca

SEQ ID NO: 391805 - RNA, 32 nt, Human
cuaagguccuccucagcuucuagaccuagaag

SEQ ID NO: 391806 - RNA, 32 nt, Human
cuaaggucuggaguucgagaccagccuggcca

SEQ ID NO: 391807 - RNA, 32 nt, Human
cuaaggugacauuucaagaaacacauguguug

SEQ ID NO: 391808 - RNA, 32 nt, Human
cuaaggugaugugguuuuaaucuuucauucug

SEQ ID NO: 391809 - RNA, 32 nt, Human
cuaaggugcugcaggaccuggggccagggaca

SEQ ID NO: 391810 - RNA, 32 nt, Human
cuaaggugggaggaucaccugagcucaagagg

SEQ ID NO: 391811 - RNA, 32 nt, Human
cuaaggugggcggaucaccugaugucaggagu

SEQ ID NO: 391812 - RNA, 32 nt, Human
cuaagguggguggaucaccugaggucaagagu

SEQ ID NO: 391813 - RNA, 32 nt, Human
cuaagguggugaugccauuuuguucugccaaa

SEQ ID NO: 391814 - RNA, 32 nt, Human
cuaagguuacauacagguuuggagauuaggac

SEQ ID NO: 391815 - RNA, 32 nt, Human
cuaagguuaggaguuugagaccagccuggcca

SEQ ID NO: 391816 - RNA, 23 nt, Human
cuaagguuaucuacuuuuacuca

SEQ ID NO: 391817 - RNA, 32 nt, Human
cuaagguuucuuucuacucugcuugacuccuu

SEQ ID NO: 391818 - RNA, 32 nt, Human
cuaagguuuuauuguuuguauuucaagccauu

SEQ ID NO: 391819 - RNA, 32 nt, Human
cuaaguaaacuuuguugucaagcaauuugucc

SEQ ID NO: 391820 - RNA, 32 nt, Human
cuaaguaaaggcaauuugcaggccauucuaau

SEQ ID NO: 391821 - RNA, 32 nt, Human
cuaaguaacauacucaagacuuuguaucugug

SEQ ID NO: 391822 - RNA, 32 nt, Human
cuaaguaacuguguaaaucugugcaaagguac

SEQ ID NO: 391823 - RNA, 32 nt, Human
cuaaguaagcuucagugaaaacuguucacggu

SEQ ID NO: 391824 - RNA, 32 nt, Human
cuaaguacaacuuuuggaaugauaccugaaga

SEQ ID NO: 391825 - RNA, 32 nt, Human
cuaaguacauggcaacacaucugucucucccu

SEQ ID NO: 391826 - RNA, 32 nt, Human
cuaaguacccucugaauggccaugccuguuac

SEQ ID NO: 391827 - RNA, 32 nt, Human
cuaaguagaaccagguaauugucucuuuuucu

SEQ ID NO: 391828 - RNA, 32 nt, Human
cuaaguagacuuuauaauauuguguuuuaucu

SEQ ID NO: 391829 - RNA, 32 nt, Human
cuaaguagcaggcagugccacuguggacagug

SEQ ID NO: 391830 - RNA, 32 nt, Human
cuaaguagcucccauucccucaccuuuucaau

SEQ ID NO: 391831 - RNA, 20 nt, Human
cuaaguagcugggacuacag

SEQ ID NO: 391832 - RNA, 21 nt, Human
cuaaguagcugggacuacagg

SEQ ID NO: 391833 - RNA, 21 nt, Human
cuaaguagcugggaguacagg

SEQ ID NO: 391834 - RNA, 21 nt, Human
cuaaguagcugggauuacagg

SEQ ID NO: 391835 - RNA, 32 nt, Human
cuaaguaggagaaagggagaccuuuuuauuuu

SEQ ID NO: 391836 - RNA, 32 nt, Human
cuaaguaggauugugacagucacgcccccggc

SEQ ID NO: 391837 - RNA, 32 nt, Human
cuaaguauagaugaagaugaagaggcagaauu

SEQ ID NO: 391838 - RNA, 32 nt, Human
cuaaguaugcucagugcugugaaaguggauua

SEQ ID NO: 391839 - RNA, 32 nt, Human
cuaaguauugcccuccccaauucuucaucgua

SEQ ID NO: 391840 - RNA, 32 nt, Human
cuaagucaaggccgaacuccagccugguggcu

SEQ ID NO: 391841 - RNA, 32 nt, Human
cuaagucacugaggcuggaguacaguggcaug

SEQ ID NO: 391842 - RNA, 32 nt, Human
cuaagucaggcccugaucuagugcaguaaagg

SEQ ID NO: 391843 - RNA, 32 nt, Human
cuaagucaggugcagagguucugagggaccca

SEQ ID NO: 391844 - RNA, 32 nt, Human
cuaaguccaaaaacuauagagcagaagaauug

SEQ ID NO: 391845 - RNA, 32 nt, Human
cuaaguccagagccaggagaguuggaccauug

SEQ ID NO: 391846 - RNA, 32 nt, Human
cuaaguccagcucuccccugcgcaggcccucc

SEQ ID NO: 391847 - RNA, 32 nt, Human
cuaaguccauuuucagacaaaguuucugugga

SEQ ID NO: 391848 - RNA, 32 nt, Human
cuaagucccagccucugcaauacacaguuacc

SEQ ID NO: 391849 - RNA, 32 nt, Human
cuaaguccccaggccugaccuggagcuggccu

SEQ ID NO: 391850 - RNA, 32 nt, Human
cuaagucccuauucacugugcuuaguagugac

SEQ ID NO: 391851 - RNA, 32 nt, Human
cuaagucccuucaucucccuggacccugccuu

SEQ ID NO: 391852 - RNA, 32 nt, Human
cuaaguccucccucccccuucuccuucacccc

SEQ ID NO: 391853 - RNA, 32 nt, Human
cuaaguccucuccagguugguccugggauauc

SEQ ID NO: 391854 - RNA, 17 nt, Human
cuaagucggcuccggga

SEQ ID NO: 391855 - RNA, 32 nt, Human
cuaagucuaggaggucgaggcuucagugagcg

SEQ ID NO: 391856 - RNA, 32 nt, Human
cuaagucuuugucccaccagggguugcagugg

SEQ ID NO: 391857 - RNA, 32 nt, Human
cuaagugaccacacaggagagcagugaggcca

SEQ ID NO: 391858 - RNA, 32 nt, Human
cuaagugaugaccaccuacggugcuuucggca

SEQ ID NO: 391859 - RNA, 32 nt, Human
cuaagugccuuuuggaggauuucuuggaagag

SEQ ID NO: 391860 - RNA, 32 nt, Human
cuaaguggaagaguguuuccuccucuggccgu

SEQ ID NO: 391861 - RNA, 32 nt, Human
cuaaguggcaacauuuuuauucuucagaguca

SEQ ID NO: 391862 - RNA, 32 nt, Human
cuaaguggcuuuucuucuguccucuucucaaa

SEQ ID NO: 391863 - RNA, 32 nt, Human
cuaagugggaagugaagccccuuguccucucc

SEQ ID NO: 391864 - RNA, 32 nt, Human
cuaaguggggauguguauauuucaggaacuuu

SEQ ID NO: 391865 - RNA, 32 nt, Human
cuaaguggggcccaccauggccauagccccuc

SEQ ID NO: 391866 - RNA, 32 nt, Human
cuaagugugguggcucaugccuguagucccag

SEQ ID NO: 391867 - RNA, 32 nt, Human
cuaaguguguguacucauacacacagauaaac

SEQ ID NO: 391868 - RNA, 32 nt, Human
cuaaguuaguugcacuuacaugauuauuguua

SEQ ID NO: 391869 - RNA, 32 nt, Human
cuaaguucagccccaaacccacaugaagaacu

SEQ ID NO: 391870 - RNA, 32 nt, Human
cuaaguugaacccggcaguaugcaugauugcc

SEQ ID NO: 391871 - RNA, 32 nt, Human
cuaaguugcauccuuuauauuaaagcaauaau

SEQ ID NO: 391872 - RNA, 32 nt, Human
cuaaguugcuuuggcugaggggagaggaaaac

SEQ ID NO: 391873 - RNA, 32 nt, Human
cuaaguuggggaguucaagaccagccugacca

SEQ ID NO: 391874 - RNA, 32 nt, Human
cuaaguuuuucaugcauuucccagacuacuua

SEQ ID NO: 391875 - RNA, 32 nt, Human
cuaauaaaaauacaaaaauuagccaggcaugg

SEQ ID NO: 391876 - RNA, 32 nt, Human
cuaauaaaaauacaaaaauuagccaggcgugg

SEQ ID NO: 391877 - RNA, 32 nt, Human
cuaauaaaaauacaaaaauuagccgggcgugg

SEQ ID NO: 391878 - RNA, 32 nt, Human
cuaauaaaaauacaaaaauuagcugggcaugg

SEQ ID NO: 391879 - RNA, 32 nt, Human
cuaauaaaaauacaaaacuuagcugggcgugg

SEQ ID NO: 391880 - RNA, 32 nt, Human
cuaauaaaaauacgaaaaauuagccaggcgug

SEQ ID NO: 391881 - RNA, 32 nt, Human
cuaauaaaaauauaaaaauuagccuggcaugg

SEQ ID NO: 391882 - RNA, 32 nt, Human
cuaauaaaaaucaagacuccugggacgccuuc

SEQ ID NO: 391883 - RNA, 29 nt, Human
cuaauaaaagagacuuuccucuucccuuc

SEQ ID NO: 391884 - RNA, 32 nt, Human
cuaauaaagcuucuguuccgugcuugucccug

SEQ ID NO: 391885 - RNA, 32 nt, Human
cuaauaaagggaagaauuauauugaauggaau

SEQ ID NO: 391886 - RNA, 32 nt, Human
cuaauaaaguacuagguugcaauaugugaaau

SEQ ID NO: 391887 - RNA, 32 nt, Human
cuaauaaauucuaggguuugagucuagaagcc

SEQ ID NO: 391888 - RNA, 32 nt, Human
cuaauaacaacaauguaauuuuugcagacagc

SEQ ID NO: 391889 - RNA, 32 nt, Human
cuaauaacacucauuccucaagugauauuaga

SEQ ID NO: 391890 - RNA, 32 nt, Human
cuaauaacccuaggaggcguagaugccuccca

SEQ ID NO: 391891 - RNA, 32 nt, Human
cuaauaagaacgugcccuucucacuugcaccc

SEQ ID NO: 391892 - RNA, 32 nt, Human
cuaauaagcugcucugccccuugugcucagag

SEQ ID NO: 391893 - RNA, 32 nt, Human
cuaauaaggagcgaauccuacauccaccaagg

SEQ ID NO: 391894 - RNA, 32 nt, Human
cuaauaaggauaaugcugaauuuugaaaggac

SEQ ID NO: 391895 - RNA, 32 nt, Human
cuaauaaggcuuuggcgccucucccagaacuc

SEQ ID NO: 391896 - RNA, 32 nt, Human
cuaauaagguuuaugguuuagcuuaaagagca

SEQ ID NO: 391897 - RNA, 32 nt, Human
cuaauaaguuguugguuuuccaagagaaaacu

SEQ ID NO: 391898 - RNA, 32 nt, Human
cuaauaauaagcuaaccuuugugcacaaauaa

SEQ ID NO: 391899 - RNA, 32 nt, Human
cuaauaauaauacaaaaauuagcugggcgugg

SEQ ID NO: 391900 - RNA, 32 nt, Human
cuaauaauacaaaaauuagcugggcauggugg

SEQ ID NO: 391901 - RNA, 32 nt, Human
cuaauaauacaaaaauuagcugggcauguugg

SEQ ID NO: 391902 - RNA, 32 nt, Human
cuaauaaugcccuuucuuuaucugagaugucu

SEQ ID NO: 391903 - RNA, 32 nt, Human
cuaauaauggaaauagaagagcagaagcaaaa

SEQ ID NO: 391904 - RNA, 32 nt, Human
cuaauacagacuucugcagccauuaccaccgu

SEQ ID NO: 391905 - RNA, 32 nt, Human
cuaauacaucaucucacacuuucauguucuuc

SEQ ID NO: 391906 - RNA, 32 nt, Human
cuaauacaugauacaugugggccuguuagucu

SEQ ID NO: 391907 - RNA, 32 nt, Human
cuaauacccacugcuucaguguuaacacagca

SEQ ID NO: 391908 - RNA, 32 nt, Human
cuaauaccuauucuucaaccaccucgguuacu

SEQ ID NO: 391909 - RNA, 32 nt, Human
cuaauaccuugccucuuauuccugcuacagca

SEQ ID NO: 391910 - RNA, 32 nt, Human
cuaauacgugaagaaaauaguuugaguagcag

SEQ ID NO: 391911 - RNA, 32 nt, Human
cuaauacuaagugcccaaccugacaacagaga

SEQ ID NO: 391912 - RNA, 32 nt, Human
cuaauacuaaugagaggaucaccugagcccag

SEQ ID NO: 391913 - RNA, 32 nt, Human
cuaauacuacagaaauacaaaauaucaucaga

SEQ ID NO: 391914 - RNA, 32 nt, Human
cuaauagagcacacuaguuagcagaacagaac

SEQ ID NO: 391915 - RNA, 32 nt, Human
cuaauagcuccccguucuuccucucucaacau

SEQ ID NO: 391916 - RNA, 20 nt, Human
cuaauagcugggacuacagg

SEQ ID NO: 391917 - RNA, 32 nt, Human
cuaauaggaaggcagaucucagcgauaaacaa

SEQ ID NO: 391918 - RNA, 32 nt, Human
cuaauaggacucaggcuuggaaggaacuaaag

SEQ ID NO: 391919 - RNA, 30 nt, Human
cuaauaggggaccugagggcacaguccuca

SEQ ID NO: 391920 - RNA, 32 nt, Human
cuaauaggggcagagcucagauaugagucaag

SEQ ID NO: 391921 - RNA, 32 nt, Human
cuaauaguaagaagguggaggaagacuuaaag

SEQ ID NO: 391922 - RNA, 32 nt, Human
cuaauagucacucaagcaguaccauuuauuuu

SEQ ID NO: 391923 - RNA, 32 nt, Human
cuaauagucuguuccuuguggaaaaauguuga

SEQ ID NO: 391924 - RNA, 32 nt, Human
cuaauagugguuuuccuugcguuuccuuaaug

SEQ ID NO: 391925 - RNA, 32 nt, Human
cuaauaguuacuucccugguucaucaauuuaa

SEQ ID NO: 391926 - RNA, 32 nt, Human
cuaauauaucuacaguaaauguuacacuagag

SEQ ID NO: 391927 - RNA, 18 nt, Human
cuaauaugaugcauuuua

SEQ ID NO: 391928 - RNA, 32 nt, Human
cuaauauggaaaucacugccagagacagucua

SEQ ID NO: 391929 - RNA, 20 nt, Human
cuaauauggugaaaccccgu

SEQ ID NO: 391930 - RNA, 20 nt, Human
cuaauauggugaaacccugu

SEQ ID NO: 391931 - RNA, 20 nt, Human
cuaauauggugaaaccucgu

SEQ ID NO: 391932 - RNA, 32 nt, Human
cuaauauucucagcacggguguauggggaccu

SEQ ID NO: 391933 - RNA, 32 nt, Human
cuaauauuuuuaucuagaaagaagagugagug

SEQ ID NO: 391934 - RNA, 32 nt, Human
cuaauauuuuucuacucucuuacccucuuaac

SEQ ID NO: 391935 - RNA, 32 nt, Human
cuaaucaaacuaaccucaaaacaaaugauaac

SEQ ID NO: 391936 - RNA, 32 nt, Human
cuaaucacacacaggaagaguguguagaagug

SEQ ID NO: 391937 - RNA, 32 nt, Human
cuaaucacaccacugcacuccagccugggcaa

SEQ ID NO: 391938 - RNA, 32 nt, Human
cuaaucacccaaaaagaaaccccacgcccauu

SEQ ID NO: 391939 - RNA, 32 nt, Human
cuaaucagagucagaccaguagagaaauuaaa

SEQ ID NO: 391940 - RNA, 32 nt, Human
cuaaucagauccaccaauguuucaaauaggac

SEQ ID NO: 391941 - RNA, 32 nt, Human
cuaaucagcaucuggccaacauaguggagaga

SEQ ID NO: 391942 - RNA, 32 nt, Human
cuaaucaggaggcugaggcaggagaauggugu

SEQ ID NO: 391943 - RNA, 32 nt, Human
cuaaucaggcucaccagggggaucauuaccgu

SEQ ID NO: 391944 - RNA, 32 nt, Human
cuaaucauucagacuucauugagcucugcaaa

SEQ ID NO: 391945 - RNA, 32 nt, Human
cuaauccaacagcaaauccccuugaugcuacc

SEQ ID NO: 391946 - RNA, 32 nt, Human
cuaauccacauccuuauugauuagcuacacug

SEQ ID NO: 391947 - RNA, 32 nt, Human
cuaauccagauguauuaaaaauauauaaaagu

SEQ ID NO: 391948 - RNA, 32 nt, Human
cuaauccaucgagagaaagaggcuuacgaaaa

SEQ ID NO: 391949 - RNA, 32 nt, Human
cuaauccaugccggguuggaggcugcugacgc

SEQ ID NO: 391950 - RNA, 32 nt, Human
cuaaucccagcacuuugggagacugagguggg

SEQ ID NO: 391951 - RNA, 32 nt, Human
cuaaucccagcacuuugggaggcugaggcagg

SEQ ID NO: 391952 - RNA, 32 nt, Human
cuaaucccagcacuuugggaggcugaggcugg

SEQ ID NO: 391953 - RNA, 32 nt, Human
cuaaucccagcacuuugggaggcugagguagg

SEQ ID NO: 391954 - RNA, 32 nt, Human
cuaauccuaccugaucuuuaacaaagcauuaa

SEQ ID NO: 391955 - RNA, 32 nt, Human
cuaauccuagugagaggugaagccaguuggac

SEQ ID NO: 391956 - RNA, 32 nt, Human
cuaauccuaucugccaaaauggcuuagacaca

SEQ ID NO: 391957 - RNA, 32 nt, Human
cuaauccucaucuuuuucucucuguauaucac

SEQ ID NO: 391958 - RNA, 32 nt, Human
cuaauccugccugauuguguuuacagaagcuu

SEQ ID NO: 391959 - RNA, 32 nt, Human
cuaauccugcuugccugguaaauguucucuuc

SEQ ID NO: 391960 - RNA, 32 nt, Human
cuaaucucacccucuccuccagugugggcuug

SEQ ID NO: 391961 - RNA, 32 nt, Human
cuaaucucuacaggggcccaguacaguuguuu

SEQ ID NO: 391962 - RNA, 31 nt, Human
cuaaucugccucugccucuguuuaauaagga

SEQ ID NO: 391963 - RNA, 32 nt, Human
cuaaucugguagcaauccaucuccccagugaa

SEQ ID NO: 391964 - RNA, 32 nt, Human
cuaaucuguuauagggaguuguuuucucuugc

SEQ ID NO: 391965 - RNA, 32 nt, Human
cuaaucuucagccucaaaguccucagaagggc

SEQ ID NO: 391966 - RNA, 32 nt, Human
cuaaucuuuuugccucagaauaccaaaacaac

SEQ ID NO: 391967 - RNA, 32 nt, Human
cuaaugaaaaagacauggaggccaggugcggu

SEQ ID NO: 391968 - RNA, 32 nt, Human
cuaaugaaaagagagaaaagaagaauggggaa

SEQ ID NO: 391969 - RNA, 32 nt, Human
cuaaugaaaauacauacuucuucauucggaga

SEQ ID NO: 391970 - RNA, 24 nt, Human
cuaaugaaagaaaaugcccuuuaa

SEQ ID NO: 391971 - RNA, 31 nt, Human
cuaaugaaggagggagaaaaacuguugauuu

SEQ ID NO: 391972 - RNA, 32 nt, Human
cuaaugaaucaucacaggaauguguugcuccu

SEQ ID NO: 391973 - RNA, 32 nt, Human
cuaaugacaacaaaagccaucuucacaaaagg

SEQ ID NO: 391974 - RNA, 32 nt, Human
cuaaugacaagcuguucgaaguauggcaaaau

SEQ ID NO: 391975 - RNA, 32 nt, Human
cuaaugacagggagcccacuaccucauaagcu

SEQ ID NO: 391976 - RNA, 32 nt, Human
cuaaugacuuccuuauugucccugauauuuug

SEQ ID NO: 391977 - RNA, 32 nt, Human
cuaaugagagugcacugcucccugggguucuc

SEQ ID NO: 391978 - RNA, 32 nt, Human
cuaaugaggggcccugccgaggcaucagcugc

SEQ ID NO: 391979 - RNA, 32 nt, Human
cuaaugaguauaauuggccacugccuuauuua

SEQ ID NO: 391980 - RNA, 32 nt, Human
cuaaugagucacagagagaugcugcccagguc

SEQ ID NO: 391981 - RNA, 32 nt, Human
cuaaugauccacucccugcucuucuucuucau

SEQ ID NO: 391982 - RNA, 32 nt, Human
cuaaugauuguuuucuaagcauuguggcuucu

SEQ ID NO: 391983 - RNA, 32 nt, Human
cuaaugcaacagcaacaaagccacugauaccu

SEQ ID NO: 391984 - RNA, 32 nt, Human
cuaaugcacccaccagcucaaacacaccaaua

SEQ ID NO: 391985 - RNA, 32 nt, Human
cuaaugcaggcugcuuucucucauguaaccaa

SEQ ID NO: 391986 - RNA, 32 nt, Human
cuaaugcauccacugaugaacaugcaaacuuu

SEQ ID NO: 391987 - RNA, 32 nt, Human
cuaaugcauuugguauguaacuuuaaauuuga

SEQ ID NO: 391988 - RNA, 32 nt, Human
cuaaugccagcuguuuauacugcucuuucaag

SEQ ID NO: 391989 - RNA, 32 nt, Human
cuaaugcccuauguguauaguaccagaagcaa

SEQ ID NO: 391990 - RNA, 32 nt, Human
cuaaugcggaggcugcuugcugugcuggcuuu

SEQ ID NO: 391991 - RNA, 32 nt, Human
cuaaugcuuccagaugugcacugcuucugucu

SEQ ID NO: 391992 - RNA, 32 nt, Human
cuaauggagagggauugaaaggggaagagccc

SEQ ID NO: 391993 - RNA, 32 nt, Human
cuaauggagcuucaugacccacggucagcccc

SEQ ID NO: 391994 - RNA, 31 nt, Human
cuaauggcaauguuuguccuuaccaggauuu

SEQ ID NO: 391995 - RNA, 32 nt, Human
cuaaugggaagaggaaaaugggaaacaaugca

SEQ ID NO: 391996 - RNA, 32 nt, Human
cuaauggggcagagacaggaagagcaauaaua

SEQ ID NO: 391997 - RNA, 32 nt, Human
cuaaugggggagcaggaggagggcaaggaccu

SEQ ID NO: 391998 - RNA, 32 nt, Human
cuaauguaaaauuguacugggcuggucggaug

SEQ ID NO: 391999 - RNA, 32 nt, Human
cuaauguaguuucuuugauuaccgacuacaca

SEQ ID NO: 392000 - RNA, 32 nt, Human
cuaauguauccagaagauuggaagagggauaa

SEQ ID NO: 392001 - RNA, 32 nt, Human
cuaaugucacaacauggugcuacuucuucuuc

SEQ ID NO: 392002 - RNA, 32 nt, Human
cuaaugucacggggguguacacccugugauag

SEQ ID NO: 392003 - RNA, 32 nt, Human
cuaaugucauuggaaacaaaagcuugaaagaa

SEQ ID NO: 392004 - RNA, 32 nt, Human
cuaaugucugcagauguggaucccgaauccug

SEQ ID NO: 392005 - RNA, 32 nt, Human
cuaaugucuggugacagaguuggacucugucu

SEQ ID NO: 392006 - RNA, 32 nt, Human
cuaauguggucugccugugaaucuccccaugu

SEQ ID NO: 392007 - RNA, 20 nt, Human
cuaauguggugaaaccccgu

SEQ ID NO: 392008 - RNA, 32 nt, Human
cuaaugugugacugagaagcagccugggugug

SEQ ID NO: 392009 - RNA, 32 nt, Human
cuaauguguggcuaaggaguuaccugggggaa

SEQ ID NO: 392010 - RNA, 32 nt, Human
cuaauguuacuguugauucauuucccaaauuc

SEQ ID NO: 392011 - RNA, 32 nt, Human
cuaauguucauucuucugaaauucugggauua

SEQ ID NO: 392012 - RNA, 32 nt, Human
cuaauguugaacaccuauuuugcgccagaccu

SEQ ID NO: 392013 - RNA, 32 nt, Human
cuaauguugauugaaccucccuuuccccauaa

SEQ ID NO: 392014 - RNA, 32 nt, Human
cuaauguuuauaggagaaagcaaaauacauca

SEQ ID NO: 392015 - RNA, 32 nt, Human
cuaauguuuuccacaagacugaacaacgugua

SEQ ID NO: 392016 - RNA, 32 nt, Human
cuaauuaacucuagauuaaaagcuacucugga

SEQ ID NO: 392017 - RNA, 32 nt, Human
cuaauuaagcaggcccagagacagagaggggg

SEQ ID NO: 392018 - RNA, 32 nt, Human
cuaauuaagggagggagcagcggggagcuugc

SEQ ID NO: 392019 - RNA, 32 nt, Human
cuaauuaagguuugcccugccugcagccuccc

SEQ ID NO: 392020 - RNA, 32 nt, Human
cuaauuacagaaaauugugcagauacuaguga

SEQ ID NO: 392021 - RNA, 19 nt, Human
cuaauuacagcccccaacc

SEQ ID NO: 392022 - RNA, 32 nt, Human
cuaauuagagaaugccuguaaauguaggcuga

SEQ ID NO: 392023 - RNA, 32 nt, Human
cuaauuagcuugcuugaagauguggccuuggc

SEQ ID NO: 392024 - RNA, 32 nt, Human
cuaauuaggaauagacauggacacugauaugg

SEQ ID NO: 392025 - RNA, 32 nt, Human
cuaauuaucuguguaauuuuauaacauacuuu

SEQ ID NO: 392026 - RNA, 32 nt, Human
cuaauuaugcacacagaaaaucuguggagccu

SEQ ID NO: 392027 - RNA, 32 nt, Human
cuaauucaaaguugcauguucuaugacaucug

SEQ ID NO: 392028 - RNA, 32 nt, Human
cuaauucacagaaugcacuuucuacccugugu

SEQ ID NO: 392029 - RNA, 32 nt, Human
cuaauucacuauacagagagucugaaccuuag

SEQ ID NO: 392030 - RNA, 32 nt, Human
cuaauucagucaugucuuuccacagaugggga

SEQ ID NO: 392031 - RNA, 32 nt, Human
cuaauucccuucuucaugaaaccagggcccuc

SEQ ID NO: 392032 - RNA, 32 nt, Human
cuaauuccgagucaccaccacagcggccuccu

SEQ ID NO: 392033 - RNA, 32 nt, Human
cuaauucuaauucugaugaugacuccuacucc

SEQ ID NO: 392034 - RNA, 32 nt, Human
cuaauucuacaccccugucgccuccuaggggc

SEQ ID NO: 392035 - RNA, 32 nt, Human
cuaauucuaguauagcuugagaaaaauaugaa

SEQ ID NO: 392036 - RNA, 32 nt, Human
cuaauucucaaaagcaaaacaagagcacacaa

SEQ ID NO: 392037 - RNA, 21 nt, Human
cuaauucucaaaggugcuuau

SEQ ID NO: 392038 - RNA, 32 nt, Human
cuaauucuccugacuguucuucccaggggagu

SEQ ID NO: 392039 - RNA, 32 nt, Human
cuaauucucuucgcugugaugcaugagcuccc

SEQ ID NO: 392040 - RNA, 32 nt, Human
cuaauucugcagguggagguugcuagucuagu

SEQ ID NO: 392041 - RNA, 32 nt, Human
cuaauucugcaucugggcaggaugacuuuacu

SEQ ID NO: 392042 - RNA, 23 nt, Human
cuaauucugcauuaaagugcaag

SEQ ID NO: 392043 - RNA, 32 nt, Human
cuaauucugcccauggucaucugcaccugcac

SEQ ID NO: 392044 - RNA, 32 nt, Human
cuaauugaaagaaaaaucauagaaauaaguaa

SEQ ID NO: 392045 - RNA, 32 nt, Human
cuaauugaagaaaaauguaaacuacuugaaaa

SEQ ID NO: 392046 - RNA, 32 nt, Human
cuaauugaagaagaaagggagggcagagagga

SEQ ID NO: 392047 - RNA, 32 nt, Human
cuaauugcaaauaguauuaggcucacuggaaa

SEQ ID NO: 392048 - RNA, 32 nt, Human
cuaauugcaaggauuucucaggugacugguua

SEQ ID NO: 392049 - RNA, 32 nt, Human
cuaauugcccugcuguuuuacugguguauagg

SEQ ID NO: 392050 - RNA, 32 nt, Human
cuaauugcgccacugcacuccagccugagcga

SEQ ID NO: 392051 - RNA, 32 nt, Human
cuaauugcuaacuguuuauacuuuucugaaua

SEQ ID NO: 392052 - RNA, 32 nt, Human
cuaauugcuguggccaagcgccugugugccga

SEQ ID NO: 392053 - RNA, 32 nt, Human
cuaauugcuucuuuauuuugggccacaacguu

SEQ ID NO: 392054 - RNA, 32 nt, Human
cuaauuggaagggugaggcgggaggaucgcuu

SEQ ID NO: 392055 - RNA, 32 nt, Human
cuaauuggacauagaaaccaccuucacucaua

SEQ ID NO: 392056 - RNA, 32 nt, Human
cuaauuggauauaguuacuaugaguccaugaa

SEQ ID NO: 392057 - RNA, 32 nt, Human
cuaauuguaagugcccuuacuaagggcacaug

SEQ ID NO: 392058 - RNA, 32 nt, Human
cuaauuguuuuuauaaaaauuauucccuauug

SEQ ID NO: 392059 - RNA, 32 nt, Human
cuaauuuauugccgugcguccugcugcuguga

SEQ ID NO: 392060 - RNA, 32 nt, Human
cuaauuuauuuuuagcagagaugggguuucac

SEQ ID NO: 392061 - RNA, 32 nt, Human
cuaauuucacuaccuauccaggaguggaacug

SEQ ID NO: 392062 - RNA, 32 nt, Human
cuaauuucauugagagaaacccagccagacuu

SEQ ID NO: 392063 - RNA, 32 nt, Human
cuaauuucauugucuuucuucccacgcucauu

SEQ ID NO: 392064 - RNA, 32 nt, Human
cuaauuuccucuucgcucuauuuuagcaguug

SEQ ID NO: 392065 - RNA, 32 nt, Human
cuaauuucuccucccuuccuuuucccugcuuc

SEQ ID NO: 392066 - RNA, 32 nt, Human
cuaauuugaacuggacuggucucagugugagc

SEQ ID NO: 392067 - RNA, 32 nt, Human
cuaauuugaagagagccgccacguaccucucu

SEQ ID NO: 392068 - RNA, 32 nt, Human
cuaauuugcuauaacagcucacaaacacuuau

SEQ ID NO: 392069 - RNA, 32 nt, Human
cuaauuuggucagucacaaauuccuuuuuagc

SEQ ID NO: 392070 - RNA, 32 nt, Human
cuaauuuuaaaauguuuuguaggcggggcucg

SEQ ID NO: 392071 - RNA, 32 nt, Human
cuaauuuuagucagagguuagcacuugauaau

SEQ ID NO: 392072 - RNA, 32 nt, Human
cuaauuuucuguauuuuuaguagagacggggu

SEQ ID NO: 392073 - RNA, 32 nt, Human
cuaauuuugagugcuuucuacaauuucaaccc

SEQ ID NO: 392074 - RNA, 32 nt, Human
cuaauuuuguuauuucaagaaugcuauuaaaa

SEQ ID NO: 392075 - RNA, 32 nt, Human
cuaauuuuucuuccucuccagccagucuccug

SEQ ID NO: 392076 - RNA, 32 nt, Human
cuacaaaaacuacaaaaauuagccgggugugg

SEQ ID NO: 392077 - RNA, 32 nt, Human
cuacaaaaagacacaaaaauuagacaggugug

SEQ ID NO: 392078 - RNA, 32 nt, Human
cuacaaaaagaguguuucaaagcugcucaauc

SEQ ID NO: 392079 - RNA, 32 nt, Human
cuacaaaaaguacaaaaauuagccgggcaugu

SEQ ID NO: 392080 - RNA, 32 nt, Human
cuacaaaaaguacaaaaauuagccgggugugg

SEQ ID NO: 392081 - RNA, 32 nt, Human
cuacaaaaaguacaaaaauuagucgggcguga

SEQ ID NO: 392082 - RNA, 32 nt, Human
cuacaaaaaguguguuucaaagcugcucaauc

SEQ ID NO: 392083 - RNA, 32 nt, Human
cuacaaaaauuagccaggcaugguggcgcaug

SEQ ID NO: 392084 - RNA, 32 nt, Human
cuacaaaaauuagcugggcgugguggcgcgcg

SEQ ID NO: 392085 - RNA, 32 nt, Human
cuacaaaacaugcaaaaauuagcugggcaugg

SEQ ID NO: 392086 - RNA, 32 nt, Human
cuacaaaacuagccuggaguugggcugucggg

SEQ ID NO: 392087 - RNA, 32 nt, Human
cuacaaaacuuagccgggcaugguggugcgug

SEQ ID NO: 392088 - RNA, 32 nt, Human
cuacaaaaggacuacauuuccccaaaugcccg

SEQ ID NO: 392089 - RNA, 32 nt, Human
cuacaaaauauacaaaaauuagccaggcaugg

SEQ ID NO: 392090 - RNA, 32 nt, Human
cuacaaaauauacaaaauauuagccagccauc

SEQ ID NO: 392091 - RNA, 32 nt, Human
cuacaaaauauuuaaaaauuagccaggcauga

SEQ ID NO: 392092 - RNA, 32 nt, Human
cuacaaacaauacaaaaauuagccaggcaugg

SEQ ID NO: 392093 - RNA, 32 nt, Human
cuacaaacauuuccugagccccucccaugugc

SEQ ID NO: 392094 - RNA, 32 nt, Human
cuacaaaccaccaucuaccaucugccaggccc

SEQ ID NO: 392095 - RNA, 32 nt, Human
cuacaaaccagcaacaugaaauggacaaacca

SEQ ID NO: 392096 - RNA, 32 nt, Human
cuacaaaccccacaguuuaucaaggaaaaucu

SEQ ID NO: 392097 - RNA, 32 nt, Human
cuacaaacccuugugcuuucacuguauagcca

SEQ ID NO: 392098 - RNA, 32 nt, Human
cuacaaagagguggacagagaagacagcagag

SEQ ID NO: 392099 - RNA, 32 nt, Human
cuacaaagcagaccagccuggggcagauauac

SEQ ID NO: 392100 - RNA, 32 nt, Human
cuacaaaggacacaaucucucuucuucaaauu

SEQ ID NO: 392101 - RNA, 32 nt, Human
cuacaaaggagagagauguaaggguuauuuag

SEQ ID NO: 392102 - RNA, 32 nt, Human
cuacaaaguccugcagcuucccccuccuuccc

SEQ ID NO: 392103 - RNA, 32 nt, Human
cuacaaauacaaaaauuagcuggacguggugg

SEQ ID NO: 392104 - RNA, 32 nt, Human
cuacaaauacaaaaauuagcuggguguggugc

SEQ ID NO: 392105 - RNA, 32 nt, Human
cuacaaauacgaaaauuagcugggcguggugg

SEQ ID NO: 392106 - RNA, 32 nt, Human
cuacaaauaggcugggauucaauguggagugg

SEQ ID NO: 392107 - RNA, 32 nt, Human
cuacaaauaugaagaauguggcaaacacugua

SEQ ID NO: 392108 - RNA, 32 nt, Human
cuacaaauccaaauugccuggauacuguaaac

SEQ ID NO: 392109 - RNA, 32 nt, Human
cuacaaaugccaccuggugcugcgccccaucc

SEQ ID NO: 392110 - RNA, 32 nt, Human
cuacaaauuuaucuuagcacuaguuucacuac

SEQ ID NO: 392111 - RNA, 32 nt, Human
cuacaacaaaaauacaaaaauuagccaagugc

SEQ ID NO: 392112 - RNA, 19 nt, Human
cuacaacagaugcuugaug

SEQ ID NO: 392113 - RNA, 32 nt, Human
cuacaacaggcugcugugcagccuggggcccu

SEQ ID NO: 392114 - RNA, 32 nt, Human
cuacaacagugaucaucacagaggacuucuuu

SEQ ID NO: 392115 - RNA, 32 nt, Human
cuacaaccaagcucucugcaucuacucccaag

SEQ ID NO: 392116 - RNA, 32 nt, Human
cuacaaccuccaccuccuggguuugaggaauu

SEQ ID NO: 392117 - RNA, 32 nt, Human
cuacaaccuuccacagcagcccaggcuccacu

SEQ ID NO: 392118 - RNA, 32 nt, Human
cuacaacucccaggaggcauugaggcggcgcc

SEQ ID NO: 392119 - RNA, 32 nt, Human
cuacaacugcaauuuaccuuugagggcccaug

SEQ ID NO: 392120 - RNA, 32 nt, Human
cuacaacuucguccuguuccccgacaccaaga

SEQ ID NO: 392121 - RNA, 32 nt, Human
cuacaacuuugcgacauaaauuuuggggucuc

SEQ ID NO: 392122 - RNA, 32 nt, Human
cuacaagaaauuuaaaaacuagccaggcgugg

SEQ ID NO: 392123 - RNA, 32 nt, Human
cuacaagaaccugcuaaggcugccucagaccu

SEQ ID NO: 392124 - RNA, 25 nt, Human
cuacaagaagaaaacuagaacuuua

SEQ ID NO: 392125 - RNA, 32 nt, Human
cuacaagauuaauggcucuguuguauauacug

SEQ ID NO: 392126 - RNA, 32 nt, Human
cuacaagcagaggcugaacaccugcggaagga

SEQ ID NO: 392127 - RNA, 22 nt, Human
cuacaagcagccuaucugcuua

SEQ ID NO: 392128 - RNA, 32 nt, Human
cuacaagcaguuggacaguucuggaggcugga

SEQ ID NO: 392129 - RNA, 32 nt, Human
cuacaagcauggagaaaaugaagaauaggccu

SEQ ID NO: 392130 - RNA, 32 nt, Human
cuacaagccauuuugaacuucugcccucaccg

SEQ ID NO: 392131 - RNA, 32 nt, Human
cuacaagcuccccuucccagguucaagcaauu

SEQ ID NO: 392132 - RNA, 32 nt, Human
cuacaaggcucugaguguuugucccucacaua

SEQ ID NO: 392133 - RNA, 32 nt, Human
cuacaaggggcagaccacgcugauucaguaca

SEQ ID NO: 392134 - RNA, 32 nt, Human
cuacaaguuguccucaaggucauccuggagau

SEQ ID NO: 392135 - RNA, 31 nt, Human
cuacaauagaagacauuuucacuggaauuac

SEQ ID NO: 392136 - RNA, 32 nt, Human
cuacaauaucauuuguggauggucccaggucc

SEQ ID NO: 392137 - RNA, 32 nt, Human
cuacaaucaccagucucaaaugcgcuauuguu

SEQ ID NO: 392138 - RNA, 32 nt, Human
cuacaaucagaauaugcuuucuuggaccaugu

SEQ ID NO: 392139 - RNA, 32 nt, Human
cuacaaucccaggaugcaucgggaucaaagca

SEQ ID NO: 392140 - RNA, 32 nt, Human
cuacaaucuccaccauccacuagauugucucc

SEQ ID NO: 392141 - RNA, 32 nt, Human
cuacaaucugcucagggauuuauacucaaugc

SEQ ID NO: 392142 - RNA, 32 nt, Human
cuacaaugaauccugcucucaacccaaccagg

SEQ ID NO: 392143 - RNA, 32 nt, Human
cuacaauggccuccucuccaucagugccuuug

SEQ ID NO: 392144 - RNA, 32 nt, Human
cuacaauguccaguuucuccccuagacucagg

SEQ ID NO: 392145 - RNA, 32 nt, Human
cuacaaugugccagauacauguuuccuaugcc

SEQ ID NO: 392146 - RNA, 32 nt, Human
cuacaauuggaagagaaaaggauauggaacau

SEQ ID NO: 392147 - RNA, 32 nt, Human
cuacaauugugagccaccaugccaggcucauu

SEQ ID NO: 392148 - RNA, 32 nt, Human
cuacaauuugccauuguuucuccuggguuagg

SEQ ID NO: 392149 - RNA, 32 nt, Human
cuacaauuugcccucauacacacugcuuccac

SEQ ID NO: 392150 - RNA, 32 nt, Human
cuacaauuuuagauggaagcugagaugauuuc

SEQ ID NO: 392151 - RNA, 32 nt, Human
cuacaauuuuaguauaaugacauuugagucua

SEQ ID NO: 392152 - RNA, 32 nt, Human
cuacacaagccuuagccucaguggagcugugg

SEQ ID NO: 392153 - RNA, 32 nt, Human
cuacacaccuccugcauggauggccagagcgc

SEQ ID NO: 392154 - RNA, 32 nt, Human
cuacacacggacgugugauacacacaugcaug

SEQ ID NO: 392155 - RNA, 32 nt, Human
cuacacacucaggagcuugcaaagugaccaca

SEQ ID NO: 392156 - RNA, 32 nt, Human
cuacacagaaaacuacaagauguguggcguug

SEQ ID NO: 392157 - RNA, 32 nt, Human
cuacacagacauuaagaagagcagagcuggca

SEQ ID NO: 392158 - RNA, 32 nt, Human
cuacacagagagugcauuuucucuccagagau

SEQ ID NO: 392159 - RNA, 32 nt, Human
cuacacagagauuucucagccuacaaauugug

SEQ ID NO: 392160 - RNA, 32 nt, Human
cuacacagaguguuacuguuacaucaguaacu

SEQ ID NO: 392161 - RNA, 32 nt, Human
cuacacagcucugaaccuucuuuguuaaagaa

SEQ ID NO: 392162 - RNA, 32 nt, Human
cuacacaggaggcugaggcaggagaaucacuu

SEQ ID NO: 392163 - RNA, 32 nt, Human
cuacacaggaggcugaggcaggagaauugcuu

SEQ ID NO: 392164 - RNA, 32 nt, Human
cuacacaguaauccaugccuguuaguuuggag

SEQ ID NO: 392165 - RNA, 32 nt, Human
cuacacaguggagcugccccuccugggcugga

SEQ ID NO: 392166 - RNA, 32 nt, Human
cuacacaucaaaaggucauuucaggacacaaa

SEQ ID NO: 392167 - RNA, 32 nt, Human
cuacacaucccaauagaagccccuucuuaugc

SEQ ID NO: 392168 - RNA, 23 nt, Human
cuacacaucugauuuugugaacc

SEQ ID NO: 392169 - RNA, 32 nt, Human
cuacacaucuuucuuccaaagcauuuuuccug

SEQ ID NO: 392170 - RNA, 32 nt, Human
cuacaccaacagcaauuacauugaagccgagg

SEQ ID NO: 392171 - RNA, 32 nt, Human
cuacaccaccacagguaugcaccaccauaccu

SEQ ID NO: 392172 - RNA, 32 nt, Human
cuacaccaccaggcuucagccuccaaagagac

SEQ ID NO: 392173 - RNA, 24 nt, Human
cuacaccacgcagcugaccaugaa

SEQ ID NO: 392174 - RNA, 32 nt, Human
cuacaccagggcugccucaggccaggccccca

SEQ ID NO: 392175 - RNA, 32 nt, Human
cuacaccagugaggagaagaugagcgcaaggg

SEQ ID NO: 392176 - RNA, 32 nt, Human
cuacaccauuuuauguucccaccaacggugua

SEQ ID NO: 392177 - RNA, 32 nt, Human
cuacacccagcagagucccggugcccucuguc

SEQ ID NO: 392178 - RNA, 32 nt, Human
cuacacccaucccccuuccucuagcccucccu

SEQ ID NO: 392179 - RNA, 32 nt, Human
cuacaccgaagacacggagcugauggagucag

SEQ ID NO: 392180 - RNA, 32 nt, Human
cuacaccgaagccuggugagcucccagcucaa

SEQ ID NO: 392181 - RNA, 32 nt, Human
cuacaccgcccaggccagaguaggguggagcu

SEQ ID NO: 392182 - RNA, 32 nt, Human
cuacaccuaagaaaauuacucccaauguuacu

SEQ ID NO: 392183 - RNA, 32 nt, Human
cuacaccuagccugcaucuucacuuucuugau

SEQ ID NO: 392184 - RNA, 32 nt, Human
cuacaccuauuuucugcugcaggaugaggcua

SEQ ID NO: 392185 - RNA, 32 nt, Human
cuacaccugcaagggcugguucccaggcccug

SEQ ID NO: 392186 - RNA, 32 nt, Human
cuacaccugccuggcugagaaugccuuggggc

SEQ ID NO: 392187 - RNA, 32 nt, Human
cuacacggcaggggcagacacugugaguauaa

SEQ ID NO: 392188 - RNA, 32 nt, Human
cuacacgggaggcugaggcaggagaauggcau

SEQ ID NO: 392189 - RNA, 32 nt, Human
cuacacgggaggcugaggcaggagaauggcgu

SEQ ID NO: 392190 - RNA, 32 nt, Human
cuacacgggaggcuuaggcaggagaauuccuu

SEQ ID NO: 392191 - RNA, 32 nt, Human
cuacacgugugcacuccaccacucuggccauu

SEQ ID NO: 392192 - RNA, 32 nt, Human
cuacacuacuccugaggaugcuacucccgagc

SEQ ID NO: 392193 - RNA, 31 nt, Human
cuacacuauuaaagauauaaaguucuuggca

SEQ ID NO: 392194 - RNA, 32 nt, Human
cuacacuauugacuccaaccaggugggacucu

SEQ ID NO: 392195 - RNA, 32 nt, Human
cuacacuccagccugagcaacagagugagacc

SEQ ID NO: 392196 - RNA, 32 nt, Human
cuacacuccagccuggaugacagagugagacu

SEQ ID NO: 392197 - RNA, 32 nt, Human
cuacacuccagccuggccacagagcgagacuc

SEQ ID NO: 392198 - RNA, 32 nt, Human
cuacacuccagccuggcgacagagcgagacuu

SEQ ID NO: 392199 - RNA, 32 nt, Human
cuacacuccagccugggagacagagcgagacu

SEQ ID NO: 392200 - RNA, 32 nt, Human
cuacacuccagccugggcaacagagagcgacu

SEQ ID NO: 392201 - RNA, 32 nt, Human
cuacacuccagccugggcaacagagcgagacu

SEQ ID NO: 392202 - RNA, 32 nt, Human
cuacacuccagccugggcaacagagggagacu

SEQ ID NO: 392203 - RNA, 32 nt, Human
cuacacuccagccugggcaacagagugagacu

SEQ ID NO: 392204 - RNA, 32 nt, Human
cuacacuccagccugggcgacagagcgagacu

SEQ ID NO: 392205 - RNA, 32 nt, Human
cuacacuccagccugggcgacagagugacccu

SEQ ID NO: 392206 - RNA, 32 nt, Human
cuacacuccagccugggugacaaagcgagacu

SEQ ID NO: 392207 - RNA, 32 nt, Human
cuacacuccagccugggugacagagugagacu

SEQ ID NO: 392208 - RNA, 32 nt, Human
cuacacuccagccugggugacagagugagauc

SEQ ID NO: 392209 - RNA, 32 nt, Human
cuacacuccagccuggucaacagagugagacu

SEQ ID NO: 392210 - RNA, 32 nt, Human
cuacacuccagccuggucgacagagugaacuc

SEQ ID NO: 392211 - RNA, 32 nt, Human
cuacacuccagccuggugacagagugagacuc

SEQ ID NO: 392212 - RNA, 31 nt, Human
cuacacucccucucugagccuccgucgcccc

SEQ ID NO: 392213 - RNA, 32 nt, Human
cuacacucggaauucccugaagcaacacugcc

SEQ ID NO: 392214 - RNA, 32 nt, Human
cuacacucucagagaguaguagaaagagagua

SEQ ID NO: 392215 - RNA, 32 nt, Human
cuacacucugggagguagaggugggaggacug

SEQ ID NO: 392216 - RNA, 32 nt, Human
cuacacugaacaguaccuuccuuucuagaaac

SEQ ID NO: 392217 - RNA, 32 nt, Human
cuacacugagacaaggaaguuggaaaagccga

SEQ ID NO: 392218 - RNA, 32 nt, Human
cuacacugcugcccacuccucucuccagcucc

SEQ ID NO: 392219 - RNA, 32 nt, Human
cuacacuucccaagccuuacccuggcaucuuu

SEQ ID NO: 392220 - RNA, 32 nt, Human
cuacacuuccuucugugcccugccagugaccc

SEQ ID NO: 392221 - RNA, 32 nt, Human
cuacacuugaagcauuuaaagauaucccuuac

SEQ ID NO: 392222 - RNA, 32 nt, Human
cuacagaaaacccaaggagugaagggacagga

SEQ ID NO: 392223 - RNA, 32 nt, Human
cuacagaaaccaggucauuugugcacagcccg

SEQ ID NO: 392224 - RNA, 32 nt, Human
cuacagaaacuaccaaaauuagccaggugugg

SEQ ID NO: 392225 - RNA, 32 nt, Human
cuacagaaagaguguuucaaagcugcucaaug

SEQ ID NO: 392226 - RNA, 32 nt, Human
cuacagaaaguuuuaaaauuagccagguguag

SEQ ID NO: 392227 - RNA, 32 nt, Human
cuacagaacagcccuggcacugcauucaaauc

SEQ ID NO: 392228 - RNA, 32 nt, Human
cuacagaacccgaacagucucauuccaauaca

SEQ ID NO: 392229 - RNA, 32 nt, Human
cuacagaagauacaaaaauuggcugggcguug

SEQ ID NO: 392230 - RNA, 32 nt, Human
cuacagacaccuucuggaagcugcggugggga

SEQ ID NO: 392231 - RNA, 32 nt, Human
cuacagacccacaaacacuacaugcagcauca

SEQ ID NO: 392232 - RNA, 32 nt, Human
cuacagacccuucugucacagcacccaggagc

SEQ ID NO: 392233 - RNA, 32 nt, Human
cuacagagaacugcagcccuuauucagaauug

SEQ ID NO: 392234 - RNA, 32 nt, Human
cuacagagagcuaugauugcaccacugcacuc

SEQ ID NO: 392235 - RNA, 32 nt, Human
cuacagagaggaaauucuccacugugcacacc

SEQ ID NO: 392236 - RNA, 32 nt, Human
cuacagaggaaggagagguagagccaggauuu

SEQ ID NO: 392237 - RNA, 32 nt, Human
cuacagaggacccucagccagagcagaaagcu

SEQ ID NO: 392238 - RNA, 32 nt, Human
cuacagagucugagauuugauacuacuugcag

SEQ ID NO: 392239 - RNA, 32 nt, Human
cuacagaguguuucgugaucucuccuucucca

SEQ ID NO: 392240 - RNA, 32 nt, Human
cuacagaguuccugggaccggggugaaggcau

SEQ ID NO: 392241 - RNA, 32 nt, Human
cuacagaucaaagacuccuccaaaaagcacaa

SEQ ID NO: 392242 - RNA, 32 nt, Human
cuacagaugaggaaccuggacccaguuggcuc

SEQ ID NO: 392243 - RNA, 32 nt, Human
cuacagauguuacuguuucugagugagccgaa

SEQ ID NO: 392244 - RNA, 32 nt, Human
cuacagauguuaggauauguccacauaagaaa

SEQ ID NO: 392245 - RNA, 32 nt, Human
cuacagcaagacacagaaaggugugagcucug

SEQ ID NO: 392246 - RNA, 31 nt, Human
cuacagcaaucggucaguugugggagugcuu

SEQ ID NO: 392247 - RNA, 32 nt, Human
cuacagcaaugccauucccacuugccccagag

SEQ ID NO: 392248 - RNA, 32 nt, Human
cuacagcacagaaccugcuucucagacuuaca

SEQ ID NO: 392249 - RNA, 32 nt, Human
cuacagcacccagcacugugcuguuguugucu

SEQ ID NO: 392250 - RNA, 32 nt, Human
cuacagcacccaggaggugcgaguguggcugc

SEQ ID NO: 392251 - RNA, 32 nt, Human
cuacagcaccccagucucagcacucuuuggug

SEQ ID NO: 392252 - RNA, 32 nt, Human
cuacagcaggagaaaguugagguucuucaccu

SEQ ID NO: 392253 - RNA, 15 nt, Human
cuacagcauauucua

SEQ ID NO: 392254 - RNA, 32 nt, Human
cuacagcauccacugcagcucugggcuccauu

SEQ ID NO: 392255 - RNA, 20 nt, Human
cuacagcccacccccuccca

SEQ ID NO: 392256 - RNA, 19 nt, Human
cuacagcccacccuacccc

SEQ ID NO: 392257 - RNA, 32 nt, Human
cuacagcccaggcugugugcaggggcucccau

SEQ ID NO: 392258 - RNA, 32 nt, Human
cuacagccuccaacucuugggcucaagcauca

SEQ ID NO: 392259 - RNA, 32 nt, Human
cuacagccuccacggcaggagugaagcuggac

SEQ ID NO: 392260 - RNA, 32 nt, Human
cuacagccugcagcaugucugcacgugugcau

SEQ ID NO: 392261 - RNA, 32 nt, Human
cuacagccugcucucuucugcuguccccacug

SEQ ID NO: 392262 - RNA, 32 nt, Human
cuacagccuggaugacaagcaagacccucccu

SEQ ID NO: 392263 - RNA, 32 nt, Human
cuacagccuugaacuccugggcucaagagguu

SEQ ID NO: 392264 - RNA, 32 nt, Human
cuacagcgaugggccaacuggcaccagugugg

SEQ ID NO: 392265 - RNA, 32 nt, Human
cuacagcggagguggcuguggcgguggcgcug

SEQ ID NO: 392266 - RNA, 15 nt, Human
cuacagcguuuucua

SEQ ID NO: 392267 - RNA, 32 nt, Human
cuacagcuacagaaagcaggacuaggaacugg

SEQ ID NO: 392268 - RNA, 32 nt, Human
cuacagcuaugggacccuuucuuaggcaagag

SEQ ID NO: 392269 - RNA, 32 nt, Human
cuacagcuccacacccuacccacccaucggca

SEQ ID NO: 392270 - RNA, 32 nt, Human
cuacagcucucccccagcuaguaugaugaucc

SEQ ID NO: 392271 - RNA, 25 nt, Human
cuacagcugcgccggaucugggcga

SEQ ID NO: 392272 - RNA, 32 nt, Human
cuacagcugcuccccacuuucucggacccggu

SEQ ID NO: 392273 - RNA, 23 nt, Human
cuacagcugcuccccucccgcca

SEQ ID NO: 392274 - RNA, 32 nt, Human
cuacagcuggcccugcaggccacccggacugg

SEQ ID NO: 392275 - RNA, 32 nt, Human
cuacagcuguauccaaaagguaccauguaucu

SEQ ID NO: 392276 - RNA, 31 nt, Human
cuacagcuucaucaacaccuaccccauggcc

SEQ ID NO: 392277 - RNA, 32 nt, Human
cuacagcuucucuuugccauuuguggauuuca

SEQ ID NO: 392278 - RNA, 32 nt, Human
cuacagcuuugccuguaacaugggcacaggcu

SEQ ID NO: 392279 - RNA, 32 nt, Human
cuacaggaacaacagauguugaguacuucuag

SEQ ID NO: 392280 - RNA, 32 nt, Human
cuacaggaagcuuuguccgucauuccacagaa

SEQ ID NO: 392281 - RNA, 32 nt, Human
cuacaggaaggaagacaugcuuuugcccuuuc

SEQ ID NO: 392282 - RNA, 32 nt, Human
cuacaggacagcaaggagaugccaccuaaaaa

SEQ ID NO: 392283 - RNA, 32 nt, Human
cuacaggacucggccaagucucugccuacucu

SEQ ID NO: 392284 - RNA, 32 nt, Human
cuacaggagagcaagagccaauguggucagac

SEQ ID NO: 392285 - RNA, 32 nt, Human
cuacaggagcucgccaccacacccagcuaauu

SEQ ID NO: 392286 - RNA, 32 nt, Human
cuacaggaggcugaggcaagaggauugcuuga

SEQ ID NO: 392287 - RNA, 32 nt, Human
cuacaggagugaagccaccacacagauggaaa

SEQ ID NO: 392288 - RNA, 32 nt, Human
cuacaggauagggaaguggugguggaauaaaa

SEQ ID NO: 392289 - RNA, 32 nt, Human
cuacaggcaaaagggcuccuucccguggcugc

SEQ ID NO: 392290 - RNA, 31 nt, Human
cuacaggcaaaguguccuggcauuuaaaacc

SEQ ID NO: 392291 - RNA, 32 nt, Human
cuacaggcacacaccacaacaccuggcuaauu

SEQ ID NO: 392292 - RNA, 32 nt, Human
cuacaggcacacaccacaacacuuggcuaauu

SEQ ID NO: 392293 - RNA, 32 nt, Human
cuacaggcacacaccaccacaccuggcuaagu

SEQ ID NO: 392294 - RNA, 32 nt, Human
cuacaggcacacaccaccacgcccagcuaauu

SEQ ID NO: 392295 - RNA, 32 nt, Human
cuacaggcacacaccaccacgcccagcucuac

SEQ ID NO: 392296 - RNA, 32 nt, Human
cuacaggcacacaccaccacgccuggcuaauu

SEQ ID NO: 392297 - RNA, 32 nt, Human
cuacaggcacacacugccgcgcccagcuaauu

SEQ ID NO: 392298 - RNA, 32 nt, Human
cuacaggcacacgccaccacacccaacuaauu

SEQ ID NO: 392299 - RNA, 32 nt, Human
cuacaggcacccaccaccacacccagcuaauu

SEQ ID NO: 392300 - RNA, 32 nt, Human
cuacaggcacccaccaccacacccagcuaguu

SEQ ID NO: 392301 - RNA, 31 nt, Human
cuacaggcacgugugaccaugccaggcuaau

SEQ ID NO: 392302 - RNA, 32 nt, Human
cuacaggcagaggccccaccuaccugauguuu

SEQ ID NO: 392303 - RNA, 32 nt, Human
cuacaggcaguuaacaugcaugggcugguuug

SEQ ID NO: 392304 - RNA, 32 nt, Human
cuacaggcaugcaucacuaugcucugcuaauu

SEQ ID NO: 392305 - RNA, 25 nt, Human
cuacaggccagcagcuagccaugaa

SEQ ID NO: 392306 - RNA, 32 nt, Human
cuacaggccaucucccuccuguaggccucuga

SEQ ID NO: 392307 - RNA, 32 nt, Human
cuacaggccauggacagguccaugaccuguua

SEQ ID NO: 392308 - RNA, 32 nt, Human
cuacaggcccaaccucugccucaugggggcuu

SEQ ID NO: 392309 - RNA, 32 nt, Human
cuacaggcgcacaccaccacacuggcuaauuu

SEQ ID NO: 392310 - RNA, 32 nt, Human
cuacaggcgcccaccaccacaccaggcuaauu

SEQ ID NO: 392311 - RNA, 32 nt, Human
cuacaggcgccugccaccacacccagcuaacu

SEQ ID NO: 392312 - RNA, 32 nt, Human
cuacaggcucaaaacuccucuuugauaucaga

SEQ ID NO: 392313 - RNA, 32 nt, Human
cuacaggcucaugccaucaugcccagcuaaua

SEQ ID NO: 392314 - RNA, 32 nt, Human
cuacaggcucuuccaucucucaugacuucaug

SEQ ID NO: 392315 - RNA, 32 nt, Human
cuacaggcuucccgacccacaggccagcuacg

SEQ ID NO: 392316 - RNA, 32 nt, Human
cuacagggacauguacugguuccuucagauca

SEQ ID NO: 392317 - RNA, 32 nt, Human
cuacagggagagggaugguggggaaggggugg

SEQ ID NO: 392318 - RNA, 32 nt, Human
cuacagggcaggguaccgggaggcaggcggga

SEQ ID NO: 392319 - RNA, 32 nt, Human
cuacaggggaaggcaggagcuaugggagcaag

SEQ ID NO: 392320 - RNA, 32 nt, Human
cuacaggggaggcugaggcaggagaaucgcuu

SEQ ID NO: 392321 - RNA, 32 nt, Human
cuacaggggagggagagccugaggcucugcuc

SEQ ID NO: 392322 - RNA, 32 nt, Human
cuacaggggcugggugaccucuuuuugcuaau

SEQ ID NO: 392323 - RNA, 32 nt, Human
cuacagggggucuggcugguguuaacagaagg

SEQ ID NO: 392324 - RNA, 32 nt, Human
cuacagggugaucucauuugaaagcuaugaug

SEQ ID NO: 392325 - RNA, 32 nt, Human
cuacaggugagcauuuuacccauuguuggaua

SEQ ID NO: 392326 - RNA, 31 nt, Human
cuacaggugcaugccaccaugccaggcuaau

SEQ ID NO: 392327 - RNA, 32 nt, Human
cuacaggugcccgccaccacaccagcuaauuu

SEQ ID NO: 392328 - RNA, 32 nt, Human
cuacaggugcccgccaccacacccagcuaauu

SEQ ID NO: 392329 - RNA, 32 nt, Human
cuacaggugccugccaccacacccagcuaauu

SEQ ID NO: 392330 - RNA, 32 nt, Human
cuacagguggugccaccauaccuagcuaauuu

SEQ ID NO: 392331 - RNA, 32 nt, Human
cuacagguguacaccaccaugccuagcuaauu

SEQ ID NO: 392332 - RNA, 32 nt, Human
cuacaggugugcaccaccacaccaggcuaauu

SEQ ID NO: 392333 - RNA, 32 nt, Human
cuacaggugugcaccaccaugcccagcuaguu

SEQ ID NO: 392334 - RNA, 32 nt, Human
cuacaggugugcaccaccaugcccagguaauu

SEQ ID NO: 392335 - RNA, 32 nt, Human
cuacagguucgagaguuaugggugcuacaugu

SEQ ID NO: 392336 - RNA, 32 nt, Human
cuacaguaaagaaaagaggugguucucugcag

SEQ ID NO: 392337 - RNA, 18 nt, Human
cuacaguacuguguaauu

SEQ ID NO: 392338 - RNA, 32 nt, Human
cuacaguauuuuuacaggguaaaacuaguuau

SEQ ID NO: 392339 - RNA, 32 nt, Human
cuacagucacccagcuuagagcuccagucccc

SEQ ID NO: 392340 - RNA, 32 nt, Human
cuacagucccuugagcagggauuugcacacag

SEQ ID NO: 392341 - RNA, 32 nt, Human
cuacagucucagauuccugggcuuaagcaguc

SEQ ID NO: 392342 - RNA, 32 nt, Human
cuacagucugcaucuguagugccuuguggggu

SEQ ID NO: 392343 - RNA, 32 nt, Human
cuacagucuggccaagugugguggcucacgcc

SEQ ID NO: 392344 - RNA, 32 nt, Human
cuacagugacaucucucaguguuuccaacaca

SEQ ID NO: 392345 - RNA, 32 nt, Human
cuacagugagaggcagcuucuaggcagaguug

SEQ ID NO: 392346 - RNA, 32 nt, Human
cuacagugauucaugucccagguccaggaaau

SEQ ID NO: 392347 - RNA, 32 nt, Human
cuacagugcaccacggccuuggaacaccgcac

SEQ ID NO: 392348 - RNA, 32 nt, Human
cuacaguggcugaauagcuucuccaaaggcuc

SEQ ID NO: 392349 - RNA, 32 nt, Human
cuacagugucccugauucuuggaaaagccugg

SEQ ID NO: 392350 - RNA, 32 nt, Human
cuacaguguguacaaaagacuugcuguuuuaa

SEQ ID NO: 392351 - RNA, 32 nt, Human
cuacaguuauguucagucacacacacauacaa

SEQ ID NO: 392352 - RNA, 32 nt, Human
cuacaguucugagcaugacacuagccuucucu

SEQ ID NO: 392353 - RNA, 32 nt, Human
cuacaguugugcaccaccacaccaaacaagaa

SEQ ID NO: 392354 - RNA, 32 nt, Human
cuacauaaaauacaaaaauuagcugggcgugg

SEQ ID NO: 392355 - RNA, 32 nt, Human
cuacauaaguggacauagaaaaagaggcuggc

SEQ ID NO: 392356 - RNA, 32 nt, Human
cuacauaccaccacagcagcccagcuucugug

SEQ ID NO: 392357 - RNA, 32 nt, Human
cuacauaggcagcaaacuaagcugcagugaug

SEQ ID NO: 392358 - RNA, 32 nt, Human
cuacauagggguguuuauuugugucacaaaga

SEQ ID NO: 392359 - RNA, 32 nt, Human
cuacauagucaccguccgcuuuuccugaguuc

SEQ ID NO: 392360 - RNA, 22 nt, Human
cuacauauccuugccugucuag

SEQ ID NO: 392361 - RNA, 32 nt, Human
cuacauauccuuuccuagcugugugacuuugc

SEQ ID NO: 392362 - RNA, 32 nt, Human
cuacauaugaauggcaaaggcacuuuugauau

SEQ ID NO: 392363 - RNA, 32 nt, Human
cuacauauggcugcauuccauaccucagugaa

SEQ ID NO: 392364 - RNA, 32 nt, Human
cuacauaugggucuggaaaaacuguacacugu

SEQ ID NO: 392365 - RNA, 32 nt, Human
cuacauauugccagugagaaacuggguuggac

SEQ ID NO: 392366 - RNA, 32 nt, Human
cuacaucaagcuguugacagggcugcuuuucu

SEQ ID NO: 392367 - RNA, 32 nt, Human
cuacaucaauuugaaaggagcuucuggcugaa

SEQ ID NO: 392368 - RNA, 32 nt, Human
cuacaucacagcaagugacuucucagagggga

SEQ ID NO: 392369 - RNA, 32 nt, Human
cuacaucacuggcugcucuucaucaaaccuac

SEQ ID NO: 392370 - RNA, 32 nt, Human
cuacaucagaugcagaaaccagggcgcagagu

SEQ ID NO: 392371 - RNA, 32 nt, Human
cuacaucaggguggguccuaagaaacauggca

SEQ ID NO: 392372 - RNA, 32 nt, Human
cuacaucaugguuguggcugagcugcugcugc

SEQ ID NO: 392373 - RNA, 32 nt, Human
cuacauccagcuguagaaauuugucagaaauu

SEQ ID NO: 392374 - RNA, 32 nt, Human
cuacauccagguccuaaaacuauaucaucaga

SEQ ID NO: 392375 - RNA, 18 nt, Human
cuacauccaucuaugcca

SEQ ID NO: 392376 - RNA, 32 nt, Human
cuacaucccaggagaggacacagucugucauc

SEQ ID NO: 392377 - RNA, 32 nt, Human
cuacaucccaggaggaugcaccaaguugcuca

SEQ ID NO: 392378 - RNA, 32 nt, Human
cuacaucccaggguuucuggcugcaagugaga

SEQ ID NO: 392379 - RNA, 32 nt, Human
cuacaucccuuucucccuucccuccucuugcu

SEQ ID NO: 392380 - RNA, 32 nt, Human
cuacauccgccucacccaguacaucgacgggc

SEQ ID NO: 392381 - RNA, 32 nt, Human
cuacauccucaucaacacuugcuauuaucugu

SEQ ID NO: 392382 - RNA, 32 nt, Human
cuacauccucuuguuccagucucagcuggcug

SEQ ID NO: 392383 - RNA, 32 nt, Human
cuacauccugccuuuugaaccuaaaugaguuu

SEQ ID NO: 392384 - RNA, 32 nt, Human
cuacaucgaguauacugcuagaaaaaucuacc

SEQ ID NO: 392385 - RNA, 32 nt, Human
cuacaucuccaaugugcuuucuaaucuccugc

SEQ ID NO: 392386 - RNA, 24 nt, Human
cuacaucucccggcgugccuggca

SEQ ID NO: 392387 - RNA, 32 nt, Human
cuacaucugcaaccucgcgcccaaggacagcg

SEQ ID NO: 392388 - RNA, 32 nt, Human
cuacaucugcccucagcuggguccaucaugca

SEQ ID NO: 392389 - RNA, 32 nt, Human
cuacaucuuccgugguucccagcacagcccaa

SEQ ID NO: 392390 - RNA, 32 nt, Human
cuacaugaggucugcgggguccuggccgggca

SEQ ID NO: 392391 - RNA, 32 nt, Human
cuacaugaucacugcaggaugauccuccuccc

SEQ ID NO: 392392 - RNA, 32 nt, Human
cuacaugauucccuuggggcucagcaucgggg

SEQ ID NO: 392393 - RNA, 32 nt, Human
cuacaugcagagccauaagagcagcugcacua

SEQ ID NO: 392394 - RNA, 32 nt, Human
cuacaugcuacugccuagagcuugucucaaug

SEQ ID NO: 392395 - RNA, 32 nt, Human
cuacaugcuucucaugaaaauucaacggcuac

SEQ ID NO: 392396 - RNA, 32 nt, Human
cuacauggaacagcaaauaggcccagugaugc

SEQ ID NO: 392397 - RNA, 32 nt, Human
cuacaugggaagcugaggcaggagaaucaccu

SEQ ID NO: 392398 - RNA, 32 nt, Human
cuacaugggaggauuugcuugagccugggagg

SEQ ID NO: 392399 - RNA, 32 nt, Human
cuacaugggaggcuaaggugggaggaucacuu

SEQ ID NO: 392400 - RNA, 32 nt, Human
cuacaugggaggcugaggcaggagaagggcgu

SEQ ID NO: 392401 - RNA, 32 nt, Human
cuacaugggaggcugaggcaggagaaucgcuu

SEQ ID NO: 392402 - RNA, 32 nt, Human
cuacaugggaggcugaggcaggaggaucacuu

SEQ ID NO: 392403 - RNA, 32 nt, Human
cuacaugggaggcugaggcgggauugcuugag

SEQ ID NO: 392404 - RNA, 32 nt, Human
cuacaugggaggcugaggugggaggaucacuu

SEQ ID NO: 392405 - RNA, 32 nt, Human
cuacaugggauaagccaaggcuugccuucagg

SEQ ID NO: 392406 - RNA, 32 nt, Human
cuacaugggggcggauggcaggaacagaaauu

SEQ ID NO: 392407 - RNA, 32 nt, Human
cuacaugguugaugcgggcagugugggacccu

SEQ ID NO: 392408 - RNA, 32 nt, Human
cuacaugguuuuggaagaacauacuuuagaaa

SEQ ID NO: 392409 - RNA, 32 nt, Human
cuacauguauuuuucacaugaagaucuccuua

SEQ ID NO: 392410 - RNA, 32 nt, Human
cuacaugucuguggguaucacacugaguguga

SEQ ID NO: 392411 - RNA, 32 nt, Human
cuacaugucuuucuguagccucugcauacuac

SEQ ID NO: 392412 - RNA, 32 nt, Human
cuacaugugacugauagcuuuucccaaaggcc

SEQ ID NO: 392413 - RNA, 15 nt, Human
cuacauguuauucua

SEQ ID NO: 392414 - RNA, 32 nt, Human
cuacauuaguaucccacuagcccaggggagca

SEQ ID NO: 392415 - RNA, 32 nt, Human
cuacauucaaaaccaccacuaagagccacgau

SEQ ID NO: 392416 - RNA, 32 nt, Human
cuacauucacaguguccaguuuagccaccaug

SEQ ID NO: 392417 - RNA, 32 nt, Human
cuacauucagcaggaacuuuucucgaggagug

SEQ ID NO: 392418 - RNA, 32 nt, Human
cuacauuccagccugggcaacacgagcgaaac

SEQ ID NO: 392419 - RNA, 20 nt, Human
cuacauucccucggcccgug

SEQ ID NO: 392420 - RNA, 32 nt, Human
cuacauucccuggccuggcucuccuguagcuc

SEQ ID NO: 392421 - RNA, 32 nt, Human
cuacauuccuaaguguucaccaguggaacaga

SEQ ID NO: 392422 - RNA, 32 nt, Human
cuacauuccucuccucuucacuagccucucug

SEQ ID NO: 392423 - RNA, 32 nt, Human
cuacauucuaccaagcugcucuuuuaaaaguc

SEQ ID NO: 392424 - RNA, 32 nt, Human
cuacauucugauuuuuauuuucuacuuuuauu

SEQ ID NO: 392425 - RNA, 32 nt, Human
cuacauugagacugcuuugagaaguuucuagc

SEQ ID NO: 392426 - RNA, 23 nt, Human
cuacauugcccaggcuggucuca

SEQ ID NO: 392427 - RNA, 32 nt, Human
cuacauugccuaaauccauuuguuucuuugga

SEQ ID NO: 392428 - RNA, 32 nt, Human
cuacauuguaaguuccuugagggcagggccau

SEQ ID NO: 392429 - RNA, 32 nt, Human
cuacauuuaguucuccccacucugauccccug

SEQ ID NO: 392430 - RNA, 32 nt, Human
cuacauuucuguccucccugcguucucagcuu

SEQ ID NO: 392431 - RNA, 32 nt, Human
cuacauuuuccccaaaacauuuauuuugccau

SEQ ID NO: 392432 - RNA, 32 nt, Human
cuaccaaaaauacaaaaauuagccagacgugg

SEQ ID NO: 392433 - RNA, 32 nt, Human
cuaccaaaaauacaaaaauuagccaggcauag

SEQ ID NO: 392434 - RNA, 32 nt, Human
cuaccaaaaauacaaaaauuagccaggcgugg

SEQ ID NO: 392435 - RNA, 32 nt, Human
cuaccaaaaauacaaaaauuagccgggcgugg

SEQ ID NO: 392436 - RNA, 32 nt, Human
cuaccaaaaauacaaaaauuagccgggugugg

SEQ ID NO: 392437 - RNA, 32 nt, Human
cuaccaaaaauacaaaaauuagcuagacauag

SEQ ID NO: 392438 - RNA, 32 nt, Human
cuaccaaaaauacaaaaauuagcugggcgugg

SEQ ID NO: 392439 - RNA, 32 nt, Human
cuaccaaaaauacaaaaauuagcugggcuugg

SEQ ID NO: 392440 - RNA, 32 nt, Human
cuaccaaaaauacaaaaauuagcugggugcga

SEQ ID NO: 392441 - RNA, 32 nt, Human
cuaccaaaaauacaaaaauucaccaggcaugg

SEQ ID NO: 392442 - RNA, 21 nt, Human
cuaccaaaacauagaugacag

SEQ ID NO: 392443 - RNA, 32 nt, Human
cuaccaaaacuacaaaaauuagccgggcucac

SEQ ID NO: 392444 - RNA, 32 nt, Human
cuaccaaacagcuuaaauucuucaagaaagaa

SEQ ID NO: 392445 - RNA, 32 nt, Human
cuaccaaagacaaaaagaaaguaaaacauuuc

SEQ ID NO: 392446 - RNA, 20 nt, Human
cuaccaaagcaguguuuaca

SEQ ID NO: 392447 - RNA, 32 nt, Human
cuaccaaagugcugggauuacaggcgugaacc

SEQ ID NO: 392448 - RNA, 32 nt, Human
cuaccaaagugcugggauuacaggcgugagcc

SEQ ID NO: 392449 - RNA, 32 nt, Human
cuaccaaaugugggccacugacugcuaacaga

SEQ ID NO: 392450 - RNA, 32 nt, Human
cuaccaacagaucugcacuuugaagucaaugg

SEQ ID NO: 392451 - RNA, 32 nt, Human
cuaccaaccacugucccagagucaccaaacua

SEQ ID NO: 392452 - RNA, 24 nt, Human
cuaccaaccacuuuaaaccaacca

SEQ ID NO: 392453 - RNA, 32 nt, Human
cuaccaaccccagauaaguaagaguacuauua

SEQ ID NO: 392454 - RNA, 22 nt, Human
cuaccaaccuaaauuucugcca

SEQ ID NO: 392455 - RNA, 32 nt, Human
cuaccaagaaacacaggaagguauuccagugu

SEQ ID NO: 392456 - RNA, 32 nt, Human
cuaccaagacuccacuuccgucuuacccacuu

SEQ ID NO: 392457 - RNA, 32 nt, Human
cuaccaagcagcugggacuacaggucugcacc

SEQ ID NO: 392458 - RNA, 32 nt, Human
cuaccaaggccuucucuuccuucccacccaag

SEQ ID NO: 392459 - RNA, 32 nt, Human
cuaccaaguagcugggauuacagguguguggc

SEQ ID NO: 392460 - RNA, 32 nt, Human
cuaccaaucugaauucgaggcccauaugagag

SEQ ID NO: 392461 - RNA, 32 nt, Human
cuaccaaugcaugcagccacugugcugaauuc

SEQ ID NO: 392462 - RNA, 32 nt, Human
cuaccaaugcuuaaaaccacacccagggagcc

SEQ ID NO: 392463 - RNA, 18 nt, Human
cuaccacaaucuguuguc

SEQ ID NO: 392464 - RNA, 32 nt, Human
cuaccacacacaguaacacugcgucuuccaga

SEQ ID NO: 392465 - RNA, 32 nt, Human
cuaccacacagccgugucugggacacaguugg

SEQ ID NO: 392466 - RNA, 32 nt, Human
cuaccacacccagcuaauuuuguauuucuagu

SEQ ID NO: 392467 - RNA, 32 nt, Human
cuaccacacuccugcagacccugagccagcag

SEQ ID NO: 392468 - RNA, 22 nt, Human
cuaccacagggagacagaggga

SEQ ID NO: 392469 - RNA, 32 nt, Human
cuaccacagggagacagagggagguaagccau

SEQ ID NO: 392470 - RNA, 32 nt, Human
cuaccacaugccaagcacugugcucagggcua

SEQ ID NO: 392471 - RNA, 32 nt, Human
cuaccacauucuguccccaaaauguggaaugc

SEQ ID NO: 392472 - RNA, 27 nt, Human
cuaccaccaccagugagcuccagccug

SEQ ID NO: 392473 - RNA, 18 nt, Human
cuaccaccagggccagcu

SEQ ID NO: 392474 - RNA, 24 nt, Human
cuaccacccacuccguuccugcca

SEQ ID NO: 392475 - RNA, 32 nt, Human
cuaccacccaggacacuggugugaaugacaca

SEQ ID NO: 392476 - RNA, 32 nt, Human
cuaccacccaggcuggagugcaguggugugau

SEQ ID NO: 392477 - RNA, 32 nt, Human
cuaccaccccgcuccaucaucacuauguccag

SEQ ID NO: 392478 - RNA, 20 nt, Human
cuaccacccuauaaccuccc

SEQ ID NO: 392479 - RNA, 31 nt, Human
cuaccacccuuauuggagcacuuuguacucu

SEQ ID NO: 392480 - RNA, 32 nt, Human
cuaccaccuccagggcuggggcuggcgccucc

SEQ ID NO: 392481 - RNA, 32 nt, Human
cuaccaccuucccacuuggcuagcuguccuuu

SEQ ID NO: 392482 - RNA, 32 nt, Human
cuaccaccuuccuccuaccucuucccauauug

SEQ ID NO: 392483 - RNA, 32 nt, Human
cuaccaccuucugaacacuccuacucaucauc

SEQ ID NO: 392484 - RNA, 32 nt, Human
cuaccaccuuggaagguaagagguuaguaccu

SEQ ID NO: 392485 - RNA, 32 nt, Human
cuaccacguccggcugauuuuguauuuuuggu

SEQ ID NO: 392486 - RNA, 32 nt, Human
cuaccacuaacucugcucagacugcuuaggaa

SEQ ID NO: 392487 - RNA, 32 nt, Human
cuaccacuccugccaaggaggauuccauuugg

SEQ ID NO: 392488 - RNA, 32 nt, Human
cuaccacugaagcagaaaggagucugggagca

SEQ ID NO: 392489 - RNA, 32 nt, Human
cuaccacugcacuucagccuaggugacauagc

SEQ ID NO: 392490 - RNA, 32 nt, Human
cuaccacugguccacucuggaccucagacucu

SEQ ID NO: 392491 - RNA, 32 nt, Human
cuaccacugugggcugaagugcucugaggucc

SEQ ID NO: 392492 - RNA, 32 nt, Human
cuaccagaagugaaugucaaccagcuggaacg

SEQ ID NO: 392493 - RNA, 32 nt, Human
cuaccagagagggaggacugaacagcaagggg

SEQ ID NO: 392494 - RNA, 32 nt, Human
cuaccagagcagagaagggcaggagaggaaga

SEQ ID NO: 392495 - RNA, 32 nt, Human
cuaccagaugaaacuggauauaaucugagaca

SEQ ID NO: 392496 - RNA, 32 nt, Human
cuaccagaugagccacugguuccacuggagcu

SEQ ID NO: 392497 - RNA, 31 nt, Human
cuaccagcagcuaucccuaggagggagucuc

SEQ ID NO: 392498 - RNA, 32 nt, Human
cuaccagccucagaguuccggaaagguagagc

SEQ ID NO: 392499 - RNA, 32 nt, Human
cuaccagccucggccuucugaagugcugggau

SEQ ID NO: 392500 - RNA, 32 nt, Human
cuaccagcuaacuccagucuccugacauuaag

SEQ ID NO: 392501 - RNA, 32 nt, Human
cuaccagcuauacaacccugacuucagaguuu

SEQ ID NO: 392502 - RNA, 32 nt, Human
cuaccagcuguccugagggcugaaggaucaug

SEQ ID NO: 392503 - RNA, 32 nt, Human
cuaccaggaggagaccagguugcaguggcgua

SEQ ID NO: 392504 - RNA, 32 nt, Human
cuaccaggccacaacaacgacacccaccucac

SEQ ID NO: 392505 - RNA, 32 nt, Human
cuaccaggccuucagguccucauaaagaaaag

SEQ ID NO: 392506 - RNA, 32 nt, Human
cuaccaggcugaaugcuggagaaaacuggcua

SEQ ID NO: 392507 - RNA, 32 nt, Human
cuaccagggggaccuggaccuggagcuggacu

SEQ ID NO: 392508 - RNA, 32 nt, Human
cuaccagguagagagacacagagcuguguaca

SEQ ID NO: 392509 - RNA, 20 nt, Human
cuaccagguagcaguugaca

SEQ ID NO: 392510 - RNA, 32 nt, Human
cuaccagguggggaguggaaauucagccugcu

SEQ ID NO: 392511 - RNA, 32 nt, Human
cuaccaguccccaguuccccagcccugcugug

SEQ ID NO: 392512 - RNA, 32 nt, Human
cuaccaguggcccugugauaccacagacugug

SEQ ID NO: 392513 - RNA, 32 nt, Human
cuaccauaaccaguuugcgagucaaauggcau

SEQ ID NO: 392514 - RNA, 32 nt, Human
cuaccaucagaaaagaggccaaacuucuauca

SEQ ID NO: 392515 - RNA, 32 nt, Human
cuaccaucagggacaggaugaccuggagaacu

SEQ ID NO: 392516 - RNA, 32 nt, Human
cuaccauccacuguccauauucagucccagcc

SEQ ID NO: 392517 - RNA, 32 nt, Human
cuaccaucucucucuuaaaacgagaucagguu

SEQ ID NO: 392518 - RNA, 32 nt, Human
cuaccaugaaaagaagaggaaaagugagggaa

SEQ ID NO: 392519 - RNA, 32 nt, Human
cuaccaugacauauauuugaaauugcuuugga

SEQ ID NO: 392520 - RNA, 32 nt, Human
cuaccaugcauucaugucaaugccacauaucu

SEQ ID NO: 392521 - RNA, 32 nt, Human
cuaccaugcuccuuccuucaucccgagaggcu

SEQ ID NO: 392522 - RNA, 32 nt, Human
cuaccauugcagauuucuucugaccccaaaug

SEQ ID NO: 392523 - RNA, 32 nt, Human
cuaccauugccuccucaccuuccuccacuacg

SEQ ID NO: 392524 - RNA, 32 nt, Human
cuacccaaauguguauuuuggcaauuuggugg

SEQ ID NO: 392525 - RNA, 22 nt, Human
cuacccaacauggugaaacccc

SEQ ID NO: 392526 - RNA, 32 nt, Human
cuacccaacauggugaaaccccaucucuucua

SEQ ID NO: 392527 - RNA, 32 nt, Human
cuacccaacauucauuccccaccuucuugcug

SEQ ID NO: 392528 - RNA, 32 nt, Human
cuacccaagaaacaugaacacagggagucaug

SEQ ID NO: 392529 - RNA, 32 nt, Human
cuacccaaugcucugcucccagccuggacuag

SEQ ID NO: 392530 - RNA, 32 nt, Human
cuacccacccucccccagacccccguuuccuc

SEQ ID NO: 392531 - RNA, 32 nt, Human
cuacccacccucuucucucuucucuucucccu

SEQ ID NO: 392532 - RNA, 32 nt, Human
cuacccacuuccauucccguggucuccuugca

SEQ ID NO: 392533 - RNA, 32 nt, Human
cuacccacuucuucuuucuucccuuuccuucc

SEQ ID NO: 392534 - RNA, 32 nt, Human
cuacccagacaaggagcugacuugucaggaag

SEQ ID NO: 392535 - RNA, 32 nt, Human
cuacccagaccagugcugguggaaggaggacc

SEQ ID NO: 392536 - RNA, 32 nt, Human
cuacccagagagcagcugcuguucuuuauuuu

SEQ ID NO: 392537 - RNA, 32 nt, Human
cuacccagagggcugccgccgccucuccaagu

SEQ ID NO: 392538 - RNA, 32 nt, Human
cuacccagcugugugugaggaggaccugaugc

SEQ ID NO: 392539 - RNA, 32 nt, Human
cuacccaggaggcugagacaggagaaucgcuu

SEQ ID NO: 392540 - RNA, 32 nt, Human
cuacccaggaggcugaggcaggagaaucgcug

SEQ ID NO: 392541 - RNA, 32 nt, Human
cuacccaggaggcugaggcaggagaaucgcuu

SEQ ID NO: 392542 - RNA, 32 nt, Human
cuacccaggaggcugaggcaggagaauugcug

SEQ ID NO: 392543 - RNA, 32 nt, Human
cuacccaggagggagagcgcagcugcugcagg

SEQ ID NO: 392544 - RNA, 32 nt, Human
cuacccagucgaguccucuuguggagcccaca

SEQ ID NO: 392545 - RNA, 32 nt, Human
cuacccauccccaacauucagcucagcugccu

SEQ ID NO: 392546 - RNA, 32 nt, Human
cuacccauuagaugcaggcucuaccucaagua

SEQ ID NO: 392547 - RNA, 32 nt, Human
cuacccauuuucugccaagauucaagcagucg

SEQ ID NO: 392548 - RNA, 22 nt, Human
cuaccccaaaauuguuuucuca

SEQ ID NO: 392549 - RNA, 32 nt, Human
cuaccccaagagcagggauauuagcugugucc

SEQ ID NO: 392550 - RNA, 21 nt, Human
cuaccccaagucacuaccuca

SEQ ID NO: 392551 - RNA, 32 nt, Human
cuaccccacauccugucuuagccgcagucucc

SEQ ID NO: 392552 - RNA, 32 nt, Human
cuaccccagaaauaagaaucaagagcagcuau

SEQ ID NO: 392553 - RNA, 32 nt, Human
cuaccccagacacacccucucuccucggauga

SEQ ID NO: 392554 - RNA, 32 nt, Human
cuaccccagcacacacacucccugccacuguu

SEQ ID NO: 392555 - RNA, 23 nt, Human
cuaccccagccaucauuuucuca

SEQ ID NO: 392556 - RNA, 32 nt, Human
cuaccccagcuaaccucuucuggaccaggaga

SEQ ID NO: 392557 - RNA, 32 nt, Human
cuaccccagcuccgugugaugcccaguaaagc

SEQ ID NO: 392558 - RNA, 32 nt, Human
cuaccccaggaggcucuuaucuccccagcccc

SEQ ID NO: 392559 - RNA, 22 nt, Human
cuaccccagguuccuuuccuua

SEQ ID NO: 392560 - RNA, 32 nt, Human
cuacccccaaguuucuccucugacccaucagc

SEQ ID NO: 392561 - RNA, 32 nt, Human
cuacccccacagaccugcucuggacacuugcu

SEQ ID NO: 392562 - RNA, 32 nt, Human
cuacccccaccugaacuucagcauucccauca

SEQ ID NO: 392563 - RNA, 18 nt, Human
cuacccccacugccccga

SEQ ID NO: 392564 - RNA, 32 nt, Human
cuacccccaggagauauucacuguaaugaaua

SEQ ID NO: 392565 - RNA, 22 nt, Human
cuacccccaguuucugcuguua

SEQ ID NO: 392566 - RNA, 32 nt, Human
cuacccccggagccauggccucugcuggggug

SEQ ID NO: 392567 - RNA, 32 nt, Human
cuacccccugggcuggagggaggcagggcacc

SEQ ID NO: 392568 - RNA, 32 nt, Human
cuacccccuuccuucuuugucuugccccuagg

SEQ ID NO: 392569 - RNA, 32 nt, Human
cuaccccgacuggccggccccgccccgugccc

SEQ ID NO: 392570 - RNA, 32 nt, Human
cuaccccggucccucccuuucugggguggggc

SEQ ID NO: 392571 - RNA, 32 nt, Human
cuaccccuauguccaaauuuucagccaccaca

SEQ ID NO: 392572 - RNA, 32 nt, Human
cuaccccugcucccauuccucccuccggccau

SEQ ID NO: 392573 - RNA, 32 nt, Human
cuaccccugcugcccagcuccccagccuguuc

SEQ ID NO: 392574 - RNA, 32 nt, Human
cuaccccuguagcugugaaccuccgggcucau

SEQ ID NO: 392575 - RNA, 32 nt, Human
cuaccccugucuccccuucaaggacuucuccc

SEQ ID NO: 392576 - RNA, 32 nt, Human
cuacccgagacagggcaucacuguguugccaa

SEQ ID NO: 392577 - RNA, 32 nt, Human
cuacccgauccuggcccuccaccugccuccag

SEQ ID NO: 392578 - RNA, 32 nt, Human
cuacccgccacugcauuccacagccuguagaa

SEQ ID NO: 392579 - RNA, 32 nt, Human
cuacccgcgcccgucugcucucucucuucauu

SEQ ID NO: 392580 - RNA, 32 nt, Human
cuacccgcuuccuggagcaaacaguugggggu

SEQ ID NO: 392581 - RNA, 32 nt, Human
cuacccggaaggcugaggcaggagaauggcgu

SEQ ID NO: 392582 - RNA, 32 nt, Human
cuacccggaggcaccaugagcguggaggcgua

SEQ ID NO: 392583 - RNA, 32 nt, Human
cuacccggaugaagagguuggaggugggcagc

SEQ ID NO: 392584 - RNA, 32 nt, Human
cuacccgggaggcaguggcugcagugagcuga

SEQ ID NO: 392585 - RNA, 32 nt, Human
cuacccgggaggcgaagagaagcacagaagaa

SEQ ID NO: 392586 - RNA, 32 nt, Human
cuacccgggaggcugaggcaggagaaucacuu

SEQ ID NO: 392587 - RNA, 32 nt, Human
cuacccgggaggcugaggcaggagaaucgcuu

SEQ ID NO: 392588 - RNA, 32 nt, Human
cuacccgggaggcugaggcaggagaauggcgu

SEQ ID NO: 392589 - RNA, 32 nt, Human
cuacccgggaggcugaggcaggagaauugcuu

SEQ ID NO: 392590 - RNA, 32 nt, Human
cuacccuaagccagccaccccucuucacagug

SEQ ID NO: 392591 - RNA, 32 nt, Human
cuacccuaauccccacuucccugcagaaucaa

SEQ ID NO: 392592 - RNA, 32 nt, Human
cuacccuacaugcucccucuggcaccauuuca

SEQ ID NO: 392593 - RNA, 32 nt, Human
cuacccuacccucauuccccgacacccucugg

SEQ ID NO: 392594 - RNA, 32 nt, Human
cuacccuagggaggccaggaggagcuucggag

SEQ ID NO: 392595 - RNA, 32 nt, Human
cuacccuagggaggccuccaucuggaaauggg

SEQ ID NO: 392596 - RNA, 32 nt, Human
cuacccuaucccugcccugggagaccuggggu

SEQ ID NO: 392597 - RNA, 32 nt, Human
cuacccucacugcucuccugugcccagguuau

SEQ ID NO: 392598 - RNA, 32 nt, Human
cuacccucagucucccugucugugguuccaga

SEQ ID NO: 392599 - RNA, 32 nt, Human
cuacccuccucucuccccagaugugacuacug

SEQ ID NO: 392600 - RNA, 32 nt, Human
cuacccuccucucuucccagaugugaccacug

SEQ ID NO: 392601 - RNA, 32 nt, Human
cuacccucucccaccacacaguacugauugcu

SEQ ID NO: 392602 - RNA, 32 nt, Human
cuacccucucccugccuggcacaugccugcca

SEQ ID NO: 392603 - RNA, 32 nt, Human
cuacccucugcacccucaagaaacccccagug

SEQ ID NO: 392604 - RNA, 32 nt, Human
cuacccucuuccugggaaaguaauugcugagc

SEQ ID NO: 392605 - RNA, 32 nt, Human
cuacccugaaccuauguguccucuaagucagg

SEQ ID NO: 392606 - RNA, 32 nt, Human
cuacccugagccaccacccucagccuuggugu

SEQ ID NO: 392607 - RNA, 32 nt, Human
cuacccugcaacuucuauccuuucuuccgcac

SEQ ID NO: 392608 - RNA, 32 nt, Human
cuacccugcaccugaccucaugauccccucca

SEQ ID NO: 392609 - RNA, 32 nt, Human
cuacccuggaaucucacuggugccccaggaga

SEQ ID NO: 392610 - RNA, 32 nt, Human
cuacccuggagccaggagcaucaggguuggcu

SEQ ID NO: 392611 - RNA, 32 nt, Human
cuacccuggagugcugcagugugugagagcug

SEQ ID NO: 392612 - RNA, 32 nt, Human
cuacccuggugggauggaugguucuguaaaug

SEQ ID NO: 392613 - RNA, 32 nt, Human
cuacccuguccuuuuaauguaagucacucccc

SEQ ID NO: 392614 - RNA, 32 nt, Human
cuacccuguggaggcugaggggucgggggaag

SEQ ID NO: 392615 - RNA, 32 nt, Human
cuacccuuaguagugugaccagucagacaacu

SEQ ID NO: 392616 - RNA, 32 nt, Human
cuacccuucucuuccucuuuuaagcccucucu

SEQ ID NO: 392617 - RNA, 32 nt, Human
cuacccuuuccucgcuccgggccggcagugug

SEQ ID NO: 392618 - RNA, 32 nt, Human
cuacccuuugaucaccagugugaacagaaucc

SEQ ID NO: 392619 - RNA, 32 nt, Human
cuaccgaagugcuaggauuacagacguaagcc

SEQ ID NO: 392620 - RNA, 32 nt, Human
cuaccgaguagcugggacuacaggcacgcgcc

SEQ ID NO: 392621 - RNA, 32 nt, Human
cuaccgaugcacagcaaccagccaauccugcu

SEQ ID NO: 392622 - RNA, 32 nt, Human
cuaccgcaggcaaagguucccaccuuacuaca

SEQ ID NO: 392623 - RNA, 32 nt, Human
cuaccgcaggcgaagguucccaccuuacuaca

SEQ ID NO: 392624 - RNA, 21 nt, Human
cuaccgccgccgccgccgccg

SEQ ID NO: 392625 - RNA, 32 nt, Human
cuaccgccuccuggaccucuuugcucguccuu

SEQ ID NO: 392626 - RNA, 32 nt, Human
cuaccgcuacucuccccaagccuguguugcag

SEQ ID NO: 392627 - RNA, 32 nt, Human
cuaccgcucccucugcugaacuauuccggaug

SEQ ID NO: 392628 - RNA, 32 nt, Human
cuaccggagccuaagaccagaaggcaggugag

SEQ ID NO: 392629 - RNA, 32 nt, Human
cuaccggccuccuauucuccugcuccaccccc

SEQ ID NO: 392630 - RNA, 32 nt, Human
cuaccggggaggcugaggcaggagaaucgcua

SEQ ID NO: 392631 - RNA, 32 nt, Human
cuaccgguaauuucccaguagcuuugaauauu

SEQ ID NO: 392632 - RNA, 23 nt, Human
cuaccggugcaggagcacaggga

SEQ ID NO: 392633 - RNA, 32 nt, Human
cuaccggugcaggagcacagggaucaguuguc

SEQ ID NO: 392634 - RNA, 32 nt, Human
cuaccgucgcucagcaacaccaaaaagagaaa

SEQ ID NO: 392635 - RNA, 32 nt, Human
cuaccuaagcacaugucugugacaaggucuua

SEQ ID NO: 392636 - RNA, 32 nt, Human
cuaccuaaggacaagacacugaggagauacug

SEQ ID NO: 392637 - RNA, 32 nt, Human
cuaccuacacauaggaaggccaagguugaucc

SEQ ID NO: 392638 - RNA, 32 nt, Human
cuaccuacuccgaguguccuccccugccccac

SEQ ID NO: 392639 - RNA, 32 nt, Human
cuaccuacugcccccauucauccuggcuuucc

SEQ ID NO: 392640 - RNA, 32 nt, Human
cuaccuacugggugguggggagggaagcuucu

SEQ ID NO: 392641 - RNA, 32 nt, Human
cuaccuagaaaaucacagccuccuuauaaugc

SEQ ID NO: 392642 - RNA, 32 nt, Human
cuaccuaggaggcugaggcaggagaauagcug

SEQ ID NO: 392643 - RNA, 32 nt, Human
cuaccuagugcuuuuucaaucaugccugauua

SEQ ID NO: 392644 - RNA, 32 nt, Human
cuaccuaguuucucccucuuguccugcacaag

SEQ ID NO: 392645 - RNA, 32 nt, Human
cuaccuauacauacgugcacacacacauacau

SEQ ID NO: 392646 - RNA, 32 nt, Human
cuaccuauaguuguuggccuuuuugcauauaa

SEQ ID NO: 392647 - RNA, 32 nt, Human
cuaccuaugcagauaaccuggaguggacuuca

SEQ ID NO: 392648 - RNA, 32 nt, Human
cuaccuauuccugcacuuauuacccucauucu

SEQ ID NO: 392649 - RNA, 32 nt, Human
cuaccucacaacaaccauuugccuccuuuaag

SEQ ID NO: 392650 - RNA, 32 nt, Human
cuaccucacagaacucugaacccuacagaaau

SEQ ID NO: 392651 - RNA, 32 nt, Human
cuaccucacaggacuguugugaggcuuggcaa

SEQ ID NO: 392652 - RNA, 32 nt, Human
cuaccucacagggguguugugaggcuuuaacu

SEQ ID NO: 392653 - RNA, 32 nt, Human
cuaccucacuccugaggggagauguuucugca

SEQ ID NO: 392654 - RNA, 32 nt, Human
cuaccucacugagagggaacagaaggauauug

SEQ ID NO: 392655 - RNA, 32 nt, Human
cuaccucacugcauugcacuggaccugggaug

SEQ ID NO: 392656 - RNA, 32 nt, Human
cuaccucacuggucuggaaguccuccgaagac

SEQ ID NO: 392657 - RNA, 32 nt, Human
cuaccucagaaacugcagcuugguucugauga

SEQ ID NO: 392658 - RNA, 32 nt, Human
cuaccucagcacaacuucauuaucacaaaaga

SEQ ID NO: 392659 - RNA, 32 nt, Human
cuaccucauggaguauucucccagaaacugca

SEQ ID NO: 392660 - RNA, 32 nt, Human
cuaccuccaaaguguugggauuacaggcaaug

SEQ ID NO: 392661 - RNA, 32 nt, Human
cuaccuccaccugagccucacccugcuguuga

SEQ ID NO: 392662 - RNA, 32 nt, Human
cuaccuccacuuccuuucccuugcucacucug

SEQ ID NO: 392663 - RNA, 32 nt, Human
cuaccucccaaagcagccugaccugcguggga

SEQ ID NO: 392664 - RNA, 32 nt, Human
cuaccucccacugcacugccgguuucccuggg

SEQ ID NO: 392665 - RNA, 32 nt, Human
cuaccucccagcucuguuuuccauccccuuca

SEQ ID NO: 392666 - RNA, 32 nt, Human
cuaccuccccucccaggaccccgagacacccc

SEQ ID NO: 392667 - RNA, 32 nt, Human
cuaccuccccuccccaggacacucccaggcuu

SEQ ID NO: 392668 - RNA, 32 nt, Human
cuaccucccuaaaaguaaauacaaagagaacu

SEQ ID NO: 392669 - RNA, 32 nt, Human
cuaccucccugccuuggucccgccaacacaug

SEQ ID NO: 392670 - RNA, 32 nt, Human
cuaccuccuccuccucaccaccuuggggcuuc

SEQ ID NO: 392671 - RNA, 32 nt, Human
cuaccuccuuuagagccuucugugggggcaca

SEQ ID NO: 392672 - RNA, 32 nt, Human
cuaccucuaccaggaaucucugcugcucagca

SEQ ID NO: 392673 - RNA, 32 nt, Human
cuaccucucacgaaagcugacugugugaugaa

SEQ ID NO: 392674 - RNA, 32 nt, Human
cuaccucucaggaguucauuugucucucuguc

SEQ ID NO: 392675 - RNA, 32 nt, Human
cuaccucucaugauuacuauggagauugaaua

SEQ ID NO: 392676 - RNA, 32 nt, Human
cuaccucuccacacuuccccagaagggaaaag

SEQ ID NO: 392677 - RNA, 32 nt, Human
cuaccucucccagacagaguuggggucaaauu

SEQ ID NO: 392678 - RNA, 32 nt, Human
cuaccucucccucugcugacuuaaugucguga

SEQ ID NO: 392679 - RNA, 32 nt, Human
cuaccucucucuucccuagggccuuuugugga

SEQ ID NO: 392680 - RNA, 32 nt, Human
cuaccucucugaguccguuugcuuuauucaaa

SEQ ID NO: 392681 - RNA, 32 nt, Human
cuaccucugcccugcccuccagccugggacaa

SEQ ID NO: 392682 - RNA, 32 nt, Human
cuaccucugcucuuggaggagauggggacagg

SEQ ID NO: 392683 - RNA, 32 nt, Human
cuaccucuuccaggaagcacaggccaggggau

SEQ ID NO: 392684 - RNA, 32 nt, Human
cuaccucuuuggccaggacccuugccagccag

SEQ ID NO: 392685 - RNA, 32 nt, Human
cuaccugaaccccucuugccacugccuucuac

SEQ ID NO: 392686 - RNA, 32 nt, Human
cuaccugauggaaacuuuucuuacccuuauag

SEQ ID NO: 392687 - RNA, 32 nt, Human
cuaccugauggaccuccuucgcuggaaggucu

SEQ ID NO: 392688 - RNA, 32 nt, Human
cuaccugauucugccacuuacccacacugucu

SEQ ID NO: 392689 - RNA, 32 nt, Human
cuaccugcacacagaagcccauugucgccggc

SEQ ID NO: 392690 - RNA, 32 nt, Human
cuaccugcacacuguccuauuauauucauucu

SEQ ID NO: 392691 - RNA, 32 nt, Human
cuaccugcacccgagcccuggggcucagcccc

SEQ ID NO: 392692 - RNA, 32 nt, Human
cuaccugcaccucacagugcaaggcuuuugcc

SEQ ID NO: 392693 - RNA, 32 nt, Human
cuaccugcacucccgcccugaggcccggagcc

SEQ ID NO: 392694 - RNA, 32 nt, Human
cuaccugcagugaguuccagaccugcccgucc

SEQ ID NO: 392695 - RNA, 18 nt, Human
cuaccugcccugccugcc

SEQ ID NO: 392696 - RNA, 20 nt, Human
cuaccugccuggugcugguc

SEQ ID NO: 392697 - RNA, 32 nt, Human
cuaccugcggccgagccagggagcgagagggc

SEQ ID NO: 392698 - RNA, 32 nt, Human
cuaccugcucuguccucuuccuugccagauga

SEQ ID NO: 392699 - RNA, 32 nt, Human
cuaccugcuuuuccucucucucccaaggccug

SEQ ID NO: 392700 - RNA, 32 nt, Human
cuaccuggaacagcacaggaucuggcagaccc

SEQ ID NO: 392701 - RNA, 32 nt, Human
cuaccuggacgggcccaggcuuggggacucug

SEQ ID NO: 392702 - RNA, 31 nt, Human
cuaccuggcaaagcuuuuggauuucaaagcu

SEQ ID NO: 392703 - RNA, 32 nt, Human
cuaccuggcuacccccuuccauggccccagcu

SEQ ID NO: 392704 - RNA, 32 nt, Human
cuaccugggagaugguggaggaugaagcccug

SEQ ID NO: 392705 - RNA, 32 nt, Human
cuaccugggaggcugaggaaggagaaucgcuu

SEQ ID NO: 392706 - RNA, 32 nt, Human
cuaccugggaggcugaggcaggagaaucacuu

SEQ ID NO: 392707 - RNA, 32 nt, Human
cuaccugggaggcugaggcaggagaaucgcuu

SEQ ID NO: 392708 - RNA, 32 nt, Human
cuaccugggaggcugaggcgggagaaucaccu

SEQ ID NO: 392709 - RNA, 32 nt, Human
cuaccugggaggcugagguaugaggauugcuu

SEQ ID NO: 392710 - RNA, 32 nt, Human
cuaccugggaggcugaggugggaggaucgcuu

SEQ ID NO: 392711 - RNA, 32 nt, Human
cuaccugggagguggagggagacaggagagaa

SEQ ID NO: 392712 - RNA, 32 nt, Human
cuaccugggaucaaacuauggccccacccuua

SEQ ID NO: 392713 - RNA, 32 nt, Human
cuaccuggggaagcggggguuggguguuuuag

SEQ ID NO: 392714 - RNA, 32 nt, Human
cuaccuguaaaggaaaguagaccuggauucau

SEQ ID NO: 392715 - RNA, 18 nt, Human
cuaccugucucccacaga

SEQ ID NO: 392716 - RNA, 32 nt, Human
cuaccugugauuuccagcaagauuacuguuau

SEQ ID NO: 392717 - RNA, 32 nt, Human
cuaccugugccaccccugcccugauuccacgg

SEQ ID NO: 392718 - RNA, 32 nt, Human
cuaccugugggagcgcuacccgggaggcgaag

SEQ ID NO: 392719 - RNA, 32 nt, Human
cuaccugugguguugggaccaagccuccaaua

SEQ ID NO: 392720 - RNA, 32 nt, Human
cuaccuguuagacaaugguugcucuugggcuc

SEQ ID NO: 392721 - RNA, 32 nt, Human
cuaccuguucuguguuggcaagggagagugcc

SEQ ID NO: 392722 - RNA, 32 nt, Human
cuaccuguugcagagucaagggacuugcaugu

SEQ ID NO: 392723 - RNA, 32 nt, Human
cuaccuguuuauagccugcugcuccuggugaa

SEQ ID NO: 392724 - RNA, 32 nt, Human
cuaccuuaagucucccccucuuuuauccuugc

SEQ ID NO: 392725 - RNA, 32 nt, Human
cuaccuuagaagaagaaagaaagagggaaaga

SEQ ID NO: 392726 - RNA, 32 nt, Human
cuaccuuaguuuccuuuucuguuuccuguccu

SEQ ID NO: 392727 - RNA, 32 nt, Human
cuaccuucacuucuccccagcucugcccucug

SEQ ID NO: 392728 - RNA, 32 nt, Human
cuaccuucagaggcaugccuccccagccaccc

SEQ ID NO: 392729 - RNA, 32 nt, Human
cuaccuucagccagagccagagagcuggauau

SEQ ID NO: 392730 - RNA, 32 nt, Human
cuaccuucauuuucuaauucucuuuucaaaca

SEQ ID NO: 392731 - RNA, 32 nt, Human
cuaccuuccagaguuacuucagugcauaaagu

SEQ ID NO: 392732 - RNA, 32 nt, Human
cuaccuucccacucaccuuccccagcuacaaa

SEQ ID NO: 392733 - RNA, 32 nt, Human
cuaccuuccucucuccccacaugugacuacug

SEQ ID NO: 392734 - RNA, 32 nt, Human
cuaccuuccuuccuccucuguuuagcaaagga

SEQ ID NO: 392735 - RNA, 32 nt, Human
cuaccuucucagaauuaacaggggauguuaau

SEQ ID NO: 392736 - RNA, 32 nt, Human
cuaccuucugcacuuacuccccaucagaagau

SEQ ID NO: 392737 - RNA, 16 nt, Human
cuaccuucuucacaga

SEQ ID NO: 392738 - RNA, 32 nt, Human
cuaccuucuuuucuuccucauuuccuucuuuu

SEQ ID NO: 392739 - RNA, 32 nt, Human
cuaccuuguuuuugguuggcuuuuguuguugu

SEQ ID NO: 392740 - RNA, 32 nt, Human
cuaccuuuaagaucagccugacuuaucaaacg

SEQ ID NO: 392741 - RNA, 32 nt, Human
cuaccuuuacucccucuccuucaauuccacuu

SEQ ID NO: 392742 - RNA, 32 nt, Human
cuaccuuuccucaccucuaucucucucaacca

SEQ ID NO: 392743 - RNA, 32 nt, Human
cuaccuuucucccucuccuucccuucaucaca

SEQ ID NO: 392744 - RNA, 32 nt, Human
cuaccuuugcagauuugcuccuuucccauugc

SEQ ID NO: 392745 - RNA, 32 nt, Human
cuaccuuugcugggaucccccuccuccauccu

SEQ ID NO: 392746 - RNA, 32 nt, Human
cuaccuuuggaucugugagaaggugaauacaa

SEQ ID NO: 392747 - RNA, 32 nt, Human
cuaccuuuucacuguuucuuccuuccuuuaug

SEQ ID NO: 392748 - RNA, 32 nt, Human
cuacgaaaaauacaaaaauuagcugggcauag

SEQ ID NO: 392749 - RNA, 32 nt, Human
cuacgaaaaauacaaaauuuagccgggcaugg

SEQ ID NO: 392750 - RNA, 32 nt, Human
cuacgaagagucgggguugagccccagcugag

SEQ ID NO: 392751 - RNA, 32 nt, Human
cuacgaagcuugaaggauggcuggagcuuagg

SEQ ID NO: 392752 - RNA, 32 nt, Human
cuacgaauagccacugcauaccaaccugggca

SEQ ID NO: 392753 - RNA, 32 nt, Human
cuacgaccuaccacagcagcccgggcucaacu

SEQ ID NO: 392754 - RNA, 32 nt, Human
cuacgagaagcacagucucugccugaggcucc

SEQ ID NO: 392755 - RNA, 32 nt, Human
cuacgagaaucagucuaacagagaugccgaug

SEQ ID NO: 392756 - RNA, 32 nt, Human
cuacgagauuagccuggauauuaacuugucuu

SEQ ID NO: 392757 - RNA, 32 nt, Human
cuacgagcuccucaaguaucccagagcauccc

SEQ ID NO: 392758 - RNA, 32 nt, Human
cuacgaggcuuauccuggcaaugggguaguca

SEQ ID NO: 392759 - RNA, 32 nt, Human
cuacgagugcuacagugaggccuggacacaug

SEQ ID NO: 392760 - RNA, 32 nt, Human
cuacgaguuuuccagauuuaggagacuucaga

SEQ ID NO: 392761 - RNA, 32 nt, Human
cuacgaucacuuccgcuccugccugcacgcgc

SEQ ID NO: 392762 - RNA, 32 nt, Human
cuacgauccaggcuggaguugcgcucggccgg

SEQ ID NO: 392763 - RNA, 32 nt, Human
cuacgaugaucuguuucucagacaugcagcac

SEQ ID NO: 392764 - RNA, 32 nt, Human
cuacgauggguggaucaccugaggucaggagu

SEQ ID NO: 392765 - RNA, 32 nt, Human
cuacgauuccuugaguguuuuuccagcuaccu

SEQ ID NO: 392766 - RNA, 32 nt, Human
cuacgcaggaggccaaggcaggagaaucacuu

SEQ ID NO: 392767 - RNA, 32 nt, Human
cuacgccaaugaggccucaucugugcucucgc

SEQ ID NO: 392768 - RNA, 32 nt, Human
cuacgccaccuugcccagcccuggccaagccc

SEQ ID NO: 392769 - RNA, 32 nt, Human
cuacgccacugcacuccagccuggaggccaga

SEQ ID NO: 392770 - RNA, 32 nt, Human
cuacgccaggcacaaggcaucuuguugccuug

SEQ ID NO: 392771 - RNA, 32 nt, Human
cuacgcccgaggcucccuucccuuccccagcc

SEQ ID NO: 392772 - RNA, 32 nt, Human
cuacgcccuccccuccccagccuuuuccagaa

SEQ ID NO: 392773 - RNA, 32 nt, Human
cuacgcccuccccuccccggcccuccacagcu

SEQ ID NO: 392774 - RNA, 32 nt, Human
cuacgccuggauccgggagcauggcccagaga

SEQ ID NO: 392775 - RNA, 32 nt, Human
cuacgccuguaaucccagcacuuugggaggcc

SEQ ID NO: 392776 - RNA, 20 nt, Human
cuacgcggccuuccacgccc

SEQ ID NO: 392777 - RNA, 32 nt, Human
cuacgcucaaaggcaucucuauaaggauguga

SEQ ID NO: 392778 - RNA, 32 nt, Human
cuacgcucacugcaggcuccgccuccuggguu

SEQ ID NO: 392779 - RNA, 32 nt, Human
cuacgcucucagggaaauacaaauaucacguu

SEQ ID NO: 392780 - RNA, 32 nt, Human
cuacgcugaagauggcauccugugaaguccuu

SEQ ID NO: 392781 - RNA, 32 nt, Human
cuacgcugcucgggccauugcccagccagaug

SEQ ID NO: 392782 - RNA, 32 nt, Human
cuacggaaaaucacauccacagaggccagggc

SEQ ID NO: 392783 - RNA, 32 nt, Human
cuacggagagggguggacggcucugcacgggc

SEQ ID NO: 392784 - RNA, 32 nt, Human
cuacggagaugagacaggcgugcagugugcgc

SEQ ID NO: 392785 - RNA, 32 nt, Human
cuacggaggcuucuccauugucccugcuggag

SEQ ID NO: 392786 - RNA, 32 nt, Human
cuacggagggucuuccugaaacccgcagagga

SEQ ID NO: 392787 - RNA, 32 nt, Human
cuacggaguccaccccucccucucuagaaccc

SEQ ID NO: 392788 - RNA, 32 nt, Human
cuacggcagcaaauugcuacaugugcuggaua

SEQ ID NO: 392789 - RNA, 32 nt, Human
cuacggccagaagaacaaguaccgagcacccc

SEQ ID NO: 392790 - RNA, 32 nt, Human
cuacggcccaccuccuggugcugguguuuuca

SEQ ID NO: 392791 - RNA, 32 nt, Human
cuacggcccuggaacggggccauggagaagcu

SEQ ID NO: 392792 - RNA, 32 nt, Human
cuacggcgccuggagcagggucugcagcggcc

SEQ ID NO: 392793 - RNA, 32 nt, Human
cuacggcuguugccaugaggcgaggcuaggga

SEQ ID NO: 392794 - RNA, 32 nt, Human
cuacgggcacacacagaaaacagcagccugcg

SEQ ID NO: 392795 - RNA, 32 nt, Human
cuacggggccgcggccacuagcgcggcgccgc

SEQ ID NO: 392796 - RNA, 32 nt, Human
cuacguauuuuauuuuacauagaucauauugu

SEQ ID NO: 392797 - RNA, 32 nt, Human
cuacgucuuggacgggaaucacuggggcagag

SEQ ID NO: 392798 - RNA, 32 nt, Human
cuacgugacccaggcuggaguguaguagcuau

SEQ ID NO: 392799 - RNA, 32 nt, Human
cuacgugcacaucugggcacaguaccuuuccu

SEQ ID NO: 392800 - RNA, 32 nt, Human
cuacgugcuauugaacacuaaaaauuuuucug

SEQ ID NO: 392801 - RNA, 32 nt, Human
cuacgugggaggcagaggcaggagaaucauuu

SEQ ID NO: 392802 - RNA, 32 nt, Human
cuacgugggaggcugaggcaggagaaucacuu

SEQ ID NO: 392803 - RNA, 32 nt, Human
cuacguguacaucauuaauccccauugccaag

SEQ ID NO: 392804 - RNA, 32 nt, Human
cuacguuaaauacacuggauuagucugucuuc

SEQ ID NO: 392805 - RNA, 32 nt, Human
cuacguucuccagcccacaccccuccaaagcc

SEQ ID NO: 392806 - RNA, 32 nt, Human
cuacguuuaggcaccccuuuccccagccucuc

SEQ ID NO: 392807 - RNA, 32 nt, Human
cuacguuucccaggacucuccccaucuccaga

SEQ ID NO: 392808 - RNA, 32 nt, Human
cuacuaaaaacacaaaaauuagccaggcaugg

SEQ ID NO: 392809 - RNA, 32 nt, Human
cuacuaaaaacacaaaaauuagccaggcgugg

SEQ ID NO: 392810 - RNA, 32 nt, Human
cuacuaaaaacacaaaaauuagccgggcgggg

SEQ ID NO: 392811 - RNA, 32 nt, Human
cuacuaaaaacacaaaaauuagccggguguac

SEQ ID NO: 392812 - RNA, 32 nt, Human
cuacuaaaaacacaaaaauuagcuaggcaugg

SEQ ID NO: 392813 - RNA, 32 nt, Human
cuacuaaaaacacaaaaauuagcugggcaugg

SEQ ID NO: 392814 - RNA, 32 nt, Human
cuacuaaaaacacaaaaauuagcugggcgugg

SEQ ID NO: 392815 - RNA, 32 nt, Human
cuacuaaaaacacaaaaauuagcugggugugg

SEQ ID NO: 392816 - RNA, 32 nt, Human
cuacuaaaaagcgcacgacaaugguagaagca

SEQ ID NO: 392817 - RNA, 32 nt, Human
cuacuaaaaauaaagaaagauuagcugggaca

SEQ ID NO: 392818 - RNA, 32 nt, Human
cuacuaaaaauaacaaaauuagccgggcgugg

SEQ ID NO: 392819 - RNA, 32 nt, Human
cuacuaaaaauacaaaaacuagccaggcaugg

SEQ ID NO: 392820 - RNA, 32 nt, Human
cuacuaaaaauacaaaaacuagccaggugugg

SEQ ID NO: 392821 - RNA, 32 nt, Human
cuacuaaaaauacaaaaacuagccuggcaagg

SEQ ID NO: 392822 - RNA, 32 nt, Human
cuacuaaaaauacaaaaacuagcugggcaugg

SEQ ID NO: 392823 - RNA, 32 nt, Human
cuacuaaaaauacaaaaacuuagccgggcaug

SEQ ID NO: 392824 - RNA, 32 nt, Human
cuacuaaaaauacaaaaacuuagcugggugua

SEQ ID NO: 392825 - RNA, 32 nt, Human
cuacuaaaaauacaaaaagauuagccaggcau

SEQ ID NO: 392826 - RNA, 32 nt, Human
cuacuaaaaauacaaaaagccagguguggugg

SEQ ID NO: 392827 - RNA, 32 nt, Human
cuacuaaaaauacaaaaagccgggcguggugg

SEQ ID NO: 392828 - RNA, 32 nt, Human
cuacuaaaaauacaaaaaguagccaggcaugg

SEQ ID NO: 392829 - RNA, 32 nt, Human
cuacuaaaaauacaaaaaguagcuaggugugg

SEQ ID NO: 392830 - RNA, 32 nt, Human
cuacuaaaaauacaaaaaguuagcugggcaug

SEQ ID NO: 392831 - RNA, 32 nt, Human
cuacuaaaaauacaaaaauagccaggcauggu

SEQ ID NO: 392832 - RNA, 32 nt, Human
cuacuaaaaauacaaaaauagccgggcauggu

SEQ ID NO: 392833 - RNA, 32 nt, Human
cuacuaaaaauacaaaaaucaaccaggcauga

SEQ ID NO: 392834 - RNA, 32 nt, Human
cuacuaaaaauacaaaaaucagccaggcaugg

SEQ ID NO: 392835 - RNA, 32 nt, Human
cuacuaaaaauacaaaaaucagccgggucuca

SEQ ID NO: 392836 - RNA, 32 nt, Human
cuacuaaaaauacaaaaaucagccgggugugg

SEQ ID NO: 392837 - RNA, 32 nt, Human
cuacuaaaaauacaaaaaucagcggggagugg

SEQ ID NO: 392838 - RNA, 32 nt, Human
cuacuaaaaauacaaaaaucagcugggcaugg

SEQ ID NO: 392839 - RNA, 32 nt, Human
cuacuaaaaauacaaaaaugagcaaggcaugg

SEQ ID NO: 392840 - RNA, 32 nt, Human
cuacuaaaaauacaaaaaugagccgggcaugg

SEQ ID NO: 392841 - RNA, 32 nt, Human
cuacuaaaaauacaaaaaugagcuaggcaugg

SEQ ID NO: 392842 - RNA, 32 nt, Human
cuacuaaaaauacaaaaaugagcugggcaugg

SEQ ID NO: 392843 - RNA, 32 nt, Human
cuacuaaaaauacaaaaaugagcugggcgugg

SEQ ID NO: 392844 - RNA, 32 nt, Human
cuacuaaaaauacaaaaaugagcugggcuugg

SEQ ID NO: 392845 - RNA, 32 nt, Human
cuacuaaaaauacaaaaaugagcuggguguga

SEQ ID NO: 392846 - RNA, 32 nt, Human
cuacuaaaaauacaaaaaugagcugggugugg

SEQ ID NO: 392847 - RNA, 32 nt, Human
cuacuaaaaauacaaaaauuaaccaggcguag

SEQ ID NO: 392848 - RNA, 32 nt, Human
cuacuaaaaauacaaaaauuaaccaggcuuga

SEQ ID NO: 392849 - RNA, 32 nt, Human
cuacuaaaaauacaaaaauuaaccaggugugg

SEQ ID NO: 392850 - RNA, 32 nt, Human
cuacuaaaaauacaaaaauuacccaggcauag

SEQ ID NO: 392851 - RNA, 32 nt, Human
cuacuaaaaauacaaaaauuacccgggcuugg

SEQ ID NO: 392852 - RNA, 32 nt, Human
cuacuaaaaauacaaaaauuaccgugguggca

SEQ ID NO: 392853 - RNA, 32 nt, Human
cuacuaaaaauacaaaaauuagaugggcgugg

SEQ ID NO: 392854 - RNA, 32 nt, Human
cuacuaaaaauacaaaaauuagauggguguag

SEQ ID NO: 392855 - RNA, 32 nt, Human
cuacuaaaaauacaaaaauuagauggguguuu

SEQ ID NO: 392856 - RNA, 32 nt, Human
cuacuaaaaauacaaaaauuagcagggcaugg

SEQ ID NO: 392857 - RNA, 32 nt, Human
cuacuaaaaauacaaaaauuagccagacgugg

SEQ ID NO: 392858 - RNA, 32 nt, Human
cuacuaaaaauacaaaaauuagccaggacuga

SEQ ID NO: 392859 - RNA, 32 nt, Human
cuacuaaaaauacaaaaauuagccaggcacgg

SEQ ID NO: 392860 - RNA, 32 nt, Human
cuacuaaaaauacaaaaauuagccaggcaucg

SEQ ID NO: 392861 - RNA, 32 nt, Human
cuacuaaaaauacaaaaauuagccaggcauga

SEQ ID NO: 392862 - RNA, 32 nt, Human
cuacuaaaaauacaaaaauuagccaggcaugc

SEQ ID NO: 392863 - RNA, 32 nt, Human
cuacuaaaaauacaaaaauuagccaggcaugg

SEQ ID NO: 392864 - RNA, 32 nt, Human
cuacuaaaaauacaaaaauuagccaggcgugg

SEQ ID NO: 392865 - RNA, 32 nt, Human
cuacuaaaaauacaaaaauuagccaggcuuag

SEQ ID NO: 392866 - RNA, 32 nt, Human
cuacuaaaaauacaaaaauuagccaggggugg

SEQ ID NO: 392867 - RNA, 32 nt, Human
cuacuaaaaauacaaaaauuagccagguaugg

SEQ ID NO: 392868 - RNA, 32 nt, Human
cuacuaaaaauacaaaaauuagccagguggug

SEQ ID NO: 392869 - RNA, 32 nt, Human
cuacuaaaaauacaaaaauuagccagguguga

SEQ ID NO: 392870 - RNA, 32 nt, Human
cuacuaaaaauacaaaaauuagccaggugugg

SEQ ID NO: 392871 - RNA, 32 nt, Human
cuacuaaaaauacaaaaauuagccaggugugu

SEQ ID NO: 392872 - RNA, 32 nt, Human
cuacuaaaaauacaaaaauuagccagguguug

SEQ ID NO: 392873 - RNA, 32 nt, Human
cuacuaaaaauacaaaaauuagccagucacgg

SEQ ID NO: 392874 - RNA, 32 nt, Human
cuacuaaaaauacaaaaauuagcccggcaugu

SEQ ID NO: 392875 - RNA, 32 nt, Human
cuacuaaaaauacaaaaauuagcccggcgugg

SEQ ID NO: 392876 - RNA, 32 nt, Human
cuacuaaaaauacaaaaauuagcccggugugg

SEQ ID NO: 392877 - RNA, 32 nt, Human
cuacuaaaaauacaaaaauuagccggacgcag

SEQ ID NO: 392878 - RNA, 32 nt, Human
cuacuaaaaauacaaaaauuagccggacgugg

SEQ ID NO: 392879 - RNA, 32 nt, Human
cuacuaaaaauacaaaaauuagccggcagggu

SEQ ID NO: 392880 - RNA, 32 nt, Human
cuacuaaaaauacaaaaauuagccgggcaugg

SEQ ID NO: 392881 - RNA, 32 nt, Human
cuacuaaaaauacaaaaauuagccgggccugg

SEQ ID NO: 392882 - RNA, 32 nt, Human
cuacuaaaaauacaaaaauuagccgggcguag

SEQ ID NO: 392883 - RNA, 32 nt, Human
cuacuaaaaauacaaaaauuagccgggcgugg

SEQ ID NO: 392884 - RNA, 32 nt, Human
cuacuaaaaauacaaaaauuagccggguagua

SEQ ID NO: 392885 - RNA, 32 nt, Human
cuacuaaaaauacaaaaauuagccgggugugg

SEQ ID NO: 392886 - RNA, 32 nt, Human
cuacuaaaaauacaaaaauuagccgguggugg

SEQ ID NO: 392887 - RNA, 32 nt, Human
cuacuaaaaauacaaaaauuagccuggcaugg

SEQ ID NO: 392888 - RNA, 32 nt, Human
cuacuaaaaauacaaaaauuagccuggcgugg

SEQ ID NO: 392889 - RNA, 32 nt, Human
cuacuaaaaauacaaaaauuagccuggggugg

SEQ ID NO: 392890 - RNA, 32 nt, Human
cuacuaaaaauacaaaaauuagccuggugugg

SEQ ID NO: 392891 - RNA, 32 nt, Human
cuacuaaaaauacaaaaauuagcggccgggug

SEQ ID NO: 392892 - RNA, 32 nt, Human
cuacuaaaaauacaaaaauuagcggggcggcg

SEQ ID NO: 392893 - RNA, 32 nt, Human
cuacuaaaaauacaaaaauuagcuaggcauga

SEQ ID NO: 392894 - RNA, 32 nt, Human
cuacuaaaaauacaaaaauuagcuaggcaugg

SEQ ID NO: 392895 - RNA, 32 nt, Human
cuacuaaaaauacaaaaauuagcuaggccugg

SEQ ID NO: 392896 - RNA, 32 nt, Human
cuacuaaaaauacaaaaauuagcuaggcgggg

SEQ ID NO: 392897 - RNA, 32 nt, Human
cuacuaaaaauacaaaaauuagcuaggcgugg

SEQ ID NO: 392898 - RNA, 32 nt, Human
cuacuaaaaauacaaaaauuagcuagguaugg

SEQ ID NO: 392899 - RNA, 27 nt, Human
cuacuaaaaauacaaaaauuagcuggg

SEQ ID NO: 392900 - RNA, 32 nt, Human
cuacuaaaaauacaaaaauuagcugggcacgg

SEQ ID NO: 392901 - RNA, 32 nt, Human
cuacuaaaaauacaaaaauuagcugggcauga

SEQ ID NO: 392902 - RNA, 32 nt, Human
cuacuaaaaauacaaaaauuagcugggcaugg

SEQ ID NO: 392903 - RNA, 32 nt, Human
cuacuaaaaauacaaaaauuagcugggcgcag

SEQ ID NO: 392904 - RNA, 32 nt, Human
cuacuaaaaauacaaaaauuagcugggcgcgg

SEQ ID NO: 392905 - RNA, 32 nt, Human
cuacuaaaaauacaaaaauuagcugggcgggg

SEQ ID NO: 392906 - RNA, 32 nt, Human
cuacuaaaaauacaaaaauuagcugggcguga

SEQ ID NO: 392907 - RNA, 32 nt, Human
cuacuaaaaauacaaaaauuagcugggcgugc

SEQ ID NO: 392908 - RNA, 32 nt, Human
cuacuaaaaauacaaaaauuagcugggcgugg

SEQ ID NO: 392909 - RNA, 32 nt, Human
cuacuaaaaauacaaaaauuagcugggcgugu

SEQ ID NO: 392910 - RNA, 32 nt, Human
cuacuaaaaauacaaaaauuagcugggcguua

SEQ ID NO: 392911 - RNA, 32 nt, Human
cuacuaaaaauacaaaaauuagcuggggcgag

SEQ ID NO: 392912 - RNA, 32 nt, Human
cuacuaaaaauacaaaaauuagcugggggugg

SEQ ID NO: 392913 - RNA, 32 nt, Human
cuacuaaaaauacaaaaauuagcugggugcgg

SEQ ID NO: 392914 - RNA, 32 nt, Human
cuacuaaaaauacaaaaauuagcuggguguag

SEQ ID NO: 392915 - RNA, 32 nt, Human
cuacuaaaaauacaaaaauuagcuggguguau

SEQ ID NO: 392916 - RNA, 32 nt, Human
cuacuaaaaauacaaaaauuagcuggguguga

SEQ ID NO: 392917 - RNA, 32 nt, Human
cuacuaaaaauacaaaaauuagcugggugugg

SEQ ID NO: 392918 - RNA, 32 nt, Human
cuacuaaaaauacaaaaauuagcugggugugu

SEQ ID NO: 392919 - RNA, 32 nt, Human
cuacuaaaaauacaaaaauuagcuuggugugg

SEQ ID NO: 392920 - RNA, 32 nt, Human
cuacuaaaaauacaaaaauuaggcaugguggu

SEQ ID NO: 392921 - RNA, 32 nt, Human
cuacuaaaaauacaaaaauuaggccaggugcg

SEQ ID NO: 392922 - RNA, 32 nt, Human
cuacuaaaaauacaaaaauuaggccgggcgca

SEQ ID NO: 392923 - RNA, 32 nt, Human
cuacuaaaaauacaaaaauuaggccggguaca

SEQ ID NO: 392924 - RNA, 32 nt, Human
cuacuaaaaauacaaaaauuagggccgggcgc

SEQ ID NO: 392925 - RNA, 32 nt, Human
cuacuaaaaauacaaaaauuaggugggucugg

SEQ ID NO: 392926 - RNA, 32 nt, Human
cuacuaaaaauacaaaaauuagucaggcaugg

SEQ ID NO: 392927 - RNA, 32 nt, Human
cuacuaaaaauacaaaaauuagucaggcgcgg

SEQ ID NO: 392928 - RNA, 32 nt, Human
cuacuaaaaauacaaaaauuagucaggcgugg

SEQ ID NO: 392929 - RNA, 32 nt, Human
cuacuaaaaauacaaaaauuagucaggugugg

SEQ ID NO: 392930 - RNA, 32 nt, Human
cuacuaaaaauacaaaaauuagucgggcgugc

SEQ ID NO: 392931 - RNA, 32 nt, Human
cuacuaaaaauacaaaaauuagucgggcgugg

SEQ ID NO: 392932 - RNA, 32 nt, Human
cuacuaaaaauacaaaaauuaguucggcaugg

SEQ ID NO: 392933 - RNA, 32 nt, Human
cuacuaaaaauacaaaaauuaguugggcaugg

SEQ ID NO: 392934 - RNA, 32 nt, Human
cuacuaaaaauacaaaaauuauccaggcgugg

SEQ ID NO: 392935 - RNA, 32 nt, Human
cuacuaaaaauacaaaaauuauccgggcaugg

SEQ ID NO: 392936 - RNA, 32 nt, Human
cuacuaaaaauacaaaaauuaucggggugcaa

SEQ ID NO: 392937 - RNA, 32 nt, Human
cuacuaaaaauacaaaaauucaccaggcaugg

SEQ ID NO: 392938 - RNA, 32 nt, Human
cuacuaaaaauacaaaaauugcccaggcaugg

SEQ ID NO: 392939 - RNA, 32 nt, Human
cuacuaaaaauacaaaaauuggccgggugugg

SEQ ID NO: 392940 - RNA, 32 nt, Human
cuacuaaaaauacaaaaauuggcugggcaugg

SEQ ID NO: 392941 - RNA, 32 nt, Human
cuacuaaaaauacaaaaauuggcugggugugg

SEQ ID NO: 392942 - RNA, 32 nt, Human
cuacuaaaaauacaaaaauuggucgggcaugg

SEQ ID NO: 392943 - RNA, 32 nt, Human
cuacuaaaaauacaaaaauuguccgggugugg

SEQ ID NO: 392944 - RNA, 32 nt, Human
cuacuaaaaauacaaaaauuuagccaggcaug

SEQ ID NO: 392945 - RNA, 32 nt, Human
cuacuaaaaauacaaaaauuugccaggcgugg

SEQ ID NO: 392946 - RNA, 32 nt, Human
cuacuaaaaauacaaaaauuugccgggugugg

SEQ ID NO: 392947 - RNA, 32 nt, Human
cuacuaaaaauacaaaaauuugcugggcaugg

SEQ ID NO: 392948 - RNA, 32 nt, Human
cuacuaaaaauacaaaaauuugcugggcuugg

SEQ ID NO: 392949 - RNA, 32 nt, Human
cuacuaaaaauacaaaacaauuagccgggcgu

SEQ ID NO: 392950 - RNA, 32 nt, Human
cuacuaaaaauacaaaacauuagccgggcgug

SEQ ID NO: 392951 - RNA, 32 nt, Human
cuacuaaaaauacaaaacuagccaggaauggu

SEQ ID NO: 392952 - RNA, 32 nt, Human
cuacuaaaaauacaaaacuagccaggcgcggu

SEQ ID NO: 392953 - RNA, 32 nt, Human
cuacuaaaaauacaaaacuagccggguauggu

SEQ ID NO: 392954 - RNA, 32 nt, Human
cuacuaaaaauacaaaacuuagccaggcaugg

SEQ ID NO: 392955 - RNA, 32 nt, Human
cuacuaaaaauacaaaacuuagccaggugugg

SEQ ID NO: 392956 - RNA, 32 nt, Human
cuacuaaaaauacaaaagaaaauuagccgggu

SEQ ID NO: 392957 - RNA, 32 nt, Human
cuacuaaaaauacaaaaguagccgggcguggu

SEQ ID NO: 392958 - RNA, 32 nt, Human
cuacuaaaaauacaaaaguuagcagggcgugg

SEQ ID NO: 392959 - RNA, 32 nt, Human
cuacuaaaaauacaaaaguuagccgggugugg

SEQ ID NO: 392960 - RNA, 32 nt, Human
cuacuaaaaauacaaaaguuagcuggggcugg

SEQ ID NO: 392961 - RNA, 32 nt, Human
cuacuaaaaauacaaaaguuagcugggugugg

SEQ ID NO: 392962 - RNA, 32 nt, Human
cuacuaaaaauacaaaauauuagcugggcgug

SEQ ID NO: 392963 - RNA, 32 nt, Human
cuacuaaaaauacaaaaucagccaggcguggu

SEQ ID NO: 392964 - RNA, 32 nt, Human
cuacuaaaaauacaaaauuagcagggcauggu

SEQ ID NO: 392965 - RNA, 32 nt, Human
cuacuaaaaauacaaaauuagccaggcaugau

SEQ ID NO: 392966 - RNA, 32 nt, Human
cuacuaaaaauacaaaauuagccaggcauggu

SEQ ID NO: 392967 - RNA, 32 nt, Human
cuacuaaaaauacaaaauuagccaggcguagu

SEQ ID NO: 392968 - RNA, 32 nt, Human
cuacuaaaaauacaaaauuagccaggcgugau

SEQ ID NO: 392969 - RNA, 32 nt, Human
cuacuaaaaauacaaaauuagccaggcguggu

SEQ ID NO: 392970 - RNA, 32 nt, Human
cuacuaaaaauacaaaauuagccagguauggu

SEQ ID NO: 392971 - RNA, 32 nt, Human
cuacuaaaaauacaaaauuagccagguguggu

SEQ ID NO: 392972 - RNA, 32 nt, Human
cuacuaaaaauacaaaauuagccgggcaugau

SEQ ID NO: 392973 - RNA, 32 nt, Human
cuacuaaaaauacaaaauuagccgggcauggg

SEQ ID NO: 392974 - RNA, 32 nt, Human
cuacuaaaaauacaaaauuagccgggcauggu

SEQ ID NO: 392975 - RNA, 32 nt, Human
cuacuaaaaauacaaaauuagccgggcguggu

SEQ ID NO: 392976 - RNA, 32 nt, Human
cuacuaaaaauacaaaauuagccggguggugu

SEQ ID NO: 392977 - RNA, 32 nt, Human
cuacuaaaaauacaaaauuagccggguguggu

SEQ ID NO: 392978 - RNA, 32 nt, Human
cuacuaaaaauacaaaauuagcugggcauggu

SEQ ID NO: 392979 - RNA, 32 nt, Human
cuacuaaaaauacaaaauuagcugggcguggu

SEQ ID NO: 392980 - RNA, 32 nt, Human
cuacuaaaaauacaaaauuagcuggguggggu

SEQ ID NO: 392981 - RNA, 32 nt, Human
cuacuaaaaauacaaaauuagcugggugugcu

SEQ ID NO: 392982 - RNA, 32 nt, Human
cuacuaaaaauacaaaauuagcuggguguggu

SEQ ID NO: 392983 - RNA, 32 nt, Human
cuacuaaaaauacaaaauuagucaggcauugu

SEQ ID NO: 392984 - RNA, 32 nt, Human
cuacuaaaaauacaaaauuagucgggcguagu

SEQ ID NO: 392985 - RNA, 32 nt, Human
cuacuaaaaauacaaaauuagucggguauggu

SEQ ID NO: 392986 - RNA, 32 nt, Human
cuacuaaaaauacaaaauucagccagguaugg

SEQ ID NO: 392987 - RNA, 32 nt, Human
cuacuaaaaauacaaaauuggcaggguguggu

SEQ ID NO: 392988 - RNA, 32 nt, Human
cuacuaaaaauacaaaauuggccgggcauguu

SEQ ID NO: 392989 - RNA, 32 nt, Human
cuacuaaaaauacaaaauuuagccaggcaugg

SEQ ID NO: 392990 - RNA, 32 nt, Human
cuacuaaaaauacaaacaaaauuagcugggca

SEQ ID NO: 392991 - RNA, 32 nt, Human
cuacuaaaaauacaaacaaauuagccgggcgu

SEQ ID NO: 392992 - RNA, 32 nt, Human
cuacuaaaaauacaaacauuagccaggugugg

SEQ ID NO: 392993 - RNA, 32 nt, Human
cuacuaaaaauacaaacauuagcccggcgugg

SEQ ID NO: 392994 - RNA, 32 nt, Human
cuacuaaaaauacaaacguuagccgggcgugg

SEQ ID NO: 392995 - RNA, 32 nt, Human
cuacuaaaaauacaaaguuaaccggguguggu

SEQ ID NO: 392996 - RNA, 32 nt, Human
cuacuaaaaauacaaaguuagccaggcauagu

SEQ ID NO: 392997 - RNA, 32 nt, Human
cuacuaaaaauacaaaguuagccaggcauggu

SEQ ID NO: 392998 - RNA, 32 nt, Human
cuacuaaaaauacaaauauauuagccgggcgu

SEQ ID NO: 392999 - RNA, 32 nt, Human
cuacuaaaaauacaaauauuagccgggcaugg

SEQ ID NO: 393000 - RNA, 32 nt, Human
cuacuaaaaauacaaauuuagccgggcguggu

SEQ ID NO: 393001 - RNA, 32 nt, Human
cuacuaaaaauacaacaaaguuagccgggcgu

SEQ ID NO: 393002 - RNA, 32 nt, Human
cuacuaaaaauacaagaauuagccaggugugg

SEQ ID NO: 393003 - RNA, 32 nt, Human
cuacuaaaaauacaagaauuagcugggcgugg

SEQ ID NO: 393004 - RNA, 32 nt, Human
cuacuaaaaauacaagaauuagcugggugugg

SEQ ID NO: 393005 - RNA, 32 nt, Human
cuacuaaaaauacaaggauuagcugggcaugg

SEQ ID NO: 393006 - RNA, 32 nt, Human
cuacuaaaaauacaauaaauuagcugggcaug

SEQ ID NO: 393007 - RNA, 32 nt, Human
cuacuaaaaauacaauaauuagccaggcaugg

SEQ ID NO: 393008 - RNA, 32 nt, Human
cuacuaaaaauacaauaauuagcugggcgugg

SEQ ID NO: 393009 - RNA, 32 nt, Human
cuacuaaaaauacaauauuagccgggcguggu

SEQ ID NO: 393010 - RNA, 32 nt, Human
cuacuaaaaauacaauuagccagguguggcgg

SEQ ID NO: 393011 - RNA, 32 nt, Human
cuacuaaaaauacacaaauuagcuaggcaugg

SEQ ID NO: 393012 - RNA, 32 nt, Human
cuacuaaaaauacagaaaauuagcugggcgca

SEQ ID NO: 393013 - RNA, 32 nt, Human
cuacuaaaaauacagaaauuagccgggcaugg

SEQ ID NO: 393014 - RNA, 32 nt, Human
cuacuaaaaauacagaaauuagccgggcgugg

SEQ ID NO: 393015 - RNA, 32 nt, Human
cuacuaaaaauacagaaauuagccggucaugg

SEQ ID NO: 393016 - RNA, 32 nt, Human
cuacuaaaaauacagaaauuagcugggugugg

SEQ ID NO: 393017 - RNA, 32 nt, Human
cuacuaaaaauaccaaaauuagccaggcguga

SEQ ID NO: 393018 - RNA, 32 nt, Human
cuacuaaaaauaccaaaauuagccaggugugu

SEQ ID NO: 393019 - RNA, 32 nt, Human
cuacuaaaaauaccaaaauuagccgggcaugg

SEQ ID NO: 393020 - RNA, 32 nt, Human
cuacuaaaaauaccaaaauuagcugggcaugg

SEQ ID NO: 393021 - RNA, 32 nt, Human
cuacuaaaaauacgaaaauuagccuggcgugg

SEQ ID NO: 393022 - RNA, 32 nt, Human
cuacuaaaaauacgaaaauuagcuggguguga

SEQ ID NO: 393023 - RNA, 32 nt, Human
cuacuaaaaauagaaaaauuagccaggcacgu

SEQ ID NO: 393024 - RNA, 32 nt, Human
cuacuaaaaauagaaaaauuagccagguguag

SEQ ID NO: 393025 - RNA, 32 nt, Human
cuacuaaaaauagaaaaauuagcuaggcaugg

SEQ ID NO: 393026 - RNA, 32 nt, Human
cuacuaaaaauagaaaaauuagcugggcaugg

SEQ ID NO: 393027 - RNA, 32 nt, Human
cuacuaaaaauagaaaccuuagccaggcgugg

SEQ ID NO: 393028 - RNA, 32 nt, Human
cuacuaaaaauagagaaaauuagccaggcaua

SEQ ID NO: 393029 - RNA, 32 nt, Human
cuacuaaaaauauaaaaaguagccaggcgugg

SEQ ID NO: 393030 - RNA, 32 nt, Human
cuacuaaaaauauaaaaauuagcagggcaugg

SEQ ID NO: 393031 - RNA, 32 nt, Human
cuacuaaaaauauaaaaauuagccaggcauga

SEQ ID NO: 393032 - RNA, 32 nt, Human
cuacuaaaaauauaaaaauuagccaggcgugg

SEQ ID NO: 393033 - RNA, 32 nt, Human
cuacuaaaaauauaaaaauuagccgggcaugg

SEQ ID NO: 393034 - RNA, 32 nt, Human
cuacuaaaaauauaaaaauuagccgggcguga

SEQ ID NO: 393035 - RNA, 32 nt, Human
cuacuaaaaauauaaaaauuagcugggugugg

SEQ ID NO: 393036 - RNA, 32 nt, Human
cuacuaaaaauauaaaaauuaggccaggcaca

SEQ ID NO: 393037 - RNA, 32 nt, Human
cuacuaaaaauauaaaaauuagucgggcauga

SEQ ID NO: 393038 - RNA, 32 nt, Human
cuacuaaaaauauaaaaauuagugaggcaugg

SEQ ID NO: 393039 - RNA, 32 nt, Human
cuacuaaaaauauaagaaauuagccggacaug

SEQ ID NO: 393040 - RNA, 32 nt, Human
cuacuaaaaaugcaaaaaguuagccaggcaug

SEQ ID NO: 393041 - RNA, 32 nt, Human
cuacuaaaaaugcaaaaauuaacagggcacgg

SEQ ID NO: 393042 - RNA, 32 nt, Human
cuacuaaaaaugcaaaaauuaccgggacgugu

SEQ ID NO: 393043 - RNA, 32 nt, Human
cuacuaaaaaugcaaaaauuagccaggcguag

SEQ ID NO: 393044 - RNA, 32 nt, Human
cuacuaaaaaugcaaaaauuagccgggcgugg

SEQ ID NO: 393045 - RNA, 32 nt, Human
cuacuaaaaaugcaaaaauuagcugggugugg

SEQ ID NO: 393046 - RNA, 32 nt, Human
cuacuaaaaaugcaaaaauuaguccggcgugg

SEQ ID NO: 393047 - RNA, 32 nt, Human
cuacuaaaacauacaaaaauuagccgggcaug

SEQ ID NO: 393048 - RNA, 32 nt, Human
cuacuaaaaguacaaaaauuagccaggcggua

SEQ ID NO: 393049 - RNA, 32 nt, Human
cuacuaaaaguacaaaaauuagccaggcguga

SEQ ID NO: 393050 - RNA, 32 nt, Human
cuacuaaaaguacaaaaauuagccagguggua

SEQ ID NO: 393051 - RNA, 32 nt, Human
cuacuaaaaguacaaaaauuagccgggcgugg

SEQ ID NO: 393052 - RNA, 32 nt, Human
cuacuaaaaguacaaaaauuagcugggcauga

SEQ ID NO: 393053 - RNA, 32 nt, Human
cuacuaaaaguacaaaaauuagucagguaugg

SEQ ID NO: 393054 - RNA, 32 nt, Human
cuacuaaaaguacagaaauuagcuggguguga

SEQ ID NO: 393055 - RNA, 32 nt, Human
cuacuaaaauauacaaaaauuagccaggugug

SEQ ID NO: 393056 - RNA, 32 nt, Human
cuacuaaacauacaaaaauuagcuaggcgugg

SEQ ID NO: 393057 - RNA, 32 nt, Human
cuacuaaagauacaaaaagauuagcugggcau

SEQ ID NO: 393058 - RNA, 32 nt, Human
cuacuaaagauacaaaaauuagccgggcaugg

SEQ ID NO: 393059 - RNA, 32 nt, Human
cuacuaaagauacaaaaauuagcugggugugg

SEQ ID NO: 393060 - RNA, 32 nt, Human
cuacuaaagauauaaaaauuagccgggcgugg

SEQ ID NO: 393061 - RNA, 32 nt, Human
cuacuaaagcagcuugagugcuguaaggagag

SEQ ID NO: 393062 - RNA, 32 nt, Human
cuacuaaagugcugggauuacaggcgugagcu

SEQ ID NO: 393063 - RNA, 32 nt, Human
cuacuaaauacuguaggcaguuguaaaaggau

SEQ ID NO: 393064 - RNA, 32 nt, Human
cuacuaaauauacaaaauuagccgggcguggu

SEQ ID NO: 393065 - RNA, 24 nt, Human
cuacuaaaucaugaacagcuuuaa

SEQ ID NO: 393066 - RNA, 32 nt, Human
cuacuaagaaaaucucucuugauucugcacag

SEQ ID NO: 393067 - RNA, 32 nt, Human
cuacuaagaacucuuucuuaaaugugguuugu

SEQ ID NO: 393068 - RNA, 32 nt, Human
cuacuaagaauacaaaaauuagccaggagugg

SEQ ID NO: 393069 - RNA, 32 nt, Human
cuacuaagaauacaaaaauuagccgggugugg

SEQ ID NO: 393070 - RNA, 32 nt, Human
cuacuaagaauacaaaauuagcugggcauggu

SEQ ID NO: 393071 - RNA, 32 nt, Human
cuacuaagaauauaaaaauuagcuggguaugg

SEQ ID NO: 393072 - RNA, 25 nt, Human
cuacuaagagaaggggugcagagug

SEQ ID NO: 393073 - RNA, 32 nt, Human
cuacuaaggaggcggcccugcgcgggcugucc

SEQ ID NO: 393074 - RNA, 32 nt, Human
cuacuaaggauacaaaaauuggccgggugcgg

SEQ ID NO: 393075 - RNA, 32 nt, Human
cuacuaaggauacaaaauuagccgggcauggu

SEQ ID NO: 393076 - RNA, 32 nt, Human
cuacuaauaauacaaaaauuagccaggugugg

SEQ ID NO: 393077 - RNA, 32 nt, Human
cuacuaauaauacaaaaauuagcugggcaugg

SEQ ID NO: 393078 - RNA, 32 nt, Human
cuacuaauaauacaacaauuagccaggcgugg

SEQ ID NO: 393079 - RNA, 32 nt, Human
cuacuaaucuacaugauuauauaguaaggaaa

SEQ ID NO: 393080 - RNA, 32 nt, Human
cuacuaauuucaguacuaagguggugaugcca

SEQ ID NO: 393081 - RNA, 32 nt, Human
cuacuacaaauacaaaaauuagccaggcgugg

SEQ ID NO: 393082 - RNA, 32 nt, Human
cuacuacaaauacaaaaauuagccgggugugg

SEQ ID NO: 393083 - RNA, 32 nt, Human
cuacuacaaauacaaaaauuagcuggacgugg

SEQ ID NO: 393084 - RNA, 32 nt, Human
cuacuacaaauacaaaaauuagcugggugugg

SEQ ID NO: 393085 - RNA, 32 nt, Human
cuacuacaaauacgaaaauuagcugggcgugg

SEQ ID NO: 393086 - RNA, 32 nt, Human
cuacuacaagcauuaccuaacauggugaucug

SEQ ID NO: 393087 - RNA, 22 nt, Human
cuacuacacuguggaugaaccu

SEQ ID NO: 393088 - RNA, 31 nt, Human
cuacuacaguuucacagaauaccugagaaga

SEQ ID NO: 393089 - RNA, 32 nt, Human
cuacuacccagaggagagcacauggcuguucu

SEQ ID NO: 393090 - RNA, 32 nt, Human
cuacuaccugcggcucugccucaagcgguuca

SEQ ID NO: 393091 - RNA, 32 nt, Human
cuacuaccugcuggagaaaggcgcagaccuca

SEQ ID NO: 393092 - RNA, 32 nt, Human
cuacuacgcagcuucagcgccagugugaauuu

SEQ ID NO: 393093 - RNA, 32 nt, Human
cuacuacgucacuaccuggaagcaauugccuu

SEQ ID NO: 393094 - RNA, 32 nt, Human
cuacuacuaaugucacaaugcguguacaccuu

SEQ ID NO: 393095 - RNA, 32 nt, Human
cuacuacucagcccucuccugcggccacauca

SEQ ID NO: 393096 - RNA, 31 nt, Human
cuacuagaaaaaggaacuggcaugcacacgu

SEQ ID NO: 393097 - RNA, 32 nt, Human
cuacuagaaauacaaaaauuagccaggugugg

SEQ ID NO: 393098 - RNA, 32 nt, Human
cuacuagaaauacaaaacaauuagcugggugu

SEQ ID NO: 393099 - RNA, 32 nt, Human
cuacuagaaauacagaaaaauuagcugggugu

SEQ ID NO: 393100 - RNA, 32 nt, Human
cuacuagagacaccccuaagccaugaugaacu

SEQ ID NO: 393101 - RNA, 32 nt, Human
cuacuagauaaauggccuucaggcagugcucc

SEQ ID NO: 393102 - RNA, 32 nt, Human
cuacuagcaaaugacccuaccauuuauuucug

SEQ ID NO: 393103 - RNA, 32 nt, Human
cuacuagcagcaccagccuuguuuuaaauguu

SEQ ID NO: 393104 - RNA, 32 nt, Human
cuacuagcugcacccgauuccucccagugcuu

SEQ ID NO: 393105 - RNA, 32 nt, Human
cuacuaggaagagagugggcugcagaugaauc

SEQ ID NO: 393106 - RNA, 32 nt, Human
cuacuaggaaggcugaggcaggagaaucgcuu

SEQ ID NO: 393107 - RNA, 32 nt, Human
cuacuaggccuacaccucuccccacgcagagg

SEQ ID NO: 393108 - RNA, 32 nt, Human
cuacuagggacgcugaggcaggagaaucgcuu

SEQ ID NO: 393109 - RNA, 32 nt, Human
cuacuagggagacugaggcaggagaauugcuu

SEQ ID NO: 393110 - RNA, 32 nt, Human
cuacuagggaggaugaggcaggagaauugcuu

SEQ ID NO: 393111 - RNA, 32 nt, Human
cuacuagggaggcugagccaggaagaacgcuc

SEQ ID NO: 393112 - RNA, 32 nt, Human
cuacuagggaggcugagccaggaggaucacuu

SEQ ID NO: 393113 - RNA, 32 nt, Human
cuacuagggaggcugaggcaggagaaucacuu

SEQ ID NO: 393114 - RNA, 32 nt, Human
cuacuagggaggcugaggcaggagaaucgcuu

SEQ ID NO: 393115 - RNA, 32 nt, Human
cuacuagggaggcugaggcaggagaaucucuu

SEQ ID NO: 393116 - RNA, 32 nt, Human
cuacuagggaggcugaggcaggagaauggcca

SEQ ID NO: 393117 - RNA, 32 nt, Human
cuacuagggaggcugaggcaggagaauggcgu

SEQ ID NO: 393118 - RNA, 32 nt, Human
cuacuagggaggcugaggcaggagaauggugu

SEQ ID NO: 393119 - RNA, 32 nt, Human
cuacuagggaggcugaggcaggagaauugcuu

SEQ ID NO: 393120 - RNA, 32 nt, Human
cuacuagggaggcugcggcaggagaauugcuu

SEQ ID NO: 393121 - RNA, 32 nt, Human
cuacuagggcuuacacaucugcuuccaagcuc

SEQ ID NO: 393122 - RNA, 32 nt, Human
cuacuauaaauacaaaaauuagccaggcucgu

SEQ ID NO: 393123 - RNA, 32 nt, Human
cuacuauaugucaagugcugugcaagguauua

SEQ ID NO: 393124 - RNA, 32 nt, Human
cuacuaucccagacaguuaguaccagauacuu

SEQ ID NO: 393125 - RNA, 30 nt, Human
cuacuaugcgaagaaaaguggaacaggagg

SEQ ID NO: 393126 - RNA, 32 nt, Human
cuacuauggcuuaagacccagggccagggucc

SEQ ID NO: 393127 - RNA, 32 nt, Human
cuacuaugugcagugcaguuacuccaaucuua

SEQ ID NO: 393128 - RNA, 32 nt, Human
cuacuaugugccaggcacuguguaggugcuga

SEQ ID NO: 393129 - RNA, 32 nt, Human
cuacuaugugccaggccaauugcugaguccgc

SEQ ID NO: 393130 - RNA, 32 nt, Human
cuacucaaccucucugugccucggguccuccu

SEQ ID NO: 393131 - RNA, 32 nt, Human
cuacucacagauaggaauugaagccaccacaa

SEQ ID NO: 393132 - RNA, 32 nt, Human
cuacucacagcugaagaaaaugagcacacccu

SEQ ID NO: 393133 - RNA, 32 nt, Human
cuacucacccgcuauuagaguauggaggaagg

SEQ ID NO: 393134 - RNA, 32 nt, Human
cuacucacccuuugaaagcugugugacugccu

SEQ ID NO: 393135 - RNA, 32 nt, Human
cuacucacugcaaccuccaccucccggguuca

SEQ ID NO: 393136 - RNA, 32 nt, Human
cuacucacuuucuccuagccagccuggacuuu

SEQ ID NO: 393137 - RNA, 32 nt, Human
cuacucagaacuggggaaggaguggaacuuau

SEQ ID NO: 393138 - RNA, 32 nt, Human
cuacucagagucaggcacucacaguagacaga

SEQ ID NO: 393139 - RNA, 32 nt, Human
cuacucagauggcugaggcaggagaacuacuu

SEQ ID NO: 393140 - RNA, 32 nt, Human
cuacucagcaaugccuuccuggaccacaaccc

SEQ ID NO: 393141 - RNA, 32 nt, Human
cuacucagccuccuguagugucgagaauauag

SEQ ID NO: 393142 - RNA, 32 nt, Human
cuacucagccuucaauguaccuguguguccau

SEQ ID NO: 393143 - RNA, 32 nt, Human
cuacucaggaagcugaggcaggagaaucacuu

SEQ ID NO: 393144 - RNA, 32 nt, Human
cuacucaggagacugaggcaggagaaucgcuu

SEQ ID NO: 393145 - RNA, 32 nt, Human
cuacucaggagccugaggcaggagaauugcuu

SEQ ID NO: 393146 - RNA, 32 nt, Human
cuacucaggaggaugaggcaggagaaucacuu

SEQ ID NO: 393147 - RNA, 32 nt, Human
cuacucaggaggccgaggcaagagaaucgcuu

SEQ ID NO: 393148 - RNA, 32 nt, Human
cuacucaggaggccgaggcaggagaaugguuu

SEQ ID NO: 393149 - RNA, 32 nt, Human
cuacucaggaggccgaggcaggagaauugcug

SEQ ID NO: 393150 - RNA, 32 nt, Human
cuacucaggaggccgaggcaggagaauugcuu

SEQ ID NO: 393151 - RNA, 32 nt, Human
cuacucaggaggccgaggcgggaggaucccca

SEQ ID NO: 393152 - RNA, 32 nt, Human
cuacucaggaggcuaaggcaggagaaucacuu

SEQ ID NO: 393153 - RNA, 32 nt, Human
cuacucaggaggcuaaggcaggagaaucgcuu

SEQ ID NO: 393154 - RNA, 32 nt, Human
cuacucaggaggcugaaacaggagaaucacuu

SEQ ID NO: 393155 - RNA, 32 nt, Human
cuacucaggaggcugaagcaggagaaucacuu

SEQ ID NO: 393156 - RNA, 32 nt, Human
cuacucaggaggcugaagcaggagaaucgcug

SEQ ID NO: 393157 - RNA, 32 nt, Human
cuacucaggaggcugaagcaggagaaucgcuu

SEQ ID NO: 393158 - RNA, 32 nt, Human
cuacucaggaggcugagacaggagaaucaccu

SEQ ID NO: 393159 - RNA, 32 nt, Human
cuacucaggaggcugagacaggagaaucacuu

SEQ ID NO: 393160 - RNA, 32 nt, Human
cuacucaggaggcugagacaggagaaucgcuu

SEQ ID NO: 393161 - RNA, 32 nt, Human
cuacucaggaggcugaggcaggagaacugcuu

SEQ ID NO: 393162 - RNA, 32 nt, Human
cuacucaggaggcugaggcaggagaaucaauu

SEQ ID NO: 393163 - RNA, 32 nt, Human
cucaaaaggaugagcaagucuguuccagcauu

SEQ ID NO: 393164 - RNA, 32 nt, Human
cucaaaagugaguuugcuuaaugaagacauuu

SEQ ID NO: 393165 - RNA, 32 nt, Human
cucaaaauaaaauaaaauaggccaggcguggu

SEQ ID NO: 393166 - RNA, 32 nt, Human
cucaaaauaccuguaaucccagcacuuuggga

SEQ ID NO: 393167 - RNA, 32 nt, Human
cucaaaauacuguaaucucagcauuuugggag

SEQ ID NO: 393168 - RNA, 32 nt, Human
cucaaaaucaaagaaagguucagcaaggcugu

SEQ ID NO: 393169 - RNA, 23 nt, Human
cucaaaaucaacuaucagugaug

SEQ ID NO: 393170 - RNA, 32 nt, Human
cucaaaaucuggaacugggaggcuggagaaag

SEQ ID NO: 393171 - RNA, 32 nt, Human
cucaaaaugagauacugacaccaccuuugccc

SEQ ID NO: 393172 - RNA, 32 nt, Human
cucaaacaccccagaagaauucuagcagugau

SEQ ID NO: 393173 - RNA, 32 nt, Human
cucaaacaucagcccugaguucuugaguccac

SEQ ID NO: 393174 - RNA, 32 nt, Human
cucaaacaugaauggagagagacagagaggaa

SEQ ID NO: 393175 - RNA, 32 nt, Human
cucaaaccagagacuauuucaagcccuggaua

SEQ ID NO: 393176 - RNA, 32 nt, Human
cucaaacccagcucuguggaucauguuccuaa

SEQ ID NO: 393177 - RNA, 32 nt, Human
cucaaaccccuccaccaucccacacccuccuc

SEQ ID NO: 393178 - RNA, 32 nt, Human
cucaaacccgggaggcagagguugcagugacc

SEQ ID NO: 393179 - RNA, 32 nt, Human
cucaaacccgggaggcggagauugcagugagc

SEQ ID NO: 393180 - RNA, 23 nt, Human
cucaaacccucagggaccuggua

SEQ ID NO: 393181 - RNA, 32 nt, Human
cucaaaccuacuucuuauuuacuccaaagccu

SEQ ID NO: 393182 - RNA, 32 nt, Human
cucaaaccuauaaucccagcacuuugggaggc

SEQ ID NO: 393183 - RNA, 32 nt, Human
cucaaaccucucccaucucccaacaacugcac

SEQ ID NO: 393184 - RNA, 16 nt, Human
cucaaaccugaaucca

SEQ ID NO: 393185 - RNA, 17 nt, Human
cucaaaccuggauucca

SEQ ID NO: 393186 - RNA, 32 nt, Human
cucaaaccugggaggcgaagauugcagugagc

SEQ ID NO: 393187 - RNA, 32 nt, Human
cucaaaccugggaguuugaagcugcagugagc

SEQ ID NO: 393188 - RNA, 32 nt, Human
cucaaaccuguaaucccagcacuuugggagac

SEQ ID NO: 393189 - RNA, 32 nt, Human
cucaaaccuguaaucccagcacuuugggaggc

SEQ ID NO: 393190 - RNA, 32 nt, Human
cucaaacgcggagggcugcgugcagugggagc

SEQ ID NO: 393191 - RNA, 32 nt, Human
cucaaacucccagccucaagcgaugcucccac

SEQ ID NO: 393192 - RNA, 32 nt, Human
cucaaacucccaggcucaagggauccuccugc

SEQ ID NO: 393193 - RNA, 32 nt, Human
cucaaacuccuaggcucaggugauccuccugc

SEQ ID NO: 393194 - RNA, 21 nt, Human
cucaaacuccugaccuuguga

SEQ ID NO: 393195 - RNA, 32 nt, Human
cucaaacugcaaaugacuauucaagagcuuuu

SEQ ID NO: 393196 - RNA, 20 nt, Human
cucaaacuggggacuguucc

SEQ ID NO: 393197 - RNA, 32 nt, Human
cucaaacuguaugccugcuccagccuggacug

SEQ ID NO: 393198 - RNA, 32 nt, Human
cucaaagaaagaaagaaagaaaagaaagaaag

SEQ ID NO: 393199 - RNA, 32 nt, Human
cucaaagaaagccggacccaagagcagccccc

SEQ ID NO: 393200 - RNA, 32 nt, Human
cucaaagaaauggcacaaccauguucuucggc

SEQ ID NO: 393201 - RNA, 32 nt, Human
cucaaagaacuccaugaaaucaggaacugcuu

SEQ ID NO: 393202 - RNA, 24 nt, Human
cucaaagacacugguuaucagagg

SEQ ID NO: 393203 - RNA, 32 nt, Human
cucaaagacuguggccucuucugggugccuga

SEQ ID NO: 393204 - RNA, 32 nt, Human
cucaaagagaucuggguacaugccaguugaac

SEQ ID NO: 393205 - RNA, 32 nt, Human
cucaaagaguuggguuucugcguccaugugaa

SEQ ID NO: 393206 - RNA, 22 nt, Human
cucaaagauuugaaguguccca

SEQ ID NO: 393207 - RNA, 32 nt, Human
cucaaagcaagcucuucuccucagcuuggggc

SEQ ID NO: 393208 - RNA, 21 nt, Human
cucaaagcaggauuucaggca

SEQ ID NO: 393209 - RNA, 32 nt, Human
cucaaagccaagcagaggccggcaguggaggc

SEQ ID NO: 393210 - RNA, 32 nt, Human
cucaaagccaccucccccucuggagaccucac

SEQ ID NO: 393211 - RNA, 32 nt, Human
cucaaagccauuuccacucagcucuuuccaga

SEQ ID NO: 393212 - RNA, 32 nt, Human
cucaaagcccccacuucucuccaggcuguuuc

SEQ ID NO: 393213 - RNA, 32 nt, Human
cucaaagcgugcauuaucacagccugagggga

SEQ ID NO: 393214 - RNA, 32 nt, Human
cucaaagcuuaaagauuuacgcuaucgcagcu

SEQ ID NO: 393215 - RNA, 32 nt, Human
cucaaagcuuaucagcgcagagcccauaauuu

SEQ ID NO: 393216 - RNA, 32 nt, Human
cucaaagcuuauggaagacauaccugcaaugg

SEQ ID NO: 393217 - RNA, 18 nt, Human
cucaaagcuuccauucca

SEQ ID NO: 393218 - RNA, 32 nt, Human
cucaaaggaagcaggggauucagugaguguga

SEQ ID NO: 393219 - RNA, 30 nt, Human
cucaaaggaagccacaaggcgcgggggcca

SEQ ID NO: 393220 - RNA, 32 nt, Human
cucaaaggaagccacaaggcgcgggggccacu

SEQ ID NO: 393221 - RNA, 32 nt, Human
cucaaaggcccugguuacacagucuucugggg

SEQ ID NO: 393222 - RNA, 32 nt, Human
cucaaaggcugagaguaucccacccacuucac

SEQ ID NO: 393223 - RNA, 32 nt, Human
cucaaagggacagaggacagauucauaauugu

SEQ ID NO: 393224 - RNA, 32 nt, Human
cucaaaggggagacagaggcagugcucccugu

SEQ ID NO: 393225 - RNA, 32 nt, Human
cucaaaggguaacaggucuaacagaaagaacu

SEQ ID NO: 393226 - RNA, 32 nt, Human
cucaaaggucaugauuuccacccuggggcugg

SEQ ID NO: 393227 - RNA, 32 nt, Human
cucaaaggucuggucugugggccucugaggag

SEQ ID NO: 393228 - RNA, 32 nt, Human
cucaaagucccucuggaggaccacagcucaac

SEQ ID NO: 393229 - RNA, 32 nt, Human
cucaaagugauccucccaugucagccuccuga

SEQ ID NO: 393230 - RNA, 22 nt, Human
cucaaagugcugggauuacagg

SEQ ID NO: 393231 - RNA, 22 nt, Human
cucaaagugcugggauuacggg

SEQ ID NO: 393232 - RNA, 22 nt, Human
cucaaagugcugggauuagagg

SEQ ID NO: 393233 - RNA, 22 nt, Human
cucaaagugcugggauuauagg

SEQ ID NO: 393234 - RNA, 32 nt, Human
cucaaaguggggguggagacucugauuuuccc

SEQ ID NO: 393235 - RNA, 32 nt, Human
cucaaagugugggcccuggaccaguggcagca

SEQ ID NO: 393236 - RNA, 22 nt, Human
cucaaaguguugggauugcagg

SEQ ID NO: 393237 - RNA, 32 nt, Human
cucaaauaaggcagacuuuaaccaucugauaa

SEQ ID NO: 393238 - RNA, 32 nt, Human
cucaaauacaugcacagucauacaagucaugg

SEQ ID NO: 393239 - RNA, 31 nt, Human
cucaaauagagaccuguugguugcuagggua

SEQ ID NO: 393240 - RNA, 32 nt, Human
cucaaauagagcccugggggcagagcuccugg

SEQ ID NO: 393241 - RNA, 32 nt, Human
cucaaauccugaguuauugcugcaugcuuuaa

SEQ ID NO: 393242 - RNA, 32 nt, Human
cucaaauccuuuucucuuucccuuacuucauc

SEQ ID NO: 393243 - RNA, 23 nt, Human
cucaaaucucagaauaggaucaa

SEQ ID NO: 393244 - RNA, 32 nt, Human
cucaaaucuguuguguuucugagucuaggguc

SEQ ID NO: 393245 - RNA, 24 nt, Human
cucaaaucuugaacccuggaccaa

SEQ ID NO: 393246 - RNA, 32 nt, Human
cucaaaucuuggugaacccugagagcuaccca

SEQ ID NO: 393247 - RNA, 32 nt, Human
cucaaaugaaaauucuuuaucugaaauuuuaa

SEQ ID NO: 393248 - RNA, 22 nt, Human
cucaaaugauccucccaccuca

SEQ ID NO: 393249 - RNA, 32 nt, Human
cucaaaugaucugcccaccucuaccuccaaag

SEQ ID NO: 393250 - RNA, 32 nt, Human
cucaaaugccuguaaucccaguacuuugggag

SEQ ID NO: 393251 - RNA, 32 nt, Human
cucaaauggacccugaggaaauggauaccuga

SEQ ID NO: 393252 - RNA, 32 nt, Human
cucaaauggcacccuggcuggcugcaagcagc

SEQ ID NO: 393253 - RNA, 32 nt, Human
cucaaauggugcuucugcccaugaugguacca

SEQ ID NO: 393254 - RNA, 32 nt, Human
cucaaauguaauaaaauugaggcuccacggag

SEQ ID NO: 393255 - RNA, 32 nt, Human
cucaaauguauuuuccuaauugcccacuugag

SEQ ID NO: 393256 - RNA, 21 nt, Human
cucaaauuccaacugaaauca

SEQ ID NO: 393257 - RNA, 32 nt, Human
cucaaauuccagaaguggaggcuccagccucc

SEQ ID NO: 393258 - RNA, 32 nt, Human
cucaaauuguaauccccaugugucaagggagg

SEQ ID NO: 393259 - RNA, 32 nt, Human
cucaaauuuuauuuagguucaggggguacaug

SEQ ID NO: 393260 - RNA, 19 nt, Human
cucaaauuuucuaacuugu

SEQ ID NO: 393261 - RNA, 32 nt, Human
cucaacaaaugucaucaaauauguugaauuga

SEQ ID NO: 393262 - RNA, 32 nt, Human
cucaacaacccuaggaggguucuugaagcuuu

SEQ ID NO: 393263 - RNA, 21 nt, Human
cucaacaaccugaauguccca

SEQ ID NO: 393264 - RNA, 22 nt, Human
cucaacaaugccccccaucgcc

SEQ ID NO: 393265 - RNA, 32 nt, Human
cucaacacacagaucuccuacuccauccaguc

SEQ ID NO: 393266 - RNA, 22 nt, Human
cucaacacacuccuccuccccu

SEQ ID NO: 393267 - RNA, 22 nt, Human
cucaacacccuccaccuucccc

SEQ ID NO: 393268 - RNA, 26 nt, Human
cucaacaccuuuugcccuccuccccu

SEQ ID NO: 393269 - RNA, 32 nt, Human
cucaacacgcugauucuccuccugccucuccc

SEQ ID NO: 393270 - RNA, 32 nt, Human
cucaacacgguguugcucuucagucauaccgg

SEQ ID NO: 393271 - RNA, 32 nt, Human
cucaacacuaccugugggaugccuuaguuacc

SEQ ID NO: 393272 - RNA, 22 nt, Human
cucaacacugugcuccacauca

SEQ ID NO: 393273 - RNA, 32 nt, Human
cucaacacuuccuuccccaaagccagaagaug

SEQ ID NO: 393274 - RNA, 32 nt, Human
cucaacagacaccuccagcacagcuucaccag

SEQ ID NO: 393275 - RNA, 32 nt, Human
cucaacagacccaucaagucacgcuguuggac

SEQ ID NO: 393276 - RNA, 32 nt, Human
cucaacagauuauuccuccucuccuuagaaua

SEQ ID NO: 393277 - RNA, 22 nt, Human
cucaacagccccuuccaccccu

SEQ ID NO: 393278 - RNA, 32 nt, Human
cucaacagccuccaccucccuuucuacccuca

SEQ ID NO: 393279 - RNA, 32 nt, Human
cucaacaggccucagggcuccuugugggccug

SEQ ID NO: 393280 - RNA, 32 nt, Human
cucaacaggcugagguugggaggaucaccuga

SEQ ID NO: 393281 - RNA, 32 nt, Human
cucaacaggguccauugccucuugccuccaga

SEQ ID NO: 393282 - RNA, 32 nt, Human
cucaacagggucucccucuguugcccaggcug

SEQ ID NO: 393283 - RNA, 22 nt, Human
cucaacagugguccucaucccu

SEQ ID NO: 393284 - RNA, 32 nt, Human
cucaacaguguuaaaagaggaagugaccucac

SEQ ID NO: 393285 - RNA, 24 nt, Human
cucaacaucauuggucaucagaga

SEQ ID NO: 393286 - RNA, 32 nt, Human
cucaacaucugauuguuuuccaccucagccug

SEQ ID NO: 393287 - RNA, 31 nt, Human
cucaacaugagcuauugguugggucugguga

SEQ ID NO: 393288 - RNA, 32 nt, Human
cucaacaugccugcuaaccuagccuucuagaa

SEQ ID NO: 393289 - RNA, 24 nt, Human
cucaacauuacugaucauuagaga

SEQ ID NO: 393290 - RNA, 32 nt, Human
cucaacauucacgugccucuugcuuucuuucu

SEQ ID NO: 393291 - RNA, 32 nt, Human
cucaaccaaaacaagucuuuuggcuuucuuuu

SEQ ID NO: 393292 - RNA, 21 nt, Human
cucaaccaacuccuuuagcau

SEQ ID NO: 393293 - RNA, 32 nt, Human
cucaaccaaucacauggcugucaacaaugcca

SEQ ID NO: 393294 - RNA, 32 nt, Human
cucaaccaccaccaccaccaccaccccuacua

SEQ ID NO: 393295 - RNA, 32 nt, Human
cucaaccagcuacucaggaggcugggcaggag

SEQ ID NO: 393296 - RNA, 32 nt, Human
cucaaccauagcaugcaggaacagcgaagcca

SEQ ID NO: 393297 - RNA, 24 nt, Human
cucaaccauccugccaaugcccag

SEQ ID NO: 393298 - RNA, 32 nt, Human
cucaacccaagaaccuguuuccuggaccagug

SEQ ID NO: 393299 - RNA, 32 nt, Human
cucaacccaccugcaugcaucucccccagagg

SEQ ID NO: 393300 - RNA, 18 nt, Human
cucaacccaucuuccuag

SEQ ID NO: 393301 - RNA, 20 nt, Human
cucaacccaugauucaggga

SEQ ID NO: 393302 - RNA, 32 nt, Human
cucaaccccagccuggggcuuugugcugcacc

SEQ ID NO: 393303 - RNA, 32 nt, Human
cucaaccccaucauccugccccuguggcaugu

SEQ ID NO: 393304 - RNA, 32 nt, Human
cucaaccccguccccuucgcacugaccacacc

SEQ ID NO: 393305 - RNA, 23 nt, Human
cucaaccccuccccuccaucccu

SEQ ID NO: 393306 - RNA, 32 nt, Human
cucaaccccuuccuccucccucuggggaugaa

SEQ ID NO: 393307 - RNA, 32 nt, Human
cucaacccuaaucugcagccccgccuuugccu

SEQ ID NO: 393308 - RNA, 21 nt, Human
cucaacccucaccuccauccc

SEQ ID NO: 393309 - RNA, 32 nt, Human
cucaacccuccaggggucaggagugguaccag

SEQ ID NO: 393310 - RNA, 32 nt, Human
cucaacccugcacccacccuccuccagggauc

SEQ ID NO: 393311 - RNA, 32 nt, Human
cucaacccugcuccucccgguaggccagcugc

SEQ ID NO: 393312 - RNA, 32 nt, Human
cucaacccuucaagaaaguacaugucaggaac

SEQ ID NO: 393313 - RNA, 32 nt, Human
cucaaccuaccuggcauauuuauuuugcaguc

SEQ ID NO: 393314 - RNA, 32 nt, Human
cucaaccucagacuucucagccugccuaacug

SEQ ID NO: 393315 - RNA, 32 nt, Human
cucaaccuccacccugucccauggcccaagga

SEQ ID NO: 393316 - RNA, 32 nt, Human
cucaaccucccaggcucaaucgauccuuccaa

SEQ ID NO: 393317 - RNA, 32 nt, Human
cucaaccucuaggauuuugcaugcagagcgga

SEQ ID NO: 393318 - RNA, 32 nt, Human
cucaaccucuccagauucaagugauccuccca

SEQ ID NO: 393319 - RNA, 32 nt, Human
cucaaccugcagcccucaucuccgccggcgag

SEQ ID NO: 393320 - RNA, 32 nt, Human
cucaaccugccugccccucacccgccguggga

SEQ ID NO: 393321 - RNA, 32 nt, Human
cucaaccuggacucaaguuacuguggugagaa

SEQ ID NO: 393322 - RNA, 32 nt, Human
cucaaccuggcccgcggaccucaggccaucgc

SEQ ID NO: 393323 - RNA, 32 nt, Human
cucaaccuguauuggacagcacugccucuuuu

SEQ ID NO: 393324 - RNA, 32 nt, Human
cucaaccuugaccaucuccaucugcccuuaaa

SEQ ID NO: 393325 - RNA, 32 nt, Human
cucaaccuugcaaagccauccaccucauugug

SEQ ID NO: 393326 - RNA, 32 nt, Human
cucaaccuuggggccagcaucucccacugccu

SEQ ID NO: 393327 - RNA, 32 nt, Human
cucaacgaguuucuuuggucuuuacugaaaga

SEQ ID NO: 393328 - RNA, 20 nt, Human
cucaacgcccugcugguggc

SEQ ID NO: 393329 - RNA, 32 nt, Human
cucaacgcccugcugguggcugcugaacaccu

SEQ ID NO: 393330 - RNA, 32 nt, Human
cucaacgcgcugcugcugcugcucuaucggcc

SEQ ID NO: 393331 - RNA, 32 nt, Human
cucaacggguguagccacuggugcuuugaagc

SEQ ID NO: 393332 - RNA, 32 nt, Human
cucaacguauauccuucccaucuauugccuuc

SEQ ID NO: 393333 - RNA, 32 nt, Human
cucaacguggguguggccgaggugaagaaauc

SEQ ID NO: 393334 - RNA, 32 nt, Human
cucaacuaaaaauacaaaaauuagccaggugu

SEQ ID NO: 393335 - RNA, 32 nt, Human
cucaacuaaaaauauaaaaauuagccaggcgu

SEQ ID NO: 393336 - RNA, 32 nt, Human
cucaacucaagcaauccucccaccucagccac

SEQ ID NO: 393337 - RNA, 32 nt, Human
cucaacucacucuagccugggugacagagcga

SEQ ID NO: 393338 - RNA, 23 nt, Human
cucaacucacugcaaccuccgcu

SEQ ID NO: 393339 - RNA, 32 nt, Human
cucaacucacugcaaccucugcccuucagguu

SEQ ID NO: 393340 - RNA, 32 nt, Human
cucaacucacugcaagcuccgccuccuggguu

SEQ ID NO: 393341 - RNA, 24 nt, Human
cucaacucacuguaaccuccgccu

SEQ ID NO: 393342 - RNA, 32 nt, Human
cucaacucagagccauggaggcaaguaccuua

SEQ ID NO: 393343 - RNA, 32 nt, Human
cucaacuccaacccuugcuugucucaaggcac

SEQ ID NO: 393344 - RNA, 20 nt, Human
cucaacuccaccccauccca

SEQ ID NO: 393345 - RNA, 18 nt, Human
cucaacuccccucgggca

SEQ ID NO: 393346 - RNA, 32 nt, Human
cucaacucuccccaggaaaguuuccccuguuu

SEQ ID NO: 393347 - RNA, 32 nt, Human
cucaacugauccucgcaucucagccuccugag

SEQ ID NO: 393348 - RNA, 32 nt, Human
cucaacugccccuuuccucucccucagaauuu

SEQ ID NO: 393349 - RNA, 32 nt, Human
cucaacuggcagcugcuccucggcugggcgcc

SEQ ID NO: 393350 - RNA, 32 nt, Human
cucaacuggccucugcugccaggccacugccu

SEQ ID NO: 393351 - RNA, 32 nt, Human
cucaacugugugguaacagaaagcuucuuacc

SEQ ID NO: 393352 - RNA, 32 nt, Human
cucaacuuaugacgcaguugugaugggguuau

SEQ ID NO: 393353 - RNA, 23 nt, Human
cucaacuuccuacugcaagcuua

SEQ ID NO: 393354 - RNA, 32 nt, Human
cucaacuucucccauccucucaccuccuauuu

SEQ ID NO: 393355 - RNA, 18 nt, Human
cucaacuugcacuguaua

SEQ ID NO: 393356 - RNA, 32 nt, Human
cucaacuugccaguugcugggugcugggcccu

SEQ ID NO: 393357 - RNA, 32 nt, Human
cucaacuugcugggacacugacaggcguuccu

SEQ ID NO: 393358 - RNA, 22 nt, Human
cucaagaaaauucacuauguga

SEQ ID NO: 393359 - RNA, 20 nt, Human
cucaagaaagcugguccagg

SEQ ID NO: 393360 - RNA, 32 nt, Human
cucaagaaaguggagaaggaaacgcugggaaa

SEQ ID NO: 393361 - RNA, 32 nt, Human
cucaagaacaccuuuguuuugcacugacaaga

SEQ ID NO: 393362 - RNA, 32 nt, Human
cucaagaacgggcucaucagcaaccgcagcgu

SEQ ID NO: 393363 - RNA, 32 nt, Human
cucaagaacugaucuucgguuuuacaauagug

SEQ ID NO: 393364 - RNA, 32 nt, Human
cucaagaacugggaguauguuccuucagggag

SEQ ID NO: 393365 - RNA, 23 nt, Human
cucaagaaggaccaagaaguuuu

SEQ ID NO: 393366 - RNA, 32 nt, Human
cucaagaauguucacuuacugauuacuacaau

SEQ ID NO: 393367 - RNA, 32 nt, Human
cucaagaauugcuuguuacaggcacaguagcc

SEQ ID NO: 393368 - RNA, 32 nt, Human
cucaagacaagaaacugcuccuucacuaccca

SEQ ID NO: 393369 - RNA, 32 nt, Human
cucaagacaagccuggccaacauggugaaacc

SEQ ID NO: 393370 - RNA, 32 nt, Human
cucaagacaagugugggcaacacagcaagacc

SEQ ID NO: 393371 - RNA, 21 nt, Human
cucaagacacauugacacugu

SEQ ID NO: 393372 - RNA, 32 nt, Human
cucaagaccagccugaccaacauggugaaauc

SEQ ID NO: 393373 - RNA, 32 nt, Human
cucaagaccagccugaccaauauagugaaaca

SEQ ID NO: 393374 - RNA, 32 nt, Human
cucaagaccagccuggacaacauggcaagacc

SEQ ID NO: 393375 - RNA, 32 nt, Human
cucaagaccagccuggccaacuuggugaaacc

SEQ ID NO: 393376 - RNA, 32 nt, Human
cucaagaccagccuggcuaacauggugaaacc

SEQ ID NO: 393377 - RNA, 32 nt, Human
cucaagaccagccuggguaacaaagugagacc

SEQ ID NO: 393378 - RNA, 32 nt, Human
cucaagaccagccuggucaacauggugaaacc

SEQ ID NO: 393379 - RNA, 32 nt, Human
cucaagaccaggcugcagccuccacuucccuc

SEQ ID NO: 393380 - RNA, 32 nt, Human
cucaagaccauccuggaugcccaggaccugga

SEQ ID NO: 393381 - RNA, 32 nt, Human
cucaagaccucuucccccuugccuuuaaccuu

SEQ ID NO: 393382 - RNA, 32 nt, Human
cucaagacugacuuacagaccaaccaaccacc

SEQ ID NO: 393383 - RNA, 24 nt, Human
cucaagacuggcgcuaaaaguuuu

SEQ ID NO: 393384 - RNA, 32 nt, Human
cucaagagcaaagguuaauuuaaggacaaaga

SEQ ID NO: 393385 - RNA, 24 nt, Human
cucaagaggccgagguugcaguga

SEQ ID NO: 393386 - RNA, 32 nt, Human
cucaagaggccgagguugcagugagccgugau

SEQ ID NO: 393387 - RNA, 32 nt, Human
cucaagagguccuuccaucucagucucccaag

SEQ ID NO: 393388 - RNA, 32 nt, Human
cucaagagguugaggcugcagugagcccugau

SEQ ID NO: 393389 - RNA, 21 nt, Human
cucaagauaauauaacuuuga

SEQ ID NO: 393390 - RNA, 32 nt, Human
cucaagaucacuccuaggcuucucccaaaccc

SEQ ID NO: 393391 - RNA, 32 nt, Human
cucaagaucagccugggcaacauggugaaacc

SEQ ID NO: 393392 - RNA, 32 nt, Human
cucaagauccaguugaagaugcagucuuuggc

SEQ ID NO: 393393 - RNA, 32 nt, Human
cucaagauccaugccagggagcucuuugacuc

SEQ ID NO: 393394 - RNA, 28 nt, Human
cucaagaucugugcugccuccucaggag

SEQ ID NO: 393395 - RNA, 32 nt, Human
cucaagauguacugguucccuggcaccuuaag

SEQ ID NO: 393396 - RNA, 32 nt, Human
cucaagaugugccugcuccacccccaguugac

SEQ ID NO: 393397 - RNA, 32 nt, Human
cucaagcaaccaggucuuccugccauuccccu

SEQ ID NO: 393398 - RNA, 22 nt, Human
cucaagcaacccucccaccuua

SEQ ID NO: 393399 - RNA, 32 nt, Human
cucaagcaaucagcccaccucugccucccaaa

SEQ ID NO: 393400 - RNA, 22 nt, Human
cucaagcaauccucccaccuca

SEQ ID NO: 393401 - RNA, 22 nt, Human
cucaagcaauccucccacuuca

SEQ ID NO: 393402 - RNA, 32 nt, Human
cucaagcaauccucccaucucagccucuuaaa

SEQ ID NO: 393403 - RNA, 22 nt, Human
cucaagcaauccucccccuuca

SEQ ID NO: 393404 - RNA, 22 nt, Human
cucaagcaauccucccgccuca

SEQ ID NO: 393405 - RNA, 32 nt, Human
cucaagcaauccuccugccucugccucccaag

SEQ ID NO: 393406 - RNA, 22 nt, Human
cucaagcaauccucucaccuca

SEQ ID NO: 393407 - RNA, 32 nt, Human
cucaagcaauucgacaucucaagugagacaug

SEQ ID NO: 393408 - RNA, 22 nt, Human
cucaagcaauucucccaccuca

SEQ ID NO: 393409 - RNA, 32 nt, Human
cucaagcagaccuacaagaugggguacuaaca

SEQ ID NO: 393410 - RNA, 32 nt, Human
cucaagcagcacagaggaaggggcaagacgug

SEQ ID NO: 393411 - RNA, 32 nt, Human
cucaagcagcugagacagggaagacagcauaa

SEQ ID NO: 393412 - RNA, 32 nt, Human
cucaagcaggguggcgcgcaugagcggcgaag

SEQ ID NO: 393413 - RNA, 32 nt, Human
cucaagcagggugggcagugagagcugcuaug

SEQ ID NO: 393414 - RNA, 32 nt, Human
cucaagcaguaggaaaggaccugcucuuacau

SEQ ID NO: 393415 - RNA, 22 nt, Human
cucaagcaguccucccacccca

SEQ ID NO: 393416 - RNA, 22 nt, Human
cucaagcaguccucccaccuca

SEQ ID NO: 393417 - RNA, 22 nt, Human
cucaagcaguucucccaccuca

SEQ ID NO: 393418 - RNA, 32 nt, Human
cucaagccaccugcgaacacugcugcuaccau

SEQ ID NO: 393419 - RNA, 32 nt, Human
cucaagccacugaagagcaucuccccacccag

SEQ ID NO: 393420 - RNA, 32 nt, Human
cucaagccaguucuucucuuccagaagaauuc

SEQ ID NO: 393421 - RNA, 22 nt, Human
cucaagccauccucccaccuca

SEQ ID NO: 393422 - RNA, 32 nt, Human
cucaagccaucuuuccaccucagccugccagu

SEQ ID NO: 393423 - RNA, 24 nt, Human
cucaagcccauaaucccagcacuu

SEQ ID NO: 393424 - RNA, 32 nt, Human
cucaagcccauaaucccagcacuuugggaggc

SEQ ID NO: 393425 - RNA, 25 nt, Human
cucaagccccuccccacaccuggug

SEQ ID NO: 393426 - RNA, 32 nt, Human
cucaagcccugccuuccgguacaggauaagga

SEQ ID NO: 393427 - RNA, 32 nt, Human
cucaagcccugggaggucaaggcugcagugag

SEQ ID NO: 393428 - RNA, 32 nt, Human
cucaagccuauaaucccagcacuuugggaggc

SEQ ID NO: 393429 - RNA, 32 nt, Human
cucaagccucuucagccuuucucagcagucuc

SEQ ID NO: 393430 - RNA, 32 nt, Human
cucaagccuggcgacagagcgagacuccgucu

SEQ ID NO: 393431 - RNA, 32 nt, Human
cucaagccugggaagucacaggaagcagcagc

SEQ ID NO: 393432 - RNA, 21 nt, Human
cucaagccugggcaacagagc

SEQ ID NO: 393433 - RNA, 32 nt, Human
cucaagccuggugacagagcgaaacuccgucu

SEQ ID NO: 393434 - RNA, 32 nt, Human
cucaagccuguaaucccagcacguugggaggc

SEQ ID NO: 393435 - RNA, 32 nt, Human
cucaagccuguaaucccagcacuuuagguggc

SEQ ID NO: 393436 - RNA, 32 nt, Human
cucaagccuguaaucccagcacuuugggaggc

SEQ ID NO: 393437 - RNA, 32 nt, Human
cucaagccuguaaucccagcacuuuggguggc

SEQ ID NO: 393438 - RNA, 32 nt, Human
cucaagccuguaaucccagcauuuugggaggc

SEQ ID NO: 393439 - RNA, 32 nt, Human
cucaagccuguaauccuagcacuuugggaggc

SEQ ID NO: 393440 - RNA, 32 nt, Human
cucaagccuguacucccagcacuuuuggaggc

SEQ ID NO: 393441 - RNA, 32 nt, Human
cucaagccuguaucccagcacuuugggaggca

SEQ ID NO: 393442 - RNA, 32 nt, Human
cucaagccuuucuccaccaggccccucaucug

SEQ ID NO: 393443 - RNA, 22 nt, Human
cucaagcgauccaccccccuca

SEQ ID NO: 393444 - RNA, 22 nt, Human
cucaagcgauccucccaccuca

SEQ ID NO: 393445 - RNA, 32 nt, Human
cucaagcgauccucccaucucagccucccaaa

SEQ ID NO: 393446 - RNA, 32 nt, Human
cucaagcgauccucccaucucagccucccaga

SEQ ID NO: 393447 - RNA, 32 nt, Human
cucaagcgauccucccaucucagccucccuga

SEQ ID NO: 393448 - RNA, 32 nt, Human
cucaagcgauccuccuuccucauccuucuaaa

SEQ ID NO: 393449 - RNA, 32 nt, Human
cucaagcgauccucucaucucagccuccugag

SEQ ID NO: 393450 - RNA, 32 nt, Human
cucaagcgcaguuucaagucucaggccguggg

SEQ ID NO: 393451 - RNA, 32 nt, Human
cucaagcgcuggagcuugucgguggccgguaa

SEQ ID NO: 393452 - RNA, 30 nt, Human
cucaagcggggccacagggccaaggugugc

SEQ ID NO: 393453 - RNA, 32 nt, Human
cucaagcuaguucaucaaacaggccaguuagg

SEQ ID NO: 393454 - RNA, 32 nt, Human
cucaagcucccuuccccucucuggcugcccuc

SEQ ID NO: 393455 - RNA, 32 nt, Human
cucaagcucuucugcuagugcccugccccugu

SEQ ID NO: 393456 - RNA, 32 nt, Human
cucaagcugcagcuggacugcaggcuuauuuu

SEQ ID NO: 393457 - RNA, 32 nt, Human
cucaagcugggcucugugugaggccuggcccc

SEQ ID NO: 393458 - RNA, 32 nt, Human
cucaagcuggucucaagcuccugggcucaagc

SEQ ID NO: 393459 - RNA, 32 nt, Human
cucaagcuguagugcaguggugccaucuuggc

SEQ ID NO: 393460 - RNA, 32 nt, Human
cucaagcuguuuggacgccacagccaggacca

SEQ ID NO: 393461 - RNA, 32 nt, Human
cucaagcuuaaucuccucuucucuccaacucu

SEQ ID NO: 393462 - RNA, 32 nt, Human
cucaagcuuguauuaccagcacuuuaggaggu

SEQ ID NO: 393463 - RNA, 32 nt, Human
cucaaggaaaagguuuucaugauaacuuuguu

SEQ ID NO: 393464 - RNA, 18 nt, Human
cucaaggaagcauagcca

SEQ ID NO: 393465 - RNA, 32 nt, Human
cucaaggaaggcauguaaacagcaaccucggg

SEQ ID NO: 393466 - RNA, 17 nt, Human
cucaaggaauccuguca

SEQ ID NO: 393467 - RNA, 32 nt, Human
cucaaggaccacagccucugcccaccagcaug

SEQ ID NO: 393468 - RNA, 16 nt, Human
cucaaggaccauggcc

SEQ ID NO: 393469 - RNA, 32 nt, Human
cucaaggacucauguauaccauauguuccacu

SEQ ID NO: 393470 - RNA, 16 nt, Human
cucaaggacuccagcc

SEQ ID NO: 393471 - RNA, 32 nt, Human
cucaaggagcacaguccugggaaaggccuagg

SEQ ID NO: 393472 - RNA, 32 nt, Human
cucaaggaggaacuggcaaaugcugaauauuc

SEQ ID NO: 393473 - RNA, 32 nt, Human
cucaaggaguggccuugucucuggccuguccc

SEQ ID NO: 393474 - RNA, 19 nt, Human
cucaaggaucaauaaucca

SEQ ID NO: 393475 - RNA, 15 nt, Human
cucaaggaucaccca

SEQ ID NO: 393476 - RNA, 18 nt, Human
cucaaggaucuagaacca

SEQ ID NO: 393477 - RNA, 32 nt, Human
cucaaggcaaagcugcacaacauaacaagacc

SEQ ID NO: 393478 - RNA, 32 nt, Human
cucaaggcaccuggauggugacccugggccgu

SEQ ID NO: 393479 - RNA, 20 nt, Human
cucaaggcaggcagcccagg

SEQ ID NO: 393480 - RNA, 19 nt, Human
cucaaggcagggcucuggg

SEQ ID NO: 393481 - RNA, 32 nt, Human
cucaaggccaauuccaauuggaucgaguuuuu

SEQ ID NO: 393482 - RNA, 32 nt, Human
cucaaggccccuggcccuuacugagccugcag

SEQ ID NO: 393483 - RNA, 32 nt, Human
cucaaggccuauagccugucacuccuugaagc

SEQ ID NO: 393484 - RNA, 32 nt, Human
cucaaggccuccuccaccuccaccuccacccc

SEQ ID NO: 393485 - RNA, 32 nt, Human
cucaaggccugggaagguuuucuaaucugugc

SEQ ID NO: 393486 - RNA, 32 nt, Human
cucaagggaagacaucaagacuggacuugaac

SEQ ID NO: 393487 - RNA, 32 nt, Human
cucaagggauccucccaucucagccucccaag

SEQ ID NO: 393488 - RNA, 32 nt, Human
cucaagggauccucccaucucagcuuccugag

SEQ ID NO: 393489 - RNA, 32 nt, Human
cucaagggauccugccaucucagcuucccaag

SEQ ID NO: 393490 - RNA, 32 nt, Human
cucaagggauuccuggcuggcuaugugguggc

SEQ ID NO: 393491 - RNA, 17 nt, Human
cucaagggcacaugcca

SEQ ID NO: 393492 - RNA, 32 nt, Human
cucaagggcagggauucucccacccaccuaag

SEQ ID NO: 393493 - RNA, 32 nt, Human
cucaagggcuguagauguucccuuuccacccc

SEQ ID NO: 393494 - RNA, 32 nt, Human
cucaagggcuugcagccccacugcuccuucua

SEQ ID NO: 393495 - RNA, 32 nt, Human
cucaaggggacagcugcuguggcagauauuug

SEQ ID NO: 393496 - RNA, 32 nt, Human
cucaaggggaccugccccagccuccucuugua

SEQ ID NO: 393497 - RNA, 17 nt, Human
cucaaggggcccagcca

SEQ ID NO: 393498 - RNA, 32 nt, Human
cucaaggucacaggucacgcuggcacgccugg

SEQ ID NO: 393499 - RNA, 32 nt, Human
cucaaggucagccuucagauuugggagcaaac

SEQ ID NO: 393500 - RNA, 32 nt, Human
cucaaggugagagugagcuacaagaugaggcu

SEQ ID NO: 393501 - RNA, 32 nt, Human
cucaagguguagcagaggaauuuguaggagag

SEQ ID NO: 393502 - RNA, 32 nt, Human
cucaaggugucacccuaacagaccuucaagaa

SEQ ID NO: 393503 - RNA, 32 nt, Human
cucaaggugucacccuaacagaccuucaagag

SEQ ID NO: 393504 - RNA, 32 nt, Human
cucaagguuauuauucugacaccagcuugcug

SEQ ID NO: 393505 - RNA, 20 nt, Human
cucaagguugaggccgccau

SEQ ID NO: 393506 - RNA, 32 nt, Human
cucaagguuuaaugauggugugcauggaaggc

SEQ ID NO: 393507 - RNA, 32 nt, Human
cucaagguuucuguucauuaugaaacaucaau

SEQ ID NO: 393508 - RNA, 32 nt, Human
cucaagguuugaagacuuccuagcuuguccua

SEQ ID NO: 393509 - RNA, 32 nt, Human
cucaaguaaacuaucucugccuucaaggagcu

SEQ ID NO: 393510 - RNA, 32 nt, Human
cucaaguaccccaguuucacacauaccaaacc

SEQ ID NO: 393511 - RNA, 32 nt, Human
cucaaguagcagagacaggugugcaaaggcuc

SEQ ID NO: 393512 - RNA, 32 nt, Human
cucaaguagcagggacaggugugcaaaagcuc

SEQ ID NO: 393513 - RNA, 31 nt, Human
cucaaguauaucugugcuucacuggaagagu

SEQ ID NO: 393514 - RNA, 32 nt, Human
cucaaguauggugaggacagagugucauguga

SEQ ID NO: 393515 - RNA, 32 nt, Human
cucaagucacauaauaucagcacuuugugcug

SEQ ID NO: 393516 - RNA, 32 nt, Human
cucaagucaggaguucgagaccagccuggcca

SEQ ID NO: 393517 - RNA, 32 nt, Human
cucaaguccacugucacaaucccuuucagaaa

SEQ ID NO: 393518 - RNA, 32 nt, Human
cucaaguccaggaguucgagaccagccugggc

SEQ ID NO: 393519 - RNA, 32 nt, Human
cucaagucccccaagaccuaaggguuuuaucu

SEQ ID NO: 393520 - RNA, 31 nt, Human
cucaaguccucuuggaggccuguguuuucuu

SEQ ID NO: 393521 - RNA, 32 nt, Human
cucaaguccugacugaggucuccaauuaccuu

SEQ ID NO: 393522 - RNA, 32 nt, Human
cucaagucggccucuccaugcccagccuccug

SEQ ID NO: 393523 - RNA, 32 nt, Human
cucaagucucucucccccuccuuucucccccu

SEQ ID NO: 393524 - RNA, 32 nt, Human
cucaagucuguaaucccagcgcuuugggaggc

SEQ ID NO: 393525 - RNA, 32 nt, Human
cucaagugaacugcaggaauccuccaacaacc

SEQ ID NO: 393526 - RNA, 32 nt, Human
cucaagugacaacugggaccuggaccucuggg

SEQ ID NO: 393527 - RNA, 22 nt, Human
cucaagugacccucccaccuca

SEQ ID NO: 393528 - RNA, 31 nt, Human
cucaagugacucagccugguuggagaacugc

SEQ ID NO: 393529 - RNA, 32 nt, Human
cucaagugagccacaucugccucagccucccg

SEQ ID NO: 393530 - RNA, 22 nt, Human
cucaagugauccacccaccuca

SEQ ID NO: 393531 - RNA, 32 nt, Human
cucaagugauccacccaccucugccucccaaa

SEQ ID NO: 393532 - RNA, 22 nt, Human
cucaagugauccacccacuuca

SEQ ID NO: 393533 - RNA, 22 nt, Human
cucaagugauccgcccaccuca

SEQ ID NO: 393534 - RNA, 32 nt, Human
cucaagugauccgccugccucuaccucccaaa

SEQ ID NO: 393535 - RNA, 22 nt, Human
cucaagugauccucacaccuca

SEQ ID NO: 393536 - RNA, 22 nt, Human
cucaagugauccucccaccuca

SEQ ID NO: 393537 - RNA, 32 nt, Human
cucaagugauccucccaccucugccucccaaa

SEQ ID NO: 393538 - RNA, 22 nt, Human
cucaagugauccuccugccuca

SEQ ID NO: 393539 - RNA, 22 nt, Human
cucaagugauccuccugucuca

SEQ ID NO: 393540 - RNA, 32 nt, Human
cucaagugauccuuccaucucagccucccaaa

SEQ ID NO: 393541 - RNA, 32 nt, Human
cucaagugauccuuccaucucagccucccgag

SEQ ID NO: 393542 - RNA, 32 nt, Human
cucaagugaucuaccugccucugccucccaaa

SEQ ID NO: 393543 - RNA, 32 nt, Human
cucaagugaucuaccugccucugccucccgaa

SEQ ID NO: 393544 - RNA, 32 nt, Human
cucaagugauucuaucgccucugccucccaaa

SEQ ID NO: 393545 - RNA, 32 nt, Human
cucaagugauucucccaucucagccucccaaa

SEQ ID NO: 393546 - RNA, 32 nt, Human
cucaagugccugccccugacacuccuggcccu

SEQ ID NO: 393547 - RNA, 32 nt, Human
cucaaguggaaagaaaugcaaagagaaaauga

SEQ ID NO: 393548 - RNA, 32 nt, Human
cucaaguggacauaccuuaucuugucagcucu

SEQ ID NO: 393549 - RNA, 32 nt, Human
cucaaguggggugggauuggggugggguccua

SEQ ID NO: 393550 - RNA, 32 nt, Human
cucaaguguuaggcagggucucaggccuuuga

SEQ ID NO: 393551 - RNA, 32 nt, Human
cucaaguguucauucauuuaauucuuaccaca

SEQ ID NO: 393552 - RNA, 32 nt, Human
cucaaguucauuuuucucuguuucugagauuc

SEQ ID NO: 393553 - RNA, 32 nt, Human
cucaaguucugaggucagaguggaccccguca

SEQ ID NO: 393554 - RNA, 32 nt, Human
cucaaguuuuagcaacucaccaacuaaggcgu

SEQ ID NO: 393555 - RNA, 32 nt, Human
cucaauaaaagcuuguuaauugauggaccaca

SEQ ID NO: 393556 - RNA, 32 nt, Human
cucaauaaaauuauagcucuaauguuugcaua

SEQ ID NO: 393557 - RNA, 32 nt, Human
cucaauaacucaguguagcacuuuaaagucug

SEQ ID NO: 393558 - RNA, 32 nt, Human
cucaauaaguugagcccagguguccucuuucc

SEQ ID NO: 393559 - RNA, 22 nt, Human
cucaauacaauuugucacauca

SEQ ID NO: 393560 - RNA, 32 nt, Human
cucaauaccaucaucucuuaucucuauacagg

SEQ ID NO: 393561 - RNA, 32 nt, Human
cucaauaccuggccucauuuaaaacaagacuu

SEQ ID NO: 393562 - RNA, 32 nt, Human
cucaauacucucaucaaaaucaggguauuaac

SEQ ID NO: 393563 - RNA, 31 nt, Human
cucaauacugugagagaaagacuguacucca

SEQ ID NO: 393564 - RNA, 32 nt, Human
cucaauagaagaggaggaaaacauguuuuuaa

SEQ ID NO: 393565 - RNA, 32 nt, Human
cucaauagccuagggagagucgaugaaggaua

SEQ ID NO: 393566 - RNA, 32 nt, Human
cucaaucaagaaaauucugagacuauuaauaa

SEQ ID NO: 393567 - RNA, 32 nt, Human
cucaaucaucuucuccuggccaaggcucugac

SEQ ID NO: 393568 - RNA, 32 nt, Human
cucaauccaccagaaccaugggcugcuguggc

SEQ ID NO: 393569 - RNA, 22 nt, Human
cucaauccacucagcacuuggc

SEQ ID NO: 393570 - RNA, 32 nt, Human
cucaauccagaaggaggccuaagugggcauca

SEQ ID NO: 393571 - RNA, 32 nt, Human
cucaauccagccuuagcugagcaccugucccc

SEQ ID NO: 393572 - RNA, 32 nt, Human
cucaauccaguuuugaccagucugacuuggug

SEQ ID NO: 393573 - RNA, 32 nt, Human
cucaauccccaaaggcaagguggacgcaguua

SEQ ID NO: 393574 - RNA, 32 nt, Human
cucaauccccaaaggcaagguggaugcaguua

SEQ ID NO: 393575 - RNA, 32 nt, Human
cucaauccccucccaucuuccccagaccuacc

SEQ ID NO: 393576 - RNA, 32 nt, Human
cucaauccucaagguugcucacugcaaauaua

SEQ ID NO: 393577 - RNA, 32 nt, Human
cucaauccucauucucugccuccuggacccuc

SEQ ID NO: 393578 - RNA, 32 nt, Human
cucaauccugcucucaccaugagccuccgccu

SEQ ID NO: 393579 - RNA, 32 nt, Human
cucaaucucagguaaagccuggagucuggggu

SEQ ID NO: 393580 - RNA, 21 nt, Human
cucaaucuccugaccucguga

SEQ ID NO: 393581 - RNA, 32 nt, Human
cucaaucugauacuguggagguuguuaauuua

SEQ ID NO: 393582 - RNA, 32 nt, Human
cucaaucugcugccguccaagccuggggccca

SEQ ID NO: 393583 - RNA, 32 nt, Human
cucaaucugucacccaggcuggagcgcagugg

SEQ ID NO: 393584 - RNA, 32 nt, Human
cucaaucuguuacccaggcuggagugcagugg

SEQ ID NO: 393585 - RNA, 32 nt, Human
cucaaucuucucaaagcuucugacuccagaca

SEQ ID NO: 393586 - RNA, 32 nt, Human
cucaaucuugugucugccucagucuuuucuga

SEQ ID NO: 393587 - RNA, 32 nt, Human
cucaaugaaagccaagccagaauggaacaucc

SEQ ID NO: 393588 - RNA, 32 nt, Human
cucaaugaagggacccaggguguaucugagug

SEQ ID NO: 393589 - RNA, 32 nt, Human
cucaaugauuuaaggaaagaaaaugcucacaa

SEQ ID NO: 393590 - RNA, 32 nt, Human
cucaaugcaaagugucauucucuggaauugca

SEQ ID NO: 393591 - RNA, 32 nt, Human
cucaaugcagugagaagagggacagggacaag

SEQ ID NO: 393592 - RNA, 32 nt, Human
cucaaugcagugaguuauagauucucuaguuu

SEQ ID NO: 393593 - RNA, 29 nt, Human
cucaaugccacccugcagcugugccagau

SEQ ID NO: 393594 - RNA, 23 nt, Human
cucaaugccagcccaugaaagca

SEQ ID NO: 393595 - RNA, 32 nt, Human
cucaaugcccauuaaauacucuugccugccuc

SEQ ID NO: 393596 - RNA, 21 nt, Human
cucaaugcccugccuuggaca

SEQ ID NO: 393597 - RNA, 32 nt, Human
cucaaugccucaccuuucccguucgccagaug

SEQ ID NO: 393598 - RNA, 32 nt, Human
cucaaugccuccauuccaaacuguugucugcu

SEQ ID NO: 393599 - RNA, 32 nt, Human
cucaaugccugggacuggagguugauaguuua

SEQ ID NO: 393600 - RNA, 21 nt, Human
cucaaugccugugucucuccc

SEQ ID NO: 393601 - RNA, 32 nt, Human
cucaaugcgauggaauacauucaugccauugu

SEQ ID NO: 393602 - RNA, 32 nt, Human
cucaauggcuucgggaaacacacauauacaca

SEQ ID NO: 393603 - RNA, 32 nt, Human
cucaaugggcuggaaggaaggagagaaaaaga

SEQ ID NO: 393604 - RNA, 32 nt, Human
cucaauggucugggaguggacacuccuggugu

SEQ ID NO: 393605 - RNA, 32 nt, Human
cucaauggugcccaggcuggagugcaguggcg

SEQ ID NO: 393606 - RNA, 32 nt, Human
cucaaugguguccaggcuggagugcaguggcg

SEQ ID NO: 393607 - RNA, 22 nt, Human
cucaauguggucaaagcuucag

SEQ ID NO: 393608 - RNA, 32 nt, Human
cucaaugugucaccuccuuucuaguuuccucc

SEQ ID NO: 393609 - RNA, 32 nt, Human
cucaauguugcccaggcuggagugcaguggcg

SEQ ID NO: 393610 - RNA, 32 nt, Human
cucaauguuucuagccuucacucuccauuguc

SEQ ID NO: 393611 - RNA, 32 nt, Human
cucaauuaaaaagaaguaauuuagaaguuacu

SEQ ID NO: 393612 - RNA, 32 nt, Human
cucaauuagccaccuuuucacaguugugugga

SEQ ID NO: 393613 - RNA, 32 nt, Human
cucaauucacaacuuagcauuuugccaucuga

SEQ ID NO: 393614 - RNA, 32 nt, Human
cucaauucauuccuccucuuccucucaaaggc

SEQ ID NO: 393615 - RNA, 32 nt, Human
cucaauucccuugguccccagugcaguguuug

SEQ ID NO: 393616 - RNA, 32 nt, Human
cucaauucugaaggucgccaagaaggagagaa

SEQ ID NO: 393617 - RNA, 26 nt, Human
cucaauuguaccugcagcuccugcca

SEQ ID NO: 393618 - RNA, 32 nt, Human
cucaauuguccucuguguccugccugacaugg

SEQ ID NO: 393619 - RNA, 32 nt, Human
cucaauuucccagaaauuggguucuaugcugg

SEQ ID NO: 393620 - RNA, 32 nt, Human
cucaauuucuuaggcuggagugcaguggcacg

SEQ ID NO: 393621 - RNA, 32 nt, Human
cucaauuuguucugcauuaaugccacaguggg

SEQ ID NO: 393622 - RNA, 32 nt, Human
cucaauuuugagucugacauuuccaggaccag

SEQ ID NO: 393623 - RNA, 31 nt, Human
cucaauuuugugagagaaagacuguacucca

SEQ ID NO: 393624 - RNA, 32 nt, Human
cucacaaaagagaguccucaaguuguggcugu

SEQ ID NO: 393625 - RNA, 32 nt, Human
cucacaaaaucucucugaagcuuaaagucuua

SEQ ID NO: 393626 - RNA, 32 nt, Human
cucacaaaccuacagcccagaaaccagaagcc

SEQ ID NO: 393627 - RNA, 32 nt, Human
cucacaaaccuacagcccagaaacccagaagc

SEQ ID NO: 393628 - RNA, 32 nt, Human
cucacaaagugccgggauuacaggcgugagcc

SEQ ID NO: 393629 - RNA, 32 nt, Human
cucacaaagugcuaggauuacaggcaugagcc

SEQ ID NO: 393630 - RNA, 24 nt, Human
cucacaaagugcugggauuacagg

SEQ ID NO: 393631 - RNA, 32 nt, Human
cucacaaagugcugggauuacaggcaugaacc

SEQ ID NO: 393632 - RNA, 32 nt, Human
cucacaaagugcugggauuacaggcgugagcc

SEQ ID NO: 393633 - RNA, 32 nt, Human
cucacaaagugcugggauuacagguguaagcc

SEQ ID NO: 393634 - RNA, 32 nt, Human
cucacaaagugcugggauuauaggcaagagcg

SEQ ID NO: 393635 - RNA, 32 nt, Human
cucacaaaguguugagacuacaggcaugagcc

SEQ ID NO: 393636 - RNA, 32 nt, Human
cucacaacacagauugacugcucugacuuuga

SEQ ID NO: 393637 - RNA, 32 nt, Human
cucacaacaggcuggaugggugggugguaaaa

SEQ ID NO: 393638 - RNA, 32 nt, Human
cucacaacauggcaaguacaguacuuugaauu

SEQ ID NO: 393639 - RNA, 32 nt, Human
cucacaacccugcuuacauugaaaagucuuuu

SEQ ID NO: 393640 - RNA, 32 nt, Human
cucacaacuaccugccuggaugaauuuaggaa

SEQ ID NO: 393641 - RNA, 32 nt, Human
cucacaacugcaaccuccgucucccggguuca

SEQ ID NO: 393642 - RNA, 32 nt, Human
cucacaacuguaaccucaagcacuuugggagg

SEQ ID NO: 393643 - RNA, 32 nt, Human
cucacaacuguaauccucgcacuuugggaggc

SEQ ID NO: 393644 - RNA, 32 nt, Human
cucacaagcugguuguacagauugaauaacaa

SEQ ID NO: 393645 - RNA, 21 nt, Human
cucacaaggugcacacugcug

SEQ ID NO: 393646 - RNA, 24 nt, Human
cucacaaguagcugggauuacagg

SEQ ID NO: 393647 - RNA, 32 nt, Human
cucacaaguagcugggauuacaggugcccgcc

SEQ ID NO: 393648 - RNA, 32 nt, Human
cucacaauguguucaaccugaucaagaauauc

SEQ ID NO: 393649 - RNA, 32 nt, Human
cucacacaaagaaggaagagaacaguaccaac

SEQ ID NO: 393650 - RNA, 17 nt, Human
cucacacaaagucacac

SEQ ID NO: 393651 - RNA, 32 nt, Human
cucacacaaggauucuuuaaaagaggaagaga

SEQ ID NO: 393652 - RNA, 32 nt, Human
cucacacacagccucguggguagggucagcag

SEQ ID NO: 393653 - RNA, 32 nt, Human
cucacacacauccacacacaagcauaugcaua

SEQ ID NO: 393654 - RNA, 32 nt, Human
cucacacacaugcaaugguauaugugcaucug

SEQ ID NO: 393655 - RNA, 32 nt, Human
cucacacacaugcacacauccguacgugugug

SEQ ID NO: 393656 - RNA, 32 nt, Human
cucacacacccaggugagugguguucaggugg

SEQ ID NO: 393657 - RNA, 32 nt, Human
cucacacacucauccucacacccagcuauacc

SEQ ID NO: 393658 - RNA, 32 nt, Human
cucacacacucuuuuucccuucugccuucacc

SEQ ID NO: 393659 - RNA, 32 nt, Human
cucacacacuggcuggcccucucauucucacu

SEQ ID NO: 393660 - RNA, 32 nt, Human
cucacacagacacacccagcugcacacaugag

SEQ ID NO: 393661 - RNA, 32 nt, Human
cucacacaggacuugggcucuucuacugccag

SEQ ID NO: 393662 - RNA, 32 nt, Human
cucacacaucccucgccacucugcacauggcu

SEQ ID NO: 393663 - RNA, 32 nt, Human
cucacacaugcagacacaccugggcgucccga

SEQ ID NO: 393664 - RNA, 32 nt, Human
cucacacaugccacaacauggaugagccuuga

SEQ ID NO: 393665 - RNA, 32 nt, Human
cucacacaugccacauccauugcagagaugcu

SEQ ID NO: 393666 - RNA, 32 nt, Human
cucacaccaagagaguuugaaaagcuuugggc

SEQ ID NO: 393667 - RNA, 32 nt, Human
cucacaccaaggggagaugcaccccacggaca

SEQ ID NO: 393668 - RNA, 32 nt, Human
cucacaccacugcacuccagccugggugacag

SEQ ID NO: 393669 - RNA, 32 nt, Human
cucacaccacugcacuccauccugggcaacag

SEQ ID NO: 393670 - RNA, 32 nt, Human
cucacaccagcugugcgaugcccgcuuuuaca

SEQ ID NO: 393671 - RNA, 32 nt, Human
cucacaccauccaccuccacacugccuccugg

SEQ ID NO: 393672 - RNA, 32 nt, Human
cucacaccauuucacuuccucuuccucuccuc

SEQ ID NO: 393673 - RNA, 32 nt, Human
cucacacccaggcuggagugcagucucaacuc

SEQ ID NO: 393674 - RNA, 24 nt, Human
cucacacccauaaucccaacacuu

SEQ ID NO: 393675 - RNA, 24 nt, Human
cucacacccauaaucccagcacuu

SEQ ID NO: 393676 - RNA, 20 nt, Human
cucacacccccgcccacacu

SEQ ID NO: 393677 - RNA, 32 nt, Human
cucacaccccuuccucccagucugggaguaua

SEQ ID NO: 393678 - RNA, 24 nt, Human
cucacacccguaaucccagcacuu

SEQ ID NO: 393679 - RNA, 30 nt, Human
cucacacccguaaucccagcacuuugggag

SEQ ID NO: 393680 - RNA, 25 nt, Human
cucacacccuguaaucccagcacuu

SEQ ID NO: 393681 - RNA, 32 nt, Human
cucacacccuguaaucccagcacuuugggagg

SEQ ID NO: 393682 - RNA, 24 nt, Human
cucacaccgguaaucccaacacuu

SEQ ID NO: 393683 - RNA, 24 nt, Human
cucacaccgguaaucccagcacuu

SEQ ID NO: 393684 - RNA, 32 nt, Human
cucacaccgguaaucccagcacuuugggaggc

SEQ ID NO: 393685 - RNA, 24 nt, Human
cucacaccuacgaucacagcacuu

SEQ ID NO: 393686 - RNA, 24 nt, Human
cucacaccuauaaucccaacacuu

SEQ ID NO: 393687 - RNA, 24 nt, Human
cucacaccuauaaucccaauacuu

SEQ ID NO: 393688 - RNA, 23 nt, Human
cucacaccuauaaucccagcacu

SEQ ID NO: 393689 - RNA, 24 nt, Human
cucacaccuauaaucccagcacuu

SEQ ID NO: 393690 - RNA, 32 nt, Human
cucacaccuauaaucccagcacuuuaggaggc

SEQ ID NO: 393691 - RNA, 32 nt, Human
cucacaccuauaaucccagcacuuugggaagc

SEQ ID NO: 393692 - RNA, 32 nt, Human
cucacaccuauaaucccagcacuuugggaggc

SEQ ID NO: 393693 - RNA, 32 nt, Human
cucacaccuauaaucccagcacuuugggaggg

SEQ ID NO: 393694 - RNA, 32 nt, Human
cucacaccuauaaucccagcacuuugggaggu

SEQ ID NO: 393695 - RNA, 24 nt, Human
cucacaccuauaaucccagcccuu

SEQ ID NO: 393696 - RNA, 24 nt, Human
cucacaccuauaaucccagcgcuu

SEQ ID NO: 393697 - RNA, 24 nt, Human
cucacaccuauaauccuagcgcuu

SEQ ID NO: 393698 - RNA, 24 nt, Human
cucacaccuauaauccuaggacuu

SEQ ID NO: 393699 - RNA, 32 nt, Human
cucacaccuauaauccuaggacuuugggaggc

SEQ ID NO: 393700 - RNA, 24 nt, Human
cucacaccuauaauccuggcacuu

SEQ ID NO: 393701 - RNA, 23 nt, Human
cucacaccuauaaucgagcacuu

SEQ ID NO: 393702 - RNA, 32 nt, Human
cucacaccuauaaucucagcacuuugggaggc

SEQ ID NO: 393703 - RNA, 24 nt, Human
cucacaccuauaauuccagcacuu

SEQ ID NO: 393704 - RNA, 23 nt, Human
cucacaccuauagucccagcacu

SEQ ID NO: 393705 - RNA, 22 nt, Human
cucacaccuaugaucucagcac

SEQ ID NO: 393706 - RNA, 17 nt, Human
cucacaccucagccucc

SEQ ID NO: 393707 - RNA, 24 nt, Human
cucacaccucuaaucccagcacuu

SEQ ID NO: 393708 - RNA, 32 nt, Human
cucacaccucuaaucccagcacuuugggaggc

SEQ ID NO: 393709 - RNA, 32 nt, Human
cucacaccucuccugggacuggaacccuucag

SEQ ID NO: 393710 - RNA, 24 nt, Human
cucacaccugaaaucccagcacuu

SEQ ID NO: 393711 - RNA, 32 nt, Human
cucacaccugaaaucccagcacuuugggaggc

SEQ ID NO: 393712 - RNA, 32 nt, Human
cucacaccugaaaucuuagcacuucgggaggc

SEQ ID NO: 393713 - RNA, 24 nt, Human
cucacaccugcaaucccaccacuu

SEQ ID NO: 393714 - RNA, 24 nt, Human
cucacaccugcaaucccagcacuu

SEQ ID NO: 393715 - RNA, 32 nt, Human
cucacaccugcaaucccagcacuuuggaaggc

SEQ ID NO: 393716 - RNA, 32 nt, Human
cucacaccugcaaucccagcacuuugggagac

SEQ ID NO: 393717 - RNA, 32 nt, Human
cucacaccugcaaucccagcacuuugggaggc

SEQ ID NO: 393718 - RNA, 32 nt, Human
cucacaccugcacuuaccagcauccagaauau

SEQ ID NO: 393719 - RNA, 32 nt, Human
cucacaccugggaaggggcucucuaaaucccg

SEQ ID NO: 393720 - RNA, 32 nt, Human
cucacaccuguaaacccaacacuuugggaggc

SEQ ID NO: 393721 - RNA, 24 nt, Human
cucacaccuguaaacccagcacuu

SEQ ID NO: 393722 - RNA, 32 nt, Human
cucacaccuguaaacccagcacuuugggagac

SEQ ID NO: 393723 - RNA, 32 nt, Human
cucacaccuguaaaccuaacacuuugggaggc

SEQ ID NO: 393724 - RNA, 24 nt, Human
cucacaccuguaaccccaacacuu

SEQ ID NO: 393725 - RNA, 23 nt, Human
cucacaccuguaaccccagcacu

SEQ ID NO: 393726 - RNA, 24 nt, Human
cucacaccuguaaccccagcacuu

SEQ ID NO: 393727 - RNA, 32 nt, Human
cucacaccuguaaccccagcacuuugggacgc

SEQ ID NO: 393728 - RNA, 32 nt, Human
cucacaccuguaaccccagcacuuugggaggc

SEQ ID NO: 393729 - RNA, 32 nt, Human
cucacaccuguaacccccagcacuuugggagg

SEQ ID NO: 393730 - RNA, 24 nt, Human
cucacaccuguaacccuagcacuu

SEQ ID NO: 393731 - RNA, 32 nt, Human
cucacaccuguaacccuagcacuuugggaggc

SEQ ID NO: 393732 - RNA, 32 nt, Human
cucacaccuguaauaccagcacuuugggaagu

SEQ ID NO: 393733 - RNA, 32 nt, Human
cucacaccuguaaucaaaacacuuugggaggc

SEQ ID NO: 393734 - RNA, 32 nt, Human
cucacaccuguaaucacagcacuuugggaggc

SEQ ID NO: 393735 - RNA, 32 nt, Human
cucacaccuguaauccaagcacuuugggaggc

SEQ ID NO: 393736 - RNA, 18 nt, Human
cucacaccuguaauccca

SEQ ID NO: 393737 - RNA, 24 nt, Human
cucacaccuguaaucccaacacuu

SEQ ID NO: 393738 - RNA, 32 nt, Human
cucacaccuguaaucccaacacuuuggaaggc

SEQ ID NO: 393739 - RNA, 32 nt, Human
cucacaccuguaaucccaacacuuugggaagc

SEQ ID NO: 393740 - RNA, 32 nt, Human
cucacaccuguaaucccaacacuuugggaauc

SEQ ID NO: 393741 - RNA, 32 nt, Human
cucacaccuguaaucccaacacuuugggacgu

SEQ ID NO: 393742 - RNA, 32 nt, Human
cucacaccuguaaucccaacacuuugggagcc

SEQ ID NO: 393743 - RNA, 32 nt, Human
cucacaccuguaaucccaacacuuugggaggc

SEQ ID NO: 393744 - RNA, 32 nt, Human
cucacaccuguaaucccaacacuuugggaugc

SEQ ID NO: 393745 - RNA, 24 nt, Human
cucacaccuguaaucccaacaguu

SEQ ID NO: 393746 - RNA, 24 nt, Human
cucacaccuguaaucccaacauuu

SEQ ID NO: 393747 - RNA, 32 nt, Human
cucacaccuguaaucccaacauuuugggaacc

SEQ ID NO: 393748 - RNA, 32 nt, Human
cucacaccuguaaucccaacauuuugggaggc

SEQ ID NO: 393749 - RNA, 23 nt, Human
cucacaccuguaaucccaauacu

SEQ ID NO: 393750 - RNA, 32 nt, Human
cucacaccuguaaucccaauacuuuggguggc

SEQ ID NO: 393751 - RNA, 24 nt, Human
cucacaccuguaaucccagaacuu

SEQ ID NO: 393752 - RNA, 32 nt, Human
cucacaccuguaaucccagaacuuugggaggc

SEQ ID NO: 393753 - RNA, 20 nt, Human
cucacaccuguaaucccagc

SEQ ID NO: 393754 - RNA, 21 nt, Human
cucacaccuguaaucccagca

SEQ ID NO: 393755 - RNA, 32 nt, Human
cucacaccuguaaucccagcaauuugggagac

SEQ ID NO: 393756 - RNA, 22 nt, Human
cucacaccuguaaucccagcac

SEQ ID NO: 393757 - RNA, 32 nt, Human
cucacaccuguaaucccagcacacugggaggc

SEQ ID NO: 393758 - RNA, 32 nt, Human
cucacaccuguaaucccagcaccuugggaggc

SEQ ID NO: 393759 - RNA, 23 nt, Human
cucacaccuguaaucccagcacu

SEQ ID NO: 393760 - RNA, 32 nt, Human
cucacaccuguaaucccagcacuaugggaggc

SEQ ID NO: 393761 - RNA, 32 nt, Human
cucacaccuguaaucccagcacucugggaggc

SEQ ID NO: 393762 - RNA, 32 nt, Human
cucacaccuguaaucccagcacucugggaggg

SEQ ID NO: 393763 - RNA, 32 nt, Human
cucacaccuguaaucccagcacuguggaaaga

SEQ ID NO: 393764 - RNA, 24 nt, Human
cucacaccuguaaucccagcacuu

SEQ ID NO: 393765 - RNA, 32 nt, Human
cucacaccuguaaucccagcacuuagggaaga

SEQ ID NO: 393766 - RNA, 32 nt, Human
cucacaccuguaaucccagcacuuagggaggc

SEQ ID NO: 393767 - RNA, 32 nt, Human
cucacaccuguaaucccagcacuuagguaggc

SEQ ID NO: 393768 - RNA, 32 nt, Human
cucacaccuguaaucccagcacuucgggaagc

SEQ ID NO: 393769 - RNA, 32 nt, Human
cucacaccuguaaucccagcacuucgggaggc

SEQ ID NO: 393770 - RNA, 32 nt, Human
cucacaccuguaaucccagcacuucgggaggu

SEQ ID NO: 393771 - RNA, 32 nt, Human
cucacaccuguaaucccagcacuugggaagcc

SEQ ID NO: 393772 - RNA, 32 nt, Human
cucacaccuguaaucccagcacuuggggaagc

SEQ ID NO: 393773 - RNA, 32 nt, Human
cucacaccuguaaucccagcacuuggggaggc

SEQ ID NO: 393774 - RNA, 32 nt, Human
cucacaccuguaaucccagcacuuuaggaggu

SEQ ID NO: 393775 - RNA, 32 nt, Human
cucacaccuguaaucccagcacuuucggaggc

SEQ ID NO: 393776 - RNA, 32 nt, Human
cucacaccuguaaucccagcacuuugagagga

SEQ ID NO: 393777 - RNA, 32 nt, Human
cucacaccuguaaucccagcacuuugagaggc

SEQ ID NO: 393778 - RNA, 32 nt, Human
cucacaccuguaaucccagcacuuugcggggc

SEQ ID NO: 393779 - RNA, 32 nt, Human
cucacaccuguaaucccagcacuuuggcaggc

SEQ ID NO: 393780 - RNA, 32 nt, Human
cucacaccuguaaucccagcacuuugggaacc

SEQ ID NO: 393781 - RNA, 32 nt, Human
cucacaccuguaaucccagcacuuugggaagc

SEQ ID NO: 393782 - RNA, 32 nt, Human
cucacaccuguaaucccagcacuuugggaagu

SEQ ID NO: 393783 - RNA, 32 nt, Human
cucacaccuguaaucccagcacuuugggacac

SEQ ID NO: 393784 - RNA, 32 nt, Human
cucacaccuguaaucccagcacuuugggagac

SEQ ID NO: 393785 - RNA, 32 nt, Human
cucacaccuguaaucccagcacuuugggagcc

SEQ ID NO: 393786 - RNA, 32 nt, Human
cucacaccuguaaucccagcacuuugggaggc

SEQ ID NO: 393787 - RNA, 32 nt, Human
cucacaccuguaaucccagcacuuugggaggg

SEQ ID NO: 393788 - RNA, 32 nt, Human
cucacaccuguaaucccagcacuuugggaggu

SEQ ID NO: 393789 - RNA, 32 nt, Human
cucacaccuguaaucccagcacuuugggaguc

SEQ ID NO: 393790 - RNA, 32 nt, Human
cucacaccuguaaucccagcacuuugggauua

SEQ ID NO: 393791 - RNA, 32 nt, Human
cucacaccuguaaucccagcacuuugggauuc

SEQ ID NO: 393792 - RNA, 32 nt, Human
cucacaccuguaaucccagcacuuuggggagc

SEQ ID NO: 393793 - RNA, 32 nt, Human
cucacaccuguaaucccagcacuuuggguggc

SEQ ID NO: 393794 - RNA, 32 nt, Human
cucacaccuguaaucccagcacuuugguaggc

SEQ ID NO: 393795 - RNA, 32 nt, Human
cucacaccuguaaucccagcacuuuuggaggc

SEQ ID NO: 393796 - RNA, 24 nt, Human
cucacaccuguaaucccagcaguu

SEQ ID NO: 393797 - RNA, 32 nt, Human
cucacaccuguaaucccagcaguuuggaaggc

SEQ ID NO: 393798 - RNA, 32 nt, Human
cucacaccuguaaucccagcaguuugggaggc

SEQ ID NO: 393799 - RNA, 24 nt, Human
cucacaccuguaaucccagcauuu

SEQ ID NO: 393800 - RNA, 32 nt, Human
cucacaccuguaaucccagcauuuugggaagc

SEQ ID NO: 393801 - RNA, 32 nt, Human
cucacaccuguaaucccagcauuuugggaggc

SEQ ID NO: 393802 - RNA, 32 nt, Human
cucacaccuguaaucccagcccuuugggaggc

SEQ ID NO: 393803 - RNA, 22 nt, Human
cucacaccuguaaucccagccu

SEQ ID NO: 393804 - RNA, 24 nt, Human
cucacaccuguaaucccagcgcuu

SEQ ID NO: 393805 - RNA, 32 nt, Human
cucacaccuguaaucccagcgcuuugggaggc

SEQ ID NO: 393806 - RNA, 24 nt, Human
cucacaccuguaaucccagcuacu

SEQ ID NO: 393807 - RNA, 32 nt, Human
cucacaccuguaaucccagcuacuugggaggc

SEQ ID NO: 393808 - RNA, 24 nt, Human
cucacaccuguaaucccagcucuu

SEQ ID NO: 393809 - RNA, 32 nt, Human
cucacaccuguaaucccagcucuuuggaggcc

SEQ ID NO: 393810 - RNA, 32 nt, Human
cucacaccuguaaucccagcucuuugggaggc

SEQ ID NO: 393811 - RNA, 32 nt, Human
cucacaccuguaaucccagcuguuugggaggc

SEQ ID NO: 393812 - RNA, 24 nt, Human
cucacaccuguaaucccaggacuu

SEQ ID NO: 393813 - RNA, 32 nt, Human
cucacaccuguaaucccaggacuuugggaggc

SEQ ID NO: 393814 - RNA, 22 nt, Human
cucacaccuguaaucccaguac

SEQ ID NO: 393815 - RNA, 32 nt, Human
cucacaccuguaaucccaguaccuugggaggc

SEQ ID NO: 393816 - RNA, 24 nt, Human
cucacaccuguaaucccaguacuu

SEQ ID NO: 393817 - RNA, 32 nt, Human
cucacaccuguaaucccaguacuuugggaggc

SEQ ID NO: 393818 - RNA, 32 nt, Human
cucacaccuguaaucccagugcuuugggaggc

SEQ ID NO: 393819 - RNA, 25 nt, Human
cucacaccuguaauccccagcacuu

SEQ ID NO: 393820 - RNA, 32 nt, Human
cucacaccuguaauccccagcacuuugggagg

SEQ ID NO: 393821 - RNA, 23 nt, Human
cucacaccuguaaucccgcacuu

SEQ ID NO: 393822 - RNA, 24 nt, Human
cucacaccuguaaucccggcacuu

SEQ ID NO: 393823 - RNA, 24 nt, Human
cucacaccuguaaucccugcacuu

SEQ ID NO: 393824 - RNA, 32 nt, Human
cucacaccuguaaucccugcacuuugggaggc

SEQ ID NO: 393825 - RNA, 24 nt, Human
cucacaccuguaaucccugcauuu

SEQ ID NO: 393826 - RNA, 24 nt, Human
cucacaccuguaauccgaguacuu

SEQ ID NO: 393827 - RNA, 32 nt, Human
cucacaccuguaauccgaguacuuugcggggc

SEQ ID NO: 393828 - RNA, 24 nt, Human
cucacaccuguaauccuaacacuu

SEQ ID NO: 393829 - RNA, 32 nt, Human
cucacaccuguaauccuaacacuuggggaggc

SEQ ID NO: 393830 - RNA, 32 nt, Human
cucacaccuguaauccuaacacuuugggaggc

SEQ ID NO: 393831 - RNA, 28 nt, Human
cucacaccuguaauccuaaguaacacuu

SEQ ID NO: 393832 - RNA, 22 nt, Human
cucacaccuguaauccuagcac

SEQ ID NO: 393833 - RNA, 32 nt, Human
cucacaccuguaauccuagcacauugggaggc

SEQ ID NO: 393834 - RNA, 32 nt, Human
cucacaccuguaauccuagcacguggggaggc

SEQ ID NO: 393835 - RNA, 24 nt, Human
cucacaccuguaauccuagcacuu

SEQ ID NO: 393836 - RNA, 32 nt, Human
cucacaccuguaauccuagcacuuugggaggc

SEQ ID NO: 393837 - RNA, 32 nt, Human
cucacaccuguaauccuagcacuuugggaggu

SEQ ID NO: 393838 - RNA, 22 nt, Human
cucacaccuguaauccuagcau

SEQ ID NO: 393839 - RNA, 32 nt, Human
cucacaccuguaauccuagcaucuugggaggc

SEQ ID NO: 393840 - RNA, 24 nt, Human
cucacaccuguaauccuagcgcuu

SEQ ID NO: 393841 - RNA, 32 nt, Human
cucacaccuguaauccuagcgcuuugggaggc

SEQ ID NO: 393842 - RNA, 32 nt, Human
cucacaccuguaauccugcacuuugggagucu

SEQ ID NO: 393843 - RNA, 32 nt, Human
cucacaccuguaauccuugcauuuuggaaggc

SEQ ID NO: 393844 - RNA, 32 nt, Human
cucacaccuguaaucucaacacuuugggaggc

SEQ ID NO: 393845 - RNA, 24 nt, Human
cucacaccuguaaucucaacgcuu

SEQ ID NO: 393846 - RNA, 32 nt, Human
cucacaccuguaaucucaacgcuuugggaggg

SEQ ID NO: 393847 - RNA, 21 nt, Human
cucacaccuguaaucucagca

SEQ ID NO: 393848 - RNA, 22 nt, Human
cucacaccuguaaucucagcac

SEQ ID NO: 393849 - RNA, 32 nt, Human
cucacaccuguaaucucagcacguugggaagu

SEQ ID NO: 393850 - RNA, 32 nt, Human
cucacaccuguaaucucagcacucugggaggc

SEQ ID NO: 393851 - RNA, 24 nt, Human
cucacaccuguaaucucagcacuu

SEQ ID NO: 393852 - RNA, 32 nt, Human
cucacaccuguaaucucagcacuuugggaagu

SEQ ID NO: 393853 - RNA, 32 nt, Human
cucacaccuguaaucucagcacuuugggaggc

SEQ ID NO: 393854 - RNA, 32 nt, Human
cucacaccuguaaucucagcacuuuggguggu

SEQ ID NO: 393855 - RNA, 24 nt, Human
cucacaccuguaaucucagcauuu

SEQ ID NO: 393856 - RNA, 32 nt, Human
cucacaccuguaaucucagcauuuugggaggc

SEQ ID NO: 393857 - RNA, 22 nt, Human
cucacaccuguaaucucagccu

SEQ ID NO: 393858 - RNA, 32 nt, Human
cucacaccuguaaucucagccucccagacggc

SEQ ID NO: 393859 - RNA, 24 nt, Human
cucacaccuguaaucugaacacuu

SEQ ID NO: 393860 - RNA, 32 nt, Human
cucacaccuguaaucugaacacuuugggaggc

SEQ ID NO: 393861 - RNA, 22 nt, Human
cucacaccuguaaucugagcac

SEQ ID NO: 393862 - RNA, 32 nt, Human
cucacaccuguaaucugagcacauugggaggc

SEQ ID NO: 393863 - RNA, 32 nt, Human
cucacaccuguaaucugagcauucugggaggc

SEQ ID NO: 393864 - RNA, 23 nt, Human
cucacaccuguaaucuuaacacu

SEQ ID NO: 393865 - RNA, 32 nt, Human
cucacaccuguaaucuuaacacugugggaggc

SEQ ID NO: 393866 - RNA, 20 nt, Human
cucacaccuguaaugccagc

SEQ ID NO: 393867 - RNA, 32 nt, Human
cucacaccuguaaugccagcacuuugggcagc

SEQ ID NO: 393868 - RNA, 24 nt, Human
cucacaccuguaauuccaacacuu

SEQ ID NO: 393869 - RNA, 32 nt, Human
cucacaccuguaauuccaacacuuugggaggc

SEQ ID NO: 393870 - RNA, 24 nt, Human
cucacaccuguaauuccagcacuu

SEQ ID NO: 393871 - RNA, 32 nt, Human
cucacaccuguaauuccagcacuuugggagac

SEQ ID NO: 393872 - RNA, 32 nt, Human
cucacaccuguaauuccagcacuuugggaggc

SEQ ID NO: 393873 - RNA, 32 nt, Human
cucacaccuguaauuccagcacuuugggaggu

SEQ ID NO: 393874 - RNA, 32 nt, Human
cucacaccuguaauucuagcacuuugggaggc

SEQ ID NO: 393875 - RNA, 24 nt, Human
cucacaccuguaauugcagcacuu

SEQ ID NO: 393876 - RNA, 22 nt, Human
cucacaccuguaauuucagcac

SEQ ID NO: 393877 - RNA, 24 nt, Human
cucacaccuguacucccagcacuu

SEQ ID NO: 393878 - RNA, 20 nt, Human
cucacaccuguaggacacac

SEQ ID NO: 393879 - RNA, 32 nt, Human
cucacaccuguagucccagagcuuugggaggc

SEQ ID NO: 393880 - RNA, 24 nt, Human
cucacaccuguagucccagcacuu

SEQ ID NO: 393881 - RNA, 32 nt, Human
cucacaccuguagucccagcacuuuaggaggc

SEQ ID NO: 393882 - RNA, 32 nt, Human
cucacaccuguaucccagcacuuugggaggcc

SEQ ID NO: 393883 - RNA, 24 nt, Human
cucacaccuguauucccaacacuu

SEQ ID NO: 393884 - RNA, 24 nt, Human
cucacaccuguauucccagcacuu

SEQ ID NO: 393885 - RNA, 32 nt, Human
cucacaccuguauucccagcacuuugggaggc

SEQ ID NO: 393886 - RNA, 24 nt, Human
cucacaccugucaucccagcacuu

SEQ ID NO: 393887 - RNA, 32 nt, Human
cucacaccugucaucccagcacuuugggaggc

SEQ ID NO: 393888 - RNA, 32 nt, Human
cucacaccuguccuucucaggcuggcaucucc

SEQ ID NO: 393889 - RNA, 24 nt, Human
cucacaccugugaucccaacauuu

SEQ ID NO: 393890 - RNA, 24 nt, Human
cucacaccugugaucccagcacuu

SEQ ID NO: 393891 - RNA, 32 nt, Human
cucacaccugugaucccagcacuuugggaggc

SEQ ID NO: 393892 - RNA, 27 nt, Human
cucacaccugugauccccccagcacuu

SEQ ID NO: 393893 - RNA, 22 nt, Human
cucacaccugugaucucagcac

SEQ ID NO: 393894 - RNA, 32 nt, Human
cucacaccugugcucccagcacuuugggaggc

SEQ ID NO: 393895 - RNA, 26 nt, Human
cucacaccuguggaaucccagcacuu

SEQ ID NO: 393896 - RNA, 22 nt, Human
cucacaccuguguucucagcac

SEQ ID NO: 393897 - RNA, 25 nt, Human
cucacaccuguuaaucccagcacuu

SEQ ID NO: 393898 - RNA, 32 nt, Human
cucacaccuguuaaucccagcacuucgggagg

SEQ ID NO: 393899 - RNA, 24 nt, Human
cucacaccuguuaucccagcacuu

SEQ ID NO: 393900 - RNA, 23 nt, Human
cucacaccuuaaucccagcacuu

SEQ ID NO: 393901 - RNA, 32 nt, Human
cucacaccuuaaucccagcacuuugggaggcu

SEQ ID NO: 393902 - RNA, 32 nt, Human
cucacaccuugggacccuucucuccccugugc

SEQ ID NO: 393903 - RNA, 25 nt, Human
cucacaccuuguaaucccagcacuu

SEQ ID NO: 393904 - RNA, 24 nt, Human
cucacaccuuuaaucccagcacuu

SEQ ID NO: 393905 - RNA, 32 nt, Human
cucacaccuuuaaucccagcacuuugggaagc

SEQ ID NO: 393906 - RNA, 32 nt, Human
cucacaccuuuaaucccagcacuuugggagac

SEQ ID NO: 393907 - RNA, 32 nt, Human
cucacacgccuguaaucccagcacuuugggag

SEQ ID NO: 393908 - RNA, 32 nt, Human
cucacacggaacagacagggagccggagguga

SEQ ID NO: 393909 - RNA, 32 nt, Human
cucacacggucaucaucccuacccacacacag

SEQ ID NO: 393910 - RNA, 24 nt, Human
cucacacguguaaucccaacacuu

SEQ ID NO: 393911 - RNA, 32 nt, Human
cucacacguguaaucccaacacuuugggaggc

SEQ ID NO: 393912 - RNA, 24 nt, Human
cucacacguuuaaucccagcacuu

SEQ ID NO: 393913 - RNA, 32 nt, Human
cucacacguuuaaucccagcacuuugggaggc

SEQ ID NO: 393914 - RNA, 32 nt, Human
cucacacuauaaucccagcaauuugggaggcu

SEQ ID NO: 393915 - RNA, 32 nt, Human
cucacacucagaaccucauaccccagagcaaa

SEQ ID NO: 393916 - RNA, 32 nt, Human
cucacacucagcuucagcauaagcugugaggc

SEQ ID NO: 393917 - RNA, 32 nt, Human
cucacacucagggacuucgagagugaaucaac

SEQ ID NO: 393918 - RNA, 32 nt, Human
cucacacuccaugcccagaagcagaaaugagu

SEQ ID NO: 393919 - RNA, 32 nt, Human
cucacacuccccuccauccucugagcucccug

SEQ ID NO: 393920 - RNA, 32 nt, Human
cucacacuccucucccugucuuccggcuccuu

SEQ ID NO: 393921 - RNA, 32 nt, Human
cucacacucuccucagcucucucaucuccugg

SEQ ID NO: 393922 - RNA, 32 nt, Human
cucacacucugccugcccaucucagugcugag

SEQ ID NO: 393923 - RNA, 32 nt, Human
cucacacugcaaccgcacgugcuuggaggacu

SEQ ID NO: 393924 - RNA, 32 nt, Human
cucacacugcaagcucccuggcaugggcaaag

SEQ ID NO: 393925 - RNA, 32 nt, Human
cucacacugcccaggcuggagcauaguggcaa

SEQ ID NO: 393926 - RNA, 32 nt, Human
cucacacugcuaacucuguuacugacaaaagc

SEQ ID NO: 393927 - RNA, 32 nt, Human
cucacacuggacagggcaggaggagggggccg

SEQ ID NO: 393928 - RNA, 32 nt, Human
cucacacuggccucucuaggccgagguccuuu

SEQ ID NO: 393929 - RNA, 32 nt, Human
cucacacuguaaucacagugacucaggaggcu

SEQ ID NO: 393930 - RNA, 32 nt, Human
cucacacuguaaucccagcacuuugggaggcc

SEQ ID NO: 393931 - RNA, 32 nt, Human
cucacacuguaauccccacuggagcccaggaa

SEQ ID NO: 393932 - RNA, 32 nt, Human
cucacacugucacccaggcuggagugcagugu

SEQ ID NO: 393933 - RNA, 32 nt, Human
cucacacugugacccuguugugcuccaagaac

SEQ ID NO: 393934 - RNA, 32 nt, Human
cucacacuguggcccaggcuggacuccagcac

SEQ ID NO: 393935 - RNA, 32 nt, Human
cucacacuguugcccaggcuggagugcagugg

SEQ ID NO: 393936 - RNA, 32 nt, Human
cucacacuuagucccgggagcugcaggucuua

SEQ ID NO: 393937 - RNA, 24 nt, Human
cucacacuuauaaucccagcacuu

SEQ ID NO: 393938 - RNA, 32 nt, Human
cucacacuuccaagcaccccacaccaaggaca

SEQ ID NO: 393939 - RNA, 32 nt, Human
cucacacuugccaaaaguuguggguuaggguu

SEQ ID NO: 393940 - RNA, 32 nt, Human
cucacacuugggacucaaaaauguggagucag

SEQ ID NO: 393941 - RNA, 32 nt, Human
cucacacuuguaaucacugcacuuugggaagc

SEQ ID NO: 393942 - RNA, 32 nt, Human
cucacacuuguaaucauagcacuuugggaggc

SEQ ID NO: 393943 - RNA, 24 nt, Human
cucacacuuguaaucccaacacuu

SEQ ID NO: 393944 - RNA, 32 nt, Human
cucacacuuguaaucccaacacuuuggaaggc

SEQ ID NO: 393945 - RNA, 32 nt, Human
cucacacuuguaaucccagcaauuugggaggc

SEQ ID NO: 393946 - RNA, 24 nt, Human
cucacacuuguaaucccagcacuu

SEQ ID NO: 393947 - RNA, 32 nt, Human
cucacacuuguaaucccagcacuuugggaagc

SEQ ID NO: 393948 - RNA, 32 nt, Human
cucacacuuguaaucccagcacuuugggaggc

SEQ ID NO: 393949 - RNA, 32 nt, Human
cucacacuuguaaucccagcacuuugggaugc

SEQ ID NO: 393950 - RNA, 32 nt, Human
cucacacuuguaaucccagcauuuugggaggc

SEQ ID NO: 393951 - RNA, 32 nt, Human
cucacacuuguaaucccgacacuuugggaggc

SEQ ID NO: 393952 - RNA, 32 nt, Human
cucacacuuguaauccuaguacuuugggaggc

SEQ ID NO: 393953 - RNA, 32 nt, Human
cucacacuuugucacuggaauuuuauuuauuu

SEQ ID NO: 393954 - RNA, 32 nt, Human
cucacacuuuuuauuugccguaaugaaccguc

SEQ ID NO: 393955 - RNA, 32 nt, Human
cucacagaaaaauaggcacuuugggccaaaag

SEQ ID NO: 393956 - RNA, 32 nt, Human
cucacagaaagaaacgaaagaaagcaaagcaa

SEQ ID NO: 393957 - RNA, 32 nt, Human
cucacagaaaguuggauucagagucuggaaag

SEQ ID NO: 393958 - RNA, 32 nt, Human
cucacagacccacacacauacacacugucaug

SEQ ID NO: 393959 - RNA, 32 nt, Human
cucacagagcacguguuucgcggccugggcag

SEQ ID NO: 393960 - RNA, 32 nt, Human
cucacagagcccagacugcuggaacagccaag

SEQ ID NO: 393961 - RNA, 21 nt, Human
cucacagaggaagggcaggug

SEQ ID NO: 393962 - RNA, 32 nt, Human
cucacagaggcaguuucucuuuauuuuaugua

SEQ ID NO: 393963 - RNA, 32 nt, Human
cucacagauaagacagaggcccaggggauuuu

SEQ ID NO: 393964 - RNA, 20 nt, Human
cucacagauacccccuccca

SEQ ID NO: 393965 - RNA, 22 nt, Human
cucacagcaaccuccgccuccu

SEQ ID NO: 393966 - RNA, 32 nt, Human
cucacagcaaccucugccuccuggguucaagc

SEQ ID NO: 393967 - RNA, 23 nt, Human
cucacagcaaggauggagcugaa

SEQ ID NO: 393968 - RNA, 32 nt, Human
cucacagcacagaaccuagaagcaccugcuga

SEQ ID NO: 393969 - RNA, 32 nt, Human
cucacagcacaugcuggccagccuggggccug

SEQ ID NO: 393970 - RNA, 32 nt, Human
cucacagcaccucacgacugugccucaaagcc

SEQ ID NO: 393971 - RNA, 32 nt, Human
cucacagcaggcuccaccucucaggcucaagc

SEQ ID NO: 393972 - RNA, 32 nt, Human
cucacagccacuaucagccuguccucaagggu

SEQ ID NO: 393973 - RNA, 32 nt, Human
cucacagccagccgggcugcccauucacgcag

SEQ ID NO: 393974 - RNA, 32 nt, Human
cucacagccauccugcacugucuaguuuucca

SEQ ID NO: 393975 - RNA, 32 nt, Human
cucacagcccugagugacagagaggaaggagg

SEQ ID NO: 393976 - RNA, 32 nt, Human
cucacagcccuggccacuggcagaucagcaga

SEQ ID NO: 393977 - RNA, 26 nt, Human
cucacagccuagcacgaaggcaggua

SEQ ID NO: 393978 - RNA, 32 nt, Human
cucacagcuauaaucucagcacuuugggaggc

SEQ ID NO: 393979 - RNA, 32 nt, Human
cucacagcucacuuguauucuguugacuuuua

SEQ ID NO: 393980 - RNA, 19 nt, Human
cucacagcuccucaugcca

SEQ ID NO: 393981 - RNA, 24 nt, Human
cucacagcuguaaucccagcacuu

SEQ ID NO: 393982 - RNA, 32 nt, Human
cucacagcuguaaucccagcacuuagggaggu

SEQ ID NO: 393983 - RNA, 32 nt, Human
cucacagcuguaaucccagcacuuugagguug

SEQ ID NO: 393984 - RNA, 32 nt, Human
cucacagcuguggcugcuucacuuagaugcag

SEQ ID NO: 393985 - RNA, 21 nt, Human
cucacaggaacauggagcagg

SEQ ID NO: 393986 - RNA, 32 nt, Human
cucacaggacaggagggagugagggaaagggg

SEQ ID NO: 393987 - RNA, 32 nt, Human
cucacaggaccagccacuagcgcagccucgag

SEQ ID NO: 393988 - RNA, 32 nt, Human
cucacaggagcagggagcaggagcacucuaag

SEQ ID NO: 393989 - RNA, 32 nt, Human
cucacaggagggugugagucagcucuguccgu

SEQ ID NO: 393990 - RNA, 32 nt, Human
cucacaggagggugugagucagcucugucugu

SEQ ID NO: 393991 - RNA, 32 nt, Human
cucacaggagggugugagucagcucugugugg

SEQ ID NO: 393992 - RNA, 32 nt, Human
cucacaggagggugugagucagcucugugugu

SEQ ID NO: 393993 - RNA, 32 nt, Human
cucacaggagggugugugucagcucugucucu

SEQ ID NO: 393994 - RNA, 32 nt, Human
cucacaggagggugugugucagcucugucugu

SEQ ID NO: 393995 - RNA, 32 nt, Human
cucacaggccaaagcaucagcaccagaacgca

SEQ ID NO: 393996 - RNA, 32 nt, Human
cucacaggccugcagccccacugaucaucuuc

SEQ ID NO: 393997 - RNA, 32 nt, Human
cucacaggcucugcuguucuccacuucucacc

SEQ ID NO: 393998 - RNA, 21 nt, Human
cucacagggaacacgggacag

SEQ ID NO: 393999 - RNA, 21 nt, Human
cucacagggaggaggaggcgg

SEQ ID NO: 394000 - RNA, 32 nt, Human
cucacagggagguccagccauguucucugggc

SEQ ID NO: 394001 - RNA, 32 nt, Human
cucacagggcucccucagccuggggaacauua

SEQ ID NO: 394002 - RNA, 32 nt, Human
cucacagggcuggggccugcgucccuccucgu

SEQ ID NO: 394003 - RNA, 22 nt, Human
cucacaggggccuuucucacca

SEQ ID NO: 394004 - RNA, 32 nt, Human
cucacagguacgcgguggugucggguuccugg

SEQ ID NO: 394005 - RNA, 32 nt, Human
cucacaggugcaugaggaucggacuccgccuc

SEQ ID NO: 394006 - RNA, 32 nt, Human
cucacaguauccuauaaucuuugugcucucac

SEQ ID NO: 394007 - RNA, 24 nt, Human
cucacagucacgccgcagcaugga

SEQ ID NO: 394008 - RNA, 21 nt, Human
cucacagucccugcuguggga

SEQ ID NO: 394009 - RNA, 32 nt, Human
cucacagucccugcuuuugggauuacuuaugc

SEQ ID NO: 394010 - RNA, 32 nt, Human
cucacagucuaaggcuggaaguuuaaugaacu

SEQ ID NO: 394011 - RNA, 32 nt, Human
cucacagugaggcccucagaccugccacaggg

SEQ ID NO: 394012 - RNA, 32 nt, Human
cucacagugcaaccucugcuucccagguucaa

SEQ ID NO: 394013 - RNA, 32 nt, Human
cucacaguuaggggacugggcguggcugauug

SEQ ID NO: 394014 - RNA, 32 nt, Human
cucacauacagacacacacauauauguacaga

SEQ ID NO: 394015 - RNA, 32 nt, Human
cucacauaccaaggccccuccccaccaucggu

SEQ ID NO: 394016 - RNA, 32 nt, Human
cucacauaggauuccagaacauucaugcuggg

SEQ ID NO: 394017 - RNA, 32 nt, Human
cucacauauagggaaugcagaauaaaucccau

SEQ ID NO: 394018 - RNA, 32 nt, Human
cucacauaucuaagacuuuuccauuuuucuuc

SEQ ID NO: 394019 - RNA, 32 nt, Human
cucacauaucucacauauaauguaauuucccu

SEQ ID NO: 394020 - RNA, 32 nt, Human
cucacauccagccuuggaaucuaacgggcauu

SEQ ID NO: 394021 - RNA, 18 nt, Human
cucacauccuccugccca

SEQ ID NO: 394022 - RNA, 32 nt, Human
cucacauccuuugaagaugaccaccuugaaga

SEQ ID NO: 394023 - RNA, 32 nt, Human
cucacaucucucucacucccuccaauccucac

SEQ ID NO: 394024 - RNA, 26 nt, Human
cucacaucucuugacaguuaaagccu

SEQ ID NO: 394025 - RNA, 24 nt, Human
cucacaucuguaaccccagcacuu

SEQ ID NO: 394026 - RNA, 32 nt, Human
cucacaucuguaaccccagcacuuugggaggc

SEQ ID NO: 394027 - RNA, 32 nt, Human
cucacaucuguaauccaagcacuuugggaggu

SEQ ID NO: 394028 - RNA, 24 nt, Human
cucacaucuguaaucccaacacuu

SEQ ID NO: 394029 - RNA, 32 nt, Human
cucacaucuguaaucccaacacuuugggaggc

SEQ ID NO: 394030 - RNA, 24 nt, Human
cucacaucuguaaucccagcacuu

SEQ ID NO: 394031 - RNA, 32 nt, Human
cucacaucuguaaucccagcacuuuggaaggc

SEQ ID NO: 394032 - RNA, 32 nt, Human
cucacaucuguaaucccagcacuuugggagac

SEQ ID NO: 394033 - RNA, 32 nt, Human
cucacaucuguaaucccagcacuuugggaggc

SEQ ID NO: 394034 - RNA, 32 nt, Human
cucacaucuguaaucccagcacuuugggaguc

SEQ ID NO: 394035 - RNA, 32 nt, Human
cucacaucuguaaucccagcacuuuuggaggc

SEQ ID NO: 394036 - RNA, 24 nt, Human
cucacaucuguaaucucaacacuu

SEQ ID NO: 394037 - RNA, 32 nt, Human
cucacaucuguaaucucaacacuuugggaggc

SEQ ID NO: 394038 - RNA, 32 nt, Human
cucacaucuguaaucucagcauuuugggaggc

SEQ ID NO: 394039 - RNA, 32 nt, Human
cucacaucuguaaugccagcacuuugggaggc

SEQ ID NO: 394040 - RNA, 32 nt, Human
cucacaucuuguacuccauccugggcccccug

SEQ ID NO: 394041 - RNA, 32 nt, Human
cucacaucuuuacucuguccuaccucucauuu

SEQ ID NO: 394042 - RNA, 32 nt, Human
cucacaugcauacauacacauauauacacaca

SEQ ID NO: 394043 - RNA, 32 nt, Human
cucacauggaagcagaagcugugacaaguuua

SEQ ID NO: 394044 - RNA, 32 nt, Human
cucacauggacaccuaaacaccugccgaugau

SEQ ID NO: 394045 - RNA, 32 nt, Human
cucacauggauugaggcccaguuccugggaga

SEQ ID NO: 394046 - RNA, 31 nt, Human
cucacauggcuucuccccacgaaggucccag

SEQ ID NO: 394047 - RNA, 32 nt, Human
cucacauggcuucuccccacgaaggucccagg

SEQ ID NO: 394048 - RNA, 32 nt, Human
cucacauggcuugcacucagugacaccaaauc

SEQ ID NO: 394049 - RNA, 32 nt, Human
cucacauguuccugauagugcugcaguugcuu

SEQ ID NO: 394050 - RNA, 32 nt, Human
cucacauucagaggaaguccagaucuccugag

SEQ ID NO: 394051 - RNA, 32 nt, Human
cucacauucccucugcuggucugugcuggucu

SEQ ID NO: 394052 - RNA, 24 nt, Human
cucacauucguaaucccagcacuu

SEQ ID NO: 394053 - RNA, 32 nt, Human
cucacauucuucucuucucuccucucaaaaag

SEQ ID NO: 394054 - RNA, 22 nt, Human
cucacauugucccuacaaggac

SEQ ID NO: 394055 - RNA, 32 nt, Human
cucacauuugugaacucaaacgaugugcaaua

SEQ ID NO: 394056 - RNA, 32 nt, Human
cucaccaaagcccacugccauggggccaucug

SEQ ID NO: 394057 - RNA, 32 nt, Human
cucaccaacagcaauaugacugcuaaagaacc

SEQ ID NO: 394058 - RNA, 32 nt, Human
cucaccaacauggagaaaccccgucuccacua

SEQ ID NO: 394059 - RNA, 32 nt, Human
cucaccaacauggagaaaucccaucucuacua

SEQ ID NO: 394060 - RNA, 32 nt, Human
cucaccaaccuccaacccagagccccagugag

SEQ ID NO: 394061 - RNA, 17 nt, Human
cucaccaagcuguucca

SEQ ID NO: 394062 - RNA, 32 nt, Human
cucaccaagggaaagaaagagaaaaggacucu

SEQ ID NO: 394063 - RNA, 32 nt, Human
cucaccaagggaggggaccucugggagcucuc

SEQ ID NO: 394064 - RNA, 19 nt, Human
cucaccacagcccaccugg

SEQ ID NO: 394065 - RNA, 32 nt, Human
cucaccaccauggucgggcuccuuuuguuuuu

SEQ ID NO: 394066 - RNA, 32 nt, Human
cucaccaccuccacuuuucucucacucugccc

SEQ ID NO: 394067 - RNA, 32 nt, Human
cucaccaccugccucuaaucugagcugcagcc

SEQ ID NO: 394068 - RNA, 32 nt, Human
cucaccaccugcugagcucugugugauuucug

SEQ ID NO: 394069 - RNA, 32 nt, Human
cucaccacgagggucuguggcuucauuccuua

SEQ ID NO: 394070 - RNA, 32 nt, Human
cucaccacuacacuccagccugggugacagca

SEQ ID NO: 394071 - RNA, 32 nt, Human
cucaccacucacaagcugugugacuucaaaca

SEQ ID NO: 394072 - RNA, 32 nt, Human
cucaccacugaacuccagccugggcgacagag

SEQ ID NO: 394073 - RNA, 32 nt, Human
cucaccacugcacuccagccugggcagcagag

SEQ ID NO: 394074 - RNA, 32 nt, Human
cucaccacugcugccaccucucuggccaaugg

SEQ ID NO: 394075 - RNA, 32 nt, Human
cucaccacuguacuccagccugggugacagag

SEQ ID NO: 394076 - RNA, 22 nt, Human
cucaccacuguccaguccagca

SEQ ID NO: 394077 - RNA, 32 nt, Human
cucaccacuuaagauagaagcagcagcugcau

SEQ ID NO: 394078 - RNA, 32 nt, Human
cucaccagcaaggaagagugggguauggaagu

SEQ ID NO: 394079 - RNA, 32 nt, Human
cucaccagccucucccugaagucuuggcccgg

SEQ ID NO: 394080 - RNA, 32 nt, Human
cucaccagccugggcagcagcaagaacuauuu

SEQ ID NO: 394081 - RNA, 32 nt, Human
cucaccaggaaaccuguucuucugcucauucu

SEQ ID NO: 394082 - RNA, 32 nt, Human
cucaccaggaacauucgcuucucucaccagga

SEQ ID NO: 394083 - RNA, 32 nt, Human
cucaccaggaaccgcaucccugugcugccucc

SEQ ID NO: 394084 - RNA, 32 nt, Human
cucaccaggagaaagagccacauccccacguu

SEQ ID NO: 394085 - RNA, 32 nt, Human
cucaccaggaggaagaagcaugcagggcacuc

SEQ ID NO: 394086 - RNA, 32 nt, Human
cucaccaggccugggucagguggggaggggac

SEQ ID NO: 394087 - RNA, 32 nt, Human
cucaccaggcuggagugugguagcacgaucuc

SEQ ID NO: 394088 - RNA, 32 nt, Human
cucaccagggucugaggggcagcucuggccag

SEQ ID NO: 394089 - RNA, 32 nt, Human
cucaccagugguugauuuuccaagaaauauaa

SEQ ID NO: 394090 - RNA, 18 nt, Human
cucaccauccagcugcag

SEQ ID NO: 394091 - RNA, 32 nt, Human
cucaccaugcacuccagccuagacaacagggc

SEQ ID NO: 394092 - RNA, 32 nt, Human
cucaccauuacacuccagccugggcgacaaga

SEQ ID NO: 394093 - RNA, 32 nt, Human
cucaccauuccaagucuccaccccuuucuaga

SEQ ID NO: 394094 - RNA, 21 nt, Human
cucaccauugaugaccuuugu

SEQ ID NO: 394095 - RNA, 32 nt, Human
cucaccauugcacuccagccuggaugacagag

SEQ ID NO: 394096 - RNA, 32 nt, Human
cucaccauugcacuccagccugggcgacugag

SEQ ID NO: 394097 - RNA, 32 nt, Human
cucaccauuucccagcgcuccuggggcucagu

SEQ ID NO: 394098 - RNA, 32 nt, Human
cucacccaaacagcaacauuucuaaggaacuu

SEQ ID NO: 394099 - RNA, 32 nt, Human
cucacccaaaggaaccgcuccuugucccuccu

SEQ ID NO: 394100 - RNA, 32 nt, Human
cucacccaaauuucaucucgaauuguaauccc

SEQ ID NO: 394101 - RNA, 32 nt, Human
cucacccaaccugugaugggaaucaaggggua

SEQ ID NO: 394102 - RNA, 21 nt, Human
cucacccacaaaacaauguaa

SEQ ID NO: 394103 - RNA, 32 nt, Human
cucacccacacugccugugccugcugggccca

SEQ ID NO: 394104 - RNA, 32 nt, Human
cucacccacagcaggagccccuugucuuucag

SEQ ID NO: 394105 - RNA, 32 nt, Human
cucacccacagccccugcugggcccaccaccu

SEQ ID NO: 394106 - RNA, 32 nt, Human
cucacccacccucucccucucccuucagcucu

SEQ ID NO: 394107 - RNA, 32 nt, Human
cucacccacuccaagagacugcagcccucaaa

SEQ ID NO: 394108 - RNA, 23 nt, Human
cucacccacuccauggaccucaa

SEQ ID NO: 394109 - RNA, 32 nt, Human
cucacccacuccucgcucaguuugaccacugu

SEQ ID NO: 394110 - RNA, 32 nt, Human
cucacccacuccugcguuccuguccaggcagu

SEQ ID NO: 394111 - RNA, 32 nt, Human
cucacccagacuccaggcugucuuucacugaa

SEQ ID NO: 394112 - RNA, 32 nt, Human
cucacccagccucggcugaauguggccugaga

SEQ ID NO: 394113 - RNA, 32 nt, Human
cucacccagccuggccccucugcugagcacuu

SEQ ID NO: 394114 - RNA, 32 nt, Human
cucacccaggaucuuccucaauacugcuccuc

SEQ ID NO: 394115 - RNA, 32 nt, Human
cucacccaggccugccauggguccuuagcccu

SEQ ID NO: 394116 - RNA, 22 nt, Human
cucacccaggcuggaaugcagu

SEQ ID NO: 394117 - RNA, 24 nt, Human
cucacccaggcuggaaugcagugg

SEQ ID NO: 394118 - RNA, 23 nt, Human
cucacccaggcuggagugcagug

SEQ ID NO: 394119 - RNA, 32 nt, Human
cucacccaggcuggggucugagugucacuguc

SEQ ID NO: 394120 - RNA, 32 nt, Human
cucacccaguauaccagccucuuccuggugau

SEQ ID NO: 394121 - RNA, 21 nt, Human
cucacccagugcccucucccc

SEQ ID NO: 394122 - RNA, 32 nt, Human
cucacccaguucagguguauagggaauuuuca

SEQ ID NO: 394123 - RNA, 32 nt, Human
cucacccauagucccagcuauucaggaggcua

SEQ ID NO: 394124 - RNA, 32 nt, Human
cucacccaucccacugacaccaugaagccugu

SEQ ID NO: 394125 - RNA, 32 nt, Human
cucaccccaaccuccgccuccuggguucaggc

SEQ ID NO: 394126 - RNA, 20 nt, Human
cucaccccaagaacuccagg

SEQ ID NO: 394127 - RNA, 19 nt, Human
cucaccccacaccucaaga

SEQ ID NO: 394128 - RNA, 32 nt, Human
cucaccccacaccugacacagagcaggcacuc

SEQ ID NO: 394129 - RNA, 31 nt, Human
cucaccccacccuccuguccugugucuugga

SEQ ID NO: 394130 - RNA, 21 nt, Human
cucaccccacucccaccuuug

SEQ ID NO: 394131 - RNA, 32 nt, Human
cucaccccagaacccucgggacugcgacgagg

SEQ ID NO: 394132 - RNA, 32 nt, Human
cucaccccagauugcugccagcucuuuuguuu

SEQ ID NO: 394133 - RNA, 32 nt, Human
cucaccccagcacuuccuaugggacucacgcc

SEQ ID NO: 394134 - RNA, 32 nt, Human
cucaccccagcccuccccacucccagguuaac

SEQ ID NO: 394135 - RNA, 16 nt, Human
cucacccccacccuca

SEQ ID NO: 394136 - RNA, 32 nt, Human
cucacccccacccucauguucaggguggaugu

SEQ ID NO: 394137 - RNA, 32 nt, Human
cucacccccaccucaaggucaggaugcgaaca

SEQ ID NO: 394138 - RNA, 32 nt, Human
cucacccccaggagggugcagaccucagccaa

SEQ ID NO: 394139 - RNA, 32 nt, Human
cucacccccgggcugucucacucucuggagcc

SEQ ID NO: 394140 - RNA, 32 nt, Human
cucacccccugccagugccacuccuagccagc

SEQ ID NO: 394141 - RNA, 32 nt, Human
cucacccccugcccccgcaccaaccacccaua

SEQ ID NO: 394142 - RNA, 32 nt, Human
cucacccccuggcuucugcaucucccuaaggg

SEQ ID NO: 394143 - RNA, 32 nt, Human
cucacccccuguaaucccagcacuuugggaag

SEQ ID NO: 394144 - RNA, 32 nt, Human
cucaccccgggcuaccuccugucacuacucac

SEQ ID NO: 394145 - RNA, 18 nt, Human
cucaccccuacucgggca

SEQ ID NO: 394146 - RNA, 20 nt, Human
cucaccccucaccauccuuc

SEQ ID NO: 394147 - RNA, 32 nt, Human
cucaccccucagcuccccuuggggcccagcug

SEQ ID NO: 394148 - RNA, 32 nt, Human
cucaccccucauucuguccuccggacuuagga

SEQ ID NO: 394149 - RNA, 32 nt, Human
cucaccccuccuggcccaggccuugcugacuc

SEQ ID NO: 394150 - RNA, 22 nt, Human
cucaccccucuauccauuccuc

SEQ ID NO: 394151 - RNA, 32 nt, Human
cucaccccugcacuccagccugggcaacagag

SEQ ID NO: 394152 - RNA, 32 nt, Human
cucaccccugcacugagcccccuuagaucuac

SEQ ID NO: 394153 - RNA, 32 nt, Human
cucaccccugcccucuugcacucucccugccc

SEQ ID NO: 394154 - RNA, 32 nt, Human
cucaccccugcucugcccucugcccuaggaag

SEQ ID NO: 394155 - RNA, 32 nt, Human
cucaccccugcucuggccaugugccgcgccug

SEQ ID NO: 394156 - RNA, 32 nt, Human
cucaccccuggaaucccagcacuuugggaggc

SEQ ID NO: 394157 - RNA, 32 nt, Human
cucaccccuguaacccuagcacuuuaggaaau

SEQ ID NO: 394158 - RNA, 18 nt, Human
cucaccccuguaauccca

SEQ ID NO: 394159 - RNA, 32 nt, Human
cucaccccuguaaucccagcacuuugggaggc

SEQ ID NO: 394160 - RNA, 32 nt, Human
cucaccccuguaaucccagcacuuuggguggg

SEQ ID NO: 394161 - RNA, 32 nt, Human
cucaccccuguaaucccagcacuuugugaggc

SEQ ID NO: 394162 - RNA, 32 nt, Human
cucaccccuguaaucccaguacuuugggaggc

SEQ ID NO: 394163 - RNA, 32 nt, Human
cucaccccuguaauccuagcacuuugggaggc

SEQ ID NO: 394164 - RNA, 32 nt, Human
cucaccccuguaaucgcagcacuuugggaggc

SEQ ID NO: 394165 - RNA, 32 nt, Human
cucaccccuguaaucucagcacuuuggguggc

SEQ ID NO: 394166 - RNA, 32 nt, Human
cucaccccuguaaucucagcauuuugggaggc

SEQ ID NO: 394167 - RNA, 32 nt, Human
cucaccccuucccuggccucugggccucacug

SEQ ID NO: 394168 - RNA, 32 nt, Human
cucaccccuuuaaucccagcacuuuggaaggc

SEQ ID NO: 394169 - RNA, 32 nt, Human
cucaccccuuuuugccccuccugccccuucca

SEQ ID NO: 394170 - RNA, 28 nt, Human
cucacccgaagggcugccucacucugug

SEQ ID NO: 394171 - RNA, 32 nt, Human
cucacccgcacaccguccgcgcacgccugagg

SEQ ID NO: 394172 - RNA, 32 nt, Human
cucacccgcuccacgcccuccugggccgagug

SEQ ID NO: 394173 - RNA, 32 nt, Human
cucacccgggcuugcaccaccagucuucaccu

SEQ ID NO: 394174 - RNA, 32 nt, Human
cucacccuagaugaguccuuugguucgguggu

SEQ ID NO: 394175 - RNA, 32 nt, Human
cucacccuauuccagggacacagucugcuugg

SEQ ID NO: 394176 - RNA, 32 nt, Human
cucacccuauugcccaggcuggagugcaaugg

SEQ ID NO: 394177 - RNA, 21 nt, Human
cucacccucaccccauccuuc

SEQ ID NO: 394178 - RNA, 32 nt, Human
cucacccucaguagcugggauuauuggcaugc

SEQ ID NO: 394179 - RNA, 32 nt, Human
cucacccuccaccccugcuauucugccauguc

SEQ ID NO: 394180 - RNA, 32 nt, Human
cucacccuccacccucugccuugcaauacgca

SEQ ID NO: 394181 - RNA, 32 nt, Human
cucacccucccaaagugcugggauuauaggca

SEQ ID NO: 394182 - RNA, 32 nt, Human
cucacccuccucccucucccuccuccucccuc

SEQ ID NO: 394183 - RNA, 32 nt, Human
cucacccuccugagcugggauuacaggcgccu

SEQ ID NO: 394184 - RNA, 18 nt, Human
cucacccucuaccucccu

SEQ ID NO: 394185 - RNA, 22 nt, Human
cucacccucuccgcacaccucu

SEQ ID NO: 394186 - RNA, 32 nt, Human
cucacccucucuggaccucaucuguaagagga

SEQ ID NO: 394187 - RNA, 18 nt, Human
cucacccucugcccuucu

SEQ ID NO: 394188 - RNA, 32 nt, Human
cucacccucugccucacucccaaugucuccuu

SEQ ID NO: 394189 - RNA, 32 nt, Human
cucacccucugccugcccuguccuuccccugg

SEQ ID NO: 394190 - RNA, 32 nt, Human
cucacccugcagcucccgcaccugugccugcc

SEQ ID NO: 394191 - RNA, 32 nt, Human
cucacccugccagagcagcuguaggagaugga

SEQ ID NO: 394192 - RNA, 32 nt, Human
cucacccugcccuccuccccagccuggaaucg

SEQ ID NO: 394193 - RNA, 20 nt, Human
cucacccugcuccccagaca

SEQ ID NO: 394194 - RNA, 32 nt, Human
cucacccugcucccucucgccccuucucuccc

SEQ ID NO: 394195 - RNA, 24 nt, Human
cucacccugcuuucguacaaggaa

SEQ ID NO: 394196 - RNA, 19 nt, Human
cucacccugggcacccucu

SEQ ID NO: 394197 - RNA, 22 nt, Human
cucacccugggcacccucuuca

SEQ ID NO: 394198 - RNA, 32 nt, Human
cucacccuggggacaugccuguugauaacaug

SEQ ID NO: 394199 - RNA, 32 nt, Human
cucacccugucacccaggcuggaaugcaaugg

SEQ ID NO: 394200 - RNA, 32 nt, Human
cucacccugucgcccaggcuggagugcaaugc

SEQ ID NO: 394201 - RNA, 32 nt, Human
cucacccuguugcccaggcuacagugcaaugg

SEQ ID NO: 394202 - RNA, 32 nt, Human
cucacccuguugcccaggcuggagugcaaugg

SEQ ID NO: 394203 - RNA, 18 nt, Human
cucacccuuccacuuuca

SEQ ID NO: 394204 - RNA, 19 nt, Human
cucacccuucuuucuggca

SEQ ID NO: 394205 - RNA, 24 nt, Human
cucacccuuguaaucccagcacuu

SEQ ID NO: 394206 - RNA, 32 nt, Human
cucacccuuguaaucccagcacuuugggaggc

SEQ ID NO: 394207 - RNA, 32 nt, Human
cucacccuuuccaaacuccagaaaucuugucu

SEQ ID NO: 394208 - RNA, 32 nt, Human
cucaccgacacagcaggagagcagcuuggaac

SEQ ID NO: 394209 - RNA, 32 nt, Human
cucaccgagcccucuuccccagcuccucugaa

SEQ ID NO: 394210 - RNA, 32 nt, Human
cucaccgagguggguacccugcccaccgccag

SEQ ID NO: 394211 - RNA, 32 nt, Human
cucaccgcaaccuccaccuccuggguucaagu

SEQ ID NO: 394212 - RNA, 32 nt, Human
cucaccgcaaccuccgccuccuggguucaagc

SEQ ID NO: 394213 - RNA, 32 nt, Human
cucaccgcaaccuccgucuccuggguucaagc

SEQ ID NO: 394214 - RNA, 32 nt, Human
cucaccgcaaccucugccuccuggguucaagc

SEQ ID NO: 394215 - RNA, 32 nt, Human
cucaccgcagccucaaacuccccagcucgggu

SEQ ID NO: 394216 - RNA, 32 nt, Human
cucaccgcagccuccgccuccuggggucaggc

SEQ ID NO: 394217 - RNA, 32 nt, Human
cucaccgcaggaagcaguuuggguuuugaaag

SEQ ID NO: 394218 - RNA, 32 nt, Human
cucaccgccagguuccagcccaggaagcgcuc

SEQ ID NO: 394219 - RNA, 22 nt, Human
cucaccgccuccucuucgggca

SEQ ID NO: 394220 - RNA, 32 nt, Human
cucaccgcgaagguccacggcuucauucuuua

SEQ ID NO: 394221 - RNA, 32 nt, Human
cucaccgcgaggguccguggcuucauucuuga

SEQ ID NO: 394222 - RNA, 32 nt, Human
cucaccgcguccaggcgucagugaggggcuau

SEQ ID NO: 394223 - RNA, 32 nt, Human
cucaccgcuguagcuguggcggcuggggcugc

SEQ ID NO: 394224 - RNA, 32 nt, Human
cucaccggaaggcaugggguggcguguagacc

SEQ ID NO: 394225 - RNA, 32 nt, Human
cucaccggaauacccagccaaagaaaaagguc

SEQ ID NO: 394226 - RNA, 32 nt, Human
cucaccggagcuugucuuuaaaaaugagcagg

SEQ ID NO: 394227 - RNA, 32 nt, Human
cucaccggcuuccuauuugaugcacccaggcc

SEQ ID NO: 394228 - RNA, 32 nt, Human
cucaccgggaucuggcuuuccuucccuuccca

SEQ ID NO: 394229 - RNA, 32 nt, Human
cucaccgucccccaggcuggagugccguggcg

SEQ ID NO: 394230 - RNA, 32 nt, Human
cucaccgucuuccuccuccuggucuucuacac

SEQ ID NO: 394231 - RNA, 19 nt, Human
cucaccguuucacuggaua

SEQ ID NO: 394232 - RNA, 24 nt, Human
cucaccuagagcucacucucugga

SEQ ID NO: 394233 - RNA, 32 nt, Human
cucaccuagauacuuccagaaccuucucuggg

SEQ ID NO: 394234 - RNA, 32 nt, Human
cucaccuaucuucucucuugcuccaucuacca

SEQ ID NO: 394235 - RNA, 28 nt, Human
cucaccucaacugcugccuucuguccag

SEQ ID NO: 394236 - RNA, 24 nt, Human
cucaccucacugcaaccuccaccu

SEQ ID NO: 394237 - RNA, 32 nt, Human
cucaccucacugcaaccuccaccuccuagguu

SEQ ID NO: 394238 - RNA, 32 nt, Human
cucaccucacugcaaccuccgccuccuggguu

SEQ ID NO: 394239 - RNA, 32 nt, Human
cucaccucacugcaaccucugccucccggguc

SEQ ID NO: 394240 - RNA, 32 nt, Human
cucaccucacugcaagcucugccucccgggcu

SEQ ID NO: 394241 - RNA, 32 nt, Human
cucaccuccaccuguaaugcaggagggagaau

SEQ ID NO: 394242 - RNA, 32 nt, Human
cucaccuccaucuuucaaaauauggcaagcug

SEQ ID NO: 394243 - RNA, 32 nt, Human
cucaccucccacccucugccuuugcuggugcc

SEQ ID NO: 394244 - RNA, 32 nt, Human
cucaccucccuccuggggccuuuuguuuugga

SEQ ID NO: 394245 - RNA, 32 nt, Human
cucaccuccgugugaauggaaggggcucugcu

SEQ ID NO: 394246 - RNA, 32 nt, Human
cucaccuccguguucucguucucaucucugcc

SEQ ID NO: 394247 - RNA, 32 nt, Human
cucaccucgacauucagagaacuggccuggga

SEQ ID NO: 394248 - RNA, 32 nt, Human
cucaccucgggcucccgcuccgucuccaccuc

SEQ ID NO: 394249 - RNA, 32 nt, Human
cucaccucguuccacagcuccaccuucaucuu

SEQ ID NO: 394250 - RNA, 32 nt, Human
cucaccucuacauggcgaaaaccaaggguuca

SEQ ID NO: 394251 - RNA, 32 nt, Human
cucaccucuaccuccuguccucaggccgugcg

SEQ ID NO: 394252 - RNA, 32 nt, Human
cucaccucucacccuccuccagucccacuuca

SEQ ID NO: 394253 - RNA, 32 nt, Human
cucaccucucccccgaaaacccccuauuuagc

SEQ ID NO: 394254 - RNA, 32 nt, Human
cucaccucucccugggguccccaaauccaggc

SEQ ID NO: 394255 - RNA, 32 nt, Human
cucaccucuccuccgcuagaguguuccauggc

SEQ ID NO: 394256 - RNA, 32 nt, Human
cucaccucucugaccucagcuuccucaacugg

SEQ ID NO: 394257 - RNA, 32 nt, Human
cucaccucucugcuucuugggcuccaucccaa

SEQ ID NO: 394258 - RNA, 32 nt, Human
cucaccucugcagguccugggcgcagacuuca

SEQ ID NO: 394259 - RNA, 24 nt, Human
cucaccucuguaaucccagcacuu

SEQ ID NO: 394260 - RNA, 32 nt, Human
cucaccucuguaaucccagcacuuugggaggc

SEQ ID NO: 394261 - RNA, 32 nt, Human
cucaccucuucuuuaccagaacgguucuuuga

SEQ ID NO: 394262 - RNA, 28 nt, Human
cucaccugagugggggccucaucuaccu

SEQ ID NO: 394263 - RNA, 20 nt, Human
cucaccugcauccucucccc

SEQ ID NO: 394264 - RNA, 32 nt, Human
cucaccugccacagagcccacacccaugccca

SEQ ID NO: 394265 - RNA, 32 nt, Human
cucaccugccauuuauggcucuugccguuuau

SEQ ID NO: 394266 - RNA, 26 nt, Human
cucaccugccccucuguucucucccc

SEQ ID NO: 394267 - RNA, 22 nt, Human
cucaccugccugaccugcccca

SEQ ID NO: 394268 - RNA, 25 nt, Human
cucaccugccugcccuccccucccc

SEQ ID NO: 394269 - RNA, 32 nt, Human
cucaccugcucgggcccugccugcugggcccu

SEQ ID NO: 394270 - RNA, 32 nt, Human
cucaccugcuggccccucaccugggcaccugg

SEQ ID NO: 394271 - RNA, 32 nt, Human
cucaccuggcagcugccgucucugcccccugg

SEQ ID NO: 394272 - RNA, 32 nt, Human
cucaccuggcuugcuugggcccaguguggggg

SEQ ID NO: 394273 - RNA, 32 nt, Human
cucaccugggcuccccuccugaggcagugcag

SEQ ID NO: 394274 - RNA, 22 nt, Human
cucaccugguucucucucccca

SEQ ID NO: 394275 - RNA, 32 nt, Human
cucaccugucucuauucuuucaacagguugau

SEQ ID NO: 394276 - RNA, 23 nt, Human
cucaccugucuguucucucccca

SEQ ID NO: 394277 - RNA, 32 nt, Human
cucaccugugacaccaagacccaccccaaucc

SEQ ID NO: 394278 - RNA, 32 nt, Human
cucaccugugcuggggacccugugggagcagc

SEQ ID NO: 394279 - RNA, 32 nt, Human
cucaccuguggaauuuggugucagcuaaaagg

SEQ ID NO: 394280 - RNA, 32 nt, Human
cucaccuguguuuccucaguggcuccaccucu

SEQ ID NO: 394281 - RNA, 32 nt, Human
cucaccuuaccccauagcaucuugcggcccag

SEQ ID NO: 394282 - RNA, 32 nt, Human
cucaccuucccucccccugcuuuuuaauuucu

SEQ ID NO: 394283 - RNA, 32 nt, Human
cucaccuucccucccuuaccccaagcaaggcc

SEQ ID NO: 394284 - RNA, 32 nt, Human
cucaccuuccucaccccuccucugacccaccc

SEQ ID NO: 394285 - RNA, 32 nt, Human
cucaccuucgccucugcugaagucuccccgca

SEQ ID NO: 394286 - RNA, 32 nt, Human
cucaccuucuccccacccuaccucaccucuuc

SEQ ID NO: 394287 - RNA, 32 nt, Human
cucaccuugucacccaggcuagagugcagugg

SEQ ID NO: 394288 - RNA, 25 nt, Human
cucaccuuucccaccucucucccca

SEQ ID NO: 394289 - RNA, 32 nt, Human
cucaccuuugguugugcuuccuuuccaacccu

SEQ ID NO: 394290 - RNA, 32 nt, Human
cucacgaaauaugcucucuccuuuuccaguaa

SEQ ID NO: 394291 - RNA, 32 nt, Human
cucacgaagcagaggcugggcgugguggcucu

SEQ ID NO: 394292 - RNA, 32 nt, Human
cucacgaagccggggaaacacuucagccgcag

SEQ ID NO: 394293 - RNA, 32 nt, Human
cucacgaaucagcugcaggucucuguuuugaa

SEQ ID NO: 394294 - RNA, 32 nt, Human
cucacgaauggcuccaaccuccugggugcgau

SEQ ID NO: 394295 - RNA, 23 nt, Human
cucacgacggcaccacuaggcca

SEQ ID NO: 394296 - RNA, 24 nt, Human
cucacgaggagcugggauugcagg

SEQ ID NO: 394297 - RNA, 32 nt, Human
cucacgaguagcuggaauuacaggcaggcgcc

SEQ ID NO: 394298 - RNA, 32 nt, Human
cucacgaguagcugggacuacaggcaugcacc

SEQ ID NO: 394299 - RNA, 24 nt, Human
cucacgaguagcugggauuacagg

SEQ ID NO: 394300 - RNA, 32 nt, Human
cucacgaguagcugggauuacaggcaugcgcc

SEQ ID NO: 394301 - RNA, 31 nt, Human
cucacgaugaccaggugugcucugcuguugc

SEQ ID NO: 394302 - RNA, 32 nt, Human
cucacgcaccaacauggagaaaccccgucucu

SEQ ID NO: 394303 - RNA, 32 nt, Human
cucacgcagcuccagcccaucuugcugaccua

SEQ ID NO: 394304 - RNA, 19 nt, Human
cucacgcaggagacucagu

SEQ ID NO: 394305 - RNA, 23 nt, Human
cucacgcauguaaucccagcacu

SEQ ID NO: 394306 - RNA, 32 nt, Human
cucacgcauguaaucccagcacucugggaggc

SEQ ID NO: 394307 - RNA, 24 nt, Human
cucacgcauguaaucccagcacuu

SEQ ID NO: 394308 - RNA, 32 nt, Human
cucacgcauguaaucccagcacuuugggaggc

SEQ ID NO: 394309 - RNA, 32 nt, Human
cucacgcauguaaucccugcacuuugggaggc

SEQ ID NO: 394310 - RNA, 24 nt, Human
cucacgcauguaauccuaacacuu

SEQ ID NO: 394311 - RNA, 32 nt, Human
cucacgcauguaauccuaacacuuugggaggc

SEQ ID NO: 394312 - RNA, 32 nt, Human
cucacgccaggaaucccagcacuuugggaggc

SEQ ID NO: 394313 - RNA, 24 nt, Human
cucacgccaguaaucccagcacuu

SEQ ID NO: 394314 - RNA, 32 nt, Human
cucacgccaguaaucccagcacuuuggagggc

SEQ ID NO: 394315 - RNA, 32 nt, Human
cucacgccaguaaucccagcacuuugggaggc

SEQ ID NO: 394316 - RNA, 32 nt, Human
cucacgcccauaaucccagcacuuugggaggc

SEQ ID NO: 394317 - RNA, 32 nt, Human
cucacgcccccaggaaugcaagugguuuccug

SEQ ID NO: 394318 - RNA, 32 nt, Human
cucacgcccuucaaugcugcaggauggacugg

SEQ ID NO: 394319 - RNA, 24 nt, Human
cucacgccgguaaucccagcacuu

SEQ ID NO: 394320 - RNA, 32 nt, Human
cucacgccgguaaucccagcacuuugggaggc

SEQ ID NO: 394321 - RNA, 23 nt, Human
cucacgccguaaugccaacacuu

SEQ ID NO: 394322 - RNA, 32 nt, Human
cucacgccuauaauccaagcacuuugggaggc

SEQ ID NO: 394323 - RNA, 32 nt, Human
cucacgccuauaaucccaacacuuugggaagc

SEQ ID NO: 394324 - RNA, 24 nt, Human
cucacgccuauaaucccaacaguu

SEQ ID NO: 394325 - RNA, 24 nt, Human
cucacgccuauaaucccagcacuu

SEQ ID NO: 394326 - RNA, 32 nt, Human
cucacgccuauaaucccagcacuuuaggaggc

SEQ ID NO: 394327 - RNA, 32 nt, Human
cucacgccuauaaucccagcacuuugggaggc

SEQ ID NO: 394328 - RNA, 32 nt, Human
cucacgccuauaauccuaucacuuugggaggc

SEQ ID NO: 394329 - RNA, 32 nt, Human
cucacgccuauaucccagcacuuugggaggcc

SEQ ID NO: 394330 - RNA, 32 nt, Human
cucacgccuaugaucccagcacuuugggaggc

SEQ ID NO: 394331 - RNA, 32 nt, Human
cucacgccuauuaucuuagcacuuugggaggc

SEQ ID NO: 394332 - RNA, 32 nt, Human
cucacgccucuaaucccagcacuuugggaggu

SEQ ID NO: 394333 - RNA, 32 nt, Human
cucacgccucuaaucgcagcacuuugggaggc

SEQ ID NO: 394334 - RNA, 32 nt, Human
cucacgccucuaaucucagcacuuugggaggc

SEQ ID NO: 394335 - RNA, 32 nt, Human
cucacgccugaaaucccagcacuuugggagac

SEQ ID NO: 394336 - RNA, 32 nt, Human
cucacgccugaaaucccagcacuuugggaggc

SEQ ID NO: 394337 - RNA, 32 nt, Human
cucacgccugaaaucucagcacuuugguaggc

SEQ ID NO: 394338 - RNA, 24 nt, Human
cucacgccugcaaucccagcacuu

SEQ ID NO: 394339 - RNA, 32 nt, Human
cucacgccugcaaucccagcacuuugggagac

SEQ ID NO: 394340 - RNA, 32 nt, Human
cucacgccugcaaucccagcacuuugggaggc

SEQ ID NO: 394341 - RNA, 32 nt, Human
cucacgccugcagucccagcacuuugggaggc

SEQ ID NO: 394342 - RNA, 32 nt, Human
cucacgccuggaaucccagcacuuugggaagc

SEQ ID NO: 394343 - RNA, 32 nt, Human
cucacgccuggaaucccagcacuuugggaggc

SEQ ID NO: 394344 - RNA, 32 nt, Human
cucacgccuguaaacccagcacuuuaggagcc

SEQ ID NO: 394345 - RNA, 32 nt, Human
cucacgccuguaaccccaacacuuugggaggc

SEQ ID NO: 394346 - RNA, 24 nt, Human
cucacgccuguaaccccagcacuu

SEQ ID NO: 394347 - RNA, 32 nt, Human
cucacgccuguaaccccagcacuuugggaggc

SEQ ID NO: 394348 - RNA, 24 nt, Human
cucacgccuguaaccccaucacuu

SEQ ID NO: 394349 - RNA, 32 nt, Human
cucacgccuguaaccccaucacuuugggaggc

SEQ ID NO: 394350 - RNA, 32 nt, Human
cucacgccuguaacccuagcacuuugggaguc

SEQ ID NO: 394351 - RNA, 32 nt, Human
cucacgccuguaaccucagcacuuugggaggc

SEQ ID NO: 394352 - RNA, 32 nt, Human
cucacgccuguaacuccagcacuuugggaggc

SEQ ID NO: 394353 - RNA, 32 nt, Human
cucacgccuguaauaccagcacuuugggaggc

SEQ ID NO: 394354 - RNA, 32 nt, Human
cucacgccuguaaucacaacacuuugggaggc

SEQ ID NO: 394355 - RNA, 32 nt, Human
cucacgccuguaaucacagcacuuugggaggc

SEQ ID NO: 394356 - RNA, 23 nt, Human
cucacgccuguaauccaacacuu

SEQ ID NO: 394357 - RNA, 32 nt, Human
cucacgccuguaauccaagcacuuggggaggc

SEQ ID NO: 394358 - RNA, 32 nt, Human
cucacgccuguaauccagcaauuugggaggcc

SEQ ID NO: 394359 - RNA, 32 nt, Human
cucacgccuguaauccagcacuuugggagacc

SEQ ID NO: 394360 - RNA, 32 nt, Human
cucacgccuguaauccagcacuuugggaggcc

SEQ ID NO: 394361 - RNA, 18 nt, Human
cucacgccuguaauccca

SEQ ID NO: 394362 - RNA, 22 nt, Human
cucacgccuguaaucccaacac

SEQ ID NO: 394363 - RNA, 24 nt, Human
cucacgccuguaaucccaacacuu

SEQ ID NO: 394364 - RNA, 32 nt, Human
cucacgccuguaaucccaacacuuuaggagac

SEQ ID NO: 394365 - RNA, 32 nt, Human
cucacgccuguaaucccaacacuuuaggaguc

SEQ ID NO: 394366 - RNA, 32 nt, Human
cucacgccuguaaucccaacacuuugggagcc

SEQ ID NO: 394367 - RNA, 32 nt, Human
cucacgccuguaaucccaacacuuugggaggc

SEQ ID NO: 394368 - RNA, 32 nt, Human
cucacgccuguaaucccaacacuuugggaggu

SEQ ID NO: 394369 - RNA, 24 nt, Human
cucacgccuguaaucccaacauuu

SEQ ID NO: 394370 - RNA, 32 nt, Human
cucacgccuguaaucccaacauuuugggaggc

SEQ ID NO: 394371 - RNA, 24 nt, Human
cucacgccuguaaucccaccacuu

SEQ ID NO: 394372 - RNA, 32 nt, Human
cucacgccuguaaucccaccacuuuggaaagc

SEQ ID NO: 394373 - RNA, 32 nt, Human
cucacgccuguaaucccaccacuuugggagac

SEQ ID NO: 394374 - RNA, 32 nt, Human
cucacgccuguaaucccaccacuuugggagga

SEQ ID NO: 394375 - RNA, 32 nt, Human
cucacgccuguaaucccagaacuuuaggaggc

SEQ ID NO: 394376 - RNA, 32 nt, Human
cucacgccuguaaucccagaacuuugggaagc

SEQ ID NO: 394377 - RNA, 32 nt, Human
cucacgccuguaaucccagaacuuugggaggc

SEQ ID NO: 394378 - RNA, 32 nt, Human
cucacgccuguaaucccagaauuuuaggaggc

SEQ ID NO: 394379 - RNA, 32 nt, Human
cucacgccuguaaucccagacuuugggaggcc

SEQ ID NO: 394380 - RNA, 32 nt, Human
cucacgccuguaaucccagcaaguugggaggc

SEQ ID NO: 394381 - RNA, 32 nt, Human
cucacgccuguaaucccagcaauugggaaggc

SEQ ID NO: 394382 - RNA, 32 nt, Human
cucacgccuguaaucccagcaauuugggaggc

SEQ ID NO: 394383 - RNA, 32 nt, Human
cucacgccuguaaucccagcaauuugggaggu

SEQ ID NO: 394384 - RNA, 32 nt, Human
cucacgccuguaaucccagcaauuugggaguc

SEQ ID NO: 394385 - RNA, 22 nt, Human
cucacgccuguaaucccagcac

SEQ ID NO: 394386 - RNA, 32 nt, Human
cucacgccuguaaucccagcacacugggaggc

SEQ ID NO: 394387 - RNA, 32 nt, Human
cucacgccuguaaucccagcacauugggaggc

SEQ ID NO: 394388 - RNA, 32 nt, Human
cucacgccuguaaucccagcaccuugggaggc

SEQ ID NO: 394389 - RNA, 32 nt, Human
cucacgccuguaaucccagcacgcugggaggc

SEQ ID NO: 394390 - RNA, 23 nt, Human
cucacgccuguaaucccagcacu

SEQ ID NO: 394391 - RNA, 32 nt, Human
cucacgccuguaaucccagcacuaggaggccg

SEQ ID NO: 394392 - RNA, 32 nt, Human
cucacgccuguaaucccagcacucugggaggc

SEQ ID NO: 394393 - RNA, 32 nt, Human
cucacgccuguaaucccagcacugagaggccg

SEQ ID NO: 394394 - RNA, 32 nt, Human
cucacgccuguaaucccagcacuggaaggcca

SEQ ID NO: 394395 - RNA, 32 nt, Human
cucacgccuguaaucccagcacugggaggccg

SEQ ID NO: 394396 - RNA, 32 nt, Human
cucacgccuguaaucccagcacugugggaggc

SEQ ID NO: 394397 - RNA, 24 nt, Human
cucacgccuguaaucccagcacuu

SEQ ID NO: 394398 - RNA, 32 nt, Human
cucacgccuguaaucccagcacuuaggaagac

SEQ ID NO: 394399 - RNA, 32 nt, Human
cucacgccuguaaucccagcacuuaggguggg

SEQ ID NO: 394400 - RNA, 32 nt, Human
cucacgccuguaaucccagcacuucgggaggc

SEQ ID NO: 394401 - RNA, 32 nt, Human
cucacgccuguaaucccagcacuugggaggcc

SEQ ID NO: 394402 - RNA, 32 nt, Human
cucacgccuguaaucccagcacuuggggagga

SEQ ID NO: 394403 - RNA, 32 nt, Human
cucacgccuguaaucccagcacuuggggaggc

SEQ ID NO: 394404 - RNA, 32 nt, Human
cucacgccuguaaucccagcacuuuaggaggc

SEQ ID NO: 394405 - RNA, 32 nt, Human
cucacgccuguaaucccagcacuuucggaggc

SEQ ID NO: 394406 - RNA, 32 nt, Human
cucacgccuguaaucccagcacuuugagaagc

SEQ ID NO: 394407 - RNA, 32 nt, Human
cucacgccuguaaucccagcacuuugagagac

SEQ ID NO: 394408 - RNA, 32 nt, Human
cucacgccuguaaucccagcacuuugagaggc

SEQ ID NO: 394409 - RNA, 32 nt, Human
cucacgccuguaaucccagcacuuugagaugc

SEQ ID NO: 394410 - RNA, 32 nt, Human
cucacgccuguaaucccagcacuuugcgauac

SEQ ID NO: 394411 - RNA, 32 nt, Human
cucacgccuguaaucccagcacuuugcggggc

SEQ ID NO: 394412 - RNA, 32 nt, Human
cucacgccuguaaucccagcacuuuggaaggc

SEQ ID NO: 394413 - RNA, 32 nt, Human
cucacgccuguaaucccagcacuuuggaggcc

SEQ ID NO: 394414 - RNA, 32 nt, Human
cucacgccuguaaucccagcacuuuggcaggc

SEQ ID NO: 394415 - RNA, 32 nt, Human
cucacgccuguaaucccagcacuuugggaagc

SEQ ID NO: 394416 - RNA, 32 nt, Human
cucacgccuguaaucccagcacuuugggacac

SEQ ID NO: 394417 - RNA, 32 nt, Human
cucacgccuguaaucccagcacuuugggagac

SEQ ID NO: 394418 - RNA, 32 nt, Human
cucacgccuguaaucccagcacuuugggagcc

SEQ ID NO: 394419 - RNA, 32 nt, Human
cucacgccuguaaucccagcacuuugggagga

SEQ ID NO: 394420 - RNA, 32 nt, Human
cucacgccuguaaucccagcacuuugggaggc

SEQ ID NO: 394421 - RNA, 32 nt, Human
cucacgccuguaaucccagcacuuugggaggg

SEQ ID NO: 394422 - RNA, 32 nt, Human
cucacgccuguaaucccagcacuuugggaggu

SEQ ID NO: 394423 - RNA, 32 nt, Human
cucacgccuguaaucccagcacuuugggaguc

SEQ ID NO: 394424 - RNA, 32 nt, Human
cucacgccuguaaucccagcacuuuggggagc

SEQ ID NO: 394425 - RNA, 32 nt, Human
cucacgccuguaaucccagcacuuugguaggc

SEQ ID NO: 394426 - RNA, 32 nt, Human
cucacgccuguaaucccagcacuuugguuggg

SEQ ID NO: 394427 - RNA, 32 nt, Human
cucacgccuguaaucccagcacuuuguggggc

SEQ ID NO: 394428 - RNA, 32 nt, Human
cucacgccuguaaucccagcacuuuucagagg

SEQ ID NO: 394429 - RNA, 32 nt, Human
cucacgccuguaaucccagcacuuuuggaggc

SEQ ID NO: 394430 - RNA, 32 nt, Human
cucacgccuguaaucccagcacuuuugggagg

SEQ ID NO: 394431 - RNA, 32 nt, Human
cucacgccuguaaucccagcaguuugggaagc

SEQ ID NO: 394432 - RNA, 32 nt, Human
cucacgccuguaaucccagcaguuugggaggu

SEQ ID NO: 394433 - RNA, 32 nt, Human
cucacgccuguaaucccagcauuugggaggcu

SEQ ID NO: 394434 - RNA, 32 nt, Human
cucacgccuguaaucccagcauuuugggagcu

SEQ ID NO: 394435 - RNA, 32 nt, Human
cucacgccuguaaucccagcauuuugggaggc

SEQ ID NO: 394436 - RNA, 32 nt, Human
cucacgccuguaaucccagcccuuugggaggc

SEQ ID NO: 394437 - RNA, 32 nt, Human
cucacgccuguaaucccagcgcuuugggagag

SEQ ID NO: 394438 - RNA, 32 nt, Human
cucacgccuguaaucccagcgcuuugggaggc

SEQ ID NO: 394439 - RNA, 32 nt, Human
cucacgccuguaaucccagcucuuugggaggc

SEQ ID NO: 394440 - RNA, 32 nt, Human
cucacgccuguaaucccaggacuuuaggaggc

SEQ ID NO: 394441 - RNA, 32 nt, Human
cucacgccuguaaucccaggacuuugggaggc

SEQ ID NO: 394442 - RNA, 32 nt, Human
cucacgccuguaaucccaguacugugggaggc

SEQ ID NO: 394443 - RNA, 32 nt, Human
cucacgccuguaaucccaguacuugggaggcc

SEQ ID NO: 394444 - RNA, 32 nt, Human
cucacgccuguaaucccaguacuuugggagcc

SEQ ID NO: 394445 - RNA, 32 nt, Human
cucacgccuguaaucccaguacuuugggaggc

SEQ ID NO: 394446 - RNA, 32 nt, Human
cucacgccuguaaucccaguaguuugggaggc

SEQ ID NO: 394447 - RNA, 32 nt, Human
cucacgccuguaaucccaguauuuugggaguc

SEQ ID NO: 394448 - RNA, 24 nt, Human
cucacgccuguaaucccaucacuu

SEQ ID NO: 394449 - RNA, 32 nt, Human
cucacgccuguaaucccaucacuuugggaggc

SEQ ID NO: 394450 - RNA, 24 nt, Human
cucacgccuguaauccccacacuu

SEQ ID NO: 394451 - RNA, 32 nt, Human
cucacgccuguaaucccccagcaauuugggag

SEQ ID NO: 394452 - RNA, 32 nt, Human
cucacgccuguaauccccgcacuuugggaggc

SEQ ID NO: 394453 - RNA, 32 nt, Human
cucacgccuguaaucccggcacugugggaggc

SEQ ID NO: 394454 - RNA, 32 nt, Human
cucacgccuguaaucccggcacuuugggaggc

SEQ ID NO: 394455 - RNA, 32 nt, Human
cucacgccuguaaucccggcaguuugggaggc

SEQ ID NO: 394456 - RNA, 32 nt, Human
cucacgccuguaaucccgguauuuugggaggc

SEQ ID NO: 394457 - RNA, 24 nt, Human
cucacgccuguaaucccuacacuu

SEQ ID NO: 394458 - RNA, 32 nt, Human
cucacgccuguaaucccuacacuuugggaggc

SEQ ID NO: 394459 - RNA, 24 nt, Human
cucacgccuguaauccuaacacuu

SEQ ID NO: 394460 - RNA, 32 nt, Human
cucacgccuguaauccuaacacuuugggaggc

SEQ ID NO: 394461 - RNA, 32 nt, Human
cucacgccuguaauccuagcaauuugggaggc

SEQ ID NO: 394462 - RNA, 32 nt, Human
cucacgccuguaauccuagcaccuugggaggc

SEQ ID NO: 394463 - RNA, 32 nt, Human
cucacgccuguaauccuagcaccuuggggguc

SEQ ID NO: 394464 - RNA, 32 nt, Human
cucacgccuguaauccuagcacuugggaggca

SEQ ID NO: 394465 - RNA, 32 nt, Human
cucacgccuguaauccuagcacuuuggaaggc

SEQ ID NO: 394466 - RNA, 32 nt, Human
cucacgccuguaauccuagcacuuugggaggc

SEQ ID NO: 394467 - RNA, 32 nt, Human
cucacgccuguaauccuagcacuuuguaaggc

SEQ ID NO: 394468 - RNA, 32 nt, Human
cucacgccuguaauccuagcacuuuugggagg

SEQ ID NO: 394469 - RNA, 32 nt, Human
cucacgccuguaauccuagcaguuugggaggc

SEQ ID NO: 394470 - RNA, 32 nt, Human
cucacgccuguaauccuagcauuuugggaggc

SEQ ID NO: 394471 - RNA, 32 nt, Human
cucacgccuguaauccuagcauuuugggugac

SEQ ID NO: 394472 - RNA, 32 nt, Human
cucacgccuguaauccuagcauuuuuggaggc

SEQ ID NO: 394473 - RNA, 32 nt, Human
cucacgccuguaauccuagcccuuuggaaggc

SEQ ID NO: 394474 - RNA, 32 nt, Human
cucacgccuguaauccuauccuuuaggaggcc

SEQ ID NO: 394475 - RNA, 32 nt, Human
cucacgccuguaauccugacacuuugggaggc

SEQ ID NO: 394476 - RNA, 32 nt, Human
cucacgccuguaauccuggcacuuugggagga

SEQ ID NO: 394477 - RNA, 32 nt, Human
cucacgccuguaauccuggcacuuugggaggc

SEQ ID NO: 394478 - RNA, 32 nt, Human
cucacgccuguaaucgcagcacuuugggaggc

SEQ ID NO: 394479 - RNA, 32 nt, Human
cucacgccuguaaucgcggcacuuugggaggc

SEQ ID NO: 394480 - RNA, 24 nt, Human
cucacgccuguaaucucaacacuu

SEQ ID NO: 394481 - RNA, 32 nt, Human
cucacgccuguaaucucaacacuuugggaggc

SEQ ID NO: 394482 - RNA, 32 nt, Human
cucacgccuguaaucucagcacauugggaggc

SEQ ID NO: 394483 - RNA, 32 nt, Human
cucacgccuguaaucucagcacuuugggaggc

SEQ ID NO: 394484 - RNA, 32 nt, Human
cucacgccuguaaucucagcacuuuggguggc

SEQ ID NO: 394485 - RNA, 32 nt, Human
cucacgccuguaaucucagcauuuugggaggc

SEQ ID NO: 394486 - RNA, 32 nt, Human
cucacgccuguaaucucggcacuuugggagac

SEQ ID NO: 394487 - RNA, 32 nt, Human
cucacgccuguaaugccagcacuuugggaggg

SEQ ID NO: 394488 - RNA, 32 nt, Human
cucacgccuguaauuccagcacuuugggagac

SEQ ID NO: 394489 - RNA, 32 nt, Human
cucacgccuguaauuccagcacuuugggaggc

SEQ ID NO: 394490 - RNA, 32 nt, Human
cucacgccuguaauucuagcacuuugggagac

SEQ ID NO: 394491 - RNA, 32 nt, Human
cucacgccuguaauucuagcacuuugggaggc

SEQ ID NO: 394492 - RNA, 24 nt, Human
cucacgccuguagucccaacacuu

SEQ ID NO: 394493 - RNA, 32 nt, Human
cucacgccuguagucccaacacuuugggaggc

SEQ ID NO: 394494 - RNA, 32 nt, Human
cucacgccuguagucccagagcuuugggaggc

SEQ ID NO: 394495 - RNA, 32 nt, Human
cucacgccuguagucccagcacuuugggagcc

SEQ ID NO: 394496 - RNA, 32 nt, Human
cucacgccuguagucccagcacuuugggaggc

SEQ ID NO: 394497 - RNA, 32 nt, Human
cucacgccuguaguguccgcacuuugggaggc

SEQ ID NO: 394498 - RNA, 32 nt, Human
cucacgccuguaucccagcacuuuggaaggcu

SEQ ID NO: 394499 - RNA, 32 nt, Human
cucacgccuguaucccagcacuuugggaggcc

SEQ ID NO: 394500 - RNA, 32 nt, Human
cucacgccugucaucccagcacuuugggaggc

SEQ ID NO: 394501 - RNA, 32 nt, Human
cucacgccugucauccuagcacuuugggaggc

SEQ ID NO: 394502 - RNA, 32 nt, Human
cucacgccugucaucucagcacuuugggaggc

SEQ ID NO: 394503 - RNA, 32 nt, Human
cucacgccugugauaccagcacuuuugggagg

SEQ ID NO: 394504 - RNA, 32 nt, Human
cucacgccugugaucccagcacuuugggaggc

SEQ ID NO: 394505 - RNA, 32 nt, Human
cucacgccugugauccuagcacuuugggaggc

SEQ ID NO: 394506 - RNA, 32 nt, Human
cucacgccugugauuccagcacuuugggaggc

SEQ ID NO: 394507 - RNA, 32 nt, Human
cucacgccuguggucccagcacuuuggcaggu

SEQ ID NO: 394508 - RNA, 32 nt, Human
cucacgccuguggucccagcacuuugggaggc

SEQ ID NO: 394509 - RNA, 32 nt, Human
cucacgccuguggucucagcacuuugggaggc

SEQ ID NO: 394510 - RNA, 32 nt, Human
cucacgccuguuaaguccagcacuuugggagg

SEQ ID NO: 394511 - RNA, 24 nt, Human
cucacgccuguuaucccaacacuu

SEQ ID NO: 394512 - RNA, 32 nt, Human
cucacgccuguuaucccagcacuuugggaggc

SEQ ID NO: 394513 - RNA, 32 nt, Human
cucacgccuuguaaucccagcacuuugggagg

SEQ ID NO: 394514 - RNA, 32 nt, Human
cucacgccuuucuguuccuuguccucaccuua

SEQ ID NO: 394515 - RNA, 32 nt, Human
cucacgcucaaacccccacuuccugccccagg

SEQ ID NO: 394516 - RNA, 32 nt, Human
cucacgcucggugcaggaccucagggcugucg

SEQ ID NO: 394517 - RNA, 32 nt, Human
cucacgcugacacugcagccagcuccucaaug

SEQ ID NO: 394518 - RNA, 32 nt, Human
cucacgcuggagcuggagugcgagguucuuag

SEQ ID NO: 394519 - RNA, 32 nt, Human
cucacgcuguccaccugccagguggaguguau

SEQ ID NO: 394520 - RNA, 24 nt, Human
cucacgcuuauaaucccagcacuu

SEQ ID NO: 394521 - RNA, 32 nt, Human
cucacgcuuauaaucccagcacuuugggaggc

SEQ ID NO: 394522 - RNA, 32 nt, Human
cucacgcuuguaaucccaacacuuugggaggc

SEQ ID NO: 394523 - RNA, 24 nt, Human
cucacgcuuguaaucccagcacuu

SEQ ID NO: 394524 - RNA, 32 nt, Human
cucacgcuuguaaucccagcacuuugggaagc

SEQ ID NO: 394525 - RNA, 32 nt, Human
cucacgcuuguaaucccagcacuuugggaggc

SEQ ID NO: 394526 - RNA, 32 nt, Human
cucacgcuuguaaucccagcuacucuggaggc

SEQ ID NO: 394527 - RNA, 32 nt, Human
cucacgcuuguaaucccaguacuuugggaggc

SEQ ID NO: 394528 - RNA, 32 nt, Human
cucacgcuuguaaucccggcacuuuaggaggg

SEQ ID NO: 394529 - RNA, 32 nt, Human
cucacgcuuguaaucgcagcacuuugggaggc

SEQ ID NO: 394530 - RNA, 32 nt, Human
cucacgcuuguaaucucagcacuuugggaggc

SEQ ID NO: 394531 - RNA, 32 nt, Human
cucacgcuuguaauuccagcacuuugggaggc

SEQ ID NO: 394532 - RNA, 32 nt, Human
cucacggacuccugguugccagucuugccagg

SEQ ID NO: 394533 - RNA, 32 nt, Human
cucacggagaggaagggaaggaaggagaggga

SEQ ID NO: 394534 - RNA, 32 nt, Human
cucacggagccagcggccggguaggaugcaga

SEQ ID NO: 394535 - RNA, 32 nt, Human
cucacggcaaccugggauggccgccgguugcc

SEQ ID NO: 394536 - RNA, 32 nt, Human
cucacggccaggccucucuccugcugcuguuu

SEQ ID NO: 394537 - RNA, 32 nt, Human
cucacggcuguaaucccagcacuuugggaggc

SEQ ID NO: 394538 - RNA, 32 nt, Human
cucacggcuugucucaugcagucguguggcuu

SEQ ID NO: 394539 - RNA, 32 nt, Human
cucacgggagggugugagucagcucugucugu

SEQ ID NO: 394540 - RNA, 32 nt, Human
cucacggggcggcagaggcaacuucagugucc

SEQ ID NO: 394541 - RNA, 32 nt, Human
cucacgguccuccuuccugggaccugagcagg

SEQ ID NO: 394542 - RNA, 32 nt, Human
cucacgguggaacucucagaugacagcaugca

SEQ ID NO: 394543 - RNA, 32 nt, Human
cucacgguggcaggggaaggggagcaggugug

SEQ ID NO: 394544 - RNA, 32 nt, Human
cucacguaccuggcugacagagugcagauggu

SEQ ID NO: 394545 - RNA, 24 nt, Human
cucacguauguaaucccagcacuu

SEQ ID NO: 394546 - RNA, 32 nt, Human
cucacguauguaaucccagcacuuugggaagc

SEQ ID NO: 394547 - RNA, 32 nt, Human
cucacgucaggccuuugagaauucuuuccccc

SEQ ID NO: 394548 - RNA, 32 nt, Human
cucacgucugcugcaaccugaagcuugcaucu

SEQ ID NO: 394549 - RNA, 32 nt, Human
cucacgucuguaaucccagcaauuugggaggc

SEQ ID NO: 394550 - RNA, 22 nt, Human
cucacgucuguaaucccagcac

SEQ ID NO: 394551 - RNA, 32 nt, Human
cucacgucuguaaucccagcaccuugggaggc

SEQ ID NO: 394552 - RNA, 24 nt, Human
cucacgucuguaaucccagcacuu

SEQ ID NO: 394553 - RNA, 32 nt, Human
cucacgucuguaaucccagcacuuuggaaggc

SEQ ID NO: 394554 - RNA, 32 nt, Human
cucacgucuguaaucccagcacuuugggagcc

SEQ ID NO: 394555 - RNA, 32 nt, Human
cucacgucuguaaucccagcacuuugggaggc

SEQ ID NO: 394556 - RNA, 32 nt, Human
cucacgucuguaaucccagcacuuugggaggg

SEQ ID NO: 394557 - RNA, 32 nt, Human
cucacgucuguaaucccagcaguuugggaggc

SEQ ID NO: 394558 - RNA, 32 nt, Human
cucacgucuguaaucccagcgcuuugggaggc

SEQ ID NO: 394559 - RNA, 32 nt, Human
cucacgucuguaaucccaggacuuugggaggc

SEQ ID NO: 394560 - RNA, 32 nt, Human
cucacgucuguaaucucagcacuuagggaggc

SEQ ID NO: 394561 - RNA, 32 nt, Human
cucacgucuguaaucuuugggagcacuuuggg

SEQ ID NO: 394562 - RNA, 32 nt, Human
cucacgugccugcagggccaggaaagggaaau

SEQ ID NO: 394563 - RNA, 32 nt, Human
cucacguuucccaccagcucagacaugcacgc

SEQ ID NO: 394564 - RNA, 24 nt, Human
cucacguuuguaaucccagcacuu

SEQ ID NO: 394565 - RNA, 32 nt, Human
cucacguuuguaaucccagcacuuugggaggc

SEQ ID NO: 394566 - RNA, 32 nt, Human
cucacguuuugguaucacgaugccgugggcac

SEQ ID NO: 394567 - RNA, 32 nt, Human
cucacuaaauagauuaaacagagcaggcuugu

SEQ ID NO: 394568 - RNA, 32 nt, Human
cucacuaacauggugaaacccccaucuacacu

SEQ ID NO: 394569 - RNA, 32 nt, Human
cucacuaaccacccaccccuaccuggaaugga

SEQ ID NO: 394570 - RNA, 32 nt, Human
cucacuaagcucuuaaucagcaaacgcaguga

SEQ ID NO: 394571 - RNA, 32 nt, Human
cucacuaccugccaugcauacaugcugcgcau

SEQ ID NO: 394572 - RNA, 21 nt, Human
cucacuaccuuguaccuuuau

SEQ ID NO: 394573 - RNA, 32 nt, Human
cucacuacuguaauuccagcacuuugggaggc

SEQ ID NO: 394574 - RNA, 32 nt, Human
cucacuacuuuuuccuccucugugagugacca

SEQ ID NO: 394575 - RNA, 32 nt, Human
cucacuagaauauuccuuauguugacauggau

SEQ ID NO: 394576 - RNA, 32 nt, Human
cucacuagagugagcugggaaguagauacccu

SEQ ID NO: 394577 - RNA, 31 nt, Human
cucacuagccucuaacucccugugucugcau

SEQ ID NO: 394578 - RNA, 32 nt, Human
cucacuaggagaaaacacaucccucagccgug

SEQ ID NO: 394579 - RNA, 32 nt, Human
cucacuagucuugaggcccagccuaggauggu

SEQ ID NO: 394580 - RNA, 32 nt, Human
cucacuaucaugagaacagcaccaagaagcug

SEQ ID NO: 394581 - RNA, 32 nt, Human
cucacuaugucacccagguucgucucaaacuc

SEQ ID NO: 394582 - RNA, 32 nt, Human
cucacuauguugaccaggcuggucuugaacuc

SEQ ID NO: 394583 - RNA, 32 nt, Human
cucacuauguugaccaggcuggucuugaacuu

SEQ ID NO: 394584 - RNA, 32 nt, Human
cucacuauguugcccaggcuggagugcagugg

SEQ ID NO: 394585 - RNA, 32 nt, Human
cucacuauuacuguauucucuacuucuaaaua

SEQ ID NO: 394586 - RNA, 32 nt, Human
cucacuauuuugcccaggcuggucucaaacuc

SEQ ID NO: 394587 - RNA, 32 nt, Human
cucacucaaacaguaaacgagucacuguauau

SEQ ID NO: 394588 - RNA, 32 nt, Human
cucacucacucuccaccagccugggaaaugaa

SEQ ID NO: 394589 - RNA, 32 nt, Human
cucacucacugcaauugcuucuacucugggca

SEQ ID NO: 394590 - RNA, 32 nt, Human
cucacucacuggcuuugugcuucucuucccga

SEQ ID NO: 394591 - RNA, 32 nt, Human
cucacucagauggggacaccgagguccagagg

SEQ ID NO: 394592 - RNA, 32 nt, Human
cucacucagauggggacacugagguccagagg

SEQ ID NO: 394593 - RNA, 32 nt, Human
cucacucagccuguugcggaucuucauggccu

SEQ ID NO: 394594 - RNA, 32 nt, Human
cucacucaggcaucuucuuucucuaaauacca

SEQ ID NO: 394595 - RNA, 32 nt, Human
cucacucaggguggggucaggaaucugcauuu

SEQ ID NO: 394596 - RNA, 32 nt, Human
cucacucaucccuuuggcccacagguacaugu

SEQ ID NO: 394597 - RNA, 32 nt, Human
cucacucauggggucugaggggagagaagcac

SEQ ID NO: 394598 - RNA, 32 nt, Human
cucacucauucauucguucccacacacacuaa

SEQ ID NO: 394599 - RNA, 22 nt, Human
cucacuccaaaguccugcugga

SEQ ID NO: 394600 - RNA, 32 nt, Human
cucacuccaaccuccgccuccuggguucaagu

SEQ ID NO: 394601 - RNA, 32 nt, Human
cucacuccaagaggggagucagccuggggaca

SEQ ID NO: 394602 - RNA, 31 nt, Human
cucacuccaagcccaguuacagcagaaaguu

SEQ ID NO: 394603 - RNA, 19 nt, Human
cucacuccaccagcuuccu

SEQ ID NO: 394604 - RNA, 32 nt, Human
cucacuccagaagaacugagacacagcagcac

SEQ ID NO: 394605 - RNA, 32 nt, Human
cucacuccagccuccaacuccugggcucaagc

SEQ ID NO: 394606 - RNA, 32 nt, Human
cucacuccagccugggcaacauagugagaccc

SEQ ID NO: 394607 - RNA, 32 nt, Human
cucacuccagccugggugacagcguaagacuc

SEQ ID NO: 394608 - RNA, 32 nt, Human
cucacucccacacacacccccuggcucugcug

SEQ ID NO: 394609 - RNA, 32 nt, Human
cucacucccagaggaucugaucuacaugugug

SEQ ID NO: 394610 - RNA, 32 nt, Human
cucacucccagccugcggguaaccugccgccc

SEQ ID NO: 394611 - RNA, 32 nt, Human
cucacuccccaaaaugagaacagggaagagga

SEQ ID NO: 394612 - RNA, 23 nt, Human
cucacuccccagccuccucugga

SEQ ID NO: 394613 - RNA, 32 nt, Human
cucacucccccaaaaugacacccaccgucguc

SEQ ID NO: 394614 - RNA, 32 nt, Human
cucacucccccaggaagccuucccugccuucu

SEQ ID NO: 394615 - RNA, 32 nt, Human
cucacuccccuacaaaagauggagcuuaaugg

SEQ ID NO: 394616 - RNA, 32 nt, Human
cucacuccccuccccagggagccugcacagcu

SEQ ID NO: 394617 - RNA, 23 nt, Human
cucacuccccucugaccuccaga

SEQ ID NO: 394618 - RNA, 32 nt, Human
cucacuccuagaaaacaggaaaaagaaggucu

SEQ ID NO: 394619 - RNA, 32 nt, Human
cucacuccuccaggaaccaggccaagggcugg

SEQ ID NO: 394620 - RNA, 32 nt, Human
cucacuccuccagggcacuuuuaggaaagggu

SEQ ID NO: 394621 - RNA, 32 nt, Human
cucacuccuccccuccuucgcucgcucaaccu

SEQ ID NO: 394622 - RNA, 19 nt, Human
cucacuccucccucccucu

SEQ ID NO: 394623 - RNA, 32 nt, Human
cucacuccuggguuccaggucacugcaucugu

SEQ ID NO: 394624 - RNA, 32 nt, Human
cucacuccuguaauaccagcacuuugggaggc

SEQ ID NO: 394625 - RNA, 32 nt, Human
cucacuccuguaaucccaccacuuugggaggc

SEQ ID NO: 394626 - RNA, 32 nt, Human
cucacuccuguaaucccagcacuuuggaggcc

SEQ ID NO: 394627 - RNA, 32 nt, Human
cucacuccuguaaucccagcacuuugggaagc

SEQ ID NO: 394628 - RNA, 32 nt, Human
cucacuccuguaaucccagcacuuugggaggc

SEQ ID NO: 394629 - RNA, 32 nt, Human
cucacuccuguaaucccagcacuuugggaggu

SEQ ID NO: 394630 - RNA, 32 nt, Human
cucacuccuguaaucccagcauuuugggaggc

SEQ ID NO: 394631 - RNA, 32 nt, Human
cucacuccuguaaucccggcacuuuggaaugc

SEQ ID NO: 394632 - RNA, 32 nt, Human
cucacuccuguaauccgagcaauuugggaggc

SEQ ID NO: 394633 - RNA, 32 nt, Human
cucacuccuguaauccuagcaguuuggaaggc

SEQ ID NO: 394634 - RNA, 32 nt, Human
cucacuccuguaaucucagaacuuugggaggc

SEQ ID NO: 394635 - RNA, 32 nt, Human
cucacuccuguaauuccagcacuuugggaggc

SEQ ID NO: 394636 - RNA, 32 nt, Human
cucacuccuguagucccagcacuuugggaggc

SEQ ID NO: 394637 - RNA, 32 nt, Human
cucacucuauugcccaggcuggagugcacugg

SEQ ID NO: 394638 - RNA, 32 nt, Human
cucacucucacacccaggcuggagugcagucu

SEQ ID NO: 394639 - RNA, 32 nt, Human
cucacucucacccaggcuggagugcaguggca

SEQ ID NO: 394640 - RNA, 32 nt, Human
cucacucucaccccuucugccugccaggucuu

SEQ ID NO: 394641 - RNA, 32 nt, Human
cucacucucacugcauuucccaccuuccugug

SEQ ID NO: 394642 - RNA, 32 nt, Human
cucacucuccacuggcuuuccucucucccuuu

SEQ ID NO: 394643 - RNA, 32 nt, Human
cucacucuccccugaaguuuagggucccaucu

SEQ ID NO: 394644 - RNA, 32 nt, Human
cucacucucucccucaugaacacccacccacc

SEQ ID NO: 394645 - RNA, 32 nt, Human
cucacucucuccucucgcccaggcuggagugc

SEQ ID NO: 394646 - RNA, 32 nt, Human
cucacucucucgcccaggcuggagugcaacgg

SEQ ID NO: 394647 - RNA, 32 nt, Human
cucacucucucgcccaggcuggagugcagugg

SEQ ID NO: 394648 - RNA, 32 nt, Human
cucacucucuggagaagaggaaaaggaagaag

SEQ ID NO: 394649 - RNA, 32 nt, Human
cucacucugaccacuucucugccugcccagca

SEQ ID NO: 394650 - RNA, 32 nt, Human
cucacucugcaaccuccacuucccagguucaa

SEQ ID NO: 394651 - RNA, 32 nt, Human
cucacucugccgcccaggcuggacugcaguga

SEQ ID NO: 394652 - RNA, 32 nt, Human
cucacucugcuagcaccuccucccuuucccca

SEQ ID NO: 394653 - RNA, 32 nt, Human
cucacucugcugcccaggcuggaguacagugg

SEQ ID NO: 394654 - RNA, 32 nt, Human
cucacucuggcgcucuggagugcaguggugug

SEQ ID NO: 394655 - RNA, 32 nt, Human
cucacucuguaacccaggcuggagugcagugg

SEQ ID NO: 394656 - RNA, 32 nt, Human
cucacucugucacccaggcgggaguggugcaa

SEQ ID NO: 394657 - RNA, 32 nt, Human
cucacucugucacccaggcgggaguuaggugg

SEQ ID NO: 394658 - RNA, 32 nt, Human
cucacucugucacccaggcugaagugcagugg

SEQ ID NO: 394659 - RNA, 32 nt, Human
cucacucugucacccaggcugcagugcaaugg

SEQ ID NO: 394660 - RNA, 32 nt, Human
cucacucugucacccaggcugcaguguagugg

SEQ ID NO: 394661 - RNA, 32 nt, Human
cucacucugucacccaggcuggaaugcagugg

SEQ ID NO: 394662 - RNA, 32 nt, Human
cucacucugucacccaggcuggacugcaauga

SEQ ID NO: 394663 - RNA, 32 nt, Human
cucacucugucacccaggcuggagagcaauug

SEQ ID NO: 394664 - RNA, 32 nt, Human
cucacucugucacccaggcuggaguacaaugg

SEQ ID NO: 394665 - RNA, 32 nt, Human
cucacucugucacccaggcuggaguacaguga

SEQ ID NO: 394666 - RNA, 32 nt, Human
cucacucugucacccaggcuggaguacagugg

SEQ ID NO: 394667 - RNA, 32 nt, Human
cucacucugucacccaggcuggagugcaaugc

SEQ ID NO: 394668 - RNA, 32 nt, Human
cucacucugucacccaggcuggagugcaaugg

SEQ ID NO: 394669 - RNA, 32 nt, Human
cucacucugucacccaggcuggagugcaguag

SEQ ID NO: 394670 - RNA, 32 nt, Human
cucacucugucacccaggcuggagugcagugg

SEQ ID NO: 394671 - RNA, 32 nt, Human
cucacucugucacccaggcuggagugcagugu

SEQ ID NO: 394672 - RNA, 32 nt, Human
cucacucugucacccaggcuggagugcggugg

SEQ ID NO: 394673 - RNA, 32 nt, Human
cucacucugucacccaggcuggaguguagugg

SEQ ID NO: 394674 - RNA, 32 nt, Human
cucacucugucacccaggcugggaugcagugg

SEQ ID NO: 394675 - RNA, 32 nt, Human
cucacucugucagcagguccccagggaccugc

SEQ ID NO: 394676 - RNA, 32 nt, Human
cucacucugucccccaggcuggagugcagugg

SEQ ID NO: 394677 - RNA, 32 nt, Human
cucacucugucgcccaggcuagagugcagugg

SEQ ID NO: 394678 - RNA, 32 nt, Human
cucacucugucgcccaggcuagaguggauugg

SEQ ID NO: 394679 - RNA, 32 nt, Human
cucacucugucgcccaggcuggaaugcagugg

SEQ ID NO: 394680 - RNA, 32 nt, Human
cucacucugucgcccaggcuggagggcagugg

SEQ ID NO: 394681 - RNA, 32 nt, Human
cucacucugucgcccaggcuggagugcaguag

SEQ ID NO: 394682 - RNA, 31 nt, Human
cucacucugucgcccaggcuggagugcagug

SEQ ID NO: 394683 - RNA, 32 nt, Human
cucacucugucgcccaggcuggagugcagugg

SEQ ID NO: 394684 - RNA, 32 nt, Human
cucacucugucgcccaggcuggagugcagugu

SEQ ID NO: 394685 - RNA, 32 nt, Human
cucacucugucgcccaggcuggggugcagugg

SEQ ID NO: 394686 - RNA, 32 nt, Human
cucacucugucucccaggcuagagugcagugg

SEQ ID NO: 394687 - RNA, 32 nt, Human
cucacucugucucccaggcugcaacauccacc

SEQ ID NO: 394688 - RNA, 32 nt, Human
cucacucugucucccaggcuggacugcagugg

SEQ ID NO: 394689 - RNA, 32 nt, Human
cucacucugucucccaggcuggagugcagugg

SEQ ID NO: 394690 - RNA, 32 nt, Human
cucacucugucucccaggcuggagugugaugg

SEQ ID NO: 394691 - RNA, 32 nt, Human
cucacucugucucccaggcuggaguugcagug

SEQ ID NO: 394692 - RNA, 32 nt, Human
cucacucuguggcccaggcuggagugcagugg

SEQ ID NO: 394693 - RNA, 32 nt, Human
cucacucugugucccaggcuggagugcagugg

SEQ ID NO: 394694 - RNA, 32 nt, Human
cucacucuguuacccaggccggagugcagugg

SEQ ID NO: 394695 - RNA, 32 nt, Human
cucacucuguuacccaggcuagagugcagugg

SEQ ID NO: 394696 - RNA, 32 nt, Human
cucacucuguuacccaggcuagaguguagugg

SEQ ID NO: 394697 - RNA, 32 nt, Human
cucacucuguuacccaggcuggaaugcagugg

SEQ ID NO: 394698 - RNA, 32 nt, Human
cucacucuguuacccaggcuggagugcaaugg

SEQ ID NO: 394699 - RNA, 32 nt, Human
cucacucuguugcccaggcugaagugcagugg

SEQ ID NO: 394700 - RNA, 32 nt, Human
cucacucuguugcccaggcugagguacagugg

SEQ ID NO: 394701 - RNA, 32 nt, Human
cucacucuguugcccaggcugcagugcagugg

SEQ ID NO: 394702 - RNA, 32 nt, Human
cucacucuguugcccaggcuggaaugcaguga

SEQ ID NO: 394703 - RNA, 32 nt, Human
cucacucuguugcccaggcuggaaugcagugg

SEQ ID NO: 394704 - RNA, 32 nt, Human
cucacucuguugcccaggcuggaguacagugg

SEQ ID NO: 394705 - RNA, 32 nt, Human
cucacucuguugcccaggcuggagugcaaugg

SEQ ID NO: 394706 - RNA, 32 nt, Human
cucacucuguugcccaggcuggagugcaguga

SEQ ID NO: 394707 - RNA, 32 nt, Human
cucacucuguugcccaggcuggagugcagugg

SEQ ID NO: 394708 - RNA, 32 nt, Human
cucacucuguugcccaggcuggagugcagugu

SEQ ID NO: 394709 - RNA, 32 nt, Human
cucacucuguugcccaggcuggagugccucuu

SEQ ID NO: 394710 - RNA, 32 nt, Human
cucacucuguugcccaggcuggagugcgaugg

SEQ ID NO: 394711 - RNA, 32 nt, Human
cucacucuguugcccaggcuggaguguagugg

SEQ ID NO: 394712 - RNA, 32 nt, Human
cucacucuguugcccaggcuggaguucagcgg

SEQ ID NO: 394713 - RNA, 32 nt, Human
cucacucuguugcccaugcuggagggcagugg

SEQ ID NO: 394714 - RNA, 32 nt, Human
cucacucuuaagguugcugcuauauacagucu

SEQ ID NO: 394715 - RNA, 32 nt, Human
cucacucuucaaggaggcccacugugucuagg

SEQ ID NO: 394716 - RNA, 32 nt, Human
cucacucuucaaggaggcccacuugugucuua

SEQ ID NO: 394717 - RNA, 32 nt, Human
cucacucuucacucaggcugcagugcaguggc

SEQ ID NO: 394718 - RNA, 32 nt, Human
cucacucuuccgcccaggcugcagugcagugg

SEQ ID NO: 394719 - RNA, 32 nt, Human
cucacucuugcccaggcuggagugcaguggug

SEQ ID NO: 394720 - RNA, 24 nt, Human
cucacucuuguaaucccaaaacuu

SEQ ID NO: 394721 - RNA, 32 nt, Human
cucacucuuucacccaggcuggagugcagugg

SEQ ID NO: 394722 - RNA, 32 nt, Human
cucacucuuucgcccaggcuggagugcagugg

SEQ ID NO: 394723 - RNA, 32 nt, Human
cucacucuuugauuuggaauucagucuuuauc

SEQ ID NO: 394724 - RNA, 32 nt, Human
cucacucuuuuacacccagagguggagcaggu

SEQ ID NO: 394725 - RNA, 32 nt, Human
cucacugaacccugcacguugaguaacagcag

SEQ ID NO: 394726 - RNA, 32 nt, Human
cucacugaagccucaaccucccuggguuugag

SEQ ID NO: 394727 - RNA, 32 nt, Human
cucacugacauccugacaucucaggauccuac

SEQ ID NO: 394728 - RNA, 32 nt, Human
cucacugacccucagcuggacacugcccaacc

SEQ ID NO: 394729 - RNA, 32 nt, Human
cucacugaccuccugaccccugaccucaucac

SEQ ID NO: 394730 - RNA, 32 nt, Human
cucacugagacaacaaucuauacuguuuuggc

SEQ ID NO: 394731 - RNA, 32 nt, Human
cucacugagcacuggccauagccccgggaggg

SEQ ID NO: 394732 - RNA, 32 nt, Human
cucacugagccaccuccauuucuucaucugug

SEQ ID NO: 394733 - RNA, 22 nt, Human
cucacugauguuuugcacuuua

SEQ ID NO: 394734 - RNA, 32 nt, Human
cucacugauuccuggcacucugcucccucucg

SEQ ID NO: 394735 - RNA, 32 nt, Human
cucacugauucugagauggcuuuugcugcucu

SEQ ID NO: 394736 - RNA, 21 nt, Human
cucacugcaaaaucugccucc

SEQ ID NO: 394737 - RNA, 32 nt, Human
cucacugcaaaggucuacagcuucauuccuga

SEQ ID NO: 394738 - RNA, 21 nt, Human
cucacugcaacaucugccucc

SEQ ID NO: 394739 - RNA, 32 nt, Human
cucacugcaaccacugccucccaggcucaagu

SEQ ID NO: 394740 - RNA, 32 nt, Human
cucacugcaaccacugccucccagguucaagc

SEQ ID NO: 394741 - RNA, 32 nt, Human
cucacugcaaccacugcuuccuggguucaagu

SEQ ID NO: 394742 - RNA, 32 nt, Human
cucacugcaaccucagccuccugggcucaagc

SEQ ID NO: 394743 - RNA, 22 nt, Human
cucacugcaaccuccacccccu

SEQ ID NO: 394744 - RNA, 21 nt, Human
cucacugcaaccuccaccucc

SEQ ID NO: 394745 - RNA, 22 nt, Human
cucacugcaaccuccaccuccu

SEQ ID NO: 394746 - RNA, 32 nt, Human
cucacugcaaccuccaccuccugggcucaagc

SEQ ID NO: 394747 - RNA, 32 nt, Human
cucacugcaaccuccaccuccugggucaagcc

SEQ ID NO: 394748 - RNA, 32 nt, Human
cucacugcaaccuccaccuccuggguucaagc

SEQ ID NO: 394749 - RNA, 32 nt, Human
cucacugcaaccuccaccuccuggguucaagu

SEQ ID NO: 394750 - RNA, 32 nt, Human
cucacugcaaccuccaccuccuggguucaggc

SEQ ID NO: 394751 - RNA, 32 nt, Human
cucacugcaaccuccaccuccuggguugaagu

SEQ ID NO: 394752 - RNA, 32 nt, Human
cucacugcaaccuccaccuccuggguuuaagc

SEQ ID NO: 394753 - RNA, 32 nt, Human
cucacugcaaccucccccuccuggguucaagc

SEQ ID NO: 394754 - RNA, 20 nt, Human
cucacugcaaccuccgccuc

SEQ ID NO: 394755 - RNA, 21 nt, Human
cucacugcaaccuccgccucc

SEQ ID NO: 394756 - RNA, 22 nt, Human
cucacugcaaccuccgccuccu

SEQ ID NO: 394757 - RNA, 32 nt, Human
cucacugcaaccuccgccuccugggaucaagu

SEQ ID NO: 394758 - RNA, 32 nt, Human
cucacugcaaccuccgccuccugggcucaagc

SEQ ID NO: 394759 - RNA, 32 nt, Human
cucacugcaaccuccgccuccuggguuaaagu

SEQ ID NO: 394760 - RNA, 32 nt, Human
cucacugcaaccuccgccuccuggguucaaac

SEQ ID NO: 394761 - RNA, 32 nt, Human
cucacugcaaccuccgccuccuggguucaaga

SEQ ID NO: 394762 - RNA, 32 nt, Human
cucacugcaaccuccgccuccuggguucaagc

SEQ ID NO: 394763 - RNA, 32 nt, Human
cucacugcaaccuccgccuccuggguucaagg

SEQ ID NO: 394764 - RNA, 32 nt, Human
cucacugcaaccuccgccuccuggguucaagu

SEQ ID NO: 394765 - RNA, 32 nt, Human
cucacugcaaccuccgccuccuggguucacau

SEQ ID NO: 394766 - RNA, 32 nt, Human
cucacugcaaccuccgccuccuggguucagga

SEQ ID NO: 394767 - RNA, 32 nt, Human
cucacugcaaccuccgccuccuggguucaggc

SEQ ID NO: 394768 - RNA, 32 nt, Human
cucacugcaaccuccgccuccuggguuccaac

SEQ ID NO: 394769 - RNA, 32 nt, Human
cucacugcaaccuccgccuccuggguucgggc

SEQ ID NO: 394770 - RNA, 32 nt, Human
cucacugcaaccuccgccuccuggguucgggu

SEQ ID NO: 394771 - RNA, 21 nt, Human
cucacugcaaccuccgcuccc

SEQ ID NO: 394772 - RNA, 32 nt, Human
cucacugcaaccuccgucuccuggguucaagu

SEQ ID NO: 394773 - RNA, 32 nt, Human
cucacugcaaccuccugcuuccuggguucaag

SEQ ID NO: 394774 - RNA, 21 nt, Human
cucacugcaaccucuaccucc

SEQ ID NO: 394775 - RNA, 22 nt, Human
cucacugcaaccucugcccucc

SEQ ID NO: 394776 - RNA, 21 nt, Human
cucacugcaaccucugccucc

SEQ ID NO: 394777 - RNA, 22 nt, Human
cucacugcaaccucugccuccu

SEQ ID NO: 394778 - RNA, 32 nt, Human
cucacugcaaccucugccuccugggcucaacg

SEQ ID NO: 394779 - RNA, 32 nt, Human
cucacugcaaccucugccuccugggcucaaga

SEQ ID NO: 394780 - RNA, 32 nt, Human
cucacugcaaccucugccuccugggcucaagc

SEQ ID NO: 394781 - RNA, 32 nt, Human
cucacugcaaccucugccuccuggguucaaga

SEQ ID NO: 394782 - RNA, 32 nt, Human
cucacugcaaccucugccuccuggguucaagc

SEQ ID NO: 394783 - RNA, 32 nt, Human
cucacugcaaccucugccuccuggguucaagu

SEQ ID NO: 394784 - RNA, 32 nt, Human
cucacugcaaccucugccuccuggguucaggc

SEQ ID NO: 394785 - RNA, 32 nt, Human
cucacugcaaccucugccuccuggguucaggu

SEQ ID NO: 394786 - RNA, 32 nt, Human
cucacugcaaccucugccuccuggguucuccu

SEQ ID NO: 394787 - RNA, 32 nt, Human
cucacugcaaccucugccuccuggguuuaaau

SEQ ID NO: 394788 - RNA, 32 nt, Human
cucacugcaaccucugccuccuggguuuaagc

SEQ ID NO: 394789 - RNA, 21 nt, Human
cucacugcaaccucugccucu

SEQ ID NO: 394790 - RNA, 32 nt, Human
cucacugcaaccucugucuccugggcucaagc

SEQ ID NO: 394791 - RNA, 21 nt, Human
cucacugcaaccucuuccucc

SEQ ID NO: 394792 - RNA, 21 nt, Human
cucacugcaaccuucgccucc

SEQ ID NO: 394793 - RNA, 22 nt, Human
cucacugcaacuuccaccuccu

SEQ ID NO: 394794 - RNA, 20 nt, Human
cucacugcaacuuccgcccc

SEQ ID NO: 394795 - RNA, 32 nt, Human
cucacugcaacuuccgccuccugggaucaagu

SEQ ID NO: 394796 - RNA, 32 nt, Human
cucacugcaacuuccgccuccuggggucaagc

SEQ ID NO: 394797 - RNA, 32 nt, Human
cucacugcaagcuccaccuccuggguucaagc

SEQ ID NO: 394798 - RNA, 32 nt, Human
cucacugcaagcuccaccuccuggguucacgc

SEQ ID NO: 394799 - RNA, 32 nt, Human
cucacugcaagcuccaccuccuggguucaugc

SEQ ID NO: 394800 - RNA, 21 nt, Human
cucacugcaagcuccgccucc

SEQ ID NO: 394801 - RNA, 22 nt, Human
cucacugcaagcuccgccuccu

SEQ ID NO: 394802 - RNA, 32 nt, Human
cucacugcaagcuccgccuccuggguucaagc

SEQ ID NO: 394803 - RNA, 32 nt, Human
cucacugcaagcuccgccuccuggguucacac

SEQ ID NO: 394804 - RNA, 32 nt, Human
cucacugcaagcuccgccuccuggguucacgc

SEQ ID NO: 394805 - RNA, 32 nt, Human
cucacugcaagcuccgccuccuggguucacgu

SEQ ID NO: 394806 - RNA, 32 nt, Human
cucacugcaagcuccgccuccuggguucaugc

SEQ ID NO: 394807 - RNA, 32 nt, Human
cucacugcaagcuccgccuccuggguugacac

SEQ ID NO: 394808 - RNA, 32 nt, Human
cucacugcaagcucugccuccugggcucacac

SEQ ID NO: 394809 - RNA, 32 nt, Human
cucacugcaagcucugccuccuggguucaagu

SEQ ID NO: 394810 - RNA, 32 nt, Human
cucacugcaagcucugccuccuggguucacgc

SEQ ID NO: 394811 - RNA, 32 nt, Human
cucacugcaaggggccguggcuucauucuuga

SEQ ID NO: 394812 - RNA, 21 nt, Human
cucacugcaaucuccaccucc

SEQ ID NO: 394813 - RNA, 32 nt, Human
cucacugcaaucuccaccuccuggguucaagc

SEQ ID NO: 394814 - RNA, 32 nt, Human
cucacugcaaucucugccuccuggguucaagu

SEQ ID NO: 394815 - RNA, 32 nt, Human
cucacugcaaucucugccuccuggguucagau

SEQ ID NO: 394816 - RNA, 32 nt, Human
cucacugcacagaacccaccccuucugugugg

SEQ ID NO: 394817 - RNA, 32 nt, Human
cucacugcacauugcccaugugggcagcgagg

SEQ ID NO: 394818 - RNA, 32 nt, Human
cucacugcaccagugucuuugaugguggugag

SEQ ID NO: 394819 - RNA, 32 nt, Human
cucacugcacccucaaccuccuggguucaagc

SEQ ID NO: 394820 - RNA, 32 nt, Human
cucacugcacccuccgccuccugggcucaagc

SEQ ID NO: 394821 - RNA, 32 nt, Human
cucacugcacucaggcuggagugcagugguac

SEQ ID NO: 394822 - RNA, 32 nt, Human
cucacugcagagcuggaaaagcuucagacaga

SEQ ID NO: 394823 - RNA, 32 nt, Human
cucacugcagccucaaccucccaggcucaagu

SEQ ID NO: 394824 - RNA, 32 nt, Human
cucacugcagccucaaccucccagguucaagc

SEQ ID NO: 394825 - RNA, 32 nt, Human
cucacugcagccucaaccuccugagcucaagc

SEQ ID NO: 394826 - RNA, 32 nt, Human
cucacugcagccucaaccuccuggacucagag

SEQ ID NO: 394827 - RNA, 32 nt, Human
cucacugcagccucaaccuccugggcuaagug

SEQ ID NO: 394828 - RNA, 32 nt, Human
cucacugcagccucaaccuccugggcucaagc

SEQ ID NO: 394829 - RNA, 32 nt, Human
cucacugcagccucaaccuccuggggccaagu

SEQ ID NO: 394830 - RNA, 32 nt, Human
cucacugcagccucaaccuccuggguucaagu

SEQ ID NO: 394831 - RNA, 32 nt, Human
cucacugcagccuccaccuccugggcucaaag

SEQ ID NO: 394832 - RNA, 32 nt, Human
cucacugcagccuccaccuccugggcucaagc

SEQ ID NO: 394833 - RNA, 32 nt, Human
cucacugcagccuccaccuccugggcucaugu

SEQ ID NO: 394834 - RNA, 32 nt, Human
cucacugcagccuccaccuccugggcucucca

SEQ ID NO: 394835 - RNA, 32 nt, Human
cucacugcagccuccaccuccuggguucaagc

SEQ ID NO: 394836 - RNA, 32 nt, Human
cucacugcagccuccgccuccuggguucaagc

SEQ ID NO: 394837 - RNA, 32 nt, Human
cucacugcagccuccgccuccuggguucaagu

SEQ ID NO: 394838 - RNA, 32 nt, Human
cucacugcagccuccuucuccuggguccaagc

SEQ ID NO: 394839 - RNA, 32 nt, Human
cucacugcagccucgaccuccccagcucaagc

SEQ ID NO: 394840 - RNA, 32 nt, Human
cucacugcagccucgaccuccugggcucaacu

SEQ ID NO: 394841 - RNA, 32 nt, Human
cucacugcagccucgaccuccugggcucaagc

SEQ ID NO: 394842 - RNA, 32 nt, Human
cucacugcagccucugccuccuggguucaagc

SEQ ID NO: 394843 - RNA, 32 nt, Human
cucacugcagccucugccuccuggguuccaag

SEQ ID NO: 394844 - RNA, 32 nt, Human
cucacugcagccucugucucccgggcucaagc

SEQ ID NO: 394845 - RNA, 32 nt, Human
cucacugcagccuugaacugugcugaagcgau

SEQ ID NO: 394846 - RNA, 32 nt, Human
cucacugcagccuugaccuccugggcugaagc

SEQ ID NO: 394847 - RNA, 32 nt, Human
cucacugcaggcuccgccuccuggguucacgc

SEQ ID NO: 394848 - RNA, 32 nt, Human
cucacugcaggcucugccuccuggguucacgc

SEQ ID NO: 394849 - RNA, 32 nt, Human
cucacugcaggcucugccuccuggguuccagc

SEQ ID NO: 394850 - RNA, 32 nt, Human
cucacugcaguagcacgcccuccugggccguc

SEQ ID NO: 394851 - RNA, 32 nt, Human
cucacugcagucucaaucucucuggcucaagc

SEQ ID NO: 394852 - RNA, 32 nt, Human
cucacugcaguuucaaccucccagauuccagu

SEQ ID NO: 394853 - RNA, 32 nt, Human
cucacugcaguuucaaguuccugggcucaaag

SEQ ID NO: 394854 - RNA, 32 nt, Human
cucacugcauccucaaccuccuggguucagau

SEQ ID NO: 394855 - RNA, 32 nt, Human
cucacugcauccuccaccuccuggguucaagu

SEQ ID NO: 394856 - RNA, 32 nt, Human
cucacugcauccucugccuccuggguucaaac

SEQ ID NO: 394857 - RNA, 32 nt, Human
cucacugcauccucugccuccuggguucaagu

SEQ ID NO: 394858 - RNA, 32 nt, Human
cucacugcauuccagccugggcaacagagaac

SEQ ID NO: 394859 - RNA, 32 nt, Human
cucacugcauucccucaccucuaccuuuuuau

SEQ ID NO: 394860 - RNA, 32 nt, Human
cucacugcauuccggccugggcaacagagacc

SEQ ID NO: 394861 - RNA, 32 nt, Human
cucacugcauuuuccauacaaauguuucuauu

SEQ ID NO: 394862 - RNA, 32 nt, Human
cucacugccacacgcagcucagccugggcggc

SEQ ID NO: 394863 - RNA, 32 nt, Human
cucacugccaccuuugccuccuggguucaagc

SEQ ID NO: 394864 - RNA, 32 nt, Human
cucacugcccagccccgccuguccucagccag

SEQ ID NO: 394865 - RNA, 32 nt, Human
cucacugccccacugugcuccugggccuguga

SEQ ID NO: 394866 - RNA, 32 nt, Human
cucacugccccagggaccaacuuccuacccuc

SEQ ID NO: 394867 - RNA, 32 nt, Human
cucacugcccucccucccuccugggcuccagg

SEQ ID NO: 394868 - RNA, 32 nt, Human
cucacugcccuggaaucaacaggcugguugcu

SEQ ID NO: 394869 - RNA, 32 nt, Human
cucacugccgccucaaccucuccuggguucag

SEQ ID NO: 394870 - RNA, 32 nt, Human
cucacugccucuuugcaguaggggagagagca

SEQ ID NO: 394871 - RNA, 32 nt, Human
cucacugccugagaccccuuccuuagagagca

SEQ ID NO: 394872 - RNA, 32 nt, Human
cucacugccugcuuauugccucuuucucagaa

SEQ ID NO: 394873 - RNA, 20 nt, Human
cucacugcgccaggcccagg

SEQ ID NO: 394874 - RNA, 32 nt, Human
cucacugcggccuuuguaacaaaaccaguugu

SEQ ID NO: 394875 - RNA, 32 nt, Human
cucacugcuaagcuacaaacucggacaggguc

SEQ ID NO: 394876 - RNA, 32 nt, Human
cucacugcucacugacaucuuaauugccugca

SEQ ID NO: 394877 - RNA, 20 nt, Human
cucacugcucagcccaggug

SEQ ID NO: 394878 - RNA, 32 nt, Human
cucacugcugaccugggcuggucccagccugg

SEQ ID NO: 394879 - RNA, 32 nt, Human
cucacugcugcaaccucccccuccuggguuca

SEQ ID NO: 394880 - RNA, 32 nt, Human
cucacugcugccucaaccucccaggcucaagu

SEQ ID NO: 394881 - RNA, 32 nt, Human
cucacugcugccucaacuuccugggcucaagu

SEQ ID NO: 394882 - RNA, 32 nt, Human
cucacuggaaucuccagccuuccagauuuucu

SEQ ID NO: 394883 - RNA, 32 nt, Human
cucacuggagaaaccugugcacggccccacaa

SEQ ID NO: 394884 - RNA, 18 nt, Human
cucacuggagcuguucca

SEQ ID NO: 394885 - RNA, 32 nt, Human
cucacuggauccaccacggccuggguggacgg

SEQ ID NO: 394886 - RNA, 32 nt, Human
cucacuggccaguagcugccaaaaagaacacc

SEQ ID NO: 394887 - RNA, 32 nt, Human
cucacuggcccagugguguucuaccuccuacc

SEQ ID NO: 394888 - RNA, 28 nt, Human
cucacuggcccugcugccucuucaaguu

SEQ ID NO: 394889 - RNA, 32 nt, Human
cucacuggcucugagggcaggacaggguauca

SEQ ID NO: 394890 - RNA, 32 nt, Human
cucacugggaaucuucguuugucaugagccag

SEQ ID NO: 394891 - RNA, 32 nt, Human
cucacugggagcaaugggguugcagcugaagu

SEQ ID NO: 394892 - RNA, 32 nt, Human
cucacugggauccccuuccugccuccucccag

SEQ ID NO: 394893 - RNA, 31 nt, Human
cucacugggcccugugucccugugucccugu

SEQ ID NO: 394894 - RNA, 32 nt, Human
cucacugggccuuagcugccuuccugcggggc

SEQ ID NO: 394895 - RNA, 32 nt, Human
cucacugggcuccccagacucugugugugaga

SEQ ID NO: 394896 - RNA, 32 nt, Human
cucacuggggucuguguggugcccaugaccac

SEQ ID NO: 394897 - RNA, 32 nt, Human
cucacuggugacuucaucccucaggcuccagc

SEQ ID NO: 394898 - RNA, 32 nt, Human
cucacugguucacgccuguaaucccagcacuu

SEQ ID NO: 394899 - RNA, 19 nt, Human
cucacuguaaccuccgacu

SEQ ID NO: 394900 - RNA, 21 nt, Human
cucacuguaaccuccgccucc

SEQ ID NO: 394901 - RNA, 32 nt, Human
cucacuguaagagucagaacaccccacaggcc

SEQ ID NO: 394902 - RNA, 32 nt, Human
cucacuguagccuugaucuccugggcucaagc

SEQ ID NO: 394903 - RNA, 32 nt, Human
cucacuguagucucaaccuccugggcucaaga

SEQ ID NO: 394904 - RNA, 32 nt, Human
cucacuguaucacccaggccagaguguagugg

SEQ ID NO: 394905 - RNA, 32 nt, Human
cucacugucaccaggcuggagugcaguggugc

SEQ ID NO: 394906 - RNA, 32 nt, Human
cucacugucacccaggccggagugcaguggca

SEQ ID NO: 394907 - RNA, 32 nt, Human
cucacugucacccaggcugaacugcaguggug

SEQ ID NO: 394908 - RNA, 32 nt, Human
cucacugucacccaggcuggagugcaguggca

SEQ ID NO: 394909 - RNA, 32 nt, Human
cucacugucacccagucuggaguggaguggca

SEQ ID NO: 394910 - RNA, 32 nt, Human
cucacugucaccuaggcuggagugcaguggua

SEQ ID NO: 394911 - RNA, 32 nt, Human
cucacugucccucucugucugucucucagccu

SEQ ID NO: 394912 - RNA, 32 nt, Human
cucacugucgcccaggcuggagugcaguggcg

SEQ ID NO: 394913 - RNA, 32 nt, Human
cucacugucgcccaggcuggagugcgguggug

SEQ ID NO: 394914 - RNA, 32 nt, Human
cucacugucuaaaucagugucucuacuccacc

SEQ ID NO: 394915 - RNA, 32 nt, Human
cucacugucuccauccuccaccucugagaugg

SEQ ID NO: 394916 - RNA, 32 nt, Human
cucacugucucccaggcuggaauguagggugu

SEQ ID NO: 394917 - RNA, 32 nt, Human
cucacugucuccuaggcuggagugcaguggug

SEQ ID NO: 394918 - RNA, 32 nt, Human
cucacugucucuaguauuuuagcuaccacuug

SEQ ID NO: 394919 - RNA, 32 nt, Human
cucacugucuugcccaggcuggagugcagugg

SEQ ID NO: 394920 - RNA, 32 nt, Human
cucacugugaaacgucgcgaccugugacgucu

SEQ ID NO: 394921 - RNA, 32 nt, Human
cucacugugcacauuauacaagcacaacagga

SEQ ID NO: 394922 - RNA, 32 nt, Human
cucacugugcugcuuuuccaugagcucuugga

SEQ ID NO: 394923 - RNA, 32 nt, Human
cucacuguggaggucauaaggaagcuacuuuu

SEQ ID NO: 394924 - RNA, 32 nt, Human
cucacugugggaaggccagcugccccagccag

SEQ ID NO: 394925 - RNA, 32 nt, Human
cucacugugucacccaggcuggagugcagugg

SEQ ID NO: 394926 - RNA, 32 nt, Human
cucacugugucccccaggcuggagugcagugg

SEQ ID NO: 394927 - RNA, 32 nt, Human
cucacugugucgcccaggcuggagugcaagug

SEQ ID NO: 394928 - RNA, 32 nt, Human
cucacugugucgcccaggcuggagugcagugg

SEQ ID NO: 394929 - RNA, 32 nt, Human
cucacuguguugcccaggcuggagugcaaaug

SEQ ID NO: 394930 - RNA, 32 nt, Human
cucacuguguugcccaggcuggagugcaguag

SEQ ID NO: 394931 - RNA, 32 nt, Human
cucacuguguugcccaggcuggucugaaacuu

SEQ ID NO: 394932 - RNA, 32 nt, Human
cucacuguuauccaggcuggagugcagaggca

SEQ ID NO: 394933 - RNA, 32 nt, Human
cucacuguuccaggaauucuugcaguguagag

SEQ ID NO: 394934 - RNA, 32 nt, Human
cucacuguuccccaugcgcacacacauacaca

SEQ ID NO: 394935 - RNA, 32 nt, Human
cucacuguucucucuuucagccuagaccugcu

SEQ ID NO: 394936 - RNA, 32 nt, Human
cucacuguugccaggcuggagugcaguggcac

SEQ ID NO: 394937 - RNA, 32 nt, Human
cucacuguugcccaggcuggagugcaguggug

SEQ ID NO: 394938 - RNA, 32 nt, Human
cucacuguugcccaggcuggagugcauugaug

SEQ ID NO: 394939 - RNA, 32 nt, Human
cucacuguugcccaggcuggcgugcaguggug

SEQ ID NO: 394940 - RNA, 32 nt, Human
cucacuguugccucgcugucugccaggaggcc

SEQ ID NO: 394941 - RNA, 32 nt, Human
cucacuguugccuggcuggagcacuuugguuu

SEQ ID NO: 394942 - RNA, 32 nt, Human
cucacuguuguccaggcuggucucaaacuccu

SEQ ID NO: 394943 - RNA, 21 nt, Human
cucacuguuucuaagccuccu

SEQ ID NO: 394944 - RNA, 32 nt, Human
cucacuguuucuaagccuccuggaccauggcc

SEQ ID NO: 394945 - RNA, 20 nt, Human
cucacuuaacuugcaaggaa

SEQ ID NO: 394946 - RNA, 32 nt, Human
cucacuuagcguggaggaaggaacaggaagag

SEQ ID NO: 394947 - RNA, 32 nt, Human
cucacuuauacuuccuuccucccaaguaauca

SEQ ID NO: 394948 - RNA, 32 nt, Human
cucacuuaugagaugccugaagccaggccaug

SEQ ID NO: 394949 - RNA, 32 nt, Human
cucacuuauuaaagcacaaaauguuuuaccua

SEQ ID NO: 394950 - RNA, 32 nt, Human
cucacuucacugcacuccagucugggugacag

SEQ ID NO: 394951 - RNA, 17 nt, Human
cucacuucacuguucca

SEQ ID NO: 394952 - RNA, 28 nt, Human
cucacuuccaaugcugccuugaucucug

SEQ ID NO: 394953 - RNA, 32 nt, Human
cucacuuccugccucugcugccaccaucacug

SEQ ID NO: 394954 - RNA, 32 nt, Human
cucacuuccuuggcaucuccccacugcuccuc

SEQ ID NO: 394955 - RNA, 32 nt, Human
cucacuucgcaggucacaugccuauacaucac

SEQ ID NO: 394956 - RNA, 32 nt, Human
cucacuucucagacggggcgguugccaggcag

SEQ ID NO: 394957 - RNA, 32 nt, Human
cucacuucucagacggggugguugccaggcag

SEQ ID NO: 394958 - RNA, 32 nt, Human
cucacuucucagauggggcgguugccaggcag

SEQ ID NO: 394959 - RNA, 32 nt, Human
cucacuucucuuucccuucaaaaugcuuuuca

SEQ ID NO: 394960 - RNA, 32 nt, Human
cucacuugaauccagcucagugcucugggugg

SEQ ID NO: 394961 - RNA, 32 nt, Human
cucacuugagccacugaaaccagccaggucuu

SEQ ID NO: 394962 - RNA, 31 nt, Human
cucacuugagcccaggagguugaggcugcag

SEQ ID NO: 394963 - RNA, 32 nt, Human
cucacuugagcccaggagguugaggcugcagu

SEQ ID NO: 394964 - RNA, 32 nt, Human
cucacuugaucacccaggcuagagugcagugg

SEQ ID NO: 394965 - RNA, 32 nt, Human
cucacuugcacaccacgggauacuccuccuga

SEQ ID NO: 394966 - RNA, 32 nt, Human
cucacuugccauuccagggccaaaggaccgga

SEQ ID NO: 394967 - RNA, 32 nt, Human
cucacuuggcaaagcagcucggcgucucagcc

SEQ ID NO: 394968 - RNA, 32 nt, Human
cucacuuggccuuucccugcaggaugagugaa

SEQ ID NO: 394969 - RNA, 32 nt, Human
cucacuuggcuccccucuccuccuuagccaga

SEQ ID NO: 394970 - RNA, 32 nt, Human
cucacuuguaauugugccucagacuuuuugaa

SEQ ID NO: 394971 - RNA, 32 nt, Human
cucacuuguaccccacccuguuccuguguccc

SEQ ID NO: 394972 - RNA, 32 nt, Human
cucacuuguggccuauuucucugcuucuucca

SEQ ID NO: 394973 - RNA, 32 nt, Human
cucacuuguguugcugucagugccaguagggc

SEQ ID NO: 394974 - RNA, 32 nt, Human
cucacuuguuuuguguucugucauccuuguuu

SEQ ID NO: 394975 - RNA, 32 nt, Human
cucacuuuauucaagucccugcucagguguca

SEQ ID NO: 394976 - RNA, 32 nt, Human
cucacuuucauguaagguuauccacuuuugcu

SEQ ID NO: 394977 - RNA, 32 nt, Human
cucacuuuccaccacugucagccuggaaagag

SEQ ID NO: 394978 - RNA, 32 nt, Human
cucacuuuccacccucucuccaccugccucug

SEQ ID NO: 394979 - RNA, 32 nt, Human
cucacuuucccccuacaggacucagaucuggg

SEQ ID NO: 394980 - RNA, 22 nt, Human
cucacuuucccugcaccuuuau

SEQ ID NO: 394981 - RNA, 32 nt, Human
cucacuuugaaccuucuuguuuacagauuuuu

SEQ ID NO: 394982 - RNA, 32 nt, Human
cucacuuugacacccaggcuggagugcagugg

SEQ ID NO: 394983 - RNA, 24 nt, Human
cucacuuugccucucgccucugga

SEQ ID NO: 394984 - RNA, 32 nt, Human
cucacuuugcugccccaccaucuugcugacaa

SEQ ID NO: 394985 - RNA, 32 nt, Human
cucacuuugcuucccaggcuggagugcagugg

SEQ ID NO: 394986 - RNA, 32 nt, Human
cucacuuuggggacuguucccaucacccaccu

SEQ ID NO: 394987 - RNA, 32 nt, Human
cucacuuuggggcugggcugguucuccacccu

SEQ ID NO: 394988 - RNA, 32 nt, Human
cucacuuuguaacccaggcuggaaugcaaugg

SEQ ID NO: 394989 - RNA, 32 nt, Human
cucacuuugucacccaggcuagagugcagugg

SEQ ID NO: 394990 - RNA, 32 nt, Human
cucacuuugucacccaggcuggaaugcagugg

SEQ ID NO: 394991 - RNA, 32 nt, Human
cucacuuugucacccaggcuggagugcagugg

SEQ ID NO: 394992 - RNA, 32 nt, Human
cucacuuugucgcccaggcuggaguacagugg

SEQ ID NO: 394993 - RNA, 32 nt, Human
cucacuuugucgcccaggcuggagugcagugg

SEQ ID NO: 394994 - RNA, 32 nt, Human
cucacuuuguuacccaggcuggagugcagugg

SEQ ID NO: 394995 - RNA, 32 nt, Human
cucacuuuguugcccaggcuggagcgcagugg

SEQ ID NO: 394996 - RNA, 32 nt, Human
cucacuuuguugcccaggcuggagugcagugg

SEQ ID NO: 394997 - RNA, 32 nt, Human
cucacuuuguugcccaggcuggagugcggugg

SEQ ID NO: 394998 - RNA, 32 nt, Human
cucacuuuuccuggggccccucuccccaaccc

SEQ ID NO: 394999 - RNA, 18 nt, Human
cucacuuuucuucuggca

SEQ ID NO: 395000 - RNA, 32 nt, Human
cucacuuuugggaggcagaaggguaggcucag

SEQ ID NO: 395001 - RNA, 21 nt, Human
cucagaaaacauuuugugucu

SEQ ID NO: 395002 - RNA, 32 nt, Human
cucagaaacagcugucgccucagucugcgcac

SEQ ID NO: 395003 - RNA, 32 nt, Human
cucagaaaccccugcccuuucccuucagaaaa

SEQ ID NO: 395004 - RNA, 32 nt, Human
cucagaaacuauacucuucuguguaacagacc

SEQ ID NO: 395005 - RNA, 32 nt, Human
cucagaaagaggaaauaaugccuccaccauuu

SEQ ID NO: 395006 - RNA, 32 nt, Human
cucagaaagcucugcgcuuuccagaaagcgcu

SEQ ID NO: 395007 - RNA, 32 nt, Human
cucagaaaugugugaaagaaccucacacaaca

SEQ ID NO: 395008 - RNA, 32 nt, Human
cucagaacaccccagccuugagcuuagcugca

SEQ ID NO: 395009 - RNA, 32 nt, Human
cucagaaccagcuccacccaaaucacucuucg

SEQ ID NO: 395010 - RNA, 32 nt, Human
cucagaacccagcaaauaugucaaaguaccag

SEQ ID NO: 395011 - RNA, 32 nt, Human
cucagaacggacgagauaaugugaacuagcug

SEQ ID NO: 395012 - RNA, 32 nt, Human
cucagaacucacaagccauugcuccccagcug

SEQ ID NO: 395013 - RNA, 32 nt, Human
cucagaacuuggccuacguuucccaggacucu

SEQ ID NO: 395014 - RNA, 32 nt, Human
cucagaacuuugugugguugagcccaggccuc

SEQ ID NO: 395015 - RNA, 32 nt, Human
cucagaagaacaaagugaggaggcagaaggag

SEQ ID NO: 395016 - RNA, 32 nt, Human
cucagaagacacccagcugggcccuucauggg

SEQ ID NO: 395017 - RNA, 22 nt, Human
cucagaagacucuuguguuuug

SEQ ID NO: 395018 - RNA, 24 nt, Human
cucagaaggcagagguugcagugg

SEQ ID NO: 395019 - RNA, 24 nt, Human
cucagaaggcggaggcugcaguga

SEQ ID NO: 395020 - RNA, 32 nt, Human
cucagaaggcggaggcugcagugagccgagau

SEQ ID NO: 395021 - RNA, 32 nt, Human
cucagaaggcggagguuccagugagccaucgc

SEQ ID NO: 395022 - RNA, 32 nt, Human
cucagaaggcugagaggguuugcaguggagcc

SEQ ID NO: 395023 - RNA, 32 nt, Human
cucagaaggcuuucucuguguaaagaaguaua

SEQ ID NO: 395024 - RNA, 32 nt, Human
cucagaagguggagguugcagugaggcgagau

SEQ ID NO: 395025 - RNA, 32 nt, Human
cucagaaguucagaaacuaagaccagaaaaga

SEQ ID NO: 395026 - RNA, 32 nt, Human
cucagaaguucagcuguugaaacgaaaacugu

SEQ ID NO: 395027 - RNA, 32 nt, Human
cucagaaguuccacugcacuccagccuggguu

SEQ ID NO: 395028 - RNA, 32 nt, Human
cucagaaguugcagagcagccugggcaacaug

SEQ ID NO: 395029 - RNA, 32 nt, Human
cucagaaguuucugagacuugguggucgucuu

SEQ ID NO: 395030 - RNA, 32 nt, Human
cucagaaucacuuuucccaucuguaaaauuga

SEQ ID NO: 395031 - RNA, 32 nt, Human
cucagaauccaccccgugccugcaggggaaag

SEQ ID NO: 395032 - RNA, 32 nt, Human
cucagaauccugcucuuccuccagagagauuc

SEQ ID NO: 395033 - RNA, 32 nt, Human
cucagaaucuaaggaugaauguucaccguggc

SEQ ID NO: 395034 - RNA, 32 nt, Human
cucagaaucugaaguaguucccuccucagcaa

SEQ ID NO: 395035 - RNA, 32 nt, Human
cucagaaucuuuccuuccucucauccuuuucu

SEQ ID NO: 395036 - RNA, 32 nt, Human
cucagaauguuggccgggcaugguggcucaca

SEQ ID NO: 395037 - RNA, 32 nt, Human
cucagaauguuuuuggcuuuucugcuaaagau

SEQ ID NO: 395038 - RNA, 32 nt, Human
cucagaauucuuccagccuccaccuacugccc

SEQ ID NO: 395039 - RNA, 32 nt, Human
cucagacacaccauuucaccucccuugccaag

SEQ ID NO: 395040 - RNA, 32 nt, Human
cucagacacaggugagaagaugcagcaccuuc

SEQ ID NO: 395041 - RNA, 32 nt, Human
cucagacaccagcaacagccucuugggaugcc

SEQ ID NO: 395042 - RNA, 32 nt, Human
cucagacagaaaucagaugcuuccauguauuc

SEQ ID NO: 395043 - RNA, 32 nt, Human
cucagacagccauuugcuuuggguuuugcuuc

SEQ ID NO: 395044 - RNA, 32 nt, Human
cucagacagggcugagugccuccacccugauu

SEQ ID NO: 395045 - RNA, 32 nt, Human
cucagacagucaugcaccacccucaaucccag

SEQ ID NO: 395046 - RNA, 32 nt, Human
cucagacagugccaccauggccaugcagcagg

SEQ ID NO: 395047 - RNA, 32 nt, Human
cucagacauccugugugguccaccucacuucu

SEQ ID NO: 395048 - RNA, 32 nt, Human
cucagacaucuuuucccucccucucucuuuca

SEQ ID NO: 395049 - RNA, 32 nt, Human
cucagacaugucuguccucacagcagaaugua

SEQ ID NO: 395050 - RNA, 32 nt, Human
cucagaccaccagccaagagccuucccuugaa

SEQ ID NO: 395051 - RNA, 18 nt, Human
cucagaccacuugcuucc

SEQ ID NO: 395052 - RNA, 17 nt, Human
cucagaccagagugcca

SEQ ID NO: 395053 - RNA, 18 nt, Human
cucagaccagcucacuga

SEQ ID NO: 395054 - RNA, 17 nt, Human
cucagacccacugacca

SEQ ID NO: 395055 - RNA, 18 nt, Human
cucagacccagcggucca

SEQ ID NO: 395056 - RNA, 32 nt, Human
cucagacccaggaguccagccccuccucccuc

SEQ ID NO: 395057 - RNA, 32 nt, Human
cucagacccaggaguccaggcccccagccccu

SEQ ID NO: 395058 - RNA, 19 nt, Human
cucagacccagugaaccca

SEQ ID NO: 395059 - RNA, 18 nt, Human
cucagaccccacugucca

SEQ ID NO: 395060 - RNA, 17 nt, Human
cucagacccgcucuucc

SEQ ID NO: 395061 - RNA, 17 nt, Human
cucagacccggaaucca

SEQ ID NO: 395062 - RNA, 18 nt, Human
cucagacccgggagucca

SEQ ID NO: 395063 - RNA, 18 nt, Human
cucagacccgggcuccca

SEQ ID NO: 395064 - RNA, 32 nt, Human
cucagacccgggcucucgguccgccgcuucag

SEQ ID NO: 395065 - RNA, 19 nt, Human
cucagacccucgccuucca

SEQ ID NO: 395066 - RNA, 18 nt, Human
cucagacccucucuucca

SEQ ID NO: 395067 - RNA, 32 nt, Human
cucagacccugccugaugcuauaugcagaggc

SEQ ID NO: 395068 - RNA, 19 nt, Human
cucagacccugggcuuccg

SEQ ID NO: 395069 - RNA, 20 nt, Human
cucagacccuuccugguucc

SEQ ID NO: 395070 - RNA, 25 nt, Human
cucagaccgacccccacuccauccc

SEQ ID NO: 395071 - RNA, 20 nt, Human
cucagaccgagcgugugcca

SEQ ID NO: 395072 - RNA, 18 nt, Human
cucagaccuacugaauca

SEQ ID NO: 395073 - RNA, 32 nt, Human
cucagaccuaggacgggagcucacaucccauc

SEQ ID NO: 395074 - RNA, 17 nt, Human
cucagaccuagugcucc

SEQ ID NO: 395075 - RNA, 32 nt, Human
cucagaccuauaaucccagcacuuugggaguc

SEQ ID NO: 395076 - RNA, 18 nt, Human
cucagaccuauccuuucc

SEQ ID NO: 395077 - RNA, 32 nt, Human
cucagaccucaccuuccucccacccaccccug

SEQ ID NO: 395078 - RNA, 32 nt, Human
cucagaccuccucaucucaugagcuucuuggg

SEQ ID NO: 395079 - RNA, 20 nt, Human
cucagaccugaaugcacucc

SEQ ID NO: 395080 - RNA, 17 nt, Human
cucagaccugacaccca

SEQ ID NO: 395081 - RNA, 17 nt, Human
cucagaccugaccaucc

SEQ ID NO: 395082 - RNA, 18 nt, Human
cucagaccugauccuucc

SEQ ID NO: 395083 - RNA, 16 nt, Human
cucagaccugauuucc

SEQ ID NO: 395084 - RNA, 16 nt, Human
cucagaccugcaccca

SEQ ID NO: 395085 - RNA, 19 nt, Human
cucagaccugcagacuccc

SEQ ID NO: 395086 - RNA, 19 nt, Human
cucagaccugcgcacucca

SEQ ID NO: 395087 - RNA, 32 nt, Human
cucagaccugcgcacuccaucucccucccuuu

SEQ ID NO: 395088 - RNA, 18 nt, Human
cucagaccugcuacacca

SEQ ID NO: 395089 - RNA, 19 nt, Human
cucagaccuggaagacucc

SEQ ID NO: 395090 - RNA, 18 nt, Human
cucagaccuggaccccca

SEQ ID NO: 395091 - RNA, 32 nt, Human
cucagaccuggacccccaccagccucacuccc

SEQ ID NO: 395092 - RNA, 19 nt, Human
cucagaccuggcuuuuucc

SEQ ID NO: 395093 - RNA, 32 nt, Human
cucagaccuggcuuuuuccucagucccuguuc

SEQ ID NO: 395094 - RNA, 18 nt, Human
cucagaccuggugcucua

SEQ ID NO: 395095 - RNA, 32 nt, Human
cucagaccuguaaucccagaacuuugggagcc

SEQ ID NO: 395096 - RNA, 16 nt, Human
cucagaccugugaucc

SEQ ID NO: 395097 - RNA, 32 nt, Human
cucagaccuucauagccucucuugucauucuu

SEQ ID NO: 395098 - RNA, 32 nt, Human
cucagaccuucccaucucccuggcuuuccaug

SEQ ID NO: 395099 - RNA, 17 nt, Human
cucagaccuugcaucca

SEQ ID NO: 395100 - RNA, 18 nt, Human
cucagaccuuggagccca

SEQ ID NO: 395101 - RNA, 21 nt, Human
cucagaccuuggauucauucc

SEQ ID NO: 395102 - RNA, 32 nt, Human
cucagaccuuucucgcuucugagcuugguggc

SEQ ID NO: 395103 - RNA, 32 nt, Human
cucagacgacucuggaagcuucccucuaccac

SEQ ID NO: 395104 - RNA, 32 nt, Human
cucagacgccggccucggccugggcgaugaga

SEQ ID NO: 395105 - RNA, 32 nt, Human
cucagacuagaccccaaccccaauaggggagg

SEQ ID NO: 395106 - RNA, 32 nt, Human
cucagacucaacugcuaugugugacugccgcu

SEQ ID NO: 395107 - RNA, 32 nt, Human
cucagacuccaauggcaguguccuguuugagc

SEQ ID NO: 395108 - RNA, 32 nt, Human
cucagacucccaaagugcugggauuauaggga

SEQ ID NO: 395109 - RNA, 32 nt, Human
cucagacuccuaaguagcugggauuacaggca

SEQ ID NO: 395110 - RNA, 32 nt, Human
cucagacuccuggguuuuuguuguugcuguug

SEQ ID NO: 395111 - RNA, 18 nt, Human
cucagacucuauguucca

SEQ ID NO: 395112 - RNA, 18 nt, Human
cucagacucugacuucca

SEQ ID NO: 395113 - RNA, 32 nt, Human
cucagacucugaggaccccuuucuggaugagu

SEQ ID NO: 395114 - RNA, 32 nt, Human
cucagacucuuagagccagcuguggcuucgga

SEQ ID NO: 395115 - RNA, 32 nt, Human
cucagacucuucccccacccccucucuuuucc

SEQ ID NO: 395116 - RNA, 32 nt, Human
cucagacugagugguggccuggggaaguuggg

SEQ ID NO: 395117 - RNA, 32 nt, Human
cucagacugcaagcugucuggcugcuccgggu

SEQ ID NO: 395118 - RNA, 32 nt, Human
cucagacuggcauccaggcuuugcuccaccaa

SEQ ID NO: 395119 - RNA, 32 nt, Human
cucagacuggcccgggagguucucccagacau

SEQ ID NO: 395120 - RNA, 32 nt, Human
cucagacuggggcucccugaggacggggcugu

SEQ ID NO: 395121 - RNA, 32 nt, Human
cucagacuguaagaggccgggaggggaaggac

SEQ ID NO: 395122 - RNA, 32 nt, Human
cucagacuguagagcucggucucuccaaguuu

SEQ ID NO: 395123 - RNA, 32 nt, Human
cucagacugucagauaaaucggcgggccgggc

SEQ ID NO: 395124 - RNA, 19 nt, Human
cucagacuugaccugucca

SEQ ID NO: 395125 - RNA, 32 nt, Human
cucagacuugcaguugauagaggcuguggugu

SEQ ID NO: 395126 - RNA, 18 nt, Human
cucagacuuguuauuuca

SEQ ID NO: 395127 - RNA, 32 nt, Human
cucagagaaaucagguaacuucccaaaugacc

SEQ ID NO: 395128 - RNA, 31 nt, Human
cucagagaacaaugagcacuugaagauuuuu

SEQ ID NO: 395129 - RNA, 32 nt, Human
cucagagaagccccagaguagaaagaagacaa

SEQ ID NO: 395130 - RNA, 32 nt, Human
cucagagaagugagcagagacuccacagacac

SEQ ID NO: 395131 - RNA, 32 nt, Human
cucagagacagagcagaagacagaaccugguc

SEQ ID NO: 395132 - RNA, 32 nt, Human
cucagagaccacucauccucuggaaucaaccu

SEQ ID NO: 395133 - RNA, 32 nt, Human
cucagagaccucccuuuccaagccugccuggg

SEQ ID NO: 395134 - RNA, 32 nt, Human
cucagagagagggagggagaagagagauagug

SEQ ID NO: 395135 - RNA, 32 nt, Human
cucagagagauguggugacuugcucaaauagu

SEQ ID NO: 395136 - RNA, 32 nt, Human
cucagagagcaaccuccucccucguagaggga

SEQ ID NO: 395137 - RNA, 32 nt, Human
cucagagagcaagcgguaccagagguaccagc

SEQ ID NO: 395138 - RNA, 32 nt, Human
cucagagagcacagguuuccagccuggaaccu

SEQ ID NO: 395139 - RNA, 32 nt, Human
cucagagagcaguuaugaaggaaaaccagguc

SEQ ID NO: 395140 - RNA, 23 nt, Human
cucagagagccucuuuaacuuaa

SEQ ID NO: 395141 - RNA, 32 nt, Human
cucagagaguccacagucccuccucucaguuc

SEQ ID NO: 395142 - RNA, 32 nt, Human
cucagagaguugucuguccaggcccuuaggga

SEQ ID NO: 395143 - RNA, 32 nt, Human
cucagagauguuccuccccucaucugcccggg

SEQ ID NO: 395144 - RNA, 32 nt, Human
cucagagauucacacagaagucuggacacaau

SEQ ID NO: 395145 - RNA, 32 nt, Human
cucagagcaaaguggcuguguguuccgagccg

SEQ ID NO: 395146 - RNA, 32 nt, Human
cucagagcacagaaaccuucagcuuugcuguc

SEQ ID NO: 395147 - RNA, 32 nt, Human
cucagagcaccaauaucuccuccaucacuucc

SEQ ID NO: 395148 - RNA, 16 nt, Human
cucagagcagagccag

SEQ ID NO: 395149 - RNA, 32 nt, Human
cucagagcagaggagguggggagcagguggcu

SEQ ID NO: 395150 - RNA, 32 nt, Human
cucagagcccuaagcccugccucccgguccug

SEQ ID NO: 395151 - RNA, 32 nt, Human
cucagagcccucagcccuuccugcuuucaggc

SEQ ID NO: 395152 - RNA, 32 nt, Human
cucagagcccugcucuuugccuggaugguuca

SEQ ID NO: 395153 - RNA, 22 nt, Human
cucagagccgcccaaacugccg

SEQ ID NO: 395154 - RNA, 32 nt, Human
cucagagccguuucagacaguggaaauccaug

SEQ ID NO: 395155 - RNA, 32 nt, Human
cucagagccuccgccucggccucucucucgcg

SEQ ID NO: 395156 - RNA, 32 nt, Human
cucagagcggagcccacagagcagggcaccgg

SEQ ID NO: 395157 - RNA, 32 nt, Human
cucagagcuaugccuccagacgcaucauuccu

SEQ ID NO: 395158 - RNA, 32 nt, Human
cucagagcucacugcauccuugaccucccaga

SEQ ID NO: 395159 - RNA, 32 nt, Human
cucagagcuggggcagcugccucccaggggug

SEQ ID NO: 395160 - RNA, 32 nt, Human
cucagaggaagaggaaagaaagaagaggaggg

SEQ ID NO: 395161 - RNA, 23 nt, Human
cucagaggaagcccgugcaguca

SEQ ID NO: 395162 - RNA, 32 nt, Human
cucagaggaaguguggacucacaggugggcaa

SEQ ID NO: 395163 - RNA, 32 nt, Human
cucagaggagcccucugaggaugcgccccugg

SEQ ID NO: 395164 - RNA, 32 nt, Human
cucagaggagcucuacccugcucccugcuuug

SEQ ID NO: 395165 - RNA, 32 nt, Human
cucagaggaggugagaggagaggaaggagaaa

SEQ ID NO: 395166 - RNA, 20 nt, Human
cucagaggauuacuguuuca

SEQ ID NO: 395167 - RNA, 32 nt, Human
cucagaggcagagacugaguuaagucauaggu

SEQ ID NO: 395168 - RNA, 23 nt, Human
cucagaggcagagguugcaauga

SEQ ID NO: 395169 - RNA, 32 nt, Human
cucagaggcccagggcggcgggcucagccauu

SEQ ID NO: 395170 - RNA, 32 nt, Human
cucagaggcccccugaguguuccccuuggccu

SEQ ID NO: 395171 - RNA, 32 nt, Human
cucagaggcgaccauaaugucguuacguguac

SEQ ID NO: 395172 - RNA, 32 nt, Human
cucagaggcggcccuuugccucugccugccgg

SEQ ID NO: 395173 - RNA, 32 nt, Human
cucagaggcgugcugguccccuccucagugac

SEQ ID NO: 395174 - RNA, 32 nt, Human
cucagaggcuaaggcgggagaaucacuugaac

SEQ ID NO: 395175 - RNA, 32 nt, Human
cucagaggcugaggcaggaggaucgcuugaac

SEQ ID NO: 395176 - RNA, 32 nt, Human
cucagaggcugcagggagggcccaggagccgg

SEQ ID NO: 395177 - RNA, 32 nt, Human
cucagagggaaaaggaaaagagccucaaacau

SEQ ID NO: 395178 - RNA, 32 nt, Human
cucagagggaacauugcagagacucaggagau

SEQ ID NO: 395179 - RNA, 32 nt, Human
cucagagggaaggcucucuggucuaccugaga

SEQ ID NO: 395180 - RNA, 32 nt, Human
cucagagggcccagagaauggcugagcaggac

SEQ ID NO: 395181 - RNA, 32 nt, Human
cucagagggcucuucugccaucccuugucucc

SEQ ID NO: 395182 - RNA, 32 nt, Human
cucagagggcucuuggucgcucagggaggugg

SEQ ID NO: 395183 - RNA, 32 nt, Human
cucagagggucugagguccgagcacccugcug

SEQ ID NO: 395184 - RNA, 32 nt, Human
cucagagggucuggggcaccagguggagacca

SEQ ID NO: 395185 - RNA, 32 nt, Human
cucagagggucuguccagcccugggaagcgac

SEQ ID NO: 395186 - RNA, 32 nt, Human
cucagagguggaagagcaaggcuggaaguucu

SEQ ID NO: 395187 - RNA, 32 nt, Human
cucagagguggaggugaggggaaagugaagug

SEQ ID NO: 395188 - RNA, 32 nt, Human
cucagagguggccuccuccuccaggcauggag

SEQ ID NO: 395189 - RNA, 32 nt, Human
cucagagguuuaggcuggaggcuuggugagaa

SEQ ID NO: 395190 - RNA, 32 nt, Human
cucagagucaguuuucagaagcagguuucagu

SEQ ID NO: 395191 - RNA, 32 nt, Human
cucagaguccaaguaggacacgcagguggacg

SEQ ID NO: 395192 - RNA, 32 nt, Human
cucagaguguggcuguaccacauucgguguau

SEQ ID NO: 395193 - RNA, 32 nt, Human
cucagaguucaggaaguauugguaaauggagg

SEQ ID NO: 395194 - RNA, 32 nt, Human
cucagaguugcuguuucuccuugagaugcuuu

SEQ ID NO: 395195 - RNA, 32 nt, Human
cucagaguuguggcuguuaucucuucaggaau

SEQ ID NO: 395196 - RNA, 32 nt, Human
cucagaguuuaauguaaaugaaucuagaugau

SEQ ID NO: 395197 - RNA, 32 nt, Human
cucagaguuuggcuccugcacucucauuucag

SEQ ID NO: 395198 - RNA, 32 nt, Human
cucagaguuuucuaacaggagaaaaguccugu

SEQ ID NO: 395199 - RNA, 32 nt, Human
cucagauaaacacauagaggccagcuuaaaau

SEQ ID NO: 395200 - RNA, 32 nt, Human
cucagauaacucaguacagauagcaauuaguc

SEQ ID NO: 395201 - RNA, 32 nt, Human
cucagauauacuccugggagagagcaugaaug

SEQ ID NO: 395202 - RNA, 32 nt, Human
cucagauauacuugguucucuccaccagguuc

SEQ ID NO: 395203 - RNA, 32 nt, Human
cucagauauagagguuaugucauuuuauaaag

SEQ ID NO: 395204 - RNA, 20 nt, Human
cucagaucaaagcagcucug

SEQ ID NO: 395205 - RNA, 18 nt, Human
cucagaucaacuacucua

SEQ ID NO: 395206 - RNA, 24 nt, Human
cucagaucacugcaaccuccaccu

SEQ ID NO: 395207 - RNA, 32 nt, Human
cucagaucacugcaaccuccaccucccagguu

SEQ ID NO: 395208 - RNA, 32 nt, Human
cucagaucacugcaaccuccgccuccuggguu

SEQ ID NO: 395209 - RNA, 32 nt, Human
cucagaucacugcaaccucugccucccggguu

SEQ ID NO: 395210 - RNA, 32 nt, Human
cucagaucacugcaaccucugccuccuggguu

SEQ ID NO: 395211 - RNA, 32 nt, Human
cucagaucauuucuagcaccaacucaaccuuu

SEQ ID NO: 395212 - RNA, 32 nt, Human
cucagaucccagagggaugcaggagcccuaua

SEQ ID NO: 395213 - RNA, 32 nt, Human
cucagaucccaggcucauuccucaaaucacuu

SEQ ID NO: 395214 - RNA, 32 nt, Human
cucagaucccugcucuuccugccuuuccugcc

SEQ ID NO: 395215 - RNA, 32 nt, Human
cucagauccuaccuguucagacacagccaucc

SEQ ID NO: 395216 - RNA, 17 nt, Human
cucagaucucuauuuca

SEQ ID NO: 395217 - RNA, 22 nt, Human
cucagaucucuucaugccgcug

SEQ ID NO: 395218 - RNA, 32 nt, Human
cucagaucucuuguacccaccaccccaucaag

SEQ ID NO: 395219 - RNA, 32 nt, Human
cucagaucugaucaagagucuggauuucuaac

SEQ ID NO: 395220 - RNA, 32 nt, Human
cucagaucugcacuccugucucuugggaagca

SEQ ID NO: 395221 - RNA, 17 nt, Human
cucagaucugccuccca

SEQ ID NO: 395222 - RNA, 20 nt, Human
cucagaucuuaacaauucca

SEQ ID NO: 395223 - RNA, 18 nt, Human
cucagaucuucugucuca

SEQ ID NO: 395224 - RNA, 19 nt, Human
cucagaugagucuguugca

SEQ ID NO: 395225 - RNA, 19 nt, Human
cucagaugccacuguguga

SEQ ID NO: 395226 - RNA, 21 nt, Human
cucagaugcugcauauugcug

SEQ ID NO: 395227 - RNA, 31 nt, Human
cucagauggacaagauuaccccaccuugccc

SEQ ID NO: 395228 - RNA, 32 nt, Human
cucagauggagugcugucuggaagugggagua

SEQ ID NO: 395229 - RNA, 32 nt, Human
cucagauggcuacauuuucaugauauuguuca

SEQ ID NO: 395230 - RNA, 32 nt, Human
cucagaugggagagagccagagagaggaguga

SEQ ID NO: 395231 - RNA, 32 nt, Human
cucagauggggaccccaaagaagcagaagcug

SEQ ID NO: 395232 - RNA, 32 nt, Human
cucagaugggugggacacaugccuuccucccc

SEQ ID NO: 395233 - RNA, 32 nt, Human
cucagauggucaccaucauuccugugcucaga

SEQ ID NO: 395234 - RNA, 32 nt, Human
cucagauguggcuagaccaaccagugggaaac

SEQ ID NO: 395235 - RNA, 32 nt, Human
cucagauuaaagacaggaguguggugagcucu

SEQ ID NO: 395236 - RNA, 32 nt, Human
cucagauuauuccuuucuggagcuuugagauc

SEQ ID NO: 395237 - RNA, 32 nt, Human
cucagauuauucuucucauugacaaugccagg

SEQ ID NO: 395238 - RNA, 32 nt, Human
cucagauucuccccugggcuucucccacgcag

SEQ ID NO: 395239 - RNA, 32 nt, Human
cucagauugauaccugccauggcuguaccuug

SEQ ID NO: 395240 - RNA, 32 nt, Human
cucagauugcgucacugcacuccaaccugggu

SEQ ID NO: 395241 - RNA, 32 nt, Human
cucagauugugcaguccauccccagucaaugg

SEQ ID NO: 395242 - RNA, 32 nt, Human
cucagauuucagugaaaaguucagaggaggcc

SEQ ID NO: 395243 - RNA, 17 nt, Human
cucagauuucugucuca

SEQ ID NO: 395244 - RNA, 32 nt, Human
cucagauuuucucacagacccuucccaauucc

SEQ ID NO: 395245 - RNA, 32 nt, Human
cucagcaaacucccuuucaaagcugugugacc

SEQ ID NO: 395246 - RNA, 32 nt, Human
cucagcaacacagugaaaccccgucucuacua

SEQ ID NO: 395247 - RNA, 19 nt, Human
cucagcaagcccagaagca

SEQ ID NO: 395248 - RNA, 32 nt, Human
cucagcaaguaggauacuucucauguuuuuga

SEQ ID NO: 395249 - RNA, 32 nt, Human
cucagcaauggcucuccuccagcuuuggcuuu

SEQ ID NO: 395250 - RNA, 20 nt, Human
cucagcaauucaaauucuag

SEQ ID NO: 395251 - RNA, 32 nt, Human
cucagcacaacaggcuggcgccaauggcauua

SEQ ID NO: 395252 - RNA, 32 nt, Human
cucagcacaauugagcagcuugcccagcuagg

SEQ ID NO: 395253 - RNA, 32 nt, Human
cucagcacacgcugugugaagggaucugagcu

SEQ ID NO: 395254 - RNA, 17 nt, Human
cucagcacacuguucca

SEQ ID NO: 395255 - RNA, 32 nt, Human
cucagcacagaguaggaagaacagugacauca

SEQ ID NO: 395256 - RNA, 32 nt, Human
cucagcacaggcagcucgcggucaugggcggc

SEQ ID NO: 395257 - RNA, 32 nt, Human
cucagcacauggacaguaguguuuugauuugu

SEQ ID NO: 395258 - RNA, 32 nt, Human
cucagcaccauccagucugauuccccguuucu

SEQ ID NO: 395259 - RNA, 32 nt, Human
cucagcacccaccccugccauucacuagucaa

SEQ ID NO: 395260 - RNA, 32 nt, Human
cucagcaccccugucucuagccacuuuggucc

SEQ ID NO: 395261 - RNA, 32 nt, Human
cucagcaccuggugcaaguaagcacaaucugg

SEQ ID NO: 395262 - RNA, 32 nt, Human
cucagcacguggugcaugcgccgcaucucguu

SEQ ID NO: 395263 - RNA, 31 nt, Human
cucagcacuagcuagaaaccucaagcccuug

SEQ ID NO: 395264 - RNA, 32 nt, Human
cucagcacugccugcucccauccuguguguua

SEQ ID NO: 395265 - RNA, 32 nt, Human
cucagcacuggggagcgcacuggugaggcaaa

SEQ ID NO: 395266 - RNA, 32 nt, Human
cucagcacuugcucaguaguuuugugaaaguc

SEQ ID NO: 395267 - RNA, 32 nt, Human
cucagcacuuuggugaggcagaaggaucucuu

SEQ ID NO: 395268 - RNA, 32 nt, Human
cucagcacuuuguugacgugguggugagagca

SEQ ID NO: 395269 - RNA, 32 nt, Human
cucagcagaucuuuacaagcaguuuccuuaua

SEQ ID NO: 395270 - RNA, 32 nt, Human
cucagcagaugacugaucuggcucuggaggac

SEQ ID NO: 395271 - RNA, 32 nt, Human
cucagcagauggcaaggagcaguaugaaaggc

SEQ ID NO: 395272 - RNA, 32 nt, Human
cucagcagccuguguguugugugaaauaaauu

SEQ ID NO: 395273 - RNA, 32 nt, Human
cucagcagcucugguggggcggguggggccau

SEQ ID NO: 395274 - RNA, 32 nt, Human
cucagcagcugcagaccgccccucaccaaccc

SEQ ID NO: 395275 - RNA, 32 nt, Human
cucagcaggaacagccuugaguugcuuuggac

SEQ ID NO: 395276 - RNA, 32 nt, Human
cucagcaggaagacagaggugccuggguggcc

SEQ ID NO: 395277 - RNA, 32 nt, Human
cucagcaggaagggaaggagaggugucugugc

SEQ ID NO: 395278 - RNA, 32 nt, Human
cucagcaggaauacucauaaagagacugagcc

SEQ ID NO: 395279 - RNA, 32 nt, Human
cucagcaggagaaaggcaaggggcucguucau

SEQ ID NO: 395280 - RNA, 32 nt, Human
cucagcagggcucugggaaugugccuuccuua

SEQ ID NO: 395281 - RNA, 32 nt, Human
cucagcagggugacuugccucagaggcuauau

SEQ ID NO: 395282 - RNA, 32 nt, Human
cucagcaguaggccuugccucagauccaaggu

SEQ ID NO: 395283 - RNA, 32 nt, Human
cucagcagugcccugaggaugggcuuccuugu

SEQ ID NO: 395284 - RNA, 22 nt, Human
cucagcaguucagcuccuucca

SEQ ID NO: 395285 - RNA, 32 nt, Human
cucagcaguugacauccaaaucuagccagagc

SEQ ID NO: 395286 - RNA, 32 nt, Human
cucagcauaaucagaggaggugaccccaagca

SEQ ID NO: 395287 - RNA, 32 nt, Human
cucagcauacggaggaccagcacuggcaccgg

SEQ ID NO: 395288 - RNA, 31 nt, Human
cucagcaucaacacaauuuccaggggaccuc

SEQ ID NO: 395289 - RNA, 32 nt, Human
cucagcaucaggauugauaaacaaauguagau

SEQ ID NO: 395290 - RNA, 32 nt, Human
cucagcaucauggaugcaggggcuugucugaa

SEQ ID NO: 395291 - RNA, 19 nt, Human
cucagcauccaccccguga

SEQ ID NO: 395292 - RNA, 23 nt, Human
cucagcauccccaccccaccccu

SEQ ID NO: 395293 - RNA, 32 nt, Human
cucagcaugguggcaugcgccuguaaucccag

SEQ ID NO: 395294 - RNA, 20 nt, Human
cucagcauuccugcccugga

SEQ ID NO: 395295 - RNA, 22 nt, Human
cucagcauuccuuacuauguga

SEQ ID NO: 395296 - RNA, 32 nt, Human
cucagcauuuccugaugacagaacagugccgu

SEQ ID NO: 395297 - RNA, 32 nt, Human
cucagccaacagcccuaacauuugccaagucu

SEQ ID NO: 395298 - RNA, 32 nt, Human
cucagccaagcuuguuuccugcucugaggcuu

SEQ ID NO: 395299 - RNA, 32 nt, Human
cucagccaaugcugcccagccugagggucccu

SEQ ID NO: 395300 - RNA, 32 nt, Human
cucagccaaugcuugaaccagcaggugggugg

SEQ ID NO: 395301 - RNA, 32 nt, Human
cucagccacaaaccucaguuuccaaauauuug

SEQ ID NO: 395302 - RNA, 32 nt, Human
cucagccacagcuguaagcagcucucugccag

SEQ ID NO: 395303 - RNA, 19 nt, Human
cucagccaccugcccgcca

SEQ ID NO: 395304 - RNA, 32 nt, Human
cucagccaccugcuaccucugccuucuggguu

SEQ ID NO: 395305 - RNA, 32 nt, Human
cucagccacgccucucucagcccaggucuccu

SEQ ID NO: 395306 - RNA, 32 nt, Human
cucagccacugagcaggcuguuccgggccuuu

SEQ ID NO: 395307 - RNA, 32 nt, Human
cucagccagcacuuuaggacaucugguuggau

SEQ ID NO: 395308 - RNA, 32 nt, Human
cucagccagcagaggcccagggcaagggacag

SEQ ID NO: 395309 - RNA, 18 nt, Human
cucagccagcagcccccu

SEQ ID NO: 395310 - RNA, 32 nt, Human
cucagccagcagcuccagcucagagcagugcc

SEQ ID NO: 395311 - RNA, 19 nt, Human
cucagccagcccagaagca

SEQ ID NO: 395312 - RNA, 32 nt, Human
cucagccagcuggccugugccgcucugacgug

SEQ ID NO: 395313 - RNA, 32 nt, Human
cucagccagcuggcugcaugaggagcagcuuu

SEQ ID NO: 395314 - RNA, 32 nt, Human
cucagccaggaauucaagaccagccugggcaa

SEQ ID NO: 395315 - RNA, 32 nt, Human
cucagccaggagaagagggugguguuuucacg

SEQ ID NO: 395316 - RNA, 19 nt, Human
cucagccaggagccagugg

SEQ ID NO: 395317 - RNA, 32 nt, Human
cucagccauccuuagagaacuguggugccugu

SEQ ID NO: 395318 - RNA, 27 nt, Human
cucagccaugccguguguaggcuuagc

SEQ ID NO: 395319 - RNA, 32 nt, Human
cucagccaugcucuccccaggguggggcuaug

SEQ ID NO: 395320 - RNA, 32 nt, Human
cucagcccaaguaccuggggcuagcagggcag

SEQ ID NO: 395321 - RNA, 32 nt, Human
cucagcccacacagugcugaaccaucuucccu

SEQ ID NO: 395322 - RNA, 32 nt, Human
cucagcccacccuucccgccacccuggccucc

SEQ ID NO: 395323 - RNA, 23 nt, Human
cucagcccacucauaccuagaga

SEQ ID NO: 395324 - RNA, 32 nt, Human
cucagcccacucucccuguuacacacugccca

SEQ ID NO: 395325 - RNA, 32 nt, Human
cucagcccacugacuucauugaucucuaaucu

SEQ ID NO: 395326 - RNA, 32 nt, Human
cucagcccagacaggcuccaccaggagaucaa

SEQ ID NO: 395327 - RNA, 24 nt, Human
cucagcccagccaggcccccuccc

SEQ ID NO: 395328 - RNA, 19 nt, Human
cucagcccagcccagccca

SEQ ID NO: 395329 - RNA, 22 nt, Human
cucagcccaggagagccagggg

SEQ ID NO: 395330 - RNA, 32 nt, Human
cucagcccaggcccagcuggggagaaggcgcu

SEQ ID NO: 395331 - RNA, 32 nt, Human
cucagccccaagccucuagucuggguguguac

SEQ ID NO: 395332 - RNA, 32 nt, Human
cucagccccagccuggccuuccuggugcccac

SEQ ID NO: 395333 - RNA, 32 nt, Human
cucagccccagcucugccaucuuggagccagc

SEQ ID NO: 395334 - RNA, 32 nt, Human
cucagccccaggagaagggacaaaagguacug

SEQ ID NO: 395335 - RNA, 32 nt, Human
cucagccccagucccagccacauguccuccau

SEQ ID NO: 395336 - RNA, 21 nt, Human
cucagcccccucagcccucaa

SEQ ID NO: 395337 - RNA, 32 nt, Human
cucagccccucuuuucccacauucauagccug

SEQ ID NO: 395338 - RNA, 32 nt, Human
cucagccccugcccaggcuagagggaaacagc

SEQ ID NO: 395339 - RNA, 32 nt, Human
cucagccccuucucccccgucagcccugcucu

SEQ ID NO: 395340 - RNA, 32 nt, Human
cucagccccuucuucacuaucugggccuccca

SEQ ID NO: 395341 - RNA, 32 nt, Human
cucagccccuucuucuuuccugccucaccuuc

SEQ ID NO: 395342 - RNA, 32 nt, Human
cucagccccuuguguuuacagacaaggacaug

SEQ ID NO: 395343 - RNA, 32 nt, Human
cucagcccgaguugcugggaugacaggcacac

SEQ ID NO: 395344 - RNA, 32 nt, Human
cucagcccuaucuccauuucccuaucuggcuc

SEQ ID NO: 395345 - RNA, 32 nt, Human
cucagcccucccagcccacuucugccuguuuu

SEQ ID NO: 395346 - RNA, 32 nt, Human
cucagcccuccccacccuggcucuccuugcau

SEQ ID NO: 395347 - RNA, 32 nt, Human
cucagcccuccuggcccuucagucuuggugcc

SEQ ID NO: 395348 - RNA, 32 nt, Human
cucagcccucucuugccaaaaagcacaagaug

SEQ ID NO: 395349 - RNA, 32 nt, Human
cucagcccugcucccaucuggcaccuucaagu

SEQ ID NO: 395350 - RNA, 32 nt, Human
cucagcccugcuucaucuagucuuccaguugg

SEQ ID NO: 395351 - RNA, 32 nt, Human
cucagcccuuccccuggcaccuuuacucuucg

SEQ ID NO: 395352 - RNA, 32 nt, Human
cucagccgccuugccagcgcccccagccgcgc

SEQ ID NO: 395353 - RNA, 32 nt, Human
cucagccgcuucucaaacugggucucagaaaa

SEQ ID NO: 395354 - RNA, 32 nt, Human
cucagccgggaggcccagaguguucugcagag

SEQ ID NO: 395355 - RNA, 23 nt, Human
cucagccuacaaucccaacacuu

SEQ ID NO: 395356 - RNA, 22 nt, Human
cucagccuacuccgcucacuga

SEQ ID NO: 395357 - RNA, 32 nt, Human
cucagccuauuccuuguucccugguggggucu

SEQ ID NO: 395358 - RNA, 32 nt, Human
cucagccucaccccaccucucgcugcucagcu

SEQ ID NO: 395359 - RNA, 32 nt, Human
cucagccucagggcucagaaggugccaguccg

SEQ ID NO: 395360 - RNA, 32 nt, Human
cucagccucauccuccccaggaccccugucca

SEQ ID NO: 395361 - RNA, 32 nt, Human
cucagccuccacucccugucugaaaccagaag

SEQ ID NO: 395362 - RNA, 32 nt, Human
cucagccuccacuuccccagaguaaauucaaa

SEQ ID NO: 395363 - RNA, 32 nt, Human
cucagccuccacuucuuauuuugauucuuuuc

SEQ ID NO: 395364 - RNA, 32 nt, Human
cucagccuccaggcuucagucuucccaacuuc

SEQ ID NO: 395365 - RNA, 32 nt, Human
cucagccucccaaaagcugggauuacaggcgu

SEQ ID NO: 395366 - RNA, 32 nt, Human
cucagccucccaaaguccugggauuacaggcg

SEQ ID NO: 395367 - RNA, 32 nt, Human
cucagccucccaaaguccugggauuacaggcu

SEQ ID NO: 395368 - RNA, 32 nt, Human
cucagccucccaagcuuucaccaucauggacc

SEQ ID NO: 395369 - RNA, 32 nt, Human
cucagccucccaaguacugggauuacagcuuc

SEQ ID NO: 395370 - RNA, 32 nt, Human
cucagccucccaaguacugggauuacaggugc

SEQ ID NO: 395371 - RNA, 32 nt, Human
cucagccucccaagucacugggauuauagaca

SEQ ID NO: 395372 - RNA, 32 nt, Human
cucagccucccaagugcugggauuacaggcgu

SEQ ID NO: 395373 - RNA, 32 nt, Human
cucagccucccaaguggcugggauuauaggug

SEQ ID NO: 395374 - RNA, 32 nt, Human
cucagccucccagcuacuuaggaggcugaggc

SEQ ID NO: 395375 - RNA, 32 nt, Human
cucagccucccaggugcugggauuauaggcgu

SEQ ID NO: 395376 - RNA, 32 nt, Human
cucagccucccuaguagcugggauuauaggcg

SEQ ID NO: 395377 - RNA, 21 nt, Human
cucagccuccgacccaggugg

SEQ ID NO: 395378 - RNA, 32 nt, Human
cucagccuccggagaacugggauuacaggcau

SEQ ID NO: 395379 - RNA, 32 nt, Human
cucagccuccuaaagugcugggauuauagcug

SEQ ID NO: 395380 - RNA, 32 nt, Human
cucagccuccuaaaugcugggauuacaggcgu

SEQ ID NO: 395381 - RNA, 32 nt, Human
cucagccuccuaagggcugggauuacaggaau

SEQ ID NO: 395382 - RNA, 32 nt, Human
cucagccuccuaagugcugggauuacagacgu

SEQ ID NO: 395383 - RNA, 32 nt, Human
cucagccuccugaguagcaauuacagggagca

SEQ ID NO: 395384 - RNA, 32 nt, Human
cucagccuccugaguagcugggauuauaggca

SEQ ID NO: 395385 - RNA, 32 nt, Human
cucagccuccugaguagcugggauuauaggcg

SEQ ID NO: 395386 - RNA, 32 nt, Human
cucagccuccugaguagcugggauuauaggua

SEQ ID NO: 395387 - RNA, 32 nt, Human
cucagccuccugaguagcugggauuauaggug

SEQ ID NO: 395388 - RNA, 32 nt, Human
cucagccuccugaguagcugggauuauggaca

SEQ ID NO: 395389 - RNA, 32 nt, Human
cucagccuccugaguagcugggauuaugggcg

SEQ ID NO: 395390 - RNA, 32 nt, Human
cucagccuccugaguagcugggauuaugggug

SEQ ID NO: 395391 - RNA, 32 nt, Human
cucagccuccugaguggcugggauuauaggug

SEQ ID NO: 395392 - RNA, 32 nt, Human
cucagccuccugaguggggauuacaggccaca

SEQ ID NO: 395393 - RNA, 32 nt, Human
cucagccuccugauucauggguccccuaguua

SEQ ID NO: 395394 - RNA, 32 nt, Human
cucagccuccugccauggugcagcccuccucu

SEQ ID NO: 395395 - RNA, 32 nt, Human
cucagccuccuguaaucccagcuacuugggag

SEQ ID NO: 395396 - RNA, 32 nt, Human
cucagccucgcucuccccgggacucucacgcu

SEQ ID NO: 395397 - RNA, 32 nt, Human
cucagccucucccagucucucccugcaguccu

SEQ ID NO: 395398 - RNA, 32 nt, Human
cucagccucucugcccacagacugcccccacg

SEQ ID NO: 395399 - RNA, 32 nt, Human
cucagccucucuggccgccaguagccugaggc

SEQ ID NO: 395400 - RNA, 32 nt, Human
cucagccucugccucccagccucuuucugagg

SEQ ID NO: 395401 - RNA, 32 nt, Human
cucagccucugcuauuuccuuugaggaaggua

SEQ ID NO: 395402 - RNA, 32 nt, Human
cucagccucuggcccucuuggcucagauucaa

SEQ ID NO: 395403 - RNA, 32 nt, Human
cucagccucuggguccagagccucagcuccua

SEQ ID NO: 395404 - RNA, 32 nt, Human
cucagccucuuuagcugggauuacaggcaccc

SEQ ID NO: 395405 - RNA, 32 nt, Human
cucagccugaguagcugggacuacaggugugu

SEQ ID NO: 395406 - RNA, 32 nt, Human
cucagccugaguagcugggaugggacuacaga

SEQ ID NO: 395407 - RNA, 32 nt, Human
cucagccugagugggcccuggggacacuguca

SEQ ID NO: 395408 - RNA, 32 nt, Human
cucagccugcaaccucuauccuggaaccuguc

SEQ ID NO: 395409 - RNA, 18 nt, Human
cucagccugcacugggcc

SEQ ID NO: 395410 - RNA, 21 nt, Human
cucagccugcagacacaggga

SEQ ID NO: 395411 - RNA, 32 nt, Human
cucagccugcagagaagaaagugaggccggga

SEQ ID NO: 395412 - RNA, 32 nt, Human
cucagccugcagcucuacuacauccccgugcu

SEQ ID NO: 395413 - RNA, 32 nt, Human
cucagccugccaggaagccaagcccuacagug

SEQ ID NO: 395414 - RNA, 20 nt, Human
cucagccugcccagcaggga

SEQ ID NO: 395415 - RNA, 22 nt, Human
cucagccugccuccccaaggga

SEQ ID NO: 395416 - RNA, 32 nt, Human
cucagccugcugcccaggcugugcagcgcagc

SEQ ID NO: 395417 - RNA, 32 nt, Human
cucagccuggaauccccaccuugcccacccca

SEQ ID NO: 395418 - RNA, 20 nt, Human
cucagccuggagugcaguga

SEQ ID NO: 395419 - RNA, 18 nt, Human
cucagccuggcgcugcug

SEQ ID NO: 395420 - RNA, 32 nt, Human
cucagccuggcgguucuaccuccgaggguucg

SEQ ID NO: 395421 - RNA, 32 nt, Human
cucagccugggcucccagccccucucuccuuu

SEQ ID NO: 395422 - RNA, 32 nt, Human
cucagccuggggcucccugagucagggcugug

SEQ ID NO: 395423 - RNA, 32 nt, Human
cucagccugggugacagagcaagacuccgucu

SEQ ID NO: 395424 - RNA, 32 nt, Human
cucagccugguaucagggaaauugagacuuau

SEQ ID NO: 395425 - RNA, 32 nt, Human
cucagccuggugaaccacacaggccagcgcuc

SEQ ID NO: 395426 - RNA, 22 nt, Human
cucagccuguaagcaaagcagg

SEQ ID NO: 395427 - RNA, 32 nt, Human
cucagccuuccaaagggagggauuacuggcgu

SEQ ID NO: 395428 - RNA, 32 nt, Human
cucagccuucccgguucgggaaaggggaagaa

SEQ ID NO: 395429 - RNA, 32 nt, Human
cucagccuucucugccccuccugggaaucugu

SEQ ID NO: 395430 - RNA, 32 nt, Human
cucagccuucuggcuagcucuuagcuuccagc

SEQ ID NO: 395431 - RNA, 32 nt, Human
cucagccuucuguguggaggauuugcacuugg

SEQ ID NO: 395432 - RNA, 32 nt, Human
cucagccuugcaccccagcacugagaagcuac

SEQ ID NO: 395433 - RNA, 23 nt, Human
cucagccuugggccaagccugga

SEQ ID NO: 395434 - RNA, 24 nt, Human
cucagccuuguaaucccagcacuu

SEQ ID NO: 395435 - RNA, 32 nt, Human
cucagccuuuuucauaaucagaagaaugcaaa

SEQ ID NO: 395436 - RNA, 32 nt, Human
cucagcgaaauugugcccagauuccugaccua

SEQ ID NO: 395437 - RNA, 32 nt, Human
cucagcgacacugucauuucugcuucauuacu

SEQ ID NO: 395438 - RNA, 32 nt, Human
cucagcgaccgggcccuucuccaccuccugcc

SEQ ID NO: 395439 - RNA, 32 nt, Human
cucagcgaggcagaggguggggcugcacagag

SEQ ID NO: 395440 - RNA, 32 nt, Human
cucagcgauuacaggaaugcaccaccacgccc

SEQ ID NO: 395441 - RNA, 32 nt, Human
cucagcgcagcccuggcccaggaaggcaggag

SEQ ID NO: 395442 - RNA, 32 nt, Human
cucagcgcagccgccgcccgcggagccagcac

SEQ ID NO: 395443 - RNA, 24 nt, Human
cucagcgccacucccacccccggc

SEQ ID NO: 395444 - RNA, 32 nt, Human
cucagcgccagccugucccauggacacuccag

SEQ ID NO: 395445 - RNA, 21 nt, Human
cucagcgcccugccgccgccg

SEQ ID NO: 395446 - RNA, 32 nt, Human
cucagcgccucaaaugagagacuggugugggg

SEQ ID NO: 395447 - RNA, 32 nt, Human
cucagcggacucgauaaucugccugcugaugu

SEQ ID NO: 395448 - RNA, 32 nt, Human
cucagcggaggugagaggagaggaggagaaaa

SEQ ID NO: 395449 - RNA, 21 nt, Human
cucagcggccagcuccucgcc

SEQ ID NO: 395450 - RNA, 32 nt, Human
cucagcgggcagugcuuagagcacaggccccu

SEQ ID NO: 395451 - RNA, 32 nt, Human
cucagcgucccccagucacacuguccccauug

SEQ ID NO: 395452 - RNA, 32 nt, Human
cucagcgucugccuccccagcacacccucauu

SEQ ID NO: 395453 - RNA, 32 nt, Human
cucagcuacaugugaccuccagcuuggugagg

SEQ ID NO: 395454 - RNA, 32 nt, Human
cucagcuaccccucagcuccgguagucgccag

SEQ ID NO: 395455 - RNA, 20 nt, Human
cucagcuaccgccgcugccg

SEQ ID NO: 395456 - RNA, 23 nt, Human
cucagcuacuccuaaccuccacu

SEQ ID NO: 395457 - RNA, 32 nt, Human
cucagcuagauuggaagagaggaugggaagac

SEQ ID NO: 395458 - RNA, 32 nt, Human
cucagcuauccuucuaauuucucucuaauuuc

SEQ ID NO: 395459 - RNA, 32 nt, Human
cucagcuauggccugggcucuagcuuuggcuc

SEQ ID NO: 395460 - RNA, 32 nt, Human
cucagcucaacauggcuugacauggugggcac

SEQ ID NO: 395461 - RNA, 32 nt, Human
cucagcucacagcaaccucugccuccuggguu

SEQ ID NO: 395462 - RNA, 24 nt, Human
cucagcucaccacaaccuccaccu

SEQ ID NO: 395463 - RNA, 24 nt, Human
cucagcucaccacaaccuccgccu

SEQ ID NO: 395464 - RNA, 32 nt, Human
cucagcucaccacaaccucugccuccccgguu

SEQ ID NO: 395465 - RNA, 24 nt, Human
cucagcucaccgcaaccuccaccu

SEQ ID NO: 395466 - RNA, 24 nt, Human
cucagcucaccgcaaccuccgccu

SEQ ID NO: 395467 - RNA, 32 nt, Human
cucagcucaccgcaaccucugccucccagauu

SEQ ID NO: 395468 - RNA, 32 nt, Human
cucagcucaccgcaaucuccgccucccagauu

SEQ ID NO: 395469 - RNA, 32 nt, Human
cucagcucaccgccacuuucuccugccuuccu

SEQ ID NO: 395470 - RNA, 24 nt, Human
cucagcucacuacaaccuccgccu

SEQ ID NO: 395471 - RNA, 24 nt, Human
cucagcucacuacaaccucugccu

SEQ ID NO: 395472 - RNA, 32 nt, Human
cucagcucacuacaaccucugccucccagguu

SEQ ID NO: 395473 - RNA, 32 nt, Human
cucagcucacuacaaccucugccuucugguuu

SEQ ID NO: 395474 - RNA, 25 nt, Human
cucagcucacucugcaaccuccacu

SEQ ID NO: 395475 - RNA, 32 nt, Human
cucagcucacucugcaaccuccacuucccagg

SEQ ID NO: 395476 - RNA, 32 nt, Human
cucagcucacugaaaccucugccucccggguu

SEQ ID NO: 395477 - RNA, 32 nt, Human
cucagcucacugcaaacuccaccucccagguu

SEQ ID NO: 395478 - RNA, 32 nt, Human
cucagcucacugcaaacucugccucccgaauu

SEQ ID NO: 395479 - RNA, 32 nt, Human
cucagcucacugcaacauccaccuccuggguu

SEQ ID NO: 395480 - RNA, 32 nt, Human
cucagcucacugcaacauccgccucugggguu

SEQ ID NO: 395481 - RNA, 24 nt, Human
cucagcucacugcaaccaacaccu

SEQ ID NO: 395482 - RNA, 32 nt, Human
cucagcucacugcaaccacugccucccaggcu

SEQ ID NO: 395483 - RNA, 32 nt, Human
cucagcucacugcaacccccgccuccuggguu

SEQ ID NO: 395484 - RNA, 32 nt, Human
cucagcucacugcaaccuacgccuucuggguu

SEQ ID NO: 395485 - RNA, 21 nt, Human
cucagcucacugcaaccucca

SEQ ID NO: 395486 - RNA, 24 nt, Human
cucagcucacugcaaccuccaccu

SEQ ID NO: 395487 - RNA, 32 nt, Human
cucagcucacugcaaccuccaccucccagacu

SEQ ID NO: 395488 - RNA, 32 nt, Human
cucagcucacugcaaccuccaccucccaggau

SEQ ID NO: 395489 - RNA, 32 nt, Human
cucagcucacugcaaccuccaccucccaggcu

SEQ ID NO: 395490 - RNA, 32 nt, Human
cucagcucacugcaaccuccaccucccagguu

SEQ ID NO: 395491 - RNA, 32 nt, Human
cucagcucacugcaaccuccaccucccggguc

SEQ ID NO: 395492 - RNA, 32 nt, Human
cucagcucacugcaaccuccaccucccggguu

SEQ ID NO: 395493 - RNA, 32 nt, Human
cucagcucacugcaaccuccaccucccugguu

SEQ ID NO: 395494 - RNA, 32 nt, Human
cucagcucacugcaaccuccaccuccggguuc

SEQ ID NO: 395495 - RNA, 32 nt, Human
cucagcucacugcaaccuccaccuccuggguu

SEQ ID NO: 395496 - RNA, 32 nt, Human
cucagcucacugcaaccuccaccucuuauguu

SEQ ID NO: 395497 - RNA, 24 nt, Human
cucagcucacugcaaccuccaucu

SEQ ID NO: 395498 - RNA, 32 nt, Human
cucagcucacugcaaccuccaucuccuggauu

SEQ ID NO: 395499 - RNA, 32 nt, Human
cucagcucacugcaaccucccccuccuggguu

SEQ ID NO: 395500 - RNA, 32 nt, Human
cucagcucacugcaaccuccgcccccuggguu

SEQ ID NO: 395501 - RNA, 24 nt, Human
cucagcucacugcaaccuccgccu

SEQ ID NO: 395502 - RNA, 32 nt, Human
cucagcucacugcaaccuccgccucccaaguu

SEQ ID NO: 395503 - RNA, 32 nt, Human
cucagcucacugcaaccuccgccucccagguu

SEQ ID NO: 395504 - RNA, 32 nt, Human
cucagcucacugcaaccuccgccucccggguu

SEQ ID NO: 395505 - RNA, 32 nt, Human
cucagcucacugcaaccuccgccuccugaggu

SEQ ID NO: 395506 - RNA, 32 nt, Human
cucagcucacugcaaccuccgccuccugggau

SEQ ID NO: 395507 - RNA, 32 nt, Human
cucagcucacugcaaccuccgccuccuggguu

SEQ ID NO: 395508 - RNA, 32 nt, Human
cucagcucacugcaaccuccgccucuuggguu

SEQ ID NO: 395509 - RNA, 32 nt, Human
cucagcucacugcaaccuccgccugcuggguu

SEQ ID NO: 395510 - RNA, 32 nt, Human
cucagcucacugcaaccuccgccuucuggguu

SEQ ID NO: 395511 - RNA, 23 nt, Human
cucagcucacugcaaccuccgcu

SEQ ID NO: 395512 - RNA, 24 nt, Human
cucagcucacugcaaccuccgucu

SEQ ID NO: 395513 - RNA, 32 nt, Human
cucagcucacugcaaccuccgucuccaggguu

SEQ ID NO: 395514 - RNA, 32 nt, Human
cucagcucacugcaaccuccgucucuacuaaa

SEQ ID NO: 395515 - RNA, 32 nt, Human
cucagcucacugcaaccuccguuuccuggguu

SEQ ID NO: 395516 - RNA, 24 nt, Human
cucagcucacugcaaccuccuccu

SEQ ID NO: 395517 - RNA, 32 nt, Human
cucagcucacugcaaccuccuccucccggguu

SEQ ID NO: 395518 - RNA, 32 nt, Human
cucagcucacugcaaccuccuccuucuggguu

SEQ ID NO: 395519 - RNA, 32 nt, Human
cucagcucacugcaaccucgaccucuuggguu

SEQ ID NO: 395520 - RNA, 24 nt, Human
cucagcucacugcaaccucuaccu

SEQ ID NO: 395521 - RNA, 32 nt, Human
cucagcucacugcaaccucuaccuccuggguu

SEQ ID NO: 395522 - RNA, 24 nt, Human
cucagcucacugcaaccucucucu

SEQ ID NO: 395523 - RNA, 32 nt, Human
cucagcucacugcaaccucucucucccggguu

SEQ ID NO: 395524 - RNA, 24 nt, Human
cucagcucacugcaaccucugacu

SEQ ID NO: 395525 - RNA, 22 nt, Human
cucagcucacugcaaccucugc

SEQ ID NO: 395526 - RNA, 24 nt, Human
cucagcucacugcaaccucugccu

SEQ ID NO: 395527 - RNA, 32 nt, Human
cucagcucacugcaaccucugccuccagaguu

SEQ ID NO: 395528 - RNA, 32 nt, Human
cucagcucacugcaaccucugccucccagguu

SEQ ID NO: 395529 - RNA, 32 nt, Human
cucagcucacugcaaccucugccucccaguuc

SEQ ID NO: 395530 - RNA, 32 nt, Human
cucagcucacugcaaccucugccucccggauu

SEQ ID NO: 395531 - RNA, 32 nt, Human
cucagcucacugcaaccucugccucccggguu

SEQ ID NO: 395532 - RNA, 32 nt, Human
cucagcucacugcaaccucugccucccugguu

SEQ ID NO: 395533 - RNA, 32 nt, Human
cucagcucacugcaaccucugccuccugaguu

SEQ ID NO: 395534 - RNA, 32 nt, Human
cucagcucacugcaaccucugccuccuggauu

SEQ ID NO: 395535 - RNA, 32 nt, Human
cucagcucacugcaaccucugccuccugggcu

SEQ ID NO: 395536 - RNA, 32 nt, Human
cucagcucacugcaaccucugccuccuggguu

SEQ ID NO: 395537 - RNA, 32 nt, Human
cucagcucacugcaaccucugccuccugguuc

SEQ ID NO: 395538 - RNA, 32 nt, Human
cucagcucacugcaaccucugccuucuggauu

SEQ ID NO: 395539 - RNA, 32 nt, Human
cucagcucacugcaaccucugcuucccggguu

SEQ ID NO: 395540 - RNA, 24 nt, Human
cucagcucacugcaaccucugucu

SEQ ID NO: 395541 - RNA, 32 nt, Human
cucagcucacugcaaccucugucucccggguu

SEQ ID NO: 395542 - RNA, 32 nt, Human
cucagcucacugcaaccucugucuccuggguu

SEQ ID NO: 395543 - RNA, 32 nt, Human
cucagcucacugcaaccugugccucccggcuu

SEQ ID NO: 395544 - RNA, 32 nt, Human
cucagcucacugcaaccuuggccucccguguu

SEQ ID NO: 395545 - RNA, 32 nt, Human
cucagcucacugcaaccuuugucucccgggcu

SEQ ID NO: 395546 - RNA, 24 nt, Human
cucagcucacugcaacguccaccu

SEQ ID NO: 395547 - RNA, 32 nt, Human
cucagcucacugcaacguccaccuccuggguu

SEQ ID NO: 395548 - RNA, 32 nt, Human
cucagcucacugcaacguccaccucuugaguu

SEQ ID NO: 395549 - RNA, 32 nt, Human
cucagcucacugcaacgucugccucccggguu

SEQ ID NO: 395550 - RNA, 24 nt, Human
cucagcucacugcaacuuccaccu

SEQ ID NO: 395551 - RNA, 32 nt, Human
cucagcucacugcaacuucugccucccagguu

SEQ ID NO: 395552 - RNA, 32 nt, Human
cucagcucacugcaacuucugccuccuggguu

SEQ ID NO: 395553 - RNA, 32 nt, Human
cucagcucacugcaacuucugccuccugguau

SEQ ID NO: 395554 - RNA, 24 nt, Human
cucagcucacugcaagcuccaacu

SEQ ID NO: 395555 - RNA, 24 nt, Human
cucagcucacugcaagcuccaccu

SEQ ID NO: 395556 - RNA, 32 nt, Human
cucagcucacugcaagcuccaccucccggguu

SEQ ID NO: 395557 - RNA, 32 nt, Human
cucagcucacugcaagcuccgccucccagguu

SEQ ID NO: 395558 - RNA, 32 nt, Human
cucagcucacugcaagcuccgccucccgggua

SEQ ID NO: 395559 - RNA, 32 nt, Human
cucagcucacugcaagcuccgccuccucccgg

SEQ ID NO: 395560 - RNA, 32 nt, Human
cucagcucacugcaagcuccgccuccuggguu

SEQ ID NO: 395561 - RNA, 32 nt, Human
cucagcucacugcaagcucuaccucuugguuc

SEQ ID NO: 395562 - RNA, 32 nt, Human
cucagcucacugcaagcucugccucccggguu

SEQ ID NO: 395563 - RNA, 32 nt, Human
cucagcucacugcaagcucugccucccguguu

SEQ ID NO: 395564 - RNA, 32 nt, Human
cucagcucacugcaagcucugccucucagguu

SEQ ID NO: 395565 - RNA, 24 nt, Human
cucagcucacugcaaucuccaccu

SEQ ID NO: 395566 - RNA, 32 nt, Human
cucagcucacugcaaucuccaccuccuggguu

SEQ ID NO: 395567 - RNA, 32 nt, Human
cucagcucacugcaaucuucaccuccuaggcu

SEQ ID NO: 395568 - RNA, 32 nt, Human
cucagcucacugcacccuccgccucucggguu

SEQ ID NO: 395569 - RNA, 32 nt, Human
cucagcucacugcacccucugugucccggauu

SEQ ID NO: 395570 - RNA, 32 nt, Human
cucagcucacugcagccacugccucccagguu

SEQ ID NO: 395571 - RNA, 32 nt, Human
cucagcucacugcagcccugacugccuaggcu

SEQ ID NO: 395572 - RNA, 24 nt, Human
cucagcucacugcagccucaaacu

SEQ ID NO: 395573 - RNA, 32 nt, Human
cucagcucacugcagccucaacugccccaggu

SEQ ID NO: 395574 - RNA, 24 nt, Human
cucagcucacugcagccuccaacu

SEQ ID NO: 395575 - RNA, 24 nt, Human
cucagcucacugcagccuccaccu

SEQ ID NO: 395576 - RNA, 32 nt, Human
cucagcucacugcagccuccaccucccagguu

SEQ ID NO: 395577 - RNA, 32 nt, Human
cucagcucacugcagccuccaccuccuggguu

SEQ ID NO: 395578 - RNA, 23 nt, Human
cucagcucacugcagccuccacu

SEQ ID NO: 395579 - RNA, 32 nt, Human
cucagcucacugcagccuccacuuccuggguu

SEQ ID NO: 395580 - RNA, 32 nt, Human
cucagcucacugcagccuccgucucccagguu

SEQ ID NO: 395581 - RNA, 32 nt, Human
cucagcucacugcagccucugccacccagauu

SEQ ID NO: 395582 - RNA, 32 nt, Human
cucagcucacugcagccucugccucccggguu

SEQ ID NO: 395583 - RNA, 32 nt, Human
cucagcucacugcagccucugccuccugaguu

SEQ ID NO: 395584 - RNA, 32 nt, Human
cucagcucacugcagccucugucucccgggcu

SEQ ID NO: 395585 - RNA, 32 nt, Human
cucagcucacugcagccuugaccuccuggguu

SEQ ID NO: 395586 - RNA, 32 nt, Human
cucagcucacugcagcuuugaccuugccgggc

SEQ ID NO: 395587 - RNA, 32 nt, Human
cucagcucacugcaggcucugccuccuggguu

SEQ ID NO: 395588 - RNA, 32 nt, Human
cucagcucacugcagucucugccucccggguu

SEQ ID NO: 395589 - RNA, 32 nt, Human
cucagcucacugcauccucugccucccggguu

SEQ ID NO: 395590 - RNA, 32 nt, Human
cucagcucacugccaccucugccucccagguu

SEQ ID NO: 395591 - RNA, 32 nt, Human
cucagcucacugccaccuuugccuccuggguu

SEQ ID NO: 395592 - RNA, 24 nt, Human
cucagcucacugcgaccuccaccu

SEQ ID NO: 395593 - RNA, 32 nt, Human
cucagcucacugcgaccuccaccuccuggguu

SEQ ID NO: 395594 - RNA, 32 nt, Human
cucagcucacugcgaccugcaccuccuggguu

SEQ ID NO: 395595 - RNA, 32 nt, Human
cucagcucacugcggccuugaacuccugggcu

SEQ ID NO: 395596 - RNA, 32 nt, Human
cucagcucacuggagccucugccuuccagguu

SEQ ID NO: 395597 - RNA, 24 nt, Human
cucagcucacuguaaccuccaccu

SEQ ID NO: 395598 - RNA, 24 nt, Human
cucagcucacuguaaccucugccu

SEQ ID NO: 395599 - RNA, 32 nt, Human
cucagcucacuguaaccucugccucccugcuu

SEQ ID NO: 395600 - RNA, 21 nt, Human
cucagcucacuguacuccagc

SEQ ID NO: 395601 - RNA, 32 nt, Human
cucagcucacuguacuccagcccggguucaag

SEQ ID NO: 395602 - RNA, 32 nt, Human
cucagcucagcaucuucagcugugcccgggcu

SEQ ID NO: 395603 - RNA, 32 nt, Human
cucagcucagcccucaggugcaguggcccuac

SEQ ID NO: 395604 - RNA, 32 nt, Human
cucagcucagcgccagccugucccauggacac

SEQ ID NO: 395605 - RNA, 32 nt, Human
cucagcucagcuuuuguagauccuuaugacac

SEQ ID NO: 395606 - RNA, 32 nt, Human
cucagcucagucuccccucucucccuguccug

SEQ ID NO: 395607 - RNA, 32 nt, Human
cucagcucauagacccucccucccugcaugug

SEQ ID NO: 395608 - RNA, 32 nt, Human
cucagcuccagcauaccccaccaccuucuccu

SEQ ID NO: 395609 - RNA, 32 nt, Human
cucagcuccagccucacacugaccucagcagu

SEQ ID NO: 395610 - RNA, 32 nt, Human
cucagcuccaugcaaccucugccuccuggguu

SEQ ID NO: 395611 - RNA, 32 nt, Human
cucagcuccaugucuuguacacacagaaacau

SEQ ID NO: 395612 - RNA, 32 nt, Human
cucagcucccaaagugcugggauuacaggcau

SEQ ID NO: 395613 - RNA, 32 nt, Human
cucagcucccaaguagcugggauuacaggcau

SEQ ID NO: 395614 - RNA, 32 nt, Human
cucagcucccacaaaugacagccccuuaagca

SEQ ID NO: 395615 - RNA, 24 nt, Human
cucagcucccugcaaccuccaccu

SEQ ID NO: 395616 - RNA, 32 nt, Human
cucagcucccuuuaaccuccagcuccuggguu

SEQ ID NO: 395617 - RNA, 32 nt, Human
cucagcuccgugugcccacauggccccaggcc

SEQ ID NO: 395618 - RNA, 32 nt, Human
cucagcuccguucacucucugccuucugcccc

SEQ ID NO: 395619 - RNA, 32 nt, Human
cucagcuccuucuuucauuccagaccugcccc

SEQ ID NO: 395620 - RNA, 32 nt, Human
cucagcuccuuggaagucuugggguggggauc

SEQ ID NO: 395621 - RNA, 20 nt, Human
cucagcucgccgcagccccg

SEQ ID NO: 395622 - RNA, 24 nt, Human
cucagcucgcugcaacccccaccu

SEQ ID NO: 395623 - RNA, 32 nt, Human
cucagcucuagggugaaaggcgagagguugca

SEQ ID NO: 395624 - RNA, 32 nt, Human
cucagcucucccucacaccucccuucauccca

SEQ ID NO: 395625 - RNA, 32 nt, Human
cucagcucuccucugcgccggcccgcucacuc

SEQ ID NO: 395626 - RNA, 32 nt, Human
cucagcucucgaaacagaaggcagcagcccau

SEQ ID NO: 395627 - RNA, 32 nt, Human
cucagcucugacagccccuccuccaggaaggc

SEQ ID NO: 395628 - RNA, 32 nt, Human
cucagcucugagccauucacacaucuucaccc

SEQ ID NO: 395629 - RNA, 32 nt, Human
cucagcucuggaguucagcagcaacagcagca

SEQ ID NO: 395630 - RNA, 19 nt, Human
cucagcucugucugcucaa

SEQ ID NO: 395631 - RNA, 32 nt, Human
cucagcucuuugacaaucacuguggcuguugg

SEQ ID NO: 395632 - RNA, 32 nt, Human
cucagcucuuuuucuugcacuuccuuggagga

SEQ ID NO: 395633 - RNA, 32 nt, Human
cucagcugagagagcuggacagacuccauuuu

SEQ ID NO: 395634 - RNA, 32 nt, Human
cucagcugagcugaagcuggauuauuaaagug

SEQ ID NO: 395635 - RNA, 32 nt, Human
cucagcugaggccacccgagccccagggagga

SEQ ID NO: 395636 - RNA, 32 nt, Human
cucagcugcacugcggccugguggcagugugg

SEQ ID NO: 395637 - RNA, 32 nt, Human
cucagcugcagaggaggaaagggaaaggguag

SEQ ID NO: 395638 - RNA, 32 nt, Human
cucagcugcccaggcuggagugugguggcgcc

SEQ ID NO: 395639 - RNA, 32 nt, Human
cucagcugcccgucucuggccugggccccugc

SEQ ID NO: 395640 - RNA, 32 nt, Human
cucagcugcccuuuggaauaaagcugccugau

SEQ ID NO: 395641 - RNA, 32 nt, Human
cucagcugccuccccugcccuuucucagcugc

SEQ ID NO: 395642 - RNA, 31 nt, Human
cucagcugccucucagggacugcacuguucc

SEQ ID NO: 395643 - RNA, 32 nt, Human
cucagcugcugcaaccuccaccucccggguuc

SEQ ID NO: 395644 - RNA, 32 nt, Human
cucagcuggaacaguggggacaggaggaggca

SEQ ID NO: 395645 - RNA, 32 nt, Human
cucagcuggcuguccugguucacucagaagau

SEQ ID NO: 395646 - RNA, 32 nt, Human
cucagcugggaaggagguggucucaagcagcc

SEQ ID NO: 395647 - RNA, 32 nt, Human
cucagcuggggguggaggggcaauuggaaggc

SEQ ID NO: 395648 - RNA, 15 nt, Human
cucagcuggguccag

SEQ ID NO: 395649 - RNA, 21 nt, Human
cucagcugguaaauuguucca

SEQ ID NO: 395650 - RNA, 32 nt, Human
cucagcuguacuuuugugggccugucaucuug

SEQ ID NO: 395651 - RNA, 32 nt, Human
cucagcugucgguuuaaagagacacugagggg

SEQ ID NO: 395652 - RNA, 22 nt, Human
cucagcuguggccaccaacaca

SEQ ID NO: 395653 - RNA, 32 nt, Human
cucagcugugggcucagaaacugcuagguaaa

SEQ ID NO: 395654 - RNA, 32 nt, Human
cucagcuguguauccuaucuguucuagcuucu

SEQ ID NO: 395655 - RNA, 32 nt, Human
cucagcugugucccauccccacugccuggucc

SEQ ID NO: 395656 - RNA, 32 nt, Human
cucagcugugugugcacaugcacacccacccc

SEQ ID NO: 395657 - RNA, 24 nt, Human
cucagcuuaccacaaccuccaccu

SEQ ID NO: 395658 - RNA, 32 nt, Human
cucagcuuacggcaaucucugcuucccggguu

SEQ ID NO: 395659 - RNA, 32 nt, Human
cucagcuuacugcaaccucugccucccggguu

SEQ ID NO: 395660 - RNA, 32 nt, Human
cucagcuuacugcacccucugccucccgguuu

SEQ ID NO: 395661 - RNA, 32 nt, Human
cucagcuuacuguaaccucugccuccuggauu

SEQ ID NO: 395662 - RNA, 32 nt, Human
cucagcuuauuacaaccucugccuccugggcu

SEQ ID NO: 395663 - RNA, 32 nt, Human
cucagcuucaaggagaaagaguucagaggccc

SEQ ID NO: 395664 - RNA, 32 nt, Human
cucagcuuccacugccgucuccacaggaaacc

SEQ ID NO: 395665 - RNA, 32 nt, Human
cucagcuuccaucaccccuagcaauauguauu

SEQ ID NO: 395666 - RNA, 32 nt, Human
cucagcuucccaaggagcugggacugcaggca

SEQ ID NO: 395667 - RNA, 32 nt, Human
cucagcuucccagauagcugggccacaggcgu

SEQ ID NO: 395668 - RNA, 32 nt, Human
cucagcuucccaggacccuaagcugcuccugg

SEQ ID NO: 395669 - RNA, 32 nt, Human
cucagcuucccuugcguuuaaggccugcccua

SEQ ID NO: 395670 - RNA, 32 nt, Human
cucagcuuccugaggagcugggauuauaggug

SEQ ID NO: 395671 - RNA, 32 nt, Human
cucagcuucgagccgaggugcagugagcuggu

SEQ ID NO: 395672 - RNA, 23 nt, Human
cucagcuucuaaucccagcacuu

SEQ ID NO: 395673 - RNA, 32 nt, Human
cucagcuucuaaucccagcacuuugguaggca

SEQ ID NO: 395674 - RNA, 32 nt, Human
cucagcuucucaaaguacugggauuauauagg

SEQ ID NO: 395675 - RNA, 32 nt, Human
cucagcuucugccuccugucuccugggacccu

SEQ ID NO: 395676 - RNA, 32 nt, Human
cucagcuugaagcagggccucgugccccggcg

SEQ ID NO: 395677 - RNA, 32 nt, Human
cucagcuugaauacaguuccuggugcaucaaa

SEQ ID NO: 395678 - RNA, 32 nt, Human
cucagcuugacuucugucaugaaucagugcuc

SEQ ID NO: 395679 - RNA, 23 nt, Human
cucagcuugcuccccuccucccu

SEQ ID NO: 395680 - RNA, 32 nt, Human
cucagcuugggucagggcagagccuguuaccu

SEQ ID NO: 395681 - RNA, 32 nt, Human
cucagcuugucuggacaguguuuuucaaaucc

SEQ ID NO: 395682 - RNA, 32 nt, Human
cucagcuugugagcuucuucccgggagagcag

SEQ ID NO: 395683 - RNA, 32 nt, Human
cucccaaaaugcugggauuacaggugugagcc

SEQ ID NO: 395684 - RNA, 32 nt, Human
cucccaaaaugcugggauuacaugcaugagcc

SEQ ID NO: 395685 - RNA, 32 nt, Human
cucccaaaaugcugggauuaccggugugagcc

SEQ ID NO: 395686 - RNA, 24 nt, Human
cucccaaaaugcugggauuagagg

SEQ ID NO: 395687 - RNA, 32 nt, Human
cucccaaaaugcugggauuagaggugugagcc

SEQ ID NO: 395688 - RNA, 32 nt, Human
cucccaaaaugcugggauuauaggcaugagcc

SEQ ID NO: 395689 - RNA, 32 nt, Human
cucccaaaaugcugggauugcagacauggacc

SEQ ID NO: 395690 - RNA, 32 nt, Human
cucccaaaaugcugggguuacaggcaugagcc

SEQ ID NO: 395691 - RNA, 32 nt, Human
cucccaaaaugcuucgauugcaggcaugagcc

SEQ ID NO: 395692 - RNA, 32 nt, Human
cucccaaaaugcuuggauuacaggcaugaacc

SEQ ID NO: 395693 - RNA, 32 nt, Human
cucccaaaauggugggauuacagguguguggg

SEQ ID NO: 395694 - RNA, 24 nt, Human
cucccaaaauguugagauugcagg

SEQ ID NO: 395695 - RNA, 32 nt, Human
cucccaaaauguugcaauuacaggcaugagca

SEQ ID NO: 395696 - RNA, 23 nt, Human
cucccaaaauguugggauuacag

SEQ ID NO: 395697 - RNA, 32 nt, Human
cucccaaaauguugggauuacaggcaugagcc

SEQ ID NO: 395698 - RNA, 24 nt, Human
cucccaaaauucugggauuacagg

SEQ ID NO: 395699 - RNA, 32 nt, Human
cucccaaaauucugggauuacaggcauaagcc

SEQ ID NO: 395700 - RNA, 32 nt, Human
cucccaaaauucugggauuacaggcaugagcc

SEQ ID NO: 395701 - RNA, 32 nt, Human
cucccaaaccagagucauaugcugcuaguaga

SEQ ID NO: 395702 - RNA, 21 nt, Human
cucccaaaccagccugccugg

SEQ ID NO: 395703 - RNA, 32 nt, Human
cucccaaacccagcacuccagacucgagggaa

SEQ ID NO: 395704 - RNA, 32 nt, Human
cucccaaacuaccugucaccauggcccaccga

SEQ ID NO: 395705 - RNA, 20 nt, Human
cucccaaacuccugccugcc

SEQ ID NO: 395706 - RNA, 32 nt, Human
cucccaaacuccugccugcccuccagacuguc

SEQ ID NO: 395707 - RNA, 24 nt, Human
cucccaaacugcugggauuacagg

SEQ ID NO: 395708 - RNA, 32 nt, Human
cucccaaacugcugggauuacaggcgugaacc

SEQ ID NO: 395709 - RNA, 32 nt, Human
cucccaaacugcugggauuacaggcgugagcc

SEQ ID NO: 395710 - RNA, 32 nt, Human
cucccaaacugcugggauuacaggcgugugcc

SEQ ID NO: 395711 - RNA, 32 nt, Human
cucccaaacugcugggauuacaggugugagcc

SEQ ID NO: 395712 - RNA, 24 nt, Human
cucccaaacuucugggauuacagg

SEQ ID NO: 395713 - RNA, 24 nt, Human
cucccaaagaacugggauuacagg

SEQ ID NO: 395714 - RNA, 24 nt, Human
cucccaaagagcugggauuacagg

SEQ ID NO: 395715 - RNA, 32 nt, Human
cucccaaagagcugggauuacaggcaugagcc

SEQ ID NO: 395716 - RNA, 32 nt, Human
cucccaaagagcugggauuacaggcgugagac

SEQ ID NO: 395717 - RNA, 24 nt, Human
cucccaaagcacugggauuacagg

SEQ ID NO: 395718 - RNA, 32 nt, Human
cucccaaagcccuugucccacagccauuuaaa

SEQ ID NO: 395719 - RNA, 24 nt, Human
cucccaaagcgcugggauuacagg

SEQ ID NO: 395720 - RNA, 32 nt, Human
cucccaaagcgcugggauuacaggcaugagcc

SEQ ID NO: 395721 - RNA, 32 nt, Human
cucccaaagcgcugggauuacaggcgugagcc

SEQ ID NO: 395722 - RNA, 24 nt, Human
cucccaaagcgcugggauuauagg

SEQ ID NO: 395723 - RNA, 24 nt, Human
cucccaaagcguugggauuauagg

SEQ ID NO: 395724 - RNA, 24 nt, Human
cucccaaagggcugggauuacagg

SEQ ID NO: 395725 - RNA, 24 nt, Human
cucccaaaggguugggauuacagg

SEQ ID NO: 395726 - RNA, 22 nt, Human
cucccaaaguacugggauuaca

SEQ ID NO: 395727 - RNA, 32 nt, Human
cucccaaaguacugggauuacaaacauaagcc

SEQ ID NO: 395728 - RNA, 24 nt, Human
cucccaaaguacugggauuacagg

SEQ ID NO: 395729 - RNA, 32 nt, Human
cucccaaaguacugggauuacaggcaugaacc

SEQ ID NO: 395730 - RNA, 32 nt, Human
cucccaaaguacugggauuacaggcaugagca

SEQ ID NO: 395731 - RNA, 32 nt, Human
cucccaaaguacugggauuacaggcaugagcc

SEQ ID NO: 395732 - RNA, 32 nt, Human
cucccaaaguacugggauuacaggccugagcc

SEQ ID NO: 395733 - RNA, 32 nt, Human
cucccaaaguacugggauuacaggcgugaacc

SEQ ID NO: 395734 - RNA, 32 nt, Human
cucccaaaguacugggauuacaggcgugagcc

SEQ ID NO: 395735 - RNA, 24 nt, Human
cucccaaaguacugggauuauagg

SEQ ID NO: 395736 - RNA, 32 nt, Human
cucccaaaguacugggauuauaggcaugagcc

SEQ ID NO: 395737 - RNA, 32 nt, Human
cucccaaaguacugggauuauaggcgugagcc

SEQ ID NO: 395738 - RNA, 32 nt, Human
cucccaaaguacugggauuauaggugugaacc

SEQ ID NO: 395739 - RNA, 32 nt, Human
cucccaaaguacugggauuauaggugugagcu

SEQ ID NO: 395740 - RNA, 32 nt, Human
cucccaaaguacugggauuuaggcaugagcca

SEQ ID NO: 395741 - RNA, 32 nt, Human
cucccaaaguauugggauuacccgcgugagcc

SEQ ID NO: 395742 - RNA, 32 nt, Human
cucccaaaguccucggauuacaggcaugagcc

SEQ ID NO: 395743 - RNA, 32 nt, Human
cucccaaaguccuggaauuacaggcaugaguc

SEQ ID NO: 395744 - RNA, 24 nt, Human
cucccaaaguccugggauuacagg

SEQ ID NO: 395745 - RNA, 32 nt, Human
cucccaaaguccugggauuacaggcgugagcc

SEQ ID NO: 395746 - RNA, 32 nt, Human
cucccaaaguccugggauuacaggcugagcca

SEQ ID NO: 395747 - RNA, 32 nt, Human
cucccaaagugauggaauuacaggugugaauc

SEQ ID NO: 395748 - RNA, 32 nt, Human
cucccaaagugaugggauuacaggcaugagcc

SEQ ID NO: 395749 - RNA, 32 nt, Human
cucccaaagugaugggauuacaggcgugagcc

SEQ ID NO: 395750 - RNA, 32 nt, Human
cucccaaagugcagggauuacaggcacaagcc

SEQ ID NO: 395751 - RNA, 32 nt, Human
cucccaaagugcagggauuacaggcaugagcc

SEQ ID NO: 395752 - RNA, 32 nt, Human
cucccaaagugccaggauuacaggcaugagcc

SEQ ID NO: 395753 - RNA, 32 nt, Human
cucccaaagugccaggauuacaggcgugagcc

SEQ ID NO: 395754 - RNA, 32 nt, Human
cucccaaagugccgagauuacaggugugagcc

SEQ ID NO: 395755 - RNA, 23 nt, Human
cucccaaagugccgagauugcag

SEQ ID NO: 395756 - RNA, 32 nt, Human
cucccaaagugccgccgggauuacaggcguga

SEQ ID NO: 395757 - RNA, 32 nt, Human
cucccaaagugccgggaugacaggcaugagcc

SEQ ID NO: 395758 - RNA, 32 nt, Human
cucccaaagugccgggauuacaggcauaagcc

SEQ ID NO: 395759 - RNA, 32 nt, Human
cucccaaagugccgggauuacaggcaugagcc

SEQ ID NO: 395760 - RNA, 32 nt, Human
cucccaaagugccgggauuacaggcgugagcc

SEQ ID NO: 395761 - RNA, 32 nt, Human
cucccaaagugcuaagauuacaggcauggguc

SEQ ID NO: 395762 - RNA, 32 nt, Human
cucccaaagugcuaagauuacaggcgugagcc

SEQ ID NO: 395763 - RNA, 32 nt, Human
cucccaaagugcuagaauuacaggcauuagcc

SEQ ID NO: 395764 - RNA, 32 nt, Human
cucccaaagugcuagaauuacaggugugagcc

SEQ ID NO: 395765 - RNA, 32 nt, Human
cucccaaagugcuaggaccacaggcaugagcc

SEQ ID NO: 395766 - RNA, 32 nt, Human
cucccaaagugcuaggauuacagacaugagcc

SEQ ID NO: 395767 - RNA, 32 nt, Human
cucccaaagugcuaggauuacagcgugaucua

SEQ ID NO: 395768 - RNA, 32 nt, Human
cucccaaagugcuaggauuacaggcauaagcc

SEQ ID NO: 395769 - RNA, 32 nt, Human
cucccaaagugcuaggauuacaggcaucagcc

SEQ ID NO: 395770 - RNA, 32 nt, Human
cucccaaagugcuaggauuacaggcaugaacc

SEQ ID NO: 395771 - RNA, 32 nt, Human
cucccaaagugcuaggauuacaggcaugagca

SEQ ID NO: 395772 - RNA, 32 nt, Human
cucccaaagugcuaggauuacaggcaugagcc

SEQ ID NO: 395773 - RNA, 32 nt, Human
cucccaaagugcuaggauuacaggcaugggcc

SEQ ID NO: 395774 - RNA, 32 nt, Human
cucccaaagugcuaggauuacaggcccgugcc

SEQ ID NO: 395775 - RNA, 32 nt, Human
cucccaaagugcuaggauuacaggccugagac

SEQ ID NO: 395776 - RNA, 32 nt, Human
cucccaaagugcuaggauuacaggcgugagcc

SEQ ID NO: 395777 - RNA, 32 nt, Human
cucccaaagugcuaggauuacaggcgugugcc

SEQ ID NO: 395778 - RNA, 32 nt, Human
cucccaaagugcuaggauuacaggcuggagcu

SEQ ID NO: 395779 - RNA, 32 nt, Human
cucccaaagugcuaggauuacagguaugagcc

SEQ ID NO: 395780 - RNA, 32 nt, Human
cucccaaagugcuaggauuacagguguaagcc

SEQ ID NO: 395781 - RNA, 32 nt, Human
cucccaaagugcuaggauuacaggugugagcc

SEQ ID NO: 395782 - RNA, 32 nt, Human
cucccaaagugcuaugauuacagacgugagcc

SEQ ID NO: 395783 - RNA, 32 nt, Human
cucccaaagugcucggauuacagacaugagcc

SEQ ID NO: 395784 - RNA, 24 nt, Human
cucccaaagugcugaaauuacagg

SEQ ID NO: 395785 - RNA, 32 nt, Human
cucccaaagugcugaaauuacaggcaugagcc

SEQ ID NO: 395786 - RNA, 24 nt, Human
cucccaaagugcugacauuacagg

SEQ ID NO: 395787 - RNA, 32 nt, Human
cucccaaagugcugacauuacaggugugagcc

SEQ ID NO: 395788 - RNA, 22 nt, Human
cucccaaagugcugagauuaca

SEQ ID NO: 395789 - RNA, 23 nt, Human
cucccaaagugcugagauuacag

SEQ ID NO: 395790 - RNA, 32 nt, Human
cucccaaagugcugagauuacagacaugagcc

SEQ ID NO: 395791 - RNA, 32 nt, Human
cucccaaagugcugagauuacagacgugagcc

SEQ ID NO: 395792 - RNA, 24 nt, Human
cucccaaagugcugagauuacagg

SEQ ID NO: 395793 - RNA, 32 nt, Human
cucccaaagugcugagauuacaggcauaaacc

SEQ ID NO: 395794 - RNA, 32 nt, Human
cucccaaagugcugagauuacaggcauaagcc

SEQ ID NO: 395795 - RNA, 32 nt, Human
cucccaaagugcugagauuacaggcaugaacc

SEQ ID NO: 395796 - RNA, 32 nt, Human
cucccaaagugcugagauuacaggcaugaccc

SEQ ID NO: 395797 - RNA, 32 nt, Human
cucccaaagugcugagauuacaggcaugagcc

SEQ ID NO: 395798 - RNA, 32 nt, Human
cucccaaagugcugagauuacaggcaugaguc

SEQ ID NO: 395799 - RNA, 32 nt, Human
cucccaaagugcugagauuacaggccugagcc

SEQ ID NO: 395800 - RNA, 32 nt, Human
cucccaaagugcugagauuacaggcgugagcc

SEQ ID NO: 395801 - RNA, 32 nt, Human
cucccaaagugcugagauuacaggcgugagcu

SEQ ID NO: 395802 - RNA, 32 nt, Human
cucccaaagugcugagauuacaggcgugaggc

SEQ ID NO: 395803 - RNA, 32 nt, Human
cucccaaagugcugagauuacaggcuugaacc

SEQ ID NO: 395804 - RNA, 32 nt, Human
cucccaaagugcugagauuacaggcuugagcc

SEQ ID NO: 395805 - RNA, 32 nt, Human
cucccaaagugcugagauuacaggggugaguc

SEQ ID NO: 395806 - RNA, 32 nt, Human
cucccaaagugcugagauuacagguguaagcc

SEQ ID NO: 395807 - RNA, 32 nt, Human
cucccaaagugcugagauuacaggugugagcc

SEQ ID NO: 395808 - RNA, 32 nt, Human
cucccaaagugcugagauuacaggugugagcu

SEQ ID NO: 395809 - RNA, 24 nt, Human
cucccaaagugcugagauuacugg

SEQ ID NO: 395810 - RNA, 24 nt, Human
cucccaaagugcugagauuauagg

SEQ ID NO: 395811 - RNA, 23 nt, Human
cucccaaagugcugagauugcag

SEQ ID NO: 395812 - RNA, 32 nt, Human
cucccaaagugcugauauuacaggcgugagcc

SEQ ID NO: 395813 - RNA, 32 nt, Human
cucccaaagugcugccauuacaggcgugagcc

SEQ ID NO: 395814 - RNA, 23 nt, Human
cucccaaagugcugcgauuacag

SEQ ID NO: 395815 - RNA, 24 nt, Human
cucccaaagugcugcgauuacagg

SEQ ID NO: 395816 - RNA, 32 nt, Human
cucccaaagugcugcgauuacaggcaugagcc

SEQ ID NO: 395817 - RNA, 32 nt, Human
cucccaaagugcugcgauuacaggcgugagcc

SEQ ID NO: 395818 - RNA, 32 nt, Human
cucccaaagugcugcugggauuacaggcguga

SEQ ID NO: 395819 - RNA, 24 nt, Human
cucccaaagugcuggaaccacagg

SEQ ID NO: 395820 - RNA, 24 nt, Human
cucccaaagugcuggaauaacagg

SEQ ID NO: 395821 - RNA, 24 nt, Human
cucccaaagugcuggaaucacagg

SEQ ID NO: 395822 - RNA, 23 nt, Human
cucccaaagugcuggaauuacag

SEQ ID NO: 395823 - RNA, 32 nt, Human
cucccaaagugcuggaauuacagcuuacaggg

SEQ ID NO: 395824 - RNA, 24 nt, Human
cucccaaagugcuggaauuacagg

SEQ ID NO: 395825 - RNA, 32 nt, Human
cucccaaagugcuggaauuacaggcaugagcc

SEQ ID NO: 395826 - RNA, 32 nt, Human
cucccaaagugcuggaauuacaggcauuagcc

SEQ ID NO: 395827 - RNA, 32 nt, Human
cucccaaagugcuggaauuacaggcgaaccuu

SEQ ID NO: 395828 - RNA, 32 nt, Human
cucccaaagugcuggaauuacaggcgugagcc

SEQ ID NO: 395829 - RNA, 24 nt, Human
cucccaaagugcuggaauuacugg

SEQ ID NO: 395830 - RNA, 24 nt, Human
cucccaaagugcuggaauuagagg

SEQ ID NO: 395831 - RNA, 24 nt, Human
cucccaaagugcuggaauuauagg

SEQ ID NO: 395832 - RNA, 23 nt, Human
cucccaaagugcuggaauugcag

SEQ ID NO: 395833 - RNA, 23 nt, Human
cucccaaagugcuggauuacagg

SEQ ID NO: 395834 - RNA, 24 nt, Human
cucccaaagugcuggcacuacagg

SEQ ID NO: 395835 - RNA, 32 nt, Human
cucccaaagugcuggcacuacaggcaugagcc

SEQ ID NO: 395836 - RNA, 24 nt, Human
cucccaaagugcuggcauuacagg

SEQ ID NO: 395837 - RNA, 32 nt, Human
cucccaaagugcuggcauuacaggcgugagcc

SEQ ID NO: 395838 - RNA, 32 nt, Human
cucccaaagugcuggcauuacaggcgugugcc

SEQ ID NO: 395839 - RNA, 32 nt, Human
cucccaaagugcuggcauuacagguaugagcc

SEQ ID NO: 395840 - RNA, 32 nt, Human
cucccaaagugcuggcauuacaggugugagcc

SEQ ID NO: 395841 - RNA, 24 nt, Human
cucccaaagugcugggaauacagg

SEQ ID NO: 395842 - RNA, 32 nt, Human
cucccaaagugcugggaauacaggcaugagcc

SEQ ID NO: 395843 - RNA, 32 nt, Human
cucccaaagugcugggacuacagacaugagcc

SEQ ID NO: 395844 - RNA, 32 nt, Human
cucccaaagugcugggacuacaggcaggagcc

SEQ ID NO: 395845 - RNA, 32 nt, Human
cucccaaagugcugggacuacaggcaugagcc

SEQ ID NO: 395846 - RNA, 32 nt, Human
cucccaaagugcugggacuacaggcgugagcc

SEQ ID NO: 395847 - RNA, 32 nt, Human
cucccaaagugcugggacuacaggugcaugca

SEQ ID NO: 395848 - RNA, 32 nt, Human
cucccaaagugcugggacuauaagugugagcc

SEQ ID NO: 395849 - RNA, 32 nt, Human
cucccaaagugcugggacugcaggcgugagcc

SEQ ID NO: 395850 - RNA, 24 nt, Human
cucccaaagugcugggauaauagg

SEQ ID NO: 395851 - RNA, 32 nt, Human
cucccaaagugcugggauaauaggugucagcc

SEQ ID NO: 395852 - RNA, 23 nt, Human
cucccaaagugcugggaucacag

SEQ ID NO: 395853 - RNA, 32 nt, Human
cucccaaagugcugggaucacagacgugagcc

SEQ ID NO: 395854 - RNA, 24 nt, Human
cucccaaagugcugggaucacagg

SEQ ID NO: 395855 - RNA, 32 nt, Human
cucccaaagugcugggaucacaggcaugaacc

SEQ ID NO: 395856 - RNA, 32 nt, Human
cucccaaagugcugggaucacaggcaugagcc

SEQ ID NO: 395857 - RNA, 32 nt, Human
cucccaaagugcugggaucacaggcgccagcc

SEQ ID NO: 395858 - RNA, 32 nt, Human
cucccaaagugcugggaucacaggcgugagcu

SEQ ID NO: 395859 - RNA, 24 nt, Human
cucccaaagugcugggaugacagg

SEQ ID NO: 395860 - RNA, 32 nt, Human
cucccaaagugcugggaugacaggcaugaauc

SEQ ID NO: 395861 - RNA, 32 nt, Human
cucccaaagugcugggaugacaggcgugagcc

SEQ ID NO: 395862 - RNA, 32 nt, Human
cucccaaagugcugggaugacaggcgugaucc

SEQ ID NO: 395863 - RNA, 32 nt, Human
cucccaaagugcugggaugacaggcgugcgcc

SEQ ID NO: 395864 - RNA, 32 nt, Human
cucccaaagugcugggaugacaggugugagcc

SEQ ID NO: 395865 - RNA, 32 nt, Human
cucccaaagugcugggaugacaguugugagcc

SEQ ID NO: 395866 - RNA, 32 nt, Human
cucccaaagugcugggaugaccagcaucagcc

SEQ ID NO: 395867 - RNA, 24 nt, Human
cucccaaagugcugggaugauagg

SEQ ID NO: 395868 - RNA, 32 nt, Human
cucccaaagugcugggaugauaggcgugagcc

SEQ ID NO: 395869 - RNA, 32 nt, Human
cucccaaagugcugggaugccaggcgugaguc

SEQ ID NO: 395870 - RNA, 19 nt, Human
cucccaaagugcugggauu

SEQ ID NO: 395871 - RNA, 23 nt, Human
cucccaaagugcugggauuaaag

SEQ ID NO: 395872 - RNA, 24 nt, Human
cucccaaagugcugggauuaaagg

SEQ ID NO: 395873 - RNA, 32 nt, Human
cucccaaagugcugggauuaaaggcgugagcc

SEQ ID NO: 395874 - RNA, 32 nt, Human
cucccaaagugcugggauuaaaggugugagcc

SEQ ID NO: 395875 - RNA, 32 nt, Human
cucccaaagugcugggauuaacagguaugaac

SEQ ID NO: 395876 - RNA, 23 nt, Human
cucccaaagugcugggauuaagg

SEQ ID NO: 395877 - RNA, 32 nt, Human
cucccaaagugcugggauuaauggcgugagcc

SEQ ID NO: 395878 - RNA, 22 nt, Human
cucccaaagugcugggauuaca

SEQ ID NO: 395879 - RNA, 32 nt, Human
cucccaaagugcugggauuacaagcaugagcc

SEQ ID NO: 395880 - RNA, 32 nt, Human
cucccaaagugcugggauuacaagggugagcc

SEQ ID NO: 395881 - RNA, 32 nt, Human
cucccaaagugcugggauuacaaguaugagcc

SEQ ID NO: 395882 - RNA, 32 nt, Human
cucccaaagugcugggauuacaagugugagcc

SEQ ID NO: 395883 - RNA, 23 nt, Human
cucccaaagugcugggauuacag

SEQ ID NO: 395884 - RNA, 32 nt, Human
cucccaaagugcugggauuacagacacgagcc

SEQ ID NO: 395885 - RNA, 32 nt, Human
cucccaaagugcugggauuacagacaugaacu

SEQ ID NO: 395886 - RNA, 32 nt, Human
cucccaaagugcugggauuacagacaugagca

SEQ ID NO: 395887 - RNA, 32 nt, Human
cucccaaagugcugggauuacagacaugagcc

SEQ ID NO: 395888 - RNA, 32 nt, Human
cucccaaagugcugggauuacagacgugagcc

SEQ ID NO: 395889 - RNA, 32 nt, Human
cucccaaagugcugggauuacagacgugagcg

SEQ ID NO: 395890 - RNA, 32 nt, Human
cucccaaagugcugggauuacagacgugagcu

SEQ ID NO: 395891 - RNA, 32 nt, Human
cucccaaagugcugggauuacagacgugaggc

SEQ ID NO: 395892 - RNA, 32 nt, Human
cucccaaagugcugggauuacagacgugaucc

SEQ ID NO: 395893 - RNA, 32 nt, Human
cucccaaagugcugggauuacagagugugagc

SEQ ID NO: 395894 - RNA, 32 nt, Human
cucccaaagugcugggauuacagccacugcac

SEQ ID NO: 395895 - RNA, 32 nt, Human
cucccaaagugcugggauuacagcccugagcg

SEQ ID NO: 395896 - RNA, 32 nt, Human
cucccaaagugcugggauuacagccgugagcc

SEQ ID NO: 395897 - RNA, 32 nt, Human
cucccaaagugcugggauuacagcgaagagcc

SEQ ID NO: 395898 - RNA, 32 nt, Human
cucccaaagugcugggauuacagcugugagcc

SEQ ID NO: 395899 - RNA, 24 nt, Human
cucccaaagugcugggauuacagg

SEQ ID NO: 395900 - RNA, 32 nt, Human
cucccaaagugcugggauuacaggaauuuagu

SEQ ID NO: 395901 - RNA, 32 nt, Human
cucccaaagugcugggauuacaggagugaacc

SEQ ID NO: 395902 - RNA, 32 nt, Human
cucccaaagugcugggauuacaggagugagca

SEQ ID NO: 395903 - RNA, 32 nt, Human
cucccaaagugcugggauuacaggagugagcc

SEQ ID NO: 395904 - RNA, 32 nt, Human
cucccaaagugcugggauuacaggagugugcc

SEQ ID NO: 395905 - RNA, 32 nt, Human
cucccaaagugcugggauuacaggaugagcca

SEQ ID NO: 395906 - RNA, 32 nt, Human
cucccaaagugcugggauuacaggcaacucug

SEQ ID NO: 395907 - RNA, 32 nt, Human
cucccaaagugcugggauuacaggcaccgaga

SEQ ID NO: 395908 - RNA, 32 nt, Human
cucccaaagugcugggauuacaggcacgagcc

SEQ ID NO: 395909 - RNA, 32 nt, Human
cucccaaagugcugggauuacaggcaggagcc

SEQ ID NO: 395910 - RNA, 32 nt, Human
cucccaaagugcugggauuacaggcauaagcc

SEQ ID NO: 395911 - RNA, 32 nt, Human
cucccaaagugcugggauuacaggcaucagcc

SEQ ID NO: 395912 - RNA, 32 nt, Human
cucccaaagugcugggauuacaggcaugaacc

SEQ ID NO: 395913 - RNA, 32 nt, Human
cucccaaagugcugggauuacaggcaugaauc

SEQ ID NO: 395914 - RNA, 32 nt, Human
cucccaaagugcugggauuacaggcaugaaug

SEQ ID NO: 395915 - RNA, 32 nt, Human
cucccaaagugcugggauuacaggcaugaccc

SEQ ID NO: 395916 - RNA, 32 nt, Human
cucccaaagugcugggauuacaggcaugagcc

SEQ ID NO: 395917 - RNA, 32 nt, Human
cucccaaagugcugggauuacaggcaugagcu

SEQ ID NO: 395918 - RNA, 32 nt, Human
cucccaaagugcugggauuacaggcaugaguc

SEQ ID NO: 395919 - RNA, 32 nt, Human
cucccaaagugcugggauuacaggcauggagc

SEQ ID NO: 395920 - RNA, 32 nt, Human
cucccaaagugcugggauuacaggccacuaca

SEQ ID NO: 395921 - RNA, 32 nt, Human
cucccaaagugcugggauuacaggccccuugu

SEQ ID NO: 395922 - RNA, 32 nt, Human
cucccaaagugcugggauuacaggccugagcc

SEQ ID NO: 395923 - RNA, 32 nt, Human
cucccaaagugcugggauuacaggccuggccc

SEQ ID NO: 395924 - RNA, 32 nt, Human
cucccaaagugcugggauuacaggcgcaagcc

SEQ ID NO: 395925 - RNA, 32 nt, Human
cucccaaagugcugggauuacaggcgccaccg

SEQ ID NO: 395926 - RNA, 32 nt, Human
cucccaaagugcugggauuacaggcgcgagcc

SEQ ID NO: 395927 - RNA, 32 nt, Human
cucccaaagugcugggauuacaggcggccagg

SEQ ID NO: 395928 - RNA, 32 nt, Human
cucccaaagugcugggauuacaggcgggagcc

SEQ ID NO: 395929 - RNA, 32 nt, Human
cucccaaagugcugggauuacaggcguaagcc

SEQ ID NO: 395930 - RNA, 32 nt, Human
cucccaaagugcugggauuacaggcgucagcc

SEQ ID NO: 395931 - RNA, 32 nt, Human
cucccaaagugcugggauuacaggcgugaaac

SEQ ID NO: 395932 - RNA, 32 nt, Human
cucccaaagugcugggauuacaggcgugaacc

SEQ ID NO: 395933 - RNA, 32 nt, Human
cucccaaagugcugggauuacaggcgugacga

SEQ ID NO: 395934 - RNA, 32 nt, Human
cucccaaagugcugggauuacaggcgugagac

SEQ ID NO: 395935 - RNA, 32 nt, Human
cucccaaagugcugggauuacaggcgugagca

SEQ ID NO: 395936 - RNA, 32 nt, Human
cucccaaagugcugggauuacaggcgugagcc

SEQ ID NO: 395937 - RNA, 32 nt, Human
cucccaaagugcugggauuacaggcgugagcu

SEQ ID NO: 395938 - RNA, 32 nt, Human
cucccaaagugcugggauuacaggcgugaggc

SEQ ID NO: 395939 - RNA, 32 nt, Human
cucccaaagugcugggauuacaggcgugaguc

SEQ ID NO: 395940 - RNA, 32 nt, Human
cucccaaagugcugggauuacaggcgugaucc

SEQ ID NO: 395941 - RNA, 32 nt, Human
cucccaaagugcugggauuacaggcgugaugc

SEQ ID NO: 395942 - RNA, 32 nt, Human
cucccaaagugcugggauuacaggcgugggcc

SEQ ID NO: 395943 - RNA, 32 nt, Human
cucccaaagugcugggauuacaggcgugugcc

SEQ ID NO: 395944 - RNA, 32 nt, Human
cucccaaagugcugggauuacaggcguuagcc

SEQ ID NO: 395945 - RNA, 32 nt, Human
cucccaaagugcugggauuacaggcucaugcc

SEQ ID NO: 395946 - RNA, 32 nt, Human
cucccaaagugcugggauuacaggcuguaaag

SEQ ID NO: 395947 - RNA, 32 nt, Human
cucccaaagugcugggauuacaggcuuaagcc

SEQ ID NO: 395948 - RNA, 32 nt, Human
cucccaaagugcugggauuacaggcuucagcc

SEQ ID NO: 395949 - RNA, 32 nt, Human
cucccaaagugcugggauuacaggcuugaaag

SEQ ID NO: 395950 - RNA, 32 nt, Human
cucccaaagugcugggauuacaggcuugaccc

SEQ ID NO: 395951 - RNA, 32 nt, Human
cucccaaagugcugggauuacaggcuugagcc

SEQ ID NO: 395952 - RNA, 32 nt, Human
cucccaaagugcugggauuacaggcuugggcc

SEQ ID NO: 395953 - RNA, 32 nt, Human
cucccaaagugcugggauuacagggauaagcc

SEQ ID NO: 395954 - RNA, 32 nt, Human
cucccaaagugcugggauuacagggaugagcc

SEQ ID NO: 395955 - RNA, 32 nt, Human
cucccaaagugcugggauuacagggcacugaa

SEQ ID NO: 395956 - RNA, 32 nt, Human
cucccaaagugcugggauuacaggggagagcu

SEQ ID NO: 395957 - RNA, 32 nt, Human
cucccaaagugcugggauuacaggggagccac

SEQ ID NO: 395958 - RNA, 32 nt, Human
cucccaaagugcugggauuacagguacgaguc

SEQ ID NO: 395959 - RNA, 32 nt, Human
cucccaaagugcugggauuacagguaucagcc

SEQ ID NO: 395960 - RNA, 32 nt, Human
cucccaaagugcugggauuacagguaugagcc

SEQ ID NO: 395961 - RNA, 32 nt, Human
cucccaaagugcugggauuacaggugcgagcc

SEQ ID NO: 395962 - RNA, 32 nt, Human
cucccaaagugcugggauuacaggugggagcc

SEQ ID NO: 395963 - RNA, 32 nt, Human
cucccaaagugcugggauuacagguguaagcc

SEQ ID NO: 395964 - RNA, 32 nt, Human
cucccaaagugcugggauuacagguguaaguc

SEQ ID NO: 395965 - RNA, 32 nt, Human
cucccaaagugcugggauuacaggugucagcc

SEQ ID NO: 395966 - RNA, 32 nt, Human
cucccaaagugcugggauuacaggugugaacc

SEQ ID NO: 395967 - RNA, 32 nt, Human
cucccaaagugcugggauuacaggugugaccc

SEQ ID NO: 395968 - RNA, 32 nt, Human
cucccaaagugcugggauuacaggugugagca

SEQ ID NO: 395969 - RNA, 32 nt, Human
cucccaaagugcugggauuacaggugugagcc

SEQ ID NO: 395970 - RNA, 32 nt, Human
cucccaaagugcugggauuacaggugugagcu

SEQ ID NO: 395971 - RNA, 32 nt, Human
cucccaaagugcugggauuacaggugugaggc

SEQ ID NO: 395972 - RNA, 32 nt, Human
cucccaaagugcugggauuacaggugugaguc

SEQ ID NO: 395973 - RNA, 32 nt, Human
cucccaaagugcugggauuacaggugugcgcc

SEQ ID NO: 395974 - RNA, 32 nt, Human
cucccaaagugcugggauuacaggugugcguc

SEQ ID NO: 395975 - RNA, 32 nt, Human
cucccaaagugcugggauuacaggugugggag

SEQ ID NO: 395976 - RNA, 32 nt, Human
cucccaaagugcugggauuacagguguuccug

SEQ ID NO: 395977 - RNA, 32 nt, Human
cucccaaagugcugggauuacagguuugagcc

SEQ ID NO: 395978 - RNA, 32 nt, Human
cucccaaagugcugggauuacagucaugagcc

SEQ ID NO: 395979 - RNA, 32 nt, Human
cucccaaagugcugggauuacagucaugaguc

SEQ ID NO: 395980 - RNA, 32 nt, Human
cucccaaagugcugggauuacagucgugagcc

SEQ ID NO: 395981 - RNA, 32 nt, Human
cucccaaagugcugggauuacaguugcgagcc

SEQ ID NO: 395982 - RNA, 24 nt, Human
cucccaaagugcugggauuaccag

SEQ ID NO: 395983 - RNA, 32 nt, Human
cucccaaagugcugggauuaccagcauaagcc

SEQ ID NO: 395984 - RNA, 32 nt, Human
cucccaaagugcugggauuacccacauccuag

SEQ ID NO: 395985 - RNA, 24 nt, Human
cucccaaagugcugggauuaccgg

SEQ ID NO: 395986 - RNA, 32 nt, Human
cucccaaagugcugggauuaccggcaugagcc

SEQ ID NO: 395987 - RNA, 32 nt, Human
cucccaaagugcugggauuaccggcuugagcc

SEQ ID NO: 395988 - RNA, 32 nt, Human
cucccaaagugcugggauuaccgguaugaacc

SEQ ID NO: 395989 - RNA, 24 nt, Human
cucccaaagugcugggauuacggg

SEQ ID NO: 395990 - RNA, 32 nt, Human
cucccaaagugcugggauuacgggcaugagcc

SEQ ID NO: 395991 - RNA, 32 nt, Human
cucccaaagugcugggauuacgggugugagcc

SEQ ID NO: 395992 - RNA, 32 nt, Human
cucccaaagugcugggauuacgguguuagcca

SEQ ID NO: 395993 - RNA, 32 nt, Human
cucccaaagugcugggauuacuagacguaagc

SEQ ID NO: 395994 - RNA, 24 nt, Human
cucccaaagugcugggauuacugg

SEQ ID NO: 395995 - RNA, 32 nt, Human
cucccaaagugcugggauuacuggcaugagcc

SEQ ID NO: 395996 - RNA, 32 nt, Human
cucccaaagugcugggauuacugguaugaacc

SEQ ID NO: 395997 - RNA, 32 nt, Human
cucccaaagugcugggauuacuggugugagcc

SEQ ID NO: 395998 - RNA, 32 nt, Human
cucccaaagugcugggauuacuuuacaggcgu

SEQ ID NO: 395999 - RNA, 24 nt, Human
cucccaaagugcugggauuagagg

SEQ ID NO: 396000 - RNA, 32 nt, Human
cucccaaagugcugggauuagaggcaugagcc

SEQ ID NO: 396001 - RNA, 32 nt, Human
cucccaaagugcugggauuagaggcgugagcc

SEQ ID NO: 396002 - RNA, 32 nt, Human
cucccaaagugcugggauuagaggcuugagcc

SEQ ID NO: 396003 - RNA, 32 nt, Human
cucccaaagugcugggauuaggugugagccac

SEQ ID NO: 396004 - RNA, 32 nt, Human
cucccaaagugcugggauuauacaugugagcc

SEQ ID NO: 396005 - RNA, 32 nt, Human
cucccaaagugcugggauuauacguaugggcc

SEQ ID NO: 396006 - RNA, 23 nt, Human
cucccaaagugcugggauuauag

SEQ ID NO: 396007 - RNA, 32 nt, Human
cucccaaagugcugggauuauagaugugagcc

SEQ ID NO: 396008 - RNA, 24 nt, Human
cucccaaagugcugggauuauagg

SEQ ID NO: 396009 - RNA, 32 nt, Human
cucccaaagugcugggauuauaggagugagcc

SEQ ID NO: 396010 - RNA, 32 nt, Human
cucccaaagugcugggauuauaggcacaagac

SEQ ID NO: 396011 - RNA, 32 nt, Human
cucccaaagugcugggauuauaggcaugaacc

SEQ ID NO: 396012 - RNA, 32 nt, Human
cucccaaagugcugggauuauaggcaugagcc

SEQ ID NO: 396013 - RNA, 32 nt, Human
cucccaaagugcugggauuauaggcaugcgcc

SEQ ID NO: 396014 - RNA, 32 nt, Human
cucccaaagugcugggauuauaggccugagcc

SEQ ID NO: 396015 - RNA, 32 nt, Human
cucccaaagugcugggauuauaggcguaagcc

SEQ ID NO: 396016 - RNA, 32 nt, Human
cucccaaagugcugggauuauaggcgugagac

SEQ ID NO: 396017 - RNA, 32 nt, Human
cucccaaagugcugggauuauaggcgugagcc

SEQ ID NO: 396018 - RNA, 32 nt, Human
cucccaaagugcugggauuauaggcgugaguc

SEQ ID NO: 396019 - RNA, 32 nt, Human
cucccaaagugcugggauuauaggcgugugcc

SEQ ID NO: 396020 - RNA, 32 nt, Human
cucccaaagugcugggauuauaggcugggugu

SEQ ID NO: 396021 - RNA, 32 nt, Human
cucccaaagugcugggauuauagggaugaguc

SEQ ID NO: 396022 - RNA, 32 nt, Human
cucccaaagugcugggauuauaggugugagcc

SEQ ID NO: 396023 - RNA, 32 nt, Human
cucccaaagugcugggauuauggacgugagcc

SEQ ID NO: 396024 - RNA, 24 nt, Human
cucccaaagugcugggauuauggg

SEQ ID NO: 396025 - RNA, 32 nt, Human
cucccaaagugcugggauuccaggcgugagcc

SEQ ID NO: 396026 - RNA, 32 nt, Human
cucccaaagugcugggauucccggcgugagcc

SEQ ID NO: 396027 - RNA, 32 nt, Human
cucccaaagugcugggauugaaggcgugaguc

SEQ ID NO: 396028 - RNA, 32 nt, Human
cucccaaagugcugggauugcagccgugaacc

SEQ ID NO: 396029 - RNA, 24 nt, Human
cucccaaagugcugggauugcagg

SEQ ID NO: 396030 - RNA, 32 nt, Human
cucccaaagugcugggauugcaggcaugagcc

SEQ ID NO: 396031 - RNA, 32 nt, Human
cucccaaagugcugggauugcaggcauggccc

SEQ ID NO: 396032 - RNA, 32 nt, Human
cucccaaagugcugggauugcaggcgugagcc

SEQ ID NO: 396033 - RNA, 32 nt, Human
cucccaaagugcugggauugcaggugcgagcc

SEQ ID NO: 396034 - RNA, 32 nt, Human
cucccaaagugcugggauugcaggugugaacu

SEQ ID NO: 396035 - RNA, 32 nt, Human
cucccaaagugcugggauugcaggugugagcc

SEQ ID NO: 396036 - RNA, 23 nt, Human
cucccaaagugcugggauuguag

SEQ ID NO: 396037 - RNA, 32 nt, Human
cucccaaagugcugggauugugggugugagcc

SEQ ID NO: 396038 - RNA, 32 nt, Human
cucccaaagugcugggauuucaggcgugagcc

SEQ ID NO: 396039 - RNA, 24 nt, Human
cucccaaagugcugggcuuacagg

SEQ ID NO: 396040 - RNA, 32 nt, Human
cucccaaagugcugggguuacaggcaugagcc

SEQ ID NO: 396041 - RNA, 32 nt, Human
cucccaaagugcugggguuacaggcgugagcc

SEQ ID NO: 396042 - RNA, 32 nt, Human
cucccaaagugcugggguuacaggcguguguc

SEQ ID NO: 396043 - RNA, 32 nt, Human
cucccaaagugcuggguuaacaggcaugagcc

SEQ ID NO: 396044 - RNA, 23 nt, Human
cucccaaagugcugguauuacag

SEQ ID NO: 396045 - RNA, 24 nt, Human
cucccaaagugcugguauuacagg

SEQ ID NO: 396046 - RNA, 32 nt, Human
cucccaaagugcugguauuacaggcgugagcc

SEQ ID NO: 396047 - RNA, 24 nt, Human
cucccaaagugcuguaauuacagg

SEQ ID NO: 396048 - RNA, 32 nt, Human
cucccaaagugcuguaauuacaggcaugagcc

SEQ ID NO: 396049 - RNA, 24 nt, Human
cucccaaagugcugugauuacagg

SEQ ID NO: 396050 - RNA, 32 nt, Human
cucccaaagugcugugauuacaggccucagcc

SEQ ID NO: 396051 - RNA, 32 nt, Human
cucccaaagugcugugauuacaggugugaacc

SEQ ID NO: 396052 - RNA, 32 nt, Human
cucccaaagugcugugauuacaggugugagcc

SEQ ID NO: 396053 - RNA, 32 nt, Human
cucccaaagugcuuggauuacaggcauaagcc

SEQ ID NO: 396054 - RNA, 32 nt, Human
cucccaaagugcuuggauuacaggcaugagcc

SEQ ID NO: 396055 - RNA, 32 nt, Human
cucccaaagugcuuggauuacagguguaagcc

SEQ ID NO: 396056 - RNA, 32 nt, Human
cucccaaagugguaggauuacaggcgugagcc

SEQ ID NO: 396057 - RNA, 32 nt, Human
cucccaaaguggugggauuacagacgugagcc

SEQ ID NO: 396058 - RNA, 32 nt, Human
cucccaaaguggugggauuacaggugugagcc

SEQ ID NO: 396059 - RNA, 32 nt, Human
cucccaaaguggugggauuauaggcaugagcc

SEQ ID NO: 396060 - RNA, 32 nt, Human
cucccaaaguguagggauuacaggcgugagcc

SEQ ID NO: 396061 - RNA, 32 nt, Human
cucccaaaguguggggauuacgggugugagcc

SEQ ID NO: 396062 - RNA, 32 nt, Human
cucccaaaguguuaggauuacaggcaugagcc

SEQ ID NO: 396063 - RNA, 32 nt, Human
cucccaaaguguuaggauuacaggcgugagcc

SEQ ID NO: 396064 - RNA, 32 nt, Human
cucccaaaguguucggauuacaaacgugagcc

SEQ ID NO: 396065 - RNA, 24 nt, Human
cucccaaaguguugagauuacagg

SEQ ID NO: 396066 - RNA, 32 nt, Human
cucccaaaguguugagauuacaggcaugagcc

SEQ ID NO: 396067 - RNA, 24 nt, Human
cucccaaaguguuggaauugcagg

SEQ ID NO: 396068 - RNA, 23 nt, Human
cucccaaaguguugggauuacag

SEQ ID NO: 396069 - RNA, 32 nt, Human
cucccaaaguguugggauuacagacauuagcc

SEQ ID NO: 396070 - RNA, 24 nt, Human
cucccaaaguguugggauuacagg

SEQ ID NO: 396071 - RNA, 32 nt, Human
cucccaaaguguugggauuacaggcaagagcc

SEQ ID NO: 396072 - RNA, 32 nt, Human
cucccaaaguguugggauuacaggcauaagca

SEQ ID NO: 396073 - RNA, 32 nt, Human
cucccaaaguguugggauuacaggcaugaauc

SEQ ID NO: 396074 - RNA, 32 nt, Human
cucccaaaguguugggauuacaggcaugagac

SEQ ID NO: 396075 - RNA, 32 nt, Human
cucccaaaguguugggauuacaggcaugagcc

SEQ ID NO: 396076 - RNA, 32 nt, Human
cucccaaaguguugggauuacaggcgugagcc

SEQ ID NO: 396077 - RNA, 32 nt, Human
cucccaaaguguugggauuacaggcgugaguc

SEQ ID NO: 396078 - RNA, 32 nt, Human
cucccaaaguguugggauuacaggcgugagug

SEQ ID NO: 396079 - RNA, 32 nt, Human
cucccaaaguguugggauuacaggugugaacc

SEQ ID NO: 396080 - RNA, 32 nt, Human
cucccaaaguguugggauuacaggugugagcc

SEQ ID NO: 396081 - RNA, 32 nt, Human
cucccaaaguguugggauuacagguguguguc

SEQ ID NO: 396082 - RNA, 32 nt, Human
cucccaaaguguugggauuacaugcaugagcc

SEQ ID NO: 396083 - RNA, 24 nt, Human
cucccaaaguguugggauuauagg

SEQ ID NO: 396084 - RNA, 32 nt, Human
cucccaaaguguugggauuauaggcaugagcc

SEQ ID NO: 396085 - RNA, 32 nt, Human
cucccaaaguguugggauuauaggcgugagcc

SEQ ID NO: 396086 - RNA, 32 nt, Human
cucccaaaguguugggauuauagguaugagcc

SEQ ID NO: 396087 - RNA, 24 nt, Human
cucccaaaguguugggauuauggg

SEQ ID NO: 396088 - RNA, 23 nt, Human
cucccaaaguguugggauugcag

SEQ ID NO: 396089 - RNA, 24 nt, Human
cucccaaaguguugggauugcagg

SEQ ID NO: 396090 - RNA, 24 nt, Human
cucccaaaguguugggauuucagg

SEQ ID NO: 396091 - RNA, 32 nt, Human
cucccaaaguguugugauuacaggcgugagcc

SEQ ID NO: 396092 - RNA, 32 nt, Human
cucccaaaguucuaggauuacaggugugagcc

SEQ ID NO: 396093 - RNA, 32 nt, Human
cucccaaaguucucggauuacaggcgugagcc

SEQ ID NO: 396094 - RNA, 22 nt, Human
cucccaaaguucugggauuaca

SEQ ID NO: 396095 - RNA, 32 nt, Human
cucccaaaguucugggauuacaagugugaacc

SEQ ID NO: 396096 - RNA, 32 nt, Human
cucccaaaguucugggauuacaagugugagcc

SEQ ID NO: 396097 - RNA, 24 nt, Human
cucccaaaguucugggauuacagg

SEQ ID NO: 396098 - RNA, 32 nt, Human
cucccaaaguucugggauuacaggcaugagcc

SEQ ID NO: 396099 - RNA, 32 nt, Human
cucccaaaguucugggauuacaggcgugagcc

SEQ ID NO: 396100 - RNA, 32 nt, Human
cucccaaaguucugggauuacaggcuugagcc

SEQ ID NO: 396101 - RNA, 32 nt, Human
cucccaaaguucugggauuacagguaugagcc

SEQ ID NO: 396102 - RNA, 32 nt, Human
cucccaaaguucugggauuacaggugugagcc

SEQ ID NO: 396103 - RNA, 32 nt, Human
cucccaaaguucugggauuacgggcgugagcc

SEQ ID NO: 396104 - RNA, 24 nt, Human
cucccaaaguucugggauuauggg

SEQ ID NO: 396105 - RNA, 32 nt, Human
cucccaaaguucugggauuaugggugugagcc

SEQ ID NO: 396106 - RNA, 32 nt, Human
cucccaaaguuuugggauuacaagugugggcc

SEQ ID NO: 396107 - RNA, 32 nt, Human
cucccaaauagcuaugauuacaggcacccgcc

SEQ ID NO: 396108 - RNA, 32 nt, Human
cucccaaauagcugggacuacaggcacaggcc

SEQ ID NO: 396109 - RNA, 24 nt, Human
cucccaaauagcugggauuacagg

SEQ ID NO: 396110 - RNA, 32 nt, Human
cucccaaauagcugggauuacaggcacccacc

SEQ ID NO: 396111 - RNA, 32 nt, Human
cucccaaauagcugggauuacaggugcaugcc

SEQ ID NO: 396112 - RNA, 32 nt, Human
cucccaaauagcugggauuacaguugccugcc

SEQ ID NO: 396113 - RNA, 32 nt, Human
cucccaaauagcugugauuacaggcgugcacc

SEQ ID NO: 396114 - RNA, 24 nt, Human
cucccaaauaguugggauuacagg

SEQ ID NO: 396115 - RNA, 32 nt, Human
cucccaaauaguugggauuacaggcacaugcc

SEQ ID NO: 396116 - RNA, 22 nt, Human
cucccaaaugcugggauuacag

SEQ ID NO: 396117 - RNA, 32 nt, Human
cucccaaauugccgggauuacaggcaugagcc

SEQ ID NO: 396118 - RNA, 32 nt, Human
cucccaaauugcuccccaccucccaucccugu

SEQ ID NO: 396119 - RNA, 24 nt, Human
cucccaaauugcugggauuacagg

SEQ ID NO: 396120 - RNA, 32 nt, Human
cucccaaauugcugggauuacaggcaugagcc

SEQ ID NO: 396121 - RNA, 32 nt, Human
cucccaaauugcugggauuacaggcgugagcc

SEQ ID NO: 396122 - RNA, 32 nt, Human
cucccaaauugcugggauuacaggugugagcc

SEQ ID NO: 396123 - RNA, 24 nt, Human
cucccaaauugcugggauuccagg

SEQ ID NO: 396124 - RNA, 32 nt, Human
cucccaaauugcugggauuuacaggcaugagc

SEQ ID NO: 396125 - RNA, 32 nt, Human
cucccaaauugucagccuucuuaccuggccaa

SEQ ID NO: 396126 - RNA, 24 nt, Human
cucccaaauuguugggauuauagg

SEQ ID NO: 396127 - RNA, 32 nt, Human
cucccaaauuguugggauuauaggcgugagcc

SEQ ID NO: 396128 - RNA, 31 nt, Human
cucccaacaaacuccagaacagcagaaagcg

SEQ ID NO: 396129 - RNA, 23 nt, Human
cucccaacaacuacaacccugga

SEQ ID NO: 396130 - RNA, 22 nt, Human
cucccaacaagugcucuuucca

SEQ ID NO: 396131 - RNA, 32 nt, Human
cucccaacaguugcuguuccucaggccaaagu

SEQ ID NO: 396132 - RNA, 32 nt, Human
cucccaacaugcuggcauuacagguaugagcc

SEQ ID NO: 396133 - RNA, 32 nt, Human
cucccaacaugcugggauuacaggcgugagcc

SEQ ID NO: 396134 - RNA, 32 nt, Human
cucccaacaugcugggauuauagacauuagcc

SEQ ID NO: 396135 - RNA, 32 nt, Human
cucccaacccacccauucuuuuuccuggcacu

SEQ ID NO: 396136 - RNA, 21 nt, Human
cucccaacccagaggaggcag

SEQ ID NO: 396137 - RNA, 32 nt, Human
cucccaaccccugcuccagccacgccaacccu

SEQ ID NO: 396138 - RNA, 32 nt, Human
cucccaaccuacacccucaaguagaccccagu

SEQ ID NO: 396139 - RNA, 23 nt, Human
cucccaaccuauguccccauucc

SEQ ID NO: 396140 - RNA, 32 nt, Human
cucccaaccucgggggaccuagccaagcuagg

SEQ ID NO: 396141 - RNA, 32 nt, Human
cucccaaccucuugcucuggauuugcagaaga

SEQ ID NO: 396142 - RNA, 32 nt, Human
cucccaaccuggcaguccccagccucccagca

SEQ ID NO: 396143 - RNA, 22 nt, Human
cucccaacgcccggcgccgccg

SEQ ID NO: 396144 - RNA, 32 nt, Human
cucccaacgugcuggaauuacaggcaugagcc

SEQ ID NO: 396145 - RNA, 23 nt, Human
cucccaacgugcugggauuacag

SEQ ID NO: 396146 - RNA, 32 nt, Human
cucccaacgugcugggauuacagccggugguc

SEQ ID NO: 396147 - RNA, 24 nt, Human
cucccaacgugcugggauuacagg

SEQ ID NO: 396148 - RNA, 32 nt, Human
cucccaacgugcugggauuacaggcaugagcc

SEQ ID NO: 396149 - RNA, 32 nt, Human
cucccaacgugcugggauuacaggugugagcc

SEQ ID NO: 396150 - RNA, 24 nt, Human
cucccaacgugcugggauuauagg

SEQ ID NO: 396151 - RNA, 32 nt, Human
cucccaacgugcugggauuauaggcgugagcc

SEQ ID NO: 396152 - RNA, 32 nt, Human
cucccaacuagcugggauuacaggcgugcgcc

SEQ ID NO: 396153 - RNA, 32 nt, Human
cucccaacucagccuguuccuuccugcagacc

SEQ ID NO: 396154 - RNA, 32 nt, Human
cucccaacucauuagcuccugggcagcauccu

SEQ ID NO: 396155 - RNA, 32 nt, Human
cucccaacuugcugggauuacaggugugagcc

SEQ ID NO: 396156 - RNA, 32 nt, Human
cucccaagaagcuagaaccacauguacacacc

SEQ ID NO: 396157 - RNA, 24 nt, Human
cucccaagaagcugggauuacagg

SEQ ID NO: 396158 - RNA, 32 nt, Human
cucccaagaagcugggauuacaggcaugcgcc

SEQ ID NO: 396159 - RNA, 32 nt, Human
cucccaagaauacaaaaauuagccaggcaugg

SEQ ID NO: 396160 - RNA, 21 nt, Human
cucccaagacaucugccugcc

SEQ ID NO: 396161 - RNA, 32 nt, Human
cucccaagaccacagaggauaagggcuggugg

SEQ ID NO: 396162 - RNA, 32 nt, Human
cucccaagagccuccaaggcgccauuggcuuc

SEQ ID NO: 396163 - RNA, 32 nt, Human
cucccaagcagcugcaacuacaggcacacucc

SEQ ID NO: 396164 - RNA, 23 nt, Human
cucccaagcagcugggauuauag

SEQ ID NO: 396165 - RNA, 24 nt, Human
cucccaagcagcugggauuauagg

SEQ ID NO: 396166 - RNA, 24 nt, Human
cucccaagcagcugggauuguagg

SEQ ID NO: 396167 - RNA, 32 nt, Human
cucccaagcccaggcuuuggcacucagaaugg

SEQ ID NO: 396168 - RNA, 32 nt, Human
cucccaagccccgcccucagaaagccaaguac

SEQ ID NO: 396169 - RNA, 22 nt, Human
cucccaagcuggaguccagugg

SEQ ID NO: 396170 - RNA, 32 nt, Human
cucccaaggaagcacaaauaguuuuugucgcu

SEQ ID NO: 396171 - RNA, 24 nt, Human
cucccaaggagcugggauuacagg

SEQ ID NO: 396172 - RNA, 24 nt, Human
cucccaaggagcugggguuacagg

SEQ ID NO: 396173 - RNA, 32 nt, Human
cucccaaggauguggaggggcagugaggccug

SEQ ID NO: 396174 - RNA, 32 nt, Human
cucccaaggugcuaggauuacaggcaugagcc

SEQ ID NO: 396175 - RNA, 32 nt, Human
cucccaaggugcugagauuacaggcgugagcc

SEQ ID NO: 396176 - RNA, 32 nt, Human
cucccaaggugcugauaguacaggcaugaacc

SEQ ID NO: 396177 - RNA, 24 nt, Human
cucccaaggugcuggaauuacagg

SEQ ID NO: 396178 - RNA, 32 nt, Human
cucccaaggugcuggaauuacaggugugagcc

SEQ ID NO: 396179 - RNA, 23 nt, Human
cucccaaggugcuggauuacagg

SEQ ID NO: 396180 - RNA, 24 nt, Human
cucccaaggugcugggacuacagg

SEQ ID NO: 396181 - RNA, 32 nt, Human
cucccaaggugcugggacuacaggcguggguc

SEQ ID NO: 396182 - RNA, 22 nt, Human
cucccaaggugcugggauuaca

SEQ ID NO: 396183 - RNA, 24 nt, Human
cucccaaggugcugggauuacagg

SEQ ID NO: 396184 - RNA, 32 nt, Human
cucccaaggugcugggauuacaggcacgagcc

SEQ ID NO: 396185 - RNA, 32 nt, Human
cucccaaggugcugggauuacaggcauaagcu

SEQ ID NO: 396186 - RNA, 32 nt, Human
cucccaaggugcugggauuacaggcaugagcc

SEQ ID NO: 396187 - RNA, 32 nt, Human
cucccaaggugcugggauuacaggcaugaggg

SEQ ID NO: 396188 - RNA, 32 nt, Human
cucccaaggugcugggauuacaggugugagcc

SEQ ID NO: 396189 - RNA, 24 nt, Human
cucccaaggugcugggauuauagg

SEQ ID NO: 396190 - RNA, 23 nt, Human
cucccaaggugcugggauugcag

SEQ ID NO: 396191 - RNA, 32 nt, Human
cucccaaggugcugggauugcagacgugagcc

SEQ ID NO: 396192 - RNA, 24 nt, Human
cucccaaggugcugggauugcagg

SEQ ID NO: 396193 - RNA, 32 nt, Human
cucccaaggugcugggauugcaggccggccuu

SEQ ID NO: 396194 - RNA, 32 nt, Human
cucccaaggugcugggauugcaggcgugagcc

SEQ ID NO: 396195 - RNA, 32 nt, Human
cucccaagguggcagugguggcagcagugauc

SEQ ID NO: 396196 - RNA, 24 nt, Human
cucccaagguguugggaccacagg

SEQ ID NO: 396197 - RNA, 23 nt, Human
cucccaagguguugggauuacag

SEQ ID NO: 396198 - RNA, 32 nt, Human
cucccaagguguugggauuacaggcgugagcc

SEQ ID NO: 396199 - RNA, 24 nt, Human
cucccaagguguugggauugcagg

SEQ ID NO: 396200 - RNA, 24 nt, Human
cucccaaguaacugggauuacagg

SEQ ID NO: 396201 - RNA, 32 nt, Human
cucccaaguagauuacaggauuacaggagccc

SEQ ID NO: 396202 - RNA, 32 nt, Human
cucccaaguagcagggauuacaggcaugcacc

SEQ ID NO: 396203 - RNA, 32 nt, Human
cucccaaguagccgggacuacaggugccugcc

SEQ ID NO: 396204 - RNA, 32 nt, Human
cucccaaguagcuaggauuacaggcaugugcc

SEQ ID NO: 396205 - RNA, 32 nt, Human
cucccaaguagcugagacuacaagcacccacc

SEQ ID NO: 396206 - RNA, 32 nt, Human
cucccaaguagcugagauuacaggcacaugcc

SEQ ID NO: 396207 - RNA, 32 nt, Human
cucccaaguagcugagauuacaggcauccgcc

SEQ ID NO: 396208 - RNA, 32 nt, Human
cucccaaguagcugagauuacaggcgcacacc

SEQ ID NO: 396209 - RNA, 32 nt, Human
cucccaaguagcugagauuacaggugugcacc

SEQ ID NO: 396210 - RNA, 32 nt, Human
cucccaaguagcuggaacuacaggcaugcacc

SEQ ID NO: 396211 - RNA, 32 nt, Human
cucccaaguagcuggaauuacaggcacauacc

SEQ ID NO: 396212 - RNA, 32 nt, Human
cucccaaguagcuggaauuacaggcaccugcc

SEQ ID NO: 396213 - RNA, 32 nt, Human
cucccaaguagcuggaauuacaggcgugugcc

SEQ ID NO: 396214 - RNA, 32 nt, Human
cucccaaguagcugggaauacaggcacgccac

SEQ ID NO: 396215 - RNA, 32 nt, Human
cucccaaguagcugggaccacaggcaugcacc

SEQ ID NO: 396216 - RNA, 32 nt, Human
cucccaaguagcugggacuacaggcacacacc

SEQ ID NO: 396217 - RNA, 32 nt, Human
cucccaaguagcugggacuacaggcacacacu

SEQ ID NO: 396218 - RNA, 32 nt, Human
cucccaaguagcugggacuacaggcacacgcc

SEQ ID NO: 396219 - RNA, 32 nt, Human
cucccaaguagcugggacuacaggcacccacc

SEQ ID NO: 396220 - RNA, 32 nt, Human
cucccaaguagcugggacuacaggcacccgcc

SEQ ID NO: 396221 - RNA, 32 nt, Human
cucccaaguagcugggacuacaggcaccugcc

SEQ ID NO: 396222 - RNA, 32 nt, Human
cucccaaguagcugggacuacaggcacgugcc

SEQ ID NO: 396223 - RNA, 32 nt, Human
cucccaaguagcugggacuacaggcaggugcc

SEQ ID NO: 396224 - RNA, 32 nt, Human
cucccaaguagcugggacuacaggcauaugcc

SEQ ID NO: 396225 - RNA, 32 nt, Human
cucccaaguagcugggacuacaggcaugaacc

SEQ ID NO: 396226 - RNA, 32 nt, Human
cucccaaguagcugggacuacaggcaugagcc

SEQ ID NO: 396227 - RNA, 32 nt, Human
cucccaaguagcugggacuacaggcaugcacc

SEQ ID NO: 396228 - RNA, 32 nt, Human
cucccaaguagcugggacuacaggcaugcacu

SEQ ID NO: 396229 - RNA, 32 nt, Human
cucccaaguagcugggacuacaggcaugcgcc

SEQ ID NO: 396230 - RNA, 32 nt, Human
cucccaaguagcugggacuacaggcauguaac

SEQ ID NO: 396231 - RNA, 32 nt, Human
cucccaaguagcugggacuacaggcauguacc

SEQ ID NO: 396232 - RNA, 24 nt, Human
cucccaaguagcugggauaacagg

SEQ ID NO: 396233 - RNA, 32 nt, Human
cucccaaguagcugggauaacaggcgcccacc

SEQ ID NO: 396234 - RNA, 24 nt, Human
cucccaaguagcugggaucacagg

SEQ ID NO: 396235 - RNA, 32 nt, Human
cucccaaguagcugggaugacaggcgcacacc

SEQ ID NO: 396236 - RNA, 24 nt, Human
cucccaaguagcugggauuaaagg

SEQ ID NO: 396237 - RNA, 32 nt, Human
cucccaaguagcugggauuaaaggcacgugcc

SEQ ID NO: 396238 - RNA, 23 nt, Human
cucccaaguagcugggauuaagg

SEQ ID NO: 396239 - RNA, 32 nt, Human
cucccaaguagcugggauuaaggcgccugcca

SEQ ID NO: 396240 - RNA, 23 nt, Human
cucccaaguagcugggauuacag

SEQ ID NO: 396241 - RNA, 32 nt, Human
cucccaaguagcugggauuacagaugccugcc

SEQ ID NO: 396242 - RNA, 32 nt, Human
cucccaaguagcugggauuacagcgauugguu

SEQ ID NO: 396243 - RNA, 24 nt, Human
cucccaaguagcugggauuacagg

SEQ ID NO: 396244 - RNA, 32 nt, Human
cucccaaguagcugggauuacaggcacaaacc

SEQ ID NO: 396245 - RNA, 32 nt, Human
cucccaaguagcugggauuacaggcacaggcc

SEQ ID NO: 396246 - RNA, 32 nt, Human
cucccaaguagcugggauuacaggcacaugcc

SEQ ID NO: 396247 - RNA, 32 nt, Human
cucccaaguagcugggauuacaggcacccacc

SEQ ID NO: 396248 - RNA, 32 nt, Human
cucccaaguagcugggauuacaggcacccacg

SEQ ID NO: 396249 - RNA, 32 nt, Human
cucccaaguagcugggauuacaggcacccgcc

SEQ ID NO: 396250 - RNA, 32 nt, Human
cucccaaguagcugggauuacaggcaccuacc

SEQ ID NO: 396251 - RNA, 32 nt, Human
cucccaaguagcugggauuacaggcaccugcc

SEQ ID NO: 396252 - RNA, 32 nt, Human
cucccaaguagcugggauuacaggcacgcgcc

SEQ ID NO: 396253 - RNA, 32 nt, Human
cucccaaguagcugggauuacaggcacgcucc

SEQ ID NO: 396254 - RNA, 32 nt, Human
cucccaaguagcugggauuacaggcagacacg

SEQ ID NO: 396255 - RNA, 32 nt, Human
cucccaaguagcugggauuacaggcagcacca

SEQ ID NO: 396256 - RNA, 32 nt, Human
cucccaaguagcugggauuacaggcauacacc

SEQ ID NO: 396257 - RNA, 32 nt, Human
cucccaaguagcugggauuacaggcaugcacc

SEQ ID NO: 396258 - RNA, 32 nt, Human
cucccaaguagcugggauuacaggcaugcacu

SEQ ID NO: 396259 - RNA, 32 nt, Human
cucccaaguagcugggauuacaggcaugcgcc

SEQ ID NO: 396260 - RNA, 32 nt, Human
cucccaaguagcugggauuacaggcaugggcc

SEQ ID NO: 396261 - RNA, 32 nt, Human
cucccaaguagcugggauuacaggcauguacc

SEQ ID NO: 396262 - RNA, 32 nt, Human
cucccaaguagcugggauuacaggcauguacu

SEQ ID NO: 396263 - RNA, 32 nt, Human
cucccaaguagcugggauuacaggcaugugcc

SEQ ID NO: 396264 - RNA, 32 nt, Human
cucccaaguagcugggauuacaggcgcacgcc

SEQ ID NO: 396265 - RNA, 32 nt, Human
cucccaaguagcugggauuacaggcgcauugg

SEQ ID NO: 396266 - RNA, 32 nt, Human
cucccaaguagcugggauuacaggcgccugcc

SEQ ID NO: 396267 - RNA, 32 nt, Human
cucccaaguagcugggauuacaggcgcgugcc

SEQ ID NO: 396268 - RNA, 32 nt, Human
cucccaaguagcugggauuacaggcguccgcc

SEQ ID NO: 396269 - RNA, 32 nt, Human
cucccaaguagcugggauuacaggcgugcacc

SEQ ID NO: 396270 - RNA, 32 nt, Human
cucccaaguagcugggauuacaggcguguacc

SEQ ID NO: 396271 - RNA, 32 nt, Human
cucccaaguagcugggauuacagguaccugcc

SEQ ID NO: 396272 - RNA, 32 nt, Human
cucccaaguagcugggauuacaggugcacacc

SEQ ID NO: 396273 - RNA, 32 nt, Human
cucccaaguagcugggauuacaggugcaggcc

SEQ ID NO: 396274 - RNA, 32 nt, Human
cucccaaguagcugggauuacaggugcccaac

SEQ ID NO: 396275 - RNA, 32 nt, Human
cucccaaguagcugggauuacaggugcccacc

SEQ ID NO: 396276 - RNA, 32 nt, Human
cucccaaguagcugggauuacaggugcccgcc

SEQ ID NO: 396277 - RNA, 32 nt, Human
cucccaaguagcugggauuacaggugccugcc

SEQ ID NO: 396278 - RNA, 32 nt, Human
cucccaaguagcugggauuacaggugcucacc

SEQ ID NO: 396279 - RNA, 32 nt, Human
cucccaaguagcugggauuacagguguccgcc

SEQ ID NO: 396280 - RNA, 32 nt, Human
cucccaaguagcugggauuacaggugugagcc

SEQ ID NO: 396281 - RNA, 32 nt, Human
cucccaaguagcugggauuacaggugugcacc

SEQ ID NO: 396282 - RNA, 32 nt, Human
cucccaaguagcugggauuacaggugugcacu

SEQ ID NO: 396283 - RNA, 32 nt, Human
cucccaaguagcugggauuacaggugugcgcc

SEQ ID NO: 396284 - RNA, 32 nt, Human
cucccaaguagcugggauuacaggugugugcc

SEQ ID NO: 396285 - RNA, 32 nt, Human
cucccaaguagcugggauuacagucaggcacc

SEQ ID NO: 396286 - RNA, 32 nt, Human
cucccaaguagcugggauuacagugccugcca

SEQ ID NO: 396287 - RNA, 32 nt, Human
cucccaaguagcugggauuacaugugugugcc

SEQ ID NO: 396288 - RNA, 24 nt, Human
cucccaaguagcugggauuacggg

SEQ ID NO: 396289 - RNA, 32 nt, Human
cucccaaguagcugggauuacgggcaugcgcc

SEQ ID NO: 396290 - RNA, 32 nt, Human
cucccaaguagcugggauuauaggcaccugcc

SEQ ID NO: 396291 - RNA, 32 nt, Human
cucccaaguagcugggauuauaggcauccacu

SEQ ID NO: 396292 - RNA, 32 nt, Human
cucccaaguagcugggauuauaggugugugcc

SEQ ID NO: 396293 - RNA, 32 nt, Human
cucccaaguagcugggauugcaggcgcccgcc

SEQ ID NO: 396294 - RNA, 32 nt, Human
cucccaaguagcugggauugcaggugcccacc

SEQ ID NO: 396295 - RNA, 22 nt, Human
cucccaaguagcugggauugua

SEQ ID NO: 396296 - RNA, 32 nt, Human
cucccaaguagcugggauuguaagaguaugcc

SEQ ID NO: 396297 - RNA, 32 nt, Human
cucccaaguagcuggggcuacaggcacccacc

SEQ ID NO: 396298 - RNA, 24 nt, Human
cucccaaguagcugggguuacagg

SEQ ID NO: 396299 - RNA, 32 nt, Human
cucccaaguagcugggguuacaggcauuugcc

SEQ ID NO: 396300 - RNA, 32 nt, Human
cucccaaguaguugggacuacaggcaugcgcc

SEQ ID NO: 396301 - RNA, 24 nt, Human
cucccaaguaguugggauuacagg

SEQ ID NO: 396302 - RNA, 32 nt, Human
cucccaaguaguugggauuacaggcaccugcc

SEQ ID NO: 396303 - RNA, 32 nt, Human
cucccaaguaguugggauuacaggcaugcauc

SEQ ID NO: 396304 - RNA, 32 nt, Human
cucccaaguaguugggauuacgggcaugcacc

SEQ ID NO: 396305 - RNA, 24 nt, Human
cucccaaguaguugggauugcagg

SEQ ID NO: 396306 - RNA, 18 nt, Human
cucccaagucagacaccu

SEQ ID NO: 396307 - RNA, 23 nt, Human
cucccaagugcuggaauuacagg

SEQ ID NO: 396308 - RNA, 23 nt, Human
cucccaagugcugggauuacagg

SEQ ID NO: 396309 - RNA, 24 nt, Human
cucccaaguggcugggauuacagg

SEQ ID NO: 396310 - RNA, 32 nt, Human
cucccaaguggcugggauuacaggcgcaaacc

SEQ ID NO: 396311 - RNA, 24 nt, Human
cucccaaguggcugggauuauagg

SEQ ID NO: 396312 - RNA, 24 nt, Human
cucccaaguggcugggauugcagg

SEQ ID NO: 396313 - RNA, 32 nt, Human
cucccaaguggcugggauugcaggcaugagcu

SEQ ID NO: 396314 - RNA, 24 nt, Human
cucccaaguugcugggacuacagg

SEQ ID NO: 396315 - RNA, 19 nt, Human
cucccaauacagacgggug

SEQ ID NO: 396316 - RNA, 32 nt, Human
cucccaauacccacccuucucucucgagggau

SEQ ID NO: 396317 - RNA, 20 nt, Human
cucccaauagccgccgcccg

SEQ ID NO: 396318 - RNA, 32 nt, Human
cucccaauauuccuucucaaacuuggagaggg

SEQ ID NO: 396319 - RNA, 32 nt, Human
cucccaauccugcauaagaggucauagaaaca

SEQ ID NO: 396320 - RNA, 32 nt, Human
cucccaaucucuuuccuuucucucuucaguuc

SEQ ID NO: 396321 - RNA, 32 nt, Human
cucccaauggaggggagguugcaggggagagc

SEQ ID NO: 396322 - RNA, 32 nt, Human
cucccaaugugcuaggauuacaggcgugggcc

SEQ ID NO: 396323 - RNA, 23 nt, Human
cucccaaugugcugggauuacag

SEQ ID NO: 396324 - RNA, 24 nt, Human
cucccaaugugcugggauuacagg

SEQ ID NO: 396325 - RNA, 32 nt, Human
cucccaaugugcugggauuacaggcaugagcc

SEQ ID NO: 396326 - RNA, 32 nt, Human
cucccaauguguugggauuacaggcgugaacc

SEQ ID NO: 396327 - RNA, 18 nt, Human
cucccaauuacuauuuuc

SEQ ID NO: 396328 - RNA, 32 nt, Human
cucccaauuacuauuuucuuccuucccagcuc

SEQ ID NO: 396329 - RNA, 24 nt, Human
cucccaauuucagacucccauucc

SEQ ID NO: 396330 - RNA, 32 nt, Human
cucccacaaaggagagcuagcagcagggaggg

SEQ ID NO: 396331 - RNA, 32 nt, Human
cucccacaaccuuggacuccagcuggcagcug

SEQ ID NO: 396332 - RNA, 32 nt, Human
cucccacaagcaccugcucaacauaggccugc

SEQ ID NO: 396333 - RNA, 32 nt, Human
cucccacaauaacugcgugaagaaggaauuuu

SEQ ID NO: 396334 - RNA, 32 nt, Human
cucccacaaugcuggaauuacagguguuagcc

SEQ ID NO: 396335 - RNA, 32 nt, Human
cucccacacacacccacacacucgcccgccca

SEQ ID NO: 396336 - RNA, 32 nt, Human
cucccacacagcccuucccugaggcagcagga

SEQ ID NO: 396337 - RNA, 32 nt, Human
cucccacacccacagccccaggcuuucuucuu

SEQ ID NO: 396338 - RNA, 32 nt, Human
cucccacacccagccacuaccucccagcuugg

SEQ ID NO: 396339 - RNA, 32 nt, Human
cucccacacccccaaucuaccuggugaugauu

SEQ ID NO: 396340 - RNA, 32 nt, Human
cucccacaccgucagguacuccugccagggaa

SEQ ID NO: 396341 - RNA, 32 nt, Human
cucccacacguacacaugcacauguacgcacc

SEQ ID NO: 396342 - RNA, 32 nt, Human
cucccacacgugcucacccacccgcagccuag

SEQ ID NO: 396343 - RNA, 32 nt, Human
cucccacacugcucccaguccugggcacagug

SEQ ID NO: 396344 - RNA, 32 nt, Human
cucccacagagcccuggaaggccccagcccug

SEQ ID NO: 396345 - RNA, 32 nt, Human
cucccacagcacauccuacccggaagaccagc

SEQ ID NO: 396346 - RNA, 32 nt, Human
cucccacagcucuugaccaauguggccaaagc

SEQ ID NO: 396347 - RNA, 20 nt, Human
cucccacagcuugugcccuc

SEQ ID NO: 396348 - RNA, 32 nt, Human
cucccacagggcacgucaggugccucugaggg

SEQ ID NO: 396349 - RNA, 32 nt, Human
cucccacaggguggcaggacugggagaaucuc

SEQ ID NO: 396350 - RNA, 32 nt, Human
cucccacaguaaggagcucacagcugucauga

SEQ ID NO: 396351 - RNA, 24 nt, Human
cucccacagugcugggauuacagg

SEQ ID NO: 396352 - RNA, 32 nt, Human
cucccacagugcugggauuacaggagugagcc

SEQ ID NO: 396353 - RNA, 32 nt, Human
cucccacagugcugggauuacaggcaugggcc

SEQ ID NO: 396354 - RNA, 32 nt, Human
cucccacagugcugggauuacaggccugagcc

SEQ ID NO: 396355 - RNA, 32 nt, Human
cucccacagugcugggauuacaggcgugagcc

SEQ ID NO: 396356 - RNA, 24 nt, Human
cucccacagugcugggauuaccgg

SEQ ID NO: 396357 - RNA, 32 nt, Human
cucccacagugcugggauuaccggcgugagcc

SEQ ID NO: 396358 - RNA, 24 nt, Human
cucccacagugcugggauuagagg

SEQ ID NO: 396359 - RNA, 32 nt, Human
cucccacagugcugggauuagaggcaugagcc

SEQ ID NO: 396360 - RNA, 32 nt, Human
cucccacauccuggccucuccucuccacgguc

SEQ ID NO: 396361 - RNA, 32 nt, Human
cucccacauucccagggauuuuccccaucagu

SEQ ID NO: 396362 - RNA, 22 nt, Human
cucccaccaccccugccugcca

SEQ ID NO: 396363 - RNA, 32 nt, Human
cucccaccacccuccaccuagagcucacccaa

SEQ ID NO: 396364 - RNA, 32 nt, Human
cucccaccacggggucugcagcaaugaaggga

SEQ ID NO: 396365 - RNA, 32 nt, Human
cucccaccacugcacuccagccugggaagcag

SEQ ID NO: 396366 - RNA, 32 nt, Human
cucccaccacugcacuccagccugggcgacac

SEQ ID NO: 396367 - RNA, 21 nt, Human
cucccaccagggccccuccca

SEQ ID NO: 396368 - RNA, 31 nt, Human
cucccaccaguguccaggcaggcaggagccc

SEQ ID NO: 396369 - RNA, 32 nt, Human
cucccaccaucauuuuaaccuuccucagguuu

SEQ ID NO: 396370 - RNA, 18 nt, Human
cucccacccaacgcucca

SEQ ID NO: 396371 - RNA, 18 nt, Human
cucccacccaccccugcc

SEQ ID NO: 396372 - RNA, 32 nt, Human
cucccacccaccgccacugccaaccaagacau

SEQ ID NO: 396373 - RNA, 25 nt, Human
cucccacccaccuagcuccccccag

SEQ ID NO: 396374 - RNA, 32 nt, Human
cucccacccacugacucagggcucagacucag

SEQ ID NO: 396375 - RNA, 32 nt, Human
cucccacccacugagggcaggagggcuugugg

SEQ ID NO: 396376 - RNA, 32 nt, Human
cucccacccacuggcucccucccccagcgcuc

SEQ ID NO: 396377 - RNA, 32 nt, Human
cucccacccacuguagugcucccaccccugga

SEQ ID NO: 396378 - RNA, 18 nt, Human
cucccacccagcccugcc

SEQ ID NO: 396379 - RNA, 18 nt, Human
cucccaccccacccugcu

SEQ ID NO: 396380 - RNA, 32 nt, Human
cucccaccccaccuaccucacaggguuguugu

SEQ ID NO: 396381 - RNA, 32 nt, Human
cucccaccccaucccucuccccagucuuggau

SEQ ID NO: 396382 - RNA, 32 nt, Human
cucccaccccuccaagacccauucugcacagu

SEQ ID NO: 396383 - RNA, 18 nt, Human
cucccaccccugccccca

SEQ ID NO: 396384 - RNA, 32 nt, Human
cucccacccgagaacaggggccagguugcucc

SEQ ID NO: 396385 - RNA, 32 nt, Human
cucccacccgggacuacuugcuggugacuuuu

SEQ ID NO: 396386 - RNA, 32 nt, Human
cucccacccucccccugcuccccaccauucuc

SEQ ID NO: 396387 - RNA, 32 nt, Human
cucccacccucugagccucuucugcuccugca

SEQ ID NO: 396388 - RNA, 32 nt, Human
cucccacccugcccuggccuggguggaggaac

SEQ ID NO: 396389 - RNA, 32 nt, Human
cucccacccuucucuauugucuggacccagug

SEQ ID NO: 396390 - RNA, 19 nt, Human
cucccacccuucugucucc

SEQ ID NO: 396391 - RNA, 18 nt, Human
cucccacccuugccugcc

SEQ ID NO: 396392 - RNA, 32 nt, Human
cucccacccuuguguuucacuccaccaccaac

SEQ ID NO: 396393 - RNA, 20 nt, Human
cucccaccgagcugccugcc

SEQ ID NO: 396394 - RNA, 32 nt, Human
cucccaccgcaccuuccugaauagcugagacu

SEQ ID NO: 396395 - RNA, 20 nt, Human
cucccaccgccgccgccccg

SEQ ID NO: 396396 - RNA, 32 nt, Human
cucccaccgccgcggcaacggccccggcccac

SEQ ID NO: 396397 - RNA, 32 nt, Human
cucccaccgucuuccuccuacacaccaaugau

SEQ ID NO: 396398 - RNA, 32 nt, Human
cucccaccuacuguaguggagcugcucaacca

SEQ ID NO: 396399 - RNA, 32 nt, Human
cucccaccuauaauccuagcacuuugggaggc

SEQ ID NO: 396400 - RNA, 32 nt, Human
cucccaccucaaccucuagaauagcugggacu

SEQ ID NO: 396401 - RNA, 32 nt, Human
cucccaccucaaccucuuaaauagcugagacu

SEQ ID NO: 396402 - RNA, 32 nt, Human
cucccaccucagcaucccaaagcacugcuacu

SEQ ID NO: 396403 - RNA, 32 nt, Human
cucccaccucagccauccaaauagcugggacc

SEQ ID NO: 396404 - RNA, 32 nt, Human
cucccaccucagccucccaaauagcugggauc

SEQ ID NO: 396405 - RNA, 32 nt, Human
cucccaccucagccucccaaauagcugggauu

SEQ ID NO: 396406 - RNA, 32 nt, Human
cucccaccucagccucccgaauagcugggacu

SEQ ID NO: 396407 - RNA, 32 nt, Human
cucccaccucagccuccugaauagcugggacu

SEQ ID NO: 396408 - RNA, 32 nt, Human
cucccaccucagccucucaaauagcugggacu

SEQ ID NO: 396409 - RNA, 19 nt, Human
cucccaccucagccugcca

SEQ ID NO: 396410 - RNA, 32 nt, Human
cucccaccucagucuccugaaagcugggauga

SEQ ID NO: 396411 - RNA, 32 nt, Human
cucccaccuccaccucccaaacugcugggauu

SEQ ID NO: 396412 - RNA, 32 nt, Human
cucccaccuccaccucccaaagugcugggauu

SEQ ID NO: 396413 - RNA, 18 nt, Human
cucccaccucccgcccca

SEQ ID NO: 396414 - RNA, 18 nt, Human
cucccaccuccugauuca

SEQ ID NO: 396415 - RNA, 32 nt, Human
cucccaccucggcuucccaaagugcagagauu

SEQ ID NO: 396416 - RNA, 32 nt, Human
cucccaccucugagauuaggacaggaaaaaug

SEQ ID NO: 396417 - RNA, 18 nt, Human
cucccaccucugucugcc

SEQ ID NO: 396418 - RNA, 32 nt, Human
cucccaccucuucuacccucccccucuucuuu

SEQ ID NO: 396419 - RNA, 32 nt, Human
cucccaccugcacaugucacacugaccacauc

SEQ ID NO: 396420 - RNA, 32 nt, Human
cucccaccugcacaugucacacugaccccauc

SEQ ID NO: 396421 - RNA, 32 nt, Human
cucccaccugcaggguguucacuuuguggcuc

SEQ ID NO: 396422 - RNA, 32 nt, Human
cucccaccugcucaaucugacaggaagcuucu

SEQ ID NO: 396423 - RNA, 32 nt, Human
cucccaccugcucuucaugaggaguccuuuau

SEQ ID NO: 396424 - RNA, 18 nt, Human
cucccaccugcugccugc

SEQ ID NO: 396425 - RNA, 32 nt, Human
cucccaccuguagucccagcacuuugggaggc

SEQ ID NO: 396426 - RNA, 32 nt, Human
cucccaccuucaacucuuuucucccauuauuu

SEQ ID NO: 396427 - RNA, 32 nt, Human
cucccaccuucccagagucuccugggcagugc

SEQ ID NO: 396428 - RNA, 32 nt, Human
cucccaccuucccagaugguuccuuucugccc

SEQ ID NO: 396429 - RNA, 32 nt, Human
cucccaccuucucuccccuccucucugcuuua

SEQ ID NO: 396430 - RNA, 32 nt, Human
cucccaccuugcagccgugggaauguucuaug

SEQ ID NO: 396431 - RNA, 20 nt, Human
cucccacgcgacccugcagg

SEQ ID NO: 396432 - RNA, 32 nt, Human
cucccacgcugccccuaguccugggcauggag

SEQ ID NO: 396433 - RNA, 32 nt, Human
cucccacgcugcccuccugccugcagccauga

SEQ ID NO: 396434 - RNA, 17 nt, Human
cucccacuaaccccgcc

SEQ ID NO: 396435 - RNA, 20 nt, Human
cucccacuacagaccugcca

SEQ ID NO: 396436 - RNA, 21 nt, Human
cucccacuacugccacuacca

SEQ ID NO: 396437 - RNA, 19 nt, Human
cucccacuagggcccugcc

SEQ ID NO: 396438 - RNA, 32 nt, Human
cucccacucaaggcaccccauggagccuccug

SEQ ID NO: 396439 - RNA, 19 nt, Human
cucccacucaccacugcca

SEQ ID NO: 396440 - RNA, 19 nt, Human
cucccacucacccccagca

SEQ ID NO: 396441 - RNA, 20 nt, Human
cucccacucagaacucucca

SEQ ID NO: 396442 - RNA, 32 nt, Human
cucccacucaggaaguggguggggaagggaaa

SEQ ID NO: 396443 - RNA, 32 nt, Human
cucccacucagugugcucugcagcugugagga

SEQ ID NO: 396444 - RNA, 18 nt, Human
cucccacucauacccgcc

SEQ ID NO: 396445 - RNA, 21 nt, Human
cucccacuccauaccccgcca

SEQ ID NO: 396446 - RNA, 17 nt, Human
cucccacuccccuacca

SEQ ID NO: 396447 - RNA, 20 nt, Human
cucccacucccggccuguca

SEQ ID NO: 396448 - RNA, 18 nt, Human
cucccacucccguuucca

SEQ ID NO: 396449 - RNA, 17 nt, Human
cucccacucucccugcc

SEQ ID NO: 396450 - RNA, 32 nt, Human
cucccacucuccuaggcauucuggaccucugg

SEQ ID NO: 396451 - RNA, 21 nt, Human
cucccacugaaugcacuucua

SEQ ID NO: 396452 - RNA, 32 nt, Human
cucccacugcaacuuuucagcucagggguugu

SEQ ID NO: 396453 - RNA, 32 nt, Human
cucccacugcacuccagccugggcgacagagc

SEQ ID NO: 396454 - RNA, 32 nt, Human
cucccacugcacuccagcucggggaacagagc

SEQ ID NO: 396455 - RNA, 32 nt, Human
cucccacugcagccucugccugcucugccgcc

SEQ ID NO: 396456 - RNA, 32 nt, Human
cucccacugcaugcccggcccccagcccaccu

SEQ ID NO: 396457 - RNA, 21 nt, Human
cucccacugccaccaccgcca

SEQ ID NO: 396458 - RNA, 18 nt, Human
cucccacugcccccucca

SEQ ID NO: 396459 - RNA, 32 nt, Human
cucccacugccccucucugccucccacugauu

SEQ ID NO: 396460 - RNA, 20 nt, Human
cucccacugcccgccuguca

SEQ ID NO: 396461 - RNA, 18 nt, Human
cucccacugcccuagcca

SEQ ID NO: 396462 - RNA, 21 nt, Human
cucccacugcccugcacacca

SEQ ID NO: 396463 - RNA, 32 nt, Human
cucccacugccgaccgcacagcucccucucug

SEQ ID NO: 396464 - RNA, 19 nt, Human
cucccacugcucccuguca

SEQ ID NO: 396465 - RNA, 17 nt, Human
cucccacugcuuccugc

SEQ ID NO: 396466 - RNA, 21 nt, Human
cucccacuggagaagccgcca

SEQ ID NO: 396467 - RNA, 32 nt, Human
cucccacuggcaacaucuuguagcuucuguuu

SEQ ID NO: 396468 - RNA, 20 nt, Human
cucccacuggcauccuggca

SEQ ID NO: 396469 - RNA, 32 nt, Human
cucccacugggcggcuccagccccagacaaca

SEQ ID NO: 396470 - RNA, 19 nt, Human
cucccacuguggccuccca

SEQ ID NO: 396471 - RNA, 22 nt, Human
cucccacuguugcugccugcca

SEQ ID NO: 396472 - RNA, 32 nt, Human
cucccacuuaccugcucuugugcaauguuucu

SEQ ID NO: 396473 - RNA, 32 nt, Human
cucccacuuaggaagcucguguuuccagaucu

SEQ ID NO: 396474 - RNA, 32 nt, Human
cucccacuuauaagugaggacaugcaguauuu

SEQ ID NO: 396475 - RNA, 20 nt, Human
cucccacuucacccuccugc

SEQ ID NO: 396476 - RNA, 32 nt, Human
cucccacuucacccucuugauaacccagagcc

SEQ ID NO: 396477 - RNA, 19 nt, Human
cucccacuucacccuucua

SEQ ID NO: 396478 - RNA, 19 nt, Human
cucccacuucagccuccca

SEQ ID NO: 396479 - RNA, 32 nt, Human
cucccacuucagccucccaaauagcuggggcu

SEQ ID NO: 396480 - RNA, 32 nt, Human
cucccacuucagugcuguccuccugggcgugu

SEQ ID NO: 396481 - RNA, 19 nt, Human
cucccacuucauaacuaca

SEQ ID NO: 396482 - RNA, 21 nt, Human
cucccacuucauacauuacca

SEQ ID NO: 396483 - RNA, 19 nt, Human
cucccacuuccaucuggca

SEQ ID NO: 396484 - RNA, 19 nt, Human
cucccacuucccaacucca

SEQ ID NO: 396485 - RNA, 18 nt, Human
cucccacuucccagccgc

SEQ ID NO: 396486 - RNA, 21 nt, Human
cucccacuuccccuucugcca

SEQ ID NO: 396487 - RNA, 18 nt, Human
cucccacuuccuccuacc

SEQ ID NO: 396488 - RNA, 32 nt, Human
cucccacuuccuugacgcuauuuccugggagg

SEQ ID NO: 396489 - RNA, 18 nt, Human
cucccacuucggcagcca

SEQ ID NO: 396490 - RNA, 20 nt, Human
cucccacuucguggcaucca

SEQ ID NO: 396491 - RNA, 19 nt, Human
cucccacuucucaacucca

SEQ ID NO: 396492 - RNA, 19 nt, Human
cucccacuucucuacucca

SEQ ID NO: 396493 - RNA, 32 nt, Human
cucccacuucuucuccccucccccaccgcauc

SEQ ID NO: 396494 - RNA, 18 nt, Human
cucccacuucuuucucca

SEQ ID NO: 396495 - RNA, 20 nt, Human
cucccacuugcacgccacca

SEQ ID NO: 396496 - RNA, 20 nt, Human
cucccacuugcaugcuucca

SEQ ID NO: 396497 - RNA, 18 nt, Human
cucccacuuggaccugcu

SEQ ID NO: 396498 - RNA, 21 nt, Human
cucccacuugguagcaccuuc

SEQ ID NO: 396499 - RNA, 19 nt, Human
cucccacuuuagccuccca

SEQ ID NO: 396500 - RNA, 18 nt, Human
cucccacuuuccccugcc

SEQ ID NO: 396501 - RNA, 19 nt, Human
cucccacuuuggccuucca

SEQ ID NO: 396502 - RNA, 32 nt, Human
cucccacuuugucccgagccuccuucuccccc

SEQ ID NO: 396503 - RNA, 32 nt, Human
cucccagaaaccugaaagcaccugccaaugac

SEQ ID NO: 396504 - RNA, 32 nt, Human
cucccagaacaacaacuauccugacuucuaau

SEQ ID NO: 396505 - RNA, 25 nt, Human
cucccagaacaggcaccccuuccca

SEQ ID NO: 396506 - RNA, 32 nt, Human
cucccagaagcaccugcuuaauaaaucaaaga

SEQ ID NO: 396507 - RNA, 32 nt, Human
cucccagaaucugccuuuuaaguuuccaucag

SEQ ID NO: 396508 - RNA, 24 nt, Human
cucccagaaugcugggauuacagg

SEQ ID NO: 396509 - RNA, 32 nt, Human
cucccagaaugcugggauuacaggcgugagca

SEQ ID NO: 396510 - RNA, 32 nt, Human
cucccagaauguacuuaucuuaccucggcaug

SEQ ID NO: 396511 - RNA, 32 nt, Human
cucccagaccaggaguuggggcaggcugccug

SEQ ID NO: 396512 - RNA, 32 nt, Human
cucccagaccucccucauucuuuuugucucuu

SEQ ID NO: 396513 - RNA, 32 nt, Human
cucccagaccuccugaccugggugguugaggc

SEQ ID NO: 396514 - RNA, 24 nt, Human
cucccagacggcugggauuccagg

SEQ ID NO: 396515 - RNA, 32 nt, Human
cucccagacugcugagauuacaggcgugagcc

SEQ ID NO: 396516 - RNA, 24 nt, Human
cucccagacuguugggauuacagg

SEQ ID NO: 396517 - RNA, 32 nt, Human
cucccagacuguugggauuacaggcaugagcc

SEQ ID NO: 396518 - RNA, 32 nt, Human
cucccagagccccaggacugggccagagcacu

SEQ ID NO: 396519 - RNA, 32 nt, Human
cucccagaggggcauggacugccaccaggacu

SEQ ID NO: 396520 - RNA, 24 nt, Human
cucccagaguacugggauuacagg

SEQ ID NO: 396521 - RNA, 23 nt, Human
cucccagaguauugggauuacag

SEQ ID NO: 396522 - RNA, 32 nt, Human
cucccagaguauugggauuacagacaugagcc

SEQ ID NO: 396523 - RNA, 32 nt, Human
cucccagagugcuaggauuacaggcaugagcc

SEQ ID NO: 396524 - RNA, 32 nt, Human
cucccagagugcuaggauuacaggccuuuuga

SEQ ID NO: 396525 - RNA, 32 nt, Human
cucccagagugcugagauuacagacgugaacc

SEQ ID NO: 396526 - RNA, 24 nt, Human
cucccagagugcugagauuacagg

SEQ ID NO: 396527 - RNA, 32 nt, Human
cucccagagugcugagauuacaggcgugagcc

SEQ ID NO: 396528 - RNA, 32 nt, Human
cucccagagugcugagauuuacaggcgugagc

SEQ ID NO: 396529 - RNA, 32 nt, Human
cucccagagugcugggacuacaggcaucagcc

SEQ ID NO: 396530 - RNA, 32 nt, Human
cucccagagugcugggacuacaggcaugagcc

SEQ ID NO: 396531 - RNA, 22 nt, Human
cucccagagugcugggauuaca

SEQ ID NO: 396532 - RNA, 24 nt, Human
cucccagagugcugggauuacagg

SEQ ID NO: 396533 - RNA, 32 nt, Human
cucccagagugcugggauuacaggcaugagcc

SEQ ID NO: 396534 - RNA, 32 nt, Human
cucccagagugcugggauuacaggcgucagcc

SEQ ID NO: 396535 - RNA, 32 nt, Human
cucccagagugcugggauuacaggcgugagcc

SEQ ID NO: 396536 - RNA, 32 nt, Human
cucccagagugcugggauuacagggggagcca

SEQ ID NO: 396537 - RNA, 32 nt, Human
cucccagagugcugggauuacaggugugaauc

SEQ ID NO: 396538 - RNA, 32 nt, Human
cucccagagugcugggauuacaggugugagcc

SEQ ID NO: 396539 - RNA, 32 nt, Human
cucccagagugcugggauuacaggugugagcu

SEQ ID NO: 396540 - RNA, 32 nt, Human
cucccagagugcugggauuauaggcgugagcc

SEQ ID NO: 396541 - RNA, 32 nt, Human
cucccagagugcugggauuuacaggcaugagc

SEQ ID NO: 396542 - RNA, 24 nt, Human
cucccagagugcuuggauugcagg

SEQ ID NO: 396543 - RNA, 32 nt, Human
cucccagaguguuaggauuacaggcgugagcc

SEQ ID NO: 396544 - RNA, 32 nt, Human
cucccagauagcugggacuacaggcacacgcu

SEQ ID NO: 396545 - RNA, 32 nt, Human
cucccagauauaaguaucaugguccagcagua

SEQ ID NO: 396546 - RNA, 32 nt, Human
cucccagauuccccguaaagcagcccugcagc

SEQ ID NO: 396547 - RNA, 32 nt, Human
cucccagauugcuggguuuacaggcaugagcc

SEQ ID NO: 396548 - RNA, 22 nt, Human
cucccagcacugacucacuccu

SEQ ID NO: 396549 - RNA, 32 nt, Human
cucccagcagaacauacuagggagaugcaccc

SEQ ID NO: 396550 - RNA, 32 nt, Human
cucccagcagccacaccggcuuugugcucagc

SEQ ID NO: 396551 - RNA, 21 nt, Human
cucccagcaggcugccugcca

SEQ ID NO: 396552 - RNA, 32 nt, Human
cucccagcaugcuggacuaugauacagagaac

SEQ ID NO: 396553 - RNA, 18 nt, Human
cucccagcauuucacuuc

SEQ ID NO: 396554 - RNA, 32 nt, Human
cucccagccaagaucugucuuccuucauggug

SEQ ID NO: 396555 - RNA, 32 nt, Human
cucccagccacaccugccccugcucuggggcc

SEQ ID NO: 396556 - RNA, 21 nt, Human
cucccagccaccagccugccu

SEQ ID NO: 396557 - RNA, 20 nt, Human
cucccagccaccgccugcca

SEQ ID NO: 396558 - RNA, 24 nt, Human
cucccagccccaccccgggaucug

SEQ ID NO: 396559 - RNA, 32 nt, Human
cucccagccccacuccccgcagucucccugaa

SEQ ID NO: 396560 - RNA, 32 nt, Human
cucccagccccacucuggggcagaucaaaugu

SEQ ID NO: 396561 - RNA, 20 nt, Human
cucccagcccccuccuccug

SEQ ID NO: 396562 - RNA, 20 nt, Human
cucccagccccgccgcgccg

SEQ ID NO: 396563 - RNA, 21 nt, Human
cucccagccccuauuccucua

SEQ ID NO: 396564 - RNA, 18 nt, Human
cucccagccccuccuucu

SEQ ID NO: 396565 - RNA, 21 nt, Human
cucccagccccucgccuucua

SEQ ID NO: 396566 - RNA, 32 nt, Human
cucccagccccuggugggcugcggugaugggu

SEQ ID NO: 396567 - RNA, 16 nt, Human
cucccagcccuccuuc

SEQ ID NO: 396568 - RNA, 32 nt, Human
cucccagcccucuccucauucucugaacccac

SEQ ID NO: 396569 - RNA, 20 nt, Human
cucccagcccucuccuccug

SEQ ID NO: 396570 - RNA, 32 nt, Human
cucccagcccucuuugccggacgagcucuggg

SEQ ID NO: 396571 - RNA, 21 nt, Human
cucccagcccuguaaauucua

SEQ ID NO: 396572 - RNA, 19 nt, Human
cucccagcccuuccuccug

SEQ ID NO: 396573 - RNA, 32 nt, Human
cucccagcccuugcccagccugggggaguggg

SEQ ID NO: 396574 - RNA, 18 nt, Human
cucccagccgcgacuucu

SEQ ID NO: 396575 - RNA, 32 nt, Human
cucccagccucaguuucccccacagcagcacg

SEQ ID NO: 396576 - RNA, 17 nt, Human
cucccagccuccacuuu

SEQ ID NO: 396577 - RNA, 32 nt, Human
cucccagccuccacuuucagagugaaauucaa

SEQ ID NO: 396578 - RNA, 32 nt, Human
cucccagccuccagaacucugagagaccuggc

SEQ ID NO: 396579 - RNA, 21 nt, Human
cucccagccuccagggcuucu

SEQ ID NO: 396580 - RNA, 32 nt, Human
cucccagccuccagggcuucucugugugucuu

SEQ ID NO: 396581 - RNA, 22 nt, Human
cucccagccugaauucugucua

SEQ ID NO: 396582 - RNA, 16 nt, Human
cucccagccugcacuu

SEQ ID NO: 396583 - RNA, 20 nt, Human
cucccagccugccccuucug

SEQ ID NO: 396584 - RNA, 16 nt, Human
cucccagccugccuuc

SEQ ID NO: 396585 - RNA, 20 nt, Human
cucccagccugggcccucug

SEQ ID NO: 396586 - RNA, 20 nt, Human
cucccagccuggggcaucuc

SEQ ID NO: 396587 - RNA, 18 nt, Human
cucccagccugugucuuc

SEQ ID NO: 396588 - RNA, 32 nt, Human
cucccagcgaccauugcucuccuggcugagga

SEQ ID NO: 396589 - RNA, 20 nt, Human
cucccagcgaguccugcagg

SEQ ID NO: 396590 - RNA, 20 nt, Human
cucccagcgcagcgccgccg

SEQ ID NO: 396591 - RNA, 32 nt, Human
cucccagcgcaguucccagcugucucccugcu

SEQ ID NO: 396592 - RNA, 24 nt, Human
cucccagcgugcugggauuauagg

SEQ ID NO: 396593 - RNA, 32 nt, Human
cucccagcuauauuucuccagacuugcauuuu

SEQ ID NO: 396594 - RNA, 18 nt, Human
cucccagcuccacuucua

SEQ ID NO: 396595 - RNA, 22 nt, Human
cucccagcuccagcccugcagg

SEQ ID NO: 396596 - RNA, 21 nt, Human
cucccagcucuggucccggca

SEQ ID NO: 396597 - RNA, 32 nt, Human
cucccagcucugucaguggcccgcggggcccg

SEQ ID NO: 396598 - RNA, 22 nt, Human
cucccagcugaggccacaggac

SEQ ID NO: 396599 - RNA, 32 nt, Human
cucccagcugcacuuuaacccuagaagguggg

SEQ ID NO: 396600 - RNA, 20 nt, Human
cucccagcugccacgcucua

SEQ ID NO: 396601 - RNA, 32 nt, Human
cucccagcugcccuccccuacuucucccuugc

SEQ ID NO: 396602 - RNA, 32 nt, Human
cucccagcugugguaggcucacauagccagug

SEQ ID NO: 396603 - RNA, 32 nt, Human
cucccagcuuaugauccaugaagagaacgucu

SEQ ID NO: 396604 - RNA, 32 nt, Human
cucccagcuuggguguggccuccugggcucac

SEQ ID NO: 396605 - RNA, 32 nt, Human
cucccagcuuugaaggucuugcggugaagcau

SEQ ID NO: 396606 - RNA, 32 nt, Human
cucccagcuuugaaggucuugcgguggugcgu

SEQ ID NO: 396607 - RNA, 21 nt, Human
cucccaggaagagugcugugg

SEQ ID NO: 396608 - RNA, 32 nt, Human
cucccaggacaaggguugagaggcucaacccc

SEQ ID NO: 396609 - RNA, 32 nt, Human
cucccaggacccccacccucugggacaggccc

SEQ ID NO: 396610 - RNA, 32 nt, Human
cucccaggacucugcugccucagccagagccu

SEQ ID NO: 396611 - RNA, 32 nt, Human
cucccaggagagaacggagagccagugugcug

SEQ ID NO: 396612 - RNA, 32 nt, Human
cucccaggaucauccuuccucuguucucuuuc

SEQ ID NO: 396613 - RNA, 18 nt, Human
cucccaggaugcuagugg

SEQ ID NO: 396614 - RNA, 19 nt, Human
cucccaggcaagcagcugg

SEQ ID NO: 396615 - RNA, 22 nt, Human
cucccaggcacucuuacuucua

SEQ ID NO: 396616 - RNA, 32 nt, Human
cucccaggcaggcagaugccagugucugcucu

SEQ ID NO: 396617 - RNA, 32 nt, Human
cucccaggcauaagcauucugccugucucagc

SEQ ID NO: 396618 - RNA, 32 nt, Human
cucccaggcccagcaccgagcagaacagacca

SEQ ID NO: 396619 - RNA, 32 nt, Human
cucccaggccccuggcuguccaugucccacac

SEQ ID NO: 396620 - RNA, 22 nt, Human
cucccaggccggagugcagugg

SEQ ID NO: 396621 - RNA, 18 nt, Human
cucccaggccugcugugg

SEQ ID NO: 396622 - RNA, 22 nt, Human
cucccaggcgccgccgcagccg

SEQ ID NO: 396623 - RNA, 22 nt, Human
cucccaggcuagaguaccgugg

SEQ ID NO: 396624 - RNA, 22 nt, Human
cucccaggcuagagugcaaugg

SEQ ID NO: 396625 - RNA, 32 nt, Human
cucccaggcucaaucgauccuuccaacugagc

SEQ ID NO: 396626 - RNA, 32 nt, Human
cucccaggcuccucuucugcagugccagcuga

SEQ ID NO: 396627 - RNA, 32 nt, Human
cucccaggcuccuggaacuucugccuccaccu

SEQ ID NO: 396628 - RNA, 21 nt, Human
cucccaggcugaagugcagug

SEQ ID NO: 396629 - RNA, 22 nt, Human
cucccaggcugaagugcagugg

SEQ ID NO: 396630 - RNA, 32 nt, Human
cucccaggcugcaacauccaccucccagguuc

SEQ ID NO: 396631 - RNA, 32 nt, Human
cucccaggcugcagacucugaccuguggcauc

SEQ ID NO: 396632 - RNA, 25 nt, Human
cucccaggcugcuggagugcagugg

SEQ ID NO: 396633 - RNA, 22 nt, Human
cucccaggcuggaaugcagugg

SEQ ID NO: 396634 - RNA, 22 nt, Human
cucccaggcuggaguacagugg

SEQ ID NO: 396635 - RNA, 22 nt, Human
cucccaggcuggagugcaaugg

SEQ ID NO: 396636 - RNA, 21 nt, Human
cucccaggcuggagugcagug

SEQ ID NO: 396637 - RNA, 22 nt, Human
cucccaggcuggagugcagugg

SEQ ID NO: 396638 - RNA, 32 nt, Human
cucccaggcuggaguugcaguggugcaaugac

SEQ ID NO: 396639 - RNA, 21 nt, Human
cucccaggcuggauggcaugg

SEQ ID NO: 396640 - RNA, 20 nt, Human
cucccaggcuggggcagugg

SEQ ID NO: 396641 - RNA, 32 nt, Human
cucccaggcugucccccuccucccagggccuc

SEQ ID NO: 396642 - RNA, 32 nt, Human
cucccaggcugucuucuccucaucacagggac

SEQ ID NO: 396643 - RNA, 32 nt, Human
cucccagggagcaugagaggaggcagcaggac

SEQ ID NO: 396644 - RNA, 32 nt, Human
cucccagggaggcgcuugucacccucauucua

SEQ ID NO: 396645 - RNA, 20 nt, Human
cucccagggagguucacuuc

SEQ ID NO: 396646 - RNA, 32 nt, Human
cucccagggccagacagcccuuccuggcuccc

SEQ ID NO: 396647 - RNA, 32 nt, Human
cucccagggcccuggcgucugggucaagcagc

SEQ ID NO: 396648 - RNA, 20 nt, Human
cucccagggccgccgcuccg

SEQ ID NO: 396649 - RNA, 32 nt, Human
cucccagggccugucucaagcucuuccuuacu

SEQ ID NO: 396650 - RNA, 23 nt, Human
cucccagggcuccuugccuuagg

SEQ ID NO: 396651 - RNA, 18 nt, Human
cucccagggcuuugcagc

SEQ ID NO: 396652 - RNA, 32 nt, Human
cucccaggggccuuugcagcgucuuuuuaacc

SEQ ID NO: 396653 - RNA, 32 nt, Human
cucccaggggucccucccucccuccuucccaa

SEQ ID NO: 396654 - RNA, 32 nt, Human
cucccaggggugccaggagccacugggacagg

SEQ ID NO: 396655 - RNA, 19 nt, Human
cucccagggucccagggag

SEQ ID NO: 396656 - RNA, 32 nt, Human
cucccagggugaggauaggucuccagaccaag

SEQ ID NO: 396657 - RNA, 32 nt, Human
cucccagggugcugggacugcaggcaugaguc

SEQ ID NO: 396658 - RNA, 24 nt, Human
cucccagggugcugggauuacagg

SEQ ID NO: 396659 - RNA, 32 nt, Human
cucccagggugcugggauuacaggugugagcc

SEQ ID NO: 396660 - RNA, 32 nt, Human
cucccagguaaggcggaggcugcuggugugag

SEQ ID NO: 396661 - RNA, 24 nt, Human
cucccagguagcugggauuacagg

SEQ ID NO: 396662 - RNA, 32 nt, Human
cucccagguagcugggauuacaggcaugcaac

SEQ ID NO: 396663 - RNA, 32 nt, Human
cucccagguagcugggauuacaggcaugugcc

SEQ ID NO: 396664 - RNA, 32 nt, Human
cucccaggucaagugauucuccugccucagcc

SEQ ID NO: 396665 - RNA, 20 nt, Human
cucccaggugagggcagugg

SEQ ID NO: 396666 - RNA, 23 nt, Human
cucccaggugcugggauuauagg

SEQ ID NO: 396667 - RNA, 32 nt, Human
cucccagguggcugggauuacaggcaugcacc

SEQ ID NO: 396668 - RNA, 32 nt, Human
cucccagguucaagcauucuucugccucagcc

SEQ ID NO: 396669 - RNA, 24 nt, Human
cucccagguugcugggguuacagg

SEQ ID NO: 396670 - RNA, 22 nt, Human
cucccagguuggagugcagugg

SEQ ID NO: 396671 - RNA, 32 nt, Human
cucccaguaaagcuuuucuucucccgacugcu

SEQ ID NO: 396672 - RNA, 32 nt, Human
cucccaguacuuccuggacucuaccucggaaa

SEQ ID NO: 396673 - RNA, 23 nt, Human
cucccaguagcugggauuagagg

SEQ ID NO: 396674 - RNA, 22 nt, Human
cucccaguauugggauuacagg

SEQ ID NO: 396675 - RNA, 32 nt, Human
cucccaguccacauggaaaacaucagggagug

SEQ ID NO: 396676 - RNA, 32 nt, Human
cucccaguccauucauuucuucauucauuugu

SEQ ID NO: 396677 - RNA, 32 nt, Human
cucccaguccuacccuuuacucagggaguaau

SEQ ID NO: 396678 - RNA, 32 nt, Human
cucccagucucucgcucugccugccugcucag

SEQ ID NO: 396679 - RNA, 20 nt, Human
cucccagucugccaguucua

SEQ ID NO: 396680 - RNA, 32 nt, Human
cucccagucuuguccuuacccauuccaagugc

SEQ ID NO: 396681 - RNA, 32 nt, Human
cucccagugacgcccgagaucuuucuccagau

SEQ ID NO: 396682 - RNA, 32 nt, Human
cucccagugagcugguguccccgugugucuuu

SEQ ID NO: 396683 - RNA, 32 nt, Human
cucccagugcagcugccaccccagcccaaaug

SEQ ID NO: 396684 - RNA, 32 nt, Human
cucccagugcugcugcugaccuucacugacag

SEQ ID NO: 396685 - RNA, 32 nt, Human
cucccagugcugcuguccucugauccacccuc

SEQ ID NO: 396686 - RNA, 22 nt, Human
cucccagugcugggauuauagg

SEQ ID NO: 396687 - RNA, 32 nt, Human
cucccaguggagcucugcaggccaggccauau

SEQ ID NO: 396688 - RNA, 24 nt, Human
cucccagugggcugggauuauagg

SEQ ID NO: 396689 - RNA, 24 nt, Human
cucccagugugcugggauuacagg

SEQ ID NO: 396690 - RNA, 32 nt, Human
cucccagugugcugggauuacaggcaugagcu

SEQ ID NO: 396691 - RNA, 32 nt, Human
cucccaguuagaauaacuaauauagagaagug

SEQ ID NO: 396692 - RNA, 32 nt, Human
cucccaguucaagugauuccccugccucagcc

SEQ ID NO: 396693 - RNA, 32 nt, Human
cucccaguucauuccuggaaccagccaggcca

SEQ ID NO: 396694 - RNA, 32 nt, Human
cucccauaaagaggaggaaaaggaagauacag

SEQ ID NO: 396695 - RNA, 32 nt, Human
cucccauaaugcugggauuacaggcgugagca

SEQ ID NO: 396696 - RNA, 24 nt, Human
cucccauagugcugggauuacagg

SEQ ID NO: 396697 - RNA, 32 nt, Human
cucccauagugcugggauuacaggcaugagcc

SEQ ID NO: 396698 - RNA, 32 nt, Human
cucccauagugcugggauuacaggugugagcc

SEQ ID NO: 396699 - RNA, 32 nt, Human
cucccaucaacgagucuuggcccaggggacac

SEQ ID NO: 396700 - RNA, 32 nt, Human
cucccaucacacccuucagcccauccaugcgg

SEQ ID NO: 396701 - RNA, 32 nt, Human
cucccaucaccaccucuaggacucgggggcuc

SEQ ID NO: 396702 - RNA, 32 nt, Human
cucccaucaccucaacuccagccagggaggaa

SEQ ID NO: 396703 - RNA, 24 nt, Human
cucccauccaacaucacccagugg

SEQ ID NO: 396704 - RNA, 32 nt, Human
cucccauccaaguacuaaccaggcccgacccu

SEQ ID NO: 396705 - RNA, 32 nt, Human
cucccaucccacccuugccccgccucccugcc

SEQ ID NO: 396706 - RNA, 32 nt, Human
cucccaucccccaggcugguaccaguucugua

SEQ ID NO: 396707 - RNA, 21 nt, Human
cucccauccccgccgccggcc

SEQ ID NO: 396708 - RNA, 32 nt, Human
cucccauccccucccuccuucacuccugccuc

SEQ ID NO: 396709 - RNA, 32 nt, Human
cucccaucccucagauccccacauuguuccuc

SEQ ID NO: 396710 - RNA, 19 nt, Human
cucccaucucagccucuga

SEQ ID NO: 396711 - RNA, 32 nt, Human
cucccaucucugcccaugagccacagggaaca

SEQ ID NO: 396712 - RNA, 32 nt, Human
cucccaucugcugcccauggaugcucuggcug

SEQ ID NO: 396713 - RNA, 23 nt, Human
cucccaucuucaccucgggccug

SEQ ID NO: 396714 - RNA, 25 nt, Human
cucccaugacacccagaaggggcag

SEQ ID NO: 396715 - RNA, 32 nt, Human
cucccaugaccauacugagggaccaacugggc

SEQ ID NO: 396716 - RNA, 32 nt, Human
cucccaugacugcccagcucugaggcccgauc

SEQ ID NO: 396717 - RNA, 32 nt, Human
cucccaugaugcagugugauaaggauuggccu

SEQ ID NO: 396718 - RNA, 32 nt, Human
cucccaugcccacagucacccauuccagacuc

SEQ ID NO: 396719 - RNA, 32 nt, Human
cucccaugcccguucugaccucagccuuggaa

SEQ ID NO: 396720 - RNA, 23 nt, Human
cucccaugccuuccugccugcca

SEQ ID NO: 396721 - RNA, 32 nt, Human
cucccaugcuccuuggcuucugaaggcugaag

SEQ ID NO: 396722 - RNA, 32 nt, Human
cucccauggcccgaggacccacugugagcacu

SEQ ID NO: 396723 - RNA, 23 nt, Human
cucccauguagcugggauuacag

SEQ ID NO: 396724 - RNA, 32 nt, Human
cucccauguccucagacccagcaaaagcguag

SEQ ID NO: 396725 - RNA, 18 nt, Human
cucccauucacgcccgcc

SEQ ID NO: 396726 - RNA, 19 nt, Human
cucccauucaugcccacca

SEQ ID NO: 396727 - RNA, 24 nt, Human
cucccauuccaaccuuagaaugga

SEQ ID NO: 396728 - RNA, 32 nt, Human
cucccauucuggcuccaccugcagccucccug

SEQ ID NO: 396729 - RNA, 32 nt, Human
cucccauucugugguugugguggugguaagaa

SEQ ID NO: 396730 - RNA, 31 nt, Human
cucccauuggccucuccuugccaaaucuaaa

SEQ ID NO: 396731 - RNA, 32 nt, Human
cucccauuuaaguuaugcuucugaccuuguau

SEQ ID NO: 396732 - RNA, 32 nt, Human
cucccauuucaggacauuugcacugacuguuu

SEQ ID NO: 396733 - RNA, 18 nt, Human
cucccauuucgccggcca

SEQ ID NO: 396734 - RNA, 32 nt, Human
cucccauuuucucugcuggcguuucugcugug

SEQ ID NO: 396735 - RNA, 19 nt, Human
cuccccaaaagugaccaca

SEQ ID NO: 396736 - RNA, 32 nt, Human
cuccccaaacacaccaagaagcauuuuuaacg

SEQ ID NO: 396737 - RNA, 32 nt, Human
cuccccaaacacccacagccacugacccaucc

SEQ ID NO: 396738 - RNA, 25 nt, Human
cuccccaaagugcugggaugacagg

SEQ ID NO: 396739 - RNA, 32 nt, Human
cuccccaaagugcugggaugacaggcaugagc

SEQ ID NO: 396740 - RNA, 25 nt, Human
cuccccaaagugcugggauuacagg

SEQ ID NO: 396741 - RNA, 32 nt, Human
cuccccaaagugcugggauuacaggcaugagc

SEQ ID NO: 396742 - RNA, 32 nt, Human
cuccccaaagugcugggauuacaggcgugagc

SEQ ID NO: 396743 - RNA, 32 nt, Human
cuccccaaagugcugggauuacagguacaaug

SEQ ID NO: 396744 - RNA, 25 nt, Human
cuccccaaagugcugggauugcagg

SEQ ID NO: 396745 - RNA, 32 nt, Human
cuccccaaagugcugggauugcaggcgugagc

SEQ ID NO: 396746 - RNA, 32 nt, Human
cuccccaaccagcccagcuucuccuuaccugc

SEQ ID NO: 396747 - RNA, 32 nt, Human
cuccccaacccuucaggaacccuuuaguuuau

SEQ ID NO: 396748 - RNA, 32 nt, Human
cuccccaaccggcuugccccggucccccuggg

SEQ ID NO: 396749 - RNA, 32 nt, Human
cuccccaacucauucuaugaggccaacaucau

SEQ ID NO: 396750 - RNA, 21 nt, Human
cuccccaacuccagcagccuu

SEQ ID NO: 396751 - RNA, 21 nt, Human
cuccccaagaaaaagggccuu

SEQ ID NO: 396752 - RNA, 20 nt, Human
cuccccaagaggccaaccca

SEQ ID NO: 396753 - RNA, 32 nt, Human
cuccccaagcccuucccagucacugcauggcc

SEQ ID NO: 396754 - RNA, 22 nt, Human
cuccccaagccuguguugcagg

SEQ ID NO: 396755 - RNA, 32 nt, Human
cuccccaagcuggcagaggggccguggcagga

SEQ ID NO: 396756 - RNA, 20 nt, Human
cuccccaaggacaagcuccu

SEQ ID NO: 396757 - RNA, 32 nt, Human
cuccccaaggagaucggucaccaggagagcag

SEQ ID NO: 396758 - RNA, 19 nt, Human
cuccccaaggaugaccaca

SEQ ID NO: 396759 - RNA, 19 nt, Human
cuccccaaggcaggccaua

SEQ ID NO: 396760 - RNA, 20 nt, Human
cuccccaaggcuggcaaccu

SEQ ID NO: 396761 - RNA, 24 nt, Human
cuccccaagggugaguucagcacc

SEQ ID NO: 396762 - RNA, 32 nt, Human
cuccccaaguagcugggacuagaggcaugcgc

SEQ ID NO: 396763 - RNA, 24 nt, Human
cuccccaagugcuggaauuacagg

SEQ ID NO: 396764 - RNA, 32 nt, Human
cuccccaagugcuggaauuacaggcgugagcu

SEQ ID NO: 396765 - RNA, 32 nt, Human
cuccccaagugcugggauuacaggcgugagcc

SEQ ID NO: 396766 - RNA, 24 nt, Human
cuccccaagugcugggauuauagg

SEQ ID NO: 396767 - RNA, 32 nt, Human
cuccccaagugcugggauuauaggcaugagcc

SEQ ID NO: 396768 - RNA, 24 nt, Human
cuccccaaguguugggauuacagg

SEQ ID NO: 396769 - RNA, 32 nt, Human
cuccccaaguguugggauuacaggcgugagcc

SEQ ID NO: 396770 - RNA, 32 nt, Human
cuccccaauaccuaauaaggcaugcgaaaugu

SEQ ID NO: 396771 - RNA, 19 nt, Human
cuccccaauuccagcccuu

SEQ ID NO: 396772 - RNA, 25 nt, Human
cuccccacaccuacccacccagugg

SEQ ID NO: 396773 - RNA, 32 nt, Human
cuccccacagccacccucccucuucagagagc

SEQ ID NO: 396774 - RNA, 19 nt, Human
cuccccacagccagucccc

SEQ ID NO: 396775 - RNA, 19 nt, Human
cuccccacagccuuccuca

SEQ ID NO: 396776 - RNA, 20 nt, Human
cuccccacagcgucccuggc

SEQ ID NO: 396777 - RNA, 21 nt, Human
cuccccacaggagcccugcag

SEQ ID NO: 396778 - RNA, 32 nt, Human
cuccccacaggcaccccucaugcucugauugu

SEQ ID NO: 396779 - RNA, 25 nt, Human
cuccccacagugcugggauuacagg

SEQ ID NO: 396780 - RNA, 22 nt, Human
cuccccaccaaauaaucucaua

SEQ ID NO: 396781 - RNA, 32 nt, Human
cuccccaccaagcccucuaucuccuucuaauc

SEQ ID NO: 396782 - RNA, 32 nt, Human
cuccccaccacagccccagcugccucagagca

SEQ ID NO: 396783 - RNA, 18 nt, Human
cuccccaccacccccgca

SEQ ID NO: 396784 - RNA, 32 nt, Human
cuccccaccacccuccgccaucagccugccug

SEQ ID NO: 396785 - RNA, 32 nt, Human
cuccccaccaccugugccccagagagcagggc

SEQ ID NO: 396786 - RNA, 32 nt, Human
cuccccaccacgucugugcccugcacuguccc

SEQ ID NO: 396787 - RNA, 32 nt, Human
cuccccacccaggagggagguggcacuucuua

SEQ ID NO: 396788 - RNA, 24 nt, Human
cuccccaccccaagccacagggac

SEQ ID NO: 396789 - RNA, 24 nt, Human
cuccccaccccaccccaccccagg

SEQ ID NO: 396790 - RNA, 24 nt, Human
cuccccaccccaccgcaccccagg

SEQ ID NO: 396791 - RNA, 32 nt, Human
cuccccacccccaguucugggcugggauccug

SEQ ID NO: 396792 - RNA, 22 nt, Human
cuccccaccccccagcccuagg

SEQ ID NO: 396793 - RNA, 32 nt, Human
cuccccacccccuccugcuccuggggccggcc

SEQ ID NO: 396794 - RNA, 32 nt, Human
cuccccacccccuggcaaaaggcuggccaugc

SEQ ID NO: 396795 - RNA, 27 nt, Human
cuccccaccccugagccaggaccccag

SEQ ID NO: 396796 - RNA, 21 nt, Human
cuccccacccgucccugggcu

SEQ ID NO: 396797 - RNA, 28 nt, Human
cuccccacccuaccugccccccuggcuu

SEQ ID NO: 396798 - RNA, 19 nt, Human
cuccccacccuggaacccc

SEQ ID NO: 396799 - RNA, 22 nt, Human
cuccccacccuggaaccccuga

SEQ ID NO: 396800 - RNA, 20 nt, Human
cuccccaccgagaacuccag

SEQ ID NO: 396801 - RNA, 32 nt, Human
cuccccaccuccacuccacauuucuuucauuu

SEQ ID NO: 396802 - RNA, 32 nt, Human
cuccccaccuccaguucugccugccggaccuc

SEQ ID NO: 396803 - RNA, 32 nt, Human
cuccccaccucccacgccccagccccucccuc

SEQ ID NO: 396804 - RNA, 32 nt, Human
cuccccaccucccuggccaggauggggauggg

SEQ ID NO: 396805 - RNA, 32 nt, Human
cuccccaccucugcaggacagacaugggaggg

SEQ ID NO: 396806 - RNA, 32 nt, Human
cuccccaccugcacuccauccagcuacaggag

SEQ ID NO: 396807 - RNA, 32 nt, Human
cuccccaccugcuaccccaucugcuugggccc

SEQ ID NO: 396808 - RNA, 24 nt, Human
cuccccaccuucaauuccugggcc

SEQ ID NO: 396809 - RNA, 19 nt, Human
cuccccacgcuggcugcug

SEQ ID NO: 396810 - RNA, 32 nt, Human
cuccccacgguucacaggucucggucuucgga

SEQ ID NO: 396811 - RNA, 32 nt, Human
cuccccacgugccaccaccgggccaccgcggc

SEQ ID NO: 396812 - RNA, 21 nt, Human
cuccccacucaucccuggucu

SEQ ID NO: 396813 - RNA, 32 nt, Human
cuccccacuccccacucucagccugggagacu

SEQ ID NO: 396814 - RNA, 24 nt, Human
cuccccacuccgcugcccuggccu

SEQ ID NO: 396815 - RNA, 21 nt, Human
cuccccacuccucucccacag

SEQ ID NO: 396816 - RNA, 32 nt, Human
cuccccacucucucuuucuccugcuuuggcca

SEQ ID NO: 396817 - RNA, 32 nt, Human
cuccccacugaauguuucauaaggaagcacug

SEQ ID NO: 396818 - RNA, 32 nt, Human
cuccccacugcccuuuuugagccacuuccgag

SEQ ID NO: 396819 - RNA, 19 nt, Human
cuccccacugccgcugcug

SEQ ID NO: 396820 - RNA, 15 nt, Human
cuccccacugccugc

SEQ ID NO: 396821 - RNA, 32 nt, Human
cuccccacugcggcuaggacuccagggagccu

SEQ ID NO: 396822 - RNA, 32 nt, Human
cuccccacuuccgacuggcucccuucgggggc

SEQ ID NO: 396823 - RNA, 32 nt, Human
cuccccacuuccuccugacaacccaggcacag

SEQ ID NO: 396824 - RNA, 32 nt, Human
cuccccacuuccuccugcaccaccacggggaa

SEQ ID NO: 396825 - RNA, 32 nt, Human
cuccccacuucucuggaaccucaggacccgcc

SEQ ID NO: 396826 - RNA, 32 nt, Human
cuccccagacacaacucccuuccccaugcaca

SEQ ID NO: 396827 - RNA, 32 nt, Human
cuccccagacacacccacugcacgcugcagca

SEQ ID NO: 396828 - RNA, 22 nt, Human
cuccccagacagcacuucaggc

SEQ ID NO: 396829 - RNA, 32 nt, Human
cuccccagaccaccccggcagccugagcagcu

SEQ ID NO: 396830 - RNA, 19 nt, Human
cuccccagaccagcagccu

SEQ ID NO: 396831 - RNA, 18 nt, Human
cuccccagagcccugcag

SEQ ID NO: 396832 - RNA, 23 nt, Human
cuccccagagccuccuccugccc

SEQ ID NO: 396833 - RNA, 32 nt, Human
cuccccagagggcacagggcucugcugugccu

SEQ ID NO: 396834 - RNA, 32 nt, Human
cuccccagaguugcuguucccaccucuggcug

SEQ ID NO: 396835 - RNA, 22 nt, Human
cuccccagaucucuccaaguga

SEQ ID NO: 396836 - RNA, 32 nt, Human
cuccccagcagcugggacuacaggcacacauc

SEQ ID NO: 396837 - RNA, 32 nt, Human
cuccccagcagcugggacuacaggcacccacc

SEQ ID NO: 396838 - RNA, 32 nt, Human
cuccccagcagcugggacuacaggugcacgcc

SEQ ID NO: 396839 - RNA, 32 nt, Human
cuccccagcaggcauccacuaccccagggccc

SEQ ID NO: 396840 - RNA, 32 nt, Human
cuccccagccaugcuuccuguacagccugcaa

SEQ ID NO: 396841 - RNA, 32 nt, Human
cuccccagccaugggccacccuugccagugac

SEQ ID NO: 396842 - RNA, 17 nt, Human
cuccccagccccacggg

SEQ ID NO: 396843 - RNA, 32 nt, Human
cuccccagccucccucuccaccucccugcccc

SEQ ID NO: 396844 - RNA, 32 nt, Human
cuccccagccucuaccugucaggaugacucca

SEQ ID NO: 396845 - RNA, 32 nt, Human
cuccccagccuggcacaggccgaggcaggagg

SEQ ID NO: 396846 - RNA, 32 nt, Human
cuccccagccuuccaccuccuguucuuccuac

SEQ ID NO: 396847 - RNA, 32 nt, Human
cuccccagccuucucauuuccgccucuccaga

SEQ ID NO: 396848 - RNA, 32 nt, Human
cuccccagccuucuucagccuucuucagccuu

SEQ ID NO: 396849 - RNA, 32 nt, Human
cuccccagccuucuucagccuucuucagcuca

SEQ ID NO: 396850 - RNA, 32 nt, Human
cuccccagccuucuuucucucccagaagccuc

SEQ ID NO: 396851 - RNA, 32 nt, Human
cuccccagcgcagccugagcccccaggccccu

SEQ ID NO: 396852 - RNA, 32 nt, Human
cuccccagcuacucgggaggcugaggcaggag

SEQ ID NO: 396853 - RNA, 32 nt, Human
cuccccagcucagugccuuucugcaccccuuc

SEQ ID NO: 396854 - RNA, 32 nt, Human
cuccccagcucugucaugcaggccuguccucc

SEQ ID NO: 396855 - RNA, 18 nt, Human
cuccccagcugcgcugcc

SEQ ID NO: 396856 - RNA, 32 nt, Human
cuccccagcugggaucugcucccaggcaacug

SEQ ID NO: 396857 - RNA, 32 nt, Human
cuccccaggaccugagcaggaaccuggaguuu

SEQ ID NO: 396858 - RNA, 32 nt, Human
cuccccaggagaaaaagacccccaagcagaaa

SEQ ID NO: 396859 - RNA, 32 nt, Human
cuccccaggagccaggucugcccacgccuuga

SEQ ID NO: 396860 - RNA, 23 nt, Human
cuccccaggccccgccgcugccg

SEQ ID NO: 396861 - RNA, 32 nt, Human
cuccccaggcucaugugccaccaccuucccuc

SEQ ID NO: 396862 - RNA, 32 nt, Human
cuccccaggcugcuuacagcucauucugcugg

SEQ ID NO: 396863 - RNA, 32 nt, Human
cuccccaggggugaaauguaggaugaaucaca

SEQ ID NO: 396864 - RNA, 32 nt, Human
cuccccaggguggcaggagcugaggaagggcc

SEQ ID NO: 396865 - RNA, 32 nt, Human
cuccccaggucccacauuguuacaagaucuuu

SEQ ID NO: 396866 - RNA, 32 nt, Human
cuccccagguucugaaaaacaccugcauuugu

SEQ ID NO: 396867 - RNA, 24 nt, Human
cuccccaguaccugggauuacagg

SEQ ID NO: 396868 - RNA, 24 nt, Human
cuccccaguagcugagauugcagg

SEQ ID NO: 396869 - RNA, 32 nt, Human
cuccccaguagcugggacuacaagcacaugcc

SEQ ID NO: 396870 - RNA, 23 nt, Human
cuccccaguagcugggauuacag

SEQ ID NO: 396871 - RNA, 24 nt, Human
cuccccaguagcugggauuacagg

SEQ ID NO: 396872 - RNA, 32 nt, Human
cuccccaguagcugggauuacaggcgugggcc

SEQ ID NO: 396873 - RNA, 32 nt, Human
cuccccagugcaaaugcaugcuucuucucaaa

SEQ ID NO: 396874 - RNA, 32 nt, Human
cuccccagugccugccacucucugggacucuc

SEQ ID NO: 396875 - RNA, 32 nt, Human
cuccccagugggcuccuaagggggcaggcgug

SEQ ID NO: 396876 - RNA, 32 nt, Human
cuccccaguucugguccuggccaggccaugcu

SEQ ID NO: 396877 - RNA, 32 nt, Human
cuccccauacccuucagugcaguguaccaggg

SEQ ID NO: 396878 - RNA, 32 nt, Human
cuccccauccacccuucccucccugucuucac

SEQ ID NO: 396879 - RNA, 32 nt, Human
cuccccauccacccuuuacaugauguagggac

SEQ ID NO: 396880 - RNA, 32 nt, Human
cuccccaucccccuuccugcugugccaacuca

SEQ ID NO: 396881 - RNA, 32 nt, Human
cuccccaucucccugaagcuuccaggguagca

SEQ ID NO: 396882 - RNA, 32 nt, Human
cuccccaucugugcuccugccugccggccauc

SEQ ID NO: 396883 - RNA, 32 nt, Human
cuccccaucuuccugcuauaaaugugggugug

SEQ ID NO: 396884 - RNA, 32 nt, Human
cuccccaucuucuccuuacugcaucucagccc

SEQ ID NO: 396885 - RNA, 24 nt, Human
cuccccaugcaaggggcucauccu

SEQ ID NO: 396886 - RNA, 32 nt, Human
cuccccaugcaggacgggccaggcugggagug

SEQ ID NO: 396887 - RNA, 32 nt, Human
cuccccaugccacuggucggcacuuugccacu

SEQ ID NO: 396888 - RNA, 32 nt, Human
cuccccaugccuccugcccugcagcccgccgc

SEQ ID NO: 396889 - RNA, 32 nt, Human
cuccccaugcugcagugcacagguggguugca

SEQ ID NO: 396890 - RNA, 32 nt, Human
cuccccaugggcaccaucucugccauucuuuc

SEQ ID NO: 396891 - RNA, 32 nt, Human
cuccccauggggcagaguggucuccuuacgug

SEQ ID NO: 396892 - RNA, 32 nt, Human
cuccccaugguggcagaggucaauuccacagu

SEQ ID NO: 396893 - RNA, 32 nt, Human
cuccccaugguguuguaaaauggccuaaaagu

SEQ ID NO: 396894 - RNA, 32 nt, Human
cuccccauguccucuggaacagcugggcaugg

SEQ ID NO: 396895 - RNA, 25 nt, Human
cuccccauguccuggugcgcacagc

SEQ ID NO: 396896 - RNA, 24 nt, Human
cuccccaugugcugggauuacagg

SEQ ID NO: 396897 - RNA, 32 nt, Human
cuccccaugugcugggauuacaggcgugagcc

SEQ ID NO: 396898 - RNA, 32 nt, Human
cuccccauguucugcucacuccugucuccagg

SEQ ID NO: 396899 - RNA, 32 nt, Human
cuccccauguuucuccccacuagaagccuccg

SEQ ID NO: 396900 - RNA, 20 nt, Human
cuccccauuccaaaggggca

SEQ ID NO: 396901 - RNA, 32 nt, Human
cuccccauucuuuuccaugcaggaggauuggc

SEQ ID NO: 396902 - RNA, 32 nt, Human
cuccccauugagugugucaugguacaaaucac

SEQ ID NO: 396903 - RNA, 26 nt, Human
cuccccauugcuggaggcucuuccca

SEQ ID NO: 396904 - RNA, 32 nt, Human
cuccccauuggcaaaccggacccggccgccgc

SEQ ID NO: 396905 - RNA, 32 nt, Human
cucccccaaaaccagagccaccugccagccuc

SEQ ID NO: 396906 - RNA, 32 nt, Human
cucccccaacagcagggaugggucagguggca

SEQ ID NO: 396907 - RNA, 32 nt, Human
cucccccaagcccaacccaggcggacaaaagg

SEQ ID NO: 396908 - RNA, 20 nt, Human
cucccccaagcuggaggcgg

SEQ ID NO: 396909 - RNA, 32 nt, Human
cucccccaaugcccugccuuccacucccaccu

SEQ ID NO: 396910 - RNA, 32 nt, Human
cucccccacaaaauucaagggaaaguaaaggg

SEQ ID NO: 396911 - RNA, 21 nt, Human
cucccccacaagagggcagug

SEQ ID NO: 396912 - RNA, 32 nt, Human
cucccccacccaggacggcugugaugaggugg

SEQ ID NO: 396913 - RNA, 32 nt, Human
cucccccaccugccaaauaaccuguucaaaac

SEQ ID NO: 396914 - RNA, 19 nt, Human
cucccccagacugcucguc

SEQ ID NO: 396915 - RNA, 20 nt, Human
cucccccagacuggacaggg

SEQ ID NO: 396916 - RNA, 23 nt, Human
cucccccagagagcucgaagugg

SEQ ID NO: 396917 - RNA, 32 nt, Human
cucccccagagaucuggcuggagcccagaaaa

SEQ ID NO: 396918 - RNA, 18 nt, Human
cucccccagaggcugcag

SEQ ID NO: 396919 - RNA, 20 nt, Human
cucccccagaggcuguucag

SEQ ID NO: 396920 - RNA, 32 nt, Human
cucccccagaguacuccccacugugaaaagag

SEQ ID NO: 396921 - RNA, 32 nt, Human
cucccccagcagaauggaggcaggggacaagg

SEQ ID NO: 396922 - RNA, 32 nt, Human
cucccccagcccgagcgugccucugcccucug

SEQ ID NO: 396923 - RNA, 18 nt, Human
cucccccagccucaguca

SEQ ID NO: 396924 - RNA, 24 nt, Human
cucccccagcugccuggaggggca

SEQ ID NO: 396925 - RNA, 32 nt, Human
cucccccaggagaucaggauuccacugacguc

SEQ ID NO: 396926 - RNA, 25 nt, Human
cucccccaggagccuccaggaugga

SEQ ID NO: 396927 - RNA, 22 nt, Human
cucccccaggcauggcacaggg

SEQ ID NO: 396928 - RNA, 22 nt, Human
cucccccaggcccugccauugg

SEQ ID NO: 396929 - RNA, 32 nt, Human
cucccccaggguggaagccguggggucccuca

SEQ ID NO: 396930 - RNA, 32 nt, Human
cucccccaguagcugggacuacaggcgcgugc

SEQ ID NO: 396931 - RNA, 24 nt, Human
cucccccauagcacccugcccuca

SEQ ID NO: 396932 - RNA, 22 nt, Human
cucccccauagcucugcugcgu

SEQ ID NO: 396933 - RNA, 32 nt, Human
cucccccaucaaugcuccaucuugucggucug

SEQ ID NO: 396934 - RNA, 32 nt, Human
cucccccauccaccauccacaaaucaguaaag

SEQ ID NO: 396935 - RNA, 32 nt, Human
cucccccauggaggaggaggagggggcggugg

SEQ ID NO: 396936 - RNA, 21 nt, Human
cuccccccaacgcaaggagga

SEQ ID NO: 396937 - RNA, 23 nt, Human
cuccccccaagcccucccuccua

SEQ ID NO: 396938 - RNA, 20 nt, Human
cuccccccacccuguguguu

SEQ ID NO: 396939 - RNA, 23 nt, Human
cuccccccaggucuaccccuccc

SEQ ID NO: 396940 - RNA, 21 nt, Human
cuccccccggccucccuccca

SEQ ID NO: 396941 - RNA, 32 nt, Human
cucccccgaaaccaguagcuuucugaguccug

SEQ ID NO: 396942 - RNA, 22 nt, Human
cucccccgaacgccgcccgccg

SEQ ID NO: 396943 - RNA, 32 nt, Human
cucccccgaaugcauuuggaaccaaagucuaa

SEQ ID NO: 396944 - RNA, 32 nt, Human
cucccccgagaccacccccacccuggggaagc

SEQ ID NO: 396945 - RNA, 32 nt, Human
cucccccgaucccagcuuucucuccuuugaaa

SEQ ID NO: 396946 - RNA, 32 nt, Human
cucccccgccacgcccagcccaagagggcugc

SEQ ID NO: 396947 - RNA, 18 nt, Human
cucccccgccccaucccc

SEQ ID NO: 396948 - RNA, 21 nt, Human
cucccccgcccgccgccgccg

SEQ ID NO: 396949 - RNA, 32 nt, Human
cucccccgcggccggagccagggaaccgagcc

SEQ ID NO: 396950 - RNA, 21 nt, Human
cucccccggcugccgccgucg

SEQ ID NO: 396951 - RNA, 21 nt, Human
cucccccgggccgccgccgcc

SEQ ID NO: 396952 - RNA, 22 nt, Human
cucccccgggccgccgccgccg

SEQ ID NO: 396953 - RNA, 24 nt, Human
cucccccguaucugccgccuguca

SEQ ID NO: 396954 - RNA, 30 nt, Human
cucccccuaguucuuccgcuccugugagga

SEQ ID NO: 396955 - RNA, 32 nt, Human
cucccccuccacccccucccccaccccggagg

SEQ ID NO: 396956 - RNA, 32 nt, Human
cucccccuccagccuuugccugggaacugguc

SEQ ID NO: 396957 - RNA, 32 nt, Human
cucccccuccaggccaucucauuggcugcuug

SEQ ID NO: 396958 - RNA, 23 nt, Human
cucccccuccugggugcaacugu

SEQ ID NO: 396959 - RNA, 32 nt, Human
cucccccuccuugugccuucuuuguauauagg

SEQ ID NO: 396960 - RNA, 32 nt, Human
cucccccugcaacuuccgcugaggggucucgg

SEQ ID NO: 396961 - RNA, 32 nt, Human
cucccccugcagccuccuguacccgccucaug

SEQ ID NO: 396962 - RNA, 32 nt, Human
cucccccugccuggcccugagagcggcucugc

SEQ ID NO: 396963 - RNA, 32 nt, Human
cucccccugcuccccaccauucucccuuggca

SEQ ID NO: 396964 - RNA, 32 nt, Human
cucccccugcuccccuacuucucaguccccuu

SEQ ID NO: 396965 - RNA, 31 nt, Human
cucccccugcucucuggguauuugaaauguc

SEQ ID NO: 396966 - RNA, 32 nt, Human
cucccccuggagacccuggaagugguguguuc

SEQ ID NO: 396967 - RNA, 32 nt, Human
cucccccuguucuguuggggagggguagccau

SEQ ID NO: 396968 - RNA, 32 nt, Human
cucccccuucgacugcagccucgcuccgugcc

SEQ ID NO: 396969 - RNA, 32 nt, Human
cucccccuugggcuagcauccccagcccuuaa

SEQ ID NO: 396970 - RNA, 17 nt, Human
cucccccuuggguccag

SEQ ID NO: 396971 - RNA, 32 nt, Human
cuccccgaaagccaugaacugcagcgagagcc

SEQ ID NO: 396972 - RNA, 32 nt, Human
cuccccgaaaugcagauggucaagucaggagc

SEQ ID NO: 396973 - RNA, 32 nt, Human
cuccccgaagacacuccuuccccaaguaauug

SEQ ID NO: 396974 - RNA, 20 nt, Human
cuccccgaagucccgcugcc

SEQ ID NO: 396975 - RNA, 32 nt, Human
cuccccgaagugugauggaggaaaggccggaa

SEQ ID NO: 396976 - RNA, 32 nt, Human
cuccccgaagugugcuggaggaaaggccagaa

SEQ ID NO: 396977 - RNA, 32 nt, Human
cuccccgacccccacggcagagcccggcggcu

SEQ ID NO: 396978 - RNA, 32 nt, Human
cuccccgacccccagcccggacaccucauucc

SEQ ID NO: 396979 - RNA, 32 nt, Human
cuccccgaccugcagccccagacucugcucuc

SEQ ID NO: 396980 - RNA, 32 nt, Human
cuccccgagacccucacuaucuccugcagggu

SEQ ID NO: 396981 - RNA, 18 nt, Human
cuccccgagccgccgcug

SEQ ID NO: 396982 - RNA, 32 nt, Human
cuccccgagugccuggauuacaggcaugagcc

SEQ ID NO: 396983 - RNA, 23 nt, Human
cuccccgagugcugggauuaaag

SEQ ID NO: 396984 - RNA, 32 nt, Human
cuccccgagugcugggauuaaagacgugagcc

SEQ ID NO: 396985 - RNA, 32 nt, Human
cuccccgcaacccugagacuccaggcuccccu

SEQ ID NO: 396986 - RNA, 32 nt, Human
cuccccgcacacugaccuauaccucaggaugg

SEQ ID NO: 396987 - RNA, 25 nt, Human
cuccccgcaccgcccgcgcugcgcg

SEQ ID NO: 396988 - RNA, 19 nt, Human
cuccccgcacuccgcugcu

SEQ ID NO: 396989 - RNA, 20 nt, Human
cuccccgcagcccccuggcu

SEQ ID NO: 396990 - RNA, 32 nt, Human
cuccccgcaggugaucauccuccugcaggugu

SEQ ID NO: 396991 - RNA, 32 nt, Human
cuccccgccacgaucgucgcugugcuuggugu

SEQ ID NO: 396992 - RNA, 32 nt, Human
cuccccgccacucagaccuggguggugauaac

SEQ ID NO: 396993 - RNA, 19 nt, Human
cuccccgccagccccggcc

SEQ ID NO: 396994 - RNA, 21 nt, Human
cuccccgccagccccggcccc

SEQ ID NO: 396995 - RNA, 18 nt, Human
cuccccgccagcccgccc

SEQ ID NO: 396996 - RNA, 22 nt, Human
cuccccgccaguggagaucucc

SEQ ID NO: 396997 - RNA, 32 nt, Human
cuccccgccaugagcuccuacguagccaauuc

SEQ ID NO: 396998 - RNA, 19 nt, Human
cuccccgcccacccugguc

SEQ ID NO: 396999 - RNA, 19 nt, Human
cuccccgcccagcagcccc

SEQ ID NO: 397000 - RNA, 18 nt, Human
cuccccgcccagggaccc

SEQ ID NO: 397001 - RNA, 23 nt, Human
cuccccgcccagggaccccuccc

SEQ ID NO: 397002 - RNA, 26 nt, Human
cuccccgccccaacucacucuggccu

SEQ ID NO: 397003 - RNA, 22 nt, Human
cuccccgccccaccccacgccu

SEQ ID NO: 397004 - RNA, 20 nt, Human
cuccccgccccacccgcccc

SEQ ID NO: 397005 - RNA, 32 nt, Human
cuccccgcccccgcgggacacgcccagauucu

SEQ ID NO: 397006 - RNA, 22 nt, Human
cuccccgcccccucccgcggcc

SEQ ID NO: 397007 - RNA, 18 nt, Human
cuccccgccccgcaccgg

SEQ ID NO: 397008 - RNA, 21 nt, Human
cuccccgccccgcaccggccu

SEQ ID NO: 397009 - RNA, 18 nt, Human
cuccccgccccgcugccg

SEQ ID NO: 397010 - RNA, 24 nt, Human
cuccccgccccuguggcccuggcc

SEQ ID NO: 397011 - RNA, 22 nt, Human
cuccccgccccuucccugagcc

SEQ ID NO: 397012 - RNA, 19 nt, Human
cuccccgcccgccccgccg

SEQ ID NO: 397013 - RNA, 18 nt, Human
cuccccgcccgcgccgcc

SEQ ID NO: 397014 - RNA, 21 nt, Human
cuccccgcccggcccugcccu

SEQ ID NO: 397015 - RNA, 20 nt, Human
cuccccgcccgugucccgcc

SEQ ID NO: 397016 - RNA, 23 nt, Human
cuccccgcccucagcccuggccu

SEQ ID NO: 397017 - RNA, 21 nt, Human
cuccccgcccucgccgcgccg

SEQ ID NO: 397018 - RNA, 20 nt, Human
cuccccgcccucucccggcc

SEQ ID NO: 397019 - RNA, 23 nt, Human
cuccccgcccucucucacucccc

SEQ ID NO: 397020 - RNA, 19 nt, Human
cuccccgcccucugcugcc

SEQ ID NO: 397021 - RNA, 21 nt, Human
cuccccgcccucuucccggcc

SEQ ID NO: 397022 - RNA, 19 nt, Human
cuccccgcccugccuggcc

SEQ ID NO: 397023 - RNA, 18 nt, Human
cuccccgccgccgccccg

SEQ ID NO: 397024 - RNA, 19 nt, Human
cuccccgccgccgccgcgc

SEQ ID NO: 397025 - RNA, 18 nt, Human
cuccccgccgccgccucc

SEQ ID NO: 397026 - RNA, 17 nt, Human
cuccccgccgccgcugc

SEQ ID NO: 397027 - RNA, 32 nt, Human
cuccccgccgccgcuuccuccacccccagucc

SEQ ID NO: 397028 - RNA, 32 nt, Human
cuccccgccgccuguuuccucaccuucucucc

SEQ ID NO: 397029 - RNA, 20 nt, Human
cuccccgccgcgccccugcc

SEQ ID NO: 397030 - RNA, 20 nt, Human
cuccccgccuccucccggcc

SEQ ID NO: 397031 - RNA, 19 nt, Human
cuccccgccucgcgcugcu

SEQ ID NO: 397032 - RNA, 21 nt, Human
cuccccgccucucugcagccu

SEQ ID NO: 397033 - RNA, 19 nt, Human
cuccccgccugacccggcc

SEQ ID NO: 397034 - RNA, 19 nt, Human
cuccccgccuggccuggcc

SEQ ID NO: 397035 - RNA, 32 nt, Human
cuccccgccugggagcucagcuuuccucagaa

SEQ ID NO: 397036 - RNA, 24 nt, Human
cuccccgccugugucccccuggcu

SEQ ID NO: 397037 - RNA, 19 nt, Human
cuccccgcgccgccccgcc

SEQ ID NO: 397038 - RNA, 20 nt, Human
cuccccgcgccgccgagacc

SEQ ID NO: 397039 - RNA, 20 nt, Human
cuccccgcgccgccgccgcc

SEQ ID NO: 397040 - RNA, 21 nt, Human
cuccccgcgccgccuccucug

SEQ ID NO: 397041 - RNA, 20 nt, Human
cuccccgcgccgcgaggccg

SEQ ID NO: 397042 - RNA, 19 nt, Human
cuccccgcgccgcucgcgc

SEQ ID NO: 397043 - RNA, 23 nt, Human
cuccccgcgccucccggucgccg

SEQ ID NO: 397044 - RNA, 32 nt, Human
cuccccgcgcgagagcggccccugccaccggg

SEQ ID NO: 397045 - RNA, 21 nt, Human
cuccccgcgcgccccgccgcu

SEQ ID NO: 397046 - RNA, 20 nt, Human
cuccccgcgcggucccggcc

SEQ ID NO: 397047 - RNA, 32 nt, Human
cuccccgcucauagaagccuggucccucuguc

SEQ ID NO: 397048 - RNA, 22 nt, Human
cuccccgcuccccggcccggcc

SEQ ID NO: 397049 - RNA, 22 nt, Human
cuccccgcuccgucucuguccu

SEQ ID NO: 397050 - RNA, 32 nt, Human
cuccccgcuccuccuccccagccauggcguuc

SEQ ID NO: 397051 - RNA, 24 nt, Human
cuccccgcucguccuccccgggcc

SEQ ID NO: 397052 - RNA, 20 nt, Human
cuccccgcucugccgccgcc

SEQ ID NO: 397053 - RNA, 18 nt, Human
cuccccgcugagcugcug

SEQ ID NO: 397054 - RNA, 22 nt, Human
cuccccgcugccgccaccgccg

SEQ ID NO: 397055 - RNA, 32 nt, Human
cuccccgcugccgccuccuccugggcugggcc

SEQ ID NO: 397056 - RNA, 23 nt, Human
cuccccgcugccugcccugaccu

SEQ ID NO: 397057 - RNA, 22 nt, Human
cuccccgcugucucccccugcc

SEQ ID NO: 397058 - RNA, 32 nt, Human
cuccccgcugugguuggcagccacccacccca

SEQ ID NO: 397059 - RNA, 19 nt, Human
cuccccgcuuccacccucc

SEQ ID NO: 397060 - RNA, 21 nt, Human
cuccccgcuucugccugcacc

SEQ ID NO: 397061 - RNA, 32 nt, Human
cuccccgcuucugcuuggcuuuccggcuuaau

SEQ ID NO: 397062 - RNA, 21 nt, Human
cuccccggacuaagccucccu

SEQ ID NO: 397063 - RNA, 22 nt, Human
cuccccggcagccgccgccgcc

SEQ ID NO: 397064 - RNA, 32 nt, Human
cuccccggcaggccugagaaugagugggaauc

SEQ ID NO: 397065 - RNA, 32 nt, Human
cuccccggccacggcagcacagaacgggcccg

SEQ ID NO: 397066 - RNA, 32 nt, Human
cuccccggccaggcacguggcaccgucgccuu

SEQ ID NO: 397067 - RNA, 32 nt, Human
cuccccggccugacagacccagggagcugcag

SEQ ID NO: 397068 - RNA, 32 nt, Human
cuccccggccugcucagacuccuccacgcucg

SEQ ID NO: 397069 - RNA, 32 nt, Human
cuccccggccuggguuggagggagcggauggg

SEQ ID NO: 397070 - RNA, 21 nt, Human
cuccccggcucgcgccgcucc

SEQ ID NO: 397071 - RNA, 32 nt, Human
cuccccggcugauuugcgcaucaggaggagga

SEQ ID NO: 397072 - RNA, 32 nt, Human
cuccccggcugcaggcggcgugcaggaccagc

SEQ ID NO: 397073 - RNA, 23 nt, Human
cuccccggcugccgccgccgccg

SEQ ID NO: 397074 - RNA, 32 nt, Human
cuccccgggacagccacgggggccaagugaaa

SEQ ID NO: 397075 - RNA, 24 nt, Human
cuccccgggcggcugcaucccggg

SEQ ID NO: 397076 - RNA, 22 nt, Human
cuccccgggcuccccgccgccg

SEQ ID NO: 397077 - RNA, 19 nt, Human
cuccccggggcagcgaccu

SEQ ID NO: 397078 - RNA, 32 nt, Human
cuccccggucagagggccggagcgagaagaug

SEQ ID NO: 397079 - RNA, 21 nt, Human
cuccccgugccagcacugccg

SEQ ID NO: 397080 - RNA, 32 nt, Human
cuccccguggucacauggagguugugggccga

SEQ ID NO: 397081 - RNA, 32 nt, Human
cuccccguuucucuccccaucuuggcugcugu

SEQ ID NO: 397082 - RNA, 32 nt, Human
cuccccuaaagaaaaaggauauuagauugcac

SEQ ID NO: 397083 - RNA, 32 nt, Human
cuccccuacaaagcagaccagccuggggcaga

SEQ ID NO: 397084 - RNA, 32 nt, Human
cuccccuacaucuguuuucuucuguauuucuu

SEQ ID NO: 397085 - RNA, 32 nt, Human
cuccccuacuggaggcaaaggaaggggagggu

SEQ ID NO: 397086 - RNA, 32 nt, Human
cuccccuacuggccccuggcucaggcccacac

SEQ ID NO: 397087 - RNA, 32 nt, Human
cuccccuagacccuggaaauucuuuccuuccu

SEQ ID NO: 397088 - RNA, 21 nt, Human
cuccccuagcccuccaucccc

SEQ ID NO: 397089 - RNA, 32 nt, Human
cuccccuaugccucagccccaucucugcuccu

SEQ ID NO: 397090 - RNA, 17 nt, Human
cuccccucaccaggaga

SEQ ID NO: 397091 - RNA, 32 nt, Human
cuccccucacccuccucaccuuccucacaucc

SEQ ID NO: 397092 - RNA, 22 nt, Human
cuccccucaccgccucccaggu

SEQ ID NO: 397093 - RNA, 32 nt, Human
cuccccucagacacccucagagaguucacacu

SEQ ID NO: 397094 - RNA, 32 nt, Human
cuccccucagacuagcuuucagucuucuguca

SEQ ID NO: 397095 - RNA, 32 nt, Human
cuccccucagccauggacaugcuucauccauc

SEQ ID NO: 397096 - RNA, 32 nt, Human
cuccccucagcccaucuugcucccucuucagc

SEQ ID NO: 397097 - RNA, 32 nt, Human
cuccccucagcuuaacgaugaagaggagaacu

SEQ ID NO: 397098 - RNA, 32 nt, Human
cuccccucauccgauuccccuguaucagucac

SEQ ID NO: 397099 - RNA, 32 nt, Human
cuccccucauuucaccuucagcauauauucua

SEQ ID NO: 397100 - RNA, 32 nt, Human
cuccccucauuuccaucucccagcccccaggg

SEQ ID NO: 397101 - RNA, 32 nt, Human
cuccccucauuuccucuucuccuuacuaaggu

SEQ ID NO: 397102 - RNA, 21 nt, Human
cuccccuccacccuccucucu

SEQ ID NO: 397103 - RNA, 32 nt, Human
cuccccuccagccugggcgacagagugagacu

SEQ ID NO: 397104 - RNA, 32 nt, Human
cuccccuccagccuuuggccuuggcuuuucua

SEQ ID NO: 397105 - RNA, 26 nt, Human
cuccccucccagcccucgcucucucg

SEQ ID NO: 397106 - RNA, 32 nt, Human
cuccccucccauccuuuuguaagcaaggaggg

SEQ ID NO: 397107 - RNA, 32 nt, Human
cuccccucccaucugugccucuguaaggggcu

SEQ ID NO: 397108 - RNA, 32 nt, Human
cuccccuccccaccucgcuucuucccaauuua

SEQ ID NO: 397109 - RNA, 32 nt, Human
cuccccucccccugcaggucccccuccccucu

SEQ ID NO: 397110 - RNA, 32 nt, Human
cuccccuccccucccucuuuuuaguuuuaauu

SEQ ID NO: 397111 - RNA, 32 nt, Human
cuccccuccccucuccccuugacuccucuccg

SEQ ID NO: 397112 - RNA, 32 nt, Human
cuccccuccccuuuuucauuccuuccuccccc

SEQ ID NO: 397113 - RNA, 32 nt, Human
cuccccucccuauauacccccaccccacaaag

SEQ ID NO: 397114 - RNA, 25 nt, Human
cuccccuccggagcugggauccagg

SEQ ID NO: 397115 - RNA, 32 nt, Human
cuccccuccggcccucuccacugcuuuccaga

SEQ ID NO: 397116 - RNA, 32 nt, Human
cuccccuccugaggcagugcaggaggccugug

SEQ ID NO: 397117 - RNA, 32 nt, Human
cuccccuccugcccuucgcuccuggguugguu

SEQ ID NO: 397118 - RNA, 32 nt, Human
cuccccucgguguggcuggugggugagccgug

SEQ ID NO: 397119 - RNA, 32 nt, Human
cuccccucguuuuugaccuuuguccccaaaug

SEQ ID NO: 397120 - RNA, 32 nt, Human
cuccccucuauucuuugucucaggugaugucu

SEQ ID NO: 397121 - RNA, 32 nt, Human
cuccccucucaggggaauaaagugucaagcaa

SEQ ID NO: 397122 - RNA, 32 nt, Human
cuccccucuccccucucccguucuuccuccca

SEQ ID NO: 397123 - RNA, 32 nt, Human
cuccccucucccucccccucccccgccggugg

SEQ ID NO: 397124 - RNA, 24 nt, Human
cuccccucuccgccuaagccugcc

SEQ ID NO: 397125 - RNA, 32 nt, Human
cuccccucuccguugugcccuggaccucgggc

SEQ ID NO: 397126 - RNA, 32 nt, Human
cuccccucuccucuaacugcuggauuugucuu

SEQ ID NO: 397127 - RNA, 25 nt, Human
cuccccucucucucuucucugucuc

SEQ ID NO: 397128 - RNA, 32 nt, Human
cuccccucucuggguugacugcauuucuagac

SEQ ID NO: 397129 - RNA, 23 nt, Human
cuccccucucuugcacccgccuc

SEQ ID NO: 397130 - RNA, 32 nt, Human
cuccccucugcacuuuguuuacuuguuuugca

SEQ ID NO: 397131 - RNA, 32 nt, Human
cuccccucugucucccuccugcucuggccaua

SEQ ID NO: 397132 - RNA, 32 nt, Human
cuccccucuugcacuuucucuccagucaccau

SEQ ID NO: 397133 - RNA, 32 nt, Human
cuccccucuuuucccucccucuccuccccuuc

SEQ ID NO: 397134 - RNA, 31 nt, Human
cuccccugaaaucaagacaggggccacccga

SEQ ID NO: 397135 - RNA, 32 nt, Human
cuccccugaacagcagcugcagcagccauggc

SEQ ID NO: 397136 - RNA, 32 nt, Human
cuccccugaaggaggaucgagagccggugaau

SEQ ID NO: 397137 - RNA, 32 nt, Human
cuccccugacacugaagaggauccacaacucc

SEQ ID NO: 397138 - RNA, 32 nt, Human
cuccccugagaacacaggacaggccugcugac

SEQ ID NO: 397139 - RNA, 32 nt, Human
cuccccugcacuccagacugaucugccugggg

SEQ ID NO: 397140 - RNA, 32 nt, Human
cuccccugcagcuuccucugcuucuggaauga

SEQ ID NO: 397141 - RNA, 32 nt, Human
cuccccugccaaaggccaggccgccacagagc

SEQ ID NO: 397142 - RNA, 32 nt, Human
cuccccugccacccagccucugaggccggcuc

SEQ ID NO: 397143 - RNA, 32 nt, Human
cuccccugccagccuaggauuuugggcgucau

SEQ ID NO: 397144 - RNA, 32 nt, Human
cuccccugcccaggcagcugguggugggcgcu

SEQ ID NO: 397145 - RNA, 32 nt, Human
cuccccugcccucagaaggaaaggagagggcu

SEQ ID NO: 397146 - RNA, 32 nt, Human
cuccccugcccucuggcuuccugcugagguca

SEQ ID NO: 397147 - RNA, 19 nt, Human
cuccccugcccugcugccg

SEQ ID NO: 397148 - RNA, 32 nt, Human
cuccccugcccugguccagggaagcuggccga

SEQ ID NO: 397149 - RNA, 19 nt, Human
cuccccugccgccgcugcu

SEQ ID NO: 397150 - RNA, 20 nt, Human
cuccccugccgccgcugcuc

SEQ ID NO: 397151 - RNA, 20 nt, Human
cuccccugccgggcugcaag

SEQ ID NO: 397152 - RNA, 32 nt, Human
cuccccugccuccccagggccucugcucuccu

SEQ ID NO: 397153 - RNA, 21 nt, Human
cuccccugccuggucuuccaa

SEQ ID NO: 397154 - RNA, 32 nt, Human
cuccccugcgucgcuaagacugucauaaaaug

SEQ ID NO: 397155 - RNA, 32 nt, Human
cuccccugcuacugcugaccaaauucccagga

SEQ ID NO: 397156 - RNA, 22 nt, Human
cuccccugcucccucccagguc

SEQ ID NO: 397157 - RNA, 32 nt, Human
cuccccugcugguugauguggaauacgccagc

SEQ ID NO: 397158 - RNA, 32 nt, Human
cuccccugcuguguggccuuaggcaacggcuu

SEQ ID NO: 397159 - RNA, 32 nt, Human
cuccccugcuucucccccuccuaccugagagg

SEQ ID NO: 397160 - RNA, 32 nt, Human
cuccccuggcacuggcugggaccauggugggc

SEQ ID NO: 397161 - RNA, 32 nt, Human
cuccccuggcagcagaagugggugcaggaagg

SEQ ID NO: 397162 - RNA, 32 nt, Human
cuccccuggcugcaaaugcuuuucugaaagua

SEQ ID NO: 397163 - RNA, 32 nt, Human
cuccccugggcaacugcagccaccuccaaacu

SEQ ID NO: 397164 - RNA, 32 nt, Human
cuccccuggggucaggagaggccgagccccag

SEQ ID NO: 397165 - RNA, 32 nt, Human
cuccccugguauagccucgcagggcugggguc

SEQ ID NO: 397166 - RNA, 32 nt, Human
cuccccuguaguuuaggacacaaaacagcuac

SEQ ID NO: 397167 - RNA, 19 nt, Human
cuccccuguaucugcagca

SEQ ID NO: 397168 - RNA, 32 nt, Human
cuccccuguauuauuuccuauaacuccaugug

SEQ ID NO: 397169 - RNA, 32 nt, Human
cuccccuguccuccuccaccuucuuccucugg

SEQ ID NO: 397170 - RNA, 32 nt, Human
cuccccugucuccuuuccuccuccuggguuca

SEQ ID NO: 397171 - RNA, 32 nt, Human
cuccccugugccagugccaccugggugccucc

SEQ ID NO: 397172 - RNA, 32 nt, Human
cuccccuguggaaaggucuauaugacgggccg

SEQ ID NO: 397173 - RNA, 32 nt, Human
cuccccuguggaaauuggggucuguugguggg

SEQ ID NO: 397174 - RNA, 32 nt, Human
cuccccugugugugagcaagaccacagcucuc

SEQ ID NO: 397175 - RNA, 32 nt, Human
cuccccuguuccuucuccuccccgucccuucu

SEQ ID NO: 397176 - RNA, 32 nt, Human
cuccccuguuugggacaggccgugcucccacc

SEQ ID NO: 397177 - RNA, 21 nt, Human
cuccccuguuuuucugccugc

SEQ ID NO: 397178 - RNA, 32 nt, Human
cuccccuuaagaaaccuuaaagaaauaaguau

SEQ ID NO: 397179 - RNA, 32 nt, Human
cuccccuuacccaggcuuaggcuuaauuaccu

SEQ ID NO: 397180 - RNA, 32 nt, Human
cuccccuuaugauuacuaaauauuuuauuuug

SEQ ID NO: 397181 - RNA, 19 nt, Human
cuccccuucaaggacuucu

SEQ ID NO: 397182 - RNA, 32 nt, Human
cuccccuucacucaggcccugggaaaccagcc

SEQ ID NO: 397183 - RNA, 32 nt, Human
cuccccuucacucccaccgcaggauuugggcu

SEQ ID NO: 397184 - RNA, 32 nt, Human
cuccccuuccacccucacccccaggucccagc

SEQ ID NO: 397185 - RNA, 32 nt, Human
cuccccuuccacccucagcuccacccucaggc

SEQ ID NO: 397186 - RNA, 32 nt, Human
cuccccuucccacucccugcucucagcauucu

SEQ ID NO: 397187 - RNA, 18 nt, Human
cuccccuuccccgucccc

SEQ ID NO: 397188 - RNA, 32 nt, Human
cuccccuuccccucccccuccccucccccucc

SEQ ID NO: 397189 - RNA, 27 nt, Human
cuccccuuccuaccgcacccucagguc

SEQ ID NO: 397190 - RNA, 32 nt, Human
cuccccuuccuuucccccuccuccgggggcca

SEQ ID NO: 397191 - RNA, 32 nt, Human
cuccccuucuccccacuuucaccuccccaccc

SEQ ID NO: 397192 - RNA, 32 nt, Human
cuccccuucucccggccuuccucugccugggg

SEQ ID NO: 397193 - RNA, 32 nt, Human
cuccccuucuuucucuuccuucugccuccccc

SEQ ID NO: 397194 - RNA, 32 nt, Human
cuccccuugcagcugaugacacaucugaggaa

SEQ ID NO: 397195 - RNA, 32 nt, Human
cuccccuugcccacugggacuccucuuuggcu

SEQ ID NO: 397196 - RNA, 32 nt, Human
cuccccuuggagcucuugccaaaggaggagac

SEQ ID NO: 397197 - RNA, 32 nt, Human
cuccccuuggccaggacaugcugcugcuacug

SEQ ID NO: 397198 - RNA, 32 nt, Human
cuccccuuggccggggcaacaccaguuacugu

SEQ ID NO: 397199 - RNA, 32 nt, Human
cuccccuuggcuugaucucucauacaaagguu

SEQ ID NO: 397200 - RNA, 32 nt, Human
cuccccuugggcccugccuggagugugugccg

SEQ ID NO: 397201 - RNA, 32 nt, Human
cuccccuuggggaccuagccuggagucaggac

SEQ ID NO: 397202 - RNA, 32 nt, Human
cuccccuugguauaacugauuuccuuuuuagu

SEQ ID NO: 397203 - RNA, 32 nt, Human
cuccccuuuagcucugugaugccugccuguua

SEQ ID NO: 397204 - RNA, 32 nt, Human
cucccgaaaauacaaaauuagccaggcguggu

SEQ ID NO: 397205 - RNA, 32 nt, Human
cucccgaaagccgugcucuccagccuggcugc

SEQ ID NO: 397206 - RNA, 32 nt, Human
cucccgaaagugcugggauuacagucaugagc

SEQ ID NO: 397207 - RNA, 24 nt, Human
cucccgaaaugcugggauuacagg

SEQ ID NO: 397208 - RNA, 32 nt, Human
cucccgaaaugcugggauuacaggcaugagcc

SEQ ID NO: 397209 - RNA, 32 nt, Human
cucccgaaauguugguauuacaggcaugagcc

SEQ ID NO: 397210 - RNA, 22 nt, Human
cucccgaacuacugacuuugaa

SEQ ID NO: 397211 - RNA, 27 nt, Human
cucccgaaggcucgcacagccucccca

SEQ ID NO: 397212 - RNA, 32 nt, Human
cucccgaagugcuaagauuacaggcgugagcc

SEQ ID NO: 397213 - RNA, 24 nt, Human
cucccgaagugcuggaauuacagg

SEQ ID NO: 397214 - RNA, 32 nt, Human
cucccgaagugcuggaauuacaggcgugagcc

SEQ ID NO: 397215 - RNA, 32 nt, Human
cucccgaagugcuggcauuacaggcaugagcc

SEQ ID NO: 397216 - RNA, 23 nt, Human
cucccgaagugcugggauuacag

SEQ ID NO: 397217 - RNA, 24 nt, Human
cucccgaagugcugggauuacagg

SEQ ID NO: 397218 - RNA, 32 nt, Human
cucccgaagugcugggauuacaggcaugagcc

SEQ ID NO: 397219 - RNA, 32 nt, Human
cucccgaagugcugggauuacaggcgggagcc

SEQ ID NO: 397220 - RNA, 32 nt, Human
cucccgaagugcugggauuacaggcguaagcc

SEQ ID NO: 397221 - RNA, 32 nt, Human
cucccgaagugcugggauuacaggcgugagcc

SEQ ID NO: 397222 - RNA, 32 nt, Human
cucccgaagugcugggauuacaggugugagcc

SEQ ID NO: 397223 - RNA, 32 nt, Human
cucccgaagugcugggauuacugacaugagcc

SEQ ID NO: 397224 - RNA, 24 nt, Human
cucccgaagugcugggauuauagg

SEQ ID NO: 397225 - RNA, 32 nt, Human
cucccgaagugcugggauuauaggugugagcc

SEQ ID NO: 397226 - RNA, 24 nt, Human
cucccgaagugcugggauugcagg

SEQ ID NO: 397227 - RNA, 32 nt, Human
cucccgaagugcugggauugcaggcauaagcu

SEQ ID NO: 397228 - RNA, 32 nt, Human
cucccgaagugcugggauugcaggcgugagcc

SEQ ID NO: 397229 - RNA, 32 nt, Human
cucccgaagugcuuggauuacaggugugagcc

SEQ ID NO: 397230 - RNA, 24 nt, Human
cucccgaaguguugggauuacagg

SEQ ID NO: 397231 - RNA, 32 nt, Human
cucccgaaguguugggauuacaggcacgagcc

SEQ ID NO: 397232 - RNA, 32 nt, Human
cucccgaauagcagggacuacaggcaugcgcc

SEQ ID NO: 397233 - RNA, 32 nt, Human
cucccgaauagcugggauuacagacaggcacc

SEQ ID NO: 397234 - RNA, 24 nt, Human
cucccgaauagcugggauuacagg

SEQ ID NO: 397235 - RNA, 32 nt, Human
cucccgaauagcugggauuacaggcgcccgcc

SEQ ID NO: 397236 - RNA, 32 nt, Human
cucccgaauggcugggacuacaggcacccacc

SEQ ID NO: 397237 - RNA, 22 nt, Human
cucccgacaauggcgccuccca

SEQ ID NO: 397238 - RNA, 22 nt, Human
cucccgacaggggacacuccca

SEQ ID NO: 397239 - RNA, 32 nt, Human
cucccgaccagccccagcgcggugggcccagg

SEQ ID NO: 397240 - RNA, 28 nt, Human
cucccgaccagugcugcccuguuugccc

SEQ ID NO: 397241 - RNA, 22 nt, Human
cucccgacgggccucgggccug

SEQ ID NO: 397242 - RNA, 32 nt, Human
cucccgacguggugggguuacaggcaugagcc

SEQ ID NO: 397243 - RNA, 32 nt, Human
cucccgacuagcugggacuacaggcgcccgcc

SEQ ID NO: 397244 - RNA, 32 nt, Human
cucccgagagaagacagacaaugagcaaguaa

SEQ ID NO: 397245 - RNA, 32 nt, Human
cucccgagcagcugggacuacaggcgcccgcc

SEQ ID NO: 397246 - RNA, 32 nt, Human
cucccgagcagcugggacuacaggcgcccgcu

SEQ ID NO: 397247 - RNA, 32 nt, Human
cucccgagcagcugggacuacaggcgugcgcc

SEQ ID NO: 397248 - RNA, 24 nt, Human
cucccgagcagcugggauuacagg

SEQ ID NO: 397249 - RNA, 18 nt, Human
cucccgagccgccugcua

SEQ ID NO: 397250 - RNA, 32 nt, Human
cucccgagcuccgacagcauuaccucacccgg

SEQ ID NO: 397251 - RNA, 32 nt, Human
cucccgagcugccccuccuuucccaggcccug

SEQ ID NO: 397252 - RNA, 20 nt, Human
cucccgagcugcccuucagg

SEQ ID NO: 397253 - RNA, 32 nt, Human
cucccgaggaacaggcgucuuccccgaacccu

SEQ ID NO: 397254 - RNA, 23 nt, Human
cucccgaggugccgggauugcag

SEQ ID NO: 397255 - RNA, 32 nt, Human
cucccgagguugccuuucuuagucccaaacua

SEQ ID NO: 397256 - RNA, 32 nt, Human
cucccgaguaaaaggcaugcaucaccacaccu

SEQ ID NO: 397257 - RNA, 24 nt, Human
cucccgaguaccugggauuacagg

SEQ ID NO: 397258 - RNA, 32 nt, Human
cucccgaguaccugggauuacaggcaugcacc

SEQ ID NO: 397259 - RNA, 32 nt, Human
cucccgaguaccugggauuacaggcaugugcc

SEQ ID NO: 397260 - RNA, 32 nt, Human
cucccgaguagcagggauuaccggugugcacc

SEQ ID NO: 397261 - RNA, 32 nt, Human
cucccgaguagcggggauuacaggcacgcgcu

SEQ ID NO: 397262 - RNA, 32 nt, Human
cucccgaguagcuaggauuacagaugugcauc

SEQ ID NO: 397263 - RNA, 32 nt, Human
cucccgaguagcucagauuacaggcaugugcc

SEQ ID NO: 397264 - RNA, 32 nt, Human
cucccgaguagcugagacuacaggcaugcacc

SEQ ID NO: 397265 - RNA, 32 nt, Human
cucccgaguagcugcuacuagagaugcaccac

SEQ ID NO: 397266 - RNA, 32 nt, Human
cucccgaguagcuggaauuacaggcaccugcc

SEQ ID NO: 397267 - RNA, 32 nt, Human
cucccgaguagcuggaauuacaggcaugcgcc

SEQ ID NO: 397268 - RNA, 32 nt, Human
cucccgaguagcuggcauuacaggcauguguc

SEQ ID NO: 397269 - RNA, 32 nt, Human
cucccgaguagcugggacuacaggcacaaguc

SEQ ID NO: 397270 - RNA, 32 nt, Human
cucccgaguagcugggacuacaggcacacagu

SEQ ID NO: 397271 - RNA, 32 nt, Human
cucccgaguagcugggacuacaggcacccacc

SEQ ID NO: 397272 - RNA, 32 nt, Human
cucccgaguagcugggacuacaggcacccgcc

SEQ ID NO: 397273 - RNA, 32 nt, Human
cucccgaguagcugggacuacaggcaccugcc

SEQ ID NO: 397274 - RNA, 32 nt, Human
cucccgaguagcugggacuacaggcacgugcu

SEQ ID NO: 397275 - RNA, 32 nt, Human
cucccgaguagcugggacuacaggcacgugug

SEQ ID NO: 397276 - RNA, 32 nt, Human
cucccgaguagcugggacuacaggcaggcgcc

SEQ ID NO: 397277 - RNA, 32 nt, Human
cucccgaguagcugggacuacaggcaugcacc

SEQ ID NO: 397278 - RNA, 32 nt, Human
cucccgaguagcugggacuacaggcaugugcc

SEQ ID NO: 397279 - RNA, 32 nt, Human
cucccgaguagcugggaguacaggcacacacc

SEQ ID NO: 397280 - RNA, 32 nt, Human
cucccgaguagcugggaucacaggugugcgcc

SEQ ID NO: 397281 - RNA, 22 nt, Human
cucccgaguagcugggauuaca

SEQ ID NO: 397282 - RNA, 32 nt, Human
cucccgaguagcugggauuacaagcacccacc

SEQ ID NO: 397283 - RNA, 32 nt, Human
cucccgaguagcugggauuacaagugcacacu

SEQ ID NO: 397284 - RNA, 32 nt, Human
cucccgaguagcugggauuacaagugcgcacu

SEQ ID NO: 397285 - RNA, 23 nt, Human
cucccgaguagcugggauuacag

SEQ ID NO: 397286 - RNA, 32 nt, Human
cucccgaguagcugggauuacagacaugugcc

SEQ ID NO: 397287 - RNA, 24 nt, Human
cucccgaguagcugggauuacagg

SEQ ID NO: 397288 - RNA, 32 nt, Human
cucccgaguagcugggauuacaggcacacacc

SEQ ID NO: 397289 - RNA, 32 nt, Human
cucccgaguagcugggauuacaggcacacgcc

SEQ ID NO: 397290 - RNA, 32 nt, Human
cucccgaguagcugggauuacaggcacaugcc

SEQ ID NO: 397291 - RNA, 32 nt, Human
cucccgaguagcugggauuacaggcacccacc

SEQ ID NO: 397292 - RNA, 32 nt, Human
cucccgaguagcugggauuacaggcacccgcc

SEQ ID NO: 397293 - RNA, 32 nt, Human
cucccgaguagcugggauuacaggcaccugcc

SEQ ID NO: 397294 - RNA, 32 nt, Human
cucccgaguagcugggauuacaggcaccuguc

SEQ ID NO: 397295 - RNA, 32 nt, Human
cucccgaguagcugggauuacaggcacgcacc

SEQ ID NO: 397296 - RNA, 32 nt, Human
cucccgaguagcugggauuacaggcacuugcc

SEQ ID NO: 397297 - RNA, 32 nt, Human
cucccgaguagcugggauuacaggcaucugcc

SEQ ID NO: 397298 - RNA, 32 nt, Human
cucccgaguagcugggauuacaggcaucugcu

SEQ ID NO: 397299 - RNA, 32 nt, Human
cucccgaguagcugggauuacaggcaugagcc

SEQ ID NO: 397300 - RNA, 32 nt, Human
cucccgaguagcugggauuacaggcaugcacc

SEQ ID NO: 397301 - RNA, 32 nt, Human
cucccgaguagcugggauuacaggcaugcgcc

SEQ ID NO: 397302 - RNA, 32 nt, Human
cucccgaguagcugggauuacaggcaugcgcu

SEQ ID NO: 397303 - RNA, 32 nt, Human
cucccgaguagcugggauuacaggcaugcucc

SEQ ID NO: 397304 - RNA, 32 nt, Human
cucccgaguagcugggauuacaggcaugugca

SEQ ID NO: 397305 - RNA, 32 nt, Human
cucccgaguagcugggauuacaggcaugugcc

SEQ ID NO: 397306 - RNA, 32 nt, Human
cucccgaguagcugggauuacaggcgcacgcc

SEQ ID NO: 397307 - RNA, 32 nt, Human
cucccgaguagcugggauuacaggcgcccacc

SEQ ID NO: 397308 - RNA, 32 nt, Human
cucccgaguagcugggauuacaggcgcccgcc

SEQ ID NO: 397309 - RNA, 32 nt, Human
cucccgaguagcugggauuacaggcgccugac

SEQ ID NO: 397310 - RNA, 32 nt, Human
cucccgaguagcugggauuacaggcgccugcc

SEQ ID NO: 397311 - RNA, 32 nt, Human
cucccgaguagcugggauuacaggcgugcacu

SEQ ID NO: 397312 - RNA, 32 nt, Human
cucccgaguagcugggauuacaggcgugcgcc

SEQ ID NO: 397313 - RNA, 32 nt, Human
cucccgaguagcugggauuacaggcgugugcc

SEQ ID NO: 397314 - RNA, 32 nt, Human
cucccgaguagcugggauuacaggcguguguc

SEQ ID NO: 397315 - RNA, 32 nt, Human
cucccgaguagcugggauuacaggugagcacc

SEQ ID NO: 397316 - RNA, 32 nt, Human
cucccgaguagcugggauuacaggugcaugcc

SEQ ID NO: 397317 - RNA, 32 nt, Human
cucccgaguagcugggauuacaggugcccacc

SEQ ID NO: 397318 - RNA, 32 nt, Human
cucccgaguagcugggauuacaggugccugcc

SEQ ID NO: 397319 - RNA, 32 nt, Human
cucccgaguagcugggauuacaggugcgcacu

SEQ ID NO: 397320 - RNA, 32 nt, Human
cucccgaguagcugggauuacaggugcgcccc

SEQ ID NO: 397321 - RNA, 32 nt, Human
cucccgaguagcugggauuacaggugcgcgcc

SEQ ID NO: 397322 - RNA, 32 nt, Human
cucccgaguagcugggauuacagguggugacu

SEQ ID NO: 397323 - RNA, 32 nt, Human
cucccgaguagcugggauuacaggugugcacc

SEQ ID NO: 397324 - RNA, 32 nt, Human
cucccgaguagcugggauuacaggugugggcc

SEQ ID NO: 397325 - RNA, 24 nt, Human
cucccgaguagcugggauuacggg

SEQ ID NO: 397326 - RNA, 32 nt, Human
cucccgaguagcugggauuacgggcauaugcc

SEQ ID NO: 397327 - RNA, 32 nt, Human
cucccgaguagcugggauuacgggcgcccgcc

SEQ ID NO: 397328 - RNA, 24 nt, Human
cucccgaguagcugggauuacugg

SEQ ID NO: 397329 - RNA, 24 nt, Human
cucccgaguagcugggauuagagg

SEQ ID NO: 397330 - RNA, 32 nt, Human
cucccgaguagcugggauuagaggcgugugcc

SEQ ID NO: 397331 - RNA, 23 nt, Human
cucccgaguagcugggauuauag

SEQ ID NO: 397332 - RNA, 24 nt, Human
cucccgaguagcugggauuauagg

SEQ ID NO: 397333 - RNA, 32 nt, Human
cucccgaguagcugggauuauaggcacccgcc

SEQ ID NO: 397334 - RNA, 32 nt, Human
cucccgaguagcugggauuauaggcaccugcc

SEQ ID NO: 397335 - RNA, 32 nt, Human
cucccgaguagcugggauuauaggcgagugcc

SEQ ID NO: 397336 - RNA, 32 nt, Human
cucccgaguagcugggauuauaggcgcccgcc

SEQ ID NO: 397337 - RNA, 24 nt, Human
cucccgaguagcugggauuauggg

SEQ ID NO: 397338 - RNA, 32 nt, Human
cucccgaguagcugggauuaugggcgcccacc

SEQ ID NO: 397339 - RNA, 32 nt, Human
cucccgaguagcugggauuaugggcgcccgcc

SEQ ID NO: 397340 - RNA, 24 nt, Human
cucccgaguagcugggauuccagg

SEQ ID NO: 397341 - RNA, 24 nt, Human
cucccgaguagcugggauugcagg

SEQ ID NO: 397342 - RNA, 32 nt, Human
cucccgaguagcugggauugcaggcgcccgcc

SEQ ID NO: 397343 - RNA, 32 nt, Human
cucccgaguagcugggauugcagguacccauc

SEQ ID NO: 397344 - RNA, 24 nt, Human
cucccgaguagcugggguuacagg

SEQ ID NO: 397345 - RNA, 32 nt, Human
cucccgaguagcugggguuacaggcaugcacc

SEQ ID NO: 397346 - RNA, 24 nt, Human
cucccgaguaguugggauuacagg

SEQ ID NO: 397347 - RNA, 32 nt, Human
cucccgaguaguugggauuacaggcgccugcc

SEQ ID NO: 397348 - RNA, 32 nt, Human
cucccgaguaucuggggcuacaggcauguacc

SEQ ID NO: 397349 - RNA, 24 nt, Human
cucccgagucacugggauuacagg

SEQ ID NO: 397350 - RNA, 32 nt, Human
cucccgagucucccuucuccgcucuccgagac

SEQ ID NO: 397351 - RNA, 32 nt, Human
cucccgagugacucggauuacaggcaugugcc

SEQ ID NO: 397352 - RNA, 32 nt, Human
cucccgaguggcugggauuagcggcaugcacc

SEQ ID NO: 397353 - RNA, 24 nt, Human
cucccgaguggcugggauuauagg

SEQ ID NO: 397354 - RNA, 32 nt, Human
cucccgaguggcugggauuauaggcgugcacc

SEQ ID NO: 397355 - RNA, 24 nt, Human
cucccgaguugcugggacuauagg

SEQ ID NO: 397356 - RNA, 24 nt, Human
cucccgaguugcugggauugcggg

SEQ ID NO: 397357 - RNA, 32 nt, Human
cucccgaguugcugggauugcgggcauggugg

SEQ ID NO: 397358 - RNA, 32 nt, Human
cucccgauccuguaguuaaccccacacaagau

SEQ ID NO: 397359 - RNA, 32 nt, Human
cucccgauuacuuccuuuacgucuagcaguau

SEQ ID NO: 397360 - RNA, 24 nt, Human
cucccgauuagcugggaucacagg

SEQ ID NO: 397361 - RNA, 25 nt, Human
cucccgauucuacagucuggcucua

SEQ ID NO: 397362 - RNA, 23 nt, Human
cucccgauuucccaggggcucug

SEQ ID NO: 397363 - RNA, 32 nt, Human
cucccgcaaggcaggucauagaaaccagaacc

SEQ ID NO: 397364 - RNA, 32 nt, Human
cucccgcaaugcugcaauuacagguguuagcc

SEQ ID NO: 397365 - RNA, 32 nt, Human
cucccgcacagcagccgccagcgcggccuccu

SEQ ID NO: 397366 - RNA, 32 nt, Human
cucccgcacccaaacuuggagcacuugaccuu

SEQ ID NO: 397367 - RNA, 32 nt, Human
cucccgcaccgcccggugcuccccaucugccu

SEQ ID NO: 397368 - RNA, 32 nt, Human
cucccgcagacugagccacagccugggccucc

SEQ ID NO: 397369 - RNA, 32 nt, Human
cucccgcagccccuguccaccauugacucucc

SEQ ID NO: 397370 - RNA, 21 nt, Human
cucccgcagccgcagccgccg

SEQ ID NO: 397371 - RNA, 32 nt, Human
cucccgcagccggugaggguuuggaaaccagg

SEQ ID NO: 397372 - RNA, 32 nt, Human
cucccgcaggcagauggacagacgauggcccc

SEQ ID NO: 397373 - RNA, 32 nt, Human
cucccgcagugaaggccuucuauaaccaaauu

SEQ ID NO: 397374 - RNA, 24 nt, Human
cucccgcagugcugggauuacagg

SEQ ID NO: 397375 - RNA, 32 nt, Human
cucccgcagugcugggauuacaggcaugagcc

SEQ ID NO: 397376 - RNA, 32 nt, Human
cucccgcaucccucgccugcacagugggcagu

SEQ ID NO: 397377 - RNA, 21 nt, Human
cucccgccaccgccgccgccg

SEQ ID NO: 397378 - RNA, 32 nt, Human
cucccgccaguccucggcuccugcugcaaagu

SEQ ID NO: 397379 - RNA, 18 nt, Human
cucccgcccaccuccagg

SEQ ID NO: 397380 - RNA, 32 nt, Human
cucccgcccaccuccaggucccaguccucugu

SEQ ID NO: 397381 - RNA, 23 nt, Human
cucccgccccucgccgccgcucg

SEQ ID NO: 397382 - RNA, 19 nt, Human
cucccgccgcccuggggcg

SEQ ID NO: 397383 - RNA, 16 nt, Human
cucccgccgccgcccg

SEQ ID NO: 397384 - RNA, 21 nt, Human
cucccgccgccgccgccgccg

SEQ ID NO: 397385 - RNA, 21 nt, Human
cucccgccgccgccgccgcug

SEQ ID NO: 397386 - RNA, 21 nt, Human
cucccgccgccuccgccgccg

SEQ ID NO: 397387 - RNA, 17 nt, Human
cucccgccgccuccggg

SEQ ID NO: 397388 - RNA, 15 nt, Human
cucccgccgcugcug

SEQ ID NO: 397389 - RNA, 32 nt, Human
cucccgccuccccucacccucaacucucaaug

SEQ ID NO: 397390 - RNA, 32 nt, Human
cucccgccucccugccuccagcccuggcugca

SEQ ID NO: 397391 - RNA, 32 nt, Human
cucccgccucccugcugagauuacagguguaa

SEQ ID NO: 397392 - RNA, 32 nt, Human
cucccgccuccuccucuugcuccuccucggcg

SEQ ID NO: 397393 - RNA, 22 nt, Human
cucccgccucuccccuccccau

SEQ ID NO: 397394 - RNA, 32 nt, Human
cucccgccuggaaucccagcacuuugggaggc

SEQ ID NO: 397395 - RNA, 32 nt, Human
cucccgccugggguugcugcuuuugcucagag

SEQ ID NO: 397396 - RNA, 32 nt, Human
cucccgccuguaaucccagaacuuugggaggc

SEQ ID NO: 397397 - RNA, 32 nt, Human
cucccgccuguaaucccagcacuuugggaagc

SEQ ID NO: 397398 - RNA, 32 nt, Human
cucccgccuguaaucccagcacuuugggaggc

SEQ ID NO: 397399 - RNA, 32 nt, Human
cucccgccuguaaucccaguacuuugggaagc

SEQ ID NO: 397400 - RNA, 32 nt, Human
cucccgccuguaaucccauuacuuugggaggc

SEQ ID NO: 397401 - RNA, 32 nt, Human
cucccgccuguaauccuagcacuuugggaggc

SEQ ID NO: 397402 - RNA, 32 nt, Human
cucccgccugugaucccggcacuuugggaggc

SEQ ID NO: 397403 - RNA, 32 nt, Human
cucccgcgacuagaagugugaggucccagggc

SEQ ID NO: 397404 - RNA, 32 nt, Human
cucccgcgcagccugcccccuccuggacgugc

SEQ ID NO: 397405 - RNA, 32 nt, Human
cucccgcgcagcugggacugcagggguguucc

SEQ ID NO: 397406 - RNA, 24 nt, Human
cucccgcgccccaccacccccggc

SEQ ID NO: 397407 - RNA, 32 nt, Human
cucccgcgccgcaaccuccuccucggcgaagu

SEQ ID NO: 397408 - RNA, 20 nt, Human
cucccgcgccgccgccgccg

SEQ ID NO: 397409 - RNA, 24 nt, Human
cucccgcgcugccacccgccgccg

SEQ ID NO: 397410 - RNA, 32 nt, Human
cucccgcgcugccucugcuguggucacagccc

SEQ ID NO: 397411 - RNA, 32 nt, Human
cucccgcggccagcccuucccucccagucggc

SEQ ID NO: 397412 - RNA, 20 nt, Human
cucccgcggccgccgccgcc

SEQ ID NO: 397413 - RNA, 21 nt, Human
cucccgcggggaccccccuca

SEQ ID NO: 397414 - RNA, 32 nt, Human
cucccgcgugggccucacagggccgguccaca

SEQ ID NO: 397415 - RNA, 32 nt, Human
cucccgcuccacccugcccgugcugcugcucu

SEQ ID NO: 397416 - RNA, 32 nt, Human
cucccgcuccaggcacaucccaccuuaccucu

SEQ ID NO: 397417 - RNA, 32 nt, Human
cucccgcuccggugaccccauccuugcacacc

SEQ ID NO: 397418 - RNA, 32 nt, Human
cucccgcucuauccuguucccugaccggcaug

SEQ ID NO: 397419 - RNA, 32 nt, Human
cucccgcugaagagaaaagaccagucugaaau

SEQ ID NO: 397420 - RNA, 19 nt, Human
cucccgcugacugcccaca

SEQ ID NO: 397421 - RNA, 32 nt, Human
cucccgcugccaugcacccugcagccuucccg

SEQ ID NO: 397422 - RNA, 32 nt, Human
cucccgcugccccagaaguuucuaucauucca

SEQ ID NO: 397423 - RNA, 21 nt, Human
cucccgcugccgccgccgccg

SEQ ID NO: 397424 - RNA, 32 nt, Human
cucccgcugcuccuggagucuuggggaggggu

SEQ ID NO: 397425 - RNA, 18 nt, Human
cucccgcugcugcugccg

SEQ ID NO: 397426 - RNA, 32 nt, Human
cucccgcuggcccaggucuccucuccaguccc

SEQ ID NO: 397427 - RNA, 32 nt, Human
cucccgcugguggaaguauaaagugguacaaa

SEQ ID NO: 397428 - RNA, 32 nt, Human
cucccgcuuccaucagaaccacugacuuccac

SEQ ID NO: 397429 - RNA, 26 nt, Human
cucccggacccuccacuuuggggcuu

SEQ ID NO: 397430 - RNA, 32 nt, Human
cucccggagaggggagcuggagggcgcgcccu

SEQ ID NO: 397431 - RNA, 32 nt, Human
cucccggagccgcggaacucggcggccgccau

SEQ ID NO: 397432 - RNA, 25 nt, Human
cucccggaggccugugggcugccag

SEQ ID NO: 397433 - RNA, 32 nt, Human
cucccggagggcccugagcugagggcauugcu

SEQ ID NO: 397434 - RNA, 32 nt, Human
cucccggaguagccacgacuccagccaccacc

SEQ ID NO: 397435 - RNA, 24 nt, Human
cucccggauagcugggauuacagg

SEQ ID NO: 397436 - RNA, 32 nt, Human
cucccggauagcugggauuacaggcgugcacc

SEQ ID NO: 397437 - RNA, 32 nt, Human
cucccggcaaggaggaggggaguuucuucugc

SEQ ID NO: 397438 - RNA, 20 nt, Human
cucccggcaagucgccgccg

SEQ ID NO: 397439 - RNA, 32 nt, Human
cucccggcaccaucccuuccuucaucugacuu

SEQ ID NO: 397440 - RNA, 21 nt, Human
cucccggcaccgccgccgucg

SEQ ID NO: 397441 - RNA, 32 nt, Human
cucccggcaccuaggucuccagcugcugggug

SEQ ID NO: 397442 - RNA, 32 nt, Human
cucccggcagccagggcuuccuggaggcgaug

SEQ ID NO: 397443 - RNA, 32 nt, Human
cucccggcagcccgggcucuggggcggaagga

SEQ ID NO: 397444 - RNA, 32 nt, Human
cucccggcagcccucggcauguaccuuuguug

SEQ ID NO: 397445 - RNA, 32 nt, Human
cucccggccccggccccguccucugcugcugg

SEQ ID NO: 397446 - RNA, 19 nt, Human
cucccggcccgccccgccg

SEQ ID NO: 397447 - RNA, 19 nt, Human
cucccggcccgcugccgcc

SEQ ID NO: 397448 - RNA, 32 nt, Human
cucccggcccugaugcguguacacucugcggg

SEQ ID NO: 397449 - RNA, 32 nt, Human
cucccggcccugccucccagcaaguaagcaag

SEQ ID NO: 397450 - RNA, 18 nt, Human
cucccggccgccgccuua

SEQ ID NO: 397451 - RNA, 32 nt, Human
cucccggccggccugcacgaugcacacgccgg

SEQ ID NO: 397452 - RNA, 32 nt, Human
cucccggccuccccucgcucugaggcucgggg

SEQ ID NO: 397453 - RNA, 22 nt, Human
cucccggccuggagugcagugg

SEQ ID NO: 397454 - RNA, 32 nt, Human
cucccggccuggcuugcugccugcaggccucu

SEQ ID NO: 397455 - RNA, 32 nt, Human
cucccggcgagcugcccuugucuuuggcacag

SEQ ID NO: 397456 - RNA, 20 nt, Human
cucccggcgccgccgccgcc

SEQ ID NO: 397457 - RNA, 21 nt, Human
cucccggcgcggccgccgccg

SEQ ID NO: 397458 - RNA, 32 nt, Human
cucccggcgcuagcagggcugaagagaagaug

SEQ ID NO: 397459 - RNA, 21 nt, Human
cucccggcggccgccgcugcc

SEQ ID NO: 397460 - RNA, 24 nt, Human
cucccggcuccacccaucacacua

SEQ ID NO: 397461 - RNA, 32 nt, Human
cucccggcucggcuucuuccccacagcaggcu

SEQ ID NO: 397462 - RNA, 22 nt, Human
cucccggcugccgcugcugccg

SEQ ID NO: 397463 - RNA, 32 nt, Human
cucccggcugcuggugggcacggaggaaccag

SEQ ID NO: 397464 - RNA, 32 nt, Human
cucccggcuguaucagucuuaacugaaccagc

SEQ ID NO: 397465 - RNA, 21 nt, Human
cucccggcuuccgccgccgcc

SEQ ID NO: 397466 - RNA, 32 nt, Human
cucccgggaaggagggcugagcaucgagaaac

SEQ ID NO: 397467 - RNA, 20 nt, Human
cucccgggaguaaaaccaca

SEQ ID NO: 397468 - RNA, 32 nt, Human
cucccgggagucuucugccuacucccagaaga

SEQ ID NO: 397469 - RNA, 32 nt, Human
cucccgggccuggccagcauccccagccuagg

SEQ ID NO: 397470 - RNA, 32 nt, Human
cucccgggcucacuggagugcaaacugcuuuc

SEQ ID NO: 397471 - RNA, 32 nt, Human
cucccgggcuuaauugaucuccugccucagcc

SEQ ID NO: 397472 - RNA, 32 nt, Human
cucccggggagcuauugggauccagagaauca

SEQ ID NO: 397473 - RNA, 32 nt, Human
cucccggggcugagucccugcccggacuccga

SEQ ID NO: 397474 - RNA, 32 nt, Human
cucccgggggaggagccaaggaaggggcgugg

SEQ ID NO: 397475 - RNA, 32 nt, Human
cucccggggugagugaggaggcgggauuggac

SEQ ID NO: 397476 - RNA, 32 nt, Human
cucccggggugcugggauuauaggcgugagcc

SEQ ID NO: 397477 - RNA, 32 nt, Human
cucccggguagcugggauuacaggcaugugcc

SEQ ID NO: 397478 - RNA, 32 nt, Human
cucccgggucgugagccaguagccuccugggg

SEQ ID NO: 397479 - RNA, 24 nt, Human
cucccggguggcugggaucacagg

SEQ ID NO: 397480 - RNA, 24 nt, Human
cucccggguggcugggauugcagg

SEQ ID NO: 397481 - RNA, 24 nt, Human
cucccggguggcugggauuguagg

SEQ ID NO: 397482 - RNA, 32 nt, Human
cucccggugagaggugagccagcuggacuucc

SEQ ID NO: 397483 - RNA, 32 nt, Human
cucccgguucaagcgauucuccugccucagcc

SEQ ID NO: 397484 - RNA, 19 nt, Human
cucccguccgccgccgccg

SEQ ID NO: 397485 - RNA, 21 nt, Human
cucccguccuccccgccgccg

SEQ ID NO: 397486 - RNA, 32 nt, Human
cucccgucuccaagccuucaugcacauaugua

SEQ ID NO: 397487 - RNA, 32 nt, Human
cucccgugacagccggcaggcccagcccaucc

SEQ ID NO: 397488 - RNA, 32 nt, Human
cucccgugcccucuccccgugugccccagggg

SEQ ID NO: 397489 - RNA, 32 nt, Human
cucccgugcggaucgcaaaaucucggagcuga

SEQ ID NO: 397490 - RNA, 32 nt, Human
cucccguggccuggacacgcuggggagcuucu

SEQ ID NO: 397491 - RNA, 18 nt, Human
cucccgugguggcccagg

SEQ ID NO: 397492 - RNA, 32 nt, Human
cucccguguccgagcugggauaccaaagaagu

SEQ ID NO: 397493 - RNA, 32 nt, Human
cucccguucccuccucuucucucugggaggca

SEQ ID NO: 397494 - RNA, 32 nt, Human
cucccguucuguccauuugucuugucugccga

SEQ ID NO: 397495 - RNA, 32 nt, Human
cucccguugcaugucuggcuucugccugugcu

SEQ ID NO: 397496 - RNA, 32 nt, Human
cucccguugcggccgcucccugccuuagaggc

SEQ ID NO: 397497 - RNA, 32 nt, Human
cucccuaaaugccgggauuacaggcaugagcc

SEQ ID NO: 397498 - RNA, 32 nt, Human
cucccuaacacagccacccucccuucauuacc

SEQ ID NO: 397499 - RNA, 24 nt, Human
cucccuaacagcugggauuacagg

SEQ ID NO: 397500 - RNA, 32 nt, Human
cucccuaacagcugggauuacaggcgugagcc

SEQ ID NO: 397501 - RNA, 32 nt, Human
cucccuaaccaccccugcaucaucucguuugu

SEQ ID NO: 397502 - RNA, 32 nt, Human
cucccuaaccuucagaccaguaaaccagaugc

SEQ ID NO: 397503 - RNA, 19 nt, Human
cucccuaagaaaccccagg

SEQ ID NO: 397504 - RNA, 32 nt, Human
cucccuaagaccuugagagccaugacaggucc

SEQ ID NO: 397505 - RNA, 22 nt, Human
cucccuaagagcuaauggcacc

SEQ ID NO: 397506 - RNA, 32 nt, Human
cucccuaagugcggggauuacaggcuugagcc

SEQ ID NO: 397507 - RNA, 24 nt, Human
cucccuaagugcugagauuacagg

SEQ ID NO: 397508 - RNA, 32 nt, Human
cucccuaagugcugggauuacagacgugaacc

SEQ ID NO: 397509 - RNA, 32 nt, Human
cucccuaagugcugggauuacaggcaugagcc

SEQ ID NO: 397510 - RNA, 24 nt, Human
cucccuaagugcugggauuauagg

SEQ ID NO: 397511 - RNA, 32 nt, Human
cucccuaagugcugggauuauaggcgugagcc

SEQ ID NO: 397512 - RNA, 24 nt, Human
cucccuaagugcugggauugcagg

SEQ ID NO: 397513 - RNA, 32 nt, Human
cucccuaagugcugggauugcaggcgugagcc

SEQ ID NO: 397514 - RNA, 28 nt, Human
cucccuaagugcuucuuuggaucucagg

SEQ ID NO: 397515 - RNA, 32 nt, Human
cucccuaaguguugggauuacaggcaugagcc

SEQ ID NO: 397516 - RNA, 32 nt, Human
cucccuaaguguugggauuauaggugugagcc

SEQ ID NO: 397517 - RNA, 25 nt, Human
cucccuaaguugcugggauuacagg

SEQ ID NO: 397518 - RNA, 32 nt, Human
cucccuaaguuuaaaggacugauuuggugccu

SEQ ID NO: 397519 - RNA, 32 nt, Human
cucccuaauaagucuucuuuccuuccaacuaa

SEQ ID NO: 397520 - RNA, 24 nt, Human
cucccuaauagcugggacuacagg

SEQ ID NO: 397521 - RNA, 32 nt, Human
cucccuaccaucccugaggcucgcuggaaggc

SEQ ID NO: 397522 - RNA, 32 nt, Human
cucccuaccccacgccuucucccuuccucguu

SEQ ID NO: 397523 - RNA, 32 nt, Human
cucccuaccucccucacuuucuuccucucucc

SEQ ID NO: 397524 - RNA, 32 nt, Human
cucccuaccuguaauuccagucuuugugcauu

SEQ ID NO: 397525 - RNA, 32 nt, Human
cucccuacgggagaggaugccccgcaggaaca

SEQ ID NO: 397526 - RNA, 32 nt, Human
cucccuacucaggccuccucggcgauggcuuu

SEQ ID NO: 397527 - RNA, 32 nt, Human
cucccuacuguuggauguaugugugacaagug

SEQ ID NO: 397528 - RNA, 32 nt, Human
cucccuagcagcugggacuauuagugcacacc

SEQ ID NO: 397529 - RNA, 24 nt, Human
cucccuagcagcugggauuacagg

SEQ ID NO: 397530 - RNA, 32 nt, Human
cucccuagcucaacgauccucucaccucagcc

SEQ ID NO: 397531 - RNA, 32 nt, Human
cucccuaggagaagaguugaggaacuguacag

SEQ ID NO: 397532 - RNA, 32 nt, Human
cucccuaggcuucuacccucccuccugauguc

SEQ ID NO: 397533 - RNA, 24 nt, Human
cucccuagguguugggauuacagg

SEQ ID NO: 397534 - RNA, 32 nt, Human
cucccuagguguugggauuacaggcgugagcc

SEQ ID NO: 397535 - RNA, 23 nt, Human
cucccuaguagcugggacuacag

SEQ ID NO: 397536 - RNA, 24 nt, Human
cucccuaguagcugggacuacagg

SEQ ID NO: 397537 - RNA, 32 nt, Human
cucccuaguagcugggaugacaagcacacgcc

SEQ ID NO: 397538 - RNA, 24 nt, Human
cucccuaguagcugggaugacagg

SEQ ID NO: 397539 - RNA, 32 nt, Human
cucccuaguagcugggauuacagccaugcacc

SEQ ID NO: 397540 - RNA, 24 nt, Human
cucccuaguagcugggauuacagg

SEQ ID NO: 397541 - RNA, 32 nt, Human
cucccuaguagcugggauuacaggcaugcacu

SEQ ID NO: 397542 - RNA, 32 nt, Human
cucccuaguagcugggauuacaggcaugugcc

SEQ ID NO: 397543 - RNA, 24 nt, Human
cucccuaguagcugggauuauagg

SEQ ID NO: 397544 - RNA, 24 nt, Human
cucccuaguggcugggauuacagg

SEQ ID NO: 397545 - RNA, 32 nt, Human
cucccuagugucccuucagccugggcugacca

SEQ ID NO: 397546 - RNA, 32 nt, Human
cucccuauacuccucaggcuccuggguggccu

SEQ ID NO: 397547 - RNA, 32 nt, Human
cucccuaugccaacaugucaccuguguuuaug

SEQ ID NO: 397548 - RNA, 21 nt, Human
cucccuaugcccaggccugcc

SEQ ID NO: 397549 - RNA, 32 nt, Human
cucccuaugucacccaggcuguggugcaguaa

SEQ ID NO: 397550 - RNA, 32 nt, Human
cucccuauuauggcaugcauuacacuguacug

SEQ ID NO: 397551 - RNA, 32 nt, Human
cucccucaagacuaagggcuacaguaguuugu

SEQ ID NO: 397552 - RNA, 32 nt, Human
cucccucaagcucuggauggcugcaguguugu

SEQ ID NO: 397553 - RNA, 32 nt, Human
cucccucaaggccuccuccaccuccaccucca

SEQ ID NO: 397554 - RNA, 32 nt, Human
cucccucaaugaaaacagacaccagaaccauc

SEQ ID NO: 397555 - RNA, 32 nt, Human
cucccucaaugccacccugaccccacggcugg

SEQ ID NO: 397556 - RNA, 32 nt, Human
cucccucacagcccuuggcuggggcuccucca

SEQ ID NO: 397557 - RNA, 21 nt, Human
cucccucacagugcgcagugg

SEQ ID NO: 397558 - RNA, 32 nt, Human
cucccucaccaccacgccucccugccuaccau

SEQ ID NO: 397559 - RNA, 22 nt, Human
cucccucaccagcucugcaccc

SEQ ID NO: 397560 - RNA, 32 nt, Human
cucccucacccaggcacugggcaagugaagag

SEQ ID NO: 397561 - RNA, 32 nt, Human
cucccucacccaggcugcagugccaugcagac

SEQ ID NO: 397562 - RNA, 32 nt, Human
cucccucaccucuuuggcuuaccagcucccau

SEQ ID NO: 397563 - RNA, 32 nt, Human
cucccucaccugcccagguguaugauccuaca

SEQ ID NO: 397564 - RNA, 32 nt, Human
cucccucacugcaacugaacacauuucuuagu

SEQ ID NO: 397565 - RNA, 18 nt, Human
cucccucagacccaggag

SEQ ID NO: 397566 - RNA, 19 nt, Human
cucccucagacccaggagu

SEQ ID NO: 397567 - RNA, 19 nt, Human
cucccucagacccaggggu

SEQ ID NO: 397568 - RNA, 19 nt, Human
cucccucagacccgggagu

SEQ ID NO: 397569 - RNA, 25 nt, Human
cucccucagcacccaaaaggggcag

SEQ ID NO: 397570 - RNA, 32 nt, Human
cucccucagccaaguccuuccuuacaaugaau

SEQ ID NO: 397571 - RNA, 32 nt, Human
cucccucagccauccaauucuugaguuuucuc

SEQ ID NO: 397572 - RNA, 21 nt, Human
cucccucagccugcaaccucu

SEQ ID NO: 397573 - RNA, 32 nt, Human
cucccucagccugcaaccucuauccuggaacc

SEQ ID NO: 397574 - RNA, 32 nt, Human
cucccucagcucacuccgagccuggagaacug

SEQ ID NO: 397575 - RNA, 21 nt, Human
cucccucagcuuguccugagu

SEQ ID NO: 397576 - RNA, 32 nt, Human
cucccucaggaucaggugcccugcagacccag

SEQ ID NO: 397577 - RNA, 32 nt, Human
cucccucaggcagagcagggaggaggcugaca

SEQ ID NO: 397578 - RNA, 32 nt, Human
cucccucaggggaggugggccaugcagcuaac

SEQ ID NO: 397579 - RNA, 32 nt, Human
cucccucagucuccucuccaugcccaagucgg

SEQ ID NO: 397580 - RNA, 32 nt, Human
cucccucagucuggcacccacugcuacacuca

SEQ ID NO: 397581 - RNA, 32 nt, Human
cucccucagucuggcccuuccuuuucgcagga

SEQ ID NO: 397582 - RNA, 32 nt, Human
cucccucauuguaaagacagcucuucccccug

SEQ ID NO: 397583 - RNA, 32 nt, Human
cucccucauuugagcaauacucucauuuccuc

SEQ ID NO: 397584 - RNA, 21 nt, Human
cucccuccaaccucccuccca

SEQ ID NO: 397585 - RNA, 23 nt, Human
cucccuccaaggaccaggucuca

SEQ ID NO: 397586 - RNA, 32 nt, Human
cucccuccacacagccacacugccucaugcag

SEQ ID NO: 397587 - RNA, 32 nt, Human
cucccuccacagucuccuuggcauuccaugac

SEQ ID NO: 397588 - RNA, 32 nt, Human
cucccuccaccaggauggcagccaggagcggc

SEQ ID NO: 397589 - RNA, 32 nt, Human
cucccuccaccuccucuccaccugcuggugag

SEQ ID NO: 397590 - RNA, 32 nt, Human
cucccuccacggucaccuucaacgcccagaca

SEQ ID NO: 397591 - RNA, 32 nt, Human
cucccuccagaacacaaaucagagggaaaggg

SEQ ID NO: 397592 - RNA, 32 nt, Human
cucccuccagcccagcuccauucuuuggcaua

SEQ ID NO: 397593 - RNA, 32 nt, Human
cucccuccagcccucgcuaugugccucugcca

SEQ ID NO: 397594 - RNA, 32 nt, Human
cucccuccagccugucccuggccaagccgccu

SEQ ID NO: 397595 - RNA, 32 nt, Human
cucccuccagcucugcuuaggcauuuugcccc

SEQ ID NO: 397596 - RNA, 19 nt, Human
cucccuccagcuguuuuca

SEQ ID NO: 397597 - RNA, 32 nt, Human
cucccuccagcuguuuucacucauuagcuccu

SEQ ID NO: 397598 - RNA, 32 nt, Human
cucccuccaucuuccuccccuuucccuuccag

SEQ ID NO: 397599 - RNA, 32 nt, Human
cucccuccaucuuccuccccuuuuccuuccag

SEQ ID NO: 397600 - RNA, 32 nt, Human
cucccuccaucuuugcauaguuucuggccccu

SEQ ID NO: 397601 - RNA, 32 nt, Human
cucccucccacacccagccuacuggguggacu

SEQ ID NO: 397602 - RNA, 32 nt, Human
cucccucccacaugggcauacaugcuguguau

SEQ ID NO: 397603 - RNA, 32 nt, Human
cucccucccagagcaccugcugucuggguggc

SEQ ID NO: 397604 - RNA, 32 nt, Human
cucccucccaggccgcacagguccugccaagc

SEQ ID NO: 397605 - RNA, 32 nt, Human
cucccuccccacuccuagcugcuccaggggca

SEQ ID NO: 397606 - RNA, 21 nt, Human
cucccuccccgcccgcacggc

SEQ ID NO: 397607 - RNA, 32 nt, Human
cucccuccccuagagcuauucuccuuuggguu

SEQ ID NO: 397608 - RNA, 32 nt, Human
cucccuccccuccuacuucucucacacucacc

SEQ ID NO: 397609 - RNA, 32 nt, Human
cucccuccccucuccacccuucagugcuggga

SEQ ID NO: 397610 - RNA, 31 nt, Human
cucccuccccucucugcugggucugugcgcu

SEQ ID NO: 397611 - RNA, 32 nt, Human
cucccuccccugccaccucuguccucaccuug

SEQ ID NO: 397612 - RNA, 32 nt, Human
cucccuccccuggcccccgggauuuccucugc

SEQ ID NO: 397613 - RNA, 32 nt, Human
cucccucccgccucaguggaucaugcccaggg

SEQ ID NO: 397614 - RNA, 21 nt, Human
cucccucccgccucccggguc

SEQ ID NO: 397615 - RNA, 22 nt, Human
cucccucccgggagugcgcacg

SEQ ID NO: 397616 - RNA, 32 nt, Human
cucccucccgggcugcucucuccacaucuccu

SEQ ID NO: 397617 - RNA, 18 nt, Human
cucccucccgucccccaa

SEQ ID NO: 397618 - RNA, 32 nt, Human
cucccucccuacugcuuccuaggagcuuccuc

SEQ ID NO: 397619 - RNA, 32 nt, Human
cucccucccuagcccuuccagccugggacaca

SEQ ID NO: 397620 - RNA, 32 nt, Human
cucccucccuccagcaucccucgggaaccuca

SEQ ID NO: 397621 - RNA, 32 nt, Human
cucccucccucccuccuccuccuuccucguuc

SEQ ID NO: 397622 - RNA, 32 nt, Human
cucccucccucccucuauccauucaucgugag

SEQ ID NO: 397623 - RNA, 32 nt, Human
cucccucccuccggauccccgcucucuccccg

SEQ ID NO: 397624 - RNA, 32 nt, Human
cucccucccucucuccccagcugccuccuccu

SEQ ID NO: 397625 - RNA, 18 nt, Human
cucccucccugccugcca

SEQ ID NO: 397626 - RNA, 32 nt, Human
cucccucccugccuucacuccccguccugccg

SEQ ID NO: 397627 - RNA, 32 nt, Human
cucccucccuguucucugccucuuguaccccu

SEQ ID NO: 397628 - RNA, 32 nt, Human
cucccucccuuccccgacggcuucuggcggcc

SEQ ID NO: 397629 - RNA, 32 nt, Human
cucccucccuuucccucccucgucgacuguuu

SEQ ID NO: 397630 - RNA, 32 nt, Human
cucccucccuuuccuccccucccugccucccu

SEQ ID NO: 397631 - RNA, 32 nt, Human
cucccucccuuucuaucguucucucuuugcau

SEQ ID NO: 397632 - RNA, 32 nt, Human
cucccucccuuucugucuuccucucuuuccuc

SEQ ID NO: 397633 - RNA, 32 nt, Human
cucccucccuuucuuccuuccuuccuugaugg

SEQ ID NO: 397634 - RNA, 32 nt, Human
cucccucccuuucuuucuuucuuucuaucucu

SEQ ID NO: 397635 - RNA, 32 nt, Human
cucccuccgagaggaggccagagggagaggag

SEQ ID NO: 397636 - RNA, 22 nt, Human
cucccuccgauccuuccuccca

SEQ ID NO: 397637 - RNA, 32 nt, Human
cucccuccggcuuggcagacucagccugucac

SEQ ID NO: 397638 - RNA, 32 nt, Human
cucccuccgugccuccccgccuuuucugcaga

SEQ ID NO: 397639 - RNA, 32 nt, Human
cucccuccuaacccucuccuugccugacaggg

SEQ ID NO: 397640 - RNA, 32 nt, Human
cucccuccuaguucugccccaggcucuucuuu

SEQ ID NO: 397641 - RNA, 21 nt, Human
cucccuccucaagcuguccuc

SEQ ID NO: 397642 - RNA, 32 nt, Human
cucccuccucaccuguccugugcuucucuuuc

SEQ ID NO: 397643 - RNA, 23 nt, Human
cucccuccuccacaccuugagug

SEQ ID NO: 397644 - RNA, 32 nt, Human
cucccuccuccaccgccacucccuuggccucg

SEQ ID NO: 397645 - RNA, 32 nt, Human
cucccuccuccacugacuccaacccugccuug

SEQ ID NO: 397646 - RNA, 32 nt, Human
cucccuccuccaggaagccuuccccuaccccu

SEQ ID NO: 397647 - RNA, 32 nt, Human
cucccuccuccaggcagccuuccuggucuacc

SEQ ID NO: 397648 - RNA, 21 nt, Human
cucccuccuccaggccugccu

SEQ ID NO: 397649 - RNA, 32 nt, Human
cucccuccucccaaccuccacccucaaguagg

SEQ ID NO: 397650 - RNA, 32 nt, Human
cucccuccucccaggcuggugugagugugcgu

SEQ ID NO: 397651 - RNA, 32 nt, Human
cucccuccuccccucccuccagucuccggauc

SEQ ID NO: 397652 - RNA, 32 nt, Human
cucccuccuccccuccuacucccuuuucucac

SEQ ID NO: 397653 - RNA, 32 nt, Human
cucccuccuccucauucccuuccaucucccuc

SEQ ID NO: 397654 - RNA, 32 nt, Human
cucccuccuccuuuuccccucucccuccuacu

SEQ ID NO: 397655 - RNA, 32 nt, Human
cucccuccucuccuuugagaggcccauguguc

SEQ ID NO: 397656 - RNA, 32 nt, Human
cucccuccucugguguuaaggcugcuuugggg

SEQ ID NO: 397657 - RNA, 32 nt, Human
cucccuccugcucuguccagguggucuggacc

SEQ ID NO: 397658 - RNA, 32 nt, Human
cucccuccugggaggccuuagcucuagaguga

SEQ ID NO: 397659 - RNA, 32 nt, Human
cucccuccuugcaguuggaucccuggcgggug

SEQ ID NO: 397660 - RNA, 22 nt, Human
cucccuccuuuauucccuggcc

SEQ ID NO: 397661 - RNA, 32 nt, Human
cucccuccuuucucccuuccuuccuuucuucc

SEQ ID NO: 397662 - RNA, 32 nt, Human
cucccucgaagcugcuguucucuugucugucu

SEQ ID NO: 397663 - RNA, 32 nt, Human
cucccucgacccucccccuccuugucccucug

SEQ ID NO: 397664 - RNA, 32 nt, Human
cucccucgagacuggccagcccaccucucccg

SEQ ID NO: 397665 - RNA, 32 nt, Human
cucccucgauccccagcaccccuccaggccca

SEQ ID NO: 397666 - RNA, 32 nt, Human
cucccucgccuaaagugcagcagcagcuccuc

SEQ ID NO: 397667 - RNA, 32 nt, Human
cucccucgcgcaucuccagccuaaggguuguc

SEQ ID NO: 397668 - RNA, 32 nt, Human
cucccucgcuucuucucucuuucuuacuucuu

SEQ ID NO: 397669 - RNA, 32 nt, Human
cucccucggagacgcagguugcaguggacauu

SEQ ID NO: 397670 - RNA, 22 nt, Human
cucccucggccugggauuucag

SEQ ID NO: 397671 - RNA, 32 nt, Human
cucccucgggcaggcccagagagccagagugg

SEQ ID NO: 397672 - RNA, 21 nt, Human
cucccucggguuugccuugag

SEQ ID NO: 397673 - RNA, 32 nt, Human
cucccucuauugcccaggcuggagugcagugg

SEQ ID NO: 397674 - RNA, 21 nt, Human
cucccucucacaggccugccu

SEQ ID NO: 397675 - RNA, 32 nt, Human
cucccucucagcagcuguucugcccaggcagg

SEQ ID NO: 397676 - RNA, 32 nt, Human
cucccucucaggcagagagguugccgagugau

SEQ ID NO: 397677 - RNA, 32 nt, Human
cucccucucagggguagcagagacaggguugc

SEQ ID NO: 397678 - RNA, 32 nt, Human
cucccucucauggcuaguaggagagacuggug

SEQ ID NO: 397679 - RNA, 32 nt, Human
cucccucuccacccccacuuucucuucuuccu

SEQ ID NO: 397680 - RNA, 32 nt, Human
cucccucuccaccuccuuuccucccccaucca

SEQ ID NO: 397681 - RNA, 32 nt, Human
cucccucuccagcccccgauguggacccgggg

SEQ ID NO: 397682 - RNA, 32 nt, Human
cucccucucccagaccagcuaguuuggggcug

SEQ ID NO: 397683 - RNA, 32 nt, Human
cucccucuccccuucaucuucugcuccaaagg

SEQ ID NO: 397684 - RNA, 32 nt, Human
cucccucuccccuuuuggagucuccuguaucu

SEQ ID NO: 397685 - RNA, 32 nt, Human
cucccucucccucucccacucucccucucuuu

SEQ ID NO: 397686 - RNA, 32 nt, Human
cucccucuccuccccucuccuccccuccccuc

SEQ ID NO: 397687 - RNA, 20 nt, Human
cucccucuccucuccucucu

SEQ ID NO: 397688 - RNA, 32 nt, Human
cucccucucuccauucuucucucagcuuuccu

SEQ ID NO: 397689 - RNA, 32 nt, Human
cucccucucucccucuuccucucccuuccagg

SEQ ID NO: 397690 - RNA, 32 nt, Human
cucccucucucucccucucucucccucucucu

SEQ ID NO: 397691 - RNA, 32 nt, Human
cucccucucucucccucucugccuccuccugc

SEQ ID NO: 397692 - RNA, 32 nt, Human
cucccucucugccuccuccugccugucugcac

SEQ ID NO: 397693 - RNA, 21 nt, Human
cucccucucugucccuuggca

SEQ ID NO: 397694 - RNA, 32 nt, Human
cucccucucuuccucccuuccuccucucccca

SEQ ID NO: 397695 - RNA, 32 nt, Human
cucccucucuuucaggggcugccugggccucu

SEQ ID NO: 397696 - RNA, 32 nt, Human
cucccucugcaagcucuguccucauugcaugu

SEQ ID NO: 397697 - RNA, 18 nt, Human
cucccucugccaagccug

SEQ ID NO: 397698 - RNA, 32 nt, Human
cucccucugccaaggacucauggccaagccag

SEQ ID NO: 397699 - RNA, 18 nt, Human
cucccucugccggcucug

SEQ ID NO: 397700 - RNA, 32 nt, Human
cucccucugccuccuccaugaaggucuccugg

SEQ ID NO: 397701 - RNA, 32 nt, Human
cucccucugcgggcuucucuugcucugagccu

SEQ ID NO: 397702 - RNA, 32 nt, Human
cucccucugcugucuguucuauucaaguucuu

SEQ ID NO: 397703 - RNA, 32 nt, Human
cucccucugggcuggagcucagugagggacaa

SEQ ID NO: 397704 - RNA, 32 nt, Human
cucccucugucacccaggcuagagggugguga

SEQ ID NO: 397705 - RNA, 32 nt, Human
cucccucugucacccaggcuggagugcagugg

SEQ ID NO: 397706 - RNA, 32 nt, Human
cucccucugucccccaggcuggagugcagugg

SEQ ID NO: 397707 - RNA, 32 nt, Human
cucccucuguugcccaggcuggagugcagagg

SEQ ID NO: 397708 - RNA, 32 nt, Human
cucccucuguugcccaggcuggagugcagugg

SEQ ID NO: 397709 - RNA, 32 nt, Human
cucccucuguuguccccuccucaggcuucugu

SEQ ID NO: 397710 - RNA, 32 nt, Human
cucccucuuacuaaaaacaauaguaguuucug

SEQ ID NO: 397711 - RNA, 32 nt, Human
cucccucuucuccccucccccuccucaccguc

SEQ ID NO: 397712 - RNA, 32 nt, Human
cucccucuuggcacuccaggcaaggcaggugc

SEQ ID NO: 397713 - RNA, 32 nt, Human
cucccucuuuacccuccccuccagugaauguu

SEQ ID NO: 397714 - RNA, 32 nt, Human
cucccucuuuggcuacucaccugcugcggcua

SEQ ID NO: 397715 - RNA, 32 nt, Human
cucccucuuuucaguuucucccccuccucucc

SEQ ID NO: 397716 - RNA, 23 nt, Human
cucccucuuuugccacugucugg

SEQ ID NO: 397717 - RNA, 16 nt, Human
cucccugaacccagcc

SEQ ID NO: 397718 - RNA, 32 nt, Human
cucccugacaacacaaaacuagagccaggggc

SEQ ID NO: 397719 - RNA, 32 nt, Human
cucccugacaauguggccuggccaagcugacg

SEQ ID NO: 397720 - RNA, 32 nt, Human
cucccugacaugcucacacacugucacacuca

SEQ ID NO: 397721 - RNA, 32 nt, Human
cucccugacccuuaacacuccuguccugccca

SEQ ID NO: 397722 - RNA, 32 nt, Human
cucccugaccucuucgccgcagcucaccggcc

SEQ ID NO: 397723 - RNA, 32 nt, Human
cucccugaccugcguuauaucuucccacuggg

SEQ ID NO: 397724 - RNA, 32 nt, Human
cucccugacuccaaagccugugcucuuaacca

SEQ ID NO: 397725 - RNA, 23 nt, Human
cucccugacucucaucucccucu

SEQ ID NO: 397726 - RNA, 24 nt, Human
cucccugagaagcugggaccacag

SEQ ID NO: 397727 - RNA, 32 nt, Human
cucccugagaagcugggaccacaggccuggcu

SEQ ID NO: 397728 - RNA, 32 nt, Human
cucccugagcagcugggaauacaagcauacac

SEQ ID NO: 397729 - RNA, 21 nt, Human
cucccugagcgggacggcagg

SEQ ID NO: 397730 - RNA, 32 nt, Human
cucccugagcuuccuguacccugacccucucc

SEQ ID NO: 397731 - RNA, 32 nt, Human
cucccugaggaccaccuccuacacuauugacc

SEQ ID NO: 397732 - RNA, 32 nt, Human
cucccugaguagcugggacuacaggcacacac

SEQ ID NO: 397733 - RNA, 32 nt, Human
cucccugaguggcagggauuacaggaacccac

SEQ ID NO: 397734 - RNA, 21 nt, Human
cucccugaucccagaccuguc

SEQ ID NO: 397735 - RNA, 32 nt, Human
cucccugaucccgugugccaccaggagggagu

SEQ ID NO: 397736 - RNA, 32 nt, Human
cucccugauugucaagaccuacucugaagauc

SEQ ID NO: 397737 - RNA, 32 nt, Human
cucccugauuuuccuuucguuucuucuuuauu

SEQ ID NO: 397738 - RNA, 32 nt, Human
cucccugcaaagcagcucaacaagagaaaaag

SEQ ID NO: 397739 - RNA, 32 nt, Human
cucccugcaaccuccaccuccuggguucaaac

SEQ ID NO: 397740 - RNA, 32 nt, Human
cucccugcaaccuccaccuccuggguucaagc

SEQ ID NO: 397741 - RNA, 32 nt, Human
cucccugcaaccuccgccuccuggauuccagc

SEQ ID NO: 397742 - RNA, 32 nt, Human
cucccugcaaccuccgccuccuggguucaagc

SEQ ID NO: 397743 - RNA, 32 nt, Human
cucccugcaaccuccgccuccuggguugaagc

SEQ ID NO: 397744 - RNA, 32 nt, Human
cucccugcaagacagaugggaauguguauaau

SEQ ID NO: 397745 - RNA, 32 nt, Human
cucccugcaagcugagccccugugugcccaga

SEQ ID NO: 397746 - RNA, 32 nt, Human
cucccugcacacaccagaacccacacgcuggu

SEQ ID NO: 397747 - RNA, 32 nt, Human
cucccugcacugccacagcccagaugcaguuc

SEQ ID NO: 397748 - RNA, 32 nt, Human
cucccugcacugcugaagcccagaugccucgc

SEQ ID NO: 397749 - RNA, 32 nt, Human
cucccugcacuucccguucucagcacuuaaug

SEQ ID NO: 397750 - RNA, 32 nt, Human
cucccugcagagccgagggccuuggcccagcc

SEQ ID NO: 397751 - RNA, 32 nt, Human
cucccugcagccaccagacuuggccuccagcu

SEQ ID NO: 397752 - RNA, 32 nt, Human
cucccugcagcucagcgcagcccagggcucca

SEQ ID NO: 397753 - RNA, 19 nt, Human
cucccugccaccguugccg

SEQ ID NO: 397754 - RNA, 32 nt, Human
cucccugccagcaugccugccugcccaccuca

SEQ ID NO: 397755 - RNA, 32 nt, Human
cucccugccagcugcccccaccgccuuccccu

SEQ ID NO: 397756 - RNA, 32 nt, Human
cucccugccagcugcccuauguagcuccuaac

SEQ ID NO: 397757 - RNA, 32 nt, Human
cucccugccaggccaagccagguguccucuug

SEQ ID NO: 397758 - RNA, 31 nt, Human
cucccugcccacucugggccuugcugacacc

SEQ ID NO: 397759 - RNA, 32 nt, Human
cucccugcccagccagggacuucuacucugca

SEQ ID NO: 397760 - RNA, 32 nt, Human
cucccugccccaggacuucaucggagcaggca

SEQ ID NO: 397761 - RNA, 32 nt, Human
cucccugccccagggagcucacgccaggcagg

SEQ ID NO: 397762 - RNA, 32 nt, Human
cucccugcccccgacauggcucaggagaagau

SEQ ID NO: 397763 - RNA, 31 nt, Human
cucccugcccucucuggccucuggggucaua

SEQ ID NO: 397764 - RNA, 32 nt, Human
cucccugcccucugcacuaagcacuuuccagg

SEQ ID NO: 397765 - RNA, 21 nt, Human
cucccugccgccgccgccgcc

SEQ ID NO: 397766 - RNA, 22 nt, Human
cucccugccgcgccgccgccgc

SEQ ID NO: 397767 - RNA, 32 nt, Human
cucccugccgggaggcgcaaaaagcaacuccc

SEQ ID NO: 397768 - RNA, 32 nt, Human
cucccugccucagcucccugcccagccagccu

SEQ ID NO: 397769 - RNA, 32 nt, Human
cucccugccuccaagccuggugccacaggccu

SEQ ID NO: 397770 - RNA, 32 nt, Human
cucccugccuccgcgcugcagccccugccgua

SEQ ID NO: 397771 - RNA, 20 nt, Human
cucccugccuccuccucucu

SEQ ID NO: 397772 - RNA, 32 nt, Human
cucccugccuccuccuuccugccugugaugcu

SEQ ID NO: 397773 - RNA, 23 nt, Human
cucccugccuccuggagggacag

SEQ ID NO: 397774 - RNA, 22 nt, Human
cucccugccucgcucgcugccg

SEQ ID NO: 397775 - RNA, 32 nt, Human
cucccugccucuccucacccucccucucuucc

SEQ ID NO: 397776 - RNA, 21 nt, Human
cucccugccugcuccuuggca

SEQ ID NO: 397777 - RNA, 21 nt, Human
cucccugccuggcccccaacc

SEQ ID NO: 397778 - RNA, 32 nt, Human
cucccugccugggaccacacaccccugggaua

SEQ ID NO: 397779 - RNA, 32 nt, Human
cucccugccuugugaguggccugcugccucac

SEQ ID NO: 397780 - RNA, 32 nt, Human
cucccugccuuucaaagcucucucccccauga

SEQ ID NO: 397781 - RNA, 32 nt, Human
cucccugccuuuccucugccuccuccccugcc

SEQ ID NO: 397782 - RNA, 32 nt, Human
cucccugcgcccagccucuccccagcauguaa

SEQ ID NO: 397783 - RNA, 21 nt, Human
cucccugcgccgccgccgccg

SEQ ID NO: 397784 - RNA, 22 nt, Human
cucccugcgccgccuccuccca

SEQ ID NO: 397785 - RNA, 22 nt, Human
cucccugcgucgccagccaccg

SEQ ID NO: 397786 - RNA, 32 nt, Human
cucccugcuaccauuauauuuugggguuaugu

SEQ ID NO: 397787 - RNA, 32 nt, Human
cucccugcuaccuccugcugggcugcuccugg

SEQ ID NO: 397788 - RNA, 32 nt, Human
cucccugcuauaauccuagcacuuugggaggc

SEQ ID NO: 397789 - RNA, 32 nt, Human
cucccugcuccagggaugugagcacccacucc

SEQ ID NO: 397790 - RNA, 32 nt, Human
cucccugcucccagcugcuuuacuaaggggaa

SEQ ID NO: 397791 - RNA, 32 nt, Human
cucccugcucccucccuccaccggggaagggc

SEQ ID NO: 397792 - RNA, 20 nt, Human
cucccugcucgcuccggguc

SEQ ID NO: 397793 - RNA, 21 nt, Human
cucccugcugcuuggauugca

SEQ ID NO: 397794 - RNA, 19 nt, Human
cucccugcugggagugcug

SEQ ID NO: 397795 - RNA, 32 nt, Human
cucccugcuggugccuuauagcuccccuccca

SEQ ID NO: 397796 - RNA, 32 nt, Human
cucccugcuguucaccagcugcaugaccuuga

SEQ ID NO: 397797 - RNA, 32 nt, Human
cucccugcuuccuucugcauucccaagccggc

SEQ ID NO: 397798 - RNA, 32 nt, Human
cucccugcuuggcucugucucuccacacccgg

SEQ ID NO: 397799 - RNA, 32 nt, Human
cucccuggacacucaaggcucuuguggugaca

SEQ ID NO: 397800 - RNA, 32 nt, Human
cucccuggacagagaggaaggagguggagcag

SEQ ID NO: 397801 - RNA, 32 nt, Human
cucccuggacugaagagagggagaauagaagc

SEQ ID NO: 397802 - RNA, 32 nt, Human
cucccuggagcaccgagacuccuggggcugug

SEQ ID NO: 397803 - RNA, 32 nt, Human
cucccuggagcugggggagcucagggaccccc

SEQ ID NO: 397804 - RNA, 32 nt, Human
cucccuggaggaaaaugcucauuauuucugcu

SEQ ID NO: 397805 - RNA, 32 nt, Human
cucccuggaggacucuagaagcucagguuccc

SEQ ID NO: 397806 - RNA, 32 nt, Human
cucccuggagugcaguuuccaaucccauagau

SEQ ID NO: 397807 - RNA, 32 nt, Human
cucccuggauccuccccgugacuggccgggcc

SEQ ID NO: 397808 - RNA, 32 nt, Human
cucccuggcacgcucuucucacccucaacuuc

SEQ ID NO: 397809 - RNA, 19 nt, Human
cucccuggcagcucaaggg

SEQ ID NO: 397810 - RNA, 32 nt, Human
cucccuggcaggcaggcugugggcuggugggg

SEQ ID NO: 397811 - RNA, 32 nt, Human
cucccuggcaucaccaugccuggcugcagcca

SEQ ID NO: 397812 - RNA, 32 nt, Human
cucccuggcauugggagagccccacacggccu

SEQ ID NO: 397813 - RNA, 32 nt, Human
cucccuggccuacucaguuggccaaggugcag

SEQ ID NO: 397814 - RNA, 32 nt, Human
cucccuggccuccagagguggcgugggcuggc

SEQ ID NO: 397815 - RNA, 32 nt, Human
cucccuggccugugcuuccucccuccaugcuc

SEQ ID NO: 397816 - RNA, 32 nt, Human
cucccuggcucugcccuucuuacugcaaacca

SEQ ID NO: 397817 - RNA, 32 nt, Human
cucccuggcugaaccccugccacccuacuccu

SEQ ID NO: 397818 - RNA, 32 nt, Human
cucccuggcugcacuuggcuggguuugcaguc

SEQ ID NO: 397819 - RNA, 32 nt, Human
cucccuggcugcagccuccgggguucagccuc

SEQ ID NO: 397820 - RNA, 32 nt, Human
cucccuggcuguguugugcacgcacaguuccc

SEQ ID NO: 397821 - RNA, 32 nt, Human
cucccuggcuuacaccuccugcuccuuccugc

SEQ ID NO: 397822 - RNA, 32 nt, Human
cucccuggcuucuucccuuuacccagggcggg

SEQ ID NO: 397823 - RNA, 32 nt, Human
cucccugggaaaagucuguugcuuugguucuc

SEQ ID NO: 397824 - RNA, 32 nt, Human
cucccugggaacccuggcccagaggaacagcu

SEQ ID NO: 397825 - RNA, 32 nt, Human
cucccugggaagccuccgggugauaggggugu

SEQ ID NO: 397826 - RNA, 32 nt, Human
cucccugggaggaugagcuggggcccuuuuuc

SEQ ID NO: 397827 - RNA, 32 nt, Human
cucccugggaguggguggaggcagccagggcu

SEQ ID NO: 397828 - RNA, 17 nt, Human
cucccugggcacagagu

SEQ ID NO: 397829 - RNA, 32 nt, Human
cucccugggcaggaagacugaggaggaaggga

SEQ ID NO: 397830 - RNA, 32 nt, Human
cucccugggcaggggaguucugaggcuccugc

SEQ ID NO: 397831 - RNA, 32 nt, Human
cucccugggccuggccccacugcccugugagg

SEQ ID NO: 397832 - RNA, 32 nt, Human
cucccugggcugggacccuuucuugccucccc

SEQ ID NO: 397833 - RNA, 32 nt, Human
cucccugggcuucaccucuucaccugugggcu

SEQ ID NO: 397834 - RNA, 32 nt, Human
cucccuggggagaagagaauauucagaacagc

SEQ ID NO: 397835 - RNA, 32 nt, Human
cucccuggggcagcagccaccauguucucgug

SEQ ID NO: 397836 - RNA, 32 nt, Human
cucccuggggcggaaccuggaggugcuguuuc

SEQ ID NO: 397837 - RNA, 32 nt, Human
cucccuggggcugaggggcugcaaggagaagu

SEQ ID NO: 397838 - RNA, 24 nt, Human
cucccuggguccuggauccuccaa

SEQ ID NO: 397839 - RNA, 32 nt, Human
cucccugggugagguggguccucuggccucag

SEQ ID NO: 397840 - RNA, 24 nt, Human
cucccugggugcugggauugcagg

SEQ ID NO: 397841 - RNA, 32 nt, Human
cucccuggguuugacuguaugugcagacuuug

SEQ ID NO: 397842 - RNA, 24 nt, Human
cucccugguagcugggauuacagg

SEQ ID NO: 397843 - RNA, 32 nt, Human
cucccuggucuggcccccuccuccggguuagg

SEQ ID NO: 397844 - RNA, 32 nt, Human
cucccuggugagccacugugggccacucgcca

SEQ ID NO: 397845 - RNA, 32 nt, Human
cucccuggugcuggguuucuggccuuugguga

SEQ ID NO: 397846 - RNA, 32 nt, Human
cucccugguggccacucuuugcucugaagccc

SEQ ID NO: 397847 - RNA, 32 nt, Human
cucccugguucugcagagggccagaagaauga

SEQ ID NO: 397848 - RNA, 32 nt, Human
cucccuguccacugcacuccucccaccucauu

SEQ ID NO: 397849 - RNA, 32 nt, Human
cucccuguccccaccaccccugccccacccag

SEQ ID NO: 397850 - RNA, 32 nt, Human
cucccugucccugggcaggagugcuggugagg

SEQ ID NO: 397851 - RNA, 32 nt, Human
cucccugucccugucaaauaaaccagaacaaa

SEQ ID NO: 397852 - RNA, 32 nt, Human
cucccuguccuccuucuuggucucacacuugg

SEQ ID NO: 397853 - RNA, 32 nt, Human
cucccugucuacaccugagcacugcaggagau

SEQ ID NO: 397854 - RNA, 32 nt, Human
cucccugucuacccaucucugcugcuccagcu

SEQ ID NO: 397855 - RNA, 32 nt, Human
cucccugucuccacuuaucucucaugauuggg

SEQ ID NO: 397856 - RNA, 17 nt, Human
cucccugucucuccuca

SEQ ID NO: 397857 - RNA, 32 nt, Human
cucccugucugcuuccgcagaugaaauucucu

SEQ ID NO: 397858 - RNA, 32 nt, Human
cucccugucuucauucuccacgcagccuggug

SEQ ID NO: 397859 - RNA, 32 nt, Human
cucccugugccuguaauaccaugucuucccau

SEQ ID NO: 397860 - RNA, 18 nt, Human
cucccugugcuccugcca

SEQ ID NO: 397861 - RNA, 32 nt, Human
cucccugugcugcuuguagacaguucccauaa

SEQ ID NO: 397862 - RNA, 32 nt, Human
cucccuguggagaucagugaagacugggagga

SEQ ID NO: 397863 - RNA, 32 nt, Human
cucccuguggccuucugagauugcaggagaug

SEQ ID NO: 397864 - RNA, 32 nt, Human
cucccuguggugggggauggcagaggcuuccc

SEQ ID NO: 397865 - RNA, 31 nt, Human
cucccuguguucccugggccucagcuguucc

SEQ ID NO: 397866 - RNA, 32 nt, Human
cucccuguucacggugacacaggucagggcuc

SEQ ID NO: 397867 - RNA, 32 nt, Human
cucccuguuccucuccccgccaccccagggcc

SEQ ID NO: 397868 - RNA, 32 nt, Human
cucccuguugcccaaguuggagugcaaucuug

SEQ ID NO: 397869 - RNA, 32 nt, Human
cucccuuacuccccucucgcucccucuacccu

SEQ ID NO: 397870 - RNA, 24 nt, Human
cucccuuacucuguauccccggcu

SEQ ID NO: 397871 - RNA, 22 nt, Human
cucccuuagccuuuauccugcc

SEQ ID NO: 397872 - RNA, 24 nt, Human
cucccuuagcugcuaagccugccu

SEQ ID NO: 397873 - RNA, 18 nt, Human
cucccuuaggccugugug

SEQ ID NO: 397874 - RNA, 32 nt, Human
cucccuuagugcuuuuugucccuucccgaaca

SEQ ID NO: 397875 - RNA, 22 nt, Human
cucccuuaguguucccuggccu

SEQ ID NO: 397876 - RNA, 32 nt, Human
cucccuuaucucuucauauucuuuauucccua

SEQ ID NO: 397877 - RNA, 32 nt, Human
cucccuuauuuacucuaaacaguguuaugccu

SEQ ID NO: 397878 - RNA, 32 nt, Human
cucccuucagaugaccauugcuagcaagaaac

SEQ ID NO: 397879 - RNA, 32 nt, Human
cucccuucaggcggagguugcagugagccgag

SEQ ID NO: 397880 - RNA, 32 nt, Human
cucccuucaugggccucccagggaaggaggaa

SEQ ID NO: 397881 - RNA, 32 nt, Human
cucccuuccaccugcagcaccaggaagccauu

SEQ ID NO: 397882 - RNA, 32 nt, Human
cucccuuccagcuguggcaaagcuauauuucu

SEQ ID NO: 397883 - RNA, 32 nt, Human
cucccuucccaggucaccagcuugggaccucc

SEQ ID NO: 397884 - RNA, 32 nt, Human
cucccuuccccacuccauggcgccagccuccu

SEQ ID NO: 397885 - RNA, 32 nt, Human
cucccuucccccaccccaucaggaugauauga

SEQ ID NO: 397886 - RNA, 24 nt, Human
cucccuuccccccucccugucugg

SEQ ID NO: 397887 - RNA, 32 nt, Human
cucccuucccccugcuucaggcugcugagcac

SEQ ID NO: 397888 - RNA, 23 nt, Human
cucccuuccccugccugcugcug

SEQ ID NO: 397889 - RNA, 32 nt, Human
cucccuucccuccaccggacgggugacugacu

SEQ ID NO: 397890 - RNA, 32 nt, Human
cucccuucccuccagcccaugccaggagcuug

SEQ ID NO: 397891 - RNA, 32 nt, Human
cucccuuccgcuccugcccagccugggggaag

SEQ ID NO: 397892 - RNA, 32 nt, Human
cucccuuccggaagaugcugaggaugacagcu

SEQ ID NO: 397893 - RNA, 32 nt, Human
cucccuuccuacaguccuuggguagacugaga

SEQ ID NO: 397894 - RNA, 21 nt, Human
cucccuuccuccaagcuucuc

SEQ ID NO: 397895 - RNA, 22 nt, Human
cucccuuccucccaacuccuca

SEQ ID NO: 397896 - RNA, 32 nt, Human
cucccuuccucccuuucuuaccacagauggga

SEQ ID NO: 397897 - RNA, 20 nt, Human
cucccuuccuccucugcuca

SEQ ID NO: 397898 - RNA, 32 nt, Human
cucccuuccucuccaucucucccucucuccaa

SEQ ID NO: 397899 - RNA, 32 nt, Human
cucccuuccugccucauuucaucccccgcagc

SEQ ID NO: 397900 - RNA, 32 nt, Human
cucccuuccuuguccuuguccucugcccuuuu

SEQ ID NO: 397901 - RNA, 22 nt, Human
cucccuuccuuuaucgugucuc

SEQ ID NO: 397902 - RNA, 32 nt, Human
cucccuuccuuuccuuuccgcuccucuuccga

SEQ ID NO: 397903 - RNA, 19 nt, Human
cucccuucgcugggugccg

SEQ ID NO: 397904 - RNA, 32 nt, Human
cucccuucucacugccacugcucuugccucuu

SEQ ID NO: 397905 - RNA, 18 nt, Human
cucccuucucagccucgu

SEQ ID NO: 397906 - RNA, 32 nt, Human
cucccuucuccccaaagcgcuccaagagaaag

SEQ ID NO: 397907 - RNA, 32 nt, Human
cucccuucuccccucuuuccuucugccggucc

SEQ ID NO: 397908 - RNA, 18 nt, Human
cucccuucuccuucccgg

SEQ ID NO: 397909 - RNA, 21 nt, Human
cucccuucucuauccuguuuc

SEQ ID NO: 397910 - RNA, 22 nt, Human
cucccuucucucacucucacuc

SEQ ID NO: 397911 - RNA, 22 nt, Human
cucccuucucuccacgagcucg

SEQ ID NO: 397912 - RNA, 22 nt, Human
cucccuucucucuuuucuucuc

SEQ ID NO: 397913 - RNA, 32 nt, Human
cucccuucugccagccugcauccucuccucag

SEQ ID NO: 397914 - RNA, 18 nt, Human
cucccuucugcucugcca

SEQ ID NO: 397915 - RNA, 32 nt, Human
cucccuucuucugagugaauguuaacaugcgc

SEQ ID NO: 397916 - RNA, 24 nt, Human
cucccuucuuucggccgccgucuc

SEQ ID NO: 397917 - RNA, 32 nt, Human
cucccuugagauacacuaccaucuuaacuucu

SEQ ID NO: 397918 - RNA, 32 nt, Human
cucccuugaggcuuauaaugggccaaguugaa

SEQ ID NO: 397919 - RNA, 20 nt, Human
cucccuugaguuguuguaaa

SEQ ID NO: 397920 - RNA, 32 nt, Human
cucccuugcagcacgcaugggaagaaaggcca

SEQ ID NO: 397921 - RNA, 32 nt, Human
cucccuugcaggacccauccaggauuuccuuc

SEQ ID NO: 397922 - RNA, 32 nt, Human
cucccuugcaggagguggagguuguuggugga

SEQ ID NO: 397923 - RNA, 22 nt, Human
cucccuugcccccaagccuguc

SEQ ID NO: 397924 - RNA, 32 nt, Human
cucccuugccccuuuccugggcccagaaguug

SEQ ID NO: 397925 - RNA, 32 nt, Human
cucccuugccucucccccuccaccaccaccuu

SEQ ID NO: 397926 - RNA, 20 nt, Human
cucccuugcuccugaggcca

SEQ ID NO: 397927 - RNA, 29 nt, Human
cucccuugcuggccagcaucccccucuuc

SEQ ID NO: 397928 - RNA, 30 nt, Human
cucccuuggaucuccauguuucuccagaug

SEQ ID NO: 397929 - RNA, 32 nt, Human
cucccuuggcuccugcuuucugcuugggcccu

SEQ ID NO: 397930 - RNA, 32 nt, Human
cucccuugggaagacgauugacuggggaaugg

SEQ ID NO: 397931 - RNA, 32 nt, Human
cucccuugggcuguggcagcaggaggcggggg

SEQ ID NO: 397932 - RNA, 32 nt, Human
cucccuugggguccaagagggaaaugcugguc

SEQ ID NO: 397933 - RNA, 32 nt, Human
cucccuuggggucuagaggagacccccggaga

SEQ ID NO: 397934 - RNA, 32 nt, Human
cucccuuggucuuccaugggaugguuagugug

SEQ ID NO: 397935 - RNA, 32 nt, Human
cucccuuguggacaggcagggagaugcaugcg

SEQ ID NO: 397936 - RNA, 32 nt, Human
cucccuuuaaccuccagcuccuggguucaagc

SEQ ID NO: 397937 - RNA, 32 nt, Human
cucccuuuauccaaggagguggcugugcaggu

SEQ ID NO: 397938 - RNA, 32 nt, Human
cucccuuucaccaacaccgacacccacauuga

SEQ ID NO: 397939 - RNA, 32 nt, Human
cucccuuuccaaccccuuccuuccuuuuccuc

SEQ ID NO: 397940 - RNA, 22 nt, Human
cucccuuuccaagccugccugg

SEQ ID NO: 397941 - RNA, 23 nt, Human
cucccuuuccaagccugccuggg

SEQ ID NO: 397942 - RNA, 18 nt, Human
cucccuuuccacuugcca

SEQ ID NO: 397943 - RNA, 32 nt, Human
cucccuuuccaucaugggacucuggaugccgg

SEQ ID NO: 397944 - RNA, 32 nt, Human
cucccuuucccccuccccacccccuccccaac

SEQ ID NO: 397945 - RNA, 19 nt, Human
cucccuuucccgcuucugc

SEQ ID NO: 397946 - RNA, 19 nt, Human
cucccuuucccggccucgu

SEQ ID NO: 397947 - RNA, 32 nt, Human
cucccuuuccuugagcucucuggacacugcag

SEQ ID NO: 397948 - RNA, 20 nt, Human
cucccuuucuauguggcaua

SEQ ID NO: 397949 - RNA, 32 nt, Human
cucccuuucucagcagcuuugcuuguggcagg

SEQ ID NO: 397950 - RNA, 32 nt, Human
cucccuuucuccugcagccauggaugccgcuc

SEQ ID NO: 397951 - RNA, 19 nt, Human
cucccuuucucucuucugc

SEQ ID NO: 397952 - RNA, 32 nt, Human
cucccuuucucuuuucucuaccccuguguccu

SEQ ID NO: 397953 - RNA, 32 nt, Human
cucccuuucuucaugcuuccacaguuuuccuc

SEQ ID NO: 397954 - RNA, 32 nt, Human
cucccuuucuuuccuucucuccuccuuuauuu

SEQ ID NO: 397955 - RNA, 32 nt, Human
cucccuuugggcaaggaccugagacccuugug

SEQ ID NO: 397956 - RNA, 21 nt, Human
cucccuuugguaaaucugccu

SEQ ID NO: 397957 - RNA, 32 nt, Human
cucccuuuggugaccugaagucacugugacag

SEQ ID NO: 397958 - RNA, 32 nt, Human
cucccuuugucacccaggccggagugcagugg

SEQ ID NO: 397959 - RNA, 21 nt, Human
cucccuuuugucaucuugagu

SEQ ID NO: 397960 - RNA, 32 nt, Human
cucccuuuuugaaagaucuuuccuuuugaugc

SEQ ID NO: 397961 - RNA, 24 nt, Human
cuccgaaaaugcugggauuacagg

SEQ ID NO: 397962 - RNA, 32 nt, Human
cuccgaaaaugcugggauuacaggcgugagcc

SEQ ID NO: 397963 - RNA, 32 nt, Human
cuccgaaaaugcugggauuacaggugugagcc

SEQ ID NO: 397964 - RNA, 32 nt, Human
cuccgaaagugcuaggauuacaggugugagcc

SEQ ID NO: 397965 - RNA, 32 nt, Human
cuccgaaagugcugagauuacaguugcgagcc

SEQ ID NO: 397966 - RNA, 24 nt, Human
cuccgaaagugcugggaucacagg

SEQ ID NO: 397967 - RNA, 32 nt, Human
cuccgaaagugcugggaucacaggugggagcc

SEQ ID NO: 397968 - RNA, 23 nt, Human
cuccgaaagugcugggauuacag

SEQ ID NO: 397969 - RNA, 24 nt, Human
cuccgaaagugcugggauuacagg

SEQ ID NO: 397970 - RNA, 32 nt, Human
cuccgaaagugcugggauuacaggcgugagcc

SEQ ID NO: 397971 - RNA, 32 nt, Human
cuccgaaagugcugggauuacaggcgugagcu

SEQ ID NO: 397972 - RNA, 32 nt, Human
cuccgaaagugcugggauuacaguugugaguc

SEQ ID NO: 397973 - RNA, 32 nt, Human
cuccgaacauaaauaagcagccggguucagug

SEQ ID NO: 397974 - RNA, 20 nt, Human
cuccgaagccgccgccgccg

SEQ ID NO: 397975 - RNA, 32 nt, Human
cuccgaagcggggaagugggacaagaugguuu

SEQ ID NO: 397976 - RNA, 32 nt, Human
cuccgaaggcuccacuccccacuuuuacuacu

SEQ ID NO: 397977 - RNA, 32 nt, Human
cuccgaaguagcugggaauuacaggcacccac

SEQ ID NO: 397978 - RNA, 24 nt, Human
cuccgaaguagcugggauuacagg

SEQ ID NO: 397979 - RNA, 32 nt, Human
cuccgaaguagcugggauuacaggcgcccgcc

SEQ ID NO: 397980 - RNA, 32 nt, Human
cuccgaagucaauacugagaucccagaugugu

SEQ ID NO: 397981 - RNA, 32 nt, Human
cuccgaaucuggcaucaguggcugccagcggg

SEQ ID NO: 397982 - RNA, 32 nt, Human
cuccgacacccgagacugcacugaccucccuc

SEQ ID NO: 397983 - RNA, 32 nt, Human
cuccgacccauaccuucuccccacagccucug

SEQ ID NO: 397984 - RNA, 32 nt, Human
cuccgacccggccucccucccuggggccagcg

SEQ ID NO: 397985 - RNA, 32 nt, Human
cuccgacccuggcuccccuuugagcccuaauu

SEQ ID NO: 397986 - RNA, 32 nt, Human
cuccgacggcuucucauuuccccaauaccaca

SEQ ID NO: 397987 - RNA, 21 nt, Human
cuccgacugccgucgccgccg

SEQ ID NO: 397988 - RNA, 32 nt, Human
cuccgacuggggcucccugaggacagggcugu

SEQ ID NO: 397989 - RNA, 32 nt, Human
cuccgagaaaagcucucacaaagcuuuugagc

SEQ ID NO: 397990 - RNA, 32 nt, Human
cuccgagaaaugcagcugcucaaaggccuucu

SEQ ID NO: 397991 - RNA, 32 nt, Human
cuccgagagagccauggaaaagcugcugcggc

SEQ ID NO: 397992 - RNA, 32 nt, Human
cuccgagaggaggccagagggagaggaggauc

SEQ ID NO: 397993 - RNA, 32 nt, Human
cuccgagagggaccagcaccaccugggaagcc

SEQ ID NO: 397994 - RNA, 32 nt, Human
cuccgagcaugagguccgccuccugggcgaga

SEQ ID NO: 397995 - RNA, 21 nt, Human
cuccgagcccuggaggagcag

SEQ ID NO: 397996 - RNA, 32 nt, Human
cuccgagccgggcagcaacagccccggcagcg

SEQ ID NO: 397997 - RNA, 31 nt, Human
cuccgaggccagagagaaaagacugcgaggu

SEQ ID NO: 397998 - RNA, 22 nt, Human
cuccgagggccgaccgcugccg

SEQ ID NO: 397999 - RNA, 22 nt, Human
cuccgagggccgcgccaggcca

SEQ ID NO: 398000 - RNA, 32 nt, Human
cuccgaggggguggaagggggugggcacacuc

SEQ ID NO: 398001 - RNA, 32 nt, Human
cuccgaguggaacugcagccuggggacuugau

SEQ ID NO: 398002 - RNA, 17 nt, Human
cuccgauaacuguucca

SEQ ID NO: 398003 - RNA, 32 nt, Human
cuccgaucaaagccggccgugcugcuggccgg

SEQ ID NO: 398004 - RNA, 32 nt, Human
cuccgaucucacagccugucaugcugcucagu

SEQ ID NO: 398005 - RNA, 32 nt, Human
cuccgaugaaaaugccauuucuucguugccaa

SEQ ID NO: 398006 - RNA, 32 nt, Human
cuccgaugacaucugaaguugugacuucauca

SEQ ID NO: 398007 - RNA, 32 nt, Human
cuccgaugaccagcuucuuuugcucgacucua

SEQ ID NO: 398008 - RNA, 32 nt, Human
cuccgauggcugccaggagcugagcucagggu

SEQ ID NO: 398009 - RNA, 32 nt, Human
cuccgauucacuucuguucuuaggguguagcc

SEQ ID NO: 398010 - RNA, 32 nt, Human
cuccgauuugagccucuccggcugccagccag

SEQ ID NO: 398011 - RNA, 32 nt, Human
cuccgcaaaaugucagccuccaccuccucgca

SEQ ID NO: 398012 - RNA, 32 nt, Human
cuccgcaagcuggaacgugagccaggaggccc

SEQ ID NO: 398013 - RNA, 32 nt, Human
cuccgcacaauacuugaacauucaucuguacu

SEQ ID NO: 398014 - RNA, 32 nt, Human
cuccgcacacaccccaccccagccugcuauag

SEQ ID NO: 398015 - RNA, 32 nt, Human
cuccgcacuugcagguccccucccucuccgcc

SEQ ID NO: 398016 - RNA, 32 nt, Human
cuccgcagcccacacagccucugcagcccaag

SEQ ID NO: 398017 - RNA, 32 nt, Human
cuccgcagccccagcuaggagaacucgggagc

SEQ ID NO: 398018 - RNA, 32 nt, Human
cuccgcagccccagucccuggccacgcccaag

SEQ ID NO: 398019 - RNA, 32 nt, Human
cuccgcagccgcugccccggacccugacgacc

SEQ ID NO: 398020 - RNA, 30 nt, Human
cuccgcagccucuccaucugcuggcacucc

SEQ ID NO: 398021 - RNA, 20 nt, Human
cuccgcagcucugguuccug

SEQ ID NO: 398022 - RNA, 21 nt, Human
cuccgcagcuucugacacaac

SEQ ID NO: 398023 - RNA, 32 nt, Human
cuccgcaggcagagaagccgggagcgggcgag

SEQ ID NO: 398024 - RNA, 32 nt, Human
cuccgcaggccuuccuuuaggcccaggagaac

SEQ ID NO: 398025 - RNA, 22 nt, Human
cuccgcagugccgccgccgucg

SEQ ID NO: 398026 - RNA, 20 nt, Human
cuccgcaucccgggcuccug

SEQ ID NO: 398027 - RNA, 32 nt, Human
cuccgcaucuaucagcagguugccccggaugg

SEQ ID NO: 398028 - RNA, 32 nt, Human
cuccgcaucucaucuuucucuuuucaaucagg

SEQ ID NO: 398029 - RNA, 32 nt, Human
cuccgcaugccccucccuccccacggcccugc

SEQ ID NO: 398030 - RNA, 32 nt, Human
cuccgccaccgagaguccugugcuucggaaug

SEQ ID NO: 398031 - RNA, 32 nt, Human
cuccgccacugcaugcucccgccggaccgagc

SEQ ID NO: 398032 - RNA, 32 nt, Human
cuccgccagaggccacgggcgcccuuguuccc

SEQ ID NO: 398033 - RNA, 32 nt, Human
cuccgccagcagcaaccgaacuuggaccaagu

SEQ ID NO: 398034 - RNA, 32 nt, Human
cuccgccagccccuccaccccagccugccugc

SEQ ID NO: 398035 - RNA, 17 nt, Human
cuccgccagcgcugccg

SEQ ID NO: 398036 - RNA, 32 nt, Human
cuccgccaggcacuaaccugccauaacccuuu

SEQ ID NO: 398037 - RNA, 32 nt, Human
cuccgccaugcuugccaccucuugcuucugag

SEQ ID NO: 398038 - RNA, 32 nt, Human
cuccgcccaccugccccugccucucagccucc

SEQ ID NO: 398039 - RNA, 24 nt, Human
cuccgcccagucaccaucaggcca

SEQ ID NO: 398040 - RNA, 32 nt, Human
cuccgccccaccacagcacucucaggaaagga

SEQ ID NO: 398041 - RNA, 32 nt, Human
cuccgccccaccacuuucauccuaaaccuacu

SEQ ID NO: 398042 - RNA, 20 nt, Human
cuccgccccagccccagcca

SEQ ID NO: 398043 - RNA, 23 nt, Human
cuccgccccaggagcuggagcca

SEQ ID NO: 398044 - RNA, 32 nt, Human
cuccgcccccucacgcgcucucgccgggaccc

SEQ ID NO: 398045 - RNA, 18 nt, Human
cuccgccccgugguuccu

SEQ ID NO: 398046 - RNA, 32 nt, Human
cuccgccccgugugugcgcccugcacuuaggg

SEQ ID NO: 398047 - RNA, 32 nt, Human
cuccgccccugccucccuccugccccugcucc

SEQ ID NO: 398048 - RNA, 32 nt, Human
cuccgcccgccucccuccucuggcccccuccg

SEQ ID NO: 398049 - RNA, 32 nt, Human
cuccgcccucccccucucccccauccgccugc

SEQ ID NO: 398050 - RNA, 20 nt, Human
cuccgcccuccgcuggcucc

SEQ ID NO: 398051 - RNA, 32 nt, Human
cuccgcccugacccuccugcugccuucccacc

SEQ ID NO: 398052 - RNA, 32 nt, Human
cuccgcccuggcuuucugcagcuuugagaugc

SEQ ID NO: 398053 - RNA, 32 nt, Human
cuccgcccugugcccuuucccugcugcuggcu

SEQ ID NO: 398054 - RNA, 17 nt, Human
cuccgccgccacugcug

SEQ ID NO: 398055 - RNA, 17 nt, Human
cuccgccgccgccgccg

SEQ ID NO: 398056 - RNA, 20 nt, Human
cuccgccgccgccgccgccg

SEQ ID NO: 398057 - RNA, 17 nt, Human
cuccgccgccgcucccg

SEQ ID NO: 398058 - RNA, 20 nt, Human
cuccgccgccgcugcugccg

SEQ ID NO: 398059 - RNA, 32 nt, Human
cuccgccgcuccaggacucggcgcggagggaa

SEQ ID NO: 398060 - RNA, 20 nt, Human
cuccgccgcugccgccgccg

SEQ ID NO: 398061 - RNA, 17 nt, Human
cuccgccgcugcugccg

SEQ ID NO: 398062 - RNA, 32 nt, Human
cuccgccguggcuccccagcgagcccacgggg

SEQ ID NO: 398063 - RNA, 32 nt, Human
cuccgccucacccuuggcgcuggaccagugag

SEQ ID NO: 398064 - RNA, 19 nt, Human
cuccgccucagcccuucug

SEQ ID NO: 398065 - RNA, 32 nt, Human
cuccgccucagccucuggaguagcugggaccu

SEQ ID NO: 398066 - RNA, 32 nt, Human
cuccgccucccggauacuccugccucagccuc

SEQ ID NO: 398067 - RNA, 17 nt, Human
cuccgccuccgcugccg

SEQ ID NO: 398068 - RNA, 32 nt, Human
cuccgccuccuccccuccuccuucucgucuuc

SEQ ID NO: 398069 - RNA, 32 nt, Human
cuccgccuccuccucugcuccgccaccggcuu

SEQ ID NO: 398070 - RNA, 32 nt, Human
cuccgccuccugccaaccccugcucuuccagg

SEQ ID NO: 398071 - RNA, 32 nt, Human
cuccgccuccuggguccaagugauucuccugc

SEQ ID NO: 398072 - RNA, 19 nt, Human
cuccgccucguccccgggg

SEQ ID NO: 398073 - RNA, 18 nt, Human
cuccgccucguugcccug

SEQ ID NO: 398074 - RNA, 21 nt, Human
cuccgccucucugagccucug

SEQ ID NO: 398075 - RNA, 32 nt, Human
cuccgccucugcacuccagccugggugacaag

SEQ ID NO: 398076 - RNA, 32 nt, Human
cuccgccugcagcugcgggacgacgcgccccu

SEQ ID NO: 398077 - RNA, 32 nt, Human
cuccgccugccagcccaccccagccuggggag

SEQ ID NO: 398078 - RNA, 20 nt, Human
cuccgccugccccgccgccg

SEQ ID NO: 398079 - RNA, 32 nt, Human
cuccgccugccuggggccuucggcugcgggga

SEQ ID NO: 398080 - RNA, 32 nt, Human
cuccgccugcugccuggacugcucagugaggu

SEQ ID NO: 398081 - RNA, 32 nt, Human
cuccgccuggcuuacgaacacacacauguguu

SEQ ID NO: 398082 - RNA, 32 nt, Human
cuccgccuucacuccggugugccugcagcccc

SEQ ID NO: 398083 - RNA, 32 nt, Human
cuccgccuuccagguuuaagcuauucuccugc

SEQ ID NO: 398084 - RNA, 32 nt, Human
cuccgcgauguccucucaacagagcgccguuu

SEQ ID NO: 398085 - RNA, 32 nt, Human
cuccgcgcccuccccucuccuuucucccucuc

SEQ ID NO: 398086 - RNA, 18 nt, Human
cuccgcgccgccgcugcc

SEQ ID NO: 398087 - RNA, 15 nt, Human
cuccgcgccgcgccg

SEQ ID NO: 398088 - RNA, 20 nt, Human
cuccgcgcgcgccgcagccg

SEQ ID NO: 398089 - RNA, 22 nt, Human
cuccgcgcggcugcagcgcggg

SEQ ID NO: 398090 - RNA, 32 nt, Human
cuccgcgcuggcgcgcuuuguccuccucgcgc

SEQ ID NO: 398091 - RNA, 32 nt, Human
cuccgcggccuggaguggcucugccggggcau

SEQ ID NO: 398092 - RNA, 32 nt, Human
cuccgcggcgccgccucccagcccagagccca

SEQ ID NO: 398093 - RNA, 24 nt, Human
cuccgcggcgggaccggggcgcag

SEQ ID NO: 398094 - RNA, 32 nt, Human
cuccgcgggcugggaccaugggcugcuucuuc

SEQ ID NO: 398095 - RNA, 32 nt, Human
cuccgcggugcccagcucuccagccuggggau

SEQ ID NO: 398096 - RNA, 21 nt, Human
cuccgcguccgauggcuccug

SEQ ID NO: 398097 - RNA, 32 nt, Human
cuccgcgucuacugcgagucaggccgugaugg

SEQ ID NO: 398098 - RNA, 32 nt, Human
cuccgcguggcucacuccagccucggauguuu

SEQ ID NO: 398099 - RNA, 32 nt, Human
cuccgcuaaaaaugcaaaaauuagccaggcgu

SEQ ID NO: 398100 - RNA, 21 nt, Human
cuccgcuacucgggaggcuga

SEQ ID NO: 398101 - RNA, 32 nt, Human
cuccgcucacugcaacauccgccucccggacu

SEQ ID NO: 398102 - RNA, 24 nt, Human
cuccgcucacugcaaccuccaccu

SEQ ID NO: 398103 - RNA, 32 nt, Human
cuccgcucacugcaaccuccaccuccuggcuu

SEQ ID NO: 398104 - RNA, 23 nt, Human
cuccgcucacugcaaccuccacu

SEQ ID NO: 398105 - RNA, 32 nt, Human
cuccgcucacugcaaccucugccucccgguuc

SEQ ID NO: 398106 - RNA, 32 nt, Human
cuccgcucacugcaagcuccgccucccggguu

SEQ ID NO: 398107 - RNA, 32 nt, Human
cuccgcucacugcaagcuccgccucgcgaguu

SEQ ID NO: 398108 - RNA, 32 nt, Human
cuccgcucacugcaagcucugccuccugggcu

SEQ ID NO: 398109 - RNA, 32 nt, Human
cuccgcucacugcagccuccgccuccuggguu

SEQ ID NO: 398110 - RNA, 32 nt, Human
cuccgcucauacaggaaugaagccuuagccag

SEQ ID NO: 398111 - RNA, 32 nt, Human
cuccgcuccaccacugaggcccaggcucccag

SEQ ID NO: 398112 - RNA, 32 nt, Human
cuccgcuccuccugcgcggggugcugaaacag

SEQ ID NO: 398113 - RNA, 32 nt, Human
cuccgcucgcagcaaccucugccucccagguu

SEQ ID NO: 398114 - RNA, 32 nt, Human
cuccgcucgccuggcccggaccggaagcggcg

SEQ ID NO: 398115 - RNA, 32 nt, Human
cuccgcucgcugccuucucuccuggcaggcgc

SEQ ID NO: 398116 - RNA, 32 nt, Human
cuccgcucgucccgcucgucauggccuacccg

SEQ ID NO: 398117 - RNA, 32 nt, Human
cuccgcucucccggcgccugggccuacccagc

SEQ ID NO: 398118 - RNA, 32 nt, Human
cuccgcucuccuaguuccuucucccuccucua

SEQ ID NO: 398119 - RNA, 32 nt, Human
cuccgcugaccaguccuuggacacaacgcgga

SEQ ID NO: 398120 - RNA, 32 nt, Human
cuccgcugagccacuccugugccucccuggcc

SEQ ID NO: 398121 - RNA, 20 nt, Human
cuccgcugcagcccaaagca

SEQ ID NO: 398122 - RNA, 20 nt, Human
cuccgcugccgccgccgccg

SEQ ID NO: 398123 - RNA, 32 nt, Human
cuccgcugcgccucagcugugggggccucagg

SEQ ID NO: 398124 - RNA, 32 nt, Human
cuccgcuggccccagccgcggggccaccgcca

SEQ ID NO: 398125 - RNA, 17 nt, Human
cuccgcuggccgcgccg

SEQ ID NO: 398126 - RNA, 30 nt, Human
cuccgcuggcucugccugcuccugcaacag

SEQ ID NO: 398127 - RNA, 32 nt, Human
cuccgcugggcccagacagcagcguuugguuu

SEQ ID NO: 398128 - RNA, 32 nt, Human
cuccgcuggggcuucucucggccgcggaagga

SEQ ID NO: 398129 - RNA, 32 nt, Human
cuccgcuggucugucugugcauccacugugcc

SEQ ID NO: 398130 - RNA, 32 nt, Human
cuccgcuucccaggcuggggugcaguggugcg

SEQ ID NO: 398131 - RNA, 22 nt, Human
cuccgcuucgccgccgccgccg

SEQ ID NO: 398132 - RNA, 21 nt, Human
cuccgcuucuaggccccaacc

SEQ ID NO: 398133 - RNA, 32 nt, Human
cuccgcuucuccccauccccuacuuuccuccc

SEQ ID NO: 398134 - RNA, 32 nt, Human
cuccgcuucucccugcagcccugccuuugcug

SEQ ID NO: 398135 - RNA, 32 nt, Human
cuccggaaagcugcggcccagcgcggacuagu

SEQ ID NO: 398136 - RNA, 32 nt, Human
cuccggaaccacugcacgacggggcuggacug

SEQ ID NO: 398137 - RNA, 32 nt, Human
cuccggaagugcugggauuacaggcgugagcc

SEQ ID NO: 398138 - RNA, 22 nt, Human
cuccggacacgcgccugcaccu

SEQ ID NO: 398139 - RNA, 32 nt, Human
cuccggacagagcugggccuggggaagggguu

SEQ ID NO: 398140 - RNA, 32 nt, Human
cuccggacaucgggggccagggcacaacaucu

SEQ ID NO: 398141 - RNA, 32 nt, Human
cuccggaccgacacucccucagccucucagug

SEQ ID NO: 398142 - RNA, 24 nt, Human
cuccggaccucgcugcagcgcgga

SEQ ID NO: 398143 - RNA, 32 nt, Human
cuccggaccugccucgagccucaggcugcuga

SEQ ID NO: 398144 - RNA, 32 nt, Human
cuccggacgcugccaaccuguucuccaccguc

SEQ ID NO: 398145 - RNA, 17 nt, Human
cuccggacucgccgcuc

SEQ ID NO: 398146 - RNA, 23 nt, Human
cuccggagaacugggauuacagg

SEQ ID NO: 398147 - RNA, 32 nt, Human
cuccggagacaugucugucuucccucucauuc

SEQ ID NO: 398148 - RNA, 32 nt, Human
cuccggagcccaggcggcggcgaguacucggg

SEQ ID NO: 398149 - RNA, 32 nt, Human
cuccggagccucgucccucccuuccccuuccc

SEQ ID NO: 398150 - RNA, 32 nt, Human
cuccggagccugcugaaaacucucaagaccug

SEQ ID NO: 398151 - RNA, 32 nt, Human
cuccggaggagccggcccugcuggccacgcag

SEQ ID NO: 398152 - RNA, 24 nt, Human
cuccggaggcaccuucuccuggua

SEQ ID NO: 398153 - RNA, 32 nt, Human
cuccggaggccaugggcuacccggagguggag

SEQ ID NO: 398154 - RNA, 24 nt, Human
cuccggaguagcugggauuacagg

SEQ ID NO: 398155 - RNA, 32 nt, Human
cuccggaguagcugggauuacaggcacaugcc

SEQ ID NO: 398156 - RNA, 32 nt, Human
cuccggaguagcugggauuacaggcacgugcc

SEQ ID NO: 398157 - RNA, 32 nt, Human
cuccggaguagcugggauuacaggcaugcacc

SEQ ID NO: 398158 - RNA, 32 nt, Human
cuccggaguagcugggauuacaggcgccugcc

SEQ ID NO: 398159 - RNA, 32 nt, Human
cuccggaguagcugggauuacaggcgugcgcc

SEQ ID NO: 398160 - RNA, 24 nt, Human
cuccggaguagcugggauugcagg

SEQ ID NO: 398161 - RNA, 32 nt, Human
cuccggaguagcugggauugcaggcacccgcc

SEQ ID NO: 398162 - RNA, 32 nt, Human
cuccggaguagcugggguuacaggcacgggcc

SEQ ID NO: 398163 - RNA, 20 nt, Human
cuccggagucgccgcugccg

SEQ ID NO: 398164 - RNA, 31 nt, Human
cuccggaugcuggugcugccaucccccugcc

SEQ ID NO: 398165 - RNA, 32 nt, Human
cuccggcaacacaauggccccuccaucuuugu

SEQ ID NO: 398166 - RNA, 20 nt, Human
cuccggcaccgagcccucca

SEQ ID NO: 398167 - RNA, 32 nt, Human
cuccggcaccuccaaaccuaccccacagucag

SEQ ID NO: 398168 - RNA, 32 nt, Human
cuccggcagcagguccucgcugggcagaugcu

SEQ ID NO: 398169 - RNA, 19 nt, Human
cuccggccaacccggagga

SEQ ID NO: 398170 - RNA, 32 nt, Human
cuccggccaccugggcuccaccagcccagccc

SEQ ID NO: 398171 - RNA, 32 nt, Human
cuccggccaccuguacuguaucagccccaagc

SEQ ID NO: 398172 - RNA, 32 nt, Human
cuccggccagcugccugcccucuugucugugc

SEQ ID NO: 398173 - RNA, 32 nt, Human
cuccggccauucuccccucacccuccucaccu

SEQ ID NO: 398174 - RNA, 32 nt, Human
cuccggcccacugucuguggcccauugucauu

SEQ ID NO: 398175 - RNA, 32 nt, Human
cuccggccccugaagcauggccagcagcggca

SEQ ID NO: 398176 - RNA, 24 nt, Human
cuccggcccuacccacggucucca

SEQ ID NO: 398177 - RNA, 32 nt, Human
cuccggcccuccuccuccuccugguccuugcu

SEQ ID NO: 398178 - RNA, 22 nt, Human
cuccggccgcccgccucugccg

SEQ ID NO: 398179 - RNA, 20 nt, Human
cuccggccgccgccgccccg

SEQ ID NO: 398180 - RNA, 17 nt, Human
cuccggccgccgcgccg

SEQ ID NO: 398181 - RNA, 32 nt, Human
cuccggccucacgguggccucuccaggcucag

SEQ ID NO: 398182 - RNA, 32 nt, Human
cuccggccucagcucccuccccaaagugccug

SEQ ID NO: 398183 - RNA, 32 nt, Human
cuccggccucuccagccucagcccccugcuuc

SEQ ID NO: 398184 - RNA, 32 nt, Human
cuccggccugaugacagagcgagauuccgucu

SEQ ID NO: 398185 - RNA, 22 nt, Human
cuccggccugggcaacaagagc

SEQ ID NO: 398186 - RNA, 18 nt, Human
cuccggccuguccuccaa

SEQ ID NO: 398187 - RNA, 32 nt, Human
cuccggccuuuccuuguacagguucuauguag

SEQ ID NO: 398188 - RNA, 22 nt, Human
cuccggcgacuggugcuacgca

SEQ ID NO: 398189 - RNA, 32 nt, Human
cuccggcgcacacccaaaccgcgcugcgcccg

SEQ ID NO: 398190 - RNA, 17 nt, Human
cuccggcgccgcccgcc

SEQ ID NO: 398191 - RNA, 24 nt, Human
cuccggcgcgagccgccgccaccg

SEQ ID NO: 398192 - RNA, 32 nt, Human
cuccggcggccgagaggagggagcgcggcgca

SEQ ID NO: 398193 - RNA, 32 nt, Human
cuccggcggcgcucuccagucauggacuaccg

SEQ ID NO: 398194 - RNA, 32 nt, Human
cuccggcucacugcccagcccccaucuaccuc

SEQ ID NO: 398195 - RNA, 19 nt, Human
cuccggcucccgcgcccuc

SEQ ID NO: 398196 - RNA, 18 nt, Human
cuccggcucuggcucuug

SEQ ID NO: 398197 - RNA, 32 nt, Human
cuccggcucuugccucccagugccaugcaggu

SEQ ID NO: 398198 - RNA, 19 nt, Human
cuccggcugcagggacccu

SEQ ID NO: 398199 - RNA, 32 nt, Human
cuccggcuggugucuugagaccagccugccag

SEQ ID NO: 398200 - RNA, 32 nt, Human
cuccggcuugcagacgggcuucucccaccccc

SEQ ID NO: 398201 - RNA, 32 nt, Human
cuccgggaaagagaaggggcuuuuugccuuuu

SEQ ID NO: 398202 - RNA, 32 nt, Human
cuccgggaagaggccaggugggggagaacaua

SEQ ID NO: 398203 - RNA, 32 nt, Human
cuccgggacuccucgccaccugcucuguuucu

SEQ ID NO: 398204 - RNA, 32 nt, Human
cuccgggacugcucuggacugacauugcucag

SEQ ID NO: 398205 - RNA, 32 nt, Human
cuccgggagagggggagugcgcggcggccgca

SEQ ID NO: 398206 - RNA, 19 nt, Human
cuccgggagcccacuucua

SEQ ID NO: 398207 - RNA, 32 nt, Human
cuccgggagccugaaccuccugacugaggaac

SEQ ID NO: 398208 - RNA, 32 nt, Human
cuccgggaggccgcggugaggggccgggccca

SEQ ID NO: 398209 - RNA, 32 nt, Human
cuccgggaggccucggugauucagccacagcc

SEQ ID NO: 398210 - RNA, 32 nt, Human
cuccgggaggcugaggcaggagagucacuuga

SEQ ID NO: 398211 - RNA, 32 nt, Human
cuccgggauucugcuguuauuauccaaaggcg

SEQ ID NO: 398212 - RNA, 32 nt, Human
cuccgggcacggcuucccaggggaacgaggag

SEQ ID NO: 398213 - RNA, 32 nt, Human
cuccgggcacgugcugcagcuguggcugaggc

SEQ ID NO: 398214 - RNA, 32 nt, Human
cuccgggcagcccagcgccaggccagagauug

SEQ ID NO: 398215 - RNA, 32 nt, Human
cuccgggcagggaagaggagguuguccccuuu

SEQ ID NO: 398216 - RNA, 32 nt, Human
cuccgggcagggcugggaaggaaaggaaauac

SEQ ID NO: 398217 - RNA, 21 nt, Human
cuccgggccccaccugcaccc

SEQ ID NO: 398218 - RNA, 20 nt, Human
cuccgggcccggcgccgccg

SEQ ID NO: 398219 - RNA, 19 nt, Human
cuccgggccgccgccgcug

SEQ ID NO: 398220 - RNA, 32 nt, Human
cuccgggccgcuccgcucugggcgucagggcg

SEQ ID NO: 398221 - RNA, 32 nt, Human
cuccgggcgcgagaagaggggagccaggccga

SEQ ID NO: 398222 - RNA, 22 nt, Human
cuccgggcugcuccguccuucc

SEQ ID NO: 398223 - RNA, 20 nt, Human
cuccgggcuugggccaggcc

SEQ ID NO: 398224 - RNA, 32 nt, Human
cuccggggagaaaggacacugccccucccccg

SEQ ID NO: 398225 - RNA, 32 nt, Human
cuccggggagcuagaacuggcguuagaggagg

SEQ ID NO: 398226 - RNA, 32 nt, Human
cuccggggcccacuccacugggcccacccugg

SEQ ID NO: 398227 - RNA, 32 nt, Human
cuccggggccgaggugggccugcucauuggaa

SEQ ID NO: 398228 - RNA, 32 nt, Human
cuccggggcuccugccagccccaacccccggc

SEQ ID NO: 398229 - RNA, 32 nt, Human
cuccggggcugggggaucacaggcuggugaac

SEQ ID NO: 398230 - RNA, 17 nt, Human
cuccgggggcugacccu

SEQ ID NO: 398231 - RNA, 32 nt, Human
cuccgggggugacagugaugaggaacugggug

SEQ ID NO: 398232 - RNA, 32 nt, Human
cuccggguaaaggcaagagcaagaccaaguga

SEQ ID NO: 398233 - RNA, 32 nt, Human
cuccgggucacugcuguauauaacuccccucc

SEQ ID NO: 398234 - RNA, 18 nt, Human
cuccggguucaagugauu

SEQ ID NO: 398235 - RNA, 32 nt, Human
cuccggguucacaguguaagggaaauaaaccc

SEQ ID NO: 398236 - RNA, 32 nt, Human
cuccggguucacaguguaggggaaauaaaccc

SEQ ID NO: 398237 - RNA, 32 nt, Human
cuccggguugagauccacagagcuaaacguuu

SEQ ID NO: 398238 - RNA, 22 nt, Human
cuccggguugccgccgccgccg

SEQ ID NO: 398239 - RNA, 23 nt, Human
cuccgguagccucucccaccuaa

SEQ ID NO: 398240 - RNA, 32 nt, Human
cuccggucacagcagcucaguccuccaaagcu

SEQ ID NO: 398241 - RNA, 20 nt, Human
cuccggucccgccgcucccg

SEQ ID NO: 398242 - RNA, 32 nt, Human
cuccgguccugggucgggaggggugggggcca

SEQ ID NO: 398243 - RNA, 32 nt, Human
cuccggugagccacagccuggccaccugucuu

SEQ ID NO: 398244 - RNA, 32 nt, Human
cuccggugcacaaaugcuuucucuucaaggca

SEQ ID NO: 398245 - RNA, 19 nt, Human
cuccggugccgccgcugcc

SEQ ID NO: 398246 - RNA, 24 nt, Human
cuccgguggacgccccggcacggg

SEQ ID NO: 398247 - RNA, 22 nt, Human
cuccggugugccugcagccccg

SEQ ID NO: 398248 - RNA, 18 nt, Human
cuccguaaugagagcccg

SEQ ID NO: 398249 - RNA, 32 nt, Human
cuccguagcccaggcuggagugcaguggcaca

SEQ ID NO: 398250 - RNA, 32 nt, Human
cuccguagucucgcggacagcucucuuuccug

SEQ ID NO: 398251 - RNA, 32 nt, Human
cuccguaucagaaagaaaaagaggaacugaau

SEQ ID NO: 398252 - RNA, 32 nt, Human
cuccguaugcugccugcgccagaagagcuuug

SEQ ID NO: 398253 - RNA, 32 nt, Human
cuccgucaacaucugcugcuccaagcugguga

SEQ ID NO: 398254 - RNA, 21 nt, Human
cuccgucaagcugguugucca

SEQ ID NO: 398255 - RNA, 32 nt, Human
cuccgucacaacaacaacaacaaaaagcuucc

SEQ ID NO: 398256 - RNA, 26 nt, Human
cuccgucacccaggcuggagugcagu

SEQ ID NO: 398257 - RNA, 32 nt, Human
cuccgucacccaggcuggagugcaguggcaag

SEQ ID NO: 398258 - RNA, 32 nt, Human
cuccgucacccaggcuggagugcaguggcgcc

SEQ ID NO: 398259 - RNA, 32 nt, Human
cuccgucagacuguugcaguagaagaaugauu

SEQ ID NO: 398260 - RNA, 32 nt, Human
cuccgucagccugucggugcucugacccucug

SEQ ID NO: 398261 - RNA, 32 nt, Human
cucgguggcuuccccugcgcccugggaguuug

SEQ ID NO: 398262 - RNA, 32 nt, Human
cucgguguccccacagcaccuagcacagucuc

SEQ ID NO: 398263 - RNA, 32 nt, Human
cucggugugggcagugggaggcaagagugaag

SEQ ID NO: 398264 - RNA, 32 nt, Human
cucgguucaagcaauucgcccaccuuggccuc

SEQ ID NO: 398265 - RNA, 22 nt, Human
cucgguucacuacaaccuccgc

SEQ ID NO: 398266 - RNA, 24 nt, Human
cucgguucacugcaaccuccaccu

SEQ ID NO: 398267 - RNA, 32 nt, Human
cucgguucacugcaaccuccgccuccagguuc

SEQ ID NO: 398268 - RNA, 32 nt, Human
cucgguucacugcaaccuccgccucccgguuc

SEQ ID NO: 398269 - RNA, 32 nt, Human
cucgguucacugcaaccucugccacccauguu

SEQ ID NO: 398270 - RNA, 32 nt, Human
cucgguucacugcaaccucugccucccaggau

SEQ ID NO: 398271 - RNA, 32 nt, Human
cucgguucacugcaaccucugccucccagguu

SEQ ID NO: 398272 - RNA, 32 nt, Human
cucgguucacugcaaccucugccuccuggguu

SEQ ID NO: 398273 - RNA, 32 nt, Human
cucgguucacugcaaccucugccucucagguu

SEQ ID NO: 398274 - RNA, 32 nt, Human
cucgguucacugcaaccuuggccuccuagguu

SEQ ID NO: 398275 - RNA, 32 nt, Human
cucgguucacugcagccucugccuucugggcu

SEQ ID NO: 398276 - RNA, 32 nt, Human
cucgguucccacccucagcaagcaggccucca

SEQ ID NO: 398277 - RNA, 18 nt, Human
cucgguuccccgcugccg

SEQ ID NO: 398278 - RNA, 32 nt, Human
cucgguuccucuuacccucuucuuggacccua

SEQ ID NO: 398279 - RNA, 32 nt, Human
cucgguugcaccugacauucucuccccaguaa

SEQ ID NO: 398280 - RNA, 32 nt, Human
cucgguuggcuccucuggaacagggaguagug

SEQ ID NO: 398281 - RNA, 32 nt, Human
cucgguuguaacggggcugggaagaaaagcag

SEQ ID NO: 398282 - RNA, 32 nt, Human
cucgguuuggccugcacuguccuccggccuca

SEQ ID NO: 398283 - RNA, 32 nt, Human
cucguaaaggagagaguaagagucaccaaaca

SEQ ID NO: 398284 - RNA, 24 nt, Human
cucguaaagugcugggauuacagg

SEQ ID NO: 398285 - RNA, 32 nt, Human
cucguaaauggcacguuuagguggugagaggu

SEQ ID NO: 398286 - RNA, 32 nt, Human
cucguaaauugcugggauuacaggcaugagcc

SEQ ID NO: 398287 - RNA, 32 nt, Human
cucguaaccagagaccagcacaugucagggaa

SEQ ID NO: 398288 - RNA, 32 nt, Human
cucguaaccuccauauuuucaggauuuuugaa

SEQ ID NO: 398289 - RNA, 32 nt, Human
cucguaauucacaacccuaaaguuccauuuac

SEQ ID NO: 398290 - RNA, 32 nt, Human
cucguacacacacgcaguuuuaagggugaugu

SEQ ID NO: 398291 - RNA, 32 nt, Human
cucguacagcacaggaaccugacacauaguag

SEQ ID NO: 398292 - RNA, 32 nt, Human
cucguacauaugugcuucauaauaugucacuc

SEQ ID NO: 398293 - RNA, 32 nt, Human
cucguacaugcacaaauacacacucaugcaca

SEQ ID NO: 398294 - RNA, 32 nt, Human
cucguacccuucuacgugaucugcaccuuuaa

SEQ ID NO: 398295 - RNA, 32 nt, Human
cucguaccucagacucccgaauagcugggauu

SEQ ID NO: 398296 - RNA, 32 nt, Human
cucguaccuguaauccagcacuuugggaagcc

SEQ ID NO: 398297 - RNA, 32 nt, Human
cucguagaggagagaaaacaagaguggacugg

SEQ ID NO: 398298 - RNA, 32 nt, Human
cucguagcuccacucugcagccucaaacuccu

SEQ ID NO: 398299 - RNA, 32 nt, Human
cucguagggggugaguugaguguggcugggag

SEQ ID NO: 398300 - RNA, 32 nt, Human
cucguaucuguaaucccagcacuuugagaggc

SEQ ID NO: 398301 - RNA, 32 nt, Human
cucguaugcuuccuggccuggaaugcacuugc

SEQ ID NO: 398302 - RNA, 32 nt, Human
cucgucacccagccucaaaaauauaugugucu

SEQ ID NO: 398303 - RNA, 23 nt, Human
cucgucacccaggcuggagugca

SEQ ID NO: 398304 - RNA, 16 nt, Human
cucgucacugccugcc

SEQ ID NO: 398305 - RNA, 32 nt, Human
cucgucagccucccgccggccgucuccuuaac

SEQ ID NO: 398306 - RNA, 32 nt, Human
cucgucagccuuccucuuccagaagcuguugg

SEQ ID NO: 398307 - RNA, 32 nt, Human
cucgucaucaggugcauagcaagugaaagcaa

SEQ ID NO: 398308 - RNA, 32 nt, Human
cucguccacccaccccuggcuggcagccuccc

SEQ ID NO: 398309 - RNA, 32 nt, Human
cucgucccagguaaggagaguccuggucuuug

SEQ ID NO: 398310 - RNA, 32 nt, Human
cucgucccaugccuccugccucuccccucccu

SEQ ID NO: 398311 - RNA, 32 nt, Human
cucguccccucuuccacaccuucccagcauca

SEQ ID NO: 398312 - RNA, 32 nt, Human
cucgucccgggcugaauucucucuccacucuu

SEQ ID NO: 398313 - RNA, 32 nt, Human
cucguccuagcaacaggagaccugacagaugc

SEQ ID NO: 398314 - RNA, 21 nt, Human
cucguccuccgugggcacuga

SEQ ID NO: 398315 - RNA, 32 nt, Human
cucguccuccuggaagcugaggcugagaaggg

SEQ ID NO: 398316 - RNA, 32 nt, Human
cucgucgccauggaggagcuccaggagccucu

SEQ ID NO: 398317 - RNA, 32 nt, Human
cucgucuaaaaauacaaaaauuagccgggcgu

SEQ ID NO: 398318 - RNA, 32 nt, Human
cucgucucacugcaaccuccgccucccagauu

SEQ ID NO: 398319 - RNA, 32 nt, Human
cucgucucacugcaaccucugccuccuggguu

SEQ ID NO: 398320 - RNA, 32 nt, Human
cucgucucccccgagagccacagggagugcug

SEQ ID NO: 398321 - RNA, 32 nt, Human
cucgucucucccuggaaagggagggaggcuuc

SEQ ID NO: 398322 - RNA, 32 nt, Human
cucgucucucuucuccaggacuccugcacuga

SEQ ID NO: 398323 - RNA, 32 nt, Human
cucgucugcacuccacuccauccugcugcugg

SEQ ID NO: 398324 - RNA, 20 nt, Human
cucgucugccgccgccgucg

SEQ ID NO: 398325 - RNA, 32 nt, Human
cucgucugcuucuuguuuggcagaaauagaug

SEQ ID NO: 398326 - RNA, 32 nt, Human
cucgucugugcacgaacagguggccgacucug

SEQ ID NO: 398327 - RNA, 32 nt, Human
cucgucuucagcugcauuucacaugccuugca

SEQ ID NO: 398328 - RNA, 32 nt, Human
cucgucuucauuaagcccucuuccaucauguc

SEQ ID NO: 398329 - RNA, 32 nt, Human
cucgucuuccuugggccgagauuuuccacugc

SEQ ID NO: 398330 - RNA, 32 nt, Human
cucgucuugucuacccacccucccucccccau

SEQ ID NO: 398331 - RNA, 32 nt, Human
cucgucuuucucccgggaaccuugacgacgcc

SEQ ID NO: 398332 - RNA, 32 nt, Human
cucgugaaauguugaggguggggagaaaagac

SEQ ID NO: 398333 - RNA, 32 nt, Human
cucgugacaagugccuucacacagaccccucg

SEQ ID NO: 398334 - RNA, 32 nt, Human
cucgugaccgcagugauccucccgccucggcc

SEQ ID NO: 398335 - RNA, 32 nt, Human
cucgugagacacgucccacugccuuguugcag

SEQ ID NO: 398336 - RNA, 32 nt, Human
cucgugagccccgggauggaggagaaauacgg

SEQ ID NO: 398337 - RNA, 32 nt, Human
cucgugagcuaaagcuacucgcccaccuggau

SEQ ID NO: 398338 - RNA, 32 nt, Human
cucgugaugagaaacucacuucuggcaccugu

SEQ ID NO: 398339 - RNA, 32 nt, Human
cucgugcauguaauccuagcacuuugggaggc

SEQ ID NO: 398340 - RNA, 18 nt, Human
cucgugccaccgccgccg

SEQ ID NO: 398341 - RNA, 18 nt, Human
cucgugccuguaauccca

SEQ ID NO: 398342 - RNA, 32 nt, Human
cucgugccuguaaucccagcacuuugggaggc

SEQ ID NO: 398343 - RNA, 32 nt, Human
cucgugccuguaaucccagcacuuugggaggu

SEQ ID NO: 398344 - RNA, 32 nt, Human
cucgugccuguacucccagcacuuugggaggc

SEQ ID NO: 398345 - RNA, 32 nt, Human
cucgugccuguagucccagcacuuugggaggc

SEQ ID NO: 398346 - RNA, 32 nt, Human
cucgugccugucaucccagcacuuugggaggc

SEQ ID NO: 398347 - RNA, 32 nt, Human
cucgugccugugaucccagcacuuugggaggc

SEQ ID NO: 398348 - RNA, 32 nt, Human
cucgugcugcccagcgccccaggcuggacuga

SEQ ID NO: 398349 - RNA, 32 nt, Human
cucgugcugcugcccaggcuggagugcagugg

SEQ ID NO: 398350 - RNA, 32 nt, Human
cucgugcuuguaaucccagcacuuugggaggc

SEQ ID NO: 398351 - RNA, 32 nt, Human
cucguggacaccugcccugcccugccaccugu

SEQ ID NO: 398352 - RNA, 32 nt, Human
cucguggacacugcgugguacugugugcacac

SEQ ID NO: 398353 - RNA, 32 nt, Human
cucguggagcugccaacucggccaaaggagaa

SEQ ID NO: 398354 - RNA, 32 nt, Human
cucguggaggcaucuacacccacccacagcag

SEQ ID NO: 398355 - RNA, 32 nt, Human
cucguggagguggugguugaaaggugagaauu

SEQ ID NO: 398356 - RNA, 32 nt, Human
cucguggcccggcggggccccugcugccuccc

SEQ ID NO: 398357 - RNA, 24 nt, Human
cucguggcuguaaucccagcacuu

SEQ ID NO: 398358 - RNA, 32 nt, Human
cucguggcuuaaccccuccuacccucuaccuc

SEQ ID NO: 398359 - RNA, 32 nt, Human
cucgugggagggagcaugcaggugagaggaug

SEQ ID NO: 398360 - RNA, 32 nt, Human
cucgugggccagugaaaauagacuguaggucc

SEQ ID NO: 398361 - RNA, 32 nt, Human
cucguggguggacugagucccacucagcuuca

SEQ ID NO: 398362 - RNA, 32 nt, Human
cucguggguggagccugguaaaaagaggaaag

SEQ ID NO: 398363 - RNA, 32 nt, Human
cucgugguuccccgcuaggucuccgcuggggc

SEQ ID NO: 398364 - RNA, 32 nt, Human
cucgugguuccgcgcuaggucuccgcuggggc

SEQ ID NO: 398365 - RNA, 32 nt, Human
cucguguacccaucuucccacccucuauguuc

SEQ ID NO: 398366 - RNA, 32 nt, Human
cucguguccucugccaccccugcccacugucc

SEQ ID NO: 398367 - RNA, 32 nt, Human
cucgugucucucagugaaaggcugcuuaaaca

SEQ ID NO: 398368 - RNA, 32 nt, Human
cucgugugcauggccccugccucuucaggcuc

SEQ ID NO: 398369 - RNA, 32 nt, Human
cucguguguucugccaagagcugcuucuguca

SEQ ID NO: 398370 - RNA, 32 nt, Human
cucguguugccccggcuggagugcaguggcgc

SEQ ID NO: 398371 - RNA, 32 nt, Human
cucguguugugagccucaaaccaggcaccagg

SEQ ID NO: 398372 - RNA, 32 nt, Human
cucguuaaagcacagauaucacacaagugauu

SEQ ID NO: 398373 - RNA, 32 nt, Human
cucguuaagcuccgggaugaccuuguaggaga

SEQ ID NO: 398374 - RNA, 32 nt, Human
cucguuacacauuccacagcugugacugagaa

SEQ ID NO: 398375 - RNA, 32 nt, Human
cucguuaggacaaugccuuccaggugccacug

SEQ ID NO: 398376 - RNA, 32 nt, Human
cucguuccccuccaucugauccccacacaggc

SEQ ID NO: 398377 - RNA, 32 nt, Human
cucguuccgggcuaguccugcagccacacaga

SEQ ID NO: 398378 - RNA, 32 nt, Human
cucguuccucaagguuuagccgagacacugcc

SEQ ID NO: 398379 - RNA, 32 nt, Human
cucguucugaaccaauuuucuccuaucuucuc

SEQ ID NO: 398380 - RNA, 32 nt, Human
cucguucugucacccaggcuggagugcaguga

SEQ ID NO: 398381 - RNA, 32 nt, Human
cucguucugucacccaggcuggcgugcaauag

SEQ ID NO: 398382 - RNA, 32 nt, Human
cucguucugucgcccaggcuggagugcagggg

SEQ ID NO: 398383 - RNA, 32 nt, Human
cucguugaguuauuuguaaaauaaacauuuag

SEQ ID NO: 398384 - RNA, 32 nt, Human
cucguugccaugggacaccuccgagagagugg

SEQ ID NO: 398385 - RNA, 23 nt, Human
cucguugcccaaccuggagugca

SEQ ID NO: 398386 - RNA, 23 nt, Human
cucguugcccaggcuggagugca

SEQ ID NO: 398387 - RNA, 25 nt, Human
cucguugcccaggcuggagugcagu

SEQ ID NO: 398388 - RNA, 32 nt, Human
cucguugcccaggcuggagugcaguggcgcaa

SEQ ID NO: 398389 - RNA, 32 nt, Human
cucguuggcuuccucuuggacugggucucaau

SEQ ID NO: 398390 - RNA, 32 nt, Human
cucguugguggaggggagggagagagcuucag

SEQ ID NO: 398391 - RNA, 24 nt, Human
cucguugucucagccucccagguc

SEQ ID NO: 398392 - RNA, 22 nt, Human
cucguuuccaggccucucccca

SEQ ID NO: 398393 - RNA, 32 nt, Human
cucguuuccaucaagcauuccaguacccccac

SEQ ID NO: 398394 - RNA, 32 nt, Human
cucguuucuccucuuuccuccugcuucauggg

SEQ ID NO: 398395 - RNA, 32 nt, Human
cucguuugccuuucuauuuccuuccaaauucu

SEQ ID NO: 398396 - RNA, 32 nt, Human
cucguuuggggaaaacgacccgggaggagagc

SEQ ID NO: 398397 - RNA, 32 nt, Human
cucguuuguggacaaagcagcacguaucaccu

SEQ ID NO: 398398 - RNA, 32 nt, Human
cucguuuucuggguuuuggugauguuggagga

SEQ ID NO: 398399 - RNA, 32 nt, Human
cucguuuugcagcccaguccccgccuuuucag

SEQ ID NO: 398400 - RNA, 32 nt, Human
cucguuuuuauuccuccucucccagauuggcu

SEQ ID NO: 398401 - RNA, 32 nt, Human
cucguuuuucuuucucucuuucccccguccau

SEQ ID NO: 398402 - RNA, 32 nt, Human
cucuaaaaauagauucagagaaaggguggaca

SEQ ID NO: 398403 - RNA, 32 nt, Human
cucuaaaaccacacuaaaguuuucugacuucu

SEQ ID NO: 398404 - RNA, 32 nt, Human
cucuaaaagaagcuggagggaggaagcccauu

SEQ ID NO: 398405 - RNA, 32 nt, Human
cucuaaaaggguccauauuugccugcauucua

SEQ ID NO: 398406 - RNA, 32 nt, Human
cucuaaaaguuuuguaaucaugaguuagauau

SEQ ID NO: 398407 - RNA, 32 nt, Human
cucuaaaauggaauuucccacuucacuccaaa

SEQ ID NO: 398408 - RNA, 32 nt, Human
cucuaaacauuucauauaaauggaauuacaca

SEQ ID NO: 398409 - RNA, 32 nt, Human
cucuaaaccccuggaccaucugaauggagcag

SEQ ID NO: 398410 - RNA, 32 nt, Human
cucuaaaccucaaccuccuccuaccuggcagu

SEQ ID NO: 398411 - RNA, 32 nt, Human
cucuaaagaaggcugaaaauuuuuguccaaau

SEQ ID NO: 398412 - RNA, 32 nt, Human
cucuaaagcuuguuugaugaaacugguugguc

SEQ ID NO: 398413 - RNA, 32 nt, Human
cucuaaagggaaaaggucuacccuggagccag

SEQ ID NO: 398414 - RNA, 32 nt, Human
cucuaaagucccugcucugaggagacucugcc

SEQ ID NO: 398415 - RNA, 32 nt, Human
cucuaaaucaaggaucaugugugcacaauacu

SEQ ID NO: 398416 - RNA, 32 nt, Human
cucuaaauuguauauaaguuguguauauagag

SEQ ID NO: 398417 - RNA, 32 nt, Human
cucuaacaccacacuccagcuacuguguagug

SEQ ID NO: 398418 - RNA, 32 nt, Human
cucuaacagaucccuccucuucucggagaccu

SEQ ID NO: 398419 - RNA, 32 nt, Human
cucuaacaggcagauauagacaaagcagugca

SEQ ID NO: 398420 - RNA, 32 nt, Human
cucuaacauuugcaaaauggaaauguaauaau

SEQ ID NO: 398421 - RNA, 32 nt, Human
cucuaaccgaggaagcauugauugggagcuac

SEQ ID NO: 398422 - RNA, 21 nt, Human
cucuaaccugggcgacagagu

SEQ ID NO: 398423 - RNA, 32 nt, Human
cucuaaccuguagcuucagaggccagucuggg

SEQ ID NO: 398424 - RNA, 32 nt, Human
cucuaaccuuucucucacuccuacaaggcccu

SEQ ID NO: 398425 - RNA, 32 nt, Human
cucuaaccuuucucugccucucccacacucuc

SEQ ID NO: 398426 - RNA, 32 nt, Human
cucuaacuccuccuccuccucucuucuccucu

SEQ ID NO: 398427 - RNA, 32 nt, Human
cucuaacugaggcucugcuaugugccaugucc

SEQ ID NO: 398428 - RNA, 32 nt, Human
cucuaacugucaagacaaacacaaaggcccag

SEQ ID NO: 398429 - RNA, 19 nt, Human
cucuaacuucccuggcuuc

SEQ ID NO: 398430 - RNA, 21 nt, Human
cucuaacuugggcaacaaagc

SEQ ID NO: 398431 - RNA, 32 nt, Human
cucuaagaaaaaguuaagacaccuagucuaau

SEQ ID NO: 398432 - RNA, 32 nt, Human
cucuaagaaaugcugaaguaucggcauuacau

SEQ ID NO: 398433 - RNA, 32 nt, Human
cucuaagaaccccucacugauucacucaauag

SEQ ID NO: 398434 - RNA, 32 nt, Human
cucuaagaacugcucucuaaggcugcgguagc

SEQ ID NO: 398435 - RNA, 32 nt, Human
cucuaagaaggcugcuguacugguugaauugu

SEQ ID NO: 398436 - RNA, 24 nt, Human
cucuaagacagcuccuguguacag

SEQ ID NO: 398437 - RNA, 32 nt, Human
cucuaagacauccacaggugugcaguguuaaa

SEQ ID NO: 398438 - RNA, 22 nt, Human
cucuaagacgaaauuuggccag

SEQ ID NO: 398439 - RNA, 32 nt, Human
cucuaagagaacagccagaugguuuauaugaa

SEQ ID NO: 398440 - RNA, 32 nt, Human
cucuaagagagguugggaccaggcuagguucc

SEQ ID NO: 398441 - RNA, 32 nt, Human
cucuaagauacugauggcucugcagaggaccc

SEQ ID NO: 398442 - RNA, 32 nt, Human
cucuaagauauuagcuacuuucuguaugcaca

SEQ ID NO: 398443 - RNA, 22 nt, Human
cucuaagaugaaccuggggaca

SEQ ID NO: 398444 - RNA, 32 nt, Human
cucuaagcaaugacaucaugacauauauucaa

SEQ ID NO: 398445 - RNA, 32 nt, Human
cucuaagcacagauugcuuuuugcugccucuc

SEQ ID NO: 398446 - RNA, 32 nt, Human
cucuaagcacuaagggcugugccugagaaugg

SEQ ID NO: 398447 - RNA, 31 nt, Human
cucuaagcugguguucccaugcacagggcca

SEQ ID NO: 398448 - RNA, 32 nt, Human
cucuaaggaaggcagagaccuggguugagcag

SEQ ID NO: 398449 - RNA, 32 nt, Human
cucuaaggccugaaaaggaacaaggcccaccg

SEQ ID NO: 398450 - RNA, 32 nt, Human
cucuaagggagguggcagcaucaaaggcuccc

SEQ ID NO: 398451 - RNA, 32 nt, Human
cucuaaggguucugcucugacuccagguuggg

SEQ ID NO: 398452 - RNA, 32 nt, Human
cucuaaggucuggacaucaucaucccagcuag

SEQ ID NO: 398453 - RNA, 32 nt, Human
cucuaagguugggcagggugacccugaaguga

SEQ ID NO: 398454 - RNA, 25 nt, Human
cucuaagguuuucaucugcuuguuu

SEQ ID NO: 398455 - RNA, 32 nt, Human
cucuaaguucuugucucuggccagaggugugg

SEQ ID NO: 398456 - RNA, 32 nt, Human
cucuaauaaaaauacaaaaauuagccaggcau

SEQ ID NO: 398457 - RNA, 32 nt, Human
cucuaauaaaaauacaaaaauuagccaggcgu

SEQ ID NO: 398458 - RNA, 32 nt, Human
cucuaauaaaaauacaaaaauuagcuggacau

SEQ ID NO: 398459 - RNA, 32 nt, Human
cucuaauaaaaauacaaaaauuagcugggcau

SEQ ID NO: 398460 - RNA, 32 nt, Human
cucuaauaaaaauacaaaacuuagcugggcgu

SEQ ID NO: 398461 - RNA, 32 nt, Human
cucuaauaaaaauacgaaaaauuagcugggca

SEQ ID NO: 398462 - RNA, 32 nt, Human
cucuaauaaaaauauaaaaauuagccuggcau

SEQ ID NO: 398463 - RNA, 32 nt, Human
cucuaauaaccagcuacaaggaacggaggccc

SEQ ID NO: 398464 - RNA, 32 nt, Human
cucuaauaacuugcauuuccuuaucuauggau

SEQ ID NO: 398465 - RNA, 32 nt, Human
cucuaauaggugaugcaugagcaaacagugag

SEQ ID NO: 398466 - RNA, 32 nt, Human
cucuaauaugaacauuaguuugagguaguuuu

SEQ ID NO: 398467 - RNA, 21 nt, Human
cucuaaucccagguacuuggg

SEQ ID NO: 398468 - RNA, 32 nt, Human
cucuaaucccuguguuccuucucccccaucuu

SEQ ID NO: 398469 - RNA, 32 nt, Human
cucuaaucuccucuacaaucauccucccuugu

SEQ ID NO: 398470 - RNA, 32 nt, Human
cucuaaucugagcugcagccuggcugguccuc

SEQ ID NO: 398471 - RNA, 32 nt, Human
cucuaaugccugugucccuuacuuugguuaau

SEQ ID NO: 398472 - RNA, 18 nt, Human
cucuaauggacuguucca

SEQ ID NO: 398473 - RNA, 28 nt, Human
cucuaauuaagaacugccucauugagcc

SEQ ID NO: 398474 - RNA, 32 nt, Human
cucuaauuauuuuucuccugaacaaaauuacc

SEQ ID NO: 398475 - RNA, 32 nt, Human
cucuaauucaagcgaauguuggaacaccauga

SEQ ID NO: 398476 - RNA, 32 nt, Human
cucuaauuguaauccccacaugucgagggagg

SEQ ID NO: 398477 - RNA, 32 nt, Human
cucuacaaaaacuacaaaaauuagccgggugu

SEQ ID NO: 398478 - RNA, 32 nt, Human
cucuacaaaaaguacaaaaauuagucgggcgu

SEQ ID NO: 398479 - RNA, 32 nt, Human
cucuacaaaaaguagaaaaauuagcugagugu

SEQ ID NO: 398480 - RNA, 32 nt, Human
cucuacaaaaauaagaaaauuagccaggugua

SEQ ID NO: 398481 - RNA, 32 nt, Human
cucuacaaaaauacaaaaauuagccaggcgug

SEQ ID NO: 398482 - RNA, 32 nt, Human
cucuacaaaaauacaaaaauuagccaggugug

SEQ ID NO: 398483 - RNA, 32 nt, Human
cucuacaaaaauacaaaaauuagccagguuug

SEQ ID NO: 398484 - RNA, 32 nt, Human
cucuacaaaaauacaaaaauuaggccgggugc

SEQ ID NO: 398485 - RNA, 32 nt, Human
cucuacaaaaauacaaaauuagccagguaugg

SEQ ID NO: 398486 - RNA, 32 nt, Human
cucuacaaaacauacaaaaauuagcugagcgu

SEQ ID NO: 398487 - RNA, 32 nt, Human
cucuacaaaacaugcaaaaauuagcugggcau

SEQ ID NO: 398488 - RNA, 32 nt, Human
cucuacaaaacuuaaaaguuagccaggccugg

SEQ ID NO: 398489 - RNA, 19 nt, Human
cucuacaaaagaaaaauua

SEQ ID NO: 398490 - RNA, 32 nt, Human
cucuacaaaagaugcaagaauuagcugggugu

SEQ ID NO: 398491 - RNA, 32 nt, Human
cucuacaaaaguacaaaaauuagccaggcgug

SEQ ID NO: 398492 - RNA, 32 nt, Human
cucuacaaaauauacaaaaauuagccaggcau

SEQ ID NO: 398493 - RNA, 32 nt, Human
cucuacaaaauaucuaaaaauuagcugggcac

SEQ ID NO: 398494 - RNA, 32 nt, Human
cucuacaaacaauacaaaaauuagccaggcau

SEQ ID NO: 398495 - RNA, 32 nt, Human
cucuacaaacauuuuaaaaauuagcugggugu

SEQ ID NO: 398496 - RNA, 32 nt, Human
cucuacaaagaauacgaacauuagcugggucu

SEQ ID NO: 398497 - RNA, 32 nt, Human
cucuacaacagugaucaucacagaggacuucu

SEQ ID NO: 398498 - RNA, 32 nt, Human
cucuacaacuccugccacuguuggccaugucg

SEQ ID NO: 398499 - RNA, 32 nt, Human
cucuacaacugaguccuuaaacagggcaucuc

SEQ ID NO: 398500 - RNA, 32 nt, Human
cucuacaagugccugcuaucccucucccacuc

SEQ ID NO: 398501 - RNA, 32 nt, Human
cucuacacagaucagacucaugugcagaaucg

SEQ ID NO: 398502 - RNA, 18 nt, Human
cucuacaccaccaucacc

SEQ ID NO: 398503 - RNA, 32 nt, Human
cucuacacugcaagcugcauuccagccacaac

SEQ ID NO: 398504 - RNA, 32 nt, Human
cucuacacugcaccauccgccggcaaccgcuc

SEQ ID NO: 398505 - RNA, 18 nt, Human
cucuacacugggccugug

SEQ ID NO: 398506 - RNA, 32 nt, Human
cucuacagaagauacaaaaauuggcugggcgu

SEQ ID NO: 398507 - RNA, 32 nt, Human
cucuacagacacaauccucaaaccaacaaaac

SEQ ID NO: 398508 - RNA, 32 nt, Human
cucuacagacaggggcgcugcugcagaugcuc

SEQ ID NO: 398509 - RNA, 32 nt, Human
cucuacagaguccucaagcuggugucccucca

SEQ ID NO: 398510 - RNA, 32 nt, Human
cucuacagcagcuucacugccugaaaaugaaa

SEQ ID NO: 398511 - RNA, 32 nt, Human
cucuacagccuggaagacagaguaagauccaa

SEQ ID NO: 398512 - RNA, 32 nt, Human
cucuacaggaugagggagagguugauucuguc

SEQ ID NO: 398513 - RNA, 32 nt, Human
cucuacaggccagccucugccucacaguggac

SEQ ID NO: 398514 - RNA, 32 nt, Human
cucuacagguggggcagagagggugguggaca

SEQ ID NO: 398515 - RNA, 32 nt, Human
cucuacauaaaauacaaaaacuuagaugggca

SEQ ID NO: 398516 - RNA, 32 nt, Human
cucuacauaaaauacaaaaauuagcugggcgu

SEQ ID NO: 398517 - RNA, 32 nt, Human
cucuacauccccagcagggaguggccucuccc

SEQ ID NO: 398518 - RNA, 30 nt, Human
cucuacauccucuccagcaccuguuguuuc

SEQ ID NO: 398519 - RNA, 32 nt, Human
cucuacaucuucugccuuagucucaguuugug

SEQ ID NO: 398520 - RNA, 32 nt, Human
cucuacaugacacaguuaccacccucauucuu

SEQ ID NO: 398521 - RNA, 32 nt, Human
cucuacaugcuuguugacagagagagauacuc

SEQ ID NO: 398522 - RNA, 32 nt, Human
cucuaccaaaaauacaaaaauuaaccaugcgu

SEQ ID NO: 398523 - RNA, 32 nt, Human
cucuaccaaaaauacaaaaauuagccacgcau

SEQ ID NO: 398524 - RNA, 32 nt, Human
cucuaccaaaaauacaaaaauuagccagacgu

SEQ ID NO: 398525 - RNA, 32 nt, Human
cucuaccaaaaauacaaaaauuagccaggcau

SEQ ID NO: 398526 - RNA, 32 nt, Human
cucuaccaaaaauacaaaaauuagccaggcgu

SEQ ID NO: 398527 - RNA, 32 nt, Human
cucuaccaaaaauacaaaaauuagccgggcgu

SEQ ID NO: 398528 - RNA, 32 nt, Human
cucuaccaaaaauacaaaaauuagccgggugu

SEQ ID NO: 398529 - RNA, 32 nt, Human
cucuaccaaaaauacaaaaauuagcuagacau

SEQ ID NO: 398530 - RNA, 32 nt, Human
cucuaccaaaaauacaaaaauuagcugggcgu

SEQ ID NO: 398531 - RNA, 32 nt, Human
cucuaccaaaaauacaaaaauuagcugggcuu

SEQ ID NO: 398532 - RNA, 32 nt, Human
cucuaccaaaaauacaaaaauuagcugggugc

SEQ ID NO: 398533 - RNA, 32 nt, Human
cucuaccaaaaauacaaaaauucaccaggcau

SEQ ID NO: 398534 - RNA, 32 nt, Human
cucuaccaaaaauacaggaaauuaucugggca

SEQ ID NO: 398535 - RNA, 32 nt, Human
cucuaccaaaauacaaaaauuagccgggcaug

SEQ ID NO: 398536 - RNA, 32 nt, Human
cucuaccaaaauuacaaaaauuagccgagcau

SEQ ID NO: 398537 - RNA, 31 nt, Human
cucuaccacagcuacgugccagaguuguuuu

SEQ ID NO: 398538 - RNA, 32 nt, Human
cucuaccacagcuacgugccagaguuguuuuc

SEQ ID NO: 398539 - RNA, 32 nt, Human
cucuaccacagugucccugaaaccacaugcau

SEQ ID NO: 398540 - RNA, 32 nt, Human
cucuaccacccaggcuggagugcaguggugug

SEQ ID NO: 398541 - RNA, 26 nt, Human
cucuaccacccagucuggagugcagu

SEQ ID NO: 398542 - RNA, 32 nt, Human
cucuaccagcaucugcugagcuaugagccaaa

SEQ ID NO: 398543 - RNA, 32 nt, Human
cucuaccaggaggagaccagguugcaguggcg

SEQ ID NO: 398544 - RNA, 32 nt, Human
cucuaccaguuccuguuucuucugagccagac

SEQ ID NO: 398545 - RNA, 32 nt, Human
cucuacccacagauggcccugggaaucaauuc

SEQ ID NO: 398546 - RNA, 32 nt, Human
cucuacccacagugacgugguaucugaugaag

SEQ ID NO: 398547 - RNA, 32 nt, Human
cucuacccacccucuucucucuucucuucucc

SEQ ID NO: 398548 - RNA, 32 nt, Human
cucuacccagcccugggcaguucccucaacag

SEQ ID NO: 398549 - RNA, 32 nt, Human
cucuacccaggaacaaacugugccugaaccug

SEQ ID NO: 398550 - RNA, 20 nt, Human
cucuaccccagggcccucaa

SEQ ID NO: 398551 - RNA, 32 nt, Human
cucuacccccuucugagaacaucccccacaga

SEQ ID NO: 398552 - RNA, 32 nt, Human
cucuacccgccacugcauuccacagccuguag

SEQ ID NO: 398553 - RNA, 32 nt, Human
cucuacccuacaugaucuggagcaacagcuag

SEQ ID NO: 398554 - RNA, 32 nt, Human
cucuacccuacaugaucuggagcaacagcugg

SEQ ID NO: 398555 - RNA, 32 nt, Human
cucuacccucauucacaucuagccaagccagu

SEQ ID NO: 398556 - RNA, 32 nt, Human
cucuacccucauucauccuuuugggcuaauug

SEQ ID NO: 398557 - RNA, 32 nt, Human
cucuacccuccagaaccugacgacugggccau

SEQ ID NO: 398558 - RNA, 32 nt, Human
cucuacccugcucccugcuuuggcugaggggc

SEQ ID NO: 398559 - RNA, 32 nt, Human
cucuacccuucaggacccuccccaccagcuca

SEQ ID NO: 398560 - RNA, 32 nt, Human
cucuacccuuucacagugagugagugaguaca

SEQ ID NO: 398561 - RNA, 32 nt, Human
cucuaccuacuucuugguauuccgaauuguuc

SEQ ID NO: 398562 - RNA, 32 nt, Human
cucuaccucacugccaccacuccugcuuuuag

SEQ ID NO: 398563 - RNA, 32 nt, Human
cucuaccuccacccccaccggccugacgcugu

SEQ ID NO: 398564 - RNA, 32 nt, Human
cucuaccuccauccuugaaucauccacuuuua

SEQ ID NO: 398565 - RNA, 32 nt, Human
cucuaccucccaaagugcugggauuacagaca

SEQ ID NO: 398566 - RNA, 32 nt, Human
cucuaccucccaaagugcugggauuacaggca

SEQ ID NO: 398567 - RNA, 32 nt, Human
cucuaccucucuauacuaaucucccuacaaau

SEQ ID NO: 398568 - RNA, 20 nt, Human
cucuaccucuuugccuccug

SEQ ID NO: 398569 - RNA, 32 nt, Human
cucuaccugccugguccagcugggacccugcc

SEQ ID NO: 398570 - RNA, 32 nt, Human
cucuaccugcugugcuuauuugcauggacuuu

SEQ ID NO: 398571 - RNA, 32 nt, Human
cucuaccuggccugcuuacucucccacgugcc

SEQ ID NO: 398572 - RNA, 32 nt, Human
cucuaccuguucucugcaaucauccaaaauuu

SEQ ID NO: 398573 - RNA, 32 nt, Human
cucuaccuucaagaagcauuucaaggcuaaua

SEQ ID NO: 398574 - RNA, 32 nt, Human
cucuaccuucaccaccaccacugcccaucuug

SEQ ID NO: 398575 - RNA, 32 nt, Human
cucuaccuucccacucaccuuccccagcuaca

SEQ ID NO: 398576 - RNA, 17 nt, Human
cucuaccuuggugcucu

SEQ ID NO: 398577 - RNA, 32 nt, Human
cucuaccuuuuaaaauugaauaguuuauuucu

SEQ ID NO: 398578 - RNA, 29 nt, Human
cucuacgaaaaauacaaaaauuaacuggg

SEQ ID NO: 398579 - RNA, 32 nt, Human
cucuacgaaaaauacaaaaauuagcugggcau

SEQ ID NO: 398580 - RNA, 32 nt, Human
cucuacgaaaauuacaaaaauuagcuggcaug

SEQ ID NO: 398581 - RNA, 20 nt, Human
cucuacgaccgccguugccg

SEQ ID NO: 398582 - RNA, 32 nt, Human
cucuacgagaccagagagacuguaguucccua

SEQ ID NO: 398583 - RNA, 28 nt, Human
cucuacgccaaugaggccucaucugugc

SEQ ID NO: 398584 - RNA, 32 nt, Human
cucuacgcugugaauauugccuggugaucaag

SEQ ID NO: 398585 - RNA, 22 nt, Human
cucuacggaauucccuguauua

SEQ ID NO: 398586 - RNA, 32 nt, Human
cucuacgggaaagagagguaggagaggcugcg

SEQ ID NO: 398587 - RNA, 32 nt, Human
cucuacgucucugugcagaaccugagccgucc

SEQ ID NO: 398588 - RNA, 32 nt, Human
cucuacguugcccaggcuggucucgaacuccu

SEQ ID NO: 398589 - RNA, 32 nt, Human
cucuacuaaaaacacaaaaauuagcuaggcau

SEQ ID NO: 398590 - RNA, 32 nt, Human
cucuacuaaaaacacaaaaauuagcugagcau

SEQ ID NO: 398591 - RNA, 32 nt, Human
cucuacuaaaaacacaaaaauuagcugggcau

SEQ ID NO: 398592 - RNA, 32 nt, Human
cucuacuaaaaacacaaaaauuagcugggcgu

SEQ ID NO: 398593 - RNA, 32 nt, Human
cucuacuaaaaacacaaaaauuagcugggugu

SEQ ID NO: 398594 - RNA, 32 nt, Human
cucuacuaaaaacacaaaaauuaucugggcau

SEQ ID NO: 398595 - RNA, 32 nt, Human
cucuacuaaaaacacaaauuagccaggcgugg

SEQ ID NO: 398596 - RNA, 32 nt, Human
cucuacuaaaaacagaaaauuauccgggcgug

SEQ ID NO: 398597 - RNA, 32 nt, Human
cucuacuaaaaacauaaaaauuagcugggggu

SEQ ID NO: 398598 - RNA, 32 nt, Human
cucuacuaaaaacgcaaaauuagccgggcgug

SEQ ID NO: 398599 - RNA, 19 nt, Human
cucuacuaaaaauacaaaa

SEQ ID NO: 398600 - RNA, 32 nt, Human
cucuacuaaaaauacaaaaacuaacugggcgu

SEQ ID NO: 398601 - RNA, 32 nt, Human
cucuacuaaaaauacaaaaacuagccuggcaa

SEQ ID NO: 398602 - RNA, 32 nt, Human
cucuacuaaaaauacaaaaacuagcugggcau

SEQ ID NO: 398603 - RNA, 32 nt, Human
cucuacuaaaaauacaaaaacuuagccgggca

SEQ ID NO: 398604 - RNA, 32 nt, Human
cucuacuaaaaauacaaaaacuuagcugggug

SEQ ID NO: 398605 - RNA, 32 nt, Human
cucuacuaaaaauacaaaaagccagguguggu

SEQ ID NO: 398606 - RNA, 32 nt, Human
cucuacuaaaaauacaaaaaguagcugaaugu

SEQ ID NO: 398607 - RNA, 32 nt, Human
cucuacuaaaaauacaaaaaguuagcugggca

SEQ ID NO: 398608 - RNA, 32 nt, Human
cucuacuaaaaauacaaaaaucagcugggcau

SEQ ID NO: 398609 - RNA, 32 nt, Human
cucuacuaaaaauacaaaaaugagcuaggcau

SEQ ID NO: 398610 - RNA, 32 nt, Human
cucuacuaaaaauacaaaaaugagcugggcau

SEQ ID NO: 398611 - RNA, 32 nt, Human
cucuacuaaaaauacaaaaaugagcugggcuu

SEQ ID NO: 398612 - RNA, 32 nt, Human
cucuacuaaaaauacaaaaaugagcugggugu

SEQ ID NO: 398613 - RNA, 32 nt, Human
cucuacuaaaaauacaaaaauuaacagcagag

SEQ ID NO: 398614 - RNA, 32 nt, Human
cucuacuaaaaauacaaaaauuaaccaggcuu

SEQ ID NO: 398615 - RNA, 32 nt, Human
cucuacuaaaaauacaaaaauuaaccaguugu

SEQ ID NO: 398616 - RNA, 32 nt, Human
cucuacuaaaaauacaaaaauuaacugggcgu

SEQ ID NO: 398617 - RNA, 32 nt, Human
cucuacuaaaaauacaaaaauuaacugggugc

SEQ ID NO: 398618 - RNA, 32 nt, Human
cucuacuaaaaauacaaaaauuaacugggugu

SEQ ID NO: 398619 - RNA, 32 nt, Human
cucuacuaaaaauacaaaaauuaccugggcgu

SEQ ID NO: 398620 - RNA, 32 nt, Human
cucuacuaaaaauacaaaaauuagaugggugu

SEQ ID NO: 398621 - RNA, 32 nt, Human
cucuacuaaaaauacaaaaauuagcagagcau

SEQ ID NO: 398622 - RNA, 32 nt, Human
cucuacuaaaaauacaaaaauuagcagggcau

SEQ ID NO: 398623 - RNA, 32 nt, Human
cucuacuaaaaauacaaaaauuagccaagugc

SEQ ID NO: 398624 - RNA, 32 nt, Human
cucuacuaaaaauacaaaaauuagccaagugu

SEQ ID NO: 398625 - RNA, 32 nt, Human
cucuacuaaaaauacaaaaauuagccagacgu

SEQ ID NO: 398626 - RNA, 32 nt, Human
cucuacuaaaaauacaaaaauuagccaggacu

SEQ ID NO: 398627 - RNA, 32 nt, Human
cucuacuaaaaauacaaaaauuagccaggcac

SEQ ID NO: 398628 - RNA, 32 nt, Human
cucuacuaaaaauacaaaaauuagccaggcau

SEQ ID NO: 398629 - RNA, 32 nt, Human
cucuacuaaaaauacaaaaauuagccaggcgu

SEQ ID NO: 398630 - RNA, 32 nt, Human
cucuacuaaaaauacaaaaauuagccaggcuu

SEQ ID NO: 398631 - RNA, 32 nt, Human
cucuacuaaaaauacaaaaauuagccaggggu

SEQ ID NO: 398632 - RNA, 32 nt, Human
cucuacuaaaaauacaaaaauuagccagguau

SEQ ID NO: 398633 - RNA, 32 nt, Human
cucuacuaaaaauacaaaaauuagccaggugg

SEQ ID NO: 398634 - RNA, 32 nt, Human
cucuacuaaaaauacaaaaauuagccaggugu

SEQ ID NO: 398635 - RNA, 32 nt, Human
cucuacuaaaaauacaaaaauuagccagucac

SEQ ID NO: 398636 - RNA, 32 nt, Human
cucuacuaaaaauacaaaaauuagccaugcau

SEQ ID NO: 398637 - RNA, 32 nt, Human
cucuacuaaaaauacaaaaauuagccaugcgu

SEQ ID NO: 398638 - RNA, 32 nt, Human
cucuacuaaaaauacaaaaauuagcccgacau

SEQ ID NO: 398639 - RNA, 32 nt, Human
cucuacuaaaaauacaaaaauuagcccggcau

SEQ ID NO: 398640 - RNA, 32 nt, Human
cucuacuaaaaauacaaaaauuagcccggcgu

SEQ ID NO: 398641 - RNA, 32 nt, Human
cucuacuaaaaauacaaaaauuagcccggugu

SEQ ID NO: 398642 - RNA, 32 nt, Human
cucuacuaaaaauacaaaaauuagccgacaug

SEQ ID NO: 398643 - RNA, 32 nt, Human
cucuacuaaaaauacaaaaauuagccgagcau

SEQ ID NO: 398644 - RNA, 32 nt, Human
cucuacuaaaaauacaaaaauuagccgagcgu

SEQ ID NO: 398645 - RNA, 32 nt, Human
cucuacuaaaaauacaaaaauuagccgagugu

SEQ ID NO: 398646 - RNA, 32 nt, Human
cucuacuaaaaauacaaaaauuagccggacgc

SEQ ID NO: 398647 - RNA, 32 nt, Human
cucuacuaaaaauacaaaaauuagccggacgu

SEQ ID NO: 398648 - RNA, 32 nt, Human
cucuacuaaaaauacaaaaauuagccggcagg

SEQ ID NO: 398649 - RNA, 32 nt, Human
cucuacuaaaaauacaaaaauuagccgggcau

SEQ ID NO: 398650 - RNA, 32 nt, Human
cucuacuaaaaauacaaaaauuagccgggccu

SEQ ID NO: 398651 - RNA, 32 nt, Human
cucuacuaaaaauacaaaaauuagccgggcgu

SEQ ID NO: 398652 - RNA, 32 nt, Human
cucuacuaaaaauacaaaaauuagccggguag

SEQ ID NO: 398653 - RNA, 32 nt, Human
cucuacuaaaaauacaaaaauuagccgggugu

SEQ ID NO: 398654 - RNA, 32 nt, Human
cucuacuaaaaauacaaaaauuagccgguggu

SEQ ID NO: 398655 - RNA, 32 nt, Human
cucuacuaaaaauacaaaaauuagccgugcau

SEQ ID NO: 398656 - RNA, 32 nt, Human
cucuacuaaaaauacaaaaauuagccuggcau

SEQ ID NO: 398657 - RNA, 32 nt, Human
cucuacuaaaaauacaaaaauuagccuggcgu

SEQ ID NO: 398658 - RNA, 32 nt, Human
cucuacuaaaaauacaaaaauuagccuggggu

SEQ ID NO: 398659 - RNA, 32 nt, Human
cucuacuaaaaauacaaaaauuagccuggugu

SEQ ID NO: 398660 - RNA, 32 nt, Human
cucuacuaaaaauacaaaaauuagcggccggg

SEQ ID NO: 398661 - RNA, 32 nt, Human
cucuacuaaaaauacaaaaauuagcgggcgua

SEQ ID NO: 398662 - RNA, 32 nt, Human
cucuacuaaaaauacaaaaauuagcggggcgg

SEQ ID NO: 398663 - RNA, 32 nt, Human
cucuacuaaaaauacaaaaauuagcuaggcau

SEQ ID NO: 398664 - RNA, 32 nt, Human
cucuacuaaaaauacaaaaauuagcuaggcgg

SEQ ID NO: 398665 - RNA, 32 nt, Human
cucuacuaaaaauacaaaaauuagcuaggcgu

SEQ ID NO: 398666 - RNA, 32 nt, Human
cucuacuaaaaauacaaaaauuagcuagguau

SEQ ID NO: 398667 - RNA, 32 nt, Human
cucuacuaaaaauacaaaaauuagcugagcau

SEQ ID NO: 398668 - RNA, 32 nt, Human
cucuacuaaaaauacaaaaauuagcugagcuc

SEQ ID NO: 398669 - RNA, 32 nt, Human
cucuacuaaaaauacaaaaauuagcugaucau

SEQ ID NO: 398670 - RNA, 32 nt, Human
cucuacuaaaaauacaaaaauuagcugcacau

SEQ ID NO: 398671 - RNA, 32 nt, Human
cucuacuaaaaauacaaaaauuagcuggacau

SEQ ID NO: 398672 - RNA, 32 nt, Human
cucuacuaaaaauacaaaaauuagcuggacgu

SEQ ID NO: 398673 - RNA, 32 nt, Human
cucuacuaaaaauacaaaaauuagcuggaugu

SEQ ID NO: 398674 - RNA, 29 nt, Human
cucuacuaaaaauacaaaaauuagcuggg

SEQ ID NO: 398675 - RNA, 32 nt, Human
cucuacuaaaaauacaaaaauuagcugggcac

SEQ ID NO: 398676 - RNA, 32 nt, Human
cucuacuaaaaauacaaaaauuagcugggcau

SEQ ID NO: 398677 - RNA, 32 nt, Human
cucuacuaaaaauacaaaaauuagcugggcgc

SEQ ID NO: 398678 - RNA, 32 nt, Human
cucuacuaaaaauacaaaaauuagcugggcgg

SEQ ID NO: 398679 - RNA, 32 nt, Human
cucuacuaaaaauacaaaaauuagcugggcgu

SEQ ID NO: 398680 - RNA, 32 nt, Human
cucuacuaaaaauacaaaaauuagcugggggu

SEQ ID NO: 398681 - RNA, 32 nt, Human
cucuacuaaaaauacaaaaauuagcugggugc

SEQ ID NO: 398682 - RNA, 32 nt, Human
cucuacuaaaaauacaaaaauuagcugggugu

SEQ ID NO: 398683 - RNA, 32 nt, Human
cucuacuaaaaauacaaaaauuagcugugcau

SEQ ID NO: 398684 - RNA, 32 nt, Human
cucuacuaaaaauacaaaaauuagcuuggugu

SEQ ID NO: 398685 - RNA, 32 nt, Human
cucuacuaaaaauacaaaaauuaggcauggug

SEQ ID NO: 398686 - RNA, 32 nt, Human
cucuacuaaaaauacaaaaauuaggugggucu

SEQ ID NO: 398687 - RNA, 32 nt, Human
cucuacuaaaaauacaaaaauuagucaggcgc

SEQ ID NO: 398688 - RNA, 32 nt, Human
cucuacuaaaaauacaaaaauuagucaggcgu

SEQ ID NO: 398689 - RNA, 32 nt, Human
cucuacuaaaaauacaaaaauuagucaggugu

SEQ ID NO: 398690 - RNA, 32 nt, Human
cucuacuaaaaauacaaaaauuagucgggcgu

SEQ ID NO: 398691 - RNA, 32 nt, Human
cucuacuaaaaauacaaaaauuaguucggcau

SEQ ID NO: 398692 - RNA, 32 nt, Human
cucuacuaaaaauacaaaaauuaguugggcau

SEQ ID NO: 398693 - RNA, 32 nt, Human
cucuacuaaaaauacaaaaauuaucugggcac

SEQ ID NO: 398694 - RNA, 32 nt, Human
cucuacuaaaaauacaaaaauuaucugggcau

SEQ ID NO: 398695 - RNA, 32 nt, Human
cucuacuaaaaauacaaaaauuaucugggcuu

SEQ ID NO: 398696 - RNA, 32 nt, Human
cucuacuaaaaauacaaaaauuaucugggugu

SEQ ID NO: 398697 - RNA, 32 nt, Human
cucuacuaaaaauacaaaaauuggccgggugu

SEQ ID NO: 398698 - RNA, 32 nt, Human
cucuacuaaaaauacaaaaauuggcugggcau

SEQ ID NO: 398699 - RNA, 32 nt, Human
cucuacuaaaaauacaaaaauuggucgggcau

SEQ ID NO: 398700 - RNA, 32 nt, Human
cucuacuaaaaauacaaaaauuguccgggugu

SEQ ID NO: 398701 - RNA, 32 nt, Human
cucuacuaaaaauacaaaaauuuagccaggca

SEQ ID NO: 398702 - RNA, 32 nt, Human
cucuacuaaaaauacaaaaauuugcugggcau

SEQ ID NO: 398703 - RNA, 32 nt, Human
cucuacuaaaaauacaaaaauuugcugggcuu

SEQ ID NO: 398704 - RNA, 32 nt, Human
cucuacuaaaaauacaaaacaauuagccgggc

SEQ ID NO: 398705 - RNA, 32 nt, Human
cucuacuaaaaauacaaaacauuagccgggcg

SEQ ID NO: 398706 - RNA, 32 nt, Human
cucuacuaaaaauacaaaaccuagcugggcgu

SEQ ID NO: 398707 - RNA, 32 nt, Human
cucuacuaaaaauacaaaacuagcugggcauu

SEQ ID NO: 398708 - RNA, 32 nt, Human
cucuacuaaaaauacaaaagaaaauuagccgg

SEQ ID NO: 398709 - RNA, 32 nt, Human
cucuacuaaaaauacaaaaguuagcagggcgu

SEQ ID NO: 398710 - RNA, 32 nt, Human
cucuacuaaaaauacaaaaguuagccgggugu

SEQ ID NO: 398711 - RNA, 32 nt, Human
cucuacuaaaaauacaaaaguuagcuggggcu

SEQ ID NO: 398712 - RNA, 32 nt, Human
cucuacuaaaaauacaaaaguuagcugggugu

SEQ ID NO: 398713 - RNA, 32 nt, Human
cucuacuaaaaauacaaaauauuagcugggcg

SEQ ID NO: 398714 - RNA, 32 nt, Human
cucuacuaaaaauacaaaauuaacugggcgug

SEQ ID NO: 398715 - RNA, 32 nt, Human
cucuacuaaaaauacaaaauuaacugggugcg

SEQ ID NO: 398716 - RNA, 32 nt, Human
cucuacuaaaaauacaaaauuaccugggcgug

SEQ ID NO: 398717 - RNA, 32 nt, Human
cucuacuaaaaauacaaaauuagcugggcaug

SEQ ID NO: 398718 - RNA, 32 nt, Human
cucuacuaaaaauacaaaauuagcugggcgug

SEQ ID NO: 398719 - RNA, 32 nt, Human
cucuacuaaaaauacaaaauuagcuggguggg

SEQ ID NO: 398720 - RNA, 32 nt, Human
cucuacuaaaaauacaaaauuagcugggugug

SEQ ID NO: 398721 - RNA, 32 nt, Human
cucuacuaaaaauacaaaauuagucaggcauu

SEQ ID NO: 398722 - RNA, 32 nt, Human
cucuacuaaaaauacaaaauuagucgggcgua

SEQ ID NO: 398723 - RNA, 32 nt, Human
cucuacuaaaaauacaaaauuagucggguaug

SEQ ID NO: 398724 - RNA, 32 nt, Human
cucuacuaaaaauacaaaauuuaucugggugu

SEQ ID NO: 398725 - RNA, 32 nt, Human
cucuacuaaaaauacaaacaaaauuagcuggg

SEQ ID NO: 398726 - RNA, 32 nt, Human
cucuacuaaaaauacaaacaaauuagccgggc

SEQ ID NO: 398727 - RNA, 32 nt, Human
cucuacuaaaaauacaaacaauuaacugagca

SEQ ID NO: 398728 - RNA, 32 nt, Human
cucuacuaaaaauacaaacuuggcugggcuua

SEQ ID NO: 398729 - RNA, 32 nt, Human
cucuacuaaaaauacaaauauuagcuggauau

SEQ ID NO: 398730 - RNA, 32 nt, Human
cucuacuaaaaauacaagaauuagccaggugu

SEQ ID NO: 398731 - RNA, 32 nt, Human
cucuacuaaaaauacaagaauuagcugggcgu

SEQ ID NO: 398732 - RNA, 32 nt, Human
cucuacuaaaaauacaagaauuagcugggugu

SEQ ID NO: 398733 - RNA, 32 nt, Human
cucuacuaaaaauacaaggauuagcugggcau

SEQ ID NO: 398734 - RNA, 32 nt, Human
cucuacuaaaaauacaauaaauuagcugggca

SEQ ID NO: 398735 - RNA, 32 nt, Human
cucuacuaaaaauacaauaauuagcugggcgu

SEQ ID NO: 398736 - RNA, 32 nt, Human
cucuacuaaaaauacacaaaauuagcugggcg

SEQ ID NO: 398737 - RNA, 32 nt, Human
cucuacuaaaaauacacaaauuagcuaggcau

SEQ ID NO: 398738 - RNA, 32 nt, Human
cucuacuaaaaauacagaaaauuagcugggcg

SEQ ID NO: 398739 - RNA, 32 nt, Human
cucuacuaaaaauacagaaauuagccgggcau

SEQ ID NO: 398740 - RNA, 32 nt, Human
cucuacuaaaaauacagaaauuagccgggcgu

SEQ ID NO: 398741 - RNA, 32 nt, Human
cucuacuaaaaauacagaaauuagccggucau

SEQ ID NO: 398742 - RNA, 32 nt, Human
cucuacuaaaaauacagaaauuagcugggugu

SEQ ID NO: 398743 - RNA, 32 nt, Human
cucuacuaaaaauacagaaauucacagggugu

SEQ ID NO: 398744 - RNA, 32 nt, Human
cucuacuaaaaauacagaauuagcugagugug

SEQ ID NO: 398745 - RNA, 32 nt, Human
cucuacuaaaaauacagaauuagucaggcgug

SEQ ID NO: 398746 - RNA, 32 nt, Human
cucuacuaaaaauacagcaaauuagcugggcg

SEQ ID NO: 398747 - RNA, 32 nt, Human
cucuacuaaaaauaccaaaaauuagccgagcg

SEQ ID NO: 398748 - RNA, 32 nt, Human
cucuacuaaaaauaccaaaaauuagccgggcg

SEQ ID NO: 398749 - RNA, 32 nt, Human
cucuacuaaaaauaccaaaauuagcugggcau

SEQ ID NO: 398750 - RNA, 32 nt, Human
cucuacuaaaaauacgaaaauuagccuggcgu

SEQ ID NO: 398751 - RNA, 32 nt, Human
cucuacuaaaaauacgaaaauuagcugggugu

SEQ ID NO: 398752 - RNA, 32 nt, Human
cucuacuaaaaauacgaaacuuagcugggcgu

SEQ ID NO: 398753 - RNA, 32 nt, Human
cucuacuaaaaauacgaaaguuagucgggcau

SEQ ID NO: 398754 - RNA, 32 nt, Human
cucuacuaaaaauagaaaaauuaagcugggca

SEQ ID NO: 398755 - RNA, 32 nt, Human
cucuacuaaaaauagaaaaauuagcuaggcau

SEQ ID NO: 398756 - RNA, 32 nt, Human
cucuacuaaaaauagaaaaauuagcuggccau

SEQ ID NO: 398757 - RNA, 32 nt, Human
cucuacuaaaaauagaaaaauuagcugggcau

SEQ ID NO: 398758 - RNA, 32 nt, Human
cucuacuaaaaauauaaaaauuagcagggcau

SEQ ID NO: 398759 - RNA, 32 nt, Human
cucuacuaaaaauauaaaaauuagccaaguuu

SEQ ID NO: 398760 - RNA, 32 nt, Human
cucuacuaaaaauauaaaaauuagccaggcau

SEQ ID NO: 398761 - RNA, 32 nt, Human
cucuacuaaaaauauaaaaauuagccaggcgu

SEQ ID NO: 398762 - RNA, 32 nt, Human
cucuacuaaaaauauaaaaauuagccgggcau

SEQ ID NO: 398763 - RNA, 32 nt, Human
cucuacuaaaaauauaaaaauuagccgggcgu

SEQ ID NO: 398764 - RNA, 32 nt, Human
cucuacuaaaaauauaaaaauuagcugggugu

SEQ ID NO: 398765 - RNA, 32 nt, Human
cucuacuaaaaauauaaaaauuagucgggcau

SEQ ID NO: 398766 - RNA, 32 nt, Human
cucuacuaaaaauaucaaaauuagcugggcac

SEQ ID NO: 398767 - RNA, 32 nt, Human
cucuacuaaaaauaugaaaauuagcugggcau

SEQ ID NO: 398768 - RNA, 32 nt, Human
cucuacuaaaaauaugaaaauuagcugggcuu

SEQ ID NO: 398769 - RNA, 32 nt, Human
cucuacuaaaaaugcaaaaauuagccaggcgu

SEQ ID NO: 398770 - RNA, 32 nt, Human
cucuacuaaaaaugcaaaaauuagccgggcgu

SEQ ID NO: 398771 - RNA, 32 nt, Human
cucuacuaaaaaugcaaaaauuagcuggacgu

SEQ ID NO: 398772 - RNA, 32 nt, Human
cucuacuaaaaaugcaaaaauuagcugggugu

SEQ ID NO: 398773 - RNA, 32 nt, Human
cucuacuaaaaaugcaaaaauuaguccggcgu

SEQ ID NO: 398774 - RNA, 32 nt, Human
cucuacuaaaaaugcaaacauuagcugggcau

SEQ ID NO: 398775 - RNA, 32 nt, Human
cucuacuaaaaauuuaaaaauuagcugggcau

SEQ ID NO: 398776 - RNA, 32 nt, Human
cucuacuaaaaauuugaaauuagccaggcaug

SEQ ID NO: 398777 - RNA, 32 nt, Human
cucuacuaaaacaaauacaaaacuucgcuggg

SEQ ID NO: 398778 - RNA, 32 nt, Human
cucuacuaaaacuacaaaaauuaacugggugu

SEQ ID NO: 398779 - RNA, 32 nt, Human
cucuacuaaaaguacaaaaauuagccaggcgg

SEQ ID NO: 398780 - RNA, 32 nt, Human
cucuacuaaaaguacaaaaauuagccaggcgu

SEQ ID NO: 398781 - RNA, 32 nt, Human
cucuacuaaaaguacaaaaauuagccaggugg

SEQ ID NO: 398782 - RNA, 32 nt, Human
cucuacuaaaaguacaaaaauuagccgggcgu

SEQ ID NO: 398783 - RNA, 32 nt, Human
cucuacuaaaaguacaaaaauuagcuggaugu

SEQ ID NO: 398784 - RNA, 32 nt, Human
cucuacuaaaaguacaaaaauuagcuggcgug

SEQ ID NO: 398785 - RNA, 32 nt, Human
cucuacuaaaaguacaaaaauuagcugggcau

SEQ ID NO: 398786 - RNA, 32 nt, Human
cucuacuaaaaguacaaaaauuagucagguau

SEQ ID NO: 398787 - RNA, 32 nt, Human
cucuacuaaaaguacaaaaguuagucaggcau

SEQ ID NO: 398788 - RNA, 32 nt, Human
cucuacuaaaauacaaaaauuagccagacaug

SEQ ID NO: 398789 - RNA, 32 nt, Human
cucuacuaaaauacaaaaauuagccgggcgua

SEQ ID NO: 398790 - RNA, 32 nt, Human
cucuacuaaaauacaaaauuagccaggcgugg

SEQ ID NO: 398791 - RNA, 32 nt, Human
cucuacuaaaauacacaaauuagcuaggcauu

SEQ ID NO: 398792 - RNA, 32 nt, Human
cucuacuaaaauacauaaauuagccgggugug

SEQ ID NO: 398793 - RNA, 32 nt, Human
cucuacuaaacauacaaaaauuagcuaggcgu

SEQ ID NO: 398794 - RNA, 32 nt, Human
cucuacuaaacauacaaaauuagcugggcaug

SEQ ID NO: 398795 - RNA, 32 nt, Human
cucuacuaaacaugcaaaaauuaccugggcau

SEQ ID NO: 398796 - RNA, 32 nt, Human
cucuacuaaacaugcaaaaauuagcugggcac

SEQ ID NO: 398797 - RNA, 32 nt, Human
cucuacuaaagauacaaaaagauuagcugggc

SEQ ID NO: 398798 - RNA, 32 nt, Human
cucuacuaaagauacaaaaauuagccgggcau

SEQ ID NO: 398799 - RNA, 32 nt, Human
cucuacuaaagauacaaaaauuagcugggugu

SEQ ID NO: 398800 - RNA, 32 nt, Human
cucuacuaaagauacaaaaauuugcugagcgu

SEQ ID NO: 398801 - RNA, 32 nt, Human
cucuacuaaagauauaaaaauuagcuggaugu

SEQ ID NO: 398802 - RNA, 32 nt, Human
cucuacuaaauacaaaaauuagcugggcgugg

SEQ ID NO: 398803 - RNA, 32 nt, Human
cucuacuaaauacagaaaauuagccaggcaug

SEQ ID NO: 398804 - RNA, 32 nt, Human
cucuacuaaauauacaaaaauuagcugggugu

SEQ ID NO: 398805 - RNA, 32 nt, Human
cucuacuaaauauacaaaaauuaguugggugu

SEQ ID NO: 398806 - RNA, 32 nt, Human
cucuacuaacaauauaaaaauuagcugggagu

SEQ ID NO: 398807 - RNA, 32 nt, Human
cucuacuaagaauacaaaaauuagccaggagu

SEQ ID NO: 398808 - RNA, 32 nt, Human
cucuacuaagaauacaaaaauuagccgggugu

SEQ ID NO: 398809 - RNA, 32 nt, Human
cucuacuaagaauacaaaauuagcugggcaug

SEQ ID NO: 398810 - RNA, 32 nt, Human
cucuacuaagaauauaaaaauuagcuggguau

SEQ ID NO: 398811 - RNA, 32 nt, Human
cucuacuaauaauacaaaaauuagcugggcau

SEQ ID NO: 398812 - RNA, 32 nt, Human
cucuacuacaaauacaaaaauuagcuggacgu

SEQ ID NO: 398813 - RNA, 32 nt, Human
cucuacuacaaauacaaaaauuagcugggugu

SEQ ID NO: 398814 - RNA, 32 nt, Human
cucuacuacaaauacgaaaauuagcugggcgu

SEQ ID NO: 398815 - RNA, 32 nt, Human
cucuacuacaugugacuggcaguauuaagugu

SEQ ID NO: 398816 - RNA, 32 nt, Human
cucuacuagaaauacaaaaauuagccaggugu

SEQ ID NO: 398817 - RNA, 32 nt, Human
cucuacuagaaauacaaaaauuagcuggauau

SEQ ID NO: 398818 - RNA, 32 nt, Human
cucuacuagaaauacaaaacaauuagcugggu

SEQ ID NO: 398819 - RNA, 32 nt, Human
cucuacuauuaagggacgacugccuucaagca

SEQ ID NO: 398820 - RNA, 32 nt, Human
cucuacucaagagcuccgucuccgucucgccc

SEQ ID NO: 398821 - RNA, 32 nt, Human
cucuacucacauauaauaaauacuaucuuaua

SEQ ID NO: 398822 - RNA, 32 nt, Human
cucuacucacaucuuuuaaucuugaagacuag

SEQ ID NO: 398823 - RNA, 32 nt, Human
cucuacucacucacuucauuguccucaccauc

SEQ ID NO: 398824 - RNA, 24 nt, Human
cucuacucacugcaaccuccaccu

SEQ ID NO: 398825 - RNA, 32 nt, Human
cucuacucacugcaaccuccaccucccggguu

SEQ ID NO: 398826 - RNA, 32 nt, Human
cucuacucacugcagccucaaucuccuggucu

SEQ ID NO: 398827 - RNA, 32 nt, Human
cucuacuccagcccuucucccucccucccuuc

SEQ ID NO: 398828 - RNA, 32 nt, Human
cucuacucccagcgcuggcuccaggcuccuca

SEQ ID NO: 398829 - RNA, 32 nt, Human
cucuacucccccagcuucuugcucuugacccu

SEQ ID NO: 398830 - RNA, 32 nt, Human
cucuacucccuagaaugucugucucccaagac

SEQ ID NO: 398831 - RNA, 32 nt, Human
cucuacucccugagcuuccccaccccaagcgc

SEQ ID NO: 398832 - RNA, 32 nt, Human
cucuacucuccucugccaugaggccauuuuca

SEQ ID NO: 398833 - RNA, 32 nt, Human
cucuacucuggccaacaacuuuguucucaucg

SEQ ID NO: 398834 - RNA, 32 nt, Human
cucuacugaaaauacaaaaauuagcuggaugu

SEQ ID NO: 398835 - RNA, 32 nt, Human
cucuacugaaaauacaaaaauuagcugggcgu

SEQ ID NO: 398836 - RNA, 32 nt, Human
cucuacugaaaauacaaaaauuagcugggugu

SEQ ID NO: 398837 - RNA, 32 nt, Human
cucuacugaaaauacaaaaauuagucaggugc

SEQ ID NO: 398838 - RNA, 32 nt, Human
cucuacugaaaauacaagaaauuagcugggac

SEQ ID NO: 398839 - RNA, 32 nt, Human
cucuacugaaaauacaauaauuagcugggcgu

SEQ ID NO: 398840 - RNA, 32 nt, Human
cucuacugaaaguacaaaaauuagcugggugu

SEQ ID NO: 398841 - RNA, 32 nt, Human
cucuacugagcaauuccuauuccaaccacgcc

SEQ ID NO: 398842 - RNA, 32 nt, Human
cucuacugagcuguaacaaagccucuuuaaau

SEQ ID NO: 398843 - RNA, 32 nt, Human
cucuacugcccagccccuccugauuucuuugg

SEQ ID NO: 398844 - RNA, 32 nt, Human
cucuacugcccuggcccguucauccuguguau

SEQ ID NO: 398845 - RNA, 32 nt, Human
cucuacugccuccugaauacacaugaaccccu

SEQ ID NO: 398846 - RNA, 23 nt, Human
cucuacugccuuguuccauauua

SEQ ID NO: 398847 - RNA, 32 nt, Human
cucuacugcucccucccucucuugccucuuaa

SEQ ID NO: 398848 - RNA, 32 nt, Human
cucuacuggcccagggcuucagcucuugguua

SEQ ID NO: 398849 - RNA, 32 nt, Human
cucuacuggcugucccugagccucuaguuccu

SEQ ID NO: 398850 - RNA, 32 nt, Human
cucuacugggaauccuccucaggcagguccca

SEQ ID NO: 398851 - RNA, 32 nt, Human
cucuacuggggcagccuggcugugggagguga

SEQ ID NO: 398852 - RNA, 32 nt, Human
cucuacugucucaaaauuuuguuuuaaaauaa

SEQ ID NO: 398853 - RNA, 32 nt, Human
cucuacugugaaggagcagggagcugccgagg

SEQ ID NO: 398854 - RNA, 32 nt, Human
cucuacuguucuuucuuuaauaguggcaaaug

SEQ ID NO: 398855 - RNA, 32 nt, Human
cucuacuguuugggacaguaagccaaauaccu

SEQ ID NO: 398856 - RNA, 32 nt, Human
cucuacuuaaaauacaaauauuagcugggcau

SEQ ID NO: 398857 - RNA, 32 nt, Human
cucuacuuaagaugcgaaaauuagccuggugu

SEQ ID NO: 398858 - RNA, 21 nt, Human
cucuacuuggccuauuugcca

SEQ ID NO: 398859 - RNA, 32 nt, Human
cucuacuuugggcugcgguuucaggcuuuuug

SEQ ID NO: 398860 - RNA, 32 nt, Human
cucuagaaauuuuucagaugcuucugggagac

SEQ ID NO: 398861 - RNA, 32 nt, Human
cucuagaacacgaggaaaaacagggucuugua

SEQ ID NO: 398862 - RNA, 32 nt, Human
cucuagaacccccacuuccaggcacucucagu

SEQ ID NO: 398863 - RNA, 32 nt, Human
cucuagaaggcaaaauuuaccugcugacaauu

SEQ ID NO: 398864 - RNA, 32 nt, Human
cucuagacaaguacacaggcccugccacccug

SEQ ID NO: 398865 - RNA, 32 nt, Human
cucuagacacugccacacagggucugcaaggu

SEQ ID NO: 398866 - RNA, 32 nt, Human
cucuagacuagucugggcaacauagugaggcc

SEQ ID NO: 398867 - RNA, 32 nt, Human
cucuagagaaugcugugcuguggaugacugca

SEQ ID NO: 398868 - RNA, 32 nt, Human
cucuagagccagcacaggucacugccugaccu

SEQ ID NO: 398869 - RNA, 21 nt, Human
cucuagaggcaagccaggcca

SEQ ID NO: 398870 - RNA, 32 nt, Human
cucuagaggcugaggugggaggaucacuugag

SEQ ID NO: 398871 - RNA, 32 nt, Human
cucuagaguagcugggauuacaggcgcaugcc

SEQ ID NO: 398872 - RNA, 23 nt, Human
cucuagagucugggcaaaauguu

SEQ ID NO: 398873 - RNA, 21 nt, Human
cucuagaucucuuuugugcug

SEQ ID NO: 398874 - RNA, 32 nt, Human
cucuagcaaaaauacaaaaauuagucaggagu

SEQ ID NO: 398875 - RNA, 32 nt, Human
cucuagcaaauacuucuuucuccuugcuugcc

SEQ ID NO: 398876 - RNA, 32 nt, Human
cucuagcacgaguucaauaugaucugggaauu

SEQ ID NO: 398877 - RNA, 32 nt, Human
cucuagcaucagugccugcuccugccugcccu

SEQ ID NO: 398878 - RNA, 32 nt, Human
cucuagcauggccccagcauucagccagucgg

SEQ ID NO: 398879 - RNA, 32 nt, Human
cucuagcauuuucauguuuaucuuuaauagca

SEQ ID NO: 398880 - RNA, 32 nt, Human
cucuagccaaaucacaccccagagccagaggc

SEQ ID NO: 398881 - RNA, 32 nt, Human
cucuagccagccagccccagauacuccucaga

SEQ ID NO: 398882 - RNA, 32 nt, Human
cucuagccaguggcccucugcagccacgggga

SEQ ID NO: 398883 - RNA, 32 nt, Human
cucuagccauucuuuauuuauagugggucugc

SEQ ID NO: 398884 - RNA, 24 nt, Human
cucuagcccaggcuggagugcugu

SEQ ID NO: 398885 - RNA, 32 nt, Human
cucuagcccuacuccuuugcccaagacagaaa

SEQ ID NO: 398886 - RNA, 20 nt, Human
cucuagcccucuaaggcugg

SEQ ID NO: 398887 - RNA, 18 nt, Human
cucuagccgccgcugccg

SEQ ID NO: 398888 - RNA, 32 nt, Human
cucuagccucuccuggaaaggccuggauaugg

SEQ ID NO: 398889 - RNA, 32 nt, Human
cucuagccucugaccuugcuguugacucugaa

SEQ ID NO: 398890 - RNA, 21 nt, Human
cucuagccugagcgacagagu

SEQ ID NO: 398891 - RNA, 19 nt, Human
cucuagccuggcaacagag

SEQ ID NO: 398892 - RNA, 32 nt, Human
cucuagccuggcaacagagcaagacuccgucu

SEQ ID NO: 398893 - RNA, 22 nt, Human
cucuagccugggcaacaagagc

SEQ ID NO: 398894 - RNA, 24 nt, Human
cucuagccugggcaacaagaguga

SEQ ID NO: 398895 - RNA, 20 nt, Human
cucuagccugggcaacagag

SEQ ID NO: 398896 - RNA, 21 nt, Human
cucuagccugggcaacagagc

SEQ ID NO: 398897 - RNA, 21 nt, Human
cucuagccugggcaacagagu

SEQ ID NO: 398898 - RNA, 20 nt, Human
cucuagccugggcgacagag

SEQ ID NO: 398899 - RNA, 21 nt, Human
cucuagccugggcgacagagu

SEQ ID NO: 398900 - RNA, 25 nt, Human
cucuagccugggugacagagcgaga

SEQ ID NO: 398901 - RNA, 32 nt, Human
cucuagccuguggccugcuccugguugaagaa

SEQ ID NO: 398902 - RNA, 32 nt, Human
cucuagcgaaacuguuuuccucucuauucaga

SEQ ID NO: 398903 - RNA, 32 nt, Human
cucuagcucacuguugccucgcugucugccag

SEQ ID NO: 398904 - RNA, 25 nt, Human
cucuagcugccuugucgccaucgca

SEQ ID NO: 398905 - RNA, 32 nt, Human
cucuagcugcuggugguucuuucacagacauu

SEQ ID NO: 398906 - RNA, 32 nt, Human
cucuagcugggagcuuggccucuggcuccauc

SEQ ID NO: 398907 - RNA, 32 nt, Human
cucuagcugggugagagggugucccuugucac

SEQ ID NO: 398908 - RNA, 32 nt, Human
cucuagcuugcccagcaacuugcuuuccugug

SEQ ID NO: 398909 - RNA, 32 nt, Human
cucuagcuuuuugccagaacaaaggaggguac

SEQ ID NO: 398910 - RNA, 32 nt, Human
cucuaggacauaaauuagaggucuccaaaauc

SEQ ID NO: 398911 - RNA, 32 nt, Human
cucuaggagccccaauagcccaggagcuuggg

SEQ ID NO: 398912 - RNA, 32 nt, Human
cucuaggagccccaguagcccaggagcuuggg

SEQ ID NO: 398913 - RNA, 32 nt, Human
cucuaggaggccgaggagggcagaucaacuga

SEQ ID NO: 398914 - RNA, 32 nt, Human
cucuaggaggcgcccucaggagaggggcgggc

SEQ ID NO: 398915 - RNA, 32 nt, Human
cucuaggaggcucuggcucaaacagcaauagg

SEQ ID NO: 398916 - RNA, 26 nt, Human
cucuaggaggguuugggauaggaagc

SEQ ID NO: 398917 - RNA, 32 nt, Human
cucuaggauccaggcuccacagagcacaugac

SEQ ID NO: 398918 - RNA, 32 nt, Human
cucuaggaugucccucaccuggcagccaucug

SEQ ID NO: 398919 - RNA, 32 nt, Human
cucuaggcagaagaagcugggagggaggggga

SEQ ID NO: 398920 - RNA, 32 nt, Human
cucuaggcaggacugccaugcagugagcccuc

SEQ ID NO: 398921 - RNA, 32 nt, Human
cucuaggcaggcagggugcuccuggugucugc

SEQ ID NO: 398922 - RNA, 32 nt, Human
cucuaggccaucacuuuaauugaucucucuac

SEQ ID NO: 398923 - RNA, 32 nt, Human
cucuaggccauccccucuucuaccuccugcaa

SEQ ID NO: 398924 - RNA, 32 nt, Human
cucuaggccauggggagucccugaagacucga

SEQ ID NO: 398925 - RNA, 32 nt, Human
cucuaggcccccagccccacacugccuggggg

SEQ ID NO: 398926 - RNA, 32 nt, Human
cucuaggcggcucuggguaaguugucguucug

SEQ ID NO: 398927 - RNA, 32 nt, Human
cucuaggcucaagcgauccuccugccugagcc

SEQ ID NO: 398928 - RNA, 32 nt, Human
cucuaggcugccuggagggaaggaacaggccc

SEQ ID NO: 398929 - RNA, 32 nt, Human
cucuaggcugcgcgaaggaagaggguacgacg

SEQ ID NO: 398930 - RNA, 32 nt, Human
cucuaggcuucuccugcugaguccuggucuug

SEQ ID NO: 398931 - RNA, 32 nt, Human
cucuagggaacagcacugugagcaggggcugu

SEQ ID NO: 398932 - RNA, 32 nt, Human
cucuagggacaccuggugauuccuacacaagu

SEQ ID NO: 398933 - RNA, 32 nt, Human
cucuagggacacuggcagcuguggaaaugaau

SEQ ID NO: 398934 - RNA, 32 nt, Human
cucuagggaccccucgccccagccucauuccc

SEQ ID NO: 398935 - RNA, 32 nt, Human
cucuagggacuugaugguguugcuuggaaggc

SEQ ID NO: 398936 - RNA, 32 nt, Human
cucuagggagaguugcaggcagaggagauugg

SEQ ID NO: 398937 - RNA, 32 nt, Human
cucuagggagcacugugcccacucuuucuggg

SEQ ID NO: 398938 - RNA, 21 nt, Human
cucuagggcaacccagggcag

SEQ ID NO: 398939 - RNA, 32 nt, Human
cucuagggcauaauuuaugggcucagaaaggg

SEQ ID NO: 398940 - RNA, 32 nt, Human
cucuaggggagaauucauuucuggccuuuuca

SEQ ID NO: 398941 - RNA, 32 nt, Human
cucuaggggagagagcugcuagugagaugacu

SEQ ID NO: 398942 - RNA, 32 nt, Human
cucuaggggugaggaccuagcagucuguuuaa

SEQ ID NO: 398943 - RNA, 32 nt, Human
cucuaggggugcagcuuuggagcccagaggug

SEQ ID NO: 398944 - RNA, 32 nt, Human
cucuagggucuuggcagaauucugagcuugaa

SEQ ID NO: 398945 - RNA, 32 nt, Human
cucuagguacuaacucagcaguuuuucuguaa

SEQ ID NO: 398946 - RNA, 32 nt, Human
cucuaggucuccaugcauucuuccugcccuag

SEQ ID NO: 398947 - RNA, 32 nt, Human
cucuaggugaaaugagcggugguugagcccua

SEQ ID NO: 398948 - RNA, 32 nt, Human
cucuaggugaucugugaaaaugguucgcuauu

SEQ ID NO: 398949 - RNA, 20 nt, Human
cucuagguucaccuguguug

SEQ ID NO: 398950 - RNA, 19 nt, Human
cucuagguucuaggggugc

SEQ ID NO: 398951 - RNA, 32 nt, Human
cucuagguucuaggggugcaagccucugugug

SEQ ID NO: 398952 - RNA, 20 nt, Human
cucuagguucugggcaguug

SEQ ID NO: 398953 - RNA, 20 nt, Human
cucuagguuggugagugcug

SEQ ID NO: 398954 - RNA, 32 nt, Human
cucuaguaaaaauacaaaaauuagccaggcau

SEQ ID NO: 398955 - RNA, 32 nt, Human
cucuaguaaaaauacaaaaauuagcucagcau

SEQ ID NO: 398956 - RNA, 32 nt, Human
cucuaguaaaaauacaaaaauuagcugggcgu

SEQ ID NO: 398957 - RNA, 20 nt, Human
cucuaguaaaaauacaaaau

SEQ ID NO: 398958 - RNA, 32 nt, Human
cucuaguaaaaauacaaaauuuagucagacau

SEQ ID NO: 398959 - RNA, 32 nt, Human
cucuaguaggcaggccagguuagugaggaagg

SEQ ID NO: 398960 - RNA, 31 nt, Human
cucuaguagguggaaagguagguggagcagg

SEQ ID NO: 398961 - RNA, 32 nt, Human
cucuagucccagcuacuugggaggcuuaguca

SEQ ID NO: 398962 - RNA, 32 nt, Human
cucuagucccuuuaaacguuugccccuggcgu

SEQ ID NO: 398963 - RNA, 32 nt, Human
cucuagucuccaagccucuagcauagagcacu

SEQ ID NO: 398964 - RNA, 32 nt, Human
cucuagucuggggaacauaugagaccccugcc

SEQ ID NO: 398965 - RNA, 32 nt, Human
cucuagugaaaauacaaaaauuagccaggugu

SEQ ID NO: 398966 - RNA, 32 nt, Human
cucuagugcaggaggagaaggaggaggagcag

SEQ ID NO: 398967 - RNA, 21 nt, Human
cucuagugccuuucuagcaca

SEQ ID NO: 398968 - RNA, 32 nt, Human
cucuagugcuggguguggagugaggcaccacc

SEQ ID NO: 398969 - RNA, 31 nt, Human
cucuaguggguggaaacgggugguugccaug

SEQ ID NO: 398970 - RNA, 32 nt, Human
cucuaguguuugaguaaaggagacugaggaug

SEQ ID NO: 398971 - RNA, 32 nt, Human
cucuaguucccucauuccccgcgcccuucccg

SEQ ID NO: 398972 - RNA, 32 nt, Human
cucuaguuccucacucuuccuuuucagaaccu

SEQ ID NO: 398973 - RNA, 32 nt, Human
cucuaguugcccacacuagagugcaauggcgc

SEQ ID NO: 398974 - RNA, 32 nt, Human
cucuaguuuuccagacugcugguuuggguaac

SEQ ID NO: 398975 - RNA, 19 nt, Human
cucuaguuuuucuaacaua

SEQ ID NO: 398976 - RNA, 32 nt, Human
cucuauaaagcacuacacaagacuggauaauu

SEQ ID NO: 398977 - RNA, 32 nt, Human
cucuauaaccaccugcuucccacucagccugc

SEQ ID NO: 398978 - RNA, 32 nt, Human
cucuauacacuucaagacuuuacaggauuuuu

SEQ ID NO: 398979 - RNA, 32 nt, Human
cucuauacaucucuccccaacccuagguuccc

SEQ ID NO: 398980 - RNA, 32 nt, Human
cucuauacauuccagugccuagccaguuuguu

SEQ ID NO: 398981 - RNA, 32 nt, Human
cucuauaccuugccugugccuuaguguccucu

SEQ ID NO: 398982 - RNA, 32 nt, Human
cucuauagcuuaucuuggccccucucugugug

SEQ ID NO: 398983 - RNA, 32 nt, Human
cucuauagucucucuaggucauagcuuucaug

SEQ ID NO: 398984 - RNA, 32 nt, Human
cucuauaguuaaaaggcuuccucaucuauauu

SEQ ID NO: 398985 - RNA, 32 nt, Human
cucuauauacauguacacaaagccacacaguu

SEQ ID NO: 398986 - RNA, 32 nt, Human
cucuauauacauguuuuauauaccucauucug

SEQ ID NO: 398987 - RNA, 19 nt, Human
cucuauauacuucauguca

SEQ ID NO: 398988 - RNA, 32 nt, Human
cucuauaucccuuuuaucgguggacccaacaa

SEQ ID NO: 398989 - RNA, 32 nt, Human
cucuauauuuggaacgagaaaaggaacaaaua

SEQ ID NO: 398990 - RNA, 32 nt, Human
cucuaucaaaaauacaaaaauuagcuggcaug

SEQ ID NO: 398991 - RNA, 32 nt, Human
cucuaucacacaggcuggagggcaguggcagg

SEQ ID NO: 398992 - RNA, 32 nt, Human
cucuaucaccaccaccagcagagccugagcug

SEQ ID NO: 398993 - RNA, 32 nt, Human
cucuaucaccaggugggagugcaguggcacaa

SEQ ID NO: 398994 - RNA, 32 nt, Human
cucuaucacccaagcuggaguacaguggcaca

SEQ ID NO: 398995 - RNA, 32 nt, Human
cucuaucacccaagcuggagugcaguggcacc

SEQ ID NO: 398996 - RNA, 32 nt, Human
cucuaucacccaggcugaagugcaguagugca

SEQ ID NO: 398997 - RNA, 32 nt, Human
cucuaucacccaggcugaagugcagugguacg

SEQ ID NO: 398998 - RNA, 32 nt, Human
cucuaucacccaggcuggagugcaguggugca

SEQ ID NO: 398999 - RNA, 32 nt, Human
cucuaucacccaggcuggagugcaguguggcu

SEQ ID NO: 399000 - RNA, 25 nt, Human
cucuaucaccuaggcuggagugcag

SEQ ID NO: 399001 - RNA, 32 nt, Human
cucuaucaccuaggcuggagugcagcggcaug

SEQ ID NO: 399002 - RNA, 32 nt, Human
cucuauccaugcugucaacuccugccuccacc

SEQ ID NO: 399003 - RNA, 32 nt, Human
cucuaucccuagaguaagaccaacuugaaccu

SEQ ID NO: 399004 - RNA, 32 nt, Human
cucuauccucacccuguuuugugcucuucccc

SEQ ID NO: 399005 - RNA, 32 nt, Human
cucuauccuccacggccccauccaagccaggg

SEQ ID NO: 399006 - RNA, 32 nt, Human
cucuauccuucuucugguccuuccuagaaaau

SEQ ID NO: 399007 - RNA, 25 nt, Human
cucuaucgccaggcuggaguguagu

SEQ ID NO: 399008 - RNA, 32 nt, Human
cucuaucgccaggcuggaguguaguggcauga

SEQ ID NO: 399009 - RNA, 32 nt, Human
cucuaucgcccaggauggagugcaguggcuca

SEQ ID NO: 399010 - RNA, 26 nt, Human
cucuaucgcccaggcuggagugcagu

SEQ ID NO: 399011 - RNA, 32 nt, Human
cucuaucgcccaggcuggagugcaguggcgca

SEQ ID NO: 399012 - RNA, 26 nt, Human
cucuaucgccuaggcugaagcacagu

SEQ ID NO: 399013 - RNA, 32 nt, Human
cucuaucgccuaggcugaagcacaguggugcg

SEQ ID NO: 399014 - RNA, 32 nt, Human
cucuaucgcggucaacuuuccucaggaucuga

SEQ ID NO: 399015 - RNA, 32 nt, Human
cucuaucgcuugcucucuccugccucacuccu

SEQ ID NO: 399016 - RNA, 32 nt, Human
cucuaucggggucuucgagagccagacagccu

SEQ ID NO: 399017 - RNA, 32 nt, Human
cucuaucuccaccuccuuuucccagccuucag

SEQ ID NO: 399018 - RNA, 18 nt, Human
cucuaucucuggcuccug

SEQ ID NO: 399019 - RNA, 32 nt, Human
cucuaucugcagguccccagccuggguaaaga

SEQ ID NO: 399020 - RNA, 32 nt, Human
cucuaucugugguuuggcauuguaccugggua

SEQ ID NO: 399021 - RNA, 32 nt, Human
cucuaucuuuaaacgaaacaaagacaauuuau

SEQ ID NO: 399022 - RNA, 32 nt, Human
cucuaugaaaaauacaaaauuugcugggagug

SEQ ID NO: 399023 - RNA, 32 nt, Human
cucuaugaaccucugcugggcccagccccugu

SEQ ID NO: 399024 - RNA, 32 nt, Human
cucuaugaacucaucauuccagccugggcaac

SEQ ID NO: 399025 - RNA, 32 nt, Human
cucuaugaacuuaugaaaaccuucaguuacag

SEQ ID NO: 399026 - RNA, 29 nt, Human
cucuaugagggaacugcuggggccugcgg

SEQ ID NO: 399027 - RNA, 32 nt, Human
cucuaugcaaccuccaccuccuggguucaugc

SEQ ID NO: 399028 - RNA, 32 nt, Human
cucuaugccacugucugcuuagcccagcucag

SEQ ID NO: 399029 - RNA, 32 nt, Human
cucuaugcccacugcccuccucccucuccugg

SEQ ID NO: 399030 - RNA, 32 nt, Human
cucuaugcccuguuaaauggggagacaaaggg

SEQ ID NO: 399031 - RNA, 32 nt, Human
cucuaugcgacaggggcccaggaacagccuga

SEQ ID NO: 399032 - RNA, 32 nt, Human
cucuaugcuaucuccucuaaucuccccgcucu

SEQ ID NO: 399033 - RNA, 32 nt, Human
cucuaugcugggaaccagggaccaagaguaaa

SEQ ID NO: 399034 - RNA, 29 nt, Human
cucuauggagacguccccaugcccagaac

SEQ ID NO: 399035 - RNA, 32 nt, Human
cucuauggccaggccucacacauggcucugcc

SEQ ID NO: 399036 - RNA, 29 nt, Human
cucuauggcccaggcuggagcgcagcggu

SEQ ID NO: 399037 - RNA, 32 nt, Human
cucuauggcccaggcuggaguacagugacacg

SEQ ID NO: 399038 - RNA, 32 nt, Human
cucuaugggcagaucuaccccuuacuuauuau

SEQ ID NO: 399039 - RNA, 32 nt, Human
cucuaugggggugcgggggugucaugucuugc

SEQ ID NO: 399040 - RNA, 32 nt, Human
cucuaugguacaccugcuuauguguugccuca

SEQ ID NO: 399041 - RNA, 32 nt, Human
cucuaugucugaucuaggaggcugggggaaga

SEQ ID NO: 399042 - RNA, 32 nt, Human
cucuauguucagaccacuggagaggauagaga

SEQ ID NO: 399043 - RNA, 32 nt, Human
cucuauuaaaaauacaaaaauuagacuggcau

SEQ ID NO: 399044 - RNA, 32 nt, Human
cucuauuaaaaauacaaaaauuagccaggcau

SEQ ID NO: 399045 - RNA, 32 nt, Human
cucuauuaaaaauacaaaaauuagccgagagu

SEQ ID NO: 399046 - RNA, 32 nt, Human
cucuauuaaaaauacaaaaauuagccggaugu

SEQ ID NO: 399047 - RNA, 32 nt, Human
cucuauuaaaaauacaaaaauuagccgggagu

SEQ ID NO: 399048 - RNA, 32 nt, Human
cucuauuaaaaauacaaaaauuagccgggugu

SEQ ID NO: 399049 - RNA, 32 nt, Human
cucuauuaaaaauacaaaaauuagcugggcau

SEQ ID NO: 399050 - RNA, 32 nt, Human
cucuauuaaaaauacaaaaauuagcugggcgu

SEQ ID NO: 399051 - RNA, 32 nt, Human
cucuauuaaaaauacaaaaauuagcugggguu

SEQ ID NO: 399052 - RNA, 32 nt, Human
cucuauuaaaaauacaaaaauuagcugggugu

SEQ ID NO: 399053 - RNA, 32 nt, Human
cucuauuaaaaauaccaaaauuagcugggcau

SEQ ID NO: 399054 - RNA, 32 nt, Human
cucuauuaaaaauuuuacaaaaauuagcugcg

SEQ ID NO: 399055 - RNA, 32 nt, Human
cucuauuaacacagcuagaucuuuuucuucca

SEQ ID NO: 399056 - RNA, 32 nt, Human
cucuauuacucaggcuggaguaaaauggugcc

SEQ ID NO: 399057 - RNA, 32 nt, Human
cucuauuagucucuucucaggcugcuaauaaa

SEQ ID NO: 399058 - RNA, 32 nt, Human
cucuauuauggagaugugaaaagagagaccca

SEQ ID NO: 399059 - RNA, 32 nt, Human
cucuauucaagaaagcacacaggccuuugaug

SEQ ID NO: 399060 - RNA, 25 nt, Human
cucuauucagguaaaacaaugaaug

SEQ ID NO: 399061 - RNA, 32 nt, Human
cucuauucauguggcccugaacacugagcuca

SEQ ID NO: 399062 - RNA, 32 nt, Human
cucuauucauucucucaccaaacaagcuucua

SEQ ID NO: 399063 - RNA, 32 nt, Human
cucuauuccgacauccuccaacauggaggaaa

SEQ ID NO: 399064 - RNA, 32 nt, Human
cucuauucucucucagaguacaagcucucauc

SEQ ID NO: 399065 - RNA, 18 nt, Human
cucuauucuuggcuucug

SEQ ID NO: 399066 - RNA, 32 nt, Human
cucuauucuuuucucuuucuucauuuaacauu

SEQ ID NO: 399067 - RNA, 32 nt, Human
cucuauugccaaggagggcuucaagaagauua

SEQ ID NO: 399068 - RNA, 32 nt, Human
cucuauugcccaggcuggagugcacuggcgug

SEQ ID NO: 399069 - RNA, 26 nt, Human
cucuauugcccaggcuggagugcagu

SEQ ID NO: 399070 - RNA, 32 nt, Human
cucuauugcccaggcuggagugcaguggcuca

SEQ ID NO: 399071 - RNA, 32 nt, Human
cucuauugcccaggcuggagugcagugguaca

SEQ ID NO: 399072 - RNA, 32 nt, Human
cucuauugcccaggcuggagugcaguggugua

SEQ ID NO: 399073 - RNA, 32 nt, Human
cucuauugcccagucuggagugcaguggcaug

SEQ ID NO: 399074 - RNA, 32 nt, Human
cucuauugcucaggcuggagugugguggcagg

SEQ ID NO: 399075 - RNA, 32 nt, Human
cucuauugcucuucugucccgaagaugcaguc

SEQ ID NO: 399076 - RNA, 32 nt, Human
cucuauuggccaggcuggaguguaguggcacc

SEQ ID NO: 399077 - RNA, 26 nt, Human
cucuauuguucagacuggagugcagu

SEQ ID NO: 399078 - RNA, 32 nt, Human
cucuauuguucagacuggagugcaguggcaug

SEQ ID NO: 399079 - RNA, 32 nt, Human
cucuauuuauaucuacauuuccuuccagcuga

SEQ ID NO: 399080 - RNA, 20 nt, Human
cucuauuuccaaugcuccuc

SEQ ID NO: 399081 - RNA, 21 nt, Human
cucuauuucuauugggauaua

SEQ ID NO: 399082 - RNA, 32 nt, Human
cucuauuucucuuccugucacuuaaucuuuuc

SEQ ID NO: 399083 - RNA, 21 nt, Human
cucuauuucugucaaugacau

SEQ ID NO: 399084 - RNA, 16 nt, Human
cucuauuucuguggca

SEQ ID NO: 399085 - RNA, 32 nt, Human
cucuauuuguugcaaucuuucuccuuaggucc

SEQ ID NO: 399086 - RNA, 32 nt, Human
cucuauuuuacagaugagaaaacugaagcaca

SEQ ID NO: 399087 - RNA, 21 nt, Human
cucuauuuuaguacugacaug

SEQ ID NO: 399088 - RNA, 32 nt, Human
cucuauuuucacucuuggcggcugcccacacg

SEQ ID NO: 399089 - RNA, 32 nt, Human
cucuauuuucauccucaccaauccugccaggg

SEQ ID NO: 399090 - RNA, 32 nt, Human
cucuauuuuccucugcauuguacuaaucuguu

SEQ ID NO: 399091 - RNA, 32 nt, Human
cucuauuuuuauucuccuuuggccauugcagu

SEQ ID NO: 399092 - RNA, 23 nt, Human
cucucaaaaagagagaaaaagaa

SEQ ID NO: 399093 - RNA, 32 nt, Human
cucucaaaaagcuuauuaagccugaaaagcca

SEQ ID NO: 399094 - RNA, 32 nt, Human
cucucaaaaugcuggcauuacaggugugagcc

SEQ ID NO: 399095 - RNA, 32 nt, Human
cucucaaaaugcugggauuacaggugugagcc

SEQ ID NO: 399096 - RNA, 32 nt, Human
cucucaaacugcugggauuacaggcacgcgcc

SEQ ID NO: 399097 - RNA, 32 nt, Human
cucucaaacugcugggauuauaggcaugagcc

SEQ ID NO: 399098 - RNA, 32 nt, Human
cucucaaacuugagugcugaggagacucagau

SEQ ID NO: 399099 - RNA, 32 nt, Human
cucucaaagagcugggauuacaggcaugaguc

SEQ ID NO: 399100 - RNA, 32 nt, Human
cucucaaagcgcugggauuacaggcaugagcc

SEQ ID NO: 399101 - RNA, 32 nt, Human
cucucaaagugcugggauuaaaggcguaagcc

SEQ ID NO: 399102 - RNA, 32 nt, Human
cucucaaagugcugggauuacaagcaugagcc

SEQ ID NO: 399103 - RNA, 32 nt, Human
cucucaaagugcugggauuacaggcauaagcc

SEQ ID NO: 399104 - RNA, 32 nt, Human
cucucaaagugcugggauuacaggcaugagcc

SEQ ID NO: 399105 - RNA, 32 nt, Human
cucucaaagugcugggauuacaggccugagca

SEQ ID NO: 399106 - RNA, 32 nt, Human
cucucaaagugcugggauuacaggcgugagcc

SEQ ID NO: 399107 - RNA, 32 nt, Human
cucucaaagugcugggauuacaggcgugaggc

SEQ ID NO: 399108 - RNA, 32 nt, Human
cucucaaagugcugggauuacaggcgugaguc

SEQ ID NO: 399109 - RNA, 32 nt, Human
cucucaaagugcugggauuacaggcgugggcc

SEQ ID NO: 399110 - RNA, 32 nt, Human
cucucaaagugcugggauuacaggcuuacgcc

SEQ ID NO: 399111 - RNA, 32 nt, Human
cucucaaagugcugggauuacaggugugagcc

SEQ ID NO: 399112 - RNA, 32 nt, Human
cucucaaagugcugggauuacaggugugccac

SEQ ID NO: 399113 - RNA, 32 nt, Human
cucucaaagugcugggauuacgggcaugagcu

SEQ ID NO: 399114 - RNA, 32 nt, Human
cucucaaagugcugggauuacgggcgugagcc

SEQ ID NO: 399115 - RNA, 32 nt, Human
cucucaaagugcugggauuagaggcuugagcc

SEQ ID NO: 399116 - RNA, 32 nt, Human
cucucaaagugcugggauuagaggugugagcc

SEQ ID NO: 399117 - RNA, 32 nt, Human
cucucaaagugcugggauuaggcaugaacuac

SEQ ID NO: 399118 - RNA, 32 nt, Human
cucucaaagugcugggauuauaggcaugaacc

SEQ ID NO: 399119 - RNA, 32 nt, Human
cucucaaagugcugggauuauaggcgugagcc

SEQ ID NO: 399120 - RNA, 32 nt, Human
cucucaaagugcugggauuauaggcgugagcu

SEQ ID NO: 399121 - RNA, 32 nt, Human
cucucaaagugcugggauuauaggcuugagcc

SEQ ID NO: 399122 - RNA, 32 nt, Human
cucucaaagugcugguauuacaggcgugagcc

SEQ ID NO: 399123 - RNA, 32 nt, Human
cucucaaaguguugggauaacaggcaugagcc

SEQ ID NO: 399124 - RNA, 32 nt, Human
cucucaaaguguugggauuacaggcgugagcc

SEQ ID NO: 399125 - RNA, 32 nt, Human
cucucaaaguguugggauuacguguguaagcc

SEQ ID NO: 399126 - RNA, 21 nt, Human
cucucaaauaauuaaaaagga

SEQ ID NO: 399127 - RNA, 32 nt, Human
cucucaaauagcugggacuacaggcagcaaag

SEQ ID NO: 399128 - RNA, 24 nt, Human
cucucaaauguuuccagaaaaaag

SEQ ID NO: 399129 - RNA, 21 nt, Human
cucucaacaagugccacucca

SEQ ID NO: 399130 - RNA, 20 nt, Human
cucucaacacccaguuuccu

SEQ ID NO: 399131 - RNA, 24 nt, Human
cucucaacaccucggggaccccug

SEQ ID NO: 399132 - RNA, 19 nt, Human
cucucaacaccuuggcucc

SEQ ID NO: 399133 - RNA, 18 nt, Human
cucucaacagccccagca

SEQ ID NO: 399134 - RNA, 32 nt, Human
cucucaaccacaaccuccagcuacagggcucu

SEQ ID NO: 399135 - RNA, 32 nt, Human
cucucaacccaaagucuuccaccagccaauca

SEQ ID NO: 399136 - RNA, 32 nt, Human
cucucaacccccugucaugagcucuuucuagc

SEQ ID NO: 399137 - RNA, 32 nt, Human
cucucaaccucauucccaccucuggggccccu

SEQ ID NO: 399138 - RNA, 31 nt, Human
cucucaacuaacaaggaggcaggagagguca

SEQ ID NO: 399139 - RNA, 31 nt, Human
cucucaacuaauacuuugcuguugaaauguu

SEQ ID NO: 399140 - RNA, 22 nt, Human
cucucaacucacuguaaccucc

SEQ ID NO: 399141 - RNA, 32 nt, Human
cucucaacucacuguaaccuccgccucccgga

SEQ ID NO: 399142 - RNA, 21 nt, Human
cucucaacugcaguuuucuua

SEQ ID NO: 399143 - RNA, 32 nt, Human
cucucaagaccaccuggccaaaacugaacuaa

SEQ ID NO: 399144 - RNA, 32 nt, Human
cucucaagcucacucucuaggucuccagggua

SEQ ID NO: 399145 - RNA, 32 nt, Human
cucucaagcuguuuucccucugauuuacaaug

SEQ ID NO: 399146 - RNA, 32 nt, Human
cucucaaggguaucucaaguaccauuuagaau

SEQ ID NO: 399147 - RNA, 24 nt, Human
cucucaaguaacugggauuacagg

SEQ ID NO: 399148 - RNA, 32 nt, Human
cucucaaguagcugggacuacaggcaugugcc

SEQ ID NO: 399149 - RNA, 22 nt, Human
cucucaaguagcugggauuaca

SEQ ID NO: 399150 - RNA, 32 nt, Human
cucucaaguagcugggauuacaagcaccagcc

SEQ ID NO: 399151 - RNA, 32 nt, Human
cucucaaguagcugggauuacaagcaugcgcc

SEQ ID NO: 399152 - RNA, 24 nt, Human
cucucaaguagcugggauuacagg

SEQ ID NO: 399153 - RNA, 32 nt, Human
cucucaaguagcugggauuacaggcgcccgcc

SEQ ID NO: 399154 - RNA, 24 nt, Human
cucucaagugauccuccugccuca

SEQ ID NO: 399155 - RNA, 32 nt, Human
cucucaaguucagagcucugauguggaaagac

SEQ ID NO: 399156 - RNA, 32 nt, Human
cucucaauaccuuuugcuguguguuucugucu

SEQ ID NO: 399157 - RNA, 32 nt, Human
cucucaauagagagcuaugucuuacauucuuu

SEQ ID NO: 399158 - RNA, 24 nt, Human
cucucaaugaagagguauuuccua

SEQ ID NO: 399159 - RNA, 32 nt, Human
cucucacaaagucauccaguaagagagaucac

SEQ ID NO: 399160 - RNA, 32 nt, Human
cucucacaaggaaggccgcuguggagcgugga

SEQ ID NO: 399161 - RNA, 32 nt, Human
cucucacacacguguaugcacagcagagagac

SEQ ID NO: 399162 - RNA, 32 nt, Human
cucucacacaggcuccacagugcuucacccag

SEQ ID NO: 399163 - RNA, 32 nt, Human
cucucacacauacacacacaaacacauacaca

SEQ ID NO: 399164 - RNA, 32 nt, Human
cucucacacccaggcuggagugcagucucaac

SEQ ID NO: 399165 - RNA, 32 nt, Human
cucucacagacaaagaggccugggauauuagg

SEQ ID NO: 399166 - RNA, 32 nt, Human
cucucacagugaauuuugaugcauuuaaaaua

SEQ ID NO: 399167 - RNA, 32 nt, Human
cucucacaucccgugcggucaggaagcccuuc

SEQ ID NO: 399168 - RNA, 32 nt, Human
cucucacauuuggguaaaauguuuagcaggcu

SEQ ID NO: 399169 - RNA, 32 nt, Human
cucucaccaccaggguugcagucaggacaaga

SEQ ID NO: 399170 - RNA, 18 nt, Human
cucucaccaccuccucca

SEQ ID NO: 399171 - RNA, 32 nt, Human
cucucaccagcccaggcccucaggaggaggag

SEQ ID NO: 399172 - RNA, 32 nt, Human
cucucaccagcccuccuuucagccucuacaac

SEQ ID NO: 399173 - RNA, 32 nt, Human
cucucaccaggucaguugugcaucaaggcuac

SEQ ID NO: 399174 - RNA, 32 nt, Human
cucucacccaggccugaagugcaguggcauga

SEQ ID NO: 399175 - RNA, 24 nt, Human
cucucacccaggcuggaguagagu

SEQ ID NO: 399176 - RNA, 24 nt, Human
cucucacccaggcuggagugcagu

SEQ ID NO: 399177 - RNA, 32 nt, Human
cucucacccaggcuggagugcaguggcacaau

SEQ ID NO: 399178 - RNA, 24 nt, Human
cucucacccaggcuggaguggagu

SEQ ID NO: 399179 - RNA, 32 nt, Human
cucucacccaggcuggaguggaguggcgcuau

SEQ ID NO: 399180 - RNA, 22 nt, Human
cucucacccaggcuggagugua

SEQ ID NO: 399181 - RNA, 32 nt, Human
cucucacccaggcuggaguguaagugacauga

SEQ ID NO: 399182 - RNA, 32 nt, Human
cucucaccccgccauccccaccaguccccacc

SEQ ID NO: 399183 - RNA, 32 nt, Human
cucucaccccugccccuuagagucuaggugca

SEQ ID NO: 399184 - RNA, 32 nt, Human
cucucaccgcaaccuccgucuccuggguucaa

SEQ ID NO: 399185 - RNA, 32 nt, Human
cucucaccuccaccaccccucccugucccagc

SEQ ID NO: 399186 - RNA, 24 nt, Human
cucucaccucccagcccucagcca

SEQ ID NO: 399187 - RNA, 32 nt, Human
cucucaccuccuucauccccuaccuccugcag

SEQ ID NO: 399188 - RNA, 32 nt, Human
cucucaccugcacucccagcuacucgggaggc

SEQ ID NO: 399189 - RNA, 32 nt, Human
cucucaccugucuguucucuccccagucagcc

SEQ ID NO: 399190 - RNA, 32 nt, Human
cucucacgcuccacucugcagcuuggacaccc

SEQ ID NO: 399191 - RNA, 32 nt, Human
cucucacuacuaaaaauacaaaauuagccacg

SEQ ID NO: 399192 - RNA, 32 nt, Human
cucucacucacccuccggcuuccugucggggc

SEQ ID NO: 399193 - RNA, 32 nt, Human
cucucacucacugcaauugcuucuacucuggg

SEQ ID NO: 399194 - RNA, 32 nt, Human
cucucacucauguaugcauacaugcacagaga

SEQ ID NO: 399195 - RNA, 32 nt, Human
cucucacuccccuaagccuggugaaagaguca

SEQ ID NO: 399196 - RNA, 32 nt, Human
cucucacuccccucucaccuuuugcagucucc

SEQ ID NO: 399197 - RNA, 32 nt, Human
cucucacuccugaaagccccagaaggacacug

SEQ ID NO: 399198 - RNA, 20 nt, Human
cucucacuccugcugcugcc

SEQ ID NO: 399199 - RNA, 21 nt, Human
cucucacugaaauaaaaggaa

SEQ ID NO: 399200 - RNA, 19 nt, Human
cucucacugcaagaauuga

SEQ ID NO: 399201 - RNA, 32 nt, Human
cucucacuggauaguuuuuagauguguuucuu

SEQ ID NO: 399202 - RNA, 32 nt, Human
cucucacugucgcccaggcuggagugcagugg

SEQ ID NO: 399203 - RNA, 32 nt, Human
cucucacugucucuggcucacgcuucccgggc

SEQ ID NO: 399204 - RNA, 20 nt, Human
cucucacuuacccccauucc

SEQ ID NO: 399205 - RNA, 32 nt, Human
cucucacuuggccuugcugcuguccucugaga

SEQ ID NO: 399206 - RNA, 18 nt, Human
cucucacuuuaaagacau

SEQ ID NO: 399207 - RNA, 18 nt, Human
cucucacuuuagccaugg

SEQ ID NO: 399208 - RNA, 22 nt, Human
cucucacuuucagcacuauuga

SEQ ID NO: 399209 - RNA, 17 nt, Human
cucucacuuugcuguga

SEQ ID NO: 399210 - RNA, 22 nt, Human
cucucacuuuuuaaagcauuga

SEQ ID NO: 399211 - RNA, 32 nt, Human
cucucagaaagccaagagugcaggaugagagc

SEQ ID NO: 399212 - RNA, 32 nt, Human
cucucagaacagcuccuagaggcugcucauga

SEQ ID NO: 399213 - RNA, 32 nt, Human
cucucagaagcagaggaggcagguggguggag

SEQ ID NO: 399214 - RNA, 32 nt, Human
cucucagaagggagaggaggccuccaaaucua

SEQ ID NO: 399215 - RNA, 22 nt, Human
cucucagaagggugccaggcca

SEQ ID NO: 399216 - RNA, 32 nt, Human
cucucagaauauguggaagaggauguggagaa

SEQ ID NO: 399217 - RNA, 32 nt, Human
cucucagaccuuuugucacagggcuacaggac

SEQ ID NO: 399218 - RNA, 27 nt, Human
cucucagagaugccucaguuucccuag

SEQ ID NO: 399219 - RNA, 32 nt, Human
cucucagaggauccuauacauggaugugaugc

SEQ ID NO: 399220 - RNA, 32 nt, Human
cucucagaggcagcaugagcugagagggugau

SEQ ID NO: 399221 - RNA, 32 nt, Human
cucucagagugcugggaucacaggcgugagcc

SEQ ID NO: 399222 - RNA, 32 nt, Human
cucucagagugcugggauuauaggugugcgcc

SEQ ID NO: 399223 - RNA, 32 nt, Human
cucucagaguguugggauuacagccaugagcc

SEQ ID NO: 399224 - RNA, 32 nt, Human
cucucagaugcgauuuggaggaagggccauac

SEQ ID NO: 399225 - RNA, 32 nt, Human
cucucagauggucuuuuguuacugcaagauuu

SEQ ID NO: 399226 - RNA, 32 nt, Human
cucucagaugugccagguggugccagugccag

SEQ ID NO: 399227 - RNA, 32 nt, Human
cucucagauucuuccccaaaugaggcagggug

SEQ ID NO: 399228 - RNA, 32 nt, Human
cucucagcagggugucaggcuuggggauuuga

SEQ ID NO: 399229 - RNA, 32 nt, Human
cucucagcaguuauugaucauuucuuaaggaa

SEQ ID NO: 399230 - RNA, 32 nt, Human
cucucagcaguuuuugcugcuucagcucuucc

SEQ ID NO: 399231 - RNA, 32 nt, Human
cucucagcaugucuccuccaccacgggacccc

SEQ ID NO: 399232 - RNA, 17 nt, Human
cucucagccaacuucua

SEQ ID NO: 399233 - RNA, 32 nt, Human
cucucagccaacuucuagcucacugcacucac

SEQ ID NO: 399234 - RNA, 32 nt, Human
cucucagccauuucagcagccccgucaaccgc

SEQ ID NO: 399235 - RNA, 32 nt, Human
cucucagcccacugcacucuccacucugccag

SEQ ID NO: 399236 - RNA, 32 nt, Human
cucucagcccagggaucagggacugggcugcu

SEQ ID NO: 399237 - RNA, 32 nt, Human
cucucagcccccguuucagggucagcgggaac

SEQ ID NO: 399238 - RNA, 32 nt, Human
cucucagcccugccacugccccggcgugcucc

SEQ ID NO: 399239 - RNA, 32 nt, Human
cucucagccuugaagccguuucccucugcgau

SEQ ID NO: 399240 - RNA, 32 nt, Human
cucucagcgguggcuggcuggcauuuuucucu

SEQ ID NO: 399241 - RNA, 22 nt, Human
cucucagcucacugagcucucu

SEQ ID NO: 399242 - RNA, 32 nt, Human
cucucagcucacugcaaccuccaccucccagg

SEQ ID NO: 399243 - RNA, 32 nt, Human
cucucagcucacugcagcccugacugccuagg

SEQ ID NO: 399244 - RNA, 32 nt, Human
cucucagcucuagggcccucugcacacuggcc

SEQ ID NO: 399245 - RNA, 32 nt, Human
cucucagcucugccaccucuagcugcaugacc

SEQ ID NO: 399246 - RNA, 32 nt, Human
cucucagcugcacucacagcaccagugagacc

SEQ ID NO: 399247 - RNA, 32 nt, Human
cucucagcugugugugcacaugcacacccacc

SEQ ID NO: 399248 - RNA, 32 nt, Human
cucucagcuuccugauccacagaagcagcaug

SEQ ID NO: 399249 - RNA, 32 nt, Human
cucucaggaaaggugauggagccccagugaca

SEQ ID NO: 399250 - RNA, 32 nt, Human
cucucaggaccacugugggugccaccaggcac

SEQ ID NO: 399251 - RNA, 32 nt, Human
cucucaggacuguggcuggaggcugggucugc

SEQ ID NO: 399252 - RNA, 32 nt, Human
cucucaggagagaagcuuuugaccacggagua

SEQ ID NO: 399253 - RNA, 32 nt, Human
cucucaggaugaaggugacggugggcccagac

SEQ ID NO: 399254 - RNA, 32 nt, Human
cucucaggccagaacucaacagcuauuuuugg

SEQ ID NO: 399255 - RNA, 32 nt, Human
cucucaggccggcagccccagccugcuagcua

SEQ ID NO: 399256 - RNA, 32 nt, Human
cucucaggcgacgguugcucagcugggucuau

SEQ ID NO: 399257 - RNA, 32 nt, Human
cucucagggcaggcacauguacggggcauaca

SEQ ID NO: 399258 - RNA, 32 nt, Human
cucucagggcccugcucaccugcucuggcugu

SEQ ID NO: 399259 - RNA, 32 nt, Human
cucucagggcucuguugggucuaccucaucug

SEQ ID NO: 399260 - RNA, 18 nt, Human
cucucagggcugcagcuu

SEQ ID NO: 399261 - RNA, 32 nt, Human
cucucagggcugggaggaccccagugcccucc

SEQ ID NO: 399262 - RNA, 32 nt, Human
cucucaggggcagagucagggcuggagguaga

SEQ ID NO: 399263 - RNA, 32 nt, Human
cucucaggggccagggaggccacccaggaccu

SEQ ID NO: 399264 - RNA, 32 nt, Human
cucucagggugcuggggcagccccaggucccc

SEQ ID NO: 399265 - RNA, 32 nt, Human
cucucaggucccucucuccugcccuagaggga

SEQ ID NO: 399266 - RNA, 32 nt, Human
cucucaguaaagccuccuggcaccaggccuuc

SEQ ID NO: 399267 - RNA, 32 nt, Human
cucucaguagacacuggagcugcucugucccu

SEQ ID NO: 399268 - RNA, 32 nt, Human
cucucaguccagccuggaggugugcucugagg

SEQ ID NO: 399269 - RNA, 22 nt, Human
cucucaguccaggcaaagccca

SEQ ID NO: 399270 - RNA, 32 nt, Human
cucucaguccucagauguggaaauaaaacaaa

SEQ ID NO: 399271 - RNA, 32 nt, Human
cucucaguccugaugucacaggcgcggcaagg

SEQ ID NO: 399272 - RNA, 32 nt, Human
cucucagucuccauuuuaacagugcuuuugaa

SEQ ID NO: 399273 - RNA, 24 nt, Human
cucucagugccaccacccccggca

SEQ ID NO: 399274 - RNA, 32 nt, Human
cucucagugccuggcccagcuuccuucaaaau

SEQ ID NO: 399275 - RNA, 32 nt, Human
cucucaguguguggugccuagccuccaggugg

SEQ ID NO: 399276 - RNA, 32 nt, Human
cucucaguuacuaagcaauacuuccuggagag

SEQ ID NO: 399277 - RNA, 32 nt, Human
cucucauacaucaagccccagaggaggcggca

SEQ ID NO: 399278 - RNA, 32 nt, Human
cucucauaggugcuauagccccagggacccag

SEQ ID NO: 399279 - RNA, 32 nt, Human
cucucauagucuuaaugcgucuggaccacugg

SEQ ID NO: 399280 - RNA, 32 nt, Human
cucucaucacagucugagucugguccauugcu

SEQ ID NO: 399281 - RNA, 32 nt, Human
cucucaucacccaggcuagagugcaguggcac

SEQ ID NO: 399282 - RNA, 32 nt, Human
cucucaucguccggccuucucccuucaucuug

SEQ ID NO: 399283 - RNA, 32 nt, Human
cucucaugacuuaacuggcuucccucugcugc

SEQ ID NO: 399284 - RNA, 22 nt, Human
cucucaugagcaccucuuccca

SEQ ID NO: 399285 - RNA, 32 nt, Human
cucucaugauccaccugccccgggagggcagc

SEQ ID NO: 399286 - RNA, 32 nt, Human
cucucaugcacggacuggagggcugcuccaac

SEQ ID NO: 399287 - RNA, 32 nt, Human
cucucaugccuccugaggcuguuuuuggcugu

SEQ ID NO: 399288 - RNA, 19 nt, Human
cucucauggaauugacaua

SEQ ID NO: 399289 - RNA, 32 nt, Human
cucucauucuccauagucuguuuccuggaaag

SEQ ID NO: 399290 - RNA, 32 nt, Human
cucucauucucccacaaugugugaaagcccca

SEQ ID NO: 399291 - RNA, 32 nt, Human
cucucauucuuauugaaccucuagcucuacua

SEQ ID NO: 399292 - RNA, 32 nt, Human
cucucauugcagccucggcguuuguagaagag

SEQ ID NO: 399293 - RNA, 32 nt, Human
cucucauugcccaggcuggagugcagugagcu

SEQ ID NO: 399294 - RNA, 32 nt, Human
cucucauuggggucucacugucucuaguauuu

SEQ ID NO: 399295 - RNA, 32 nt, Human
cucucauuucccuucuccuucucccucagucu

SEQ ID NO: 399296 - RNA, 32 nt, Human
cucucauuuccucugaugucuggaugaucggc

SEQ ID NO: 399297 - RNA, 32 nt, Human
cucucauuuguaacugcaugcauuauucuuga

SEQ ID NO: 399298 - RNA, 31 nt, Human
cucucauuuguucacuuuacagcagagugcc

SEQ ID NO: 399299 - RNA, 32 nt, Human
cucucauuuucccaucuucugcccuuuacuau

SEQ ID NO: 399300 - RNA, 32 nt, Human
cucucauuuuucugaagucugggaccucaaca

SEQ ID NO: 399301 - RNA, 32 nt, Human
cucuccaaaauacuugugaaacaauuuaucuu

SEQ ID NO: 399302 - RNA, 32 nt, Human
cucuccaaacccuguuucaucuucccaagcau

SEQ ID NO: 399303 - RNA, 32 nt, Human
cucuccaaaccugcuugcuugcaccccucuag

SEQ ID NO: 399304 - RNA, 32 nt, Human
cucuccaaccugggugacagaccgagacccug

SEQ ID NO: 399305 - RNA, 32 nt, Human
cucuccaacugccaccaagagguccauuccuu

SEQ ID NO: 399306 - RNA, 32 nt, Human
cucuccaagacaggaggccccagauccccaga

SEQ ID NO: 399307 - RNA, 32 nt, Human
cucuccaagaucuauguaucccuggcccacgu

SEQ ID NO: 399308 - RNA, 32 nt, Human
cucuccaagcucaauucucuaagccccucagg

SEQ ID NO: 399309 - RNA, 32 nt, Human
cucuccaagggccaccacaguguguaacaaua

SEQ ID NO: 399310 - RNA, 32 nt, Human
cucuccaagugcugggauuacaggcaucagcc

SEQ ID NO: 399311 - RNA, 29 nt, Human
cucuccaauaaagcaccuuguugaaagaa

SEQ ID NO: 399312 - RNA, 32 nt, Human
cucuccacaauccucuuaaagccccaggccag

SEQ ID NO: 399313 - RNA, 32 nt, Human
cucuccacagaauguuugcagagcugggcagu

SEQ ID NO: 399314 - RNA, 32 nt, Human
cucuccacagcaccuuugugaacucaggaaug

SEQ ID NO: 399315 - RNA, 32 nt, Human
cucuccacagccccaucaaagaacagagagga

SEQ ID NO: 399316 - RNA, 31 nt, Human
cucuccacaggagcggaaaaagagagacugc

SEQ ID NO: 399317 - RNA, 32 nt, Human
cucuccacaggcaccucuggggucuugguaug

SEQ ID NO: 399318 - RNA, 32 nt, Human
cucuccacccaguucaauggugcaauggacca

SEQ ID NO: 399319 - RNA, 32 nt, Human
cucuccacccguucugccucagugguuucaaa

SEQ ID NO: 399320 - RNA, 32 nt, Human
cucuccaccucacuagcuccccaaucccugac

SEQ ID NO: 399321 - RNA, 32 nt, Human
cucuccacuccacgaggaugugaaacgguucu

SEQ ID NO: 399322 - RNA, 32 nt, Human
cucuccacuccccucuacucccucccuguaac

SEQ ID NO: 399323 - RNA, 32 nt, Human
cucuccacucucccucuccacuccccuuccug

SEQ ID NO: 399324 - RNA, 32 nt, Human
cucuccacugaauuccugaauuaugcauugca

SEQ ID NO: 399325 - RNA, 32 nt, Human
cucuccacuuccccucucccugcugaggaauc

SEQ ID NO: 399326 - RNA, 32 nt, Human
cucuccacuuucucucacaggcugcuagaaca

SEQ ID NO: 399327 - RNA, 32 nt, Human
cucuccagaauggcacauggcuccggggugcc

SEQ ID NO: 399328 - RNA, 22 nt, Human
cucuccagaccaagcucucccu

SEQ ID NO: 399329 - RNA, 32 nt, Human
cucuccagaccaagcucucccucccaguggcc

SEQ ID NO: 399330 - RNA, 19 nt, Human
cucuccagaccuccucucu

SEQ ID NO: 399331 - RNA, 32 nt, Human
cucuccagaggacacacagcucuggauuucua

SEQ ID NO: 399332 - RNA, 32 nt, Human
cucuccagauaccaauucuucaugccgagagc

SEQ ID NO: 399333 - RNA, 32 nt, Human
cucuccagcaaaggacacaucucuccagcaaa

SEQ ID NO: 399334 - RNA, 32 nt, Human
cucuccagcaagcccugaagucaguagugccu

SEQ ID NO: 399335 - RNA, 21 nt, Human
cucuccagcaggggaucccca

SEQ ID NO: 399336 - RNA, 24 nt, Human
cucuccagcagggugcuccugcuc

SEQ ID NO: 399337 - RNA, 32 nt, Human
cucuccagcaucucuccguagccugggugaag

SEQ ID NO: 399338 - RNA, 32 nt, Human
cucuccagcauuuggaauuccacccgccuugc

SEQ ID NO: 399339 - RNA, 32 nt, Human
cucuccagccccaggucuccugacauuguguu

SEQ ID NO: 399340 - RNA, 32 nt, Human
cucuccagccccauggcugcugcuggucagcc

SEQ ID NO: 399341 - RNA, 18 nt, Human
cucuccagccccugcagc

SEQ ID NO: 399342 - RNA, 32 nt, Human
cucuccagcccuuugggacuuccaaugggauc

SEQ ID NO: 399343 - RNA, 32 nt, Human
cucuccagcccuuuucuccaucccuguccaau

SEQ ID NO: 399344 - RNA, 32 nt, Human
cucuccagccugagcgacagagcgagacuccg

SEQ ID NO: 399345 - RNA, 32 nt, Human
cucuccagccugagguggugaaggcaggaugc

SEQ ID NO: 399346 - RNA, 32 nt, Human
cucuccagccuggcgacagagggagacuccau

SEQ ID NO: 399347 - RNA, 32 nt, Human
cucuccagccugggcaacagagcaaggcucug

SEQ ID NO: 399348 - RNA, 32 nt, Human
cucuccagccugggcgacaagagcgaaacucc

SEQ ID NO: 399349 - RNA, 32 nt, Human
cucuccagccugggcgacagagugagacucca

SEQ ID NO: 399350 - RNA, 32 nt, Human
cucuccagccuggggaacagagcaagacuguc

SEQ ID NO: 399351 - RNA, 32 nt, Human
cucuccagccugggugacacagcaagacucug

SEQ ID NO: 399352 - RNA, 32 nt, Human
cucuccagccugggugacagaggaagacucag

SEQ ID NO: 399353 - RNA, 32 nt, Human
cucuccagccuggguggcagagcgagacccug

SEQ ID NO: 399354 - RNA, 19 nt, Human
cucuccagcuccugcaccc

SEQ ID NO: 399355 - RNA, 32 nt, Human
cucuccagcugcagcauguuggugccauuuuc

SEQ ID NO: 399356 - RNA, 32 nt, Human
cucuccagcugccaccacagccuggaggcgcc

SEQ ID NO: 399357 - RNA, 32 nt, Human
cucuccagcuggauucuggagcuguucuccau

SEQ ID NO: 399358 - RNA, 32 nt, Human
cucuccaggaagguagcccagcacugugaaga

SEQ ID NO: 399359 - RNA, 32 nt, Human
cucuccaggaccaguggagagccccacccccg

SEQ ID NO: 399360 - RNA, 32 nt, Human
cucuccaggacugaggacagagcugcucuucu

SEQ ID NO: 399361 - RNA, 32 nt, Human
cucuccaggagcaaguccuguguggcaaaacu

SEQ ID NO: 399362 - RNA, 32 nt, Human
cucuccaggcagauagugcccucuccacaauc

SEQ ID NO: 399363 - RNA, 21 nt, Human
cucuccaggcccagcuccccu

SEQ ID NO: 399364 - RNA, 32 nt, Human
cucuccaggcuggagugcaguggcacaaucuc

SEQ ID NO: 399365 - RNA, 32 nt, Human
cucuccagggccugggccugauucaggugcag

SEQ ID NO: 399366 - RNA, 32 nt, Human
cucuccaggguaggccagcuugaggaaucuua

SEQ ID NO: 399367 - RNA, 19 nt, Human
cucuccagucaaggccacc

SEQ ID NO: 399368 - RNA, 32 nt, Human
cucuccagugccacuacugcgcuuucgaugca

SEQ ID NO: 399369 - RNA, 32 nt, Human
cucuccagugcuguccuugucugcaccacccg

SEQ ID NO: 399370 - RNA, 32 nt, Human
cucuccagugggagggcggcagcuccuguccc

SEQ ID NO: 399371 - RNA, 32 nt, Human
cucuccaguucccucagacucugucuucagcu

SEQ ID NO: 399372 - RNA, 32 nt, Human
cucuccaguucccuccuggucaccugcugccu

SEQ ID NO: 399373 - RNA, 32 nt, Human
cucuccauccacccaccuuucccucauucccu

SEQ ID NO: 399374 - RNA, 32 nt, Human
cucuccaucccuccuugcuggcccuccucccc

SEQ ID NO: 399375 - RNA, 32 nt, Human
cucuccaucccucugucccuugcucuucuuca

SEQ ID NO: 399376 - RNA, 32 nt, Human
cucuccaucccucuuuucuuuuguccuugccu

SEQ ID NO: 399377 - RNA, 32 nt, Human
cucuccaucccuuccuuccucccuccuucucc

SEQ ID NO: 399378 - RNA, 32 nt, Human
cucuccaucuacaaaguugcaguauuaugcaa

SEQ ID NO: 399379 - RNA, 32 nt, Human
cucuccaucuacuuuucccugugcauaauauc

SEQ ID NO: 399380 - RNA, 32 nt, Human
cucuccaucucucaccaaggcugcgucaaagc

SEQ ID NO: 399381 - RNA, 32 nt, Human
cucuccaucugaggcuccuucacuuucucucc

SEQ ID NO: 399382 - RNA, 32 nt, Human
cucuccaucuuucugcuucugggcuuucugaa

SEQ ID NO: 399383 - RNA, 32 nt, Human
cucuccaugccaccaccugcccuaccauuuau

SEQ ID NO: 399384 - RNA, 32 nt, Human
cucuccaugcuguggcccuggugauggcagag

SEQ ID NO: 399385 - RNA, 32 nt, Human
cucuccauucacuggucaaauaacuccaugag

SEQ ID NO: 399386 - RNA, 32 nt, Human
cucuccauuuccugccucuccuuucaccaagc

SEQ ID NO: 399387 - RNA, 32 nt, Human
cucuccauuugcuaccuguaguagccugccuc

SEQ ID NO: 399388 - RNA, 32 nt, Human
cucucccaacauacccaauccuggugaucagg

SEQ ID NO: 399389 - RNA, 32 nt, Human
cucucccaagaauacaaaaauuagccaggcau

SEQ ID NO: 399390 - RNA, 32 nt, Human
cucucccaaugccuccaucccauccccauggu

SEQ ID NO: 399391 - RNA, 32 nt, Human
cucucccaccacaggcucacacugcccuuacu

SEQ ID NO: 399392 - RNA, 32 nt, Human
cucucccaccaccugaauucuccaaggacucg

SEQ ID NO: 399393 - RNA, 20 nt, Human
cucucccaccucagccuccu

SEQ ID NO: 399394 - RNA, 32 nt, Human
cucucccaccucuaccuccacccccaccggcc

SEQ ID NO: 399395 - RNA, 32 nt, Human
cucucccaccugguuaccacagucuccauggg

SEQ ID NO: 399396 - RNA, 23 nt, Human
cucucccacggcugcaggucaga

SEQ ID NO: 399397 - RNA, 32 nt, Human
cucucccacuagacaaguccagccuggcaagg

SEQ ID NO: 399398 - RNA, 32 nt, Human
cucucccacucucccuucucucugagucuuau

SEQ ID NO: 399399 - RNA, 32 nt, Human
cucucccacugcaacuccacuuucuuugcauc

SEQ ID NO: 399400 - RNA, 32 nt, Human
cucucccacugcacacagggugguggcacauu

SEQ ID NO: 399401 - RNA, 32 nt, Human
cucucccacugcaccccuucuccuccaagaau

SEQ ID NO: 399402 - RNA, 32 nt, Human
cucucccacugcacccuggguugggugcacag

SEQ ID NO: 399403 - RNA, 32 nt, Human
cucucccacuuuucccuuccucuuuccccaca

SEQ ID NO: 399404 - RNA, 32 nt, Human
cucucccagaggagaucucuccccaguagugc

SEQ ID NO: 399405 - RNA, 22 nt, Human
cucucccagccaccuccuccca

SEQ ID NO: 399406 - RNA, 32 nt, Human
cucucccagccugugcuccuuucccucaucca

SEQ ID NO: 399407 - RNA, 32 nt, Human
cucucccagccuugccuggcugagcuguguuc

SEQ ID NO: 399408 - RNA, 32 nt, Human
cucucccagcgggccucccccuuccuacucag

SEQ ID NO: 399409 - RNA, 32 nt, Human
cucucccaggagcagugaguugugaguggaaa

SEQ ID NO: 399410 - RNA, 17 nt, Human
cucucccaggcucaccc

SEQ ID NO: 399411 - RNA, 32 nt, Human
cucucccaggggcuggcuucaggagggagcau

SEQ ID NO: 399412 - RNA, 32 nt, Human
cucucccaggucuacugcucccuggaaagccc

SEQ ID NO: 399413 - RNA, 32 nt, Human
cucucccagguuuccagcuugcaacugcuggu

SEQ ID NO: 399414 - RNA, 32 nt, Human
cucucccagucaaguggucaccagcaggacug

SEQ ID NO: 399415 - RNA, 32 nt, Human
cucucccaguccauuuccaaauguggccucca

SEQ ID NO: 399416 - RNA, 32 nt, Human
cucucccaucuggaucucccagccuuuuccaa

SEQ ID NO: 399417 - RNA, 32 nt, Human
cucucccaucuucucauauccuggcucuucuc

SEQ ID NO: 399418 - RNA, 32 nt, Human
cucucccauucuccgagcuuguccucagagaa

SEQ ID NO: 399419 - RNA, 32 nt, Human
cucucccauucugugaugaguacagcagagac

SEQ ID NO: 399420 - RNA, 32 nt, Human
cucuccccacagccuuccuccccaccaucccg

SEQ ID NO: 399421 - RNA, 32 nt, Human
cucuccccaccagccccauucucagguccuuu

SEQ ID NO: 399422 - RNA, 32 nt, Human
cucuccccacugucucucuucuuucugucagg

SEQ ID NO: 399423 - RNA, 32 nt, Human
cucuccccagccauucagagguuuccaaacua

SEQ ID NO: 399424 - RNA, 32 nt, Human
cucuccccagcccugagcacugugucaguucc

SEQ ID NO: 399425 - RNA, 32 nt, Human
cucuccccaggccucuggcugcagugaugccg

SEQ ID NO: 399426 - RNA, 32 nt, Human
cucuccccagggccuggcccuaccuccugguc

SEQ ID NO: 399427 - RNA, 32 nt, Human
cucuccccaggggagcccccaagggcggucgg

SEQ ID NO: 399428 - RNA, 32 nt, Human
cucuccccagguaguuggucagcuguggacuc

SEQ ID NO: 399429 - RNA, 32 nt, Human
cucuccccaguauuaucuuacuugcaaaaugg

SEQ ID NO: 399430 - RNA, 32 nt, Human
cucuccccagucugccccacuuccuggcuuua

SEQ ID NO: 399431 - RNA, 32 nt, Human
cucuccccaucuucccucaguucccauaaaac

SEQ ID NO: 399432 - RNA, 32 nt, Human
cucuccccaucuuggcugcuguccugccucug

SEQ ID NO: 399433 - RNA, 32 nt, Human
cucucccccaagagcuagcgugugguauagug

SEQ ID NO: 399434 - RNA, 32 nt, Human
cucucccccacccucuuuucccuucccaaagg

SEQ ID NO: 399435 - RNA, 32 nt, Human
cucucccccagccugccauguggcacugccca

SEQ ID NO: 399436 - RNA, 32 nt, Human
cucucccccaggaaacagugccuaaggaugau

SEQ ID NO: 399437 - RNA, 32 nt, Human
cucucccccaggcucuuucuccagcccugucu

SEQ ID NO: 399438 - RNA, 32 nt, Human
cucucccccaggcugcaguauuuugggcaggc

SEQ ID NO: 399439 - RNA, 32 nt, Human
cucucccccucaccauccccagauuuuaguug

SEQ ID NO: 399440 - RNA, 32 nt, Human
cucucccccuccacuuccucuccucccacccu

SEQ ID NO: 399441 - RNA, 32 nt, Human
cucucccccuccccaaacacaccaagaagcau

SEQ ID NO: 399442 - RNA, 32 nt, Human
cucucccccucggaggcggcgggcggaggcgg

SEQ ID NO: 399443 - RNA, 32 nt, Human
cucucccccuuccucucucccuucccuuccau

SEQ ID NO: 399444 - RNA, 32 nt, Human
cucuccccgcuccccagccucgggcgaggccg

SEQ ID NO: 399445 - RNA, 32 nt, Human
cucuccccgcugcgcucccucgcuccuucccu

SEQ ID NO: 399446 - RNA, 32 nt, Human
cucuccccgcuuccuauuuucucccuccaccu

SEQ ID NO: 399447 - RNA, 32 nt, Human
cucuccccggcaggccugagaaugagugggaa

SEQ ID NO: 399448 - RNA, 32 nt, Human
cucuccccgugcauggaaguccugguaaagga

SEQ ID NO: 399449 - RNA, 32 nt, Human
cucuccccguucaugcccugcacuacauagca

SEQ ID NO: 399450 - RNA, 32 nt, Human
cucuccccuacagggcccuugcugcgugaugg

SEQ ID NO: 399451 - RNA, 32 nt, Human
cucuccccuccagagcccugaguuucuuggcu

SEQ ID NO: 399452 - RNA, 32 nt, Human
cucuccccuccagccuuuggccuuggcuuuuc

SEQ ID NO: 399453 - RNA, 32 nt, Human
cucuccccuccccacuggcucugucugcucuc

SEQ ID NO: 399454 - RNA, 32 nt, Human
cucuccccucccccaccuuggcccccucuuug

SEQ ID NO: 399455 - RNA, 32 nt, Human
cucuccccucccccaguuucuccuccccuaaa

SEQ ID NO: 399456 - RNA, 32 nt, Human
cucuccccuccccucagugcccuugccccauc

SEQ ID NO: 399457 - RNA, 32 nt, Human
cucuccccuccccuccccuccccuccucuccu

SEQ ID NO: 399458 - RNA, 32 nt, Human
cucuccccuccccucuccggguucccccaccc

SEQ ID NO: 399459 - RNA, 32 nt, Human
cucuccccuccccuggcuuuccucucugccug

SEQ ID NO: 399460 - RNA, 32 nt, Human
cucuccccuccccuuccccucucgcaaacaug

SEQ ID NO: 399461 - RNA, 32 nt, Human
cucuccccuccccuuccuaccgcacccucagg

SEQ ID NO: 399462 - RNA, 32 nt, Human
cucuccccuccuccuccuugucacuggccucc

SEQ ID NO: 399463 - RNA, 32 nt, Human
cucuccccucucuacuuuaauucauuggagca

SEQ ID NO: 399464 - RNA, 32 nt, Human
cucuccccucucucuccaucccuuccuuccuc

SEQ ID NO: 399465 - RNA, 18 nt, Human
cucuccccugcagccgcg

SEQ ID NO: 399466 - RNA, 32 nt, Human
cucuccccugcccugcagcccugggccagaca

SEQ ID NO: 399467 - RNA, 32 nt, Human
cucuccccugcucucccaccucuaccuccacc

SEQ ID NO: 399468 - RNA, 32 nt, Human
cucuccccuucuacugccuccaacacggcggc

SEQ ID NO: 399469 - RNA, 18 nt, Human
cucucccgaccagcccca

SEQ ID NO: 399470 - RNA, 19 nt, Human
cucucccgccacccgggaa

SEQ ID NO: 399471 - RNA, 32 nt, Human
cucucccgcucccucugcuccaccaggacaca

SEQ ID NO: 399472 - RNA, 31 nt, Human
cucucccggcagggagcuggcauuccccaug

SEQ ID NO: 399473 - RNA, 32 nt, Human
cucucccggccaggagcgggaacucuuccagg

SEQ ID NO: 399474 - RNA, 32 nt, Human
cucucccguaccucagaagagugcaguacugg

SEQ ID NO: 399475 - RNA, 32 nt, Human
cucucccgugagccuccagaccgccccuggcc

SEQ ID NO: 399476 - RNA, 32 nt, Human
cucucccgugccucugcuuucuccagcagcug

SEQ ID NO: 399477 - RNA, 32 nt, Human
cucucccguuucucgauaccuuccuggaggaa

SEQ ID NO: 399478 - RNA, 32 nt, Human
cucucccuaaggguagccaggagaagucuccu

SEQ ID NO: 399479 - RNA, 32 nt, Human
cucucccuaccucccuccucaggggcaacaac

SEQ ID NO: 399480 - RNA, 32 nt, Human
cucucccuacugccugagcaaaccugaggccu

SEQ ID NO: 399481 - RNA, 32 nt, Human
cucucccuagugucccuucagccugggcugac

SEQ ID NO: 399482 - RNA, 32 nt, Human
cucucccucacaccucccuucaucccagggua

SEQ ID NO: 399483 - RNA, 32 nt, Human
cucucccucacugcucccagcaccuccugacc

SEQ ID NO: 399484 - RNA, 32 nt, Human
cucucccuccacacagccacacugccucaugc

SEQ ID NO: 399485 - RNA, 32 nt, Human
cucucccuccacccugccuccucgggcuccac

SEQ ID NO: 399486 - RNA, 32 nt, Human
cucucccuccacucagcucccagcugccggug

SEQ ID NO: 399487 - RNA, 32 nt, Human
cucucccuccacuccucccaacucuggccuug

SEQ ID NO: 399488 - RNA, 31 nt, Human
cucucccuccagcaugggccugugucucagc

SEQ ID NO: 399489 - RNA, 32 nt, Human
cucucccuccaggagcccccagcauguccuga

SEQ ID NO: 399490 - RNA, 32 nt, Human
cucucccuccugugucuugcgcuuuauguuuu

SEQ ID NO: 399491 - RNA, 32 nt, Human
cucucccuccuucuccuuccucugugauucac

SEQ ID NO: 399492 - RNA, 32 nt, Human
cucucccucuaggcucugccuucgaggucaga

SEQ ID NO: 399493 - RNA, 32 nt, Human
cucucccucucccacaccucacacacacauac

SEQ ID NO: 399494 - RNA, 32 nt, Human
cucucccucucuccaagacucuggcaguggcc

SEQ ID NO: 399495 - RNA, 18 nt, Human
cucucccucucuuagggu

SEQ ID NO: 399496 - RNA, 32 nt, Human
cucucccucuuccucugcucccgcggggucug

SEQ ID NO: 399497 - RNA, 32 nt, Human
cucucccugaaccugauccucagccuucaguu

SEQ ID NO: 399498 - RNA, 32 nt, Human
cucucccugcaaacaccacacacacauggcau

SEQ ID NO: 399499 - RNA, 32 nt, Human
cucucccugcagccacauguuucccaugaccu

SEQ ID NO: 399500 - RNA, 32 nt, Human
cucucccugcagcuuucacugcucuugccuaa

SEQ ID NO: 399501 - RNA, 32 nt, Human
cucucccugcauaggcugcugggaagcucaga

SEQ ID NO: 399502 - RNA, 32 nt, Human
cucucccugccacccuuccccaguucaccaaa

SEQ ID NO: 399503 - RNA, 32 nt, Human
cucucccugccccuuggugaccccguggcuuc

SEQ ID NO: 399504 - RNA, 32 nt, Human
cucucccugccucugagcucuggacucuguuu

SEQ ID NO: 399505 - RNA, 32 nt, Human
cucucccugccuggcacaugccugccagcguu

SEQ ID NO: 399506 - RNA, 27 nt, Human
cucucccugcuccacagcuuucagggu

SEQ ID NO: 399507 - RNA, 32 nt, Human
cucucccugcugucagcagugucucuggcaug

SEQ ID NO: 399508 - RNA, 32 nt, Human
cucucccuggacagcucugaggggcuccuugc

SEQ ID NO: 399509 - RNA, 32 nt, Human
cucucccuggacauacguuagcacauuggcau

SEQ ID NO: 399510 - RNA, 32 nt, Human
cucucccuggcuggagcagggagcuccaggag

SEQ ID NO: 399511 - RNA, 32 nt, Human
cucucccugggaggggacgaggggcggccuuc

SEQ ID NO: 399512 - RNA, 32 nt, Human
cucucccugggcuucucucucuucuaguucua

SEQ ID NO: 399513 - RNA, 31 nt, Human
cucucccuggugucucccccaagaccccaaa

SEQ ID NO: 399514 - RNA, 32 nt, Human
cucucccugugucgcuuaaacaacaguccuaa

SEQ ID NO: 399515 - RNA, 32 nt, Human
cucucccuucgcuccaagccucaggccaccgg

SEQ ID NO: 399516 - RNA, 32 nt, Human
cucucccuuuccagcucuccccaaaguccaca

SEQ ID NO: 399517 - RNA, 32 nt, Human
cucucccuuucucccuccauccuuccacuucc

SEQ ID NO: 399518 - RNA, 32 nt, Human
cucuccgaaaggcaucuaucugugcuauugca

SEQ ID NO: 399519 - RNA, 32 nt, Human
cucuccgaagaggaaagccacguagagugguu

SEQ ID NO: 399520 - RNA, 32 nt, Human
cucuccgaaugcugcgcaccgcgaugggccug

SEQ ID NO: 399521 - RNA, 32 nt, Human
cucuccgacuccgccaagcaagagcucaugga

SEQ ID NO: 399522 - RNA, 32 nt, Human
cucuccgagagaaaaccaaggugugucaaaug

SEQ ID NO: 399523 - RNA, 22 nt, Human
cucuccgauuccaccuccuccu

SEQ ID NO: 399524 - RNA, 32 nt, Human
cucuccgcagccgcccuccgccaagccccagc

SEQ ID NO: 399525 - RNA, 32 nt, Human
cucuccgcaggcccacuguccuuggguuuaau

SEQ ID NO: 399526 - RNA, 32 nt, Human
cucuccgcccacccuuacucccucccccucau

SEQ ID NO: 399527 - RNA, 32 nt, Human
cucuccgccccaggccagccagcuccaucucg

SEQ ID NO: 399528 - RNA, 32 nt, Human
cucuccgccucuccaucaccagccuucaucag

SEQ ID NO: 399529 - RNA, 32 nt, Human
cucuccgcgccuacccuucccgccucccucuc

SEQ ID NO: 399530 - RNA, 32 nt, Human
cucuccgcgguuaccugugccuagaggugauu

SEQ ID NO: 399531 - RNA, 32 nt, Human
cucuccgcuccagccucuccccagaacggcuc

SEQ ID NO: 399532 - RNA, 32 nt, Human
cucuccgcucuuuccagcaaagcugcucagag

SEQ ID NO: 399533 - RNA, 32 nt, Human
cucuccgcugggcucccagagcugcuggcguu

SEQ ID NO: 399534 - RNA, 32 nt, Human
cucuccggcaagggguuguugcacuagauuuc

SEQ ID NO: 399535 - RNA, 32 nt, Human
cucuccgggcccagaaccuccucaagucggcc

SEQ ID NO: 399536 - RNA, 32 nt, Human
cucuccgguacgugcccagcucaggccggcug

SEQ ID NO: 399537 - RNA, 32 nt, Human
cucuccggugccgccgcugccugcucccgcca

SEQ ID NO: 399538 - RNA, 32 nt, Human
cucuccguacaugcgccccacccccaugagcc

SEQ ID NO: 399539 - RNA, 32 nt, Human
cucuccgucuucuccccuccuucuuccccacu

SEQ ID NO: 399540 - RNA, 19 nt, Human
cucuccguguccccaccgg

SEQ ID NO: 399541 - RNA, 32 nt, Human
cucuccguugcucucccuggaucaggaacugg

SEQ ID NO: 399542 - RNA, 32 nt, Human
cucuccguuggccucagagucacuccugcccc

SEQ ID NO: 399543 - RNA, 32 nt, Human
cucuccuaaaaauacaaaaauuagccagaugu

SEQ ID NO: 399544 - RNA, 32 nt, Human
cucuccuaaaaauacaaaaauuagccgggcau

SEQ ID NO: 399545 - RNA, 32 nt, Human
cucuccuaaaaauacaaaaauuagcuggacau

SEQ ID NO: 399546 - RNA, 32 nt, Human
cucuccuaaaaauacaaaaauuagcuggaugu

SEQ ID NO: 399547 - RNA, 32 nt, Human
cucuccuaaaaauacaaaaauuggccgggcau

SEQ ID NO: 399548 - RNA, 32 nt, Human
cucuccuaaaaauacagaaaauuagccuggca

SEQ ID NO: 399549 - RNA, 32 nt, Human
cucuccuaaacuugcacucugcuccaucucag

SEQ ID NO: 399550 - RNA, 32 nt, Human
cucuccuaagcuccuucuuucauucugccauu

SEQ ID NO: 399551 - RNA, 20 nt, Human
cucuccuacccucuccucuu

SEQ ID NO: 399552 - RNA, 32 nt, Human
cucuccuaccugcugauugagccauccauuuu

SEQ ID NO: 399553 - RNA, 32 nt, Human
cucuccuagcucuccccuaagcuucuugaguc

SEQ ID NO: 399554 - RNA, 32 nt, Human
cucuccuaguaguacuuuuucucucuccauuu

SEQ ID NO: 399555 - RNA, 32 nt, Human
cucuccuaucuacugcuacagauccuguugaa

SEQ ID NO: 399556 - RNA, 32 nt, Human
cucuccuaugccaccccagguggggagggagg

SEQ ID NO: 399557 - RNA, 32 nt, Human
cucuccucaccccucuauccauuccucccgcc

SEQ ID NO: 399558 - RNA, 32 nt, Human
cucuccucacuccucuggacuuggcccugagc

SEQ ID NO: 399559 - RNA, 32 nt, Human
cucuccucagagggcggcacaggcugggcucc

SEQ ID NO: 399560 - RNA, 32 nt, Human
cucuccucaggggagcggggaggcagcugcug

SEQ ID NO: 399561 - RNA, 32 nt, Human
cucuccucaucuccaucucccaggcucuccac

SEQ ID NO: 399562 - RNA, 32 nt, Human
cucuccucauggcagcgacccaccuccagucc

SEQ ID NO: 399563 - RNA, 32 nt, Human
cucuccucauuucggugcauguccuuucugca

SEQ ID NO: 399564 - RNA, 32 nt, Human
cucuccuccaucuucuggcaaggacagaggcg

SEQ ID NO: 399565 - RNA, 32 nt, Human
cucuccucccacaucuguuccuccugcaacaa

SEQ ID NO: 399566 - RNA, 32 nt, Human
cucuccucccccacuccugcucccucucccuu

SEQ ID NO: 399567 - RNA, 32 nt, Human
cucuccucccccagccuuccuccggcuggcag

SEQ ID NO: 399568 - RNA, 32 nt, Human
cucuccuccccuuuuagcauuacugucuucug

SEQ ID NO: 399569 - RNA, 32 nt, Human
cucuccuccuccacuugccccuccuguggcac

SEQ ID NO: 399570 - RNA, 32 nt, Human
cucuccuccucccccucucuccuuccuuccuu

SEQ ID NO: 399571 - RNA, 32 nt, Human
cucuccuccuccgucgucaccccggccgcccu

SEQ ID NO: 399572 - RNA, 32 nt, Human
cucuccuccuucccucucccucucugcuuccu

SEQ ID NO: 399573 - RNA, 32 nt, Human
cucuccucgagcacgucacacacacaugccag

SEQ ID NO: 399574 - RNA, 32 nt, Human
cucuccucgcuguccccucucuguagugacug

SEQ ID NO: 399575 - RNA, 32 nt, Human
cucuccucgugcuucaaaaugacaggaauccu

SEQ ID NO: 399576 - RNA, 32 nt, Human
cucuccucguuucucuccuuccuuccuuucca

SEQ ID NO: 399577 - RNA, 32 nt, Human
cucuccucguuucucucuuacuccucauccuc

SEQ ID NO: 399578 - RNA, 32 nt, Human
cucuccucuccccucccugccccuugccucac

SEQ ID NO: 399579 - RNA, 32 nt, Human
cucuccucuccccucccuugcuuuccccagag

SEQ ID NO: 399580 - RNA, 32 nt, Human
cucuccucuccgcuucucucccccucugucuc

SEQ ID NO: 399581 - RNA, 32 nt, Human
cucuccucuccucaggcucaauaauuccaugg

SEQ ID NO: 399582 - RNA, 32 nt, Human
cucuccucuccucauucccaacccaaacucag

SEQ ID NO: 399583 - RNA, 32 nt, Human
cucuccucuccuccucugugcuccugucccuc

SEQ ID NO: 399584 - RNA, 32 nt, Human
cucuccucuccuccuuccugucuccucucucu

SEQ ID NO: 399585 - RNA, 32 nt, Human
cucuccucuccuccuucugcuuaauuuaccuu

SEQ ID NO: 399586 - RNA, 32 nt, Human
cucuccucuccuccuugucuggcucuguugac

SEQ ID NO: 399587 - RNA, 32 nt, Human
cucuccucucucccucucccucucccucucug

SEQ ID NO: 399588 - RNA, 32 nt, Human
cucuccucucucuaccccuccugucucuccuc

SEQ ID NO: 399589 - RNA, 32 nt, Human
cucuccucucucuuccucuccucucucuaccc

SEQ ID NO: 399590 - RNA, 32 nt, Human
cucuccucugcuaguccugauuuggaaacagu

SEQ ID NO: 399591 - RNA, 32 nt, Human
cucuccucuggccccucuggcuuuguuuggag

SEQ ID NO: 399592 - RNA, 32 nt, Human
cucuccucuuagcuggcuccagugcccagacc

SEQ ID NO: 399593 - RNA, 32 nt, Human
cucuccucuuccuuccccaacaauguaguuuu

SEQ ID NO: 399594 - RNA, 32 nt, Human
cucuccucuuuaugcucguguuucuggaggag

SEQ ID NO: 399595 - RNA, 32 nt, Human
cucuccugaaaauguuggcauaguaaauaaaa

SEQ ID NO: 399596 - RNA, 32 nt, Human
cucuccugacucuguguuuccuacaauucuac

SEQ ID NO: 399597 - RNA, 32 nt, Human
cucuccugagaugucaggaaggagggggccac

SEQ ID NO: 399598 - RNA, 32 nt, Human
cucuccugagauuguagcaggcagccaaacau

SEQ ID NO: 399599 - RNA, 32 nt, Human
cucuccugagccugucucucccuacccucuuc

SEQ ID NO: 399600 - RNA, 19 nt, Human
cucuccugaggaccucucu

SEQ ID NO: 399601 - RNA, 23 nt, Human
cucuccugaggaccucucuguca

SEQ ID NO: 399602 - RNA, 32 nt, Human
cucuccugagggccugaagagaacaaaaggca

SEQ ID NO: 399603 - RNA, 32 nt, Human
cucuccugagggggaauccuggugcucaaauu

SEQ ID NO: 399604 - RNA, 32 nt, Human
cucuccugaggggugagccaagcccugccaug

SEQ ID NO: 399605 - RNA, 32 nt, Human
cucuccugcaaggcagcucauacuuguacugu

SEQ ID NO: 399606 - RNA, 32 nt, Human
cucuccugcaccucccuggcccugccggccac

SEQ ID NO: 399607 - RNA, 32 nt, Human
cucuccugcaugccuggggcucuugggaucug

SEQ ID NO: 399608 - RNA, 32 nt, Human
cucuccugcccaggggcuagagagcagucucc

SEQ ID NO: 399609 - RNA, 32 nt, Human
cucuccugcccucugcucugccuggagugucg

SEQ ID NO: 399610 - RNA, 32 nt, Human
cucuccugcccuggccccggccccuccugcca

SEQ ID NO: 399611 - RNA, 32 nt, Human
cucuccugcccuuagggacaugcggcuaucaa

SEQ ID NO: 399612 - RNA, 22 nt, Human
cucuccugcccuuucuccucuu

SEQ ID NO: 399613 - RNA, 32 nt, Human
cucuccugccgucaucacuauggcaggaaaac

SEQ ID NO: 399614 - RNA, 21 nt, Human
cucuccugccucagccucccu

SEQ ID NO: 399615 - RNA, 20 nt, Human
cucuccugccucagccuccu

SEQ ID NO: 399616 - RNA, 31 nt, Human
cucuccugccucucuguuucuccaucuccuc

SEQ ID NO: 399617 - RNA, 21 nt, Human
cucuccugcguccuucuguca

SEQ ID NO: 399618 - RNA, 20 nt, Human
cucuccugcuagccaucucu

SEQ ID NO: 399619 - RNA, 32 nt, Human
cucuccugcugcucggguucugaggcacagcu

SEQ ID NO: 399620 - RNA, 32 nt, Human
cucuccuggacugccuugaauauccccuccca

SEQ ID NO: 399621 - RNA, 32 nt, Human
cucuccuggagcuguucuggucucagaggcuu

SEQ ID NO: 399622 - RNA, 32 nt, Human
cucuccuggccacauccuaugcuccacauuac

SEQ ID NO: 399623 - RNA, 32 nt, Human
cucuccuggccccuuuucacggauggggaauc

SEQ ID NO: 399624 - RNA, 32 nt, Human
cucuccuggccgccaaaccccagcuggaacuc

SEQ ID NO: 399625 - RNA, 32 nt, Human
cucuccuggccuggccuggcuguggagaaccg

SEQ ID NO: 399626 - RNA, 32 nt, Human
cucuccuggcgaggcuggcaagugggguccca

SEQ ID NO: 399627 - RNA, 32 nt, Human
cucuccugggcccucauuccgggcaggucccc

SEQ ID NO: 399628 - RNA, 32 nt, Human
cucuccugggcccuuccuuaggucaguaauug

SEQ ID NO: 399629 - RNA, 32 nt, Human
cucuccugggcucaggcgcuucucccaccuug

SEQ ID NO: 399630 - RNA, 32 nt, Human
cucuccugggcucuuccaggagcauugaacac

SEQ ID NO: 399631 - RNA, 32 nt, Human
cucuccugggcugucuuuuucuccagcagacc

SEQ ID NO: 399632 - RNA, 17 nt, Human
cucuccugggcuucuca

SEQ ID NO: 399633 - RNA, 32 nt, Human
cucuccuggggccuggcuuuggcuggaggggc

SEQ ID NO: 399634 - RNA, 32 nt, Human
cucuccugucucccacccccugccccagaccc

SEQ ID NO: 399635 - RNA, 32 nt, Human
cucuccuguggcagagacggagaagaugaaca

SEQ ID NO: 399636 - RNA, 32 nt, Human
cucuccugugugucugugacccugugcgcugu

SEQ ID NO: 399637 - RNA, 32 nt, Human
cucuccuuagggagcucgaguccuggugggga

SEQ ID NO: 399638 - RNA, 32 nt, Human
cucuccuuagugccuagcugugcaauguuugc

SEQ ID NO: 399639 - RNA, 21 nt, Human
cucuccuucagggaaaauguu

SEQ ID NO: 399640 - RNA, 32 nt, Human
cucuccuucaugacagccuccaccccacaacc

SEQ ID NO: 399641 - RNA, 32 nt, Human
cucuccuuccaagucuuuagaggaagguacua

SEQ ID NO: 399642 - RNA, 32 nt, Human
cucuccuucccaagcccccuuccuucauccuu

SEQ ID NO: 399643 - RNA, 32 nt, Human
cucuccuucccuccaccugggcucggagucag

SEQ ID NO: 399644 - RNA, 32 nt, Human
cucuccuucccuccuucccuccuuccuuccuu

SEQ ID NO: 399645 - RNA, 32 nt, Human
cucuccuuccuucuucccuugaucucccucuu

SEQ ID NO: 399646 - RNA, 32 nt, Human
cucuccuucucagcggugugauggcagaugga

SEQ ID NO: 399647 - RNA, 32 nt, Human
cucuccuucuucuuccugcuguccugcccaag

SEQ ID NO: 399648 - RNA, 32 nt, Human
cucuccuucuuucuccuucaagguucuuuccc

SEQ ID NO: 399649 - RNA, 32 nt, Human
cucuccuugacagcauccaggaaagguaauua

SEQ ID NO: 399650 - RNA, 32 nt, Human
cucuccuugcagcugcuuagacgcuggauuuu

SEQ ID NO: 399651 - RNA, 32 nt, Human
cucuccuugccagcuucuccccaggccagagc

SEQ ID NO: 399652 - RNA, 32 nt, Human
cucuccuuggauaccugauauuuuauuucaag

SEQ ID NO: 399653 - RNA, 32 nt, Human
cucuccuuguguguuuuuggagaagaugggca

SEQ ID NO: 399654 - RNA, 32 nt, Human
cucuccuuucaggcccuacuggacaggugaug

SEQ ID NO: 399655 - RNA, 32 nt, Human
cucuccuuuccaggagccccaggauuagcauc

SEQ ID NO: 399656 - RNA, 32 nt, Human
cucuccuuuccuuccucauccccaccuggucc

SEQ ID NO: 399657 - RNA, 32 nt, Human
cucuccuuuccuuucccugccuggagccuucu

SEQ ID NO: 399658 - RNA, 32 nt, Human
cucuccuuucucucuucucuuccuuccucucc

SEQ ID NO: 399659 - RNA, 22 nt, Human
cucuccuuucuuccucuugccu

SEQ ID NO: 399660 - RNA, 32 nt, Human
cucuccuuugccugcgcaggaauucuaacagg

SEQ ID NO: 399661 - RNA, 22 nt, Human
cucuccuuuucacuucuugccu

SEQ ID NO: 399662 - RNA, 32 nt, Human
cucuccuuuuccaggcugcugaguaaagucug

SEQ ID NO: 399663 - RNA, 32 nt, Human
cucuccuuuucccucuuacccucucucucuua

SEQ ID NO: 399664 - RNA, 32 nt, Human
cucuccuuuucuuccuccucuuccaacuccuu

SEQ ID NO: 399665 - RNA, 32 nt, Human
cucucgaagccuuccuguagagugaggugggu

SEQ ID NO: 399666 - RNA, 32 nt, Human
cucucgaagugcugggauuccaggcgugagcc

SEQ ID NO: 399667 - RNA, 20 nt, Human
cucucgacuccagagaccug

SEQ ID NO: 399668 - RNA, 32 nt, Human
cucucgacuuaaccaccucuucagguggccag

SEQ ID NO: 399669 - RNA, 32 nt, Human
cucucgagcagcugggauuacagguaugcgcc

SEQ ID NO: 399670 - RNA, 20 nt, Human
cucucgagccacgcgcgcuc

SEQ ID NO: 399671 - RNA, 32 nt, Human
cucucgaguagaugggauuauaggcaugugcc

SEQ ID NO: 399672 - RNA, 32 nt, Human
cucucgaguagcuaggauuacaggcaugcacc

SEQ ID NO: 399673 - RNA, 32 nt, Human
cucucgaguagcugggauuacaggcaccugcc

SEQ ID NO: 399674 - RNA, 32 nt, Human
cucucgaguagcugggauuacaggcaugcacc

SEQ ID NO: 399675 - RNA, 32 nt, Human
cucucgaguagcugggauuacaggcaugcgcc

SEQ ID NO: 399676 - RNA, 32 nt, Human
cucucgaguagcugggauuacaggcgcaugcc

SEQ ID NO: 399677 - RNA, 32 nt, Human
cucucgaguagcugggauuauaggcguccgcc

SEQ ID NO: 399678 - RNA, 32 nt, Human
cucucgaguggcugggauuacaggcauccgcc

SEQ ID NO: 399679 - RNA, 26 nt, Human
cucucgccacgacgguccccauucca

SEQ ID NO: 399680 - RNA, 23 nt, Human
cucucgccaggcuggaguguagu

SEQ ID NO: 399681 - RNA, 32 nt, Human
cucucgccaugguuggagugcaguggugcgau

SEQ ID NO: 399682 - RNA, 32 nt, Human
cucucgcccaggcuagagugcaguggcaugau

SEQ ID NO: 399683 - RNA, 22 nt, Human
cucucgcccaggcuggagugca

SEQ ID NO: 399684 - RNA, 32 nt, Human
cucucgcccaggcuggagugcaacgguacgau

SEQ ID NO: 399685 - RNA, 24 nt, Human
cucucgcccaggcuggagugcagu

SEQ ID NO: 399686 - RNA, 32 nt, Human
cucucgcccaggcuggagugcaguggcgugau

SEQ ID NO: 399687 - RNA, 32 nt, Human
cucucgcccaggcuggagugcagugggugggg

SEQ ID NO: 399688 - RNA, 32 nt, Human
cucucgcccaggcuggagugcaguggugcgac

SEQ ID NO: 399689 - RNA, 32 nt, Human
cucucgcccaggcuggagugcaguggugucau

SEQ ID NO: 399690 - RNA, 32 nt, Human
cucucgcccaggcuggagugcaguggugugau

SEQ ID NO: 399691 - RNA, 32 nt, Human
cucucgccgccgccuccacagccugggccucg

SEQ ID NO: 399692 - RNA, 32 nt, Human
cucucgccucaccccggcuccugggcuuugau

SEQ ID NO: 399693 - RNA, 32 nt, Human
cucucgccuguaaucccagcacuuugggaggc

SEQ ID NO: 399694 - RNA, 32 nt, Human
cucucgccuguaaucucagcacuuugggaggc

SEQ ID NO: 399695 - RNA, 32 nt, Human
cucucgcggccgcggcggcagcagcagcgcca

SEQ ID NO: 399696 - RNA, 32 nt, Human
cucucgcuccauccucccaagagccuccaagg

SEQ ID NO: 399697 - RNA, 32 nt, Human
cucucgcuccugcuggcuggacauggaggauu

SEQ ID NO: 399698 - RNA, 32 nt, Human
cucucgcugcagcuggagcugcaggucucgcc

SEQ ID NO: 399699 - RNA, 32 nt, Human
cucucgcugcucauguacggcugccugggggc

SEQ ID NO: 399700 - RNA, 32 nt, Human
cucucgcugucccugugcugcugguauuucau

SEQ ID NO: 399701 - RNA, 32 nt, Human
cucucgcuuugauauucuuaaauuccuaggua

SEQ ID NO: 399702 - RNA, 32 nt, Human
cucucggacccagggcugcacuuccaaugcuc

SEQ ID NO: 399703 - RNA, 32 nt, Human
cucucggagaaacccuguccacccaaccccga

SEQ ID NO: 399704 - RNA, 32 nt, Human
cucucggauucaaccgauucuugugccucagc

SEQ ID NO: 399705 - RNA, 32 nt, Human
cucucggcaccaguugaccuacugagaacaga

SEQ ID NO: 399706 - RNA, 31 nt, Human
cucucggccacuugcucuaugccaagcucca

SEQ ID NO: 399707 - RNA, 32 nt, Human
cucucggccccucugcuggcguccccggagcc

SEQ ID NO: 399708 - RNA, 20 nt, Human
cucucggccgggugcagugg

SEQ ID NO: 399709 - RNA, 32 nt, Human
cucucggccucggugaauuccaucucuuccau

SEQ ID NO: 399710 - RNA, 32 nt, Human
cucucggcucacugcaaccucugccucccagg

SEQ ID NO: 399711 - RNA, 32 nt, Human
cucucggcuccuccuccuccucccggcggugg

SEQ ID NO: 399712 - RNA, 32 nt, Human
cucucgggccagggagguugaggcugcaguga

SEQ ID NO: 399713 - RNA, 32 nt, Human
cucucgggcccaucugcgucugaggcugggag

SEQ ID NO: 399714 - RNA, 32 nt, Human
cucucggggcugggcuggggccgcucuuggcc

SEQ ID NO: 399715 - RNA, 32 nt, Human
cucucggggcuggggguucauuccuggggcac

SEQ ID NO: 399716 - RNA, 32 nt, Human
cucucgggggacgggggacagagccagggcuc

SEQ ID NO: 399717 - RNA, 32 nt, Human
cucucgggucuccuccuccucguuugcugccu

SEQ ID NO: 399718 - RNA, 32 nt, Human
cucucggguuagagcuuuuccacccacuucuc

SEQ ID NO: 399719 - RNA, 32 nt, Human
cucucggugagguugggagaaggaaaaggcuu

SEQ ID NO: 399720 - RNA, 32 nt, Human
cucucggugcagaugcacccugaaaacugacc

SEQ ID NO: 399721 - RNA, 32 nt, Human
cucucgguuccucuuuccucccaaguaaggga

SEQ ID NO: 399722 - RNA, 32 nt, Human
cucucgucacugggcucuguuuucacuguucg

SEQ ID NO: 399723 - RNA, 32 nt, Human
cucucgucgcccaggcuggaaugcaguggugc

SEQ ID NO: 399724 - RNA, 32 nt, Human
cucucgucuccagccagcaccaagaggauggu

SEQ ID NO: 399725 - RNA, 32 nt, Human
cucucgucuccuccccuccuucuugucacugg

SEQ ID NO: 399726 - RNA, 32 nt, Human
cucucgugcaggcguuugcagugugcagcuga

SEQ ID NO: 399727 - RNA, 32 nt, Human
cucucgugccagcugcuccgccuguccugccc

SEQ ID NO: 399728 - RNA, 32 nt, Human
cucucguggaaacagcacacagcaagcaacca

SEQ ID NO: 399729 - RNA, 32 nt, Human
cucucguuaccuuucuucuauaccuuggccuc

SEQ ID NO: 399730 - RNA, 32 nt, Human
cucucguucugucacccaggcuggagugcagu

SEQ ID NO: 399731 - RNA, 32 nt, Human
cucucguugccaaggcuggagugcaauggcac

SEQ ID NO: 399732 - RNA, 32 nt, Human
cucucguugcccaggcuggagugcaauggcgc

SEQ ID NO: 399733 - RNA, 32 nt, Human
cucucguugccgaggcuggaguguaguagugu

SEQ ID NO: 399734 - RNA, 32 nt, Human
cucucuaaaugcugggauugcaggcgugagcc

SEQ ID NO: 399735 - RNA, 32 nt, Human
cucucuaacccgagcuagagugcagugacgcg

SEQ ID NO: 399736 - RNA, 32 nt, Human
cucucuaagagagguugggaccaggcuagguu

SEQ ID NO: 399737 - RNA, 32 nt, Human
cucucuacacagagugguggggagacaaggag

SEQ ID NO: 399738 - RNA, 32 nt, Human
cucucuacauuaaagguauggaaggcgauagg

SEQ ID NO: 399739 - RNA, 32 nt, Human
cucucuagaggcaccuggcggggagccucuca

SEQ ID NO: 399740 - RNA, 32 nt, Human
cucucuagccuaucuuuugcuguagucacuuc

SEQ ID NO: 399741 - RNA, 32 nt, Human
cucucuagcuacucaagggagggggauguggg

SEQ ID NO: 399742 - RNA, 32 nt, Human
cucucuaggccauccccucuucuaccuccugc

SEQ ID NO: 399743 - RNA, 32 nt, Human
cucucuagugaauuugcuaacugugaagaaca

SEQ ID NO: 399744 - RNA, 32 nt, Human
cucucuauagccaugagacuccuuguggccuc

SEQ ID NO: 399745 - RNA, 32 nt, Human
cucucuaucuguguacuuccaccaugcuccag

SEQ ID NO: 399746 - RNA, 23 nt, Human
cucucuauggaaauaaaaaggaa

SEQ ID NO: 399747 - RNA, 32 nt, Human
cucucucaauauguccuaguuuucuucagccu

SEQ ID NO: 399748 - RNA, 32 nt, Human
cucucucaauccauaauccagcgaugcugcag

SEQ ID NO: 399749 - RNA, 32 nt, Human
cucucucacccaggccugaagugcaguggcau

SEQ ID NO: 399750 - RNA, 32 nt, Human
cucucucacccaggcuggaguagagugacaau

SEQ ID NO: 399751 - RNA, 32 nt, Human
cucucucacccaggcuggaguggaguggcgcu

SEQ ID NO: 399752 - RNA, 32 nt, Human
cucucucacccaggcuggaguguaagugacau

SEQ ID NO: 399753 - RNA, 32 nt, Human
cucucucagacucaguggacuguuuccuaaag

SEQ ID NO: 399754 - RNA, 32 nt, Human
cucucucagauaugugccugauauuuugugga

SEQ ID NO: 399755 - RNA, 32 nt, Human
cucucucauaccaacagaacuuccgguacuuc

SEQ ID NO: 399756 - RNA, 32 nt, Human
cucucucaucacagcuugugacucuuccacuu

SEQ ID NO: 399757 - RNA, 32 nt, Human
cucucucauuucccuucuccuucucccucagu

SEQ ID NO: 399758 - RNA, 32 nt, Human
cucucuccacccccucuccaacacuggccccu

SEQ ID NO: 399759 - RNA, 32 nt, Human
cucucuccaccgccuccucuggcuccccgguc

SEQ ID NO: 399760 - RNA, 32 nt, Human
cucucuccacucuuuccugggcucggggcauc

SEQ ID NO: 399761 - RNA, 32 nt, Human
cucucuccacugccaccucccuuguccccagu

SEQ ID NO: 399762 - RNA, 23 nt, Human
cucucuccagcaauagcugccca

SEQ ID NO: 399763 - RNA, 32 nt, Human
cucucuccaucucuauaccccucucucucaca

SEQ ID NO: 399764 - RNA, 32 nt, Human
cucucuccauuccccucugccuggugagccuu

SEQ ID NO: 399765 - RNA, 32 nt, Human
cucucucccccucaccauccccaaauuuuagu

SEQ ID NO: 399766 - RNA, 32 nt, Human
cucucuccccgguacgugacgagacuccacgg

SEQ ID NO: 399767 - RNA, 32 nt, Human
cucucuccccuaucacccccagccuggacacc

SEQ ID NO: 399768 - RNA, 32 nt, Human
cucucuccccuccccuccccuccccuccucuc

SEQ ID NO: 399769 - RNA, 32 nt, Human
cucucuccccucucucuccaucccuuccuucc

SEQ ID NO: 399770 - RNA, 32 nt, Human
cucucucccgccccuccuccucccuuucccac

SEQ ID NO: 399771 - RNA, 32 nt, Human
cucucucccuaaggcucccuuaagacucuagg

SEQ ID NO: 399772 - RNA, 32 nt, Human
cucucucccuccacucagcucccagcugccgg

SEQ ID NO: 399773 - RNA, 32 nt, Human
cucucucccucccucuugcucucccucccuuu

SEQ ID NO: 399774 - RNA, 32 nt, Human
cucucucccucugggcuggagcucagugaggg

SEQ ID NO: 399775 - RNA, 32 nt, Human
cucucucccugccaucaagcagccugccccag

SEQ ID NO: 399776 - RNA, 32 nt, Human
cucucucccuuucucacugcuucaccuuccca

SEQ ID NO: 399777 - RNA, 32 nt, Human
cucucucccuuucucccuccauccuuccacuu

SEQ ID NO: 399778 - RNA, 32 nt, Human
cucucucccuuucuuuccuucucuccuccuuu

SEQ ID NO: 399779 - RNA, 32 nt, Human
cucucucccuuucuuucucccagcuuugccuc

SEQ ID NO: 399780 - RNA, 32 nt, Human
cucucucccuuucuuuguuuuucuuucuuuuu

SEQ ID NO: 399781 - RNA, 32 nt, Human
cucucuccgucucuccuccccucucucucuuc

SEQ ID NO: 399782 - RNA, 32 nt, Human
cucucuccuaucuuucccucagucucccaagu

SEQ ID NO: 399783 - RNA, 32 nt, Human
cucucuccuccacugacuuccccuucccggau

SEQ ID NO: 399784 - RNA, 32 nt, Human
cucucuccuccccuccuuccucucuccucccc

SEQ ID NO: 399785 - RNA, 32 nt, Human
cucucuccuccccuccuuccucucuccucucc

SEQ ID NO: 399786 - RNA, 32 nt, Human
cucucuccuccccuucccuucucccaucucug

SEQ ID NO: 399787 - RNA, 19 nt, Human
cucucuccuccucaugcca

SEQ ID NO: 399788 - RNA, 32 nt, Human
cucucuccuccuccucccggcacgaccuggcc

SEQ ID NO: 399789 - RNA, 32 nt, Human
cucucuccuccuccuccuccgccgccggacac

SEQ ID NO: 399790 - RNA, 32 nt, Human
cucucuccuccuccuuccccauugcuguaaau

SEQ ID NO: 399791 - RNA, 32 nt, Human
cucucuccucuccucucucuucuccucuucuc

SEQ ID NO: 399792 - RNA, 32 nt, Human
cucucuccucuccuuugagaggucccuguguc

SEQ ID NO: 399793 - RNA, 32 nt, Human
cucucuccugaagccauuggccgcuccuccac

SEQ ID NO: 399794 - RNA, 32 nt, Human
cucucuccugccugcccugccucagccaggcc

SEQ ID NO: 399795 - RNA, 32 nt, Human
cucucuccuggugccugcaccugcacucuagu

SEQ ID NO: 399796 - RNA, 32 nt, Human
cucucuccuguuucccuucccuuccacugccu

SEQ ID NO: 399797 - RNA, 32 nt, Human
cucucuccuuccucccccuuuuauccuaccuc

SEQ ID NO: 399798 - RNA, 32 nt, Human
cucucuccuuccuuguuggagaugucuuaccu

SEQ ID NO: 399799 - RNA, 32 nt, Human
cucucuccuugacuccaaaggccagccugggu

SEQ ID NO: 399800 - RNA, 32 nt, Human
cucucuccuugccccuaacccaaaaagcuuca

SEQ ID NO: 399801 - RNA, 32 nt, Human
cucucuccuuucuccuccggcagccagcgcgc

SEQ ID NO: 399802 - RNA, 32 nt, Human
cucucuccuuuuccuuuuccuccucucuuccu

SEQ ID NO: 399803 - RNA, 32 nt, Human
cucucucgaccuucugguaucuuguuagagag

SEQ ID NO: 399804 - RNA, 32 nt, Human
cucucucgccaugguuggagugcaguggugcg

SEQ ID NO: 399805 - RNA, 32 nt, Human
cucucucgcccaggcuggagugcaacgguacg

SEQ ID NO: 399806 - RNA, 32 nt, Human
cucucucgcccaggcuggagugcaguggcgug

SEQ ID NO: 399807 - RNA, 32 nt, Human
cucucucgcccaggcuggagugcaguggugcg

SEQ ID NO: 399808 - RNA, 32 nt, Human
cucucucgcccaggcuggagugcaguggugug

SEQ ID NO: 399809 - RNA, 32 nt, Human
cucucucgcuggcaaaaguaugaucuaauuga

SEQ ID NO: 399810 - RNA, 32 nt, Human
cucucucggaggccauagaggcuggggguagc

SEQ ID NO: 399811 - RNA, 32 nt, Human
cucucucgggggaaccggacagcagcuuggca

SEQ ID NO: 399812 - RNA, 32 nt, Human
cucucucucacccaggcuggaguggaguggcg

SEQ ID NO: 399813 - RNA, 32 nt, Human
cucucucuccacccuccuguucugucuguacc

SEQ ID NO: 399814 - RNA, 32 nt, Human
cucucucuccaccuccuccugccuuccccacc

SEQ ID NO: 399815 - RNA, 32 nt, Human
cucucucuccaucccuuccuuccucccuccuu

SEQ ID NO: 399816 - RNA, 32 nt, Human
cucucucuccaucucucucuuucagucucucu

SEQ ID NO: 399817 - RNA, 32 nt, Human
cucucucucccagaacugguugcagcuaaaac

SEQ ID NO: 399818 - RNA, 32 nt, Human
cucucucucccccucaccaaucucuuucuucc

SEQ ID NO: 399819 - RNA, 32 nt, Human
cucucucuccccucagcugagucccuucccug

SEQ ID NO: 399820 - RNA, 32 nt, Human
cucucucucccucucucucccucucucuuuac

SEQ ID NO: 399821 - RNA, 32 nt, Human
cucucucucccucucuuugccugcugccaucc

SEQ ID NO: 399822 - RNA, 32 nt, Human
cucucucuccuaccauaauccccaccgcuucc

SEQ ID NO: 399823 - RNA, 32 nt, Human
cucucucuccucaggcagcagcaacgcggagg

SEQ ID NO: 399824 - RNA, 32 nt, Human
cucucucucuacauaccagcagcauaccaaau

SEQ ID NO: 399825 - RNA, 32 nt, Human
cucucucucugccuccccaccagccccgacuc

SEQ ID NO: 399826 - RNA, 32 nt, Human
cucucucucugccucugcugccaggcagggaa

SEQ ID NO: 399827 - RNA, 32 nt, Human
cucucucucugucuguggcaggaggcaaagag

SEQ ID NO: 399828 - RNA, 32 nt, Human
cucucucucuucaagucccuggcaucccugga

SEQ ID NO: 399829 - RNA, 32 nt, Human
cucucucucuuccucugucucucccucucucu

SEQ ID NO: 399830 - RNA, 32 nt, Human
cucucucucuuccucuucucucucuuccccuc

SEQ ID NO: 399831 - RNA, 32 nt, Human
cucucucucuuccucuuucuucauucagaucu

SEQ ID NO: 399832 - RNA, 32 nt, Human
cucucucucuuuccuuccuuccuuccuccuuu

SEQ ID NO: 399833 - RNA, 32 nt, Human
cucucucucuuugaucccauaaagcuacgagg

SEQ ID NO: 399834 - RNA, 32 nt, Human
cucucucucuuuuaucauuucucccccgccgc

SEQ ID NO: 399835 - RNA, 32 nt, Human
cucucucucuuuuccuccuuuccuuuuucuuu

SEQ ID NO: 399836 - RNA, 32 nt, Human
cucucucugauagucacuucaaucaaauggaa

SEQ ID NO: 399837 - RNA, 32 nt, Human
cucucucugccacccaccgcccccaaucuauc

SEQ ID NO: 399838 - RNA, 32 nt, Human
cucucucugccucuaucccauucuuuuuacau

SEQ ID NO: 399839 - RNA, 32 nt, Human
cucucucugccuggccccaggcugcuuccacu

SEQ ID NO: 399840 - RNA, 32 nt, Human
cucucucugccuuccuugcauguggccaccag

SEQ ID NO: 399841 - RNA, 32 nt, Human
cucucucugcucccaccccugccgcccucacc

SEQ ID NO: 399842 - RNA, 32 nt, Human
cucucucugcucccauccugggucuccaugcu

SEQ ID NO: 399843 - RNA, 32 nt, Human
cucucucugcuccuccuucccuccaugcacca

SEQ ID NO: 399844 - RNA, 32 nt, Human
cucucucuggcccucacucuuacucucuugca

SEQ ID NO: 399845 - RNA, 32 nt, Human
cucucucuggcgacgccucccacccaccacua

SEQ ID NO: 399846 - RNA, 32 nt, Human
cucucucugggccucaucagaccaaaccaaag

SEQ ID NO: 399847 - RNA, 32 nt, Human
cucucucugucacccaggcuagagugcagugg

SEQ ID NO: 399848 - RNA, 32 nt, Human
cucucucugucacccaggcuggagugcaaugg

SEQ ID NO: 399849 - RNA, 32 nt, Human
cucucucugucacccaggcuggagugcagugg

SEQ ID NO: 399850 - RNA, 32 nt, Human
cucucucugucacccaggcuggcgugcaaugg

SEQ ID NO: 399851 - RNA, 32 nt, Human
cucucucugucccccaggcugaagugcagcgg

SEQ ID NO: 399852 - RNA, 32 nt, Human
cucucucugucucucuuucucucuuucuuucu

SEQ ID NO: 399853 - RNA, 32 nt, Human
cucucucuguggcccaggcugaagugcagugg

SEQ ID NO: 399854 - RNA, 32 nt, Human
cucucucuguuacccaggcuagagugcaaugg

SEQ ID NO: 399855 - RNA, 32 nt, Human
cucucucuguugcccaggcuggaguacaaugg

SEQ ID NO: 399856 - RNA, 32 nt, Human
cucucucuguugcccaggcuggagugcaaugg

SEQ ID NO: 399857 - RNA, 32 nt, Human
cucucucuguugcccaggcuggagugcagugg

SEQ ID NO: 399858 - RNA, 32 nt, Human
cucucucuguugcccaggcuggaguguagugg

SEQ ID NO: 399859 - RNA, 32 nt, Human
cucucucuuagcauccugccuuagagccaggc

SEQ ID NO: 399860 - RNA, 32 nt, Human
cucucucuugcccuaucucucuuucuacuuca

SEQ ID NO: 399861 - RNA, 32 nt, Human
cucucucuuucucucuuuucucccucuccuac

SEQ ID NO: 399862 - RNA, 32 nt, Human
cucucucuuuuauauacauacacacacccaaa

SEQ ID NO: 399863 - RNA, 32 nt, Human
cucucucuuuuccccucuugcuccuuucuuuu

SEQ ID NO: 399864 - RNA, 32 nt, Human
cucucugaaaguuggcuugagaguuguuguca

SEQ ID NO: 399865 - RNA, 32 nt, Human
cucucugaacugugaucuuuguccucaugaac

SEQ ID NO: 399866 - RNA, 32 nt, Human
cucucugaauccagacaaauacagcccuuuuc

SEQ ID NO: 399867 - RNA, 32 nt, Human
cucucugaaugagaggcgcguagagcuggaag

SEQ ID NO: 399868 - RNA, 32 nt, Human
cucucugaccucagugcugcuggacucaguuc

SEQ ID NO: 399869 - RNA, 32 nt, Human
cucucugacucugcugggauuggcuuucgcca

SEQ ID NO: 399870 - RNA, 32 nt, Human
cucucugacuguccuuugccugugccaagguu

SEQ ID NO: 399871 - RNA, 32 nt, Human
cucucugacuuuguacaugucaccucaauucu

SEQ ID NO: 399872 - RNA, 32 nt, Human
cucucugagcacaagcugggcaaaucacuguc

SEQ ID NO: 399873 - RNA, 32 nt, Human
cucucugagccaucuucugauuuuucauugcu

SEQ ID NO: 399874 - RNA, 32 nt, Human
cucucugagcucugcauuugucuauucuccag

SEQ ID NO: 399875 - RNA, 32 nt, Human
cucucugaggcggaggaugcgggagcgcaucu

SEQ ID NO: 399876 - RNA, 32 nt, Human
cucucugaggcucaagccagaaauucaggcug

SEQ ID NO: 399877 - RNA, 32 nt, Human
cucucugaguguacauacaacauacucaagcg

SEQ ID NO: 399878 - RNA, 32 nt, Human
cucucugaucaagacaccgcagugauggagaa

SEQ ID NO: 399879 - RNA, 32 nt, Human
cucucugauccuaaagccugagcuagaaacca

SEQ ID NO: 399880 - RNA, 32 nt, Human
cucucugaugcugggauggagccccagcccca

SEQ ID NO: 399881 - RNA, 32 nt, Human
cucucugcaacaaaaauccagucuuucaggaa

SEQ ID NO: 399882 - RNA, 32 nt, Human
cucucugcaaccuccaccuccuggguucaaga

SEQ ID NO: 399883 - RNA, 32 nt, Human
cucucugcaacuuccgccuccuggguucaagc

SEQ ID NO: 399884 - RNA, 19 nt, Human
cucucugcacacagcccca

SEQ ID NO: 399885 - RNA, 32 nt, Human
cucucugcacuccagccugggugacagagcaa

SEQ ID NO: 399886 - RNA, 21 nt, Human
cucucugcagaccucuuccca

SEQ ID NO: 399887 - RNA, 32 nt, Human
cucucugcagagccagagggcaggccggcuuc

SEQ ID NO: 399888 - RNA, 32 nt, Human
cucucugcagaggcaaagucuacuuucuggua

SEQ ID NO: 399889 - RNA, 32 nt, Human
cucucugcagccgugcccuuguggagucagca

SEQ ID NO: 399890 - RNA, 32 nt, Human
cucucugcauccauuccacucuccacucuugc

SEQ ID NO: 399891 - RNA, 32 nt, Human
cucucugcccaccucugcuuccucuaggaaca

SEQ ID NO: 399892 - RNA, 32 nt, Human
cucucugcccaggagucagaggugccuccagg

SEQ ID NO: 399893 - RNA, 32 nt, Human
cucucugccccacaguccucaggcuccagcuu

SEQ ID NO: 399894 - RNA, 32 nt, Human
cucucugcccgcacaucccucuuccagccugc

SEQ ID NO: 399895 - RNA, 32 nt, Human
cucucugcccuccagccuucuucaccaugucc

SEQ ID NO: 399896 - RNA, 32 nt, Human
cucucugccgaucucccugccugggcuggcug

SEQ ID NO: 399897 - RNA, 32 nt, Human
cucucugccuccagaggggauuuauuggaccu

SEQ ID NO: 399898 - RNA, 19 nt, Human
cucucugccuucugcccca

SEQ ID NO: 399899 - RNA, 20 nt, Human
cucucugcggggcucacucu

SEQ ID NO: 399900 - RNA, 32 nt, Human
cucucugcuacagcuucuuggcuggcucugaa

SEQ ID NO: 399901 - RNA, 32 nt, Human
cucucugcuaugggcaugacuuucucuucgcu

SEQ ID NO: 399902 - RNA, 32 nt, Human
cucucugcuauguuaugccgucauccagugca

SEQ ID NO: 399903 - RNA, 32 nt, Human
cucucugcucacauuucucucucccauuuucu

SEQ ID NO: 399904 - RNA, 32 nt, Human
cucucugcuccucacccccaccccuguaccca

SEQ ID NO: 399905 - RNA, 32 nt, Human
cucucugcucuccccaggauggggucagagga

SEQ ID NO: 399906 - RNA, 32 nt, Human
cucucugcucugcuucuccuccugccgcugac

SEQ ID NO: 399907 - RNA, 32 nt, Human
cucucugcuuuuccugucugacucugacaagu

SEQ ID NO: 399908 - RNA, 32 nt, Human
cucucuggaacaugaggugaggccccagaaac

SEQ ID NO: 399909 - RNA, 32 nt, Human
cucucuggaagagaaaggaagagccagcaguu

SEQ ID NO: 399910 - RNA, 19 nt, Human
cucucuggaaggagacuga

SEQ ID NO: 399911 - RNA, 32 nt, Human
cucucuggaagguggcccugcccggacccucu

SEQ ID NO: 399912 - RNA, 32 nt, Human
cucucuggaccagcucgggugcagggccucug

SEQ ID NO: 399913 - RNA, 32 nt, Human
cucucuggauucauauuucuucaucugucaaa

SEQ ID NO: 399914 - RNA, 32 nt, Human
cucucuggauuccauagcuggaaucuccucuc

SEQ ID NO: 399915 - RNA, 32 nt, Human
cucucuggauuuccuuuugcuucauuauuccu

SEQ ID NO: 399916 - RNA, 32 nt, Human
cucucuggcagggccccauccugggcagaggg

SEQ ID NO: 399917 - RNA, 32 nt, Human
cucucuggccacucugcucugcacauuagagg

SEQ ID NO: 399918 - RNA, 32 nt, Human
cucucuggcccaagcuggagugcaguggcacg

SEQ ID NO: 399919 - RNA, 32 nt, Human
cucucuggcggccucugcagcagcacagccgg

SEQ ID NO: 399920 - RNA, 32 nt, Human
cucucuggcucaaugaucuacauucugaaguu

SEQ ID NO: 399921 - RNA, 32 nt, Human
cucucuggcugcccucugcucuuuucaucucu

SEQ ID NO: 399922 - RNA, 20 nt, Human
cucucuggcugggugcagug

SEQ ID NO: 399923 - RNA, 32 nt, Human
cucucuggcuuugggcggcaggucccugcacc

SEQ ID NO: 399924 - RNA, 32 nt, Human
cucucugggaggcagaugggagccauggcuua

SEQ ID NO: 399925 - RNA, 32 nt, Human
cucucugggaggcugaggcggguggaucacuu

SEQ ID NO: 399926 - RNA, 32 nt, Human
cucucugggauuccggacuggcuucgcccaac

SEQ ID NO: 399927 - RNA, 32 nt, Human
cucucugggcuggaggugggggugggggcagc

SEQ ID NO: 399928 - RNA, 32 nt, Human
cucucugggcuucaguugucucauucuguaaa

SEQ ID NO: 399929 - RNA, 32 nt, Human
cucucugggcuucaguuuccuccuugcuccau

SEQ ID NO: 399930 - RNA, 32 nt, Human
cucucugggcuuuguugaggcggcaguaugac

SEQ ID NO: 399931 - RNA, 32 nt, Human
cucucuggggccaaggccagagcuguggacac

SEQ ID NO: 399932 - RNA, 32 nt, Human
cucucuggggccucuuuaaauagggucaccaa

SEQ ID NO: 399933 - RNA, 32 nt, Human
cucucugggggaggcagggcuggaaugggaga

SEQ ID NO: 399934 - RNA, 31 nt, Human
cucucugggguaaauaccuggaaguggaaug

SEQ ID NO: 399935 - RNA, 32 nt, Human
cucucugggucucaguuucuucaucugggaaa

SEQ ID NO: 399936 - RNA, 32 nt, Human
cucucuggucccagacugccuccuugcccaug

SEQ ID NO: 399937 - RNA, 32 nt, Human
cucucuggucuucucccaggcuggaucugggc

SEQ ID NO: 399938 - RNA, 31 nt, Human
cucucugguucccagcaccugccugagaccu

SEQ ID NO: 399939 - RNA, 32 nt, Human
cucucuguacacugccccaggacugucauuuu

SEQ ID NO: 399940 - RNA, 32 nt, Human
cucucuguaccaacaauauacagacuuuacag

SEQ ID NO: 399941 - RNA, 32 nt, Human
cucucuguagccaggcuggagggcaauuguac

SEQ ID NO: 399942 - RNA, 32 nt, Human
cucucugucaccaggcuguauuacaguggugc

SEQ ID NO: 399943 - RNA, 32 nt, Human
cucucugucacccaaguuggagugcaguggcc

SEQ ID NO: 399944 - RNA, 32 nt, Human
cucucugucacccaggcuagagugcaguggag

SEQ ID NO: 399945 - RNA, 32 nt, Human
cucucugucacccaggcuggagugcaauggcg

SEQ ID NO: 399946 - RNA, 32 nt, Human
cucucugucacccaggcuggagugcaguggcg

SEQ ID NO: 399947 - RNA, 32 nt, Human
cucucugucacccaggcuggcgugcaauggcg

SEQ ID NO: 399948 - RNA, 32 nt, Human
cucucugucacccagguuggagugcaguggug

SEQ ID NO: 399949 - RNA, 32 nt, Human
cucucugucaccuaggcuggagggcaggguug

SEQ ID NO: 399950 - RNA, 32 nt, Human
cucucugucaccuaggcuggagugcaguggca

SEQ ID NO: 399951 - RNA, 32 nt, Human
cucucugucacugucuugaaucagacucagaa

SEQ ID NO: 399952 - RNA, 32 nt, Human
cucucugucaucugggcugcagugcaguggug

SEQ ID NO: 399953 - RNA, 32 nt, Human
cucucugucccccaggcugaagugcagcggca

SEQ ID NO: 399954 - RNA, 32 nt, Human
cucucugucccucaccucaccugcuuucuuca

SEQ ID NO: 399955 - RNA, 32 nt, Human
cucucuguccuuccaccccucccuccuugcuu

SEQ ID NO: 399956 - RNA, 32 nt, Human
cucucugucgccaggcuggaaugcagugcagu

SEQ ID NO: 399957 - RNA, 32 nt, Human
cucucugucgcccaggcuggaguacaguggug

SEQ ID NO: 399958 - RNA, 32 nt, Human
cucucugucgcccaggcuggagugcaguggcu

SEQ ID NO: 399959 - RNA, 32 nt, Human
cucucugucucagcaggugaugacggggguac

SEQ ID NO: 399960 - RNA, 32 nt, Human
cucucugucuccgaggcuggagugcaauguug

SEQ ID NO: 399961 - RNA, 32 nt, Human
cucucugucucucuuucucuccuuuuaauuuu

SEQ ID NO: 399962 - RNA, 32 nt, Human
cucucugucuucagggagcuccacccagcagc

SEQ ID NO: 399963 - RNA, 32 nt, Human
cucucugucuucauguggaagguuuagagcag

SEQ ID NO: 399964 - RNA, 32 nt, Human
cucucugucuuuucccuguugaucuccuguua

SEQ ID NO: 399965 - RNA, 32 nt, Human
cucucugugcagccucacagggcuuugccacg

SEQ ID NO: 399966 - RNA, 32 nt, Human
cucucugugcuucaguuucccauggcuggaau

SEQ ID NO: 399967 - RNA, 32 nt, Human
cucucuguggcccaggcugaagugcaguggug

SEQ ID NO: 399968 - RNA, 32 nt, Human
cucucuguggcgacuuuucugccuucccuucu

SEQ ID NO: 399969 - RNA, 32 nt, Human
cucucuguggcuagcuagagguuucuaaaaug

SEQ ID NO: 399970 - RNA, 32 nt, Human
cucucuguggugaaagccaagcacacuuuccu

SEQ ID NO: 399971 - RNA, 32 nt, Human
cucucugugugccaugacauagcaggaaaggc

SEQ ID NO: 399972 - RNA, 31 nt, Human
cucucuguguugucugggcccuuguuuacaa

SEQ ID NO: 399973 - RNA, 32 nt, Human
cucucuguuacccaggcuagagugcaauggcg

SEQ ID NO: 399974 - RNA, 32 nt, Human
cucucuguugcccaggcuggaguacaauggcg

SEQ ID NO: 399975 - RNA, 32 nt, Human
cucucuguugcccaggcuggagugcaauggca

SEQ ID NO: 399976 - RNA, 32 nt, Human
cucucuguugcccaggcuggagugcaguggca

SEQ ID NO: 399977 - RNA, 32 nt, Human
cucucuguugcccaggcuggagugcaguggcg

SEQ ID NO: 399978 - RNA, 32 nt, Human
cucucuguugcccaggcuggaguguaguggug

SEQ ID NO: 399979 - RNA, 32 nt, Human
cucucuguuugguuuagaaauugcucaauaag

SEQ ID NO: 399980 - RNA, 32 nt, Human
cucucuuaaaguuuacauugcugaaccaagaa

SEQ ID NO: 399981 - RNA, 32 nt, Human
cucucuuaaugccacggcagccacccugccau

SEQ ID NO: 399982 - RNA, 32 nt, Human
cucucuuacccaagcuggagugcagugacaug

SEQ ID NO: 399983 - RNA, 32 nt, Human
cucucuuaccuugcccuuucuacucagaacca

SEQ ID NO: 399984 - RNA, 32 nt, Human
cucucuuaggacugcugacuugguuaugcagu

SEQ ID NO: 399985 - RNA, 32 nt, Human
cucucuuauaucagacugcagcuccuggugau

SEQ ID NO: 399986 - RNA, 32 nt, Human
cucucuuaucacugggcagacgaggagguggu

SEQ ID NO: 399987 - RNA, 32 nt, Human
cucucuuauuuggaguuuccguugguuuaccu

SEQ ID NO: 399988 - RNA, 32 nt, Human
cucucuuauuugguucuugggcugcuucauaa

SEQ ID NO: 399989 - RNA, 32 nt, Human
cucucuucaccccguuagcuguuuucaaugua

SEQ ID NO: 399990 - RNA, 32 nt, Human
cucucuucaccccuggaaaaacaaaugaucug

SEQ ID NO: 399991 - RNA, 32 nt, Human
cucucuucacugcaucccaauccaucuacagg

SEQ ID NO: 399992 - RNA, 32 nt, Human
cucucuucauuuccucguaaggccaccaaacc

SEQ ID NO: 399993 - RNA, 32 nt, Human
cucucuucauuuucuuucaucuacauggcuga

SEQ ID NO: 399994 - RNA, 32 nt, Human
cucucuuccaauauccaugucucauacacuau

SEQ ID NO: 399995 - RNA, 32 nt, Human
cucucuucccagagacccuccccacaucaugc

SEQ ID NO: 399996 - RNA, 32 nt, Human
cucucuucccagcuucccagagauaaucaacc

SEQ ID NO: 399997 - RNA, 24 nt, Human
cucucuuccccucccuaccgcuca

SEQ ID NO: 399998 - RNA, 32 nt, Human
cucucuuccccucccucacccccuuuuucuua

SEQ ID NO: 399999 - RNA, 32 nt, Human
cucucuucccuaaugcucuccauacccccugc

SEQ ID NO: 400000 - RNA, 32 nt, Human
cucucuucccuccccuccucuccccuccccuc

SEQ ID NO: 400001 - RNA, 21 nt, Human
cucucuuccuccagggacucu

SEQ ID NO: 400002 - RNA, 22 nt, Human
cucucuuccucccaucuucuca

SEQ ID NO: 400003 - RNA, 32 nt, Human
cucucuuccuccucuagacucuguguuuggua

SEQ ID NO: 400004 - RNA, 32 nt, Human
cucucuuccugccuccagcucugccccaggcu

SEQ ID NO: 400005 - RNA, 32 nt, Human
cucucuuccuuuccuggucucucuuccuuucc

SEQ ID NO: 400006 - RNA, 32 nt, Human
cucucuuccuuuggaugaggggguccuugggu

SEQ ID NO: 400007 - RNA, 24 nt, Human
cucucuucgacagggccccacccu

SEQ ID NO: 400008 - RNA, 22 nt, Human
cucucuucuaauccaccacuca

SEQ ID NO: 400009 - RNA, 32 nt, Human
cucucuucuaauuccuccugaccacaaaaagc

SEQ ID NO: 400010 - RNA, 32 nt, Human
cucucuucuaccgucuccgauuuccuuugucc

SEQ ID NO: 400011 - RNA, 32 nt, Human
cucucuucuccaccaagccucucaccugucug

SEQ ID NO: 400012 - RNA, 32 nt, Human
cucucuucuccaucacccauacccacacauac

SEQ ID NO: 400013 - RNA, 32 nt, Human
cucucuucuccucugguuugcguccuuccugg

SEQ ID NO: 400014 - RNA, 32 nt, Human
cucucuucucuccccucugucccucuucagga

SEQ ID NO: 400015 - RNA, 32 nt, Human
cucucuucucuccuggcuaaagcugcucuccu

SEQ ID NO: 400016 - RNA, 32 nt, Human
cucucuucucucuuccucuccucucucucuuc

SEQ ID NO: 400017 - RNA, 32 nt, Human
cucucuucugcucuccacucagaugugggaca

SEQ ID NO: 400018 - RNA, 32 nt, Human
cucucuucuggguggagcuggccgggaaguuu

SEQ ID NO: 400019 - RNA, 32 nt, Human
cucucuucuuacuucugucacucuuccuucuc

SEQ ID NO: 400020 - RNA, 32 nt, Human
cucucuucuugcuuggcagcuggaccaaggga

SEQ ID NO: 400021 - RNA, 32 nt, Human
cucucuucuuucucucugagggagagggagcc

SEQ ID NO: 400022 - RNA, 32 nt, Human
cucucuugacaucagaugggguauucgauauu

SEQ ID NO: 400023 - RNA, 32 nt, Human
cucucuugcaagucaucucucuugcaaauggu

SEQ ID NO: 400024 - RNA, 32 nt, Human
cucucuugcacgcucucucuucucucccaggc

SEQ ID NO: 400025 - RNA, 32 nt, Human
cucucuugcccagacuggaauacaguggugug

SEQ ID NO: 400026 - RNA, 32 nt, Human
cucucuugcccaggcuggagugcaauggcacg

SEQ ID NO: 400027 - RNA, 32 nt, Human
cucucuugcccaggcuggagugcagugguaug

SEQ ID NO: 400028 - RNA, 32 nt, Human
cucucuugccuuugaccaacaugguacuaagg

SEQ ID NO: 400029 - RNA, 22 nt, Human
cucucuugcucaauaacucuca

SEQ ID NO: 400030 - RNA, 32 nt, Human
cucucuugcuuccucucuuccucucucuguuc

SEQ ID NO: 400031 - RNA, 32 nt, Human
cucucuuggaaaguccagucucuccucggcuu

SEQ ID NO: 400032 - RNA, 32 nt, Human
cucucuugggacucucccccucccaggcauuu

SEQ ID NO: 400033 - RNA, 32 nt, Human
cucucuuguauauguggguuaaagacccucag

SEQ ID NO: 400034 - RNA, 32 nt, Human
cucucuuguccaaggcuggaguguaguagugc

SEQ ID NO: 400035 - RNA, 32 nt, Human
cucucuuguccaccuauuaauuguuuacaaua

SEQ ID NO: 400036 - RNA, 32 nt, Human
cucucuuguccaggcuggagugcaauagcgcg

SEQ ID NO: 400037 - RNA, 32 nt, Human
cucucuugucccacccuucuucucuuccccau

SEQ ID NO: 400038 - RNA, 32 nt, Human
cucucuuuccucuuuagaaauggcaguuacug

SEQ ID NO: 400039 - RNA, 32 nt, Human
cucucuuucucucucuuuuccucucucucccu

SEQ ID NO: 400040 - RNA, 32 nt, Human
cucucuuucucuuccucuucuuucucucucuu

SEQ ID NO: 400041 - RNA, 32 nt, Human
cucucuuugcaacugucucucuucucagagug

SEQ ID NO: 400042 - RNA, 22 nt, Human
cucucuuugccauuuuuggagg

SEQ ID NO: 400043 - RNA, 32 nt, Human
cucucuuugccucgcucccggcucggcgggcu

SEQ ID NO: 400044 - RNA, 32 nt, Human
cucucuuuucugagagagaaggcaugggauuu

SEQ ID NO: 400045 - RNA, 32 nt, Human
cucucuuuucuuuccaaauaucccaggaagug

SEQ ID NO: 400046 - RNA, 32 nt, Human
cucucuuuuucugcucucuccucucucagucu

SEQ ID NO: 400047 - RNA, 32 nt, Human
cucugaaaaacaugcccccgaggcucugugca

SEQ ID NO: 400048 - RNA, 32 nt, Human
cucugaaaacacaguggagguuguggugaagg

SEQ ID NO: 400049 - RNA, 32 nt, Human
cucugaaaacagccaacuaacagcgccuccca

SEQ ID NO: 400050 - RNA, 32 nt, Human
cucugaaaaccagccaacauugucaugacaau

SEQ ID NO: 400051 - RNA, 32 nt, Human
cucugaaaagcaaccucuccugccacccagau

SEQ ID NO: 400052 - RNA, 20 nt, Human
cucugaaaaggcagcagguu

SEQ ID NO: 400053 - RNA, 23 nt, Human
cucugaaacaggcauacaggcuc

SEQ ID NO: 400054 - RNA, 21 nt, Human
cucugaaacgagcaacagguu

SEQ ID NO: 400055 - RNA, 32 nt, Human
cucugaaacguccuuuucuucugagagcccag

SEQ ID NO: 400056 - RNA, 32 nt, Human
cucugaaagaaaaagaaagaaaugaagaaaag

SEQ ID NO: 400057 - RNA, 32 nt, Human
cucugaaagccagcuuauugccgacuacugag

SEQ ID NO: 400058 - RNA, 32 nt, Human
cucugaaagcugguugaaggagagcagcaaaa

SEQ ID NO: 400059 - RNA, 32 nt, Human
cucugaaaguacugggauuacaagcauaagcc

SEQ ID NO: 400060 - RNA, 32 nt, Human
cucugaaagugcugggaucacagacaugagcc

SEQ ID NO: 400061 - RNA, 32 nt, Human
cucugaaagugcugggauuacaggcgugagac

SEQ ID NO: 400062 - RNA, 32 nt, Human
cucugaaaucagcuuuggagaugcuuucacuc

SEQ ID NO: 400063 - RNA, 32 nt, Human
cucugaaaugcaccauugacuggagcaguaau

SEQ ID NO: 400064 - RNA, 24 nt, Human
cucugaaauugcugggauuacagg

SEQ ID NO: 400065 - RNA, 32 nt, Human
cucugaaauugcugggauuacaggcaugagcc

SEQ ID NO: 400066 - RNA, 32 nt, Human
cucugaacagaacuuggccuuuuguugugaau

SEQ ID NO: 400067 - RNA, 24 nt, Human
cucugaacaggcacagcccuccca

SEQ ID NO: 400068 - RNA, 32 nt, Human
cucugaacagggcuuccagucaccuccagcaa

SEQ ID NO: 400069 - RNA, 32 nt, Human
cucugaacaguucugucucuacuaccugaucu

SEQ ID NO: 400070 - RNA, 21 nt, Human
cucugaacaucuucugacaca

SEQ ID NO: 400071 - RNA, 32 nt, Human
cucugaacauuuauuuccauugcaauuucugu

SEQ ID NO: 400072 - RNA, 32 nt, Human
cucugaacccagggaagacaagaaggaaagau

SEQ ID NO: 400073 - RNA, 32 nt, Human
cucugaacccugggagccccuuguggagucug

SEQ ID NO: 400074 - RNA, 32 nt, Human
cucugaacgauuuccgccuauuuggaagccuu

SEQ ID NO: 400075 - RNA, 32 nt, Human
cucugaacucagggagggcacauacuuagaua

SEQ ID NO: 400076 - RNA, 32 nt, Human
cucugaacugggugaacucuguggagggaggc

SEQ ID NO: 400077 - RNA, 32 nt, Human
cucugaagaaacagaaccagagagggaaggug

SEQ ID NO: 400078 - RNA, 32 nt, Human
cucugaagaagcagcauuugagcugagaccug

SEQ ID NO: 400079 - RNA, 32 nt, Human
cucugaagacuucucagauggauccuagucuc

SEQ ID NO: 400080 - RNA, 32 nt, Human
cucugaagaguggguuucacaagugaaaaaca

SEQ ID NO: 400081 - RNA, 18 nt, Human
cucugaagauauacaggu

SEQ ID NO: 400082 - RNA, 21 nt, Human
cucugaagaucccaacauggu

SEQ ID NO: 400083 - RNA, 21 nt, Human
cucugaagaucuuugugaggu

SEQ ID NO: 400084 - RNA, 32 nt, Human
cucugaagcacuccccaucucaggcccaaaca

SEQ ID NO: 400085 - RNA, 32 nt, Human
cucugaagcucuccucuuugagguccuggcag

SEQ ID NO: 400086 - RNA, 32 nt, Human
cucugaagcuucaaagugacacuguggaaauc

SEQ ID NO: 400087 - RNA, 32 nt, Human
cucugaaggagcuucagacccugaggaacaug

SEQ ID NO: 400088 - RNA, 32 nt, Human
cucugaaggaugcucuggcacacagauggugc

SEQ ID NO: 400089 - RNA, 32 nt, Human
cucugaaggcccagagagguuaaguaacuucc

SEQ ID NO: 400090 - RNA, 32 nt, Human
cucugaagggaggcccaguggcugcaauauuc

SEQ ID NO: 400091 - RNA, 27 nt, Human
cucugaaggggcuuggaaccaguccgc

SEQ ID NO: 400092 - RNA, 32 nt, Human
cucugaagggucagucuucggggaagagaggu

SEQ ID NO: 400093 - RNA, 19 nt, Human
cucugaagggugcacaggu

SEQ ID NO: 400094 - RNA, 32 nt, Human
cucugaagguucuagaucaagggaggcugcau

SEQ ID NO: 400095 - RNA, 32 nt, Human
cucugaaguagcugggauuacaggcauguguc

SEQ ID NO: 400096 - RNA, 18 nt, Human
cucugaauaccuucucca

SEQ ID NO: 400097 - RNA, 32 nt, Human
cucugaauaugauaacagccuguuucacauga

SEQ ID NO: 400098 - RNA, 32 nt, Human
cucugaaucccuccuauucaccuugcugcugu

SEQ ID NO: 400099 - RNA, 32 nt, Human
cucugaaugauggcuggagauugucuaucaag

SEQ ID NO: 400100 - RNA, 32 nt, Human
cucugaaugugcugggaaccucuuggagccug

SEQ ID NO: 400101 - RNA, 32 nt, Human
cucugaauugggugcagaagacaagggcagag

SEQ ID NO: 400102 - RNA, 32 nt, Human
cucugacaaagcccuggaggcucggccuugcu

SEQ ID NO: 400103 - RNA, 32 nt, Human
cucugacaaaggcuuuuccuuauagaauaacc

SEQ ID NO: 400104 - RNA, 32 nt, Human
cucugacacuccugagcgaacaggcucagaca

SEQ ID NO: 400105 - RNA, 32 nt, Human
cucugacagccagcucaaucccagaguguccc

SEQ ID NO: 400106 - RNA, 32 nt, Human
cucugacaggaucauggcuaugauggaggucc

SEQ ID NO: 400107 - RNA, 32 nt, Human
cucugacagggccugcuucuccccagcagugc

SEQ ID NO: 400108 - RNA, 32 nt, Human
cucugacaggucuccaaauuucucccagucgc

SEQ ID NO: 400109 - RNA, 32 nt, Human
cucugacauccaagcuggggugcaguggcgcg

SEQ ID NO: 400110 - RNA, 32 nt, Human
cucugacauccagcggggccaggccggggagu

SEQ ID NO: 400111 - RNA, 22 nt, Human
cucugacauccccagguucuca

SEQ ID NO: 400112 - RNA, 32 nt, Human
cucugacauguguacacaugcuugcacacaug

SEQ ID NO: 400113 - RNA, 32 nt, Human
cucugaccagcugugcggcaugggcuaaguca

SEQ ID NO: 400114 - RNA, 19 nt, Human
cucugacccaccuaccuca

SEQ ID NO: 400115 - RNA, 32 nt, Human
cucugacccagcuucaccucauggacaacccu

SEQ ID NO: 400116 - RNA, 21 nt, Human
cucugacccccagaaccuacc

SEQ ID NO: 400117 - RNA, 32 nt, Human
cucugacccguucucggagcaccuacagagag

SEQ ID NO: 400118 - RNA, 32 nt, Human
cucugacccuggaaugggguugguuuggacac

SEQ ID NO: 400119 - RNA, 32 nt, Human
cucugaccucagcuguggcucuuggugcuggc

SEQ ID NO: 400120 - RNA, 32 nt, Human
cucugaccucaucugcucccccagucuuuuua

SEQ ID NO: 400121 - RNA, 22 nt, Human
cucugaccuccagaccagaugg

SEQ ID NO: 400122 - RNA, 32 nt, Human
cucugaccugcccccgcucugccaucagcccc

SEQ ID NO: 400123 - RNA, 32 nt, Human
cucugaccugcuacuucuggaaaaagaaucaa

SEQ ID NO: 400124 - RNA, 32 nt, Human
cucugaccuuaaaucauuccuuaucucagaaa

SEQ ID NO: 400125 - RNA, 22 nt, Human
cucugacgaggaccccaggcca

SEQ ID NO: 400126 - RNA, 24 nt, Human
cucugacgaggaccccaggccacu

SEQ ID NO: 400127 - RNA, 26 nt, Human
cucugacgcacaggcuggagugcagu

SEQ ID NO: 400128 - RNA, 32 nt, Human
cucugacgcacaggcuggagugcaguggcucc

SEQ ID NO: 400129 - RNA, 32 nt, Human
cucugacggcagggcuuugucucauuccuuuu

SEQ ID NO: 400130 - RNA, 32 nt, Human
cucugacggcauuauagagagaggagaggagg

SEQ ID NO: 400131 - RNA, 32 nt, Human
cucugacuacucuugucuuccucucucaucaa

SEQ ID NO: 400132 - RNA, 32 nt, Human
cucugacuccccuccacuuuugggcccucagc

SEQ ID NO: 400133 - RNA, 32 nt, Human
cucugacucgaacaccugcaaaggacagggac

SEQ ID NO: 400134 - RNA, 32 nt, Human
cucugacucuucagcagcugaagauuaaugca

SEQ ID NO: 400135 - RNA, 32 nt, Human
cucugacucuucuguguuaaaacaugaaacua

SEQ ID NO: 400136 - RNA, 32 nt, Human
cucugacugcacccaggaggugacugggaagg

SEQ ID NO: 400137 - RNA, 32 nt, Human
cucugacugccaccccugccugccugcccggc

SEQ ID NO: 400138 - RNA, 32 nt, Human
cucugacugcccucagccuccaaggaaccuga

SEQ ID NO: 400139 - RNA, 32 nt, Human
cucugacugccugggcgcugcguguagcaucu

SEQ ID NO: 400140 - RNA, 32 nt, Human
cucugacugcucccacugauuucuuucucucc

SEQ ID NO: 400141 - RNA, 32 nt, Human
cucugacuuguccuaggccgauuucucuaugg

SEQ ID NO: 400142 - RNA, 25 nt, Human
cucugagaaaggggauagaaagcuc

SEQ ID NO: 400143 - RNA, 32 nt, Human
cucugagaaaugccaggaucguggcucacagg

SEQ ID NO: 400144 - RNA, 32 nt, Human
cucugagaagauggcugugccacccacguaug

SEQ ID NO: 400145 - RNA, 32 nt, Human
cucugagaaguuuaguaacuugucaacuguca

SEQ ID NO: 400146 - RNA, 32 nt, Human
cucugagaaucugagauucagggugugugacu

SEQ ID NO: 400147 - RNA, 32 nt, Human
cucugagaaugacugggucuuggcucuuugau

SEQ ID NO: 400148 - RNA, 32 nt, Human
cucugagaauggguugggggaggcgggugcag

SEQ ID NO: 400149 - RNA, 32 nt, Human
cucugagacagagagcaacgaccuuugaguua

SEQ ID NO: 400150 - RNA, 21 nt, Human
cucugagacagcaguaucaca

SEQ ID NO: 400151 - RNA, 32 nt, Human
cucugagacaguucuuuuggaaauuauaaaua

SEQ ID NO: 400152 - RNA, 22 nt, Human
cucugagacccaucuccugccu

SEQ ID NO: 400153 - RNA, 32 nt, Human
cucugagaccuccagaauuaggcaucauucua

SEQ ID NO: 400154 - RNA, 32 nt, Human
cucugagagaagcagaccagaaagauggaaag

SEQ ID NO: 400155 - RNA, 32 nt, Human
cucugagagccccagccugagccagucccagc

SEQ ID NO: 400156 - RNA, 32 nt, Human
cucugagagugcgagugcaccaugcucacugu

SEQ ID NO: 400157 - RNA, 21 nt, Human
cucugagaguucaacacauca

SEQ ID NO: 400158 - RNA, 21 nt, Human
cucugagaucuuggucuccug

SEQ ID NO: 400159 - RNA, 32 nt, Human
cucugagauguggagacugauggccaggcaag

SEQ ID NO: 400160 - RNA, 32 nt, Human
cucugagauguggucagagagguuucugugga

SEQ ID NO: 400161 - RNA, 21 nt, Human
cucugagcacauguccggggg

SEQ ID NO: 400162 - RNA, 32 nt, Human
cucugagcagcagcaggcaacuucgagaacgg

SEQ ID NO: 400163 - RNA, 32 nt, Human
cucugagcaggaagccccucaggcucacacgg

SEQ ID NO: 400164 - RNA, 32 nt, Human
cucugagcaggaauccuuugugcauugaagac

SEQ ID NO: 400165 - RNA, 32 nt, Human
cucugagccagcggcuucgggugcaggagcag

SEQ ID NO: 400166 - RNA, 32 nt, Human
cucugagcccaggaggaagagaaagcauuguc

SEQ ID NO: 400167 - RNA, 32 nt, Human
cucugagcccccagaagcagagcuuuguuuug

SEQ ID NO: 400168 - RNA, 32 nt, Human
cucugagcccugcucgguuuaggccugucugc

SEQ ID NO: 400169 - RNA, 32 nt, Human
cucugagcucaggggaacacaagugcacagag

SEQ ID NO: 400170 - RNA, 32 nt, Human
cucugagcucaucuuagucuccugggcgggcg

SEQ ID NO: 400171 - RNA, 19 nt, Human
cucugagcucuucuaacac

SEQ ID NO: 400172 - RNA, 32 nt, Human
cucugagcugccgcagguccgugccaugggga

SEQ ID NO: 400173 - RNA, 32 nt, Human
cucugagcuuaggcuuucuuguugccaaacca

SEQ ID NO: 400174 - RNA, 32 nt, Human
cucugagcuucucugagccuuguuugcucauc

SEQ ID NO: 400175 - RNA, 23 nt, Human
cucugaggaaagauggaggguuc

SEQ ID NO: 400176 - RNA, 22 nt, Human
cucugaggaagaagcaggacuu

SEQ ID NO: 400177 - RNA, 32 nt, Human
cucugaggaagaggagcgaggacaacguuggc

SEQ ID NO: 400178 - RNA, 32 nt, Human
cucugaggaaggcgugcgaaggcuccacagcu

SEQ ID NO: 400179 - RNA, 24 nt, Human
cucugaggacauggagagagacuc

SEQ ID NO: 400180 - RNA, 32 nt, Human
cucugaggacuaggguggaggcaguguuucuc

SEQ ID NO: 400181 - RNA, 32 nt, Human
cucugaggagagcgagccagaggaccuugaga

SEQ ID NO: 400182 - RNA, 32 nt, Human
cucugaggaggaagaacaggaagccuggguga

SEQ ID NO: 400183 - RNA, 32 nt, Human
cucugaggaucagagacauaauugguggggcc

SEQ ID NO: 400184 - RNA, 32 nt, Human
cucugaggaugguucuacaguugggauuuugg

SEQ ID NO: 400185 - RNA, 32 nt, Human
cucugaggcaaagauggggacaaggacuaaga

SEQ ID NO: 400186 - RNA, 18 nt, Human
cucugaggccggcuccug

SEQ ID NO: 400187 - RNA, 32 nt, Human
cucugaggcgcccuagggcugagggaggggcc

SEQ ID NO: 400188 - RNA, 32 nt, Human
cucugaggcucuguugagaaucaugcuuugga

SEQ ID NO: 400189 - RNA, 32 nt, Human
cucugaggcugagagaggaagugggcuuuguu

SEQ ID NO: 400190 - RNA, 32 nt, Human
cucugagggcagcagugcacguggaggagacg

SEQ ID NO: 400191 - RNA, 20 nt, Human
cucugagggccuggcuucug

SEQ ID NO: 400192 - RNA, 32 nt, Human
cucugaggggcaggaguuauccagaucccacu

SEQ ID NO: 400193 - RNA, 32 nt, Human
cucugaggggcagugcucaguucagacaaggg

SEQ ID NO: 400194 - RNA, 22 nt, Human
cucugaggguugaggaaggcuc

SEQ ID NO: 400195 - RNA, 32 nt, Human
cucugagguacucugcucacaggccccagaca

SEQ ID NO: 400196 - RNA, 32 nt, Human
cucugaggucugaucucugcucugucaaggac

SEQ ID NO: 400197 - RNA, 32 nt, Human
cucugaguaaaaccccucuuuaucuuugaccu

SEQ ID NO: 400198 - RNA, 32 nt, Human
cucugaguaagcugcugccaagcacauauccc

SEQ ID NO: 400199 - RNA, 23 nt, Human
cucugaguagcugggauuacagg

SEQ ID NO: 400200 - RNA, 32 nt, Human
cucugaguagugcuuuaccauuuuguggagcu

SEQ ID NO: 400201 - RNA, 32 nt, Human
cucugagucacugaaugucaccaggagaggug

SEQ ID NO: 400202 - RNA, 32 nt, Human
cucugagucauccuccgacagcacccaguuca

SEQ ID NO: 400203 - RNA, 32 nt, Human
cucugaguccacugcuccauuuauaaccccag

SEQ ID NO: 400204 - RNA, 20 nt, Human
cucugagucccugguuccug

SEQ ID NO: 400205 - RNA, 32 nt, Human
cucugagucgugaagaagggaggcagcgaggg

SEQ ID NO: 400206 - RNA, 32 nt, Human
cucugagucucccggcugcaggcggauuggau

SEQ ID NO: 400207 - RNA, 32 nt, Human
cucugagucugaaucucccaaagagagaaacc

SEQ ID NO: 400208 - RNA, 32 nt, Human
cucugagugagaugcccaggaggaggagcccu

SEQ ID NO: 400209 - RNA, 32 nt, Human
cucugaguggggagagguugggcagugaguga

SEQ ID NO: 400210 - RNA, 32 nt, Human
cucugaguugugcagcguggggugggguccgg

SEQ ID NO: 400211 - RNA, 23 nt, Human
cucugaguuucggucuccugucu

SEQ ID NO: 400212 - RNA, 18 nt, Human
cucugauaaauuguguuc

SEQ ID NO: 400213 - RNA, 32 nt, Human
cucugauaacugccuuuccuuccuucugugcc

SEQ ID NO: 400214 - RNA, 22 nt, Human
cucugauaauauuuauuuuaaa

SEQ ID NO: 400215 - RNA, 32 nt, Human
cucugauaccccucuguucucauaaagccuca

SEQ ID NO: 400216 - RNA, 23 nt, Human
cucugauagaauuuaauuuuaaa

SEQ ID NO: 400217 - RNA, 18 nt, Human
cucugauauacuggcuuc

SEQ ID NO: 400218 - RNA, 20 nt, Human
cucugauauacuggcuucug

SEQ ID NO: 400219 - RNA, 32 nt, Human
cucugaucaccaucacuguaucucaagguuca

SEQ ID NO: 400220 - RNA, 32 nt, Human
cucugaucagcaugggaaugugccucggccuc

SEQ ID NO: 400221 - RNA, 32 nt, Human
cucugaucagugucuuuucagcacuuugagca

SEQ ID NO: 400222 - RNA, 21 nt, Human
cucugauccacuucucugcuu

SEQ ID NO: 400223 - RNA, 32 nt, Human
cucugaucccccuccuuccucuccucccuccc

SEQ ID NO: 400224 - RNA, 32 nt, Human
cucugauccucagcagggaaggcgaggguuac

SEQ ID NO: 400225 - RNA, 32 nt, Human
cucugauccucauugcaugcaggaagagaaga

SEQ ID NO: 400226 - RNA, 32 nt, Human
cucugauccuuuugcccuuccuucccauaacg

SEQ ID NO: 400227 - RNA, 32 nt, Human
cucugaucguggcgcauggcuuggggauuaaa

SEQ ID NO: 400228 - RNA, 32 nt, Human
cucugaugcuaucgucucaucuggaagagaug

SEQ ID NO: 400229 - RNA, 32 nt, Human
cucugaugcucccaugcucaguacaguucacu

SEQ ID NO: 400230 - RNA, 32 nt, Human
cucugaugcucuucuucugugucucuauuucu

SEQ ID NO: 400231 - RNA, 32 nt, Human
cucugaugcugcugagccacuuugacaaucgu

SEQ ID NO: 400232 - RNA, 32 nt, Human
cucugauggcugaagccaucucuccccuguga

SEQ ID NO: 400233 - RNA, 32 nt, Human
cucugaugggaggagagagggaacuuauuucc

SEQ ID NO: 400234 - RNA, 32 nt, Human
cucugaugggcugcuagugggguggugcuggg

SEQ ID NO: 400235 - RNA, 32 nt, Human
cucugauggucuucagcauucaccuucgugug

SEQ ID NO: 400236 - RNA, 32 nt, Human
cucugauguagugcuaagucuagccuccagau

SEQ ID NO: 400237 - RNA, 32 nt, Human
cucugaugucaaggccagagcaguugagaaug

SEQ ID NO: 400238 - RNA, 32 nt, Human
cucugaugucucaaaauauauuguguuucucu

SEQ ID NO: 400239 - RNA, 32 nt, Human
cucugaugucucaaagauaacuguuuuccaaa

SEQ ID NO: 400240 - RNA, 32 nt, Human
cucugaugugccacauuguucugcuacuuccu

SEQ ID NO: 400241 - RNA, 21 nt, Human
cucugauucccucuucugccu

SEQ ID NO: 400242 - RNA, 32 nt, Human
cucugauucucagcugagcugugagggcuucc

SEQ ID NO: 400243 - RNA, 32 nt, Human
cucugauugcauucuuccccuaauccauuuuc

SEQ ID NO: 400244 - RNA, 32 nt, Human
cucugauugguuuuggggaaauguggagaaga

SEQ ID NO: 400245 - RNA, 32 nt, Human
cucugauuuagaugagcaagagcugcugaguu

SEQ ID NO: 400246 - RNA, 32 nt, Human
cucugauuugguuuguucugucucaggcuucu

SEQ ID NO: 400247 - RNA, 32 nt, Human
cucugauuuugccuuuuuguuuacugaggucc

SEQ ID NO: 400248 - RNA, 32 nt, Human
cucugauuuuucaaauggaagagagaacaguu

SEQ ID NO: 400249 - RNA, 32 nt, Human
cucugcaaaauauacaaaaauuagcugggugu

SEQ ID NO: 400250 - RNA, 32 nt, Human
cucugcaaaaugucauagcuuauauaaaugua

SEQ ID NO: 400251 - RNA, 21 nt, Human
cucugcaaaccaacaggcuac

SEQ ID NO: 400252 - RNA, 32 nt, Human
cucugcaacagaauaugacaccaucuucccag

SEQ ID NO: 400253 - RNA, 32 nt, Human
cucugcaagccucuccuccaccuucaccccaa

SEQ ID NO: 400254 - RNA, 32 nt, Human
cucugcaagggagggggagagaagcagaggga

SEQ ID NO: 400255 - RNA, 32 nt, Human
cucugcaagggaucaggaccagcaaccuuuau

SEQ ID NO: 400256 - RNA, 32 nt, Human
cucugcaagggugaggggccuggcaggaugga

SEQ ID NO: 400257 - RNA, 32 nt, Human
cucugcaaucuaccugcaccccugacccaccc

SEQ ID NO: 400258 - RNA, 32 nt, Human
cucugcacaaaagaagucaacgcaggaauaaa

SEQ ID NO: 400259 - RNA, 32 nt, Human
cucugcacagagagcugggcuugaguggaguu

SEQ ID NO: 400260 - RNA, 32 nt, Human
cucugcacaugaaucccacccacaugugacac

SEQ ID NO: 400261 - RNA, 32 nt, Human
cucugcacccagcccaagggguggccguccug

SEQ ID NO: 400262 - RNA, 22 nt, Human
cucugcacccagggaaaauguu

SEQ ID NO: 400263 - RNA, 32 nt, Human
cucugcaccucugaccacaccuuggcaagucu

SEQ ID NO: 400264 - RNA, 32 nt, Human
cucugcacuacaaaagcaaauuuuccagucuu

SEQ ID NO: 400265 - RNA, 24 nt, Human
cucugcacuccuugccuccugucu

SEQ ID NO: 400266 - RNA, 32 nt, Human
cucugcacugaccacacccuccugccugcccu

SEQ ID NO: 400267 - RNA, 32 nt, Human
cucugcacuguucccuuccacuuccucauccu

SEQ ID NO: 400268 - RNA, 32 nt, Human
cucugcacuucugcccuccauccugcuccacg

SEQ ID NO: 400269 - RNA, 21 nt, Human
cucugcagacagccaguccag

SEQ ID NO: 400270 - RNA, 32 nt, Human
cucugcagaccaccucuucuucugggagcugu

SEQ ID NO: 400271 - RNA, 21 nt, Human
cucugcagagacagguucuca

SEQ ID NO: 400272 - RNA, 32 nt, Human
cucugcagaggcugggggccuccacccagcag

SEQ ID NO: 400273 - RNA, 32 nt, Human
cucugcagagggccgauccuccagcccagaga

SEQ ID NO: 400274 - RNA, 32 nt, Human
cucugcagagucacugcaccaucaggcuuggc

SEQ ID NO: 400275 - RNA, 32 nt, Human
cucugcagaguccaugcugugagcuuccuacc

SEQ ID NO: 400276 - RNA, 32 nt, Human
cucugcagaguuuggaggggcucacugccacu

SEQ ID NO: 400277 - RNA, 32 nt, Human
cucugcagccccaaauggcuccugggccuugc

SEQ ID NO: 400278 - RNA, 32 nt, Human
cucugcagccuuucacuucagugcccaccugg

SEQ ID NO: 400279 - RNA, 32 nt, Human
cucugcagccuuucccaugcucugcccccugu

SEQ ID NO: 400280 - RNA, 16 nt, Human
cucugcagcucacccu

SEQ ID NO: 400281 - RNA, 32 nt, Human
cucugcagcuccuggccagcugauucagguca

SEQ ID NO: 400282 - RNA, 32 nt, Human
cucugcaggaccaggccauggagcucgaaguc

SEQ ID NO: 400283 - RNA, 32 nt, Human
cucugcaggagucugcaggucacccggagcag

SEQ ID NO: 400284 - RNA, 23 nt, Human
cucugcaggcccagcuccugccu

SEQ ID NO: 400285 - RNA, 32 nt, Human
cucugcaggccccagcccuggccuccaagcaa

SEQ ID NO: 400286 - RNA, 20 nt, Human
cucugcaggccucuuugcuc

SEQ ID NO: 400287 - RNA, 32 nt, Human
cucugcaggcuggagcugccuggggcagggcu

SEQ ID NO: 400288 - RNA, 32 nt, Human
cucugcagggccugggccugcugagccugaua

SEQ ID NO: 400289 - RNA, 32 nt, Human
cucugcagggcuugugaccaaugaagucauau

SEQ ID NO: 400290 - RNA, 32 nt, Human
cucugcagggugguccagccuaggugacaggg

SEQ ID NO: 400291 - RNA, 32 nt, Human
cucugcagguucuucauacagcugccucugcc

SEQ ID NO: 400292 - RNA, 32 nt, Human
cucugcaguauuagcccccuuuuugcuuggug

SEQ ID NO: 400293 - RNA, 32 nt, Human
cucugcaguccuccggggugggugggugggca

SEQ ID NO: 400294 - RNA, 32 nt, Human
cucugcagucuacaaaaucgccccagucaacu

SEQ ID NO: 400295 - RNA, 21 nt, Human
cucugcagucugaaccuggag

SEQ ID NO: 400296 - RNA, 32 nt, Human
cucugcaguguggcugcuucuugauucaucca

SEQ ID NO: 400297 - RNA, 32 nt, Human
cucugcauaugguuuucaucauguggaccuuc

SEQ ID NO: 400298 - RNA, 32 nt, Human
cucugcauccaucaccuaggagaugugacucu

SEQ ID NO: 400299 - RNA, 32 nt, Human
cucugcaucccccagcgucauguccugcccca

SEQ ID NO: 400300 - RNA, 32 nt, Human
cucugcaugauuagugcaauaaaacucccuuc

SEQ ID NO: 400301 - RNA, 32 nt, Human
cucugcaugcaugugacuugcuucuuuuugca

SEQ ID NO: 400302 - RNA, 20 nt, Human
cucugcauuccacuggcucu

SEQ ID NO: 400303 - RNA, 32 nt, Human
cucugcauuccuuuguuaucauccucuuucuc

SEQ ID NO: 400304 - RNA, 19 nt, Human
cucugcauucuggcuucug

SEQ ID NO: 400305 - RNA, 32 nt, Human
cucugcauuuccuuuccuggaucucugucuuu

SEQ ID NO: 400306 - RNA, 32 nt, Human
cucugcauuuguccaguaacucuggcugugcc

SEQ ID NO: 400307 - RNA, 32 nt, Human
cucugccaaaaauacaaaaguuagccgggcgu

SEQ ID NO: 400308 - RNA, 32 nt, Human
cucugccaaauccaccuccugaggagauuucc

SEQ ID NO: 400309 - RNA, 32 nt, Human
cucugccacaagugccagcccccacaucugua

SEQ ID NO: 400310 - RNA, 22 nt, Human
cucugccacaccccaggcccug

SEQ ID NO: 400311 - RNA, 32 nt, Human
cucugccacacggguucaggugauucucuugc

SEQ ID NO: 400312 - RNA, 32 nt, Human
cucugccacagguugcaucuugaccugguccu

SEQ ID NO: 400313 - RNA, 32 nt, Human
cucugccaccagcugcucgcagcccaugccug

SEQ ID NO: 400314 - RNA, 26 nt, Human
cucugccacccaagcuggagugcagu

SEQ ID NO: 400315 - RNA, 32 nt, Human
cucugccacccaagcuggagugcaguggcacg

SEQ ID NO: 400316 - RNA, 32 nt, Human
cucugccacccagacugaagugcaguggugcg

SEQ ID NO: 400317 - RNA, 32 nt, Human
cucugccacccaggcuggagugcaguggugca

SEQ ID NO: 400318 - RNA, 21 nt, Human
cucugccacccccuccugucu

SEQ ID NO: 400319 - RNA, 32 nt, Human
cucugccacuccccacccccagccucugccgg

SEQ ID NO: 400320 - RNA, 32 nt, Human
cucugccacugacccaccgccaccuccgcgga

SEQ ID NO: 400321 - RNA, 32 nt, Human
cucugccacuggaagggcagaguagccagggu

SEQ ID NO: 400322 - RNA, 32 nt, Human
cucugccacuggcuugcuuuuggaccuuggau

SEQ ID NO: 400323 - RNA, 23 nt, Human
cucugccacugggacggcuccug

SEQ ID NO: 400324 - RNA, 32 nt, Human
cucugccacugugcccaagccuggguaucaca

SEQ ID NO: 400325 - RNA, 32 nt, Human
cucugccacuuuucccuuccuaccucuuaacu

SEQ ID NO: 400326 - RNA, 32 nt, Human
cucugccagacaaucccuccuuuagccaggga

SEQ ID NO: 400327 - RNA, 32 nt, Human
cucugccagcauaaaccacucacaccccaggg

SEQ ID NO: 400328 - RNA, 32 nt, Human
cucugccagccagacuggagugcauuggcgag

SEQ ID NO: 400329 - RNA, 32 nt, Human
cucugccagccaggcuggagugcaguggcaug

SEQ ID NO: 400330 - RNA, 32 nt, Human
cucugccagggccuacuucuccccagcagugc

SEQ ID NO: 400331 - RNA, 32 nt, Human
cucugccagggccugcuucuccccagcagugc

SEQ ID NO: 400332 - RNA, 32 nt, Human
cucugccaggggucccagcuacucaggaggcu

SEQ ID NO: 400333 - RNA, 32 nt, Human
cucugccagguggcgaguacaccugcucacgu

SEQ ID NO: 400334 - RNA, 23 nt, Human
cucugccagugacagacaggcuc

SEQ ID NO: 400335 - RNA, 18 nt, Human
cucugccagugcucucug

SEQ ID NO: 400336 - RNA, 32 nt, Human
cucugccaguguccccagcacuuuuaggucau

SEQ ID NO: 400337 - RNA, 31 nt, Human
cucugccagugucucaggacagcagaguggg

SEQ ID NO: 400338 - RNA, 32 nt, Human
cucugccaucacccagcccaaacacaucagcu

SEQ ID NO: 400339 - RNA, 32 nt, Human
cucugccauccagcgccacaaagagacauucu

SEQ ID NO: 400340 - RNA, 32 nt, Human
cucugccaucguacuucaagagcagccaguag

SEQ ID NO: 400341 - RNA, 32 nt, Human
cucugccaucuucucuccuucccaaaggaucu

SEQ ID NO: 400342 - RNA, 18 nt, Human
cucugccaugaauuccug

SEQ ID NO: 400343 - RNA, 32 nt, Human
cucugccauuuacuugcugugugucuccagca

SEQ ID NO: 400344 - RNA, 32 nt, Human
cucugcccaaaagcuuuuccacacuuacaguc

SEQ ID NO: 400345 - RNA, 32 nt, Human
cucugcccaagugggccagcugcccucacuuc

SEQ ID NO: 400346 - RNA, 32 nt, Human
cucugcccacacuucccugccuagagacccgg

SEQ ID NO: 400347 - RNA, 19 nt, Human
cucugcccacccuggcucc

SEQ ID NO: 400348 - RNA, 21 nt, Human
cucugcccaccugagguccug

SEQ ID NO: 400349 - RNA, 32 nt, Human
cucugcccaccuggggucucucucccuaccuc

SEQ ID NO: 400350 - RNA, 24 nt, Human
cucugcccacuacaaccuccaccu

SEQ ID NO: 400351 - RNA, 19 nt, Human
cucugcccagaggcuccug

SEQ ID NO: 400352 - RNA, 32 nt, Human
cucugcccagaugccaucacaucccugauacu

SEQ ID NO: 400353 - RNA, 18 nt, Human
cucugcccagccucgcug

SEQ ID NO: 400354 - RNA, 20 nt, Human
cucugcccagcucuggcuuc

SEQ ID NO: 400355 - RNA, 32 nt, Human
cucugcccaggaucugagcucauuggucaaag

SEQ ID NO: 400356 - RNA, 32 nt, Human
cucugcccagugugggagggcagaucauuccc

SEQ ID NO: 400357 - RNA, 32 nt, Human
cucugcccaguucucugggucaagcuggaugg

SEQ ID NO: 400358 - RNA, 19 nt, Human
cucugcccaucggcuucug

SEQ ID NO: 400359 - RNA, 32 nt, Human
cucugcccauuguccaugauuuacacuaauug

SEQ ID NO: 400360 - RNA, 32 nt, Human
cucugccccagcucuggcuuccagaaaacccc

SEQ ID NO: 400361 - RNA, 20 nt, Human
cucugccccagguuccagga

SEQ ID NO: 400362 - RNA, 21 nt, Human
cucugccccaugugcccucaa

SEQ ID NO: 400363 - RNA, 32 nt, Human
cucugcccccugcuggcucuucugcccaauug

SEQ ID NO: 400364 - RNA, 16 nt, Human
cucugccccgcugccg

SEQ ID NO: 400365 - RNA, 32 nt, Human
cucugccccgcugcucugcugccuguccuggg

SEQ ID NO: 400366 - RNA, 24 nt, Human
cucugccccgguucaugguuccug

SEQ ID NO: 400367 - RNA, 32 nt, Human
cucugccccucacguuccuaccacagggccac

SEQ ID NO: 400368 - RNA, 32 nt, Human
cucugccccuccccacucucaggcuggugggg

SEQ ID NO: 400369 - RNA, 32 nt, Human
cucugccccucgggggacuggacacacauccu

SEQ ID NO: 400370 - RNA, 32 nt, Human
cucugccccucuucccuggccaggggcuucuc

SEQ ID NO: 400371 - RNA, 23 nt, Human
cucugccccucuuccuggcccug

SEQ ID NO: 400372 - RNA, 32 nt, Human
cucugccccugccccugccccucccagcaccu

SEQ ID NO: 400373 - RNA, 32 nt, Human
cucugccccugcccucccucuccuaucugaac

SEQ ID NO: 400374 - RNA, 32 nt, Human
cucugccccugccucccuaauuagcuagggcu

SEQ ID NO: 400375 - RNA, 32 nt, Human
cucugccccugugaacacccaucugcaguauc

SEQ ID NO: 400376 - RNA, 32 nt, Human
cucugccccuucuguuuccauaggaaucaugu

SEQ ID NO: 400377 - RNA, 32 nt, Human
cucugccccuugcccuccccugccccucacaa

SEQ ID NO: 400378 - RNA, 18 nt, Human
cucugcccgaccucgcug

SEQ ID NO: 400379 - RNA, 32 nt, Human
cucugcccgguuggaccuccucccuuuguuga

SEQ ID NO: 400380 - RNA, 32 nt, Human
cucugcccgucacuccccuugucaccucuugg

SEQ ID NO: 400381 - RNA, 32 nt, Human
cucugcccgugaggagcuucccgcagccgccu

SEQ ID NO: 400382 - RNA, 32 nt, Human
cucugcccucacaaccucagccuggccuucau

SEQ ID NO: 400383 - RNA, 32 nt, Human
cucugcccuccagaaccugcagccuggagggg

SEQ ID NO: 400384 - RNA, 32 nt, Human
cucugcccuccagaacuucaggcucucaguga

SEQ ID NO: 400385 - RNA, 32 nt, Human
cucugcccuccagaagcccucgucugggaauu

SEQ ID NO: 400386 - RNA, 21 nt, Human
cucugcccucccuggcuccug

SEQ ID NO: 400387 - RNA, 32 nt, Human
cucugcccuccuuccccuccccaaccccaggc

SEQ ID NO: 400388 - RNA, 32 nt, Human
cucugcccuccuuuuugguuuccuugguggua

SEQ ID NO: 400389 - RNA, 20 nt, Human
cucugcccucgcugcucuug

SEQ ID NO: 400390 - RNA, 20 nt, Human
cucugcccucugacucacug

SEQ ID NO: 400391 - RNA, 18 nt, Human
cucugcccucuuugccca

SEQ ID NO: 400392 - RNA, 32 nt, Human
cucugcccugagccaggagaccugccacaccc

SEQ ID NO: 400393 - RNA, 32 nt, Human
cucugcccugcacuugugcagaaagucaggga

SEQ ID NO: 400394 - RNA, 22 nt, Human
cucugcccugccccccaccccu

SEQ ID NO: 400395 - RNA, 32 nt, Human
cucugcccugcccuccagccugggacaauaaa

SEQ ID NO: 400396 - RNA, 22 nt, Human
cucugcccugcccuggccacug

SEQ ID NO: 400397 - RNA, 32 nt, Human
cucugcccuggaaccuaccagagcagagaagg

SEQ ID NO: 400398 - RNA, 15 nt, Human
cucugcccuggcuuc

SEQ ID NO: 400399 - RNA, 32 nt, Human
cucugcccugugccugggcacacacaggcauc

SEQ ID NO: 400400 - RNA, 32 nt, Human
cucugcccuuggcuugcccuccucagaguucu

SEQ ID NO: 400401 - RNA, 32 nt, Human
cucugcccuuguuauccugccacccgcagggg

SEQ ID NO: 400402 - RNA, 32 nt, Human
cucugcccuuuacuugaacaggagucuugauu

SEQ ID NO: 400403 - RNA, 32 nt, Human
cucugcccuuuccccuucucccccucccccuc

SEQ ID NO: 400404 - RNA, 32 nt, Human
cucugcccuuucucuguccuuaugcugucccg

SEQ ID NO: 400405 - RNA, 26 nt, Human
cucugcccuuugggcuggauuaccca

SEQ ID NO: 400406 - RNA, 32 nt, Human
cucugcccuuuugccuguccucaggccgcugg

SEQ ID NO: 400407 - RNA, 19 nt, Human
cucugccgaccggcuucug

SEQ ID NO: 400408 - RNA, 32 nt, Human
cucugccgagaucaaauggagcuucucgcuga

SEQ ID NO: 400409 - RNA, 26 nt, Human
cucugccgcccaaacuggagugcagu

SEQ ID NO: 400410 - RNA, 32 nt, Human
cucugccgcccaaacuggagugcaguggcaca

SEQ ID NO: 400411 - RNA, 26 nt, Human
cucugccgcccaggcgggagugcagu

SEQ ID NO: 400412 - RNA, 32 nt, Human
cucugccgcccaggcgggagugcaguggcagu

SEQ ID NO: 400413 - RNA, 26 nt, Human
cucugccgcccaggcuggacugcagu

SEQ ID NO: 400414 - RNA, 32 nt, Human
cucugccgcccaggcuggacugcagugacaca

SEQ ID NO: 400415 - RNA, 26 nt, Human
cucugccgcccaggcuggagugcagu

SEQ ID NO: 400416 - RNA, 32 nt, Human
cucugccgcccaggcuggagugcaguggcgcg

SEQ ID NO: 400417 - RNA, 17 nt, Human
cucugccgccgccgccg

SEQ ID NO: 400418 - RNA, 32 nt, Human
cucugccgcugcuuccaggcugggcagcacaa

SEQ ID NO: 400419 - RNA, 32 nt, Human
cucugccggaaaguccgcgccgccgcugccgc

SEQ ID NO: 400420 - RNA, 32 nt, Human
cucugccggggaggaggaggaggaggaagagg

SEQ ID NO: 400421 - RNA, 18 nt, Human
cucugccgggggcuucug

SEQ ID NO: 400422 - RNA, 20 nt, Human
cucugccuacaugacuacug

SEQ ID NO: 400423 - RNA, 32 nt, Human
cucugccuacugcgcaggccucaggcccaggg

SEQ ID NO: 400424 - RNA, 32 nt, Human
cucugccuagcuguuuacauuugcaaauguag

SEQ ID NO: 400425 - RNA, 32 nt, Human
cucugccuaggcccuggugaaaccacagguau

SEQ ID NO: 400426 - RNA, 19 nt, Human
cucugccuagggggcuccu

SEQ ID NO: 400427 - RNA, 32 nt, Human
cucugccuauagccccagcuacuugggaggcu

SEQ ID NO: 400428 - RNA, 20 nt, Human
cucugccucaaagacucuug

SEQ ID NO: 400429 - RNA, 22 nt, Human
cucugccucaaccccaggccac

SEQ ID NO: 400430 - RNA, 18 nt, Human
cucugccucaaggccggg

SEQ ID NO: 400431 - RNA, 20 nt, Human
cucugccucaaggcuguccu

SEQ ID NO: 400432 - RNA, 24 nt, Human
cucugccucaaggcuugguuccug

SEQ ID NO: 400433 - RNA, 18 nt, Human
cucugccucaaugcccug

SEQ ID NO: 400434 - RNA, 18 nt, Human
cucugccucacacuccug

SEQ ID NO: 400435 - RNA, 32 nt, Human
cucugccucacacuccuguccucugaacccac

SEQ ID NO: 400436 - RNA, 32 nt, Human
cucugccucacagcagacucuccacacccagc

SEQ ID NO: 400437 - RNA, 32 nt, Human
cucugccucacagcagacucuccacgcccagc

SEQ ID NO: 400438 - RNA, 32 nt, Human
cucugccucacagcagacucuccaugcccagc

SEQ ID NO: 400439 - RNA, 32 nt, Human
cucugccucacagcagacucuucacacccagc

SEQ ID NO: 400440 - RNA, 20 nt, Human
cucugccucaccugccuccu

SEQ ID NO: 400441 - RNA, 18 nt, Human
cucugccucacucucuug

SEQ ID NO: 400442 - RNA, 17 nt, Human
cucugccucacuucuuu

SEQ ID NO: 400443 - RNA, 20 nt, Human
cucugccucagcagccgcug

SEQ ID NO: 400444 - RNA, 16 nt, Human
cucugccucagccucc

SEQ ID NO: 400445 - RNA, 19 nt, Human
cucugccucagccuccucc

SEQ ID NO: 400446 - RNA, 18 nt, Human
cucugccucagccuccug

SEQ ID NO: 400447 - RNA, 19 nt, Human
cucugccucagccuuacug

SEQ ID NO: 400448 - RNA, 18 nt, Human
cucugccucagucaccug

SEQ ID NO: 400449 - RNA, 19 nt, Human
cucugccucaguggccucc

SEQ ID NO: 400450 - RNA, 32 nt, Human
cucugccucaguuuccccaucuguaaaauggg

SEQ ID NO: 400451 - RNA, 18 nt, Human
cucugccucauauucuug

SEQ ID NO: 400452 - RNA, 32 nt, Human
cucugccucauauucuuguuaggccagguggg

SEQ ID NO: 400453 - RNA, 32 nt, Human
cucugccucauccuccuccucauucagaccaa

SEQ ID NO: 400454 - RNA, 19 nt, Human
cucugccucauccugcccu

SEQ ID NO: 400455 - RNA, 18 nt, Human
cucugccucauuuuccug

SEQ ID NO: 400456 - RNA, 32 nt, Human
cucugccuccacccccucccuauuccugaugc

SEQ ID NO: 400457 - RNA, 32 nt, Human
cucugccuccacccuccuccucuucaccaggu

SEQ ID NO: 400458 - RNA, 18 nt, Human
cucugccuccacuuccug

SEQ ID NO: 400459 - RNA, 21 nt, Human
cucugccuccacuuccugcuu

SEQ ID NO: 400460 - RNA, 18 nt, Human
cucugccuccagggcucc

SEQ ID NO: 400461 - RNA, 19 nt, Human
cucugccuccccgcucuca

SEQ ID NO: 400462 - RNA, 32 nt, Human
cucugccuccccggaagaagaugaggaaucug

SEQ ID NO: 400463 - RNA, 17 nt, Human
cucugccuccccugccc

SEQ ID NO: 400464 - RNA, 32 nt, Human
cucugccuccccuuccccuccucuccccuccu

SEQ ID NO: 400465 - RNA, 19 nt, Human
cucugccucccguugcucu

SEQ ID NO: 400466 - RNA, 19 nt, Human
cucugccucccuaagcucc

SEQ ID NO: 400467 - RNA, 19 nt, Human
cucugccucccucacccug

SEQ ID NO: 400468 - RNA, 18 nt, Human
cucugccucccuccuccu

SEQ ID NO: 400469 - RNA, 19 nt, Human
cucugccucccucgcuccu

SEQ ID NO: 400470 - RNA, 32 nt, Human
cucugccucccucgcuccuccaacagcugccu

SEQ ID NO: 400471 - RNA, 16 nt, Human
cucugccucccucucc

SEQ ID NO: 400472 - RNA, 18 nt, Human
cucugccucccucugcug

SEQ ID NO: 400473 - RNA, 20 nt, Human
cucugccucccugcucucug

SEQ ID NO: 400474 - RNA, 32 nt, Human
cucugccucccugucaccucaggcuugacccc

SEQ ID NO: 400475 - RNA, 19 nt, Human
cucugccucccugucuacc

SEQ ID NO: 400476 - RNA, 16 nt, Human
cucugccuccgccucc

SEQ ID NO: 400477 - RNA, 21 nt, Human
cucugccuccggucacucuug

SEQ ID NO: 400478 - RNA, 17 nt, Human
cucugccuccuccccug

SEQ ID NO: 400479 - RNA, 16 nt, Human
cucugccuccuccucc

SEQ ID NO: 400480 - RNA, 17 nt, Human
cucugccuccucucucc

SEQ ID NO: 400481 - RNA, 16 nt, Human
cucugccuccugcucc

SEQ ID NO: 400482 - RNA, 16 nt, Human
cucugccuccugcuuu

SEQ ID NO: 400483 - RNA, 32 nt, Human
cucugccuccuggguucuccugccucacccuc

SEQ ID NO: 400484 - RNA, 18 nt, Human
cucugccuccuuccuccu

SEQ ID NO: 400485 - RNA, 32 nt, Human
cucugccuccuuccuucuuucucuucaacccc

SEQ ID NO: 400486 - RNA, 18 nt, Human
cucugccuccuuggcccc

SEQ ID NO: 400487 - RNA, 32 nt, Human
cucugccuccuuggccccacauuucugcaaac

SEQ ID NO: 400488 - RNA, 15 nt, Human
cucugccuccuuucc

SEQ ID NO: 400489 - RNA, 19 nt, Human
cucugccuccuuucugcug

SEQ ID NO: 400490 - RNA, 18 nt, Human
cucugccucgggccuucu

SEQ ID NO: 400491 - RNA, 17 nt, Human
cucugccucgguuuccu

SEQ ID NO: 400492 - RNA, 17 nt, Human
cucugccucgucuuucc

SEQ ID NO: 400493 - RNA, 32 nt, Human
cucugccucuccccaccuucuuuggagcaagg

SEQ ID NO: 400494 - RNA, 32 nt, Human
cucugccucucucagccgcaucacccuguugc

SEQ ID NO: 400495 - RNA, 18 nt, Human
cucugccucucucuccug

SEQ ID NO: 400496 - RNA, 20 nt, Human
cucugccucucuucucucug

SEQ ID NO: 400497 - RNA, 20 nt, Human
cucugccucucuuucuccug

SEQ ID NO: 400498 - RNA, 19 nt, Human
cucugccucugacucgcug

SEQ ID NO: 400499 - RNA, 32 nt, Human
cucugccucugccucauauucuuguuaggcca

SEQ ID NO: 400500 - RNA, 32 nt, Human
cucugccucugccucucccuuccaagcucugc

SEQ ID NO: 400501 - RNA, 20 nt, Human
cucugccucuggcccuccug

SEQ ID NO: 400502 - RNA, 18 nt, Human
cucugccucuggcuuucc

SEQ ID NO: 400503 - RNA, 18 nt, Human
cucugccucugucuccug

SEQ ID NO: 400504 - RNA, 19 nt, Human
cucugccucuguucucuug

SEQ ID NO: 400505 - RNA, 32 nt, Human
cucugccucuuccuccauacuagguuggaaaa

SEQ ID NO: 400506 - RNA, 17 nt, Human
cucugccucuugcaccu

SEQ ID NO: 400507 - RNA, 19 nt, Human
cucugccucuuuucuccug

SEQ ID NO: 400508 - RNA, 20 nt, Human
cucugccugacugaccccug

SEQ ID NO: 400509 - RNA, 32 nt, Human
cucugccugaggccuagucugcauuuguuugc

SEQ ID NO: 400510 - RNA, 32 nt, Human
cucugccugaugcucucauuaaaaucuaugca

SEQ ID NO: 400511 - RNA, 20 nt, Human
cucugccugauguggcuccu

SEQ ID NO: 400512 - RNA, 19 nt, Human
cucugccugcaccuuccug

SEQ ID NO: 400513 - RNA, 18 nt, Human
cucugccugcacgcccug

SEQ ID NO: 400514 - RNA, 16 nt, Human
cucugccugcagcucc

SEQ ID NO: 400515 - RNA, 32 nt, Human
cucugccugcagcugggccucugccucauccu

SEQ ID NO: 400516 - RNA, 17 nt, Human
cucugccugccccuccu

SEQ ID NO: 400517 - RNA, 32 nt, Human
cucugccugcccuguccuuccccuggcugaug

SEQ ID NO: 400518 - RNA, 25 nt, Human
cucugccugccggcugggcugccca

SEQ ID NO: 400519 - RNA, 32 nt, Human
cucugccugccugccugccugcuguccugggc

SEQ ID NO: 400520 - RNA, 32 nt, Human
cucugccugccuggcccucaaccuuccaugac

SEQ ID NO: 400521 - RNA, 32 nt, Human
cucugccugccuggggcccuggcuagccugca

SEQ ID NO: 400522 - RNA, 32 nt, Human
cucugccugccuggucugacccuccccugcuc

SEQ ID NO: 400523 - RNA, 19 nt, Human
cucugccugccuguuccug

SEQ ID NO: 400524 - RNA, 32 nt, Human
cucugccugcucaccacagccuggagagggca

SEQ ID NO: 400525 - RNA, 19 nt, Human
cucugccugcugggcucuu

SEQ ID NO: 400526 - RNA, 15 nt, Human
cucugccugcugucc

SEQ ID NO: 400527 - RNA, 32 nt, Human
cucugccugcugugcugcuuuucccccacaug

SEQ ID NO: 400528 - RNA, 32 nt, Human
cucugccuggagcccagguugcagguggugag

SEQ ID NO: 400529 - RNA, 18 nt, Human
cucugccuggccagcccu

SEQ ID NO: 400530 - RNA, 20 nt, Human
cucugccuggccugacccug

SEQ ID NO: 400531 - RNA, 23 nt, Human
cucugccuggcugagcacaucca

SEQ ID NO: 400532 - RNA, 32 nt, Human
cucugccugggcaagaguguggaggugccgag

SEQ ID NO: 400533 - RNA, 19 nt, Human
cucugccugggccucacug

SEQ ID NO: 400534 - RNA, 32 nt, Human
cucugccuggggccauugagcccagccuccag

SEQ ID NO: 400535 - RNA, 20 nt, Human
cucugccuggguucuuccug

SEQ ID NO: 400536 - RNA, 19 nt, Human
cucugccugguggcauccu

SEQ ID NO: 400537 - RNA, 18 nt, Human
cucugccugguggcccug

SEQ ID NO: 400538 - RNA, 19 nt, Human
cucugccuggugguuccug

SEQ ID NO: 400539 - RNA, 17 nt, Human
cucugccuguggccacu

SEQ ID NO: 400540 - RNA, 24 nt, Human
cucugccugugugaguggcuccug

SEQ ID NO: 400541 - RNA, 18 nt, Human
cucugccuguuacugcug

SEQ ID NO: 400542 - RNA, 19 nt, Human
cucugccuguuagacucuu

SEQ ID NO: 400543 - RNA, 16 nt, Human
cucugccuguuccucc

SEQ ID NO: 400544 - RNA, 32 nt, Human
cucugccuguucuggacuguguucugggccug

SEQ ID NO: 400545 - RNA, 17 nt, Human
cucugccuuagcacucc

SEQ ID NO: 400546 - RNA, 23 nt, Human
cucugccuuaggcucugucucca

SEQ ID NO: 400547 - RNA, 32 nt, Human
cucugccuucaaggagcuugcaguauagugag

SEQ ID NO: 400548 - RNA, 32 nt, Human
cucugccuucaaggcccccauggggcugucca

SEQ ID NO: 400549 - RNA, 19 nt, Human
cucugccuucaggacccug

SEQ ID NO: 400550 - RNA, 19 nt, Human
cucugccuucaggcuucug

SEQ ID NO: 400551 - RNA, 32 nt, Human
cucugccuucaggcuucugucaauuucauuau

SEQ ID NO: 400552 - RNA, 21 nt, Human
cucugccuucagggucaucca

SEQ ID NO: 400553 - RNA, 19 nt, Human
cucugccuucaugcaccug

SEQ ID NO: 400554 - RNA, 32 nt, Human
cucugccuuccagguucaagcuauucucaugc

SEQ ID NO: 400555 - RNA, 32 nt, Human
cucugccuuccagguucaagugauuagagaca

SEQ ID NO: 400556 - RNA, 32 nt, Human
cucugccuucucgcucugugagguaggggaag

SEQ ID NO: 400557 - RNA, 15 nt, Human
cucugccuucucucc

SEQ ID NO: 400558 - RNA, 32 nt, Human
cucugccuucugccaccucugccucaggagca

SEQ ID NO: 400559 - RNA, 32 nt, Human
cucugccuucugguuucguguccuggugcuua

SEQ ID NO: 400560 - RNA, 19 nt, Human
cucugccuucuguucucug

SEQ ID NO: 400561 - RNA, 18 nt, Human
cucugccuugcccuccug

SEQ ID NO: 400562 - RNA, 32 nt, Human
cucugccuugcuuugcuuauguuuagcuguuu

SEQ ID NO: 400563 - RNA, 17 nt, Human
cucugccuuggagcucc

SEQ ID NO: 400564 - RNA, 19 nt, Human
cucugccuuggccucacug

SEQ ID NO: 400565 - RNA, 21 nt, Human
cucugccuuuagggucaucca

SEQ ID NO: 400566 - RNA, 32 nt, Human
cucugccuuuccuucugcuccagagcaaauug

SEQ ID NO: 400567 - RNA, 18 nt, Human
cucugccuuugagcccug

SEQ ID NO: 400568 - RNA, 32 nt, Human
cucugccuuugagcuucuccucugcuccaaca

SEQ ID NO: 400569 - RNA, 32 nt, Human
cucugccuuugguggagggcaauuccuccucu

SEQ ID NO: 400570 - RNA, 19 nt, Human
cucugccuuugugauccug

SEQ ID NO: 400571 - RNA, 17 nt, Human
cucugccuuugugcucu

SEQ ID NO: 400572 - RNA, 18 nt, Human
cucugccuuuuagcuucu

SEQ ID NO: 400573 - RNA, 20 nt, Human
cucugcgacacugguuccag

SEQ ID NO: 400574 - RNA, 32 nt, Human
cucugcgagcagcugggagcggcggcggcggc

SEQ ID NO: 400575 - RNA, 32 nt, Human
cucugcgagccccugcacuccauccugcugac

SEQ ID NO: 400576 - RNA, 32 nt, Human
cucugcgaggcagcggcuggagagggaaccau

SEQ ID NO: 400577 - RNA, 32 nt, Human
cucugcgcccaggauggagugcaguggcauga

SEQ ID NO: 400578 - RNA, 18 nt, Human
cucugcgccgcugcugcc

SEQ ID NO: 400579 - RNA, 32 nt, Human
cucugcgccucuccaccuggcuucacugauuc

SEQ ID NO: 400580 - RNA, 21 nt, Human
cucugcgccugucccucccca

SEQ ID NO: 400581 - RNA, 32 nt, Human
cucugcgcggcccacugcaauccguggaggaa

SEQ ID NO: 400582 - RNA, 32 nt, Human
cucugcgcggucagagggagcgccuggcagca

SEQ ID NO: 400583 - RNA, 32 nt, Human
cucugcgcugagcagaaccagcucccccaacu

SEQ ID NO: 400584 - RNA, 21 nt, Human
cucugcgcuggacuucugcca

SEQ ID NO: 400585 - RNA, 32 nt, Human
cucugcgcugggcaggaccaaggcuaggcuuu

SEQ ID NO: 400586 - RNA, 32 nt, Human
cucugcggaccugcagccaucugugaggcccg

SEQ ID NO: 400587 - RNA, 32 nt, Human
cucugcggaucuccccugaccgcucuccacag

SEQ ID NO: 400588 - RNA, 32 nt, Human
cucugcggcuccucccaccccaccucuucuca

SEQ ID NO: 400589 - RNA, 32 nt, Human
cucugcggggcagggccuuccugguuuuguac

SEQ ID NO: 400590 - RNA, 20 nt, Human
cucugcggggccgguccagg

SEQ ID NO: 400591 - RNA, 23 nt, Human
cucugcggguccagcuccugcuu

SEQ ID NO: 400592 - RNA, 32 nt, Human
cucugcgguugagggcccagaggacagagaga

SEQ ID NO: 400593 - RNA, 32 nt, Human
cucugcgucccgagccucccccggcucuccgc

SEQ ID NO: 400594 - RNA, 18 nt, Human
cucugcgucccgcacccc

SEQ ID NO: 400595 - RNA, 23 nt, Human
cucugcgucuuucccucuuccgc

SEQ ID NO: 400596 - RNA, 32 nt, Human
cucugcguggugccaugaaggaaagaaaccuu

SEQ ID NO: 400597 - RNA, 20 nt, Human
cucugcgugguguggcuccu

SEQ ID NO: 400598 - RNA, 32 nt, Human
cucugcguuauuggcugugcucuccucaaugg

SEQ ID NO: 400599 - RNA, 19 nt, Human
cucugcguucaucacauca

SEQ ID NO: 400600 - RNA, 32 nt, Human
cucugcuaaaaauacaaaaauagcugggcgug

SEQ ID NO: 400601 - RNA, 32 nt, Human
cucugcuaaaaauacaaaaauuagccagaugu

SEQ ID NO: 400602 - RNA, 32 nt, Human
cucugcuaaaaauacaaaaauuagccaggcau

SEQ ID NO: 400603 - RNA, 32 nt, Human
cucugcuaaaaauacaaaaauuagccgggcgu

SEQ ID NO: 400604 - RNA, 32 nt, Human
cucugcuaaaaauacaaaaauuagccgggugu

SEQ ID NO: 400605 - RNA, 32 nt, Human
cucugcuaaaaauacaaaaauuagcugggugc

SEQ ID NO: 400606 - RNA, 32 nt, Human
cucugcuaaaaauacaaaaauuagcugggugu

SEQ ID NO: 400607 - RNA, 32 nt, Human
cucugcuaaaaauacaaaauuagcugggcgug

SEQ ID NO: 400608 - RNA, 32 nt, Human
cucugcuaaaaauacaaaauuuagcugggcau

SEQ ID NO: 400609 - RNA, 31 nt, Human
cucugcuaaaaauacaaaauuuagcugggua

SEQ ID NO: 400610 - RNA, 32 nt, Human
cucugcuaacaauacugaaauuagcugggugc

SEQ ID NO: 400611 - RNA, 32 nt, Human
cucugcuacacagcacggcuuuuucaaggcug

SEQ ID NO: 400612 - RNA, 32 nt, Human
cucugcuacagcccugggaggagccaggaucc

SEQ ID NO: 400613 - RNA, 32 nt, Human
cucugcuacugaggcaggggaguaguggagag

SEQ ID NO: 400614 - RNA, 32 nt, Human
cucugcuacuucugaaucuguuuugucuuccu

SEQ ID NO: 400615 - RNA, 32 nt, Human
cucugcuagaaauacaaaaauuggcugggcgc

SEQ ID NO: 400616 - RNA, 32 nt, Human
cucugcuagaacacaggaugcuucugcucucc

SEQ ID NO: 400617 - RNA, 32 nt, Human
cucugcuagccagcagagugagcaugcacagc

SEQ ID NO: 400618 - RNA, 32 nt, Human
cucugcuagcucccagccuuccauggcagugc

SEQ ID NO: 400619 - RNA, 32 nt, Human
cucugcuaguucagauggauugcaauuauaau

SEQ ID NO: 400620 - RNA, 32 nt, Human
cucugcucaacucucuaccacaugucacagcu

SEQ ID NO: 400621 - RNA, 31 nt, Human
cucugcucaauaaaauaccuguaacuggaaa

SEQ ID NO: 400622 - RNA, 32 nt, Human
cucugcucacuacaaccucugccucccagguu

SEQ ID NO: 400623 - RNA, 32 nt, Human
cucugcucacuacaagcucugccucccgaguu

SEQ ID NO: 400624 - RNA, 20 nt, Human
cucugcucacugcaaccucc

SEQ ID NO: 400625 - RNA, 22 nt, Human
cucugcucacugcaaccuccgc

SEQ ID NO: 400626 - RNA, 32 nt, Human
cucugcucacugcaaccuccgccucccagguu

SEQ ID NO: 400627 - RNA, 32 nt, Human
cucugcucacugcaaccuccgccucccggguu

SEQ ID NO: 400628 - RNA, 32 nt, Human
cucugcucacugcaaccucugccuccuggguu

SEQ ID NO: 400629 - RNA, 32 nt, Human
cucugcucacugcaagcucagccucucggguu

SEQ ID NO: 400630 - RNA, 32 nt, Human
cucugcucacugcaagcuccgccaucuggguu

SEQ ID NO: 400631 - RNA, 32 nt, Human
cucugcucacugcaagcuccgccucccggguu

SEQ ID NO: 400632 - RNA, 32 nt, Human
cucugcucacugcaagcuccgccuccuggguu

SEQ ID NO: 400633 - RNA, 32 nt, Human
cucugcucacuguaaccucugccuccuggguu

SEQ ID NO: 400634 - RNA, 32 nt, Human
cucugcucagccaagcuuguuaucagcuuuca

SEQ ID NO: 400635 - RNA, 32 nt, Human
cucugcuccaaccuucaagagauuuugcaagu

SEQ ID NO: 400636 - RNA, 18 nt, Human
cucugcuccacccaggcu

SEQ ID NO: 400637 - RNA, 32 nt, Human
cucugcuccacugucugcagcccagauccugu

SEQ ID NO: 400638 - RNA, 32 nt, Human
cucugcuccauuucacucuuguccucacagac

SEQ ID NO: 400639 - RNA, 32 nt, Human
cucugcuccccaggcuugagugagugugugcc

SEQ ID NO: 400640 - RNA, 19 nt, Human
cucugcucccucuuccucu

SEQ ID NO: 400641 - RNA, 32 nt, Human
cucugcuccugccucccaaaguccaugucugc

SEQ ID NO: 400642 - RNA, 32 nt, Human
cucugcuccuucacuguucccucuggcuuccc

SEQ ID NO: 400643 - RNA, 32 nt, Human
cucugcuccuugggagcggguggagagacacc

SEQ ID NO: 400644 - RNA, 32 nt, Human
cucugcucgccuuagcacuaccacuccugcca

SEQ ID NO: 400645 - RNA, 29 nt, Human
cucugcucggcucugucauccccugacug

SEQ ID NO: 400646 - RNA, 22 nt, Human
cucugcucucaccucucugcuu

SEQ ID NO: 400647 - RNA, 19 nt, Human
cucugcucucauugcuugu

SEQ ID NO: 400648 - RNA, 32 nt, Human
cucugcucuccgacuaccucagggaggauucu

SEQ ID NO: 400649 - RNA, 32 nt, Human
cucugcucuccucaaagacgcaaaacauuuuc

SEQ ID NO: 400650 - RNA, 32 nt, Human
cucugcucuccucccgcaauccugcuccaaga

SEQ ID NO: 400651 - RNA, 32 nt, Human
cucugcucuccucuauucuccaugucgacuga

SEQ ID NO: 400652 - RNA, 32 nt, Human
cucugcucuguggauguggacagcgauggcag

SEQ ID NO: 400653 - RNA, 32 nt, Human
cucugcucugugggguuuggagaaaugcuuug

SEQ ID NO: 400654 - RNA, 28 nt, Human
cucugcucuucugcagccucaucucugc

SEQ ID NO: 400655 - RNA, 32 nt, Human
cucugcugaauuuuuaaauguucacucuggcu

SEQ ID NO: 400656 - RNA, 32 nt, Human
cucugcugaccugcugaccugugcacacccca

SEQ ID NO: 400657 - RNA, 22 nt, Human
cucugcugacucugcagccccg

SEQ ID NO: 400658 - RNA, 31 nt, Human
cucugcugacuucuguccuuuuuggcagagc

SEQ ID NO: 400659 - RNA, 32 nt, Human
cucugcugagugacguaggcucugagauagcu

SEQ ID NO: 400660 - RNA, 32 nt, Human
cucugcugaucugagucugccugcagcaugga

SEQ ID NO: 400661 - RNA, 32 nt, Human
cucugcugcagauggaacaacagccauggaga

SEQ ID NO: 400662 - RNA, 32 nt, Human
cucugcugcagcccuggcugggcagacaggac

SEQ ID NO: 400663 - RNA, 20 nt, Human
cucugcugcagccgcugccg

SEQ ID NO: 400664 - RNA, 20 nt, Human
cucugcugcagcggcuccug

SEQ ID NO: 400665 - RNA, 32 nt, Human
cucugcugcagcuuuuucucucaguguucugg

SEQ ID NO: 400666 - RNA, 32 nt, Human
cucugcugcaguggaucccaggaagcuggcac

SEQ ID NO: 400667 - RNA, 32 nt, Human
cucugcugccagcccuuccucacuuuuggaaa

SEQ ID NO: 400668 - RNA, 26 nt, Human
cucugcugcccaggcuagagugcagu

SEQ ID NO: 400669 - RNA, 32 nt, Human
cucugcugcccaggcuagagugcaguggcgug

SEQ ID NO: 400670 - RNA, 32 nt, Human
cucugcugcccaggcuggaaugcaguggugcc

SEQ ID NO: 400671 - RNA, 26 nt, Human
cucugcugcccaggcuggaguacagu

SEQ ID NO: 400672 - RNA, 32 nt, Human
cucugcugcccaggcuggaguacagugaugug

SEQ ID NO: 400673 - RNA, 32 nt, Human
cucugcugcccaggcuggaguacaguggcaca

SEQ ID NO: 400674 - RNA, 32 nt, Human
cucugcugcccgggcuagagugcagugguggg

SEQ ID NO: 400675 - RNA, 32 nt, Human
cucugcugccuaggcugagugcagugguguga

SEQ ID NO: 400676 - RNA, 32 nt, Human
cucugcugccucuuugcuuucucucugagaug

SEQ ID NO: 400677 - RNA, 32 nt, Human
cucugcugccugggcaugggccugagugaggg

SEQ ID NO: 400678 - RNA, 20 nt, Human
cucugcugcgucuuugccca

SEQ ID NO: 400679 - RNA, 19 nt, Human
cucugcugcuaggcuucug

SEQ ID NO: 400680 - RNA, 32 nt, Human
cucugcugcucaggcuggagugcaguggugca

SEQ ID NO: 400681 - RNA, 32 nt, Human
cucugcugcuuugaaaucugguugaaaugaga

SEQ ID NO: 400682 - RNA, 32 nt, Human
cucugcugcuuuuggggaaugaggggaagcca

SEQ ID NO: 400683 - RNA, 23 nt, Human
cucugcuggaaacagcaggaaug

SEQ ID NO: 400684 - RNA, 32 nt, Human
cucugcuggcucaggaggaggggugagagacc

SEQ ID NO: 400685 - RNA, 32 nt, Human
cucugcuggcuucuuuuuccaugcguuaacuu

SEQ ID NO: 400686 - RNA, 32 nt, Human
cucugcugggaggagcgguuagagugugugug

SEQ ID NO: 400687 - RNA, 32 nt, Human
cucugcugggcgcgaaccugcccacccaccgg

SEQ ID NO: 400688 - RNA, 32 nt, Human
cucugcugguaguaaggaggccaguuuggagg

SEQ ID NO: 400689 - RNA, 20 nt, Human
cucugcuggucucuggcucu

SEQ ID NO: 400690 - RNA, 18 nt, Human
cucugcugguggcuccug

SEQ ID NO: 400691 - RNA, 23 nt, Human
cucugcugguucccaggcugcug

SEQ ID NO: 400692 - RNA, 32 nt, Human
cucugcugguuuggggcacaaggaagccuuag

SEQ ID NO: 400693 - RNA, 32 nt, Human
cucugcugucaacuucccaucuggcucagcau

SEQ ID NO: 400694 - RNA, 32 nt, Human
cucugcugucagcuucccaucuggcucagcau

SEQ ID NO: 400695 - RNA, 32 nt, Human
cucugcugucagucuuuguuucucccaguuuu

SEQ ID NO: 400696 - RNA, 21 nt, Human
cucugcugugaacacaccacu

SEQ ID NO: 400697 - RNA, 32 nt, Human
cucugcugugacgccacagccuggugaggagg

SEQ ID NO: 400698 - RNA, 32 nt, Human
cucugcugugcuggcuucccaugaccaccucc

SEQ ID NO: 400699 - RNA, 32 nt, Human
cucugcuuaccugucuggcucagcuugggcaa

SEQ ID NO: 400700 - RNA, 32 nt, Human
cucugcuuagcuggugggcaggggagagaggg

SEQ ID NO: 400701 - RNA, 32 nt, Human
cucugcuuagggugguuugaggugaguucuga

SEQ ID NO: 400702 - RNA, 32 nt, Human
cucugcuuccacucccuuucccauucaggcug

SEQ ID NO: 400703 - RNA, 32 nt, Human
cucugcuuccaggacugcccgaguguggaagg

SEQ ID NO: 400704 - RNA, 32 nt, Human
cucugcuuccauuuaaagcauggcaguggguu

SEQ ID NO: 400705 - RNA, 32 nt, Human
cucugcuucccggguucacaagcaauucucau

SEQ ID NO: 400706 - RNA, 18 nt, Human
cucugcuuccucagcccu

SEQ ID NO: 400707 - RNA, 20 nt, Human
cucugcuuccuggccaccug

SEQ ID NO: 400708 - RNA, 19 nt, Human
cucugcuuccugggcccug

SEQ ID NO: 400709 - RNA, 21 nt, Human
cucugcuucgcugcgccucca

SEQ ID NO: 400710 - RNA, 18 nt, Human
cucugcuucguggccccu

SEQ ID NO: 400711 - RNA, 32 nt, Human
cucugcuucuaguucuccaccuccagguuggg

SEQ ID NO: 400712 - RNA, 32 nt, Human
cucugcuucucccaccacuuagucucaacccg

SEQ ID NO: 400713 - RNA, 32 nt, Human
cucugcuucucccguuugccuccuuaucauga

SEQ ID NO: 400714 - RNA, 32 nt, Human
cucugcuucucccuccuccucaguaauuuauu

SEQ ID NO: 400715 - RNA, 32 nt, Human
cucugcuucucccucugccccucuccaggcgc

SEQ ID NO: 400716 - RNA, 18 nt, Human
cucugcuucucucuugcu

SEQ ID NO: 400717 - RNA, 20 nt, Human
cucugcuucucugacuucug

SEQ ID NO: 400718 - RNA, 17 nt, Human
cucugcuucugggcucc

SEQ ID NO: 400719 - RNA, 21 nt, Human
cucugcuucuugcuuugccca

SEQ ID NO: 400720 - RNA, 32 nt, Human
cucugcuugccacccuuggggccuccuucagu

SEQ ID NO: 400721 - RNA, 18 nt, Human
cucugcuugcggccccug

SEQ ID NO: 400722 - RNA, 24 nt, Human
cucugcuuggccacagcuuugcuc

SEQ ID NO: 400723 - RNA, 32 nt, Human
cucugcuuguugcucguccugcccuaaaccuu

SEQ ID NO: 400724 - RNA, 32 nt, Human
cucugcuuguuggcuuccgugugucaucaggg

SEQ ID NO: 400725 - RNA, 19 nt, Human
cucugcuuucuuccugcca

SEQ ID NO: 400726 - RNA, 32 nt, Human
cucugcuuucuuuccguccccuugggaucccu

SEQ ID NO: 400727 - RNA, 32 nt, Human
cucugcuuugggcucugcaggccaccagauac

SEQ ID NO: 400728 - RNA, 19 nt, Human
cucugcuuugggguuccug

SEQ ID NO: 400729 - RNA, 21 nt, Human
cucugcuuuucaucucugcuu

SEQ ID NO: 400730 - RNA, 32 nt, Human
cucuggaaacuggggucccacccuggggacuu

SEQ ID NO: 400731 - RNA, 32 nt, Human
cucuggaaagacaaucuagggagcccagaggc

SEQ ID NO: 400732 - RNA, 22 nt, Human
cucuggaaagacagcacaggcc

SEQ ID NO: 400733 - RNA, 32 nt, Human
cucuggaaaggggucauccucagucugauaau

SEQ ID NO: 400734 - RNA, 32 nt, Human
cucuggaaagucgugcacagcccaggaguguu

SEQ ID NO: 400735 - RNA, 32 nt, Human
cucuggaacccuguggcuucaaauccuuuggg

SEQ ID NO: 400736 - RNA, 32 nt, Human
cucuggaacuauucuucuagacuaucccacau

SEQ ID NO: 400737 - RNA, 32 nt, Human
cucuggaacucacaaaagcuggcuuuuauucc

SEQ ID NO: 400738 - RNA, 32 nt, Human
cucuggaacucaggugcuccugcuccaagguu

SEQ ID NO: 400739 - RNA, 32 nt, Human
cucuggaacugcuuccaugcaggugaggaggc

SEQ ID NO: 400740 - RNA, 32 nt, Human
cucuggaacuucuuccuuccuccugccucugc

SEQ ID NO: 400741 - RNA, 22 nt, Human
cucuggaagagcaguaucagca

SEQ ID NO: 400742 - RNA, 32 nt, Human
cucuggaagaggccuucccauggccauuucug

SEQ ID NO: 400743 - RNA, 32 nt, Human
cucuggaagaguugggauuauggaugcaugga

SEQ ID NO: 400744 - RNA, 19 nt, Human
cucuggaagcagcaucagg

SEQ ID NO: 400745 - RNA, 32 nt, Human
cucuggaagcagcucugaggggaacagucaca

SEQ ID NO: 400746 - RNA, 32 nt, Human
cucuggaagcggguccaaggugcugucacccc

SEQ ID NO: 400747 - RNA, 32 nt, Human
cucuggaagcgguacuguaucucucuccaagg

SEQ ID NO: 400748 - RNA, 32 nt, Human
cucuggaaggccacggcaggaggaucacuuua

SEQ ID NO: 400749 - RNA, 32 nt, Human
cucuggaagugacuccucuguccucuggaauc

SEQ ID NO: 400750 - RNA, 22 nt, Human
cucuggaaugaacaguaucaca

SEQ ID NO: 400751 - RNA, 32 nt, Human
cucuggacaaugaccagcacagagcccuaagc

SEQ ID NO: 400752 - RNA, 32 nt, Human
cucuggacacgugcugcagcuguggcugaggc

SEQ ID NO: 400753 - RNA, 32 nt, Human
cucuggacaggcaaggggaguuggcgcaggug

SEQ ID NO: 400754 - RNA, 32 nt, Human
cucuggacagguggggcacugaggcagcccag

SEQ ID NO: 400755 - RNA, 32 nt, Human
cucuggaccagccuguuggacccgcucuggac

SEQ ID NO: 400756 - RNA, 32 nt, Human
cucuggacccaguuaugcuuuuccugaauugc

SEQ ID NO: 400757 - RNA, 32 nt, Human
cucuggacccccacccuccauccucacccagc

SEQ ID NO: 400758 - RNA, 19 nt, Human
cucuggacccccagccagg

SEQ ID NO: 400759 - RNA, 32 nt, Human
cucuggaccuagccugucccagaagaggagaa

SEQ ID NO: 400760 - RNA, 32 nt, Human
cucuggaccuuucccccucucccugcggccuu

SEQ ID NO: 400761 - RNA, 32 nt, Human
cucuggacggccucucugaacuccuuugugag

SEQ ID NO: 400762 - RNA, 32 nt, Human
cucuggacucacagcuuccacccuuucacaca

SEQ ID NO: 400763 - RNA, 32 nt, Human
cucuggacucagugcuuccugucccaaggacc

SEQ ID NO: 400764 - RNA, 32 nt, Human
cucuggacugcacuguagggccuggagaccug

SEQ ID NO: 400765 - RNA, 32 nt, Human
cucuggacugcccagacccuucagagccagca

SEQ ID NO: 400766 - RNA, 32 nt, Human
cucuggacuguuuccccucucagcaucgcuuu

SEQ ID NO: 400767 - RNA, 32 nt, Human
cucuggacuucugcccucuuuugugccaugug

SEQ ID NO: 400768 - RNA, 32 nt, Human
cucuggagaccccagccccagagggcuuugug

SEQ ID NO: 400769 - RNA, 32 nt, Human
cucuggagagcaauguugaaucccugagaaga

SEQ ID NO: 400770 - RNA, 32 nt, Human
cucuggagaggugguuuaaagugagauuaugc

SEQ ID NO: 400771 - RNA, 32 nt, Human
cucuggagcaauguugcuuaggaugugugcau

SEQ ID NO: 400772 - RNA, 32 nt, Human
cucuggagcagcacuggcaggagcugcagcuu

SEQ ID NO: 400773 - RNA, 32 nt, Human
cucuggagccauccugauggcuuugggggccu

SEQ ID NO: 400774 - RNA, 30 nt, Human
cucuggagccucuccuuccuguucucuguc

SEQ ID NO: 400775 - RNA, 32 nt, Human
cugaaggugaaaugcagaguuggauaagaaau

SEQ ID NO: 400776 - RNA, 32 nt, Human
cugaaggugcaggggugagagcagggaaaugg

SEQ ID NO: 400777 - RNA, 32 nt, Human
cugaaggugggagccggugugggagcuuuuac

SEQ ID NO: 400778 - RNA, 22 nt, Human
cugaagguggggccuagggagg

SEQ ID NO: 400779 - RNA, 32 nt, Human
cugaagguggggucaagggaggccccaaaaca

SEQ ID NO: 400780 - RNA, 32 nt, Human
cugaagguguuccguggucagugagggcuggc

SEQ ID NO: 400781 - RNA, 32 nt, Human
cugaagguuaauuugaucaccaauggccaaug

SEQ ID NO: 400782 - RNA, 32 nt, Human
cugaagguucuugaggaucuaguuucaugccu

SEQ ID NO: 400783 - RNA, 32 nt, Human
cugaagguuguggcugacccauucuccuggga

SEQ ID NO: 400784 - RNA, 32 nt, Human
cugaaguaaccagcaaccuaggaacauagaag

SEQ ID NO: 400785 - RNA, 32 nt, Human
cugaaguaccaguuuccauuccugggcugaga

SEQ ID NO: 400786 - RNA, 25 nt, Human
cugaaguagcugggacuacaggcgu

SEQ ID NO: 400787 - RNA, 23 nt, Human
cugaaguagcugggauuacaggc

SEQ ID NO: 400788 - RNA, 32 nt, Human
cugaaguaucugugugcuuccagaaagcuuac

SEQ ID NO: 400789 - RNA, 32 nt, Human
cugaagucagaaguuugagaccagccuggcaa

SEQ ID NO: 400790 - RNA, 32 nt, Human
cugaagucagaaguuugagaccagccuggcca

SEQ ID NO: 400791 - RNA, 32 nt, Human
cugaagucagaaguuugagaccagccuugcca

SEQ ID NO: 400792 - RNA, 32 nt, Human
cugaagucagaauaugaaguggagcuaggaau

SEQ ID NO: 400793 - RNA, 32 nt, Human
cugaagucagcccuuugugucguccccuggcg

SEQ ID NO: 400794 - RNA, 32 nt, Human
cugaagucaggaguuaaagaccagccuggcca

SEQ ID NO: 400795 - RNA, 32 nt, Human
cugaagucaggaguuagagaccagccugucca

SEQ ID NO: 400796 - RNA, 32 nt, Human
cugaagucaggaguucaagaccauccuggcca

SEQ ID NO: 400797 - RNA, 32 nt, Human
cugaagucaggaguucgagaccagccuggcca

SEQ ID NO: 400798 - RNA, 32 nt, Human
cugaagucaggaguuugagaccagccugggca

SEQ ID NO: 400799 - RNA, 32 nt, Human
cugaagucagggauuugagaccagccuggcca

SEQ ID NO: 400800 - RNA, 32 nt, Human
cugaagucagguguuugagaccagccuggcca

SEQ ID NO: 400801 - RNA, 32 nt, Human
cugaaguccaauagaggagacuugaucucuag

SEQ ID NO: 400802 - RNA, 32 nt, Human
cugaaguccggaguuugagaccagccuggcca

SEQ ID NO: 400803 - RNA, 32 nt, Human
cugaagucucaaaucauugucuggaauuuucc

SEQ ID NO: 400804 - RNA, 32 nt, Human
cugaagucucacugcugagccuucagcuuuua

SEQ ID NO: 400805 - RNA, 32 nt, Human
cugaagucuccuggcauauguuaccgaaucaa

SEQ ID NO: 400806 - RNA, 32 nt, Human
cugaagucugguauucugguauucuggguuca

SEQ ID NO: 400807 - RNA, 32 nt, Human
cugaagucuguaauccuagcacuuugggaggc

SEQ ID NO: 400808 - RNA, 23 nt, Human
cugaagugaccaggcugaaaggg

SEQ ID NO: 400809 - RNA, 32 nt, Human
cugaagugaccaggcugaaagggaagcaauac

SEQ ID NO: 400810 - RNA, 32 nt, Human
cugaagugagccaggcagcucuggccaucuuu

SEQ ID NO: 400811 - RNA, 32 nt, Human
cugaagugagguagcagcucucuucugucagc

SEQ ID NO: 400812 - RNA, 32 nt, Human
cugaagugcagguugcucacagcauccuacaa

SEQ ID NO: 400813 - RNA, 32 nt, Human
cugaagugccaagagagcugagaggagcaguu

SEQ ID NO: 400814 - RNA, 32 nt, Human
cugaagugccucuucccuccccugcuggcgcu

SEQ ID NO: 400815 - RNA, 32 nt, Human
cugaagugccugaagguaggaaugggccggcg

SEQ ID NO: 400816 - RNA, 32 nt, Human
cugaagugcucagcauccuccucuuccucggu

SEQ ID NO: 400817 - RNA, 21 nt, Human
cugaagugcugggauuacagg

SEQ ID NO: 400818 - RNA, 22 nt, Human
cugaagugcugggauuacaggc

SEQ ID NO: 400819 - RNA, 24 nt, Human
cugaagugcugggauuacaggcgu

SEQ ID NO: 400820 - RNA, 20 nt, Human
cugaagugcugggauucagg

SEQ ID NO: 400821 - RNA, 32 nt, Human
cugaaguggaaguggacugacaugcucuucug

SEQ ID NO: 400822 - RNA, 32 nt, Human
cugaaguggagcgagagggaggugcuucgccg

SEQ ID NO: 400823 - RNA, 32 nt, Human
cugaaguggcaccaucuuuucugucuuccuga

SEQ ID NO: 400824 - RNA, 32 nt, Human
cugaagugggagaagaagcagguagaccaccu

SEQ ID NO: 400825 - RNA, 24 nt, Human
cugaagugggcagaucacgagguc

SEQ ID NO: 400826 - RNA, 32 nt, Human
cugaagugggcagauuacuugaggucaggagu

SEQ ID NO: 400827 - RNA, 32 nt, Human
cugaagugggguccccaacaagaucagaaagg

SEQ ID NO: 400828 - RNA, 32 nt, Human
cugaagugggugaaucacuugaggucaggagu

SEQ ID NO: 400829 - RNA, 21 nt, Human
cugaaguggguggaucacaag

SEQ ID NO: 400830 - RNA, 29 nt, Human
cugaagugucuguauguggucuuggcugg

SEQ ID NO: 400831 - RNA, 20 nt, Human
cugaagugugccaggcaagg

SEQ ID NO: 400832 - RNA, 32 nt, Human
cugaaguguggacaugauggcaggagcugcag

SEQ ID NO: 400833 - RNA, 32 nt, Human
cugaagugugggcugcaggugaacaggaauug

SEQ ID NO: 400834 - RNA, 24 nt, Human
cugaaguguuaggauuacaggcgu

SEQ ID NO: 400835 - RNA, 32 nt, Human
cugaaguguuccuuugggauccugguucccaa

SEQ ID NO: 400836 - RNA, 32 nt, Human
cugaaguuaugcauacuucugguaaaacaagu

SEQ ID NO: 400837 - RNA, 32 nt, Human
cugaaguucuuccagcaggucuguaaccacaa

SEQ ID NO: 400838 - RNA, 32 nt, Human
cugaaguugcuuaucagguuaaggagauuuug

SEQ ID NO: 400839 - RNA, 32 nt, Human
cugaaguuggcuuuucagccagcacugaaugu

SEQ ID NO: 400840 - RNA, 32 nt, Human
cugaaguuuccuuuuuguuaugucucuuucgg

SEQ ID NO: 400841 - RNA, 32 nt, Human
cugaaguuuuagcgcucagaacauggggaccc

SEQ ID NO: 400842 - RNA, 32 nt, Human
cugaaguuuucuagucccuccuuuuuguuugu

SEQ ID NO: 400843 - RNA, 32 nt, Human
cugaauaaggauuccaaagaggggacaccggc

SEQ ID NO: 400844 - RNA, 32 nt, Human
cugaauaagucucucauaaugagugcaguguc

SEQ ID NO: 400845 - RNA, 32 nt, Human
cugaauaaugucccucauuuugacuauaacug

SEQ ID NO: 400846 - RNA, 32 nt, Human
cugaauacaacacaacuagggucuaaaagaaa

SEQ ID NO: 400847 - RNA, 32 nt, Human
cugaauacauauaaugacuaugugccagcauu

SEQ ID NO: 400848 - RNA, 19 nt, Human
cugaauaccacuuaccuca

SEQ ID NO: 400849 - RNA, 32 nt, Human
cugaauagcaaggaccuucuggaacauaaucu

SEQ ID NO: 400850 - RNA, 21 nt, Human
cugaauagcugggacuacagg

SEQ ID NO: 400851 - RNA, 22 nt, Human
cugaauagcugggauuacaggc

SEQ ID NO: 400852 - RNA, 32 nt, Human
cugaauaggacuagcaacuucauagacgguug

SEQ ID NO: 400853 - RNA, 32 nt, Human
cugaauaguuaaaccuuugauggccauaaccu

SEQ ID NO: 400854 - RNA, 32 nt, Human
cugaauaguucuccccuuugagugcauuuaac

SEQ ID NO: 400855 - RNA, 32 nt, Human
cugaauaucaagagcaagacucuccaguaaca

SEQ ID NO: 400856 - RNA, 32 nt, Human
cugaauauuuuugagcaauuucuauaugauaa

SEQ ID NO: 400857 - RNA, 32 nt, Human
cugaaucacauagauucuccuccgucaguaac

SEQ ID NO: 400858 - RNA, 32 nt, Human
cugaaucaccagcauucaaacaaauauuucgg

SEQ ID NO: 400859 - RNA, 19 nt, Human
cugaaucacuguggccuca

SEQ ID NO: 400860 - RNA, 32 nt, Human
cugaauccaguggagcugggccaaguacgaca

SEQ ID NO: 400861 - RNA, 32 nt, Human
cugaauccgcagggaugucaacgucaauauca

SEQ ID NO: 400862 - RNA, 32 nt, Human
cugaauccgggcucuguagcagguccucuucu

SEQ ID NO: 400863 - RNA, 32 nt, Human
cugaaucgucugcuucccaaaauuccuauguu

SEQ ID NO: 400864 - RNA, 32 nt, Human
cugaaucuauuuuacagggaagcaucggaagg

SEQ ID NO: 400865 - RNA, 32 nt, Human
cugaaucucaagaguuaucugaaagugauaga

SEQ ID NO: 400866 - RNA, 32 nt, Human
cugaaucucaagaugggggcagggcugugcuu

SEQ ID NO: 400867 - RNA, 32 nt, Human
cugaaucucauucaccaugcugcccaggggcc

SEQ ID NO: 400868 - RNA, 32 nt, Human
cugaaucuccaggccucacgagguccccugug

SEQ ID NO: 400869 - RNA, 32 nt, Human
cugaaucucugacuuauugauuauggaaccug

SEQ ID NO: 400870 - RNA, 32 nt, Human
cugaaucucuguccugccacacauggucccag

SEQ ID NO: 400871 - RNA, 32 nt, Human
cugaaucugccaacgugguguuggaggcucca

SEQ ID NO: 400872 - RNA, 32 nt, Human
cugaaucugcuuguugaucaguguuugaagaa

SEQ ID NO: 400873 - RNA, 32 nt, Human
cugaaucugucuacccuucauucaugagaacu

SEQ ID NO: 400874 - RNA, 32 nt, Human
cugaaucuuuuggcccccuccugcaucccagg

SEQ ID NO: 400875 - RNA, 32 nt, Human
cugaaugaagacaaagaugauuuuaaagggcc

SEQ ID NO: 400876 - RNA, 32 nt, Human
cugaaugacaggcuuuauauaacugugucaac

SEQ ID NO: 400877 - RNA, 32 nt, Human
cugaaugacaugcucacagucacacagcaggc

SEQ ID NO: 400878 - RNA, 32 nt, Human
cugaaugagaagcccgcccugcccgucauccg

SEQ ID NO: 400879 - RNA, 32 nt, Human
cugaaugagcgggcguuuccuccuggggugac

SEQ ID NO: 400880 - RNA, 32 nt, Human
cugaaugagcuuggaagcagauuucuccucag

SEQ ID NO: 400881 - RNA, 32 nt, Human
cugaaugaguuuggaagcagauucuucccagc

SEQ ID NO: 400882 - RNA, 32 nt, Human
cugaaugcaccuauuauaaucuguggccccag

SEQ ID NO: 400883 - RNA, 31 nt, Human
cugaaugccaccucugggccucugcuccugg

SEQ ID NO: 400884 - RNA, 32 nt, Human
cugaaugccaccuggaaaacagccuggaccug

SEQ ID NO: 400885 - RNA, 32 nt, Human
cugaaugccaucacccuccccagggcucugca

SEQ ID NO: 400886 - RNA, 20 nt, Human
cugaaugccucucagcauca

SEQ ID NO: 400887 - RNA, 32 nt, Human
cugaaugccugagacucuagcagaaauggccu

SEQ ID NO: 400888 - RNA, 32 nt, Human
cugaaugcuaggcuggaaaguggugccuguug

SEQ ID NO: 400889 - RNA, 32 nt, Human
cugaaugcugccucuucuaccccuauguccaa

SEQ ID NO: 400890 - RNA, 32 nt, Human
cugaaugcuggaauuggcaauauuucagguuc

SEQ ID NO: 400891 - RNA, 32 nt, Human
cugaauggaauaaggcuaaaaauauguuuagu

SEQ ID NO: 400892 - RNA, 32 nt, Human
cugaauggacccucuucuaggccaaagagacc

SEQ ID NO: 400893 - RNA, 32 nt, Human
cugaauggagaaacguagucuuaccucguuuu

SEQ ID NO: 400894 - RNA, 32 nt, Human
cugaauggcagaaaggcgccuaccucaaggac

SEQ ID NO: 400895 - RNA, 32 nt, Human
cugaaugggagagagagggaagggggaaaugg

SEQ ID NO: 400896 - RNA, 32 nt, Human
cugaaugggagccagaauucacuaggagguca

SEQ ID NO: 400897 - RNA, 32 nt, Human
cugaaugggggagggggaggggagcacggggu

SEQ ID NO: 400898 - RNA, 31 nt, Human
cugaauggggguggaccuggcauuuaucugg

SEQ ID NO: 400899 - RNA, 32 nt, Human
cugaaugguauucgacgaguccuggccuucau

SEQ ID NO: 400900 - RNA, 32 nt, Human
cugaauggucugucauugucugccuuuaaaau

SEQ ID NO: 400901 - RNA, 32 nt, Human
cugaauguacugugugaugaugcaucaugcau

SEQ ID NO: 400902 - RNA, 32 nt, Human
cugaaugucccccgccugccgaguggcuggcg

SEQ ID NO: 400903 - RNA, 32 nt, Human
cugaauguggauacauuauuccuucacacagu

SEQ ID NO: 400904 - RNA, 32 nt, Human
cugaauguguaugucugugugggugcucuguc

SEQ ID NO: 400905 - RNA, 32 nt, Human
cugaauguguggucagcaucuguacaaaugca

SEQ ID NO: 400906 - RNA, 32 nt, Human
cugaauguuaaggauggggaaaaagaaugccu

SEQ ID NO: 400907 - RNA, 32 nt, Human
cugaauguuaaugucacaucugccuuuggaga

SEQ ID NO: 400908 - RNA, 32 nt, Human
cugaauguuugucccuaacauaggauuucaga

SEQ ID NO: 400909 - RNA, 32 nt, Human
cugaauguuuguccuucacauaccauuccaga

SEQ ID NO: 400910 - RNA, 32 nt, Human
cugaauuacccccauccuccuccuuucuggaa

SEQ ID NO: 400911 - RNA, 32 nt, Human
cugaauuacuauucuuuuagaaguugagacag

SEQ ID NO: 400912 - RNA, 32 nt, Human
cugaauucccuucaaagccaaaguuucuugag

SEQ ID NO: 400913 - RNA, 32 nt, Human
cugaauuccugcgccuuccugacgugagcccu

SEQ ID NO: 400914 - RNA, 32 nt, Human
cugaauucugccucccuguuauagucccuguc

SEQ ID NO: 400915 - RNA, 32 nt, Human
cugaauugaauccauuguugggcuuaaguuac

SEQ ID NO: 400916 - RNA, 32 nt, Human
cugaauugcuggcuaauuucuugauuugccac

SEQ ID NO: 400917 - RNA, 32 nt, Human
cugaauugcuggcuaauuucuugauuugcgac

SEQ ID NO: 400918 - RNA, 32 nt, Human
cugaauuggcaagucuguggugcugcucuuug

SEQ ID NO: 400919 - RNA, 32 nt, Human
cugaauuuauuuccucuccuucccccacccag

SEQ ID NO: 400920 - RNA, 32 nt, Human
cugaauuucacucccgcuucagugggguuucu

SEQ ID NO: 400921 - RNA, 18 nt, Human
cugaauuucuggguccuu

SEQ ID NO: 400922 - RNA, 32 nt, Human
cugaauuucuuaugacccucccaaaccaaagc

SEQ ID NO: 400923 - RNA, 32 nt, Human
cugaauuugcagcauuuucucaggugcuuuuu

SEQ ID NO: 400924 - RNA, 32 nt, Human
cugaauuugcagcugucucucugaugggugcc

SEQ ID NO: 400925 - RNA, 32 nt, Human
cugaauuuggauugccugcucucuuuaaagcg

SEQ ID NO: 400926 - RNA, 32 nt, Human
cugaauuuuccaacccacccccaaacuaaaca

SEQ ID NO: 400927 - RNA, 32 nt, Human
cugaauuuugaggcugggauuggcaacucugg

SEQ ID NO: 400928 - RNA, 32 nt, Human
cugaauuuugcuuccuuugggagcucauucuu

SEQ ID NO: 400929 - RNA, 32 nt, Human
cugaauuuuugggagcaggcaauaucugaagg

SEQ ID NO: 400930 - RNA, 32 nt, Human
cugacaaacaaccugcuccguggacgccugaa

SEQ ID NO: 400931 - RNA, 22 nt, Human
cugacaaacauggagaaacccc

SEQ ID NO: 400932 - RNA, 32 nt, Human
cugacaaacuuccaucaacccaaaaaguucca

SEQ ID NO: 400933 - RNA, 32 nt, Human
cugacaaagaagcccagggaggggaagagggu

SEQ ID NO: 400934 - RNA, 32 nt, Human
cugacaaagaggaggagcuggaggaagcaugc

SEQ ID NO: 400935 - RNA, 32 nt, Human
cugacaaaggggaagaaagacauaaagaaaag

SEQ ID NO: 400936 - RNA, 32 nt, Human
cugacaacacacugcccaugaagcuagggcag

SEQ ID NO: 400937 - RNA, 32 nt, Human
cugacaaccacagccauuucucugcacggggg

SEQ ID NO: 400938 - RNA, 32 nt, Human
cugacaaccagcugcagugucuaaguguuccu

SEQ ID NO: 400939 - RNA, 23 nt, Human
cugacaaccaguccuccacauca

SEQ ID NO: 400940 - RNA, 32 nt, Human
cugacaacccaaaacauauauacagauuguug

SEQ ID NO: 400941 - RNA, 32 nt, Human
cugacaacugagaguuuuagaagauuagacca

SEQ ID NO: 400942 - RNA, 32 nt, Human
cugacaacuuggcuuccaucuugugaggaccu

SEQ ID NO: 400943 - RNA, 19 nt, Human
cugacaagaaacacauucu

SEQ ID NO: 400944 - RNA, 32 nt, Human
cugacaagagcugagggagaaaauagaccuau

SEQ ID NO: 400945 - RNA, 32 nt, Human
cugacaaggagugaagcgcccacccagcggau

SEQ ID NO: 400946 - RNA, 32 nt, Human
cugacaagggcugaccugccucucacacacau

SEQ ID NO: 400947 - RNA, 32 nt, Human
cugacaagucugucuucucuucuugguuucau

SEQ ID NO: 400948 - RNA, 32 nt, Human
cugacaauccuugagaaucuuugcaugcagag

SEQ ID NO: 400949 - RNA, 32 nt, Human
cugacacaaaccaagaaaagguggugauugcc

SEQ ID NO: 400950 - RNA, 32 nt, Human
cugacacacacguuuccccgcugacggccacg

SEQ ID NO: 400951 - RNA, 20 nt, Human
cugacacacccucuggugcc

SEQ ID NO: 400952 - RNA, 24 nt, Human
cugacacacccuucccaauugcca

SEQ ID NO: 400953 - RNA, 21 nt, Human
cugacacagagccaucugcca

SEQ ID NO: 400954 - RNA, 32 nt, Human
cugacacagcaucacaucacacacacagaaau

SEQ ID NO: 400955 - RNA, 32 nt, Human
cugacacagccccagaccccacaaagccuucu

SEQ ID NO: 400956 - RNA, 32 nt, Human
cugacacaggaaaucauuucuaggacacagug

SEQ ID NO: 400957 - RNA, 32 nt, Human
cugacacaggaaccuucuggaagcacugauua

SEQ ID NO: 400958 - RNA, 22 nt, Human
cugacacagguguggcuacugg

SEQ ID NO: 400959 - RNA, 23 nt, Human
cugacacaucucgucuccccucu

SEQ ID NO: 400960 - RNA, 32 nt, Human
cugacaccaaaguauuuuaaacaaauaaaagg

SEQ ID NO: 400961 - RNA, 32 nt, Human
cugacaccacaaaauggacuuugcagguguga

SEQ ID NO: 400962 - RNA, 32 nt, Human
cugacaccaucucucccagcagucuugggguc

SEQ ID NO: 400963 - RNA, 32 nt, Human
cugacaccauggucaacuccuguuguggcucu

SEQ ID NO: 400964 - RNA, 32 nt, Human
cugacacccacuucuuuucuccuuccuccagg

SEQ ID NO: 400965 - RNA, 32 nt, Human
cugacaccccaccucuccccagaagagaagaa

SEQ ID NO: 400966 - RNA, 32 nt, Human
cugacaccccucccccuaauucucaucuguca

SEQ ID NO: 400967 - RNA, 32 nt, Human
cugacacccuucuccccuuccugguagaccuu

SEQ ID NO: 400968 - RNA, 32 nt, Human
cugacacccuucucuuucuucuuuuucuucac

SEQ ID NO: 400969 - RNA, 32 nt, Human
cugacacccuugugcuauuaauaaccagaaua

SEQ ID NO: 400970 - RNA, 32 nt, Human
cugacaccuaguuuaccaacauguuaauaaac

SEQ ID NO: 400971 - RNA, 32 nt, Human
cugacaccuauaaucucagcacuuugggaggc

SEQ ID NO: 400972 - RNA, 32 nt, Human
cugacaccuccagguccgccuggcaugggaca

SEQ ID NO: 400973 - RNA, 23 nt, Human
cugacaccuccccacaaccugca

SEQ ID NO: 400974 - RNA, 32 nt, Human
cugacaccucggccuuuucucuuccggagggg

SEQ ID NO: 400975 - RNA, 32 nt, Human
cugacaccugagucuuucuccugcugcacgga

SEQ ID NO: 400976 - RNA, 24 nt, Human
cugacaccugcaaucccaacauuu

SEQ ID NO: 400977 - RNA, 19 nt, Human
cugacaccugcugccugca

SEQ ID NO: 400978 - RNA, 32 nt, Human
cugacaccugggcuggagugcaguggugcaau

SEQ ID NO: 400979 - RNA, 32 nt, Human
cugacaccuguaaucccagcacauugggaggc

SEQ ID NO: 400980 - RNA, 32 nt, Human
cugacaccuguaaucccagcacuuugggaggc

SEQ ID NO: 400981 - RNA, 32 nt, Human
cugacaccuguaaucccagcauuuugggagac

SEQ ID NO: 400982 - RNA, 32 nt, Human
cugacaccuugauuuuagccuuggaagacuca

SEQ ID NO: 400983 - RNA, 25 nt, Human
cugacacgcagccuaguuccuuccu

SEQ ID NO: 400984 - RNA, 21 nt, Human
cugacacggagccaaugcaga

SEQ ID NO: 400985 - RNA, 32 nt, Human
cugacacgucucacagccuuccugccuucacu

SEQ ID NO: 400986 - RNA, 32 nt, Human
cugacacuaagcuagcacacagcacuugggcc

SEQ ID NO: 400987 - RNA, 22 nt, Human
cugacacucaugcagaaugaga

SEQ ID NO: 400988 - RNA, 21 nt, Human
cugacacugcaaaccugcaug

SEQ ID NO: 400989 - RNA, 32 nt, Human
cugacacugcaaaccugcaugggugggcuuug

SEQ ID NO: 400990 - RNA, 32 nt, Human
cugacacugccauuuuuccuuuuuggaggaaa

SEQ ID NO: 400991 - RNA, 32 nt, Human
cugacacugcugcaacaugcaacugguguagg

SEQ ID NO: 400992 - RNA, 32 nt, Human
cugacacuggguguugaggucauguggcaguc

SEQ ID NO: 400993 - RNA, 32 nt, Human
cugacacugucacccuccaccgacuuuguuuu

SEQ ID NO: 400994 - RNA, 32 nt, Human
cugacacugucucuuuuuccucccucuauacg

SEQ ID NO: 400995 - RNA, 32 nt, Human
cugacagaaaagagaaucugauagucaacacu

SEQ ID NO: 400996 - RNA, 32 nt, Human
cugacagaaacaagcauuccugccuucccucc

SEQ ID NO: 400997 - RNA, 32 nt, Human
cugacagaacaacaagguuaagcuucaucugc

SEQ ID NO: 400998 - RNA, 32 nt, Human
cugacagaaggugccuuugagagguggugagc

SEQ ID NO: 400999 - RNA, 32 nt, Human
cugacagaagucagggaagagucccuggguua

SEQ ID NO: 401000 - RNA, 18 nt, Human
cugacagaauuggcuuca

SEQ ID NO: 401001 - RNA, 32 nt, Human
cugacagauccaagaccuagaccuaggucuuu

SEQ ID NO: 401002 - RNA, 32 nt, Human
cugacagaugcuuuugcuaauaccaaaauuga

SEQ ID NO: 401003 - RNA, 32 nt, Human
cugacagauggacagaaucucccguagaaagg

SEQ ID NO: 401004 - RNA, 32 nt, Human
cugacagauggcaggggagcaagagcaaguua

SEQ ID NO: 401005 - RNA, 21 nt, Human
cugacagcacaggacccugca

SEQ ID NO: 401006 - RNA, 17 nt, Human
cugacagcaccucagcu

SEQ ID NO: 401007 - RNA, 18 nt, Human
cugacagcaccugugucu

SEQ ID NO: 401008 - RNA, 20 nt, Human
cugacagcaccuugccgccu

SEQ ID NO: 401009 - RNA, 21 nt, Human
cugacagcagcaaaggcacca

SEQ ID NO: 401010 - RNA, 18 nt, Human
cugacagcagccagcuca

SEQ ID NO: 401011 - RNA, 32 nt, Human
cugacagcaggcaagcuucaguuugggcugug

SEQ ID NO: 401012 - RNA, 32 nt, Human
cugacagcaggccagggaagcagugaggccuu

SEQ ID NO: 401013 - RNA, 32 nt, Human
cugacagcaguuuuucauagccucacggauga

SEQ ID NO: 401014 - RNA, 18 nt, Human
cugacagcaugaacuuca

SEQ ID NO: 401015 - RNA, 32 nt, Human
cugacagcauguggugacaggugaugugaggg

SEQ ID NO: 401016 - RNA, 24 nt, Human
cugacagccaaggcagggcacugu

SEQ ID NO: 401017 - RNA, 32 nt, Human
cugacagccagccugccugcugggagccagga

SEQ ID NO: 401018 - RNA, 18 nt, Human
cugacagccccgggccca

SEQ ID NO: 401019 - RNA, 17 nt, Human
cugacagccgcggccuc

SEQ ID NO: 401020 - RNA, 18 nt, Human
cugacagcgccaguccca

SEQ ID NO: 401021 - RNA, 18 nt, Human
cugacagcgcccaccuca

SEQ ID NO: 401022 - RNA, 20 nt, Human
cugacagcggccugacuuca

SEQ ID NO: 401023 - RNA, 32 nt, Human
cugacagcuaucuccuccccuucuccaccaca

SEQ ID NO: 401024 - RNA, 32 nt, Human
cugacagcucacuggaacuuuucaucugcuug

SEQ ID NO: 401025 - RNA, 32 nt, Human
cugacagcuggugacagaugaagacggaagaa

SEQ ID NO: 401026 - RNA, 20 nt, Human
cugacagcuguccugagcua

SEQ ID NO: 401027 - RNA, 32 nt, Human
cugacagcugucgugcccgcagccucugaccu

SEQ ID NO: 401028 - RNA, 18 nt, Human
cugacagcuucagcccca

SEQ ID NO: 401029 - RNA, 32 nt, Human
cugacaggacagucccagcccuaggaaaugaa

SEQ ID NO: 401030 - RNA, 32 nt, Human
cugacaggagcagcagcuaucugucuuuugcu

SEQ ID NO: 401031 - RNA, 32 nt, Human
cugacaggagcaggagacgcugagggaaacag

SEQ ID NO: 401032 - RNA, 32 nt, Human
cugacaggagcgccaggcuccuugggccgccc

SEQ ID NO: 401033 - RNA, 32 nt, Human
cugacaggaguccaagaaugugcacugaggga

SEQ ID NO: 401034 - RNA, 32 nt, Human
cugacaggauuccaaaagccugcuguuugaag

SEQ ID NO: 401035 - RNA, 32 nt, Human
cugacaggcccacugaggacaugggagaggau

SEQ ID NO: 401036 - RNA, 32 nt, Human
cugacaggcccagauuuaggagucaugacgaa

SEQ ID NO: 401037 - RNA, 32 nt, Human
cugacaggcugacaguugggccauauggugcu

SEQ ID NO: 401038 - RNA, 32 nt, Human
cugacaggcuguugcugugccugcucacaccu

SEQ ID NO: 401039 - RNA, 32 nt, Human
cugacagggacgcuggccaacagggugguauu

SEQ ID NO: 401040 - RNA, 32 nt, Human
cugacagggcaccgucaccugacaacuccugc

SEQ ID NO: 401041 - RNA, 32 nt, Human
cugacagggcaugccuugucuccagugguucc

SEQ ID NO: 401042 - RNA, 21 nt, Human
cugacagggcugccuggccuc

SEQ ID NO: 401043 - RNA, 31 nt, Human
cugacaggguaagaagagugagucucaagag

SEQ ID NO: 401044 - RNA, 32 nt, Human
cugacagggucaccuccuccacagagagaauu

SEQ ID NO: 401045 - RNA, 32 nt, Human
cugacagggucuggcuugcccaggcuggagug

SEQ ID NO: 401046 - RNA, 32 nt, Human
cugacagggugaggcccaagccuggagcuuac

SEQ ID NO: 401047 - RNA, 32 nt, Human
cugacaggguuauuguagaacugacauccugg

SEQ ID NO: 401048 - RNA, 32 nt, Human
cugacaggugcuggaugccacaguucccugca

SEQ ID NO: 401049 - RNA, 32 nt, Human
cugacaggugguuacugaaucucucuaugaac

SEQ ID NO: 401050 - RNA, 32 nt, Human
cugacaguaguuugcaaaccagcagcuagcag

SEQ ID NO: 401051 - RNA, 32 nt, Human
cugacagucacuggaaugcuacuccaggccuu

SEQ ID NO: 401052 - RNA, 32 nt, Human
cugacagucauccugggagggucacaguccuc

SEQ ID NO: 401053 - RNA, 32 nt, Human
cugacaguccucuccaccuaguggcuguccag

SEQ ID NO: 401054 - RNA, 32 nt, Human
cugacagugacuccucucucuccagcgcugcc

SEQ ID NO: 401055 - RNA, 32 nt, Human
cugacaguggcagaagcucagcugacaaggac

SEQ ID NO: 401056 - RNA, 22 nt, Human
cugacaguggggccuggccuca

SEQ ID NO: 401057 - RNA, 32 nt, Human
cugacaguguggagaaaccaacaggcaaaacg

SEQ ID NO: 401058 - RNA, 29 nt, Human
cugacaguguuuuaggugccuggauauuu

SEQ ID NO: 401059 - RNA, 22 nt, Human
cugacaguuaaagcagaggacu

SEQ ID NO: 401060 - RNA, 18 nt, Human
cugacaguuucugaggca

SEQ ID NO: 401061 - RNA, 32 nt, Human
cugacauaggaagaugaaagagacugacuugu

SEQ ID NO: 401062 - RNA, 32 nt, Human
cugacauaguaaucccaaaggauuguguuacu

SEQ ID NO: 401063 - RNA, 32 nt, Human
cugacauauuaaagaucuccucuuuuaaacau

SEQ ID NO: 401064 - RNA, 32 nt, Human
cugacaucaggaguucgagaccagccuggcua

SEQ ID NO: 401065 - RNA, 32 nt, Human
cugacaucaggaguuugagaccagcuuggcca

SEQ ID NO: 401066 - RNA, 32 nt, Human
cugacaucauguccuucaacugcuccacaaga

SEQ ID NO: 401067 - RNA, 32 nt, Human
cugacauccauuguauauacuaguuucuuuca

SEQ ID NO: 401068 - RNA, 21 nt, Human
cugacaucccaaaaccaucuu

SEQ ID NO: 401069 - RNA, 32 nt, Human
cugacauccuccuucaggaacacggggagcag

SEQ ID NO: 401070 - RNA, 32 nt, Human
cugacauccugagacacugagaaauguccuga

SEQ ID NO: 401071 - RNA, 32 nt, Human
cugacaucucauccguuuguguuuccaaaagc

SEQ ID NO: 401072 - RNA, 25 nt, Human
cugacaucuuaacuacaaccucaug

SEQ ID NO: 401073 - RNA, 32 nt, Human
cugacaugccagcccccugccaccucagcccc

SEQ ID NO: 401074 - RNA, 32 nt, Human
cugacaugccagcccccugccaccucggcccc

SEQ ID NO: 401075 - RNA, 32 nt, Human
cugacaugcccagggcuccacucucaucuaau

SEQ ID NO: 401076 - RNA, 23 nt, Human
cugacaugcccucccuucucccu

SEQ ID NO: 401077 - RNA, 32 nt, Human
cugacaugcucacacacugucauacucacaca

SEQ ID NO: 401078 - RNA, 32 nt, Human
cugacaugggccaagaccaggaaggaagggcc

SEQ ID NO: 401079 - RNA, 32 nt, Human
cugacaugugcgaugcauccccauggagagac

SEQ ID NO: 401080 - RNA, 32 nt, Human
cugacauucagcugccuugcaguugcuuccuc

SEQ ID NO: 401081 - RNA, 32 nt, Human
cugacauuucaggcacuggcacagauacauug

SEQ ID NO: 401082 - RNA, 32 nt, Human
cugacauuucuucuagugaugaugguucacgu

SEQ ID NO: 401083 - RNA, 31 nt, Human
cugacauuugcuccuuuaccugugucuugag

SEQ ID NO: 401084 - RNA, 32 nt, Human
cugaccaaaaauucacugaccaaccaaccaaa

SEQ ID NO: 401085 - RNA, 32 nt, Human
cugaccaaaaccagagggcagucuaguccugg

SEQ ID NO: 401086 - RNA, 32 nt, Human
cugaccaaaacggagaaacccagucucuacug

SEQ ID NO: 401087 - RNA, 22 nt, Human
cugaccaaaauggagaaacccc

SEQ ID NO: 401088 - RNA, 24 nt, Human
cugaccaaaauggugaaaccccgu

SEQ ID NO: 401089 - RNA, 32 nt, Human
cugaccaaaauggugaaaccccgucucuacua

SEQ ID NO: 401090 - RNA, 24 nt, Human
cugaccaaaauggugaaacccugu

SEQ ID NO: 401091 - RNA, 32 nt, Human
cugaccaaaauggugaaacccugucucuacua

SEQ ID NO: 401092 - RNA, 32 nt, Human
cugaccaaaauggugaaaccuccucucuacua

SEQ ID NO: 401093 - RNA, 23 nt, Human
cugaccaaacauggcgaaacccc

SEQ ID NO: 401094 - RNA, 27 nt, Human
cugaccaacaacauggagaaaccccgu

SEQ ID NO: 401095 - RNA, 21 nt, Human
cugaccaacacgaugaaaccc

SEQ ID NO: 401096 - RNA, 24 nt, Human
cugaccaacacgaugaaacccugu

SEQ ID NO: 401097 - RNA, 22 nt, Human
cugaccaacacggagaaacccc

SEQ ID NO: 401098 - RNA, 22 nt, Human
cugaccaacacggagaaacccu

SEQ ID NO: 401099 - RNA, 21 nt, Human
cugaccaacacggugaaaccc

SEQ ID NO: 401100 - RNA, 32 nt, Human
cugaccaacacggugaaaccccaucucuacua

SEQ ID NO: 401101 - RNA, 24 nt, Human
cugaccaacacggugaaaccccgu

SEQ ID NO: 401102 - RNA, 32 nt, Human
cugaccaacacggugaaaccccgucucuacua

SEQ ID NO: 401103 - RNA, 22 nt, Human
cugaccaacacugagaaacccc

SEQ ID NO: 401104 - RNA, 21 nt, Human
cugaccaacauagugaaaccc

SEQ ID NO: 401105 - RNA, 22 nt, Human
cugaccaacauagugaaacccc

SEQ ID NO: 401106 - RNA, 32 nt, Human
cugaccaacauagugaaaccccaucucuacua

SEQ ID NO: 401107 - RNA, 32 nt, Human
cugaccaacauagugaaacccccgucucuacu

SEQ ID NO: 401108 - RNA, 24 nt, Human
cugaccaacaugaagaaacccugu

SEQ ID NO: 401109 - RNA, 21 nt, Human
cugaccaacaugacaaaaccc

SEQ ID NO: 401110 - RNA, 24 nt, Human
cugaccaacaugacaaaaccccgu

SEQ ID NO: 401111 - RNA, 32 nt, Human
cugaccaacaugaugaaacccccgucucuacu

SEQ ID NO: 401112 - RNA, 32 nt, Human
cugaccaacaugaugaaaccccguugcuacua

SEQ ID NO: 401113 - RNA, 22 nt, Human
cugaccaacaugaugaaaugcc

SEQ ID NO: 401114 - RNA, 24 nt, Human
cugaccaacaugaugaaaugccau

SEQ ID NO: 401115 - RNA, 32 nt, Human
cugaccaacaugcugaaacccagucucuacua

SEQ ID NO: 401116 - RNA, 24 nt, Human
cugaccaacauggaaaaacaccgu

SEQ ID NO: 401117 - RNA, 24 nt, Human
cugaccaacauggaaaaaccccgu

SEQ ID NO: 401118 - RNA, 32 nt, Human
cugaccaacauggaaaaaccccgucucuacua

SEQ ID NO: 401119 - RNA, 24 nt, Human
cugaccaacauggacaaaccccgu

SEQ ID NO: 401120 - RNA, 32 nt, Human
cugaccaacauggacaaaccccgucucuacua

SEQ ID NO: 401121 - RNA, 21 nt, Human
cugaccaacauggagaaaccc

SEQ ID NO: 401122 - RNA, 32 nt, Human
cugaccaacauggagaaacccaaucucuacua

SEQ ID NO: 401123 - RNA, 24 nt, Human
cugaccaacauggagaaacccagu

SEQ ID NO: 401124 - RNA, 32 nt, Human
cugaccaacauggagaaacccagucucuacug

SEQ ID NO: 401125 - RNA, 24 nt, Human
cugaccaacauggagaaacccauc

SEQ ID NO: 401126 - RNA, 22 nt, Human
cugaccaacauggagaaacccc

SEQ ID NO: 401127 - RNA, 32 nt, Human
cugaccaacauggagaaaccccaucuccacua

SEQ ID NO: 401128 - RNA, 32 nt, Human
cugaccaacauggagaaaccccaucucuacua

SEQ ID NO: 401129 - RNA, 32 nt, Human
cugaccaacauggagaaaccccaucucucccg

SEQ ID NO: 401130 - RNA, 32 nt, Human
cugaccaacauggagaaaccccaucuguacua

SEQ ID NO: 401131 - RNA, 32 nt, Human
cugaccaacauggagaaaccccauuucuacua

SEQ ID NO: 401132 - RNA, 32 nt, Human
cugaccaacauggagaaacccccaucucuacu

SEQ ID NO: 401133 - RNA, 24 nt, Human
cugaccaacauggagaaaccccgu

SEQ ID NO: 401134 - RNA, 32 nt, Human
cugaccaacauggagaaaccccgucccuacua

SEQ ID NO: 401135 - RNA, 32 nt, Human
cugaccaacauggagaaaccccgucucuacua

SEQ ID NO: 401136 - RNA, 32 nt, Human
cugaccaacauggagaaaccccgucucuauug

SEQ ID NO: 401137 - RNA, 32 nt, Human
cugaccaacauggagaaaccccgucucugcua

SEQ ID NO: 401138 - RNA, 32 nt, Human
cugaccaacauggagaaaccccgugucuacua

SEQ ID NO: 401139 - RNA, 32 nt, Human
cugaccaacauggagaaaccccugucucuguu

SEQ ID NO: 401140 - RNA, 32 nt, Human
cugaccaacauggagaaacccgucucuacuaa

SEQ ID NO: 401141 - RNA, 22 nt, Human
cugaccaacauggagaaacccu

SEQ ID NO: 401142 - RNA, 32 nt, Human
cugaccaacauggagaaacccuaucucuacua

SEQ ID NO: 401143 - RNA, 23 nt, Human
cugaccaacauggagaaacccug

SEQ ID NO: 401144 - RNA, 28 nt, Human
cugaccaacauggagaaacccugccucu

SEQ ID NO: 401145 - RNA, 24 nt, Human
cugaccaacauggagaaacccugu

SEQ ID NO: 401146 - RNA, 32 nt, Human
cugaccaacauggagaaacccugucucaacua

SEQ ID NO: 401147 - RNA, 32 nt, Human
cugaccaacauggagaaacccugucuccacua

SEQ ID NO: 401148 - RNA, 32 nt, Human
cugaccaacauggagaaacccugucucuacua

SEQ ID NO: 401149 - RNA, 32 nt, Human
cugaccaacauggagaaacccugucucuauua

SEQ ID NO: 401150 - RNA, 32 nt, Human
cugaccaacauggagaaaccucgucucuacua

SEQ ID NO: 401151 - RNA, 22 nt, Human
cugaccaacauggagaaacgcc

SEQ ID NO: 401152 - RNA, 32 nt, Human
cugaccaacauggagaaacgccaucucuacua

SEQ ID NO: 401153 - RNA, 22 nt, Human
cugaccaacauggagaaacucc

SEQ ID NO: 401154 - RNA, 32 nt, Human
cugaccaacauggagaaacuccaucucuacua

SEQ ID NO: 401155 - RNA, 32 nt, Human
cugaccaacauggagaaacuccgucucuacua

SEQ ID NO: 401156 - RNA, 24 nt, Human
cugaccaacauggagaaaucccgu

SEQ ID NO: 401157 - RNA, 32 nt, Human
cugaccaacauggagaaaucccgucucuacua

SEQ ID NO: 401158 - RNA, 32 nt, Human
cugaccaacauggagaaaugccaucucuacua

SEQ ID NO: 401159 - RNA, 24 nt, Human
cugaccaacauggagaagccccgu

SEQ ID NO: 401160 - RNA, 32 nt, Human
cugaccaacauggagaagccccgucucuacua

SEQ ID NO: 401161 - RNA, 32 nt, Human
cugaccaacauggagauauccugucucuacua

SEQ ID NO: 401162 - RNA, 32 nt, Human
cugaccaacauggauaaaucccaucucuacua

SEQ ID NO: 401163 - RNA, 24 nt, Human
cugaccaacauggauuaacccugu

SEQ ID NO: 401164 - RNA, 32 nt, Human
cugaccaacauggauuaacccugucucuacua

SEQ ID NO: 401165 - RNA, 24 nt, Human
cugaccaacauggcaaaacaucgu

SEQ ID NO: 401166 - RNA, 21 nt, Human
cugaccaacauggcaaaaccc

SEQ ID NO: 401167 - RNA, 22 nt, Human
cugaccaacauggcaaaacccc

SEQ ID NO: 401168 - RNA, 32 nt, Human
cugaccaacauggcaaaaccccgucucuacua

SEQ ID NO: 401169 - RNA, 24 nt, Human
cugaccaacauggcaaaacccugu

SEQ ID NO: 401170 - RNA, 28 nt, Human
cugaccaacauggcaaaacccugucucu

SEQ ID NO: 401171 - RNA, 32 nt, Human
cugaccaacauggcaaaacccugucucuacua

SEQ ID NO: 401172 - RNA, 32 nt, Human
cugaccaacauggccaaaaacugucucuacua

SEQ ID NO: 401173 - RNA, 21 nt, Human
cugaccaacauggcgaaaccc

SEQ ID NO: 401174 - RNA, 22 nt, Human
cugaccaacauggcgaaacccc

SEQ ID NO: 401175 - RNA, 32 nt, Human
cugaccaacauggcgaaaccccaucucuacua

SEQ ID NO: 401176 - RNA, 32 nt, Human
cugaccaacauggcgaaaccccauuucuacua

SEQ ID NO: 401177 - RNA, 24 nt, Human
cugaccaacauggcgaaaccccgu

SEQ ID NO: 401178 - RNA, 32 nt, Human
cugaccaacauggcgaaaccccgucucuacua

SEQ ID NO: 401179 - RNA, 32 nt, Human
cugaccaacauggcgaaaccccgucucuagca

SEQ ID NO: 401180 - RNA, 24 nt, Human
cugaccaacauggggauaccccgu

SEQ ID NO: 401181 - RNA, 32 nt, Human
cugaccaacauggggauaccccgucucuacua

SEQ ID NO: 401182 - RNA, 32 nt, Human
cugaccaacaugguaaaaccacaucucuacua

SEQ ID NO: 401183 - RNA, 21 nt, Human
cugaccaacaugguagaaccc

SEQ ID NO: 401184 - RNA, 24 nt, Human
cugaccaacaugguagaaccccgu

SEQ ID NO: 401185 - RNA, 22 nt, Human
cugaccaacauggugaaaaccc

SEQ ID NO: 401186 - RNA, 23 nt, Human
cugaccaacauggugaaaacccc

SEQ ID NO: 401187 - RNA, 32 nt, Human
cugaccaacauggugaaaaccccaucucuacu

SEQ ID NO: 401188 - RNA, 22 nt, Human
cugaccaacauggugaaacacc

SEQ ID NO: 401189 - RNA, 24 nt, Human
cugaccaacauggugaaacaccau

SEQ ID NO: 401190 - RNA, 32 nt, Human
cugaccaacauggugaaacaccaucucuacua

SEQ ID NO: 401191 - RNA, 24 nt, Human
cugaccaacauggugaaacacugu

SEQ ID NO: 401192 - RNA, 32 nt, Human
cugaccaacauggugaaacacugucucuacua

SEQ ID NO: 401193 - RNA, 21 nt, Human
cugaccaacauggugaaaccc

SEQ ID NO: 401194 - RNA, 22 nt, Human
cugaccaacauggugaaacccc

SEQ ID NO: 401195 - RNA, 32 nt, Human
cugaccaacauggugaaaccccaucucuacga

SEQ ID NO: 401196 - RNA, 32 nt, Human
cugaccaacauggugaaaccccaucucuacua

SEQ ID NO: 401197 - RNA, 32 nt, Human
cugaccaacauggugaaaccccaucucuacuu

SEQ ID NO: 401198 - RNA, 32 nt, Human
cugaccaacauggugaaaccccaucuguacua

SEQ ID NO: 401199 - RNA, 32 nt, Human
cugaccaacauggugaaaccccauuucuacua

SEQ ID NO: 401200 - RNA, 24 nt, Human
cugaccaacauggugaaaccccgu

SEQ ID NO: 401201 - RNA, 32 nt, Human
cugaccaacauggugaaaccccgucucuacaa

SEQ ID NO: 401202 - RNA, 32 nt, Human
cugaccaacauggugaaaccccgucucuacua

SEQ ID NO: 401203 - RNA, 32 nt, Human
cugaccaacauggugaaaccccgucuuuauua

SEQ ID NO: 401204 - RNA, 32 nt, Human
cugaccaacauggugaaaccccgugucuacua

SEQ ID NO: 401205 - RNA, 32 nt, Human
cugaccaacauggugaaaccccguuucuacua

SEQ ID NO: 401206 - RNA, 32 nt, Human
cugaccaacauggugaaaccccuucucuacgu

SEQ ID NO: 401207 - RNA, 22 nt, Human
cugaccaacauggugaaacccu

SEQ ID NO: 401208 - RNA, 32 nt, Human
cugaccaacauggugaaacccuacuaaaaaua

SEQ ID NO: 401209 - RNA, 24 nt, Human
cugaccaacauggugaaacccugu

SEQ ID NO: 401210 - RNA, 32 nt, Human
cugaccaacauggugaaacccugucucuacca

SEQ ID NO: 401211 - RNA, 32 nt, Human
cugaccaacauggugaaacccugucucuacga

SEQ ID NO: 401212 - RNA, 32 nt, Human
cugaccaacauggugaaacccugucucuacua

SEQ ID NO: 401213 - RNA, 32 nt, Human
cugaccaacauggugaaacccuguuucuacua

SEQ ID NO: 401214 - RNA, 22 nt, Human
cugaccaacauggugaaaccuc

SEQ ID NO: 401215 - RNA, 23 nt, Human
cugaccaacauggugaaaccuca

SEQ ID NO: 401216 - RNA, 32 nt, Human
cugaccaacauggugaaaccucaacucuacua

SEQ ID NO: 401217 - RNA, 24 nt, Human
cugaccaacauggugaaaccucau

SEQ ID NO: 401218 - RNA, 32 nt, Human
cugaccaacauggugaaaccucaucucuacua

SEQ ID NO: 401219 - RNA, 32 nt, Human
cugaccaacauggugaaaccucgucucugcua

SEQ ID NO: 401220 - RNA, 22 nt, Human
cugaccaacauggugaaacgcc

SEQ ID NO: 401221 - RNA, 24 nt, Human
cugaccaacauggugaaacgccau

SEQ ID NO: 401222 - RNA, 32 nt, Human
cugaccaacauggugaaacgccaucucuacua

SEQ ID NO: 401223 - RNA, 22 nt, Human
cugaccaacauggugaaacgcu

SEQ ID NO: 401224 - RNA, 24 nt, Human
cugaccaacauggugaaacgcuau

SEQ ID NO: 401225 - RNA, 20 nt, Human
cugaccaacauggugaaacu

SEQ ID NO: 401226 - RNA, 24 nt, Human
cugaccaacauggugaaacuaugu

SEQ ID NO: 401227 - RNA, 32 nt, Human
cugaccaacauggugaaacuaugucucuacua

SEQ ID NO: 401228 - RNA, 21 nt, Human
cugaccaacauggugaaacuc

SEQ ID NO: 401229 - RNA, 22 nt, Human
cugaccaacauggugaaacucc

SEQ ID NO: 401230 - RNA, 24 nt, Human
cugaccaacauggugaaacuccau

SEQ ID NO: 401231 - RNA, 32 nt, Human
cugaccaacauggugaaacuccaucucuacua

SEQ ID NO: 401232 - RNA, 24 nt, Human
cugaccaacauggugaaacucugu

SEQ ID NO: 401233 - RNA, 32 nt, Human
cugaccaacauggugaaacucuguucuacuaa

SEQ ID NO: 401234 - RNA, 32 nt, Human
cugaccaacauggugaaagcccguuucuacua

SEQ ID NO: 401235 - RNA, 19 nt, Human
cugaccaacauggugaaau

SEQ ID NO: 401236 - RNA, 21 nt, Human
cugaccaacauggugaaaucc

SEQ ID NO: 401237 - RNA, 32 nt, Human
cugaccaacauggugaaauccagucucuacuu

SEQ ID NO: 401238 - RNA, 32 nt, Human
cugaccaacauggugaaaucccgucucuauua

SEQ ID NO: 401239 - RNA, 24 nt, Human
cugaccaacauggugaaauccugu

SEQ ID NO: 401240 - RNA, 32 nt, Human
cugaccaacauggugaaauccugucucuacua

SEQ ID NO: 401241 - RNA, 32 nt, Human
cugaccaacauggugaaaugaaaccccaucuc

SEQ ID NO: 401242 - RNA, 21 nt, Human
cugaccaacauggugagaccc

SEQ ID NO: 401243 - RNA, 24 nt, Human
cugaccaacauggugagacccugu

SEQ ID NO: 401244 - RNA, 32 nt, Human
cugaccaacauggugagacccugucucuacua

SEQ ID NO: 401245 - RNA, 21 nt, Human
cugaccaacauggugaggccc

SEQ ID NO: 401246 - RNA, 22 nt, Human
cugaccaacauggugaggcccc

SEQ ID NO: 401247 - RNA, 32 nt, Human
cugaccaacgcgacauuccuccccucacgccu

SEQ ID NO: 401248 - RNA, 22 nt, Human
cugaccaacguggagaaacccc

SEQ ID NO: 401249 - RNA, 24 nt, Human
cugaccaacguggagaaaccccgu

SEQ ID NO: 401250 - RNA, 24 nt, Human
cugaccaacguggcgaaaccucgu

SEQ ID NO: 401251 - RNA, 22 nt, Human
cugaccaacguggugaaacccc

SEQ ID NO: 401252 - RNA, 32 nt, Human
cugaccaacguggugaaaccccaucucuacua

SEQ ID NO: 401253 - RNA, 24 nt, Human
cugaccaacguggugaaaccccgu

SEQ ID NO: 401254 - RNA, 32 nt, Human
cugaccaacguggugaaaccccgucucuacua

SEQ ID NO: 401255 - RNA, 24 nt, Human
cugaccaacguggugaaacccugu

SEQ ID NO: 401256 - RNA, 32 nt, Human
cugaccaacguggugaaacccugucucuacug

SEQ ID NO: 401257 - RNA, 24 nt, Human
cugaccaacguggugaaacuccgu

SEQ ID NO: 401258 - RNA, 32 nt, Human
cugaccaacguggugaaacuccgucucuacua

SEQ ID NO: 401259 - RNA, 24 nt, Human
cugaccaacguuaaguaaccccgu

SEQ ID NO: 401260 - RNA, 22 nt, Human
cugaccaagcacugcguucuca

SEQ ID NO: 401261 - RNA, 32 nt, Human
cugaccaaggagaaugacuacaagagagacaa

SEQ ID NO: 401262 - RNA, 22 nt, Human
cugaccaagguggugaaacccc

SEQ ID NO: 401263 - RNA, 32 nt, Human
cugaccaagguggugaaaccccaucucuaguu

SEQ ID NO: 401264 - RNA, 32 nt, Human
cugaccaagguggugaaaccccgucucuacua

SEQ ID NO: 401265 - RNA, 24 nt, Human
cugaccaauacggugaaagcccgu

SEQ ID NO: 401266 - RNA, 22 nt, Human
cugaccaauaugaugaaacccc

SEQ ID NO: 401267 - RNA, 32 nt, Human
cugaccaauaugaugaaaccccgucucuacua

SEQ ID NO: 401268 - RNA, 22 nt, Human
cugaccaauauggcaaaaccuc

SEQ ID NO: 401269 - RNA, 22 nt, Human
cugaccaauauggugaaacccc

SEQ ID NO: 401270 - RNA, 32 nt, Human
cugaccaauauggugaaaccccaucucuacua

SEQ ID NO: 401271 - RNA, 32 nt, Human
cugaccaauauggugaaaccccgucucuacua

SEQ ID NO: 401272 - RNA, 32 nt, Human
cugaccaauauggugaaaccccuucucuacua

SEQ ID NO: 401273 - RNA, 32 nt, Human
cugaccaauggcagaggacugccugaagagua

SEQ ID NO: 401274 - RNA, 22 nt, Human
cugaccaaugugauaaaacccc

SEQ ID NO: 401275 - RNA, 22 nt, Human
cugaccacacuccccucgcagc

SEQ ID NO: 401276 - RNA, 32 nt, Human
cugaccacagcccccaggggaggaugguacug

SEQ ID NO: 401277 - RNA, 32 nt, Human
cugaccacagccugcugagcaggaugacagga

SEQ ID NO: 401278 - RNA, 32 nt, Human
cugaccacagccuguggcugggaagggagaca

SEQ ID NO: 401279 - RNA, 32 nt, Human
cugaccacagcuggcagucaagccacagcugg

SEQ ID NO: 401280 - RNA, 24 nt, Human
cugaccaccauggagaaaccccgu

SEQ ID NO: 401281 - RNA, 32 nt, Human
cugaccacccacacucaaccucccucugaccu

SEQ ID NO: 401282 - RNA, 32 nt, Human
cugaccaccucuccaacagaagccuaguccug

SEQ ID NO: 401283 - RNA, 32 nt, Human
cugaccaccuucaucgagcuccugccucucug

SEQ ID NO: 401284 - RNA, 32 nt, Human
cugaccaccuugcacuauuggacuuuggaagg

SEQ ID NO: 401285 - RNA, 32 nt, Human
cugaccacugcaaucccagcgcccaaggaagg

SEQ ID NO: 401286 - RNA, 32 nt, Human
cugaccacugccccuccaacucccagggacuc

SEQ ID NO: 401287 - RNA, 32 nt, Human
cugaccacugccugggcuagggugucacuucc

SEQ ID NO: 401288 - RNA, 22 nt, Human
cugaccacuuaucaaacccauc

SEQ ID NO: 401289 - RNA, 32 nt, Human
cugaccagaggcaggaucccaccccacuugaa

SEQ ID NO: 401290 - RNA, 22 nt, Human
cugaccagauucccagucacca

SEQ ID NO: 401291 - RNA, 32 nt, Human
cugaccagcagaggugagagagcgagacaggu

SEQ ID NO: 401292 - RNA, 32 nt, Human
cugaccagccgugagcauguuuggaagggguc

SEQ ID NO: 401293 - RNA, 32 nt, Human
cugaccagccugaugaggcaagagccugcccc

SEQ ID NO: 401294 - RNA, 32 nt, Human
cugaccagccuggccggcuggcggagaaaagg

SEQ ID NO: 401295 - RNA, 32 nt, Human
cugaccagcugaguccuugagggcaguaaaga

SEQ ID NO: 401296 - RNA, 32 nt, Human
cugaccagcugcaaagccaaccccuaucauuu

SEQ ID NO: 401297 - RNA, 32 nt, Human
cugaccaggaagcacaaggcugagagccagug

SEQ ID NO: 401298 - RNA, 32 nt, Human
cugaccaggaguucgaggcugcagugagccga

SEQ ID NO: 401299 - RNA, 32 nt, Human
cugaccagggagggagaagcagguuuggagag

SEQ ID NO: 401300 - RNA, 32 nt, Human
cugaccaggucagcugcccuggccuugcaccc

SEQ ID NO: 401301 - RNA, 28 nt, Human
cugaccagguguagugccucaugccugu

SEQ ID NO: 401302 - RNA, 32 nt, Human
cugaccagugugcuauauaguuaaagcucauu

SEQ ID NO: 401303 - RNA, 22 nt, Human
cugaccaucauggugaaaccuc

SEQ ID NO: 401304 - RNA, 32 nt, Human
cugaccaucauggugaaaccucaucuccgcua

SEQ ID NO: 401305 - RNA, 32 nt, Human
cugaccauccagugacaugauccugaccuuua

SEQ ID NO: 401306 - RNA, 18 nt, Human
cugaccaucugcuuucca

SEQ ID NO: 401307 - RNA, 32 nt, Human
cugaccaucuuucucuuacuguccucuuuguc

SEQ ID NO: 401308 - RNA, 32 nt, Human
cugaccaugaagaggcaagagcacagacuuac

SEQ ID NO: 401309 - RNA, 32 nt, Human
cugaccaugagacacggcuugcagugggggug

SEQ ID NO: 401310 - RNA, 32 nt, Human
cugaccaugaggaaaccuaaggucaacaccgg

SEQ ID NO: 401311 - RNA, 31 nt, Human
cugaccaugucuauuauggaccacagcccca

SEQ ID NO: 401312 - RNA, 32 nt, Human
cugacccaagugaaaaugcucagaauuucaca

SEQ ID NO: 401313 - RNA, 32 nt, Human
cugacccacaucuggcaccggccugcgcucgu

SEQ ID NO: 401314 - RNA, 32 nt, Human
cugacccaccugagacagaggcugggacccac

SEQ ID NO: 401315 - RNA, 24 nt, Human
cugacccacucuuccuuccacuga

SEQ ID NO: 401316 - RNA, 32 nt, Human
cugacccacugcauuccagccuggcgacagag

SEQ ID NO: 401317 - RNA, 21 nt, Human
cugacccagaucucuggccca

SEQ ID NO: 401318 - RNA, 32 nt, Human
cugacccagcauccucugccuucuaggaagug

SEQ ID NO: 401319 - RNA, 32 nt, Human
cugacccagccagaguccagguuuccacagga

SEQ ID NO: 401320 - RNA, 22 nt, Human
cugacccagccugguccuuccu

SEQ ID NO: 401321 - RNA, 32 nt, Human
cugacccagcuccuccugugugccucccuggc

SEQ ID NO: 401322 - RNA, 32 nt, Human
cugacccaggagaacggaaagcagggacguga

SEQ ID NO: 401323 - RNA, 32 nt, Human
cugacccaggcgcgcccgcugcucgguggcag

SEQ ID NO: 401324 - RNA, 32 nt, Human
cugaccccaagagagggaggacccaggauccg

SEQ ID NO: 401325 - RNA, 32 nt, Human
cugaccccagcauuuccagagcagagccuaca

SEQ ID NO: 401326 - RNA, 32 nt, Human
cugaccccaggaucccagcccgugggagagaa

SEQ ID NO: 401327 - RNA, 32 nt, Human
cugaccccauccuccucucccuccaggagccc

SEQ ID NO: 401328 - RNA, 32 nt, Human
cugacccccaggagggugguauuaggaggugg

SEQ ID NO: 401329 - RNA, 32 nt, Human
cugacccccaucaaaucccaucaugcccacag

SEQ ID NO: 401330 - RNA, 32 nt, Human
cugacccccaucucccccuuccuuucccuccu

SEQ ID NO: 401331 - RNA, 32 nt, Human
cugacccccgcccuagaacuuuugccagugcc

SEQ ID NO: 401332 - RNA, 32 nt, Human
cugacccccugcccuugagaaacacaagaugg

SEQ ID NO: 401333 - RNA, 20 nt, Human
cugaccccgcagccuuggca

SEQ ID NO: 401334 - RNA, 19 nt, Human
cugaccccgcgccccccgg

SEQ ID NO: 401335 - RNA, 21 nt, Human
cugaccccuauucuucucccu

SEQ ID NO: 401336 - RNA, 24 nt, Human
cugaccccucaccugugccaagau

SEQ ID NO: 401337 - RNA, 32 nt, Human
cugaccccucagcugcucagccaggccccugc

SEQ ID NO: 401338 - RNA, 32 nt, Human
cugaccccuccaaggaaagaccaccuucuggg

SEQ ID NO: 401339 - RNA, 32 nt, Human
cugaccccucucuccaccccugggcuaugcag

SEQ ID NO: 401340 - RNA, 32 nt, Human
cugaccccugcaggauguuuuuccuaggcucc

SEQ ID NO: 401341 - RNA, 32 nt, Human
cugaccccugcucuaauugggaccugcugugu

SEQ ID NO: 401342 - RNA, 32 nt, Human
cugaccccugggagaggggcagugagaguuug

SEQ ID NO: 401343 - RNA, 22 nt, Human
cugaccccugugucuucucccu

SEQ ID NO: 401344 - RNA, 24 nt, Human
cugaccccuuccccaccccccggg

SEQ ID NO: 401345 - RNA, 32 nt, Human
cugaccccuucuguuuucugcaaggagcugcc

SEQ ID NO: 401346 - RNA, 19 nt, Human
cugaccccuuguccuuccc

SEQ ID NO: 401347 - RNA, 18 nt, Human
cugaccccuuuccuucuc

SEQ ID NO: 401348 - RNA, 32 nt, Human
cugacccgccggccucucccaccccagcagug

SEQ ID NO: 401349 - RNA, 18 nt, Human
cugacccgccugcugcug

SEQ ID NO: 401350 - RNA, 32 nt, Human
cugacccgggacucaccucccuacccuggccc

SEQ ID NO: 401351 - RNA, 32 nt, Human
cugacccguucccgggagcgugucuggguuug

SEQ ID NO: 401352 - RNA, 19 nt, Human
cugacccuagcugcugcug

SEQ ID NO: 401353 - RNA, 22 nt, Human
cugacccuagcugcugcugcug

SEQ ID NO: 401354 - RNA, 32 nt, Human
cugacccucacagaaagagagcucugagcagg

SEQ ID NO: 401355 - RNA, 32 nt, Human
cugacccucacuccuucuucugacccuuaauc

SEQ ID NO: 401356 - RNA, 32 nt, Human
cugacccuccaccgcagaaggaaggcagggag

SEQ ID NO: 401357 - RNA, 16 nt, Human
cugacccucccuccca

SEQ ID NO: 401358 - RNA, 32 nt, Human
cugacccucuccccacugcucauuuggauccc

SEQ ID NO: 401359 - RNA, 25 nt, Human
cugacccugaaccagaacccagcug

SEQ ID NO: 401360 - RNA, 32 nt, Human
cugacccugaguaguaggauuggaggagggaa

SEQ ID NO: 401361 - RNA, 32 nt, Human
cugacccugcaaggaagaaauacuucagaaag

SEQ ID NO: 401362 - RNA, 32 nt, Human
cugacccugcagcacuuucagcauaugcacau

SEQ ID NO: 401363 - RNA, 32 nt, Human
cugacccugcagcuggugcucugugucuucgc

SEQ ID NO: 401364 - RNA, 32 nt, Human
cugacccugccugcuaaaugccaguugcagcc

SEQ ID NO: 401365 - RNA, 32 nt, Human
cugacccugccuggagccaaccuggagaugca

SEQ ID NO: 401366 - RNA, 31 nt, Human
cugacccugcucucugggcugucucuaggga

SEQ ID NO: 401367 - RNA, 32 nt, Human
cugacccugcugcucuugccuucuaagcuacu

SEQ ID NO: 401368 - RNA, 19 nt, Human
cugacccugcuuccccaag

SEQ ID NO: 401369 - RNA, 19 nt, Human
cugacccuggcacccaggg

SEQ ID NO: 401370 - RNA, 19 nt, Human
cugacccuggcuuccaggg

SEQ ID NO: 401371 - RNA, 32 nt, Human
cugacccugggcaggugagugacggguguguc

SEQ ID NO: 401372 - RNA, 20 nt, Human
cugacccuggucuggucuca

SEQ ID NO: 401373 - RNA, 32 nt, Human
cugacccugucccacaucuuaaagcugugccu

SEQ ID NO: 401374 - RNA, 32 nt, Human
cugacccuguguaaccugcugucccggguccc

SEQ ID NO: 401375 - RNA, 19 nt, Human
cugacccuucccggcugcc

SEQ ID NO: 401376 - RNA, 32 nt, Human
cugaccgaaagaaaacccuuggggauaaguuu

SEQ ID NO: 401377 - RNA, 26 nt, Human
cugaccgcagagucuccagcaagcug

SEQ ID NO: 401378 - RNA, 32 nt, Human
cugaccgccaguccccugucaucgaguucugg

SEQ ID NO: 401379 - RNA, 32 nt, Human
cugaccgccgguccccugucaucgaguucugg

SEQ ID NO: 401380 - RNA, 32 nt, Human
cugaccggacuacagcucccagaagagccuug

SEQ ID NO: 401381 - RNA, 32 nt, Human
cugaccgggccaggccuggucuucccagcccu

SEQ ID NO: 401382 - RNA, 32 nt, Human
cugaccgguucugaaguaugggccuccggggu

SEQ ID NO: 401383 - RNA, 21 nt, Human
cugaccgucccgccagcacgc

SEQ ID NO: 401384 - RNA, 32 nt, Human
cugaccuacuucugccuggucugagaagccug

SEQ ID NO: 401385 - RNA, 32 nt, Human
cugaccuaggccaguccuggggcaggcgugcu

SEQ ID NO: 401386 - RNA, 32 nt, Human
cugaccucaaacuccugaccucaggugauccg

SEQ ID NO: 401387 - RNA, 32 nt, Human
cugaccucaaauaaucccagcacuuugggagg

SEQ ID NO: 401388 - RNA, 32 nt, Human
cugaccucaaaugacccacccaccucagccuc

SEQ ID NO: 401389 - RNA, 32 nt, Human
cugaccucaaaugauccacccaccucagccuc

SEQ ID NO: 401390 - RNA, 32 nt, Human
cugaccucaaaugauccacccaccucagucuc

SEQ ID NO: 401391 - RNA, 32 nt, Human
cugaccucaaaugauccgcccaccucggccuc

SEQ ID NO: 401392 - RNA, 32 nt, Human
cugaccucaagcaaucugcucgucuuagccuc

SEQ ID NO: 401393 - RNA, 32 nt, Human
cugaccucaagcaauuguccugccuccucaac

SEQ ID NO: 401394 - RNA, 32 nt, Human
cugaccucaagcaauuugcccaccucguucuc

SEQ ID NO: 401395 - RNA, 32 nt, Human
cugaccucaagccucagcuccagugggaccuu

SEQ ID NO: 401396 - RNA, 32 nt, Human
cugaccucaagcgauccacccaccucggccuc

SEQ ID NO: 401397 - RNA, 32 nt, Human
cugaccucaagcgaucugcccaccuccgucuc

SEQ ID NO: 401398 - RNA, 32 nt, Human
cugaccucaagcgaucugcccaccucggccuc

SEQ ID NO: 401399 - RNA, 32 nt, Human
cugaccucaaguaaucugcccaccucggccuc

SEQ ID NO: 401400 - RNA, 32 nt, Human
cugaccucaagugauccacccaccucagccuc

SEQ ID NO: 401401 - RNA, 32 nt, Human
cugaccucaagugauccacccaccucggccuc

SEQ ID NO: 401402 - RNA, 32 nt, Human
cugaccucaagugauccaccugccucagccuc

SEQ ID NO: 401403 - RNA, 32 nt, Human
cugaccucaagugauccucccaccucagccuc

SEQ ID NO: 401404 - RNA, 32 nt, Human
cugaccucaagugauccucccaccucagccug

SEQ ID NO: 401405 - RNA, 32 nt, Human
cugaccucaagugaucggcccaccucagccuc

SEQ ID NO: 401406 - RNA, 32 nt, Human
cugaccucaagugaucuacccaccucggcuuc

SEQ ID NO: 401407 - RNA, 32 nt, Human
cugaccucaagugaucugcccaccucagccuc

SEQ ID NO: 401408 - RNA, 32 nt, Human
cugaccucacacaauccuccugccuuagccuc

SEQ ID NO: 401409 - RNA, 32 nt, Human
cugaccucacagacugaccauuccaucccaca

SEQ ID NO: 401410 - RNA, 32 nt, Human
cugaccucacagaggcuugggggugaaagggu

SEQ ID NO: 401411 - RNA, 32 nt, Human
cugaccucacugccaccucuugcauugggauc

SEQ ID NO: 401412 - RNA, 32 nt, Human
cugaccucacugccugccuccucuaccccagg

SEQ ID NO: 401413 - RNA, 32 nt, Human
cugaccucagacucacuuccacccucaagugg

SEQ ID NO: 401414 - RNA, 32 nt, Human
cugaccucagaugguccacccaccucggcauc

SEQ ID NO: 401415 - RNA, 32 nt, Human
cugaccucagcccugcucacugugcccaggga

SEQ ID NO: 401416 - RNA, 32 nt, Human
cugaccucaggaguucgagaccagccugggca

SEQ ID NO: 401417 - RNA, 32 nt, Human
cugaccucaggcaauccacccaccucagccuc

SEQ ID NO: 401418 - RNA, 32 nt, Human
cugaccucaggcaaucugcccaccucagccuc

SEQ ID NO: 401419 - RNA, 32 nt, Human
cugaccucaggcgauccacccaccucagcguc

SEQ ID NO: 401420 - RNA, 32 nt, Human
cugaccucagggcucccagcucggggccugug

SEQ ID NO: 401421 - RNA, 32 nt, Human
cugaccucagguaacuuucacucucauacaua

SEQ ID NO: 401422 - RNA, 32 nt, Human
cugaccucagguaauccucccaccucagccuc

SEQ ID NO: 401423 - RNA, 19 nt, Human
cugaccucaggugagccac

SEQ ID NO: 401424 - RNA, 32 nt, Human
cugaccucaggugauacgcccaccucggccuc

SEQ ID NO: 401425 - RNA, 18 nt, Human
cugaccucaggugaucca

SEQ ID NO: 401426 - RNA, 32 nt, Human
cugaccucaggugauccacccaccucagccuc

SEQ ID NO: 401427 - RNA, 32 nt, Human
cugaccucaggugauccacccaccucggccuc

SEQ ID NO: 401428 - RNA, 32 nt, Human
cugaccucaggugauccacccaccucggcuuc

SEQ ID NO: 401429 - RNA, 32 nt, Human
cugaccucaggugauccgcccaccucagccuc

SEQ ID NO: 401430 - RNA, 32 nt, Human
cugaccucaggugauccgcccaccucggccuc

SEQ ID NO: 401431 - RNA, 32 nt, Human
cugaccucaggugauccgcccaccucggccuu

SEQ ID NO: 401432 - RNA, 32 nt, Human
cugaccucaggugauccgccuaccucagccuc

SEQ ID NO: 401433 - RNA, 32 nt, Human
cugaccucaggugauccguccaccucagccuc

SEQ ID NO: 401434 - RNA, 32 nt, Human
cugaccucaggugauccucccaccucggccuc

SEQ ID NO: 401435 - RNA, 32 nt, Human
cugaccucaggugauccucccgccucggccuc

SEQ ID NO: 401436 - RNA, 32 nt, Human
cugaccucaggugaucuacccaccucggccuc

SEQ ID NO: 401437 - RNA, 32 nt, Human
cugaccucaggugaucugcccaccucagccuc

SEQ ID NO: 401438 - RNA, 32 nt, Human
cugaccucaggugaucugcccaccucggccuc

SEQ ID NO: 401439 - RNA, 32 nt, Human
cugaccucaggugaucugcccaccucggcuuc

SEQ ID NO: 401440 - RNA, 32 nt, Human
cugaccucaggugaugcacccaccucagccuc

SEQ ID NO: 401441 - RNA, 32 nt, Human
cugaccucaggugauucacccaccucagcuuc

SEQ ID NO: 401442 - RNA, 32 nt, Human
cugaccucagguguuccacccaccucagccuu

SEQ ID NO: 401443 - RNA, 32 nt, Human
cugaccucagguguuccaccuaccucagccuc

SEQ ID NO: 401444 - RNA, 32 nt, Human
cugaccucagugccagagugacagagcugggc

SEQ ID NO: 401445 - RNA, 32 nt, Human
cugaccucaugauccaccucccucagccuccc

SEQ ID NO: 401446 - RNA, 32 nt, Human
cugaccucauguaauccacccaccucagccuc

SEQ ID NO: 401447 - RNA, 32 nt, Human
cugaccuccagugaucugcccaccucggccuc

SEQ ID NO: 401448 - RNA, 32 nt, Human
cugaccucccaucugccuucugagcaccagcu

SEQ ID NO: 401449 - RNA, 21 nt, Human
cugaccuccccgccagcugga

SEQ ID NO: 401450 - RNA, 20 nt, Human
cugaccuccccgcggggagg

SEQ ID NO: 401451 - RNA, 20 nt, Human
cugaccuccccgcugugggg

SEQ ID NO: 401452 - RNA, 16 nt, Human
cugaccuccccuccac

SEQ ID NO: 401453 - RNA, 22 nt, Human
cugaccucccucggccgugcgg

SEQ ID NO: 401454 - RNA, 32 nt, Human
cugaccuccggugauccacccaccucagccuc

SEQ ID NO: 401455 - RNA, 32 nt, Human
cugaccuccggugaucugcccaccucagucuc

SEQ ID NO: 401456 - RNA, 19 nt, Human
cugaccuccucuggccuca

SEQ ID NO: 401457 - RNA, 17 nt, Human
cugaccuccugauccac

SEQ ID NO: 401458 - RNA, 32 nt, Human
cugaccuccugccucuccuaaccucaguggcg

SEQ ID NO: 401459 - RNA, 20 nt, Human
cugaccuccuggacuguagg

SEQ ID NO: 401460 - RNA, 17 nt, Human
cugaccucgugagccac

SEQ ID NO: 401461 - RNA, 32 nt, Human
cugaccucgugauccugaccucggccucccaa

SEQ ID NO: 401462 - RNA, 22 nt, Human
cugaccucgugaucugcaccac

SEQ ID NO: 401463 - RNA, 32 nt, Human
cugaccucuaaccccggacgcacuuugauuuc

SEQ ID NO: 401464 - RNA, 32 nt, Human
cugaccucucaagggguggggguggggucaga

SEQ ID NO: 401465 - RNA, 32 nt, Human
cugaccucuccacuucuagcucucacugacau

SEQ ID NO: 401466 - RNA, 32 nt, Human
cugaccucucuccuccccuccuuccucucucc

SEQ ID NO: 401467 - RNA, 20 nt, Human
cugaccucucucuacugcca

SEQ ID NO: 401468 - RNA, 32 nt, Human
cugaccucucucuccacauuacccuuacaaaa

SEQ ID NO: 401469 - RNA, 32 nt, Human
cugaccucugaggggcugaggggugaggccag

SEQ ID NO: 401470 - RNA, 32 nt, Human
cugaccucugcagccucucucaucugccaauu

SEQ ID NO: 401471 - RNA, 21 nt, Human
cugaccucugcuccccgcgga

SEQ ID NO: 401472 - RNA, 32 nt, Human
cugaccucuggcuccuguccucuggcuccacc

SEQ ID NO: 401473 - RNA, 32 nt, Human
cugaccucuguggggugaggcagugcauggcc

SEQ ID NO: 401474 - RNA, 32 nt, Human
cugaccucuucauucuccuuuucaguauaacc

SEQ ID NO: 401475 - RNA, 32 nt, Human
cugaccugaggcgaucugcccaccucggccuc

SEQ ID NO: 401476 - RNA, 32 nt, Human
cugaccugaugaccagcucugugugaaacucc

SEQ ID NO: 401477 - RNA, 18 nt, Human
cugaccugcaacuugacu

SEQ ID NO: 401478 - RNA, 32 nt, Human
cugaccugcagccucucagggcgugcgaaguc

SEQ ID NO: 401479 - RNA, 32 nt, Human
cugaccugccaagagagagcuggggacugccu

SEQ ID NO: 401480 - RNA, 32 nt, Human
cugaccugcuggcgcucccuguccacugcacu

SEQ ID NO: 401481 - RNA, 32 nt, Human
cugaccuggaaauggccgccuucaaaggccaa

SEQ ID NO: 401482 - RNA, 32 nt, Human
cugaccuggaaccucugggagggcugcagagu

SEQ ID NO: 401483 - RNA, 32 nt, Human
cugaccuggaaggugaaggugaaggugagacc

SEQ ID NO: 401484 - RNA, 32 nt, Human
cugaccuggaaugaggccuaaccacaaucuuc

SEQ ID NO: 401485 - RNA, 32 nt, Human
cugaccuggagcuggccugugguaaaggccug

SEQ ID NO: 401486 - RNA, 32 nt, Human
cugaccuggcugcugcucuugcuucagagcca

SEQ ID NO: 401487 - RNA, 32 nt, Human
cugaccugggaauuugaaaacagcacacuaaa

SEQ ID NO: 401488 - RNA, 32 nt, Human
cugaccugggcuggcacugcugggggugagga

SEQ ID NO: 401489 - RNA, 24 nt, Human
cugaccuggggccccagcauccug

SEQ ID NO: 401490 - RNA, 32 nt, Human
cugaccugggggucaaggcaggaggacuccga

SEQ ID NO: 401491 - RNA, 32 nt, Human
cugaccugguggccgugguggagaugaugcag

SEQ ID NO: 401492 - RNA, 19 nt, Human
cugaccuguguuccuuccc

SEQ ID NO: 401493 - RNA, 32 nt, Human
cugaccuuaagugauccacccaccucggccuc

SEQ ID NO: 401494 - RNA, 32 nt, Human
cugaccuuagagaacguguccugggccagccc

SEQ ID NO: 401495 - RNA, 32 nt, Human
cugaccuuauuguugcucacacucuauguccc

SEQ ID NO: 401496 - RNA, 31 nt, Human
cugaccuucaucucugggcuuguuccgggaa

SEQ ID NO: 401497 - RNA, 32 nt, Human
cugaccuuccaagugacuuccuuggacuuuga

SEQ ID NO: 401498 - RNA, 32 nt, Human
cugaccuuccucagucugcagcucuuuucucc

SEQ ID NO: 401499 - RNA, 32 nt, Human
cugaccuucggcaguggcugggggacugcuuu

SEQ ID NO: 401500 - RNA, 32 nt, Human
cugaccuucucccucuucccuuccuccuccuc

SEQ ID NO: 401501 - RNA, 32 nt, Human
cugaccuucuccucagcuucauugugagaccu

SEQ ID NO: 401502 - RNA, 32 nt, Human
cugaccuucugagaggggccugccucacuucu

SEQ ID NO: 401503 - RNA, 18 nt, Human
cugaccuucugggaucuu

SEQ ID NO: 401504 - RNA, 32 nt, Human
cugaccuugagcucuugggcucaggugauccu

SEQ ID NO: 401505 - RNA, 32 nt, Human
cugaccuugauagggauacagcuuugauccaa

SEQ ID NO: 401506 - RNA, 32 nt, Human
cugaccuugcugggaagccucacccuucugcc

SEQ ID NO: 401507 - RNA, 32 nt, Human
cugaccuuggcacucgaacugaccucaagcuc

SEQ ID NO: 401508 - RNA, 32 nt, Human
cugaccuugggcagucuaguguuccugcauuc

SEQ ID NO: 401509 - RNA, 32 nt, Human
cugaccuuguccuacuucacugccuuugucug

SEQ ID NO: 401510 - RNA, 24 nt, Human
cugaccuugugauccacccaccuc

SEQ ID NO: 401511 - RNA, 25 nt, Human
cugaccuugugauccacccaccuca

SEQ ID NO: 401512 - RNA, 24 nt, Human
cugaccuugugauccacccaccuu

SEQ ID NO: 401513 - RNA, 24 nt, Human
cugaccuugugauccacccgccuc

SEQ ID NO: 401514 - RNA, 25 nt, Human
cugaccuugugauccacccgccuca

SEQ ID NO: 401515 - RNA, 24 nt, Human
cugaccuugugauccaccugccuu

SEQ ID NO: 401516 - RNA, 25 nt, Human
cugaccuugugauccgcccaccuca

SEQ ID NO: 401517 - RNA, 24 nt, Human
cugaccuugugauccgcccgccuc

SEQ ID NO: 401518 - RNA, 24 nt, Human
cugaccuugugauccgcccgccuu

SEQ ID NO: 401519 - RNA, 24 nt, Human
cugaccuugugauccgccugccuc

SEQ ID NO: 401520 - RNA, 24 nt, Human
cugaccuugugauccgccugccuu

SEQ ID NO: 401521 - RNA, 25 nt, Human
cugaccuugugauccgcucgccuca

SEQ ID NO: 401522 - RNA, 25 nt, Human
cugaccuugugaucugcccaccuca

SEQ ID NO: 401523 - RNA, 24 nt, Human
cugaccuugugaucugccugccuc

SEQ ID NO: 401524 - RNA, 24 nt, Human
cugaccuugugaucugccugccuu

SEQ ID NO: 401525 - RNA, 25 nt, Human
cugaccuugugaucugccugucuca

SEQ ID NO: 401526 - RNA, 25 nt, Human
cugaccuugugauuugcccgccuca

SEQ ID NO: 401527 - RNA, 32 nt, Human
cugaccuuucccugggcuucaaaggaaggcua

SEQ ID NO: 401528 - RNA, 19 nt, Human
cugaccuuucuccuguccu

SEQ ID NO: 401529 - RNA, 32 nt, Human
cugaccuuuucaucaauccuugcugacaaugu

SEQ ID NO: 401530 - RNA, 32 nt, Human
cugacgacacaagaucucagacuugugugauu

SEQ ID NO: 401531 - RNA, 32 nt, Human
cugacgacauguccaccaaaucugacgacucc

SEQ ID NO: 401532 - RNA, 32 nt, Human
cugacgagcacaggagggagguugaggugggg

SEQ ID NO: 401533 - RNA, 32 nt, Human
cugacgagcagucucaaauccacccacugccu

SEQ ID NO: 401534 - RNA, 32 nt, Human
cugacgaggcuggacuuccucgaguggccacu

SEQ ID NO: 401535 - RNA, 31 nt, Human
cugacgauggccucuguggcuucgugcgauu

SEQ ID NO: 401536 - RNA, 32 nt, Human
cugacgcaacccacguguaacugucagccggg

SEQ ID NO: 401537 - RNA, 32 nt, Human
cugacgcacacagccaguucucugcuucauau

SEQ ID NO: 401538 - RNA, 32 nt, Human
cugacgcacacgcuccuguugucauggcagac

SEQ ID NO: 401539 - RNA, 24 nt, Human
cugacgcacaggcuggagugcagu

SEQ ID NO: 401540 - RNA, 32 nt, Human
cugacgcacaggcuggagugcaguggcuccga

SEQ ID NO: 401541 - RNA, 19 nt, Human
cugacgcacgcgcacucca

SEQ ID NO: 401542 - RNA, 32 nt, Human
cugacgcagaauggaguugaggugggggcagc

SEQ ID NO: 401543 - RNA, 32 nt, Human
cugacgcagaugcaccagaaguaguaagugua

SEQ ID NO: 401544 - RNA, 32 nt, Human
cugacgcaggaacauggagcugauccaggaca

SEQ ID NO: 401545 - RNA, 32 nt, Human
cugacgcaucuucuuuuucugccuguagagau

SEQ ID NO: 401546 - RNA, 32 nt, Human
cugacgcaugccacagccugagugaauccuac

SEQ ID NO: 401547 - RNA, 17 nt, Human
cugacgccccgcugccg

SEQ ID NO: 401548 - RNA, 32 nt, Human
cugacgcccgagcaguggaggucccgcagaag

SEQ ID NO: 401549 - RNA, 32 nt, Human
cugacgcccuccauuucucuggcuccggcccc

SEQ ID NO: 401550 - RNA, 32 nt, Human
cugacgcccuugcccucuguguguccuuccuc

SEQ ID NO: 401551 - RNA, 32 nt, Human
cugacgccuacuggggcagggcagcaggcuuu

SEQ ID NO: 401552 - RNA, 32 nt, Human
cugacgccugagcugguagggguggagcaggu

SEQ ID NO: 401553 - RNA, 32 nt, Human
cugacgccuguaaucccagcacuuugggaggc

SEQ ID NO: 401554 - RNA, 19 nt, Human
cugacgcggauccggccuc

SEQ ID NO: 401555 - RNA, 32 nt, Human
cugacgcuccaggagcucacgcugucugcaga

SEQ ID NO: 401556 - RNA, 32 nt, Human
cugacgcugacaccuucucacugugaaacguc

SEQ ID NO: 401557 - RNA, 32 nt, Human
cugacgcugcagcccuggaccugcugggggcc

SEQ ID NO: 401558 - RNA, 32 nt, Human
cugacgcugcuccaggggaaagaaggaccagg

SEQ ID NO: 401559 - RNA, 18 nt, Human
cugacgcuggagaugcaa

SEQ ID NO: 401560 - RNA, 32 nt, Human
cugacgcuggugcuggaaccugcuggcaccuc

SEQ ID NO: 401561 - RNA, 32 nt, Human
cugacggacugcuucucauuugcacugaucac

SEQ ID NO: 401562 - RNA, 32 nt, Human
cugacggagccccagcuuaguggaggcugggc

SEQ ID NO: 401563 - RNA, 32 nt, Human
cugacggagccgcggcgccggcgaagucgcug

SEQ ID NO: 401564 - RNA, 22 nt, Human
cugacggccacuccugcugcug

SEQ ID NO: 401565 - RNA, 32 nt, Human
cugacggccagagggagggaaggguggucaca

SEQ ID NO: 401566 - RNA, 32 nt, Human
cugacggcccacuccaccuggagcuguccccu

SEQ ID NO: 401567 - RNA, 32 nt, Human
cugacggggguggacccccaucugcagaaguu

SEQ ID NO: 401568 - RNA, 32 nt, Human
cugacgggugggcucugccagagcccggguga

SEQ ID NO: 401569 - RNA, 32 nt, Human
cugacggugccggcaguggccguggagguggg

SEQ ID NO: 401570 - RNA, 32 nt, Human
cugacggugccuccucauguccccuuggagcg

SEQ ID NO: 401571 - RNA, 32 nt, Human
cugacguaccaaaaaguaagauauaguuuauu

SEQ ID NO: 401572 - RNA, 23 nt, Human
cugacguaggaggguugcuugag

SEQ ID NO: 401573 - RNA, 32 nt, Human
cugacgucaagcaaucccccagccucggccuc

SEQ ID NO: 401574 - RNA, 32 nt, Human
cugacgucaggaguucgagaccagccuagcca

SEQ ID NO: 401575 - RNA, 32 nt, Human
cugacgucaguaguuugagaccagccuggcca

SEQ ID NO: 401576 - RNA, 32 nt, Human
cugacgucccccaagagcacaugcagugagcc

SEQ ID NO: 401577 - RNA, 32 nt, Human
cugacguccggagucauuaaccaggaauguau

SEQ ID NO: 401578 - RNA, 32 nt, Human
cugacguggagguggauuggcugugccguggc

SEQ ID NO: 401579 - RNA, 32 nt, Human
cugacuaacaaugaagccuggaagagauucgu

SEQ ID NO: 401580 - RNA, 32 nt, Human
cugacuaacacagugaaaccccgacucuacua

SEQ ID NO: 401581 - RNA, 22 nt, Human
cugacuaacacggugaaacccc

SEQ ID NO: 401582 - RNA, 32 nt, Human
cugacuaacacggugaaaccccaucucuacua

SEQ ID NO: 401583 - RNA, 22 nt, Human
cugacuaacauggugaaacccc

SEQ ID NO: 401584 - RNA, 32 nt, Human
cugacuaacauggugaaaccccaucucuacua

SEQ ID NO: 401585 - RNA, 32 nt, Human
cugacuaaugcuuccuuugagaaaagcaccgu

SEQ ID NO: 401586 - RNA, 32 nt, Human
cugacuaccuggagcuguuugagugcagccuc

SEQ ID NO: 401587 - RNA, 32 nt, Human
cugacuagaggaaaacuuccaggccuuguuag

SEQ ID NO: 401588 - RNA, 32 nt, Human
cugacuagcugcagaaaguguggccaugccac

SEQ ID NO: 401589 - RNA, 32 nt, Human
cugacuaggcagcaaagacaggaguaucuucu

SEQ ID NO: 401590 - RNA, 32 nt, Human
cugacuagggaggguagcaccugccucagaua

SEQ ID NO: 401591 - RNA, 32 nt, Human
cugacuaguacagcugagaucuuggcuucuca

SEQ ID NO: 401592 - RNA, 32 nt, Human
cugacuagucucaaacuucuaggcucaagcga

SEQ ID NO: 401593 - RNA, 18 nt, Human
cugacuaguguggccuca

SEQ ID NO: 401594 - RNA, 32 nt, Human
cugacuauccuauucuauagaggggaauauau

SEQ ID NO: 401595 - RNA, 32 nt, Human
cugacucaacagcaagaaaaaugaacuugcca

SEQ ID NO: 401596 - RNA, 32 nt, Human
cugacucaauaugucagguuuaacucugccca

SEQ ID NO: 401597 - RNA, 32 nt, Human
cugacucacucaaacaaaauugcucacuuucc

SEQ ID NO: 401598 - RNA, 32 nt, Human
cugacucacuggcuucucacccaccaguggcu

SEQ ID NO: 401599 - RNA, 32 nt, Human
cugacucagccugucucccaccucccgggccu

SEQ ID NO: 401600 - RNA, 32 nt, Human
cugacucagcucgaggcggccuugccacauau

SEQ ID NO: 401601 - RNA, 32 nt, Human
cugacucauagagauaaaauucuuugaaagaa

SEQ ID NO: 401602 - RNA, 32 nt, Human
cugacucaucaguugagggcagcuccagugcc

SEQ ID NO: 401603 - RNA, 32 nt, Human
cugacucauggagccuugugcaaggagagcca

SEQ ID NO: 401604 - RNA, 32 nt, Human
cugacucauucuucuuggcugcagccucuucc

SEQ ID NO: 401605 - RNA, 31 nt, Human
cugacucauuuucaggagguugggggaaaag

SEQ ID NO: 401606 - RNA, 32 nt, Human
cugacuccaagcucugggguuuugccaugaau

SEQ ID NO: 401607 - RNA, 32 nt, Human
cugacuccaccugccaagagucugagccugca

SEQ ID NO: 401608 - RNA, 32 nt, Human
cugacuccagaaggcaccaggagcaugcgacu

SEQ ID NO: 401609 - RNA, 32 nt, Human
cugacuccagcagagucugugccaaugugggg

SEQ ID NO: 401610 - RNA, 32 nt, Human
cugacuccagccuguccaugcacggcuacaau

SEQ ID NO: 401611 - RNA, 32 nt, Human
cugacuccagccuugggcucagcagcacccgg

SEQ ID NO: 401612 - RNA, 32 nt, Human
cugacuccagcgaugguucuguccucgugccu

SEQ ID NO: 401613 - RNA, 32 nt, Human
cugacuccaggccugaaccccucccgugcugu

SEQ ID NO: 401614 - RNA, 32 nt, Human
cugacuccaggcgugaguauggggaaggauac

SEQ ID NO: 401615 - RNA, 32 nt, Human
cugacuccaugucccaggaccucauuuccagg

SEQ ID NO: 401616 - RNA, 32 nt, Human
cugacuccauuucucaaucugccuugcaguga

SEQ ID NO: 401617 - RNA, 20 nt, Human
cugacuccccuuucauuccc

SEQ ID NO: 401618 - RNA, 32 nt, Human
cugacucccuuagagcaaaggagagacagccc

SEQ ID NO: 401619 - RNA, 32 nt, Human
cugacuccucaccgucuucaccaacaugggaa

SEQ ID NO: 401620 - RNA, 32 nt, Human
cugacuccuccaggaccagccaugguguggag

SEQ ID NO: 401621 - RNA, 31 nt, Human
cugacuccuccucugaggccuguguuggccu

SEQ ID NO: 401622 - RNA, 32 nt, Human
cugacuccuggcccaagucucuuccuccuauc

SEQ ID NO: 401623 - RNA, 32 nt, Human
cugacuccugguggcaaggaucaucccuucua

SEQ ID NO: 401624 - RNA, 32 nt, Human
cugacuccuuccccaaacccagggaaaagagc

SEQ ID NO: 401625 - RNA, 32 nt, Human
cugacuccuuuagaaucaucucagucucucua

SEQ ID NO: 401626 - RNA, 32 nt, Human
cugacucuaggugcccuuggaggccagccagu

SEQ ID NO: 401627 - RNA, 32 nt, Human
cugacucuaguacaaacagacacauugacccu

SEQ ID NO: 401628 - RNA, 32 nt, Human
cugacucuaucacccaggcuggagugcagugu

SEQ ID NO: 401629 - RNA, 32 nt, Human
cugacucucauggaagaugguggaaggaaaau

SEQ ID NO: 401630 - RNA, 32 nt, Human
cugacucuccacuccuccucacuaaaaaggaa

SEQ ID NO: 401631 - RNA, 32 nt, Human
cugacucuccugacucuccaucgcucugucca

SEQ ID NO: 401632 - RNA, 32 nt, Human
cugacucugagccaggguucccccagggaacu

SEQ ID NO: 401633 - RNA, 32 nt, Human
cugacucugaggugggcagugagggaagcagc

SEQ ID NO: 401634 - RNA, 32 nt, Human
cugacucugcagcuccucaugcuggccuaucc

SEQ ID NO: 401635 - RNA, 32 nt, Human
cugacucugcucucuaaugagaacaaaguuag

SEQ ID NO: 401636 - RNA, 32 nt, Human
cugacucuggaagcagugguuuugaagucuua

SEQ ID NO: 401637 - RNA, 32 nt, Human
cugacucuggaaugaccacuguucauugaaaa

SEQ ID NO: 401638 - RNA, 32 nt, Human
cugacucugggcagcauuggugaugcuguauc

SEQ ID NO: 401639 - RNA, 32 nt, Human
cugacucugucacccaggcuggagugcagcag

SEQ ID NO: 401640 - RNA, 32 nt, Human
cugacucugucacccaggcuggagugcggugg

SEQ ID NO: 401641 - RNA, 32 nt, Human
cugacucuucaaggggcaacugcaggggcucg

SEQ ID NO: 401642 - RNA, 32 nt, Human
cugacucuuccucuucccagcggacggcugga

SEQ ID NO: 401643 - RNA, 16 nt, Human
cugacucuuccuuccc

SEQ ID NO: 401644 - RNA, 17 nt, Human
cugacucuugggaccuu

SEQ ID NO: 401645 - RNA, 18 nt, Human
cugacucuuguggccuca

SEQ ID NO: 401646 - RNA, 32 nt, Human
cugacucuuuucuauuucugacccaaagccua

SEQ ID NO: 401647 - RNA, 32 nt, Human
cugacugaaauagacaaaguaagagggaaagg

SEQ ID NO: 401648 - RNA, 32 nt, Human
cugacugaacuagagcuugcagugaaguguuc

SEQ ID NO: 401649 - RNA, 32 nt, Human
cugacugaagaugcaauccaaccaaagccauu

SEQ ID NO: 401650 - RNA, 32 nt, Human
cugacugaauaccacuuuuaaaggaaugugaa

SEQ ID NO: 401651 - RNA, 32 nt, Human
cugacugaccagguccgcagugaacagaggcg

SEQ ID NO: 401652 - RNA, 32 nt, Human
cugacugagacaauucuguccauguaaagauc

SEQ ID NO: 401653 - RNA, 32 nt, Human
cugacugcaaccacugccuccaggguucaagc

SEQ ID NO: 401654 - RNA, 32 nt, Human
cugacugcaaccuccaccuccuggguucaagc

SEQ ID NO: 401655 - RNA, 21 nt, Human
cugacugcaaccuccgccucc

SEQ ID NO: 401656 - RNA, 32 nt, Human
cugacugcaagcccuggcugaggccaaugcug

SEQ ID NO: 401657 - RNA, 32 nt, Human
cugacugcaaucugugccuccugggcucaagc

SEQ ID NO: 401658 - RNA, 32 nt, Human
cugacugcagaacugccgcucucaguggacag

SEQ ID NO: 401659 - RNA, 32 nt, Human
cugacugcagucugugccuccugggcucaagc

SEQ ID NO: 401660 - RNA, 32 nt, Human
cugacugcagugggcaggguauguagcugcuc

SEQ ID NO: 401661 - RNA, 32 nt, Human
cugacugcaguuacagaaucugaugaagcgag

SEQ ID NO: 401662 - RNA, 32 nt, Human
cugacugcauagcucuuuuucuugagaggcuc

SEQ ID NO: 401663 - RNA, 32 nt, Human
cugacugccacacauccgccauggugccacgg

SEQ ID NO: 401664 - RNA, 32 nt, Human
cugacugccccuguguuaccugggcagcucca

SEQ ID NO: 401665 - RNA, 32 nt, Human
cugacugccugauccuggagcgcaccccaucc

SEQ ID NO: 401666 - RNA, 17 nt, Human
cugacugcgacuucccu

SEQ ID NO: 401667 - RNA, 32 nt, Human
cugacugcggccgccuccggccaggacgcugg

SEQ ID NO: 401668 - RNA, 32 nt, Human
cugacugcucugcaaaccccagccgaggaccu

SEQ ID NO: 401669 - RNA, 32 nt, Human
cugacugcucugucuuccugccuucgucucgc

SEQ ID NO: 401670 - RNA, 32 nt, Human
cugacugcuguucaggcccgcacaaugucccg

SEQ ID NO: 401671 - RNA, 32 nt, Human
cugacuggagagcugggaauauggcauuugga

SEQ ID NO: 401672 - RNA, 32 nt, Human
cugacuggagcagagucauuugcuucagcagg

SEQ ID NO: 401673 - RNA, 32 nt, Human
cugacuggcagaggaagauugcagugacagcu

SEQ ID NO: 401674 - RNA, 32 nt, Human
cugacuggcaggcagaaagugcaacugacgag

SEQ ID NO: 401675 - RNA, 32 nt, Human
cugacuggccuccuuuuccuuugacuggacca

SEQ ID NO: 401676 - RNA, 32 nt, Human
cugacuggccuccuuuuccuuugacuggaccg

SEQ ID NO: 401677 - RNA, 20 nt, Human
cugacuggccuggucuuuuu

SEQ ID NO: 401678 - RNA, 32 nt, Human
cugacuggcucaaaggaacaggauggcaccca

SEQ ID NO: 401679 - RNA, 32 nt, Human
cugacugggccugcagcucccuucuccuggga

SEQ ID NO: 401680 - RNA, 32 nt, Human
cugacugggcuacaauccauuguucuuagucc

SEQ ID NO: 401681 - RNA, 32 nt, Human
cugacuggggacccagaccgggagcugagcga

SEQ ID NO: 401682 - RNA, 32 nt, Human
cugacuggggcguccgacuggagcucagccgc

SEQ ID NO: 401683 - RNA, 32 nt, Human
cugacugggggcaggggaagagacagggcaca

SEQ ID NO: 401684 - RNA, 32 nt, Human
cugacuggugcucuuccugugagcggauagag

SEQ ID NO: 401685 - RNA, 32 nt, Human
cugacuguauuucuuugcccuaccucacuaua

SEQ ID NO: 401686 - RNA, 17 nt, Human
cugacuguccucucccu

SEQ ID NO: 401687 - RNA, 32 nt, Human
cugacugugcagugggaguccugggggaaugg

SEQ ID NO: 401688 - RNA, 32 nt, Human
cugacuguggcuggcugagaucgcaggugccu

SEQ ID NO: 401689 - RNA, 32 nt, Human
cugacugugguucccagcuccagcccuaguca

SEQ ID NO: 401690 - RNA, 32 nt, Human
cugacuguuccuucuacugcuuuucaguuccc

SEQ ID NO: 401691 - RNA, 32 nt, Human
cugacuguugcccaggcuggaguguaauggcg

SEQ ID NO: 401692 - RNA, 32 nt, Human
cugacuucaaaugcucugccugccucggccuc

SEQ ID NO: 401693 - RNA, 32 nt, Human
cugacuucaagcaauucuccugccucagccuc

SEQ ID NO: 401694 - RNA, 32 nt, Human
cugacuucaagugaucugcccaccucugccuc

SEQ ID NO: 401695 - RNA, 32 nt, Human
cugacuucaggugauccacccaccucggccuu

SEQ ID NO: 401696 - RNA, 32 nt, Human
cugacuucauuuccuuagacaagacacagugu

SEQ ID NO: 401697 - RNA, 32 nt, Human
cugacuucauuugugccacacgcaugggcauu

SEQ ID NO: 401698 - RNA, 32 nt, Human
cugacuuccacauucuguugcauuuauuugcc

SEQ ID NO: 401699 - RNA, 20 nt, Human
cugacuuccacucuggcuca

SEQ ID NO: 401700 - RNA, 20 nt, Human
cugacuuccaucuccugccu

SEQ ID NO: 401701 - RNA, 32 nt, Human
cugacuuccauggaauggggcagcagggccug

SEQ ID NO: 401702 - RNA, 32 nt, Human
cugacuuccccagcaaggaucuucccacuucc

SEQ ID NO: 401703 - RNA, 32 nt, Human
cugacuucccugacaucucucuccaaauacgg

SEQ ID NO: 401704 - RNA, 32 nt, Human
cugacuucccugccaucucucuccaaauacgg

SEQ ID NO: 401705 - RNA, 32 nt, Human
cugacuuccgcugugucgucaucccccaggaa

SEQ ID NO: 401706 - RNA, 32 nt, Human
cugacuuccucacuaaccucuucacguguaac

SEQ ID NO: 401707 - RNA, 32 nt, Human
cugacuuccucacuauccucuucacauguaac

SEQ ID NO: 401708 - RNA, 32 nt, Human
cugacuuccugugcuccucuggccacagguaa

SEQ ID NO: 401709 - RNA, 32 nt, Human
cugacuucgggaugggaaguggagcccccgga

SEQ ID NO: 401710 - RNA, 32 nt, Human
cugacuucugucuaggcucauggaugccaccc

SEQ ID NO: 401711 - RNA, 32 nt, Human
cugacuucuuccuccuccuccuucccugacuc

SEQ ID NO: 401712 - RNA, 32 nt, Human
cugacuucuuuaagcaccuuucuaaauaccag

SEQ ID NO: 401713 - RNA, 31 nt, Human
cugacuugcacagaaauucuguugaagacag

SEQ ID NO: 401714 - RNA, 32 nt, Human
cugacuugccuaggucauugugcacacguggc

SEQ ID NO: 401715 - RNA, 32 nt, Human
cugacuugcucauuuagacuguucacggaguc

SEQ ID NO: 401716 - RNA, 32 nt, Human
cugacuuggaaaccggugggugcaaugcccga

SEQ ID NO: 401717 - RNA, 31 nt, Human
cugacuuggacaaucugccaggacagaagcu

SEQ ID NO: 401718 - RNA, 32 nt, Human
cugacuuggacccuuuccacaccagacuggca

SEQ ID NO: 401719 - RNA, 32 nt, Human
cugacuuggauugucuuucuuucauaucacua

SEQ ID NO: 401720 - RNA, 32 nt, Human
cugacuuggcuuccugugaucugcauucauga

SEQ ID NO: 401721 - RNA, 32 nt, Human
cugacuuguuguucuuggcacauguucuuauu

SEQ ID NO: 401722 - RNA, 32 nt, Human
cugacuuuagccucgugcugagccguguaucc

SEQ ID NO: 401723 - RNA, 18 nt, Human
cugacuuuaggugaucca

SEQ ID NO: 401724 - RNA, 32 nt, Human
cugacuuuauuuuccauguauuacaaaaggaa

SEQ ID NO: 401725 - RNA, 32 nt, Human
cugacuuucuguugucuaccucaggccuugug

SEQ ID NO: 401726 - RNA, 22 nt, Human
cugacuuugcacuuugguuaca

SEQ ID NO: 401727 - RNA, 32 nt, Human
cugacuuugcccacucaacacuucaacucugg

SEQ ID NO: 401728 - RNA, 32 nt, Human
cugacuuugccucuguccugccugguguggag

SEQ ID NO: 401729 - RNA, 32 nt, Human
cugacuuuguauccucuccuuuuagaggcuuu

SEQ ID NO: 401730 - RNA, 24 nt, Human
cugacuuugugauccacccgccuc

SEQ ID NO: 401731 - RNA, 32 nt, Human
cugacuuuuaauccuuacuuugcucuauuccc

SEQ ID NO: 401732 - RNA, 32 nt, Human
cugagaaaaauggaugguauuuucuuaaaauu

SEQ ID NO: 401733 - RNA, 32 nt, Human
cugagaaaagccuggaaaaaucacacuucuuu

SEQ ID NO: 401734 - RNA, 32 nt, Human
cugagaaaaggugagaaagagaauggagaguu

SEQ ID NO: 401735 - RNA, 32 nt, Human
cugagaaacagcccccaguccuccuccacuac

SEQ ID NO: 401736 - RNA, 32 nt, Human
cugagaaacaugaaucccacugggacagaugg

SEQ ID NO: 401737 - RNA, 32 nt, Human
cugagaaaccagaguuaaaaccucuuuggagc

SEQ ID NO: 401738 - RNA, 32 nt, Human
cugagaaacuggaucugaggaggcaggaaagg

SEQ ID NO: 401739 - RNA, 32 nt, Human
cugagaaacuugacaaguaucucuccauuuua

SEQ ID NO: 401740 - RNA, 32 nt, Human
cugagaaagaacagcugagugguuguucucag

SEQ ID NO: 401741 - RNA, 32 nt, Human
cugagaaagcuucagcauuucucuugcuaaca

SEQ ID NO: 401742 - RNA, 32 nt, Human
cugagaaaggaaaucauguucacugguagaag

SEQ ID NO: 401743 - RNA, 32 nt, Human
cugagaaaggaagcugcuuagagccagggggu

SEQ ID NO: 401744 - RNA, 32 nt, Human
cugagaaaggucauuucucccacacacgacaa

SEQ ID NO: 401745 - RNA, 22 nt, Human
cugagaaauagugcacuccaag

SEQ ID NO: 401746 - RNA, 31 nt, Human
cugagaaaucugguuaaaacacauuaauuau

SEQ ID NO: 401747 - RNA, 32 nt, Human
cugagaacaaucucuuauaccaccccacaaag

SEQ ID NO: 401748 - RNA, 32 nt, Human
cugagaacccacucacacccacccucaguggc

SEQ ID NO: 401749 - RNA, 32 nt, Human
cugagaacccagccagucaggaagucgcuacu

SEQ ID NO: 401750 - RNA, 32 nt, Human
cugagaacccagcgauaagggggcguucccaa

SEQ ID NO: 401751 - RNA, 19 nt, Human
cugagaaccccugccccca

SEQ ID NO: 401752 - RNA, 31 nt, Human
cugagaaccuuccaaaaacccgcccgaauuc

SEQ ID NO: 401753 - RNA, 32 nt, Human
cugagaacuauacaaccuuucccagacuccca

SEQ ID NO: 401754 - RNA, 32 nt, Human
cugagaacuccucauucccugacucuuagccc

SEQ ID NO: 401755 - RNA, 32 nt, Human
cugagaacugacccucacaucucccuuccuga

SEQ ID NO: 401756 - RNA, 32 nt, Human
cugagaagaaaaucguauguugucauucucug

SEQ ID NO: 401757 - RNA, 32 nt, Human
cugagaagaggaagaugaagaggaggaagagg

SEQ ID NO: 401758 - RNA, 32 nt, Human
cugagaagauucugauaacagaaacaaacaac

SEQ ID NO: 401759 - RNA, 32 nt, Human
cugagaagcagacucugcaucuguaaaaggcu

SEQ ID NO: 401760 - RNA, 30 nt, Human
cugagaagccucucacaagcucuuuagcca

SEQ ID NO: 401761 - RNA, 32 nt, Human
cugagaagcucccuaccucccugcccuucucc

SEQ ID NO: 401762 - RNA, 21 nt, Human
cugagaagcugggacuacagg

SEQ ID NO: 401763 - RNA, 32 nt, Human
cugagaaggaaaaaggagcccagcaagaagag

SEQ ID NO: 401764 - RNA, 32 nt, Human
cugagaaggccuggccccuuccugugcugagc

SEQ ID NO: 401765 - RNA, 32 nt, Human
cugagaagggcagaucuucugaggucaggagu

SEQ ID NO: 401766 - RNA, 32 nt, Human
cugagaagggccugagccccagggaccccuca

SEQ ID NO: 401767 - RNA, 24 nt, Human
cugagaagggcggaucacgagguc

SEQ ID NO: 401768 - RNA, 32 nt, Human
cugagaaguucaggaagauggaggaugaggau

SEQ ID NO: 401769 - RNA, 32 nt, Human
cugagaaucagcacacaccauauuucaaauau

SEQ ID NO: 401770 - RNA, 32 nt, Human
cugagaaucccagcuacucagaagguugagac

SEQ ID NO: 401771 - RNA, 32 nt, Human
cugagaaucccccaguuaagaugauuucccuu

SEQ ID NO: 401772 - RNA, 32 nt, Human
cugagaaucccgugcucuccucucuuuuggug

SEQ ID NO: 401773 - RNA, 32 nt, Human
cugagaaugaggcaguuugacacagaucacaa

SEQ ID NO: 401774 - RNA, 18 nt, Human
cugagaaugcaccaaaga

SEQ ID NO: 401775 - RNA, 32 nt, Human
cugagaaugccuaggccagcuccuuagacacc

SEQ ID NO: 401776 - RNA, 32 nt, Human
cugagaauggaugggagaggagaggaagaggg

SEQ ID NO: 401777 - RNA, 32 nt, Human
cugagacaacaaucagaauacagacuuuggau

SEQ ID NO: 401778 - RNA, 32 nt, Human
cugagacaccucagggcugcauucagcuuacc

SEQ ID NO: 401779 - RNA, 18 nt, Human
cugagacacgccccaaca

SEQ ID NO: 401780 - RNA, 32 nt, Human
cugagacacgcuugaagaguuccuggauggcc

SEQ ID NO: 401781 - RNA, 19 nt, Human
cugagacacuucuacaaca

SEQ ID NO: 401782 - RNA, 32 nt, Human
cugagacagacggaucaccugaggccaggaau

SEQ ID NO: 401783 - RNA, 32 nt, Human
cugagacagcaaccugccuggccugggaagcc

SEQ ID NO: 401784 - RNA, 23 nt, Human
cugagacagcagcccagggcagg

SEQ ID NO: 401785 - RNA, 32 nt, Human
cugagacagcucccagcacucauucauucauu

SEQ ID NO: 401786 - RNA, 19 nt, Human
cugagacaggacaggaagg

SEQ ID NO: 401787 - RNA, 24 nt, Human
cugagacaggagaagugcuugaac

SEQ ID NO: 401788 - RNA, 24 nt, Human
cugagacaggagaaucaccugaac

SEQ ID NO: 401789 - RNA, 24 nt, Human
cugagacaggagaaucacuugaac

SEQ ID NO: 401790 - RNA, 24 nt, Human
cugagacaggagaaucacuugagc

SEQ ID NO: 401791 - RNA, 24 nt, Human
cugagacaggagaaucccuugaac

SEQ ID NO: 401792 - RNA, 24 nt, Human
cugagacaggagaaucgcuugaac

SEQ ID NO: 401793 - RNA, 24 nt, Human
cugagacaggagaaucgcuugaau

SEQ ID NO: 401794 - RNA, 24 nt, Human
cugagacaggagaaucucuugaac

SEQ ID NO: 401795 - RNA, 24 nt, Human
cugagacaggagaauggcgugaau

SEQ ID NO: 401796 - RNA, 24 nt, Human
cugagacaggagaauggugugaac

SEQ ID NO: 401797 - RNA, 24 nt, Human
cugagacaggagaauugcuugaac

SEQ ID NO: 401798 - RNA, 32 nt, Human
cugagacaggagacuugcuugaaugugggagg

SEQ ID NO: 401799 - RNA, 24 nt, Human
cugagacaggagagucgcuugaac

SEQ ID NO: 401800 - RNA, 24 nt, Human
cugagacaggaggaucgcuugaac

SEQ ID NO: 401801 - RNA, 32 nt, Human
cugagacaggcagaucaccugaggucacgaau

SEQ ID NO: 401802 - RNA, 32 nt, Human
cugagacaggcagaucacuugaggucaggagu

SEQ ID NO: 401803 - RNA, 24 nt, Human
cugagacaggcggaucacgagguc

SEQ ID NO: 401804 - RNA, 32 nt, Human
cugagacagguggaucacuugaggucaggagu

SEQ ID NO: 401805 - RNA, 32 nt, Human
cugagacagugccaccaccagcaccucccaca

SEQ ID NO: 401806 - RNA, 32 nt, Human
cugagacagugggagagccugaagcagaaucc

SEQ ID NO: 401807 - RNA, 32 nt, Human
cugagacauagcagugccuggcccagcgggga

SEQ ID NO: 401808 - RNA, 32 nt, Human
cugagacauuacaaaguaucugccucaauuau

SEQ ID NO: 401809 - RNA, 32 nt, Human
cugagaccaagaagggagagcacaagacuaac

SEQ ID NO: 401810 - RNA, 32 nt, Human
cugagaccacgguccaauccagccuucuuccc

SEQ ID NO: 401811 - RNA, 32 nt, Human
cugagaccagaacuugcagccccucugcagau

SEQ ID NO: 401812 - RNA, 32 nt, Human
cugagaccagccugagcaacaugaugagaccc

SEQ ID NO: 401813 - RNA, 32 nt, Human
cugagaccagccuggccaacauggcaaaaccc

SEQ ID NO: 401814 - RNA, 32 nt, Human
cugagaccagccuggcuaacauggugaaaccc

SEQ ID NO: 401815 - RNA, 32 nt, Human
cugagaccagccuggcuuacauggugaaaccc

SEQ ID NO: 401816 - RNA, 23 nt, Human
cugagaccagccugggcaacaua

SEQ ID NO: 401817 - RNA, 32 nt, Human
cugagaccagccugggcaacauggugaaaccc

SEQ ID NO: 401818 - RNA, 20 nt, Human
cugagaccagcuauuacaac

SEQ ID NO: 401819 - RNA, 32 nt, Human
cugagaccagcuugggcaacaugguggagccc

SEQ ID NO: 401820 - RNA, 32 nt, Human
cugagaccaggagguugaggcugcagugagcc

SEQ ID NO: 401821 - RNA, 32 nt, Human
cugagaccaguccuggccaggguaguuaccag

SEQ ID NO: 401822 - RNA, 32 nt, Human
cugagaccaguugcuggugaaacugggccaau

SEQ ID NO: 401823 - RNA, 32 nt, Human
cugagaccauccuagccaacauggugaaaacc

SEQ ID NO: 401824 - RNA, 32 nt, Human
cugagaccauccuagccaacauggugaaaccc

SEQ ID NO: 401825 - RNA, 32 nt, Human
cugagaccauccuggccaacauggugaacacc

SEQ ID NO: 401826 - RNA, 32 nt, Human
cugagaccauccuggcuaacaccaugaugggc

SEQ ID NO: 401827 - RNA, 32 nt, Human
cugagaccauccuggcuaacacggugaaaccc

SEQ ID NO: 401828 - RNA, 32 nt, Human
cugagacccaggcugguguggacacaaggaag

SEQ ID NO: 401829 - RNA, 32 nt, Human
cugagacccgaaaagaccugggugcaagccuc

SEQ ID NO: 401830 - RNA, 32 nt, Human
cugagacccgugagcagcuacaagccgaagug

SEQ ID NO: 401831 - RNA, 32 nt, Human
cugagaccucaaacccuggcuccagugucaug

SEQ ID NO: 401832 - RNA, 32 nt, Human
cugagaccuccguccucugcuuuccgggcagc

SEQ ID NO: 401833 - RNA, 32 nt, Human
cugagaccugggaggaagcuggagaaaagaug

SEQ ID NO: 401834 - RNA, 32 nt, Human
cugagaccuuccaggcccugaggaaucccggg

SEQ ID NO: 401835 - RNA, 17 nt, Human
cugagacgacuacagca

SEQ ID NO: 401836 - RNA, 18 nt, Human
cugagacgagcacagggu

SEQ ID NO: 401837 - RNA, 32 nt, Human
cugagacgagcgggagcgcggagcagcagccu

SEQ ID NO: 401838 - RNA, 28 nt, Human
cugagacggcagagaccccaggauccca

SEQ ID NO: 401839 - RNA, 32 nt, Human
cugagacgggcagaucaccugagaucaggagu

SEQ ID NO: 401840 - RNA, 32 nt, Human
cugagacggguggauuaccugaggucaggacu

SEQ ID NO: 401841 - RNA, 32 nt, Human
cugagacuaacaauuggagacugaggccagag

SEQ ID NO: 401842 - RNA, 32 nt, Human
cugagacuaagaauugaagcaaugcaguuuua

SEQ ID NO: 401843 - RNA, 32 nt, Human
cugagacuaagaauugaaguaaugcaguuuua

SEQ ID NO: 401844 - RNA, 32 nt, Human
cugagacuauacaggugcaggccaccacucuu

SEQ ID NO: 401845 - RNA, 32 nt, Human
cugagacuccagccucuccuccuggggccacc

SEQ ID NO: 401846 - RNA, 32 nt, Human
cugagacucgguuuucucaucuguaaaauggg

SEQ ID NO: 401847 - RNA, 32 nt, Human
cugagacucucaccuuugcuuccaggggagag

SEQ ID NO: 401848 - RNA, 32 nt, Human
cugagacugcacuagggucuggggacacagaa

SEQ ID NO: 401849 - RNA, 22 nt, Human
cugagacugcaggcacgagcca

SEQ ID NO: 401850 - RNA, 32 nt, Human
cugagacugccuggcaacggcugaugccccag

SEQ ID NO: 401851 - RNA, 32 nt, Human
cugagacugggguugaggggacugacgggggc

SEQ ID NO: 401852 - RNA, 32 nt, Human
cugagacugugccauugcacuccagucggguu

SEQ ID NO: 401853 - RNA, 18 nt, Human
cugagacuguuacuacaa

SEQ ID NO: 401854 - RNA, 32 nt, Human
cugagacuuacgcccuguucccuuccugcccu

SEQ ID NO: 401855 - RNA, 32 nt, Human
cugagacuucaagaggcaaaauaauuuaccca

SEQ ID NO: 401856 - RNA, 32 nt, Human
cugagacuuccucugcaguugaugugguccug

SEQ ID NO: 401857 - RNA, 32 nt, Human
cugagacuugaaucaagucagcaacagagcaa

SEQ ID NO: 401858 - RNA, 32 nt, Human
cugagacuuggaccuuccccagccccugggcc

SEQ ID NO: 401859 - RNA, 32 nt, Human
cugagacuuucuacuuuaacaguuucacaguc

SEQ ID NO: 401860 - RNA, 31 nt, Human
cugagagaacaauguuucacuuaauaggagg

SEQ ID NO: 401861 - RNA, 32 nt, Human
cugagagaagcacagaaccuggcauucacugg

SEQ ID NO: 401862 - RNA, 23 nt, Human
cugagagaauccugagacauccc

SEQ ID NO: 401863 - RNA, 32 nt, Human
cugagagacaagauuccugggcccugccuucc

SEQ ID NO: 401864 - RNA, 32 nt, Human
cugagagaccaccacccuccaugccuccagcu

SEQ ID NO: 401865 - RNA, 32 nt, Human
cugagagaccauagggagguuggggcucacug

SEQ ID NO: 401866 - RNA, 19 nt, Human
cugagagacccuggccuca

SEQ ID NO: 401867 - RNA, 32 nt, Human
cugagagagacagaagccccagccccagaacc

SEQ ID NO: 401868 - RNA, 32 nt, Human
cugagagagccaccaaggaggagcaggggagc

SEQ ID NO: 401869 - RNA, 32 nt, Human
cugagagagcccagccugaugccagaacaaag

SEQ ID NO: 401870 - RNA, 32 nt, Human
cugagagaggaacucuguggggugggggccgu

SEQ ID NO: 401871 - RNA, 32 nt, Human
cugagagaguccacauccacagacuguuucau

SEQ ID NO: 401872 - RNA, 22 nt, Human
cugagagaugcacaacagucau

SEQ ID NO: 401873 - RNA, 20 nt, Human
cugagagauuaaaggaacag

SEQ ID NO: 401874 - RNA, 32 nt, Human
cugagagcacaucgccaggggaagaggacugu

SEQ ID NO: 401875 - RNA, 32 nt, Human
cugagagcaccacugaacuuagaccucucaac

SEQ ID NO: 401876 - RNA, 32 nt, Human
cugagagcacccagaggaccgaggacaggggc

SEQ ID NO: 401877 - RNA, 32 nt, Human
cugagagcaccgcugcacucgcggccggcgau

SEQ ID NO: 401878 - RNA, 32 nt, Human
cugagagcaguggcucacgccuguaaucccag

SEQ ID NO: 401879 - RNA, 32 nt, Human
cugagagcaguggcucaugccuguaaucccag

SEQ ID NO: 401880 - RNA, 32 nt, Human
cugagagcauccuggcaccugggagcgcaggu

SEQ ID NO: 401881 - RNA, 32 nt, Human
cugagagccacugaauuagaacaagggaacug

SEQ ID NO: 401882 - RNA, 32 nt, Human
cugagagcccccuuccucugagggccccaccu

SEQ ID NO: 401883 - RNA, 32 nt, Human
cugagagcccucuccucuggagcacacaccac

SEQ ID NO: 401884 - RNA, 32 nt, Human
cugagagccugcccacuguccagauccaguga

SEQ ID NO: 401885 - RNA, 32 nt, Human
cugagagcucagaagugagcaaaggagcuuaa

SEQ ID NO: 401886 - RNA, 32 nt, Human
cugagagcucagaggauuccugccaggccuca

SEQ ID NO: 401887 - RNA, 32 nt, Human
cugagagcucucucuucucuguuacaaaacga

SEQ ID NO: 401888 - RNA, 17 nt, Human
cugagagcucuggccuc

SEQ ID NO: 401889 - RNA, 32 nt, Human
cugagagcugcagagaugaccugcuggcagag

SEQ ID NO: 401890 - RNA, 32 nt, Human
cugagagcugccucucaaucccugucccaagc

SEQ ID NO: 401891 - RNA, 20 nt, Human
cugagagcugggacuacagg

SEQ ID NO: 401892 - RNA, 32 nt, Human
cugagagcuggucugcguuucccaggcgcggc

SEQ ID NO: 401893 - RNA, 32 nt, Human
cugagagcuguggguagggaagggcccaaguc

SEQ ID NO: 401894 - RNA, 32 nt, Human
cugagaggaaaaggaaaagggaagggagagaa

SEQ ID NO: 401895 - RNA, 32 nt, Human
cugagaggaaccuggacauggucccgggcauc

SEQ ID NO: 401896 - RNA, 32 nt, Human
cugagaggaaugcgcagcugaagagagaggug

SEQ ID NO: 401897 - RNA, 32 nt, Human
cugagaggacgcagcauagaaaaugcuuauga

SEQ ID NO: 401898 - RNA, 32 nt, Human
cugagaggagcguggcugucuccucucuccgc

SEQ ID NO: 401899 - RNA, 19 nt, Human
cugagaggaggagggcacu

SEQ ID NO: 401900 - RNA, 32 nt, Human
cugagaggcacuucacucacaggccuguggga

SEQ ID NO: 401901 - RNA, 24 nt, Human
cugagaggcagagguuacagugag

SEQ ID NO: 401902 - RNA, 24 nt, Human
cugagaggcagagguugcagugag

SEQ ID NO: 401903 - RNA, 22 nt, Human
cugagaggccggggcucaggga

SEQ ID NO: 401904 - RNA, 24 nt, Human
cugagaggcggagguugcagugag

SEQ ID NO: 401905 - RNA, 32 nt, Human
cugagaggcuacuuggaaaggcauuuucccag

SEQ ID NO: 401906 - RNA, 32 nt, Human
cugagaggcugacagaggcaggaugggugcaa

SEQ ID NO: 401907 - RNA, 32 nt, Human
cugagaggcugaggcaggagaauaacuggaau

SEQ ID NO: 401908 - RNA, 32 nt, Human
cugagagggaaaggaagguuggaauggcggau

SEQ ID NO: 401909 - RNA, 32 nt, Human
cugagagggcgguggagguggugaggaggauc

SEQ ID NO: 401910 - RNA, 32 nt, Human
cugagagggcugggccagaauuuuccugggcc

SEQ ID NO: 401911 - RNA, 31 nt, Human
cugagaggggagagagacuggagcuggcaag

SEQ ID NO: 401912 - RNA, 32 nt, Human
cugagaggucacagcucugccucacagcaccc

SEQ ID NO: 401913 - RNA, 32 nt, Human
cugagaggucaggaaggggaccucuuugaggg

SEQ ID NO: 401914 - RNA, 32 nt, Human
cugagaggugccgucuggcccuucccugcagg

SEQ ID NO: 401915 - RNA, 24 nt, Human
cugagagguggagguuacagugag

SEQ ID NO: 401916 - RNA, 24 nt, Human
cugagagguggagguugcagugag

SEQ ID NO: 401917 - RNA, 32 nt, Human
cugagagguggcuguuggucaggacgggaagc

SEQ ID NO: 401918 - RNA, 32 nt, Human
cugagaguaaaaagauuaugcugcaaagcuau

SEQ ID NO: 401919 - RNA, 32 nt, Human
cugagagucaaggcggaggucgcgguaagccg

SEQ ID NO: 401920 - RNA, 32 nt, Human
cugagaguccaaaauauauuuuuccagcccga

SEQ ID NO: 401921 - RNA, 32 nt, Human
cugagaguggagaugggggcgggggugguggu

SEQ ID NO: 401922 - RNA, 32 nt, Human
cugagaguggggguggcugggagcagcgcagc

SEQ ID NO: 401923 - RNA, 32 nt, Human
cugagagugucuuggggagaccuugcagaggg

SEQ ID NO: 401924 - RNA, 32 nt, Human
cugagagugugggcagcuucacgggggacgac

SEQ ID NO: 401925 - RNA, 32 nt, Human
cugagaguuaacuaacuugcccaaggucacac

SEQ ID NO: 401926 - RNA, 19 nt, Human
cugagaguuggaggcugcg

SEQ ID NO: 401927 - RNA, 32 nt, Human
cugagauaaaaauuugguucugggaaacugaa

SEQ ID NO: 401928 - RNA, 32 nt, Human
cugagauaaaacugagcagggugggaccagag

SEQ ID NO: 401929 - RNA, 32 nt, Human
cugagauaauuccaaugugcagucaggauuga

SEQ ID NO: 401930 - RNA, 18 nt, Human
cugagauagaauugugau

SEQ ID NO: 401931 - RNA, 32 nt, Human
cugagauaguaaacaagauggcuggccagguc

SEQ ID NO: 401932 - RNA, 32 nt, Human
cugagaucacuggcccacucgggccaggcggu

SEQ ID NO: 401933 - RNA, 27 nt, Human
cugagaucagaaguucgagaccagccu

SEQ ID NO: 401934 - RNA, 32 nt, Human
cugagaucagcccaaaucaaggugucccugug

SEQ ID NO: 401935 - RNA, 32 nt, Human
cugagaucaggaguucaagaccagccuggcca

SEQ ID NO: 401936 - RNA, 32 nt, Human
cugagaucaggaguucgagaccagccuggcca

SEQ ID NO: 401937 - RNA, 32 nt, Human
cugagaucaggaguucgagaccagccuggccc

SEQ ID NO: 401938 - RNA, 32 nt, Human
cugagaucaggaguucgggaccagccugggca

SEQ ID NO: 401939 - RNA, 32 nt, Human
cugagaucaggaguuugaggccagucuggcca

SEQ ID NO: 401940 - RNA, 32 nt, Human
cugagaucagugagcucugaucuccaagggaa

SEQ ID NO: 401941 - RNA, 32 nt, Human
cugagaucaugcugcuuucuucuucagaucug

SEQ ID NO: 401942 - RNA, 32 nt, Human
cugagauccacaaaguggagauagcaguagca

SEQ ID NO: 401943 - RNA, 32 nt, Human
cugagauccacgaggcagaggcagcaguagcg

SEQ ID NO: 401944 - RNA, 32 nt, Human
cugagauccagagagaugaugacuuugcccau

SEQ ID NO: 401945 - RNA, 32 nt, Human
cugagauccuucagguccccuggcccuuccuu

SEQ ID NO: 401946 - RNA, 19 nt, Human
cugagauccuugggaucuu

SEQ ID NO: 401947 - RNA, 32 nt, Human
cugagaucgagaguucaagaccagccuggcca

SEQ ID NO: 401948 - RNA, 32 nt, Human
cugagaucgcugcacuccagccugggcgacaa

SEQ ID NO: 401949 - RNA, 32 nt, Human
cugagaucguacccagccugggcaacagugcg

SEQ ID NO: 401950 - RNA, 32 nt, Human
cugagaucuacaaaugggaagcuugugagugg

SEQ ID NO: 401951 - RNA, 32 nt, Human
cugagaucugggaugugcacgaaugcuguucu

SEQ ID NO: 401952 - RNA, 32 nt, Human
cugagaugagacuucauggaaggggcuacaaa

SEQ ID NO: 401953 - RNA, 32 nt, Human
cugagaugagcagcagcgcagaggaggugccc

SEQ ID NO: 401954 - RNA, 32 nt, Human
cugagaugaugagucuguguugcuuuaagcca

SEQ ID NO: 401955 - RNA, 22 nt, Human
cugagaugauggaaauguucua

SEQ ID NO: 401956 - RNA, 32 nt, Human
cugagaugcagagcaggauggagggucugcuu

SEQ ID NO: 401957 - RNA, 32 nt, Human
cugagaugccuggcuacuuggcaccagggacu

SEQ ID NO: 401958 - RNA, 32 nt, Human
cugagaugcggaaagggucagagcagggcucg

SEQ ID NO: 401959 - RNA, 32 nt, Human
cugagaugcugugugauauguccuccuuacca

SEQ ID NO: 401960 - RNA, 32 nt, Human
cugagauggaaccuggccucaguuuaggaaca

SEQ ID NO: 401961 - RNA, 32 nt, Human
cugagauggaagcugucuugggcuuguugucu

SEQ ID NO: 401962 - RNA, 32 nt, Human
cugagauggagacagaaggaggggacuuauuu

SEQ ID NO: 401963 - RNA, 32 nt, Human
cugagauggaguuucacucuuguugcccaggc

SEQ ID NO: 401964 - RNA, 32 nt, Human
cugagauggcagugcacacacccuccccacca

SEQ ID NO: 401965 - RNA, 23 nt, Human
cugagaugggaggaucgcuugag

SEQ ID NO: 401966 - RNA, 32 nt, Human
cugagaugggcagaucacuugaggucaggagu

SEQ ID NO: 401967 - RNA, 24 nt, Human
cugagauggguggaucaccugaga

SEQ ID NO: 401968 - RNA, 32 nt, Human
cugagauggguggaucaccugagcucaggagu

SEQ ID NO: 401969 - RNA, 32 nt, Human
cugagauggucuggaggauucucucuagccgu

SEQ ID NO: 401970 - RNA, 32 nt, Human
cugagauguagaaaguuucucaaaggaaaagc

SEQ ID NO: 401971 - RNA, 18 nt, Human
cugagaugucagaucuca

SEQ ID NO: 401972 - RNA, 32 nt, Human
cugagaugugguccccaaggggccagaaauuc

SEQ ID NO: 401973 - RNA, 32 nt, Human
cugagauguguucuguccagcaggugcccgaa

SEQ ID NO: 401974 - RNA, 22 nt, Human
cugagauuacagacgugagcca

SEQ ID NO: 401975 - RNA, 22 nt, Human
cugagauuacaggcauaagcca

SEQ ID NO: 401976 - RNA, 22 nt, Human
cugagauuacaggcaugaacca

SEQ ID NO: 401977 - RNA, 22 nt, Human
cugagauuacaggcaugaccca

SEQ ID NO: 401978 - RNA, 22 nt, Human
cugagauuacaggcaugagcca

SEQ ID NO: 401979 - RNA, 22 nt, Human
cugagauuacaggcaugagcua

SEQ ID NO: 401980 - RNA, 22 nt, Human
cugagauuacaggccugagcca

SEQ ID NO: 401981 - RNA, 22 nt, Human
cugagauuacaggcgugagcca

SEQ ID NO: 401982 - RNA, 32 nt, Human
cugagauugcacuccagccugggcgacaggcu

SEQ ID NO: 401983 - RNA, 32 nt, Human
cugagauugccuggccaggcucacucacuacc

SEQ ID NO: 401984 - RNA, 32 nt, Human
cugagauugcgccacuguacuccugggcaaca

SEQ ID NO: 401985 - RNA, 32 nt, Human
cugagauugggaguucgagaccagccugucca

SEQ ID NO: 401986 - RNA, 32 nt, Human
cugagauuguaccaugcacuccagccugggua

SEQ ID NO: 401987 - RNA, 32 nt, Human
cugagauuguagagauugagugcucuggaccg

SEQ ID NO: 401988 - RNA, 24 nt, Human
cugagauugugccacugcacucca

SEQ ID NO: 401989 - RNA, 32 nt, Human
cugagauuugggguaugaaugaaagugugagu

SEQ ID NO: 401990 - RNA, 22 nt, Human
cugagauuuggugguucugcau

SEQ ID NO: 401991 - RNA, 32 nt, Human
cugagcaaaacagacaaaaauugaguugugaa

SEQ ID NO: 401992 - RNA, 32 nt, Human
cugagcaaaacccaugauucuucaagacagag

SEQ ID NO: 401993 - RNA, 21 nt, Human
cugagcaaaacguggcuuuca

SEQ ID NO: 401994 - RNA, 32 nt, Human
cugagcaaacagcgugaugacacucaccugua

SEQ ID NO: 401995 - RNA, 23 nt, Human
cugagcaacaaaagcaaaacucu

SEQ ID NO: 401996 - RNA, 21 nt, Human
cugagcaacaaagcaagaccc

SEQ ID NO: 401997 - RNA, 23 nt, Human
cugagcaacaagagcaaaacucc

SEQ ID NO: 401998 - RNA, 22 nt, Human
cugagcaacacagugagacccu

SEQ ID NO: 401999 - RNA, 24 nt, Human
cugagcaacagagcaaaaccccgu

SEQ ID NO: 402000 - RNA, 22 nt, Human
cugagcaacagagcaagacaca

SEQ ID NO: 402001 - RNA, 24 nt, Human
cugagcaacauaaugagacccugu

SEQ ID NO: 402002 - RNA, 24 nt, Human
cugagcaacauagcaaaacccugu

SEQ ID NO: 402003 - RNA, 24 nt, Human
cugagcaacauagcaagaugcugu

SEQ ID NO: 402004 - RNA, 21 nt, Human
cugagcaacauagcgagaccc

SEQ ID NO: 402005 - RNA, 21 nt, Human
cugagcaacauagcgagaccu

SEQ ID NO: 402006 - RNA, 21 nt, Human
cugagcaacauagugagaccc

SEQ ID NO: 402007 - RNA, 22 nt, Human
cugagcaacauagugagacccc

SEQ ID NO: 402008 - RNA, 24 nt, Human
cugagcaacauagugagacccugu

SEQ ID NO: 402009 - RNA, 21 nt, Human
cugagcaacauaucaaaaccc

SEQ ID NO: 402010 - RNA, 24 nt, Human
cugagcaacauaucaaaaccccgu

SEQ ID NO: 402011 - RNA, 24 nt, Human
cugagcaacaugaugaaacuccgu

SEQ ID NO: 402012 - RNA, 21 nt, Human
cugagcaacaugaugagaccc

SEQ ID NO: 402013 - RNA, 22 nt, Human
cugagcaacaugaugagacccc

SEQ ID NO: 402014 - RNA, 24 nt, Human
cugagcaacauggcgaaaccccgu

SEQ ID NO: 402015 - RNA, 32 nt, Human
cugagcaacauggcgaaaccccgucucuacua

SEQ ID NO: 402016 - RNA, 32 nt, Human
cugagcaacauggcgaaaccccgucuguaaua

SEQ ID NO: 402017 - RNA, 21 nt, Human
cugagcaacauggcgaaaccu

SEQ ID NO: 402018 - RNA, 22 nt, Human
cugagcaacauggcgaaaccuc

SEQ ID NO: 402019 - RNA, 32 nt, Human
cugagcaacauggcgaaaccucauaucuacaa

SEQ ID NO: 402020 - RNA, 21 nt, Human
cugagcaacaugguaaaaccc

SEQ ID NO: 402021 - RNA, 22 nt, Human
cugagcaacaugguaaaacccc

SEQ ID NO: 402022 - RNA, 32 nt, Human
cugagcaacaugguaaaaccccaucucuacca

SEQ ID NO: 402023 - RNA, 20 nt, Human
cugagcaacauggugaaacc

SEQ ID NO: 402024 - RNA, 24 nt, Human
cugagcaacauggugaaaccccgu

SEQ ID NO: 402025 - RNA, 32 nt, Human
cugagcaacauggugaaacccugucucuacca

SEQ ID NO: 402026 - RNA, 32 nt, Human
cugagcaacauggugagagcucaucucuacau

SEQ ID NO: 402027 - RNA, 23 nt, Human
cugagcaaccacauauugcuaca

SEQ ID NO: 402028 - RNA, 32 nt, Human
cugagcaaccccagcucugccucacaggcagg

SEQ ID NO: 402029 - RNA, 21 nt, Human
cugagcaagaucuugucucca

SEQ ID NO: 402030 - RNA, 23 nt, Human
cugagcaagggccugcacuucca

SEQ ID NO: 402031 - RNA, 23 nt, Human
cugagcaaggucugcagccccca

SEQ ID NO: 402032 - RNA, 32 nt, Human
cugagcaagucccggcccugcccucagcgagc

SEQ ID NO: 402033 - RNA, 19 nt, Human
cugagcaaucuugucucca

SEQ ID NO: 402034 - RNA, 32 nt, Human
cugagcaauguggugaaaccccaucucuacua

SEQ ID NO: 402035 - RNA, 32 nt, Human
cugagcacagcccagagccaauaaaagaucuu

SEQ ID NO: 402036 - RNA, 32 nt, Human
cugagcacaggaguuggaggcugcaguaagcc

SEQ ID NO: 402037 - RNA, 32 nt, Human
cugagcacagucaggggcugggcaucccagcu

SEQ ID NO: 402038 - RNA, 32 nt, Human
cugagcaccagcuggccaggaugggucuucaa

SEQ ID NO: 402039 - RNA, 32 nt, Human
cugagcaccgccagccaccggcaccaagaccg

SEQ ID NO: 402040 - RNA, 32 nt, Human
cugagcaccgugcagucggccucccaggccau

SEQ ID NO: 402041 - RNA, 20 nt, Human
cugagcaccuggucagucug

SEQ ID NO: 402042 - RNA, 32 nt, Human
cugagcaccuguggcccugggugcagguuaac

SEQ ID NO: 402043 - RNA, 32 nt, Human
cugagcacgguagggcagccuggugagagggg

SEQ ID NO: 402044 - RNA, 32 nt, Human
cugagcacuauauuuugcugggcuauaaaagg

SEQ ID NO: 402045 - RNA, 32 nt, Human
cugagcacuguggcucaugcuuguaaucccag

SEQ ID NO: 402046 - RNA, 32 nt, Human
cugagcacuuucugacagcaguggcccaccau

SEQ ID NO: 402047 - RNA, 32 nt, Human
cugagcagaagaacuggagaaagggaaccaca

SEQ ID NO: 402048 - RNA, 31 nt, Human
cugagcagacaccagcuucagaugcucgagg

SEQ ID NO: 402049 - RNA, 32 nt, Human
cugagcagacaggccaaccggaggacaggauu

SEQ ID NO: 402050 - RNA, 20 nt, Human
cugagcagacgcuggccuca

SEQ ID NO: 402051 - RNA, 32 nt, Human
cugagcagagaggcuggugaugaaaaggugaa

SEQ ID NO: 402052 - RNA, 22 nt, Human
cugagcagagcccucacuccca

SEQ ID NO: 402053 - RNA, 32 nt, Human
cugagcagagcugagccagccagaagaaaaag

SEQ ID NO: 402054 - RNA, 25 nt, Human
cugagcagaggcugggcauugccac

SEQ ID NO: 402055 - RNA, 21 nt, Human
cugagcagauggccaagcuca

SEQ ID NO: 402056 - RNA, 18 nt, Human
cugagcagcaacagcauc

SEQ ID NO: 402057 - RNA, 32 nt, Human
cugagcagccuccuaccuccccugccugagcc

SEQ ID NO: 402058 - RNA, 21 nt, Human
cugagcagcugggacuacagg

SEQ ID NO: 402059 - RNA, 21 nt, Human
cugagcagcugggauugcagg

SEQ ID NO: 402060 - RNA, 32 nt, Human
cugagcaggaagcgagcagaggcuccacaggc

SEQ ID NO: 402061 - RNA, 32 nt, Human
cugagcaggaagggggaggggccaugacuacg

SEQ ID NO: 402062 - RNA, 32 nt, Human
cugagcaggaagguggugguuccguggggaau

SEQ ID NO: 402063 - RNA, 32 nt, Human
cugagcaggcagcagccucugcucuguggcuc

SEQ ID NO: 402064 - RNA, 19 nt, Human
cugagcaggcagcugggug

SEQ ID NO: 402065 - RNA, 25 nt, Human
cugagcagggagaccaugccuccca

SEQ ID NO: 402066 - RNA, 32 nt, Human
cugagcagucugggagccuggagcagccccag

SEQ ID NO: 402067 - RNA, 32 nt, Human
cugagcaguguacacuguacccaguauguagc

SEQ ID NO: 402068 - RNA, 32 nt, Human
cugagcaguucugcaguaacaccugcuuaaaa

SEQ ID NO: 402069 - RNA, 23 nt, Human
cugagcaucacuccauugucaca

SEQ ID NO: 402070 - RNA, 32 nt, Human
cugagcaucgccagggcgggcggcagggcgcg

SEQ ID NO: 402071 - RNA, 32 nt, Human
cugagcaucuucucccaggaguaccagaaaca

SEQ ID NO: 402072 - RNA, 32 nt, Human
cugagcaugcuggugauuuucuguaaucccag

SEQ ID NO: 402073 - RNA, 32 nt, Human
cugagcaugguggcgugugccuguaaucucag

SEQ ID NO: 402074 - RNA, 32 nt, Human
cugagcaugguggcucacgccuguaaucccag

SEQ ID NO: 402075 - RNA, 32 nt, Human
cugagcaugguggcucaugccuguaaucccag

SEQ ID NO: 402076 - RNA, 32 nt, Human
cugagcauuaagacuucccuugcccauuccuc

SEQ ID NO: 402077 - RNA, 32 nt, Human
cugagcauucaccucaccauguuuacaaagaa

SEQ ID NO: 402078 - RNA, 32 nt, Human
cugagcauuucccagccccaguguccacaccu

SEQ ID NO: 402079 - RNA, 32 nt, Human
cugagccaaaagagcuuguuugcugggaggcg

SEQ ID NO: 402080 - RNA, 32 nt, Human
cugagccaaaagagcuuguuugcugggaggug

SEQ ID NO: 402081 - RNA, 32 nt, Human
cugagccaaagcucuggggcccugcauucccu

SEQ ID NO: 402082 - RNA, 32 nt, Human
cugagccaagcagaggcgggcagcuccuccuc

SEQ ID NO: 402083 - RNA, 32 nt, Human
cugagccacaccugcauggugcacggccugug

SEQ ID NO: 402084 - RNA, 32 nt, Human
cugagccacagcuuaaggucaguucugccuau

SEQ ID NO: 402085 - RNA, 32 nt, Human
cugagccacagcuucccgcugggaauaaugau

SEQ ID NO: 402086 - RNA, 21 nt, Human
cugagccacccaucauuguga

SEQ ID NO: 402087 - RNA, 32 nt, Human
cugagccaccgcgcccagucucuccccacguu

SEQ ID NO: 402088 - RNA, 21 nt, Human
cugagccaccggcgcauguga

SEQ ID NO: 402089 - RNA, 32 nt, Human
cugagccaccucagggauacagggucccccac

SEQ ID NO: 402090 - RNA, 32 nt, Human
cugagccaccucagggaugcagggucccccac

SEQ ID NO: 402091 - RNA, 32 nt, Human
cugagccaccucucucacuuucuuuaguugug

SEQ ID NO: 402092 - RNA, 32 nt, Human
cugagccaccuugcaggacguuuuccccaacc

SEQ ID NO: 402093 - RNA, 32 nt, Human
cugagccacgcagccccgccucuggggccgcc

SEQ ID NO: 402094 - RNA, 32 nt, Human
cugagccacugaggccagccucgugguuucca

SEQ ID NO: 402095 - RNA, 32 nt, Human
cugagccacugcacuccagccugggcaauaga

SEQ ID NO: 402096 - RNA, 32 nt, Human
cugagccacugcagggcagggcaggcaggggg

SEQ ID NO: 402097 - RNA, 32 nt, Human
cugagccagaagcaucacugcagugaaagucu

SEQ ID NO: 402098 - RNA, 32 nt, Human
cugagccagaaucacccagcuaagcugcuccc

SEQ ID NO: 402099 - RNA, 32 nt, Human
cugagccagauuucacucuccuuggugucggg

SEQ ID NO: 402100 - RNA, 32 nt, Human
cugagccagcacuuucuuucugaugaugcuug

SEQ ID NO: 402101 - RNA, 32 nt, Human
cugagccagcuccuugaggauguggccacuug

SEQ ID NO: 402102 - RNA, 32 nt, Human
cugagccaggaagcaccugggcuaagggagaa

SEQ ID NO: 402103 - RNA, 32 nt, Human
cugagccaggagacggcugagcacuggcccuc

SEQ ID NO: 402104 - RNA, 24 nt, Human
cugagccaggggcugccaguggga

SEQ ID NO: 402105 - RNA, 32 nt, Human
cugagccaguuccauguuaccgacuuaggcag

SEQ ID NO: 402106 - RNA, 32 nt, Human
cugagccauagauuuuuaaucuguaaaaggag

SEQ ID NO: 402107 - RNA, 32 nt, Human
cugagccauucucuccccuccucugcccugug

SEQ ID NO: 402108 - RNA, 32 nt, Human
cugagccauugcaggccucugccugcugcccc

SEQ ID NO: 402109 - RNA, 32 nt, Human
cugagcccaaagacauucggagguccuccaaa

SEQ ID NO: 402110 - RNA, 18 nt, Human
cugagcccaagccgguga

SEQ ID NO: 402111 - RNA, 32 nt, Human
cugagcccaagcuauccuccugccucagccuc

SEQ ID NO: 402112 - RNA, 32 nt, Human
cugagcccaagcucauugcuucuuccugacca

SEQ ID NO: 402113 - RNA, 32 nt, Human
cugagcccacagccccuccaacccccaaacca

SEQ ID NO: 402114 - RNA, 32 nt, Human
cugagcccacagcuuugaccacugugauccag

SEQ ID NO: 402115 - RNA, 32 nt, Human
cugagcccagaccccucacacagcgcuaccgg

SEQ ID NO: 402116 - RNA, 21 nt, Human
cugagcccaggagagcgggga

SEQ ID NO: 402117 - RNA, 32 nt, Human
cugagcccaggagcucaagauugcagugagcu

SEQ ID NO: 402118 - RNA, 32 nt, Human
cugagcccaggaggucaagacugcagugagcu

SEQ ID NO: 402119 - RNA, 32 nt, Human
cugagcccaggaggucaaggcuacagugagcc

SEQ ID NO: 402120 - RNA, 32 nt, Human
cugagcccaggagguggaggcugcagugagcc

SEQ ID NO: 402121 - RNA, 32 nt, Human
cugagcccaggagguggagguugcagugagcc

SEQ ID NO: 402122 - RNA, 32 nt, Human
cugagcccaggaguucaagaccagcuugugca

SEQ ID NO: 402123 - RNA, 32 nt, Human
cugagcccaggaguucgagaccagccugggca

SEQ ID NO: 402124 - RNA, 32 nt, Human
cugagcccaggaguucgaggcuguggugcacu

SEQ ID NO: 402125 - RNA, 32 nt, Human
cugagcccaggaguuuaaggcugcagugagcu

SEQ ID NO: 402126 - RNA, 32 nt, Human
cugagcccaggaguuugagacuacaguagcua

SEQ ID NO: 402127 - RNA, 32 nt, Human
cugagcccaggaguuugaggcuccagugagcu

SEQ ID NO: 402128 - RNA, 32 nt, Human
cugagcccaggaguuugaggguggagugagcu

SEQ ID NO: 402129 - RNA, 32 nt, Human
cugagcccagggaggucaaggcugcagugagc

SEQ ID NO: 402130 - RNA, 32 nt, Human
cugagcccagggguucuagaccagcuuaggca

SEQ ID NO: 402131 - RNA, 32 nt, Human
cugagcccaucucauuuagggaaacuacagag

SEQ ID NO: 402132 - RNA, 19 nt, Human
cugagccccacguggcagg

SEQ ID NO: 402133 - RNA, 32 nt, Human
cugagccccagaggcacccugggcacucccuc

SEQ ID NO: 402134 - RNA, 32 nt, Human
cugagccccagccgggaccgggaucggagccc

SEQ ID NO: 402135 - RNA, 20 nt, Human
cugagccccagcugcugaga

SEQ ID NO: 402136 - RNA, 32 nt, Human
cugagccccaggaggaguaggaguugggcagg

SEQ ID NO: 402137 - RNA, 32 nt, Human
cugagccccagggcagaggggaauggcaaaau

SEQ ID NO: 402138 - RNA, 32 nt, Human
cugagccccagucucugcucugcacaguggaa

SEQ ID NO: 402139 - RNA, 32 nt, Human
cugagccccaugccucccagcaaccagggccc

SEQ ID NO: 402140 - RNA, 32 nt, Human
cugagccccgggaggagagaucaaagcuuugg

SEQ ID NO: 402141 - RNA, 32 nt, Human
cugagccccucacccuuccacacucacgaacu

SEQ ID NO: 402142 - RNA, 18 nt, Human
cugagccccucccuccca

SEQ ID NO: 402143 - RNA, 32 nt, Human
cugagccccugccacaccccagccucugacuu

SEQ ID NO: 402144 - RNA, 19 nt, Human
cugagccccuggaugguga

SEQ ID NO: 402145 - RNA, 19 nt, Human
cugagcccgaaccugccag

SEQ ID NO: 402146 - RNA, 32 nt, Human
cugagcccuccaccaucgcccgcucucuacca

SEQ ID NO: 402147 - RNA, 21 nt, Human
cugagcccucccagggacccu

SEQ ID NO: 402148 - RNA, 32 nt, Human
cugagcccuccuggcccccgccuuccacgccc

SEQ ID NO: 402149 - RNA, 32 nt, Human
cugagcccucuuggcccugaggccuggcauug

SEQ ID NO: 402150 - RNA, 32 nt, Human
cugagcccugagccaccagcccugcagccugc

SEQ ID NO: 402151 - RNA, 32 nt, Human
cugagcccugagggauggaugucuccugaccc

SEQ ID NO: 402152 - RNA, 32 nt, Human
cugagcccugcacgcugggccuucagaauuaa

SEQ ID NO: 402153 - RNA, 32 nt, Human
cugagcccugcccucacuccacuccccucauc

SEQ ID NO: 402154 - RNA, 32 nt, Human
cugagcccugcucaugcugcuuggagcacaau

SEQ ID NO: 402155 - RNA, 32 nt, Human
cugagcccugcucccucugccacuguggacac

SEQ ID NO: 402156 - RNA, 32 nt, Human
cugagcccuggaacagggaggguguaggggag

SEQ ID NO: 402157 - RNA, 32 nt, Human
cugagcccuggaggucgaggcuacagugagcu

SEQ ID NO: 402158 - RNA, 32 nt, Human
cugagcccuggaguucgauacugcagugagcu

SEQ ID NO: 402159 - RNA, 32 nt, Human
cugagcccugguguguuuccagaucgauccug

SEQ ID NO: 402160 - RNA, 32 nt, Human
cugagcccuguuaucccucccccaugaccaca

SEQ ID NO: 402161 - RNA, 32 nt, Human
cugagcccuguuccugcucucccuccagggcu

SEQ ID NO: 402162 - RNA, 32 nt, Human
cugagcccuuccuggcaccccugcugcugaca

SEQ ID NO: 402163 - RNA, 32 nt, Human
cugagccgagggaagaacacccucuccggccc

SEQ ID NO: 402164 - RNA, 32 nt, Human
cugagccgauggggagggggaggaggaugcua

SEQ ID NO: 402165 - RNA, 32 nt, Human
cugagccgcgcuuuccccuccucccugggaug

SEQ ID NO: 402166 - RNA, 32 nt, Human
cugagccggaggggaauccggaagggacacgc

SEQ ID NO: 402167 - RNA, 32 nt, Human
cugagccgggcugaagcggggagccagacagc

SEQ ID NO: 402168 - RNA, 32 nt, Human
cugagccgggggaaucaccugagcccagggaa

SEQ ID NO: 402169 - RNA, 32 nt, Human
cugagccggguggaucgccugaggucaggagu

SEQ ID NO: 402170 - RNA, 32 nt, Human
cugagccguguuuccccucucccucccucucc

SEQ ID NO: 402171 - RNA, 32 nt, Human
cugagccuaucuggcugggaugguggaauuaa

SEQ ID NO: 402172 - RNA, 32 nt, Human
cugagccucacugaggggaaggccugggcuug

SEQ ID NO: 402173 - RNA, 19 nt, Human
cugagccucacugcugcug

SEQ ID NO: 402174 - RNA, 32 nt, Human
cugagccucaggagguugaggcugcagugagc

SEQ ID NO: 402175 - RNA, 32 nt, Human
cugagccucaggggagggagguugauagcuac

SEQ ID NO: 402176 - RNA, 32 nt, Human
cugagccucagucucccucccuuggggccuau

SEQ ID NO: 402177 - RNA, 32 nt, Human
cugagccuccagcgcgugccagccugggccgc

SEQ ID NO: 402178 - RNA, 32 nt, Human
cugagccuccgccuucccagcagcggcaccaa

SEQ ID NO: 402179 - RNA, 32 nt, Human
cugagccuccucuugaugcaagcucuaaaggg

SEQ ID NO: 402180 - RNA, 32 nt, Human
cugagccucgagcugcucucugucacugucuu

SEQ ID NO: 402181 - RNA, 16 nt, Human
cugagccucgcgguga

SEQ ID NO: 402182 - RNA, 32 nt, Human
cugagccucucagcagcccuccuuggguugaa

SEQ ID NO: 402183 - RNA, 24 nt, Human
cugagccucucgccugcccccgcc

SEQ ID NO: 402184 - RNA, 32 nt, Human
cugagccucuuugcucugccucuuggggcaag

SEQ ID NO: 402185 - RNA, 32 nt, Human
cugagccugaagagagggaacaagucagucag

SEQ ID NO: 402186 - RNA, 32 nt, Human
cugagccugagcaacauaaugagacccugucu

SEQ ID NO: 402187 - RNA, 32 nt, Human
cugagccugagcccgccccgagguccccgccc

SEQ ID NO: 402188 - RNA, 32 nt, Human
cugagccugaggacgagaagguuguuuccuac

SEQ ID NO: 402189 - RNA, 22 nt, Human
cugagccugagggccaaacaag

SEQ ID NO: 402190 - RNA, 32 nt, Human
cugagccugcagccgccccgcgccgugaccug

SEQ ID NO: 402191 - RNA, 32 nt, Human
cugagccugccucacaaccagucucugcgggc

SEQ ID NO: 402192 - RNA, 32 nt, Human
cugagccugccugcccggccgaguuuagaguu

SEQ ID NO: 402193 - RNA, 18 nt, Human
cugagccugccugcucug

SEQ ID NO: 402194 - RNA, 32 nt, Human
cugagccugccugcucugugccguggcuuucu

SEQ ID NO: 402195 - RNA, 32 nt, Human
cugagccugccugucugggcaccugcugcaac

SEQ ID NO: 402196 - RNA, 32 nt, Human
cugagccuggaacugacccuuccuucauccuc

SEQ ID NO: 402197 - RNA, 32 nt, Human
cugagccuggagauguagaggcugcaaugagc

SEQ ID NO: 402198 - RNA, 32 nt, Human
cugagccuggagauguagaggcugcagugagc

SEQ ID NO: 402199 - RNA, 32 nt, Human
cugagccugggaaguggaaguugcagugagcc

SEQ ID NO: 402200 - RNA, 32 nt, Human
cugagccugggcugcccauucaucucagcgac

SEQ ID NO: 402201 - RNA, 32 nt, Human
cugagccugguaggcugaggcugcagugagcc

SEQ ID NO: 402202 - RNA, 32 nt, Human
cugagccuggucggcugaggccaguccugucc

SEQ ID NO: 402203 - RNA, 32 nt, Human
cugagccuguggcuggcuggaaaaaggugaau

SEQ ID NO: 402204 - RNA, 32 nt, Human
cugagccuguucugaacagcuguaaccccaac

SEQ ID NO: 402205 - RNA, 32 nt, Human
cugagccuguucuuggucuuuuccaguuuauc

SEQ ID NO: 402206 - RNA, 32 nt, Human
cugagccuuaacaacauguuuuugcugcagau

SEQ ID NO: 402207 - RNA, 32 nt, Human
cugagccuuccagagagagcuauugugauaca

SEQ ID NO: 402208 - RNA, 32 nt, Human
cugagccuucugaugagacugcagccccagcu

SEQ ID NO: 402209 - RNA, 32 nt, Human
cugagccuucugaugagacugcagccccggcu

SEQ ID NO: 402210 - RNA, 32 nt, Human
cugagcgaaagaaggaaggacagacggaccug

SEQ ID NO: 402211 - RNA, 31 nt, Human
cugagcgcacaggcaggcaugccaagggggc

SEQ ID NO: 402212 - RNA, 32 nt, Human
cugagcgcagcuccagggaagccccagccccu

SEQ ID NO: 402213 - RNA, 32 nt, Human
cugagcgcaguggcucuugccuguaaucccag

SEQ ID NO: 402214 - RNA, 32 nt, Human
cugagcgccgguccucugggcccaguguucuu

SEQ ID NO: 402215 - RNA, 32 nt, Human
cugagcgccucccuccuggagcggcguccagc

SEQ ID NO: 402216 - RNA, 32 nt, Human
cugagcgccucuucccgcugcgcccgcaucag

SEQ ID NO: 402217 - RNA, 32 nt, Human
cugagcgcgguggcucacgccuguaaucccag

SEQ ID NO: 402218 - RNA, 32 nt, Human
cugagcggaugcacaggucacccauggcaggu

SEQ ID NO: 402219 - RNA, 32 nt, Human
cugagcgggaccugcgagcagcgcgggcggca

SEQ ID NO: 402220 - RNA, 32 nt, Human
cugagcgggaggugaaggcagagguggaggac

SEQ ID NO: 402221 - RNA, 32 nt, Human
cugagcgucacacccuguacuucauuucauau

SEQ ID NO: 402222 - RNA, 32 nt, Human
cugagcgucagaggacgagagcaggggccucc

SEQ ID NO: 402223 - RNA, 19 nt, Human
cugagcgucuccugggcca

SEQ ID NO: 402224 - RNA, 32 nt, Human
cugagcgucuuucugcucuccuuauccuguuc

SEQ ID NO: 402225 - RNA, 32 nt, Human
cugagcgugaugaucuagccuccaucaugaag

SEQ ID NO: 402226 - RNA, 32 nt, Human
cugagcgugguggcgggcgccuguaaucccag

SEQ ID NO: 402227 - RNA, 32 nt, Human
cugagcgugguggugugcaccuguaaucccag

SEQ ID NO: 402228 - RNA, 32 nt, Human
cugagcuaaagcgaucugcccaccucggccuc

SEQ ID NO: 402229 - RNA, 32 nt, Human
cugagcuaagggaugggguaccagguuagggg

SEQ ID NO: 402230 - RNA, 32 nt, Human
cugagcuagcagaagagaagaaaaugauugaa

SEQ ID NO: 402231 - RNA, 32 nt, Human
cugagcuauaugcacacucacaccucuuugcu

SEQ ID NO: 402232 - RNA, 32 nt, Human
cugagcuaugcagccuuggccugcugcgucuc

SEQ ID NO: 402233 - RNA, 32 nt, Human
cugagcuaugccaggauuuugugaaggcugag

SEQ ID NO: 402234 - RNA, 32 nt, Human
cugagcucaaaggauccucccaccucagccuc

SEQ ID NO: 402235 - RNA, 32 nt, Human
cugagcucaaaucucuguuacuccauuacugu

SEQ ID NO: 402236 - RNA, 32 nt, Human
cugagcucaagagguugaggcugcagugagcc

SEQ ID NO: 402237 - RNA, 32 nt, Human
cugagcucaagcaacccucccuccucagccuu

SEQ ID NO: 402238 - RNA, 32 nt, Human
cugagcucaagcaauccaccugccucagccua

SEQ ID NO: 402239 - RNA, 32 nt, Human
cugagcucaagcaauccucccaccucagccuc

SEQ ID NO: 402240 - RNA, 32 nt, Human
cugagcucaagcaauccucccaccucagccuu

SEQ ID NO: 402241 - RNA, 32 nt, Human
cugagcucaagcaauccucccgacucggcuuc

SEQ ID NO: 402242 - RNA, 32 nt, Human
cugagcucaagcaauccuccugccucagccuc

SEQ ID NO: 402243 - RNA, 32 nt, Human
cugagcucaagcaauccugcugccucaguucu

SEQ ID NO: 402244 - RNA, 32 nt, Human
cugagcucaagcaaucugccugcuucagccuc

SEQ ID NO: 402245 - RNA, 32 nt, Human
cugagcucaagcaauucucaugccucagccuc

SEQ ID NO: 402246 - RNA, 32 nt, Human
cugagcucaagcaguccaucugccucagccuc

SEQ ID NO: 402247 - RNA, 32 nt, Human
cugagcucaagcagucuucccaccuuggccuc

SEQ ID NO: 402248 - RNA, 32 nt, Human
cugagcucaagcaguucucccaccugggccuc

SEQ ID NO: 402249 - RNA, 32 nt, Human
cugagcucaagcgauccucccaccuuggccua

SEQ ID NO: 402250 - RNA, 32 nt, Human
cugagcucaagugauccacccaccucagccuc

SEQ ID NO: 402251 - RNA, 32 nt, Human
cugagcucaagugauccucccaccucagccuc

SEQ ID NO: 402252 - RNA, 32 nt, Human
cugagcucaagugauccuccuaccucagucuc

SEQ ID NO: 402253 - RNA, 32 nt, Human
cugagcucaagugaucuuccugccuuggcacc

SEQ ID NO: 402254 - RNA, 32 nt, Human
cugagcucacagacugacuugggcuccuacug

SEQ ID NO: 402255 - RNA, 32 nt, Human
cugagcucaccagcaaacagaagcaucaagcc

SEQ ID NO: 402256 - RNA, 32 nt, Human
cugagcucacccaggccagcaggugggguauc

SEQ ID NO: 402257 - RNA, 32 nt, Human
cugagcucacgcuggcucacacagcucuaggg

SEQ ID NO: 402258 - RNA, 32 nt, Human
cugagcucacugcaaccucugacucccagacu

SEQ ID NO: 402259 - RNA, 32 nt, Human
cugagcucacugcaaccucugccucccaaguu

SEQ ID NO: 402260 - RNA, 32 nt, Human
cugagcucagaugaucugcccaccucggccuc

SEQ ID NO: 402261 - RNA, 18 nt, Human
cugagcucagcuggcaga

SEQ ID NO: 402262 - RNA, 32 nt, Human
cugagcucaggaauucgagaccagccuggcca

SEQ ID NO: 402263 - RNA, 32 nt, Human
cugagcucaggagcuugagaccagccugggca

SEQ ID NO: 402264 - RNA, 32 nt, Human
cugagcucaggaguccaagaccagccugggca

SEQ ID NO: 402265 - RNA, 32 nt, Human
cugagcucaggaguucaagaccagccugggca

SEQ ID NO: 402266 - RNA, 32 nt, Human
cugagcucaggaguucgagaccagccagggca

SEQ ID NO: 402267 - RNA, 32 nt, Human
cugagcucaggaguuuaagaccagccugggca

SEQ ID NO: 402268 - RNA, 32 nt, Human
cugagcucaggaguuugagaccagccugacca

SEQ ID NO: 402269 - RNA, 32 nt, Human
cugagcucaggaguuugagaccagccugggca

SEQ ID NO: 402270 - RNA, 32 nt, Human
cugagcucaggaguuugagaccagccugucuc

SEQ ID NO: 402271 - RNA, 32 nt, Human
cugagcucaggcaauccgcccaccucagccuc

SEQ ID NO: 402272 - RNA, 32 nt, Human
cugagcucaggcaauccucccgccuuagccuc

SEQ ID NO: 402273 - RNA, 32 nt, Human
cugagcucaggcaaucugcccgccuuggccuc

SEQ ID NO: 402274 - RNA, 32 nt, Human
cugagcucaggcagucuacccaccucagccuc

SEQ ID NO: 402275 - RNA, 32 nt, Human
cugagcucaggugaucugcccaccucggccuc

SEQ ID NO: 402276 - RNA, 32 nt, Human
cugagcucaguccucuggaggaagccgcccag

SEQ ID NO: 402277 - RNA, 32 nt, Human
cugagcucaugucaugggcauguggugguuuc

SEQ ID NO: 402278 - RNA, 32 nt, Human
cugagcuccagacugcagcccgugcugaugac

SEQ ID NO: 402279 - RNA, 32 nt, Human
cugagcuccagcgaucagccuaccucaaccuc

SEQ ID NO: 402280 - RNA, 32 nt, Human
cugagcucccucugcccugccaguugucaguc

SEQ ID NO: 402281 - RNA, 32 nt, Human
cugagcuccuuucuuccucuagccaaacccug

SEQ ID NO: 402282 - RNA, 32 nt, Human
cugagcucgagccugugaccaccugugcugug

SEQ ID NO: 402283 - RNA, 21 nt, Human
cugagcucuugucauuuucca

SEQ ID NO: 402284 - RNA, 32 nt, Human
cugagcucuuucccugaaugaauccaaguaac

SEQ ID NO: 402285 - RNA, 32 nt, Human
cugagcucuuuuauuagcaccaugaaugugac

SEQ ID NO: 402286 - RNA, 32 nt, Human
cugagcugaagugccuugugaacccugcaaua

SEQ ID NO: 402287 - RNA, 32 nt, Human
cugagcugagccuuuuccaggggcagggccca

SEQ ID NO: 402288 - RNA, 32 nt, Human
cugagcugcacguuucuaagguagggaggagg

SEQ ID NO: 402289 - RNA, 32 nt, Human
cugagcugcagcaucugacucaucucagaaau

SEQ ID NO: 402290 - RNA, 16 nt, Human
cugagcugccaggcca

SEQ ID NO: 402291 - RNA, 32 nt, Human
cugagcugccaggccaagacccucccauugca

SEQ ID NO: 402292 - RNA, 32 nt, Human
cugagcugcccaggcuucacggagcgguguug

SEQ ID NO: 402293 - RNA, 32 nt, Human
cugagcugccccggagggagggaggaguuccc

SEQ ID NO: 402294 - RNA, 21 nt, Human
cugagcugccccucaaggggg

SEQ ID NO: 402295 - RNA, 20 nt, Human
cugagcugccccuggcuucc

SEQ ID NO: 402296 - RNA, 32 nt, Human
cugagcugcuguggccgggcugggcagugugc

SEQ ID NO: 402297 - RNA, 32 nt, Human
cugagcugcuucggggccaugcagcccuccug

SEQ ID NO: 402298 - RNA, 17 nt, Human
cugagcugcuucugcaa

SEQ ID NO: 402299 - RNA, 32 nt, Human
cugagcuggaaccagcauucauagagaagggg

SEQ ID NO: 402300 - RNA, 32 nt, Human
cugagcuggccuggcccauucaccucuugugg

SEQ ID NO: 402301 - RNA, 32 nt, Human
cugagcuggcugaagaucagggccagcgagcu

SEQ ID NO: 402302 - RNA, 32 nt, Human
cugagcugggagaguuggaggagguggcggcg

SEQ ID NO: 402303 - RNA, 32 nt, Human
cugagcugggaggagcagggugagggugggcg

SEQ ID NO: 402304 - RNA, 32 nt, Human
cugagcugggauuacaggcgccugccaccaug

SEQ ID NO: 402305 - RNA, 32 nt, Human
cugagcugggcagaucaccugaggucaggagu

SEQ ID NO: 402306 - RNA, 32 nt, Human
cugagcugggcaggacacaggcgagcucaggu

SEQ ID NO: 402307 - RNA, 32 nt, Human
cugagcugggcgcugccuuccuuucucauccc

SEQ ID NO: 402308 - RNA, 32 nt, Human
cugagcuggggaggucgaggcagcagugagcc

SEQ ID NO: 402309 - RNA, 32 nt, Human
cugagcugguggcacccuccccugggccggaa

SEQ ID NO: 402310 - RNA, 32 nt, Human
cugagcugguuaaaugauuucucuccaucuua

SEQ ID NO: 402311 - RNA, 32 nt, Human
cugagcuguaacaaagccucuuuaaaucggug

SEQ ID NO: 402312 - RNA, 32 nt, Human
cugagcuguggacugcagcuucaggacccuau

SEQ ID NO: 402313 - RNA, 32 nt, Human
cugagcuguggcacuagcagagcuaguagcca

SEQ ID NO: 402314 - RNA, 32 nt, Human
cugagcugugugagcucuucugcccaggcggg

SEQ ID NO: 402315 - RNA, 32 nt, Human
cugagcugugugauccugggcaagguagaggg

SEQ ID NO: 402316 - RNA, 32 nt, Human
cugagcuguucuguuucguauugcugcucugu

SEQ ID NO: 402317 - RNA, 32 nt, Human
cugagcuucccaaggaagcccccacccucugc

SEQ ID NO: 402318 - RNA, 32 nt, Human
cugagcuucguggagcucuucccgccgcugac

SEQ ID NO: 402319 - RNA, 32 nt, Human
cugagcuucuaggauccagcugugucaaccuu

SEQ ID NO: 402320 - RNA, 32 nt, Human
cugagcuuuaagaaauaacuauagugcaaagg

SEQ ID NO: 402321 - RNA, 32 nt, Human
cugagcuuucaccucugacucccuaacuccau

SEQ ID NO: 402322 - RNA, 32 nt, Human
cugagcuuucauaaccccaggguccuccagaa

SEQ ID NO: 402323 - RNA, 32 nt, Human
cugagcuuugccucugagcagcuguccuaguu

SEQ ID NO: 402324 - RNA, 32 nt, Human
cugagcuuugcuacccaaccagauuccucaua

SEQ ID NO: 402325 - RNA, 32 nt, Human
cugagcuuuuuaucuuacaccaugaagugaca

SEQ ID NO: 402326 - RNA, 24 nt, Human
cugaggaaagcagaucacaagguc

SEQ ID NO: 402327 - RNA, 32 nt, Human
cugaggaaaggagaguguggagaggggccugg

SEQ ID NO: 402328 - RNA, 32 nt, Human
cugaggaacagacgugugugagaggccuucag

SEQ ID NO: 402329 - RNA, 32 nt, Human
cugaggaacaugcucccucccucccucccaua

SEQ ID NO: 402330 - RNA, 24 nt, Human
cugaggaagaacauaagugcuaaa

SEQ ID NO: 402331 - RNA, 32 nt, Human
cugaggaagcccaacuccuaugagcuccucuc

SEQ ID NO: 402332 - RNA, 32 nt, Human
cugaggaaggagcuagggaaagagauagacac

SEQ ID NO: 402333 - RNA, 24 nt, Human
cugaggaaggcaaaucacaagguc

SEQ ID NO: 402334 - RNA, 32 nt, Human
cugaggaaggcagaagugaauuuggagaacua

SEQ ID NO: 402335 - RNA, 20 nt, Human
cugaggaagggcagagccag

SEQ ID NO: 402336 - RNA, 32 nt, Human
cugaggacaaguuugaaacugggaaggagaca

SEQ ID NO: 402337 - RNA, 32 nt, Human
cugaggacaauauuuaaaugacaggaagguau

SEQ ID NO: 402338 - RNA, 32 nt, Human
cugaggacacagaucccggggagcugugaggg

SEQ ID NO: 402339 - RNA, 32 nt, Human
cugaggacagaggaucacuugaggucaggagu

SEQ ID NO: 402340 - RNA, 32 nt, Human
cugaggacagccaggacuccagcuuuugcuga

SEQ ID NO: 402341 - RNA, 32 nt, Human
cugaggacagccgcgugcgcuucgccagcagc

SEQ ID NO: 402342 - RNA, 32 nt, Human
cugaggacaggaguucaagaccagccugggca

SEQ ID NO: 402343 - RNA, 32 nt, Human
cugaggaccagcuguggcugggccaggacaga

SEQ ID NO: 402344 - RNA, 32 nt, Human
cugaggaccaggcuugguugugagaaucccug

SEQ ID NO: 402345 - RNA, 32 nt, Human
cugaggaccugggccuguucugcuccuaggag

SEQ ID NO: 402346 - RNA, 32 nt, Human
cugaggacugauuucagagugacuacacacag

SEQ ID NO: 402347 - RNA, 32 nt, Human
cugaggacuggugacuggucugugauagaagc

SEQ ID NO: 402348 - RNA, 32 nt, Human
cugaggacuguacaaacaugaaggugugguau

SEQ ID NO: 402349 - RNA, 32 nt, Human
cugaggacuugaugaagugauccuuaaccccc

SEQ ID NO: 402350 - RNA, 32 nt, Human
cugaggagaaagccuuuccuucugcugcuacu

SEQ ID NO: 402351 - RNA, 32 nt, Human
cugaggagaacagaagcucugguaagcgaaug

SEQ ID NO: 402352 - RNA, 32 nt, Human
cugaggagacagaaggcagcaaacaaaaucau

SEQ ID NO: 402353 - RNA, 32 nt, Human
cugaggagacucugcccuuuuccaggcaccgc

SEQ ID NO: 402354 - RNA, 32 nt, Human
cugaggagagcaggaaaggcagugguggucuu

SEQ ID NO: 402355 - RNA, 32 nt, Human
cugaggagaugcugggacugagagugucaugg

SEQ ID NO: 402356 - RNA, 32 nt, Human
cugaggagcacgggaaaggcugugcuucugca

SEQ ID NO: 402357 - RNA, 22 nt, Human
cugaggagccuuccagcucuaa

SEQ ID NO: 402358 - RNA, 32 nt, Human
cugaggagcuaaaucugccucacuaaggaacg

SEQ ID NO: 402359 - RNA, 32 nt, Human
cugaggagcugccugccuucuuccaucugaga

SEQ ID NO: 402360 - RNA, 32 nt, Human
cugaggagcuggcccugccacuguggacugcc

SEQ ID NO: 402361 - RNA, 32 nt, Human
cugaggaggagaagccaaagaggaggaggcag

SEQ ID NO: 402362 - RNA, 32 nt, Human
cugaggaggagaaucacuugaaccuggaggca

SEQ ID NO: 402363 - RNA, 32 nt, Human
cugaggaggaggaggagaagcggaugagaucg

SEQ ID NO: 402364 - RNA, 32 nt, Human
cugaggaggaggaggaggcggaggaggcggug

SEQ ID NO: 402365 - RNA, 32 nt, Human
cugaggaggaggaggaggcgggggcggccaug

SEQ ID NO: 402366 - RNA, 32 nt, Human
cugaggaggagucuuccccuggggcugcgugc

SEQ ID NO: 402367 - RNA, 32 nt, Human
cugaggaggaguuuuuaauuguauuugcuaga

SEQ ID NO: 402368 - RNA, 32 nt, Human
cugaggaggauggggauaaaaggucugcaucu

SEQ ID NO: 402369 - RNA, 32 nt, Human
cugaggaggcaagaauugaaguugcugcagac

SEQ ID NO: 402370 - RNA, 32 nt, Human
cugaggaggccuugccugcagggucuuugucu

SEQ ID NO: 402371 - RNA, 32 nt, Human
cugaggaggcgaucaggagggagcuagcacug

SEQ ID NO: 402372 - RNA, 24 nt, Human
cugaggagggcggaucacaagguc

SEQ ID NO: 402373 - RNA, 24 nt, Human
cugaggaggguggaucacgagguc

SEQ ID NO: 402374 - RNA, 24 nt, Human
cugaggagguggagguugcaguga

SEQ ID NO: 402375 - RNA, 32 nt, Human
cugaggagguggagguugcagugagccgagau

SEQ ID NO: 402376 - RNA, 18 nt, Human
cugaggagugacuccaag

SEQ ID NO: 402377 - RNA, 32 nt, Human
cugaggagugggcaauggugcuucugugcuuu

SEQ ID NO: 402378 - RNA, 32 nt, Human
cugaggaguucaguugugaggaaagaaggcug

SEQ ID NO: 402379 - RNA, 32 nt, Human
cugaggauacagcucuucucagugucugaaca

SEQ ID NO: 402380 - RNA, 32 nt, Human
cugaggauauagaaauauguaacucagagucc

SEQ ID NO: 402381 - RNA, 32 nt, Human
cugaggaucaaauuucaacaugagauuuggag

SEQ ID NO: 402382 - RNA, 32 nt, Human
cugaggaucagcugcuggaggaggcggagagg

SEQ ID NO: 402383 - RNA, 23 nt, Human
cugaggaucagggcgggaccccg

SEQ ID NO: 402384 - RNA, 32 nt, Human
cugaggaucccaggaaccucccucgggccugc

SEQ ID NO: 402385 - RNA, 32 nt, Human
cugaggaucuguggcuugucucuguccugagg

SEQ ID NO: 402386 - RNA, 32 nt, Human
cugaggaugacccugacugaaaggcugcguga

SEQ ID NO: 402387 - RNA, 32 nt, Human
cugaggaugcugcuggcagccuggggaaggag

SEQ ID NO: 402388 - RNA, 32 nt, Human
cugaggauggccuggauucacgcccucuuguu

SEQ ID NO: 402389 - RNA, 32 nt, Human
cugaggaugggacgaugugcccagggagggac

SEQ ID NO: 402390 - RNA, 32 nt, Human
cugaggauggugggcaggaggccggcugcggg

SEQ ID NO: 402391 - RNA, 32 nt, Human
cugaggauguacaaaauucucauuuaauuuuc

SEQ ID NO: 402392 - RNA, 31 nt, Human
cugaggauguucaggcuggggcugcugguuu

SEQ ID NO: 402393 - RNA, 32 nt, Human
cugaggauguucuggaccucccccucuuaguc

SEQ ID NO: 402394 - RNA, 32 nt, Human
cugaggauucaggauggggugaaaggugguug

SEQ ID NO: 402395 - RNA, 32 nt, Human
cugaggauugcuagagugugccaagcucagau

SEQ ID NO: 402396 - RNA, 24 nt, Human
cugaggcaaaagaauugcuugaac

SEQ ID NO: 402397 - RNA, 23 nt, Human
cugaggcaaagggcagccugaac

SEQ ID NO: 402398 - RNA, 32 nt, Human
cugaggcaaagugucugcaucuucguccagcg

SEQ ID NO: 402399 - RNA, 32 nt, Human
cugaggcaacccccucggagccuguguuagug

SEQ ID NO: 402400 - RNA, 24 nt, Human
cugaggcaagaaaaucgcuugaac

SEQ ID NO: 402401 - RNA, 24 nt, Human
cugaggcaagagaaucacuggaac

SEQ ID NO: 402402 - RNA, 24 nt, Human
cugaggcaagagaaucacuugaac

SEQ ID NO: 402403 - RNA, 24 nt, Human
cugaggcaagagaaucauuugaac

SEQ ID NO: 402404 - RNA, 23 nt, Human
cugaggcaagagaaucgcuugaa

SEQ ID NO: 402405 - RNA, 24 nt, Human
cugaggcaagagaaucgcuugaac

SEQ ID NO: 402406 - RNA, 24 nt, Human
cugaggcaagagaaucgcuugaau

SEQ ID NO: 402407 - RNA, 23 nt, Human
cugaggcaagagaaucgcuugag

SEQ ID NO: 402408 - RNA, 24 nt, Human
cugaggcaagagaaucucuugaac

SEQ ID NO: 402409 - RNA, 24 nt, Human
cugaggcaagagaauuacuugagc

SEQ ID NO: 402410 - RNA, 24 nt, Human
cugaggcaagagaauugccugaac

SEQ ID NO: 402411 - RNA, 24 nt, Human
cugaggcaagagaauugcuugaac

SEQ ID NO: 402412 - RNA, 24 nt, Human
cugaggcaagagaauugcuuggac

SEQ ID NO: 402413 - RNA, 24 nt, Human
cugaggcaagagaguugcuugaac

SEQ ID NO: 402414 - RNA, 32 nt, Human
cugaggcaagcggaucauuugaggucaggagu

SEQ ID NO: 402415 - RNA, 32 nt, Human
cugaggcaaggaguuugagaccagcuuagcca

SEQ ID NO: 402416 - RNA, 32 nt, Human
cugaggcaaggugggaggugggauggggcagg

SEQ ID NO: 402417 - RNA, 32 nt, Human
cugaggcaagugaagcacuugaggucaggagu

SEQ ID NO: 402418 - RNA, 26 nt, Human
cugaggcaaguggauaacuugagguc

SEQ ID NO: 402419 - RNA, 32 nt, Human
cugaggcaaguggauaacuugaggucaugagu

SEQ ID NO: 402420 - RNA, 32 nt, Human
cugaggcaaguggaucacuugaggucaggagu

SEQ ID NO: 402421 - RNA, 23 nt, Human
cugaggcacagcagcacccgggc

SEQ ID NO: 402422 - RNA, 32 nt, Human
cugaggcacauggaccacuugaggucaagagu

SEQ ID NO: 402423 - RNA, 32 nt, Human
cugaggcacauggaccacuugaggucaggagu

SEQ ID NO: 402424 - RNA, 22 nt, Human
cugaggcaccgcggcugcgggc

SEQ ID NO: 402425 - RNA, 32 nt, Human
cugaggcaccugguuacgcuucaccucuuguu

SEQ ID NO: 402426 - RNA, 32 nt, Human
cugaggcacugaggcccuaccucaugccaaac

SEQ ID NO: 402427 - RNA, 21 nt, Human
cugaggcagaacugcuugaac

SEQ ID NO: 402428 - RNA, 24 nt, Human
cugaggcagaagaaccccuugaac

SEQ ID NO: 402429 - RNA, 24 nt, Human
cugaggcagaagaaucacuugaac

SEQ ID NO: 402430 - RNA, 22 nt, Human
cugaggcagaagaaucgcuuga

SEQ ID NO: 402431 - RNA, 24 nt, Human
cugaggcagaagaaucgcuugaac

SEQ ID NO: 402432 - RNA, 24 nt, Human
cugaggcagaagaaucgcuugagc

SEQ ID NO: 402433 - RNA, 24 nt, Human
cugaggcagaagaaucguuugaac

SEQ ID NO: 402434 - RNA, 24 nt, Human
cugaggcagaagaauggcaugaac

SEQ ID NO: 402435 - RNA, 24 nt, Human
cugaggcagaagaauggccugaac

SEQ ID NO: 402436 - RNA, 24 nt, Human
cugaggcagaagaauggcguaaac

SEQ ID NO: 402437 - RNA, 24 nt, Human
cugaggcagaagaauggcgugaac

SEQ ID NO: 402438 - RNA, 24 nt, Human
cugaggcagaagaauggcuugaac

SEQ ID NO: 402439 - RNA, 20 nt, Human
cugaggcagaagaauugaac

SEQ ID NO: 402440 - RNA, 22 nt, Human
cugaggcagaaggaucgcuuga

SEQ ID NO: 402441 - RNA, 24 nt, Human
cugaggcagaaggaucgcuugaac

SEQ ID NO: 402442 - RNA, 32 nt, Human
cugaggcagaaggauuaccugaggcaaggagu

SEQ ID NO: 402443 - RNA, 24 nt, Human
cugaggcagaaguauugcuugaac

SEQ ID NO: 402444 - RNA, 21 nt, Human
cugaggcagaauggcgugaac

SEQ ID NO: 402445 - RNA, 21 nt, Human
cugaggcagaauugcuugaac

SEQ ID NO: 402446 - RNA, 32 nt, Human
cugaggcagacaauggcuugaaccugggaggc

SEQ ID NO: 402447 - RNA, 21 nt, Human
cugaggcagacaggaaguguc

SEQ ID NO: 402448 - RNA, 21 nt, Human
cugaggcagagaauugcuuga

SEQ ID NO: 402449 - RNA, 32 nt, Human
cugaggcagagcuauccaggggaccugcagaa

SEQ ID NO: 402450 - RNA, 32 nt, Human
cugaggcagcacuuuuagauccuuugugagca

SEQ ID NO: 402451 - RNA, 32 nt, Human
cugaggcagccaaccuccggccccaggcaccg

SEQ ID NO: 402452 - RNA, 32 nt, Human
cugaggcagccagcagaucucagcagcccagu

SEQ ID NO: 402453 - RNA, 32 nt, Human
cugaggcagccaucugggucucugcuucccua

SEQ ID NO: 402454 - RNA, 24 nt, Human
cugaggcaggaaaaucacuugaac

SEQ ID NO: 402455 - RNA, 24 nt, Human
cugaggcaggaaaaucgcuugaac

SEQ ID NO: 402456 - RNA, 24 nt, Human
cugaggcaggaaaauggcgugaac

SEQ ID NO: 402457 - RNA, 24 nt, Human
cugaggcaggaaaauggugucaac

SEQ ID NO: 402458 - RNA, 23 nt, Human
cugaggcaggaaaauucuugaac

SEQ ID NO: 402459 - RNA, 24 nt, Human
cugaggcaggaaaauugcuugaac

SEQ ID NO: 402460 - RNA, 32 nt, Human
cugaggcaggaacccuggagguugagguugca

SEQ ID NO: 402461 - RNA, 24 nt, Human
cugaggcaggaagaucacuugaac

SEQ ID NO: 402462 - RNA, 24 nt, Human
cugaggcaggagaaaagugugaac

SEQ ID NO: 402463 - RNA, 24 nt, Human
cugaggcaggagaaacaccugagc

SEQ ID NO: 402464 - RNA, 24 nt, Human
cugaggcaggagaaaggcaugaau

SEQ ID NO: 402465 - RNA, 24 nt, Human
cugaggcaggagaaaucacuugaa

SEQ ID NO: 402466 - RNA, 24 nt, Human
cugaggcaggagaaaugcuugaac

SEQ ID NO: 402467 - RNA, 24 nt, Human
cugaggcaggagaaccgcuugaac

SEQ ID NO: 402468 - RNA, 24 nt, Human
cugaggcaggagaacggcgugaac

SEQ ID NO: 402469 - RNA, 24 nt, Human
cugaggcaggagaacuacuugaac

SEQ ID NO: 402470 - RNA, 24 nt, Human
cugaggcaggagaacugcuugaac

SEQ ID NO: 402471 - RNA, 24 nt, Human
cugaggcaggagaagggcgugaac

SEQ ID NO: 402472 - RNA, 24 nt, Human
cugaggcaggagaagggugggaac

SEQ ID NO: 402473 - RNA, 24 nt, Human
cugaggcaggagaauagccugaac

SEQ ID NO: 402474 - RNA, 24 nt, Human
cugaggcaggagaauagcgugaac

SEQ ID NO: 402475 - RNA, 24 nt, Human
cugaggcaggagaauagcuggaac

SEQ ID NO: 402476 - RNA, 24 nt, Human
cugaggcaggagaauagcuugaac

SEQ ID NO: 402477 - RNA, 24 nt, Human
cugaggcaggagaauagugugaac

SEQ ID NO: 402478 - RNA, 24 nt, Human
cugaggcaggagaauaucuugaac

SEQ ID NO: 402479 - RNA, 22 nt, Human
cugaggcaggagaauauggaac

SEQ ID NO: 402480 - RNA, 24 nt, Human
cugaggcaggagaaucaauugaac

SEQ ID NO: 402481 - RNA, 24 nt, Human
cugaggcaggagaaucacaugaac

SEQ ID NO: 402482 - RNA, 24 nt, Human
cugaggcaggagaaucacaugaau

SEQ ID NO: 402483 - RNA, 24 nt, Human
cugaggcaggagaaucaccugaac

SEQ ID NO: 402484 - RNA, 24 nt, Human
cugaggcaggagaaucacuagaac

SEQ ID NO: 402485 - RNA, 24 nt, Human
cugaggcaggagaaucacucgaac

SEQ ID NO: 402486 - RNA, 24 nt, Human
cugaggcaggagaaucacucggac

SEQ ID NO: 402487 - RNA, 22 nt, Human
cugaggcaggagaaucacuuga

SEQ ID NO: 402488 - RNA, 23 nt, Human
cugaggcaggagaaucacuugaa

SEQ ID NO: 402489 - RNA, 24 nt, Human
cugaggcaggagaaucacuugaac

SEQ ID NO: 402490 - RNA, 24 nt, Human
cugaggcaggagaaucacuugaau

SEQ ID NO: 402491 - RNA, 24 nt, Human
cugaggcaggagaaucacuugagc

SEQ ID NO: 402492 - RNA, 24 nt, Human
cugaggcaggagaaucacuuggac

SEQ ID NO: 402493 - RNA, 24 nt, Human
cugaggcaggagaaucaguugaac

SEQ ID NO: 402494 - RNA, 24 nt, Human
cugaggcaggagaaucaucugaac

SEQ ID NO: 402495 - RNA, 24 nt, Human
cugaggcaggagaaucauuugaac

SEQ ID NO: 402496 - RNA, 24 nt, Human
cugaggcaggagaaucccuugaac

SEQ ID NO: 402497 - RNA, 24 nt, Human
cugaggcaggagaaucgccugaac

SEQ ID NO: 402498 - RNA, 24 nt, Human
cugaggcaggagaaucgcgugaac

SEQ ID NO: 402499 - RNA, 24 nt, Human
cugaggcaggagaaucgcuagaac

SEQ ID NO: 402500 - RNA, 24 nt, Human
cugaggcaggagaaucgcuggaac

SEQ ID NO: 402501 - RNA, 22 nt, Human
cugaggcaggagaaucgcuuga

SEQ ID NO: 402502 - RNA, 23 nt, Human
cugaggcaggagaaucgcuugaa

SEQ ID NO: 402503 - RNA, 24 nt, Human
cugaggcaggagaaucgcuugaac

SEQ ID NO: 402504 - RNA, 24 nt, Human
cugaggcaggagaaucgcuugaau

SEQ ID NO: 402505 - RNA, 24 nt, Human
cugaggcaggagaaucgcuugagc

SEQ ID NO: 402506 - RNA, 24 nt, Human
cugaggcaggagaaucgcuuggac

SEQ ID NO: 402507 - RNA, 18 nt, Human
cugaggcaggagaaucgu

SEQ ID NO: 402508 - RNA, 24 nt, Human
cugaggcaggagaaucguuugaac

SEQ ID NO: 402509 - RNA, 22 nt, Human
cugaggcaggagaaucguuugc

SEQ ID NO: 402510 - RNA, 22 nt, Human
cugaggcaggagaaucucgaac

SEQ ID NO: 402511 - RNA, 23 nt, Human
cugaggcaggagaaucucuugaa

SEQ ID NO: 402512 - RNA, 24 nt, Human
cugaggcaggagaaucucuugaac

SEQ ID NO: 402513 - RNA, 24 nt, Human
cugaggcaggagaaugacaugaac

SEQ ID NO: 402514 - RNA, 24 nt, Human
cugaggcaggagaaugaugugaac

SEQ ID NO: 402515 - RNA, 24 nt, Human
cugaggcaggagaaugcugugaac

SEQ ID NO: 402516 - RNA, 24 nt, Human
cugaggcaggagaauggagugaac

SEQ ID NO: 402517 - RNA, 24 nt, Human
cugaggcaggagaauggcaugaac

SEQ ID NO: 402518 - RNA, 24 nt, Human
cugaggcaggagaauggcaugagc

SEQ ID NO: 402519 - RNA, 24 nt, Human
cugaggcaggagaauggccugaac

SEQ ID NO: 402520 - RNA, 24 nt, Human
cugaggcaggagaauggcgagaac

SEQ ID NO: 402521 - RNA, 24 nt, Human
cugaggcaggagaauggcgggaac

SEQ ID NO: 402522 - RNA, 24 nt, Human
cugaggcaggagaauggcguaaac

SEQ ID NO: 402523 - RNA, 23 nt, Human
cugaggcaggagaauggcgugaa
